United States Patent Application Publication US 2020/0163878 A1 - sequence listing, part 32

SEQ ID NO: 119406 - RNA, 1410 nt, Artificial Sequence
  derived and/or modified CDS sequence (opt2) from neuraminidase__InfluenzaA__AGG13702
augaaccccaaccagaagaucaucaccaucggcuccgucucccucaccaucuccaccaucugcuucuucaugcagaucgccauccucaucaccaccgucacccuccacuucaagcaguacgaguucaacuccccccccaacaaccaggucaugcucugcgagcccaccaucaucgagcgcaacaucaccgagaucgucuaccucaccaacaccaccaucgagaaggagaucugccccaagcccgccgaguaccgcaacugguccaagccccagugcgacaucaccggcuucgcccccuucuccaaggacaacuccauccgccucuccgccggcggcgacaucugggucacccgcgagcccuacgucuccugcgaccccgacaagugcuaccaguucgcccucggccagggcaccacccucaacaacguccacuccaacaacaccguccgcgaccgcacccccuaccgcacccuccucaugaacgagcucggcguccccuuccaccucggcaccaagcaggucugcaucgccugguccuccuccuccugccacgacggcaaggccuggcuccacgucugcaucaccggcgacgacaagaacgccaccgccuccuucaucuacaacggccgccucgucgacuccgucgucuccugguccaaggagauccuccgcacccaggaguccgagugcgucugcaucaacggcaccugcaccgucgucaugaccgacggcuccgccuccggcaaggccgacaccaagauccucuucaucgaggagggcaagaucguccacaccuccacccucuccggcaacgcccagcacgucgaggagugcuccugcuacccccgcuaccccggcguccgcugcgucugccgcgacaacuggaagggcuccaaccgccccaucgucgacaucaacaucaaggaccacuccaucgucucccgcuacgucugcuccggccucgucggcgacaccccccgcaagaacgacuccuccuccuccucccacugccucgaccccaacaacgaggagggcggccacggcgucaagggcugggccuucgacgacggcaacgacgucuggaugggccgcaccaucaacgagaccucccgccucggcuacgagaccuucaaggucaucgagggcugguccaaccccaaguccaagcuccagaucaaccgccaggucaucgucgaccgcggcgaccgcuccggcuacuccggcaucuucuccgucgagggcaaguccugcaucaaccgcugcuucuacgucgagcucauccgcggccgcaaggaggagaccgagguccucuggaccuccaacuccaucgucgucuucugcggcaccuccggcaccuacggcaccggcuccuggcccgacggcgccgaccucaaccucaugcccaucuga

SEQ ID NO: 119407 - RNA, 1410 nt, Artificial Sequence; identical to SEQ ID NO: 119390
  derived and/or modified CDS sequence (opt2) from neuraminidase__InfluenzaA__AGG13714

SEQ ID NO: 119408 - RNA, 1410 nt, Artificial Sequence; identical to SEQ ID NO: 118182
  derived and/or modified CDS sequence (opt2) from neuraminidase__InfluenzaA__AGG13726

SEQ ID NO: 119409 - RNA, 1410 nt, Artificial Sequence; identical to SEQ ID NO: 118182
  derived and/or modified CDS sequence (opt2) from neuraminidase__InfluenzaA__AGG13738

SEQ ID NO: 119410 - RNA, 1410 nt, Artificial Sequence; identical to SEQ ID NO: 118182
  derived and/or modified CDS sequence (opt2) from neuraminidase__InfluenzaA__AGG13750

SEQ ID NO: 119411 - RNA, 1410 nt, Artificial Sequence
  derived and/or modified CDS sequence (opt2) from neuraminidase__InfluenzaA__AGG13762
augaaccccaaccagaagaucaucaccaucggcuccgucucccucaccaucuccaccaucugcuucuucaugcagaucgccauccucaucaccaccgucacccuccacuucaagcaguacgaguucaacuccccccccaacaaccaggucaugcucugcgagcccaccaucaucgagcgcaacaucaccgagaucgucuaccucaccaacaccaccaucgagaaggagaucugccccaagcccgccgaguaccgcaacugguccaagccccagugcgacaucaccggcuucgcccccuucuccaaggacaacuccauccgccucuccgccggcggcgacaucugggucacccgcgagcccuacgucuccugcgaccccgacaagugcuaccaguucgcccucggccagggcaccacccucaacaacguccacuccaacaacaccguccgcgaccgcacccccuaccgcacccuccucaugaacgagcucggcguccccuuccaccucggcaccaagcaggucugcaucgccugguccuccuccuccugccacgacggcaaggccuggcuccacgucugcaucaccggcgacgacaagaacgccaccgccuccuucaucuacaacggccgccucgucgacuccgucgucuccugguccaaggagauccuccgcacccaggaguccgagugcgucugcaucaacggcaccugcaccgucgucaugaccgacggcuccgccuccggcaaggccgacaccaagauccucuucaucgaggagggcaagaucguccacaccuccacccucuccggcuccgcccagcacgucgaggagugcuccugcuacccccgcuaccccggcguccgcugcgucugccgcgacaacuggaagggcuccaaccgccccaucgucgacaucaacaucaaggaccacuccaucgucucccgcuacgucugcuccggccucgucggcgacaccccccgcaagaacgacuccuccuccuccucccacugccucgaccccaacaacgaggagggcggccacggcgucaagggcugggccuucgacgacggcaacgacgucuggaugggccgcaccaucaacgagaccucccgccucggcuacgagaccuucaaggucaucgagggcugguccaaccccaaguccaagcuccagaucaaccgccaggucaucgucgaccgcggcgaccgcuccggcuacuccggcaucuucuccgucgagggcaaguccugcaucaaccgcugcuucuacgucgagcucauccgcggccgcaaggaggagaccgagguccucuggaccuccaacuccaucgucgucuucugcggcaccuccggcaccuacggcaccggcuccuggcccgacggcgccgaccucaaccucaugcccaucuga

SEQ ID NO: 119412 - RNA, 1410 nt, Artificial Sequence
  derived and/or modified CDS sequence (opt2) from neuraminidase__InfluenzaA__AGG13774
augaaccccaaccagaagaucaucaccaucggcuccgucucccucaccaucuccaccaucugcuucuucaugcagaucgccauccucaucaccaccgucacccuccacuucaagcaguacgaguucaacuccccccccaacaaccaggucaugcucugcgagcccaccaccaucgagcgcaacaucaccgagaucgucuaccucaccaacaccaccaucgagaaggagaucugccccaagcucgccgaguaccgcaacugguccaagccccagugcgacaucaccggcuucgcccccuucuccaaggacaacuccauccgccucuccgccggcggcgacaucugggucacccgcgagcccuacgucuccugcgaccccgacaagugcuaccaguucgcccucggccagggcaccacccucaacaacguccacuccaacaacaccguccgcgaccgcacccccuaccgcacccuccucaugaacgagcucggcguccccuuccaccucggcaccaagcaggucugcaucgccugguccuccuccuccugccacgacggcaaggccuggcuccacgucugcaucaccggcgacgacaagaacgccaccgccuccuucaucuacaacggccgccucgucgacuccgucgucuccugguccaaggacauccuccgcacccaggaguccgagugcgucugcaucaacggcaccugcgccgucgucaugaccgacggcuccgccuccggcaaggccgacaccaagauccucuucaucgaggagggcaagaucguccacaccuccacccucuccggcuccgcccagcacgucgaggagugcuccugcuacccccgcuaccccggcguccgcugcgucugccgcgacaacuggaagggcuccaaccgccccaucgucgacaucaacaucaaggaccacuccaucgucuccuccuacgucugcuccggccucgucggcgacaccccccgcaagaacgacuccuccuccuccggccacugccucgaccccaacaacgaggagggcggccacggcgucaagggcugggccuucgacgacggcaacgacgucuggaugggccgcaccaucaacgagaccucccgccucggcuacgagaccuucaaggucaucgagggcugguccaaccccaaguccaagcuccagaucaaccgccaggucaucgucgaccgcggcaaccgcuccggcuacuccggcaucuucuccgucgagggcaagaacugcaucaaccgcugcuucuacgucgagcucauccgcggccgcaaggaggagaccgagguccucuggaccuccaacuccaucgucgucuucugcggcaccuccggcaccuacggcaccggcuccuggcccgacggcgccgaccucaaccucaugcccaucuga

SEQ ID NO: 119413 - RNA, 1410 nt, Artificial Sequence
  derived and/or modified CDS sequence (opt2) from neuraminidase__InfluenzaA__AGG13786
augaaccccaaccagaagaucaucaccaucggcuccgucucccucaccaucuccaccaucugcuucuucaugcagaucgccauccucaucaccaccgucacccuccacuucaagcaguacgaguucaacuccccccccaacaaccaggucaugcucugcgagcccaccaucaucgagcgcaacaucaccgagaucgucuaccucaccaacaccaccaucgagaaggagaucugccccaagcccgccgaguaccgcaacugguccaagccccagugcggcaucaccggcuucgcccccuucuccaaggacaacuccauccgccucuccgccggcggcgacaucugggucacccgcgagcccuacgucuccugcgaccccgacaagugcuaccaguucgcccucggccagggcaccacccucaacaaccuccacuccaacaacaccguccgcgaccgcacccccuaccgcacccuccucaugaacgagcucggcguccccuuccaccucggcaccaagcaggucugcaucgccugguccuccuccuccugccacgacggcaaggccuggcuccacgucugcaucaccggcgacgacaagaacgccaccgccuccuucaucuacaacggccgccucgucgacuccgucgucuccugguccaaggagauccuccgcacccaggaguccgagugcgucugcaucaacggcaccugcaccgucgucaugaccgacggcuccgccuccggcaaggccgacaccaagauccucuucaucgaggagggcaagaucguccacaccuccacccucuccggcuccgcccagcacgucgaggagugcuccugcuacccccgcuaccccggcguccgcugcgucugccgcgacaacuggaagggcuccaaccgccccaucgucgacaucaacaucaaggaccacuccaucgucuccuccuacgucugcuccggccucgucggcgacaccccccgcaagaacgacuccuccuccuccucccacugccucgaccccaacaacgaggagggcggccacggcgucaagggcugggccuucgacgacggcaacgacgucuggaugggccgcaccaucaacgagaccucccgccucggcuacgagaccuucaaggucaucgagggcugguccaaccccaaguccaagcuccagaucaaccgccaggucaucgucgaccgcggcgaccgcuccggcuacuccggcaucuucuccgucgagggcaaguccugcaucaaccgcugcuucuacgucgagcucauccgcggccgcaaggaggagaccgagguccucuggaccuccaacuccaucgucgucuucugcggcaccuccggcaccuacggcaccggcuccuggcccgacggcgccgaccucaaccucaugcccaucuga

SEQ ID NO: 119414 - RNA, 1410 nt, Artificial Sequence; identical to SEQ ID NO: 119390
  derived and/or modified CDS sequence (opt2) from neuraminidase__InfluenzaA__AGG13798

SEQ ID NO: 119415 - RNA, 1410 nt, Artificial Sequence
  derived and/or modified CDS sequence (opt2) from neuraminidase__InfluenzaA__AGG13810
augaaccccaaccagaagaucaucaccaucggcuccgucucccucaccaucuccaccaucugcuucuucaugcagaucgccauccucaucaccaccgucacccuccacuucaagcaguacgaguucaacuccccccccaacaaccaggucaugcucugcgagcccaccaucaucgagcgcaacaucaccgagaucgucuaccucaccaacaccaccaucgagaaggagaucugccccaagcccgccgaguaccgcaacugguccaagccccagugcgacaucaccggcuucgcccccuucuccaaggacaacuccauccgccucuccgccggcggcgacaucugggucacccgcgagcccuacgucuccugcgaccccgacaagugcuaccaguucgcccucggccagggcaccacccucaacaacguccacuccaacaacaccguccgcgaccgcacccccuaccgcacccuccucaugaacgagcucggcguccccuuccaccucggcaccaagcaggucugcaucgccugguccuccuccuccugccacgacggcaaggccuggcuccacgucugcaucaccggcgacgacaagaacgccaccgccuccuucaucuacaacggccgccucgucgacuccgucgucuccugguccaaggagauccuccgcacccaggaguccgagugcgucugcaucaacggcaccugcaccgucgucaugaccgacggcuccgccuccggcaaggccgacaccaagauccucuucaucgaggagggcaagaucguccacaccuccacccucuccggcuccgcccagcacgucgaggagugcuccugcuacccccgcuaccccggcguccgcugcgucugccgcgacaacuggaagggcuccaaccgccccaucgucgacaucaacaucaaggaccacuccaucgucucccgcuacgucugcuccggccucgucggcgacaccccccgcaagaacgacuccuccuccuccucccacugccucggccccaacaacgaggagggcggccacggcgucaagggcugggccuucgacgacggcaacgacgucuggaugggccgcaccaucaacgagaccucccgccucggcuacgagaccuucaaggucaucgagggcugguccaaccccaaguccaagcuccagaucaaccgccaggucaucgucgaccgcggcgaccgcuccggcuacuccggcaucuucuccgucgagggcaaguccugcaucaaccgcugcuucuacgucgagcucauccgcggccgcaaggaggagaccgagguccucuggaccuccaacuccaucgucgucuucugcggcaccuccggcaccuacggcaccggcuccuggcccgacggcgccgaccucaaccucaugcccaucuga

SEQ ID NO: 119416 - RNA, 1410 nt, Artificial Sequence; identical to SEQ ID NO: 119390
  derived and/or modified CDS sequence (opt2) from neuraminidase__InfluenzaA__AGG13822

SEQ ID NO: 119417 - RNA, 1410 nt, Artificial Sequence; identical to SEQ ID NO: 119390
  derived and/or modified CDS sequence (opt2) from neuraminidase__InfluenzaA__AGG13834

SEQ ID NO: 119418 - RNA, 1410 nt, Artificial Sequence; identical to SEQ ID NO: 119411
  derived and/or modified CDS sequence (opt2) from neuraminidase__InfluenzaA__AGG13846

SEQ ID NO: 119419 - RNA, 1410 nt, Artificial Sequence; identical to SEQ ID NO: 118182
  derived and/or modified CDS sequence (opt2) from neuraminidase__InfluenzaA__AGG13858

SEQ ID NO: 119420 - RNA, 1410 nt, Artificial Sequence
  derived and/or modified CDS sequence (opt2) from neuraminidase__InfluenzaA__AGG13870
augaaccccaaccagaagaucaucaccaucggcuccgucucccucaccaucuccaccaucugcuucuucaugcagaucgccauccucaucaccaccgucacccuccacuucaagcaguacgaguucaacuccccccccaacaaccaggucaugcucugcgagcccaccaucaucgagcgcaacaucaccgagaucgucuaccucaccaacaccaccaucgagaaggagaucugccccaagcccgccgaguaccgcaacugguccaagccccagugcggcaucaccggcuucgcccccuucuccaaggacaacuccauccgccucuccgccggcggcgacaucugggucacccgcgagcccuacgucuccugcgaccccgaccgcugcuaccaguucgcccucggccagggcaccacccucaacaacaugcacuccaacaacaccguccgcgaccgcacccccuaccgcacccuccucaugaacgagcucggcguccccuuccaccucggcaccaagcaggucugcaucgccugguccuccuccuccugccacgacggcaaggccuggcuccacgucugcaucaccggcgacgacaagaacgccaccgccuccuucaucuacaacggccgccucgucgacuccgucgucuccugguccaaggagauccuccgcacccaggaguccgagugcgucugcaucaacggcaccugcaccgucgucaugaccgacggcuccgccuccggcaaggccgacaccaagauccucuucaucgaggagggcaagaucguccacaccuccacccucuccggcuccgcccagcacgucgaggagugcuccugcuacccccgcuaccccggcguccgcugcgucugccgcgacaacuggaagggcuccaaccgccccaucgucgacaucaacaucaaggaccacuccaucgucuccuccuacgucugcuccggccucgucggcgacaccccccgcaagaacgacuccuccuccuccucccacugccucgaccccaacaacgaggagggcggccacggcgucaagggcugggccuucgacgacggcaacgacgucuggaugggccgcaccaucaacgagaccucccgccucggcuacgagaccuucaaggucaucgagggcugguccaaccccaaguccaagcuccagaucaaccgccaggucaucgucgaccgcggcgaccgcuccggcuacuccggcaucuucuccgucgagggcaccuccugcaucaaccgcugcuucuacgucgagcucauccgcggccgcaaggaggagaccgagguccucuggaccuccaacuccaucgucgucuucugcggcaccuccggcaccuacggcaccggcuccuggcccgacggcgccgaccucaaccucaugcccaucuga

SEQ ID NO: 119421 - RNA, 1410 nt, Artificial Sequence
  derived and/or modified CDS sequence (opt2) from neuraminidase__InfluenzaA__AGG13894
augaaccccaaccagaagaucaucaccaucggcuccgucucccucaccaucuccaccgucugcuucuucaugcagaucgccauccucaucaccaccgucacccuccacuucaagcaguacgaguucaacuccccccccaacaaccaggucaugcucugcgagcccaccaucaucgagcgcaacgucaccgagaucgucuaccucaccaacaccaccaucgagaaggagaucugccccaagcccgccgaguaccgcaacugguccaagccccagugcggcaucaccggcuucgcccccuucuccaaggacaacuccauccgccucuccgccggcggcgacaucugggucacccgcgagcccuacgucuccugcgaccccgacaagugcuaccaguucgcccucggccagggcaccacccucaacaacguccacuccaacaacaccguccgcgaccgcacccccuaccgcacccuccucaugaacgagcucggcguccccuuccaccucggcaccaagcaggucugcaucgccugguccuccuccuccugccacgacggcaaggccuggcuccacgucugcaucaccggcgacgacaagaacgccaccgccuccuucaucuacaacggccgccucgucgacuccgucgucuccugguccaaggagauccuccgcacccaggaguccgagugcgucugcaucaacggcaccugcaccgucgucaugaccgacggcuccgccuccggcaaggccgacaccaagauccucuucaucgaggagggcaagaucguccacaccuccacccucuccggcuccgcccagcacgucgaggagugcuccugcuacccccgcuaccccggcguccgcugcgucugccgcgacaacuggaagggcuccaaccgccccaucgucgacaucaacaucaaggaccacuccaucgucuccuccuacgucugcuccggccucgucggcgacaccccccgcaagaacgacuccuccuccuccucccacugccucgaccccaacaacgaggagggcggccacggcgucaagggcugggccuucgacgacggcaacgacgucuggaugggccgcaccaucaacgagaccucccgccucggcuacgagaccuucaaggucaucgagggcugguccaaccccaaguccaagcuccagaucaaccgccaggucaucgucgaccgcggcgaccgcuccggcuacuccggcaucuucuccgucgagggcaaguccugcaucaaccgcugcuucuacgucgagcucauccgcggccgcaaggaggagaccgagguccucuggaccuccaacuccaucgucgucuucugcggcaccuccggcaccuacggcaccggcuccuggcccgacggcgccgaccucaaccucaugcccaucuga

SEQ ID NO: 119422 - RNA, 1410 nt, Artificial Sequence; identical to SEQ ID NO: 119390
  derived and/or modified CDS sequence (opt2) from neuraminidase__InfluenzaA__AGG13906

SEQ ID NO: 119423 - RNA, 1410 nt, Artificial Sequence
  derived and/or modified CDS sequence (opt2) from neuraminidase__InfluenzaA__AGG13930
augaaccccaaccagaagaucaucaccaucggcuccgucucccucaccaucuccaccaucugcuucuucaugcagaucgccauccucaucaccaccgucacccuccacuucaagcaguacgaguucaacuccccccccaacaaccaggucaugcucugcgagcccaccaucaucgagcgcaacaucaccgagaucgucuaccucaccaacaccaccaucgagaaggagaucugccccaagcccgccgaguaccgcaacugguccaagccccagugcggcaucaccggcuucgcccccuucuccaaggacaacuccauccgccucuccgccggcggcgacaucugggucacccgcgagcccuacgucuccugcgaccccgacaagugcuaccaguucgcccucggccagggcaccacccucaacaacguccacuccaacaacaccguccgcgaccgcacccccuaccgcacccuccucaugaacgagcucggcguccccuuccaccucggcaccaagcaggucugcaucgccugguccuccuccuccugccacgacggcaaggccuggcuccacgucugcaucaccggcgacgacaagaacgccaccgccuccuucaucuacaacggccgccucgucgacuccgucgucuccugguccaaggagauccuccgcacccaggaguccgagugcgucugcaucaacggcaccugcaccgucgucaugaccgacggcuccgccuccggcaaggccgacaccaagauccucuucaucgaggagggcaagaucguccacaccuccacccucuccggcuccgcccagcacgucgaggagugcuccugcuacccccgcuaccccggcguccgcugcgucugccgcgacaacuggaagggcuccaaccgccccaucgucgacaucaacaucaaggaccacuccaucgucuccuccuacgucugcuccggccucgucggcgacaccccccgcaagaacgaccgcuccuccuccucccacugccucgaccccaacaacgaggagggcggccacggcgucaagggcugggccuucgacgacggcaacgacgucuggaugggccgcaccaucaacgagaccucccgccucggcuacgagaccuucaaggucaucgagggcugguccaaccccaaguccaagcuccagaucaaccgccaggucaucgucgaccgcggcgaccgcuccggcuacuccggcaucuucuccgucgagggcaaguccugcaucaaccgcugcuucuacgucgagcucauccgcggccgcaaggaggagaccgagguccucuggaccuccaacuccaucgucgucuucugcggcaccuccggcaccuacggcaccggcuccuggcccgacggcgccgaccucaaccucaugcccaucuga

SEQ ID NO: 119424 - RNA, 1410 nt, Artificial Sequence; identical to SEQ ID NO: 119400
  derived and/or modified CDS sequence (opt2) from neuraminidase__InfluenzaA__AGG13942

SEQ ID NO: 119425 - RNA, 1410 nt, Artificial Sequence
  derived and/or modified CDS sequence (opt2) from neuraminidase__InfluenzaA__AGG13965
augaaccccaaccagaagaucaucaccaucggcuccgucugcaugaccaucggcauggccaaccucauccuccagaucggcaacaucaucuccaucuggaucucccacuccauccagcucggcaaccagucccagaucgagaccugcaaccaguccgucaucaccuacgagaacaacaccugggucaaccagaccuacgucaacaucuccaacaccaacuucgccgccggccaguccgucgucuccgucaagcucgccggcaacuccucccucugccccgucuccggcugggccaucuacuccaaggacaacuccguccgcaucggcuccaagggcgacgucuucgucauccgcgagcccuucaucuccugcuccccccucgagugccgcaccuucuuccucacccagggcgcccuccucaacgacaagcacuccaacggcaccaucaaggaccgcucccccuaccgcacccucauguccugccccaucggcgagguccccucccccuacaacucccgcuucgaguccgucgccugguccgccuccgccugccacgacggcaucaacuggcucaccaucggcaucuccggccccgacuccggcgccgucgccguccucaaguacaacggcaucaucaccgacaccaucaaguccuggcgcaacaacauccuccgcacccaggaguccgagugcgccugcgucaacggcuccugcuucaccaucaugaccgacggccccuccgacggccaggccuccuacaagaucuuccgcaucgagaagggcaagaucgucaaguccgucgagaugaacgcccccaacuaccacuacgaggagugcuccugcuaccccgacuccuccgagaucaccugcgucugccgcgacaacuggcacggcuccaaccgccccugggucuccuucaaccagaaccucgaguaccagaucggcuacaucugcuccggcaucuucggcgacaacccccgccccaacgacaagaccggcuccugcggccccgucuccuccaacggcgccaacggcgucaagggcuucuccuucaaguacggcaacggcgucuggaucggccgcaccaaguccaucuccucccgcaagggcuucgagaugaucugggaccccaacggcuggaccggcaccgacaacaacuucuccaucaagcaggacaucgucggcaucaacgagugguccggcuacuccggcuccuucguccagcaccccgagcucaccggccucgacugcauccgccccugcuucugggucgagcucauccgcggccgccccaaggagaacaccaucuggaccuccggcuccuccaucuccuucugcggcgucaacuccgacaccgucggcugguccuggcccgacggcgccgagcuccccuucaccaucgacaaguga

SEQ ID NO: 119426 - RNA, 1410 nt, Artificial Sequence; identical to SEQ ID NO: 119393
  derived and/or modified CDS sequence (opt2) from neuraminidase__InfluenzaA__AGG13976

SEQ ID NO: 119427 - RNA, 1410 nt, Artificial Sequence; identical to SEQ ID NO: 119393
  derived and/or modified CDS sequence (opt2) from neuraminidase__InfluenzaA__AGG13988

SEQ ID NO: 119428 - RNA, 1410 nt, Artificial Sequence; identical to SEQ ID NO: 119393
  derived and/or modified CDS sequence (opt2) from neuraminidase__InfluenzaA__AGG14000

SEQ ID NO: 119429 - RNA, 1410 nt, Artificial Sequence; identical to SEQ ID NO: 119393
  derived and/or modified CDS sequence (opt2) from neuraminidase__InfluenzaA__AGG14012

SEQ ID NO: 119430 - RNA, 1410 nt, Artificial Sequence; identical to SEQ ID NO: 119411
  derived and/or modified CDS sequence (opt2) from neuraminidase__InfluenzaA__AGG14024

SEQ ID NO: 119431 - RNA, 1410 nt, Artificial Sequence
  derived and/or modified CDS sequence (opt2) from neuraminidase__InfluenzaA__AGG14036
augaaccccaaccagaagaucaucaccaucggcuccgucucccucaccaucuccaccaucugcuucuucaugcagaucgccauccucaucaccaccgucacccuccacuucaagcaguacgaguucaacuccccccccaacaaccaggucaugcucugcgagcccaccaucaucgagcgcaacaucaccgagaucgucuaccucaccaacaccaccaucgagaaggagaucugccccaagcucgccgaguaccgcaacugguccaagccccagugcgacaucaccggcuucgcccccuucuccaaggacaacuccauccgccucuccgccggcggcgacaucugggucacccgcgagcccuacgucuccugcgaccccgacaagugcuaccaguucgcccucggccagggcaccacccucaacaacguccacuccaacaacaccguccgcgaccgcacccccuaccgcacccuccucaugaacgagcucggcguccccuuccaccucggcaccaagcaggucugcaucgccugguccuccuccuccugccacgacggcaaggccuggcuccacgucugcaucaccggcgacgacaagaacgccaccgccuccuucaucuacaacggccgccucgucgacuccgucgucuccugguccaaggacauccuccgcacccaggaguccgagugcgucugcaucaacggcaccugcgccgucgucaugaccgacggcuccgccuccggcaaggccgacaccaagauccucuucaucgaggagggcaagaucguccacaccuccacccucuccggcuccgcccagcacgucgaggagugcuccugcuacccccgcuaccccggcguccgcugcgucugccgcgacaacuggaagggcuccaaccgccccaucgucgacaucaacaucaaggaccacuccaucgucuccuccuacaugugcuccggccucgucggcgacaccccccgcaagaacgacuccuccuccuccggccacugccucgaccccaacaacgaggagggcggccacggcgucaagggcugggccuucgacgacggcaacgacgucuggaugggccgcaccaucaacgagaccucccgccucggcuacgagaccuucaaggucaucgagggcugguccaaccccaaguccaagcuccagaucaaccgccaggucaucgucgaccgcggcaaccgcuccggcuacuccggcaucuucuccgucgagggcaagaacugcaucaaccgcugcuucuacgucgagcucauccgcggccgcaaggaggagaccgagguccucuggaccuccaacuccaucgucgucuucugcggcaccuccggcaccuacggcaccggcuccuggcccgacggcgccgaccucaaccucaugcccaucuga

SEQ ID NO: 119432 - RNA, 1410 nt, Artificial Sequence; identical to SEQ ID NO: 119411
  derived and/or modified CDS sequence (opt2) from neuraminidase__InfluenzaA__AGG14321

SEQ ID NO: 119433 - RNA, 1410 nt, Artificial Sequence; identical to SEQ ID NO: 118182
  derived and/or modified CDS sequence (opt2) from neuraminidase__InfluenzaA__AGG14333

SEQ ID NO: 119434 - RNA, 1410 nt, Artificial Sequence; identical to SEQ ID NO: 117823
  derived and/or modified CDS sequence (opt2) from neuraminidase__InfluenzaA__AGG84182

SEQ ID NO: 119435 - RNA, 1398 nt, Artificial Sequence
  derived and/or modified CDS sequence (opt2) from neuraminidase__InfluenzaA__AGJ51955
augaaccccaaccagaagauccucugcaccuccgccaccgccaucaucaucggcgccaucgccguccucaucggcaucgccaaccucggccucaacaucggccuccaccucaagcccggcugcaacugcucccacucccagcccgagaccaccaacaccucccagaccaucaucaacaacuacuacaacgagaccaacaucaccaacauccagauggaggagcgcaccucccgcaacuucaacaaccucaccaagggccucugcaccaucaacuccuggcacaucuacggcaaggacaacgccguccgcaucggcgaguccuccgacguccucgucacccgcgagcccuacgucuccugcgaccccgacgagugccgcuucuacgcccucucccagggcaccaccauccgcggcaagcacuccaacggcaccauccacgaccgcucccaguaccgcgcccucaucuccuggccccucuccuccccccccaccgucuacaacucccgcgucgagugcaucggcugguccuccaccuccugccacgacggcaagucccgcauguccaucugcaucuccggccccaacaacaacgccuccgccgucgucugguacaaccgccgccccgucgccgagaucaacaccugggcccgcaacauccuccgcacccaggaguccgagugcgucugccacaacggcgucugccccgucgucuucaccgacggcuccgccaccggccccgccgacacccgcaucuacuacuucaaggagggcaagauccucaagugggagucccucaccggcaccgccaagcacaucgaggagugcuccugcuacggcgagcgcaccggcaucaccugcaccugccgcgacaacuggcagggcuccaaccgccccgucauccagaucgaccccgucgccaugacccacaccucccaguacaucugcucccccguccucaccgacaacccccgccccaacgaccccaacaucggcaagugcaacgaccccuaccccggcaacaacaacaacggcgucaagggcuucuccuaccucgacggcgccaacaccuggcucggccgcaccaucuccaccgccucccgcuccggcuacgagaugcucaagguccccaacgcccucaccgacgaccgcuccaagcccauccagggccagaccaucguccucaacgccgacugguccggcuacuccggcuccuucauggacuacugggccgagggcgacugcuaccgcgccugcuucuacgucgagcucauccgcggccgccccaaggaggacaagguccucuggaccggcgacuccaucgucuccaugugcuccuccaccgaguuccucggccaguggaacuggcccgacggcgccaagaucgaguacuuccucuga

SEQ ID NO: 119436 - RNA, 1398 nt, Artificial Sequence
  derived and/or modified CDS sequence (opt2) from neuraminidase__InfluenzaA__AGJ72863
augaaccccaaccagaagauccucugcaccuccgccaccgccaucaucaucggcgccaucgccguccucaucggcaucgccaaccucggccucaacaucggccuccaccucaagcccggcugcaacugcucccacucccagcccgagaccaccaacaccucccagaccaucaucaacaacuacuacaacgagaccaacaucaccaacauccagauggaggagcgcaccucccgcaacuucaacaaccucaccaagggccucugcaccaucaacuccuggcacaucuacggcaaggacaacgccguccgcaucggcgaguccuccgacguccucgucacccgcgagcccuacgucuccugcgaccccgacgagugccgcuucuacgcccucucccagggcaccaccauccgcggcaagcacuccaacggcaccauccacgaccgcucccaguaccgcgcccucaucuccuggccccucuccuccccccccaccgucuacaacucccgcgucgagugcaucggcugguccuccaccuccugccacgacggcaagucccgcauguccaucugcaucuccggccccaacaacaacgccuccgccgucgucugguacaaccgccgccccgucgccgagaucaacaccugggcccgcaacauccuccgcacccaggaguccgagugcgucugccacaacggcgucugccccgucgucuucaccgacggcuccgccaccggccccgccgacacccgcaucuacuacuucaaggagggcaagauccucaagugggagucccucaccggcaccgccaagcacaucgaggagugcuccugcuacggcgagcgcaccggcaucaccugcaccugccgcgacaacuggcagggcuccaaccgccccgucauccagaucgaccccgucgccaugacccacaccucccaguacaucugcucccccguccucaccgacaacccccgccccaacgaccccaacaucggcaagugcaacgaccccuaccccggcaacaacaacaacggcgucaagggcuucuccuaccucgacggcgccaacaccuggcucggccgcaccaucuccaccgccucccgcuccggcuacgagaugcucaagguccccaacgcccucaccgacgaccgcuccaagcccauccagggccagaccaucguccucaacgccgacugguccggcuacuccggcuccuucauggacuacugggccgagggcgacugcuaccgcgccugcuucuacgucgaggucauccgcggccgccccaaggaggacaaggucuggugggccggcaacuccaucgucuccaugugcuccuccaccgaguuccucggccaguggaacuggcccgacggcgccaagaucgaguacuuccucuga

SEQ ID NO: 119437 - RNA, 1410 nt, Artificial Sequence
  derived and/or modified CDS sequence (opt2) from neuraminidase__InfluenzaA__AGJ73328
augaaccccaaccagaagaucaucaccaucggcuccgucugcaugaccaucggcauggccaaccucauccuccagaucggcaacaucaucuccaucuggaucucccacuccauccagcucggcaaccagucccagaucgagaccugcaaccaguccgucaucaccuacgagaacaacaccugggucaaccagaccuacgucaacaucuccaacaccaacuucgccgccggccaguccgucgucuccgucaagcucgccggcaacuccucccucugccccgucuccggcugggccaucuacuccaaggacaacuccguccgcaucggcuccaagggcgacgucuucgucauccgcgagcccuucaucuccugcuccccccucgagugccgcaccuucuuccucacccagggcgcccuccucaacgacaagcacuccaacggcaccaucaaggaccgcucccccuaccgcacccucauguccugccccaucggcgagguccccucccccuacaacucccgcuucgaguccgucgccugguccgccuccgccugccacgacggcaucaacuggcucaccaucggcaucuccggccccgacuccggcgccgucgccguccucaaguacaacggcaucaucaccgacaccaucaaguccuggcgcaacaacauccuccgcacccaggaguccgagugcgccugcgucaacggcuccugcuucaccaucaugaccgacggccccuccgacggccaggccuccuacaagaucuuccgcaucgagaagggcaagaucgucaaguccgucgagaugaacgcccccaacuaccacuacgaggagugcuccugcuaccccgacuccuccgagaucaccugcgucugccgcgacaacuggcacggcuccaaccgccccugggucuccuucaaccagaaccucgaguaccagaucggcuacaucugcuccggcaucuucggcgacaacccccgccccaacgacaagaccggcuccugcggccccgucuccuccaacggcgccaacggcgucaagggcuucuccuucaaguacggcaacggcgucuggaucggccgcaccaaguccaucuccucccgcaagggcuucgagaugaucugggaccccaacggcuggaacggcaccgacaacaacuucuccaucaagcaggacaucgucggcaucaacgagugguccggcuacuccggcuccuucguccagcaccccgagcucaccggccucgacugcauccgccccugcuucugggucgagcucauccgcggccgccccaaggagaacaccaucuggaccuccggcuccuccaucuccuucugcggcgucaacuccgacaccgucggcugguccuggcccgacggcgccgagcuccccuucaccaucgacaaguga

SEQ ID NO: 119438 - RNA, 1410 nt, Artificial Sequence; identical to SEQ ID NO: 116293
  derived and/or modified CDS sequence (opt2) from neuraminidase__InfluenzaA__AGJ73330

SEQ ID NO: 119439 - RNA, 1410 nt, Artificial Sequence
  derived and/or modified CDS sequence (opt2) from neuraminidase__InfluenzaA__AGJ73332
augaaccccaaccagaagaucaucaccaucggcuccgucugcaugaccaucggcauggccaaccucauccuccagaucggcaacaucaucuccaucuggaucucccacuccauccagcucggcaaccagaaccagaucgagaccugcaaccaguccgucaucaccuacgagaacaacaccugggucaaccagaccuacgucaacaucuccaacaccaacuucgccgccggccaguccgucgucuccgucaagcucgccggcaacuccucccucugccccgucuccggcugggccaucuacuccaaggacaacuccauccgcaucggcuccaagggcgacgucuucgucauccgcgagcccuucaucuccugcuccccccucgagugccgcaccuucuuccucacccagggcgcccuccucaacgacaagcacuccaacggcaccaucaaggaccgcucccccuaccgcacccucauguccugccccaucggcgagguccccucccccuacaacucccgcuucgaguccgucgccugguccgccuccgccugccacgacggcaucaacuggcucaccaucggcaucuccggccccgacaacggcgccgucgccguccucaaguacaacggcaucaucaccgacaccaucaaguccuggcgcaacaacauccuccgcacccaggaguccgagugcgccugcgucaacggcuccugcuucaccgucaugaccgacggccccuccgacggccaggccuccuacaagaucuuccgcaucgagaagggcaagaucgucaaguccgucgagaugaacgcccccaacuaccacuacgaggagugcuccugcuaccccgacuccuccgagaucaccugcgucugccgcgacaacuggcacggcuccaaccgccccugggucuccuucaaccacaaccucgaguaccagaucggcuacaucugcuccggcaucuucggcgacaacccccgccccaacgacaagaccggcuccugcggccccgucuccuccaacggcgccaacggcgucaagggcuucuccuucaaguacggcaacggcgucuggaucggccgcaccaaguccaucuccucccgcaacggcuucgagaugaucugggaccccaacggcuggaccggcaccgacaacaacuucuccaucaagcaggacaucaucggcaucaacgagugguccggcuacuccggcuccuucguccagcaccccgagcucaccggccucgacugcauccgccccugcuucugggucgagcucauccgcggccgccccaaggagaacaccaucuggaccuccggcuccuccaucuccuucugcggcgucaacuccgacaccgucggcugguccuggcccgacggcgccgagcuccccuucaccaucgacaaguga

SEQ ID NO: 119440 - RNA, 1410 nt, Artificial Sequence; identical to SEQ ID NO: 116293
  derived and/or modified CDS sequence (opt2) from neuraminidase__InfluenzaA__AGJ73334

SEQ ID NO: 119441 - RNA, 1410 nt, Artificial Sequence; identical to SEQ ID NO: 116293
  derived and/or modified CDS sequence (opt2) from neuraminidase__InfluenzaA__AGJ73336

SEQ ID NO: 119442 - RNA, 1410 nt, Artificial Sequence; identical to SEQ ID NO: 116293
  derived and/or modified CDS sequence (opt2) from neuraminidase__InfluenzaA__AGJ73338

SEQ ID NO: 119443 - RNA, 1410 nt, Artificial Sequence
  derived and/or modified CDS sequence (opt2) from neuraminidase__InfluenzaA__AGJ73340
augaaccccaaccagaagaucaucaccaucggcuccgucugcaugaccaucggcauggccaaccucauccuccagaucggcaacaucaucuccaucuggaucucccacuccauccagcucggcaaccagucccagaucgagaccugcaaccaguccgucaucaccuacgagaacaacaccugggucaaccagaccuacgucaacaucuccaacaccaacuucgccgccggccaguccgucgucuccgucaagcucgccggcaacuccucccucugccccgccuccggcugggccaucuacuccaaggacaacuccauccgcaucggcuccaagggcgacgucuucgucauccgcgagcccuucaucuccugcuccccccucgagugccgcaccuucuuccucacccagggcgcccuccucaacgacaagcacuccaacggcaccaucaaggaccgcucccccuaccgcacccucauguccugccccaucggcgagguccccucccccuacaacucccgcuucgaguccgucgccugguccgccuccgccugccacgacggcaucaacuggcucaccaucggcaucuccggccccgacaacggcgccgucgccguccucaaguacaacggcaucaucaccgacaccaucaaguccuggcgcaacaacauccuccgcacccaggaguccgagugcgccugcgucaacggcuccugcuucaccaucaugaccgacggccccuccgacggccaggccuccuacaagaucuuccgcaucgagaagggcaagaucgucaaguccgucgagaugaacgcccccaacuaccacuacgaggagugcuccugcuaccccgacuccuccgagaucaccugcgucugccgcgacaacuggcacggcuccaaccgccccugggucuccuucaaccagaaccucgaguaccagaucggcuacaucugcuccggcaucuucggcgacaacccccgccccaacgacaagaccggcuccugcggccccgucuccuccaacggcgccaacggcgucaagggcuucuccuucaaguacggcaacggcgucuggaucggccgcaccaaguccaucuccucccgcaagggcuucgagaugaucugggaccccaacggcuggaccggcaccgacaacaacuucuccaucaagcaggacaucgucggcaucaacgagugguccggcuacuccggcuccuucguccagcaccccgagcucaccggccucgacugcauccgccccugcuucugggucgagcucauccgcggccgccccaaggagaacaccaucuggaccuccggcuccuccaucuccuucugcggcgucaacuccgacaccgucggcugguccuggcccgacggcgccgagcuccccuucaccaucgacaaguga

SEQ ID NO: 119444 - RNA, 1410 nt, Artificial Sequence
  derived and/or modified CDS sequence (opt2) from neuraminidase__InfluenzaA__AGJ73342
augaaccccaaccagaagaucaucaccaucggcuccgucugcaugaccaucggcauggccaaccucauccuccagaucggcaacaucaucuccaucuggaucucccacuccauccagcucggcaaccagucccagaucgagaccugcaaccaguccgucaucaccuacgagaacaacaccugggucaaccagaccuacgucaacaucuccaacaccaacuucgccgccggccaguccgucgucuccgucaagcucgccggcaacuccucccucugccccgucuccggcugggccaucuacuccaaggacaacuccauccgcaucggcuccaagggcgacgucuucgucauccgcgagcccuucaucuccugcuccccccucgagugccgcaccuucuuccucacccagggcgcccuccucaacgacaagcacuccaacggcaccaucaaggaccgcucccccuaccgcacccucauguccugccccaucggcgagguccccucccccuacaacucccgcuucgaguccgucgccugguccgccuccgccugccacgacggcaucaacuggcucaccaucggcaucuccggccccgacaacggcgccgucgccguccucaaguacaacggcaucaucaccgacaccaucaaguccuggcgcaacaacauccuccgcacccaggaguccgagugcgccugcgucaacggcuccugcuucaccaucaugaccgacggccccuccgacggccaggccuccuacaagaucuuccgcaucgagaagggcaagaucgucaaguccgucgagaugaacgcccccaacuaccacuacgaggagugcuccugcuaccccgacuccuccgagaucaccugcgucugccgcgacaacuggcacggcuccaaccgccccugggucuccuucaaccagaaccucgaguaccagaucggcuacaucugcuccggcaucuucggcgacaacccccgccccaacgacaagaccggcuccugcggccccgucuccuccaacggcgccaacggcgucaagggcuucuccuucaaguacggcaacggcgucuggaucggccgcaccaaguccaucuccucccgcaagggcuucgagaugaucugggaccccaacggcuggaccggcaccgacaacaacuucuccaucaagcaggacaucgucggcaucaacgagugguccggcuacuccggcuccuucguccagcaccccgagcucaccggccucgacugcauccgccccugcuucugggucgagcucauccgcggccgccccaaggagaacaccaucuggaccuccggcuccuccaucuccuucugcggcgucaacuccggcaccgucggcugguccuggcccgacggcgccgagcuccccuucaccaucgacaaguga

SEQ ID NO: 119445 - RNA, 1410 nt, Artificial Sequence; identical to SEQ ID NO: 116745
  derived and/or modified CDS sequence (opt2) from neuraminidase__InfluenzaA__AGJ73344

SEQ ID NO: 119446 - RNA, 1410 nt, Artificial Sequence
  derived and/or modified CDS sequence (opt2) from neuraminidase__InfluenzaA__AGJ73346
augaaccccaaccagaagaucaucaccaucggcuccgucugcaugaccaucggcauggccaaccucauccuccagaucggcaacaucaucuccaucuggaucucccacuccauccagcucggcaaccagaaccagaucgagaagugcaaccaguccgucaucaccuacgagaacaacaccugggucaaccagaccuacgucaacaucuccaacaccaacuucgccgccggccaguccgucgucuccgucaagcucgccggcaacuccucccucugccccgucuccggcugggccaucuacuccaaggacaacuccauccgcaucggcuccaagggcgacgucuucgucauccgcgagcccuucaucuccugcuccccccucgagugccgcaccuucuuccucacccagggcgcccuccucaacgacaagcacuccaacggcaccaucaaggaccgcucccccuaccgcacccucauguccugccccaucggcgagguccccucccccuacaacucccgcuucgaguccgucgccugguccgccuccgccugccacgacggcaucaacuggcucaccaucggcaucuccggccccgacaacggcgccgucgccguccucaaguacaacggcaucaucaccgacaccaucaaguccuggcgcaacaacauccuccgcacccaggaguccgagugcgccugcgucaacggcuccugcuucaccaucaugaccgacggccccuccgacggccaggccuccuacaagaucuuccgcaucgagaagggcaagaucgucaaguccgucgagaugaacgcccccaacuaccacuacgaggagugcuccugcuaccccgacuccuccgagaucaccugcgucugccgcgacaacuggcacggcuccaaccgccccugggucuccuucaaccagaaccucgaguaccagaucggcuacaucugcuccggcaucuucggcgacaacccccgccccaacgacaagaccggcuccugcggccccgucuccuccaacggcgccaacggcgucaagggcuucuccuucaaguacggcaacggcgucuggaucggccgcaccaaguccaucuccucccgcaagggcuucgagaugaucugggaccccaacggcuggaccggcaccgacaacaacuucuccaucaagcaggacaucgucggcaucaacgagugguccggcuacuccggcuccuucguccagcaccccgagcucaccggccucgacugcauccgccccugcuucugggucgagcucauccgcggccgccccaaggaguccaccaucuggaccuccggcuccuccaucuccuucugcggcgucaacuccgacaccgucggcugguccuggcccgacggcgccgagcuccccuucaccaucgacaaguga

SEQ ID NO: 119447 - RNA, 1410 nt, Artificial Sequence
  derived and/or modified CDS sequence (opt2) from neuraminidase__InfluenzaA__AGJ73348
augaaccccaaccagaagaucaucaccaucggcuccgucugcaugaccaucggcauggccaaccucauccuccagaucggcaacaucaucuccaucuggaucucccacuccauccagcucggcaaccagaaccagaucgagaccugcaaccaguccgucaucaccuacgagaacaacaccugggucaaccagaccuacgucaacaucuccaacaccaacuucgccgccggccaguccgucaucuccgucaagcucgccggcaacuccucccucugccccgucuccggcugggccaucuacuccaaggacaacuccauccgcaucggcuccaagggcgacgucuucgucauccgcgagcccuucaucuccugcuccccccucgagugccgcaccuucuuccucacccagggcgcccuccucaacgacaagcacuccaacggcaccaucaaggaccgcucccccuaccgcacccucauguccugccccaucggcgagguccccucccccuacaacucccgcuucgaguccgucgccugguccgccuccgccugccacgacggcaucaacuggcucaccaucggcaucuccggccccgacaacggcgccgucgccguccucaaguacaacggcaucaucaccgacaccaucaaguccuggcgcaacaacauccuccgcacccaggaguccgagugcgccugcgucaacggcuccugcuucaccaucaugaccgacggccccuccgacggccaggccuccuacaagaucuuccgcaucgagaagggcaagaucgucaaguccgucgagaugaacgcccccaacuaccacuacgaggagugcuccugcuaccccgacuccuccgagaucaccugcgucugccgcgacaacuggcacggcuccaaccgccccugggucuccuucaaccagaaccucgaguaccagaucggcuacaucugcuccggcaucuucggcgacaacccccgccccaacgacaagaccggcuccugcggccccgucuccuccaacggcgccaacggcgucaagggcuucuccuucaaguacggcaacggcgucuggaucggccgcaccaaguccaucuccucccgcaagggcuucgagaugaucugggaccccaacggcuggaccggcaccgacaacaacuucuccaucaagcaggacaucgucggcaucaacgagugguccggcuacuccggcuccuucguccagcaccccgagcucaccggccucgacugcauccgccccugcuucugggucgagcucauccgcggccgccccaaggagaacaccaucuggaccuccggcuccuccaucuccuucugcggcgucaacuccgacaccgucggcugguccuggcccgacggcgccgagcuccccuucaccaucgacaaguga

SEQ ID NO: 119448 - RNA, 1410 nt, Artificial Sequence
  derived and/or modified CDS sequence (opt2) from neuraminidase__InfluenzaA__AGJ73350
augaaccccaaccagaagaucaucaccaucggcuccgucugcaugaccaucggcauggccaaccucauccuccagaucggcaacaucaucuccaucuggaucucccacuccauccagcucggcaaccagaaccagaucgagaccugcaaccaguccgucaucaccuacgagaacaacaccugggucaaccagaccuacgucaacaucuccaacaccaacuucgccgccggccaguccgucgucuccgucaagcucgccggcaacuccucccucugccccgucuccggcugggccaucuacuccaaggacaacuccauccgcaucggcuccaagggcgacgucuucgucauccgcgagcccuucaucuccugcuccccccucgagugccgcaccuucuuccucacccagggcgcccuccucaacgacgagcacuccaacggcaccaucaaggaccgcucccccuaccgcacccucauguccugccccaucggcgagguccccucccccuacaacucccgcuucgaguccgucgccugguccgccuccgccugccacgacggcaucaacuggcucaccaucggcaucuccggccccgacaacggcgccgucgccguccucaaguacaacggcaucaucaccgacaccaucaaguccuggcgcaacaacauccuccgcacccaggaguccgagugcgccugcgucaacggcuccugcuucaccaucaugaccgacggccccuccgacggccaggccuccuacaagaucuuccgcaucgagaagggcaagaucgucaaguccgucgucaugaacgcccccaacuaccacuacgaggagugcuccugcuaccccgacuccuccgagaucaccugcgucugccgcgacaacuggcacggcuccaaccgccccugggucuccuucaaccagaaccucgaguaccagaucggcuacaucugcuccggcaucuucggcgacaacccccgccccaacgacaagaccggcuccugcggccccgucuccuccaacggcgccaacggcgucaagggcuucuccuucaaguacggcaacggcgucuggaucggccgcaccaaguccaucuccucccgcaagggcuucgagaugaucugggaccccaacggcuggaccggcaccgacaacaacuucuccaucaagcaggacaucgucggcaucaacgagugguccggcuacuccggcuccuucguccagcaccccgagcucaccggccucgacugcauccgccccugcuucugggucgagcucauccgcggccgccccaaggagaacaccaucuggaccuccggcuccuccaucuccuucugcggcgucaacuccgacaccgucggcugguccuggcccgacggcgccgagcuccccuucaccaucgacaaguga

SEQ ID NO: 119449 - RNA, 1410 nt, Artificial Sequence
  derived and/or modified CDS sequence (opt2) from neuraminidase__InfluenzaA__AGJ73352
augaaccccaaccagaagaucaucaccaucggcuccgucugcaugaccaucggcauggccaaccucauccuccagaucggcaacaucaucuccaucuggaucucccacuccauccagcucggcaaccagucccagaucgagaccugcaaccaguccgucaucaccuacgagaacaacaccugggucaaccagaccuacgucaacaucuccaacaccaacuucgccgccggccaguccgucgucuccgucaagcucgucggcaacuccucccucugccccgucuccggcugggccaucuacuccaaggacaacuccauccgcaucggcuccaagggcgacgucuucgucauccgcgagcccuucaucuccugcuccccccucgagugccgcaccuucuuccucacccagggcgcccuccucaacgacaagcacuccaacggcaccaucaaggaccgcucccccuaccgcacccucauguccugccccaucggcgagguccccucccccuacaacucccgcuucgaguccgucgccugguccgccuccgccugccacgacggcaucaacuggcucaccaucggcaucuccggccccgacaacggcgccgucgccguccucaaguacaacggcaucaucaccgacaccaucaaguccuggcgcaacaacauccuccgcacccaggaguccgagugcgccugcgucaacggcuccugcuucaccaucaugaccgacggccccuccgacggccaggccuccuacaagaucuuccgcaucgagaagggcaagaucgucaaguccgucgagaugaacgcccccaacuaccacuacgaggagugcuccugcuaccccgacuccuccgagaucaccugcgucugccgcgacaacuggcacggcuccaaccgccccugggucuccuucaaccagaaccucgaguaccagaucggcuacaucugcuccggcaucuucggcgacuccccccgccccaacgacaagaccggcuccugcggccccgucuccuccaacggcgccaacggcgucaagggcuucuccuucaaguacggcaacggcgucuggaucggccgcaccaaguccaucuccucccgcaagggcuucgagaugaucugggaccccaacggcuggaccggcaccgacaacaacuucuccaucaagcaggacaucgucggcaucaacgagugguccggcuacuccggcuccuucguccagcaccccgagcucaccggccucgacugcauccgccccugcuucugggucgagcucauccgcggccgccccaaggagaacaccaucuggaccuccggcuccuccaucuccuucugcggcgucaacuccgacaccgucggcugguccuggcccgacggcgccgagcuccccuucaccaucgacaaguga

SEQ ID NO: 119450 - RNA, 1410 nt, Artificial Sequence; identical to SEQ ID NO: 116745
  derived and/or modified CDS sequence (opt2) from neuraminidase__InfluenzaA__AGJ73354

SEQ ID NO: 119451 - RNA, 1410 nt, Artificial Sequence
  derived and/or modified CDS sequence (opt2) from neuraminidase__InfluenzaA__AGJ73356
augaaccccaaccagaagaucaucaccaucggcuccgucugcaugaccaucggcauggccaaccucauccuccagaucggcaacaucaucuccaucuggaucucccacuccauccagcucggcaaccagucccagaucgagaccugcaaccaguccgucaucaccuacgagaacaacaccugggucaaccagaccuacuucaacaucuccaacaccaacuucgccgccggccaguccgucgucuccgucaagcucgccggcaacuccucccucugccccgucuccggcugggccaucuacuccaaggacaacuccauccgcaucggcuccaagggcgacgucuucgucauccgcgagcccuucaucuccugcuccccccucgagugccgcaccuucuuccucacccagggcgcccuccucaacgacaagcacuccaacggcaccaucaaggaccgcucccccuaccgcacccucauguccugccccaucggcgagguccccucccccuacaacucccgcuucgaguccgucgccugguccgccuccgccugccacgacggcaucaacuggcucaccaucggcaucuccggccccgacaacggcgccgucgccguccucaaguacaacggcaucaucaccgacaccaucaaguccuggcgcaacaacauccuccgcacccaggaguccgagugcgccugcgucaacggcuccugcuucaccaucaugaccgacggccccuccgacggccaggccuccuacaagaucuuccgcaucgagaagggcaagaucgucaaguccgucgagaugaacgcccccaacuaccacuacgaggagugcuccugcuaccccgacuccuccgagaucaccugcgucugccgcgacaacuggcacggcuccaaccgccccugggucuccuucaaccagaaccucgaguaccagaucggcuacaucugcuccggcaucuucggcgacaacccccgccccaacgacaagaccggcuccugcggccccgucuccuccaacggcgccaacggcgucaagggcuucuccuucaaguacggcaacggcgucuggaucggccgcaccaaguccaucuccucccgcaagggcuucgagaugaucugggaccccaacggcuggaccggcaccgacaacaacuucuccaucaagcaggacaucgucggcaucaacgagugguccggcuacuccggcuccuucguccagcaccccgagcucaccggccucgacugcauccgccccugcuucugggucgagcucauccgcggccgccccaaggagaacaccaucuggaccuccggcuccuccaucuccuucugcggcgucaacuccgacaccgucggcugguccuggcccgacggcgccgagcuccccuucaccaucgacaaguga

SEQ ID NO: 119452 - RNA, 1410 nt, Artificial Sequence; identical to SEQ ID NO: 116745
  derived and/or modified CDS sequence (opt2) from neuraminidase__InfluenzaA__AGJ73358

SEQ ID NO: 119453 - RNA, 1410 nt, Artificial Sequence; identical to SEQ ID NO: 116745
  derived and/or modified CDS sequence (opt2) from neuraminidase__InfluenzaA__AGJ73360

SEQ ID NO: 119454 - RNA, 1410 nt, Artificial Sequence
  derived and/or modified CDS sequence (opt2) from neuraminidase__InfluenzaA__AGJ73362
augaaccccaaccagaagaucaucaccaucggcuccgucugcaugaccaucggcauggccaaccucauccuccagaucggcaacaucaucuccaucuggaucucccacuccauccagcucggcaaccagucccagaucgagaccugcaaccaguccgucaucaccuacgagaacaacaccugggucaaccagaccuacgucaacaucuccaacaccaacuucgccgacggccaguccgucgucuccgucaagcucgccggcaacuccucccucugccccgucuccggcugggccaucuacuccaaggacaacuccauccgcaucggcuccaagggcgacgucuucgucauccgcgagcccuucaucuccugcuccccccucgagugccgcaccuucuuccucacccagggcgcccuccucaacgacaagcacuccaacggcaccaucaaggaccgcucccccuaccgcacccucauguccugccccaucggcgagguccccucccccuacaacucccgcuucgaguccgucgccugguccgccuccgccugccacgacggcaucaacuggcucaccaucggcaucuccggccccgacaacggcgccgucgccguccucaaguacaacggcaucaucaccgacaccaucaaguccuggcgcaacaacauccuccgcacccaggaguccgagugcgccugcgucaacggcuccugcuucaccaucaugaccgacggccccuccgacggccaggccuccuacaagaucuuccgcaucgagaagggcaagaucgucaaguccgucgagaugaacgcccccaacuaccacuacgaggagugcuccugcuaccccgacuccuccgagaucaccugcgucugccgcgacaacuggcacggcuccaaccgccccugggucuccuucaaccagaaccucgaguaccagaucggcuacaucugcuccggcaucuucggcgacaacccccgccccaacgacaagaccggcuccugcggccccgucuccuccaacggcgccaacggcgucaagggcuucuccuucaaguacggcaacggcgucuggaucggccgcaccaaguccaucuccucccgcaagggcuucgagaugaucugggaccccaacggcuggaccggcaccgacaacaacuucuccaucaagcaggacaucgucggcaucaacgagugguccggcuacuccggcuccuucguccagcaccccgagcucaccggccucgacugcauccgccccugcuucugggucgagcucauccgcggccgccccaaggagaacaccaucuggaccuccggcuccuccaucuccuucugcggcgucaacuccgacaccgucggcugguccuggcccgacggcgccgagcuccccuucaccaucgacaaguga

SEQ ID NO: 119455 - RNA, 1410 nt, Artificial Sequence; identical to SEQ ID NO: 117868
  derived and/or modified CDS sequence (opt2) from neuraminidase__InfluenzaA__AGJ73364

SEQ ID NO: 119456 - RNA, 1410 nt, Artificial Sequence; identical to SEQ ID NO: 116745
  derived and/or modified CDS sequence (opt2) from neuraminidase__InfluenzaA__AGJ73366

SEQ ID NO: 119457 - RNA, 1410 nt, Artificial Sequence; identical to SEQ ID NO: 116293
  derived and/or modified CDS sequence (opt2) from neuraminidase__InfluenzaA__AGJ73370

SEQ ID NO: 119458 - RNA, 1410 nt, Artificial Sequence
  derived and/or modified CDS sequence (opt2) from neuraminidase__InfluenzaA__AGJ73372
augaaccccaaccagaagaucaucaccaucggcuccgucugcaugaccaucggcauggccaaccucauccuccagaucggcaacaucaucuccaucuggaucucccacuccauccagcucggcaaccagaaccagaucgagaccugcaaccaguccgucaucaccuacgagaacaacaccugggucaaccagaccuacgucaacaucuccaacaccaacuucgccgccggccaguccgucgucuccgucaagcucgccggcaacuccucccucugccccgucuccggcugggccaucuacuccaaggacaacuccauccgcaucggcuccaagggcgacgucuucgucauccgcgagcccuucaucuccugcuccccccucgagugccgcaccuucuuccucacccagggcgcccuccucaacgacaagcacuccaacggcaccaucaaggaccgcucccccuaccgcacccucauguccugccccaucggcgagguccccucccccuacaacucccgcuucgaguccgucgccugguccgccuccgccugccacgacggcaucaacuggcucaccaucggcaucuccggccccgacaacggcgccgucgccguccucaaguacaacggcaucaucaccgacaccaucaaguccuggcgcaacaacauccuccgcacccaggaguccgagugcgccugcgucaacggcuccugcuucaccaucaugaccgacggccccuccgacggccaggccuccuacaagaucuuccgcaucgagaagggcaagaucgucaaguccgucgagaugaacgcccccaacuaccacuacgaggagugcuccugcuaccccgacuccuccgagaucaccugcgucugccgcgacaacuggcacggcuccaaccgccccugggucuccuucaaccacaaccucgaguaccagaucggcuacaucugcuccggcaucuucggcgacaacccccgccccaacgacaagaccggcuccugcggccccgucuccuccaacggcgccaacggcgucaagggcuucuccuucaaguacggcaacggcgucuggaucggccgcaccaaguccaucuccucccgcaagggcuucgagaugaucugggaccccaacggcuggaccggcaccgacaacaacuucuccaucaagcaggacaucgucggcaucaacgagugguccggcuacuccggcuccuucguccagcaccccgagcucaccggccucgacugcauccgccccugcuucugggucgagcucauccgcggccgccccaaggagaacaccaucuggaccuccggcuccuccaucuccuucugcggcgucaacuccgacaccgucggcugguccuggcccgacggcgccgagcuccccuucaccaucgacaaguga

SEQ ID NO: 119459 - RNA, 1410 nt, Artificial Sequence; identical to SEQ ID NO: 116293
  derived and/or modified CDS sequence (opt2) from neuraminidase__InfluenzaA__AGJ73374

SEQ ID NO: 119460 - RNA, 1410 nt, Artificial Sequence
  derived and/or modified CDS sequence (opt2) from neuraminidase__InfluenzaA__AGJ73376
augaaccccaaccagaagaucaucaccaucggcuccgucugcaugaccaucggcauggccaaccucauccuccagaucggcaacaucaucuccaucuggaucucccacuccauccagcucggcaaccagucccagaucgagaccugcaaccaguccgucaucaccuacgagaacaacaccugggucaaccagaccuacgucaacaucuccaacaccaacuucgccgccggccaguccgucgucuccgucaagcucgccggcaacuccucccucugccccgucuccggcugggccaucuacuccaaggacaacuccguccgcaucggcuccaagggcgacgucuucgucauccgcgagcccuucaucuccugcuccccccucgagugccgcaccuucuuccucacccagggcgcccuccucaacgacaagcacuccaacggcaccaucaaggaccgcucccccuaccgcacccucauguccugccccaucggcgagguccccucccccuacaacucccgcuucgaguccgucgccugguccgccuccgccugccacgacggcaucaacuggcucaccaucggcaucuccggccccgacuccggcgccgucgccguccucaaguacaacggcaucaucaccgacaccaucaaguccuggcgcaacaacauccuccgcacccaggaguccgagugcgccugcgucaacggcuccugcuucaccaucaugaccgacggccccuccgacggccaggccuccuacaagauccuccgcaucgagaagggcaagaucgucaaguccgucgagaugaacgcccccaacuaccacuacgaggagugcuccugcuaccccgacuccuccgagaucaccugcgucugccgcgacaacuggcacggcuccaaccgccccugggucuccuucaaccagaaccucgaguaccagaucggcuacaucugcuccggcaucuucggcgacaacccccgccccaacgacaagaccggcuccugcggccccgucuccuccaacggcgccaacggcgucaagggcuucuccuucaaguacggcaacggcgucuggaucggccgcaccaaguccaucuccucccgcaagggcuucgagaugaucugggaccccaacggcuggaccggcaccgacaacaacuucuccaccaagcaggacaucgucggcaucaacgagugguccggcuacuccggcuccuucguccagcaccccgagcucaccggccucgacugcauccgccccugcuucugggucgagcucauccgcggccgccccaaggagaacaccaucuggaccuccggcuccuccaucuccuucugcggcgucaacuccgacaccgucggcugguccuggcccgacggcgccgagcuccccuucaccaucgacaaguga

SEQ ID NO: 119461 - RNA, 1410 nt, Artificial Sequence
  derived and/or modified CDS sequence (opt2) from neuraminidase__InfluenzaA__AGJ73379
augaaccccaaccagaagaucaucaccaucggcuccgucugcaugaccaucggcauggccaaccucauccuccagaucggcaacaucaucuccaucuggaucucccacuccauccagcucggcaaccagucccagaucgagaccugcaaccaguccgucaucaccuacgagaacaacaccugggucaaccagaccuacgucaacaucuccaacaccaacuucgccgccggccaguccgucgucuccgucaagcucgccggcaacuccucccucugccccgucuccggcugggccaucuacuccaaggacaacuccguccgcaucggcuccaagggcgacgucuucgucauccgcgagcccuucaucuccugcuccccccucgagugccgcaccuucuuccucacccagggcgcccuccucaacgacaagcacuccaacggcaccaucaaggaccgcucccccuaccgcacccucauguccugccccaucggcgagguccccucccccuacaacucccgcuucgaguccgucgccugguccgccuccgccugccacgacggcaucaacuggcucaccaucggcaucuccggccccgacuccggcgccgucgccguccucaaguacaacggcaucaucaccgacaccaucaaguccuggcgcaacaacauccuccgcacccaggaguccgagugcgccugcgucaacggcuccugcuucaccaucaugaccgacggccccuccgacggccaggccuccuacaagaucuuccgcaucgagaagggcaagaucgucaaguccgucgagaugaacgcccccaacuaccacuacgaggagugcuccugcuaccccgacuccuccgagaucaccugcgucugccgcgacaacuggcacggcuccaaccgccccugggucuccuucaaccagaaccucgaguaccagaucggcuacaucugcuccggcaucuucggcgacaacccccgccccaacgacaagaccggcuccugcggccccgucuccuccaacggcgccaacggcgucaagggcuucuccuucaaguacggcaacggcgucuggaucggccgcaccaaguccaucuccucccgcaagggcuucgagaugaucugggaccccaacggcuggaccggcaccgacaacaacuucuccaucaagcaggacaucaucggcaucaacgagugguccggcuacuccggcuccuucguccagcaccccgagcucaccggccucgacugcauccgccccugcuucugggucgagcucauccgcggccgccccaaggagaacaccaucuggaccuccggcuccuccaucuccuucugcggcgucaacuccgacaccgucggcugguccuggcccgacggcgccgagcuccccuucaccaucgacaaguga

SEQ ID NO: 119462 - RNA, 1410 nt, Artificial Sequence
  derived and/or modified CDS sequence (opt2) from neuraminidase__InfluenzaA__AGJ73381
augaaccccaaccagaagaucaucaccaucggcuccgucugcaugaccaucggcauggccaaccucauccuccagaucggcaacaucaucuccaucuggaucucccacuccauccagcucggcaaccagucccagaucgagaccugcaaccaguccgucaucaccuacgagaacaacaccugggucaaccagaccuacgucaacaucuccaacaccaacuucgccgccggccaguccgucgucuccgucaagcucgccggcaacuccucccucugccccgucuccggcugggccaucuacuccaaggacaacuccguccgcaucggcuccaagggcgacgucuucgucauccgcgagcccuucaucuccugcuccccccucgagugccgcaccuucuuccucacccagggcgcccuccucaacgacgagcacuccaacggcaccaucaaggaccgcucccccuaccgcacccucauguccugccccaucggcgagguccccucccccuacaacucccgcuucgaguccgucgccugguccgccuccgccugccacgacggcaucaacuggcucaccaucggcaucuccggccccgacuccggcgccgucgccguccucaaguacaacggcaucaucaccgacaccaucaaguccuggcgcaacaacauccuccgcacccaggaguccgagugcgccugcgucaacggcuccugcuucaccaucaugaccgacggccccuccgacggccaggccuccuacaagaucuuccgcaucgagaagggcaagaucgucaaguccgucgagaugaacgcccccaacuaccacuacgaggagugcuccugcuaccccgacuccuccgagaucaccugcgucugccgcgacaacuggcacggcuccaaccgccccugggucuccuucaaccagaaccucgaguaccagaucggcuacaucugcuccggcaucuucggcgacaacccccgccccaacgacaagaccggcuccugcggccccgucuccuccaacggcgccaacggcgucaagggcuucuccuucaaguacggcaacggcgucuggaucggccgcaccaaguccaucuccucccgcaagggcuucgagaugaucugggaccccaacggcuggaccggcaccgacaacaacuucuccaucaagcaggacaucgucggcaucaacgagugguccggcuacuccggcuccuucguccagcaccccgagcucaccggccucgacugcauccgccccugcuucugggucgagcucauccgcggccgccccaaggagaacaccaucuggaccuccggcuccuccaucuccuucugcggcgucaacuccgacaccgucggcugguccuggcccgacggcgccgagcuccccuucaccaucgacaaguga

SEQ ID NO: 119463 - RNA, 1410 nt, Artificial Sequence
  derived and/or modified CDS sequence (opt2) from neuraminidase__InfluenzaA__AGK62992
augaaccccaaccagaagaucaucaccaucggcuccgucucccucaccaucuccaccaucugcuucuucaugcagaucgccauccucaucaccaccgucacccuccacuucaagcaguacgaguucaacuccccccccaacaaccaggucaugcucugcgagcccaccaucaucgagcgcaacaucaccgagaucgucuaccucaccaacaccaccaucgagaaggagaucugccccaagcccgccgaguaccgcaacugguccaagccccagugcgacaucaccggcuucgcccccuucuccaaggacaacuccauccgccucuccgccggcggcgacaucugggucacccgcgagcccuacgucuccugcgaccccgacaagugcuaccaguucgcccucggccagggcaccacccucaacaacguccacuccaacaacaccguccgcgaccgcacccccuaccgcacccuccucaugaacgagcucggcguccccuuccaccucggcaccaagcaggucugcaucgccugguccuccuccuccugccacgacggcaaggccuggcuccacgucugcaucaccggcgacgacaagaacgccaccgccuccuucaucuacaacggccgccucgucgacuccgucgucuccugguccaaggagauccuccgcacccaggaguccgagugcgucugcaucaacggcaccugcaccgucgucaugaccgacggcuccgccuccggcaaggccgacaccaagauccucuucaucgaggagggcaagaucguccacaccuccacccucuccggcuccgcccagcacgucgaggagugcuccugcuacccccgcuaccccggcguccgcugcgucugccgcgacaacuggaagggcuccaaccgccccaucgucgacaucaacaucaaggaccacuccaucgucuccuccuacgucugcuccggccucgucggcgacaccccccgcaagaacgacuccuccuccuccucccacugccucgaccccaacaacgaggagggcggccacggcgucaagggcugggccuucgacgacggcaacgacgucuggaugggccgcaccaucaacgagaccucccgccucggcuacgagaccuucaaggucaucgagggcugguccaaccccaaguccaagcuccagaucaaccgccaggucaucgucgaccgcggcgaccgcuccggcuacuccggcaucuucuccgucgaggucaaguccugcaucaaccgcugcuucuacgucgagcucauccgcggccgcaaggaggagaccgagguccucuggaccuccaacuccaucgucgucuucugcggcaccuccggcaccuacggcaccggcuccuggcccgacggcgccgacaucaaccucaugcccaucuga

SEQ ID NO: 119464 - RNA, 1410 nt, Artificial Sequence
  derived and/or modified CDS sequence (opt2) from neuraminidase__InfluenzaA__AGK62996
augaaccccaaccagaagaucaucaccaucggcuccgucucccucaucaucuccaccaucugcuucuucaugcagaucgccauccucaucaccaccgucacccuccacuucaagcaguacgaguucaacuccccccccaacaaccaggucaugcucugcgagcccaccaucaucgagcgcaacaucaccgagaucgucuaccucaccaacaccaccaucgagaaggagaucugccccaagcccgccgaguaccgcaacugguccaagccccagugcgacaucaccggcuucgcccccuucuccaaggacaacuccauccgccucuccgccggcggcgacaucugggucacccgcgagcccuacgucuccugcgaccccgacaagugcuaccaguucgcccucggccagggcaccacccucaacaacguccacuccaacaacaccguccgcgaccgcacccccuaccgcacccuccucaugaacgagcucggcguccccuuccaccucggcaccaagcaggucugcaucgccugguccuccuccuccugccacgacggcaaggccuggcuccacgucugcaucaccggcgacgacaagaacgccaccgccuccuucaucuacaacggccgccucgucgacuccgucgucuccugguccaaggagauccuccgcacccaggaguccgagugcgucugcaucaacggcaccugcaccgucgucaugaccgacggcuccgccuccggcaaggccgacaccaagauccucuucaucgaggagggcaagaucguccacaccuccacccucuccggcuccgcccagcacgucgaggagugcuccugcuacccccgcuaccccggcguccgcugcgucugccgcgacaacuggaagggcuccaaccgccccaucgucgacaucaacaucaaggaccacuccaucgucuccuccuacgucugcuccggccucgucggcgacaccccccgcaagaacgacuccuccuccuccucccacugccucgaccccaacaacgaggagggcggccacggcgucaagggcugggccuucgacgacggcaacgacgucuggaugggccgcaccaucaacgagaccucccgccucggcuacgagaccuucaaggucaucgagggcugguccaaccccaaguccaagcuccagaucaaccgccaggucaucgucgaccgcggcgaccgcuccggcuacuccggcaucuucuccgucgaguccaaguccugcaucaaccgcugcuucuacgucgagcucauccgcggccgcaaggaggagaccgagguccucuggaccuccaacuccaucgucgucuucugcggcaccuccggcaccuacggcaccggcuccuggcccgacggcgccgacaucaaccucaugcccaucuga

SEQ ID NO: 119465 - RNA, 1410 nt, Artificial Sequence
  derived and/or modified CDS sequence (opt2) from neuraminidase__InfluenzaA__AGK62998
augaaccccaaccagaagaucaucaccaucggcuccgucucccucaccaucgccaccaucugcuucuucaugcagaucgccauccucaucaccaccgucacccuccacuucaagcagugcgaguucaacuccccccccaacaaccaggucaugcucugcgagcccaccaucaucgagcgcaacaucaccgagaucgucuaccucaccaacaccaccaucgagaaggagaucugccccaagcucgccgaguaccgcaacugguccaagccccagugcgacaucaccggcuucgcccccuucuccaaggacaacuccauccgccucuccgccggcggcgacaucugggucacccgcgagcccuacgucuccugcgaccccgacaagugcuaccaguucgcccucggccagggcaccacccucaacaacguccacuccaacaacaccguccgcgaccgcacccccuaccgcacccuccucaugaacgagcucggcguccccuuccaccucggcaccaagcaggucugcauggccugguccuccuccuccugccacgacggcaaggccuggcuccacgucugcaucaccggcgacgacaagaacgccaccgccuccuucaucuacaacggccgccucgucgacuccgucgucuccugguccaaggagauccuccgcacccaggaguccgagugcgucugcaucaacggcaccugcaccgucgucaugaccgacggcuccgccuccggcaaggccgacaccaagauccucuucaucgaggagggcaagaucguccacaccuccacccucuccggcuccgcccagcacgucgaggagugcuccugcuacccccgcuaccccggcguccgcugcgucugccgcgacaacuggaagggcuccaaccgccccaucgucgacaucaacaucaaggaccacuccaucgucuccuccuacgucugcuccggccuccucggcgacaccccccgcaagaacgacuccuccuccuccucccacugccucgaccccaacaacgaggagggcggccacggcgucaagggcugggccuucgacgacggcaacgacgucuggaugggccgcaccaucuccgagaagucccgccucggcuacgagaccuucaaggucaucgagggcugguccaaccccaaguccaagcuccagaucaaccgccaggucaucgucgaccgcggcgaccgcuccggcuacuccggcaucuucuccgucgaguccaaguccugcaucaaccgcugcuucuacgucgagcucauccgcggccgcaaggaggagaccgagguccucuggaccuccaacuccaucgucgucuucugcggcaccuccggcaccuacggcaccggcuccuggcccgacggcgccgacaucaaccucaugcccaucuga

SEQ ID NO: 119466 - RNA, 1410 nt, Artificial Sequence
  derived and/or modified CDS sequence (opt2) from neuraminidase__InfluenzaA__AGK63000
augaaccccaaccagaagaucaucaccaucggcuccgucucccucaccaucgccaccaucugcuucuucaugcagaucgccauccucaucaccaccgucacccuccacuucaagcagugcgacuucaacuccccccccaacaaccaggucaugcucugcgagcccaccaucaucgagcgcaacaucaccgagaucgucuaccucaccaacaccaccaucgagaaggagaucugccccaagcucgccgaguaccgcaacugguccaagccccagugcgacaucaccggcuucgcccccuucuccaaggacaacuccauccgccucuccgccggcggcgacaucugggucacccgcgagcccuacgucuccugcgaccccgacaagugcuaccaguucgcccucggccagggcaccacccucaacaacguccacuccaacaacaccguccgcgaccgcacccccuaccgcacccuccucaugaacgagcucggcguccccuuccaccucggcaccaagcaggucugcauggccugguccuccuccuccugccacgacggcaaggccuggcuccacgucugcaucaccggcgacgacaagaacgccaccgccuccuucaucuacaacggcaagcucgucgacuccgucgucuccugguccaaggagauccuccgcacccaggaguccgagugcgucugcaucaacggcaccugcaccgucgucaugaccgacggcuccgccuccggcaaggccgacaccaagauccucuucaucgaggagggcaagaucguccacaccuccacccucuccggcuccgcccagcacgucgaggagugcuccugcuacccccgcuaccccggcguccgcugcgucugccgcgacaacuggaagggcuccaaccgccccaucgucgacaucaacaucaaggaccacuccaucgucuccuccuacgucugcuccggccucgucggcgacaccccccgcaagaacgacuccuccuccuccucccacugccucgaccccaacaacgaggagggcggccacggcgucaagggcugggccuucgacgacggcaacgacgucuggaugggccgcaccaucaacgagaccucccgccucggcuacgagaccuucaaggucaucgagggcugguccaaccccaaguccaagcuccagaucaaccgccaggucaucgucgaccgcggcgaccgcuccggcuacuccggcaucuucuccgucgagggcaaguccugcaucaaccgcugcuucuacgucgagcucauccgcggccgcaaggaggagaccgagguccucuggaccuccaacuccaucgucgucuucugcggcaccuccggcaccuacggcaccggcuccuggcccgacggcgccgacaucaaccucaugcccaucuga

SEQ ID NO: 119467 - RNA, 1410 nt, Artificial Sequence
  derived and/or modified CDS sequence (opt2) from neuraminidase__InfluenzaA__AGK63002
augaaccccaaccagaagaucaucaccaucggcuccgucucccucaccaucuccaccaucugcuucuucaugcagaucgccauccucaugaccaccgucacccuccacuucaagcagugcgaguucaacuccccccccaacaaccaggucaugcucugcgagcccaccaucaucgagcgcaacaucaccgagaucgucuaccucaccaacaccaccaucgagaaggagaucugccccaagcucgccgaguaccgcaacugguccaagccccagugcgacaucaccggcuucgcccccuucuccaaggacaacuccauccgccucuccgccggcggcgacaucugggucacccgcgagcccuacgucuccugcgaccccgacaagugcuaccaguucgcccucggccagggcaccacccucaacaacguccacuccaacaacaccguccgcgaccgcacccccuaccgcacccuccucaugaacgagcucggcguccccuuccaccucggcaccaagcaggucugcauggccugguccuccuccuccugccacgacggcaaggccuggcuccacgucugcaucaccggcaacgacaagaacgccaccgccuccuucaucuacaacggccgccucgucgacuccgucgucuccugguccaaggagauccuccgcacccaggaguccgagugcgucugcaucaacggcaccugcaccgucgucaugaccgacggcuccgccuccggcaaggccgacaccaagauccucuucaucgaggagggcaagaucguccacaccuccacccucuccggcuccgcccagcacgucgaggagugcuccugcuacccccgcuaccccggcguccgcugcgucugccgcgacaacuggaagggcuccaaccgccccaucgucgacaucaacaucaaggaccacuccaucgucuccuccuacgucugcuccggccucgucggcgacaccccccgcaagaacgacuccuccuccuccucccacugccucgaccccaacaacgaggagggcggccacggcgucaagggcugggccuucgacgacggcaacgacgucuggaugggccgcaccaucaccgagaccucccgccucggcuacgagaccuucaaggucaucgagggcugguccaaccccaaguccaagcuccagaucaaccgccaggucaucgucgaccgcggcgaccgcuccggcuacuccggcaucuucuccgucgagggcaaguccugcaucaaccgcugcuucuacgucgagcucauccgcggccgcaaggaggagaccgagguccucuggaccuccaacuccaucgucgucuucugcggcaccuccggcaccuacggcaccggcuccuggcccgacggcgccgacaucaaccucaugcccaucuga

SEQ ID NO: 119468 - RNA, 1410 nt, Artificial Sequence
  derived and/or modified CDS sequence (opt2) from neuraminidase__InfluenzaA__AGK63004
augaaccccaaccagaagaucaucaccaucggcuccgucucccucaccaucuccaccaucugcuucuucaugcagaucgccauccucaucaccaccgucacccuccacuucaagcaguacgaguucaacuccccccccaacaaccaggucaugcucugcgagcccaccaucaucgagcgcaacaucaccgagaucgucuaccucaccaacaccaccaucgagaaggagaucugccccaagcccgccgaguaccgcaacugguccaagccccagugcgacaucaccggcuucgcccccuucuccaaggacaacuccauccgccucuccgccggcggcgacaucugggucacccgcgagcccuacgucuccugcgaccccgacaagugcuaccaguucgcccucggccagggcaccacccucaacaacguccacuccaacaacaccguccgcgaccgcacccccuaccgcacccuccucaugaacgagcucggcguccccuuccaccucggcaccaagcaggucugcaucgccugguccuccuccuccugccacgacggcaaggccuggcuccacgucugcaucaccggcgacgacaagaacgccaccgccuccuucaucuacaacggccgccucgucgacuccgucgucuccugguccaaggagauccuccgcacccaggaguccgagugcgucugcaucaacggcaccugcaccgucgucaugaccgacggcuccgccuccggcaaggccgacaccaagauccucuucaucgaggagggcaagaucguccacaccuccacccucuccggcuccucccagcacgucgaggagugcuccugcuacccccgcuaccccggcguccgcugcgucugccgcgacaacuggaagggcuccaaccgccccaucgucgacaucaacaucaaggaccacuccaucgucuccuccuacgucugcuccggccucgucggcgacaccccccgcaagaacgacuccuccuccuccucccacugccucgaccccaacaacgaggagggcggccacggcgucaagggcugggccuucgacgacggcaacgacgucuggaugggccgcaccaucaacgagaccucccgccucggcuacgagaccuucaaggucaucgagggcugguccaaccccaaguccaagcuccagaucaaccgccaggucaucgucgaccgcggcgaccgcuccggcuacuccggcaucuucuccgucgagggcaaguccugcaucaaccgcugcuucuacgucgagcucauccgcggccgcaaggaggagaccgagguccucuggaccuccaacuccaucgucgucuucugcggcaccuccggcaccuacggcaccggcuccuggcccgacggcgccgacaucaaccucaugcccaucuga

SEQ ID NO: 119469 - RNA, 1410 nt, Artificial Sequence
  derived and/or modified CDS sequence (opt2) from neuraminidase__InfluenzaA__AGK63006
augaaccccaaccagaagaucaucaccaucggcuccgucucccucaccaucgccaccaucugcuucuucaugcagaucgccauccucaucaccaccgucacccuccacuucaagcaguacgaguucaacuccccccccaacaaccaggucaugcucugcgagcccaccaucaucgagcgcaacaucaccgagaucgucuaccucaccaacaccaccaucgagaaggagaucugccccaagcccgccgaguaccgcaacugguccaagccccagugcgacaucaccggcuucgcccccuucuccaaggacaacuccauccgccucuccgccggcggcgacaucugggucacccgcgagcccuacgucuccugcgaccccgacaagugcuaccaguucgcccucggccagggcaccacccucaacaacguccacuccaacaacaccguccgcgaccgcacccccuaccgcacccuccucaugaacgagcucggcguccccuuccaccucggcaccaagcaggucugcaucgccugguccuccuccuccugccacgacggcaaggccuggcuccacgucugcaucaccggcgacgacaagaacgccaccgccuccuucaucuacaacggccgccucgucgacuccgucgucuccugguccaaggagauccuccgcacccaggaguccgagugcgucugcaucaacggcaccugcaccgucgucaugaccgacggcuccgccuccgccaaggccgacaccaagauccucuucaucgaggagggcaagaucguccacaccuccacccucuccggcuccgcccagcacgucgaggagugcuccugcuacccccgcuacuccggcguccgcugcgucugccgcgacaacuggaagggcuccaaccgccccaucgucgacaucaacaucaaggaccacuccaucgucuccuccuacgucugcuccggccucgucggcgacaccccccgcaagaacgacuccuccuccuccucccacugccucgaccccaacaacgaggagggcggccacggcgucaagggcugggccuucgacgacggcaacgacgucuggaugggccgcaccaucaacgagaccucccgccucggcuacgagaccuucaaggucaucgagggcugguccaaccccaagucccagcuccagaucaaccgccaggucaucgucgaccgcggcgaccgcuccggcuacuccggcaucuucuccgucgaguccaaguccugcaucaaccgcugcuucuacgucgagcucauccgcggccgcaaggaggagaccgagguccucuggaccuccaacuccaucgucgucuucugcggcaccuccggcaccuacggcaccggcuccuggcccgacggcgccgacaucaaccucaugcccaucuga

SEQ ID NO: 119470 - RNA, 1410 nt, Artificial Sequence
  derived and/or modified CDS sequence (opt2) from neuraminidase__InfluenzaA__AGK63008
augaaccccaaccagaagaucaucaccaucggcuccgucucccucaccaucgccaccaucugcuucuucaugcagaucgccauccucaucaccaccgucacccuccacuucaagcagugcgaguucaacuccccccccaacaaccaggucaugcucugcgagcccaccaucaucgagcgcaacaucaccgagaucgucuaccucaccaacaccaccaucgagaaggagaucugccccaagcucgccgaguaccgcaacugguccaagccccagugcgacaucaccggcuucgcccccuucuccaaggacaacuccauccgccucuccgccggcggcgacaucugggucacccgcgagcccuacgucuccugcgaccccgacaagugcuaccaguucgcccucggccagggcaccacccucaacaacguccacuccaacaacaccguccgcgaccgcacccccuaccgcacccuccucaugaacgagcucggcguccccuuccaccucggcaccaagcaggucugcauggccugguccuccuccuccugccacgacggcaaggccuggcuccacgucugcaucaccggcgacgacaagaacgccaccgccuccuucaucuacaacggcaagcucgucgacuccgucgucuccugguccaaggagauccuccgcacccaggaguccgagugcgucugcaucaacggcaccugcaccgucgucaugaccgacggcuccgccuccggcaaggccgacaccaagauccucuucaucgaggagggcaagaucguccacaccuccacccucuccggcuccgcccagcacgucgaggagugcuccugcuacccccgcuaccccggcguccgcugcgucugccgcgacaacuggaagggcuccaaccgccccaucgucgacaucaacaucaaggaccacuccaucgucuccuccuacgucugcuccggccucgucggcgacaccccccgcaagaacgacuccuccuccuccucccacugccucgaccccaacaacgaggagggcggccacggcgucaagggcugggccuucgacgacggcaacgacgucuggaugggccgcaccaucaacgagaccucccgccucggcuacgagaccuucaaggucaucgagggcugguccaaccccaaguccaagcuccagaugaaccgccaggucaucgucgaccgcggcgaccgcuccggcuacuccggcaucuucuccgucgagggcaaguccugcaucaaccgcugcuucuacgucgagcucauccgcggccgcaaggaggagaccgagguccucuggaccuccaacuccaucgucgucuucugcggcaccuccggcaccuacggcaccggcuccuggcccgacggcgccgacaucaaccucaugcccaucuga

SEQ ID NO: 119471 - RNA, 1410 nt, Artificial Sequence
  derived and/or modified CDS sequence (opt2) from neuraminidase__InfluenzaA__AGK63010
augaaccccaaccagaagaucaucaccaucggcuccgucucccucaccaucgccaccaucugcuucuucaugcagaucgccauccucaucaccaccgucacccuccacuucaagcagugcgaguucaacuccccccccaacaaccaggucaugcucugcgagcccaccaucaucgagcgcaacaucaccgagaucgucuaccucaccaacaccaccaucgagaaggagaucugccccaagcucgccgaguaccgcaacugguccaagccccagugcgacaucaccggcuucgcccccuucuccaaggacaacuccauccgccucuccgccggcggcgacaucugggucacccgcgagcccuacgucuccugcgaccccgacaagugcuaccaguucgcccucggccagggcaccacccucaacaacguccacuccaacaacaccguccgcgaccgcacccccuaccgcacccuccucaugaacgagcucggcguccccuuccaccucggcaccaagcaggucugcauggccugguccuccuccuccugccacgacggcaaggccuggcuccacgucugcaucaccggcgacgacaagaacgccaccgccuccuucaucuacaacggcaagcucgucgacuccgucgucuccugguccaaggagauccuccgcacccaggaguccgagugcgucugcaucaacggcaccugcaccgucgucaugaccgacggcuccgccuccggcaaggccgacaccaagauccucuucaucgaggagggcaagaucguccacaccuccacccucuccggcuccgcccagcacgucgaggagugcuccugcuacccccgcuaccccggcguccgcugcgucugccgcgacaacuggaagggcuccaaccgccccaucgucgacaucaacaucaaggaccacuccaucgucuccuccuacgucugcuccggccucgucggcgacaccccccgcaagaacgacuccuccuccuccucccacugccucgaccccaacaacgaggagggcggccacggcgucaagggcugggccuucgacgacggcaacgacgucuggaugggccgcaccaucaacgagaccucccgccucggcuacgagaccuucaaggucaucgagggcugguccgaccccaaguccaagcuccagaucaaccgccaggucaucgucgaccgcggcgaccgcuccggcuacuccggcaucuucuccgucgagggcaaguccugcaucaaccgcugcuucuacgucgagcucauccgcggccgcaaggaggagaccgagguccucuggaccuccaacuccaucgucgucuucugcggcaccuccggcaccuacggcaccggcuccuggcccgacggcgccgacaucaaccucaugcccaucuga

SEQ ID NO: 119472 - RNA, 1410 nt, Artificial Sequence
  derived and/or modified CDS sequence (opt2) from neuraminidase__InfluenzaA__AGK63012
augaaccccaaccagaagaucaucaccaucggcuccgucucccucaccaucuccaccaucugcuucuucaugcagaucgccauccucaucaccaccgucacccuccacuucaagcaguacgaguucaacuccccccccaacaaccaggucaugcucugcgagcccaccaucaucgagcgcaacaucaccgagaucgucuaccucaccaacaccaccaucgagaaggagaucugccccaagcccgccgaguaccgcaacugguccaagccccagugcgacaucaccggcuucgcccccuucuccaaggacaacuccauccgccucuccgccggcggcgacaucugggucacccgcgagcccuacgucuccugcgaccccgacaagugcuaccaguucgcccucggccagggcaccacccucaacaacguccacuccaacaacaccguccgcgaccgcacccccuaccgcacccuccucaugaacgagcucggcguccccuuccaccucggcaccaagcaggucugcaucgccugguccuccuccuccugccacgacggcaaggccuggcuccacgucugcaucaccggcgacgacaagaacgccaccgccuccuucaucuacaacggccgccucgucgacuccgucgucuccugguccaaggagauccuccgcacccaggaguccgagugcgucugcaucaacggcaccugcaccgucgucaugaccgacggcuccgccuccggcaaggccgacaccaagauccucuucaucgaggagggcaagaucguccacaccuccacccucuccggcuccgcccagcacgucgaggagugcuccugcuacccccgcuaccccggcguccgcugcgucugccgcgacaacuggaagggcuccaaccgccccaucgucgacaucaacaucaaggaccacuccaucgucuccuccuacgucugcuccggccucgucggcgacaccccccgcaagaacgacuccuccuccuccucccacugccucgaccccaacaacgaggagggcggccacggcgucaagggcugggccuucgacgacggcaacgacgucuggaugggccgcaccaucaacgagaccucccgccucggcuacgagaccuucaaggucaucgagggcugguccaaccccaaguccaagcuccagaucaaccgccaggucaucgucgaccgcggcuaccgcuccggcuacuccggcaucuucuccgucgagggcaaguccugcaucaaccgcugcuucuacgucgaccucauccgcggccgcaaggaggagaccgagguccucuggaccuccaacuccaucgucgucuucugcggcaccuccggcaccuacggcaccggcuccuggcccgacggcgccgacaucaaccucaugcccaucuga

SEQ ID NO: 119473 - RNA, 1410 nt, Artificial Sequence
  derived and/or modified CDS sequence (opt2) from neuraminidase__InfluenzaA__AGK63014
augaaccccaaccagaagaucaucaccaucggcuccgucucccucaccaucuccaccaucugcuucuucaugcagaucgccauccucaucaccaccgucacccuccacuucaagcaguacgaguucaacuccccccccaacaaccaggucaugcucugcgagcccaccaucaucgagcgcaacaucaccgagaucgucuaccucaccaacaccaccaucgagaaggagaucugccccaagcccgccgaguaccgcaacugguccaagccccagugcgacaucaccggcuucgcccccuucuccaaggacaacuccauccgccucuccgccggcggcgacaucugggucacccgcgagcccuacgucuccugcgaccccgacaagugcuaccaguucgcccucggccagggcaccacccucaacaacguccacuccaacaacaccguccgcgaccgcacccccuaccgcacccuccucaugaacgagcucggcguccccuucccccucggcaccaagcaggucugcaucgccugguccuccuccuccugccacgacggcaaggccuggcuccacgucugcaucaccggcgacgacaagaacgccaccgccuccuucaucuacaacggccgccucgucgacuccgucgucuccugguccaaggagauccaccgcacccaggaguccgagugcgucugcaucaacggcaccugcaccgucgucaugaccgacggcuccgccuccggcaaggccgacaccaagauccucuucaucgaggagggcaagaucguccacaccuccacccucuccggcuccgcccagcacgucgaggagugcuccugcuacccccgcuaccccggcguccgcugcgucugccgcgacaacuggaagggcuccaaccgccccaucgucgacaucaacaucaaggaccacuccaucgucuccuccuacgucugcuccggccucgucggcgacaccccccgcaagaacgacuccuccuccuccucccacugccucgaccccaacaacgaggagggcggccacggcgucaagggcugggccuucgacgacggcaacgacgucuggaugggccgcaccaucuccgagaagucccgccucggcuacgagaccuucaaggucaucgagggcugguccaaccccaaguccaagcuccagaucaaccgccaggucaucgucgaccgcggcaaccgcuccggcuacuccggcaucuucuccgucgagggcaaguccugcaucaaccgcugcuucuacgucgagcucauccgcggccgcaaggaggagaccgagguccucuggaccuccaacuccaucgucgucuucugcggcaccuccggcaccuacggcaccggcuccuggcccgacggcgccgacaucaaccucaugcccaucuga

SEQ ID NO: 119474 - RNA, 1410 nt, Artificial Sequence
  derived and/or modified CDS sequence (opt2) from neuraminidase__InfluenzaA__AGK63018
augaaccccaaccagaagaucaucaccaucggcuccgucucccucaccaucuccaccaucugcuucuucaugcagaucgccauccucaucaccaccgucacccuccacuucaagcagugcgaguucaacuccccccccaacaaccaggucaugcucugcgagcccaccaucaucgagcgcaacaucaccgagaucgucuaccucaccaacaccaccaucgagaaggagaucugccccaagcucgccgaguaccgcaacugguccaagccccagugcgacaucaccggcuucgcccccuucuccaaggacaacuccauccgccucuccgccggcggcgacaucugggucacccgcgagcccuacgucuccugcgaccccgacaagugcuaccaguucgcccucggccagggcaccacccucaacaacguccacuccaacaacaccguccgcgaccgcacccccuaccgcacccuccucaugaacgagcucggcguccccuuccaccucggcaccaagcaggucugcauggccugguccuccuccuccugccacgacggcaaggccuggcuccacgucugcaucaccggcgacgacaagaacgccaccgccuccuucaucuacaacggcaagcucgucgacuccgucgucuccugguccaaggagauccuccgcacccaggaguccgagugcgucugcaucaacggcaccugcaccgucgucaugaccgacggcuccgccuccggcaaggccgacaccaagauccucuucaucgaggagggcaagaucguccacaccuccacccucuccggcuccgcccagcacgucgaggagugcuccugcuacccccgcuaccccggcguccgcugcgucugccgcgacaacuggaagggcuccaaccgccccaucgucgacaucaacaucaaggaccacuccaucgucuccuccuacgucugcuccggccucgucggcgacaccccccgcaagaacgacuccuccuccuccucccacugccucgaccccaacaacgaggagggcggccacggcgucaagggcugggccuucgacgacggcaacgacgucuggaugggccgcaccaucaacgagaccucccgccucggcuacgagaccuucaaggucaucgagggcugguccaaccccaaguccaagcuccagaucaaccgccaggucaucgucgaccgcggcgaccgcuccggcuacuccggcaucuucuccgucgagggcaaguccugcaucaaccgcugcuucuacgucgagcucauccgcggccgcaaggaggagaccgagguccucuggaccuccaacuccaucgucgucuucugcggcaccuccggcaccuacggcaccggcuccuggcccgacggcgccgacaucaaccucaugcccaucuga

SEQ ID NO: 119475 - RNA, 1410 nt, Artificial Sequence
  derived and/or modified CDS sequence (opt2) from neuraminidase__InfluenzaA__AGK63020
augaaccccaaccagaagaucaucaccaucggcuccgucucccucaccaucuccaccaucugcuucuucaugcagaucgccauccucaucaccaccgucacccuccacuucaagcaguacgaguucaacuccccccccaacaaccaggucaugcucugcgagcccaccaucaucgagcgcaacaucaccgagaucgucuaccucaccaacaccaccaucgagaaggagaucugccccaagcccgccgaguaccgcaacugguccaagccccagugcgacaucaccggcuucgcccccuucuccaaggacaacuccauccgccucuccgccggcggcgacaucugggucacccgcgagcccuacgucuccugcgaccccgacaagugcuaccaguucgcccucggccagggcaccacccucaacaacguccacuccaacaacaccguccgcgaccgcacccccuaccgcacccuccucaugaacgagcucggcguccccuuccaccucggcaccaagcaggucugcaucgccugguccuccuccuccugccacgacggcaaggccuggcuccacgucugcaucaccggcgacgacaagaacgccaccgccuccuucaucuacaacggccgccucgucgacuccgucgucuccugguccaaggagauccuccgcacccaggaguccgagugcgucugcaucaacggcaccugcaccgucgucaugaccgacggcuccgccuccggcaaggccgacaccaagauccucuucaucgaggagggcaagaucguccacaccuccacccucuccggcuccgcccagcacgucgaggagugcuccugcuacccccgcuaccccggcguccgcugcgucugccgcgacaacuggaagggcuccaaccgccccaucgucgacaucaacaucaaggaccacuccaucgucuccuccuacgucugcuccggccucgucggcgacaccccccgcaagaacgacuccuccuccuccucccacugccucgaccccaacaacgaggagggcggccacggcgucaagggcugggccuucgacgacggcaacgacgucuggaugggccgcaccaucaacgagaccucccgccucggcuacgagaccuucaaggucaucgagggcugguccaaccccaaguccaagcuccagaucaaccgccaggucaucgucgaccgcggcgaccgcuccggcuacuccggcaucuucuccgucgagggcaaguccugcaucaaccgcugcuucuacgucgagcucauccgcggccgcaaggaggagaccgagguccucuggaccuccaacuccaucgucgucuucugcggcaccuccggcaccuacggcaccggcuccuggcccgacggcgccgacaucaaccucaugcccaucuga

SEQ ID NO: 119476 - RNA, 1410 nt, Artificial Sequence
  derived and/or modified CDS sequence (opt2) from neuraminidase__InfluenzaA__AGK63022
augaaccccaaccagaagaucaucaccaucggcuccgucucccucaccaucuccaccaucugcuucuucaugcagaucgccauccucaucaccaccgucacccuccacuucaagcagugcgaguucaacuccccccccaacaaccaggucaugcucugcgagcccaccaucaucgagcgcaacaucaccgagaucgucuaccucaccaacaccaccaucgagaaggagaucugccccaagcucgccgaguaccgcaacugguccaagccccagugcgacaucaccggcuucgcccccuucuccaaggacaacuccauccgccucuccgccggcggcgacaucugggucacccgcgagcccuacgucuccugcgaccccgacaagugcuaccaguucgcccucggccagggcaccacccucaacaacguccacuccaacaacaccguccgcgaccgcacccccuaccgcacccuccucaugaacgagcucggcguccccuuccaccucggcaccaagcaggucugcauggccugguccuccuccuccugccacgacggcaaggccuggcuccacgucugcaucaccggcgacgacaagaacgccaccgccuccuucaucuacaacggcaagcucgucgacuccgucgucuccugguccaaggagauccuccgcacccaggaguccgagugcgucugcaucaacggcaccugcaccgucgucaugaccgacggcuccgccuccggcaaggccgacaccaagauccucuucaucgaggagggcaagaucguccacaccuccacccucuccggcuccgcccagcacgucgaggagugcuccugcuacccccgcuaccccggcguccgcugcgucugccgcgacaacuggaagggcuccaaccgccccaucgucgacaucaacaucaaggaccacuccaucgucuccuccuacgucugcuccggccucgucggcgacaccccccgcaagaacgacuccuccuccuccucccacugccucgaccccaacaacgaggagggcggccacggcgucaagggcugggccuucgacgacggcaacgacgucuggaugggccgcaccaucaacgagaccucccgccucggcuacgagaccuucaaggucaucgagggcugguccaaccccaaguccaagcuccagaucaaccgccaggucaucgucgaccgcggcgaccgcuccggcuacuccggcaucuucuccgucgagggcaaguccugcaucaaccgcugcuucuacgucgaccucauccgcggccgcaaggaggagaccgagguccucuggaccuccaacuccaucgucgucuucugcggcaccuccggcaccuacggcaccggcuccuggcccgacggcgccgacaucaaccucaugcccaucuga

SEQ ID NO: 119477 - RNA, 1410 nt, Artificial Sequence; identical to SEQ ID NO: 119475
  derived and/or modified CDS sequence (opt2) from neuraminidase__InfluenzaA__AGK63024

SEQ ID NO: 119478 - RNA, 1410 nt, Artificial Sequence; identical to SEQ ID NO: 119475
  derived and/or modified CDS sequence (opt2) from neuraminidase__InfluenzaA__AGK63026

SEQ ID NO: 119479 - RNA, 1410 nt, Artificial Sequence
  derived and/or modified CDS sequence (opt2) from neuraminidase__InfluenzaA__AGK63028
augaaccccaaccagaagaucaucaccaucggcuccgucucccucaccaucuccaccaucugcuucuucaugcagaucgccauccucaucaccaccgucacccuccacuucaagcaguacgaguucaacuccccccccaacaaccaggucaugcucugcgagcccaccaucaucgagcgcaacaagaccgagaucgucuaccucaccaacaccaccaucgagaaggagaucugccccaagcccgccgaguaccgcaacugguccaagccccagugcgacaucaccggcuucgcccccuucuccaaggacaacuccauccgccucuccgccggcggcgacaucugggucacccgcgagcccuacgucuccugcgaccccgacaagugcuaccaguucgcccucggccagggcaccacccucaacaacguccacuccaacaacaccguccgcgaccgcacccccuaccgcacccuccucaugaacgagcucggcguccccuuccaccucggcaccaagcaggucugcaucgccugguccuccuccuccugccacgacggcaaggccuggcuccacgucugcaucaccggcgacgacaagaacgccaccgccuccuucaucuacaacggccgccucgucgacuccgucgucuccugguccaaggagauccuccgcacccaggaguccgagugcgucugcaucaacggcaccugcaccgucgucaugaccgacggcuccgccuccggcaaggccgacaccaagauccucuucaucgaggagggcaaggucguccacaccuccacccucuccggcuccgcccagcacgucgaggagugcuccugcuacccccgcuaccccggcguccgcugcgucugccgcgacaacuggaagggcuccaaccgccccaucgucgacaucaacaucaaggaccacuccaucgucuccuccuacgucugcuccggccucgucggcgacaccccccgcaagaacgacuccuccuccuccucccacugccucgaccccaacaacgaggagggcggccacggcgucaagggcugggccuucgacgacggcaacgacgucuggaugggccgcaccaucaacgagaccucccgccucggcuacgagaccuucaaggucaucgagggcugguccaaccccaaguccaagcuccagaucaaccgccaggucaucgucgaccgcggcgaccgcuccggcuacuccggcaucuucuccgucgaggccaaguccugcaucauccgcugcuucuacgucgagcucauccgcggccgcaaggaggagaccgagguccucuggaccuccaacuccaucgucgucuucugcggcaccuccggcaccuacggcaccggcuccuggcccgacggcgccgacaucaaccucaugcccaucuga

SEQ ID NO: 119480 - RNA, 1410 nt, Artificial Sequence; identical to SEQ ID NO: 119474
  derived and/or modified CDS sequence (opt2) from neuraminidase__InfluenzaA__AGK63030

SEQ ID NO: 119481 - RNA, 1410 nt, Artificial Sequence
  derived and/or modified CDS sequence (opt2) from neuraminidase__InfluenzaA__AGK63032
augaaccccaaccagaagaucaucaccaucggcuccgucucccucaccaucuccaccaucugcuucuucaugcagaucgccauccucaucaccaccgucacccuccacuucaagcaguacgaguucaacuccccccccaacaaccaggucaugcucugcgagcccaccaucaucgagcgcaacaucaccgagaucgucuaccucaccaacaccaccaucgagaaggagaucugccccaagcucgccgaguaccgcaacugguccaagccccagugcgacaucaccggcuucgcccccuucuccaaggacaacuccauccgccucuccgccggcggcgacaucugggucacccgcgagcccuacgucuccugcgaccccgacaagugcuaccaguucgcccucggccagggcaccacccucaacaacguccacuccaacaacaccguccgcgaccgcacccccuaccgcacccuccucaugaacgagcucggcguccccuuccaccucggcaccaagcaggucugcauggccugguccuccuccuccugccacgacggcaaggccuggcuccacgucugcaucaccggcgacgacaagaacgccaccgccuccuucaucuacaacggcaagcucgucgacuccgucgucuccugguccaaggagauccuccgcacccaggaguccgagugcgucugcaucaacggcaccugcaccgucgucaugaccgacggcuccgccuccggcaaggccgacaccaagauccucuucaucgaggagggcaagaucguccacaccuccacccucuccggcuccgcccagcacgucgaggagugcuccugcuacccccgcuaccccggcguccgcugcgucugccgcgacaacuggaagggcuccaaccgccccaucgucgacaucaacaucaaggaccacuccaucgucuccuccuacgucugcuccggccucgucggcgacaccccccgcaagaacgacuccuccuccuccucccacugccucgaccccaacaacgaggagggcggccacggcgucaagggcugggccuucgacgacggcaacgacgucuggaugggccgcaccaucaccgagaccucccgccucggcuacgagaccuucaaggucaucgagggcugguccaaccccaaguccaagcuccagaucaaccgccaggucaucgucgaccgcggcaaccgcuccggcuacuccggcaucuucuccgucgagggcaaguccugcaucaaccgcugcuucuacgucgagcucauccgcggccgcaaggaggagaccgagguccucuggaccuccaacuccaucgucgucuucugcggcaccuccggcaccuacggcaccggcuccuggcccgacggcgccgacaucaaccucaugcccaucuga

SEQ ID NO: 119482 - RNA, 1410 nt, Artificial Sequence
  derived and/or modified CDS sequence (opt2) from neuraminidase__InfluenzaA__AGK63034
augaaccccaaccagaagaucaucaccaucggcuccgucucccucaccaucuccaccaucugcuucuucaugcagaucgccauccucaucaccaccgucacccuccacuucaagcagugcgaguucaacuccccccccaacaaccaggucaugcucugcgagcccaccaucaucgagcgcaacaucaccgagaucgucuaccucaccaacaccaccaucgagaaggagaucugccccaagcucgccgaguaccgcaacugguccaagccccagugcgacaucaccggcuucgcccccuucuccaaggacaacuccauccgccucuccgccggcggcgacaucugggucacccgcgagcccuacgucuccugcgaccccgacaagugcuaccaguucgcccucggccagggcaccacccucaacaacguccacuccaacaacaccguccgcgaccgcacccccuaccgcacccuccucaugaacgagcucggcguccccuuccaccucggcaccaagcaggucugcauggccugguccuccuccuccugccacgacggcaaggccuggcuccacgucugcaucaccggcgacgacaagaacgccaccgccuccuucaucuacaacggcaagcucgucgacuccgucgucuccugguccaaggagauccuccgcacccaggaguccgagugcgucugcaucaacggcaccugcaccgucgucaugaccgacggcuccgccuccggcaaggccgacaccaagauccucuucaucgaggagggcaagaucguccacaccuccacccucuccggcuccgcccagcacgucgaggagugcuccugcuacccccgcuaccccggcguccgcugcgucugccgcgacaacuggaagggcuccaaccgccccaucgucgacaucaacaucaagguccacuccaucgucuccuccuacgucugcuccggccucgucggcgacaccccccgcaagaacgacuccuccuccuccucccacugccucgaccccaacaacgaggagggcggccacggcgucaagggcugggccuucgacgacggcaacgacgucuggaugggccgcaccaucaacgagaccucccgccucggcuacgagaccuucaaggucaucgagggcugguccaaccccaaguccaagcuccagaucaaccgccaggucaucgucgaccgcggcgaccgcuccggcuacuccggcaucuucuccgucgagggcaaguccugcaucaaccgcugcuucuacgucgagcucauccgcggccgcaagaaggagaccgagguccucuggaccuccaacuccaucgucgucuucugcggcaccuccggcaccuacggcaccggcuccuggcccgacggcgccgacaucaaccucaugcccaucuga

SEQ ID NO: 119483 - RNA, 1410 nt, Artificial Sequence
  derived and/or modified CDS sequence (opt2) from neuraminidase__InfluenzaA__AGK63036
augaaccccaaccagaagaucaucaccaucggcuccgucucccucaccaucuccaccaucugcuucuucaugcagaucgccauccucaucaccaccgucacccuccacuucaagcaguacgaguucaacuccccccccaacaaccaggucaugcucugcgagcccaccaucaucgagcgcaacaucaccgagaucgucuaccucaccaacaccaccaucgagaaggagaucugccccaagcccgccgaguaccgcaacugguccaagccccagugcgacaucaccggcuucgcccccuucuccaaggacaacuccauccgccucuccgccggcggcgacaucugggucacccgcgagcccuacgucuccugcgaccccgacaagugcuaccaguucgcccucggccagggcaccacccucaacaacguccacuccaacaacaccguccgcgaccgcacccccuaccgcacccuccucaugaacgagcucggcguccccuuccaccucggcaccaagcaggucugcaucgccugguccuccuccuccugccacgacggcaaggccuggcuccacgucugcaucaccggcgacgacaagaacgccaccgccuccuucaucuacaacggccgccucgucgacuccgucgucuccugguccaaggagauccuccgcacccaggaguccgagugcgucugcaucaacggcaccugcaccgucgucaugaccgacggcuccgccuccggcaaggccgacaccaagauccucuucaucgaggagggcaagaucguccacaccuccacccucuccggcuccgcccagcacgucgaggagugcuccugcuacccccgcuaccccggcguccgcugcgucugccgcgacaacuggaagggcuccaaccgccccaucgucgacaucaacaucaaggaccacuccaucgucuccuccuacgucugcuccggccucgucggcgacaccccccgcaagaacgacuccuccuccuccucccacugccucgaccccaacaacgaggagggcggccacggcgucaagggcugggccuucgacgacggcaacgacgucuggaugggccgcaccaucaacgagaccucccgcuucggcuacgagaccaucaaggucaucgagggcugguccaaccccaaguccaaccuccagaucaaccgccaggucaucgucgaccgcggcaaccgcuccggcuacuccggcaucuucuccgucgagggcaaguccugcaucaaccgcugcuucuacgucgagcucauccgcggccgcaaggaggagaccgagguccucuggaccuccaacuccaucgucgucuucugcggcaccuccggcaccuacggcaccggcuccuggcccgacggcgccgacaucaaccucaugcccaucuga

SEQ ID NO: 119484 - RNA, 1410 nt, Artificial Sequence
  derived and/or modified CDS sequence (opt2) from neuraminidase__InfluenzaA__AGK63038
augaaccccaaccagaagaucaucaccaucggcuccgucucccucaccaucuccaccaucugcuucuucaugcagaucgccauccucaucaccaccgucacccuccacuucaagcaguacgaguucaacuccccccccaacaaccaggucaugcucugcgagcccaccaucaucgagcgcaacaucaccgagaucgucuaccucaccaacaccaccaucgagaaggagaucugccccaagcucgccgaguaccgcaacugguccaagccccagugcgacaucaccggcuucgcccccuucuccaaggacaacuccauccgccucuccgccggcggcgacaucugggucacccgcgagcccuacgucuccugcgaccccgacaagugcuaccaguucgcccucggccagggcaccacccucaacaacguccacuccaacaacaccguccgcgaccgcacccccuaccgcacccuccucaugaacgagcucggcguccccuuccaccucggcaccaagcaggucugcauggccugguccuccuccuccugccacgacggcaaggccuggcuccacgucugcaucaccggcgacgacaagaacgccaccgccuccuucaucuacaacggcaagcucgucgacuccgucgucuccugguccaaggagauccuccgcacccaggaguccgagugcgucugcaucaacggcaccugcaccgucgucaugaccgacggcuccgccuccggcaaggccgacaccaagauccucuucaucgaggagggcaagaucguccacaccuccacccucuccggcuccgcccagcacgucgaggagugcuccugcuacccccgcuaccccggcguccgcugcgucugccgcgacaacuggaagggcuccaaccgccccaucgucgacaucaacaucaaggaccacuccaucgucuccuccuacgucugcuccggccucgucggcgacaccccccgcaagaacgacuccuccuccuccucccacugccucgaccccaacaacgaggagggcgaccacggcgucaagggcugggccuucgacgacggcaacgacgucuggaugggccgcaccaucaacgagaccucccgccucggcuacgagaccuucaaggucaucgagggcugguccaaccccaaguccaagcuccagaucaaccgccaggucaucgucgaccgcggcaaccgcuccggcuacuccggcaucuucuccgucgaguccaaguccugcaucaaccgcugcuucuacgucgagcucauccgcggccgcaaggaggagaccgagguccucuggaccuccaacuccaucgucgucuucugcggcaccuccggcaccuacggcaccggcuccuggcccgacggcgccgacaucaaccucaugcccaucuga

SEQ ID NO: 119485 - RNA, 1410 nt, Artificial Sequence
  derived and/or modified CDS sequence (opt2) from neuraminidase__InfluenzaA__AGK63040
augaaccccaaccagaagaucaucaccaucggcuccgucucccucaccaucuccaccaucugcuucuucaugcagaucgccauccucaucaccaccgucacccuccacuucaagcagugcgaguucaacuccccccccaacaaccaggucaugcucugcgagcccaccaucaucgagcgcaacaucaccgagaucgucuaccucaccaacaccaccaucgagaaggagaucugccccaagcucgccgaguaccgcaacugguccaagccccagugcaacaucaccggcuucgcccccuucuccaaggacaacuccauccgccucuccgccggcggcgacaucugggucacccgcgagcccuacgucuccugcgaccccgacaagugcuaccaguucgcccucggccagggcaccacccucaacaacguccacuccaacaacaccguccgcgaccgcacccccuaccgcacccuccucaugaacgagcucggcguccccuuccaccucggcaccaagcaggucugcauggccugguccuccuccuccugccacgacggcaaggccuggcuccacgucugcaucaccggcgacgacaagaacgccaccgccuccuucaucuacaacggcaagcucgucgacuccgucgucuccugguccaaggagauccuccgcacccaggaguccgagugcgucugcaucaacggcaccugcaccgucgucaugaccgacggcuccgccuccggcaaggccgacaccaagauccucuucaucgaggagggcaagaucguccacaccuccacccucuccggcuccgcccagcacgucgaggagugcuccugcuacccccgcuaccccggcguccgcugcgucugccgcgacaacuggaagggcuccaaccgccccaucgucgacaucaacaucaaggaccacuccaucgucuccuccuacgucugcuccggccucgucggcgacaccccccgcaagaacgacuccuccuccuccucccacugccucgaccccaacaacgaggagggcggccacggcgucaagggcugggccuucgacgacggcaacgacgucuggaugggccgcaccaucaacgagaccucccgccucggcuacgagaccuucaaggucaucgagggcugguccaaccccaaguccaagcuccagaucaaccgccaggucaucgucgaccgcggcgaccgcuccggcuacuccggcaucuucuccgucgagggcaaguccugcaucaaccgcugcuucuacgucgagcucauccgcggccgcaaggaggagaccgagguccucuggaccuccaacuccaucgucgucuucugcggcaccuccggcaccuacggcaccggcuccuggcccgacggcgccgacaucaaccucaugcccaucuga

SEQ ID NO: 119486 - RNA, 1410 nt, Artificial Sequence
  derived and/or modified CDS sequence (opt2) from neuraminidase__InfluenzaA__AGK63042
augaaccccaaccagaagaucaucaccaucggcuccgucucccucaccaucuccaccaucugcuucuucaugcagaucgccauccucaucaccaccgucacccuccacuucaagcagugcgaguucaaccccccccccaacaaccaggucaugcucugcgagcccaccaucaucgagcgcaacaucaccgagaucgucuaccucaccaacaccaccaucgagaaggagaucugccccaagcucgccgaguaccgcaacugguccaagccccagugcgacaucaccggcuucgcccccuucuccaaggacaacuccauccgccucuccgccggcggcgacaucugggucacccgcgagcccuacgucuccugcgaccccgacaagugcuaccaguucgcccucggccagggcaccacccucaacaacguccacuccaacaacaccguccgcgaccgcacccccuaccgcacccuccucaugaacgagcucggcguccccuuccaccucggcaccaagcaggucugcauggccugguccuccuccuccugccacgacggcaaggccuggcuccacgucugcaucaccggcgacgacaagaacgccaccgccuccuucaucuacaacggcaagcucgucgacuccgucgucuccugguccaaggagauccuccgcacccaggaguccgagugcgucugcaucaacggcaccugcaccgucgucaugaccgacggcuccgccuccggcaaggccgacaccaagauccucuucaucgaggagggcaagaucguccacaccuccacccucuccggcuccgcccagcacgucgaggagugcuccugcuacccccgcuaccccggcguccgcugcgucugccgcgacaacuggaagggcuccaaccgccccaucgucgacaucaacaucaaggaccacuccaucgucuccuccuacgucugcuccggccucgucggcgacaccccccgcaagaacgacuccuccuccuccucccacugccucgaccccaacaacgaggagggcggccacggcgucaagggcugggccuucgacgacggcaacgacgucuggaugggccgcaccaucaacgagaccucccgccucggcuacgagaccuucaaggucaucgagggcugguccaaccccaaguccaagcuccagaucaaccgccaggucaucgucgaccgcggcgaccgcuccggcuacuccggcaucuucuccgucgagggcaaguccugcaucaaccgcugcuucuacgucgagcucauccgcggccgcaaggaggagaccgagguccucuggaccuccaacuccaucgucgucuucugcggcaccuccggcaccuacggcaccggcuccuggcccgacggcgccgacaucaaccucaugcccaucuga

SEQ ID NO: 119487 - RNA, 1410 nt, Artificial Sequence
  derived and/or modified CDS sequence (opt2) from neuraminidase__InfluenzaA__AGK63044
augaaccccaaccagaagaucaucaccaucggcuccgucucccucaccaucuccaccaucugcuucuucaugcagaucgccauccucaucaccaccgucacccuccacuucaagcagugcgaguucaacuccccccccaacaaccaggucaugcucugcgagcccaccaucaucgagcgcaacaucaccgagaucgucuaccucaccaacaccaccaucgagaaggagaucugccccaagcucgccgaguaccgcaacugguccaagccccagugcgacaucaccggcuucgcccccuucuccaaggacaacuccauccgccucuccgccggcggcgacaucugggucacccgcgagcccuacgucuccugcgaccccgacaagugcuaccaguucgcccucggccagggcaccacccucaacaacguccacuccaacaacaccguccgcgaccgcacccccuaccgcacccuccucaugaacgagcucggcguccccuuccaccucggcaccaagcaggucugcauggccugguccuccuccuccugccacgacggcaaggccuggcuccacgucugcaucaccggcgacgacaagaacgccaccgccuccuucaucuacaacggcaagcucgucgacuccgucgucuccugguccaaggagauccuccgcacccaggaguccgagugcgucugcaucaacggcaccugcaccgucgucaugaccgacggcuccgccuccggcaaggccgacaccaagauccucuucaucgaggagggcaagaucguccacaccuccacccucuccggcuccgcccagcacgucgaggagugcuccugcuacccccgcuaccccggcguccgcugcgucugccgcgacaacuggaagggcuccaaccgccccaucgucgacaucaacaucaaggaccacuccaucgucuccuccuacgucugcuccggccucgucggcgacaccccccgcaagaacgacuccuccuccuccucccacugccucgaccccaacaacgaggagggcggccacggcgucaagggcugggccuucgacgacggcaacgacgucuggaugggccgcaccaucaacgagaccucccgccucggcuacgagaccuucaaggucaucgagggcugguccaaccccaaguccaagcuccagaucaaccgccaggucaucgucgaccgcggcuaccgcuccggcuacuccggcaucuucuccgucgaguccaaguccugcaucaaccgcugcuucuacgucgagcuccuccgcggccgcaaggaggagaccgagguccucuggaccuccaacuccaucgucgucuucugcggcaccuccggcaccuacggcaccggcuccuggcccgacggcgccgacaucaaccucaugcccaucuga

SEQ ID NO: 119488 - RNA, 1410 nt, Artificial Sequence
  derived and/or modified CDS sequence (opt2) from neuraminidase__InfluenzaA__AGK63046
augaaccccaaccagaagaucaucaccaucggcuccgucucccucaccaucuccaccaucugcuucuucaugcagaucgccauccucaucaccaccgucacccuccacuucaagcacuacgaguucaacuccccccccaacaaccaggucaugcucugcgagcccaccaucaucgagcgcaacaucaccgagaucgucuaccucaccaacaccaccaucgagaaggagaucugccccaagcccgccgaguaccgcaacugguccaagccccagugcgacaucaccggcuucgcccccuucuccaaggacaacuccauccgccucuccgccggcggcgacaucugggucacccgcgagcccuacgucuccugcgaccccgacaagugcuaccaguucgcccucggccagggcaccacccucaacaacguccacuccaacaacaccguccgcgaccgcacccccuaccgcacccuccucaugaacgagcucggcguccccuuccaccucggcaccaagcaggucugcaucgccugguccuccuccuccugccacgacggcaaggccuggcuccacgucugcaucaccggcgacgacaagaacgccaccgccuccuucaucuacaacggccgccucgucgacuccgucgucuccugguccaaggagauccuccgcacccaggaguccgagugcgucugcaucaacggcaccugcaccgucgucaugaccgacggcuccgccuccggcaaggccgacaccaagauccucuucaucgaggagggcaagaucguccacaccuccacccucuccggcuccgcccagcacgucgaggagugcuccugcuacccccgcuaccccggcguccgcugcgucugccgcgacaacuggaagggcuccaaccgccccaucgucgacaucaacaucaaggaccacuccaucgucuccuccuacgucugcuccggccucgucggcgacaccccccgcaagaacgacuccuccuccuccucccacugccucgaccccaacaacgaggagggcggccacggcgucaagggcugggccuucgacgacggcaacgacgucuggaugggccgcaccaucaacgagaccucccgccucggcuacgagaccuucaaggucaucgagggcugguccaaccccaaguccaagcuccagaucaaccgccaggucaucgucgaccgcggcgaccgcuccggcuacuccggcaucuucuccgucgagggcaaguccugcaucaaccgcugcuucuacgucgaccucauccgcggccgcaaggaggagaccgagguccucuggaccuccaacuccaucgucgucuucugcggcaccuccggcaccuacggcaccggcuccuggcccgacggcgccgacaucaaccucaugcccaucuga

SEQ ID NO: 119489 - RNA, 1398 nt, Artificial Sequence
  derived and/or modified CDS sequence (opt2) from neuraminidase__InfluenzaA__AGK82159
augaaccccaaccagaagauccucugcaccuccgccaccgccaucaucaucggcgccaucgccguccucaucggcaucgccaaccucggccucaacaucggccuccaccucaagcccggcugcaacugcucccacucccagcccgagaccaccaacaccucccagaccaucaucaacaacuacuacaacgagaccaacaucaccaacauccagauggaggagcgcaccucccgcaacuucaacaaccucaccaagggccucugcaccaucaacuccuggcacaucuacggcaaggacaacgccguccgcaucggcgaguccuccgacguccucgucacccgcgagcccuacgucuccugcgaccccgacgagugccgcuucuacgcccucucccagggcaccaccauccgcggcaagcacuccaacgagaccauccacgaccgcucccaguaccgcgcccucaucuccuggccccucuccuccccccccaccgucuacaacucccgcgucgagugcaucggcugguccuccaccuccugccacgacggcaagucccgcauguccaucugcaucuccggccccaacaacaacgccuccgccgucgucugguacaaccgccgccccgucgccgagaucaacaccugggcccgcaacauccuccgcacccaggaguccgagugcgucugccacaacggcgucugccccgucgucuucaccgacggcuccgccaccggccccgccgacacccgcaucuacuacuucaaggagggcaagauccucaagugggagucccucaccggcaccgccaagcacaucgaggagugcuccugcuacggcgagcgcaccggcaucaccugcaccugccgcgacaacuggcagggcuccaaccgccccgucauccagaucgaccccgucgccaugacccacaccucccaguacaucugcucccccguccucaccgacaacccccgccccaacgaccccaacaucggcaagugcaacgaccccuaccccggcaacaacaacaacggcgucaagggcuucuccuaccucgacggcgccaacaccuggcucggccgcaccaucuccaccgccucccgcuccggcuacgagaugcucaagguccccaacgcccucaccgacgaccgcuccaagcccauccagggccagaccaucguccucaacgccgacugguccggcuacuccggcuccuucauggacuacugggccgagggcgacugcuaccgcgccugcuucuacgucgagcucauccgcggccgccccaaggaggacaaggucugguggaccuccaacuccaucgucuccaugugcuccuccaccgaguuccucggccaguggaacuggcccgacggcgccaagaucgaguacuuccucuga

SEQ ID NO: 119490 - RNA, 1398 nt, Artificial Sequence
  derived and/or modified CDS sequence (opt2) from neuraminidase__InfluenzaA__AGK84858
augaaccccaaccagaagauccucugcaccuccgccaccgccaucaucaucggcgccaucgccguccucaucggcaucgccaaccucggccucaacaucggccuccaccucaagcccggcugcaacugcucccacucccagcccgagaccaccaacaccucccagaccaucaucaacaacuacuacaacgagaccaacaucaccaacauccagauggaggagcgcaccucccgcaacuucaacaaccucaccaagggccucugcaccaucaacuccuggcacaucuacggcaaggacaacgccguccgcaucggcgaguccuccgacguccucgucacccgcgagcccuacgucuccugcgaccccgacgagugccgcuucuacgcccucucccagggcaccaccauccgcggcaagcacuccaacggcaccauccacgaccgcucccaguaccgcgcccucaucuccuggccccucuccuccccccccaccgucuacaacucccgcgucgagugcaucggcugguccuccaccuccugccacgacggcaagucccgcauguccaucugcaucuccggccccaacaacaacgccuccgccgucgucugguacaaccgccgccccgucgccgagaucaacaccugggcccgcaacauccuccgcacccaggaguccgagugcgucugccacaacggcgucugccccgucgucuucaccgacggcuccgccaccggccccgccgacacccgcaucuacuacuucaaggagggcaagauccucaagugggagucccucaccggcaccgccaagcacaucgaggagugcuccugcuacggcgagcgcaccggcaucaccugcaccugccgcgacaacuggcagggcuccaaccgccccgucauccagaucgaccccgucgccaugacccacaccucccaguacaucugcucccccguccucaccgacaacccccgccccaacgaccccaacaucggcaagugcaacgaccccuaccccggcaacaacaacaacggcgucaagggcuucuccuaccucgacggcgccaacaccuggcucggccgcaccaucuccaccgccucccgcuccggcuacgagaugcucaagguccccaacgcccucaccgacgaccgcuccaagcccauccagggccagaccaucguccucaacgccgacugguccggcuacuccggcuccuucauggacuacugggccgagggcgacugcuaccgcgccugcuucuacgucgagcucauccgcggccgccccaaggaggacaaggucugguggaccuccaacuccaucgucuccaugugcuccuccaccgaguuccucggccaguggaacuggcccgacggcgccaagaucgaguacuuccucuga

SEQ ID NO: 119491 - RNA, 1398 nt, Artificial Sequence
  derived and/or modified CDS sequence (opt2) from neuraminidase__InfluenzaA__AGK84861
augaaccccaaccagaagauccucugcaccuccgccaccgccaucaucaucggcgccaucgccguccucaucggcaucgccaaccucggccucaacaucggccuccaccucaagcccuccugcaacugcucccacucccagcccgagaccaccaacaccucccagaccaucaucaacaacuacuacaacgagaccaacaucaccaacauccagauggaggagcgcaccucccgcaacuucaacaaccucaccaagggccucugcaccaucaacuccuggcacaucuacggcaaggacaacgccguccgcaucggcgaguccuccgacguccucgucacccgcgagcccuacgucuccugcgaccccgacgagugccgcuucuacgcccucucccagggcaccaccauccgcggcaagcacuccaacggcaccauccacgaccgcucccaguaccgcgcccucaucuccuggccccucuccuccccccccaccgucuacaacucccgcgucgagugcaucggcugguccuccaccuccugccacgacggcaagucccgcauguccaucugcaucuccggccccaacaacaacgccuccgccgucgucugguacaaccgccgccccgucgccgagaucaacaccugggcccgcaacauccuccgcacccaggaguccgagugcgucugccacaacggcgucugccccgucgucuucaccgacggcuccgccaccggccccgccgacacccgcaucuacuacuucaaggagggcaagauccucaagugggagucccucaccggcaccgccaagcacaucgaggagugcuccugcuacggcgagcgcaccggcaucaccugcaccugccgcgacaacuggcagggcuccaaccgccccgucguccagaucgaccccgucgccaugacccacaccucccaguacaucugcucccccguccucaccgacaacccccgccccaacgaccccaacaucggcaagugcaacgaccccuaccccggcaucaacaacaacggcgucaagggcuucuccuaccucgacggcgccaacaccuggcucggccgcaccaucuccaccgccucccgcuccggcuacgagaugcucaagguccccaacgcccucaccgacgaccgcuccaagcccauccagggccagaccaucguccucaacgccgacugguccggcuacuccggcuccuucauggacuacugggccgagggcgacugcuaccgcgccugcuucuacgucgagcucauccgcggccgccccaaggaggacaaggucugguggaccuccaacuccaucgucuccaugugcuccuccaccgaguuccucggccaguggaacuggcccgacggcgccaagaucgaguacuuccucuga

SEQ ID NO: 119492 - RNA, 1398 nt, Artificial Sequence; identical to SEQ ID NO: 119490
  derived and/or modified CDS sequence (opt2) from neuraminidase__InfluenzaA__AGK84864

SEQ ID NO: 119493 - RNA, 1398 nt, Artificial Sequence
  derived and/or modified CDS sequence (opt2) from neuraminidase__InfluenzaA__AGL95090
augaaccccaaccagaagauccucugcaccuccgccaccgccaucaucaucggcgccaucgccguccucaucggcaucgccaaccucggccucaacaucggccuccaccucaagcccggcugcaacugcucccacucccagcccgagaccaccaacaccucccagaccaucaucaacaacuacuacaacgagaccaacaucaacaacauccagauggaggagcgcaccucccgcaacuucaacaaccucaccaagggccucugcaccaucaacuccuggcacaucuacggcaaggacaacgccguccgcaucggcgaguccuccgacguccucgucacccgcgagcccuacgucuccugcgaccccgacgagugccgcuucuacgcccucucccagggcaccaccauccgcggcaagcacuccaacggcaccauccacgaccgcucccaguaccgcgcccucaucuccuggccccucuccuccccccccaccgucuacaacucccgcgucgagugcaucggcugguccuccaccuccugccacgacggcaagucccgcauguccaucugcaucuccggccccaacaacaacgccuccgccgucgucugguacaaccgccgccccgucgccgagaucaacaccugggcccgcaacauccuccgcacccaggaguccgagugcgucugccacaacggcgucugccccgucgucuucaccgacggcuccgccaccggccccgccgacacccgcaucuacuacuucaaggagggcaagauccucaagugggagucccucaccggcaccgccaagcacaucgaggagugcuccugcuacggcgagcgcaccggcaucaccugcaccugcaaggacaacuggcagggcuccaaccgccccgucauccagaucgaccccgucgccaugacccacaccucccaguacaucugcucccccguccucaccgacaacccccgccccaacgaccccaacaucggcaagugcaacgaccccuaccccggcaacaacaacaacggcgucaagggcuucuccuaccucgacggcgccaacaccuggcucggccgcaccaucuccaccgccucccgcuccggcuacgagaugcucaagguccccaacgcccucaccgacgaccgcuccaagcccauccagggccagaccaucguccucaacgccgacugguccggcuacuccggcuccuucauggacuacugggccgagggcgacugcuaccgcgccugcuucuacgucgagcucauccgcggccgccccaaggaggacaaggucugguggaccuccaacuccaucgucuccaugugcuccuccaccgaguuccucggccaguggaacuggcccgacggcgccaagaucgaguacuuccucuga

SEQ ID NO: 119494 - RNA, 1413 nt, Artificial Sequence; identical to SEQ ID NO: 112668
  derived and/or modified CDS sequence (opt2) from neuraminidase__InfluenzaA__AGL96802

SEQ ID NO: 119495 - RNA, 1413 nt, Artificial Sequence; identical to SEQ ID NO: 112668
  derived and/or modified CDS sequence (opt2) from neuraminidase__InfluenzaA__AGL96807

SEQ ID NO: 119496 - RNA, 1413 nt, Artificial Sequence
  derived and/or modified CDS sequence (opt2) from neuraminidase__InfluenzaA__AGL96808
augaaccccaaccagaagaucaucaccaucggcuccaucuccaucgccaucggcaucaucucccucaugcuccagaucggcaacaucaucuccaucugggccucccacuccauccagaccggcucccagaacaacaccggcaucugcaaccagcgcaucaucaccuacgagaacuccaccugggucaaccacaccuacgucaacaucaacaacaccaacgucgucgccggcgaggacaagaccuccgucacccucgccggcaacuccucccucugcuccaucuccggcugggccaucuacaccaaggacaacuccauccgcaucggcuccaagggcgacgucuucgucauccgcgagcccuucaucuccugcucccaccucgagugccgcaccuucuuccucacccagggcgcccuccucaacgacaagcacuccaacggcaccgucaaggaccgcucccccuaccgcgcccucauguccugcccccucggcgaggcccccucccccuacaacuccaaguucgaguccgucgccugguccgccuccgccugccacgacggcaugggcuggcucaccaucggcaucuccggccccgacaacggcgccgucgccguccucaaguacaacggcaucaucaccggcaccaucaaguccuggaagaagcagauccuccgcacccaggaguccgagugcgucugcaugaacggcuccugcuucaccaucaugaccgacggccccuccaacaaggccgccuccuacaagaucuucaagaucgagaagggcaaggucaccaaguccaucgagcucaacgcccccaacuuccacuacgaggagugcuccugcuaccccgacaccggcaucgucaugugcgucugccgcgacaacuggcacggcuccaaccgccccugggucuccuucaaccagaaccucgacuaccagaucggcuacaucugcuccggcgucuucggcgacaacccccgccccgaggacggcgagggcuccugcaaccccgucaccgucgacggcgccaacggcgucaagggcuucuccuacaaguacgacaacggcgucuggaucggccgcaccaaguccaaccgccuccgcaagggcuucgagaugaucugggaccccaacggcuggaccaacaccgacuccuucuucuccgucaagcaggacgucgucgccaucaccgacugguccggcuacuccggcuccuucguccagcaccccgagcucaccggccucgacugcauccgccccugcuucugggucgagcucguccgcggccucccccgcgagaacaccaccaucuggaccuccggcuccuccaucuccuucugcggcgucaacuccgacaccgccaacugguccuggcccgacggcgccgagcuccccuucaccaucgacaaguga

SEQ ID NO: 119497 - RNA, 1413 nt, Artificial Sequence
  derived and/or modified CDS sequence (opt2) from neuraminidase__InfluenzaA__AGL96809
augaaccccaaccagaagaucaucaccaucggcuccaucuccaucgccaucggcaucaucucccucaugcuccagaucggcaacaucaucuccaucugggccucccacuccauccagaccggcucccagaacaacaccggcaucugcaaccagcgcaucaucaccuacgagaacuccaccugggucaaccacaccuacgucaacaucaacaacaccaacgucgucgccggcgaggacaagaccuccgucacccucgccggcaacuccucccucugcuccaucuccggcugggccaucuacaccaaggacaacuccauccgcaucggcuccaagggcgacgucuucgucauccgcgagcccuucaucuccugcucccaccucgagugccgcaccuucuuccucacccagggcgcccuccucaacgacaagcacuccaacggcaccgucaaggaccgcucccccuaccgcgcccucauguccugcccccucggcgaggcccccucccccuacaacuccaaguucgaguccgucgccugguccgccuccgccugccacgacggcaugggcuggcucaccaucggcaucuccggccccgacaacggcgccgucgccguccucaaguacaacggcaucaucaccggcaccaucaaguccuggaagaagcagauccuccgcacccaggaguccgagugcgucugcaugaacggcuccugcuucaccaucaugaccgacggccccuccaacaagaccgccuccuacaagaucuucaagaucgagaagggcaaggucaccaaguccaucgagcucaacgcccccaacuuccacuacgaggagugcuccugcuaccccgacaccggcaucgucaugugcgucugccgcgacaacuggcacggcuccaaccgccccugggucuccuucaaccagaaccucgacuaccagaucggcuacaucugcuccggcgucuucggcgacaacccccgccccgaggacggcgagggcuccugcaaccccgucaccgucgacggcgccaacggcgucaagggcuucuccuacaaguacgacaacggcgucuggaucggccgcaccaaguccaaccgccuccgcaagggcuucgagaugaucugggaccccaacggcuggaccaacaccgacuccgacuucuccgucaagcaggacgucgucgccaucaccgacugguccggcuacuccggcuccuucguccagcaccccgagcucaccggccucgacugcauccgccccugcuucugggucgagcucguccgcggccucccccgcgagaacaccaccaucuggaccuccggcuccuccaucuccuucugcggcgucaacuccgacaccgccaacugguccuggcccgacggcgccgagcuccccuucaccaucgacaaguga

SEQ ID NO: 119498 - RNA, 1413 nt, Artificial Sequence; identical to SEQ ID NO: 112668
  derived and/or modified CDS sequence (opt2) from neuraminidase__InfluenzaA__AGL96818

SEQ ID NO: 119499 - RNA, 1413 nt, Artificial Sequence
  derived and/or modified CDS sequence (opt2) from neuraminidase__InfluenzaA__AGL96820
augaaccccaaccagaagaucaucaccaccggcuccaucuccaucgccaucggcaucaucucccucaugcuccagaucggcaacaucaucuccaucugggccucccacuccauccagaccggcucccagaacaacaccggcaucugcaaccagcgcaucaucaccuacgagaacuccaccugggucaaccacaccuacgucaacaucaacaacaccaacgucgucgccggcgaggacaagaccuccgucacccucgccggcaacuccucccucugcuccaucuccggcugggccaucuacaccaaggacaacuccauccgcaucggcuccaagggcgacgucuucgucauccgcgagcccuucaucuccugcucccaccucgagugccgcaccuucuuccucacccagggcgcccuccucaacgacaagcacuccaacggcaccgucaaggaccgcucccccuaccgcgcccucauguccugcccccucggcgaggcccccucccccuacaacuccaaguucgaguccgucgccugguccgccuccgccugccacgacggcaugggcuggcucaccaucggcaucuccggccccgacaacggcgccgucgccguccucaaguacaacggcaucaucaccggcaccaucaaguccuggaagaagcagauccuccgcacccaggaguccgagugcgucugcaugaacggcuccugcuucaccaucaugaccgacggccccuccaacaaggccgccuccuacaagaucuucaagaucgagaagggcaaggucaccaaguccaucgagcucaacgcccccaacuuccacuacgaggagugcuccugcuaccccgacaccggcaucgucaugugcgucugccgcgacaacuggcacggcuccaaccgccccugggucuccuucaaccagaaccucgacuaccagaucggcuacaucugcuccggcgucuucggcgacaacccccgccccgaggacggcgagggcuccugcaaccccgucaccgucgacggcgccaacggcgucaagggcuucuccuacaaguacgacaacggcgucuggaucggccgcaccaaguccaaccgccuccgcaagggcuucgagaugaucugggaccccaacggcuggaccaacaccgacuccgacuucuccgucaagcaggacgucgucgccaucaccgacugguccggcuacuccggcuccuucguccagcaccccgagcucaccggccucgacugcauccgccccugcuucugggucgagcucguccgcggccucccccgcgagaacaccaccaucuggaccuccggcuccuccaucuccuucugcggcgucaacuccgacaccgccaacugguccuggcccgacggcgccgagcuccccuucaccaucgacaaguga

SEQ ID NO: 119500 - RNA, 1413 nt, Artificial Sequence
  derived and/or modified CDS sequence (opt2) from neuraminidase__InfluenzaA__AGL96821
augaaccccaaccagaagaucaucaccaucggcuccaucuccaucgccaucggcaucaucucccucaugcuccagaucggcaacaucaucuccaucugggccucccacuccauccagaccggcucccagaacaacaccggcaucugcaaccagcgcaucaucaccuacgagaacuccaccugggucaaccacaccuacgucaacaucaacaacaccaacgucgucgccggcgaggacaagaccuccgucacccucgccggcaacuccucccucugcuccaucuccggcugggccaucuacaccaaggacaacuccauccgcaucggcuccaagggcgacgucuucgucauccgcgagcccuucaucuccugcucccaccucgagugccgcaccuucuuccucacccagggcgcccuccucaacgacaagcacuccaacggcaccgucaaggaccgcucccccuaccgcgcccucauguccugcccccucggcgaggcccccucccccuacaacuccaaguucgaguccgucgccugguccgccuccgccugccacgacggcaugggcuggcucaccaucggcaucuccggccccgacaacggcgccgucgccguccucaaguacaacggcaucaucaccggcaccaucaaguccuggaagaagcagauccuccgcacccaggaguccgagugcgucugcaugaacggcuccugcuucaccaucaugaccgacggccccuccaacaaggccgccuccuacaagaucuucaagaucgagaagggcaaggucaccaaguccaucgagcucaacgcccccaacuuccacuacgaggagugcuccugcuaccccgacaccggcaucgucaugugcgucugccgcgacaacuggcacggcuccaaccgccccugggucuccuucaaccagaaccucgacuaccagaucggcuacaucugcuccggcgucuucggcgacaacccccgccccgaggacggcgagggcuccugcaaccccgucuccgucgacggcgccaacggcgucaagggcuucuccuacaaguacgacaacggcgucuggaucggccgcaccaaguccaaccgccuccgcaagggcuucgagaugaucugggaccccaacggcuggaccaacaccgacuccgacuucuccgucaagcaggacgucgucgccaucaccgacugguccggcuacuccggcuccuucguccagcaccccgagcucaccggccucgacugcauccgccccugcuucugggucgagcucguccgcggccucccccgcgagaacaccaccaucuggaccuccggcuccuccaucuccuucugcggcgucaacuccgacaccgccaacugguccuggcccgacggcgccgagcuccccuucaccaucgacaaguga

SEQ ID NO: 119501 - RNA, 1410 nt, Artificial Sequence
  derived and/or modified CDS sequence (opt2) from neuraminidase__InfluenzaA__AGN69269
augaucaccaaccagcgcaucaucaccaucggcaccgucugccucaucgucggcaucgucucccuccuccuccagaucggcaacaucgucucccucuggaucucccacuccauccagaccggcgagaagaaccacuccgagaucugcaaccagaacaccaucaccuacgagaacaacaccugggucaaccagaccuacgucaacaucuccaacaccaacaucgccgacggccagggcgucaccuccaucauccucgccggcaacuccucccucugccccaucuccggcugggccaucuacuccaaggacaacuccauccgcaucggcuccaagggcgacaucuucgucauccgcgagcccuucaucuccugcucccaccucgagugccgcaccuucuuccucacccagggcgcccuccucaacgaccgccacuccaacggcaccgucaaggaccgcucccccuaccgcacccucauguccugccccaucggcgaggcccccucccccuacaacucccgcuucgaguccgucgccugguccgccuccgccugccacgacggcaugggcuggaucaccaucggcaucuccggccccgacaacggcgccgucgccguccucaaguacaacggcaucaucaccgacaccaucaaguccuggcgcaacaagauccuccgcacccaggaguccgagugcgucugcaucaacggcuccugcuucaccaucaugaccgacggccccuccaacggccaggccuccuacaagaucuucaagauggagaagggcaagaucaucaaguccgucgagcucgacgcccccaacuaccacuacgaggagugcuccugcuaccccgacaccggcaaggucgucugcgucugccgcgacaacuggcacgccuccaaccgccccugggucuccuucgaccagaaccucgacuaccagaucggcuacaucugcuccggcgucuucggcgacaacccccgcuccaacgacggcaagggcaacugcggccccgcccucuccaacggcgccaacggcgucaagggcuucuccuuccgcuacggcaacggcgucuggaucggccgcaccaaguccaucuccucccgcuccggcuucgagaugaucugggaccccaacggcuggaccgagaccgacuccuccuucuccaugaagcaggacaucaucgcccucaccgacugguccggcuacuccggcuccuucguccagcaccccgagcucaccggcaugaacugcauccgccccugcuucugggucgagcucauccgcggccagcccaaggaguccaccaucuggaccuccggcuccuccaucuccuucugcggcgucgacuccgagaccgccuccugguccuggcccgacggcgccgaccuccccuucaccaucgacaaguga

SEQ ID NO: 119502 - RNA, 1410 nt, Artificial Sequence
  derived and/or modified CDS sequence (opt2) from neuraminidase__InfluenzaA__AGN69280
augaacaccaaccagcgcaucaucaccaucggcaccgucugccucaucgucggcaucgucucccuccuccuccagaucggcaacaucgucucccucuggaucucccacuccauccagaccggcgagaagaaccacuccgagaucugcaaccagaacaccaucaccuacgagaacaacaccugggucaaccagaccuacgucaacaucuccaacaccaacaucgccgacggccagggcgucaccuccaucauccucgccggcaacuccucccucugccccaucuccggcugggccaucuacuccaaggacaacuccauccgcaucggcuccaagggcgacaucuucgucauccgcgagcccuucaucuccugcucccaccucgagugccgcaccuucuuccucacccagggcgcccuccucaacgaccgccacuccaacggcaccgucaaggaccgcucccccuaccgcacccucauguccugccccaucggcgaggcccccucccccuacaacucccgcuucgaguccgucgccugguccgccuccgccugccacgacggcaugggcuggcucaccaucggcaucuccggccccgacaacggcgccgucgccguccucaaguacaacggcaucaucaccgacaccaucaaguccuggcgcaacaagauccuccgcacccaggaguccgagugcgucugcaucaacggcuccugcuucaccaucaugaccgacggccccuccaacggccaggccuccuacaagaucuucaagauggagaagggcaagaucaucaaguccgucgagcucgacgcccccaacuaccacuacgaggagugcuccugcuaccccgacaccggcaaggucgucugcgucugccgcgacaacuggcacgccuccaaccgccccugggucuccuucgaccagaaccucgacuaccagaucggcuacaucugcuccggcgucuucggcgacaacccccgcuccaacgacggcaagggcaacugcggccccguccucuccaacggcgccaacggcgucaagggcuucuccuuccgcuacggcaacggcgucuggaucggccgcaccaaguccaucuccucccgcuccggcuucgagaugaucugggaccccaacggcuggaccgagaccgacuccuccuucuccaugaagcaggacaucaucgcccucaccgacugguccggcuacuccggcuccuucguccagcaccccgagcucaccggcaugaacugcauccgccccugcuucugggucgagcucauccgcggccagcccaaggaguccaccaucuggaccggcggcuccuccaucuccuucugcggcgucgacuccgagaccgccuccugguccuggcccgacggcgccgaccuccccuucaccaucgacaaguga

SEQ ID NO: 119503 - RNA, 1410 nt, Artificial Sequence
  derived and/or modified CDS sequence (opt2) from neuraminidase__InfluenzaA__AGN69292
augaaccccaaccagaagaucaucaccaucggcuccaucugcaugaccaucggcaucgccucccucauccuccagaucggcaacaucaucuccaucuggaucucccacuccauccagaccgagaaccagaaccagcccgagaucugcaaccagaacgucaucaccuacgagaacaacaccugggucaaccagaccuacgucaacaucuccaacaccaacuucgucgccgagcaggccgucgccuccgucaagcucgccggcaacuccucccucugccccgucuccggcugggccaucuacuccaaggacaacuccguccgcaucggcuccaagggcgacgucuucgucauccgcgagcccuucaucuccugcucccaccucgagugccgcaccuucuuccucacccagggcgcccuccucaacgacaagcacuccaacggcaccaucaaggaccgcucccccuaccgcacccucauguccugccccaucggcgagguccccucccccuacaacucccgcuucgaguccgucgccugguccgccuccgccugccacgacggcaccuccuggcucaccaucggcaucuccggccccgacaacggcgccgucgccguccucaaguacaacggcaucaucaccgacaccaucaaguccuggcgcaagaacauccuccgcacccaggaguccgagugcgccugcgucaacggcuccugcuucaccgucaugaccgacggccccuccaacggccaggccuccuacaaggucuucaagaucgagaagggcaaggucgucaaguccgucgagcucaacgcccccaacuaccacuacgaggagugcuccugcuaccccgaguccggcgagaucaccugcgucugccgcgacaacuggcacggcuccaaccgccccugggucuccuucaaccagaaccucgaguaccagaugggcuacaucugcuccggcaucuucggcgacaacccccgccccaacgacaagaccggcuccugcggccccgucuucuccaacggcgccaacggcgucaagggcuucuccuucaaguacggcaacggcgucuggaucggccgcaccaaguccaucuccucccgcaugggcuucgagaugaucugggaccccgacggcuggaccaagaccgacgacaaguucuccgucaagcaggacaucaucggcaucaacgacugguccggcuacuccggcuccuucguccagcaccccgagcucaccggccucgacugcaugcgccccugcuucugggucgagcucauccgcggccgccccaaggagaacaccaucuggaccuccggcuccuccaucuccuucugcggcgucaacuccgacaccgucggcugguccuggcccgacggcgccgagcuccccuucaccaucgacaaguga

SEQ ID NO: 119504 - RNA, 1410 nt, Artificial Sequence
  derived and/or modified CDS sequence (opt2) from neuraminidase__InfluenzaA__AGN69316
augaaccccaaccagaagaucaucaccaucggcuccaucugcaugaccaucggcaucgccucccucauccuccagaucggcaacaucaucuccaucuggaucucccacuccauccagaccgagaaccagaaccagcccgagaucugcaaccagaacgucaucaccuacgagaacaacaccugggucaaccagaccuacgucaacaucuccaacaccaacuucgucgccgagcaggccgucgccuccgucaagcucgccggcaacuccucccucugccccgucuccggcugggccaucuacuccaaggacaacuccguccgcaucggcuccaagggcgacgucuucgucauccgcgagcccuucaucuccugcucccaccucgagugccgcaccuucuuccucacccagggcgcccuccucaacgacaagcacuccaacggcaccaucaaggaccgcucccccuaccgcacccucauguccugccccaucggcgagguccccucccccuacaacucccgcuucgaguccgucgccugguccgccuccgccugccacgacggcaccuccuggcucaccaucggcaucuccggccccgacaacggcgccgucgccguccucaaguacaacggcaucaucaccgacaccaucaaguccuggcgcaagaacauccuccgcacccaggaguccgagugcgccugcgucaacggcuccugcuucaccgucaugaccgacggccccuccaacggccaggccuccuacaaggucuucaagaucgagaagggcaaggucgucaagaccgucgagcucaacgcccccaacuaccacuacgaggagugcuccugcuaccccgaguccggcgagaucaccugcgucugccgcgacaacuggcacggcuccaaccgccccugggucuccuucaaccagaaccucgaguaccagaugggcuacaucugcuccggcaucuucggcgacaacccccgccccaacgacaagaccggcuccugcggccccgucuucuccaacggcgccaacggcgucaagggcuucuccuucaaguacggcaacggcgucuggaucggccgcaccaaguccaucuccucccgcaugggcuucgagaugaucugggaccccgacggcuggaccaagaccgacgacaaguucuccgucaagcaggacaucaucggcaucaacgacugguccggcuacuccggcuccuucguccagcaccccgagcucaccggccucgacugcaugcgccccugcuucugggucgagcucauccgcggccgccccaaggagaacaccaucuggaccuccggcuccuccaucuccuucugcggcgucaacuccgacaccgucggcugguccuggcccgacggcgccgagcuccccuucaccaucgacaaguga

SEQ ID NO: 119505 - RNA, 1410 nt, Artificial Sequence; identical to SEQ ID NO: 119504
  derived and/or modified CDS sequence (opt2) from neuraminidase__InfluenzaA__AGN69328

SEQ ID NO: 119506 - RNA, 1410 nt, Artificial Sequence
  derived and/or modified CDS sequence (opt2) from neuraminidase__InfluenzaA__AGN69340
augaaccccaaccagaagaucaucaccaucggccucaucugcaugaccaucggcaucgccucccucauccuccagaucggcaacaucaucuccaucuggaucucccacuccauccagaccgagaaccagaacaagcccgagaucugcaaccagaacgucaucaccuacgagaacaacaccugggucaaccagaccuacgucaacgucuccaacaccaacuucgucgccgagcaggccgucgccuccgucaagcucgucggcaacuccucccucugccccgucuccggcugggccaucuacuccaaggacaacuccguccgcaucggcuccaagggcgacgucuucgucauccgcgagcccuucaucuccugcucccaccucgagugccgcaccuucuuccucacccagggcgcccuccucaacgacaagcacuccaacggcaccaucaaggaccgcucccccuaccgcacccucauguccugccccaucggcgagguccccucccccuacaacucccgcuucgaguccgucgccugguccgccuccgccugccacgacggcaccuccuggcucaccaucggcaucuccggccccgacaacggcgccgucgccguccucaaguacaacggcaucaucaccgacaccaucaaguccuggcgcaagaacauccuccgcacccaggaguccgagugcgccugcgucaacggcuccugcuucaccgucaugaccgacggccccuccaacggccaggccuccuacaaggucuucaagaucgagcgcggcaaggucgucaaguccgucgagcucaacgcccccaacuaccacuacgaggagugcuccugcuaccccgaguccuccgagaucaccugcgucugccgcgacaacuggcacggcuccaaccgccccugggucuccuucaaccagaaccucgaguaccagaugggcuacaucugcuccggcgucuucggcgacaacccccgccccaacgacaagaccggcuccugcggccccgucuucuccaacggcgccaacggcgucaagggcuucuccuucaaguacggcaacggcgucuggaucggccgcaccaaguccaccuccucccgcaugggcuucgagaugaucugggaccccgacggcuggaccaagaccgacgacaaguucuccgucaagcaggacaucaucggcaucaccgacugguccggcuacuccggcuccuucguccagcaccccgagcucaccggccucgacugcaugcgccccugcuucugggucgagcucauccgcggccgccccaaggagaacaccaucuggaccuccggcuccuccaucuccuucugcggcgucaacuccgacaccgucggcugguccuggcccgacggcgccgagcuccccuucaccaucgacaaguga

SEQ ID NO: 119507 - RNA, 1410 nt, Artificial Sequence
  derived and/or modified CDS sequence (opt2) from neuraminidase__InfluenzaA__AGO00268
augaaccccaaccagaagaucaucaccaucggcuccaucugcauggucgucggcaucaucucccucauccuccagaucggcaacaucaucuccaucuggaucucccacuccauccagaccggcucccagaaccacaccggcaucugcaaccaguccaucaucaccuacaagaacuccaccugggucaaccagaccuacgucaacaucuccaacaccaacgucgucgccggcaaggacaccaccuccaugauccucgccggcaacuccucccucugccccauccgcggcugggccaucuacuccaaggacaacggcauccgcaucggcuccaagggcgacgucuucgucauccgcgagcccuucaucuccugcucccaccucgagugccgcaccuucuuccucacccagggcgcccuccucaacgacaagcacuccaacggcaccgucaaggaccgcucccccuaccgcgcccucauguccugccccgucggcgaggcccccucccccuacaacucccgcuucgaguccgucgccugguccgccuccgccugccacgacggcaugggcuggcucaccaucggcaucuccggccccgacgacggcgccgucgccguccucaaguacaacggcaucaucaccgagaccaucaaguccuggaagaagaagauccuccgcacccaggaguccgagugcgucugcgucaacggcuccugcuucaccaucaugaccgacggccccuccgacggccccgccuccuacaagaucuucaagaucgagaagggcaaggucaccaaguccaucgagcucgacgcccccaacucccacuacgaggagugcuccugcuaccccgacaccggcaaggucaugugcgucugccgcgacaacuggcacggcuccaaccgccccugggucuccuucgaccagaaccucgacuaccagaucggcuacaucugcuccggcgucuucggcgacaacccccgccccaaggacggcaagggcuccugcggccccgucuacgucgacggcgccaacggcgucaagggcuucuccuaccgcuacggcgacggcgucuggaucggccgcaccaaguccaacuccucccgccagggcuucgagaugaucugggaccccaacggcuggaccgagaccgacuccuccuucuucgucaagcaggacgucgucgccaugaccgacugguccggcuacuccggcuccuucguccagcaccccgagcucaccggccucaacugcaugcgccccugcuucugggucgagcucauccgcggccgccccaaggagaagaccaucuggaccuccggcuccuccaucuccuucugcggcgucaacuccgacaccgucgacugguccuggcccgacggcgccgagcuccccuucaccaucgacaaguga

SEQ ID NO: 119508 - RNA, 1410 nt, Artificial Sequence
  derived and/or modified CDS sequence (opt2) from neuraminidase__InfluenzaA__AGO00280
augaaccccaaccagaagaucaucaccaucggcuccaucugcauggucgucggcaucaucucccucauccuccagaucggcaacaucgucuccaucuggaucucccacuccauccagaccggcaaccagaaccacaccggcaccugcaaccaguccaucaucaccuacaagaacuccaccugggucaaccagaccuacgucaacaucuccaacaccaacgucgucgccggcaaggacaccaccuccgucauccucgccggcaacuccucccucugccccauccgcggcugggccaucuacuccaaggacaacggcguccgcaucggcuccaagggcgacgucuucgucauccgcgagcccuucaucuccugcucccaccucgagugccgcaccuucuuccucacccagggcgcccuccucaacgacaagcacuccaacggcaccgucaaggaccgcucccccuaccgcgcccucauguccugccccgucggcgaggcccccucccccuacaacucccgcuucgaguccgucgccugguccgccuccgccugccacgacggcaugggcuggcucaccaucggcaucuccggccccgacgacggcgccgucgccguccucaaguacaacggcaucaucaccgagaccaucaaguccuggcgcaaggagauccuccgcacccaggaguccgagugcgucugcgucaacggcuccugcuucaccaucaugaccgacggccccuccggcggccccgccuccuacaagaucuucaagaucgagaagggcaaggucaccaaguccaucgagcucgacgcccccaacucccacuacgaggagugcuccugcuaccccgacaccuccaaggucaugugcgucugccgcgacaacuggcacggcuccaaccgccccugggucuccuucgaccagaaccucgacuaccagaugggcuacaucugcuccggcgucuucggcgacaacccccgccccaaggacggcaagggcuccugcggccccgucuacgucgacggcgccaacggcgucaagggcuucuccuaccgcuacggcaacggcgucuggaucggccgcaccaaguccaacuccucccgccagggcuucgagaugaucugggaccccaacggcuggaccgagaccgacuccaacuucuucaugaagcaggacgucgucgccgucaccgacugguccggcuacuccggcuccuucguccagcaccccgagcucaccggccucgacugcaugcgccccugcuucugggucgagcucauccgcggccgccccaaggagaacaccaucuggaccuccggcuccuccaucuccuucugcggcgucaacuccgacaccgucgacugguccuggcccgacggcgccgagcuccccuucaccaucgacaaguga

SEQ ID NO: 119509 - RNA, 1413 nt, Artificial Sequence
  derived and/or modified CDS sequence (opt2) from neuraminidase__InfluenzaA__AGO00292
augaaccccaaccagaagaucaucaccaucggcuccaucugcaugaccaucggcaccaucucccucauccuccagaucggcaacaucaucuccaucuggaucucccacuccauccagaccggcucccagaaccacaccggcaucugcaaccagcgcaucaucaccuacgagaacaacaccugggucaaccagaccuacgucaacaucuccaacaccaacgucgucgccggcaaggacaccaccuccaugauccucgccggcaacuccucccucugccccauccgcggcugggccaucuacuccaaggacaacuccauccgcaucggcuccaagggcgacgucuucgucauccgcgagcccuucaucuccugcucccaccucgagugccgcaccuucuuccucacccagggcgcccuccucaacgacaagcacuccaacggcaccgucaaggaccgcucccccuaccgcgcccucauguccugccccaucggcgaggcccccucccccuacaacucccgcuucgaguccgucgccugguccgccuccgccugccacgacggcaugggcuggcucaccaucggcaucuccggccccgacgacggcgccgucgccguccucaaguacaacggcaucaucaccgagaucaucaaguccuggcgcaagcagauccuccgcacccaggaguccgagugcgucugcgucaacggcuccugcuucaccaucaugaccgacggccccuccgacggccccgccuccuaccgcaucuucaagaucgagaagggcaagaucaccaaguccaucgagcucgacgcccccaacucccacuacgaggagugcuccugcuaccccgacaccggcaaggucaugugcgucugccgcgacaacuggcacggcuccaaccgccccugggucuccuucaaccagaaccucgacuaccagaucggcuacaucugcuccggcgucuucggcgacaacccccgccccaaggacggcaagggcuccugcgaccccgucaacgucgacggcgccgacggcgucaagggcuucuccuaccgcuacggcgacggcgucuggaucggccgcaccaaguccaacuccucccgcaagggcuucgagaugaucugggaccccaacggcuggaccgacaccgacgacaacuuccucgucaagcaggacgucgucgccaugaccgacugguccggcuacuccggcuccuucguccagcaccccgagcucaccggccucgacugcauccgccccugcuucugggucgagcucauccgcggccgcccccgcgagaagaccaccaucuggaccuccggcuccuccaucuccuucugcggcgucaacuccgacaccgucaacugguccuggcccgacggcgccgagcuccccuucaccaucgacauguga

SEQ ID NO: 119510 - RNA, 1413 nt, Artificial Sequence
  derived and/or modified CDS sequence (opt2) from neuraminidase__InfluenzaA__AGO00304
augaaccccaaccagaagaucaucaccaucggcuccaucugcauggccaucggcaccaucucccucauccuccagaucggcaacaucaucuccaucuggaucucccacuccauccagaccggcucccagaaccacaccggcaucugcaaccagcgcaucaucaccuacgagaacaacaccugggucaaccagaccuacgucaacaucuccaacaccaacgucgucgccggcaaggacaccaccuccaugauccucgccggcaacaccucccucugccccauccgcggcugggccaucuacuccaaggacaacuccauccgcaucggcuccaagggcgacgucuucgucauccgcgagcccuucaucuccugcucccaccucgagugccgcaccuucuuccucacccagggcgcccuccucaacgacaagcacuccaacggcaccgucaaggaccgcucccccuaccgcgcccucauguccugccccaucggcgaggcccccucccccuacaacucccgcuucgaguccgucgccugguccgccuccgccugccacgacggcaugggcuggcucaccaucggcaucuccggccccgacgacggcgccgucgccguccucaaguacaacggcaucaucaccgagaucaucaaguccuggcgcaagcagauccuccgcacccaggaguccgagugcgucugcgucaacggcuccugcuucaccaucaugaccgacggccccuccaacggccccgccuccuaccgcaucuucaagaucgagaagggcaagaucaccaaguccaucgagcucgacgcccccaacucccacuacgaggagugcuccugcuaccccgacaccggcaaggucaugugcgucugccgcgacaacuggcacggcuccaaccgccccugggucuccuucaaccagaaccucgacuaccagaucggcuacaucugcuccggcgucuucggcgacaacccccgccccaaggacggcaagggcuccugcgaccccgucaacgucgacggcgccgacggcgucaagggcuucuccuaccgcuacggcaacggcgucuggaucggccgcaccaaguccaacuccucccgcaagggcuucgagaugaucugggaccccaacggcuggaccaacaccgacggcaacuucuccgucaagcaggacgucgucgccaugaccgacugguccggcuacuccggcuccuucguccagcaccccgagcucaccggccucgacugcaugcgccccugcuucugggucgagcucauccgcggccgcccccgcgagaagaccaccaucuggaccuccggcuccuccaucuccuucugcggcgucaacuccgacaccgucaacugguccuggcccgacggcgccgagcuccccuucaccaucgacaaguga

SEQ ID NO: 119511 - RNA, 1410 nt, Artificial Sequence; identical to SEQ ID NO: 118580
  derived and/or modified CDS sequence (opt2) from neuraminidase__InfluenzaA__AGO00316

SEQ ID NO: 119512 - RNA, 1410 nt, Artificial Sequence; identical to SEQ ID NO: 118024
  derived and/or modified CDS sequence (opt2) from neuraminidase__InfluenzaA__AGO00328

SEQ ID NO: 119513 - RNA, 1410 nt, Artificial Sequence; identical to SEQ ID NO: 110131
  derived and/or modified CDS sequence (opt2) from neuraminidase__InfluenzaA__AGO00340

SEQ ID NO: 119514 - RNA, 1365 nt, Artificial Sequence; identical to SEQ ID NO: 111755
  derived and/or modified CDS sequence (opt2) from neuraminidase__InfluenzaA__AGO00352

SEQ ID NO: 119515 - RNA, 1365 nt, Artificial Sequence; identical to SEQ ID NO: 111755
  derived and/or modified CDS sequence (opt2) from neuraminidase__InfluenzaA__AGO00376

SEQ ID NO: 119516 - RNA, 1365 nt, Artificial Sequence; identical to SEQ ID NO: 111755
  derived and/or modified CDS sequence (opt2) from neuraminidase__InfluenzaA__AGO00388

SEQ ID NO: 119517 - RNA, 1365 nt, Artificial Sequence; identical to SEQ ID NO: 111755
  derived and/or modified CDS sequence (opt2) from neuraminidase__InfluenzaA__AGO00400

SEQ ID NO: 119518 - RNA, 1365 nt, Artificial Sequence; identical to SEQ ID NO: 111755
  derived and/or modified CDS sequence (opt2) from neuraminidase__InfluenzaA__AGO00412

SEQ ID NO: 119519 - RNA, 1365 nt, Artificial Sequence; identical to SEQ ID NO: 111755
  derived and/or modified CDS sequence (opt2) from neuraminidase__InfluenzaA__AGO00424

SEQ ID NO: 119520 - RNA, 1365 nt, Artificial Sequence
  derived and/or modified CDS sequence (opt2) from neuraminidase__InfluenzaA__AGO00436
augaaccccaaccagaagaucaucaccaucggcuccaucugccucgucgucggccucaucucccucauccuccagaucggcaacaucaucuccaucuggaucucccacuccauccagaccggcucccagaaccacaccggcaucugcaaccagaacaucaucaccuacaagaacuccaccugggucaaggacaccaccuccgucauccucaccggcaacuccucccucugccccauccgcggcugggccaucuacuccaaggacaacuccauccgcaucggcuccaagggcgacgucuucgucauccgcgagcccuucaucuccugcucccaccucgagugccgcaccuucuuccucacccagggcgcccuccucaacgacaagcacuccuccggcaccgucaaggaccgcucccccuaccgcgcccucauguccugccccgucggcgaggcccccucccccuacaacucccgcuucgaguccgucgccugguccgccuccgccugccacgacggcaugggcuggcucaccaucggcaucuccggccccgacaacggcgccgucgccguccucaaguacaacggcaucaucaccgagaccaucaaguccuggcgcaagaagauccuccgcacccaggaguccgagugcgccugcgucaacggcuccugcuucaccaucaugaccgacggccccuccgacggccucgccuccuacaagaucuucaagaucgagaagggcaaggucaccaaguccaucgagcucaacgcccccaacuccaacuacgaggagugcuccugcuaccccgacaccggcaaggucaugugcgucugccgcgacaacuggcacggcuccaaccgccccugggucuccuucgaccagaaccucgacuaccagaucggcuacaucugcuccggcgucuucggcgacaacccccgccccgaggacggcaccggcuccugcggccccgucuacgucgacggcgccaacggcgucaagggcuucuccuaccgcuacggcaacggcgucuggaucggccgcaccaagucccacuccucccgccacggcuucgagaugaucugggaccccaacggcuggaccgagaccgacuccaaguucuccguccgccaggacgucgucgccaugaccgacugguccggcuacuccggcuccuucguccagcaccccgagcucaccggccucgacugcaugcgccccugcuucugggucgagcucauccgcggccgccccaaggagaagaccaucuggaccuccgccuccuccaucuccuucugcggcgucaacuccgacaccgucgacugguccuggcccgacggcgccgagcuccccuucuccaucgacaaguga

SEQ ID NO: 119521 - RNA, 1365 nt, Artificial Sequence
  derived and/or modified CDS sequence (opt2) from neuraminidase__InfluenzaA__AGO00448
augaaccccaaccagaagaucaucaccaucggcuccaucugccucgucgucggccucaucucccucauccuccagaucggcaacaucaucuccaucuggaucucccacuccauccagaccggcucccagaaccacaccggcaucugcaaccagaacaucaucaccuacaagaacuccaccugggucaaggacaccaccuccgucauccucaccggcaacuccucccucugccccauccgcggcugggccaucuacuccaaggacaacuccauccgcaucggcuccaagggcgacgucuucgucauccgcgagcccuucaucuccugcucccaccucgagugccgcaccuucuuccucacccagggcgcccuccucaacgacaagcacuccuccggcaccgucaaggaccgcucccccuaccgcgcccucauguccugccccgucggcgaggcccccucccccuacaacucccgcuucgaguccgucgccugguccgccuccgccugccacgacggcaugggcuggcucaccaucggcaucuccggccccgacaacggcgccgucgccguccucaaguacaacggcaucaucaccgagaccaucaaguccuggcgcaagaagauccuccgcacccaggaguccgagugcgccugcgucaacggcuccugcuucaccaucaugaccgacggccccuccgacggccucgccuccuaccgcaucuucaagaucgagaagggcaaggucaccaaguccaucgagcucaacgcccccaacucccacuacgaggagugcuccugcuaccccgacaccggcaaggucaugugcgucugccgcgacaacuggcacggcuccaaccgccccugggucuccuucgaccagaaccucgacuaccagaucggcuacaucugcuccggcgucuucggcgacaacccccgccccgaggacggcaccggcuccugcggccccgucuacgucgacggcgccaacggcgucaagggcuucuccuaccgcuacggcaacggcgucuggaucggccgcaccaagucccacuccucccgccacggcuucgagaugaucugggaccccaacggcuggaccgagaccgacuccaaguucuccguccgccaggacgucgucgccaugaccgacugguccggcuacuccggcuccuucguccagcaccccgagcucaccggccucgacugcaugcgccccugcuucugggucgagcucauccgcggccgccccaaggagaagaccaucuggaccuccgccuccuccaucuccuucugcggcgucaacuccgacaccgucgacugguccuggcccgacggcgccgagcuccccuucuccaucgacaaguga

SEQ ID NO: 119522 - RNA, 1410 nt, Artificial Sequence
  derived and/or modified CDS sequence (opt2) from neuraminidase__InfluenzaA__AGQ47722
augaacaccaaccagcgcaucaucaccaucggcaccaucugccucaucgucggcaucaucucccuccuccuccagaucggcaacaucaucucccucuggaucucccacuccauccagaccggcgagaagucccaccccgagaucugcaaccaguccgucaucaccuacgagaacaacaccugggucaaccagaccuacgucaacaucuccaacaccaacaucgccgccggccagggcgucacccccaucauccucgccggcaacuccucccucugccccaucuccggcugggccaucuacuccaaggacaacuccauccgcaucggcuccaagggcgacaucuucgucaugcgcgagcccuucaucuccugcucccaccucgagugccgcaccuucuuccucacccagggcgcccuccucaacgaccgccacuccaacggcaccgucaaggaccgcucccccuaccgcacccucauguccugccccaucggcgaggcccccucccccuacaacucccgcuucgaguccgucgccugguccgccuccgccugccacgacggcaugggcuggcucaccaucggcaucuccggccccgacaacggcgccgucgccguccucaaguacaacggcaucaucaccgacaccaucaaguccuggcgcaacaagauccuccgcacccaggaguccgagugcgucugcaucaacggcuccugcuucaccaucaugaccgacggccccuccaacggccaggccuccuacaagaucuucaagauggagaagggcaagaucaucaaguccaucgagcucgacgcccccaacuaccacuacgaggagugcuccugcuaccccgacaccggcaaggucaugugcgucugccgcgacaacuggcacgccuccaaccgccccugggucuccuucgaccagaaccucgacuaccagaucggcuacaucugcuccggcgucuucggcgacaacccccgcuccaacgacggcaagggcaacugcggccccguccucuccaacggcgccaacggcgucaagggcuucuccuuccgcuacggcaacggcgucuggaucggccgcaccaaguccaucuccucccgcuccggcuucgagauggucugggaccccaacggcuggaccgagaccgacuccuccuucuccaugaagcaggacaucaucgcccucaccgacugguccggcuacuccggcuccuucguccagcaccccgagcucaccggcaugaacugcauccgccccugcuucugggucgagcucauccgcggccagcccaaggaguccaccaucuggaccuccggcuccuccaucuccuucugcggcgucaacuccggcaccgccuccugguccuggcccgacggcgccgaccuccccuucaccaucgacaaguga

SEQ ID NO: 119523 - RNA, 1413 nt, Artificial Sequence; identical to SEQ ID NO: 112489
  derived and/or modified CDS sequence (opt2) from neuraminidase__InfluenzaA__AGQ47731

SEQ ID NO: 119524 - RNA, 1377 nt, Artificial Sequence
  derived and/or modified CDS sequence (opt2) from neuraminidase__InfluenzaA__AGQ47743
augaaccccaaccagaagaucaucaccaucggcuccaucugcauggucgucggcaucaucucccucauccuccagaucggcaacaucaucuccaucuggaucucccacuccauccagaccggcaaccagaaccacaagaacuccaccuggaugaaccagaccuacaucaacaucuccaacaccaacgucgucgccggccaggacuccaccuccgucauccucaccggcaacuccucccucugccccauccgcggcugggccaucaacuccaaggacaacggcauccgcaucggcuccaagggcgacgucuucgucauccgcgagcccuucaucuccugcucccaccucgagugccgcaccuucuuccucacccagggcgcccuccucaacgacaagcacuccaacggcaccgucaaggaccgcucccccuaccgcgcccucauguccugccccgucggcgaggcccccucccccuacaacucccgcuucgaguccgucgccugguccgccuccgccugccacgacggcaugggcuggcucaccaucggcaucuccggccccgacaacggcgccgucgccguccucaaguacaacggcaucaucaccgagaccaucaaguccuggcgcaagaagauccuccgcacccaggaguccgagugcaccugcgucaacggcuccugcuucaccaucaugaccgacggccccuccaacggccucgccuccuacaagaucuucaagaucgagaagggcaaggucaccaaguccaucgagcucaacgcccccaacucccacuacgaggagugcuccugcuaccccgacaccggcaaggucaugugcgucugccgcgacaacuggcacggcuccaaccgccccugggucuccuucgaccagaaccucgacuaccagaucggcuacaucugcuccggcgucuucggcgacaacccccgccccaaggacggcaccggcuccugcggccccgucuccgccgacggcgccaacggcgucaagggcuucuccuaccgcuacggcaacggcgucuggaucggccgcaccaaguccaacuccucccgccacggcuucgagaugaucugggaccccaacggcuggaccgagaccgacucccgcuucuccguccgccaggacgucgucgccaugaccgaccgcuccggcuacuccggcuccuucguccagcaccccgagcucaccggccucgacugcaugcgccccugcuucugggucgagcucauccgcggccgccccgaggaggagaccaucuggaccuccggcuccaucaucuccuucugcggcgucaacuccgacaccgucgacugguccuggcccgacggcgccgagcuccccuucaccaucgacaaguga

SEQ ID NO: 119525 - RNA, 1413 nt, Artificial Sequence
  derived and/or modified CDS sequence (opt2) from neuraminidase__InfluenzaA__AGQ47755
augaaccccaaccagaagaucaucaccaucggcuccaucugcauggccaucggcaccaucucccucauccuccagaucggcaacaucaucuccaucuggaucucccacuccauccagaccggcucccagaaccacaccggcaucugcaaccgccgcaucgucaccuacgagaacaacaccugggucaaccagaccuacgucaacaucuccaacaccaacgucgucgccgagaaggacaccaccuccaugauccucgccggcaacuccucccucugccccauccgcggcugggccaucuacuccaaggacaacuccauccgcaucggcuccaagggcgacgucuucgucauccgcgagcccuucaucuccugcucccaccucgagugccgcaccuucuuccucacccagggcgcccuccucaacgacaagcacuccaacggcaccgucaaggaccgcucccccuaccgcgcccucauguccugccccaucggcgaggcccccucccccuacaacucccgcuucgaguccgucgccugguccgccuccgccugccacgacggcaugggcuggcucaccaucggcaucuccggccccgacgacggcgccgucgccguccucaaguacaacggcaucaucaccgagaucaucaaguccuggcgcaagcagauccuccgcacccaggaguccgagugcgucugcgucaacggcuccugcuucaccaucaugaccgacggccccuccaacggccccgccuccuaccgcaucuucaagaucaagaagggcaagaucaccaaguccaucgagcucgacgcccccaacucccacuacgaggagugcuccugcuaccccgacaccggcaaggucaugugcgucugccgcgacaacuggcacggcuccaaccgccccugggucuccuucaaccagaaccucgacuaccagaucggcuacaucugcuccggcgucuucggcgacaacccccgccccaaggacggcaagggcuccugcgaccccgucaacgucgacggcgccgacggcgucaagggcuucuccuaccgcuacggcaacggcgucuggaucggccgcaccaaguccaccuccucccgcaagggcuucgagaugaucugggaccccaacggcuggaccgacaccgacggcaacuuccucgucaagcaggacgucgucgccaugaccgacugguccggcuacuccggcuccuucguccagcaccccgagcucaccggccucgacugcaugcgccccugcuucugggucgagcucauccgcggccgcccccgcgagaagaccaccaucuggaccuccggcuccuccaucuccuucugcggcgucaacuccgacaccgucaacugguccuggcccgacggcgccgagcuccccuucaccaucgacaaguga

SEQ ID NO: 119526 - RNA, 1410 nt, Artificial Sequence
  derived and/or modified CDS sequence (opt2) from neuraminidase__InfluenzaA__AGQ47767
augaaccccaaccagaagaucaucaccaucggcuccaucugcauggucgucggcaucaucucccucauccuccagaucggcaacaucgucuccaucuggaucucccacuccauccagaccggcaaccagaaccacaccggcaccugcgaccaguccaucaucaccuacaagaacuccaccugggucaaccagaccuacgucaacaucuccaacaccaacgucgucgccggcaaggacaccaccuccgucauccucgccggcaacuccucccucugccccauccgcggcugggccaucuacuccaaggacaacggcguccgcaucggcuccaagggcgacgucuucgucauccgcgagcccuucaucuccugcucccaccucgagugccgcaccuucuuccucacccagggcgcccuccucaacgacaagcacuccaacggcaccgucaaggaccgcucccccuaccgcgcccucauguccugccccgucggcgaggcccccucccccuacaacucccgcuucgaguccgucgccugguccgccuccgccugccacgacggcaugggcuggcucaccaucggcaucuccggccccgacgacggcgccgucgccguccucaaguacaacggcaucaucaccgagaccaucaaguccuggcgcaaggagauccuccgcacccaggaguccgagugcgucugcgucaacggcuccugcuucaccaucaugaccgacggccccuccggcggccccgccuccuacaagaucuucaagaucgagaagggcaaggucaccaaguccaucgagcucgacgcccccaacucccacuacgaggagugcuccugcuaccccgacaccuccaaggucaugugcgucugccgcgacaacuggcacggcuccaaccgccccugggucuccuucgaccagaaccucgacuaccagaugggcuacaucugcuccggcgucuucggcgacaacccccgccccaaggacggcaagggcuccugcggccccgucuacgucgacggcgccaacggcgucaagggcuucuccuacaaguacggcaacggcgucuggaucggccgcaccaaguccaacuccucccgccagggcuucgagaugaucugggaccccaacggcuggaccgagaccgacuccaacuucuucaccaagcaggacgucgucgccgucaccgacugguccggcuacuccggcuccuucguccagcaccccgagcucaccggccucgacugcaugcgccccugcuucugggucgagcucauccgcggccgccccaaggagaacaccaucuggaccuccggcuccuccaucuccuucugcggcgucaacuccgacaccgucgacugguccuggcccgacggcgccgagcuccccuucaccaucgacaaguga

SEQ ID NO: 119527 - RNA, 1410 nt, Artificial Sequence; identical to SEQ ID NO: 119508
  derived and/or modified CDS sequence (opt2) from neuraminidase__InfluenzaA__AGQ47779

SEQ ID NO: 119528 - RNA, 1413 nt, Artificial Sequence
  derived and/or modified CDS sequence (opt2) from neuraminidase__InfluenzaA__AGQ47791
augaaccccaaccagaagaucaucaccaucggcuccaucugcauggccaucggcaucaucucccucauccuccagaucggcaacaucaucuccaucugggucucccacuccauccagaccggcucccagaaccacaccggcaucugcaaccagcgcaucaucaccuacgagaacaacaccugggucaaccagacccacgucaacaucuccaacaccaacgucgucgccggcaaggacaccaccuccaugauccucgccggcaacuccucccucugccccauccgcggcugggccaucuacuccaaggacaacuccauccgcaucggcuccaagggcgacgucuucgucauccgcgagcccuucaucuccugcucccaccucgagugccgcaccuucuuccucacccagggcgcccuccucaacgacaagcacuccaacggcaccgucaaggaccgcucccccuaccgcgcccucauguccugccccaucggcgaggcccccucccccuacaacucccgcuucgaguccgucgccugguccgccuccgccugccacgacggcaugggcuggcucaccaucggcaucuccggccccgacgacggcgccgucgccguccucaaguacaacggcaucaucaccgagaccaucaaguccuggaagaagcagauccuccgcacccaggaguccgagugcgucugcgucaacggcuccugcuucaccaucaugaccgacggccccuccgacggccccgccuccuaccgcaucuucaagaucgagaagggcaagaucaccaaguccaucgagcucgacgcccccaacucccacuacgaggagugcuccugcuaccccgacaccggcaccgucaugugcgucugccgcgacaacuggcacggcuccaaccgccccugggucuccuucaaccagaaccucgacuaccagaucggcuacaucugcuccggcgucuucggcgacaacccccgccccaaggacggcaagggcuccugcgaccccgucaacgucgacggcgccgacggcgucaagggcuucuccuaccgcuacggcaacggcgucuggaucggccgcaccaaguccaacuccucccgcaagggcuucgagaugaucugggaccccaacggcuggaccgacaccgacggcaacuuccucgucaagcaggacgucgucgccaugaccgacugguccggcuacuccggcuccuucguccagcaccccgagcucaccggccucgacugcaugcgccccugcuucugggucgagcucauccgcggccgcccccgcgagaagaccaccaucuggaccuccggcuccuccaucuccuucugcggcgucaacuccgacaccgucaacugguccuggcccgacggcgccgagcuccccuucaccaucgacaaguga

SEQ ID NO: 119529 - RNA, 1410 nt, Artificial Sequence
  derived and/or modified CDS sequence (opt2) from neuraminidase__InfluenzaA__AGQ47803
augaaccccaaccagaagaucaucaccaucggcuccaucugcauggucgucggcaucaucucccucauccuccagaucggcaacaucaucuccaucuggaucucccacuccauccagaccggcucccagaaccacaccggcaucugcaaccaguccaucaucaccuacaagaacuccaccugggucaaccagaccuacgucaacaucuccaacaccaacgucgucgccggcaagggcaccaccuccgucauccucgccggcaacuccucccucugccccauccgcggcugggccaucuacuccaaggacaacggcauccgcaucggcuccaagggcgacgucuucgucauccgcgagcccuucaucuccugcucccaccucgagugccgcaccuucuuccucacccagggcgcccuccucaacgacaagcacuccaacggcaccgucaaggaccgcucccccuaccgcgcccucauguccugccccgucggcgaggcccccucccccuacaacucccgcuucgaguccgucgccugguccgccugcgccugccacgacggcaugggcuggcucaccaucggcaucuccggccccgacgacgaggccgucgccguccucaaguacaacggcaucaucaccgagaccaucaaguccuggcgcaagaagauccuccgcacccaggaguccgagugcgucugcgucaacggcuccugcuucaccaucaugaccgacggccccuccgacggccccgccuccuacaagaucuucaagaucgagaagggcaaggucaccaaguccaucgagcucgacgcccccaacucccacuacgaggagugcuccugcuaccccgacaccggcaaggucaugugcgucugccgcgacaacuggcacggcuccaaccgccccugggucuccuucgaccagaaccucgacuaccagaucggcuacaucugcuccggcgucuucggcgacaacccccgccccaaggacggcaagggcuccugcggccccgucuacgucgacggcgccaacggcgucaagggcuucuccuaccgcuacggcaacggcgucuggaucggccgcaccaaguccgacuccucccgccagggcuucgagaugaucugggaccccaacggcuggaccgagaccgacuccaacuucuucgucaagcaggacaucgucgccaugaccgacugguccggcuacuccggcuccuucguccagcaccccgagcucaccggccucgacugcaugcgccccugcuucugggucgagcucauccgcggccgccccaaggagaagaccaucuggaccuccggcuccuccaucuccuucugcggcgucaacuccgacaccgucgacugguccuggcccgacggcgccgagcuccccuucaccaucgacaaguga

SEQ ID NO: 119530 - RNA, 1368 nt, Artificial Sequence
  derived and/or modified CDS sequence (opt2) from neuraminidase__InfluenzaA__AGQ47814
augaaccccaaccagaagaucaucaccaucggcuccaucugcauggccaucggcaucaucucccucauccuccagaucggcaacaucaucuccaucugggucucccacuccauccagaccggcucccagaaccacaccggcaucugcaaccagcgcaucaucaccuacgagaacaacaccugggucaaggacaccaccuccaugacccucgccggcaacuccucccucugccccauccgcggcugggccaucuacuccaaggacaacuccauccgcaucggcuccaagggcgacgucuucgucauccgcgagcccuucaucuccugcucccaccucgagugccgcaccuucuuccucacccagggcgcccuccucaacgacaagcacuccaacggcaccgucaaggaccgcucccccuaccgcgcccucauguccugccccaucggcgaggcccccucccccuacaacucccgcuucgaguccgucgccugguccgccuccgccugccacgacggcaugggcuggcucaccaucggcaucuccggccccgacgacggcgccgucgccguccucaaguacaacggcaucaucaccgagaccaucaaguccuggaagaagcagauccuccgcacccaggaguccgagugcgucugcgucaacggcuccugcuucaccaucaugaccgacggccccuccgacggccccgccuccuaccgcaucuucaagaucgagaagggcaagaucaccaaguccaucgagcucgacgcccccaacucccacuacgaggagugcuccugcuaccccgacaccggcaccgucaugugcgucugccgcgacaacuggcacggcuccaaccgccccugggucuccuucaaccagaaccucgacuaccagaucggcuacaucugcuccggcgucuucggcgacaacccccgccccaaggacggcaagggcuccugcgaccccgucaacgucgacggcgccgacggcgucaagggcuucuccuaccgcuacggcaacggcgucuggaucggccgcaccaaguccaacuccucccgcaagggcuucgagaugaucugggaccccaacggcuggaccgacaccgacggcaacuuccucgucaagcaggacgucgucgccaugaccgacugguccggcuacuccggcuccuucguccagcaccccgagcucaccggccucgacugcaugcgccccugcuucugggucgagcucauccgcggccgcccccgcgagaagaccaccaucuggaccuccggcuccuccaucuccuucugcggcgucaacuccgacaccgucaacugguccuggcccgacggcgccgagcuccccuucaccaucgacaaguga

SEQ ID NO: 119531 - RNA, 1413 nt, Artificial Sequence; identical to SEQ ID NO: 112493
  derived and/or modified CDS sequence (opt2) from neuraminidase__InfluenzaA__AGQ47826

SEQ ID NO: 119532 - RNA, 1410 nt, Artificial Sequence
  derived and/or modified CDS sequence (opt2) from neuraminidase__InfluenzaA__AGQ47838
augaaccccaaccagaagaucaucaccaucggcuccgucucccucaccaucgccaccaucugcuuccucaugcagaucgccauccucgucaccaccgucacccuccacuucaagcaguacgagugcgacucccccgccaacaaccaggucaugcccugcgagcccaucaucaucgagcgcaacaucaccgagaucgucuaccucaccaacaccaccaucgagaaggagaucugccccaagcucgucggcuaccgcaacugguccaagccccagugcaagaucaccggcuucgcccccuucuccaaggacaacuccauccgccucuccgccggcggcgacaucugggucacccgcgagcccuacgucuccugcgaccccggcaagugcuaccaguucgcccucggccagggcaccacccucgacaacaagcacuccaacgacaccauccacgaccgcaccccccaccgcacccuccucaugaacgagcucggcguccccuuccaccucggcaccaagcaggucugcaucgccugguccuccuccuccugccacgacggcaaggccuggcuccacgucugcgucaccggcuacgacaagaacgccaccgccuccuucaucuacgacggccgccucgucgacuccaucggcuccuggucccagaacauccuccgcacccaggaguccgagugcgucugcaucaacggcaccugcaccgucgucaugaccgacggcuccgccuccggccgcgccgacaccaagauccucuucaucgaggagggcaagaucguccacaucuccccccucuccggcuccgcccagcacgucgaggagugcuccugcuacccccgcuaccccggcguccgcugcaucugccgcgacaacuggaagggcuccaaccgccccgucgucgacaucaacgucaaggacuacuccaucgacuccuccuacgucugcuccggccucgucggcgacaccccccgcaacaacgaccgcuccuccuccuccuacugccgcaaccccaacaacgagaagggcaaccacggcgucaagggcugggccuucgacgacggcaacgacgucuggaugggccgcaccaucuccgaggacucccgcuccggcuacgagaccuucaaggucaucggcggcugguccacccccaacuccaagcuccagaucaaccgccaggucaucgucgacuccgacaaccgcuccggcuacuccggcaucuucuccgucgagggcaaguccugcaucaaccgcugcuucuacgucgagcucauccgcggccgcgagcaggagacccgcgucugguggaccuccaacuccaucgucgucuucugcggcaccuccggcaccuacggcaccggcuccuggcccgacggcgccgacaucaaccucaugcccaucuga

SEQ ID NO: 119533 - RNA, 1362 nt, Artificial Sequence
  derived and/or modified CDS sequence (opt2) from neuraminidase__InfluenzaA__AGQ47850
augaaccccaaccagaagaucaucaccaucggcuccaucugcauggucgucggcaucaucucccucauccuccagaucggcaacaucaucuccaucuggaucucccacuccauccaggccggcuccuccaccugggucaaccagaccuacgucaacaucuccaacaccaacgucgucgccggccccgacgccaccuccgucauccucaccggcaacuccucccucugccccauccgcggcugggccaucuacuccaaggacaacggcauccgcaucggcuccaagggcgacaucuucgucauccgcgagcccuucaucuccugcucccaccucgagugccgcgccuucuuccucacccagggcgcccuccucaacgacaagcacuccaacggcaccgucaaggaccgcucccccuaccgcgcccucauguccugccccgucggcgaggcccccucccccuacaacucccgcuucgaguccgucgccugguccgccuccgccugccacgacggcaugggcuggcucaccaucggcaucuccggccccgacaacggcgccgucgccguccucaaguacaacggcaucaucaccgagaccaucaaguccuggcgcaagaagauccuccgcacccaggaguccgagugcgccugcgucaacggcuccugcuucaccaucaugaccgacggccccuccgacggccccgccuccuacaagaucuucaagaucgagaagggcaaggucaccaaguccaucgagcucgacgcccccaacucccacuacgaggagugcuccugcuaccccgacaccggcaaggucaugugcgucugccgcgacaacuggcacggcuccaaccgccccugggucuccuucgaccagaaccucgacuaccagaucggcuacaucugcuccggcgucuucggcgacuccccccgccccaaggacggcaccggcuccugcggccccgucuccgucgacggcgccaacggcgucaagggcuucuccuaccgcuacggcaacggcgucuggaucggccgcaccaaguccaaguccucccgccacggcuucgagaugaucugggaccccaacggcuggaccgagaccgacucccgcuucuccguccgccaggacgucgucgccaugaccgacugguccggcuacuccggcuccuucguccagcaccccgagcucaccggccucgacugcaugcgccccugcuucugggucgagcucauccgcggccagcccaaggagaagaccaucuggaccuccggcuccuccaucuccuucugcggcgucaacuccgacaccgucgacugguccuggcccgacggcgccgagcuccccuucaccaucgacaaguga

SEQ ID NO: 119534 - RNA, 1410 nt, Artificial Sequence
  derived and/or modified CDS sequence (opt2) from neuraminidase__InfluenzaA__AGQ47873
augaacaccaaccagcgcaccaucaccaucggcaccaucugccucaucgucggcaucaucucccuccuccuccagaucggcaacaucauccuccucuggaugucccacuccauccagaccggcgagaagucccaccccaaggucugcaaccaguccgucaucaccuacgagaacaacaccugggucaaccagaccuacgucaacaucuccaacaccaacaucgccgccggccagggcgucacccccaucauccucgccggcaacuccucccucugccccaucuccggcugggccaucuacuccaaggacaacuccauccgcaucggcuccaagggcgacaucuucgucaugcgcgagcccuucaucuccugcucccaccucgagugccgcaccuucuuccucacccagggcgcccuccucaacgaccgccacuccaacggcaccgucaaggaccgcucccccuaccgcacccucauguccugccccaucggcgaggcccccucccccuacaacucccgcuucgaguccgucgccugguccgccuccgccugccacgacggcaugggcuggcucaccaucggcaucuccggccccgacaacggcgccgucgccguccucaaguacaacggcaucaucaccgacaccaucaaguccuggcgcaacaagauccuccgcacccaggaguccgagugcgucugcaucaacggcuccugcuucaccaucaugaccgacggccccuccaacggccaggccuccuacaagcucuucaagauggagaagggcaagaucaucaaguccaucgagcucgacgcccccaacuaccacuacgaggagugcuccugcuaccccgacaccggcaaggucgucugcgucugccgcgacaacuggcacgccuccaaccgccccugggucuccuucgaccagaaccucgacuaccagaucggcuacaucugcuccggcgucuucggcgacaacccccgcuccaacgacggcaagggcaacugcggccccguccucuccaacggcgccaacggcgucaagggcuucuccuuccgcuacggcaacggcgucuggaucggccgcaccaaguccaucuccucccgcuccggcuucgagaugaucugggaccccaacggcuggaccgagaccgacuccuccuucuccaugaagcaggacaucaucgcccucaccgacugguccggcuacuccggcuccuucguccagcaccccgagcucaccggcaugaacugcauccgccccugcuucugggucgagcucauccgcggccagcccaaggaguccaccaucuggaccuccggcuccuccaucuccuucugcggcgucaacuccggcaccgccuccugguccuggcccgacggcgccgaccuccccuucaccaucgacaaguga

SEQ ID NO: 119535 - RNA, 1410 nt, Artificial Sequence; identical to SEQ ID NO: 113250
  derived and/or modified CDS sequence (opt2) from neuraminidase__InfluenzaA__AGQ47885

SEQ ID NO: 119536 - RNA, 1410 nt, Artificial Sequence; identical to SEQ ID NO: 118016
  derived and/or modified CDS sequence (opt2) from neuraminidase__InfluenzaA__AGQ47897

SEQ ID NO: 119537 - RNA, 1410 nt, Artificial Sequence; identical to SEQ ID NO: 110131
  derived and/or modified CDS sequence (opt2) from neuraminidase__InfluenzaA__AGQ47909

SEQ ID NO: 119538 - RNA, 1410 nt, Artificial Sequence
  derived and/or modified CDS sequence (opt2) from neuraminidase__InfluenzaA__AGQ47921
augaaccccaaccagaagaucaucaccaucggcuccgucucccucaccaucgccaccgucugcuuccucaugcagaccgccauccucgucaccaccgucacccuccacuucaagcaguacgagugcgacucccccgccuccaaccaggucaugcccugcgagcccaucaucaucgagcgcaacaucaccgagaucgucuaccucaacaacaccaccaucgagaaggagaucugccccaaggucgucgaguaccgcaacugguccaagccccagugccagaucaccggcuucgcccccuucuccaaggacaacuccauccgccucuccgccggcggcgacaucugggucacccgcgagcccuacgucuccugcgaccacggcaagugcuaccaguucgcccucggccagggcaccacccucgacaacaagcacuccaacgacaccauccacgaccgcaucccccaccgcacccuccucaugaacgagcucggcguccccuuccaccucggcacccgccaggucugcaucgccugguccuccuccuccugccacgacggcaaggccuggcuccacgucugcaucaccggcgacgacaagaacgccaccgccuccuucaucuacgacggccgccucgucgacuccaucggcuccuggucccagaacauccuccgcacccaggaguccgagugcgucugcaucaacggcaccugcaccgucgucaugaccgacggcuccgccuccggccgcgccgacacccgcauccucuucaucgaggagggcaagaucguccacaucuccccccucuccggcuccgcccagcacgucgaggagugcuccugcuacccccgcuaccccggcguccgcugcaucugccgcgacaacuggaagggcuccaaccgccccgucgucgacaucaacauggaggacuacuccaucgacuccuccuacgucugcuccggccucgucggcgacaccccccgcaacgacgaccgcuccuccaacuccaacugccgcaaccccaacaacgagcgcggcaaccagggcgucaagggcugggccuucgacaacggcgacgacgucuggaugggccgcaccaucuccaaggaccuccgcuccggcuacgagaccuucaaggucaucggcggcugguccacccccaacuccaagucccagaucaaccgccaggucaucgucgacuccgacaaccgcuccggcuacuccggcaucuucuccgucgagggcaaguccugcaucaaccgcugcuucuacgucgagcucauccgcggccgcaagcaggaggcccgcgucugguggaccuccaacuccaucgucgucuucugcggcaccuccggcaccuacggcaccggcuccuggcccgacggcgccaacaucaacuucaugcccaucuga

SEQ ID NO: 119539 - RNA, 1365 nt, Artificial Sequence
  derived and/or modified CDS sequence (opt2) from neuraminidase__InfluenzaA__AGQ47933
augaaccccaaccagaagaucaucaccaucggcuccaucugcauggucgucggccucaucucccucauccuccagaucggcaacaucaucuccaucuggaucucccacuccauccagaccggcucccagaaccacaccggcaucugcaaccagaacaucaucaccuacaagaacuccaccugggucaaggacaccaccuccgucauccucaccggcaacuccucccucugccccauccgcggcugggccaucuacuccaaggacaacuccauccgcaucggcuccaagggcgacgucuucgucauccgcgagcccuucaucuccugcucccaccucgagugccgcaccuucuuccucacccagggcgcccuccucaacgaccgccacuccaacggcaccgucaaggaccgcucccccuaccgcgcccucauguccugccccgucggcgaggcccccucccccuacaacucccgcuucgaguccgucgccugguccgccuccgccugccacgacggcaugggcuggcucaccaucggcaucuccggccccgacaacggcgccgucgccguccucaaguacaacggcaucaucaccgagaccaucaaguccuggcgcaagaagauccuccgcacccaggaguccgagugcgccugcgucaacggcuccugcuucaccaucaugaccgacggccccuccgacggccucgccuccuacaagaucuucaagaucgagaagggcaaggucaccaaguccaucgagcucaacgcccccaacucccacuacgaggagugcuccugcuaccccgacaccggcaaggucaugugcgucugccgcgacaacuggcacggcuccaaccgccccugggucuccuucgaccagaaccucgacuaccagaucggcuacaucugcuccggcgucuucggcgacaacccccgccccaaggacggcaccggcuccugcggccccgucuacgucgacggcgccaacggcgucaagggcuucuccuaccgcuacggcaacggcgucuggaucggccgcaccaagucccacuccucccgccacggcuucgagaugaucugggaccccaacggcuggaccgagaccgacuccaaguucuccguccgccaggacgucgucgccaugaccgacugguccggcuacuccggcuccuucguccagcaccccgagcucaccggccucgacugcauccgccccugcuucugggucgagcucauccgcggccgccccaaggagaagaccaucuggaccuccgccuccuccaucuccuucugcggcgucaacuccgacaccgucaacugguccuggcccgacggcgccgagcuccccuucaccaucgacaaguga

SEQ ID NO: 119540 - RNA, 1365 nt, Artificial Sequence; identical to SEQ ID NO: 111755
  derived and/or modified CDS sequence (opt2) from neuraminidase__InfluenzaA__AGQ47945

SEQ ID NO: 119541 - RNA, 1365 nt, Artificial Sequence; identical to SEQ ID NO: 111755
  derived and/or modified CDS sequence (opt2) from neuraminidase__InfluenzaA__AGQ47957

SEQ ID NO: 119542 - RNA, 1365 nt, Artificial Sequence; identical to SEQ ID NO: 111755
  derived and/or modified CDS sequence (opt2) from neuraminidase__InfluenzaA__AGQ47969

SEQ ID NO: 119543 - RNA, 1365 nt, Artificial Sequence; identical to SEQ ID NO: 111755
  derived and/or modified CDS sequence (opt2) from neuraminidase__InfluenzaA__AGQ47981

SEQ ID NO: 119544 - RNA, 1365 nt, Artificial Sequence
  derived and/or modified CDS sequence (opt2) from neuraminidase__InfluenzaA__AGQ48005
augaaccccaaccagaagaucaucaccaucggcuccaucugccucgucgucggccucaucucccucauccuccagaucggcaacaucaucuccaucuggaucucccacuccauccagaccggcucccagaaccacaccggcaucugcaaccagaacaucaucaccuacaagaacuccaccugggucaaggacaccaccuccgucauccucaccggcaacuccucccucugccccauccgcggcugggccaucuacuccaaggacaacuccauccgcaucggcuccaagggcgacgucuucgucauccgcgagcccuucaucuccugcucccaccucgagugccgcaccuucuuccucacccagggcgcccuccucaacgacaagcacuccuccggcaccgucaaggaccgcucccccuaccgcgcccucauguccugccccgucggcgaggcccccucccccuacaacucccgcuucgaguccgucgccugguccgccuccgccugccacgacggcaugggcuggcucaccaucggcaucuccggccccgacaacggcgccgucgccguccucaaguacaacggcaucaucaccgagaccaucaaguccuggcgcaagaagauccuccgcacccaggaguccgagugcgccugcgucaacggcuccugcuucaccaucaugaccgacggccccuccgacggccucgccuccuacaagaucuucaagaucgagaagggcaaggucaccaaguccaucgagcucaacgcccccaacucccacuacgaggagugcuccugcuaccccgacaccggcaaggucaugugcgucugccgcgacaacuggcacggcuccaaccgccccugggucuccuucgaccagaaccucgacuaccagaucggcuacaucugcuccggcgucuucggcgacaacccccgccccgaggacggcaccggcuccugcggccccgucuacgucgacggcgccaacggcgucaagggcuucuccuaccgcuacuccaacggcgucuggaucggccgcaccaagucccacuccucccgccacggcuucgagaugaucugggaccccaacggcuggaccgagaccgacuccaaguucuccguccgccaggacgucgucgccaugaccgacugguccggcuacuccggcuccuucguccagcaccccgagcucaccggccucgacugcaugcgccccugcuucugggucgagcucauccgcggccgccccaaggagaagaccaucuggaccuccgccuccuccaucuccuucugcggcgucaacuccgacaccgucgacugguccuggcccgacggcgccgagcuccccuucuccaucgacaaguga

SEQ ID NO: 119545 - RNA, 1365 nt, Artificial Sequence; identical to SEQ ID NO: 119544
  derived and/or modified CDS sequence (opt2) from neuraminidase__InfluenzaA__AGQ48017

SEQ ID NO: 119546 - RNA, 1365 nt, Artificial Sequence; identical to SEQ ID NO: 111755
  derived and/or modified CDS sequence (opt2) from neuraminidase__InfluenzaA__AGQ48029

SEQ ID NO: 119547 - RNA, 1365 nt, Artificial Sequence
  derived and/or modified CDS sequence (opt2) from neuraminidase__InfluenzaA__AGQ48041
augaaccccaaccagaagaucaucaccaucggcuccaucugccucgucgucggccucaucucccucauccuccagaucggcaacaucaucuccaucuggaucucccacuccauccagaccggcucccagaaccacaccggcaucugcaaccagaacaucaucaccuacaagaacuccaccuggaucaaggacaccaccuccgucauccucaccggcaacuccucccucugccccauccgcggcugggccaucuacuccaaggacaacuccauccgcaucggcuccaagggcgacgucuucgucauccgcgagcccuucaucuccugcucccaccucgagugccgcaccuucuuccucacccagggcgcccuccucaacgacaagcacuccuccggcaccgucaaggaccgcucccccuaccgcgcccucauguccugccccgucggcgaggcccccucccccuacaacucccgcuucgaguccgucgccugguccgccuccgccugccacgacggcaugggcuggcucaccaucggcaucuccggccccgacaacggcgccgucgccguccucaaguacaacggcaucaucaccgagaccaucaaguccuggcgcaagaagauccuccgcacccaggaguccgagugcgccugcgucaacggcuccugcuucaccaucaugaccgacggccccuccgacggccucgccuccuacaagaucuucaagaucgagaagggcaaggucaccaaguccaucgagcucaacgcccccaacucccacuacgaggagugcuccugcuaccccgacaccggcaaggucaugugcgucugccgcgacaacuggcacggcuccaaccgccccugggucuccuucgaccagaaccucgacuaccagaucggcuacaucugcuccggcgucuucggcgacaacccccgccccgaggacggcaccggcuccugcggccccgucuacgucgacggcgccaacggcgucaagggcuucuccuaccgcuacggcaacggcgucuggaucggccgcaccaagucccacuccucccgccacggcuucgagaugaucugggaccccaacggcuggaccgagaccgacuccaaguucuccguccgccaggacgucgucgccaugaccgacugguccggcuacuccggcuccuucguccagcaccccgagcucaccggccucgacugcaugcgccccugcuucugggucgagcucauccgcggccgccccaaggagaagaccaucuggaccuccgccuccuccaucuccuucugcggcgucaacuccgacaccgucgacugguccuggcccgacggcgccgagcuccccuucuccaucgacaaguga

SEQ ID NO: 119548 - RNA, 1365 nt, Artificial Sequence
  derived and/or modified CDS sequence (opt2) from neuraminidase__InfluenzaA__AGQ48053
augaaccccaaccagaagaucaucaccaucggcuccaucugccucgucgucggccucaucucccucauccuccagaucggcaacaucaucuccaucuggaucucccacuccauccagaccggcucccagaaccacaccggcaucugcaaccagaacaucaucaccuacaagaacuccaccuggaucaaggacaccaccuccgucauccucaccggcaacuccucccucugccccauccgcggcugggccaucuacuccaaggacaacuccauccgcaucggcuccaagggcgacgucuucgucauccgcgagcccuucaucuccugcucccaccucgagugccgcaccuucuuccucacccagggcgcccuccucaacgacaagcacuccuccggcaccgucaaggaccgcucccccuaccgcgcccucauguccugccccgucggcgaggcccccucccccuacaacucccgcuucgaguccgucgccugguccgccuccgccugccacgacggcaugggcuggcucaccaucggcaucuccggccccgacaacggcgccgucgccguccucaaguacaacggcaucaucaccgagaccaucaaguccuggcgcaagaagauccuccgcacccaggaguccgagugcgccugcgucaacggcuccugcuucaccaucaugaccgacggccccuccgacggccucgccuccuacaagaucuucaagaucgagaagggcaaggucaccaaguccaucgagcucaacgcccccaacucccacuacgaggagugcuccugcuaccccgacaccggcaaggucaugugcgucugccgcgacaacuggcacggcuccaaccgccccugggucuccuucgaccagaaccucgacuaccagaucggcuacaucugcuccggcgucuucggcgacaacccccgccccgaggacggcaccggcuccugcggccccgucuacgucgacggcgccaacggcgucaagggcuucuccuaccgcuacggcaacggcgucuggaucggccgcaccaagucccacuccucccgccacggcuucgagaugaucugggaccccaacggcuggaccgagaccgacuccaaguucuccguccgccaggacgucgucgccauggccgacugguccggcuacuccggcuccuucguccagcaccccgagcucaccggccucgacugcaugcgccccugcuucugggucgagcucauccgcggccgccccaaggagaagaccaucuggaccuccgccuccuccaucuccuucugcggcgucaacuccgacaccgucgacugguccuggcccgacggcgccgagcuccccuucuccaucgacaaguga

SEQ ID NO: 119549 - RNA, 1410 nt, Artificial Sequence
  derived and/or modified CDS sequence (opt2) from neuraminidase__InfluenzaA__AGQ81707
augaaccccaaccagaagaucaucaccaucggcuccaucugcauggucaucggcaucgccucccucaugcuccagaucggcaacaugaucuccaucugggucucccacuccauccagaccggcaaccaguaccagcccgagcccugcaaccaguccaucaucaccuacgagaacaacaccugggucaaccagaccuacgucaacaucuccaacaccaacuuccucaccgagcaggccgucaccuccgucgcccucgccggcaacuccucccucugccccaucuccggcugggccaucuacuccaaggacaacggcauccgcaucggcuccaagggcgacgucuucgucauccgcgagcccuucaucuccugcucccaccucgagugccgcaccuucuuccucacccagggcgcccuccucaacgacaagcacuccaacggcaccgucaaggaccgcucccccuaccgcacccucauguccugccccgucggcgaggcccccucccccuacaacucccgcuucgaguccgucgccugguccgccuccgccugccacgacggcaucuccuggcucaccaucggcaucuccggccccgacaacggcgccgucgccguccucaaguacaacggcaucaucaccgacaccaucaaguccuggcgcaacaacauccuccgcacccaggaguccgagugcgccugcgucaacggcuccugcuucaccgucaugaccgacggccccuccaacggccaggccuccuacaagaucuucaagaucgagaagggcaaggucgucaaguccgucgagcucaacgcccccaacuaccacuacgaggagugcuccugcuaccccgacgccggcaagaucaugugcgucugccgcgacaacuggcacggcuccaaccgccccugggucuccuucaaccagaaccucgaguaccagaucggcuacaucugcuccggcgucuucggcgacaacccccgccccaacgacggcaccggcuccugcggccccgucuccuccaacggcgccuacggcgucaagggcuucuccuucaaguacggcaacggcgucuggaucggccgcaccaaguccaccuccucccgcuccggcuucgagaugaucugggaccccaacggcuggaccgagaccgacuccuccuucuccgucaagcaggacaucgucgccaucaccgacugguccggcuacuccggcuccuucguccagcaccccgagcucaccggccucgacugcaugcgccccugcuucugggucgagcucauccgcggccgccccaaggagaacaccaucuggaccuccggcuccuccaucuccuucugcggcgucgacuccgacaccgucggcugguccuggcccgacggcgccgagcuccccuucaccaucgacaaguga

SEQ ID NO: 119550 - RNA, 1410 nt, Artificial Sequence
  derived and/or modified CDS sequence (opt2) from neuraminidase__InfluenzaA__AGQ81715
augaaccccaaccagaagaucaucgccaucggcuccgucucccucaccaucgccaccaucugccuccucaugcagaucgccauccucgucaccaccaugacccuccacuucaagcacaacgagugcaccaacuccuccaacaaccaggccguccccugcggccccaucaucaucgagcgcaacgucaccgagaucguccaccucaacuccaccacccucgagaaggagaucugccccaaggccgccggcuaccgcgacugguccaagccccagugccagaucaccggcuucgcccccuucuccaaggacaacuccauccgccucuccgccuccggcgacaucugggucacccgcgagcccuacgucuccugcggccucggcaagugcuaccaguucgcccucggccagggcaccacccucgacaaccgccacuccaacggcaccucccacgaccgcacccccuaccgcacccuccucaugaacgagcucggcguccccuuccaccucgccaccaagcaggucugcaucgccugguccuccuccuccugccacgacggcaaggccuggcuccacgucugcgucaccggcgacgaccgcaacgccaccgccuccaucaucuacgacggcauccucgucgacuccaucggcuccugguccaagaacauccuccgcacccaggaguccgagugcgucugcaucaacggcaccugcaccgucgucaugaccgacggcuccgccuccggcaaggccgacacccgcauccucuucauccgcgagggcaagaucguccacaucuccccccucuccggcuccgcccagcacgucgaggagugcuccugcuacccccaguaccccgagguccgcugcgucugccgcgacaacuggcgcggcuccaaccgccccguccucuacaucaacauggccgacuacuccaucgacuccggcuacgucugcuccggccucgucggcgacaccccccgcaacgacgacaucuccuccuccuccaacugcaaggaccccaacaacgagcgcggcgcccccggcgucaagggcugggccuucgacuccggcaacgacaucuggaugggccgcaccaucgagaaggacucccgcuccggcuacgagaccuuccgcgucaucggcggcuggaacaccgccaacuccaagucccagaccucccgccaggucaucgucgacuccggcaacuccuccggcuacuccggcaucuucuccaucgagggcaaguccugcaucaaccgcugcuucuacgucgagcucauccgcggccgccccaaggagacccgcgucugguggaccuccaacuccaucaucgucuucugcggcaccuccggcaccuacggcaccggcuccuggcccgacggcgccaacaucaacuucauggccaucuga

SEQ ID NO: 119551 - RNA, 1410 nt, Artificial Sequence
  derived and/or modified CDS sequence (opt2) from neuraminidase__InfluenzaA__AGQ81717
augaaccccaaccagaagaucaucgccaucggcuccgucucccucaccaucgccaccaucugccuccucaugcagaucgccauccucgucaccaccaugaccccccacuucaagcacgacgagugcaccaacuccuccaacaaccaggccguccccugcggccccaucaucaucgagcgcaacgucaccgagaucguccacaucaacuccaccauccucgagaaggagaucugccccaaggccgccggcuaccgcaacugguccaagccccagugccagaucaucggcuucgcccccuucuccaaggacaacuccauccgccucuccgccuccggcgacaucugggucacccgcgagcccuacgucuccugcggccucggcaagugcuaccaguucgcccucggccagggcaccacccucgacaaccgccacuccaacggcaccucccacgaccgcaccccccaccgcacccuccucaugaacgagcucggcguccccuuccaccucgccaccaagcaggucugcaucgccugguccuccuccuccugccacgacggcaaggccuggcuccacgucugcgucaccggcgacgaccgcaacgccaccgccuccaucaucuacgacggcaugcucgucgacuccaucggcuccugguccaagaacauccuccgcacccaggaguccgagugcgucugcaucaacggcaccugcaccgucgucaugaccgacggcuccgccuccggcaaggccgacacccgcauccucuucauccgcgagggcaagaucguccacaucuccccccucuccggcuccgcccagcacgucgaggagugcuccugcuacccccaguaccccgagguccgcugcgucugccgcgacaacuggcgcggcuccaaccgccccguccucuacaucaacauggccgacuacuccaucgacuccggcuacgucugcuccggccucgucggcgacaccccccgcaacgacgacaucuccuccuccuccaacugcaaggaccccaacaacgagcgcggcgcccccggcgucaagggcugggccuucgacuccggcaacgacaucuggaugggccgcaccaucgagaaggacucccgcuccggcuacgagaccuuccgcgucaucggcggcuggaacaccgccaacuccaagucccagaccucccgccaggucaucgucgacuccgacaacuccuccggcuacuccggcaucuucuccgucgagggcaaguccugcaucaaccgcugcuucuacgucgagcucauccgcggccgccccaaggagacccgcgucugguggaccuccaacuccaucaucgucuucugcggcaccuccggcaccuacggcaccggcuccuggcccgacggcgccaacaucaacuucauggccaucuga

SEQ ID NO: 119552 - RNA, 1410 nt, Artificial Sequence
  derived and/or modified CDS sequence (opt2) from neuraminidase__InfluenzaA__AGQ81718
augaaccccaaccagaagaucaucgccaucggcuccgucucccucaccaucgccaccaucugccuccucaugcagaucgccauccucgucaccaccaugacccuccacuucaagcacaacgagugcaccaacuccuccaacaaccaggccguccccugcggccccaucaucaucgagcgcaaccucaccgagaucguccaccucaacuccaccauccucgagaaggagaucugccccaaggccgccggcuaccgcaacugguccaagccccagugccagaucaccggcuucgcccccuucuccaaggacaacuccauccgccucuccgccuccggcgacaucugggucacccgcgagcccuacgucuccugcggccucggcaagugcuaccaguucgcccucggccagggcaccacccucgacaaccgccacuccaacggcaccucccacgaccgcaccccccaccgcacccuccucaugaacgagcucggcguccccuuccaccucuccaccaagcaggucugcaucgccugguccuccuccuccugccacgacggcaaggccuggcuccacgucugcgucaccggcgacgaccgcaacgccaccgccuccaucaucuacgacggcauccucgucgacuccaucgucuccugguccaagaacauccuccgcacccaggaguccgagugcgucugcaucaacggcaccugcaccgucgucaugaccgacggcuccgccuccggcaaggccgacacccgcauccucuucauccgcgagggcaagaucguccacaucuccccccucuccggcuccgcccagcacgucgaggagugcuccugcuacccccgcuaccccgagguccgcugcgucugccgcgacaacuggcgcggcuccaaccgccccguccucuacaucaacauggccgacuacuccaucgacuccggcuacgucugcuccggccucgucggcgacaccccccgcaacgacgacaccuccuccuccuccaacugccgcgaccccaacaacgagcgcggcgcccccggcgucaagggcugggccuucgacuccggcaacgacaucuggaugggccgcaccaucgagaaggacucccgcuccggcuacgagaccuuccgcgucaucggcggcuggaacaccgccaacuccaagucccagaccucccgccaggucaucgucgacuccgacaacuccuccggcuacuccggcgucuucuccgucgagggcaaguccugcaucaaccgcugcuucuacgucgagcucauccgcggccgccccaaggagacccgcgucugguggaccuccaacuccaucaucgucuucugcggcaccuccggcaccuacggcaccggcuccuggcccgacggcgccaacaucaacuucauggccaucuga

SEQ ID NO: 119553 - RNA, 1410 nt, Artificial Sequence
  derived and/or modified CDS sequence (opt2) from neuraminidase__InfluenzaA__AGQ81719
augaaccccaaccagaagaucaucgccaucggcuccgucucccucaccaucgccaccaucugccuccucaugcagaucgccauccucgucaccaccaugacccuccacuucaagcacaacgagugcaccaacuccuccaacaaccaggccguccccugcggccccaucaucaucgagcgcaacgucaccgagaucguccaccucaacuccaccacccucgagaaggagaucugcaccaaggccgccggcuaccgcgacugguccaagccccagugccagaucaccggcuucgcccccuucuccaaggacaacuccauccgccucuccgccuccggcgacaucugggucacccgcgagcccuacgucuccugcggccucggcaagugcuaccaguucgcccucggccagggcaccacccucgacaaccgccacuccaacggcaccacccacgaccgcaccccccaccgcacccuccucaugaacgagcucggcguccccuuccaccucgccaccaagcaggucugcaucgccugguccuccuccuccugccacgacggcaaggccuggcuccacgucugcgucaccggcgacgaccgcaacgccaccgccuccaucaucuacgacggcauccucgucgacuccaucggcuccugguccaagaacauccuccgcacccaggaguccgagugcgucugcaucaacggcaccugcaccgucgucaugaccgacggcuccgccuccggcaaggccgacacccgcauccucuucauccgcgagggcaagaucguccacaucuccccccucuccggcuccgcccagcacgucgaggagugcuccugcuacccccaguaccccgagguccgcugcgucugccgcgacaacuggcgcggcuccaaccgccccguccucuacaucaacauggccgacuacuccaucgacuccggcuacgucugcuccggccucgucggcgacaccccccgcaacgacgacaucuccuccaacuccaacugcaaggaccccaacaacgaguccggcgcccccggcgucaagggcugggccuucgacuccggcaacgacaucuggaugggccgcaccaucgagaaggacucccgcuccggcuacgagaccuuccgcgucaucggcggcuggaacaccgccaacuccaagucccagaccucccgccaggucaucgucgacuccgacaacuccuccggcuacuccggcaucuucuccaucgagggcaaguccugcaucaaccgcugcuucuacgucgagcucauccgcggccgccccaaggagacccgcgucugguggaccuccaacuccaucaucgucuucugcggcaccuccggcaccuacggcaccggcuccuggcccgacggcgccaacaucaacuucauggccaucuga

SEQ ID NO: 119554 - RNA, 1410 nt, Artificial Sequence
  derived and/or modified CDS sequence (opt2) from neuraminidase__InfluenzaA__AGQ81722
augaaccccaaccagaagaucaucgccaucggcuccgucucccucaccaucgccaccaucugccuccucaugcagaucgccauccucgucaccaccaugaccccccacuucaagcacgacgagugcaccaacuccuccaacaaccaggccguccccugcggccccaucaucaucgagcgcaacgucaccgagaucguccacaucaacuccaccauccucgagaagggcaucugccccaaggccgccggcuaccgcaacugguccaagccccagugccagaucaucggcuucgcccccuucuccaaggacaacuccauccgccucuccgccuccggcgacaucugggucacccgcgagcccuacgucuccugcggccucggcaagugcuaccaguucgcccucggccagggcaccacccucgacaaccgccacuccaacggcaccucccacgaccgcaccccccaccgcacccuccucaugaacgagcucggcguccccuuccaccucgccaccaagcaggucugcaucgccugguccuccuccuccugccacgacggcaaggccuggcuccacgucugcgucaccggcgacgaccgcaacgccaccgccuccaucaucuacgacggcaugcucgucgacuccaucggcuccugguccaagaacauccuccgcacccaggaguccgagugcgucugcaucaacggcaccugcaccgucgucaugaccgacggcuccgccuccggcaaggccgacacccgcauccucuucauccgcgagggcaagaucguccacaucuccccccucuccggcuccgcccagcacgucgaggagugcuccugcuacccccaguaccccgagguccgcugcgucugccgcgacaacuggcgcggcuccaaccgccccguccucuacaucaacauggccgacuacuccaucgacuccggcuacgucugcuccggccucgucggcgacaccccccgcaacgacgacaccuccuccuccuccaacugcaaggaccccaacaacgagcgcggcgcccccggcgucaagggcugggccuucgacuccggcaacgacaucuggaugggccgcaccaucgagaaggacucccgcuccggcuacgagaccuuccgcgucaucggcggcuggaacaccgccaacuccaagucccagaccucccgccaggucaucgucgacuccgacaacuccuccggcuacuccggcaucuucuccgucgagggcaaguccugcaucaaccgcugcuucuacgucgagcucauccgcggccgccccaaggagacccgcgucugguggaccuccaacuccaucaucgucuucugcggcaccuccggcaccuacggcaccggcuccuggcccgacggcgccaacaucaacuucauggccaucuga

SEQ ID NO: 119555 - RNA, 1410 nt, Artificial Sequence
  derived and/or modified CDS sequence (opt2) from neuraminidase__InfluenzaA__AGQ81724
augaaccccaaccagaagaucaucgccaucggcuccgucucccucaccaucgccaccaucugccuccucaugcagaucgccauccucgucaccaccaugacccuccacuucaagcacaacgagugcuccaacuccuccaacaaccaggccguccccugcggccccaucaucaucgagcgcaacgucaccgagaucguccaccucaacuccaccacccucgagaaggagaucugccccaaggccgccggcuaccgcgacugguccaagccccagugccagaucaccggcuucgcccccuucuccaaggacaacuccauccgccucuccgccuccggcgacaucugggucacccgcgagcccuacgucuccugcggccucggcaagugcuaccaguucgcccucggccagggcaccacccucgacaaccgccacuccaacggcaccucccacgaccgcaccccccaccgcacccuccucaugaacgagcucggcguccccuuccaccucgccaccaagcaggucugcaucgccugguccuccuccuccugccacgacggcaaggccuggcuccacgucugcgucaccggcgacgaccgcaacgccaccgccuccaucaucuacgacggcauccucgucgacuccaucggcuccugguccaagaacauccuccgcacccaggaguccgagugcgucugcaucaacggcaccugcaccgucgucaugaccgacggcuccgccuccggcaaggccgacacccgcauccucuucauccgcgagggcaagaucguccacaucuccccccucuccggcuccgcccagcacgucgaggagugcuccugcuacccccaguaccccgagguccgcugcgucugccgcgacaacuggcgcggcuccaaccgccccguccucuacaucaacauggaggacuacuccaucgacuccggcuacgucugcuccggccucgucggcgacaccccccgcaacgacgacaucuccuccuccuccaacugcaaggaccccaacaacgagcgcggcgcccccggcgucaagggcugggccuucgacuccggcaacgaccucuggaugggccgcaccaucgagaaggacucccgcuccggcuacgagaccuuccgcgucaucggcggcuggaacaccgccaacuccaagucccagaccucccgccaggucaucgucgacuccgacaacuccuccggcuacuccggcaucuucuccgucgagggcaaguccugcaucaaccgcugcuucuacgucgagcucauccgcggccgccccaaggagacccgcgucugguggaccuccaacuccaucaucgucuucugcggcaccuccggcaccuacggcaccggcuccuggcccgacggcgccaacaucaacuucauggccaucuga

SEQ ID NO: 119556 - RNA, 1410 nt, Artificial Sequence
  derived and/or modified CDS sequence (opt2) from neuraminidase__InfluenzaA__AGQ81726
augaaccccaaccagaagaucaucgccaucggcuccgucucccucaccaucgccaccaucugccuccucaugcagaucgccauccucgucaccaccaugacccuccacuucaagcacaacgagugcuccaacuccuccaacaaccaggccguccccugcggccccaucaucaucgagcgcaacaucaccgagaucguccaccucaacuccaccacccucgagaaggagaucugccccaaggccgccggcuaccgcgacugguccaagccccagugccagaucaccggcuucgcccccuucuccaaggacaacuccauccgccucuccgccuccggcgacaucugggucacccgcgagcccuacgucuccugcggccucggcaagugcuaccaguucgcccucggccagggcaccacccucgacaaccgccacuccaacggcaccucccacgaccgcaccccccaccgcacccuccucaugaacgagcucggcguccccuuccaccucgccaccaagcaggucugcaucgccugguccuccuccuccugccacgacggcaaggccuggcuccacgucugcgucaccggcgacgaccgcaacgccaccgccuccaucaucuacgacggcauccucgucgacuccaucggcuccugguccaagaacauccuccgcacccaggaguccgagugcgucugcaucaagcgcaccugcaccgucgucaugaccgacggcuccgccuccggcaaggccgacacccgcauccucuucauccgcgagggcaagaucguccacaucuccccccucuccggcuccgcccagcacgucgaggagugcuccugcuacccccaguaccccgagguccgcugcgucugccgcgacaacuggcgcggcuccaaccgccccguccucuacaucaacauggccgacuacuccaucgacuccggcuacgucugcuccggccucgucggcgacaccccccgcaacgacgacaucuccuccuccuccaacugcaaggaccccaacaacgagcgcggcgcccccggcgucaagggcugggccuucgacuccggcaacgaccucuggaugggccgcaccaucgagaaggagucccgcuccggcuacgagaccuuccgcgucaucggcggcuggaacaccgccaacuccaagucccagaccucccgccaggucaucgucgacuccgacaacuccuccggcuacuccggcaucuucuccgucgagggcaaguccugcaucaaccgcugcuucuacgucgagcucauccgcggccgccccaaggagacccgcgucugguggaccuccaacuccaucaucgucuucugcggcaccuccggcaccuacggcaccggcuccuggcccgacggcgccaacaucaacuucauggccaucuga

SEQ ID NO: 119557 - RNA, 1410 nt, Artificial Sequence
  derived and/or modified CDS sequence (opt2) from neuraminidase__InfluenzaA__AGQ81727
augaaccccaaccagaagaucaucgccaucggcuccgucucccucaccaucgccaccaucugccuccucaugcaggucgccauccucgucaccaccaugacccuccacuucaagcacaacgagugcuccaacuccuccaacaaccaggccguccccugcggccccaucaucaucgagcgcaacaucaccgagaucguccaccucaacuccaccacccucgagaaggagaucugccccaaggccgccggcuaccgcgacugguccaagccccagugccagaucaccggcuucgcccccuucuccaaggacaacuccauccgccucuccgccuccggcgacaucugggucacccgcgagcccuacgucuccugcggccucggcaagugcuaccaguucgcccucggccagggcaccacccucgacaaccgccacuccaacggcaccucccacgaccgcaccccccaccgcacccuccucaugaacgagcucggcguccccuuccaccucgccaccaagcaggucugcaucgccugguccuccuccuccugccacgacggccgcgccuggcuccacgucugcgucaccggcgacgaccgcaacgccaccgccuccaucaucuacgacggcauccucgucgacuccaucggcuccugguccaagaacauccuccgcacccaggaguccgagugcgucugcaucaacggcaccugcaccgucgucaugaccgacggcuccgccuccggcaaggccgacacccgcauccucuucauccgcgagggcaagaucguccacaucuccccccucuccggcuccgcccagcacgucgaggagugcuccugcuacccccaguaccccgagguccgcugcgucugccgcgacaacuggcgcggcuccaaccgccccguccucuacaucaacauggccgacuacuccaucgacuccggcuacgucugcuccggccucgucggcgacaccccccgcaacgacgacaucuccuccuccuccaacugcaaggaccccaacaacgagcgcggcgcccccggcgucaagggcugggccuucgacuccggcaacgaccucuggaugggccgcaccaucgagaaggagucccgcuccggcuacgagaccuuccgcgucaucggcggcuggaacaccgccaacuccaagucccagaccucccgccaggucaucgucgacuccgacaacuccuccggcuacuccggcaucuucuccgucgagggcaaguccugcaucaaccgcugcuucuacgucgagcucauccgcggccgccccaaggagacccgcgucugguggaccuccaacuccaucaucgucuucugcggcaccuccggcaccuacggcaccggcuccuggcccgacggcgccaacaucaacuucaugcccaucuga

SEQ ID NO: 119558 - RNA, 1410 nt, Artificial Sequence
  derived and/or modified CDS sequence (opt2) from neuraminidase__InfluenzaA__AGQ81728
augaaccccaaccagaagaucgucgccaucggcuccgucucccucaccaucgccaccaugugccuccucaugcagaucgcccucuucgccaccaccaugacccuccacuucaagcagaccggcuccaccaacuccuccgacaaccaggccguccccugcggccccaucaucaucgagcgcaacaucaccgagaucguccaccucaacuccaccacccucgagaaggagaccugccccaaguccgccggcuaccgcaacugguccaagccccagugccagaucaccggcuucgcccccuucuccaaggacaacuccauccgccucuccgccggcggcgacaucugggucacccgcgagcccuacgucuccugcggccucggcaagugcuaccaguucgcccucggccagggcaccacccucgacaacaagcacuccaacggcaccaccuacgaccgcaccccccaccgcacccuccucaugaacgagcucggcguccccuuccaccucgccaccaagcaggucugcaucgccugguccuccuccuccugccacgacggcaaggccuggcuccacgucugcgucaccggcgacgacaagaacgccaccgccuccaucaucuacgacggcauccucgucgacuccaucgccuccugguccaagaacauccuccgcacccaggaguccgagugcgucugcaucaacggcaccugcaccgucgucaugaccgacggcuccgccuccggccgcgccgacacccgcauccucuucauccgcgagggcaagaucguccacaucuccccccucuccggcuccgcccagcacgucgaggagugcuccugcuacccccgcuaccccgagguccgcugcgucugccgcgacaacuggaagggcuccaaccgccccguccucuacaucaacauggccgacuacuccaucgacuccuccuacgucugcuccggcaucgucggcgacaccccccgcaacgacgaccgcuccuccuccuccaacugccgcgaccccaacaacgagaucggcgcccccggcgucaagggcugggccuucgacuccggcaacgacaucuggaugggccgcaccaucgagaaggacucccgcuccggcuacgagaccuuccgcgucaucggcggcugguccaccgccaacuccaagucccagaucaaccgccaggucaucgucgaccgcgacaacuccuccggcuacuccggcaucuucuccgucgagggcaaguccugcaucaaccgcugcuucuacgucgagcucauccgcggccgccccaaggagaaccgcgucugguggaccuccaacuccaucaucgucuucugcggcaccuccggcaccuacggcaccggcuccuggcccgacggcgccaacaucaaccucaugcccaucuga

SEQ ID NO: 119559 - RNA, 1410 nt, Artificial Sequence
  derived and/or modified CDS sequence (opt2) from neuraminidase__InfluenzaA__AGQ81729
augaaccccaaccagaagaucaucgccaucggcuccgucucccucaccaucgccaccaucugccuccucaugcagaucgccauccucgucgccaccaugacccuccacuccaagcacggcgagugcaccaacuccuccaacaaccaggccguccccugcggccccaucaucaucgagcgcaacgucaccgagaucguccaccucaacuccaccacccucgagaaggagaucugccccaaggccgccggcuaccgcgacugguccaagccccagugccagaucaccggcuucgcccccuucuccaaggacaacuccauccgccucuccgccuccggcgacaucugggucacccgcgagcccuacgucuccugcggccucggcaagugcuaccaguucgcccucggccagggcaccacccucgacaaccgccacuccaacggcaccucccacgaccgcaccccccaccgcacccuccucaugaacgagcucggcauccccuuccaccucgccaccaagcaggucugcaucgccugguccuccuccuccugccacgacggcaaggccuggcuccacgucugcgucaccggcgacgaccgcaacgccaccgccuccaucaucuacgacggcaugcucgucgacuccaucggcuccugguccaagaacauccuccgcacccaggaguccgagugcgucugcaucaacggcaccugcaccgucgucaugaccgacggcuccgccuccggcaaggccgacacccgcauccucuucauccgcgagggcaagaucguccacaucuccccccuccucggcuccgcccagcacgucgaggagugcuccugcuacccccaguaccccgagguccgcugcgucugccgcgacaacuggcgcggcuccaaccgccccguccucuacaucaacauggccgacuacuccgucgacuccggcuacgucugcuccggccucgucggcgacaccccccgcaacgacgacaccuccuccuccuccaacugcaaggaccccaacaacgagcgcggcgcccccggcgucaagggcugggccuucgacuccggcaacgacaucuggaugggccgcaccaucgagaaggacucccgcuccggcuacgagaccuuccgcgucaucggcggcuggaacaccgccaacuccaagucccagaccucccgccaggucaucgucgacuccgacaacuccuccggcuacuccggcaucuucuccgucgagggcaaguccugcaucaaccgcugcuucuacgucgagcucauccgcggccgccccaaggagacccgcgucugguggaccuccaacuccaucaucgucuucugcggcaccuccggcaccuacggcaccggcuccuggcccgacggcgccaacaucaacuucaugcccaucuga

SEQ ID NO: 119560 - RNA, 1410 nt, Artificial Sequence
  derived and/or modified CDS sequence (opt2) from neuraminidase__InfluenzaA__AGQ81730
augaaccccaaccagaagaucaucgccaucggcuccgucucccucaccaucgccaccaucugccuccucaugcagaucgccauccucgucaccaccaugacccuccacuucaagcacaacgagugcaucaacuccuccaacaaccaguccguccccugcggccccaucaucaucgagcgcaacgucaccgagaucguccaccucaacuccaccacccucgagaaggagaucugccccaaggccgccggcuaccgcgacugguccaagccccagugccagaucaccggcuucgcccccuucuccaaggacaacuccauccgccucuccgccuccggcgacaucugggucacccgcgagcccuacgucuccugcggccucggcaagugcuaccaguucgcccucggccagggcaccacccucgacaaccgccacuccaacggcaccucccacgaccgcaccccccaccgcacccuccucaugaacgagcucggcguccccuuccaccucgccuccaagcaggucugcaucgccugguccuccuccuccugccacgacggcaaggccuggcuccacgucugcgucaccggcgacgaccgcaacgccaccgccuccaucaucuacgacggcaugcucgucgacuccaucggcuccugguccaagaacauccuccgcacccaggaguccgagugcgucugcaucaacggcaccugcaccgucgucaugaccgacggcuccgccuccggcgaggccgacacccgcauccucuucauccgcgagggcaagaucguccacaucuccccccucuccggcuccgcccagcacgucgaggagugcuccugcuacccccaguaccccgagguccgcugcgucugccgcgacaacuggcgcggcuccaaccgccccguccucuacaucaacauggccgacuacuccaucgacuccggcuacgucugcuccggccucgucggcgacaccccccgcaacgacgacaucuccuccuccuccaacugcaaggaccccaacaacgagcgcggcgcccccggcgucaagggcugggccuucgacuccggcaacgacaucuggaugggccgcaccaucgagaaggacucccgcuccggcuacgagaccuuccgcgucaucggcggcuggaacaccgccaacuccaagucccagaccucccgccaggucaucgucgacuccgacaacuccuccggcuacuccggcaucuucuccgucgagggcaaguccugcaucaaccgcugcuucuacgucgagcucauccgcggccgccccaaggagacccgcgucugguggaccuccaacuccaucaucgucuucugcggcaccuccggcaccuacggcaccggcuccuggcccgacggcgccaacaucaacuucauggccaucuga

SEQ ID NO: 119561 - RNA, 1410 nt, Artificial Sequence
  derived and/or modified CDS sequence (opt2) from neuraminidase__InfluenzaA__AGQ81731
augaaccccaaccagaagaucaucgccaucggcuccgucucccucaccaucgccaccaucugccuccucaugcagaucgccauccucgucaccaccaugacccuccacuucaagcacaacgagugcuccaacuccuccaacaaccaggccguccccugcggccccaucaucaucgagcgcaacaucaccgagaucguccaccucaacuccaccacccucgagaaggagaucugccccaagaccgccggcuaccgcgacugguccaagccccagugccagaucaccggcuucgcccccuucuccaaggacaacuccauccgccucuccgccuccggcgacaucugggucacccgcgagcccuacgucuccugcggcuucggcaagugcuaccaguucgcccucggccagggcaccacccucgacaaccgccacuccaacggcaccucccacgaccgcaccccccaccgcacccuccucaugaacgagcucggcguccccuuccaccucgccaccaagcaggucugcaucgccugguccuccuccuccugccacgacggcaaggccuggcuccacgucugcgucaccggcgacgaccgcaacgccaccgccuccaucaucuacgacggcauccucgucgacuccaucggcuccugguccaagaacauccuccgcacccaggaguccgagugcgucugcaucaacggcaccugcaccgucgucaugaccgacggcuccgccuccggcaaggccgacacccgcauccucuucauccgcgagggcaagaucguccacaucuccccccucuccggcuccgcccagcacgucgaggagugcuccugcuacccccaguaccccgagguccgcugcgucugccgcgacaacuggcgcggcuccaaccgccccguccucuacaucaacaugaccgacuacuccaucgacuccggcuacgucugcuccggccucgucggcgacaccccccgcaacgacgacaucuccuccuccuccaacugcaaggaccccaacaacgagcgcggcgcccccggcgucaagggcugggccuucgacuccggcaacgaccucuggaugggccgcaccaucgagaaggagucccgcuccggcuacgagaccuuccgcgucaucggcggcuggaacaccgccaacuccaagucccagaccucccgccaggucaucgucgacuccgacaacuccuccggcuacuccggcaucuucuccgucgagggcaaguccugcaucaaccgcugcuucuacgucgagcucauccgcggccgccccaaggagacccgcgucugguggaccuccaacuccaucaucgucuucugcggcaccuccggcaccuacggcaccggcuccuggcccgacggcgccaacaucaacuucauggccaucuga

SEQ ID NO: 119562 - RNA, 1410 nt, Artificial Sequence
  derived and/or modified CDS sequence (opt2) from neuraminidase__InfluenzaA__AGQ81732
augaaccccaaccagaagaucaucgccaucggcuccgucucccucaccaucgccaccaucugccuccucaugcaggucgccauccucgucaccaccaugacccuccacuucaagcacaacgagugcuccaacuccuccaacaaccaggccguccccugcggccccaucaucaucgagcgcaacaucaccgagaucguccaccucaacuccaccacccucgagaaggagaucugccccaaggccgccggcuaccgcgacugguccaagccccagugccagaucaccggcuucgcccccuucuccaaggacaacuccauccgccucuccgccuccggcgacaucugggucacccgcgagcccuacgucuccugcggccucggcaagugcuaccaguucgcccucggccagggcaccacccucgacaaccgccacuccaacggcaccucccacgaccgcaccccccaccgcacccuccucaugaacgagcucggcguccccuuccaccucgccaccaagcaggucugcaucgccugguccuccuccuccugccacgacggcaaggccuggcuccacgucugcgucaccggcgacgaccgcaacgccaccgccuccaucaucuacgacggcauccucgucgacuccaucggcuccugguccaagaacauccuccgcacccaggaguccgagugcgucugcaucaacggcaccugcaccgucgucaugaccgacggcuccgccuccggcaaggccgacacccgcauccucuucauccgcgagggcaagaucguccacaucuccccccucuccggcuccgcccagcacgucgaggagugcuccugcuacccccaguaccccgagguccgcugcgucugccgcgacaacuggcgcggcuccaaccgccccguccucuacaucaacauggccgacuacuccaucgacuccggcuacgucugcuccggccucgucggcgacaccccccgcaacgacgacaucuccuccuccuccaacugcaaggaccccaacaacgagcgcggcgcccccggcgucaagggcugggccuucgacuccggcaacgaccucuggaugggccgcaccaucgagaaggagucccgcuccggcuacgagaccuuccgcgucaucggcggcuggaacaccgccaacuccaagucccagaccucccgccaggucaucgucgacuccgacaacuccuccggcuacuccggcaucuucuccgucgagggcaaguccugcaucaaccgcugcuucuacgucgagcucauccgcggccgccccaaggagacccgcgucugguggaccuccaacuccaucaucgucuucugcggcaccuccggcaccuacggcaccggcuccuggcccgacggcgccaacaucaacuucaugcccaucuga

SEQ ID NO: 119563 - RNA, 1410 nt, Artificial Sequence
  derived and/or modified CDS sequence (opt2) from neuraminidase__InfluenzaA__AGQ81733
augaaccccaaccagaagaucaucgccaucggcuccgucucccucaccaucgccaccaucugccuccucaugcagaucgccauccucgucaccaccaugacccuccacuucaagcacaacgagugcuccaacuccuccaacucccaggccguccccugcggccccaucaucaucgagcgcaacgucaccgagaucguccaccucaacuccaccacccucgagaaggagaucugccccaaggccgccgaguaccgcgacugguccaagccccagugccagaucaccggcuucgcccccuucuccaaggacaacuccauccgccucuccgccuccggcgacaucugggucacccgcgagcccuacgucuccugcggccucggcaagugcuaccaguucgcccucggccagggcaccacccucgacaaccgccacuccaacggcaccucccacgaccgcaccccccaccgcacccuccucaugaacgagcucggcguccccuuccaccucgccaccaagcaggucugcaucgccugguccuccuccuccugccacgacggcaaggccuggcuccacgucugcgucaccggcgacgaccgcaacgccaccgccuccaucaucuacgacggcauccucgucgacuccaucggcuccugguccaagaacauccuccgcacccaggaguccgagugcgucugcaucaacggcaccugcaccgucgucaugaccgacggcuccgccuccggcaaggccgacacccgcauccucuucauccgcgagggcaagaucguccacaucuccccccucuccggcuccgcccagcacgucgaggagugcuccugcuacccccaguaccccgagguccgcugcgucugccgcgacaacuggcgcggcuccaaccgccccguccucuacaucaacauggccgacuacuccaucgacuccggcuacgucugcuccggccucgucggcgacaccccccgcaacgacgacaucuccuccuccuccaacugcaaggaccccaacaacgagcgcggcgcccccggcgucaagggcugggccuucgacuccggcaacgaccucuggaugggccgcaccaucgagaaggacucccgcuccggcuacgagaccuuccgcgucaucggcggcuggaacaccgccaacuccaagucccagaccucccgccaggucaucgucgacuccgacaacuccuccggcuacuccggcaucuucuccgucgagggcaaguccugcaucaaccgcugcuucuacgucgagcucauccgcggccgccccaaggagacccgcgucugguggaccuccaacuccaucaucgucuucugcggcaccuccggcaccuacggcaccggcuccuggcccgacggcgccaacaucaacuucaugcccaucuga

SEQ ID NO: 119564 - RNA, 1410 nt, Artificial Sequence
  derived and/or modified CDS sequence (opt2) from neuraminidase__InfluenzaA__AGQ81734
augaaccccaaccagaagaucaucgccaucggcuccgucucccucaccaucgccaccaucugccuccucaugcagaucgccauccucgucaccaccaugacccuccacuucaagcacaacgaguacuccaacuccuccaacaaccaggccguccccugcggccccaucaucaucgagcgcaacaucaccgagaucguccaccucaacuccaccacccucgagaaggagaucugccccaaggccgccggcuaccgcgacugguccaagccccagugccagaucaccggcuucgcccccuucuccaaggacaacuccauccgccucuccgccuccggcgacaucugggucacccgcgagcccuacgucuccugcggccucggcaagugcuaccaguucgcccucggccagggcaccacccucgacaaccgccacuccaacggcaccucccacgaccgcaccccccaccgcacccuccucaugaacgagcucggcguccccuuccaccucgccaccaagcaggucugcaucgccugguccuccuccuccugccacgacggcaaggccuggcuccacgucugcgucaccggcgacgaccgcaacgccaccgccuccaucaucuacgacggcauccucgucgacuccaucggcuccugguccaagaacauccuccgcacccaggaguccaagugcgucugcaucaagcgcaccugcaccgucgucaagaccgacggcuccgccuccggcaaggccgacacccgcauccucuucauccgcgagggcaagaucguccacaucuccccccucuccggcuccgcccagcacgucgaggagugcuccugcuacccccaguaccccgagguccgcugcgucugccgcgacaacuggcgcggcuccaaccgccccguccucuacaucaacauggccgacuacuccaucgacuccggcuacgucugcuccggccucgucggcgacaccccccgcaacgacgacaucuccuccuccuccaacugcaaggaccccaacaacgagcgcggcgcccccggcgucaagggcugggccuucgacuccggcaacgaccucuggaugggccgcaccaucgagaaggagucccgcuccggcuacgagaccuuccgcgucaucggcggcuggaacaccgccaacuccaagucccagaccucccgccaggucaucgucgacuccgacaacuccuccggcuacuccggcaucuucuccgucgagggcaaguccugcaucaaccgcugcuucuacgucgagcucauccgcggccgccccaaggagacccgcgucugguggaccuccaacuccaucaucgucuucugcggcaccuccggcaccuacggcaccggcuccuggcccgacggcgccaacaucaacuucauggccaucuga

SEQ ID NO: 119565 - RNA, 1410 nt, Artificial Sequence; identical to SEQ ID NO: 119563
  derived and/or modified CDS sequence (opt2) from neuraminidase__InfluenzaA__AGQ81735

SEQ ID NO: 119566 - RNA, 1410 nt, Artificial Sequence
  derived and/or modified CDS sequence (opt2) from neuraminidase__InfluenzaA__AGQ81736
augaaccccaaccagaagaucaucgccaucggcuccgucucccucaccaucgccaccaucugccuccucaugcagaucgccauccucgucgccaccaugacccuccacuccaagcacggcgagugcaccgacuccuccaacaaccaggccguccccugcggccccaucaucaucgagcgcaacgucaccgagaucguccaccucaacuccaccacccucgagaaggagaucugccccaaggccgccggcuacaaggacugguccaagccccagugccagaucaccggcuucgcccccuucuccaaggacaacuccauccgccucuccgccuccggcgacaucugggucacccgcgagcccuacgucuccugcggccucggcaagugcuaccaguucgcccucggccagggcaccacccucgacaaccgccacuccaacggcaccucccacgaccgcaccccccaccgcacccuccucaugaacgagcucggcguccccuuccaccucgccaccaagcaggucugcaucgccugguccuccuccuccugccacgacggcaaggccuggcuccacgucugcgucaccggcgacgaccgcaacgccaccgccuccaucaucuacgacggcaugcucgucgacuccaucggcuccugguccaagaacauccuccgcacccaggaguccgagugcgucugcaucaacggcaccugcaccgucgucaugaccgacggcuccgccuccggcaaggccgacacccgcauccucuucauccgcgagggcaagaucgcccacaucuccccccucuccggcuccgcccagcacgucgaggagugcuccugcuacccccaguaccccgagguccgcugcgucugccgcgacaacuggcgcggcuccaaccgccccguccucuacaucaacauggccgacuacuccgucgacuccggcuacgucugcuccggccucgucggcgacaccccccgcaacgacgacaccuccuccuccuccaacugcaaggaccccaacaacgagcgcggcgcccccggcgucaagggcugggccuucgacuccggcaacgacaucuggaugggccgcaccaucgagaaggacucccgcuccggcuacgagaccuuccgcgucaucggcggcuggaacaccgccaacuccaagucccagaccucccgccaggucaucgucgacuccgacaacuccuccggcuacuccggcaucuucuccgucgagggcaaguccugcaucaaccgcugcuucuacgucgagcucauccgcggccgccccaaggagacccgcgucugguggaccuccaacuccaucaucgucuucugcggcaccuccggcaccuacggcaccggcuccuggcccgacggcgccaacaucaacuucaugcccaucuga

SEQ ID NO: 119567 - RNA, 1410 nt, Artificial Sequence
  derived and/or modified CDS sequence (opt2) from neuraminidase__InfluenzaA__AGQ81737
augaaccccaaccagaagaucaucgccaucggcuccgucucccucaccaucgccaccaucugccuccucaugcagaucgccauccucgucaccaccaugacccuccacuucaagcacaacgagugcuccaacuccuccaacaaccaggccguccccugcggccccaucaucaucgagcgcaacaucaccgagaucguccaccucaacuccaccacccucgagaaggagaucugccccaaggccgccggcuaccgcgacugguccaagccccagugccagaucaccggcuucgcccccuucuccaaggacaacuccauccgccucuccgccuccggcgacaucugggucacccgcgagcccuacgucuccugcggccucggcaagugcuaccaguucgcccucggccagggcaccacccucgacaaccgccacuccaacggcaccucccacgaccgcaccccccaccgcacccuccucaugaacgagcucggcguccccuuccaccucgccaccaagcaggucugcaucgccugguccuccuccuccugccacgacggcaaggccuggcuccacgucugcgucaccggcgacgaccgcaacgccaccgccuccaucaucuacgacggcauccucgucgacuccaucggcuccugguccaagaacauccuccgcacccaggaguccgagugcgucugcaucaacggcaccugcaccgucgucaugaccgacggcuccgccuccggcaaggccgacacccgcauccucuucauccgcgagggcaagaucguccacaucuccccccucuccggcuccgcccagcacgucgaggagugcuccugcuacccccaguaccccgagguccgcugcgucugccgcgacaacuggcgcggcuccaaccgccccguccucuacaucaacauggccgacuacuccaucgacuccggcuacgucugcuccggccucgucggcgacaccccccgcaacgacgacaucuccuccuccuccaacugcaaggaccccaacaacgagcgcggcgcccccggcgucaagggcugggccuucgacuccggcaacgaccucuggaugggccgcaccaucgagaaggagucccgcuccggcuacgagaccuuccgcgucaucggcggcuggaacaccgccaacuccaagucccagaccucccgccaggucaucgucgacuccgacaacuccuccggcuacuccggcaucuucuccgucgagggcaaguccugcaucaaccgcugcuucuacgucgagcucauccgcggccgccccaaggagacccgcgucugguggaccuccaacuccaucaucgucuucugcggcaccuccggcaccuacggcaccggcuccuggcccgacggcgccaacaucaacuucauggccaucuga

SEQ ID NO: 119568 - RNA, 1410 nt, Artificial Sequence
  derived and/or modified CDS sequence (opt2) from neuraminidase__InfluenzaA__AGQ81738
augaaccccaaccagaagaucaucgccaucggcuccgucucccucaccaucgccaccaucugccuccucaugcaggucgccauccucgucaccaccaugacccuccacuucaagcacaacgagugcuccaacuccuccaacaaccaggccguccccugcggccccaucaucaucgagcgcaacaucaccgagaucguccaccucaacuccaccacccucgagaaggagaucugccccaaggccgccggcuaccgcgacugguccaagccccagugccagaucaccggcuucgcccccuucuccaaggacaacuccauccgccucuccgccuccggcgacaucugggucacccgcgagcccuacgucuccugcggccucggcaagugcuaccaguucgcccucggccagggcaccacccucgacaaccgccacuccaacggcaccucccacgaccgcaccccccaccgcacccuccucaugaacgagcucggcguccccuuccaccucgccaccaagcaggucugcaucgccugguccuccuccuccugccacgacggcaaggccuggcuccacgucugcgucaccggcgacgaccgcaacgccaccgccuccaucaucuacgacggcauccucgucgacuccaucggcuccugguccaagaacauccuccgcacccaggaguccgagugcgucugcaucaacggcaccugcaccgucgucaugaccgacggcuccgccuccggcaaggccgacacccgcauccucuucauccgcgagggcaagaucauccacaucuccccccucuccggcuccgcccagcacgucgaggagugcuccugcuacccccaguaccccgagguccgcugcgucugccgcgacaacuggcgcggcuccaaccgccccguccucuacaucaacauggccgacuacuccaucgacuccggcuacgucugcuccggccucgucggcgacaccccccgcaacgacgacaucuccuccuccuccaacugcaaggaccccaacaacgagcgcggcgcccccggcgucaagggcugggccuucgacuccggcaacgaccucuggaugggccgcaccaucgagaaggagucccgcuccggcuacgagaccuuccgcgucaucggcggcuggaacaccgccaacuccaagucccagaccucccgccaggucaucgucgacuccgacaacuccuccggcuacuccggcaucuucuccgucgagggcaaguccugcaucaaccgcugcuucuacgucgagcucauccgcggccgccccaaggagacccgcgucugguggaccuccaacuccaucaucgucuucugcggcaccuccggcaccuacggcaccggcuccuggcccgacggcgccaacaucaacuucaugcccaucuga

SEQ ID NO: 119569 - RNA, 1410 nt, Artificial Sequence
  derived and/or modified CDS sequence (opt2) from neuraminidase__InfluenzaA__AGQ81739
augaaccccaaccagaagaucaucgccaucggcuccgucucccucaccaucgccaccaucugccuccucaugcagaucgccauccucgucaccaccaugacccuccacuucaagcacgacgagugcaccaacuccuccaacaaccaggccguccccugcgagcccaucaucaucgagcgcaacgucaccgagaucguccacaucaacuccaccauccucgagaaggagaucugccccaaggccgccggcuaccgcaacugguccaagccccagugccagaucaccggcuucgcccccuucuccaaggacaacuccauccgccucuccgccuccggcgacaucugggucacccgcgagcccuacgucuccugcggccucggcaagugcuaccaguucgcccucggccagggcaccacccucgacaaccgccacuccaacggcacccucaacgaccgcaccccccaccgcacccuccucaugaacgagcucggcguccccuuccaccucgccaccaagcaggucugcaucgccugguccuccuccuccugccacgacggcaaggccuggcuccacgucugcgucaccggcgacgaccgcaacgccaccgccuccaucaucuacgacgacaugcucgucgacuccaucggcuccugguccaagaacauccuccgcacccaggaguccgagugcgucugcaucaacggcaccugcaccgucgucaugaccgacggcuccgccuccggcaaggccgacacccgcauccucuucauccgcgagggcaagaucguccacaucuccccccucuccggcuccgcccagcacgucgaggagugcuccugcuacccccaguaccccgagguccgcugcgucugccgcgacaacuggcgcggcuccaaccgccccguccucuacaucaacauggccgacuacuccaucgacuccggcuacgucugcuccggccucgucggcgacaccccccgcaacgacgacaucuccuccuccuccaacugcaaggaccccaacaacgagcgcggcgcccccggcgucaagggcugggccuucgacuccggcaacgacaucuggaugggccgcaccaucgagaaggacucccgcuccggcuacgagaccuuccgcgucaucggcggcuggaacaccgccaacuccaagucccagaccucccgccaggucaucgucgacuccgacaacuccuccggcuacuccggcaucuucuccgucgagggcaaguccugcaucaaccgcugcuucuacgucgagcucauccgcggccgccccaaggagacccgcgucugguggaccuccaacuccaucaucgucuucugcggcaccuccggcaccuacggcaccggcuccuggcccgacggcgccaacaucaacuucauggccaucuga

SEQ ID NO: 119570 - RNA, 1410 nt, Artificial Sequence
  derived and/or modified CDS sequence (opt2) from neuraminidase__InfluenzaA__AGQ81740
augaaccccaaccagaagaucgucgccaucggcuccgucucccucaccaucgccaccaucugccuccucaugcagaucgccauccucgucaccaccaugacccuccacuucaagcacggcgagugcaccaacuccuccaacaaccaggccguccccugcggccccaucaucaucgagcgcaacaucaccgagaucguccaccucaacuccaccacccucgagaaggagaucugccccaaggccgccggcuaccgcgacugguccaagccccagugccagaucaccggcuucgcccccuucuccaaggacaacuccauccgccucuccgccuccggcgacaucugggucacccgcgagcccuacgucuccugcggccucggcaagugcuaccaguucgcccucggccagggcaccacccucgacaaccgccacuccaacggcaccucccacgaccgcaccccccaccgcacccuccucaugaacgagcucggcguccccuuccaccucgccaccaagcaggucugcaucgccugguccuccuccuccugccacgacggcaaggccuggcuccacgucugcgucaccggcgacgaccgcaacgccaccgccuccaucaucuacaacggcauccucgucgacuccaucggcuccugguccaagaacauccuccgcacccaggaguccgagugcgucugcaucaacggcaccugcaccgucgucaugaccgacggcuccgccuccggcaaggccgacacccgcauccucuucauccgcgagggcaagaucguccacaucuccccccucuccggcuccgcccagcacgucgaggagugcuccugcuacccccaguaccccgagguccgcugcgucugccgcgacaacuggcgcggcuccaaccgccccguccucuacaucaacauggccgacuacuccgucgacuccggcuacgucugcuccggccucgucggcgacaccccccgcaacgacgacaccuccuccuccuccaacugcaaggaccccaacaacgagcgcggcgcccccggcgucaagggcugggccuucgacuccggcaacgacaucuggaugggccgcaccaucgagaaggaccuccgcuccggcuacgagaccuuccgcgucaucggcggcuggaacaccgccaacuccaagucccagaccucccgccaggucaucgucgacuccgacaacuccuccggcuacuccggcaucuucuccgucgagggcaaguccugcaucaaccgcugcuucuacgucgagcucauccgcggccgccccaaggagacccgcgucugguggaccuccaacuccaucaucgucuucugcggcaccuccggcaccuacggcaccggcuccuggcccgacggcgccaacaucaacuucaugcccaucuga

SEQ ID NO: 119571 - RNA, 1410 nt, Artificial Sequence
  derived and/or modified CDS sequence (opt2) from neuraminidase__InfluenzaA__AGQ81741
augaaccccaaccagaagaucgucgccaucggcuccgucucccucaccaucgccaccaucugccuccucaugcagaucgccauccucgucaccaccaugacccuccacuucaagcacggcgagugcaccaacuccuccaacaaccaggccguccccugcggccccaucaucaucgagcgcaacaucaccgagaucguccaccucaacuccaccacccucgacaaggagaucugccccaaggccgccggcuaccgcgacugguccaagccccagugccagaucaccggcuucgcccccuucuccaaggacaacuccauccgccucuccgccuccggcgacaucugggucacccgcgagcccuacgucuccugcggccucggcaagugcuaccaguucgcccucggccagggcaccacccucgacaaccgccacuccaacggcaccucccacgaccgcaccccccaccgcacccuccucaugaacgagcucggcguccccuuccaccucgccaccaagcaggucugcaucgccugguccuccuccuccugccacgacggcaaggccuggcuccacgucugcgucaccggcgacgaccgcaacgccaccgccuccaucaucuacgacggcaugcucgucgacuccaucggcuccugguccaagaacauccuccgcacccaggaguccgagugcgucugcaucaacggcaccugcaccgucgucaugaccgacggcuccgccuccggcaaggccgacacccgcauccucuucauccgcgagggcaagaucguccacaucuccccccucuccggcuccgcccagcacgucgaggagugcuccugcuacccccaguaccccgagguccgcugcgucugccgcgacaacuggcgcggcuccaaccgccccguccucuacaucaacauggccgacuacuccgucgacuccggcuacgucugcuccggccucgucggcgacaccccccgcaacgacgacaccuccuccuccuccaacugcaaggaccccaacaacgagcgcggcgcccccggcgucaagggcugggccuucgacuccggcaacgacaucuggaugggccgcaccaucgagaaggaccuccgcuccggcuacgagaccuuccgcgucaucggcggcuggaacaccgccaacuccaagucccagaccucccgccaggucaucgucgacuccgacaacuccuccggcuacuccggcaucuucuccgucgagggcaaguccugcaucaaccgcugcuucuacgucgagcucauccgcggccgccccaaggagacccgcgucugguggaccuccaacuccaucaucgucuucugcggcaccuccggcaccuacggcaccggcuccuggcccgacggcgccaacaucaacuucaugcccaucuga

SEQ ID NO: 119572 - RNA, 1410 nt, Artificial Sequence
  derived and/or modified CDS sequence (opt2) from neuraminidase__InfluenzaA__AGQ81742
augaaccccaaccagaagaucgucgccaucggcuccgucucccucaccaucgccaccaucugccuccucaugcagaucgccauccucgucaccaccaugacccuccacuucaagcacggcgagugcaccaacuccuccaacaaccaggccguccccugcggccccaucaucaucgagcgcaacaucaccgagaucguccaccucaacuccaccacccucgagaaggagaucugccccaaggccgccgaguaccgcgacugguccaagccccagugccagaucaccggcuucgcccccuucuccaaggacaacuccauccgccucuccgccuccggcgacaucugggucacccgcgagcccuacgucuccugcggccucggcaagugcuaccaguucgcccucggccagggcaccacccucgacaaccgccacuccaacggcaccucccacgaccgcaccccccaccgcacccuccucaugaacgagcucggcguccccuuccaccucgccaccaagcaggucugcaucgccugguccuccuccuccugccacgacggcaaggccuggcuccacgucugcgucaccggcgacgaccgcaacgccaccgccuccaucaucuacgacggcaugcucgucgacuccaucggcuccugguccaagaacauccuccgcacccaggaguccgagugcgucugcaucaacggcaccugcaccgucgucaugaccgacggcuccgccuccggcaaggccgacacccgcauccucuucauccgcgagggcaagaucguccacaucuccccccucuccggcuccgcccagcacgucgaggagugcuccugcuacccccaguaccccgagguccgcugcgucugccgcgacaacuggcgcggcuccaaccgccccguccucuacaucaacauggccgacuacuccgucgacuccggcuacgucugcuccggccucgucggcgacaccccccgcaacgacgacaccuccuccuccuccaacugcaaggaccccaacaacgagcgcggcgcccccggcgucaagggcugggccuucgacuccggcaacgacaucuggaugggccgcaccaucgagaaggaccuccgcuccggcuacgagaccuuccgcgucaucggcggcuggaacaccgccaacuccaagucccagaccucccgccaggucaucgucgacuccgacaacuccuccggcuacuccggcaucuucuccgucgagggcaaguccugcaucaaccgcugcuucuacgucgagcucauccgcggccgccccaaggagacccgcgucugguggaccuccaacuccaucaucgucuucugcggcaccuccggcaccuacggcaccggcuccuggcccgacggcgccaacaucaacuucaugcccaucuga

SEQ ID NO: 119573 - RNA, 1410 nt, Artificial Sequence
  derived and/or modified CDS sequence (opt2) from neuraminidase__InfluenzaA__AGQ81744
augaaccccaaccagaagaucaucgccaucggcuccgucucccucaccaucgccaccaucugccuccucaugcagaucgccauccucgucaccaccaugacccuccacuuccgccacgacgagugcaccaacuccuccaacaaccaggccguccccugcggccccaucaucaucgagcgcaacgucaccgagaucguccaccucaacuccaccacccucgagaaggagaucugccccaaggccgccgaguaccgcgacugguccaagccccagugccagaucaccggcuucguccccuucuccaaggacaacuccauccgccucuccgccggcggcgacaucugggucacccgcgagcccuacgucuccugcggccucggcaagugcuaccaguucgcccucggccagggcaccacccucgacaaccgccacuccaacggcaccucccacgaccgcaccccccaccgcacccuccucaugaacgagcucggcguccccuuccaccucgccaccaagcaggucugcaucgccugguccuccuccuccugccacgacggcaaggccuggcuccacgucugcgucaccggcgacgaccgcaacgccaccgccuccaucaucuacgacggcaugcucgucgacuccaucggcuccugguccaagaacauccuccgcacccaggaguccgagugcgucugcaucaacggcaccugcaccgucgucaugaccgacggcuccgccuccggcaaggccgacacccgcauccucuucauccgcgagggcaagaucguccacaucuccccccucuccggcuccgcccagcacgucgaggagugcuccugcuacccccaguaccccgagguccgcugcgucugccgcgacaacuggcgcggcuccaaccgccccguccucuacaucaacgucgccgacuacuccgucgacuccggcuacgucugcuccggccucgucggcgacaccccccgcaacgacgacaucuccuccuccuccaacugcaaggaccccaacaacgagcgcggcgcccccggcgucaagggcugggccuucgacuccggcaacgacaucuggaugggccgcaccaucgagaaggacucccgcuccggcuacgagaccuuccgcgucaucggcggcuggaacaccgccaacuccaagucccagaccucccgccaggucaucgucgacuccgacaaccccuccggcuacuccggcaucuucuccgucgagggcaaguccugcaucaaccgcugcuucuacgucgagcucauccgcggccgccccaaggagacccgcgucugguggaccuccaacuccaucaucgucuucugcggcaccuccggcaccuacggcaccggcuccuggcccgacggcgccaacaucaacuucaugcccaucuga

SEQ ID NO: 119574 - RNA, 1410 nt, Artificial Sequence
  derived and/or modified CDS sequence (opt2) from neuraminidase__InfluenzaA__AGQ81746
augaaccccaaccagaagaucaucgccaucggcuccgucucccucaccaucgccaccaucugccuccucaugcagaucgccauccucgucaccaccaugacccuccacuucaagcacaacgagugcuccaacuccuccaacucccaggccguccccugcggccccaucaucaucgagcgcaacgucaccgagaucguccaccucaacuccaccacccucgagaaggagaucugccccaaggccgccgaguaccgcggcugguccaagccccagugccagaucaccggcuucgcccccuucuccaaggacaacuccauccgccucuccgccuccggcgacaucugggucacccgcgagcccuacgucuccugcgaccucggcaagugcuaccaguucgcccucggccagggcaccacccucgacaaccgccacuccaacggcaccucccacgaccgcaccccccaccgcacccuccucaugaacgagcucggcguccccuuccaccucgccaccaagcaggucugcaucgccugguccuccuccuccugccacgacggcaaggccuggcuccacgucugcgucaccggcgacgaccgcaacgccaccgccuccaucaucuacgacggcauccucgucgacuccaucggcuccugguccaagaacauccuccgcacccaggaguccgagugcgucugcaucaacggcaccugcaccgucgucaugaccgacggcuccgccuccggcaaggccgacacccgcauccucuucauccgcgagggcaagaucguccacaucuccccccucuccggcuccgcccagcacgucgaggagugcuccugcuacccccaguaccccgagguccgcugcgucugccgcgacaacuggcgcggcuccaaccgccccguccucuacaucaacauggccgacuacuccaucgacuccggcuacgucugcuccggccucgucggcgacaccccccgcaacgacgacaucuccuccuccuccaacugcaaggaccccaacaacgagcgcggcgcccccggcgucaagggcugggccuucgacuccggcaacgaccucuggaugggccgcaccaucgagaaggacucccgcuccggcuacgagaccuuccgcgucaucggcggcuggaacaccgccaacuccaagucccagaccucccgccaggucaucgucgacuccgacaacuccuccggcuacuccggcaucuucuccgucgagggcaaguccugcaucaaccgcugcuucuacgucgagcucauccgcggccgccccaaggagacccgcgucugguggaccuccaacuccaucaucgucuucugcggcaccuccggcaccuacggcaccggcuccuggcccgacggcgccaacaucaacuucaugcccaucuga

SEQ ID NO: 119575 - RNA, 1410 nt, Artificial Sequence
  derived and/or modified CDS sequence (opt2) from neuraminidase__InfluenzaA__AGQ81747
augaaccccaaccagaagaucgucgccaucggcuccgucucccucaccaucgccaccaucugccuccucaugcagaucgccauccucgucaccaccaugacccuccacuucaagcacggcgagugcaccaacuccuccaacaaccaggccguccccugcggccccaucaucaucgagcgcaacaucaccgagaucguccaccucaacuccaccacccucgagaaggagaucugccccaaggccgccggcuaccgcgacugguccaagccccagugccagaucaccggcuucgcccccuucuccaaggacaacuccauccgccucuccgccuccggcgacaucugggucacccgcgagcccuacgucuccugcggccucggcaagugcuaccaguucgcccucggccagggcaccacccucgacaaccgccacuccaacggcaccucccacgaccgcaccccccaccgcacccuccucaugaacgagcucggcguccccuuccaccucgccaccaagcaggucugcaucgccugguccuccuccuccugccacgacggcaaggccuggcuccacgucugcgucaccggcgacgaccgcaacgccaccgccuccaucaucuacgacggcaugcucgucgacuccaucggcuccugguccaagaacauccuccgcacccaggaguccgagugcgucugcaucaacggcaccugcaccgucgucaugaccgacggcuccgccuccggcaaggccgacacccgcauccucuucauccgcgagggcaagaucguccacaucuccccccucuccggcuccgcccagcacgucgaggagugcuccugcuacccccaguaccccgagguccgcugcgucugccgcgacaacuggcgcggcuccaaccgccccguccucuacaucaacauggccgacuacuccgucgacuccggcuacgucugcuccggccucgucggcgacaccccccgcaacgacgacaccuccuccuccuccaacugcaaggaccccaacaacgagcgcggcgcccccggcgucaagggcugggccuucgacuccggcaacgacaucuggaugggccgcaccaucgagaaggaccuccgcuccggcuacgagaccuuccgcgucaucggcggcuggaacaccgccaacuccaagucccagaccucccgccaggucaucgucgacuccgacaacuccuccggcuacuccggcaucuucuccgucgagggcaaguccugcaucaaccgcugcuucuacgucgagcucauccgcggccgccccaaggagacccgcgucugguggaccuccaacuccaucaucgucuucugcggcaccuccggcaccuacggcaccggcuccuggcccgacggcgccaacaucaacuucaugcccaucuga

SEQ ID NO: 119576 - RNA, 1401 nt, Artificial Sequence
  derived and/or modified CDS sequence (opt2) from neuraminidase__InfluenzaA__AGQ81749
augaaccccaaccagaagaucaucgccaucggcuccgucucccucaccaccgccaucaucugcuuccucaugcagaucgccauccucaccaccaccaugacccuccacuucaagcagaacgagugcuccaaccccuccaacaaccaggucguccccugcgagcccaucaucaucgagcgcaacaccguccaccucaacuccaccaccaucgagaaggagaucugcuccaaggucgccgaguacaagaacugguccaagccccagugccagaucaccggcuucgcccccuucuccaaggacaacuccauccgccucuccgccggcggcgacaucugggucacccgcgagcccuacgucuccugcucccucggcaagugcuaccaguucgcccucggccagggcaccacccucaagaacaagcacuccaacggcaccacccacgaccgcaucccccaccgcacccuccucaugaacgagcucggcguccccuuccaccucggcaccaagcaggucugcaucgccugguccuccuccuccugcuacgacggcaaggccuggcuccacaucugcgucaccggcgacgacaagaacgccaccgccuccaucaucuacgacggcaugcucgccgacuccaucggcuccugguccaagaacauccuccgcacccaggaguccgagugcgucugcaucaacggcaccugcgccgucgucaugaccgacggcuccgccuccggcaaggccgacacccgcauccucuucauccgcgagggccgcaucaucaacaucuccccccucuccggcuccgcccagcacgucgaggagugcuccugcuacccccgcuaccccgagguccgcugcgucugccgcgacaacuggaagggcuccaaccgccccguccucuacaucaacauggccgacuacuccgucgaguccuccuacgucugcuccggccucgucggcgacaccccccgcaacgacgacuccuccuccuccuccaacugccgcgaccccaacaacgagcgcggcgcccccggcgucaagggcugggccuucgacgacggcaacgacgucuggaugggccgcaccaucaagaaggacucccgcuccggcuacgagaccuuccgcgucaucaacggcuggaccaccgccaacuccaagucccagaucaaccgccaggucaucgucgacuccgacaacugguccggcuacuccggcaucuucuccgucgagggcaagaacugcaucaaccgcugcuucuacgucgagcucauccgcggccgcccccaggagcccaaggucugguggaccuccaacuccaucaucgccuucugcggcaccuccggcaccuacggcaccggcuccuggcccgacggcgccaacaucaacuucaugcccaucuga

SEQ ID NO: 119577 - RNA, 1401 nt, Artificial Sequence; identical to SEQ ID NO: 119576
  derived and/or modified CDS sequence (opt2) from neuraminidase__InfluenzaA__AGQ81750

SEQ ID NO: 119578 - RNA, 1410 nt, Artificial Sequence
  derived and/or modified CDS sequence (opt2) from neuraminidase__InfluenzaA__AGQ81751
augaaccccaaccagaagaucaucgccaucggcuccgucucccucaccaucgccaccaucugccuccucaugcagaucgccauccucgucaccaccaugacccucuacuucaagcacaacgagugcuccaacuccuccaacaaccaggccguccccugcggccccaucaucaucgagcgcaacaucaccgagaucguccaccucaacuccaccacccucgagaaggagaucugccccaaggccgccggcuaccgcgacugguccaagccccagugccagaucaccggcuucgcccccuucuccaaggacaacuccauccgccucuccgccuccggcgacaucugggucacccgcgagcccuacgucuccugcggccucggcaagugcuaccaguucgcccucggccagggcaccacccucgacaaccgccacuccaacggcaccucccacgaccgcaccccccaccgcacccuccucaugaacgagcucggcguccccuuccaccucgccaccaagcaggucugcaucgccugguccuccuccuccugccacgacggcaaggccuggcuccacgucugcgucaccggcgacgaccgcaacgccaccgccuccaucaucuacgacggcauccucgucgacuccaucggcuccugguccaagaacauccuccgcacccaggaguccgagugcgucugcaucaacggcaccugcaccgucgucaugaccgacggcuccgccuccggcaaggccgacacccgcauccucuucauccgcgagggcaagaucguccacaucuccccccucuccggcuccgcccagcacgucgaggagugcuccugcuacccccaguaccccgagguccgcugcgucugccgcgacaacuggcgcggcuccaaccgccccguccucuacaucaacauggccgacuacuccaucgacuccggcuacgucugcuccggccucgucggcgacaccccccgcaacgacgacaucuccuccuccuccaacugcaaggaccccaacaacgagcgcggcgcccccggcgucaagggcugggccuucgacuccggcaacgaccucuggaugggccgcaccaucgagaaggagucccgcuccggcuacgagaccuuccgcgucaucggcggcuggaacaccgccaacuccaagucccagaccucccgccaggucaucgucgacuccgacaacuccuccggcuacuccggcaucuucuccgucgagggcaaguccugcaucaaccgcugcuucuacgucgagcucauccgcggccgccccaaggagacccgcgucugguggaccuccaacuccaucaucgucuucugcggcaccuccggcaccuacggcaccggcuccuggcccgacggcgccaacaucaacuucaugcccaucuga

SEQ ID NO: 119579 - RNA, 1410 nt, Artificial Sequence
  derived and/or modified CDS sequence (opt2) from neuraminidase__InfluenzaA__AGQ81753
augaaccccaaccagaagaucgucgccaucggcuccgucucccucaccaucgccaccaucugccuccucaugcagaucgccauccucgucaccaccaugacccuccacuucaagcacggcgagugcaccaacuccuccaacaaccaggccguccccugcggccccaucaucaucgagcgcaacaucaccggcaucguccaccucaacuccaccacccucgagaaggagaucugccccaaggccgccggcuaccgcgacugguccaagccccagugccagaucaccggcuucgcccccuucuccaaggacaacuccauccgccucuccgccuccggcgacaucugggucacccgcgagcccuacgucuccugcggccucggcaagugcuaccaguucgcccucggccagggcaccacccucgacaaccgccacuccaacggcaccucccacgaccgcaccccccaccgcacccuccucaugaacgagcucggcguccccuuccaccucgccaccaagcaggucugcaucgccugguccuccuccuccugccacgacggcaaggccuggcuccacaucugcgucaccggcgacgaccgcaacgccaccgccuccaucaucuacgacggcaugcucgucgacuccaucggcuccugguccaagaacauccuccgcacccaggaguccgagugcgucugcaucaacggcaccugcaccgucgucaugaccgacggcuccgccuccggcaaggccgacacccgcauccucuucauccgcgagggcaagaucguccacaucuccccccucuccggcuccgcccagcacgucgaggagugcuccugcuacccccaguaccccgagguccgcugcgucugccgcgacaacuggcgcggcuccaaccgccccguccucuacaucaacauggccgacuacuccgucgacuccggcuacgucugcuccggccucgucggcgacaccccccgcaacgacgacaccuccuccuccuccaacugcaaggaccccaacaacgagcgcggcgcccccggcgucaagggcugggccuucgacuccggcaacgacaucuggaugggccgcaccaucgagaaggaccuccgcuccggcuacgagaccuuccgcgucaucggcggcuggaacaccgccaacuccaagucccagaccaaccgccaggucaucgucgacuccgacaacuccuccggcuacuccggcaucuucuccgucgagggcaaguccugcaucaaccgcugcuucuacgucgagcucauccgcggccgccccaaggagacccgcgucugguggaccuccaacuccaucaucgucuucugcggcaccuccggcaccuacggcaccggcuccuggcccgacggcgccaacaucaacuucaugcccaucuga

SEQ ID NO: 119580 - RNA, 1410 nt, Artificial Sequence; identical to SEQ ID NO: 119579
  derived and/or modified CDS sequence (opt2) from neuraminidase__InfluenzaA__AGQ81754

SEQ ID NO: 119581 - RNA, 1410 nt, Artificial Sequence
  derived and/or modified CDS sequence (opt2) from neuraminidase__InfluenzaA__AGQ81756
augaaccccaaccagaagaucaucgccaucggcuccaucucccucaccaucgccaccaucugccuccucauccagaucgccauccucgucaccaccaugacccuccacuucaagcacggcgagugcaccaacuccuccaacaaccaggccguccccugcggccccaucaucaucgagcgcaacgucaccgagaucguccaccucaacuccaccacccucgagaaggagaucugccccaaggccgccggcuaccgcgacugguccaagccccagugccagaucaccggcuucgcccccuucuccaaggacaacuccauccgccucuccgccuccggcgacaucugggucacccgcgagcccuacgucuccugcggccucggcaagugcuaccaguucgcccucggccagggcaccacccucgacaaccgccacuccaacggcaccucccacgaccgcaccccccaccgcacccuccucaugaacgagcucggcguccccuuccaccucgccaccaagcaggucugcaucgccugguccuccuccuccugccacgacggcaaggccuggcuccacgucugcgucaccggcgacgaccgcaacgccaccgccuccaucaucuacgacggccuccucgucgacuccaucggcuccugguccaagaacauccuccgcacccaggaguccgagugcgucugcaucaacggcaccugcaccgucgucaugaccgacggcuccgccuccggcaaggccgacacccgcauccucuucauccgcgagggcaagaucauccacaucuccccccucuccggcuccgcccagcacgucgaggagugcuccugcuacccccaguaccccgagguccgcugcgucugccgcgacaacuggcgcggcuccaaccgccccguccucuacaucaacauggccgacuacuccgucgacuccggcuacgucugcuccggccucgucggcgacaccccccgcaacgacgacaccuccuccuccuccaacugcaaggaccccaacaacgagcgcggcgcccccggcgucaagggcugggccuucgacuccggcaacgacaucuggaugggccgcaccaucgagaaggacucccgcuccggcuacgagaccuuccgcgucaucggcggcuggaacaccgccaacuccaagucccagaccucccgccaggucaucgucgacuccgacaacuccuccggcuacuccggcaucuucuccgucgagggcaaguccugcaucaaccgcugcuucuacgucgagcucauccgcggccgccccaaggagacccgcgucugguggaccuccaacuccaucaucgucuucugcggcaccuccggcaccuacggcaccggcuccuggcccgacggcgccaacaucaacuucaugcccaucuga

SEQ ID NO: 119582 - RNA, 1410 nt, Artificial Sequence
  derived and/or modified CDS sequence (opt2) from neuraminidase__InfluenzaA__AGQ81757
augaaccccaaccagaagaucaucgccaucggcuccgucucccucaccaucgccaccaucugccuccucauccagaucgccauccucgucaccaccaugacccuccacuucaagcacggcgagugcaccaacuccuccaacaaccaggccguccccugcggccccaucaucaucgagcgcaacgucaccgagaucguccaccucaacuccaccacccucgagaaggagaucugccccaaggccgccggcuaccgcgacugguccaagccccagugccagaucaccggcuucgcccccuucuccaaggacaacuccauccgccucuccgccuccggcgacaucugggucacccgcgagcccuacgucuccugcggccucggcaagugcuaccaguucgcccucggccagggcaccacccucgacaaccgccacuccaacggcaccucccacgaccgcaccccccaccgcacccuccucaugaacgagcucggcguccccuuccaccucgccaccaagcaggucugcaucgccugguccuccuccuccugccacgacggcaaggccuggcuccacgucugcgucaccggcgacgaccgcaacgccaccgccuccaucaucuacgacggccuccucgucgacuccaucggcuccugguccaagaacauccuccgcacccaggaguccgagugcgucugcaucaacggcaccugcaccgucgucaugaccgacggcuccgccuccggcaaggccgacacccgcauccucuucauccgcgagggcaagaucauccacaucuccccccucuccggcuccgcccagcacgucgaggagugcuccugcuacccccaguaccccgagguccgcugcgucugccgcgacaacuggcgcggcuccaaccgccccguccucuacaucaacauggccgacuacuccgucgacuccggcuacgucugcuccggccucgucggcgacaccccccgcaacgacgacaccuccuccuccuccaacugcaaggaccccaacaacgagcgcggcgcccccggcgucaagggcugggccuucgacuccggcaacgacaucuggaugggccgcaccaucgagaaggacucccgcuccggcuacgagaccuuccgcgucaucggcggcuggaacaccgccaacuccaagucccagaccucccgccaggucaucgucgacuccgacaacuccuccggcuacuccggcaucuucuccgucgagggcaaguccugcaucaaccgcugcuucuacgucgagcucauccgcggccgccccaaggagacccgcgucugguggaccuccaacuccaucaucgucuucugcggcaccuccggcaccuacggcaccggcuccuggcccgacggcgccaacaucaacuucaugcccaucuga

SEQ ID NO: 119583 - RNA, 1401 nt, Artificial Sequence
  derived and/or modified CDS sequence (opt2) from neuraminidase__InfluenzaA__AGQ81758
augaaccccaaccagaagaucaucgccaucggcuccgucucccucaucaucgccaucaucugccuccucaugcagaucgccauccucaccaccaccaugacccuccacuuccgccagaacgagugcuccaaccccuccaacaaccaggucguccccugcgagcccaccaucaucgagcgcaacaccguccaccucaacuccaccaccaucgagcgcgagaucugccccaaggucgccgaguacaagaacugguccaagccccagugccagaucaccggcuucgcccccuucuccaaggacaacuccauccgccucuccgccggcggcgacaucugggucacccgcgagcccuacgucuccugcucccucggcaagugcuaccaguucgcccucggccagggcaccacccucaagaacaagcacuccaacggcaccacccacgaccgcaccccccaccgcacccuccucaugaacgagcucggcguccccuuccaccucggcaccaagcaggucugcaucgccugguccuccuccuccugcuacgacggcaaggccuggcuccacaucugcgucaccggcgacgacgagaacgccaccgccuccaucaucuacgacggcaugcucgucgacuccaucggcuccugguccaagaacauccuccgcacccaggaguccgagugcgucugcaucaacggcaccugcgccgucgucaugaccgacggcuccgccuccggcaaggccgacacccgcguccucuucauccgcgagggcaagaucaucaacaucuccccccucuccggcuccgcccagcacgucgaggagugcuccugcuacccccgcuaccccgagguccgcugcgucugccgcgacaacuggaagggcuccaaccgccccguccucuacaucaacauggccgacuacuccaucgaguccuccuacgucugcuccggccucgucggcgacaccccccgcaacgacgacuccuccuccuccuccaacugccgcgaccccaacaacgagcgcggcgcccccggcgucaagggcugggccuucgacgacggcaacgacgucuggaugggccgcaccaucaagaacgacucccgcuccggcuacgagaccuuccgcgucgucaacggcuggaccauggccaacuccaagucccagaucaaccgccaggucaucgucgacuccgacaacugguccggcuacuccggcaucuucuccgucgagggcaagaagugcaucaaccgcugcuucuacgucgagcucauccgcggccgcccccaggagccccgcgucugguggaccuccaacuccaucaucgucuucugcggcaccuccggcaccuacggcaccggcuccuggcccgacggcgccaacaucaacuucaugcccaucuga

SEQ ID NO: 119584 - RNA, 1401 nt, Artificial Sequence
  derived and/or modified CDS sequence (opt2) from neuraminidase__InfluenzaA__AGQ81759
augaaccccaaccagaagaucaucgccaucggcuccgucucccucaccaucgccaucaucugcuuccucauccagaucgccauccucaccaccaccaugacccuccacuuccgccaguccgagugcuccaaccccuccaacaaccaggucguccccugcgagcccaucaucaucgagcgcaacaccguccaccucaacuccaccaucaucgagaaggagaucugccccaaggucgccgaguacaagaacugguccaagccccagugccagaucaccggcuucgcccccuucuccaaggacaacuccauccgccucuccgccggcggcgacaucugggucacccgcgagcccuacgucuccugcucccucggcaagugcuaccaguucgcccucggccagggcaccacccucaagaacaagcacuccaacggcaccacccacgaccgcaucccccaccgcacccuccucaugaacgagcucggcguccccuuccaccucggcaccaagcaggucugcaucgccugguccuccuccuccugccacgacggcaaggccuggcuccacaucugcgucaccggcgacgacaagaacgccaccgccuccaucaucuacgacggcaugcucgucgacuccaucggcuccugguccaagaacauccuccgcacccaggaguccgagugcgucugcaucaacggcaccugcgccgucgucaugaccgacggcuccgccuccggcaaggccgacacccgcauccucuucauccgcgagggcaagaucaucaacaucuccccccucuccggcuccgcccagcacgucgaggagugcuccugcuacccccgcuaccccgagguccgcugcgucugccgcgacaacuggaagggcuccaaccgccccguccucuacaucaacauggccgacuacuccaucgaguccuccuacgucugcuccggccucgucggcgacaccccccgcgacgacgacuccuccuccuccuccaacugccgcgaccccaacaacgagcgcggcgcccccggcgucaagggcugggccuucgacgacggcaacgacaucuggaugggccgcaccaucaaguccgacucccgcuccggcuacgagaccuuccgcgucaucaacggcuggaccaccgccaacuccaagucccagaucaaccgccaggucaucgucgacuccgacuccugguccggcuacuccggcaucuucuccgucgagggcaagaacugcaucaaccgcugcuucuacgucgagcucauccgcggccgcccccgcgagacccgcgucugguggaccuccaacuccaucaucgucuucugcggcaccuccggcaccuacggcaccggcuccuggcccgacggcgccaacaucaacuucaugcccaucuga

SEQ ID NO: 119585 - RNA, 1401 nt, Artificial Sequence
  derived and/or modified CDS sequence (opt2) from neuraminidase__InfluenzaA__AGQ81760
augaaccccaaccagaagaucaucgccaucggcuccgucucccucaccaucgccaucaucugcuuccucaugcagaucgccauccucaccaccaccaugacccuccacuuccgccagaacgagugcuccaaccccuccaacaaccaggucguccccugcgagcccaucaucaucgagcgcaacaccguccaccucaacuccaccaccaucgagaaggagaucugccccaaggucgccgaguacaagaacugguccaagccccagugccagaucaccggcuucgcccccuucuccaaggacaacuccauccgccucuccgccggcggcgacaucugggucacccgcgagcccuacgucuccugcucccucggcaagugcuaccaguucgcccucggccagggcaccacccucaagaacaagcacuccaacggcaccacccacgaccgcaucccccaccgcacccuccucaugaacgagcucggcguccccuuccaccucggcaccaagcaggucugcaucgccugguccuccuccuccugccacgacggcaaggccuggcuccacaucugcgucaccggcgacgacaagaacgccaccgccuccaucaucuacgacggcaugcucgucgacuccaucggcuccugguccaagaacauccuccgcacccaggaguccgagugcgucugcaucaacggcaccugcgccgucgucaugaccgacggcuccgccuccggcaaggccgacacccgcguccucuucauccgcgagggcaagaucaucaacaucuccccccucuccggcuccgcccagcacgucgaggagugcuccugcuacccccgcuaccccgagguccgcugcgucugccgcgacaacuggaagggcuccaaccgccccguccucuacaucaacauggccgacuacuccaucgaguccuccuacgucugcuccggccucgucggcgacaccccccgcgacgacgacuccuccuccuccuccaacugccgcgaccccaacaacgagcgcggcgcccccggcgucaagggcugggccuucgacgacggcaacgacaucuggaugggccgcaccaucaaguccgacucccgcuccggcuacgagaccuuccgcgucgucaacggcuggaucaccgccaacuccaagucccagaucaaccgccaggucaucgucgacuccgacuccugguccggcuacuccggcaucuucuccgucgagggcaagaacugcaucaaccgcugcuucuacgucgagcucauccgcggccgcccccaggagacccgcgucugguggaccuccaacuccaucaucgucuucugcggcaccuccggcaccuacggcaccggcuccuggcccgacggcgccaacaucaacuucaugcccaucuga

SEQ ID NO: 119586 - RNA, 1401 nt, Artificial Sequence
  derived and/or modified CDS sequence (opt2) from neuraminidase__InfluenzaA__AGQ81761
augaaccccaaccagaagaucaucgccaucggcuccgucucccucaccaucgccaucaucugcuuccucaugcagaucgccauccucaccaccaccaugacccuccacuuccgccagaacgagugcuccaaccccuccaacaaccaggucguccccugcgagcccaucaucaucgagcgcaacaccguccaccucaacuccaccaccaucgagaaggagaucugccccaaggucgccgaguacaagaacugguccaagccccagugccagaucaccggcuucgcccccuucuccaaggacaacuccauccgccucuccgccggcggcgacaucugggucacccgcgagcccuacgucuccugcucccucggcaagugcuaccaguucgcccucggccagggcaccacccucaagaacaagcacuccaacggcaccacccacgaccgcaucccccaccgcacccuccucaugaacgagcucggcguccccuuccaccucggcaccaagcaggucugcaucgccugguccuccuccuccugccacgacggcaaggccuggcuccacaucugcgucaccggcgacgacaagaacgccaccgccuccaucaucuacgacggcaugcucgucgacuccaucggcuccugguccaagaacauccuccgcacccaggaguccgagugcgucugcaucaacggcaccugcgccgucgucaugaccgacggcuccgccuccggcaaggccgacacccgcauccucuucaucaaggagggcaagaucaucaacaucuccccccucuccggcuccgcccagcacgucgaggagugcuccugcuacccccgcuaccccgagguccgcugcgucugccgcgacaacuggaagggcuccaaccgccccguccucuacaucaacauggccgacuacuccaucgaguccuccuacgucugcuccggccucgucggcgacaccccccgcgacgacgacuccuccuccuccuccaacugccgcgaccccaacaacgagcgcggcgcccccggcgucaagggcugggccuucgacgacggcaacgacaucuggaugggccgcaccaucaaguccgacucccgcuccggcuacgagaccuuccgcgucgucaacggcuggaccaccgccaacuccaagucccagaucaaccgccaggucaucgucgacuccgacuccugguccggcuacuccggcaucuucuccgucgagggcaagaacugcaucaaccgcugcuucuacgucgagcucauccgcggccgcccccaggagacccgcgucugguggaccuccaacuccaucaucgucuucugcggcaccuccggcaccuacggcaccggcuccuggcccgacggcgccaacaucaacuucaugcccaucuga

SEQ ID NO: 119587 - RNA, 1401 nt, Artificial Sequence
  derived and/or modified CDS sequence (opt2) from neuraminidase__InfluenzaA__AGQ81763
augaaccccaaccagaagaucaucgccaucggcuccgucucccucaucaucgccaucaucugccuccucaugcagaucgccauccucaccaccaccaugacccuccacuuccgccagaacgagugcuccaaccccuccaacaaccaggucguccccugcgagcccaucaucaucgagcgcaacaccguccaccucaacuccaccaccaucgagcgcgagaucugccccaaggucgccgaguacaagaacugguccaagccccagugccagaucaccggcuucgcccccuucuccaaggacaacuccauccgccucuccgccggcggcgacaucugggucacccgcgagcccuacgucuccugcucccucggcaagugcuaccaguucgcccucggccagggcaccacccucaagaacaagcacuccaacggcaccacccacgaccgcaccccccaccgcacccuccucaugaacgagcucggcguccccuuccaccucggcaccaagcaggucugcaucgccugguccuccuccuccugcuacgacggcaaggccuggcuccacaucugcgucaccggcgacgacaagaacgccaccgccuccaucaucuacgacggcaugcucgucgacuccaucggcuccugguccaagaacauccuccgcacccaggaguccgagugcgucugcaucaacggcaccugcgccgucgucaugaccgacggcuccgccuccggcaaggccgacacccgcguccucuucauccgcgagggcaagaucaucaacaucuccccccucuccggcuccgcccagcacgucgaggagugcuccugcuacccccgcuaccccgagguccgcugcgucugccgcgacaacuggaagggcuccaaccgccccguccucuacaucaacauggccgacuacuccaucgaguccuccuacgucugcuccggccucgucggcgacaccccccgcaacgacgacuccuccuccuccuccaacugccgcgaccccaacaacgagcgcggcgcccccggcgucaagggcugggccuucgacgacggcaacgacgucuggaugggccgcaccaucaagaacggcucccgcuccggcuacgagaccuuccgcgucgucaacggcuggaccauggccaacuccaagucccagaucaaccgccaggucaucgucgacuccgacaacugguccggcuacuccggcaucuucuccgucgagggcaagaagugcaucaaccgcugcuucuacgucgagcucauccgcggccgcccccaggagccccgcgucugguggaccuccaacuccaucaucgucuucugcggcaccuccggcaccuacggcaccggcuccuggcccgacggcgccaacaucaacuucaugcccaucuga

SEQ ID NO: 119588 - RNA, 1401 nt, Artificial Sequence
  derived and/or modified CDS sequence (opt2) from neuraminidase__InfluenzaA__AGQ81766
augaaccccaaccagaagaucaucgccaucggcuccgucucccucaccaucgccaucaucugcuuccucaugcagaucgccauccucaccaccaccaugacccuccacuuccgccagaacgagugcuccaaccccuccaacaaccaggucguccccugcgagcccaucaucaucgagcgcaacaccguccaccucaacuccaccaccaucgagaaggagaucugccccaaggucgccgaguacaagaacugguccaagccccagugccagaucaccggcuucgcccccuucuccaaggacaacuccauccgccucuccgccggcggcgacaucugggucacccgcgagcccuacgucuccugcucccucggcaagugcuaccaguucgcccucggccagggcaccacccucaagaacaagcacuccaacggcaccacccacgaccgcaucccccaccgcacccuccucaugaacgagcucggcguccccuuccaccucggcaccaagcaggucugcaucgccugguccuccuccuccugccacgacggcaaggccuggcuccacaucugcgucaccggcgacgacaagaacgccaccgccuccaucaucuacgacggcaugcucgucgacuccaucggcuccugguccaagaacauccuccgcacccaggaguccgagugcgucugcaucaacggcaccugcgccgucgucaugaccgacggcuccgccuccggcaaggccgacacccgcauccucuucauccgcgagggcaagaucaucaacaucuccccccucuccggcuccgcccagcacgucgaggagugcuccugcuacccccgcuaccccgagguccgcugcgucugccgcgacaacuggaagggcuccaaccgccccguccucuacaucaacauggccgacuacuccaucgaguccuccuacgucugcuccggccucgucggcgacaccccccgcgacgacgacuccuucuccuccuccaacugccgcgaccccaacaacgagcgcggcgcccccggcgucaagggcugggccuucgacgacggcaacgacaucuggaugggccgcaccaucaaguccgacucccgcuccggcuacgagaccuuccgcgucgucaacggcuggaccaccgccaacuccaagucccagaucaaccgccaggucaucgucgacuccgacuccugguccggcuacuccggcaucuucuccgucgagggcaagaacugcaucaaccgcugcuucuacgucgagcucauccgcggccgcccccaggagaccaucgucugguggaccuccaacuccaucaucgucuucugcggcaccuccggcaccuacggcaccggcuccuggcccgacggcgccaacaucaacuucaugcccaucuga

SEQ ID NO: 119589 - RNA, 1401 nt, Artificial Sequence; identical to SEQ ID NO: 119588
  derived and/or modified CDS sequence (opt2) from neuraminidase__InfluenzaA__AGQ81767

SEQ ID NO: 119590 - RNA, 1410 nt, Artificial Sequence
  derived and/or modified CDS sequence (opt2) from neuraminidase__InfluenzaA__AGQ81768
augaaccccaaccagaagaucgucgccaucggcuccgucucccucaccaucgccaccaucugccuccucaugcagaucgccauccucgucaccaccaugacccuccacuucaagcacggcgagugcaccaacuccuccaacaaccaggccguccccugcggccccaucaucaucgagcgcaacaucaccgagaucguccaccucaacuccaccacccucgagaaggagaucugccccaaggccgccggcuaccgcgacugguccaagccccagugccagaucaccggcuucgcccccuucuccaaggacaacuccauccgccucuccgccuccggcgacaucugggucacccgcgagcccuacgucuccugcggccucggcaagugcuaccaguucgcccucggccagggcaccacccucgacaaccgccacuccaacggcaccucccacgaccgcaccccccaccgcacccuccucauguccgagcucggcguccccuuccaccucgccaccaagcaggucugcaucgccugguccuccuccuccugccacgacggcgaggccuggcuccacaucugcgucaccggcgacgaccgcaacgccaccgccuccaucaucuacgacggcaugcucgucgacuccaucggcuccugguccaagaacauccuccgcacccaggaguccgagugcgucugcaucaacggcaccugcaccgucgucaugaccgacggcuccgccuccggcaaggccgacacccgcauccucuucauccgcgagggcaagaucguccacaucuccccccucuccggcuccgcccagcacgucgaggagugcuccugcuacccccaguaccccgagguccgcugcgucugccgcgacaacuggcgcggcuccaaccgccccguccucuacaucaacauggccgacuacuccgucgacuccggcuacgucugcuccggccucgucggcgacaccccccgcaacgacgacaccuccuccuccuccaacugcaaggaccccaacaacgagcgcggcgcccccggcgucaagggcugggccuucgacuccggcaacgacaucuggaugggccgcaccaucgagaaggaccuccgcuccggcuacgagaccuuccgcgucaucggcggcuggaacaccgccaacuccaagucccagaccaaccgccaggucaucgucgacuccgacaacuccuccggcuacuccggcaucuucuccgucgagggcaaguccugcaucaaccgcugcuucuacgucgagcucauccgcggccgccccaaggagacccgcgucugguggaccuccaacuccaucaucgucuucugcggcaccuccggcaccuacggcaccggcuccuggcccgacggcgccaacaucaacuucaugcccaucuga

SEQ ID NO: 119591 - RNA, 1410 nt, Artificial Sequence
  derived and/or modified CDS sequence (opt2) from neuraminidase__InfluenzaA__AGQ81769
augaaccccaaccagaagaucgucgccaucggcuccgucucccucaccaucgccaccaucugccuccucaugcagaucgccauccucgucaccaccaugacccuccacuucaagcacggcgagugcaccaacuccuccaacaaccaggccguccccugcggccccaucaucaucgagcgcaacaucaccgagaucguccaccucaacuccaccacccucgagaaggagaucugccccaaggccgccggcuaccgcgacugguccaagccccagugccagaucaccggcuucgcccccuucuccaaggacaacuccauccgccucuccgccuccggcgacaucugggucacccgcgagcccuacgucuccugcggccucggcaagugcuaccaguucgcccucggccagggcaccacccucgacaaccgccacuccaacggcaccucccacgaccgcaccccccaccgcacccuccucauguccgagcucggcguccccuuccaccucgccaccaagcaggucugcaucgccugguccuccuccuccugccacgacggcgaggccuggcuccacaucugcgucaccggcgacgaccgcaacgccaccgccuccaucaucuacggcggcaugcucgucgacuccaucggcuccugguccaagaacauccuccgcacccaggaguccgagugcgucugcaucaacggcaccugcaccgucgucaugaccgacggcuccgccuccggcaaggccgacacccgcauccucuucauccgcgagggcaagaucguccacaucuccccccucuccggcuccgcccagcacgucgaggagugcuccugcuacccccaguaccccgagguccgcugcgucugccgcgacaacuggcgcggcuccaaccgccccguccucuacaucaacauggccgacuacuccgucgacuccggcuacgucugcuccggccucgucggcgacaccccccgcaacgacgacaccuccuccuccuccaacugcaaggaccccaacaacgagcgcggcgcccccggcgucaagggcugggccuucgacuccggcaacgacaucuggaugggccgcaccaucgagaaggaccuccgcuccggcuacgagaccuuccgcgucaucggcggcuggaacaccgccaacuccaagucccagaccaaccgccaggucaucgucgacuccgacaacuccuccggcuacuccggcaucuucuccgucgagggcaaguccugcaucaaccgcugcuucuacgucgagcucauccgcggccgccccaaggagacccgcgucugguggaccuccaacuccaucaucgucuucugcggcaccuccggcaccuacggcaccggcuccuggcccgacggcgccaacaucaacuucaugcccaucuga

SEQ ID NO: 119592 - RNA, 1401 nt, Artificial Sequence
  derived and/or modified CDS sequence (opt2) from neuraminidase__InfluenzaA__AGQ81770
augaaccccaaccagaagaucaucgccaucggcuccgucuccaucaccaucgccaucaucugcuucaucaugcagaucgccauccucaccaccaccaugacccuccacuuccgccagaacgagugcuccaaccccuccaacaaccaggucguccccugcgagcccaucaucaucgagcgcaacaccguccaccucaacuccaccaccaucgagaaggagaccugccccaaggucgccgaguacaagaacugguccaagccccagugccagaucaccggcuucgcccccuucuccaaggacaacuccauccgccucuccgccggcggcgacaucugggucacccgcgagcccuacgucuccugcucccucggcaagugcuaccaguucgcccucggccagggcaccacccucaagaacaagcacuccaacggcaccacccacgaccgcaucccccaccgcacccuccucaugaacgagcucggcguccccuuccaccucggcaccaagcaggucugcaucgccugguccuccuccuccugccacgacggcaaggccuggcuccacaucugcgucaccggcgacgacaagaacgccaccgccuccaucaucuacgacggcaugcucgucgacuccaucggcuccugguccaagaacauccuccgcacccaggaguccgagugcgucugcaucaacggcaccugcgccgucgucaugaccgacggcuccgccuccggcaaggccgacacccgcguccucuucauccgcgagggcaagaucaucaacaucuccccccucuccggcuccgcccagcacgucgaggagugcuccugcuacccccgcuaccccgagguccgcugcgucugccgcgacaacuggaagggcuccaaccgccccguccucuacaucaacauggccgacuacuccgucgaguccuccuacgucugcuccggccucgucggcgacaccccccgcgacgacgacuccuccuccuccuccaacugccgcgaccccaacaacgagcgcggcgcccccggcgucaagggcugggccuucgacgacggcaacgacaucuggaugggccgcaccaucaaguccgacucccgcuccggcuacgagaccuuccgcgucgucaacggcuggaccaccgccaacuccaagucccagaucaaccgccaggucaucgucgacuccgacuccugguccggcuacuccggcaucuucuccgucgagggcaagaacugcaucaaccgcugcuucuacgucgagcucauccgcggccgcccccaggagacccgcgucugguggaccuccaacuccaucaucgucuucugcggcaccuccggcaccuacggcaccggcuccuggcccgacggcgccaacaucaacuucaugcccaucuga

SEQ ID NO: 119593 - RNA, 1410 nt, Artificial Sequence
  derived and/or modified CDS sequence (opt2) from neuraminidase__InfluenzaA__AGQ81772
augaaccccaaccagaagaucgucgccaucggcuccgccucccucaccaucgccaccaugugccuccuccuccagaucgcccucuucgccaccaccaugacccuccacuucaagcagaccggcugcaccaacuccuccgacaaccaggccguccccugcggccccaucaucaucgagcgcaacaucaccgagaucguccaccucaacuccaccacccucgagaaggagaccugccccaaguccgccggcuaccgcaacugguccaagccccagugccagaucaccggcuucgcccccuucuccaaggacaacuccauccgccucgccgccgccggcgacaucugggucacccgcgagcccuacgucuccugcggccucggcaagugcuaccaguucgcccucggccagggcaccacccucgacaacaagcacuccaacggcaccacccacgaccgcaccccccaccgcacccuccucauguccgagcucggcguccccuuccaccucgccaccaagcaggucugcaucgccugguccuccuccuccugccacgacggcaaggccuggcuccacgucugcgucaccggcgacgacaagaacgccaccgccuccaucaucuacgacggcauccucgucgacuccaucgccuccugguccaagaacauccuccgcacccaggaguccgagugcgucugcaucaacggcaccugcaccgucgucaugaccgacggcuccgccuccggccgcgccgacacccgcauccucuucauccgcgagggcaagaucguccacaucuccccccucuccggcuccgcccagcacgucgaggagugcuccugcuacccccgcuaccccgagguccgcugcgucugccgcgacaacuggaagggcuccaaccgccccguccucuucaucaacauggccgacuacuccaucgacuccuccuacgucugccccggccucgucggcgacaccccccgcaacgacgaccgcuccuccuccuccaacugccgcgaccccaacaacgagcgcggcgcccccggcgucaagggcugggccuucgacuccggcaacgacaucuggaugggccgcaccaucgagaaggacucccgcuccggcuacgagaccuuccgcgucaucuccggcugguccaccgccaacuccaagucccagaucaaccgccaggucaucgucgaccgcgacaacuccuccggcuacuccggcaucuucuccgucgagggcaaguccugcaucaaccgcugcuucuacgucgagcucauccgcggccgccccaaggagaaccgcgucugguggaccuccaacuccaucaucgucuucugcggcaccuccggcaccuacggcaccggcuccuggcccgacggcgccaacaucaaccucaugcccaucuga

SEQ ID NO: 119594 - RNA, 1401 nt, Artificial Sequence
  derived and/or modified CDS sequence (opt2) from neuraminidase__InfluenzaA__AGQ81773
augaaccccaaccagaagaucaucgccaucggcuccgucucccucaccaucgccaucaucugcuuccucaugcagaucgccauccucaccaccaccaugacccuccacuuccgccagaacgagugcuccaaccccuccaacaaccaggucguccccugcgagcccaucaucaucgagcgcaagaccguccaccucaacuccaccaccaucgagaaggagaucugccccaaggucgccgaguacaagaacugguccaagccccagugccagaucaccggcuucgcccccuucuccaaggacaacuccauccgccucuccgccggcggcgacaucugggucacccgcgagcccuacgucuccugcucccucggcaagugcuaccaguucgcccucggccagggcaccacccucaagaacaagcacuccaacggcaccacccacgaccgcaucccccaccgcacccuccucaugaacgagcucggcgucccccuccacuggggcaccaagcaggucugcaucgccugguccuccuccuccugccacgacggcaaggccuggcuccacaucugcgucaccggcgacgacaagaacgccaccgccuccaucaucuacgacggcaugcucgucgacuccaucggcuccugguccaagaacauccuccgcacccaggaguccgagugcgucugcaucaacggcaccugcgccgucgucaugaccgacggcuccgccuccggcaaggccgacacccgcguccucuucauccgcgagggcaagaucaucaacaucuccccccucuccggcuccgcccagcacgucgaggagugcuccugcuacccccgcuaccccgagguccgcugcgucugccgcgacaacuggaagggcuccaaccgccccguccucuacaucaacauggccgacuacuccaucgaguccuccuacgucugcuccggccucgucggcgacaccccccgcgacgacgacuccuccuccuccuccaacugccgcgaccccaacaacgagcgcggcgcccccggcgucaagggcuggggcuucgacgacggcaacgacaucuggaugggccgcaccaucaaguccgacucccgcuccggcuacgagaccuuccgcgucgucaacggcuggaccaccgccaacuccaagucccagaucaaccgccaggucaucgucgacuccgacuccugguccggcuacuccggcaucuucuccgucgagggcaagaacugcaucaaccgcugcuucuacgucgagcucauccgcggccgcccccaggagacccgcgucugguggaccuccaacuccaucaucgucuucugcggcaccuccggcaccuacggcaccggcuccuggcccgacggcgccaacaucaacuucaugcccaucuga

SEQ ID NO: 119595 - RNA, 1401 nt, Artificial Sequence
  derived and/or modified CDS sequence (opt2) from neuraminidase__InfluenzaA__AGQ81774
augaaccccaaccagaagaucaucgccaucggcuccgucucccucaucaucgccaucaucugccuccucaugcagaucgccauccucaccaccaccaugacccuccacuuccgccagaacgagugcuccaaccccuccaacaaccaggucaugcccugcgagcccaucaucaucgagcgcaacaccguccaccucaacuccaccaccaucgagcgcgagaucugccccaaggucgccgaguacaagaacugguccaagccccagugccagaucaccggcuucgcccccuucuccaaggacaacuccauccgccucuccgccggcggcgacaucugggucacccgcgagcccuacgucuccugcucccucgacaagugcuaccaguucgcccucggccagggcaccacccucaagaacaagcacuccaacggcaccacccacgaccgcaccccccaccgcacccuccucaugaacgagcucggcguccccuuccaccucggcaccaagcaggucugcaucgccugguccuccuccuccugcuacgacggcaaggccuggcuccacaucugcgucaccggcgacgacaagaacgccaccgccuccaucaucuacgacggcaugcucgucgacuccaucggcuccugguccaagaacauccuccgcacccaggaguccgagugcgucugcaucaacggcaccugcgccgucgucaugaccgacggcuccgccuccggcaaggccgacacccgcguccucuucauccgcgagggcaagaucaucaacaucuccccccucuccggcuccgcccagcacgucgaggagugcuccugcuacccccgcuaccccgagguccgcugcgucugccgcgacaacuggaagggcuccaaccgccccauccucuacaucaacauggccgacuacuccaucgaguccuccuacgucugcuccggccucgucggcgacaccccccgcaacgacgacuccuccuccuccuccaacugccgcgaccccaacaacgagcgcggcgcccccggcgucaagggcugggccuucgacgacggcaacgacgucuggaugggccgcaccaucaagaacggcucccgcuccggcuacgagaccuuccgcgucgucaacggcuggaccaucgccaacuccaagucccagaucaaccgccaggucaucgucgacuccgacgacugguccggcuacuccggcaucuucuccgucgagggcaagaagugcaucaaccgcugcuucuacgucgagcucauccgcggccgcccccaggagccccgcgucugguggaccuccaacuccaucaucgucuucugcggcaccuccggcaccuacggcaccggcuccuggcccgacggcgccaacaucaacuucaugcccaucuga

SEQ ID NO: 119596 - RNA, 1401 nt, Artificial Sequence
  derived and/or modified CDS sequence (opt2) from neuraminidase__InfluenzaA__AGQ81776
augaaccccaaccagaagaucaucgccaucggcuccgucucccucaccaucgccaucaucugcuuccucaugcagaucgccauccucaccaccaccaugacccuccacuuccgccagaacgagugcuccaaccccuccaacaaccaggucguccccugcgagcccaucaucaucgagcgcaacaccguccaccucaacuccaccaccaucgagaaggagaucugccccaaggucgccgaguacaagaacugguccaagccccagugccagaucaccggcuucgcccccuucuccaaggacaacuccauccgccucuccgccggcggcgacaucugggucacccgcgagcccuacgucuccugcucccucggcaagugcuaccaguucgcccucggccagggcaccacccucaagaacaagcacuccaacggcaccacccacgaccgcaucccccaccgcacccuccucaugaacgagcucggcguccccuuccaccucggcaccaagcaggucugcaucgccugguccuccuccuccugccacgacggcaaggccuggcuccacaucugcgucaccggcgacgacaagaacgccaccgccuccaucaucuacgacggcaugcucgucgacuccaucggcuccugguccaagaacauccuccgcacccaggaguccgagugcgucugcaucaacggcaccugcgccgucgucaugaccgacggcuccgccuccggcaaggccgacacccgcguccucuucauccgcgagggcaagaucaucaacaucuccccccucuccggcuccgcccagcacgucgaggagugcuccugcuacccccgcuaccccgagguccgcugcgucugccgcgacaacuggaagggcuccaaccgccccguccucuacaucaacauggccgacuacuccaucgaguccuccuacgucugcuccggccucgucggcgacaccccccgcgacgacgacuccuccuccuccuccaacugccgcgaccccaacaacgagcgcggcgcccccggcgucaagggcugggccuucgacgacggcaacgacaucuggaugggccgcaccaucaaguccgacucccgcuccggcuacgagaccuuccgcgucaucgacggcuggaccaccgccgacuccaagucccagaucaaccgccaggucaucgucgacuccgacuccugguccggcuacuccggcaucuucuccgucgagggcaagaacugcaucaaccgcugcuucuacgucgagcucauccgcggccgcccccaggagacccgcgucugguggaccuccaacuccaucaucgucuucugcggcaccuccggcaccuacggcaccggcuccuggcccgacggcgccaacaucaacuucaugcccaucuga

SEQ ID NO: 119597 - RNA, 1410 nt, Artificial Sequence
  derived and/or modified CDS sequence (opt2) from neuraminidase__InfluenzaA__AGQ81777
augaaccccaaccagaagaucgucaccaucggcuccgccucccucaccaucgccaccaugugccuccuccuccagaucgcccucuucgccaccaccaugacccuccacuucaagcagaccggcugcaccaacuccuccgacaaccaggccguccccugcggccccaucaucaucgagcgcaacaucaccgagaucguccaccucaacuccaccacccucgagaaggagaccugccccaaguccgccggcuaccgcaacugguccaagccccagugccagaucaccggcuucgcccccuucuccaaggacaacuccauccgccucgccgccgccggcgacaucugggucacccgcgagcccuacgucuccugcggccucggcaagugcuaccaguucgcccucggccagggcaccacccucgacaacaagcacuccaacggcaccacccacgaccgcaccccccaccgcacccuccucaugaacgagcucggcguccccuuccaccucgccaccaagcaggucugcaucgccugguccuccuccuccugccacgacggcaaggccuggcuccacgucugcgucaccggcgacgacaagaacgccaccgccuccaucaucuacgacggcauccucgucgacuccaucgccuccugguccaagaacauccuccgcacccaggaguccgagugcgucugcaucaacggcaccugcaccgucgucaugaccgacggcuccgccuccggccgcgccgacacccgcauccucuucauccgcgagggcaagaucguccacaucuccccccucuccggcuccgcccagcacgucgaggagugcuccugcuacccccgcuaccccgagguccgcugcgucugccgcgacaacuggaacggcuccaaccgccccguccucuucaucaacauggccgacuacuccaucgacuccuccuacgucugcuccggccucgucggcgacaccccccgcaacgacgaccgcuccuccuccuccaacugccgcgaccccaacaacgagcgcggcgcccccggcgucaagggcugggccuucgacuccggcaacgacaucuggaugggccgcaccaucgagaaggacucccgcuccggcuacgagaccuuccgcgucaucuccggcugguccaccgccaacuccaagucccagaucaaccgccaggucaucgucgaccgcgacaacuccuccggcuacuccggcaucuucuccgucgagggcaaguccugcaucaaccgcugcuucuacgucgagcucauccgcggccgccccaaggagaaccgcgucugguggaccuccaacuccaucaucgucuucugcggcaccuccggcaccuacggcaccggcuccuggcccgacggcgccaacaucaaccucaugcccaucuga

SEQ ID NO: 119598 - RNA, 1410 nt, Artificial Sequence
  derived and/or modified CDS sequence (opt2) from neuraminidase__InfluenzaA__AGQ81778
augaaccccaaccagaagaucgucaccaucggcuccgccucccucaccaucgccaccaugugccuccuccuccagaucgcccucuucgccaccaccaugacccuccacuucaagcagaccggcugcaccaacuccuccgacaaccaggccguccccugcggccccaucaucaucgagcgcaacaucaccgagaucguccaccucaacuccaccacccucgagaaggagaccugccccaaguccgccggcuaccgcaacugguccaagccccagugccagaucaccggcuucgcccccuucuccaaggacaacuccauccgccucgccgccgccggcgacaucugggucacccgcgagcccuacgucuccugcggccucggcaagugcuaccaguucgcccucggccagggcaccacccucgacaacaagcacuccaacggcaccacccacgaccgcaccccccaccgcacccuccucaugaacgagcucggcguccccuuccaccucgccaccaagcaggucugcaucgccugguccuccuccuccugccacgacggcaaggccuggcuccacgucugcgucaccggcgacgacaagaacgccaccgccuccaucaucuacgacggcauccucgucgacuccaucgccuccugguccaagaacauccuccgcacccaggaguccgagugcgucugcaucaacggcaccugcaccgucgucaugaccgacggcuccgccuccggccgcgccgacacccgcauccucuucauccgcgagggcaagaucguccacaucuccccccucuccggcuccgcccagcacgucgaggagugcuccugcuacccccgcuaccccgagguccgcugcgucugccgcgacaacuggaagggcuccaaccgccccguccucuucaucaacauggccgacuacuccaucgacuccuccuacgucugcuccggccucgucggcgacaccccccgcaacgacgaccgcuccuccuccuccaacugccgcgaccccaacaacgagcgcggcgcccccggcgucaagggcugggccuucgacuccggcaacgacaucuggaugggccgcaccaucgagaaggacucccgcuccggcuacgagaccuuccgcgucaucuccggcugguccaccgccaacuccaagucccagaucaaccgccaggucaucgucgaccgcgacaacuccuccggcuacuccggcaucuucuccgucgagggcaaguccugcaucaaccgcugcuucuacgucgagcucauccgcggccgccccaaggagaaccgcgucugguggaccuccaacuccaucaucgucuucugcggcaccuccggcaccuacggcaccggcuccuggcccgacggcgccaacaucaaccucaugcccaucuga

SEQ ID NO: 119599 - RNA, 1410 nt, Artificial Sequence
  derived and/or modified CDS sequence (opt2) from neuraminidase__InfluenzaA__AGQ81779
augaaccccaaccagaagaucgucgccaucggcuccgccucccucaccaucgccaccaugugccuccuccuccagaucgcccucuucgccaccaccaugacccuccacuucaagcagaccggcugcaccaacuccuccgacaaccaggccguccccugcggccccaucaucaucgagcgcaacaucaccgagaucguccaccucaacuccaccacccucgagaaggagaccugccccaaguccgccggcuaccgcaacugguccaagccccagugccagaucaccggcuucgcccccuucuccaaggacaacuccauccgccucgccgccgccggcgacaucugggucacccgcgagcccuacgucuccugcggccucggcaagugcuaccaguucgcccucggccagggcaccacccucgacaacaagcacuccaacggcaccacccacgaccgcaccccccaccgcacccuccucaugaacgagcucggcguccccuuccaccucgccaccaagcaggucugcaucgccugguccuccuccuccugccacgacggcaaggccuggcuccacgucugcgucaccggcgacgacaagaacgccaccgccuccaucaucuacgacggcauccucgucgacuccaucgccuccugguccaagaacauccuccgcacccaggaguccgagugcgucugcaucaacggcaccugcaccgucgucaugaccgacggcuccgccuccggccgcgccgacacccgcauccucuucauccgcgagggcaagaucguccacaucuccccccucuccggcuccgcccagcacgucgaggagugcuccugcuacccccgcuaccccgagauccgcugcgucugccgcgacaacuggaagggcuccaaccgccccguccucuucaucaacauggccgacuacuccaucgacuccuccuacgucugcuccggccucgucggcgacaccccccgcaacgacgaccgcuccuccuccuccaacugccgcgaccccaacaacgagcgcggcgcccccggcgucaagggcugggccuucgacuccggcaacgacaucuggaugggccgcaccaucgagaaggacucccgcuccggcuacgagaccuuccgcgucaucuccggcugguccaccgccaacuccaagucccagaucaaccgccaggucaucgucgaccgcgacaacuccuccggcuacuccggcaucuucuccgucgagggcaaguccugcaucaaccgcugcuucuacgucgagcucauccgcggccgccccaaggagaaccgcgucugguggaccuccaacuccaucaucgucuucugcggcaccuccggcaccuacggcaccggcuccuggcccgacggcgccaacaucaaccucaugcccaucuga

SEQ ID NO: 119600 - RNA, 1410 nt, Artificial Sequence
  derived and/or modified CDS sequence (opt2) from neuraminidase__InfluenzaA__AGQ81780
augaaccccaaccagaagaucgucgccaucggcuccgccucccucaccaucgccaccaugugccuccuccuccagaucgcccucuucgccaccaccaugacccuccacuucaagcagaccggcugcaccaacuccuccgacaaccaggccguccccugcggccccaucaucaucgagcgcaacaucaccgagaucguccaccucaacuccaccacccucgagaaggagaccugccccaaguccgccggcuaccgcaacugguccaagccccagugccagaucaccggcuucgcccccuucuccaaggacaacuccauccgccucgccgccgccggcgacaucugggucacccgcgagcccuacgucuccugcggccucggcaagugcuaccaguucgcccucggccagggcaccacccucgacaacaagcacuccaacggcaccacccacgaccgcaccccccaccgcacccuccucaugaacgagcucggcguccccuuccaccucgccaccaagcaggucugcaucgccugguccuccuccuccugccacgacggcaaggccuggcuccacgucugcgucaccggcgacgacaagaacgccaccgccuccaucaucuacgacggcauccucgucgacuccaucgccuccugguccaagaacauccuccgcacccaggaguccgagugcgucugcaucaacggcaccugcaccgucgucaugaccgacggcuccgccuccggccgcgccgacacccgcauccucuucauccgcgagggcaagaucguccacaucuccccccucuccggcuccgcccagcacgucgaggagugcuccugcuacccccgcuaccccgagguccgcugcgucugccgcgacaacuggaagggcuccaaccgccccguccucuucaucaacauggccgacuacuccaucgacuccuccuacgucugcuccggccucgucggcgacaccccccgcaacgacgaccgcuccuccuccuccaacugccgcgaccccaacaacgagcgcggcgccuccggcgucaagggcugggccuucgacuccggcaacgacaucuggaugggccgcaccaucgagaaggacucccgcuccggcuacgagaccuuccgcgucaucuccggcugguccaccgccaacuccaagucccagaucaaccgccaggucaucgucgaccgcgacaacuccuccggcuacuccggcaucuucuccgucgagggcaaguccugcaucaaccgcugcuucuacgucgagcucauccgcggccgccccaaggagaaccgcgucugguggaccuccaacuccaucaucgucuucugcggcaccuccggcaccuacggcaccggcuccuggcccgacggcgccaacaucaaccucaugcccaucuga

SEQ ID NO: 119601 - RNA, 1401 nt, Artificial Sequence
  derived and/or modified CDS sequence (opt2) from neuraminidase__InfluenzaA__AGQ81781
augaaccccaaccagaagaucaucgccaucggcuccgucucccucaccaucgccaucaucugcuuccucaugcagaucgccauccucaccaccaccaugaccccccacuuccgccagaacgagugcuccaaccccuccaacaaccaggucguccccugcgagcccaucaucaucgagcgcaacaccguccaccucaacuccaccaccaucgagaaggagaucugccccaaggucgccgaguacaagaacugguccaagccccagugccagaucaccggcuucgcccccuucuccaaggacaacuccauccgccucuccgccggcggcgacaucugggucacccgcgagcccuacgucuccugcucccucggcaagugcuaccaguucgcccucggccagggcaccacccucaagaacaagcacuccaacggcaccacccacgaccgcaucccccaccgcacccuccucaugaacgagcucggcguccccuuccaccucggcaccaagcaggucugcaucgccugguccuccuccuccugccacgacggcaaggccuggcuccacaucugcgucaccggcgacgacaagaacgccaccgccuccaucaucuacgacggcaugcucgucgacuccaucggcuccugguccaagaacauccuccgcacccaggaguccgagugcgucugcaucaacggcaccugcgccgucgucaugaccgacggcuccgccuccggcaaggccgacacccgcauccucuucauccgcgagggcaagaucaucaacaucuccccccucuccggcuccgcccagcacgucgaggagugcuccugcuacccccgcuaccccgagguccgcugcgucugccgcgacaacuggaagggcuccaaccgccccguccucuacaucaacauggccgacuacuccaucgaguccuccuacgucugcuccggccucgucggcgacaccccccgcgacgacgacuccuccuccuccuccaacugccgcgaccccaacaacgagcgcggcgcccccggcgucaagggcugggccuucgacgacggcaacgacaucuggaugggccgcaccaucaaguccgacucccgcuccggcuacgagaccuuccgcgucgucaacggcuggaccaccgccaacuccaagucccagaucaaccgccaggucaucgucgacuccgacuccugguccggcuacuccggcaucuucuccgucgagggcaagaacugcaucaaccgcugcuucuacgucgagcucauccgcggccgcccccaggagacccgcgucugguggaccuccaacuccaucaucgucuucugcggcaccuccggcaccuacggcaccggcuccuggcccgacggcgccgacaucaaccucaugcccaucuga

SEQ ID NO: 119602 - RNA, 1410 nt, Artificial Sequence
  derived and/or modified CDS sequence (opt2) from neuraminidase__InfluenzaA__AGQ81783
augaaccccaaccagaagaucgucaccaucggcuccgccucccucaccaucgccaccaugugccuccuccuccagaucgcccucuucgccaccaccaugacccuccacuucaagcagaccggcugcaccaacuccuccgacaaccaggccguccccugcggccccaucaucaucgagcgcaacaucaccgagaucguccaccucaacuccaccacccucgagaaggagaccugccccaaguccgccggcuaccgcaacugguccaagccccagugccagaucaccggcuucgcccccuucuccaaggacaacuccauccgccucgccgccgccggcgacaucugggucacccgcgagcccuacgucuccugcggccucggcaagugcuaccaguucgcccucggccagggcaccacccucgacaacaagcacuccaacggcaccacccacgaccgcaccccccaccgcacccuccucaugaacgagcucggcguccccuuccaccucgccaccaagcaggucugcaucgccugguccuccuccuccugccacgacggcaaggccuggcuccacgucugcgucaccggcgacgacaagaacgccaccgccuccaucaucuacaacggcauccucgucgacuccaucgccuccugguccaagaacauccuccgcacccaggaguccgagugcgucugcaucaacggcaccugcaccgucgucaugaccgacggcuccgccuccggccgcgccgacacccgcauccucuucauccgcgagggcaagaucguccacaucuccccccucuccggcuccgcccagcacgucgaggagugcuccugcuacccccgcuaccccgagguccgcugcgucugccgcgacaacuggaagggcuccaaccgccccguccucuucaucaacauggccgacuacuccaucgacuccuccuacgucugcuccggccucgucggcgacaccccccgcaacgacgaccgcuccuccuccuccaacugccgcgaccccaacaacgagcgcggcgcccccggcgucaagggcugggccuucgacuccggcaacgacaucuggaugggccgcaccaucgagaaggacucccgcuccggcuacgagaccuuccgcgucaucuccggcugguccaccgccaacuccaagucccagaucaaccgccaggucaucgucgaccgcgacaacuccuccggcuacuccggcaucuucuccgucgagggcaaguccugcaucaaccgcugcuucuacgucgagcucauccgcggccgccccaaggagaaccgcgucugguggaccuccaacuccaucaucgucuucugcggcaccuccggcaccuacggcaccggcuccuggcccgacggcgccaacaucaaccucaugcccaucuga

SEQ ID NO: 119603 - RNA, 1401 nt, Artificial Sequence
  derived and/or modified CDS sequence (opt2) from neuraminidase__InfluenzaA__AGQ81784
augaaccccaaccagaagaucaucgccaucggcuccgucucccucaccaucgccaucaucugcuuccucaugcagaucgccauccucaccaccaccaugacccuccacuuccgccagaacgagugcuccaaccccuccaacaaccaggucguccccugcgagcccaucaucaucgagcgcaacaccguccaccucaacuccaccaccaucgagaaggagaucugccccaaggucgccgaguacaagaacugguccaagccccagugccagaucaccggcuucgcccccuucuccaaggacaacuccauccgccucuccgccggcggcgacaucugggucacccgcgagcccuacgucuccugcucccucggcaagugcuaccaguucgcccucggccagggcaccacccuccgcaacaagcacuccaacggcaccacccacgaccgcaucccccaccgcacccuccucaugaacgagcucggcguccccuuccaccucggcaccaagcaggucugcaucgccugguccuccuccuccugccacgacggcaaggccuggcuccacaucugcgucaccggcgacgacaagaacgccaccgccuccaucaucuacgacggcaugcucgucgacuccaucggcuccugguccaagaacauccuccgcacccaggaguccgagugcgucugcaucaacggcaccugcgccgucgucaugaccgacggcaacgccuccggcaaggccgacacccgcguccucuucauccgcgagggcaagaucaucaacaucuccccccucuccggcuccgcccagcacgucgaggagugcuccugcuacccccgcuaccccgagguccgcugcgucugccgcgacaacuggaagggcuccaaccgccccguccucuacaucaacauggccgacuacuccaucgaguccuccuacgucugcuccggccucgucggcgacaccccccgcgacgacgacuccuccuccuccuccaacugccgcgaccccaacaacgagcgcggcgcccccggcgucaagggcugggccuucgacgacggcaacgacaucuggaugggccgcaccaucaaguccgacucccgcuccggcuacgagaccuuccgcgucgucaacggcuggaccaccgccaacuccaagucccagaucaaccgccaggucaucgucgacuccgacuccugguccggcuacuccggcaucuucuccgucgagggcaagaacugcaucaaccgcugcuucuacgucgagcucauccgcggccgcccccaggagacccgcgucugguggaccuccaacuccaucaucgucuucugcggcaccuccggcaccuacggcaccggcuccuggcccgacggcgccgacaucaacuucaugcccaucuga

SEQ ID NO: 119604 - RNA, 1401 nt, Artificial Sequence
  derived and/or modified CDS sequence (opt2) from neuraminidase__InfluenzaA__AGQ81785
augaaccccaaccagaagaucaucgccaucggcuccgucucccucaccaucgccaucaucugcuucaucaugcagaucgccauccucaccaccaccaugaccccccacuuccgccagaacgagugcuccaaccccuccaacaaccaggucguccccugcgagcccaucaucaucgagcgcaacaccguccaccucaacuccaccaccaucgagaaggagaucugccccaaggucgccgaguacaagaacugguccaagccccagugccagaucaccggcuucgcccccuucuccaaggacaacuccauccgccucuccgccggcggcgacaucugggucacccgcgagcccuacgucuccugcucccucggcaagugcuaccaguucgcccucggccagggcaccacccucaagaacaagcacuccaacggcaccacccacgaccgcaucccccaccgcacccuccucaugaacgagcucggcguccccuuccaccucggcaccaagcaggucugcaucgccugguccuccuccuccugccacgacggcaaggccuggcuccacaucugcgucaccggcgacgacaagaacgccaccgccuccaucaucuacgacggcaugcucgucgacuccaucggcuccugguccaagaacauccuccgcacccaggaguccgagugcgucugcaucaacggcaccugcgccgucgucaugaccgacggcuccgccuccggcaaggccgacacccgcauccucuucauccgcgagggcaagaucaucaacaucuccccccucuccggcuccgcccagcacgucgaggagugcuccugcuacccccgcuaccccgagguccgcugcgucugccgcgacaacuggaagggcuccaaccgccccguccucuacaucaacauggccgacuacuccaucgaguccuccuacgucugcuccggccucgucggcgacaccccccgcgacgacgacuccuccuccuccuccaacugccgcgaccccaacaacgagcgcggcgcccccggcgucaagggcugggccuucgacgacggcaacgacaucuggaugggccgcaccaucaaguccgacucccgcuccggcuacgagaccuuccgcgucgucaacggcuggaccaccgccaacuccaagucccagaucaaccgccaggucaucgucgacuccgacuccugguccggcuacuccggcaucuucuccgucgagggcaagaacugcaucaaccgcugcuucuacgucgagcucauccgcggccgcccccaggagacccgcgucugguggaccuccaacuccaucaucgucuucugcggcaccuccggcaccuacggcaccggcuccuggcccgacggcgccgacaucaaccucaugcccaucuga

SEQ ID NO: 119605 - RNA, 1401 nt, Artificial Sequence
  derived and/or modified CDS sequence (opt2) from neuraminidase__InfluenzaA__AGQ81787
augaaccccaaccagaagaucaucgccaucggcuccgucucccucaucaucgccaucaucugccuccucaugcagaucgccauccucaccaccaccaugacccuccacuuccgccagaacgagugcuccaaccccuccaacaaccaggucguccccugcgagcccaucaucaucgagcgcaacaccguccaccucaacuccaccaccaucgagcgcgagaucugccccaaggucgccgaguacaagaacugguccaagccccagugccagaucaccggcuucgcccccuucuccaaggacaacuccauccgccucuccgccggcggcgacaucugggucacccgcgagcccuacgucuccugcucccucgacaagugcuaccaguucgcccucggccagggcaccacccucaagaacaagcacuccaacggcaccacccacgaccgcaccccccaccgcacccuccucaugaacgagcucggcguccccuuccaccucggcaccaagcaggucugcaucgccugguccuccuccuccugcuacgacggcaaggccuggcuccacaucugcgucaccggcgacgacaagaacgccaccgccuccaucaucuacgacggcaugcucgucgacuccaucggcuccugguccaagaacauccuccgcacccaggaguccgagugcgucugcaucaacggcaccugcgccgucgucaugaccgacggcuccgccuccggcaaggccgacacccgcguccucuucauccgcgagggcaagaucaucaacaucuccccccucuccggcuccgcccagcacgucgaggagugcuccugcuacccccgcuaccccgagguccgcugcgucugccgcgacaacuggaagggcuccaaccgccccauccucuacaucaacauggccgacuacuccaucgaguccuccuacgucugcuccggccucgucggcgacaccccccgcaacgacgacuccuccuccuccuccaacugccgcgaccccaacaacgagcgcggcgcccccggcgucaagggcugggccuucgacgacggcaacgacgucuggaugggccgcaccaucaagaacggcucccgcuccggcuacgagaccuuccgcgucgucaacggcuggaccauggccaacuccaagucccagaucaaccgccaggucaucgucgacuccgacgacugguccggcuacuccggcaucuucuccgucgagggcaagaagugcaucaaccgcugcuucuacgucgagcucauccgcggccgcccccaggagccccgcgucugguggaccuccaacuccaucaucgucuucugcggcaccuccggcaccuacggcaccggcuccuggcccgacggcgccaacaucaacuucaugcccaucuga

SEQ ID NO: 119606 - RNA, 1401 nt, Artificial Sequence
  derived and/or modified CDS sequence (opt2) from neuraminidase__InfluenzaA__AGQ81789
augaaccccaaccagaagaucaucgccaucggcuccgucucccucaccaucgccaucaucugccuccucaugcagaucgccauccucaccaccaccaugaccccccacuuccgccagaacgagugcuccaaccccuccaacaaccaggucguccccugcgagcccaucaucaucgagcgcaacaccguccaccucaacuccaccaccaucgagaaggagaucugccccaaggucgccgaguacaagaacugguccaagccccagugccagaucaccggcuucgcccccuucuccaaggacaacuccauccgccucuccgccggcggcgacaucugggucacccgcgagcccuacgucuccugcucccucggcaagugcuaccaguucgcccucggccagggcaccacccucaagaacaagcacuccaacggcaccacccacgaccgcaucccccaccgcacccuccucaugaacgagcucggcguccccuuccaccucggcaccaagcaggucugcaucgccugguccuccuccuccugccacgacggcaaggccuggcuccacaucugcgucaccggcgacgacaagaacgccaccgccuccaucaucuacgacggcaugcucgucgacuccaucggcuccugguccaagaacauccuccgcacccaggaguccgagugcgucugcaucaacggcaccugcgccgucgucaugaccgacggcuccgccuccggcaaggccgacacccgcauccucuucauccgcgagggcaagaucaucaacaucuccccccucuccggcuccgcccagcacgucgaggagugcuccugcuacccccgcuaccccgagguccgcugcgucugccgcgacaacuggaagggcuccaaccgccccguccucuacaucaacauggccgacuacuccaucgaguccuccuacgucugcuccggccucgucggcgacaccccccgcgacgacgacuccuccuccuccuccaacugccgcgaccccaacaacgagcgcggcgcccccggcgucaagggcugggccuucgacgacggcaacgacaucuggaugggccgcaccaucaaguccgacucccgcuccggcuacgagaccuuccgcgucgucaacggcuggaccaccgccaacuccaagucccagaucaaccgccaggucaucgucgacuccgacuccugguccggcuacuccggcaucuucuccgucgagggcaagaacugcaucaaccgcugcuucuacgucgagcucauccgcggccgcccccaggagacccgcgucugguggaccuccaacuccaucaucgucuucugcggcaccuccggcaccuacggcaccggcuccuggcccgacggcgccgacaucaaccucaugcccaucuga

SEQ ID NO: 119607 - RNA, 1401 nt, Artificial Sequence
  derived and/or modified CDS sequence (opt2) from neuraminidase__InfluenzaA__AGQ81790
augaaccccaaccagaagaucaucgccaucggcuccgucucccucaucaucgccaucaucugccuccucaugcagaucgccauccucaccaccaccaugacccuccacuuccgccagaacgagugcuccaaccccuccaacaaccaggccaugcccugcgagcccaucaucaucgagcgcaacaccguccaccucaacuccaccaccaucgagcgcgagaucugccccaaggucaccgaguacaagaacugguccaagccccagugccagaucaccggcuucgcccccuucuccaaggacaacuccauccgccucuccgccggcggcgacaucugggucacccgcgagcccuacgucuccugcucccucgacaagugcuaccaguucgcccucggccagggcaccacccucaagaacaagcacuccaacggcaccacccacgaccgcaccccccaccgcacccuccucaugaacgagcucggcguccccuuccaccucggcaccaagcaggucugcaucgccugguccuccuccuccugcuacgacggcaaggccuggcuccacaucugcgucaccggcgacgacaagaacgccaccgccuccaucaucuacgacggcaugcucgucgacuccaucggcuccugguccaagaacauccuccgcacccaggaguccgagugcgucugcaucaacggcaccugcgccgucgucaugaccgacggcuccgccuccggccgcgccgacacccgcguccucuucauccgcgagggcaagaucaucaacaucuccccccucuccggcaacgcccagcacgucgaggagugcuccugcuacccccgcuaccccgagguccgcugcgucugccgcgacaacuggaagggcuccaaccgccccauccucuacaucaacauggccgacuacuccaucgaguccuccuacgucugcuccggccucgucggcgacaccccccgcaacgacgacuccuccuccuccuccaacugccgcgaccccaacaacgagcgcggcgcccccggcgucaagggcugggccuucgacgacggcaacgacgucuggaugggccgcaccaucaagaacggcucccgcuccggcuacgagaccuuccgcgucgucaacggcuggaccauggccaacuccaagucccagaucaaccgccaggucaucgucgacuccgacgagugguccggcuacuccggcaucuucuccgucgagggcaagaagugcaucaaccgcugcuucuacgucgagcucauccgcggccgcccccaggagccccgcgucugguggaccuccaacuccaucaucgucuucugcggcaccuccggcaccuacggcaccggcuccuggcccgacggcgccaacaucaacuucaugcccaucuga

SEQ ID NO: 119608 - RNA, 1401 nt, Artificial Sequence
  derived and/or modified CDS sequence (opt2) from neuraminidase__InfluenzaA__AGQ81792
augaaccccaaccagaagaucaucgccaucggcuccgucucccucaucaucgccaucaucugccuccucaugcagaucgccauccucaccaccaccaugacccuccacuuccgccagaacgagugcuccaaccccuccaacaaccaggucaugcccugcgagcccaucaucaucgagcgcaacaccguccaccucaacuccaccaccaucgagcgcgagaucugccccaaggucgccgaguacaagaacugguccaagccccagugccagaucaccggcuucgcccccuucuccaaggacaacuccauccgccucuccgccggcggcgacaucugggucacccgcgagcccuacgucuccugcucccucaacaagugcuaccaguucgcccucggccagggcaccacccucgagaacaagcacuccaacggcaccacccacgaccgcaccccccaccgcacccuccucaugaacgagcucggcguccccuuccaccucggcaccaagcaggucugcauggccugguccuccuccuccugcuacgacggcaaggccuggcuccacaucugcgucaccggcgacgacaagaacgccaccgccuccgucaucuacgacggcaugcucgucgacuccaucggcuccuggucccagaacauccuccgcacccaggaguccgagugcgucugcaucaacggcaccugcgccgucgucaugaccgacggcuccgccuccggcaaggccgacacccgcguccucuucauccgcgagggcaagaucaucaacaucuccccccucuccggcuccgcccagcacgucgaggagugcuccugcuacccccgcuaccccgagguccgcugcgucugccgcgacaacuggaagggcuccaaccgccccauccucuacaucaacauggccgacuacuccaucgaguccuccuacgucugcuccggccucgucggcgacaccccccgcaacgacgacuccuccuccuccuccaacugccgcgaccccaacaacgagcgcggcgcccccggcgucaagggcugggccuucgacgacggcaacgacgucuggaugggccgcaccaucaagaacggcucccgcuccggcuacgagaccuuccgcgucgucaacggcuggaccauggccaacuccaagucccagaucaaccgccaggucaucgucgacuccgacgacugguccggcuacuccggcaucuucuccgucgagggcaagaagugcaucaaccgcugcuucuacgucgagcucauccgcggccgcccccaggagccccgcgucugguggaccuccaacuccaucaucgucuucugcggcaccuccggcaccuacggcaccggcuccuggcccgacggcgccaacaucaacuucaugcccaucuga

SEQ ID NO: 119609 - RNA, 1401 nt, Artificial Sequence
  derived and/or modified CDS sequence (opt2) from neuraminidase__InfluenzaA__AGQ81793
augaaccccaaccagaagaucaucgccaucggcuccgucucccucaucaucgccaucaucugccuccucaugcagaucgccauccucaccaccaccaugacccuccacuuccgccagaacgagugcuccaaccccuccaacaaccaggucaugcccugcgagcccaucaucaucgagcgcaacaccguccaccucaacuccaccaccaucgagcgcgagaucugccccaaggucgccgaguacaagaacugguccaagccccagugccagaucaccggcuucgcccccuucuccaaggacaacuccauccgccucuccgccggcggcgacaucugggucacccgcgagcccuacgucuccugcucccucaacaagugcuaccaguucgcccucggccagggcaccacccucgagaacaagcacuccaacggcaccacccacgaccgcaccccccaccgcacccuccucaugaacgagcucggcguccccuuccaccucggcaccaagcaggucugcauggccugguccuccuccuccugcuacgacggcaaggccuggcuccacaucugcgucaccggcgacgacaagaacgccaccgccuccgucaucuacgacggcaugcucgucgacuccaucggcuccugguccaagaacauccuccgcacccaggaguccgagugcgucugcaucaacggcaccugcgccgucgucaugaccgacggcuccgccuccggcaaggccgacacccgcguccucuucauccgcgagggcaagaucaucaacaucuccccccucuccggcuccgcccagcacgucgaggagugcuccugcuacccccgcuaccccgagguccgcugcgucugccgcgacaacuggaagggcuccaaccgccccauccucuacaucaacauggccgacuacuccaucgaguccuccuacgucugcuccggccucgucggcgacaccccccgcaacgacgacuccuccuccuccuccaacugccgcgaccccaacaacgagcgcggcgcccccggcgucaagggcugggccuucgacgacggcaacgacgucuggaugggccgcaccaucaagaacggcucccgcuccggcuacgagaccuuccgcgucgucaacggcuggaccauggccaacuccaagucccagaucaaccgccaggucaucgucgacuccgacgacugguccggcuacuccggcaucuucuccgucgagggcaagaagugcaucaaccgcugcuucuacgucgagcucauccgcggccgcccccaggagccccgcgucugguggaccuccaacuccaucaucgucuucugcggcaccuccggcaccuacggcaccggcuccuggcccgacggcgccaacaucaacuucaugcccaucuga

SEQ ID NO: 119610 - RNA, 1401 nt, Artificial Sequence; identical to SEQ ID NO: 119609
  derived and/or modified CDS sequence (opt2) from neuraminidase__InfluenzaA__AGQ81794

SEQ ID NO: 119611 - RNA, 1401 nt, Artificial Sequence
  derived and/or modified CDS sequence (opt2) from neuraminidase__InfluenzaA__AGQ81795
augaaccccaaccagaagaucaucgccaucggcuccgucucccucaucaucgccaucaucugccuccucaugcagaucgccauccucaccaccaccaugacccuccacuuccgccagaacgagugcaacaaccccuccaacaaccaggucaugcccugcgagcccaucaucaucgagcgcaacaccguccaccucaacuccaccaccaucgagcgcgagaucugccccaaggucgccgaguacaagaacugguccaagccccagugccagaucaccggcuucgcccccuucuccaaggacaacuccauccgccucuccgccggcggcgacaucugggucacccgcgagcccuacgucuccugcucccucgacaagugcuaccaguucgcccucggccagggcaccacccucaagaacaagcacuccaacggcaccacccacgaccgcaccccccaccgcacccuccucaugaacgagcucggcguccccuuccaccucggcaccaagcaggucugcaucgccugguccuccuccuccugcuacgacggcaaggccuggcuccacaucugcgucaccggcgacgacaagaacgccaccgccuccaucaucuacgacggcaugcucgucgacuccaucggcuccugguccaagaacauccuccgcacccaggaguccgagugcgucugcaucaacggcaccugcgccgucgucaugaccgacggcuccgccuccggcaaggccgacacccgcguccucuucauccgcgagggcaagaucaucaacaucuccccccucuccggcuccgcccagcacgucgaggagugcuccugcuacccccgcuaccccgagguccgcugcgucugccgcgacaacuggaagggcuccaaccgccccauccucuacaucaacauggccgacuacuccaucgaguccuccuacgucugcuccggccucgucggcgacaccccccgcaacgacgacuccuccuccuccuccaacugccgcgaccccaacaacgagcgcggcgcccccggcgucaagggcugggccuucgacgacggcaacgacgucuggaugggccgcaccaucaagaacggcucccgcuccggcuacgagaccuuccgcgucgucaacggcuggaccaucgccaacuccaagucccagaucaaccgccagaucaucgucgacuccgacgacugguccggcuacuccggcaucuucuccgucgagggcaagaagugcaucaaccgcugcuucuacgucgagcucauccgcggccgcccccaggagccccgcgucugguggaccuccaacuccaucaucgucuucugcggcaccuccggcaccuacggcaccggcuccuggcccgacggcgccaacaucaacuucaugcccaucuga

SEQ ID NO: 119612 - RNA, 1401 nt, Artificial Sequence
  derived and/or modified CDS sequence (opt2) from neuraminidase__InfluenzaA__AGQ81796
augaaccccaaccagaagaucaucgccaucggcuccgucucccucaucaucgccaucaucugccuccucaugcagaucgccauccucaccaccaccaugacccuccacuuccgccagaacgagugcuccaaccccuccaacaaccaggucaugcccugcgagcccaucaucaucgagcgcaacaccguccaccucaacuccaccaccaucgagcgcgagaucugccccaaggucgccgaguacaagaacugguccaagccccagugccagaucaccggcuucgcccccuucuccaaggacaacuccauccgccucuccgccggcggcgacaucugggucacccgcgagcccuacgucuccugcucccucgacaagugcuaccaguucgcccucggccagggcaccacccucaagaacaagcacuccaacggcaccacccacgaccgcaccccccaccgcacccuccucaugaacgagcucggcguccccuuccaccucggcaccaagcaggucugcaucgccugguccuccuccuccugcuacgacggcaaggccuggcuccacaucugcgucaccggcgacgacaagaacgccaccgccuccaucaucuacgacggcaugcucgucgacuccaucggcuccugguccaagaacauccuccgcacccaggaguccgagugcgucugcaucaacggcaccugcgccgucgucaugaccgacggcuccgccuccggcaaggccgacacccgcguccucuucauccgcgagggcaagaucaucaacaucuccccccucuccggcuccgcccagcacgucgaggagugcuccugcuacccccgcuaccccgagguccgcugcgucugccgcgacaacuggaagggcuccaaccgccccauccucuacaucaacauggccgacuacuccaucgaguccuccuacgucugcuccggccucgucggcgacaccccccgcaacgacgacuccuccuccuccuccaacugccgcgaccccaacaacgagcgcggcgcccccggcgucaagggcugggccuucgacgacggcaacgacaucuggaugggccgcaccaucaagaacggcucccgcuccggcuacgagaccuuccgcgucgucaacggcuggaccauggccaacuccaagucccagaucaaccgccaggucaucgucgacuccgacgacugguccggcuacuccggcaucuucuccgucgagggcaagaagugcaucaaccgcugcuucuacgucgagcucauccgcggccgcccccaggagccccgcgucugguggaccuccaacuccaucaucgucuucugcggcaccuccggcaccuacggcaccggcuccuggcccgacggcgccaacaucaacuucaugcccaucuga

SEQ ID NO: 119613 - RNA, 1401 nt, Artificial Sequence
  derived and/or modified CDS sequence (opt2) from neuraminidase__InfluenzaA__AGQ81798
augaaccccaaccagaagaucaucuccaucggcuccgucucccucaucaucgccaucaucugccuccucaugcagaucgccauccucaccaccaccaugacccuccacuuccgccagaacgagugcuccaaccccuccaacaaccaggucaugcccugcgagcccaucaucaucgagcgcaacaccguccaccucaacuccaccaccaucgagcgcgagaucugccccaaggucgccgaguacaagaacugguccaagccccagugccagaucaccggcuucgcccccuucuccaaggacaacuccauccgccucuccgccggcggcgacaucugggucacccgcgagcccuacgucuccugcucccucgacaagugcuaccaguucgcccucggccagggcaccacccucaagaacaagcacuccaacggcaccacccacgaccgcaccccccaccgcacccuccucaugaacgagcucggcguccccuuccaccucggcaccaagcaggucugcaucgccugguccuccuccuccugcuacgacggcaaggccuggcuccacaucugcgucaccggcgacgacaagaacgccaccgccuccaucaucuacgacggcaugcucgucgacuccaucggcuccugguccaagaacauccuccgcacccaggaguccgagugcgucugcaucaacggcaccugcgccgucgucaugaccgacggcuccgccuccggcaaggccgacacccgcguccucuucauccgcgagggcaagaucaucaacaucuccccccucuccggcuccgcccagcacgucgaggagugcuccugcuacccccgcuaccccgagguccgcugcgucugccgcgacaacuggaagggcuccaaccgccccauccucuacaucaacauggccgacuacuccaucgaguccuccuacgucugcuccggccucgucggcgacaccccccgcaacgacgacuccuccuccuccuccaacugccgcgaccccaacaacgagcgcggcgcccccggcgucaagggcugggccuucgacgacggcaacgacgucuggaugggccgcaccaucaagaacggcucccgcuccggcuacgagaccuuccgcgucgucaacggcuggaccauggccaacuccaagucccagaucaaccgccaggucaucgucgacuccgacgacugguccggcuacuccggcaucuucuccgucgagggcaagaagugcaucaaccgcugcuucuacgucgagcucauccgcggccgcccccaggagccccgcgucugguggaccuccaacuccaucaucgucuucugcggcaccuccggcaccuacggcaccggcuccuggcccgacggcgccaacaucaacuucaugcccaucuga

SEQ ID NO: 119614 - RNA, 1401 nt, Artificial Sequence
  derived and/or modified CDS sequence (opt2) from neuraminidase__InfluenzaA__AGQ81799
augaaccccaaccagaagaucaucgccaucggcuccgucucccucaucaucgccaucaucugccuccucaugcagaucgccauccucaccaccaccaugacccuccacuuccgccagaacgagugcuccaaccccuccaacaaccaggucaugcccugcgagcccaucaucaucgagcgcaacaccguccaccucaacuccaccaccaucgagcgcgagaucugccccaaggucgccgaguacaagaacugguccaagccccagugccagaucaccggcuucgcccccuucuccaaggacaacuccauccgccucuccgccggcggcgacaucugggucacccgcgagcccuacgucuccugcucccucgacaagugcuaccaguucgcccucggccagggcaccacccucaagaacaagcacuccaacggcaccacccacgaccgcaccccccaccgcacccuccucaugaacgagcucggcguccccuuccaccucggcaccaagcaggucugcaucgccugguccuccuccuccugcuacgacggcaaggccuggcuccacaucugcgucaccggcgacgacaagaacgccaccgccuccaucaucuacgacggcaugcucgucgacuccaucggcuccugguccaagaacauccuccgcacccaggaguccgagugcgucugcaucaacggcaccugcgccgucgucaugaccgacggcuccgccuccggcaaggccgacacccgcguccucuucauccgcgagggcaagaucaucaacaucuccccccucuccggcuccgcccagcacgucgaggagugcuccugcuacccccgcuaccccgagguccgcugcgucugccgcgacaacuggaagggcuccaaccgccccauccucuacaucaacauggccgacuacuccaucgaguccuccuacgucugcuccggccucgucggcgacaccccccgcaacgacgacuccuccuccuccuccaacugccgcgaccccaacaacgagcgcggcgcccccggcgucaagggcugggccuucgacgacggcaacgacgucuggaugggccgcaccaucaagaacggcucccgcuccggcuacgagaccuuccgcgucgucaacggcuggaccauggccaacuccaagucccagaucaaccgccaggucaucgucgacuccgacgacugguccggcuacuccggcaucuucuccgucgagggcaagaagugcaucaaccgcugcuucuacgucgagcucauccgcggccgcccccaggagccccgcgucugguggaccuccaacuccaucaucgucuucugcggcaccuccggcaccuacggcaccggcuccuggcccgacggcgccaacaucaacuucaugcccaucuga

SEQ ID NO: 119615 - RNA, 1401 nt, Artificial Sequence; identical to SEQ ID NO: 119614
  derived and/or modified CDS sequence (opt2) from neuraminidase__InfluenzaA__AGQ81800

SEQ ID NO: 119616 - RNA, 1401 nt, Artificial Sequence
  derived and/or modified CDS sequence (opt2) from neuraminidase__InfluenzaA__AGQ81801
augaaccccaaccagaagaucaucgccaucggcuccgucucccucaucaucgccaucaucugccuccucaugcagaucgccauccucaccaccaccaugacccuccacuuccgccagaacgagugcuccaaccccuccaacaaccaggucaugcccugcgagcccaucaucaucgagcgcaacaccguccaccucaacuccaccaccaucgagcgcgagaucugccccaaggucgccgaguacaagaacugguccaagccccagugccagaucaccggcuucgcccccuucuccaaggacaacuccauccgccucuccgccuccggcgacaucugggucacccgcgagcccuacgucuccugcucccucgacaagugcuaccaguucgcccucggccagggcaccacccucaagaacaagcacuccaacggcaccacccacgaccgcaccccccaccgcacccuccucaugaacgagcucggcguccccuuccaccucggcaccaagcaggucugcaucgccugguccuccuccuccugcuacgacggcaaggccuggcuccacaucugcgucaccggcgacgacaagaacgccaccgccuccaucaucuacgacggcaugcucgucgacuccaucggcuccugguccaagaacauccuccgcacccaggaguccgagugcgucugcaucaacggcaccugcgccgucgucaugaccgacggcuccgccuccggcaaggccgacacccgcguccucuucauccgcgagggcaagaucaucaacaucuccccccucuccggcuccgcccagcacgucgaggagugcuccugcuacccccgcuaccccgagguccgcugcgucugccgcgacaacuggaagggcuccaaccgccccauccucuacaucaacauggccgacuacuccaucgaguccuccuacgucugcuccggccucgucggcgacaccccccgcaacgacgacuccuccuccuccuccaacugccgcgaccccaacaacgagcgcggcgcccccggcgucaagggcugggccuucgacgacggcaacgacgucuggaugggccgcaccaucaagaacggcucccgcuccggcuacgagaccuuccgcgucgucaacggcuggaccauggccaacuccaagucccagaucaaccgccaggucaucgucgacuccgacgacugguccggcuacuccggcaucuucuccgucgagggcaagaagugcaucaaccgcugcuucuacgucgagcucauccgcggccgcccccaggagccccgcgucugguggaccuccaacuccaucaucgucuucugcggcaccuccggcaccuacggcaccggcuccuggcccgacggcgccaacaucaacuucaugcccaucuga

SEQ ID NO: 119617 - RNA, 1401 nt, Artificial Sequence
  derived and/or modified CDS sequence (opt2) from neuraminidase__InfluenzaA__AGQ81802
augaaccccaaccagaagaucaucgccaucggcuccgucucccucaucaucgccaucaucugccuccucaugcagaucgcccuccucaccaccaccaugacccuccacuuccgccagaacgagugcuccaaccccuccaacaaccaggucaugcccugcgagcccaucaucaucgagcgcaacaccguccaccucaacuccaccaccaucgagcgcgagaucugccccaaggucgccgaguacaagaacugguccaagccccagugccagaucaccggcuucgcccccuucuccaaggacaacuccauccgccucuccgccggcggcgacaucugggucacccgcgagcccuacgucuccugcucccucgacaagugcuaccaguucgcccucggccagggcaccacccucaagaacaagcacuccaacggcaccacccacgaccgcaccccccaccgcacccuccucaugaacgagcucggcguccccuuccaccucggcaccaagcaggucugcaucgccugguccuccuccuccugcuacgacggcaaggccuggcuccacaucugcgucaccggcgacgacaagaacgccaccgccuccaucaucuacaacggcaugcucgucgacuccaucggcuccugguccaagaacauccuccgcacccaggaguccgagugcgucugcaucaacggcaccugcgccgucgucaugaccgacggcuccgccuccggcaaggccgacacccgcguccucuucauccgcgagggcgagaucaucaacaucuccccccucuccggcuccgcccagcacgucgaggagugcuccugcuacccccgcuaccccgagguccgcugcgucugccgcgacaacuggaagggcuccaaccgccccauccucuacaucaacauggccgacuacuccaucgaguccuccuacgucugcuccggccucgucggcgacaccccccgcaacgacgacuccuccuccuccuccaacugccgcgaccccaacaacgagcgcggcgcccccggcgucaagggcugggccuucgacgacggcaacgacgucuggaugggccgcaccaucaagaacggcucccgcuccggcuacgagaccuuccgcgucgucaacggcuggaccauggccaacuccaagucccagaucaaccgccaggucaucgucgacuccgacgacugguccggcuacuccggcaucuucuccgucgagggcaagaagugcaucaaccgcugcuucuacgucgagcucauccgcggccgcccccaggagccccgcgucugguggaccuccaacuccaucaucgucuucugcggcaccuccggcaccuacggcaccggcuccuggcccgacggcgccaacaucaacuucaugcccaucuga

SEQ ID NO: 119618 - RNA, 1401 nt, Artificial Sequence
  derived and/or modified CDS sequence (opt2) from neuraminidase__InfluenzaA__AGQ81803
augaaccccaaccagaagaucaucgccaucggcuccgucucccucaucaucgccaucaucugccuccucaugcagaucgccauccucaccaccaccaugacccuccacuuccgccagaacgagugcuccaaccccuccaacaaccaggucaugcccugcgagcccaucaucaucgagcgcaacaccguccaccucaacuccaccaccaucgagcgcgagaucugccccaaggucgccgaguacaagaacugguccaagccccagugccagaucaccggcuucgcccccuucuccaaggacaacuccauccgccucuccgccuccggcgacaucugggucacccgcgagcccuacgucuccugcucccucgacaagugcuaccaguucgcccucggccagggcaccacccucaagaacgagcacuccaacggcaccacccacgaccgcaccccccaccgcacccuccucaugaacgagcucggcguccccuuccaccucggcaccaagcaggucugcaucgccugguccuccuccuccugcuacgacggcaaggccuggcuccacaucugcgucaccggcgacgacaagaacgccaccgccuccaucaucuacgacggcaugcucgucgacuccaucggcuccugguccaagaacauccuccgcacccaggaguccgagugcgucugcaucaacggcaccugcgccgucgucaugaccgacggcuccgccuccggcaaggccgacacccgcguccucuucauccgcgagggcaagaucaucaacaucuccccccucuccggcuccgcccagcacgucgaggagugcuccugcuacccccgcuaccccgagguccgcugcgucugccgcgacaacuggaagggcuccaaccgccccauccucuacaucaacauggccgacuacuccaucgaguccuccuacgucugcuccggccucgucggcgacaccccccgcaacgacgacuccuccuccuccuccaacugccgcgaccccaacaacgagcgcggcgcccccggcgucaagggcugggccuucgacgacggcaacgacgucuggaugggccgcaccaucaagaacggcucccgcuccggcuacgagaccuuccgcgucgucaacggcuggaucauggccaacuccaagucccagaucaaccgccaggucaucgucgacuccgacgacugguccggcuacuccggcaucuucuccgucgagggcaagaagugcaucaaccgcugcuucuacgucgagcucauccgcggccgcccccaggagccccgcgucugguggaccuccaacuccaucaucgucuucugcggcaccuccggcaccuacggcaccggcuccuggcccgacggcgccaacaucaacuucaugcccaucuga

SEQ ID NO: 119619 - RNA, 1410 nt, Artificial Sequence
  derived and/or modified CDS sequence (opt2) from neuraminidase__InfluenzaA__AGQ81804
augaaccccaaccagaagaugaucgccaucggcgccgucucccucaccaucgccaucaucugccuccucaugcagaccgccauccucgucaccaccaugacccuccacuucaagcacaacgagugcaccaacuccuccaacaaccaggccgcccccugcggccccaucaucaucgagcgcaacgucaccgaggucguccaccucaacuccaccacccucgagaaggagaucugccccaaggccgccggcuaccgcaacugguccaagccccagugccagaucaccggcuucgcccccuucuccaaggacaacuccauccgccucuccgccggcggcgacaucugggucacccgcgagcccuacgucuccugcggccucggcaagugcuaccaguucgcccucggccagggcaccacccucgacaacucccacuccaacggcaccucccacgaccgcaccccccaccgcacccuccucaugaacgagcucggcguccccuuccaccucaugaccaagcaggucugcaucgccugguccuccuccuccugccacgacggcaaggccuggcuccacgucugcgucaccggcgacgaccgcaacgccaccgccuccaucaucuacggcggcauccucgucgacuccaucggcuccugguccaagaacauccuccgcacccaggaguccgagugcgucugcaucaacggcaccugcgccgucgucaugaccgacggcuccgccuccggcaaggccgacacccgcauccucuucauccgcgagggcaagaucguccacaucuccccccucuccggcuccgcccagcacgucgaggagugcuccugcuacccccaguaccccgagguccgcugcgucugccgcgacaacuggcgcggcuccaaccgccccguccucuacaucaacauggccgacuacuccaucgacuccggcuacgucugcuccggccucgucggcgacaccccccgcaacgacgacgucuccuccuccuccaacugcaaggaccccaacaacgagcgcggcgcccccggcgucaagggcugggccuucgacaacggcaacgacaucuggaugggccgcaccaucgacaaggacucccgcuccggcuacgagaccuuccgcgucaucgacggcuggaacaccgccaacuccaagucccagaccucccgccaggucaucgucggcuccgacaacuccuccggcuacuccggcaucuucuccgucgagggcaaguccugcaucaaccgcugcuucuacgucgagcucauccgcggccgccccaaggagacccgcgucugguggaccuccaacuccaucaucgucuucugcggcaccuccggcaccuacggcaccggcuccuggcccgacggcgccaacaucaacuucaugcccaucuga

SEQ ID NO: 119620 - RNA, 1401 nt, Artificial Sequence
  derived and/or modified CDS sequence (opt2) from neuraminidase__InfluenzaA__AGQ81805
augaaccccaaccagaagaucaucgccaucggcuccgucucccucaucaucgccaucaucugccuccucaugcagaucgcccuccucaccaccaccaugacccuccacuuccgccagaacgagugcuccaaccccuccaacaaccaggucaugcccugcgagcccaucaucaucgagcgcaacaccguccaccucaacuccaccaccaucgagcgcgagaucugccccaaggucgccgaguacaagaacugguccaagccccagugccagaucaccggcuucgcccccuucuccaaggacaacuccauccgccucuccgccggcggcgacaucugggucacccgcgagcccuacgucuccugcucccucgacaagugcuaccaguucgcccucggccagggcaccaccaugaagaacaagcacuccaacggcaccacccacgaccgcaccccccaccgcacccuccucaugaacgagcucggcguccccuuccaccucggcaccaagcaggucugcaucgccugguccuccuccuccugcuacgacggcaaggccuggcuccacaucugcgucaccggcgacgacaagaacgccaccgccuccaucaucuacgacggcaugcucgucgacuccaucggcuccugguccaagaacauccuccgcacccaggaguccgagugcgucugcaucaacggcaccugcgccgucgucaugaccgacggcuccgccuccggcaaggccgacacccgcguccucuucauccgcgagggcaagaucaucaacaucuccccccucuccggcuccgcccagcacgucgaggagugcuccugcuacccccgcuaccccgagguccgcugcgucugccgcgacaacuggaagggcuccaaccgccccauccucuacaucaacauggccgacuacuccaucgaguccuccuacgucugcuccggccucgucggcgacaccccccgcaacgacgacuccuccuccuccuccaacugccgcggccccaacaacgagcgcggcgcccccggcgucaagggcugggccuucgacgacggcaacgacgucuggaugggccgcaccaucaagaacggcucccgcuccggcuacgagaccuuccgcgucgucaacggcuggaccauggccaacuccaagucccagaucaaccgccaggucaucgucgacuccgacgacugguccggcuacuccggcaucuucuccgucgagggcaagaagugcaucaaccgcugcuucuacgucgagcucauccgcggccgcccccaggagccccgcgucugguggaccuccaacuccaucaucgucuucugcggcaccuccggcaccuacggcaccggcuccuggcccgacggcgccaacaucaacuucaugcccaucuga

SEQ ID NO: 119621 - RNA, 1401 nt, Artificial Sequence
  derived and/or modified CDS sequence (opt2) from neuraminidase__InfluenzaA__AGQ81807
augaaccccaaccagaagaucaccgccaucggcuccaucucccucaucaucgccaucaucugccuccucaugcagaucgccauccucaccaccaccaugacccuccacuuccgccagaacgagugccgcaaccccuccaacaaccaggucaugcccugcgagcccgucaucaucgagcgcaacaccguccaccucaacuccaccaccaucgagcgcgagaucugccccaaggucgccgaguacaagaacugguccaagccccagugccagaucaccggcuucgcccccuucuccaaggacaacuccauccgccucuccgccuccggcgacaucugggucacccgcgagcccuacgucuccugcucccucaacaagugcuaccaguucgcccucggccagggcaccacccucaagaacaagcacuccaacggcaccacccacgaccgcaccccccaccgcacccuccucaugaacgagcucggcguccccuuccaccucggcaccaagcaggucugcaucgccugguccuccuccuccugcuacgacggcaaggccuggcuccacaucugcgucaccggcgacgacaagaacgccaccgccuccaucaucuacgacggcaugcucgucgacuccaucggcuccugguccaagaacauccuccgcacccaggaguccgagugcgucugcaucaacggcaccugcgccgucgucaugaccgacggcuccgccuccggcaaggccgacacccgcguccucuucaucaaggagggcaagaucaucaacaucuccccccucuccggcuccgcccagcacgucgaggagugcuccugcuacccccgcuaccccgagguccgcugcgucugccgcgacaacuggaagggcuccaaccgccccauccucuacaucaacauggccgacuacuccaucgaguccuccuacgucugcuccggccucgucggcgacaccccccgcaacgacgacuccuccuccuccuccaacugccgcgaccccaacaacgagcgcggcgcccccggcgucaagggcugggccuucgacgacggcaacgacgucuggaugggccgcaccaucaagaacggcucccgcuccggcuacgagaccuuccgcgucgucaacggcuggaucauggccaacuccaagucccagaucaaccgccaggucaucgucgacuccgacgacugguccggcuacuccggcaucuucuccgucgagggcaagaagugcaucaaccgcugcuucuacgucgagcucauccgcggccgcccccaggagccccgcgucugguggaccuccaacuccaucaucgucuucugcggcaccuccggcaccuacggcaccggcuccuggcccgacggcgccaacaucaacuucaugcccaucuga

SEQ ID NO: 119622 - RNA, 1401 nt, Artificial Sequence
  derived and/or modified CDS sequence (opt2) from neuraminidase__InfluenzaA__AGQ81808
augaaccccaaccagaagaucaucgccaucggcuccgucucccucaccaucgccaucaucugcuuccucaugcagaucgccauccucaccaccaccaugacccuccacuucaagcagaacgagugcuccaaccccuccaacaaccaggucguccccugcgagcccauccucaucgagcgcaacaccguccaccucaacuccaccaccaucgagaaggaggucugccccaaggucgccgaguacaagaacugguccaagccccagugccagaucaccggcuucgcccccuucuccaaggacaacuccauccgccucuccgccggcggcgacaucugggucacccgcgagcccuacgucuccugcucccucggcaagugcuaccaguucgcccucggccagggcaccacccucaagaacaaccacuccaacggcaccacccacgaccgcaccccccaccgcacccuccucaugaacgagcucggcguccccuuccaccucggcaccaagcaggucugcaucgccugguccuccuccuccugcuacgacggcaaggccuggcuccacaucugcgucaccggcgacgacaagaacgccaccgccuccaucaucuacgacggcaugcucgucgacuccaucggcuccugguccaagaacauccuccgcacccaggaguccgagugcgucugcaucaacggcaccugcgccgucgucaugaccgacggcuccgccuccggcaaggccgacacccgcauccucuucauccgcgagggcaagaucaucaacaucuccccccucuccggcuccgcccagcacgucgaggagugcuccugcuacccccgcuaccccgagguccgcugcgucugccgcgacaacuggaagggcuccaaccgccccguccucuacaucaacauggccgacuacuccgucgaguccuccuacgucugcuccggccucgucggcgacaccccccgcaacgacgacuccuccuccuccuccaacugccgcgaccccaacaacgagcgcggcgcccccggcgucaagggcugggccuucgacgacggcaacgacgucuggaugggccgcaccauccgcaacaacucccgcuccggcuacgagaccuuccgcgucgucaacggcuggaccaccgccaacuccaagucccagaucaaccgccagaucaucgucgacuccgagaacugguccggcuacuccggcaucuucuccgucgagggcaagaacugcaucaaccgcugcuucuacgucgagcucauccgcggccgcccccaggagccccgcgucugguggaccuccaacuccaucaucgucuucugcggcaccuccggcaccuacggcaccggcuccuggcccgacggcgccaacaucaacuucaugcccaucuga

SEQ ID NO: 119623 - RNA, 1401 nt, Artificial Sequence
  derived and/or modified CDS sequence (opt2) from neuraminidase__InfluenzaA__AGQ81809
augaaccccaaccagaagaucaccgccaucggcuccgucucccucaucaucgccaucaucugccuccucaugcagaucgccauccucaccaccaccaugacccuccacuuccgccagaacgagugcuccaaccccuccaacaaccaggucaugcccugcgagcccaucaucaucgagcgcaacaccguccaccucaacuccaccaccaucgagcgcgagaucugccccaaggucgccgaguacaagaacugguccaagccccagugccagaucaccggcuucgcccccuucuccaaggacaacuccauccgccucuccgccggcggcgacaucugggucacccgcgagcccuacgucuccugcucccccgacaagugcuaccaguucgcccucggccagggcaccacccucaagaacaagcacuccaacggcaccacccacgaccgcaccccccaccgcacccuccucaugaacgagcucggcguccccuuccaccucggcaccaagcaggucugcaucgccugguccuccuccuccugcuacgacggcaaggccuggcuccacaucugcgucaccggcgacgacaagaacgccaccgccuccaucaucuacgacggcaugcucgucgacuccaucggcuccugguccaagaacauccuccgcacccaggaguccgagugcgucugcaucaacggcaccugcgccgucgucaugaccgacggcuccgccuccggcgaggccgacacccgcauccucuucauccgcgagggcaagaucaucaacaucuccccccucuccggcuccgcccagcacgucgaggagugcuccugcuacccccgcuaccccgagguccgcugcgucugccgcgacaacuggaagggcuccaaccgccccaucaucuacaucaacauggucgacuacuccaucggcucccgcuacgucugcuccggccucgucggcgacaccccccgcaacgacgacuccaccuccuccuccaacugccgcgaccccaacaacgagcgcggcgcccccggcgucaagggcugggccuucgacgacggcaacgacgucuggaugggccgcaccaucaagaacggcucccgcuccggcuacgagaccuuccgcgucaucaacggcuggaccauggccaacuccaagucccagaucaaccgccaggucaucgucgacuccgacaacugguccggcuacuccggcaucuucuccgucgagggcaagaagugcaucaaccgcugcuucuacgucgagcucauccgcggccgcccccaggagccccgcgucugguggaccuccaacuccaucaucgucuucugcggcaccuccggcaccuacggcaccggcuccuggcccgacggcgccgacaucaacuucaugcccaucuga

SEQ ID NO: 119624 - RNA, 1401 nt, Artificial Sequence
  derived and/or modified CDS sequence (opt2) from neuraminidase__InfluenzaA__AGQ81810
augaaccccaaccagaagauccucgccaucggcuccgucucccucaccaucgccaucaucugcuuccucaugcagaucgccauccucaccaccaccaugacccuccacuucaagcagaacgagugcuccaaccccuccaacaaccaggucguccccugcgagcccauccucaucgagcgcaacaccguccaccucaacuccaccaccaucgagaaggaggucugccccaaggucgccgaguacaagaacugguccaagccccagugccagaucaccggcuucgcccccuucuccaaggacaacuccauccgccucuccgccggcggcgacaucugggucacccgcgagcccuacgucuccugcucccucggcaagugcuaccaguucgcccucggccagggcaccacccucaagaacaaccacuccaacggcaccacccacgaccgcaccccccaccgcacccuccucaugaacgagcucggcguccccuuccaccucggcaccaagcaggucugcaucgccugguccuccuccuccugcuacgacggcaaggccuggcuccacaucugcgucaccggcgacgacaagaacgccaccgccuccaucaucuacgacggcaugcucgucgacuccaucggcuccugguccaagaacauccuccgcacccaggaguccgagugcgucugcaucaacggcaccugcgccgucgucaugaccgacggcuccgccuccggcaaggccgacacccgcauccucuucauccgcgagggcaagaucaucaacaucuccccccucuccggcuccgcccagcacgucgaggagugcuccugcuacccccgcuaccccgagguccgcugcgucugccgcgacaacuggaagggcuccaaccgccccguccucuacaucaacauggccgacuacuccaucgaguccuccuacgucugcuccggccucgucggcgacaccccccgcaacgacgacuccuccuccuccuccaacugccgcgaccccaacaacgagcgcggcgcccccggcgucaagggcugggccuucgacgacggcaacgacgucuggaugggccgcaccauccgcaacaacucccgcuccggcuacgagaccuuccgcgucgucaacggcuggaccaccgccaacuccaagucccagaucaaccgccaggucaucgucgacuccgagaacugguccggcuacuccggcaucuucuccgucgagggcaagaacugcaucaaccgcugcuucuacgucgagcucauccgcggccgcccccaggagccccgcgucugguggaccuccaacuccaucaucgucuucugcggcaccuccggcaccuacggcaccggcuccuggcccgacggcgccaacaucaacuucaugcccaucuga

SEQ ID NO: 119625 - RNA, 1401 nt, Artificial Sequence
  derived and/or modified CDS sequence (opt2) from neuraminidase__InfluenzaA__AGQ81811
augaaccccaaccagaagaucaucgccaucggcuccgucucccucaccaucgccaucaucugcuuccucaugcagaucgccauccucaccaccaccaugacccuccacuucaagcagaacgagugcuccaaccccuccaacaaccaggucguccccugcgagcccauccucaucgagcgcaacaccguccaccucaacuccaccaccaucgagaaggaggucugccccaaggucgccgaguacaagaacugguccaagccccagugccagaucaccggcuucgcccccuucuccaaggacaacuccauccgccucuccgccggcggcgacaucugggucacccgcgagcccuacgucuccugcucccucggcaagugcuaccaguucgcccucggccagggcaccacccucaagaacaagcacuccaacggcaccacccacgaccgcaccccccaccgcacccuccucaugaacgagcucggcguccccuuccaccucggcaccaagcaggucugcaucgccugguccuccuccuccugcuacgacggcaaggccuggcuccacaucugcgucaccggcgacgacaagaacgccaccgccuccaucaucuacgacggcaugcucgucgacuccaucggcuccugguccaagaacauccuccgcacccaggaguccgagugcgucugcaucaacggcaccugcgccgucgucaugaccgacggcuccgccuccggcaaggccgacacccgcauccucuucauccgcgagggcaagaucgucaacaucuccccccucuccggcuccgcccagcacgucgaggagugcuccugcuacccccgcuaccccgagguccgcugcgucugccgcgacaacuggaagggcuccaaccgccccguccucuacaucaacauggccgacuacuccgucgaguccuccuacgucugcuccggccucgucggcgacaccccccgcaacgacgacuccuucuccuccuccaacugccgcgaccccaacaacgagcgcggcgcccccggcgucaagggcugggccuucgacgacggcaacgacgucuggaugggccgcaccauccgcaacgacucccgcuccggcuacgagaccuuccgcgucgucaacggcuggaccaccgccaacuccaagucccagaucaaccgccaggucaucgucgacuccgaguccugguccggcuacuccggcaucuucuccgucgagggcaagaacugcaucaaccgcugcuucuacgucgagcucauccgcggccgcccccaggagccccgcgucugguggaccuccaacuccaucaucgucuucugcggcaccuccggcaccuacggcaccggcuccuggcccgacggcgccaacaucaacuucaugcccaucuga

SEQ ID NO: 119626 - RNA, 1410 nt, Artificial Sequence
  derived and/or modified CDS sequence (opt2) from neuraminidase__InfluenzaA__AGQ81812
augaaccccaaccagaagaucaucaccaucggcuccgucucccucaccaucgccaccaucugcuuccucaugcagaucgccauccucgucaccaccaucacccuccacuucaagcagaacgagugcuccauccccuccaacaaccaggucguccccugcgagcccaucaucgucgagcgcaacaucaccgagaucgucuaccucaacaacaccaccaucgagaaggagcucugccccaagcucaccgaguaccgcgacugguccaagccccagugccagaucaccggcuucgcccccuucuccaaggacaacuccauccgccucuccgccggcggcgacaucugggucacccgcgagcccuacgucuccugcucccccaacaagugcuaccaguucgcccucggccagggcaccacccucgacaacaagcacuccaacggcaccauccacgaccgcaucccccaccgcacccuccucaugaacgagcucggcguccccuuccaccucggcaccaagcaggucugcaucgccugguccuccuccuccugccacgacggcaaggccuggcuccacgucugcgucaccggcgacgaccgcaacgccaccgccuccuucaucuacgacggcaugcucgucgacuccaucggcuccuggucccagaacauccuccgcacccaggaguccgagugcgucugcaucaacggcaccugcaccgucgucaugaccgacggcuccgccuccggccgcgccgacacccgcauccucuucaucaaggagggcaagaucguccacgucuccccccucuccggcuccgcccagcacaucgaggagugcuccugcuacccccgcuaccccgacguccgcugcgucugccgcgacaacuggaagggcuccaaccgccccaucaucgacaucaacgucgccgacuacuccaucgacuccuccuacgucugcuccggccucgucggcgacaccccccgcaacgacgacuccuccuccaacuccaacugcaaggaccccaacaacgagcgcggcaaccccggcgucaagggcugggccuucgacuacggcaacgacgucuggaugggccgcaccaucuccaaggacucccgcuccggcuacgagaccuuccgcgucaucggcggcuggaccaccgccaacuccaagucccaggucaaccgccaggucaucgucgacaacaacaacugguccggcuacuccggcaucuucuccgucgagggcaaguccugcaucaaccgcugcuucuacgucgagcucauccgcggccgcccccaggagacccgcgucugguggaccuccaacuccaucgucgucuucugcggcaccuccggcaccuacggcaccggcuccuggcccgacggcgccaacaucaacuucaugcccaucuga

SEQ ID NO: 119627 - RNA, 1401 nt, Artificial Sequence
  derived and/or modified CDS sequence (opt2) from neuraminidase__InfluenzaA__AGQ81814
augaaccccaaccagaagaucaucgccaucggcuccgucucccucaccaucgccaucaugugcuuccucaugcagaucgccauccucaccaccaccaugacccuccacuucaagcagaacgagugcuccaaccccuccaacaaccaggucguccccugcgagcccauccucaucgagcgcaacaccguccaccucaacuccaccaccaucgagaaggaggucugccccaaggucgccgaguacaagaacugguccaagccccagugccagaucaccggcuucgcccccuucuccaaggacaacuccauccgccucuccgccggcggcgacaucugggucacccgcgagcccuacgucuccugcucccucggcaagugcuaccaguucgcccucggccagggcaccacccucaagaacaaccacuccaacggcaccacccacgaccgcaccccccaccgcacccuccucaugaacgagcucggcguccccuuccaccucggcaccaagcaggucugcaucgccugguccuccuccuccugcuacgacggcaaggccuggcuccacaucugcgucaccggcgacgacaagaacgccaccgccuccaucaucuacgacggcaugcucgucgacuccaucggcuccugguccaagaacauccuccgcacccaggaguccgagugcgucugcaucaacggcaccugcgccgucgucaugaccgacggcuccgccuccggcaaggccgacacccgcauccucuucauccgcgagggcaagaucaucaacaucuccccccucuccggcuccgcccagcacgucgaggagugcuccugcuacccccgcuaccccgagguccgcugcgucugccgcgacaacuggaagggcuccaaccgccccguccucuacaucaacauggccgacuacuccgucgaguccuccuacgucugcuccggccucgucggcgacaccccccgcaacgacgacuccuccuccuccuccaacugccgcgaccccaacaacgagcgcggcgcccccggcgucaagggcugggccuucgacgacggcaacgacgucuggaugggccgcaccauccgcaacaacucccgcuccggcuacgagaccuuccgcgucgucaacggcuggaccaccgccaacuccaagucccagaucaaccgccaggucaucgucgacuccgagaacugguccggcuacuccggcaucuucuccgucgagggcaagaacugcaucaaccgcugcuucuacgucgagcucauccgcggccgcccccaggagccccgcgucugguggaccuccaacuccaucaucgucuucugcggcaccuccggcaccuacggcaccggcuccuggcccgacggcgccaacaucaacuucaugcccaucuga

SEQ ID NO: 119628 - RNA, 1401 nt, Artificial Sequence
  derived and/or modified CDS sequence (opt2) from neuraminidase__InfluenzaA__AGQ81815
augaaccccaaccagaagaucaucgccaucggcuccgucucccucaccaucgccaucaucugcuuccucaugcagaucgccauccucaccaccaccaugacccuccacuucaagcagaacgagugcuccaaccccuccaacaaccaggucguccccugcgagcccauccucaucgagcgcaacaccguccaccucaacuccaccaccaucgagaaggaggucugccccaaggucgccgaguacaagaacugguccaagccccagugccagaucaccggcuucgcccccuucuccaaggacaacuccauccgccucuccgccggcggcgacaucugggucacccgcgagcccuacgucuccugcucccucggcaagugcuaccaguucgcccucggccagggcaccacccucaagaacaagcacuccaacggcaccacccacgaccgcaccccccaccgcacccuccucaugaacgagcucggcguccccuuccaccucggcaccaagcaggucugcaucgccugguccuccuccuccugcuacgacggcaaggccuggcuccacaucugcgucaccggcgacgacaagaacgccaccgccuccaucaucuacgacggcaugcucgucgacuccaucggcuccugguccaagaacauccuccgcacccaggaguccgagugcgucugcaucaacggcaccugcgccgucgucaugaccgacggcuccgccuccggcaaggccgacacccgcauccucuucauccgcgagggcaagaucaucaacaucuccccccucuccggcuccgcccagcacgucgaggagugcuccugcuacccccgcuaccccgagguccgcugcgucugccgcgacaacuggaagggcuccaaccgccccguccucuacaucaacauggccgacuacuccgucgaguccuccuacgucugcuccggccucgucggcgacaccccccgcaacgacgacuccuccuccuccuccaacugccgcgaccccaacaacgagcgcggcacccccggcgucaagggcugggccuucgacgacggcaacgacgucuggaugggccgcaccauccgcaacgacucccgcuccggcuacgagaccuuccgcgucaucaacggcuggaccaccgccaacuccaagucccagaucaaccgccaggucaucgucgacuccgagaacugguccggcuacuccggcaucuucuccgucgagggcaagaacugcaucaaccgcugcuucuacgucgagcucauccgcggccgcccccaggagccccgcgucugguggaccuccaacuccaucaucgucuucugcggcaccuccggcaccuacggcaccggcuccuggcccgacggcgccaacaucaacuacaugcccaucuga

SEQ ID NO: 119629 - RNA, 1401 nt, Artificial Sequence
  derived and/or modified CDS sequence (opt2) from neuraminidase__InfluenzaA__AGQ81816
augaaccccaaccagaagaucaucgccaucggcuccgucucccucaccaucgccaucaucugcuuccucaugcagaucgccauccucaccaccaccaugacccuccacuucaagcagaacggcugcuccaaccccuccaacaaccaggucguccccugcgagcccauccucaucgagcgcaacaccguccaccucaacuccaccaccaucgagaaggaggucugccccaaggucgccgaguacaagaacugguccaagccccagugccagaucaccggcuucgcccccuucuccaaggacaacuccauccgccucuccgccggcggcgacaucugggucacccgcgagcccuacgucuccugcucccucggcaagugcuaccaguucgcccucggccagggcaccacccucaagaacaagcacuccaacggcaccacccacgaccgcaccccccaccgcacccuccucaugaacgagcucggcguccccuuccaccucggcaccaagcaggucugcaucgccugguccuccuccuccugcuacgacggcaaggccuggcuccacaucugcgucaccggcgacgacaagaacgccaccgccuccaucaucuacgacggcaugcucgucgacuccaucggcuccugguccaagaacauccuccgcacccaggaguccgagugcgucugcaucaacggcaccugcgccgucgucaugaccgacggcuccgccuccggcaaggccgacacccgcauccucuucauccgcgagggcaagaucaucaacaucuccccccucuccggcuccgcccagcacgucgaggagugcuccugcuacccccgcuaccccgagguccgcugcgucugccgcgacaacuggaagggcuccaaccgccccguccucuacaucaacauggccgacuacuccgucgaguccuccuacgucugcuccggccucgucggcgacaccccccgcaacgacgacuccuccuccuccuccaacugccgcgaccccaacaacgagcgcggcacccccggcgucaagggcugggccuucgacgacggcaacgacgucuggaugggccgcaccauccgcaacgacucccgcuccggcuacgagaccuuccgcgucaucaacggcuggaccaccgccaacuccaagucccagaucaaccgccaggucaucgucgacuccgagaacugguccggcuacuccggcaucuucuccgucgagggcaagaacugcaucaaccgcugcuucuacgucgagcucauccgcggccgcccccaggagccccgcgucugguggaccuccaacuccaucaucgucuucugcggcaccuccggcaccuacggcaccggcuccuggcccgacggcgccaacaucaacuacaugcccaucuga

SEQ ID NO: 119630 - RNA, 1401 nt, Artificial Sequence; identical to SEQ ID NO: 119628
  derived and/or modified CDS sequence (opt2) from neuraminidase__InfluenzaA__AGQ81817

SEQ ID NO: 119631 - RNA, 1401 nt, Artificial Sequence; identical to SEQ ID NO: 119628
  derived and/or modified CDS sequence (opt2) from neuraminidase__InfluenzaA__AGQ81818

SEQ ID NO: 119632 - RNA, 1401 nt, Artificial Sequence; identical to SEQ ID NO: 119628
  derived and/or modified CDS sequence (opt2) from neuraminidase__InfluenzaA__AGQ81819

SEQ ID NO: 119633 - RNA, 1401 nt, Artificial Sequence
  derived and/or modified CDS sequence (opt2) from neuraminidase__InfluenzaA__AGQ81820
augaaccccaaccagaagaucaucgccaucggcuccgucucccucaccaucgccaucaucugcuuccucaugcagaucgccauccucaccaccaccaugacccuccacuucaagcagaacgagugcuccaaccccuccaacaaccaggucguccccugcgagcccauccucaucgagcgcaacaccguccaccucaacuccaccaccaucgagaaggaggucugccccaaggucgccgaguacaagaacugguccaagccccagugccagaucaccggcuucgcccccuucuccaaggacaacuccauccgccucuccgccggcggcgacaucugggucacccgcgagcccuacgucuccugcucccucggcaagugcuaccaguucgcccucggccagggcaccacccucaagaacaagcacuccaacggcaccacccacgaccgcaccccccaccgcacccuccucaugaacgagcucggcguccccuuccaccucggcaccaagcaggucugcaucgccugguccuccuccuccugcuacgacggcaaggccuggcuccacaucugcgucaccggcgacgacaagaacgccaccgccuccaucaucuacgacggcaugcucgucgacuccaucggcuccugguccaagaacauccuccgcacccaggaguccgagugcgucugcaucaacggcaccugcgccgucgucaugaccgacggcuccgccuccggcaaggccgacacccgcauccucuucauccgcgagggcaagaucaucaacaucuccccccucuccggcuccgcccagcacgucgaggagugcuccugcuacccccgcuaccccgagguccgcugcgucugccgcgacaacuggaagggcuccaaccgccccguccucuacaucaacauggccgacuacuccaucgaguccuccuacgucugcuccggccucgucggcgacaccccccgcaacgacgacuccuccuccuccuccaacugccgcgaccccaacaacgagcgcggcacccccggcgucaagggcugggccuucgacgacggcaacgacgucuggaugggccgcaccauccgcaacgacucccgcuccggcuacgagaccuuccgcgucaucaacggcuggaccaccgccaacuccaagucccagaucaaccgccaggucaucgucgacuccgagaacugguccggcuacuccggcaucuucuccgucgagggcaagaacugcaucaaccgcugcuucuacgucgagcucauccgcggccgcccccaggagcccaaggucugguggaccuccaacuccaucaucgucuucugcggcaccuccggcaccuacggcaccggcuccuggcccgacggcgccaacaucaacuucaugcccaucuga

SEQ ID NO: 119634 - RNA, 1401 nt, Artificial Sequence
  derived and/or modified CDS sequence (opt2) from neuraminidase__InfluenzaA__AGQ81822
augaaccccaaccagaagaucaucgccaucggcuccgucucccucaccaucgccaucaucugcuuccucaugcagaucgccauccucaccaccaccaugacccuccacuucaagcagaacgagugcuccaaccccuccaacaaccaggucguccccugcgagcccauccucaucgagcgcaacaccguccaccucaacuccaccaccaucgagaagaaggucugccccaaggucgccgaguacaagaacugguccaagccccagugccagaucaccggcuucgcccccuucuccaaggacaacuccauccgccucuccgccggcggcgacaucugggucacccgcgagcccuacgucuccugcucccucggcaagugcuaccaguucgcccucggccagggcaccacccucaagaacaagcacuccaacggcaccacccacgaccgcaccccccaccgcacccuccucaugaacgagcucggcguccccuuccaccucggcaccaagcaggucugcaucgccugguccuccuccuccugcuacgacggcaaggccuggcuccacaucugcgucaccggcgacgacaagaacgccaccgccuccaucaucuacgacggcaugcucgucgacuccaucggcuccugguccaagaacauccuccgcacccaggaguccgagugcgucugcaucaacggcaccugcgccgucgucaugaccgacggcuccgccuccggcaaggccgacacccgcauccucuucauccgcgagggcaagaucaucaacaucuccccccucuccggcuccgcccagcacgucgaggagugcuccugcuacccccgcuaccccgagguccgcugcgucugccgcgacaacuggaagggcuccaaccgccccguccucuacaucaacauggccgacuacuccgucgaguccuccuacgucugcuccggccucgucggcgacaccccccgcaacgacgacuccuccuccuccuccaacugccgcgaccccaacaacgagcgcggcacccccggcgucaagggcugggccuucgacgacggcaacgacgucuggaugggccgcaccauccgcaacgacucccgcuccggcuacgagaccuuccgcgucaucaacggcuggaccaccgccaacuccaagucccagaucaaccgccaggucaucgucgacuccgagaacugguccggcuacuccggcaucuucuccgucgagggcaagaacugcaucaaccgcugcuucuacgucgagcucauccgcggccgcccccaggagccccgcgucugguggaccuccaacuccaucaucgucuucugcggcaccuccggcaccuacggcaccggcuccuggcccgacggcgccaacaucaacuacaugcccaucuga

SEQ ID NO: 119635 - RNA, 1401 nt, Artificial Sequence
  derived and/or modified CDS sequence (opt2) from neuraminidase__InfluenzaA__AGQ81823
augaaccccaaccagaagaucaucgccaucggcuccgucucccucaccaucgccaucaucugcuuccucaugcagaucgccauccucaccaccaccaugacccuccacuucaagcagaacgagugcuccaaccccuccaacaaccaggucguccccugcgagcccauccucaucgagcgcaacaccguccaccucaacuccaccaccaucgagaaggaggucugccccaaggucgccgaguacaagaacugguccaagccccagugccagaucaccggcuucgcccccuucuccaaggacaacuccauccgccucuccgccggcggcgacaucugggucacccgcgagcccuacgucuccugcucccucggcaagugcuaccaguucgcccucggccagggcaccacccucaagaacaagcacuccaacggcaccacccacgaccgcaccccccaccgcacccuccucaugaacgagcucggcguccccuuccaccucggcaccaagcaggucugcaucgccugguccuccuccuccugcuacgacggcaaggccuggcuccacaucugcgucaccggcgacgacaagaacgccaccgccuccaucaucuacgacggcaugcucgucgacuccaucggcuccugguccaagaacauccuccgcacccaggaguccgagugcgucugcaucaacggcaccugcgccgucgucaugaccgacggcuccgccuccggcaaggccgacacccgcauccucuucauccgcgagggcaagaucaucaacaucuccccccucuccggcuccgcccagcacgucgaggagugcuccugcuacccccgcuaccccgagguccgcugcgucugccgcgacaacuggaagggcuccaaccgccccguccucuacaucaacauggccgacuacuccgucgaguccuccuacgucugcuccggccucgucggcgacaccccccgcaacgacgacuccuccuccuccuccaacugccgcgaccccaacaacgagcgcggcgcccccggcgucaagggcugggccuucgacgacggcaacgacgucuggaugggccgcaccauccgcaacgacucccgcuccggcuacgagaccuuccgcgucgucaacggcuggaccaccgccaacuccaagucccagaucaaccgccaggucaucgucgacuccgagaacugguccggcuacuccggcaucuucuccgucgagggcaagaacugcaucaaccgcugcuucuacgucgagcucauccgcggccgcccccaggagccccgcgucugguggaccuccaacuccaucaucgucuucugcggcaccuccggcaccuacggcaccggcuccuggcccgacggcgccaacaucaacuucaugcccaucuga

SEQ ID NO: 119636 - RNA, 1401 nt, Artificial Sequence; identical to SEQ ID NO: 119635
  derived and/or modified CDS sequence (opt2) from neuraminidase__InfluenzaA__AGQ81824

SEQ ID NO: 119637 - RNA, 1401 nt, Artificial Sequence; identical to SEQ ID NO: 119635
  derived and/or modified CDS sequence (opt2) from neuraminidase__InfluenzaA__AGQ81825

SEQ ID NO: 119638 - RNA, 1401 nt, Artificial Sequence
  derived and/or modified CDS sequence (opt2) from neuraminidase__InfluenzaA__AGQ81831
augaaccccaaccagaagauccucgccaucggcuccgucucccucaccaucgccaucaucugcuuccucaugcagaucgccauccucaccaccaccaugacccuccacuucaagcagaacgagugcuccaaccccuccaacaaccaggucguccccugcgagcccauccucaucgagcgcaacaccguccaccucaacuccaccaccaucgagaaggaggucugccccaaggucgccgaguacaagaacugguccaagccccagugccagaucaccggcuucgcccccuucuccaaggacaacuccauccgccucuccgccggcggcgacaucugggucacccgcgagcccuacgucuccugcucccucggcaagugcuaccaguucgcccucggccagggcaccacccucaagaacaagcacuccaacggcaccacccacgaccgcaccccccaccgcacccuccucaugaacgagcucggcguccccuuccaccucggcaccaagcaggucugcaucgccugguccuccuccuccugcuacgacggcaaggccuggcuccacaucugcgucaccggcgacgacaagaacgccaccgccuccaucaucuacgacggcaugcucgucgacuccaucggcuccugguccaagaacauccuccgcacccaggaguccgagugcgucugcaucaacggcaccugcgccgucgucaugaccgacggcuccgccuccggcaaggccgacacccgcauccucuucauccgcgagggcaagaucgucaacaucuccccccucuccggcuccgcccagcacgucgaggagugcuccugcuacccccgcuaccccgagguccgcugcgucugccgcgacaacuggaagggcuccaaccgccccguccucuacaucaacauggccgacuacuccgucgaguccuccuacgucugcuccggccucgucggcgacaccccccgcaacgacgacuccuucuccuccuccaacugccgcgaccccaacaacgagcgcggcgcccccggcgucaagggcugggccuucgacgacggcaacgacgucuggaugggccgcaccauccgcaacgacucccgcuccggcuacgagaccuuccgcgucgucaacggcuggaccaccgccaacuccaagucccagaucaaccgccaggucaucgucgacuccgaguccugguccggcuacuccggcaucuucuccgucgagggcaagaacugcaucaaccgcugcuucuacgucgagcucauccgcggccgcccccaggagccccgcgucugguggaccuccaacuccaucaucgucuucugcggcaccuccggcaccuacggcaccggcuccuggcccgacggcgccaacaucaacuucaugcccaucuga

SEQ ID NO: 119639 - RNA, 1401 nt, Artificial Sequence; identical to SEQ ID NO: 119628
  derived and/or modified CDS sequence (opt2) from neuraminidase__InfluenzaA__AGQ81837

SEQ ID NO: 119640 - RNA, 1401 nt, Artificial Sequence; identical to SEQ ID NO: 119628
  derived and/or modified CDS sequence (opt2) from neuraminidase__InfluenzaA__AGQ81838

SEQ ID NO: 119641 - RNA, 1401 nt, Artificial Sequence; identical to SEQ ID NO: 119635
  derived and/or modified CDS sequence (opt2) from neuraminidase__InfluenzaA__AGQ81839

SEQ ID NO: 119642 - RNA, 1401 nt, Artificial Sequence; identical to SEQ ID NO: 119635
  derived and/or modified CDS sequence (opt2) from neuraminidase__InfluenzaA__AGQ81840

SEQ ID NO: 119643 - RNA, 1401 nt, Artificial Sequence; identical to SEQ ID NO: 119628
  derived and/or modified CDS sequence (opt2) from neuraminidase__InfluenzaA__AGQ81841

SEQ ID NO: 119644 - RNA, 1410 nt, Artificial Sequence
  derived and/or modified CDS sequence (opt2) from neuraminidase__InfluenzaA__AGQ81843
augaaccccaaccagaagaucaucaccaucggcgucgucaacaccacccucuccaccaucgcccuccucaucggcaucggcaaccucaucuucaacaccgucauccacgagaagaucggcguccaccagaccgucgucuaccccaccaucaccccccccgucauccccaacugcuccgacaccaccaucaccuacaacaacaccgucgucaacaacaucaccaccaccaucaucaacaaggccgagaagcaguucaagcccucccucccccucugccccuuccgcggcuucuuccccuuccacaaggacaacgccauccgccucggcgagaacaaggacgucaucgucacccgcgagcccuacgucuccugcgacaacgacgacugcugguccuucgcccucgcccagggcgcccuccucggcaccaagcacuccaacggcaccaucaaggaccgcacccccuaccgcucccucauccgcuuccccaucggcaccgcccccguccucggcaacuacaaggagaucugcgucgccugguccuccuccuccugcuucgacggcaaggaguggaugcacgucugcaugaccggcaacgacaacgacgccuccggccagaucaucuacgccggcaagaugaccgacuccaucaaguccuggcgccgcgacauccuccgcacccaggaguccgagugccagugcaucgacggcaccugcaucgucgccgucaccgacggccccgccgccuccuccgccgaccaccgcaucuacuggauccgcgagggcaagaucaucaaguacgaggacauccccaagaccaagauccagcaccucgaggagugcuccugcuacgucgacaccgacgucuacugcaucugccgcgacaacuggaagggcuccaaccgccccuggaugcgcaucaacaacgagaccauccucgagaccggcuacgucugcuccaaguuccacuccgacaccccccgccccgccgaccccuccaccgucuccugcgacucccccuccaacaucaacggcggccccggcgucaagggcuucggcuuccgcgccggcaacgacgucuggcucggccgcaccgucuccaccaccggccgcuccggcuucgaggucaucaaggucaccgagggcuggaucaacucccucaaccacgccaaguccgucacccagacccucgucuccaacaacgacugguccggcuacuccggcuccuucaucgucgagaacaacggcugcuuccagcccugcuucuacaucgagcucauccgcggccgccccaaccgcaacgacgacgucuccuggaccuccaacuccaucgucaccuucugcggccucgacaacgagcccggcuccggcaacuggcccgacggcuccaacaucggcuucaugcccaaguga

SEQ ID NO: 119645 - RNA, 1410 nt, Artificial Sequence
  derived and/or modified CDS sequence (opt2) from neuraminidase__InfluenzaA__AGQ81845
augaaccccaaccagaagaucaucaccaucggcgucgucaacaccacccucuccaccaucgcccuccucaucggcaucggcaaccucaucuucaacaccgucauccacgagaagaucggcguccaccagaccgucaucuaccccaccaucaccucccccgucguccccaacugcuccgacaccaccaucaccuacaacaacaccgucgucaacaacaucaccaccaccgucaucaacaaggccgagaagcacuucaagcccucccucccccucugccccuucaagggcuucuuccccuuccacaaggacaacgccauccgccucggcgagaacaaggacgucaucgucacccgcgagcccuacgucuccugcgacaacgacgacugcugguccuucgcccucgcccagggcgcccuccucggcaccaagcacuccaacggcaccaucaaggaccgcacccccuaccgcucccucauccgcuuccccaucggcaccgcccccguccucggcaacuacaaggagaucugcgucgccugguccuccuccuccugcuucgacggcaaggaguggaugcacgucugcaugaccggcaacgacaacgacgccuccggccagaucaucuacgccggcaagaugaccgacuccaucaaguccuggcgccgcgacauccuccgcacccaggaguccgagugccagugcaucgacggcaccugcaucgucgccgucaccgacggccccgccgccaacuccgccgaccaccgcaucuacuggauccgcgagggcaagaucaucaaguacgagaacauccccaagaccaagauccagcaccucgaggagugcuccugcuacgucgacaccgacgucuacugcaucugccgcgacaacuggaagggcuccaaccgccccuggaugcgcaucaacaacgagaccauccucgagaccggcuacgucugcuccaaguuccacuccgacaccccccgccccgccgaccccuccaccgucuccugcgacucccccuccaacaucaacggcggccccggcgucaagggcuucggcuuccgcaccggcaacgacgucuggcucggccgcaccgucuccaccaccggccgcuccggcuucgaggucaucaaggucaccgagggcuggaucaacucccucaaccacgccaaguccgucacccagacccucgucuccaacuccgacugguccggcuacuccggcuccuucaucgucgagaacaacggcugcuuccagcccugcuucuacaucgagcucauccgcggccgccccaacaagaacgacgacgucuccuggaccuccaacuccaucgucaccuucugcggccucgacaacgagcccggcuccggcaacuggcccgacggcuccaacaucggcuucaugcccaaguga

SEQ ID NO: 119646 - RNA, 1410 nt, Artificial Sequence; identical to SEQ ID NO: 119645
  derived and/or modified CDS sequence (opt2) from neuraminidase__InfluenzaA__AGQ81846

SEQ ID NO: 119647 - RNA, 1410 nt, Artificial Sequence; identical to SEQ ID NO: 119645
  derived and/or modified CDS sequence (opt2) from neuraminidase__InfluenzaA__AGQ81847

SEQ ID NO: 119648 - RNA, 1410 nt, Artificial Sequence
  derived and/or modified CDS sequence (opt2) from neuraminidase__InfluenzaA__AGQ81848
augaaccccaaccagaagaucaucaccaucggcgucgucaacaccacccucuccaccaucgcccuccucaucggcaucggcaaccucaucuucaacaccgucauccacgagaagaucggcguccaccagaccgucaucuaccccaccaucaccucccccgucguccccaacugcuccgacaccaccaucaccuacaacaacaccgucgucaacaacaucaccaccaccgucaucaacaaggccgagaagcacuucaagcccucccucccccucugccccuucaagggcuucuuccccuuccacaaggacaacgccauccgccucggcgagaacaaggacgucaucgucacccgcgagcccuacgucuccugcgacaacgacgacugcugguccuucgcccucgcccagggcgcccuccucggcaccaagcacuccaacggcaccaucaaggaccgcacccccuaccgcucccucauccgcuuccccaucggcaccgcccccguccucggcaacuacaaggagaucugcgucgccugguccuccuccuccugcuucgacggcaaggaguggaugcacgucugcaugaccggcaacgacaacgacgccuccggccagaucaucuacgccggcaagaugaccgacuccaucaaguccuggcgccgcgacauccuccgcacccaggaguccgagugccagugcaucgacggcaucugcaucgucgccgucaccgacggccccgccgccaacuccgccgaccaccgcaucuacuggauccgcgagggcaagaucaucaaguacgagaacauccccaagaccaagauccagcaccucgaggagugcuccugcuacgucgacaccgacgucuacugcaucugccgcgacaacuggaagggcuccaaccgccccuggaugcgcaucaacaacgagaccauccucgagaccggcuacgucugcuccaaguuccacuccgacaccccccgccccgccgaccccuccaccgucuccugcgacucccccuccaacaucaacggcggccccggcgucaagggcuucggcuuccgcaccggcaacgacgucuggcucggccgcaccgucuccaccaccggccgcuccggcuucgaggucaucaaggucaccgagggcuggaucaacucccucaaccacgccaaguccgucacccagacccucgucuccaacuccgacugguccggcuacuccggcuccuucaucgucgagaacaacggcugcuuccagcccugcuucuacaucgagcucauccgcggccgccccaacaagaacgacgacgucuccuggaccuccaacuccaucgucaccuucugcggccucgacaacgagcccggcuccggcaacuggcccgacggcuccaacaucggcuucaugcccaaguga

SEQ ID NO: 119649 - RNA, 1410 nt, Artificial Sequence
  derived and/or modified CDS sequence (opt2) from neuraminidase__InfluenzaA__AGQ81850
augaaccccaaccagaagaucaucaccaucggcgucgucaacaccacccucuccaccaucgcccuccucaucggcaucggcaaccucaucuucaacaccgucauccacgagaagaucggcguccaccagaccgucaucuaccccaccaucaccucccccgucguccccaacugcuccgacaccaccaucaccuacaacaacaccgucgucaacaacaucaccaccaccgucaucaacaaggccgagaagcacuucaagcccucccucccccucugccccuucaagggcuucuuccccuuccacaaggacaacgccauccgccucggcgagaacaaggacgucaucgucacccgcgagcccuacgucuccugcgacaacgacgacugcugguccuucgcccucgcccagggcgcccuccucggcaccaagcacuccaacggcaccaucaaggaccgcacccccuaccgcucccucauccgcuuccccaucggcaccgcccccguccucggcaacuacaaggagaucugcgucgccugguccuccuccuccugcuucgacggcaaggaguggaugcacgucugcaugaccggcaacgacaacgacgccaccggccagaucaucuacgccggcaagaugaccgacuccaucaaguccuggcgccgcgacauccuccgcacccaggaguccgagugccagugcaucgacggcaccugcaucgucgccgucaccgacggccccgccgccaacuccgccgaccaccgcaucuacuggauccgcgagggcaagaucaucaaguacgagaacauccccaagaccaagauccagcaccucgaggagugcuccugcuacgucgacaccgacgucuacugcaucugccgcgacaacuggaagggcuccaaccgccccuggaugcgcaucaacaacgagaccauccucgagaccggcuacgucugcuccaaguuccacuccgacaccccccgccccgccgaccccuccaccgucuccugcgacucccccuccaacaucaacggcggccccggcgucaagggcuucggcuuccgcaccggcaacgacgucuggcucggccgcaccgucuccaccaccggccgcuccggcuucgaggucaucaaggucaccgagggcuggaucaacucccucaaccacgccaaguccgucacccagacccucgucuccaacuccgacugguccggcuacuccggcuccuucaucgucgagaacaacggcugcuuccagcccugcuucuacaucgagcucauccgcggccgccccaacaagaacgacgacgucuccuggaccuccaacuccaucgucaccuucugcggccucgacaacgagcccggcuccggcaacuggcccgacggcuccaacaucggcuucaugcccaaguga

SEQ ID NO: 119650 - RNA, 1410 nt, Artificial Sequence
  derived and/or modified CDS sequence (opt2) from neuraminidase__InfluenzaA__AGQ81852
augaaccccaaccagaagaucaucaccaucggcgucgucaacaccacccucuccaccaucgcccuccucaucggcaucggcaaccucaucuucaacaccgucauccacgagaagaucggcguccaccagaccgucaccuaccccaccaucaccucccccgucguccccaacugcuccgacaccaccaucaccuacaacaacaccgucgucaacaacaucaccaccaccgucaucaacaaggccgagaagcacuucaagcccucccucccccucugccccuucaagggcuucuuccccuuccacaaggacaacgccauccgccucggcgagaacaaggacgucaucgucacccgcgagcccuacgucuccugcgacaacgacgacugcugguccuucgcccucgcccagggcgcccuccucggcaccaagcacuccaacggcaccaucaaggaccgcacccccuaccgcucccucauccgcuuccccaucggcaccgcccccguccucggcaacuacaaggagaucugcgucgccugguccuccuccuccugcuucgacggcaaggaguggaugcacgucugcaugaccggcaacgacaacgacgccaccggccagaucaucuacgccggcaagaugaccgacuccaucaaguccuggcgccgcgacauccuccgcacccaggaguccgagugccagugcaucgacggcaccugcaucgucgccgucaccgacggccccgccgccaacuccgccgaccaccgcaucuacuggauccgcgagggcaagaucaucaaguacgagaacauccccaagaccaagauccagcaccucgaggagugcuccugcuacgucgacaccgacgucuacugcaucugccgcgacaacuggaagggcuccaaccgccccuggaugcgcaucaacaacgagaccauccucgagaccggcuacgucugcuccaaguuccacuccgacaccccccgccccgccgaccccuccaccgucuccugcgacucccccuccaacaucaacggcggccccggcgucaagggcuucggcuuccgcaccggcaacgacgucuggcucggccgcaccgucuccaccaccggccgcuccggcuucgaggucaucaaggucaccgagggcuggaucaacucccucaaccacgccaaguccgucacccagacccucgucuccaacuccgacugguccggcuacuccggcuccuucaucgucgagaacaacggcugcuuccagcccugcuucuacaucgagcucauccgcggccgccccaaccgcaacgacgacgucuccuggaccuccaacuccaucgucaccuucugcggccucgacaacgagcccggcuccggcaacuggcccgacggcuccaacaucggcuucaugcccaaguga

SEQ ID NO: 119651 - RNA, 1410 nt, Artificial Sequence
  derived and/or modified CDS sequence (opt2) from neuraminidase__InfluenzaA__AGQ81853
augaaccccaaccagaagaucaucaccaucggcgucgucaacaccacccucuccaccaucgcccuccucaucggcaucggcaaccucaucuucaacaccgucauccacgagaagaucggcguccaccagaccgucaccuaccccaccaucaccucccccgucguccccaacugcuccgacaccaccaucaccuacaacaacaccgucgucaacaacaucaccaccaccgucaucaacaaggccgagaagcacuucaagcccucccucccccucugccccuucaagggcuucuuccccuuccacaaggacaacgccauccgccucggcgagaacaaggacgucaucgucacccgcgagcccuacgucuccugcgacaacgacgacugcugguccuucgcccucgcccagggcgcccuccucggcaccaagcacuccaacggcaccaucaaggaccgcacccccuaccgcucccucauccgcuuccccaucggcaccgcccccguccucggcaacuacaaggagaucugcgucgccugguccuccuccuccugcuucgacggcaaggaguggaugcacgucugcaugaccggcaacgacaacgacgccaccggccagaucaucuacgccggcaagaugaccgacuccaucaaguccuggcgccgcgacauccuccgcacccaggaguccgagugccagugcaucgacggcaccugcaucgucgccgucaccgacggccccgccgccaacuccgccgaccaccgcaucuacuggauccgcgagggcaagaucaucaaguacgagaacauccccaagaccaagauccagcaccucgaggagugcuccugcuacgucgacaccgacgucuacugcaucugccgcgacaacuggaagggcuccaaccgccccuggaugcgcaucaacaacgagaccauccucgagaccggcuacgucugcuccaaguuccacuccgacaccccccgccccgccgaccccuccaccgucuccugcgacucccccuccaacaucaacggcggccccggcgucaagggcuucggcuuccgcaccggcaacgacgucuggcucggccgcaccgucuccaccaccggccgcuccggcuucgaggucaucaaggucaccgagggcuggaucaacucccucaaccacgccaaguccgucacccagacccucgucuccaacuccgacugguccggcuacuccggcuccuucaucgucgagaacaacggcugcuuccagcccugcuucuacaucgagcucauccgcggccgccccaacaagaacgacgacgucuccuggaccuccaacuccaucgucaccuucugcggccucgacaacgagcccggcuccggcaacuggcccgacggcuccaacaucggcuucaugcccaaguga

SEQ ID NO: 119652 - RNA, 1410 nt, Artificial Sequence; identical to SEQ ID NO: 119651
  derived and/or modified CDS sequence (opt2) from neuraminidase__InfluenzaA__AGQ81854

SEQ ID NO: 119653 - RNA, 1410 nt, Artificial Sequence; identical to SEQ ID NO: 119651
  derived and/or modified CDS sequence (opt2) from neuraminidase__InfluenzaA__AGQ81855

SEQ ID NO: 119654 - RNA, 1410 nt, Artificial Sequence; identical to SEQ ID NO: 119644
  derived and/or modified CDS sequence (opt2) from neuraminidase__InfluenzaA__AGQ81856

SEQ ID NO: 119655 - RNA, 1410 nt, Artificial Sequence
  derived and/or modified CDS sequence (opt2) from neuraminidase__InfluenzaA__AGQ81857
augaaccccaaccagaagaucaucaccaucggcgucgucaacaccacccucuccaccaucgcccuccucaucggcaucggcaaccucaucuucaacaccgucauccacgagaagaucggcguccaccagaccgucgucuaccccaccaucaccccccccgucauccccaacugcuccgacaccaccaucaccuacaacaacaccgucgucaacaacaucaccaccaccaucaucaacaaggccgagaagcaguucaagcccucccucccccucugccccuuccgcggcuucuuccccuuccacaaggacaacgccauccgccucggcgagaacaaggacgucaucgucacccgcgagcccuacgucuccugcgacaacgacgacugcugguccuucgcccucgcccagggcgcccuccucggcaccaagcacuccaacggcaccaucaaggaccgcacccccuaccgcucccucauccgcuuccccaucggcaccgcccccguccucggcaacuacaaggagaucugcgucgccugguccuccuccuccugcuucgacggcaaggaguggaugcacgucugcaugaccggcaacgacaacgacgccuccggccagaucaucuacgccggcaagaugaccgacuccaucaaguccuggcgccgcgacauccuccgcacccaggaguccgagugccagugcaucgacggcaccugcaucgucgccgucaccgacggccccgccgccuccuccgccgaccaccgcaucuacuggauccgcgagggcaagaucaucaaguacgaggacauccccaagaccaagauccagcaccucgaggagugcuccugcuacgucgacaccgacgucuacugcaucugccgcgacaacuggaagggcuccaaccgccccuggaugcgcaucaacaacgagaccauccucgagaccggcuacgucugcuccaaguuccacuccgacaccccccgccccgccgaccccuccaccgucuccugcgacucccccuccaacaucaacggcggccccggcgucaagggcuucggcuuccgcgccggcaacgacgucuggcucggccgcaccgucuccaccaccggccgcuccggcuucgaggucaucaaggucaccgagggcuggaucaacucccucaaccacgccaaguccgucacccagacccucgucuccaacaacgacugguccggcuacuccggcuccuucaucgucgaguccaacggcugcuuccagcccugcuucuacaucgagcucauccgcggccgccccaaccgcaacgacgacgucuccuggaccuccaacuccaucgucaccuucugcggccucgacaacgagcccggcuccggcaacuggcccgacggcuccaacaucggcuucaugcccaaguga

SEQ ID NO: 119656 - RNA, 1410 nt, Artificial Sequence
  derived and/or modified CDS sequence (opt2) from neuraminidase__InfluenzaA__AGQ81858
augaaccccaaccagaagaucaucaccaucggcgucgucaacaccacccucuccaccaucgcccuccucaucggcgucggcaaccucaucuucaacaccgucauccacgagaagaucggcgaccaccagaucgucgucuaccccaccaccaccgccuccgucguccccaacugcuccgacaccaucaucaccuacaacaacaccgucgucaacaacaucaccaccaccaucaucaccaaggaggagacccacuucaaguccucccucccccucugccccuuccgcggcuucuuccccuuccacaaggacaacgccauccgccucggcgagaacaaggacgucaucgucacccgcgagcccuacgucuccugcgacaacgacgacugcugguccuucgcccucgcccagggcgcccuccucggcaccaagcacuccaacggcaccaucaaggaccgcacccccuaccgcucccucauccgcuuccccaucggcaccgcccccguccucggcaacuacaaggagaucugcgucgccugguccuccuccuccugcuucgacggcaaggaguggaugcacgucugcaugaccggcaacgacaacgacgccuccggccagaucauguacgccggcaagaugaccgacuccaucaaguccuggcgcaaggacauccuccgcacccaggaguccgagugccagugcaucgacggcaccugcaucgucgccgucaccgacggccccgccaccaacuccgccgaccaccgcaucuacuggauccgcgagggcaagaucaucaaguacgagaacauccccaagaccaagauccagcaccucgaggagugcuccugcuacgucgacaucgacgucuacugcgucugccgcgacaacuggaagggcuccaaccgccccuggaugcgcaucaacaacgagaccauccucgagaccggcuacgucugcuccaaguuccacuccgacaccccccgccccgccgaccccuccaccgucuccugcgacucccccuccaacgucaacggcggccccggcgucaagggcuucggcuucaagaccggcaacgacgucuggcucggccgcaccgucuccaccuccggccgcuccggcuucgagaucaucaaggucaccgagggcuggaucaacucccccaaccacgccaaguccgucacccagacccucgucuccaacaacgacugguccggcuacuccggcuccuucaucgucgagaacaacggcugcuuccagcccugcuucuacaucgagcucauccgcggccgccccaacaagaacgacgacgucuccuggaccuccaacuccaucgucaccuucugcggccucgacaacgagcccggcuccggcaacuggcccgacggcuccaacaucggcuucaugcccaaguga

SEQ ID NO: 119657 - RNA, 1410 nt, Artificial Sequence
  derived and/or modified CDS sequence (opt2) from neuraminidase__InfluenzaA__AGQ81859
augaaccccaaccagaagaucaucaccaucggcgucgucaacaccacccucuccaccaucgcccuccucaucggcaucggcaaccucaucuucaacaccgucauccacgagaagaucggcguccaccagaccgucgucugccccaccaucaccccccccgucguccccaacugcuccgacaccaccaucaccuacaacaacaccgucgucaacaacaucaccaccaccaucaucaacaaggccgagaagcaguucaaguccucccucccccucugccccuuccgcggcuucuuccccuuccacaaggacaacgccauccgccucggcgagaacaaggacgucaucgucacccgcgagcccuacgucuccugcgacaacgacgacugcugguccuucgcccucgcccagggcgcccuccucggcaccaagcacuccaacggcaccaucaaggaccgcacccccuaccgcucccucauccgcuuccccaucggcaccgcccccguccucggcaacuacaaggagaucugcgucgccugguccuccuccuccugcuucgacggcaaggaguggaugcacaucugcaugaccggcaacgacaacgacgccuccggccagaucaucuacgccggcaagaugaccgacuccaucaaguccuggcgccgcgacauccuccgcacccaggaguccgagugccagugcaucgacggcaccugcaucgucgccaucaccgacggccccgccgccuccuccgccgaccaccgcaucuacuggauccgcgagggcaagaucaucaaguacgagaacauccccaagaccaagauccagcaccucgaggagugcuccugcuacgucgacaucgacgucuacugcaucugccgcgacaacuggaagggcuccaaccgccccuggaugcgcaucaacaacgagaccauccucgagaccggcuacgucugcuccaaguuccacuccgacaccccccgccccgccgaccccuccaccgucuccugcgacucccccuccaacaucaacggcggccccggcgucaagggcuucggcuuccgcgccggcaacgacgucuggcucggccgcaccgucuccaccaccggccgcuccggcuucgaggucaucaaggucaccgagggcuggaucaacucccucaaccacgccaaguccgucacccagacccucgucuccaacuccgacugguccggcuacuccggcuccuucaucgucgagaacaacggcugcuuccagcccugcuucuacaucgagcucauccgcggccgccccaaccgcaacgacgacgucuccuggaccuccaacuccaucgucaccuucugcggccucgacaacgagcccggcuccggcaacuggcccgacggcuccaacaucggcuucaugcccaaguga

SEQ ID NO: 119658 - RNA, 1413 nt, Artificial Sequence
  derived and/or modified CDS sequence (opt2) from neuraminidase__InfluenzaA__AGQ81860
augaaccccaaccagaagaucaucugcaucuccgccaccggcaugacccucuccgucgucucccuccucaucggcaucgccaaccucggccucaacaucggccuccacuacaaggucggcgacacccccgacgucuccauccccaacaugaacgagaccaacuccaccaccaccaucaucaacaacaacacccagaacaacuucaccaacaucaccaacaucaucgucaacaagaacgaggagaagaccuuccucaaccucaccaagccccucugcgaggucaacuccuggcacauccucuccaaggacaacgccauccgcaucggcgaggacgcccacauccucgucacccgcgagcccuaccucuccugcgacccccagggcugccgcauguucgcccucucccagggcaccacccuccgcggccgccacgccaacggcaccauccacgaccgcucccccuuccgcgcccucgucuccugggagaugggccaggcccccucccccuacaacgucaaggucgagugcgucggcugguccuccaccuccugccacgacggcaucucccgcauguccaucugcauguccggccccaacaacaacgccuccgccgucgucugguacggcggccgccccgucaccgagauccccuccugggccggcaacauccuccgcacccaggaguccgagugcgucugccacaagggcaucugccccgucgucaugaccgacggccccgccaacaaccgcgccgccaccaagaucaucuacuucaaggagggcaagauccagaagaucgaggagcucgccggcuccgcccagcacaucgaggagugcuccugcuacggcgccgucgaggucaucaagugcaucugccgcgacaacuggaagggcgccaaccgccccgucaucaccaucaaccccgagaugaugacccacaccuccaaguaccucugcuccaagguccucaccgacaccucccgccccaacgaccccaccaacggcaacugcgacgcccccaucaccggcggcucccccgaccccggcgucaagggcuucgccuuccucgacggcgagaacuccuggcucggccgcaccaucuccaaggacucccgcuccggcuacgagaugcucaagguccccaacgccgagaccgacacccaguccggccccaccucccaccaggucaucgucaacaaccagaacugguccggcuacuccggcgccuucaucgacuacugggccaacaaggagugcuucaaccccugcuucuacgucgagcucauccgcggccgccccaaggaguccuccguccucuggaccuccaacuccaucgucgcccucugcggcuccaaggagcgccucggcuccugguccuggcacgacggcgccgagaucaucuacuucaaguga

SEQ ID NO: 119659 - RNA, 1413 nt, Artificial Sequence
  derived and/or modified CDS sequence (opt2) from neuraminidase__InfluenzaA__AGQ81861
augaaccccaaccagaagaucaucugcaucuccgccaccggcaugacccucuccgucgucucccuccucaucggcaucgccaaccucggccucaacaucggccuccacuacaaggucggcgacacccccgacgucuccauccccaacaugaacgagaccaacuccaccaccaccaucaucaacaacaacacccagaacaacuucaccaacaccaccaacaucaucgucaacaagaacgaggagaagaccuuccucaaccucaccaagccccucugcgaggucaacuccuggcacauccucuccaaggacaacgccauccgcaucggcgaggacgcccacauccucgucacccgcgagcccuaccucuccugcgacccccagggcugccgcauguucgcccucucccagggcaccacccuccgcggccgccacgccaacggcaccauccacgaccgcucccccuuccgcgcccucgucuccugggagaugggccaggcccccucccccuacaacgucaaggucgagugcgucggcugguccuccaccuccugccacgacggcaucucccgcauguccaucugcauguccggccccaacaacaacgccuccgccgucgucugguacggcggccgccccgucaccgagauccccuccugggccggcaacauccuccgcacccaggaguccgagugcgucugccacaagggcaucugccccgucgucaugaccgacggccccgccaacaaccgcgccgccaccaagaucaucuacuucaaggagggcaagauccagaagaucgaggagcucgccggcuccgcccagcacaucgaggagugcuccugcuacggcgccgucgaggucaucaagugcaucugccgcgacaacuggaagggcgccaaccgccccgucaucaccaucaaccccgagaugaugacccacaccuccaaguaccucugcuccaagguccucaccgacaccucccgccccaacgaccccaccaacggcaacugcgacgcccccaucaccggcggcucccccgaccccggcgucaagggcuucgccuuccucgacggcgagaacuccuggcucggccgcaccaucuccaaggacucccgcuccggcuacgagaugcucaagguccccaacgccgagaccgacacccaguccggccccaccucccaccaggucaucgucaacaaccagaacugguccggcuacuccggcgccuucaucgacuacugggccaacaaggagugcuucaaccccugcuucuacgucgagcucauccgcggccgccccaaggaguccuccguccucuggaccuccaacuccaucgucgcccucugcggcuccaaggagcgccucggcuccugguccuggcacgacggcgccgagaucaucuacuucaaguga

SEQ ID NO: 119660 - RNA, 1413 nt, Artificial Sequence
  derived and/or modified CDS sequence (opt2) from neuraminidase__InfluenzaA__AGQ81862
augaaccccaaccagaagaucaucugcaucuccgccaccggcaugacccucuccgucgucucccuccucaucggcaucgccaaccucggccucaacaucggccuccacuacaaggucggcgacacccccgacgucaacauccccuccaugaacgagaccaacuccaccaccaccaucaucaacaacaacacccagaacaacuucaccaacaucaccaacaucaucgucaacaaggaggagggccgcaccuuccucaaccucaccaagccccucugcgaggucaacuccuggcacauccucuccaaggacaacgccauccgcaucggcgaggacgcccacauccucgucacccgcgagcccuaccucuccugcgacccccagggcugccgcauguucgcccucucccagggcaccacccuccgcggccgccacgccaacggcaccauccacgaccgcucccccuuccgcgcccucgucuccugggagaugggccaggcccccucccccuacaacguccgcgucgagugcaucggcugguccuccaccuccugccacgacggcaucucccgcauguccaucugcauguccggccccaacaacaacgccuccgccgucgucugguacggcggccgccccgucaccgagauccccuccugggccggcaacauccuccgcacccaggaguccgagugcgucugccacaagggcaucugccccgucgucaugaccgacggccccgccaacaaccgcgccgccaccaagaucaucuacuucaaggagggcaagauccagaagaucgaggagcucgagggcaacgcccagcacaucgaggagugcuccugcuacggcgccgccggcgucaucaagugcaucugccgcgacaacuggaagggcgccaaccgccccgucaucaucaucgaccccgagaugaugacccacaccuccaaguaccucugcucccgcguccucaccgacaccucccgccccaacgaccccaccuccggcaacugcgacgcccccaucaccggcggcucccccgaccccggcgucaagggcuucgccuuccucgacggcgagaacuccuggcucggccgcaccaucuccaaggacucccgcuccggcuacgagaugcucaagguccccaacgccgagaccgacacccaguccggccccaccucccaccaggucaucgucaacaaccagaacugguccggcuacuccggcgccuucaucgacuacugggccaacaaggagugcuucaaccccugcuucuacgucgagcucauccgcggccgccccaaggaguccuccguccucuggaccuccaacuccaucgucgcccucugcggcuccaaggagcgccucggcuccugguccuggcacgacggcgccgagaucaucuacuucaaguga

SEQ ID NO: 119661 - RNA, 1413 nt, Artificial Sequence
  derived and/or modified CDS sequence (opt2) from neuraminidase__InfluenzaA__AGQ81863
augaaccccaaccagaagaucaucugcaucuccgccaccggcaugacccucuccgucgucucccuccucaucggcaucgccaaccucggccucaacaucggccuccacuacaaggucggcgacacccccgacgucaacauccccuccaugaacgagaccaacuccaccaccaccaucaucaacaacaacacccagaacaacuucaccaacaucaccaacaucaucgucaacaaggaggaggagcgcaccuuccucaaccucaccaagccccucugcgaggucaacuccuggcacauccucuccaaggacaacgccauccgcaucggcgaggacgcccacauccucgucacccgcgagcccuaccucuccugcgacccccagggcugccgcauguucgcccucucccagggcaccacccuccgcggccgccacgccaacggcaccauccacgaccgcucccccuuccgcgcccucgucuccugggagaugggccaggcccccucccccuacaacguccgcgucgagugcaucggcugguccuccaccuccugccacgacggcaucucccgcauguccaucugcauguccggccccaacaacaacgccuccgccgucgucugguacggcggccgccccgucaccgagauccccuccugggccggcaacauccuccgcacccaggaguccgagugcgucugccacaagggcaucugccccgucgucaugaccgacggccccgccaacaaccgcgccgccaccaagaucaucuacuucaaggagggcaagauccagaagaucgaggagcucgagggcaacgcccagcacaucgaggagugcuccugcuacggcgccgccggcgucaucaagugcaucugccgcgacaacuggaagggcgccaaccgccccgucaucaucaucgaccccgagaugaugacccacaccuccaaguaccucugcucccgcguccucaccgacaccucccgccccaacgaccccaucuccggcaacugcgacgcccccaucaccggcggcucccccgaccccggcgucaagggcuucgccuuccucgacggcgagaacuccuggcucggccgcaccaucuccaaggacucccgcuccggcuacgagaugcucaagguccccaacgccgagaccgacacccaguccggccccaccucccaccaggucaucgucaacaaccagaacugguccggcuacuccggcgccuucaucgacuacugggccaacaaggagugcuucaaccccugcuucuacgucgagcucauccgcggccgccccaaggaguccuccguccucuggaccuccaacuccaucgucgcccucugcggcuccaaggagcgccucggcuccugguccuggcacgacggcgccgagaucaucuacuucaaguga

SEQ ID NO: 119662 - RNA, 1416 nt, Artificial Sequence
  derived and/or modified CDS sequence (opt2) from neuraminidase__InfluenzaA__AGQ81864
augaaccccaaccagaagcucuucgcccucuccggcgucgccaucgcccucuccguccucaaccuccucaucggcaucuccaacgucggccucaacgucucccuccaccucaaggagaagggccccaagcaggaggagaacuccaccugcaccaccaucaaccagaacaacaccaccaucgucgagaacaccuacgucaacaacaccaccaucaucuccaaggagaccgagcucaagccccccaacuaccuccuccucaacaagucccucugcaacgucgagggcugggucgucaucgccaaggacaacgccguccgcuucggcgaguccgagcagaucaucgucacccgcgagcccuacgucuccugcgaccccaccggcugcaagauguacgcccuccaccagggcaccaccauccgcaacaagcacuccaacggcaccauccacgaccgcaccgccuuccgcggccucaucuccaccccccucggcaccccccccaccgucuccaacuccgacuucaucugcgucggcugguccuccaccaccugccacgacggcaucggccgcaugaccaucugcauccagggcaacaacgacaacgccaccgccaccgucuacuacaaccgccgccucaccaccaccaucaagaccugggcccgcaacauccuccgcacccaggaguccgagugcgucugccacaacggcaccugcgccgucgucaugaccgacggcuccgccuccucccaggccuacaccaaggucauguacuuccacaagggccucgucaucaaggaggaggcccucaagggcuccgcccgccacaucgaggagugcuccugcuacggccacucccagaaggccaccugcgucugccgcgacaacuggcagggcgccaaccgccccaucaucgagaucgacaugaacacccucgagcacaccucccgcuacgucugcaccggcauccucaccgacaccucccgccccggcgacaaguccuccggcgacugcuccaaccccaucaccggcucccccggcgcccccggcgucaagggcuucggcuuccucaacggcgacaacaccuggcucggccgcaccaucucccccaagucccgcuccggcuucgagaugcucaagauccccaacgccggcaccgaccccaacucccgcaucgccgagcgccaggagaucgucgacaacaacaacugguccggcuacuccggcuccuucaucgacuacugggacaacgacuccgagugcuacaaccccugcuucuacgucgagcucauccgcggccgccccgaggaggccaaguacgucugguggaccuccaacucccucaucgcccucugcggcucccccuuccccgucggcuccggcuccuuccccgacggcgcccagauccaguacuucuccuga

SEQ ID NO: 119663 - RNA, 1416 nt, Artificial Sequence
  derived and/or modified CDS sequence (opt2) from neuraminidase__InfluenzaA__AGQ81865
augaaccccaaccagaagcucuucgcccucuccggcgucgccaucgcccucuccguccucaaccuccucaucggccucuccaacgucggccucaacgucucccuccaccucaaggagaccggccccaagcaggagggcaaccucaccugcaugaccaucaaccagaacaacaccaccgucgucgagaacaccuacgucaacaacaccaccaucaucaccaaggagaccgaguccgagacccccaacuaccuccuccucaacaagucccucugcaacgucgagggcugggucgucaucgccaaggacaacgccguccgcuucggcgaguccgagcagaucaucgucacccgcgagcccuacgucuccugcgaccccaacggcugcaagauguacgcccuccaccagggcaccaccauccgcaacaagcacuccaacggcaccauccacgaccgcaccgccuuccgcggccucaucuccaccccccucggcaccccccccaccgucuccaacuccgacuucaucugcgucggcugguccuccaccaccugccacgacggcaucggccgcaugaccaucugcauccagggcaacaacgacaacgccaccgccaccgucuacuacaaccgccgccucaccaccaccaucaagaccugggcccgcaacauccuccgcacccaggaguccgagugcgucugccacaacggcaccugcgccgucgucaugaccgacggcuccgccuccucccaggcccacaccaaggucauguacuuccacaagggccucgucgucaaggaggaggcccucaagggcuccgcccgccacaucgaggagugcuccugcuacggccacaaccagaaggucaccugcgucugccgcgacaacuggcagggcgccaaccgccccaucaucgagaucgacaugaacacccucgagcacaccucccgcuacgucugcaccggcauccucaccgacaccucccgccccggcgacaagcccaccggcgacugcuccaaccccaucaccggcucccccggcgcccccggcgucaagggcuucggcuuccucaacggcggcaacaccuggcucggccgcaccaucuccccccgcucccgcuccggcuucgagaugcucaagauccccaacgccggcaccgaccccaacucccgcaucgccgagcgccaggagaucgucgacaacuccaacugguccggcuacuccggcuccuucaucgacuacuggaacgacaacuccgagugcuacaaccccugcuucuacgucgagcucauccgcggccgccccgaggaggccaaguacgucugguggaccuccaacucccucaucgcccucugcggcucccccuuccccgucggcuccggcuccuuccccgacggcgcccagauccaguacuucuccuga

SEQ ID NO: 119664 - RNA, 1416 nt, Artificial Sequence
  derived and/or modified CDS sequence (opt2) from neuraminidase__InfluenzaA__AGQ81868
augaaccccaaccagaagcucuucgcccucuccggcgucgccaucgcccucuccguccucaaccuccucaucggcaucuccaacgucggccucaacgucucccuccaccucaaggagaagggccccaagcaggaggagaacuccaccugcaccaccaucaaccagaacaacaccaccgucgucgagaacaccuacgucaacaacaccaccaucaucaccaaggagaccgagcucaagacccccuccuaccuccuccucaacaagucccucugcaacgucgagggcugggucgucaucgccaaggacaacgccguccgcuucggcgaguccgagcagaucaucgucacccgcgagcccuacgucuccugcgaccccaccggcugcaagauguacgcccuccaccagggcaccaccauccgcaacaagcacuccaacggcaccauccacgaccgcaccgccuuccgcggccucaucuccaccucccucggcaccccccccaccaucuccaacuccgacuucaugugcgucggcugguccuccaccaccugccacgacggcaucggccgcaugaccaucugcauccagggcaacaacgacaacgccaccgccaccgucuacuacaaccgccgccucaccaccaccaucaagaccugggcccgcaacauccuccgcacccaggaguccgagugcgucugccacaacggcaucugcgccgucgucaugaccgacggcuccgccuccucccaggccuacaccaaggucauguacuuccacaagggccucgucgucaaggaggaggcccucaagggcuccgcccgccacaucgaggagugcuccugcuacggccacucccagaaggucaccugcgucugccgcgacaacuggcagggcgccaaccgccccaucaucgagaucgacaugaacacccucgagcacaccucccgcuacgucugcaccggcauccucaccgacaccucccgccccggcgacaaguccuccggcgacugcuccaaccccaucgccggcucccccggcgcccccggcgucaagggcuucggcuuccucaacggcgacaacaccuggcucggccgcaccaucuccccccgcucccgcuccggcuucgagaugcucaagauccccaacgccggcaccgaccccaacucccgcaucgccggccgccaggagaucgucgacaacaacaacugguccggcuacuccggcuccuucaucgacuacuggaacgacaacuccgagugcuacaaccccugcuucuacgucgagcucauccgcggccgccccgaggaggccaaguacgucugguggaccuccaacucccucaucgcccucugcggcucccccuuccccgucggcuccggcuccuuccccgacggcgcccagauccaguacuucuccuga

SEQ ID NO: 119665 - RNA, 1416 nt, Artificial Sequence
  derived and/or modified CDS sequence (opt2) from neuraminidase__InfluenzaA__AGQ81869
augaaccccaaccagaagcucuucgcccucuccggcgucgccaucgcccucuccguccucaaccuccucaucggcaucuccaacgucggccucaacgucucccuccaccucaaggagaagggccccaagcaggaggagaacuccaccugcaccaccaucaaccagaacaacaccaccaucgucgagaacaccuacgucaacaacaccaccaucaucuccaaggagaccgagcucaagacccccuccuaccuccuccucaacaagucccucugcaacgucgagggcugggucgucaucgccaaggacaacgccguccgcuucggcgaguccgagcagaucaucgucacccgcgagcccuacgucuccugcgaccccaccggcugcaagauguacgcccuccaccagggcaccaccauccgcaacaagcacuccaacggcaccauccacgaccgcaccgccuuccgcggccucaucuccaccccccucggcaccccccccaccgucuccaacuccgacuucaucugcgucggcugguccuccaccaccugccacgacggcaucggccgcaugaccaucugcauccagggcaacaacgacaacgccaccgccaccgucuacuacaaccgccgccucaccaccaccauccgcaccugggcccgcaacauccuccgcacccaggaguccgagugcgucugccacaacggcaccugcgccgucgucaugaccgacggcuccgccuccucccaggccuacaccaaggucauguacuuccacaagggccucgucaucaaggaggaggcccucaagggcuccgcccgccacaucgaggagugcuccugcuacggccacucccagaaggccaccugcgucugccgcgacaacuggcagggcgccaaccgccccaucaucgagaucgacaugaacacccucgagcacaccucccgcuacgucugcaccggcauccucaccgacaccucccgccccggcgacaaguccuccggcgacugcuccaaccccaucaccggcucccccggcgcccccggcgucaagggcuucggcuuccucaacggcgacaacaccuggcucggccgcaccaucuccccccgcucccgcuccggcuucgagaugcucaagauccccaacgccggcaccgaccccaacucccgcaucgccgagcgccaggagaucgucgacaacaacaacugguccggcuacuccggcuccuucaucgacuacuggaacaacgacuccgagugcuacaaccccugcuucuacgucgagcucauccgcggccgccccgaggaggccaaguacgucugguggaccuccaacucccucaucgcccucugcggcucccccuuccccgucggcuccggcuccuuccccgacggcgcccagauccaguacuucuccuga

SEQ ID NO: 119666 - RNA, 1416 nt, Artificial Sequence
  derived and/or modified CDS sequence (opt2) from neuraminidase__InfluenzaA__AGQ81870
augaaccccaaccagaagcucuucgcccucuccggcgucgccaucgcccucuccguccucaaccuccucaucggcaucuccaacgucggccucaacgucucccuccaccucaaggagaagggccccaagcaggaggagaacuccaccugcaccaccaucaaccagaacaacaccaccaucgucgagaacaccuacgucaacaacaccaccaucaucuccaaggagaccgagcucaagccccccuccuaccuccuccucaacaagucccucugcaacgucgagggcugggucgucaucgccaaggacaacgccguccgcuucggcgaguccgagcagaucaucgucacccgcgagcccuacgucuccugcgaccccaccggcugcaagauguacgcccuccaccagggcaccaccauccgcaacaagcacuccaacggcaccauccacgaccgcaccgccuuccgcggccucaucuccaccccccucggcaccccccccaccgucuccaacuccgacuucaucugcgucggcugguccuccaccaccugccacgacggcaucggccgcaugaccaucugcauccagggcaacaacgacaacgccaccgccaccgucuacuacaaccgccgccucaccaccaccauccgcaccugggcccgcaacauccuccgcacccaggaguccgagugcgucugccacaacggcaccugcgccgucgucaugaccgacggcuccgccuccucccaggccuacaccaaggucauguacuuccacaagggccucgucaucaaggaggaggcccucaagggcuccgcccgccacaucgaggagugcuccugcuacggccacucccagaaggccaccugcgucugccgcgacaacuggcagggcgccaaccgccccaucaucgagaucgacaugaacacccucgagcacaccucccgcuacgucugcaccggcauccucaccgacaccucccgccccggcgacaaguccuccggcgacugcuccaaccccaucaccggcucccccggcgcccccggcgucaagggcuucggcuuccucaacggcgacaacaccuggcucggccgcaccaucuccccccgcucccgcuccggcuucgagaugcucaagauccccaacgccggcaccgaccccaacucccgcaucgccgagcgccaggagaucgucgacaacaacaacugguccggcuacuccggcuccuucaucgacuacuggaacaacgacuccgagugcuacaaccccugcuucuacgucgagcucauccgcggccgccccgaggaggccaaguacgucugguggaccuccaacucccucaucgcccucugcggcucccccuuccccgucggcuccggcuccuuccccgacggcgcccagauccaguacuucuccuga

SEQ ID NO: 119667 - RNA, 1416 nt, Artificial Sequence
  derived and/or modified CDS sequence (opt2) from neuraminidase__InfluenzaA__AGQ81871
augaaccccaaccagaagcucuucgcccucuccggcgucgccaucgcccucuccguccucaaccuccucaucggcaucuccaacgucggccucaacgucucccuccaccucaaggagaagggccccaagcaggaggagaacuccaccugcaccaccaucaaccagaacaacaccaccaucgucgagaacaccuacgucaacaacaccaccaucaucuccaaggagaccgagcucaagacccccuccuaccuccuccucaacaagucccucugcaacgucgagggcugggucgucaucgccaaggacaacgccguccgcuucggcgaguccgagcagaucaucgucacccgcgagcccuacgucuccugcgaccccaccggcugcaagauguacgcccuccaccagggcaccaccauccgcaacaagcacuccaacggcaccauccacgaccgcaccgccuuccgcggccucaucuccaccccccucggcaccccccccaccgucuccaacuccgacuucaucugcaucggcugguccuccaccaccugccacgacggcaucggccgcaugaccaucugcauccagggcaacaacgacaacgccaccgccaccgucuacuacaaccgccgccucaccaccaccauccgcaccugggcccgcaacauccuccgcacccaggaguccgagugcgucugccacaacggcaccugcgccgucgucaugaccgacggcuccgccuccucccaggccuacaccaaggucauguacuuccacaagggccucgucaucaaggaggaggcccucaagggcuccgcccgccacaucgaggagugcuccugcuacggccacucccagaaggccaccugcgucugccgcgacaacuggcagggcgccaaccgccccaucaucgagaucgacaugaacacccucgagcacaccucccgcuacgucugcaccggcauccucaccgacaccucccgccccggcgacaaguccuccggcgacugcuccaaccccaucaccggcucccccggcgcccccggcgucaagggcuucggcuuccucaacggcgacaacaccuggcucggccgcaccaucuccccccgcucccgcuccggcuucgagaugcucaagauccccaacgccggcaccgaccccaacucccgcaucgccgagcgccaggagaucgucgacaacaacaacugguccggcuacuccggcuccuucaucgacuacuggaacaacgacuccgagugcuacaaccccugcuucuacgucgagcucauccgcggccgccccgaggaggccaaguacgucugguggaccuccaacucccucaucgcccucugcggcucccccuuccccgucggcuccggcuccuuccccgacggcgcccagauccaguacuucuccuga

SEQ ID NO: 119668 - RNA, 1416 nt, Artificial Sequence
  derived and/or modified CDS sequence (opt2) from neuraminidase__InfluenzaA__AGQ81872
augaaccccaaccagaagcucuucgcccucuccggcgucgccaucgcccucuccguccucaaccuccucaucggcaucuccaacgucggccucaacgucucccuccaccucaaggagaagggccccaagcaggaggagaacuccaccugcaccaccaucaaccagaacaacaccaccaucgucgagaacaccuacgucaacaacaccaccaucaucuccaaggagaccgagcucaagacccccuccuaccuccuccucaacaagucccucugcaacgucgagggcugggucgucaucgccaaggacaacgccguccgcuucggcgaguccgagcagaucaucgucacccgcgagcccuacgucuccugcgaccccaccggcugcaagauguacgcccuccaccagggcaccaccauccgcaacaagcacuccaacggcaccauccacgaccgcaccgccuuccgcggccucaucuccaccccccucggcaccccccccuccgucuccaacuccgacuucaucugcgucggcugguccuccaccaccugccacgacggcaucggccgcaugaccaucugcauccagggcaacaacgacaacgccaccgccaccgucuacuacaaccgccgccucaccaccaccauccgcaccugggcccgcaacauccuccgcacccaggaguccgagugcgucugccacaacggcaccugcgccgucgucaugaccgacggcuccgccuccucccaggccuacaccaaggucauguacuuccacaagggccucgucaucaaggaggaggcccucaagggcuccgcccgccacaucgaggagugcuccugcuacggccacucccagaaggccaccugcgucugccgcgacaacuggcagggcgccaaccgccccaucaucgagaucgacaugaacacccucgagcacaccucccgcuacgucugcaccggcauccucaccgacaccucccgccccggcgacaaguccuccggcgacugcuccaaccccaucaccggcucccccggcgcccccggcgucaagggcuucggcuuccucaacggcgacaacaccuggcucggccgcaccaucuccccccgcucccgcuccggcuucgagaugcucaagauccccaacgccggcaccgaccccaacucccgcaucgccgagcgccaggagaucgucgacaacaacaacugguccggcuacuccggcuccuucaucgacuacuggaacaacgacuccgagugcuacaaccccugcuucuacgucgagcucauccgcggccgccccgaggaggccaaguacgucugguggaccuccaacucccucaucgcccucugcggcucccccuuccccgucggcuccggcuccuuccccgacggcgcccagauccaguacuucuccuga

SEQ ID NO: 119669 - RNA, 1416 nt, Artificial Sequence
  derived and/or modified CDS sequence (opt2) from neuraminidase__InfluenzaA__AGQ81875
augaaccccaaccagaagcucuucgcccucuccggcgucgccaucgcccucuccguccucaaccuccucaucggcaucuccaacgucggccucaacgucucccuccaccucaaggagaagggccccaagcaggaggagaacuccaccugcaugaccaucaaccagaacaacaccaccgucgucgagaacaccuacgucaacaacaccaccaucaucaccaaggagaccgagcucgagacccccuccuaccuccuccucaacaagggccucugcaacgucgagggcugggucgucaucgccaaggacaacgccguccgcuucggcgagaccgagcagaucaucgucacccgcgagcccuacgucuccugcgaccccaacggcugcaagauguacgcccuccaccagggcaccaccauccgcaacaagcacuccaacggcaccauccacgaccgcaccgccuuccgcggccucaucuccaccccccucggcaccccccccaccgucuccaacuccgacuucaucugcgucggcugguccuccaccaccugccacgacggcaucggccgcaugaccaucugcauccagggcaacaacgacaacgccaccgccaccgucuacuacaaccgccgccucaccaccaccaucaagaccugggcccgcaacauccuccgcacccaggaguccgagugcgucugccacaacggcaccugcgccgucgucaugaccgacggcuccgccuccucccaggcccacaccaaggucaucuacuuccacaagggccucaucgucaaggaggaggcccucaagggcuccgcccgccacaucgaggagugcuccugcuacggccacucccagaaggucaccugcgucugccgcgacaacuggcagggcgccaaccgccccaucaucgagaucgacaugaacacccucgagcacaccucccgcuacgucugcaccggcauccucaccgacaccucccgccccggcgacaaguccaccggcgacugcuccaaccccaucaccggcucccccggcgcccccggcgucaagggcuucggcuaccucaacggcgacaacaccuggcucggccgcaccaucuccccccgcucccgcuccggcuucgagaugcucaagauccccaacgccggcaccgaccccaacucccgcaucaccgagcgccaggagaucgucgacaacaacaacugguccggcuacuccggcuccuucgucgacuacuggaacgacaacuccgagugcuacaaccccugcuucuacgucgagcucauccgcggccgccccgaggaggccaaguacgucugguggaccuccaacuccaucaucgcccucugcggcucccccuuccccgucggcuccggcuccuuccccgacggcgcccagauccaguacuucuccuga

SEQ ID NO: 119670 - RNA, 1416 nt, Artificial Sequence
  derived and/or modified CDS sequence (opt2) from neuraminidase__InfluenzaA__AGQ81876
augaaccccaaccagaagcucuucgcccucuccggcgucgccaucgcccucuccguccucaaccuccucaucggcaucuccaacgucggccucaacgucucccuccaccucaaggagaagggccccaagcaggaggagaacuccaccugcaugaccaucaaccagaacaacaccaccgucgucgagaacaccuacgucaacaacaccaccaucaucaccaaggagaccgagcucgagacccccuccuaccuccuccucaacaagggccucugcaacgucgagggcugggucgucaucgccaaggacaacgccguccgcuucggcgagaccgagcagaucaucgucacccgcgagcccuacgucuccugcgaccccaacggcugcaagauguacgcccuccaccagggcaccaccauccgcaacaagcacuccaacggcaccauccacgaccgcaccgccuuccgcggccucaucuccaccccccucggcaccccccccaccgucuccaacuccgacuucaucugcgucggcugguccuccaccaccugccacgacggcaucggccgcaugaccaucugcauccagggcgacaacgacaacgccaccgccaccgucuacuacaaccgccgccucaccaccaccaucaagaccugggcccgcaacauccuccgcacccaggaguccgagugcgucugccacaacggcaccugcgccgucgucaugaccgacggcuccgccuccucccaggcccacaccaaggucaucuacuuccacaagggccucaucgucaaggaggaggcccucaagggcuccgcccgccacaucgaggagugcuccugcuacggccacucccagaaggucaccugcgucugccgcgacaacuggcagggcgccaaccgccccaucaucgagaucgacaugaacacccucgagcacaccucccgcuacgucugcaccggcauccucaccgacaccucccgccccggcgacaaguccaccggcgacugcuccaaccccaucaccggcucccccggcgcccccggcgucaagggcuucggcuaccucaacggcgacaacaccuggcucggccgcaccaucuccccccgcucccgcuccggcuucgagaugcucaagauccccaacgccggcaccgaccccaacucccgcaucaccgagcgccaggagaucgucgacaacaacaacugguccggcuacuccggcuccuucgucgacuacuggaacgacaacuccgagugcuacaaccccugcuucuacgucgagcucauccgcggccgccccgaggaggccaaguacgucugguggaccuccaacuccaucaucgcccucugcggcucccccuuccccgucggcuccggcuccuuccccgacggcgcccagauccaguacuucuccuga

SEQ ID NO: 119671 - RNA, 1416 nt, Artificial Sequence
  derived and/or modified CDS sequence (opt2) from neuraminidase__InfluenzaA__AGQ81877
augaaccccaaccagaagcucuucgcccucuccggcgucgccaucgcccucuccguccucaaccuccucaucggcaucuccaacgucggccucaacgucucccuccaccucaaggagaagggccccaagcaggaggagaacuccaccugcaccaccaucaaccagaacaacaccaccgucgucgagaacaccuacgucaacaacaccaccaucaucaccaaggagaccgagcucaagacccccuccuaccuccuccucaacaagucccucugcaacgucgagggcugggucgucaucgccaaggacaacgccguccgcuucggcgaguccgagcagaucaucgucacccgcgagcccuacgucuccugcgaccccaccggcugcaagauguacgcccuccaccagggcaccaccauccgcaacaagcacuccaacggcaccauccacgaccgcaccgccuuccgcggccucaucuccaccucccucggcaccccccccaccaucuccaacuccgacuucaugugcgucggcugguccuccaccaccugccacgacggcaucggccgcaugaccaucugcauccagggcaacaacgacaacgccaccgccaccgucuacuacaaccgccgccucaccaccaccaucaagaccugggcccgcaacauccuccgcacccaggaguccgagugcgucugccacaacggcaucugcgccgucgucaugaccgacggcuccgccuccucccaggccuacaccaaggucauguacuuccacaagggccucgucgucaaggaggaggcccucaagggcuccgcccgccacaucgaggagugcuccugcuacggccacucccagaaggucaccugcgucugccgcgacaacuggcagggcgccaaccgccccaucaucgagaucgacaugaacacccucgagcacaccucccgcuacgucugcaccggcauccucaccgacaccucccgccccggcgacaaguccuccggcgacugcuccaaccccaucaccggcucccccggcgcccccggcgucaagggcuucggcuuccucaacggcgacaacaccuggcucggccgcaccaucuccccccgcucccgcuccggcuucgagaugcucaagauccccaacgccggcaccgaccccaacucccgcaucgccggccgccaggagaucgucgacaacaacaacugguccggcuacuccggcuccuucaucgacuacuggaacgacaacuccgagugcuacaaccccugcuucuacgucgagcucauccgcggccgccccgaggaggccaaguacgucugguggaccuccaacucccucaucgcccucugcggcucccccuuccccgucggcuccggcuccuuccccgacggcgcccagauccaguacuucuccuga

SEQ ID NO: 119672 - RNA, 1416 nt, Artificial Sequence
  derived and/or modified CDS sequence (opt2) from neuraminidase__InfluenzaA__AGQ81878
augaaccccaaccagaagcucuucgcccucuccggcgucgccaucgcccucuccguccucaaccuccucaucggcaucuccaacgucggccucaacgucucccuccaccucaaggagaagggccccaagcaggaggagaaccucaccugcaccaccaucaaccagaacaacaccaccgucgucgagaacaccuacgucaacaacaccaccaucaucaccaaggagaccgaccucaaggcccccuccuaccuccuccucaacaagucccucugcaacgucgagggcugggucgucaucgccaaggacaacgccguccgcuucggcgaguccgagcagaucaucgucacccgcgagcccuacgucuccugcgaccccaccggcugcaagauguacgcccuccaccagggcaccaccauccgcaacaagcacuccaacggcaccauccacgaccgcaccgccuuccgcggccucaucuccaccccccucggcaccccccccaccgucuccaacuccgacuucaugugcgucggcugguccuccaccaccugccacgacggcaucggccgcaugaccaucugcauccagggcaacaacgacaacgccaccgccaccgucuacuacaaccgccgccucaccaccaccaucaagaccugggcccgcaacauccuccgcacccaggaguccgagugcgucugccacaacggcaccugcgccgucgucaugaccgacggcuccgccuccucccaggccuacaccaaggucauguacuuccacaagggccucgucgucaaggaggaggcccucaagggcuccgcccgccacaucgaggagugcuccugcuacggccacucccagaaggucaccugcgucugccgcgacaacuggcagggcgccaaccgccccaucaucgagaucgacaugaacacccucgagcacaccucccgcuacgucugcaccggcauccucaccgacaccucccgccccggcgacaaguccuccggcgacugcuccaaccccaucaccggcucccccggcgcccccggcgucaagggcuucggcuuccucaacggcgacaacaccuggcucggccgcaccaucuccccccgcucccgcuccggcuucgagaugcucaagauccccaacgccggcaccgaccccaacucccgcaucgccgagcgccaggagaucgucgacaacaacaacugguccggcuacuccggcuccuucaucgacuacuggaacgacaacuccgagugcuacaaccccugcuucuacgucgagcucauccgcggccgccccgaggaggccaaguacgucugguggaccuccaacucccucaucgcccucugcggcucccccuuccccaucggcuccggcuccuuccccgacggcgcccagauccaguacuucuccuga

SEQ ID NO: 119673 - RNA, 1416 nt, Artificial Sequence
  derived and/or modified CDS sequence (opt2) from neuraminidase__InfluenzaA__AGQ81882
augaaccccaaccagaagcucuucgcccucuccggcgucgccaucgcccucuccguccucaaccuccucaucggcaucuccaacgucggccucaacgucucccuccaccucaaggagaagggcgccaagcaggaggagaaccucaccugcaccaccaucaaccagaacaacaccaccgucgucgagaacaccuacgucaacaacaccaccgucaucaccaaggaggccgacuggaagacccccuccuaccuccuccucaacaagucccucugcaacgucgagggcugggucgucaucgccaaggacaacgccauccgcuucggcgaguccgagcagaucaucgucacccgcgagcccuacgucuccugcgaccccaccggcugcaagauguacgcccuccaccagggcaccaccauccgcaacaagcacuccaacggcaccauccacgaccgcaccgccuuccgcggccucaucuccaccccccucggcaccccccccaccgucuccaacuccgacuucaugugcgucggcugguccuccaccaccugccacgacggcaucggccgcaugaccaucugcauccagggcaacaacgacaacgccaccgccaccgucuacuacaacggccgccucaccaccaccaucaagaccugggcccgcaacauccuccgcacccaggaguccgagugcgucugccacaacggcaccugcgccgucgucaugaccgacggcuccgccuccucccaggccuacaccaaggucauguacuuccacaagggccucgucaucaaggaggaggcccucaagggcuccgcccgccacaucgaggagugcuccugcuacggccacucccagaaggucaccugcgucugccgcgacaacuggcagggcgccaaccgccccaucaucgagaucgacaugaacacccucgagcacaccucccgcuacgucugcaccggcauccucaccgacaccucccgccccggcgacaaguccuccggcgacugcuccaaccccaucaccggcucccccggcgcccccggcgucaagggcuucggcuuccucaacggcgacaacaccuggcucggccgcaccaucuccccccgcucccgcuccggcuucgagaugcucaagauccccaacgccggcaucgaccccaacucccgcaucgccgagcgccaggagaucgucgacaacaacaacugguccggcuacuccggcuccuucaucgacuacuggaacgacaacuccgagugcuacaaccccugcuucuacgucgagcucauccgcggccgccccgaggaggccaaguacgucugguggaccuccaacucccucaucgcccucugcggcucccccuuccccgucggcuccggcuccuuccccgacggcgcccagauccaguacuucuccuga

SEQ ID NO: 119674 - RNA, 1416 nt, Artificial Sequence
  derived and/or modified CDS sequence (opt2) from neuraminidase__InfluenzaA__AGQ81883
augaaccccaaccagaagcucuucgcccucuccggcgucgccaucgcccucuccguccucaaccuccucaucggcaucuccaacgucggccucaacgucucccuccaccucaaggagaagggccccaagcaggaggagaaccucaccugcaccaccaucaaccagaacaacaccaccgucgucgagaacaccuacgucaacaacaccaccgucaucaccaaggaggccgacuggaagacccccuccuaccuccuccucaacaagucccucugcaacgucgagggcugggucgucaucgccaaggacaacgccauccgcuucggcgaguccgagcagaucaucgucacccgcgagcccuacgucuccugcgaccccaccggcugcaagauguacgcccuccaccagggcaccaccauccgcaacaagcacuccaacggcaccauccacgaccgcaccgccuuccgcggccucaucuccaccccccucggcaccccccccaccgucuccaacuccgacuucaugugcgucggcugguccuccaccaccugccacgacggcaucggccgcaugaccaucugcauccagggcaacaacgacaacgccaccgccaccgucuacuacaacggccgccucaccaccaccaucaagaccugggcccgcaacauccuccgcacccaggaguccgagugcgucugccacaacggcaccugcgccgucgucaugaccgacggcuccgccuccucccaggccuacaccaaggucauguacuuccacaagggccucgucaucaaggaggaggcccucaagggcuccgcccgccacaucgaggagugcuccugcuacggccacucccagaaggucaccugcgucugccgcgacaacuggcagggcgccaaccgccccaucaucgagaucgacaugaacacccucgagcacaccucccgcuacgucugcaccggcauccucaccgacaccucccgccccggcgacaaguccuccggcgacugcuccaaccccaucaccggcucccccggcgcccccggcgucaagggcuucggcuuccucaacggcgacaacaccuggcucggccgcaccaucuccccccgcucccgcuccggcuucgagaugcucaagauccccaacgccggcaucgaccccaacucccgcaucgccgagcgccaggagaucgucgacaacaacaacugguccggcuacuccggcuccuucaucgacuacuggaacgacaacuccgagugcuacaaccccugcuucuacgucgagcucauccgcggccgccccgaggaggccaaguacgucugguggaccuccaacucccucaucgcccucugcggcucccccuuccccgucggcuccggcuccuuccccgacggcgcccagauccaguacuucuccuga

SEQ ID NO: 119675 - RNA, 1416 nt, Artificial Sequence; identical to SEQ ID NO: 119674
  derived and/or modified CDS sequence (opt2) from neuraminidase__InfluenzaA__AGQ81884

SEQ ID NO: 119676 - RNA, 1416 nt, Artificial Sequence; identical to SEQ ID NO: 119674
  derived and/or modified CDS sequence (opt2) from neuraminidase__InfluenzaA__AGQ81885

SEQ ID NO: 119677 - RNA, 1416 nt, Artificial Sequence; identical to SEQ ID NO: 119674
  derived and/or modified CDS sequence (opt2) from neuraminidase__InfluenzaA__AGQ81886

SEQ ID NO: 119678 - RNA, 1356 nt, Artificial Sequence
  derived and/or modified CDS sequence (opt2) from neuraminidase__InfluenzaA__AGQ81888
augaaccccaaccagaagcucuucgcccucuccggcgucgccaucgcccucuccguccucaaccuccucaucggccucuccaacgucggccucaacgucucccuccaccucaaggaggccggccccaagcaggaggagaaccucaccugcaugaccaccaaggagaccgagcucggcacccccuccuaccuccuccucaacaagucccucugcaacgucgagggcugggucgucaucgccaaggacaacgccguccgcuucggcgaguccgagcagaucaucaucacccgcgagcccuacgucuccugcgaccccaacggcugcaagauguacgcccuccaccagggcaccaccauccgcaacaagcacuccaacggcaccauccacgaccgcaccgccuuccgcggccucaucuccaccccccucggcaccccccccaccgucuccaacuccgacuucaucugcgucggcugguccuccaccaccugccacgacggcaucggccgcaugaccaucugcauccagggcaacaacgacaacgccaccgccaccgucuacuacaaccgccgccucaccaccaccaucaagaccugggcccgcaacauccuccgcacccaggaguccgagugcgucugccacaacggcaccugcgccgucgucaugaccgacggcuccgccuccucccaggcccacaccaaggucauguacuuccacaagggccucgucgucaaggaggaggcccucaagggcuccgccaagcacaucgaggagugcuccugcuacggccacaaccagaaggucaccugcgucugccgcgacaacuggcagggcgccaaccgccccaucaucgagaucgacaugaacacccucgagcacaccucccgcuacgucugcaccggcauccucaccgacaccucccgccccggcgacaagcccaccggcgacugcuccaaccccaucaccggcucccccggcgcccccggcgucaagggcuucggcuuccucaacggcgacaacaccuggcucggccgcaccaucuccccccgcucccgcuccggcuucgagaugcucaagauccccaacgccggcaucgaccccaacucccgcaucgccgagcgccaggagaucgucgacaacuccaacugguccggcuacuccggcuccuucaucgacuacuggaacgacaacuccgagugcuacaaccccugcuucuacgucgagcucauccgcggccgccccgaggaggccaaguacgucugguggaccuccaacucccucaucgcccucugcggcucccccuuccccgucggcuccggcuccuuccccgacggcgcccagauccaguacuucuccuga

SEQ ID NO: 119679 - RNA, 1356 nt, Artificial Sequence
  derived and/or modified CDS sequence (opt2) from neuraminidase__InfluenzaA__AGQ81889
augaaccccaaccagaagcucuucgcccucuccggcgucgccaucgcccucuccguccucaaccuccucaucggccucuccaacgucggccucaacgucucccuccaccucaaggagaccggccccaagcaggaggagaaccucaccugcaugaccaccaaggagaccgagcucggcacccccuccuaccuccuccucaacaagucccucugcaacgucgagggcugggucgucaucgccaaggacaacgccguccgcuucggcgaguccgagcagaucaucaucacccgcgagcccuacgucuccugcgaccccaacggcugcaagauguacgcccuccaccagggcaccaccauccgcaacaagcacuccaacggcaccauccacgaccgcaccgccuuccgcggccucaucuccaccccccucggcaccccccccaccgucuccaacuccgacuucaucugcgucggcugguccuccaccaccugccacgacggcaucggccgcaugaccaucugcauccagggcaacaacgacaacgccaccgccaccgucuacuacaaccgccgccucaccaccaccaucaagaccugggcccgcaacauccuccgcacccaggaguccgagugcgucugccacaacggcaccugcgccgucgucaugaccgacggcuccgccuccucccaggcccacaccaaggucauguacuuccacaagggccucgucgucaaggaggaggcccucaagggcuccgccaagcacaucgaggagugcuccugcuacggccacaaccagaaggucaccugcgucugccgcgacaacuggcagggcgccaaccgccccaucaucgagaucgacaugaacacccucgagcacaccucccgcuacgucugcaccggcauccucaccgacaccucccgccccggcgacaagcccaccggcgacugcuccaaccccaucaccggcucccccggcgcccccggcgucaagggcuucggcuuccucaacggcgacaacaccuggcucggccgcaccaucuccccccgcucccgcuccggcuucgagaugcucaagauccccaacgccggcaucgaccccaacucccgcaucgccgagcgccaggagaucgucgacaacuccaacugguccggcuacuccggcuccuucaucgacuacuggaacgacaacuccgagugcuacaaccccugcuucuacgucgagcucauccgcggccgccccgaggaggccaaguacgucugguggaccuccaacucccucaucgcccucugcggcucccccuuccccgucggcuccggcuccuuccccgacggcgcccagauccaguacuucuccuga

SEQ ID NO: 119680 - RNA, 1356 nt, Artificial Sequence; identical to SEQ ID NO: 119679
  derived and/or modified CDS sequence (opt2) from neuraminidase__InfluenzaA__AGQ81890

SEQ ID NO: 119681 - RNA, 1356 nt, Artificial Sequence; identical to SEQ ID NO: 119679
  derived and/or modified CDS sequence (opt2) from neuraminidase__InfluenzaA__AGQ81891

SEQ ID NO: 119682 - RNA, 1356 nt, Artificial Sequence
  derived and/or modified CDS sequence (opt2) from neuraminidase__InfluenzaA__AGQ81893
augaaccccaaccagaagcucuucgcccucuccggcgucgccaucgcccucuccguccucaaccuccucaucggccucuccaacgucggccucaacgucucccuccaccucaaggagaccggccccaagcaggaggagaaccucaccugcaugaccaccaaggagaccgagcucggcacccccuccuaccuccuccucaacaagucccucugcaacgucgagggcugggucgucaucgccaaggacaacgccguccgcuucggcgaguccgagcagaucaucaucacccgcgagcccuacgucuccugcgaccccaacggcugcaagauguacgcccuccaccagggcaccaccauccgcaacaagcacuccaacggcaccauccacgaccgcaccgccuuccgcggccucaucuccaccccccucggcaccccccccaccgucuccaacuccgacuucaucugcgucggcugguccuccaccaccugccacgacggcaucggccgcaugaccaucugcauccagggcaacaacgacaacgccaccgccaccgucuacuacaaccgccgccucaccaccaccaucaagaccugggcccgcaacauccuccgcacccaggaguccgagugcgucugccacaacggcaccugcgccgucgucaugaccgacggcuccgccuccucccaggcccacaccaaggucauguacuuccacaagggccucgucgucaaggaggaggcccucaagggcuccgccaagcacaucgaggagugcuccugcuacggccacaaccagaaggucaccugcgucugccgcgacaacuggcagggcgccaaccgccccaucaucgagaucgacaugaacacccucgagcacaccucccgcuacgucugcaccggcauccucaccgacaccucccgccccggcgacaagcccaccggcgacugcuccaaccccaucaccggcucccccggcgcccccggcgucaagggcuucggcuuccucaacggcgacaacaccuggcucggccgcaccaucuccccccgcucccgcuccggcuucgagaugcucaagauccccaacgccggcaucgaccccaacucccgcaucgccgagcgccaggagaucgucgacaacuccaacugguccggcuacuccggcuccuucaucgacuacuggaacgacaacuccgagugcuacaaccccugcuucuacgucgagcucauccgcggccgccccgaggaggccgaguacgucugguggaccuccaacucccucaucgcccucugcggcucccccuuccccgucggcuccggcuccuuccccgacggcgcccagauccaguacuucuccuga

SEQ ID NO: 119683 - RNA, 1356 nt, Artificial Sequence; identical to SEQ ID NO: 119679
  derived and/or modified CDS sequence (opt2) from neuraminidase__InfluenzaA__AGQ81894

SEQ ID NO: 119684 - RNA, 1356 nt, Artificial Sequence; identical to SEQ ID NO: 119679
  derived and/or modified CDS sequence (opt2) from neuraminidase__InfluenzaA__AGQ81895

SEQ ID NO: 119685 - RNA, 1356 nt, Artificial Sequence; identical to SEQ ID NO: 119679
  derived and/or modified CDS sequence (opt2) from neuraminidase__InfluenzaA__AGQ81896

SEQ ID NO: 119686 - RNA, 1356 nt, Artificial Sequence; identical to SEQ ID NO: 119679
  derived and/or modified CDS sequence (opt2) from neuraminidase__InfluenzaA__AGQ81897

SEQ ID NO: 119687 - RNA, 1356 nt, Artificial Sequence; identical to SEQ ID NO: 119679
  derived and/or modified CDS sequence (opt2) from neuraminidase__InfluenzaA__AGQ81898

SEQ ID NO: 119688 - RNA, 1356 nt, Artificial Sequence; identical to SEQ ID NO: 119679
  derived and/or modified CDS sequence (opt2) from neuraminidase__InfluenzaA__AGQ81899

SEQ ID NO: 119689 - RNA, 1356 nt, Artificial Sequence; identical to SEQ ID NO: 119679
  derived and/or modified CDS sequence (opt2) from neuraminidase__InfluenzaA__AGQ81900

SEQ ID NO: 119690 - RNA, 1356 nt, Artificial Sequence; identical to SEQ ID NO: 119679
  derived and/or modified CDS sequence (opt2) from neuraminidase__InfluenzaA__AGQ81901

SEQ ID NO: 119691 - RNA, 1356 nt, Artificial Sequence; identical to SEQ ID NO: 119679
  derived and/or modified CDS sequence (opt2) from neuraminidase__InfluenzaA__AGQ81902

SEQ ID NO: 119692 - RNA, 1356 nt, Artificial Sequence; identical to SEQ ID NO: 119679
  derived and/or modified CDS sequence (opt2) from neuraminidase__InfluenzaA__AGQ81903

SEQ ID NO: 119693 - RNA, 1356 nt, Artificial Sequence
  derived and/or modified CDS sequence (opt2) from neuraminidase__InfluenzaA__AGQ81904
augaaccccaaccagaagcucuucgcccucuccggcgucgccaucgcccucuccguccucaaccuccucaucggccucuccaacgucggccucaacgucucccuccaccucaaggagaccggccccaagcaggaggagaaccucaccugcaugaccaccaaggagaccgagcucggcacccccuccuaccuccuccucaacaagucccucugcaacgucgagggcugggucgucaucgccaaggacaacgccguccgcuucggcgaguccgagcagaucaucaucacccgcgagcccuacgucuccugcgaccccaacggcugcaagauguacgcccuccaccagggcaccaccauccgcaacaagcacuccaacggcaccauccacgaccgcaccgccuuccgcggccucaucuccaccccccucggcaccccccccaccgucuccaacuccgacuucaucugcgucggcugguccuccaccaccugccacgacggcaucggccgcaugaccaucugcauccagggcaacaacgacaacgccaccgccaccgucuacuacaaccgccgccucaccaccaccaucaagaccugggcccgcaacauccuccgcacccaggaguccgagugcgucugccacaacggcaccugcgccgucgucaugaccgacggcuccgccuccucccaggcccacaccaaggucauguacuuccacaagggccucgucgucaaggaggaggcccucaagggcuccgccaagcacaucgaggagugcuccugcuacggccacaaccagaaggucaccugcgucugccgcgacaacuggcagggcgccaaccgccccaucaucgagaucgacaugaacacccucgagcacaccucccgcuacgucugcaccggcauccucaccgacaccucccgccccggcgacaagcccaccggcgacugcuccaaccccaucaccggcucccccggcgcccccggcgucaagggcuucggcuuccucaacggcgacaacaccuggcucggccgcaccaucuccccccgcucccgcuccggcuucgagaugcucaagauccccaacgccggcaucgaccccaacucccgcaucaccgagcgccaggagaucgucgacaacuccaacugguccggcuacuccggcuccuucaucgacuacuggaacgacaacuccgagugcuacaaccccugcuucuacgucgagcucauccgcggccgccccgaggaggccaaguacgucugguggaccuccaacucccucaucgcccucugcggcucccccuuccccgucggcuccggcuccuuccccgacggcgcccagauccaguacuucuccuga

SEQ ID NO: 119694 - RNA, 1356 nt, Artificial Sequence; identical to SEQ ID NO: 119679
  derived and/or modified CDS sequence (opt2) from neuraminidase__InfluenzaA__AGQ81905

SEQ ID NO: 119695 - RNA, 1356 nt, Artificial Sequence
  derived and/or modified CDS sequence (opt2) from neuraminidase__InfluenzaA__AGQ81906
augaaccccaaccagaagcucuucgcccucuccggcgucgccaucgcccucuccguccucaaccuccucaucggccucuccaacgucggccucaacgucucccuccaccucaaggagaccggccccaagcaggaggagaaccucaccugcaugaccaccaaggagaccgagcucggcacccccuccuaccuccuccucaacaagucccucugcaacgucgagggcugggucgucaucgccaaggacaacgccguccgcuucggcgaguccgagcagaucaucaucacccgcgagcccuacgucuccugcgaccccaacggcugcaagauguacgcccuccaccagggcaccaccauccgcaacaagcacuccaacggcaccauccacgaccgcaccgccuuccgcggccucaucuccaccccccucggcaccccccccaccgucuccaacuccgacuucaucugcgucggcugguccuccaccaccugccacgacggcaucggccgcaugaccaucugcauccagggcaacaacgacaacgccaccgccaccgucuacuacaaccgccgccucaccaccaccaucaagaccugggcccgcaacauccuccgcacccaggaguccgagugcgucugccacaacggcaccugcgccgucgucaugaccgacggcuccgccuccucccaggcccacaccaaggucauguacuuccacaagggccucgucgucaaggaggaggcccucaagggcuccgcccgccacaucgaggagugcuccugcuacggccacaaccagaaggucaccugcgucugccgcgacaacuggcagggcgccaaccgccccaucaucgagaucgacaugaacacccucgagcacaccucccgcuacgucugcaccggcauccucaccgacaccucccgccccggcgacaagcccaccggcgacugcuccaaccccaucaccggcucccccggcgcccccggcgucaagggcuucggcuuccucaacggcgacaacaccuggcucggccgcaccaucuccccccgcucccgcuccggcuucgagaugcucaagauccccaacgccggcaucgaccccaacucccgcaucgccgagcgccaggagaucgucgacaacuccaacugguccggcuacuccggcuccuucaucgacuacuggaacgacaacuccgagugcuacaaccccugcuucuacgucgagcucauccgcggccgccccgaggaggccaaguacgucugguggaccuccaacucccucaucgcccucugcggcucccccuuccccgucggcuccggcuccuuccccgacggcgcccagauccaguacuucuccuga

SEQ ID NO: 119696 - RNA, 1356 nt, Artificial Sequence; identical to SEQ ID NO: 119679
  derived and/or modified CDS sequence (opt2) from neuraminidase__InfluenzaA__AGQ81907

SEQ ID NO: 119697 - RNA, 1356 nt, Artificial Sequence
  derived and/or modified CDS sequence (opt2) from neuraminidase__InfluenzaA__AGQ81908
augaaccccaaccagaagcucuucgcccucuccggcgucgccaucgcccucuccguccucaaccuccucaucggccucuccaacgucggccucaacgucucccuccaccucaaggagaccggccccaagcaggaggagaaccucaccugcaugaccaccaaggagaccgagcucggcacccccuccuaccuccuccucaacaagucccucugcaacgucgagggcugggucgucaucgccaaggacaacgccguccgcuucggcgaguccgagcagaucaucaucacccgcgagcccuacgucuccugcgaccccaacggcugcaagauguacgcccuccaccagggcaccaccauccgcaacaagcacuccaacggcaccauccacgaccgcaccgccuuccgcggccucaucuccaccccccucggcaccccccccaccgucuccaacuccgacuucaucugcgucggcugguccuccaccaccugccacgacggcaucggccgcaugaccaucugcauccagggcaacaacgacaacgccaccgccaccgucuacuacaaccgccgccucaccaccaccaucaagaccugggcccgcaacauccuccgcacccaggaguccgagugcgucugccacaacggcaccugcgccgucgucaugaccgacggcuccgccuccaaccaggcccacaccaaggucauguacuuccacaagggccucgucgucaaggaggaggcccucaagggcuccgccaagcacaucgaggagugcuccugcuacggccacaaccagaaggucaccugcgucugccgcgacaacuggcagggcgccaaccgccccaucaucgagaucgacaugaacacccucgagcacaccucccgcuacgucugcaccggcauccucaccgacaccucccgccccggcgacaagcccaccggcgacugcuccaaccccaucaccggcucccccggcgcccccggcgucaagggcuucggcuuccucaacggcgacaacaccuggcucggccgcaccaucuccccccgcucccgcuccggcuucgagaugcucaagauccccaacgccggcaucgaccccaacucccgcaucaccgagcgccaggagaucgucgacaacuccaacugguccggcuacuccggcuccuucaucgacuacuggaacgacaacuccgagugcuacaaccccugcuucuacgucgagcucauccgcggccgccccgaggaggccaaguacgucugguggaccuccaacucccucaucgcccucugcggcucccccuuccccgucggcuccggcuccuuccccgacggcgcccagauccaguacuucuccuga

SEQ ID NO: 119698 - RNA, 1356 nt, Artificial Sequence; identical to SEQ ID NO: 119679
  derived and/or modified CDS sequence (opt2) from neuraminidase__InfluenzaA__AGQ81909

SEQ ID NO: 119699 - RNA, 1356 nt, Artificial Sequence
  derived and/or modified CDS sequence (opt2) from neuraminidase__InfluenzaA__AGQ81910
augaaccccaaccagaagcucuucgcccucuccggcgucgccaucgcccucuccguccucaaccuccucaucggccucuccaacgucggccucaacgucucccuccaccucaaggagaccggccccaagcaggaggagaaccucaccugcaugaccaccaaggagaccgagcucggcacccccuccuaccuccuccucaacaagucccucugcaacgucgagggcugggucgucaucgccaaggacaacgccguccgcuucggcgaguccgagcagaucaucaucacccgcgagcccuacgucuccugcgaccccaacggcugcaagauguacgcccuccaccagggcaccaccauccgcaacaagcacuccaacggcaccauccacgaccgcaccgccuuccgcggccucaucuccaccccccucggcaccccccccaccgucuccaacuccgacuucaucugcgucggcugguccuccaccaccugccacgacggcaucggccgcaugaccaucugcauccagggcaacaacgacaacgccaccgccaccgucuacuacaaccgccgccucaccaccaccaucaagaccugggcccgcaacauccuccgcacccaggaguccgagugcgucugccacaacggcaccugcgccgucgucaugaccgacggcuccgccuccggccaggcccacaccaaggucauguacuuccacaagggccucgucgucaaggaggaggcccucaagggcuccgccaagcacaucgaggagugcuccugcuacggccacaaccagaaggucaccugcgucugccgcgacaacuggcagggcgccaaccgccccaucaucgagaucgacaugaacacccucgagcacaccuccuccuacgucugcaccggcauccucaccgacaccucccgccccggcgacaagcccaccggcgacugcuccaaccccaucaccggcucccccggcgcccccggcgucaagggcuucggcuuccucaacggcgacaacaccuggcucggccgcaccaucuccccccgcucccgcuccggcuucgagaugcucaagauccccaacgccggcaucgaccccaacucccgcaucgccgagcgccaggagaucgucgacaacuccaacugguccggcuacuccggcuccuucaucgacuacuggaacgacaacuccgagugcuacaaccccugcuucuacgucgagcucauccgcggccgccccgaggaggccaaguacgucugguggaccuccaacucccucaucgcccucugcggcucccccuuccccgucggcuccggcuccuuccccgacggcgcccagauccaguacuucuccuga

SEQ ID NO: 119700 - RNA, 1356 nt, Artificial Sequence
  derived and/or modified CDS sequence (opt2) from neuraminidase__InfluenzaA__AGQ81911
augaaccccaaccagaagcucuucgcccucuccggcgucgccaucgcccucuccguccucaaccuccucaucggccucuccaacgucggccucaacgucucccuccaccucaaggagaccggccccaagcaggaggagaaccucaccugcaugaccaccaaggagaccgagcucggcacccccuccuaccuccuccucaacaagucccucugcaacgucgagggcugggucgucaucgccaaggacaacgccguccgcuucggcgaguccgagcagaucaucaucacccgcgagcccuacgucuccugcgaccccaacggcugcaagauguacgcccuccaccagggcaccaccauccgcaacaagcacuccaacggcaccauccacgaccgcaccgccuuccgcggccucaucuccaccccccucggcaccccccccaccgucuccaacuccgacuucaucugcgucggcugguccuccaccaccugccacgacggcaucggccgcaugaccaucugcauccagggcaacaacgacaacgccaccgccaccgucuacuacaaccgccgccucaccaccaccaucaagaccugggcccgcaacauccuccgcacccaggaguccgagugcgucugccacaacggcaccugcgccgucgucaugaccgacggcuccgccuccggccaggcccacaccaaggucauguacuuccacaagggccucgucgucaaggaggaggcccucaagggcuccgccaagcacaucgaggagugcuccugcuacggccacaaccagaacgucaccugcgucugccgcgacaacuggcagggcgccaaccgccccaucaucgagaucgacaugaacacccucgagcacaccucccgcuacgucugcaccggcauccucaccgacaccucccgccccggcgacaagcccaccggcgacugcuccaaccccaucaccggcucccccggcgcccccggcgucaagggcuucggcuuccucaacggcgacaacaccuggcucggccgcaccaucuccccccgcucccgcuccggcuucgagaugcucaagauccccaacgccggcaucgaccccaacucccgcaucgccgagcgccaggagaucgucgacaacuccaacugguccggcuacuccggcuccuucaucgacuacuggaacgacaacuccgagugcuacaaccccugcuucuacgucgagcucauccgcggccgccccgaggaggccaaguacgucugguggaccuccaacucccucaucgcccucugcggcucccccuuccccgucggcuccggcuccuuccccgacggcgcccagauccaguacuucuccuga

SEQ ID NO: 119701 - RNA, 1356 nt, Artificial Sequence; identical to SEQ ID NO: 119679
  derived and/or modified CDS sequence (opt2) from neuraminidase__InfluenzaA__AGQ81912

SEQ ID NO: 119702 - RNA, 1356 nt, Artificial Sequence
  derived and/or modified CDS sequence (opt2) from neuraminidase__InfluenzaA__AGQ81913
augaaccccaaccagaagcucuucgcccucuccggcgucgccaucacccucuccguccucaaccuccucaucggccucuccaacgucggccucaacgucucccuccaccucaaggagaccggccccaagcaggaggagaaccucaccugcaugaccaccaaggagaccgagcucggcacccccuccuaccuccuccucaacaagucccucugcaacgucgagggcugggucgucaucgccaaggacaacgccguccgcuucggcgaguccgagcagaucaucaucacccgcgagcccuacgucuccugcgaccccaacggcugcaagauguacgcccuccaccagggcaccaccauccgcaacaagcacuccaacggcaccauccacgaccgcaccgccuuccgcggccucaucuccaccccccucggcaccccccccaccgucuccaacuccgacuucaucugcgucggcugguccuccaccaccugccacgacggcaucggccgcaugaccaucugcauccagggcaacaacgacaacgccaccgccaccgucuacuacaaccgccgccucaccaccaccaucaagaccugggcccgcaacauccuccgcacccaggaguccgagugcgucugccacaacggcaccugcgccgucgucaugaccgacggcuccgccuccggccaggcccacaccaaggucauguacuuccacaagggccucgucgucaaggaggaggcccucaagggcuccgccaagcacaucgaggagugcuccugcuacggccacaaccagaaggucaccugcgucugccgcgacaacuggcagggcgccaaccgccccaucaucgagaucgacaugaacacccucgagcacaccucccgcuacgucugcaccggcauccucaccgacaccucccgccccggcgacaagcccaccggcgacugcuccaaccccaucaccggcucccccggcgcccccggcgucaagggcuucggcuuccucaacggcgacaacaccuggcucggccgcaccaucuccccccgcucccgcuccggcuucgagaugcucaagauccccaacgccggcaucgaccccaacucccgcaucgccgagcgccaggagaucgucgacaacuccaacugguccggcuacuccggcuccuucaucgacuacuggaacgacaacuccgagugcuacaaccccugcuucuacgucgagcucauccgcggccgccccgaggaggccaaguacgucugguggaccuccaacucccucaucgcccucugcggcucccccuuccccgucggcuccggcuccuuccccgacggcgcccagauccaguacuucuccuga

SEQ ID NO: 119703 - RNA, 1356 nt, Artificial Sequence; identical to SEQ ID NO: 119679
  derived and/or modified CDS sequence (opt2) from neuraminidase__InfluenzaA__AGQ81914

SEQ ID NO: 119704 - RNA, 1356 nt, Artificial Sequence; identical to SEQ ID NO: 119679
  derived and/or modified CDS sequence (opt2) from neuraminidase__InfluenzaA__AGQ81915

SEQ ID NO: 119705 - RNA, 1416 nt, Artificial Sequence
  derived and/or modified CDS sequence (opt2) from neuraminidase__InfluenzaA__AGQ81917
augaaccccaaccagaagcucuucgcccucuccggcgucgccaucgcccucuccguccucaaccuccucaucggccucuccaacgucggccucaacgucucccuccaccucaaggagaccggccccaagcaggaggagaaccucaccugcaugaccaucaaccagaacaacaccaccgucgucgagaacaccuacgucaacaacaccaccaucaucaccaaggagaccgagcucgagacccccaacuaccuccuccucaacaagucccucugcaacgucgagggcugggucgucgucgccaaggacaacgccguccgcuucggcgaguccgagcagaucaucgucacccgcgagcccuacgucuccugcgaccccaacggcugcaagauguacgcccuccaccagggcaccaccauccgcaacaagcacuccaacggcaccauccacgaccgcaccgccuuccgcggccucaucuccaccccccucggcaccccccccaccgucuccaacuccgacuucaucugcgucggcugguccuccaccaccugccacgacggcaucggccgcaugaccaucugcauccagggcaacaacgacaacgccaccgccaccgucuacuacaaccgccgccucaccaccaccaucaagaccugggcccgcaacauccuccgcacccaggaguccgagugcgucugccacaacggcaccugcgccgucgucaugaccgacggcuccgccuccucccaggcccacaccaaggucauguacuuccacaagggccucgucaucaaggaggaggcccucaagggcuccgccaagcacaucgaggagugcuccugcuacggccacaaccagaaggucaccugcgucugccgcgacaacuggcagggcgccaaccgccccaucaucgagaucgacaugaacacccucgagcacaccucccgcuacgucugcaccggcauccucaccgacaccucccgccccggcgacaagcccaccggcgacugcuccaaccccaucaccggcucccccggcgcccccggcgucaagggcuucggcuuccucaacggcgacaacaccuggcucggccgcaccaucuccccccgcucccgcuccggcuucgagaugcucaagauccccaacgccggcaucgaccccaacucccgcaucgccgagcgccaggagaucgucgacaacuccaacugguccggcuacuccggcuccuucaucgacuacuggaacgacaacuccgagugcuacaaccccugcuucuacgucgagcucauccgcggccgccccgaggaggccaaguacgucugguggaccuccaacucccucaucgcccucugcggcucccccuuccccgucggcuccggcuccuuccccgacggcgcccagauccaguacuucuccuga

SEQ ID NO: 119706 - RNA, 1356 nt, Artificial Sequence
  derived and/or modified CDS sequence (opt2) from neuraminidase__InfluenzaA__AGQ81918
augaaccccaaccagaagcucuucgcccucuccggcgucgccaucgcccucuccguccucaaccuccucaucggccucuccaacgucggccucaacgucucccuccaccucaaggagaccggccccaagcaggaggagaaccucaccugcaugaccaccaaggagaccgagcucggcacccccuccuaccuccuccucaacaagggccucugcaacgucgagggcugggucgucaucgccaaggacaacgccguccgcuucggcgaguccgagcagaucaucaucacccgcgagcccuacgucuccugcgaccccaacggcugcaagauguacgcccuccaccagggcaccaccauccgcaacaagcacuccaacggcaccauccacgaccgcaccgccuuccgcggccucaucuccaccccccucggcaccccccccaccgucuccaacuccgacuucaucugcgucggcugguccuccaccaccugccacgacggcaucggccgcaugaccaucugcauccagggcaacaacgacaacgccaccgccaccgucuacuacaaccgccgccucaccaccaccaucaagaccugggcccgcaacauccuccgcacccaggaguccgagugcgucugccacaacggcaccugcgccgucgucaugaccgacggcuccgccuccucccaggcccacaccaaggucauguacuuccacaagggccucgucgucaaggaggaggcccucaagggcuccgccaagcacaucgaggagugcuccugcuacggccacaaccagaaggucaccugcgucugccgcgacaacuggcagggcgccaaccgccccaucaucgagaucgacaugaacacccucgagcacaccucccgcuacgucugcaccggcauccucaccgacaccucccgccccggcgacaagcccaccggcgacugcuccaaccccaucaccggcucccccggcgcccccggcgucaagggcuucggcuuccucaacggcgacaacaccuggcucggccgcaccaucuccccccgcucccgcuccggcuucgagaugcucaagauccccaacgccggcaucgaccccaacucccgcaucgccgagcgccaggagaucgucgacaacuccaacugguccggcuacuccggcuccuucaucgacuacuggaacgacaacuccgagugcuacaaccccugcuucuacgucgagcucauccgcggccgccccgaggaggccaaguacgucugguggaccuccaacucccucaucgcccucugcggcucccccuuccccgucggcuccggcuccuuccccgacggcgcccagauccaguacuucuccuga

SEQ ID NO: 119707 - RNA, 1356 nt, Artificial Sequence; identical to SEQ ID NO: 119679
  derived and/or modified CDS sequence (opt2) from neuraminidase__InfluenzaA__AGQ81919

SEQ ID NO: 119708 - RNA, 1356 nt, Artificial Sequence; identical to SEQ ID NO: 119679
  derived and/or modified CDS sequence (opt2) from neuraminidase__InfluenzaA__AGQ81920

SEQ ID NO: 119709 - RNA, 1356 nt, Artificial Sequence
  derived and/or modified CDS sequence (opt2) from neuraminidase__InfluenzaA__AGQ81921
augaaccccaaccagaagcucuucgcccucuccggcgucgccaucgcccucuccguccucaaccuccucaucggccucuccaacgucggccucaacgucucccuccaccucaaggagaccggccccaagcaggaggagaaccucaccugcaugaccaccaaggagaccgagcucggcacccccuccuaccuccuccucaacaagucccucugcaacgucgagggcugggucgucaucgccaaggacaacgccguccgcuucggcgaguccgagcagaucaucaucacccgcgagcccuacgucuccugcgaccccaacggcugcaagauguacgcccuccaccagggcaccaccauccgcaacaagcacuccaacggcaccauccacgaccgcaccgccuuccgcggccucaucuccaccccccucggcaccccccccaccgucuccaacuccgacuucaucugcgucggcugguccuccaccaccugccacgacggcaucggccgcaugaccaucugcauccagggcaacaacgacaacgccaccgccaccgucuacuacaaccgccgccucaccaccaccaucaagaccugggcccgcaacauccuccgcacccaggaguccgagugcgucugccacaacggcaccugcgccgucgucaugaccgacggcuccgccuccggccaggcccacaccaaggucauguacuuccacaagggccucgucgucaaggaggaggcccucaagggcuccgccaagcacaucgaggagugcuccugcuacggccacaaccagaaggucaccugcgucugccgcgacaacuggcagggcgccaaccgccccaucaucgagaucgacaugaacacccucgagcacaccucccgcuacgucugcaccggcauccucaccgacaccucccgccccggcgacaagcccaccggcgacugcuccaaccccaucaccggcucccccggcgcccccggcgucaagggcuucggcuuccucaacggcgacaacaccuggcucggccgcaccaucuccccccgcucccgcuccggcuucgagaugcucaagauccccaacgccggcaucgaccccaacucccgcaucgccgagcgccaggagaucgucgacaacuccaacugguccggcuacuccggcuccuucaucgacuacuggaacgacaacuccgagugcuacaaccccugcuucuacgucgagcucauccgcggccgccccgaggaggccaaguacgucugguggaccuccaacucccucaucgcccucugcggcucccccuuccccgucggcuccggcuccuuccccgacggcgcccagauccaguacuucuccuga

SEQ ID NO: 119710 - RNA, 1356 nt, Artificial Sequence; identical to SEQ ID NO: 119679
  derived and/or modified CDS sequence (opt2) from neuraminidase__InfluenzaA__AGQ81922

SEQ ID NO: 119711 - RNA, 1356 nt, Artificial Sequence; identical to SEQ ID NO: 119709
  derived and/or modified CDS sequence (opt2) from neuraminidase__InfluenzaA__AGQ81923

SEQ ID NO: 119712 - RNA, 1356 nt, Artificial Sequence
  derived and/or modified CDS sequence (opt2) from neuraminidase__InfluenzaA__AGQ81924
augaaccccaaccagaagcucuucgcccucuccggcgucgccaucgcccucuccguccucaaccuccucaucggccucuccaacgucggccucaacgucucccuccaccucaaggagaccggccccaagcaggaggagaaccucaccugcaugaccaccaaggagaccgagcucggcacccccuccuaccuccuccucaacaagucccucugcaacgucgagggcugggucgucaucgccaaggacaacgccguccgcuucggcgaguccgagcagaucaucaucacccgcgagcccuacgucuccugcgaccccaacggcugcaagauguacgcccuccaccagggcaccaccauccgcaacaagcacuccaacggcaccauccacgaccgcaccgccuuccgcggccucaucuccaccccccucggcaccccccccaccgucuccaacuccgacuucaucugcgucggcugguccuccaccaccugccacgacggcaucggccgcaugaccaucugcauccagggcaacaacgacaacgccaccgccaccgucuacuacaaccgccgccucaccaccaccaucaagaccugggcccgcaacauccuccgcacccaggaguccgagugcgucugccacaacggcaccugcgccgucgucaugaccgacggcuccgccaacucccaggcccacaccaaggucauguacuuccacaagggccucgucgucaaggaggaggcccucaagggcuccgccaagcacaucgaggagugcuccugcuacggccacaaccagaaggucaccugcgucugccgcgacaacuggcagggcgccaaccgccccaucaucgagaucgacaugaacacccucgagcacaccucccgcuacgucugcaccggcauccucaccgacaccucccgccccggcgacaagcccaccggcgacugcuccaaccccaucaccggcucccccggcgcccccggcgucaagggcuucggcuuccucaacggcgacaacaccuggcucggccgcaccaucuccccccgcucccgcuccggcuucgagaugcucaagauccccaacgccggcaucgaccccaacucccgcaucgccgagcgccaggagaucgucgacaacuccaacugguccggcuacuccggcuccuucaucgacuacuggaacgacaacuccgagugcuacaaccccugcuucuacgucgagcucauccgcggccgccccgaggaggccaaguacgucugguggaccuccaacucccucaucgcccucugcggcucccccuuccccgucggcuccggcuccuuccccgacggcgcccagauccaguacuucuccuga

SEQ ID NO: 119713 - RNA, 1356 nt, Artificial Sequence; identical to SEQ ID NO: 119679
  derived and/or modified CDS sequence (opt2) from neuraminidase__InfluenzaA__AGQ81925

SEQ ID NO: 119714 - RNA, 1356 nt, Artificial Sequence; identical to SEQ ID NO: 119679
  derived and/or modified CDS sequence (opt2) from neuraminidase__InfluenzaA__AGQ81926

SEQ ID NO: 119715 - RNA, 1356 nt, Artificial Sequence; identical to SEQ ID NO: 119679
  derived and/or modified CDS sequence (opt2) from neuraminidase__InfluenzaA__AGQ81927

SEQ ID NO: 119716 - RNA, 1356 nt, Artificial Sequence; identical to SEQ ID NO: 119679
  derived and/or modified CDS sequence (opt2) from neuraminidase__InfluenzaA__AGQ81928

SEQ ID NO: 119717 - RNA, 1356 nt, Artificial Sequence; identical to SEQ ID NO: 119679
  derived and/or modified CDS sequence (opt2) from neuraminidase__InfluenzaA__AGQ81929

SEQ ID NO: 119718 - RNA, 1413 nt, Artificial Sequence
  derived and/or modified CDS sequence (opt2) from neuraminidase__InfluenzaA__AGQ81930
augaaccccaaccagaagaucaucaccaucggcuccaucucccucggccucgucgucuucaacguccuccuccacgucgucuccaucaucgucaccguccucguccucggccgcggcggcaacuccggcaucugcaacgagaccgucguccgcgaguacaacgagaccguccgcaucgagaagaucacccaguggcacaacaccuccgucgucgaguacguccccuacugguccgagggcaacuacaugaacaacaccgaggccaucugcgacgucaagggcuucgcccccuucuccaaggacaacggcauccgcaucggcucccgcggccacgucuucgucauccgcgagcccuucgucuccugcucccccaccgagugccgcaccuucuuccucacccagggcucccuccucaacgacaagcacuccaacggcaccgucaaggaccgcucccccuuccgcacccucauguccgucgaggucggccagucccccaacgucuaccaggcccgcuucgaggccgucgccugguccgccaccgccugccacgacggcaagaaguggaugaccaucggcgucaccggccccgacuccaaggccgucgccgucguccacuacggcggcguccccaccgacgucgucaacuccugggccggcgacauccuccgcacccaggaguccuccugcaccugcauccagggcaacugcuacugggucaugaccgacggccccgccaaccgccaggcccaguaccgcaucuacaaggccaaccagggcaagaucgucggccagaccgacaucuccuucaacggcggccacaucgaggagugcuccugcuaccccaacgacggcaaggucgagugcgucugccgcgacaacuggaccggcaccaaccgccccguccucgucaucucccccgaccucuccuaccgcgucggcuaccucugcgccggccuccccuccgacaccccccgcggcgaggacgcccaguucaccggcuccugcaccucccccaugggcaaccagggcuacggcgucaagggcuucggcuuccgccagggcaccgacgucuggaugggccgcaccaucucccgcaccucccgcuccggcuucgagauccuccgcaucaagaacggcuggacccagaccuccaaggagcagguccgcaagcaggucgucgucgacaaccucaacugguccggcuacuccggcuccuucacccuccccgucgagcucuccggcaaggacugccucguccccugcuucugggucgagaugauccgcggcaagcccgaggagaagaccaucuggaccuccuccuccuccaucgucaugugcggcgucgacuacgaggucgccgacugguccuggcacgacggcgccauccuccccuucgacaucgacaagauguga

SEQ ID NO: 119719 - RNA, 1413 nt, Artificial Sequence
  derived and/or modified CDS sequence (opt2) from neuraminidase__InfluenzaA__AGQ81931
augaaccccaaccagaagaucaucaccaucggcucccucucccucggccucgucguccucaacauccuccuccacaucaucuccaucaccaucaccguccucgucaucccccgcaacggcaacaccggcuccugcaacgagaccgucauccgcgaguacaacgagaccguccgcaucgagaagaucacccaguggcacaacaccaacaucaucgaguacaucgagaagcccgagaacgaccucuucaugaacaacaccggcccccucugcgacgccaagggcuucgcccccuucuccaaggacaacggcauccgcaucggcuccaagggccacgucuucgucauccgcgagcccuucgucuccugcucccccaccgagugccgcaccuucuuccucacccagggcucccuccucaacgacaagcacuccaacggcaccgucaaggaccgcucccccuaccgcacccucauguccgucgagaucggccagucccccaacgucuaccaggcccgcuucgaggccgucgccugguccgccaccgccugccacgacggcaagaaguggaugaccaucggcgucaccggccccgacgccaaggccgucgccgucguccacuacggcggcauccccaccgacgucaucaacuccugggccggcgacauccuccgcacccaggaguccuccugcaccugcauccagggcgagugcuacugggucaugaccgacggccccgccaaccgccaggcccaguaccgcgccuucaaggccaagcagggcaagaucaucggccagaccgagaucuccuucaacggcggccacaucgaggagugcuccugcuaccccaacgagggcaaggucgagugcgucugccgcgacaacuggaccggcaccaaccgccccguccucgucaucuccuccgaccucuccuaccgcgucggcuaccucugcgccggccuccccuccgacaccccccgcggcgaggacucccaguucaccggcuccugcaccucccccaugggcaaccagggcuacggcgucaagggcuucggcuuccgccagggcaacgacgucuggaugggccgcaccaucucccgcaccucccgcuccggcuucgagauccucaagauccgcaacggcuggauccagaacuccaaggagcagaucaagcgccaggucgucgucgacaacuccaacugguccggcuacuccggcuccuucacccuccccgucgagcucacccgccgcaacugccucguccccugcuucugggucgagaugauccgcggcaagcccgaggagaagaccaucuggaccuccuccuccuccaucgucaugugcggcgucgaccacgagaucgccaacugguccuggcacgacggcgccauccuccccuucgacaucgacaagauguga

SEQ ID NO: 119720 - RNA, 1413 nt, Artificial Sequence
  derived and/or modified CDS sequence (opt2) from neuraminidase__InfluenzaA__AGQ81932
augaaccccaaccagaagaucaucaccaucggcuccaucucccucggccucgucgucuucaacguccuccuccacgucgucuccaucaucgucaccguccucauccucggccgcggcggcaacaacggcaucugcaacgagaccgucguccgcgaguacaacgagaccguccgcaucgagaagaucacccaguggcacaacaccuccgucgucgaguacguccccuacuggaacgagggcaccuacaugaacaacaccgaggccaucugcgacgucaagggcuucgcccccuucuccaaggacaacggcauccgcaucggcucccgcggccacgucuucgucauccgcgagcccuucgucuccugcucccccaccgagugccgcaccuucuuccucacccagggcucccuccucaacgacaagcacuccaacggcaccgucaaggaccgcucccccuuccgcacccucauguccgucgaggucggccagucccccaacgucuaccaggcccgcuucgaggccgucgccugguccgccaccgccugccacgacggcaagaaguggaugaccaucggcgucaccggcuccgacuccaaggccgucgccgucguccacuacggcggcguccccaccgacgucgucaacuccugggccggcgacauccuccgcacccaggaguccuccugcaccugcauccagggcaacugcuacugggucaugaccgacggccccgccaaccgccaggcccaguaccgcaucuacaaggccaaccagggcaaggucaucggccagaccgacaucuccuucaacggcggccacaucgaggagugcuccugcuaccccaacgacggcaaggucgagugcgucugccgcgacaacuggaccggcaccaaccgccccguccucgucaucucccccgaccucuccuaccgcgucggcuaccucugcgccggccuccccuccgacaccccccgcggcgaggacgcccaguucaccggcuccugcaccucccccaugggcaaccagggcuacggcgucaagggcuucggcuuccgccagggcaccgacgucuggaugggccgcaccaucucccagaccucccgcuccggcuucgagauccuccgcgucaagaacggcuggacccagaccuccaaggagcagguccgcaagcaggucgucgucgacaaccucaacugguccggcuacuccggcuccuucacccuccccaucgagcucuccggcaaggacugccucguccccugcuucugggucgagaugauccgcggcaagcccgaggagaaguccaucuggaccuccuccuccuccaucgucaugugcggcgucgacuacgaggucgccgacugguccuggcacgacggcgccauccuccccuucgacaucgacaagauguga

SEQ ID NO: 119721 - RNA, 1413 nt, Artificial Sequence
  derived and/or modified CDS sequence (opt2) from neuraminidase__InfluenzaA__AGQ81934
augaaccccaaccagaagauccucugcaccuccgccaccgccaucgucaucggcaccaucgccguccucaucggcaucgccaaccucggccucaacaucggccuccaccucaagcccuccugcaacugcucccacucccagcccgagaccaccaacaccucccagaccaucaucaacaacuacuacaacgagaccaacaucacccagaucuccaacaccaacauccagauggaggagcgcgccucccgcgacuucaacaaccucaccaagggccucugcaccaucaacuccuggcacaucuacggcaaggacaacgccguccgcaucggcgagaacuccgacguccucgucacccgcgagcccuacgucuccugcgaccccgacgagugccgcuucuacgcccucucccagggcaccaccauccgcggcaagcacuccaacggcaccauccacgaccgcucccaguaccgcgcccucaucuccuggccccucuccuccccccccaccgucuacaacucccgcgucgagugcaucggcugguccuccaccuccugccacgacggcaagucccgcauguccaucugcaucuccggccccaacaacaacgccuccgccgucgucugguacaaccgccgccccgucgccgagaucaacaccugggcccgcaacauccuccgcacccaggaguccgagugcgucugccacaacggcgucugccccgucgucuucaccgacggcuccgccaccggccccgccgacacccgcaucuacuacuucaaggagggccgcauccucaagugggagucccucaccggcaccgccaagcacaucgaggagugcuccugcuacggcgagcgcaccggcaucaccugcaccugccgcgacaacuggcagggcuccaaccgccccgucauccgcaucgaccccgucgccaugacccacaccucccaguacaucugcucccccguccucaccgacaacccccgccccaacgaccccaacgucggcaagugcaacgaccccuaccccggcaacaacaacaacggcgucaagggcuucuccuaccucgacggcgucaacaccuggcucggccgcaccaucuccaccgccucccgcuccggcuacgagaugcucaagguccccaacgcccucaccgacgaccgcuccaagcccauccagggccagaccaucguccucaacaccgacugguccggcuacuccggcuccuucauggacuacugggccgagggcgacugcuaccgcgccugcuucuacgucgagcucauccgcggccgccccaaggaggacaaggucugguggaccuccaacuccaucgucuccaugugcuccuccaccgaguuccucggccagugggacuggcccgacggcgccaagaucgaguacuuccucuga

SEQ ID NO: 119722 - RNA, 1413 nt, Artificial Sequence; identical to SEQ ID NO: 119721
  derived and/or modified CDS sequence (opt2) from neuraminidase__InfluenzaA__AGQ81935

SEQ ID NO: 119723 - RNA, 1413 nt, Artificial Sequence; identical to SEQ ID NO: 119721
  derived and/or modified CDS sequence (opt2) from neuraminidase__InfluenzaA__AGQ81936

SEQ ID NO: 119724 - RNA, 1413 nt, Artificial Sequence; identical to SEQ ID NO: 119721
  derived and/or modified CDS sequence (opt2) from neuraminidase__InfluenzaA__AGQ81937

SEQ ID NO: 119725 - RNA, 1413 nt, Artificial Sequence; identical to SEQ ID NO: 119721
  derived and/or modified CDS sequence (opt2) from neuraminidase__InfluenzaA__AGQ81938

SEQ ID NO: 119726 - RNA, 1413 nt, Artificial Sequence; identical to SEQ ID NO: 119721
  derived and/or modified CDS sequence (opt2) from neuraminidase__InfluenzaA__AGQ81939

SEQ ID NO: 119727 - RNA, 1413 nt, Artificial Sequence
  derived and/or modified CDS sequence (opt2) from neuraminidase__InfluenzaA__AGQ81940
augaaccccaaccagaagauccucugcaccuccgccaccgccaucaucaucggcgccaucgccguccucaucggcaucgccaaccucggccucaacaucggccuccaccucaagcccuccugcaacugcucccacucccagcccgagaccaccaacaccucccagaccaucaucaacaacuacuacaacgagaccaacaucacccagaucuccaacaccaacauccagauggaggagcgcgccuccaagggcuucaacaaccucaccaagggccucugcaccaucaacuccuggcacaucuacggcaaggacaacgccguccgcaucggcgaguccuccgacguccucgucacccgcgagcccuacgucuccugcgaccccgacgagugccgcuucuacgcccucucccagggcaccaccauccgcggcaagcacuccaacggcaccauccacgaccgcucccaguaccgcgcccucaucuccuggccccucuccuccccccccaccgucuacaacucccgcgucgagugcaucggcugguccuccaccuccugccacgacggcaagucccgcauguccaucugcaucuccggccccaacaacaacgccuccgccgucgucugguacaaccgccgccccgucgccgagaucaacaccugggcccgcaacauccuccgcacccaggaguccgagugcgucugccacaacggcgucugccccgucgucuucaccgacggcuccgccaccggccccgccgacacccgcaucuacuacuucaaggagggcaagauccucaagugggagucccucgccggcaccgccaagcacaucgaggagugcuccugcuacggcgagcgcaccggcaucaccugcaccugccgcgacaacuggcagggcuccaaccgccccgucauccagaucgaccccgucgccaugacccacaccucccaguacaucugcucccccguccucaccgacaacccccgccccaacgaccccaacaucggcaagugcaacgaccccuaccccggcaacaacaacaacggcgucaagggcuucuccuaccucgacggcgccaacaccuggcucggccgcaccaucuccaccgccucccgcuccggcuacgagaugcucaagguccccaacgcccucaccgacgaccgcuccaagcccauccagggccagaccaucguccucaacaccgacugguccggcuacuccggcuccuucauggacuacugggccgagggcgacugcuaccgcgccugcuucuacgucgagcucauccgcggccgccccaaggaggacaaggucugguggaccuccaacuccaucgucuccaugugcuccuccaccgaguuccucggccaguggaacuggcccgacggcgccaagaucgaguacuuccucuga

SEQ ID NO: 119728 - RNA, 1413 nt, Artificial Sequence
  derived and/or modified CDS sequence (opt2) from neuraminidase__InfluenzaA__AGQ81941
augaaccccaaccagaagauccucugcaccuccgccaccgccaucaucaucggcaccaucgccguccucaucggcgucgccaaccucggccucaacaucggccuccaccucaagcccggcugcaacugcucccacucccagcccgaggccaccaacaccucccagaccaucaucaacaacuacuacaacgagaccaacaucacccagaucuccaacaccaacauccagauggaggagcgccccaaccgcggcuucaacaaccucaccaagggccucugcaccaucaacuccuggcacaucuacggcaaggacaacgccguccgcaucggcgagaacuccgacguccucgucacccgcgagcccuacgucuccugcgaccccgacgagugccgcuucuacgcccucucccagggcaccaccauccgcggcaagcacuccaacggcaccauccacgaccgcucccaguaccgcgcccucaucuccuggccccucuccuccccccccaccgucuacaacucccgcgucgagugcaucggcugguccuccaccuccugccacgacggcaagucccgcauguccaucugcaucuccggccccaacaacaacgccuccgccgucgucugguacaaccgccgccccgucgccgagaucaacaccugggcccgcaacauccuccgcacccaggaguccgagugcgucugccacaacggcgucugccccgucgucuucaccgacggcuccgccaccggccccgccgacacccgcgucuacuacuuccgcgagggcaagauccucaagugggagucccucaccggcaccgcccgccacaucgaggagugcuccugcuacggcgagcgcaccggcaucaccugcaccugccgcgacaacuggcagggcuccaaccgccccgucauccagaucgaccccgucgccaugacccacaccucccaguacaucugcucccccguccucaccgacaacccccgccccaacgaccccaacgucggcaagugcaacgaccccuaccccggcaacaacaacaacggcgucaagggcuucuccuaccucgacggcgucaacaccuggcucggccgcaccaucuccaccgccucccgcuccggcuacgagaugcucaagguccccaacgcccucaccgacgaccgcuccaagcccauccagggccagaccaucguccucaacaccgacugguccggcuacuccggcuccuucauggacuacugggccgagggcgacugcuaccgcgccugcuucuacgucgagcucauccgcggccgccccaaggaggacaaggucugguggaccuccaacuccaucgucuccaugugcuccuccaccgaguuccucggccagugggacuggcccgacggcgccaagaucgaguacuuccucuga

SEQ ID NO: 119729 - RNA, 1413 nt, Artificial Sequence
  derived and/or modified CDS sequence (opt2) from neuraminidase__InfluenzaA__AGQ81942
augaaccccaaccagaagauccucugcaccuccgccaccgccaucaucaucggcaccaucgccguccucaucggcgucgccaaccucggccucaacaucggccuccaccucaagcccggcugcaacugcucccacucccagcccgaggccaccaacaccucccagaccaucaucaacaacuacuacaacgagaccaacaucacccagaucuccaacaccaacauccagauggaggagcgccccucccgcggcuucaacaaccucaccaagggccucugcaccaucaacuccuggcacaucuacggcaaggacaacgccguccgcaucggcgagaacuccgacguccucgucacccgcgagcccuacgucuccugcgaccccgacgagugccgcuucuacgcccucucccagggcaccaccauccgcggcaagcacuccaacggcaccauccacgaccgcucccaguaccgcgcccucaucuccuggccccucuccuccccccccaccgucuacaacucccgcgucgagugcaucggcugguccuccaccuccugccacgacggcaagucccgcauguccaucugcaucuccggccccaacaacaacgccuccgccaucgucugguacaaccgccgccccgucgccgagaucaacaccugggcccgcaacauccuccgcacccaggaguccgagugcgucugccacaacggcgucugccccgucgucuucaccgacggcuccgccaccggccccgccgacacccgcgucuacuacuuccgcgagggcaagauccucaagugggagucccucaccggcaccgcccgccacaucgaggagugcuccugcuacggcgagcgcaccggcaucaccugcaccugccgcgacaacuggcagggcuccaaccgccccgucauccagaucgaccccgucgccaugacccacaccucccaguacaucugcucccccguccucaccgacaacccccgccccaacgaccccaacgucggcaagugcaacgaccccuaccccggcaacaacaacaacggcgucaagggcuucuccuaccucgacggcgucaacaccuggcucggccgcaccaucuccaccgccucccgcuccggcuacgagaugcucaagguccccaacgcccucaccgacgaccgcuccaagcccauccagggccagaccaucauccucaacaccgacugguccggcuacuccggcuccuucauggacuacugggccgagggcgacugcuaccgcgccugcuucuacgucgagcucauccgcggccgccccaaggaggacaaggucugguggaccuccaacuccaucgucuccaugugcuccuccaccgaguuccucggccagugggacuggcccgacggcgccaagaucgaguacuuccucuga

SEQ ID NO: 119730 - RNA, 1413 nt, Artificial Sequence
  derived and/or modified CDS sequence (opt2) from neuraminidase__InfluenzaA__AGQ81943
augaaccccaaccagaagauccucugcaccuccgccaccgccaucaucaucggcgccaucgccguccucaucggcaucgccaaccucggccucaacaucggccuccaccucaagcccuccugcaacugcucccacucccagcccgagaccaccaacaccucccagaccaucaucaacaacuacuacaacgagaccaacaucacccagaucuccaacaccaacauccagauggaggagcgcaccucccgcggcuucaacaaccucaccaagggccucugcaccaucaacuccuggcacaucuacggcaaggacaacgccauccgcaucggcgaguccuccgacguccucgucacccgcgagcccuacgucuccugcgaccccgacgagugccgcuucuacgcccucucccagggcaccaccauccgcggcaagcacuccaacggcaccauccacgaccgcucccaguaccgcgcccucaucuccuggccccucuccuccccccccaccgucuacaacucccgcgucgagugcaucggcugguccuccaccuccugccacgacggcaagucccgcauguccaucugcaucuccggccccaacaacaacgccuccgccgucgucugguacaaccgccgccccgucgccgagaucaacaccugggcccgcaacauccuccgcacccaggaguccgagugcgucugccacaacggcgucugccccgucgucuucaccgacggcuccgccaccggccccgccgacacccgcaucuacuacuucaaggagggccgcauccucaagugggagucccucaccggcaccgccaagcacaucgaggagugcuccugcuacggcgagcgcaccggcaucaccugcaccugccgcgacaacuggcagggcuccaaccgccccgucauccagaucgaccccgucgccaugacccacaccucccaguacaucugcucccccguccucaccgacaacccccgccccaacgaccccaacaucggcaagugcaacgaccccuaccccggcaacaacaacaacggcgucaagggcuucuccuaccucgacggcgccaacaccuggcucggccgcaccaucuccaccgccucccgcuccggcuacgagaugcucaagguccccaacgcccucaccgacgaccgcuccaagcccauccagggccagaccaucguccucaacaccgacugguccggcuacuccggcuccuucauggacuacugggccgagggcgacugcuaccgcgccugcuucuacgucgagcucauccgcggccgccccaaggaggacaaggucugguggaccuccaacuccaucgucuccaugugcuccuccaccgaguuccucggccaguggaacuggcccgacggcgccaagaucgaguacuuccucuga

SEQ ID NO: 119731 - RNA, 1413 nt, Artificial Sequence; identical to SEQ ID NO: 119721
  derived and/or modified CDS sequence (opt2) from neuraminidase__InfluenzaA__AGQ81944

SEQ ID NO: 119732 - RNA, 1413 nt, Artificial Sequence
  derived and/or modified CDS sequence (opt2) from neuraminidase__InfluenzaA__AGQ81947
augaaccccaaccagaagauccucugcaccuccgccaccgcccucgucaucggcaccaucgccguccucaucggcaucgccaaccucggccucaacaucggccuccaccucaagcccuccugcaacugcucccacucccagcccgaggccaccaacaccucccagaccaucaucaacaacuacuacaacgagaccaacaucacccagaucuccaacaccaacauccagauggaggagcgcgccucccgcuccuucaacaaccucaccaagggccucugcaccaucaacuccuggcacaucuacggcaaggacaacgccauccgcaucggcgagaacuccgacguccucgucacccgcgagcccuacgucuccugcgaccccgacgagugccgcuucuacgcccucucccagggcaccaccauccgcggcaagcacuccaacggcaccauccacgaccgcucccaguaccgcgcccucaucuccuggccccucuccuccccccccaccgucuacaacucccgcgucgagugcaucggcugguccuccaccuccugccacgacggcaagucccgcauguccaucugcaucuccggccccaacaacaacgccuccgccgucgucugguacaaccgccgccccgucgccgagaucaacaccugggcccgcaacauccuccgcacccaggaguccgagugcgucugccacaacggcgucugccccgucgucuucaccgacggcuccgccaccggccccgccgacacccgcaucuacuacuucaaggagggcaagauccucaagugggagucccucaccggcaccgccaagcacaucgaggagugcuccugcuacggcgagcgcaccggcaucaccugcaccugccgcgacaacuggcagggcuccaaccgccccgucauccagaucgaccccgucgccaugacccacaccucccaguacaucugcucccccguccucaccgacaacccccgccccaacgaccccaacgucggcaagugcaacgaccccuaccccggcaacaacaacaacggcgucaagggcuucuccuaccucgacggcgucaacaccuggcucggccgcaccaucuccaccgccucccgcuccggcuacgagaugcucaagguccccaacgcccucaccgacgaccgcuccaagcccauccagggccagaccaucguccucaacaccgacugguccggcuacuccggcuccuucauggacuacugggccgagggcgacugcuaccgcgccugcuucuacgucgagcucauccgcggccgccccaaggaggacaaggucugguggaccuccaacuccaucgucuccaugugcuccuccaccgaguuccucggccaguggaacuggcccgacggcgccaagaucgaguacuuccucuga

SEQ ID NO: 119733 - RNA, 1413 nt, Artificial Sequence
  derived and/or modified CDS sequence (opt2) from neuraminidase__InfluenzaA__AGQ81948
augaaccccaaccagaagauccucugcaccuccgccaccgccaucaucaucggcgccaucgccguccucaucggcaucgccaaccucggccucaacaucggccuccaccucaagcccuccugcaacugcucccacucccagcccgagaccaccaacaccucccagaccaucaucaacaacuacuacaacgagaccaacaucacccagaucuccaacaccaacauccagauggaggagcgcaccucccgcggcuucaacaaccucaccaagggccucugcaccaucaacuccuggcacaucuacggcaaggacaacgccauccgcaucggcgaguccuccgacguccucgucacccgcgagcccuacgucuccugcgaccccgacgagugccgcuucuacgcccucucccagggcaccaccauccgcggcaagcacuccaacggcaccauccacgaccgcucccaguaccgcgcccucaucuccuggccccucuccuccccccccaccgucuacaacucccgcgucgagugcaucggcugguccuccaccuccugccacgacggcaagucccgcauguccaucugcaucuccggccccaacaacaacgccuccgccgucgucugguacaaccgccgccccgucgccgagaucaacaccugggcccgcaacauccuccgcacccaggaguccgagugcgucugccacaacggcgucugccccgucgucuucaccgacggcuccgccaccggccccgccgacacccgcaucuacuacuucaaggagggccgcauccucaagugggagucccucaccggcaccgccaagcacaucgaggagugcuccugcuacggcgagcgcaccggcaucaccugcaccugccgcgacaacuggcagggcuccaaccgccccgucauccagaucgaccccgucgccaugacccacaccucccaguacaucugcucccccguccucaccgacaacccccgccccaacgaccccaacaucggcaagugcaacgaccccuaccccggcaacaacaacaacggcgucaagggcuucuccuaccucgacggcgccaacaccuggcucggccgcaccaucuccaccgccucccgcuccggcuacgagaugcucaagguccccaacgcccucaccgacgaccgcuccaagcccauccagggccagaccaucguccucaacaccgacugguccggcuacuccggcuccuucauggacuacugggccgagggcgagugcuaccgcgccugcuucuacgucgagcucauccgcggccgccccaaggaggacaaggucugguggaccuccaacuccaucgucuccaugugcuccuccaccgaguuccucggccaguggaacuggcccgacggcgccaagaucgaguacuuccucuga

SEQ ID NO: 119734 - RNA, 1413 nt, Artificial Sequence
  derived and/or modified CDS sequence (opt2) from neuraminidase__InfluenzaA__AGQ81951
augaaccccaaccagaagauccucugcaccuccgccaccgccaucgucaucggcaccaucgccguccucaucggcgucgccaaccucggccucaacaucggccuccaccucaagcccggcugcaacugcucccagucccagcccgaggccaccaacaccucccagaccaucaucaacaacuacuacaacgagaccaacaucacccagaucuccaacaccaacauccagauggaggagcgcgccaaccgcggcuucaacaaccucaccaagggccucugcaccaucaacuccuggcacaucuacggcaaggacaacgccguccgcaucggcgagaacuccgacguccucgucacccgcgagcccuacgucuccugcgaccccgacgagugccgcuucuacgcccucucccagggcaccaccauccgcggcaagcacuccaacggcaccauccacgaccgcucccaguaccgcgcccucaucuccuggccccucuccuccccccccaccgucuacaacucccgcgucgagugcaucggcugguccuccaccuccugccacgacggcaagucccgcauguccaucugcaucuccggccccaacaacaacgccuccgccgucgucugguacaaccgccgccccgucgccgagaucaacaccugggcccgcaacauccuccgcacccaggaguccgagugcgucugccacaacggcgucugccccgucgucuucaccgacggcuccgccaccggccccgccgacacccgcgucuacuacuuccgcgagggcaagauccucaagugggagucccucaccggcaccgccaagcacaucgaggagugcuccugcuacggcgagcgcaccggcaucaccugcaccugccgcgacaacuggcagggcuccaaccgccccgucauccagaucgaccccgucgccaugacccacaccucccaguacaucugcucccccguccucaccgacaacccccgccccaacgaccccaacgucggcaagugcaacgaccccuaccccggcaacaacaacaacggcgucaagggcuucuccuaccucgacggcgucaacaccuggcucggccgcaccaucuccaccgccucccgcuccggcuacgagaugcucaagguccccaacgcccucaccgacgaccgcuccaagcccauccagggccagaccaucguccucaacaccgacugguccggcuacuccggcuccuucauggacuacugggccgagggcgacugcuaccgcgccugcuucuacgucgagcucauccgcggccgccccaaggaggacaaggucugguggaccuccaacuccaucgucuccaugugcuccuccaccgaguuccucggccaguggaacuggcccgacggcgccaagaucgaguacuuccucuga

SEQ ID NO: 119735 - RNA, 1413 nt, Artificial Sequence
  derived and/or modified CDS sequence (opt2) from neuraminidase__InfluenzaA__AGQ81952
augaaccccaaccagaagauccucugcaccuccgccaccgccaucgucaucggcaccaucgccguccucaucggcgucgccaaccucggccucaacaucggccuccaccucaagcccggcugcaacugcucccacucccagcccgaggccaccaacaccucccagaccaucaucaacaacuacuacaacgagaccaacaucacccagaucuccaacaccaacauccagauggaggagcgcgccaaccgcggcuucaacaaccucaccaagggccucugcaccaucaacuccuggcacaucuacggcaaggacaacgccguccgcaucggcgagaacuccgacguccucgucacccgcgagcccuacgucuccugcgaccccgacgagugccgcuucuacgcccucucccagggcaccaccauccgcggcaagcacuccaacggcaccauccacgaccgcucccaguaccgcgcccucaucuccuggccccucuccuccccccccaccgucuacaacucccgcgucgagugcaucggcugguccuccaccuccugccacgacggcaagucccgcauguccaucugcaucuccggccccaacaacaacgccuccgccgucgucugguacaaccgccgccccgucgccgagaucaacaccugggcccgcaacauccuccgcacccaggaguccgagugcgucugccacaacggcgucugccccgucgucuucaccgacggcuccgccaccggccccgccgacacccgcgucuacuacuuccgcgagggcaagauccucaagugggagucccucaccggcaccgccaagcacaucgaggagugcuccugcuacggcgagcgcaccggcaucaccugcaccugccgcgacaacuggcagggcuccaaccgccccgucauccagaucgaccccgucgccaugacccacaccucccaguacaucugcucccccguccucaccgacaacccccgccccaacgaccccaacgucggcaagugcaacgaccccuaccccggcaacaacaacaacggcgucaagggcuucuccuaccucgacggcgucaacaccuggcucggccgcaccaucuccaccgccucccgcuccggcuacgagaugcucaagguccccaacgcccucaccgacgaccgcuccaagcccauccagggccagaccaucguccucaacaccgacugguccggcuacuccggcuccuucauggacuacugggccgagggcgacugcuaccgcgccugcuucuacgucgagcucauccgcggccgccccaaggaggacaaggucugguggaccuccaacuccaucgucuccaugugcuccuccaccgaguuccucggccaguggaacuggcccgacggcgccaagaucgaguacuuccucuga

SEQ ID NO: 119736 - RNA, 1413 nt, Artificial Sequence
  derived and/or modified CDS sequence (opt2) from neuraminidase__InfluenzaA__AGQ81954
augaaccccaaccagaagauccucugcaccuccgccaccgccaucgucaucggcaccaucgccguccucaucggcgucgccaaccucggccucaacaucggccuccaccucaagcccuccugcaacugcucccacucccagcccgaggccaccaacaccucccagaccaucaucaacaacuacuacaacgagaccaacaucacccagaucuccaacaccaacauccagauggaggagcgcgccucccgcggcuucaacaaccucaccaagggccucugcaccaucaacuccuggcacaucuacggcaaggacaacgccguccgcaucggcgagaacuccgacguccucgucacccgcgagcccuacgucuccugcgaccccgacgagugccgcuucuacgcccucucccagggcaccaccauccgcggcaagcacuccaacggcaccauccacgaccgcucccaguaccgcgcccucaucuccuggccccucuccuccccccccaccgucuacaacucccgcgucgagugcaucggcugguccuccaccuccugccacgacggcaagucccgcauguccaucugcaucuccggccccaacaacaacgccuccgccgucgucugguacaaccgccgccccgucgccgagaucaacaccugggcccgcaacauccuccgcacccaggaguccgagugcgucugccacaacggcgucugccccgucgucuucaccgacggcuccgccaccggccccgccgacacccgcgucuacuacuucaaggagggcaagauccucaagugggagucccucaccggcaccgccaagcacaucgaggagugcuccugcuacggcgagcgcaccggcaucaccugcaccugccgcgacaacuggcagggcuccaaccgccccgucauccagaucgaccccgucgccaugacccacaccucccaguacaucugcucccccguccucaccgacaacccccgccccaacgaccccaacgucggcaagugcaacgaccccuaccccggcaacaacaacaacggcgucaagggcuucuccuaccucgacggcgucaacaccuggcucggccgcaccaucuccaccgccucccgcuccggcuacgagaugcucaagguccccaacgcccucaccgacgaccgcuccaagcccauccagggccagaccaucguccucaacaccgacugguccggcuacuccggcuccuucauggacuacugggccgagggcgacugcuaccgcgccugcuucuacgucgagcucauccgcggccgccccaaggaggacaaggucugguggaccuccaacuccaucgucuccaugugcuccuccaccgaguuccucggccaguggaacuggcccgacggcgccaagaucgaguacuuccucuga

SEQ ID NO: 119737 - RNA, 1413 nt, Artificial Sequence
  derived and/or modified CDS sequence (opt2) from neuraminidase__InfluenzaA__AGQ81956
augaaccccaaccagaagauccucugcaccuccgccaccgccaucgucaucggcaccaucgccguccucaucggcgucgccaaccucggccucaacaucggccuccaccucaagcccuccugcaacugcucccacucccagcccgaggccaccaacaccucccagaccaucaucaacaacuacuacaacgagaccaacaucacccagaucuccaacaccaacauccagauggaggagcgcgccucccgcggcuucaacaaccucaccaagggccucugcaccaucaacuccuggcacaucuacggcaaggacaacgccguccgcaucggcgagaacuccgacguccucgucacccgcgagcccuacgucuccugcgaccccgacgagugccgcuucuacgcccucucccagggcaccaccauccgcggcaagcacuccaacggcaccauccacgaccgcucccaguaccgcgcccucaucuccuggccccucuccuccccccccaccgucuacaacucccgcgucgagugcaucggcugguccuccaccuccugccacgacggcaagucccgcauguccaucugcaucuccggccccaacaacaacgccuccgccaucgucugguacaaccgccgccccgucgccgagaucaacaccugggcccgcaacauccuccgcacccaggaguccgagugcgucugccacaacggcgucugccccgucgucuucaccgacggcuccgccaccggccccgccgacacccgcgucuacuacuucaaggagggcaagauccucaagugggagucccucaccggcaccgccaagcacaucgaggagugcuccugcuacggcgagcgcaccggcaucaccugcaccugccgcgacaacuggcagggcuccaaccgccccgucauccagaucgaccccgucgccaugacccacaccucccaguacaucugcucccccguccucaccgacaacccccgccccaacgaccccaacgucggcaagugcaacgaccccuaccccggcaacaacaacaacggcgucaagggcuucuccuaccucgacggcgucaacaccuggcucggccgcaccaucuccaccgccucccgcuccggcuacgagaugcucaagguccccaacgcccucaccgacgaccgcuccaagcccauccagggccagaccaucguccucaacaccgacugguccggcuacuccggcuccuucauggacuacugggccgagggcgacugcuaccgcgccugcuucuacgucgagcucauccgcggccgccccaaggaggacaaggucugguggaccuccaacuccaucgucuccaugugcuccuccaccgaguuccucggccaguggaacuggcccgacggcgccaagaucgaguacuuccucuga

SEQ ID NO: 119738 - RNA, 1413 nt, Artificial Sequence
  derived and/or modified CDS sequence (opt2) from neuraminidase__InfluenzaA__AGQ81957
augaaccccaaccagaagauccucugcaccuccgccaccgccaucgucaucggcaccaucgccguccucaucggcaucgccaaccucggccucaacaucggccuccaccucaagcccuccugcaacugcucccacucccagcccgaggccaccaacaccucccagaucaucaucaacaacuacuacaacgagaccaacaucacccaggucuccaacaccaacauccagauggaggagcgcgccucccgcggcuucaacaaccucaccaagggccucugcaccaucaacuccuggcacaucuacggcaaggacaacgccguccgcaucggcgagaacuccgacguccucgucacccgcgagcccuacgucuccugcgaccccgacgagugccgcuucuacgcccucucccagggcaccaccauccgcggcaagcacuccaacggcaccauccacgaccgcucccaguaccgcgcccucaucuccuggccccucuccuccccccccaccgucuacaacucccgcgucgagugcaucggcugguccuccaccuccugccacgacggcaagucccgcauguccaucugcaucuccggccccaacaacaacgccuccgccgucgucugguacaaccgccgccccgucgccgagaucaacaccugggcccgcaacauccuccgcacccaggaguccgagugcgucugccacaacggcgucugccccgucgucuucaccgacggcuccgccaccggccccgccgacacccgcaucuacuacuucaaggagggcaagauccucaagugggagucccucaccggcaccgccaagcacaucgaggagugcuccugcuacggcgagcgcaccggcaucaccugcaccugccgcgacaacuggcagggcuccaaccgccccgucauccagaucgaccccgucgccaugacccacaccucccaguacaucugcucccccguccucaccgacaacccccgccccaacgaccccaacgucggcaagugcaacgaccccuaccccggcaacaacaacaacggcgucaagggcuucuccuaccucgacggcgucaacaccuggcucggccgcaccaucuccaccgccucccgcuccggcuacgagaugcucaagguccccaacgcccucaccgacgaccgcuccaagcccguccagggccagaccaucguccucaacaccgacugguccggcuacuccggcuccuucauggacuacugggccgagggcgacugcuaccgcgccugcuucuacgucgagcucauccgcggccgccccaaggaggacaaggucugguggaccuccaacuccaucgucuccaugugcuccuccaccgaguuccucggccaguggaacuggcccgacggcgccaagaucgaguacuuccucuga

SEQ ID NO: 119739 - RNA, 1413 nt, Artificial Sequence; identical to SEQ ID NO: 119721
  derived and/or modified CDS sequence (opt2) from neuraminidase__InfluenzaA__AGQ81958

SEQ ID NO: 119740 - RNA, 1413 nt, Artificial Sequence; identical to SEQ ID NO: 119721
  derived and/or modified CDS sequence (opt2) from neuraminidase__InfluenzaA__AGQ81959

SEQ ID NO: 119741 - RNA, 1413 nt, Artificial Sequence
  derived and/or modified CDS sequence (opt2) from neuraminidase__InfluenzaA__AGQ81960
augaaccccaaccagaagauccucugcaccuccgccaccgccaucgucaucggcaccaucgccguccucaucggcaucgccaaccucggccucaacaucggccuccaccucaagcccaacugcaacugcucccgcucccagcccgagaccaccaacaccucccagaccaucaucaacaacuacuacaacgagaccaacaucacccagaucuccaacaccaacauccagauggaggagcgcgccucccgcgacuucaacaaccucaccaagggccucugcaccaucaacuccuggcacaucuacggcaaggacaacgccguccgcaucggcgagaacuccgacguccucgucacccgcgagcccuacgucuccugcgaccccaacgagugccgcuucuacgcccucucccagggcaccaccauccgcggcaagcacuccaacggcaccauccacgaccgcucccaguaccgcgcccucaucuccuggccccucuccuccccccccaccgucuacaacucccgcgucgagugcaucggcugguccuccaccuccugccacgacggcaagucccgcauguccaucugcaucuccggccccaacaacaacgccuccgccgucgucugguacaaccgccgccccgucgccgagaucaacaccugggcccgcaacauccuccgcacccaggaguccgagugcgucugccacaacggcgucugccccgucgucuucaccgacggcuccgccaccggccccgccgacacccgcaucuacuacuucaaggagggcaagauccucaagugggagucccucaccggcaccgccaagcacaucgaggagugcuccugcuacggcgagcgcaccgagaucaccugcaccugccgcgacaacuggcagggcuccaaccgccccgucauccagaucgaccccgucgccaugacccacaccucccaguacaucugcucccccguccucaccgacaacccccgccccaacgaccccaacgucggcaagugcaacgaccccuaccccggcaacaacaacaacggcgucaagggcuucuccuaccucgacggcgucaacaccuggcucggccgcaccaucuccaccgccucccgcuccggcuacgagaugcucaagguccccaacgcccucaccgacgaccgcuccaagcccauccagggccagaccaucguccucaacaccgacugguccggcuacuccggcuccuucauggacuacugggccgagggcgacugcuaccgcgccugcuucuacgucgagcucauccgcggccgccccaaggaggacaaggucugguggaccuccaacuccaucgucuccaugugcuccuccaccgaguuccucggccagugggacuggcccgacggcgccaagaucgaguacuuccucuga

SEQ ID NO: 119742 - RNA, 1413 nt, Artificial Sequence; identical to SEQ ID NO: 119734
  derived and/or modified CDS sequence (opt2) from neuraminidase__InfluenzaA__AGQ81961

SEQ ID NO: 119743 - RNA, 1413 nt, Artificial Sequence; identical to SEQ ID NO: 119734
  derived and/or modified CDS sequence (opt2) from neuraminidase__InfluenzaA__AGQ81962

SEQ ID NO: 119744 - RNA, 1413 nt, Artificial Sequence
  derived and/or modified CDS sequence (opt2) from neuraminidase__InfluenzaA__AGQ81963
augaaccccaaccagaagauccucugcaccuccgccaccgccaucgucaucggcaccaucgccguccucaucggcaucgccaaccucggccucaacaucggccuccaccucaagcccuccugcaacugcucccacucccagcccgaggagaccaacaccucccagaccaucaucaacaacuacuacaacgagaccaacaucacccagaucuccaacaccaacauccagauggaggagcgcgccucccgcggcuucaacaaccucaccaagggccucugcaccaucaacuccuggcacaucuacggcaaggacaacgccguccgcaucggcgagaacuccgacguccucgucacccgcgagcccuacgucuccugcgaccccaacgagugccgcuucuacgcccucucccagggcaccaccauccgcggcaagcacuccaacggcaccauccacgaccgcucccaguaccgcgcccucaucuccuggccccucuccuccccccccaccgucuacaacucccgcgucgagugcaucggcugguccuccaccuccugccacgacggcaagucccgcauguccgucugcaucuccggccccaacgacaacgccuccgccgucgucugguacaaccgccgccccgucgccgagaucaacaccugggcccgcaacauccuccgcacccaggaguccgagugcgucugccacaacggcgucugccccgucgucuucaccgacggcuccgccaccggccccgcccacacccgcaucuacuacuucaaggagggcaagauccucaagugggagucccucaccggcaccgccaagcacaucgaggagugcuccugcuacggcgagcgcaccggcaucaccugcaccugccgcgacaacuggcagggcuccaaccgccccgucauccagaucgaccccgucgccaugacccacaccucccaguacaucugcucccccguccucaccgacaacccccgccccaacgaccccaacgucggcaagugcaacgaccccuaccccggcaacaacaacaacggcgucaagggcuucuccuaccucgacggcgucaacaccuggcucggccgcaccaucuccaccgccucccgcuccggcuacgagaugcucaagguccccaacgcccucaccgacgaccgcuccaagcccauccagggccagaccaucguccucaacaccgacugguccggcuacuccggcuccuucauggacuacuggaccgagggcgacugcuaccgcgccugcuucuacgucgagcucauccgcggccgccccaaggaggacaaggucugguggaccuccaacuccaucgucuccaugugcuccuccaccgaguuccucggccagugggacuggcccgacggcgccaagaucgaguacuuccucuga

SEQ ID NO: 119745 - RNA, 1413 nt, Artificial Sequence
  derived and/or modified CDS sequence (opt2) from neuraminidase__InfluenzaA__AGQ81964
augaaccccaaccagaagauccucugcaccuccgccaccgccaucgucaucggcaccaucgccguccucaucggcaucgccaaccucggccucaacaucggccuccaccucaagcccuccugcaacugcucccacuccaagcccgaggagaccaacgccucccagaccaucaucaacaacuacuacaacgagaccaacaucacccagaucuccaacaccaacauccagauggaggagcgcgccucccgcggcuucaacaaccucaccaagggccucugcaccaucaacuccuggcacaucuacggcaaggacaacgccguccgcaucggcgaguccuccgacguccucgucacccgcgagcccuacgucuccugcgaccccgacgagugccgcuucuacgcccucucccagggcaccaccauccgcggcaagcacuccaacggcaccauccacgaccgcucccaguaccgcgcccucaucuccuggccccucuccuccccccccaccgucuacaacucccgcgucgagugcaucggcugguccuccaccuccugccacgacggcaagucccgcauguccaucugcaucuccggccccaacaacaacgccuccgccgucgucugguacaaccgccgccccgucgccgagaucaacaccugggcccgcaacauccuccgcacccaggaguccgagugcgucugccacaacggcgucugccccgucgucuucaccgacggcuccgccaccggccccgccgacacccgcaucuacuacuucaaggagggcaagauccucaagugggagucccucaccggcaccgccaagcacaucgaggagugcuccugcuacggcgagcgcaccggcaucaccugcaccugccgcgacaacuggcagggcuccaaccgccccgucauccagaucgaccccgucgccaugacccacaccucccaguacaucugcucccccguccucaccgacaacccccgccccaacgaccccaacgucggcaagugcaacgaccccuaccccggcaacaacaacaacggcgucaagggcuucuccuaccucgacggcgucaacaccuggcucggccgcaccaccuccaccaccucccgcuccggcuacgagaugcucaagguccccaacgcccucaccgacgaccgcuccaagcccauccagggccagaccaucguccucaacaccgacugguccggcuacuccggcuccuucauggacuacugggccgagggcgacugcuaccgcgccugcuucuacgucgagcucauccgcggccgccccaaggaggacaaggucugguggaccuccaacuccaucgucuccaugugcuccuccaccgaguuccucggccaguggaacuggcccgacggcgccaagaucgaguacuuccucuga

SEQ ID NO: 119746 - RNA, 1413 nt, Artificial Sequence
  derived and/or modified CDS sequence (opt2) from neuraminidase__InfluenzaA__AGQ81966
augaaccccaaccagcgcauccucugcaccuccgccaccgccaucgucaucggcaccaucgccguccucaucggcgucgccaaccucggccucaacaucggccuccaccucaagcccggcugcaacugcucccacucccagcccgaggccaccaacaccucccagaccaucaucaacaacuacuacaacgagaccaacaucacccagaucuccaacaccaacauccagauggaggagcgcgccaaccgcggcuucaacaaccucaccaagggccucugcaccaucaacuccuggcacaucuacggcaaggacaacgccguccgcaucggcgagaacuccgacguccucgucacccgcgagcccuacgucuccugcgaccccgacgagugccgcuucuacgcccucucccagggcaccaccauccgcggcaagcacuccaacggcaccauccacgaccgcucccaguaccgcgcccucaucuccuggccccucuccuccccccccaccgucuacaacucccgcgucgagugcaucggcugguccuccaccuccugccacgacggcaagucccgcauguccaucugcaucuccggccccaacaacaacgccuccgccgucgucugguacaaccgccgccccgucgccgagaucaacaccugggcccgcaacauccuccgcacccaggaguccgagugcgucugccacaacggcgucugccccgucgucuucaccgacggcuccgccaccggccccgccgacacccgcgucuacuacuuccgcgagggcaagauccucaagugggagucccucaccggcaccgccaagcacaucgaggagugcuccugcuacggcgagcgcaccggcaucaccugcaccugccgcgacaacuggcagggcuccaaccgccccgucauccagaucgaccccgucgccaugacccacaccucccaguacaucugcucccccguccucaccgacaacccccgccccaacgaccccaacgucggcaagugcaacgaccccuaccccggcaacaacaacaacggcgucaagggcuucuccuaccucgacggcgucaacaccuggcucggccgcaccaucuccaccgccucccgcuccggcuacgagaugcucaagguccccaacgcccucaccgacgaccgcuccaagcccauccagggccagaccaucguccucaacaccgacugguccggcuacuccggcuccuucauggacuacugggccgagggcgacugcuaccgcgccugcuucuacgucgagcucauccgcggccgccccaaggaggacaaggucugguggaccuccaacuccaucgucuccaugugcuccuccaccgaguuccucggccaguggaacuggcccgacggcgccaagaucgaguacuuccucuga

SEQ ID NO: 119747 - RNA, 1413 nt, Artificial Sequence
  derived and/or modified CDS sequence (opt2) from neuraminidase__InfluenzaA__AGQ81967
augaaccccaaccagaagauccucugcaccuccgccaccgccaucgucaucggcaucaucgccguccucaucggcaucgccaaccucggccucaacaucggccuccaccucaagcccuccugcaacugcucccacucccagcccgaggccaccaacgccucccagaccaucaucaacaacuacuacaacgagaccaacaucacccagaucuccaacaccaacauccagauggaggagcgcgccucccgcggcuucaacaaccucaccaagggccucugcaccaucaacuccuggcacaucuacggcaaggacaacgccguccgcaucggcgagaacuccgacguccucgucacccgcgagcccuacgucuccugcgaccccgacgagugccgcuucuacgcccucucccagggcaccaccauccgcggcaagcacuccaacggcaccauccacgaccgcucccaguaccgcgcccucaucuccuggccccucuccuccccccccaccgucuacaacucccgcgucgagugcaucggcugguccuccaccuccugccacgacggcaagucccgcauguccaucugcaucuccggccccaacaacaacgccuccgccgucgucugguacaaccgccgccccgucgccgagaucaacaccugggcccgcaacauccuccgcacccaggaguccgagugcgucugccacaacggcgucugccccgucgucuucaccgacggcuccgccaccggccccgccgagacccgcaucuacuacuucaaggagggcaagauccucaagugggagucccucaccggcaccgccaagcacaucgaggagugcuccugcuacggcgagcgcaccggcaucaccugcaccugccgcgacaacuggcagggcuccaaccgccccgucauccagaucgaccccgucgccaugacccacaccucccaguacaucugcucccccguccucaccgacaacccccgccccaacgaccccaacgucggcaagugcaacgaccccuaccccggcaacaacaacaacggcgucaagggcuucuccuaccucgacggcgucaacaccuggcucggccgcaccaucuccaccgccucccgcuccggcuacgagaugcucaagguccccaacgcccucaccgacgaccgcuccaagcccauccagggccagaucaucguccucaacaccgacugguccggcuacuccggcuccuucauggacuacugggccgagggcgacugcuaccgcgccugcuucuacgucgagcucauccgcggccgccccaaggaggacaaggucugguggaccuccaacuccaucgucuccaugugcuccuccaccgaguuccucggccaguggaacuggcccgacggcgccaagaucgaguacuuccucuga

SEQ ID NO: 119748 - RNA, 1413 nt, Artificial Sequence
  derived and/or modified CDS sequence (opt2) from neuraminidase__InfluenzaA__AGQ81968
augaaccccaaccagaagauccucugcaccuccgccaccgccaucgucaucggcaucaucgccguccucaucggcaucgccaaccucggccucaacaucggccuccaccucaagcccuccugcaacugcucccacucccagcccgaggccaccaacgccucccagaccaucaucaacaacuacuacaacgagaccaacaucacccagaucuccaacaccaacauccagauggaggagcgcgccucccgcggcuucaacaaccucaccaagggccucugcaccaucaacuccuggcacaucuacggcaaggacaacgccguccgcaucggcgagaacuccgacauccucgucacccgcgagcccuacgucuccugcgaccccgacgagugccgcuucuacgcccucucccagggcaccaccauccgcggcaagcacuccaacggcaccauccacgaccgcucccaguaccgcucccucaucuccuggccccucuccuccccccccaccgucuacaacucccgcgucgagugcaucggcugguccuccaccuccugccacgacggcaagucccgcauguccaucugcaucuccggccccaacaacaacgccuccgccgucgucugguacaaccgccgccccgucgccgagaucaacaccugggcccgcaacauccuccgcacccaggaguccgagugcgucugccacaacggcgucugccccgucgucuucaccgacggcuccgccaccggccccgccgagacccgcaucuacuacuucaaggagggcaagauccucaagugggagucccucaccggcaccgccaagcacaucgaggagugcuccugcuacggcgagcgcaccggcaucaccugcaccugccgcgacaacuggcagggcuccaaccgccccgucauccagaucgaccccgucgccaugacccacaccucccaguacaucugcucccccguccucaccgacaacccccgccccaacgaccccaacgucggcaagugcaacgaccccuaccccggcaacaacaacaacggcgucaagggcuucuccuaccucgacggcgucaacaccuggcucggccgcaccaucuccaccgccucccgcuccggcuacgagaugcucaagguccccaacgcccucaccgacgaccgcuccaagcccauccagggccagaccaucguccucaacaccgacugguccggcuacuccggcuccuucaucgacuacugggccgagggcgacugcuaccgcgccugcuucuacgucgagcucauccgcggccgccccaaggaggacaaggucugguggaccuccaacuccaucgucuccaugugcuccuccaccgaguuccucggccaguggaacuggcccgacggcgccaagaucgaguacuuccucuga

SEQ ID NO: 119749 - RNA, 1413 nt, Artificial Sequence
  derived and/or modified CDS sequence (opt2) from neuraminidase__InfluenzaA__AGQ81969
augaaccccaaccagaagauccucugcaccuccgccaccgccaucgucaucggcaucaucgccguccucaucggcaucgccaaccucggccucaacaucggccuccaccucaagcccuccugcaacugcucccacucccagcccgaggagaccaacgccucccagaccaucaucaacaacuacuacaacgagaccaacaucacccagaucuccaacaccaacauccagauggaggagcgcgccucccgcggcuucaacaaccucaccaagggccucugcaccaucaacuccuggcacaucuacggcaaggacaacgccguccgcaucggcgagaacuccgacguccucgucacccgcgagcccuacgucuccugcgaccccgacgagugccgcuucuacgcccucucccagggcaccaccauccgcggcaagcacuccaacggcaccauccacgaccgcucccaguaccgcgcccucaucuccuggccccucuccuccccccccaccgucuacaacucccgcgucgagugcaucggcugguccuccaccuccugccacgacggcaagucccgcauguccaucugcaucuccggccccaacaacaacgccuccgccgucgucugguacaaccgccgccccgucgccgagaucaacaccugggcccgcaacauccuccgcacccaggaguccgagugcgucugccacaacggcgucugccccgucgucuucaccgacggcuccgccaccggccccgccgagacccgcaucuacuacuucaaggagggcaagauccucaagugggagucccucaccggcaccgccaagcacaucgaggagugcuccugcuacggcgagcgcaccggcaucaccugcaccugccgcgacaacuggcagggcuccaaccgccccgucauccagaucgaccccgucgccaugacccacaccucccaguacaucugcucccccguccucaccgacaacccccgccccaacgaccccaacgucggcaagugcaacgaccccuaccccggcaacaacaacaacggcgucaagggcuucuccuaccucgacggcgucaacaccuggcucggccgcaccaucuccaccgccucccgcuccggcuacgagaugcucaagguccccaacgcccucaccgacgaccgcuccaagcccauccagggccagaucaucguccucaacaccgacugguccggcuacuccggcuccuucauggacuacugggccgagggcgacugcuaccgcgccugcuucuacgucgagcucauccgcggccgccccaaggaggacaaggucugguggaccuccaacuccaucgucuccaugugcuccuccaccgaguuccucggccaguggaacuggcccgacggcgccaagaucgaguacuuccucuga

SEQ ID NO: 119750 - RNA, 1413 nt, Artificial Sequence
  derived and/or modified CDS sequence (opt2) from neuraminidase__InfluenzaA__AGQ81970
augaaccccaaccagaagauccucugcaccuccgccaccgccaucgucaucggcaccaucgccguccucaucggcaucgccaaccucggccucaacaucggccuccaccucaagcccuccugcaacugcucccacucccagcccgaggagaccaacgccucccagaccaucaucaacaacuacuacaacgagaccaacaucacccagaucuccaacaccaacauccagauggaggagcgcgccucccgcggcuucaacaaccucaccaagggccucugcaccaucaacuccuggcacaucuacggcaaggacaacgccguccgcaucggcgagaacuccgacguccucgucacccgcgagcccuacgucuccugcgaccccgacgagugccgcuucuacgcccucucccagggcaccaccauccgcggcaagcacuccaacggcaccauccacgaccgcucccaguaccgcgcccucaucuccuggccccucuccuccccccccaccgucuacaacucccgcgucgagugcaucggcugguccuccaccuccugccacgacggcaagucccgcauguccaucugcaucuccggccccaacaacaacgccuccgccgucgucugguacaacaagcgccccgucgccgagaucaacaccugggcccgcaacauccuccgcacccaggaguccgagugcgucugccacaacggcgucugccccgucgucuucaccgacggcuccgccaccggccccgccgacacccgcaucuacuacuucaaggagggcaagauccucaagugggagccccucaccggcaccgccaagcacaucgaggagugcuccugcuacggcgagcgcaccggcaucaccugcaccugccgcgacaacuggcagggcuccaaccgccccgucauccagaucgaccccgucgccaugacccacaccucccaguacaucugcucccccguccucaccgacaacccccgccccaacgaccccaacgucggcaagugcaacgaccccuaccccggcaacuccaacaacggcgucaagggcuucuccuaccucgacggcgucaacaccuggcucggccgcaccaucuccaccgccucccgcuccggcuacgagaugcucaagguccccaacgcccucaccgacgaccgcuccaagcccauccagggccagaccaucguccucaacaccgacugguccggcuacuccggcuccuucauggacuacugggccgagggcgacugcuaccgcgccugcuucuacgucgagcucauccgcggccgccccaaggaggacaaggucugguggaccuccaacuccaucgucuccaugugcuccuccaccgaguuccucggccaguggaacuggcccgacggcgccaagaucgaguacuuccucuga

SEQ ID NO: 119751 - RNA, 1413 nt, Artificial Sequence
  derived and/or modified CDS sequence (opt2) from neuraminidase__InfluenzaA__AGQ81971
augaaccccaaccagaagauccucugcaccuccgccaccgccaucaucaucggcgccaucgccguccucaucggcaucgccaaccucggccucaacaucggccuccaccucaagcccuccugcaacugcucccacucccagcccgagaccaccaacaccucccagaccaucaucaacaacuacuacaacgagaccaacaucacccagaucuccaacaccaacauccagauggaggagcgcaccucccgcggcuucaacaaccucaccaagggccucugcaccaucaacuccuggcacaucuacggcaaggacaacgccguccgcaucggcgaguccuccgacguccucgucacccgcgagcccuacgucuccugcgaccccgacgagugccgcuucuacgcccucucccagggcaccaccauccgcggcaagcacuccaacggcaccauccacgaccgcucccaguaccgcgcccucaucuccuggccccucuccuccccccccaccgucuacuccucccgcgucgagugcaucggcugguccuccaccuccugccacgacggcaagucccgcauguccaucugcaucuccggccccaacaacaacgccuccgccgucgucugguacaaccgccgccccgucgccgagaucaacaccugggcccgcaacauccuccgcacccaggaguccgagugcgucugccacaacggcgucugccccgucgucuucaccgacggcuccgccaccggccccgccgacacccgcaucuacuacuucaaggagggcaagauccucaagugggagucccucaccggcaccgccaagcacaucgaggagugcuccugcuacggcgagcgcaccggcaucaccugcaccugccgcgacaacuggcagggcuccaaccgccccgucauccagaucgaccccgucgccaugacccacaccucccaguacaucugcucccccguccucaccgacaacccccgccccaacgaccccaacaucggcaagugcaacgaccccuaccccggcaacaacaacaacggcgucaagggcuucuccuaccucgacggcgccaacaccuggcucggccgcaccaucuccaccgccucccgcuccggcuacgagaugcucaagguccccaacgcccucaccgacgaccgcuccaagcccauccagggccagaccaucguccucaacaccgacugguccggcuacuccggcuccuucauggacuacugggccgagggcgacugcuaccgcgccugcuucuacgucgagcucauccgcggccgccccaaggaggacaaggucugguggaccuccaacuccaucgucuccaugugcuccuccaccgaguuccucggccaguggaacuggcccgacggcgccaagaucgaguacuuccucuga

SEQ ID NO: 119752 - RNA, 1413 nt, Artificial Sequence
  derived and/or modified CDS sequence (opt2) from neuraminidase__InfluenzaA__AGQ81972
augaaccccaaccagaagauccucugcaccuccgccaccgccaucaucaucggcgccaucgccguccucaucggcaucgccaaccucggccucaacaucggccuccaccucaagcccuccugcaacugcucccacucccagcccgagaccaccaacaccucccagaccaucaucaacaacuacuacaacgagaccaacaucacccagaucuccaacaccaacauccagauggaggagcgcgccucccgcggcuucaacaaccucaccaagggccucugcaccaucaacuccuggcacaucuacggcaaggacaacgccguccgcaucggcgaguccuccgacguccucgucacccgcgagcccuacgucuccugcgaccccgacgagugccgcuucuacgcccucucccagggcaccaccauccgcggcaagcacuccaacggcaccauccacgaccgcucccaguaccgcgcccucaucuccuggccccucuccuccccccccaccgucuacaacucccgcgucgagugcaucggcugguccuccaccuccugccacgacggcaagucccgcauguccaucugcaucuccggccccaacaacaacgccuccgccgucgucugguacaaccgccgccccgucgccgagaucaacaccugggcccgcaacauccuccgcacccaggaguccgagugcgucugccacaacggcgucugccccgucgucuucaccgacggcuccgccaccggccccgccgacacccgcaucuacuacuucaaggagggcaagauccucaagugggagucccucaccggcaccgccaagcacaucgaggagugcuccugcuacggcgagcgcaccggcaucaccugcaccugccgcgacaacuggcagggcuccaaccgccccgucauccagaucgaccccgucgccaugacccacaccucccaguacaucugcucccccguccucaccgacaacccccgccccaacgaccccaacaucggcaagugcaacgaccccuaccccggcaacaacaacaacggcgucaagggcuucuccuaccucgacggcgccaacaccuggcucggccgcaccaucuccaccgccucccgcuccggcuacgagaugcucaagguccccaacgcccucaccgacgaccgcuccaagcccauccagggccagaccaucguccucaacaccgacugguccggcuacuccggcuccuucauggacuacugggccgagggcgacugcuaccgcgccugcuucuacgucgagcucauccgcggccgccccaaggaggacaaggucugguggaccuccaacuccaucgucuccaugugcuccuccaccgaguuccucggccaguggaacuggcccgacggcgccaagaucgaguacuuccucuga

SEQ ID NO: 119753 - RNA, 1413 nt, Artificial Sequence
  derived and/or modified CDS sequence (opt2) from neuraminidase__InfluenzaA__AGQ81973
augaaccccaaccagaagauccucugcaccuccgccaccgccaucaucaucggcgccaucgccguccucaucggcaucgccaaccucggccucaacaucggccuccaccucaagcccuccugcaacugcucccacucccagcccgagaccaccaacaccucccagaccaucaucaacaacuacuacaacgagaccaacaucacccagaucuccaacaccaacauccagauggaggagcgcaccucccgcggcuucaacaaccucaccaagggccucugcaccaucaacuccuggcacaucuacggcaaggacaacgccguccgcaucggcgaguccuccgacguccucgucacccgcgagcccuacgucuccugcgaccccgacgagugccgcuucuacgcccucucccagggcaccaccauccgcggcaagcacuccaacggcaccauccacgaccgcucccaguaccgcgcccucaucuccuggccccucuccuccccccccaccgucuacaacucccgcgucgagugcaucggcugguccuccaccuccugccacgacggcaagucccgcauguccaucugcaucuccggccccaacaacaacgccuccgccgucgucugguacaaccgccgccccgucgccgagaucaacaccugggcccgcaacauccuccgcacccaggaguccgagugcgucugccacaacggcgucugccccgucgucuucaccgacggcuccgccaccggccccgccgacacccgcaucuacuacuucaaggagggcaagauccucaagugggagucccucaccggcaccgccaagcacaucgaggagugcuccugcuacggcgagcgcaccggcaucaccugcaccugccgcgacaacuggcagggcuccaaccgccccgucauccagaucgaccccgucgccaugacccacaccucccaguacaucugcucccccguccucaccgacaacccccgccccaacgaccccaacaucggcaagugcaacgaccccuaccccggcaacaacaacaacggcgucaagggcuucuccuaccucgacggcgccaacaccuggcucggccgcaccaucuccaccgccucccgcuccggcuacgagaugcucaagguccccaacgcccucaccgacgaccgcuccaagcccauccagggccagaccaucguccucaacaccgacugguccggcuacuccggcuccuucauggacuacugggccgagggcgacugcuaccgcgccugcuucuacgucgagcucauccgcggccgccccaaggaggacaaggucugguggaccuccaacuccaucgucuccaugugcuccuccaccgaguuccucggccaguggaacuggcccgacggcgccaagaucgaguacuuccucuga

SEQ ID NO: 119754 - RNA, 1413 nt, Artificial Sequence; identical to SEQ ID NO: 119734
  derived and/or modified CDS sequence (opt2) from neuraminidase__InfluenzaA__AGQ81974

SEQ ID NO: 119755 - RNA, 1398 nt, Artificial Sequence
  derived and/or modified CDS sequence (opt2) from neuraminidase__InfluenzaA__AGQ81975
augaaccccaaccagaagauccucugcaccuccgccaccgccaucaucaucggcgccaucgccguccucaucggcaucgccaaccucggccucaacaucggccuccaccucaagcccggcugcaacugcucccacucccagcccgagaccaccaacaccucccagaccaucaucaacaacuacuacaacgagaccaacaucaccaacauccagauggaggagcgcaccucccgcaacuucaacaaccucaccaaguggcucugcaccaucaacuccuggcacaucuacggcaaggacaacgccguccgcaucggcgagaacuccgacguccucgucacccgcgagcccuacgucuccugcgaccccgacgagugccgcuucuacgcccucucccagggcaccaccauccgcggcaagcacuccaacggcaccauccacgaccgcucccaguaccgcgcccucaucuccuggccccucuccuccccccccaccgucuacaacucccgcgucgagugcaucggcugguccuccaccuccugccacgacggcaagucccgcauguccaucugcaucuccggccccaacaacaacgccuccgccgucgucugguacaaccgccgccccgucgccgagaucaacaccugggcccgcaacauccuccgcacccaggaguccgagugcgucugccacaacggcgucugccccgucgucuucaccgacggcuccgccaccggccccgccgacacccgcaucuacuacuucaaggagggcaagauccucaagugggagucccucaccggcaccgccaagcacaucgaggagugcuccugcuacggcgagcgcaccggcaucaccugcaccugccgcgacaacuggcagggcuccaaccgccccgucauccagaucgaccccgucgccaugacccacaccucccaguacaucugcucccccguccucaccgacaacccccgccccgacgaccccaacaucggcaagugcaacgaccccuaccccggcaacaacaacaacggcgucaagggcuucuccuaccucgacggcgccaacaccuggcucggccgcaccaucuccaccgccucccgcuccggcuacgagaugcucaagguccccaacgcccucaccgacgaccgcuccaagcccauccagggccagaccaucguccucaacgccgacugguccggcuacuccggcuccuucauggacuacugggccgacggcgacugcuaccgcgccugcuucuacgucgagcucauccgcggccgccccaaggaggacaaggucugguggaccuccaacuccaucgucuccaugugcuccuccaccgaguuccucggccaguggaacuggcccgacggcgccaagaucgaguacuuccucuga

SEQ ID NO: 119756 - RNA, 1398 nt, Artificial Sequence
  derived and/or modified CDS sequence (opt2) from neuraminidase__InfluenzaA__AGQ81977
augaaccccaaccagaagauccucugcaccuccgccaccgccaucaucaucggcgccaucgccguccucaucggcaucgccaaccucggccucaacaucggccuccaccucaagcccggcugcaacugcucccacucccagcccgagaccaccaacaccucccagaccaucaucaacaacuacuacaacgagaccaacaucaccaacauccagauggaggagcgcaccucccgcaacuucaacaaccucaccaagggccucugcaccaucaacuccuggcacaucuacggcaaggacaacgccguccgcaucggcgaguccuccgacguccucgucacccgcgagcccuacgucuccugcgaccccgacgagugccgcuucuacgcccucucccagggcaccaccauccgcggcaagcacuccaacggcaccauccacgaccgcucccaguaccgcgcccucaucuccuggccccucuccuccccccccaccgucuacaacucccgcgucgagugcaucggcugguccuccaccuccugccacgacggcaagucccgcauguccaucugcaucuccggccccaacaacaacgccuccgccgucgucugguacaaccgccgccccgucgccgagaucaacaccugggcccgcaacauccuccgcacccaggaguccgagugcgucugccacaacggcgucugccccgucgucuucaccgacggcuccgccaccggccccgccgacacccgcaucuacuacuucaaggagggcaagauccucaagugggagucccucaccggcaccgccaagcacaucgaggagugcuccugcuacggcgagcgcaccggcaucaccugcaccugccgcgacaacuggcagggcuccaaccgccccgucauccagaucgaccccgucgccaugacccacaccucccaguacaucugcucccccguccucaccgacaacccccgccccgacgaccccaacaucggcaagugcaacgaccccuaccccggcaacaacaacaacggcgucaagggcuucuccuaccucgacggcgccaacaccuggcucggccgcaccaucuccaccgccucccgcuccggcuacgagaugcucaagguccccaacgcccucaccgacgaccgcuccaagcccauccagggccagaccaucguccucaacgccgacugguccggcuacuccggcuccuucauggacuacugggccgacggcgacugcuaccgcgccugcuucuacgucgagcucauccgcggccgccccaaggaggacaaggucugguggaccuccaacuccaucgucuccaugugcuccuccaccgaguuccucggccaguggaacuggcccgacggcgccaagaucgaguacuuccucuga

SEQ ID NO: 119757 - RNA, 1398 nt, Artificial Sequence
  derived and/or modified CDS sequence (opt2) from neuraminidase__InfluenzaA__AGQ81979
augaaccccaaccagaagauccucugcaccuccgccaccgccaucaucaucggcgccaucgccgcccucaucggcaucgccaaccucggccucaacaucggccuccaccucaagcccggcugcaacugcucccacucccagcccgagaccaccaacaccucccagaccaucaucaacaacuacuacaacgagaccaacaucaccaacauccagauggaggagcgcaccucccgcaacuucaacaaccucaccaagggccucugcaccaucaacuccuggcacaucuacggcaaggacaacgccguccgcaucggcgaguccuccgacguccucgucacccgcgagcccuacgucuccugcgaccccgacgagugccgcuucuacgcccucucccagggcaccaccauccgcggcaagcacuccaacggcaccauccacgaccgcucccaguaccgcgcccucaucuccuggccccucuccuccccccccaccgucuacaacucccgcgucgagugcaucggcugguccuccaccuccugccacgacggcaagucccgcauguccaucugcaucuccggccccaacaacaacgccuccgccgucgucugguacaaccgccgccccgucgccgagaucaacaccugggcccgcaacauccuccgcacccaggaguccgagugcgucugccacaacggcgucugccccgucgucuucaccgacggcuccgccaccggccccgccgacacccgcaucuacuacuucaaggagggcaagauccucaagugggagucccucaccggcaccgccaagcacaucgaggagugcuccugcuacggcgagcgcaccggcaucaccugcaccugccgcgacaacuggcagggcuccaaccgccccgucauccagaucgaccccgucgccaugacccacaccucccaguacaucugcucccccguccucaccgacaacccccgccccgacgaccccaacaucggcaagugcaacgaccccuaccccggcaacaacaacaacggcgucaagggcuucuccuaccucgacggcgccaacaccuggcucggccgcaccaucuccaccgccucccgcuccggcuacgagaugcucaagguccccaacgcccucaccgacgaccgcuccaagcccauccagggccagaccaucguccucaacgccgacugguccggcuacuccggcuccuucauggacuacugggccgacggcgacugcuaccgcgccugcuucuacgucgagcucauccgcggccgccccaaggaggacaaggucugguggaccuccaacuccaucgucuccaugugcuccuccaccgaguuccucggccaguggaacuggcccgacggcgccaagaucgaguacuuccucuga

SEQ ID NO: 119758 - RNA, 1398 nt, Artificial Sequence; identical to SEQ ID NO: 119756
  derived and/or modified CDS sequence (opt2) from neuraminidase__InfluenzaA__AGQ81980

SEQ ID NO: 119759 - RNA, 1350 nt, Artificial Sequence
  derived and/or modified CDS sequence (opt2) from neuraminidase__InfluenzaA__AGQ88501
augaaccccaaccagaagaucgucaccaucggcuccaucugcauggucaucggcaucgucucccucaugcuccagaucggcaacaugaucuccaucugggucucccacuccauccagaccggcaaccagcaccagaccgagcccauccgcaacaccaacuuccucaccgagaacgccgucgccuccgucgcccucuccggcaacuccucccucugccccauccgcggcugggccguccacuccaaggacaacuccauccgcaucggcuccaagggcgacgucuucgucauccgcgagcccuucaucuccugcuccaaccucgagugccgcaccuucuuccucacccagggcgcccuccucaacgacaagcacuccaacggcaccgucaaggaccgcuccccccaccgcacccucauguccugccccaucggcgaggcccccucccccuacaacucccgcuucgaguccgucgccugguccgccuccgccugccacgacggcaucuccuggcucaccaucggcaucuccggccccgacaacggcgccgucgccguccucaaguacaacggcaucaucaccgacaccaucaaguccuggcgcaacaacauccuccgcacccaggaguccgagugcaccugcgucaacggcuccugcuucaccgucaugaccgacggccccuccaacggccaggccuccuacaagaucuucaagaucgagaagggcaaggucgucaaguccgucgagcucaacgcccccaacuaccacuacgaggagugcuccugcuaccccgacgccggcgagaucaucugcgucugccgcgacaacuggcacggcuccaaccgccccugggucuccuucaaccagaaccucgaguaccagaucggcuacaucugcuccggcgucuucggcgacaacccccgccccaacgacggcgagggcuccugcggccccgucucccccaacggcgccuacggcgucaagggcuucuccuucaaguacggcaacggcgucuggaucggccgcaccaaguccacccacucccgcuccggcuucgagaugaucugggaccccaacggcuggaccggcaccgacuccgaguucuccaugaagcaggacaucgucgccaucaccgacugguccggcuacuccggcuccuucguccagcaccccgagcucaccggccucgacugcauccgccccugcuucugggucgagcucauccgcggccgccccaaggaguccaccaucuggaccuccggcuccuccaucuccuucugcggcgucaacuccgacaccgucuccugguccuggcccgacggcgccgagcuccccuucaccaucgacaaguga

SEQ ID NO: 119760 - RNA, 1401 nt, Artificial Sequence; identical to SEQ ID NO: 119638
  derived and/or modified CDS sequence (opt2) from neuraminidase__InfluenzaA__AGR33906

SEQ ID NO: 119761 - RNA, 1401 nt, Artificial Sequence
  derived and/or modified CDS sequence (opt2) from neuraminidase__InfluenzaA__AGR33908
augaaccccaaccagaagaucaccgccaucggcuccgucucccucaucaucgccaucaucugccuccucaugcagaucgccauccucaccaccaccaugacccuccacuuccgccagaacgagugcuccaaccccuccaacaaccaggucaugcccugcgagcccaucaucaucgagcgcaacaccguccaccucaacuccaccaccaucgagcgcgagaucugccccaaggucgccgaguacaagaacugguccaagccccagugccagaucaccggcuucgcccccuucuccaaggacaacuccauccgccucuccgccggcggcgacaucugggucacccgcgagcccuacgucuccugcucccccgacaagugcuaccaguucgcccucggccagggcaccacccucaagaacaagcacuccaacggcaccacccacgaccgcaccccccaccgcacccuccucaugaacgagcucggcguccccuuccaccucggcaccaagcaggucugcaucgccugguccuccuccuccugcuacgacggcaaggccuggcuccacaucugcgucaccggcgacgacaagaacgccaccgccuccaucaucuacgacggcaugcucgucgacuccaucggcuccugguccaagaacauccuccgcacccaggaguccgagugcgucugcaucaacggcaccugcgccgucgucaugaccgacggcuccgccuccggcgaggccgacacccgcauccucuucauccgcgagggcaagaucaucaacaucuccccccucuccggcuccgcccagcacgucgaggagugcuccugcuacccccgcuaccccgagguccgcugcgucugccgcgacaacuggaagggcuccaaccgccccaucaucuacaucaacauggucgacuacuccaucgagucccgcuacgucugcuccggccucgucggcgacaccccccgcaacgacgacuccaccuccuccuccaacugccgcgaccccaacaacgagcgcggcgcccccggcgucaagggcugggccuucgacgacggcaacgacgucuggaugggccgcaccaucaagaacggcucccgcuccggcuacgagaccuuccgcgucaucaacggcuggaccauggccaacuccaagucccagaucaaccgccaggucaucgucgacuccgacaacugguccggcuacuccggcaucuucuccgucgagggcaagaagugcaucaaccgcugcuucuacgucgagcucauccgcggccgcccccaggagccccgcgucugguggaccuccaacuccaucaucgucuucugcggcaccuccggcaccuacggcaccggcuccuggcccgacggcgccgacaucaacuucaugcccaucuga

SEQ ID NO: 119762 - RNA, 1401 nt, Artificial Sequence
  derived and/or modified CDS sequence (opt2) from neuraminidase__InfluenzaA__AGR33910
augaaccccaaccagaagaucaucgccaucggcuccgucucccucaccaucgccaucaucugcuuccucaugcagaucgccauccucaccaccaccaugacccuccacuucaagcagaacgagugcuccaagcccuccaacaaccaggucguccccugcgagcccauccucaucgagcgcaacaccguccaccucaacuccaccaccaucgagaaggaggucugccccaaggucgccgaguacaagaacugguccaagccccagugccagaucaccggcuucgcccccuucuccaaggacaacuccauccgccucuccgccggcggcgacaucugggucacccgcgagcccuacgucuccugcuccuucggcaagugcuaccaguucgcccucggccagggcaccacccucaagaacaagcacuccaacggcaccacccacgaccgcaccccccaccgcacccuccucaugaacgagcucggcguccccuuccaccucggcaccaagcaggucugcaucgccugguccuccuccuccugcuacgacggcaaggccuggcuccacaucugcgucaccggcgacgacaagaacgccaccgccuccaucaucuacgacggcaugcucgucgacuccaucggcuccugguccaagaacauccuccgcacccaggaguccgagugcgucugcaucaacggcaccugcgccgucgucaugaccgacggcuccgccuccggcaaggccgacacccgcauccucuucauccgcgagggcaagaucaucaacauccgcccccucuccggcuccgcccagcacgucgaggagugcuccugcuacccccgcuaccccgagguccgcugcgucugccgcgacaacuggaagggcuccaaccgccccguccucuacaucaacauggccgacuacuccgucgaguccuccuacgucugcuccggccucgucggcgacaccccccgcaacgacgacuccuccuccuccuccaacugccgcgaccccaacaacgagcgcggcgcccccggcgucaagggcugggccuucgacgacggcaacgacgucuggaugggccgcaccauccgcaacgacucccgcuccggcuacgagaccuuccgcgucgucaacggcuggaccaccgccaacuccaagucccagaucaaccgccaggucaucgucgacuccgagaacugguccggcuacuccggcaucuucuccgucgagggcaagaacugcaucaaccgcugcuucuacgucgagcucauccgcggccgcccccaggagccccgcgucugguggaccuccaacuccaucaucgucuucugcggcaccuccggcaccuacggcaccggcuccuggcccgacggcgccaacaucaacuucaugcccaucuga

SEQ ID NO: 119763 - RNA, 1401 nt, Artificial Sequence
  derived and/or modified CDS sequence (opt2) from neuraminidase__InfluenzaA__AGR33911
augaaccccaaccagaagaucaucgccaucggcuccgucucccucaccaucgccaucaucugcuuccucaugcagaucgccauccucaccaccaccaugacccuccacuucaagcagaacgagugcuccaaccccuccaacaaccaggucguccccugcgagcccauccucaucgagcgcaacaccguccaccucaacuccaccaccaucgagaaggaggucugccccaaggucgccgaguacaagaacugguccaagccccagugccagaucaccggcuucgcccccuucuccaaggacaacuccauccgccucuccgccggcggcgacaucugggucacccgcgagcccuacgucuccugcucccucggcaagugcuaccaguucgcccucggccagggcaccacccucaagaacaaccacuccaacggcaccacccacgaccgcaccccccaccgcacccuccucaugaacgagcucggcguccccuuccaccucggcaccaagcaggucugcaucgccugguccuccuccuccugcuacgacggcaaggccuggcuccacaucugcgucaccggcgacgacaagaacgccaccgccuccaucaucuacgacggcaugcucgucgacuccaucggcuccugguccaagaacauccuccgcacccaggaguccgagugcgucugcaucaacggcaccugcgccgucgucaugaccgacggcuccgccuccggcaaggccgacacccgcauccucuucauccgcgagggcaagaucaucaacaucuccccccucuccggcuccgcccagcacgucgaggagugcuccugcuacccccgcuaccccgagguccgcugcgucugccgcgacaacuggaagggcuccaaccgccccguccucuacaucaacauggccgacuacuccaucgaguccuccuacgucugcuccggccucgucggcgacaccccccgcaacgacgacuccuccuccuccuccaacugccgcgaccccaacaacgagcgcggcgcccccggcgucaagggcugggccuucgacgacggcaacgacgucuggaugggccgcaccauccgcaacaacucccgcuccggcuacgagaccuuccgcgucgucaacggcuggaccaccgccaacuccaagucccagaucaaccgccaggucaucgucgacuccgagaacugguccggcuacuccggcaucuucuccgucgagggcaagaacugcaucaaccgcugcuucuacgucgagcucauccgcggccgcccccaggagccccgcgucugguggaccuccaacuccaucaucgucuucugcggcaccuccggcaccuacggcaccggcuccuggcccgacggcgccaacaucaacuucaugcccaucuga

SEQ ID NO: 119764 - RNA, 1356 nt, Artificial Sequence; identical to SEQ ID NO: 119679
  derived and/or modified CDS sequence (opt2) from neuraminidase__InfluenzaA__AGR33912

SEQ ID NO: 119765 - RNA, 1356 nt, Artificial Sequence; identical to SEQ ID NO: 119709
  derived and/or modified CDS sequence (opt2) from neuraminidase__InfluenzaA__AGR33913

SEQ ID NO: 119766 - RNA, 1356 nt, Artificial Sequence; identical to SEQ ID NO: 119679
  derived and/or modified CDS sequence (opt2) from neuraminidase__InfluenzaA__AGR33915

SEQ ID NO: 119767 - RNA, 1356 nt, Artificial Sequence
  derived and/or modified CDS sequence (opt2) from neuraminidase__InfluenzaA__AGR33916
augaaccccaaccagaagcucuucgccuccuccggcgucgccaucgcccucuccguccucaaccuccucaucggccucuccaacgucggccucaacgucucccuccaccucaaggagaccggccccaagcaggaggagaaccucaccugcaugaccaccaaggagaccgagcucggcacccccuccuaccuccuccucaacaagucccucugcaacgucgagggcugggucgucaucgccaaggacaacgccguccgcuucggcgaguccgagcagaucaucaucacccgcgagcccuacgucuccugcgaccccaacggcugcaagauguacgcccuccaccagggcaccaccauccgcaacaagcacuccaacggcaccauccacgaccgcaccgccuuccgcggccucaucuccaccccccucggcaccccccccaccgucuccaacuccgacuucaucugcgucggcugguccuccaccaccugccacgacggcaucggccgcaugaccaucugcauccagggcaacaacgacaacgccaccgccaccgucuacuacaaccgccgccucaccaccaccaucaagaccugggcccgcaacauccuccgcacccaggaguccgagugcgucugccacaacggcaccugcgccgucgucaugaccgacggcuccgccuccucccaggcccacaccaaggucauguacuuccacaagggccucgucgucaaggaggaggcccucaagggcuccgccaagcacaucgaggagugcuccugcuacggccacaaccagaaggucaccugcgucugccgcgacaacuggcagggcgccaaccgccccaucaucgagaucgacaugaacacccucgagcacaccucccgcuacgucugcaccggcauccucaccgacaccucccgccccggcgacaagcccaccggcgacugcuccaaccccaucaccggcucccccggcgcccccggcgucaagggcuucggcuuccucaacggcgacaacaccuggcucggccgcaccaucuccccccgcucccgcuccggcuucgagaugcucaagauccccaacgccggcaucgaccccaacucccgcaucgccgagcgccaggagaucgucgacaacuccaacugguccggcuacuccggcuccuucaucgacuacuggaacgacaacuccgagugcuacaaccccugcuucuacgucgagcucauccgcggccgccccgaggaggccaaguacgucugguggaccuccaacucccucaucgcccucugcggcucccccuuccccgucggcuccggcuccuuccccgacggcgcccagauccaguacuucuccuga

SEQ ID NO: 119768 - RNA, 1356 nt, Artificial Sequence; identical to SEQ ID NO: 119709
  derived and/or modified CDS sequence (opt2) from neuraminidase__InfluenzaA__AGR33917

SEQ ID NO: 119769 - RNA, 1356 nt, Artificial Sequence; identical to SEQ ID NO: 119679
  derived and/or modified CDS sequence (opt2) from neuraminidase__InfluenzaA__AGR33918

SEQ ID NO: 119770 - RNA, 1398 nt, Artificial Sequence; identical to SEQ ID NO: 119756
  derived and/or modified CDS sequence (opt2) from neuraminidase__InfluenzaA__AGR33919

SEQ ID NO: 119771 - RNA, 1413 nt, Artificial Sequence
  derived and/or modified CDS sequence (opt2) from neuraminidase__InfluenzaA__AGR45094
augaaccccaaccagaagaucaucaccaucggcuccaucuccauggccaucggcaucaucucccucauccuccagaucggcaacaucaucuccaucugggccucccacuccauccagaccggcucccagaaccacaccggcaucugcaaccagcgcaucaucaccuacgagaacuccaccugggucaaccagaccuacgucaacaucaacaacaccaacgucgucgccggcaaggacaagaccuccgucacccucgccggcaacuccucccucugccccauccgcggcugggccaucuacaccaaggacaacuccauccgcaucggcuccaagggcgacgucuucgucauccgcgagcccuucaucuccugcucccaccucgagugccgcaccuucuuccucacccagggcgcccuccucaacgacaagcacuccaacggcaccgucaaggaccgcucccccuaccgcgcccucauguccugcccccucggcgaggcccccucccccuacaacucccgcuucgaguccgucgccugguccgccuccgccugccacgacggcaugggcuggcucaccaucggcaucuccggccccgacaacggcgccgucgccguccucaaguacaacggcaucaucaccgagaccaucaaguccuggaagaagcgcauccuccgcacccaggaguccgagugcgucugcgucaacggcuccugcuucaccaucaugaccgacggccccuccaacggccccgccuccuaccgcaucuucaagaucgagaagggcaagaucaccaaguccaucgagcucgacgcccccaacuaccacuacgaggagugcuccugcuaccccgacaccggcaccgucaugugcgucugccgcgacaacuggcacggcuccaaccgccccugggucuccuucaaccagaaccucgacuaccagaucggcuacaucugcuccggcgucuucggcgacaacccccgccccaaggacggcgagggcuccugcaaccccgucaccgucgacggcgccgacggcgucaagggcuucuccuaccgcuacggcaacggcgucuggaucggccgcaccaaguccaacuccucccgcaagggcuucgagaugaucugggaccccaacggcuggaccgacaccgacuccgacuucuccgucaagcaggacgucguccccaugaccgacugguccggcuacuccggcuccuucguccagcaccccgagcucaccggccucgacugcaugcgccccugcuucugggucgagcucauccgcggccgcccccgcgagaacaccaccaucuggaccuccggcuccuccaucuccuucugcggcgucaacuccgacaccgccaacugguccuggcccgacgacgccgagcucccccucaccaucgacaaguga

SEQ ID NO: 119772 - RNA, 1413 nt, Artificial Sequence; identical to SEQ ID NO: 114966
  derived and/or modified CDS sequence (opt2) from neuraminidase__InfluenzaA__AGR49780

SEQ ID NO: 119773 - RNA, 1410 nt, Artificial Sequence
  derived and/or modified CDS sequence (opt2) from neuraminidase__InfluenzaA__AGR49804
augaaccccaaccagaagaucaucaccaucggcuccgucugcaugaccaucggcauggccaaccucauccuccagaucggcaacaucaucuccaucuggaucucccacuccauccagcucggcaaccagaaccagaucgagaccugcaaccaguccgucaucaccuacgagaacaacaccugggucaaccagaccuacgucaacaucuccaacaccaacuucgccgccggccaguccgucgucuccgucaagcucaccggcaacuccucccucugccccgucuccggcugggccaucuacuccaaggacaacuccguccgcaucggcuccaagggcgacgucuucgucauccgcgagcccuucaucuccugcuccccccucgagugccgcaccuucuuccucacccagggcgcccuccucaacgacaagcacuccaacggcaccaucaaggaccgcucccccuaccgcacccucauguccugccccaucggcgagguccccucccccuacaacucccgcuucgaguccgucgccugguccgccuccgccugccacgacggcaucaacuggcucaccaucggcaucuccggccccgacaacggcgccgucgccguccucaaguacaacggcaucaucaccgacaccaucaaguccuggcgcaacaacauccuccgcacccaggaguccgagugcgccugcgucaacggcuccugcuucaccgucaugaccgacggccccuccaacggccaggccuccuacaagaucuuccgcaucgagaagggcaagaucgucaaguccgucgagaugaacgcccccaacuaccacuacgaggagugcuccugcuaccccgacuccuccgagaucaccugcgucugccgcgacaacuggcacggcuccaaccgccccugggucuccuucaaccagaaccucgaguaccagaucggcuacaucugcuccggcaucuucggcgacaacccccgccccaacgacaagaccggcuccugcggccccgucuccuccaacggcgccaacggcgucaagggcuucuccuucaaguacggcaacggcgucuggaucggccgcaccaaguccaucuccucccgcaacggcuucgagaugaucugggaccccaacggcuggaccggcaccgacaacaacuucuccaucaagcaggacaucgucggcaucaacgagugguccggcuacuccggcuccuucguccagcaccccgagcucaccggccucgacugcauccgccccugcuucugggucgagcucauccgcggccgccccaaggagaacaccaucuggaccuccggcuccuccaucuccuucugcggcgucaacuccgacaccgucggcugguccuggcccgacggcgccgagcuccccuucaccaucgacaaguga

SEQ ID NO: 119774 - RNA, 1413 nt, Artificial Sequence; identical to SEQ ID NO: 114966
  derived and/or modified CDS sequence (opt2) from neuraminidase__InfluenzaA__AGR49820

SEQ ID NO: 119775 - RNA, 1410 nt, Artificial Sequence; identical to SEQ ID NO: 112126
  derived and/or modified CDS sequence (opt2) from neuraminidase__InfluenzaA__AGR49832

SEQ ID NO: 119776 - RNA, 1413 nt, Artificial Sequence; identical to SEQ ID NO: 114966
  derived and/or modified CDS sequence (opt2) from neuraminidase__InfluenzaA__AGR49844

SEQ ID NO: 119777 - RNA, 1413 nt, Artificial Sequence; identical to SEQ ID NO: 114966
  derived and/or modified CDS sequence (opt2) from neuraminidase__InfluenzaA__AGR49856

SEQ ID NO: 119778 - RNA, 1413 nt, Artificial Sequence; identical to SEQ ID NO: 114966
  derived and/or modified CDS sequence (opt2) from neuraminidase__InfluenzaA__AGR49868

SEQ ID NO: 119779 - RNA, 1410 nt, Artificial Sequence; identical to SEQ ID NO: 112764
  derived and/or modified CDS sequence (opt2) from neuraminidase__InfluenzaA__AGR49880

SEQ ID NO: 119780 - RNA, 1410 nt, Artificial Sequence; identical to SEQ ID NO: 114520
  derived and/or modified CDS sequence (opt2) from neuraminidase__InfluenzaA__AGR49891

SEQ ID NO: 119781 - RNA, 1410 nt, Artificial Sequence
  derived and/or modified CDS sequence (opt2) from neuraminidase__InfluenzaA__AGR49903
augaaccccaaccagaagaucaucaccaucggcuccgucucccucaccaucuccaccaucugcuucuucaugcagaucgccauccucaucaccaccgucacccuccacuucaagcaguacgaguucaacuccccccccaacaaccaggucaugcucugcgagcccaccaucaucgagcgcaacaucaccgagaucgucuaccucaccaacaccaccaucgagaaggagaucugccccaagcucgccgaguaccgcaacugguccaagccccagugcgacaucaccggcuucgcccccuucuccaaggacaacuccauccgccucuccgccggcggcgacaucugggucacccgcgagcccuacgucuccugcgaccccgacaagugcuaccaguucgcccucggccagggcaccacccucaacaacguccacuccaacgacaccguccacgaccgcacccccuaccgcacccuccucaugaacgagcucggcguccccuuccaccucggcaccaagcaggucugcaucgccugguccuccuccuccugccacgacggcaaggccuggcuccacgucugcaucaccggcgacgacaagaacgccaccgccuccuucaucuacaacggccgccucgucgacuccaucgucuccugguccaaggagauccuccgcacccaggaguccgagugcgucugcaucaacggcaccugcaccgucgucaugaccgacggcuccgccuccggcaaggccgacaccaagauccucuucaucgaggagggcaagaucguccacaccuccacccucuccggcuccgcccagcacgucgaggagugcuccugcuacccccgcuaccccggcguccgcugcgucugccgcgacaacuggaagggcuccaaccgccccaucgucgacaucaacaucaaggaccacuccaucgucuccuccuacgucugcuccggccucgucggcgacaccccccgcaagaacgacuccuccuccuccggccacugccucgaccccaacaacgaggagggcggccacggcgucaagggcugggccuucgacgacggcaacgacgucuggaugggccgcaccaucuccgagaagucccgccucggcuacgagaccuucaaggucaucgagggcugguccaaccccaaguccaagcuccagaucaaccgccaggucaucgucgaccgcggcaaccgcuccggcuacuccggcaucuucuccgucgagggcaaguccugcaucaaccgcugcuucuacgucgagcucauccgcggccgcaaggaggagaccgagguccucuggaccuccaacuccaucgucgucuucugcggcaccuccggcaccuacggcaccggcuccuggcccgacggcgccgacaucaaccucaugcccaucuga

SEQ ID NO: 119782 - RNA, 1410 nt, Artificial Sequence; identical to SEQ ID NO: 112126
  derived and/or modified CDS sequence (opt2) from neuraminidase__InfluenzaA__AGR49915

SEQ ID NO: 119783 - RNA, 1410 nt, Artificial Sequence; identical to SEQ ID NO: 112126
  derived and/or modified CDS sequence (opt2) from neuraminidase__InfluenzaA__AGR49927

SEQ ID NO: 119784 - RNA, 1410 nt, Artificial Sequence
  derived and/or modified CDS sequence (opt2) from neuraminidase__InfluenzaA__AGR49939
augaaccccaacaagaagaucaucaccaucggcuccgucucccucaccaucuccaccaucugcuucuucaugcagaucgccauccucaucaccaccgucacccuccacuucaagcaguacgaguucaacuccccccccaacaaccaggucaugcucugcgagcccaccaucaucgagcgcaacaucaccgagaucgucuaccucaccaacaccaccaucgagaaggagaucugccccaagcucgccgaguaccgcaacugguccaagccccagugcgacaucaccggcuucgcccccuucuccaaggacaacuccauccgccucuccgccggcggcgacaucugggucacccgcgagcccuacgucuccugcgaccccgacaagugcuaccaguucgcccucggccagggcaccacccucaacaacguccacuccaacgacaccguccgcgaccgcacccccuaccgcacccuccucaugaacgagcucggcguccccuuccaccucggcaccaagcaggucugcaucgccugguccuccuccuccugccacgacggcaaggccuggcuccacgucugcaucaccggcgacgacaagaacgccaccgccuccuucaucuacaacggccgccucgucgacuccaucgucuccugguccaaggagauccuccgcacccaggaguccgagugcgucugcaucaacggcaccugcaccgucgucaugaccgacggcuccgccuccggcaaggccgacaccaagauccucuucaucgaggagggcaagaucguccacaccuccacccucuccggcuccgcccagcacgucgaggagugcuccugcuacccccgcuaccccggcguccgcugcgucugccgcgacaacuggaagggcuccaaccgccccaucgucgacaucaacaucaaggaccacuccaucgucuccuccuacgucugcuccggccucgucggcgacaccccccgcaagaacgacuccuccuccuccggccacugccucgaccccaacaacgaggagggcggccacggcgucaagggcugggccuucgacgacggcaacgacgucuggaugggccgcaccaucuccgagaagucccgccucggcuacgagaccuucaaggucaucgagggcugguccaaccccaaguccaagcuccagaucaaccgccaggucaucgucgaccgcggcaaccgcuccggcuacuccggcaucuucuccgucgagggcaaguccugcaucaaccgcugcuucuacgucgagcucauccgcggccgcaaggaggagaccgagguccucuggaccuccaacuccaucgucgucuucugcggcaccuccggcaccuacggcaccggcuccuggcccgacggcgccgacaucaaccucaugcccaucuga

SEQ ID NO: 119785 - RNA, 1410 nt, Artificial Sequence; identical to SEQ ID NO: 112721
  derived and/or modified CDS sequence (opt2) from neuraminidase__InfluenzaA__AGR49951

SEQ ID NO: 119786 - RNA, 1410 nt, Artificial Sequence
  derived and/or modified CDS sequence (opt2) from neuraminidase__InfluenzaA__AGR49963
augaaccccaacaagaagaucaucaccaucggcuccgucucccucaccaucuccaccaucugcuucuucaugcagaucgccauccucaucaccaccgucacccuccacuucaagcaguacgaguucaacuccccccccaacaaccaggucaugcucugcgagcccaccaucaucgagcgcaacaucaccgagaucgucuaccucaccaacaccaccaucgagaaggagaucugccccaagcucgccgaguaccgcaacugguccaagccccagugcgacaucaccggcuucgcccccuucuccaaggacaacuccauccgccucuccgccggcggcgacaucugggucacccgcgagcccuacgucuccugcgaccccgacaagugcuaccaguucgcccucggccagggcaccacccucaacaacguccacuccaacgacaccguccgcgaccgcacccccuaccgcacccuccucaugaacgagcucggcguccccuuccaccucggcaccaagcaggucugcaucgccugguccuccuccuccugccacgacggcaaggccuggcuccacgucugcaucaccggcgacgacaagaacgccaccgccuccuucaucuacaacggccgccucgucgacuccaucgucuccugguccaaggagauccuccgcacccaggaguccgagugcgucugcaucaacggcaccugcaccgucgucaugaccgacggcuccgccuccggcaaggccgacaccaagauccucuucaucgaggagggcaagaucguccacaccuccacccucuccggcuccgcccagcacgucgaggagugcuccugcuacccccgcuaccccggcguccgcugcgucugccgcgacaacuggaagggcuccaaccgccccaucgucgacaucaacaucaaggaccacuccaucgucuccuccuacgucugcuccggccucgucggcgacaccccccgcaagaacgacuccuccuccuccggccacugccucgaccccaacaacgaggagggcggccacggcgucaagggcugggccuucgacgacggcaacgacgucuggaugggccgcaccaucuccaagaagucccgccucggcuacgagaccuucaaggucaucgagggcugguccaaccccaaguccaagcuccagaucaaccgccaggucaucgucgaccgcggcaaccgcuccggcuacuccggcaucuucuccgucgagggcaaguccugcaucaaccgcugcuucuacgucgagcucauccgcggccgcaaggaggagaccgagguccucuggaccuccaacuccaucgucgucuucugcggcaccuccggcaccuacggcaccggcuccuggcccgacggcgccgacaucaaccucaugcccaucuga

SEQ ID NO: 119787 - RNA, 1410 nt, Artificial Sequence; identical to SEQ ID NO: 112764
  derived and/or modified CDS sequence (opt2) from neuraminidase__InfluenzaA__AGR49975

SEQ ID NO: 119788 - RNA, 1413 nt, Artificial Sequence; identical to SEQ ID NO: 114966
  derived and/or modified CDS sequence (opt2) from neuraminidase__InfluenzaA__AGR49986

SEQ ID NO: 119789 - RNA, 1413 nt, Artificial Sequence; identical to SEQ ID NO: 114966
  derived and/or modified CDS sequence (opt2) from neuraminidase__InfluenzaA__AGR49998

SEQ ID NO: 119790 - RNA, 1410 nt, Artificial Sequence; identical to SEQ ID NO: 112764
  derived and/or modified CDS sequence (opt2) from neuraminidase__InfluenzaA__AGR50010

SEQ ID NO: 119791 - RNA, 1410 nt, Artificial Sequence; identical to SEQ ID NO: 112764
  derived and/or modified CDS sequence (opt2) from neuraminidase__InfluenzaA__AGR50021

SEQ ID NO: 119792 - RNA, 1410 nt, Artificial Sequence; identical to SEQ ID NO: 112774
  derived and/or modified CDS sequence (opt2) from neuraminidase__InfluenzaA__AGR50032

SEQ ID NO: 119793 - RNA, 1410 nt, Artificial Sequence
  derived and/or modified CDS sequence (opt2) from neuraminidase__InfluenzaA__AGR50043
augaaccccaaccagaagaucaucaccaucggcuccgucucccucaccaucuccaccaucugcuucuucaugcagaucgccauccucaucaccaccgucacccuccacuucaagcaguacgaguucaacuccccccccaacaaccaggucaugcucugcgagcccaccaucaucgagcgcaacaucaccgagaucgucuaccucaccaacaccaccaucgagaaggagaucugccccaagcucgccgaguaccgcaacugguccaagccccagugcgacaucaccggcuucgcccccuucuccaaggacaacuccauccgccucuccgccggcggcgacaucugggucacccgcgagcccuacgucuccugcgaccccgacaagugcuaccaguucgcccucggccagggcaccacccucaacaacguccacuccaacaacaccguccgcgaccgcacccccuaccgcacccuccucaugaacgagcucggcguccccuuccaccucggcaccaagcaggucugcaucgccugguccuccuccuccugccacgacggcaaggccuggcuccacgucugcaucaccggcgacgacaagaacgccaccgccuccuucaucuacaacggccgccucgucgacuccgucgucuccugguccaaggacauccuccgcacccaggaguccgagugcgucugcaucaacggcaccugcaccgucgucaugaccgacggcuccgccuccggcaaggccgacaccaagauccucuucaucgaggagggcaagaucguccacaccuccacccucuccggcuccgcccagcacgucgaggagugcuccugcuacccccgcuaccccggcguccgcugcgucugccgcgacaacuggaagggcuccaaccgccccaucgucgacaucaacaucaaggaccacuccaucgucuccuccuacgucugcuccggccucgucggcgacaccccccgcaagaacgacuccuccuccuccucccacugccucgaccccaacaacgaggagggcggccacggcgucaagggcugggccuucgacgacggcaacgacgucuggaugggccgcaccaucuccgagaagucccgccucggcuacgagaccuucaaggucaucgagggcugguccaaccccaaguccaagcuccagaucaaccgccaggucaucgucgaccgcggcaaccgcuccggcuacuccggcaucuucuccgucgagggcaaguccugcaucaaccgcugcuucuacgucgagcucauccgcggccgcaaggaggagaccgagguccucuggaccuccaacuccaucgucgucuucugcggcaccuccggcaccuacggcaccggcuccuggcccgacggcgccgaccucaaccucaugcccaucuga

SEQ ID NO: 119794 - RNA, 1410 nt, Artificial Sequence; identical to SEQ ID NO: 112764
  derived and/or modified CDS sequence (opt2) from neuraminidase__InfluenzaA__AGR50055

SEQ ID NO: 119795 - RNA, 1410 nt, Artificial Sequence
  derived and/or modified CDS sequence (opt2) from neuraminidase__InfluenzaA__AGR50066
augaaccccaaccagaagaucaucaccaucggcuccgucugcaugaccaucggcauggccaaccucauccuccagaucggcaacaucaucuccaucuggaucucccacuccauccagcucggcaaccagaaccagaucgagaccugcaaccaguccgucaucaccuacgagaacaacaccugggucaaccagaccuacgucaacaucuccaacaccaacuucgccgccggccaguccgucgucuccgucaagcucgccggcaacuccucccucugccccgucuccggcugggccaucuacuccaaggacaacuccguccgcaucggcuccaagggcgacgucuucgucauccgcgagcccuucaucuccugcuccccccucgagugccgcaccuucuuccucacccagggcgcccuccucaacgacaagcacuccaacggcaccaucaaggaccgcucccccuaccgcacccucauguccugccccaucggcgagguccccucccccuacaacucccgcuucgaguccgucgccugguccgccuccgccugccacgacggcaucaacuggcucaccaucggcaucuccggccccgacaacggcgccgucgccguccucaaguacaacggcaucaucaccgacaccaucaaguccuggcgcaacaacauccuccgcacccaggaguccgagugcgccugcgucaacggcuccugcuucaccgucaugaccgacggccccuccaacggccaggccuccuacaagaucuucaagaucgagaagggcaagaucgucaaguccgucgagaugaacgcccccaacuaccacuacgaggagugcuccugcuaccccgacuccuccgagaucaccugcgucugccgcgacaacuggcacggcuccaaccgccccugggucuccuucaaccagaaccucgaguaccagaucggcuacaucugcuccggcaucuucggcgacaacccccgccccaacgacaagaccggcuccugcggccccgucuccuccaacggcgccaacggcgucaagggcuucuccuucaaguacggcaacggcgucuggaucggccgcaccaaguccaucuccucccgcaacggcuucgagaugaucugggaccccaacggcuggaccggcaccgacaacaacuucuccaucaagcaggacaucgucggcaucaacgagugguccggcuacuccggcuccuucguccagcaccccgagcucaccggccucgacugcauccgccccugcuucugggucgagcucauccgcggccgccccaaggagaacaccaucuggaccuccggcuccuccaucuccuucugcggcgucaacuccgacaccgucggcugguccuggcccgacggcgccgagcuccccuucaccaucgacaaguga

SEQ ID NO: 119796 - RNA, 1410 nt, Artificial Sequence; identical to SEQ ID NO: 112764
  derived and/or modified CDS sequence (opt2) from neuraminidase__InfluenzaA__AGR50077

SEQ ID NO: 119797 - RNA, 1410 nt, Artificial Sequence; identical to SEQ ID NO: 112764
  derived and/or modified CDS sequence (opt2) from neuraminidase__InfluenzaA__AGR50088

SEQ ID NO: 119798 - RNA, 1410 nt, Artificial Sequence; identical to SEQ ID NO: 112764
  derived and/or modified CDS sequence (opt2) from neuraminidase__InfluenzaA__AGR50099

SEQ ID NO: 119799 - RNA, 1410 nt, Artificial Sequence; identical to SEQ ID NO: 112764
  derived and/or modified CDS sequence (opt2) from neuraminidase__InfluenzaA__AGR50110

SEQ ID NO: 119800 - RNA, 1410 nt, Artificial Sequence
  derived and/or modified CDS sequence (opt2) from neuraminidase__InfluenzaA__AGR50121
augaaccccaaccagaagaucaucaccaucggcuccgucugcaugaccaucggcauggccaaccucauccuccagaucggcaacaucaucuccaucuggaucucccacuccauccagcucggcaaccagaaccagaucgagaccugcaaccaguccgucaucaccuacgagaacaacaccugggucaaccagaccuacgucaacaucuccaacaccaacuucgccgccggccaguccgucgucuccgucaagcucgccggcaacuccucccucugccccgucuccggcugggccaucuacuccaaggacaacuccguccgcaucggcuccaagggcgacgucuucgucauccgcgagcccuucaucuccugcuccccccucgagugccgcaccuucuuccucacccagggcgcccuccucaacgacaagcacuccaacggcaccaucaaggaccgcucccccuaccgcacccucauguccugccccaucggcgagguccccucccccuacaacucccgcuucgaguccgucgccugguccgccuccgccugccacgacggcaucaacuggcucaccaucggcaucuccggccccgacaacggcgccgucgccguccucaaguacaacggcaucaucaccgacaccaucaaguccuggcgcaacaacauccuccgcacccaggaguccgagugcgccugcgucaacggcuccugcuucaccgucaugaccgacggccccuccaacggccaggccuccuacaagaucuuccgcaucgagaagggcaagaucgucaaguccgucgagaugaacgcccccaacuaccacuacgaggagugcuccugcuaccccgacuccuccgagaucaccugcgucugccgcgacaacuggcacggcuccaaccgccccugggucuccuucaaccagaaccucgaguaccagaucggcuacaucugcuccggcaucuucggcgacaacccccgccccaacgacaagaccggcuccugcggccccguccccuccaacggcgccaacggcgucaagggcuucuccuucaaguacggcaacggcgucuggaucggccgcaccaaguccaucuccucccgcaacggcuucgagaugaucugggaccccaacggcuggaccggcaccgacaacaacuucuccaucaagcaggacaucgucggcaucaacgagugguccggcuacuccggcuccuucguccagcaccccgagcucaccggccucgacugcauccgccccugcuucugggucgagcucauccgcggccgccccaaggagaacaccaucuggaccuccggcuccuccaucuccuucugcggcgucaacuccgacaccgucggcugguccuggcccgacggcgccgagcuccccuucaccaucgacaaguga

SEQ ID NO: 119801 - RNA, 1410 nt, Artificial Sequence
  derived and/or modified CDS sequence (opt2) from neuraminidase__InfluenzaA__AGR50132
augaaccccaaccagaagaucaucaccaucggcuccgucugcaugaccaucggcauggccaaccucauccuccagaucggcaacaucaucuccaucuggaucucccacuccauccagcucggcaaccagaaccagaucgagaccugcaaccaguccgucaucaccuacgagaacaacaccugggucaaccagaccuacgucaacaucuccaacaccaacuucgccgccggccaguccgucgucuccgucaagcucgccggcaacuccucccucugccccgucuccggcugggccaucuacuccaaggacaacuccguccgcaucggcuccaagggcgacgucuucgucauccgcgagcccuucaucuccugcuccccccucgagugccgcaccuucuuccucacccagggcgcccuccucaacgacaagcacuccaacggcaccaucaaggaccgcucccccuaccgcacccucauguccugccccaucggcgagguccccucccccuacaacucccgcuucgaguccgucgccugguccgccuccgccugccacgacggcaucaacuggcucaccaucggcaucuccggccccgacaacggcgccgucgccguccucaaguacaacggcaucaucaccgacaccaucaaguccuggcgcaacaacauccuccgcacccaggaguccgagugcgccugcgccaacggcuccugcuucaccgucaugaccgacggccccuccaacggccaggccuccuacaagaucuuccgcaucgagaagggcaagaucgucaaguccgucgagaugaacgcccccaacuaccacuacgaggagugcuccugcuaccccgacuccuccgagaucaccugcgucugccgcgacaacuggcacggcuccaaccgccccugggucuccuucaaccagaaccucgaguaccagaucggcuacaucugcuccggcaucuucggcgacaacccccgccccaacgacaagaccggcuccugcggccccgucuccuccaacggcgccaacggcgucaagggcuucuccuucaaguacggcaacggcgucuggaucggccgcaccaaguccaucuccucccgcaacggcuucgagaugaucugggaccccaacggcuggaccggcaccgacaacaacuucuccaucaagcaggacaucgucggcaucaacgagugguccggcuacuccggcuccuucguccagcaccccgagcucaccggccucgacugcauccgccccugcuucugggucgagcucauccgcggccgccccaaggagaacaccaucuggaccuccggcuccuccaucuccuucugcggcgucaacuccgacaccgucggcugguccuggcccgacggcgccgagcuccccuucaccaucgacaaguga

SEQ ID NO: 119802 - RNA, 1410 nt, Artificial Sequence; identical to SEQ ID NO: 112764
  derived and/or modified CDS sequence (opt2) from neuraminidase__InfluenzaA__AGR50143

SEQ ID NO: 119803 - RNA, 1410 nt, Artificial Sequence; identical to SEQ ID NO: 112764
  derived and/or modified CDS sequence (opt2) from neuraminidase__InfluenzaA__AGR50154

SEQ ID NO: 119804 - RNA, 1413 nt, Artificial Sequence; identical to SEQ ID NO: 114966
  derived and/or modified CDS sequence (opt2) from neuraminidase__InfluenzaA__AGR50165

SEQ ID NO: 119805 - RNA, 1410 nt, Artificial Sequence; identical to SEQ ID NO: 112764
  derived and/or modified CDS sequence (opt2) from neuraminidase__InfluenzaA__AGR50177

SEQ ID NO: 119806 - RNA, 1410 nt, Artificial Sequence; identical to SEQ ID NO: 112764
  derived and/or modified CDS sequence (opt2) from neuraminidase__InfluenzaA__AGR50188

SEQ ID NO: 119807 - RNA, 1410 nt, Artificial Sequence; identical to SEQ ID NO: 112764
  derived and/or modified CDS sequence (opt2) from neuraminidase__InfluenzaA__AGR50199

SEQ ID NO: 119808 - RNA, 1410 nt, Artificial Sequence; identical to SEQ ID NO: 112764
  derived and/or modified CDS sequence (opt2) from neuraminidase__InfluenzaA__AGR50210

SEQ ID NO: 119809 - RNA, 1410 nt, Artificial Sequence; identical to SEQ ID NO: 112764
  derived and/or modified CDS sequence (opt2) from neuraminidase__InfluenzaA__AGR50221

SEQ ID NO: 119810 - RNA, 1410 nt, Artificial Sequence
  derived and/or modified CDS sequence (opt2) from neuraminidase__InfluenzaA__AGR50232
augaaccccaaccagaagaucaucaccaucggcuccgucugcaugaccaucggcauggccaaccucauccuccagaucggcaacaucaucuccaucuggaucucccacuccauccagcucggcaaccagaaccagaucgagaccugcaaccaguccgucaucaccuacgagaacaacaccugggucaaccagaccuacgucaacaucuccaacaccaacuucgccgccggccaguccgucgucuccgucaagcucgccggcaacuccucccucugccccgucuccggcugggccaucuacuccaaggacaacuccguccgcaucggcuccaagggcgacgucuucgucauccgcgagcccuucaucuccugcuccccccucgagugccgcaccuucuuccucacccagggcgcccuccucaacgacaagcacuccaacggcaccaucaaggaccgcucccccuaccgcacccucauguccugccccaucggcgagguccccucccccuacaacucccgcuucgaguccgucgccugguccgccuccgccugccacgacggcaucaacuggcucaccaucggcaucuccggccccgacaacggcgccgucgccguccucaaguacaacggcaucaucaccgacaccaucaaguccuggcgcaacaacauccuccgcacccaggaguccgagugcgccugcgucaacggcuccugcuucaccgucaugaccgacggccccaacaacggccaggccuccuacaagaucuuccgcaucgagaagggcaagaucgucaaguccgucgagaugaacgcccccaacuaccacuacgaggagugcuccugcuaccccgacuccuccgagaucaccugcgucugccgcgacaacuggcacggcuccaaccgccccugggucuccuucaaccagaaccucgaguaccagaucggcuacaucugcuccggcaucuucggcgacaacccccgccccaacgacaagaccggcuccugcggccccgucuccuccaacggcgccaacggcgucaagggcuucuccuucaaguacggcaacggcgucuggaucggccgcaccaaguccaucuccucccgcaacggcuucgagaugaucugggaccccaacggcuggaccggcaccgacaacaacuucuccaucaagcaggacaucgucggcaucaacgagugguccggcuacuccggcuccuucguccagcaccccgagcucaccggccucgacugcauccgccccugcuucugggucgagcucauccgcggccgccccaaggagaacaccaucuggaccuccggcuccuccaucuccuucugcggcgucaacuccgacaccgucggcugguccuggcccgacggcgccgagcuccccuucaccaucgacaaguga

SEQ ID NO: 119811 - RNA, 1410 nt, Artificial Sequence; identical to SEQ ID NO: 112764
  derived and/or modified CDS sequence (opt2) from neuraminidase__InfluenzaA__AGR50243

SEQ ID NO: 119812 - RNA, 1410 nt, Artificial Sequence; identical to SEQ ID NO: 112764
  derived and/or modified CDS sequence (opt2) from neuraminidase__InfluenzaA__AGR50254

SEQ ID NO: 119813 - RNA, 1410 nt, Artificial Sequence; identical to SEQ ID NO: 112764
  derived and/or modified CDS sequence (opt2) from neuraminidase__InfluenzaA__AGR50265

SEQ ID NO: 119814 - RNA, 1410 nt, Artificial Sequence
  derived and/or modified CDS sequence (opt2) from neuraminidase__InfluenzaA__AGR50276
augaaccccaaccagaagaucaucaccaucggcuccgucugcaugaccaucggcauggccaaccucauccuccagaucggcaacaucaucuccaucuggaucucccacuccauccagcucggcaaccagaaccagaucgagaccugcaaccaguccgucaucaccuacgagaacaacaccugggucaaccagaccuacgucaacaucuccaacaccaacuucgccgccgagcaguccgucgucuccgucaagcucgccggcaacuccucccucugccccgucuccggcugggccaucuacuccaaggacaacuccguccgcaucggcuccaagggcgacgucuucgucauccgcgagcccuucaucuccugcuccccccucgagugccgcaccuucuuccucacccagggcgcccuccucaacgacaagcacuccaacggcaccaucaaggaccgcucccccuaccgcacccucauguccugccccaucggcgagguccccucccccuacaacucccgcuucgaguccgucgccugguccgccuccgccugccacgacggcaucaacuggcucaccaucggcaucuccggccccgacaacggcgccgucgccguccucaaguacaacggcaucaucaccgacaccaucaaguccuggcgcaacaacauccuccgcacccaggaguccgagugcgccugcgucaacggcuccugcuucaccgucaugaccgacggccccuccaacggccaggccuccuacaagaucuuccgcaucgagaagggcaagaucgucaaguccgucgagaugaacgcccccaacuaccacuacgaggagugcuccugcuaccccgacuccuccgagaucaccugcgucugccgcgacaacuggcacggcuccaaccgccccugggucuccuucaaccagaaccucgaguaccagaucggcuacaucugcuccggcaucuucggcgacaacccccgccccaacgacaagaccggcuccugcggccccgucuccuccaacggcgccaacggcgucaagggcuucuccuucaaguacggcaacggcgucuggaucggccgcaccaaguccaucuccucccgcaacggcuucgagaugaucugggaccccaacggcuggaccggcaccgacaacaacuucuccaucaagcaggacaucgucggcaucaacgagugguccggcuacuccggcuccuucguccagcaccccgagcucaccggccucgacugcauccgccccugcuucugggucgagcucauccgcggccgccccaaggagaacaccaucuggaccuccggcuccuccaucuccuucugcggcgucaacuccgacaccgucggcugguccuggcccgacggcgccgagcuccccuucaccaucgacaaguga

SEQ ID NO: 119815 - RNA, 1410 nt, Artificial Sequence; identical to SEQ ID NO: 112764
  derived and/or modified CDS sequence (opt2) from neuraminidase__InfluenzaA__AGR50287

SEQ ID NO: 119816 - RNA, 1410 nt, Artificial Sequence
  derived and/or modified CDS sequence (opt2) from neuraminidase__InfluenzaA__AGR50298
augaaccccaaccagaagaucaucaccaucggcuccgucugcaugaccaucggcauggccaaccucauccuccagaucggcaacaccaucuccaucuggaucucccacuccauccagcccggcaaccagaaccagaucgagaccugcaaccaguccgucaucaccuacgagaacaacaccugggucaaccagaccuacgucaacaucuccaacaccaacuucgccgccggccaguccgucgucuccgucaagcucgccggcaacuccucccucugccccgucuccggcugggccaucuacuccaaggacaacuccauccgcaucggcuccaagggcgacgucuucgucauccgcgagcccuucaucuccugcuccccccucgagugccgcaccuucuuccucacccagggcgcccuccucaacgacaagcacuccaacggcaccaucaaggaccgcucccccuaccgcacccucauguccugccccaucggcgagguccccucccccuacaacucccgcuucgaguccgucgccugguccgccuccgccugccacgacggcaucaacuggcucaccaucggcaucuccggccccgacaacggcgccgucgccguccucaaguacaacggcaucaucaccgacaccaucaaguccuggcgcaacaacauccuccgcacccaggaguccgagugcgccugcgucaacggcuccugcuucaccgucaugaccgacggccccuccgacggccaggccuccuacaagaucuuccgcaucgagaagggcaagaucgucaaguccgucgagaugaacgcccccaacuaccacuacgaggagugcuccugcuaccccgacuccuccgagaucaccugcgucugccgcgacaacuggcacggcuccaaccgccccugggucuccuucaaccagaaccucgaguaccagaucggcuacaucugcuccggcaucuucggcgacaacccccgccccaacgacaagaccggcuccugcggccccgucuccuccaacggcgccaacggcgucaagggcuucuccuucaaguacggcaacggcgucuggaucggccgcaccaaguccaucuccucccgcaacggcuucgagaugaucugggaccccaacggcuggaccggcaccgacaacaacuucuccaucaagcaggacaucgucggcaucaacgagugguccggcuacuccggcuccuucguccagcaccccgagcucaccggccucgacugcauccgccccugcuucugggucgagcucauccgcggccgccccaaggagaacaccaucuggaccuccggcuccuccaucuccuucugcggcgucaacuccgacaccgucggcugguccuggcccgacggcgccgagcuccccuucaccaucgacaaguga

SEQ ID NO: 119817 - RNA, 1410 nt, Artificial Sequence; identical to SEQ ID NO: 112764
  derived and/or modified CDS sequence (opt2) from neuraminidase__InfluenzaA__AGR50309

SEQ ID NO: 119818 - RNA, 1410 nt, Artificial Sequence; identical to SEQ ID NO: 112764
  derived and/or modified CDS sequence (opt2) from neuraminidase__InfluenzaA__AGR50320

SEQ ID NO: 119819 - RNA, 1410 nt, Artificial Sequence; identical to SEQ ID NO: 112764
  derived and/or modified CDS sequence (opt2) from neuraminidase__InfluenzaA__AGR50331

SEQ ID NO: 119820 - RNA, 1410 nt, Artificial Sequence
  derived and/or modified CDS sequence (opt2) from neuraminidase__InfluenzaA__AGR50342
augaaccccaaccagaagaucaucaccaucggcuccgucugcaugaccaucggcauggccaaccucauccuccagaucggcaacaucaucuccaucuggaucucccacuccauccagcucggcaaccagaaccagaucgagaccugcaaccaguccgucaucaccuacgagaacaacaccugggucaaccagaccuacgucaacaucuccaacaccaacuucgccgccggccaguccgucaucuccgucaagcucgccggcaacuccucccucugccccgucuccggcugggccaucuacuccaaggacaacuccguccgcaucggcuccaagggcgacgucuucgucauccgcgagcccuucaucuccugcuccccccucgagugccgcaccuucuuccucacccagggcgcccuccucaacgacaagcacuccaacggcaccaucaaggaccgcucccccuaccgcacccucauguccugccccaucggcgagguccccucccccuacaacucccgcuucgaguccgucgccugguccgccuccgccugccacgacggcaucaacuggcucaccaucggcaucuccggccccgacaacggcgccgucgccguccucaaguacaacggcaucaucaccgacaccaucaaguccuggcgcaacaacauccuccgcacccaggaguccgagugcgccugcgucaacggcuccugcuucaccgucaugaccgacggccccuccaacggccaggccuccuacaagaucuuccgcaucgagaagggcaagaucgucaaguccgucgagaugaacgcccccaacuaccacuacgaggagugcuccugcuaccccgacuccuccgagaucaccugcgucugccgcgacaacuggcacggcuccaaccgccccugggucuccuucaaccagaaccucgaguaccagaucggcuacaucugcuccggcaucuucggcgacaacccccgccccaacgacaagaccggcuccugcggccccgucuccuccaacggcgccaacggcgucaagggcuucuccuucaaguacggcaacggcgucuggaucggccgcaccaaguccaucuccucccgcaacggcuucgagaugaucugggaccccaacggcuggaccggcaccgacaacaacuucuccaucaagcaggacaucgucggcaucaacgagugguccggcuacuccggcuccuucguccagcaccccgagcucaccggccucgacugcauccgccccugcuucugggucgagcucauccgcggccgccccaaggagaacaccaucuggaccuccggcuccuccaucuccuucugcggcgucaacuccgacaccgucggcugguccuggcccgacggcgccgagcuccccuucaccaucgacaaguga

SEQ ID NO: 119821 - RNA, 1410 nt, Artificial Sequence; identical to SEQ ID NO: 112764
  derived and/or modified CDS sequence (opt2) from neuraminidase__InfluenzaA__AGR50353

SEQ ID NO: 119822 - RNA, 1413 nt, Artificial Sequence; identical to SEQ ID NO: 114966
  derived and/or modified CDS sequence (opt2) from neuraminidase__InfluenzaA__AGR50364

SEQ ID NO: 119823 - RNA, 1410 nt, Artificial Sequence
  derived and/or modified CDS sequence (opt2) from neuraminidase__InfluenzaA__AGR55170
augaaccccaaccagaagaucaucaccaucggcuccgucucccucaccaucuccaccaucugcuucuucaugcagaucgccauccucaucaccaccgucacccuccacuucaagcaguacgaguucaacuccccccccaacaaccaggucaugcucugcgagcccaccaucaucgagcgcaacaucaccgagaucgucuaccucaccaacaccaccaucgagaaggagaucugccccaagcucgccgaguaccgcaacugguccaagccccagugcgacaucaccggcuucgcccccuucuccaaggacaacuccauccgccucuccgccggcggcgacaucugggucacccgcgagcccuacgucuccugcgaccccgacaagugcuaccaguucgcccucggccagggcaccacccucaacaacguccacuccaacgacaccguccgcgaccgcacccccuaccgcacccuccucaugaacgagcucggcguccccuuccaccucggcaccaagcaggucugcaucgccugguccuccuccuccugccacgacggcaaggccuggcuccacgucugcaucaccggcgacgacaagaacgccaccgccuccuucaucuacaacggccgccucgucgacuccaucgucuccugguccaaggagauccuccgcacccaggaguccgagugcgucugcaucaacggcaccugcaccgucgucaugaccgacggcuccgccuccggcaaggccgacaccaagauccucuucaucgaggagggcaagaucguccacaccuccacccucuccggcuccgcccagcacgucgaggagugcuccugcuacccccgcuaccccggcguccgcugcgucugccgcgacaacuggaagggcuccaaccgccccaucgucgacaucaacaucaaggaccacuccaucgucuccuccuacgucugcuccggccucgucggcgacaccccccgcaagaacgacuccuccuccuccucccacugccucgaccccaacaacgaggagggcggccacggcgucaagggcugggccuucgacgacggcaacgacgucuggaugggccgcaccaucuccgagaagucccgccucggcuacgagaccuucaaggucaucgagggcugguccaaccccaacuccaagcuccagaucaaccgccagaucaucgucgaccgcggcaaccgcuccggcuacuccggcaucuucuccgucgagggcaaguccugcaucaaccgcugcuucuacgucgagcucauccgcggccgcaaggaggagaccgagguccucuggaccuccaacuccaucgucgucuucugcggcaccuccggcaccuacggcaccggcuccuggcccgacggcgccgacaucaaccucaugcccaucuga

SEQ ID NO: 119824 - RNA, 1410 nt, Artificial Sequence; identical to SEQ ID NO: 110181
  derived and/or modified CDS sequence (opt2) from neuraminidase__InfluenzaA__AGR55180

SEQ ID NO: 119825 - RNA, 1410 nt, Artificial Sequence; identical to SEQ ID NO: 110181
  derived and/or modified CDS sequence (opt2) from neuraminidase__InfluenzaA__AGR55181

SEQ ID NO: 119826 - RNA, 1410 nt, Artificial Sequence; identical to SEQ ID NO: 110181
  derived and/or modified CDS sequence (opt2) from neuraminidase__InfluenzaA__AGR55183

SEQ ID NO: 119827 - RNA, 1410 nt, Artificial Sequence
  derived and/or modified CDS sequence (opt2) from neuraminidase__InfluenzaA__AGR55184
augaaccccaaccagaagaucaucaccaucggcuccgucucccucaccaucgccaccaucugcuuccucaugcagaucgccauccucgucaccaccgucacccuccacuucaagcagcacgagugcaacuccccccccaagaaccaggucaugcucugcgagcccaccaucaucgagcgcaacaucaccgagaucgucuaccucaccaacaccaccaucgagaaggagaucugccccaagcucgccgaguaccgcaacugguccaagccccagugcaacaucaccggcuucgcccccuucuccaaggacaacuccauccgccucuccgccggcggcgacaucugggucacccgcgagcccuacgucuccugcgaccccgacaagugcuaccaguucgcccucggccagggcaccacccucaacaacggccacuccaacgacaccguccacgaccgcacccccuaccgcacccuccucaugaacgagcucggcguccccuuccaccucggcacccgccaggucugcaucgccugguccuccuccuccugccacgacggcaaggccuggcuccacgucugcgucaccggcgacgacaagaacgccaccgccuccuucaucuacaacggccgccucgucgacuccaucggcuccugguccaagaagauccuccgcacccaggaguccgagugcgucugcaucaacggcaccugcaccgucgucaugaccgacggcuccgccuccggcaaggccgacaccaagauccucuucaucgaggagggcaagaucguccacaucuccacccucuccggcuccgcccagcacgucgaggagugcuccugcuacccccgcuaccccggcguccgcugcgucugccgcgacaacuggaagggcuccaaccgccccaucgucgacaucaacgucaaggacuacuccaucgucuccuccuacgucugcuccggccucgucggcgacaccccccgcaagaacgacuccuucuccuccucccacugccucgaccccaacaacgaggagggcggccacggcgucaagggcugggccuucgacgacggcaacgacgucuggaugggccgcaccaucuccgagaagcuccgcuccggcuacgagaccuucaaggucaucgagggcugguccaagcccaacuccaagcuccagaucaaccgccaggucaucgucgagcgcggcaaccgcuccggcuacuccggcaucuucuccgucgagggcaaguccugcaucaaccgcugcuucuacgucgagcucauccgcggccgcaaggaggagaccgaggucugguggaccuccaacuccaucgucgucuucugcggcaccuccggcaccuacggcaccggcuccuggcccgacggcgccgacaucaaccucaugcccaucuga

SEQ ID NO: 119828 - RNA, 1410 nt, Artificial Sequence
  derived and/or modified CDS sequence (opt2) from neuraminidase__InfluenzaA__AGR55185
augaaccccaaccagaagaucaucaccaucggcuccgucucccucaccaucgccaccaucugcuuccucaugcagaucgccauccucgucaccaccgucacccuccacuucaagcagcacgagugcaacuccccccccaagaaccaggucaugcucugcgagcccaccaucaucgagcgcaacaucaccgagaucgucuaccucaccaacaccaccaucgagaaggagaucugccccaagcucgccgaguaccgcaacugguccaagccccagugcaacaucaccggcuucgcccccuucuccaaggacaacuccauccgccucuccgccggcggcgacaucugggucacccgcgagcccuacgucuccugcgaccccgacaagugcuaccaguucgcccucggccagggcaccacccucaacaacggccacuccaacgacaccguccacgaccgcacccccuaccgcacccuccucaugaacgagcucggcguccccuuccaccucggcacccgccaggucugcaucgccugguccuccuccuccugccacgacggcaaggccuggcuccacgucugcgucaccggcgacgacaagaacgccaccgccuccuucaucuacaacggccgccucgucgacuccaucggcuccugguccaagaagauccuccgcacccaggaguccgagugcgucugcaucaacggcaccugcaccgucgucaugaccgacggcuccgccuccggcaaggccgacaccaagauccucuucaucgaggagggcaagaucguccacaucuccacccucuccggcuccgcccagcacgucgaggagugcuccugcuacccccgcuaccccggcguccgcugcgucugccgcgacaacuggaagggcuccaaccgccccaucgucgacaucaacgucaaggacuacuccaucgucuccuccuacgucugcuccggccucgucggcgacaccccccgcaagaacgacuccuucuccuccucccacugccucgaccccaacaacgaggagggcggccacggcgucaagggcugggccuucgacgacggcaacgacgucuggaugggccgcaccaucuccgagaagcuccgcuccggcuacgagaccuucaaggucaucgagggcugguccaagcccaacuccaagcuccagaucaaccgccaggucaucgucgagcgcggcaaccgcuccggcuacuccggcaucuucuccgucgagggcaaguccugcaucaaccgcugcuucuacgucgagcucauccgcggccgcaaggaggagaccgaggucugguggaccuccaacuccaucgucgucuucugcggcaccucccgcaccuacggcaccggcuccuggcccgacggcgccgacaucaaccucaugcccaucuga

SEQ ID NO: 119829 - RNA, 1410 nt, Artificial Sequence
  derived and/or modified CDS sequence (opt2) from neuraminidase__InfluenzaA__AGR55186
augaaccccaaccagaagaucaucaccaucggcuccgucucccucaccaucuccaccaucugcuucuucaugcagaucgccauccucaucaccaccgucacccuccacuucaagcaguacgaguucaacuccccccccaacaaccaggucaugcucugcgagcccaccaucaucgagcgcaacaucaccgagaucgucuaccucaccaacaccaccaucgagaaggagaucugccccaagcucgccgaguaccgcaacugguccaagccccagugcgacaucaccggcuucgcccccuucuccaaggacaacuccauccgccucuccgccggcggcgacaucugggucacccgcgagcccuacgucuccugcgaccccgacaagugcuaccaguucgcccucggccagggcaccacccucaacaacguccacuccaacgacaccguccacgaccgcacccccuaccgcacccuccucaugaacgagcucggcguccccuuccaccucggcaccaagcaggucugcaucgccugguccuccuccuccugccacgacggcaaggccuggcuccacgucugcgucaccggcgacgacaagaacgccaccgccuccuucaucuacaacggccgccucgucgacuccaucgucuccugguccaagaagauccuccgcacccaggaguccgagugcgucugcaucaacggcaccugcaccgucgucaugaccgacggcuccgccuccggcaaggccgacaccaagauccucuucaucgaggagggcaagaucguccacaccuccacccucuccggcuccgcccagcacgucgaggagugcuccugcuacccccgcuaccccggcguccgcugcgucugccgcgacaacuggaagggcuccaaccgccccaucgucgacaucaacaucaaggacuacuccaucgucuccuccuacgucugcuccggccucgucggcgacaccccccgcaagaacgacuccuccuccuccucccacugccucgagcccaacaacgaggagggcggccacggcgucaagggcugggccuucgacgacggcaacgacgucuggaugggccgcaccaucuccgagaagcuccgcuccggcuacgagaccuucaaggucaucgagggcugguccaaccccaacuccaagcuccagaucaaccgccaggucaucgucgaccgcggcaaccgcuccggcuacuccggcaucuucuccgucgagggcaaguccugcaucaaccgcugcuucuacgucgagcucauccgcggccgcaagcaggagaccgagguccucuggaccuccaacuccaucgucgucuucugcggcaccuccggcaccuacggcaccggcuccuggcccgacggcgccgacaucaaccucaugcccaucuga

SEQ ID NO: 119830 - RNA, 1410 nt, Artificial Sequence; identical to SEQ ID NO: 110181
  derived and/or modified CDS sequence (opt2) from neuraminidase__InfluenzaA__AGR55187

SEQ ID NO: 119831 - RNA, 1410 nt, Artificial Sequence; identical to SEQ ID NO: 110750
  derived and/or modified CDS sequence (opt2) from neuraminidase__InfluenzaA__AGR55192

SEQ ID NO: 119832 - RNA, 1410 nt, Artificial Sequence
  derived and/or modified CDS sequence (opt2) from neuraminidase__InfluenzaA__AGR55195
augaaccccaaccagaagaucaucaccaucggcuccgucucccucaccaucuccaccaucugcuucuucaugcagaucgccauccucaucaccaccgucacccuccacuucaagcaguacgaguucaacuccccccccaacaaccaggucaugcucugcgagcccaccaucaucgagcgcaacaucaccgagaucgucuaccucaccaacaccaccaucgagaaggagaucugccccaagcucgccgaguaccgcaacugguccaagccccagugcgacaucaccggcuucgcccccuucuccaaggacaacuccauccgccucuccgccggcggcgacaucugggucacccgcgagcccuacgucuccugcgaccccgacaagugcuaccaguucgcccucggccagggcaccacccucaacaacguccacuccaacgacaccguccacgaccgcacccccuaccgcacccuccucaugaacgagcucggcguccccuuccaccucggcaccaagcaggucugcaucgccugguccuccuccuccugccacgacggcaaggccuggcuccacgucugcgucaccggcgacgacaagaacgccaccgccuccuucaucuacaacggccgccucgucgacuccaucgucuccugguccaaggagauccuccgcacccaggaguccgagugcgucugcaucaacggcaccugcaccgucgucaugaccgacggcuccgccuccggcaaggccgacaccaagauccucuucaucgaggagggcaagaucguccacaccuccacccucuccggcuccgcccagcacgucgaggagugcuccugcuacccccgcuaccccggcguccgcugcgucugccgcgaccacuggaagggcuccaaccgccccaucgucgacaucaacaucaaggacuacuccaucgucuccuccuacgucugcuccggccucgucggcgacaccccccgcaagaacgacuccuccuccuccucccacugccucgaccccaacaacgaggagggcggccacggcgucaagggcugggccuucgacgacggcaacgacgucuggaugggccgcaccaucuccgagaagcuccgccucggcuacgagaccuucaaggucaucgagggcugguccaaccccaacuccaagcuccagaucaaccgccaggucaucgucgaccgcggcaaccgcuccggcuacuccggcaucuucuccgucgagggcaaguccugcaucaaccgcugcuucuacgucgagcucauccgcggccgcaaggaggagaccgagguccucuggaccuccaacuccaucgucgucuucugcggcaccuccggcaccuacggcaccggcuccuggcccgacggcgccgacaucaaccucaugcccaucuga

SEQ ID NO: 119833 - RNA, 1410 nt, Artificial Sequence
  derived and/or modified CDS sequence (opt2) from neuraminidase__InfluenzaA__AGR55204
augaaccccaaccagaagaucaucaccaucggcuccgucucccucaccaucuccaccaucugcuucuucaugcagaucgccauccucaucaccaccgucacccuccacuucaagcaguacgaguucaacuccccccccaacaaccaggucaugcucugcgagcccaccaucaucgagcgcaacaucaccgagaucgucuaccucaccaacaccaccaucgagaaggagaucugccccaagcucgccgaguaccgcaacugguccaagccccagugcgacaucaccggcuucgcccccuucuccaaggacaacuccauccgccucuccgccggcggcgacaucugggucacccgcgagcccuacgucuccugcgaccccgacaagugcuaccaguucgcccucggccagggcaccacccucaacaacguccacuccaacgacaccguccgcgaccgcacccccuaccgcacccuccucaugaacgagcucggcguccccuuccaccucggcaccaagcaggucugcaucgccugguccuccuccuccugccacgacggcaaggccuggcuccacgucugcaucaccggcgacgacaagaacgccaccgccuccuucaucuacaacggccgccucgucgacuccaucgucuccugguccaaggagauccuccgcacccaggaguccgagugcgucugcaucaacggcaccugcaccgucgucaugaccgacggcuccgccuccggcgaggccgacaccaagauccucuucaucgaggagggcaagaucguccacaccuccacccucuccggcuccgcccagcacgucgaggagugcuccugcuacccccgcuaccccggcguccgcugcgucugccgcgacaacuggaagggcuccaaccgccccaucgucgacaucaacaucaaggaccacuccaucgucuccuccuacgucugcuccggccucgucggcgacaccccccgcaagaacgacuccuccuccuccucccacugccucgaccccaacaacgaggagggcggccacggcgucaagggcugggccuucgacgacggcaacgacgucuggaugggccgcaccaucuccgagaagucccgccucggcuacgagaccuucaaggucaucgagggcugguccaaccccaaguccaagcuccagaucaaccgccaggucaucgucgaccgcggcaaccgcuccggcuacuccggcaucuucuccgucgagggcaaguccugcaucaaccgcugcuucuacgucgagcucauccgcggccgcaaggaggagaccgagguccucuggaccuccaacuccaucgucgucuucugcggcaccucccgcaccuacggcaccggcuccuggcccgacggcgccgacaucaaccucaugcccaucuga

SEQ ID NO: 119834 - RNA, 1410 nt, Artificial Sequence
  derived and/or modified CDS sequence (opt2) from neuraminidase__InfluenzaA__AGR55218
augaaccccaaccagaagaucaucaccaucggcuccgucucccucaccaucuccaccaucugcuucuucaugcagaucgccauccucaucaccaccgucacccuccacuucaagcaguacgaguucaacuccccccccaacaaccaggucguccucugcgagcccaccaucaucgagcgcaacaucaccgagaucgucuaccucaccaacaccaccaucgagaaggagaucugccccaagcucgccgaguaccgcaacugguccaagccccagugcgacaucaccggcuucgcccccuucuccaaggacaacuccauccgccucuccgccggcggcgacaucugggucacccgcgagcccuacgucuccugcgaccccgacaagugcuaccaguucgcccucggccagggcaccacccucaacaacguccacuccaacaacaccguccgcgaccgcacccccuaccgcacccuccucaugaacgagcucggcguccccuuccaccucggcaccaagcaggucugcaucgccugguccuccuccuccugccacgacggcaaggccuggcuccacgucugcaucaccggcgacgacaagaacgccaccgccuccuucaucuacaacggccgccucgucgacuccaucgucuccugguccaaggagauccuccgcacccaggaguccgagugcgucugcaucaacggcaccugcaccgucgucaugaccgacggcuccgccuccggcaaggccgacaccaagauccucuucaucgaggagggcaagaucguccacaccuccacccucuccggcuccgcccagcacgucgaggagugcuccugcuacccccgcuaccccggcguccgcugcgucugccgcgacaacuggaagggcuccaaccgccccaucgucgacaucaacaucaaggaccacuccaucgucuccuccuacgucugcuccggccucgucggcgacaccccccgcaagaacgacuccuccuccuccucccacugccucgaccccaacaacgaggagggcggccacggcgucaagggcugggccuucgacgacggcaacgacgucuggaugggccgcaccaucuccgagaagucccgccucggcuacgagaccuucaaggucaucgagggcugguccaaccccaaguccaagcuccagaucaaccgccaggucaucgucgaccgcggcaaccgcuccggcuacuccggcaucuucuccgucgagggcaaguccugcaucaaccgcugcuucuacgucgagcucauccgcggccgcaaggaggagaccgagguccucuggaccuccaacuccaucgucgucuucugcggcaccuccggcaccuacggcaccggcuccuggcccgacggcgccgacaucaaccucaugcccaucuga

SEQ ID NO: 119835 - RNA, 1410 nt, Artificial Sequence; identical to SEQ ID NO: 119425
  derived and/or modified CDS sequence (opt2) from neuraminidase__InfluenzaA__AGT18726

SEQ ID NO: 119836 - RNA, 1410 nt, Artificial Sequence
  derived and/or modified CDS sequence (opt2) from neuraminidase__InfluenzaA__AGT18727
augaaccccaaccagaagaucaucaccaucggcuccgucugcaugaccaucggcauggccaaccucauccuccagaucggcaacaucaucuccaucuggaucucccacuccauccagcucggcucccagaaccagaucgagaccugcaaccaguccgucaucaccuacgagaacaacaccugggucaaccagaccuacgucaacaucuccaacaccaacuucgccgccggccaguccgucgucuccgucaagcucgccggcaacuccucccucugccccgucuccggcugggccaucuacuccaaggacaacuccguccgcaucggcuccaagggcgacgucuucgucauccgcgagcccuucaucuccugcuccccccucgagugccgcaccuucuuccucacccagggcgcccuccucaacgacaagcacuccaacggcaccaucaaggaccgcucccccuaccgcacccucauguccugccccaucggcgagguccccucccccuacaacucccgcuucgaguccgucgccugguccgccuccgccugccacgacggcaucaacuggcucaccaucggcaucuccggccccgacuccggcgccgucgccguccucaaguacaacggcaucaucaccgacaccaucaaguccuggcgcaacaacauccuccgcacccaggaguccgagugcgccugcgucaacggcuccugcuucaccaucaugaccgacggccccuccgacggccaggccuccuacaagaucuuccgcaucgagaagggcaagaucgucaaguccgucgagaugaacgcccccaacuaccacuacgaggagugcuccugcuaccccgacuccuccgagaucaccugcgucugccgcgacaacuggcacggcuccaaccgccccugggucuccuucaaccagaaccucgaguaccagaucggcuacaucugcuccggcaucuucggcgacaacccccgccccaacgacaagaccggcuccugcggccccgucuccuccaacggcgccaacggcgucaagggcuucuccuucaaguacggcaacggcgucuggaucggccgcaccaaguccaucuccucccgcaagggcuucgagaugaucugggaccccaacggcugguccggcaccgacaacaacuucuccaucaagcaggacaucgucggcaucaacgagugguccggcuacuccggcuccuucguccagcaccccgagcucaccggccucgacugcauccgccccugcuucugggucgagcucauccgcggccgccccaaggagaacaccaucuggaccuccggcuccuccaucuccuucugcggcgucaacuccgacaccgucggcugguccuggcccgacggcgccgagcuccccuucaccaucgacaaguga

SEQ ID NO: 119837 - RNA, 1410 nt, Artificial Sequence; identical to SEQ ID NO: 119425
  derived and/or modified CDS sequence (opt2) from neuraminidase__InfluenzaA__AGT18728

SEQ ID NO: 119838 - RNA, 1410 nt, Artificial Sequence
  derived and/or modified CDS sequence (opt2) from neuraminidase__InfluenzaA__AGT18729
augaaccccaaccagaagaucaucaccaucggccaggucugcaugaccaucggcauggccaaccucauccuccagaucggcaacaucaucuccaucuggaucucccacuccauccagcucggcucccagaaccagaucgagaccugcaaccaguccgucaucaccuacgagaacaacaccugggucaaccagaccuacgucaacaucuccaacaccaacuucgccgccggccaguccgucgucuccgucaagcucgccggcaacuccucccucugccccgucuccggcugggccaucuacuccaaggacaacuccguccgcaucggcuccaagggcgacgucuucgucauccgcgagcccuucaucuccugcuccccccucgagugccgcaccuucuuccucacccagggcgcccuccucaacgacaagcacuccaacggcaccaucaaggaccgcucccccuaccgcacccucauguccugccccaucggcgagguccccucccccuacaacucccgcuucgaguccgucgccugguccgccuccgccugccacgacggcaucaacuggcucaccaucggcaucuccggccccgacuccggcgccgucgccguccucaaguacaacggcaucaucaccgacaccaucaaguccuggcgcaacaacauccuccgcacccaggaguccgagugcgccugcgucaacggcuccugcuucaccaucaugaccgacggccccuccgacggccaggccuccuacaagaucuuccgcaucgagaagggcaagaucgucaaguccgucgagaugaacgcccccaacuaccacuacgaggagugcuccugcuaccccgacuccuccgagaucaccugcgucugccgcgacaacuggcacggcuccaaccgccccugggucuccuucaaccagaaccucgaguaccagaucggcuacaucugcuccggcaucuucggcgacaacccccgccccaacgacaagaccggcuccugcggccccgucuccuccaacggcgccaacggcgucaagggcuucuccuucaaguacggcaacggcgucuggaucggccgcaccaaguccaucuccucccgcaagggcuucgagaugaucugggaccccaacggcuggaccggcaccgacaacaacuucuccaucaagcaggacaucgucggcaucaacgagugguccggcuacuccggcuccuucguccagcaccccgagcucaccggccucgacugcauccgccccugcuucugggucgagcucauccgcggccgccccaaggagaacaccaucuggaccuccggcuccuccaucuccuucugcggcgucaacuccgacaccgucggcugguccuggcccgacggcgccgagcuccccuucaccaucgacaaguga

SEQ ID NO: 119839 - RNA, 1410 nt, Artificial Sequence
  derived and/or modified CDS sequence (opt2) from neuraminidase__InfluenzaA__AGT18730
augaaccccaaccagaagaucaucaccaucggcuccgucugcaugaccaucggcauggccaaccucauccuccagaucggcaacaucaucuccaucuggaucucccacuccauccagcucggcaaccagucccagaucgagaccugcaaccaguccgucaucaccuacgagaacaacaccugggucaaccagaccuacgucaacaucuccaacaccaacuucgccgccggccaguccgucgucuccgucaagcucgccggcaacuccucccucugccccgucuccggcugggccaucuacuccaaggacaacuccguccgcaucggcuccaagggcgacgucuucgucauccgcgagcccuucaucuccugcuccccccucgagugccgcaccuucuuccucacccagggcgcccuccucaacgacaagcacuccaacggcaccaucaaggaccgcucccccuaccgcacccucauguccugccccaucggcgagguccccucccccuacaacucccgcuucgaguccgucgccugguccgccuccgccugccacgacggcaucaacuggcucaccaucggcaucuccggccccgacuccggcgccgucgccguccucaaguacaacggcaucaucaccgacaccaucaaguccuggcgcaacaacauccuccgcacccaggaguccgagugcgccugcgucaacggcuccugcuucaccaucaugaccgacggccccuccgacggccaggccuccuacaagaucuuccgcaucgagaagggcaagaucgucaaguccgucgagaucaacgcccccaacuaccacuacgaggagugcuccugcuaccccgacuccuccgagaucaccugcgucugccgcgacaacuggcacggcuccaaccgccccugggucuccuucaaccagaaccucgaguaccagaucggcuacaucugcuccggcaucuucggcgacaacccccgccccaacgacaagaccggcuccugcggccccgucuccuccaacggcgccaacggcgucaagggcuucuccuucaaguacggcaacggcgucuggaucggccgcaccaaguccaucuccucccgcaagggcuucgagaugaucugggaccccaacggcuggaccggcaccgacaacaacuucuccaucaagcaggacaucgucggcaucaacgagugguccggcuacuccggcuccuucguccagcaccccgagcucaccggccucgacugcauccgccccugcuucugggucgagcucauccgcggccgccccaaggagaacaccaucuggaccuccggcuccuccaucuccuucugcggcgucaacuccgacaccgucggcugguccuggcccgacggcgccgagcuccccuucaccaucgacaaguga

SEQ ID NO: 119840 - RNA, 1410 nt, Artificial Sequence; identical to SEQ ID NO: 119425
  derived and/or modified CDS sequence (opt2) from neuraminidase__InfluenzaA__AGT18731

SEQ ID NO: 119841 - RNA, 1410 nt, Artificial Sequence
  derived and/or modified CDS sequence (opt2) from neuraminidase__InfluenzaA__AGT18732
augaaccccaaccagaagaucaucaccaucggcuccgucugcaugaccaucggcauggccaaccucauccuccagaucggcaacaucaucuccaucuggaucucccacuccauccagcucggcaaccagucccagaucgagaccugcaaccaguccgucaucaccuacgagaacaacaccugggucaaccagaccuacgucaacaucuccaacaccaacuucgccgccggccaguccgucgucuccgucaagcucgccggcaacuccucccucugccccgucuccggcugggccaucuacuccaaggacaacuccguccgcaucggcuccaagggcgacgucuucgucauccgcgagcccuucaucuccugcuccccccucgagugccgcaccuucuuccucacccagggcgcccuccucaacgacaagcacuccaacggcaccaucaaggaccgcucccccuaccgcacccucauguccugccccaucggcgagguccccucccccuacaacucccgcuucgaguccgucgccugguccgccuccgccugccacgacggcaucaacuggcucaccaucggcaucuccggccccgacuccggcgccgucgccguccucaaguacaacggcaucaucaccgacaccaucaaguccuggcgcaacaacauccuccgcacccaggaguccgagugcgccugcgucaacggcuccugcuucaccaucaugaccgacggccccuccgacggccaggccuccuacaagaucuuccgcaucgagaagggcaagaucgucaaguccgucgagaugaacgcccccaacuaccacuacgaggagugcuccugcuaccccgacuccuccgagaucaccugcgucugccgcgacaacuggcacggcuccaaccgccccugggucuccuucaaccagaaccucgaguaccagaucggcuacaucugcuccggcaucuucggcgacaacccccgccccaacgacaagaccggcuccugcggccccgucuccuccaacggcgccaacggcgucaagggcuucuccuucaaguacggcaacggcgucuggaucggccgcaccaaguccaucuccucccgcaagggcuucgagaugaucugggaccccaacggcuggaccggcaccgacaacaacuucuccaucaagcaggacaucgucggcaucaacgagugguccggcuacuccggcuccuucguccagcaccccgagcucaccggccucgacugcauccgccccugcuucugggucgagcucauccgcggccgccccaaggagaacaccaucuggacccgcggcuccuccaucuccuucugcggcgucaacuccgacaccgucggcugguccuggcccgacggcgccgagcuccccuucaccaucgacaaguga

SEQ ID NO: 119842 - RNA, 1410 nt, Artificial Sequence
  derived and/or modified CDS sequence (opt2) from neuraminidase__InfluenzaA__AGT18733
augaaccccaaccagaagaucaucaccaucggcuccgucugcaugaccaucggcauggccaaccucauccuccagaucggcaacaucaucuccaucuggaucucccacuccauccagcucggcaaccagucccagaucgagaccugcaaccaguccgucaucaccuacgagaacaacaccugggucaaccagaccuacgucaacaucuccaacaccaacuucgccgccggccaguccgucgucuccgucaagcucgccggcaacuccucccucugccccgucuccggcugggccaucuacuccaaggacaacuccguccgcaucggcuccaagggcgacgucuucgucauccgcgagcccuucaucuccugcuccccccucgagugccgcaccuucuuccucacccagggcgcccuccucaacgacaagcacuccaacggcaccaucaaggaccgcucccccuaccgcacccucauguccugccccaucggcgagguccccucccccuacaacucccgcuucgaguccgucgccugguccgccuccgccugccacgacggcaucaacuggcucaccaucggcaucuccggccccgacuccggcgccgucgccguccucaaguacaacggcaucaucaccgacaccaucaaguccuggcgcaacaacauccuccgcacccaggaguccgagugcgccugcgucaacggcuccugcuucaccaucaugaccgacggccccuccgacggccaggccuccuacaagaucuuccgcaucgagaagggcaagaucgucaaguccgucgagaugaacgcccccaacuaccacuacgaggagugcuccugcuaccccgacuccuccgaguccaccugcgucugccgcgacaacuggcacggcuccaaccgccccugggucuccuucaaccagaaccucgaguaccagaucggcuacaucugcuccggcaucuucggcgacaacccccgccccaacgacaagaccggcuccugcggccccgucuccuccaacggcgccaacggcgucaagggcuucuccuucaaguacggcaacggcgucuggaucggccgcaccaaguccaucuccucccgcaagggcuucgagaugaucugggaccccaacggcuggaccggcaccgacaacaacuucuccaucaagcaggacaucgucggcaucaacgagugguccggcuacuccggcuccuucguccagcaccccgagcucaccggccucgacugcauccgccccugcuucugggucgagcucauccgcggccgccccaaggagaacaccaucuggaccuccggcuccucccgcuccuucugcggcgucaacuccgacaccgucggcugguccuggcccgacggcgccgagcuccccuucaccaucgacaaguga

SEQ ID NO: 119843 - RNA, 1410 nt, Artificial Sequence
  derived and/or modified CDS sequence (opt2) from neuraminidase__InfluenzaA__AGT18762
augaaccccaaccagaagaucaucaccaucggcuccgucucccucaccaucuccaccaucugcuucuucaugcagaucgccauccucaucaccaccgucacccuccacuucaagcaguacgaguucaacuccccccccaacaaccaggucacccucugcgagcccaucaucaucgagcgcaacaucaccgagaucgucuaccucaccaacaccaccaucgagaaggagaucugccccaagcccgccgaguaccgcaacugguccaagccccagugcggcaucaccggcuucgcccccuucuccaaggacaacuccauccgccucuccgccggcggcgacaucugggucacccgcgagcccuacgucuccugcgaccccgacaagugcuaccaguucgcccucggccagggcaccacccucaacaacguccacuccaacaacaccguccgcgaccgcacccccuaccgcacccuccucaugaacgagcucggcguccccuuccaccucggcaccaagcaggucugcaucgccugguccuccuccuccugccacgacggcaaggccuggcuccacgucugcaucaccggcgacgacaagaacgccaccgccuccuucaucuacaacggccgccucgucgacuccgucgucuccugguccaaggagauccuccgcacccaggaguccgagugcgucugcaucaacggcaccugcaccgucgucaugaccgacggcuccgccuccggcaaggccgacaccaagauccucuucaucgaggagggcaagaucguccacaccuccacccucuccggcuccgcccagcacgucgaggagugcuccugcuacccccgcuaccccggcguccgcugcgucugccgcgacaacuggaagggcuccaaccgccccaucgucgacaucaacaucaaggaccacuccaucgucuccuccuacgucugcuccggccucgucggcgacaccccccgcaagaacgacuccuccuccuccucccacugccucgaccccaacaacgaggagggcggccacggcgucaagggcugggccuucgacgacggcaacgacgucuggaugggccgcaccaucaacgagaccucccgccucggcuacgagaccuucaaggucaucgagggcugguccaaccccaaguccaagcuccagaucaaccgccaggucaucgucgaccgcggcgaccgcuccggcuacuccggcaucuucuccgucgagggcaaguccugcaucaaccgcugcuucuacgucgagcucauccgcggccgcaaggaggagaccgagguccucuggaccuccaacuccaucgucgucuucugcggcaccuccggcaccuacggcaccggcuccuggcccgacggcgccgaccucaaccucaugcccaucuga

SEQ ID NO: 119844 - RNA, 1410 nt, Artificial Sequence
  derived and/or modified CDS sequence (opt2) from neuraminidase__InfluenzaA__AGT18764
augaaccccaaccagaugaucaucaccaucggcuccgucucccucaccuccuccaccaucugcuucuucaugcagaccgccuccuucaucaccaccgucacccuccacaucaagcagcacgaguuccacuccccccccaacaaccaggucaugcucugcgagcccaccaucaucgagcgcaacaucaccgagaucgucuaccucaccaacaccaccaucgagaaggagaucugccccaagcucgccgaguaccgcaacugguccaagccccagugcgacaucaccggcuucgcccccuucuccaaggacaacuccauccgccucuccgccggcggcgacaucugggucacccgcgagcccuacgucuccugcgaccccgacaagugcuaccaguucgcccucggccagggcaccacccucaacaacguccacuccaacaacaccguccgcgaccgcacccccuaccgcacccuccucaugaacgagcucggcguccccuuccaccucggcaccaagcaggucugcaucgccugguccuccuccuccugccacgacggcaaggccuggcuccacgucugcaucaccggcgacgacaagaacgccaccgccuccuucaucuacaacggcaagcucgucgacuccgucgucuccugguccaaggagauccuccgcacccaggaguccgagugcgucugcaucaacggcaccugcaccgucgucaugaccgacggcuccgccuccggcaaggccgacaccaagauccucuucaucgaggagggcaagaucguccacaccuccacccucuccggcuccgcccagcacgucgaggagugcuccugcuacccccgcuaccccggcguccgcugcgucugccgcgacaacuggaagggcuccaaccgccccaucgucgacaucaacaugaaggaccacuccaucgucuccuccuacgucugcuccggccucgucggcgacaccccccgcaagaacgaccgcuccuccaacucccacugccucgaccccaacaacgaggagggcggccacggcgucaagggcugggccuucgacgacggcaacgacgucuggaugggccgcaccaucaacgagaccucccgccucggcuacgagaccuucaaggucaucgagggcugguccaaccccaaguccaagcuccagaucaaccgccaggucaucgucgaccgcggcaaccgcuccggcuacuccggcaucuucuccgucgagggcaaguccugcaucaaccgcugcuucuacgucgagcucauccgcggccgcaaggaggagaccgagguccucuggaccuccaacuccaucgucgucuucugcggcaccuccggcaccuacggcaccggcuccuggcccgacggcgccgaccucaaccucaugcccaucuga

SEQ ID NO: 119845 - RNA, 1410 nt, Artificial Sequence
  derived and/or modified CDS sequence (opt2) from neuraminidase__InfluenzaA__AGT18765
augaaccccaaccagaagaucaucaccaucggcuccgucucccucaccaucuccaccaucugcuucuucaugcagaucgccauccucaucaccaccgucacccuccacuucaagcagcacgaguuccacuccccccccaacaaccaggucaugcucugcgagcccaccaucaucgagcgcaacaucaccgagaucgucuaccucaccaacaccaccaucgagaaggagaucugccccaagcucgccgaguaccgcaacugguccaagccccagugcgacaucaccggcuucgcccccuucuccaaggacaacuccauccgccucuccgccggcggcgacaucugggucacccgcgagcccuacgucuccugcgaccccgacaagugcuaccaguucgcccucggccagggcaccacccucaacaacguccacuccaacaacaccguccgcgaccgcacccccuaccgcacccuccucaugaacgagcucggcguccccuuccaccucggcaccaagcaggucugcaucgccugguccuccuccuccugccacgacggcaaggccuggcuccacgucugcaucaccggcgacgacaagaacgccaccgccuccuucaucuacaacggccgccucgucgacuccgucgucuccugguccaaggagauccuccgcacccaggaguccgagugcgucugcaucaacggcaccugcaccgucgucaugaccgacggcuccgccuccggcaaggccgacaccaagauccucuucaucgaggagggcaagaucguccacaccuccacccucuccggcuccgcccagcacgucgaggagugcuccugcuacccccgcuaccccggcguccgcugcgucugccgcgacaacuggaagggcuccaaccgccccaucgucgacaucaacaugaaggaccacuccaucgucuccuccuacgucugcuccggccucgucggcgacaccccccgcaagaacgaccgcuccuccaacucccacugccucgaccccaacaacgaggagggcggccacggcgucaagggcugggccuucgacgacggcaacgacgucuggaugggccgcaccaucaacgagaccucccgccucggcuacgagaccuucaaggucaucgagggcugguccaaccccaaguccaagcuccagaucaaccgccaggucaucgucgaccgcggcaaccgcuccggcuacuccggcaucuucuccgucgagggcaaguccugcaucaaccgcugcuucuacgucgagcucauccgcggccgcaaggaggagaccgagguccucuggaccuccaacuccaucgucgucuucugcggcaccuccggcaccuacggcaccggcuccuggcccgacggcgccgaccucaaccucaugcccaucuga

SEQ ID NO: 119846 - RNA, 1410 nt, Artificial Sequence
  derived and/or modified CDS sequence (opt2) from neuraminidase__InfluenzaA__AGT18766
augaaccccaaccagaagaucaucaccaucggcuccgucucccucaccaucuccaccaucugccucuucaugcagaucgccauccucaucaccaccgucacccuccacuucaagcagcacgaguuccacuccccccccaacaaccaggucaugcucugcgagcccaccaucaucgagcgcaacaucaccgagaucgucuaccucaccaacaccaccaucgagaaggagaucugccccaagcucgccgaguaccgcaacugguccaagccccagugcgacaucaccggcuucgcccccuucuccaaggacaacuccauccgccucuccgccggcggcgacaucugggucacccgcgagcccuacgucuccugcgaccccgacaagugcuaccaguucgcccucggccagggcaccacccucaacaacguccacuccaacaacaccguccgcgaccgcacccccuaccgcacccuccucaugaacgagcucggcguccccuuccaccucggcaccaagcaggucugcaucgccugguccuccuccuccugccacgacggcaaggccuggcuccacgucugcaucaccggcgacgacaagaacgccaccgccuccuucaucuacaacggccgccucgucgacuccgucgucuccugguccaaggagauccuccgcacccaggaguccgagugcgucugcaucaacggcaccugcaccgucgucaugaccgacggcuccgccuccggcaaggccgacaccaagauccucuucaucgaggagggcaagaucguccacaccuccacccucuccggcuccgcccagcacgucgaggagugcuccugcuacccccgcuaccccggcguccgcugcgucugccgcgacaacuggaagggcuccaaccgccccaucgucgacaucaacaugaaggaccacuccaucgucuccuccuacgucugcuccggccucgucggcgacaccccccgcaagaacgaccgcuccuccaacucccacugccucgaccccaacaacgaggagggcggccacggcgucaagggcugggccuucgacgacggcaacgacgucuggaugggccgcaccaucaacgagaccucccgccucggcuacgagaccuucaaggucaucgagggcugguccaaccccaaguccaagcuccagaucaaccgccaggucaucgucgaccgcggcaaccgcuccggcuacuccggcaucuucuccgucgagggcaaguccugcaucaaccgcugcuucuacgucgagcucauccgcggccgcaaggaggagaccgagguccucuggaccuccaacuccaucgucgucuucugcggcaccuccggcaccuacggcaccggcuccuggcccgacggcgccgaccucaaccucaagcccaucuga

SEQ ID NO: 119847 - RNA, 1410 nt, Artificial Sequence
  derived and/or modified CDS sequence (opt2) from neuraminidase__InfluenzaA__AGT18767
augaaccccaaccagaagaucaucaccaucggcuccgucucccucaccaucuccaccaucugcuucuucaugcagaccgccucccucaucaccaccgucacccuccacuucaagcagcacgaguuccacuccccccccaacaaccaggucaugcucugcgagcccaccaucaucgagcgcaacaucaccgagaucgucuaccucaccaacaccaccaucgagaaggagaucugccccaagcucgccgaguaccgcaacugguccaagccccagugcgacaucaccggcuucgcccccuucuccaaggacaacuccauccgccucuccgccggcggcgacaucugggucacccgcgagcccuacgucuccugcgaccccgacaagugcuaccaguucgcccucggccagggcaccacccucaacaacguccacuccaacaacaccguccgcgaccgcacccccuaccgcacccuccucaugaacgagcucggcguccccuuccaccucggcaccaagcaggucugcaucgccugguccuccuccuccugccacgacggcaaggccuggcuccacgucugcaucaccggcgacgacaagaacgccaccgccuccuucaucuacaacggccgccucgucgacuccgucgucuccugguccaaggagauccuccgcacccaggaguccgagugcgucugcaucaacggcaccugcaccgucgucaugaccgacggcuccgccuccggcaaggccgacaccaagauccucuucaucgaggagggcaagaucguccacaccuccacccucuccggcuccgcccagcacgucgaggagugcuccugcuacccccgcuaccccggcguccgcugcgucugccgcgacaacuggaagggcuccaaccgccccaucgucgacaucaacaugaaggaccacuccaucgucuccuccuacgucugcuccggccucgucggcgacaccccccgcaagaacgaccgcuccuccaacucccacugccucgaccccaacaacgaggagggcggccacggcgucaagggcugggccuucgacgacggcaacgacgucuggaugggccgcaccaucaacgagaccucccgccucggcuacgagaccuucaaggucaucgagggcugguccaaccccaaguccaagcuccagaucaaccgccaggucaucgucgaccgcggcaaccgcuccggcuacuccggcaucuucuccgucgagggcaaguccugcaucaaccgcugcuucuacgucgagcucauccgcggccgcaaggaggagaccgagguccucuggaccuccaacuccaucgucgucuucugcggcaccuccggcaccuacggcaccggcuccuggcccgacggcgccgaccucaaccucaugcccaucuga

SEQ ID NO: 119848 - RNA, 1410 nt, Artificial Sequence
  derived and/or modified CDS sequence (opt2) from neuraminidase__InfluenzaA__AGT18768
augaaccccaaccagaagaucaucaccaucggcuccgucucccucaccaucuccaccaucugcuucuucaugcagaccgccuccuucaucaccaccgucacccuccacuucaagcaguacgaguucaacuccccccccaacaaccaggucaugcucugcgagcccaccaucaucgagcgcaacaucaccgagaucgucuaccucaccaacaccaccaucgagaaggagaucugccccaagcucgccgaguaccgcaacugguccaagccccagugcgacaucaccggcuucgcccccuucuccaaggacaacuccauccgccucuccgccggcggcgacaucugggucacccgcgagcccuacgucuccugcgaccccgacaagugcuaccaguucgcccucggccagggcaccacccucaacaacguccacuccaacaacaccguccgcgaccgcacccccuaccgcacccuccucaugaacgagcucggcguccccuuccaccucggcaccaagcaggucugcaucgccugguccuccuccuccugccacgacggcaaggccuggcuccacgucugcaucaccggcgacgacaagaacgccaccgccuccuucaucuacaacggccgccucgucgacuccgucgucuccugguccaaggagauccuccgcacccaggaguccgagugcgucugcaucaacggcaccugcaccgucgucaugaccgacggcuccgccuccggcaaggccgacaccaagauccucuucaucgaggagggcaagaucguccacaccuccacccucuccggcuccgcccagcacgucgaggagugcuccugcuacccccgcuaccccggcguccgcugcgucugccgcgacaacuggaagggcuccaaccgccccaucgucgacaucaacaugaaggaccacuccaucgucuccuccuacgucugcuccggccucgucggcgacaccccccgcaagaacgaccgcuccuccaacucccacugccucgaccccaacaacgaggagggcggccacggcgucaagggcugggccuucgacgacggcaacgacgucuggaugggccgcaccaucaacgagaccucccgccucggcuacgagaccuucaaggucaucgagggcugguccaaccccaaguccaagcuccagaucaaccgccaggucaucgucgaccgcggcaaccgcuccggcuacuccggcaucuucuccgucgagggcaaguccugcaucaaccgcugcuucuacgucgagcucauccgcggccgcaaggaggagaccgagguccucuggaccuccaacuccaucgucgucuucugcggcaccuccggcaccuacggcaccggcuccuggcccgacggcgccgaccucaaccucaugcccaucuga

SEQ ID NO: 119849 - RNA, 1410 nt, Artificial Sequence; identical to SEQ ID NO: 118182
  derived and/or modified CDS sequence (opt2) from neuraminidase__InfluenzaA__AGT18769

SEQ ID NO: 119850 - RNA, 1410 nt, Artificial Sequence
  derived and/or modified CDS sequence (opt2) from neuraminidase__InfluenzaA__AGT18770
augaaccccaaccagaagaucaucaccaucggcuccgucucccucaccaucuccaccaucugcuucuucaugcagaucgccauccucaucaccaccgucacccuccacuucaagcaguacgaguucaacuccccccccaacaacaaggucaugcucugcgagcccaccaucaucgagcgcaacaucaccgagaucgucuaccucaccaacaccaccaucgagaaggagaucugccccaagcccgccgaguaccgcaacugguccaagccccagugcggcaucaccggcuucgcccccuucuccaaggacaacuccauccgccucuccgccggcggcgacaucugggucacccgcgagcccuacgucuccugcgaccccgacaagugcuaccaguucgcccucggccagggcaccacccucaacaacguccacuccaacaacaccguccgcgaccgcacccccuaccgcacccuccucaugaacgagcucggcguccccuuccaccucggcaccaagcaggucugcaucgccugguccuccuccuccugccacgacggcaaggccuggcuccacgucugcaucaccggcgacgacaagaacgccaccgccuccuucaucuacaacggccgccucgucgacuccgucgucuccugguccaaggagauccuccgcacccaggaguccgagugcgucugcaucaacggcaccugcaccgucgucaugaccgacggcuccgccuccggcaaggccgacaccaagauccucuucaucgaggagggcaagaucguccacaccuccacccucuccggcuccgcccagcacgucgaggagugcuccugcuacccccgcuaccccggcguccgcugcgucugccgcgacaacuggaagggcuccaaccgccccaucgucgacaucaacaucaaggaccacuccaucgucuccuccuacgucugcuccggccucgucggcgacaccccccgcaagaacgacuccuccuccuccucccacugccucgaccccaacaacgaggagggcggccacggcgucaagggcugggccuucgacgacggcaacgacgucuggaugggccgcaccaucaacgagaccucccgccucggcuacgagaccuucaaggucaucgagggcugguccaaccccaaguccaagcuccagaucaaccgccaggucaucgucgaccgcggcgaccgcuccggcuacuccggcaucuucuccgucgagggcaaguccugcaucaaccgcugcuucuacgucgagcucauccgcggccgcaaggaggagaccgagguccucuggaccuccaacuccaucgucgucuucugcggcaccuccggcaccuacggcaccggcuccuggcccgacggcgccgaccucaaccucaugcccaucuga

SEQ ID NO: 119851 - RNA, 1410 nt, Artificial Sequence
  derived and/or modified CDS sequence (opt2) from neuraminidase__InfluenzaA__AGT18771
augaaccccaaccagaagaucaucaccaucggcuccgucucccucaccaucuccaccaucugcuucuucaugcagaucgccauccucaucaccaccgucacccuccacuucaagcaguacaaguucaacuccccccccaacaaccaggucaugcucugcgagcccaccaucaucgagcgcaacaucaccgagaucgucuaccucaccaacaccaccaucgagaaggagaucugccccaagcccgccgaguaccgcaacugguccaagccccagugcggcaucaccggcuucgcccccuucuccaaggacaacuccauccgccucuccgccggcggcgacaucugggucacccgcgagcccuacgucuccugcgaccccgacaagugcuaccaguucgcccucggccagggcaccacccucaacaacguccacuccaacaacaccguccgcgaccgcacccccuaccgcacccuccucaugaacgagcucggcguccccuuccaccucggcaccaagcaggucugcaucgccugguccuccuccuccugccacgacggcaaggccuggcuccacgucugcaucaccggcgacgacaagaacgccaccgccuccuucaucuacaacggccgccucgucgacuccgucgucuccugguccaaggagauccuccgcacccaggaguccgagugcgucugcaucaacggcaccugcaccgucgucaugaccgacggcuccgccuccggcaaggccgacaccaagauccucuucaucgaggagggcaagaucguccacaccuccacccucuccggcuccgcccagcacgucgaggagugcuccugcuacccccgcuaccccggcguccgcugcgucugccgcgacaacuggaagggcuccaaccgccccaucgucgacaucaacaucaaggaccacuccaucgucuccuccuacgucugcuccggccucgucggcgacaccccccgcaagaacgacuccuccuccuccucccacugccucgaccccaacaacgaggagggcggccacggcgucaagggcugggccuucgacgacggcaacgacgucuggaugggccgcaccaucaacgagaccucccgccucggcuacgagaccuucaaggucaucgagggcugguccaaccccaaguccaagcuccagaucaaccgccaggucaucgucgaccgcggcgaccgcuccggcuacuccggcaucuucuccgucgagggcaaguccugcaucaaccgcugcuucuacgucgagcucauccgcggccgcaaggaggagaccgagguccucuggaccuccaacuccaucgucgucuucugcggcaccuccggcaccuacggcaccggcuccuggcccgacggcgccgaccucaaccucaugcccaucuga

SEQ ID NO: 119852 - RNA, 1410 nt, Artificial Sequence; identical to SEQ ID NO: 118182
  derived and/or modified CDS sequence (opt2) from neuraminidase__InfluenzaA__AGT18772

SEQ ID NO: 119853 - RNA, 1410 nt, Artificial Sequence
  derived and/or modified CDS sequence (opt2) from neuraminidase__InfluenzaA__AGT37104
augaaccccaaccagaagaucaucaccaucggcuccgucucccucaccaucgccaccaucugccuccucaugcagaucgccauccucgucaccaccgucacccuccacuucaagcaguacgagugcuccuccccccccaacaaccaggucaugcccugcgagcccaccaucaucgagcgcaacaucaccaagaucgucuaccucaccaacaccaccaucgagcgcgaggccugccccgagcucgccgaguaccgccacugguccaagccccagugcaagauccgcggcuucgcccccuucuccaaggacaacuccauccgccucuccgccggcggcgacaucugggucacccgcgagcccuacgucuccugcgaccccggcaagugcuaccaguucgcccucggccagggcaccacccucaacaaccgccacuccaacgacaccguccacgaccgcacccccuaccgcacccuccucaugaacgagcucggcguccccuuccaccucggcaccaagcaggucugcaucgccugguccuccuccuccugccacgacggcaaggccuggcuccacgucugcaucaccggccacgacaagaacgccaccgccuccuucaucuacgacggccgccucgucgacuccaucggcuccuggucccagaacauccuccgcacccaggaguccgagugcgucugcaucaacggcaccugcaccgucgucaugaccgacggcuccgccuccggccgcgccgacaccaagaucauguucgucgaggagggcaagaucguccacaucuccccccucgccggcuccgcccagcacgucgaggagugcuccugcuaccccaaguaccccggcguccgcugcgucugccgcgacaacuggaagggcuccaaccgccccaucgucgacaucaacaugaaggacuacuccaucgucuccuccuacgucugcuccggccucgucggcgacaccccccgccgcaacgacuccuccuccaccuccuacugccucaaccccaacaacgaggagggcggccacggcgucaagggcugggccuucgacgacggcgacgacgucuggaugggccgcaccaucuccgagaagcuccgccucggcuacgagaccuucaaggucaucggcggcugguccaagcccaacuccaagcuccagaucaaccgccaggucgucgucgacaucuccaaccgcuccggcuacuccggcaucuucuccgucgagggcaaguccugcaucaaccgcugcuucuacgucgagcucauccgcggccgcaagcaggagaacgaggucugguggaccuccaacuccaucgucgucuucugcggcaccuccggcaccuacggcaccggcuccuggcccgacggcgccgacaucaaccucaugcccaucuga

SEQ ID NO: 119854 - RNA, 1410 nt, Artificial Sequence
  derived and/or modified CDS sequence (opt2) from neuraminidase__InfluenzaA__AGU69973
augaaccccaaccagaagaucaucaccaucggcuccgucucccucaccaucgccaccaucugcuuccucaugcagaucgccauccucgucaccaccgucacccuccacuucaagcaguacgagugcaacuccccccccaacaaccaggucaugcucugcgagcccaccaucaucgagcgcaacaucaccgagaucgucuaccucaccaacaccaccaucgagaaggagaucugccccaagcucgccgaguaccgcaacugguccaagccccagugcaacaucaccggcuucgcccccuucuccaaggacaacuccauccgccucuccgccggcggcgacaucugggucacccgcgagcccuacgucuccugcgaccccgacaagugcuaccaguucgcccucggccagggcaccacccucaacaacggccacuccaacgacaccguccacgaccgcacccccuaccgcacccuccucaugaacgagcucggcguccccuuccaccucggcaccaagcaggucugcaucgccugguccuccuccuccugccacgacggcaaggccuggcuccacgucugcgucaccggcgacgacgagaacgccaccgccuccuucaucuacaacggccgccucgucgacuccaucggcuccugguccaagaagauccuccgcacccaggaguccgagugcgucugcaucaacggcaccugcaccgucgucaugaccgacggcuccgccuccggcaaggccgacaccaagauccucuucaucgaggagggcaagaucguccacaccuccccccucuccggcuccgcccagcacgucgaggagugcuccugcuacccccgcuaccccggcguccgcugcgucugccgcgacaacuggaagggcuccaaccgccccaucgucgacaucaacgucaaggacuacuccaucgucuccuccuacguccgcuccggccucgucggcgacaccccccgcaagaacgacuccuccuccuccucccacugccucgaccccaacaacgaggagggcggccacggcgucaagggcugggccuucgacgacggcaacgacgucuggaugggccgcaccaucuccgagaagucccgcuccggcuacgagaccuucaaggucaucgagggcugguccaagcccaacuccaagcuccagaucaaccgccaggucaucgucgaccgcggcaaccgcuccggcuacuccggcaucuucuccgucgagggcaaguccugcaucaaccgcugcuucuacgucgagcucauccgcggcggcaagcaggagaccgagguccucuggaccuccaacuccaucgucgucuucugcggcaccuccggcaccuacggcaccggcuccuggcccgacggcgccgaccucaaccucaugcccaucuga

SEQ ID NO: 119855 - RNA, 1410 nt, Artificial Sequence
  derived and/or modified CDS sequence (opt2) from neuraminidase__InfluenzaA__AGU92648
augaaccccaaccagaagaucaucaccaucggcuccgucugcaugaccaucggcauggccaaccucauccuccagaucggcaacaucaucuccaucuggaucucccacuccauccagcuccgcaaccagucccagaucgagaccugcaaccaguccgucaucaccuacgagaacaacaccugggucaaccagaccuacgucaacaucuccaacaccaacuucgccgccggccaguccgucgucuccgucaagcucgccggcaacuccucccucugccccgucuccggcugggccaucuacuccaaggacaacuccauccgcaucggcuccaagggcgacgucuucgucauccgcgagcccuucaucuccugcuccccccucgagugccgcaccuucuuccucacccagggcgcccuccucaacgacaagcacuccaacggcaccaucaaggaccgcucccccuaccgcacccucauguccugccccaucggcgagguccccucccccuacaacucccgcuucgaguccgucgccugguccgccuccgccugccacgacggcaucaacuggcucaccaucggcaucuccggccccgacaacggcgccgucgccguccucaaguacaacggcaucaucaccgacaccaucaaguccuggcgcaacaacauccuccgcacccaggaguccgagugcgccugcgucaacggcuccugcuucaccaucaugaccgacggccccuccgacggccaggccuccuacaagaucuuccgcaucgagaagggcaagaucgucaaguccgucgagaugaacgcccccaacuaccacuacgaggagugcuccugcuaccccgacuccuccgagaucaucugcgucugccgcgacaacuggcacggcuccaaccgccccugggucuccuucaaccagaaccucgaguaccagaucggcuacaucugcuccggcaucuucggcgacaacccccgccccaacgacaagaccggcuccugcggccccgucuccuccaacggcgccaacggcgucaagggcuucuccuucaaguacggcaacggcgucuggaucggccgcaccaaguccaucuccucccgcaagggcuucgagaugaucugggaccccaacggcuggaccggcaccgacaacaacuucuccaucaagcaggacaucgucggcaucaacgagugguccggcuacuccggcuccuucguccagcaccccgagcucaccggccucgacugcauccgccccugcuucugggucgagcucauccgcggccgccccaaggagaacaccaucuggaccuccggcuccuccaucuccuucugcggcgucaacuccgacaccgucggcugguccuggcccgacggcgccgagcuccccuucaccaucgacaaguga

SEQ ID NO: 119856 - RNA, 1410 nt, Artificial Sequence
  derived and/or modified CDS sequence (opt2) from neuraminidase__InfluenzaA__AGU92670
augaaccccaaccagaagaucaucaccaucggcuccgucugcaugaccaucggcauggccaaccucauccuccagaucggcaacaucaucuccaucuggaucucccacuccauccagcuccgcaaccagucccagaucgagaccugcaaccaguccgucaucaccuacgagaacaacaccugggucaaccagaccuacgucaacaucuccaacaccaacuucgccgccggccaguccgucgucuccgucaagcucgccggcaacuccucccucugccccgucuccggcugggccaucuacuccaaggacaacuccauccgcaucggcuccaagggcgacgucuucgucauccgcgagcccuucaucuccugcuccccccucgagugccgcaccuucuuccucacccagggcgcccuccucaacgacaagcacuccaacggcaccaucaaggaccgcucccccuaccgcacccucauguccugccccaucggcgagguccccucccccuacaacucccgcuucgaguccgucgccugguccgccuccgccugccacgacggcaucaacuggcucaccaucggcaucuccggccccgacaacggcgccgucgccguccucaaguacaacggcaucaucaccgacaccaucaaguccuggcgcaacaacauccuccgcacccaggaguccgagugcgccugcgucaacggcuccugcuucaccaucaugaccgacggccccuccgacggccaggccuccuacaagaucuuccgcaucgagaagggcaagaucgucaaguccgucgagaugaacgcccccaacuaccacuacgaggagugcuccugcuaccccgacuccuccgagaucaucugcgucugccgcgacaacuggcacggcuccaaccgccccugggucuccuucaaccagaaccucgaguaccagaucggcuacaucugcuccggcaucuucggcgacaacccccgccccgacgacaagaccggcuccugcggccccgucuccuccaacggcgccaacggcgucaagggcuucuccuucaaguacggcaacggcgucuggaucggccgcaccaaguccaucuccucccgcaagggcuucgagaugaucugggaccccaacggcuggaccggcaccgacaacaacuucuccaucaagcaggacaucgucggcaucaacgagugguccggcuacuccggcuccuucguccagcaccccgagcucaccggccucgacugcauccgccccugcuucugggucgagcucauccgcggccgccccaaggagaacaccaucuggaccuccggcuccuccaucuccuucugcggcgucaacuccgacaccgucggcugguccuggcccgacggcgccgagcuccccuucaccaucgacaaguga

SEQ ID NO: 119857 - RNA, 1410 nt, Artificial Sequence
  derived and/or modified CDS sequence (opt2) from neuraminidase__InfluenzaA__AGU92681
augaaccccaaccagaagaucaucaccaucggcuccgucugcaugaccaucggcauggccaaccucauccuccagaucggcaacaucaucuccaucuggaucucccacuccauccagcuccgcaaccagucccagaucgagaccugcaaccaguccgucaucaccuacgagaacaacaccugggucaaccagaccuacgucaacaucuccaacaccaacuucgccgccggccaguccgucgucuccgucaagcucgccggcaacuccucccucugccccgucuccggcugggccaccuacuccaaggacaacuccauccgcaucggcuccaagggcgacgucuucgucauccgcgagcccuucaucuccugcuccccccucgagugccgcaccuucuuccucacccagggcgcccuccucaacgacaagcacuccaacggcaccaucaaggaccgcucccccuaccgcacccucauguccugccccaucggcgagguccccucccccuacaacucccgcuucgaguccgucgccugguccgccuccgccugccacgacggcaucaacuggcucaccaucggcaucuccggccccgacaacggcgccgucgccguccucaaguacaacggcaucaucaccgacaccaucaaguccuggcgcaacaacauccuccgcacccaggaguccgagugcgccugcgucaacggcuccugcuucaccaucaugaccgacggccccuccgacggccaggccuccuacaagaucuuccgcaucgagaagggcaagaucgucaaguccgucgagaugaacgcccccaacuaccacuacgaggagugcuccugcuaccccgacuccuccgagaucaucugcgucugccgcgacaacuggcacggcuccaaccgccccugggucuccuucaaccagaaccucgaguaccagaucggcuacaucugcuccggcaucuucggcgacaacccccgccccaacgacaagaccggcuccugcggccccgucuccuccaacggcgccaacggcgucaagggcuucuccuucaaguacggcaacggcgucuggaucggccgcaccaaguccaucuccucccgcaagggcuucgagaugaucugggaccccaacggcuggaccggcaccgacaacaacuucuccaucaagcaggacaucgucggcaucaacgagugguccggcuacuccggcuccuucguccagcaccccgagcucaccggccucgacugcauccgccccugcuucugggucgagcucauccgcggccgccccaaggagaacaccaucuggaccuccggcuccuccaucuccuucugcggcgucaacuccgacaccgucggcugguccuggcccgacggcgccgagcuccccuucaccaucgacaaguga

SEQ ID NO: 119858 - RNA, 1410 nt, Artificial Sequence
  derived and/or modified CDS sequence (opt2) from neuraminidase__InfluenzaA__AGU92692
augaaccccaaccagaagaucaucaccaucggcuccgucugcaugaccaucggcauggccaaccucauccuccagaucggcaacaucaucuccaucuggaucucccacuccauccagcucggcaaccagaaccagaucgagaccugcaaccaguccgucaucaccuacgagaacaacaccugggucaaccagaccuacgucaacaucuccaacaccaacuucgccgccggccaguccgucgucuccgucaagcucgccggcaacuccucccucugccccgucuccggcugggccaucuacuccaaggacaacuccguccgcgucggcuccaagggcgacgucuucgucauccgcgagcccuucaucuccugcuccccccucgagugccgcaccuucuuccucacccagggcgcccuccucaacgacaagcacuccaacggcaccaucaaggaccgcucccccuaccgcacccucauguccugccccaucggcgagguccccucccccuacaacucccgcuucgaguccgucgccugguccgccuccgccugccacgacggcaucaacuggcucaccaucggcaucuccggccccgacaacggcgccgucgccguccucaaguacaacggcaucaucaccgacaccaucaaguccuggcgcaacaacauccuccgcacccaggaguccgagugcgccugcgucaacggcuccugcuucaccgucaugaccgacggccccuccaacggccaggccuccuacaagaucuuccgcaucgagaagggcaagaucgucaaguccgucgagaugaacgcccccaacuaccacuacgaggagugcuccugcuaccccgacuccuccgagaucaccugcgucugccgcgacaacuggcacggcuccaaccgccccugggucuccuucaaccagaaccucgaguaccagaucggcuacaucugcuccggcaucuucggcgacaacccccgccccaacgacaagaccggcuccugcggccccgucuccuccaacggcgccaacggcgucaagggcuucuccuucaaguacggcaacggcgucuggaucggccgcaccaaguccaucuccucccgcaacggcuucgagaugaucugggaccccaacggcuggaccggcaccgacaacaacuucuccaucaagcaggacaucgucggcaucaacgagugguccggcuacuccggcuccuucauccagcaccccgagcucaccggccucgacugcauccgccccugcuucugggucgagcucauccgcggccgccccaaggagaacaccaucuggaccuccggcuccuccaucuccuucugcggcgucaacuccgacaccgucggcugguccuggcccgacggcgccgagcuccccuucaccaucgacaaguga

SEQ ID NO: 119859 - RNA, 1410 nt, Artificial Sequence; identical to SEQ ID NO: 119858
  derived and/or modified CDS sequence (opt2) from neuraminidase__InfluenzaA__AGU92703

SEQ ID NO: 119860 - RNA, 1410 nt, Artificial Sequence; identical to SEQ ID NO: 119858
  derived and/or modified CDS sequence (opt2) from neuraminidase__InfluenzaA__AGU92714

SEQ ID NO: 119861 - RNA, 1410 nt, Artificial Sequence; identical to SEQ ID NO: 119858
  derived and/or modified CDS sequence (opt2) from neuraminidase__InfluenzaA__AGU92725

SEQ ID NO: 119862 - RNA, 1410 nt, Artificial Sequence; identical to SEQ ID NO: 119858
  derived and/or modified CDS sequence (opt2) from neuraminidase__InfluenzaA__AGU92736

SEQ ID NO: 119863 - RNA, 1410 nt, Artificial Sequence; identical to SEQ ID NO: 119858
  derived and/or modified CDS sequence (opt2) from neuraminidase__InfluenzaA__AGU92747

SEQ ID NO: 119864 - RNA, 1410 nt, Artificial Sequence; identical to SEQ ID NO: 119858
  derived and/or modified CDS sequence (opt2) from neuraminidase__InfluenzaA__AGU92758

SEQ ID NO: 119865 - RNA, 1410 nt, Artificial Sequence; identical to SEQ ID NO: 119855
  derived and/or modified CDS sequence (opt2) from neuraminidase__InfluenzaA__AGU92769

SEQ ID NO: 119866 - RNA, 1410 nt, Artificial Sequence; identical to SEQ ID NO: 119855
  derived and/or modified CDS sequence (opt2) from neuraminidase__InfluenzaA__AGU92780

SEQ ID NO: 119867 - RNA, 1410 nt, Artificial Sequence
  derived and/or modified CDS sequence (opt2) from neuraminidase__InfluenzaA__AGU92791
augaaccccaaccagaagaucaucaccaucggcuccgucugcaugaccaucggcauggccaaccucauccuccagaucggcaacaucaucuccaucuggaucucccacuccauccagcuccgcaaccagucccagaucgagaccugcaaccaguccgucaucaccuacgagaacaacaccugggucaaccagaccuacgucaacaucuccaacaccaacuucgccgccggccaguccgucgucuccgucaagcucgccggcaacuccucccucugccccgucuccggcugggccaucuacuccaaggacaacuccauccgcaucggcuccaagggcgacgucuucgucauccgcgagcccuucaucuccugcuccccccucgagugccgcaucuucuuccucacccagggcgcccuccucaacgacaagcacuccaacggcaccaucaaggaccgcucccccuaccgcacccucauguccugccccaucggcgagguccccucccccuacaacucccgcuucgaguccgucgccugguccgccuccgccugccacgacggcaucaacuggcucaccaucggcaucuccggccccgacaacggcgccgucgccguccucaaguacaacggcaucaucaccgacaccaucaaguccuggcgcaacaacauccuccgcacccaggaguccgagugcgccugcgucaacggcuccugcuucaccaucaugaccgacggccccuccgacggccaggccuccuacaagaucuuccgcaucgagaagggcaagaucgucaaguccgucgagaugaacgcccccaacuaccacuacgaggagugcuccugcuaccccgacuccuccgagaucaucugcgucugccgcgacaacuggcacggcuccaaccgccccugggucuccuucaaccagaaccucgaguaccagaucggcuacaucugcuccggcaucuucggcgacaacccccgccccaacgacaagaccggcuccugcggccccgucuccuccaacggcgccaacggcgucaagggcuucuccuucaaguacggcaacggcgucuggaucggccgcaccaaguccaucuccucccgcaagggcuucgagaugaucugggaccccaacggcuggaccggcaccgacaacaacuucuccaucaagcaggacaucgucggcaucaacgagugguccggcuacuccggcuccuucguccagcaccccgagcucaccggccucgacugcauccgccccugcuucugggucgagcucauccgcggccgccccaaggagaacaccaucuggaccuccggcuccuccaucuccuucugcggcgucaacuccgacaccgucggcugguccuggcccgacggcgccgagcuccccuucaccaucgacaaguga

SEQ ID NO: 119868 - RNA, 1410 nt, Artificial Sequence; identical to SEQ ID NO: 119855
  derived and/or modified CDS sequence (opt2) from neuraminidase__InfluenzaA__AGU92802

SEQ ID NO: 119869 - RNA, 1410 nt, Artificial Sequence; identical to SEQ ID NO: 119855
  derived and/or modified CDS sequence (opt2) from neuraminidase__InfluenzaA__AGU92813

SEQ ID NO: 119870 - RNA, 1410 nt, Artificial Sequence; identical to SEQ ID NO: 119855
  derived and/or modified CDS sequence (opt2) from neuraminidase__InfluenzaA__AGU92824

SEQ ID NO: 119871 - RNA, 1410 nt, Artificial Sequence
  derived and/or modified CDS sequence (opt2) from neuraminidase__InfluenzaA__AGU92846
augaaccccaaccagaagaucaucaccaucggcuccgucugcaugaccaucggcauggccaaccucauccuccagaucggcaacaucaucuccaucuggaucucccacuccauccagcucggcaaccagaaccagaucgagaccugcaaccaguccgucaucaccuacgagaacaacaccugggucaaccagaccuacgucaacaucuccaacaccaacuucgccgccggccaguccgucgucuccgucaagcucgccggcaacuccucccucugccccgucuccggcugggccaucuacuccaaggacaacuccguccgcgucggcuccaagggcgacgucuucgucauccgcgagcccuucaucuccugcuccccccucgagugccgcaccuucuuccucacccagggcgcccuccucaacgacaagcacuccaacggcaccaucaaggaccgcucccccuaccgcacccucauguccugccccaucggcgagguccccucccccuacaacucccgcuucgaguccgucgccugguccgccuccgccugccacgacggcaucaacuggcucaccaucggcaucuccggccccgacaacggcgccgucgccguccucaaguacaacggcaucaucaccgacaccaucaaguccuggcgcaacaacauccuccgcacccaggaguccgagugcgccugcgucaacggcuccugcuucaccgucaugaccgacggccccuccaacggccaggccuccuacaagaucuuccgcaucgagaagggcaagaucgucaaguccgucgagaugaacgcccccaacuaccacuacgaggagugcuccugcuaccccgacuccuccgagaucaccugcgucugccgcgacaacuggcacggcuccaaccgccccugggucuccuucaaccagaaccucgaguaccagaucggcuacaucugcuccggcaucuucggcgacaacccccgccccaacgacaagaccggcuccugcggccccgucuccuccaacggcgccaacggcgucaagggcuucgccuucaaguacggcaacggcgucuggaucggccgcaccaaguccaucuccucccgcaacggcuucgagaugaucugggaccccaacggcuggaccggcaccgacaacaacuucuccaucaagcaggacaucgucggcaucaacgagugguccggcuacuccggcuccuucauccagcaccccgagcucaccggccucgacugcauccgccccugcuucugggucgagcucauccgcggccgccccaaggagaacaccaucuggaccuccggcuccuccaucuccuucugcggcgucaacuccgacaccgucggcugguccuggcccgacggcgccgagcuccccuucaccaucgacaaguga

SEQ ID NO: 119872 - RNA, 1410 nt, Artificial Sequence
  derived and/or modified CDS sequence (opt2) from neuraminidase__InfluenzaA__AGU92868
augaaccccaaccagaagaucaucaccaucggcuccgucugcaugaccaucggcauggccaaccucauccuccagaucggcaacaucaucuccaucuggaucucccacuccauccagcucggcaaccagaaccagaucgagaccugcaaccaguccgucaucaccuacgagaacaacaccugggucaaccagaccuacgucaacaucuccaacaccaacuucgccgccggccaguccgucgucuccgucaaguucgccggcaacuccucccucugccccgucuccggcugggccaucuacuccaaggacaacuccguccgcgucggcuccaagggcgacgucuucgucauccgcgagcccuucaucuccugcuccccccucgagugccgcaccuucuuccucacccagggcgcccuccucaacgacaagcacuccaacggcaccaucaaggaccgcucccccuaccgcacccucauguccugccccaucggcgagguccccucccccuacaacucccgcuucgaguccgucgccugguccgccuccgccugccacgacggcaucaacuggcucaccaucggcaucuccggccccgacaacggcgccgucgccguccucaaguacaacggcaucaucaccgacaccaucaaguccuggcgcaacaacauccuccgcacccaggaguccgagugcgccugcgucaacggcuccugcuucaccgucaugaccgacggccccuccaacggccaggccuccuacaagaucuuccgcaucgagaagggcaagaucgucaaguccgucgagaugaacgcccccaacuaccacuacgaggagugcuccugcuaccccgacuccuccgagaucaccugcgucugccgcgacaacuggcacggcuccaaccgccccugggucuccuucaaccagaaccucgaguaccagaucggcuacaucugcuccggcaucuucggcgacaacccccgccccaacgacaagaccggcuccugcggccccgucuccuccaacggcgccaacggcgucaagggcuucuccuucaaguacggcaacggcgucuggaucggccgcaccaaguccaucuccucccgcaacggcuucgagaugaucugggaccccaacggcuggaccggcaccgacaacaacuucuccaucaagcaggacaucgucggcaucaacgagugguccggcuacuccggcuccuucauccagcaccccgagcucaccggccucgacugcauccgccccugcuucugggucgagcucauccgcggccgccccaaggagaacaccaucuggaccuccggcuccuccaucuccuucugcggcgucaacuccgacaccgucggcugguccuggcccgacggcgccgagcuccccuucaccaucgacaaguga

SEQ ID NO: 119873 - RNA, 1410 nt, Artificial Sequence
  derived and/or modified CDS sequence (opt2) from neuraminidase__InfluenzaA__AGU92890
augaaccccaaccagaagaucaucaccaucggcuccgucugcaugaccaucggcauggccaaccucauccuccagaucggcaacaucaucuccaucuggaucucccacuccauccagcucggcaaccagaaccagaucgagaccugcaaccaguccgucaucaccuacgagaacaacaccugggucaaccagaccuacgucaacaucuccaacaccaacuucgccgccggccaguccgucgucuccgucaagcucgccggcaacuccucccucugccccgucuccggcugggccaucuacuccaaggacaacuccguccgcgucggcuccaagggcgacgucuucgucauccgcgagcccuucaucuccugcuccccccucgagugccgcaccuucuuccucacccagggcgcccuccucaacgacaagcacuccaacggcaccaucaaggaccgcucccccuaccgcacccucauguccugccccaucggcgagguccccucccccuacaacucccgcuucgaguccgucgccugguccgccuccgccugccacgacggcaucaacuggcucaccaucggcaucuccggccccgacaacggcgccgucgccguccucaaguacaacggcaucaucaccgacaccaucaaguccuggcgcaacaacauccuccgcacccaggaguccgagugcgccugcgucaacggcuccugcuucaccgucaugaccgacggccccuccaacggccaggccuccuacaagaucuuccgcaucgagaagggcaagaucgucaaguccgucgagaugaacgcccccaacuaccacuacgaggagugcuccugcuaccccgacuccuccgagaucaccugcgucugccgcgacaacuggcacggcuccaaccgccccugggucuccuucaaccagaaccucgaguaccagaucggcuacaucugcuccggcaucuucggcgacaacccccgccccaacgacaagaccggcuccugcggccccgucuccuccaacggcgccaacggcgucaagggcuucuccuucaaguacggcaacggcgucuggaucggccgcaccaaguccaucuccucccgcaacggcuucgagaugaucugggaccccaacggcuggaccgagaccgacaacaacuucuccaucaagcaggacaucgucggcaucaacgagugguccggcuacuccggcuccuucauccagcaccccgagcucaccggccucgacugcauccgccccugcuucugggucgagcucauccgcggccgccccaaggagaacaccaucuggaccuccggcuccuccaucuccuucugcggcgucaacuccgacaccgucggcugguccuggcccgacggcgccgagcuccccuucaccaucgacaaguga

SEQ ID NO: 119874 - RNA, 1410 nt, Artificial Sequence; identical to SEQ ID NO: 119855
  derived and/or modified CDS sequence (opt2) from neuraminidase__InfluenzaA__AGU92901

SEQ ID NO: 119875 - RNA, 1410 nt, Artificial Sequence; identical to SEQ ID NO: 119855
  derived and/or modified CDS sequence (opt2) from neuraminidase__InfluenzaA__AGU92912

SEQ ID NO: 119876 - RNA, 1410 nt, Artificial Sequence; identical to SEQ ID NO: 119855
  derived and/or modified CDS sequence (opt2) from neuraminidase__InfluenzaA__AGU92923

SEQ ID NO: 119877 - RNA, 1410 nt, Artificial Sequence; identical to SEQ ID NO: 119858
  derived and/or modified CDS sequence (opt2) from neuraminidase__InfluenzaA__AGU92934

SEQ ID NO: 119878 - RNA, 1410 nt, Artificial Sequence; identical to SEQ ID NO: 119858
  derived and/or modified CDS sequence (opt2) from neuraminidase__InfluenzaA__AGU92945

SEQ ID NO: 119879 - RNA, 1410 nt, Artificial Sequence; identical to SEQ ID NO: 119858
  derived and/or modified CDS sequence (opt2) from neuraminidase__InfluenzaA__AGU92956

SEQ ID NO: 119880 - RNA, 1410 nt, Artificial Sequence; identical to SEQ ID NO: 119855
  derived and/or modified CDS sequence (opt2) from neuraminidase__InfluenzaA__AGU92967

SEQ ID NO: 119881 - RNA, 1410 nt, Artificial Sequence; identical to SEQ ID NO: 119855
  derived and/or modified CDS sequence (opt2) from neuraminidase__InfluenzaA__AGU92978

SEQ ID NO: 119882 - RNA, 1410 nt, Artificial Sequence
  derived and/or modified CDS sequence (opt2) from neuraminidase__InfluenzaA__AGU92989
augaaccccaaccagaagaucaucaccaucggcuccgucugcaugaccaucggcauggccaaccucauccuccagaucggcaacaucaucuccaucuggaucucccacuccauccagcucggcaaccagaaccagaucgagaccugcaaccaguccgucaucaccuacgagaacaacaccugggucaaccagaccuacgucaacaucuccaacaccaacuucgccgccggccaguccgucgucuccgucaagcucgccggcaacuccucccucugccccgucuccggcugggccaucuacuccaaggacaacuccguccgcgucggcuccaagggcgacgucuucgucauccgcgagcccuucaucuccugcuccccccucgagugccgcaccuucuuccucacccagggcgcccuccucaacgacaagcacuccaacggcaccaucaaggaccgcucccccuaccgcacccucauguccugccccaucggcgagguccccucccccuacaacucccgcuucgaguccgucgccugguccgccuccgccugccacgacggcaucaacuggcucaccaucggcaucuccggccccgacaacggcgccgucgccguccucaaguacaacggcaucaucaccgacaccaucaaguccuggcgcaacaacauccuccgcacccaggaguccgagugcgccugcgucaacggcuccugcuucaccgucaugaccgacggccccuccaacggccaggccuccuacaagaucuuccgcaucgagaagggcaagaucgucaaguccgucgagaugaacgcccccaacuaccacuacgaggagugcuccugcuaccccgacuccuccgagaucaccugcgucugccgcgacaacuggcacggcuccaaccgccccugggucuccuucaaccagaaccucgaguaccagaucggcuacaucugcuccggcaucuucggcgacaacccccgccccaacgacaagaccggcuccugcggccccgucuccuccaacggcgccaacggcgucaagggcuucuccuucaaguacggcaacggcgucuggaucggccgcaccaaguccaucuccucccgcaacggcuucgagaugaucugggaccccaacggcuggaccggcaccgacaacaacuucuccaucaagcaggacaucgucggcaucaacgagugguccggcuacuccggcuccuucguccagcaccccgagcucaccggccucgacugcauccgccccugcuucugggucgagcucauccgcggccgccccaaggagaacaccaucuggaccuccggcuccuccaucuccuucugcggcgucaacuccgacaccgucggcugguccuggcccgacggcgccgagcuccccuucaccaucgacaaguga

SEQ ID NO: 119883 - RNA, 1410 nt, Artificial Sequence; identical to SEQ ID NO: 119872
  derived and/or modified CDS sequence (opt2) from neuraminidase__InfluenzaA__AGU93000

SEQ ID NO: 119884 - RNA, 1410 nt, Artificial Sequence; identical to SEQ ID NO: 119873
  derived and/or modified CDS sequence (opt2) from neuraminidase__InfluenzaA__AGU93011

SEQ ID NO: 119885 - RNA, 1365 nt, Artificial Sequence; identical to SEQ ID NO: 116426
  derived and/or modified CDS sequence (opt2) from neuraminidase__InfluenzaA__AGU93022

SEQ ID NO: 119886 - RNA, 1410 nt, Artificial Sequence
  derived and/or modified CDS sequence (opt2) from neuraminidase__InfluenzaA__AGU93034
augaaccccacccagaagaucaucaccaucggcuccgucugcaugaccaucggcauggccaaccucauccuccagaucggcaacaucaucuccaucuggaucucccacuccauccagcucggcaaccagaaccagaucgagaccugcaaccaguccgucaucaccuacgagaacaacaccugggucaaccagaccuacgucaacaucuccaacaccaacuucgccgccggccaguccgucgccuccgucaagcucgccggcaacuccucccucugccccgucuccggcugggccaucuacuccaaggacaacuccauccgcaucggcuccaagggcgacgucuucgucauccgcgagcccuucaucuccugcuccccccucgagugccgcaccuucuuccucacccagggcgcccuccucaacgacaagcacuccaacggcaccaucaaggaccgcucccccuaccgcacccucauguccugccccaucggcgagguccccucccccuacaacucccgcuucgaguccgucgccugguccgccuccgccugccacgacggcaucaacuggcucaccaucggcaucuccggccccgacaacggcgccgucgccguccucaaguacaacggcaucaucaccgacaccaucaaguccuggcgcaacaacauccuccgcacccaggaguccgagugcgccugcgucaacggcuccugcuucaccaucaugaccgacggccccuccgacggccaggccuccuacaagaucuuccgcaucgagaagggcaagaucgucaaguccgucgagaugaacgcccccaacuaccacuacgaggagugcuccugcuaccccgacuccuccgagaucaccugcgucugccgcgacaacuggcacggcuccaaccgccccugggucuccuucaaccagaaccucgaguaccagaucggcuacaucugcuccggcaucuucggcgacaacccccgccccaacgacaagaccggcuccugcggccccgucuccuccaacggcgccaacggcgucaagggcuucuccuucaaguacggcaacggcgucuggaucggccgcaccaaguccaucuccucccgcaagggcuucgagaugaucugggaccccaacggcuggaccggcaccgacaacaacuucuccaucaagcaggacaucgucggcaucaacgagugguccggcuacuccggcuccuucguccagcaccccgagcucaccggccucgacugcauccgccccugcuucugggucgagcucauccgcggccgccccaaggagaacaccaucuggaccuccggcuccuccaucuccuucugcggcgucaacuccgacaccgucggcugguccuggcccgacggcgccgagcuccccuucaccaucgacaaguga

SEQ ID NO: 119887 - RNA, 1410 nt, Artificial Sequence; identical to SEQ ID NO: 119194
  derived and/or modified CDS sequence (opt2) from neuraminidase__InfluenzaA__AGU93045

SEQ ID NO: 119888 - RNA, 1410 nt, Artificial Sequence; identical to SEQ ID NO: 119855
  derived and/or modified CDS sequence (opt2) from neuraminidase__InfluenzaA__AGU93056

SEQ ID NO: 119889 - RNA, 1410 nt, Artificial Sequence; identical to SEQ ID NO: 118182
  derived and/or modified CDS sequence (opt2) from neuraminidase__InfluenzaA__AGV98980

SEQ ID NO: 119890 - RNA, 1410 nt, Artificial Sequence; identical to SEQ ID NO: 118182
  derived and/or modified CDS sequence (opt2) from neuraminidase__InfluenzaA__AGV98993

SEQ ID NO: 119891 - RNA, 1410 nt, Artificial Sequence; identical to SEQ ID NO: 118182
  derived and/or modified CDS sequence (opt2) from neuraminidase__InfluenzaA__AGV99005

SEQ ID NO: 119892 - RNA, 1410 nt, Artificial Sequence; identical to SEQ ID NO: 118182
  derived and/or modified CDS sequence (opt2) from neuraminidase__InfluenzaA__AGV99017

SEQ ID NO: 119893 - RNA, 1410 nt, Artificial Sequence; identical to SEQ ID NO: 118182
  derived and/or modified CDS sequence (opt2) from neuraminidase__InfluenzaA__AGV99040

SEQ ID NO: 119894 - RNA, 1410 nt, Artificial Sequence
  derived and/or modified CDS sequence (opt2) from neuraminidase__InfluenzaA__AGV99052
augaaccccaaccagaagaucaucaccaucggcuccgucucccucaccaucuccaccaucugcuucuucaugcagaucgccauccucaucaccaccgucacccuccacuucaagcaguacgaguucaacuccccccccaacaaccaggucaugcucugcgagcccaccaucaucgagcgcaacaucaccgagaucgucuaccucaccaacaccaccaucgagaaggagaucugccccaagcccgccgaguaccgcaacugguccaagccccagugcggcaucaccggcuucgcccccuucuccaaggacaacuccauccgccucuccgccggcggcgacaucugggucacccgcgagcccuacgucuccugcgaccccgacaagugcuaccaguucgcccucggccagggcaccacccucaacaacguccacuccaacaacaccguccgcgaccgcacccccuaccgcacccuccucaugaacgagcucggcguccccuuccaccucggcaccaagcaggucugcaucgccugguccuccuccuccugccacgacggcaaggccuggcuccacgucugcaucaccggcgacgacaagaacgccaccgccuccuucaucuacaacggccgccucgucgacuccgucgucuccugguccaaggagauccuccgcacccaggaguccgagugcgucugcaucaacggcaccugcaccgucgucaugaccgacggcuccgccuccggcaaggccgacaccaagauccucuucaucgaggagggcaagaucguccacaccuccacccucuccggcuccgcccagcacgucgaggagugcuccugcuacccccgcuaccccggcguccgcugcgucugccgcgacaacuggaagggcuccaaccgccccaucgucgacaucaacaucaaggaccacuccgucaucuccuccuacgucugcuccggccucgucggcgacaccccccgcaagaacgacuccuccuccuccucccacugccucgaccccaacaacgaggagggcggccacggcgucaagggcugggccuucgacgacggcaacgacgucuggaugggccgcaccaucaacgagaccucccgccucggcuacgagaccuucaaggucaucgagggcugguccaaccccaaguccaagcuccagaucaaccgccaggucaucgucgaccgcggcgaccgcuccggcuacuccggcaucuucuccgucgagggcaaguccugcaucaaccgcugcuucuacgucgagcucauccgcggccgcaaggaggagaccgagguccucuggaccuccaacuccaucgucgucuucugcggcaccuccggcaccuacggcaccggcuccuggcccgacggcgccgaccucaaccucaugcccaucuga

SEQ ID NO: 119895 - RNA, 1410 nt, Artificial Sequence
  derived and/or modified CDS sequence (opt2) from neuraminidase__InfluenzaA__AGV99100
augaaccccaaccagaagaucaucaccaucggcuccgucucccucaccaucuccaccaucugcuucuucaugcagaucgccauccucaucaccaccgucacccuccacuucaagcaguacgaguucaacuccccccccaacaaccaggucaugcucugcgagcccaccaucaucgagcgcaacaucaccgagaucgucuaccucaccaacaccaccaucgagaaggagaucugccccaagcccgccgaguaccgcaacugguccaagccccagugcggcaucaccggcuucgcccccuucuccaaggacaacuccauccgccucuccgccggcggcgacaucugggucacccgcgagcccuacgucuccugcgaccccgacaagugcuaccaguucgcccucggccagggcaccacccucaacaacguccacuccaacaacaccguccgcgaccgcacccccuaccgcacccuccucaugaacgagcucggcguccccuuccaccucggcaccaagcaggucugcaucgccugguccuccuccuccugccacgacggcaaggccuggcuccacgucugcaucaccggcgacgacaagaacgccaccgccuccuucaucuacaacggccgccucgucgacuccgucgucuccugguccaaggagauccuccgcacccaggaguccgagugcgucugcaucaacggcaccugcaccgucgucaugaccgacggcuccgccuccggcaaggccgacaccaagauccucuucaucgaggagggcaagaucguccacaccuccacccucuccggcuccgcccagcacgucgaggagugcuccugcuacccccgcuaccccggcguccgcugcgucugccgcgacaacuggaagggcuccaaccgccccaucgucgacaucaacaucaaggaccacuccaucgucuccuccuacgucugcuccggccucgucggcgacaccccccgcaagaacgacuccuccuccuccucccacugccucgaccccaacaacgaggagggcggccacggcgucaagggcugggccuucgacgacggcaacgacgucuggaugggccgcaccaucaacgagaccucccgccucggcuacgagaccuucaaggucaucgagggcugguccaaccccaaguccaagcuccagaucaaccgccaggucaucgucgaccgcggcgaccgcuccggcuacuccggcaucuucuccgucgagggcaaguccugcgucaaccgcugcuucuacgucgagcucauccgcggccgcaaggaggagaccgagguccucuggaccuccaacuccaucgucgucuucugcggcaccuccggcaccuacggcaccggcuccuggcccgacggcgccgaccucaaccucaugcccaucuga

SEQ ID NO: 119896 - RNA, 1410 nt, Artificial Sequence; identical to SEQ ID NO: 118182
  derived and/or modified CDS sequence (opt2) from neuraminidase__InfluenzaA__AGV99112

SEQ ID NO: 119897 - RNA, 1410 nt, Artificial Sequence; identical to SEQ ID NO: 118182
  derived and/or modified CDS sequence (opt2) from neuraminidase__InfluenzaA__AGV99124

SEQ ID NO: 119898 - RNA, 1410 nt, Artificial Sequence; identical to SEQ ID NO: 118182
  derived and/or modified CDS sequence (opt2) from neuraminidase__InfluenzaA__AGV99136

SEQ ID NO: 119899 - RNA, 1410 nt, Artificial Sequence; identical to SEQ ID NO: 118182
  derived and/or modified CDS sequence (opt2) from neuraminidase__InfluenzaA__AGV99148

SEQ ID NO: 119900 - RNA, 1410 nt, Artificial Sequence; identical to SEQ ID NO: 118182
  derived and/or modified CDS sequence (opt2) from neuraminidase__InfluenzaA__AGV99160

SEQ ID NO: 119901 - RNA, 1410 nt, Artificial Sequence; identical to SEQ ID NO: 118182
  derived and/or modified CDS sequence (opt2) from neuraminidase__InfluenzaA__AGV99172

SEQ ID NO: 119902 - RNA, 1410 nt, Artificial Sequence; identical to SEQ ID NO: 118182
  derived and/or modified CDS sequence (opt2) from neuraminidase__InfluenzaA__AGV99196

SEQ ID NO: 119903 - RNA, 1410 nt, Artificial Sequence; identical to SEQ ID NO: 118182
  derived and/or modified CDS sequence (opt2) from neuraminidase__InfluenzaA__AGV99208

SEQ ID NO: 119904 - RNA, 1410 nt, Artificial Sequence; identical to SEQ ID NO: 118182
  derived and/or modified CDS sequence (opt2) from neuraminidase__InfluenzaA__AGV99959

SEQ ID NO: 119905 - RNA, 1410 nt, Artificial Sequence; identical to SEQ ID NO: 119393
  derived and/or modified CDS sequence (opt2) from neuraminidase__InfluenzaA__AGW00005

SEQ ID NO: 119906 - RNA, 1410 nt, Artificial Sequence; identical to SEQ ID NO: 118182
  derived and/or modified CDS sequence (opt2) from neuraminidase__InfluenzaA__AGW00068

SEQ ID NO: 119907 - RNA, 1410 nt, Artificial Sequence
  derived and/or modified CDS sequence (opt2) from neuraminidase__InfluenzaA__AGW00080
augaaccccaaccagaagaucaucaccaucggcuccgucucccucaccaucuccaccaucugcuucuucaugcagaucgccauccucaucaccaccgucacccuccacuucaagcaguacgaguucgacuccccccccaacaaccaggucaugcucugcgagcccaccaucaucgagcgcaacaucaccgagaucgucuaccucaccaacaccaccaucgagaaggagaucugccccaagcccgccgaguaccgcaacugguccaagccccagugcggcaucaccggcuucgcccccuucuccaaggacaacuccauccgccucuccgccggcggcgacaucugggucacccgcgagcccuacgucuccugcgaccccgacaagugcuaccaguucgcccucggccagggcaccacccucaacaacguccacuccaacaacaccguccgcgaccgcacccccuaccgcacccuccucaugaacgagcucggcguccccuuccaccucggcaccaagcaggucugcaucgccugguccuccuccuccugccacgacggcaaggccuggcuccacgucugcaucaccggcgacgacaagaacgccaccgccuccuucaucuacaacggccgccucgucgacuccgucgucuccugguccaaggagauccuccgcacccaggaguccgagugcgucugcaucaacggcaccugcaccgucgucaugaccgacggcuccgccuccggcaaggccgacaccaagauccucuucaucgaggagggcaagaucguccacaccuccacccucuccggcuccgcccagcacgucgaggagugcuccugcuacccccgcuaccccggcguccgcugcgucugccgcgacaacuggaagggcuccaaccgccccaucgucgacaucaacaucaaggaccacuccaucgucuccuccuacgucugcuccggccucgucggcgacaccccccgcaagaacgacuccuccuccuccucccacugccucgaccccaacaacgaggagggcggccacggcgucaagggcugggccuucgacgacggcaacgacgucuggaugggccgcaccaucaacgagaccucccgccucggcuacgagaccuucaaggucaucgagggcugguccaaccccaaguccaagcuccagaucaaccgccaggucaucgucgaccgcggcgaccgcuccggcuacuccggcaucuucuccgucgagggcaaguccugcaucaaccgcugcuucuacgucgagcucauccgcggccgcaaggaggagaccgagguccucuggaccuccaacuccaucgucgucuucugcggcaccuccggcaccuacggcaccggcuccuggcccgacggcgccgaccucaaccucaugcccaucuga

SEQ ID NO: 119908 - RNA, 1410 nt, Artificial Sequence
  derived and/or modified CDS sequence (opt2) from neuraminidase__InfluenzaA__AGW00104
augaaccccaaccagaagaucaucaccaucggcuccgucucccucaccaucuccaccaucugcuucuucaugcagaucgccauccucaucaccaccgucacccuccacuucaagcaguacgaguucaacuccccccccaacaaccaggucaugcucugcgagcccaccaucaucgagcgcaacaucaccgagaucgucuaccucaccaacaccaccaucgagaaggagaucugccccaagcccgccgaguaccgcaacugguccaagccccagugcggcaucaccggcuucgcccccuucuccaaggacaacuccauccgccucuccgccggcggcgacaucugggucacccgcgagcccuacgucuccugcgaccccgacaagugcuaccaguucgcccucggccagggcaccacccucaacaacguccacuccaacaacaccguccgcgaccgcacccccuaccgcacccuccucaugaacgagcucggcguccccuuccaccucggcaccaagcaggucugcaucgccugguccuccuccuccugccacgacggcaaggccuggcuccacgucugcaucaccggcgacgacaagaacgccaccgccuccuucaucuacaacggccgccucgucgacuccgucgucuccugguccaaggagauccuccgcacccaggaguccgagugcgucugcaucaacggcaccugcaccgucgucaugaccgacggcuccgccuccggcgaggccgacaccaagauccucuucaucgaggagggcaagaucguccacaccuccacccucuccggcuccgcccagcacgucgaggagugcuccugcuacccccgcuaccccggcguccgcugcgucugccgcgacaacuggaagggcuccaaccgccccaucgucgacaucaacaucaaggaccacuccaucgucuccuccuacgucugcuccggccucgucggcgacaccccccgcaagaacgacuccuccuccuccucccacugccucgaccccaacaacgaggagggcggccacggcgucaagggcugggccuucgacgacggcaacgacgucuggaugggccgcaccaucaacgagaccucccgccucggcuacgagaccuucaaggucaucgagggcugguccaaccccaaguccaagcuccagaucaaccgccaggucaucgucgaccgcggcgaccgcuccggcuacuccggcaucuucuccgucgagggcaaguccugcaucaaccgcugcuucuacgucgagcucauccgcggccgcaaggaggagaccgagguccucuggaccuccaacuccaucgucgucuucugcggcaccuccggcaccuacggcaccggcuccuggcccgacggcgccgaccucaaccucaugcccaucuga

SEQ ID NO: 119909 - RNA, 1410 nt, Artificial Sequence; identical to SEQ ID NO: 119907
  derived and/or modified CDS sequence (opt2) from neuraminidase__InfluenzaA__AGW00116

SEQ ID NO: 119910 - RNA, 1410 nt, Artificial Sequence; identical to SEQ ID NO: 119907
  derived and/or modified CDS sequence (opt2) from neuraminidase__InfluenzaA__AGW00128

SEQ ID NO: 119911 - RNA, 1410 nt, Artificial Sequence; identical to SEQ ID NO: 118182
  derived and/or modified CDS sequence (opt2) from neuraminidase__InfluenzaA__AGW00140

SEQ ID NO: 119912 - RNA, 1410 nt, Artificial Sequence; identical to SEQ ID NO: 118182
  derived and/or modified CDS sequence (opt2) from neuraminidase__InfluenzaA__AGW00152

SEQ ID NO: 119913 - RNA, 1410 nt, Artificial Sequence; identical to SEQ ID NO: 119907
  derived and/or modified CDS sequence (opt2) from neuraminidase__InfluenzaA__AGW00164

SEQ ID NO: 119914 - RNA, 1410 nt, Artificial Sequence; identical to SEQ ID NO: 118182
  derived and/or modified CDS sequence (opt2) from neuraminidase__InfluenzaA__AGW00176

SEQ ID NO: 119915 - RNA, 1410 nt, Artificial Sequence; identical to SEQ ID NO: 118182
  derived and/or modified CDS sequence (opt2) from neuraminidase__InfluenzaA__AGW00188

SEQ ID NO: 119916 - RNA, 1410 nt, Artificial Sequence; identical to SEQ ID NO: 118182
  derived and/or modified CDS sequence (opt2) from neuraminidase__InfluenzaA__AGW00712

SEQ ID NO: 119917 - RNA, 1410 nt, Artificial Sequence; identical to SEQ ID NO: 118182
  derived and/or modified CDS sequence (opt2) from neuraminidase__InfluenzaA__AGW00724

SEQ ID NO: 119918 - RNA, 1410 nt, Artificial Sequence
  derived and/or modified CDS sequence (opt2) from neuraminidase__InfluenzaA__AGW00736
augaaccccaaccagaagaucaucaccaucggcuccgucucccucaccaucuccaccaucugcuucuucaugcagaucgccauccucaucaccaccgucacccuccacuucaagcaguacgaguucaacuccccccccaacaaccagaugaugcucugcgagcccaccaucaucgagcgcaacaucaccgagaucgucuaccucaccaacaccaccaucgagaaggagaucugccccaagcccgccgaguaccgcaacugguccaagccccagugcggcaucaccggcuucgcccccuucuccaaggacaacuccauccgccucuccgccggcggcgacaucugggucacccgcgagcccuacgucuccugcgaccccgacaagugcuaccaguucgcccucggccagggcaccacccucaacaacguccacuccaacaacaccguccgcgaccgcacccccuaccgcacccuccucaugaacgagcucggcguccccuuccaccucggcaccaagcaggucugcaucgccugguccuccuccuccugccacgacggcaaggccuggcuccacgucugcaucaccggcgacgacaagaacgccaccgccuccuucaucuacaacggccgccucgucgacuccgucgucuccugguccaaggagauccuccgcacccaggaguccgagugcgucugcaucaacggcaccugcaccgucgucaugaccgacggcuccgccuccggcaaggccgacaccaagauccucuucaucgaggagggcaagaucguccacaccuccacccucuccggcuccgcccagcacgucgaggagugcuccugcuacccccgcuaccccggcguccgcugcgucugccgcgacaacuggaagggcuccaaccgccccaucgucgacaucaacaucaaggaccacuccaucgucuccuccuacgucugcuccggccucgucggcgacaccccccgcaagaacgacuccuccuccuccucccacugccucgaccccaacaacgaggagggcggccacggcgucaagggcugggccuucgacgacggcaacgacgucuggaugggccgcaccaucaacgagaccucccgccucggcuacgagaccuucaaggucaucgagggcugguccgaccccaaguccaagcuccagaucaaccgccaggucaucgucgaccgcggcgaccgcuccggcuacuccggcaucuucuccgucgagggcaaguccugcaucaaccgcugcuucuacgucgagcucauccgcggccgcaaggaggagaccgagguccucuggaccuccaacuccaucgucgucuucugcggcaccuccggcaccuacggcaccggcuccuggcccgacggcgccgaccucaaccucaugcccaucuga

SEQ ID NO: 119919 - RNA, 1410 nt, Artificial Sequence
  derived and/or modified CDS sequence (opt2) from neuraminidase__InfluenzaA__AGW00748
augaaccccaaccagaagaucaucaccaucggcuccgucucccucaccaucuccaccaucugcuucuucaugcagaucgccauccucaucaccaccgucacccuccacuucaagcaguacgaguucaacuccccccccaacaaccaggucaugcucugcgagcccaccaucaucgagcgcaacaucaccgagaucgucuaccucaccaacaccaccaucgagaaggagaucugccccaagcccgccgaguaccgcaacugguccaagccccagugcggcaucaccggcuucgcccccuucuccaaggacaacuccauccgccucuccgccggcggcgacaucugggucacccgcgagcccuacgucuccugcgaccccgacaagugcuaccaguucgcccucggccagggcaccacccucaacaacaugcacuccaacaacaccguccgcgaccgcacccccuaccgcacccuccucaugaacgagcucggcguccccuuccaccucggcaccaagcaggucugcaucgccugguccuccuccuccugccacgacggcaaggccuggcuccacgucugcaucaccggcgacgacaagaacgccaccgccuccuucaucuacaacggccgccucgucgacuccgucgucuccugguccaaggagauccuccgcacccaggaguccgagugcgucugcaucaacggcaccugcaccgucgucaugaccgacggcuccgccuccggcaaggccgacaccaagauccucuucaucgaggagggcaagaucguccacaccuccacccucuccggcuccgcccagcacgucgaggagugcuccugcuacccccgcuaccccggcguccgcugcgucugccgcgacaacuggaagggcuccaaccgccccaucgucgacaucaacaucaaggaccacuccaucgucuccuccuacgucugcuccggccucgucggcgacaccccccgcaagaacgacuccuccuccuccucccacugccucgaccccaacaacgaggagggcggccacggcgucaagggcugggccuucgacgacggcaacgacgucuggaugggccgcaccaucaacgagaccucccgccucggcuacgagaccuucaaggucaucgagggcugguccaaccccaaguccaagcuccagaucaaccgccaggucaucgucgaccgcggcgaccgcuccggcuacuccggcaucuucuccgucgagggcaaguccugcaucaaccgcugcuucuacgucgagcucauccgcggccgcaaggaggagaccgagguccucuggaccuccaacuccaucgucgucuucugcggcaccuccggcaccuacggcaccggcuccuggcccgacggcgccgaccucaaccucaugcccaucuga

SEQ ID NO: 119920 - RNA, 1410 nt, Artificial Sequence
  derived and/or modified CDS sequence (opt2) from neuraminidase__InfluenzaA__AGW00760
augaaccccaaccagaagaucaucaccaucggcuccgucucccucaccaucuccaccaucugcuucuucaugcagaucgccauccucaucaccaccgucacccuccacuucaagcaguacgaguucaacuccccccccaacaaccaggucaugcucugcgagcccaccaucaucgagcgcaacaucaccgagaucgucuaccucaccaacaccaccaucgagaaggagaucugccccaagcccgccgaguaccgcaacugguccaagccccagugcggcaucaccggcuucgcccccuucuccaaggacaacuccauccgccucuccgccggcggcgacaucugggucacccgcgagcccuacgucuccugcgaccccgacaagugcuaccaguucgcccucggccagggcaccacccucaacaacguccacuccaacaacaccguccgcgaccgcacccccuaccgcacccuccucaugaacgagcucggcguccccuuccaccucggcaccaagcaggucugcaucgccugguccuccuccuccugccacgacggcaaggccuggcuccacgucugcaucaccggcgacgacaagaacgccaccgccuccuucaucuacaacggccgccucgucgacuccgucgucuccugguccaaggagauccuccgcacccaggaguccgagugcgucugcaucaacggcaccugcaccgucgucaugaccgacggcuccgccuccggcaaggccgacaccaagauccucuucaucgaggagggcaagaucguccacaccuccacccucuccggcuccgcccagcacgucgaggagugcuccugcuacccccgcuaccccggcguccgcugcgucugccgcgacaacuggaagggcuccaaccgccccaucgucgacaucaacaucaaggaccacuccaucgucuccuccuacgucugcuccggccucgucggcgacaccccccgcaagaacgacuccuccuccuccucccacugccucgaccccaacaacgaggagggcggccacggcgucaagggcugggccuucgacgacggcaacgacgucuggaugggccgcaccaucaacgagaccucccgccucggcuacgagaccuucaaggucaucgagggcugguccaaccccaaguccaagcuccaggucaaccgccaggucaucgucgaccgcggcgaccgcuccggcuacuccggcaucuucuccgucgagggcaaguccugcaucaaccgcugcuucuacgucgagcucauccgcggccgcaaggaggagaccgagguccucuggaccuccaacuccaucgucgucuucugcggcaccuccggcaccuacggcaccggcuccuggcccgacggcgccgaccucaaccucaugcccaucuga

SEQ ID NO: 119921 - RNA, 1410 nt, Artificial Sequence; identical to SEQ ID NO: 118182
  derived and/or modified CDS sequence (opt2) from neuraminidase__InfluenzaA__AGW00784

SEQ ID NO: 119922 - RNA, 1410 nt, Artificial Sequence; identical to SEQ ID NO: 118182
  derived and/or modified CDS sequence (opt2) from neuraminidase__InfluenzaA__AGW00796

SEQ ID NO: 119923 - RNA, 1410 nt, Artificial Sequence; identical to SEQ ID NO: 119907
  derived and/or modified CDS sequence (opt2) from neuraminidase__InfluenzaA__AGW00808

SEQ ID NO: 119924 - RNA, 1410 nt, Artificial Sequence; identical to SEQ ID NO: 119411
  derived and/or modified CDS sequence (opt2) from neuraminidase__InfluenzaA__AGW00820

SEQ ID NO: 119925 - RNA, 1410 nt, Artificial Sequence; identical to SEQ ID NO: 118182
  derived and/or modified CDS sequence (opt2) from neuraminidase__InfluenzaA__AGW00832

SEQ ID NO: 119926 - RNA, 1410 nt, Artificial Sequence
  derived and/or modified CDS sequence (opt2) from neuraminidase__InfluenzaA__AGW00844
augaaccccaaccagaagaucaucaccaucggcuccgucucccucaccaucuccaccaucugcuucuucaugcagaucgccauccucaucaccaccgucacccuccacuucaagcaguacgaguucaacuucccccccaacaaccaggucaugcucugcgagcccaccaucaucgagcgcaacaucaccgagaucgucuaccucaccaacaccaccaucgagaaggagaucugccccaagcccgccgaguaccgcaacugguccaagccccagugcggcaucaccggcuucgcccccuucuccaaggacaacuccauccgccucuccgccggcggcgacaucugggucacccgcgagcccuacgucuccugcgaccccgacaagugcuaccaguucgcccucggccagggcaccacccucaacaacguccacuccaacaacaccguccgcgaccgcacccccuaccgcacccuccucaugaacgagcucggcguccccuuccaccucggcaccaagcaggucugcaucgccugguccuccuccuccugccacgacggcaaggccuggcuccacgucugcaucaccggcgacgacaagaacgccaccgccuccuucaucuacaacggccgccucgucgacuccgucgucuccugguccaaggagauccuccgcacccaggaguccgagugcgucugcaucaacggcaccugcaccgucgucaugaccgacggcuccgccuccggcaaggccgacaccaagauccucuucaucgaggagggcaagaucguccacaccuccacccucuccggcuccgcccagcacgucgaggagugcuccugcuacccccgcuaccccggcguccgcugcgucugccgcgacaacuggaagggcuccaaccgccccaucgucgacaucaacaucaaggaccacuccaucgucuccuccuacgucugcuccggccucgucggcgacaccccccgcaagaacgacuccuccuccuccucccacugccucgaccccaacaacgaggagggcggccacggcgucaagggcugggccuucgacgacggcaacgacgucuggaugggccgcaccaucaacgagaccucccgccucggcuacgagaccuucaaggucaucgagggcugguccaaccccaaguccaagcuccagaucaaccgccaggucaucgucgaccgcggcgaccgcuccggcuacuccggcaucuucuccgucgagggcaaguccugcaucaaccgcugcuucuacgucgagcucauccgcggccgcaaggaggagaccgagguccucuggaccuccaacuccaucgucgucuucugcggcaccuccggcaccuacggcaccggcuccuggcccgacggcgccgaccucaaccucaugcccaucuga

SEQ ID NO: 119927 - RNA, 1410 nt, Artificial Sequence; identical to SEQ ID NO: 119919
  derived and/or modified CDS sequence (opt2) from neuraminidase__InfluenzaA__AGW00868

SEQ ID NO: 119928 - RNA, 1410 nt, Artificial Sequence
  derived and/or modified CDS sequence (opt2) from neuraminidase__InfluenzaA__AGW00880
augaaccccaaccagaagaucaucaccaucggcuccgucucccucaccaucuccaccaucugcuucuucaugcagaucgccauccucaucaccaccgucacccuccacuucaagcaguacgaguucaacuccccccccaacaaccaggucaugcucugcgagcccaccaucaucgagcgcaacaucaccgagaucgucuaccucaccaacaccaccaucgagaaggagaucugccccaagcccgccgaguaccgcaacugguccaagccccagugcgacaucaccggcuucgcccccuucuccaaggacaacuccauccgccucuccgccggcggcgacgucugggucacccgcgagcccuacgucuccugcgaccccgacaagugcuaccaguucgcccucggccagggcaccacccucaacaacguccacuccaacaacaccguccgcgaccgcacccccuaccgcacccuccucaugaacgagcucggcguccccuuccaccucggcaccaagcaggucugcaucgccugguccuccuccuccugccacgacggcaaggccuggcuccacgucugcaucaccggcgacgacaagaacgccaccgccuccuucaucuacaacggcaagcucgucgacuccgucgucuccugguccaaggagauccuccgcacccaggaguccgagugcgucugcaucaacggcaccugcaccgucgucaugaccgacggcuccgccuccggcaaggccgacaccaagauccucuucaucgaggagggcaagaucguccacaccuccacccucuccggcuccgcccagcacgucgaggagugcuccugcuacccccgcuaccccgacguccgcugcgucugccgcgacaacuggaagggcuccaaccgccccaucgucgacaucaacaucaaggaccacuccaucgucucccgcuacgucugcuccggccucgucggcgacaccccccgcaagaacgacuccuccuccuccucccacugccucgaccccaacaacgaggagggcggccacggcgucaagggcugggccuucgacgacggcaacgacgucuggaugggccgcaccaucaacgagaccucccgccucggcuacgagaccuucaaggucaucgagggcugguccaaccccaaguccaagcuccagaucaaccgccaggucaucgucgaccgcggcgaccgcuccggcuacuccggcaucuucuccgucgagggcaaguccugcaucaaccgcugcuucuacgucgagcucauccgcggccgcaaggaggagaccgagguccucuggaccuccaacuccaucgucgucuucugcggcaccuccggcaccuacggcaccggcuccuggcccgacggcgccgaccucaaccucaugcccaucuga

SEQ ID NO: 119929 - RNA, 1410 nt, Artificial Sequence
  derived and/or modified CDS sequence (opt2) from neuraminidase__InfluenzaA__AGW00892
augaaccccaaccagaagaucaucaccaucggcuccgucucccucaccaucuccaccaucugcuucuucaugcagaucgccauccucaucaccaccgucacccuccacuucaagcaguacgaguucaaccccccccccaacaaccaggucaugcucugcgagcccaccaucaucgagcgcaacaucaccgagaucgucuaccucaccaacaccaccaucgagaaggagaucugccccaagcccgccgaguaccgcaacugguccaagccccagugcggcaucaccggcuucgcccccuucuccaaggacaacuccauccgccucuccgccggcggcgacaucugggucacccgcgagcccuacgucuccugcgaccccgacaagugcuaccaguucgcccucggccagggcaccacccucaacaacguccacuccaacaacaccguccgcgaccgcacccccuaccgcacccuccucaugaacgagcucggcguccccuuccaccucggcaccaagcaggucugcaucgccugguccuccuccuccugccacgacggcaaggccuggcuccacgucugcaucaccggcgacgacaagaacgccaccgccuccuucaucuacaacggccgccucgucgacuccgucgucuccugguccaaggagauccuccgcacccaggaguccgagugcgucugcaucaacggcaccugcaccgucgucaugaccgacggcuccgccuccggcaaggccgacaccaagauccucuucaucgaggagggcaagaucguccacaccuccacccucuccggcuccgcccagcacgucgaggagugcuccugcuacccccgcuaccccggcguccgcugcgucugccgcgacaacuggaagggcuccaaccgccccaucgucgacaucaacaucaaggaccacuccaucgucuccuccuacgucugcuccggccucgucggcgacaccccccgcaagaacgacuccuccuccuccucccacugccucgaccccaacaacgaggagggcggccacggcgucaagggcugggccuucgacgacggcaacgacgucuggaugggccgcaccaucaacgagaccucccgccucggcuacgagaccuucaaggucaucgagggcugguccaaccccaaguccaagcuccagaugaaccgccaggucaucgucgaccgcggcgaccgcuccggcuacuccggcaucuucuccgucgagggcaaguccugcaucaaccgcugcuucuacgucgagcucauccgcggccgcaaggaggagaccgagguccucuggaccuccaacuccaucgucgucuucugcggcaccuccggcaccuacggcaccggcuccuggcccgacggcgccgaccucaaccucaugcccaucuga

SEQ ID NO: 119930 - RNA, 1410 nt, Artificial Sequence
  derived and/or modified CDS sequence (opt2) from neuraminidase__InfluenzaA__AGW00904
augaaccccaaccagaagaucaucaccaucggcuccgucucccucaccaucuccaccaucugcuucuucaugcagaucgccauccucaucaccaccgucacccuccacuucaagcaguacgaguucaacuccccccccaacaaccaggucaugcucugcgagcccaccaucaucgagcgcaacaucaccgagaucgucuaccucaccaacaccaccaucgagaaggagaucugccccaagcccgccgaguaccgcaacugguccaagccccagugcggcaucaccggcuucgcccccuucuccaaggacaacuccauccgccucuccgccggcggcgacaucugggucacccgcgagcccuacgucuccugcggccccgacaagugcuaccaguucgcccucggccagggcaccacccucaacaacaugcacuccaacaacaccguccgcgaccgcacccccuaccgcacccuccucaugaacgagcucggcguccccuuccaccucggcaccaagcaggucugcaucgccugguccuccuccuccugccacgacggcaaggccuggcuccacgucugcaucaccggcgacgacaagaacgccaccgccuccuucaucuacaacggccgccucgucgacuccgucgucuccugguccaaggagauccuccgcacccaggaguccgagugcgucugcaucaacggcaccugcaccgucgucaugaccgacggcuccgccuccggcaaggccgacaccaagauccucuucaucgaggagggcaagaucguccacaccuccacccucuccggcuccgcccagcacgucgaggagugcuccugcuacccccgcuaccccggcguccgcugcgucugccgcgacaacuggaagggcuccaaccgccccaucgucgacaucaacaucaaggaccacuccaucgucuccuccuacgucugcuccggccucgucggcgacaccccccgcaagaacgacuccuccuccuccucccacugccucgaccccaacaacgaggagggcggccacggcgucaagggcugggccuucgacgacggcaacgacgucuggaugggccgcaccaucaacgagaccucccgccucggcuacgagaccuucaaggucaucgagggcugguccaaccccaaguccaagcuccagaucaaccgccaggucaucgucgaccgcggcgaccgcuccggcuacuccggcaucuucuccgucgagggcaaguccugcaucaaccgcugcuucuacgucgagcucauccgcggccgcaaggaggagaccgagguccucuggaccuccaacuccaucgucgucuucugcggcaccuccggcaccuacggcaccggcuccuggcccgacggcgccgaccucaaccucaugcccaucuga

SEQ ID NO: 119931 - RNA, 1410 nt, Artificial Sequence
  derived and/or modified CDS sequence (opt2) from neuraminidase__InfluenzaA__AGW00916
augaaccccaaccagaagaucaucaccaucggcuccgucucccucaccaucuccaccaucugcuucuucaugcagaucgccauccucaucaccaccgucacccuccacuucaagcaguacgaguucaacuccccccccaacaaccaggucaugcucugcgagcccaccaucaucgagcgcaacaucaccgagaucgucuaccucaccaacaccaccaucgagaaggagaucugccccaagcccgccgaguaccgcaacugguccaagccccagugcggcaucaccggcuucgcccccuucuccaaggacaacuccauccgccucuccgccggcggcgacaucugggucacccgcgagcccuacgucuccugcgaccccgacaagugcuaccaguucgcccucggccagggcaccacccucaacaacaugcacuccaacaacaccgucugcgaccgcacccccuaccgcacccuccucaugaacgagcucggcguccccuuccaccucggcaccaagcaggucugcaucgccugguccuccuccuccugccacgacggcaaggccuggcuccacgucugcaucaccggcgacgacaagaacgccaccgccuccuucaucuacaacggccgccucgucgacuccgucgucuccugguccaaggagauccuccgcacccaggaguccgagugcgucugcaucaacggcaccugcaccgucgucaugaccgacggcuccgccuccggcaaggccgacaccaagauccucuucaucgaggagggcaagaucguccacaccuccacccucuccggcuccgcccagcacgucgaggagugcuccugcuacccccgcuaccccggcguccgcugcgucugccgcgacaacuggaagggcuccaaccgccccaucgucgacaucaacaucaaggaccacuccaucgucuccuccuacgucugcuccggccucgucggcgacaccccccgcaagaacgacuccuccuccuccucccacugccucgaccccaacaacgaggagggcggccacggcgucaagggcugggccuucgacgacggcaacgacgucuggaugggccgcaccaucaacgagaccucccgccucggcuacgagaccuucaaggucaucgagggcugguccaaccccaaguccaagcuccagaucaaccgccaggucaucgucgaccgcggcgaccgcuccggcuacuccggcaucuucuccgucgagggcaaguccugcaucaaccgcugcuucuacgucgagcucauccgcggccgcaaggaggagaccgagguccucuggaccuccaacuccaucgucgucuucugcggcaccuccggcaccuacggcaccggcuccuggcccgacggcgccgaccucaaccucaugcccaucuga

SEQ ID NO: 119932 - RNA, 1410 nt, Artificial Sequence; identical to SEQ ID NO: 119907
  derived and/or modified CDS sequence (opt2) from neuraminidase__InfluenzaA__AGW00934

SEQ ID NO: 119933 - RNA, 1410 nt, Artificial Sequence
  derived and/or modified CDS sequence (opt2) from neuraminidase__InfluenzaA__AGW01247
augaaccccaaccagaagaucaucaccaucggcuccgucucccucaccaucuccaccaucugcuucuucaugcagaucgccauccucaucaccaccgucacccuccacuucaagcaguacgaguucaacuccccccccaacaaccaggucaugcucugcgagcccaccaucaucgagcgcaacaucaccgagaucgucuaccucaccaacaccaccaucgagaaggagaucugccccaagcccgccgaguaccgcaacugguccaagccccagugcggcaucaccggcuucgcccccuucuccaaggacaacuccauccgccucuccgccggcggcgacaucugggucacccgcgagcccuacgucuccugcgaccccgacaagugcuaccaguucgcccucggccagggcaccacccucaacaacguccacuccaacaacaccguccgcgaccgcacccccuaccgcacccuccucaugaacgagcucggcguccccuuccaccucggcaccaagcaggucugcaucgccugguccuccuccuccugccacgacggcaaggccuggcuccacgucugcaucaccggcgacgacaagaacgccaccgccuccuucaucuacaacggccgccucgucgacuccgucgucuccugguccaaggagauccuccgcacccaggaguccgagugcgucugcaucaacggcaccugcaccgucgucaugaccgacggcuccgccuccggcaaggccgacaccaagauccucuucaucgaggagggcaagaucguccacaccuccacccucuccggcuccgcccagcacgucgaggagugcuccugcuacccccgcuaccccggcguccgcugcgucugccgcgacaacuggaagggcuccaaccgccccaucgucgacaucaacaucaaggaccacuccaucgucuccuccuacgucugcuccggccucgucggcgacaccccccgcaagaaggacuccuccuccuccucccacugccucgaccccaacaacgaggagggcggccacggcgucaagggcugggccuucgacgacggcaacgacgucuggaugggccgcaccaucaacgagaccucccgccucggcuacgagaccuucaaggucaucgagggcugguccaaccccaaguccaagcuccagaucaaccgccaggucaucgucgaccgcggcgaccgcuccggcuacuccggcaucuucuccgucgagggcaaguccugcaucaaccgcugcuucuacgucgagcucauccgcggccgcaaggaggagaccgagguccucuggaccuccaacuccaucgucgucuucugcggcaccuccggcaccuacggcaccggcuccuggcccgacggcgccgaccucaaccucaugcccaucuga

SEQ ID NO: 119934 - RNA, 1410 nt, Artificial Sequence; identical to SEQ ID NO: 118182
  derived and/or modified CDS sequence (opt2) from neuraminidase__InfluenzaA__AGW01259

SEQ ID NO: 119935 - RNA, 1410 nt, Artificial Sequence; identical to SEQ ID NO: 119919
  derived and/or modified CDS sequence (opt2) from neuraminidase__InfluenzaA__AGW01298

SEQ ID NO: 119936 - RNA, 1410 nt, Artificial Sequence; identical to SEQ ID NO: 119411
  derived and/or modified CDS sequence (opt2) from neuraminidase__InfluenzaA__AGW01322

SEQ ID NO: 119937 - RNA, 1410 nt, Artificial Sequence
  derived and/or modified CDS sequence (opt2) from neuraminidase__InfluenzaA__AGW01334
augaaccccaaccagaagaucaucaccaucggcuccgucucccucaccaucuccaccaucugcuucuucaugcagaucgccauccucaucaccaccgucacccuccacuucaagcaguacgaguucaacuccccccccaacaaccaggucaugcucugcgagcccaccaucaucgagcgcaacaucaccgagaucgucuaccucaccaacaccaccaucgagaaggagaucugccccaagcccgccgaguaccgcaacugguccaagccccagugcggcaucaccggcuucgcccccuucuccaaggacaacuccauccgccucuccgccggcggcgacaucugggucacccgcgagcccuacgucuccugcgaccccgacaagugcuaccaguucgcccucggccagggcaccacccucaacaacguccacuccaacaacaccguccgcgaccgcacccccuaccgcacccuccucaugaacgagcucggcguccccuuccaccucggcaccaagcaggucugcaucgccugguccuccuccuccugccacgacggcaaggccuggcuccacgucugcaucaccggcgacgacaagaacgccaccgccuccuucaucuacaacggccgccucgucgacuccgucgucuccugguccaaggagauccuccgcacccaggaguccgagugcgucugcaucaacggcaccugcaccgucgucaugaccgacggcuccgccuccggcaaggccgacaccaagauccucuucaucgaggagggcaagaucguccacaccuccacccucuccggcuccgcccagcacgucgaggagugcuccugcuacccccgcuaccccggcguccgcugcgucugccgcgacaacuggaagggcuccaaccgccccaucgucgacaucaacaucaaggaccacuccaucgucuccuccuacgucugcuccggccucgucggcgacaccccccgcaagaacgacuccuccuccuccucccacugccucgaccccaacaacgaggagggcggccacggcgucaagggcugggccuucgacgacggcaacgacgucuggaugggccgcaccaucaacgagaccucccgccucggcuacgagaccuucaaggucaucgagggcugguccaaccccaaguccaagcuccagaucaaccgccaggucaucgucgaccgcggcgaccgcuccggcuacuccggcaucuucuccgucgagggcaaguccugcaucaaccgcugcuucuacgucgagcucauccgcggccgcaaggaggaggccgagguccucuggaccuccaacuccaucgucgucuucugcggcaccuccggcaccuacggcaccggcuccuggcccgacggcgccgaccucaaccucaugcccaucuga

SEQ ID NO: 119938 - RNA, 1410 nt, Artificial Sequence; identical to SEQ ID NO: 118182
  derived and/or modified CDS sequence (opt2) from neuraminidase__InfluenzaA__AGW01346

SEQ ID NO: 119939 - RNA, 1410 nt, Artificial Sequence
  derived and/or modified CDS sequence (opt2) from neuraminidase__InfluenzaA__AGW01358
augaaccccaaccagaagaucaucaccaucggcuccgucucccucaccaucuccaccaucugcuucuucaugcagaucgccauccucaucaccaccgucacccuccacuucaagcaguacgaguucaacuccccccccaacaaccaggucaugcucugcgagcccaccaucaucgagcgcaacaucaccgagaucgucuaccucaccaacaccaccaucgagaaggagaucugccccaagcccaccgaguaccgcaacugguccaagccccagugcggcaucaccggcuucgcccccuucuccaaggacaacuccauccgccucuccgccggcggcgacaucugggucacccgcgagcccuacgucuccugcgaccccgacaagugcuaccaguucgcccucggccagggcaccacccucaacaacguccacuccaacaacaccguccgcgaccgcacccccuaccgcacccuccucaugaacgagcucggcguccccuuccaccucggcaccaagcaggucugcaucgccugguccuccuccuccugccacgacggcaaggccuggcuccacgucugcaucaccggcgacgacaagaacgccaccgccuccuucaucuacaacggccgccucgucgacuccgucgucuccugguccaaggagauccuccgcacccaggaguccgagugcgucugcaucaacggcaccugcaccgucgucaugaccgacggcuccgccuccggcaaggccgacaccaagauccucuucaucgaggagggcaagaucguccacaccuccacccucuccggcuccgcccagcacgucgaggagugcuccugcuacccccgcuaccccggcguccgcugcgucugccgcgacaacuggaagggcuccaaccgccccaucgucgacaucaacaucaaggaccacuccaucgucuccuccuacgucugcuccggccucgucggcgacaccccccgcaagaacgacuccuccuccuccucccacugccucgaccccaacaacgaggagggcggccacggcgucaagggcugggccuucgacgacggcaacgacgucuggaugggccgcaccaucaacgagaccucccgccucggcuacgagaccuucaaggucaucgagggcugguccaaccccaaguccaagcuccagaucaaccgccaggucaucgucgaccgcggcgaccgcuccggcuacuccggcaucuucuccgucgagggcaaguccugcaucaaccgcugcuucuacgucgagcucauccgcggccgcaaggaggagaccgagguccucuggaccuccaacuccaucgucgucuucugcggcaccuccggcaccuacggcaccggcuccuggcccgacggcgccgaccucaaccucaugcccaucuga

SEQ ID NO: 119940 - RNA, 1410 nt, Artificial Sequence; identical to SEQ ID NO: 118182
  derived and/or modified CDS sequence (opt2) from neuraminidase__InfluenzaA__AGW01370

SEQ ID NO: 119941 - RNA, 1410 nt, Artificial Sequence; identical to SEQ ID NO: 118182
  derived and/or modified CDS sequence (opt2) from neuraminidase__InfluenzaA__AGW01382

SEQ ID NO: 119942 - RNA, 1410 nt, Artificial Sequence
  derived and/or modified CDS sequence (opt2) from neuraminidase__InfluenzaA__AGW01394
augaaccccaaccagaagaucaucaccaucggcuccgucucccucaccaucuccaccaucugcuucuucaugcagaucgccauccucaucaccaccgucacccuccacuucaagcaguacgaguucgacuccccccccaacaaccaggucaugcucugcgagcccaccaucaucgagcgcaacaucaccgagaucgucuaccucaccaacaccaccaucgagaaggagaucugccccaagcccgccgaguaccgcaacugguccaagccccagugcggcaucaccggcuucgcccccuucuccaaggacaacuccauccgccucuccgccggcggcgacaucugggucacccgcgagcccuacgucuccugcgaccccgacaagugcuaccaguucgcccucggccagggcaccacccucaacaacguccacuccaacaacaccguccgcgaccgcacccccuaccgcacccuccucaugaacgagcucggcguccccuuccaccucggcaccaagcaggucugcaucgccugguccuccuccuccugccacgacggcaaggccuggcuccacgucugcaucaccggcgacgacaagaacgccaccgccuccuucaucuacaacggccgccucgucgacuccaucgucuccugguccaaggacauccuccgcacccaggaguccgagugcgucugcaucaacggcaccugcaccgucgucaugaccgacggcuccgccuccggcaaggccgacaccaagauccucuucaucgaggagggcaagaucguccacaccuccacccucuccggcuccgcccagcacgucgaggagugcuccugcuacccccgcuaccccggcguccgcugcgucugccgcgacaacuggaagggcuccaaccgccccaucgucgacaucaacaucaaggaccacuccaucgucuccuccuacgucugcuccggccucgucggcgacaccccccgcaagaacgacuccuccuccuccucccacugccucgaccccaacaacgaggagggcggccacggcgucaagggcugggccuucgacgacggcaacgacgucuggaugggccgcaccaucaacgagaccucccgccucggcuacgagaccuucaaggucaucgagggcugguccaaccccaaguccaagcuccagaucaaccgccaggucaucgucgaccgcggcgaccgcuccggcuacuccggcaucuucuccgucgagggcaaguccugcaucaaccgcugcuucuacgucgagcucauccgcggccgcaaggaggagaccgagguccucuggaccuccaacuccaucgucgucuucugcggcaccuccggcaccuacggcaccggcuccuggcccgacggcgccgaccucaaccucaugcccaucuga

SEQ ID NO: 119943 - RNA, 1410 nt, Artificial Sequence
  derived and/or modified CDS sequence (opt2) from neuraminidase__InfluenzaA__AGW01406
augaaccccaaccagaagaucaucaccaucggcuccgucucccucaccaucuccaccaucugcuucuucaugcagaucgccauccucaucaccaccgucacccuccacuucaagcaguacgaguucaacuccccccccaacaaccaggucaugcucugcgagcccaccaucaucgagcgcaacaucaccgagaucgucuaccucaccaacaccaccaucgagaaggagaucugccccaagcccgccgaguaccgcaacugguccaagccccagugcgacaucaccggcuucgcccccuucuccaaggacaacuccauccgccucuccgccggcggcgacaucugggucacccgcgagcccuacgucuccugcgaccccgacaagugcuaccaguucgcccucggccagggcaccacccucaacaacaugcacuccaacaacaccguccgcgaccgcacccccuaccgcacccuccucaugaacgagcucggcguccccuuccaccucggcaccaagcaggucugcaucgccugguccuccuccuccugccacgacggcaaggccuggcuccacgucugcaucaccggcgacgacaagaacgccaccgccuccuucaucuacaacggccgccucgucgacuccgucgucuccugguccaaggagauccuccgcacccaggaguccgagugcgucugcaucaacggcaccugcaccgucgucaucaccgacggcuccgccuccggcaaggccgacaccaagauccucuucaucgaggagggcaagaucguccacaccuccacccucuccggcuccgcccagcacgucgaggagugcuccugcuacccccgcuaccccggcguccgcugcgucugccgcgacaacuggaagggcuccaaccgccccaucgucgacaucaacaucaaggaccacuccaucgucuccuccuacgucugcuccggccucgucggcgacaccccccgcaagaacgacuccuccuccuccucccacugccucgaccccaacaacgaggagggcggccacggcgucaagggcugggccuucgacgacggcaacgacgucuggaugggccgcaccaucaacgagaccucccgccucggcuacgagaccuucaaggucaucgagggcugguccaaccccaaguccaagcuccagaucaaccgccaggucaucgucgaccgcggcgaccgcuccggcuacuccggcaucuucuccgucgagggcaaguccugcaucaaccgcugcuucuacgucgagcucauccgcggccgcaaggaggagaccgagguccucuggaccuccaacuccaucgucgucuucugcggcaccuccggcaccuacggcaccggcuccuggcccgacggcgccgaccucaaccucaugcccaucuga

SEQ ID NO: 119944 - RNA, 1410 nt, Artificial Sequence
  derived and/or modified CDS sequence (opt2) from neuraminidase__InfluenzaA__AGW01418
augaaccccaaccagaagaucaucaccaucggcuccgucucccucaccaucuccaccaucugcuucuucaugcagaucgccauccucaucaccaccgucacccuccacuucaagcaguacgaguucaacuccccccccaacaaccaggucaugcucugcgagcccaccaucaucgagcgcaacaucaccgagaucgucuaccucaccaacaccaccaucgagaaggagaucugccccaagcccgccgaguaccgcaacugguccaagccccagugcggcaucaccggcuucgcccccuucuccaaggacaacuccauccgccucuccgccggcggcgacaucugggucacccgcgagcccuacgucuccugcgaccccgacaagugcuaccaguucgcccucggccagggcaccacccucaacaacaugcacuccaacaacaccguccgcgaccgcacccccuaccgcacccuccucaugaacgagcucggcguccccuuccaccucggcaccaagcaggucugcaucgccugguccuccuccuccugccacgacggcaaggccuggcuccacgucugcaucaccggcgacgacaagaacgccaccgccuccuucaucuacaacggccgccucgucgacuccgucgucuccugguccaaggagauccuccgcacccaggaguccgagugcgucugcaucaacggcaccugcaccgucgucaugaccgacggcuccgccuccggcaaggccgacaccaagauccucuucaucgaggagggcaagaucguccacaccuccacccucuccggcuccgcccagcacgucgaggagugcuccugcuacccccgcuaccccggcguccgcugcgucugccgcgacaacuggaagggcuccaaccgccccaucgucgacaucaacaucaaggaccacuccaucgucuccuccuacgucugcuccggccucgucggcgacaccccccgcaagaacgacuccuccuccuccucccacugccucgaccccaacaacgaggagggcggccacggcgucaagggcugggccuucgacgacggcaacgacgucuggaugggccgcaccaucaacgagaccucccgccucggcuacgagaccuucaaggucaucgagggcugguccaaccccaaguccaagcuccagaucaaccgccaggucaucgucgaccgcggcgaccgcuccggcuacuccggcaucuucuccgucgagggcaaguccugcaucaaccgcugcuucuacgucgagcucauccgcggccgcaaggaggagaccggcguccucuggaccuccaacuccaucgucgucuucugcggcaccuccggcaccuacggcaccggcuccuggcccgacggcgccgaccucaaccucaugcccaucuga

SEQ ID NO: 119945 - RNA, 1410 nt, Artificial Sequence; identical to SEQ ID NO: 118182
  derived and/or modified CDS sequence (opt2) from neuraminidase__InfluenzaA__AGW01430

SEQ ID NO: 119946 - RNA, 1410 nt, Artificial Sequence; identical to SEQ ID NO: 118182
  derived and/or modified CDS sequence (opt2) from neuraminidase__InfluenzaA__AGW01442

SEQ ID NO: 119947 - RNA, 1410 nt, Artificial Sequence; identical to SEQ ID NO: 118182
  derived and/or modified CDS sequence (opt2) from neuraminidase__InfluenzaA__AGW01454

SEQ ID NO: 119948 - RNA, 1410 nt, Artificial Sequence; identical to SEQ ID NO: 119907
  derived and/or modified CDS sequence (opt2) from neuraminidase__InfluenzaA__AGW01466

SEQ ID NO: 119949 - RNA, 1410 nt, Artificial Sequence; identical to SEQ ID NO: 118182
  derived and/or modified CDS sequence (opt2) from neuraminidase__InfluenzaA__AGW01478

SEQ ID NO: 119950 - RNA, 1410 nt, Artificial Sequence
  derived and/or modified CDS sequence (opt2) from neuraminidase__InfluenzaA__AGW01490
augaaccccaaccagaagaucaucaccaucuccuccgucucccucaccaucuccaccaucugcuucuucaugcagaucgccauccucaucaccaccgucacccuccacuucaagcaguacgaguucaacuccccccccaacaaccaggucaugcucugcgagcccaccaucaucgagcgcaacaucaccgagaucgucuaccucaccaacaccaccaucgagaaggagaucugccccaagcccgccgaguaccgcaacugguccaagccccagugcggcaucaccggcuucgcccccuucuccaaggacaacuccauccgccucuccgccggcggcgacaucugggucacccgcgagcccuacgucuccugcgaccccgacaagugcuaccaguucgcccucggccagggcaccacccucaacaacguccacuccaacaacaccguccgcgaccgcacccccuaccgcacccuccucaugaacgagcucggcguccccuuccaccucggcaccaagcaggucugcaucgccugguccuccuccuccugccacgacggcaaggccuggcuccacgucugcaucaccggcgacgacaagaacgccaccgccuccuucaucuacaacggccgccucgucgacuccgucgucuccugguccaaggagauccuccgcacccaggaguccgagugcgucugcaucaacggcaccugcaccgucgucaugaccgacggcuccgccuccggcaaggccgacaccaagauccucuucaucgaggagggcaagaucguccacaccuccacccucuccggcuccgcccagcacgucgaggagugcuccugcuacccccgcuaccccggcguccgcugcgucugccgcgacaacuggaagggcuccaaccgccccaucgucgacaucaacaucaaggaccacuccaucgucuccuccuacgucugcuccggccucgucggcgacaccccccgcaagaacgacuccuccuccuccucccacugccucgaccccaacaacgaggagggcggccacggcgucaagggcugggccuucgacgacggcaacgacgucuggaugggccgcaccaucaacgagaccucccgccucggcuacgagaccuucaaggucaucgagggcugguccaacuccaaguccaagcuccagaucaaccgccaggucaucgucgaccgcggcgaccgcuccggcuacuccggcaucuucuccgucgagggcaaguccugcaucaaccgcugcuucuacgucgagcucauccgcggccgcaaggaggagaccgagguccucuggaccuccaacuccaucgucgucuucugcggcaccuccggcaccuacggcaccggcuccuggcccgacggcgccgaccucaaccucaugcccaucuga

SEQ ID NO: 119951 - RNA, 1410 nt, Artificial Sequence; identical to SEQ ID NO: 118182
  derived and/or modified CDS sequence (opt2) from neuraminidase__InfluenzaA__AGW01538

SEQ ID NO: 119952 - RNA, 1410 nt, Artificial Sequence; identical to SEQ ID NO: 119907
  derived and/or modified CDS sequence (opt2) from neuraminidase__InfluenzaA__AGW01562

SEQ ID NO: 119953 - RNA, 1410 nt, Artificial Sequence; identical to SEQ ID NO: 118182
  derived and/or modified CDS sequence (opt2) from neuraminidase__InfluenzaA__AGW01574

SEQ ID NO: 119954 - RNA, 1410 nt, Artificial Sequence; identical to SEQ ID NO: 118182
  derived and/or modified CDS sequence (opt2) from neuraminidase__InfluenzaA__AGW01586

SEQ ID NO: 119955 - RNA, 1410 nt, Artificial Sequence; identical to SEQ ID NO: 118182
  derived and/or modified CDS sequence (opt2) from neuraminidase__InfluenzaA__AGW01598

SEQ ID NO: 119956 - RNA, 1410 nt, Artificial Sequence; identical to SEQ ID NO: 119907
  derived and/or modified CDS sequence (opt2) from neuraminidase__InfluenzaA__AGW01610

SEQ ID NO: 119957 - RNA, 1410 nt, Artificial Sequence; identical to SEQ ID NO: 118182
  derived and/or modified CDS sequence (opt2) from neuraminidase__InfluenzaA__AGW01622

SEQ ID NO: 119958 - RNA, 1410 nt, Artificial Sequence; identical to SEQ ID NO: 118182
  derived and/or modified CDS sequence (opt2) from neuraminidase__InfluenzaA__AGW01634

SEQ ID NO: 119959 - RNA, 1410 nt, Artificial Sequence
  derived and/or modified CDS sequence (opt2) from neuraminidase__InfluenzaA__AGW01646
augaaccccaaccagaagaucaucaccaucggcuccgucucccucaccaucuccaccaucugcuucuucaugcagaucgccauccucaucaccaccgucacccuccacuucaagcaguacgaguucaacuccccccccaacaaccaggucaugcucugcgagcccaccaucaucgagcgcaacaucaccgagaucgucuaccucaccaacaccaccaucgagaaggagaucugccccaagcccgccgaguaccgcaacugguccaagccccagugcggcaucaccggcuucgcccccuucuccaaggacaacuccauccgccucuccgccggcggcgacaucugggucacccgcgagcccuacgucuccugcgaccccgacaagugcuaccaguucgcccucggccagggcaccacccucaacaacguccacuccaacaacaccguccgcgaccgcacccccuaccgcacccuccucaugaacgagcucggcguccccuuccaccucggcaccaagcaggucugcaucgccugguccuccuccuccugccacgacggcaaggccuggcuccacgucugcaucaccggcgacgacaagaacgccaccgccuccuucaucuacaacggccgccucgucgacuccgucgucuccugguccaaggagauccuccgcacccaggaguccgagugcgucugcaucgacggcaccugcaccgucgucaugaccgacggcuccgccuccggcaaggccgacaccaagauccucuucaucgaggagggcaagaucguccacaccuccacccucuccggcuccgcccagcacgucgaggagugcuccugcuacccccgcuaccccggcguccgcugcgucugccgcgacaacuggaagggcuccaaccgccccaucgucgacaucaacaucaaggaccacuccaucgucuccuccuacgucugcuccggccucgucggcgacaccccccgcaagaacgacuccuccuccuccucccacugccucgaccccaacaacgaggagggcggccacggcgucaagggcugggccuucgacgacggcaacgacgucuggaugggccgcaccaucaacgagaccucccgccucggcuacgagaccuucaaggucaucgagggcugguccaaccccaaguccaagcuccagaucaaccgccaggucaucgucgaccgcggcgaccgcuccggcuacuccggcaucuucuccgucgagggcaaguccugcaucaaccgcugcuucuacgucgagcucauccgcggccgcaaggaggagaccgagguccucuggaccuccaacuccaucgucgucuucugcggcaccuccggcaccuacggcaccggcuccuggcccgacggcgccgaccucaaccucaugcccaucuga

SEQ ID NO: 119960 - RNA, 1410 nt, Artificial Sequence; identical to SEQ ID NO: 118182
  derived and/or modified CDS sequence (opt2) from neuraminidase__InfluenzaA__AGW01670

SEQ ID NO: 119961 - RNA, 1410 nt, Artificial Sequence; identical to SEQ ID NO: 118182
  derived and/or modified CDS sequence (opt2) from neuraminidase__InfluenzaA__AGW01682

SEQ ID NO: 119962 - RNA, 1410 nt, Artificial Sequence; identical to SEQ ID NO: 119919
  derived and/or modified CDS sequence (opt2) from neuraminidase__InfluenzaA__AGW01704

SEQ ID NO: 119963 - RNA, 1410 nt, Artificial Sequence
  derived and/or modified CDS sequence (opt2) from neuraminidase__InfluenzaA__AGW01716
augaaccccaaccagaagaucaucaccaucggcuccgucucccucaccaucuccaccaucugcuucuucaugcagaucgccauccucaucaccaccgucacccuccacuucaagcaguacgaguucaacuccccccccaacaaccaggucaugcucugcgagcccaccaucaucgagcgcaacaucaccgagaucgucuaccucaccaacaccaccaucgagaaggagaucugccccaagcccgccgaguaccgcaacugguccaagccccagugcggcaucaccggcuucgcccccuucuccaaggacaacuccauccgccucuccgccggcggcgacaucugggucacccgcgagcccuacgucuccugcgaccccgacaagugcuaccaguucgcccucggccagggcaccacccucaacaacaugcacuccaacaacaccguccgcgaccgcacccccuaccgcacccuccucaugaacgagcucggcguccccuuccaccucggcaccaagcaggucugcaucgccugguccuccuccuccugccacgacggcaaggccuggcuccacgucugcaucaccggcgacgacaagaacgccaccgccuccuucaucuacaacggccgccucgucgacuccgucgucuccugguccaaggagauccuccgcacccaggaguccgagugcgucugcaucaacggcaccugcaccgucgucaugaccgacggcuccgccuccggcaaggccgacaccaagauccucuucaucgaggagggcaagaucguccacaccuccacccucuccggcuccgcccagcacgucgaggagugcuccugcuacccccgcuaccccggcguccgcugcgucugccgcgacaacuggaagggcuccaaccgccccaucgucgacaucaacaucaaggaccacuccaucgucuccuccuacgucugcuccggccucgucggcgacaccccccgcaagaacgacuccuccuccuccucccacugccucgaccccaacaacgaggagggcggccacggcgucaagggcugggccuucgacgacggcaacgacgucuggaugggccgcaccaucaacgagaccucccgccucggcuacgagaccuucaaggucaucgagggcugguccaaccccaaguccaagcuccagaucaaccgccaggucaucgucgaccgcggcgaccgcuccggcuacuccggcaucuucuccgucgagggccgcuccugcaucaaccgcugcuucuacgucgagcucauccgcggccgcaaggaggagaccgagguccucuggaccuccaacuccaucgucgucuucugcggcaccuccggcaccuacggcaccggcuccuggcccgacggcgccgaccucaaccucaugcccaucuga

SEQ ID NO: 119964 - RNA, 1410 nt, Artificial Sequence
  derived and/or modified CDS sequence (opt2) from neuraminidase__InfluenzaA__AGW01728
augaaccccaaccagaagaucaucaccaucggcuccgucucccucaccaucuccaccaucugcuucuucaugcagaucgccauccucaucaccaccgucacccuccacuucaagcaguacgaguucaacuccccccccaacaaccaggucaugcucugcgagcccaccaucaucgagcgcaacaucaccgagaucgucuaccucaccaacaccaccaucgagaaggagaucugccccaagcccgccgaguaccgcaacugguccaagccccagugcggcaucaccggcuucgcccccuucuccaaggacaacuccauccgccucuccgccggcggcgacaucugggucacccgcgagcccuacgucuccugcgaccccgacaagugcuaccaguucgcccucggccagggcaccacccucaacaacaugcacuccaacaacaccguccgcgaccgcacccccuaccgcacccuccucaugaacgagcucggcguccccuuccaccucggcaccaagcaggucugcaucgccugguccuccuccuccugccacgacggcaaggccuggcuccacgucugcaucaccggcgacgacaagaacgccaccgccuccuucaucuacaacggccgccucgucgacuccgucgucuccugguccaaggagauccuccgcacccaggaguccgagugcgucugcaucaacggcaccugcaccgucgucaugaccgacggcuccgccuccggcaaggccgacaccaagauccucuucaucgaggagggcaagaucguccacaccuccacccucuccggcuccgcccagcacgucgaggagugcuccugcuacccccgcuaccccggcguccgcugcgucugccgcgacaacuggaagggcuccaaccgccccaucgucgacaucaacaucaaggaccacuccaucgucuccuccuacgucugcuccggccucgucggcgacaccccccgcaagaacgacuccuccuccuccucccacugccucgaccccaacaacgaggagggcggccacggcgucaagggcugggccuucgacgacggcaacgacgucuggaugggccgcaccaucaacgagaccucccgccucggcuacgagaccuucaaggucaucgagggcugguccaaccccaaguccaagcuccagaucaaccgccaggucaucgucgaccgcggcgaccgcuccggcuacuccggcaucuucuccgucgagggcaaguccugcaucaaccgcugcuucuacgucgagcucauccgcggccgcaaggaggagaccgagguccucuggaccuccaacuccgucgucgucuucugcggcaccuccggcaccuacggcaccggcuccuggcccgacggcgccgaccucaaccucaugcccaucuga

SEQ ID NO: 119965 - RNA, 1410 nt, Artificial Sequence; identical to SEQ ID NO: 118182
  derived and/or modified CDS sequence (opt2) from neuraminidase__InfluenzaA__AGW01740

SEQ ID NO: 119966 - RNA, 1410 nt, Artificial Sequence
  derived and/or modified CDS sequence (opt2) from neuraminidase__InfluenzaA__AGW01752
augaaccccaaccagaagaucaucaccaucggcuccgucucccucaccaucuccaccaucugcuucuucaugcagaucgccauccucaucaccaccgucacccuccacuucaagcaguacgaguucaacuccccccccaacaaccaggucaugcucugcgagcccaccaucaucgagcgcaacaucaccgagaucgucuaccucaccaacaccaccaucgagaaggagaucugccccaagcccgccgaguaccgcaacugguccaagccccagugcggcaucaccggcuucgcccccuucuccaaggacaacuccauccgccucuccgccggcggcgacaucugggucacccgcgagcccuacgucuccugcgaccccgacaagugcuaccaguucgcccucggccagggcaccacccucaacaacguccacuccaacaacaccguccgcgaccgcacccccuaccgcacccuccucaugaacgagcucggcguccccuuccaccucggcaccaagcaggucugcaucgccugguccuccuccuccugccacgacggcaaggccuggcuccacgucugcaucaccggcgacgacaagaacgccaccgccuccuucaucuacaacggccgccucgucgacuccgucgucuccugguccaaggagauccuccgcacccaggaguccgagugcgucugcaucaacggcaccugcaccgucgucaugaccgacggcuccgccuccggcaaggccgacaccaagauccucuucaucgaggagggcaagaucguccacaccuccacccucuccggcuccgcccagcacgucgaggagugcuccugcuacccccgcuaccccggcguccgcugcgucugccgcgacaacuggaagggcuccaaccgccccaucgucgacaucaacaucaaggaccacuccaucgucuccuccuacgucugcuccggccucgucggcgacaccccccgcaagaacgacuccuccuccuccucccacugccucgaccccaacaacgaggagggcggccacggcgucaagggcugggccuucgacgacggcaacgacgucuggaugggccgcaccaucaacgagaccucccgccucggcuacgagaccuucaaggucaucggcggcugguccaaccccaaguccaagcuccagaucaaccgccaggucaucgucgaccgcggcgaccgcuccggcuacuccggcaucuucuccgucgagggcaaguccugcaucaaccgcugcuucuacgucgagcucauccgcggccgcaaggaggagaccgagguccucuggaccuccaacuccaucgucgucuucugcggcaccuccggcaccuacggcaccggcuccuggcccgacggcgccgaccucaaccucaugcccaucuga

SEQ ID NO: 119967 - RNA, 1410 nt, Artificial Sequence; identical to SEQ ID NO: 118182
  derived and/or modified CDS sequence (opt2) from neuraminidase__InfluenzaA__AGW01764

SEQ ID NO: 119968 - RNA, 1410 nt, Artificial Sequence; identical to SEQ ID NO: 119919
  derived and/or modified CDS sequence (opt2) from neuraminidase__InfluenzaA__AGW01776

SEQ ID NO: 119969 - RNA, 1410 nt, Artificial Sequence; identical to SEQ ID NO: 119907
  derived and/or modified CDS sequence (opt2) from neuraminidase__InfluenzaA__AGW01788

SEQ ID NO: 119970 - RNA, 1410 nt, Artificial Sequence; identical to SEQ ID NO: 119919
  derived and/or modified CDS sequence (opt2) from neuraminidase__InfluenzaA__AGW01800

SEQ ID NO: 119971 - RNA, 1410 nt, Artificial Sequence; identical to SEQ ID NO: 119907
  derived and/or modified CDS sequence (opt2) from neuraminidase__InfluenzaA__AGW01812

SEQ ID NO: 119972 - RNA, 1410 nt, Artificial Sequence; identical to SEQ ID NO: 119907
  derived and/or modified CDS sequence (opt2) from neuraminidase__InfluenzaA__AGW01824

SEQ ID NO: 119973 - RNA, 1410 nt, Artificial Sequence; identical to SEQ ID NO: 119930
  derived and/or modified CDS sequence (opt2) from neuraminidase__InfluenzaA__AGW01848

SEQ ID NO: 119974 - RNA, 1410 nt, Artificial Sequence
  derived and/or modified CDS sequence (opt2) from neuraminidase__InfluenzaA__AGW01860
augaaccccaaccagaagaucaucaccaucggcuccgucucccucaccaucuccaccaucugcuucuucaugcagaucgccauccucaucaccaccgucacccuccacuucaagcaguacgaguucaacucccuccccaacaaccaggucaugcucugcgagcccaccaucaucgagcgcaacaucaccgagaucgucuaccucaccaacaccaccaucgagaaggagaucugccccaagcccgccgaguaccgcaacugguccaagccccagugcggcaucaccggcuucgcccccuucuccaaggacaacuccauccgccucuccgccggcggcgacaucugggucacccgcgagcccuacgucuccugcgaccccgacaagugcuaccaguucgcccucggccagggcaccacccucaacaacguccacuccaacaacaccguccgcgaccgcacccccuaccgcacccuccucaugaacgagcucggcguccccuuccaccucggcaccaagcaggucugcaucgccugguccuccuccuccugccacgacggcaaggccuggcuccacgucugcaucaccggcgacgacaagaacgccaccgccuccuucaucuacaacggccgccucgucgacuccgucgucuccugguccaaggagauccuccgcacccaggaguccgagugcgucugcaucaacggcaccugcaccgucgucaugaccgacggcuccgccuccggcaaggccgacaccaagauccucuucaucgaggagggcaagaucguccacaccuccacccucuccggcuccgcccagcacgucgaggagugcuccugcuacccccgcuaccccggcguccgcugcgucugccgcgacaacuggaagggcuccaaccgccccaucgucgacaucaacaucaaggaccacuccaucgucuccuccuacgucugcuccggccucgucggcgacaccccccgcaagaacgacuccuccuccuccucccacugcuucgaccccaacaacgaggagggcggccacggcgucaagggcugggccuucgacgacggcaacgacgucuggaugggccgcaccaucaacgagaccucccgccucggcuacgagaccuucaaggucaucggcggcugguccaaccccaaguccaagcuccagaucaaccgccaggucaucgucgaccgcggcgaccgcuccggcuacuccggcaucuucuccgucgagggcaaguccugcaucaaccgcugcuucuacgucgagcucauccgcggccgcaaggaggagaccgagguccucuggaccuccaacuccaucaucgucuucugcggcaccuccggcaccuacggcaccggcuccuggcccgacggcgccgaccucaaccucaugcccaucuga

SEQ ID NO: 119975 - RNA, 1410 nt, Artificial Sequence
  derived and/or modified CDS sequence (opt2) from neuraminidase__InfluenzaA__AGW01884
augaaccccaaccagaagaucaucaccaucggcuccgucucccucaccaucuccaccaucugcuucuucaugcagaucgccauccucaucaccaccgucacccuccacuucaagcaguacgaguucaacuccccccccaacaaccaggucaugcucugcgagcccaccaucaucgagcgcaacaucaccaagaucgucuaccucaccaacaccaccaucgagaaggagaucugccccaagcccgccgaguaccgcaacugguccaagccccagugcggcaucaccggcuucgcccccuucuccaaggacaacuccauccgccucuccgccggcggcgacaucugggucacccgcgagcccuacgucuccugcgaccccgacaagugcuaccaguucgcccucggccagggcaccacccucaacaacguccacuccaacaacaccguccgcgaccgcacccccuaccgcacccuccucaugaacgagcucggcguccccuuccaccucggcaccaagcaggucugcaucgccugguccuccuccuccugccacgacggcaaggccuggcuccacgucugcaucaccggcgacgacaagaacgccaccgccuccuucaucuacaacggccgccucgucgacuccgucgucuccugguccaaggagauccuccgcacccaggaguccgagugcgucugcaucaacggcaccugcaccgucgucaugaccgacggcuccgccuccggcaaggccgacaccaagauccucuucaucgaggagggcaagaucguccacaccuccacccucuccggcuccgcccagcacgucgaggagugcuccugcuacccccgcuaccccggcguccgcugcgucugccgcgacaacuggaagggcuccaaccgccccaucgucgacaucaacaucaaggaccacuccaucgucuccuccuacgucugcuccggccucgucggcgacaccccccgcaagaacgacuccuccuccuccucccacugccucgaccccaacaacgaggagggcggccacggcgucaagggcugggccuucgacgacggcaacgacgucuggaugggccgcaccaucaacgagaccucccgccucggcuacgagaccuucaaggucaucgagggcugguccaaccccaaguccaagcuccagaucaaccgccaggucaucgucgaccgcggcgaccgcuccggcuacuccggcaucuucuccgucgagggcaaguccugcaucaaccgcugcuucuacgucgagcucauccgcggccgcaaggaggagaccgagguccucuggaccuccaacuccaucgucgucuucugcggcaccuccggcaccuacggcaccggcuccuggcccgacggcgccgaccucaaccucaugcccaucuga

SEQ ID NO: 119976 - RNA, 1410 nt, Artificial Sequence; identical to SEQ ID NO: 118182
  derived and/or modified CDS sequence (opt2) from neuraminidase__InfluenzaA__AGW01896

SEQ ID NO: 119977 - RNA, 1410 nt, Artificial Sequence; identical to SEQ ID NO: 118182
  derived and/or modified CDS sequence (opt2) from neuraminidase__InfluenzaA__AGW01908

SEQ ID NO: 119978 - RNA, 1410 nt, Artificial Sequence; identical to SEQ ID NO: 118182
  derived and/or modified CDS sequence (opt2) from neuraminidase__InfluenzaA__AGW01920

SEQ ID NO: 119979 - RNA, 1410 nt, Artificial Sequence; identical to SEQ ID NO: 118182
  derived and/or modified CDS sequence (opt2) from neuraminidase__InfluenzaA__AGW01932

SEQ ID NO: 119980 - RNA, 1410 nt, Artificial Sequence
  derived and/or modified CDS sequence (opt2) from neuraminidase__InfluenzaA__AGW01944
augaaccccaaccagaagaucaucaccaucggcuccgucucccucaccaucuccaccaucugcuucuucaugcagaucgccauccucaucaccaccgucacccuccacuucaagcaguacgaguucaacuucccccccaacaaccaggucaugcucugcgagcccaccaucaucgagcgcaacaucaccgagaucgucuaccucaccaacaccaccaucgagaaggagaucugccccaagcccgccgaguaccgcaacugguccaagccccagugcggcaucaccggcuucgcccccuucuccaaggacaacuccauccgccucuccgccggcggcgacaucugggucacccgcgagcccuacgucuccugcgaccccgacaagugcuaccaguucgcccucggccagggcaccacccucaacaacguccacuccaacaacaccguccgcgaccgcacccccuaccgcacccuccucaugaacgagcucggcguccccuuccaccucggcaccaagcaggucugcaucgccugguccuccuccuccugccacgacggcaaggccuggcuccacgucugcaucaccggcgacgacaagaacgccaccgccuccuucaucuacaacggccgccucgucgacuccgucgucuccugguccaaggagauccuccgcacccaggaguccgagugcgucugcaucaacggcaccugcaccgucgucaugaccgacggcuccgccuccggcaaggccgacaccaagauccucuucaucgaggagggcaagaucguccacaccuccacccucuccggcuccgcccagcacgucgaggagugcuccugcuacccccgcuaccccggcguccgcugcgucugccgcgacaacuggaagggcuccaaccgccccaucgucgacaucaacaucaaggaccacuccaucgucuccuccuacgucugcuccggccucgucggcgacaccccccgcaagaacgacuccuccuccuccucccacugccucgcccccaacaacgaggagggcggccacggcgucaagggcugggccuucgacgacggcaacgacgucuggaugggccgcaccaucaacgagaccucccgccucggcuacgagaccuucaaggucaucgagggcugguccaaccccaaguccaagcuccagaucaaccgccaggucaucgucgaccgcggcgaccgcuccggcuacuccggcaucuucuccgucgagggcaaguccugcaucaaccgcugcuucuacgucgagcucauccgcggccgcaaggaggagaccgagguccucuggaccuccaacuccaucgucgucuucugcggcaccuccggcaccuacggcaccggcuccuggcccgacggcgccgaccucaaccucaugcccaucuga

SEQ ID NO: 119981 - RNA, 1410 nt, Artificial Sequence; identical to SEQ ID NO: 118182
  derived and/or modified CDS sequence (opt2) from neuraminidase__InfluenzaA__AGW01956

SEQ ID NO: 119982 - RNA, 1410 nt, Artificial Sequence
  derived and/or modified CDS sequence (opt2) from neuraminidase__InfluenzaA__AGW01968
augaaccccaaccagaagaucaucaccaucggcuccgucucccucaccaucuccaccaucugcuucuucaugcagaucgccauccucaucaccaccgucacccuccacuucaagcaguacgaguucaacuccccccccaacaaccaggucaugcucugcgagcccaccaucaucgagcgcaacaucaccgagaucgucuaccucaccaacaccaccaucgagaaggagaucugccccaagcccgccgaguaccgcaacugguccaagccccagugcgacaucaccggcuucgcccccuucuccaaggacaacuccauccgccucuccgccggcggcgacaucugggucacccgcgagcccuacgucuccugcgaccccgacaagugcuaccaguucgcccucggccagggcaccacccucaacaacguccacuccaacaacaccauccgcgaccgcacccccuaccgcacccuccucaugaacgagcucggcguccccuuccaccucggcaccaagcaggucugcaucgccugguccuccuccuccugccacgacggcaaggccuggcuccacgucugcaucaccggcgacgacgagaacgccaccgccuccuucaucuacaacggccgccucgucgacuccgucgucuccugguccaaggagauccuccgcacccaggaguccgagugcgucugcaucaacggcaccugcaccgucgucaugaccgacggcuccgccuccggcaaggccgacaccaagauccucuucaucgaggagggcaagaucguccacaccuccacccucuccggcuccgcccagcacgucgaggagugcuccugcuacccccgcuaccccggcguccgcugcgucugccgcgacaacuggaagggcuccaaccgccccaucgucgacaucaacaucaaggaccacuccaucgucucccgcuacgucugcuccggccucgucggcgacaccccccgcaagaacgacuccuccuccuccucccacugccucgaccccaacaacgaggagggcggccacggcgucaagggcugggccuucgacgacggcaacgacgucuggaugggccgcaccaucaacgagaccucccgccucggcuacgagaccuucaaggucaucgagggcugguccaaccccaaguccaagcuccagaucaaccgccaggucaucgucgaccgcggcgaccgcuccggcuacuccggcaucuucuccgucgagggcaaguccugcaucaaccgcugcuucuacgucgagcucauccgcggccgcaaggaggagaccgagguccucuggaccuccaacuccaucgucgucuucugcggcaccuccggcaccuacggcaccggcuccuggcccgacggcgccgaccucaaccucaugcccaucuga

SEQ ID NO: 119983 - RNA, 1410 nt, Artificial Sequence; identical to SEQ ID NO: 119907
  derived and/or modified CDS sequence (opt2) from neuraminidase__InfluenzaA__AGW01980

SEQ ID NO: 119984 - RNA, 1410 nt, Artificial Sequence; identical to SEQ ID NO: 118182
  derived and/or modified CDS sequence (opt2) from neuraminidase__InfluenzaA__AGW01992

SEQ ID NO: 119985 - RNA, 1410 nt, Artificial Sequence; identical to SEQ ID NO: 118182
  derived and/or modified CDS sequence (opt2) from neuraminidase__InfluenzaA__AGW02004

SEQ ID NO: 119986 - RNA, 1410 nt, Artificial Sequence; identical to SEQ ID NO: 118182
  derived and/or modified CDS sequence (opt2) from neuraminidase__InfluenzaA__AGW02016

SEQ ID NO: 119987 - RNA, 1410 nt, Artificial Sequence; identical to SEQ ID NO: 118182
  derived and/or modified CDS sequence (opt2) from neuraminidase__InfluenzaA__AGW02040

SEQ ID NO: 119988 - RNA, 1410 nt, Artificial Sequence
  derived and/or modified CDS sequence (opt2) from neuraminidase__InfluenzaA__AGW02064
augaaccccaaccagaagaucaucaccaucggcuccgucucccucaccaucuccaccaucugcuucuucaugcagaucgccauccucaucaccaccgucacccuccacuucaagcaguacgaguucgacuccccccccaacaaccaggucaugcucugcgagcccaccaucaucgagcgcaacaucaccgagaucgucuaccucaccaacaccaccaucgagaaggagaucugccccaagcccgccgaguaccgcaacugguccaagccccagugcggcaucaccggcuucgcccccuucuccaaggacaacuccauccgccucuccgccggcggcgacaucugggucacccgcgagcccuacgucuccugcgaccccgacaagugcuaccaguucgcccucggccagggcaccacccucaacaacguccacuccaacaacaccguccgcgaccgcacccccuaccgcacccuccucaugaacgagcucggcguccccuuccaccucggcaccaagcaggucugcaucgccugguccuccuccuccugccacgacggcaaggccuggcuccacgucugcaucaccggcgacgacaagaacgccaccgccuccuucaucuacaacggccgccucgucgacuccgucgucuccugguccaaggagauccuccgcacccaggaguccgagugcgucugcaucaacggcaccugcaccgucgucaugaccgacggcuccgccuccggcaaggccgacaccaagauccucuucaucgaggagggcaagaucguccacaccuccacccucuccggcuccgcccagcacgucgaggagugcuccugcuacccccgcuaccccggcguccgcugcgucugccgcgacaacuggaagggcuccaaccgccccaucgucgacaucaacaucaaggaccacuccaucgucuccuccuacgucugcuccggccucgucggcgacaccccccgcaagaacgacuccuccuccuccggccacugccucgaccccaacaacgaggagggcggccacggcgucaagggcugggccuucgacgacggcaacgacgucuggaugggccgcaccaucaacgagaccucccgccucggcuacgagaccuucaaggucaucgagggcugguccaaccccaaguccaagcuccagaucaaccgccaggucaucgucgaccgcggcgaccgcuccggcuacuccggcaucuucuccgucgagggcaaguccugcaucaaccgcugcuucuacgucgagcucauccgcggccgcaaggaggagaccgagguccucuggaccuccaacuccaucgucgucuucugcggcaccuccggcaccuacggcaccggcuccuggcccgacggcgccgaccucaaccucaugcccaucuga

SEQ ID NO: 119989 - RNA, 1410 nt, Artificial Sequence; identical to SEQ ID NO: 118182
  derived and/or modified CDS sequence (opt2) from neuraminidase__InfluenzaA__AGW02076

SEQ ID NO: 119990 - RNA, 1410 nt, Artificial Sequence; identical to SEQ ID NO: 118182
  derived and/or modified CDS sequence (opt2) from neuraminidase__InfluenzaA__AGW02088

SEQ ID NO: 119991 - RNA, 1410 nt, Artificial Sequence
  derived and/or modified CDS sequence (opt2) from neuraminidase__InfluenzaA__AGW02100
augaaccccaaccagaagaucaucaccaucggcuccgucucccucaccaucuccaccaucugcuucuucaugcagaucgccauccucaucaccaccgucacccuccacuucaagcaguacgaguccaacuccccccccaacaaccaggucaugcucugcgagcccaccaucaucgagcgcaacaucaccgagaucgucuaccucaccaacaccaccaucgagaaggagaucugccccaagcccgccgaguaccgcaacugguccaagccccagugcggcaucaccggcuucgcccccuucuccaaggacaacuccauccgccucuccgccggcggcgacaucugggucacccgcgagcccuacgucuccugcgaccccgacaagugcuaccaguucgcccucggccagggcaccacccucaacaacguccacuccaacaacaccguccgcgaccgcacccccuaccgcacccuccucaugaacgagcucggcguccccuuccaccucggcaccaagcaggucugcaucgccugguccuccuccuccugccacgacggcaaggccuggcuccacgucugcaucaccggcgacgacaagaacgccaccgccuccuucaucuacaacggccgccucgucgacuccgucgucuccugguccaaggagauccuccgcacccaggaguccgagugcgucugcaucaacggcaccugcaccgucgucaugaccgacggcuccgccuccggcaaggccgacaccaagauccucuucaucgaggagggcaagaucguccacaccuccacccucuccggcuccgcccagcacgucgaggagugcuccugcuacccccgcuaccccggcguccgcugcgucugccgcgacaacuggaagggcuccaaccgccccaucgucgacaucaacaucaaggaccacuccaucgucuccuccuacgucugcuccggccucgucggcgacaccccccgcaagaacgacuccuccuccuccucccacugccucgaccccaacaacgaggagggcggccacggcgucaagggcugggccuucgacgacggcaacgacgucuggaugggccgcaccaucaacgagaccucccgccucggcuacgagaccuucaaggucaucgagggcugguccaaccccaaguccaagcuccagaucaaccgccaggucaucgucgaccgcggcgaccgcuccggcuacuccggcaucuucuccgucgagggcaaguccugcaucaaccgcugcuucuacgucgagcucauccgcggccgcaaggaggagaccgagguccucuggaccuccaacuccaucgucgucuucugcggcaccuccggcaccuacggcaccggcuccuggcccgacggcgccgaccucaaccucaugcccaucuga

SEQ ID NO: 119992 - RNA, 1410 nt, Artificial Sequence; identical to SEQ ID NO: 119919
  derived and/or modified CDS sequence (opt2) from neuraminidase__InfluenzaA__AGW02112

SEQ ID NO: 119993 - RNA, 1410 nt, Artificial Sequence
  derived and/or modified CDS sequence (opt2) from neuraminidase__InfluenzaA__AGW02124
augaaccccaaccagaagaucaucaccaucggcuccgucucccucaccaucuccaccaucugcuucuucaugcagaucgccauccucaucaccaccgucacccuccacuucaagcaguacgaguucaacuccccccccaacaaccaggucaugcucugcgagcccaccaucaucgagcgcaacaucaccgagaucgucuaccucaccaacaccaccaucgagaaggagaucugccccaagcccgccgaguaccgcaacugguccaagccccagugcggcaucaccggcuucgcccccuucuccaaggacaacuccauccgccucuccgccggcggcgacaucugggucacccgcgagcccuacgucuccugcgaccccgacaagugcuaccaguucgcccucggccagggcaccacccucaacaacguccacuccaacaacaccgucuccgaccgcacccccuaccgcacccuccucaugaacgagcucggcguccccuuccaccucggcaccaagcaggucugcaucgccugguccuccuccuccugccacgacggcaaggccuggcuccacgucugcaucaccggcgacgacaagaacgccaccgccuccuucaucuacaacggccgccucgucgacuccgucgucuccugguccaaggagauccuccgcacccaggaguccgagugcgucugcaucaacggcaccugcaccgucgucaugaccgacggcuccgccuccggcaaggccgacaccaagauccucuucaucgaggagggcaagaucguccacaccuccacccucuccggcuccgcccagcacgucgaggagugcuccugcuacccccgcuaccccggcguccgcugcgucugccgcgacaacuggaagggcuccaaccgccccaucgucgacaucaacaucaaggaccacuccaucgucuccuccuacgucugcuccggccucgucggcgacaccccccgcaagaacgacuccuccuccuccucccacugccucgaccccaacaacgaggagggcggccacggcgucaagggcugggccuucgacgacggcaacgacgucuggaugggccgcaccaucaacgagaccucccgccucggcuacgagaccuucaaggucaucgagggcugguccaaccccaaguccaagcuccagaucaaccgccaggucaucgucgaccgcggcgaccgcuccggcuacuccggcaucuucuccgucgagggcaaguccugcaucaaccgcugcuucuacgucgagcucauccgcggccgcaaggaggagaccgagguccucuggaccuccaacuccaucgucgucuucugcggcaccuccggcaccuacggcaccggcuccuggcccgacggcgccgaccucaaccucaugcccaucuga

SEQ ID NO: 119994 - RNA, 1410 nt, Artificial Sequence; identical to SEQ ID NO: 119907
  derived and/or modified CDS sequence (opt2) from neuraminidase__InfluenzaA__AGW02136

SEQ ID NO: 119995 - RNA, 1410 nt, Artificial Sequence; identical to SEQ ID NO: 119919
  derived and/or modified CDS sequence (opt2) from neuraminidase__InfluenzaA__AGW02148

SEQ ID NO: 119996 - RNA, 1410 nt, Artificial Sequence
  derived and/or modified CDS sequence (opt2) from neuraminidase__InfluenzaA__AGW02160
augaaccccaaccagaagaucaucaccaucggcuccgucucccucaccaucuccaccaucugcuucuucaugcagaucgccauccucaucaccaccgucacccuccacuucaagcaguacgaguucgacuccccccccaacaaccaggucaugcucugcgagcccaccaucaucgagcgcaacaucaccgagaucgucuaccucaccaacaccaccaucgagaaggagaucugccccaagcccgccgaguaccgcaacugguccaagccccagugcggcaucaccggcuucgcccccuucuccaaggacaacuccauccgccucuccgccggcggcgacaucugggucacccgcgagcccuacgucuccugcgaccccgacaagugcuaccaguucgcccucggccagggcaccacccucaacaacguccacuccaacaacaccguccgcgaccgcacccccuaccgcacccuccucaugaacgagcucggcguccccuuccaccucggcaccaagcaggucugcaucgccugguccuccuccuccugccacgacggcaaggccuggcuccacgucugcaucaccggcgacgacaagaacgccaccgccuccuucaucuacaacggccgccucgucgacuccgucgucuccugguccaaggagauccuccgcacccaggaguccgagugcgucugcaucaacggcaccugcaccgucgucaugaccgacggcuccgccuccggcaaggccgacaccaagauccucuucaucgaggagggcaagaucguccacaccuccacccucuccggcuccgcccagcacgucgaggagugcuccugcuacccccgcuaccccggcguccgcugcgucugccgcgacaacuggaagggcuccaaccgccccaucgucgacaucaacaucaaggaccacuccaucgucuccuccuacgucugcuccggccucgucggcgacaccccccgcaagaacgacuccuccuccuccucccacugccucgaccccaacaacgaggagggcggccacggcgucaagggcugggccuucgacgacggcaacgacgucuggaugggccgcaccaucaacgagaccucccgccucggcuacgagaccuucaaggucaucgagggcugguccaaccccaaguccaagcuccagaucaaccgccaggucaucgucgaccgcuccgaccgcuccggcuacuccggcaucuucuccgucgagggcaaguccugcaucaaccgcugcuucuacgucgagcucauccgcggccgcaaggaggagaccgagguccucuggaccuccaacuccaucgucgucuucugcggcaccuccggcaccuacggcaccggcuccuggcccgacggcgccgaccucaaccucaugcccaucuga

SEQ ID NO: 119997 - RNA, 1410 nt, Artificial Sequence; identical to SEQ ID NO: 118182
  derived and/or modified CDS sequence (opt2) from neuraminidase__InfluenzaA__AGW02172

SEQ ID NO: 119998 - RNA, 1410 nt, Artificial Sequence; identical to SEQ ID NO: 118182
  derived and/or modified CDS sequence (opt2) from neuraminidase__InfluenzaA__AGW02184

SEQ ID NO: 119999 - RNA, 1410 nt, Artificial Sequence
  derived and/or modified CDS sequence (opt2) from neuraminidase__InfluenzaA__AGW02196
augaaccccaaccagaagaucaucaccaucggcuccgucucccucaccaucuccaccaucugcuucuucaugcagaucgccauccucaucaccaccgucacccuccacuucaagcaguacgaguucaacuccccccccaacaaccaggucaugcucugcgagcccaccaucaucgagcgcaacaucaccgagaucgucuaccucaucaacaccaccaucgagaaggagaucugccccaagcccgccgaguaccgcaacugguccaagccccagugcggcaucaccggcuucgcccccuucuccaaggacaacuccauccgccucuccgccggcggcgacaucugggucacccgcgagcccuacgucuccugcgaccccuacaagugcuaccaguucgcccucggccagggcaccacccucaacaacguccacuccaacaacaccguccgcgaccgcacccccuaccgcacccuccucaugaacgagcucggcguccccuuccaccucggcaccaagcaggucugcaucgccugguccuccuccuccugccacgacggcaaggccuggcuccacgucugcaucaccggcgacgacaagaacgccaccgccuccuucaucuacaacggccgccucgucgacuccgucgucuccugguccaaggagauccuccgcacccaggaguccgagugcgucugcaucaacggcaccugcaccgucgucaugaccgacggcuccgccuccggcaaggccgacaccaagauccucuucaucgaggagggcaagaucguccacaccuccacccucuccggcuccgcccagcacgucgaggagugcuccugcuacccccgcuaccccggcguccgcugcgucugccgcgacaacuggaagggcuccaaccgccccaucgucgacaucaacaucaaggaccacuccaucgucuccuccuacgucugcuccggccucgucggcgacaccccccgcaagaacgacuccuccuccuccucccacugccucgaccccaacaacgaggagggcggccacggcgucaagggcugggccuucgacgacggcaacgacgucuggaugggccgcaccaucaacgagaccucccgccucggcuacgagaccuucaaggucaucgagggcugguccaaccccaaguccaagcuccagaucaaccgccaggucaucgucgaccgcggcgaccgcuccggcuacuccggcaucuucuccgucgagggcaaguccugcaucaaccgcugcuucuacgucgagcucauccgcggccgcaaggaggagaccgagguccucuggaccuccaacuccaucgucgucuucugcggcaccuccggcaccuacggcaccggcuccuggcccgacggcgccgaccucaaccucaugcccaucuga

SEQ ID NO: 120000 - RNA, 1410 nt, Artificial Sequence; identical to SEQ ID NO: 119411
  derived and/or modified CDS sequence (opt2) from neuraminidase__InfluenzaA__AGW04174

SEQ ID NO: 120001 - RNA, 1410 nt, Artificial Sequence
  derived and/or modified CDS sequence (opt2) from neuraminidase__InfluenzaA__AGW25784
augaaccccaaccagaagaucaucaccaucggcuccgucucccucaucaucgccaccaucugcuuccucaugcagaucgccauccucgucaccaccgucacccuccacuucaagcaguacggcuacaacucccuccccaacaaccaggucaugcucugcgagcccaccaucaucgagcgcaacaucaccgagaucgucuaccucaccaacaccaccaucgagaaggagaucugccccaagcucgccgaguaccgcaacugguccaagccccagugcaagaucaccggcuucgcccccuucuccaaggacaacuccauccgccucuccgccggcggcgacaucugggucacccgcgagcccuacgucuccugcgaccccuacaagugcuaccaguucgcccucggccagggcaccacccucaacaacaagcacuccaacgacaccguccacgaccgcacccccuaccgcacccuccucaugaacgagcucggcguccccuuccaccucggcaccaagcaggucugcaucgccugguccuccuccuccugccacgacggcaaggccuggcuccacaucugcgucaccggccacgacgagaacgccaccgccuccuucaucuacgacggcaagcucgucgacuccaucggcuccugguccaagaagauccuccgcacccaggaguccgagugcgucugcaucaacggcaccugcaccgucgucaugaccgacggcuccgccuccggccgcgccgacaccaagauccucuucaucgaggagggcaagaucauccacaucucccagcucuccggcuccgcccagcacgucgaggagugcuccugcuacccccgcuaccccggcauccgcugcgucugccgcgacaacuggaagggcuccaaccgccccaucgucgacaucaacgucaaggacuacuccaucaccuccuccuacgucugcuccggccucgucggcgacaccccccgcaagaccgacaacuccuccuccucccacugccucaaccccaacaacgaggagggcggccacggcgucaagggcugggccuucgacgacggcaacgacgucuggaugggccgcaccaucuccgagaaguuccgcuccggcuacgagaccuucaaggucaucaagggcugguccaagcccaacuccaagcuccagaucaaccgccaggucaucgucgaccgcgacaaccgcuccggcuacuccggcaucuucuccgucgagggcaaguccugcaucaaccgcugcuucuacgucgagcucauccgcggccgcaagcgcgaggccgaggucugguggaccuccaacuccaucgucgucuucugcggcaccuccggcaccuacggcaccggcuccuggcccgacggcgccgacaucaaccucaugcccaucuga

SEQ ID NO: 120002 - RNA, 1350 nt, Artificial Sequence
  derived and/or modified CDS sequence (opt2) from neuraminidase__InfluenzaA__AGW27062
augaaccccaaccagaagaucgucaccaucggcuccaucugcauggucaucggcaccaucucccucaugcuccagaucggcaacaucaucuccaucugggucucccacuccauccagaccggcaaccagcaccagaccgagcccauccgcaacaccaacuuccucaccgagaacgccgucgccuccgucacccucgccggcaacuccucccucugccccauccgcggcugggccguccacuccaaggacaacuccauccgcaucggcuccaagggcgacgucuucgucauccgcgagcccuucaucuccugcucccaccucgagugccgcaccuucuuccucacccagggcgcccuccucaacgacaagcacuccaacggcaccgucaaggaccgcuccccccaccgcacccucauguccugccccaucggcgaggcccccucccccuacaacucccgcuucgaguccgucgccugguccgccuccgccugccacgacggcaccuccuggcucgucaucggcaucuccggccccgacaacggcgccgucgccguccucaaguacaacggcaucaucaccgacaccauccgcuccuggcgcaacaacauccuccgcacccaggaguccgagugcgccugcgucaacggcuccugcuucaccgucaugaccgacggccccuccaacggccaggccuccuacaagaucuucaagaucgagaagggcaaggucgucaaguccgucgagcucaacgcccccaacuaccacuacgaggagugcuccugcuaccccgacgccggcgagaucaccugcgucugccgcgacaacuggcacggcuccaaccgccccugggucuccuucaaccagaaccucgaguaccagaucggcuacaucugcuccggcgucuucggcgacaacccccgccccaacgacggcaccggcuccugcggccccgucuccuccaacggcgccuacggcgucaagggcuucuccuucaaguacggcaacggcgucuggaucggccgcaccaaguccacccacucccgcuccggcuucgagaugaucugggaccccaacggcuggaccggcaccgacuccgaguucuccaugaagcaggacaucgucgccaucaccgacugguccggcuacuccggcuccuucguccagcaccccgagcucaccggccucgacugcauccgccccugcuucugggucgagcucauccgcggccgccccaaggaguccaccaucuggaccuccggcuccuccaucuccuucugcggcgucaacuccgacaccgucuccugguccuggcccgacggcgccgagcuccccuucaccaucgacaaguga

SEQ ID NO: 120003 - RNA, 1410 nt, Artificial Sequence
  derived and/or modified CDS sequence (opt2) from neuraminidase__InfluenzaA__AGY14472
augaaccccaaccagaagaucaucaccaucggcuccgucucccucacccucgccaccaucugcuuccucaugcagaucgccauccucgucaccaccgucacccuccacuucaagcaguacgagugcaacuccacccccaacaaccaggucaugcucugcgagcccaccgucaucgagcgcaacaucaccaagaucgucuaccucaccaacaccaccgucgagaaggagaucugccccaagcccgccgaguaccgcaacugguccaagccccagugcaagaucaccggcuucgcccccuucuccaaggacaacuccauccgccucuccgccggcggcgacaucugggucacccgcgagcccuacgucuccugcgaccccaacaagugcuaccaguucgcccucggccagggcaccacccucaacaaccgccacuccaacgacaccguccacgaccgcacccccuaccgcacccuccucaugaacgagcucggcauccccuuccaccucggcaccaagcaggucugcaucgccugguccuccuccuccugccacgacggcaaggccuggcuccacgucugcgucaccggccacgacaagaacgccaccgccuccuucaucuacgacggcaagcucgucgacuccaucggcuccugguccaagaagauccuccgcacccaggaguccgagugcgucugcaucaacggcaccugcaccgucgucaugaccgacggcuccgccuccggccgcgccgacaccaagauccucuucaucgaggagggcaagaucauccacaucucccagcucuccggcuccgcccagcacgucgaggagugcuccugcuacccccgcuaccccggcauccgcugcgucugccgcgacaacuggaagggcuccaaccgccccaucgucgacaucaacgucaaggacuacuccaucaccuccuccuacgucugcuccggccucgucggcgacaccccccgcaagaccgacaacuccuccuccucccacugccucaaccccaacaacgaggagggcggccacggcgucaagggcugggccuucgacgacggcaacgacgucuggaugggccgcaccaucuccgagaaguuccgcuccggcuacgagaccuucaaggucaucaagggcugguccaagcccaacuccaagcuccagaucaaccgccaggucaucgucgaccgcgacaaccgcuccggcuacuccggcaucuucuccgucgagggcaaguccugcaucaaccgcugcuucuacgucgagcucauccgcggccgcaagcgcgaggccgaggucugguggaccuccaacuccaucgucgucuucugcggcaccuccggcaccuacggcaccggcuccuggcccgacggcgccgacaucaaccucaugcccaucuga

SEQ ID NO: 120004 - RNA, 1398 nt, Artificial Sequence
  derived and/or modified CDS sequence (opt2) from neuraminidase__InfluenzaA__AHA11501
augaaccccaaccagaagauccucugcaccuccgccaccgccaucaucaucggcgccaucgccguccucaucggcaucgccaaccucggccucaacaucggccuccaccucaagcccggcugcaacugcucccacucccagcccgagaccaccaacaccucccagaccaucaucaacaacuacuacaacgagaccaacaucaccaacauccagauggaggagcgcaccucccgcaacuucaacaaccucaccaagggccucugcaccaucaacuccuggcacaucuacggcaaggacaacgccguccgcaucggcgaguccuccgacguccucgucacccgcgagcccuacgucuccugcgaccccgacgagugccgcuucuacgcccucucccagggcaccaccauccgcggcaagcacuccaacggcaccauccacgaccgcucccaguaccgcgcccucaucuccuggccccucuccuccccccccaccgucuacaacucccgcgucgagugcaucggcugguccuccaccuccugccacgacggcaagucccgcauguccaucugcaucuccggccccaacaacaacgccuccgccgucgucugguacaaccgccgccccgucgccgagaucaacaccugggcccgcaacauccuccgcacccaggaguccgagugcgucugccacaacggcgucugccccaucgucuucaccgacggcuccgccaccggccccgccgacacccgcaucuacuacuucaaggagggcaagauccucgagugggagucccucaccggcaccgccaagcacaucgaggagugcuccugcuacggcgagcgcaccggcaucaccugcaccugccgcgacaacuggcagggcuccaaccgccccgucauccagaucgaccccgucgccaugacccacaccucccaguacaucugcucccccguccucaccgacaccccccgccccaacgaccccaacaucggcaagugcaacgaccccuaccccggcaacgacaacaacggcgucaagggcuucuccuaccucgacggcgccaacaccuggcucggccgcaccaucuccaccgccucccgcuccggcuacgagaugcucaagguccccaacgcccucaccgacgaccgcuccaagcccauccagggccagaccaucguccucaacgccgacugguccggcuacuccggcuccuucauggacuacugggccgagggcgacugcuaccgcgccugcuucuacgucgagcucauccgcggccgccccaaggaggacaaggucugguggaccuccaacuccaucgucuccaugugcuccuccaccgaguuccucggccaguggaacuggcccgacggcgcccgcaucgaguacuuccucuga

SEQ ID NO: 120005 - RNA, 1410 nt, Artificial Sequence
  derived and/or modified CDS sequence (opt2) from neuraminidase__InfluenzaA__AHC57462
augaaccccaaccagaagaucaucaccaucggcuccgucucccucaccaucuccaccaucugcuucuucaugcagaucgccauccucaucaccaccgucacccuccacuucaagcaguacgaguucaacuccccccccaacaaccaggucaugcucugcgagcccaccaucaucgagcgcaacaucaccgagaucgucuaccucaccaacaccaccaucgagaaggagaucugccccaagcucgccgaguaccgcaacugguccaagccccagugcgacaucaccggcuucgcccccuucuccaaggacaacuccauccgccucuccgccggcggcgacaucugggucacccgcgagcccuacgucuccugcgaccccgacaagugcuaccaguucgcccucggccagggcaccacccucaacaacguccacuccaacaacaccguccgcgaccgcacccccuaccgcacccuccucaugaacgagcucggcguccccuuccaccucggcaccaagcaggucugcaucgccugguccuccuccuccugccacgacggcaaggccuggcuccacgucugcaucaccggcgacgacaagaacgccaccgccuccuucaucuacaacggccgccucgucgacuccgucgucuccugguccaaggagauccuccgcacccaggaguccgagugcgucugcaucaacggcaccugcaccgucgucaugaccgacggcuccgccuccggcaaggccgacaccaagauccucuucaucgaggagggcaagaucguccacaccuccacccucuccggcuccgcccagcacgucgaggagugcuccugcuacccccgcuaccccggcguccgcugcgucugccgcgacaacuggaagggcuccaaccgccccaucgucgacaucaacaucaaggaccacuccaucgucuccuccuacgucugcuccggccucgucggcgacaccccccgcaagaacgacuccuccuccuccucccacugcugggaccccaacaacgaggagggcggccacggcgucaagggcugggccuucgacgacggcaacgacgucuggaugggccgcaccaucaacgagaccucccgccucggcuacgagaccuucaaggucaucgagggcugguccaaccccaaguccaagcuccaggucaaccgccaggucaucgucgaccgcggcgaccgcuccggcuacuccggcaucuucuccgucgagggcaaguccugcaucaaccgcugcuucuacgucgagcucauccgcggccgcaaggaggagaccgagguccucuggaccuccaacuccaucgucgucuucugcggcaccuccggcaccuacggcaccggcuccuggcccgacggcgccgaccucaaccucaugcccaucuga

SEQ ID NO: 120006 - RNA, 1410 nt, Artificial Sequence; identical to SEQ ID NO: 115554
  derived and/or modified CDS sequence (opt2) from neuraminidase__InfluenzaA__AHC57490

SEQ ID NO: 120007 - RNA, 1410 nt, Artificial Sequence
  derived and/or modified CDS sequence (opt2) from neuraminidase__InfluenzaA__AHC57514
augaaccccaaccagaagaucaucaccaucggcuccgucucccucaccaucuccaccaucugcuucuucaugcagaucgccauccucaucaccaccgucacccuccacuucaagcaguacgaguucuacuccccccccaacaaccaggucaugcucugcgagcccaccaucaucgagcgcaacaucaccgagaucgucuaccucaccaacaccaccaucgagaaggagaucugccccaagcucgccgaguaccgcaacugguccaagccccagugcgacaucaccggcuucgcccccuucuccaaggacaacuccauccgccucuccgccggcggcgacaucugggucacccgcgagcccuacgucuccugcgaccccgacaagugcuaccaguucgcccucggccagggcaccacccucaacaacguccacuccaacaacaccguccgcgaccgcacccccuaccgcacccuccucaugaacgagcucggcguccccuuccaccucggcaccaagcaggucugcaucgccugguccuccuccuccugccacgacggcaaggccuggcuccacgucugcaucaccggcgacgacaagaacgccaccgccuccuucaucuacaacggccgccucgucgacuccgucgucuccugguccaaggagauccuccgcacccaggaguccgagugcgucugcaucaacggcaccugcaccgucgucaugaccgacggcuccgccuccggcaaggccgacaccaagauccucuucaucgaggagggcaagaucguccacaccuccacccucuccggcuccgcccagcacgucgaggagugcuccugcuacccccgcuaccccggcguccgcugcgucugccgcgacaacuggaagggcuccaaccgccccaucgucgacaucaacaucaaggaccacuccaucgucuccuccuacgucugcuccggccucgucggcgacaccccccgcaagaacgacuccuccuccuccucccacugccucgaccccaacaacgaggagggcggccacggcgucaagggcugggccuucgacgacggcaacgacgucuggaugggccgcaccaucaacgagaccucccgccucggcuacgagaccuucaaggucaucgagggcugguccaaccccaaguccaagcuccagaucaaccgccaggucaucgucgaccgcggcaaccgcuccggcuacuccggcaucuucuccgucgagggcaaguccugcaucaaccgcugcuucuacgucgagcucauccgcggccgcaaggaggagaccgagguccucuggaccuccaacuccaucgucgucuucugcggcaccuccggcaccuacggcaccggcuccuggcccgacggcgccgaccucaaccucaugcccaucuga

SEQ ID NO: 120008 - RNA, 1410 nt, Artificial Sequence; identical to SEQ ID NO: 120007
  derived and/or modified CDS sequence (opt2) from neuraminidase__InfluenzaA__AHC57526

SEQ ID NO: 120009 - RNA, 1410 nt, Artificial Sequence; identical to SEQ ID NO: 120007
  derived and/or modified CDS sequence (opt2) from neuraminidase__InfluenzaA__AHC57806

SEQ ID NO: 120010 - RNA, 1410 nt, Artificial Sequence; identical to SEQ ID NO: 120007
  derived and/or modified CDS sequence (opt2) from neuraminidase__InfluenzaA__AHC57818

SEQ ID NO: 120011 - RNA, 1410 nt, Artificial Sequence
  derived and/or modified CDS sequence (opt2) from neuraminidase__InfluenzaA__AHC57830
augaaccccaaccagaagaucaucaccaucggcuccgucucccucaccaucuccaccaucugcuucuucaugcagaucgccauccucaucaccaccgucacccuccacuucaagcaguacgaguucaacuccccccccaacaaccaggucaugcucugcgagcccaccaucaucgagcgcaacaucaccgagaucgucuaccucaccaacaccaccaucgagaaggagaucugccccaagcucgccgaguaccgcaacugguccaagccccagugcgacaucaccggcuucgcccccuucuccaaggacaacuccauccgccucuccgccggcggcgacaucugggucacccgcgagcccuacgucuccugcgaccccaacaagugcuaccaguucgcccucggccagggcaccacccucaacaacguccacuccaacaacaccguccgcgaccgcacccccuaccgcacccuccucaugaacgagcucggcguccccuuccaccucggcaccaagcaggucugcaucgccugguccuccuccuccugccacgacggcaaggccuggcuccacgucugcaucaccggcgacgacaagaacgccaccgccuccuucaucuacaacggcaagcucgucgacuccgucgucuccugguccaaggagauccuccgcacccaggaguccgagugcgucugcaucaacggcaccugcaccgucgucaugaccgacggcuccgccuccggcaaggccgacaccaagauccucuucaucgaggagggcaagaucguccacaccuccacccucuccggcuccgcccagcacgucgaggagugcuccugcuacccccgcuaccccggcguccgcugcgucugccgcgacaacuggaagggcuccaaccgccccaucgucgacaucaacaucaaggaccacuccaucgucuccuccuacgucugcuccggccucgucggcgacaccccccgcaagaacgacuccuccuccuccucccacugccucgaccccaacaacgaggagggcggccacggcgucaagggcugggccuucgacgacggcaacgacgucuggaugggccgcaccaucaacgagaccucccgccucggcuacgagaccuucaaggucaucgagggcugguccaaccccaaguccaagcuccagaucaaccgccaggucaucgucgaccgcggcaaccgcuccggcuacuccggcaucuucuccgucgagggcaaguccugcaucaaccgcugcuucuacgucgagcucauccgcggccgcaaggaggagaccgagguccucuggaccuccaacuccaucgucgucuucugcggcaccuccggcaccuacggcaccggcuccuggcccgacggcgccgaccucaaccucaugcccaucuga

SEQ ID NO: 120012 - RNA, 1410 nt, Artificial Sequence; identical to SEQ ID NO: 120011
  derived and/or modified CDS sequence (opt2) from neuraminidase__InfluenzaA__AHC57971

SEQ ID NO: 120013 - RNA, 1410 nt, Artificial Sequence; identical to SEQ ID NO: 120007
  derived and/or modified CDS sequence (opt2) from neuraminidase__InfluenzaA__AHC57984

SEQ ID NO: 120014 - RNA, 1410 nt, Artificial Sequence
  derived and/or modified CDS sequence (opt2) from neuraminidase__InfluenzaA__AHC57996
augaaccccaaccagaagaucaucaccaucggcuccgucucccucaccaucuccaccaucugcuucuucaugcagaucgccauccucaucaccaccgucacccuccacuucaagcaguacgaguucuacuccccccccaacaaccaggucaugcucugcgagcccaccaucaucgagcgcaacaucaccgagaucgucuaccucaccaacaccaccaucgagaaggagaucugccccaagcucgccgaguaccgcaacugguccaagccccagugcgacaucaccggcuucgcccccuucuccaaggacaacuccauccgccucuccgccggcggcgacaucugggucacccgcgagcccuacgucuccugcgaccccgacaagugcuaccaguucgcccucggccagggcaccacccucaacaacguccacuccaacaacaccguccgcgaccgcaccccccaccgcacccuccucaugaacgagcucggcguccccuuccaccucggcaccaagcaggucugcaucgccugguccuccuccuccugccacgacggcaaggccuggcuccacgucugcaucaccggcgacgacaagaacgccaccgccuccuucaucuacaacggccgccucgucgacuccgucgucuccugguccaaggagauccuccgcacccaggaguccgagugcgucugcaucaacggcaccugcaccgucgucaugaccgacggcuccgccuccggcaaggccgacaccaagauccucuucaucgaggagggcaagaucguccacaccuccacccucuccggcuccgcccagcacgucgaggagugcuccugcuacccccgcuaccccggcguccgcugcgucugccgcgacaacuggaagggcuccaaccgccccaucgucgacaucaacaucaaggaccacuccaucgucuccuccuacgucugcuccggccucgucggcgacaccccccgcaagaacgacuccuccuccuccucccacugccucgaccccaacaacgaggagggcggccacggcgucaagggcugggccuucgacgacggcaacgacgucuggaugggccgcaccaucaacgagaccucccgccucggcuacgagaccuucaaggucaucgagggcugguccaaccccaaguccaagcuccagaucaaccgccaggucaucgucgaccgcggcaaccgcuccggcuacuccggcaucuucuccgucgagggcaaguccugcaucaaccgcugcuucuacgucgagcucauccgcggccgcaaggaggagaccgagguccucuggaccuccaacuccaucgucgucuucugcggcaccuccggcaccuacggcaccggcuccuggcccgacggcgccgaccucaaccucaugcccaucuga

SEQ ID NO: 120015 - RNA, 1410 nt, Artificial Sequence; identical to SEQ ID NO: 118958
  derived and/or modified CDS sequence (opt2) from neuraminidase__InfluenzaA__AHC58008

SEQ ID NO: 120016 - RNA, 1410 nt, Artificial Sequence; identical to SEQ ID NO: 115554
  derived and/or modified CDS sequence (opt2) from neuraminidase__InfluenzaA__AHC58020

SEQ ID NO: 120017 - RNA, 1410 nt, Artificial Sequence
  derived and/or modified CDS sequence (opt2) from neuraminidase__InfluenzaA__AHC58032
augaaccccaaccagaagaucaucaccaucggcuccgucucccucaccaucuccaccaucugcuucuucaugcagaucgccauccucaucaccaccgucacccuccacuucaagcaguacgaguucaacuccccccccaacaaccaggucaugcucugcgagcccaccaucaucgagcgcaacaucaccgagaucgucuaccucaccaacaccaccaucgagaaggagaucugccccaagcucgccgaguaccgcaacugguccaagccccagugcgacaucaccggcuucgcccccuucuccaaggacaacuccauccgccucuccgccggcggcgacaucugggucacccgcgagcccuacgucuccugcgaccccaacaagugcuaccaguucgcccucggccagggcaccacccucaacaacguccacuccaacaacaccguccgcgaccgcacccccuaccgcacccuccucaugaacgagcucggcguccccuuccaccucggcaccaagcaggucugcaucgccugguccuccuccuccugccacgacggcaaggccuggcuccacgucugcaucaccggcgacgacaagaacgccaccgccuccuucaucuacaacggcaagcucgucgacuccgucgucuccugguccaaggagauccuccgcacccaggaguccgagugcgucugcaucaacggcaccugcaccgucgucaugaccgacggcuccgccuccggcaaggccgacaccaagauccucuucaucgaggagggcaagaucguccacaccuccacccucuccggcuccgcccagcacgucgaggagugcuccugcuacccccgcuaccccggcguccgcugcgucugccgcgacaacuggaagggcuccaaccgccccaucgucgacaucaacaucaaggaccacuccaucgucuccuccuacgucugcuccggccucgucggcgacaccccccgcaagaacgacuccuccuccuccucccacugccucaaccccaacaacgaggagggcggccacggcgucaagggcugggccuucgacgacggcaacgacgucuggaugggccgcaccaucaacgagaccucccgccucggcuacgagaccuucaaggucaucgagggcugguccaaccccaaguccaagcuccagaucaaccgccaggucaucgucgaccgcggcaaccgcuccggcuacuccggcaucuucuccgucgagggcaaguccugcaucaaccgcugcuucuacgucgagcucauccgcggccgcaaggaggagaccgagguccucuggaccuccaacuccaucgucgucuucugcggcaccuccggcaccuacggcaccggcuccuggcccgacggcgccgaccucaaccucaugcccaucuga

SEQ ID NO: 120018 - RNA, 1410 nt, Artificial Sequence; identical to SEQ ID NO: 118958
  derived and/or modified CDS sequence (opt2) from neuraminidase__InfluenzaA__AHC58053

SEQ ID NO: 120019 - RNA, 1410 nt, Artificial Sequence
  derived and/or modified CDS sequence (opt2) from neuraminidase__InfluenzaA__AHC58077
augaaccccaaccagaagaucaucaccaucggcuccgucucccucaccaucuccaccaucugcuucuucaugcagaucgccauccucaucaccaccgucacccuccacuucaagcaguacgaguucuacuccccccccaacaaccaggucaugcuccgcgagcccaccaucaucgagcgcaacaucaccgagaucgucuaccucaccaacaccaccaccgagaaggagaucugccccaagcucgccgaguaccgcaacugguccaagccccagugcgacaucaccggcuucgcccccuucuccaaggacaacuccauccgccucuccgccggcggcgacaucugggucacccgcgagcccuacgucuccugcgaccccgacaagugcuaccaguucgcccucggccagggcaccacccucaacaacguccacuccaacaacaccguccgcgaccgcacccccuaccgcacccuccucaugaacgagcucggcguccccuuccaccucggcaccaagcaggucugcaucgccugguccuccuccuccugccacgacggcaaggccuggcuccacgucugcaucaccggcgacgacaagaacgccaccgccuccuucaucuacaacggccgccucgucgacuccgucgucuccugguccaaggagauccuccgcacccaggaguccgagugcgucugcaucaacggcaccugcaccgucgucaugaccgacggcuccgccuccggcaaggccgacaccaagauccucuucaucgaggagggcaagaucguccacaccuccacccucuccggcuccgcccagcacgucgaggagugcuccugcuacccccgcuaccccggcguccgcugcgucugccgcgacaacuggaagggcuccaaccgccccaucgucgacaucaacaucaaggaccacuccaucgucuccuccuacgucugcuccggccucgucggcgacaccccccgcaagaacgacuccuccuccuccucccacugccucgaccccaacaacgaggagggcggccacggcgucaagggcugggccuucgacgacggcaacgacgucuggaugggccgcaccaucaacgagaccucccgccucggcuacgagaccuucaaggucaucgagggcugguccaaccccaaguccaagcuccagaucaaccgccaggucaucgucgaccgcggcaaccgcuccggcuacuccggcaucuucuccgucgagggcaaguccugcaucaaccgcugcuucuacgucgagcucauccgcggccgcaaggaggagaccgagguccucuggaccuccaacuccaucgucgucuucugcggcaccuccggcaccuacggcaccggcuccuggcccgacggcgccgaccucaaccucaugcccaucuga

SEQ ID NO: 120020 - RNA, 1410 nt, Artificial Sequence; identical to SEQ ID NO: 120011
  derived and/or modified CDS sequence (opt2) from neuraminidase__InfluenzaA__AHC58089

SEQ ID NO: 120021 - RNA, 1410 nt, Artificial Sequence; identical to SEQ ID NO: 120007
  derived and/or modified CDS sequence (opt2) from neuraminidase__InfluenzaA__AHC58101

SEQ ID NO: 120022 - RNA, 1410 nt, Artificial Sequence
  derived and/or modified CDS sequence (opt2) from neuraminidase__InfluenzaA__AHC58113
augaaccccaaccagaagaucaucaccaucggcuccgucucccucaccaucuccaccaucugcuucuucaugcagaucgccauccucaucaccaccgucacccuccacuucaagcaguacgaguucuacuccccccccaacaaccaggucaugcucugcgagcccaccaucaucgagcgcaacaucaccgagaucgucuaccucaccaacaccaccaucgagaaggagaucugccccaagcucgccgaguaccgcaacugguccaagccccagugcgacaucaccggcuucgcccccuucuccaaggacaacuccauccgccucuccgccggcggcgacaucugggucacccgcgagcccuacgucuccugcgaccccgacaagugcuaccaguucgcccucggccagggcaccacccucaacaacguccacuccaacaacaccguccgcgaccgcacccccuaccgcacccuccucaugaacgagcucggcguccccuuccaccucggcaccaagcaggucugcaucgccugguccuccuccuccugccacgacggcaaggccuggcuccacgucugcaucaccggcgacgacaagaacgccaccgccuccuucaucuacaacggccgccucgucgacuccgucgucuccugguccaagaagauccuccgcacccaggaguccgagugcgucugcaucaacggcaccugcaccgucgucaugaccgacggcuccgccuccggcaaggccgacaccaagauccucuucaucgaggagggcaagaucguccacaccuccacccucuccggcuccgcccagcacgucgaggagugcuccugcuacccccgcuaccccggcguccgcugcgucugccgcgacaacuggaagggcuccaaccgccccaucgucgacaucaacaucaaggaccacuccaucgucuccuccuacgucugcuccggccucgucggcgacaccccccgcaagaacgacuccuccuccuccucccacugccucgaccccaacaacgaggagggcggccacggcgucaagggcugggccuucgacgacggcaacgacgucuggaugggccgcaccaucaacgagaccucccgccucggcuacgagaccuucaaggucaucgagggcugguccaaccccaaguccaagcuccagaucaaccgccaggucaucgucgaccgcggcaaccgcuccggcuacuccggcaucuucuccgucgagggcaaguccugcaucaaccgcugcuucuacgucgagcucauccgcggccgcaaggaggagaccgagguccucuggaccuccaacuccaucgucgucuucugcggcaccuccggcaccuacggcaccggcuccuggcccgacggcgccgaccucaaccucaugcccaucuga

SEQ ID NO: 120023 - RNA, 1410 nt, Artificial Sequence; identical to SEQ ID NO: 120007
  derived and/or modified CDS sequence (opt2) from neuraminidase__InfluenzaA__AHC58129

SEQ ID NO: 120024 - RNA, 1410 nt, Artificial Sequence; identical to SEQ ID NO: 120007
  derived and/or modified CDS sequence (opt2) from neuraminidase__InfluenzaA__AHC58153

SEQ ID NO: 120025 - RNA, 1410 nt, Artificial Sequence; identical to SEQ ID NO: 120007
  derived and/or modified CDS sequence (opt2) from neuraminidase__InfluenzaA__AHC58165

SEQ ID NO: 120026 - RNA, 1410 nt, Artificial Sequence; identical to SEQ ID NO: 120011
  derived and/or modified CDS sequence (opt2) from neuraminidase__InfluenzaA__AHC58177

SEQ ID NO: 120027 - RNA, 1410 nt, Artificial Sequence
  derived and/or modified CDS sequence (opt2) from neuraminidase__InfluenzaA__AHC58189
augaaccccaaccagaagaucaucaccaucggcuccgucucccucaccaucuccaccaucugcuucuucaugcagaucgccauccucaucaccaccgucacccuccacuucaagcaguacgaguucaacuccccccccaacaaccaggucaugcucugcgagcccaccaucaucgagcgcaacaucaccgagaucgucuaccucaccaacaccaccaucgagaaggagaucugccccaagcccgccgaguaccgcaacugguccaagccccagugcgacaucaccggcuucgcccccuucuccaaggacaacuccauccgccucuccgccggcggcgacaucugggucacccgcgagcccuacgucuccugcgaccccgacaagugcuaccaguucgcccucggccagggcaccacccucaacaacguccacuccaacaacaccguccgcgaccgcacccccuaccgcacccuccucaugaacgagcucggcguccccuuccaccucggcaccaagcaggucugcaucgccugguccuccuccuccugccacgacggcaaggccuggcuccacgucugcaucaccggcgacgacaagaacgccaccgccuccuucaucuacaacggccgccucgucgacuccgucgucuccugguccaaggagauccuccgcacccaggaguccgagugcgucugcaucaacggcaccugcaccgucgucaugaccgacggcuccgccuccggcaaggccgacaccaagauccucuucaucgaggagggcaagaucguccacaccuccacccucuccggcuccgcccagcacgucgaggagugcuccugcuacccccgcuaccccggcguccgcugcgucugccgcgacaacuggaagggcuccaaccgccccaucgucgacaucaacaucaaggaccacuccaucgucuccuccuacgucugcuccggccucgucggcgacaccccccgcaagaacgacuccuccuccuccucccacugccucgaccccaacaacgaggagggcggccacggcgucaagggcugggccuucgacgacggcaacgacgucuggaugggccgcaccaucaacgagaugucccgccucggcuacgagaccuucaaggucaucgagggcugguccaaccccaaguccaagcuccagaucaaccgccaggucaucgucgaccgcggcgaccgcuccggcuacuccggcaucuucuccgucgagggcaaguccugcaucaaccgcugcuucuacgucgagcucauccgcggccgcaaggaggagaccgagguccucuggaccuccaacuccaucgucgucuucugcggcaccuccggcaccuacggcaccggcuccuggcccgacggcgccgaccucaaccucaugcccaucuga

SEQ ID NO: 120028 - RNA, 1410 nt, Artificial Sequence; identical to SEQ ID NO: 120007
  derived and/or modified CDS sequence (opt2) from neuraminidase__InfluenzaA__AHC58201

SEQ ID NO: 120029 - RNA, 1410 nt, Artificial Sequence
  derived and/or modified CDS sequence (opt2) from neuraminidase__InfluenzaA__AHC58225
augaaccccaaccagaagaucaucaccaucggcuccgucucccucaccaucuccaccaucugcuucuucaugcagaucgccauccucaucaccaccgucacccuccacuucaagcaguacgaguucaacuccccccccaacaaccaggucaugcucugcgagcccaccaucaucgagcgcaacaucaccgagaucgucuaccucaccaacaccaccaucgagaaggagaucugccccaagcccgccgaguaccgcaacugguccaagccccagugcgacaucaccggcuucgcccccuucuccaaggacaacuccauccgccucuccgccggcggcgacaucugggucacccgcgagcccuacgucuccugcgaccccgacaagugcuaccaguucgcccucggccagggcaccacccucaacaacguccacuccaacaacaccguccgcgaccgcacccccuaccgcacccuccucaugaacgagcucggcguccccuuccaccucggcaccaagcaggucugcaucgccugguccuccuccuccugccacgacggcaaggccuggcuccacgucugcaucaccggcgacgacaagaacgccaccgccuccuucaucuacaacggccgccucgucgacuccgucgucuccugguccaaggagauccuccgcacccaggaguccgagugcgucugcaucaacggcaccugcaccgucgucaugaccgacggcuccgccuccggcaaggccgacaccaagauccucuucaucgaggagggcaagaucguccacaccuccacccucuccggcuccgcccagcacgucgaggagugcuccugcuacccccgcuaccccggcguccgcugcgucugccgcgacaacuggaagggcuccaaccgccccaucgucgacaucaacaucaaggaccacuccaucgucuccuccuacgucugcuccggccucgucggcgacaccccccgcaagaacgacuccuccuccuccucccacugccucgaccccaacaacgaggagggcggccacggcgucaagggcugggccuucgacgacggcaacgacgucuggaugggccgcaccaucaacgagaccucccgccucggcuacgagaccuucaaggucaucgagggcugguccaaccccaaguccaagcuccagaucaaccgccaggucaucgucaaccgcggcgaccgcuccggcuacuccggcaucuucuccgucgagggcaaguccugcaucaaccgcugcuucuacgucgagcucauccgcggccgcaaggaggagaccgagguccucuggaccuccaacuccaucgucgucuucugcggcaccuccggcaccuacggcaccggcuccuggcccgacggcgccgaccucaaccucaugcccaucuga

SEQ ID NO: 120030 - RNA, 1410 nt, Artificial Sequence; identical to SEQ ID NO: 120011
  derived and/or modified CDS sequence (opt2) from neuraminidase__InfluenzaA__AHC58237

SEQ ID NO: 120031 - RNA, 1410 nt, Artificial Sequence; identical to SEQ ID NO: 120007
  derived and/or modified CDS sequence (opt2) from neuraminidase__InfluenzaA__AHC58249

SEQ ID NO: 120032 - RNA, 1410 nt, Artificial Sequence; identical to SEQ ID NO: 115554
  derived and/or modified CDS sequence (opt2) from neuraminidase__InfluenzaA__AHC58273

SEQ ID NO: 120033 - RNA, 1410 nt, Artificial Sequence; identical to SEQ ID NO: 120011
  derived and/or modified CDS sequence (opt2) from neuraminidase__InfluenzaA__AHC58363

SEQ ID NO: 120034 - RNA, 1410 nt, Artificial Sequence; identical to SEQ ID NO: 118958
  derived and/or modified CDS sequence (opt2) from neuraminidase__InfluenzaA__AHC58375

SEQ ID NO: 120035 - RNA, 1410 nt, Artificial Sequence; identical to SEQ ID NO: 120011
  derived and/or modified CDS sequence (opt2) from neuraminidase__InfluenzaA__AHC58387

SEQ ID NO: 120036 - RNA, 1410 nt, Artificial Sequence; identical to SEQ ID NO: 120011
  derived and/or modified CDS sequence (opt2) from neuraminidase__InfluenzaA__AHC58399

SEQ ID NO: 120037 - RNA, 1410 nt, Artificial Sequence; identical to SEQ ID NO: 120007
  derived and/or modified CDS sequence (opt2) from neuraminidase__InfluenzaA__AHC58411

SEQ ID NO: 120038 - RNA, 1410 nt, Artificial Sequence; identical to SEQ ID NO: 118958
  derived and/or modified CDS sequence (opt2) from neuraminidase__InfluenzaA__AHC58423

SEQ ID NO: 120039 - RNA, 1410 nt, Artificial Sequence; identical to SEQ ID NO: 120011
  derived and/or modified CDS sequence (opt2) from neuraminidase__InfluenzaA__AHC58459

SEQ ID NO: 120040 - RNA, 1410 nt, Artificial Sequence
  derived and/or modified CDS sequence (opt2) from neuraminidase__InfluenzaA__AHC58471
augaaccccaaccagaagaucaucaccaucggcuccgucugcaugaccaucggcauggccaaccucauccuccagaucggcaacaucaucuccaucuggaucucccacuccauccagcucggcaaccagaaccagaucgagaccugcaaccaguccgucaucaccuacgagaacaacaccugggucaaccagaccuacgucaacaucuccaacaccaacuucgccgccggccagcccgucgucuccgucaagcucgccggcaacuccucccucugccccgucuccggcugggccaucuacuccaaggacaacuccauccgcaucggcuccaagggcgacgucuucgucauccgcgagcccuucaucuccugcuccccccucgagugccgcaccuucuuccucacccagggcgcccuccucaacgacaagcacuccaacggcaccaucaaggaccgcucccccuaccgcacccucauguccugccccaucggcgagguccccucccccuacaacucccgcuucgaguccgucgccugguccgccuccgccugccacgacggcaucaacuggcucaccaucggcaucuccggccccgacaacggcgccgucgccguccucaaguacaacggcaucaucaccgacaccaucaaguccuggcgcaacaacauccuccgcacccaggaguccgagugcgccugcgucaacggcuccugcuucaccgucaugaccgacggccccuccgacggccaggccuccuacaagaucuuccgcaucgagaagggcaagaucgucaaguccgucgagaugaacgcccccaacuaccacuacgaggagugcuccugcuaccccgacuccuccgagaucaccugcgucugccgcgacaacuggcacggcgccaaccgccccugggucuccuucaaccagaaccucgaguaccagaucggcuacaucugcuccggcgucuucggcgacaacccccgccccaacgacaagaccggcuccugcggccccgucuccuccaacggcgccaacggcgucaagggcuucuccuucaaguacggcaacggcgucuggaucggccgcaccaaguccaucuccucccgcaacggcuucgagaugaucugggaccccaacggcuggaccggcaccgacaacaacuucuccaucaagcaggacaucgucggcaucaacgagugguccggcuacuccggcuccuucguccagcaccccgagcucaccggccucgacugcauccgccccugcuucugggucgagcucauccgcggccgccccaaggagaacaccaucuggaccuccggcuccuccaucuccuucugcggcgucaacuccgacaccgucggcugguccuggcccgacggcgccgagcuccccuucaccaucgacaaguga

SEQ ID NO: 120041 - RNA, 1410 nt, Artificial Sequence; identical to SEQ ID NO: 120007
  derived and/or modified CDS sequence (opt2) from neuraminidase__InfluenzaA__AHC58482

SEQ ID NO: 120042 - RNA, 1410 nt, Artificial Sequence; identical to SEQ ID NO: 120011
  derived and/or modified CDS sequence (opt2) from neuraminidase__InfluenzaA__AHC58494

SEQ ID NO: 120043 - RNA, 1410 nt, Artificial Sequence
  derived and/or modified CDS sequence (opt2) from neuraminidase__InfluenzaA__AHC58518
augaaccccaaccagaagaucaucaccaucggcuccgucucccucaccaucuccaccaucugcuucuucaugcaggucgccauccucaucaccaccgucacccuccacuucaagcaguacgaguucaacuccccccccaacaaccaggucaugcucugcgagcccaccaucaucgagcgcaacaucaccgagaucgucuaccucaccaacaccaccaucgagaaggagaucugccccaagcucgccgaguaccgcaacugguccaagccccagugcgacaucaccggcuucgcccccuucuccaaggacaacuccauccgccucuccgccggcggcgacaucugggucacccgcgagcccuacgucuccugcgaccccgacaagugcuaccaguucgcccucggccagggcaccacccucaacaacguccacuccaacaacaccguccgcgaccgcacccccuaccgcacccuccucaugaacgagcucggcguccccuuccaccucggcaccaagcaggucugcaucgccugguccuccuccuccugccacgacggcaaggccuggcuccacgucugcaucaccggcgacgacaagaacgccaccgccuccuucaucuacaacggcaagcucgucgacuccgucgucuccugguccaaggagauccuccgcacccaggaguccgagugcgucugcaucaacggcaccugcaccgucgucaugaccgacggcuccgccuccggcaaggccgacaccaagauccucuucaucgaggagggcaagaucguccacaccuccacccucuccggcuccgcccagcacgucgaggagugcuccugcuacccccgcuaccccggcguccgcugcgucugccgcgacaacuggaagggcuccaaccgccccaucgucgacaucaacaucaaggaccacuccaucgucuccuccuacgucugcuccggccucgucggcgacaccccccgcaagaacgacuccuccuccuccucccacugccucgaccccaacaacgaggagggcggccacggcgucaagggcugggccuucgacgacggcaacgacgucuggaugggccgcaccaucaacgagaccucccgccucggcuacgagaccuucaaggucaucgagggcugguccaaccccaaguccaagcuccagaucaaccgccaggucaucgucgaccgcggcaaccgcuccggcuacuccggcaucuucuccgucgagggcaaguccugcaucaaccgcugcuucuacgucgagcucauccgcggccgcaaggaggagaccgagguccucuggaccuccaacuccaucgucgucuucugcggcaccuccggcaccuacggcaccggcuccuggcccgacggcgccgaccucaaccucaugcccaucuga

SEQ ID NO: 120044 - RNA, 1410 nt, Artificial Sequence; identical to SEQ ID NO: 120007
  derived and/or modified CDS sequence (opt2) from neuraminidase__InfluenzaA__AHC58530

SEQ ID NO: 120045 - RNA, 1410 nt, Artificial Sequence; identical to SEQ ID NO: 120007
  derived and/or modified CDS sequence (opt2) from neuraminidase__InfluenzaA__AHC58554

SEQ ID NO: 120046 - RNA, 1410 nt, Artificial Sequence; identical to SEQ ID NO: 120007
  derived and/or modified CDS sequence (opt2) from neuraminidase__InfluenzaA__AHC58566

SEQ ID NO: 120047 - RNA, 1410 nt, Artificial Sequence
  derived and/or modified CDS sequence (opt2) from neuraminidase__InfluenzaA__AHC58578
augaaccccaaccagaagaucaucaccaucggcuccgucucccucaccgucuccaccaucugcuucuucaugcagaucgccauccucaucaccaccgucacccuccacuucaagcaguacgaguucuacuccccccccaacaaccaggucaugcucugcgagcccaccaucaucgagcgcaacaucaccgagaucgucuaccucaccaacaccaccaucgagaaggagaucugccccaagcucgccgaguaccgcaacugguccaagccccagugcgacaucaccggcuucgcccccuucuccaaggacaacuccauccgccucuccgccggcggcgacaucugggucacccgcgagcccuacgucuccugcgaccccgacaagugcuaccaguucgcccucggccagggcaccacccucaacaacguccacuccaacaacaccguccgcgaccgcacccccuaccgcacccuccucaugaacgagcucggcguccccuuccaccucggcaccaagcaggucugcaucgccugguccuccuccuccugccacgacggcaaggccuggcuccacgucugcaucaccggcgacgacaagaacgccaccgccuccuucaucuacaacggccgccucgucgacuccgucgucuccugguccaaggagauccuccgcacccaggaguccgagugcgucugcaucaacggcaccugcaccgucgucaugaccgacggcuccgccuccggcaaggccgacaccaagauccucuucaucgaggagggcaagaucguccacaccuccacccucuccggcuccgcccagcacgucgaggagugcuccugcuacccccgcuaccccggcguccgcugcgucugccgcgacaacuggaagggcuccaaccgccccaucgucgacaucaacaucaaggaccacuccaucgucuccuccuacgucugcuccggccucgucggcgacaccccccgcaagaacgacuccuccuccuccucccacugccucgaccccaacaacgaggagggcggccacggcgucaagggcugggccuucgacgacggcaacgacgucuggaugggccgcaccaucaacgagaccucccgccucggcuacgagaccuucaaggucaucgagggcugguccaaccccaaguccaagcuccagaucaaccgccaggucaucgucgaccgcggcaaccgcuccggcuacuccggcaucuucuccgucgagggcaaguccugcaucaaccgcugcuucuacgucgagcucauccgcggccgcaaggaggagaccgagguccucuggaccuccaacuccaucgucgucuucugcggcaccuccggcaccuacggcaccggcuccuggcccgacggcgccgaccucaaccucaugcccaucuga

SEQ ID NO: 120048 - RNA, 1410 nt, Artificial Sequence; identical to SEQ ID NO: 115554
  derived and/or modified CDS sequence (opt2) from neuraminidase__InfluenzaA__AHC58590

SEQ ID NO: 120049 - RNA, 1410 nt, Artificial Sequence; identical to SEQ ID NO: 120043
  derived and/or modified CDS sequence (opt2) from neuraminidase__InfluenzaA__AHC58602

SEQ ID NO: 120050 - RNA, 1410 nt, Artificial Sequence; identical to SEQ ID NO: 120007
  derived and/or modified CDS sequence (opt2) from neuraminidase__InfluenzaA__AHC58614

SEQ ID NO: 120051 - RNA, 1410 nt, Artificial Sequence; identical to SEQ ID NO: 120007
  derived and/or modified CDS sequence (opt2) from neuraminidase__InfluenzaA__AHC58626

SEQ ID NO: 120052 - RNA, 1410 nt, Artificial Sequence; identical to SEQ ID NO: 120007
  derived and/or modified CDS sequence (opt2) from neuraminidase__InfluenzaA__AHC58638

SEQ ID NO: 120053 - RNA, 1410 nt, Artificial Sequence; identical to SEQ ID NO: 120007
  derived and/or modified CDS sequence (opt2) from neuraminidase__InfluenzaA__AHC58650

SEQ ID NO: 120054 - RNA, 1410 nt, Artificial Sequence
  derived and/or modified CDS sequence (opt2) from neuraminidase__InfluenzaA__AHC58662
augaaccccaaccagaagaucaucaccaucggcuccgucucccucaccaucuccaccaucugcuucuucaugcagaccgccauccucaucaccaccgucacccuccacuucaagcaguacgaguucaacuccccccccaacaaccaggucaugcucugcgagcccaccaucaucgagcgcaacaucaccgagaucgucuaccucaccaacaccaccaucgagaaggagaucugccccaagcucgccgaguaccgcaacugguccaagccccagugcgacaucaccggcuucgcccccuucuccaaggacaacuccauccgccucuccgccggcggcgacaucugggucacccgcgagcccuacgucuccugcgaccccgacaagugcuaccaguucgcccucggccagggcaccacccucaacaacguccacuccaacaacaccguccgcgaccgcacccccuaccgcacccuccucaugaacgagcucggcguccccuuccaccucggcaccaagcaggucugcaucgccugguccuccuccuccugccacgacggcaaggccuggcuccacgucugcaucaccggcgacgacaagaacgccaccgccuccuucaucuacaacggcaagcucgucgacuccgucgucuccugguccaaggagauccuccgcacccaggaguccgagugcgucugcaucaacggcaccugcaccgucgucaugaccgacggcuccgccuccggcaaggccgacaccaagauccucuucaucgaggagggcaagaucguccacaccuccacccucuccggcuccgcccagcacgucgaggagugcuccugcuacccccgcuaccccggcguccgcugcgucugccgcgacaacuggaagggcuccaaccgccccaucgucgacaucaacaucaaggaccacuccaucgucuccuccuacgucugcuccggccucgucggcgacaccccccgcaagaacgacuccuccuccuccucccacugccucgaccccaacaacgaggagggcggccacggcgucaagggcugggccuucgacgacggcaacgacgucuggaugggccgcaccaucaacgagaccucccgccucggcuacgagaccuucaaggucaucgagggcugguccaaccccaaguccaagcuccagaucaaccgccaggucaucgucgaccgcggcaaccgcuccggcuacuccggcaucuucuccgucgagggcaaguccugcaucaaccgcugcuucuacgucgagcucauccgcggccgcaaggaggagaccgagguccucuggaccuccaacuccaucgucgucuucugcggcaccuccggcaccuacggcaccggcuccuggcccgacggcgccgaccucaaccucaugcccaucuga

SEQ ID NO: 120055 - RNA, 1410 nt, Artificial Sequence
  derived and/or modified CDS sequence (opt2) from neuraminidase__InfluenzaA__AHC58686
augaaccccaaccagaagaucaucaccaucggcuccgucucccucaccaucuccaccaucugcuucuucaugcagaucgccauccucaucaccaccgucacccuccacuucaagcaguacgaguucaacuccccccccaacaaccaggucguccucugcgagcccaccaucaucgagcgcaacaucaccgagaucgucuaccucaccaacaccaccaucgagaaggagaucugccccaagcccgccgaguaccgcaacugguccaagccccagugcgacaucaccggcuucgcccccuucuccaaggacaacuccauccgccucuccgccggcggcgacaucugggucacccgcgagcccuacgucuccugcgaccccgacaagugcuaccaguucgcccucggccagggcaccacccucaacaacguccacuccaacaacaccguccgcgaccgcacccccuaccgcacccuccucaugaacgagcucggcguccccuuccaccucggcaccaagcaggucugcaucgccugguccuccuccuccugccacgacggcaaggccuggcuccacgucugcaucaccggcgacgacaagaacgccaccgccuccuucaucuacaacggccgccucgucgacuccgucgucuccugguccaaggagauccuccgcacccaggaguccgagugcgucugcaucaacggcaccugcaccgucgucaugaccgacggcuccgccuccggcaaggccgacaccaagauccucuucaucgaggagggcaagaucguccacaccuccacccucuccggcuccgcccagcacgucgaggagugcuccugcuacccccgcuaccccggcguccgcugcgucugccgcgacaacuggaagggcuccaaccgccccaucgucgacaucaacaucaaggaccacuccaucgucuccuccuacgucugcuccggccucgucggcgacaccccccgcaagaacgacuccuccuccuccucccacugccucgaccccaacaacgaggagggcggccacggcgucaagggcugggccuucgacgacggcaacgacgucuggaugggccgcaccaucaacgagaccucccgccucggcuacgagaccuucaaggucaucgagggcugguccaaccccaaguccaagcuccagaucaaccgccaggucaucgucgaccgcggcgaccgcuccggcuacuccggcaucuucuccgucgagggcaaguccugcaucaaccgcugcuucuacgucgagcucauccgcggccgcaaggaggagaccgagguccucuggaccuccaacuccaucgucgucuucugcggcaccuccggcaccuacggcaccggcuccuggcccgacggcgccgaccucaaccucaugcccaucuga

SEQ ID NO: 120056 - RNA, 1410 nt, Artificial Sequence
  derived and/or modified CDS sequence (opt2) from neuraminidase__InfluenzaA__AHC58698
augaaccccaaccagaagaucaucaccaucggcuccgucucccucaccaucuccaccaucugcuucuucaugcagaucgccauccucaucaccaccgucacccuccacuucaagcaguacgaguucaacuccccccccaacaaccaggucaugcucugcgagcccaccaucaucgagcgcaacaucaccgagaucgucuaccucaccaacaccaccaucgagaaggagaucugccccaagcucgccgaguaccgcaacugguccaagccccagugcgacaucaccggcuucgcccccuucuccaaggacaacuccauccgccucuccgccggcggcgacaucugggucacccgcgagcccuacgucuccugcgaccccgacaagugcuaccaguucgcccucggccagggcaccacccucaacaacguccacuccaacaacaccguccgcgaccgcacccccuaccgcacccuccucaugaacgagcucggcguccccuuccaccucggcaccaagcaggucugcaucgccugguccuccuccuccugccacgacggcaaggccuggcuccacgucugcaucaccggcgacgacaagaacgccaccgccuccuucaucuacaacggccgccucgucgacuccgucgucuccugguccaaggagauccuccgcacccaggaguccgagugcgucugcaucaacggcaccugcgccgucgucaugaccgacggcuccgccuccggcaaggccgacaccaagauccucuucaucgaggagggcaagaucguccacaccuccacccucuccggcuccgcccagcacgucgaggagugcuccugcuacccccgcuaccccggcguccgcugcgucugccgcgacaacuggaagggcuccaaccgccccaucgucgacaucaacaucaaggaccacuccaucgucuccuccuacgucugcuccggccucgucggcgacaccccccgcaagaacgacuccuccuccuccucccacugccucgaccccaacaacgaggagggcggccacggcgucaagggcugggccuucgacgacggcaacgacgucuggaugggccgcaccaucaacgagaccucccgccucggcuacgagaccuucaaggucaucgagggcugguccaaccccaaguccaagcuccagaucaaccgccaggucaucgucgaccgcggcaaccgcuccggcuacuccggcaucuucuccgucgagggcaaguccugcaucaaccgcugcuucuacgucgagcucauccgcggccgcaaggaggagaccgagguccucuggaccuccaacuccaucgucgucuucugcggcaccuccggcaccuacggcaccggcuccuggcccgacggcgccgaccucaaccucaugcccaucuga

SEQ ID NO: 120057 - RNA, 1410 nt, Artificial Sequence; identical to SEQ ID NO: 118958
  derived and/or modified CDS sequence (opt2) from neuraminidase__InfluenzaA__AHC58710

SEQ ID NO: 120058 - RNA, 1410 nt, Artificial Sequence; identical to SEQ ID NO: 118958
  derived and/or modified CDS sequence (opt2) from neuraminidase__InfluenzaA__AHC58722

SEQ ID NO: 120059 - RNA, 1410 nt, Artificial Sequence
  derived and/or modified CDS sequence (opt2) from neuraminidase__InfluenzaA__AHC58734
augaaccccaaccagaagaucaucaccaucggcuccgucucccucaccaucuccaccaucugcuucuucaugcagaucgccauccucaucaccaccgucacccuccacuucaagcaguacgaguucaacuccccccccaacaaccaggucaugcucugcgagcccaccaucaucgagcgcaacaucaccgagaucgucuaccucaccaacaccaccaucgagaaggagaucugccccaagcucgccgaguaccgcaacugguccaagccccagugcgacaucaccggcuucgcccccuucuccaaggacaacuccauccgccucuccgccggcggcgacaucugggucacccgcgagcccuacgucuccugcgaccccaacaagugcuaccaguucgcccucggccagggcaccacccucaacaacguccacuccaacaacaccguccgcgaccgcacccccuaccgcacccuccucaugaacgagcucggcguccccuuccaccucggcaccaagcaggucugcaucgccugguccuccuccuccugccacgacggcaaggccuggcuccacgucugcaucaccggcgacgacaagaacgccaccgccuccuucaucuacaacggcaagcucgucgacuccgucgucuccugguccaaggagauccuccgcacccaggaguccgagugcgucugcaucaacggcaccugcaccgucgucaugaccgacggcuccgccuccggcaaggccgacaccaagauccucuucaucgaggagggcaagaucguccacaccuccacccucuccggcuccgcccagcacgucgaggagugcuccugcuacccccgcuaccccggcauccgcugcgucugccgcgacaacuggaagggcuccaaccgccccaucgucgacaucaacaucaaggaccacuccaucgucuccuccuacgucugcuccggccucgucggcgacaccccccgcaagaacgacuccuccuccuccucccacugccucgaccccaacaacgaggagggcggccacggcgucaagggcugggccuucgacgacggcaacgacgucuggaugggccgcaccaucaacgagaccucccgccucggcuacgagaccuucaaggucaucgagggcugguccaaccccaaguccaagcuccagaucaaccgccaggucaucgucgaccgcggcaaccgcuccggcuacuccggcaucuucuccgucgagggcaaguccugcaucaaccgcugcuucuacgucgagcucauccgcggccgcaaggaggagaccgagguccucuggaccuccaacuccaucgucgucuucugcggcaccuccggcaccuacggcaccggcuccuggcccgacggcgccgaccucaaccucaugcccaucuga

SEQ ID NO: 120060 - RNA, 1410 nt, Artificial Sequence; identical to SEQ ID NO: 120007
  derived and/or modified CDS sequence (opt2) from neuraminidase__InfluenzaA__AHC58746

SEQ ID NO: 120061 - RNA, 1410 nt, Artificial Sequence; identical to SEQ ID NO: 120011
  derived and/or modified CDS sequence (opt2) from neuraminidase__InfluenzaA__AHC58758

SEQ ID NO: 120062 - RNA, 1410 nt, Artificial Sequence; identical to SEQ ID NO: 120007
  derived and/or modified CDS sequence (opt2) from neuraminidase__InfluenzaA__AHC58770

SEQ ID NO: 120063 - RNA, 1410 nt, Artificial Sequence; identical to SEQ ID NO: 115554
  derived and/or modified CDS sequence (opt2) from neuraminidase__InfluenzaA__AHC58782

SEQ ID NO: 120064 - RNA, 1410 nt, Artificial Sequence; identical to SEQ ID NO: 120007
  derived and/or modified CDS sequence (opt2) from neuraminidase__InfluenzaA__AHC58806

SEQ ID NO: 120065 - RNA, 1410 nt, Artificial Sequence
  derived and/or modified CDS sequence (opt2) from neuraminidase__InfluenzaA__AHC58818
augaaccccaaccagaagaucaucaccaucggcuccgucucccucaccaucuccaccaucugcuucuucauccagaucgccauccucaucaccaccgucacccuccacuucaagcaguacgaguucaacuccccccccaacaaccaggucaugcucugcgagcccaccaucaucgagcgcaacaucaccgagaucgucuaccucaccaacaccaccaucgagaaggagaucugccccaagcucgccgaguaccgcaacugguccaagccccagugcgacaucaccggcuucgcccccuucuccaaggacaacuccauccgccucuccgccggcggcgacaucugggucacccgcgagcccuacgucuccugcgaccccgacaagugcuaccaguucgcccucggccagggcaccacccucaacaacguccacuccaacaacaccguccgcgaccgcacccccuaccgcacccuccucaugaacgagcucggcguccccuuccaccucggcaccaagcaggucugcaucgccugguccuccuccuccugccacgacggcaaggccuggcuccacgucugcaucaccggcgacgacaagaacgccaccgccuccuucaucuacaacggccgccucgucgacuccgucgucuccugguccaaggagauccuccgcacccaggaguccgagugcgucugcaucaacggcaccugcaccgucgucaugaccgacggcuccgccuccggcaaggccgacaccaagauccucuucaucgaggagggcaagaucguccacaccuccacccucuccggcuccgcccagcacgucgaggagugcuccugcuacccccgcuaccccggcguccgcugcgucugccgcgacaacuggaagggcuccaaccgccccaucgucgacaucaacaucaaggaccacuccaucgucuccuccuacgucugcuccggccucgucggcgacaccccccgcaagaacgacuccuccuccuccucccacugccucgaccccaacaacgaggagggcggccacggcgucaagggcugggccuucgacgacggcaacgacgucuggaugggccgcaccaucaacgagaccucccgccucggcuacgagaccuucaaggucaucgagggcugguccaaccccaaguccaagcuccagaucaaccgccaggucaucgucgaccgcggcaaccgcuccggcuacuccggcaucuucuccgucgagggcaaguccugcaucaaccgcugcuucuacgucgagcucauccgcggccgcaaggaggagaccgagguccucuggaccuccaacuccaucgucgucuucugcggcaccuccggcaccuacggcaccggcuccuggcccgacggcgccgaccucaaccucaugcccaucuga

SEQ ID NO: 120066 - RNA, 1410 nt, Artificial Sequence; identical to SEQ ID NO: 120056
  derived and/or modified CDS sequence (opt2) from neuraminidase__InfluenzaA__AHC58830

SEQ ID NO: 120067 - RNA, 1410 nt, Artificial Sequence; identical to SEQ ID NO: 120007
  derived and/or modified CDS sequence (opt2) from neuraminidase__InfluenzaA__AHC58842

SEQ ID NO: 120068 - RNA, 1410 nt, Artificial Sequence
  derived and/or modified CDS sequence (opt2) from neuraminidase__InfluenzaA__AHC58866
augaaccccaaccagaagaucaucaccaucggcuccgucucccucaccaucuccaccaucugcuucuucaugcagaucgccauccucaucaccaccgucacccuccacuucaagcagugcgaguucaacuccccccccaacaaccgcgucaugcucugcgagcccaccaucaucgagcgcaacaucaccgagaucgucuaccucaccaacaccaccaucgagaaggagaucugccccaagcucgccgaguaccgcaacugguccaagccccagugcgacaucaccggcuucgcccccuucuccaaggacaacuccauccgccucuccgccggcggcgacaucugggucacccgcgagcccuacgucuccugcgaccccaacaagugcuaccaguucgcccucggccagggcaccacccucaacaacguccacuccaacaacaccguccgcgaccgcacccccuaccgcacccuccucaugaacgagcucggcguccccuuccaccucggcaccaagcaggucugcaucgccugguccuccuccuccugccacgacggcaaggccuggcuccacgucugcaucaccggcgacgacaagaacgccaccgccuccuucaucuacaacggcaagcucgucgacuccgucgucuccugguccaaggagauccuccgcacccaggaguccgagugcgucugcaucaacggcaccugcaccgucgucaugaccgacggcuccgccuccggcaaggccgacaccaagauccucuucaucgaggagggcaagaucguccacaccuccacccucuccggcuccgcccagcacgucgaggagugcuccugcuacccccgcuaccccggcguccgcugcgucugccgcgacaacuggaagggcuccaaccgccccaucgucgacaucaacaucaaggaccacuccaucgucuccuccuacgucugcuccggccucgucggcgacaccccccgcaagaacgacuccuccuccuccucccacugccucgaccccaacaacgaggagggcggccacggcgucaagggcugggccuucgacgacggcaacgacgucuggaugggccgcaccaucaacgagaccucccgccucggcuacgagaccuucaaggucaucgagggcugguccaaccccaaguccaagcuccagaucaaccgccaggucaucgucgaccgcggcaaccgcuccggcuacuccggcaucuucuccgucgagggcaaguccugcaucaaccgcugcuucuacgucgagcucauccgcggccgcaaggaggagaccggcguccucuggaccuccaacuccaucgucgucuucugcggcaccuccggcaccuacggcaccggcuccuggcccgacggcgccgaccucaaccucaugcccaucuga

SEQ ID NO: 120069 - RNA, 1410 nt, Artificial Sequence; identical to SEQ ID NO: 120056
  derived and/or modified CDS sequence (opt2) from neuraminidase__InfluenzaA__AHC58878

SEQ ID NO: 120070 - RNA, 1410 nt, Artificial Sequence; identical to SEQ ID NO: 120007
  derived and/or modified CDS sequence (opt2) from neuraminidase__InfluenzaA__AHC58890

SEQ ID NO: 120071 - RNA, 1410 nt, Artificial Sequence; identical to SEQ ID NO: 120011
  derived and/or modified CDS sequence (opt2) from neuraminidase__InfluenzaA__AHC58902

SEQ ID NO: 120072 - RNA, 1410 nt, Artificial Sequence; identical to SEQ ID NO: 120007
  derived and/or modified CDS sequence (opt2) from neuraminidase__InfluenzaA__AHC58996

SEQ ID NO: 120073 - RNA, 1410 nt, Artificial Sequence; identical to SEQ ID NO: 120007
  derived and/or modified CDS sequence (opt2) from neuraminidase__InfluenzaA__AHC59008

SEQ ID NO: 120074 - RNA, 1410 nt, Artificial Sequence; identical to SEQ ID NO: 120011
  derived and/or modified CDS sequence (opt2) from neuraminidase__InfluenzaA__AHC59020

SEQ ID NO: 120075 - RNA, 1410 nt, Artificial Sequence
  derived and/or modified CDS sequence (opt2) from neuraminidase__InfluenzaA__AHC59032
augaaccccaaccagaagaucaucaccaucggcuccgucucccucaccaucuccaccaucugcuucuucaugcagaucgccauccucaucaccaccgucacccuccacuucaagcaguacgaguucaacuccccccccaacaaccaggucaugcucugcgagcccaccaucaucgagcgcaacaucaccgagaucgucuaccucaccaacaccaccaucgagaaggagaucugccccaagcucgccgaguaccgcaacugguccaagccccagugcgacaucaccggcuucgcccccuucuccaaggacaacuccauccgccucuccgccggcggcgacaucugggucacccgcgagcccuacgucuccugcgaccccaacaagugcuaccaguucgcccucggccagggcaccacccucaacaacguccacuccaacaacaccguccgcgaccgcacccccuaccgcacccuccucaugaacgagcucggcguccccuuccaccucggcaccaagcaggucugcaucgccugguccuccuccuccugccacgacggcaaggccuggcuccacgucugcaucaccggcgacgacaagaacgccaccgccuccuucaucuacaacggcaagcucgucgacuccgucgucuccugguccaaggagauccuccgcacccaggaguccgagugcgucugcaucaacggcaccugcaccgucgucaugaccgacggcuccgccuccggcaaggccgacaccaagauccucuucaucgaggagggcaagaucguccacaccuccacccucuccggcuccgcccagcacgucgaggagugcuccugcuacccccgcuaccccuccguccgcugcgucugccgcgacaacuggaagggcuccaaccgccccaucgucgacaucaacaucaaggaccacuccaucgucuccuccuacgucugcuccggccucgucggcgacaccccccgcaagaacgacuccuccuccuccucccacugccucgaccccaacaacgaggagggcggccacggcgucaagggcugggccuucgacgacggcaacgacgucuggaugggccgcaccaucaacgagaccucccgccucggcuacgagaccuucaaggucaucgagggcugguccaaccccaaguccaagcuccagaucaaccgccaggucaucgucgaccgcggcaaccgcuccggcuacuccggcaucuucuccgucgagggcaaguccugcaucaaccgcugcuucuacgucgagcucauccgcggccgcaaggaggagaccgagguccucuggaccuccaacuccaucgucgucuucugcggcaccuccggcaccuacggcaccggcuccuggcccgacggcgccgaccucaaccucaugcccaucuga

SEQ ID NO: 120076 - RNA, 1410 nt, Artificial Sequence; identical to SEQ ID NO: 120043
  derived and/or modified CDS sequence (opt2) from neuraminidase__InfluenzaA__AHC59044

SEQ ID NO: 120077 - RNA, 1410 nt, Artificial Sequence; identical to SEQ ID NO: 115554
  derived and/or modified CDS sequence (opt2) from neuraminidase__InfluenzaA__AHC59056

SEQ ID NO: 120078 - RNA, 1410 nt, Artificial Sequence; identical to SEQ ID NO: 120007
  derived and/or modified CDS sequence (opt2) from neuraminidase__InfluenzaA__AHC59068

SEQ ID NO: 120079 - RNA, 1410 nt, Artificial Sequence; identical to SEQ ID NO: 120007
  derived and/or modified CDS sequence (opt2) from neuraminidase__InfluenzaA__AHC59080

SEQ ID NO: 120080 - RNA, 1410 nt, Artificial Sequence
  derived and/or modified CDS sequence (opt2) from neuraminidase__InfluenzaA__AHC59092
augaaccccaaccagaagaucaucaccaucggcuccgucucccucaccaucuccaccaucugcuucuucaugcagaucgccauccucgucaccaccgucacccuccacuucaagcaguacgaguucaacuccccccccaacaaccaggucaugcucugcgagcccaccaucaucgagcgcaacaucaccgagaucgucuaccucaccaacaccaccaucgagaaggagaucugccccaagcccgccgaguaccgcaacugguccaagccccagugcgacaucaccggcuucgcccccuucuccaaggacaacuccauccgccucuccgccggcggcgacaucugggucacccgcgagcccuacgucuccugcgaccccgacaagugcuaccaguucgcccucggccagggcaccacccucaacaacguccacuccaacaacaccguccgcgaccgcacccccuaccgcacccuccucaugaacgagcucggcguccccuuccaccucggcaccaagcaggucugcaucgccugguccuccuccuccugccacgacggcaaggccuggcuccacgucugcaucaccggcgacgacaagaacgccaccgccuccuucaucuacaacggccgccucgucgacuccgucgucuccugguccaaggagauccuccgcacccaggaguccgagugcgucugcaucaacggcaccugcaccgucgucaugaccgacggcuccgccuccggcaaggccgacaccaagauccucuucaucgaggagggcaagaucguccacaccuccacccucuccggcuccgcccagcacgucgaggagugcuccugcuacccccgcuaccccggcguccgcugcgucugccgcgacaacuggaagggcuccaaccgccccaucgucgacaucaacaucaaggaccacuccaucgucuccuccuacgucugcuccggccucgucggcgacaccccccgcaagaacgacuccuccuccuccggccacugccucgaccccaacaacgaggagggcggccacggcgucaagggcugggccuucgacgacggcaacgacgucuggaugggccgcaccaucaacgagaccucccgccucggcuacgagaccuucaaggucaucgagggcugguccaaccccaaguccaagcuccagaucaaccgccaggucaucgucgaccgcggcgaccgcuccggcuacuccggcaucuucuccgucgagggcaaguccugcaucaaccgcugcuucuacgucgagcucauccgcggccgcaaggaggagaccgagguccucuggaccuccaacuccaucgucgucuucugcggcaccuccggcaccuacggcaccggcuccuggcccgacggcgccgaccucaaccucaugcccaucuga

SEQ ID NO: 120081 - RNA, 1410 nt, Artificial Sequence
  derived and/or modified CDS sequence (opt2) from neuraminidase__InfluenzaA__AHC59104
augaaccccaaccagaagaucaucaccaucggcuccgucucccucaccaucuccaccaucugcuucuucaugcagaucgccauccucaucaccaccgucacccuccacuucaagcaguacgaguucuacuccccccccaacaaccaggucaugcucugcgagcccaccaucaucaagcgcaacaucaccgagaucgucuaccucaccaacaccaccaucgagaaggagaucugccccaagcucgccgaguaccgcaacugguccaagccccagugcgacaucaccggcuucgcccccuucuccaaggacaacuccauccgccucuccgccggcggcgacaucugggucacccgcgagcccuacgucuccugcgaccccgacaagugcuaccaguucgcccucggccagggcaccacccucaacaacguccacuccaacaacaccguccgcgaccgcacccccuaccgcacccuccucaugaacgagcucggcguccccuuccaccucggcaccaagcaggucugcaucgccugguccuccuccuccugccacgacggcaaggccuggcuccacgucugcaucaccggcgacgacaagaacgccaccgccuccuucaucuacaacggccgccucgucgacuccgucgucuccugguccaaggagauccuccgcacccaggaguccgagugcgucugcaucaacggcaccugcaccgucgucaugaccgacggcuccgccuccggcaaggccgacaccaagauccucuucaucgaggagggcaagaucguccacaccuccacccucuccggcuccgcccagcacgucgaggagugcuccugcuacccccgcuaccccggcguccgcugcgucugccgcgacaacuggaagggcuccaaccgccccaucgucgacaucaacaucaaggaccacuccaucgucuccuccuacgucugcuccggccucgucggcgacaccccccgcaagaacgacuccuccuccuccucccacugccucgaccccaacaacgaggagggcggccacggcgucaagggcugggccuucgacgacggcaacgacgucuggaugggccgcaccaucaacgagaccucccgccucggcuacgagaccuucaaggucaucgagggcugguccaaccccaaguccaagcuccagaucaaccgccaggucaucgucgaccgcggcaaccgcuccggcuacuccggcaucuucuccgucgagggcaaguccugcaucaaccgcugcuucuacgucgagcucauccgcggccgcaaggaggagaccgagguccucuggaccuccaacuccaucgucgucuucugcggcaccuccggcaccuacggcaccggcuccuggcccgacggcgccgaccucaaccucaugcccaucuga

SEQ ID NO: 120082 - RNA, 1410 nt, Artificial Sequence
  derived and/or modified CDS sequence (opt2) from neuraminidase__InfluenzaA__AHC59116
augaaccccaaccagaagaucaucaccaucggcuccgucucccucaccaucuccaccaucugcuucuucaugcagaucgccauccucaucaccaccgucacccuccacuucaagcaguacgaguucaacuccccccccaacaaccaggucaugcucugcgagcccaccaucaucgagcgcaacaucaccgagaucgucuaccucaccaacaccaccaucgagaaggagaucugccccaagcucgccgaguaccgcaacugguccaagccccagugcgacaucaccggcuucgcccccuucuccaaggacaacuccauccgccucuccgccggcggcgacaucugggucacccgcgagcccuacgucuccugcgaccccaacaagugcuaccaguucgcccucggccagggcaccacccucaacaacguccacuccaacaacaccguccgcgaccgcacccccuaccgcacccuccucaugaacgagcucggcguccccuuccaccucggcaccaagcaggucugcaucgccugguccuccuccuccugccacgacggcaaggccuggcuccacgucugcaucaccggcgacgacaagaacgccaccgccuccuucaucuacaacggcaagcucgucgacuccgucgucuccugguccaaggagauccuccgcacccaggaguccgagugcgucugcaucaacggcaccugcaccgucgucaugaccgacggcuccgccuccggcaaggccgacaccaagauccucuucaucgaggagggcaagaucguccacaccuccacccucuccggcuccgcccagcacgucgaggagugcuccugcuacccccgcuaccccggcguccgcugcgucugccgcgacaacuggaagggcuccaaccgccccaucgucgacaucaacaucaaggaccacuccaucgucuccuccuacgucugcuccggccucgucggcgacaccccccgcaagaacgacuccuccuccuccucccacugccucgaccccaacaacgaggagggcggccacggcgucaagggcugggccuucgacgacggcaacgacgucuggaugggccgcaccaucaacgagaccucccgccucggcuacgagaccuucaaggucaucgagggcugguccaaccccaaguccaagcuccagaucaaccgccaggucaucgucgaccgcggcaaccgcuccggcuacuccggcaucuucuccgucgagggcaaguccugcaucaaccgcugcuucuacgucgagcucauccgcggccgcgaggaggagaccgagguccucuggaccuccaacuccaucgucgucuucugcggcaccuccggcaccuacggcaccggcuccuggcccgacggcgccgaccucaaccucaugcccaucuga

SEQ ID NO: 120083 - RNA, 1410 nt, Artificial Sequence
  derived and/or modified CDS sequence (opt2) from neuraminidase__InfluenzaA__AHC59128
augaaccccaaccagaagaucaucaccaucggcuccgucucccucaccaucuccaccaucugcuucuucaugcagaucgccauccucaucaccaccgucacccuccacuucaagcaguacgaguucuacuccccccccaacaaccaggucaugcucugcgagcccaccaucauggagcgcaacaucaccgagaucgucuaccucaccaacaccaccaucgagaaggagaucugccccaagcucgccgaguaccgcaacugguccaagccccagugcgacaucaccggcuucgcccccuucuccaaggacaacuccauccgccucuccgccggcggcgacaucugggucacccgcgagcccuacgucuccugcgaccccgacaagugcuaccaguucgcccucggccagggcaccacccucaacaacguccacuccaacaacaccguccgcgaccgcacccccuaccgcacccuccucaugaacgagcucggcguccccuuccaccucggcaccaagcaggucugcaucgccugguccuccuccuccugccacgacggcaaggccuggcuccacgucugcgucaccggcgacgacaagaacgccaccgccuccuucaucuacaacggccgccucgucgacuccgucgucuccugguccaaggagauccuccgcacccaggaguccgagugcgucugcaucaacggcaccugcaccgucgucaugaccgacggcuccgccuccggcaaggccgacaccaagauccucuucaucgaggagggcaagaucguccacaccuccacccucuccggcuccgcccagcacgucgaggagugcuccugcuacccccgcuaccccggcguccgcugcgucugccgcgacaacuggaagggcuccaaccgccccaucgucgacaucaacaucaaggaccacuccaucgucuccuccuacgucugcuccggccucgucggcgacaccccccgcaagaacgacuccuccuccuccucccacugccucgaccccaacaacgaggagggcggccacggcgucaagggcugggccuucgacgacggcaacgacgucuggaugggccgcaccaucaacgagaccucccgccucggcuacgagaccuucaaggucaucgagggcugguccaaccccaaguccaagcuccagaucaaccgccaggucaucgucgaccgcggcaaccgcuccggcuacuccggcaucuucuccgucgagggcaaguccugcaucaaccgcugcuucuacgucgagcucauccgcggccgcaaggaggagaccgagguccucuggaccuccaacuccaucgucgucuucugcggcaccuccggcaccuacggcaccggcuccuggcccgacggcgccgaccucaaccucaugcccaucuga

SEQ ID NO: 120084 - RNA, 1410 nt, Artificial Sequence
  derived and/or modified CDS sequence (opt2) from neuraminidase__InfluenzaA__AHC59152
augaaccccaaccagaagaucaucaccaucggcuccgucucccucaccaucuccaccaucugcuucuucaugcaggucgccauccucaucaccaccgucacccuccacuucaagcaguacgaguucaacuccccccccaacaaccaggucaugcucugcgagcccaccaucaucgagcgcaacaucaccgagauccucuaccucaccaacaccaccaucgagaaggagaucugccccaagcucgccgaguaccgcaacugguccaagccccagugcgacaucaccggcuucgcccccuucuccaaggacaacuccauccgccucuccgccggcggcgacaucugggucacccgcgagcccuacgucuccugcgaccccgacaagugcuaccaguucgcccucggccagggcaccacccucaacaacguccacuccaacaacaccguccgcgaccgcacccccuaccgcacccuccucaugaacgagcucggcguccccuuccaccucggcaccaagcaggucugcaucgccugguccuccuccuccugccacgacggcaaggccuggcuccacgucugcaucaccggcgacgacaagaacgccaccgccuccuucaucuacaacggcaagcucgucgacuccgucgucuccugguccaaggagauccuccgcacccaggaguccgagugcgucugcaucaacggcaccugcaccgucgucaugaccgacggcuccgccuccggcaaggccgacaccaagauccucuucaucgaggagggcaagaucguccacaccuccacccucuccggcuccgcccagcacgucgaggagugcuccugcuacccccgcuaccccggcguccgcugcgucugccgcgacaacuggaagggcuccaaccgccccaucgucgacaucaacaucaaggaccacuccaucgucuccuccuacgucugcuccggccucgucggcgacaccccccgcaagaacgacuccuccuccuccucccacugccucgaccccaacaacgaggagggcggccacggcgucaagggcugggccuucgacgacggcaacgacgucuggaugggccgcaccaucaacgagaccucccgccucggcuacgagaccuucaaggucaucgagggcugguccaaccccaaguccaagcuccagaucaaccgccaggucaucgucgaccgcggcaaccgcuccggcuacuccggcaucuucuccgucgagggcaaguccugcaucaaccgcugcuucuacgucgagcucauccgcggccgcaaggaggagaccgagguccucuggaccuccaacuccaucgucgucuucugcggcaccuccggcaccuacggcaccggcuccuggcccgacggcgccgaccucaaccucaugcccaucuga

SEQ ID NO: 120085 - RNA, 1410 nt, Artificial Sequence
  derived and/or modified CDS sequence (opt2) from neuraminidase__InfluenzaA__AHC59188
augaaccccaaccagaagaucaucaccaucggcuccgucucccucaccaucuccaccaucugcuucuucaugcagaucgccauccucaucaccaccgucacccuccacuucaagcaguacgaguucaaccccccccccaacaaccaggucguccucugcgagcccaccaucaucgagcgcaacaucaccgagaucgucuaccucaccaacaccaccaucgagaaggagaucugccccaagcucgccgaguaccgcaacugguccaagccccagugcgacaucaccggcuucgcccccuucuccaaggacaacuccauccgccucuccgccggcggcgacaucugggucacccgcgagcccuacgucuccugcgaccccgacaagugcuaccaguucgcccucggccagggcaccacccucaacaacguccacuccaacaacaccguccgcgaccgcacccccuaccgcacccuccucaugaacgagcucggcguccccuuccaccucggcaccaagcaggucugcaucgccugguccuccuccuccugccacgacggcaaggccuggcuccacgucugcaucaccggcgacgacaagaacgccaccgccuccuucaucuacaacggccgccucgucgacuccgucgucuccugguccaaggagauccuccgcacccaggaguccgagugcgucugcaucaacggcaccugcaccgucgucaugaccgacggcuccgccuccggcaaggccgacaccaagauccucuucaucgaggagggcaagaucguccacaccuccacccucuccggcuccgcccagcacgucgaggagugcuccugcuacccccgcuaccccggcguccgcugcgucugccgcgacaacuggaagggcuccaaccgccccaucgucgacaucaacaucaaggaccacuccaucgucuccuccuacgucugcuccggccucgucggcgacaccccccgcaagaacgacuccuccuccuccucccacugccucgaccccaacaacgaggagggcggccacggcgucaagggcugggccuucgacgacggcaacgacgucuggaugggccgcaccaucaacgagaccucccgccucggcuacgagaccuucaaggucaucgagggcugguccaaccccaaguccaagcuccagaucaaccgccaggucaucgucgaccgcggcgaccgcuccggcuacuccggcaucuucuccgucgagggcaaguccugcaucaaccgcugcuucuacgucgagcucauccgcggccgcaaggaggagaccgagguccucuggaccuccaacuccaucgucgucuucugcggcaccuccggcaccuacggcaccggcuccuggcccgacggcgccgaccucaaccucaugcccaucuga

SEQ ID NO: 120086 - RNA, 1410 nt, Artificial Sequence; identical to SEQ ID NO: 115554
  derived and/or modified CDS sequence (opt2) from neuraminidase__InfluenzaA__AHC59200

SEQ ID NO: 120087 - RNA, 1410 nt, Artificial Sequence
  derived and/or modified CDS sequence (opt2) from neuraminidase__InfluenzaA__AHC59212
augaaccccaaccagaagaucaucaccaucggcuccgucucccucaccaucuccaccaucugcuucuucaugcagaucgccacccucaucaccaccgucacccuccacuucaagcaguacgaguucaacuccccccccaacaaccaggucaugcucugcgagcccaccaucaucgagcgcaacaucaccgagaucgucuaccucaccaacaccaccaucgagaaggagaucugccccaagcucgccgaguaccgcaacugguccaagccccagugcgacaucaccggcuucgcccccuucuccaaggacaacuccauccgccucuccgccggcggcgacaucugggucacccgcgagcccuacgucuccugcgaccccgacaagugcuaccaguucgcccucggccagggcaccacccucaacaacguccacuccaacaacaccguccgcgaccgcacccccuaccgcacccuccucaugaacgagcucggcguccccuuccaccucggcaccaagcaggucugcaucgccugguccuccuccuccugccacgacggcaaggccuggcuccacgucugcaucaccggcgacgacaagaacgccaccgccuccuucaucuacaacggccgccucgucgacuccgucgucuccugguccaaggagauccuccgcacccaggaguccgagugcgucugcaucaacggcaccugcaccgucgucaugaccgacggcuccgccuccggcaaggccgacaccaagauccucuucaucgaggagggcaagaucguccacaccuccacccucuccggcuccgcccagcacgucgaggagugcuccugcuacccccgcuaccccggcguccgcugcgucugccgcgacaacuggaagggcuccaaccgccccaucgucgacaucaacaucaaggaccacuccaucgucuccuccuacgucugcuccggccucgucggcgacaccccccgcaagaacgacuccuccuccuccucccacugccucgaccccaacaacgaggagggcggccacggcgucaagggcugggccuucgacgacggcaacgacgucuggaugggccgcaccaucaacgagaccucccgccucggcuacgagaccuucaaggucaucgagggcugguccaaccccaaguccaagcuccagaucaaccgccaggucaucgucgaccgcggcgaccgcuccggcuacuccggcaucuucuccgucgagggcaaguccugcaucaaccgcugcuucuacgucgagcucauccgcggccgcaaggaggagaccgagguccucuggaccuccaacuccaucgucgucuucugcggcaccuccggcaccuacggcaccggcuccuggcccgacggcgccgaccucaaccucaugcccaucuga

SEQ ID NO: 120088 - RNA, 1410 nt, Artificial Sequence; identical to SEQ ID NO: 120011
  derived and/or modified CDS sequence (opt2) from neuraminidase__InfluenzaA__AHC59224

SEQ ID NO: 120089 - RNA, 1410 nt, Artificial Sequence
  derived and/or modified CDS sequence (opt2) from neuraminidase__InfluenzaA__AHC59236
augaaccccaaccagaagaucaucaccaucggcuccgucucccucaccaucuccaccaucugcuucuucaugcagaucgccauccucaucaccaccgucacccuccacuucaagcaguacgaguucuacuccccccccaacaaccaggucaugcucugcgagcccaccaucaucgagcgcaacaucaccgagaucgucuaccucaccaacaccaccaucgagaaggagaucugccccaagcucgccgaguaccgcaacugguccaagccccagugcgacaucaccggcuucgcccccuucuccaaggacaacuccauccgccucuccgccggcggcgacaucugggucacccgcgagcccuacgucuccugcgaccccgacaagugcuaccaguucgcccucggccagggcaccacccucaacaacguccacuccaacaacaccguccacgaccgcacccccuaccgcacccuccucaugaacgagcucggcguccccuuccaccucggcaccaagcaggucugcaucgccugguccuccuccuccugccacgacggcaaggccuggcuccacgucugcaucaccggcgacgacaagaacgccaccgccuccuucaucuacaacggccgccucgucgacuccgucgucuccugguccaaggagauccuccgcacccaggaguccgagugcgucugcaucaacggcaccugcaccgucgucaugaccgacggcuccgccuccggcaaggccgacaccaagauccucuucaucgaggagggcaagaucguccacaccuccacccucuccggcuccgcccagcacgucgaggagugcuccugcuacccccgcuaccccggcguccgcugcgucugccgcgacaacuggaagggcuccaaccgccccaucgucgacaucaacaucaaggaccacuccaucgucuccuccuacgucugcuccggccucgucggcgacaccccccgcaagaacgacuccuccuccuccucccacugccucgaccccaacaacgaggagggcggccacggcgucaagggcugggccuucgacgacggcaacgacgucuggaugggccgcaccaucaacgagaccucccgccucggcuacgagaccuucaaggucaucgagggcugguccaaccccaaguccaagcuccagaucaaccgccaggucaucgucgaccgcggcaaccgcuccggcuacuccggcaucuucuccgucgagggcaaguccugcaucaaccgcugcuucuacgucgagcucauccgcggccgcaaggaggagaccgagguccucuggaccuccaacuccaucgucgucuucugcggcaccuccggcaccuacggcaccggcuccuggcccgacggcgccgaccucaaccucaugcccaucuga

SEQ ID NO: 120090 - RNA, 1410 nt, Artificial Sequence; identical to SEQ ID NO: 120011
  derived and/or modified CDS sequence (opt2) from neuraminidase__InfluenzaA__AHC59260

SEQ ID NO: 120091 - RNA, 1410 nt, Artificial Sequence; identical to SEQ ID NO: 120007
  derived and/or modified CDS sequence (opt2) from neuraminidase__InfluenzaA__AHC59272

SEQ ID NO: 120092 - RNA, 1410 nt, Artificial Sequence; identical to SEQ ID NO: 120011
  derived and/or modified CDS sequence (opt2) from neuraminidase__InfluenzaA__AHC59284

SEQ ID NO: 120093 - RNA, 1410 nt, Artificial Sequence
  derived and/or modified CDS sequence (opt2) from neuraminidase__InfluenzaA__AHC59296
augaaccccaaccagaagaucaucaccaucggcuccgucucccucaccaucuccaccaucugcuucuucaugcagaucgccauccucaucaccaccgucacccuccacuucaagcaguacgaguucaacuccccccccaacaaccaggucaugcucugcgagcccaccaucaucgagcgcaacaucaccgagaucgucuaccucaccaacaccaccaucgagaaggagaucugccccaagcucgccgaguaccgcaacugguccaagccccagugcgacaucaccggcuucgcccccuucuccaaggacaacuccauccgccucuccgccggcggcgacaucugggucacccgcgagcccuacgucuccugcgaccccaacaagugcuaccaguucgcccucggccagggcaccacccucaacaacguccacuccaacaacaccguccgcgaccgcacccccuaccgcacccuccucaugaacgagcucggcguccccuuccaccucggcaccaagcaggucugcaucgccugguccuccuccuccugccacgacggcaaggccuggcuccacgucugcaucaccggcgacgacaagaacgccaccgccuccuucaucuacaacggcaagcucgucgacuccgucgucuccugguccaaggagauccuccgcacccaggaguccgagugcgucugcaucaacggcaccugcaccgucgucaugaccgacggcuccgccuccggcaaggccgacaccaagauccucuucaucgaggagggcaagaucguccacaccuccacccucuccggcuccgcccagcacgucgaggagugcuccugcuacccccgcuaccccggcguccgcugcgucugccgcgacaacuggaagggcuccaaccgccccaucgucgacaucaagaucaaggaccacuccaucgucuccuccuacgucugcuccggccucgucggcgacaccccccgcaagaacgacuccuccuccuccucccacugccucgaccccaacaacgaggagggcggccacggcgucaagggcugggccuucgacgacggcaacgacgucuggaugggccgcaccaucaacgagaccucccgccucggcuacgagaccuucaaggucaucgagggcugguccaaccccaaguccaagcuccagaucaaccgccaggucaucgucgaccgcggcaaccgcuccggcuacuccggcaucuucuccgucgagggcaaguccugcaucaaccgcugcuucuacgucgagcucauccgcggccgcaaggaggagaccgagguccucuggaccuccaacuccaucgucgucuucugcggcaccuccggcaccuacggcaccggcuccuggcccgacggcgccgaccucaaccucaugcccaucuga

SEQ ID NO: 120094 - RNA, 1410 nt, Artificial Sequence
  derived and/or modified CDS sequence (opt2) from neuraminidase__InfluenzaA__AHC59308
augaaccccaaccagaagaucaucaccaucggcuccgucucccucaccaucuccaccaucugcuucuucaugcagaucgccauccucaucaccaccgucacccuccacuucaagcaguacgaguucaaccccccccccaacaaccaggucaugcucugcgagcccaccaucaucgagcgcaacaucaccgagaucgucuaccucaccaacaccaccaucgagaaggagaucugccccaagcucgccgaguaccgcaacugguccaagccccagugcgacaucaccggcuucgcccccuucuccaaggacaacuccauccgccucuccgccggcggcgacaucugggucacccgcgagcccuacgucuccugcgaccccaacaagugcuaccaguucgcccucggccagggcaccacccucaacaacguccacuccaacaacaccguccgcgaccgcacccccuaccgcacccuccucaugaacgagcucggcguccccuuccaccucggcaccaagcaggucugcaucgccugguccuccuccuccugccacgacggcaaggccuggcuccacgucugcaucaccggcgacgacaagaacgccaccgccuccuucaucuacaacggcaagcucgucgacuccgucgucuccugguccaaggagauccuccgcacccaggaguccgagugcgucugcaucaacggcaccugcaccgucgucaugaccgacggcuccgccuccggcaaggccgacaccaagauccucuucaucgaggagggcaagaucguccacaccuccacccucuccggcuccgcccagcacgucgaggagugcuccugcuacccccgcuaccccggcguccgcugcgucugccgcgacaacuggaagggcuccaaccgccccaucgucgacaucaacaucaaggaccacuccaucgucuccuccuacgucugcuccggccucgucggcgacaccccccgcaagaacgacuccuccuccuccucccacugccucgaccccaacaacgaggagggcggccacggcgucaagggcugggccuucgacgacggcaacgacgucuggaugggccgcaccaucaacgagaccucccgccucggcuacgagaccuucaaggucaucgagggcugguccaaccccaaguccaagcuccagaucaaccgccaggucauggucgaccgcggcaaccgcuccggcuacuccggcaucuucuccgucgagggcaaguccugcaucaaccgcugcuucuacgucgagcucauccgcggccgcaaggaggagaccgagguccucuggaccuccaacuccaucgucgucuucugcggcaccuccggcaccuacggcaccggcuccuggcccgacggcgccgaccucaaccucaugcccaucuga

SEQ ID NO: 120095 - RNA, 1410 nt, Artificial Sequence; identical to SEQ ID NO: 119919
  derived and/or modified CDS sequence (opt2) from neuraminidase__InfluenzaA__AHC59320

SEQ ID NO: 120096 - RNA, 1410 nt, Artificial Sequence; identical to SEQ ID NO: 118182
  derived and/or modified CDS sequence (opt2) from neuraminidase__InfluenzaA__AHC59332

SEQ ID NO: 120097 - RNA, 1410 nt, Artificial Sequence; identical to SEQ ID NO: 120055
  derived and/or modified CDS sequence (opt2) from neuraminidase__InfluenzaA__AHC59344

SEQ ID NO: 120098 - RNA, 1410 nt, Artificial Sequence
  derived and/or modified CDS sequence (opt2) from neuraminidase__InfluenzaA__AHC59368
augaaccccaaccagaagaucaucaccaucggcuccgucucccucaccaucuccaccaucugcuucuucaugcagaucgccauccucaucaccaccgucacccuccacuucaagcaguacgaguucaacuccccccccaacaaccaggucaugcucugcgagcccaccaucaucgagcgcaacaucaccgagaucgucuaccucaccaacaccaccaucgagaaggagaucugccccaagcucgccgaguaccgcaacugguccaagccccagugcgacaucaccggcuucgcccccuucuccaaggacaacuccauccgccucuccgccggcggcgacaucugggucacccgcgagcccuacgucuccugcgaccccaacaagugcuaccaguucgcccucggccagggcaccacccucaacaacguccacuccaacaacaccguccgcgaccgcacccccuaccgcacccuccucaugaacgagcucggcguccccuuccaccucggcaccaagcaggucugcaucgccugguccuccuccuccugccacgacggcaaggccuggcuccacgucugcaucaccggcgacgacaagaacgccaccgccuccuucaucuacaacggcaagcucgucgacuccgucgucuccugguccaaggagauccuccgcacccaggaguccgagugcgucugcaucaacggcaccugcaccgucgucaugaccgacggcuccgccuccggcaaggccgacaccaagauccucuucaucgaggagggcaagaucguccacaccuccacccucuccggcuccgcccagcacgucgaggagugcuccugcuacccccgcuaccccggcguccgcugcgucugccgcgacaacuggaagggcuccaaccgccccaucgucgacaucaacaucaaggaccacuccaucgucuccuccuacgucugcuccggccucgucggcgacaccccccgcaagaacgacuccuccuccuccucccacugccucgaccccaacaacgaggagggcggccacggcgucaagggcugggccuucgacgacggcaacgacgucuggaugggccgcaccaucgacgagaccucccgccucggcuacgagaccuucaaggucaucgagggcugguccaaccccaaguccaagcuccagaucaaccgccaggucaucgucgaccgcggcaaccgcuccggcuacuccggcaucuucuccgucgagggcaaguccugcaucaaccgcugcuucuacgucgagcucauccgcggccgcaaggaggagaccgagguccucuggaccuccaacuccaucgucgucuucugcggcaccuccggcaccuacggcaccggcuccuggcccgacggcgccgaccucaaccucaugcccaucuga

SEQ ID NO: 120099 - RNA, 1410 nt, Artificial Sequence; identical to SEQ ID NO: 120007
  derived and/or modified CDS sequence (opt2) from neuraminidase__InfluenzaA__AHC59380

SEQ ID NO: 120100 - RNA, 1410 nt, Artificial Sequence; identical to SEQ ID NO: 118958
  derived and/or modified CDS sequence (opt2) from neuraminidase__InfluenzaA__AHC59392

SEQ ID NO: 120101 - RNA, 1410 nt, Artificial Sequence; identical to SEQ ID NO: 120043
  derived and/or modified CDS sequence (opt2) from neuraminidase__InfluenzaA__AHC59404

SEQ ID NO: 120102 - RNA, 1410 nt, Artificial Sequence; identical to SEQ ID NO: 120011
  derived and/or modified CDS sequence (opt2) from neuraminidase__InfluenzaA__AHC59416

SEQ ID NO: 120103 - RNA, 1410 nt, Artificial Sequence
  derived and/or modified CDS sequence (opt2) from neuraminidase__InfluenzaA__AHC59428
augaaccccaaccagaagaucaucaccaucggcuccgucucccucaccaucuccaccaucugcuucuucaugcagaucgccauccucaucaccaccgucacccuccacuucaagcaguacgaguucuacuccccccccaacaaccaggucaugcucugcgagcccaccaucaucgagcgcaacaucaccgagaucgucuaccucaccaacaccaccaucgagaaggagaucugccccaagcucgccgaguaccgcaacugguccaagccccagugcgacaucaccggcuucgcccccuucuccaaggacaacuccauccgccucuccgccggcggcgacaucugggucacccgcgagcccuacgucuccugcgaccccgaccgcugcuaccaguucgcccucggccagggcaccacccucaacaacguccacuccaacaacaccguccgcgaccgcacccccuaccgcacccuccucaugaacgagcucggcguccccuuccaccucggcaccaagcaggucugcaucgccugguccuccuccuccugccacgacggcaaggccuggcuccacgucugcaucaccggcgacgacaagaacgccaccgccuccuucaucuacaacggccgccucgucgacuccgucgucuccugguccaaggagauccuccgcacccaggaguccgagugcgucugcaucaacggcaccugcaccgucgucaugaccgacggcuccgccuccggcaaggccgacaccaagauccucuucaucgaggagggcaagaucguccacaccuccacccucuccggcuccgcccagcacgucgaggagugcuccugcuacccccgcuaccccggcguccgcugcgucugccgcgacaacuggaagggcuccaaccgccccaucgucgacaucaacaucaaggaccacuccaucgucuccuccuacgucugcuccggccucgucggcgacaccccccgcaagaacgacuccuccuccuccucccacugccucgaccccaacaacgaggagggcggccacggcgucaagggcugggccuucgacgacggcaacgacgucuggaugggccgcaccaucaacgagaccucccgccucggcuacgagaccuucaaggucaucgagggcugguccaaccccaaguccaagcuccagaucaaccgccaggucaucgucgaccgcggcaaccgcuccggcuacuccggcaucuucuccgucgagggcaaguccugcaucaaccgcugcuucuacgucgagcucauccgcggccgcaaggaggagaccgagguccucuggaccuccaacuccaucgucgucuucugcggcaccuccggcaccuacggcaccggcuccuggcccgacggcgccgaccucaaccucaugcccaucuga

SEQ ID NO: 120104 - RNA, 1410 nt, Artificial Sequence
  derived and/or modified CDS sequence (opt2) from neuraminidase__InfluenzaA__AHC59440
augaaccccaaccagaagaucaucaccaucggcuccgucucccucaccaucuccaccaucugcuucuucaugcagaucgccauccucaucaccaccgucacccuccacuucaagcaguacgaguucaacuccccccccaacaaccaggucaugcucugcgagcccaccaucaucgagcgcaacaucaccgagaucgucuaccucaccaacaccaccaucgagaaggagaucugccccaagcccgccgaguaccgcaacugguccaagccccagugcgacaucaccggcuucgcccccuucuccaaggacaacuccauccgccucuccgccggcggcgacaucugggucacccgcgagcccuacgucuccugcgaccccgacaagugcuaccaguucgcccucggccagggcaccacccucaacaacguccacuccaacaacaccguccgcgaccgcacccccuaccgcacccuccucaugaacgagcucggcguccccuuccaccucggcaccaagcaggucugcaucgccugguccuccuccuccugccacgacggcaaggccuggcuccacgucugcaucaccggcgacgacaagaacgccaccgccuccuucaucuacaacggccgccucgucgacuccgucgucuccugguccaaggagauccuccgcacccaggaguccgagugcgucugcaucaacggcaccugcaccgucgucaugaccgacggcuccgccuccggcaaggccgacaccaagauccucuucaucgaggagggcaagaucguccagaccuccacccucuccggcuccgcccagcacgucgaggagugcuccugcuacccccgcuaccccggcguccgcugcgucugccgcgacaacuggaagggcuccaaccgccccaucgucgacaucaacaucaaggaccacuccaucgucuccuccuacgucugcuccggccucgucggcgacaccccccgcaagaacgacuccuccuccuccucccacugccucgaccccaacaacgaggagggcggccacggcgucaagggcugggccuucgacgacggcaacgacgucuggaugggccgcaccaucaacgagaccucccgccucggcuacgagaccuucaaggucaucgagggcugguccaaccccaaguccaagcuccagaucaaccgccaggucaucgucgaccgcggcgaccgcuccggcuacuccggcaucuucuccgucgagggcaaguccugcaucaaccgcugcuucuacgucgagcucauccgcggccgcaaggaggagaccgagguccucuggaccuccaacuccaucgucgucuucugcggcaccuccggcaccuacggcaccggcuccuggcccgacggcgccgaccucaaccucaugcccaucuga

SEQ ID NO: 120105 - RNA, 1410 nt, Artificial Sequence; identical to SEQ ID NO: 120011
  derived and/or modified CDS sequence (opt2) from neuraminidase__InfluenzaA__AHC59452

SEQ ID NO: 120106 - RNA, 1410 nt, Artificial Sequence; identical to SEQ ID NO: 115554
  derived and/or modified CDS sequence (opt2) from neuraminidase__InfluenzaA__AHC59464

SEQ ID NO: 120107 - RNA, 1410 nt, Artificial Sequence; identical to SEQ ID NO: 119919
  derived and/or modified CDS sequence (opt2) from neuraminidase__InfluenzaA__AHC59476

SEQ ID NO: 120108 - RNA, 1410 nt, Artificial Sequence; identical to SEQ ID NO: 120011
  derived and/or modified CDS sequence (opt2) from neuraminidase__InfluenzaA__AHC59488

SEQ ID NO: 120109 - RNA, 1410 nt, Artificial Sequence; identical to SEQ ID NO: 120011
  derived and/or modified CDS sequence (opt2) from neuraminidase__InfluenzaA__AHC59500

SEQ ID NO: 120110 - RNA, 1410 nt, Artificial Sequence; identical to SEQ ID NO: 120056
  derived and/or modified CDS sequence (opt2) from neuraminidase__InfluenzaA__AHC59512

SEQ ID NO: 120111 - RNA, 1410 nt, Artificial Sequence; identical to SEQ ID NO: 120056
  derived and/or modified CDS sequence (opt2) from neuraminidase__InfluenzaA__AHC59524

SEQ ID NO: 120112 - RNA, 1410 nt, Artificial Sequence; identical to SEQ ID NO: 120043
  derived and/or modified CDS sequence (opt2) from neuraminidase__InfluenzaA__AHC59536

SEQ ID NO: 120113 - RNA, 1410 nt, Artificial Sequence; identical to SEQ ID NO: 120011
  derived and/or modified CDS sequence (opt2) from neuraminidase__InfluenzaA__AHC59548

SEQ ID NO: 120114 - RNA, 1410 nt, Artificial Sequence; identical to SEQ ID NO: 120011
  derived and/or modified CDS sequence (opt2) from neuraminidase__InfluenzaA__AHC59560

SEQ ID NO: 120115 - RNA, 1410 nt, Artificial Sequence; identical to SEQ ID NO: 120089
  derived and/or modified CDS sequence (opt2) from neuraminidase__InfluenzaA__AHC59572

SEQ ID NO: 120116 - RNA, 1410 nt, Artificial Sequence; identical to SEQ ID NO: 120084
  derived and/or modified CDS sequence (opt2) from neuraminidase__InfluenzaA__AHC59584

SEQ ID NO: 120117 - RNA, 1410 nt, Artificial Sequence; identical to SEQ ID NO: 120056
  derived and/or modified CDS sequence (opt2) from neuraminidase__InfluenzaA__AHC59596

SEQ ID NO: 120118 - RNA, 1410 nt, Artificial Sequence; identical to SEQ ID NO: 118958
  derived and/or modified CDS sequence (opt2) from neuraminidase__InfluenzaA__AHC59608

SEQ ID NO: 120119 - RNA, 1410 nt, Artificial Sequence; identical to SEQ ID NO: 120043
  derived and/or modified CDS sequence (opt2) from neuraminidase__InfluenzaA__AHC59620

SEQ ID NO: 120120 - RNA, 1410 nt, Artificial Sequence; identical to SEQ ID NO: 120011
  derived and/or modified CDS sequence (opt2) from neuraminidase__InfluenzaA__AHC59632

SEQ ID NO: 120121 - RNA, 1410 nt, Artificial Sequence; identical to SEQ ID NO: 120011
  derived and/or modified CDS sequence (opt2) from neuraminidase__InfluenzaA__AHC59644

SEQ ID NO: 120122 - RNA, 1410 nt, Artificial Sequence
  derived and/or modified CDS sequence (opt2) from neuraminidase__InfluenzaA__AHC59656
augaaccccaaccagaagaucaucaccaucggcuccgucucccucaccaucuccaccaucugcuucuucaugcagaucgccauccucaucaccaccgucaccaugcacuucaagcaguacgaguucaacuccccccccaacaaccaggucaugcucugcgagcccaccaucaucgagcgcaacaucaccgagaucgucuaccucaccaacaccaccaucgagaaggagaucugccccaagcucgccgaguaccgcaacugguccaagccccagugcgacaucaccggcuucgcccccuucuccaaggacaacuccauccgccucuccgccggcggcgacaucugggucacccgcgagcccuacgucuccugcgaccccgucaagugcuaccaguucgcccucggccagggcaccacccucaacaacguccacuccaacaacaccguccgcgaccgcacccccuaccgcacccuccucaugaacgagcucggcguccccuuccaccucggcaccaagcaggucugcaucgccugguccuccuccuccugccacgacggcaaggccuggcuccacgucugcaucaccggcgacgacaagaacgccaccgccuccuucaucuacaacggcaagcucgucgacuccgucgucuccugguccaaggagauccuccgcacccaggaguccgagugcgucugcaucaacggcaccugcaccgucgucaugaccgacggcuccgccuccggcaaggccgacaccaagauccucuucaucgaggagggcaagaucguccacaccuccacccucuccggcuccgcccagcacgucgaggagugcuccugcuacccccgcuaccccggcguccgcugcgucugccgcgacaacuggaagggcuccaaccgccccaucgucgacaucaacaucaaggaccacuccaucgucuccuccuacgucugcuccggccucgucggcgacaccccccgcaagaacgacuccuccuccuccucccacugccucgaccccaacaacgaggagggcggccacggcgucaagggcugggccuucgacgacggcaacgacgucuggaugggccgcaccaucaacgagaccucccgccucggcuacgagaccuucaaggucaucgagggcugguccaaccccaaguccaagcuccagaucaaccgccaggucaucgucgaccgcggcaaccgcuccggcuacuccggcaucuucuccgucgagggcaaguccugcaucaaccgcugcuucuacgucgagcucauccgcggccgcaaggaggagaccgagguccucuggaccuccaacuccaucgucgucuucugcggcaccuccggcaccuacggcaccggcuccuggcccgacggcgccgaccucaaccucaugcccaucuga

SEQ ID NO: 120123 - RNA, 1410 nt, Artificial Sequence; identical to SEQ ID NO: 120056
  derived and/or modified CDS sequence (opt2) from neuraminidase__InfluenzaA__AHC59668

SEQ ID NO: 120124 - RNA, 1410 nt, Artificial Sequence; identical to SEQ ID NO: 120084
  derived and/or modified CDS sequence (opt2) from neuraminidase__InfluenzaA__AHC59680

SEQ ID NO: 120125 - RNA, 1410 nt, Artificial Sequence; identical to SEQ ID NO: 120011
  derived and/or modified CDS sequence (opt2) from neuraminidase__InfluenzaA__AHC59704

SEQ ID NO: 120126 - RNA, 1410 nt, Artificial Sequence; identical to SEQ ID NO: 115554
  derived and/or modified CDS sequence (opt2) from neuraminidase__InfluenzaA__AHC59716

SEQ ID NO: 120127 - RNA, 1410 nt, Artificial Sequence; identical to SEQ ID NO: 115554
  derived and/or modified CDS sequence (opt2) from neuraminidase__InfluenzaA__AHC59728

SEQ ID NO: 120128 - RNA, 1410 nt, Artificial Sequence; identical to SEQ ID NO: 120056
  derived and/or modified CDS sequence (opt2) from neuraminidase__InfluenzaA__AHC59752

SEQ ID NO: 120129 - RNA, 1410 nt, Artificial Sequence; identical to SEQ ID NO: 120043
  derived and/or modified CDS sequence (opt2) from neuraminidase__InfluenzaA__AHC59764

SEQ ID NO: 120130 - RNA, 1410 nt, Artificial Sequence
  derived and/or modified CDS sequence (opt2) from neuraminidase__InfluenzaA__AHC59776
augaaccccaaccagaagaucaucaccaucggcuccgucucccucaccaucuccaccaucugcuucuucaugcagaucgccauccucaucaccaccgucacccuccacuucaagcaguacgaguucuacuccccccccaacaaccaggucaugcucugcgagcccaccaucaucgagcgcaacaucaccgagaucgucuaccucaccaacaccaccaucgagaaggagaucugccccaagcucgccgaguaccgcaacugguccaagccccagugcgacaucaccggcuucgcccccuucuccaaggacaacuccauccgccucuccgccggcggcgacaucugggucacccgcgagcccuacgucuccugcgaccccgacaagugcuaccaguucgcccucggccagggcaccacccucaacaacguccacuccaacaacaccguccgcgaccgcacccccuaccgcacccuccucaugaacgagcucggcguccccuuccaccucggcaccaagcaggucugcaucgccugguccuccuccuccugccacgacggcaaggccuggcuccacgucugcaucaccggcgacgacaagaacgccaccgccuccuucaucuacaacggcaagcucgucgacuccgucgucuccugguccaaggagauccuccgcacccaggaguccgagugcgucugcaucaacggcaccugcaccgucgucaugaccgacggcuccgccuccggcaaggccgacaccaagauccucuucaucgaggagggcaagaucguccacaccuccacccucuccggcuccgcccagcacgucgaggagugcuccugcuacccccgcuaccccggcguccgcugcgucugccgcgacaacuggaagggcuccaaccgccccaucgucgacaucaacaucaaggaccacuccaucgucuccuccuacgucugcuccggccucgucggcgacaccccccgcaagaacgacuccuccuccuccucccacugccucgaccccaacaacgaggagggcggccacggcgucaagggcugggccuucgacgacggcaacgacgucuggaugggccgcaccaucaacgagaccucccgccucggcuacgagaccuucaaggucaucgagggcugguccaaccccaaguccaagcuccagaucaaccgccaggucaucgucgaccgcggcaaccgcuccggcuacuccggcaucuucuccgucgagggcaaguccugcaucaaccgcugcuucuacgucgagcucauccgcggccgcaaggaggagaccgagguccucuggaccuccaacuccaucgucgucuucugcggcaccuccggcaccuacggcaccggcuccuggcccgacggcgccgaccucaaccucaugcccaucuga

SEQ ID NO: 120131 - RNA, 1410 nt, Artificial Sequence; identical to SEQ ID NO: 120007
  derived and/or modified CDS sequence (opt2) from neuraminidase__InfluenzaA__AHC59788

SEQ ID NO: 120132 - RNA, 1410 nt, Artificial Sequence; identical to SEQ ID NO: 120084
  derived and/or modified CDS sequence (opt2) from neuraminidase__InfluenzaA__AHC59800

SEQ ID NO: 120133 - RNA, 1410 nt, Artificial Sequence
  derived and/or modified CDS sequence (opt2) from neuraminidase__InfluenzaA__AHC59812
augaaccccaaccagaagaucaucaccaucggcuccgucucccucaccaucuccaccaucugcuucuucaugcagaucgccauccucaucaccaccgucacccuccacuucaagcaguacgaguucaacuccccccccaacaaccaggucguccucugcgagcccaccaucaucgagcgcaacaucaccgagaucgucuaccucaccaacaccaccaucgagaaggagaucugccccaagcccgccgaguaccgcaacugguccaagccccagugcgacaucaccggcuucgcccccuucuccaaggacaacuccauccgccucuccgccggcggcgacaucugggucacccgcgagcccuacgucuccugcgaccccgacaagugcuaccaguucgcccucggccagggcaccacccucaacaacguccacuccaacaacaccguccgcgaccgcacccccuaccgcacccuccucaugaacgagcucggcguccccuuccaccucggcaccaagcaggucugcaucgccugguccuccuccuccugccacgacggcaaggccuggcuccacgucugcaucaccggcgacgacaagaacgccaccgccuccuucaucuacaacggccgccucgucgacuccgucgucuccugguccaaggagauccuccgcacccaggaguccgagugcgucugcaucaacggcaccugcaccgucgucaugaccgacggcuccgccuccggcaaggccgacaccaagauccucuucaucgaggagggcaagaucgucuacaccuccacccucuccggcuccgcccagcacgucgaggagugcuccugcuacccccgcuaccccggcguccgcugcgucugccgcgacaacuggaagggcuccaaccgccccaucgucgacaucaacaucaaggaccacuccaucgucuccuccuacgucugcuccggccucgucggcgacaccccccgcaagaacgacuccuccuccuccucccacugccucgaccccaacaacgaggagggcggccacggcgucaagggcugggccuucgacgacggcaacgacgucuggaugggccgcaccaucaacgagaccucccgccucggcuacgagaccuucaaggucaucgagggcugguccaaccccaaguccaagcuccagaucaaccgccaggucaucgucgaccgcggcgaccgcuccggcuacuccggcaucuucuccgucgagggcaaguccugcaucaaccgcugcuucuacgucgagcucauccgcggccgcaaggaggagaccgagguccucuggaccuccaacuccaucgucgucuucugcggcaccuccggcaccuacggcaccggcuccuggcccgacggcgccgaccucaaccucaugcccaucuga

SEQ ID NO: 120134 - RNA, 1410 nt, Artificial Sequence
  derived and/or modified CDS sequence (opt2) from neuraminidase__InfluenzaA__AHC59824
augaaccccaaccagaagaucaucaccaucggcuccgucucccucaccaucuccaccaucugcuucuucaugcagaucgccauccucaucaccaccgucacccuccacuucaagcaguacgaguucuacuccccccccaacaaccaggucaugcucugcgagcccaccaucaucgagcgcaacaucaccgagaucgucuaccucaccaacaccaccaucgagaaggagaucugccccaagcucgccgaguaccgcaagugguccaagccccagugcgacaucaccggcuucgcccccuucuccaaggacaacuccauccgccucuccgccggcggcgacaucugggucacccgcgagcccuacgucuccugcgaccccgacaagugcuaccaguucgcccucggccagggcaccacccucaacaacguccacuccaacaacaccguccgcgaccgcacccccuaccgcacccuccucaugaacgagcucggcguccccuuccaccucggcaccaagcaggucugcaucgccugguccuccuccuccugccacgacggcaaggccuggcuccacgucugcaucaccggcgacgacaagaacgccaccgccuccuucaucuacaacggccgccucgucgacuccgucgucuccugguccaaggagauccuccgcacccaggaguccgagugcgucugcaucaacggcaccugcaccgucgucaugaccgacggcuccgccuccggcaaggccgacaccaagauccucuucaucgaggagggcaagaucguccacaccuccacccucuccggcuccgcccagcacgucgaggagugcuccugcuacccccgcuaccccggcguccgcugcgucugccgcgacaacuggaagggcuccaaccgccccaucgucgacaucaacaucaaggaccacuccaucgucuccuccuacgucugcuccggccucgucggcgacaccccccgcaagaacgacuccuccuccuccucccacugccucgaccccaacaacgaggagggcggccacggcgucaagggcugggccuucgacgacggcaacgacgucuggaugggccgcaccaucaacgagaccucccgccucggcuacgagaccuucaaggucaucgagggcugguccaaccccaaguccaagcuccagaucaaccgccaggucaucgucgaccgcggcaaccgcuccggcuacuccggcaucuucuccgucgagggcaaguccugcaucaaccgcugcuucuacgucgagcucauccgcggccgcaaggaggagaccgagguccucuggaccuccaacuccaucgucgucuucugcggcaccuccggcaccuacggcaccggcuccuggcccgacggcgccgaccucaaccucaugcccaucuga

SEQ ID NO: 120135 - RNA, 1410 nt, Artificial Sequence; identical to SEQ ID NO: 120011
  derived and/or modified CDS sequence (opt2) from neuraminidase__InfluenzaA__AHC59836

SEQ ID NO: 120136 - RNA, 1410 nt, Artificial Sequence; identical to SEQ ID NO: 118958
  derived and/or modified CDS sequence (opt2) from neuraminidase__InfluenzaA__AHC59848

SEQ ID NO: 120137 - RNA, 1410 nt, Artificial Sequence; identical to SEQ ID NO: 120007
  derived and/or modified CDS sequence (opt2) from neuraminidase__InfluenzaA__AHC59860

SEQ ID NO: 120138 - RNA, 1410 nt, Artificial Sequence; identical to SEQ ID NO: 120054
  derived and/or modified CDS sequence (opt2) from neuraminidase__InfluenzaA__AHC59872

SEQ ID NO: 120139 - RNA, 1410 nt, Artificial Sequence; identical to SEQ ID NO: 120043
  derived and/or modified CDS sequence (opt2) from neuraminidase__InfluenzaA__AHC59884

SEQ ID NO: 120140 - RNA, 1410 nt, Artificial Sequence
  derived and/or modified CDS sequence (opt2) from neuraminidase__InfluenzaA__AHC59895
augaaccccaaccagaagaucaucaccaucggcuccgucucccucaccaucuccaccaucugcuucuucaugcagaucgccauccucaucaccaccgucacccuccacuucaagcaguacgaguucaacuccccccccaacaaccaggucaugcucugcgagcccaccaucaucgagcgcaacaucaccgagaucgucuaccucaccaacaccaccaucgagaaggagaucugccccaagcucgccgaguaccgcaacugguccaagccccagugcgacaucaccggcuucgcccccuucuccaaggacaacuccauccgccucuccgccggcggcgacaucugggucacccgcgagcccuacgucuccugcgaccccgacaagugcuaccaguucgcccucggccagggcaccacccucaacaacguccacuccaacaacaccguccgcgaccgcacccccuaccgcacccuccucaugaacgagcucggcguccccuuccaccucggcaccaagcaggucugcaucgccugguccuccuccuccugccacgacggcaaggccuggcuccacgucugcaucaccggcgacgacaagaacgccaccgccuccuucaucuacaacggccgccucgucgacuccgucgucuccugguccaaggagauccuccgcacccaggaguccgagugcgucugcaucaacggcaccugcaccgucgucaugaccgacggcuccgccuccggcaaggccgacaccaagauccucuucaucaaggagggcaagaucguccacaccuccacccucuccggcuccgcccagcacgucgaggagugcuccugcuacccccgcuaccccggcguccgcugcgucugccgcgacaacuggaagggcuccaaccgccccaucgucgacaucaacaucaaggaccacuccaucgucuccuccuacgucugcuccggccucgucggcgacaccccccgcaagaacgacuccuccuccuccucccacugccucgaccccaacaacgaggagggcggccacggcgucaagggcugggccuucgacgacggcaacgacgucuggaugggccgcaccaucaacgagaccucccgccucggcuacgagaccuucaaggucaucgagggcugguccaaccccaaguccaagcuccagaucaaccgccaggucaucgucgaccgcggcaaccgcuccggcuacuccggcaucuucuccgucgagggcaaguccugcaucaaccgcugcuucuacgucgagcucauccgcggccgcaaggaggagaccgagguccucuggaccuccaacuccaucgucgucuucugcggcaccuccggcaccuacggcaccggcuccuggcccgacggcgccgaccucaaccucaugcccaucuga

SEQ ID NO: 120141 - RNA, 1410 nt, Artificial Sequence; identical to SEQ ID NO: 120011
  derived and/or modified CDS sequence (opt2) from neuraminidase__InfluenzaA__AHC59907

SEQ ID NO: 120142 - RNA, 1410 nt, Artificial Sequence
  derived and/or modified CDS sequence (opt2) from neuraminidase__InfluenzaA__AHC59918
augaaccccaaccagaagaucaucaccaucggcuccgucucccucaccaucuccaccaucugcuucuucauccagaucgccauccucaucaccaccgucacccuccacuucaagcaguacgaguucaacuccccccccaacaaccaggucaugcucugcgagcccaccaucaucgagcgcaacaucaccgagaucgucuaccucaccaacaccaccaucgagaaggagaucugccccaagcucgccgaguaccgcaacugguccaagccccagugcgacaucaccggcuucgcccccuucuccaaggacaacuccauccgccucuccgccggcggcgacaucugggucacccgcgagcccuacgucuccugcgaccccgacaagugcuaccaguucgcccucggccagggcaccacccucaacaacguccacuccaacaacaccguccgcgaccgcacccccuaccgcacccuccucaugaacgagcucggcguccccuuccaccucggcaccaagcaggucugcaucgccugguccuccuccuccugccacgacggcaaggccuggcuccacgucugcaucaccggcgacgacaagaacgccaccgccuccuucaucuacaacggccgccucgucgacuccgucgucuccugguccaaggagauccuccgcacccaggaguccgagugcgucugcaucaacggcaccugcaccgucgucaugaccgacggcuccgccuccggcaaggccgacaccaagauccucuucaucgaggagggcaagaucguccacaccuccacccucuccggcuccgcccagcacgucgaggagugcuccugcuacccccgcuaccccggcguccgcugcgucugccgcgacaacuggaagggcuccaaccgccccaucgucgacaucaacaucaaggaccacuccaucgucuccuccuacgucugcuccggccucgucggcgacaccccccgcaagaacgacuccuccuccuccucccacugccucgaccccaacaacgaggagggcggccacggcgucaagggcugggccuucgacgacggcaacgacgucuggaugggccgcaccaucaacgagaccucccgccucggcuacgagaccuucaaggucaucgagggcugguccaaccccaaguccaagcuccagaugaaccgccaggucaucgucgaccgcggcaaccgcuccggcuacuccggcaucuucuccgucgagggcaaguccugcaucaaccgcugcuucuacgucgagcucauccgcggccgcaaggaggagaccgagguccucuggaccuccaacuccaucgucgucuucugcggcaccuccggcaccuacggcaccggcuccuggcccgacggcgccgaccucaaccucaugcccaucuga

SEQ ID NO: 120143 - RNA, 1410 nt, Artificial Sequence; identical to SEQ ID NO: 120142
  derived and/or modified CDS sequence (opt2) from neuraminidase__InfluenzaA__AHC59930

SEQ ID NO: 120144 - RNA, 1410 nt, Artificial Sequence; identical to SEQ ID NO: 120011
  derived and/or modified CDS sequence (opt2) from neuraminidase__InfluenzaA__AHC59942

SEQ ID NO: 120145 - RNA, 1410 nt, Artificial Sequence; identical to SEQ ID NO: 120056
  derived and/or modified CDS sequence (opt2) from neuraminidase__InfluenzaA__AHC59954

SEQ ID NO: 120146 - RNA, 1410 nt, Artificial Sequence
  derived and/or modified CDS sequence (opt2) from neuraminidase__InfluenzaA__AHC59966
augaaccccaaccagaagaucaucaccaucggcuccgucucccucaccaucuccaccaucugcuucuucaugcagaucgccauccucaucaccaccgucacccuccacuucaagcaguacgaguucaacuccucccccaacaaccaggucaugcucugcgagcccaccaucaucgagcgcaacaucaccgagaucgucuaccucaccaacaccaccaucgagaaggagaucugccccaagcccgccgaguaccgcaacugguccaagccccagugcgacaucaccggcuucgcccccuucuccaaggacaacuccauccgccucuccgccggcggcgacaucugggucacccgcgagcccuacgucuccugcgaccccgacaagugcuaccaguucgcccucggccagggcaccacccucaacaacguccacuccaacaacaccguccgcgaccgcacccccuaccgcacccuccucaugaacgagcucggcguccccuuccaccucggcaccaagcaggucugcaucgccugguccuccuccuccugccacgacggcaaggccuggcuccacgucugcaucaccggcgacgacaagaacgccaccgccuccuucaucuacaacggccgccucgucgacuccgucgucuccugguccaaggagauccuccgcacccaggaguccgagugcgucugcaucaacggcaccugcaccgucgucaugaccgacggcuccgccuccggcaaggccgacaccaagauccucuucaucgaggagggcaagaucguccacaccuccacccucuccggcuccgcccagcacgucgaggagugcuccugcuacccccgcuaccccggcguccgcugcgucugccgcgacaacuggaagggcuccaaccgccccaucgucgacaucaacaucaaggaccacuccaucgucuccuccuacgucugcuccggccucgucggcgacaccccccgcaagaacgacuccuccuccuccucccacugccucgaccccaacaacgaggagggcggccacggcgucaagggcugggccuucgacgacggcaacgacgucuggaugggccgcaccaucaacgagaccucccgccucggcuacgagaccuucaaggucaucgagggcugguccaaccccaaguccaagcuccagaucaaccgccaggucaucgucgaccgcggcgacggcuccggcuacuccggcaucuucuccgucgagggcaaguccugcaucaaccgcugcuucuacgucgagcucauccgcggccgcaaggaggagaccgagguccucuggaccuccaacuccaucgucgucuucugcggcaccuccggcaccuacggcaccggcuccuggcccgacggcgccgaccucaaccucaugcccaucuga

SEQ ID NO: 120147 - RNA, 1410 nt, Artificial Sequence; identical to SEQ ID NO: 118958
  derived and/or modified CDS sequence (opt2) from neuraminidase__InfluenzaA__AHC59978

SEQ ID NO: 120148 - RNA, 1410 nt, Artificial Sequence; identical to SEQ ID NO: 116920
  derived and/or modified CDS sequence (opt2) from neuraminidase__InfluenzaA__AHC59990

SEQ ID NO: 120149 - RNA, 1410 nt, Artificial Sequence; identical to SEQ ID NO: 120056
  derived and/or modified CDS sequence (opt2) from neuraminidase__InfluenzaA__AHC60002

SEQ ID NO: 120150 - RNA, 1410 nt, Artificial Sequence; identical to SEQ ID NO: 120011
  derived and/or modified CDS sequence (opt2) from neuraminidase__InfluenzaA__AHC60014

SEQ ID NO: 120151 - RNA, 1410 nt, Artificial Sequence; identical to SEQ ID NO: 115554
  derived and/or modified CDS sequence (opt2) from neuraminidase__InfluenzaA__AHC60026

SEQ ID NO: 120152 - RNA, 1410 nt, Artificial Sequence; identical to SEQ ID NO: 120007
  derived and/or modified CDS sequence (opt2) from neuraminidase__InfluenzaA__AHC60038

SEQ ID NO: 120153 - RNA, 1410 nt, Artificial Sequence; identical to SEQ ID NO: 120007
  derived and/or modified CDS sequence (opt2) from neuraminidase__InfluenzaA__AHC60050

SEQ ID NO: 120154 - RNA, 1410 nt, Artificial Sequence
  derived and/or modified CDS sequence (opt2) from neuraminidase__InfluenzaA__AHC60062
augaaccccaaccagaagaucaucaccaucggcuccgucucccucaccaucuccaccaucugcuucuucaugcagaucgccauccucaucaccaccgucaccaugcacuucaagcaguacgaguucaacuccccccccaacaaccaggucaugcucugcgagcccaccaucaucgagcgcaacaucaccgagaucgucuaccucaccaacaccaccaucgagaaggagaucugccccaagcucgccgaguaccgcaacugguccaagccccagugcgacaucaccggcuucgcccccuucuccaaggacaacuccauccgccucuccgccggcggcgacaucugggucacccgcgagcccuacgucuccugcgaccccgacaagugcuaccaguucgcccucggccagggcaccacccucaacaacguccacuccaacaacaccguccgcgaccgcacccccuaccgcacccuccucaugaacgagcucggcguccccuuccaccucggcaccaagcaggucugcaucgccugguccuccuccuccugccacgacggcaaggccuggcuccacgucugcaucaccggcgacgacaagaacgccaccgccuccuucaucuacaacggcaagcucgucgacuccgucgucuccugguccaaggagauccuccgcacccaggaguccgagugcgucugcaucaacggcaccugcaccgucgucaugaccgacggcuccgccuccggcaaggccgacaccaagauccucuucaucgaggagggcaagaucguccacaccuccacccucuccggcuccgcccagcacgucgaggagugcuccugcuacccccgcuaccccggcguccgcugcgucugccgcgacaacuggaagggcuccaaccgccccaucgucgacaucaacaucaaggaccacuccaucgucuccuccuacgucugcuccggccucgucggcgacaccccccgcaagaacgacuccuccuccuccucccacugccucgaccccaacaacgaggagggcggccacggcgucaagggcugggccuucgacgacggcaacgacgucuggaugggccgcaccaucaacgagaccucccgccucggcuacgagaccuucaaggucaucgagggcugguccaaccccaaguccaagcuccagaucaaccgccaggucaucgucgaccgcggcaaccgcuccggcuacuccggcaucuucuccgucgagggcaaguccugcaucaaccgcugcuucuacgucgagcucauccgcggccgcaaggaggagaccgagguccucuggaccuccaacuccaucgucgucuucugcggcaccuccggcaccuacggcaccggcuccuggcccgacggcgccgaccucaaccucaugcccaucuga

SEQ ID NO: 120155 - RNA, 1410 nt, Artificial Sequence; identical to SEQ ID NO: 118958
  derived and/or modified CDS sequence (opt2) from neuraminidase__InfluenzaA__AHC60074

SEQ ID NO: 120156 - RNA, 1410 nt, Artificial Sequence; identical to SEQ ID NO: 120011
  derived and/or modified CDS sequence (opt2) from neuraminidase__InfluenzaA__AHC60086

SEQ ID NO: 120157 - RNA, 1410 nt, Artificial Sequence
  derived and/or modified CDS sequence (opt2) from neuraminidase__InfluenzaA__AHC60098
augaaccccaaccagaagaucaucaccaucggcuccgucucccucaccaucuccaccaucugcuucuucaugcagaucgccauccucaucaccaccgucacccuccacuucaagcaguacgaguucuacuccccccccaacaaccaggucaugcucugcgagcccaccaucaucgagcgcaacaucaccgagaucgucuaccucaccaacaccaccaucgagaaggagaucugccccaagcucgccgaguaccgcaacugguccaagccccagugcgacaucaccggcuucgcccccuucuccaaggacaacuccauccgccucuccgccggcggcgacaucugggucacccgcgagcccuacgucuccugcgaccccgacaagugcuaccaguucgcccucggccagggcaccacccucaacaacguccacuccaacaacaccguccgcgaccgcacccccuaccgcacccuccucaugaacgagcucggcguccccuuccaccucggcaccaagcaggucugcaucgccugguccuccuccuccugccacgacggcaaggccuggcuccacgucugcaucaccggcgacgacaagaacgccaccgccuccuucaucuacaacggccgccucgucgacuccgucgucuccugguccaaggagauccuccgcacccaggaguccgagugcgucugcaucaacggcaccugcaccgucgucaugaccgacggcuccgccuccggcaaggccgacaccaagauccucuucaucgaggagggcaagaucguccacaccuccacccucuccggcuccgcccagcacgucgaggagugcuccugcuacccccgcuaccccggcguccgcugcgucugccgcgacaacuggaagggcuccaaccgccccaucgucgacaucaacaucaaggaccacuccaucgucuccuccuacgucugcuccggccucgucggcgacaccccccgcaagaacgacuccuccuccuccucccacugccucgaccccaacaacgaggagggcggccacggcgucaagggcugggccuucgacgacggcaacgacgucuggaugggccgcaccaucgacgagaccucccgccucggcuacgagaccuucaaggucaucgagggcugguccaaccccaaguccaagcuccagaucaaccgccaggucaucgucgaccgcggcaaccgcuccggcuacuccggcaucuucuccgucgagggcaaguccugcaucaaccgcugcuucuacgucgagcucauccgcggccgcaaggaggagaccgagguccucuggaccuccaacuccaucgucgucuucugcggcaccuccggcaccuacggcaccggcuccuggcccgacggcgccgaccucaaccucaugcccaucuga

SEQ ID NO: 120158 - RNA, 1410 nt, Artificial Sequence; identical to SEQ ID NO: 120007
  derived and/or modified CDS sequence (opt2) from neuraminidase__InfluenzaA__AHC60110

SEQ ID NO: 120159 - RNA, 1410 nt, Artificial Sequence; identical to SEQ ID NO: 120084
  derived and/or modified CDS sequence (opt2) from neuraminidase__InfluenzaA__AHC60122

SEQ ID NO: 120160 - RNA, 1410 nt, Artificial Sequence; identical to SEQ ID NO: 120011
  derived and/or modified CDS sequence (opt2) from neuraminidase__InfluenzaA__AHC60134

SEQ ID NO: 120161 - RNA, 1410 nt, Artificial Sequence; identical to SEQ ID NO: 120065
  derived and/or modified CDS sequence (opt2) from neuraminidase__InfluenzaA__AHC60146

SEQ ID NO: 120162 - RNA, 1410 nt, Artificial Sequence; identical to SEQ ID NO: 120142
  derived and/or modified CDS sequence (opt2) from neuraminidase__InfluenzaA__AHC60158

SEQ ID NO: 120163 - RNA, 1410 nt, Artificial Sequence; identical to SEQ ID NO: 120007
  derived and/or modified CDS sequence (opt2) from neuraminidase__InfluenzaA__AHC60182

SEQ ID NO: 120164 - RNA, 1410 nt, Artificial Sequence
  derived and/or modified CDS sequence (opt2) from neuraminidase__InfluenzaA__AHC60206
augaaccccaaccagaagaucaucaccaucggcuccgucucccucaccaucuccaucaucugcuucuucaugcaggucgccauccucaucaccaccgucacccuccacuucaagcaguacgaguucaacuccccccccaacaaccaggucaugcucugcgagcccaccaucaucgagcgcaacaucaccgagaucgucuaccucaccaacaccaccaucgagaaggagaucugccccaagcucgccgaguaccgcaacugguccaagccccagugcgacaucaccggcuucgcccccuucuccaaggacaacuccauccgccucuccgccggcggcgacaucugggucacccgcgagcccuacgucuccugcgaccccgacaagugcuaccaguucgcccucggccagggcaccacccucaacaacguccacuccaacaacaccguccgcgaccgcacccccuaccgcacccuccucaugaacgagcucggcguccccuuccaccucggcaccaagcaggucugcaucgccugguccuccuccuccugccacgacggcaaggccuggcuccacgucugcaucaccggcgacgacaagaacgccaccgccuccuucaucuacaacggcaagcucgucgacuccgucgucuccugguccaaggagauccuccgcacccaggaguccgagugcgucugcaucaacggcaccugcaccgucgucaugaccgacggcuccgccuccggcaaggccgacaccaagauccucuucaucgaggagggcaagaucguccacaccuccacccucuccggcuccgcccagcacgucgaggagugcuccugcuacccccgcuaccccggcguccgcugcgucugccgcgacaacuggaagggcuccaaccgccccaucgucgacaucaacaucaaggaccacuccaucgucuccuccuacgucugcuccggccucgucggcgacaccccccgcaagaacgacuccuccuccuccucccacugccucgaccccaacaacgaggagggcggccacggcgucaagggcugggccuucgacgacggcaacgacgucuggaugggccgcaccaucaacgagaccucccgccucggcuacgagaccuucaaggucaucgagggcugguccaaccccaaguccaagcuccagaucaaccgccaggucaucgucgaccgcggcaaccgcuccggcuacuccggcaucuucuccgucgagggcaaguccugcaucaaccgcugcuucuacgucgagcucauccgcggccgcaaggaggagaccgagguccucuggaccuccaacuccaucgucgucuucugcggcaccuccggcaccuacggcaccggcuccuggcccgacggcgccgaccucaaccucaugcccaucuga

SEQ ID NO: 120165 - RNA, 1410 nt, Artificial Sequence; identical to SEQ ID NO: 118958
  derived and/or modified CDS sequence (opt2) from neuraminidase__InfluenzaA__AHC60218

SEQ ID NO: 120166 - RNA, 1410 nt, Artificial Sequence; identical to SEQ ID NO: 115554
  derived and/or modified CDS sequence (opt2) from neuraminidase__InfluenzaA__AHC60230

SEQ ID NO: 120167 - RNA, 1410 nt, Artificial Sequence; identical to SEQ ID NO: 120007
  derived and/or modified CDS sequence (opt2) from neuraminidase__InfluenzaA__AHC60242

SEQ ID NO: 120168 - RNA, 1410 nt, Artificial Sequence; identical to SEQ ID NO: 120007
  derived and/or modified CDS sequence (opt2) from neuraminidase__InfluenzaA__AHC60254

SEQ ID NO: 120169 - RNA, 1410 nt, Artificial Sequence; identical to SEQ ID NO: 120007
  derived and/or modified CDS sequence (opt2) from neuraminidase__InfluenzaA__AHC60266

SEQ ID NO: 120170 - RNA, 1410 nt, Artificial Sequence; identical to SEQ ID NO: 120056
  derived and/or modified CDS sequence (opt2) from neuraminidase__InfluenzaA__AHC60278

SEQ ID NO: 120171 - RNA, 1410 nt, Artificial Sequence; identical to SEQ ID NO: 120007
  derived and/or modified CDS sequence (opt2) from neuraminidase__InfluenzaA__AHC60290

SEQ ID NO: 120172 - RNA, 1410 nt, Artificial Sequence
  derived and/or modified CDS sequence (opt2) from neuraminidase__InfluenzaA__AHC60302
augaaccccaaccagaagaucaucaccaucggcuccgucucccucaccaucuccaccaucugcuucuucaugcagaucgccauccucaucaccaccgucacccuccacuucaagcaguacgaguucaacuccccccccaacaaccaggucaugcucugcgagcccaccaucaucgagcgcaacaucaccgagaucgucuaccucaccaacaccaccaucgagaaggagaucugccccaagcucgccgaguaccgcaacugguccaagccccagugcgacaucaccggcuucgcccccuucuccaaggacaacuccauccgccucuccgccggcggcgacaucugggucacccgcgagcccuacgucuccugcgaccccaacaagugcuaccaguucgcccucggccagggcaccacccucaacaacguccacuccaacaacaccguccgcgaccgcacccccuaccgcacccuccucaugaacgagcucggcguccccuuccaccucggcaccaagcaggucugcaucgccugguccuccuccuccugccacgacggcaaggccuggcuccacgucugcaucaccggcgacgacaagaacgccaccgccuccuucaucuacaacggcaagcucgucgacuccgucgucuccugguccaaggagauccuccgcacccaggaguccgagugcgucugcaucaacggcaccugcaccgucgucaugaccgacggcuccgccuccggcaaggccgacaccaagauccucuucaucgaggagggcaagaucauccacaccuccacccucuccggcuccgcccagcacgucgaggagugcuccugcuacccccgcuaccccggcguccgcugcgucugccgcgacaacuggaagggcuccaaccgccccaucgucgacaucaacaucaaggaccacuccaucgucuccuccuacgucugcuccggccucgucggcgacaccccccgcaagaacgacuccuccuccuccucccacugccucgaccccaacaacgaggagggcggccacggcgucaagggcugggccuucgacgacggcaacgacgucuggaugggccgcaccaucaacgagaccucccgccucggcuacgagaccuucaaggucaucgagggcugguccaaccccaaguccaagcuccagaucaaccgccaggucaucgucgaccgcggcaaccgcuccggcuacuccggcaucuucuccgucgagggcaaguccugcaucaaccgcugcuucuacgucgagcucauccgcggccgcaaggaggagaccgagguccucuggaccuccaacuccaucgucgucuucugcggcaccuccggcaccuacggcaccggcuccuggcccgacggcgccgaccucaaccucaugcccaucuga

SEQ ID NO: 120173 - RNA, 1410 nt, Artificial Sequence; identical to SEQ ID NO: 120007
  derived and/or modified CDS sequence (opt2) from neuraminidase__InfluenzaA__AHC60314

SEQ ID NO: 120174 - RNA, 1410 nt, Artificial Sequence; identical to SEQ ID NO: 120007
  derived and/or modified CDS sequence (opt2) from neuraminidase__InfluenzaA__AHC60326

SEQ ID NO: 120175 - RNA, 1410 nt, Artificial Sequence
  derived and/or modified CDS sequence (opt2) from neuraminidase__InfluenzaA__AHC60338
augaaccccaaccagaagaucaucaccaucggcuccgucucccucaccaucuccaccaucugcuucuucaugcagaucgccauccucaucaccaccgucacccuccacuucaagcaguacgaguucaacuccccccccaacaaccaggucaugcucugcgagcccaccaucaucgagcgcaacaucaccgagaucgucuaccucaccaacaccaccaucgagaaggagaucugccccaagcccgccgaguaccgcaacugguccaagccccagugcgacaucaccggcuucgcccccuucuccaaggacaacuccauccgccucuccgccggcggcgacaucugggucacccgcgagcccuacgucuccugcgaccccgacaagugcuaccaguucgcccucggccagggcaccacccucaacaacguccacuccaacaacaccguccgcgaccgcacccccuaccgcacccuccucaugaacgagcucggcguccccuuccaccucggcaccaagcaggucugcaucgccugguccuccuccuccugccacgacggcaaggccuggcuccacgucugcaucaccggcgacgacaagaacgccaccgccuccuucaucuacaacggccgccucgucgacuccgucgucuccugguccaaggagauccuccgcacccaggaguccgagugcgucugcaucaacggcaccugcaccgucgucaugaccgacggcuccgccuccggcaaggccgacaccaagauccucuucaucgaggagggcaagaucguccacaccuccacccucuccggcuccgcccagcacgucgaggagugcuccugcuacccccgcuaccccggcguccgcugcgucugccgcgacaacuggaagggcuccaaccgccccaucgucgacaucaacaucaaggaccacuccaucgucuccuccuacgucugcuccggccucgucggcgacaccccccgcaagaacgacuccuccuccuccucccacugccucgaccccaacaacgaggagggcggccacggcgucaagggcugggccuucgacgacggcgacgacgucuggaugggccgcaccaucaacgagaccucccgccucggcuacgagaccuucaaggucaucgagggcugguccaaccccaaguccaagcuccagaucaaccgccaggucaucgucgaccgcggcgaccgcuccggcuacuccggcaucuucuccgucgagggcaaguccugcaucaaccgcugcuucuacgucgagcucauccgcggccgcaaggaggagaccgagguccucuggaccuccaacuccaucgucgucuucugcggcaccuccggcaccuacggcaccggcuccuggcccgacggcgccgaccucaaccucaugcccaucuga

SEQ ID NO: 120176 - RNA, 1410 nt, Artificial Sequence; identical to SEQ ID NO: 116920
  derived and/or modified CDS sequence (opt2) from neuraminidase__InfluenzaA__AHC60350

SEQ ID NO: 120177 - RNA, 1410 nt, Artificial Sequence
  derived and/or modified CDS sequence (opt2) from neuraminidase__InfluenzaA__AHC60362
augaaccccaaccagaagaucaucaccaucggcuccgucucccucaccaucuccaccaucugcuucuucaugcaggucgccauccucaucaccaccgucacccuccacuucaagcaguacgaguucaacuccccccccaacaaccaggucaugcucugcaagcccaccaucaucgagcgcaacaucaccgagaucgucuaccucaccaacaccaccaucgagaaggagaucugccccaagcucgccgaguaccgcaacugguccaagccccagugcgacaucaccggcuucgcccccuucuccaaggacaacuccauccgccucuccgccggcggcgacaucugggucacccgcgagcccuacgucuccugcgaccccgacaagugcuaccaguucgcccucggccagggcaccacccucaacaacguccacuccaacaacaccguccgcgaccgcacccccuaccgcacccuccucaugaacgagcucggcguccccuuccaccucggcaccaagcaggucugcaucgccugguccuccuccuccugccacgacggcaaggccuggcuccacgucugcaucaccggcgacgacaagaacgccaccgccuccuucaucuacaacggcaagcucgucgacuccgucgucuccugguccaaggagauccuccgcacccaggaguccgagugcgucugcaucaacggcaccugcaccgucgucaugaccgacggcuccgccuccggcaaggccgacaccaagauccucuucaucgaggagggcaagaucguccacaccuccacccucuccggcuccgcccagcacgucgaggagugcuccugcuacccccgcuaccccggcguccgcugcgucugccgcgacaacuggaagggcuccaaccgccccaucgucgacaucaacaucaaggaccacuccaucgucuccuccuacgucugcuccggccucgucggcgacaccccccgcaagaacgacuccuccuccuccucccacugccucgaccccaacaacgaggagggcggccacggcgucaagggcugggccuucgacgacggcaacgacgucuggaugggccgcaccaucaacgagaccucccgccucggcuacgagaccuucaaggucaucgagggcugguccaaccccaaguccaagcuccagaucaaccgccaggucaucgucgaccgcggcaaccgcuccggcuacuccggcaucuucuccgucgagggcaaguccugcaucaaccgcugcuucuacgucgagcucauccgcggccgcaaggaggagaccgagguccucuggaccuccaacuccaucgucgucuucugcggcaccuccggcaccuacggcaccggcuccuggcccgacggcgccgaccucaaccucaugcccaucuga

SEQ ID NO: 120178 - RNA, 1410 nt, Artificial Sequence; identical to SEQ ID NO: 119919
  derived and/or modified CDS sequence (opt2) from neuraminidase__InfluenzaA__AHC60374

SEQ ID NO: 120179 - RNA, 1410 nt, Artificial Sequence; identical to SEQ ID NO: 115554
  derived and/or modified CDS sequence (opt2) from neuraminidase__InfluenzaA__AHC60386

SEQ ID NO: 120180 - RNA, 1410 nt, Artificial Sequence; identical to SEQ ID NO: 120011
  derived and/or modified CDS sequence (opt2) from neuraminidase__InfluenzaA__AHC60398

SEQ ID NO: 120181 - RNA, 1410 nt, Artificial Sequence; identical to SEQ ID NO: 120043
  derived and/or modified CDS sequence (opt2) from neuraminidase__InfluenzaA__AHC60410

SEQ ID NO: 120182 - RNA, 1410 nt, Artificial Sequence; identical to SEQ ID NO: 115554
  derived and/or modified CDS sequence (opt2) from neuraminidase__InfluenzaA__AHC60422

SEQ ID NO: 120183 - RNA, 1410 nt, Artificial Sequence; identical to SEQ ID NO: 120043
  derived and/or modified CDS sequence (opt2) from neuraminidase__InfluenzaA__AHC60434

SEQ ID NO: 120184 - RNA, 1410 nt, Artificial Sequence; identical to SEQ ID NO: 120011
  derived and/or modified CDS sequence (opt2) from neuraminidase__InfluenzaA__AHC60446

SEQ ID NO: 120185 - RNA, 1410 nt, Artificial Sequence
  derived and/or modified CDS sequence (opt2) from neuraminidase__InfluenzaA__AHC60458
augaaccccaaccagaagaucaucaccaucggcuccgucucccucaccaucuccaccaucugcuucuucaugcagaucgccauccucaucaccaccgucacccuccacuucaagcaguacgaguucaacuccccccccaacaaccaggucaugcucugcgagcccaccaucaucgagcgcaacaucaccgagaucgucuaccucaccaacaccaccaucgagaaggagaucugccccaagcucgccgaguaccgcaacugguccaagccccagugcgacaucaccggcuucgcccccuucuccaaggacaacuccauccgccucuccgccggcggcgacaucugggucacccgcgagcccuacgucuccugcgaccccgacaagugcuaccaguucgcccucggccagggcaccacccucaacaacguccacuccaacaacaccguccgcgaccgcacccccuaccgcacccuccucaugaacgagcucggcguccccuuccaccucggcaccaagcaggucugcaucgccugguccuccuccuccugccacgacggcaaggccuggcuccacgucugcaucaccggcgacgacaagaacgccaccgccuccuucaucuacaacggccgccucgucgacuccgucgucuccugguccaaggagauccuccgcacccaggaguccgagugcgucugcaucaacggcaccugcgccgucgucaugaccgacggcuccgccuccggcaaggccgacaccaagauccucuucaucgaggagggcaagaucguccacaccuccacccucuccggcuccgcccagcacgucgaggagugcuccugcuacccccgcuaccccggcguccgcugcgucugccgcgacaacuggaagggcuccaaccgccccaucgucgacaucaacaucaaggaccacuccaucgucuccuccuacgucugcuccggccucgucggcgacaccccccgcaagaacgacggcuccuccuccucccacugccucgaccccaacaacgaggagggcggccacggcgucaagggcugggccuucgacgacggcaacgacgucuggaugggccgcaccaucaacgagaccucccgccucggcuacgagaccuucaaggucaucgagggcugguccaaccccaaguccaagcuccagaucaaccgccaggucaucgucgaccgcggcaaccgcuccggcuacuccggcaucuucuccgucgagggcaaguccugcaucaaccgcugcuucuacgucgagcucauccgcggccgcaaggaggagaccgagguccucuggaccuccaacuccaucgucgucuucugcggcaccuccggcaccuacggcaccggcuccuggcccgacggcgccgaccucaaccucaugcccaucuga

SEQ ID NO: 120186 - RNA, 1410 nt, Artificial Sequence; identical to SEQ ID NO: 120056
  derived and/or modified CDS sequence (opt2) from neuraminidase__InfluenzaA__AHC60470

SEQ ID NO: 120187 - RNA, 1410 nt, Artificial Sequence
  derived and/or modified CDS sequence (opt2) from neuraminidase__InfluenzaA__AHC60482
augaaccccaaccagaagaucaucaccaucggcuccgucucccucaccaucuccaccaucugcuucuucaugcagaucgccauccucaccaccaccgucacccuccacuucaagcaguacgaguucaacuccccccccaacaaccaggucaugcucugcgagcccaccaucaucgagcgcaacaucaccgagaucgucuaccucaccaacaccaccaucgagaaggagaucugccccaagcccgccgaguaccgcaacugguccaagccccagugcgacaucaccggcuucgcccccuucuccaaggacaacuccauccgccucuccgccggcggcgacaucugggucacccgcgagcccuacgucuccugcgaccccgacaagugcuaccaguucgcccucggccagggcaccacccucaacaacguccacuccaacaacaccguccgcgaccgcacccccuaccgcacccuccucaugaacgagcucggcguccccuuccaccucggcaccaagcaggucugcaucgccugguccuccuccuccugccacgacggcaaggccuggcuccacgucugcaucaccggcgacgacaagaacgccaccgccuccuucaucuacaacggccgccucgucgacuccgucgucuccugguccaaggagauccuccgcacccaggaguccgagugcgucugcaucaacggcaccugcaccgucgucaugaccgacggcuccgccuccggcaaggccgacaccaagauccucuucaucgaggagggcaagaucguccacaccuccacccucuccggcuccgcccagcacgucgaggagugcuccugcuacccccgcuaccccggcguccgcugcgucugccgcgacaacuggaagggcuccaaccgccccaucgucgacaucaacaucaaggaccacuccaucgucuccuccuacgucugcuccggccucgucggcgacaccccccgcaagaacgacuccuccuccuccucccacugccucgaccccaacaacgaggagggcggccacggcgucaagggcugggccuucgacgacggcaacgacgucuggaugggccgcaccaucaacgagaccucccgccucggcuacgagaccuucaaggucaucgagggcugguccaaccccaaguccaagcuccagaucaaccgccaggucaucgucgaccgcggcgaccgcuccggcuacuccggcaucuucuccgucgagggcaaguccugcaucaaccgcugcuucuacgucgagcucauccgcggccgcaaggaggagaccgagguccucuggaccuccaacuccaucgucgucuucugcggcaccuccggcaccuacggcaccggcuccuggcccgacggcgccgaccucaaccucaugcccaucuga

SEQ ID NO: 120188 - RNA, 1410 nt, Artificial Sequence; identical to SEQ ID NO: 120007
  derived and/or modified CDS sequence (opt2) from neuraminidase__InfluenzaA__AHC60494

SEQ ID NO: 120189 - RNA, 1410 nt, Artificial Sequence; identical to SEQ ID NO: 120007
  derived and/or modified CDS sequence (opt2) from neuraminidase__InfluenzaA__AHC60506

SEQ ID NO: 120190 - RNA, 1410 nt, Artificial Sequence; identical to SEQ ID NO: 120011
  derived and/or modified CDS sequence (opt2) from neuraminidase__InfluenzaA__AHC60518

SEQ ID NO: 120191 - RNA, 1410 nt, Artificial Sequence; identical to SEQ ID NO: 120011
  derived and/or modified CDS sequence (opt2) from neuraminidase__InfluenzaA__AHC60542

SEQ ID NO: 120192 - RNA, 1410 nt, Artificial Sequence
  derived and/or modified CDS sequence (opt2) from neuraminidase__InfluenzaA__AHC60554
augaaccccaaccagaagaucaucaccaucggcuccgucucccucaccaucuccaccaucugcuucuucaugcagaucgccauccucaucaccaccgucacccuccacuucaagcaguacgaguucuacuccccccccaacaaccaggucaugcucugcgagcccaccaugaucgagcgcaacaucaccgagaucgucuaccucaccaacaccaccaucgagaaggagaucugccccaagcucgccgaguaccgcaacugguccaagccccagugcgacaucaccggcuucgcccccuucuccaaggacaacuccauccgccucuccgccggcggcgacaucugggucacccgcgagcccuacgucuccugcgaccccgacaagugcuaccaguucgcccucggccagggcaccacccucaacaacguccacuccaacaacaccguccgcgaccgcacccccuaccgcacccuccucaugaacgagcucggcguccccuuccaccucggcaccaagcaggucugcaucgccugguccuccuccuccugccacgacggcaaggccuggcuccacgucugcaucaccggcgacgacaagaacgccaccgccuccuucaucuacaacggccgccucgucgacuccgucgucuccugguccaaggagauccuccgcacccaggaguccgagugcgucugcaucaacggcaccugcaccgucgucaugaccgacggcuccgccuccggcaaggccgacaccaagauccucuucaucgaggagggcaagaucguccacaccuccacccucuccggcuccgcccagcacgucgaggagugcuccugcuacccccgcuaccccggcguccgcugcgucugccgcgacaacuggaagggcuccaaccgccccaucgucgacaucaacaucaaggaccacuccaucgucuccuccuacgucugcuccggccucgucggcgacaccccccgcaagaacgacuccuccuccuccucccacugccucgaccccaacaacgaggagggcggccacggcgucaagggcugggccuucgacgacggcaacgacgucuggaugggccgcaccaucaacgagaccucccgccucggcuacgagaccuucaaggucaucgagggcugguccaaccccaaguccaagcuccagaucaaccgccaggucaucgucgaccgcggcaaccgcuccggcuacuccggcaucuucuccgucgagggcaaguccugcaucaaccgcugcuucuacgucgagcucauccgcggccgcaaggaggagaccgagguccucuggaccuccaacuccaucgucgucuucugcggcaccuccggcaccuacggcaccggcaccuggcccgacggcgccgaccucaaccucaugcccaucuga

SEQ ID NO: 120193 - RNA, 1410 nt, Artificial Sequence
  derived and/or modified CDS sequence (opt2) from neuraminidase__InfluenzaA__AHC60566
augaaccccaaccagaagaucaucaccaucggcuccgucucccucaccaucuccaccaucugcuucuucaugcagaucgccauccucaucaccaccgucacccuccacuucaagcaguacgaguucaacuccccccccaacaaccaggucaugcucugcgagcccaccaucaucgagcgcaacaucaccgagaucgucuaccucaccaacaccaccaucgagaaggagaucugccccaagcccgccgaguaccgcaacugguccaagccccagugcgacaucaccggcuucgcccccuucuccaaggacaacuccauccgccucuccgccggcggcgacaucugggucacccgcgagcccuacgucuccugcgaccccgacaagugcuaccaguucgcccucggccagggcaccacccucaacaacguccacuccaacaacaccguccgcgaccgcacccccuaccgcacccuccucaugaacgagcucggcguccccuuccaccucggcaccaagcaggucugcaucgccugguccuccuccuccugccacgacggcaaggccuggcuccacgucugcaucaccggcgacgacaagaacgccaccgccuccuucaucuacaacggccgccucgucgacuccgucgucuccugguccaaggagauccuccgcacccaggaguccgagugcgucugcaucaacggcaccugcaccgucgucaugaccgacggcuccgccuccggcaaggccgacaccaagauccucuucaucgaggagggcaagaucguccacaccuccacccucuccggcuccgcccagcacgucgaggagugcuccugcuacccccgcuaccccggcguccgcugcgucugccgcgacaacuggaagggcuccaaccgccccaucgucgacaucaacaucaaggaccacuccaucgucuccuccuacgucugcuccggccucgucggcgacaccccccgcaagaacgacuccuccuccuccucccacugccucgaccccaacaacgaggagggcggccacggcgucaagggcugggccuucgacgacggcaacgacgucuggaugggccgcaccaucaacgagaccucccgccucggcuacgagaccuucaaggucaucgagggcugguccaaccccaaguccaagcuccaggucaaccgccaggucaucgucgaccgcggcgaccgcuccggcuacuccggcaucuucuccgucgagggcaaguccugcaucaaccgcugcuucuacgucgagcucauccgcggccgcaaggaggagaccgagguccucuggaccuccaacuccaucgucgucuucugcggcaccuccggcaccuacggcaccggcuccuggcccgacggcgccgaccucaaccucaugcccaucuga

SEQ ID NO: 120194 - RNA, 1410 nt, Artificial Sequence; identical to SEQ ID NO: 118958
  derived and/or modified CDS sequence (opt2) from neuraminidase__InfluenzaA__AHC60578

SEQ ID NO: 120195 - RNA, 1410 nt, Artificial Sequence; identical to SEQ ID NO: 120007
  derived and/or modified CDS sequence (opt2) from neuraminidase__InfluenzaA__AHC60590

SEQ ID NO: 120196 - RNA, 1410 nt, Artificial Sequence
  derived and/or modified CDS sequence (opt2) from neuraminidase__InfluenzaA__AHC60602
augaaccccaaccagaagaucaucaccaucggcuccgucucccucaccaucuccaccaucugcuucuucaugcagaucgccauccucaucaccaccgucacccuccacuucaagcaguacgaguucaaccccccccccaacaaccaggucguccucugcgagcccaccaucaucgagcgcaacaucaccgagaucgucuaccucaccaacaccaccaucgagaaggagaucugccccaagcccgccgaguaccgcaacugguccaagccccagugcgacaucaccggcuucgcccccuucuccaaggacaacuccauccgccucuccgccggcggcgacaucugggucacccgcgagcccuacgucuccugcgaccccgacaagugcuaccaguucgcccucggccagggcaccacccucaacaacguccacuccaacaacaccguccgcgaccgcacccccuaccgcacccuccucaugaacgagcucggcguccccuuccaccucggcaccaagcaggucugcaucgccugguccuccuccuccugccacgacggcaaggccuggcuccacgucugcaucaccggcgacgacaagaacgccaccgccuccuucaucuacaacggccgccucgucgacuccgucgucuccugguccaaggagauccuccgcacccaggaguccgagugcgucugcaucaacggcaccugcaccgucgucaugaccgacggcuccgccuccggcaaggccgacaccaagauccucuucaucgaggagggcaagaucguccacaccuccacccucuccggcuccgcccagcacgucgaggagugcuccugcuacccccgcuaccccggcguccgcugcgucugccgcgacaacuggaagggcuccaaccgccccaucgucgacaucaacaucaaggaccacuccaucgucuccuccuacgucugcuccggccucgucggcgacaccccccgcaagaacgacuccuccuccuccucccacugccucgaccccaacaacgaggagggcggccacggcgucaagggcugggccuucgacgacggcaacgacgucuggaugggccgcaccaucaacgagaccucccgccucggcuacgagaccuucaaggucaucgagggcugguccaaccccaaguccaagcuccagaucaaccgccaggucaucgucgaccgcggcgaccgcuccggcuacuccggcaucuucuccgucgagggcaaguccugcaucaaccgcugcuucuacgucgagcucauccgcggccgcaaggaggagaccgagguccucuggaccuccaacuccaucgucgucuucugcggcaccuccggcaccuacggcaccggcuccuggcccgacggcgccgaccucaaccucaugcccaucuga

SEQ ID NO: 120197 - RNA, 1410 nt, Artificial Sequence; identical to SEQ ID NO: 115554
  derived and/or modified CDS sequence (opt2) from neuraminidase__InfluenzaA__AHC60614

SEQ ID NO: 120198 - RNA, 1410 nt, Artificial Sequence; identical to SEQ ID NO: 118958
  derived and/or modified CDS sequence (opt2) from neuraminidase__InfluenzaA__AHC60626

SEQ ID NO: 120199 - RNA, 1410 nt, Artificial Sequence
  derived and/or modified CDS sequence (opt2) from neuraminidase__InfluenzaA__AHC60650
augaaccccaaccagaagaucaucaccaucggcuccgucucccucaccaucuccaccaucugcuucuucaugcagaucgccauccucaucaccaccgucacccuccacuucaagcaguacgaguucuacuccccccccaacaaccaggucaugcucugcgagcccaccaucaucgagcgcaacaucaccgagaucgucuaccucaccaacaccaccaucgagaaggagaucugccccaagcucgccgaguaccgcaacugguccaagccccagugcgacaucaccggcuucgcccccuucuccaaggacaacuccauccgccucuccgccggcggcgacaucugggucacccgcgagcccuacgucuccugcgaccccgacaagugcuaccaguucgcccucggccagggcaccacccucaacaacguccacuccaacaacaccguccgcgaccgcacccccuaccgcacccuccucaugaacgagcucggcguccccuuccaccucggcaccaagcaggucugcaucgccugguccuccuccuccugccacgacggcaaggccuggcuccacgucugcaucaccggcgacgacgagaacgccaccgccuccuucaucuacaacggccgccucgucgacuccgucgucuccugguccaaggagauccuccgcacccaggaguccgagugcgucugcaucaacggcaccugcaccgucgucaugaccgacggcuccgccuccggcaaggccgacaccaagauccucuucaucgaggagggcaagaucguccacaccuccacccucuccggcuccgcccagcacgucgaggagugcuccugcuacccccgcuaccccggcguccgcugcgucugccgcgacaacuggaagggcuccaaccgccccaucgucgacaucaacaucaaggaccacuccaucgucuccuccuacgucugcuccggccucgucggcgacaccccccgcaagaacgacuccuccuccuccucccacugccucgaccccaacaacgaggagggcggccacggcgucaagggcugggccuucgacgacggcaacgacgucuggaugggccgcaccaucaacgagaccucccgccucggcuacgagaccuucaaggucaucgagggcugguccaaccccaaguccaagcuccagaucaaccgccaggucaucgucgaccgcggcaaccgcuccggcuacuccggcaucuucuccgucgagggcaaguccugcaucaaccgcugcuucuacgucgagcucauccgcggccgcaaggaggagaccgagguccucuggaccuccaacuccaucgucgucuucugcggcaccuccggcaccuacggcaccggcuccuggcccgacggcgccgaccucaaccucaugcccaucuga

SEQ ID NO: 120200 - RNA, 1410 nt, Artificial Sequence; identical to SEQ ID NO: 120056
  derived and/or modified CDS sequence (opt2) from neuraminidase__InfluenzaA__AHC60662

SEQ ID NO: 120201 - RNA, 1410 nt, Artificial Sequence; identical to SEQ ID NO: 120011
  derived and/or modified CDS sequence (opt2) from neuraminidase__InfluenzaA__AHC60674

SEQ ID NO: 120202 - RNA, 1410 nt, Artificial Sequence; identical to SEQ ID NO: 115554
  derived and/or modified CDS sequence (opt2) from neuraminidase__InfluenzaA__AHC60686

SEQ ID NO: 120203 - RNA, 1410 nt, Artificial Sequence; identical to SEQ ID NO: 120011
  derived and/or modified CDS sequence (opt2) from neuraminidase__InfluenzaA__AHC60698

SEQ ID NO: 120204 - RNA, 1410 nt, Artificial Sequence; identical to SEQ ID NO: 120007
  derived and/or modified CDS sequence (opt2) from neuraminidase__InfluenzaA__AHC60710

SEQ ID NO: 120205 - RNA, 1410 nt, Artificial Sequence; identical to SEQ ID NO: 120056
  derived and/or modified CDS sequence (opt2) from neuraminidase__InfluenzaA__AHC60722

SEQ ID NO: 120206 - RNA, 1410 nt, Artificial Sequence
  derived and/or modified CDS sequence (opt2) from neuraminidase__InfluenzaA__AHC60734
augaaccccaaccagaagaucaucaccaucggcuccgucucccucaccaucuccaccaucugcuucuucaugcagaucgccauccucaucaccaccgucacccuccacuucaagcaguacgaguucaacuccccccccaacaaccaggucaugcucugcgagcccaccaucaucgagcgcaacaucaccgagaucgucuaccucaucaacaccaccaucgagaaggagaucugccccaagcucgccgaguaccgcaacugguccaagccccagugcgacaucaccggcuucgcccccuucuccaaggacaacuccauccgccucuccgccggcggcgacaucugggucacccgcgagcccuacgucuccugcgaccccaacaagugcuaccaguucgcccucggccagggcaccacccucaacaacguccacuccaacaacaccguccgcgaccgcacccccuaccgcacccuccucaugaacgagcucggcguccccuuccaccucggcaccaagcaggucugcaucgccugguccuccuccuccugccacgacggcaaggccuggcuccacgucugcaucaccggcgacgacaagaacgccaccgccuccuucaucuacaacggcaagcucgucgacuccgucgucuccugguccaaggagauccuccgcacccaggaguccgagugcgucugcaucaacggcaccugcaccgucgucaugaccgacggcuccgccuccggcaaggccgacaccaagauccucuucaucgaggagggcaagaucguccacaccuccacccucuccggcuccgcccagcacgucgaggagugcuccugcuacccccgcuaccccggcguccgcugcgucugccgcgacaacuggaagggcuccaaccgccccaucgucgacaucaacaucaaggaccacuccaucgucuccuccuacgucugcuccggccucgucggcgacaccccccgcaagaacgacuccuccuccuccucccacugccucgaccccaacaacgaggagggcggccacggcgucaagggcugggccuucgacgacggcaacgacgucuggaugggccgcaccaucaacgagaccucccgccucggcuacgagaccuucaaggucaucgagggcugguccaaccccaaguccaagcuccagaucaaccgccaggucaucgucgaccgcggcaaccgcuccggcuacuccggcaucuucuccgucgagggcaaguccugcaucaaccgcugcuucuacgucgagcucauccgcggccgcaaggaggagaccgagguccucuggaccuccaacuccaucgucgucuucugcggcaccuccggcaccuacggcaccggcuccuggcccgacggcgccgaccucaaccucaugcccaucuga

SEQ ID NO: 120207 - RNA, 1410 nt, Artificial Sequence; identical to SEQ ID NO: 120043
  derived and/or modified CDS sequence (opt2) from neuraminidase__InfluenzaA__AHC60746

SEQ ID NO: 120208 - RNA, 1410 nt, Artificial Sequence; identical to SEQ ID NO: 120142
  derived and/or modified CDS sequence (opt2) from neuraminidase__InfluenzaA__AHC60770

SEQ ID NO: 120209 - RNA, 1410 nt, Artificial Sequence
  derived and/or modified CDS sequence (opt2) from neuraminidase__InfluenzaA__AHC60782
augaaccccaaccagaagaucaucaccaucggcuccgucucccucaccaucuccaccaucugcuucuucaugcagaucgccauccucaucaccaccgucacccuccacuucaagcaguacgaguucaacuccccccccaacaaccaggucaugcucugcgagcccaccaucaucgagcgcaacaucaccgagaucgucuaccucaccaacaccaccaucgagaaggagaucugccccaagcucgccgaguaccgcaacugguccaagccccagugcgacaucaccggcuucgcccccuucuccaaggacaacuccauccgccucuccgccggcggcgacaucugggucacccgcgagcccuacgucuccugcgaccccgacaagugcuaccaguucgcccucggccagggcaccacccucaacaacguccacuccaacaacaccguccgcgaccgcacccccuaccgcacccuccucaugaacgagcucggcguccccuuccaccucggcaccaagcaggucugcaucgccugguccuccuccuccugccacgacggcaaggccuggcuccacgucugcaucaccggcgacgacaagaacgccaccgccuccuucaucuacaacggccgccucgucgacuccgucgucuccugguccaaggagauccuccgcacccaggaguccgagugcgucugcaucaacggcaccugcaccgucgucaugaccgacggcuccgccuccggcaaggccgacaccaagauccucuucaucgaggagggcaagaucguccacaccuccacccucuccggcuccgcccagcacgucgaggagugcuccugcuacccccgcuaccccggcguccgcugcgucugccgcgacaacuggaagggcuccaaccgccccaucgucgacaucaacaucaaggaccacuccaucgucuccggcuacgucugcuccggccucgucggcgacaccccccgcaagaacgacuccuccuccuccucccacugccucgaccccaacaacgaggagggcggccacggcgucaagggcugggccuucgacgacggcaacgacgucuggaugggccgcaccaucaacgagaccucccgccucggcuacgagaccuucaaggucaucgagggcugguccaaccccaaguccaagcuccagaucaaccgccaggucaucgucgaccgcggcaaccgcuccggcuacuccggcaucuucuccgucgagggcaaguccugcaucaaccgcugcuucuacgucgagcucauccgcggccgcaaggaggagaccgagguccucuggaccuccaacuccaucgucgucuucugcggcaccuccggcaccuacggcaccggcuccuggcccgacggcgccgaccucaaccucaugcccaucuga

SEQ ID NO: 120210 - RNA, 1410 nt, Artificial Sequence; identical to SEQ ID NO: 120054
  derived and/or modified CDS sequence (opt2) from neuraminidase__InfluenzaA__AHC60794

SEQ ID NO: 120211 - RNA, 1410 nt, Artificial Sequence
  derived and/or modified CDS sequence (opt2) from neuraminidase__InfluenzaA__AHC60806
augaaccccaaccagaagaucaucaccaucggcuccgucucccucaccaucuccaccaucugcuucuucaugcagaucgccauccucaucaccaccgucacccuccacuucaagcagugcgaguucaacuccccccccaacaaccaggucaugcucugcgagcccaccaucaucgagcgcaacaucaccgagaucgucuaccucaccaacaccaccaucgagaaggagaucugccccaagcucgccgaguaccgcaacugguccaagccccagugcgacaucaccggcuucgcccccuucuccaaggacaacuccauccgccucuccgccggcggcgacaucugggucacccgcgagcccuacgucuccugcgaccccaacaagugcuaccaguucgcccucggccagggcaccacccucaacaacguccacuccaacaacaccguccgcgaccgcacccccuaccgcacccuccucaugaacgagcucggcguccccuuccaccucggcaccaagcaggucugcaucgccugguccuccuccuccugccacgacggcaaggccuggcuccacgucugcaucaccggcgacgacaagaacgccaccgccuccuucaucuacaacggcaagcucgucgacuccgucgucuccugguccaaggagauccuccgcacccaggaguccgagugcgucugcaucaacggcaccugcaccgucgucaugaccgacggcuccgccuccggcaaggccgacaccaagauccucuucaucgaggagggcaagaucguccacaccuccacccucuccggcuccgcccagcacgucgaggagugcuccugcuacccccgcuaccccggcguccgcugcgucugccgcgacaacuggaagggcuccaaccgccccaucgucgacaucaacaucaaggaccacuccaucgucuccuccuacgucugcuccggccucgucggcgacaccccccgcaagaacgacuccuccuccuccucccacugccucgaccccaacaacgaggagggcggccacggcgucaagggcugggccuucgacgacggcaacgacgucuggaugggccgcaccaucaacgagaccucccgccucggcuacgagaccuucaaggucaucgagggcugguccaaccccaaguccaagcuccagaucaaccgccaggucaucgucgaccgcggcaaccgcuccggcuacuccggcaucuucuccgucgagggcaaguccugcaucaaccgcugcuucuacgucgagcucauccgcggccgcaaggaggagaccggcguccucuggaccuccaacuccaucgucgucuucugcggcaccuccggcaccuacggcaccggcuccuggcccgacggcgccgaccucaaccucaugcccaucuga

SEQ ID NO: 120212 - RNA, 1410 nt, Artificial Sequence; identical to SEQ ID NO: 116920
  derived and/or modified CDS sequence (opt2) from neuraminidase__InfluenzaA__AHC60818

SEQ ID NO: 120213 - RNA, 1410 nt, Artificial Sequence; identical to SEQ ID NO: 120011
  derived and/or modified CDS sequence (opt2) from neuraminidase__InfluenzaA__AHC60830

SEQ ID NO: 120214 - RNA, 1410 nt, Artificial Sequence; identical to SEQ ID NO: 120192
  derived and/or modified CDS sequence (opt2) from neuraminidase__InfluenzaA__AHC60842

SEQ ID NO: 120215 - RNA, 1410 nt, Artificial Sequence; identical to SEQ ID NO: 120011
  derived and/or modified CDS sequence (opt2) from neuraminidase__InfluenzaA__AHC60854

SEQ ID NO: 120216 - RNA, 1410 nt, Artificial Sequence; identical to SEQ ID NO: 120056
  derived and/or modified CDS sequence (opt2) from neuraminidase__InfluenzaA__AHC60866

SEQ ID NO: 120217 - RNA, 1410 nt, Artificial Sequence; identical to SEQ ID NO: 120043
  derived and/or modified CDS sequence (opt2) from neuraminidase__InfluenzaA__AHC60878

SEQ ID NO: 120218 - RNA, 1410 nt, Artificial Sequence; identical to SEQ ID NO: 120043
  derived and/or modified CDS sequence (opt2) from neuraminidase__InfluenzaA__AHC60890

SEQ ID NO: 120219 - RNA, 1410 nt, Artificial Sequence; identical to SEQ ID NO: 120142
  derived and/or modified CDS sequence (opt2) from neuraminidase__InfluenzaA__AHC60902

SEQ ID NO: 120220 - RNA, 1410 nt, Artificial Sequence; identical to SEQ ID NO: 120007
  derived and/or modified CDS sequence (opt2) from neuraminidase__InfluenzaA__AHC60914

SEQ ID NO: 120221 - RNA, 1410 nt, Artificial Sequence; identical to SEQ ID NO: 120011
  derived and/or modified CDS sequence (opt2) from neuraminidase__InfluenzaA__AHC60926

SEQ ID NO: 120222 - RNA, 1410 nt, Artificial Sequence; identical to SEQ ID NO: 120007
  derived and/or modified CDS sequence (opt2) from neuraminidase__InfluenzaA__AHC60938

SEQ ID NO: 120223 - RNA, 1410 nt, Artificial Sequence; identical to SEQ ID NO: 120011
  derived and/or modified CDS sequence (opt2) from neuraminidase__InfluenzaA__AHC60950

SEQ ID NO: 120224 - RNA, 1410 nt, Artificial Sequence
  derived and/or modified CDS sequence (opt2) from neuraminidase__InfluenzaA__AHC60962
augaaccccaaccagaagaucaucaccaucggcuccgucucccucaccaucuccaccaucugcuucuucaugcagaucgccauccucaucaccaccgucacccuccacuucaagcaguacgaguucuacuccccccccaacaaccaggucaugcucugcgagcccaccaucaucgagcgcaacaucaccgagaucgucuaccucaccaacaccaccaucgagaaggagaucugccccaagcucgccgaguaccgcaacugguccaagccccagugcgacaucaccggcuucgcccccuucuccaaggacaacuccauccgccucuccgccggcggcgacaucugggucacccgcgagcccuacgucuccugcgaccccgacaagugcuaccaguucgcccucggccagggcaccacccucaacaacguccacuccaacaacaccguccgcgaccgcacccccuaccgcacccuccucaugaacgagcucggcguccccuuccaccucggcaccaagcaggucugcaucgccugguccuccuccuccugccacgacggcaaggccuggcuccacgucugcgucaccggcgacgacaagaacgccaccgccuccuucaucuacaacggccgccucgucgacuccgucgucuccugguccaaggagauccuccgcacccaggaguccgagugcgucugcaucaacggcaccugcaccgucgucaugaccgacggcuccgccuccggcaaggccgacaccaagauccucuucaucgaggagggcaagaucguccacaccuccacccucuccggcuccgcccagcacgucgaggagugcuccugcuacccccgcuaccccggcguccgcugcgucugccgcgacaacuggaagggcuccaaccgccccaucgucgacaucaacaucaaggaccacuccaucgucuccuccuacgucugcuccggccucgucggcgacaccccccgcaagaacgacuccuccuccuccucccacugccucgaccccaacaacgaggagggcggccacggcgucaagggcugggccuucgacgacggcaacgacgucuggaugggccgcaccaucaacgagaccucccgccucggcuacgagaccuucaaggucaucgagggcugguccaaccccaaguccaagcuccagaucaaccgccaggucaucgucgaccgcggcaaccgcuccggcuacuccggcaucuucuccgucgagggcaaguccugcaucaaccgcugcuucuacgucgagcucauccgcggccgcaaggaggagaccgagguccucuggaccuccaacuccaucgucgucuucugcggcaccuccggcaccuacggcaccggcuccuggcccgacggcgccgaccucaaccucaugcccaucuga

SEQ ID NO: 120225 - RNA, 1410 nt, Artificial Sequence; identical to SEQ ID NO: 120056
  derived and/or modified CDS sequence (opt2) from neuraminidase__InfluenzaA__AHC60974

SEQ ID NO: 120226 - RNA, 1410 nt, Artificial Sequence; identical to SEQ ID NO: 120007
  derived and/or modified CDS sequence (opt2) from neuraminidase__InfluenzaA__AHC60986

SEQ ID NO: 120227 - RNA, 1410 nt, Artificial Sequence; identical to SEQ ID NO: 120154
  derived and/or modified CDS sequence (opt2) from neuraminidase__InfluenzaA__AHC60998

SEQ ID NO: 120228 - RNA, 1410 nt, Artificial Sequence; identical to SEQ ID NO: 120054
  derived and/or modified CDS sequence (opt2) from neuraminidase__InfluenzaA__AHC61010

SEQ ID NO: 120229 - RNA, 1410 nt, Artificial Sequence
  derived and/or modified CDS sequence (opt2) from neuraminidase__InfluenzaA__AHC61022
augaaccccaaccagaagaucaucaccaucggcuccgucucccucaccaucuccaccaucugcuucuucaugcagaucgccauccucaucaccaccgucacccuccacuucaagcaguacgaguucaacuccccccccaacaaccaggucaugcucugcgagcccaccaucaucgagcgcaacaucaccgagaucgucuaccucaccaacaccaccaucgagaaggagaucugccccaagcucgccgaguaccgcaacugguccaagccccagugcgacaucaccggcuucgcccccuucuccaaggacaacuccauccgccucuccgccggcggcgacaucugggucacccgcgagcccuacgucuccugcgaccccgacaagugcuaccaguucgcccucggccagggcaccacccucaacaacguccacuccaacaacaccguccgcgaccgcacccccuaccgcacccuccucaugaacgagcucggcguccccuuccaccucggcaccaagcaggucugcaucgccugguccuccuccuccugccacgacggcaaggccuggcuccacgucugcaucaccggcgacgacaagaacgccaccgccuccuucaucuacaacggccgccucgucgacuccgucgucuccugguccaaggagauccuccgcacccaggaguccgagugcgucugcaucaacggcaccugcaccgucgucaugaccgacggcuccgccuccggcaaggccgacaccaagauccucuucaucgaggagggcaagaucguccacaccuccacccucuccggcuccgcccagcacgucgaggagugcuccugcuacccccgcuaccccggcguccgcugcgucugccgcgacaacuggaagggcuccaaccgccccaucgucgacaucaacaucaaggaccacuccaucgucuccuccuacgucugcuccggccucgucggcgacaccccccgcaagaacgacuccuccuccaucucccacugccucgaccccaacaacgaggagggcggccacggcgucaagggcugggccuucgacgacggcaacgacgucuggaugggccgcaccaucaacgagaccucccgccucggcuacgagaccuucaaggucaucgagggcugguccaaccccaaguccaagcuccagaucaaccgccaggucaucgucgaccgcggcaaccgcuccggcuacuccggcaucuucuccgucgagggcaaguccugcaucaaccgcugcuucuacgucgagcucauccgcggccgcaaggaggagaccgagguccucuggaccuccaacuccaucgucgucuucugcggcaccuccggcaccuacggcaccggcuccuggcccgacggcgccgaccucaaccucaugcccaucuga

SEQ ID NO: 120230 - RNA, 1410 nt, Artificial Sequence; identical to SEQ ID NO: 115554
  derived and/or modified CDS sequence (opt2) from neuraminidase__InfluenzaA__AHC61034

SEQ ID NO: 120231 - RNA, 1410 nt, Artificial Sequence; identical to SEQ ID NO: 120007
  derived and/or modified CDS sequence (opt2) from neuraminidase__InfluenzaA__AHC61046

SEQ ID NO: 120232 - RNA, 1410 nt, Artificial Sequence; identical to SEQ ID NO: 120056
  derived and/or modified CDS sequence (opt2) from neuraminidase__InfluenzaA__AHC61058

SEQ ID NO: 120233 - RNA, 1410 nt, Artificial Sequence; identical to SEQ ID NO: 119919
  derived and/or modified CDS sequence (opt2) from neuraminidase__InfluenzaA__AHC61070

SEQ ID NO: 120234 - RNA, 1410 nt, Artificial Sequence
  derived and/or modified CDS sequence (opt2) from neuraminidase__InfluenzaA__AHC61082
augaaccccaaccagaagaucaucaccaucggcuccgucucccucaccaucuccaccaucugcuucuucaugcagaucgccauccucaucaccaccgucacccuccacuucaagcaguacgaguucaacuccccccccaacaaccaggucguccucugcgagcccaccaucaucgagcgcaacaucaccgagaucgucuaccucaccaacaccaccaucgagaaggagaucugccccaagcccgccgaguaccgcaacugguccaagccccagugcgacaucaccggcuucgcccccuucuccaaggacaacuccauccgccucuccgccggcggcgacaucugggucacccgcgagcccuacgucuccugcgaccccgacaagugcuaccaguucgcccucggccagggcaccacccucaacaacguccacuccaacaacaccguccgcgaccgcacccccuaccgcacccuccucaugaacgagcucggcguccccuuccaccucggcaccaagcaggucugcaucgccugguccuccuccuccugccacgacggcaaggccuggcuccacgucugcaucaccggcgacgacaagaacgccaccgccuccuucaucuacaacggccgccucgucgacuccgucgucuccugguccaaggagauccuccgcacccaggaguccgagugcgucugcaucaacggcaccugcaccgucgucaugaccgacggcuccgccuccggcaaggccgacaccaagauccucuucaucgaggagggcaagaucguccacaccuccacccucuccggcuccgcccagcacgucgaggagugcuccugcuacccccgcuaccccggcguccgcugcgucugccgcgacaacuggaagggcuccaaccgccccaucgucgacaucaacaucaaggaccacuccaucgucuccuccuacgucugcuccggccucgucggcgacaccccccgcaagaacgacuccuccuccuccucccacugccucgaccccaacaacgaggagggcggccacggcgucaagggcugggccuucgacgacggcaacgacgucuggaugggccgcaccaucaacgagaccucccgccucggcuacgagaccuucaaggucaucgagggcugguccaaccccaaguccaagcuccagaucaaccgccaggucaucgucgaccgcggcgaccgcuccggcuacuccggcaucuucuccgucgagggcaaguccugcaucaaccgcugcuucuacgucgagcucauccgcggccgcaaggaggagaccggcguccucuggaccuccaacuccaucgucgucuucugcggcaccuccggcaccuacggcaccggcuccuggcccgacggcgccgaccucaaccucaugcccaucuga

SEQ ID NO: 120235 - RNA, 1410 nt, Artificial Sequence; identical to SEQ ID NO: 115554
  derived and/or modified CDS sequence (opt2) from neuraminidase__InfluenzaA__AHC61094

SEQ ID NO: 120236 - RNA, 1410 nt, Artificial Sequence; identical to SEQ ID NO: 120043
  derived and/or modified CDS sequence (opt2) from neuraminidase__InfluenzaA__AHC61106

SEQ ID NO: 120237 - RNA, 1410 nt, Artificial Sequence; identical to SEQ ID NO: 120043
  derived and/or modified CDS sequence (opt2) from neuraminidase__InfluenzaA__AHC61118

SEQ ID NO: 120238 - RNA, 1410 nt, Artificial Sequence; identical to SEQ ID NO: 120007
  derived and/or modified CDS sequence (opt2) from neuraminidase__InfluenzaA__AHC61130

SEQ ID NO: 120239 - RNA, 1410 nt, Artificial Sequence; identical to SEQ ID NO: 120154
  derived and/or modified CDS sequence (opt2) from neuraminidase__InfluenzaA__AHC61142

SEQ ID NO: 120240 - RNA, 1410 nt, Artificial Sequence; identical to SEQ ID NO: 120043
  derived and/or modified CDS sequence (opt2) from neuraminidase__InfluenzaA__AHC61154

SEQ ID NO: 120241 - RNA, 1410 nt, Artificial Sequence
  derived and/or modified CDS sequence (opt2) from neuraminidase__InfluenzaA__AHC61166
augaaccccaaccagaagaucaucaccaucggcuccgucucccucaccaucuccaccaucugcuucuucaugcaggucgccauccucaucaccaccgucacccuccacuucaagcaguacgaguucaacuccccccccaacaaccaggucaugcucugcgagcccaccaucaucgagcgcaacaucaccgagaucgucuaccucaccaacaccaccaucgagaaggagaucugccccaagcucgccgaguaccgcaacugguccaagccccagugcgacaucaccggcuucgcccccuucuccaaggacaacuccauccgccucuccgccggcggcgacaucugggucacccgcgagcccuacgucuccugcgaccccgacaagugcuaccaguucgcccucggccagggcaccacccucaacaacguccacuccaacaacaccguccgcgaccgcacccccuaccgcacccuccucaugaacgagcucggcguccccuuccaccucggcaccaagcaggucugcaucgccugguccuccuccuccugccacgacggcaaggccuggcuccacgucugcaucaccggcgacgacaagaacgccaccgccuccuucaucuacaacggcaagcucgucgacuccgucgucuccugguccaaggagauccuccgcacccaggaguccgagugcgucugcaucaacggcaccugcaccgucgucaugaccgacggcuccgccuccggcaaggccgacaccaagauccucuucaucgaggagggcaagaucguccacaccuccacccucuccggcuccgcccagcacgucgaggagugcuccugcuacccccgcuaccccggcguccgcugcgucugccgcgacaacuggaagggcuccaaccgccccaucgucgacaucaacaucaaggaccacuccaucgucuccuccuacgucugcuccggccucgucggcgacaccccccgcaagaacgacuccuccuccuccucccacugccucgaccccaacaacgaggagggcggccacggcgucaagggcugggccuucgacgacggcaacgacgucuggaugggccgcaccaucaacgagaccucccgccucggcuacgagaccuucaaggucaucgagggcugguccaaccccaaguccaagcuccagaccaaccgccaggucaucgucgaccgcggcaaccgcuccggcuacuccggcaucuucuccgucgagggcaaguccugcaucaaccgcugcuucuacgucgagcucauccgcggccgcaaggaggagaccgagguccucuggaccuccaacuccaucgucgucuucugcggcaccuccggcaccuacggcaccggcuccuggcccgacggcgccgaccucaaccucaugcccaucuga

SEQ ID NO: 120242 - RNA, 1410 nt, Artificial Sequence; identical to SEQ ID NO: 120007
  derived and/or modified CDS sequence (opt2) from neuraminidase__InfluenzaA__AHC61178

SEQ ID NO: 120243 - RNA, 1410 nt, Artificial Sequence; identical to SEQ ID NO: 120043
  derived and/or modified CDS sequence (opt2) from neuraminidase__InfluenzaA__AHC61190

SEQ ID NO: 120244 - RNA, 1410 nt, Artificial Sequence; identical to SEQ ID NO: 120056
  derived and/or modified CDS sequence (opt2) from neuraminidase__InfluenzaA__AHC61202

SEQ ID NO: 120245 - RNA, 1410 nt, Artificial Sequence; identical to SEQ ID NO: 120011
  derived and/or modified CDS sequence (opt2) from neuraminidase__InfluenzaA__AHC61214

SEQ ID NO: 120246 - RNA, 1410 nt, Artificial Sequence; identical to SEQ ID NO: 120056
  derived and/or modified CDS sequence (opt2) from neuraminidase__InfluenzaA__AHC61226

SEQ ID NO: 120247 - RNA, 1410 nt, Artificial Sequence; identical to SEQ ID NO: 120043
  derived and/or modified CDS sequence (opt2) from neuraminidase__InfluenzaA__AHC61238

SEQ ID NO: 120248 - RNA, 1410 nt, Artificial Sequence; identical to SEQ ID NO: 120224
  derived and/or modified CDS sequence (opt2) from neuraminidase__InfluenzaA__AHC61250

SEQ ID NO: 120249 - RNA, 1410 nt, Artificial Sequence; identical to SEQ ID NO: 120007
  derived and/or modified CDS sequence (opt2) from neuraminidase__InfluenzaA__AHC61262

SEQ ID NO: 120250 - RNA, 1410 nt, Artificial Sequence; identical to SEQ ID NO: 120011
  derived and/or modified CDS sequence (opt2) from neuraminidase__InfluenzaA__AHC61274

SEQ ID NO: 120251 - RNA, 1410 nt, Artificial Sequence; identical to SEQ ID NO: 115554
  derived and/or modified CDS sequence (opt2) from neuraminidase__InfluenzaA__AHC61286

SEQ ID NO: 120252 - RNA, 1410 nt, Artificial Sequence; identical to SEQ ID NO: 120055
  derived and/or modified CDS sequence (opt2) from neuraminidase__InfluenzaA__AHC61298

SEQ ID NO: 120253 - RNA, 1410 nt, Artificial Sequence
  derived and/or modified CDS sequence (opt2) from neuraminidase__InfluenzaA__AHC61310
augaaccccaaccagaagaucaucaccaucggcuccgucucccucaccaucuccaccaucugcuucuucaugcagaucgccauccucaucaccaccgucacccuccacuucaagcaguacgaguucaacuccccccccaacaaccaggucaugcucugcgagcccaccaucaucgagcgcaacaucaccgagaucgucuaccucaccaacaccaccaucgagaaggagaucugccccaagcucgccgaguaccgcaacugguccaagccccagugcgacaucaccggcuucgcccccuucuccaaggacaacuccauccgccucuccgccggcggcgacaucugggucacccgcgagcccuacgucuccugcgaccccaacaagugcuaccaguucgcccucggccagggcaccacccucaacaacguccacuccaacaacaccguccgcgaccgcacccccuaccgcacccuccucaugaacgagcucggcguccccuuccaccucggcaccaagcaggucugcaucgccugguccuccuccuccugccacgacggcaaggccuggcuccacgucugcaucaccggcgacgacaagaacgccaccgccuccuucaucuacaacggcaagcucgucgacuccgucgucuccugguccaaggagauccuccgcacccaggaguccgagugcgucugcaucaacggcaccugcaccgucgucaugaccgacggcuccgccuccggcaaggccgacaccaagauccucuucaucgaggagggcaagaucguccacaccuccacccucuccggcuccgcccagcacgucgaggagugcuccugcuacccccgcuaccccggcguccgcugcgucugccgcgacaacuggaagggcuccaaccgccccaucgucgacaucaacaucaaggaccacuccaucgucuccuccuacgucugcuccggccucgucggcgacaccccccgcaagaacgacuccuccuccuccucccacugccucgaccccaacaacgaggagggcggccacggcgucaagggcugggccuucgacgacggcaacgacgucuggaugggccgcaccaucaacgagaccucccgccucggcuacgagaccuucaaggucaucgagggcugguccaaccccaaguccaagcuccagaucaaccgccaggucaucaucgaccgcggcaaccgcuccggcuacuccggcaucuucuccgucgagggcaaguccugcaucaaccgcugcuucuacgucgagcucauccgcggccgcaaggaggagaccgagguccucuggaccuccuccuccaucgucgucuucugcggcaccuccggcaccuacggcaccggcuccuggcccgacggcgccgaccucaaccucaugcccaucuga

SEQ ID NO: 120254 - RNA, 1410 nt, Artificial Sequence; identical to SEQ ID NO: 120084
  derived and/or modified CDS sequence (opt2) from neuraminidase__InfluenzaA__AHC61322

SEQ ID NO: 120255 - RNA, 1410 nt, Artificial Sequence; identical to SEQ ID NO: 120043
  derived and/or modified CDS sequence (opt2) from neuraminidase__InfluenzaA__AHC61334

SEQ ID NO: 120256 - RNA, 1410 nt, Artificial Sequence; identical to SEQ ID NO: 120011
  derived and/or modified CDS sequence (opt2) from neuraminidase__InfluenzaA__AHC61346

SEQ ID NO: 120257 - RNA, 1410 nt, Artificial Sequence
  derived and/or modified CDS sequence (opt2) from neuraminidase__InfluenzaA__AHC61358
augaaccccaaccagaagaucaucaccaucggcuccgucucccucaccaucuccaccaucugcuucuucaugcagaucgccauccucaucaccaccgucacccuccacuucaagcaguacgaguucaacuccccccccaacaaccaggucaugcucugcgagcccaccaucaucgagcgcaacaucaccgagaucgucuaccucaccaacaccaccaucgagaaggagaucugccccaagcucgccgaguaccgcaacugguccaagccccagugcgacaucaccggcuucgcccccuucuccaaggacaacuccauccgccucuccgccggcggcgacaucugggucacccgcgagcccuacgucuccugcgaccccgacaagugcuaccaguucgcccucggccagggcaccacccucaacaacguccacuccaacaacaccguccgcgaccgcacccccuaccgcacccuccucaugaacgagcucggcguccccuuccaccucggcaccaagcaggucugcaucgccugguccuccuccuccugccacgacggcaaggccuggcuccacgucugcaucaccggcgacgacaagaacgccaccgccuccuucaucuacaacggccgccucgucgacuccgucgucuccugguccaaggagauccuccgcacccaggaguccgagugcgucugcaucaacggcaccugcaccgucgucaugaccgacggcuccgccuccggcaaggccgacaccaagauccucuucaucgaggagggcaagaucguccacaccuccacccucuccggcuccgcccagcacgucgaggagugcuccugcuacccccgcuaccccggcguccgcugcgucugccgcgacaacuggaagggcuccaaccgccccaucgucgacaucaacaucaaggaccacuccaucgucuccuccuacgucugcuccggccucgucggcgacaccccccgcaagaacgacaucuccuccuccucccacugccucgaccccaacaacgaggagggcggccacggcgucaagggcugggccuucgacgacggcaacgacgucuggaugggccgcaccaucaacgagaccucccgccucggcuacgagaccuucaaggucaucaagggcugguccaaccccaaguccaagcuccagaucaaccgccaggucaucgucgaccgcggcaaccgcuccggcuacuccggcaucuucuccgucgagggcaaguccugcaucaaccgcugcuucuacgucgagcucauccgcggccgcaaggaggagaccgagguccucuggaccuccaacuccaucgucgucuucugcggcaccuccggcaccuacggcaccggcuccuggcccgacggcgccgaccucaaccucaugcccaucuga

SEQ ID NO: 120258 - RNA, 1410 nt, Artificial Sequence; identical to SEQ ID NO: 120056
  derived and/or modified CDS sequence (opt2) from neuraminidase__InfluenzaA__AHC61370

SEQ ID NO: 120259 - RNA, 1410 nt, Artificial Sequence; identical to SEQ ID NO: 120084
  derived and/or modified CDS sequence (opt2) from neuraminidase__InfluenzaA__AHC61382

SEQ ID NO: 120260 - RNA, 1410 nt, Artificial Sequence; identical to SEQ ID NO: 120056
  derived and/or modified CDS sequence (opt2) from neuraminidase__InfluenzaA__AHC61394

SEQ ID NO: 120261 - RNA, 1410 nt, Artificial Sequence; identical to SEQ ID NO: 120084
  derived and/or modified CDS sequence (opt2) from neuraminidase__InfluenzaA__AHC61406

SEQ ID NO: 120262 - RNA, 1410 nt, Artificial Sequence; identical to SEQ ID NO: 120043
  derived and/or modified CDS sequence (opt2) from neuraminidase__InfluenzaA__AHC61418

SEQ ID NO: 120263 - RNA, 1410 nt, Artificial Sequence; identical to SEQ ID NO: 115554
  derived and/or modified CDS sequence (opt2) from neuraminidase__InfluenzaA__AHC61430

SEQ ID NO: 120264 - RNA, 1410 nt, Artificial Sequence; identical to SEQ ID NO: 120056
  derived and/or modified CDS sequence (opt2) from neuraminidase__InfluenzaA__AHC61442

SEQ ID NO: 120265 - RNA, 1410 nt, Artificial Sequence; identical to SEQ ID NO: 120056
  derived and/or modified CDS sequence (opt2) from neuraminidase__InfluenzaA__AHC61454

SEQ ID NO: 120266 - RNA, 1410 nt, Artificial Sequence
  derived and/or modified CDS sequence (opt2) from neuraminidase__InfluenzaA__AHC61466
augaaccccaaccagaagaucaucaccaucggcuccgucucccucaccaucuccaccaucugcuucuucaugcagaucgccauccucaucaccaccgucacccuccacuucaagcaguacgaguucaacuccccccccaacaaccaggucaugcucugcgagcccaccaucaucgagcgcaacaccaccgagaucgucuaccucaccaacaccaccaucgagaaggagaucugccccaagcucgccgaguaccgcaacugguccaagccccagugcgacaucaccggcuucgcccccuucuccaaggacaacuccauccgccucuccgccggcggcgacaucugggucacccgcgagcccuacgucuccugcgaccccgacaagugcuaccaguucgcccucggccagggcaccacccucaacaacguccacuccaacaacaccguccgcgaccgcacccccuaccgcacccuccucaugaacgagcucggcguccccuuccaccucggcaccaagcaggucugcaucgccugguccuccuccuccugccacgacggcaaggccuggcuccacgucugcaucaccggcgacgacaagaacgccaccgccuccuucaucuacaacggccgccucgucgacuccgucgucuccugguccaaggagauccuccgcacccaggaguccgagugcgucugcaucaacggcaccugcaccgucgucaugaccgacggcuccgccuccggcaaggccgacaccaagauccucuucaucgaggagggcaagaucguccacaccuccacccucuccggcuccgcccagcacgucgaggagugcuccugcuacccccgcuaccccggcguccgcugcgucugccgcgacaacuggaagggcuccaaccgccccaucgucgacaucaacaucaaggaccacuccaucgucuccuccuacgucugcuccggccucgucggcgacaccccccgcaagaacgacuccuccuccuccucccacugccucgaccccaacaacgaggagggcggccacggcgucaagggcugggccuucgacgacggcaacgacgucuggaugggccgcaccaucaacgagaccucccgccucggcuacgagaccuucaaggucaucgagggcugguccaaccccaaguccaagcuccagaucaaccgccaggucaucgucgacaagggcaaccgcuccggcuacuccggcaucuucuccgucgagggcaaguccugcaucaaccgcugcuucuacgucgagcucauccgcggccgcaaggaggagaccgagguccucuggaccuccaacuccaucgucgucuucugcggcaccuccggcaccuacggcaccggcuccuggcccgacggcgccgaccucaaccucaugcccaucuga

SEQ ID NO: 120267 - RNA, 1410 nt, Artificial Sequence; identical to SEQ ID NO: 120007
  derived and/or modified CDS sequence (opt2) from neuraminidase__InfluenzaA__AHC61478

SEQ ID NO: 120268 - RNA, 1410 nt, Artificial Sequence; identical to SEQ ID NO: 120043
  derived and/or modified CDS sequence (opt2) from neuraminidase__InfluenzaA__AHC61490

SEQ ID NO: 120269 - RNA, 1410 nt, Artificial Sequence; identical to SEQ ID NO: 120007
  derived and/or modified CDS sequence (opt2) from neuraminidase__InfluenzaA__AHC61502

SEQ ID NO: 120270 - RNA, 1410 nt, Artificial Sequence; identical to SEQ ID NO: 120056
  derived and/or modified CDS sequence (opt2) from neuraminidase__InfluenzaA__AHC61514

SEQ ID NO: 120271 - RNA, 1410 nt, Artificial Sequence; identical to SEQ ID NO: 118958
  derived and/or modified CDS sequence (opt2) from neuraminidase__InfluenzaA__AHC61526

SEQ ID NO: 120272 - RNA, 1410 nt, Artificial Sequence
  derived and/or modified CDS sequence (opt2) from neuraminidase__InfluenzaA__AHC61538
augaaccccaaccagaagaucaucaccaucggcuccgucucccucaccaucuccaccaucugcuucuucaugcagaucgccauccucaucaccaccgucacccuccacuucaagcaguacgaguucaacuccccccccaacaaccaggucaugcucugcgagcccaccaucaucgagcgcaacaucaccgagaucgucuaccucaccaacaccaccaucgagaaggagaucugccccaagcucgccgaguaccgcaacugguccaagccccagugcgacaucaccggcuucgcccccuucuccaaggacaacuccauccgccucuccgccggcggcgacaucugggucacccgcgagcccuacgucuccugcgaccccaacaagugcuaccaguucgcccucggccagggcaccacccucaacaacguccacuccaacaacaccguccgcgaccgcacccccuaccgcacccuccucaugaacgagcucggcguccccuuccaccucggcaccaagcaggucugcaucgccugguccuccuccuccugccacgacggcaaggccuggcuccacgucugcaucaccggcgacgacaagaacgccaccgccuccuucaucuacaacggcaagcucgucgacuccgucgucuccugguccaaggagauccuccgcacccaggaguccgagugcgucugcaucaacggcaccugcaccgucgucaugaccgacggcuccgccuccggcaaggccgacaccaagauccucuucaucgaggagggcaagaucguccacaccuccacccucuccggcuccgcccagcacgucgaggagugcuccugcuacccccgcuaccccggcguccgcugcgucugccgcgacaacuggaagggcuccaaccgccccaucgucgacaucaacaucaaggaccacuccaucgucuccuccuacgucugcuccggccucgucggcgacaccccccgcaagaacgacuccuccuccuccucccacugccucgaccccaacaacgaggagggcucccacggcgucaagggcugggccuucgacgacggcaacgacgucuggaugggccgcaccaucaacgagaccucccgccucggcuacgagaccuucaaggucaucgagggcugguccaaccccaaguccaagcuccagaucaaccgccaggucaucgucgaccgcggcaaccgcuccggcuacuccggcaucuucuccgucgagggcaaguccugcaucaaccgcugcuucuacgucgagcucauccgcggccgcaaggaggagaccgagguccucuggaccuccaacuccaucgucgucuucugcggcaccuccggcaccuacggcaccggcuccuggcccgacggcgccgaccucaaccucaugcccaucuga

SEQ ID NO: 120273 - RNA, 1410 nt, Artificial Sequence; identical to SEQ ID NO: 120056
  derived and/or modified CDS sequence (opt2) from neuraminidase__InfluenzaA__AHC61550

SEQ ID NO: 120274 - RNA, 1410 nt, Artificial Sequence
  derived and/or modified CDS sequence (opt2) from neuraminidase__InfluenzaA__AHC61562
augaaccccaaccagaagaucaucaccaucggcuccgucucccucaccaucuccaccaucugcuucuucaugcagaucgccauccucaucaccaccgucacccuccacuucaagcaguacgaguucuacuccccccccaacaaccaggucaugcucugcgagcccaccaugaucgagcgcaacaucaccgagaucgucuaccucaccaacaccaccaucgagaaggagaucugccccaagcucgccgaguaccgcaacugguccaagccccagugcgacaucaccggcuucgcccccuucuccaaggacaacuccauccgccucuccgccggcggcgacaucugggucacccgcgagcccuacgucuccugcgaccccgacaagugcuaccaguucgcccucggccagggcaccacccucaacaacguccacuccaacaacaccguccgcgaccgcacccccuaccgcacccuccucaugaacgagcucggcguccccuuccaccucggcaccaagcaggucugcaucgccugguccuccuccuccugccacgacggcaaggccuggcuccacgucugcaucaccggcgacgacaagaacgccaccgccuccuucaucuacaacggccgccucgucgacuccgucgucuccugguccaaggagauccuccgcacccaggaguccgagugcgucugcaucaacggcaccugcaccgucgucaugaccgacggcuccgccuccggcaaggccgacaccaagauccucuucaucgaggagggcaagaucguccacaccuccacccucuccggcuccgcccagcacgucgaggagugcuccugcuacccccgcuaccccggcguccgcugcgucugccgcgacaacuggaagggcuccaaccgccccaucgucgacaucaacaucaaggaccacuccaucgucuccuccuacgucugcuccggccucgucggcgacaccccccgcaagaacgacuccuccuccuccucccacugccucgaccccaacaacgaggagggcggccacggcgucaagggcugggccuucgacgacggcaacgacgucuggaugggccgcaccaucaacgagaccucccgccucggcuacgagaccuucaaggucaucgagggcugguccaaccccaaguccaagcuccagaucaaccgccaggucaucgucgaccgcggcaaccgcuccggcuacuccggcaucuucuccgucgaguccaaguccugcaucaaccgcugcuucuacgucgagcucauccgcggccgcaaggaggagaccgagguccucuggaccuccaacuccaucgucgucuucugcggcaccuccggcaccuacggcaccggcaccuggcccgacggcgccgaccucaaccucaugcccaucuga

SEQ ID NO: 120275 - RNA, 1410 nt, Artificial Sequence; identical to SEQ ID NO: 120055
  derived and/or modified CDS sequence (opt2) from neuraminidase__InfluenzaA__AHC61574

SEQ ID NO: 120276 - RNA, 1410 nt, Artificial Sequence; identical to SEQ ID NO: 120056
  derived and/or modified CDS sequence (opt2) from neuraminidase__InfluenzaA__AHC61586

SEQ ID NO: 120277 - RNA, 1410 nt, Artificial Sequence; identical to SEQ ID NO: 118958
  derived and/or modified CDS sequence (opt2) from neuraminidase__InfluenzaA__AHC61598

SEQ ID NO: 120278 - RNA, 1410 nt, Artificial Sequence; identical to SEQ ID NO: 120007
  derived and/or modified CDS sequence (opt2) from neuraminidase__InfluenzaA__AHC61610

SEQ ID NO: 120279 - RNA, 1410 nt, Artificial Sequence; identical to SEQ ID NO: 120055
  derived and/or modified CDS sequence (opt2) from neuraminidase__InfluenzaA__AHC61622

SEQ ID NO: 120280 - RNA, 1410 nt, Artificial Sequence; identical to SEQ ID NO: 115554
  derived and/or modified CDS sequence (opt2) from neuraminidase__InfluenzaA__AHC61634

SEQ ID NO: 120281 - RNA, 1410 nt, Artificial Sequence; identical to SEQ ID NO: 115554
  derived and/or modified CDS sequence (opt2) from neuraminidase__InfluenzaA__AHC61646

SEQ ID NO: 120282 - RNA, 1410 nt, Artificial Sequence; identical to SEQ ID NO: 115554
  derived and/or modified CDS sequence (opt2) from neuraminidase__InfluenzaA__AHC61658

SEQ ID NO: 120283 - RNA, 1410 nt, Artificial Sequence; identical to SEQ ID NO: 118958
  derived and/or modified CDS sequence (opt2) from neuraminidase__InfluenzaA__AHC61670

SEQ ID NO: 120284 - RNA, 1410 nt, Artificial Sequence; identical to SEQ ID NO: 120011
  derived and/or modified CDS sequence (opt2) from neuraminidase__InfluenzaA__AHC61682

SEQ ID NO: 120285 - RNA, 1410 nt, Artificial Sequence; identical to SEQ ID NO: 118958
  derived and/or modified CDS sequence (opt2) from neuraminidase__InfluenzaA__AHC61694

SEQ ID NO: 120286 - RNA, 1410 nt, Artificial Sequence
  derived and/or modified CDS sequence (opt2) from neuraminidase__InfluenzaA__AHC61706
augaaccccaaccagaagaucaucaccaucggcuccgucucccucaccaucuccaccaucugcuucuucaugcagaucgccauccucaucaccaccgucacccuccacuucaagcaguacgaguucaacuccccccccaacaaccaggucaugcucugcgagcccaccaucaucgagcgcaacaucaccgagaucgucuaccucaccaacaccaccaucgagaaggagaucugccccaagcucgccgaguaccgcaacugguccaagccccagugcgacaucaccggcuucgcccccuucuccaaggacaacuccauccgccucuccgccggcggcgacaucugggucacccgcgagcccuacgucuccugcgaccccgacaagugcuaccaguucgcccucggccagggcaccacccucaacaacguccacuccaacaacaccguccgcgaccgcacccccuaccgcacccuccucaugaacgagcucggcguccccuuccaccucggcaccaagcaggucugcaucgccugguccuccuccuccugccacgacggcaaggccuggcuccacgucugcaucaccggcgacgacaagaacgccaccgccuccuucaucuacaacggccgccucgucgacuccgucgucuccugguccaaggagauccuccgcacccaggaguccgagugcgucugcaucaacggcaccugcaccgucgucaugaccgacggcuccgccuccggcaaggccgacaccaagauccucuucaucgaggagggcaagaucguccacaccuccacccucuccggcuccgcccagcacgucgaggagugcuccugcuacccccgcuaccccggcguccgcugcgucugccgcgacaacuggaagggcuccaaccgccccaucgucgacaucaacaucaaggagcacuccaucgucuccuccuacgucugcuccggccucgucggcgacaccccccgcaagaacgacuccuccuccuccucccacugccucgaccccaacaacgaggagggcggccacggcgucaagggcugggccuucgacgacggcaacgacgucuggaugggccgcaccaucaacgagaccucccgccucggcuacgagaccuucaaggucaucgagggcugguccaaccccaaguccaagcuccagaucaaccgccaggucaucgucgaccgcggcaaccgcuccggcuacuccggcaucuucuccgucgagggcaaguccugcaucaaccgcugcuucuacgucgagcucauccgcggccgcaaggaggagaccgagguccucuggaccuccaacuccaucgucgucuucugcggcaccuccggcaccuacggcaccggcuccuggcccgacggcgccgaccucaaccucaugcccaucuga

SEQ ID NO: 120287 - RNA, 1410 nt, Artificial Sequence
  derived and/or modified CDS sequence (opt2) from neuraminidase__InfluenzaA__AHC61718
augaaccccaaccagaagaucaucaccaucggcuccgucucccucaccaucuccaccaucugcuucuucaugcagaucgccauccucaucaccaccgucacccuccacuucaagcagugcgaguucaacuccccccccaacaaccaggucaugcucugcgagcccaccaucaucgagcgcaacaucaccgagaucgucuaccucaccaacaccaccaucgagaaggagaucugccccaagcucaccgaguaccgcaacugguccaagccccagugcgacaucaccggcuucgcccccuucuccaaggacaacuccauccgccucuccgccggcggcgacaucugggucacccgcgagcccuacgucuccugcgaccccaacaagugcuaccaguucgcccucggccagggcaccacccucaacaacguccacuccaacaacaccguccgcgaccgcacccccuaccgcacccuccucaugaacgagcucggcguccccuuccaccucggcaccaagcaggucugcaucgccugguccuccuccuccugccacgacggcaaggccuggcuccacgucugcaucaccggcgacgacaagaacgccaccgccuccuucaucuacaacggcaagcucgucgacuccgucgucuccugguccaaggagauccuccgcacccaggaguccgagugcgucugcaucaacggcaccugcaccgucgucaugaccgacggcuccgccuccggcaaggccgacaccaagauccucuucaucgaggagggcaagaucguccacaccuccacccucuccggcuccgcccagcacgucgaggagugcuccugcuacccccgcuaccccggcguccgcugcgucugccgcgacaacuggaagggcuccaaccgccccaucgucgacaucaacaucaaggaccacuccaucgucuccuccuacgucugcuccggccucgucggcgacaccccccgcaagaacgacuccuccuccuccucccacugccucgaccccaacaacgaggagggcggccacggcgucaagggcugggccuucgacgacggcaacgacgucuggaugggccgcaccaucaacgagaccucccgccucggcuacgagaccuucaaggucaucgagggcugguccaaccccaaguccaagcuccagaucaaccgccaggucaucgucgaccgcggcaaccgcuccggcuacuccggcaucuucuccgucgagggcaaguccugcaucaaccgcugcuucuacgucgagcucauccgcggccgcaaggaggagaccggcguccucuggaccuccaacuccaucgucgucuucugcggcaccuccggcaccuacggcaccggcuccuggcccgacggcgccgaccucaaccucaugcccaucuga

SEQ ID NO: 120288 - RNA, 1410 nt, Artificial Sequence; identical to SEQ ID NO: 120007
  derived and/or modified CDS sequence (opt2) from neuraminidase__InfluenzaA__AHC61730

SEQ ID NO: 120289 - RNA, 1410 nt, Artificial Sequence; identical to SEQ ID NO: 120056
  derived and/or modified CDS sequence (opt2) from neuraminidase__InfluenzaA__AHC61742

SEQ ID NO: 120290 - RNA, 1410 nt, Artificial Sequence; identical to SEQ ID NO: 120007
  derived and/or modified CDS sequence (opt2) from neuraminidase__InfluenzaA__AHC61754

SEQ ID NO: 120291 - RNA, 1410 nt, Artificial Sequence; identical to SEQ ID NO: 115554
  derived and/or modified CDS sequence (opt2) from neuraminidase__InfluenzaA__AHC61766

SEQ ID NO: 120292 - RNA, 1410 nt, Artificial Sequence; identical to SEQ ID NO: 120043
  derived and/or modified CDS sequence (opt2) from neuraminidase__InfluenzaA__AHC61778

SEQ ID NO: 120293 - RNA, 1410 nt, Artificial Sequence; identical to SEQ ID NO: 120081
  derived and/or modified CDS sequence (opt2) from neuraminidase__InfluenzaA__AHC61790

SEQ ID NO: 120294 - RNA, 1410 nt, Artificial Sequence; identical to SEQ ID NO: 120011
  derived and/or modified CDS sequence (opt2) from neuraminidase__InfluenzaA__AHC61802

SEQ ID NO: 120295 - RNA, 1410 nt, Artificial Sequence; identical to SEQ ID NO: 120007
  derived and/or modified CDS sequence (opt2) from neuraminidase__InfluenzaA__AHC61814

SEQ ID NO: 120296 - RNA, 1410 nt, Artificial Sequence
  derived and/or modified CDS sequence (opt2) from neuraminidase__InfluenzaA__AHC61826
augaaccccaaccagaagaucaucaccaucggcuccgucucccucaccaucuccaccaucugcuucuucaugcagaucgccauccucaucaccaccgucacccuccacuucaagcaguacgaguucaacuccccccccaacaaccaggucguccucugcgagcccaccaucaucgagcgcaacaucaccgagaucgucuaccucaccaacaccaccaucgagaaggagaucugccccaagcccgccgaguaccgcaacugguccaagccccagugcgacaucaccggcuucgcccccuucuccaaggacaacuccauccgccucuccgccggcggcgacaucugggucacccgcgagcccuacgucuccugcgaccccgacaagugcuaccaguucgcccucggccagggcaccacccucaacaacguccacuccaacaacaccguccgcgaccgcacccccuaccgcacccuccucaugaacgagcucggcguccccuuccaccucggcaccaagcaggucugcaucgccugguccuccuccuccugccacgacggcaaggccuggcuccacgucugcaucaccggcgacgacaagaacgccaccgccuccuucaucuacaacggccgccucgucgacuccgucgucuccugguccaaggagauccuccgcacccaggaguccgagugcgucugcaucaacggcaccugcaccgucgucaugaccgacggcuccgccuccggcaaggccgacaccaagauccucuucaucgaggagggcaagaucguccacaccuccacccucuccggcuccgcccagcacgucgaggagugcuccugcuacccccgcuaccccggcguccgcugcgucugccgcgacaacuggaagggcuccaaccgccccaucgucgacaucaacaucaaggaccacuccaucgucuccuccuacgucugcuccggccucgucggcgacaccccccgcaagaacgacuccuccuccuccucccacugccucgaccccaacaacgaggagggcggccacggcgucaagggcugggccuucgacgacggcaacgacgucuggaugggccgcaccaucaacgagaccucccgccucggcuacgagaccuucaaggucaucgagggcugguccaaccccaaguccaagcuccagaucaaccgccaggucaucgucgaccgcuccgaccgcuccggcuacuccggcaucuucuccgucgagggcaaguccugcaucaaccgcugcuucuacgucgagcucauccgcggccgcaaggaggagaccgagguccucuggaccuccaacuccaucgucgucuucugcggcaccuccggcaccuacggcaccggcuccuggcccgacggcgccgaccucaaccucaugcccaucuga

SEQ ID NO: 120297 - RNA, 1410 nt, Artificial Sequence; identical to SEQ ID NO: 120007
  derived and/or modified CDS sequence (opt2) from neuraminidase__InfluenzaA__AHC61838

SEQ ID NO: 120298 - RNA, 1410 nt, Artificial Sequence; identical to SEQ ID NO: 120043
  derived and/or modified CDS sequence (opt2) from neuraminidase__InfluenzaA__AHC61850

SEQ ID NO: 120299 - RNA, 1410 nt, Artificial Sequence; identical to SEQ ID NO: 120056
  derived and/or modified CDS sequence (opt2) from neuraminidase__InfluenzaA__AHC61862

SEQ ID NO: 120300 - RNA, 1410 nt, Artificial Sequence; identical to SEQ ID NO: 120007
  derived and/or modified CDS sequence (opt2) from neuraminidase__InfluenzaA__AHC61874

SEQ ID NO: 120301 - RNA, 1410 nt, Artificial Sequence
  derived and/or modified CDS sequence (opt2) from neuraminidase__InfluenzaA__AHC61886
augaaccccaaccagaagaucaucaccaucggcuccgucucccucaccaucuccaccaucugcuucuucaugcagaucgccauccucaucaccaccgucacccuccacuucaagcaguacgaguucaaccccccccccaacaaccaggucguccucugcgagcccaccaucaucgagcgcaacaucaccgagaucgucuaccucaccaacaccaccaucgagaaggagaucugccccaagcccgccgaguaccgccacugguccaagccccagugcgacaucaccggcuucgcccccuucuccaaggacaacuccauccgccucuccgccggcggcgacaucugggucacccgcgagcccuacgucuccugcgaccccgacaagugcuaccaguucgcccucggccagggcaccacccucaacaacguccacuccaacaacaccguccgcgaccgcacccccuaccgcacccuccucaugaacgagcucggcguccccuuccaccucggcaccaagcaggucugcaucgccugguccuccuccuccugccacgacggcaaggccuggcuccacgucugcaucaccggcgacgacaagaacgccaccgccuccuucaucuacaacggccgccucgucgacuccgucgucuccugguccaaggagauccuccgcacccaggaguccgagugcgucugcaucaacggcaccugcaccgucgucaugaccgacggcuccgccuccggcaaggccgacaccaagauccucuucaucgaggagggcaagaucguccacaccuccacccucuccggcuccgcccagcacgucgaggagugcuccugcuacccccgcuaccccggcguccgcugcgucugccgcgacaacuggaagggcuccaaccgccccaucgucgacaucaacaucaaggaccacuccaucgucuccuccuacgucugcuccggccucgucggcgacaccccccgcaagaacgacuccuccuccuccucccacugccucgaccccaacaacgaggagggcggccacggcgucaagggcugggccuucgacgacggcaacgacgucuggaugggccgcaccaucaacgagaccucccgccucggcuacgagaccuucaaggucaucgagggcugguccaaccccaaguccaagcuccagaucaaccgccaggucaucgucgaccgcggcgaccgcuccggcuacuccggcaucuucuccgucgagggcaaguccugcaucaaccgcugcuucuacgucgagcucauccgcggccgcaaggaggagaccgagguccucuggaccuccaacuccaucgucgucuucugcggcaccuccggcaccuacggcaccggcuccuggcccgacggcgccgaccucaaccucaugcccaucuga

SEQ ID NO: 120302 - RNA, 1410 nt, Artificial Sequence; identical to SEQ ID NO: 120011
  derived and/or modified CDS sequence (opt2) from neuraminidase__InfluenzaA__AHC61898

SEQ ID NO: 120303 - RNA, 1410 nt, Artificial Sequence; identical to SEQ ID NO: 120043
  derived and/or modified CDS sequence (opt2) from neuraminidase__InfluenzaA__AHC61910

SEQ ID NO: 120304 - RNA, 1410 nt, Artificial Sequence; identical to SEQ ID NO: 115554
  derived and/or modified CDS sequence (opt2) from neuraminidase__InfluenzaA__AHC61934

SEQ ID NO: 120305 - RNA, 1410 nt, Artificial Sequence
  derived and/or modified CDS sequence (opt2) from neuraminidase__InfluenzaA__AHC61946
augaaccccaaccagaagaucaucaccaucggcuccgucucccucaccaucuccaccaucugcuucuucaugcagaucgccauccucaucaccaccgucacccuccacuucaagcaguacgaguccuacuccccccccaacaaccaggucaugcucugcgagcccaccaucaucgagcgcaacaucaccgagaucgucuaccucaccaacaccaccaucgagaaggagaucugccccaagcucgccgaguaccgcaacugguccaagccccagugcgacaucaccggcuucgcccccuucuccaaggacaacuccauccgccucuccgccggcggcgacaucugggucacccgcgagcccuacgucuccugcgaccccgacaagugcuaccaguucgcccucggccagggcaccacccucaacaacguccacuccaacaacaccguccgcgaccgcacccccuaccgcacccuccucaugaacgagcucggcguccccuuccaccucggcaccaagcaggucugcaucgccugguccuccuccuccugccacgacggcaaggccuggcuccacgucugcaucaccggcgacgacaagaacgccaccgccuccuucaucuacaacggccgccucgucgacuccgucgucuccugguccaaggagauccuccgcacccaggaguccgagugcgucugcaucaacggcaccugcaccgucgucaugaccgacggcuccgccuccggcaaggccgacaccaagauccucuucaucgaggagggcaagaucguccacaccuccacccucuccggcuccgcccagcacgucgaggagugcuccugcuacccccgcaaccccggcguccgcugcgucugccgcgacaacuggaagggcuccaaccgccccaucgucgacaucaacaucaaggaccacuccaucgucuccuccuacgucugcuccggccucgucggcgacaccccccgcaagaacgacuccuccuccuccucccacugccucgaccccaacaacgaggagggcggccacggcgucaagggcugggccuucgacgacggcaacgacgucuggaugggccgcaccaucaacgagaccucccgccucggcuacgagaccuucaaggucaucgagggcugguccaaccccaaguccaagcuccagaucaaccgccaggucaucgucgaccgcggcaaccgcuccggcuacuccggcaucuucuccgucgagggcaaguccugcaucaaccgcugcuucuacgucgagcucauccgcggccgcaaggaggagaccgagguccucuggaccuccaacuccaucgucgucuucugcggcaccuccggcaccuacggcaccggcuccuggcccgacggcgccgaccucaaccucaugcccaucuga

SEQ ID NO: 120306 - RNA, 1410 nt, Artificial Sequence; identical to SEQ ID NO: 118958
  derived and/or modified CDS sequence (opt2) from neuraminidase__InfluenzaA__AHC61958

SEQ ID NO: 120307 - RNA, 1410 nt, Artificial Sequence; identical to SEQ ID NO: 120007
  derived and/or modified CDS sequence (opt2) from neuraminidase__InfluenzaA__AHC61970

SEQ ID NO: 120308 - RNA, 1410 nt, Artificial Sequence
  derived and/or modified CDS sequence (opt2) from neuraminidase__InfluenzaA__AHC61982
augaaccccaaccagaagaucaucaccaucggcuccgucucccucaccaucuccaccaucugcuucuucaugcagaucgccauccucaucaccaccgucacccuccacuucaagcaguacgaguucaacuccccccccaacaaccaggucaugcucugcgagcccaccaucaucgagcgcaacaucaccgagaucgucuaccucaccaacaccaccaucgagaaggagaucugccccaagcucgccgaguaccgcaacugguccaagccccagugcgacaucaccggcuucgcccccuucuccaaggacaacuccauccgccucuccgccggcggcgacaucugggucacccgcgagcccuacgucuccugcgaccccgacaagugcuaccaguucgcccucggccagggcaccacccucaacaacguccacuccaacaacaccguccgcgaccgcacccccuaccgcacccuccucaugaacgagcucggcguccccuuccaccucggcaccaagcaggucugcaucgccugguccuccuccuccugccacgacggcaaggccuggcuccacgucugcaucaccggcgacgacaagaacgccaccgccuccuucaucuacaacggccgccucgucgacuccgucgucuccugguccaaggagauccuccgcacccaggaguccgagugcgucugcaucaacggcaccugcgccgucgucaugaccgacggcuccgccuccggcaaggccgacaccaagauccucuucaucgaggagggcaagaucguccacaccuccacccucuccggcuccgcccagcacgucgaggagugcuccugcuacccccgcuaccccggcguccgcugcgucugccgcgacaacuggaagggcuccaaccgccccaucgucgacaucaacaucaaggaccacggcaucgucuccuccuacgucugcuccggccucgucggcgacaccccccgcaagaacgacuccuccuccuccucccacugccucgaccccaacaacgaggagggcggccacggcgucaagggcugggccuucgacgacggcaacgacgucuggaugggccgcaccaucaacgagaccucccgccucggcuacgagaccuucaaggucaucgagggcugguccaaccccaaguccaagcuccagaucaaccgccaggucaucgucgaccgcggcaaccgcuccggcuacuccggcaucuucuccgucgagggcaaguccugcaucaaccgcugcuucuacgucgagcucauccgcggccgcaaggaggagaccgagguccucuggaccuccaacuccaucgucgucuucugcggcaccuccggcaccuacggcaccggcuccuggcccgacggcgccgaccucaaccucaugcccaucuga

SEQ ID NO: 120309 - RNA, 1410 nt, Artificial Sequence; identical to SEQ ID NO: 120011
  derived and/or modified CDS sequence (opt2) from neuraminidase__InfluenzaA__AHC61994

SEQ ID NO: 120310 - RNA, 1410 nt, Artificial Sequence; identical to SEQ ID NO: 120043
  derived and/or modified CDS sequence (opt2) from neuraminidase__InfluenzaA__AHC62006

SEQ ID NO: 120311 - RNA, 1410 nt, Artificial Sequence; identical to SEQ ID NO: 120007
  derived and/or modified CDS sequence (opt2) from neuraminidase__InfluenzaA__AHC62018

SEQ ID NO: 120312 - RNA, 1410 nt, Artificial Sequence; identical to SEQ ID NO: 118958
  derived and/or modified CDS sequence (opt2) from neuraminidase__InfluenzaA__AHC62030

SEQ ID NO: 120313 - RNA, 1410 nt, Artificial Sequence; identical to SEQ ID NO: 120011
  derived and/or modified CDS sequence (opt2) from neuraminidase__InfluenzaA__AHC62042

SEQ ID NO: 120314 - RNA, 1410 nt, Artificial Sequence; identical to SEQ ID NO: 120084
  derived and/or modified CDS sequence (opt2) from neuraminidase__InfluenzaA__AHC62053

SEQ ID NO: 120315 - RNA, 1410 nt, Artificial Sequence
  derived and/or modified CDS sequence (opt2) from neuraminidase__InfluenzaA__AHC62065
augaaccccaaccagaagaucaucaccaucggcuccgucucccucaccaucuccaccaucugcuucuucaugcagaucgccauccucgucaccaccgucacccuccacuucaagcaguacgaguucaacuccccccccaacaaccaggucaugcucugcgagcccaccaucaucgagcgcaacaucaccgagaucgucuaccucaccaacaccaccaucgagaaggagaucugccccaagcccgccgaguaccgcaacugguccaagccccagugcgacaucaccggcuucgcccccuucuccaaggacaacuccauccgccucuccgccggcggcgacaucugggucacccgcgagcccuacgucuccugcgaccccgacaagugcuaccaguucgcccucggccagggcaccacccucaacaacguccacuccaacaacaccguccgcgaccgcacccccuaccgcacccuccucaugaacgagcucggcguccccuuccaccucggcaccaagcaggucugcaucgccugguccuccuccuccugccacgacggcaaggccuggcuccacgucugcaucaccggcgacgacaagaacgccaccgccuccuucaucuacaacggccgccucgucgacuccgucgucuccugguccaaggagauccuccgcacccaggaguccgagugcgucugcaucaacggcaccugcaccgucgucaugaccgacggcuccgccuccggcaaggccgacaccaagauccucuucaucgaggagggcaagaucguccacaccuccacccucuccggcuccgcccagcacgucgaggagugcuccugcuacccccgcuaccccggcguccgcugcgucugccgcgacaacuggaagggcuccaaccgccccaucgucgacaucaacaucaaggaccacuccaucgucuccuccuacgucugcuccggccucgucggcgacaccccccgcaagaacgacuccuccuccuccucccacugccucgaccccaacaacgaggagggcggccacggcgucaagggcugggccuucgacgacggcaacgacgucuggaugggccgcaccaucaacgagaccucccgccucggcuacgagaccuucaaggucaucgagggcugguccaaccccaaguccaagcuccagaucaaccgccaggucaucgucgaccgcggcgaccgcuccggcuacuccggcaucuucuccgucgagggcaaguccugcaucaaccgcugcuucuacgucgagcucauccgcggccgcaaggaggagaccgagguccucuggaccuccaacuccaucgucgucuucugcggcaccuccggcaccuacggcaccggcuccuggcccgacggcgccgaccucaaccucaugcccaucuga

SEQ ID NO: 120316 - RNA, 1410 nt, Artificial Sequence; identical to SEQ ID NO: 120142
  derived and/or modified CDS sequence (opt2) from neuraminidase__InfluenzaA__AHC62077

SEQ ID NO: 120317 - RNA, 1410 nt, Artificial Sequence; identical to SEQ ID NO: 120056
  derived and/or modified CDS sequence (opt2) from neuraminidase__InfluenzaA__AHC62089

SEQ ID NO: 120318 - RNA, 1410 nt, Artificial Sequence; identical to SEQ ID NO: 120007
  derived and/or modified CDS sequence (opt2) from neuraminidase__InfluenzaA__AHC62101

SEQ ID NO: 120319 - RNA, 1410 nt, Artificial Sequence; identical to SEQ ID NO: 120056
  derived and/or modified CDS sequence (opt2) from neuraminidase__InfluenzaA__AHC62113

SEQ ID NO: 120320 - RNA, 1410 nt, Artificial Sequence
  derived and/or modified CDS sequence (opt2) from neuraminidase__InfluenzaA__AHC62125
augaaccccaaccagaagaucaucaccaucggcuccgucucccucaccaucuccaccaucugcuucuucaugcagaucgccauccucaucaccaccgucacccuccacuucaagcaguacgaguucaacuccccccccaacaaccaggucaugcucugcgagcccaccaucaucgagcgcaacaucaccgagaucgucuaccucaccaacaccaccaucgagaaggagaucugccccaagcucgccgaguaccgcaacugguccaagccccagugcgacaucaccggcuucgcccccuucuccaaggacaacuccauccgccucuccgccggcggcgacaucugggucacccgcgagcccuacgucuccugcgaccccaacaagugcuaccaguucgcccucggccagggcaccacccucaacaacguccacuccaacaacaccguccgcgaccgcacccccuaccgcacccuccucaugaacgagcucggcguccccuuccaccucggcaccaagcaggucugcaucgccugguccuccuccuccugccacgacggcaaggccuggcuccacgucugcaucaccggcgacgacaagaacgccaccgccuccuucaucuacaacggcaagcucgucgacuccgucgucuccugguccaaggagauccuccgcacccaggaguccgagugcgucugcaucaacggcaccugcaccgucgucaugaccgacggcuccgccuccggcaaggccgacaccaagauccucuucaucgaggagggcaagaucguccacaccuccacccucuccggcuccgcccagcacgucgaggagugcuccugcuacccccgcuaccccggcguccgcugcgucugccgcgacaacuggaagggcuccaaccgccccaucgucgacaucaacaucaaggaccacuccaucgucuccuccuacgucugcuccggccucgucggcgacaccccccgcaagaacgacuccuccuccuccucccacugccucgaccccaacaacgaggagggcggccacggcgucaagggcugggccuucgacgacggcaacgacgucuggaugggccgcaccaucaacgagaccucccgccucggcuacgagaccuucaaggucaucgagggcugguccaaccccaaguccaagcuccagaucaaccgccaggucaucgucgaccgcggcaacaaguccggcuacuccggcaucuucuccgucgagggcaaguccugcaucaaccgcugcuucuacgucgagcucauccgcggccgcaaggaggagaccgagguccucuggaccuccaacuccaucgucgucuucugcggcaccuccggcaccuacggcaccggcuccuggcccgacggcgccgaccucaaccucaugcccaucuga

SEQ ID NO: 120321 - RNA, 1410 nt, Artificial Sequence
  derived and/or modified CDS sequence (opt2) from neuraminidase__InfluenzaA__AHC62137
augaaccccaaccagaagaucaucaccaucggcuccgucucccucaccaucuccaccaucugcuucuucaugcagaucgccauccucaucaccaccgucacccuccacuucaagcaguacgaguucaacuccccccccaacaaccaggucaugcucugcgagcccaccaucaucgagcgcaacaucaccgagaucgucuaccucaccaacaccaccaucgagaaggagaucugccccaagcucgccgaguaccgcaacugguccaagccccagugcgacaucaccggcuucgcccccuucuccaaggacaacuccauccgccucuccgccggcggcgacaucugggucacccgcgagcccuacgucuccugcgaccccgacaagugcuaccaguucgcccucggccagggcaccacccucaacaacguccacuccaacaacaccguccgcgaccgcacccccuaccgcacccuccucaugaacgagcucggcguccccuuccaccucggcaccaagcaggucugcaucgccugguccuccuccuccugccacgacggcaaggccuggcuccacgucugcaucaccggcgacgacaagaacgccaccgccuccuucaucuacaacggccgccucgucgacuccgucgucuccugguccaaggagauccuccgcacccaggaguccgagugcgucugcaucaacggcaccugcaccgucgucaugaccgacggcuccgccuccggcaaggccgacaccaagauccucuucaucgaggagggcaagaucguccacaccuccacccucuccggcuccgcccagcacgucgaggagugcuccugcuacccccgcuaccccggcguccgcugcgucugccgcgacaacuggaagggcuccaaccgccccaucgucgacaucaacaucaaggaccacuccaucgucuccuccuacgucugcuccggccucgucggcgacaccccccgcaagaacgacuccuccuccuccucccacugccucgaccccaacaacgaggagggcggccacggcgucaagggcugggccuucgacgacggcaacgacgucuggaugggccgcaccaucaacgagaccucccgccucggcuacgagaccuucaaggucaucgagggcugguccaaccccaaguccaagcuccagaucaaccgccaggucaucgucgaccgcggcgaccgcuccggcuacuccggcaucuucuccgucgagggcaaguccugcaucaaccgcugcuucuacgucgagcucauccgcggccgcaaggaggagaccgagguccucuggaccuccaacuccaucgucgucuucugcggcaccuccggcaccuacggcaccggcuccuggcccgacggcgccgaccucaaccucaugcccaucuga

SEQ ID NO: 120322 - RNA, 1410 nt, Artificial Sequence
  derived and/or modified CDS sequence (opt2) from neuraminidase__InfluenzaA__AHC62149
augaaccccaaccagaagaucaucaccaucggcuccgucucccucaccaucuccaccaucugcuucuucaugcagaucgccauccucaucaccaccgucacccuccacuucaagcaguacgaguucaacuccccccccaacaaccaggucaugcucugcgagcccaccaucaucgagcgcaacaucaccgagaucgucuaccucaccaacaccaccaucgagaaggagaucugccccaagcccgccgaguaccgcaacugguccaagccccagugcgacaucaccggcuucgcccccuucuccaaggacaacuccauccgccucuccgccggcggcgacaucugggucacccgcgagcccuacgucuccugcgaccccgacaagugcuaccaguucgcccucggccagggcaccacccucaacaacguccacuccaacaacaccguccgcgaccgcacccccuaccgcacccuccucaugaacgagcucggcguccccuuccaccucggcaccaagcaggucugcaucgccugguccuccuccuccugccacgacggcaaggccuggcuccacgucugcaucaccggcgacgacaagaacgccaccgccuccuucaucuacaacggccgccucgucgacuccgucgucuccugguccaaggagauccuccgcacccaggaguccgagugcgucugcaucaacggcaccugcaccgucgucaugaccgacggcuccgccuccggcaaggccgacaccaagauccucuucaucgaggagggcaagaucguccacaccuccacccucuccggcuccgcccagcacgucgaggagugcuccugcuacccccgcuaccccggcguccgcugcgucugccgcgacaacuggaagggcuccaaccgccccaucgucgacaucaacauccgcgaccacuccaucgucuccuccuacgucugcuccggccucgucggcgacaccccccgcaagaacgacuccuccuccuccucccacugccucgaccccaacaacgaggagggcggccacggcgucaagggcugggccuucgacgacggcaacgacgucuggaugggccgcaccaucaacgagaccucccgccucggcuacgagaccuucaaggucaucgagggcugguccaaccccaaguccaagcuccagaucaaccgccaggucaucgucgaccgcggcgaccgcuccggcuacuccggcaucuucuccgucgagggcaaguccugcaucaaccgcugcuucuacgucgagcucauccgcggccgcaaggaggagaccgagguccucuggaccuccaacuccaucgucgucuucugcggcaccuccggcaccuacggcaccggcuccuggcccgacggcgccgaccucaaccucaugcccaucuga

SEQ ID NO: 120323 - RNA, 1410 nt, Artificial Sequence; identical to SEQ ID NO: 120043
  derived and/or modified CDS sequence (opt2) from neuraminidase__InfluenzaA__AHC62161

SEQ ID NO: 120324 - RNA, 1410 nt, Artificial Sequence
  derived and/or modified CDS sequence (opt2) from neuraminidase__InfluenzaA__AHC62173
augaaccccaaccagaagaucaucaccaucggcuccgucucccucaccaucuccaccaucugcuucuucaugcagaucgccauccucaucaccaccgucacccuccacuucaagcagugcgaguucaacuccccccccaacaaccaggucaugcucugcgagcccaccaucaucgagcgcaacaucaccgagaucgucuaccucaccaacaccaccaucgagaaggagaucugccccaagcucgccgaguaccgcaacugguccaagccccagugcgacaucaccggcuucgcccccuucuccaaggacaacuccauccgccucuccgccggcggcgacaucugggucacccgcgagcccuacgucuccugcgaccccaacaagugcuaccaguucgcccucggccagggcaccacccucaacaacguccacuccaacaacaccguccgcgaccgcacccccuaccgcacccuccucaugaacgagcucggcguccccuuccaccucggcaccaagcaggucugcaucgccugguccuccuccuccugccacgacggcaaggccuggcuccacgucugcaucaccggcgacgacaagaacgccaccgccuccuucaucuacaacggcaagcucgucgacuccgucgucuccugguccaaggagauccuccgcacccaggaguccgagugcgucugcaucaacggcaccugcaccgucgucaugaccgacggcuccgccuccggcaaggccgacaccaagauccucuucaucgaggagggcaagaucguccacaccuccacccucuccggcuccgcccagcacgucgaggagugcuccugcuacccccgcuaccccggcguccgcugcgucugccgcgacaacuggaagggcuccaaccgccccaucgucgacaucaacaucaaggaccacuccaucgucuccuccuacgucugcuccggccucgucggcgacaccccccgcaagaacgacuccuccuccuccucccacugccucgaccccaacaacgaggagggcggccacggcgucaagggcugggccuucgacgacggcaacgacgucuggaugggccgcaccaucaacgagaccucccgccucggcuacgagaccuucaaggucaucgagggcugguccaaccccaaguccaagcuccagaucaaccgccaggucaucgucgaccgcggcaaccgcuccggcuacuccggcaucuucuccgucgagggcaaguccugcaucaaccgcugcuucuacgucgagcucauccgcggccgcaaggaggagaccgagguccucuggaccuccaacuccaucgucgucuucugcggcaccuccggcaccuacggcaccggcuccuggcccgacggcgccgaccucaaccucaugcccaucuga

SEQ ID NO: 120325 - RNA, 1410 nt, Artificial Sequence; identical to SEQ ID NO: 120056
  derived and/or modified CDS sequence (opt2) from neuraminidase__InfluenzaA__AHC62185

SEQ ID NO: 120326 - RNA, 1410 nt, Artificial Sequence; identical to SEQ ID NO: 118958
  derived and/or modified CDS sequence (opt2) from neuraminidase__InfluenzaA__AHC62197

SEQ ID NO: 120327 - RNA, 1410 nt, Artificial Sequence
  derived and/or modified CDS sequence (opt2) from neuraminidase__InfluenzaA__AHC62209
augaaccccaaccagaagaucaucaccaucggcuccgucucccucaccaucuccaccaucugcuucuucaugcagaucgccauccucaucaccaccgucacccuccacuucaagcaguacgaguucaacuccccccccaacaaccaggucaugcucugcgagcccaccaucaucgagcgcaacaucaccgagaucgucuaccucaccaacaccaccaucgagaaggagaucugccccaagcccgccgaguaccgcaacugguccaagccccagugcgacaucaccggcuucgcccccuucuccaaggacaacuccauccgccucuccgccggcggcgacaucugggucacccgcgagcccuacgucuccugcgaccccgacaagugcuaccaguucgcccucggccagggcaccacccucaacaacguccacuccaacaacaccguccgcgaccgcacccccuaccgcacccuccucaugaacgagcucggcguccccuuccaccucggcaccaagcaggucugcaucgccugguccuccuccuccugccacgacggcaaggccuggcuccacgucugcaucaccggcgacgacaagaacgccaccgccuccuucaucuacaacggccgccucgucgacuccgucgucuccugguccaaggagauccuccgcacccaggaguccgagugcgucugcaucaacggcaccugcaccgucgucaugaccgacggcuccgccuccggcaaggccgacaccaagauccucuucaucgaggagggcaagaucguccacaccuccacccucuccggcuccgcccagcacgucgaggagugcuccugcuacccccgcuaccccggcguccgcugcgucugccgcgacaacuggaagggcuccaaccgccccaucgucgacaucaacaucaagaaccacuccaucgucuccuccuacgucugcuccggccucgucggcgacaccccccgcaagaacgacuccuccuccuccucccacugccucgaccccaacaacgaggagggcggccacggcgucaagggcugggccuucgacgacggcaacgacgucuggaugggccgcaccaucaacgagaccucccgccucggcuacgagaccuucaaggucaucgagggcugguccaaccccaaguccaagcuccagaucaaccgccaggucaucgucgaccgcggcgaccgcuccggcuacuccggcaucuucuccgucgagggcaaguccugcaucaaccgcugcuucuacgucgagcucauccgcggccgcaaggaggagaccgagguccucuggaccuccaacuccaucgucgucuucugcggcaccuccggcaccuacggcaccggcuccuggcccgacggcgccgaccucaaccucaugcccaucuga

SEQ ID NO: 120328 - RNA, 1410 nt, Artificial Sequence; identical to SEQ ID NO: 120011
  derived and/or modified CDS sequence (opt2) from neuraminidase__InfluenzaA__AHC62221

SEQ ID NO: 120329 - RNA, 1410 nt, Artificial Sequence; identical to SEQ ID NO: 115554
  derived and/or modified CDS sequence (opt2) from neuraminidase__InfluenzaA__AHC62233

SEQ ID NO: 120330 - RNA, 1410 nt, Artificial Sequence; identical to SEQ ID NO: 120007
  derived and/or modified CDS sequence (opt2) from neuraminidase__InfluenzaA__AHC62245

SEQ ID NO: 120331 - RNA, 1410 nt, Artificial Sequence
  derived and/or modified CDS sequence (opt2) from neuraminidase__InfluenzaA__AHC62257
augaaccccaaccagaagaucaucaccaucggcuccgucucccucaccaucuccaccaucugcuucuucaugcagaucgccauccucaucaccaccgucacccuccacuucaagcaguacgaguucaacuccccccccaacaaccaggucaugcucugcgagcccaccaucaucgagcgcaacaucaccgagaucgucuaccucaccaacaccaccaucgagaaggagaucugccccaagcccgccgaguaccgcaacugguccaagccccagugcgacaucaccggcuucgcccccuucuccaaggacaacuccauccgccucuccgccggcggcgacaucugggucacccgcgagcccuacgucuccugcgaccccgacaagugcuaccaguucgcccucggccagggcaccacccucaacaacguccacuccaacaacaccguccgcgaccgcacccccuaccgcacccuccucaugaacgagcucggcguccccuuccaccucggcaccaagcaggucugcaucgccugguccuccuccuccugccacgacggcaaggccuggcuccacgucugcaucaccggcgacgacaagaacgccaccgccuccuucaucuacaacggccgccucgucgacuccgucgucuccugguccaaggagauccuccgcacccaggaguccgagugcgucugcaucaacggcaccugcaccgucgucaugaccgacggcuccgccuccggcaaggccgacaccaagauccucuucaucgaggagggcaagaucguccacaccuccacccucuccggcuccgcccagcacgucgaggagugcuccugcuacccccgcuaccccggcguccgcugcgucugccgcgacaacuggaagggcuccaaccgccccaucgucgacaucaacaucaaggaccacuccaucgucuccuccuacgucugcuccggccucgucggcgacaccccccgcaagaacgacuccuccuccuccucccacugccucgaccccaacaacgaggagggcggccacggcgucaagggcugggccuucgacgacggcaacgacgucuggaugggccgcaccaucaacgagaccucccgccucggcuacgagaccuucaaggucaucgagggcugguccaaccccaaguccaagcuccagaucaaccgccaggucaucgucggccgcggcgaccgcuccggcuacuccggcaucuucuccgucgagggcaaguccugcaucaaccgcugcuucuacgucgagcucauccgcggccgcaaggaggagaccgagguccucuggaccuccaacuccaucgucgucuucugcggcaccuccggcaccuacggcaccggcuccuggcccgacggcgccgaccucaaccucaugcccaucuga

SEQ ID NO: 120332 - RNA, 1410 nt, Artificial Sequence; identical to SEQ ID NO: 120084
  derived and/or modified CDS sequence (opt2) from neuraminidase__InfluenzaA__AHC62269

SEQ ID NO: 120333 - RNA, 1410 nt, Artificial Sequence; identical to SEQ ID NO: 120056
  derived and/or modified CDS sequence (opt2) from neuraminidase__InfluenzaA__AHC62281

SEQ ID NO: 120334 - RNA, 1410 nt, Artificial Sequence; identical to SEQ ID NO: 120011
  derived and/or modified CDS sequence (opt2) from neuraminidase__InfluenzaA__AHC62293

SEQ ID NO: 120335 - RNA, 1410 nt, Artificial Sequence; identical to SEQ ID NO: 115554
  derived and/or modified CDS sequence (opt2) from neuraminidase__InfluenzaA__AHC62305

SEQ ID NO: 120336 - RNA, 1410 nt, Artificial Sequence; identical to SEQ ID NO: 120007
  derived and/or modified CDS sequence (opt2) from neuraminidase__InfluenzaA__AHC62317

SEQ ID NO: 120337 - RNA, 1410 nt, Artificial Sequence
  derived and/or modified CDS sequence (opt2) from neuraminidase__InfluenzaA__AHC62329
augaaccccaaccagaagaucaucaccaucggcuccgucucccucaccaucuccaccaucugcuucuucaugcagaucgccauccucaucaccaccgucacccuccacuucaagcaguacgaguucaacuccccccccaacaaccaggucaugcucugcgagcccaccaucaucgagcgcaacaucaccgagaucgucuaccucaccaacaccaccaucgagaaggagaucugccccaagcccgccgaguaccgcaacugguccaagccccagugcgacaucaccggcuucgcccccuucuccaaggacaacuccauccgccucuccgccggcggcgacaucugggucacccgcgagcccuacgucuccugcgaccccgacaagugcuaccaguucgcccucggccagggcaccacccucaacaacguccacuccaacaacaccguccgcgaccgcacccccuaccgcacccuccucaugaacgagcucggcguccccuuccaccucggcaccaagcaggucugcaucgccugguccuccuccuccugccacgacggcaaggccuggcuccacgucugcaucaccggcgacgacaagaacgccaccgccuccuucaucuacaacggccgccucgucgacuccgucgucuccugguccaaggagauccuccgcacccaggaguccgagugcgucugcaucaacggcaccugcaccgucgucaugaccgacggcuccgccuccggcaaggccgacaccaagauccucuucaucgaggagggcaagaucguccacaccuccacccucuccggcuccgcccagcacgucgaggagugcuccugcuacccccgcuaccccggcguccgcugcgucugccgcgacaacuggaagggcuccaaccgccccaucgucgacaucaacaucaaggaccacuccaucgucuccuccuacgucugcuccggccucgucggcgacaccccccgcaagaacgacuccuccuccuccucccacugccucgaccccaacaacgaggagggcggccacggcgucaagggcugggccuucgacgacggcaacgacgucuggaugggccgcaccaucaacgagaccucccgccucggcuacgagaccuucaaggucaucgagggcugguccaaccccaaguccaagcuccagaucaaccgccaggucaucgccgaccgcggcgaccgcuccggcuacuccggcaucuucuccgucgagggcaaguccugcaucaaccgcugcuucuacgucgagcucauccgcggccgcaaggaggagaccgagguccucuggaccuccaacuccaucgucgucuucugcggcaccuccggcaccuacggcaccggcuccuggcccgacggcgccgaccucaaccucaugcccaucuga

SEQ ID NO: 120338 - RNA, 1410 nt, Artificial Sequence; identical to SEQ ID NO: 120007
  derived and/or modified CDS sequence (opt2) from neuraminidase__InfluenzaA__AHC62341

SEQ ID NO: 120339 - RNA, 1410 nt, Artificial Sequence
  derived and/or modified CDS sequence (opt2) from neuraminidase__InfluenzaA__AHC62353
augaaccccaaccagaagaucaucaccaucggcuccgucucccucaccaucuccaccaucugcuucuucaugcagaucgccauccucaucaccaccgucacccuccacuucaagcaguacgaguucaacuccccccccaacaaccaggucaugcucugcgagcccaccaucaucgagcgcaacaucaccgagaucgucuaccucaccaacaccaccaucgagaaggagaucugccccaagcucgccgaguaccgcaacugguccaagccccagugcgacaucaccggcuucgcccccuucuccaaggacaacuccauccgccucuccgccggcggcgacaucugggucacccgcgagcccuacgucuccugcgaccccgacaagugcuaccaguucgcccucggccagggcaccacccucaacaacguccacuccaacaacaccguccgcgaccgcacccccuaccgcacccuccucaugaacgagcucggcguccccuuccaccucggcaccaagcaggucugcaucgccugguccuccuccuccugccacgacggcaaggccuggcuccacgucugcaucaccggcgacgacaagaacgccaccgccuccuucaucuacaacggccgccucgucgacuccgucgucuccugguccaaggagauccuccgcacccaggaguccgagugcgucugcaucaacggcaccugcaccgucgucaugaccgacggcuccgccuccggcaaggccgacaccaagauccucuucaucgaggagggcaagaucguccacaccuccacccucuccggcuccgcccagcacgucgaggagugcuccugcuacccccgcuaccccggcguccgcugcgucugccgcgacaacuggaagggcuccaaccgccccaucgucgacaucaacaucaaggaccacuccaucgucuccuccuacgucugcuccggccucgucggcgacaccccccgcaagaccgacuccuccuccuccucccacugccucgaccccaacaacgaggagggcggccacggcgucaagggcugggccuucgacgacggcaacgacgucuggaugggccgcaccaucaacgagaccucccgccucggcuacgagaccuucaaggucaucgagggcugguccaaccccaaguccaagcuccagaucaaccgccaggucaucgucgaccgcggcaaccgcuccggcuacuccggcaucuucuccgucgagggcaaguccugcaucaaccgcugcuucuacgucgagcucauccgcggccgcaaggaggagaccgagguccucuggaccuccaacuccaucgucgucuucugcggcaccuccggcaccuacggcaccggcuccuggcccgacggcgccgaccucaaccucaugcccaucuga

SEQ ID NO: 120340 - RNA, 1410 nt, Artificial Sequence; identical to SEQ ID NO: 120007
  derived and/or modified CDS sequence (opt2) from neuraminidase__InfluenzaA__AHC62365

SEQ ID NO: 120341 - RNA, 1410 nt, Artificial Sequence; identical to SEQ ID NO: 120224
  derived and/or modified CDS sequence (opt2) from neuraminidase__InfluenzaA__AHC62377

SEQ ID NO: 120342 - RNA, 1410 nt, Artificial Sequence; identical to SEQ ID NO: 120056
  derived and/or modified CDS sequence (opt2) from neuraminidase__InfluenzaA__AHC62389

SEQ ID NO: 120343 - RNA, 1410 nt, Artificial Sequence; identical to SEQ ID NO: 120056
  derived and/or modified CDS sequence (opt2) from neuraminidase__InfluenzaA__AHC62401

SEQ ID NO: 120344 - RNA, 1410 nt, Artificial Sequence; identical to SEQ ID NO: 120084
  derived and/or modified CDS sequence (opt2) from neuraminidase__InfluenzaA__AHC62413

SEQ ID NO: 120345 - RNA, 1410 nt, Artificial Sequence; identical to SEQ ID NO: 120142
  derived and/or modified CDS sequence (opt2) from neuraminidase__InfluenzaA__AHC62425

SEQ ID NO: 120346 - RNA, 1410 nt, Artificial Sequence; identical to SEQ ID NO: 115554
  derived and/or modified CDS sequence (opt2) from neuraminidase__InfluenzaA__AHC62437

SEQ ID NO: 120347 - RNA, 1410 nt, Artificial Sequence; identical to SEQ ID NO: 120056
  derived and/or modified CDS sequence (opt2) from neuraminidase__InfluenzaA__AHC62449

SEQ ID NO: 120348 - RNA, 1410 nt, Artificial Sequence; identical to SEQ ID NO: 120011
  derived and/or modified CDS sequence (opt2) from neuraminidase__InfluenzaA__AHC62461

SEQ ID NO: 120349 - RNA, 1410 nt, Artificial Sequence; identical to SEQ ID NO: 120007
  derived and/or modified CDS sequence (opt2) from neuraminidase__InfluenzaA__AHC62473

SEQ ID NO: 120350 - RNA, 1410 nt, Artificial Sequence; identical to SEQ ID NO: 118182
  derived and/or modified CDS sequence (opt2) from neuraminidase__InfluenzaA__AHC62485

SEQ ID NO: 120351 - RNA, 1410 nt, Artificial Sequence; identical to SEQ ID NO: 120056
  derived and/or modified CDS sequence (opt2) from neuraminidase__InfluenzaA__AHC62509

SEQ ID NO: 120352 - RNA, 1410 nt, Artificial Sequence
  derived and/or modified CDS sequence (opt2) from neuraminidase__InfluenzaA__AHC62521
augaaccccaaccagaagaucaucaccaucggcuccgucucccucaccaucuccaccaucugcuucuucaugcagaucgccauccucaucaccaccgucacccuccacuucaagcaguacgaguucaacuccccccccaacaaccaggucaugcucugcgagcccaccaucaucgagcgcaacaucaccgagaucgucuaccucaccaacaccaccaucgagaaggagaucugccccaagcucgccgaguaccgcaacugguccaagccccagugcgacaucaccggcuucgcccccuucuccaaggacaacuccauccgccucuccgccggcggcgacaucugggucacccgcgagcccuacgucuccugcgaccccaacaagugcuaccaguucgcccucggccagggcaccacccucaacaacguccacuccaacaacaccguccgcgaccgcacccccuaccgcacccuccucaugaacgagcucggcguccccuuccaccucggcaccaagcaggucugcaucgccugguccuccuccuccugccacgacggcaaggccuggcuccacgucugcaucaccggcgacgacaagaacgccaccgccuccuucaucuacaacggcaagcucgucgacuccgucgucuccugguccaaggagauccuccgcacccaggaguccgagugcgucugcaucaacggcaccugcaccgucgucaugaccgacggcuccgccuccggcaaggccgacaccaagauccucuucaucgaggagggcaagaucguccacaccuccacccucuccggcuccgcccagcacgucgaggagugcuccugcuacccccgcuaccccggcguccgcugcgucugccgcgacaacuggaagggcuccaaccgccccaucgucgacaucaacaucaaggaccacuccaucgucuccuccuacgucugcuccggccucgucggcgacaccccccgcaagaacgacuccuccuccuccucccacugccucgaccccaacaacgaggagggcggccacggcgucaagggcugggccuucgacgacggcaacgacgucuggaugggccgcaccaucaacgagaccucccgccucggcuacgagaccuucaaggucaucgagggcugguccaaccccaaguccaagcuccagaucaaccgccaggucaucgucgaccgcggcaaccgcuccggcuacuccggcaucuucuccgucgagggcaaguccugcaucaaccgcugcuucuacgucgagcucauccgcggccgcaaggaggagaccgagguccucuggaccuccaacuccaucaucgucuucugcggcaccuccggcaccuacggcaccggcuccuggcccgacggcgccgaccucaaccucaugcccaucuga

SEQ ID NO: 120353 - RNA, 1410 nt, Artificial Sequence
  derived and/or modified CDS sequence (opt2) from neuraminidase__InfluenzaA__AHC62533
augaaccccaaccagaagaucaucaccaucggcuccgucucccucaccaucuccaccaucugcuucuucaugcaggucgccauccucaucaccaccgucacccuccacuucaagcaguacgaguucaacuccccccccaacaaccaggucaugcucugcgagcccaccaucaucgagcgcaacaucaccgagauccucuaccucaccaacaccaccaucgagaaggagaucugccccaagcucgccgaguaccgcaacugguccaagccccagugcgacaucaccggcuucgcccccuucuccaaggacaacuccauccgccucuccgccggcggcgacaucugggucacccgcgagcccuacgucuccugcgaccccgacaagugcuaccaguucgcccucggccagggcaccacccucaacaacguccacuccaacaacaccguccgcgaccgcacccccuaccgcacccuccucaugaacgagcucggcguccccuuccaccucggcaccaagcaggucugcaucgccugguccuccuccuccugccacgacggcaaggccuggcuccacgucugcaucaccggcgacgacaagaacgccaccgccuccuucaucuacaacggcaagcucgucgacuccgucgucuccugguccaaggagauccuccgcacccaggaguccgagugcgucugcaucaacggcaccugcaccgucgucaugaccgacggcuccgccuccggcaaggccgacaccaagauccucuucaucgaggagggcaagaucguccacaccuccacccucuccggcuccgcccagcacgucgaggagugcuccugcuacccccgcuaccccggcguccgcugcgucugccgcgacaacuggaagggcuccaaccgccccaucgucgacaucaacaucaaggaccacuccaucgucuccuccuacgucugcuccggccucgucggcgacaccccccgcaagaacgacuccuccuccuccucccacugccucgaccccaacaacgaggagggcggcaacggcgucaagggcugggccuucgacgacggcaacgacgucuggaugggccgcaccaucaacgagaccucccgccucggcuacgagaccuucaaggucaucgagggcugguccaaccccaaguccaagcuccagaucaaccgccaggucaucgucgaccgcggcaaccgcuccggcuacuccggcaucuucuccgucgagggcaaguccugcaucaaccgcugcuucuacgucgagcucauccgcggccgcaaggaggagaccgagguccucuggaccuccaacuccaucgucgucuucugcggcaccuccggcaccuacggcaccggcuccuggcccgacggcgccgaccucaaccucaugcccaucuga

SEQ ID NO: 120354 - RNA, 1410 nt, Artificial Sequence; identical to SEQ ID NO: 120211
  derived and/or modified CDS sequence (opt2) from neuraminidase__InfluenzaA__AHC62545

SEQ ID NO: 120355 - RNA, 1410 nt, Artificial Sequence; identical to SEQ ID NO: 120056
  derived and/or modified CDS sequence (opt2) from neuraminidase__InfluenzaA__AHC62557

SEQ ID NO: 120356 - RNA, 1410 nt, Artificial Sequence; identical to SEQ ID NO: 120007
  derived and/or modified CDS sequence (opt2) from neuraminidase__InfluenzaA__AHC62569

SEQ ID NO: 120357 - RNA, 1410 nt, Artificial Sequence; identical to SEQ ID NO: 120056
  derived and/or modified CDS sequence (opt2) from neuraminidase__InfluenzaA__AHC62581

SEQ ID NO: 120358 - RNA, 1410 nt, Artificial Sequence
  derived and/or modified CDS sequence (opt2) from neuraminidase__InfluenzaA__AHC62593
augaaccccaaccagaagaucaucaccaucggcuccgucucccucaccaucuccaccaucugcuucuucaugcagaucgccauccucaucaccaccgucacccuccacuucaagcaguacgaguucaacuccccccccaacaaccaggucaugcucugcgagcccaccaucaucgagcgcaacaucaccgagaucgucuaccucaccaacaccaccaucgagaaggagaucugccccaagcucgccgaguaccgcaacugguccaagccccagugcgacaucaccggcuucgcccccuucuccaaggacaacuccauccgccucuccgccggcggcaacaucugggucacccgcgagcccuacgucuccugcgaccccgacaagugcuaccaguucgcccucggccagggcaccacccucaacaacguccacuccaacaacaccguccgcgaccgcacccccuaccgcacccuccucaugaacgagcucggcguccccuuccaccucggcaccaagcaggucugcaucgccugguccuccuccuccugccacgacggcaaggccuggcuccacgucugcaucaccggcgacgacaagaacgccaccgccuccuucaucuacaacggccgccucgucgacuccgucgucuccugguccaaggagauccuccgcacccaggaguccgagugcgucugcaucaacggcaccugcaccgucgucaugaccgacggcuccgccuccggcaaggccgacaccaagauccucuucaucgaggagggcaagaucguccacaccuccacccucuccggcuccgcccagcacgucgaggagugcuccugcuacccccgcuaccccggcguccgcugcgucugccgcgacaacuggaagggcuccaaccgccccaucgucgacaucaacaucaaggaccacuccaucgucuccuccuacgucugcuccggccucgucggcgacaccccccgcaagaacgacuccuccuccuccucccacugccucgaccccaacaacgaggagggcggccacggcgucaagggcugggccuucgacgacggcaacgacgucuggaugggccgcaccaucaacgagaccucccgccucggcuacgagaccuucaaggucaucgagggcugguccaaccccaaguccaagcuccagaucaaccgccaggucaucgucgaccgcggcaaccgcuccggcuacuccggcaucuucuccgucgagggcaaguccugcaucaaccgcugcuucuacgucgagcucauccgcggccgcaaggaggagaccgagguccucuggaccuccaacuccaucgucgucuucugcggcaccuccggcaccuacggcaccggcuccuggcccgacggcgccgaccucaaccucaugcccaucuga

SEQ ID NO: 120359 - RNA, 1410 nt, Artificial Sequence; identical to SEQ ID NO: 120043
  derived and/or modified CDS sequence (opt2) from neuraminidase__InfluenzaA__AHC62605

SEQ ID NO: 120360 - RNA, 1410 nt, Artificial Sequence
  derived and/or modified CDS sequence (opt2) from neuraminidase__InfluenzaA__AHC62617
augaaccccaaccagaagaucaucaccaucggcuccgucucccucaccaucuccaccaucugcuucuucaugcagaucgccauccucaucaccaccgucacccuccacuucaagcaguacgaguucaacuccccccccaacaaccaggucaugcgcugcgagcccaccaucaucgagcgcaacaucaccgagaucgucuaccucaccaacaccaccaucgagaaggagaucugccccaagcucgccgaguaccgcaacugguccaagccccagugcgacaucaccggcuucgcccccuucuccaaggacaacuccauccgccucuccgccggcggcgacaucugggucacccgcgagcccuacgucuccugcgaccccaacaagugcuaccaguucgcccucggccagggcaccacccucaacaacguccacuccaacaacaccguccgcgaccgcacccccuaccgcacccuccucaugaacgagcucggcguccccuuccaccucggcaccaagcaggucugcaucgccugguccuccuccuccugccacgacggcaaggccuggcuccacgucugcaucaccggcgacgacaagaacgccaccgccuccuucaucuacaacggcaagcucgucgacuccgucgucuccugguccaaggagauccuccgcacccaggaguccgagugcgucugcaucaacggcaccugcaccgucgucaugaccgacggcuccgccuccggcaaggccgacaccaagauccucuucaucgaggagggcaagaucguccacaccuccacccucuccggcuccgcccagcacgucgaggagugcuccugcuacccccgcuaccccggcguccgcugcgucugccgcgacaacuggaagggcuccaaccgccccaucgucgacaucaacaucaaggaccacuccaucgucuccuccuacgucugcuccggccucgucggcgacaccccccgcaagaacgacuccuccuccuccucccacugccucgaccccaacaacgaggagggcggccacggcgucaagggcugggccuucgacgacggcaacgacgucuggaugggccgcaccaucaacgagaccucccgccucggcuacgagaccuucaaggucaucgagggcugguccaaccccaaguccaagcuccagaucaaccgccaggucaucgucgaccgcggcaaccgcuccggcuacuccggcaucuucuccgucgagggcaaguccugcaucaaccgcugcuucuacgucgagcucauccgcggccgcaaggaggagaccgagguccucuggaccuccaacuccaucgucgucuucugcggcaccuccggcaccuacggcaccggcuccuggcccgacggcgccgaccucaaccucaugcccaucuga

SEQ ID NO: 120361 - RNA, 1410 nt, Artificial Sequence; identical to SEQ ID NO: 120011
  derived and/or modified CDS sequence (opt2) from neuraminidase__InfluenzaA__AHC62629

SEQ ID NO: 120362 - RNA, 1410 nt, Artificial Sequence
  derived and/or modified CDS sequence (opt2) from neuraminidase__InfluenzaA__AHC62641
augaaccccaaccagaagaucaucaccaucggcuccgucucccucaccaucuccaccgucugcuucuucaugcaggucgccauccucaucaccaccgucacccuccacuucaagcaguacgaguucaacuccccccccaacaaccaggucaugcucugcgagcccaccaucaucgagcgcaacaucaccgagauccucuaccucaccaacaccaccaucgagaaggagaucugccccaagcucgccgaguaccgcaacugguccaagccccagugcgacaucaccggcuucgcccccuucuccaaggacaacuccauccgccucuccgccggcggcgacaucugggucacccgcgagcccuacgucuccugcgaccccgacaagugcuaccaguucgcccucggccagggcaccacccucaacaacguccacuccaacaacaccguccgcgaccgcacccccuaccgcacccuccucaugaacgagcucggcguccccuuccaccucggcaccaagcaggucugcaucgccugguccuccuccuccugccacgacggcaaggccuggcuccacgucugcaucaccggcgacgacaagaacgccaccgccuccuucaucuacaacggcaagcucgucgacuccgucgucuccugguccaaggagauccuccgcacccaggaguccgagugcgucugcaucaacggcaccugcaccgucgucaugaccgacggcuccgccuccggcaaggccgacaccaagauccucuucaucgaggagggcaagaucguccacaccuccacccucuccggcuccgcccagcacgucgaggagugcuccugcuacccccgcuaccccggcguccgcugcgucugccgcgacaacuggaagggcuccaaccgccccaucgucgacaucaacaucaaggaccacuccaucgucuccuccuacgucugcuccggccucgucggcgacaccccccgcaagaacgacuccuccuccuccucccacugccucgaccccaacaacgaggagggcggccacggcgucaagggcugggccuucgacgacggcaacgacgucuggaugggccgcaccaucaacgagaccucccgccucggcuacgagaccuucaaggucaucgagggcugguccaaccccaaguccaagcuccagaucaaccgccaggucaucgucgaccgcggcaaccgcuccggcuacuccggcaucuucuccgucgagggcaaguccugcaucaaccgcugcuucuacgucgagcucauccgcggccgcaaggaggagaccgagguccucuggaccuccaacuccaucgucgucuucugcggcaccuccggcaccuacggcaccggcuccuggcccgacggcgccgaccucaaccucaugcccaucuga

SEQ ID NO: 120363 - RNA, 1410 nt, Artificial Sequence; identical to SEQ ID NO: 120011
  derived and/or modified CDS sequence (opt2) from neuraminidase__InfluenzaA__AHC62653

SEQ ID NO: 120364 - RNA, 1410 nt, Artificial Sequence; identical to SEQ ID NO: 120011
  derived and/or modified CDS sequence (opt2) from neuraminidase__InfluenzaA__AHC62665

SEQ ID NO: 120365 - RNA, 1410 nt, Artificial Sequence
  derived and/or modified CDS sequence (opt2) from neuraminidase__InfluenzaA__AHC62677
augaaccccaaccagaagaucaucaccaucggcuccgucucccucaccaucuccaccaucugcuucuucaugcagaucgccauccucaucaccaccgucacccuccacuucaagcaguacgaguucaacuccccccccaacaaccaggucaugcucugcgagcccaccaucaucgagcgcaacaucaccgagaucgucuaccucaccaacaccaccaucgagaaggagaucugccccaagcucgccgaguaccgcaacugguccaagccccagugcgacaucaccggcuucgcccccuucuccaaggacaacuccauccgccucuccgccggcggcgacaucugggucacccgcgagcccuacgucuccugcgaccccaacaagugcuaccaguucgcccucggccagggcaccacccucaacaacguccacuccaacaacaccguccgcgaccgcacccccuaccgcacccuccucaugaacgagcucggcguccccuuccaccucggcaccaagcaggucugcaucgccugguccuccuccuccugccacgacggcaaggccuggcuccacgucugcaucaccggcgacgacaagaacgccaccgccuccuucaucuacaacggcaagcucgucgacuccgucgucuccugguccaaggagauccuccgcacccaggaguccgagugcgucugcaucaacggcaccugcaccgucgucaugaccgacggcuccgccuccggcaaggccgacaccaagauccucuucaucgaggagggcaagaucguccacaccuccacccucuccggcuccgcccagcacgucgaggagugcuccugcuacccccgcuaccccggcguccgcugcgucugccgcgacaacuggaagggcuccaaccgccccaucgucgacaucaacaucaaggaccacuccaucgucuccuccuacgucugcuccggccucgucggcgacaccccccgcaagaacgacaucuccuccuccucccacugccucgaccccaacaacgaggagggcggccacggcgucaagggcugggccuucgacgacggcaacgacgucuggaugggccgcaccaucaacgagaccucccgccucggcuacgagaccuucaaggucaucgagggcugguccaaccccaaguccaagcuccagaucaaccgccaggucaucgucgaccgcggcaaccgcuccggcuacuccggcaucuucuccgucgagggcaaguccugcaucaaccgcugcuucuacgucgagcucauccgcggccgcaaggaggagaccgagguccucuggaccuccaacuccaucgucgucuucugcggcaccuccggcaccuacggcaccggcuccuggcccgacggcgccgaccucaaccucaugcccaucuga

SEQ ID NO: 120366 - RNA, 1398 nt, Artificial Sequence
  derived and/or modified CDS sequence (opt2) from neuraminidase__InfluenzaA__AHF20560
augaaccccaaccagaagauccucugcaccuccgccaccgccaucaucaucggcgccaucaccguccucaucggcaucgccaaccucggccucaacaucggccuccaccucaagcccggcugcaacugcucccacucccagcccgagaccaccaacaccucccagaccaucaucaacaacuacuacaacgagaccaacaccaccaacauccagauggaggagcgcaccucccgcaacuucaacaaccucaccaagggccucugcaccaucaacuccuggcacaucuacggcaaggacaacgccguccgcaucggcgaguccuccgacguccucgucacccgcgagcccuacgucuccugcgaccccgacgagugccgcuucuacgcccucucccagggcaccaccauccgcggcaagcacuccaacggcaccauccacgaccgcucccaguaccgcgcccucaucuccuggccccucuccuccccccccaccgucuacaacucccgcgucgagugcaucggcugguccuccaccuccugccacgacggcaagucccgcauguccaucugcaucuccggccccaacaacaacgccuccgccgucgucugguacaaccgccgccccgucgccgagaucaacaccugggcccgcaacauccuccgcacccaggaguccgagugcgucugccacaacggcgucugccccgucgucuucaccgacggcuccgccaccggccccgccgacacccgcaucuacuacuucaaggagggcaagauccucaagugggagucccucaccggcaccgccaagcacaucgaggagugcuccugcuacggcgagcgcaccggcaucaccugcaccugccgcgacaacuggcagggcuccaaccgccccgucauccagaucgaccccgucgccaugacccacaccucccaguacaucugcucccccguccucaccgacaacccccgccccaacgaccccaacaucggcaagugcaacgaccccuaccccggcaacaacaacaacggcgucaagggcuucuccuaccucgacggcgccaacaccuggcucggccgcaccaucuccaccgccucccgcuccggcuacgagaugcucaagguccccaacgcccucaccgacgaccgcuccaagcccauccagggccagaccaucguccucaacgccgacugguccggcuacuccggcuccuucauggacuacugggccgagggcgacugcuaccgcgccugcuucuacgucgagcucauccgcggccgccccaaggaggacaaggucugguggaccuccaacuccaucgucuccaugugcuccuccaccgaguuccucgagcaguggaacuggcccgacggcgccaagaucgaguacuuccucuga

SEQ ID NO: 120367 - RNA, 1398 nt, Artificial Sequence; identical to SEQ ID NO: 119490
  derived and/or modified CDS sequence (opt2) from neuraminidase__InfluenzaA__AHF20570

SEQ ID NO: 120368 - RNA, 1413 nt, Artificial Sequence; identical to SEQ ID NO: 112668
  derived and/or modified CDS sequence (opt2) from neuraminidase__InfluenzaA__AHG96111

SEQ ID NO: 120369 - RNA, 1413 nt, Artificial Sequence; identical to SEQ ID NO: 112668
  derived and/or modified CDS sequence (opt2) from neuraminidase__InfluenzaA__AHG96123

SEQ ID NO: 120370 - RNA, 1413 nt, Artificial Sequence; identical to SEQ ID NO: 112668
  derived and/or modified CDS sequence (opt2) from neuraminidase__InfluenzaA__AHG96135

SEQ ID NO: 120371 - RNA, 1413 nt, Artificial Sequence; identical to SEQ ID NO: 112668
  derived and/or modified CDS sequence (opt2) from neuraminidase__InfluenzaA__AHG96147

SEQ ID NO: 120372 - RNA, 1413 nt, Artificial Sequence; identical to SEQ ID NO: 112668
  derived and/or modified CDS sequence (opt2) from neuraminidase__InfluenzaA__AHG96159

SEQ ID NO: 120373 - RNA, 1413 nt, Artificial Sequence; identical to SEQ ID NO: 112668
  derived and/or modified CDS sequence (opt2) from neuraminidase__InfluenzaA__AHG96171

SEQ ID NO: 120374 - RNA, 1413 nt, Artificial Sequence; identical to SEQ ID NO: 112668
  derived and/or modified CDS sequence (opt2) from neuraminidase__InfluenzaA__AHG96183

SEQ ID NO: 120375 - RNA, 1413 nt, Artificial Sequence; identical to SEQ ID NO: 112668
  derived and/or modified CDS sequence (opt2) from neuraminidase__InfluenzaA__AHG96195

SEQ ID NO: 120376 - RNA, 1413 nt, Artificial Sequence; identical to SEQ ID NO: 112668
  derived and/or modified CDS sequence (opt2) from neuraminidase__InfluenzaA__AHG96207

SEQ ID NO: 120377 - RNA, 1413 nt, Artificial Sequence; identical to SEQ ID NO: 112668
  derived and/or modified CDS sequence (opt2) from neuraminidase__InfluenzaA__AHG96219

SEQ ID NO: 120378 - RNA, 1413 nt, Artificial Sequence; identical to SEQ ID NO: 112668
  derived and/or modified CDS sequence (opt2) from neuraminidase__InfluenzaA__AHG96231

SEQ ID NO: 120379 - RNA, 1413 nt, Artificial Sequence; identical to SEQ ID NO: 112668
  derived and/or modified CDS sequence (opt2) from neuraminidase__InfluenzaA__AHG96243

SEQ ID NO: 120380 - RNA, 1413 nt, Artificial Sequence; identical to SEQ ID NO: 112668
  derived and/or modified CDS sequence (opt2) from neuraminidase__InfluenzaA__AHG96255

SEQ ID NO: 120381 - RNA, 1413 nt, Artificial Sequence; identical to SEQ ID NO: 112668
  derived and/or modified CDS sequence (opt2) from neuraminidase__InfluenzaA__AHG96267

SEQ ID NO: 120382 - RNA, 1413 nt, Artificial Sequence; identical to SEQ ID NO: 112668
  derived and/or modified CDS sequence (opt2) from neuraminidase__InfluenzaA__AHG96279

SEQ ID NO: 120383 - RNA, 1413 nt, Artificial Sequence; identical to SEQ ID NO: 112668
  derived and/or modified CDS sequence (opt2) from neuraminidase__InfluenzaA__AHG96291

SEQ ID NO: 120384 - RNA, 1413 nt, Artificial Sequence; identical to SEQ ID NO: 112668
  derived and/or modified CDS sequence (opt2) from neuraminidase__InfluenzaA__AHG96303

SEQ ID NO: 120385 - RNA, 1410 nt, Artificial Sequence; identical to SEQ ID NO: 112492
  derived and/or modified CDS sequence (opt2) from neuraminidase__InfluenzaA__AHG96362

SEQ ID NO: 120386 - RNA, 1410 nt, Artificial Sequence; identical to SEQ ID NO: 112492
  derived and/or modified CDS sequence (opt2) from neuraminidase__InfluenzaA__AHG96374

SEQ ID NO: 120387 - RNA, 1410 nt, Artificial Sequence; identical to SEQ ID NO: 112492
  derived and/or modified CDS sequence (opt2) from neuraminidase__InfluenzaA__AHG96386

SEQ ID NO: 120388 - RNA, 1413 nt, Artificial Sequence; identical to SEQ ID NO: 112668
  derived and/or modified CDS sequence (opt2) from neuraminidase__InfluenzaA__AHG96398

SEQ ID NO: 120389 - RNA, 1410 nt, Artificial Sequence; identical to SEQ ID NO: 112492
  derived and/or modified CDS sequence (opt2) from neuraminidase__InfluenzaA__AHG96410

SEQ ID NO: 120390 - RNA, 1410 nt, Artificial Sequence; identical to SEQ ID NO: 112492
  derived and/or modified CDS sequence (opt2) from neuraminidase__InfluenzaA__AHG96422

SEQ ID NO: 120391 - RNA, 1410 nt, Artificial Sequence; identical to SEQ ID NO: 112492
  derived and/or modified CDS sequence (opt2) from neuraminidase__InfluenzaA__AHG96434

SEQ ID NO: 120392 - RNA, 1410 nt, Artificial Sequence; identical to SEQ ID NO: 112492
  derived and/or modified CDS sequence (opt2) from neuraminidase__InfluenzaA__AHG96446

SEQ ID NO: 120393 - RNA, 1410 nt, Artificial Sequence; identical to SEQ ID NO: 112492
  derived and/or modified CDS sequence (opt2) from neuraminidase__InfluenzaA__AHG96458

SEQ ID NO: 120394 - RNA, 1410 nt, Artificial Sequence; identical to SEQ ID NO: 112492
  derived and/or modified CDS sequence (opt2) from neuraminidase__InfluenzaA__AHG96470

SEQ ID NO: 120395 - RNA, 1410 nt, Artificial Sequence; identical to SEQ ID NO: 112492
  derived and/or modified CDS sequence (opt2) from neuraminidase__InfluenzaA__AHG96482

SEQ ID NO: 120396 - RNA, 1410 nt, Artificial Sequence; identical to SEQ ID NO: 112492
  derived and/or modified CDS sequence (opt2) from neuraminidase__InfluenzaA__AHG96494

SEQ ID NO: 120397 - RNA, 1410 nt, Artificial Sequence; identical to SEQ ID NO: 112492
  derived and/or modified CDS sequence (opt2) from neuraminidase__InfluenzaA__AHG96506

SEQ ID NO: 120398 - RNA, 1413 nt, Artificial Sequence; identical to SEQ ID NO: 112668
  derived and/or modified CDS sequence (opt2) from neuraminidase__InfluenzaA__AHG96518

SEQ ID NO: 120399 - RNA, 1413 nt, Artificial Sequence; identical to SEQ ID NO: 112668
  derived and/or modified CDS sequence (opt2) from neuraminidase__InfluenzaA__AHG96530

SEQ ID NO: 120400 - RNA, 1413 nt, Artificial Sequence; identical to SEQ ID NO: 112668
  derived and/or modified CDS sequence (opt2) from neuraminidase__InfluenzaA__AHG96542

SEQ ID NO: 120401 - RNA, 1413 nt, Artificial Sequence; identical to SEQ ID NO: 112668
  derived and/or modified CDS sequence (opt2) from neuraminidase__InfluenzaA__AHG96554

SEQ ID NO: 120402 - RNA, 1413 nt, Artificial Sequence; identical to SEQ ID NO: 112668
  derived and/or modified CDS sequence (opt2) from neuraminidase__InfluenzaA__AHG96566

SEQ ID NO: 120403 - RNA, 1413 nt, Artificial Sequence; identical to SEQ ID NO: 112668
  derived and/or modified CDS sequence (opt2) from neuraminidase__InfluenzaA__AHG96578

SEQ ID NO: 120404 - RNA, 1413 nt, Artificial Sequence; identical to SEQ ID NO: 112668
  derived and/or modified CDS sequence (opt2) from neuraminidase__InfluenzaA__AHG96590

SEQ ID NO: 120405 - RNA, 1413 nt, Artificial Sequence; identical to SEQ ID NO: 112668
  derived and/or modified CDS sequence (opt2) from neuraminidase__InfluenzaA__AHG96602

SEQ ID NO: 120406 - RNA, 1413 nt, Artificial Sequence; identical to SEQ ID NO: 112668
  derived and/or modified CDS sequence (opt2) from neuraminidase__InfluenzaA__AHG96614

SEQ ID NO: 120407 - RNA, 1413 nt, Artificial Sequence; identical to SEQ ID NO: 112668
  derived and/or modified CDS sequence (opt2) from neuraminidase__InfluenzaA__AHG96626

SEQ ID NO: 120408 - RNA, 1413 nt, Artificial Sequence; identical to SEQ ID NO: 112668
  derived and/or modified CDS sequence (opt2) from neuraminidase__InfluenzaA__AHG96638

SEQ ID NO: 120409 - RNA, 1413 nt, Artificial Sequence; identical to SEQ ID NO: 112668
  derived and/or modified CDS sequence (opt2) from neuraminidase__InfluenzaA__AHG96650

SEQ ID NO: 120410 - RNA, 1413 nt, Artificial Sequence; identical to SEQ ID NO: 112668
  derived and/or modified CDS sequence (opt2) from neuraminidase__InfluenzaA__AHG96662

SEQ ID NO: 120411 - RNA, 1413 nt, Artificial Sequence; identical to SEQ ID NO: 112668
  derived and/or modified CDS sequence (opt2) from neuraminidase__InfluenzaA__AHG96674

SEQ ID NO: 120412 - RNA, 1413 nt, Artificial Sequence; identical to SEQ ID NO: 112668
  derived and/or modified CDS sequence (opt2) from neuraminidase__InfluenzaA__AHG96686

SEQ ID NO: 120413 - RNA, 1410 nt, Artificial Sequence; identical to SEQ ID NO: 112492
  derived and/or modified CDS sequence (opt2) from neuraminidase__InfluenzaA__AHG96698

SEQ ID NO: 120414 - RNA, 1410 nt, Artificial Sequence; identical to SEQ ID NO: 112492
  derived and/or modified CDS sequence (opt2) from neuraminidase__InfluenzaA__AHG96710

SEQ ID NO: 120415 - RNA, 1410 nt, Artificial Sequence; identical to SEQ ID NO: 112492
  derived and/or modified CDS sequence (opt2) from neuraminidase__InfluenzaA__AHG96722

SEQ ID NO: 120416 - RNA, 1410 nt, Artificial Sequence; identical to SEQ ID NO: 112492
  derived and/or modified CDS sequence (opt2) from neuraminidase__InfluenzaA__AHG96734

SEQ ID NO: 120417 - RNA, 1410 nt, Artificial Sequence; identical to SEQ ID NO: 112492
  derived and/or modified CDS sequence (opt2) from neuraminidase__InfluenzaA__AHG96746

SEQ ID NO: 120418 - RNA, 1410 nt, Artificial Sequence; identical to SEQ ID NO: 112492
  derived and/or modified CDS sequence (opt2) from neuraminidase__InfluenzaA__AHG96758

SEQ ID NO: 120419 - RNA, 1410 nt, Artificial Sequence; identical to SEQ ID NO: 112492
  derived and/or modified CDS sequence (opt2) from neuraminidase__InfluenzaA__AHG96770

SEQ ID NO: 120420 - RNA, 1410 nt, Artificial Sequence; identical to SEQ ID NO: 112492
  derived and/or modified CDS sequence (opt2) from neuraminidase__InfluenzaA__AHG96782

SEQ ID NO: 120421 - RNA, 1410 nt, Artificial Sequence; identical to SEQ ID NO: 112492
  derived and/or modified CDS sequence (opt2) from neuraminidase__InfluenzaA__AHG96794

SEQ ID NO: 120422 - RNA, 1410 nt, Artificial Sequence; identical to SEQ ID NO: 112492
  derived and/or modified CDS sequence (opt2) from neuraminidase__InfluenzaA__AHG96806

SEQ ID NO: 120423 - RNA, 1410 nt, Artificial Sequence; identical to SEQ ID NO: 112492
  derived and/or modified CDS sequence (opt2) from neuraminidase__InfluenzaA__AHG96818

SEQ ID NO: 120424 - RNA, 1410 nt, Artificial Sequence; identical to SEQ ID NO: 112492
  derived and/or modified CDS sequence (opt2) from neuraminidase__InfluenzaA__AHG96830

SEQ ID NO: 120425 - RNA, 1410 nt, Artificial Sequence; identical to SEQ ID NO: 112492
  derived and/or modified CDS sequence (opt2) from neuraminidase__InfluenzaA__AHG96842

SEQ ID NO: 120426 - RNA, 1410 nt, Artificial Sequence; identical to SEQ ID NO: 112492
  derived and/or modified CDS sequence (opt2) from neuraminidase__InfluenzaA__AHG96854

SEQ ID NO: 120427 - RNA, 1410 nt, Artificial Sequence; identical to SEQ ID NO: 112492
  derived and/or modified CDS sequence (opt2) from neuraminidase__InfluenzaA__AHG96866

SEQ ID NO: 120428 - RNA, 1410 nt, Artificial Sequence; identical to SEQ ID NO: 112492
  derived and/or modified CDS sequence (opt2) from neuraminidase__InfluenzaA__AHG96878

SEQ ID NO: 120429 - RNA, 1410 nt, Artificial Sequence; identical to SEQ ID NO: 112492
  derived and/or modified CDS sequence (opt2) from neuraminidase__InfluenzaA__AHG96890

SEQ ID NO: 120430 - RNA, 1410 nt, Artificial Sequence; identical to SEQ ID NO: 112492
  derived and/or modified CDS sequence (opt2) from neuraminidase__InfluenzaA__AHG96902

SEQ ID NO: 120431 - RNA, 1410 nt, Artificial Sequence; identical to SEQ ID NO: 112492
  derived and/or modified CDS sequence (opt2) from neuraminidase__InfluenzaA__AHG96914

SEQ ID NO: 120432 - RNA, 1410 nt, Artificial Sequence; identical to SEQ ID NO: 112492
  derived and/or modified CDS sequence (opt2) from neuraminidase__InfluenzaA__AHG96926

SEQ ID NO: 120433 - RNA, 1410 nt, Artificial Sequence; identical to SEQ ID NO: 112492
  derived and/or modified CDS sequence (opt2) from neuraminidase__InfluenzaA__AHG96938

SEQ ID NO: 120434 - RNA, 1410 nt, Artificial Sequence; identical to SEQ ID NO: 112492
  derived and/or modified CDS sequence (opt2) from neuraminidase__InfluenzaA__AHG96950

SEQ ID NO: 120435 - RNA, 1410 nt, Artificial Sequence; identical to SEQ ID NO: 112492
  derived and/or modified CDS sequence (opt2) from neuraminidase__InfluenzaA__AHG96962

SEQ ID NO: 120436 - RNA, 1410 nt, Artificial Sequence; identical to SEQ ID NO: 112492
  derived and/or modified CDS sequence (opt2) from neuraminidase__InfluenzaA__AHG96974

SEQ ID NO: 120437 - RNA, 1410 nt, Artificial Sequence; identical to SEQ ID NO: 112492
  derived and/or modified CDS sequence (opt2) from neuraminidase__InfluenzaA__AHG96986

SEQ ID NO: 120438 - RNA, 1410 nt, Artificial Sequence; identical to SEQ ID NO: 112492
  derived and/or modified CDS sequence (opt2) from neuraminidase__InfluenzaA__AHG96998

SEQ ID NO: 120439 - RNA, 1410 nt, Artificial Sequence; identical to SEQ ID NO: 112492
  derived and/or modified CDS sequence (opt2) from neuraminidase__InfluenzaA__AHG97010

SEQ ID NO: 120440 - RNA, 1410 nt, Artificial Sequence; identical to SEQ ID NO: 112492
  derived and/or modified CDS sequence (opt2) from neuraminidase__InfluenzaA__AHG97022

SEQ ID NO: 120441 - RNA, 1410 nt, Artificial Sequence; identical to SEQ ID NO: 112492
  derived and/or modified CDS sequence (opt2) from neuraminidase__InfluenzaA__AHG97034

SEQ ID NO: 120442 - RNA, 1410 nt, Artificial Sequence; identical to SEQ ID NO: 112492
  derived and/or modified CDS sequence (opt2) from neuraminidase__InfluenzaA__AHG97046

SEQ ID NO: 120443 - RNA, 1410 nt, Artificial Sequence
  derived and/or modified CDS sequence (opt2) from neuraminidase__InfluenzaA__AHH00872
augaaccccaaccagaagaucaucaccaucggcuccgucucccucaccaucgccaccaucugcuuccucaugcagaucgccauccucgucaccaccgucacccuccacuucaagcaguacgagugcaaccccccccccaacaaccaggucaugcucugcgagcccaccaucaucgagcgcaacaucaccgagaucgucuaccucaccaacaccaccaucgagaaggagaucugccccaagcucgccgaguaccgcaacugguccaagccccagugcaacaucaccggcuucgcccccuucuccaaggacaacuccauccgccucuccgccggcggcgacaucugggucacccgcgagcccuacgucuccugcgaccccgacaagugcuaccaguucgcccucggccagggcaccacccucaacaacggccacuccaacgacaccguccacgaccgcacccccuaccgcacccuccucaugaacgagcucggcguccccuuccaccucggcaccaagcaggucugcaucgccugguccuccuccuccugccacgacggcaaggccuggcuccacgucugcgucaccggcgacgacgagaacgccaccgccuccuucaucuacaacggccgccucgucgacuccaucggcuccugguccaagaagauccuccgcacccaggaguccgagugcgucugcaucaacggcaccugcaccgucaucaugaccgacggcuccgccuccggcaaggccgacaccaagauccucuucaucgaggagggcaagaucguccacaccuccccccucuccggcuccgcccagcacgucgaggagugcuccugcuacccccgcuaccccggcguccgcugcgucugccgcgacaacuggaagggcuccaaccgccccaucgucgacaucaacgucaaggacuacuccaucgucuccuccuacgucugcuccggccucgucggcgacaccccccgcaagaacgacuccuccuccuccucccacugccucgaccccaacaacgaggagggcggccacggcgucaagggcugggccuucgacgacggcaacgacgucuggaugggccgcaccaucuccgagaagucccgcuccggcuacgagaccuucaaggucaucgagggcugguccaagcccaacuccaagcuccagaucaaccgccaggucaucaucgaccgcggcaaccgcuccggcuacuccggcaucuucuccgucgagggcaaguccugcaucaaccgcugcuucuacgucgagcucauccgcggccgcaagcaggagaccgagguccucuggaccuccaacuccaucgucgucuucugcggcaccuccggcaccuacggcaccggcuccuggcccgacggcgccgaccucaaccucaugcccaucuga

SEQ ID NO: 120444 - RNA, 1416 nt, Artificial Sequence
  derived and/or modified CDS sequence (opt2) from neuraminidase__InfluenzaA__AHI43497
augaaccccaaccagaagcucuucgcccucuccggcgucgccaucgcccucuccauccucaaccuccucaucggcaucuccaacgucggccucaacaucucccuccaccucaagggcaagggccccaagcaggaggagaaccucaccugcaccaccaucaaccagaacaacaccaccgucgucgagaacaccuacgucaacaacaccaccaucaucaccaaggagaccgacuggaacacccccuccuaccuccuccucaacaagucccucugcaacgucgagggcugggucgucaucgccaaggacaacgccauccgcuucggcgaguccgagcagaucaucgucacccgcgagcccuacgucuccugcgaccccaccggcugcaagauguacgcccuccaccagggcaccaccauccgcaacaagcacuccaacggcaccauccacgaccgcaccgccuuccgcggccucaucuccaccccccucggcaccccccccaccgucuccaacuccggcuucaugugcgucggcugguccuccaccaccugccacgacggcaucggccgcaugaccaucugcauccagggcaacaacgacaacgccaccgccaccgucuacuacaacggccgccucaccaccaccaucaagaccugggcccgcaacauccuccgcacccaggaguccgagugcgucugccacaacggcaccugcgccgucgucaugaccgacggcuccgccuccucccaggccuacaccaaggucauguacuuccacaagggccucgucaucaaggaggaggcccuccgcggcuccgcccgccacaucgaggagugcuccugcuacggccacucccagcgcgucaccugcgucugccgcgacaacuggcagggcgccaaccgccccaucaucgagaucgacaugaacacccucgagcacaccucccgcuacgucugcaccggcauccucaccgacaccucccgccccggcgacaaguccuccggcgacugcuccaaccccaucaccggcucccccggcgcccagggcgucaagggcuucggcuuccucaacggcgacaacaccuggcucggccgcaccaucuccccccgcucccgcuccggcuucgagaugcucaagauccccaacgccggcaccgaccccaacucccgcaucgccgagcgccaggagaucgucgacaacaacaacugguccggcuacuccggcuccuucaucgacuacuggaacaacaacuccgagugcuacaaccccugcuucuacgucgagcucauccgcggccgccccgaggaggccaaguacgucugguggaccuccaacucccucaucgcccucugcggcucccccuuccccgucggcuccggcuccuuccccgacggcgcccagauccaguacuucuccuga

SEQ ID NO: 120445 - RNA, 1410 nt, Artificial Sequence
  derived and/or modified CDS sequence (opt2) from neuraminidase__InfluenzaA__AHJ57439
augaaccccaaccagaagaucaucaccaucggcuccgucucccucaucaucuccaccaucugcuucuucaugcaggucgccauccuccucaccaccgucacccuccacuucaagcaguacgaguucaacuccccccccaacaaccaggucaugcucugcgagcccaccaucaucgagcgcaacaucaccgagaucgucuaccucaccaacaccaccaucgagaaggagaucugccccaagcccgccgaguaccgcaacugguccaagccccagugcgacaucaccggcuucgcccccuucuccaaggacaacuccauccgccucuccgccggcggcgacaucugggucacccgcgagcccuacgucuccugcgaccccgacaagugcuaccaguucgcccucggccagggcaccacccucaacaacguccacuccaacaacaccguccgcgaccgcacccccuaccgcacccuccucaugaacgagcucggcguccccuuccaccucggcaccaagcaggucugcaucgccugguccuccuccuccugccacgacggcaaggccuggcuccacgucugcaucaccggcgacgacaagaacgccaccgccuccuucaucuacaacggccgccucgucgacuccgucgucuccugguccaaggacauccuccgcacccaggaguccgagugcgucugcaucaacggcaccugcaccgucgucaugaccgacggcuccgccuccggcaaggccgacaccaagauccucuucaucgaggagggcaagaucguccacaccuccacccucuccggcuccgcccagcacgucgaggagugcuccugcuacccccgcuaccccggcguccgcugcgucugccgcgacaacuggaagggcuccaaccgccccaucgucgacaucaacaucaaggaccacuccaucgucuccuccuacgucugcuccggccucgucggcgacaccccccgcaagaacgacuccuccuccuccucccacugccucgaccccaacaacgaggagggcggccacggcgucaagggcugggccuucgacgacggcaacgacgucuggaugggccgcaccaucaacgagaccucccgccucggcuacgagaccuucaaggucaucgagggcugguccaaccccaaguccaagcuccagaucaaccgccaggucaucgucgaccgcggcaaccgcuccggcuacuccggcaucuucuccgucgagggcaaguccugcaucaaccgcugcuucuacgucgagcucauccgcggccgcaaggaggagaccgagguccucuggaccuccaacuccaucgucgucuucugcggcaccuccggcaccuacggcaccggcuccuggcccgacggcgccgacaucaaccucaugcccaucuga

SEQ ID NO: 120446 - RNA, 1410 nt, Artificial Sequence
  derived and/or modified CDS sequence (opt2) from neuraminidase__InfluenzaA__AHJ57440
augaaccccaaccagaagaucaucaccaucggcuccgucucccucaucaucuccaccaucugcuucuucaugcagaucgccauccucaucaccaccgucacccuccacuucaagcaguacgaguucaacuccccccccaacaaccagaugaugcucugcgagcccaccaucaucgagcgcaacaucaccgagaucgucuaccucaccaacaccaccaucgagaaggagaucugccccaagcccgccgaguaccgcaacugguccaagccccagugcgacaucaccggcuucgcccccuucuccaaggacaacuccauccgccucuccgccggcggcgacaucugggucacccgcgagcccuacgucuccugcgaccccgacaagugcuaccaguucgcccucggccagggcaccacccucaacaacggccacuccaacaacaccguccgcgaccgcacccccuaccgcacccuccucaugaacgagcucggcguccccuuccaccucggcaccaagcaggucugcaucgccugguccuccuccuccugccacgacggcaaggccuggcuccacgucugcaucaccggcgacgacaagaacgccaccgccuccuucaucuacaacggccgccucgucgacuccgucgucuccugguccaaggagauccuccgcacccaggaguccgagugcgucugcaucaacggcaccugcaccgucgucaugaccgacggcuccgccuccggcaaggccgacaccaagauccucuucaucgaggagggcaagaucguccacaccuccacccucuccggcuccgcccagcacgucgaggagugcuccugcuacccccgcuaccccggcguccgcugcgucugccgcgacaacuggaagggcuccaaccgccccaucgucgacaucaacaucaaggaccacuccaucgucuccuccuacgucugcuccggccucgucggcgacaccccccgcaagaacgacuccuccuccuccucccacugccucgaccccaacaacgaggagggcggccacggcgucaagggcugggccuucgacgacggcaacgacgucuggaugggccgcaccaucaacgagaccucccgccucggcuacgagaccuucaaggucaucgagggcugguccaaccccaaguccaagcuccagaucaaccgccaggucaucgucgaccgcggcgaccgcuccggcuacuccggcaucuucuccgucgagggcaaguccugcaucaaccgcugcuucuacgucgagcucauccgcggccgcaaggaggagaccgagguccucuggaccuccaacuccaucgucgucuucugcggcaccuccggcaccuacggcaccggcuccuggcccgacggcgccgacaucaaccucaugcccaucuga

SEQ ID NO: 120447 - RNA, 1410 nt, Artificial Sequence
  derived and/or modified CDS sequence (opt2) from neuraminidase__InfluenzaA__AHJ57441
augaaccccaaccagaagaucaucaccaucggcuccgucucccucaucaucuccaccaucugcuucuucaugcagaucgccauccucaucaccaccgucacccuccacuucaagcaguacgaguucaacuccccccccaacaaccaggucaugcucugcgagcccaccaucaucgagcgcaacaagaccgagaucgucuaccucaccaacaccaccaucgagaaggagaucugccccaagcccgccgaguaccgcaacugguccaagccccagugcgacaucaccggcuucgcccccuucuccaaggacaacuccauccgccucuccgccggcggcgacaucugggucacccgcgagcccuacgucuccugcgaccccgacaagugcuaccaguucgcccucggccagggcaccacccucaacaacguccacuccaacaacaccguccacgaccgcacccccuaccgcacccuccucaugaacgagcucggcguccccuuccaccucggcaccaagcaggucugcaucgccugguccuccuccuccugccacgacggcaaggccuggcuccacgucugcaucaccggcgacgacaagaacgccaccgccuccuucaucuacaacggccgccucgucgacuccgucgucuccugguccaaggagauccuccgcacccaggaguccgagugcgucugcaucaacggcaccugcaccgucgucaugaccgacggcuccgccuccggcaaggccgacaccaagauccucuucaucgaggagggcaagaucguccacaccuccacccucuccggcuccgcccagcacgucgaggagugcuccugcuacccccgcuaccccggcguccgcugcgucugccgcgacaacuggaagggcuccaaccgccccaucgucgacaucaacaucaaggaccacuccaucgucuccuccuacgucugcuccggccucgucggcgacaccccccgcaagaacgacuccuccuccuccucccacugccucgaccccaacaacgaggagggcggccacggcgucaagggcugggccuucgacgacggcaacgacgucuggaugggccgcaccaucaacgagaccucccgccucggcuacgagaccuucaaggucaucgagggcugguccaaccccaaguccaagcuccagaucaaccgccaggucaucgucgaccgcggcaaccgcuccggcuacuccggcaucuucuccgucgagggcaaguccugcaucaaccgcugcuucuacgucgagcucauccgcggccgcaaggaggagaccgagguccucuggaccuccaacuccaucgucgucuucugcggcaccuccggcaccuacggcaccggcuccuggcccgacggcgccgacaucaaccucaugcccaucuga

SEQ ID NO: 120448 - RNA, 1413 nt, Artificial Sequence
  derived and/or modified CDS sequence (opt2) from neuraminidase__InfluenzaA__AHJ57654
augaaccccaaccagaagaucaccugcaucuccgccaccggcaugacccucuccgucgucucccuccucaucggcaucgccaaccucggccucaacaucggccuccacuacaaggucuccgacuccaccaacaucaacauccccaacaugaacgagaccucccccaccaccaccaucaucaacaaccacccccagaacaacuucaccaacaucaccaacaucaucaugaacaagaacgaggagggcaacuuccucaaccucaccaagccccucugcgaggucaacuccuggcacauccucuccaaggacaacgccauccgcaucggcgagaacgcccacauccucgucacccgcgagcccuaccucuccugcgacccccagggcugccgcauguucgcccucucccagggcaccacccuccgcggccgccacgccaacggcaccauccacgaccgcucccccuuccgcgcccucaucuccugggagaugggccaggcccccucccccuacaacgcccgcgucgagugcaucggcugguccuccaccuccugccacgacggcaucucccgcauguccaucugcaucuccggccccaacaacaacgccuccgccgucgucugguacggcggccgccccgucaccgagauccccuccugggccggcaacauccuccgcacccaggaguccgagugcgucugccacggcggcaucugccccgucgucaugaccgacggccccgccaacaaccgcgccgagaccaagaucaucuacuucaaggagggcaagguccagaagaucgaggagcucaagggcaacgcccagcacaucgaggagugcuccugcuacggcgccuccggcaugaucaagugcaucugccgcgacaacuggaagggcgccaaccgccccgucaucaccaucgaccccgagaugaugacccacaccuccaaguaccucugcuccaagauccucaccgacaccucccgccccaacgaccccaccaacggcaacugcgacgcccccaucaccggcggcucccccgaccccggcgucaagggcuucgccuuccucgacggcgagaacuccuggcucggccgcaccaucuccaaggacucccgcuccggcuacgagaugcucaagauccccaacgccgagaccgacacccaguccggcgccaucucccaccagaucaucgucaacaaccagaacugguccggcuacuccggcgccuucaucgacuacugggccaacaaggagugcuucaaccccugcuucuacgucgagcucauccgcggccgccccaaggaguccuccguccucuggaccuccaacuccaucgucgcccucugcggcucccgcgagcgccucggcuccugguccuggcacgacggcgccgagaucaucuacuucaaguga

SEQ ID NO: 120449 - RNA, 1410 nt, Artificial Sequence
  derived and/or modified CDS sequence (opt2) from neuraminidase__InfluenzaA__AHJ57666
augaaccccaaccagaagaucaucaccaucggcuccgucucccucaccaucgccaccgucuccuuccucaugcagaucgccauccucaccaccaccgucacccuccacuucaagcacaacgagugcaacaugccccccaagaaccaggucauguccugcgagcccaucaucaucgagcgcaacaucaccgagaucgucuaccucaacaacaccaccgucgagaaggagaucugccccaaggucgucgaguaccgcaacugguccaagccccagugcaagaucaccggcuucgcccccuucuccaaggacaacuccauccgccucuccgccggcggcgacaucugggucacccgcgagcccuacgucuccugcggccucggcaagugcuaccaguucgcccucggccagggcaccacccucgacaacucccacuccaacggcaccauccacgaccgcaucccccaccgcacccuccucaugaacgagcucggcguccccuuccaccucggcaccaagcaggucugcaucgccugguccuccuccuccugccacgacggccgcgccuggcuccacaucugcaucaccggcgacgaccgcaacgccaccgccuccuucaucuacgacggcaugcucgucgacuccaucggcuccugguccaagaacauccuccgcacccaggaguccgagugcgucugcaucaacggcaccugcgccgucgucaugaccgacggcuccgccuccggcgucgccgacacccgcauccucuucauccgcgagggcaagaucguccacaucuccccccucuccggcuccgcccagcacaucgaggagugcuccugcuacccccgcuaccccgacguccgcugcgucugccgcgacaacuggaagggcuccaaccgccccgucaucgacaucaacauggccgacuacuccaucgacuccaacuacgucugcuccggccucgucggcgacaccccccgcaacgacgacaacuccuccuccuccaacugccgcgaccccaacaacgagcgcggcaaccccggcgucaagggcugggccuucgacgacggcaacgacgucuggaugggccgcaccaucaaccgcgacucccgcuccggcuacgagaccuuccgcgucaucggcggcuggaccaccgccaacuccaagucccagaucaaccgccaggucaucgucgacaacaacaacugguccggcuacuccggcgucuucuccgucgagggcaaguccugcaucaaccgcugcuucuacgucgagcucaucaagggccgcccccaggagccccgcgucugguggaccuccaacuccaucgucgucuucugcggcaccuccggcaccuacggcaccggcuccuggcccgacggcgccaacaucaacuucaugcccaucuga

SEQ ID NO: 120450 - RNA, 1413 nt, Artificial Sequence
  derived and/or modified CDS sequence (opt2) from neuraminidase__InfluenzaA__AHJ57677
augaaccccaaccagaagaucaccugcaucuccgccaccggcaugacccucuccgucgucuccaugcucaucggcaucgccaaccucggccucaacaucggccuccacuacaaggucuccgacuccaccaacaucaacauccccaacaugaacgagaccucccccaccaccaccgucaucaacaaccacccccagaacaacuucaccaacaucaccaacaucaucgucaacaagaacgaggaggagaacuuccucaaccucaccaagccccucugcgaggucaacuccuggcacauccucuccaaggacaacgccauccgcaucggcgagaacgcccacauccucgucacccgcgagcccuaccucuccugcgacccccagggcugccgcauguucgcccucucccagggcaccacccuccgcggccagcacgccaacggcaccauccacgaccgcucccccuuccgcgcccucaucuccugggagaugggccaggcccccucccccuacaacgcccgcgucgagugcaucggcugguccuccaccuccugccacgacggcaucucccgcauguccaucugcaucuccggccccaacaacaacgccuccgccgucgucugguacggcggccgccccgucaccgagauccccuccugggccggcaacauccuccgcacccaggaguccgagugcgucugccacggcggcaucugccccgucgucaugaccgacggccccgccaacaaccgcgccgagaccaagaucaucuacuucaaggagggcaagauccagaaggucgaggagcucaagggcaacgcccagcacaucgaggagugcuccugcuacggcgccuccggcaugaucaagugcaucugccgcgacaacuggaagggcgccaaccgccccgucaucaccaucgaccccgagaugaugacccacaccuccaaguaccucugcuccaagauccucaccgacaccucccgccccaacgaccccaccaacggcaacugcgacgcccccaucaccggcggcucccccgaccccggcgucaagggcuucgccuuccucgacggcgagaacuccuggcucggccgcaccaucuccaaggacucccgcuccggcuacgagaugcucaagguccccaacgccgagaccgacacccaguccggcgccaucucccaccagaugaucgucaacaaccagaacugguccggcuacuccggcgccuucaucgacuacugggccaagaaggagugcuucaaccccugcuucuacgucgagcucauccgcggccgccccaaggaguccuccguccucuggaccuccaacuccaucgucgcccucugcggcucccgcgagcgccucggcuccugguccuggcacgacggcgccgagaucaucuacuucaaguga

SEQ ID NO: 120451 - RNA, 1413 nt, Artificial Sequence
  derived and/or modified CDS sequence (opt2) from neuraminidase__InfluenzaA__AHJ57689
augaaccccaaccagaagaucaccugcaucuccgccaccggcaugacccucuccgucgucuccaugcucaucggcaucgccaaccucggccucaacaucggccuccacuacaaggucuccgacuccaccaacaucaacauccccaagaugaacgagaccucccccaccaccaccaucaucaacaaccacccccagaacaacuucaccaacaucaccaacaucaucgucaacaagaacgaggaggagaacuuccucaaccucaccaagccccucugcgaggucaacuccuggcacauccucuccaaggacaacgccauccgcaucggcgagaacgcccacauccucgucacccgcgagcccuaccucuccugcgacccccagggcugccgcauguucgcccucucccagggcaccacccuccgcggccagcacgccaacggcaccauccacgaccgcucccccuuccgcgcccucaucuccugggagaugggccaggcccccucccccuacaacgcccgcgucgagugcaucggcugguccuccaccuccugccacgacggcaucucccgcauguccaucugcaucuccggccccaacaacaacgccuccgccgucgucugguacggcggccgccccgucaccgagauccccuccugggccggcaacauccuccgcacccaggaguccgagugcgucugccacggcggcaucugccccgucgucaugaccgacggccccgccaacaaccgcgccgagaccaagaucaucuacuucaaggagggcaagauccagaagaucgaggagcucaagggcaacgcccagcacaucgaggagugcuccugcuacggcgccuccggcaugaucaagugcaucugccgcgacaacuggaagggcgccaaccgccccgucaucaccaucgaccccgagaugaugacccacaccuccaaguaccucugcuccaagauccucaccgacaccucccgccccaacgaccccaccaacggcaacugcgacgcccccaucaccggcggcucccccgaccccggcgucaagggcuucgccuuccucgacggcgagaacuccuggcucggccgcaccaucuccaaggacucccgcuccggcuacgagaugcucaagguccccaacgccgagaccgacacccaguccggcgccaucucccaccagaucaucgucaacaaccagaacugguccggcuacuccggcgccuucaucgacuacugggccaacaaggagugcuucaaccccugcuucuacgucgagcucauccgcggccgccccaaggaguccuccguccucuggaccuccaacuccaucgucgcccucugcggcucccgcgagcgccucggcuccugguccuggcacgacggcgccgagaucaucuacuucaaguga

SEQ ID NO: 120452 - RNA, 1413 nt, Artificial Sequence
  derived and/or modified CDS sequence (opt2) from neuraminidase__InfluenzaA__AHJ57700
augaaccccaaccagaagaucaccugcaucuccgccaccggcaugacccucuccgucgucucccuccucaucggcaucgccaaccucggccucaacaucggccuccacuacaaggucuccgacuccaccaacaucaacauccccaacaugaacgagaccucccccaccaccaccaucaucaacaaccacccccagaacaacuucaccaacaucaccaacaucaucaugaacaagaacgaggagggcaacuuccucaaccucaccaagccccucugcgaggucaacuccuggcacauccucuccaaggacaacgccauccgcaucggcgagaacgcccacauccucgucacccgcgagcccuaccucuccugcgacccccagggcugccgcauguucgcccucucccagggcaccacccuccgcggccgccacgccaacggcaccauccacgaccgcucccccuuccgcgcccucaucuccugggagaugggccaggcccccucccccuacaacgcccgcgucgagugcaucggcugguccuccaccuccugccacgacggcaucucccgcauguccaucugcaucuccggccccaacaacaacgccuccgccgucgucugguacggcggccgccccgucaccgagauccccuccugggccggcaacauccuccgcacccaggaguccgagugcgucugccacggcggcaucugccccgucgucaugaccgacggccccgccaacaaccgcgccgagaccaagaucaucuacuucaaggagggcaagguccagaagaucgaggagcucaagggcaacgcccagcacaucgaggagugcuccugcuacggcgccuccggcaugaucaagugcaucugccgcgacaacuggaagggcgccaaccgccccgucaucaccaucgaccccgagaugaugacccacaccuccaaguaccucugcuccaagauccucaccgacaccucccgccccaacgaccccaccaacggcaacugcgacgcccccaucaccggcggcucccccgaccccggcgucaagggcuucgccuuccucgacggcgagaacuccuggcucggccgcaccaucuccaaggacucccgcuccggcuacgagaugcucaagguccccaacgccgagaccgacacccaguccggcgccaucucccaccagaucaucgucaacaaccagaacugguccggcuacuccggcgccuucaucgacuacugggccaacaaggagugcuucaaccccugcuucuacgucgagcucauccgcggccgccccaaggaguccuccguccucuggaccuccaacuccaucgucgcccucugcggcucccgcgagcgccucggcuccugguccuggcacgacggcgccgagaucaucuacuucaaguga

SEQ ID NO: 120453 - RNA, 1410 nt, Artificial Sequence
  derived and/or modified CDS sequence (opt2) from neuraminidase__InfluenzaA__AHJ57710
augaaccccaaccagaagaucaucaccaucggcuccgucucccucaccaucgccaccgucuccuuccucaugcagaucgccauccucaccaccaccgucacccuccacuucaagcacaacgagugcaacaugccccccaagaaccaggucauguccugcgagcccaucaucaucgagcgcaacaucaccgagaucgucuaccucaacaacaccaccgucgagaaggagaucugccccaaggucgucgaguaccgcaacugguccaagccccagugcaagaucaccggcuucgcccccuucuccaaggacaacuccauccgccucuccgccggcggcgacaucugggucacccgcgagcccuacgucuccugcggccucggcaagugcuaccaguucgcccucggccagggcaccacccucgacaacucccacuccaacggcaccauccacgaccgcaucccccaccgcacccuccucaugaacgagcucggcguccccuuccaccucggcaccaagcaggucugcaucgccugguccuccuccuccugccacgacggccgcgccuggcuccacaucugcaucaccggcgacgaccgcaacgccaccgccuccuucaucuacgacggcaugcucgucgacuccaucuccuccugguccaagaacauccuccgcacccaggaguccgagugcgucugcaucaacggcaccugcgccgucgucaugaccgacggcuccgccuccggcgucgccgacacccgcauccucuucauccgcgagggcaagaucguccacaucuccccccucuccggcuccgcccagcacaucgaggagugcuccugcuacccccgcuaccccgacguccgcugcgucugccgcgacaacuggaagggcuccaaccgccccgucaucaacaucaacauggccgacuacuccaucgacuccaacuacgucugcuccggccucgucggcgacaccccccgcaacgacgacaacuccuccuccuccaacugccgcgaccccaacaacgagcgcggcaaccccggcgucaagggcugggccuucgacgacggcaacgacgucuggaugggccgcaccaucaaccgcgacucccgcuccggcuacgagaccuuccgcgucaucggcggcuggaccaccgccaacuccaagucccagaucaaccgccaggucaucgucgacaacaacaacugguccggcuacuccggcgucuucuccgucgagggcaaguccugcaucaaccgcugcuucuacgucgagcucauccgcggccgcccccaggagccccgcgucugguggaccuccaacuccaucgucgucuucugcggcaccuccggcaccuacggcaccggcuccuggcccgacggcgccaacaucaacuucaugcccaucuga

SEQ ID NO: 120454 - RNA, 1410 nt, Artificial Sequence
  derived and/or modified CDS sequence (opt2) from neuraminidase__InfluenzaA__AHJ57734
augaaccccaaccagaagaucaucaccaucggcuccgucucccucaccaucgccaccgucuccuuccucaugcagaucgccauccucaccaccaccgucacccuccacuucaagcacaacgagugcaacaugccccccaagaaccaggucauguccugcgagcccaucaucaucgagcgcaacaucaccgagaucgucuaccucaacaacaccaccgucgagaaggagaucugccccaaggucgccgaguaccgcaacugguccaagccccagugcaagaucaccggcuucgcccccuucuccaaggacaacuccauccgccucuccgccggcggcgacaucugggucacccgcgagcccuacgucuccugcggccucggcaagugcuaccaguucgcccucggccagggcaccacccucgacaacucccacuccaacggcaccauccacgaccgcaucccccaccgcacccuccucaugaacgagcucggcguccccuuccaccucggcaccaagcaggucugcaucgccugguccuccuccuccugccacgacggccgcgccuggcuccacaucugcaucaccggcgacgaccgcaacgccaccgccuccuucaucuacgacggcaugcucgucgacuccaucggcuccugguccaagaacauccuccgcacccaggaguccgagugcgucugcaucaacggcaccugcgccgucgucaugaccgacggcuccgccuccggcgucgccgacacccgcauccucuucauccgcgagggcaagaucguccacaucuccccccucuccggcuccgcccagcacaucgaggagugcuccugcuacccccgcuaccccgacguccgcugcgucugccgcgacaacuggaagggcuccaaccgccccgucaucaacaucaacauggccgacuacuccaucgacuccaacuacgucugcuccggccucgucggcgacaccccccgcaacgacgacaacuccuccuccuccaacugccgcgaccccaacaacgagcgcggcaaccccggcgucaagggcugggccuucgacgacggcaacgacgucuggaugggccgcaccaucaaccgcgacucccgcuccggcuacgagaccuuccgcgucaucggcggcuggaccaccgccaacuccaagucccagaucaaccgccaggucaucgucgacaacaacaacugguccggcuacuccggcgucuucuccgucgagggcaaguccugcaucaaccgcugcuucuacgucgagcucauccgcggccgcccccaggagccccgcgucugguggaccuccaacuccaucgucgucuucugcggcaccuccggcaccuacggcaccggcuccuggcccgacggcgccaacaucaacuucaugcccaucuga

SEQ ID NO: 120455 - RNA, 1380 nt, Artificial Sequence
  derived and/or modified CDS sequence (opt2) from neuraminidase__InfluenzaA__AHJ57746
augaaccccaaccagaagaucaucaccaucggcuccgucuccaucaccaucgccgccgucugcuuccucaugcagaucgccauccucgccaccaccgucacccuccacuucaagcagaacgagugcaacauccccuccaagaaccacgucauccccugcgagcccaucaucaucgagcgcaacaucaccgaggucgagauccgccccaaggucgccgaguaccgcgacugguccaagccccagugccagaucaccggcuucgcccccuucuccaaggacaacuccauccgccucuccgccggcggcaacaucugggucacccgcgagcccuacgucuccugcggccccgacaagugcuaccaguucgcccucggccagggcaccacccucggcaacggccacuccaacggcaccauccacgacaagaucccccaccgcacccuccucaugaacgagcucggcguccccuuccaccucggcaccaagcaggucugcaucgccugguccuccuccuccugccacgacggccgcgccuggcuccacgucugcgucaccggcgacgaccgcaacgccaccgccuccuucaucuacgacggcaugcucgucgacuccaucgccuccuggucccagaacauccuccgcacccaggaguccgagugcgucugcaucaacggcaccugcaccgucgucaugaccgacggcuccgccuccggcgucgccgacacccgcauccucuucauccgcgagggcaagaucguccacaucuccccccucuccggcuccgcccagcacaucgaggagugcuccugcuacccccgccacuccgacguccgcugcgucugccgcgacaacuggaagggcuccaaccgccccgucgucgacaucaacaugaccgacuacuccaucgacuccuccuacgucugcuccggccucgucggcgacaccccccgcaacgacgacuccuccuccuccuccaacugccgcgaccccaacaacgagcgcggcaaccccggcgucaagggcugggccuucgacgacggcgacgacgucuggaugggccgcaccaucucccgcgacucccgcuccggcuacgagaccuuccgcgucaucggcggcuggaccaccgccaacuccaagucccagaucaaccgccaggucaucgucgacaacaacaacugguccggcuacuccggcgucuucuccgucgagggcaaguccugcaucaaccgcugcuucuacgucgagcucauccgcggccgcccccaggagacccgcgucugguggaccuccaacuccaucgucgucuucugcggcaccuccggcaccuacggcaccggcuccuggcccgacggcgccaacaucaacuucaugcccaucuga

SEQ ID NO: 120456 - RNA, 1410 nt, Artificial Sequence
  derived and/or modified CDS sequence (opt2) from neuraminidase__InfluenzaA__AHJ57758
augaaccccaaccagaagaucaucaccgucggcuccgucucccucgccaucgccaccaucugccuccucaugcagaucgccauccucgccaccaccgucacccuccacuucaagcagaacgagugcaacauccccuccaagaaccaggucaugcccugcgagcccaucaucaucgagcgcaacaucaccgaggucgucuaccucaacaacaccaucaucgagaaggagaucugccccaaggucgucgaguaccgcaacugguccaagccccagugccagaucaccggcuucgcccccuucuccaaggacaacuccauccgccucuccgccggcggcgacaucugggucacccgcgagcccuacgucuccugcucccccuccaagugcuaccaguucgcccucggccagggcaccacccucgacaacucccacuccaacggcaccauccacgaccgcaucccccaccgcacccuccucaugaacgagcucggcguccccuuccaccucggcaccaagcaggucugcaucgccugguccuccuccuccugccacgacggccgcgccuggcuccacgucugcaucaccggcgacgaccgcaacgccaccgccuccuucaucuacaacggcaugcucgucgacuccaucuccuccuggucccgcaacauccuccgcacccaggaguccgagugcgucugcaucaacggcaccugcaccgucaucaugaccgacggcuccgccuccggcgucgccgacacccgcauccucuucauccgcgagggcaacaucguccacgucuccccccucuccggcuccgcccagcacaucgaggagugcuccugcuacccccgcuaccccgacguccgcugcgucugccgcgacaacuggaagggcuccaaccgccccgucgucgacaucaacauggccgacuacuccaucgacucccacuacgucugcuccggccucgucggcgacaccccccgcaacgacgacuccuccuccuccuccaacugcaaggaccccaacaacgagcgcggcaaccccggcgucaagggcugggccuucgacgacggcaacgacgucuggaugggccgcaccaucucccgcgacucccgcuccggcuacgagaccuuccgcgucaucggcggcuggaccaccgccaacuccaagucccagaucaaccgccaggucaucgucgacaacaacaacugguccggcuacuccggcgucuucuccgucgagggcaaguccugcaucaaccgcugcuucuacgucgagcucauccgcggccgcccccaggagacccgcgucugguggaccuccaacuccaucgucgucuucugcggcaccuccggcaccuacggcaccggcuccuggcccgacggcgccaacaucaacuucaugcccaucuga

SEQ ID NO: 120457 - RNA, 1401 nt, Artificial Sequence
  derived and/or modified CDS sequence (opt2) from neuraminidase__InfluenzaA__AHJ57770
augaaccccaaccagaagaucaucgccaucggcuccgucucccucaccaucgccaucaucugcuuccucaugcagaucgccauccucaccaccaccaugacccuccacuucaagcagaacgagugcuccaaccccuccaacaaccaggucguccccugcgagcccaucaucaucgagcgcaacaccguccaccucaacuccaccaccaucgagaaggagaucugccccaaggucgucgaguacaagaacugguccaagccccagugccagaucaccggcuucgcccccuucuccaaggacaacuccauccgccucuccgccggcggcgacaucugggucacccgcgagcccuacgucuccugcucccucggcaagugcuaccaguucgcccucggccagggcaccacccucaagaacaagcacuccaacggcaccacccacgaccgcaucccccaccgcacccuccucaugaacgagcucggcguccccuuccaccucggcaccaagcaggucugcaucgccugguccuccuccuccugcuacgacggcaaggccuggcuccacaucugcgucaccggcgacgacaagaacgccaccgccuccaucaucuacgacggcaugcucgucgacuccaucggcuccugguccaagaacauccuccgcacccaggaguccgagugcgucugcaucaacggcaccugcgccgucgucaugaccgacggcuccgccuccggcaaggccgacacccgcauccucuucauccgcgagggcaagaucaucaacaucuccccccucuccggcuccgcccagcacgucgaggagugcuccugcuacccccgcuaccccgagguccgcugcgucugccgcgacaacuggaagggcuccaaccgccccguccucuacaucaacauggccgacuacuccgucgaguccuccuacgucugcuccggccucgucggcgacaccccccgcaacgacgacuccuccuccuccuccaacugccgcgaccccaacaacgagcgcggcgcccccggcgucaagggcugggccuucgacgacggcaacgacgucuggaugggccgcaccaucaagaacgacucccgcuccggcuacgagaccuuccgcgucgucaacggcuggaccaccgccaacuccaagucccagaucaaccgccaggucaucgucgacuccgagaacugguccggcuacuccggcaucuucuccgucgagggcaagaacugcaucaaccgcugcuucuacgucgagcucauccgcggccgcccccaggagccccgcgucugguggaccuccaacuccaucaucgucuucugcggcaccuccggcaccuacggcaccggcuccuggcccgacggcgccaacaucaacuuccuccccaucuga

SEQ ID NO: 120458 - RNA, 1410 nt, Artificial Sequence
  derived and/or modified CDS sequence (opt2) from neuraminidase__InfluenzaA__AHJ57782
augaaccccaaccagaagaucaucaucaucggcuccgucucccucaccaucgccaccgucugcuuccucaugcagaucgccauccucgccaccaccgucacccuccacuucaagcagaacgagugcaacauccccuccaagaaccaggucguccccugcgagcccaucaucaucgagcgcaacaucaccgaggucgucuaccucaacaacaccaccaucgagaaggagaucugccccgccgucgucgaguaccgcaacugguccaagccccagugccagaucaagggcuucgcccccuucuccaaggacaacuccauccgccucuccgccggcggcgacaugugggucacccgcgagcccuacgucuccugcucccccuccaagugcuaccaguucgcccucggccagggcaccacccucgacaacaaccacuccaacggcaccauccacgaccgcaucccccaccgcacccuccucaugaacgagcucggcguccccuuccaccucggcaccaagcaggucugcaucgccugguccuccuccuccugccacgacggcaaggccuggcuccacgucugcgucaccggcgacgaccgcaacgccaccgccuccuucaucuacgacggcaugcucgucgacuccaucggcuccuggucccagaacauccuccgcacccaggaguccgagugcgucugcaucaacggcaccugcaccgucgucaugaccgacggcuccgccuccggcaucgccgacacccgcauccucuucguccgcgagggcaagaucguccacaucuccccccucuccggcuccgcccagcacaucgaggagugcuccugcuacccccgcuaccccgacguccgcugcgucugccgcgacaacuggaagggcuccaaccgccccaucgucgacaucaacauggccgacuacuccaucggcuccuccuacgucugcuccggccucgucggcgacaccccccgcaacgacgaccgcuucuccuccuccaacugccgcgaccccaacuccgagcgcggcaaccccggcgucaagggcugggccuucgacgacggcgacgacgucuggaugggccgcaccaucucccgcgacucccgcuccggcuacgagaccuuccgcgucaucggcggcuggaccaccgccaacuccaagucccagaucaaccgccaggucaucgucgacaacaacaacugguccggcuacuccggcgucuucuccgucgagggcaaguccugcaucaaccgcugcuucuacgucgagcucauccgcggccgcccccaggagacccgcgucugguggaccuccaacuccaucgucgucuucugcggcaccuccggcaccuacggcaccggcuccuggcccgacggcgccaacaucaacuucaugcccaucuga

SEQ ID NO: 120459 - RNA, 1410 nt, Artificial Sequence
  derived and/or modified CDS sequence (opt2) from neuraminidase__InfluenzaA__AHJ57794
augaaccccaaccagaagaucaucaccgucggcuccgucucccucgccaucgccaccaucugcuuccucaugcagaucgccauccucgccaccaccgucacccuccacuucaagcagaacgagugcaacauccccuccaagaaccaggucaugcccugcgagcccaucaucaucgagcgcaacaucaccgaggucgucuaccucaacaacaccaucaucgagaaggagaucugccccaaggucgucgaguaccgcaacugguccaagccccagugccagaucaccggcuucgcccccuucuccaaggacaacuccauccgccucuccgccggcggcgacaucugggucacccgcgagcccuacgucuccugcucccccuccaagugcuaccaguucgcccucggccagggcaccacccucgacaacucccacuccaacggcaccauccacgaccgcaucccccaccgcacccuccucaugaacgagcucggcguccccuuccaccucggcaccaagcaggucugcaucgccugguccuccuccuccugccacgacggccgcgccuggcuccacgucugcaucaccggcgacgaccgcaacgccaccgccuccuucaucuacaacggcaugcucgucgacuccaucuccuccuggucccgcaacauccuccgcacccaggaguccgagugcgucugcaucaacggcaccugcaccgucaucaugaccgacggcuccgccuccggcgucgccgacacccgcauccucuucauccgcgagggcaacaucguccacgucuccccccucuccggcuccgcccagcacaucgaggagugcuccugcuacccccgcuaccccgacguccgcugcgucugccgcgacaacuggaagggcuccaaccgccccgucgucgacaucaacauggccgacuacuccaucgacucccacuacgucugcuccggccucgucggcgacaccccccgcaacgacgacuccuccuccuccuccaacugcaaggaccccaacaacgagcgcggcaaccccggcgucaagggcugggccuccgacgacggccacgacgucuggaugggccgcaccaucggccgcgacucccgcuccggcuacgagaccuuccgcgucaucggcggcuggaccaccgccaacuccaagucccagaucaaccgccaggucaucgucgacaacaacaacugguccggcuacuccggcgucuucuccgucgagggcaaguccugcaucaaccgcugcuucuacgucgagcucauccgcggccgcccccaggagacccgcgucugguggaccuccaacuccaucgucgucuucugcggcaccuccggcaccuacggcaccggcuccuggcccgacggcgccaacaucaacuucaugcccaucuga

SEQ ID NO: 120460 - RNA, 1413 nt, Artificial Sequence
  derived and/or modified CDS sequence (opt2) from neuraminidase__InfluenzaA__AHJ57806
augaaccccaaccagaagaucaccugcaucuccgccaccggcaugacccucuccgucgucucccuccucaccggcaucgccaaccucggccucaacaucggccuccacuacaaggucuccgacuccaccaacaucuccauccccaacaugaacgaggccucccccaccaccaccaucaucaacaaccacccccagaacaacuucaccaacaucaccaacaucaucaugaacaagaacgaggagggcaacuuccucaaccucaccaagccccucugcgaggucaacuccuggcacauccucuccaaggacaacgccauccgcaucggcgagaacgcccacauccucgucacccgcgagcccuaccucuccugcgacccccagggcugccgcauguucgcccucucccagggcaccacccuccgcggccgccacgccaacggcaccauccacgaccgcucccccuuccgcgcccucaucuccugggagaugggccaggcccccucccccuacaacgcccgcgucgagugcaucggcugguccuccaccuccugccacgacggcaucucccgcauguccaucugcaucuccggccccaacaacaacgccuccgccgucgucugguacggcggccgccccgucaccgagauccccuccugggccggcaacauccuccgcacccaggaguccgagugcgucugccacggcggcaucugccccgucgucaugaccgacggccccgccaacaaccgcgccgagaccaagaucaucuacuucaaggagggcaagauccagaagaucgaggagcucaagggcaacgcccagcacaucgaggagugcuccugcuacggcgccuccggcaugaucaagugcaucugccgcgacaacuggaagggcgccaaccgccccgucaucaccaucgaccccgagaugaugacccacaccuccaaguaccucugcuccaagauccucaccgacaccucccgccccaacgaccccaccaacggcaacugcgacgcccccaucaccggcggcucccccgaccccggcgucaagggcuucgccuuccucgacggcaagaacuccuggcucggccgcaccaucuccaaggacucccgcuccggcuacgagaugcucaagguccccaacgccgagaccgacacccaguccggcgccaucucccaccagaucaucgucaacaaccagaacugguccggcuacuccggcgccuucaucgacuacugggccaacaaggagugcuucaaccccugcuucuacgucgagcucauccgcggccgccccaaggaguccuccguccucuggaccuccaacuccaucgucgcccucugcggcucccgcgagcgccucggcuccugguccuggcacgacggcgccgagaucaucuacuucaaguga

SEQ ID NO: 120461 - RNA, 1380 nt, Artificial Sequence
  derived and/or modified CDS sequence (opt2) from neuraminidase__InfluenzaA__AHJ57818
augaaccccaaccagaagaucaccugcaucuccgccaccggcgucacccucuccgucgucucccuccucaucggcaucgccaaccucggccucaacaucggccuccacuacaaggucuccgacucccccaccaucaacauccccaacaugaacgagaccaaccccaucaccaccaacaucaccaacaucaucgucaacaagaacgaggagggcaccuuccucaaccucaccaagccccucugcgaggucaacuccuggcacauccucuccaaggacaacgccauccgcaucggcgaggacgcccacauccucgucacccgcgagcccuaccucuccugcgacccccagggcugccgcauguucgcccucucccagggcaccacccuccgcggccgccacgccaacggcaccauccacgaccgcucccccuuccgcgcccucaucuccugggagaugggccaggcccccucccccuacaacacccgcgucgagugcaucggcugguccuccaccuccugccacgacggcaucucccgcauguccaucugcaucuccggccccaacaacaacgccuccgccgucgucugguaccgcggccgccccgucaccgagauccccuccugggccggcaacauccuccgcacccaggaguccgagugcgucugccacaagggcaucugccccgucgucaugaccgacggccccgccaacaacaaggccgccaccaagaucaucuacuucaaggagggcaagauccagaagaucgaggagcuccagggcaacgcccagcacaucgaggagugcuccugcuacggcgccgccggcaugaucaagugcgucugccgcgacaacuggaagggcgccaaccgccccaucaucaccaucgaccccgagaugaugacccacaccuccaaguaccucugcuccaagauccucaccgacaccucccgccccaacgaccccaccgacggcaacugcgacgcccccaucaccggcggcucccccgaccccggcgucaagggcuucgccuuccucgagggcgagaacuccuggcucggccgcaccaucuccaaggacucccgcuccggcuacgagaugcucaagguccccaacgccgagaccgacacccaguccggcgccaucucccaccagaugaucgucaacaaccagaacugguccggcuacuccggcgccuucaucgacuacugggccaacaaggagugcuucaaccccugcuucuacgucgagcucauccgcggccgccccaaggaguccuccguccucuggaccuccaacuccaucgucgcccucugcggcucccgcgagcgccucggcuccugguccuggcacgacggcgccgagaucaucuacuucaaguga

SEQ ID NO: 120462 - RNA, 1410 nt, Artificial Sequence
  derived and/or modified CDS sequence (opt2) from neuraminidase__InfluenzaA__AHJ57830
augaaccccaaccagaagaucaucaccaucggcuccgucucccucaccaucgccaccgucuccuuccucaugcagaucgccauccucaccaccaccgucacccuccacuucaagcacaacgagugcaacaugccccccaagaaccaggucauguccugcgagcccaucaucaucgagcgcaacaucaccgagaucgucuaccucaacaacaccaccaucgagaaggagaucugccccaaggucgucgaguaccgcaacugguccaagccccagugcaagaucaccggcuucgcccccuucuccaaggacaacuccauccgccucuccgccggcggcgacaucugggucacccgcgagcccuacgucuccugcggccucggcaagugcuaccaguucgcccucggccagggcaccacccucgacaacucccacuccaacggcaccauccacgaccgcaucccccaccgcacccuccucaugaacgagcucggcguccccuuccaccucggcaccaagcaggucugcaucgccugguccuccuccuccugccacgacggccgcgccuggcuccacaucugcaucaccggcgacgaccgcaacgccaccgccuccuucaucuacgacggcaugcucgucgacuccaucggcuccugguccaagaacauccuccgcacccaggaguccgagugcgucugcaucaacggcaccugcgccgucgucaugaccgacggcuccgccuccggcgucgccgacacccgcauccucuucauccgcgagggcaagaucguccacaucuccccccucuccggcuccgcccagcacaucgaggagugcuccugcuacccccgcuaccccgacguccgcugcgucugccgcgacaacuggaagggcuccaaccgccccgucaucgacaucaacauggccgacuacuccaucgacuccaacuacgucugcuccggccucgucggcgacaccccccgcaacgacgacaacuccuccuccuccaacugccgcgaccccaacaacgagcgcggcaaccccggcgucaagggcugggccuucgacgacggcaacgacgucuggaugggccgcaccaucaaccgcgacucccgcuccggcuacgagaccuuccgcgucaucggcggcuggaccaccgccaacuccaagucccagaucaaccgccaggucaucgucgacaacaacaacugguccggcuacuccggcgucuucuccgucgagggcaaguccugcaucaaccgcugcuucuacgucgagcucauccgcggccgcccccaggagccccgcgucugguggaccuccaacuccaucgucgucuucugcggcaccuccggcaccuacggcaccggcuccuggcccgacggcgccaacaucaacuucaugcccaucuga

SEQ ID NO: 120463 - RNA, 1413 nt, Artificial Sequence
  derived and/or modified CDS sequence (opt2) from neuraminidase__InfluenzaA__AHJ57842
augaaccccaaccagaagaucaccugcaucuccgccaccggcaugacccucuccgucgucuccaugcucaucggcaucgccaaccucggccucaacaucggccuccacuacaaggucuccgacuccaccaacaucaacauccccaagaugaacgagaccaaccccaccaccaccaucaucaacaaccacccccagaacaacuucaccaacaucaccaacaucaucgucaacaagaacgaggaggagaacuuccucaaccucaccaagccccucugcgaggucaacuccuggcacauccucuccaaggacaacgccauccgcaucggcgagaacgcccacauccucgucacccgcgagcccuaccucuccugcgacccccagggcugccgcauguucgcccucucccagggcaccaccauccgcggccagcacgccaacggcaccauccacgaccgcucccccuuccgcgcccucaucuccugggagaugggccaggcccccucccccuacaacgcccgcgucgagugcaucggcugguccuccaccuccugccacgacggcaucucccgcauguccaucugcaucuccggccccaacaacaacgccuccgccgucgucugguacggcggccgccccgucaccgagauccccuccugggccggcaacauccuccgcacccaggaguccgagugcgucugccacggcggcaucugccccgucgucaugaccgacggccccgccaacaaccgcgccgagaccaagaucaucuacuucaaggagggcaagauccagaagaucgaggagcucaagggcaacgcccagcacaucgaggagugcuccugcuacggcgccuccggcaugaucaagugcaucugccgcgacaacuggaagggcgccaaccgccccgucaucaccaucgaccccgagaugaugacccacaccuccaaguaccucugcuccaagauccucaccgacaccucccgccccaacgaccccaccaacggcaacugcgacgcccccaucaccggcggcuccuccgaccccggcgucaagggcuucgccuuccucgacggcgagaacuccuggcucggccgcaccaucuccaaggacucccgcuccggcuacgagaugcucaagguccccaacgccgagaccgacacccaguccggcgccaucucccaccagaucaucgucaacaaccagaacugguccggcuacuccggcgccuucaucgacuacugggccaacaaggagugcuucaaccccugcuucuacgucgagcucauccgcggccgccccaaggaguccuccguccucuggaccuccaacuccaucgucgcccucugcggcucccgcgagcgccucggcuccugguccuggcacgacggcgccgagaucaucuacuucaaguga

SEQ ID NO: 120464 - RNA, 1413 nt, Artificial Sequence
  derived and/or modified CDS sequence (opt2) from neuraminidase__InfluenzaA__AHJ57853
augaaccccaaccagaagaucaccugcaucuccgccaccggcaugacccucuccgucgucucccuccucaucggcaucgccaaccucggccucaacgucggccuccacuacaaggucaacgaccccaccaacaucaacauccccaacaugaacgagaccucccccaccaccaccaucaucaacaaccacccccagaacaacuucaccaacaucaccaacaucaucgucaacaagaacgaggaggagaacuuccucaaccucaccaagccccucugcgaggucaacuccuggcacauccucuccaaggacaacgccauccgcaucggcgagaacgcccacauccucgucacccgcgagcccuaccucuccugcgacccccagggcugccgcauguucgcccucucccagggcaccacccuccgcggccagcacgccaacggcaccauccacgaccgcucccccuuccgcgcccucaucuccugggagaugggccaggcccccucccccuacaacgcccgcgucgagugcaucggcugguccuccaccuccugccacgacggcaucucccgcauguccaucugcaucuccggccccaacaacaacgccuccgccgucgucugguacggcggccgccccgucaccgagauccccuccugggccggcaacauccuccgcacccaggaguccgagugcgucugccacggcggcaucugccccgucgucaugaccgacggccccgccaacaaccgcgccgagaccaagaucaucuacuucaaggagggcaagauccagaagaucgaggagcucaagggcaacgcccagcacaucgaggagugcuccugcuacggcgccuccggcaugaucaagugcaucugccgcgacaacuggaagggcgccaaccgccccgucaucaccaucgaccccgagaugaugacccacaccuccaaguaccucugcuccaagauccucaccgacaccucccgccccaacgaccccaccaacggcaacugcgacgcccccaucaccggcggcucccccgaccccggcgucaagggcuucgccuuccucgacggcgagaacuccuggcucggccgcaccaucuccaaggacucccgcuccggcuacgagaugcucaagguccccaacgccgagaccgacacccaguccggcgccaucucccaccagaugaucgucaacaaccagaacugguccggcuacuccggcgccuucaucgacuacugggccaacaaggagugcuucaaccccugcuucuacgucgagcucauccgcggccgccccaaggaguccuccguccucuggaccuccaacuccaucgucgcccucugcggcucccgcgagcgccucggcuccugguccuggcacgacggcgccgagaucaucuacuucaaguga

SEQ ID NO: 120465 - RNA, 1413 nt, Artificial Sequence
  derived and/or modified CDS sequence (opt2) from neuraminidase__InfluenzaA__AHJ57865
augaaccccaaccagaagaucaccugcaucuccgccaccggcaugacccucuccgucgucuccaugcucaucggcaucgccaaccucggccucaacaucggccuccacuacaaggucuccgacuccaccaacaucaacauccccaagaugaacgagaccaaccccaccaccaccaucaucaacaaccacccccagaacaacuucaccaacaucaccaacaucaucgucaacaagaacgaggaggagaacuuccucaaccucaccaagccccucugcgaggucaacuccuggcacauccucuccaaggacaacgccauccgcaucggcgagaacgcccacauccucgucacccgcgagcccuaccucuccugcgacccccagggcugccgcauguucgcccucucccagggcaccacccuccgcggccgccacgccaacggcaccauccacgaccgcucccccuuccgcgcccucaucuccugggagaugggccaggcccccucccccuacaacgcccgcgucgagugcaucggcugguccuccaccuccugccacgacggcaucucccgcauguccaucugcaucuccggccccaacaacaacgccuccgccgucgucugguacggcggccgccccgucaccgagauccccuccugggccggcaacauccuccgcacccaggaguccgagugcgucugccacggcggcaucugccccgucgucaugaccgacggccccgccaacaaccgcgccgagaccaagaucaucuacuucaaggagggcaagauccagaagaucgaggagcucaagggcaacgcccagcacaucgaggagugcuccugcuacggcgccuccggcaugaucaagugcaucugccgcgacaacuggaagggcgccaaccgccccgucaucaccaucgaccccgagaugaugacccacaccuccaaguaccucugcuccaagauccucaccgacaccucccgccccaacgaccccaccaacggcaacugcgacgcccccaucaccggcggcucccccgaccccggcgucaagggcuucgccuuccucgacggcgagaacuccuggcucggccgcaccaucuccaaggacucccgcuccggcuacgagaugcucaagguccccaacgccgagaccgacacccaguccggcgccaucucccaccagaugaucgucaacaaccagaacugguccggcuacuccggcgccuucaucgacuacugggccaacaaggagugcuucaaccccugcuucuacgucgagcucauccgcggccgccccaaggaguccuccguccucuggaccuccaacuccaucgucgcccucugcggcucccgcgagcgccucggcuccugguccuggcacgacggcgccgagaucaucuacuucaaguga

SEQ ID NO: 120466 - RNA, 1413 nt, Artificial Sequence
  derived and/or modified CDS sequence (opt2) from neuraminidase__InfluenzaA__AHJ57876
augaaccccaaccagaagaucaccugcaucuccgccaccggcaugacccucuccgucgucucccuccucaucggcaucgccaaccucggccucaacaucggccuccacuacaaggucuccgacuccaccaacaucaacauccccaacaugaacgagaccucccccaccaccaccaucaucaacaaccacccccagaacaacuucaccaacaucaccaacaucaucaugaacaagaacgaggagggcaacuuccucaaccucaccaagccccucugcgaggucaacuccuggcacauccucuccaaggacaacgccauccgcaucggcgagaacgcccacauccucgucacccgcgagcccuaccucuccugcgacccccagggcugccgcauguucgcccucucccagggcaccacccuccgcggccgccacgccaacggcaccauccacgaccgcucccccuuccgcgcccucaucuccugggagaugggccaggcccccucccccuacaacgcccgcgucgagugcaucggcugguccuccaccuccugccacgacggcaagucccgcauguccaucugcaucuccggccccaacaacaacgccuccgccgucgucugguacggcggccgccccaucaccgagauccccuccugggccggcaacauccuccgcacccaggaguccgagugcgucugccacggcggcaucugccccgucgucaugaccgacggccccgccaacaaccgcgccgagaccaagaucaucuacuucaaggagggcaagguccagaagaucgaggagcucaagggcaacgcccagcacaucgaggagugcuccugcuacggcgccuccggcaugaucaagugcaucugccgcgacaacuggaagggcgccaaccgccccgucaucaccaucgaccccgagaugaugacccacaccuccaaguaccucugcuccaagauccucaccgacaccucccgccccaacgaccccaccaacggcaacugcgacgcccccaucaccggcggcucccccgaccccggcgucaagggcuucgccuuccucgacggcgagaacuccuggcucggccgcaccaucuccaaggacucccgcuccggcuacgagaugcucaagguccccaacgccgagaccgacacccaguccggcgccaucucccaccagaucaucgucaacaaccagaacugguccggcuacuccggcgccuucaucgacuacugggccaacaaggagugcuucaaccccugcuucuacgucgagcucauccgcggccgccccaaggaguccuccguccucuggaccuccaacuccaucgucgcccucugcggcucccgcgagcgccucggcuccugguccuggcacgacggcgccgagaucaucuacuucaaguga

SEQ ID NO: 120467 - RNA, 1413 nt, Artificial Sequence
  derived and/or modified CDS sequence (opt2) from neuraminidase__InfluenzaA__AHJ57888
augaaccccaaccagaagaucaccugcaucuccgccaccggcaugacccucuccgucgucuccaugcucaucggcaucgccaaccucggccucaacaucggccuccacuacaaggucuccgacuccaccaacaucaacauccccaacaugaacgagaccucccccaccaccaccaucaccaacaaccacccccagaacaacuucaccaacaucaccaacaucaucgucuccaagaacgaggaggagaacuuccucaaccucaccaagccccucugcgaggucaacuccuggcacauccucuccaaggacaacgccauccgcaucggcgagaacgcccacauccucgucacccgcgagcccuaccucuccugcgacccccagggcugccgcauguucgcccucucccagggcaccacccuccgcggccagcacgccaacggcaccauccacgaccgcucccccuuccgcgcccucaucuccugggagaugggccaggcccccucccccuacaacgcccgcgucgagugcaucggcugguccuccaccuccugccacgacggcaucucccgcauguccaucugcaucuccggccccaacaacaacgccuccgccgucgucugguacggcggccgccccgucaccgagauccccuccugggccggcaacauccuccgcacccaggaguccgagugcgucugccacggcggcaucugccccgucgucaugaccgacggccccgccaacaaccgcgccgagaccaagaucaucuacuucaaggagggcaagauccagaagaucgaggagcucaagggcaacgcccagcacaucgaggagugcuccugcuacggcgccuccggcaugaucaagugcaucugccgcgacaacuggaagggcgccaaccgccccgucaucaccaucgaccccgagaugaugacccacaccuccaaguaccucugcuccaagauccucaccgacaccucccgccccaacgaccccaccaacggcaacugcgacgcccccaucaccggcggcucccccgaccccggcgucaagggcuucgccuuccucgacggcgagaacuccuggcucggccgcaccaucuccaaggacucccgcuccggcuacgagaugcucaagguccccaacgccgagaccgacacccaguccggcgccaucucccaccagaugaucgucaacaaccagaacugguccggcuacuccggcgccuucaucgacuacugggccaacaaggagugcuucaaccccugcuucuacgucgagcucauccgcggccgccccaaggaguccuccguccucuggaccuccaacuccaucgucgcccucugcggcucccgcgagcgccucggcuccugguccuggcacgacggcgccgagaucaucuacuucaaguga

SEQ ID NO: 120468 - RNA, 1413 nt, Artificial Sequence
  derived and/or modified CDS sequence (opt2) from neuraminidase__InfluenzaA__AHJ57900
augaaccccaaccagaagaucaccugcaucuccgccaccggcaugacccucuccgucgucucccuccucaucggcaucgccaaccucggccucaacaucggccuccacuacaaggucuccgacuccaccaacaucaacauccccaacaugaacgagaccucccccaccgccaccaucaucaacaaccacccccagaacaacuucaccaacaucaccaacaucaucgucaacaagaacgaggaggagaacuucuucaaccucgccaagccccucugcgaggucaacuccuggcacauccucuccaaggacaacgccauccgcaucggcgagaacgcccacauccucgucacccgcgagcccuaccucuccugcgacccccagggcugccgcauguucgcccucucccagggcaccacccuccgcggccagcacgccaacggcaccauccacgaccgcucccccuuccgcgcccucaucuccugggagaugggccaggcccccucccccuacaacgcccgcgucgagugcaucggcugguccuccaccuccugccacgacggcaucucccgcauguccaucugcaucuccggccccaacaacaacgccuccgccgucgucugguacggcggccgccccgucaccgagauccccuccugggccggcaacauccuccgcacccaggaguccgagugcgucugccacggcggcaucugccccgucgucaugaccgacggccccgccaacaaccgcgccgagaccaagaucaucuacuucaaggagggcaagauccagaagaucgaggaccucaagggcaacgcccagcacaucgaggagugcuccugcuacggcgccuccggcaugaucaagugcaucugccgcgacaacuggaagggcgccaaccgccccgucaucaccaucgaccccgagaugaugacccacaccuccaaguaccucugcuccaagauccucaccgacaccucccgccccaacgaccccaccaacggcaacugcgacgcccccaucaccggcggcucccccgaccccggcgucaagggcuucgccuuccucgacggcgagaacuccuggcucggccgcaccaucuccaaggacucccgcuccggcuacgagaugcucaagguccccaacgccgagaccgacacccaguccggcgccaucucccaccagaugaucgucaacaaccagaacugguccggcuacuccggcgccuucaucgacuacugggccaacaaggagugcuucaaccccugcuucuacgucgagcucauccgcggccgccccaaggaguccuccguccucuggaccuccaacuccaucgucgcccucugcggcucccgcgagcgccucggcuccugguccuggcacgacggcgccgagaucaucuacuucaaguga

SEQ ID NO: 120469 - RNA, 1413 nt, Artificial Sequence
  derived and/or modified CDS sequence (opt2) from neuraminidase__InfluenzaA__AHJ57911
augaaccccaaccagaagaucaccugcaucuccgccaccggcgucacccucuccgucgucucccuccucaucggcaucgccaaccucggccucaacaucggccuccacuacaaggucuccgacuccuccaacaucaacauccccaacaugaacgagaccaaccccaccaccaccaucaucaacaaccacacccagaacaacuucaagaacaucaccaacaucaucgucaacaagaacgaggagggcaucuuccucaaccucaccaagccccucugcgaggucaacuccuggcacauccucuccaaggacaacgccauccgcaucggcgaggacgcccacauccucgucacccgcgagcccuaccucuccugcgacccccagggcugccgcauguucgcccucucccagggcaccacccuccgcggccgccacgccaacggcaccauccacgaccgcucccccuuccgcgcccucaucuccugggagaugggccaggcccccucccccuacaacgcccgcgucgagugcaucggcugguccuccaccuccugccacgacggcaucucccgcauguccaucugcaucuccggccccaacaacaacgccuccgccgucgucugguaccgcggccgccccgucaccgagauccccuccugggccggcaacauccuccgcacccaggaguccgagugcgucugccacaagggcaucugccccgucgucaugaccgacggccccgccaacaaccgcgccgccaccaagaucaucuacuucaaggagggcaagauccagaagaucgaggagcucaagggcaacgcccagcacaucgaggagugcuccugcuacggcgccgccggcaugaucaagugcaucugccgcgacaacuggcgcggcgccaaccgccccgucaucaccaucgaccccgagaugaugacccacaccuccaaguaccucugcuccaagauccucaccgacaccucccgccccaacgaccccaccaacggcaacugcgacgcccccaucaccggcggcucccccgaccccggcgucaagggcuucgccuuccucgacggcgagaacuccuggcucggccgcaccaucuccaaggacucccgcuccggcuacgagaugcucaagguccccaacgccgagaccgacacccaguccggcuccaccuccuaccagaucaucgucaacaaccagaacugguccggcuacuccggcgccuucaucgacuacugggccaacaaggagugcuucaaccccugcuucuacgucgagcucauccgcggccgccccaaggaguccuccguccucuggaccuccaacuccaucgucgcccucugcggcucccgcgagcgccucggcuccugguccuggcacgacggcgccgagaucaucuacuucaaguga

SEQ ID NO: 120470 - RNA, 1410 nt, Artificial Sequence
  derived and/or modified CDS sequence (opt2) from neuraminidase__InfluenzaA__AHJ57923
augaaccccaaccagaagaucaucaccgucggcuccgucucccucgccaucgccaccaucugcuuccucaugcagaucgccauccucgccaccaccgucacccuccacuucaagcagaacgagugcaacauccccuccaagaaccaggucaugcccugcgagcccaucaucaucgagcgcaacaucaccgaggucgucuaccucaacaacaccaucaucgagaaggagaucugccccaaggucgucgaguaccgcaacugguccaagccccagugccagaucaccggcuucgcccccuucuccaaggacaacuccauccgccucuccgccggcggcgacaucugggucacccgcgagcccuacgucuccugcucccccuccaagugcuaccaguucgcccucggccagggcaccacccucgacaacucccacuccaacggcaccauccacgaccgcaucccccaccgcacccuccucaugaacgagcucggcguccccuuccaccucggcaccaagcaggucugcaucgccugguccuccuccuccugccacgacggccgcgccuggcuccacgucugcaucaccggcgacgaccgcaacgccaccgccuccuucaucuacaacggcaugcucgucgacuccaucuccuccuggucccgcaacauccuccgcacccaggaguccgagugcgucugcaucaacggcaccugcaccgucaucaugaccgacggcuccgccuccggcgucgccgacacccgcauccucuucauccgcgagggcaagaucguccacgucuccccccucuccggcuccgcccagcacaucgaggagugcuccugcuacccccgcuaccccgacguccgcugcgucugccgcgacaacuggaagggcuccaaccgccccgucgucgacaucaacauggccgacuacuccaucgacucccacuacgucugcuccggccucgucggcgacaccccccgcaacgacgacuccuccuccuccuccaacugcaaggaccccaacaacgagcgcggcaaccccggcgucaagggcugggccuucgacgacggcaacgacgucuggaugggccgcaccaucucccgcgacucccgcuccggcuacgagaccuuccgcgucaucggcggcuggaccaccgccaacuccaagucccagaucaaccgccaggucaucgucgacaacaacaacugguccggcuacuccggcgucuucuccgucgagggcaaguccugcaucaaccgcugcuucuacgucgagcucauccgcggccgcccccaggagacccgcgucugguggaccuccaacuccaucgucgucuucugcggcaccuccggcaccuacggcaccggcuccuggcccgacggcgccaacaucaacuucaugcccaucuga

SEQ ID NO: 120471 - RNA, 1380 nt, Artificial Sequence
  derived and/or modified CDS sequence (opt2) from neuraminidase__InfluenzaA__AHJ57935
augaaccccaaccagaagaucaccugcaucuccgccaccggcgucacccucuccgucgucucccuccucaucggcaucgccaaccucggccucaacaucggccuccacuacaaggucuccgacucccccaccaucaacauccccaacaugaacgagaccaaccccaccaccaccaacaucaccaacaucaucgucaacaagaacgaggagggcaccuuccucaaccucaccaagccccucugcgaggucaacuccuggcacauccucuccaaggacaacgccauccgcaucggcgaggacgcccacauccucgucacccgcgagcccuaccucuccugcgacccccagggcugccgcauguucgcccucucccagggcaccacccuccgcggccgccacgccaacggcaccauccacgaccgcucccccuuccgcgcccucaucuccugggagaugggccaggcccccucccccuacaacacccgcgucgagugcaucggcugguccuccaccuccugccacgacggcaucucccgcauguccaucugcaucuccggccccaacaacaacgccuccgccgucgucugguaccgcggccgccccgucaccgagauccccuccugggccggcaacauccuccgcacccaggaguccgagugcgucugccacaagggcaucugccccgucgucaugaccgacggccccgccaacaacaaggccgccaccaagaucaucuacuucaaggagggcaagauccagaagaucgaggagcuccagggcaacgcccagcacaucgaggagugcuccugcuacggcgccgccggcaugaucaagugcgucugccgcgacaacuggaagggcgccaaccgccccaucaucaccaucgaccccgagaugaugacccacaccuccaaguaccucugcuccaagauccucaccgacaccucccgccccaacgaccccaccaacggcaacugcgacgcccccaucaccggcggcucccccgaccccggcgucaagggcuucgccuuccucgacggcgagaacuccuggcucggccgcaccaucuccaaggacucccgcuccggcuacgagaugcucaagguccccaacgcccagaccgacacccaguccggccccaccuccuaccagcucaucgucaacaaccagaacugguccggcuacuccggcgccuucaucgacuacugggccaacaaggagugcuucaaccccugcuucuacgucgagcucauccgcggccgccccaaggaguccaacguccucuggaccuccaacuccauggucgcccucugcggcucccgcgagcgccucggcuccugguccuggcacgacgacgccgagaucaucuacuucaaguga

SEQ ID NO: 120472 - RNA, 1410 nt, Artificial Sequence
  derived and/or modified CDS sequence (opt2) from neuraminidase__InfluenzaA__AHJ57946
augaaccccaaccagaagaucaucaccaucggcuccgucucccucaccaucgccaccgucuccuuccucaugcagaucgccauccucaccaccaccgucacccuccacuucaagcacaacgagugcaacaugccccccaagaaccaggucauguccugcgagcccaucaucaucgagcgcaacaucaccgagaucgucuaccucaacaacaccaccgucgagaaggagaucugccccaaggucgucgaguaccgcaacugguccaagccccagugcaagaucaccggcuucgcccccuucuccaaggacaacuccauccgccucuccgccggcggcgacaucugggucacccgcgagcccuacgucuccugcggccucggcaagugcuaccaguucgcccucggccagggcaccacccucgacaacucccacuccaacggcaccauccacgaccgcaucccccaccgcacccuccucaugaacgagcucggcguccccuuccaccucggcaccaagcaggucugcaucgccugguccuccuccuccugccacgacggccgcgccuggcuccacaucugcaucaccggcgacgaccgcaacgccaccgccuccuucaucuacgacggcaugcucgucgacuccaucggcuccugguccaagaacauccuccgcacccaggaguccgagugcgucugcaucaacggcaccugcgccgucgucaugaccgacggcuccgccuccggcgucgccgacacccgcauccucuucauccgcgagggcaagaucguccacaucuccccccucuccggcuccgcccagcacaucgaggagugcuccugcuacccccgcuaccccgacguccgcugcgucugccgcgacaacuggaagggcuccaaccgccccgucaucgacaucaacauggccgacuacuccaucgacucccacuacgucugcuccggccucgucggcgacaccccccgcaacgacgacaacuccuccuccuccaacugccgcgaccccaacaacgagcgcggcaaccccggcgucaagggcugggccuucgacgacggcaacgacgucuggaugggccgcaccaucaaccgcgacucccgcuccggcuacgagaccuuccgcgucaucggcggcuggaccaccgccaacuccaagucccagaucaaccgccaggucaucgucgacaacaacaacugguccggcuacuccggcgucuucuccgucgagggcaaguccugcaucaaccgcugcuucuacgucgagcucauccgcggccgcccccaggagccccgcgucugguggaccuccaacuccaucgucgucuucugcggcaccuccggcaccuacggcaccggcuccuggcccgacggcgccaacaucaacuucaugcccaucuga

SEQ ID NO: 120473 - RNA, 1410 nt, Artificial Sequence
  derived and/or modified CDS sequence (opt2) from neuraminidase__InfluenzaA__AHJ57957
augaaccccaaccagaagaucaucaccaucggcuccgucucccucaccaucgccaccgucuccuuccucaugcagaucgccauccucaccaccaccgucacccuccacuucaagcagaacgagugcaacaugccccccaagaaccaggucauguccugcgagcccaucaucaucgagcgcaacaucaccgagaucgucuaccucaacaacaccaccgucgagaaggagaucugccccaaggucgucgaguaccgcaacugguccaagccccagugcaagaucaccggcuucgcccccuucuccaaggacaacuccauccgccucuccgccggcggcgacaucugggucacccgcgagcccuacgucuccugcggccucggcaagugcuaccaguucgcccucggccagggcaccacccucgacaacucccacuccaacggcaccauccacgaccgcaucccccaccgcacccuccucaugaacgagcucggcguccccuuccaccucggcaccaagcaggucugcaucgccugguccuccuccuccugccacgacggccgcgccuggcuccacaucugcaucaccggcgacgaccgcaacgccaccgccuccuucaucuacgacggcaugcucgucgacuccaucggcuccugguccaagaacauccuccgcacccaggaguccgagugcgucugcaucaacggcaccugcgccgucgucaugaccgacggcuccgccuccggcgucgccgacacccgcauccucuucauccgcgagggcaagaucguccacaucuccccccucuccggcuccgcccagcacaucgaggagugcuccugcuacccccgcuaccccgacguccgcugcgucugccgcgacaacuggaagggcuccaaccgccccgucaucgacaucaacauggccgacuacuccaucgacuccaacuacgucugcuccggccucgucggcgacaccccccgcaacgacgacaacuccuccuccuccaacugccgcgaccccaacaacgagcgcggcaaccccggcgucaagggcugggccuucgacuacggcaacgacgucuggaugggccgcaccaucaaccgcgacucccgcuccggcuacgagaccuuccgcgucaucggcggcuggaccaccgccaacuccaagucccagaucaaccgccaggucaucgucgacaacaacaacugguccggcuacuccggcgucuucuccgucgagggcaaguccugcaucaaccgcugcuucuacgucgagcucauccgcggccgcccccaggagccccgcgucugguggaccuccaacuccaucgucgucuucugcggcaccuccggcaccuacggcaccggcuccuggcccgacggcgccaacaucaacuucaugcccaucuga

SEQ ID NO: 120474 - RNA, 1410 nt, Artificial Sequence
  derived and/or modified CDS sequence (opt2) from neuraminidase__InfluenzaA__AHJ57968
augaaccccaaccagaagaucaucaccgucggcuccgucucccucgccaucgccaccaucugccuccucaugcagaucgccauccucgccaccaccgucacccuccacuucaagcagaacgagugcaacauccccuccaagaaccaggucaugcccugcgagcccaucaucaucgagcgcaacaucaccgaggucgucuaccucaacaacaccaucaucgagaaggagaucugccccaaggucgucgaguaccgcaacugguccaagccccagugccagaucaccggcuucgcccccuucuccaaggacaacuccauccgccucuccgccggcggcgacaucugggucacccgcgagcccuacgucuccugcucccccuccaagugcuaccaguucgcccucggccagggcaccacccucgacaacucccacuccaacggcaccauccacgaccgcaucccccaccgcacccuccucaugaacgagcucggcguccccuuccaccucggcaccaagcaggucugcaucgccugguccuccuccuccugccacgacggccgcgccuggcuccacgucugcaucaccggcgacgaccgcaacgccaccgccuccuucaucuacaacggcaugcucgucgacuccaucuccuccuggucccgcaacauccuccgcacccaggaguccgagugcgucugcaucaacggcaccugcaccgucaucaugaccgacggcuccgccuccggcgucgccgacacccgcauccucuucauccgcgagggcaagaucguccacaucuccccccucuccggcuccgcccagcacaucgaggagugcuccugcuacccccgcuaccccgacguccgcugcgucugccgcgacaacuggaagggcuccaaccgccccgucaucgacaucaacauggccgacuacuccaucgacuccaacuacgucugcuccggccucgucggcgacaccccccgcaacgacgacaacuccuccuccuccaacugccgcgaccccaacaacgagcgcggcaaccccggcgucaagggcugggccuucgacgacggcaacgacgucuggaugggccgcaccaucaaccgcgacucccgcuccggcuacgagaccuuccgcgucaucggcggcuggaccaccgccaacuccaagucccagaucaaccgccaggucaucgucgacaacaacaacugguccggcuacuccggcgucuucuccgucgagggcaaguccugcaucaaccgcugcuucuacgucgagcucauccgcggccgcccccaggagacccgcgucugguggaccuccaacuccaucgucgucuucugcggcaccuccugcaccuacggcaccggcuccuggcccgacggcgccaacaucaacuucaugcccaucuga

SEQ ID NO: 120475 - RNA, 1413 nt, Artificial Sequence
  derived and/or modified CDS sequence (opt2) from neuraminidase__InfluenzaA__AHJ57980
augaaccccaaccagaagaacaccugcaucuccgccaucggcaugacccucuccgucgucucccuccucaucggcgucgccgaccucggccucaacaucggccuccacuacaaggucuccgacuccuccaacaucaacauccccaacaugaacgagaccaaccccaccaccaccaucaucaacaacaacccccagaacaacuucaccaacaucaccaacaucaucgucaacaagaacgaggaggagaaguuccucaaccucaccaagccccucugcgaggucaacuccuggcacauccucuccaaggacaacgccauccgcaucggcgaggacgcccacauccucgucacccgcgagcccuaccucuccugcgacccccagggcugccgcauguucgcccucucccagggcaccacccuccgcggccgccacgccaacggcaccauccacgaccgcucccccuuccgcgcccucaucuccugggagaugggccaggcccccucccccuacaacgcccgcgucgagugcaucggcugguccuccaccuccugccacgacggcaucucccgcauguccaucugcaucuccggccccaacaacaacgccuccgccgucgucugguacggcggccgccccgucaccgagauccccuccugggccggcaacauccuccgcacccaggaguccgagugcgucugccacaagggcaucugccccgucgucaugaccgacggccccgccaacaaccgcgccgccaccaagaucaucuacuucaaggagggcaagauccagaagaucgaggagcucaagggcaacgcccagcacaucgaggagugcuccugcuacggcgccgccggcaugaucaagugcaucugccgcgacaacuggaagggcgccaaccgccccgucaucaccaucgaccccgagaugaugacccacaccuccaaguaccucugcuccaagauccucaccgacaccucccgccccaacgaccccaccuccggcaacugcgacgcccccaucaccggcggcucccccgaccccggcgucaagggcuucgccuuccucgacggcgagaacuccuggcucggccgcaccaucuccaaggacucccgcuccggcuacgagaugcucaagguccccaacgccgagaccgacacccaguccggccccaucuccuaccagaccaucgucaacaaccagaacugguccggcuacuccggcgccuucaucgacuacugggccaacaaggagugcuucaaccccugcuucuacgucgagcucauccgcggccgccccaaggaguccuccguccucuggaccuccaacuccaucgucgcccucugcggcucccgcgagcgccucggcuccugguccuggcacgacggcgccgagaucaucuacuucaaguga

SEQ ID NO: 120476 - RNA, 1410 nt, Artificial Sequence
  derived and/or modified CDS sequence (opt2) from neuraminidase__InfluenzaA__AHJ57992
augaaccccaaccagaagaucaucaccaucggcuccgucucccucaccaucgccaccgucuccuuccucaugcagaucgccauccucaccaccaccgucacccuccacuucaagcacaacgagugcaacaugccccccaagaaccaggucauguccugcgagcccaucaucaucgagcgcaacaucaccgagaucgucuaccucaacaacaccaccgucgagaaggagaucugccccaaggucgucgaguaccgcaacugguccaagccccagugcaagaucaccggcuucgcccccuucuccaaggacaacuccauccgccucuccgccggcggcgacaucugggucacccgcgagcccuacgucuccugcggccucggcaagugcuaccaguucgcccucggccagggcaccacccucgacaacucccacuccaacggcaccauccacgaccgcaucccccaccgcacccuccucaugaacgagcucggcguccccuuccaccucggcaccaagcaggucugcaucgccugguccuccuccuccugccacgacggccgcgccuggcuccacaucugcaucaccggcgacgaccgcaacgccaccgccuccuucaucuacgacggcaugcucgucgacuccaucggcuccugguccaagaacauccuccgcacccaggaguccgagugcgucugcaucaacggcaccugcgccgucgucaugaccgacggcuccgccuccggcgucgccgacacccgcauccucuucauccgcgagggcaagaucguccacaucuccccccucuccggcuccgcccagcacaucgaggagugcuccugcuacccccgcuaccccgacguccgcugcgucugccgcgacaacuggaagggcuccaaccgccccgucaucaacaucaacauggccgacuacuccaucgacuccaacuacgucugcuccggccucgucggcgacaccccccgcaacgacgacaacuccuccuccuccaacugccgcgaccccaacaacgagcgcggcaaccccggcgucaagggcugggccuucgacgacggcaacgacgucuggaugggccgcaccaucaaccgcgacucccgcuccggcuacgagaccuuccgcgucaucggcggcuggaccaccgccaacuccaagucccagaucaaccgccaggucaucgucgacaacaacaacugguccggcuacuccggcgucuucuccgucgagggcaaguccugcaucaaccgcugcuucuacgucgagcucauccgcggccgcccccaggagccccgcgucugguggaccuccaacuccaucgucgucuucugcggcaccuccggcaccuacggcaccggcuccuggcccgacggcgccaacaucaacuucaugcccaucuga

SEQ ID NO: 120477 - RNA, 1413 nt, Artificial Sequence
  derived and/or modified CDS sequence (opt2) from neuraminidase__InfluenzaA__AHJ58004
augaaccccaaccagaagaucaccugcaucuccgccaccggcgucacccucuccgucgucucccuccucaucggcaucgccaaccucggccucaacaucggccuccacuacaaggucuccgacuccuccaacaucaacauccccaacaugaacgagaccaaccccaccaccaccaucaucaacaaccacacccagaacaacuucaagaacaucaccaacaucaucgucaacaagaacgaggagggcaccuuccucaaccucaccaagccccucugcgaggucaacuccuggcacauccucuccaaggacaacgccauccgcaucggcgaggacgcccacauccucgucacccgcgagcccuaccucuccugcgacccccagggcugccgcauguucgcccucucccagggcaccacccuccgcggccgccacgccaacggcaccauccacgaccgcucccccuuccgcgcccucaucuccugggagaugggccaggcccccucccccuacaacgcccgcgucgagugcaucggcugguccuccaccuccugccacgacggcaucucccgcauguccaucugcaucuccggccccaacaacaacgccuccgccgucgucugguaccgcggccgccccgucaccgagauccccuccugggccggcaacauccuccgcacccaggaguccgagugcgucugccacaagggcaucugccccgucgucaugaccgacggccccgccaacaaccgcgccgccaccaagaucaucuacuucaaggagggcaagauccagaagaucgaggagcucaagggcaacgcccagcacaucgaggagugcuccugcuacggcgccgccggcaugaucaagugcaucugccgcgacaacuggcgcggcgccaaccgccccgucaucaccaucgaccccgagaugaugacccacaccuccaaguaccucugcuccaagauccucaccgacaccucccgccccaacgaccccaccaacggcaacugcgacgagcccaucaccggcggcucccccgaccccggcgucaagggcuucgccuuccucgacggcgagaacuccuggcucggccgcaccaucuccaaggacucccgcuccggcuacgagaugcucaagguccccaacgccgagaccgacacccaguccggccccaccuccuaccagaucaucgucaacaaccagaacugguccggcuacuccggcgccuucaucgacuacugggccaacaaggagugcuucaaccccugcuucuacgucgagcucauccgcggccgccccaaggaguccuccguccucuggaccuccaacuccaucgucgcccucugcggcucccgcgagcgccucggcuccugguccuggcacgacggcgccgagaucaucuacuucaaguga

SEQ ID NO: 120478 - RNA, 1413 nt, Artificial Sequence
  derived and/or modified CDS sequence (opt2) from neuraminidase__InfluenzaA__AHJ58016
augaaccccaaccagaagaucaccugcaucuccgccaccggcaugacccucuccgucgucuccaugcucaucggcaucgccaaccucggccucaacaucggccuccacuacaaggucuccgacuccaccaacaucaacauccccaagaugaacgagaccaaccccaccaccaccaucaucaacaaccacccccagaacaacuucaccaacaucaccaacaucaucgucaacaagaacgaggaggagaacuuccucaaccucaccaagccccucugcgaggucaacuccuggcacauccucuccaaggacaacgccauccgcaucggcgagaacgcccacauccucgucacccgcgagcccuaccucuccugcgacccccagggcugccgcauguucgcccucucccagggcaccacccuccgcggccgccacgccaacggcaccauccacgaccgcucccccuuccgcgcccucaucuccugggagaugggccaggcccccucccccuacaacgcccgcgucgagugcaucggcugguccuccaccuccugccacgacggcaucucccgcauguccaucugcaucuccggccccaacaacaacgccuccgccgucgucugguacggcggccgccccgucaccgagauccccuccugggccggcaacauccuccgcacccaggaguccgagugcgucugccacggcggcaucugccccgucgucaugaccgacggccccgccaacaaccgcgccgagaccaagaucaucuacuucaaggagggcaagauccagaagaucgaggagcucaagggcaacgcccagcacaucgaggagugcuccugcuacggcgccuccggcaugaucaagugcaucugccgcgacaacuggaagggcgccaaccgccccgucaucaccaucgaccccgagaugaugacccacaccuccaaguaccucugcuccaagauccucaccgacaccucccgccccaacgaccccaccaacggcaacugcgacgcccccaucaccggcggcucccccgaccccggcgucaagggcuucgccuuccucgacggcaagaacuccuggcucggccgcaccaucuccaaggacucccgcuccggcuacgagaugcucaagguccccaacgccgagaccgacacccaguccggcgccaucucccaccagaucaucgucaacaaccagaacugguccggcuacuccggcgccuucaucgacuacugggccaacaaggagugcuucaaccccugcuucuacgucgagcucauccgcggccgccccaaggaguccuccguccucuggaccuccaacuccaucgucgcccucugcggcucccgcgagcgccucggcuccugguccuggcacgacggcgccgagaucaucuaccucaaguga

SEQ ID NO: 120479 - RNA, 1413 nt, Artificial Sequence
  derived and/or modified CDS sequence (opt2) from neuraminidase__InfluenzaA__AHJ58028
augaaccccaaccagaagaucaccugcaucuccgccaccggcaugacccucuccgucgucuccaugcucaucggcaucgccaaccucggccucaacaucggccuccacuacaaggucuccgacuccaccaacaucaacauccccaagaugaacgagaccaaccccaccaccaccaucaucaacaaccacccccagaacaacuucaccaacaucaccaacaucaucgucaacaagaacgaggaggagaacuuccucaaccucaccaagccccucugcgaggucaacuccuggcacauccucuccaaggacaacgccguccgcaucggcgaggacgcccacauccucgucacccgcgagcccuaccucuccugcgacccccagggcugccgcauguucgcccucucccagggcaccacccuccgcggccgccacgccaacggcaccauccacgaccgcucccccuuccgcgcccucaucuccugggagaugggccaggcccccucccccuacaacacccgcgucgagugcaucggcugguccuccaccuccugccacgacggcaucucccgcauguccaucugcaucuccggccccaacaacaacgccuccgccgucgucugguaccgcggccgccccgucaccgagauccccuccugggccggcaacauccuccgcacccaggaguccgagugcgucugccacaagggcaucugccccgucgucaugaccgacggccccgccaacaaccgcgccgagaccaagaucaucuacuucaaggagggcaagauccagaagaucgaggagcucgagggcaacgcccagcacaucgaggagugcuccugcuacggcaccgccggcaugaucaagugcaucugccgcgacaacuggcgcggcgccaaccgccccgucaucaccaucgaccccgagaugaugacccacaccucccgcuaccucugcuccaagauccucaccgacaccucccgccccaacgaccccaccaacggcaacugcgacgcccccaucaccggcggcucccccgaccccggcgucaagggcuucgccuuccucgacggcaagaacuccuggcucggccgcaccaucuccaaggacucccgcuccggcuacgagaugcucaagguccccaacgccgagaccgacauccaguccggccccaccuccaaccagaucaucgucaacaaccagaacugguccggcuacuccggcgccuucaucgacuacugggccaacaaggagugcuucaaccccugcuucuacgucgagcucauccgcggccgccccaaggaguccaacguccucuggaccuccaacuccaucgucgcccucugcggcucccgcgagcgccucggcuccugguccuggcacgacggcgccgagaucaucuacuucaaguga

SEQ ID NO: 120480 - RNA, 1410 nt, Artificial Sequence
  derived and/or modified CDS sequence (opt2) from neuraminidase__InfluenzaA__AHJ58040
augaaccccaaccagaagaucaucaccgucggcuccgucucccucgccaucgccaccaucugccuccucaugcagaucgccauccucgccaccaccgucacccuccacuucaagcagaacgagugcaacauccccuccaagaaccaggucaugcccugcgagcccaucaucaucgagcgcaacaucaccgaggucgucuaccucaacaacaccaucaucgagaaggagaucugccccaaggucgucgaguaccgcaacugguccaagccccagugccagaucaccggcuucgcccccuucuccaaggacaacuccauccgccucuccgccggcggcgacaucugggucacccgcgagcccuacgucuccugcucccccuccaagugcuaccaguucgcccucggccagggcaccacccucgacaacucccacuccaacggcaccauccacgaccgcaucccccaccgcacccuccucaugaacgagcucggcguccccuuccaccucggcaccaagcaggucugcaucgccugguccuccuccuccugccacgacggccgcgccuggcuccacgucugcaucaccggcgacgaccgcaacgccaccgccuccuucaucuacaacggcaugcucgucgacuccaucuccuccuggucccgcaacauccuccgcacccaggaguccgagugcgucugcaucaacggcaccugcaccgucaucaugaccgacggcuccgccuccggcgucgccgacacccgcauccucuucauccgcgagggcaagaucguccacgucuccccccucuccggcuccgcccagcacaucgaggagugcuccugcuacccccgcuaccccgacguccgcugcgucugccgcgacaacuggaagggcuccaaccgccccgucgucgacaucaacauggccgacuacuccaucgacucccacuacgucugcuccggccucgucggcgacaccccccgcaacgacgacuccuccuccuccuccaacugcaaggaccccaacaacgagcgcggcaaccccggcgucaagggcugggccuucgacgacggcaacgacgucuggaugggccgcaccaucucccgcgacucccgcuccggcuacgagaccuuccgcgucaucggcggcuggaccaccgccaacuccaagucccagaucaaccgccaggucaucgucgacaacaacaacugguccggcuacuccggcgucuucuccgucgagggcaaguccugcaucaaccgcugcuucuacgucgagcucauccgcggccgcccccaggagacccgcgucugguggaccuccaacuccaucgucgucuucugcggcaccuccggcaccuacggcaccggcuccuggcccgacggcgccaacaucaacuucaugcccaucuga

SEQ ID NO: 120481 - RNA, 1410 nt, Artificial Sequence
  derived and/or modified CDS sequence (opt2) from neuraminidase__InfluenzaA__AHJ58052
augaaccccaaccagaagaucaucaccaucggcuccgucucccucaccaucgccaccgucuccuuccucaugcagaucgccauccucaccaccaccgucacccuccacuucaagcacaacgagugcaacaugccccccaagaaccaggucauguccugcgagcccaucaucaucgagcgcaacaucaccgagaucgucuaccucaacaacaccaccgucgagaaggagaucugccccaaggucgucgaguaccgcaacugguccaagccccagugcaagaucaccggcuucgcccccuucuccaaggacaacuccauccgccucuccgccggcggcgacaucugggucacccgcgagcccuacgucuccugcggccucggcaagugcuaccaguucgcccucggccagggcaccacccucgacaacucccacuccaacggcaccauccacgaccgcaucccccaccgcacccuccucaugaacgagcucggcguccccuuccaccucggcaccaagcaggucugcaucgccugguccuccuccuccugccacgacggccgcgccuggcuccacaucugcaucaccggcgacgaccgcaacgccaccgccuccuucaucuacgacggcaugcucgucgacuccaucggcuccugguccaagaacauccuccgcacccaggaguccgagugcgucugcaucaacggcaccugcgccgucgucaugaccgacggcuccgccuccggcgucgccgacacccgcauccucuucauccgcgagggcaagaucguccacaucuccccccucuccggcuccgcccagcacaucgaggagugcuccugcuacccccgcuaccccgacguccgcugcgucugccgcgacaacuggaagggcuccaaccgccccgucaucgacaucaacauggccgacuacuccaucgacuccaacuacgucugcuccggccucgucggcgacaccccccgcaacgacgacaacuccuccuccuccaacugccgcgaccccaacaacgagcgcggcaaccccggcgucaagggcugggccuucgacgacggcaacgacgucuggaugggccgcaccaucaaccgcgacucccgcuccggcuacgagaccuuccgcgucaucggcggcuggaccaccgccaacuccaagucccagaucaaccgccaggucaucgucgacaacaacaacugguccggcuacuccggcgucuucuccgucgagggcaaguccugcaucaaccgcugcuucuacgucgagcucauccgcggccgcccccaggagccccgcgucugguggaccuccaacuccaucgucgucuucugcggcaccuccggcaccuacggcaccggcuccuggcccgacggcgccaacaucaacuucaugcccaucuga

SEQ ID NO: 120482 - RNA, 1413 nt, Artificial Sequence
  derived and/or modified CDS sequence (opt2) from neuraminidase__InfluenzaA__AHJ58064
augaaccccaaccagaagaucaccugcaucuccgccaccggcaugacccucuccgucgucucccuccucaucggcaucgccaaccucggccucaacaucggccuccacuacaaggucuccgacuccaccaacaucaacauccccaacaugaacgagaccucccccaccaccaccaucaucaacaaccacccccagaacaacuucaccaacaucaccaacaucaucgucaacaagaacgaggaggagaacuuccucaaccucaccaagccccucugcgaggucaacuccuggcacauccucuccaaggacaacgccauccgcaucggcgagaacgcccacauccucgucacccgcgagcccuaccucuccugcgacccccagggcugccgcauguucgcccucucccagggcaccacccuccgcggccagcacgccaacggcaccauccacgaccgcucccccuuccgcgcccucaucuccugggagaugggccaggcccccucccccuacaacgcccgcgucgagugcaucggcugguccuccaccuccugccacgacggcaucucccgcauguccaucugcaucuccggccccaacaacaacgccuccgccgucgucugguacggcggccgccccgucaccgagauccccuccugggccggcaacauccuccgcacccaggaguccgagugcgucugccacggcggcaucugccccgucgucaugaccgacggccccgccaacaaccgcgccgagaccaagaucaucuacuucaaggagggcaagauccagaagaucgaggagcucaagggcaacgcccagcacaucgaggagugcuccugcuacggcgccuccggcaugaucaagugcaucugccgcgacaacuggaagggcgccaaccgccccgucaucaccaucgaccccgagaugaugacccacaccuccaaguaccucugcuccaagauccucaccgacaccucccgccccaacgaccccaucaacggcaacugcgacgcccccaucaccggcggcucccccgaccccggcgucaagggcuucgccuuccucgacggcgagaacuccuggcucggccgcaccaucuccaaggacucccgcuccggcuacgagaugcucaagguccccaacgccgagaccgacacccaguccggcgccaucucccaccagaugaucgucaacaaccagaacugguccggcuacuccggcgccuucaucgacuacugggccaacaaggagugcuucaaccccugcuucuacgucgagcucauccgcggccgccccaaggaguccuccguccucuggaccuccaacuccaucgucgcccucugcggcucccgcgagcgccucggcuccugguccuggcacgacggcgccgagaucaucuacuucaaguga

SEQ ID NO: 120483 - RNA, 1401 nt, Artificial Sequence
  derived and/or modified CDS sequence (opt2) from neuraminidase__InfluenzaA__AHJ58075
augaaccccaaccagaagaucaucgccaucggcuccgucucccucaccaucgccaucaucugcuuccuccuccagaucgccauccucaccaccaccaugacccuccacuuccgccagaacgagugcuccaaccccuccaacaaccaggucguccccugcgagcccaucaucaucgagcgcaacaccguccaccucaacuccaccaccaucgagaaggagaucugccccaaggucgccgaguacaagaacugguccaagccccagugccagaucaccggcuucgcccccuucuccaaggacaacuccauccgccucuccgccggcggcgacaucugggucacccgcgagcccuacgucuccugcucccucggcaagugcuaccaguucgcccucggccagggcaccacccucaagaacaagcacuccaacggcaccacccacgaccgcaucccccaccgcacccuccucaugaacgagcucggcguccccuuccaccucggcaccaagcaggucugcaucgccugguccuccuccuccugccacgacggcaaggccuggcuccacaucugcgucaccggcgacgacaagaacgccaccgccuccaucaucuacgacggcaugcucgucgacuccaucggcuccugguccaagaacauccuccgcacccaggaguccgagugcgucugcaucaacggcaccugcgccgucgucaugaccgacggcuccgccuccggcaaggccgacacccgcauccucuucauccgcgagggcaagaucaucaacaucuccccccucuccggcuccgcccagcacgucgaggagugcuccugcuacccccgcuaccccgagguccgcugcgucugccgcgacaacuggaagggcuccaaccgccccguccucuacaucaacauggccgacuacuccaucgaguccuccuacgucugcuccggccucgucggcgacaccccccgcgacgacgacuccuccuccuccuccaacugccgcgaccccaacaacgagcgcggcgcccccggcgucaagggcugggccuucgacgacggcaacgacaucuggaugggccgcaccaucaaguccgacucccgcuccggcuacgagaccuuccgcgucgucaacggcuggaccaccgccaacuccaagucccagaucaaccgccaggucaucgucgacuccgacuccugguccggcuacuccggcaucuucuccgucgagggcaagaacugcaucaaccgcugcuucuacgucgagcucauccgcggccgcccccaggagacccgcgucugguggaccuccaacuccaucaucgucuucugcggcaccuccggcaccuacggcaccggcuccuggcccgacggcgccaacaucaacuucaugcccaucuga

SEQ ID NO: 120484 - RNA, 1413 nt, Artificial Sequence
  derived and/or modified CDS sequence (opt2) from neuraminidase__InfluenzaA__AHJ58087
augaaccccaaccagaagaucaccugcaucuccgccaccggcaugacccucuccgucgucucccuccucaucggcaucgccaaccucggccucaacaucggccuccacuacaaggucuccgacuccaccaacaucaacauccccaacaugaacgagaccucccccaccaccaccaucaucaacaaccacccccagaacaacuucaccaacaucaccaacaucaucgucaacaagaacgaggaggagaacuuccucaaccucaccaagccccucugcgaggucaacuccuggcacauccucuccaaggacaacgccauccgcaucggcgagaacgcccacauccucgucacccgcgagcccuaccucuccugcgacccccagggcugccgcauguucgcccucucccagggcaccacccuccgcggccagcacgccaacggcaccauccacgaccgcucccccuuccgcgcccucaucuccugggagaugggccaggcccccucccccuacaacgcccgcgucgagugcaucggcugguccuccaccuccugccacgacggcaucucccgcauguccaucugcaucuccggccccaacaacaacgccuccgccgucgucugguacggcggccgccccgucaccgagauccccuccugggccggcaacauccuccgcacccaggaguccgagugcgucugccacggcggcaucugccccgucgucaugaccgacggccccgccaacaaccgcgccgagaccaagaucaucuacuucaaggagggcaagauccagaagaucgaggagcucaagggcaacgcccagcacaucgaggagugcuccugcuacggcgccuccggcaugaucaagugcaucugccgcgacaacuggaagggcgccaaccgccccgucaucaccaucgaccccgagaugaugacccacaccuccaaguaccucugcuccaagauccucaccgacaccucccgccccaacgaccccaucaacggcaacugcgacgcccccaucaccggcggcucccccgaccccggcgucaagggcuucgccuuccucgacggcgacaacuccuggcucggccgcaccaucuccaaggacucccgcuccggcuacgagaugcucaagguccccaacgccgagaccgacacccaguccggcgccaucucccaccagaugaucgucaacaaccagaacugguccggcuacuccggcgccuucaucgacuacugggccaacaaggagugcuucaaccccugcuucuacgucgagcucauccgcggccgccccaaggaguccuccguccucuggaccuccaacuccaucgucgcccucugcggcucccgcgagcgccucggcuccugguccuggcacgacggcgccgagaucaucuacuucaaguga

SEQ ID NO: 120485 - RNA, 1410 nt, Artificial Sequence
  derived and/or modified CDS sequence (opt2) from neuraminidase__InfluenzaA__AHL80721
augaaccccaaccagaagaucaucaccaucggcuccgucugcaugaccaucggcauggccaaccucauccuccagaucggcaacaucaucuccaucuggaucucccacuccauccagcucggcaaccagaaccagaucgagaccugcaaccaguccgucaucaccuacgagaacaacaccugggucaaccagaccuacgucaacaucuccaacaccaacuucgccgccggccaguccgucgucuccgucaagcucgccggcaacuccucccucugccccgucuccggcugggccaucuacuccaaggacaacuccauccgcaucggcuccaagggcgacgucuucgucauccgcgagcccuucaucuccugcuccccccucgagugccgcaccuucuuccucacccagggcgcccuccucaacgacaagcacuccaacggcaccaucaaggaccgcucccccuaccgcacccucauguccugccccaucggcgagguccccucccccuacaacucccgcuucgaguccgucgccugguccgccuccgccugccacgacggcaucaacuggcucaccaucggcaucuccggccccgacaacggcgccgucgccguccucaaguacaacggcaucaucaccgacaccaucaaguccuggcgcaacaacauccuccgcacccaggaguccgagugcgccugcgucaacggcuccugcuucaccgucaugaccgacggccccuccgacggccaggccuccuacaagaucuuccgcaucgagaagggcaagaucgucaaguccgucgagaugaacgcccccaacuaccacuacgaggagugcuccugcuaccccgacuccuccgagaucaccugcgucugccgcgacaacuggcacggcuccaaccgccccugggucuccuucaaccagaaccucgaguaccagaucggcuacaucugcuccggcaucuucggcgacaacccccgccccaacgacaagaccggcuccugcggccccgucuccuccaacggcgccaacggcgucaagggcuucuccuucaaguacggcaacggcgucuggaucggccgcaccaaguccaucuccucccgcaagggcuucgagaugaucugggaccccaacggcuggaccggcaccgacaacaacuucuccaucaagcaggacgucgucggcaucaacgagugguccggcuacuccggcuccuucguccagcaccccgagcucaccggccucgacugcauccgccccugcuucugggucgagcucauccgcggccgccccaaggagaacaccaucuggaccuccggcuccuccaucuccuucugcggcgucaacuccgacaccgucggcugguccuggcccgacggcgccgagcuccccuucaccaucgacaaguga

SEQ ID NO: 120486 - RNA, 1410 nt, Artificial Sequence
  derived and/or modified CDS sequence (opt2) from neuraminidase__InfluenzaA__AHL80732
augaaccccaaccagaagaucaucaccaucggcuccgucugcaugaccaucggcauggccaaccucauccuccagaucggcaacaucaucuccaucuggaucucccacuccauccagcucggcaaccagaaccagaucgagaccugcaaccaguccgucaucaccuacgagaacaacaccugggucaaccagaccuacgucaacaucuccaacaccaacuucgccgccggccaguccgucgucuccgucaagcucgccggcaacuccucccucugccccgucuccggcugggccaucuacuccaaggacaacuccauccgcaucggcuccaagggcgacgucuucgucauccgcgagcccuucaucuccugcuccccccucgagugccgcaccuucuuccucacccagggcgcccuccucaacgacaagcacuccaacggcaccaucaaggaccgcucccccuaccgcacccucauguccugccccaucggcgagguccccucccccuacaacucccgcuucgaguccgucgccugguccgccuccgccugccacgacggcaucaacuggcucaccaucggcaucuccggccccgacaacggcgccgucgccguccucaaguacaacggcaucaucaccgacaccaucaaguccuggcgcaacaacauccuccgcacccaggaguccgagugcgccugcgucaacggcuccugcuucaccgucaugaccgacggccccuccgacggccaggccuccuacaagaucuuccgcaucgagaagggcaagaucgucaaguccgucgagaugaacgcccccaacuacuacuacgaggagugcuccugcuaccccgacuccuccgagaucaccugcgucugccgcgacaacuggcacggcuccaaccgccccugggucuccuucaaccagaaccucgaguaccagaucggcuacaucugcuccggcaucuucggcgacaacccccgccccaacgacaagaccggcuccugcggccccgucuccuccaacggcgccaacggcgucaagggcuucuccuucaaguacggcaacggcgucuggaucggccgcaccaaguccaucuccucccgcaacggcuucgagaugaucugggaccccaacggcuggaccggcaccgacaacaacuucuccaucaagcaggacaucgucggcaucaacgagugguccggcuacuccggcuccuucguccagcaccccgagcucaccggccucgacugcauccgccccugcuucugggucgagcucauccgcggccgccccaaggagaacaccaucuggaccuccggcuccuccaucuccuucugcggcgucaacuccgacaccgucggcugguccuggcccgacggcgccgagcuccccuucaucaucgacaaguga

SEQ ID NO: 120487 - RNA, 1410 nt, Artificial Sequence; identical to SEQ ID NO: 112774
  derived and/or modified CDS sequence (opt2) from neuraminidase__InfluenzaA__AHL80743

SEQ ID NO: 120488 - RNA, 1410 nt, Artificial Sequence
  derived and/or modified CDS sequence (opt2) from neuraminidase__InfluenzaA__AHL80754
augaaccccaaccagaagaucaucaccaucggcuccgucugcaugaccaucggcauggccaaccucauccuccagaucggcaacaucaucuccaucuggaucucccacuccauccagcucggcaaccagaaccagaucgagaccugcaaccaguccgucaucaccuacgagaacaacaccugggucaaccagaccuacgucaacaucuccaacaccaacuucgccgccggccaguccgucgucuccgucaagcucgccggcaacuccucccucugccccgucuccggcugggccaucuacuccaaggacaacuccauccgcaucggcuccaagggcgacgucuucgucauccgcgagcccuucaucuccugcuccccccucgagugccgcaccuucuuccucacccagggcgcccuccucaacgacaagcacuccaacggcaccaucaaggaccgcucccccuaccgcacccucauguccugccccaucggcgagguccccucccccuacaacucccgcuucgaguccgucgccugguccgccuccgccugccacgacggcaucaacuggcucaccaucggcaucuccggccccgacaacggcgccgucgccguccucaaguacaacggcaucaucaccgacaccaucaaguccuggcgcaacaacauccuccgcacccaggaguccgagugcgucugcgucaacggcuccugcuucaccgucaugaccgacggccccuccgacggccaggccuccuacaagaucuuccgcaucgagaagggcaagaucgucaaguccgucgagaugaacgcccccaacuaccacuacgaggagugcuccugcuaccccgacuccuccgagaucaccugcgucugccgcgacaacuggcacggcuccaaccgccccugggucuccuucaaccagaaccucgaguaccagaucggcuacaucugcuccggcaucuucggcgacaacccccgccccaacgacaagaccggcuccugcggccccgucuccuccaacggcgccaacggcgucaagggcuucuccuucaaguacggcaacggcgucuggaucggccgcaccaaguccaucuccucccgcaacggcuucgagaugaucugggaccccaacggcuggaccggcaccgacaacaacuucuccaucaagcaggacaucgucggcaucaacgagugguccggcuacuccggcuccuucguccagcaccccgagcucaccggccucgacugcauccgccccugcuucugggucgagcucauccgcggccgccccaaggagaacaccaucuggaccuccggcuccuccaucuccuucugcggcgucaacuccgacaccgucggcugguccuggcccgacggcgccgagcuccccuucaccaucgacaaguga

SEQ ID NO: 120489 - RNA, 1410 nt, Artificial Sequence; identical to SEQ ID NO: 112774
  derived and/or modified CDS sequence (opt2) from neuraminidase__InfluenzaA__AHL80765

SEQ ID NO: 120490 - RNA, 1410 nt, Artificial Sequence; identical to SEQ ID NO: 112774
  derived and/or modified CDS sequence (opt2) from neuraminidase__InfluenzaA__AHL80776

SEQ ID NO: 120491 - RNA, 1410 nt, Artificial Sequence; identical to SEQ ID NO: 112774
  derived and/or modified CDS sequence (opt2) from neuraminidase__InfluenzaA__AHL80787

SEQ ID NO: 120492 - RNA, 1410 nt, Artificial Sequence
  derived and/or modified CDS sequence (opt2) from neuraminidase__InfluenzaA__AHL80798
augaaccccaaccagaagaucaucaccaucggcuccgucugcaugaccaucggcauggccaaccucauccuccagaucggcaacaucaucuccaucuggaucucccacuccauccagcucggcaaccagaaccagaucgagaccugcaaccaguccgucaucaccuacgagaacaacaccugggucaaccagaccuacgucaacaucuccaacaccaacuucgccgccggccaguccgucgucuccgucaagcucgccggcaacuccucccucugccccgucuccggcugggccaucuacuccaaggacaacuccauccgcaucggcuccaagggcgacgucuucgucauccgcgagcccuucaucuccugcuccccccucgagugccgcaccuucuuccucacccagggcgcccuccucaacgacaagcacuccaacggcaccaucaaggaccgcucccccuaccgcacccucauguccugccccaucggcgagguccccucccccuacaacucccgcuucgaguccgucgccugguccgccuccgccugccacgacggcaucaacuggcucaccaucggcaucuccggccccgacaacggcgccgucgccguccucaaguacaacggcaucaucaccgacaccaucaaguccuggcgcaacaacauccuccgcacccaggaguccgagugcgccugcgucaacggcuccugcuucaccgucaugaccgacggccccuccgacggccaggccuccuacaagaucuuccgcaucgagaagggcaagaucgucaaguccgucgagaugaacgcccccaacuaccacuacgaggagugcuccugcuaccccgacuccuccgagaucaccugcgucugccgcgacaacuggcacggcuccaaccgccccugggucuccuucaaccagaaccucgaguaccagaucggcuacaucugcuccggcaucuucggcgacaacccccgccccaacgacaagaagggcuccugcggccccgucuccuccaacggcgccaacggcgucaagggcuucuccuucaaguacggcaacggcgucuggaucggccgcaccaaguccaucuccucccgcaacggcuucgagaugaucugggaccccaacggcuggaccggcaccgacaacaacuucuccgucaagcaggacaucgucggcaucaacgagugguccggcuacuccggcuccuucguccagcaccccgagcucaccggccucgacugcauccgccccugcuucugggucgagcucauccgcggccgccccaaggagaacaccaucuggaccuccggcuccuccaucuccuucugcggcgucaacuccgacaccgucggcugguccuggcccgacggcgccgagcuccccuucaccaucgacaaguga

SEQ ID NO: 120493 - RNA, 1410 nt, Artificial Sequence; identical to SEQ ID NO: 112774
  derived and/or modified CDS sequence (opt2) from neuraminidase__InfluenzaA__AHL80809

SEQ ID NO: 120494 - RNA, 1410 nt, Artificial Sequence; identical to SEQ ID NO: 112774
  derived and/or modified CDS sequence (opt2) from neuraminidase__InfluenzaA__AHL80820

SEQ ID NO: 120495 - RNA, 1410 nt, Artificial Sequence; identical to SEQ ID NO: 112774
  derived and/or modified CDS sequence (opt2) from neuraminidase__InfluenzaA__AHL80831

SEQ ID NO: 120496 - RNA, 1410 nt, Artificial Sequence; identical to SEQ ID NO: 112774
  derived and/or modified CDS sequence (opt2) from neuraminidase__InfluenzaA__AHL80842

SEQ ID NO: 120497 - RNA, 1410 nt, Artificial Sequence; identical to SEQ ID NO: 114062
  derived and/or modified CDS sequence (opt2) from neuraminidase__InfluenzaA__AHL80853

SEQ ID NO: 120498 - RNA, 1410 nt, Artificial Sequence
  derived and/or modified CDS sequence (opt2) from neuraminidase__InfluenzaA__AHL80864
augaaccccaaccagaagaucaucaccaucggcuccgucugcaugaccaucggcauggccaaccucauccuccagaucggcaacaucaucuccaucuggaucucccacuccauccagcucggcaaccagaaccagaucgagaccugcaaccaguccgucaucaccuacgagaacaacaccugggucaaccagaccuacgucaacaucuccaacaccaacuucgccgccggccaguccgucgucuccgucaagcucgccggcaacuccucccucugccccgucuccggcugggccaucuacuccaaggacaacuccauccgcaucggcuccaagggcgacgucuucgucauccgcgagcccuucaucuccugcuccccccucgagugccgcaccuucuuccucacccagggcgcccuccucaacgacaagcacuccaacggcaccaucaaggaccgcucccccuaccgcacccucauguccugccccaucggcgagguccccucccccuacaacucccgcuucgaguccgucgccugguccgccuccgccugccacgacggcaucaacuggcucaccaucggcaucuccggccccgacaacggcgccgucgccguccucaaguacaacggcaucaucaccgacaccaucaaguccuggcgcaacaacauccuccgcacccaggaguccgagugcgccugcgucaacggcuccugcuucaccgucaugaccgacggccccuccgacggccaggccuccuacaagaucuuccgcaucgagaagggcaagaucgucaaguccgucgagaugaacgcccccaacuacuacuacgaggagugcuccugcuaccccgacuccuccgagaucaccugcgucugccgcgacaacuggcacggcuccaaccgccccugggucuccuucaaccagaaccucgaguaccagaucggcuacaucugcuccggcaucuucggcgacaacccccgccccaacgacaagaagggcuccugcggccccgucuccuccaacggcgccaacggcgucaagggcuucuccuucaaguacggcaacggcgucuggaucggccgcaccaaguccaucuccucccgcaacggcuucgagaugaucugggaccccaacggcuggaccggcaccgacaacaacuucuccaucaagcaggacaucgucggcaucaacgagugguccggcuacuccggcuccuucguccagcaccccgagcucaccggccucgacugcauccgccccugcuucugggucgagcucauccgcggccgccccaaggagaacaccaucuggaccuccggcuccuccaucuccuucugcggcgucaacuccgacaccgucggcugguccuggcccgacggcgccgagcuccccuucaccaucgacaaguga

SEQ ID NO: 120499 - RNA, 1410 nt, Artificial Sequence; identical to SEQ ID NO: 114062
  derived and/or modified CDS sequence (opt2) from neuraminidase__InfluenzaA__AHL80875

SEQ ID NO: 120500 - RNA, 1410 nt, Artificial Sequence; identical to SEQ ID NO: 114062
  derived and/or modified CDS sequence (opt2) from neuraminidase__InfluenzaA__AHL80886

SEQ ID NO: 120501 - RNA, 1410 nt, Artificial Sequence
  derived and/or modified CDS sequence (opt2) from neuraminidase__InfluenzaA__AHL80897
augaaccccaaccagaagaucaucaccaucggcuccgucugcaugaccaucggcauggccaaccucauccuccagaucggcaacaucaucuccaucuggaucucccacuccauccagcucggcaaccagaaccagaucgagaccugcaaccaguccgucaucaccuacgagaacaacaccugggucaaccagaccuacgucaacaucuccaacaccaacuucgccgccggccaguccgucgucuccgucaagcucgccggcaacuccucccucugccccgucuccggcugggccaucuacuccaaggacaacuccauccgcaucggcuccaagggcgacgucuucgucauccgcgagcccuucaucuccugcuccccccucgagugccgcaccuucuuccucacccagggcgcccuccucaacgacaagcacuccaacggcaccaucaaggaccgcucccccuaccgcacccucauguccugccccaucggcgagguccccucccccuacaacucccgcuucgaguccgucgccugguccgccuccgccugccacgacggcaucaacuggcucaccaucggcaucuccggccccgacaacggcgccgucgccguccucaaguacaacggcaucaucaccgacaccaucaaguccuggcgcaacaacauccuccgcacccaggaguccgagugcgccugcaucaacggcuccugcuucaccgucaugaccgacggccccuccgacggccaggccuccuacaagaucuuccgcaucgagaagggcaagaucgucaaguccgucgagaugaacgcccccaacuaccacuacgaggagugcuccugcuaccccgacuccuccgagaucaccugcgucugccgcgacaacuggcacggcuccaaccgccccugggucuccuucaaccagaaccucgaguaccagaucggcuacaucugcuccggcaucuucggcgacaacccccgccccaacgacaagaagggcuccugcggccccgucuccuccaacggcgccaacggcgucaagggcuucuccuucaaguacggcaacggcgucuggaucggccgcaccaaguccaucuccucccgcaacggcuucgagaugaucugggaccccaacggcuggaccggcaccgacaacaacuucuccaucaagcaggacaucgucggcaucaacgagugguccggcuacuccggcuccuucguccagcaccccgagcucaccggccucgacugcauccgccccugcuucugggucgagcucauccgcggccgccccaaggagaacaccaucuggaccuccggcuccuccaucuccuucugcggcgucaacuccgacaccgucggcugguccuggcccgacggcgccgagcuccccuucaccaucgacaaguga

SEQ ID NO: 120502 - RNA, 1410 nt, Artificial Sequence
  derived and/or modified CDS sequence (opt2) from neuraminidase__InfluenzaA__AHL80908
augaaccccaaccagaagaucaucaccaucggcuccgucugcaugaccaucggcauggccaaccucauccuccagaucggcaacaucaucuccaucuggaucucccacuccauccagcucggcaaccagaaccagaucgagaccugcaaccaguccgucaccauccacgagaacaacaccugggucaaccagaccuacgucaacaucuccaacaccaacuucgccgccggccaguccgucgucuccgucaagcucgccggcaacuccucccucugccccgucuccggcugggccaucuacuccaaggacaacuccauccgcaucggcuccaagggcgacgucuucgucauccgcgagcccuucaucuccugcuccccccucgagugccgcaccuucuuccucacccagggcgcccuccucaacgacaagcacuccaacggcaccaucaaggaccgcucccccuaccgcacccucauguccugccccaucggcgagguccccucccccuacaacucccgcuucgaguccgucgccugguccgccuccgccugccacgacggcaucaacuggcucaccaucggcaucuccggccccgacaacggcgccgucgccguccucaaguacaacggcaucaucaccgacaccaucaaguccuggcgcaacaacauccuccgcacccaggaguccgagugcgccugcgucaacggcuccugcuucaccgucaugaccgacggccccuccgacggccaggccuccuacaagaucuuccgcaucgagaagggcaagaucgucaaguccgucgagaugaacgcccccaacuacuacuacgaggagugcuccugcuaccccgacuccuccgagaucaccugcgucugccgcgacaacuggcacggcuccaaccgccccugggucuccuucaaccagaaccucgaguaccagaucggcuacaucugcuccggcaucuucggcgacaacccccgccccaacgacaagaagggcuccugcggccccgucuccuccaacggcgccaacggcgucaagggcuucuccuucaaguacggcaacggcgucuggaucggccgcaccaaguccaucuccucccgcaacggcuucgagaugaucugggaccccaacggcuggaccggcaccgacaacaacuucuccaucaagcaggacaucgucggcaucaacgagugguccggcuacuccggcuccuucguccagcaccccgagcucaccggccucgacugcauccgccccugcuucugggucgagcucauccgcggccgccccaaggagaacaccaucuggaccuccggcuccuccaucuccuucugcggcgucaacuccgacaccgucggcugguccuggcccgacggcgccgagcuccccuucaccaucgacaaguga

SEQ ID NO: 120503 - RNA, 1410 nt, Artificial Sequence
  derived and/or modified CDS sequence (opt2) from neuraminidase__InfluenzaA__AHL80919
augaaccccaaccagaagaucaucaccaucggcuccgucugcaugaccaucggcauggccaaccucauccuccagaucggcaacaucaucuccaucuggaucucccacuccauccagcucggcaaccagucccagaucgagaccugcaaccaguccgucaucaccuacgagaacaacaccugggucaaccagaccuacgucaacaucuccaacaccaacuucgccgccggccaguccgucgucuccgucaagcucgccggcaacuccucccucugccccgucuccggcugggccaucuacuccaaggacaacuccauccgcaucggcuccaagggcgacgucuucgucauccgcgagcccuucaucuccugcuccccccucgagugccgcaccuucuuccucacccagggcgcccuccucaacgacaagcacuccaacggcaccaucaaggaccgcucccccuaccgcacccucauguccugccccaccggcgagguccccucccccuacaacucccgcuucgaguccgucgccugguccgccuccgccugccacgacggcaucaacuggcucaccaucggcaucuccggccccgacaacggcgccgucgccguccucaaguacaacggcaucaucaccgacaccaucaaguccuggcgcaacaacauccuccgcacccaggaguccgagugcgccugcgucaacggcuccugcuucaccaucaugaccgacggccccuccgacggccaggccuccuacaagaucuuccgcaucgagaagggcaagaucgucaaguccgucgagaugaacgcccccaacuaccacuacgaggagugcuccugcuaccccgacuccuccgagaucaccugcgucugccgcgacaacuggcacggcuccaaccgccccugggucuccuucaaccagaaccucgaguaccagaucggcuacaucugcuccggcaucuucggcgacaacccccgccccaacgacaagaccggcuccugcggccccgucuccuccaacggcgccaacggcgucaagggcuucuccuucaaguacggcaacggcgucuggaucggccgcaccaaguccaucuccucccgcaagggcuucgagaugaucugggaccccaacggcuggaccggcaccgacaacaacuucuccaucaagcaggacaucgucggcaucaacgagugguccggcuacuccggcuccuucguccagcaccccgagcucaccggccucgacugcauccgccccugcuucugggucgagcucauccgcggccgccccaaggagaacaccaucuggaccuccggcuccuccaucuccuucugcggcgucaacuccgacaccgucggcugguccuggcccgacggcgccgagcuccccuucaccaucgacaaguga

SEQ ID NO: 120504 - RNA, 1410 nt, Artificial Sequence; identical to SEQ ID NO: 115554
  derived and/or modified CDS sequence (opt2) from neuraminidase__InfluenzaA__AHL80930

SEQ ID NO: 120505 - RNA, 1410 nt, Artificial Sequence; identical to SEQ ID NO: 115554
  derived and/or modified CDS sequence (opt2) from neuraminidase__InfluenzaA__AHL80949

SEQ ID NO: 120506 - RNA, 1410 nt, Artificial Sequence
  derived and/or modified CDS sequence (opt2) from neuraminidase__InfluenzaA__AHL80961
augaaccccaaccagaagaucaucaccaucggcuccgucugcaugaccaucggcauggccaaccucauccuccagaucggcaacaucaucuccaucuggaucucccacuccauccagcucggcaaccagaaccagaucgagaccugcaaccaguccgucaucaccuacgagaacaacaccugggucaaccagaccuacgucaacaucuccaacaccaacuucgccgccggccaguccgucgucuccgucaagcucgccggcaacuccucccucugccccgucuccggcugggccaucuacuccaaggacaacuccauccgcaucggcuccaagggcgacgucuucgucauccgcgagcccuucaucuccugcuccccccucgagugccgcaccuucuuccucacccagggcgcccuccucaacgacaagcacuccaacggcaccaucaaggaccgcucccccuaccgcacccucauguccugccccaucggcgagguccccucccccuacaacucccgcuucgaguccgucgccugguccgccuccgccugccacgacggcaucaacuggcucaccaucggcaucuccggccccgacaacggcgccgucgccguccucaaguacaacggcaucaucaccgacaccaucaaguccuggcgcaacaacauccuccgcacccaggaguccgagugcgccugcgucaacggcuccugcuucaccaucaugaccgacggccccuccgacggccaggccuccuacaagaucuuccgcaucgagaagggcaagaucgucaaguccgucgagaugaacgcccccaacuaccacuacgaggagugcuccugcuaccccgacuccuccgagaucaccugcgucugccgcgacaacuggcacggcuccaaccgccccugggucuccuucaaccagaaccucgaguaccagaucggcuacaucugcuccggcaucuucggcgacaacccccgccccaacgacaagaccggcuccugcggccccgucuccuccaacggcgccaacggcgucaagggcuucuccuucaaguacggcaacggcgucuggaucggccgcaccaaguccaucuccucccgcaagggcuucgagaugaucugggaccccaacggcuggaccggcaccgacaacaacuucuccaucaagcaggacgucgucggcaucaacgagugguccggcuacuccggcuccuucguccagcaccccgagcucaccggccucgacugcauccgccccugcuucugggucgagcucauccgcggccgccccaaggagaacaccaucuggaccuccggcuccuccaucuccuucugcggcgucaacuccgacaccgucggcugguccuggcccgacggcgccgagcuccccuucaccaucgacaaguga

SEQ ID NO: 120507 - RNA, 1410 nt, Artificial Sequence; identical to SEQ ID NO: 120506
  derived and/or modified CDS sequence (opt2) from neuraminidase__InfluenzaA__AHL80972

SEQ ID NO: 120508 - RNA, 1410 nt, Artificial Sequence; identical to SEQ ID NO: 115554
  derived and/or modified CDS sequence (opt2) from neuraminidase__InfluenzaA__AHL80983

SEQ ID NO: 120509 - RNA, 1410 nt, Artificial Sequence; identical to SEQ ID NO: 115554
  derived and/or modified CDS sequence (opt2) from neuraminidase__InfluenzaA__AHL80992

SEQ ID NO: 120510 - RNA, 1410 nt, Artificial Sequence; identical to SEQ ID NO: 115554
  derived and/or modified CDS sequence (opt2) from neuraminidase__InfluenzaA__AHL81004

SEQ ID NO: 120511 - RNA, 1410 nt, Artificial Sequence
  derived and/or modified CDS sequence (opt2) from neuraminidase__InfluenzaA__AHL81016
augaaccccaaccagaagaucaucaccaucggcuccgucucccucaccaucuccaccaucugcuucuucaugcagaucgccauccucaucaccaccgucacccuccacuucaagcaguacgaguucaacuccccccccaacaaccaggucaugcucugcgagcccaccaucaucgagcgcaacaucaccgagaucgucuaccucaccaacaccaccaucgagaaggagaucugccccaagcucgccgaguaccgcaacugguccaagccccagugcgacaucaccggcuucgcccccuucuccaaggacaacuccauccgccucuccgccggcggcgacaucugggucacccgcgagcccuacgucuccugcgacuccgacaagugcuaccaguucgcccucggccagggcaccacccucaacaacguccacuccaacaacaccguccgcgaccgcacccccuaccgcacccuccucaugaacgagcucggcguccccuuccaccucggcaccaagcaggucugcaucgccugguccuccuccuccugccacgacggcaaggccuggcuccacgucugcaucaccggcgacgacaagaacgccaccgccuccuucaucuacaacggccgccucgucgacuccgucgucuccugguccaaggagauccuccgcacccaggaguccgagugcgucugcaucaacggcaccugcaccgucgucaugaccgacggcuccgccuccggcaaggccgacaccaagauccucuucaucgaggagggcaagaucguccacaccuccacccucuccggcuccgcccagcacgucgaggagugcuccugcuacccccgcuaccccggcguccgcugcgucugccgcgacaacuggaagggcuccaaccgccccaucgucgacaucaacaucaaggaccacuccaucgucuccuccuacgucugcuccggccucgucggcgacaccccccgcaagaacgacuccuccuccuccucccacugccucgaccccaacaacgaggagggcggccacggcgucaagggcugggccuucgacgacggcaacgacgucuggaugggccgcaccaucaacgagaccucccgccucggcuacgagaccuucaaggucaucgagggcugguccaaccccaaguccaagcuccagaucaaccgccaggucaucgucgaccgcggcaaccgcuccggcuacuccggcaucuucuccgucgagggcaaguccugcaucaaccgcugcuucuacgucgagcucauccgcggccgcaaggaggagaccgagguccucuggaccuccaacuccaucgucgucuucugcggcaccuccggcaccuacggcaccggcuccuggcccgacggcgccgaccucaaccucaugcccaucuga

SEQ ID NO: 120512 - RNA, 1410 nt, Artificial Sequence; identical to SEQ ID NO: 115554
  derived and/or modified CDS sequence (opt2) from neuraminidase__InfluenzaA__AHL81028

SEQ ID NO: 120513 - RNA, 1410 nt, Artificial Sequence; identical to SEQ ID NO: 115554
  derived and/or modified CDS sequence (opt2) from neuraminidase__InfluenzaA__AHL81040

SEQ ID NO: 120514 - RNA, 1410 nt, Artificial Sequence; identical to SEQ ID NO: 115554
  derived and/or modified CDS sequence (opt2) from neuraminidase__InfluenzaA__AHL81052

SEQ ID NO: 120515 - RNA, 1410 nt, Artificial Sequence; identical to SEQ ID NO: 120506
  derived and/or modified CDS sequence (opt2) from neuraminidase__InfluenzaA__AHL81064

SEQ ID NO: 120516 - RNA, 1410 nt, Artificial Sequence; identical to SEQ ID NO: 120506
  derived and/or modified CDS sequence (opt2) from neuraminidase__InfluenzaA__AHL81075

SEQ ID NO: 120517 - RNA, 1410 nt, Artificial Sequence
  derived and/or modified CDS sequence (opt2) from neuraminidase__InfluenzaA__AHL81086
augaaccccaaccagaagaucaucaccaucggcuccgucucccucaccaucuccaccaucugcuucuucaugcagaucgccauccucaucaccaccgucacccuccacuucaagcaguacgaguucaacuccccccccaacaaccaggucaugcucugcaagcccaccaucaucgagcgcaacaucaccgagaucgucuaccucaccaacaccaccaucgagaaggagaucugccccaagcucgccgaguaccgcaacugguccaagccccagugcgacaucaccggcuucgcccccuucuccaaggacaacuccauccgccucuccgccggcggcgacaucugggucacccgcgagcccuacgucuccugcgaccccgacaagugcuaccaguucgcccucggccagggcaccacccucaacaacguccacuccaacaacaccguccgcgaccgcacccccuaccgcacccuccucaugaacgagcucggcguccccuuccaccucggcaccaagcaggucugcaucgccugguccuccuccuccugccacgacggcaaggccuggcuccacgucugcaucaccggcgacgacaagaacgccaccgccuccuucaucuacaacggccgccucgucgacuccgucgucuccugguccaaggagauccuccgcacccaggaguccgagugcgucugcaucaacggcaccugcaccgucgucaugaccgacggcuccgccuccggcaaggccgacaccaagauccucuucaucgaggagggcaagaucguccacaccuccacccucuccggcuccgcccagcacgucgaggagugcuccugcuacccccgcuaccccggcguccgcugcgucugccgcgacaacuggaagggcuccaaccgccccaucgucgacaucaacaucaaggaccacuccaucgucuccuccuacgucugcuccggccucgucggcgacaccccccgcaagaacgacuccuccuccuccucccacugccucgaccccaacaacgaggagggcggccacggcgucaagggcugggccuucgacgacggcaacgacgucuggaugggccgcaccaucaacgagaccucccgccucggcuacgagaccuucaaggucaucgagggcugguccaaccccaaguccaagcuccagaucaaccgccaggucaucgucgaccgcggcaaccgcuccggcuacuccggcaucuucuccgucgagggcaaguccugcaucaaccgcugcuucuacgucgagcucauccgcggccgcaaggaggagaccgagguccucuggaccuccaacuccaucgucgucuucugcggcaccuccggcaccuacggcaccggcuccuggcccgacggcgccgaccucaaccucaugcccaucuga

SEQ ID NO: 120518 - RNA, 1410 nt, Artificial Sequence
  derived and/or modified CDS sequence (opt2) from neuraminidase__InfluenzaA__AHL81098
augaaccccaaccagaagaucaucaccaucggcuccgucucccucaccaucuccaccaucugcuucuucguccagaucgccauccucaucaccaccgucacccuccacuucaagcaguacgaguucaacuccccccccaacaaccaggucaugcucugcgagcccaccaucaucgagcgcaacaucaccgagaucgucuaccucaccaacaccaccaucgagaaggagaucugccccaagcucgccgaguaccgcaacugguccaagccccagugcgacaucaccggcuucgcccccuucuccaaggacaacuccauccgccucuccgccggcggcgacaucugggucacccgcgagcccuacgucuccugcgaccccgacaagugcuaccaguucgcccucggccagggcaccacccucaacaacguccacuccaacaacaccguccgcgaccgcacccccuaccgcacccuccucaugaacgagcucggcguccccuuccaccucggcaccaagcaggucugcaucgccugguccuccuccuccugccacgacggcaaggccuggcuccacgucugcaucaccggcgacgacaagaacgccaccgccuccuucaucuacaacggccgccucgucgacuccgucgucuccugguccaaggagauccuccgcacccaggaguccgagugcgucugcaucaacggcaccugcaccgucgucaugaccgacggcuccgccuccggcaaggccgacaccaagauccucuucaucgaggagggcaagaucguccacaccuccacccucuccggcuccgcccagcacgucgaggagugcuccugcuacccccgcuaccccggcguccgcugcgucugccgcgacaacuggaagggcuccaaccgccccaucgucgacaucaacaucaaggaccacuccaucgucuccuccuacgucugcuccggccucgucggcgacaccccccgcaagaacgacuccuccuccuccucccacugccucgaccccaacaacgaggagggcggccacggcgucaagggcugggccuucgacgacggcaacgacgucuggaugggccgcaccaucaacgagaccucccgccucggcuacgagaccuucaaggucaucgagggcugguccaaccccaaguccaagcuccagaucaaccgccaggucaucgucgaccgcggcaaccgcuccggcuacuccggcaucuucuccgucgagggcaaguccugcaucaaccgcugcuucuacgucgagcucauccgcggccgcaaggaggagaccgagguccucuggaccuccaacuccaucgucgucuucugcggcaccuccggcaccuacggcaccggcuccuggcccgacggcgccgaccucaaccucaugcccaucuga

SEQ ID NO: 120519 - RNA, 1410 nt, Artificial Sequence; identical to SEQ ID NO: 116745
  derived and/or modified CDS sequence (opt2) from neuraminidase__InfluenzaA__AHL81110

SEQ ID NO: 120520 - RNA, 1410 nt, Artificial Sequence; identical to SEQ ID NO: 116745
  derived and/or modified CDS sequence (opt2) from neuraminidase__InfluenzaA__AHL81121

SEQ ID NO: 120521 - RNA, 1410 nt, Artificial Sequence; identical to SEQ ID NO: 115554
  derived and/or modified CDS sequence (opt2) from neuraminidase__InfluenzaA__AHL81132

SEQ ID NO: 120522 - RNA, 1410 nt, Artificial Sequence; identical to SEQ ID NO: 115554
  derived and/or modified CDS sequence (opt2) from neuraminidase__InfluenzaA__AHL81144

SEQ ID NO: 120523 - RNA, 1410 nt, Artificial Sequence; identical to SEQ ID NO: 115554
  derived and/or modified CDS sequence (opt2) from neuraminidase__InfluenzaA__AHL81156

SEQ ID NO: 120524 - RNA, 1410 nt, Artificial Sequence; identical to SEQ ID NO: 117823
  derived and/or modified CDS sequence (opt2) from neuraminidase__InfluenzaA__AHL81168

SEQ ID NO: 120525 - RNA, 1410 nt, Artificial Sequence; identical to SEQ ID NO: 117823
  derived and/or modified CDS sequence (opt2) from neuraminidase__InfluenzaA__AHL81180

SEQ ID NO: 120526 - RNA, 1410 nt, Artificial Sequence; identical to SEQ ID NO: 115554
  derived and/or modified CDS sequence (opt2) from neuraminidase__InfluenzaA__AHL81192

SEQ ID NO: 120527 - RNA, 1410 nt, Artificial Sequence
  derived and/or modified CDS sequence (opt2) from neuraminidase__InfluenzaA__AHL81215
augaaccccaaccagaagaucaucaccaucggcuccgucucccucaccaucuccaccaucugcuucuucaugcagaucgccauccucaucaccaccgucacccuccacuucaagcaguacgaguucaacuccccccccaacaaccaggucaugcucugcgagcccaccaucaucgagcgcaacaucaccgagaucauguaccucaccaacaccaccaucgagaaggagaucugccccaagcucgccgaguaccgcaacugguccaagccccagugcgacaucaccggcuucgcccccuucuccaaggacaacuccauccgccucuccgccggcggcgacaucugggucacccgcgagcccuacgucuccugcgaccccgacaagugcuaccaguucgcccucggccagggcaccacccucaacaacguccacuccaacaacaccguccgcgaccgcacccccuaccgcacccuccucaugaacgagcucggcguccccuuccaccucggcaccaagcaggucugcaucgccugguccuccuccuccugccacgacggcaaggccuggcuccacgucugcaucaccggcgacgacaagaacgccaccgccuccuucaucuacaacggccgccucgucgacuccgucgucuccugguccaaggagauccuccgcacccaggaguccgagugcgucugcaucaacggcaccugcaccgucgucaugaccgacggcuccgccuccggcaaggccgacaccaagauccucuucaucgaggagggcaagaucguccacaccuccacccucuccggcuccgcccagcacgucgaggagugcuccugcuacccccgcuaccccggcguccgcugcgucugccgcgacaacuggaagggcuccaaccgccccaucgucgacaucaacaucaaggaccacuccaucgucuccuccuacgucugcuccggccucgucggcgacaccccccgcaagaacgacuccuccuccuccucccacugccucgaccccaacaacgaggagggcggccacggcgucaagggcugggccuucgacgacggcaacgacgucuggaugggccgcaccaucaacgagaccucccgccucggcuacgagaccuucaaggucaucgagggcugguccaaccccaaguccaagcuccagaucaaccgccaggucaucgucgaccgcggcaaccgcuccggcuacuccggcaucuucuccgucgagggcaaguccugcaucaaccgcugcuucuacgucgagcucauccgcggccgcaaggaggagaccgagguccucuggaccuccaacuccaucgucgucuucugcggcaccuccggcaccuacggcaccggcuccuggcccgacggcgccgaccucaacuucaugcccaucuga

SEQ ID NO: 120528 - RNA, 1410 nt, Artificial Sequence
  derived and/or modified CDS sequence (opt2) from neuraminidase__InfluenzaA__AHL81227
augaaccccaaccagaagaucaucaccaucggcuccgucugcaugaccaucggcauggccaaccucauccuccagaucggcaacaucaucuccaucuggaucucccacuccauccagcucggcaaccagucccagaucgagaccugcaaccaguccgucaucaccuacgagaacaacaccugggucaaccagaccuacgucaacaucuccaacaccaacuucgccgccggccaguccgucgucuccgucaagcucgccggcaacuccucccucugccccgucuccggcugggccaucuacuccaaggacaacuccauccgcaucggcuccaagggcgacgucuucgucauccgcgagcccuucaucuccugcuccccccucgagugccgcaccuucuuccucacccagggcgcccuccucaacgacaagcacuccaacggcaccaucaaggaccgcucccccuaccgcacccucauguccugccccaccggcgagguccccucccccuacaacucccgcuucgaguccgucgccugguccgccuccgccugccacgacggcaucaacuggcucaccaucggcaucuccggccccgacaacggcgccgucgccguccucaaguacaacggcaucaucaccgacaccaucaaguccuggcgcaacaacauccuccgcacccaggaguccgagugcgccugcgucaacggcuccugcuucaccaucaugaccgacggccccuccgacggccaggccuccuacaagaucuuccgcaucgagaagggcaagaucgucaaguccgucgagaugaacgcccccaacuaccacuacgaggagugcuccugcuaccccgacuccuccgagaucaccugcgucugccgcgacaacuggcacggcuccaaccgccccugggucuccuucaaccagaaccucgaguaccagaucggcuacaucugcuccggcaucuucggcgacaacccccgccccaacgacaagaccggcuccugcggccccgucuccuccaacggcgccaacggcgucaagggcuucuccuucaaguacggcaacggcgucuggaucggccgcaccaaguccaucuccucccgcaagggcuucgagaugaucugggaccccaacggcuggaccggcaccgacaacaacuucuccaucaagcaggacaucaucggcaucaacgagugguccggcuacuccggcuccuucguccagcaccccgagcucaccggccucgacugcauccgccccugcuucugggucgagcucauccgcggccgccccaaggagaacaccaucuggaccuccggcuccuccaucuccuucugcggcgucaacuccgacaccgucggcugguccuggcccgacggcgccgagcuccccuucaccaucgacaaguga

SEQ ID NO: 120529 - RNA, 1410 nt, Artificial Sequence; identical to SEQ ID NO: 115554
  derived and/or modified CDS sequence (opt2) from neuraminidase__InfluenzaA__AHL81238

SEQ ID NO: 120530 - RNA, 1410 nt, Artificial Sequence; identical to SEQ ID NO: 115554
  derived and/or modified CDS sequence (opt2) from neuraminidase__InfluenzaA__AHL81250

SEQ ID NO: 120531 - RNA, 1410 nt, Artificial Sequence; identical to SEQ ID NO: 115554
  derived and/or modified CDS sequence (opt2) from neuraminidase__InfluenzaA__AHL81262

SEQ ID NO: 120532 - RNA, 1410 nt, Artificial Sequence; identical to SEQ ID NO: 115554
  derived and/or modified CDS sequence (opt2) from neuraminidase__InfluenzaA__AHL81274

SEQ ID NO: 120533 - RNA, 1410 nt, Artificial Sequence; identical to SEQ ID NO: 115554
  derived and/or modified CDS sequence (opt2) from neuraminidase__InfluenzaA__AHL81286

SEQ ID NO: 120534 - RNA, 1410 nt, Artificial Sequence; identical to SEQ ID NO: 115554
  derived and/or modified CDS sequence (opt2) from neuraminidase__InfluenzaA__AHL81298

SEQ ID NO: 120535 - RNA, 1410 nt, Artificial Sequence; identical to SEQ ID NO: 120506
  derived and/or modified CDS sequence (opt2) from neuraminidase__InfluenzaA__AHL81310

SEQ ID NO: 120536 - RNA, 1410 nt, Artificial Sequence; identical to SEQ ID NO: 116745
  derived and/or modified CDS sequence (opt2) from neuraminidase__InfluenzaA__AHL81332

SEQ ID NO: 120537 - RNA, 1410 nt, Artificial Sequence
  derived and/or modified CDS sequence (opt2) from neuraminidase__InfluenzaA__AHL81343
augaaccccaaccagaagaucaucaccaucggcuccgucucccucaccaucuccaccaucugcuuccucaugcagaucgccauccucaucaccaccgucacccuccacuucaagcaguacgaguucaacuccccccccaacaaccaggucaugcucugcgagcccaccaucaucgagcgcaacaucaccgagaucgucuaccucaccaacaccaccaucgagaaggagaucugccccaagcucgccgaguaccgcaacugguccaagccccagugcgacaucaccggcuucgcccccuucuccaaggacaacuccauccgccucuccgccggcggcgacaucugggucacccgcgagcccuacgucuccugcgaccccgacaagugcuaccaguucgcccucggccagggcaccacccucaacaacguccacuccaacaacaccguccgcgaccgcacccccuaccgcacccuccucaugaacgagcucggcguccccuuccaccucggcaccaagcaggucugcaucgccugguccuccuccuccugccacgacggcaaggccuggcuccacgucugcaucaccggcgacgacaagaacgccaccgccuccuucaucuacaacggccgccucgucgacuccgucgucuccugguccaaggagauccuccgcacccaggaguccgagugcgucugcaucaacggcaccugcaccgucgucaucaccgacggcuccgccuccggcaaggccgacaccaagauccucuucaucgaggagggcaagaucguccacaccuccacccucuccggcuccgcccagcacgucgaggagugcuccugcuacccccgcuaccccggcguccgcugcgucugccgcgacaacuggaagggcuccaaccgccccaucgucgacaucaacaucaaggaccacuccaucgucuccuccuacgucugcuccggccucgucggcgacaccccccgcaagaacgacuccuccuccuccucccacugcuccgaccccaacaacgaggagggcggccacggcgucaagggcugggccuucgacgacggcaacgacgucuggaugggccgcaccaucuccgagaagucccgccucggcuacgagaccuucaaggucaucgagggcugguccaaccccaaguccaagcuccagaucaaccgccaggucaucgucgaccgcggcaaccgcuccggcuacuccggcaucuucuccgucgagggcaaguccugcaucaaccgcugcuucuacgucgagcucauccgcggccgcaaggaggagaccgagguccucuggaccuccaacuccaucgucgucuucugcggcaccuccggcaccuacggcaccggcuccuggcccgacggcgccgacaucaaccucaugcccaucuga

SEQ ID NO: 120538 - RNA, 1410 nt, Artificial Sequence; identical to SEQ ID NO: 115554
  derived and/or modified CDS sequence (opt2) from neuraminidase__InfluenzaA__AHL81355

SEQ ID NO: 120539 - RNA, 1410 nt, Artificial Sequence; identical to SEQ ID NO: 116745
  derived and/or modified CDS sequence (opt2) from neuraminidase__InfluenzaA__AHL81367

SEQ ID NO: 120540 - RNA, 1410 nt, Artificial Sequence; identical to SEQ ID NO: 116745
  derived and/or modified CDS sequence (opt2) from neuraminidase__InfluenzaA__AHL81378

SEQ ID NO: 120541 - RNA, 1410 nt, Artificial Sequence; identical to SEQ ID NO: 116745
  derived and/or modified CDS sequence (opt2) from neuraminidase__InfluenzaA__AHL81389

SEQ ID NO: 120542 - RNA, 1410 nt, Artificial Sequence; identical to SEQ ID NO: 115554
  derived and/or modified CDS sequence (opt2) from neuraminidase__InfluenzaA__AHL81400

SEQ ID NO: 120543 - RNA, 1410 nt, Artificial Sequence; identical to SEQ ID NO: 120527
  derived and/or modified CDS sequence (opt2) from neuraminidase__InfluenzaA__AHL81412

SEQ ID NO: 120544 - RNA, 1410 nt, Artificial Sequence; identical to SEQ ID NO: 112774
  derived and/or modified CDS sequence (opt2) from neuraminidase__InfluenzaA__AHL81422

SEQ ID NO: 120545 - RNA, 1410 nt, Artificial Sequence; identical to SEQ ID NO: 114062
  derived and/or modified CDS sequence (opt2) from neuraminidase__InfluenzaA__AHL81433

SEQ ID NO: 120546 - RNA, 1410 nt, Artificial Sequence
  derived and/or modified CDS sequence (opt2) from neuraminidase__InfluenzaA__AHL88954
augaaccccaaccagaagaucaucaccaucggcuccgucucccucaccaucuccaccaucugcuucuucaugcagaucgccauccucaucaccaccgucacccuccacuucaagcaguacgaguucaacuccccccccaacaaccaggucaugcucugcgagcccaccaucaucgagcgcaacaucaccgagaucgucuaccucaccaacaccaccaucgagaaggagaucugccccaagcucgccgaguaccgcaacugguccaagccccagugcaacaucaccggcuucgcccccuucuccaaggacaacuccauccgccucuccgccggcggcgacaucugggucacccgcgagcccuacgucuccugcgaccccgacaagugcuaccaguucgcccucggccagggcaccacccucaacaacguccacuccaacgacaccguccacgaccgcacccccuaccgcacccuccucaugaacgagcucggcguccccuuccaccucggcaccaagcaggucugcaucgccugguccuccuccuccugccacgacggcaaggccuggcuccacgucugcgucaccggcgacgacaagaacgccaccgccuccuucaucuacaacggccgccucgucgacuccaucgucuccugguccaaggagauccuccgcacccaggaguccgagugcgucugcaucaacggcaccugcaccgucgucaugaccgacggcuccgccuccggcaaggccgacaccaagauccucuucaucaaggagggcaagaucguccacaccuccacccucuccggcuccgcccagcacgucgaggagugcuccugcuacccccgcuaccccggcguccgcugcgucugccgcgacaacuggaagggcuccaaccgccccaucgucgacaucaacaucaaggacuacuccaucgucuccuccuacgucugcuccggccucgucggcgacaccccccgcaagaacgacuccuccuccuccucccacugccucgaccccaacaacgaggagggcggccacggcgucaagggcugggccuucgacgacggcaacgacgucuggaugggccgcaccaucuccgagaagcuccgcuccggcuacgagaccuucaaggucaucgagggcugguccaaccccaacuccaagcuccagaucaaccgccaggucaucgucgaccgcgacaaccgcuccggcuacuccggcaucuucuccgucgagggcaaguccugcaucaaccgcugcuucuacgucgagcucauccgcggccgcaaggaggagaccgagguccucuggaccuccaacuccaucgucgucuucugcggcaccuccggcaccuacggcaccggcuccuggcccgacggcgccgacaucaaccucaugcccaucuga

SEQ ID NO: 120547 - RNA, 1410 nt, Artificial Sequence
  derived and/or modified CDS sequence (opt2) from neuraminidase__InfluenzaA__AHL89033
augaaccccaaccagaagaucaucaccaucggcuccgucucccucaccaucuccaccaucugcuucuucaugcagaucgccauccucaucaccaccgucacccuccacuucaagcaguacgaguucaacuccccccccaacaaccaggucaugcucugcgagcccaccaucaucgagcgcaacaucaccgagaucgucuaccucaccaacaccaccaucgagaaggagaucugccccaagcucgccgaguaccgcaacugguccaagccccagugcaacaucaccggcuucgcccccuucuccaaggacaacuccauccgccucuccgccggcggcgacaucugggucacccgcgagcccuacgucuccugcgaccccgacaagugcuaccaguucgcccucggccagggcaccacccucaacaacguccacuccaacgacaccguccacgaccgcacccccuaccgcacccuccucaugaacgagcucggcguccccuuccaccucggcaccaagcaggucugcaucgccugguccuccuccuccugccacgacggcaaggccuggcuccacgucugcgucaccggcgacgacaagaacgccaccgccuccuucaucuacaacggccgccucgucgacuccaucgucuccugguccaaggagauccuccgcacccaggaguccgagugcgucugcaucaacggcaccugcaccgucgucaugaccgacggcuccgccuccggcaaggccgacaccaagauccucuucaucgaggagggcaagaucguccacaccuccacccucuccggcuccgcccagcacgucgaggagugcuccugcuacccccgcuaccccggcguccgcugcgucugccgcgacaacuggaagggcuccaaccgccccaucgucgacaucaacaucaaggacuacuccaucgucuccuccuacgucugcuccggccucgucggcgacaccccccgcaagaacgacuccuccuccuccucccacugccucgaccccaacaacgaggagggcggccacggcgucaagggcugggccuucgacgacggcaacgacgucuggaugggccgcaccaucuccgagaagcuccgcuccggcuacgagaccuucaaggucaucgagggcugguccaaccccaacuccaagcuccagaucaaccgccaggucaucgucgaccgcggcaaccgcuccggcuacuccggcaucuucuccgucgaggacaaguccugcaucaaccgcugcuucuacgucgagcucauccgcggccgcaaggaggagaccgagguccucuggaccuccaacuccaucgucgucuucugcggcaccuccggcaccuacggcaccggcuccuggcccgacggcgccgacaucaaccucaugcccaucuga

SEQ ID NO: 120548 - RNA, 1410 nt, Artificial Sequence
  derived and/or modified CDS sequence (opt2) from neuraminidase__InfluenzaA__AHL89045
augaaccccaaccagaagaucaucaccaucggcuccgucucccucaccaucuccaccaucugcuucuucaugcagaucgccauccucaucaccaccgucacccuccacuucaagcaguacgaguucaacuccccccccaacaaccaggucaugcucugcgagcccaccaucaucgagcgcaacaucaccgagaucgucuaccucaccaacaccaccaucgagaaggagaucugccccaagcucgccgaguaccgcaacugguccaagccccagugcaacaucaccggcuucgcccccuucuccaaggacaacuccauccgccucuccgccggcggcgacaucugggucacccgcgagcccuacgucuccugcgaccccgacaagugcuaccaguucgcccucggccagggcaccacccucaacaacguccacuccaacgacaccguccacgaccgcacccccuaccgcacccuccucaugaacgagcucggcguccccuuccaccucggcaccaagcaggucugcaucgccugguccuccuccuccugccacgacggcaaggccuggcuccacgucugcgucaccggcgacgacaagaacgccaccgccuccuucaucuacaacggccgccucgucgacuccaucgucuccugguccaaggagauccuccgcacccaggaguccgagugcgucugcaucaacggcaccugcaccgucgucaugaccgacggcuccgccuccggcaaggccgacaccaagauccucuucaucgaggagggcaagaucguccacaccuccacccucuccggcuccgcccagcacgucgaggagugcuccugcuacccccgccaccccggcguccgcugcgucugccgcgacaacuggaagggcuccaaccgccccaucgucgacaucaacaucaaggacuacuccaucgucuccuccuacgucugcuccggccucgucggcgacaccccccgcaagaacgacuccuccuccuccucccacugccucgaccccaacaacgaggagggcggccacggcgucaagggcugggccuucgacgacggcaacgacgucuggaugggccgcaccaucuccgagaagcuccgcuccggcuacgagaccuucaaggucaucgagggcugguccaaccccaacuccaagcuccagaccaaccgccaggucaucgucgaccgcggcaaccgcuccggcuacuccggcaucuucuccgucgagggcaaguccugcaucaaccgcugcuucuacgucgagcucauccgcggccgcaaggaggagaccgagguccucuggaccuccaacuccaucgucgucuucugcggcaccuccggcaccuacggcaccggcuccuggcccgacggcgccgacaucaaccucaugcccaucuga

SEQ ID NO: 120549 - RNA, 1410 nt, Artificial Sequence
  derived and/or modified CDS sequence (opt2) from neuraminidase__InfluenzaA__AHL89057
augaaccccaaccagaagaucaucaccaucggcuccgucucccucaccaucuccaccaucugcuucuucaugcagaucgccauccucaucaccaccgucacccuccacuucaagcaguacgaguucaacuccccccccaacaaccaggucaugcucugcgagcccaccaucaucgagcgcaacaucaccgagaucgucuaccucaccaacaccaccaucgagaaggagaucugccccaagcucgccgaguaccgcaacugguccaagccccagugcaacaucaccggcuucgcccccuucuccaaggacaacuccauccgccucuccgccggcggcgacaucugggucacccgcgagcccuacgucuccugcgaccccgacaagugcuaccaguucgcccucggccagggcaccacccucaacaacguccacuccaacgacaccguccacgaccgcacccccuaccgcacccuccucaugaacgagcucggcguccccuuccaccucggcaccaagcaggucugcaucgccugguccuccuccuccugccacgacggcaaggccuggcuccacgucugcgucaccggcgacgacaagaacgccaccgccuccuucaucuacaacggccgccucgucgacuccaucgucuccugguccaaggagauccuccgcacccaggaguccgagugcgucugcaucaacggcaccugcaccgucgucaugaccgacggcuccgccuccggcaaggccgacaccaagauccucuucaucgaggagggcaagaucguccacaccuccacccucuccggcuccgcccagcacgucgaggagugcuccugcuacccccgcuaccccggcguccgcugcgucugccgcgacaacuggaagggcuccaaccgccccaucgucgacaucaacaucaaggacuacuccaucgucuccuccuacgucugcuccggccucgucggcgacaccccccgcaagaacgacuccuccuccuccucccacugccucgaccccaacaacgaggagggcggccacggcgucaagggcugggccuucgacgacggcaacgacgucuggaugggccgcaccaucuccgagaagcuccgcuccggcuacgagaccuucaaggucaucgagggcugguccaagcccaacuccaagcuccagaucaaccgccaggucaucgucgaccgcggcaaccgcuccggcuacuccggcaucuucuccgucgagggcaaguccugcaucaaccgcugcuucuacgucgagcucauccgcggccgcaaggaggagaccgagguccucuggaccuccaacuccaucgucgucuucugcggcaccuccggcaccuacggcaccggcuccuggcccgacggcgccgacaucaaccucaugcccaucuga

SEQ ID NO: 120550 - RNA, 1410 nt, Artificial Sequence; identical to SEQ ID NO: 111743
  derived and/or modified CDS sequence (opt2) from neuraminidase__InfluenzaA__AHL89069

SEQ ID NO: 120551 - RNA, 1410 nt, Artificial Sequence; identical to SEQ ID NO: 110748
  derived and/or modified CDS sequence (opt2) from neuraminidase__InfluenzaA__AHL89081

SEQ ID NO: 120552 - RNA, 1410 nt, Artificial Sequence; identical to SEQ ID NO: 110748
  derived and/or modified CDS sequence (opt2) from neuraminidase__InfluenzaA__AHL89093

SEQ ID NO: 120553 - RNA, 1410 nt, Artificial Sequence; identical to SEQ ID NO: 110748
  derived and/or modified CDS sequence (opt2) from neuraminidase__InfluenzaA__AHL89117

SEQ ID NO: 120554 - RNA, 1410 nt, Artificial Sequence; identical to SEQ ID NO: 110748
  derived and/or modified CDS sequence (opt2) from neuraminidase__InfluenzaA__AHL89129

SEQ ID NO: 120555 - RNA, 1410 nt, Artificial Sequence
  derived and/or modified CDS sequence (opt2) from neuraminidase__InfluenzaA__AHL89141
augaaccccaaccagaagaucaucaccaucggcuccgucucccucaccaucuccaccaucugcuucuucaugcagaucgccauccucaucaccaccgucacccuccacuucaagcaguacgaguucaacuccccccccaacaaccaggucaugcucugcgagcccaccaucaucgagcgcaacaucaccgagaucgucuaccucaccaacaccaccaucgagaaggagaucugccccaagcucgccgaguaccgcaacugguccaagccccagugcaacaucaccggcuucgcccccuucuccaaggacaacuccauccgccucuccgccggcggcgacaucugggucacccgcgagcccuacgucuccugcgaccccgacaagugcuaccaguucgcccucggccagggcaccacccucaacaacguccacuccaacgacaccguccacgaccgcacccccuaccgcacccuccucaugaacgagcucggcguccccuuccaccucggcaccaagcaggucugcaucgccugguccuccuccuccugccacgacggcaaggccuggcuccacgucugcgucaccggcgacgacaagaacgccaccgccuccuucaucuacaacggccgccucgucgacuccaucgucuccugguccaaggagauccuccgcacccaggaguccgagugcgucugcaucaacggcaccugcaccgucgucaugaccgacggcuccgccuccggcaaggccgacaccaagauccucuucaucgaggagggcaagaucguccacaccuccacccucuccggcuccgcccagcacgucgaggagugcuccugcuacccccgcuaccccggcguccgcugcgucugccgcgacaacuggaagggcuccaaccgccccaucgucgacaucaacaucaaggacuacuccaucgucuccuccuacgucugcuccggccucgucggcgacaccccccgcaagaacgacuccuccuccuccucccacugccucgaccccaacaacgaggagggcggccacggcgucaagggcugggccuucgacgacggcaacgacgucuggaugggccgcaccaucuccgagaagcuccgccucggcuacgagaccuucaaggucaucgagggcugguccaaccccaacuccaagcuccagaccaaccgccaggucaucgucgaccgcggcaaccgcuccggcuacuccggcaucuucuccgucgagggcaaguccugcaucaaccgcugcuucuacgucgagcucauccgcggccgcaaggaggagaccgagguccucuggaccuccaacuccaucgucgucuucugcggcaccuccggcaccuacggcaccggcuccuggcccgacggcgccgacaucaaccucaugcccaucuga

SEQ ID NO: 120556 - RNA, 1410 nt, Artificial Sequence
  derived and/or modified CDS sequence (opt2) from neuraminidase__InfluenzaA__AHL89153
augaaccccaaccagaagaucaucaccaucggcuccgucucccucaccaucuccaccaucugcuucuucaugcagaucgccauccucaucaccaccgucacccuccacuucaagcaguacgaguucaacuccccccccaacaaccaggucaugcucugcgagcccaccaucaucgagcgcaacaucaccgagaucgucuaccucaccaacaccaccaucgagaaggagaucugccccaagcucgccgaguaccgcaacugguccaagccccagugcaacaucaccggcuucgcccccuucuccaaggacaacuccauccgccucuccgccggcggcgacaucugggucacccgcgagcccuacgucuccugcgaccccgacaagugcuaccaguucucccucggccagggcaccacccucaacaacguccacuccaacgacaccguccacgaccgcacccccuaccgcacccuccucaugaacgagcucggcguccccuuccaccucggcaccaagcaggucugcaucgccugguccuccuccuccugccacgacggcaaggccuggcuccacgucugcgucaccggcgacgacaagaacgccaccgccuccuucaucuacaacggccgccucgucgacuccaucgucuccugguccaaggagauccuccgcacccaggaguccgagugcgucugcaucaacggcaccugcaccgucgucaugaccgacggcuccgccuccggcaaggccgacaccaagauccucuucaucgaggagggcaagaucguccacaccuccacccucuccggcuccgcccagcacgucgaggagugcuccugcuacccccgcuaccccggcguccgcugcgucugccgcgacaacuggaagggcuccaaccgccccaucgucgacaucaacaucaaggacuacuccaucgucuccuccuacgucugcuccggccucgucggcgacaccccccgcaagaacgacuccuccuccuccucccacugccucgaccccaacaacgaggagggcggccacggcgucaagggcugggccuucgacgacggcaacgacgucuggaugggccgcaccaucuccgagaagcuccgcuccggcuacgagaccuucaaggucaucgagggcugguccaaccccaacuccaagcuccagaucaaccgccaggucaucgucgaccgcggcaaccgcuccggcuacuccggcaucuucuccgucgagggcaaguccugcaucaaccgcugcuucuacgucgagcucauccgcggccgcaaggaggagaccgagguccucuggaccuccaacuccaucgucgucuucugcggcaccuccggcaccuacggcaccggcuccuggcccgacggcgccgacaucaaccucaugcccaucuga

SEQ ID NO: 120557 - RNA, 1410 nt, Artificial Sequence; identical to SEQ ID NO: 110748
  derived and/or modified CDS sequence (opt2) from neuraminidase__InfluenzaA__AHL89165

SEQ ID NO: 120558 - RNA, 1410 nt, Artificial Sequence
  derived and/or modified CDS sequence (opt2) from neuraminidase__InfluenzaA__AHL89177
augaaccccaaccagaagaucaucaccaucggcuccgucucccucaccaucuccaccaucugcuucuucaugcagaucgccauccucaucaccaccgucacccuccacuucaagcaguacgaguucaacuccccccccaacaaccaggucaugcucugcgagcccaccaucaucgagcgcaacaucaccgagaucgucuaccucaccaacaccaccaucgagaaggagaucugccccaagcucgccgaguaccgcaacugguccaagccccagugcaacaucaccggcuucgcccccuucuccaaggacaacuccauccgccucuccgccggcggcgacaucugggucacccgcgagcccuacgucuccugcgaccccgacaagugcuaccaguucgcccucggccagggcaccacccucaacaacguccacuccaacgacaccguccacgaccgcacccccuaccgcacccuccucaugaacgagcucggcguccccuuccaccucggcaccaagcaggucugcaucgccugguccuccuccuccugccacgacggcaaggccuggcuccacgucugcgucaccggcgacgacaagaacgccaccgccuccuucaucuacaacggccgccucgucgacuccaucgucuccugguccaacgagauccuccgcacccaggaguccgagugcgucugcaucaacggcaccugcaccgucgucaugaccgacggcuccgccuccggcaaggccgacaccaagauccucuucaucgaggagggcaagaucguccacaccuccacccucuccggcuccgcccagcacgucgaggagugcuccugcuacccccgcuaccccggcguccgcugcgucugccgcgacaacuggaagggcuccaaccgccccaucgucgacaucaacaucaaggacuacuccaucgucuccuccuacgucugcuccggccucgucggcgacaccccccgcaagaacgacuccuccuccuccucccacugccucgaccccaacaacgaggagggcggccacggcgucaagggcugggccuucgacgacggcaacgacgucuggaugggccgcaccaucuccgagaagcuccgcuccggcuacgagaccuucaaggucaucgagggcugguccaaccccaacuccaagcuccagaucaaccgccaggucaucgucgaccgcggcaaccgcuccggcuacuccggcaucuucuccgucgagggcaaguccugcaucaaccgcugcuucuacgucgagcucauccgcggccgcaaggaggagaacgagguccucuggaccuccaacuccaucgucgucuucugcggcaccuccggcaccuacggcaccggcuccuggcccgacggcgccgacaucaaccucaugcccaucuga

SEQ ID NO: 120559 - RNA, 1410 nt, Artificial Sequence; identical to SEQ ID NO: 112600
  derived and/or modified CDS sequence (opt2) from neuraminidase__InfluenzaA__AHL89189

SEQ ID NO: 120560 - RNA, 1410 nt, Artificial Sequence; identical to SEQ ID NO: 111743
  derived and/or modified CDS sequence (opt2) from neuraminidase__InfluenzaA__AHL89201

SEQ ID NO: 120561 - RNA, 1410 nt, Artificial Sequence; identical to SEQ ID NO: 112600
  derived and/or modified CDS sequence (opt2) from neuraminidase__InfluenzaA__AHL89213

SEQ ID NO: 120562 - RNA, 1410 nt, Artificial Sequence
  derived and/or modified CDS sequence (opt2) from neuraminidase__InfluenzaA__AHL89225
augaaccccaaccagaagaucaucaccaucggcuccgucucccucaccaucuccaccaucugcuucuucaugcagaucgccauccucaucaccaccgucacccuccacuucaagcaguacgaguucaaccccccccccaacaaccaggucaugcucugcgagcccaccaucaucgagcgcaacaucaccgagaucgucuaccucaccaacaccaccaucgagaaggagaucugccccaagcucgccgaguaccgcaacugguccaagccccagugcaacaucaccggcuucgcccccuucuccaaggacaacuccauccgccucuccgccggcggcgacaucugggucacccgcgagcccuacgucuccugcgaccccgacaagugcuaccaguucgcccucggccagggcaccacccucaacaacguccacuccaacgacaccguccacgaccgcacccccuaccgcacccuccucaugaacgagcucggcguccccuuccaccucggcaccaagcaggucugcaucgccugguccuccuccuccugccacgacggcaaggccuggcuccacgucugcgucaccggcgacgacaagaacgccaccgccuccuucaucuacaacggccgccucgucgacuccaucgucuccugguccaaggagauccuccgcacccaggaguccgagugcgucugcaucaacggcaccugcaccgucgucaugaccgacggcuccgccuccggcaaggccgacaccaagauccucuucaucgaggagggcaagaucguccacaccuccacccucuccggcuccgcccagcacgucgaggagugcuccugcuacccccgcuaccccggcguccgcugcgucugccgcgacaacuggaagggcuccaaccgccccaucgucgacaucaacaucaaggacuacuccaucgucuccuccuacgucugcuccggccucgucggcgacaccccccgcaagaacgacuccuccuccuccucccacugccucgaccccaacaacgaggagggcggccacggcgucaagggcugggccuucgacgacggcaacgacgucuggaugggccgcaccaucuccgagaagcuccgccucggcuacgagaccuucaaggucaucgagggcugguccaaccccaacuccaagcuccagaccaaccgccaggucaucgucgaccgcggcaaccgcuccggcuacuccggcaucuucuccgucgagggcaaguccugcaucaaccgcugcuucuacgucgagcucauccgcggccgcaaggaggagaccgagguccucuggaccuccaacuccaucgucgucuucugcggcaccuccggcaccuacggcaccggcuccuggcccgacggcgccgacaucaaccucaugcccaucuga

SEQ ID NO: 120563 - RNA, 1410 nt, Artificial Sequence; identical to SEQ ID NO: 112600
  derived and/or modified CDS sequence (opt2) from neuraminidase__InfluenzaA__AHL89237

SEQ ID NO: 120564 - RNA, 1410 nt, Artificial Sequence; identical to SEQ ID NO: 111743
  derived and/or modified CDS sequence (opt2) from neuraminidase__InfluenzaA__AHL89261

SEQ ID NO: 120565 - RNA, 1410 nt, Artificial Sequence
  derived and/or modified CDS sequence (opt2) from neuraminidase__InfluenzaA__AHL89273
augaaccccaaccagaagaucaucaccaucggcuccgucucccucaccaucuccaccaucugcuucuucaugcagaucgccauccucaucaccaccgucacccuccacuucaagcaguacgaguucaacuccccccccaacaaccaggucaugcucugcgagcccaccaucaucgagcgcaacaucaccgagaucgucuaccucaccaacaccaccaucgagaaggagaucugccccaagcucgccgaguaccgcaacugguccaagccccagugcaacaucaccggcuucgcccccuucuccaaggacaacuccauccgccucuccgccggcggcgacaucugggucacccgcgagcccuacgucuccugcgaccccgacaagugcuaccaguucgcccucggccagggcaccacccucaacaacguccacuccaacgacaccguccacgaccgcacccccuaccgcacccuccucaugaacgagcucggcguccccuuccaccucggcaccaagcaggucugcaucgccugguccuccuccuccugccacgacggcaaggccuggcuccacgucugcgucaccggcgacgacaagaacgccaccgccuccuucaucuacaacggccgccucgucgacuccaucgucuccugguccaaggagauccuccgcacccaggaguccgagugcgucugcaucaacggcaccugcaccgucgucaugaccgacggcuccgccuccggcaaggccgacaccaagauccucuucaucgaggagggcaagaucguccacaccuccacccucuccggcuccgcccagcacgucgaggagugcuccugcuacccccgcuaccccggcguccgcugcgucugccgcgacaacuggaagggcuccaaccgccccaucgucgacaucaacaucaaggacuacuccaucgucuccuccuacgucugcuccggccucgucggcgacaccccccgcaagaacgacuccuccuccuccucccacugccucgaccccaacaacgaggagggcggccacggcgucaagggcugggccuucgacgacggcaacgacgucuggaugggccgcaccaucuccgagaagcuccgccucggcuacgagaccuucaaggucaucgagggcugguccaaccccaacuccaagcuccagaccaaccgccaggucaucgucgaccgcggcaaccgcuccggcuacuccggcaucuucuccgucgagggcaaguccugcaucaaccgcugcuucuacgucgagcucauccgcggccgcaaggaggagaccgacguccucuggaccuccaacuccaucgucgucuucugcggcaccuccggcaccuacggcaccggcuccuggcccgacggcgccgacaucaaccucaugcccaucuga

SEQ ID NO: 120566 - RNA, 1410 nt, Artificial Sequence
  derived and/or modified CDS sequence (opt2) from neuraminidase__InfluenzaA__AHL89285
augaaccccaaccagaagaucaucaccaucggcuccgucucccucaccaucuccaccaucugcuucuucaugcagaucgccauccucaucaccaccgucacccuccacuucaagcaguacgaguucaacuccccccccaacaaccaggucaugcucugcgagcccaccaucaucgagcgcaacaucaccgagaucgucuaccucaccaacaccaccaucgagaaggagaucugccccaagcucgccgaguaccgcaacugguccaagccccagugcaacaucaccggcuucgcccccuucuccaaggacaacuccauccgccucuccgccggcggcgacaucugggucacccgcgagcccuacgucuccugcgaccccgacaagugcuaccaguucgcccucggccagggcaccacccucaacaacguccacuccaacgacaccguccacgaccgcacccccuaccgcacccuccucaugaacgagcucggcguccccuuccaccucggcaccaagcaggucugcaucgccugguccuccuccuccugccacgacggcaaggccuggcuccacgucugcgucaccggcgacgacaagaacgccaccgccuccuucaucuacaacggccgccucgucgacuccaucgucuccugguccaaggagauccuccgcacccaggaguccgagugcgucugcaucaacggcaccugcaccgucgucaugaccgacggcuccgccuccggcaaggccgacaccaagauccucuucaucgaggagggcaagaucguccacaccuccacccucuccggcuccgcccagcacgucgaggagugcuccugcuacccccgcuaccccggcguccgcugcgucugccgcgacaacuggaagggcuccaaccgccccaucgucgacaucaacaucaaggacuacuccaucgucuccuccuacgucugcuccggccucgucggcgacaccccccgcaagaacgacuccuccuccuccucccacugccucgaccccaacaacgaggagggcggccacggcgucaagggcugggccuucgacgacggcaacgacgucuggaugggccgcaccaucuccgagaagcuccgccucggcuacgagaccuucaaggucaucgagggcugguccaaccccaacuccaagcuccagaccaaccgccaggucaucgucgaccgcggcaaccgcuccggcuacuccggcaucuucuccgucgagggcaaguccugcaucaaccgcugcuucuacgucgagcucauccgcggccgcaaggaggagaccgacguccucuggaccuccaacuccaucgucgucuucugcuccaccuccggcaccuacggcaccggcuccuggcccgacggcgccgacaucaaccucaugcccaucuga

SEQ ID NO: 120567 - RNA, 1410 nt, Artificial Sequence; identical to SEQ ID NO: 120565
  derived and/or modified CDS sequence (opt2) from neuraminidase__InfluenzaA__AHL89297

SEQ ID NO: 120568 - RNA, 1410 nt, Artificial Sequence; identical to SEQ ID NO: 120565
  derived and/or modified CDS sequence (opt2) from neuraminidase__InfluenzaA__AHL89309

SEQ ID NO: 120569 - RNA, 1410 nt, Artificial Sequence
  derived and/or modified CDS sequence (opt2) from neuraminidase__InfluenzaA__AHL89321
augaaccccaaccagaagaucaucaccaucggcuccgucucccucaccaucuccaccaucugcuucuucaugcagaucgccauccucaucaccaccgucacccuccacuucaagcaguacgaguucaacuccccccccaacaaccaggucaugcucugcgagcccaccaucaucgagcgcaacaucaccgagaucgucuaccucaccaacaccaccaucgagaaggagaucugccccaagcucgccgaguaccgcaacugguccaagccccagugcgacaucaccggcuucgcccccuucuccaaggacaacuccauccgccucuccgccggcggcgacaucugggucacccgcgagcccuacgucuccugcgaccccgacaagugcuaccaguucgcccucggccagggcaccacccucaacaacguccacuccaacgacaccguccacgaccgcacccccuaccgcacccuccucaugaacgagcucggcguccccuuccaccucggcaccaagcaggucugcaucgccugguccuccuccuccugccacgacggcaaggccuggcuccacgucugcgucaccggcgacgacaagaacgccaccgccuccuucaucuacaacggccgccucgucgacuccgucgucuccugguccaaggacauccuccgcacccaggaguccgagugcgucugcaucaacggcaccugcaccgucgucaugaccgacggcuccgccuccggcaaggccgacaccaagauccucuucaucgaggagggcaagaucguccacaucuccacccucuccggcuccgcccagcacgucgaggagugcuccugcuacccccgcuaccccggcguccgcugcgucugccgcgacaacuggaagggcuccaaccgccccaucgucgacaucaacaucaagaacuacuccaucgucuccuccuacgucugcuccggccucgucggcgacaccccccgcaagaccgacuccuccuccuccucccacugccucgaccccaacaacgaggagggcggccacggcgucaagggcugggccuucgacgacggcaacgacgucuggaugggccgcaccaucuccgagaagcuccgccucggcuacgagaccuucaaggucaucgagggcugguccaaccccaacuccaagcuccagaucaaccgccaggucaucgucgaccgcggcaaccgcuccggcuacuccggcaucuucuccgucgagggcaaguccugcaucaaccgcugcuucuacgucgagcucauccgcggccgcaaggaggagaccgagguccucuggaccuccaacuccaucgucgucuucugcggcaccuccggcaccuacggcaccggcuccuggcccgacggcgccgacaucaaccucaugcccaucuga

SEQ ID NO: 120570 - RNA, 1410 nt, Artificial Sequence
  derived and/or modified CDS sequence (opt2) from neuraminidase__InfluenzaA__AHL89333
augaaccccaaccagaagaucaucaccaucggcuccgucucccucaccaucuccaccaucugcuucuucaugcagaucgccauccucaucgccaccgucacccuccacuucaagcaguacgaguucaacuccccccccaacaaccaggucaugcucugcgagcccaccaucaucgagcgcaacaucaccgagaucgucuaccucaccaacaccaccaucgagaaggagaucugccccaagcucgccgaguaccgcaacugguccaagccccagugcaacaucaccggcuucgcccccuucuccaaggacaacuccauccgccucuccgccggcggcgacaucugggucacccgcgagcccuacgucuccugcgaccccgacaagugcuaccaguucgcccucggccagggcaccacccucaacaacguccacuccaacgacaccguccacgaccgcacccccuaccgcacccuccucaugaacgagcucggcguccccuuccaccucggcaccaagcaggucugcaucgccugguccuccuccuccugccacgacggcaaggccuggcuccacgucugcgucaccggcgacgacaagaacgccaccgccuccuucaucuacaacggccgccucgucgacuccaucgucuccugguccaaggagauccuccgcacccaggaguccgagugcgucugcaucaacggcaccugcgccgucgucaugaccgacggcuccgccuccggcaaggccgacaccaagauccucuucaucgaggagggcaagaucguccacaccuccacccucuccggcuccgcccagcacgucgaggagugcuccugcuacccccgcuaccccggcguccgcugcgucugccgcgacaacuggaagggcuccaaccgccccaucgucgacaucaacaucaaggacuacuccaucgucuccuccuacgucugcuccggccucgucggcgacaccccccgcaagaacgacuccuccuccuccucccacugccucgaccccaacaacgaggagggcggccacggcgucaagggcugggccuucgacgacggcaacgacgucuggaugggccgcaccaucuccgagaagcuccgccucggcuacgagaccuucaaggucaucgagggcugguccaaccccaacuccaagcuccagaccaaccgccaggucaucgucgaccgcggcaaccgcuccggcuacuccggcaucuucuccgucgagggcaaguccugcaucaaccgcugcuucuacgucgagcucauccgcggccgcaaggaggagaccgagguccucuggaccuccaacuccaucgucgucuucugcggcaccuccggcaccuacggcaccggcuccuggcccgacggcgccgacaucaaccucaugcccaucuga

SEQ ID NO: 120571 - RNA, 1410 nt, Artificial Sequence; identical to SEQ ID NO: 110748
  derived and/or modified CDS sequence (opt2) from neuraminidase__InfluenzaA__AHL89345

SEQ ID NO: 120572 - RNA, 1410 nt, Artificial Sequence; identical to SEQ ID NO: 111742
  derived and/or modified CDS sequence (opt2) from neuraminidase__InfluenzaA__AHL89357

SEQ ID NO: 120573 - RNA, 1410 nt, Artificial Sequence; identical to SEQ ID NO: 111743
  derived and/or modified CDS sequence (opt2) from neuraminidase__InfluenzaA__AHL89369

SEQ ID NO: 120574 - RNA, 1410 nt, Artificial Sequence
  derived and/or modified CDS sequence (opt2) from neuraminidase__InfluenzaA__AHL89381
augaaccccaaccagaagaucaucaccaucggcuccgucucccucaccaucuccaccaucugcuucuucaugcagaucgccauccucaucaccaccgucacccuccacuucaagcaguacgaguacaacuccccccccaacaaccaggucaugcucugcgagcccaccaucaucgagcgcaacaucaccgagaucgucuaccucaccaacaccaccaucgagaaggagaucugccccaagcucgccgaguaccgcaacugguccaagccccagugcaacaucaccggcuucgcccccuucuccaaggacaacuccauccgccucuccgccggcggcgacaucugggucacccgcgagcccuacgucuccugcgaccccgacaagugcuaccaguucgcccucggccagggcaccacccucaacaacguccacuccaacgacaccguccacgaccgcacccccuaccgcacccuccucaugaacgagcucggcguccccuuccaccucggcaccaagcaggucugcaucgccugguccuccuccuccugccacgacggcaaggccuggcuccacgucugcgucaccggcgacgacaagaacgccaccgccuccuucaucuacaacggccgccucgucgacuccaucgucuccugguccaaggagauccuccgcacccaggaguccgagugcgucugcaucaacggcaccugcaccgucgucaugaccgacggcuccgccuccggcaaggccgacaccaagauccucuucaucgaggagggcaagaucguccacaccuccacccucuccggcuccgcccagcacgucgaggagugcuccugcuacccccgcuaccccggcguccgcugcgucugccgcgacaacuggaagggcuccaaccgccccaucgucgacaucaacaucaaggacuacuccaucgucuccuccuacgucugcuccggccucgucggcgacaccccccgcaagaacgacuccuccuccuccucccacugccucgaccccaacaacgaggagggcggccacggcgucaagggcugggccuucgacgacggcaacgacgucuggaugggccgcaccaucuccgagaagcuccgccucggcuacgagaccuucaaggucaucgagggcugguccaaccccaacuccaagcuccagaccaaccgccaggucaucgucgaccgcggcaaccgcuccggcuacuccggcaucuucuccgucgagggcaaguccugcaucaaccgcugcuucuacgucgagcucauccgcggccgcaaggaggagaccgagguccucuggaccuccaacuccaucgucgucuucugcggcaccuccggcaccuacggcaccggcuccuggcccgacggcgccgacaucaaccucaugcccaucuga

SEQ ID NO: 120575 - RNA, 1410 nt, Artificial Sequence; identical to SEQ ID NO: 120565
  derived and/or modified CDS sequence (opt2) from neuraminidase__InfluenzaA__AHL89405

SEQ ID NO: 120576 - RNA, 1410 nt, Artificial Sequence
  derived and/or modified CDS sequence (opt2) from neuraminidase__InfluenzaA__AHL89417
augaaccccaaccagaagaucaucaccaucggcuccgucucccucaccaucuccaccaucugcuucuucaugcagaucgccauccucaucaccaccgucacccuccacuucaagcaguacgaguucaacuccccccccaacaaccaggucaugcucugcgagcccaccaucaucgagcgcaacaucaccgagaucgucuaccucaccaacaccaccaucgagaaggagaucugccccaagcucgccgaguaccgcaacugguccaagccccagugcgacaucaccggcuucgcccccuucuccaaggacaacuccauccgccucuccgccggcggcgacaucugggucacccgcgagcccuacgucuccugcgaccccgacaagugcuaccaguucgcccucggccagggcaccacccucaacaacguccacuccaacgacaccguccacgaccgcacccccuaccgcacccuccucaugaacgagcucggcguccccuuccaccucggcaccaagcaggucugcaucgccugguccuccuccuccugccacgacggcaaggccuggcuccacgucugcgucaccggcgacgacaagaacgccaccgccuccuucaucuacaacggccgccucgucgacuccgucgucuccugguccaaggacauccuccgcacccaggaguccgagugcgucugcaucaacggcaccugcaccgucgucaugaccgacggcuccgccuccggcaaggccgacaccaagauccucuucaucgaggagggcaagaucguccacaccuccacccucuccggcuccgcccagcacgucgaggagugcuccugcuacccccgcuaccccggcguccgcugcgucugccgcgacaacuggaagggcuccaaccgccccaucgucgacaucgacaucaagaacuacuccaucgucuccuccuacgucugcuccggccucgucggcgacaccccccgcaagaccgacuccuccuccuccucccacugccucgaccccaacaacgaggagggcggccacggcgucaagggcugggccuucgacgacggcaacgacgucuggaugggccgcaccaucuccgagaagcuccgccucggcuacgagaccuucaaggucaucgagggcugguccaaccccaacuccaagcuccagaucaaccgccaggucaucgucgaccgcggcaaccgcuccggcuacuccggcaucuucuccgucgagggcaaguccugcaucaaccgcugcuucuacgucgagcucauccgcggccgcaaggaggagaccgagguccucuggaccuccaacuccaucgucgucuucugcggcaccuccggcaccuacggcaccggcuccuggcccgacggcgccgacaucaaccucaugcccaucuga

SEQ ID NO: 120577 - RNA, 1410 nt, Artificial Sequence; identical to SEQ ID NO: 111743
  derived and/or modified CDS sequence (opt2) from neuraminidase__InfluenzaA__AHL89429

SEQ ID NO: 120578 - RNA, 1410 nt, Artificial Sequence; identical to SEQ ID NO: 110748
  derived and/or modified CDS sequence (opt2) from neuraminidase__InfluenzaA__AHL89441

SEQ ID NO: 120579 - RNA, 1410 nt, Artificial Sequence; identical to SEQ ID NO: 110748
  derived and/or modified CDS sequence (opt2) from neuraminidase__InfluenzaA__AHL89453

SEQ ID NO: 120580 - RNA, 1410 nt, Artificial Sequence
  derived and/or modified CDS sequence (opt2) from neuraminidase__InfluenzaA__AHL89465
augaaccccaaccagaagaucaucaccaucggcuccgucucccucaccaucuccaccaucugcuucuucaugcagaucgccauccucaucaccaccgucacccuccacuucaagcaguacgaguucaacuccccccccaacaaccaggucaugcucugcgagcccaccaucaucgagcgcaacaucaccgagaucgucuaccucaccaacaucaccaucgagaaggagaagugccccaagcucgccgaguaccgcaacugguccaagccccagugcaacaucaccggcuucgcccccuucuccaaggacaacuccauccgccucuccgccggcggcgacaucugggucacccgcgagcccuacgucuccugcgaccccgaccgcugcuaccaguucgcccucggccagggcaccacccucaacaacguccacuccaacgacaccguccacgaccgcacccccuaccgcacccuccucaugaacgagcucggcguccccuuccaccucggcaccaagcaggucugcaucgccugguccuccuccuccugccacgacggcaaggccuggcuccacgucugcgucaccggcgacgacaagaacgccaccgccuccuucaucuacaacggccgccucgucgacuccaucgucuccugguccaaggagauccuccgcacccaggaguccgagugcgucugcaucaacggcaccugcaccgucgucaugaccgacggcuccgccuccggcaaggccgacaccaagauccucuucaucgaggagggcaagaucguccacaccuccacccucuccggcuccgcccagcacgucgaggagugcuccugcuacccccgcuaccccggcguccgcugcgucugccgcgacaacuggaagggcuccaaccgccccaucgucgacaucaacaucaaggacuacuccaucgucuccuccuacgucugcuccggccucgucggcgacaccccccgcaagaacgacuccuccuccuccucccacugccucgaccccaacaacgaggagggcggccacggcgucaagggcugggccuucgacgacggcaacgacgucuggaugggccgcaccaucuccgagaagcuccgccucggcuacgagaccuucaaggucaucgagggcugguccaaccccaacuccaagcuccagaccaaccgccaggucaucgucgaccgcggcaaccgcuccggcuacuccggcaucuucuccgucgagggcaaguccugcaucaaccgcugcuucuacgucgagcucauccgcggccgcaaggaggagaccgagguccucuggaccuccaacuccaucgucgucuucugcggcaccuccggcaccuacggcaccggcuccuggcccgacggcgccgacaucaaccucaugcccaucuga

SEQ ID NO: 120581 - RNA, 1410 nt, Artificial Sequence; identical to SEQ ID NO: 120555
  derived and/or modified CDS sequence (opt2) from neuraminidase__InfluenzaA__AHL89477

SEQ ID NO: 120582 - RNA, 1410 nt, Artificial Sequence
  derived and/or modified CDS sequence (opt2) from neuraminidase__InfluenzaA__AHL89489
augaaccccaaccagaagaucaucaccaucggcuccgucucccucaccaucuccaccaucugcuucuucaugcagaucgccauccucaucaccaccgucacccuccacuucaagcaguacgaguucaacuccccccccaacaaccaggucaugcucugcgagcccaccaucaucgagcgcaacaucaccgagaucgucuaccucaccaacaccaccaucgagaaggagaucugccccaagcucgccgaguaccgcaacugguccaagccccagugcuccaucaccggcuucgcccccuucuccaaggacaacuccauccgccucuccgccggcggcgacaucugggucacccgcgagcccuacgucuccugcgaccccgacaagugcuaccaguucgcccucggccagggcaccacccucaacaacguccacuccaacgacaccguccacgaccgcacccccuaccgcacccuccucaugaacgagcucggcguccccuuccaccucggcaccaagcaggucugcaucgccugguccuccuccuccugccacgacggcaaggccuggcuccacgucugcgucaccggcgacgacaagaacgccaccgccuccuucaucuacaacggccgccucgucgacuccaucgucuccugguccaaggagauccuccgcacccaggaguccgagugcgucugcaucaacggcaccugcaccgucgucaugaccgacggcuccgccuccggcaaggccgacaccaagauccucuucaucgaggagggcaagaucguccacaccuccacccucuccggcuccgcccagcacgucgaggagugcuccugcuacccccgcuaccccggcguccgcugcgucugccgcgacaacuggaagggcuccaaccgccccaucgucgacaucaacaucaaggacuacuccaucgucuccuccuacgucugcuccggccucgucggcgacaccccccgcaagaacgaccgcuccuccuccucccacugccucgaccccaacaacgaggagggcggccacggcgucaagggcugggccuucgacgacggcaacgacgucuggaugggccgcaccaucuccgagaagucccgcuccggcuacgagaccuucaaggucaucgagggcugguccaacccccacuccaagcuccagaucaaccgccaggucaucgucgaccgcggcaaccgcuccggcuacuccggcaucuucuccgucgagggcaaguccugcaucaaccgcugcuucuacgucgagcucauccgcggccgcaaggaggagaccgagguccucuggaccuccaacuccaucgucgucuucugcggcaccuccggcaccuacggcaccggcuccuggcccgacggcgccgacaucaaccucaugcccaucuga

SEQ ID NO: 120583 - RNA, 1410 nt, Artificial Sequence; identical to SEQ ID NO: 111743
  derived and/or modified CDS sequence (opt2) from neuraminidase__InfluenzaA__AHL89501

SEQ ID NO: 120584 - RNA, 1410 nt, Artificial Sequence; identical to SEQ ID NO: 111743
  derived and/or modified CDS sequence (opt2) from neuraminidase__InfluenzaA__AHL89513

SEQ ID NO: 120585 - RNA, 1410 nt, Artificial Sequence; identical to SEQ ID NO: 111743
  derived and/or modified CDS sequence (opt2) from neuraminidase__InfluenzaA__AHL89525

SEQ ID NO: 120586 - RNA, 1410 nt, Artificial Sequence; identical to SEQ ID NO: 111743
  derived and/or modified CDS sequence (opt2) from neuraminidase__InfluenzaA__AHL89537

SEQ ID NO: 120587 - RNA, 1413 nt, Artificial Sequence
  derived and/or modified CDS sequence (opt2) from neuraminidase__InfluenzaA__AHL89549
augaaccccaaccagaagaucaucaccaucggcuccaucuccaucgccaucggcaucaucucccucaugcuccagaucggcaacaucaucuccaucugggccucccacuccauccagaccggcucccagaaccacaccggcaucugcaaccagcgcaucaucaccuacgagaacuccaccugggucaaccacaccuacgucaacaucaacaacaccaacgucgucgccggcaaggacaagaccuccgucacccucgccggcaacuccucccucugcuccaucuccggcugggccaucuacaccaaggacaacuccauccgcaucggcuccaagggcgacgucuucgucauccgcgagcccuucaucuccugcucccaccucgagugccgcaccuucuuccucacccagggcgcccuccucaacgacaagcacuccaacggcaccgucaaggaccgcucccccuaccgcgcccucauguccugcccccucggcgaggcccccucccccuacaacuccaaguucgaguccgucgccugguccgccuccgccugccacgacggcaugggcuggcucaccaucggcaucuccggccccgacaacggcgccgucgccguccucaaguacaacggcaucaucaccgagaccaucaaguccuggaagaagcgcauccuccgcacccaggaguccgagugcgucugcgucaacggcuccugcuucaccaucaugaccgacggccccuccaacggcgccgccuccuacaagaucuucaagaucgagaagggcaaggucaccaaguccaucgagcucaacgcccccaacuuccacuacgaggagugcuccugcuaccccgacaccggcaccgucaugugcgucugccgcgacaacuggcacggcuccaaccgccccugggucuccuucaaccagcaccucgacuaccagaucggcuacaucugcuccggcgucuucggcgacaacccccgccccaaggacggcaagggcuccugcaaccccgucaccgucgacggcgccgacggcgucaagggcuucuccuacaaguacggcaacggcgucuggaucggccgcaccaaguccaaccgccuccgcaagggcuucgagaugaucugggaccccaacggcuggaccgacaccgacuccgacuucuccgucaagcaggacgucgucgccaucaccgacugguccggcuacuccggcuccuucguccagcaccccgagcucaccggccucgacugcauccgccccugcuucugggucgagcucguccgcggccucccccgcgagaacaccaccaucuggaccuccggcuccuccaucuccuucugcggcgucgacuccgacaccgccaacugguccuggcccgacggcgccgagcuccccuucaccaucgacaaguga

SEQ ID NO: 120588 - RNA, 1413 nt, Artificial Sequence; identical to SEQ ID NO: 112066
  derived and/or modified CDS sequence (opt2) from neuraminidase__InfluenzaA__AHL89561

SEQ ID NO: 120589 - RNA, 1413 nt, Artificial Sequence; identical to SEQ ID NO: 112066
  derived and/or modified CDS sequence (opt2) from neuraminidase__InfluenzaA__AHL89573

SEQ ID NO: 120590 - RNA, 1413 nt, Artificial Sequence; identical to SEQ ID NO: 112101
  derived and/or modified CDS sequence (opt2) from neuraminidase__InfluenzaA__AHL89585

SEQ ID NO: 120591 - RNA, 1413 nt, Artificial Sequence
  derived and/or modified CDS sequence (opt2) from neuraminidase__InfluenzaA__AHL89597
augaaccccaaccagaagaucaucaccaucggcuccaucuccaucgccaucggcaucaucucccucaugcuccagaucggcaacaucaucuccaucugggccucccacuccauccagaccggcucccagaaccacaccggcaucugcaaccagcgcaucaucaccuacgagaacuccaccugggucaaccacaccuacgucaacaucaacaacaccaacgucgucgccggcaaggacaagaccuccgucacccucgccggcaacuccucccucugcuccaucuccggcugggccaucuacaccaaggacaacuccauccgcaucggcuccaagggcgacgucuucgucauccgcgagcccuucaucuccugcucccaccucgagugccgcaccuucuuccucacccagggcgcccuccucaacgacaagcacuccaacggcaccguccgcgaccgcucccccuaccgcgcccucauguccugcccccucggcgaggcccccucccccuacaacuccaaguucgaguccgucgccugguccgccuccgccugccacgacggcaugggcuggcucaccaucggcaucuccggccccgacaacggcgccgucgccguccucaaguacaacggcaucaucaccgagaccaucaaguccuggaagaagcgcauccuccgcacccaggaguccgagugcgucugcgucaacggcuccugcuucaccaucaugaccgacggccccuccaacggcgccgccuccuacaagaucuucaagaucgagaagggcaaggucaccaaguccaucgagcucaacgcccccaacuuccacuacgaggagugcuccugcuaccccgacaccggcaccgucaugugcgucugccgcgacaacuggcacggcuccaaccgccccugggucuccuucaaccagaaccucgacuaccaggucggcuacaucugcuccggcgucuucggcgacaacccccgccccaaggacggcaagggcuccugcaaccccaugaccgucgacggcgccgacggcgucaagggcuucuccuacaaguacggcaacggcgucuggaucggccgcaccaaguccaacaagcuccgcaagggcuucgagaugaucugggaccccaacggcuggaccgacaccgacuccgacuucuccgucaagcaggacgucgucgccaucaccgacugguccggcuacuccggcuccuucguccagcaccccgagcucaccggccucgacugcauccgccccugcuucugggucgagcucguccgcggccucccccgcgagaacaccaccaucuggaccuccggcuccuccaucuccuucugcggcgucgacuccgacaccgccaacugguccuggcccgacggcgccgagcuccccuucaccaucgacaaguga

SEQ ID NO: 120592 - RNA, 1413 nt, Artificial Sequence; identical to SEQ ID NO: 112101
  derived and/or modified CDS sequence (opt2) from neuraminidase__InfluenzaA__AHL89609

SEQ ID NO: 120593 - RNA, 1413 nt, Artificial Sequence
  derived and/or modified CDS sequence (opt2) from neuraminidase__InfluenzaA__AHL89621
augaaccccaaccagaagaucaucaccaucggcuccaucuccaucgccaucggcaucaucucccucaugcuccagaucggcaacaucaucuccaucugggccucccacuccauccagaccggcucccagaaccacaccggcaucugcaaccagcgcaucaucaccuacgagaacuccaccugggucaaccacaccuacgucuccaucaacaacaccaacgucgucgccggcaaggacaagaccuccgucacccucgccggcaacuccucccucugcuccaucuccggcugggccaucuacaccaaggacaacuccauccgcaucggcuccaagggcgacgucuucgucauccgcgagcccuucaucuccugcucccaccucgagugccgcaccuucuuccucacccagggcgcccuccucaacgacaagcacuccaacggcaccgucaaggaccgcucccccuaccgcgcccucauguccugcccccucggcgaggcccccucccccuacaacuccaaguucgaguccgucgccugguccgccuccgccugccacgacggcaugggcuggcucaccaucggcaucuccggccccgacaacggcgccgucgccguccucaaguacaacggcaucaucaccgagaccaucaaguccuggaagaagcgcauccuccgcacccaggaguccgagugcgucugcgucaacggcuccugcuucaccaucaugaccgacggccccuccaacggcgccgccuccuacaagaucuucaagaucgagaagggcaaggucaccaaguccaucgagcucaacgcccccaacuuccacuacgaggagugcuccugcuaccccgacaccggcaccgucaugugcgucugccgcgacaacuggcacggcuccaaccgccccugggucuccuucaaccagaaccucgacuaccagaucggcuacaucugcuccggcgucuucggcgacaacccccgccccaaggacggcaagggcuccugcaaccccgucaccgucgacggcgccgacggcgucaagggcuucuccuacaaguacggcaacggcgucuggaucggccgcaccaaguccaaccgccaccgcaagggcuucgagaugaucugggaccccaacggcuggaccgacaccgacuccgacuucuccgucaagcaggacgucgucgccaucaccgacugguccggcuacuccggcuccuucguccagcaccccgagcucaccggccucgacugcauccgccccugcuucugggucgagcucguccgcggccucccccgcgagaacaccaccaucuggaccuccggcuccuccaucuccuucugcggcgucgacuccgacaccgccaacugguccuggcccgacggcgccgagcuccccuucaccaucgacaaguga

SEQ ID NO: 120594 - RNA, 1413 nt, Artificial Sequence; identical to SEQ ID NO: 112092
  derived and/or modified CDS sequence (opt2) from neuraminidase__InfluenzaA__AHL89633

SEQ ID NO: 120595 - RNA, 1413 nt, Artificial Sequence; identical to SEQ ID NO: 112101
  derived and/or modified CDS sequence (opt2) from neuraminidase__InfluenzaA__AHL89645

SEQ ID NO: 120596 - RNA, 1413 nt, Artificial Sequence; identical to SEQ ID NO: 112066
  derived and/or modified CDS sequence (opt2) from neuraminidase__InfluenzaA__AHL89657

SEQ ID NO: 120597 - RNA, 1413 nt, Artificial Sequence
  derived and/or modified CDS sequence (opt2) from neuraminidase__InfluenzaA__AHL89669
augaaccccaaccagaagaucaucaccaucggcuccaucuccaucgccaucggcaucaucucccucaugcuccagaucggcaacaucaucuccaucugggccucccacuccauccagaccggcucccagaaccacaccggcaucugcaaccagcgcaucaucaccuacgagaacuccaccugggucaaccacaccuacgucaacaucaacaacaccaacgucgucgccggcaaggacaagaccuccgucacccucgccggcaacuccucccucugcuccaucuccggcugggccaucuacaccaaggacaacuccauccgcaucggcuccaagggcgacgucuucgucauccgcgagcccuucaucuccugcucccaccucgagugccgcaccuucuuccucacccagggcgcccuccucaacgacaagcacuccaacggcaccgucaaggaccgcucccccuaccgcgcccucauguccugcccccucggcgaggcccccucccccuacaacuccaaguucgaguccgucgccugguccgccuccgccugccacgacggcaugggcuggcucaccaucggcaucuccggccccgacaacggcgccgucgccguccucaaguacaacggcaucaucaccgagaccaucaaguccuggaagaagcgcauccuccgcacccaggaguccgagugcgucugcgucaacggcuccugcuucaccaucaugaccgacggccccuccaacggcgccgccuccuacaagaucuucaagaucgagaagggcaaggucaccaaguccaucgagcucaacgcccccaacuuccacuacgaggagugcuccugcuaccccgacaccggcaccgucaugugcgucugccgcgacaacuggcacggcuccaaccgccccugggucuccuucaaccagaaccucgacuaccaggucggcuacaucugcuccggcgucuucggcgacaacccccgccccaaggacggcaagggcuccugcaaccccaugaccgucgacggcgccgacggcgucaagggcuucuccuacaaguacggcaacggcgucuggaucggccgcaccaaguccaacgagcuccgcaagggcuucgagaugaucugggaccccaacggcuggaccgacaccgacuccgacuucuccgucaagcaggacgucgucgccaucaccgacugguccggcuacuccggcuccuucguccagcaccccgagcucaccggccucgacugcauccgccccugcuucugggucgagcucguccgcggccucccccgcgagaacaccaccaucuggaccuccggcuccuccaucuccuucugcggcgucgacuccgacaccgccaacugguccuggcccgacggcgccgagcuccccuucaccaucgacaaguga

SEQ ID NO: 120598 - RNA, 1413 nt, Artificial Sequence
  derived and/or modified CDS sequence (opt2) from neuraminidase__InfluenzaA__AHL89681
augaaccccaaccagaagaucaucaccaucggcuccaucuccaucgccaucggcaucaucucccucaugcuccagaucggcaacaucaucuccaucugggccucccacuccauccagaccggcucccagaaccacaccggcaucugcaaccagcgcaucaucaccuacgagaacuccaccugggucaaccacaccuacgucaacaucaacaacaccaacgucgucgccggcaaggacaagaccuccgucacccucgccggcaacuccucccucugcuccaucuccggcugggccaucuacaccaaggacaacuccauccgcaucggcuccaagggcgacgucuucgucauccgcgagcccuucaucuccugcucccaccucgagugccgcaccuucuuccucacccagggcgcccuccucaacgacaagcacuccaacggcaccgucaaggaccgcucccccuaccgcgcccucauguccugcccccucggcgaggcccccucccccuacaacuccaaguucgaguccgucgccugguccgccuccgccugccacgacggcaugggcuggcucaccaucggcaucuccggccccgacaacggcgccgucgccguccucaaguacaacggcaucaucaccgagaccaucaaguccuggaagaagcgcauccuccgcacccaggaguccgagugcgucugcgucaacggcuccugcuucaccaucaugaccgacggccccuccaacggcgccgccuccuacaagaucuucaagaucgagaagggcaagaucaccaaguccaucgagcucaacgcccccaacuuccacuacgaggagugcuccugcuaccccgacaccggcaccgucaugugcgucugccgcgacaacuggcacggcuccaaccgccccugggucuccuucaaccagaaccucgacuaccaggucggcuacaucugcuccggcgucuucggcgacaacccccgccccaaggacggcaagggcuccugcaaccccaugaccgucgacggcgccgacggcgucaagggcuucuccuacaaguacggcaacggcgucuggaucggccgcaccaaguccaacaagcuccgcaagggcuucgagaugaucugggaccccaacggcuggaccgacaccgacuccgacuucuccgucaagcaggacgucgucgccaucaccgacugguccggcuacuccggcuccuucguccagcaccccgagcucaccggccucgacugcauccgccccugcuucugggucgagcucguccgcggccucccccgcgagaacgccaccaucuggaccuccggcuccuccaucuccuucugcggcgucgacuccgacaccgccaacugguccuggcccgacggcgccgagcuccccuucaccaucgacaaguga

SEQ ID NO: 120599 - RNA, 1413 nt, Artificial Sequence
  derived and/or modified CDS sequence (opt2) from neuraminidase__InfluenzaA__AHL89693
augaaccccaaccagaagaucaucaccaucggcuccaucuccaucgccaucggcaucaucucccucaugcuccagaucggcaacaucaucuccaucugggccucccacuccauccagaccggcucccagaaccacaccggcaucugcaaccagcgcaucaucaccuacgagaacuccaccugggucaaccacaccuacgucaacaucaacaacaccaacgucgucgccggcaaggacaagaccuccgucacccucgccggcaacuccucccucugcuccaucuccggcugggccaucuacaccaaggacaacuccauccgcaucggcuccaagggcgacgucuucgucauccgcgagcccuucaucuccugcucccaccucgagugccgcaccuucuuccucacccagggcgcccuccucaacgacaagcacuccaacggcaccgucaaggaccgcucccccuaccgcgcccucauguccugcccccucggcgaggcccccucccccuacaacuccaaguucgaguccgucgccugguccgccuccgccugccacgacggcaugggcuggcucaccaucggcaucuccggccccgacaacggcgccgucgccguccucaaguacaagggcaucaucaccggcaccaucaaguccuggcgcaagcagauccuccgcacccaggaguccgagugcgucugcaugaacggcuccugcuucaccaucaugaccgacggccccuccaacggcgccgccuccuacaagaucuucaagaucgagaagggcaaggucaccaaguccaucgagcucaacgcccccaacuuccacuacgaggagugcuccugcuaccccgacaccggcaucgucaugugcgucugccgcgacaacuggcacggcuccaaccgccccugggucuccuucaaccagaaccucgacuaccagaucggcuacaucugcuccggcgucuucggcgacaacccccgccccaaggacggcgagggcuccugcaaccccgucaccgucgacggcgccgacggcgucaagggcuucuccuacaaguacgacgacggcgucuggaucggccgcaccaaguccaaccgccuccgcaagggcuucgagaugaucugggaccccaacggcuggaccaacaccgacuccgacuucuccgucaagcaggacgucgucgccaucaccgacugguccggcuacuccggcuccuucguccagcaccccgagcucaccggccucgacugcauccgccccugcuucugggucgagcucguccgcggccucccccgcgagaacaccaccaucuggaccuccggcuccuccaucuccuucugcggcgucaacuccgacaccgccaacugguccuggcccgacggcgccgagcuccccuucaccaucgacaaguga

SEQ ID NO: 120600 - RNA, 1413 nt, Artificial Sequence
  derived and/or modified CDS sequence (opt2) from neuraminidase__InfluenzaA__AHL89705
augaaccccaaccagaagaucaucaccaucggcuccaucuccaucgccaucggcaucaucucccucaugcuccagaucggcaacaucaucuccaucugggccucccacuccauccagaacggcucccagaaccacaccggcaucugcaaccagcgcaucaucaccuacgagaacuccaccugggucaaccacaccuacgucuccaucaacaacaccaacgucgucgccggcaaggacaagaccuccgucacccucgccggcaacuccucccucugcuccaucuccggcugggccaucuacaccaaggacaacuccauccgcaucggcuccaagggcgacgucuucgucauccgcgagcccuucaucuccugcucccaccucgagugccgcaccuucuuccucacccagggcgcccuccucaacgacaagcacuccaacggcaccgucaaggaccgcucccccuaccgcgcccucauguccugcccccucggcgaggcccccucccccuacaacuccaaguucgaguccgucgccugguccgccuccgccugccacgacggcaugggcuggcucaccaucggcaucuccggccccgacaacggcgccgucgccguccucaaguacaacggcaucaucaccgagaccaucaaguccuggaagaagcgcauccuccgcacccaggaguccgagugcgucugcgucaacggcuccugcuucaccaucaugaccgacggccccuccaacggcgccgccuccuacaagaucuucaagaucgagaagggcaaggucaccaaguccaucgagcucaacgcccccaacuuccacuacgaggagugcuccugcuaccccgacaccggcaccgucaugugcgucugccgcgacaacuggcacggcuccaaccgccccugggucuccuucaaccagaaccucgacuaccagaucggcuacaucugcuccggcgucuucggcgacaacccccgccccaaggacggcaagggcuccugcaaccccgucaccgucgacggcgccgacggcgucaagggcuucuccuacaaguacggcaacggcgucuggaucggccgcaccaaguccaaccgccuccgcaagggcuucgagaugaucugggaccccaacggcuggaccgacaccgacuccgacuucuccgucaagcaggacgucgucgccaucaccgacugguccggcuacuccggcuccuucguccagcaccccgagcucaccggccucgacugcauccgccccugcuucugggucgagcucguccgcggccucccccgcgagaacaccaccaucuggaccuccggcuccuccaucuccuucugcggcgucgacuccgacaccgccaacugguccuggcccgacggcgccgagcuccccuucaccaucgacaaguga

SEQ ID NO: 120601 - RNA, 1413 nt, Artificial Sequence; identical to SEQ ID NO: 112066
  derived and/or modified CDS sequence (opt2) from neuraminidase__InfluenzaA__AHL89717

SEQ ID NO: 120602 - RNA, 1413 nt, Artificial Sequence; identical to SEQ ID NO: 112066
  derived and/or modified CDS sequence (opt2) from neuraminidase__InfluenzaA__AHL89729

SEQ ID NO: 120603 - RNA, 1413 nt, Artificial Sequence
  derived and/or modified CDS sequence (opt2) from neuraminidase__InfluenzaA__AHL89753
augaaccccaaccagaagaucaucaccaucggcuccaucuccaucgccaucggcaucaucucccucaugcuccagaucggcaacaucaucuccaucugggccucccacuccauccagaccggcucccagaaccacaccggcaucugcaaccagcgcaucaucaccuacgagaacuccaccugggucaaccacaccuacgucuccaucaacaacaccaacgucgucgccggcaacgacaagaccuccgucacccucgccggcaacuccucccucugcuccaucuccggcugggccaucuacaccaaggacaacuccauccgcaucggcuccaagggcgacgucuucgucauccgcgagcccuucaucuccugcucccaccucgagugccgcaccuucuuccucacccagggcgcccuccucaacgacaagcacuccaacggcaccgucaaggaccgcucccccuaccgcgcccucauguccugcccccucggcgaggcccccucccccuacaacuccaaguucgaguccgucgccugguccgccuccgccugccacgacggcaugggcuggcucaccaucggcaucuccggccccgacaacggcgccgucgccguccucaaguacaacggcaucaucaccgagaccaucaaguccuggaagaagcgcauccuccgcacccaggaguccgagugcgucugcgucaacggcuccugcuucaccaucaugaccgacggccccuccaacggcgccgccuccuacaagaucuucaagaucgagaagggcaaggucaccaaguccaucgagcucaacgcccccaacuuccacuacgaggagugcuccugcuaccccgacaccggcaccgucaugugcgucugccgcgacaacuggcacggcuccaaccgccccugggucuccuucaaccagaaccucgacuaccagaucggcuacaucugcuccggcgucuucggcgacaacccccgccccaaggacggcaagggcuccugcaaccccgucaccgucgacggcgccgacggcgucaagggcuucuccuacaaguacggcaacggcgucuggaucggccgcaccaaguccaaccgccuccgcaagggcuucgagaugaucugggaccccaacggcuggaccgacaccgacuccgacuucuccgucaagcaggacgucgucgccaucaccgacugguccggcuacuccggcuccuucguccagcaccccgagcucaccggccucgacugcauccgccccugcuucugggucgagcucguccgcggccucccccgcgagaacaccaccaucuggaccuccggcuccuccaucuccuucugcggcgucgacuccgacaccgccaacugguccuggcccgacggcgccgagcuccccuucaccaucgacaaguga

SEQ ID NO: 120604 - RNA, 1413 nt, Artificial Sequence; identical to SEQ ID NO: 112066
  derived and/or modified CDS sequence (opt2) from neuraminidase__InfluenzaA__AHL89765

SEQ ID NO: 120605 - RNA, 1413 nt, Artificial Sequence; identical to SEQ ID NO: 112107
  derived and/or modified CDS sequence (opt2) from neuraminidase__InfluenzaA__AHL89777

SEQ ID NO: 120606 - RNA, 1413 nt, Artificial Sequence; identical to SEQ ID NO: 112066
  derived and/or modified CDS sequence (opt2) from neuraminidase__InfluenzaA__AHL89789

SEQ ID NO: 120607 - RNA, 1413 nt, Artificial Sequence
  derived and/or modified CDS sequence (opt2) from neuraminidase__InfluenzaA__AHL89801
augaaccccaaccagaagaucaucaccaucggcuccaucuccaucgccaucggcaucaucucccucaugcuccagaucggcaacaucaucuccaucugggccucccacuccauccagaccggcucccagaaccacaccggcaucugcaaccagcgcaucaucaccuacgagaacuccaccugggucaaccacaccuacgucaacaucaacaacaccaacgucgucgccggcaaggacaagaccuccgucgcccucgccggcaacuccucccucugcuccaucuccggcugggccaucuacaccaaggacaacuccauccgcaucggcuccaagggcgacgucuucgucauccgcgagcccuucaucuccugcucccaccucgagugccgcaccuucuuccucacccagggcgcccuccucaacgacaagcacuccaacggcaccgucaaggaccgcucccccuaccgcgcccucauguccugcccccucggcgaggcccccucccccuacaacuccaaguucgaguccgucgccugguccgccuccgccugccacgacggcaugggcuggcucaccaucggcaucuccggccccgacaacggcgccgucgccguccucaaguacaacggcaucaucaccgagaccaucaaguccuggaagaagcgcauccuccgcacccaggaguccgagugcgucugcgucaacggcuccugcuucaccaucaugaccgacggccccuccaacggcgccgccuccuacaagaucuucaagaucgagaagggcaaggucaccaaguccaucgagcucaacgcccccaacuuccacuacgaggagugcuccugcuaccccgacaccggcaccgucaugugcgucugccgcgacaacuggcacggcuccaaccgccccugggucuccuucaaccagaaccucgacuaccagaucggcuacaucugcuccggcgucuucggcgacaacccccgccccaaggacggcaagggcuccugcaaccccgucaccgucgacggcgccgacggcgucaagggcuucuccuacaaguacggcaacggcgucuggaucggccgcaccaaguccaaccgccuccgcaagggcuucgagaugaucugggaccccaacggcuggaccaacaccgacuccgacuucuccgucaagcaggacgucgucgccaucaccgacugguccggcuacuccggcuccuucguccagcaccccgagcucaccggccucgacugcauccgccccugcuucugggucgagcucguccgcggccucccccgcgagaacaccaccaucuggaccuccggcuccuccaucuccuucugcggcgucgacuccgacaccgccaacugguccuggcccgacggcgccgagcuccccuucaccaucgacaaguga

SEQ ID NO: 120608 - RNA, 1413 nt, Artificial Sequence
  derived and/or modified CDS sequence (opt2) from neuraminidase__InfluenzaA__AHL89813
augaaccccaaccagaagaucaucaccaucggcuccaucuccaucgccaucggcaucaucucccucaugcuccagaucggcaacaucaucuccaucugggccucccacuccauccagaccggcucccagaaccacaccggcaucugcaaccagcgcaucaucaccuacgagaacuccaccugggucaaccacaccuacgucaacaucaacaacaccaacgucgucgccggcaaggacaagaccuccgucacccucgccggcaacuccucccucugcuccaucuccggcugggccaucuacaccaaggacaacuccauccgcaucggcuccaagggcgacgucuucgucauccgcgagcccuucaucuccugcucccaccucgagugccgcaccuucuuccucacccagggcgcccuccucaacgacaagcacuccaacggcaccgucaaggaccgcucccccuaccgcgcccucauguccugcccccucggcgaggcccccucccccuacaacuccaaguucgaguccgucgccugguccgccuccgccugccacgacggcaugggcuggcucaccaucggcaucuccggccccgacaacggcgccgucgccguccucaaguacaacggcaucaucaccgagaccaucaaguccuggaagaagcgcauccuccgcacccaggaguccgagugcgucugcgucaacggcuccugcuucaccaucaugaccgacggccccuccaacggcgccgccuccuacaagaucuucaagaucgagaagggcaaggucaccaaguccaucgagcucaacgcccccaacuuccacuacgaggagugcuccugcuaccccgacaccggcaccgucaugugcgucugccgcgacaacuggcacggcuccaaccgccccugggucuccuucaaccagaaccucgacuaccaggucggcuacaucugcuccggcgucuucggcgacaacccccgccccaaggacggcaagggcuccugcaaccccaugaccgccgacggcgccgacggcgucaagggcuucuccuacaaguacggcaacggcgucuggaucggccgcaccaaguccaacaagcuccgcaagggcuucgagaugaucugggaccccaacggcuggaccgacaccgacuccgacuucuccgucaagcaggacgucgucgccaucaccgacugguccggcuacuccggcuccuucguccagcaccccgagcucaccggccucgacugcauccgccccugcuucugggucgagcucguccgcggccucccccgcgagaacgccaccaucuggaccuccggcuccuccaucuccuucugcggcgucgacuccgacaccgccaacugguccuggcccgacggcgccgagcuccccuucaccaucgacaaguga

SEQ ID NO: 120609 - RNA, 1413 nt, Artificial Sequence; identical to SEQ ID NO: 112107
  derived and/or modified CDS sequence (opt2) from neuraminidase__InfluenzaA__AHL89825

SEQ ID NO: 120610 - RNA, 1413 nt, Artificial Sequence; identical to SEQ ID NO: 112066
  derived and/or modified CDS sequence (opt2) from neuraminidase__InfluenzaA__AHL89837

SEQ ID NO: 120611 - RNA, 1413 nt, Artificial Sequence
  derived and/or modified CDS sequence (opt2) from neuraminidase__InfluenzaA__AHL89849
augaaccccaaccagaagaucaucaccaucggcuccaucuccaucgccaucggcaucaucucccucaugcuccagaucggcaacaucaucuccaucugggccucccacuccauccagaccggcucccagaaccacaccggcaucugcaaccagcgcaucaucaccuacgagaacuccaccugggucaaccacaccuacgucuacaucaacaacaccaacgucgucgccggcaaggacaagaccuccgucacccucgccggcaacuccucccucugcuccaucuccggcugggccaucuacaccaaggacaacuccauccgcaucggcuccaagggcgacgucuucgucauccgcgagcccuucaucuccugcucccaccucgagugccgcaccuucuuccucacccagggcgcccuccucaacgacaagcacuccaacggcaccgucaaggaccgcucccccuaccgcgcccucauguccugcccccucggcgaggcccccucccccuacaacuccaaguucgaguccgucgccugguccgccuccgccugccacgacggcaugggcuggcucaccaucggcaucuccggccccgacaacggcgccgucgccguccucaaguacaacggcaucaucaccgagaccaucaaguccuggaagaagcgcauccuccgcacccaggaguccgagugcgucugcgucaacggcuccugcuucaccaucaugaccgacggccccuccaacggcgccgccuccuacaagaucuucaagaucgagaagggcauggucaccaaguccaucgagcucaacgcccccaacuuccacuacgaggagugcuccugcuaccccgacaccggcaccgucaugugcgucugccgcgacaacuggcacggcuccaaccgccccugggucuccuucaaccagaaccucgacuaccagaucggcuacaucugcuccggcgucuucggcgacaacccccgccccaaggacggcaagggcuccugcaaccccgucaccgucgacggcgccgacggcgucaagggcuucuccuacaaguacggcaacggcgucuggaucggccgcaccaaguccaaccgccuccgcaagggcuucgagaugaucugggaccccaacggcuggaccaacaccgacuccgacuucuccgucaagcaggacgucgucgccaucaccgacugguccggcuacuccggcuccuucguccagcaccccgagcucaccggccucgacugcauccgccccugcuucugggucgagcucguccgcggccucccccgcgagaacaccaccaucuggaccuccggcuccuccaucuccuucugcggcgucgacuccgacaccgccaacugguccuggcccgacggcgccgagcuccccuucaccaucgacaaguga

SEQ ID NO: 120612 - RNA, 1410 nt, Artificial Sequence; identical to SEQ ID NO: 112102
  derived and/or modified CDS sequence (opt2) from neuraminidase__InfluenzaA__AHL89861

SEQ ID NO: 120613 - RNA, 1410 nt, Artificial Sequence
  derived and/or modified CDS sequence (opt2) from neuraminidase__InfluenzaA__AHL89873
augaaccccaaccagaagaucaucaccaucggcuccgucucccucaccaucuccaccaucugcuucuucaugcagaccgccauccucaucaccaccgucacccuccacuucaagcaguacgaguucaacuccccccccaacaaccaggucaugcucugcgagcccaccaucaucgagcgcaacaucaccgagaucgucuaccucaccaacaccaccaucgagaaggagaucugccccaagcucgccgaguaccgcaacugguccaagccccagugcgacaucaccggcuucgcccccuucuccaaggacaacuccauccgccucuccgccggcggcgacaucugggucacccgcgagcccuacgucuccugcgaccccgacaagugcuaccaguucgcccucggccagggcaccacccucaacaacguccacuccaacgacaccguccgcgaccgcacccccuaccgcacccuccucaugaacgagcucggcguccccuuccaccucggcaccaagcaggucugcaucgccugguccuccuccuccugccacgacggcaaggccuggcuccacgucugcaucaccggcgacgacaagaacgccaccgccuccuucaucuacaacggccgccucgucgacuccaucgucuccugguccaaggagauccuccgcacccaggaguccgagugcgucugcaucaacggcaccugcaccgucgucaugaccgacggcuccgccuccggcaaggccgacaccaagauccucuucaucgaggagggcaagaucguccacaccuccacccucuccggcuccgcccagcacgucgaggagugcuccugcuacccccgcuaccccggcguccgcugcgucugccgcgacaacuggaagggcuccaaccgccccaucgucgacaucaacaucaaggaccacuccaucgucuccuccuacgucugcuccggccucgucggcgacaccccccgcaagaacgacuccuccuccuccucccacugccucgaccccaacaacgaggagggcggccacggcgucaagggcugggccuucgacgacggcaacgacgucuggaugggccgcaccaucuccgagaagucccgccucggcuacgagaccuucaaggucaucgagggcugguccaaccccaaguccaagcuccagaucaaccgccaggucaucgucgacggcggcaaccgcuccggcuacuccggcaucuucuccgucgagggcaaguccugcaucaaccgcugcuucuacgucgagcucauccgcggccgcaaggaggagaccgagguccucuggaccuccaacuccaucgucgucuucugcggcaccuccggcaccuacggcaccggcuccuggcccgacggcgccgacaucaaccucaugcccaucuga

SEQ ID NO: 120614 - RNA, 1410 nt, Artificial Sequence; identical to SEQ ID NO: 112779
  derived and/or modified CDS sequence (opt2) from neuraminidase__InfluenzaA__AHL89885

SEQ ID NO: 120615 - RNA, 1410 nt, Artificial Sequence
  derived and/or modified CDS sequence (opt2) from neuraminidase__InfluenzaA__AHL89897
augaaccccaaccagaagaucaucaccaucggcuccgucucccucaccaucuccaccaucugcuucuucaugcagaucgccauccucaucaccaccgucacccuccacuucaagcaguacgaguucaacuccccccccaacaaccaggucaugcucugcgagcccaccaucaucgagcgcaacaucaccgagaucgucuaccucaccaacaccaccaucgagaaggagaucugccccaagcucgccgaguaccgcaacugguccaagccccagugcgacaucaccggcuucgcccccuucuccaaggacaacuccauccgccucuccgccggcggcgacaucugggucacccgcgagcccuacgucuccugcgaccccgacaagugcuaccaguucgcccucggccagggcaccacccucaacaacguccacuccaacgacaccguccgcgaccgcacccccuaccgcacccuccucaugaacgagcucggcguccccuuccaccucggcaccaagcaggucugcaucgccugguccuccuccuccugccacgacggcaaggccuggcuccacgucugcaucaccggcgacgacaagaacgccaccgccuccuucaucuacaacggccgccucgucgacuccaucgucuccugguccaaggagauccuccgcacccaggaguccgagugcgucugcaucaacggcaccugcaccgucgucaugaccgacggcuccgccuccggcaaggccgacaccaagauccucuucaucgaggagggcaagaucguccacaccuccacccucuccggcuccgcccagcacgucgaggagugcuccugcuacccccgcuaccccggcguccgcugcgucugccgcgacaacuggaagggcuccaaccgccccaucgucgacaucaacaucaaggaccacuccaucgucuccuccuacgucugcuccggccucgucggcgacaccccccgcaagaacgacuccuccuccuccucccacugccucgaccccaacaacgaggagggcggccacggcgucaagggcugggccuucgacgacggcaacgacgucuggaugggccgcaccaucuccgagaagucccgccucggcuacgagaccuucaaggucaucgagggcugguccaaccccaaguccaagcuccagaccaaccgccaggucaucgucgaccgcggcaaccgcuccggcuacuccggcaucuucuccgucgagggcaaguccugcaucaaccgcugcuucuacgucgagcucauccgcggccgcaaggaggagaccgagguccucuggaccuccaacuccaucgucgucuucugcggcaccuccggcaccuacggcaccggcuccuggcccgacggcgccgacaucaaccucaugcccaucuga

SEQ ID NO: 120616 - RNA, 1410 nt, Artificial Sequence; identical to SEQ ID NO: 112438
  derived and/or modified CDS sequence (opt2) from neuraminidase__InfluenzaA__AHL89909

SEQ ID NO: 120617 - RNA, 1410 nt, Artificial Sequence; identical to SEQ ID NO: 112077
  derived and/or modified CDS sequence (opt2) from neuraminidase__InfluenzaA__AHL89921

SEQ ID NO: 120618 - RNA, 1410 nt, Artificial Sequence; identical to SEQ ID NO: 112438
  derived and/or modified CDS sequence (opt2) from neuraminidase__InfluenzaA__AHL89933

SEQ ID NO: 120619 - RNA, 1410 nt, Artificial Sequence; identical to SEQ ID NO: 112077
  derived and/or modified CDS sequence (opt2) from neuraminidase__InfluenzaA__AHL89945

SEQ ID NO: 120620 - RNA, 1410 nt, Artificial Sequence
  derived and/or modified CDS sequence (opt2) from neuraminidase__InfluenzaA__AHL89957
augaaccccaaccagaagaucaucaccaucggcuccgucucccucaccaucuccaccaucugcuucuucaugcagaucgccauccucaucaccaccgucacccuccacuucaagcaguacgaguucaacuccccccccaacaaccaggucaugcucugcgagcccaccaucaucgagcgcaacaucaccgagaucgucuaccucaccaacaccaccaucgagaaggagaucugccccaagcucgccgaguaccgcaacugguccaagccccagugcgacaucaccggcuucgcccccuucuccaaggacaacuccauccgccucuccgccggcggcgacaucugggucacccgcgagcccuacgucuccugcgaccccgacaagugcuaccaguucgcccucggccagggcaccacccucaacaacguccacuccaacgacaccguccgcgaccgcacccccuaccgcacccuccucaugaacgagcucggcguccccuuccaccucggcaccaagcaggucugcaucgccugguccuccuccuccugccacgacggcaaggccuggcuccacgucugcaucaccggcgacgacaagaacgccaccgccuccuucaucuacaacggccgccucgucgacuccaucgucuccugguccaaggagauccuccgcacccaggaguccgagugcgucugcaucaacggcaccugcaccgucgucaugaccgacggcuccgccuccggcaaggccgacaccaagauccucuucaucaaggagggcaagaucguccacaccuccacccucuccggcuccgcccagcacgucgaggagugcuccugcuacccccgcuaccccggcguccgcugcgucugccgcgacaacuggaagggcuccaaccgccccaucgucgacaucaacaucaaggaccacuccaucgucuccuccuacgucugcuccggccucgucggcgacaccccccgcaagaacgacuccuccuccuccucccacugccucgaccccaacaacgaggagggcggccacggcgucaagggcugggccuucgacgacggcaacgacgucuggaugggccgcaccaucuccgagaagucccgccucggcuacgagaccuucaaggucaucgagggcugguccaaccccaaguccaagcuccagaucaaccgccaggucaucgucgaccgcggcaaccgcuccggcuacuccggcaucuucuccgucgagggcaaguccugcaucaaccgcugcuucuacgucgagcucauccgcggccgcaaggaggagaccgagguccucuggaccuccaacuccaucgucgucuucugcggcaccuccggcaccuacggcaccggcuccuggcccgacggcgccgacaucaaccucaugcccaucuga

SEQ ID NO: 120621 - RNA, 1410 nt, Artificial Sequence; identical to SEQ ID NO: 111920
  derived and/or modified CDS sequence (opt2) from neuraminidase__InfluenzaA__AHL89969

SEQ ID NO: 120622 - RNA, 1410 nt, Artificial Sequence; identical to SEQ ID NO: 111920
  derived and/or modified CDS sequence (opt2) from neuraminidase__InfluenzaA__AHL89981

SEQ ID NO: 120623 - RNA, 1410 nt, Artificial Sequence
  derived and/or modified CDS sequence (opt2) from neuraminidase__InfluenzaA__AHL89993
augaaccccaaccagaagaucaucaccaucggcuccgucucccucuccaucuccaccaucugcuucuucaugcagaucgccauccucaucaccaccgucacccuccacuucaagcaguacgaguucaacuccccccccaacaaccaggucaugcucugcgagcccaccaucaucgagcgcaacaucaccgagaucgucuaccucaccaacaccaccaucgagaaggagaucugccccaagcucgccgaguaccgcaacugguccaagccccagugcgacaucaccggcuucgcccccuucuccaaggacaacuccauccgccucuccgccggcggcgacaucugggucacccgcgagcccuacgucuccugcgaccccgacaagugcuaccaguucgcccucggccagggcaccacccucaacaacguccacuccaacgacaccguccgcgaccgcacccccuaccgcacccuccucaugaacgagcucggcguccccuuccaccucggcaccaagcaggucugcaucgccugguccuccuccuccugccacgacggcaaggccuggcuccacgucugcaucaccggcgacgacaagaacgccaccgccuccuucaucuacaacggccgccucgucgacuccaucgucuccugguccaaggagauccuccgcacccaggaguccgagugcgucugcaucaacggcaccugcacccucgucaugaccgacggcuccgccuccggcaaggccgacaccaagauccucuucaucgaggagggcaagaucguccacaccuccacccucuccggcuccgcccagcacgucgaggagugcuccugcuacccccgcuaccccggcguccgcugcgucugccgcgacaacuggaagggcuccaaccgccccaucgucgacaucaacaucaaggaccacuccaucgucuccuccuacgucugcuccggccucgucggcgacaccccccgcaagaacgacuccuccuccuccucccacugccucgaccccaacaacgaggagggcggccacggcgucaagggcugggccuucgacgacggcaacgacgucuggaugggccgcaccaucuccgagaagucccgccucggcuacgagaccuucaaggucaucgagggcugguccaaccccaaguccaagcuccagaucaaccgccaggucaucgucgaccgcggcaaccgcuccggcuacuccggcaucuucuccgucgagggcaaguccugcaucaaccgcugcuucuacgucgagcucauccgcggccgcaaggaggagaccgagguccucuggaccuccaacuccaucgucgucuucugcggcaccuccggcaccuacggcaccggcuccuggcccgacggcgccgacaucaaccucaugcccaucuga

SEQ ID NO: 120624 - RNA, 1410 nt, Artificial Sequence
  derived and/or modified CDS sequence (opt2) from neuraminidase__InfluenzaA__AHL90005
augaaccccaaccagaagaucaucaccaucggcuccgucucccucaccaucuccaccaucugcuucuucaugcagaucgccauccucaucaccaccgucacccuccacuucaagcaguacgaguucuccuccccccccaacaaccaggucaugcucugcgagcccaccaucaucaagcgcaacaucaccgagaucgucuaccucaccaacaccaccaucgagaaggagaucugccccaagcucgccgaguaccgcaacugguccaagccccagugcgacaucaccggcuucgcccccuucuccaaggacaacuccauccgccucuccgccggcggcgacaucugggucacccgcgagcccuacgucuccugcgaccccgacaagugcuaccaguucgcccucggccagggcaccacccucaacaacguccacuccaacgacaccguccacgaccgcacccccuaccgcacccuccucaugaacgagcucggcguccccuuccaccucggcaccaagcaggucugcaucgccugguccuccuccuccugccacgacggcaaggccuggcuccacgucugcgucaccggcgacgacaagaacgccaccgccuccuucaucuacaacggccgccucgucgacuccaucgucuccugguccaaggagauccuccgcacccaggaguccgagugcgucugcaucaacggcaccugcaccgucgucaugaccgacggcuccgccuccggcaaggccgacaccaagauccucuucaucgaggagggcaagaucguccacaccuccacccucuccggcuccgcccagcacgucgaggagugcuccugcuacccccgcuaccccggcguccgcugcgucugccgcgacaacuggaagggcuccaaccgccccaucgucgacaucaacaucaaggacuacuccaucgucucccgcuacgucugcuccggccucgucggcgacaccccccgcaagaacgacuccuacuccuccucccacugccucgaccccaacaacgaggagggcggccacggcgucaagggcugggccuucgacgacggcaacgacgucuggaugggccgcaccaucuccgagaagucccgcuccggcuacgagaccuucaaggucaucgagggcugguccaaccccaacuccaagcuccagaucaaccgccaggucaucgucgaccgcggcaaccgcuccggcuacuccggcaucuucuccgucgagggcaaguccugcaucaaccgcugcuucuacgucgagcucauccgcggccgcaaggaggagaccgagguccucuggaccuccaacuccaucgucgucuucugcggcaccuccggcaccuacggcaccggcuccuggcccgacggcgccgacaucaaccucaugcccaucuga

SEQ ID NO: 120625 - RNA, 1410 nt, Artificial Sequence; identical to SEQ ID NO: 112126
  derived and/or modified CDS sequence (opt2) from neuraminidase__InfluenzaA__AHL90017

SEQ ID NO: 120626 - RNA, 1410 nt, Artificial Sequence; identical to SEQ ID NO: 112077
  derived and/or modified CDS sequence (opt2) from neuraminidase__InfluenzaA__AHL90029

SEQ ID NO: 120627 - RNA, 1410 nt, Artificial Sequence; identical to SEQ ID NO: 112093
  derived and/or modified CDS sequence (opt2) from neuraminidase__InfluenzaA__AHL90041

SEQ ID NO: 120628 - RNA, 1410 nt, Artificial Sequence; identical to SEQ ID NO: 112093
  derived and/or modified CDS sequence (opt2) from neuraminidase__InfluenzaA__AHL90053

SEQ ID NO: 120629 - RNA, 1410 nt, Artificial Sequence; identical to SEQ ID NO: 118358
  derived and/or modified CDS sequence (opt2) from neuraminidase__InfluenzaA__AHL90065

SEQ ID NO: 120630 - RNA, 1410 nt, Artificial Sequence; identical to SEQ ID NO: 120620
  derived and/or modified CDS sequence (opt2) from neuraminidase__InfluenzaA__AHL90077

SEQ ID NO: 120631 - RNA, 1410 nt, Artificial Sequence; identical to SEQ ID NO: 112102
  derived and/or modified CDS sequence (opt2) from neuraminidase__InfluenzaA__AHL90089

SEQ ID NO: 120632 - RNA, 1410 nt, Artificial Sequence; identical to SEQ ID NO: 112779
  derived and/or modified CDS sequence (opt2) from neuraminidase__InfluenzaA__AHL90101

SEQ ID NO: 120633 - RNA, 1410 nt, Artificial Sequence; identical to SEQ ID NO: 112077
  derived and/or modified CDS sequence (opt2) from neuraminidase__InfluenzaA__AHL90113

SEQ ID NO: 120634 - RNA, 1413 nt, Artificial Sequence; identical to SEQ ID NO: 112668
  derived and/or modified CDS sequence (opt2) from neuraminidase__InfluenzaA__AHL90125

SEQ ID NO: 120635 - RNA, 1413 nt, Artificial Sequence
  derived and/or modified CDS sequence (opt2) from neuraminidase__InfluenzaA__AHL90136
augaaccccaaccagaagaucaucaccaucggcuccaucuccaucgccaucggcaucaucucccucaugcuccagaucggcaacaucaucuccaucugggccucccacuccauccagaccggcucccagaacaacaccggcaucugcaaccagcgcaucaucaccuacgagaacuccaccugggucaaccacaccuacgucaacaucaacaacaccaacgucgucgccggcgaggacaagaccuccgucacccucgccggcaacuccucccucugcuccaucuccggcugggccaucuacaccaaggacaacuccauccgcaucggcuccaagggcgacgucuucgucauccgcgagcccuucaucuccugcucccaccucgagugccgcaccuucuuccucacccagggcgcccuccucaacgacaagcacuccaacggcaccgucaaggaccgcucccccuaccgcgcccucauguccugcccccucggcgaggcccccucccccuacaacuccaaguucgaguccgucgccugguccgccuccgccugccacgacggcaugggcuggcucaccaucggcaucuccggccccgacaacggcgccgucgccguccucaaguacaacggcaucaucaccggcaccaucaaguccuggaagaagcagauccuccgcacccaggaguccgagugcgucugcaugaacggcuccugcuucaccaucaugaccgacggccccuccaacaaggccgccuccuacaagaucuucaagaucgagaagggcaaggucaccaaguccaucgagcucaacgcccccaacuucuacuacgaggagugcuccugcuaccccgacuccggcauggucaugugcgucugccgcgacaacuggcacggcuccaaccgccccugggucuccuucaaccagaaccucgacuaccagaucggcuacaucugcuccggcgucuucggcgacaacccccgccccgaggacggcgagggcuccugcaaccccgucaccgucgacggcgccaacggcgucaagggcuucuccuacaaguacggcaacggcgucuggaucggccgcaccaaguccaaccgccuccgcaagggcuucgagaugaucugggaccccaacggcuggaccaacaccgacuccgacuucuccgucaagcaggacgucgucgccaucaccgacugguccggcuacuccggcuccuucguccagcaccccgagcucaccggccucgacugcauccgccccugcuucugggucgagcucguccgcggccucccccgcgagaacaccaccaucuggaccuccggcuccuccaucuccuucugcggcgucaacuccgacaccgccaacugguccuggcccgacggcgccgagcuccccuucaccaucgacaaguga

SEQ ID NO: 120636 - RNA, 1413 nt, Artificial Sequence; identical to SEQ ID NO: 112668
  derived and/or modified CDS sequence (opt2) from neuraminidase__InfluenzaA__AHL90160

SEQ ID NO: 120637 - RNA, 1413 nt, Artificial Sequence
  derived and/or modified CDS sequence (opt2) from neuraminidase__InfluenzaA__AHL90172
augaaccccaaccagaagaucaucaccaucggcuccaucuccaucgccaucggcaucaucucccucaugcuccagaucggcaacaucaucuccaucugggccucccacuccauccagaccggcucccagaacaacaccggcaucugcaaccagcgcaucaucaccuacgagaacuccaccugggucaaccacaccuacgucaacaucaacaacaccaacgucgucgccggcgaggacaagaccuccgucacccucgccggcaacuccucccucugcuccaucuccggcugggccaucuacaccaaggacaacuccauccgcaucggcuccaagggcgacgucuucgucauccgcgagcccuucaucuccugcucccaccucgagugccgcaccuucuuccucacccagggcgcccuccucaacgacaagcacuccaacggcaccgucaaggaccgcucccccuaccgcgcccucauguccugcccccucggcgaggcccccucccccuacaacuccaaguucgaguccgucgccugguccgccuccgccugccacgacggcaugggcuggcucaccaucggcaucuccggccccgacaacggcgccgucgccguccucaaguacaacggcaucaucaccggcaccaucaaguccuggaagaagcagauccuccgcacccaggaguccgagugcgucugcaugaacggcuccugcuucaccaucaugaccgacggccccuccaacaaggccgccuccuacaagaucuucaagaucgagaagggcaaggucaccaaguccaucgagcucaacgcccccaacuuccacuacgaggagugcuccugcuaccccgacaccggcaucgucaugugcgucugccgcgacaacuggcacggcuccaaccgccccugggucuccuucaaccagaaccucgacuaccagaucggcuacaucugcuccggcgucuucggcgacaacccccgccccgaggacggcgagggcaacugcaaccccgucaccgucgacggcgccaacggcgucaagggcuucuccuacaaguacggcaacggcgucuggaucggccgcaccaaguccaaccgccuccgcaagggcuucgagaugaucugggaccccaacggcuggaccaacaccgacuccgacuucuccgucaagcaggacgucgucgccaucaccgacugguccggcuacuccggcuccuucguccagcaccccgagcucaccggccucgacugcauccgccccugcuucugggucgagcucguccgcggccucccccgcgagaacaccaccaucuggaccuccggcuccuccaucuccuucugcggcgucaacuccgacaccgccaacugguccuggcccgacggcgccgagcuccccuucaccaucgacaaguga

SEQ ID NO: 120638 - RNA, 1413 nt, Artificial Sequence; identical to SEQ ID NO: 112668
  derived and/or modified CDS sequence (opt2) from neuraminidase__InfluenzaA__AHL90184

SEQ ID NO: 120639 - RNA, 1413 nt, Artificial Sequence; identical to SEQ ID NO: 115966
  derived and/or modified CDS sequence (opt2) from neuraminidase__InfluenzaA__AHL90196

SEQ ID NO: 120640 - RNA, 1413 nt, Artificial Sequence; identical to SEQ ID NO: 112668
  derived and/or modified CDS sequence (opt2) from neuraminidase__InfluenzaA__AHL90220

SEQ ID NO: 120641 - RNA, 1413 nt, Artificial Sequence
  derived and/or modified CDS sequence (opt2) from neuraminidase__InfluenzaA__AHL90232
augaaccccaaccagaagaucaucaccaucggcuccaucuccaucgccaucggcaucaucucccucaugcuccagaucggcaacaucaucuccaucugggccucccacuccauccagaccggcucccagaacaacaccggcaucugcaaccagcgcaucaucaccuacgagaacuccaccugggucaaccacaccuacgucaacaucaacaacaccaacgucgucgccggcgaggacaagaccuccgucacccucgccggcaacuccucccucugcuccaucuccggcugggccaucuacaccaaggacaacuccauccgcaucggcuccaagggcgacgucuucgucauccgcgagcccuucaucuccugcucccaccucgagugccgcaccuucuuccucacccagggcgcccuccucaacgacaagcacuccaacggcaccgucaaggaccgcucccccuaccgcgcccucauguccugcccccucggcgaggcccccucccccuacaacuccaaguucgaguccgucgccugguccgccuccgccugccacgacggcaugggcuggcucaccaucggcaucuccggccccgacaacggcgccgucgccguccucaaguacaacggcaucaucaccggcaccaucaaguccuggaagaagcagauccuccgcacccaggaguccgagugcgucugcaugaacggcuccugcuucaccaucaugaccgacggccccuccaacaaggccgccuccuacaagaucuucaagaucgagaagggcaaggucaccaaguccaucgagcucaacgcccccaacuuccacuacgaggagugcuccugcuaccccgacaccggcaucgucaugugcgucugccgcgacaacuggcacggcuccaaccgccccugggucuccuucaaccagaaccucgacuaccagaucggcuacaucugcuccggcgucuucggcgacaacccccgccccgaggacggcgagggcuccugcaaccccgucaccgucaacggcgccaacggcgucaagggcuucuccuacaaguacgacaacggcgucuggaucggccgcaccaaguccaaccgccuccgcaagggcuucgagaugaucugggaccccaacggcuggaccaacaccgacuccgacuucuccgucaagcaggacgucgucgccaucaccgacugguccggcuacuccggcuccuucguccagcaccccgagcucaccggccucgacugcauccgccccugcuucugggucgagcucguccgcggccucccccgcgagaacaccaccaucuggaccuccggcuccuccaucuccuucugcggcgucaacuccgacaccgccaacugguccuggcccgacggcgccgagcuccccuucaccaucgacaaguga

SEQ ID NO: 120642 - RNA, 1413 nt, Artificial Sequence
  derived and/or modified CDS sequence (opt2) from neuraminidase__InfluenzaA__AHL90244
augaaccccaaccagaagaucaucaccaucggcuccaucuccaucgccaucggcaucaucucccucaugcuccagaucggcaacaucaucuccaucugggccucccacuccauccagaccggcucccagaacaacaccggcaucugcaaccagcgcaucaucaccuacgagaacuccaccugggucaaccacaccuacgucaacaucaacaacaccaacgucgucgccggcgaggacaagaccuccgucacccucgccggcaacuccucccucugcuccaucuccggcugggccaucuacaccaaggacaacuccauccgcaucggcuccaagggcgacgucuucgucauccgcgagcccuucaucuccugcucccaccucgagugccgcaccuucuuccucacccagggcgcccuccucaacgacaagcacuccaacggcaccgucaaggaccgcucccccuaccgcgcccucauguccugcccccucggcgaggcccccucccccuacaacuccaaguucgaguccgucgccugguccgccuccgccugccacgacggcaugggcuggcucaccaucggcaucuccggccccgacaacggcgccgucgccguccucaaguacaacggcaucaucaccggcaccaucaaguccuggaagaagcagauccuccgcacccaggaguccgagugcgucugcaugaacggcuccugcuucaccaucaugaccgacggccccuccaacaaggccgccuccuacaagaucuucaagaucgagaagggcaaggucaccaaguccaucgagcucaacgcccccaacuuccacuacgaggagugcuccugcuaccccgacaccggcaucgucaugugcgucugccgcgacaacuggcacggcuccaaccgccccugggucuccuucaaccagaaccucgacuaccagaucggcuacaucugcuccggcgucuucggcgacaacccccgccccgaggacggcgagggcuccugcaaccccaugaccgucgacggcgccaacggcgucaagggcuucuccuacaaguacgacaacggcgucuggaucggccgcaccaaguccaaccgccuccgcaagggcuucgagaugaucugggaccccaacggcuggaccaacaccgacuccgacuucuccgucaagcaggacgucgucgccaucaccgacugguccggcuacuccggcuccuucguccagcaccccgagcucaccggccucgacugcauccgccccugcuucugggucgagcucguccgcggccucccccgcgagaacaccaccaucuggaccuccggcuccuccaucuccuucugcggcgucaacuccgacaccgccuccugguccuggcccgacggcgccgagcuccccuucaccaucgacaaguga

SEQ ID NO: 120643 - RNA, 1413 nt, Artificial Sequence; identical to SEQ ID NO: 113497
  derived and/or modified CDS sequence (opt2) from neuraminidase__InfluenzaA__AHL90256

SEQ ID NO: 120644 - RNA, 1413 nt, Artificial Sequence
  derived and/or modified CDS sequence (opt2) from neuraminidase__InfluenzaA__AHL90268
augaaccccaaccagaagaucaucaccaucggcuccaucuccaucgccaucggcaucaucucccucaugcuccagaucggcaacaucaucuccaucugggccucccacuccauccagaccggcucccagaacaacaccggcaucugcaaccagcgcaucaucaccuacgagaacuccaccugggucaaccacaccuacgucaacaucaacaacaccaacgucgucgccggcgaggacaagaccuccgucacccucgccggcaacuccucccucugcuccaucuccggcugggccaucuacaccaaggacaacuccauccgcaucggcuccaagggcgacgucuucgucauccgcgagcccuucaucuccugcucccaccucgagugccgcaccuucuuccucacccagggcgcccuccucaacgacaagcacuccaacggcaccgucaaggaccgcucccccuaccgcgcccucauguccugcccccucggcgaggcccccucccccuacaacuccaaguucgaguccgucgccugguccgccuccgccugccacgacggcaugggcuggcucaccaucggcaucuccggccccgacaacggcgccgucgccguccucaaguacaacggcaucaucaccggcaccaucaaguccuggaagaagcagauccuccgcacccaggaguccgagugcgucugcaugaacggcuccugcuucaccaucaugaccgacggccccuccaacaaggccgccuccuacaagaucuucaagaucgagaagggcaaggucaccaaguccaucgagcucaacgcccccaacuuccacuacgaggagugcuccugcuaccccgacaccuccaucgucaugugcgucugccgcgacaacuggcacggcuccaaccgccccugggucuccuucaaccagaaccucgacuaccagaucggcuacaucugcuccggcgucuucggcgacaacccccgccccgaggacggcgagggcuccugcaaccccgucaccgucgacggcgccaacggcgucaagggcuucuccuacaaguacgacaacggcgucuggaucggccgcaccaaguccaaccgccuccgcaagggcuucgagaugaucugggaccccaacggcuggaccaacaccgaccgcgacuucuccgucaagcaggacgucgucgccaucaccgacugguccggcuacuccggcuccuucguccagcaccccgagcucaccggccucgacugcauccgccccugcuucugggucgagcucguccgcggccucccccgcgagaacaccaccaucuggaccuccggcuccuccaucuccuucugcggcgucaacuccgacaccgccaacugguccuggcccgacggcgccgagcuccccuucaccaucgacaaguga

SEQ ID NO: 120645 - RNA, 1413 nt, Artificial Sequence; identical to SEQ ID NO: 113497
  derived and/or modified CDS sequence (opt2) from neuraminidase__InfluenzaA__AHL90280

SEQ ID NO: 120646 - RNA, 1413 nt, Artificial Sequence
  derived and/or modified CDS sequence (opt2) from neuraminidase__InfluenzaA__AHL90304
augaaccccaaccagaagaucaucaccaucggcuccaucuccaucgccaucggcaucaucucccucaugcuccagaucggcaacaucaucuccaucugggccucccacuccauccagaccggcucccagaacaacaccgagaucugcaaccagcgcaucaucaccuacgagaacuccaccugggucaaccacaccuacgucaacaucaacaacaccaacgucgucgccggcgaggacaagaccuccgucacccucgccggcaacuccucccucugcuccaucuccggcugggccaucuacaccaaggacaacuccauccgcaucggcuccaagggcgacgucuucgucauccgcgagcccuucaucuccugcucccaccucgagugccgcaccuucuuccucacccagggcgcccuccucaacgacaagcacuccaacggcaccgucaaggaccgcucccccuaccgcgcccucauguccugcccccucggcgaggcccccucccccuacaacuccaaguucgaguccgucgccugguccgccuccgccugccacgacggcaugggcuggcucaccaucggcaucuccggccccgacaacggcgccgucgccguccucaaguacaacggcaucaucaccggcaccaucaaguccuggaagaagcagauccuccgcacccaggaguccgagugcgucugcaugaacggcuccugcuucaccaucaugaccgacggccccuccaacaaggccgccuccuacaagaucuucaagaucgagaagggcaaggucaccaaguccaucgagcucaacgcccccaacuuccacuacgaggagugcuccugcuaccccgacaccggcaucgucaugugcgucugccgcgacaacuggcacggcuccaaccgccccugggucuccuucaaccagaaccucgacuaccagaucggcuacaucugcuccggcgucuucggcgacaacccccgccccgaggacggcgagggcuccugcaaccccgucaccgucgacggcgccaacggcgucaagggcuucuccuacaaguacgacaacggcgucuggaucggccgcaccaaguccaaccgccuccgcaagggcuucgagaugaucugggaccccaacggcuggaccaacaccgacuccgacuucuccgucaagcaggacgucgucgccaucaccgacugguccggcuacuccggcuccuucguccagcaccccgagcucaccggccucgacugcauccgccccugcuucugggucgagcucguccgcggccucccccgcgagaacaccaccaucuggaccuccggcuccuccaucuccuucugcggcgucaacuccgacaccgccaacugguccuggcccgacggcgccgagcuccccuucaccaucgacaaguga

SEQ ID NO: 120647 - RNA, 1413 nt, Artificial Sequence; identical to SEQ ID NO: 112668
  derived and/or modified CDS sequence (opt2) from neuraminidase__InfluenzaA__AHL90316

SEQ ID NO: 120648 - RNA, 1413 nt, Artificial Sequence
  derived and/or modified CDS sequence (opt2) from neuraminidase__InfluenzaA__AHL90328
augaaccccaacaagaagaucaucaccaucggcuccaucuccaucgccaucggcaucaucucccucaugcuccagaucggcaacaucaucuccaucugggccucccacuccauccagaccggcucccagaacaacaccggcaucugcaaccagcgcaucaucaccuacgagaacuccaccugggucaaccacaccuacgucaacaucaacaacaccaacgucgucgccggcgaggacaagaccuccgucacccucgccggcaacuccucccucugcuccaucuccggcugggccaucuacaccaaggacaacuccauccgcaucggcuccaagggcgacgucuucgucauccgcgagcccuucaucuccugcucccaccucgagugccgcaccuucuuccucacccagggcgcccuccucaacgacaagcacuccaacggcaccgucaaggaccgcucccccuaccgcgcccucauguccugcccccucggcgaggcccccucccccuacaacuccaaguucgaguccgucgccugguccgccuccgccugccacgacggcaugggcuggcucaccaucggcaucuccggccccgacaacggcgccgucgccguccucaaguacaacggcaucaucaccggcaccaucaaguccuggaagaagcagauccuccgcacccaggaguccgagugcgucugcaugaacggcuccugcuucaccaucaugaccgacggccccuccaacaaggccgccuccuacaagaucuucaagaucgagaagggcaaggucaccaaguccaucgagcucaacgcccccaacuuccacuacgaggagugcuccugcuaccccgacaccggcaucgucaugugcgucugccgcgacaacuggcacggcuccaaccgccccugggucuccuucaaccagaaccucgacuaccagaucggcuacaucugcuccggcgucuucggcgacaacccccgccccgaggacggcgagggcuccugcaaccccgucaccgucgacggcgccaacggcgucaagggcuucuccuacaaguacgacaacggcgucuggaucggccgcaccaaguccaaccgccuccgcaagggcuucgagaugaucugggaccccaacggcuggaccaacaccgacuccgacuucuccgucaagcaggacgucgucgccgucaccgacugguccggcuacuccggcuccuucguccagcaccccgagcucaccggccucgacugcauccgccccugcuucugggucgagcucguccgcggccucccccgcgagaacaccaccaucuggaccuccggcuccuccaucuccuucugcggcgucaacuccgacaccgccaacugguccuggcccgacggcgccgagcuccccuucaccaucgacaaguga

SEQ ID NO: 120649 - RNA, 1413 nt, Artificial Sequence; identical to SEQ ID NO: 112668
  derived and/or modified CDS sequence (opt2) from neuraminidase__InfluenzaA__AHL90340

SEQ ID NO: 120650 - RNA, 1413 nt, Artificial Sequence
  derived and/or modified CDS sequence (opt2) from neuraminidase__InfluenzaA__AHL90352
augaaccccaaccagaagaucaugaccaucggcuccaucuccaucgccaucggcaucaucucccucaugcuccagaucggcaacaucaucuccaucugggccucccacuccauccagaccggcucccagaacaacaccggcaucugcaaccagcgcaucaucaccuacgagaacuccaccugggucaaccacaccuacgucaacaucaacaacaccaacgucgucgccggcgaggacaagaccuccgucacccucgccggcaacuccucccucugcuccaucuccggcugggccaucuacaccaaggacaacuccauccgcaucggcuccaagggcgacgucuucgucauccgcgagcccuucaucuccugcucccaccucgagugccgcaccuucuuccucacccagggcgcccuccucaacgacaagcacuccaacggcaccgucaaggaccgcucccccuaccgcgcccucauguccugcccccucggcgaggcccccucccccuacaacuccaaguucgaguccgucgccugguccgccuccgccugccacgacggcaugggcuggcucaccaucggcaucuccggccccgacaacggcgccgucgccguccucaaguacaacggcaucaucaccggcaccaucaaguccuggaagaagcagauccuccgcacccaggaguccgagugcgucugcaugaacggcuccugcuucaccaucaugaccgacggccccuccaacaaggccgccuccuacaagaucuucaagaucgagaagggcaaggucaccaaguccaucgagcucaacgcccccaacuuccacuacgaggagugcuccugcuaccccgacaccggcaucgucaugugcgucugccgcgacaacuggcacggcuccaaccgccccugggucuccuucaaccagaaccucgacuaccagaucggcuacaucugcuccggcgucuucggcgacaacccccgccccgaggacggcgagggcuccugcucccccgucaccgucgacggcgccaacggcgucaagggcuucuccuacaaguacgacaacggcgucuggaucggccgcaccaaguccaaccgccuccgcaagggcuucgagaugaucugggaccccaacggcuggaccaacaccgacuccgacuucuccgucaagcaggacgucgucgccaucaccgacugguccggcuacuccggcuccuucguccagcaccccgagcucaccggccucgacugcauccgccccugcuucugggucgagcucguccgcggcaugccccgcgagaacaccaccaucuggaccuccggcuccuccaucuccuucugcggcgucaacuccgacaccgccaacugguccuggcccgacggcgccgagcuccccuucaccaucgacaaguga

SEQ ID NO: 120651 - RNA, 1413 nt, Artificial Sequence; identical to SEQ ID NO: 119497
  derived and/or modified CDS sequence (opt2) from neuraminidase__InfluenzaA__AHL90364

SEQ ID NO: 120652 - RNA, 1413 nt, Artificial Sequence; identical to SEQ ID NO: 113497
  derived and/or modified CDS sequence (opt2) from neuraminidase__InfluenzaA__AHL90376

SEQ ID NO: 120653 - RNA, 1410 nt, Artificial Sequence
  derived and/or modified CDS sequence (opt2) from neuraminidase__InfluenzaA__AHL90388
augaaccccaaccagaagaucaucaccaucggcuccgucucccucaucaucuccaccaucugcuucuucaugcagaucgccauccucaucaccaccgucacccuccacuucaagcaguacgaguucaacuccucccccaacaaccaggucaugcucugcgagcccaccaucaucgagcgcaacaucaccgagaucgucuaccucaccaacaccaucaucgagaaggagaucugccccaagcucgccgaguaccgcaacugguccaagccccagugcgacaucaccggcuucgcccccuucuccaaggacaacuccauccgccucuccgccggcggcgacaucugggucacccgcgagcccuacgucuccugcgaccccgacaagugcuaccaguucgcccucggccagggcaccacccucaacaacguccacuccaacaacaccguccgcgaccgcacccccuaccgcacccuccucaugaacgagcucggcguccccuuccaccucggcaccaagcaggucugcaucgccugguccuccuccuccugccacgacggcaaggccuggcuccacgucugcaucaccggcgacgacaagaacgccaccgccuccuucaucuacaacggccgccucgucgacuccaucgucuccugguccaaggagauccuccgcacccaggaguccgagugcgucugcaucaacggcaccugcaccgucgucaugaccgacggcuccgccuccggcaaggccgacaccaagauccucuucaucgaggagggcaagaucguccacaccuccacccucuccggcuccgcccagcacgucgaggagugcuccugcuacccccgcuaccccggcguccgcugcgucugccgcgacaacuggaagggcuccaaccgccccaucgucgacaucaacaucaaggaccacuccaucgucuccuccuacgucugcuccggccucgucggcgacaccccccgcaagaacgacuccuccuccuccucccacugccucgaccccaacaacgaggagggcggccacggcgucaagggcugggccuucgacgacggcaacgacgucuggaugggccgcaccaucuccgagaagucccgccucggcuacgagaccuucaaggucaucgagggcugguccaaccccaaguccaagcuccagaucaaccgccaggucaucgucgaccgcggcaaccgcuccggcuacuccggcaucuucuccgucgagggcaaguccugcaucaaccgcugcuucuacgucgagcucauccgcggccgcaaggaggagaccgagguccucuggaccuccaacuccaucgucgucuucugcggcaccuccggcaccuacggcaccggcuccuggcccgacggcgccgacaucaaccucaugcccaucuga

SEQ ID NO: 120654 - RNA, 1410 nt, Artificial Sequence; identical to SEQ ID NO: 112548
  derived and/or modified CDS sequence (opt2) from neuraminidase__InfluenzaA__AHL90400

SEQ ID NO: 120655 - RNA, 1410 nt, Artificial Sequence; identical to SEQ ID NO: 112548
  derived and/or modified CDS sequence (opt2) from neuraminidase__InfluenzaA__AHL90413

SEQ ID NO: 120656 - RNA, 1410 nt, Artificial Sequence
  derived and/or modified CDS sequence (opt2) from neuraminidase__InfluenzaA__AHL90425
augaaccccaaccagaagaucaucaccaucggcuccgucucccucaccaucuccaccaucugcuucuucaugcagaccgccauccucaucaccaccgucacccuccacuucaagcaguacgaguucaacuccccccccaacaaccaggucaugcucugcgagcccaccaucaucgagcgcaacaucaccgagaucgucuaccucaccaacaccaccaucgagaaggagaucugccccaagcucgccgaguaccgcaacugguccaagccccagugcgacaucaccggcuucgcccccuucuccaaggacaacuccauccgccucuccgccggcggcgacaucugggucacccgcgagcccuacgucuccugcgaccccgacaagugcuaccaguucgcccucggccagggcaccacccucaacaacguccacuccaacgacaccguccacgaccgcacccccuaccgcacccuccucaugaacgagcucggcguccccuuccaccucggcaccaagcaggucugcaucgccugguccuccuccuccugccacgacggcaaggccuggcuccacgucugcaucaccggcgacgacaagaacgccaccgccuccuucaucuacaacggccgccucgucgacuccaucgucuccugguccaaggagauccuccgcacccaggaguccgagugcgucugcaucaacggcaccugcaccgucgucaugaccgacggcuccgccuccggcaaggccgacaccaagauccucuucaucgaggagggcaagaucguccacaccuccacccucuccggcuccgcccagcacgucgaggagugcuccugcuacccccgcuaccccggcguccgcugcgucugccgcgacaacuggaagggcuccaaccgccccaucgucgacaucaacaucaaggaccacuccaucgucuccuccuacgucugcuccggccucgucggcgacaccccccgcaagaacgacuccuccuccuccucccacugccucgaccccaacaacgaggagggcggccacggcgucaagggcugggccuucgacgacggcaacgacgucuggaugggccgcaccaucuccgagaagucccgccucggcuacgagaccuucaaggucaucgagggcugguccaaccccaaguccaagcuccagaucaaccgccaggucaucgucgaccgcggcgaccgcuccggcuacuccggcaucuucuccgucgagggcaaguccugcaucaaccgcugcuucuacgucgagcucauccgcggccgcaaggaggagaccgagguccucuggaccuccaacuccaucgucgucuucugcggcaccuccggcaccuacggcaccggcuccuggcccgacggcgccgacaucaaccucaugcccaucuga

SEQ ID NO: 120657 - RNA, 1410 nt, Artificial Sequence; identical to SEQ ID NO: 112635
  derived and/or modified CDS sequence (opt2) from neuraminidase__InfluenzaA__AHL90437

SEQ ID NO: 120658 - RNA, 1410 nt, Artificial Sequence; identical to SEQ ID NO: 112548
  derived and/or modified CDS sequence (opt2) from neuraminidase__InfluenzaA__AHL90449

SEQ ID NO: 120659 - RNA, 1410 nt, Artificial Sequence; identical to SEQ ID NO: 112548
  derived and/or modified CDS sequence (opt2) from neuraminidase__InfluenzaA__AHL90461

SEQ ID NO: 120660 - RNA, 1410 nt, Artificial Sequence; identical to SEQ ID NO: 112548
  derived and/or modified CDS sequence (opt2) from neuraminidase__InfluenzaA__AHL90473

SEQ ID NO: 120661 - RNA, 1410 nt, Artificial Sequence; identical to SEQ ID NO: 112548
  derived and/or modified CDS sequence (opt2) from neuraminidase__InfluenzaA__AHL90485

SEQ ID NO: 120662 - RNA, 1410 nt, Artificial Sequence; identical to SEQ ID NO: 112639
  derived and/or modified CDS sequence (opt2) from neuraminidase__InfluenzaA__AHL90497

SEQ ID NO: 120663 - RNA, 1410 nt, Artificial Sequence; identical to SEQ ID NO: 112639
  derived and/or modified CDS sequence (opt2) from neuraminidase__InfluenzaA__AHL90509

SEQ ID NO: 120664 - RNA, 1410 nt, Artificial Sequence
  derived and/or modified CDS sequence (opt2) from neuraminidase__InfluenzaA__AHL90521
augaaccccaaccagaagaucaucaccaucggcuccgucucccucaccaucuccaccaucugcuucuuccuccagaucgccauccucaucaccaccgucacccuccacuucaagcaguacgaguucaacuccccccccaacaaccaggucaugcucugcgagcccaccaucaucgagcgcaacaucaccgagaucgucuaccucaccaacaccaccaucgagaaggagaucugccccaagcucgccgaguaccgcaacugguccaagccccagugcgacaucaccggcuucgcccccuucuccaaggacaacuccauccgccucuccgccggcggcgacaucugggucacccgcgagcccuacgucuccugcgaccccgacaagugcuaccaguucgcccucggccagggcaccacccucaacaacguccacuccaacaacaccguccgcgaccgcacccccuaccgcacccuccucaugaacgagcucggcguccccuuccaccucggcaccaagcaggucugcaucgccugguccuccuccuccugccacgacggcaaggccuggcuccacgucugcaucaccggcgacgacaagaacgccaccgccuccuucaucuacaacggccgccucgucgacuccaucgucuccugguccaaggagauccuccgcacccaggaguccgagugcgucugcaucaacggcaccugcaccgucgucaugaccgacggcuccgccuccggcaaggccgacaccaagauccucuucaucgaggagggcaagaucguccacaccuccacccucuccggcuccgcccagcacgucgaggagugcuccugcuacccccgcuaccccggcguccgcugcgucugccgcgacaacuggaagggcuccaaccgccccaucgucgacaucaacaucaaggaccacuccaucgucuccuccuacgucugcuccggccucgucggcgacaccccccgcaagaacgacuccuccuccuccucccacugccucgaccccaacaacgaggagggcggccacggcgucaagggcugggccuucgacgacggcaacgacgucuggaugggccgcaccaucuccgagaagucccgccucggcuacgagaccuucaaggucaucgagggcugguccaaccccaaguccaagcuccagaucaaccgccaggucaucgucgaccgcggcaaccgcuccggcuacuccggcaucuucuccgucgagggcaaguccugcaucaaccgcugcuucuacgucgagcucauccgcggccgcaaggaggagaccgagguccucuggaccuccaacuccaucgucgucuucugcggcaccuccggcaccuacggcaccggcuccuggcccgacggcgccgacaucaaccucaugcccaucuga

SEQ ID NO: 120665 - RNA, 1410 nt, Artificial Sequence
  derived and/or modified CDS sequence (opt2) from neuraminidase__InfluenzaA__AHL90533
augaaccccaaccagaagaucaucaccaucggcuccgucucccucaccaucuccaccaucugcuucuucaugcagaccgccauccucaucaccaccgucacccuccacuucaagcaguacgaguucaacuccccccccaacaaccaggucaugcucugcgagcccaccaucaucgagcgcaacaucaccgagaucgucuaccucaccaacaccaccaucgagaaggagaucugccccaagcucgccgaguaccgcaacugguccaagccccagugcgacaucaccggcuucgcccccuucuccaaggacaacuccauccgccucuccgccggcggcgacaucugggucacccgcgagcccuacgucuccugcgaccccgacaagugcuaccaguucgcccucggccagggcaccacccucaacaacguccacuccaacgacaccguccgcgaccgcacccccuaccgcacccuccucaugaacgagcucggcguccccuuccaccucggcaccaagcaggucugcaucgccugguccuccuccuccugccacgacggcaaggccuggcuccacgucugcaucaccggcgacgacaagaacgccaccgccuccuucaucuacaacggccgccucgucgacuccaucgucuccugguccaaggagauccuccgcacccaggaguccgagugcgucugcaucaacggcaccugcaccgucgucaugaccgacggcuccgccuccggcaaggccgacaccaagauccucuucaucgaggagggcaagaucguccacaccuccacccucuccggcuccgcccagcacgucgaggagugcuccugcuacccccgcuaccccggcguccgcugcgucugccgcgacaacuggaagggcuccaaccgccccaucgucgacaucaacaucaaggaccacuccaucgucuccuccuacgucugcuccggccucgucggcgacaccccccgcaagaacgacuccuccuccuccucccacugccucgaccccaacaacgaggagggcggccacggcgucaagggcugggccuucgacgacggcaacgacgucuggaugggccgcaccaucuccgagaagucccgccucggcuacgagaccuucaaggucaucgagggcugguccaaccccaaguccaagcuccagaucaaccgccaggucaucgucgagcgcggcgaccgcuccggcuacuccggcaucuucuccgucgagggcaaguccugcaucaaccgcugcuucuacgucgagcucauccgcggccgcaaggaggagaccgagguccucuggaccuccaacuccaucgucgucuucugcggcaccuccggcaccuacggcaccggcuccuggcccgacggcgccgacaucaaccucaugcccaucuga

SEQ ID NO: 120666 - RNA, 1410 nt, Artificial Sequence; identical to SEQ ID NO: 112548
  derived and/or modified CDS sequence (opt2) from neuraminidase__InfluenzaA__AHL90545

SEQ ID NO: 120667 - RNA, 1410 nt, Artificial Sequence; identical to SEQ ID NO: 112635
  derived and/or modified CDS sequence (opt2) from neuraminidase__InfluenzaA__AHL90557

SEQ ID NO: 120668 - RNA, 1410 nt, Artificial Sequence
  derived and/or modified CDS sequence (opt2) from neuraminidase__InfluenzaA__AHL90569
augaaccccaaccagaagaucaucaccaucggcuccgucucccucaccaucuccaccaucugcuucuucaugcagaucgccauccucaucaccaccgucacccuccacuucaagcaguacgaguucaacuccccccccaacaaccaggucaugcucugcgagcccaccaucaucgagcgcaacaucaccgagaucgucuaccucaccaacaccaccaucgagaaggagaucugccccaagcucgccgaguaccgcaacugguccaagccccagugcgacaucaagggcuucgcccccuucuccaaggacaacuccauccgccucuccgccggcggcgacaucugggucacccgcgagcccuacgucuccugcgaccccgacaagugcuaccaguucgcccucggccagggcaccacccucaacaacguccacuccaacaacaccguccgcgaccgcacccccuaccgcacccuccucaugaacgagcucggcguccccuuccaccucggcaccaagcaggucugcaucgccugguccuccuccuccugccacgacggcaaggccuggcuccacgucugcaucaccggcgacgacaagaacgccaccgccuccuucaucuacaacggccgccucgucgacuccgucgucuccugguccaaggagauccuccgcacccaggaguccgagugcgucugcaucaacggcaccugcaccgucgucaugaccgacggcuccgccuccggcaaggccgacaccaagauccucuucaucgaggagggcaagaucguccacaccuccacccucuccggcuccgcccagcacgucgaggagugcuccugcuacccccgcuaccccggcguccgcugcgucugccgcgacaacuggaagggcuccaaccgccccaucgucgacaucaacaucaaggaccacuccaucgucuccuccuacgucugcuccggccucgucggcgacaccccccgcaagaacgacuccuccuccuccucccacugccucgaccccaacaacgaggagggcggccacggcgucaagggcugggccuucgacgacggcaacgacgucuggaugggccgcaccaucuccgagaagucccgccucggcuacgagaccuucaaggucaucgagggcugguccaaccccaaguccaagcuccagaucaaccgccaggucaucgucgaccgcggcaaccgcuccggcuacuccggcaucuucuccgucgagggcaaguccugcaucaaccgcugcuucuacgucgagcucauccgcggccgcaaggaggagaccgagguccucuggaccuccaacuccaucgucgucuucugcggcaccuccggcaccuacggcaccggcuccuggcccgacggcgccgacaucaaccucaugcccaucuga

SEQ ID NO: 120669 - RNA, 1410 nt, Artificial Sequence; identical to SEQ ID NO: 112635
  derived and/or modified CDS sequence (opt2) from neuraminidase__InfluenzaA__AHL90581

SEQ ID NO: 120670 - RNA, 1410 nt, Artificial Sequence; identical to SEQ ID NO: 112639
  derived and/or modified CDS sequence (opt2) from neuraminidase__InfluenzaA__AHL90593

SEQ ID NO: 120671 - RNA, 1410 nt, Artificial Sequence
  derived and/or modified CDS sequence (opt2) from neuraminidase__InfluenzaA__AHL90605
augaaccccaaccagaagaucaucaccaucggcuccgucucccucaccaucuccaccaucugcuucuucaugcagaucgccauccucaucaccaccgucacccuccacuucaagcaguacgaguucaacuccccccccaacaaccaggucaugcucugcgagcccaccaucaucgagcgcaacaucaccgagaucgucuaccucaccaacaccaccaucgagaaggagaucugccccaagcucgccgaguaccgcaacugguccaagccccagugcgacaucaccggcuucgcccccuucuccaaggacaacuccauccgccucuccgccggcggcgacaucugggucacccgcgagcccuacgucuccugcgaccccgacaagugcuaccaguucgcccucggccagggcaccacccucaacaacguccacuccaacaacaccguccgcgaccgcacccccuaccgcacccuccucaugaacgagcucggcguccccuuccaccucggcaccaagcaggucugcaucgccugguccuccuccuccugccacgacggcaaggccuggcuccacgucugcaucaccggcgacgacaagaacgccaccgccuccuucaucuacaacggccgccucgucgacuccgucgucuccugguccaaggagauccuccgcacccaggaguccgagugcgucugcaucaacggcaccugcaccgucgucaugaccgacggcuccgccuccggcaaggccgacaccaagauccucuucaucgaggagggcaagaucguccacaccuccacccucuccggcuccgcccagcacgucgaggagugcuccugcuacccccgcuaccccggcguccgcugcgucugccgcgacaacuggaagggcuccaaccgccccaucgucgacaucaacaucaaggaccacuccaucgucuccuccuacgucugcuccggccucgucggcgacaccccccgcaagaacgacuccuccuccuccucccacugccucgaccccaacaacgaggagggcggccacggcgucaagggcugggccuucgacgacggcaacgacgucuggaugggccgcaccaucuccgagaagucccgccucggcuacgagaccuucaaggucaucgagggcugguccaaccccaaguccaagcuccagaucaaccgccaggucaucgucgaccgcggcaaccgcuccggcuacuccggcaucuucuccgucgagggcaaguccugcaucaaccgcugcuucuacgucgagcucauccgcggccgcaaggaggagaccgagguccucuggaccuccaacuccaucgucgucuucugcggcaccuccggcaccuacggcaccggcuccuggcccgacggcgccaacaucaaccucaugcccaucuga

SEQ ID NO: 120672 - RNA, 1410 nt, Artificial Sequence; identical to SEQ ID NO: 112635
  derived and/or modified CDS sequence (opt2) from neuraminidase__InfluenzaA__AHL90629

SEQ ID NO: 120673 - RNA, 1410 nt, Artificial Sequence; identical to SEQ ID NO: 112635
  derived and/or modified CDS sequence (opt2) from neuraminidase__InfluenzaA__AHL90641

SEQ ID NO: 120674 - RNA, 1410 nt, Artificial Sequence; identical to SEQ ID NO: 112548
  derived and/or modified CDS sequence (opt2) from neuraminidase__InfluenzaA__AHL90653

SEQ ID NO: 120675 - RNA, 1410 nt, Artificial Sequence; identical to SEQ ID NO: 112635
  derived and/or modified CDS sequence (opt2) from neuraminidase__InfluenzaA__AHL90665

SEQ ID NO: 120676 - RNA, 1410 nt, Artificial Sequence
  derived and/or modified CDS sequence (opt2) from neuraminidase__InfluenzaA__AHL90677
augaaccccaaccagaagaucaucaccaucggcuccgucucccucaccaucuccaccaucugcuucuucaugcagaccgccauccucaucaccaccgucacccuccacuucaagcaguacgaguucaacuccccccccaacaaccaggucaugcucugcgagcccaccaucaucgagcgcaacaucaccgagaucgucuaccucaccaacaccaccaucgagaaggagaucugccccaagcucgccgaguaccgcaacugguccaagccccagugcgacaucaccggcuucgcccccuucuccaaggacaacuccauccgccucuccgccggcggcgacaucugggucacccgcgagcccuacgucuccugcgaccccgacaagugcuaccaguucgcccucggccagggcaccacccucaacaacguccacuccaacaacaccguccgcgaccgcacccccuaccgcacccuccucaugaacgagcucggcguccccuuccaccucggcaccaagcaggucugcaucgccugguccuccuccuccugccacgacggcaaggccuggcuccacgucugcaucaccggcgacgacaagaacgccaccgccuccuucaucuacaacggcaagcucgucgacuccaucgucuccugguccaaggagauccuccgcacccaggaguccgagugcgucugcaucaacggcaccugcaccgucgucaugaccgacggcuccgccuccggcaaggccgacaccaagauccucuucaucgaggagggcaagaucguccacaccuccacccucuccggcuccgcccagcacgucgaggagugcuccugcuacccccgcuaccccggcguccgcugcgucugccgcgacaacuggaagggcuccaaccgccccaucgucgacaucaacaucaaggaccacuccaucgucuccuccuacgucugcuccggccucgucggcgacaccccccgcaagaacgacuccuccuccuccucccacugccucgaccccaacaacgaggagggcggccacggcgucaagggcugggccuucgacgacggcaacgacgucuggaugggccgcaccaucuccgagaagucccgccucggcuacgagaccuucaaggucaucgagggcugguccaaccccaaguccaagcuccagaucaaccgccaggucaucgucgaccgcggcaaccgcuccggcuacuccggcaucuucuccgucgagggcaaguccugcaucaaccgcugcuucuacgucgagcucauccgcggccgcaaggaggagaccgagguccucuggaccuccaacuccaucgucgucuucugcggcaccuccggcaccuacggcaccggcuccuggcccgacggcgccgacaucaaccucaugcccaucuga

SEQ ID NO: 120677 - RNA, 1410 nt, Artificial Sequence; identical to SEQ ID NO: 112635
  derived and/or modified CDS sequence (opt2) from neuraminidase__InfluenzaA__AHL90689

SEQ ID NO: 120678 - RNA, 1410 nt, Artificial Sequence
  derived and/or modified CDS sequence (opt2) from neuraminidase__InfluenzaA__AHL90701
augaaccccaaccagaagaucaucaccaucggcuccgucucccucaccaucuccaccaucugcuucuucaugcagaucgccauccucaucaccaccgucacccuccacuucaagcaguacgaguucaacuccccccccaacaaccaggucaugcucugcgagcccaccaucaucgagcgcaacaucaccgagaucgucuaccucaccaacaccaccaucgagaaggagaucugccccaagcucgccgaguaccgcaacugguccaagccccagugcgacaucaccggcuucgcccccuucuccaaggacaacuccauccgccucuccgccggcggcggcaucugggucacccgcgagcccuacgucuccugcgaccccgacaagugcuaccaguucgcccucggccagggcaccacccucaacaacguccacuccaacaacaccguccgcgaccgcacccccuaccgcacccuccucaugaacgagcucggcguccccuuccaccucggcaccaagcaggucugcaucgccugguccuccuccuccugccacgacggcaaggccuggcuccacgucugcaucaccggcgacgacaagaacgccaccgccuccuucaucuacaacggccgccucgucgacuccgucgucuccugguccaaggacauccuccgcacccaggaguccgagugcgucugcaucaacggcaccugcaccgucgucaugaccgacggcuccgccuccggcaaggccgacaccaagauccucuucaucgaggagggcaagaucguccacaccuccacccucuccggcuccgcccagcacgucgaggagugcuccugcuacccccgcuaccccggcguccgcugcgucugccgcgacaacuggaagggcuccaaccgccccaucgucgacaucaacaucaaggaccacuccaucgucuccuccuacgucugcuccggccucgucggcgacaccccccgcaagaacgacuccuccuccuccucccacugccucgaccccaacaacgaggagggcggccacggcgucaagggcugggccuucgacgacggcaacgacgucuggaugggccgcaccaucuccgagaagucccgccucggcuacgagaccuucaaggucaucgagggcugguccaaccccaaguccaagcuccagaucaaccgccaggucaucgucgaccgcggcaaccgcuccggcuacuccggcaucuucuccgucgagggcaaguccugcaucaaccgcugcuucuacgucgagcucauccgcggccgcaaggaggagaccgagguccucuggaccuccaacuccaucgucgucuucugcggcaccuccggcaccuacggcaccggcuccuggcccgacggcgccgacaucaaccucaugcccaucuga

SEQ ID NO: 120679 - RNA, 1410 nt, Artificial Sequence; identical to SEQ ID NO: 115340
  derived and/or modified CDS sequence (opt2) from neuraminidase__InfluenzaA__AHL90713

SEQ ID NO: 120680 - RNA, 1413 nt, Artificial Sequence; identical to SEQ ID NO: 115973
  derived and/or modified CDS sequence (opt2) from neuraminidase__InfluenzaA__AHL90725

SEQ ID NO: 120681 - RNA, 1413 nt, Artificial Sequence; identical to SEQ ID NO: 114966
  derived and/or modified CDS sequence (opt2) from neuraminidase__InfluenzaA__AHL90749

SEQ ID NO: 120682 - RNA, 1413 nt, Artificial Sequence; identical to SEQ ID NO: 113497
  derived and/or modified CDS sequence (opt2) from neuraminidase__InfluenzaA__AHL90761

SEQ ID NO: 120683 - RNA, 1413 nt, Artificial Sequence
  derived and/or modified CDS sequence (opt2) from neuraminidase__InfluenzaA__AHL90773
augaaccccaaccagaagaucaucaccaucggcuccaucuccaucgccaucggcaucaucucccucaugcuccagaucggcaacaucaucuccaucugggccucccacuccauccagaccggcucccagaacaacaccggcaucugcaaccagcgcaucaucaccuacgagaacuccaccugggucaaccacaccuacgucaacaucaacaacaccaacgucgucgccggcgaggacaagaccuccaugacccucgccggcaacuccucccucugcuccaucuccggcugggccaucuacaccaaggacaacuccauccgcaucggcuccaagggcgacgucuucgucauccgcgagcccuucaucuccugcucccaccucgagugccgcaccuucuuccucacccagggcgcccuccucaacgacaagcacuccaacggcaccgucaaggaccgcucccccuaccgcgcccucauguccugcccccucggcgaggcccccucccccuacaacuccaaguucgaguccgucgccugguccgccuccgccugccacgacggcaugggcuggcucaccaucggcaucuccggccccgacaacggcgccgucgccguccucaaguacaacggcaucaucaccggcaccaucaaguccuggaagaagcagauccuccgcacccaggaguccgagugcgucugcaugaacggcuccugcuucaccaucaugaccgacggccccuccaacaaggccgccuccuacaagaucuucaagaucgagaagggcaaggucaccaaguccaucgagcucaacgcccccaacuucuacuacgaggagugcuccugcuaccccgacaccggcaucgucaugugcgucugccgcgacaacuggcacggcuccaaccgccccugggucuccuucaaccagaaccucgacuaccagaucggcuacaucugcuccggcgucuucggcgacaacccccgccccgaggaccgcgagggcuccugcaaccccgucaccgucgacggcgccaacggcgucaagggcuucuccuacaaguacggcaacggcgucuggaucggccgcaccaaguccaaccgccuccgcaagggcuucgagaugaucugggaccccaacggcuggaccaacaccgacuccgacuucuccgucaagcaggacgucgucgccaucaccgacugguccggcuacuccggcuccuucguccagcaccccgagcucaccggccucgacugcauccgccccugcuucugggucgagcucguccgcggccucccccgcgagaacaccaccaucuggaccuccggcuccuccaucuccuucugcggcgucaacuccgacaccgccaacugguccuggcccgacggcgccgagcuccccuucaccaucgacaaguga

SEQ ID NO: 120684 - RNA, 1413 nt, Artificial Sequence
  derived and/or modified CDS sequence (opt2) from neuraminidase__InfluenzaA__AHL90785
augaaccccaaccagaagaucaucaccaucggcuccaucuccaucgccaucggcaucaucucccucaugcuccagaucggcaacaucaucuccaucugggccucccacuccauccagaccggcucccagaacaacaccggcaucugcaaccagcgcaucaucaccuacgagaacuccaccugggucaaccacaccuacgucaacaucaacaacaccaacgucgucgccggcgaggacaagaccuccgucacccucgccggcaacuccucccucugcuccaucuccggcugggccaucuacaccaaggacaacuccauccgcaucggcuccaagggcgacgucuucgucauccgcgagcccuucaucuccugcucccaccucgagugccgcaccuucuuccucacccagggcgcccuccucaacgacaagcacuccaacggcaccgucaaggaccgcucccccuaccgcgcccucauguccugcccccucggcgaggcccccucccccuacaacuccaaguucgaguccgucgccugguccgccuccgccugccacgacggcaugggcuggcucaccaucggcaucuccggccccgacaacggcgccgucgccguccucaaguacaacggcaucaucaccggcaccaucaaguccuggaagaagcagauccuccgcacccaggaguccgagugcgucugcaugaacggcuccugcuucaccaucaugaccgacggccccuccaacaaggccgccuccuacaagaucuucaagaucgagaagggcaaggucaccaaguccaucgagcucaacgcccccaacuucuacuacgaggagugcuccugcuaccccgacaccggcaucgucaugugcgucugccgcgacaacuggcacggcuccaaccgccccugggucuccuucaaccagaaccucgacuaccagaucggcuacaucugcuccggcgucuucggcgacaacccccgccccgaggacggcgagggcuccugcaaccccgucaccgucaacggcgccgacggcgucaagggcuucuccuacaaguacggcaacggcgucuggaucggccgcaccaaguccaaccgccuccgcaagggcuucgagaugaucugggaccccaacggcuggaccaacaccgacuccgacuucuccgucaagcaggacgucgucgccaucaccgacugguccggcuacuccggcuccuucguccagcaccccgagcucaccggccucgacugcauccgccccugcuucugggucgagcucguccgcggccucccccgcgagaacaucaccaucuggaccuccggcuccuccaucuccuucugcggcgucaacuccgacaccgccaacugguccuggcccgacggcgccgagcuccccuucaccaucgacaaguga

SEQ ID NO: 120685 - RNA, 1413 nt, Artificial Sequence
  derived and/or modified CDS sequence (opt2) from neuraminidase__InfluenzaA__AHL90797
augaaccccaaccagaagaucaucaccaucggcuccaucuccaucgccaucggcaucaucucccucaugcuccagaucggcaacaucaucuccaucugggccucccacuccauccagaccggcucccagaacaacaccggcaucugcaacaagcgcaucaucaccuacgagaacuccaccugggucaaccacaccuacgucaacaucaacaacaccaacgucgucgccggcgaggacaagaccuccgucacccucgccggcaacuccucccucugcuccaucuccggcugggccaucuacaccaaggacaacuccauccgcaucggcuccaagggcgacgucuucgucauccgcgagcccuucaucgccugcucccaccucgagugccgcaccuucuuccucacccagggcgcccuccucaacgacaagcacuccaacggcaccgucaaggaccgcucccccuaccgcgcccucauguccugcccccucggcgaggcccccucccccuacaacuccaaguucgaguccgucgccugguccgccuccgccugccacgacggcaugggcuggcucaccaucggcaucuccggccccgacaacggcgccgucgccguccucaaguacaacggcaucaucaccggcaccaucaaguccuggaagaagcagauccuccgcacccaggaguccgagugcgucugcaugaacggcuccugcuucaccaucaugaccgacggccccuccgacaaggccgccuccuacaagaucuucaagaucgagaagggcaaggucaccaaguccaucgagcucaacgcccccaacuuccacuacgaggagugcuccugcuaccccgacaccggcaucgucaugugcgucugccgcgacaacuggcacggcuccaaccgccccugggucuccuucaaccagaaccucgacuaccagaucggcuacaucugcuccggcgucuucggcgacaacccccgccccgaggacggcgagggcuccugcucccccgucaccgucgacggcgccaacggcgucaagggcuucuccuacaaguacgacaacggcgucuggaucggccgcaccaaguccaaccgccuccgcaagggcuucgaggucaucugggaccccaacggcuggaccaacaccgacuccgacuucuccgucaagcaggacgucgucgccaucaccgacugguccggcuacuccggcuccuucguccagcaccccgagcucaccggccucgacugcauccgccccugcuucugggucgagcucguccgcggccucccccgcgagaacaccaccaucuggaccuccggcuccuccaucuccuucugcggcgucaacuccgacaccgccaacugguccuggcccgacggcgccgagcuccccuucaccaucgacaaguga

SEQ ID NO: 120686 - RNA, 1413 nt, Artificial Sequence; identical to SEQ ID NO: 113497
  derived and/or modified CDS sequence (opt2) from neuraminidase__InfluenzaA__AHL90809

SEQ ID NO: 120687 - RNA, 1413 nt, Artificial Sequence; identical to SEQ ID NO: 115973
  derived and/or modified CDS sequence (opt2) from neuraminidase__InfluenzaA__AHL90821

SEQ ID NO: 120688 - RNA, 1413 nt, Artificial Sequence
  derived and/or modified CDS sequence (opt2) from neuraminidase__InfluenzaA__AHL90833
augaaccccaaccagcgcaucaucaccaucggcuccaucuccaucgccaucggcaucaucucccucaugcuccagaucggcaacaucaucuccaucugggccucccacuccauccagaccggcucccagaacaacaccggcaucugcaaccagcgcaucaucaccuacgagaacuccaccugggucaaccacaccuacgucaacaucaacaacaccaacgucgucgccggcgaggacaagaccuccgucacccucgccggcaacuccucccucugcuccaucuccggcugggccaucuacaccaaggacaacuccauccgcaucggcuccaagggcgacgucuucgucauccgcgagcccuucaucuccugcucccaccucgagugccgcaccuucuuccucacccagggcgcccuccucaacgacaagcacuccaacggcaccgccaaggaccgcucccccuaccgcgcccucauguccugcccccucggcgaggcccccucccccuacaacuccaaguucgaguccgucgccugguccgccuccgccugccacgacggcaugggcuggcucaccaucggcaucuccggccccgacaacggcgccgucgccguccucaaguacaacggcaucaucaccggcaccaucaaguccuggaagaagcagauccuccgcacccaggaguccgagugcgucugcaugaacggcuccugcuucaccaucaugaccgacggccccuccaacaaggccgccuccuacaagaucuucaagaucgagaagggcaaggucaccaaguccaucgagcucaacgcccccaacuucuacuacgaggagugcuccugcuaccccgacaccggcaucgucaugugcgucugccgcgacaacuggcacggcuccaaccgccccugggucuccuucaaccagaaccucgacuaccagaugggcuacaucugcuccggcgucuucggcgacaacccccgccccgaggacggcgagggcuccugcaaccccgucaccgucgacggcgccaacggcgucaagggcuucuccuacaaguacggcaacggcgucuggaucggccgcaccaaguccaaccgccuccgcaagggcuucgagaugaucugggaccccaacggcuggaccaacaccgacuccgacuucuccgucaagcaggacgucgucgccaucaccgacugguccggcuacuccggcuccuucguccagcaccccgagcucaccggccucgacugcauccgccccugcuucugggucgagcucguccgcggccucccccgcgagaacaccaccaucuggaccuccggcuccuccaucuccuucugcggcgucaacuccgacaccgccaacugguccuggcccgacggcgccgagcuccccuucaccaucgacaaguga

SEQ ID NO: 120689 - RNA, 1413 nt, Artificial Sequence; identical to SEQ ID NO: 113497
  derived and/or modified CDS sequence (opt2) from neuraminidase__InfluenzaA__AHL90845

SEQ ID NO: 120690 - RNA, 1413 nt, Artificial Sequence; identical to SEQ ID NO: 114966
  derived and/or modified CDS sequence (opt2) from neuraminidase__InfluenzaA__AHL90857

SEQ ID NO: 120691 - RNA, 1413 nt, Artificial Sequence; identical to SEQ ID NO: 113497
  derived and/or modified CDS sequence (opt2) from neuraminidase__InfluenzaA__AHL90869

SEQ ID NO: 120692 - RNA, 1413 nt, Artificial Sequence
  derived and/or modified CDS sequence (opt2) from neuraminidase__InfluenzaA__AHL90881
augaaccccaaccagaagaucaucaccaucggcuccaucuccaucgccaucggcaucaucuccaccaugcuccagaucggcuccaucaucuccaucugggccucccacuccauccagaccggcucccagaacaacaccggcaucugcaaccagcgcaucaucaccuacgagaacuccaccugggucaaccacaccuacgucaacaucaacaacaccaacgucgucgccggcgaggacaagaccuccgucacccucgccggcaacuccucccucugcuccaucuccggcugggccaucuacaccaaggacaacuccauccgcaucggcuccaagggcgacgucuucgucauccgcgagcccuucaucuccugcucccaccucgagugccgcaccuucuuccucacccagggcgcccuccucaacgacaagcacuccaacggcaccgucaaggaccgcucccccuaccgcgcccucauguccugcccccucggcgaggcccccucccccuacaacuccaaguucgaguccgucgccugguccgccuccgccugccacgacggcaugggcuggcucaccaucggcaucuccggccccgacaacggcgccgucgccguccucaaguacaacggcaucaucaccggcaccaucaaguccuggaagaagcagauccuccgcacccaggaguccgagugcgucugcaugaacggcuccugcuucaccaucaugaccgacggccccuccaacaaggccgccuccuacaagaucuucaagaucgagaagggcaaggucaccaaguccaucgagcucaacgcccccaacuucuacuacgaggagugcuccugcuaccccgacaccggcaucgucaugugcgucugccgcgacaacuggcacggcuccaaccgccccugggucuccuucaaccagaaccucgacuaccagaucggcuacaucugcuccggcgucuucggcgacaacccccgccccgaggacggcgagggcuccugcaaccccgucaccgucgacggcgccaacggcgucaagggcuucuccuacaaguacggcaacggcgucuggaucggccgcaccaaguccaaccgccucaucaagggcuucgagaugaucugggaccccaacggcuggaccaacaccgacuccgacuucuccgucaagcaggacgucgucgccaucaccgacugguccggcuacuccggcuccuucguccagcaccccgagcucaccggccucgacugcauccgccccugcuucugggucgagcucguccgcggccucccccgcgagaacaccaccaucuggaccuccggcuccuccaucuccuucugcggcgucaacuccgacaccgccaacugguccuggcccgacggcgccgagcuccccuucaccaucgacaaguga

SEQ ID NO: 120693 - RNA, 1413 nt, Artificial Sequence; identical to SEQ ID NO: 115973
  derived and/or modified CDS sequence (opt2) from neuraminidase__InfluenzaA__AHL90893

SEQ ID NO: 120694 - RNA, 1413 nt, Artificial Sequence; identical to SEQ ID NO: 114966
  derived and/or modified CDS sequence (opt2) from neuraminidase__InfluenzaA__AHL90905

SEQ ID NO: 120695 - RNA, 1413 nt, Artificial Sequence
  derived and/or modified CDS sequence (opt2) from neuraminidase__InfluenzaA__AHL90917
augaaccccaaccagaagaucaucaccaucggcuccaucuccaucgccaucggcaucaucucccucacccuccagaucggcaacaucaucuccaucugggccucccacuccauccagaccggcucccagaacaacaccggcaucugcaaccagcgcaucaucaccuacgagaacuccaccugggucaaccacaccuacgucaacaucaacaacaccaacgucgucgccggcgaggacaagaccuccgucacccucgccggcaacuccucccucugcuccaucuccggcugggccaucuacaccaaggacaacuccauccgcaucggcuccaagggcgacgucuucgucauccgcgagcccuucaucuccugcucccaccucgagugccgcaccuucuuccucacccagggcgcccuccucaacgacaagcacuccaacggcaccgucaaggaccgcucccccuaccgcgcccucauguccugcccccucggcgaggcccccucccccuacaacuccaaguucgaguccgucgccugguccgccuccgccugccacgacggcaugggcuggcucaccaucggcaucuccggccccgacaacggcgccgucgccguccucaaguacaacggcaucaucaccggcaccaucaaguccuggaagaagcagauccuccgcacccaggaguccgagugcgucugcaugaacggcuccugcuucaccaucaugaccgacggccccuccaacaaggccgccuccuacaagaucuucaagaucgagaagggcaaggucaccaaguccaucgagcucaacgcccccaacuucuacuacgaggagugcuccugcuaccccgacaccggcaucgucaugugcgucugccgcgacaacuggcacggcuccaaccgccccugggucuccuucaaccagaaccucgacuaccagaucggcuacaucugcuccggcgucuucggcgacaacccccgccccgaggacggcgagggcuccugcaaccccgucaccgucgacggcgccaacggcgucaagggcuucuccuacaaguacggcaacggcgucuggaucggccgcaccaaguccaaccgccuccgcaagggcuucgagaugaucugggaccccaacggcuggaccaacaccgacuccgacuucuccgucaagcaggacgucgucgccaucaccgacugguccggcuacuccggcuccuucguccagcaccccgagcucaccggccucgacugcauccgccccugcuucugggucgagcucguccgcggccucccccgcgagaacaccaccaucuggaccuccggcuccuccaucuccuucugcggcgucaacuccgacaccgccaacugguccuggcccgacggcgccgagcuccccuucaccaucgacaaguga

SEQ ID NO: 120696 - RNA, 1413 nt, Artificial Sequence
  derived and/or modified CDS sequence (opt2) from neuraminidase__InfluenzaA__AHL90929
augaaccccaaccagaagaucaucaccaucggcuccaucuccaucgccaucggcaucaucucccucaugcuccagaucggcaacaucaucuccaucugggccucccacuccauccagaccggcucccagaacaacaccggcaucugcaaccagcgcaucaucaccuacgagaacuccaccugggucaaccacaccuacgucaacaucaacaacaccaacgucgucgccggcgaggacaagaccuccaugacccucgccggcaacuccucccucugcuccaucuccggcugggccaucuacaccaaggacaacuccauccgcaucggcuccaagggcgacgucuucgucauccgcgagcccuucaucuccugcucccaccucgagugccgcaccuucuuccucacccagggcgcccuccucaacgacaagcacuccaacggcaccgucaaggaccgcucccccuaccgcgcccucauguccugcccccucggcgaggcccccucccccuacaacuccaaguucgaguccgucgccugguccgccuccgccugccacgacggcaugggcuggcucaccaucggcaucuccggccccgacaacggcgccgucgccguccucaaguacaacggcaucaucaccggcaccaucaaguccuggaagaagcagauccuccgcacccaggaguccgagugcgucugcaugaacggcuccugcuucaccaucaugaccgacggccccuccaacaaggccgccuccuacaagaucuucaagaucgagaagggcaaggucaccaaguccaucgagcucaacgcccccaacuucuacuacgaggagugcuccugcuaccccgacaccggcaucgucaugugcgucugccgcgacaacuggcacggcuccaaccgccccugggucuccuucaaccagaaccucgacuaccagaucggcuacaucugcuccggcgucuucggcgacaacccccgccccgaggacggcgagggcuccugcaaccccgucaccgucgacggcgccaacggcgucaagggcuucuccuacaaguacggcaacggcgucuggaucggccgcaccaaguccaaccgccuccgcaagggcuucgagaugaucugggaccccaacggcuggaccaacaccgacuccgacuucuccgucaagcaggacgucgucgccaucaccgacugguccggcuacuccggcuccuucguccagcaccccgagcucaccggccucgacugcauccgccccugcuucugggucgagcucguccgcggccucccccgcgagaacaccaccaucuggaccuccggcuccuccaucuccuucugcggcgucaacuccgacaccgccaacugguccuggcccgacggcgccgagcuccccuucaccaucgacaaguga

SEQ ID NO: 120697 - RNA, 1413 nt, Artificial Sequence; identical to SEQ ID NO: 114966
  derived and/or modified CDS sequence (opt2) from neuraminidase__InfluenzaA__AHL90941

SEQ ID NO: 120698 - RNA, 1413 nt, Artificial Sequence; identical to SEQ ID NO: 114966
  derived and/or modified CDS sequence (opt2) from neuraminidase__InfluenzaA__AHL90953

SEQ ID NO: 120699 - RNA, 1413 nt, Artificial Sequence; identical to SEQ ID NO: 114966
  derived and/or modified CDS sequence (opt2) from neuraminidase__InfluenzaA__AHL90965

SEQ ID NO: 120700 - RNA, 1413 nt, Artificial Sequence
  derived and/or modified CDS sequence (opt2) from neuraminidase__InfluenzaA__AHL90977
augaaccccaaccagaagaucaucaccaucggcuccaucuccaucgccaucggcaucaucucccucaugcuccagaucggcaacaucaucuccaucugggccucccacuccauccagaccggcucccagaacaacaccggcaucugcaaccagcgcaucaucaccuacgagaacuccaccugggucaaccacaccuacgucaacaucaacaacaccaacgucgucgccggcgaggacaagaccuccgucacccucgccggcaacuccucccucugcuccaucuccggcugggccaucuacaccaaggacaacuccauccgcaucggcuccaagggcgacgucuucgucauccgcgagcccuucaucuccugcucccaccucgagugccgcaccuucuuccucacccagggcgcccuccucaacgacaagcacuccaacggcaccgucaaggaccgcucccccuaccgcgcccucauguccugcccccucggcgaggcccccucccccuacaacuccaaguucgaguccgucgccugguccgccuccgccugccacgacggcaugggcuggcucaccaucggcaucuccggccccgacaacggcgccgucgccguccucaaguacaacggcaucaucaccggcaccaucaaguccuggaagaagcagauccuccgcacccaggaguccgagugcgucugcaugaacggcuccugcuucaccaucaugaccgacggccccuccaacaaggccgccuccuacaagaucuucaagaucgagaagggcaaggucaccaaguccaucgagcucaacgcccccaacuucuacuacgaggagugcuccugcuaccccgacaccggcaucgucaugugcgucugccgcgacaacuggcacggcuccaaccgccccugggucuccuucaaccagaaccucgacuaccagaucggcuacaucugcuccggcgucuucggcgacaacccccgccccgaggacggcgagggcuccugcaaccccgucaccgucgacggcgccaacggcgucaagggcuucuccuacaaguacggcaacggcgucuggaucggccgcaccaaguccaaccgccuccgcaagggcuucgagaugaucugggaccccaacggcuggaccaacaccgacuccgacuucuccgucaagcaggacgucgucgccaucgccgacugguccggcuacuccggcuccuucguccagcaccccgagcucaccggccucgacugcauccgccccugcuucugggucgagcucguccgcggccucccccgcgagaacaccaccaucuggaccuccggcuccuccaucuccuucugcggcgucaacuccgacaccgccaacugguccuggcccgacggcgccgagcuccccuucaccaucgacaaguga

SEQ ID NO: 120701 - RNA, 1413 nt, Artificial Sequence; identical to SEQ ID NO: 116240
  derived and/or modified CDS sequence (opt2) from neuraminidase__InfluenzaA__AHL90989

SEQ ID NO: 120702 - RNA, 1413 nt, Artificial Sequence; identical to SEQ ID NO: 120696
  derived and/or modified CDS sequence (opt2) from neuraminidase__InfluenzaA__AHL91001

SEQ ID NO: 120703 - RNA, 1413 nt, Artificial Sequence
  derived and/or modified CDS sequence (opt2) from neuraminidase__InfluenzaA__AHL91013
augaaccccaaccagaagaucaucaccaucggcuccaucuccaucgccaucggcaucaucucccucaugcuccagaucggcaacaucaucuccaucugggccucccacuccauccagaccggcucccagaacaacaccggcaucugcucccagcgcaucaucaccuacgagaacuccaccugggucaaccacaccuacgucaacaucaacaacaccaacgucgucgccggcgaggacaagaccuccaugacccucgccggcaacuccucccucugcuccaucuccggcugggccaucuacaccaaggacaacuccauccgcaucggcuccaagggcgacgucuucgucauccgcgagcccuucaucuccugcucccaccucgagugccgcaccuucuuccucacccagggcgcccuccucaacgacaagcacuccaacggcaccgucaaggaccgcucccccuaccgcgcccucauguccugcccccucggcgaggcccccucccccuacaacuccaaguucgaguccgucgccugguccgccuccgccugccacgacggcaugggcuggcucaccaucggcaucuccggccccgacaacggcgccgucgccguccucaaguacaacggcaucaucaccggcaccauccgcuccuggaagaagcagauccuccgcacccaggaguccgagugcgucugcaugaacggcuccugcuucaccaucaugaccgacggccccuccaacaaggccgccuccuacaagaucuucaagaucgagaagggcaaggucaccaaguccaucgagcucaacgcccccaacuucuacuacgaggagugcuccugcuaccccgacaccggcaucgucaugugcgucugccgcgacaacuggcacggcuccaaccgccccugggucuccuucaaccagaaccucgacuaccagaucggcuacaucugcuccggcgucuucggcgacaacccccgccccgaggacggcgagggcuccugcaaccccgucaccgucgacggcgccaacggcgucaagggcuucuccuacaaguacggcaacggcgucuggaucggccgcaccaaguccaaccgccuccgcaagggcuucgagaugaucugggaccccaacggcuggaccaacaccgacuccgacuucuccgucaagcaggacgucgucgccaucaccgacugguccggcuacuccggcuccuucguccagcaccccgagcucaccggccucgacugcauccgccccugcuucugggucgagcucguccgcggccucccccgcgagaacaccaccaucuggaccuccggcuccuccaucuccuucugcggcgucaacuccgacaccgccaacugguccuggcccgacggcgccgagcuccccuucaccaucgacaaguga

SEQ ID NO: 120704 - RNA, 1413 nt, Artificial Sequence; identical to SEQ ID NO: 120696
  derived and/or modified CDS sequence (opt2) from neuraminidase__InfluenzaA__AHL91025

SEQ ID NO: 120705 - RNA, 1410 nt, Artificial Sequence; identical to SEQ ID NO: 113941
  derived and/or modified CDS sequence (opt2) from neuraminidase__InfluenzaA__AHL91037

SEQ ID NO: 120706 - RNA, 1410 nt, Artificial Sequence; identical to SEQ ID NO: 115554
  derived and/or modified CDS sequence (opt2) from neuraminidase__InfluenzaA__AHL91049

SEQ ID NO: 120707 - RNA, 1410 nt, Artificial Sequence
  derived and/or modified CDS sequence (opt2) from neuraminidase__InfluenzaA__AHL91061
augaaccccaaccagaagaucaucaccaucggcuccgucucccucaccaucuccaccaucugcuucuucaugcagaucgccauccucaucaccaccgucacccuccacuucaagcaguacgaguucaacuccccccccaacaaccaggucaugcucugcgagcccaccaucaucgagcgcaacaucaccgagaucgucuaccucaccaacaccaccaucgagaaggagaucugccccaagcucgccgaguaccgcaacugguccaagccccagugcgacaucaccggcuucgcccccuucuccaaggacaacuccauccgccucuccgccggcggcgacaucugggucacccgcgagcccuacgucuccugcgaccccgacaagugcuaccaguucgcccucggccagggcaccacccucaacaacguccacuccaacaacaccguccgcgaccgcacccccuaccgcacccuccucaugaacgagcucggcguccccuuccaccucggcaccaagcaggucugcaucgccugguccuccuccuccugccacgacggcaaggccuggcuccacgucugcaucaccggcgacgacaagaacgccaccgccuccuucaucuacaacggccgccucgucgacuccgucgucuccugguccaaggagauccuccgcacccaggaguccgagugcgucugcaucaacggcaccugcaccgucgucaugaccgacggcuccgccuccggcaaggccgacaccaagauccucuucaucgaggagggcaagaucguccacaccuccacccucuccggcuccgcccagcacgucgaggagugcuccugcuacccccgcuaccccggcguccgcugcgucugccgcgacaacuggaagggcuccaaccgccccaucgucgacaucaacaucaaggaccacuccaucgucuccuccuacgucugcuccggccucgucggcgacaccccccgcaagaacgacuccuccuccuccucccacugccucaaccccaacaacgaggagggcggccacggcgucaagggcugggccuucgacgacggcaacgacgucuggaugggccgcaccaucuccgagaagucccgccucggcuacgagaccuucaaggucaucgagggcugguccaaccacaaguccaagcuccagaucaaccgccaggucaucgucgaccgcggcaaccgcuccggcuacuccggcaucuucuccgucgagggcaaguccugcaucaaccgcugcuucuacgucgagcucauccgcggccgcaaggaggagaccgagguccucuggaccuccaacuccaucgucgucuucugcggcaccuccggcaccuacggcaccggcuccuggcccgacggcgccgaccucaaccucaugcccaucuga

SEQ ID NO: 120708 - RNA, 1410 nt, Artificial Sequence
  derived and/or modified CDS sequence (opt2) from neuraminidase__InfluenzaA__AHL91073
augaaccccaaccagaagaucaucaccaucggcuccgucucccucaccaucuccaccaucugcuucuucaugcagaucgccauccucaucaccaccgucacccuccacuucaagcaguacgaguucaacuccccccccaacaaccaggucaugcucugcgagcccaccaucaucgagcgcaacaucaccgagaucgucuaccucaccaacaccaccaucgagaaggagaucugccccaagcucgccgaguaccgcaccugguccaagccccagugcgacaucaccggcuucgcccccuucuccaaggacaacuccauccgccucuccgccggcggcgacaucugggucacccgcgagcccuacgucuccugcgaccccgacaagugcuaccaguucgcccucggccagggcaccacccucaacaacguccacuccaacaacaccguccgcgaccgcacccccuaccgcacccuccucaugaacgagcucggcguccccuuccaccucggcaccaagcaggucugcaucgccugguccuccuccuccugccacgacggcaaggccuggcuccacgucugcaucaccggcgacgacaagaacgccaccgccuccuucaucuacaacggccgccucgucgacuccgucgucuccugguccaaggagauccuccgcacccaggaguccgagugcgucugcaucaacggcaccugcaccgucgucaugaccgacggcuccgccuccggcaaggccgacaccaagauccucuucaucgaggagggcaagaucguccacaccuccacccucuccggcuccgcccagcacgucgaggagugcuccugcuacccccgcuaccccggcguccgcugcgucugccgcgacaacuggaagggcuccaaccgccccaucgucgacaucaacaucaaggaccacuccaucgucuccuccuacgucugcuccggccucgucggcgacaccccccgcaagaacgacuccuccuccggcucccacugccucgaccccaacaacgaggagggcggccacggcgucaagggcugggccuucgacgacggcaacgacgucuggaugggccgcaccaucuccgagaagucccgccucggcuacgagaccuucaaggucaucgagggcugguccaaccacaaguccaagcuccagaucaaccgccaggucaucgucgaccgcggcaaccgcuccggcuacuccggcaucuucuccgucgagggcaaguccugcaucaaccgcugcuucuacgucgagcucauccgcggccgcaaggaggagaccgagguccucuggaccuccaacuccaucgucgucuucugcggcaccuccggcaccuacggcaccggcuccuggcccgacggcgccgaccucaaccucaugcccaucuga

SEQ ID NO: 120709 - RNA, 1410 nt, Artificial Sequence
  derived and/or modified CDS sequence (opt2) from neuraminidase__InfluenzaA__AHL91085
augaaccccaaccagaagaucaucaccaucggcuccgucucccucaccaucuccaccaucugcuucuucaugcagaucgccauccucaucaccaccgucacccuccacuucaagcaguacgaguucaacuccccccccaacaaccaggucaugcucugcgagcccaagaucaucgagcgcaacaucaccgagaucgucuaccucaccaacaccaccaucgagaaggagaucugccccaagcucgccgaguaccgcaacugguccaagccccagugcgacaucaccggcuucgcccccuucuccaaggacaacuccauccgccucuccgccggcggcgacaucugggucacccgcgagcccuacgucuccugcgaccccgacaagugcuaccaguucgcccucggccagggcaccacccucaacaacguccacuccaacaacaccguccgcgaccgcacccccuaccgcacccuccucaugaacgagcucggcguccccuuccaccucggcaccaagcaggucugcaucgccugguccuccuccuccugccacgacggcaaggccuggcuccacgucugcaucaccggcgacgacaagaacgccaccgccuccuucaucuacaacggccgccucgucgacuccgucgucuccugguccaaggagauccuccgcacccaggaguccgagugcgucugcaucaacggcaucugcaccgucgucaugaccgacggcuccgccuccggcaaggccgacaccaagauccucuucaucgaggagggcaagaucguccacaccuccacccucuccggcuccgcccagcacgucgaggagugcuccugcuacccccgcuaccccggcguccgcugcgucugccgcgacaacuggaagggcuccaaccgccccaucgucgacaucaacaucaaggaccacuccaucgucuccuccuacgucugcuccggccucgucggcgacaccccccgcaagaacgacuccuccuccuccucccacugccucgaccccaacaacgaggagggcggccacggcgucaagggcugggccuucgacgacggcaacgacgucuggaugggccgcaccaucuccgagaagucccgccucggcuacgagaccuucaaggucaucgagggcugguccaaccccaaguccaagcuccagaucaaccgccaggucaucgucgaccgcggcaaccgcuccggcuacuccggcaucuucuccgucgagggcaaguccugcaucaaccgcugcuucuacgucgagcucauccgcggccgcaaggaggagaccgagguccucuggaccuccaacuccaucgucgucuucugcggcaccuccggcaccuacggcaccggcuccuggcccgacggcgccgacaucaaccucaugcccaucuga

SEQ ID NO: 120710 - RNA, 1410 nt, Artificial Sequence; identical to SEQ ID NO: 112635
  derived and/or modified CDS sequence (opt2) from neuraminidase__InfluenzaA__AHL91097

SEQ ID NO: 120711 - RNA, 1410 nt, Artificial Sequence
  derived and/or modified CDS sequence (opt2) from neuraminidase__InfluenzaA__AHL91109
augaaccccaaccagaagaucaucaccaucggcuccgucucccucaccaucuccaccaucugcuucuucaugcagaucgccauccucaucaccaccgucacccuccacuucaagcaguacgaguucaacuccccccccaacaaccaggucaugcucugcgagcccaccaucaucgagcgcaacaucaccgagaucgucuaccucaccaacaccaccaucgagaaggagaucugccccaagcucgccgaguaccgcaacugguccaagccccagugcgacaucaccggcuucgcccccuucuccaaggacaacuccauccgccucuccgccggcggcgacaucugggucacccgcgagcccuacgucuccugcgaccccgacaagugcuaccaguucgcccucggccagggcaccacccucaacaacguccacuccaacaacaccguccgcgaccgcacccccuaccgcacccuccucaugaacgagcucggcguccccuuccaccucggcaccaagcaggucugcaucgccugguccuccuccuccugccacgacggcaaggccuggcuccacgucugcaucaccggcgacgacaagaacgccaccgccuccuucaucuacaacggccgccucgucgacuccgucgucuccugguccaaggagauccuccgcacccaggaguccgagugcgucugcaucaacggcaccugcaccgucgucaugaccgacggcuccgccuccggcaaggccgacaccaagauccucuucaucgaggagggcaagaucguccacaccuccacccucuccggcuccgcccagcacgucgaggagugcuccugcuacccccgcuaccccggcguccgcugcgucugccgcgacaacuggaagggcuccaaccgccccaucgucgacaucaacaucaaggaccacuccaucgucuccuccuacgucugcuccggccucgucggcgacaccccccgcaagaacgacuccuccuccuccucccacugccucgaccccaacaacgaggagggcggccacggcgucaagggcugggccuucgacgacggcaacgacgucuggaugggccgcaccaucuccgagaagucccgccucggcuacgagaccuucaaggucaucgagggcugguccaaccacaaguccaagcuccagaucaaccgccaggucaucgucgaccgcggcaaccgcuccggcuacuccggcaucuucuccgucgagggcaaguccugcaucaaccgcugcuucuacgucgagcucauccgcggccgcaaggaggagaccgagguccucuggaccuccaacuccaucgucgucuucugcggcaccuccggcaccuacggcaccggcuccuggcccgacggcgccgaccucaacaucaugcccaucuga

SEQ ID NO: 120712 - RNA, 1410 nt, Artificial Sequence; identical to SEQ ID NO: 113941
  derived and/or modified CDS sequence (opt2) from neuraminidase__InfluenzaA__AHL91121

SEQ ID NO: 120713 - RNA, 1410 nt, Artificial Sequence
  derived and/or modified CDS sequence (opt2) from neuraminidase__InfluenzaA__AHL91133
augaaccccaaccagaagaucaucaccaucggcuccgucucccucaccaucuccaccaucugcuucuucaugcagaucgccauccucaucaccaccgucacccuccacuucaagcaguucgaguucaacuccccccccaacaaccaggucaugcucugcgagcccaccaucaucgagcgcaacaucaccgagaucgucuaccucaccaacaccaccaucgagaaggagaucugccccaagcucgccgaguaccgcaacugguccaagccccagugcgacaucaccggcuucgcccccuucuccaaggacaacuccauccgccucuccgccggcggcgacaucugggucacccgcgagcccuacgucuccugcgaccccgacaagugcuaccaguucgcccucggccagggcaccacccucaacaacguccacuccaacaacaccguccgcgaccgcacccccuaccgcacccuccucaugaacgagcucggcguccccuuccaccucggcaccaagcaggucugcaucgccugguccuccuccuccugccacgacggcaaggccuggcuccacgucugcaucaccggcgacgacaagaacgccaccgccuccuucaucuacaacggccgccucgucgacuccgucgucuccugguccaaggagauccuccgcacccaggaguccgagugcgucugcaucaacggcaccugcaccgucgucaugaccgacggcuccgccuccggcaaggccgacaccaagauccucuucaucgaggagggcaagaucguccacaccuccacccucuccggcuccgcccagcacgucgaggagugcuccugcuacccccgcuaccccggcguccgcugcgucugccgcgacaacuggaagggcuccaaccgccccaucgucgacaucaacaucaaggaccacuccaucgucuccuccuacgucugcuccggccucgucggcgacaccccccgcaagaacgacuccuccuccuccucccacugccucgaccccaacaacgaggagggcggccacggcgucaagggcugggccuucgacgacggcaacgacgucuggaugggccgcaccaucuccgagaagucccgccucggcuacgagaccuucaaggucaucgagggcugguccaaccacaaguccaagcuccagaucaaccgccaggucaucgucgaccgcggcaaccgcuccggcuacuccggcaucuucuccgucgagggcaaguccugcaucaaccgcugcuucuacgucgagcucauccgcggccgcaaggaggagaccgagguccucuggaccuccaacuccaucgucgucuucugcggcaccuccggcaccuacggcaccggcuccuggcccgacggcgccgaccucaaccucaugcccaucuga

SEQ ID NO: 120714 - RNA, 1410 nt, Artificial Sequence; identical to SEQ ID NO: 115340
  derived and/or modified CDS sequence (opt2) from neuraminidase__InfluenzaA__AHL91145

SEQ ID NO: 120715 - RNA, 1410 nt, Artificial Sequence; identical to SEQ ID NO: 115340
  derived and/or modified CDS sequence (opt2) from neuraminidase__InfluenzaA__AHL91157

SEQ ID NO: 120716 - RNA, 1410 nt, Artificial Sequence; identical to SEQ ID NO: 110748
  derived and/or modified CDS sequence (opt2) from neuraminidase__InfluenzaA__AHL91169

SEQ ID NO: 120717 - RNA, 1410 nt, Artificial Sequence; identical to SEQ ID NO: 118182
  derived and/or modified CDS sequence (opt2) from neuraminidase__InfluenzaA__AHL94987

SEQ ID NO: 120718 - RNA, 1410 nt, Artificial Sequence; identical to SEQ ID NO: 118182
  derived and/or modified CDS sequence (opt2) from neuraminidase__InfluenzaA__AHL94999

SEQ ID NO: 120719 - RNA, 1410 nt, Artificial Sequence
  derived and/or modified CDS sequence (opt2) from neuraminidase__InfluenzaA__AHL95011
augaaccccaaccagaagaucaucaccaucggcuccgucucccucaccaucuccaccaucugcuucuucaugcagaucgccauccucaucaccaccgucacccuccacuucaagcaguacgaguucaacuccccccccaacaaccaggucaugcucugcgagcccaccaucaucgagcgcaacaucaccgagaucgucuaccucaccaacaccaccaucgagaaggagaucugccccaagcccgccgaguaccgcaacugguccaagccccagugcgacaucaccggcuucgcccccuucuccaaggacaacuccauccgccucuccgccggcggcgacaucugggucacccgcgagcccuacgucuccugcgaccccgacaagugcuaccaguucgcccucggccagggcaccacccucaacaacguccacuccaacaacaccguccgcgaccgcacccccuaccgcacccuccucaugaacgagcucggcguccccuuccaccucggcaccaagcaggucugcaucgccugguccuccuccuccugccacgacggcaaggccuggcuccacgucugcaucaccggcgacgacaagaacgccaccgccuccuucaucuacaacggccgccucgucgacuccgucgucuccugguccaaggagauccuccgcacccaggaguccgagugcgucugcaucaacggcaccugcaccgucgucaugaccgacggcuccgccuccggcaaggccgacaccaagauccucuucaucgaggagggcaagaucguccacaccuccacccucuccggcuccgcccagcacgucgaggagugcuccugcuacccccgcuaccccggcguccgcugcgucugccgcgacaacuggaagggcuccaaccgccccaucgucgacaucaacaucaaggaccacuccaucgucucccgcuacgucugcuccggccucgucggcgacaccccccgcaagaacgacuccuccuccuccucccacugccucgaccccaacaacgaggagggcggccacggcgucaagggcugggccuucgacgacggcaacgacgucuggaugggccgcaccaucaacgagaccucccgccucggcuacgagaccuucaaggucaucgagggcugguucaaccccaaguccaagcuccagaucaaccgccaggucaucgucgaccgcggcgaccgcuccggcuacuccggcaucuucuccgucgagggcaaguccugcaucaaccgcugcuucuacgucgagcucauccgcggccgcaaggaggagaccgagguccucuggaccuccaacuccaucgucgucuucugcggcaccuccggcaccuacggcaccggcuccuggcccgacggcgccgaccucaaccucaugcccaucuga

SEQ ID NO: 120720 - RNA, 1410 nt, Artificial Sequence; identical to SEQ ID NO: 119939
  derived and/or modified CDS sequence (opt2) from neuraminidase__InfluenzaA__AHL95023

SEQ ID NO: 120721 - RNA, 1410 nt, Artificial Sequence; identical to SEQ ID NO: 118182
  derived and/or modified CDS sequence (opt2) from neuraminidase__InfluenzaA__AHL95035

SEQ ID NO: 120722 - RNA, 1410 nt, Artificial Sequence; identical to SEQ ID NO: 118182
  derived and/or modified CDS sequence (opt2) from neuraminidase__InfluenzaA__AHL95047

SEQ ID NO: 120723 - RNA, 1410 nt, Artificial Sequence; identical to SEQ ID NO: 119930
  derived and/or modified CDS sequence (opt2) from neuraminidase__InfluenzaA__AHL95059

SEQ ID NO: 120724 - RNA, 1410 nt, Artificial Sequence; identical to SEQ ID NO: 118182
  derived and/or modified CDS sequence (opt2) from neuraminidase__InfluenzaA__AHL95071

SEQ ID NO: 120725 - RNA, 1410 nt, Artificial Sequence; identical to SEQ ID NO: 118182
  derived and/or modified CDS sequence (opt2) from neuraminidase__InfluenzaA__AHL95083

SEQ ID NO: 120726 - RNA, 1410 nt, Artificial Sequence; identical to SEQ ID NO: 118182
  derived and/or modified CDS sequence (opt2) from neuraminidase__InfluenzaA__AHL95095

SEQ ID NO: 120727 - RNA, 1410 nt, Artificial Sequence; identical to SEQ ID NO: 118182
  derived and/or modified CDS sequence (opt2) from neuraminidase__InfluenzaA__AHL95107

SEQ ID NO: 120728 - RNA, 1410 nt, Artificial Sequence
  derived and/or modified CDS sequence (opt2) from neuraminidase__InfluenzaA__AHL95119
augaaccccaaccagaagaucaucaccaucggcuccgucucccucaccaucuccaccaucugcuucuucaugcagaucgccauccucaucaccaccgucacccuccacuucaagcaguacgaguucaacuccccccccaacaaccaggucaugcucugcgagcccaccaucaucgagcgcaacaucaccgagaucgucuaccucaccaacaccaccaucgagaaggagaucugccccaagcccgccgaguaccgcaacugguccaagccccagugcgacaucaccggcuucgcccccuucuccaaggacaacuccauccgccucuccgccggcggcgacaucugggucacccgcgagcccuacgucuccugcgaccccgacaagugcuaccaguucgcccucggccagggcaccacccucaacaacguccacuccaacaacaccguccgcgaccgcacccccuaccgcacccuccucaugaacgagcucggcguccccuuccaccucggcaccaagcaggucugcaucgccugguccuccuccuccugccacgacggcaaggccuggcuccacgucugcaucaccggcgacgacaagaacgccaccgccuccuucaucuacaacggccgccucgucgacuccgucgucuccugguccaaggagauccuccgcacccaggaguccgagugcgucugcaucaacggcaccugcaccgucgucaugaccgacggcuccgccuccggcaaggccgacaccaagauccucuucaucgaggagggcaagaucguccacaccuccacccucuccggcuccgcccagcacgucgaggagugcuccugcuacccccgcuaccccggcguccgcugcgucugccgcgacaacuggaagggcuccaaccgccccaucgucgacaucaacaucaaggaccacuccaucgucucccgcuacgucugcuccggccucgucggcgacaccccccgcaagaacgacucccucuccuccucccacugccucgaccccaacaacgaggagggcggccacggcgucaagggcugggccuucgacgacggcaacgacgucuggaugggccgcaccaucaacgagaccucccgccucggcuacgagaccuucaaggucaucgagggcugguccaaccccaaguccaagcuccagaucaaccgccaggucaucgucgaccgcggcgaccgcuccggcuacuccggcaucuucuccgucgagggcaaguccugcaucaaccgcugcuucuacgucgagcucauccgcggccgcaaggaggagaccgagguccucuggaccuccaacuccaucgucgucuucugcggcaccuccggcaccuacggcaccggcuccuggcccgacggcgccgaccucaaccucaugcccaucuga

SEQ ID NO: 120729 - RNA, 1410 nt, Artificial Sequence; identical to SEQ ID NO: 119411
  derived and/or modified CDS sequence (opt2) from neuraminidase__InfluenzaA__AHL95131

SEQ ID NO: 120730 - RNA, 1410 nt, Artificial Sequence; identical to SEQ ID NO: 119919
  derived and/or modified CDS sequence (opt2) from neuraminidase__InfluenzaA__AHL95143

SEQ ID NO: 120731 - RNA, 1410 nt, Artificial Sequence
  derived and/or modified CDS sequence (opt2) from neuraminidase__InfluenzaA__AHL95155
augaaccccaaccagaagaucaucaccaucggcuccgucucccucaccaucuccaccaucugcuucuucaugcagaucgccauccucaucaccaccgucacccuccacuucaagcaguacgaguucaacuccccccccaacaaccaggucaugcucugcgagcccaccaucaucgagcgcaacaucaccgagaucgucuaccucaccaacaccaccaucgagaaggagaucugccccaagcccgccgaguaccgcaacugguccaagccccagugcggcaucaccggcuucgcccccuucuccaaggacaacuccauccgccucuccgccggcggcgacaucugggucacccgcgagcccuacgucuccugcgaccccgacaagugcuaccaguucgcccucggccagggcaccacccucaacaacguccacuccaacaacaccguccgcgaccgcacccccuaccgcacccuccucaugaacgagcucggcguccccuuccaccucggcaccaagcaggucugcaucgccugguccuccuccuccugccacgacggcaaggccuggcuccacgucugcaucaccggcgacgacaagaacgccaccgccuccuucaucuacaacggccgccucgucgacuccgucgucuccugguccaaggagauccuccgcacccaggaguccgagugcgucugcaucaacggcaccugcaccgucgucaugaccgacggcuccgccuccggcaaggccgacaccaagauccucuucaucgaggagggcaagaucguccacaccuccacccucuccggcuccgcccagcacgucgaggagugcuccugcuacccccgcuaccccggcguccgcugcgucugccgcgacaacuggaagggcuccaaccgccccaucgucgacaucaacaucaaggaccacuccaucgucuccuccuacgucugcuccggccucgucggcgacaccccccgcaagaacgacuccuccuccuccucccacugccucgaccccaacaacgaggagggcucccacggcgucaagggcugggccuucgacgacggcaacgacgucuggaugggccgcaccaucaacgagaccucccgccucggcuacgagaccuucaaggucaucgagggcugguccaaccccaaguccaagcuccagaucaaccgccaggucaucgucgaccgcggcgaccgcuccggcuacuccggcaucuucuccgucgagggcaaguccugcaucaaccgcugcuucuacgucgagcucauccgcggccgcaaggaggagaccgagguccucuggaccuccaacuccaucgucgucuucugcggcaccuccggcaccuacggcaccggcuccuggcccgacggcgccgaccucaaccucaugcccaucuga

SEQ ID NO: 120732 - RNA, 1410 nt, Artificial Sequence
  derived and/or modified CDS sequence (opt2) from neuraminidase__InfluenzaA__AHL95167
augaaccccaaccagaagaucaucaccaucggcuccgucucccucaccaucuccaccaucugcuucuucaugcagaucgccauccucaucaccaccgucacccuccacuucaagcaguacgaguucaacuccccccccaacaaccaggucaugcucugcgagcccaccaucaucgagcgcaacaucaccgagaucgucuaccucaccaacaccaccaucgagaaggagaucugccccaagcccgccgaguaccgcaacugguccaagccccagugcgacaucaccggcuucgcccccuucuccaaggacaacuccauccgccucuccgccggcggcgacaucugggucacccgcgagcccuacgucuccugcgaccccgacaagugcuaccaguucgcccucggccagggcaccacccucaacaacguccacuccaacaacaccguccgcgaccgcacccccuaccgcacccuccucaugaacgagcucggcguccccuuccaccucggcaccaagcaggucugcaucgccugguccuccuccuccugccacgacggcaaggccuggcuccacgucugcaucaccggcgacgacaagaacgccaccgccuccuucaucuacaacggccgccucgucgacuccgucgucuccugguccaaggagauccuccgcacccaggaguccgagugcgucugcaucaacggcaccugcaccgucgucaugaccgacggcuccgccuccggcaaggccgacaccaagauccucuucaucgaggagggcaagaucguccacaccuccacccucuccggcuccgcccagcacgucgaggagugcuccugcuacccccgcuaccccggcguccgcugcgucugccgcgacaacuggaagggcuccaaccgccccaucgucgacaucaacaucaaggaccacuccaucgucucccgcuaccucugcuccggccucgucggcgacaccccccgcaagaacgacuccuccuccuccucccacugccucgaccccaacaacgaggagggcggccacggcgucaagggcugggccuucgacgacggcaacgacgucuggaugggccgcaccaucaacgagaccucccgccucggcuacgagaccuucaaggucaucgagggcugguccaaccccaaguccaagcuccagaucaaccgccaggucaucgucgaccgcggcgaccgcuccggcuacuccggcaucuucuccgucgagggcaaguccugcaucaaccgcugcuucuacgucgagcucauccgcggccgcaaggaggagaccgagguccucuggaccuccaacuccaucgucgucuucugcggcaccuccggcaccuacggcaccggcuccuggcccgacggcgccgaccucaaccucaugcccaucuga

SEQ ID NO: 120733 - RNA, 1410 nt, Artificial Sequence; identical to SEQ ID NO: 118182
  derived and/or modified CDS sequence (opt2) from neuraminidase__InfluenzaA__AHL95179

SEQ ID NO: 120734 - RNA, 1410 nt, Artificial Sequence; identical to SEQ ID NO: 118182
  derived and/or modified CDS sequence (opt2) from neuraminidase__InfluenzaA__AHL95191

SEQ ID NO: 120735 - RNA, 1410 nt, Artificial Sequence; identical to SEQ ID NO: 118182
  derived and/or modified CDS sequence (opt2) from neuraminidase__InfluenzaA__AHL95203

SEQ ID NO: 120736 - RNA, 1410 nt, Artificial Sequence; identical to SEQ ID NO: 118182
  derived and/or modified CDS sequence (opt2) from neuraminidase__InfluenzaA__AHL95215

SEQ ID NO: 120737 - RNA, 1410 nt, Artificial Sequence
  derived and/or modified CDS sequence (opt2) from neuraminidase__InfluenzaA__AHL95227
augaaccccaaccagaagaucaucaccaucggcuccgucucccucaccaucuccaccaucugcuucuucaugcagaucgccauccucaucaccaccgucacccuccacuucaagcaguacgaguucaacuccccccccaacaaccaggucaugcucugcgagcccaccaucaucgagcgcaacaucaccgagaucgucuaccucaccaacaccaccaucgagaaggagaucugccccaagcccgccgaguaccgcaacugguccaagccccagugcggcaucaccggcuucgcccccuucuccaaggacaacuccauccgccucuccgccggcggcgacaucugggucacccgcgagcccuacgucuccugcgaccccgacaagugcuaccaguucgcccucggccagggcaccacccucaacaacaugcacuccaacaacaccguccgcgaccgcacccccuaccgcacccuccucaugaacgagcucggcguccccuuccaccucggcaccaagcaggucugcaucgccugguccuccuccuccugccacgacggcaaggccuggcuccacgucugcaucaccggcgacgacaagaacgccaccgccuccuucaucuacaacggccgccucgucgacuccgucgucuccugguccaaggagauccuccgcacccaggaguccgagugcgucugcaucaacggcaccugcaccgucgucaugaccgacggcuccgccuccggcaaggccgacaccaagauccucuucaucgaggagggcaagaucguccacaccuccacccucuccggcuccgcccagcacgucgaggagugcuccugcuacccccgcuaccccggcguccgcugcgucugccgcgacaacuggaagggcuccaaccgccccaucgucgacaucaacaucaaggaccacuccaucgucuccuccuacgucugcuccggccucgucggcgacaccccccgcgagaacgacuccuccuccuccucccacugccucgaccccaacaacgaggagggcggccacggcgucaagggcugggccuucgacgacggcaacgacgucuggaugggccgcaccaucaacgagaccucccgccucggcuacgagaccuucaaggucaucgagggcugguccaaccccaaguccaagcuccagaucaaccgccaggucaucgucgaccgcggcgaccgcuccggcuacuccggcaucuucuccgucgagggcaaguccugcaucaaccgcugcuucuacgucgagcucauccgcggccgcaaggaggagaccgagguccucuggaccuccaacuccaucgucgucuucugcggcaccuccggcaccuacggcaccggcuccuggcccgacggcgccgaccucaaccucaugcccaucuga

SEQ ID NO: 120738 - RNA, 1410 nt, Artificial Sequence; identical to SEQ ID NO: 119919
  derived and/or modified CDS sequence (opt2) from neuraminidase__InfluenzaA__AHL95239

SEQ ID NO: 120739 - RNA, 1410 nt, Artificial Sequence
  derived and/or modified CDS sequence (opt2) from neuraminidase__InfluenzaA__AHL95251
augaaccccaaccagaagaucaucaccaucggcuccgucucccucaccaucuccaccaucugcuucuucaugcagaucgccauccucaucaccaccgucacccuccacuucaagcaguacgaguucaacuccccccccaacaaccaggucaugcucugcgagcccaccaucaucgagcgcaacaucaccgagaucgucuaccucaccaacaccaccaucgagaaggagaucugccccaagcccgccgaguaccgcaacugguccaagccccagugcggcaucaccggcuucgcccccuucuccaaggacaacuccauccgccucuccgccggcggcgacaucugggucacccgcgagcccuacgucuccugcgaccccgacaagugcuaccaguucgcccucggccagggcaccacccucaacaacguccacuccaacaacaccguccgcgaccgcacccccuaccgcacccuccucaugaacgagcucggcguccccuuccaccucggcaccaagcaggucugcaucgccugguccuccuccuccugccacgacggcaaggccuggcuccacgucugcaucaccggcgacgacaagaacgccaccgccuccuucaucuacaacggccgccucgucgacuccgucgucuccugguccaaggagauccuccgcacccaggaguccgagugcgucugcaucaacggcaccugcaccgucgucaugaccgacggcuccgccuccggcaaggccgacaccaagauccucuucaucaaggagggcaagaucguccacaccuccacccucuccggcuccgcccagcacgucgaggagugcuccugcuacccccgcuaccccggcguccgcugcgucugccgcgacaacuggaagggcuccaaccgccccaucgucgacaucaacaucaaggaccacuccaucgucuccuccuacgucugcuccggccucgucggcgacaccccccgcaagaacgacuccuccuccuccucccacugccucgaccccaacaacgaggagggcggccacggcgucaagggcugggccuucgacgacggcaacgacgucuggaugggccgcaccaucaacgagaccucccgccucggcuacgagaccuucaaggucaucgagggcugguccaaccccaaguccaagcuccagaucaaccgccaggucaucgucgaccgcggcgaccgcuccggcuacuccggcaucuucuccgucgagggcaaguccugcaucaaccgcugcuucuacgucgagcucauccgcggccgcaaggaggagaccgagguccucuggaccuccaacuccaucgucgucuucugcggcaccuccggcaccuacggcaccggcuccuggcccgacggcgccgaccucaaccucaugcccaucuga

SEQ ID NO: 120740 - RNA, 1410 nt, Artificial Sequence; identical to SEQ ID NO: 118182
  derived and/or modified CDS sequence (opt2) from neuraminidase__InfluenzaA__AHL95263

SEQ ID NO: 120741 - RNA, 1410 nt, Artificial Sequence
  derived and/or modified CDS sequence (opt2) from neuraminidase__InfluenzaA__AHL95275
augaaccccaaccagaagaucaucaccaucggcuccgucucccucaccaucuccaccaucugcuucuucaugcagaucgccauccucaucaccaccgucacccuccacuucaagcaguacgaguucaacuccccccccaacaaccaggucaugcucugcgagcccaccaucaucgagcgcaacaucaccgagaucgucuaccucaccaacaucaccaucgagaaggagaucugccccaagcccgccgaguaccgcaacugguccaagccccagugcggcaucaccggcuucgcccccuucuccaaggacaacuccauccgccucuccgccggcggcgacaucugggucacccgcgagcccuacgucuccugcgaccccgacaagugcuaccaguucgcccucggccagggcaccacccucaacaacguccacuccaacaacaccguccgcgaccgcacccccuaccgcacccuccucaugaacgagcucggcguccccuuccaccucggcaccaagcaggucugcaucgccugguccuccuccuccugccacgacggcaaggccuggcuccacgucugcaucaccggcgacgacaagaacgccaccgccuccuucaucuacaacggccgccucgucgacuccgucgucuccugguccaaggagauccuccgcacccaggaguccgagugcgucugcaucaacggcaccugcaccgucgucaugaccgacggcuccgccuccggcaaggccgacaccaagauccucuucaucgaggagggcaagaucguccacaccuccacccucuccggcuccgcccagcacgucgaggagugcuccugcuacccccgcuaccccggcguccgcugcgucugccgcgacaacuggaagggcuccaaccgccccaucgucgacaucaacaucaaggaccacuccaucgucuccuccuacgucugcuccggccucgucggcgacaccccccgcaagaacgacuccuccuccuccucccacugccucgaccccaacaacgaggagggcggccacggcgucaagggcugggccuucgacgacggcaacgacgucuggaugggccgcaccaucaacgagaccucccgccucggcuacgagaccuucaaggucaucgagggcugguccaaccccaaguccaagcuccagaucaaccgccaggucaucgucgaccgcggcgaccgcuccggcuacuccggcaucuucuccgucgagggcaaguccugcaucaaccgcugcuucuacgucgagcucauccgcggccgcaaggaggagaccgagguccucuggaccuccaacuccaucgucgucuucugcggcaccuccggcaccuacggcaccggcuccuggcccgacggcgccgaccucaaccucaugcccaucuga

SEQ ID NO: 120742 - RNA, 1410 nt, Artificial Sequence; identical to SEQ ID NO: 119425
  derived and/or modified CDS sequence (opt2) from neuraminidase__InfluenzaA__AHL95299

SEQ ID NO: 120743 - RNA, 1410 nt, Artificial Sequence
  derived and/or modified CDS sequence (opt2) from neuraminidase__InfluenzaA__AHL95310
augaaccccaaccagaagaucaucaccaucggcuccgucucccucaccaucuccaccaucugcuucuucaugcagaucgccauccucaucaccaccgucacccuccacuucaagcaguacgaguucaacuccccccccaacaaccaggucaugcucugcgagcccaccaucaucgagcgcaacaucaccgagaucgucuaccucaccaacaccaccaucgagaaggagaucugccccaagcccgccgaguaccgcaacugguccaagccccagugcgacaucaccggcuucgcccccuucuccaaggacaacuccauccgccucuccgccggcggcgacaucugggucacccgcgagcccuacgucuccugcgaccccgacaagugcuaccaguucgcccucggccagggcaccacccucaacaacguccacuccaacaacaccguccgcgaccgcacccccuaccgcacccuccucaugaacgagcucggcguccccuuccaccucggcaccaagcaggucugcaucgccugguccuccuccuccugccacgacggcaaggccuggcuccacgucugcaucaccggcgacgacaagaacgccaccgccuccuucaucuacaacggccgccucgucgacuccgucgucuccugguccaaggagauccuccgcacccaggaguccgagugcgucugcaucaacggcaccugcaccgucgucaugaccgacggcuccgccuccggcaaggccgacaccaagauccucuucaucgaggagggcaagaucguccacaccuccacccucuccggcuccgcccagcacgucgaggagugcuccugcuacccccgcuaccccggcguccgcugcgucugccgcgacaacuggaagggcuccaaccgccccaucgucgacaucaacaucaaggaccacuccaucgucucccgcuacgucugcuccggccucgucggcgacaccccccgcaagaacgacuccuccuccuccucccacugccucgaccccaacaacgaggagggcggccacggcgucaagggcugggccuucgacgacggcaacgacgucuggaugggccgcaccaucaacgagaccucccgccucggcuacgagaccuucaaggucaucgagggcugguccaaccccaaguccaagcuccagaucaaccgccaggucaucgucgaccgcggcgaccgcuccggcuacuccggcaucuucuccgucgagggcaaguccugcaucaaccgcugcuucuacgucgagcucauccgcggccgcaaggaggagaccgagguccucuggaccuccaacuccaucgucgucuucugcggcaccuccggcaccuacggcaccggcuccuggcccgacggcgccaaccucaaccucaugcccaucuga

SEQ ID NO: 120744 - RNA, 1410 nt, Artificial Sequence; identical to SEQ ID NO: 119930
  derived and/or modified CDS sequence (opt2) from neuraminidase__InfluenzaA__AHL95322

SEQ ID NO: 120745 - RNA, 1410 nt, Artificial Sequence; identical to SEQ ID NO: 119907
  derived and/or modified CDS sequence (opt2) from neuraminidase__InfluenzaA__AHL95334

SEQ ID NO: 120746 - RNA, 1410 nt, Artificial Sequence; identical to SEQ ID NO: 118182
  derived and/or modified CDS sequence (opt2) from neuraminidase__InfluenzaA__AHL95423

SEQ ID NO: 120747 - RNA, 1410 nt, Artificial Sequence; identical to SEQ ID NO: 119930
  derived and/or modified CDS sequence (opt2) from neuraminidase__InfluenzaA__AHL95435

SEQ ID NO: 120748 - RNA, 1410 nt, Artificial Sequence; identical to SEQ ID NO: 119907
  derived and/or modified CDS sequence (opt2) from neuraminidase__InfluenzaA__AHL95447

SEQ ID NO: 120749 - RNA, 1410 nt, Artificial Sequence
  derived and/or modified CDS sequence (opt2) from neuraminidase__InfluenzaA__AHL95461
augaaccccaaccagaagaucaucaccaucggcuccgucucccucaccaucuccaccaucugcuucuucaugcagaucgccauccucaucaccaccgucacccuccacuucaagcaguacgaguucaaccccccccccaacaaccaggucaugcucugcgagcccaccaucaucgagcgcaacaucaccgagaucgucuaccucaccaacaccaccaucgagaaggagaucugccccaagcccgccgaguaccgcaacugguccaagccccagugcggcaucaccggcuucgcccccuucuccaaggacaacuccauccgccucuccgccggcggcgacaucugggucacccgcgagcccuacgucuccugcggccccgacaagugcuaccaguucgcccucggccagggcaccacccucaacaacaugcacuccaacaacaccguccgcgaccgcacccccuaccgcacccuccucaugaacgagcucggcguccccuuccaccucggcaccaagcaggucugcaucgccugguccuccuccuccugccacgacggcaaggccuggcuccacgucugcaucaccggcgacgacaagaacgccaccgccuccuucaucuacaacggccgccucgucgacuccgucgucuccugguccaaggagauccuccgcacccaggaguccgagugcgucugcaucaacggcaccugcaccgucgucaugaccgacggcuccgccuccggcaaggccgacaccaagauccucuucaucgaggagggcaagaucguccacaccuccacccucuccggcuccgcccagcacgucgaggagugcuccugcuacccccgcuaccccggcguccgcugcgucugccgcgacaacuggaagggcuccaaccgccccaucgucgacaucaacaucaaggaccacuccaucgucuccuccuacgucugcuccggccucgucggcgacaccccccgcaagaacgacuccuccuccuccucccacugccucgaccccaacaacgaggagggcggccacggcgucaagggcugggccuucgacgacggcaacgacgucuggaugggccgcaccaucaacgagaccucccgccucggcuacgagaccuucaaggucaucgagggcugguccaaccccaaguccaagcuccagaucaaccgccaggucaucgucgaccgcggcgaccgcuccggcuacuccggcaucuucuccgucgagggcaaguccugcaucaaccgcugcuucuacgucgagcucauccgcggccgcaaggaggagaccgagguccucuggaccuccaacuccaucgucgucuucugcggcaccuccggcaccuacggcaccggcuccuggcccgacggcgccgaccucaaccucaugcccaucuga

SEQ ID NO: 120750 - RNA, 1410 nt, Artificial Sequence; identical to SEQ ID NO: 118958
  derived and/or modified CDS sequence (opt2) from neuraminidase__InfluenzaA__AHL95473

SEQ ID NO: 120751 - RNA, 1410 nt, Artificial Sequence; identical to SEQ ID NO: 118182
  derived and/or modified CDS sequence (opt2) from neuraminidase__InfluenzaA__AHL95485

SEQ ID NO: 120752 - RNA, 1410 nt, Artificial Sequence; identical to SEQ ID NO: 118182
  derived and/or modified CDS sequence (opt2) from neuraminidase__InfluenzaA__AHL95497

SEQ ID NO: 120753 - RNA, 1410 nt, Artificial Sequence
  derived and/or modified CDS sequence (opt2) from neuraminidase__InfluenzaA__AHL95509
augaaccccaaccagaagaucaucaccaucggcuccgucucccucaccaucuccaccaucugcuucuucaugcagaucgccauccucaucaccaccgucacccuccacuucaagcaguacgaguucaacuccccccccaacaaccaggucaugcucugcgagcccaccaucaucgagcgcaacaucaccgagaucgucuaccucaccaacaccaccaucgagaaggagaucugccccaagcccgccgaguaccgcaacugguccaagccccagugcggcaucaccggcuucgcccccuucuccaaggacaacuccauccgccucuccgccggcggcgacaucugggucacccgcgagcccuacgucuccugcgaccccgacaagugcuaccaguucgcccucggccagggcaccacccucaacaacguccacuccaacaacaccguccgcgaccgcacccccuaccgcacccuccucaugaacgagcucggcguccccuuccaccucggcaccaagcaggucugcaucgccugguccuccuccuccugccacgacggcaaggccuggcuccacgucugcaucaccggcgacgacaagaacgccaccgccuccuucaucuacaacggccgccucgucgacuccgucgucuccugguccaaggagauccuccgcacccaggaguccgagugcgucugcaucaacggcaccugcaccgucgucaugaccgacggcuccgccuccggcaaggccgacaccaagauccucuucaucgaggagggcaagaucguccacaccuccacccucuccggcuccgcccagcacgucgaggagugcuccugcuacccccgcuaccccggcguccgcugcgucugccgcgacaacuggaagggcuccaaccgccccaucgucgacaucaacaucaagaaccacuccaucgucuccuccuacgucugcuccggccucgucggcgacaccccccgcaagaacgacuccuccuccuccucccacugccucgaccccaacaacgaggagggcggccacggcgucaagggcugggccuucgacgacggcaacgacgucuggaugggccgcaccaucaacgagaccucccgccucggcuacgagaccuucaaggucaucgagggcugguccaaccccaaguccaagcuccagaucaaccgccaggucaucgucgaccgcggcgaccgcuccggcuacuccggcaucuucuccgucgagggcaaguccugcaucaaccgcugcuucuacgucgagcucauccgcggccgcaaggaggagaccgagguccucuggaccuccaacuccaucgucgucuucugcggcaccuccggcaccuacggcaccggcuccuggcccgacggcgccgaccucaaccucaugcccaucuga

SEQ ID NO: 120754 - RNA, 1410 nt, Artificial Sequence; identical to SEQ ID NO: 118182
  derived and/or modified CDS sequence (opt2) from neuraminidase__InfluenzaA__AHL95521

SEQ ID NO: 120755 - RNA, 1410 nt, Artificial Sequence; identical to SEQ ID NO: 118182
  derived and/or modified CDS sequence (opt2) from neuraminidase__InfluenzaA__AHL95533

SEQ ID NO: 120756 - RNA, 1410 nt, Artificial Sequence; identical to SEQ ID NO: 118182
  derived and/or modified CDS sequence (opt2) from neuraminidase__InfluenzaA__AHL95545

SEQ ID NO: 120757 - RNA, 1410 nt, Artificial Sequence
  derived and/or modified CDS sequence (opt2) from neuraminidase__InfluenzaA__AHL95557
augaaccccaaccagaagaucaucaccaucggcuccgucucccucaccaucuccaccaucugcuucuucauccagaucgccauccucaucaccaccgucacccuccacuucaagcaguacgaguucaacuccccccccaacaaccaggucaugcucugcgagcccaccaucaucgagcgcaacaucaccgagaucgucuaccucaccaacaccaccaucgagaaggagaucugccccaagcccgccgaguaccgcaacugguccaagccccagugcggcaucaccggcuucgcccccuucuccaaggacaacuccauccgccucuccgccggcggcgacaucugggucacccgcgagcccuacgucuccugcgaccccgacaagugcuaccaguucgcccucggccagggcaccacccucaacaacguccacuccaacaacaccgcccgcgaccgcacccccuaccgcacccuccucaugaacgagcucggcguccccuuccaccucggcaccaagcaggucugcaucgccugguccuccuccuccugccacgacggcaaggccuggcuccacgucugcaucaccggcgacgacaagaacgccaccgccuccuucaucuacaacggccgccucgucgacuccgucgucuccugguccaaggagauccuccgcacccaggaguccgagugcgucugcaucaacggcaccugcaccgucgucaugaccgacggcuccgccuccggcaaggccgacaccaagauccucuucaucgaggagggcaagaucguccacaccuccacccucuccggcuccgcccagcacgucgaggagugcuccugcuacccccgcuaccccggcguccgcugcgucugccgcgacaacuggaagggcuccaaccgccccaucgucgacaucaacaucaaggaccacuccaucgucuccuccuacgucugcuccggccucgucggcgacaccccccgcaagaacgacuccuccuccuccucccacugccucgaccccaacaacgaggagggcggccacggcgucaagggcugggccuucgacgacggcaacgacgucuggaugggccgcaccaucaacgagaccucccgccucggcuacgagaccuucaaggucaucgagggcugguccaaccccgaguccaagcuccagaucaaccgccaggucaucgucgaccgcggcgaccgcuccggcuacuccggcaucuucuccgucgagggcaaguccugcaucaaccgcugcuucuacgucgagcucauccgcggccgcaaggaggagaccgagguccucuggaccuccaacuccaucgucgucuucugcggcaccuccggcaccuacggcaccggcuccuggcccgacggcgccgaccucaaccucaugcccaucuga

SEQ ID NO: 120758 - RNA, 1410 nt, Artificial Sequence; identical to SEQ ID NO: 119907
  derived and/or modified CDS sequence (opt2) from neuraminidase__InfluenzaA__AHL95569

SEQ ID NO: 120759 - RNA, 1410 nt, Artificial Sequence; identical to SEQ ID NO: 118182
  derived and/or modified CDS sequence (opt2) from neuraminidase__InfluenzaA__AHL95581

SEQ ID NO: 120760 - RNA, 1410 nt, Artificial Sequence
  derived and/or modified CDS sequence (opt2) from neuraminidase__InfluenzaA__AHL95605
augaaccccaaccagaagaucaucaccaucggcuccgucucccucaccaucuccaccaucugcuucuucaugcagaucgccauccucaucaccaccgucacccuccacuucaagcaguacgaguucaacuccccccccaacaaccaggucaugcucugcgagcccaccaucaucgagcgcaacaucaccgagaucgucuaccucaccaacaccaccaucgagaaggagaucugccccaagcccgccgaguaccgcaacugguccaagccccagugcggcaucaccggcuucgcccccuucuccaaggacaacuccauccgccucuccgccggcggcgacaucugggucacccgcgagcccuacgucuccugcgaccccgacaagugcuaccaguucgcccucggccagggcaccacccucaacaacguccacuccaacaacaccguccgcgaccgcacccccuaccgcacccuccucaugaacgagcucggcguccccuuccaccucggcaccaagcaggucugcaucgccugguccuccuccuccugccacgacggcaaggccuggcuccacgucugcaucaccggcgacgacaagaacgccaccgccuccuucaucuacaacggccgccucgucgacuccgucgucuccugguccaaggagauccuccgcacccaggaguccgagugcgucugcaucaacggcaccugcaccgucgucaugaccgacggcuccgccuccggcaaggccgacaccaagauccucuucaucgaggagggcaagaucguccacaccuccacccucuccggcuccgcccagcacgucgaggagugcuccugcuacccccgcuaccccggcguccgcugcgucugccgcgacaacuggaagggcuccaaccgccccaucgucgacaucaacaucaaggaccacuccaucgucuccuccuacgucugcuccggccucgucggcgacaccccccgcaagaacgacaucuccuccuccucccacugccucgaccccaacaacgaggagggcggccacggcgucaagggcugggccuucgacgacggcaacgacgucuggaugggccgcaccaucaacgagaccucccgccucggcuacgagaccuucaaggucaucgagggcugguccaaccccaaguccaagcuccagaucaaccgccaggucaucgucgaccgcggcgaccgcuccggcuacuccggcaucuucuccgucgagggcaaguccugcaucaaccgcugcuucuacgucgagcucauccgcggccgcaaggaggagaccgagguccucuggaccuccaacuccaucgucgucuucugcggcaccuccggcaccuacggcaccggcuccuggcccgacggcgccgaccucaaccucaugcccaucuga

SEQ ID NO: 120761 - RNA, 1410 nt, Artificial Sequence; identical to SEQ ID NO: 118182
  derived and/or modified CDS sequence (opt2) from neuraminidase__InfluenzaA__AHL95617

SEQ ID NO: 120762 - RNA, 1410 nt, Artificial Sequence; identical to SEQ ID NO: 118182
  derived and/or modified CDS sequence (opt2) from neuraminidase__InfluenzaA__AHL95629

SEQ ID NO: 120763 - RNA, 1410 nt, Artificial Sequence; identical to SEQ ID NO: 118182
  derived and/or modified CDS sequence (opt2) from neuraminidase__InfluenzaA__AHL95641

SEQ ID NO: 120764 - RNA, 1410 nt, Artificial Sequence; identical to SEQ ID NO: 118182
  derived and/or modified CDS sequence (opt2) from neuraminidase__InfluenzaA__AHL95653

SEQ ID NO: 120765 - RNA, 1410 nt, Artificial Sequence; identical to SEQ ID NO: 120760
  derived and/or modified CDS sequence (opt2) from neuraminidase__InfluenzaA__AHL95665

SEQ ID NO: 120766 - RNA, 1410 nt, Artificial Sequence; identical to SEQ ID NO: 118182
  derived and/or modified CDS sequence (opt2) from neuraminidase__InfluenzaA__AHL95677

SEQ ID NO: 120767 - RNA, 1410 nt, Artificial Sequence
  derived and/or modified CDS sequence (opt2) from neuraminidase__InfluenzaA__AHL95689
augaaccccaaccagaagaucaucaccaucggcuccgucucccucaccaucuccaccaucugcuucuucaugcagaucgccauccucaucaccaccgucacccuccacuucaagcaguacgaguucgacuccccccccaacaaccaggucaugcucugcgagcccaccaucaucgagcgcaacaucaccgagaucgucuaccucaccaacaccaccaucgagaaggagaucugccccaagcccgccgaguaccgcaacugguccaagccccagugcggcaucaccggcuucgcccccuucuccaaggacaacuccauccgccucuccgccggcggcgacaucugggucacccgcgagcccuacgucuccugcgaccccgacaagugcuaccaguucgcccucggccagggcaccacccucaacaacguccacuccaacaacaccguccgcgaccgcacccccuaccgcacccuccucaugaacgagcucggcguccccuuccaccucggcaccaagcaggucugcaucgccugguccuccuccuccugccacgacggcaaggccuggcuccacgucugcaucaccggcgacgacaagaacgccaccgccuccuucaucuacaacggccgccucgucgacuccgucgucuccugguccaaggagauccuccgcacccaggaguccgagugcgucugcaucaacggcaccugcaccgucgucaugaccgacggcuccgccuccggcaaggccgacaccaagauccucuucaucgaggagggcaagaucguccacaccuccacccucuccggcuccgcccagcacgucgaggagugcuccugcuacccccgcuaccccggcguccgcugcgucugccgcgacaacuggaagggcuccaaccgccccaucgucgacaucaacaucaaggaccacuccaucgucuccuccuacgucugcuccggccucgucggcgacaccccccgcaagaacgacuccuccuccuccucccacugccucgaccccaacaacgaggagggcggccacggcgucaagggcugggccuucgacgacggcaacgacgucuggaugggccgcaccaucaacgagaccucccgccucggcuacgagaccuucaaggucaucgagggcugguccaaccccaaguccaagcuccagaucaaccgccaggucaucgucgaccgcggcgaccgcuccggcuacuccggcaucuucuccgucgagggcaaguccugcaucaaccgcugcuucuacgucgagcucauccgcggccgcaaggaggagaccgagguccucuggaccuccaacuccaucgucgucuucugcggcaccuccggcaccuacggcaccggcuccuggcccgacggcgccaaccucaaccucaugcccaucuga

SEQ ID NO: 120768 - RNA, 1410 nt, Artificial Sequence; identical to SEQ ID NO: 118182
  derived and/or modified CDS sequence (opt2) from neuraminidase__InfluenzaA__AHL95701

SEQ ID NO: 120769 - RNA, 1410 nt, Artificial Sequence; identical to SEQ ID NO: 118182
  derived and/or modified CDS sequence (opt2) from neuraminidase__InfluenzaA__AHL95713

SEQ ID NO: 120770 - RNA, 1410 nt, Artificial Sequence
  derived and/or modified CDS sequence (opt2) from neuraminidase__InfluenzaA__AHL95725
augaaccccaaccagaagaucaucaccaucggcuccgucucccucaccaucuccaccaucugcuucuucaugcagaucgccauccucaucaccaccgucacccuccacuucaagcaguacgaguucgaccccccccccaacaaccaggucaugcucugcgagcccaccaucaucgagcgcaacaucaccgagaucgucuaccucaccaacaccaccaucgagaaggagaucugccccaagcccgccgaguaccgcaacugguccaagccccagugcggcaucaccggcuucgcccccuucuccaaggacaacuccauccgccucuccgccggcggcgacaucugggucacccgcgagcccuacgucuccugcgaccccgacaagugcuaccaguucgcccucggccagggcaccacccucaacaacguccacuccaacaacaccguccgcgaccgcacccccuaccgcacccuccucaugaacgagcucggcguccccuuccaccucggcaccaagcaggucugcaucgccugguccuccuccuccugccacgacggcaaggccuggcuccacgucugcaucaccggcgacgacaagaacgccaccgccuccuucaucuacaacggccgccucgucgacuccgucgucuccugguccaaggagauccuccgcacccaggaguccgagugcgucugcaucaacggcaccugcaccgucgucaugaccgacggcuccgccuccggcaaggccgacaccaagauccucuucaucgaggagggcaagaucguccacaccuccacccucuccggcuccgcccagcacgucgaggagugcuccugcuacccccgcuaccccggcguccgcugcgucugccgcgacaacuggaagggcuccaaccgccccaucgucgacaucaacaucaaggaccacuccaucgucuccuccuacgucugcuccggccucgucggcgacaccccccgcaagaacgacuccuccuccuccucccacugccucgaccccaacaacgaggagggcggccacggcgucaagggcugggccuucgacgacggcaacgacgucuggaugggccgcaccaucaacgagaccucccgccucggcuacgagaccuucaaggucaucgagggcugguccaaccccaaguccaagcuccagaucaaccgccaggucaucgucgaccgcggcgaccgcuccggcuacuccggcaucuucuccgucgagggcaaguccugcaucaaccgcugcuucuacgucgagcucauccgcggccgcaaggaggagaucgagguccucuggaccuccaacuccaucgucgucuucugcggcaccuccggcaccuacggcaccggcuccuggcccgacggcgccgaccucaaccucaugcccaucuga

SEQ ID NO: 120771 - RNA, 1410 nt, Artificial Sequence; identical to SEQ ID NO: 119919
  derived and/or modified CDS sequence (opt2) from neuraminidase__InfluenzaA__AHL95737

SEQ ID NO: 120772 - RNA, 1410 nt, Artificial Sequence
  derived and/or modified CDS sequence (opt2) from neuraminidase__InfluenzaA__AHL95749
augaaccccaaccagaagaucaucaccaucggcuccgucucccucaccaucuccaccaucugcuucuucaugcagaucgccauccucaucaccaccgucacccuccacuucaagcaguacgaguucaacuccccccccaacaaccaggucaugcucugcgagcccaccaucaucgagcgcaacaucaccgagaucgucuaccucaccaacaccaccaucgagaaggagaucugccccaagcccgccgaguaccgcaacugguccaagccccagugcggcaucaccggcuucgcccccuucuccaaggacaacuccauccgccucuccgccggcggcgacaucugggucacccgcgagcccuacgucuccugcgaccccgacaagugcuaccaguucgcccucggccagggcaccacccucaacaacguccacuccaacaacaccgcccgcgaccgcacccccuaccgcacccuccucaugaacgagcucggcguccccuuccaccucggcaccaagcaggucugcaucgccugguccuccuccuccugccacgacggcaaggccuggcuccacgucugcaucaccggcgacgacaagaacgccaccgccuccuucaucuacaacggccgccucgucgacuccgucgucuccugguccaaggagauccuccgcacccaggaguccgagugcgucugcaucaacggcaccugcaccgucgucaugaccgacggcuccgccuccggcaaggccgacaccaagauccucuucaucgaggagggcaagaucguccacaccuccacccucuccggcuccgcccagcacgucgaggagugcuccugcuacccccgcuaccccggcguccgcugcgucugccgcgacaacuggaagggcuccaaccgccccaucgucgacaucaacaucaaggaccacuccaucgucuccuccuacgucugcuccggccucgucggcgacaccccccgcaagaacgacuccuccuccuccucccacugccucgaccccaacaacgaggagggcggccacggcgucaagggcugggccuucgacgacggcaacgacgucuggaugggccgcaccaucaacgagaccucccgccucggcuacgagaccuucaaggucaucgagggcugguccaaccccaaguccaagcuccagaucaaccgccaggucaucgucgaccgcggcgaccgcuccggcuacuccggcaucuucuccgucgagggcaaguccugcaucaaccgcugcuucuacgucgagcucauccgcggccgcaaggaggagaccgagguccucuggaccuccaacuccaucgucgucuucugcggcaccuccggcaccuacggcaccggcuccuggcccgacggcgccgaccucaaccucaugcccaucuga

SEQ ID NO: 120773 - RNA, 1410 nt, Artificial Sequence; identical to SEQ ID NO: 118182
  derived and/or modified CDS sequence (opt2) from neuraminidase__InfluenzaA__AHL95761

SEQ ID NO: 120774 - RNA, 1410 nt, Artificial Sequence; identical to SEQ ID NO: 118182
  derived and/or modified CDS sequence (opt2) from neuraminidase__InfluenzaA__AHL95773

SEQ ID NO: 120775 - RNA, 1410 nt, Artificial Sequence
  derived and/or modified CDS sequence (opt2) from neuraminidase__InfluenzaA__AHL95785
augaaccccaaccagaagaucaucaccaucggcuccgucucccucaccaucuccaccaucugcuucuucaugcagaucgccauccucaucaccaccgucacccuccacuucaagcaguacgaguucaacuccccccccaacaaccaggucaugcucugcgagcccaccaucaucgagcgcaacaucaccgagaucgucuaccucaccaacaccaccaucgagaaggagaucugccccaagcccgccgaguaccgcaacugguccaagccccagugcgacaucaccggcuucgcccccuucuccaaggacaacuccguccgccucuccgccggcggcgacaucugggucacccgcgagcccuacgucuccugcgaccccgacaagugcuaccaguucgcccucggccagggcaccacccucaacaacguccacuccaacaacaccguccgcgaccgcacccccuaccgcacccuccucaugaacgagcucggcguccccuuccaccucggcaccaagcaggucugcaucgccugguccuccuccuccugccacgacggcaaggccuggcuccacgucugcaucaccggcgacgacaagaacgccaccgccuccuucaucuacaacggccgccucgucgacuccgucgucuccugguccaaggagauccuccgcacccaggaguccgagugcgucugcaucaacggcaccugcaccgucgucaugaccgacggcuccgccuccggcaaggccgacaccaagauccucuucaucgaggagggcaagaucguccacaccuccacccucuccggcuccgcccagcacgucgaggagugcuccugcuacccccgcuaccccggcguccgcugcgucugccgcgacaacuggaagggcuccaaccgccccaucgucgacaucaacaucaaggaccacuccaucgucuccuccuacgucugcuccggccucgucggcgacaccccccgcaagaacgacuccuccuccuccucccacugccucgaccccaacaacgaggagggcggccacggcgucaagggcugggccuucgacgacggcaacgacgucuggaugggccgcaccaucaacgagaccucccgccucggcuacgagaccuucaaggucaucgagggcugguccaaccccaaguccaagcuccagaucaaccgccaggucaucgucgaccgcggcgaccgcuccggcuacuccggcaucuucuccgucgagggcaaguccugcaucaaccgcugcuucuacgucgagcucauccgcggccgcaaggaggagaccgagguccucuggaccuccaacuccaucgucgucuucugcggcaccuccggcaccuacggcaccggcuccuggcccgacggcgccgaccucaaccucaugcccaucuga

SEQ ID NO: 120776 - RNA, 1410 nt, Artificial Sequence; identical to SEQ ID NO: 119907
  derived and/or modified CDS sequence (opt2) from neuraminidase__InfluenzaA__AHL95797

SEQ ID NO: 120777 - RNA, 1410 nt, Artificial Sequence; identical to SEQ ID NO: 118182
  derived and/or modified CDS sequence (opt2) from neuraminidase__InfluenzaA__AHL95833

SEQ ID NO: 120778 - RNA, 1410 nt, Artificial Sequence; identical to SEQ ID NO: 119907
  derived and/or modified CDS sequence (opt2) from neuraminidase__InfluenzaA__AHL95845

SEQ ID NO: 120779 - RNA, 1410 nt, Artificial Sequence
  derived and/or modified CDS sequence (opt2) from neuraminidase__InfluenzaA__AHL95857
augaaccccaaccagaagaucaucuccaucggcuccgucucccucaccaucuccaccaucugcuucuucaugcagaucgccauccucaucaccaccgucacccuccacuucaagcaguacgaguucaacuccccccccaacaaccaggucaugcucugcgagcccaccaucaucgagcgcaacaucaccgagaucgucuaccucaccaacaccaccaucgagaaggagaucugccccaagcccgccgaguaccgcaacugguccaagccccagugcggcaucaccggcuucgcccccuucuccaaggacaacuccauccgccucuccgccggcggcgacaucugggucacccgcgagcccuacgucuccugcgaccccgacaagugcuaccaguucgcccucggccagggcaccacccucaacaacguccacuccaacaacaccguccgcgaccgcacccccuaccgcacccuccucaugaacgagcucggcguccccuuccaccucggcaccaagcaggucugcaucgccugguccuccuccuccugccacgacggcaaggccuggcuccacgucugcaucaccggcgacgacaagaacgccaccgccuccuucaucuacaacggccgccucgucgacuccgucgucuccugguccaaggagauccuccgcacccaggaguccgagugcgucugcaucaacggcaccugcaccgucgucaugaccgacggcuccgccuccggcaaggccgacaccaagauccucuucaucgaggagggcaagaucguccacaccuccacccucuccggcuccgcccagcacgucgaggagugcuccugcuacccccgcuaccccggcguccgcugcgucugccgcgacaacuggaagggcuccaaccgccccaucgucgacaucaacaucaaggaccacuccaucgucuccuccuacgucugcuccggccucgucggcgacaccccccgcaagaacgacuccuccuccuccucccacugccucgaccccaacaacgaggagggcggccacggcgucaagggcugggccuucgacgacggcaacgacgucuggaugggccgcaccaucaacgagaccucccgccucggcuacgagaccuucaaggucaucgagggcugguccaaccccaaguccaagcuccagaucaaccgccaggucaucgucgaccgcggcgaccgcuccggcuacuccggcaucuucuccgucgagggcaaguccugcaucaaccgcugcuucuacgucgagcucauccgcggccgcaaggaggagaccgagguccucuggaccuccaacuccaucgucgucuucugcggcaccuccggcaccuacggcaccggcuccuggcccgacggcgccgaccucaaccucaugcccaucuga

SEQ ID NO: 120780 - RNA, 1410 nt, Artificial Sequence; identical to SEQ ID NO: 118182
  derived and/or modified CDS sequence (opt2) from neuraminidase__InfluenzaA__AHL95869

SEQ ID NO: 120781 - RNA, 1410 nt, Artificial Sequence
  derived and/or modified CDS sequence (opt2) from neuraminidase__InfluenzaA__AHL95881
augaaccccaaccagaagaucaucaccaucggcuccgucugcaugaccaucggcauggccaaccucauccuccagaucggcaacaucaucuccaucuggaucucccacuccauccaggucggcaaccagucccagaucgagaccugcaaccaguccgucaucaccuacgagaacaacaccugggucaaccagaccuacgucaacaucuccaacaccaaccucgccgccggccaguccgucgucuccgucaagcucgccggcaacuccucccucugccccgucuccggcugggccaucuacuccaaggacaacuccguccgcaucggcuccaagggcgacgucuucgucauccgcgagcccuucaucuccugcuccccccucgagugccgcaccuucuuccucacccagggcgcccuccucaacgacaagcacuccaacggcaccaucaaggaccgcucccccuaccgcacccucauguccugccccaucggcgagguccccucccccuacaacucccgcuucgaguccgucgccugguccgccuccgccugccacgacggcaucaacuggcucaccaucggcaucuccggccccgacuccggcgccgucgccguccucaaguacaacggcaucaucaccgacaccaucaaguccuggcgcaacaacauccuccgcacccaggaguccgagugcgccugcgucaacggcuccugcuucaccaucaugaccgacggccccuccgacggccaggccuccuacaagaucuuccgcaucgagaagggcaagaucgucaaguccgucgagaugaacgcccccaacuaccacuacgaggagugcuccugcuaccccgacuccuccgagaucaccugcgucugccgcgacaacuggcacggcuccaaccgccccugggucuccuucaaccagaaccucgaguaccagaucggcuacaucugcuccggcaucuucggcgacaacccccgccccaacgacaagaccggcuccugcggccccgucuccuccaacggcgccaacggcgucaagggcuucuccuucaaguacggcaacggcgucuggaucggccgcaccaaguccaucuccucccgcaagggcuucgagaugaucugggaccccaacggcuggaccggcaccgacaacaacuucuccaucaagcaggacaucgucggcaucaacgagugguccggcuacuccggcuccuucguccagcaccccgagcucaccggccucgacugcauccgccccugcuucugggucgagcucauccgcggccgccccaaggagaacaccaucuggaccuccggcuccuccaucuccuucugcggcgucaacuccgacaccgucggcugguccuggcccgacggcgccgagcuccccuucaccaucgacaaguga

SEQ ID NO: 120782 - RNA, 1410 nt, Artificial Sequence
  derived and/or modified CDS sequence (opt2) from neuraminidase__InfluenzaA__AHL95892
augaaccccaaccagaagaucaucaccaucggcuccgucucccucaccaucuccaccaucugcuucuucaugcagaucgccauccucaucaccaccgucacccuccacuucaagcaguacgaguucaacuccccccccaacaaccaggucaugcucugcgagcccaccaucaucgagcgcaacaucaccgagaucgucuaccucaccaacaccaccaucgagaaggagaucugccccaagcccgccgaguaccgcaacugguccaagccccagugcggcaucaccggcuucgcccccuucuccaaggacaacuccauccgccucuccgccggcggcgacaucugggucacccgcgagcccuacgucuccugcgaccccgacaagugcuaccaguucgcccucggccagggcaccacccucaacaacguccacuccaacaacaccguccgcgaccgcacccccuaccgcacccuccucaugaacgagcucggcguccccuuccaccucggcaccaagcaggucugcaucgccugguccuccuccuccugccacgacggcaaggccuggcuccacgucugcaucaccggcgacgacaagaacgccaccgccuccuucaucuacaacggccgccucgucgacuccgucgucuccugguccaaggagauccuccgcacccaggaguccgagugcgucugcaucaacggcaccugcaccgucgucaugaccgacggcuccgccuccggcaaggccgacaccaagauccucuucaucgaggagggcaagaucguccacaccuccacccucuccggcuccgcccagcacgucgaggagugcuccugcuacccccgcuaccccggcguccgcugcgucugccgcgacaacuggaagggcuccaaccgccccaucgucgacaucaacaucaaggaccacuccaucgucucccgcuacgucugcuccggccucgucggcgacaccccccgcaagaacgacuccuccuccuccucccacugccucgaccccaacaacgaggagggcggccacggcgucaagggcugggccuucgacgacggcaacgacgucuggaugggccgcaccaucaacgagaccucccgccucggcuacgagaccuucaaggucaucgagggcugguccaaccccaaguccaagcuccagaucaaccgccaggucaucgucgaccgcggcgaccgcuccggcuacuccggcaucuucuccgucgagggcaaguccugcaucaaccgcugcuucuacgucgagcucauccgcggccgcaaggaggagaccgagguccucuggaccuccaacuccaucgucgucuucugcggcaccuccggcaccuacggcaccggcuccuggcccgacggcgccgaccucaaccucaugcccaucuga

SEQ ID NO: 120783 - RNA, 1410 nt, Artificial Sequence; identical to SEQ ID NO: 118182
  derived and/or modified CDS sequence (opt2) from neuraminidase__InfluenzaA__AHL95904

SEQ ID NO: 120784 - RNA, 1410 nt, Artificial Sequence
  derived and/or modified CDS sequence (opt2) from neuraminidase__InfluenzaA__AHL95916
augaaccccaaccagaagaucaucaccaucggcuccgucucccucaccaucuccaccaucugcuucuucaugcagaucgccauccucaucaccaccgucacccuccacuucaagcaguacgagcucaacuccccccccaacaaccaggucaugcucugcgagcccaccaucaucgagcgcaacaucaccgagaucgucuaccucaccaacaccaccaucgagaaggagaucugccccaagcccgccgaguaccgcaacugguccaagccccagugcggcaucaccggcuucgcccccuucuccaaggacaacuccauccgccucuccgccggcggcgacaucugggucacccgcgagcccuacgucuccugcgaccccgacaagugcuaccaguucgcccucggccagggcaccacccucaacaacguccacuccaacaacaccguccgcgaccgcacccccuaccgcacccuccucaugaacgagcucggcguccccuuccaccucggcaccaagcaggucugcaucgccugguccuccuccuccugccacgacggcaaggccuggcuccacgucugcaucaccggcgacgacaagaacgccaccgccuccuucaucuacaacggccgccucgucgacuccgucgucuccugguccaaggagauccuccgcacccaggaguccgagugcgucugcaucaacggcaccugcaccgucgucaugaccgacggcuccgccuccggcaaggccgacaccaagauccucuucaucgaggagggcaagaucguccacaccuccacccucuccggcuccgcccagcacgucgaggagugcuccugcuacccccgcuaccccggcguccgcugcgucugccgcgacaacuggaagggcuccaaccgccccaucgucgacaucaacaucaaggaccacuccaucgucuccuccuacgucugcuccggccucgucggcgacaccccccgcaagaacgacuccuccuccuccucccacugccucgaccccaacaacgaggagggcggccacggcgucaagggcugggccuucgacgacggcaacgacgucuggaugggccgcaccaucaacgagaccucccgccucggcuacgagaccuucaaggucaucgagggcugguccaaccccaaguccaagcuccagaucaaccgccaggucaucgucgaccgcggcgaccgcuccggcuacuccggcaucuucuccgucgagggcaaguccugcaucaaccgcugcuucuacgucgagcucauccgcggccgcaaggaggagaccgagguccucuggaccuccaacuccaucgucgucuucugcggcaccuccggcaccuacggcaccggcuccuggcccgacggcgccgaccucaaccucaugcccaucuga

SEQ ID NO: 120785 - RNA, 1410 nt, Artificial Sequence; identical to SEQ ID NO: 119919
  derived and/or modified CDS sequence (opt2) from neuraminidase__InfluenzaA__AHL95928

SEQ ID NO: 120786 - RNA, 1410 nt, Artificial Sequence; identical to SEQ ID NO: 119907
  derived and/or modified CDS sequence (opt2) from neuraminidase__InfluenzaA__AHL95940

SEQ ID NO: 120787 - RNA, 1410 nt, Artificial Sequence; identical to SEQ ID NO: 118182
  derived and/or modified CDS sequence (opt2) from neuraminidase__InfluenzaA__AHL95952

SEQ ID NO: 120788 - RNA, 1410 nt, Artificial Sequence; identical to SEQ ID NO: 118182
  derived and/or modified CDS sequence (opt2) from neuraminidase__InfluenzaA__AHL95964

SEQ ID NO: 120789 - RNA, 1410 nt, Artificial Sequence; identical to SEQ ID NO: 118182
  derived and/or modified CDS sequence (opt2) from neuraminidase__InfluenzaA__AHL95976

SEQ ID NO: 120790 - RNA, 1410 nt, Artificial Sequence; identical to SEQ ID NO: 118182
  derived and/or modified CDS sequence (opt2) from neuraminidase__InfluenzaA__AHL95988

SEQ ID NO: 120791 - RNA, 1410 nt, Artificial Sequence; identical to SEQ ID NO: 118182
  derived and/or modified CDS sequence (opt2) from neuraminidase__InfluenzaA__AHL96000

SEQ ID NO: 120792 - RNA, 1410 nt, Artificial Sequence
  derived and/or modified CDS sequence (opt2) from neuraminidase__InfluenzaA__AHL96012
augaaccccaaccagaagaucaucaccaucggcuccgucucccucaccaucuccaccaucugcuucuucaugcagaucgccauccucaucaccaccgucacccuccacuucaagcaguacgaguucaacuccccccccaacaaccaggucaugcucugcgagcccaccaucaucgagcgcaacaucaccgagaucgucuaccucaccaacaccaccaucgagaaggagaucugccccaagcccgccgaguaccgcaacugguccaagccccagugcggcaucaccggcuucgcccccuucuccaaggacaacuccauccgccucuccgccggcggcgacaucugggucacccgcguccccuacgucuccugcgaccccgacaagugcuaccaguucgcccucggccagggcaccacccucaacaacguccacuccaacaacaccguccgcgaccgcacccccuaccgcacccuccucaugaacgagcucggcguccccuuccaccucggcaccaagcaggucugcaucgccugguccuccuccuccugccacgacggcaaggccuggcuccacgucugcaucaccggcgacgacaagaacgccaccgccuccuucaucuacaacggccgccucgucgacuccgucgucuccugguccaaggagauccuccgcacccaggaguccgagugcgucugcaucaacggcaccugcaccgucgucaugaccgacggcuccgccuccggcaaggccgacaccaagauccucuucaucgaggagggcaagaucguccacaccuccacccucuccggcuccgcccagcacgucgaggagugcuccugcuacccccgcuaccccggcguccgcugcgucugccgcgacaacuggaagggcuccaaccgccccaucgucgacaucaacaucaaggaccacuccaucgucuccuccuacgucugcuccggccucgucggcgacaccccccgcaagaacgacuccuccuccuccucccacugccucgaccccaacaacgaggagggcggccacggcgucaagggcugggccuucgacgacggcaacgacgucuggaugggccgcaccaucaacgagaccucccgccucggcuacgagaccuucaaggucaucgagggcugguccaaccccaaguccaagcuccagaucaaccgccaggucaucgucgaccgcggcgaccgcuccggcuacuccggcaucuucuccgucgagggcaaguccugcaucaaccgcugcuucuacgucgagcucauccgcggccgcaaggaggagaccgagguccucuggaccuccaacuccaucgucgucuucugcggcaccuccggcaccuacggcaccggcuccuggcccgacggcgccgaccucaaccucaugcccaucuga

SEQ ID NO: 120793 - RNA, 1410 nt, Artificial Sequence
  derived and/or modified CDS sequence (opt2) from neuraminidase__InfluenzaA__AHL96024
augaaccccaaccagaagaucaucaccaucggcuccgucucccucaccaucuccaccaucugcuucuucaugcagaucgccauccucaucaccaccgucacccuccacuucaagcaguacgaguucaacuccccccccaacaaccaggucaugcucugcgagcccaccaucaucgagcgcaacaucaccgagaucgucuaccucaccaacaccaccaucgagaaggagaucugccccaagcccgccgaguaccgcaacugguccaagccccagugcggcaucaccggcuucgcccccuucuccaaggacaacuccauccgccucuccgccggcggcgacaucugggucacccgcgagcccuacgucuccugcgaccccgacaagugcuaccaguucgcccucggccagggcaccacccucaacaacguccacuccaacaacaccguccgcgaccgcacccccuaccgcacccuccucaugaacgagcucggcguccccuuccaccucggcaccaagcaggucugcaucgccugguccuccuccuccugccacgacggcaaggccuggcuccacgucugcaucaccggcgacgacaagaacgccaccgccuccuucaucuacaacggccgccucgucgacuccgucgucuccugguccaaggagaaccuccgcacccaggaguccgagugcgucugcaucaacggcaccugcaccgucgucaugaccgacggcuccgccuccggcaaggccgacaccaagauccucuucaucgaggagggcaagaucguccacaccuccacccucuccggcuccgcccagcacgucgaggagugcuccugcuacccccgcuaccccggcguccgcugcgucugccgcgacaacuggaagggcuccaaccgccccaucgucgacaucaacaucaaggaccacuccaucgucuccuccuacgucugcuccggccucgucggcgacaccccccgcaagaacgacuccuccuccuccucccacugccucgaccccaacaacgaggagggcggccacggcgucaagggcugggccuucgacgacggcaacgacgucuggaugggccgcaccaucaacgagaccucccgccucggcuacgagaccuucaaggucaucgagggcugguccaaccccaaguccaagcuccagaucaaccgccaggucaucgucgaccgcggcgaccgcuccggcuacuccggcaucuucuccgucgagggcaaguccugcaucaaccgcugcuucuacgucgagcucauccgcggccgcaaggaggagaccgagguccucuggaccuccaacuccaucgucgucuucugcggcaccuccggcaccuacggcaccggcuccuggcccgacggcgccgaccucaaccucaugcccaucuga

SEQ ID NO: 120794 - RNA, 1410 nt, Artificial Sequence; identical to SEQ ID NO: 118182
  derived and/or modified CDS sequence (opt2) from neuraminidase__InfluenzaA__AHL96036

SEQ ID NO: 120795 - RNA, 1410 nt, Artificial Sequence; identical to SEQ ID NO: 119425
  derived and/or modified CDS sequence (opt2) from neuraminidase__InfluenzaA__AHL96048

SEQ ID NO: 120796 - RNA, 1410 nt, Artificial Sequence; identical to SEQ ID NO: 118182
  derived and/or modified CDS sequence (opt2) from neuraminidase__InfluenzaA__AHL96059

SEQ ID NO: 120797 - RNA, 1410 nt, Artificial Sequence; identical to SEQ ID NO: 119919
  derived and/or modified CDS sequence (opt2) from neuraminidase__InfluenzaA__AHL96071

SEQ ID NO: 120798 - RNA, 1410 nt, Artificial Sequence; identical to SEQ ID NO: 120760
  derived and/or modified CDS sequence (opt2) from neuraminidase__InfluenzaA__AHL96083

SEQ ID NO: 120799 - RNA, 1410 nt, Artificial Sequence; identical to SEQ ID NO: 118182
  derived and/or modified CDS sequence (opt2) from neuraminidase__InfluenzaA__AHL96095

SEQ ID NO: 120800 - RNA, 1410 nt, Artificial Sequence
  derived and/or modified CDS sequence (opt2) from neuraminidase__InfluenzaA__AHL96107
augaaccccaaccagaagaucaucaccaucggcuccgucucccucaccaucuccaccaucugcuucuucaugcagaucgccauccucaucaccaccgucacccuccacuucaagcaguacgaguucaacuccccccccaacaaccaggucaugcucugcgagcccaccaucaucgagcgcaacaucaccgagaucgucuaccucaccaacaccaccaucgagaaggagaucugccccaagcccgccgaguaccgcaacugguccaagccccagugcggcaucaccggcuucgcccccuucuccaaggacaacuccauccgccucuccgccggcggcgacaucugggucacccgcgagcccuacgucuccugcgaccccgacaagugcuaccaguucgcccucggccagggcaccacccucaacaacaugcacuccaacaacaccguccgcgaccgcacccccuaccgcacccuccucaugaacgagcucggcguccccuuccaccucggcaccaagcaggucugcaucgccugguccuccuccuccugccacgacggcaaggccuggcuccacgucugcaucaccggcgacgacaagaacgccaccgccuccuucaucuacaacggccgccucgucgacuccgucgucuccugguccaaggagauccuccgcacccaggaguccgagugcgucugcaucaacggcaccugcaccgucgucaugaccgacggcuccgccuccggcaaggccgacaccaagauccucuucaucgaggagggcaagaucguccacaccuccacccucuccggcuccgcccagcacgucgaggagugcuccugcuacccccgcuaccccggcguccgcugcgucugccgcgacaacuggaagggcuccaaccgccccaucgucgacaucaacaucaaggaccacuccaucgucuccuccuacgucugcuccggccucgucggcgacaccccccgcaagaacgacaacuccuccuccucccacugccucgaccccaacaacgaggagggcggccacggcgucaagggcugggccuucgacgacggcaacgacgucuggaugggccgcaccaucaacgagaccucccgccucggcuacgagaccuucaaggucaucgagggcugguccaaccccaaguccaagcuccagaucaaccgccaggucaucgucgaccgcggcgaccgcuccggcuacuccggcaucuucuccgucgagggcaaguccugcaucaaccgcugcuucuacgucgagcucauccgcggccgcaaggaggagaccgagguccucuggaccuccaacuccaucgucgucuucugcggcaccuccggcaccuacggcaccggcuccuggcccgacggcgccgaccucaaccucaugcccaucuga

SEQ ID NO: 120801 - RNA, 1410 nt, Artificial Sequence; identical to SEQ ID NO: 118182
  derived and/or modified CDS sequence (opt2) from neuraminidase__InfluenzaA__AHL96119

SEQ ID NO: 120802 - RNA, 1410 nt, Artificial Sequence; identical to SEQ ID NO: 119919
  derived and/or modified CDS sequence (opt2) from neuraminidase__InfluenzaA__AHL96131

SEQ ID NO: 120803 - RNA, 1410 nt, Artificial Sequence; identical to SEQ ID NO: 118182
  derived and/or modified CDS sequence (opt2) from neuraminidase__InfluenzaA__AHL96143

SEQ ID NO: 120804 - RNA, 1410 nt, Artificial Sequence; identical to SEQ ID NO: 118182
  derived and/or modified CDS sequence (opt2) from neuraminidase__InfluenzaA__AHL96167

SEQ ID NO: 120805 - RNA, 1410 nt, Artificial Sequence; identical to SEQ ID NO: 118182
  derived and/or modified CDS sequence (opt2) from neuraminidase__InfluenzaA__AHL96179

SEQ ID NO: 120806 - RNA, 1410 nt, Artificial Sequence
  derived and/or modified CDS sequence (opt2) from neuraminidase__InfluenzaA__AHL96191
augaaccccaaccagaagaucaucaccaucggcuccgucucccucaccaucuccaccaucugcuucuucaugcagaucgccauccucaucaccaccgucacccuccacuucaagcaguacgaguucgacuccccccccaacaaccaggucaugcucugcgagcccaccaucaucgagcgcaacaucaccgagaucgucuaccucaccaacaccaccaucgagaaggagaucugccccaagcccgccgaguaccgcaacugguccaagccccagugcggcaucaccggcuucgcccccuucuccaaggacaacuccauccgccucuccgccggcggcgacaucugggucacccgcgagcccuacgucuccugcgaccccgacaagugcuaccaguucgcccucggccagggcaccacccucaacaacaugcacuccaacaacaccguccgcgaccgcacccccuaccgcacccuccucaugaacgagcucggcguccccuuccaccucggcaccaagcaggucugcaucgccugguccuccuccuccugccacgacggcaaggccuggcuccacgucugcaucaccggcgacgacaagaacgccaccgccuccuucaucuacaacggccgccucgucgacuccgucgucuccugguccaaggagauccuccgcacccaggaguccgagugcgucugcaucaacggcaccugcaccgucgucaugaccgacggcuccgccuccggcaaggccgacaccaagauccucuucaucgaggagggcaagaucguccacaccuccacccucuccggcuccgcccagcacgucgaggagugcuccugcuacccccgcuaccccggcguccgcugcgucugccgcgacaacuggaagggcuccaaccgccccaucgucgacaucaacaucaaggaccacuccaucgucuccuccuacgucugcuccggccucgucggcgacaccccccgcaagaacgacuccuccuccuccucccacugccucgaccccaacaacgaggagggcggccacggcgucaagggcugggccuucgacgacggcaacgacgucuggaugggccgcaccaucaacgagaccucccgccucggcuacgagaccuucaaggucaucgagggcugguccaaccccaaguccaagcuccagaucaaccgccaggucaucgucgaccgcggcgaccgcuccggcuacuccggcaucuucuccgucgagggcaaguccugcaucaaccgcugcuucuacgucgagcucauccgcggccgcaaggaggagaccgagguccucuggaccuccaacuccaucgucgucuucugcggcaccuccggcaccuacggcaccggcuccuggcccgacggcgccgaccucaaccucaugcccaucuga

SEQ ID NO: 120807 - RNA, 1410 nt, Artificial Sequence; identical to SEQ ID NO: 119907
  derived and/or modified CDS sequence (opt2) from neuraminidase__InfluenzaA__AHL96203

SEQ ID NO: 120808 - RNA, 1410 nt, Artificial Sequence; identical to SEQ ID NO: 119919
  derived and/or modified CDS sequence (opt2) from neuraminidase__InfluenzaA__AHL96215

SEQ ID NO: 120809 - RNA, 1410 nt, Artificial Sequence; identical to SEQ ID NO: 118182
  derived and/or modified CDS sequence (opt2) from neuraminidase__InfluenzaA__AHL96227

SEQ ID NO: 120810 - RNA, 1410 nt, Artificial Sequence; identical to SEQ ID NO: 118182
  derived and/or modified CDS sequence (opt2) from neuraminidase__InfluenzaA__AHL96239

SEQ ID NO: 120811 - RNA, 1410 nt, Artificial Sequence; identical to SEQ ID NO: 118182
  derived and/or modified CDS sequence (opt2) from neuraminidase__InfluenzaA__AHL96251

SEQ ID NO: 120812 - RNA, 1410 nt, Artificial Sequence; identical to SEQ ID NO: 118182
  derived and/or modified CDS sequence (opt2) from neuraminidase__InfluenzaA__AHL96263

SEQ ID NO: 120813 - RNA, 1410 nt, Artificial Sequence; identical to SEQ ID NO: 119963
  derived and/or modified CDS sequence (opt2) from neuraminidase__InfluenzaA__AHL96277

SEQ ID NO: 120814 - RNA, 1410 nt, Artificial Sequence
  derived and/or modified CDS sequence (opt2) from neuraminidase__InfluenzaA__AHL96308
augaaccccaaccagaagaucaucaccaucggcuccgucucccucaccaucuccaccaucugcuucuucaugcagaucgccauccucaucaccaccgucacccuccacuucaagcaguacgaguucaacuucccccccaacaaccaggucaugcucugcgagcccaccaucaucgagcgcaacaucaccgagaucgucuaccucaccaacaccaccaucgagaaggagaucugccccaagcccgccgaguaccgcaacugguccaagccccagugcggcaucaccggcuucgcccccuucuccaaggacaacuccauccgccucuccgccggcggcgacaucugggucacccgcgagcccuacgucuccugcgaccccgacaagugcuaccaguucgcccucggccagggcaccacccucaacaacguccacuccaacaacaccguccgcgaccgcacccccuaccgcacccuccucauguccgagcucggcguccccuuccaccucggcaccaagcaggucugcaucgccugguccuccuccuccugccacgacggcaaggccuggcuccacgucugcaucaccggcgacgacaagaacgccaccgccuccuucaucuacaacggccgccucgucgacuccgucgucuccugguccaaggagauccuccgcacccaggaguccgagugcgucugcaucaacggcaccugcaccgucgucaugaccgacggcuccgccuccggcaaggccgacaccaagauccucuucaucgaggagggcaagaucguccacaccuccacccucuccggcuccgcccagcacgucgaggagugcuccugcuacccccgcuaccccggcguccgcugcgucugccgcgacaacuggaagggcuccaaccgccccaucgucgacaucaacaucaaggaccacuccaucgucuccuccuacgucugcuccggccucgucggcgacaccccccgcaagaacgacuccuccuccuccucccacugccucgaccccaacaacgaggagggcggccacggcgucaagggcugggccuucgacgacggcaacgacgucuggaugggccgcaccaucaacgagaccucccgccucggcuacgagaccuucaaggucaucgagggcugguccaaccccaaguccaagcuccagaucaaccgccaggucaucgucgaccgcggcgaccgcuccggcuacuccggcaucuucuccgucgagggcaaguccugcaucaaccgcugcuucuacgucgagcucauccgcggccgcaaggaggagaccgagguccucuggaccuccaacuccaucgucgucuucugcggcaccuccggcaccuacggcaccggcuccuggcccgacggcgccgaccucaaccucaugcccaucuga

SEQ ID NO: 120815 - RNA, 1410 nt, Artificial Sequence; identical to SEQ ID NO: 119411
  derived and/or modified CDS sequence (opt2) from neuraminidase__InfluenzaA__AHL96321

SEQ ID NO: 120816 - RNA, 1410 nt, Artificial Sequence; identical to SEQ ID NO: 118182
  derived and/or modified CDS sequence (opt2) from neuraminidase__InfluenzaA__AHL96333

SEQ ID NO: 120817 - RNA, 1410 nt, Artificial Sequence
  derived and/or modified CDS sequence (opt2) from neuraminidase__InfluenzaA__AHL96345
augaaccccaaccagaagaucaucaccaucggcuccgucucccucaccaucuccaccaucugcuucuucaugcagaucgccauccucaucaccaccgucacccuccacuucaagcaguacgaguucaacuccccccccaacaaccaggucaugcucugcgagcccaccaucaucgagcgcaacaucaccgagaucgucuaccucaccaacaccaccaucgagaaggagaucugccccaagcccgccgaguaccgcaacugguccaagccccagugcggcaucaccggcuucgcccccuucuccaaggacaacuccauccgccucuccgccggcggcgacaucugggucacccgcgagcccuacgucuccugcgaccccgacaagugcuaccaguucgcccucggccagggcaccacccucaacaacguccacuccaacaacaccguccgcgaccgcacccccuaccgcacccuccucaugaacgagcucggcguccccuuccaccucggcaccaagcaggucugcaucgccugguccuccuccuccugccacgacggcaaggccuggcuccacgucugcaucaccggcgacgacaagaacgccaccgccuccuucaucuacaacggccgccucgucgacuccgucgucuccugguccaaggagauccuccgcacccaggaguccgagugcgucugcaucaacggcaccugcaccgucgucaugaccgacggcuccgccuccggcaaggccgacaccaagauccucuucaucgaggagggcaagaucguccacaccuccacccucuccggcuccgcccagcacgucgaggagugcuccugcuacccccgcuaccccggcguccgcugcgucugccgcgacaacuggaagggcuccaaccgccccaucgucgacaucaacaucaaggaccacuccaucgucuccuccuacgucugcuccggccucgucggcgacaccccccgcaagaacgacaacuccuccuccucccacugccucgaccccaacaacgaggagggcggccacggcgucaagggcugggccuucgacgacggcaacgacgucuggaugggccgcaccaucaacgagaccucccgccucggcuacgagaccuucaaggucaucgagggcugguccaaccccaaguccaagcuccagaucaaccgccaggucaucgucgaccgcggcgaccgcuccggcuacuccggcaucuucuccgucgagggcaaguccugcaucaaccgcugcuucuacgucgagcucauccgcggccgcaaggaggagaccgagguccucuggaccuccaacuccaucgucgucuucugcggcaccuccggcaccuacggcaccggcuccuggcccgacggcgccgaccucaaccucaugcccaucuga

SEQ ID NO: 120818 - RNA, 1410 nt, Artificial Sequence; identical to SEQ ID NO: 119907
  derived and/or modified CDS sequence (opt2) from neuraminidase__InfluenzaA__AHL96357

SEQ ID NO: 120819 - RNA, 1410 nt, Artificial Sequence; identical to SEQ ID NO: 118182
  derived and/or modified CDS sequence (opt2) from neuraminidase__InfluenzaA__AHL96369

SEQ ID NO: 120820 - RNA, 1410 nt, Artificial Sequence; identical to SEQ ID NO: 118182
  derived and/or modified CDS sequence (opt2) from neuraminidase__InfluenzaA__AHL96381

SEQ ID NO: 120821 - RNA, 1410 nt, Artificial Sequence; identical to SEQ ID NO: 119919
  derived and/or modified CDS sequence (opt2) from neuraminidase__InfluenzaA__AHL96393

SEQ ID NO: 120822 - RNA, 1410 nt, Artificial Sequence
  derived and/or modified CDS sequence (opt2) from neuraminidase__InfluenzaA__AHL96405
augaaccccaaccagaagaucaucaccaucggcuccgucucccucaccaucuccaccaucugcuucuucaugcagaucgccauccucaucaccaccgucacccuccacuucaagcaguacgaguucaacuccccccccaacaaccaggucaugcucugcgagcccaccaucaucgagcgcaacaucaccgagaucgucuaccucaccaacaccaccaucgagaaggagaucugccccaagcccgccgaguaccgcaacugguccaagccccagugcggcaucaccggcuucgcccccuucuccaaggacaacuccauccgccucuccgccggcggcgacaucugggucacccgcgagcccuacgucuccugcgaccccgacaagugcuaccaguucgcccucggccagggcaccacccucaacaacguccacuccaacaacaccguccgcgaccgcacccccuaccgcacccuccucaugaacgagcucggcguccccuuccaccucggcaccaagcaggucugcaucgccugguccuccuccuccugccacgacggcaaggccuggcuccacgucugcaucaccggcgacgacaagaacgccaccgccuccuucaucuacaacggccgccucgucgacuccgucgucuccugguccaaggagauccuccgcacccaggaguccgagugcgucugcaucaacggcaccugcaccgucgucaugaccgacggcuccgccuccggcaaggccgacaccaagauccucuucaucgaggagggcaagaucguccacaccuccacccucuccggcuccgcccagcacgucgaggagugcuccugcuacccccgcuaccccggcguccgcugcgucugccgcgacaacuggaagggcuccaaccgccccaucgucgacaucaacaucaaggaccacuccaucgucuccuccuacgucugcuccggccucgucggcgacaccccccgcaagaacgacuccuccuccuccucccacugccucggccccaacaacgaggagggcggccacggcgucaagggcugggccuucgacgacggcaacgacgucuggaugggccgcaccaucaacgagaccucccgccucggcuacgagaccuucaaggucaucgagggcugguccaaccccaaguccaagcuccagaucaaccgccaggucaucgucgaccgcggcgaccgcuccggcuacuccggcaucuucuccgucgagggcaaguccugcaucaaccgcugcuucuacgucgagcucauccgcggccgcaaggaggagaccgagguccucuggaccuccaacuccaucgucgucuucugcggcaccuccggcaccuacggcaccggcuccuggcccgacggcgccgaccucaaccucaugcccaucuga

SEQ ID NO: 120823 - RNA, 1410 nt, Artificial Sequence; identical to SEQ ID NO: 118182
  derived and/or modified CDS sequence (opt2) from neuraminidase__InfluenzaA__AHL96417

SEQ ID NO: 120824 - RNA, 1410 nt, Artificial Sequence; identical to SEQ ID NO: 118182
  derived and/or modified CDS sequence (opt2) from neuraminidase__InfluenzaA__AHL96429

SEQ ID NO: 120825 - RNA, 1410 nt, Artificial Sequence
  derived and/or modified CDS sequence (opt2) from neuraminidase__InfluenzaA__AHL96441
augaaccccaaccagaagaucaucaccaucggcuccgucucccucaccaucuccaccaucugcuucuucaugcagaucgccauccucaucaccaccgucacccuccacuucaagcacuacgaguucaacuccccccccaacaaccaggucaugcucugcgagcccaccaucaucgagcgcaacaucaccgagaucgucuaccucaccaacaccaccaucgagaaggagaucugccccaagcccgccgaguaccgcaacugguccaagccccagugcgacaucaccggcuucgcccccuucuccaaggacaacuccauccgccucuccgccggcggcgacaucugggucacccgcgagcccuacgucuccugcgaccccgacaagugcuaccaguucgcccucggccagggcaccacccucaacaacguccacuccaacaacaccguccgcgaccgcacccccuaccgcacccuccucaugaacgagcucggcguccccuuccaccucggcaccaagcaggucugcaucgccugguccuccuccuccugccacgacggcaaggccuggcuccacgucugcaucaccggcgacgacaagaacgccaccgccuccuucaucuacaacggccgccucgucgacuccgucgucuccugguccaaggagauccuccgcacccaggaguccgagugcgucugcaucaacggcaccugcaccgucgucaugaccgacggcuccgccuccggcaaggccgacaccaagauccucuucaucgaggagggcaagaucguccacaccuccacccucuccggcuccgcccagcacgucgaggagugcuccugcuacccccgcuaccccggcguccgcugcgucugccgcgacaacuggaagggcuccaaccgccccaucgucgacaucaacaucaaggaccacuccaucgucucccgcuacgucugcuccggccucgucggcgacaccccccgcaagaacgacuccuccuccuccucccacugccucaaccccaacaacgaggagggcggccacggcgucaagggcugggccuucgacgacggcaacgacgucuggaugggccgcaccaucaacgagaccucccgccucggcuacgagaccuucaaggucaucgagggcugguccaaccccaaguccaagcuccagaucaaccgccagaucaucgucgaccgcggcgaccgcuccggcuacuccggcaucuucuccgucgagggcaaguccugcaucaaccgcugcuucuacgucgagcucauccgcggccgcaaggaggagaccgagguccucuggaccuccaacuccaucgucgucuucugcggcaccuccggcaccuacggcaccggcuccuggcccgacggcgccgaccucaaccucaugcccaucuga

SEQ ID NO: 120826 - RNA, 1410 nt, Artificial Sequence; identical to SEQ ID NO: 118182
  derived and/or modified CDS sequence (opt2) from neuraminidase__InfluenzaA__AHL96453

SEQ ID NO: 120827 - RNA, 1410 nt, Artificial Sequence; identical to SEQ ID NO: 118182
  derived and/or modified CDS sequence (opt2) from neuraminidase__InfluenzaA__AHL96465

SEQ ID NO: 120828 - RNA, 1410 nt, Artificial Sequence
  derived and/or modified CDS sequence (opt2) from neuraminidase__InfluenzaA__AHL96477
augaaccccaaccagaagaucaucaccaucggcuccgucugcaugaccaucggcauggccaaccucauccuccagaucggcaacaucaucuccaucuggaucucccacuccauccaggucggcaaccagucccagaucgagaccugcaaccaguccgucaucaccuacgagaacaacaccugggucaaccagaccuacgucaacaucuccaacaccaacuucgccgccggccaguccgucgucuccgucaagcucgccggcaacuccucccucugccccgucuccggcugggccaucuacuccaaggacaacuccguccgcaucggcuccaagggcgacgucuucgucauccgcgagcccuucaucuccugcuccccccucgagugccgcaccuucuuccucacccagggcgcccuccucaacgacaagcacuccaacggcaccaucaaggaccgcucccccuaccgcacccucauguccugccccaucggcgagguccccucccccuacaacucccgcuucgaguccgucgccugguccgccuccgccugccacgacggcaucaacuggcucaccaucggcaucuccggccccgacuccggcgccgucgccguccucaaguacaacggcaucaucaccgacaccaucaaguccuggcgcaacaacauccuccgcacccaggaguccgagugcgccugcgucaacggcuccugcuucaccaucaugaccgacggccccuccgacggccaggccuccuacaagaucuuccgcaucgagaagggcaagaucgucaaguccgucgagaugaacgcccccaacuaccacuacgaggagugcuccugcuaccccgacuccuccgagaucaccugcgucugccgcgacaacuggcacggcuccaaccgccccugggucuccuucaaccagaaccucgaguaccagaucggcuacaucugcuccggcaucuucggcgacaacccccgccccaacgacaagaccggcuccugcggccccgucuccuccaacggcgccaacggcgucaagggcuucuccuucaaguacggcaacggcgucuggaucggccgcaccaaguccaucuccucccgcaagggcuucgagaugaucugggaccccaacggcuggaccggcaccgacaacaacuucuccaucaagcaggacaucgucggcaucaacgagugguccggcuacuccggcuccuucguccagcaccccgagcucaccggccucgacugcauccgccccugcuucugggucgagcucauccgcggccgccccaaggagaacaccaucuggaccuccggcuccuccaucuccuucugcggcgucaacuccgacaccgucggcugguccuggcccgacggcgccgagcuccccuucaccaucgacaaguga

SEQ ID NO: 120829 - RNA, 1410 nt, Artificial Sequence; identical to SEQ ID NO: 119919
  derived and/or modified CDS sequence (opt2) from neuraminidase__InfluenzaA__AHL96488

SEQ ID NO: 120830 - RNA, 1410 nt, Artificial Sequence; identical to SEQ ID NO: 118182
  derived and/or modified CDS sequence (opt2) from neuraminidase__InfluenzaA__AHL96500

SEQ ID NO: 120831 - RNA, 1410 nt, Artificial Sequence; identical to SEQ ID NO: 118182
  derived and/or modified CDS sequence (opt2) from neuraminidase__InfluenzaA__AHL96512

SEQ ID NO: 120832 - RNA, 1410 nt, Artificial Sequence; identical to SEQ ID NO: 119411
  derived and/or modified CDS sequence (opt2) from neuraminidase__InfluenzaA__AHL96524

SEQ ID NO: 120833 - RNA, 1410 nt, Artificial Sequence
  derived and/or modified CDS sequence (opt2) from neuraminidase__InfluenzaA__AHL96536
augaaccccaaccagaagaucaucaccaucggcuccgucucccucaccaucuccaccaucugcuucuucacccagaucgccauccucaucaccaccgucacccuccacuucaagcaguacgaguucaacuccccccccaacaaccaggucaugcucugcgagcccaccaucaucgagcgcaacaucaccgagaucgucuaccucaccaacaccaccaucgagaaggagaucugccccaagcccgccgaguaccgcaacugguccaagccccagugcggcaucaccggcuucgcccccuucuccaaggacaacuccauccgccucuccgccggcggcgacaucugggucacccgcgagcccuacgucuccugcgaccccgacaagugcuaccaguucgcccucggccagggcaccaccaucaacaacguccacuccaacaacaccguccgcgaccgcacccccuaccgcacccuccucaugaacgagcucggcguccccuuccaccucggcaccaagcaggucugcaucgccugguccuccuccuccugccacgacggcaaggccuggcuccacgucugcaucaccggcgacgacaagaacgccaccgccuccuucaucuacaacggccgccucgucgacuccgucgucuccugguccaaggagauccuccgcacccaggaguccgagugcgucugcaucaacggcaccugcaccgucgucaugaccgacggcuccgccuccggcaaggccgacaccaagauccucuucaucgaggagggcaagaucguccacaccuccacccucuccggcuccgcccagcacgucgaggagugcuccugcuacccccgcuaccccggcguccgcugcgucugccgcgacaacuggaagggcuccaaccgccccaucgucgacaucaacaucaaggaccacuccaucgucuccuccuacgucugcuccggccucgucggcgacaccccccgcaagaacgacuccuccuccuccucccacugccucgaccccaacaacgaggagggcggccacggcgucaagggcugggccuucgacgacggcaacgacgucuggaugggccgcaccaucaacgagaccucccgccucggcuacgagaccuucaaggucaucgagggcugguccaaccccaaguccaagcuccagaucaaccgccaggucaucgucgaccgcggcgaccgcuccggcuacuccggcaucuucuccgucgagggcaaguccugcaucaaccgcugcuucuacgucgagcucauccgcggccgcaaggaggagaccgagguccucuggaccuccaacuccaucgucgucuucugcggcaccuccggcaccuacggcaccggcuccuggcccgacggcgccgaccucaaccucaugcccaucuga

SEQ ID NO: 120834 - RNA, 1410 nt, Artificial Sequence; identical to SEQ ID NO: 119919
  derived and/or modified CDS sequence (opt2) from neuraminidase__InfluenzaA__AHL96548

SEQ ID NO: 120835 - RNA, 1410 nt, Artificial Sequence
  derived and/or modified CDS sequence (opt2) from neuraminidase__InfluenzaA__AHL96560
augaaccccaaccagaagaucaucaccaucggcuccgucucccucaccaucuccaccaucugcuucuucaugcagaucgccauccucaucaccaccgucacccuccacuucaagcaguacgaguucaacuccccccccaacaaccaggucaugcucugcgagcccaccaucaucgagcgcaacaucaccgagaucgucuaccucaccaacaccaccaucgagaaggagaucugccccaagcccgccgaguaccgcaacugguccaagccccagugcggcaucaccggcuucgcccccuucuccaaggacaacuccauccgccucuccgccggcggcgacaucugggucacccgcgagcccuacgucuccugcgaccccgacaagugcuaccaguucgcccucggccagggcaccacccucaacaacguccacuccaacaacaccguccgcgaccgcacccccuaccgcacccuccucaugaacgagcucggcguccccuuccaccucggcaccaagcaggucugcaucgccugguccuccuccuccugccacgacggcaaggccuggcuccacgucugcaucaccggcgacgacaagaacgccaccgccuccuucaucuacaacggccgccucgucgacuccgucgucuccugguccaaggagauccuccgcacccaggaguccgagugcgucugcaucaacggcaccugcaccgucgucaugaccgacggcaacgccuccggcaaggccgacaccaagauccucuucaucgaggagggcaagaucguccacaccuccacccucuccggcuccgcccagcacgucgaggagugcuccugcuacccccgcuaccccggcguccgcugcgucugccgcgacaacuggaagggcuccaaccgccccaucgucgacaucaacaucaaggaccacuccaucgucuccuccuacgucugcuccggccucgucggcgacaccccccgcaagaacgacuccuccuccuccucccacugccucgaccccaacaacgaggagggcggccacggcgucaagggcugggccuucgacgacggcaacgacgucuggaugggccgcaccaucaacgagaccucccgccucggcuacgagaccuucaaggucaucgagggcugguccaaccccaaguccaagcuccagaucaaccgccaggucaucgucgaccgcggcgaccgcuccggcuacuccggcaucuucuccgucgagggcaaguccugcaucaaccgcugcuucuacgucgagcucauccgcggccgcaaggaggagaccgagguccucuggaccuccaacuccaucgucgucuucugcggcaccuccggcaccuacggcaccggcuccuggcccgacggcgccgaccucaaccucaugcccaucuga

SEQ ID NO: 120836 - RNA, 1410 nt, Artificial Sequence; identical to SEQ ID NO: 119393
  derived and/or modified CDS sequence (opt2) from neuraminidase__InfluenzaA__AHL96572

SEQ ID NO: 120837 - RNA, 1410 nt, Artificial Sequence; identical to SEQ ID NO: 120828
  derived and/or modified CDS sequence (opt2) from neuraminidase__InfluenzaA__AHL96584

SEQ ID NO: 120838 - RNA, 1410 nt, Artificial Sequence
  derived and/or modified CDS sequence (opt2) from neuraminidase__InfluenzaA__AHL96595
augaaccccaaccagaagaucaucaccaucggcuccgucucccucaccaucuccaccaucugcuucuucaugcagaucgccauccucaucaccaccgucacccuccacuucaagcaguacgaguucaacuccccccccaacaaccaggucaugcucugcgagcccaccaucaucgagcgcaacaucaccgagaucgucuaccucaccaacaccaccaucgagaaggagaucugccccaagcccgccgaguaccgcaacugguccaagccccagugcggcaucaccggcuucgcccccuucuccaaggacaacuccauccgccucuccgccggcggcgacaucugggucacccgcgagcccuacgucuccugcgaccccgacaagugcuaccaguucgcccucggccagggcaccacccucaacaacguccacuccaacaacaccguccgcgaccgcacccccuaccgcacccuccucaugaacgagcucggcguccccuuccaccucggcaccaagcaggucugcaucgccugguccuccuccuccugccacgacggcaaggccuggcuccacgucugcaucaccggcgacgacaagaacgccaccgccuccuucaucuacaacggccgccucgucgacuccgucgucuccugguccaaggagauccuccgcacccaggaguccgagugcgucugcaucaacggcaccugcaccgucgucaugaccgacggcuccgccuccggcaaggccgacaccaagauccucuucaucgaggagggcaagaucguccacaccuccacccucuccggcuccgcccagcacgucgaggagugcuccugcuacccccgcuaccccggcguccgcugcgucugccgcgacaacuggaagggcuccaaccgccccaucgucgacaucaacaucaaggaccacuccaucgucuccuccuacgucugcuccggccucgucggcgacaccccccgcaagaacgacuccuccuccuccucccacugccucgaccccaacaacgaggagggcggccacggcgucaagggcugggccuucgacgacggcaacgacgucuggaugggccgcaccaucaacgagaccucccgccucggcuacgagaccuucaaggucaucgagggcugguccaaccccaaguccaagcuccagaucaaccgccaggucaucgucgaccgcggcgaccgcuccggcuacuccggcaucuucuccgucgaguccaaguccugcaucaaccgcugcuucuacgucgagcucauccgcggccgcaaggaggagaccgagguccucuggaccuccaacuccaucgucgucuucugcggcaccuccggcaccuacggcaccggcuccuggcccgacggcgccgaccucaaccucaugcccaucuga

SEQ ID NO: 120839 - RNA, 1410 nt, Artificial Sequence; identical to SEQ ID NO: 118182
  derived and/or modified CDS sequence (opt2) from neuraminidase__InfluenzaA__AHL96607

SEQ ID NO: 120840 - RNA, 1410 nt, Artificial Sequence
  derived and/or modified CDS sequence (opt2) from neuraminidase__InfluenzaA__AHL96631
augaaccccaaccagaagaucaucaccaucggcuccgucucccucaccaucuccaccaucugcuucuucaugcagaucgccauccucaucaccaccgucacccuccacuucaagcaguacgaguucaacucccuccccaacaaccaggucaugcucugcgagcccaccaucaucgagcgcaacaucaccgagaucgucuaccucaccaacaccaccaucgagaaggagaucugccccaagcccgccgaguaccgcaacugguccaagccccagugcggcaucaccggcuucgcccccuucuccaaggacaacuccauccgccucuccgccggcggcgacaucugggucacccgcgagcccuacgucuccugcgaccccgacaagugcuaccaguucgcccucggccagggcaccacccucaacaacaugcacuccaacaacaccguccgcgaccgcacccccuaccgcacccuccucaugaacgagcucggcguccccuuccaccucggcaccaagcaggucugcaucgccugguccuccuccuccugccacgacggcaaggccuggcuccacgucugcaucaccggcgacgacaagaacgccaccgccuccuucaucuacaacggccgccucgucgacuccgucgucuccugguccaaggagauccuccgcacccaggaguccgagugcgucugcaucaacggcaccugcaccgucgucaugaccgacggcuccgccuccggcaaggccgacaccaagauccucuucaucgaggagggcaagaucguccacaccuccacccucuccggcuccgcccagcacgucgaggagugcuccugcuacccccgcuaccccggcguccgcugcgucugccgcgacaacuggaagggcuccaaccgccccaucgucgacaucaacaucaaggaccacuccaucgucuccuccuacgucugcuccggccucgucggcgacaccccccgcaagaacgacuccuccuccuccucccacugccucgaccccaacaacgaggagggcggccacggcgucaagggcugggccuucgacgacggcaacgacgucuggaugggccgcaccaucaacgagaccucccgccucggcuacgagaccuucaaggucaucgagggcugguccaaccccaaguccaagcuccagaucaaccgccaggucaucgucgaccgcggcgaccgcuccggcuacuccggcaucuucuccgucgagggcaaguccugcaucaaccgcugcuucuacgucgagcucauccgcggccgcaaggaggagaccgagguccucuggaccuccaacuccaucgucgucuucugcggcaccuccggcaccuacggcaccggcuccuggcccgacggcgccgaccucaaccucaugcccaucuga

SEQ ID NO: 120841 - RNA, 1410 nt, Artificial Sequence; identical to SEQ ID NO: 119919
  derived and/or modified CDS sequence (opt2) from neuraminidase__InfluenzaA__AHL96643

SEQ ID NO: 120842 - RNA, 1410 nt, Artificial Sequence; identical to SEQ ID NO: 118182
  derived and/or modified CDS sequence (opt2) from neuraminidase__InfluenzaA__AHL96655

SEQ ID NO: 120843 - RNA, 1410 nt, Artificial Sequence; identical to SEQ ID NO: 118182
  derived and/or modified CDS sequence (opt2) from neuraminidase__InfluenzaA__AHL96667

SEQ ID NO: 120844 - RNA, 1410 nt, Artificial Sequence; identical to SEQ ID NO: 118182
  derived and/or modified CDS sequence (opt2) from neuraminidase__InfluenzaA__AHL96679

SEQ ID NO: 120845 - RNA, 1410 nt, Artificial Sequence; identical to SEQ ID NO: 118182
  derived and/or modified CDS sequence (opt2) from neuraminidase__InfluenzaA__AHL96691

SEQ ID NO: 120846 - RNA, 1410 nt, Artificial Sequence; identical to SEQ ID NO: 118182
  derived and/or modified CDS sequence (opt2) from neuraminidase__InfluenzaA__AHL96703

SEQ ID NO: 120847 - RNA, 1410 nt, Artificial Sequence; identical to SEQ ID NO: 119907
  derived and/or modified CDS sequence (opt2) from neuraminidase__InfluenzaA__AHL96763

SEQ ID NO: 120848 - RNA, 1410 nt, Artificial Sequence; identical to SEQ ID NO: 120760
  derived and/or modified CDS sequence (opt2) from neuraminidase__InfluenzaA__AHL96787

SEQ ID NO: 120849 - RNA, 1410 nt, Artificial Sequence
  derived and/or modified CDS sequence (opt2) from neuraminidase__InfluenzaA__AHL96799
augaaccccaaccagaagaucaucaccaucggcuccgucucccucaccaucuccaccaucugcuucuucaugcagaucgccauccucaucaccaccgucacccuccacuucaagcaguacgaguucaacuccccccccaacaaccaggucaugcucugcgagcccaccaucaucgagcgcaacaucaccgagaucgucuaccucaccaacaccaccaucgagaaggagaucugccccaagcccgccgaguaccgcaacugguccaagccccagugcggcaucaccggcuucgcccccuucuccaaggacaacuccauccgccucuccgccggcggcgacaucugggucacccgcgagcccuacgucuccugcgaccccgacaagugcuaccaguucgcccucggccagggcaccacccucaacaacguccacuccaacaacaccguccgcgaccgcacccccuaccgcacccuccucaugaacgagcucggcguccccuuccaccucggcaccaagcaggucugcaucgccugguccuccuccuccugccacgacggcaaggccuggcuccacgucugcaucaccggcgacgacaagaacgccaccgccuccuucaucuacaacggccgccucgucgacuccgucgucuccugguccaaggagauccuccgcacccaggaguccgagugcgucugcaucaacggcaccugcaccgucgucaugaccgacggcuccgccuccggcaaggccgacaccaagauccucuucaucgaggagggcaagaucguccacaccuccacccucuccggcuccgcccagcacgucgaggagugcuccugcuacccccgcuaccccggcguccgcugcgucugccgcgacaacuggaagggcuccaaccgccccaucgucgacaucaacaucaaggaccacuccaucgucuccuccuacgucugcuccggccucgucggcgacaccccccgcaagaacgacuccuccuccuccucccacugccucgaccccaacaacgaggagggcggccacggcgucaagggcugggccuucgacgacggcaacgacgucuggaugggccgcaccaucaacgagaccucccgccucggcuacgagaccuucaaggucaucgagggcugguccaaccccaaguccaagcuccagaucaaccgccaggucaucgucgaccgcggcgaccgcuccggcuacuccggcaucuucuccgucgagggcaaguccugcaucaaccgcugcuucuacgucgagcucauccgcggccgcaaggacgagaccgagguccucuggaccuccaacuccaucgucgucuucugcggcaccuccggcaccuacggcaccggcuccuggcccgacggcgccgaccucaaccucaugcccaucuga

SEQ ID NO: 120850 - RNA, 1410 nt, Artificial Sequence; identical to SEQ ID NO: 119919
  derived and/or modified CDS sequence (opt2) from neuraminidase__InfluenzaA__AHL96811

SEQ ID NO: 120851 - RNA, 1410 nt, Artificial Sequence; identical to SEQ ID NO: 119919
  derived and/or modified CDS sequence (opt2) from neuraminidase__InfluenzaA__AHL96823

SEQ ID NO: 120852 - RNA, 1410 nt, Artificial Sequence; identical to SEQ ID NO: 118182
  derived and/or modified CDS sequence (opt2) from neuraminidase__InfluenzaA__AHL96847

SEQ ID NO: 120853 - RNA, 1410 nt, Artificial Sequence
  derived and/or modified CDS sequence (opt2) from neuraminidase__InfluenzaA__AHL96859
augaaccccaaccagaagaucaucaccaucggcuccgucucccucaccaucuccaccaucugcuucuucaugcagaucgccauccucaucaccaccgucacccuccacuucaagcaguacgaguucaacuccccccccaacaaccagaugaugcucugcgagcccaccaucaucgagcgcaacaucaccgagaucgucuaccucaccaacaccaccaucgagaaggagaucugccccaagcccgccgaguaccgcaacugguccaagccccagugcggcaucaccggcuucgcccccuucuccaaggacaacuccauccgccucuccgccggcggcgacaucugggucacccgcgagcccuacgucuccugcgaccccgacaagugcuaccaguucgcccucggccagggcaccacccucaacaacguccacuccaacaacaccguccgcgaccgcacccccuaccgcacccuccucaugaacgagcucggcguccccuuccaccucggcaccaagcaggucugcaucgccugguccuccuccuccugccacgacggcaaggccuggcuccacgucugcaucaccggcgacgacaagaacgccaccgccuccuucaucuacaacggccgccucgucgacuccgucgucuccugguccaaggagauccuccgcacccaggaguccgagugcgucugcaucaacggcaccugcaccgucgucaugaccgacggcuccgccuccggcaaggccgacaccaagauccucuucaucgaggagggcaagaucguccacaccuccacccucuccggcuccgcccagcacgucgaggagugcuccugcuacccccgcuaccccggcguccgcugcgucugccgcgacaacuggaagggcuccaaccgccccaucgucgacaucaacaucaaggaccacuccaucgucuccuccuacgucugcuccggccucgucggcgacaccccccgcaagaacgacuccuccuccuccucccacugccucgaccccaacaacgaggagggcggccacggcgucaagggcugggccuucgacgacggcaacgacgucuggaugggccgcaccaucaacgagaccucccgccucggcuacgagaccuucaaggucaucgagggcugguccaaccccaaguccaagcuccagaucaaccgccaggucaucgucgaccgcggcgaccgcuccggcuacuccggcaucuucuccgucgagggcaaguccugcaucaaccgcugcuucuacgucgagcucauccgcggccgcaaggaggagaccgagguccucuggaccuccaacuccaucgucgucuucugcggcaccuccggcaccuacggcaccggcuccuggcccgacggcgccgaccucaaccucaugcccaucuga

SEQ ID NO: 120854 - RNA, 1410 nt, Artificial Sequence
  derived and/or modified CDS sequence (opt2) from neuraminidase__InfluenzaA__AHL96871
augaaccccaaccagaagaucaucaccaucggcuccgucucccucaccaucuccaccaucugcuucuucaugcagaucgccauccucaucaccaccgucacccuccacuucaagcaguacgaguucaacuccccccccaacaaccaggucaugcucugcgagcccaccaucgucgagcgcaacaucaccgagaucgucuaccucaccaacaccaccaucgagaaggagaucugccccaagcccgccgaguaccgcaacugguccaagccccagugcggcaucaccggcuucgcccccuucuccaaggacaacuccauccgccucuccgccggcggcgacaucugggucacccgcgagcccuacgucuccugcgaccccgacaagugcuaccaguucgcccucggccagggcaccacccucaacaacguccacuccaacaacaccguccgcgaccgcacccccuaccgcacccuccucaugaacgagcucggcguccccuuccaccucggcaccaagcaggucugcaucgccugguccuccuccuccugccacgacggcaaggccuggcuccacgucugcaucaccggcgacgacaagaacgccaccgccuccuucaucuacaacggccgccucgucgacuccgucgucuccugguccaaggagguccuccgcacccaggaguccgagugcgucugcaucaacggcaccugcgccgucgucaugaccgacggcuccgccuccggcaaggccgacaccaagauccucuucaucgaggagggcaagaucguccacaccuccacccucuccggcuccgcccagcacgucgaggagugcuccugcuacccccgcuaccccggcguccgcugcgucugccgcgacaacuggaagggcuccaaccgccccaucgucgacaucaacaucaaggaccacuccaucgucuccuccuacgucugcuccggccucgucggcgacaccccccgcaagaacgaccgcuccuccuccucccacugccucgaccccaacaacgaggagggcggccacggcgucaagggcugggccuucgacgacggcaacgacgucuggaugggccgcaccaucaacgagaccucccgccucggcuacgagaccuucaaggucaucgagggcugguccaaccccaaguccaagcuccagaucaaccgccaggucaucgucgaccgcggcgaccgcuccggcuacuccggcaucuucuccgucgagggcaaguccugcaucaaccgcugcuucuacgucgagcucauccgcggccgcaaggaggagaccgagguccucuggaccuccaacuccaucgucgucuucugcggcaccuccggcaccuacggcaccggcuccuggcccgacggcgccgaccucaaccucaugcccaucuga

SEQ ID NO: 120855 - RNA, 1410 nt, Artificial Sequence
  derived and/or modified CDS sequence (opt2) from neuraminidase__InfluenzaA__AHL96883
augaaccccaaccagaagaucaucaccaucggcuccgucucccucaccaucuccaccaucugcuucuucaugcagaucgccauccucaucaccaccgucacccuccacuucaagcaguacgaguucaacuccccccccaacaaccaggucaugcucugcgagcccaccaucaucgagcgcaacaucaccgagaucgucuaccucaccaacaccaccaucgagaaggagaucugccccaaguccgccgaguaccgcaacugguccaagccccagugcggcaucaccggcuucgcccccuucuccaaggacaacuccauccgccucuccgccggcggcgacaucugggucacccgcgagcccuacgucuccugcgaccccgacaagugcuaccaguucgcccucggccagggcaccacccucaacaacaugcacuccaacaacaccguccgcgaccgcacccccuaccgcacccuccucaugaacgagcucggcguccccuuccaccucggcaccaagcaggucugcaucgccugguccuccuccuccugccacgacggcaaggccuggcuccacgucugcaucaccggcgacgacaagaacgccaccgccuccuucaucuacaacggccgccucgucgacuccgucgucuccugguccaaggagauccuccgcacccaggaguccgagugcgucugcaucaacggcaccugcaccgucgucaugaccgacggcuccgccuccggcaaggccgacaccaagauccucuucaucgaggagggcaagaucguccacaccuccacccucuccggcuccgcccagcacgucgaggagugcuccugcuacccccgcuaccccggcguccgcugcgucugccgcgacaacuggaagggcuccaaccgccccaucgucgacaucaacaucaaggaccacuccaucgucuccuccuacgucugcuccggccucgucggcgacaccccccgcaagaacgacuccuccuccuccucccacugccucgaccccaacaacgaggagggcggccacggcgucaagggcugggccuucgacgacggcaacgacgucuggaugggccgcaccaucaacgagaccucccgccucggcuacgagaccuucaaggucaucgagggcugguccaaccccaaguccaagcuccagaucaaccgccaggucaucgucgaccgcggcgaccgcuccggcuacuccggcaucuucuccgucgagggcaaguccugcaucaaccgcugcuucuacgucgagcucauccgcggccgcaaggaggagaccgagguccucuggaccuccaacuccaucgucgucuucugcggcaccuccggcaccuacggcaccggcuccuggcccgacggcgccgaccucaaccucaugcccaucuga

SEQ ID NO: 120856 - RNA, 1410 nt, Artificial Sequence; identical to SEQ ID NO: 119907
  derived and/or modified CDS sequence (opt2) from neuraminidase__InfluenzaA__AHL96895

SEQ ID NO: 120857 - RNA, 1410 nt, Artificial Sequence
  derived and/or modified CDS sequence (opt2) from neuraminidase__InfluenzaA__AHL96907
augaaccccaaccagaagaucaucaccaucggcuccgucucccucaccaucuccaccaucugcuucuucaugcagaucgccauccucaucaccaccgucacccuccacuucaagcaguacgaguucaacuccccccccaacaaccaggucaugcucugcgagcccaccaucgucgagcgcaacaucaccgagaucgucuaccucaccaacaccaccaucgagaaggagaucugccccaagcccgccgaguaccgcaacugguccaagccccagugcggcaucaccggcuucgcccccuucuccaaggacaacuccauccgccucuccgccggcggcgacaucugggucacccgcgagcccuacgucuccugcgaccccgacaagugcuaccaguucgcccucggccagggcaccacccucaacaacguccacuccaacaacaccguccgcgaccgcacccccuaccgcacccuccucaugaacgagcucggcguccccuuccaccucggcaccaagcaggucugcaucgccugguccuccuccuccugccacgacggcaaggccuggcuccacgucugcaucaccggcgacgacaagaacgccaccgccuccuucaucuacaacggccgccucgucgacuccgucgucuccugguccaaggagguccuccgcacccaggaguccgagugcgucugcaucaacggcaccugcgccgucgucaugaccgacggcuccgccuccggcaaggccgacaccaagauccucuucaucgaggagggcaagaucguccacaccuccacccucuccggcuccgcccagcacgucgaggagugcuccugcuacccccgcuaccccggcguccgcugcgucugccgcgacaacuggaagggcuccaaccgccccaucgucgacaucaacaucaaggaccacuccaucgucuccuccuacgucugcuccggccucgucggcgacaccccccgcaagaacgacuccuccuccuccucccacugccucgaccccaacaacgaggagggcggccacggcgucaagggcugggccuucgacgacggcaacgacgucuggaugggccgcaccaucaacgagaccucccgccucggcuacgagaccuucaaggucaucgagggcugguccaaccccaaguccaagcuccagaucaaccgccaggucaucgucgaccgcggcgaccgcuccggcuacuccggcaucuucuccgucgagggcaaguccugcaucaaccgcugcuucuacgucgagcucauccgcggccgcaaggaggagaccgagguccucuggaccuccaacuccaucgucgucuucugcggcaccuccggcaccuacggcaccggcuccuggcccgacggcgccgaccucaaccucaugcccaucuga

SEQ ID NO: 120858 - RNA, 1410 nt, Artificial Sequence; identical to SEQ ID NO: 119919
  derived and/or modified CDS sequence (opt2) from neuraminidase__InfluenzaA__AHL96919

SEQ ID NO: 120859 - RNA, 1410 nt, Artificial Sequence; identical to SEQ ID NO: 119919
  derived and/or modified CDS sequence (opt2) from neuraminidase__InfluenzaA__AHL96931

SEQ ID NO: 120860 - RNA, 1410 nt, Artificial Sequence; identical to SEQ ID NO: 119919
  derived and/or modified CDS sequence (opt2) from neuraminidase__InfluenzaA__AHL96943

SEQ ID NO: 120861 - RNA, 1410 nt, Artificial Sequence
  derived and/or modified CDS sequence (opt2) from neuraminidase__InfluenzaA__AHL96955
augaaccccaaccagaagaucaucaccaucggcuccgucucccucaccaucuccaccaucugcuucuucaugcagaucgccauccucaucaccaccgucacccuccacuucaagcaguacgaguucaacucccccuccaacaaccaggucaugcucugcgagcccaccaucaucgagcgcaacaucaccgagaucgucuaccucaccaacaccaccaucgagaaggagaucugccccaagcccgccgaguaccgcaacugguccaagccccagugcggcaucaccggcuucgcccccuucuccaaggacaacuccauccgccucuccgccggcggcaacaucugggucacccgcgagcccuacgucuccugcgaccccgacaagugcuaccaguucgcccucggccagggcaccacccucaacaacguccacuccaacaacaccguccgcgaccgcacccccuaccgcacccuccucaugaacgagcucggcguccccuuccaccucggcaccaagcaggucugcaucgccugguccuccuccuccugccacgacggcaaggccuggcuccacgucugcaucaccggcgacgacaagaacgccaccgccuccuucaucuacaacggccgccucgucgacuccgucgucuccugguccaaggagauccuccgcacccaggaguccgagugcgucugcaucaacggcaccugcaccgucgucaugaccgacggcuccgccuccggcaaggccgacaccaagauccucuucaucgaggagggcaagaucguccacaccuccacccucuccggcuccgcccagcacgucgaggagugcuccugcuacccccgcuaccccggcguccgcugcgucugccgcgacaacuggaagggcuccaaccgccccaucgucgacaucaacaucaaggaccacuccaucgucuccuccuacgucugcuccggccucgucggcgacaccccccgcaagaacgacuccuccuccuccucccacugccucgaccccaacaacgaggagggcggccacggcgucaagggcugggccuucgacgacggcaacgacgucuggaugggccgcaccaucaacgagaccucccgccucggcuacgagaccuucaaggucaucgagggcugguccaaccccaaguccaagcuccagaucaaccgccaggucaucgucgaccgcggcgaccgcuccggcuacuccggcaucuucuccgucgagggcaaguccugcaucaaccgcugcuucuacgucgagcucauccgcggccgcaaggaggagaccgagguccucuggaccuccaacuccaucgucgucuucugcggcaccuccggcaccuacggcaccggcuccuggcccgacggcgccgaccucaaccucaugcccaucuga

SEQ ID NO: 120862 - RNA, 1410 nt, Artificial Sequence; identical to SEQ ID NO: 120760
  derived and/or modified CDS sequence (opt2) from neuraminidase__InfluenzaA__AHL96967

SEQ ID NO: 120863 - RNA, 1410 nt, Artificial Sequence
  derived and/or modified CDS sequence (opt2) from neuraminidase__InfluenzaA__AHL96979
augaaccccaaccagaagaucaucaccaucggcuccgucucccucaccaucuccaccaucugcuucuucaugcagaucgccauccucaucaccaccgucacccuccacuucaagcaguacgaguucaacuccccccccaacaaccaggucaugcucugcgagcccaccaucaucgagcgcaacaucaccgagaucgucuaccucaccaacaccaccaucgagaaggagaucugccccaagcccgccgaguaccgcaacugguccaagccccagugcgacaucaccggcuucgcccccuucuccaaggacaacuccauccgccucuccgccggcggcgacaucugggucacccgcgagcccuacgucuccugcgaccccgacaagugcuaccaguucgcccucggccagggcaccacccucaacaacaugcacuccaacaacaccguccgcgaccgcacccccuaccgcacccuccucaugaacgagcucggcguccccuuccaccucggcaccaagcaggucugcaucgccugguccuccuccuccugccacgacggcaaggccuggcuccacgucugcaucaccggcgacgacaagaacgccaccgccuccuucaucuacaacggccgccucgucgacuccgucgucuccugguccaaggagauccuccgcacccaggaguccgagugcgucugcaucaacggcaccugcaccgucgucaugaccgacggcuccgccuccggcaaggccgacaccaagauccucuucaucgaggagggcaagaucguccacaccuccacccucuccggcuccgcccagcacgucgaggagugcuccugcuacccccgcuaccccggcguccgcugcgucugccgcgacaacuggaagggcuccaaccgccccaucgucgacaucaacaucaaggaccacuccaucgucuccuccuacgucugcuccggccucgucggcgacaccccccgcaagaacgacuccuccuccuccucccacugccucgaccccaacaacgaggagggcggccacggcgucaagggcugggccuucgacgacggcaacgacgucuggaugggccgcaccaucaacgagaccucccgccucggcuacgagaccuucaaggucaucgagggcugguccaaccccaaguccaagcuccagaucaaccgccaggucaucgucgaccgcggcgaccgcuccggcuacuccggcaucuucuccgucgagggcaaguccugcaucaaccgcugcuucuacgucgagcucauccgcggccgcaaggaggagaccgagguccucuggaccuccaacuccaucgucgucuucugcggcaccuccggcaccuacggcaccggcuccuggcccgacggcgccgaccucaacaucaugcccaucuga

SEQ ID NO: 120864 - RNA, 1410 nt, Artificial Sequence; identical to SEQ ID NO: 119919
  derived and/or modified CDS sequence (opt2) from neuraminidase__InfluenzaA__AHL96991

SEQ ID NO: 120865 - RNA, 1410 nt, Artificial Sequence; identical to SEQ ID NO: 118182
  derived and/or modified CDS sequence (opt2) from neuraminidase__InfluenzaA__AHL97003

SEQ ID NO: 120866 - RNA, 1410 nt, Artificial Sequence
  derived and/or modified CDS sequence (opt2) from neuraminidase__InfluenzaA__AHL97015
augaaccccaaccagaagaucaucaccaucggcuccgucucccucaccaucuccaccaucugcuucuucaugcagaucgccauccucaucaccaccgucacccuccacuucaagcaguacgaguucaacuccccccccaacaaccaggucaugcucugcgagcccaccaucaucgagcgcaacaucaccgagaucgucuaccucaccaacaccaccaucgagaaggagaucugccccaagcccgccgaguaccgcaacugguccaagccccagugcggcaucaccggcuucgcccccuucuccaaggacaacuccauccgccucuccgccggcggcgacaucugggucacccgcgagcccuacgucuccugcgaccccgacaagugcuaccaguucgcccucggccagggcaccacccucaacaacguccacuccaacaacaccguccgcgaccgcacccccuaccgcacccuccucaugaacgagcucggcguccccuuccaccucggcaccaagcaggucugcaucgccugguccuccuccuccugccacgacggcaaggccuggcuccacgucugcaucaccggcgacgacaagaacgccaccgccuccuucaucuacaacggccgccucgucgacuccgucgucuccugguccaaggagauccuccgcacccaggaguccgagugcgucugcaucaacggcaccugcaccgucgucaugaccgacggcuccgccuccggcaaggccgacaccaagauccucuucaucgaggagggcaagaucguccacaccuccacccucuccggcuccgcccagcacgucgaggagugcuccugcuacccccgcuaccccggcguccgcugcgucugccgcgacaacuggaagggcuccaaccgccccaucgucgacaucaacaucaaggaccacuccaucgucuccuccuacgucugcuccggccucgucggcgacaccccccgcaagaacgacuccuccuccuccucccacugccucgaccccaacaacgaggagggcggccacggcgucaagggcugggccuucgacgacggcaacgacgucuggaugggccgcaccaucaacgagaccucccgccucggcuacgagaccuucaaggucaucgagggcugguccaaccccaaguccaagcuccagaucaaccgccagaucaucgucgaccgcggcgaccgcuccggcuacuccggcaucuucuccgucgagggcaaguccugcaucaaccgcugcuucuacgucgagcucauccgcggccgcaaggaggagaccgagguccucuggaccuccaacuccaucgucgucuucugcggcaccuccggcaccuacggcaccggcuccuggcccgacggcgccgaccucaaccucaugcccaucuga

SEQ ID NO: 120867 - RNA, 1410 nt, Artificial Sequence; identical to SEQ ID NO: 118182
  derived and/or modified CDS sequence (opt2) from neuraminidase__InfluenzaA__AHL97027

SEQ ID NO: 120868 - RNA, 1410 nt, Artificial Sequence
  derived and/or modified CDS sequence (opt2) from neuraminidase__InfluenzaA__AHL97039
augaaccccaaccagaagaucaucaccaucggcuccgucucccucaccaucuccaccaucugcuucuucaugcagaucgccauccucaucaccaccgucacccuccacuucaagcaguacgaguucaacuccccccccaacaaccaggucaugcucugcgagcccaccaucaucgagcgcaacaucaccgagaucgucuaccucaccaacaccaccaucgagaaggagaucugccccaagcccgccgaguaccgcaacugguccaagccccagugcggcaucaccggcuucgcccccuucuccaaggacaacuccauccgccucuccgccggcggcgacaucugggucacccgcgagcccuacgucuccugcgaccccgacaagugcuaccaguucgcccucggccagggcaccacccucaacaacguccacuccaacaacaccguccgcgaccgcacccccuaccgcacccuccucaugaacgagcucggcguccccuuccaccucggcaccaagcaggucugcaucgccugguccuccuccuccugccacgacggcaaggccuggcuccacgucugcaucaccggcgacgacaagaacgccaccgccuccuucaucuacaacggccgccucgucgacuccgucgucuccugguccaaggagauccuccgcacccaggaguccgagugcgucugcaucaacggcaccugcaccgucgucaugaccgacggcaacgccuccggcaaggccgacaccaagauccucuucaucgaggagggcaagaucguccacaccuccacccucuccggcuccgcccagcacgucgaggagugcuccugcuacccccgcuaccccggcguccgcugcgucugccgcgacaacuggaagggcuccaaccgccccaucgucgacaucaacaucaaggacuacuccaucgucuccuccuacgucugcuccggccucgucggcgacaccccccgcaagaacgacuccuccuccuccucccacugccucgaccccaacaacgaggagggcggccacggcgucaagggcugggccuucgacgacggcaacgacgucuggaugggccgcaccaucaacgagaccucccgccucggcuacgagaccuucaaggucaucgagggcugguccaaccccaaguccaagcuccagaucaaccgccaggucaucgucgaccgcggcgaccgcuccggcuacuccggcaucuucuccgucgagggcaaguccugcaucaaccgcugcuucuacgucgagcucauccgcggccgcaaggaggagaccgagguccucuggaccuccaacuccaucgucgucuucugcggcaccuccggcaccuacggcaccggcuccuggcccgacggcgccgaccucaaccucaugcccaucuga

SEQ ID NO: 120869 - RNA, 1410 nt, Artificial Sequence; identical to SEQ ID NO: 118182
  derived and/or modified CDS sequence (opt2) from neuraminidase__InfluenzaA__AHL97051

SEQ ID NO: 120870 - RNA, 1410 nt, Artificial Sequence
  derived and/or modified CDS sequence (opt2) from neuraminidase__InfluenzaA__AHL97063
augaaccccaaccagaagaucaucaccaucggcuccgucucccucaccaucuccaccaucugcuucuucaugcagaucgccauccucaucaccaccgucacccuccacuucaagcaguacgaguucaacuccccccccaacaaccaggucaugcucugcgagcccaccaucaucgagcgcaacaucaccgagaucgucuaccucaccaacaccaccaucgagaaggagaucugccccaagcccgccgaguaccgcaacugguccaagccccagugcggcaucaccggcuucgcccccuucuccaaggacaacuccauccgccucuccgccggcggcgacaucugggucacccgcgagcccuacgucuccugcgaccccgacaagugcuaccaguucgcccucggccagggcaccacccucaacaacguccacuccaacaacaccguccgcgaccgcacccccuaccgcacccuccucaugaacgagcucggcguccccuuccaccucggcaccaagcaggucugcaucgccugguccuccuccuccugccacgacggcaaggccuggcuccacgucugcaucaccggcgacgacaagaacgccaccgccuccuucaucuacaacggccgccucgucgacuccgucgucuccugguccaaggagauccuccgcacccaggaguccgagugcgucugcaucaacggcaccugcaccgucgucaugaccgacggcuccgccuccggcaaggccgacaccaagauccucuucaucgaggagggcaagaucguccacaccuccacccucuccggcuccgcccagcacgucgaggagugcuccugcuacccccgcuaccccggcguccgcugcgucugccgcgacaacuggaagggcuccaaccgccccaucgucgacaucaacaucaaggaccacuccaucgucuccuccuacgucugcuccggccucgucggcgacaccccccgcaagaacgacuccuccuccuccucccacugccucggccccaacaacgaggagggcggccacggcgucaagggcugggccuucgacgacggcaacgacgucuggaugggccgcaccaucaacgagaccucccgccucggcuacgagaccuucaaggucaucgacggcugguccaaccccaaguccaagcuccagaucaaccgccaggucaucgucgaccgcggcgaccgcuccggcuacuccggcaucuucuccgucgagggcaaguccugcaucaaccgcugcuucuacgucgagcucauccgcggccgcaaggaggagaccgagguccucuggaccuccaacuccaucgucgucuucugcggcaccuccggcaccuacggcaccggcuccuggcccgacggcgccgaccucaaccucaugcccaucuga

SEQ ID NO: 120871 - RNA, 1410 nt, Artificial Sequence; identical to SEQ ID NO: 118182
  derived and/or modified CDS sequence (opt2) from neuraminidase__InfluenzaA__AHL97075

SEQ ID NO: 120872 - RNA, 1410 nt, Artificial Sequence; identical to SEQ ID NO: 119907
  derived and/or modified CDS sequence (opt2) from neuraminidase__InfluenzaA__AHL97087

SEQ ID NO: 120873 - RNA, 1410 nt, Artificial Sequence; identical to SEQ ID NO: 119411
  derived and/or modified CDS sequence (opt2) from neuraminidase__InfluenzaA__AHL97099

SEQ ID NO: 120874 - RNA, 1410 nt, Artificial Sequence; identical to SEQ ID NO: 118182
  derived and/or modified CDS sequence (opt2) from neuraminidase__InfluenzaA__AHL97111

SEQ ID NO: 120875 - RNA, 1410 nt, Artificial Sequence
  derived and/or modified CDS sequence (opt2) from neuraminidase__InfluenzaA__AHL97123
augaaccccaaccagaagaucaucaccaucggcuccgucucccucaccaucuccaccaucugcuucuucaugcagaucgccauccucaucaccaccgucacccuccacuucaagcaguacgaguucgacuccccccccaacaaccaggucaugcucugcgagcccaccaucaucgagcgcaacaucaccgagaucgucuaccucaccaacaccaccaucgagaaggagaucugccccaagcccgccgaguaccgcaacugguccaagccccagugcggcaucaccggcuucgcccccuucuccaaggacaacuccauccgccucuccgccggcggcgacaucugggucacccgcgagcccuacgucuccugcgaccccgacaagugcuaccaguucgcccucggccagggcaccacccucaacaacguccacuccaacaacaccguccgcgaccgcacccccuaccgcacccuccucaugaacgagcucggcguccccuuccaccucggcaccaagcaggucugcaucgccugguccuccuccuccugccacgacggcaaggccuggcuccacgucugcaucaccggcgacgacaagaacgccaccgccuccuucaucuacaacggccgccucgucgacuccgucgucuccugguccaaggagauccuccgcacccaggaguccgagugcgucugcaucaacggcaccugcaccgucgucaugaccgacggcuccgccuccggcaaggccgacaccaagauccucuucaucgaggagggcaagaucguccacaccuccacccucuccggcuccgcccagcacgucgaggagugcuccugcuacccccgcuaccccggcguccgcugcgucugccgcgacaacuggaagggcuccaaccgccccaucgucgacaucaacaucaaggaccacuccaucgucuccuccuacgucugcuccggccucgucggcgacaccccccgccgcaacgacuccuccuccuccucccacugccucgaccccaacaacgaggagggcggccacggcgucaagggcugggccuucgacgacggcaacgacgucuggaugggccgcaccaucaacgagaccucccgccucggcuacgagaccuucaaggucaucgagggcugguccaaccccaaguccaagcuccagaucaaccgccaggucaucgucgaccgcggcgaccgcuccggcuacuccggcaucuucuccgucgagggcaaguccugcaucaaccgcugcuucuacgucgagcucauccgcggccgcaaggaggagaccgagguccucuggaccuccaacuccaucgucgucuucugcggcaccuccggcaccuacggcaccggcuccuggcccgacggcgccgaccucaaccucaugcccaucuga

SEQ ID NO: 120876 - RNA, 1410 nt, Artificial Sequence; identical to SEQ ID NO: 119939
  derived and/or modified CDS sequence (opt2) from neuraminidase__InfluenzaA__AHL97135

SEQ ID NO: 120877 - RNA, 1410 nt, Artificial Sequence
  derived and/or modified CDS sequence (opt2) from neuraminidase__InfluenzaA__AHL97147
augaaccccaaccagaagaucaucaccaucggcuccgucucccucaccaucuccaccaucugcuucuucaugcagaucgccauccucaucaccaccgucacccuccacuucaagcaguacgaguucaacuccccccccaacaaccaggucaugcucugcgagcccaccaucaucgagcgcaacaucaccgagaucgucuaccucaccaacaccaccaucgagaaggagaucugccccaagcccgccgaguaccgcaacugguccaagccccagugcggcaucaccggcuucgcccccuucuccaaggacaacuccauccgccucuccgccggcggcgacaucugggucacccgcgagcccuacgucuccugcgaccccgacaagugcuaccaguucgcccucggccagggcaccacccucaacaacguccacuccaacaacaccguccgcgaccgcacccccuaccgcacccuccucaugaacgagcucggcguccccuuccaccucggcaccaagcaggucugcaucgccugguccuccuccuccugccacgacggcaaggccuggcuccacgucugcaucaccggcgacgacaagaacgccaccgccuccuucaucuacaacggccgccucgucgacuccgucgucuccugguccaaggagauccuccgcacccaggaguccgagugcgucugcaucaacggcaccugcaccgucgucaugaccgacggcuccgccuccggcaaggccgacaccaagauccucuucaucgaggagggcaagaucguccacaccuccacccucuccggcuccgcccagcacgucgaggagugcuccugcuacccccgcuaccccggcguccgcugcgucugccgcgacaacuggcgcggcuccaaccgccccaucgucgacaucaacaucaaggaccacuccaucgucuccuccuacgucugcuccggccucgucggcgacaccccccgcaagaacgacuccuccuccuccucccacugccucgaccccaacaacgaggagggcggccacggcgucaagggcugggccuucgacgacggcaacgacgucuggaugggccgcaccaucaacgagaccucccgccucggcuacgagaccuucaaggucaucgagggcugguccaaccccaaguccaagcuccagaucaaccgccaggucaucgucgaccgcggcgaccgcuccggcuacuccggcaucuucuccgucgagggcaaguccugcaucaaccgcugcuucuacgucgagcucauccgcggccgcaaggaggagaccgagguccucuggaccuccaacuccaucgucgucuucugcggcaccuccggcaccuacggcaccggcuccuggcccgacggcgccgaccucaaccucaugcccaucuga

SEQ ID NO: 120878 - RNA, 1410 nt, Artificial Sequence; identical to SEQ ID NO: 118182
  derived and/or modified CDS sequence (opt2) from neuraminidase__InfluenzaA__AHL97159

SEQ ID NO: 120879 - RNA, 1410 nt, Artificial Sequence; identical to SEQ ID NO: 118182
  derived and/or modified CDS sequence (opt2) from neuraminidase__InfluenzaA__AHL97171

SEQ ID NO: 120880 - RNA, 1410 nt, Artificial Sequence; identical to SEQ ID NO: 118182
  derived and/or modified CDS sequence (opt2) from neuraminidase__InfluenzaA__AHL97183

SEQ ID NO: 120881 - RNA, 1410 nt, Artificial Sequence; identical to SEQ ID NO: 118182
  derived and/or modified CDS sequence (opt2) from neuraminidase__InfluenzaA__AHL97195

SEQ ID NO: 120882 - RNA, 1410 nt, Artificial Sequence; identical to SEQ ID NO: 118182
  derived and/or modified CDS sequence (opt2) from neuraminidase__InfluenzaA__AHL97207

SEQ ID NO: 120883 - RNA, 1410 nt, Artificial Sequence; identical to SEQ ID NO: 118182
  derived and/or modified CDS sequence (opt2) from neuraminidase__InfluenzaA__AHL97219

SEQ ID NO: 120884 - RNA, 1410 nt, Artificial Sequence
  derived and/or modified CDS sequence (opt2) from neuraminidase__InfluenzaA__AHL97231
augaaccccaaccagaagaucaucaccaucggcuccgucucccucaccaucuccaccaucugcuucuucaugcagaucgccauccucaucaccaccgucacccuccacuucaagcaguacgacuucaacuccccccccaacaaccaggucaugcucugcgagcccaccaucaucgagcgcaacaucaccgagaucgucuaccucaccaacaccaccaucgagaaggagaucugccccaagcccgccgaguaccgcaacugguccaagccccagugcggcaucaccggcuucgcccccuucuccaaggacaacuccauccgccucuccgccggcggcgacaucugggucacccgcgagcccuacgucuccugcgaccccgacaagugcuaccaguucgcccucggccagggcaccacccucaacaacguccacuccaacaacaccguccgcgaccgcacccccuaccgcacccuccucaugaacgagcucggcguccccuuccaccucggcaccaagcaggucugcaucgccugguccuccuccuccugccacgacggcaaggccuggcuccacgucugcaucaccggcgacgacaagaacgccaccgccuccuucaucuacaacggccgccucgucgacuccgucgucuccugguccaaggagauccuccgcacccaggaguccgagugcgucugcaucaacggcaccugcaccgucgucaugaccgacggcuccgccuccggcaaggccgacaccaagauccucuucaucgaggagggcaagaucguccacaccuccacccucuccggcuccgcccagcacgucgaggagugcuccugcuacccccgcuaccccggcguccgcugcgucugccgcgacaacuggaagggcuccaaccgccccaucgucgacaucaacaucaaggaccacuccgucaucuccuccuacgucugcuccggccucgucggcgacaccccccgcaagaacgacuccuccuccuccucccacugccucgaccccaacaacgaggagggcggccacggcgucaagggcugggccuucgacgacggcaacgacgucuggaugggccgcaccaucaacgagaccucccgccucggcuacgagaccuucaaggucaucggcggcugguccaaccccaaguccaagcuccagaucaaccgccaggucaucgucgaccgcggcgaccgcuccggcuacuccggcaucuucuccgucgagggcaaguccugcaucaaccgcugcuucuacgucgagcucauccgcggccgcaaggaggagaccgagguccucuggaccuccaacuccaucgucgucuucugcggcaccuccggcaccuacggcaccggcuccuggcccgacggcgccgaccucaaccucaugcccaucuga

SEQ ID NO: 120885 - RNA, 1410 nt, Artificial Sequence
  derived and/or modified CDS sequence (opt2) from neuraminidase__InfluenzaA__AHL97243
augaaccccaaccagaagaucaucaccaucggcuccgucucccucaccaucuccaccaucugcuucuucaugcagaucgccauccucaucaccaccgucacccucaacuucaagcaguacgaguucaacuccccccccaacaaccaggucaugcucugcgagcccaccaucaucgagcgcaacaucaccgagaucgucuaccucaccaacaccaccaucgagaaggagaucugccccaagcccgccgaguaccgcaacugguccaagccccagugcggcaucaccggcuucgcccccuucuccaaggacaacuccauccgccucuccgccggcggcgacaucugggucacccgcgagcccuacgucuccugcgaccccgacaagugcuaccaguucgcccucggccagggcaccacccucaacaacguccacuccaacaacaccguccgcgaccgcacccccuaccgcacccuccucaugaacgagcucggcguccccuuccaccucggcaccaagcaggucugcaucgccugguccuccuccuccugccacgacggcaaggccuggcuccacgucugcaucaccggcgacgacaagaacgccaccgccuccuucaucuacaacggccgccucgucgacuccgucgucuccugguccaaggagauccuccgcacccaggaguccgagugcgucugcaucaacggcaccugcaccgucgucaugaccgacggcuccgccuccggcaaggccgacaccaagauccucuucaucgaggagggcaagaucguccacaccuccacccucuccggcuccgcccagcacgucgaggagugcuccugcuacccccgcuaccccggcguccgcugcgucugccgcgacaacuggaagggcuccaaccgccccaucgucgacaucaacaucaaggaccacuccaucgucuccuccuacgucugcuccggccucgucggcgacaccccccgcaagaacgacuccuccuccuccucccacugccucgaccccaacaacgaggagggcggccacggcgucaagggcugggccuucgacgacggcaacgacgucuggaugggccgcaccaucaacgagaccucccgccucggcuacgagaccuucaaggucaucgagggcugguccaaccccaaguccaagcuccagaucaaccgccaggucaucgucgaccgcggcgaccgcuccggcuacuccggcaucuucuccgucgagggcaaguccugcaucaaccgcugcuucuacgucgagcucauccgcggccgcaaggaggagaccgagguccucuggaccuccaacuccaucgucgucuucugcggcaccuccggcaccuacggcaccggcuccuggcccgacggcgccgaccucaaccucaugcccaucuga

SEQ ID NO: 120886 - RNA, 1410 nt, Artificial Sequence; identical to SEQ ID NO: 119411
  derived and/or modified CDS sequence (opt2) from neuraminidase__InfluenzaA__AHL97255

SEQ ID NO: 120887 - RNA, 1410 nt, Artificial Sequence
  derived and/or modified CDS sequence (opt2) from neuraminidase__InfluenzaA__AHL97267
augaaccccaaccagaagaucaucaccaucggcuccgucucccucaccaucuccaccaucugcuucuucaugcagaucgccauccucaucaccaccgucacccuccacuucaagcaguacgaguucaacuccccccccaacaaccaggucaugcucugcgagcccaccaucaucgagcgcaacaucaccgagaucgucuaccucaccaacaccaccaucgagaaggagaucugccccaagcccgccgaguaccgcaacugguccaagccccagugcggcaucaccggcuucgcccccuucuccaaggacaacuccauccgccucuccgccggcggcgacaucugggucacccgcgagcccuacgucuccugcgaccccgacaagugcuaccaguucgcccucggccagggcaccacccucaacaacguccacuccaacaacaccgcccgcgaccgcacccccuaccgcacccuccucaugaacgagcucggcguccccuuccaccucggcaccaagcaggucugcaucgccugguccuccuccuccugccacgacggcaaggccuggcuccacgucugcaucaccggcgacgacaagaacgccaccgccuccuucaucuacaacggccgccucgucgacuccgucgucuccugguccaaggagauccuccgcacccaggaguccgagugcgucugcaucaacggcaccugcaccgucgucaugaccgacggcuccgccuccggcaaggccgacaccaagauccucuucaucgaggagggcaagaucguccacaccuccacccucuccggcuccgcccagcacgucgaggagugcuccugcuacccccgcuaccccggcguccgcugcgucugccgcgacaacuggaagggcuccaaccgccccaucgucgacaucaacaucaaggaccacuccaucgucuccuccuacgucugcuccggccucgucggcgacaccccccgcaagaacgacuccuucuccuccucccacugccucgaccccaacaacgaggagggcggccacggcgucaagggcugggccuucgacgacggcaacgacgucuggaugggccgcaccaucaacgagaccucccgccucggcuacgagaccuucaaggucaucgagggcugguccaaccccaaguccaagcuccagaucaaccgccaggucaucgucgaccgcggcgaccgcuccggcuacuccggcaucuucuccgucgagggcaaguccugcaucaaccgcugcuucuacgucgagcucauccgcggccgcaaggaggagaccgagguccucuggaccuccaacuccaucgucgucuucugcggcaccuccggcaccuacggcaccggcuccuggcccgacggcgccgaccucaaccucaugcccaucuga

SEQ ID NO: 120888 - RNA, 1410 nt, Artificial Sequence; identical to SEQ ID NO: 118182
  derived and/or modified CDS sequence (opt2) from neuraminidase__InfluenzaA__AHL97279

SEQ ID NO: 120889 - RNA, 1410 nt, Artificial Sequence; identical to SEQ ID NO: 120772
  derived and/or modified CDS sequence (opt2) from neuraminidase__InfluenzaA__AHL97291

SEQ ID NO: 120890 - RNA, 1410 nt, Artificial Sequence; identical to SEQ ID NO: 120760
  derived and/or modified CDS sequence (opt2) from neuraminidase__InfluenzaA__AHL97303

SEQ ID NO: 120891 - RNA, 1410 nt, Artificial Sequence
  derived and/or modified CDS sequence (opt2) from neuraminidase__InfluenzaA__AHL97339
augaaccccaaccagaagaucaucaccaucggcuccgucucccucaccaucuccaccaucugcuucuucaugcagaucgccauccucaucaccaccgucacccuccacuucaagcaguacgaguucgacuccccccccaacaaccaggucaugcucugcgagcccaccaucaucgagcgcaacaucaccgagaucgucuaccucaccaacaccaccaucgagaaggagaucugccccaagcccgccgaguaccgcaacugguccaagccccagugcggcaucaccggcuucgcccccuucuccaaggacaacuccauccgccucuccgccggcggcgacaucugggucacccgcgagcccuacgucuccugcgaccccgacaagugcuaccaguucgcccucggccagggcaccacccucaacaacguccacuccaacaacaccguccgcgaccgcaccuccuaccgcacccuccucaugaacgagcucggcguccccuuccaccucggcaccaagcaggucugcaucgccugguccuccuccuccugccacgacggcaaggccuggcuccacgucugcaucaccggcgacgacaagaacgccaccgccuccuucaucuacaacggccgccucgucgacuccgucgucuccugguccaaggagauccuccgcacccaggaguccgagugcgucugcaucaacggcaccugcaccgucgucaugaccgacggcuccgccuccggccgcgccgacaccaagauccucuucaucgaggagggcaagaucguccacaccuccacccucuccggcuccgcccagcacgucgaggagugcuccugcuacccccgcuaccccggcguccgcugcgucugccgcgacaacuggaagggcuccaaccgccccaucgucgacaucaacaucaaggaccacuccaucgucuccuccuacgucugcuccggccucgucggcgacaccccccgcaagaacgacuccuccuccuccucccacugccucgaccccaacaacgaggagggcggccacggcgucaagggcugggccuucgacgacggcaacgacgucuggaugggccgcaccaucaacgagaccucccgccucggcuacgagaccuucaaggucaucgagggcugguccaaccccaaguccaagcuccagaucaaccgccaggucaucgucgaccgcggcgaccgcuccggcuacuccggcaucuucuccgucgagggcaaguccugcaucaaccgcugcuucuacgucgagcucauccgcggccgcaaggaggagaccgagguccucuggaccuccaacuccaucgucgucuucugcggcaccuccggcaccuacggcaccggcuccuggcccgacggcgccgaccucaaccucaugcccaucuga

SEQ ID NO: 120892 - RNA, 1410 nt, Artificial Sequence; identical to SEQ ID NO: 119907
  derived and/or modified CDS sequence (opt2) from neuraminidase__InfluenzaA__AHL97351

SEQ ID NO: 120893 - RNA, 1410 nt, Artificial Sequence; identical to SEQ ID NO: 120772
  derived and/or modified CDS sequence (opt2) from neuraminidase__InfluenzaA__AHL97363

SEQ ID NO: 120894 - RNA, 1410 nt, Artificial Sequence; identical to SEQ ID NO: 118182
  derived and/or modified CDS sequence (opt2) from neuraminidase__InfluenzaA__AHL97387

SEQ ID NO: 120895 - RNA, 1410 nt, Artificial Sequence
  derived and/or modified CDS sequence (opt2) from neuraminidase__InfluenzaA__AHL97399
augaaccccaaccagaagaucaucaccaucggcuccgucucccucaccaucuccaccaucugcuucuucaugcagaucgccauccucaucaccaccgucacccuccacuucaagcaguacgaguucaacuccccccccaacaaccaggucaugcucugcgagcccaccaucaucgagcgcaacaucaccgagaucauguaccucaccaacaccaccaucgagaaggagaucugccccaagcccgccgaguaccgcaacugguccaagccccagugcggcaucaccggcuucgcccccuucuccaaggacaacuccauccgccucuccgccggcggcgacaucugggucacccgcgagcccuacgucuccugcgaccccgacaagugcuaccaguucgcccucggccagggcaccacccucaacaacaugcacuccaacaacaccguccgcgaccgcacccccuaccgcacccuccucaugaacgagcucggcguccccuuccaccucggcaccaagcaggucugcaucgccugguccuccuccuccugccacgacggcaaggccuggcuccacgucugcaucaccggcgacgacaagaacgccaccgccuccuucaucuacaacggccgccucgucgacuccgucgucuccugguccaaggagauccuccgcacccaggaguccgagugcgucugcaucaacggcaccugcaccgucgucaugaccgacggcuccgccuccggcaaggccgacaccaagauccucuucaucgaggagggcaagaucguccacaccuccacccucuccggcuccgcccagcacgucgaggagugcuccugcuacccccgcuaccccggcguccgcugcgucugccgcgacaacuggaagggcuccaaccgccccaucgucgacaucaacaucaaggaccacuccaucgucuccuccuacgucugcuccggccucgucggcgacaccccccgcaagaacgacuccuccuccuccucccacugccucgaccccaacaacgaggagggcggccacggcgucaagggcugggccuucgacgacggcaacgacgucuggaugggccgcaccaucaacgagaccucccgccucggcuacgagaccuucaaggucaucgagggcugguccaaccccaaguccaagcuccagaucaaccgccaggucaucgucgaccgcggcgaccgcuccggcuacuccggcaucuucuccgucgagggccgcuccugcaucaaccgcugcuucuacgucgagcucauccgcggccgcaaggaggagaccgagguccucuggaccuccaacuccaucgucgucuucugcggcaccuccggcaccuacggcaccggcuccuggcccgacggcgccgaccucaaccucaugcccaucuga

SEQ ID NO: 120896 - RNA, 1410 nt, Artificial Sequence; identical to SEQ ID NO: 119411
  derived and/or modified CDS sequence (opt2) from neuraminidase__InfluenzaA__AHL97411

SEQ ID NO: 120897 - RNA, 1410 nt, Artificial Sequence
  derived and/or modified CDS sequence (opt2) from neuraminidase__InfluenzaA__AHL97423
augaaccccaaccagaagaucaucaccaucggcuccgucucccucaccaucuccaccaucugcuucuucaugcagaucgccauccucaucaccaccgucacccuccacuucaagcaguacgaguucaacuccccccccaacaaccaggucaugcucugcgagcccaccaucaucgagcgcaacaucaccgagaucgucuaccucaccaacaccaccaucgagaaggagaucugccccaagcccgccgaguaccgcaacugguccaagccccagugcggcaucaccggcuucgcccccuucuccaaggacaacuccauccgccucuccgccggcggcgacaucugggucacccgcgagcccuacgucuccugcgaccccgacaagugcuaccaguucgcccucggccagggcaccacccucaacaacguccacuccaacaacaccguccgcgaccgcacccccuaccgcacccuccucaugaacgagcucggcguccccuuccaccucggcaccaagcaggucugcaucgccugguccuccuccuccugccacgacggcaaggccuggcuccacgucugcaucaccggcgacgacaagaacgccaccgccuccuucaucuacaacggccgccucgucgacuccgucgucuccugguccaaggagauccuccgcacccaggaguccgagugcgucugcaucaacggcaccugcaccgucgucaugaccgacggcuccgccuccggcaaggccgacaccaagauccucuucaucgaggagggcaagaucguccacaccuccacccucuccggcuccgcccagcacgucgaggagugcuccugcuacccccgcuaccccggcguccgcugcgucugccgcgacaacuggaagggcuccaaccgccccaucgucgacaucaacaucaaggaccacuccaucgucuccuccuacgucugcuccggccucgucggcgacaccccccgcaagaacgacuccuccuccuccucccacugccucgaccccaacaacgaggagggcggccacggcgucaagggcugggccuucgacgacggcaacgacauguggaugggccgcaccaucaacgagaccucccgccucggcuacgagaccuucaaggucaucgagggcugguccaaccccaaguccaagcuccagaucaaccgccaggucaucgucgaccgcggcgaccgcuccggcuacuccggcaucuucuccgucgagggcaaguccugcaucaaccgcugcuucuacgucgagcucauccgcggccgcaaggaggagaccgagguccucuggaccuccaacuccaucgucgucuucugcggcaccuccggcaccuacggcaccggcuccuggcccgacggcgccgaccucaaccucaugcccaucuga

SEQ ID NO: 120898 - RNA, 1410 nt, Artificial Sequence
  derived and/or modified CDS sequence (opt2) from neuraminidase__InfluenzaA__AHL97447
augaaccccaaccagaagaucaucaccaucggcuccgucucccucaccaucuccaccaucugcuucuucaugcagaucgccauccucaucaccaccgucacccuccacuucaagcaguacgaguucaacuccccccccaacaaccaggucaugcucugcgagcccaccaucaucgagcgcaacaucaccgagaucgucuaccucaccaacaccaccaucgagaaggagaucugccccaagcccgccgaguaccgcaacugguccaagccccagugcggcaucaccggcuucgcccccuucuccaaggacaacuccauccgccucuccgccggcggcgacaucugggucacccgcgagcccuacgucuccugcgaccccgacaagugcuaccaguucgcccucggccagggcaccacccucaacaacguccacuccaacaacaccguccgcgaccgcacccccuaccgcacccuccucaugaacgagcucggcguccccuuccaccucggcaccaagcaggucugcaucgccugguccuccuccuccugccacgacggcaaggccuggcuccacgucugcaucaccggcgacgacaagaacgccaccgccuccuucaucuacaacggccgccucgucgacuccgucgucuccugguccaaggagauccuccgcacccaggaguccgagugcgucugcaucaacggcaccugcaccgucgucaugaccgacggcuccgccuccggcaaggccgacaccaagauccucuucaucgaggagggcaagaucguccacaccuccacccucuccggcuccgcccagcacgucgaggagugcuccugcuacccccgcuaccccggcguccgcugcgucugccgcgacaacuggaagggcuccaaccgccccaucgucgacaucaacaucaaggaccacuccaucgucuccuccuacgucugcuccggccucgucggcgacaccccccgcaagaacgacuccuucuccuccucccacugccucgaccccaacaacgaggagggcggccacggcgucaagggcugggccuucgacgacggcaacgacgucuggaugggccgcaccaucaacgagaccucccgccucggcuacgagaccuucaaggucaucgagggcugguccaaccccaaguccaagcuccagaucaaccgccaggucaucgucgaccgcggcgaccgcuccggcuacuccggcaucuucuccgucgagggcaaguccugcaucaaccgcugcuucuacgucgagcucauccgcggccgcaaggaggagaccgagguccucuggaccuccaacuccaucgucgucuucugcggcaccuccggcaccuacggcaccggcuccuggcccgacggcgccgaccucaaccucaugcccaucuga

SEQ ID NO: 120899 - RNA, 1410 nt, Artificial Sequence; identical to SEQ ID NO: 118182
  derived and/or modified CDS sequence (opt2) from neuraminidase__InfluenzaA__AHL97459

SEQ ID NO: 120900 - RNA, 1410 nt, Artificial Sequence; identical to SEQ ID NO: 120772
  derived and/or modified CDS sequence (opt2) from neuraminidase__InfluenzaA__AHL97471

SEQ ID NO: 120901 - RNA, 1410 nt, Artificial Sequence; identical to SEQ ID NO: 119907
  derived and/or modified CDS sequence (opt2) from neuraminidase__InfluenzaA__AHL97483

SEQ ID NO: 120902 - RNA, 1410 nt, Artificial Sequence; identical to SEQ ID NO: 118182
  derived and/or modified CDS sequence (opt2) from neuraminidase__InfluenzaA__AHL97496

SEQ ID NO: 120903 - RNA, 1410 nt, Artificial Sequence; identical to SEQ ID NO: 118182
  derived and/or modified CDS sequence (opt2) from neuraminidase__InfluenzaA__AHL97508

SEQ ID NO: 120904 - RNA, 1410 nt, Artificial Sequence
  derived and/or modified CDS sequence (opt2) from neuraminidase__InfluenzaA__AHL97520
augaaccccaaccagaagaucaucaccaucggcuccgucucccucaccaucuccaccaucugcuucuucaugcagaucgccauccucaucaccaccgucacccuccacuucaagcaguacgaguucaacuccccccccaacaaccaggucaugcucugcgagcccaccaucaucgagcgcaacaucaccgagaucgucuaccucaccaacaccaccaucgagaaggagaccugccccaagcccgccgaguaccgcaacugguccaagccccagugcggcaucaccggcuucgcccccuucuccaaggacaacuccauccgccucuccgccggcggcgacaucugggucacccgcgagcccuacgucuccugcggccccgacaagugcuaccaguucgcccucggccagggcaccacccucaacaacaugcacuccaacaacaccguccgcgaccgcacccccuaccgcacccuccucaugaacgagcucggcguccccuuccaccucggcaccaagcaggucugcaucgccugguccuccuccuccugccacgacggcaaggccuggcuccacgucugcaucaccggcgacgacaagaacgccaccgccuccuucaucuacaacggccgccucgucgacuccgucgucuccugguccaaggagauccuccgcacccaggaguccgagugcgucugcaucaacggcaccugcaccgucgucaugaccgacggcuccgccuccggcaaggccgacaccaagauccucuucaucgaggagggcaagaucguccacaccuccacccucuccggcuccgcccagcacgucgaggagugcuccugcuacccccgcuaccccggcguccgcugcgucugccgcgacaacuggaagggcuccaaccgccccaucgucgacaucaacaucaaggaccacuccaucgucuccuccuacgucugcuccggccucgucggcgacaccccccgcaagaacgacuccuccuccuccucccacugccucgaccccaacaacgaggagggcggccacggcgucaagggcugggccuucgacgacggcaacgacgucuggaugggccgcaccaucaacgagaccucccgccucggcuacgagaccuucaaggucaucgagggcugguccaaccccaaguccaagcuccagaucaaccgccaggucaucgucgaccgcggcgaccgcuccggcuacuccggcaucuucuccgucgagggcaaguccugcaucaaccgcugcuucuacgucgagcucauccgcggccgcaaggaggagaccgagguccucuggaccuccaacuccaucgucgucuucugcggcaccuccggcaccuacggcaccggcuccuggcccgacggcgccgaccucaaccucaugcccaucuga

SEQ ID NO: 120905 - RNA, 1410 nt, Artificial Sequence; identical to SEQ ID NO: 118182
  derived and/or modified CDS sequence (opt2) from neuraminidase__InfluenzaA__AHL97532

SEQ ID NO: 120906 - RNA, 1410 nt, Artificial Sequence; identical to SEQ ID NO: 118182
  derived and/or modified CDS sequence (opt2) from neuraminidase__InfluenzaA__AHL97544

SEQ ID NO: 120907 - RNA, 1410 nt, Artificial Sequence; identical to SEQ ID NO: 119907
  derived and/or modified CDS sequence (opt2) from neuraminidase__InfluenzaA__AHL97556

SEQ ID NO: 120908 - RNA, 1410 nt, Artificial Sequence
  derived and/or modified CDS sequence (opt2) from neuraminidase__InfluenzaA__AHL97568
augaaccccaaccagaagaucaucaccaucggcuccgucucccucaccaucuccgccaucugcuucuucaugcagaucgccauccucaucaccaccgucacccuccgcuucaagcaguacgaguucaacuccccccccaacaaccaggucaugcucugcgagcccaccaucaucgagcgcaacaucaccgagaucgucuaccucaccaacaccaccaucgagaaggagaucugccccaagcccgccgaguaccgcaacugguccaagccccagugcgacaucaccggcuucgcccccuucuccaaggacaacuccauccgccucuccgccggcggcgacaucugggucacccgcgagcccuacgucuccugcgaccccgacaagugcuaccaguucgcccucggccagggcaccacccucaccaacguccacuccaacaacaccguccgcgaccgcacccccuaccgcacccuccucaugaacgagcucggcguccccuuccaccucggcaccaagcaggucugcaucgccugguccuccuccuccugccacgacggcaaggccuggcuccacgucugcaucaccggcgacgacaagaacgccaccgccuccuucaucuacaacggccgccucgucgacuccgucgucuccugguccaaggagauccuccgcacccaggaguccgagugcgucugcaucaacggcaccugcaccgucgucaugaccgacggcuccgccuccggcaaggccgacaccaagauccucuucaucgaggagggcaagaucguccacaccuccacccucuccggcuccgcccagcacgucgaggagugcuccugcuacccccgcuaccccggcguccgcugcgucugccgcgacaacuggaagggcuccaaccgccccaucgucgacaucaacaucaaggaccacuccaucgucucccgcuacgucugcuccggccucgucggcgacaccccccgcaagaacgacuccuccuccuccucccacugccucgaccccaacaacgaggagggcggccacggcgucaagggcugggccuucgacgacggcaacgacgucuggaugggccgcaccaucaacgagaccucccgccucggcuacgagaccuucaaggucaucgagggcugguccaaccccaaguccaagcuccagaucaaccgccaggucaucgucgaccgcggcgaccgcuccggcuacuccggcaucuucuccgucgagggcaaguccugcaucaaccgcugcuucuacgucgagcucauccgcggccgcaaggaggagaccgagguccucuggaccuccaacuccaucgucgucuucugcggcaccuccggcaccuacggcaccggcuccuggcccgacggcgccgaccucaaccucaugcccaucuga

SEQ ID NO: 120909 - RNA, 1410 nt, Artificial Sequence; identical to SEQ ID NO: 120822
  derived and/or modified CDS sequence (opt2) from neuraminidase__InfluenzaA__AHL97580

SEQ ID NO: 120910 - RNA, 1410 nt, Artificial Sequence
  derived and/or modified CDS sequence (opt2) from neuraminidase__InfluenzaA__AHL97592
augaaccccaaccagaagaucaucaccaucggcuccgucucccucaccaucuccaccaucugcuucuucaugcagaucgccauccucaucaccaccgucacccuccacuucaagcaguacgaguucaacuccccccccaacaaccaggucaugcucugcgagcccaccaucaucgagcgcaacaucaccgagaucgucuaccucaccaacaccaccaucgagaaggagaucugccccaagcccgccgaguaccgcaacugguccaagccccagugcggcaucaccggcuucgcccccuucuccaaggacaacuccguccgccucuccgccggcggcgacaucugggucacccgcgagcccuacgucuccugcgaccccgacaagugcuaccaguucgcccucggccagggcaccacccucaacaacguccacuccaacaacaccguccgcgaccgcacccccuaccgcacccuccucaugaacgagcucggcguccccuuccaccucggcaccaagcaggucugcaucgccugguccuccuccuccugccacgacggcaaggccuggcuccacgucugcaucaccggcgacgacaagaacgccaccgccuccuucaucuacaacggccgccucgucgacuccgucgucuccugguccaaggagauccuccgcacccaggaguccgagugcgucugcaucaacggcaccugcaccgucgucaugaccgacggcuccgccuccggcaaggccgacaccaagauccucuucaucgaggagggcaagaucguccacaccuccacccucuccggcuccgcccagcacgucgaggagugcuccugcuacccccgcuaccccggcguccgcugcgucugccgcgacaacuggaagggcuccaaccgccccaucgucgacaucaacaucaaggaccacuccaucgucuccuccuacgucugcuccggccucgucggcgacaccccccgcaagaacgacuccuccuccuccucccacugccucggccccaacaacgaggagggcggccacggcgucaagggcugggccuucgacgacggcaacgacgucuggaugggccgcaccaucaacgagaccucccgcuccggcuacgagaccuucaaggucaucgagggcugguccaaccccaaguccaagcuccagaucaaccgccaggucaucgucgaccgcggcgaccgcuccggcuacuccggcaucuucuccgucgagggcaaguccugcaucaaccgcugcuucuacgucgagcucauccgcggccgcaaggaggagaccgagguccucuggaccuccaacuccaucgucgucuucugcggcaccuccggcaccuacggcaccggcuccuggcccgacggcgccgaccucaaccucaugcccaucuga

SEQ ID NO: 120911 - RNA, 1410 nt, Artificial Sequence; identical to SEQ ID NO: 118182
  derived and/or modified CDS sequence (opt2) from neuraminidase__InfluenzaA__AHL97604

SEQ ID NO: 120912 - RNA, 1410 nt, Artificial Sequence
  derived and/or modified CDS sequence (opt2) from neuraminidase__InfluenzaA__AHL97616
augaaccccaaccagaagaucaucaccaucggcuccgucucccucaccaucuccaccaucugcuucuucaugcagaucgccauccucaucaccaccgucacccuccacuucaagcaguacgaguucaacuccccccccaacaaccaggucaugcucugcgagcccaccaucaucgagcgcaacaucaccgagaucgucuaccucaccaacaccaccaucgagaaggagaucugccccaagcccgccgaguaccgcaacugguccaagccccagugcggcaucaccggcuucgcccccuucuccaaggacaacuccauccgccucuccgccggcggcgacaucugggucacccgcgagcccuacgucuccugcgaccccgacaagugcuaccaguucgcccucggccagggcaccacccucaacaacaugcacuccaacaacaccguccgcgaccgcacccccuaccgcacccuccucaugaacgagcucggcguccccuuccaccucggcaccaagcaggucugcaucgccugguccuccuccuccugccacgacggcaaggccuggcuccacgucugcaucaccggcgacgacaagaacgccaccgccuccuucaucuacaacggccgccucgucgacuccgucgucuccugguccaaggagguccuccgcacccaggaguccgagugcgucugcaucaacggcaccugcaccgucgucaugaccgacggcuccgccuccggcaaggccgacaccaagauccucuucaucgaggagggcaagaucguccacaccuccacccucuccggcuccgcccagcacgucgaggagugcuccugcuacccccgcuaccccggcguccgcugcgucugccgcgacaacuggaagggcuccaaccgccccaucgucgacaucaacaucaaggaccacuccaucgucuccuccuacgucugcuccggccucgucggcgacaccccccgcaagaacgacuccuccuccuccucccacugccucgaccccaacaacgaggagggcggccacggcgucaagggcugggccuucgacgacggcaacgacgucuggaugggccgcaccaucaacgagaccucccgccucggcuacgagaccuucaaggucaucgagggcugguccaaccccaaguccaagcuccagaucaaccgccaggucaucgucgaccgcggcgaccgcuccggcuacuccggcaucuucuccgucgagggcaaguccugcaucaaccgcugcuucuacgucgagcucauccgcggccgcaaggaggagaccgagguccucuggaccuccaacuccaucgucgucuucugcggcaccuccggcaccuacggcaccggcuccuggcccgacggcgccgaccucaaccucaugcccaucuga

SEQ ID NO: 120913 - RNA, 1410 nt, Artificial Sequence; identical to SEQ ID NO: 120772
  derived and/or modified CDS sequence (opt2) from neuraminidase__InfluenzaA__AHL97628

SEQ ID NO: 120914 - RNA, 1410 nt, Artificial Sequence; identical to SEQ ID NO: 118182
  derived and/or modified CDS sequence (opt2) from neuraminidase__InfluenzaA__AHL97640

SEQ ID NO: 120915 - RNA, 1410 nt, Artificial Sequence; identical to SEQ ID NO: 119930
  derived and/or modified CDS sequence (opt2) from neuraminidase__InfluenzaA__AHL97652

SEQ ID NO: 120916 - RNA, 1410 nt, Artificial Sequence; identical to SEQ ID NO: 119930
  derived and/or modified CDS sequence (opt2) from neuraminidase__InfluenzaA__AHL97664

SEQ ID NO: 120917 - RNA, 1410 nt, Artificial Sequence; identical to SEQ ID NO: 119411
  derived and/or modified CDS sequence (opt2) from neuraminidase__InfluenzaA__AHL97676

SEQ ID NO: 120918 - RNA, 1410 nt, Artificial Sequence; identical to SEQ ID NO: 118182
  derived and/or modified CDS sequence (opt2) from neuraminidase__InfluenzaA__AHL97688

SEQ ID NO: 120919 - RNA, 1410 nt, Artificial Sequence; identical to SEQ ID NO: 119907
  derived and/or modified CDS sequence (opt2) from neuraminidase__InfluenzaA__AHL97700

SEQ ID NO: 120920 - RNA, 1410 nt, Artificial Sequence
  derived and/or modified CDS sequence (opt2) from neuraminidase__InfluenzaA__AHL97712
augaaccccaaccagaagaucaucaccaucggcuccgucucccucaccaucuccaccaucugcuucuucaugcagaucgccauccucaucaccaccgucacccuccacuucaagcaguacgaguucaacuccccccccaacaaccaggucaugcucugcgagcccaccaucaucgagcgcaacaucaccgagaucgucuaccucaccaacaccaccaucgagaaggagaucugccccaagcccgccgaguaccgcaacugguccaagccccagugcggcaucaccggcuucgcccccuucuccaaggacaacuccauccgccucuccgccggcggcgacaucugggucacccgcgagcccuacgucuccugcgaccccgacaagugcuaccaguucgcccucggccagggcaccacccucaacaacguccacuccaacaacaccguccgcgaccgcacccccuaccgcacccuccucaugaacgagcucggcguccccuuccaccucggcaccaagcaggucugcaucgccugguccuccuccuccugccacgacggcaaggccuggcuccacgucugcaucaccggcgacgacaagaacgccaccgccuccuucaucuacaacggccgccucgucgacuccgucgucuccugguccaaggagauccuccgcacccaggaguccgagugcgucugcaucaacggcaccugcaccgucgucaugaccgacggcuccgccuccggcaaggccgacaccaagauccucuucaucgaggagggcaagaucguccacaccuccacccucuccggcuccgcccagcacgucgaggagugcuccugcuacccccgcuaccccggcguccgcugcgucugccgcgacaacuggaagggcuccaaccgccccaucgucgacaucaacaucaaggaccacuccaucgucuccuccuacgucugcuccggccucgucggcgacaccccccgcaagaacgacuccaccuccuccucccacugccucgaccccaacaacgaggagggcggccacggcgucaagggcugggccuucgacgacggcaacgacgucuggaugggccgcaccaucaacgagaccucccgccucggcuacgagaccuucaaggucaucgagggcugguccaaccccaaguccaagcuccagaucaaccgccaggucaucgucgaccgcggcgaccgcuccggcuacuccggcaucuucuccgucgagggcaaguccugcaucaaccgcugcuucuacgucgagcucauccgcggccgcaaggaggagaccgagguccucuggaccuccaacuccaucgucgucuucugcggcaccuccggcaccuacggcaccggcuccuggcccgacggcgccgaccucaaccucaugcccaucuga

SEQ ID NO: 120921 - RNA, 1410 nt, Artificial Sequence; identical to SEQ ID NO: 119907
  derived and/or modified CDS sequence (opt2) from neuraminidase__InfluenzaA__AHL97724

SEQ ID NO: 120922 - RNA, 1410 nt, Artificial Sequence; identical to SEQ ID NO: 118182
  derived and/or modified CDS sequence (opt2) from neuraminidase__InfluenzaA__AHL97736

SEQ ID NO: 120923 - RNA, 1410 nt, Artificial Sequence
  derived and/or modified CDS sequence (opt2) from neuraminidase__InfluenzaA__AHL97760
augaaccccaaccagaagaucaucaccaucggcuccgucucccucaccaucuccaccaucugcuucuucaugcagaucgccauccucaucaccaccgucacccuccacuucaagcaguacgaguucaacuccccccccaacaaccaggucaugcucugcgagcccaccaucaucgagcgcaacaucaccgagaucgucuaccucaccaacaccaccaucgagaaggagaucugccccaagcccgccgaguaccgcaacugguccaagccccagugcggcaucaccggcuucgcccccuucuccaaggacaacuccauccgccucuccgccggcggcgacaucugggucacccgcgagcccuacgucuccugcgaccccgacaagugcuaccaguucgcccucggccagggcaccacccucaacaacguccacuccaacaacaccguccgcgaccgcacccccuaccgcacccuccucaugaacgagcucggcguccccuuccaccucggcaccaagcaggucugcaucgccugguccuccuccuccugccacgacggcaaggccuggcuccacgucugcaucaccggcgacgacgagaacgccaccgccuccuucaucuacaacggccgccucgucgacuccgucgucuccugguccaaggagauccuccgcacccaggaguccgagugcgucugcaucaacggcaccugcaccgucgucaugaccgacggcuccgccuccggcaaggccgacaccaagauccucuucaucgaggagggcaagaucguccacaccuccacccucuccggcuccgcccagcacgucgaggagugcuccugcuacccccgcuaccccggcguccgcugcgucugccgcgacaacuggaagggcuccaaccgccccaucgucgacaucaacaucaaggaccacuccaucgucuccuccuacgucugcuccggccucgucggcgacaccccccgcaagaacgacuccuccuccuccucccacugccucgaccccaacaacgaggagggcggccacggcgucaagggcugggccuucgacgacggcaacgacgucuggaugggccgcaccaucaacgagaccucccgccucggcuacgagaccuucaaggucaucgagggcugguccaaccccaaguccaagcuccagaucaaccgccaggucaucgucgaccgcggcgaccgcuccggcuacuccggcaucuucuccgucgagggcaaguccugcaucaaccgcugcuucuacgucgagcucauccgcggccgcaaggaggagaccgagguccucuggaccuccaacuccaucgucgucuucugcggcaccuccggcaccuacggcaccggcuccuggcccgacggcgccgaccucaaccucaugcccaucuga

SEQ ID NO: 120924 - RNA, 1410 nt, Artificial Sequence
  derived and/or modified CDS sequence (opt2) from neuraminidase__InfluenzaA__AHL97772
augaaccccaaccagaagaucaucaccaucggcuccgucucccucaccaucuccaccaucugcuucuucaugcagaucgccauccucaucaccaccgucacccuccacuucaagcaguacgaguucaacuccccccccaacaaccaggucaugcucugcgagcccaccaucaucgagcgcaacaucaccgagaucgucuaccucaccaacaccaccaucgagaaggagaucugccccaagcccgccgaguaccgcaacugguccaagccccagugcggcaucaccggcuucgcccccuucuccaaggacaacuccauccgccucuccgccggcggcgacaucugggucacccgcgagcccuacgucuccugcgaccccgacaagugcuaccaguucgcccucggccagggcaccacccucaacaacguccacuccaacaacaccguccgcgaccgcacccccuaccgcacccuccucaugaacgagcucggcguccccuuccaccucggcaccaagcaggucugcaucgccugguccuccuccuccugccacgacggcaaggccuggcuccacgucugcaucaccggcgacgacaagaacgccaccgccuccuucaucuacaacggccgccucgucgacuccgucgucuccugguccaaggagauccuccgcacccaggaguccgagugcgucugcaucaacggcaccugcaccgucgucaugaccgacggcuccgccuccggcaaggccgacaccaagauccucuucaucgaggagggcaagaucguccacaccuccacccucuccggcuccgcccagcacgucgaggagugcuccugcuacccccgcuaccccggcguccgcugcgucugccgcgacaacuggaagggcuccaaccgccccaucgucgacaucaacaucaaggaccacuccaucgucuccuccuacgucugcuccggccucgucggcgacaccccccgcaagaacgacuccuccuccuccucccacugccucgaccccaacaacgaggagggcggccacggcgucaagggcugggccuucgacgacggcaacgacgucuggaugggccgcaccaucaacgagaccucccgccucggcuacgagaccuucaaggucaucgagggcugguccaaccccaaguccaagcuccagaucaaccgccaggucaucgucgaccgcggcgaccgcuccggcuacuccggcaucuucuccgucgagggcaaguccugcaucaaccgcugcuucuacgucgagcucauccgcggccgcaaggaggagaccgagguccucuggaccuccaacuccgucgucgucuucugcggcaccuccggcaccuacggcaccggcuccuggcccgacggcgccgaccucaaccucaugcccaucuga

SEQ ID NO: 120925 - RNA, 1410 nt, Artificial Sequence; identical to SEQ ID NO: 119411
  derived and/or modified CDS sequence (opt2) from neuraminidase__InfluenzaA__AHL97784

SEQ ID NO: 120926 - RNA, 1410 nt, Artificial Sequence; identical to SEQ ID NO: 118182
  derived and/or modified CDS sequence (opt2) from neuraminidase__InfluenzaA__AHL97796

SEQ ID NO: 120927 - RNA, 1410 nt, Artificial Sequence; identical to SEQ ID NO: 118182
  derived and/or modified CDS sequence (opt2) from neuraminidase__InfluenzaA__AHL97808

SEQ ID NO: 120928 - RNA, 1410 nt, Artificial Sequence; identical to SEQ ID NO: 118182
  derived and/or modified CDS sequence (opt2) from neuraminidase__InfluenzaA__AHL97820

SEQ ID NO: 120929 - RNA, 1410 nt, Artificial Sequence
  derived and/or modified CDS sequence (opt2) from neuraminidase__InfluenzaA__AHL97832
augaaccccaaccagaagaucaucaccaucggcuccgucucccucaccaucuccaccaucugcuucuucaugcagaucgccauccucaucaccaccgucacccuccacuucaagcaguacgaguucgacuccccccccaacaaccaggucaugcucugcgagcccaccaucaucgagcgcaacaucaccgagaucgucuaccucaccaacaccaccaucgagaaggagaucugccccaagcccgccgaguaccgcuccugguccaagccccagugcggcaucaccggcuucgcccccuucuccaaggacaacuccauccgccucuccgccggcggcgacaucugggucacccgcgagcccuacgucuccugcgaccccgacaagugcuaccaguucgcccucggccagggcaccacccucaacaacguccacuccaacaacaccguccgcgaccgcacccccuaccgcacccuccucaugaacgagcucggcguccccuuccaccucggcaccaagcaggucugcaucgccugguccuccuccuccugccacgacggcaaggccuggcuccacgucugcaucaccggcgacgacaagaacgccaccgccuccuucaucuacaacggccgccucgucgacuccgucgucuccugguccaaggagauccuccgcacccaggaguccgagugcgucugcaucaacggcaccugcaccgucgucaugaccgacggcuccgccuccggcaaggccgacaccaagauccucuucaucgaggagggcaagaucguccacaccuccacccucuccggcuccgcccagcacgucgaggagugcuccugcuacccccgcuaccccggcguccgcugcgucugccgcgacaacuggaagggcuccaaccgccccaucgucgacaucaacaucaaggaccacuccaucgucuccuccuacgucugcuccggccucgucggcgacaccccccgcaagaacgacuccuccuccuccucccacugccucgaccccaacaacgaggagggcggccacggcgucaagggcugggccuucgacgacggcaacgacgucuggaugggccgcaccaucaacgagaccucccgccucggcuacgagaccuucaaggucaucgagggcugguccaaccccaaguccaagcuccagaucaaccgccaggucaucgucgaccgcggcgaccgcuccggcuacuccggcaucuucuccgucgagggcaaguccugcaucaaccgcugcuucuacgucgagcucauccgcggccgcaaggaggagaccgagguccucuggaccuccaacuccaucgucgucuucugcggcaccuccggcaccuacggcaccggcuccuggcccgacggcgccgaccucaaccucaugcccaucuga

SEQ ID NO: 120930 - RNA, 1410 nt, Artificial Sequence; identical to SEQ ID NO: 118182
  derived and/or modified CDS sequence (opt2) from neuraminidase__InfluenzaA__AHL97844

SEQ ID NO: 120931 - RNA, 1410 nt, Artificial Sequence; identical to SEQ ID NO: 120923
  derived and/or modified CDS sequence (opt2) from neuraminidase__InfluenzaA__AHL97856

SEQ ID NO: 120932 - RNA, 1410 nt, Artificial Sequence; identical to SEQ ID NO: 118182
  derived and/or modified CDS sequence (opt2) from neuraminidase__InfluenzaA__AHL97868

SEQ ID NO: 120933 - RNA, 1410 nt, Artificial Sequence; identical to SEQ ID NO: 119907
  derived and/or modified CDS sequence (opt2) from neuraminidase__InfluenzaA__AHL97880

SEQ ID NO: 120934 - RNA, 1410 nt, Artificial Sequence; identical to SEQ ID NO: 118182
  derived and/or modified CDS sequence (opt2) from neuraminidase__InfluenzaA__AHL97892

SEQ ID NO: 120935 - RNA, 1410 nt, Artificial Sequence; identical to SEQ ID NO: 118182
  derived and/or modified CDS sequence (opt2) from neuraminidase__InfluenzaA__AHL97904

SEQ ID NO: 120936 - RNA, 1410 nt, Artificial Sequence; identical to SEQ ID NO: 119919
  derived and/or modified CDS sequence (opt2) from neuraminidase__InfluenzaA__AHL97916

SEQ ID NO: 120937 - RNA, 1410 nt, Artificial Sequence; identical to SEQ ID NO: 118182
  derived and/or modified CDS sequence (opt2) from neuraminidase__InfluenzaA__AHL97928

SEQ ID NO: 120938 - RNA, 1410 nt, Artificial Sequence; identical to SEQ ID NO: 120898
  derived and/or modified CDS sequence (opt2) from neuraminidase__InfluenzaA__AHL97952

SEQ ID NO: 120939 - RNA, 1410 nt, Artificial Sequence; identical to SEQ ID NO: 118182
  derived and/or modified CDS sequence (opt2) from neuraminidase__InfluenzaA__AHL97964

SEQ ID NO: 120940 - RNA, 1410 nt, Artificial Sequence; identical to SEQ ID NO: 118182
  derived and/or modified CDS sequence (opt2) from neuraminidase__InfluenzaA__AHL97976

SEQ ID NO: 120941 - RNA, 1410 nt, Artificial Sequence; identical to SEQ ID NO: 118182
  derived and/or modified CDS sequence (opt2) from neuraminidase__InfluenzaA__AHL97988

SEQ ID NO: 120942 - RNA, 1410 nt, Artificial Sequence
  derived and/or modified CDS sequence (opt2) from neuraminidase__InfluenzaA__AHL98000
augaaccccaaccagaagaucaucaccaucggcuccgucucccucaccaucuccaccaucugcuucuucaugcagaucgccauccucaucaccaccgucacccuccacuucaagcaguacgaguucaacuccccccccaacaaccaggucaugcucugcgagcccaccaucaucgagcgcaacaucaccgagaucgucuaccucaccaacaccaccaucgagaaggagaucugccccaagcccgccgaguaccgcaacugguccaagccccagugcggcaucaccggcuucgcccccuucuccaaggacaacuccauccgccucuccgccggcggcgacaucugggucacccgcgagcccuacgucuccugcgaccccgacaagugcuaccaguucgcccucggccagggcaccacccucaacaacguccacuccaacaacaccguccgcgaccgcacccccuaccgcacccuccucaugaacgagcucggcguccccuuccaccucggcaccaagcaggucugcaucgccugguccuccuccuccugccacgacggcaaggccuggcuccacgucugcaucaccggcgacgacaagaacgccaccgccuccuucaucuacaacggccgccucgucgacuccgucgucuccugguccaaggagauccuccgcacccacgaguccgagugcgucugcaucaacggcaccugcaccgucgucaugaccgacggcuccgccuccggcaaggccgacaccaagauccucuucaucgaggagggcaagaucguccacaccuccacccucuccggcuccgcccagcacgucgaggagugcuccugcuacccccgcuaccccggcguccgcugcgucugccgcgacaacuggaagggcuccaaccgccccaucgucgacaucaacaucaaggaccacuccaucgucuccuccuacgucugcuccggccucgucggcgacaccccccgcaagaaggacuccuccuccuccucccacugccucgaccccaacaacgaggagggcggccacggcgucaagggcugggccuucgacgacggcaacgacgucuggaugggccgcaccaucaacgagaccucccgccucggcuacgagaccuucaaggucaucgagggcugguccaaccccaaguccaagcuccagaucaaccgccaggucaucgucgaccgcggcgaccgcuccggcuacuccggcaucuucuccgucgagggcaaguccugcaucaaccgcugcuucuacgucgagcucauccgcggccgcaaggaggagaccgagguccucuggaccuccaacuccaucgucgucuucugcggcaccuccggcaccuacggcaccggcuccuggcccgacggcgccgaccucaaccucaugcccaucuga

SEQ ID NO: 120943 - RNA, 1410 nt, Artificial Sequence
  derived and/or modified CDS sequence (opt2) from neuraminidase__InfluenzaA__AHL98012
augaaccccaaccagaagaucaucaccaucggcuccgucucccucaccaucuccaccaucugcuucuucaugcagaucgccauccucaucaccaccgucacccuccacuucaagcaguacgaguucaacuccccccccaacaaccaggucaugcucugcgagcccaccaucaucgagcgcaacaucaccgagaucgucuaccucaccaacaccaccaucgagaaggagaucugccccaagcccgccgaguaccgcaacugguccaagccccagugcggcaucaccggcuucgcccccuucuccaaggacaacuccauccgccucuccgccggcggcgacaucugggucacccgcgagcccuacgucuccugcgaccccgacaagugcuaccaguucgcccucggccagggcaccacccucaacaacguccacuccaacaacaccguccgcgaccgcacccccuaccgcacccuccucaugaacgagcucggcguccccuuccaccucggcaccaagcaggucugcaucgccugguccuccuccuccugccacgacggcaaggccuggcuccacgucugcaucaccggcgacgacaagaacgccaccgccuccuucaucuacaacggccgccucgucgacuccgucgucuccugguccaaggagguccuccgcacccaggaguccgagugcgucugcaucaacggcaccugcaccgucgucaugaccgacggcuccgccuccggcaaggccgacaccaagauccucuucaucgaggagggcaagaucguccacaccuccacccucuccggcuccgcccagcacgucgaggagugcuccugcuacccccgcuaccccggcguccgcugcgucugccgcgacaacuggaagggcuccaaccgccccaucgucgacaucaacaucaaggaccacuccaucgucuccuccuacgucugcuccggccucgucggcgacaccccccgcaagaacgacuccuccuccuccucccacugccucgaccccaacaacgaggagggcgaccacggcgucaagggcugggccuucgacgacggcaacgacgucuggaugggccgcaccaucaacgagaccucccgccucggcuacgagaccuucaaggucaucgagggcugguccaaccccaaguccaagcuccagaucaaccgccaggucaucgucgaccgcggcgaccgcuccggcuacuccggcaucuucuccgucgagggcaaguccugcaucaaccgcugcuucuacgucgagcucauccgcggccgcaaggaggagaccgagguccucuggaccuccaacuccaucgucgucuucugcggcaccuccggcaccuacggcaccggcuccuggcccgacggcgccgaccucaaccucaugcccaucuga

SEQ ID NO: 120944 - RNA, 1410 nt, Artificial Sequence; identical to SEQ ID NO: 119919
  derived and/or modified CDS sequence (opt2) from neuraminidase__InfluenzaA__AHL98048

SEQ ID NO: 120945 - RNA, 1410 nt, Artificial Sequence; identical to SEQ ID NO: 119919
  derived and/or modified CDS sequence (opt2) from neuraminidase__InfluenzaA__AHL98060

SEQ ID NO: 120946 - RNA, 1410 nt, Artificial Sequence; identical to SEQ ID NO: 119919
  derived and/or modified CDS sequence (opt2) from neuraminidase__InfluenzaA__AHL98072

SEQ ID NO: 120947 - RNA, 1410 nt, Artificial Sequence; identical to SEQ ID NO: 118182
  derived and/or modified CDS sequence (opt2) from neuraminidase__InfluenzaA__AHL98084

SEQ ID NO: 120948 - RNA, 1410 nt, Artificial Sequence; identical to SEQ ID NO: 119919
  derived and/or modified CDS sequence (opt2) from neuraminidase__InfluenzaA__AHL98096

SEQ ID NO: 120949 - RNA, 1410 nt, Artificial Sequence; identical to SEQ ID NO: 118182
  derived and/or modified CDS sequence (opt2) from neuraminidase__InfluenzaA__AHL98119

SEQ ID NO: 120950 - RNA, 1410 nt, Artificial Sequence; identical to SEQ ID NO: 118182
  derived and/or modified CDS sequence (opt2) from neuraminidase__InfluenzaA__AHL98131

SEQ ID NO: 120951 - RNA, 1410 nt, Artificial Sequence; identical to SEQ ID NO: 118182
  derived and/or modified CDS sequence (opt2) from neuraminidase__InfluenzaA__AHL98143

SEQ ID NO: 120952 - RNA, 1410 nt, Artificial Sequence
  derived and/or modified CDS sequence (opt2) from neuraminidase__InfluenzaA__AHL98155
augaaccccaaccagaagaucaucaccaucggcuccgucucccucaccaucuccaccaucugcuucuucaugcagaucgccauccucaucaccaccgucacccuccacuucaagcaguacgaguucaacuccccccccaacaaccaggucaugcucugcgagcccaccaucaucgagcgcaacaucaccgagaucgucuaccucaccaacaccaccaucgagaaggagaucugccccaagcccgccgaguaccgcaacugguccaagccccagugcggcaucaccggcuucgcccccuucuccaaggacaacuccauccgccucuccgccggcggcgacaucugggucacccgcgagcccuacgucuccugcgaccccgacaagugcuaccaguucgcccucggccagggcaccacccucaacaacguccacuccaacaacaccguccgcgaccgcacccccuaccgcacccuccucaugaacgagcucggcguccccuuccaccucggcaccaagcaggucugcaucgccugguccuccuccuccugccacgacggcaaggccuggcuccacgucugcaucaccggcgacgacaagaacgccaccgccuccuucaucuacaacggccgccucgucgacuccgucgucuccugguccaaggagauccuccgcacccaggaguccgagugcgucugcaucaacggcaccugcaccgucgucaugaccgacggcuccgccuccggcaaggccgacaccaagauccucuucaucgaggagggcaagaucguccacaccuccacccucuccggcuccgcccagcacgucgaggagugcuccugcuacccccgcuaccccggcguccgcugcgucugccgcgacaacuggaagggcuccaaccgccccaucgucgacaucaacaucaaggaccacuccaucgucuccuccuacgucugcuccggccucgucggcgacaccccccgcaagaacgacuccuccuccuccucccacugccucgaccccaacaacgaggagggcggccacggcgucaagggcugggccuucgacgacggcaacgacgucuggaugggccgcaccaucaacgagaccucccgccucggcuacgagaccuucaaggucaucgagggcugguccaacuccaaguccaagcuccagaucaaccgccaggucaucgucgaccgcggcgaccgcuccggcuacuccggcaucuucuccgucgagggcaaguccugcaucaaccgcugcuucuacgucgagcucauccgcggccgcaaggaggagaccgagguccucuggaccuccaacuccaucgucgucuucugcggcaccuccggcaccuacggcaccggcuccuggcccgacggcgccgaccucaaccucaugcccaucuga

SEQ ID NO: 120953 - RNA, 1410 nt, Artificial Sequence; identical to SEQ ID NO: 118182
  derived and/or modified CDS sequence (opt2) from neuraminidase__InfluenzaA__AHL98167

SEQ ID NO: 120954 - RNA, 1410 nt, Artificial Sequence; identical to SEQ ID NO: 118182
  derived and/or modified CDS sequence (opt2) from neuraminidase__InfluenzaA__AHL98179

SEQ ID NO: 120955 - RNA, 1410 nt, Artificial Sequence; identical to SEQ ID NO: 118182
  derived and/or modified CDS sequence (opt2) from neuraminidase__InfluenzaA__AHL98191

SEQ ID NO: 120956 - RNA, 1410 nt, Artificial Sequence; identical to SEQ ID NO: 119919
  derived and/or modified CDS sequence (opt2) from neuraminidase__InfluenzaA__AHL98215

SEQ ID NO: 120957 - RNA, 1410 nt, Artificial Sequence
  derived and/or modified CDS sequence (opt2) from neuraminidase__InfluenzaA__AHL98227
augaaccccaaccagaagaucaucaccaucggcuccgucucccucaccaucuccaccaucugcuucuucaugcagaucgccauccucaucaccaccgucacccuccacuucaagcaguacgaguucaacuccccccccaacaaccaggucaugcucugcgagcccaccaucaucgagcgcaacaucaccgacaucgucuaccucaccaacaccaccaucgagaaggagaucugccccaagcccgccgaguaccgcaacugguccaagccccagugcggcaucaccggcuucgcccccuucuccaaggacaacuccauccgccucuccgccggcggcgacaucugggucacccgcgagcccuacgucuccugcgaccccgacaagugcuaccaguucgcccucggccagggcaccacccucaacaacaugcacuccaacaacaccguccgcgaccgcacccccuaccgcacccuccucaugaacgagcucggcguccccuuccaccucggcaccaagcaggucugcaucgccugguccuccuccuccugccacgacggcaaggccuggcuccacgucugcaucaccggcgacgacaagaacgccaccgccuccuucaucuacaacggccgccucgucgacuccgucgucuccugguccaaggagauccuccgcacccaggaguccgagugcgucugcaucaacggcaccugcaccgucgucaugaccgacggcuccgccuccggcaaggccgacaccaagauccucuucaucgaggagggcaagaucguccacaccuccacccucuccggcuccgcccagcacgucgaggagugcuccugcuacccccgcuaccccggcguccgcugcgucugccgcgacaacuggaagggcuccaaccgccccaucgucgacaucaacaucaaggaccacuccaucgucuccuccuacgucugcuccggccucgucggcgacaccccccgcaagaacgacuccuccuccuccucccacugccucgaccccaacaacgaggagggcggccacggcgucaagggcugggccuucgacgacggcaacgacgucuggaugggccgcaccaucaacgagaccucccgccucggcuacgagaccuucaaggucaucgagggcugguccaaccccaaguccaagcuccagaucaaccgccaggucaucgucgaccgcggcgaccgcuccggcuacuccggcaucuucuccgucgagggcaaguccugcaucaaccgcugcuucuacgucgagcucauccgcggccgcaaggaggagaccgagguccucuggaccuccaacuccaucgucgucuucugcggcaccuccggcaccuacggcaccggcuccuggcccgacggcgccgaccucaaccucaugcccaucuga

SEQ ID NO: 120958 - RNA, 1410 nt, Artificial Sequence; identical to SEQ ID NO: 118182
  derived and/or modified CDS sequence (opt2) from neuraminidase__InfluenzaA__AHL98239

SEQ ID NO: 120959 - RNA, 1410 nt, Artificial Sequence; identical to SEQ ID NO: 118182
  derived and/or modified CDS sequence (opt2) from neuraminidase__InfluenzaA__AHL98251

SEQ ID NO: 120960 - RNA, 1410 nt, Artificial Sequence; identical to SEQ ID NO: 119930
  derived and/or modified CDS sequence (opt2) from neuraminidase__InfluenzaA__AHL98263

SEQ ID NO: 120961 - RNA, 1410 nt, Artificial Sequence; identical to SEQ ID NO: 118182
  derived and/or modified CDS sequence (opt2) from neuraminidase__InfluenzaA__AHL98275

SEQ ID NO: 120962 - RNA, 1410 nt, Artificial Sequence; identical to SEQ ID NO: 120828
  derived and/or modified CDS sequence (opt2) from neuraminidase__InfluenzaA__AHL98287

SEQ ID NO: 120963 - RNA, 1410 nt, Artificial Sequence
  derived and/or modified CDS sequence (opt2) from neuraminidase__InfluenzaA__AHL98298
augaaccccaaccagaagaucaucaccaucggcuccgucucccucaccaucuccaccaucugcuucuucaugcagaucgccauccucaucaccaccgucacccuccacuucaagcaguacgaguucaacuccccccccaacaaccaggucaugcucugcgagcccaccaucaucggccgcaacaucaccgagaucgucuaccucaccaacaccaccaucgagaaggagaucugccccaagcccgccgaguaccgcaacugguccaagccccagugcggcaucaccggcuucgcccccuucuccaaggacaacuccauccgccucuccgccggcggcgacaucugggucacccgcgagcccuacgucuccugcgaccccgacaagugcuaccaguucgcccucggccagggcaccacccucaacaacguccacuccaacaacaccguccgcgaccgcacccccuaccgcacccuccucaugaacgagcucggcguccccuuccaccucggcaccaagcaggucugcaucgccugguccuccuccuccugccacgacggcaaggccuggcuccacgucugcaucaccggcgacgacaagaacgccaccgccuccuucaucuacaacggccgccucgucgacuccgucgucuccugguccaaggagauccuccgcacccaggaguccgagugcgucugcaucaacggcaccugcaccgucgucaugaccgacggcuccgccuccggcaaggccgacaccaagauccucuucaucgaggagggcaagaucguccacaccuccacccucuccggcuccgcccagcacgucgaggagugcuccugcuacccccgcuaccccggcguccgcugcgucugccgcgacaacuggaagggcuccaaccgccccaucgucgacaucaacaucaaggaccacuccaucgucuccuccuacgucugcuccggccucgucggcgacaccccccgcaagaacgacuccuccuccuccucccacugccucgaccccaacaacgaggagggcggccacggcgucaagggcugggccuucgacgacggcaacgacgucuggaugggccgcaccaucaacgagaccucccgccucggcuacgagaccuucaaggucaucgagggcugguccaaccccaaguccaagcuccagaucaaccgccaggucaucgucgaccgcggcgaccgcuccggcuacuccggcaucuucuccgucgagggcaaguccugcaucaaccgcugcuucuacgucgagcucauccgcggccgcaaggaggagaccgagguccucuggaccuccaacuccaucgucgucuucugcggcaccuccggcaccuacggcaccggcuccuggcccgacggcgccgaccucaaccucaugcccaucuga

SEQ ID NO: 120964 - RNA, 1410 nt, Artificial Sequence; identical to SEQ ID NO: 118182
  derived and/or modified CDS sequence (opt2) from neuraminidase__InfluenzaA__AHL98310

SEQ ID NO: 120965 - RNA, 1410 nt, Artificial Sequence; identical to SEQ ID NO: 118182
  derived and/or modified CDS sequence (opt2) from neuraminidase__InfluenzaA__AHL98322

SEQ ID NO: 120966 - RNA, 1410 nt, Artificial Sequence
  derived and/or modified CDS sequence (opt2) from neuraminidase__InfluenzaA__AHL98334
augaaccccaaccagaagaucaucaccaucggcuccgucucccucaccaucuccaccaucugcuucuucaugcagaucgccauccucaucaccaccgucacccuccacuucaagcaguacgaguucaacuccccccccaacaaccaggucaugcucugcgagcccaccaucaucgagcgcaacaucaccgaggucgucuaccucaccaacaccaccaucgagaaggagaucugccccaagcccgccgaguaccgcaacugguccaagccccagugcggcaucaccggcuucgcccccuucuccaaggacaacuccauccgccucuccgccggcggcgacaucugggucacccgcgagcccuacgucuccugcgaccccgacaagugcuaccaguucgcccucggccagggcaccacccucaacaacguccacuccaacaacaccguccgcgaccgcacccccuaccgcacccuccucaugaacgagcucggcguccccuuccaccucggcaccaagcaggucugcaucgccugguccuccuccuccugccacgacggcaaggccuggcuccacgucugcaucaccggcgacgacaagaacgccaccgccuccuucaucuacaacggccgccucgucgacuccgucgucuccugguccaaggagauccuccgcacccaggaguccgagugcgucugcaucaacggcaccugcaccgucgucaugaccgacggcuccgccuccggcaaggccgacaccaagauccucuucaucgaggagggcaagaucguccacaccuccacccucuccggcuccgcccagcacgucgaggagugcuccugcuacccccgcuaccccggcguccgcugcgucugccgcgacaacuggaagggcuccaaccgccccaucgucgacaucaacaucaaggaccacuccaucgucuccuccuacgucugcuccggccucgucggcgacaccccccgcaagaacgacuccuccuccuccucccacugccucgaccccaacaacgaggagggcggccacggcgucaagggcugggccuucgacgacggcaacgacgucuggaugggccgcaccaucaacgagaccucccgccucggcuacgagaccuucaaggucaucgagggcugguccaaccccaaguccaagcuccagaucaaccgccaggucaucgucgaccgcggcgaccgcuccggcuacuccggcaucuucuccgucgagggcaaguccugcaucaaccgcugcuucuacgucgagcucauccgcggccgcaaggaggagaccgagguccucuggaccuccaacuccaucgucgucuucugcggcaccuccggcaccuacggcaccggcuccuggcccgacggcgccgaccucaaccucaugcccaucuga

SEQ ID NO: 120967 - RNA, 1410 nt, Artificial Sequence
  derived and/or modified CDS sequence (opt2) from neuraminidase__InfluenzaA__AHL98346
augaaccccaaccagaagaucaucaccaucggcuccgucucccucaccaucuccaccaucugcuucuucaugcagaucgccauccucaucaccaccgucacccuccacuucaagcaguacgaguucgacuccccccccaacaaccaggucaugcucugcgagcccaccaucaucgagcgcaacaucaccgagaucgucuaccucaccaacaccaccaucgagaaggagaucugccccaagcccgccgaguaccgcaacugguccaagccccagugcggcaucaccggcuucgcccccuucuccaaggacaacuccauccgccucuccgccggcggcgacaucugggucacccgcgagcccuacgucuccugcgaccccgacaagugcuaccaguucgcccucggccagggcaccacccucaacaacguccacuccaacaacaccguccgcgaccgcacccccuaccgcacccuccucaugaacgagcucggcguccccuuccaccucggcaccaagcaggucugcaucgccugguccuccuccuccugccacgacggcaaggccuggcuccacgucugcaucaccggcgacgacaagaacgccaccgccuccuucaucuacaacggccgccucgucgacuccgucgucuccugguccaaggagauccuccgcacccaggaguccgagugcgucugcaucaacggcaccugcaccgucgucaugaccgacggcuccgccuccggcaaggccgacaccaagauccucuucaucgaggagggcaagaucguccacaccuccacccucuccggcuccgcccagcacgucgaggagugcuccugcuacccccgcuaccccggcguccgcugcgucugccgcgacaacuggaagggcuccaaccgccccaucgucgacaucaacaucaaggaccacuccaucgucuccuccuacgucugcuccggccucgucggcgacaccccccgcaagaacgacuccuccuccuccucccacugccucgaccccaacaacgaggagggcggccacggcgucaagggcugggccuucgacgacggcaacgacgucuggaugggccgcaccaucaacgagaccucccgccucggcuacgagaccuucaaggucaucgagggcugguccaaccccaaguccaagcuccagaucaaccgccaggucaucgucgaccgcggcgaccgcuccggcuacuccggcaucuucuccgucgagggcaaguccugcaucaaccgcugcuucuacgucgagcucauccgcggccgcaaggaggagaacgagguccucuggaccuccaacuccaucgucgucuucugcggcaccuccggcaccuacggcaccggcuccuggcccgacggcgccgaccucaaccucaugcccaucuga

SEQ ID NO: 120968 - RNA, 1410 nt, Artificial Sequence; identical to SEQ ID NO: 118182
  derived and/or modified CDS sequence (opt2) from neuraminidase__InfluenzaA__AHL98357

SEQ ID NO: 120969 - RNA, 1410 nt, Artificial Sequence; identical to SEQ ID NO: 119930
  derived and/or modified CDS sequence (opt2) from neuraminidase__InfluenzaA__AHL98369

SEQ ID NO: 120970 - RNA, 1410 nt, Artificial Sequence
  derived and/or modified CDS sequence (opt2) from neuraminidase__InfluenzaA__AHL98381
augaaccccaaccagaagaucaucaccaucggcuccgucucccucaccaucuccaccaucugcuucuucaugcagaucgccauccucaucaccaccgucacccuccacuucaagcaguacgaguucaacuccccccccaacaaccaggucaugcucugcgagcccaccaucaucgagcgcaacaucaccgagaucgucuaccucaccaacaccaccaucgagaaggagaucugccccaagcccgccgaguaccgcaacugguccaagccccagugcggcaucaccggcuucgcccccuucuccaaggacaacuccauccgccucuccgccggcggcgacaucugggucacccgcgagcccuacgucuccugcggccccgacaagugcuaccaguucgcccucggccagggcaccacccucaacaacaugcacuccaacaacaccguccgcgaccgcacccccuaccgcacccuccucauguccgagcucggcguccccuuccaccucggcaccaagcaggucugcaucgccugguccuccuccuccugccacgacggcaaggccuggcuccacgucugcaucaccggcgacgacaagaacgccaccgccuccuucaucuacaacggccgccucgucgacuccgucgucuccugguccaaggagauccuccgcacccaggaguccgagugcgucugcaucaacggcaccugcaccgucgucaugaccgacggcuccgccuccggcaaggccgacaccaagauccucuucaucgaggagggcaagaucguccacaccuccacccucuccggcuccgcccagcacgucgaggagugcuccugcuacccccgcuaccccggcguccgcugcgucugccgcgacaacuggaagggcuccaaccgccccaucgucgacaucaacaucaaggaccacuccaccgucuccuccuacgucugcuccggccucgucggcgacaccccccgcaagaacgacuccuccuccuccucccacugccucgaccccaacaacgaggagggcggccacggcgucaagggcugggccuucgacgacggcaacgacgucuggaugggccgcaccaucaacgagaccucccgccucggcuacgagaccuucaaggucaucgagggcugguccaaccccaaguccaagcuccagaucaaccgccaggucaucgucgaccgcggcgaccgcuccggcuacuccggcaucuucuccgucgagggcaaguccugcaucaaccgcugcuucuacgucgagcucauccgcggccgcaaggaggagaccgagguccucuggaccuccaacuccaucgucgucuucugcggcaccuccggcaccuacggcaccggcuccuggcccgacggcgccgaccucaaccucaugcccaucuga

SEQ ID NO: 120971 - RNA, 1410 nt, Artificial Sequence
  derived and/or modified CDS sequence (opt2) from neuraminidase__InfluenzaA__AHL98393
augaaccccaaccagaagaucaucaccaucggcuccgucucccucaccaucuccaccaucugcuucuucaugcagaucgccauccucaucaccaccgucacccuccacuucaagcaguacgaguucaacuccccccccaacaaccagaugaugcucugcgagcccaccaucaucgagcgcaacaucaccgagaucgucuaccucaccaacaccaccaucgagaaggagaucugccccaagcccgccgaguaccgcaacugguccaagccccagugcggcaucaccggcuucgcccccuucuccaaggacaacuccauccgccucuccgccggcggcgacaucugggucacccgcgagcccuacgucuccugcggccccgacaagugcuaccaguucgcccucggccagggcaccacccucaacaacaugcacuccaacaacaccguccgcgaccgcacccccuaccgcacccuccucaugaacgagcucggcguccccuuccaccucggcaccaagcaggucugcaucgccugguccuccuccuccugccacgacggcaaggccuggcuccacgucugcaucaccggcgacgacaagaacgccaccgccuccuucaucuacaacggccgccucgucgacuccgucgucuccugguccaaggagauccuccgcacccaggaguccgagugcgucugcaucaacggcaccugcaccgucgucaugaccgacggcuccgccuccggcaaggccgacaccaagauccucuucaucgaggagggcaagaucguccacaccuccacccucuccggcuccgaccagcacaucgaggagugcuccugcuacccccgcuaccccggcguccgcugcgucugccgcgacaacuggaagggcuccaaccgccccaucgucgacaucaacaucaaggaccacuccaucgucuccuccuacgucugcuccggccucgucggcgacaccccccgcaagaacgacuccuccuccuccucccacugccucgaccccaacaacgaggagggcggccacggcgucaagggcugggccuucgacgacggcaacgacgucuggaugggccgcaccaucaacgagaccucccgccucggcuacgagaccuucaaggucaucgagggcugguccaaccccaaguccaagcuccagaucaaccgccaggucaucgucgaccgcggcgaccgcuccggcuacuccggcaucuucuccgucgagggcaaguccugcaucaaccgcugcuucuacgucgagcucauccgcggccgcaaggaggagaccgagguccucuggaccuccaacuccaucgucgucuucugcggcaccuccggcaccuacggcaccggcuccuggcccgacggcgccgaccucaaccucaugcccaucuga

SEQ ID NO: 120972 - RNA, 1410 nt, Artificial Sequence; identical to SEQ ID NO: 118182
  derived and/or modified CDS sequence (opt2) from neuraminidase__InfluenzaA__AHL98405

SEQ ID NO: 120973 - RNA, 1410 nt, Artificial Sequence; identical to SEQ ID NO: 118182
  derived and/or modified CDS sequence (opt2) from neuraminidase__InfluenzaA__AHL98417

SEQ ID NO: 120974 - RNA, 1410 nt, Artificial Sequence; identical to SEQ ID NO: 118182
  derived and/or modified CDS sequence (opt2) from neuraminidase__InfluenzaA__AHL98429

SEQ ID NO: 120975 - RNA, 1410 nt, Artificial Sequence
  derived and/or modified CDS sequence (opt2) from neuraminidase__InfluenzaA__AHL98452
augaaccccacccagaagaucaucaccaucggcuccgucugcaugaccaucggcauggccaaccucauccuccagaucggcaacaucaucuccaucuggaucucccacuccauccagcucggcaaccagucccagaucgagaccugcaaccaguccgucaucaccuacgagaacaacaccugggucaaccagaccuacgucaacaucuccaacaccaacuucgccgccggccaguccgucgucuccgucaagcucgccggcaacuccucccucugccccgucuccggcugggccaucuacuccaaggacaacuccguccgcaucggcuccaagggcgacgucuucgucauccgcgagcccuucaucuccugcuccccccucgagugccgcaccuucuuccucacccagggcgcccuccucaacgacaagcacuccaacggcaccaucaaggaccgcucccccuaccgcacccucauguccugccccaucggcgagguccccucccccuacaacucccgcuucgaguccgucgccugguccgccuccgccugccacgacggcaucaacuggcucaccaucggcaucuccggccccgacuccggcgccgucgccguccucaaguacaacggcaucaucaccgacaccaucaaguccuggaagaacaacauccuccgcacccaggaguccgagugcgccugcgucaacggcuccugcuucaccaucaugaccgacggccccuccgacggccaggccuccuacaagaucuuccgcaucgagaagggcaagaucgucaaguccgucgagaugaacgcccccaacuaccacuacgaggagugcuccugcuaccccgacuccuccgagaucaccugcgucugccgcgacaacuggcacggcuccaaccgccccugggucuccuucaaccagaaccucgaguaccagaucggcuacaucugcuccggcgucuucggcgacaacccccgccccaacgacaagaccggcuccugcggccccgucuccuccaacggcgccaacggcgucaagggcuucuccuucaaguacggcaacggcgucuggaucggccgcaccaaguccaucuccucccgcaagggcuucgagaugaucugggaccccaacggcuggaccggcaccgacaacaacuucuccaucaagcaggacaucgucggcaucaacgagugguccggcuacuccggcuccuucguccagcaccccgagcucaccggccucgacugcauccgccccugcuucugggucgagcucauccgcggccgccccaaggagaacaccaucuggaccuccggcuccuccaucuccuucugcggcgucaacuccgacaccgucggcugguccuggcccgacggcgccgagcuccccuucaccaucgacaaguga

SEQ ID NO: 120976 - RNA, 1410 nt, Artificial Sequence
  derived and/or modified CDS sequence (opt2) from neuraminidase__InfluenzaA__AHL98474
augaaccccaaccagaagaucaucaccaucggcuccgucugcaugaccaucggcauggccaaccucauccuccagaucggcaacaucaucuccaucuggaucucccacuccauccagcucggcaaccagucccagaucgagaccugcaaccaguccgucaucaccuacgagaacaacaccugggucaaccagaccuacgucaacaucuccaacaccaacuucgccgccggccaguccgucgucuccgucaagcucgccggcaacuccucccucugccccgucuccggcugggccaucuacuccaaggacaacuccguccgcaucggcuccaagggcgacgucuucgucauccgcgagcccuucaucuccugcuccccccucgagugccgcaccuucuuccucacccagggcgcccuccucaacgacaagcacuccaacggcaccaucaaggaccgcucccccuaccgcacccucauguccugccccaucggcgagguccccucccccuacaacucccgcuucgaguccgucgccugguccgccuccgccugccacgacggcaucaacuggcucaccaucggcaucuccggccccaacuccggcgccgucgccguccucaaguacaacggcaucaucaccgacaccaucaaguccuggcgcaacaacauccuccgcacccaggaguccgagugcgccugcgucaacggcuccugcuucaccaucaugaccgacggccccuccgacggccaggccuccuacaagaucuuccgcaucgagaagggcaagaucgucaaguccgucgagaugaacgcccccaacuaccacuacgaggagugcuccugcuaccccgacuccuccgagaucaccugcgucugccgcgacaacuggcacggcuccaaccgccccugggucuccuucaaccagaaccucgaguaccagaucggcuacaucugcuccggcgucuucggcgacaacccccgccccaacgacaagaccggcuccugcggccccgucuccuccaacggcgccaacggcgucaagggcuucuccuucaaguacggcaacggcgucuggaucggccgcaccaaguccaucuccucccgcaagggcuucgagaugaucugggaccccaacggcuggaccggcaccgacaacaacuucuccaucaagcaggacaucgucggcaucaacgagugguccggcuacuccggcuccuucguccagcaccccgagcucaccggccucgacugcauccgccccugcuucugggucgagcucauccgcggccgccccaaggagaacaccaucuggaccuccggcuccuccaucuccuucugcggcgucaacuccgacaccgucggcugguccuggcccgacggcgccgagcuccccuucaccaucgacaaguga

SEQ ID NO: 120977 - RNA, 1410 nt, Artificial Sequence
  derived and/or modified CDS sequence (opt2) from neuraminidase__InfluenzaA__AHL98485
augaaccccaaccagaagaucaucaccaucggcuccgucucccucaccaucuccaccaucugcuucuucaugcagaucgccauccucaucaccaccgucacccuccacuucaagcaguacgaguucaacuccccccccaacaaccaggucaugcucugcgagcccaccaucaucgagcgcaacaucaccgagaucgucuaccucaccaacaccaccaucgagaaggagaucugccccaagcccgccgaguaccgcaacugguccaagccccagugcggcaucaccggcuucgcccccuucuccaaggacaacuccauccgccucuccgccggcggcgacaucugggucacccgcgagcccuacgucuccugcgaccccgacaagugcuaccaguucgcccucggccagggcaccacccucaacaacguccacuccaacaacaccguccgcgaccgcacccccuaccgcacccuccucaugaacgagcucggcguccccuuccaccucggcaccaagcaggucugcaucgccugguccuccuccuccugccacgacggcaaggccuggcuccacgucugcaucaccggcgacgacaagaacgccaccgccuccuucaucuacaacggccgccucgucgacuccgucgucuccugguccaaggagauccuccgcacccaggaguccgagugcgucugcaucaacggcaccugcaccgucgucaugaccgacggcuccgccuccggcaaggccgacaccaagauccucuucaucgaggagggcaagaucguccacaccuccauccucuccggcuccgcccagcacgucgaggagugcuccugcuacccccgcuaccccggcguccgcugcgucugccgcgacaacuggaagggcuccaaccgccccaucgucgacaucaacaucaaggaccacuccaucgucuccuccuacgucugcuccggccucgucggcgacaccccccgcaagaacgacuccuccuccuccucccacugccucgaccccaacaacgaggagggcggccacggcgucaagggcugggccuucgacgacggcaacgacgucuggaugggccgcaccaucaacgagaccucccgccucggcuacgagaccuucaaggucaucgagggcugguccaaccccaaguccaagcuccagaucaaccgccaggucaucgucgaccgcggcgaccgcuccggcuacuccggcaucuucuccgucgagggcaaguccugcaucaaccgcugcuucuacgucgagcucauccgcggccgcaaggaggagaccgagguccucuggaccuccaacuccaucgucgucuucugcggcaccuccggcaccuacggcaccggcuccuggcccgacggcgccgaccucaaccucaugcccaucuga

SEQ ID NO: 120978 - RNA, 1410 nt, Artificial Sequence; identical to SEQ ID NO: 119411
  derived and/or modified CDS sequence (opt2) from neuraminidase__InfluenzaA__AHL98497

SEQ ID NO: 120979 - RNA, 1410 nt, Artificial Sequence; identical to SEQ ID NO: 118182
  derived and/or modified CDS sequence (opt2) from neuraminidase__InfluenzaA__AHL98509

SEQ ID NO: 120980 - RNA, 1410 nt, Artificial Sequence; identical to SEQ ID NO: 118182
  derived and/or modified CDS sequence (opt2) from neuraminidase__InfluenzaA__AHL98521

SEQ ID NO: 120981 - RNA, 1410 nt, Artificial Sequence; identical to SEQ ID NO: 119411
  derived and/or modified CDS sequence (opt2) from neuraminidase__InfluenzaA__AHL98533

SEQ ID NO: 120982 - RNA, 1410 nt, Artificial Sequence; identical to SEQ ID NO: 118182
  derived and/or modified CDS sequence (opt2) from neuraminidase__InfluenzaA__AHL98545

SEQ ID NO: 120983 - RNA, 1410 nt, Artificial Sequence; identical to SEQ ID NO: 118182
  derived and/or modified CDS sequence (opt2) from neuraminidase__InfluenzaA__AHL98557

SEQ ID NO: 120984 - RNA, 1410 nt, Artificial Sequence; identical to SEQ ID NO: 118182
  derived and/or modified CDS sequence (opt2) from neuraminidase__InfluenzaA__AHL98569

SEQ ID NO: 120985 - RNA, 1410 nt, Artificial Sequence
  derived and/or modified CDS sequence (opt2) from neuraminidase__InfluenzaA__AHL98581
augaaccccaaccagaagaucaucaccaucggcuccgucucccucaccaucuccaccaucugcuucuucaugcagaucgccauccucaucaccaccgucacccuccacuucaagcaguacgaguucaacuccccccccaacaaccaggucaugcucugcgagcccaccaucaucgagcgcaacaucaccgagaucgucuaccucaccaacaccaccaucgagaaggagaucugccccaagcccgccgaguaccgcaacugguccaagccccagugcggcaucaccggcuucgcccccuucuccaaggacaacuccauccgccucuccgccggcggcaacaucugggucacccgcgagcccuacgucuccugcgaccccgacaagugcuaccaguucgcccucggccagggcaccacccucaacaacguccacuccaacaacaccguccgcgaccgcacccccuaccgcacccuccucaugaacgagcucggcguccccuuccaccucggcaccaagcaggucugcaucgccugguccuccuccuccugccacgacggcaaggccuggcuccacgucugcaucaccggcgacgacaagaacgccaccgccuccuucaucuacaacggccgccucgucgacuccgucgucuccugguccaaggagauccuccgcacccaggaguccgagugcgucugcaucaacggcaccugcaccgucgucaugaccgacggcuccgccuccggcaaggccgacaccaagauccucuucaucgaggagggcaagaucguccacaccuccacccucuccggcuccgcccagcacgucgaggagugcuccugcuacccccgcuaccccggcguccgcugcgucugccgcgacaacuggaagggcuccaaccgccccaucgucgacaucaacaucaaggaccacuccaucgucuccuccuacgucugcuccggccucgucggcgacaccccccgcaagaacgacuccuccuccuccucccacugccucgaccccaacaacgaggagggcggccacggcgucaagggcugggccuucgacgacggcaacgacgucuggaugggccgcaccaucaacgagaccucccgccucggcuacgagaccuucaaggucaucgagggcugguccaaccccaaguccaagcuccagaucaaccgccaggucaucgucgaccgcggcgaccgcuccggcuacuccggcaucuucuccgucgagggcaaguccugcaucaaccgcugcuucuacgucgagcucauccgcggccgcaaggaggagaccgagguccucuggaccuccaacuccaucgucgucuucugcggcaccuccggcaccuacggcaccggcuccuggcccgacggcgccgaccucaaccucaugcccaucuga

SEQ ID NO: 120986 - RNA, 1410 nt, Artificial Sequence; identical to SEQ ID NO: 118182
  derived and/or modified CDS sequence (opt2) from neuraminidase__InfluenzaA__AHL98593

SEQ ID NO: 120987 - RNA, 1410 nt, Artificial Sequence; identical to SEQ ID NO: 119919
  derived and/or modified CDS sequence (opt2) from neuraminidase__InfluenzaA__AHL98605

SEQ ID NO: 120988 - RNA, 1410 nt, Artificial Sequence; identical to SEQ ID NO: 119411
  derived and/or modified CDS sequence (opt2) from neuraminidase__InfluenzaA__AHL98617

SEQ ID NO: 120989 - RNA, 1410 nt, Artificial Sequence; identical to SEQ ID NO: 119411
  derived and/or modified CDS sequence (opt2) from neuraminidase__InfluenzaA__AHL98629

SEQ ID NO: 120990 - RNA, 1410 nt, Artificial Sequence; identical to SEQ ID NO: 118182
  derived and/or modified CDS sequence (opt2) from neuraminidase__InfluenzaA__AHL98641

SEQ ID NO: 120991 - RNA, 1410 nt, Artificial Sequence; identical to SEQ ID NO: 120760
  derived and/or modified CDS sequence (opt2) from neuraminidase__InfluenzaA__AHL98653

SEQ ID NO: 120992 - RNA, 1410 nt, Artificial Sequence; identical to SEQ ID NO: 118182
  derived and/or modified CDS sequence (opt2) from neuraminidase__InfluenzaA__AHL98665

SEQ ID NO: 120993 - RNA, 1410 nt, Artificial Sequence
  derived and/or modified CDS sequence (opt2) from neuraminidase__InfluenzaA__AHL98677
augaaccccaaccagaagaucaucaccaucggcuccgucucccucaccaucuccaccaucugcuucuucaugcagaucgccauccucaucaccaccgucacccuccacuucaagcaguacgaguucaacuccccccccaacaaccaggucaugcucugcgagcccaccaucaucgagcgcaacaucaccgagaucgucuaccucaccaacaccaccaucgagaaggagaucugccccaagcccgccgaguaccgcaacugguccaagccccagugcggcaucaccggcuucgcccccuucuccaaggacaacuccauccgccucuccgccggcggcgacaucugggucacccgcgagcccuacgucuccugcgaccccgacaagugcuaccaguucgcccucggccagggcaccacccucaacaacguccacuccaacaacaccguccgcgaccgcaccccccaccgcacccuccucaugaacgagcucggcguccccuuccaccucggcaccaagcaggucugcaucgccugguccuccuccuccugccacgacggcaaggccuggcuccacgucugcaucaccggcgacgacaagaacgccaccgccuccuucaucuacaacggccgccucgucgacuccgucgucuccugguccaaggagauccuccgcacccaggaguccgagugcgucugcaucaacggcaccugcaccgucgucaugaccgacggcuccgccuccggcaaggccgacaccaagauccucuucaucgaggagggcaagaucguccacaccuccacccucuccggcaacgcccagcacgucgaggagugcuccugcuacccccgcuaccccggcguccgcugcgucugccgcgacaacuggaagggcuccaaccgccccaucgucgacaucaacaucaaggaccacuccaucgucuccuccuacgucugcuccggccucgucggcgacaccccccgcaagaacgacuccuccuccuccucccacugccucgaccccaacaacgaggagggcggccacggcgucaagggcugggccuucgacgacggcaacgacgucuggaugggccgcaccaucaacgagaccucccgccucggcuacgagaccuucaaggucaucgagggcugguccaaccccaaguccaagcuccagaucaaccgccaggucaucgucgaccgcggcgaccgcuccggcuacuccggcaucuucuccgucgagggcaaguccugcaucaaccgcugcuucuacgucgagcucauccgcggccgcaaggaggagaccgagguccucuggaccuccaacuccaucgucgucuucugcggcaccuccggcaccuacggcaccggcuccuggcccgacggcgccgaccucaaccucaugcccaucuga

SEQ ID NO: 120994 - RNA, 1410 nt, Artificial Sequence; identical to SEQ ID NO: 119930
  derived and/or modified CDS sequence (opt2) from neuraminidase__InfluenzaA__AHL98689

SEQ ID NO: 120995 - RNA, 1410 nt, Artificial Sequence
  derived and/or modified CDS sequence (opt2) from neuraminidase__InfluenzaA__AHL98702
augaaccccaaccagaagaucaucaccaucggcuccgucucccucaccaucuccaccaucugcuucuucaugcagaucgccauccucaucaccaccgucacccuccacuucaagcaguacgaguucgacuccccccccaacaaccaggucaugcucugcgagcccaccaucaucgagcgcaacaucaccgagaucgucuaccucaccaacaccaccaucgagaaggagaucugccccaagcccgccgaguaccgcaacugguccaagccccagugcggcaucaccggcuucgcccccuucuccaaggacaacuccauccgccucuccgccggcggcgacaucugggucacccgcgagcccuacgucuccugcgaccccgacaagugcuaccaguucgcccucggccagggcaccacccucaacaacggccacuccaacaacaccguccgcgaccgcacccccuaccgcacccuccucaugaacgagcucggcguccccuuccaccucggcaccaagcaggucugcaucgccugguccuccuccuccugccacgacggcaaggccuggcuccacgucugcaucaccggcgacgacaagaacgccaccgccuccuucaucuacaacggccgccucgucgacuccgucgucuccugguccaaggagauccuccgcacccaggaguccgagugcgucugcaucaacggcaccugcaccgucgucaugaccgacggcuccgccuccggcaaggccgacaccaagauccucuucaucgaggagggcaagaucguccacaccuccacccucuccggcuccgcccagcacgucgaggagugcuccugcuacccccgcuaccccggcguccgcugcgucugccgcgacaacuggaagggcuccaaccgccccaucgucgacaucaacaucaaggaccacuccaucgucuccuccuacgucugcuccggccucgucggcgacaccccccgcaagaacgacuccuccuccuccucccacugccucgaccccaacaacgaggagggcggccacggcgucaagggcugggccuucgacgacggcaacgacgucuggaugggccgcaccaucaacgagaccucccgccucggcuacgagaccuucaaggucaucgagggcugguccaaccccaaguccaagcuccagaucaaccgccaggucaucgucgaccgcggcgaccgcuccggcuacuccggcaucuucuccgucgagggcaaguccugcaucaaccgcugcuucuacgucgagcucauccgcggccgcaaggaggagaccgagguccucuggaccuccaacuccaucgucgucuucugcggcaccuccggcaccuacggcaccggcuccuggcccgacggcgccgaccucaaccucaugcccaucuga

SEQ ID NO: 120996 - RNA, 1410 nt, Artificial Sequence; identical to SEQ ID NO: 119425
  derived and/or modified CDS sequence (opt2) from neuraminidase__InfluenzaA__AHL98714

SEQ ID NO: 120997 - RNA, 1410 nt, Artificial Sequence
  derived and/or modified CDS sequence (opt2) from neuraminidase__InfluenzaA__AHL98725
augaaccccaaccagaagaucaucaccaucggcuccgucucccucaccaucuccaccaucugcuucuucaugcagaucgccauccucaucaccaccgucacccuccacuucaagcaguacgaguucaacuccccccccaacaaccaggucaugcucugcgagcccaccaucaucgagcgcaacaucaccgagaucgucuaccucaccaacaccaccaucgagaaggagaucugccccaagcccgccgaguaccgcaacugguccaagccccagugcggcaucaccggcuucgcccccuucuccaaggacaacuccauccgccucuccgccggcggcggcaucugggucacccgcgagcccuacgucuccugcgaccccgacaagugcuaccaguucgcccucggccagggcaccacccucaacaacguccacuccaacaacaccguccgcgaccgcacccccuaccgcacccuccucaugaacgagcucggcguccccuuccaccucggcaccaagcaggucugcaucgccugguccuccuccuccugccacgacggcaaggccuggcuccacgucugcaucaccggcgacgacaagaacgccaccgccuccuucaucuacaacggccgccucgucgacuccgucgucuccugguccaaggagauccuccgcacccaggaguccgagugcgucugcaucaacggcaccugcaccgucgucaugaccgacggcaacgccuccggcaaggccgacaccaagauccucuucaucgaggagggcaagaucguccacaccuccacccucuccggcuccgcccagcacgucgaggagugcuccugcuacccccgcuaccccggcguccgcugcgucugccgcgacaacuggaagggcuccaaccgccccaucgucgacaucaacaucaaggaccacuccaucgucuccuccuacgucugcuccggccucgucggcgacaccccccgcaagaacgacuccuccuccuccucccacugccucgaccccaacaacgaggagggcggccacggcgucaagggcugggccuucgacgacgagaacgacgucuggaugggccgcaccaucaacgagaccucccgccucggcuacgagaccuucaaggucaucgagggcugguccaaccccaaguccaagcuccagaucaaccgccaggucaucgucgaccgcggcaaccgcuccggcuacuccggcaucuucuccgucgagggcaaguccugcaucaaccgcugcuucuacgucgagcucauccgcggccgcaaggaggagaccgagguccucuggaccuccaacuccaucgucgucuucugcggcaccuccggcaccuacggcaccggcuccuggcccgacggcgccgaccucaaccucaugcccaucuga

SEQ ID NO: 120998 - RNA, 1410 nt, Artificial Sequence; identical to SEQ ID NO: 119919
  derived and/or modified CDS sequence (opt2) from neuraminidase__InfluenzaA__AHL98737

SEQ ID NO: 120999 - RNA, 1410 nt, Artificial Sequence; identical to SEQ ID NO: 119907
  derived and/or modified CDS sequence (opt2) from neuraminidase__InfluenzaA__AHL98749

SEQ ID NO: 121000 - RNA, 1410 nt, Artificial Sequence; identical to SEQ ID NO: 119919
  derived and/or modified CDS sequence (opt2) from neuraminidase__InfluenzaA__AHL98761

SEQ ID NO: 121001 - RNA, 1410 nt, Artificial Sequence
  derived and/or modified CDS sequence (opt2) from neuraminidase__InfluenzaA__AHL98773
augaaccccaaccagaagaucaucaccaucggcuccgucucccucaccaucuccaccaucugcuucuucaugcagaucgccauccucaucaccaccgucacccuccacuucaagcaguacgaguucaacuccccccccaacaaccaggucaugcucugcgagcccaccaucaucgagcgcaacaucaccgagaucgucuaccucaccaacaccaccaucgagaaggagaucugccccaagcccgccgaguaccgcaacugguccaagccccagugcggcaucaccggcuucgcccccuucuccaaggacaacuccauccgccucuccgccggcggcaacaucugggucacccgcgagcccuacgucuccugcgaccccgacaagugcuaccaguucgcccucggccagggcaccacccucaacaacguccacuccaacaacaccgcccgcgaccgcacccccuaccgcacccuccucaugaacgagcucggcguccccuuccaccucggcaccaagcaggucugcaucgccugguccuccuccuccugccacgacggcaaggccuggcuccacgucugcaucaccggcgacgacaagaacgccaccgccuccuucaucuacaacggccgccucgucgacuccgucgucuccugguccaaggagauccuccgcacccaggaguccgagugcgucugcaucaacggcaccugcaccgucgucaugaccgacggcuccgccuccggcaaggccgacaccaagauccucuucaucgaggagggcaagaucguccacaccuccacccucuccggcuccgcccagcacgucgaggagugcuccugcuacccccgcuaccccggcguccgcugcgucugccgcgacaacuggaagggcuccaaccgccccaucgucgacaucaacaucaaggaccacuccaucgucuccuccuacgucugcuccggccucgucggcgacaccccccgcaagaacgacuccuccuccuccucccacugccucgaccccaacaacgaggagggcggccacggcgucaagggcugggccuucgacgacggcaacgacgucuggaugggccgcaccaucaacgagaccucccgccucggcuacgagaccuucaaggucaucgagggcugguccaaccccaaguccaagcuccagaucaaccgccaggucaucgucgaccgcggcgaccgcuccggcuacuccggcaucuucuccgucgagggcaaguccugcaucaaccgcugcuucuacgucgagcucauccgcggccgcaaggaggagaccgagguccucuggaccuccaacuccaucgucgucuucugcggcaccuccggcaccuacggcaccggcuccuggcccgacggcgccgaccucaaccucaugcccaucuga

SEQ ID NO: 121002 - RNA, 1410 nt, Artificial Sequence; identical to SEQ ID NO: 119939
  derived and/or modified CDS sequence (opt2) from neuraminidase__InfluenzaA__AHL98785

SEQ ID NO: 121003 - RNA, 1410 nt, Artificial Sequence
  derived and/or modified CDS sequence (opt2) from neuraminidase__InfluenzaA__AHL98797
augaaccccaaccagaagaucaucaccaucggcuccgucucccucaccaucuccaccaucugcuucuucacccagaucgccauccucaucaccaccgucacccuccacuucaagcaguacgaguucaacuccccccccaacaaccaggucaugcucugcgagcccaccaucaucgagcgcaacaucaccgagaucgucuaccucaccaacaccaccaucgagaaggagaucugccccaagcccgccgaguaccgcaacugguccaagccccagugcggcaucaccggcuucgcccccuucuccaaggacaacuccauccgccucuccgccggcggcgacaucugggucacccgcgagcccuacgucuccugcgaccccgacaagugcuaccaguucgcccucggccagggcaccacccucaacaacguccacuccaacaacaccguccgcgaccgcacccccuaccgcacccuccucaugaacgagcucggcguccccuuccaccucggcaccaagcaggucugcaucgccugguccuccuccuccugccacgacggcaaggccuggcuccacgucugcaucaccggcgacgacaagaacgccaccgccuccuucaucuacaacggccgccucgucgacuccgucgucuccugguccaaggagauccuccgcacccaggaguccgagugcgucugcaucaacggcaccugcaccgucgucaugaccgacggcuccgccuccggcaaggccgacaccaagauccucuucaucgaggagggcaagaucguccacaccuccacccucuccggcuccgcccagcacgucgaggagugcuccugcuacccccgcuaccccggcguccgcugcgucugccgcgacaacuggaagggcuccaaccgccccaucgucgacaucaacaucaaggaccacuccaucgucuccuccuacgucugcuccggccucgucggcgacaccccccgcaagaacgacuccuccuccuccucccacugccucgaccccaacaacgaggagggcggccacggcgucaagggcugggccuucgacgacggcaacgacgucuggaugggccgcaccaucaacgagaccucccgcuccggcuacgagaccuucaaggucaucgagggcugguccaaccccaaguccaagcuccagaucaaccgccaggucaucgucgaccgcggcgaccgcuccggcuacuccggcaucuucuccgucgagggcaaguccugcaucaaccgcugcuucuacgucgagcucauccgcggccgcaaggaggagaccgagguccucuggaccuccaacuccaucgucgucuucugcggcaccuccggcaccuacggcaccggcuccuggcccgacggcgccgaccucaaccucaugcccaucuga

SEQ ID NO: 121004 - RNA, 1410 nt, Artificial Sequence; identical to SEQ ID NO: 118182
  derived and/or modified CDS sequence (opt2) from neuraminidase__InfluenzaA__AHL98809

SEQ ID NO: 121005 - RNA, 1410 nt, Artificial Sequence
  derived and/or modified CDS sequence (opt2) from neuraminidase__InfluenzaA__AHL98821
augaaccccaaccagaagaucaucaccaucggcuccgucucccucaccaucuccaccaucugcuucuucaugcagaucgccauccucaucaccaccgucacccuccacuucaagcaguacgaguucaacuccccccccaacaaccaggucaugcucugcgagcccaccaucaucgagcgcaacaucaccgagaucgucuaccucaccaacaccaccaucgagaaggagaucugccccaagcccgccgaguaccgcaacugguccaagccccagugcggcaucaccggcuucgcccccuucuccaaggacaacuccauccgccucuccgccggcggcgacaucugggucacccgcgagcccuacgucuccugcgaccccgaccgcugcuaccaguucgcccucggccagggcaccacccucaacaacaugcacuccaacaacaccguccgcgaccgcacccccuaccgcacccuccucaugaacgagcucggcguccccuuccaccucggcaccaagcaggucugcaucgccugguccuccuccuccugccacgacggcaaggccuggcuccacgucugcaucaccggcgacgacaagaacgccaccgccuccuucaucuacaacggccgccucgucgacuccgucgucuccugguccaaggagauccuccgcacccaggaguccgagugcgucugcaucaacggcaccugcaccgucgucaugaccgacggcuccgccuccggcaaggccgacaccaagauccucuucaucgaggagggcaagaucguccacaccuccacccucuccggcuccgcccagcacgucgaggagugcuccugcuacccccgcuaccccggcguccgcugcgucugccgcgacaacuggaagggcuccaaccgccccaucgucgacaucaacaucaaggaccacuccaucgucuccuccuacgucugcuccggccucgucggcgacaccccccgcaagaacgacuccuccuccuccucccacugccucgaccccaacaacgaggagggcggccacggcgucaagggcugggccuucgacgacggcaacgacgucuggaugggccgcaccaucaacgagaccucccgccucggcuacgagaccuucaaggucaucgagggcugguccaaccccaaguccaagcuccagaucaaccgccaggucaucgucgaccgcggcgaccgcuccggcuacuccggcaucuucuccgucgagggcaaguccugcaucaaccgcugcuucuacgucgagcucauccgcggccgcaaggaggagaccgagguccucuggaccuccaacuccaucgucgucuucugcggcaccuccggcaccuacggcaccggcuccuggcccgacggcgccgaccucaaccucaugcccaucuga

SEQ ID NO: 121006 - RNA, 1410 nt, Artificial Sequence; identical to SEQ ID NO: 118182
  derived and/or modified CDS sequence (opt2) from neuraminidase__InfluenzaA__AHL98833

SEQ ID NO: 121007 - RNA, 1410 nt, Artificial Sequence
  derived and/or modified CDS sequence (opt2) from neuraminidase__InfluenzaA__AHL98845
augaaccccaaccagaagaucaucaccaucggcuccgucucccucaccaucuccaccaucugcuucuucaugcagaucgccauccucaucaccaccgucacccuccacuucaagcaguacgaguucaacuccccccccaacaaccaggucaugcucugcgagcccaccaucaucgagcgcaacaucaccgagaucgucuaccucaucaacaccaccaucgagaaggagaucugccccaagcccgccgaguaccgcaacugguccaagccccagugcggcaucaccggcuucgcccccuucuccaaggacaacuccauccgccucuccgccggcggcgacaucugggucacccgcgagcccuacgucuccugcggccccgacaagugcuaccaguucgcccucggccagggcaccacccucaacaacaugcacuccaacaacaccguccgcgaccgcacccccuaccgcacccuccucaugaacgagcucggcguccccuuccaccucggcaccaagcaggucugcaucgccugguccuccuccuccugccacgacggcaaggccuggcuccacgucugcaucaccggcgacgacaagaacgccaccgccuccuucaucuacaacggccgccucgucgacuccgucgucuccugguccaaggagauccuccgcacccaggaguccgagugcgucugcaucaacggcaccugcaccgucgucaugaccgacggcuccgccuccggcaaggccgacaccaagauccucuucaucgaggagggcaagaucguccacaccuccacccucuccggcuccgcccagcacgucgaggagugcuccugcuacccccgcuaccccggcguccgcugcgucugccgcgacaacuggaagggcuccaaccgccccaucgucgacaucaacaucaaggaccacuccaucgucuccuccuacgucugcuccggccucgucggcgacaccccccgcaagaacgacuccuccuccuccucccacugccucgaccccaacaacgaggagggcggccacggcgucaagggcugggccuucgacgacggcaacgacgucuggaugggccgcaccaucaacgagaccucccgccucggcuacgagaccuucaaggucaucgagggcugguccaaccccaaguccaagcuccagaucaaccgccaggucaucgucgaccgcggcgaccgcuccggcuacuccggcaucuucuccgucgagggcaaguccugcaucaaccgcugcuucuacgucgagcucauccgcggccgcaaggaggagaccgagguccucuggaccuccaacuccaucgucgucuucugcggcaccuccggcaccuacggcaccggcuccuggcccgacggcgccgaccucaaccucaugcccaucuga

SEQ ID NO: 121008 - RNA, 1410 nt, Artificial Sequence; identical to SEQ ID NO: 119919
  derived and/or modified CDS sequence (opt2) from neuraminidase__InfluenzaA__AHL98857

SEQ ID NO: 121009 - RNA, 1410 nt, Artificial Sequence; identical to SEQ ID NO: 119919
  derived and/or modified CDS sequence (opt2) from neuraminidase__InfluenzaA__AHL98869

SEQ ID NO: 121010 - RNA, 1410 nt, Artificial Sequence; identical to SEQ ID NO: 118182
  derived and/or modified CDS sequence (opt2) from neuraminidase__InfluenzaA__AHL98881

SEQ ID NO: 121011 - RNA, 1410 nt, Artificial Sequence
  derived and/or modified CDS sequence (opt2) from neuraminidase__InfluenzaA__AHL98893
augaaccccaaccagaagaucaucaccaucggcuccgucucccucaccaucuccaccaucugcuucuucaugcagaucgccauccucaucaccaccgucacccuccacuucaagcaguacgaguucgacuccccccccaacaaccaggucaugcucugcgagcccaccaucaucgagcgcaacaucaccgagaucgucuaccucaccaacaccaccaucgagaaggagaucugccccaagcccgccgaguaccgcaacugguccaagccccagugcggcaucaccggcuucgcccccuucuccaaggacaacuccauccgccucuccgccggcggcgacaucugggucacccgcgagcccuacgucuccugcgaccccgacaagugcuaccaguucgcccucggccagggcaccacccucaacaacguccacuccaacaacaccguccgcgaccgcacccccuaccgcacccuccucaugaacgagcucggcguccccuuccaccucggcaccaagcaggucugcaucgccugguccuccuccuccugccacgacggcaaggccuggcuccacgucugcaucaccggcgacgacaagaacgccaccgccuccuucaucuacaacggccgccucgucgacuccgucgucuccugguccaaggagauccuccgcacccaggaguccgagugcgucugcaucaacggcaccugcaccgucgucaugaccgacggcuccgccuccggcaaggccgacaccaagauccucuucaucgaggagggcaagaucguccacaccuccacccucuccggcuccgcccagcacgucgaggagugcuccugcuacccccgcuaccccggcguccgcugcgucugccgcgacaacuggaagggcuccaaccgccccaucgucgacaucaacaucaaggaccacuccaucgucuccuccuacgucugcuccggccucgucggcgacaccccccgcaagaacgacuccuccuccuccucccacugccucgaccccaacaacgaggagggcggccacggcgucaagggcugggccuucgacgacggcaacgacgucuggaugggccgcaccaucaacgagaccucccgccucggcuacgagaccuucaaggucuucgagggcugguccaaccccaaguccaagcuccagaucaaccgccaggucaucgucgaccgcggcgaccgcuccggcuacuccggcaucuucuccgucgagggcaaguccugcaucaaccgcugcuucuacgucgagcucauccgcggccgcaaggaggagaccgagguccucuggaccuccaacuccaucgucgucuucugcggcaccuccggcaccuacggcaccggcuccuggcccgacggcgccgaccucaaccucaugcccaucuga

SEQ ID NO: 121012 - RNA, 1410 nt, Artificial Sequence; identical to SEQ ID NO: 119907
  derived and/or modified CDS sequence (opt2) from neuraminidase__InfluenzaA__AHL98905

SEQ ID NO: 121013 - RNA, 1410 nt, Artificial Sequence; identical to SEQ ID NO: 118182
  derived and/or modified CDS sequence (opt2) from neuraminidase__InfluenzaA__AHL98916

SEQ ID NO: 121014 - RNA, 1410 nt, Artificial Sequence; identical to SEQ ID NO: 119930
  derived and/or modified CDS sequence (opt2) from neuraminidase__InfluenzaA__AHL98928

SEQ ID NO: 121015 - RNA, 1410 nt, Artificial Sequence; identical to SEQ ID NO: 118182
  derived and/or modified CDS sequence (opt2) from neuraminidase__InfluenzaA__AHL98940

SEQ ID NO: 121016 - RNA, 1410 nt, Artificial Sequence; identical to SEQ ID NO: 118182
  derived and/or modified CDS sequence (opt2) from neuraminidase__InfluenzaA__AHL98952

SEQ ID NO: 121017 - RNA, 1410 nt, Artificial Sequence; identical to SEQ ID NO: 119907
  derived and/or modified CDS sequence (opt2) from neuraminidase__InfluenzaA__AHL98964

SEQ ID NO: 121018 - RNA, 1410 nt, Artificial Sequence
  derived and/or modified CDS sequence (opt2) from neuraminidase__InfluenzaA__AHL98976
augaaccccaaccagaagaucaucaccaucggcuccgucucccucaccaucuccaccaucugcuucuucaugcagaucgccauccucaucaccaccgucacccuccacuucaagcaguacgaguucaacuccccccccaacaaccaggucaugcucugcgagcccaccaucgucgagcgcaacaucaccgagaucgucuaccucaccaacaccaccaucgagaaggagaucugccccaagcccgccgaguaccgcaacugguccaagccccagugcggcaucaccggcuucgcccccuucuccaaggacaacuccauccgccucuccgccggcggcgacaucugggucacccgcgagcccuacgucuccugcgaccccgacaagugcuaccaguucgcccucggccagggcaccacccucaacaacguccacuccaacaacaccguccgcgaccgcacccccuaccgcacccuccucaugaacgagcucggcguccccuuccaccucggcaccaagcaggucugcaucgccugguccuccuccuccugccacgacggcaaggccuggcuccacgucugcaucaccggcgacgacaagaacgccaccgccuccuucaucuacaacggccgccucgucgacuccgucgccuccugguccaaggagguccuccgcacccaggaguccgagugcgucugcaucaacggcaccugcgccgucgucaugaccgacggcuccgccuccggcaaggccgacaccaagauccucuucaucgaggagggcaagaucguccacaccuccacccucuccggcuccgcccagcacgucgaggagugcuccugcuacccccgcuaccccggcguccgcugcgucugccgcgacaacuggaagggcuccaaccgccccaucgucgacaucaacaucaaggaccacuccaucgucuccuccuacgucugcuccggccucgucggcgacaccccccgcaagaacgacuccuccuccuccucccacugccucgaccccaacaacgaggagggcggccacggcgucaagggcugggccuucgacgacggcaacgacgucuggaugggccgcaccaucaacgagaccucccgccucggcuacgagaccuucaaggucaucgagggcugguccaaccccaaguccaagcuccagaucaaccgccaggucaucgucgaccgcggcgaccgcuccggcuacuccggcaucuucuccgucgagggcaaguccugcaucaaccgcugcuucuacgucgagcucauccgcggccgcaaggaggagaccgagguccucuggaccuccaacuccaucgucgucuucugcggcaccuccggcaccuacggcaccggcuccuggcccgacggcgccgaccucaaccucaugcccaucuga

SEQ ID NO: 121019 - RNA, 1410 nt, Artificial Sequence; identical to SEQ ID NO: 119907
  derived and/or modified CDS sequence (opt2) from neuraminidase__InfluenzaA__AHL98988

SEQ ID NO: 121020 - RNA, 1410 nt, Artificial Sequence; identical to SEQ ID NO: 118182
  derived and/or modified CDS sequence (opt2) from neuraminidase__InfluenzaA__AHL99000

SEQ ID NO: 121021 - RNA, 1410 nt, Artificial Sequence; identical to SEQ ID NO: 118182
  derived and/or modified CDS sequence (opt2) from neuraminidase__InfluenzaA__AHL99012

SEQ ID NO: 121022 - RNA, 1410 nt, Artificial Sequence
  derived and/or modified CDS sequence (opt2) from neuraminidase__InfluenzaA__AHL99024
augaaccccaaccagaagaucaucaccaucggcuccgucucccucaccaucuccaccaucugcuucuucaugcagaucgccauccucaucaccaccgucacccuccacuucaagcaguacgaguucaacuccccccccaacaaccaggucaugcucugcgagcccaccaucaucgagcgcaacaucaccgagaucgucuaccucaccaacaccaccaucgagaaggagaucugccccaagcccgccgaguaccgcaacugguccaagccccagugcggcaucaccggcuucgcccccuucuccaaggacaacuccauccgccucuccgccggcggcgacaucugggucacccgcgagcccuacgucuccugcgaccccgacaagugcuaccaguucgcccucggccagggcaccacccucaacaacguccacuccaacaacaccguccgcgaccgcacccccuaccgcacccuccucaugaacgagcucggcguccccuuccaccucggcaccaagcaggucugcaucgccugguccuccuccuccugccacgacggcaaggccuggcuccacgucugcaucaccggcgacgacaagaacgccaccgccuccuucaucuacaacggccgccucgucgacuccgucgucuccugguccaaggagauccuccgcacccaggaguccgagugcgucugcaucaacggcaccugcaccgucgucaugaccgacggcuccgccuccggcaaggccgacaccaagauccucuucaucgaggagggcaagaucguccacaccuccacccucuccggcuccgcccagcacgucgaggagugcuccugcuacccccgcuaccccggcguccgcugcaucugccgcgacaacuggaagggcuccaaccgccccaucgucgacaucaacaucaaggaccacuccaucgucuccuccuacgucugcuccggccucgucggcgacaccccccgcaagaacgacuccuccuccuccucccacugccucgaccccaacaacgaggagggcggccacggcgucaagggcugggccuucgacgacggcaacgacgucuggaugggccgcaccaucaacgagaccucccgccucggcuacgagaccuucaaggucaucgagggcugguccaaccccaaguccaagcuccagaucaaccgccaggucaucgucgaccgcggcgaccgcuccggcuacuccggcaucuucuccgucgagggcaaguccugcaucaaccgcugcuucuacgucgagcucauccgcggccgcaaggaggagaccgagguccucuggaccuccaacuccaucgucgucuucugcggcaccuccggcaccuacggcaccggcuccuggcccgacggcgccgaccucaaccucaugcccaucuga

SEQ ID NO: 121023 - RNA, 1410 nt, Artificial Sequence; identical to SEQ ID NO: 119400
  derived and/or modified CDS sequence (opt2) from neuraminidase__InfluenzaA__AHL99036

SEQ ID NO: 121024 - RNA, 1410 nt, Artificial Sequence; identical to SEQ ID NO: 120822
  derived and/or modified CDS sequence (opt2) from neuraminidase__InfluenzaA__AHL99048

SEQ ID NO: 121025 - RNA, 1410 nt, Artificial Sequence; identical to SEQ ID NO: 118182
  derived and/or modified CDS sequence (opt2) from neuraminidase__InfluenzaA__AHL99060

SEQ ID NO: 121026 - RNA, 1410 nt, Artificial Sequence
  derived and/or modified CDS sequence (opt2) from neuraminidase__InfluenzaA__AHL99072
augaaccccaaccagaagaucaucaccaucggcuccgucucccucaccaucuccaccaucugcuucuucaugcagaucgccauccucaucaccaccgucacccuccacuucaagcaguacgaguucaacuccccccccaacaaccaggucaugcucugcgagcccaccaucaucgagcgcaacaucaccgagaucgucuaccucaccaacaccaccaucgagaaggagaucugccccaagcccgccgaguaccgcaacugguccaagccccagugcggcaucaccggcuucgcccccuucuccaaggacaacuccauccgccucuccgccggcggcgacaucugggucacccgcgagcccuacgucuccugcgaccccgacaagugcuaccaguucgcccucggccagggcaccacccucaacaacguccacuccaacaacaccguccgcgaccgcacccccuaccgcacccuccucaugaacgagcucggcguccccuuccaccucggcaccaagcaggucugcaucgccugguccuccuccuccugccacgacggcaaggccuggcuccacgucugcaucaccggcgacgacaagaacgccaccgccuccuucaucuacaacggccgccucgucgacuccgucgucuccugguccaaggagauccuccgcacccaggaguccgagugcgucugcaucaacggcaccugcaccgucgucaugaccgacggcuccgccuccggcaaggccgacaccaagauccucuucaucgaggagggcaagaucguccacaccuccacccucuccggcuccgcccagcacgucgaggagugcuccugcuacccccgcuaccccggcguccgcugcgucugccgcgacaacuggaagggcuccaaccgccccaucgucgacaucaacaugaaggaccacuccaucgucuccuccuacgucugcuccggccucgucggcgacaccccccgcaagaacgacuccuccuccuccucccacugccucgaccccaacaacgaggagggcggccacggcgucaagggcugggccuucgacgacggcaacgacgucuggaugggccgcaccaucaacgagaccucccgccucggcuacgagaccuucaaggucaucgagggcugguccaaccccaaguccaagcuccagaucaaccgccaggucaucgucgaccgcggcgaccgcuccggcuacuccggcaucuucuccgucgagggcaaguccugcaucaaccgcugcuucuacgucgagcucauccgcggccgcaaggaggagaccgagguccucuggaccuccaacuccaucgucgucuucugcggcaccuccggcaccuacggcaccggcuccuggcccgacggcgccgaccucaaccucaugcccaucuga

SEQ ID NO: 121027 - RNA, 1410 nt, Artificial Sequence
  derived and/or modified CDS sequence (opt2) from neuraminidase__InfluenzaA__AHL99084
augaaccccaaccagaagaucaucaccaucggcuccgucucccucaccaucuccaccaucugcuucuucaugcagaucgccauccucaucaccaccgucacccuccacuucaagcaguacgaguucaacuccccccccaacaaccaggucaugcucugcgagcccaccaucaucgagcgcaacaucaccgagaucgucuaccucaccaacaccaccaucgagaaggagaucugccccaagcccgccgaguaccgcaacugguccaagccccagugcggcaucaccggcuucgcccccuucuccaaggacaacuccauccgccucuccgccggcggcgacaucugggucacccgcgagcccuacgucuccugcgaccccgaccgcugcuaccaguucgcccucggccagggcaccacccucaacaacaugcacuccaacaacaccguccgcgaccgcacccccuaccgcacccuccucaugaacgagcucggcguccccuuccaccucggcaccaagcaggucugcaucgccugguccuccuccuccugccacgacggcaaggccuggcuccacgucugcaucaccggcgacgacaagaacgccaccgccuccuucaucuacaacggccgccucgucgacuccgucgucuccugguccaaggagauccuccgcacccaggaguccgagugcgucugcaucaacggcaccugcaccgucgucaugaccgacggcuccgccuccggcaaggccgacaccaagauccucuucaucgaggagggcaagaucguccacaccuccacccucuccggcuccgcccagcacgucgaggagugcuccugcuacccccgcuaccccggcguccgcugcgucugccgcgacaacuggaagggcuccaaccgccccaucgucgacaucaacaucaaggaccacaacaucgucuccuccuacgucugcuccggccucgucggcgacaccccccgcaagaacgacuccuccuccuccucccacugccucgaccccaacaacgaggagggcggccacggcgucaagggcugggccuucgacgacggcaacgacgucuggaugggccgcaccaucaacgagaccucccgccucggcuacgagaccuucaaggucaucgagggcugguccaaccccaaguccaagcuccagaucaaccgccaggucaucgucgaccgcggcgaccgcuccggcuacuccggcaucuucuccgucgagggcaaguccugcaucaaccgcugcuucuacgucgagcucauccgcggccgcaaggaggagaccgagguccucuggaccuccaacuccaucgucgucuucugcggcaccuccggcaccuacggcaccggcuccuggcccgacggcgccgaccucaaccucaugcccaucuga

SEQ ID NO: 121028 - RNA, 1410 nt, Artificial Sequence; identical to SEQ ID NO: 118182
  derived and/or modified CDS sequence (opt2) from neuraminidase__InfluenzaA__AHL99096

SEQ ID NO: 121029 - RNA, 1410 nt, Artificial Sequence; identical to SEQ ID NO: 118182
  derived and/or modified CDS sequence (opt2) from neuraminidase__InfluenzaA__AHL99108

SEQ ID NO: 121030 - RNA, 1410 nt, Artificial Sequence; identical to SEQ ID NO: 118182
  derived and/or modified CDS sequence (opt2) from neuraminidase__InfluenzaA__AHL99120

SEQ ID NO: 121031 - RNA, 1410 nt, Artificial Sequence; identical to SEQ ID NO: 118182
  derived and/or modified CDS sequence (opt2) from neuraminidase__InfluenzaA__AHL99132

SEQ ID NO: 121032 - RNA, 1410 nt, Artificial Sequence
  derived and/or modified CDS sequence (opt2) from neuraminidase__InfluenzaA__AHL99144
augaaccccaaccagaagaucaucaccaucggcuccgucucccucaccaucuccaccaucugcuucuucaugcagaucgccauccucaucaccaccgucacccuccacuucaagcaguacgaguucaacuccccccccaacaaccaggucaugcucugcgagcccaccaucaucgagcgcaacaucaccgagaucgucuaccucaccaacaccaccaucgagaaggagaucugccccaagcccgccgaguaccgcaacugguccaagccccagugcggcaucaccggcuucgcccccuucuccaaggacaacuccauccgccucuccgccggcggcgacaucugggucacccgcgagcccuacgucuccugcgaccccgacaagugcuaccaguucgcccucggccagggcaccacccucaacaacguccacuccaacaacaccguccgcgaccgcacccccuaccgcacccuccucaugaacgagcucggcguccccuuccaccucggcaccaagcaggucugcaucgccugguccuccuccuccugccacgacggcaaggccuggcuccacgucugcaucaccggcgacgacaagaacgccaccgccuccuucaucuacaacggccgccucgucgacuccgucgucuccugguccaaggagauccuccgcacccaggaguccgagugcgucugcaucaacggcaccugcaccgucgucaugaccgacggcuccgccuccggcaaggccgacaccaagauccucuucaucgaggagggccgcaucguccacaccuccacccucuccggcuccgcccagcacgucgaggagugcuccugcuacccccgcuaccccggcguccgcugcgucugccgcgacaacuggaagggcuccaaccgccccaucgucgacaucaacaucaaggaccacuccaucgucuccuccuacgucugcuccggccucgucggcgacaccccccgcaagaacgacuccuccuccuccucccacugccucgaccccaacaacgaggagggcggccacggcgucaagggcugggccuucgacgacggcaacgacgucuggaugggccgcaccaucaacgagaccucccgccucggcuacgagaccuucaaggucaucgagggcugguccaaccccaaguccaagcuccagaucaaccgccaggucaucgucgaccgcggcgaccgcuccggcuacuccggcaucuucuccgucgagggcaaguccugcaucaaccgcugcuucuacgucgagcucauccgcggccgcaaggaggagaccgagguccucuggaccuccaacuccaucgucgucuucugcggcaccuccggcaccuacggcaccggcuccuggcccgacggcgccgaccucaaccucaugcccaucuga

SEQ ID NO: 121033 - RNA, 1410 nt, Artificial Sequence; identical to SEQ ID NO: 118182
  derived and/or modified CDS sequence (opt2) from neuraminidase__InfluenzaA__AHL99156

SEQ ID NO: 121034 - RNA, 1410 nt, Artificial Sequence
  derived and/or modified CDS sequence (opt2) from neuraminidase__InfluenzaA__AHL99168
augaaccccaaccagaagaucaucaccaucggcuccgucucccucaccaucuccaccaucugcuucuucaugcagaucgccauccucaucaccaccgucacccuccacuucaagcaguacgaguucaacuccccccccaacaaccaggucaugcucugcgagcccaccaucaucgagcgcaacaccaccgagaucgucuaccucaccaacaccaccaucgagaaggagaucugccccaagcccgccgaguaccgcaacugguccaagccccagugcggcaucaccggcuucgcccccuucuccaaggacaacuccauccgccucuccgccggcggcgacaucugggucacccgcgagcccuacgucuccugcgaccccgacaagugcuaccaguucgcccucggccagggcaccacccucaacaacguccacuccaacaacaccguccgcgaccgcacccccuaccgcacccuccucaugaacgagcucggcguccccuuccaccucggcaccaagcaggucugcaucgccugguccuccuccuccugccacgacggcaaggccuggcuccacgucugcaucaccggcgacgacaagaacgccaccgccuccuucaucuacaacggccgccucgucgacuccgucgucuccugguccaaggagauccuccgcacccaggaguccgagugcgucugcaucaacggcaccugcaccgucgucaugaccgacggcuccgccuccggcaaggccgacaccaagauccucuucaucgaggagggcaagaucguccacaccuccacccucuccggcuccgcccagcacgucgaggagugcuccugcuacccccgcuaccccggcguccgcugcgucugccgcgacaacuggaagggcuccaaccgccccaucgucgacaucaacaucaaggaccacuccaucgucuccuccuacgucugcuccggccucgucggcgacaccccccgcaagaacgacuccuccuccuccucccacugccucgaccccaacaacgaggagggcggccacggcgucaagggcugggccuucgacgacggcaacgacgucuggaugggccgcaccaucaacgagaccucccgccucggcuacgagaccuucaaggucaucgagggcugguccaaccccaaguccaagcuccagaucaaccgccaggucaucgucgaccgcggcgaccgcuccggcuacuccggcaucuucuccgucgagggcaaguccugcaucaaccgcugcuucuacgucgagcucauccgcggccgcaaggaggagaccgagguccucuggaccuccaacuccaucgucgucuucugcggcaccuccggcaccuacggcaccggcuccuggcccgacggcgccgaccucaaccucaugcccaucuga

SEQ ID NO: 121035 - RNA, 1410 nt, Artificial Sequence; identical to SEQ ID NO: 118182
  derived and/or modified CDS sequence (opt2) from neuraminidase__InfluenzaA__AHL99180

SEQ ID NO: 121036 - RNA, 1410 nt, Artificial Sequence; identical to SEQ ID NO: 119046
  derived and/or modified CDS sequence (opt2) from neuraminidase__InfluenzaA__AHL99204

SEQ ID NO: 121037 - RNA, 1410 nt, Artificial Sequence
  derived and/or modified CDS sequence (opt2) from neuraminidase__InfluenzaA__AHL99216
augaaccccaaccagaagaucaucaccaucggcuccgucucccucaccaucuccaccaucugcuucuucaugcagaucgccauccucaucaccaccgucacccuccacuucaagcaguacgaguucaacuccccccccaacaaccaggucaugcucugcgagcccaccaucaucgagcgcaacaucaccgagaucgucuaccucaccaacaccaccgucgagaaggagaucugccccaagcccgccgaguaccgcaacugguccaagccccagugcggcaucaccggcuucgcccccuucuccaaggacaacuccauccgccucuccgccggcggcgacaucugggucacccgcgagcccuacgucuccugcgaccccgacaagugcuaccaguucgcccucggccagggcaccacccucaacaacguccacuccaacaacaccguccgcgaccgcacccccuaccgcacccuccucaugaacgagcucggcguccccuuccaccucggcaccaagcaggucugcaucgccugguccuccuccuccugccacgacggcaaggccuggcuccacgucugcaucaccggcgacgacaagaacgccaccgccuccuucaucuacaacggccgccucgucgacuccgucgucuccugguccaaggagauccuccgcacccaggaguccgagugcgucugcaucaacggcaccugcaccgucgucaugaccgacggcuccgccuccggcaaggccgacaccaagauccucuucaucgaggagggcaagaucguccacaccuccacccucuccggcuccgcccagcacgucgaggagugcuccugcuacccccgcuaccccggcguccgcugcgucugccgcgacaacuggaagggcuccaaccgccccaucaucgacaucaacaucaaggaccacuccaucgucuccuccuacgucugcuccggccucgucggcgacaccccccgcaagaacgacuccuccuccuccucccacugccucgaccccaacaacgaggagggcggccacggcgucaagggcugggccuucgacgacggcaacgacgucuggaugggccgcaccaucaacgagaccucccgccucggcuacgagaccuucaaggucaucgagggcugguccaaccccaaguccaagcuccagaucaaccgccaggucaucgucgaccgcggcgaccgcuccggcuacuccggcaucuucuccgucgagggcaaguccugcaucaaccgcugcuucuacgucgagcucauccgcggccgcaagaaggagaccgagguccucuggaccuccaacuccaucgucgucuucugcggcaccuccggcaccuacggcaccggcuccuggcccgacggcgccgaccucaaccucaugcccaucuga

SEQ ID NO: 121038 - RNA, 1410 nt, Artificial Sequence; identical to SEQ ID NO: 118182
  derived and/or modified CDS sequence (opt2) from neuraminidase__InfluenzaA__AHL99228

SEQ ID NO: 121039 - RNA, 1410 nt, Artificial Sequence; identical to SEQ ID NO: 118182
  derived and/or modified CDS sequence (opt2) from neuraminidase__InfluenzaA__AHL99240

SEQ ID NO: 121040 - RNA, 1410 nt, Artificial Sequence; identical to SEQ ID NO: 118182
  derived and/or modified CDS sequence (opt2) from neuraminidase__InfluenzaA__AHL99252

SEQ ID NO: 121041 - RNA, 1410 nt, Artificial Sequence; identical to SEQ ID NO: 118182
  derived and/or modified CDS sequence (opt2) from neuraminidase__InfluenzaA__AHL99264

SEQ ID NO: 121042 - RNA, 1410 nt, Artificial Sequence; identical to SEQ ID NO: 118182
  derived and/or modified CDS sequence (opt2) from neuraminidase__InfluenzaA__AHL99276

SEQ ID NO: 121043 - RNA, 1410 nt, Artificial Sequence; identical to SEQ ID NO: 119919
  derived and/or modified CDS sequence (opt2) from neuraminidase__InfluenzaA__AHL99288

SEQ ID NO: 121044 - RNA, 1410 nt, Artificial Sequence; identical to SEQ ID NO: 120822
  derived and/or modified CDS sequence (opt2) from neuraminidase__InfluenzaA__AHL99300

SEQ ID NO: 121045 - RNA, 1410 nt, Artificial Sequence; identical to SEQ ID NO: 118182
  derived and/or modified CDS sequence (opt2) from neuraminidase__InfluenzaA__AHL99312

SEQ ID NO: 121046 - RNA, 1410 nt, Artificial Sequence
  derived and/or modified CDS sequence (opt2) from neuraminidase__InfluenzaA__AHL99324
augaaccccaaccagaagaucaucaccaucggcuccgucucccucaccaucuccaccaucugcuucuucaugcagaucgccauccucaucaccaccgucacccuccacuucaagcaguacgaguucaacuccccccccaacaaccaggucauccucugcgagcccaccaucaucgagcgcaacaucaccgagaucgucuaccucaccaacaccaccaucgagaaggagaucugccccaagcccgccgaguaccgcaacugguccaagccccagugcggcaucaccggcuucgcccccuucuccaaggacaacuccauccgccucuccgccggcggcgacaucugggucacccgcgagcccuacgucuccugcgaccccgacaagugcuaccaguucgcccucggccagggcaccacccucaacaacguccacuccaacaacaccguccgcgaccgcacccccuaccgcacccuccucaugaacgagcucggcguccccuuccaccucggcaccaagcaggucugcaucgccugguccuccuccuccugccacgacggcaaggccuggcuccacgucugcaucaccggcgacgacaagaacgccaccgccuccuucaucuacaacggcaagcucgucgacuccgucgucuccugguccaaggagauccuccgcacccaggaguccgagugcgucugcaucaacggcaccugcaccgucgucaugaccgacggcuccgccuccggcaaggccgacaccaagauccucuucaucgaggagggcaagaucguccacaccuccacccucuccggcuccgcccagcacgucgaggagugcuccugcuacccccgcuaccccggcguccgcugcgucugccgcgacaacuggaagggcuccaaccgccccaucgucgacaucaacaucaaggaccacuccaucgucuccuccuacgucugcuccggccucgucggcgacaccccccgcaagaacgacuccuccuccuccucccacugccucgaccccaacaacgaggagggcggccacggcgucaagggcugggccuucgacgacggcaacgacgucuggaugggccgcaccaucaacgagaccucccgccucggcuacgagaccuucaaggucaucgagggcugguccaaccccaaguccaagcuccagaucaaccgccaggucaucgucgaccgcggcgaccgcuccggcuacuccggcaucuucuccgucgagggcaaguccugcaucaaccgcugcuucuacgucgagcucauccgcggccgcaaggaggagaccgagguccucuggaccuccaacuccaucgucgucuucugcggcaccuccggcaccuacggcaccggcuccuggcccgacggcgccgaccucaaccucaugcccaucuga

SEQ ID NO: 121047 - RNA, 1410 nt, Artificial Sequence; identical to SEQ ID NO: 119425
  derived and/or modified CDS sequence (opt2) from neuraminidase__InfluenzaA__AHL99348

SEQ ID NO: 121048 - RNA, 1410 nt, Artificial Sequence; identical to SEQ ID NO: 119425
  derived and/or modified CDS sequence (opt2) from neuraminidase__InfluenzaA__AHL99359

SEQ ID NO: 121049 - RNA, 1410 nt, Artificial Sequence
  derived and/or modified CDS sequence (opt2) from neuraminidase__InfluenzaA__AHL99370
augaaccccaaccagaagaucaucaccaucggcuccgucucccucaccaucaccaccaucugcuucuucaugcagaucgccauccucaucaccaccgucacccuccacuucaagcaguacgaguucaacuccccccccaacaaccagaugaugcucugcgagcccaccaucaucgagcgcaacaucaccgagaucgucuaccucaccaacaccaccaucgagaaggagaucugccccaagcccgccgaguaccgcaacugguccaagccccagugcggcaucaccggcuucgcccccuucuccaaggacaacuccauccgccucuccgccggcggcgacaucugggucacccgcgagcccuacgucuccugcgaccccgacaagugcuaccaguucgcccucggccagggcaccacccucaacaacguccacuccaacaacaccguccgcgaccgcacccccuaccgcacccuccucaugaacgagcucggcguccccuuccaccucggcaccaagcaggucugcaucgccugguccuccuccuccugccacgacggcaaggccuggcuccacgucugcaucaccggcgacgacaagaacgccaccgccuccuucaucuacaacggccgccucgucgacuccgucgucuccugguccaaggagauccuccgcacccaggaguccgagugcgucugcaucaacggcaccugcaccgucgucaugaccgacggcuccgccuccggcaaggccgacaccaagauccucuucaucgaggagggcaagaucguccacaccuccacccucuccggcuccgcccagcacgucgaggagugcuccugcuacccccgcuaccccggcguccgcugcgucugccgcgacaacuggaagggcuccaaccgccccaucgucgacaucaacaucaaggaccacuccaucgucuccuccuacgucugcuccggccucgucggcgacaccccccgcaagaacgacuccuccuccuccucccacugccucgaccccaacaacgaggagggcggccacggcgucaagggcugggccuucgacgacggcaacgacgucuggaugggccgcaccaucaacgagaccucccgccucggcuacgagaccuucaaggucaucgagggcugguccaaccccaaguccaagcuccagaucaaccgccaggucaucgucgaccgcggcgaccgcuccggcuacuccggcaucuucuccgucgagggcaaguccugcaucaaccgcugcuucuacgucgagcucauccgcggccgcaaggaggagaccgagguccucuggaccuccaacuccaucgucgucuucugcggcaccuccggcaccuacggcaccggcuccuggcccgacggcgccgaccucaaccucaugcccaucuga

SEQ ID NO: 121050 - RNA, 1410 nt, Artificial Sequence; identical to SEQ ID NO: 118182
  derived and/or modified CDS sequence (opt2) from neuraminidase__InfluenzaA__AHL99393

SEQ ID NO: 121051 - RNA, 1410 nt, Artificial Sequence; identical to SEQ ID NO: 118182
  derived and/or modified CDS sequence (opt2) from neuraminidase__InfluenzaA__AHL99417

SEQ ID NO: 121052 - RNA, 1410 nt, Artificial Sequence; identical to SEQ ID NO: 118182
  derived and/or modified CDS sequence (opt2) from neuraminidase__InfluenzaA__AHL99429

SEQ ID NO: 121053 - RNA, 1410 nt, Artificial Sequence; identical to SEQ ID NO: 118182
  derived and/or modified CDS sequence (opt2) from neuraminidase__InfluenzaA__AHL99441

SEQ ID NO: 121054 - RNA, 1410 nt, Artificial Sequence; identical to SEQ ID NO: 118182
  derived and/or modified CDS sequence (opt2) from neuraminidase__InfluenzaA__AHL99453

SEQ ID NO: 121055 - RNA, 1410 nt, Artificial Sequence; identical to SEQ ID NO: 118182
  derived and/or modified CDS sequence (opt2) from neuraminidase__InfluenzaA__AHL99477

SEQ ID NO: 121056 - RNA, 1410 nt, Artificial Sequence; identical to SEQ ID NO: 120822
  derived and/or modified CDS sequence (opt2) from neuraminidase__InfluenzaA__AHL99489

SEQ ID NO: 121057 - RNA, 1410 nt, Artificial Sequence
  derived and/or modified CDS sequence (opt2) from neuraminidase__InfluenzaA__AHL99501
augaaccccaaccagaagaucaucaccaucggcuccgucucccucaccaucuccaccaucugcuucuucaugcagaucgccauccucaucaccaccgucacccuccacuucaagcaguacgaguucaacuccccccccaacaaccaggucaugcucugcgagcccaccaucaucgagcgcaacaucaccgagaucgucuaccucaccaacaccaccaucgagaaggagaucugccccaagcccgccgaguaccgcaacugguccaagccccagugcggcaucaccggcuucgcccccuucuccaaggacaacuccauccgccucuccgccggcggcgacaucugggucacccgcgagcccuacgucuccugcgaccccgacaagugcuaccaguucgcccucggccagggcaccacccucaacaacguccacuccaacaacaccguccgcgaccgcacccccuaccgcacccuccucaugaacgagcucggcguccccuuccaccucggcaccaagcaggucugcaucgccugguccuccuccuccugccacgacggcaaggccuggcuccacgucugcaucaccggcgacgacaagaacgccaccgccuccuucaucuacaacggccgccucgucgacuccgucgucuccugguccaaggagauccuccgcacccaggaguccgagugcgucugcaucaacggcaccugcaccgucgucaugaccgacggcuccgccuccggcaaggccgacaccaagauccucuucaucgaggagggcaagaucguccacaccuccacccucuccggcuccgcccagcacgucgaggagugcuccugcuacccccgcuaccccggcguccgcugcgucugccgcgacaacuggaagggcuccaaccgccccaucgucgacaucaacaucaaggaccacuccaccgucuccuccuacgucugcuccggccucgucggcgacaccccccgcaagaacgacuccuccuccuccucccacugccucgaccccaacaacgaggagggcggccacggcgucaagggcugggccuucgacgacggcaacgacgucuggaugggccgcaccaucaacgagaccucccgccucggcuacgagaccuucaaggucaucgagggcugguccaaccccaaguccaagcuccagaucaaccgccaggucaucgucgaccgcggcgaccgcuccggcuacuccggcaucuucuccgucgagggcaaguccugcaucaaccgcugcuucuacgucgagcucauccgcggccgcaaggaggagaccgagguccucuggaccuccaacuccaucgucgucuucugcggcaccuccggcaccuacggcaccggcuccuggcccgacggcgccgaccucaaccucaugcccaucuga

SEQ ID NO: 121058 - RNA, 1410 nt, Artificial Sequence; identical to SEQ ID NO: 118182
  derived and/or modified CDS sequence (opt2) from neuraminidase__InfluenzaA__AHL99525

SEQ ID NO: 121059 - RNA, 1410 nt, Artificial Sequence
  derived and/or modified CDS sequence (opt2) from neuraminidase__InfluenzaA__AHL99537
augaaccccaaccagaagaucaucaccaucggcuccgucucccucaccaucuccaccaucugcuucuucaugcagaucgccauccucaucaccaccgucacccuccacuucaagcaguacgaguucaacuccccccccaacaaccaggucaugcucugcgagcccaccaucaucgagcgcaacaucaccgagaucgucuaccucaccaacaccaccaucgagaaggagaucugccccaagcccgccgaguaccgcaacugguccaagccccagugcggcaucaccggcuucgcccccuucuccaaggacaacuccauccgccucuccgccggcggcgacaucugggucacccgcgagcccuacgucuccugcgaccccgacaagugcuaccaguucgcccucggccagggcaccacccucaacaacguccacuccaacaacaccguccgcgaccgcaccuccuaccgcacccuccucaugaacgagcucggcguccccuuccaccucggcaccaagcaggucugcaucgccugguccuccuccuccugccacgacggcaaggccuggcuccacgucugcaucaccggcgacgacaagaacgccaccgccuccuucaucuacaacggccgccucgucgacuccgucgucuccugguccaaggagauccuccgcacccaggaguccgagugcgucugcaucaacggcaccugcaccgucgucaugaccgacggcuccgccuccggcaaggccgacaccaagauccucuucaucgaggagggcaagaucguccacaccuccacccucuccggcuccgcccagcacgucgaggagugcuccugcuacccccgcuaccccggcguccgcugcgucugccgcgacaacuggaagggcuccaaccgccccaucgucgacaucaacaucaaggaccacuccaucgucuccuccuacgucugcuccggccucgucggcgacaccccccgcaagaacgacuccuccuccuccucccacugccucgaccccaacaacgaggagggcggccacggcgucaagggcugggccuucgacgacggcaacgacgucuggaugggccgcaccaucaacgagaccucccgccucggcuacgagaccuucaaggucaucgagggcugguccaaccccaaguccaagcuccagaucaaccgccaggucaucgucgaccgcggcgaccgcuccggcuacuccggcaucuucuccgucgagggcaaguccugcaucaaccgcugcuucuacgucgagcucauccgcggccgcaaggaggagaccgagguccucuggaccuccaacuccaucgucgucuucugcggcaccuccggcaccuacggcaccggcuccuggcccgacggcgccgaccucaaccucaugcccaucuga

SEQ ID NO: 121060 - RNA, 1410 nt, Artificial Sequence; identical to SEQ ID NO: 119919
  derived and/or modified CDS sequence (opt2) from neuraminidase__InfluenzaA__AHL99549

SEQ ID NO: 121061 - RNA, 1410 nt, Artificial Sequence; identical to SEQ ID NO: 118182
  derived and/or modified CDS sequence (opt2) from neuraminidase__InfluenzaA__AHL99561

SEQ ID NO: 121062 - RNA, 1410 nt, Artificial Sequence
  derived and/or modified CDS sequence (opt2) from neuraminidase__InfluenzaA__AHL99573
augaaccccaaccagaagaucaucaccaucggcuccgucucccucaccaucuccaccaucugcuucuucaugcagaucgccauccucaucaccaccgucacccuccacuucaagcaguacgaguucaacuccccccccaacaaccaggucaugcucugcgagcccaccaucaucgagcgcaacaucaccgagaucgucuaccucaccaacaccaccggcgagaaggagaucugccccaagcccgccgaguaccgcaacugguccaagccccagugcggcaucaccggcuucgcccccuucuccaaggacaacuccauccgccucuccgccggcggcgacaucugggucacccgcgagcccuacgucuccugcgaccccgacaagugcuaccaguucgcccucggccagggcaccacccucaacaacguccacuccaacaacaccguccgcgaccgcacccccuaccgcacccuccucaugaacgagcucggcguccccuuccaccucggcaccaagcaggucugcaucgccugguccuccuccuccugccacgacggcaaggccuggcuccacgucugcaucaccggcgacgacaagaacgccaccgccuccuucaucuacaacggccgccucgucgacuccgucgucuccugguccaaggagauccuccgcacccaggaguccgagugcgucugcaucaacggcaccugcaccgucgucaugaccgacggcuccgccuccggcaaggccgacaccaagauccucuucaucgaggagggcaagaucguccacaccuccacccucuccggcuccgcccagcacgucgaggagugcuccugcuacccccgcuaccccggcguccgcugcgucugccgcgacaacuggaagggcuccaaccgccccaucaucgacaucaacaucaaggaccacuccaucgucuccuccuacgucugcuccggccucgucggcgacaccccccgcaagaacgacuccuccuccuccucccacugccucgaccccaacaacgaggagggcggccacggcgucaagggcugggccuucgacgacggcaacgacgucuggaugggccgcaccaucaacgagaccucccgccucggcuacgagaccuucaaggucaucgagggcugguccaaccccaaguccaagcuccagaucaaccgccaggucaucgucgacaagggcgaccgcuccggcuacuccggcaucuucuccgucgagggcaaguccugcaucaaccgcugcuucuacgucgagcucauccgcggccgcaaggaggagaccgagguccucuggaccuccaacuccaucgucgucuucugcggcaccuccggcaccuacggcaccggcuccuggcccgacggcgccgaccucaaccucaugcccaucuga

SEQ ID NO: 121063 - RNA, 1410 nt, Artificial Sequence
  derived and/or modified CDS sequence (opt2) from neuraminidase__InfluenzaA__AHL99585
augaaccccaaccagaagaucaucaccaucggcuccgucucccucaccaucuccaccaucugcuucuucaugcagaucgccauccucaucaccaccgucacccuccacuucaagcaguacgaguucaacuccccccccaacaaccaggucaugcucugcgagcccaccaucaucgagcgcaacaucaccgagaucgucuaccucaccaacaccaccaucgagaaggagaucugccccaagcccgccgaguaccgcaacugguccaagccccagugcggcaucaccggcuucgcccccuucuccaaggacaacuccauccgccucuccgccggcggcgacaucugggucacccgcgagcccuacgucuccugcgaccccgacaagugcuaccaguucgcccucggccagggcaccacccucaacaacguccacuccaacaacaccgcccgcgaccgcacccccuaccgcacccuccucaugaacgagcucggcguccccuuccaccucggcaccaagcaggucugcaucgccugguccuccuccuccugccacgacggcaaggccuggcuccacgucugcaucaccggcgacgacaagaacgccaccgccuccuucaucuacaacggccgccucgucgacuccgucgucuccugguccaaggagauccuccgcacccaggaguccgagugcgucugcaucaacggcaccugcaccgucgucaugaccgacggcuccgccuccggcaaggccgacaccaagauccucuucaucgaggagggcaagaucguccacaccuccacccucuccggcuccgcccagcacgucgaggagugcuccugcuacccccgcuaccccggcguccgcugcgucugccgcgacaacuggaagggcuccaaccgccccaucgucgacaucaacaucaaggaccacuccaucgucuccuccuacgucugcuccggccucgucggcgacaccccccgcaagaacgacuccuccuccuccucccacugccucaaccccaacaacgaggagggcggccacggcgucaagggcugggccuucgacgacggcaacgacgucuggaugggccgcaccaucaacgagaccucccgccucggcuacgagaccuucaaggucaucgagggcugguccaaccccaaguccaagcuccagaucaaccgccaggucaucgucgaccgcggcgaccgcuccggcuacuccggcaucuucuccgucgagggcaaguccugcaucaaccgcugcuucuacgucgagcucauccgcggccgcaaggaggagaccgagguccucuggaccuccaacuccaucgucgucuucugcggcaccuccggcaccuacggcaccggcuccuggcccgacggcgccgaccucaaccucaugcccaucuga

SEQ ID NO: 121064 - RNA, 1410 nt, Artificial Sequence
  derived and/or modified CDS sequence (opt2) from neuraminidase__InfluenzaA__AHL99597
augaaccccaaccagaagaucaucaccaucggcuccgucugcaugaccaucggcauggccaaccucauccuccagaucggcaacaucaucuccaucuggaucucccacuccauccaggucggcaaccagucccagaucgagaccugcaaccaguccgucaucaccuacgagaacaacaccugggucaaccagaccuacgucaacaucuccaacaccaacuucgccgucggccaguccgucgucuccgucaagcucgccggcaacuccucccucugccccgucuccggcugggccaucuacuccaaggacaacuccguccgcaucggcuccaagggcgacgucuucgucauccgcgagcccuucaucuccugcuccccccucgagugccgcaccuucuuccucacccagggcgcccuccucaacgacaagcacuccaacggcaccaucaaggaccgcucccccuaccgcacccucauguccugccccaucggcgagguccccucccccuacaacucccgcuucgaguccgucgccugguccgccuccgccugccacgacggcaucaacuggcucaccaucggcaucuccggccccgacuccggcgccgucgccguccucaaguacaacggcaucaucaccgacaccaucaaguccuggcgcaacgacauccuccgcacccaggaguccgagugcgccugcgucaacggcuccugcuucaccaucaugaccgacggccccuccgacggccaggccuccuacaagaucuuccgcaucgagaagggcaagaucgucaaguccgucgagaugaacgcccccaacuaccacuacgaggagugcuccugcuaccccgacuccuccgagaucaccugcgucugccgcgacaacuggcacggcuccaaccgccccugggucuccuucaaccagaaccucgaguaccagaucggcuacaucugcuccggcaucuucggcgacaacccccgccccaacgacaagaccggcuccugcggccccgucuccuccaacggcgccaacggcgucaagggcuucuccuucaaguacggcaacggcgucuggaucggccgcaccaaguccaucuccucccgcaagggcuucgagaugaucugggaccccaacggcuggaccggcaccgacaacaacuucuccaucaagcaggacaucgucggcaucaacgagugguccggcuacuccggcuccuucguccagcaccccgagcucaccggccucgacugcauccgccccugcuucugggucgagcucauccgcggccgccccaaggagaacaccaucuggaccuccggcuccuccaucuccuucugcggcgucaacuccgacaccgucggcugguccuggcccgacggcgccgagcuccccuucaccaucgacaaguga

SEQ ID NO: 121065 - RNA, 1410 nt, Artificial Sequence
  derived and/or modified CDS sequence (opt2) from neuraminidase__InfluenzaA__AHL99608
augaaccccaaccagaagaucaucaccaucggcuccgucucccucaccaucuccaccaucugcgucuucaugcagaucgccauccucaucaccaccgucacccuccacuucaagcaguacgaguucaacuccccccccaacaaccaggucaugcucugcgagcccaccaucaucgagcgcaacaucaccgagaucgucuaccucaccaacaccaccaucgagaaggagaucugccccaagcccgccgaguaccgcaacugguccaagccccagugcggcaucaccggcuucgcccccuucuccaaggacaacuccauccgccucuccgccggcggcgacaucugggucacccgcgagcccuacgucuccugcgaccccgacaagugcuaccaguucgcccucggccagggcaccacccucaacaacguccacuccaacaacaccguccgcgaccgcacccccuaccgcacccuccucaugaacgagcucggcguccccuuccaccucggcaccaagcaggucugcaucgccugguccuccuccuccugccacgacggcaaggccuggcuccacgucugcaucaccggcgacgacaagaacgccaccgccuccuucaucuacaacggccgccucgucgacuccgucgucuccugguccaaggagauccuccgcacccaggaguccgagugcgucugcaucaacggcaccugcaccgucgucaugaccgacggcuccgccuccggcaaggccgacaccaagauccucuucaucgaggagggcaagaucguccacaccuccacccucuccggcuccgcccagcacgucgaggagugcuccugcuacccccgcuaccccggcguccgcugcgucugccgcgacaacuggaagggcuccaaccgccccaucgucgacaucaacaucaaggaccacuccaucgucuccuccuacgucugcuccggccucgucggcgacaccccccgcaagaacgacuccuccuccuccucccacugccucgaccccaacaacgaggagggcggccacggcgucaagggcugggccuucgacgacggcaacgacgucuggaugggccgcaccaucaacgagaccucccgccucggcuacgagaccuucaaggucaucgagggcugguccaaccccaaguccaagcuccagaucaaccgccaggucaucgucgaccgcggcgaccgcuccggcuacuccggcaucuucuccgucgagggcaaguccugcaucaaccgcugcuucuacgucgagcucauccgcggccgcaaggaggagaccgagguccucuggaccuccaacuccaucgucgucuucugcggcaccuccggcaccuacggcaccggcuccuggcccgacggcgccgaccucaaccucaugcccaucuga

SEQ ID NO: 121066 - RNA, 1410 nt, Artificial Sequence
  derived and/or modified CDS sequence (opt2) from neuraminidase__InfluenzaA__AHL99620
augaaccccaaccagaagaucaucaccaucggcuccgucucccucaccaucuccaccaucugcuucuucaugcagaucgccauccucaucaccaccgucacccuccacuucaagcaguacgaguucaacuccccccccaacaaccaggucaugcucugcgagcccaccaucaucgagcgcaacaucaccgagaucgucuaccucaccaacaccaccaucgagaaggagaucugccccaagcccgccgaguaccgcaacugguccaagccccagugcggcaucaccggcuucgcccccuucuccaaggacaacuccauccgccucuccgccggcggcgacaucugggucacccgcgagcccuacgucuccugcgaccccgacaagugcuaccaguucgcccucggccagggcaccacccucaacaacguccacuccaacaacaccguccgcgaccgcacccccuaccgcacccuccucaugaacgagcucggcguccccuuccaccucggcaccaagcaggucugcaucgccugguccuccuccuccugccacgacggcaaggccuggcuccacgucugcaucaccggcgacgacaagaacgccaccgccuccuucaucuacaacggcaagcucgucgacuccgucgucuccugguccaaggagauccuccgcacccaggaguccgagugcgucugcaucaacggcaccugcaccgucgucaugaccgacggcuccgccuccggcaaggccgacaccaagauccucuucaucgaggagggcaagaucguccacaccuccacccucuccggcuccgcccagcacgucgaggagugcuccugcuacccccgcuaccccggcguccgcugcgucugccgcgacaacuggaagggcuccaaccgccccaucgucgacaucaacaucaaggaccacuccaucgucuccuccuacgucugcuccggccucgucggcgacaccccccgcaagaacgacuccuccuccuccucccacugccucgaccccaacaacgaggagggcggccacggcgucaagggcugggccuucgacgacggcaacgacgucuggaugggccgcaccaucaacgagaccucccgccucggcuacgagaccuucaaggucaucgagggcugguccaaccccaaguccaagcuccagaucaaccgccaggucaucgucgaccgcggcgaccgcuccggcuacuccggcaucuucuccgucgagggcaaguccugcaucaaccgcugcuucuacgucgagcucauccgcggccgcaaggaggagaccgagguccucuggaccuccaacuccaucgucgucuucugcggcaccuccggcaccuacggcaccggcuccuggcccgacggcgccgaccucaaccucaugcccaucuga

SEQ ID NO: 121067 - RNA, 1410 nt, Artificial Sequence
  derived and/or modified CDS sequence (opt2) from neuraminidase__InfluenzaA__AHL99632
augaaccccaaccagaagaucaucaccaucggcuccgucucccucaccaucuccaccaucugcuucuucaugcagaucgccauccucaucaccaccgucacccuccacuucaagcaguacgaguucaacuccccccccaacaaccaggucaugcucugcgagcccaccaccaucgagcgcaacaucaccgagaucgucuaccucaccaacaccaccaucgagaaggagaucugccccaagcccgccgaguaccgcaacugguccaagccccagugcggcaucaccggcuucgcccccuucuccaaggacaacuccauccgccucuccgccggcggcgacaucugggucacccgcgagcccuacgucuccugcgaccccgacaagugcuaccaguucgcccucggccagggcaccacccucaacaacguccacuccaacaacaccguccgcgaccgcacccccuaccgcacccuccucaugaacgagcucggcguccccuuccaccucggcaccaagcaggucugcaucgccugguccuccuccuccugccacgacggcaaggccuggcuccacgucugcaucaccggcgacgacaagaacgccaccgccuccuucaucuacaacggccgccucgucgacuccgucgucuccugguccaaggagauccuccgcacccaggaguccgagugcgucugcaucaacggcaccugcaccgucgucaugaccgacggcuccgccuccggcaaggccgacaccaagauccucuucaucgaggagggcaagaucguccacaccuccacccucuccggcuccgcccagcacgucgaggagugcuccugcuacccccgcuaccccggcguccgcugcgucugccgcgacaacuggaagggcuccaaccgccccaucgucgacaucaacaucaaggaccacuccaucgucuccuccuacgucugcuccggccucgucggcgacaccccccgcaagaacgacuccuccuccuccucccacugccucgaccccaacaacgaggagggcggccacggcgucaagggcugggccuucgacgacggcaacgacgucuggaugggccgcaccaucaacgagaccucccgccucggcuacgagaccuucaaggucaucgagggcugguccaaccccaaguccaagcuccagaucaaccgccaggucaucgucgaccgcggcgaccgcuccggcuacuccggcaucuucuccgucgagggcaaguccugcaucaaccgcugcuucuacgucgagcucauccgcggccgcaaggaggagaccgagguccucuggaccuccaacuccaucgucgucuucugcggcaccuccggcaccuacggcaccggcuccuggcccgacggcgccgaccucaaccucaugcccaucuga

SEQ ID NO: 121068 - RNA, 1410 nt, Artificial Sequence; identical to SEQ ID NO: 120857
  derived and/or modified CDS sequence (opt2) from neuraminidase__InfluenzaA__AHL99644

SEQ ID NO: 121069 - RNA, 1410 nt, Artificial Sequence
  derived and/or modified CDS sequence (opt2) from neuraminidase__InfluenzaA__AHL99668
augaaccccaaccagaagaucaucaccaucggcuccgucucccucaccaucuccaccaucugcuucuucaugcagaucgccauccucaucaccaccgucacccuccacuucaagcaguacgaguucaacuccccccccaacaaccaggucaugcucugcgagcccaccaucaucgagcgcaacaucaccgagaucgucuaccucaccaacaccaccgucgagaaggagaucugccccaagcccgccgaguaccgcaacugguccaagccccagugcggcaucaccggcuucgcccccuucuccaaggacaacuccauccgccucuccgccggcggcgacaucugggucacccgcgagcccuacgucuccugcgaccccgacaagugcuaccaguucgcccucggccagggcaccacccucaacaacguccacuccaacaacaccguccgcgaccgcacccccuaccgcacccuccucaugaacgagcucggcguccccuuccaccucggcaccaagcaggucugcaucgccugguccuccuccuccugccacgacggcaaggccuggcuccacgucugcaucaccggcgacgacaagaacgccaccgccuccuucaucuacaacggccgccucgucgacuccgucgucuccugguccaaggagauccuccgcacccaggaguccgagugcgucugcaucaacggcaccugcaccgucgucaugaccgacggcuccgccuccggcaaggccgacaccaagauccucuucaucgaggagggcaagaucguccacaccuccacccucuccggcuccgcccagcacgucgaggagugcuccugcuacccccgcuaccccggcguccgcugcgucugccgcgacaacuggaagggcuccaaccgccccaucaucgacaucaacaucaaggaccacuccaucgucuccuccuacgucugcuccggccucgucggcgacaccccccgcaagaacgacuccuccuccuccucccacugccucgaccccaacaacgaggagggcggccacggcgucaagggcugggccuucgacgacggcaacgacgucuggaugggccgcaccaucaacgagaccucccgccucggcuacgagaccuucaaggucaucgagggcugguccaaccccaaguccaagcuccagaucaaccgccaggucaucgucgaccgcggcgaccgcuccggcuacuccggcaucuucuccgucgagggcaaguccugcaucaaccgcugcuucuacgucgagcucauccgcggccgcaaggaggagaccgagguccucuggaccuccaacuccaucgucgucuucugcggcaccuccggcaccuacggcaccggcuccuggcccgacggcgccgaccucaaccucaugcccaucuga

SEQ ID NO: 121070 - RNA, 1410 nt, Artificial Sequence; identical to SEQ ID NO: 118182
  derived and/or modified CDS sequence (opt2) from neuraminidase__InfluenzaA__AHL99680

SEQ ID NO: 121071 - RNA, 1410 nt, Artificial Sequence
  derived and/or modified CDS sequence (opt2) from neuraminidase__InfluenzaA__AHL99692
augaaccccaaccagaagaucaucaccaucggcuccgucucccucaccaucuccaccaccugcuucuucaugcagaucgccauccucaucaccaccgucacccuccacuucaagcaguacgaguucaacuccccccccaacaaccaggucaugcucugcgagcccaccaucaucgagcgcaacaucaccgagaucgucuaccucaccaacaccaccaucgagaaggagaucugccccaagcccgccgaguaccgcaacugguccaagccccagugcggcaucaccggcuucgcccccuucuccaaggacaacuccauccgccucuccgccggcggcgacaucugggucacccgcgagcccuacgucuccugcgaccccgacaagugcuaccaguucgcccucggccagggcaccacccucaacaacguccacuccaacaacaccguccgcgaccgcacccccuaccgcacccuccucaugaacgagcucggcguccccuuccaccucggcaccaagcaggucugcaucgccugguccuccuccuccugccacgacggcaaggccuggcuccacgucugcaucaccggcgacgacaagaacgccaccgccuccuucaucuacaacggccgccucgucgacuccgucgucuccugguccaaggagauccuccgcacccaggaguccgagugcgucugcaucaacggcaccugcaccgucgucaugaccgacggcuccgccuccggcaaggccgacaccaagauccucuucaucgaggagggcaagaucguccacaccuccacccucuccggcuccgcccagcacgucgaggagugcuccugcuacccccgcuaccccggcguccgcugcgucugccgcgacaacuggaagggcuccaaccgccccaucgucgacaucaacaucaaggaccacuccaucgucuccuccuacgucugcuccggccucgucggcgacaccccccgcaagaacgacuccuccuccuccucccacugccucgaccccaacaacgaggagggcggccacggcgucaagggcugggccuucgacgacggcaacgacgucuggaugggccgcaccaucaacgagaccucccgccucggcuacgagaccuucaaggucaucgagggcugguccaaccccaaguccaagcuccagaucaaccgccaggucaucgucgaccgcggcgaccgcuccggcuacuccggcaucuucuccgucgagggcaaguccugcaucaaccgcugcuucuacgucgagcucauccgcggccgcaaggaggagaccgagguccucuggaccuccaacuccaucgucgucuucugcggcaccuccggcaccuacggcaccggcuccuggcccgacggcgccgaccucaaccucaugcccaucuga

SEQ ID NO: 121072 - RNA, 1410 nt, Artificial Sequence; identical to SEQ ID NO: 118182
  derived and/or modified CDS sequence (opt2) from neuraminidase__InfluenzaA__AHL99704

SEQ ID NO: 121073 - RNA, 1410 nt, Artificial Sequence; identical to SEQ ID NO: 118182
  derived and/or modified CDS sequence (opt2) from neuraminidase__InfluenzaA__AHL99716

SEQ ID NO: 121074 - RNA, 1410 nt, Artificial Sequence; identical to SEQ ID NO: 121064
  derived and/or modified CDS sequence (opt2) from neuraminidase__InfluenzaA__AHL99740

SEQ ID NO: 121075 - RNA, 1410 nt, Artificial Sequence
  derived and/or modified CDS sequence (opt2) from neuraminidase__InfluenzaA__AHL99751
augaaccccaaccagaagaucaucaccaucggcuccgucucccucaccaucuccaccaucugcuucuucaugcagaucgccauccucaucaccaccgucacccuccacuucaagcaguacgaguucaacuccccccccaacaaccaggucaugcucugcgagcccaccaucaucgagcgcaacaucaccgagaucgucuaccucaccaacaccaccgucgagaaggagaucugccccaagcccgccgaguaccgcaacugguccaagccccagugcggcaucaccggcuucgcccccuucuccaaggacaacuccauccgccucuccgccggcggcgacaucugggucacccgcgagcccuacgucuccugcgaccccgacaagugcuaccaguucgcccucggccagggcaccacccucaacaacguccacuccaacaacaccgcccgcgaccgcacccccuaccgcacccuccucaugaacgagcucggcguccccuuccaccucggcaccaagcaggucugcaucgccugguccuccuccuccugccacgacggcaaggccuggcuccacgucugcaucaccggcgacgacaagaacgccaccgccuccuucaucuacaacggccgccucgucgacuccgucgucuccugguccaaggagauccuccgcacccaggaguccgagugcgucugcaucaacggcaccugcaccgucgucaugaccgacggcuccgccuccggcaaggccgacaccaagauccucuucaucgaggagggcaagaucguccacaccuccacccucuccggcuccgcccagcacgucgaggagugcuccugcuacccccgcuaccccggcguccgcugcgucugccgcgacaacuggaagggcuccaaccgccccaucgucgacaucaacaucaaggaccacuccaucgucuccuccuacgucugcuccggccucgucggcgacaccccccgcaagaacgacuccuccuccuccucccacugccucaaccccaacaacgaggagggcggccacggcgucaagggcugggccuucgacgacggcaacgacgucuggaugggccgcaccaucaacgagaccucccgccucggcuacgagaccuucaaggucaucgagggcugguccaaccccaaguccaagcuccagaucaaccgccaggucaucgucgaccgcggcgaccgcuccggcuacuccggcaucuucuccgucgagggcaaguccugcaucaaccgcugcuucuacgucgagcucauccgcggccgcaaggaggagaccgagguccucuggaccuccaacuccaucgucgucuucugcggcaccuccggcaccuacggcaccggcuccuggcccgacggcgccgaccucaaccucaugcccaucuga

SEQ ID NO: 121076 - RNA, 1410 nt, Artificial Sequence
  derived and/or modified CDS sequence (opt2) from neuraminidase__InfluenzaA__AHL99763
augaaccccaaccagaagaucaucaccaucggcuccgucucccucaccaucuccaccaucugcuucuucaugcagaucgccauccucaucaccaccgucacccuccacuucaagcaguacgaguucaacuccccccccaacaaccaggucaugcucugcgagcccaccaucaucgagcgcaacaucaccgagaucgucuaccucaccaacaccaccaucgagaaggagaucugccccaagcccgccgaguaccgcaacugguccaagccccagugcggcaucaccggcuucgcccccuucuccaaggacaacuccauccgccucuccgccggcggcgacaucugggucacccgcgagcccuacgucuccugcgaccccgacaagugcuaccaguucgcccucggccagggcaccacccucaacaacguccacuccaacaacaccguccgcgaccgcacccccuaccgcacccuccucaugaacgagcucggcguccccuuccaccucggcaccaagcaggucugcaucgccugguccuccuccuccugccacgacggcaaggccuggcuccacgucugcaucaccggcgacgacaagaacgccaccgccuccuucaucuacaacggccgccucgucgacuccgucgucuccugguccaaggagauccuccgcacccaggaguccgagugcgucugcaucaacggcaccugcaccgucgucaugaccgacggcuccgccuccggcaaggccgacaccaagauccucuucaucgaggagggcaagaucguccacaccuccacccucuccggcuccgcccagcacgucgaggagugcuccugcuacccccgcuaccccggcguccgcugcgucugccgcgacaacuggaagggcuccaaccgccccaucgucgacaucaacaucaaggaccacuccaucgucuccuccuacgucugcuccggccucgucggcgacaccccccgcaagaacgacuccuccuccuccucccacugccucgaccccaacaacgaggagggcggccacggcgucaagggcugggccuucgacgacggcaacgacgucuggaugggccgcaccaucaacgagaccucccgccucggcuacgagaccuucaaggucaucgagggcugguccaaccccaaguccaagcuccagaugaaccgccaggucaucgucgaccgcggcgaccgcuccggcuacuccggcaucuucuccgucgagggcaaguccugcaucaaccgcugcuucuacgucgagcucauccgcggccgcaaggaggagaccgagguccucuggaccuccaacuccaucgucgucuucugcggcaccuccggcaccuacggcaccggcuccuggcccgacggcgccgaccucaaccucaugcccaucuga

SEQ ID NO: 121077 - RNA, 1410 nt, Artificial Sequence; identical to SEQ ID NO: 118182
  derived and/or modified CDS sequence (opt2) from neuraminidase__InfluenzaA__AHL99775

SEQ ID NO: 121078 - RNA, 1410 nt, Artificial Sequence
  derived and/or modified CDS sequence (opt2) from neuraminidase__InfluenzaA__AHL99787
augaaccccaaccagaagaucaucaccaucggcuccgucucccucaccaucuccaccaucugcuucuucaugcagaucgccauccucaucaccaccgucacccuccacuucaagcaguacgaguucaacuccccccccaacaaccaggucaugcucugcgagcccaccaucaucgagcgcaacaucaccgagaucgucuaccucaccaacaccaccaucgagaaggagaucugccccaagcccgccgaguaccgcaacugguccaagccccagugcggcaucaccggcuucgcccccuucuccaaggacaacuccauccgccucuccgccggcggcgacaucugggucacccgcgagcccuacgucuccugcgaccccgacaagugcuaccaguucgcccucggccagggcaccacccucaacaacguccacuccaacaacaccguccgcgaccgcacccccuaccgcacccuccucaugaacgagcucggcguccccuuccaccucggcaccaagcaggucugcaucgccugguccuccuccuccugccacgacggcaaggccuggcuccacgucugcaucaccggcgacgacaagaacgccaccgccuccuucaucuacaacggccgccucgucgacuccgucgucuccugguccaaggagauccuccgcacccaggaguccgagugcgucugcaucaacggcaccugcaccgucgucaugaccgacggcuccgccuccggcaaggccgacaccaagauccucuucaucgaggagggcaagaucguccacaccuccacccucuccggcuccgcccagcacgucgaggagugcuccugcuacccccgcuaccccggcguccgcugcgucugccgcgacaacuggaagggcuccaaccgccccaucgucgacaucaacaucaaggaccacuccaucgucuccuccuacgucugcuccggccucgucggcgacaccccccgcaagaacgacuccuccuccuccucccacugccucgaccccaacaacgaggagggcggccacggcgucaagggcugggccuucgacgacggcaacgacgucuggaugggccgcaccaucaacgagaccucccgccucggcuacgagaccuucaaggucaucgagggcugguccaaccccgaguccaagcuccagaucaaccgccaggucaucgucgaccgcggcgaccgcuccggcuacuccggcaucuucuccgucgagggcaaguccugcaucaaccgcugcuucuacgucgagcucauccgcggccgcaaggaggagaccgagguccucuggaccuccaacuccaucgucgucuucugcggcaccuccggcaccuacggcaccggcuccuggcccgacggcgccgaccucaaccucaugcccaucuga

SEQ ID NO: 121079 - RNA, 1410 nt, Artificial Sequence
  derived and/or modified CDS sequence (opt2) from neuraminidase__InfluenzaA__AHL99799
augaaccccaaccagaagaucaucaccaucggcuccgucucccucaccaucuccaccaucugcuucuucaugcagaucgccauccucaucaccaccgucacccuccacuucaagcaguacgaguucaacuccccccccaacaaccaggucaugcucugcgagcccaccaucaucgagcgcaacaucaccgagaucgucuaccucaccaacaccaccaucgagaaggagaucugccccaagcccgccgaguaccgcaacugguccaagccccagugcggcaucaccggcuucgcccccuucuccaaggacaacuccauccgccucuccgccggcggcgacaucugggucacccgcgagcccuacgucuccugcgaccccgacaagugcuaccaguucgcccucggccagggcaccacccucaacaacguccacuccaacaacaccguccgcgaccgcacccccuaccgcacccuccucaugaacgagcucggcguccccuuccaccucggcaccaagcaggucugcaucgccugguccuccuccuccugccacgacggcaaggccuggcuccacgucugcaucaccggcgacgacaagaacgccaccgccuccuucaucuacaacggccgccucgucgacuccgucgucuccugguccaaggagauccuccgcacccaggaguccgagugcgucugcaucaacggcaccugcaccgucgucaugaccgacggcuccgccuccggcaaggccgacaccaagauccucuucaucgaggagggcaagaucguccacaccuccacccucuccggcuccgcccagcacgucgaggagugcuccugcuacccccgcuaccccggcguccgcugcaucugccgcgacaacuggaagggcuccaaccgccccaucgucgacaucaacaucaaggaccacuccaucgucuccuccuacgucugcuccggccucgucggcgacaccccccgcaagaacgacuccuccuccuccucccacugccucggccccaacaacgaggagggcggccacggcgucaagggcugggccuucgacgacggcaacgacgucuggaugggccgcaccaucaacgagaccucccgccucggcuacgagaccuucaaggucaucgagggcugguccaaccccaaguccaagcuccagaucaaccgccaggucaucgucgaccgcggcgaccgcuccggcuacuccggcaucuucuccgucgagggcaaguccugcaucaaccgcugcuucuacgucgagcucauccgcggccgcaaggaggagaccgagguccucuggaccuccaacuccaucgucgucuucugcggcaccuccggcaccuacggcaccggcuccuggcccgacggcgccgaccucaaccucaugcccaucuga

SEQ ID NO: 121080 - RNA, 1410 nt, Artificial Sequence; identical to SEQ ID NO: 118182
  derived and/or modified CDS sequence (opt2) from neuraminidase__InfluenzaA__AHL99811

SEQ ID NO: 121081 - RNA, 1410 nt, Artificial Sequence
  derived and/or modified CDS sequence (opt2) from neuraminidase__InfluenzaA__AHL99823
augaaccccaaccagaagaucaucaccaucggcuccgucucccucaccaucuccaccaucugcuucuucaugcagaucgccauccucaucaccaccgucacccuccacuucaagcaguacgaguucaacuccccccccaacaaccaggucaugcucugcgagcccaccaucaucgagcgcaacaucaccgagaucgucuaccucaccaacaccaccaucgagaaggagaucugccccaagcccgccgaguaccgcaacugguccaagccccagugcggcaucaccggcuucgcccccuucuccaaggacaacuccauccgccucuccgccggcggcgacaucugggucacccgcgagcccuacgucuccugcgaccccgacaagugcuaccaguucgcccucggccagggcaccacccucaacaacguccacuccaacaacaccguccgcgaccgcacccccuaccgcacccuccucaugaacgagcucggcguccccuuccaccucggcaccaagcaggucugcaucgccugguccuccuccuccugccacgacggcaaggccuggcuccacgucugcaucaccggcgacgacaagaacgccaccgccuccuucaucuacaacggccgccucgucgacuccgucgucuccugguccaaggagauccuccgcacccaggaguccgagugcgucugcaucaacggcaccugcgccgucgucaugaccgacggcuccgccuccggcaaggccgacaccaagauccucuucaucgaggagggcaagaucguccacaccuccacccucuccggcuccgcccagcacgucgaggagugcuccugcuacccccgcuaccccggcguccgcugcgucugccgcgacaacuggaagggcuccaaccgccccaucgucgacaucaacaucaaggaccacuccaucgucuccuccuacgucugcuccggccucgucggcgacaccccccgcaagaacgacuccuccuccuccucccacugccucgaccccaacaacgaggagggcggccacggcgucaagggcugggccuucgacgacggcaacgacgucuggaugggccgcaccaucaacgagaccucccgccucggcuacgagaccuucaaggucaucgagggcugguccaaccccaaguccaagcuccagaucaaccgccaggucaucgucgaccgcggcgaccgcuccggcuacuccggcaucuucuccgucgagggcaaguccugcaucaaccgcugcuucuacgucgagcucauccgcggccgcaaggaggagaccgagguccucuggaccuccaacuccaucgucgucuucugcggcaccuccggcaccuacggcaccggcuccuggcccgacggcgccgaccucaaccucaugcccaucuga

SEQ ID NO: 121082 - RNA, 1410 nt, Artificial Sequence
  derived and/or modified CDS sequence (opt2) from neuraminidase__InfluenzaA__AHL99835
augaaccccaaccagaagaucaucaccaucggcuccgucucccucaccaucuccaccaucugcuucuucaugcagaucgccauccucaucaccaccgucacccuccacuucaagcaguacgaguucaacuccccccccaacaaccaggucaugcucugcgagcccaccaucaucgagcgcaacaucaccgagaucgucuaccucaccaacaccaccaucgagaaggagaucugccccaagcccgccgaguaccgcaacugguccaagccccagugcggcaucaccggcuucgcccccuucuccaaggacaacuccauccgccucuccgccggcggcgacaucugggucacccgcgagcccuacgucuccugcgcccccgacaagugcuaccaguucgcccucggccagggcaccacccucaacaacguccacuccaacaacaccguccgcgaccgcacccccuaccgcacccuccucaugaacgagcucggcguccccuuccaccucggcaccaagcaggucugcaucgccugguccuccuccuccugccacgacggcaaggccuggcuccacgucugcaucaccggcgacgacaagaacgccaccgccuccuucaucuacaacggccgccucgucgacuccgucgucuccugguccaaggagauccuccgcacccaggaguccgagugcgucugcaucaacggcaccugcaccgucgucaugaccgacggcuccgccuccggcaaggccgacaccaagauccucuucaucgaggagggcaagaucguccacaccuccacccucuccggcuccgcccagcacgucgaggagugcuccugcuacccccgcuaccccggcguccgcugcgucugccgcgacaacuggaagggcuccaaccgccccaucgucgacaucaacaucaaggaccacuccaucgucuccuccuacgucugcuccggccucgucggcgacaccccccgcaagaacgacuccuccuccuccucccacugccucgaccccaacaacgaggagggcggccacggcgucaagggcugggccuucgacgacggcaacgacgucuggaugggccgcaccaucaacgagaccucccgccucggcuacgagaccuucaaggucaucgagggcugguccaaccccaaguccaagcuccucaucaaccgccaggucaucgucgaccgcggcgaccgcuccggcuacuccggcaucuucuccgucgagggcaaguccugcaucaaccgcugcuucuacgucgagcucauccgcggccgcaaggaggagaccgagguccucuggaccuccaacuccaucgucgucuucugcggcaccuccggcaccuacggcaccggcuccuggcccgacggcgccgaccucaaccucaugcccaucuga

SEQ ID NO: 121083 - RNA, 1410 nt, Artificial Sequence; identical to SEQ ID NO: 118182
  derived and/or modified CDS sequence (opt2) from neuraminidase__InfluenzaA__AHL99847

SEQ ID NO: 121084 - RNA, 1410 nt, Artificial Sequence; identical to SEQ ID NO: 119411
  derived and/or modified CDS sequence (opt2) from neuraminidase__InfluenzaA__AHL99859

SEQ ID NO: 121085 - RNA, 1410 nt, Artificial Sequence
  derived and/or modified CDS sequence (opt2) from neuraminidase__InfluenzaA__AHL99871
augaaccccaaccagaagaucaucaccaucggcuccgucucccucaccaucuccaccaucugcuucuucaugcagaucgccauccucaccaccaccgucacccuccacuucaagcaguacgaguucaacuccccccccaacaaccaggucaugcucugcgagcccaccaucaucgagcgcaacaucaccgagaucgucuaccucaccaacaccaccaucgagaaggagaucugccccaagcccgccgaguaccgcaacugguccaagccccagugcgacaucaccggcuucgcccccuucuccaaggacaacuccauccgccucuccgccggcggcgacaucugggucacccgcgagcccuacgucuccugcgaccccgacaagugcuaccaguucgcccucggccagggcaccacccucaacaacguccacuccaacaacaccguccgcgaccgcacccccuaccgcacccuccucaugaacgagcucggcguccccuuccaccucggcaccaagcaggucugcaucgccugguccuccuccuccugccacgacggcaaggccuggcuccacgucugcaucaccggcgacgacaagaacgccaccgccuccuucaucuacaacggccgccucgucgacuccgucgucuccugguccaaggagauccuccgcacccaggaguccgagugcgucugcaucaacggcaccugcaccgucgucaugaccgacggcuccgccuccggcaaggccgacaccaagauccucuucaucgaggagggccgcaucguccacaccuccacccucuccggcuccgcccagcacgucgaggagugcuccugcuacccccgcuaccccggcguccgcugcgucugccgcgacaacuggaagggcuccaaccgccccaucgucgacaucaacaucaaggaccacuccaucgucucccgcuacgucugcuccggccucgucggcgacaccccccgcaagaacgacuccuccuccuccucccacugccucgaccccaacaacgaggagggcggccacggcgucaagggcugggccuucgacgacggcaacgacgucuggaugggccgcaccaucaacgagaccucccgccucggcuacgagaccuucaaggucaucgagggcugguccaaccccaaguccaagcuccagaucaaccgccaggucaucgucgaccgcggcgaccgcuccggcuacuccggcaucuucuccgucgagggcaaguccugcaucaaccgcugcuucuacgucgagcucauccgcggccgcaaggaggagaccgagguccucuggaccuccaacuccaucgucgucuucugcggcaccuccggcaccuacggcaccggcuccuggcccgacggcgccgaccucaaccucaugcccaucuga

SEQ ID NO: 121086 - RNA, 1410 nt, Artificial Sequence; identical to SEQ ID NO: 118182
  derived and/or modified CDS sequence (opt2) from neuraminidase__InfluenzaA__AHL99883

SEQ ID NO: 121087 - RNA, 1410 nt, Artificial Sequence; identical to SEQ ID NO: 121063
  derived and/or modified CDS sequence (opt2) from neuraminidase__InfluenzaA__AHL99895

SEQ ID NO: 121088 - RNA, 1410 nt, Artificial Sequence; identical to SEQ ID NO: 118182
  derived and/or modified CDS sequence (opt2) from neuraminidase__InfluenzaA__AHL99907

SEQ ID NO: 121089 - RNA, 1410 nt, Artificial Sequence; identical to SEQ ID NO: 118182
  derived and/or modified CDS sequence (opt2) from neuraminidase__InfluenzaA__AHL99919

SEQ ID NO: 121090 - RNA, 1410 nt, Artificial Sequence
  derived and/or modified CDS sequence (opt2) from neuraminidase__InfluenzaA__AHL99943
augaaccccaaccagaagaucaucaccaucggcuccgucucccucaccaucuccaccaucugcuucuucaugcagaucgccauccucaucaccaccgucacccuccacuucaagcagcacgaguucaacuccccccccaacaaccaggucaugcucugcgagcccaccaucaucgagcgcaacaucaccgagaucgucuaccucaccaacaccaccaucgagaaggagaucugccccaagcccgccgaguaccgcaacugguccaagccccagugcggcaucaccggcuucgcccccuucuccaaggacaacuccauccgccucuccgccggcggcgacaucugggucacccgcgagcccuacgucuccugcgaccccgacaagugcuaccaguucgcccucggccagggcaccacccucaacaacguccacuccaacaacaccguccgcgaccgcacccccuaccgcacccuccucaugaacgagcucggcguccccuuccaccucggcaccaagcaggucugcaucgccugguccuccuccuccugccacgacggcaaggccuggcuccacgucugcaucaccggcgacgacaagaacgccaccgccuccuucaucuacaacggccgccucgucgacuccgucgucuccugguccaaggagauccuccgcacccaggaguccgagugcgucugcaucaacggcaccugcaccgucgucaugaccgacggcuccgccuccggcaaggccgacaccaagauccucuucaucgaggagggcaagaucguccacaccuccacccucuccggcuccgcccagcacgucgaggagugcuccugcuacccccgcuaccccggcguccgcugcgucugccgcgacaacuggaagggcuccaaccgccccaucgucgacaucaacaucaaggaccacuccaucgucuccuccuacgucugcuccggccucgucggcgacaccccccgcaagaacgacuccuccuccuccucccacugccucgaccccaacaacgaggagggcggccacggcgucaagggcugggccuucgacgacggcaacgacgucuggaugggccgcaccaucaacgagaccucccgccucggcuacgagaccuucaaggucaucgagggcugguccaaccccaaguccaagcuccagaucaaccgccaggucaucgucgaccgcggcgaccgcuccggcuacuccggcaucuucuccgucgagggcaaguccugcaucaaccgcugcuucuacgucgagcucauccgcggccgcaaggaggagaccgagguccucuggaccuccaacuccaucgucgucuucugcggcaccuccggcaccuacggcaccggcuccuggcccgacggcgccgaccucaaccucaugcccaucuga

SEQ ID NO: 121091 - RNA, 1410 nt, Artificial Sequence; identical to SEQ ID NO: 118182
  derived and/or modified CDS sequence (opt2) from neuraminidase__InfluenzaA__AHL99955

SEQ ID NO: 121092 - RNA, 1410 nt, Artificial Sequence
  derived and/or modified CDS sequence (opt2) from neuraminidase__InfluenzaA__AHL99967
augaaccccaaccagaagaucaucaccaucggcuccgucucccucaccaucuccaccaucugcuucuucaugcagaucgccauccucaucaccaccgucacccuccacuucaagcaguacgaguucaacuccccccccaacaaccaggucaugcucugcgagcccaccaucaucgagcgcaacaucaccgagaucgucuaccucaccaacaccaccaucgagaaggagaucugccccaagcccgccgaguaccgcaacugguccaagccccagugcggcaucaccggcuucgcccccuucuccaaggacaacuccauccgccucuccgccggcggcgacaucugggucacccgcgagcccuacgucuccugcgaccccgacaagugcuaccaguucgcccucggccagggcaccacccucaacaacguccacuccaacaacaccguccacgaccgcacccccuaccgcacccuccucaugaacgagcucggcguccccuuccaccucggcaccaagcaggucugcaucgccugguccuccuccuccugccacgacggcaaggccuggcuccacgucugcaucaccggcgacgacaagaacgccaccgccuccuucaucuacaacggccgccucgucgacuccgucgucuccugguccaaggagauccuccgcacccaggaguccgagugcgucugcaucaacggcaccugcaccgucgucaugaccgacggcuccgccuccggcaaggccgacaccaagauccucuucaucgaggagggcaagaucguccacaccuccacccucuccggcuccgcccagcacgucgaggagugcuccugcuacccccgcuaccccggcguccgcugcgucugccgcgacaacuggaagggcuccaaccgccccaucgucgacaucaacaugaaggaccacuccaucgucuccuccuacgucugcuccggccucgucggcgacaccccccgcaagaacgacuccuccuccuccucccacugccucgaccccaacaacgaggagggcggccacggcgucaagggcugggccuucgacgacggcaacgacgucuggaugggccgcaccaucaacgagaccucccgccucggcuacgagaccuucaaggucaucgagggcugguccaaccccaaguccaagcuccagaucaaccgccaggucaucgucgaccgcggcgaccgcuccggcuacuccggcaucuucuccgucgagggcaaguccugcaucaaccgcugcuucuacgucgagcucauccgcggccgcaaggaggagaccgagguccucuggaccuccaacuccaucgucgucuucugcggcaccuccggcaccuacggcaccggcuccuggcccgacggcgccgaccucaaccucaugcccaucuga

SEQ ID NO: 121093 - RNA, 1410 nt, Artificial Sequence
  derived and/or modified CDS sequence (opt2) from neuraminidase__InfluenzaA__AHL99979
augaaccccaaccagaagaucaucaccaucggcuccgucucccucaccaucuccaccaucugcuucuucaugcagaucgccauccucaucaccaccgucgcccuccacuucaagcagcacgaguucaacuccccccccaacaaccaggucaugcucugcgagcccaccaucaucgagcgcaacaucaccgagaucgucuaccucaccaacaccaccaucgagaaggagaucugccccaagcccgccgaguaccgcaacugguccaagccccagugcggcaucaccggcuucgcccccuucuccaaggacaacuccauccgccucuccgccggcggcgacaucugggucacccgcgagcccuacgucuccugcgaccccgacaagugcuaccaguucgcccucggccagggcaccacccucaacaacguccacuccaacaacaccguccgcgaccgcacccccuaccgcacccuccucaugaacgagcucggcguccccuuccaccucggcaccaagcaggucugcaucgccugguccuccuccuccugccacgacggcaaggccuggcuccacgucugcaucaccggcgacgacaagaacgccaccgccuccuucaucuacaacggccgccucgucgacuccgucgucuccugguccaaggagauccuccgcacccaggaguccgagugcgucugcaucaacggcaccugcaccgucgucaugaccgacggcuccgccuccggcaaggccgacaccaagauccucuucaucgaggagggcaagaucguccacaccuccacccucuccggcuccgcccagcacgucgaggagugcuccugcuacccccgcuaccccggcguccgcugcgucugccgcgacaacuggaagggcuccaaccgccccaucgucgacaucaacaucaaggaccacuccaucgucuccuccuacgucugcuccggccucgucggcgacaccccccgcaagaacgacuccuccuccuccucccacugccucgaccccaacaacgaggagggcggccacggcgucaagggcugggccuucgacgacggcaacgacgucuggaugggccgcaccaucaacgagaccucccgccucggcuacgagaccuucaaggucaucgagggcugguccaaccccaaguccaagcuccagaucaaccgccaggucaucgucgaccgcggcgaccgcuccggcuacuccggcaucuucuccgucgagggcaaguccugcaucaaccgcugcuucuacgucgagcucauccgcggccgcaaggaggagaccgagguccucuggaccuccaacuccaucgucgucuucugcggcaccuccggcaccuacggcaccggcuccuggcccgacggcgccgaccucaaccucaugcccaucuga

SEQ ID NO: 121094 - RNA, 1410 nt, Artificial Sequence; identical to SEQ ID NO: 121090
  derived and/or modified CDS sequence (opt2) from neuraminidase__InfluenzaA__AHL99991

SEQ ID NO: 121095 - RNA, 1410 nt, Artificial Sequence; identical to SEQ ID NO: 118182
  derived and/or modified CDS sequence (opt2) from neuraminidase__InfluenzaA__AHM00004

SEQ ID NO: 121096 - RNA, 1410 nt, Artificial Sequence; identical to SEQ ID NO: 118182
  derived and/or modified CDS sequence (opt2) from neuraminidase__InfluenzaA__AHM00016

SEQ ID NO: 121097 - RNA, 1410 nt, Artificial Sequence; identical to SEQ ID NO: 118182
  derived and/or modified CDS sequence (opt2) from neuraminidase__InfluenzaA__AHM00028

SEQ ID NO: 121098 - RNA, 1410 nt, Artificial Sequence; identical to SEQ ID NO: 121090
  derived and/or modified CDS sequence (opt2) from neuraminidase__InfluenzaA__AHM00040

SEQ ID NO: 121099 - RNA, 1410 nt, Artificial Sequence; identical to SEQ ID NO: 118182
  derived and/or modified CDS sequence (opt2) from neuraminidase__InfluenzaA__AHM00052

SEQ ID NO: 121100 - RNA, 1410 nt, Artificial Sequence; identical to SEQ ID NO: 119046
  derived and/or modified CDS sequence (opt2) from neuraminidase__InfluenzaA__AHM00064

SEQ ID NO: 121101 - RNA, 1410 nt, Artificial Sequence; identical to SEQ ID NO: 118182
  derived and/or modified CDS sequence (opt2) from neuraminidase__InfluenzaA__AHM00076

SEQ ID NO: 121102 - RNA, 1410 nt, Artificial Sequence; identical to SEQ ID NO: 118182
  derived and/or modified CDS sequence (opt2) from neuraminidase__InfluenzaA__AHM00088

SEQ ID NO: 121103 - RNA, 1410 nt, Artificial Sequence
  derived and/or modified CDS sequence (opt2) from neuraminidase__InfluenzaA__AHM00100
augaaccccaaccagaagaucaucaccaucggcuccaucugcaugaccaucggcauggccaaccucauccuccagaucggcaacaucaucuccaucuggaucucccacuccauccagcucggcaaccagucccagaucgagaccugcaaccaguccgucaucaccuacgagaacaacaccugggucaaccagaccuacgucaacaucuccaacaccaacuucgccgccggccaguccgucgucuccgucaagcucgccggcaacuccucccucugccccgucuccggcugggccaucuacuccaaggacaacuccauccgcaucggcuccaagggcgacgucuucgucauccgcgagcccuucaucuccugcuccccccucgagugccgcaccuucuuccucacccagggcgcccuccucaacgacaagcacuccaacggcaccaucaaggaccgcucccccuaccgcacccucauguccugccccaucggcgagguccccucccccuacaacucccgcuucgaguccgucgccugguccgccuccgccugccacgacggcaucaacuggcucaccaucggcaucuccggccccgacaacggcgccgucgccguccucaaguacaacggcgucaucaccgacaccaucaaguccuggcgcaacaacauccuccgcacccaggaguccgagugcgccugcgucaacggcuccugcuucaccaucaugaccgacggccccuccgacggccaggccuccuacaagaucuuccgcaucgagaagggcaagaucgucaaguccgucgagaugaacgcccccaacuaccacuacgaggagugcuccugcuaccccgacuccuccgagaucaccugcgucugccgcgacaacuggcacggcuccaaccgccccugggucuccuucaaccagaaccucgaguaccagaucggcuacaucugcuccggcaucuucggcgacaacccccgccccaacgacaagaccggcuccugcggccccgucuccuccaacggcgccaacggcgucaagggcuucuccuucaaguacggcaacggcgucuggaucggccgcaccaaguccaucuccucccgcaagggcuucgagaugaucugggaccccaacggcuggaccggcaccgacaacaacuucuccaccaagcaggacaucgucggcaucaacgagugguccggcuacuccggcuccuucguccagcaccccgagcucaccggccucgacugcauccgccccugcuucugggucgagcucauccgcggccgccccaaggagaacaccaucuggaccuccggcuccuccaucuccuucugcggcgucaacuccgacaccgucggcugguccuggcccgacggcgccgagcuccccuucaccaucgacaacuga

SEQ ID NO: 121104 - RNA, 1410 nt, Artificial Sequence; identical to SEQ ID NO: 121026
  derived and/or modified CDS sequence (opt2) from neuraminidase__InfluenzaA__AHM00111

SEQ ID NO: 121105 - RNA, 1410 nt, Artificial Sequence; identical to SEQ ID NO: 121090
  derived and/or modified CDS sequence (opt2) from neuraminidase__InfluenzaA__AHM00123

SEQ ID NO: 121106 - RNA, 1410 nt, Artificial Sequence; identical to SEQ ID NO: 119411
  derived and/or modified CDS sequence (opt2) from neuraminidase__InfluenzaA__AHM00135

SEQ ID NO: 121107 - RNA, 1410 nt, Artificial Sequence; identical to SEQ ID NO: 119919
  derived and/or modified CDS sequence (opt2) from neuraminidase__InfluenzaA__AHM00147

SEQ ID NO: 121108 - RNA, 1410 nt, Artificial Sequence; identical to SEQ ID NO: 121090
  derived and/or modified CDS sequence (opt2) from neuraminidase__InfluenzaA__AHM00159

SEQ ID NO: 121109 - RNA, 1410 nt, Artificial Sequence; identical to SEQ ID NO: 118182
  derived and/or modified CDS sequence (opt2) from neuraminidase__InfluenzaA__AHM00171

SEQ ID NO: 121110 - RNA, 1410 nt, Artificial Sequence; identical to SEQ ID NO: 118182
  derived and/or modified CDS sequence (opt2) from neuraminidase__InfluenzaA__AHM00183

SEQ ID NO: 121111 - RNA, 1410 nt, Artificial Sequence
  derived and/or modified CDS sequence (opt2) from neuraminidase__InfluenzaA__AHM00195
augaaccccaaccagaagaucaucaccaucggcuccgucucccucaccaucuccaccaucugcuucuucaugcagaucgccauccucaucaccaccgucacccuccacuucaagcaguacgaguucaacuccccccccaacaaccaggucaugcucugcgagcccaccaucaucgagcgcaacaucaccgagaucgucuaccucaccaacaccaccaucgagaaggagaucugccccaagcccgccgaguaccgcaacugguccaagccccagugcgacaucaccggcuucgcccccuucuccaaggacaacuccauccgccucuccgccggcggcgacaucugggucacccgcgagcccuacgucuccugcgaccccgacaagugcuaccaguucgcccucggccagggcaccacccucaacaacguccacuccaacaacaccguccgcgaccgcacccccuaccgcacccuccucaugaacgagcucggcguccccuuccaccucggcaccaagcaggucugcaucgccugguccuccuccuccugccacgacggcaaggccuggcuccacgucugcaucaccggcgacgacaagaacgccaccgccuccuucaucuacaacggccgccucgucgacuccgucgucuccugguccaaggagauccuccgcacccaggaguccgagugcgucugcaucaacggcaccugcaccgucgucaugaccgacggcuccgccuccggcaaggccgacaccaagguccucuucaucgaggagggcaagaucguccacaccuccacccucuccggcuccgcccagcacgucgaggagugcuccugcuacccccgcuaccccggcguccgcugcgucugccgcgacaacuggaagggcuccaaccgccccaucgucgacaucaacaucaaggaccacuccaucgucucccgcuacgucugcuccggccucgucggcgacaccccccgcaagaacgacuccuccuccuccucccacugccucgaccccaacaacgaggagggcggccacggcgucaagggcugggccuucgacgacggcaacgacgucuggaugggccgcaccaucaacgagaccucccgccucggcuacgagaccuucaaggucaucgagggcugguccaaccccaaguccaagcuccagaucaaccgccaggucaucgucgaccgcggcgaccgcuccggcuacuccggcaucuucuccgucgagggcaaguccugcaucaaccgcugcuucuacgucgagcucauccgcggccgcaaggaggagaccgagguccucuggaccuccaacuccaucgucgucuucugcggcaccuccggcaccuacggcaccggcuccuggcccgacggcgccgaccucaaccucaugcccaucuga

SEQ ID NO: 121112 - RNA, 1410 nt, Artificial Sequence
  derived and/or modified CDS sequence (opt2) from neuraminidase__InfluenzaA__AHM00207
augaaccccaaccagaagaucaucaccaucggcuccgucucccucaccaucuccaccaucugcuucuucaugcagaucgccauccucaucaccaccgucacccuccacuucaagcagcacgaguucaacuccccccccaacaaccaggucaugcucugcgagcccaccaucaucgagcgcaacaucaccgagaucgucuaccucaccaacaccaccaucgagaaggagaucugccccaagcccgccgaguaccgcaacugguccaagccccagugcggcaucaccggcuucgcccccuucuccaaggacaacuccauccgccucuccgccggcggcaacaucugggucacccgcgagcccuacgucuccugcgaccccgacaagugcuaccaguucgcccucggccagggcaccacccucaacaacguccacuccaacaacaccguccgcgaccgcacccccuaccgcacccuccucaugaacgagcucggcguccccuuccaccucggcaccaagcaggucugcaucgccugguccuccuccuccugccacgacggcaaggccuggcuccacgucugcaucaccggcgacgacaagaacgccaccgccuccuucaucuacaacggccgccucgucgacuccgucgucuccugguccaaggagauccuccgcacccaggaguccgagugcgucugcaucaacggcaccugcaccgucgucaugaccgacggcuccgccuccggcaaggccgacaccaagauccucuucaucgaggagggcaagaucguccacaccuccacccucuccggcuccgcccagcacgucgaggagugcuccugcuacccccgcuaccccggcguccgcugcgucugccgcgacaacuggaagggcuccaaccgccccaucgucgacaucaacaucaaggaccacuccaucgucuccuccuacgucugcuccggccucgucggcgacaccccccgcaagaacgacuccuccuccuccucccacugccucgaccccaacaacgaggagggcggccacggcgucaagggcugggccuucgacgacggcaacgacgucuggaugggccgcaccaucaacgagaccucccgccucggcuacgagaccuucaaggucaucgagggcugguccaaccccaaguccaagcuccagaucaaccgccaggucaucgucgaccgcggcgaccgcuccggcuacuccggcaucuucuccgucgagggcaaguccugcaucaaccgcugcuucuacgucgagcucauccgcggccgcaaggaggagaccgagguccucuggaccuccaacuccaucgucgucuucugcggcaccuccggcaccuacggcaccggcuccuggcccgacggcgccgaccucaaccucaugcccaucuga

SEQ ID NO: 121113 - RNA, 1410 nt, Artificial Sequence; identical to SEQ ID NO: 121090
  derived and/or modified CDS sequence (opt2) from neuraminidase__InfluenzaA__AHM00219

SEQ ID NO: 121114 - RNA, 1410 nt, Artificial Sequence; identical to SEQ ID NO: 118182
  derived and/or modified CDS sequence (opt2) from neuraminidase__InfluenzaA__AHM00231

SEQ ID NO: 121115 - RNA, 1410 nt, Artificial Sequence; identical to SEQ ID NO: 118182
  derived and/or modified CDS sequence (opt2) from neuraminidase__InfluenzaA__AHM00243

SEQ ID NO: 121116 - RNA, 1410 nt, Artificial Sequence; identical to SEQ ID NO: 118182
  derived and/or modified CDS sequence (opt2) from neuraminidase__InfluenzaA__AHM00255

SEQ ID NO: 121117 - RNA, 1410 nt, Artificial Sequence
  derived and/or modified CDS sequence (opt2) from neuraminidase__InfluenzaA__AHM00267
augaaccccaaccagaagaucaucaccaucggcuccgucucccucaccaucuccaccaucugcuucuucaugcagaucgccauccucaucaccaccgucacccuccacuucaagcaguacgaguucaacuccccccccaacaaccaggucaugcucugcgagcccaccaucaucgagcgcaacaucaccgagaucgucuaccucaccaacaccaccaucgagaaggagaucugccccaagcccgccgaguaccgcaacugguccaagccccagugcggcaucaccggcuucgcccccuucuccaaggacaacuccauccgccucuccgccggcggcgacaucugggucacccgcgagcccuacgucuccugcgaccccgacaagugcuaccaguucgcccucggccagggcaccacccucaacaacguccacuccaacaacaccguccgcgaccgcacccccuaccgcacccuccucaugaacgagcucggcguccccuuccaccucggcaccaagcaggucugcaucgccugguccuccuccuccugccacgacggcaaggccuggcuccacgucugcaucaccggcgacgacaagaacgccaccgccuccuucaucuacaacggccgccucgucgacuccgucgccuccugguccaaggagauccuccgcacccaggaguccgagugcgucugcaucaacggcaccugcaccgucgucaugaccgacggcuccgccuccggcaaggccgacaccaagauccucuucaucgaggagggcaagaucguccacaccuccacccucuccggcuccgcccagcacgucgaggagugcuccugcuacccccgcuaccccggcguccgcugcgucugccgcgacaacuggaagggcuccaaccgccccaucgucgacaucaacaucaaggaccacuccaucgucuccuccuacgucugcuccggccucgucggcgacaccccccgcaagaacgacuccuccuccuccucccacugccucgaccccaacaacgaggagggcggccacggcgucaagggcugggccuucgacgacggcaacgacgucuggaugggccgcaccaucaacgagaccucccgccucggcuacgagaccuucaaggucaucgagggcugguccaaccccaaguccaagcuccagaucaaccgccaggucaucgucgaccgcggcgaccgcuccggcuacuccggcaucuucuccgucgagggcaaguccugcaucaaccgcugcuucuacgucgagcucauccgcggccgcaaggaggagaccgagguccucuggaccuccaacuccaucgucgucuucugcggcaccuccggcaccuacggcaccggcuccuggcccgacggcgccgaccucaaccucaugcccaucuga

SEQ ID NO: 121118 - RNA, 1410 nt, Artificial Sequence; identical to SEQ ID NO: 119411
  derived and/or modified CDS sequence (opt2) from neuraminidase__InfluenzaA__AHM00279

SEQ ID NO: 121119 - RNA, 1410 nt, Artificial Sequence; identical to SEQ ID NO: 118182
  derived and/or modified CDS sequence (opt2) from neuraminidase__InfluenzaA__AHM00291

SEQ ID NO: 121120 - RNA, 1410 nt, Artificial Sequence; identical to SEQ ID NO: 118182
  derived and/or modified CDS sequence (opt2) from neuraminidase__InfluenzaA__AHM00303

SEQ ID NO: 121121 - RNA, 1410 nt, Artificial Sequence; identical to SEQ ID NO: 118182
  derived and/or modified CDS sequence (opt2) from neuraminidase__InfluenzaA__AHM00315

SEQ ID NO: 121122 - RNA, 1410 nt, Artificial Sequence; identical to SEQ ID NO: 119411
  derived and/or modified CDS sequence (opt2) from neuraminidase__InfluenzaA__AHM00327

SEQ ID NO: 121123 - RNA, 1410 nt, Artificial Sequence; identical to SEQ ID NO: 119411
  derived and/or modified CDS sequence (opt2) from neuraminidase__InfluenzaA__AHM00339

SEQ ID NO: 121124 - RNA, 1410 nt, Artificial Sequence; identical to SEQ ID NO: 121090
  derived and/or modified CDS sequence (opt2) from neuraminidase__InfluenzaA__AHM00351

SEQ ID NO: 121125 - RNA, 1410 nt, Artificial Sequence; identical to SEQ ID NO: 121026
  derived and/or modified CDS sequence (opt2) from neuraminidase__InfluenzaA__AHM00363

SEQ ID NO: 121126 - RNA, 1410 nt, Artificial Sequence
  derived and/or modified CDS sequence (opt2) from neuraminidase__InfluenzaA__AHM00375
augaaccccaaccagaagaucaucaccaucggcuccgucucccucaccaucuccaccaucugcuucuucaugcagaucgccauccucaucaccaccgucacccuccacuucaagcagcacgaguucaacuccccccccaacaaccaggucaugcucugcgagcccaccaucaucgagcgcaacaucaccgagaucgucuaccucaccaacaccaccaucgagaaggaggucugccccaagcccgccgaguaccgcaacugguccaagccccagugcggcaucaccggcuucgcccccuucuccaaggacaacuccauccgccucuccgccggcggcgacaucugggucacccgcgagcccuacgucuccugcgaccccgacaagugcuaccaguucgcccucggccagggcaccacccucaacaacguccacuccaacaacaccguccgcgaccgcacccccuaccgcacccuccucaugaacgagcucggcguccccuuccaccucggcaccaagcaggucugcaucgccugguccuccuccuccugccacgacggcaaggccuggcuccacgucugcaucaccggcgacgacaagaacgccaccgccuccuucaucuacaacggccgccucgucgacuccgucgucuccugguccaaggagauccuccgcacccaggaguccgagugcgucugcaucaacggcaccugcaccgucgucaugaccgacggcuccgccuccggcaaggccgacaccaagauccucuucaucgaggagggcaagaucguccacaccuccacccucuccggcuccgcccagcacgucgaggagugcuccugcuacccccgcuaccccggcguccgcugcgucugccgcgacaacuggaagggcuccaaccgccccaucgucgacaucaacaucaaggaccacuccaucgucuccuccuacgucugcuccggccucgucggcgacaccccccgcaagaacgacuccuccuccuccucccacugccucgaccccaacaacgaggagggcggccacggcgucaagggcugggccuucgacgacggcaacgacgucuggaugggccgcaccaucaacgagaccucccgccucggcuacgagaccuucaaggucaucgagggcugguccaaccccaaguccaagcuccagaucaaccgccaggucaucgucgaccgcggcgaccgcuccggcuacuccggcaucuucuccgucgagggcaaguccugcaucaaccgcugcuucuacgucgagcucauccgcggccgcaaggaggagaccgagguccucuggaccuccaacuccaucgucgucuucugcggcaccuccggcaccuacggcaccggcuccuggcccgacggcgccgaccucaaccucaugcccaucuga

SEQ ID NO: 121127 - RNA, 1410 nt, Artificial Sequence
  derived and/or modified CDS sequence (opt2) from neuraminidase__InfluenzaA__AHM00398
augaaccccaaccagaagaucaucaccaucggcuccgucucccucaccaucuccaccaucugcuucuucaugcagaucgccauccucaucaccaccgucacccuccacuucaagcagcacgaguucaacuccccccccaacaaccaggucaugcucugcgagcccaccaucaucgagcgcaacaucaccgagaucgucuaccucaccaacaccaccaucgagaaggagaucugccccaagcccgccgaguaccgcaacugguccaagccccagugcggcaucaccggcuucgcccccuucuccaaggagaacuccauccgccucuccgccggcggcgacaucugggucacccgcgagcccuacgucuccugcgaccccgacaagugcuaccaguucgcccucggccagggcaccacccucaacaacguccacuccaacaacaccguccgcgaccgcacccccuaccgcacccuccucaugaacgagcucggcguccccuuccaccucggcaccaagcaggucugcaucgccugguccuccuccuccugccacgacggcaaggccuggcuccacgucugcaucaccggcgacgacaagaacgccaccgccuccuucaucuacaacggccgccucgucgacuccgucgucuccugguccaaggagauccuccgcacccaggaguccgagugcgucugcaucaacggcaccugcaccgucgucaugaccgacggcuccgccuccggcaaggccgacaccaagauccucuucaucgaggagggcaagaucguccacaccuccacccucuccggcuccgcccagcacgucgaggagugcuccugcuacccccgcuaccccggcguccgcugcgucugccgcgacaacuggaagggcuccaaccgccccaucgucgacaucaacaucaaggaccacuccaucgucuccuccuacgucugcuccggccucgucggcgacaccccccgcaagaacgacuccuccuccuccucccacugccucgaccccaacaacgaggagggcggccacggcgucaagggcugggccuucgacgacggcaacgacgucuggaugggccgcaccaucaacgagaccucccgccucggcuacgagaccuucaaggucaucgagggcugguccaaccccaaguccaagcuccagaucaaccgccaggucaucgucgaccgcggcgaccgcuccggcuacuccggcaucuucuccgucgagggcaaguccugcaucaaccgcugcuucuacgucgagcucauccgcggccgcaaggaggagaccgagguccucuggaccuccuccuccaucgucgucuucugcggcaccuccggcaccuacggcaccggcuccuggcccgacggcgccgaccucaaccucaugcccaucuga

SEQ ID NO: 121128 - RNA, 1410 nt, Artificial Sequence; identical to SEQ ID NO: 118182
  derived and/or modified CDS sequence (opt2) from neuraminidase__InfluenzaA__AHM00410

SEQ ID NO: 121129 - RNA, 1410 nt, Artificial Sequence
  derived and/or modified CDS sequence (opt2) from neuraminidase__InfluenzaA__AHM00422
augaaccccaaccagaagaucaucaccaucggcuccgucucccucaccaucuccaccaucugcuucuucaugcagaucgccauccucgucaccaccgucacccuccacuucaagcaguacgaguucaacuccccccccaacaaccaggucaugcucugcgagcccaccaucaucgagcgcaacaucaccgagaucgucuaccucaccaacaccaccaucgagaaggagaucugccccaagcccgccgaguaccgcaacugguccaagccccagugcggcaucaccggcuucgcccccuucuccaaggacaacuccauccgccucuccgccggcggcgacaucugggucacccgcgagcccuacgucuccugcgaccccgacaagugcuaccaguucgcccucggccagggcaccacccucaacaacguccacuccaacaacaccguccgcgaccgcacccccuaccgcacccuccucaugaacgagcucggcguccccuuccaccucggcaccaagcaggucugcaucgccugguccuccuccuccugccacgacggcaaggccuggcuccacgucugcaucaccggcgacgacaagaacgccaccgccuccuucaucuacaacggccgccucgucgacuccgucgucuccugguccaaggagauccuccgcacccaggaguccgagugcgucugcaucaacggcaccugcaccgucgucaugaccgacggcuccgccuccggcaaggccgacaccaagauccucuucaucgaggagggcaagaucguccacaccuccacccucuccggcuccgcccagcacgucgaggagugcuccugcuacccccgcuaccccggcguccgcugcgucugccgcgacaacuggaagggcuccaaccgccccaucgucgacaucaacaucaaggaccacuccaucgucuccuccuacgucugcuccggccucgucggcgacaccccccgcaagaacgacuccuccuccuccucccacugccucgaccccaacaacgaggagggcggccacggcgucaagggcugggccuucgacgacggcaacgacgucuggaugggccgcaccaucaacgagaccucccgccucggcuacgagaccuucaaggucaucgagggcugguccaaccccaaguccaagcuccagaucaaccgccaggucaucgucgaccgcggcgaccgcuccggcuacuccggcaucuucuccgucgagggcaaguccugcaucaaccgcugcuucuacgucgagcucauccgcggccgcaaggaggagaccgagguccucuggaccuccaacuccaucgucgucuucugcggcaccuccggcaccuacggcaccggcuccuggcccgacggcgccgaccucaaccucaugcccaucuga

SEQ ID NO: 121130 - RNA, 1410 nt, Artificial Sequence
  derived and/or modified CDS sequence (opt2) from neuraminidase__InfluenzaA__AHM00434
augaaccccaaccagaagaucaucaccaucggcuccgucucccucaccaucuccaccaucugcuucuucaugcagaucgccauccucaucaccaccgucacccuccacuucaagcaguacgaguucaaccccccccccaacaaccaggucaugcucugcgagcccaccaucaucgagcgcaacaucaccgagaucgucuaccucaccaacaccaccaucgagaaggagaucugccccaagcccgccgaguaccgcaacugguccaagccccagugcggcaucaccggcuucgcccccuucuccaaggacaacuccauccgccucuccgccggcggcgacaucugggucacccgcgagcccuacgucuccugcgaccccgacaagugcuaccaguucgcccucggccagggcaccacccucaacaacguccacuccaacaacaccguccgcgaccgcacccccuaccgcacccuccucaugaacgagcucggcguccccuuccaccucggcaccaagcaggucugcaucgccugguccuccuccuccugccacgacggcaaggccuggcuccacgucugcaucaccggcgacgacaagaacgccaccgccuccuucaucuacaacggccgccucgucgacuccgucgucuccugguccaaggagauccuccgcacccaggaguccgagugcgucugcaucaacggcaccugcaccgucgucaugaccgacggcuccgccuccggcaaggccgacaccaagauccucuucaucgaggagggcaagaucguccacaccuccacccucuccggcuccgcccagcacgucgaggagugcuccugcuacccccgcuaccccggcguccgcugcgucugccgcgacaacuggaagggcuccaaccgccccaucgucgacaucaacaucaaggaccacuccaucgucuccuccuacgucugcuccggccucgucggcgacaccccccgcaagaacgacuccuccuccuccucccacugccucgaccccaacaacgaggagggcggccacggcgucaagggcugggccuucgacgacggcaacgacgucuggaugggccgcaccaucaacgagaccucccgccucggcuacgagaccuucaaggucaucgagggcugguccaaccccaaguccaagcuccagaucaaccgccaggucaucgucgaccgcggcgaccgcuccggcuacuccggcaucuucuccgucgagggcaaguccugcaucaaccgcugcuucuacgucgagcucauccgcggccgcaaggaggagaccgagguccucuggaccuccaacuccaucgucgucuucugcggcaccuccggcaccuacggcaccggcuccuggcccgacggcgccgaccucaaccucaugcccaucuga

SEQ ID NO: 121131 - RNA, 1410 nt, Artificial Sequence; identical to SEQ ID NO: 118182
  derived and/or modified CDS sequence (opt2) from neuraminidase__InfluenzaA__AHM00446

SEQ ID NO: 121132 - RNA, 1410 nt, Artificial Sequence; identical to SEQ ID NO: 121090
  derived and/or modified CDS sequence (opt2) from neuraminidase__InfluenzaA__AHM00458

SEQ ID NO: 121133 - RNA, 1410 nt, Artificial Sequence; identical to SEQ ID NO: 121090
  derived and/or modified CDS sequence (opt2) from neuraminidase__InfluenzaA__AHM00470

SEQ ID NO: 121134 - RNA, 1410 nt, Artificial Sequence; identical to SEQ ID NO: 121090
  derived and/or modified CDS sequence (opt2) from neuraminidase__InfluenzaA__AHM00482

SEQ ID NO: 121135 - RNA, 1410 nt, Artificial Sequence; identical to SEQ ID NO: 121090
  derived and/or modified CDS sequence (opt2) from neuraminidase__InfluenzaA__AHM00494

SEQ ID NO: 121136 - RNA, 1410 nt, Artificial Sequence
  derived and/or modified CDS sequence (opt2) from neuraminidase__InfluenzaA__AHM00506
augaaccccaaccagaagaucaucaccaucggcuccgucucccucaccaucuccaccaucugcuucuucaugcagaucgccauccucaucaccaccgucacccuccacuucaagcaguacgaguucaacuccccccccaacaaccaggucaugcucugcgagcccaccaucaucgagcgcaacaucaccgagaucgucuaccucaccaacaccaccaucgagaaggagaucugccccaagcccgccgaguaccgcaacugguccaagccccagugcggcaucaccggcuucgcccccuucuccaaggacaacuccauccgccucuccgccggcggcgacaucugggucacccgcgagcccuacgucuccugcgaccccgacaagugcuaccaguucgcccucggccagggcaccacccucaacaacguccacuccaacaacaccguccgcgaccgcacccccuaccgcacccuccucaugaacgagcucggcguccccuuccaccucggcaccaagcaggucugcaucgccugguccuccuccuccugccacgacggcaaggccuggcuccacgucugcaucaccggcgacgacaagaacgccaccgccuccuucaucuacaacggccgccucgucgacuccgucgucuccugguccaaggagauccuccgcacccaggaguccgagugcgucugcaucaacggcaccugcaccgucgucaugaccgacggcuccgccuccggcaaggccgacaccaagauccucuucaucgaggagggcaagaucguccacaccuccacccucuccggcuccgcccagcacgucgaggagugcuccugcuacccccgcuaccccggcguccgcugcgucugccgcgacaacuggaagggcuccaaccgccccaucgucgacaucaacaucaaggaccacuccaucgucuccuccuacgucugcuccggccucgucggcgacaccccccgcaagaacgacuccuccuccuccucccacugccucgaccccaacaacgaggagggcggccacggcgucaagggcugggccuucgacgacggcaacgacgucuggaugggccgcaccaucaacgagaccucccgccucggcuacgagaccuucaaggucaucgagggcugguccaaccccaaguccaagcuccagaucaaccgccaggucaucgucaaccgcggcgaccgcuccggcuacuccggcaucuucuccgucgagggcaaguccugcaucaaccgcugcuucuacgucgagcucauccgcggccgcaaggaggagaccgagguccucuggaccuccaacuccaucgucgucuucugcggcaccuccggcaccuacggcaccggcuccuggcccgacggcgccgaccucaaccucaugcccaucuga

SEQ ID NO: 121137 - RNA, 1410 nt, Artificial Sequence; identical to SEQ ID NO: 118182
  derived and/or modified CDS sequence (opt2) from neuraminidase__InfluenzaA__AHM00518

SEQ ID NO: 121138 - RNA, 1410 nt, Artificial Sequence
  derived and/or modified CDS sequence (opt2) from neuraminidase__InfluenzaA__AHM00530
augaaccccaaccagaagaucaucaccaucggcuccgucucccucaccaucuccaccaucugcuucuccaugcagaucgccauccucaucaccaccgucacccuccacuucaagcaguacgaguucaaccccccccccaacaaccaggucaugcucugcgagcccaccaucaucgagcgcaacaucaccgagaucgucuaccucaccaacaccaccaucgagaaggagaucugccccaagcccgccgaguaccgcaacugguccaagccccagugcggcaucaccggcuucgcccccuucuccaaggacaacuccauccgccucuccgccggcggcgacaucugggucacccgcgagcccuacgucuccugcgaccccgacaagugcuaccaguucgcccucggccagggcaccacccucaacaacguccacuccaacaacaccguccgcgaccgcacccccuaccgcacccuccucaugaacgagcucggcguccccuuccaccucggcaccaagcaggucugcaucgccugguccuccuccuccugccacgacggcaaggccuggcuccacgucugcaucaccggcgacgacaagaacgccaccgccuccuucaucuacaacggccgccucgucgacuccgucgucuccugguccaaggagauccuccgcacccaggaguccgagugcgucugcaucaacggcaccugcaccgucgucaugaccgacggcuccgccuccggcaaggccgacaccaagauccucuucaucgaggagggcaagaucguccacaccuccacccucuccggcuccgcccagcacgucgaggagugcuccugcuacccccgcuaccccggcguccgcugcgucugccgcgacaacuggaagggcuccaaccgccccaucgucgacaucaacaucaaggaccacuccaucgucuccuccuacgucugcuccggccucgucggcgacaccccccgcaagaacgacuccuccuccuccucccacugccucgaccccaacaacgaggagggcggccacggcgucaagggcugggccuucgacgacggcaacgacgucuggaugggccgcaccaucaacgagaccucccgccucggcuacgagaccuucaaggucaucgagggcugguccaaccccaaguccaagcuccagaucaaccgccaggucaucgucgaccgcggcgaccgcuccggcuacuccggcaucuucuccgucgagggcaaguccugcaucaaccgcugcuucuacgucgagcucauccgcggccgcaaggaggagaccgagguccucuggaccuccaacuccaucgucgucuucugcggcaccuccggcaccuacggcaccggcuccuggcccgacggcgccgaccucaaccucaugcccaucuga

SEQ ID NO: 121139 - RNA, 1410 nt, Artificial Sequence; identical to SEQ ID NO: 119411
  derived and/or modified CDS sequence (opt2) from neuraminidase__InfluenzaA__AHM00542

SEQ ID NO: 121140 - RNA, 1410 nt, Artificial Sequence
  derived and/or modified CDS sequence (opt2) from neuraminidase__InfluenzaA__AHM00546
augaaccccaaccagaagaucaucaccaucggcuccgucucccucaccaucuccaccaucugcuucuucaugcagaucgccauccucaucaccaccgucacccuccacuucaagcaguacgaguucaacuccccccccaacaaccaggucaugcucugcgagcccaccaucaucgagcgcaacaucaccgagaucgucuaccucaccaacaccaccaucgagaaggagaucugccccaagcccgccgaguaccgcaacugguccaagccccagugcgacaucaccggcuucgcccccuucuccaaggacaacuccauccgccucuccgccggcggcgacaucugggucacccgcgagcccuacgucuccugcgaccccgacaagugcuaccaguucgcccucggccagggcaccacccucaacaacguccacuccaacaacaccguccgcgaccgcacccccuaccgcacccuccucaugaacgagcucggcguccccuuccaccucggcaccaagcaggucugcaucgccugguccuccuccuccugccacgacggcaaggccuggcuccacgucugcaucaccggcgacgacaagaacgccaccgccuccuucaucuacaacggccgccucgucgacuccgucgucuccugguccaaggagauccuccgcacccaggaguccgagugcgucugcaucaacggcaccugcaccgucgucaugaccgacggcuccgccuccggcaaggccgacaccaagauccucuucaucgaggagggcaagaucguccacaccuccacccucuccggcuccgcccagcacgucgaggagugcuccugcuacccccgcuaccccggcguccgcugcgucugccgcgacaacuggaagggcuccaaccgccccaucgucgacaucaacaucaaggaccacuccaucgucuccaaguacgucugcuccggccucgucggcgacaccccccgcaagaacgacuccuccuccuccucccacugccucgaccccaacaacgaggagggcggccacggcgucaagggcugggccuucgacgacggcaacgacgucuggaugggccgcaccaucaacgagaccucccgccucggcuacgagaccuucaaggucaucgagggcugguccaaccccaaguccaagcuccagaucaaccgccaggucaucgucgaccgcggcgaccgcuccggcuacuccggcaucuucuccgucgagggcaaguccugcaucaaccgcugcuucuacgucgagcucauccgcggccgcaaggaggagaccgagguccucuggaccuccaacuccaucgucgucuucugcggcaccuccggcaccuacggcaccggcuccuggcccgacggcgccgaccucaaccucaugcccaucuga

SEQ ID NO: 121141 - RNA, 1410 nt, Artificial Sequence
  derived and/or modified CDS sequence (opt2) from neuraminidase__InfluenzaA__AHM00558
augaaccccaaccagaagaucaucaccaucggcuccgucucccucaccaucuccaccaucugcuucuucaugcagaucgccauccucaucaccaccgucacccuccacuucaagcaguacgaguucaacuccccccccaacaaccaggucaugcucugcgagcccaccaucaucgagcgcaacaucaccgagaucgucuaccucaccaacaccaccaucgagaaggaggucugccccaagcccgccgaguaccgcaacugguccaagccccagugcggcaucaccggcuucgcccccuucuccaaggacaacuccauccgccucuccgccggcggcgacaucugggucacccgcgagcccuacgucuccugcgaccccgacaagugcuaccaguucgcccucggccagggcaccacccucaacaacguccacuccaacaacaccguccgcgaccgcacccccuaccgcacccuccucaugaacgagcucggcguccccuuccaccucggcaccaagcaggucugcaucgccugguccuccuccuccugccacgacggcaaggccuggcuccacgucugcaucaccggcgacgacaagaacgccaccgccuccuucaucuacaacggccgccucgucgacuccgucgucuccugguccaaggagauccuccgcacccaggaguccgagugcgucugcaucaacggcaccugcaccgucgucaugaccgacggcuccgccuccggcaaggccgacaccaagauccucuucaucgaggagggcaagaucguccacaccuccacccucuccggcuccgcccagcacgucgaggagugcuccugcuacccccgcuaccccggcguccgcugcgucugccgcgacaacuggaagggcuccaaccgccccaucgucgacaucaacaucaaggaccacuccaucgucuccuccuacgucugcuccggccucgucggcgacaccccccgcaagaacgacuccuccuccuccucccacugccucgaccccaacaacgaggagggcggccacggcgucaagggcugggccuucgacgacggcaacgacgucuggaugggccgcaccaucaacgagaccucccgccucggcuacgagaccuucaaggucaucgagggcugguccaaccccaaguccaagcuccagaucaaccgccaggucaucgucgaccgcggcgaccgcuccggcuacuccggcaucuucuccgucgagggcaaguccugcaucaaccgcugcuucuacgucgagcucauccgcggccgcaaggaggagaccgagguccucuggaccuccaacuccaucgucgucuucugcggcaccuccggcaccuacggcaccggcuccuggcccgacggcgccgaccucaaccucaugcccaucuga

SEQ ID NO: 121142 - RNA, 1410 nt, Artificial Sequence; identical to SEQ ID NO: 118182
  derived and/or modified CDS sequence (opt2) from neuraminidase__InfluenzaA__AHM00570

SEQ ID NO: 121143 - RNA, 1410 nt, Artificial Sequence; identical to SEQ ID NO: 118182
  derived and/or modified CDS sequence (opt2) from neuraminidase__InfluenzaA__AHM00582

SEQ ID NO: 121144 - RNA, 1410 nt, Artificial Sequence
  derived and/or modified CDS sequence (opt2) from neuraminidase__InfluenzaA__AHM00594
augaaccccaaccagaagaucaucaccaucggcuccgucucccucaccaucuccaccaucugcuucuucaugcagaucgccauccucaucaccaccgucacccuccacuucaagcagcacgaguucaacuccccccccaacaaccaggucaugcucugcgagcccaccaucaucgagcgcaacaucaccgagaucguccaccucaccaacaccaccaucgagaaggagaucugccccaagcccgccgaguaccgcaacugguccaagccccagugcggcaucaccggcuucgcccccuucuccaaggacaacuccauccgccucuccgccggcggcgacaucugggucacccgcgagcccuacgucuccugcgaccccgacaagugcuaccaguucgcccucggccagggcaccacccucaacaacguccacuccaacaacaccguccgcgaccgcacccccuaccgcacccuccucaugaacgagcucggcguccccuuccaccucggcaccaagcaggucugcaucgccugguccuccuccuccugccacgacggcaaggccuggcuccacgucugcaucaccggcgacgacaagaacgccaccgccuccuucaucuacaacggccgccucgucgacuccgucgucuccugguccaaggagauccuccgcacccaggaguccgagugcgucugcaucaacggcaccugcaccgucgucaugaccgacggcuccgccuccggcaaggccgacaccaagauccucuucaucgaggagggcaagaucguccacaccuccacccucuccggcuccgcccagcacgucgaggagugcuccugcuacccccgcuaccccggcguccgcugcgucugccgcgacaacuggaagggcuccaaccgccccaucgucgacaucaacaucaaggaccacuccaucgucuccuccuacgucugcuccggccucgucggcgacaccccccgcaagaacgacuccuccuccuccucccacugccucgaccccaacaacgaggagggcggccacggcgucaagggcugggccuucgacgacggcaacgacgucuggaugggccgcaccaucaacgagaccucccgccucggcuacgagaccuucaaggucaucgagggcugguccaaccccaaguccaagcuccagaucaaccgccaggucaucgucgaccgcggcgaccgcuccggcuacuccggcaucuucuccgucgagggcaaguccugcaucaaccgcugcuucuacgucgagcucauccgcggccgcaaggaggagaccgagguccucuggaccuccaacuccaucgucgucuucugcggcaccuccggcaccuacggcaccggcuccuggcccgacggcgccgaccucaaccucaugcccaucuga

SEQ ID NO: 121145 - RNA, 1410 nt, Artificial Sequence; identical to SEQ ID NO: 118182
  derived and/or modified CDS sequence (opt2) from neuraminidase__InfluenzaA__AHM00606

SEQ ID NO: 121146 - RNA, 1410 nt, Artificial Sequence; identical to SEQ ID NO: 118182
  derived and/or modified CDS sequence (opt2) from neuraminidase__InfluenzaA__AHM00618

SEQ ID NO: 121147 - RNA, 1410 nt, Artificial Sequence; identical to SEQ ID NO: 118182
  derived and/or modified CDS sequence (opt2) from neuraminidase__InfluenzaA__AHM00630

SEQ ID NO: 121148 - RNA, 1410 nt, Artificial Sequence; identical to SEQ ID NO: 118182
  derived and/or modified CDS sequence (opt2) from neuraminidase__InfluenzaA__AHM00642

SEQ ID NO: 121149 - RNA, 1410 nt, Artificial Sequence; identical to SEQ ID NO: 119411
  derived and/or modified CDS sequence (opt2) from neuraminidase__InfluenzaA__AHM00654

SEQ ID NO: 121150 - RNA, 1410 nt, Artificial Sequence; identical to SEQ ID NO: 118182
  derived and/or modified CDS sequence (opt2) from neuraminidase__InfluenzaA__AHM00666

SEQ ID NO: 121151 - RNA, 1410 nt, Artificial Sequence; identical to SEQ ID NO: 121090
  derived and/or modified CDS sequence (opt2) from neuraminidase__InfluenzaA__AHM00678

SEQ ID NO: 121152 - RNA, 1410 nt, Artificial Sequence; identical to SEQ ID NO: 119425
  derived and/or modified CDS sequence (opt2) from neuraminidase__InfluenzaA__AHM00690

SEQ ID NO: 121153 - RNA, 1410 nt, Artificial Sequence; identical to SEQ ID NO: 119411
  derived and/or modified CDS sequence (opt2) from neuraminidase__InfluenzaA__AHM00701

SEQ ID NO: 121154 - RNA, 1410 nt, Artificial Sequence
  derived and/or modified CDS sequence (opt2) from neuraminidase__InfluenzaA__AHM00713
augaaccccaaccagaagaucaucaccaucggcuccgucucccucaccaucuccaccaucugcuucuucaugcagaucgccauccucaucaccaccgucacccuccacuucaagcaguacgaguucaacuccccccccaacaaccaggucaugcucugcgagcccaccaucaucgagcgcaacaucaccgagaucgucuaccucaccaacaccaccaucgagaaggagaucugccccaaguccgccgaguaccgcaacugguccaagccccagugcggcaucaccggcuucgcccccuucuccaaggacaacuccauccgccucuccgccggcggcgacaucugggucacccgcgagcccuacgucuccugcgaccccgacaagugcuaccaguucgcccucggccagggcaccacccucaacaacguccacuccaacaacaccguccgcgaccgcacccccuaccgcacccuccucaugaacgagcucggcguccccuuccaccucggcaccaagcaggucugcaucgccugguccuccuccuccugccacgacggcaaggccuggcuccacgucugcaucaccggcgacgacaagaacgccaccgccuccuucaucuacaacggccgccucgucgacuccgucgucuccugguccaaggagauccuccgcacccaggaguccgagugcgucugcaucaacggcaccugcaccgucgucaugaccgacggcuccgccuccggcaaggccgacaccaagauccucuucaucgaggagggcaagaucguccacaccuccacccucuccggcuccgcccagcacgucgaggagugcuccugcuacccccgcuaccccggcguccgcugcgucugccgcgacaacuggaagggcuccaaccgccccaucgucgacaucaacaucaaggaccacuccaucgucuccuccuacgucugcuccggccucgucggcgacaccccccgcaagaacgacuccuccuccuccucccacugccucgaccccaacaacgaggagggcggccacggcgucaagggcugggccuucgacgacggcaacgacgucuggaugggccgcaccaucaacgagaccucccgccucggcuacgagaccuucaaggucaucgagggcugguccaaccccaaguccaagcuccagaucaaccgccaggucaucgucgaccgcggcgaccgcuccggcuacuccggcaucuucuccgucgagggcaaguccugcaucaaccgcugcuucuacgucgagcucauccgcggccgcaaggaggagaccgagguccucuggaccuccaacuccaucgucgucuucugcggcaccuccggcaccuacggcaccggcuccuggcccgacggcgccgaccucaaccucaugcccaucuga

SEQ ID NO: 121155 - RNA, 1410 nt, Artificial Sequence; identical to SEQ ID NO: 118182
  derived and/or modified CDS sequence (opt2) from neuraminidase__InfluenzaA__AHM00725

SEQ ID NO: 121156 - RNA, 1410 nt, Artificial Sequence; identical to SEQ ID NO: 118182
  derived and/or modified CDS sequence (opt2) from neuraminidase__InfluenzaA__AHM00737

SEQ ID NO: 121157 - RNA, 1410 nt, Artificial Sequence; identical to SEQ ID NO: 121090
  derived and/or modified CDS sequence (opt2) from neuraminidase__InfluenzaA__AHM00749

SEQ ID NO: 121158 - RNA, 1410 nt, Artificial Sequence; identical to SEQ ID NO: 118182
  derived and/or modified CDS sequence (opt2) from neuraminidase__InfluenzaA__AHM00761

SEQ ID NO: 121159 - RNA, 1410 nt, Artificial Sequence; identical to SEQ ID NO: 119411
  derived and/or modified CDS sequence (opt2) from neuraminidase__InfluenzaA__AHM00785

SEQ ID NO: 121160 - RNA, 1410 nt, Artificial Sequence; identical to SEQ ID NO: 119046
  derived and/or modified CDS sequence (opt2) from neuraminidase__InfluenzaA__AHM00797

SEQ ID NO: 121161 - RNA, 1410 nt, Artificial Sequence
  derived and/or modified CDS sequence (opt2) from neuraminidase__InfluenzaA__AHM00809
augaaccccaaccagaagaucaucaccaucggcuccgucucccucaccaucuccaccaucugcuucuucauccagaucgccauccucaucaccaccgucacccuccacuucaagcaguacgaguucaacuccccccccaacaaccaggucaugcucugcgagcccaccaucaucgagcgcaacaucaccgagaucgucuaccucaccaacaccaccaucgagaaggagaucugccccaagcccgccgaguaccgcaacugguccaagccccagugcgacaucaccggcuucgcccccuucuccaaggacaacuccauccgccucuccgccggcggcgacaucugggucacccgcgagcccuacgucuccugcgaccccgacaagugcuaccaguucgcccucggccagggcaccacccucaacaacaugcacuccaacaacaccguccgcgaccgcacccccuaccgcacccuccucaugaacgagcucggcguccccuuccaccucggcaccaagcaggucugcaucgccugguccuccuccuccugccacgacggcaaggccuggcuccacgucugcaucaccggcgacgacaagaacgccaccgccuccuucaucuacaacggccgccucgucgacuccgucgucuccugguccaaggagauccuccgcacccaggaguccgagugcgucugcaucaacggcaccugcaccgucgucaugaccgacggcuccgccuccggcaaggccgacaccaagauccucuucaucgaggagggcaagaucguccacaccuccacccucuccggcuccgcccagcacgucgaggagugcuccugcuacccccgcuaccccggcguccgcugcgucugccgcgacaacuggaagggcuccaaccgccccaucgucgacaucaacaucaaggaccacuccaucgucuccuccuacgucugcuccggccucgucggcgacaccccccgcaagaacgacuccuccuccuccucccacugccucgaccccaacaacgaggagggcggccacggcgucaagggcugggccuucgacgacggcaacgacgucuggaugggccgcaccaucaacgagaccucccgccucggcuacgagaccuucaaggucaucgagggcugguccaaccccaaguccaagcuccagaucaaccgccaggucaucgucgaccgcggcgaccgcuccggcuacuccggcaucuucuccgucgagggcaaguccugcaucaaccgcugcuucuacgucgagcucauccgcggccgcaaggaggagaccgagguccucuggaccuccaacuccaucgucgucuucugcggcaccuccggcaccuacggcaccggcuccuggcccgacggcgccgaccucaaccucaugcccaucuga

SEQ ID NO: 121162 - RNA, 1410 nt, Artificial Sequence; identical to SEQ ID NO: 121090
  derived and/or modified CDS sequence (opt2) from neuraminidase__InfluenzaA__AHM00821

SEQ ID NO: 121163 - RNA, 1410 nt, Artificial Sequence; identical to SEQ ID NO: 121090
  derived and/or modified CDS sequence (opt2) from neuraminidase__InfluenzaA__AHM00833

SEQ ID NO: 121164 - RNA, 1410 nt, Artificial Sequence; identical to SEQ ID NO: 119046
  derived and/or modified CDS sequence (opt2) from neuraminidase__InfluenzaA__AHM00845

SEQ ID NO: 121165 - RNA, 1410 nt, Artificial Sequence; identical to SEQ ID NO: 118182
  derived and/or modified CDS sequence (opt2) from neuraminidase__InfluenzaA__AHM00857

SEQ ID NO: 121166 - RNA, 1410 nt, Artificial Sequence; identical to SEQ ID NO: 118182
  derived and/or modified CDS sequence (opt2) from neuraminidase__InfluenzaA__AHM00869

SEQ ID NO: 121167 - RNA, 1410 nt, Artificial Sequence; identical to SEQ ID NO: 118182
  derived and/or modified CDS sequence (opt2) from neuraminidase__InfluenzaA__AHM00881

SEQ ID NO: 121168 - RNA, 1410 nt, Artificial Sequence; identical to SEQ ID NO: 119411
  derived and/or modified CDS sequence (opt2) from neuraminidase__InfluenzaA__AHM00893

SEQ ID NO: 121169 - RNA, 1410 nt, Artificial Sequence
  derived and/or modified CDS sequence (opt2) from neuraminidase__InfluenzaA__AHM00905
augaaccccaaccagaagaucaucaccaucggcuccgucucccucaccaucuccaccaucugcuucuucaugcagaucgccauccucaucaccaccgucacccuccacuucaagcaguacgaguucaacuccccccccaacaaccaggucaugcucugcgagcccaccaucaucgagcgcaacaucaccgagaucgucuaccucaccaacaccaccaucgagaaggagaucugccccaagcccgccgaguaccgcaacugguccaagccccagugcggcaucaccggcuucgcccccuucuccaaggacaacuccauccgccucuccgccggcggcgacaucugggucacccgcgagcccuacgucuccugcgaccccgacaagugcuaccaguucgcccucggccagggcaccacccucaacaacguccacuccaacaacaccguccgcgaccgcacccccuaccgcacccuccucaugaacgagcucggcguccccuuccaccucggcaccaagcaggucugcaucgccugguccuccuccuccugccacgacggcaaggccuggcuccacgucugcaucaccggcgacgacaagaacgccaccgccuccuucaucuacaacggccgccucgucgacuccgucgucuccugguccaaggagauccuccgcacccaggaguccgagugcgucugcaucaacggcaccugcaccgucgucaugaccgacggcuccgccuccggcaaggccgacaccaagauccucuucaucgaggagggcaagaucguccacaccuccacccucuccggcuccgcccagcacgucgaggagugcuccugcuacccccgcuaccccggcguccgcugcgucugccgcgacaacuggaagggcuccaaccgccccaucgucgacaucaacaucaaggaccacuccaucgucuccuccuacgucugcuccggccucgucggcgacaccccccgcaagaccgacuccuccuccuccggccacugccucgaccccaacaacgaggagggcggccacggcgucaagggcugggccuucgacgacggcaacgacgucuggaugggccgcaccaucaacgagaccucccgccucggcuacgagaccuucaaggucaucgagggcugguccaaccccaaguccaagcuccagaucaaccgccaggucaucgucgaccgcggcgaccgcuccggcuacuccggcaucuucuccgucgagggcaaguccugcaucaaccgcugcuucuacgucgagcucauccgcggccgcaaggaggagaccgagguccucuggaccuccaacuccaucgucgucuucugcggcaccuccggcaccuacggcaccggcuccuggcccgacggcgccgaccucaaccucaugcccaucuga

SEQ ID NO: 121170 - RNA, 1410 nt, Artificial Sequence
  derived and/or modified CDS sequence (opt2) from neuraminidase__InfluenzaA__AHM00917
augaaccccaaccagaagaucaucaccaucggcuccgucucccucaccaucuccaccaucugcuucuucaugcagaucgccauccucaucaccaccgucacccuccacuucaagcaguacgaguucaacuccccccccaacaaccaggucaugcucugcgagcccaccaucaucgagcgcaacaucaccgagaucgucuaccucaccaacaccaccaucgagaaggagaucugccccaagcccgccgaguaccgcaacugguccaagccccagugcggcaucaccggcuucgcccccuucuccaaggacaacuccauccgccucuccgccggcggcgacaucugggucacccgcgagcccuacgucuccugcgaccccgacaagugcuaccaguucgcccucggccagggcaccacccucaacaacguccacuccaacaacaccguccgcgaccgcacccccuaccgcacccuccucaugaacgagcucggcguccccuuccaccucggcaccaagcaggucugcaucgccugguccuccuccuccugccacgacggcaaggccuggcuccacgucugcaucaccggcgacgacaagaacgccaccgccuccuucaucuacaacggccgccucgucgacuccgucgucuccugguccaaggagauccuccgcacccaggaguccgagugcgucugcaucaacggcaccugcaccgucgucaugaccgacggcuccgccuccggcaaggccgacaccaagauccucuucaucgaggagggcaagaucguccacaccuccacccucuccggcuccgcccagcacgucgaggagugcuccugcuacccccgcuaccccggcguccgcugcgucugccgcgacaacuggaagggcuccaaccgccccaucgucgacaucaacaucaaggaccacuccaucgucuccuccuacgucugcuccggccucgucggcgacaccccccgcaagaacgacuccuccuccuccucccacugccucgaccccaacaacgaggagggcggccacggcgucaagggcugggccuucgacgacggcaacgacaucuggaugggccgcaccaucaacgagaccucccgccucggcuacgagaccuucaaggucaucgagggcugguccaaccccaaguccaagcuccagaucaaccgccaggucaucgucgaccgcggcgaccgcuccggcuacuccggcaucuucuccgucgagggcaaguccugcaucaaccgcugcuucuacgucgagcucauccgcggccgcaaggaggagaccgagguccucuggaccuccaacuccaucgucgucuucugcggcaccuccggcaccuacggcaccggcuccuggcccgacggcgccgaccucaaccucaugcccaucuga

SEQ ID NO: 121171 - RNA, 1410 nt, Artificial Sequence; identical to SEQ ID NO: 118182
  derived and/or modified CDS sequence (opt2) from neuraminidase__InfluenzaA__AHM00929

SEQ ID NO: 121172 - RNA, 1410 nt, Artificial Sequence
  derived and/or modified CDS sequence (opt2) from neuraminidase__InfluenzaA__AHM00941
augaaccccaaccagaagaucaucaccaucggcuccgucucccucaccaucuccaccaucugcuucuucaugcagaucgccauccucaucaccaccgucacccuccacuucaagcaguacgaguucaacuccccccccaacaaccaggucaugcucugcgagcccaccaucaucgagcgcaacaucaccgagaucgucuaccucaccaacaccaccaucgagaaggagaucugccccaagcccgccgaguaccgcaacugguccaagccccagugcgacaucaccggcuucgcccccuucuccaaggacaacuccauccgccucuccgccggcggcgacaucugggucacccgcgagcccuacgucuccugcgaccccgacaagugcuaccaguucgcccucggccagggcaccacccucaacaacguccacuccaacaacaccauccgcgaccgcacccccuaccgcacccuccucaugaacgagcucggcguccccuuccaccucggcaccaagcaggucugcaucgccugguccuccuccuccugccacgacggcaaggccuggcuccacgucugcaucaccggcgacgacaagaacgccaccgccuccuucaucuacaacggccgccucgucgacuccgucgucuccugguccaaggagauccuccgcacccaggaguccgagugcgucugcaucaacggcaccugcaccgucgucaugaccgacggcuccgccuccggcaaggccgacaccaagauccucuucaucgaggagggcaagaucguccacaccuccacccucuccggcuccgcccagcacgucgaggagugcuccugcuacccccgcuaccccggcguccgcugcgucugccgcgacaacuggaagggcuccaaccgccccaucgucgacaucaacaucaaggaccacuccaucgucucccgcuacgucugcuccggccucgucggcgacaccccccgcaagaacgacuccuccuccuccucccacugccucgaccccaacaacgaggagggcggccacggcgucaagggcugggccuucgacgacggcaacgacgucuggaugggccgcaccaucaacgagaccucccgccucggcuacgagaccuucaaggucaucgagggcugguccaaccccaaguccaagcuccagaucaaccgccaggucaucgucgaccgcggcgaccgcuccggcuacuccggcaucuucuccgucgagggcaaguccugcaucaaccgcugcuucuacgucgagcucauccgcggccgcaaggaggagaccgagguccucuggaccuccaacuccaucgucgucuucugcggcaccuccggcaccuacggcaccggcuccuggcccgacggcgccgaccucaaccucaugcccaucuga

SEQ ID NO: 121173 - RNA, 1410 nt, Artificial Sequence
  derived and/or modified CDS sequence (opt2) from neuraminidase__InfluenzaA__AHM00953
augaaccccaaccagaagaucaucaccaucggcuccgucucccucaccaucuccaccaucugcuucuucaugcagaucgccauccucaucaccaccgucacccuccacuucaagcaguacgccuucaacuccccccccaacaaccaggucaugcucugcgagcccaccaucaucgagcgcaacaucaccgagaucgucuaccucaccaacaccaccaucgagaaggagaucugccccaagcccgccgaguaccgcaacugguccaagccccagugcggcaucaccggcuucgcccccuucuccaaggacaacuccauccgccucuccgccggcggcgacaucugggucacccgcgagcccuacgucuccugcgaccccgacaagugcuaccaguucgcccucggccagggcaccacccucaacaacguccacuccaacaacaccguccgcgaccgcacccccuaccgcacccuccucaugaacgagcucggcguccccuuccaccucggcaccaagcaggucugcaucgccugguccuccuccuccugccacgacggcaaggccuggcuccacgucugcaucaccggcgacgacaagaacgccaccgccuccuucaucuacaacggccgccucgucgacuccgucgucuccugguccaaggagauccuccgcacccaggaguccgagugcgucugcaucaacggcaccugcaccgucgucaugaccgacggcuccgccuccggcaaggccgacaccaagauccucuucaucgaggagggcaagaucguccacaccuccacccucuccggcuccgcccagcacgucgaggagugcuccugcuacccccgcuaccccggcguccgcugcgucugccgcgacaacuggaagggcuccaaccgccccaucgucgacaucaacaucaaggaccacuccaucgucuccuccuacgucugcuccggccucgucggcgacaccccccgcaagaacgacuccuccuccuccucccacugccucgaccccaacaacgaggagggcggccacggcgucaagggcugggccuucgacgacggcaacgacgucuggaugggccgcaccaucaacgagaccucccgccucggcuacgagaccuucaaggucaucgagggcugguccaaccccaaguccaagcuccagaucaaccgccaggucaucgucgaccgcggcgaccgcuccggcuacuccggcaucuucuccgucgagggcaaguccugcaucaaccgcugcuucuacgucgagcucauccgcggccgcaaggaggagaccgagguccucuggaccuccaacuccaucgucgucuucugcggcaccuccggcaccuacggcaccggcuccuggcccgacggcgccgaccucaaccucaugcccaucuga

SEQ ID NO: 121174 - RNA, 1410 nt, Artificial Sequence; identical to SEQ ID NO: 119411
  derived and/or modified CDS sequence (opt2) from neuraminidase__InfluenzaA__AHM00965

SEQ ID NO: 121175 - RNA, 1410 nt, Artificial Sequence; identical to SEQ ID NO: 119411
  derived and/or modified CDS sequence (opt2) from neuraminidase__InfluenzaA__AHM00977

SEQ ID NO: 121176 - RNA, 1398 nt, Artificial Sequence
  derived and/or modified CDS sequence (opt2) from neuraminidase__InfluenzaA__AHM24226
augaaccccaaccagaagauccucugcaccuccgccaccgccaucaucaucggcgccaucgccguccucaucggcaucgccaaccucggccucaacaucggccuccaccucaagcccggcugcaacugcucccacucccagcccgagaccaccaacaccucccagaccaucaucaacaacuacuacaacgagaccaacaucaccaacauccagauggaggagcgcaccucccgcaacuucaacaaccucaccaagggccucugcaccaucaacuccuggcacaucuacggcaaggacaacgccguccgcaucggcgaguccuccgacguccucgucacccgcgagcccuacgucuccugcgaccccgacgagugccgcuucuacgcccucucccagggcaccaccauccgcggcaagcacuccaacggcaccauccacgaccgcucccaguaccgcgcccucaucuccuggccccucuccuccccccccaccgucuacaacucccgcgucgagugcaucggcugguccuccaccuccugccacgacggcaagucccgcauguccaucugcaucuccggccccaacaacaacgccuccgccgucgucugguacaaccgccgccccgucgccgagaucaacaccugggcccgcaacauccuccgcacccaggaguccgagugcgucugccacaacggcgucugccccgucgucuucaccgacggcuccgccaccggccccgccgacacccgcaucuacuacuucaaggagggcaagaugcucaagugggagucccucaccggcaccgccaagcacaacgaggagugcuccugcuacggcgagcgcaccggcaucaccugcaccugccgcgacaacuggcagggcuccaaccgccccgucauccagaucgaccccgucgccaugacccacaccucccaguacaucugcucccccguccucaccgacaacccccgccccaacgaccccaacaucggcaagugcaacgaccccuaccccggcaacaacaacaacggcgucaagggcuucuccuaccucgacggcgccaacaccuggcucggccgcaccaucuccaccgccucccgcuccggcuacgagaugcucaagguccccaacgcccucaccgacgaccgcuccaagcccauccagggccagaccaucguccucaacgccgacugguccggcuacuccggcuccuucauggacuacugggccgagggcgacugcuaccgcgccugcuucuacgucgagcucauccgcggccgccccaaggaggacaaggucugguggaccuccaacuccaucgucuccaugugcuccuccaccgaguuccucggccaguggaacuggcccgacggcgccaagaucgaguacuuccucuga

SEQ ID NO: 121177 - RNA, 1398 nt, Artificial Sequence; identical to SEQ ID NO: 119490
  derived and/or modified CDS sequence (opt2) from neuraminidase__InfluenzaA__AHM24238

SEQ ID NO: 121178 - RNA, 1398 nt, Artificial Sequence
  derived and/or modified CDS sequence (opt2) from neuraminidase__InfluenzaA__AHM24250
augaaccccaaccagaagauccucugcaccuccgccaccgccaucaucaucggcgccaucgccguccucaucggcaucgccaaccucggccucaacaucggccuccaccucaagcccuccugcaacugcucccacucccagcccgagaccaccaacaccucccagaccaucaucaacaacuacuacaacgagaccaacaucaccaacauccagauggaggagcgcaccucccgcaacuucaacaaccucaccaagggccucugcaccaucaacuccuggcacaucuacggcaaggacaacgccguccgcaucggcgagaacuccgacguccucgucacccgcgagcccuacgucuccugcgaccccgacgagugccgcuucuacgcccucucccagggcaccaccauccgcggcaagcacuccaacggcaccauccacgaccgcucccaguaccgcgcccucaucuccuggccccucuccuccccccccaccgucuacaacucccgcgucgagugcaucggcugguccuccaccuccugccacgacggcaagucccgcauguccaucugcaucuccggccccaacaacaacgccuccgccgucgucugguacaaccgccgccccgucgccgagaucaacaccugggcccgcaacauccuccgcacccaggaguccgagugcgucugccacaacggcgucugccccgucgucuucaccgacggcuccgccaccggccccgccgacacccgcaucuacuacuucaaggagggcaagauccucaagugggagucccucaccggcaccgccaagcacaucgaggagugcuccugcuacggcgagcgcaccggcaucaccugcaccugccgcgacaacuggcagggcuccaaccgccccgucauccagaucgaccccgucgccaugacccacaccucccaguacaucugcucccccguccucaccgacaacccccgccccaacgaccccaacaucggcaagugcaacgaccccuaccccggcaacaacaacaacggcgucaagggcuucuccuaccucgacggcgccaacaccuggcucggccgcaccaucuccaccgccucccgcuccggcuacgagaugcucaagguccccaacgcccucaccgacgaccgcuccaagcccauccagggccagaccaucguccucaacgccgacugguccggcuacuccggcuccuucauggacuacugggccgagggcgacugcuaccgcgccugcuucuacgucgagcucauccgcggccgccccaaggaggacaaggucugguggaccuccaacuccaucgucuccaugugcuccuccaccgaguuccucggccaguggaacuggcccgacggcgccaagaucgaguacuuccucuga

SEQ ID NO: 121179 - RNA, 1410 nt, Artificial Sequence; identical to SEQ ID NO: 116745
  derived and/or modified CDS sequence (opt2) from neuraminidase__InfluenzaA__AHM98312

SEQ ID NO: 121180 - RNA, 1410 nt, Artificial Sequence
  derived and/or modified CDS sequence (opt2) from neuraminidase__InfluenzaA__AHM98331
augaaccccaaccagaagaucaucaccaucggcuccgucugcaugaccaucggcauggccaaccucauccuccagaucggcaacaucaucuccaucuggaucucccacuccauccagcucggcaaccagucccagaucgagaccugcaaccaguccgucaucaccuacgagaacaacaccugggucaaccagaccuacgucaacaucuccaacaccaacuucgccgccggccaguccgucgucuccgucaagcucgccggcaacuccucccucugccccgucuccggcugggccaucuacuccaaggacaacuccauccgcaucggcuccaagggcgacgucuucgucauccgcgagcccuucaucuccugcuccccccucgagugccgcaccuucuuccucacccagggcgcccuccucaacgacaagcacuccaacggcaccaucaaggaccgcucccccuaccgcacccucauguccugccccaucggcgagguccccucccccuacaacucccgcuucgaguccgucgccugguccgccuccgccugccacgacggcaucaacuggcucaccaucggcaucuccggccccgacaacggcgccgucgccguccucaaguacaacggcaucaucaccgacaccaucaaguccuggcgcaacaacauccuccgcacccaggaguccgagugcgccugcgucaacggcuccugcuucaccaucaugaccgacggccccuccgacggccaggccuccuacaagaucuuccgcaucgagaagggcaagaucgucaaguccgucgagaugaacgcccccaacuaccacuacgaggagugcuccugcuaccccgacuccuccgagaucaccugcgucugccgcgacaacuggcacggcuccaaccgccccugggucuccuucaaccagaaccucgaguaccagaucggcuacaucugcuccggcaucuucggcgacaacccccgccccaacgacaagaccggcuccugcggccccgucuccuccaacggcgccaacggcgucaagggcuucuccuucaaguacggcaacggcgucuggaucggccgcaccaaguccaucuccucccgcaagggcuucgagaugaucugggaccccaacggcuggaccggcaccgacaacaacuucuccaucaagcaggacaucgucggcaucaacgagugguccggcuacuccggcuccuucguccagcaccccgagcucaccggccucgacugcauccgccccugcuucugggucgagcucauccgcggccgccccaaggagaacaccaucuggaccuccggcuccuccaucuccuucugcggcguccacuccgacaccgucggcugguccuggcccgacggcgccgagcuccccuucaccaucgacaaguga

SEQ ID NO: 121181 - RNA, 1410 nt, Artificial Sequence; identical to SEQ ID NO: 116761
  derived and/or modified CDS sequence (opt2) from neuraminidase__InfluenzaA__AHM98342

SEQ ID NO: 121182 - RNA, 1410 nt, Artificial Sequence
  derived and/or modified CDS sequence (opt2) from neuraminidase__InfluenzaA__AHM98353
augaaccccaaccagaagaucaucaccaucggcuccgucugcaugaccaucggcauggccaaccucauccuccagaucggcaacaucaucuccaucuggaucucccacuccauccagcucggcaaccagucccagaucgagaccugcaaccaguccgucaucaccuacgagaacaacaccugggucaaccagaccuacgucaacaucuccaacaccaacuucgccgccggccaguccgucgucuccgucaagcucgccggcaacuccucccucugccccgucuccggcugggccaucuacuccaaggacaacuccauccgcaucggcuccaagggcgacgucuucgucauccgcgagcccuucaucuccugcuccccccucgagugccgcaccuucuuccucacccagggcgcccuccucaacgacaagcacuccaacggcaccaucaaggaccgcucccccuaccgcacccucauguccugccccaucggcgagguccccucccccuacaacucccgcuucgaguccgucgccugguccgccuccgccugccacgacggcaucaacuggcucaccaucggcaucuccggccccgacaacggcgccgucgccguccucaaguacaacggcaucaucaccgacaccaucaaguccuggcgcaacaacauccuccgcacccaggaguccgagugcgccugcgucgacggcuccugcuucaccaucaugaccgacggccccuccgacggccaggccuccuacaagaucuuccgcaucgagaagggcaagaucgucaaguccgucgagaugaacgcccccaacuaccacuacgaggagugcuccugcuaccccgacuccuccgagaucaccugcgucugccgcgacaacuggcacggcuccaaccgccccugggucuccuucaaccagaaccucgaguaccagaucggcuacaucugcuccggcaucuucggcgacaacccccgccccaacgacaagaccggcuccugcggccccgucuccuccaacggcgccaacggcgucaagggcuucuccuucaaguacggcaacggcgucuggaucggccgcaccaaguccaucuccucccgcaagggcuucgagaugaucugggaccccaacggcuggaccggcaccgacaacaacuucuccaucaagcaggacaucgucggcaucaacgagugguccggcuacuccggcuccuucguccagcaccccgagcucaccggccucgacugcauccgccccugcuucugggucgagcucauccgcggccgccccaaggagaacaccaucuggaccuccggcuccuccaucuccuucugcggcgucaacuccgacaccgucggcugguccuggcccgacggcgccgagcuccccuucaccaucgacaaguga

SEQ ID NO: 121183 - RNA, 1410 nt, Artificial Sequence
  derived and/or modified CDS sequence (opt2) from neuraminidase__InfluenzaA__AHM98364
augaaccccaaccagaagaucaucaccaucggcuccgucugcaugaccaucggcauggccaaccucauccuccagaucggcaacaucaucuccaucuggaucucccacuccauccagcucggcaaccagucccagaucgagaccugcaaccaguccgucaucaccuacgagaacaacaccugggucaaccagaccuacgucaacaucuccaacaccaacuucgccgccggccaguccgucgucuccgucaaccucgccggcaacuccucccucugccccgucuccggcugggccaucuacuccaaggacaacuccauccgcaucggcuccaagggcgacgucuucgucauccgcgagcccuucaucuccugcuccccccucgagugccgcaccuucuuccucacccagggcgcccuccucaacgacaagcacuccaacggcaccaucaaggaccgcucccccuaccgcacccucauguccugccccaucggcgagguccccucccccuacaacucccgcuucgaguccgucgccugguccgccuccgccugccacgacggcaucaacuggcucaccaucggcaucuccggccccgacaacggcgccgucgccguccucaaguacaacggcaucaucaccgacaccaucaaguccuggcgcaacaacauccuccgcacccaggaguccgagugcgccugcgucaacggcuccugcuucaccaucaugaccgacggccccuccgacggccaggccuccuacaagaucuuccgcaucgagaagggcaagaucgucaaguccgucgagaugaacgcccccaacuaccacuacgaggagugcuccugcuaccccgacuccuccgagaucaccugcgucugccgcgacaacuggcacggcuccaaccgccccugggucuccuucaaccagaaccucgaguaccagaucggcuacaucugcuccggcaucuucggcgacaacccccgccccaacgacaagaccggcuccugcggccccgucuccuccaacggcgccaacggcgucaagggcuucuccuucaaguacggcaacggcgucuggaucggccgcaccaaguccaucuccucccgcaagggcuucgagaugaucugggaccccaacggcuggaccggcaccgacaacaacuucuccaucaagcaggacaucgucggcaucaacgagugguccggcuacuccggcuccuucguccagcaccccgagcucaccggccucgacugcauccgccccugcuucugggucgagcucauccgcggccgccccaaggagaacaccaucuggaccuccggcuccuccaucuccuucugcggcgucaacuccgacaccgucggcugguccuggcccgacggcgccgagcuccccuucaccaucgacaaguga

SEQ ID NO: 121184 - RNA, 1410 nt, Artificial Sequence
  derived and/or modified CDS sequence (opt2) from neuraminidase__InfluenzaA__AHM98375
augaaccccaaccagaagaucaucaccaucggcuccgucugcaugaccaucggcauggccaaccucauccuccagaucggcaacaucaucuccaucuggaucucccacuccauccagcucggcaaccagaaccagaucgagaccugcaaccaguccgucaucaccuacgagaacaacaccugggucaaccagaccuacgucaacaucuccaacaccaacuucgccgccggccaguccgucgucuccgucaagcucgccggcaacuccucccucugccccgucuccggcugggccaucuacuccaaggacaacuccauccgcaucggcuccaagggcgacgucuucgucauccgcgagcccuucaucuccugcuccccccucgagugccgcaccuucuuccucacccagggcgcccuccucaacgacaagcacuccaacggcaccaucaaggaccgcucccccuuccgcacccucauguccugccccaucggcgagguccccucccccuacaacucccgcuucgaguccgucgccugguccgccuccgccugccacgacggcaucaacuggcucaccaucggcaucuccggccccgacaacggcgccgucgccguccucaaguacaacggcaucaucaccgacaccaucaaguccuggcgcaacaacauccuccgcacccaggaguccgagugcgccugcgucaacggcuccugcuucaccaucaugaccgacggccccuccgacggccaggccuccuacaagaucuuccgcaucgagaagggcaagaucgucaaguccgucgagaugaacgcccccaacuaccacuacgaggagugcuccugcuaccccgacuccuccgagaucaccugcgucugccgcgacaacuggcacggcuccaaccgccccugggucuccuucaaccagaaccucgaguaccagaucggcuacaucugcuccggcaucuucggcgacaacccccgccccaacgacaagaccggcuccugcggccccgucuccuccaacggcgccaacggcgucaagggcuucuccuucaaguacggcaacggcgucuggaucggccgcaccaaguccaucuccucccgcaagggcuucgagaugaucugggaccccaacggcuggaccggcaccgacaacaacuucuccaucaagcaggacaucgucggcaucaacgagugguccggcuacuccggcuccuucguccagcaccccgagcucaccggccucgacugcauccgccccugcuucugggucgagcucauccgcggccgccccaaggagaacaccaucuggaccuccggcuccuccaucuccuucugcggcgucaacuccgacaccgucggcugguccuggcccgacggcgccgagcuccccuucaccaucgacaaguga

SEQ ID NO: 121185 - RNA, 1410 nt, Artificial Sequence; identical to SEQ ID NO: 116745
  derived and/or modified CDS sequence (opt2) from neuraminidase__InfluenzaA__AHM98386

SEQ ID NO: 121186 - RNA, 1410 nt, Artificial Sequence
  derived and/or modified CDS sequence (opt2) from neuraminidase__InfluenzaA__AHM98408
augaaccccaaccagaagaucaucaccaucggcuccgucugcaugaccaucggcauggccaaccucauccuccagaucggcaacaucaucuccaucuggaucucccacuccauccagcucggcaaccagucccagaucgagaccugcaaccaguccgucaucaccuacgagaacaacaccuggaucaaccagaccuacgucaacaucuccaacaccaacuucgccgccggccaguccgucgucuccgucaagcucgccggcaacuccucccucugccccgucuccggcugggccaucuacuccaaggacaacuccauccgcaucggcuccaagggcgacgucuucgucauccgcgagcccuucaucuccugcuccccccucgagugccgcaccuucuuccucacccagggcgcccuccucaacgacaagcacuccaacggcaccaucaaggaccgcucccccuaccgcacccucauguccugccccaucggcgagguccccucccccuacaacucccgcuucgaguccgucgccugguccgccuccgccugccacgacggcaucaacuggcucaccaucggcaucuccggccccgacaacggcgccgucgccguccucaaguacaacggcaucaucaccgacaccaucaaguccuggcgcaacaacauccuccgcacccaggaguccgagugcgccugcgucaacggcuccugcuucaccaucaugaccgacggccccuccgacggccaggccuccuacaagaucuuccgcaucgagaagggcaagaucgucaaguccgucgagaugaacgcccccaacuaccacuacgaggagugcuccugcuaccccgacuccuccgagaucaccugcgucugccgcgacaacuggcacggcuccaaccgccccugggucuccuucaaccagaaccucgaguaccagaucggcuacaucugcuccggcaucuucggcgacaacccccgccccaacgacaagaccggcuccugcggccccgucuccuccaacggcgccaacggcgucaagggcuucuccuucaaguacggcaacggcgucuggaucggccgcaccaaguccaucuccucccgcaagggcuucgagaugaucugggaccccaacggcuggaccggcaccgacaacuccuucuccaucaagcaggacaucgucggcaucaacgagugguccggcuacuccggcuccuucguccagcaccccgagcucaccggccucgacugcauccgccccugcuucugggucgagcucauccgcggccgccccaaggagaacaccaucuggaccuccggcuccuccaucuccuucugcggcgucaacuccgacaccgucggcugguccuggcccgacggcgccgagcuccccuucaccaucgacaaguga

SEQ ID NO: 121187 - RNA, 1410 nt, Artificial Sequence; identical to SEQ ID NO: 121186
  derived and/or modified CDS sequence (opt2) from neuraminidase__InfluenzaA__AHM98419

SEQ ID NO: 121188 - RNA, 1410 nt, Artificial Sequence
  derived and/or modified CDS sequence (opt2) from neuraminidase__InfluenzaA__AHM98430
augaaccccaaccagaagaucaucaccaucggcuccgucugcaugaccaucggcauggccaaccucauccuccagaucggcaacaucaucuccaucuggaucucccacuccauccagcucggcaaccagucccagaucgagaccugcaaccagaacgucaucaccuacgagaacaacaccugggucaaccagaccuacgucaacaucuccaacaccaacuucgccgccggccaguccgucguccccgucaagcucgccggcaacuccucccucugccccgucuccggcugggccaucuacuccaaggacaacuccauccgcaucggcuccaagggcgacgucuucgucauccgcgagcccuucaucuccugcuccccccucgagugccgcaccuucuuccucacccagggcgcccuccucaacgacaagcacuccaacggcaccaucaaggaccgcucccccuaccgcacccucauguccugccccaucggcgagguccccucccccuacaacucccgcuucgaguccgucgccugguccgccuccgccugccacgacggcaucaacuggcucaccaucggcaucuccggccccgacaacggcgccgucgccguccucaaguacaacggcaucaucaccgacaccaucaaguccuggcgcaacaacauccuccgcacccaggaguccgagugcgccugcgucaacggcuccugcuucaccaucaugaccgacggccccuccgacggccaggccuccuacaagaucuuccgcaucgagaagggcaagaucgucaaguccgucgagaugaacgcccccaacuaccacuacgaggagugcuccugcuaccccgacuccuccgagaucaccugcgucugccgcgacaacuggcacggcuccaaccgccccugggucuccuucaaccagaaccucgaguaccagaucggcuacaucugcuccggcaucuucggcgacaacccccgccccaacgacaagaccggcuccugcggccccgucuccuccaacggcgccaacggcgucaagggcuucuccuucaaguacggcaacggcgucuggaucggccgcaccaaguccaucuccucccgcaagggcuucgagaugaucugggaccccaacggcuggaccggcaccgacaacaacuucuccaucaagcaggacaucgucggcaucaacgagugguccggcuacuccggcuccuucguccagcaccccgagcucaccggccucgacugcauccgccccugcuucugggucgagcucauccgcggccgccccaaggagaacaccaucuggaccuccggcuccuccaucuccuucugcggcgucaacuccgacaccgucggcugguccuggcccgacggcgccgagcuccccuucaccaucgacaaguga

SEQ ID NO: 121189 - RNA, 1410 nt, Artificial Sequence; identical to SEQ ID NO: 116993
  derived and/or modified CDS sequence (opt2) from neuraminidase__InfluenzaA__AHM98441

SEQ ID NO: 121190 - RNA, 1410 nt, Artificial Sequence
  derived and/or modified CDS sequence (opt2) from neuraminidase__InfluenzaA__AHM98452
augaaccccaaccagaagaucaucaccaucggcuccgucugcaugaccaucggcauggccaaccucauccuccagaucggcaacaucaucuccaucuggaucucccacuccauccagcuccgcaaccagucccagaucgagaccugcaaccaguccgucaucaccuacgagaacaacaccugggucaaccagaccuacgucaacaucuccaacaccaacuucgccgccggccaguccgucgucuccgucaagcucgccggcaacuccucccucugccccgucuccggcugggccaucuacuccaaggacaacuccauccgcaucggcuccaagggcgacgucuucgucauccgcgagcccuucaucuccugcuccccccucgagugccgcaccuucuuccucacccagggcgcccuccucaacgacaagcacuccaacggcaccaucaaggaccgcucccccuaccgcacccucauguccugccccaucggcgagguccccucccccuacaacucccgcuucgaguccgucgccugguccgccuccgccugccacgacggcaucaacuggcucaccaucggcaucuccggccccgacaacggcgccgucgccguccucaaguacaacggcaucaucaccgacaccaucaaguccuggcgcaacaacauccuccgcacccaggaguccgagugcgccugcgucaacggcuccugcuucaccaucaugaccgacggccccuccgacggccaggccuccuacaagaucuuccgcaucgagaagggcaagaucgucaaguccgucgagaugaacgcccccaacuaccacuacgaggagugcuccugcuaccccgacuccuccgagaucaccugcgucugccgcgacaacuggcacggcuccaaccgccccugggucuccuucaaccagaaccucgaguaccagaucggcuacaucugcuccggcaucuucggcgacaacccccgccccaacgacaagaccggcuccugcggccccgucuccuccaacggcgccaacggcgucaagggcuucuccuucaaguacggcaacggcgucuggaucggccgcaccaaguccaucuccucccgcaagggcuucgagaugaucugggaccccaacggcuggaccggcaccgacaacaacuucuccaucaagcaggacaucgucggcgucaacgagugguccggcuacuccggcuccuucguccagcaccccgagcucaccggccucgacugcauccgccccugcuucugggucgagcucauccgcggccgccccaaggagaacaccaucuggaccuccggcuccuccaucuccuucugcggcgucaacuccgacaccgucggcugguccuggcccgacggcgccgagcuccccuucaccaucgacaaguga

SEQ ID NO: 121191 - RNA, 1410 nt, Artificial Sequence; identical to SEQ ID NO: 116745
  derived and/or modified CDS sequence (opt2) from neuraminidase__InfluenzaA__AHM98474

SEQ ID NO: 121192 - RNA, 1410 nt, Artificial Sequence
  derived and/or modified CDS sequence (opt2) from neuraminidase__InfluenzaA__AHM98485
augaaccccaaccagaagaucaucaccaucggcuccgucugcaugaccaucggcauggccaaccucauccuccagaucggcaacaucaucuccaucuggaucucccacuccauccagcucggcaaccagucccagaucgagaccugcaaccaguccgucaucaccuacgagaacaacaccugggucaaccagaccuacgucaacaucuccaacaccaacuucgccgccggccaguccgucgucuccgucaagcucgucggcaacuccucccucugccccgucuccggcugggccaucuacuccaaggacaacuccauccgcaucggcuccaagggcgacgucuucgucauccgcgagcccuucaucuccugcuccccccucgagugccgcaccuucuuccucacccagggcgcccuccucaacgacaagcacuccaacggcaccaucaaggaccgcucccccuaccgcacccucauguccugccccaucggcgagguccccucccccuacaacucccgcuucgaguccgucgccugguccgccuccgccugccacgacggcaucaacuggcucaccaucggcaucuccggccccgacaacggcgccgucgccguccucaaguacaacggcaucaucaccgacaccaucaaguccuggcgcaacaacauccuccgcacccaggaguccgagugcgccugcgucaacggcuccugcuucaccaucaugaccgacggccccuccgacggccaggccuccuacaagaucuuccgcaucgagaagggcaagaucgucaaguccgucgagaugaacgcccccaacuaccacuacgaggagugcuccugcuaccccgacuccuccgagaucaccugcgucugccgcgacaacuggcacggcuccaaccgccccugggucuccuucaaccagaaccucgaguaccagaucggcuacaucugcuccggcaucuucggcgacaacccccgccccaacgacaagaccggcuccugcggccccgucuccuccaacggcgccaacggcgucaagggcuucuccuucaaguacggcaacggcgucuggaucggccgcaccaaguccaucuccucccgcaagggcuucgagaugaucugggaccccaacggcuggaccggcaccgacaacaacuucuccaucaagcaggacaucgucggcaucaacgagugguccggcuacuccggcuccuucguccagcaccccgagcucaccggccucgacugcauccgccccugcuucugggucgagcucauccgcggccgccccaaggagaacaccaucuggaccuccggcuccuccaucuccuucugcggcgucaacuccgacaccgucggcugguccuggcccgacggcgccgagcuccccuucaccaucgacaaguga

SEQ ID NO: 121193 - RNA, 1410 nt, Artificial Sequence
  derived and/or modified CDS sequence (opt2) from neuraminidase__InfluenzaA__AHM98496
augaaccccaaccagaagaucaucaccaucggcuccgucugcaugaccaucggcauggccaaccucauccuccagaucggcaacaucaucuccaucuggaucucccacuccauccagcucggcaaccagaaccagaucgagaccugcaaccaguccgucaucaccuacgagaacaacaccugggucaaccagaccuacgucaacaucuccaacaccaacuucgccgccggccaguccgucgucuccgucaagcucgccggcaacuccucccucugccccgucuccggcugggccaucuacuccaaggacaacuccauccgcaucggcuccaagggcgacgucuucgucauccgcgagcccuucaucuccugcuccccccucgagugccgcaccuucuuccucacccagggcgcccuccucaacgacaagcacuccaacggcaccaucaagaaccgcucccccuaccgcacccucauguccugccccaucggcgagguccccucccccuacaacucccgcuucgaguccgucgccugguccgccuccgccugccacgacggcaucaacuggcucaccaucggcaucuccggccccgacaacggcgccgucgccguccucaaguacaacggcaucaucaccgacaccaucaaguccuggcgcaacaacauccuccgcacccaggaguccgagugcgccugcgucaacggcuccugcuucaccaucaugaccgacggccccuccgacggccaggccuccuacaagaucuuccgcaucgagaagggcaagaucgucaaguccgucgagaugaacgcccccaacuaccacuacgaggagugcuccugcuaccccgacuccuccgagaucaagugcgucugccgcgacaacuggcacggcuccaaccgccccugggucuccuucaaccagaaccucgaguaccagaucggcuacaucugcuccggcaucuucggcgacaacccccgccccaacgacaagaccggcuccugcggccccgucuccuccaacggcgccaacggcgucaagggcuucuccuucaaguacggcaacggcgucuggaucggccgcaccaaguccaucuccucccgcaagggcuucgagaugaucugggaccccaacggcuggaccggcaccgacaacaacuucuccaucaagcaggacaucgucggcaucaacgagugguccggcuacuccggcuccuucguccagcaccccgagcucaccggccucgacugcauccgccccugcuucugggucgagcucauccgcggccgccccaaggagaacaccaucuggaccuccggcuccuccaucuccuucugcggcgucaacuccgacaccgucggcugguccuggcccgacggcgccgagcuccccuucaccaucgacaaguga

SEQ ID NO: 121194 - RNA, 1410 nt, Artificial Sequence; identical to SEQ ID NO: 116745
  derived and/or modified CDS sequence (opt2) from neuraminidase__InfluenzaA__AHM98507

SEQ ID NO: 121195 - RNA, 1410 nt, Artificial Sequence
  derived and/or modified CDS sequence (opt2) from neuraminidase__InfluenzaA__AHM98518
augaaccccaaccagaagaucaucaccaucggcuccgucugcaugaccaucggcauggccaaccucauccuccagaucggcaacaucaucuccaucuggaucucccacuccauccagcucggcaaccagucccagaucgagaccugcaaccaguccgucaucaccuacgagaacaacaccuggaucaaccagaccuacgucaacaucuccaacaccaacuucgccgccggccaguccgucgucuccgucaagcucgccggcaacuccucccucugccccgucuccggcugggccaucuacuccaaggacaacuccauccgcaucggcuccaagggcgacgucuucgucauccgcgagcccuucaucuccugcuccccccucgagugccgcaccuucuuccucacccagggcgcccuccucaacgacaagcacuccaacggcaccaucaaggaccgcucccccuaccgcacccucauguccugccccaucggcgagguccccucccccuacaacucccgcuucgaguccgucgccugguccgccuccgccugccacgacggcaucaacuggcucaccaucggcaucuccggccccgacaacggcgccgucgccguccucaaguacaacggcaucaucaccgacaccaucaaguccuggcgcaacaacauccuccgcacccaggaguccgagugcgccugcgucaacggcuccugcuucaccaucaugaccgacggccccuccgacggccaggccuccuacaagaucuuccgcaucgagaagggcaagaucgucaaguccgucgagaugaacgcccccaacuaccacuacgaggagugcuccugcuaccccgacuccuccgagaucaccugcgucugccgcgacaacuggcacggcuccaaccgccccugggucuccuucaaccagaaccucgaguaccagaucggcuacaucugcuccggcaucuucggcgacaacccccgccccaacgacaagaccggcuccugcggccccgucuccuccaacggcgccaacggcgucaagggcuucuccuucaaguacggcaacggcgucuggaucggccgcaccaaguccaucuccucccgcaagggcuucgagaugaucugggaccccaacggcuggaccggcaccgacaacaacuucuccaucaagcaggacaucgucggcaucaacgagugguccggcuacuccggcuccuucguccagcaccccgagcucaccggccucgacugcauccgccccugcuucugggucgagcucauccgcggccgccccaaggagaacaccaucuggaccuccggcuccuccauguccuucugcggcgucaacuccgacaccgucggcugguccuggcccgacggcgccgagcuccccuucaccaucgacaaguga

SEQ ID NO: 121196 - RNA, 1410 nt, Artificial Sequence; identical to SEQ ID NO: 116293
  derived and/or modified CDS sequence (opt2) from neuraminidase__InfluenzaA__AHM98529

SEQ ID NO: 121197 - RNA, 1410 nt, Artificial Sequence; identical to SEQ ID NO: 117037
  derived and/or modified CDS sequence (opt2) from neuraminidase__InfluenzaA__AHM98540

SEQ ID NO: 121198 - RNA, 1410 nt, Artificial Sequence
  derived and/or modified CDS sequence (opt2) from neuraminidase__InfluenzaA__AHM98562
augaaccccaaccagaagaucaucaccaucggcuccgucugcaugaccaucggcauggccaaccucauccuccagaucggcaacaucaucuccaucuggaucucccacuccauccagcucggcaaccagaaccagaucgagaccugcaaccaguccgucaucaccuacgagaacaacaccugggucaaccagaccuacgucaacaucuccaacaccaacuucgccgccggccaguccgucgucuccgucaagcucgccggcaacuccucccucugccccgucuccggcugggccaucuacuccaaggacaacuccauccgcaucggcuccaagggcgacgucuucgucauccgcgagcccuucaucuccugcuccccccucgagugccgcaccuucuuccucacccagggcgcccuccucaacgacaagcacuccaacggcaccaucaaggaccgcucccccuaccgcacccucauguccugccccaucggcgagguccccucccccuacaacucccgcuucgaguccgucgccugguccgccuccgccugccacgacggcaucaacuggcucaccaucggcaucuccggccccgacaacggcgccgucgccguccucaaguacaacggcaucaucaccgacaccaucaaguccuggcgcaacaacauccuccgcacccaggaguccgagugcgccugcgucaacggcuccugcuucaccaucaugaccgacggccccuccgacggccaggccuccuacaagaucuuccgcaucgagaagggcaagaucgucaaguccgucgagaugaacgcccccaacuaccacuacgaggagugcuccugcuaccccgacuccuccgagaucaccugcgucugccgcgacaacuggcacggcuccaaccgccccugggucuccuucaaccagaaccucgaguaccagaucggcuacaucugcuccggcaucuucggcgacaacccccgccccaacgacaaggccggcuccugcggccccgucuccuccaacggcgccaacggcgucaagggcuucuccuucaaguacggcaacggcgucuggaucggccgcaccaaguccaucuccucccgcaagggcuucgagaugaucugggaccccaacggcuggaccggcaccgacaacaacuucuccaucaagcaggacaucgucggcaucaacgagugguccggcuacuccggcuccuucguccagcaccccgagcucaccggccucgacugcauccgccccugcuucugggucgagcucauccgcggccgccccaaggagaacaccaucuggaccuccggcuccuccaucuccuucugcggcgucaacuccuacaccgucggcugguccuggcccgacggcgccgagcuccccuucaccaucgacaaguga

SEQ ID NO: 121199 - RNA, 1410 nt, Artificial Sequence; identical to SEQ ID NO: 121188
  derived and/or modified CDS sequence (opt2) from neuraminidase__InfluenzaA__AHM98573

SEQ ID NO: 121200 - RNA, 1410 nt, Artificial Sequence
  derived and/or modified CDS sequence (opt2) from neuraminidase__InfluenzaA__AHM98584
augaaccccaaccagaagaucaucaccaucggcuccgucugcaugaccaucggcauggccaaccucauccuccagaucggcaacaucaucuccaucuggaucucccacuccauccagcucggcaaccagucccagaucgagaccugcaaccaguccgucaucaccuacgagaacaacaccuggaucaaccagaccuacgucaacaucuccaacaccaacuucgccgccggccaguccgucgucuccgucaagcucgccggcaacuccucccucugccccgucuccggcugggccaucuacuccaaggacaacuccauccgcaucggcuccaagggcgacgucuucgucauccgcgagcccuucaucuccugcuccccccucgagugccgcaccuucuuccucacccagggcgcccuccucaacgacaagcacuccaacggcaccaucaaggaccgcucccccuaccgcacccucauguccugccccaucggcgagguccccucccccuacaacucccgcuucgaguccgucgccugguccgccuccgccugccacgacggcaucaacuggcucaccaucggcaucuccggccccgacaacggcgccgucgccguccuccgcuacaacggcaucaucaccgacaccaucaaguccuggcgcaacaacauccuccgcacccaggaguccgagugcgccugcgucaacggcuccugcuucaccaucaugaccgacggccccuccgacggccaggccuccuacaagaucuuccgcaucgagaagggcaagaucgucaaguccgucgagaugaacgcccccaacuaccacuacgaggagugcuccugcuaccccgacuccuccgagaucaccugcgucugccgcgacaacuggcacggcuccaaccgccccugggucuccuucaaccagaaccucgaguaccagaucggcuacaucugcuccggcaucuucggcgacaacccccgccccaacgacaagaccggcuccugcggccccgucuccuccaacggcgccaacggcgucaagggcuucuccuucaaguacggcaacggcgucuggaucggccgcaccaaguccaucuccucccgcaagggcuucgagaugaucugggaccccaacggcuggaccggcaccgacaacuccuucuccaucaagcaggacaucgucggcaucaacgagugguccggcuacuccggcuccuucguccagcaccccgagcucaccggccucgacugcauccgccccugcuucugggucgagcucauccgcggccgccccaaggagaacaccaucuggaccuccggcuccuccaucuccuucugcggcgucaacuccgacaccgucggcugguccuggcccgacggcgccgagcuccccuucaccaucgacaaguga

SEQ ID NO: 121201 - RNA, 1410 nt, Artificial Sequence; identical to SEQ ID NO: 121188
  derived and/or modified CDS sequence (opt2) from neuraminidase__InfluenzaA__AHM98595

SEQ ID NO: 121202 - RNA, 1410 nt, Artificial Sequence; identical to SEQ ID NO: 116745
  derived and/or modified CDS sequence (opt2) from neuraminidase__InfluenzaA__AHM98606

SEQ ID NO: 121203 - RNA, 1410 nt, Artificial Sequence
  derived and/or modified CDS sequence (opt2) from neuraminidase__InfluenzaA__AHM98617
augaaccccaaccagaagaucaucaccaucggcuccgucugcaugaccaucggcauggccaaccucauccuccagaucggcaacaucaucuccaucuggaucucccacuccauccagcucggcaaccagucccagaucgagaccugcaaccaguccgucaucaccuacgagaacaacaccuggaucaaccagaccuacgucaacaucuccaacaccaacuucgccgccggccaguccgucgucuccgucaagcucgccggcaacuccucccucugccccgucuccggcugggccaucuacuccaaggacaacuccauccgcaucggcuccaagggcgacgucuucgucauccgcgagcccuucaucuccugcuccccccucggcugccgcaccuucuuccucacccagggcgcccuccucaacgacaagcacuccaacggcaccaucaaggaccgcucccccuaccgcacccucauguccugccccaucggcgagguccccucccccuacaacucccgcuucgaguccgucgccugguccgccuccgccugccacgacggcaucaacuggcucaccaucggcaucuccggccccgacaacggcgccgucgccguccucaaguacaacggcaucaucaccgacaccaucaaguccuggcgcaacaacauccuccgcacccaggaguccgagugcgccugcgucaacggcuccugcuucaccaucaugaccgacggccccuccgacggccaggccuccuacaagaucuuccgcaucgagaagggcaagaucgucaaguccgucgagaugaacgcccccaacuaccacuacgaggagugcuccugcuaccccgacuccuccgagaucaccugcgucugccgcgacaacuggcacggcuccaaccgccccugggucuccuucaaccagaaccucgaguaccagaucggcuacaucugcuccggcaucuucggcgacaacccccgccccaacgacaagaccggcuccugcggccccgucuccuccaacggcgccaacggcgucaagggcuucuccuucaaguacggcaacggcgucuggaucggccgcaccaaguccaucuccucccgcaagggcuucgagaugaucugggaccccaacggcuggaccggcaccgacaacuccuucuccaucaagcaggacaucgucggcaucaacgagugguccggcuacuccggcuccuucguccagcaccccgagcucaccggccucgacugcauccgccccugcuucugggucgagcucauccgcggccgccccaaggagaacaccaucuggaccuccggcuccuccaucuccuucugcggcgucaacuccgacaccgucggcugguccuggcccgacggcgccgagcuccccuucaccaucgacaaguga

SEQ ID NO: 121204 - RNA, 1410 nt, Artificial Sequence; identical to SEQ ID NO: 121186
  derived and/or modified CDS sequence (opt2) from neuraminidase__InfluenzaA__AHM98628

SEQ ID NO: 121205 - RNA, 1410 nt, Artificial Sequence
  derived and/or modified CDS sequence (opt2) from neuraminidase__InfluenzaA__AHM98639
augaaccccaaccagaagaucaucaccaucggcuccgucugcaugaccaucggcauggccaaccucauccuccagaucggcaacaucaucuccaucuggaucucccacuccauccagcucggcaaccagucccagaucgagaccugcaaccaguccgucaucaucuacgagaacaacaccuggaucaaccagaccuacgucaacaucuccaacaccaacuucgccgccgagcaguccgucgucuccgucaagcucgccggcaacuccucccucugccccgucuccggcugggccaucuacuccaaggacaacuccauccgcaucggcuccaagggcgacgucuucgucauccgcgagcccuucaucuccugcuccccccucgagugccgcaccuucuuccucacccagggcgcccuccucaacgacaagcacuccaacggcaccaucaaggaccgcucccccuaccgcacccucauguccugccccaucggcgagguccccucccccuacaacucccgcuucgaguccgucgccugguccgccuccgccugccacgacggcaucaacuggcucaccaucggcaucuccggccccgacaacggcgccgucgccguccucaaguacaacggcaucaucaccgacaccaucaaguccuggcgcaacaacauccuccgcacccaggaguccgagugcgccugcgucaacggcuccugcuucaccaucaugaccgacggccccuccgacggccaggccuccuacaagaucuuccgcaucgagaagggcaagaucgucaaguccgucgagaugaacgcccccaacuaccacuacgaggagugcuccugcuaccccgacuccuccgagaucaccugcgucugccgcgacaacuggcacggcuccaaccgccccugggucuccuucaaccagaaccucgaguaccagaucggcuacaucugcuccggcaucuucggcgacaacccccgccccaacgacaagaccggcuccugcggccccgucuccuccaacggcgccaacggcgucaagggcuucuccuucaaguacggcaacggcgucuggaucggccgcaccaaguccaucuccucccgcaagggcuucgagaugaucugggaccccaacggcuggaccggcaccgacaacuccuucuccaucaagcaggacaucgucggcaucaacgagugguccggcuacuccggcuccuucguccagcaccccgagcucaccggccucgacugcauccgccccugcuucugggucgagcucauccgcggccgccccaaggagaacaccaucuggaccuccggcuccuccaucuccuucugcggcgucaacuccgacaccgucggcugguccuggcccgacggcgccgagcuccccuucaccaucgacaaguga

SEQ ID NO: 121206 - RNA, 1410 nt, Artificial Sequence; identical to SEQ ID NO: 116745
  derived and/or modified CDS sequence (opt2) from neuraminidase__InfluenzaA__AHM98650

SEQ ID NO: 121207 - RNA, 1410 nt, Artificial Sequence; identical to SEQ ID NO: 116745
  derived and/or modified CDS sequence (opt2) from neuraminidase__InfluenzaA__AHM98661

SEQ ID NO: 121208 - RNA, 1410 nt, Artificial Sequence
  derived and/or modified CDS sequence (opt2) from neuraminidase__InfluenzaA__AHM98672
augaaccccaaccagaagaucaucaccaucggcuccgucugcaugaccaucggcauggccaaccucauccuccagaucggcaacaucaucuccaucuggaucucccacuccauccagcucggcaaccagucccagaucgagaccugcaaccagaacgucaucaccuacgagaacaacaccugggucaaccagaccuacgucaacaucuccaacaccaacuucgccgccgagcaguccgucguccccgucaagcucgccggcaacuccucccucugccccgucuccggcugggccaucuacuccaaggacaacuccauccgcaucggcuccaagggcgacgucuucgucauccgcgagcccuucaucuccugcuccccccucgagugccgcaccuucuuccucacccagggcgcccuccucaacgacaagcacuccaacggcaccaucaaggaccgcucccccuaccgcacccucauguccugccccaucggcgagguccccucccccuacaacucccgcuucgaguccgucgccugguccgccuccgccugccacgacggcaucaacuggcucaccaucggcaucuccggccccgacaacggcgccgucgccguccucaaguacaacggcaucaucaccgacaccaucaaguccuggcgcaacaacauccuccgcacccaggaguccgagugcgccugcgucaacggcuccugcuucaccaucaugaccgacggccccuccgacggccaggccuccuacaagaucuuccgcaucgagaagggcaagaucgucaaguccgucgagaugaacgcccccaacuaccacuacgaggagugcuccugcuaccccgacuccuccgagaucaccugcgucugccgcgacaacuggcacggcuccaaccgccccugggucuccuucaaccagaaccucgaguaccagaucggcuacaucugcuccggcaucuucggcgacaacccccgccccaacgacaagaccggcuccugcggccccgucuccuccaacggcgccaacggcgucaagggcuucuccuucaaguacggcaacggcgucuggaucggccgcaccaaguccaucuccucccgcaagggcuucgagaugaucugggaccccaacggcuggaccggcaccgacaacaacuucuccaucaagcaggacaucgucggcaucaacgagugguccggcuacuccggcuccuucguccagcaccccgagcucaccggccucgacugcauccgccccugcuucugggucgagcucauccgcggccgccccaaggagaacaccaucuggaccuccggcuccuccaucuccuucugcggcgucaacuccgacaccgucggcugguccuggcccgacggcgccgagcuccccuucaccaucgacaaguga

SEQ ID NO: 121209 - RNA, 1410 nt, Artificial Sequence
  derived and/or modified CDS sequence (opt2) from neuraminidase__InfluenzaA__AHM98683
augaaccccaaccagaagaucaucaccaucggcuccgucugcaugaccaucggcauggccaaccucauccuccagaucggcaacaucaucuccaucuggaucucccacuccauccagcucggcaaccagaaccagaucgagaccugcaaccaguccgucaucaccuacgagaacaacaccugggucaaccagaccuacgucaacaucuccaacaccaacuucgacgccggccaguccgucgucuccguccgccucgccggcaacuccucccucugccccgucuccggcugggccaucuacuccaaggacaacuccauccgcaucggcuccaagggcgacgucuucgucauccgcgagcccuucaucuccugcuccccccucgagugccgcaccuucuuccucacccagggcgcccuccucaacgacaagcacuccaacggcaccaucaaggaccgcucccccuaccgcacccucauguccugccccaucggcgagguccccucccccuacaacucccgcuucgaguccgucgccugguccgccuccgccugccacgacggcuucaacuggcucaccaucggcaucuccggccccgacaacggcgccgucgccguccucaaguacaacggcaucaucaccgacaccauccgcuccuggcgcaacaacauccuccgcacccaggaguccgagugcgccugcgucaacggcuccugcuucaccaucaugaccgacggccccuccgacggccaggccuccuacaagaucuuccgcaucgagaagggcaagaucgucaaguccgucgagaugaacgcccccaacuaccacuacgaggagugcuccugcuaccccgacuccuccgagaucaccugcgucugccgcgacaacuggcacggcuccaaccgccccugggucuccuucaaccagaaccucgaguaccagaucggcuacaucugcuccggcaucuucggcgacaacccccgccccaacgacaagaccggcuccugcggccccgucuccuccaacggcgccaacggcgucaagggcuucuccuucaaguacggcaacggcgucuggaucggccgcaccaaguccaucuccucccgcaagggcuucgagaugaucugggaccccaacggcuggaccggcaccgacaacaacuucuccaucaagcaggacaucgucggcaucaacgagugguccggcuacuccggcuccuucguccagcaccccgagcucaccggccucgacugcauccgccccugcuucugggucgagcucauccgcggccgccccaaggagaacaccaucuggaccuccggcuccuccaucuccuucugcggcgucaacuccgacaccgucggcugguccuggcccgacggcgccgagcuccccuucaccaucgacaaguga

SEQ ID NO: 121210 - RNA, 1410 nt, Artificial Sequence; identical to SEQ ID NO: 116745
  derived and/or modified CDS sequence (opt2) from neuraminidase__InfluenzaA__AHM98693

SEQ ID NO: 121211 - RNA, 1410 nt, Artificial Sequence; identical to SEQ ID NO: 119194
  derived and/or modified CDS sequence (opt2) from neuraminidase__InfluenzaA__AHM98704

SEQ ID NO: 121212 - RNA, 1410 nt, Artificial Sequence; identical to SEQ ID NO: 119194
  derived and/or modified CDS sequence (opt2) from neuraminidase__InfluenzaA__AHM98715

SEQ ID NO: 121213 - RNA, 1410 nt, Artificial Sequence; identical to SEQ ID NO: 116745
  derived and/or modified CDS sequence (opt2) from neuraminidase__InfluenzaA__AHM98726

SEQ ID NO: 121214 - RNA, 1410 nt, Artificial Sequence
  derived and/or modified CDS sequence (opt2) from neuraminidase__InfluenzaA__AHM98737
augaaccccaaccagaagaucaucaccaucggcuccgucugcaugaccaucggcauggccaaccucauccuccagaucggcaacaucaucuccaucuggaucucccacuccauccagcuccgcaaccagucccagaucgagaccugcaaccaguccgucaucaacuacgagaacaacaccugggucaaccagaccuacgucaacaucuccaacaccaacuucgccgccggccaguccgucgucuccgucaagcucgccggcaacuccucccucugccccgucuccggcugggccaucuacuccaaggacaacuccauccgcaucggcuccaagggcgacgucuucgucauccgcgagcccuucgucuccugcuccccccucgagugccgcaccuucuuccucacccagggcgcccuccucaacgacaagcacuccaacggcaccaucaaggaccgcucccccuaccgcacccucauguccugccccaucggcgagguccccucccccuacaacucccgcuucgaguccgucgccugguccgccuccgccugccacgacggcaucaacuggcucaccaucggcaucuccggccccgacaacggcgccgucgccguccucaaguacaacggcaucaucaccgacaccaucaaguccuggcgcaacgacauccuccgcacccaggaguccgagugcgccugcgucaacggcuccugcuucaccaucaugaccgacggccccuccgacggccaggccuccuacaagaucuuccgcaucgagaagggcaagaucgucaaguccgucgagaugaacgcccccaacuaccacuacgaggagugcuccugcuaccccgacuccuccgagaucaccugcgucugccgcgacaacuggcacggcuccaaccgccccugggucuccuucaaccagaaccucgaguaccagaucggcuacaucugcuccggcaucuucggcgacaacccccgccccaacgacaagaccggcuccugcggccccgucuccuccaacggcgccaacggcgucaagggcuucuccuucaaguacggcaacggcgucuggaucggccgcaccaaguccaucuccucccgcaagggcuucgagaugaucugggaccccaacggcuggaccggcaccgacaacaacuucuccaucaagcaggacaucgucggcaucaacgagugguccggcuacuccggcuccuucguccagcaccccgagcucaccggccucgacugcauccgccccugcuucugggucgagcucauccgcggccgccccaaggagaacaccaucuggaccuccggcuccuccaucuccuucugcggcgucaacuccgacaccgucggcugguccuggcccgacggcgccgagcuccccuucaccaucgacaaguga

SEQ ID NO: 121215 - RNA, 1410 nt, Artificial Sequence; identical to SEQ ID NO: 119194
  derived and/or modified CDS sequence (opt2) from neuraminidase__InfluenzaA__AHM98748

SEQ ID NO: 121216 - RNA, 1410 nt, Artificial Sequence; identical to SEQ ID NO: 119194
  derived and/or modified CDS sequence (opt2) from neuraminidase__InfluenzaA__AHM98759

SEQ ID NO: 121217 - RNA, 1410 nt, Artificial Sequence
  derived and/or modified CDS sequence (opt2) from neuraminidase__InfluenzaA__AHM98770
augaaccccaaccagaagaucaucaccaucggcuccgucugcaugaccaucggcauggccaaccucauccuccagaucggcaacaucaucuccaucuggaucucccacuccauccagcuccgcaaccagucccagaucgagaccugcaaccaguccgccaucaccuacgagaacaacaccugggucaaccagaccuacgucaacaucuccaacaccaacuucgccgccggccaguccgucgucuccgucaagcucgccggcaacuccucccucugccccgucuccggcugggccaucuacuccaaggacaacuccauccgcaucggcuccaagggcgacgucuucgucauccgcgagcccuucaucuccugcuccccccucgagugccgcaccuucuuccucacccagggcgcccuccucaacgacaagcacuccaacggcaccaucaaggaccgcucccccuaccgcacccucauguccugccccaucggcgagguccccucccccuacaacucccgcuucgaguccgucgccugguccgccuccgccugccacgacggcaucaacuggcucaccaucggcaucuccggccccgacaacggcgccgucgccguccucaaguacaacggcaucaucaccgacaccaucaaguccuggcgcaacaacauccuccgcacccaggaguccgagugcgccugcgucaacggcuccugcuucaccaucaugaccgacggccccuccgacggccaggccuccuacaagaucuuccgcaucgagaagggcaagaucgucaaguccgucgagaugaacgcccccaacuaccacuacgaggagugcuccugcuaccccgacuccuccgagaucaccugcgucugccgcgacaacuggcacggcuccaaccgccccugggucuccuucaaccagaaccucgaguaccagaucggcuacaucugcuccggcaucuucggcgacaacccccgccccaacgacaagaccggcuccugcggccccgucuccuccaacggcgccaacggcgucaagggcuucuccuucaaguacggcaacggcgucuggaucggccgcaccaaguccaucuccucccgcaagggcuucgagaugaucugggaccccaacggcuggaccggcaccgacaacaacuucuccaucaagcaggacaucgucggcaucaacgagugguccggcuacuccggcuccuucguccagcaccccgagcucaccggccucgacugcauccgccccugcuucugggucgagcucauccgcggccgccccaaggagaacaccaucuggaccuccggcuccuccaucuccuucugcggcgucaacuccgacaccgucggcugguccuggcccgacggcgccgagcuccccuucaccaucgacaaguga

SEQ ID NO: 121218 - RNA, 1410 nt, Artificial Sequence
  derived and/or modified CDS sequence (opt2) from neuraminidase__InfluenzaA__AHM98781
augaaccccaaccagaagaucaucaccaucggcuccgucugcaugaccaucggcauggccaaccucauccuccagaucggcaacaucaucuccaucuggaucucccacuccauccagcucggcaaccagaaccagaucgagaccugcaaccaguccgucaucaccuacgagaacaacaccugggucaaccagaccuacgucaacaucuccaacaccaacuucgccgccggccaguccgucgucuccgucaagcucgccggcaacuccucccucugccccgucuccggcugggccaucuacuccaaggacaacuccauccgcaucggcuccaagggcgacgucuucgucauccgcgagcccuucaucuccugcuccccccucgagugccgcaccuucuuccucacccagggcgcccuccucaacgacaagcacuccaacggcaccaucaaggaccgcucccccuaccgcacccucauguccugccccaucggcgagguccccucccccuacaacucccgcuucgaguccgucgccugguccgccuccgccugccacgacggcaucaacuggcucaccaucggcaucuccggccccgacaacggcgccgucgccguccucaaguacaacggcaucaucaccgacaccaucaaguccuggcgcaacaacauccuccgcacccaggaguccgagugcgccugcgucaacggcuccugcuucaccaucaugaccgacggccccuccgacggccaggccuccuacaagaucuuccgcaucgagaagggcaagaucgucaaguccgucgagaugaacgcccccaacuaccacuacgaggagugcuccugcuaccccgacuccuccgagaucaccugcgucugccgcgacaacuggcacggcuccaaccgccccugggucuccuucaaccagaaccucgaguaccagaucggcuacaucugcuccggcaucuucggcgacaacccccgccccuccgacaagaccggcuccugcggccccgucuccuccaacggcgccaacggcgucaagggcuucuccuucaaguacggcaacggcgucuggaucggccgcaccaaguccaucuccucccgcaagggcuucgagaugaucugggaccccaacggcuggaccggcaccgacaacuccuucuccaucaagcaggacaucgucggcaucaacgagugguccggcuacuccggcuccuucguccagcaccccgagcucaccggccucgacugcauccgccccugcuucugggucgagcucauccgcggccgccccaaggagaacaccaucuggaccuccggcuccuccaucuccuucugcggcgucaacuccggcaccgucggcugguccuggcccgacggcgccgagcuccccuucaccaucgacaaguga

SEQ ID NO: 121219 - RNA, 1410 nt, Artificial Sequence; identical to SEQ ID NO: 116745
  derived and/or modified CDS sequence (opt2) from neuraminidase__InfluenzaA__AHM98801

SEQ ID NO: 121220 - RNA, 1410 nt, Artificial Sequence; identical to SEQ ID NO: 116293
  derived and/or modified CDS sequence (opt2) from neuraminidase__InfluenzaA__AHM98812

SEQ ID NO: 121221 - RNA, 1410 nt, Artificial Sequence
  derived and/or modified CDS sequence (opt2) from neuraminidase__InfluenzaA__AHM98823
augaaccccaaccagaagaucaucaccaucggcuccgucugcaugaccaucggcauggccaaccucauccuccagaucggcaacaucaucuccaucuggaucucccacuccauccagcucggcaaccagucccagaucgagaccugcaaccaguccgucaucaccuacgagaacaacaccugggucaaccagaccuacaucaacaucuccaacaccaacuucgccgccggccaguccgucgucuccgucaagcucgccggcaacuccucccucugccccgucuccggcugggccaucuacuccaaggacaacuccauccgcaucggcuccaagggcgacgucuucgucauccgcgagcccuucaucuccugcucccccuccgagugccgcaccuucuuccucacccagggcgcccuccucaacgacaagcacuccaacggcaccaucaaggaccgcucccccuaccgcacccucauguccugccccaucggcgagguccccucccccuacaacucccgcuucgaguccgucgccugguccgccuccgccugccacgacggcaucaacuggcucaccaucggcaucuccggccccgacaacggcgccgucgccguccucaaguacaacggcaucaucaccgacaccaucaaguccuggcgcaacaacauccuccgcacccaggaguccgagugcgccugcgucaacggcuccugcuucaccaucaugaccgacggccccuccgacggccaggccuccuacaagaucuuccgcaucgagaagggcaagaucgucaaguccgucgagaugaacgcccccaacuaccacuacgaggagugcuccugcuaccccgacuccuccgagaucaccugcgucugccgcgacaacuggcacggcuccaaccgccccugggucuccuucaaccagaaccucgaguaccagaucggcuacaucugcuccggcaucuucggcgacaacccccgccccaacgacaagaccggcuccugcggccccgucuccuccaacggcgccaacggcgucaagggcuucuccuucaaguacggcaacggcgucuggaucggccgcaccaaguccaucuccucccgcaagggcuucgagaugaucugggaccccaacggcuggaccggcaccgacaacaacuucuccaucaagcaggacaucgucggcaucaacgagugguccggcuacuccggcuccuucguccagcaccccgagcucaccggccucgacugcauccgccccugcuucugggucgagcucauccgcggccgccccaaggagaacaccaucuggaccuccggcuccuccaucuccuucugcggcgucaacuccgacaccgucggcugguccuggcccgacggcgccgagcuccccuucaccaucgacaaguga

SEQ ID NO: 121222 - RNA, 1410 nt, Artificial Sequence
  derived and/or modified CDS sequence (opt2) from neuraminidase__InfluenzaA__AHM98839
augaaccccaaccagaagaucaucaccaucggcuccgucugcaugaccgucggcauggccaaccucauccuccagaucggcaacaucaucuccaucuggaucucccacuccauccagcucggcaaccagucccagaucgagaccugcaaccaguccgucaucaccuacgagaacaacaccugggucaaccagaccuacgucaacaucuccaacaccaacuucgccgccggccaguccgucgucuccgucaagcucgccggcaacuccucccucugccccgucuccggcugggccaucuacuccaaggacaacuccauccgcaucggcuccaagggcgacgucuucgucauccgcgagcccuucaucuccugcuccccccucgagugccgcaccuucuuccucacccagggcgcccuccucaacgacaagcacuccaacggcaccaucaaggaccgcucccccuaccgcacccucauguccugccccaucggcgagguccccucccccuacaacucccgcuucgaguccgucgccugguccgccuccgccugccacgacggcaucaacuggcucaccaucggcaucuccggccccgacaacggcgccgucgccguccucaaguacaacggcaucaucaccgacaccaucaaguccuggcgcaacaacauccuccgcacccaggaguccgagugcgccugcgucaacggcuccugcuucaccaucaugaccgacggccccuccgacggccaggccuccuacaagaucuuccgcaucgagaagggcaagaucgucaaguccgucgagaugaacgcccccaacuaccacuacgaggagugcuccugcuaccccgacuccuccgagaucaccugcgucugccgcgacaacuggcacggcuccaaccgccccugggucuccuucaaccagaaccucgaguaccagaucggcuacaucugcuccggcaucuucggcgacaacccccgccccaacgacaagaccggcuccugcggccccgucuccuccaacggcgccaacggcgucaagggcuucuccuucaaguacggcaacggcgucuggaucggccgcaccaaguccaucuccucccgcaagggcuucgagaugaucugggaccccaacggcuggaccggcaccgacaacaacuucuccaucaagcaggacaucgucggcaucaacgagugguccggcuacuccggcuccuucguccagcaccccgagcucaccggccucgacugcauccgccccugcuucugggucgagcucauccgcggccgccccaaggagaacaccaucuggaccuccggcuccuccaucuccuucugcggcgucaacuccgacaccgucggcugguccuggcccgacggcgccgagcuccccuucaccaucgacaaguga

SEQ ID NO: 121223 - RNA, 1410 nt, Artificial Sequence; identical to SEQ ID NO: 116293
  derived and/or modified CDS sequence (opt2) from neuraminidase__InfluenzaA__AHM98850

SEQ ID NO: 121224 - RNA, 1410 nt, Artificial Sequence; identical to SEQ ID NO: 116293
  derived and/or modified CDS sequence (opt2) from neuraminidase__InfluenzaA__AHM98861

SEQ ID NO: 121225 - RNA, 1410 nt, Artificial Sequence
  derived and/or modified CDS sequence (opt2) from neuraminidase__InfluenzaA__AHM98901
augaaccccaaccagaagaucaucaccaucggcuccgucugcaugaccaucggcauggccaaccucauccuccagaucggcaacaucaucuccaucuggaucucccacuccauccagcucggcaaccagaaccagaucgagaccugcaaccaguccgucaucaccuacgagaacaacaccugggucaaccagaccuacgucaacaucuccaacaccaacuucgccgccggccaguccgucgucuccgucaagcucgccggcaacuccucccucugccccgucuccggcugggccaucuacuccaaggacaacuccauccgcaucggcuccaagggcgacgucuucgucauccgcgagcccuucaucuccugcuccccccucgagugccgcaccuucuuccucacccagggcgcccuccucaacgacaagcacuccaacggcaccaucaaggaccgcuccccccaccgcacccucauguccugccccaucggcgagguccccucccccuacaacucccgcuucgaguccgucgccugguccgccuccgccugccacgacggcaucaacuggcucaccaucggcaucuccggccccgacaacggcgccgucgccguccucaaguacaacggcaucaucaccgacaccaucaaguccuggcgcaacaacauccuccgcacccaggaguccgagugcgccugcgucaacggcuccugcuucaccaucaugaccgacggccccuccgacggccaggccuccuacaagaucuuccgcaucgagaagggcaagaucgucaaguccgucgagaugaacgcccccaacuaccacuacgaggagugcuccugcuaccccgacuccuccgagaucaccugcgucugccgcgacaacuggcacggcuccaaccgccccugggucuccuucaaccagaaccucgaguaccagaucggcuacaucugcuccggcaucuucggcgacaacccccgccccaacgacaagaccggcuccugcggccccgucuccuccaacggcgccaacggcgucaagggcuucuccuucaaguacggcaacggcgucuggaucggccgcaccaaguccaucuccucccgcaagggcuucgagaugaucugggaccccaacggcuggaccggcaccgacaacaacuucuccaucaagcaggacaucgucggcaucaacgagugguccggcuacuccggcuccuucguccagcaccccgagcucaccggccucgacugcauccgccccugcuucugggucgagcucauccgcggccgccccaaggagaacaccaucuggaccuccggcuccuccaucuccuucugcggcgucaacuccgacaccgucggcugguccuggcccgacggcgccgagcuccccuucaccaucgacaaguga

SEQ ID NO: 121226 - RNA, 1410 nt, Artificial Sequence; identical to SEQ ID NO: 119882
  derived and/or modified CDS sequence (opt2) from neuraminidase__InfluenzaA__AHM98912

SEQ ID NO: 121227 - RNA, 1410 nt, Artificial Sequence; identical to SEQ ID NO: 119882
  derived and/or modified CDS sequence (opt2) from neuraminidase__InfluenzaA__AHM98923

SEQ ID NO: 121228 - RNA, 1410 nt, Artificial Sequence; identical to SEQ ID NO: 119882
  derived and/or modified CDS sequence (opt2) from neuraminidase__InfluenzaA__AHM98935

SEQ ID NO: 121229 - RNA, 1410 nt, Artificial Sequence; identical to SEQ ID NO: 119882
  derived and/or modified CDS sequence (opt2) from neuraminidase__InfluenzaA__AHM98943

SEQ ID NO: 121230 - RNA, 1410 nt, Artificial Sequence; identical to SEQ ID NO: 119882
  derived and/or modified CDS sequence (opt2) from neuraminidase__InfluenzaA__AHM98954

SEQ ID NO: 121231 - RNA, 1410 nt, Artificial Sequence; identical to SEQ ID NO: 119882
  derived and/or modified CDS sequence (opt2) from neuraminidase__InfluenzaA__AHM98972

SEQ ID NO: 121232 - RNA, 1410 nt, Artificial Sequence; identical to SEQ ID NO: 119882
  derived and/or modified CDS sequence (opt2) from neuraminidase__InfluenzaA__AHM98978

SEQ ID NO: 121233 - RNA, 1410 nt, Artificial Sequence; identical to SEQ ID NO: 119882
  derived and/or modified CDS sequence (opt2) from neuraminidase__InfluenzaA__AHM98990

SEQ ID NO: 121234 - RNA, 1410 nt, Artificial Sequence; identical to SEQ ID NO: 119882
  derived and/or modified CDS sequence (opt2) from neuraminidase__InfluenzaA__AHM99000

SEQ ID NO: 121235 - RNA, 1410 nt, Artificial Sequence; identical to SEQ ID NO: 119882
  derived and/or modified CDS sequence (opt2) from neuraminidase__InfluenzaA__AHM99011

SEQ ID NO: 121236 - RNA, 1410 nt, Artificial Sequence; identical to SEQ ID NO: 119858
  derived and/or modified CDS sequence (opt2) from neuraminidase__InfluenzaA__AHM99022

SEQ ID NO: 121237 - RNA, 1410 nt, Artificial Sequence; identical to SEQ ID NO: 119858
  derived and/or modified CDS sequence (opt2) from neuraminidase__InfluenzaA__AHM99034

SEQ ID NO: 121238 - RNA, 1410 nt, Artificial Sequence; identical to SEQ ID NO: 119858
  derived and/or modified CDS sequence (opt2) from neuraminidase__InfluenzaA__AHM99046

SEQ ID NO: 121239 - RNA, 1410 nt, Artificial Sequence; identical to SEQ ID NO: 119858
  derived and/or modified CDS sequence (opt2) from neuraminidase__InfluenzaA__AHM99057

SEQ ID NO: 121240 - RNA, 1410 nt, Artificial Sequence; identical to SEQ ID NO: 119858
  derived and/or modified CDS sequence (opt2) from neuraminidase__InfluenzaA__AHM99068

SEQ ID NO: 121241 - RNA, 1410 nt, Artificial Sequence; identical to SEQ ID NO: 119882
  derived and/or modified CDS sequence (opt2) from neuraminidase__InfluenzaA__AHM99078

SEQ ID NO: 121242 - RNA, 1410 nt, Artificial Sequence
  derived and/or modified CDS sequence (opt2) from neuraminidase__InfluenzaA__AHN00720
augaacaccaaccagcgcaucaucaccaucggcaccaucugccucaucgucggcaucaucucccuccuccuccagaucggcaacaucgucucccucuggaucucccacuccauccagaccgaggagaagucccaccccgaggucugcaaccaguccgucaucaccuacgagaacaacaccugggucaaccagaccuacaucaacaucuccaacaccaacaucgccgccggccagggcgucacccccaucauccucgccggcaacuccucccucugccccaucuccggcugggccaucuacuccaaggacaacuccauccgcaucggcuccaagggcgacaucuucgucaugcgcgagcccuucaucuccugcucccaccucgagugccgcaccuucuuccucacccagggcgcccuccucaacgaccgccacuccaacggcaccgucaaggaccgcucccccuaccgcacccucauguccugccccaucggcgaggcccccucccccuacaacucccgcuucgaguccgucgccugguccgccuccgccugccacgacggcaugggcuggcucaccaucggcaucuccggccccgacaacggcgccgucgccguccucaaguacaacggcaucaucaccgacaccaugaaguccuggcgcaacaagauccuccgcacccaggaguccgagugcgucugcaucaacggcuccugcuucaccaucaugaccgacggccccuccaacggccaggccuccuacaagaucuucaagauggagaagggcaagaucaucaaguccaucgagcucgacgcccccaacuaccacuacgaggagugcuccugcuaccccgacaccggcaaggucgucugcgucugccgcgacaacuggcacgccuccaaccgccccugggucuccuucgaccagaaccucgacuaccagaucggcuacaucugcuccggcgucuucggcgacaacccccgcuccaacgacggcaagggcaacugcggccccguccucuccaacggcgccaacggcgucaagggcuucuccuuccgcuacggcaacggcgucuggaucggccgcaccaaguccaucuccucccgcuccggcuucgagaugaucugggaccccaacggcuggaccgagaccgacuccuccuucuccaugaagcaggacaucaucgcccucaccgacugguccggcuacuccggcuccuucguccagcaccccgagcucaccggcaugaacugcauccgccccugcuucugggucgagcucauccgcggccagcccaaggaguccaccaucuggaccuccggcuccuccaucuccuucugcggcgucaacuccgagaccgccuccugguccuggcccgacggcgccgaccuccccuucaccaucgacaaguga

SEQ ID NO: 121243 - RNA, 1410 nt, Artificial Sequence
  derived and/or modified CDS sequence (opt2) from neuraminidase__InfluenzaA__AHN00767
augaacaccaaccagcgcaucaucaccaucggcaccaucugccucaucgucggcaucaucucccuccuccuccagaucggcaacaucgucucccucuggaucucccacuccauccagaccggcgagaagucccaccccgaggucugcaaccaguccgucaucaccuacgagaacaacaccugggucaaccagaccuacgucaacaucuccaacaccaacaucgccgccggccagggcgucacccccaucauccucgccggcaacuccucccucugccccaucuccggcugggccaucuacuccaaggacaacuccauccgcaucggcuccaagggcgacaucuucgucaugcgcgagcccuucaucuccugcucccaccucgagugccgcaccuucuuccucacccagggcgcccuccucaacgaccgccacuccaacggcaccgucaaggaccgcucccccuaccgcacccucauguccugccccaucggcgaggcccccucccccuacaacucccgcuucgaguccgucgccugguccgccuccgccugccacgacggcaugggcuggcucaccaucggcaucuccggccccgacaacggcgccgucgccguccucaaguacaacggcaucaucaccgacaccaucaaguccuggcgcaacaagauccuccgcacccaggaguccgagugcgucugcaucaacggcuccugcuucaccaucaugaccgacggccccuccaacggccaggccuccuacaagaucuucaagauggagaagggcaagaucaucaaguccaucgagcucgacgcccccaacuaccacuacgaggagugcuccugcuaccccgacaccggcaaggucgucugcgucugccgcgacaacuggcacgccuccaaccgccccugggucuccuucgaccagaaccucgacuaccagaucggcuacaucugcuccggcgucuucggcgacaacccccgcuccaacgacggcaagggcaacugcggccccguccucuccaacggcgccaacggcgucaagggcuucuccuuccgcuacggcaacggcgucuggaucggccgcaccaaguccaucuccucccgcuccggcuucgagaugaucugggaccccaacggcuggaccgagaccgacuccuccuucuccaugaagcaggacaucaucgcccucaccgacugguccggcuacuccggcuccuucguccagcaccccgagcucaccggcaugaacugcauccgccccugcuucugggucgagcucauccgcggccagcccaaggaguccaccaucuggaccuccggcuccuccaucuccuucugcggcgucaacuccgagaccgccuccugguccuggcccgacggcgccgaccuccccuucaccaucgacaaguga

SEQ ID NO: 121244 - RNA, 1398 nt, Artificial Sequence
  derived and/or modified CDS sequence (opt2) from neuraminidase__InfluenzaA__AHN96324
augaaccccaaccagaagauccucugcaccuccgccaccgccaucaucaucggcgccaucgccguccucaucggcaucgccaaccucggccucaacaucggccuccaccucaagcccuccugcaacugcucccacucccagcccgagaccaccaacaccucccagaccaucaucaacaacuacuacaacgagaccaacaucaccaacauccagauggaggagcgcaccucccgcaacuucaacaaccucaccaagggccucugcaccaucaacuccuggcacaucuacggcaaggacaacgccguccgcaucggcgaguccuccgacguccucgucacccgcgagcccuacgucuccugcgaccccgacgagugccgcuucuacgcccucucccagggcaccaccauccgcggcaagcacuccaacggcaccauccacgaccgcucccaguaccgcgcccucaucuccuggccccucuccuccccccccaccgucuacaacucccgcgucgagugcaucggcugguccuccaccuccugccacgacggcaagucccgcauguccaucugcaucuccggccccaacaacaacgccuccgccgucgucugguacaaccgccgccccgucgccgagaucaacaccugggcccgcaacauccuccgcacccaggaguccgagugcgucugccacaacggcgucugccccgucgucuucaccgacggcuccgccaccggccccgccgacacccgcaucuacuacuucaaggagggcaagauccucaagugggagucccucaccggcaccgccaagcacaucgaggagugcuccugcuacggcgagcgcaccggcaucaccugcaccugccgcgacaacuggcagggcuccaaccgccccgucguccagaucgaccccgucgccaugacccacaccucccaguacaucugcucccccguccucaccgacaacccccgccccaacgaccccaacaucggcaagugcaacgaccccuaccccggcaacaacaacaacggcgucaagggcuucuccuaccucgacggcgccaacaccuggcucggccgcaccaucuccaccgccucccgcuccggcuacgagaugcucaagguccccaacgcccucaccgacgaccgcuccaagcccauccagggccagaccaucguccucaacgccgacugguccggcuacuccggcuccuucauggacuacugggccgagggcgacugcuaccgcgccugcuucuacgucgagcucauccgcggccgccccaaggaggacaaggucugguggaccuccaacuccaucgucuccaugugcuccuccaccgaguuccucggccaguggaacuggcccgacggcgccaagaucgaguacuuccucuga

SEQ ID NO: 121245 - RNA, 1410 nt, Artificial Sequence; identical to SEQ ID NO: 117179
  derived and/or modified CDS sequence (opt2) from neuraminidase__InfluenzaA__AHN96448

SEQ ID NO: 121246 - RNA, 1410 nt, Artificial Sequence; identical to SEQ ID NO: 118182
  derived and/or modified CDS sequence (opt2) from neuraminidase__InfluenzaA__AHN96450

SEQ ID NO: 121247 - RNA, 1410 nt, Artificial Sequence
  derived and/or modified CDS sequence (opt2) from neuraminidase__InfluenzaA__AHN96451
augaaccccaaccagaagaucaucaccaucggcuccgucucccucaccaucuccaccaucugcuucuucaugcagaucgccauccucaucaccaccgucacccuccacuucaagcaguacgaguucaacuccccccccaacaaccaggucaugcucugcgagcccaccaucaucgagcgcaacaucaccgagaucauguaccucaccaacaccaccaucgagaaggagaucugccccaagcccgccgaguaccgcaacugguccaagccccagugcggcaucaccggcuucgcccccuucuccaaggacaacuccauccgccucuccgccggcggcgacaucugggucacccgcgagcccuacgucuccugcgaccccgacaagugcuaccaguucgcccucggccagggcaccacccucaacaacguccacuccaacaacaccguccgcgaccgcacccccuaccgcacccuccucaugaacgagcucggcguccccuuccaccucggcaccaagcaggucugcaucgccugguccuccuccuccugccacgacggcaaggccuggcuccacgucugcaucaccggcgacgacaagaacgccaccgccuccuucaucuacaacggccgccucgucgacuccgucgucuccugguccaaggagauccuccgcacccaggaguccgagugcgucugcaucaacggcaccugcaccgucgucaugaccgacggcuccgccuccggcaaggccgacaccaagauccucuucaucgaggagggcaagaucguccacaccuccacccucuccggcuccgcccagcacgucgaggagugcuccugcuacccccgcuaccccggcguccgcugcgucugccgcgacaacuggaagggcuccaaccgccccaucgucgacaucaacaucaaggaccacuccaucgucuccuccuacgucugcuccggccucgucggcgacaccccccgcaagaacgacuccuccuccuccucccacugccucgaccccaacaacgaggagggcggccacggcgucaagggcugggccuucgacgacggcaacgacgucuggaugggccgcaccaucaacgagaccucccgccucggcuacgagaccuucaaggucaucgagggcugguccaaccccaaguccaagcuccagaucaaccgccaggucaucgucgaccgcggcgaccgcuccggcuacuccggcaucuucuccgucgagggcaaguccugcaucaaccgcugcuucuacgucgagcucauccgcggccgcaaggaggagaccgagguccucuggaccuccaacuccaucgucgucuucugcggcaccuccggcaccuacggcaccggcuccuggcccgacggcgccgaccucaaccucaugcccaucuga

SEQ ID NO: 121248 - RNA, 1410 nt, Artificial Sequence
  derived and/or modified CDS sequence (opt2) from neuraminidase__InfluenzaA__AHN96453
augaaccccaaccagaagaucaucaccaucggcuccgucucccucaccaucuccaccaucugcuucuucaugcagaucgccauccucaucaccaccgucacccuccacuucaagcaguacgaguucaacuccccccccaacaaccaggucaugcucugcgagcccaccaucaucgagcgcaacaucaccgagaucgucuaccucaccaacaccaccaucgagaaggagaucugccccaagcccgccgaguaccgcaacugguccaagccccagugcggcaucaccggcuucgcccccuucuccaaggacaacuccauccgccucuccgccggcggcgacaucugggucacccgcgagcccuacgucuccugcgaccccgacaagugcuaccaguucgcccucggccagggcaccacccucgacaacguccacuccaacaacaccguccgcaaccgcacccccuaccgcacccuccucaugaacgagcucggcguccccuuccaccucggcaccaagcaggucugcaucgccugguccuccuccuccugccacgacggcaaggccuggcuccacgucugcaucaccggcgacgacaagaacgccaccgccuccuucaucuacaacggccgccucgucgacuccgucgucuccugguccaaggacauccuccgcacccaggaguccgagugcgucugcaucaacggcaccugcaccgucgucaugaccgacggcuccgccuccggcaaggccgacaccaagauccucuucaucgaggagggcaagaucguccacaccuccacccucuccggcuccgcccagcacgucgaggagugcuccugcuacccccgcuaccccggcguccgcugcgucugccgcgacaacuggaagggcuccaaccgccccaucgucgacaucaacaucaaggaccacuccaucgucuccuccuacgucugcuccggccucgucggcgacaccccccgcaagaacgacuccuccuccuccucccacugccucgaccccaacaacgaggagggcggccacggcgucaagggcugggccuucgacgacggcaacgacgucuggaugggccgcaccaucaacgagaccucccgccucggcuacgagaccuucaaggucaucgagggcugguccaaccccaaguccaagcuccagaucaaccgccaggucaucgucgaccgcggcgaccgcuccggcuacuccggcaucuucuccaucgagggcaaguccugcaucaaccgcugcuucuacgucgagcucauccgcggccgcaaggaggagaccgagguccucuggaccuccaacuccaucgucgucuucugcggcaccuccggcaccuacggcaccggcuccuggcccgacggcgccgaccucaaccucaugcccaucuga

SEQ ID NO: 121249 - RNA, 1410 nt, Artificial Sequence
  derived and/or modified CDS sequence (opt2) from neuraminidase__InfluenzaA__AHZ13526
augaaccccaaccagaagaucaucaccaucggcuccgucucccucaccaucgccaccaucugcuuccucaugcagaucgccauccucgucaccaccgucacccuccacuucaagcaguacgagugcuccuccccccccaacaaccaggucaugcccugcgagcccaucaucaucgagcgcaacaugaccgagaucgucuaccucaccaacaccaccaucgagaaggagaucugccccaagcucgucgaguaccgcaacugguccaagccccagugcaagaucaccggcuucgcccccuucuccaaggacaacuccauccgccucuccgccggcggcgacaucugggucacccgcgagcccuacgucuccugcgaccccggcaagugcuaccaguucgcccucggccagggcaccacccucaacaacaagcacuccaacgacaccauccacgaccgcacccccuaccgcacccuccucaugaacgagcucggcguccccuuccaccucggcaccaagcaggucugcaucgccugguccuccuccuccugccacgacggcaaggccuggcuccacgucugcgucaccggccacgacaagaacgccaccgccuccuucaucuacgacggccgccucgucgacuccaucggcuccugguccaagaacauccuccgcacccaggaguccgagugcgucugcaucaacggcaccugcaccgucgucaugaccgacggcuccgccuccgaccgcgccgacaccaagauccucuucaucgaggagggcaagaucguccacaucuccccccucuccggcuccgcccagcacgucgaggagugcuccugcuacccccgcuaccccggcguccgcugcgucugccgcgacaacuggaagggcuccaaccgccccaucgucgacaucaacgucaaggacuacuccaucgucuccuccuacgucugcuccggccucgucggcgacaccccccgcaagaacgacggcuccuccuccuccuacugccgcaaccccaacaacgagaagggcaaccacggcgucaagggcugggccuucgacgacggcaacgacgucuggaugggccgcaccaucggcgaggagcuccgcuccggcuacgagaccuucaaggucaucggcggcugguccacccccaacuccaagcuccagaucaaccgccaggucaucgucgacuccaacaaccgcuccggcuacuccggcaucuucuccgucgagggcaaguccugcaucaaccgcugcuucuacgucgagcucauccgcggccgcgagcaggagacccgcgucugguggaccuccaacuccaucgucgucuucugcggcaccuccggcaccuacggcaccggcuccuggcccgacggcgccgacaucaaccucaugcccaucuga

SEQ ID NO: 121250 - RNA, 1413 nt, Artificial Sequence; identical to SEQ ID NO: 116241
  derived and/or modified CDS sequence (opt2) from neuraminidase__InfluenzaA__AHZ13584

SEQ ID NO: 121251 - RNA, 1410 nt, Artificial Sequence; identical to SEQ ID NO: 118958
  derived and/or modified CDS sequence (opt2) from neuraminidase__InfluenzaA__AHZ35575

SEQ ID NO: 121252 - RNA, 1410 nt, Artificial Sequence; identical to SEQ ID NO: 118958
  derived and/or modified CDS sequence (opt2) from neuraminidase__InfluenzaA__AHZ35587

SEQ ID NO: 121253 - RNA, 1410 nt, Artificial Sequence
  derived and/or modified CDS sequence (opt2) from neuraminidase__InfluenzaA__AHZ35611
augaaccccaaccagaagaucaucaccaucggcuccgucucccucaccaucuccaccaucugcuucuucaugcagaucgccauccucaucaccaccgucacccuccacuucaagcaguacgaguucaacuccccccccaacaaccaggucaugcucugcgagcccaccaucaucgagcgcaacaucaccgagaucgucuaccucaccaacaccaccaucgagaaggagaucugccccaagcccgccgaguaccgcaacugguccaagccccagugcgacaucaccggcuucgcccccuucuccaaggacaacuccauccgccucuccgccggcggcgacaucugggucacccgcgagcccuacgucuccugcgaccccgacaagugcuaccaguucgcccucggccagggcaccacccucaacaacguccacuccaacaacaccguccgcgaccgcacccccuaccgcacccuccucaugaacgagcucggcguccccuuccaccucggcaccaagcaggucugcaucgccugguccuccuccuccugccacgacggcaaggccuggcuccacgucugcaucaccggcgacgacaagaacgccaccgccuccuucaucuacaacggccgccucgucgacuccgucgucuccugguccaaggagauccuccgcacccaggaguccgagugcgucugcaucaacggcaccugcaccgucgucaugaccgacggcuccgccuccggcaaggccgacaccaagauccucuucaucgaggagggcaagaucguccacaccuccacccucuccggcuccgcccagcacgucgaggagugcuccugcuacccccgcuaccccggcguccgcugcgucugccgcgacaacuggaagggcuccaaccgccccaucgucgacaucaacaucaaggaccacuccaucgucuccuccuacgucugcuccggccucgucggcgacaccccccgcaagaacgacuccuccuccuccucccacugccucgaccccaacaacgaggagggcggccacggcgucaagggcugggccuucgacgacggcaacgacgucuggaugggccgcaccaucaacgagaccucccgccucggcuacgagaccuucaaggucaucgagggcugguccaaccccaaguccaagcuccagaucaaccgccaggucaucgucgaccgcggcgaccgcuccggcuacuccggcaucuucuccgucgagggccgcuccugcaucaaccgcugcuucuacgucgagcucauccgcggccgcaaggaggagaccgagguccucuggaccuccaacuccaucgucgucuucugcggcaccuccggcaccuacggcaccggcuccuggcccgacggcgccgaccucaaccucaugcccaucuga

SEQ ID NO: 121254 - RNA, 1410 nt, Artificial Sequence; identical to SEQ ID NO: 118958
  derived and/or modified CDS sequence (opt2) from neuraminidase__InfluenzaA__AHZ35623

SEQ ID NO: 121255 - RNA, 1410 nt, Artificial Sequence; identical to SEQ ID NO: 118958
  derived and/or modified CDS sequence (opt2) from neuraminidase__InfluenzaA__AHZ35635

SEQ ID NO: 121256 - RNA, 1410 nt, Artificial Sequence
  derived and/or modified CDS sequence (opt2) from neuraminidase__InfluenzaA__AHZ35647
augaaccccaaccagaagaucaucaccaucggcuccgucucccucaccaucuccaccaucugcuucuucaugcagaucgccauccucaucaccaccgucacccuccacuucaagcaguacgaguucaacuccccccccaacaaccaggucaugcucugcgagcccaccaucaucgagcgcaacaucaccgagaucgucuaccucaccaacaccaccaucgagaaggagaucugccccaagcccgccgaguaccgcaacugguccaagccccagugcgacaucaccggcuucgcccccuucuccaaggacaacuccauccgccucuccgccggcggcgacaucugggucacccgcgagcccuacgucuccugcgaccccgacaagugcuaccaguucgcccucggccagggcaccacccucaacaacguccacuccaacaacaccguccgcgaccgcacccccuaccgcacccuccucaugaacgagcucggcguccccuuccaccucggcaccaagcaggucugcaucgccugguccuccuccuccugccacgacggcaaggccuggcuccacgucugcaucaccggcgacgacaagaacgccaccgccuccuucaucuacaacggccgccucgucgacuccgucgucuccugguccaaggagauccuccgcacccaggaguccgagugcgucugcaucaacggcaccugcaccgucgucaugaccgacggcuccgccuccggcaaggccgacaccaagauccucuucaucgaggagggcaagaucguccacaccuccacccucuccggcuccgcccagcacgucgaggagugcuccugcuacccccgcuaccccgacguccgcugcgucugccgcgacaacuggaagggcuccaaccgccccaucgucgacaucaacaucaaggaccacuccaucgucuccuccuacgucugcuccggccucgucggcgacaccccccgcaagaacgacuccuccuccuccucccacugccucgaccccaacaacgaggagggcggccacggcgucaagggcugggccuucgacgacggcaacgacgucuggaugggccgcaccaucaacgagaccucccgccucggcuacgagaccuucaaggucaucgagggcugguccaaccccaaguccaagcuccagaucaaccgccaggucaucgucgaccgcggcgaccgcuccggcuacuccggcaucuucuccgucgagggcaaguccugcaucaaccgcugcuucuacgucgagcucauccgcggccgcaaggaggagaccgagguccucuggaccuccaacuccaucgucgucuucugcggcaccuccggcaccuacggcaccggcuccuggcccgacggcgccgaccucaaccucaugcccaucuga

SEQ ID NO: 121257 - RNA, 1410 nt, Artificial Sequence; identical to SEQ ID NO: 118958
  derived and/or modified CDS sequence (opt2) from neuraminidase__InfluenzaA__AHZ35659

SEQ ID NO: 121258 - RNA, 1410 nt, Artificial Sequence; identical to SEQ ID NO: 118958
  derived and/or modified CDS sequence (opt2) from neuraminidase__InfluenzaA__AHZ35671

SEQ ID NO: 121259 - RNA, 1410 nt, Artificial Sequence; identical to SEQ ID NO: 118958
  derived and/or modified CDS sequence (opt2) from neuraminidase__InfluenzaA__AHZ35683

SEQ ID NO: 121260 - RNA, 1410 nt, Artificial Sequence
  derived and/or modified CDS sequence (opt2) from neuraminidase__InfluenzaA__AHZ35695
augaaccccaaccagaagaucaucaccaucggcuccgucucccucaccaucuccaccaucugcuucuucaugcagaucgccauccucaucaccaccgucacccuccacuucaagcaguacgaguucaaccccccccccaacaaccaggucaugcucugcgagcccaccaucaucgagcgcaacaucaccgagaucgucuaccucaccaacaccaccaucgagaaggagaucugccccaagcccgccgaguaccgcaacugguccaagccccagugcgacaucaccggcuucgcccccuucuccaaggacaacuccauccgccucuccgccggcggcgacaucugggucacccgcgagcccuacgucuccugcgaccccgacaagugcuaccaguucgcccucggccagggcaccacccucaacaacguccacuccaacaacaccguccgcgaccgcacccccuaccgcacccuccucaugaacgagcucggcguccccuuccaccucggcaccaagcaggucugcaucgccugguccuccuccuccugccacgacggcaaggccuggcuccacgucugcaucaccggcgacgacaagaacgccaccgccuccuucaucuacaacgagcgccucgucgacuccgucgucuccugguccaaggagauccuccgcacccaggaguccgagugcgucugcaucaacggcaccugcaccgucgucaugaccgacggcuccgccuccggcaaggccgacaccaagauccucuucaucgaggagggcaagaucguccacaccuccacccucuccggcuccgcccagcacgucgaggagugcuccugcuacccccgcuaccccggcguccgcugcgucugccgcgacaacuggaagggcuccaaccgccccaucgucgacaucaacaucaaggaccacuccaucgucuccuccuacgucugcuccggccucgucggcgacaccccccgcaagaacgacuccuccuccuccucccacugccucgaccccaacaacgaggagggcggccacggcgucaagggcugggccuucgacgacggcaacgacgucuggaugggccgcaccaucaacgagaccucccgccucggcuacgagaccuucaaggucaucgagggcugguccaaccccaaguccaagcuccagaucaaccgccaggucaucgucgaccgcggcgaccgcuccggcuacuccggcaucuucuccgucgagggcaacuccugcaucaaccgcugcuucuacgucgagcucauccgcggccgcaaggaggagaccgagguccucuggaccuccaacuccaucgucgucuucugcggcaccuccggcaccuacggcaccggcuccuggcccgacggcgccgaccucaaccucaugcccaucuga

SEQ ID NO: 121261 - RNA, 1410 nt, Artificial Sequence
  derived and/or modified CDS sequence (opt2) from neuraminidase__InfluenzaA__AHZ35719
augaaccccaaccagaagaucaucaccaucggcuccgucucccucaccaucuccaccaucugcuucuucaugcagaucgccauccucaucaccaccgucacccuccacuucaagcaguacgaguucaacuccccccccaacaaccaggucaugcucugcgagcccaccaucaucgagcgcaacaucaccgagaucgucuaccucaccaacaccaccaucgagaaggagaucugccccaagcccgccgaguaccgcaacugguccaagccccagugcgacaucaccggcuucgcccccuucuccaaggacaacuccauccgccucuccgccggcggcgacaucugggucacccgcgagcccuacgucuccugcgaccccgacaagugcuaccaguucgcccucggccagggcaccacccucaacaacguccacuccaacaacaccguccgcgaccgcacccccuaccgcacccuccucaugaacgagcucggcguccccuuccaccucggcaccaagcaggucugcaucgccugguccuccuccuccugccacgacggcaaggccuggcuccacgucugcaucaccggcgacgacaagaacgccaccgccuccuucaucuacaacggccgccucgucgacuccgucgucuccugguccaaggagauccuccgcacccaggaguccgagugcgucugcaucaacggcaccugcaccgucgucaugaccgacggcuccgccuccggcaaggccgacaccaagauccucuucaucgaggagggcaagaucguccacaccuccacccucuccggcuccgcccagcacgucgaggagugcuccugcuacccccgcuaccccggcguccgcugcgucugccgcgacaacuggaagggcuccaaccgccccaucgucgacaucaacaucaaggaccacuccaucgucuccuccuacgucugcuccggccucgucggcgacaccccccgcaagaacgacuccuccuccuccucccacugccucgaccccaacaacgaggagggcggccacggcgucaagggcugggccuucgacgacggcaacgacgucuggaugggccgcaccaucaacgagaccucccgccucggcuacgagaccuucaaggucaucgagggcugguccaaccccaaguccaagcuccagaucaaccgccaggucaucgucgaccgcggcgaccgcuccggcuacuccggcaucuucuccgucgagggcaaguccugcaucaaccgcugcuucuacgucgagcucauccgcggccgcaaggaggagaccgagguccucuggaccuccaacuccaucgucgucuucugcggcaccuccggcaccuacggcaccggcuccuggcccgacggcgccgaccucaaccucacccccaucuga

SEQ ID NO: 121262 - RNA, 1410 nt, Artificial Sequence; identical to SEQ ID NO: 118958
  derived and/or modified CDS sequence (opt2) from neuraminidase__InfluenzaA__AHZ35731

SEQ ID NO: 121263 - RNA, 1410 nt, Artificial Sequence; identical to SEQ ID NO: 118958
  derived and/or modified CDS sequence (opt2) from neuraminidase__InfluenzaA__AHZ35743

SEQ ID NO: 121264 - RNA, 1410 nt, Artificial Sequence; identical to SEQ ID NO: 118958
  derived and/or modified CDS sequence (opt2) from neuraminidase__InfluenzaA__AHZ35755

SEQ ID NO: 121265 - RNA, 1410 nt, Artificial Sequence; identical to SEQ ID NO: 118958
  derived and/or modified CDS sequence (opt2) from neuraminidase__InfluenzaA__AHZ35767

SEQ ID NO: 121266 - RNA, 1410 nt, Artificial Sequence; identical to SEQ ID NO: 118958
  derived and/or modified CDS sequence (opt2) from neuraminidase__InfluenzaA__AHZ35779

SEQ ID NO: 121267 - RNA, 1410 nt, Artificial Sequence
  derived and/or modified CDS sequence (opt2) from neuraminidase__InfluenzaA__AHZ35803
augaaccccaaccagaagaucaucaccaucggcuccgucugcaugaccaucggcauggccaaccucaugcuccagaucggcaacaucaucuccaucuggaucucccacuccauccagcucggcaacaagaaccagaucgagaccugcaaccaguccgucaucaccuacgagaacaacaccugggucaaccagaccuacgucaacaucuccaacaccaacuucgccgccggccaguccgucgucuccgucaagaucgccggcaacuccucccucugccccgucuccggcugggccaucuacuccaaggacaacuccauccgcaucggcuccaagggcgacgucuucgucauccgcgagcccuucaucuccugcuccccccucgagugccgcaccuucuuccucacccagggcgcccuccucaacgacaagcacuccaacggcaccaucaaggaccgcucccccuaccgcacccucauguccugccccaucggcgagguccccucccccuacaacucccgcuucgaguccgucgccugguccgccuccgccugccacgacggcaucaacuggcucaccaucggcaucuccggccccgacaacggcgccgucgccguccucaaguacaacggcaucaucaccgacaccaucaaguccuggcgcaacaacauccuccgcacccaggaguccgagugcgccugcgucaacggcuccugcuucaccaucaugaccgacggccccuccgacggccaggccuccuacaagaucuuccgcaucgagaagggcaagaucgucaaguccgucgagaugaacgcccccaacuaccacuacgaggagugcuccugcuaccccgacuccuccgagaucaccugcgucugccgcgacaacuggcacggcuccaaccgccccugggucuccuucaaccagaaccucgaguaccagaucggcuacaucugcuccggcaucuucggcgacaacccccgcccccacgacaagaccggcuccugcggccccgucuccuccaacggcgccaacggcgucaagggcuucuccuucaaguacggcaacggcgucuggaucggccgcaccaaguccaucuccucccgcaagggcuucgagaugaucugggaccccaacggcuggaccggcaccgacaacaacuucuccaucaagcaggacaucgucggcaugaacgagugguccggcuacuccggcuccuucguccagcaccccgagcucaccggccucgacugcauccgccccugcuucugggucgagcucauccgcggccgccccaaggagaacaccaucuggaccuccggcuccuccaucuccuucugcggcgucaacuccgacaccgucggcugguccuggcccgacggcgccgagcuccccuucaccaucgacaaguga

SEQ ID NO: 121268 - RNA, 1410 nt, Artificial Sequence
  derived and/or modified CDS sequence (opt2) from neuraminidase__InfluenzaA__AHZ35814
augaaccccaaccagaagaucaucaccaucggcuccgucucccucaccaucuccaccaucugcuucuucaugcagaucgccauccucaucaccaccgucacccuccacuucaagcaguacgaguucaacuccccccccaacaaccaggucaugcucugcgagcccaccaucaucgagcgcaacaucaccgagaucgucuaccucaccaacaccaccaucgagaaggagaucugccccaagcucgccgaguaccgcaacugguccaagccccagugcgacaucaccggcuucgcccccuucuccaaggacaacuccauccgccucuccgccggcggcgaccucugggucacccgcgagcccuacgucuccugcgaccccgacaagugcuaccaguucgcccucggccagggcaccacccucaacaacguccacuccaacaacaccguccgcgaccgcacccccuaccgcacccuccucaugaacgagcucggcguccccuuccaccucggcaccaagcaggucugcaucgccugguccuccuccuccugccacgacggcaaggccuggcuccacgucugcaucaccggcgacgacaagaacgccaccgccuccuucaucuacaacggccgccucgucgacuccgucgucuccugguccaaggagauccuccgcacccaggaguccgagugcgucugcaucaacggcaccugcaccgucgucaugaccgacggcuccgccuccggcaaggccgacaccaagauccucuucaucgaggagggcaagaucguccacaccuccacccucuccggcuccgcccagcacgucgaggagugcuccugcuacccccgcuaccccggcguccgcugcgucugccgcgacaacuggaagggcuccaaccgccccaucgucgacaucaacaucaaggaccacuccaucgucuccuccuacgucugcuccggccucgucggcgacaccccccgcaagaacgacuccuccuccuccucccacugccucgaccccaacaacgaggagggcggccacggcgucaagggcugggccuucgacgacggcaacgacgucuggaugggccgcaccaucaacgagaccucccgccucggcuacgagaccuucaaggucaucgagggcugguccaaccccaaguccaagcuccagaucaaccgccaggucaucgucgaccgcggcaaccgcuccggcuacuccggcaucuucuccgucgagggcaaguccugcaucaaccgcugcuucuacgucgagcucauccgcggccgcaaggaggagaccgagguccucuggaccuccaacuccaucgucgucuucugcggcaccuccggcaccuacggcaccggcuccuggcccgacggcgccgaccucaaccucaugcccaucuga

SEQ ID NO: 121269 - RNA, 1410 nt, Artificial Sequence
  derived and/or modified CDS sequence (opt2) from neuraminidase__InfluenzaA__AHZ35837
augaaccccaaccagaagaucaucaccaucggcuccgucugcaugaccaucggcauggccaaccucaugcuccagaucggcaacaucaucuccaucuggaucucccacuccauccagcucggcaacaagaaccagaucgagaccugcaaccaguccgucaucaccuacgagaacaacaccugggucaaccagaccuacgucaacaucuccaacaccaacuucgccgccggccaguccgucgucuccgucaagaucgccggcaacuccucccucugccccgucuccggcugggccaucuacuccaaggacaacuccauccgcaucggcuccaagggcgacgucuucgucauccgcgagcccuucaucuccugcuccccccucgagugccgcaccuucuuccucacccagggcgcccuccucaacgacaagcacuccaacggcaccaucaaggaccgcucccccuaccgcacccucauguccugccccaucggcgagguccccucccccuacaacucccgcuucgaguccgucgccugguccgccuccgccugccacgacggcaucaacuggcucaccaucggcaucuccggccccgacaacggcgccgucgccguccucaaguacaacggcaucaucaccgacaccaucaaguccuggcgcaacaacauccuccgcacccaggaguccgagugcgccugcgucaacggcuccugcuucaccaucaugaccgacggccccuccgacggccaggccuccuacaagaucuuccgcaucgagaagggcaagaucgucaaguccgucgagaugaacgcccccaacuaccacuacgaggagugcuccugcuaccccgacuccuccgagaucaccugcgucugccgcgacaacuggcacggcuccaaccgccccugggucuccuucaaccagaaccucgaguaccagaucggcuacaucugcuccggcaucuucggcgacaacccccgcccccacgacaagaccggcuccugcggccccgucuccuccaacggcgccaacggcgucaagggcuucuccuucaaguacggcaacggcgucuggaucggccgcaccaaguccaucuccucccgcaagggcuucgagaugaucugggaccccaacggcuggaccggcaccgacaacaacuucuccaucaagcaggacaucgucggcaucaacgagugguccggcuacuccggcuccuucguccagcaccccgagcucaccggccucgacugcauccgccccugcuucugggucgagcucauccgcggccgccccaaggagaacaccaucuggaccuccggcuccuccaucuccuucugcggcgucaacuccgacaccgucggcugguccuggcccgacggcgccgagcuccccuucaccaucgacaaguga

SEQ ID NO: 121270 - RNA, 1410 nt, Artificial Sequence; identical to SEQ ID NO: 121269
  derived and/or modified CDS sequence (opt2) from neuraminidase__InfluenzaA__AHZ35848

SEQ ID NO: 121271 - RNA, 1410 nt, Artificial Sequence; identical to SEQ ID NO: 121269
  derived and/or modified CDS sequence (opt2) from neuraminidase__InfluenzaA__AHZ35859

SEQ ID NO: 121272 - RNA, 1410 nt, Artificial Sequence; identical to SEQ ID NO: 121268
  derived and/or modified CDS sequence (opt2) from neuraminidase__InfluenzaA__AHZ35870

SEQ ID NO: 121273 - RNA, 1410 nt, Artificial Sequence; identical to SEQ ID NO: 121268
  derived and/or modified CDS sequence (opt2) from neuraminidase__InfluenzaA__AHZ35882

SEQ ID NO: 121274 - RNA, 1410 nt, Artificial Sequence
  derived and/or modified CDS sequence (opt2) from neuraminidase__InfluenzaA__AHZ35894
augaaccccaaccagaagaucaucaccaucggcuccgucugcaugaccaucggcauggccaaccucaugcuccagaucggcaacaucaucuccaucuggaucucccacuccauccagcucggcaacaagaaccagaucgagaccugcaaccaguccgucaucaccuacgagaacaacaccugggucaaccagaccuacgucaacaucuccaacaccaacuucgccgccggccaguccgucgucuccgucaagaucgccggcaacuccucccucugccccgucuccggcugggccaucuacuccaaggacaacuccauccgcaucggcuccaagggcgacgucuucgucauccgcgagcccuucaucuccugcuccccccucgagugccgcaccuucuuccucacccagggcgcccuccucaacgacaagcacuccaacggcaccaucaaggaccgcucccccuaccgcacccucauguccugccccaucggcgagguccccucccccuacaacucccgcuucgaguccgucgccugguccgccuccgccugccacgacggcaucaacuggcucaccaucggcaucuccggccccgacaacggcgccgucgccguccucaaguacaacggcaucaucaccgacaccaucaaguccuggcgcaacaacauccuccgcacccaggaguccgagugcgccugcgucaacggcuccugcuucaccaucaugaccgacggccccuccgacggccaggccuccuacaagaucuuccgcaucgagaagggcaagaucgucaaguccgucgagaugaacgcccccaacuaccacuacgaggagugcuccugcuaccccgacuccuccgagaucaccugcgucugccgcgacaacuggcacggcuccaaccgccccugggucuccuucaaccagaaccucgaguaccagaucggcuacaucugcuccggcaucuucggcgacaacccccgcccccacgacaagaccggcuccugcggccccgucuccuccaacggcgccaacggcgucaagggcuucuccuucaaguacggcuccggcgucuggaucggccgcaccaaguccaucuccucccgcaagggcuucgagaugaucugggaccccaacggcuggaccggcaccgacaacaacuucuccaucaagcaggacaucgucggcaucaacgagugguccggcuacuccggcuccuucguccagcaccccgagcucaccggccucgacugcauccgccccugcuucugggucgagcucauccgcggccgccccaaggagaacaccaucuggaccuccggcuccuccaucuccuucugcggcgucaacuccgacaccgucggcugguccuggcccgacggcgccgagcuccccuucaccaucgacaaguga

SEQ ID NO: 121275 - RNA, 1410 nt, Artificial Sequence; identical to SEQ ID NO: 121269
  derived and/or modified CDS sequence (opt2) from neuraminidase__InfluenzaA__AHZ35905

SEQ ID NO: 121276 - RNA, 1410 nt, Artificial Sequence; identical to SEQ ID NO: 121269
  derived and/or modified CDS sequence (opt2) from neuraminidase__InfluenzaA__AHZ35916

SEQ ID NO: 121277 - RNA, 1410 nt, Artificial Sequence; identical to SEQ ID NO: 116994
  derived and/or modified CDS sequence (opt2) from neuraminidase__InfluenzaA__AHZ35927

SEQ ID NO: 121278 - RNA, 1410 nt, Artificial Sequence
  derived and/or modified CDS sequence (opt2) from neuraminidase__InfluenzaA__AHZ35938
augaaccccaaccagaagaucaucaccaucggcuccgucugcaugaucaucggcauggccaaccucauccuccagaucggcaacaucaucuccaucuggaucucccacuccauccagcucggcaaccagaaccagaucgagaccugcaaccaguccgucaucaccuacgagaacaacaccugggucaaccagaccuacgucaacaucuccaacaccaacuucgccgccggccaguccgucgucuccgucaagcucgccggcaacuccucccucugccccgucuccggcugggccaucuacuccaaggacaacuccauccgcaucggcuccaagggcgacgucuucgucauccgcgagcccuucaucuccugcuccccccucgagugccgcaccuucuuccucacccagggcgcccuccucaacgacaagcacuccaacggcaccaucaaggaccgcucccccuaccgcacccucauguccugccccaucggcgagguccccucccccuacaacucccgcuucgaguccgucgccugguccgccuccgccugccacgacggcaucaacuggcucaccaucggcaucuccggccccgacaacggcgccgucgccguccucaaguacaacggcaucaucaccgacaccaucaaguccuggcgcaacaacauccuccgcacccaggaguccgagugcgccugcgucaacggcuccugcuucaccaucaugaccgacggccccuccgacggccaggccuccuacaagaucuuccgcaucgagaagggcaagaucgucaaguccgucgagaugaacgcccccaacuaccacuacgaggagugcuccugcuaccccgacuccuccgagaucaccugcgucugccgcgacaacuggcacggcuccaaccgccccugggucuccuucaaccagaaccucgaguaccagaucggcuacaucugcuccggcaucuucggcgacaacccccgcccccacgacaagaccggcuccugcggccccgucuccuccaacggcgccaacggcgucaagggcuucuccuucaaguacggcaacggcgucuggaucggccgcaccaaguccaucuccucccgcaagggcuucgagaugaucugggaccccaacggcuggaccggcaccgacaacaacuucuccaucaagcaggacaucgucggcaucaacgagugguccggcuacuccggcuccuucguccagcaccccgagcucaccggccucgacugcauccgccccugcuucugggucgagcucauccgcggccgccccaaggagaacaccaucuggaccuccggcuccuccaucuccuucugcggcgucaacuccgacaccgucggcugguccuggcccgacggcgccgagcuccccuucaccaucgacaaguga

SEQ ID NO: 121279 - RNA, 1410 nt, Artificial Sequence; identical to SEQ ID NO: 121268
  derived and/or modified CDS sequence (opt2) from neuraminidase__InfluenzaA__AHZ35949

SEQ ID NO: 121280 - RNA, 1410 nt, Artificial Sequence
  derived and/or modified CDS sequence (opt2) from neuraminidase__InfluenzaA__AHZ35961
augaaccccaaccagaagaucaucaccaucggcuccgucugcaugaccaucggcauggccaaccucaugcuccagaucggcaacaucaucuccaucuggaucucccacuccauccagcucggcaacaagaaccagaucgagaccugcaaccaguccgucaucaccuacgagaacaacaccugggucaaccagaccuacgucaacaucuccaacaccaacuucgccgccggccaguccgucgucuccgucaagaucgccggcaacuccucccucugccccgucuccggcugggccaucuacuccaaggacaacuccauccgcaucggcuccaagggcgacgucuucgucauccgcgagcccuucaucuccugcuccccccucgagugccgcaccuucuuccucacccagggcgcccuccucaacgacaagcacuccaacggcaccaucaaggaccgcucccccuaccgcacccucauguccugccccaucggcgagguccccucccccuacaacucccgcuucgaguccgucgccugguccgccuccgccugccacgacggcaucaacuggcucaccaucggcaucuccggccccgacaacggcgccgucgccguccucaaguacaacggcaucaucaccgacaccaucaaguccuggcgcaacaacauccuccgcacccaggaguccgagugcgccugcgucaacggcuccugcuucaccaucaugaccgacggccccuccgacggccaggccuccuacaagaucuuccgcaucgagaagggcaagaucgucaaguccgucgagaugaacgcccccaacuaccacuacgaggagugcuccugcuaccccgacuccuccgagaucaccugcgucugccgcgacaacuggcacggcuccaaccgccccugggucuccuucaaccagaaccucgaguaccagaucggcuacaucugcuccggcaucuucggcgacaacccccgcccccacgacaagaccggcuccugcggccccgucuccuccaacggcgccaacggcgucaagggcuucuccuucaaguacggcaacggcgucuggaucggccgcaccaaguccaucuccucccgcaagggcuucgagaugaucugggaccccaacggcuggaccggcaccgacaacaacuucuccaucaagcaggacaucgucggcaucaacgagugguccggcuacuccggcuccuucguccagcaccccgagcucaccggccucgacugcauccgccccugcuucugggucgagcucauccgcggccgccccaaggaguccaccaucuggaccuccggcuccuccaucuccuucugcggcgucaacuccgacaccgucggcugguccuggcccgacggcgccgagcuccccuucaccaucgacaaguga

SEQ ID NO: 121281 - RNA, 1410 nt, Artificial Sequence; identical to SEQ ID NO: 121269
  derived and/or modified CDS sequence (opt2) from neuraminidase__InfluenzaA__AHZ35972

SEQ ID NO: 121282 - RNA, 1410 nt, Artificial Sequence
  derived and/or modified CDS sequence (opt2) from neuraminidase__InfluenzaA__AHZ35983
augaaccccaaccagaagaucaccaccaucggcuccgucugcaugaccaucggcauggccaaccucaugcuccagaucggcaacaucaucuccaucuggaucucccacuccauccagcucggcaacaagaaccagaucgagaccugcaaccaguccgucaucaccuacgagaacaacaccugggucaaccagaccuacgucaacaucuccaacaccaacuucgccgccggccaguccgucgucuccgucaagaucgccggcaacuccucccucugccccgucuccggcugggccaucuacuccaaggacaacuccauccgcaucggcuccaagggcgacgucuucgucauccgcgagcccuucaucuccugcuccccccucgagugccgcaccuucuuccucacccagggcgcccuccucaacgacaagcacuccaacggcaccaucaaggaccgcucccccuaccgcacccucauguccugccccaucggcgagguccccucccccuacaacucccgcuucgaguccgucgccugguccgccuccgccugccacgacggcaucaacuggcucaccaucggcaucuccggccccgacaacggcgccgucgccguccucaaguacaacggcaucaucaccgacaccaucaaguccuggcgcaacaacauccuccgcacccaggaguccgagugcgccugcgucaacggcuccugcuucaccaucaugaccgacggccccuccgacggccaggccuccuacaagaucuuccgcaucgagaagggcaagaucgucaaguccgucgagaugaacgcccccaacuaccacuacgaggagugcuccugcuaccccgacuccuccgagaucaccugcgucugccgcgacaacuggcacggcuccaaccgccccugggucuccuucaaccagaaccucgaguaccagaucggcuacaucugcuccggcaucuucggcgacaacccccgcccccacgacaagaccggcuccugcggccccgucuccuccaacggcgccaacggcgucaagggcuucuccuucaaguacggcaacggcgucuggaucggccgcaccaaguccaucuccucccgcaagggcuucgagaugaucugggaccccaacggcuggaccggcaccgacaacaacuucuccaucaagcaggacaucgucggcaucaacgagugguccggcuacuccggcuccuucguccagcaccccgagcucaccggccucgacugcauccgccccugcuucugggucgagcucauccgcggccgccccaaggagaacaccaucuggaccuccggcuccuccaucuccuucugcggcgucaacuccgacaccgucggcugguccuggcccgacggcgccgagcuccccuucaccaucgacaaguga

SEQ ID NO: 121283 - RNA, 1410 nt, Artificial Sequence; identical to SEQ ID NO: 121269
  derived and/or modified CDS sequence (opt2) from neuraminidase__InfluenzaA__AHZ35994

SEQ ID NO: 121284 - RNA, 1410 nt, Artificial Sequence; identical to SEQ ID NO: 121269
  derived and/or modified CDS sequence (opt2) from neuraminidase__InfluenzaA__AHZ36005

SEQ ID NO: 121285 - RNA, 1410 nt, Artificial Sequence; identical to SEQ ID NO: 121269
  derived and/or modified CDS sequence (opt2) from neuraminidase__InfluenzaA__AHZ36016

SEQ ID NO: 121286 - RNA, 1410 nt, Artificial Sequence
  derived and/or modified CDS sequence (opt2) from neuraminidase__InfluenzaA__AHZ36027
augaaccccaaccagaagaucaucaccaucggcuccgucugcaugaccaucggcauggccaaccucauccuccagaucggcaacaucaucuccaucuggaucucccacuccauccagcucggcaaccagaaccagaucgagaccugcaaccaguccgucaucaucuacgagaacaacaccugggucaaccagaccuacgucaacaucuccaacaccaacuucgccgccggccaguccgucgucuccgucaagcucgccggcaacuccucccucugccccgucuccggcugggccaucuacuccaaggacaacuccauccgcaucggcuccaagggcgacgucuucgucauccgcgagcccuucaucuccugcuccccccucgagugccgcaccuucuuccucacccagggcgcccuccucaacgacaagcacuccaacggcaccaucaaggaccgcucccccuaccgcacccucauguccugccccaucggcgagguccccucccccuacaacucccgcuucgaguccgucgccugguccgccuccgccugccacgacggcuucaacuggcucaccaucggcaucuccggccccgacaacggcgccgucgccguccucaaguacaacggcaucaucaccgacaccaucaaguccuggcgcaacaacauccuccgcacccaggaguccgagugcgccugcgucaacggcuccugcuucaccaucaugaccgacggccccuccgacggccaggccuccuacaagaucuuccgcaucgagaagggcaagaucgucaaguccgucgagaugaacgcccccaacuaccacuacgaggagugcuccugcuaccccgacuccuccgagaucaccugcgucugccgcgacaacuggcacggcuccaaccgccccugggucuccuucaaccagaaccucgaguaccagaucggcuacaucugcuccggcaucuucggcgacaacccccgccccaacgacaagaccggcuccugcggccccgucuccuccaacggcgccaacggcgucaagggcuucuccuucaaguacggcaacggcgucuggaucggccgcaccaaguccaucuccucccgcaagggcuucgagaugaucugggaccccaacggcuggaccggcaccgacaacaacuucuccaucaagcaggacaucaucggcaucaacgagugguccggcuacuccggcuccuucguccagcaccccgagcucaccggccucgacugcauccgccccugcuucugggucgagcucauccgcggccgccccaaggagaacaccaucuggaccuccggcuccuccaucuccuucugcggcgucaacuccgacaccgucggcugguccuggcccgacggcgccgagcuccccuucaccaucgacaaguga

SEQ ID NO: 121287 - RNA, 1410 nt, Artificial Sequence
  derived and/or modified CDS sequence (opt2) from neuraminidase__InfluenzaA__AHZ36050
augaaccccaaccagaagaucaucaccaucggcuccgucucccucaccaucuccaccaucugcuucuucaugcagaucgccauccucaucaccaccgucacccuccacuucaagcaguacgaguucaacuccccccccaacaaccaggucaugcucugcgagcccaccaucaucgagcgcaacaucaccgagaucgucuaccucaccaacaccaccaucgagaaggagaucugccccaagcucgccgaguaccgcaacugguccaagccccagugcgacaucaccggcuucgcccccuucuccaaggacaacuccauccgccucuccgccggcggcgacaucugggucacccgcgagcccuacgucuccugcgaccccgacaagugcuaccaguucgcccucggccagggcaccacccucaacaacguccacuccaacaacaccguccgcgaccgcacccccuaccgcacccuccucaugaacgagcucggcguccccuuccaccucggcaccaagcaggucugcaucgccugguccuccuccuccugccacgacggcaaggccuggcuccacgucugcaucaccggcgacgacaagaacgccaccgccuccuucaucuacaacggccgccucgucgacuccgucgucuccugguccaaggagauccuccgcacccaggaguccgagugcgucugcaucaacggcaccugcaccgucgucaugaccgacggcuccgccuccggcaaggccgacaccaagauccucuucaucgaggagggcaagaucguccacaccuccacccucuccggcuccgcccagcacgucgaggagugcuccugcuacccccgcuaccccggcguccgcugcgucugccgcgacaacuggaagggcuccaaccgccccaucgucgacaucaacaucaaggaccacuccaucgucuccuccuacgucugcuccggccucgucggcgacaccccccgccgcaacgacuccuccuccuccucccacugccucgaccccaacaacgaggagggcggccacggcgucaagggcugggccuucgacgacggcaacgacgucuggaugggccgcaccaucaacgagaccucccgccucggcuacgagaccuucaaggucaucgagggcugguccaaccccaaguccaagcuccagaucaaccgccaggucaucgucgaccgcggcaaccgcuccggcuacuccggcaucuucuccgucgagggcaaguccugcaucaaccgcugcuucuacgucgagcucauccgcggccgcaaggaggagaccgagguccucuggaccuccaacuccaucgucgucuucugcggcaccuccggcaccuacggcaccggcuccuggcccgacggcgccgaccucaaccucaugcccaucuga

SEQ ID NO: 121288 - RNA, 1410 nt, Artificial Sequence
  derived and/or modified CDS sequence (opt2) from neuraminidase__InfluenzaA__AHZ36062
augaaccccaaccagaagaucaucaccaucggcuccgucugcaugaccaucggcauggccaaccucaugcuccagaucggcaacaucaucuccaucuggaucucccacuccauccagcucggcaacaagaaccagaucgagaccugcaaccaguccgucaucaccuacgagaacaacaccugggucaaccagaccuacgucaacaucuccaacaccaacuucgccgccggccaguccgucgucuccgucaagaucgccggcaacuccucccucugccccgucuccggcugggccaucuacuccaaggacaacuccauccgcaucggcuccaagggcgacgucuucgucauccgcgagcccuucaucuccugcuccccccucggcugccgcaccuucuuccucacccagggcgcccuccucaacgacaagcacuccaacggcaccaucaaggaccgcucccccuaccgcacccucauguccugccccaucggcgagguccccucccccuacaacucccgcuucgaguccgucgccugguccgccuccgccugccacgacggcaucaacuggcucaccaucggcaucuccggccccgacaacggcgccgucgccguccucaaguacaacggcaucaucaccgacaccaucaaguccuggcgcaacaacauccuccgcacccaggaguccgagugcgccugcgucaacggcuccugcuucaccaucaugaccgacggccccuccgacggccaggccuccuacaagaucuuccgcaucgagaagggcaagaucgucaaguccgucgagaugaacgcccccaacuaccacuacgaggagugcuccugcuaccccgacuccuccgagaucaccugcgucugccgcgacaacuggcacggcuccaaccgccccugggucuccuucaaccagaaccucgaguaccagaucggcuacaucugcuccggcaucuucggcgacaacccccgcccccacgacaagaccggcuccugcggccccgucuccuccaacggcgccaacggcgucaagggcuucuccuucaaguacggcaacggcgucuggaucggccgcaccaaguccaucuccucccgcaagggcuucgagaugaucugggaccccaacggcuggaccggcaccgacaacaacuucuccaucaagcaggacaucgucggcaucaacgagugguccggcuacuccggcuccuucguccagcaccccgagcucaccggccucgacugcauccgccccugcuucugggucgagcucauccgcggccgccccaaggagaacaccaucuggaccuccggcuccuccaucuccuucugcggcgucaacuccgacaccgucggcugguccuggcccgacggcgccgagcuccccuucaccaucgacaaguga

SEQ ID NO: 121289 - RNA, 1410 nt, Artificial Sequence; identical to SEQ ID NO: 121269
  derived and/or modified CDS sequence (opt2) from neuraminidase__InfluenzaA__AHZ36084

SEQ ID NO: 121290 - RNA, 1410 nt, Artificial Sequence
  derived and/or modified CDS sequence (opt2) from neuraminidase__InfluenzaA__AHZ36095
augaaccccaaccagaagaucaucaccaucggcuccgucugcaugaccaucggcauggccaaccucauccuccagaucggcaacaucaucuccaucuggaucucccacuccauccagcucggcaaccagaaccagaucgagaccugcaaccaguccgucaucaucuacgagaacaacaccugggucaaccagaccuacgucaacaucuccaacaccaacuucgccgccggccaguccgucgucuccgucaagcucgccggcaacuccucccucugccccgucuccggcugggccaucuacuccaaggacaacuccauccgcaucggcuccaagggcgacgucuucgucauccgcgagcccuucaucuccugcuccccccucgagugccgcaccuucuuccucacccagggcgcccuccucaacgacaagcacuccaacggcaccaucaaggaccgcucccccuaccgcacccucauguccugccccaucggcgagguccccucccccuacaacucccgcuucgaguccgucgccugguccgccuccgccugccacgacggcuucaacuggcucaccaucggcaucuccggccccgacaacggcgccgucgccguccucaaguacaacggcaucaucaccgacaccaucaaguccuggcgcaacaacauccuccgcacccaggaguccgagugcgccugcgucaacggcuccugcuucaccaucaugaccgacggccccuccgacggccaggccuccuacaagaucuuccgcaucgagaagggcaagaucgucaaguccgucgagaugaacgcccccaacuaccacuacgaggagugcuccugcuaccccgacuccuccgagaucaccugcgucugccgcgacaacuggcacggcuccaaccgccccugggucuccuucaaccagaaccucgaguaccagaucggcuacaucugcuccggcaucuucggcgacaacccccgccccaacgacaagaccggcggcugcggccccgucuccuccaacggcgccaacggcgucaagggcuucuccuucaaguacggcaacggcgucuggaucggccgcaccaaguccaucuccucccgcaagggcuucgagaugaucugggaccccaacggcuggaccggcaccgacaacaacuucuccaucaagcaggacaucaucggcaucaacgagugguccggcuacuccggcuccuucguccagcaccccgagcucaccggccucgacugcauccgccccugcuucugggucgagcucauccgcggccgccccaaggagaacaccaucuggaccuccggcuccuccaucuccuucugcggcgucaacuccgacaccgucggcugguccuggcccgacggcgccgagcuccccuucaccaucgacaaguga

SEQ ID NO: 121291 - RNA, 1410 nt, Artificial Sequence; identical to SEQ ID NO: 121269
  derived and/or modified CDS sequence (opt2) from neuraminidase__InfluenzaA__AHZ36106

SEQ ID NO: 121292 - RNA, 1410 nt, Artificial Sequence
  derived and/or modified CDS sequence (opt2) from neuraminidase__InfluenzaA__AHZ36117
augaaccccaaccagaagaucaucaccaucggcuccgucugcaugaccaucggcauggccaaccucauccuccagaucggcaacaucaucuccaucuggaucucccacuccauccagcucggcaaccagaaccagaucgagaccugcaaccaguccgucaucaucuacgagaacaacaccugggucaaccagaccuacgucaacaucuccaacaccaacuucgccgccggccaguccgucgucuccgucaagcucgccggcaacuccucccucugccccgucuccggcugggccaucuacuccaaggacaacuccauccgcaucggcuccaagggcgacgucuucgucauccgcgagcccuucaucuccugcuccccccucgagugccgcaccuucuuccucacccagggcgcccuccucaacgacaagcacuccaacggcaccaucaaggaccgcucccccuaccgcacccucauguccugcuccaucggcgagguccccucccccuacaacucccgcuucgaguccgucgccugguccgccuccgccugccacgacggcuucaacuggcucaccaucggcaucuccggccccgacaacggcgccgucgccguccucaaguacaacggcaucaucaccgacaccaucaaguccuggcgcaacaacauccuccgcacccaggaguccgagugcgccugcgucaacggcuccugcuucaccaucaugaccgacggccccuccgacggccaggccuccuacaagaucuuccgcaucgagaagggcaagaucgucaaguccgucgagaugaacgcccccaacuaccacuacgaggagugcuccugcuaccccgacuccuccgagaucaccugcgucugccgcgacaacuggcacggcuccaaccgccccugggucuccuucaaccagaaccucgaguaccagaucggcuacaucugcuccggcaucuucggcgacaacccccgccccaacgacaagaccggcuccugcggccccgucuccuccaacggcgccaacggcgucaagggcuucuccuucaaguacggcaacggcgucuggaucggccgcaccaaguccaucuccucccgcaagggcuucgagaugaucugggaccccaacggcuggaccggcaccgacaacaacuucuccaucaagcaggacaucaucggcaucaacgagugguccggcuacuccggcuccuucguccagcaccccgagcucaccggccucgacugcauccgccccugcuucugggucgagcucauccgcggccgccccaaggagaacaccaucuggaccuccggcuccuccaucuccuucugcggcgucaacuccgacaccgucggcugguccuggcccgacggcgccgagcuccccuucaccaucgacaaguga

SEQ ID NO: 121293 - RNA, 1410 nt, Artificial Sequence; identical to SEQ ID NO: 121269
  derived and/or modified CDS sequence (opt2) from neuraminidase__InfluenzaA__AHZ36128

SEQ ID NO: 121294 - RNA, 1410 nt, Artificial Sequence; identical to SEQ ID NO: 121269
  derived and/or modified CDS sequence (opt2) from neuraminidase__InfluenzaA__AHZ36139

SEQ ID NO: 121295 - RNA, 1410 nt, Artificial Sequence; identical to SEQ ID NO: 121287
  derived and/or modified CDS sequence (opt2) from neuraminidase__InfluenzaA__AHZ36150

SEQ ID NO: 121296 - RNA, 1410 nt, Artificial Sequence; identical to SEQ ID NO: 121269
  derived and/or modified CDS sequence (opt2) from neuraminidase__InfluenzaA__AHZ36161

SEQ ID NO: 121297 - RNA, 1410 nt, Artificial Sequence; identical to SEQ ID NO: 121269
  derived and/or modified CDS sequence (opt2) from neuraminidase__InfluenzaA__AHZ36172

SEQ ID NO: 121298 - RNA, 1410 nt, Artificial Sequence
  derived and/or modified CDS sequence (opt2) from neuraminidase__InfluenzaA__AHZ36183
augaaccccaaccagaagaucaucaccaucggcuccgucugcaugaccaucggcauggccaaccucaugcuccagaucggcaacaucaucuccaucuggaucucccacuccauccagcucggcaacaagaaccagaucgagaccugcaaccaguccgucaucaccuacgagaacaacaccugggucaaccagaccuacgucaacaucuccaacaccaacuucgccgccggccaguccgucgucuccgucaagaucgccggcaacuccucccucugccccgucuccggcugggccaucuacuccaaggacaacuccauccgcaucggcuccaagggcgacgucuucgucauccgcgagcccuucaucuccugcuccccccucgagugccgcaccuucuuccucacccagggcgcccuccucaacgacaagcacuccaacggcaccaucaaggaccgcucccccuaccgcacccucauguccugccccaucggcgagguccccucccccuacaacucccgcuucgaguccgucgccugguccgccuccgccugccacgacggcaucaacuggcucaccaucggcaucuccggccccgacaacggcgccgucgccguccucaaguacaacggcaucaucaccgacaccaucaaguccuggcgcaacaacauccuccgcacccaggaguccgagugcgccugcgucaacggcuccugcuucaccaucaugaccgacggccccuccgacggccaggccuccuacaagaucuuccgcaucgagaagggcaagaucgucaaguccgucgagaugaacgcccccaacuaccacuacgaggagugcuccugcuaccccgacuccuccgagaucaccugcgucugccgcgacaacuggcacggcuccaaccgccccugggucuccuucaaccagaaccucgaguaccagaucggcuacaucugcuccggcauccucggcgacaacccccgcccccacgacaagaccggcuccugcggccccgucuccuccaacggcgccaacggcgucaagggcuucuccuucaaguacggcaacggcgucuggaucggccgcaccaaguccaucuccucccgcaagggcuucgagaugaucugggaccccaacggcuggaccggcaccgacaacaacuucuccaucaagcaggacaucgucggcaucaacgagugguccggcuacuccggcuccuucguccagcaccccgagcucaccggccucgacugcauccgccccugcuucugggucgagcucauccgcggccgccccaaggagaacaccaucuggaccuccggcuccuccaucuccuucugcggcgucaacuccgacaccgucggcugguccuggcccgacggcgccgagcuccccuucaccaucgacaaguga

SEQ ID NO: 121299 - RNA, 1410 nt, Artificial Sequence; identical to SEQ ID NO: 121268
  derived and/or modified CDS sequence (opt2) from neuraminidase__InfluenzaA__AHZ36194

SEQ ID NO: 121300 - RNA, 1410 nt, Artificial Sequence; identical to SEQ ID NO: 121287
  derived and/or modified CDS sequence (opt2) from neuraminidase__InfluenzaA__AHZ36206

SEQ ID NO: 121301 - RNA, 1410 nt, Artificial Sequence; identical to SEQ ID NO: 121269
  derived and/or modified CDS sequence (opt2) from neuraminidase__InfluenzaA__AHZ36218

SEQ ID NO: 121302 - RNA, 1410 nt, Artificial Sequence; identical to SEQ ID NO: 121287
  derived and/or modified CDS sequence (opt2) from neuraminidase__InfluenzaA__AHZ36229

SEQ ID NO: 121303 - RNA, 1410 nt, Artificial Sequence; identical to SEQ ID NO: 121269
  derived and/or modified CDS sequence (opt2) from neuraminidase__InfluenzaA__AHZ36241

SEQ ID NO: 121304 - RNA, 1410 nt, Artificial Sequence; identical to SEQ ID NO: 121269
  derived and/or modified CDS sequence (opt2) from neuraminidase__InfluenzaA__AHZ36252

SEQ ID NO: 121305 - RNA, 1410 nt, Artificial Sequence; identical to SEQ ID NO: 121269
  derived and/or modified CDS sequence (opt2) from neuraminidase__InfluenzaA__AHZ36263

SEQ ID NO: 121306 - RNA, 1410 nt, Artificial Sequence; identical to SEQ ID NO: 118958
  derived and/or modified CDS sequence (opt2) from neuraminidase__InfluenzaA__AHZ36274

SEQ ID NO: 121307 - RNA, 1410 nt, Artificial Sequence; identical to SEQ ID NO: 121269
  derived and/or modified CDS sequence (opt2) from neuraminidase__InfluenzaA__AHZ36286

SEQ ID NO: 121308 - RNA, 1410 nt, Artificial Sequence
  derived and/or modified CDS sequence (opt2) from neuraminidase__InfluenzaA__AHZ36297
augaaccccaaccagaagaucaucaccaucggcuccgucucccucaccaucuccaccaucugcuucuucaugcagaucgccauccucaucaccaccgucacccuccacuucaagcaguacgaguucaacuccccccccaacaaccaggucaugcucugcgagcccaccaucaucgagcgcaacaucaccgagaucgucuaccucaccaacaccaccaucgagaaggagaucugcccccgccccgccgaguaccgcaacugguccaagccccagugcgacaucaccggcuucgcccccuucuccaaggacaacuccauccgccucuccgccggcggcgacaucugggucacccgcgagcccuacgucuccugcgaccccgacaagugcuaccaguucgcccucggccagggcaccacccucaacaacguccacuccaacaacaccguccgcgaccgcacccccuaccgcacccuccucaugaacgagcucggcguccccuuccaccucggcaccaagcaggucugcaucgccugguccuccuccuccugccacgacggcaaggccuggcuccacgucugcaucaccggcgacgacaagaacgccaccgccuccuucaucuacaacggccgccucgucgacuccgucgucuccugguccaaggagauccuccgcacccaggaguccgagugcgucugcaucaacggcaccugcaccgucgucaugaccgacggcuccgccuccggcaaggccgacaccaagauccucuucaucgaggagggcaagaucguccacaccuccacccucuccggcggcgcccagcacgucgaggagugcuccugcuacccccgcuaccccggcguccgcugcgucugccgcgacaacuggaagggcuccaaccgccccaucgucgacaucaacaucaaggaccacuccaucgucuccuccuacgucugcuccggccucgucggcgacaccccccgcaagaacgacuccuccuccuccucccacugccucgaccccaacaacgaggagggcggccacggcgucaagggcugggccuucgacgacggcaacgacgucuggaugggccgcaccaucaacgagaccucccgccucggcuacgagaccuucaaggucaucgagggcugguccaaccccaaguccaagcuccagaucaaccgccaggucaucgucgaccgcggcgaccgcuccggcuacuccggcaucuucuccgucgagggcaaguccugcaucaaccgcugcuucuacgucgagcucauccgcggccgcaaggaggagaccgagguccucuggaccuccaacuccaucgucgucuucugcggcaccuccggcaccuacggcaccggcuccuggcccgacggcgccgaccucaaccucaugcccaucuga

SEQ ID NO: 121309 - RNA, 1410 nt, Artificial Sequence
  derived and/or modified CDS sequence (opt2) from neuraminidase__InfluenzaA__AHZ36309
augaaccccaaccagaagaucaucaccaucggcuccgucugcaugaccaucggcauggccaaccucaugcuccagaucggcaacaucaucuccaucuggaucucccacuccauccagcucggcgacaagaaccagaucgagaccugcaaccaguccgucaucaccuacgagaacaacaccugggucaaccagaccuacgucaacaucuccaacaccaacuucgccgccggccaguccgucgucuccgucaagaucgccggcaacuccucccucugccccgucuccggcugggccaucuacuccaaggacaacuccauccgcaucggcuccaagggcgacgucuucgucauccgcgagcccuucaucuccugcuccccccucgagugccgcaccuucuuccucacccagggcgcccuccucaacgacaagcacuccaacggcaccaucaaggaccgcucccccuaccgcacccucauguccugccccaucggcgagguccccucccccuacaacucccgcuucgaguccgucgccugguccgccuccgccugccacgacggcaucaacuggcucaccaucggcaucuccggccccgacaacggcgccgucgccguccucaaguacaacggcaucaucaccgacaccaucaaguccuggcgcaacaacauccuccgcacccaggaguccgagugcgccugcgucaacggcuccugcuucaccaucaugaccgacggccccuccgacggccaggccuccuacaagaucuuccgcaucgagaagggcaagaucgucaaguccgucgagaugaacgcccccaacuaccacuacgaggagugcuccugcuaccccgacuccuccgagaucaccugcgucugccgcgacaacuggcacggcuccaaccgccccugggucuccuucaaccagaaccucgaguaccagaucggcuacaucugcuccggcaucuucggcgacaacccccgcccccacgacaagaccggcuccugcggccccgucuccuccaacggcgccaacggcgucaagggcuucuccuucaaguacggcaacggcgucuggaucggccgcaccaaguccaucuccucccgcaagggcuucgagaugaucugggaccccaacggcuggaccggcaccgacaacaacuucuccaucaagcaggacaucgucggcaucaacgagugguccggcuacuccggcuccuucguccagcaccccgagcucaccggccucgacugcauccgccccugcuucugggucgagcucauccgcggccgccccaaggagaacaccaucuggaccuccggcuccuccaucuccuucugcggcgucaacuccgacaccgucggcugguccuggcccgacggcgccgagcuccccuucaccaucgacaaguga

SEQ ID NO: 121310 - RNA, 1410 nt, Artificial Sequence; identical to SEQ ID NO: 121269
  derived and/or modified CDS sequence (opt2) from neuraminidase__InfluenzaA__AHZ36320

SEQ ID NO: 121311 - RNA, 1410 nt, Artificial Sequence; identical to SEQ ID NO: 121269
  derived and/or modified CDS sequence (opt2) from neuraminidase__InfluenzaA__AHZ36331

SEQ ID NO: 121312 - RNA, 1410 nt, Artificial Sequence; identical to SEQ ID NO: 118958
  derived and/or modified CDS sequence (opt2) from neuraminidase__InfluenzaA__AHZ36353

SEQ ID NO: 121313 - RNA, 1410 nt, Artificial Sequence
  derived and/or modified CDS sequence (opt2) from neuraminidase__InfluenzaA__AHZ36365
augaaccccaaccagaagaucaucaccaucggcuccgucugcaugaccaucggcauggccaaccucaugcuccagaucggcaacaucaucuccaucuggaucucccaccccauccagcucggcaacaagaaccagaucgagaccugcaaccaguccgucaucaccuacgagaacaacaccugggucaaccagaccuacgucaacaucuccaacaccaacuucgccgccggccaguccgucgucuccgucaagaucgccggcaacuccucccucugccccgucuccggcugggccaucuacuccaaggacaacuccauccgcaucggcuccaagggcgacgucuucgucauccgcgagcccuucaucuccugcuccccccucgagugccgcaccuucuuccucacccagggcgcccuccucaacgacaagcacuccaacggcaccaucaaggaccgcucccccuaccgcacccucauguccugccccaucggcgagguccccucccccuacaacucccgcuucgaguccgucgccugguccgccuccgccugccacgacggcaucaacuggcucaccaucggcaucuccggccccgacaacggcgccgucgccguccucaaguacaacggcaucaucaccgacaccaucaaguccuggcgcaacaacauccuccgcacccaggaguccgagugcgccugcgucaacggcuccugcuucaccaucaugaccgacggccccuccgacggccaggccuccuacaagaucuuccgcaucgagaagggcaagaucgucaaguccgucgagaugaacgcccccaacuaccacuacgaggagugcuccugcuaccccgacuccuccgagaucaccugcgucugccgcgacaacuggcacggcuccaaccgccccugggucuccuucaaccagaaccucgaguaccagaucggcuacaucugcuccggcaucuucggcgacaacccccgcccccacgacaagaccggcuccugcggccccgucuccuccaacggcgccaacggcgucaagggcuucuccuucaaguacggcaacggcgucuggaucggccgcaccaaguccaucuccucccgcaagggcuucgagaugaucugggaccccaacggcuggaccggcaccgacaacaacuucuccaucaagcaggacaucgucggcaucaacgagugguccggcuacuccggcuccuucguccagcaccccgagcucaccggccucgacugcauccgccccugcuucugggucgagcucauccgcggccgccccaaggagaacaccaucuggaccuccggcuccuccaucuccuucugcggcgucaacuccgacaccgucggcugguccuggcccgacggcgccgagcuccccuucaccaucgacaaguga

SEQ ID NO: 121314 - RNA, 1410 nt, Artificial Sequence; identical to SEQ ID NO: 118958
  derived and/or modified CDS sequence (opt2) from neuraminidase__InfluenzaA__AHZ36376

SEQ ID NO: 121315 - RNA, 1410 nt, Artificial Sequence; identical to SEQ ID NO: 118958
  derived and/or modified CDS sequence (opt2) from neuraminidase__InfluenzaA__AHZ36388

SEQ ID NO: 121316 - RNA, 1410 nt, Artificial Sequence; identical to SEQ ID NO: 118958
  derived and/or modified CDS sequence (opt2) from neuraminidase__InfluenzaA__AHZ36400

SEQ ID NO: 121317 - RNA, 1410 nt, Artificial Sequence; identical to SEQ ID NO: 118958
  derived and/or modified CDS sequence (opt2) from neuraminidase__InfluenzaA__AHZ36412

SEQ ID NO: 121318 - RNA, 1410 nt, Artificial Sequence; identical to SEQ ID NO: 118958
  derived and/or modified CDS sequence (opt2) from neuraminidase__InfluenzaA__AHZ36424

SEQ ID NO: 121319 - RNA, 1410 nt, Artificial Sequence; identical to SEQ ID NO: 118958
  derived and/or modified CDS sequence (opt2) from neuraminidase__InfluenzaA__AHZ36436

SEQ ID NO: 121320 - RNA, 1410 nt, Artificial Sequence
  derived and/or modified CDS sequence (opt2) from neuraminidase__InfluenzaA__AHZ36448
augaaccccaaccagaagaucaucaccaucggcuccgucucccucaccaucuccaccaucugcuucuucaugcagaucgccauccucaucaccaccgucacccuccacuucaagcaguacgaguucaacuccccccccaacaaccaggucaugcucugcgagcccaccaucaucgagaagaacaucaccgagaucgucuaccucaccaacaccaccaucgagaaggagaucugccccaagcccgccgaguaccgcaacugguccaagccccagugcgacaucaccggcuucgcccccuucuccaaggacaacuccauccgccucuccgccggcggcgacaucugggucacccgcgagcccuacgucuccugcgaccccgacaagugcuaccaguucgcccucggccagggcaccacccucaacaacguccacuccaacaacaccguccgcgaccgcacccccuaccgcacccuccucaugaacgagcucggcguccccuuccaccucggcaccaagcaggucugcaucgccugguccuccuccuccugccacgacggcaaggccuggcuccacgucugcaucaccggcgacgacaagaacgccaccgccuccuucaucuacaacggccgccucgucgacuccgucgucuccugguccaaggagauccuccgcacccaggaguccgagugcgucugcaucaacggcaccugcaccgucgucaugaccgacggcuccgccuccggcaaggccgacaccaagauccucuucaucgaggagggcaagaucguccacaccuccacccucuccggcuccgcccagcacgucgaggagugcuccugcuacccccgcuaccccggcguccgcugcgucugccgcgacaacuggaagggcuccaaccgccccaucgucgacaucaacaucaaggaccacuccaucgucuccuccuacgucugcuccggccucgucggcgacaccccccgcaagaacgacuccuccuccuccucccacugccucgaccccaacaacgaggagggcggccacggcgucaagggcugggccuucgacgacggcaacgacgucuggaugggccgcaccaucaacgagaccucccgccucggcuacgagaccuucaaggucaucgagggcugguccaaccccaaguccaagcuccagaucaaccgccaggucaucgucgaccgcggcgaccgcuccggcuacuccggcaucuucuccgucgagggcaaguccugcaucaaccgcugcuucuacgucgagcucauccgcggccgcaaggaggagaccgagguccucuggaccuccaacuccaucgucgucuucugcggcaccuccggcaccuacggcaccggcuccuggcccgacggcgccgaccucaaccucaugcccaucuga

SEQ ID NO: 121321 - RNA, 1410 nt, Artificial Sequence; identical to SEQ ID NO: 118958
  derived and/or modified CDS sequence (opt2) from neuraminidase__InfluenzaA__AHZ36460

SEQ ID NO: 121322 - RNA, 1410 nt, Artificial Sequence; identical to SEQ ID NO: 118958
  derived and/or modified CDS sequence (opt2) from neuraminidase__InfluenzaA__AHZ36472

SEQ ID NO: 121323 - RNA, 1410 nt, Artificial Sequence; identical to SEQ ID NO: 118958
  derived and/or modified CDS sequence (opt2) from neuraminidase__InfluenzaA__AHZ36484

SEQ ID NO: 121324 - RNA, 1410 nt, Artificial Sequence; identical to SEQ ID NO: 118958
  derived and/or modified CDS sequence (opt2) from neuraminidase__InfluenzaA__AHZ36496

SEQ ID NO: 121325 - RNA, 1410 nt, Artificial Sequence; identical to SEQ ID NO: 118958
  derived and/or modified CDS sequence (opt2) from neuraminidase__InfluenzaA__AHZ36508

SEQ ID NO: 121326 - RNA, 1410 nt, Artificial Sequence; identical to SEQ ID NO: 118958
  derived and/or modified CDS sequence (opt2) from neuraminidase__InfluenzaA__AHZ36520

SEQ ID NO: 121327 - RNA, 1410 nt, Artificial Sequence
  derived and/or modified CDS sequence (opt2) from neuraminidase__InfluenzaA__AHZ36532
augaaccccaaccagaagaucaucaccaucggcuccgucucccucaccaucuccaccaucugcuucuucaugcagaucgccauccucaucaccaccgucacccuccacuucaagcaguacgaguucaacuccccccccaacaaccaggucaugcucugcgagcccaccaucaucgagcgcaacaucaccgagaucgucuaccucaccaacaccaccaucgagaaggagaucugccccaagcccgccgaguaccgcaccugguccaagccccagugcgacaucaccggcuucgcccccuucuccaaggacaacuccauccgccucuccgccggcggcgacaucugggucacccgcgagcccuacgucuccugcgaccccgacaagugcuaccaguucgcccucggccagggcaccacccucaacaacguccacuccaacaacaccguccgcgaccgcacccccuaccgcacccuccucaugaacgagcucggcguccccuuccaccucggcaccaagcaggucugcaucgccugguccuccuccuccugccacgacggcaaggccuggcuccacgucugcaucaccggcgacgacaagaacgccaccgccuccuucaucuacaacggccgccucgucgacuccgucgucuccugguccaaggagauccuccgcacccaggaguccgagugcgucugcaucaacggcaccugcaccgucgucaugaccgacggcuccgccuccggcaaggccgacaccaagauccucuucaucgaggagggcaagaucguccacaccuccacccucuccggcuccgcccagcacgucgaggagugcuccugcuacccccgcuaccccggcguccgcugcgucugccgcgacaacuggaagggcuccaaccgccccaucgucgacaucaacaucaaggaccacuccaucgucuccuccuacgucugcuccggccucgucggcgacaccccccgcaagaacgacuccuccuccuccucccacugccucgaccccaacaacgaggagggcggccacggcgucaagggcugggccuucgacgacggcaacgacgucuggaugggccgcaccaucaacgagaccucccgccucggcuacgagaccuucaaggucaucgagggcugguccaaccccaaguccaagcuccagaucaaccgccaggucaucgucgaccgcggcgaccgcuccggcuacuccggcaucuucuccgucgagggcaaguccugcaucaaccgcugcuucuacgucgagcucauccgcggccgcaaggaggagaccgagguccucuggaccuccaacuccaucgucgucuucugcggcaccuccggcaccuacggcaccggcuccuggcccgacggcgccgaccucaaccucaugcccaucuga

SEQ ID NO: 121328 - RNA, 1410 nt, Artificial Sequence; identical to SEQ ID NO: 118958
  derived and/or modified CDS sequence (opt2) from neuraminidase__InfluenzaA__AHZ36544

SEQ ID NO: 121329 - RNA, 1410 nt, Artificial Sequence; identical to SEQ ID NO: 118958
  derived and/or modified CDS sequence (opt2) from neuraminidase__InfluenzaA__AHZ36556

SEQ ID NO: 121330 - RNA, 1410 nt, Artificial Sequence; identical to SEQ ID NO: 118958
  derived and/or modified CDS sequence (opt2) from neuraminidase__InfluenzaA__AHZ36568

SEQ ID NO: 121331 - RNA, 1410 nt, Artificial Sequence; identical to SEQ ID NO: 118958
  derived and/or modified CDS sequence (opt2) from neuraminidase__InfluenzaA__AHZ36580

SEQ ID NO: 121332 - RNA, 1410 nt, Artificial Sequence; identical to SEQ ID NO: 118958
  derived and/or modified CDS sequence (opt2) from neuraminidase__InfluenzaA__AHZ36592

SEQ ID NO: 121333 - RNA, 1410 nt, Artificial Sequence; identical to SEQ ID NO: 118958
  derived and/or modified CDS sequence (opt2) from neuraminidase__InfluenzaA__AHZ36604

SEQ ID NO: 121334 - RNA, 1410 nt, Artificial Sequence; identical to SEQ ID NO: 118958
  derived and/or modified CDS sequence (opt2) from neuraminidase__InfluenzaA__AHZ36616

SEQ ID NO: 121335 - RNA, 1410 nt, Artificial Sequence
  derived and/or modified CDS sequence (opt2) from neuraminidase__InfluenzaA__AHZ36628
augaaccccaaccagaagaucaucaccaucggcuccgucucccucaccaucuccaccaucugcuucuucaugcagaucgccauccucaucaccaccgucacccuccacuucaagcagugcgaguucaacuccccccccaacaaccaggucaugcucugcgagcccaccaucaucgagcgcaacaucaccgagaucgucuaccucaccaacaccaccaucgagaaggagaucugccccaagcccgccgaguaccgcaacugguccaagccccagugcgacaucaccggcuucgcccccuucuccaaggacaacuccauccgccucuccgccggcggcgacaucugggucacccgcgagcccuacgucuccugcgaccccgacaagugcuaccaguucgcccucggccagggcaccacccucaacaacguccacuccaacaacaccguccgcgaccgcacccccuaccgcacccuccucaugaacgagcucggcguccccuuccaccucggcaccaagcaggucugcaucgccugguccuccuccuccugccacgacggcaaggccuggcuccacgucugcaucaccggcgacgacaagaacgccaccgccuccuucaucuacaacggccgccucgucgacuccgucgucuccugguccaaggagauccuccgcacccaggaguccgagugcgucugcaucaacggcaccugcaccgucgucaugaccgacggcuccgccuccggcaaggccgacaccaagauccucuucaucgaggagggcaagaucguccacaccuccacccucuccggcuccgcccagcacgucgaggagugcuccugcuacccccgcuaccccggcguccgcugcgucugccgcgacaacuggaagggcuccaaccgccccaucgucgacaucaacaucaaggaccacuccaucgucuccuccuacgucugcuccggccucgucggcgacaccccccgcaagaacgacuccuccuccuccucccacugccucgaccccaacaacgaggagggcggccacggcgucaagggcugggccuucgacgacggcaacgacgucuggaugggccgcaccaucaacgagaccucccgccucggcuacgagaccuucaaggucaucgagggcugguccaaccccaaguccaagcuccagaucaaccgccaggucaucgucgaccgcggcgaccgcuccggcuacuccggcaucuucuccgucgagggcaaguccugcaucaaccgcugcuucuacgucgagcucauccgcggccgcaaggaggagaccgagguccucuggaccuccaacuccaucgucgucuucugcggcaccuccggcaccuacggcaccggcuccuggcccgacggcgccgaccucaaccucaugcccaucuga

SEQ ID NO: 121336 - RNA, 1410 nt, Artificial Sequence
  derived and/or modified CDS sequence (opt2) from neuraminidase__InfluenzaA__AHZ36640
augaaccccaaccagaagaucaucaccaucggcuccgucucccucaccaucuccaccaucugcuucuucaugcagaucgccauccucaucaccaccgucacccuccacuucaagcaguacgaguucaacuccccccccaacaaccaggucaugcucugcgagcccaccaucaucgagcgcaacaucaccgagaucgucuaccucaccaacaccaccaucgagaaggagaucugccccaagcccgccgaguaccgcaacugguccaagccccagugcgacaucaccggcuucgcccccuucuccaaggacaacuccauccgccucuccgccggcggcgacaucugggucacccgcgagcccuacgucuccugcgaccccgacaagugcuaccaguucgcccucggccagggcaccacccucaacaacguccacuccaacaacaccguccacgaccgcacccccuaccgcacccuccucaugaacgagcucggcguccccuuccaccucggcaccaagcaggucugcaucgccugguccuccuccuccugccacgacggcaaggccuggcuccacgucugcaucaccggcgacgacaagaacgccaccgccuccuucaucuacaacggccgccucgucgacuccgucgucuccugguccaaggagauccuccgcacccaggaguccgagugcgucugcaucaacggcaccugcaccgucgucaugaccgacggcuccgccuccggcaaggccgacaccaagauccucuucaucgaggagggcaagaucguccacaccuccacccucuccggcuccgcccagcacgucgaggagugcuccugcuacccccgcuaccccggcguccgcugcgucugccgcgacaacuggaagggcuccaaccgccccaucgucgacaucaacaucaaggaccacuccaucgucuccuccuacgucugcuccggccucgucggcgacaccccccgcaagaacgacuccuccuccuccucccacugccucgaccccaacaacgaggagggcggccacggcgucaagggcugggccuucgacgacggcaacgacgucuggaugggccgcaccaucaacgagaccucccgccucggcuacgagaccuucaaggucaucgagggcugguccaaccccaaguccaagcuccagaucaaccgccaggucaucgucgaccgcggcgaccgcuccggcuacuccggcaucuucuccgucgagggcaaguccugcaucaaccgcugcuucuacgucgagcucauccgcggccgcaaggaggagaccgagguccucuggaccuccaacuccaucgucgucuucugcggcaccuccggcaccuacggcaccggcuccuggcccgacggcgccgaccucaaccucaugcccaucuga

SEQ ID NO: 121337 - RNA, 1410 nt, Artificial Sequence; identical to SEQ ID NO: 118958
  derived and/or modified CDS sequence (opt2) from neuraminidase__InfluenzaA__AHZ36652

SEQ ID NO: 121338 - RNA, 1410 nt, Artificial Sequence; identical to SEQ ID NO: 118182
  derived and/or modified CDS sequence (opt2) from neuraminidase__InfluenzaA__AHZ36664

SEQ ID NO: 121339 - RNA, 1410 nt, Artificial Sequence; identical to SEQ ID NO: 118182
  derived and/or modified CDS sequence (opt2) from neuraminidase__InfluenzaA__AHZ36676

SEQ ID NO: 121340 - RNA, 1410 nt, Artificial Sequence; identical to SEQ ID NO: 118182
  derived and/or modified CDS sequence (opt2) from neuraminidase__InfluenzaA__AHZ36688

SEQ ID NO: 121341 - RNA, 1398 nt, Artificial Sequence; identical to SEQ ID NO: 119490
  derived and/or modified CDS sequence (opt2) from neuraminidase__InfluenzaA__AHZ39689

SEQ ID NO: 121342 - RNA, 1398 nt, Artificial Sequence; identical to SEQ ID NO: 119490
  derived and/or modified CDS sequence (opt2) from neuraminidase__InfluenzaA__AHZ39713

SEQ ID NO: 121343 - RNA, 1398 nt, Artificial Sequence; identical to SEQ ID NO: 119490
  derived and/or modified CDS sequence (opt2) from neuraminidase__InfluenzaA__AHZ39725

SEQ ID NO: 121344 - RNA, 1398 nt, Artificial Sequence; identical to SEQ ID NO: 119490
  derived and/or modified CDS sequence (opt2) from neuraminidase__InfluenzaA__AHZ39737

SEQ ID NO: 121345 - RNA, 1398 nt, Artificial Sequence
  derived and/or modified CDS sequence (opt2) from neuraminidase__InfluenzaA__AHZ39749
augaaccccaaccagaagauccucugcaucuccgccaccgccaucaucaucggcgccaucgccguccucaucggcaucgccaaccucggccucaacaucggccuccaccucaagcccggcugcaacugcucccacucccagcccgagaccaccaacaccucccagaccaucaucaacaacuacuacaacgagaccaacaucaccaacauccagauggaggagcgcaccucccgcaacuucaacaaccucaccaagggccucugcaccaucaacuccuggcacaucuacggcaaggacaacgccguccgcaucggcgaguccuccgacguccucgucacccgcgagcccuacgucuccugcgaccccgacgagugccgcuucuacgcccucucccagggcaccaccauccgcggcaagcacuccaacggcaccauccacgaccgcucccaguaccgcgcccucaucuccuggccccucuccuccccccccaccgucuacaacucccgcgucgagugcaucggcugguccuccaccuccugccacgacggcaagucccgcauguccaucugcaucuccggccccaacaacaacgccuccgccgucgucugguacaaccgccgccccgucgccgagaucaacaccugggcccgcaacauccuccgcacccaggaguccgagugcgucugccacaacggcgucugccccgucgucuucaccgacggcuccgccaccggccccgccgacacccgcaucuacuacuucaaggagggcaagauccucaagugggagucccucaccggcaccgccaagcacaucgaggagugcuccugcuacggcgagcgcaccggcaucaccugcaccugccgcgacaacuggcagggcuccaaccgccccgucauccagaucgaccccgucgccaugacccacaccucccaguacaucugcucccccguccucaccgacaacccccgccccaacgaccccaacaucggcaagugcaacgaccccuaccccggcaacaacaacaacggcgucaagggcuucuccuaccucgacggcgccaacaccuggcucggccgcaccaucuccaccgccucccgcuccggcuacgagaugcucaagguccccaacgcccucaccgacgaccgcuccaagcccauccagggccagaccaucguccucaacgccgacugguccggcuacuccggcuccuucauggacuacugggccgagggcgacugcuaccgcgccugcuucuacgucgagcucauccgcggccgccccaaggaggacaaggucugguggaccuccaacuccaucgucuccaugugcuccuccaccgaguuccucggccaguggaacuggcccgacggcgccaagaucgaguacuuccucuga

SEQ ID NO: 121346 - RNA, 1398 nt, Artificial Sequence; identical to SEQ ID NO: 121345
  derived and/or modified CDS sequence (opt2) from neuraminidase__InfluenzaA__AHZ39761

SEQ ID NO: 121347 - RNA, 1398 nt, Artificial Sequence; identical to SEQ ID NO: 119490
  derived and/or modified CDS sequence (opt2) from neuraminidase__InfluenzaA__AHZ39773

SEQ ID NO: 121348 - RNA, 1398 nt, Artificial Sequence; identical to SEQ ID NO: 119490
  derived and/or modified CDS sequence (opt2) from neuraminidase__InfluenzaA__AHZ39785

SEQ ID NO: 121349 - RNA, 1410 nt, Artificial Sequence
  derived and/or modified CDS sequence (opt2) from neuraminidase__InfluenzaA__AHZ39797
augaaccccaaccagaagaucaucaccaucggcuccgucucccucaccaucuccaccgucugcuucuucaugcagaucgccauccucaucaccaccgucacccuccacuucaagcaguacgaguucaaccccccccccaacaaccaggucaugcucugcgagcccaccaucaucgagcgcaacaucaccgagaucgucuaccucaccaacaccaccaucgagaaggagaucugccccaagcccgccgaguaccgcaacugguccaagccccagugcggcaucaccggcuucgcccccuucuccaaggacaacuccauccgccucuccgccggcggcgacaucugggucacccgcgagcccuacgucuccugcgaccccgacaagugcuaccaguucgcccucggccagggcaccacccucaacaacguccacuccaacaacaccguccgcgaccgcacccccuaccgcacccuccucaugaacgagcucggcguccccuuccaccucggcaccaagcaggucugcaucgccugguccuccuccuccugccacgacggcaaggccuggcuccacgucugcaucaccggcgacgacaagaacgccaccgccuccuucaucuacaacggccgccucgucgacuccgucgucuccugguccaaggagauccuccgcacccaggaguccgagugcgucugcaucaacggcaccugcaccgucgucaugaccgacggcuccgccuccggcaaguccgacaccaagauccucuucaucgaggagggcaagaucguccacaccuccacccucuccggcuccgcccagcacgucgaggagugcuccugcuacccccgcuaccccggcguccgcugcgucugccgcgacaacuggaagggcuccaaccgccccaucgucgacaucaacaucaaggaccacuccaucgucuccuccuacgucugcuccggccucgucggcgacaccccccgcaagaacgacuccuccuccuccucccacugccucgaccccaacaacgaggagggcggccacggcgucaagggcugggccuucgacgacggcaacgacgucuggaugggccgcaccaucaacgagaccucccgccucggcuacgagaccuucaaggucaucgagggcugguccaaccccaaguccaagcuccagaucaaccgccaggucaucgucgaccgcggcgaccgcuccggcuacuccggcaucuucuccgucgagggcaaguccugcaucaaccgcugcuucuacgucgagcucauccgcggccgcaaggaggagaccgagguccucuggaccuccaacuccaucgucgucuucugcggcaccuccggcaccuacggcaccggcuccuggcccgacggcgccgaccucaaccucaugcccaucuga

SEQ ID NO: 121350 - RNA, 1410 nt, Artificial Sequence
  derived and/or modified CDS sequence (opt2) from neuraminidase__InfluenzaA__AHZ39821
augaaccccaaccagaagaucaucaccaucggcuccgucucccucaccaucuccaccaucugcuucuucaugcagaccgccauccucaucaccaccgucacccuccacuucaagcaguacgaguucaacuccccccccaacaaccaggucaugcucugcgagcccaccaucaucgagcgcaacaucaccgagaucgucuaccucaccaacaccaccaucgagaaggagaucugccccaagcucgccgaguaccgcaacugguccaagccccagugcgacaucaccggcuucgcccccuucuccaaggacaacuccauccgccucuccgccggcggcgacaucugggucacccgcgagcccuacgucuccugcgaccccgacaagugcuaccaguucgcccucggccagggcaccacccucaacaacguccacuccaacaacaccguccgcgaccgcacccccuaccgcacccuccucaugaacgagcucggcguccccuuccaccucggcaccaagcaggucugcaucgccugguccuccuccuccugccacgacggcaaggccuggcuccacgucugcaucaccggcgacgacaagaacgccaccgccuccuucaucuacaacggccgccucgucgacuccgucgucuccugguccaaggagauccuccgcacccaggaguccgagugcgucugcaucaacggcaccugcaccgucgucaugaccgacggcuccgccuccggcaaggccgacaccaagauccucuucaucgaggagggcaagaucguccacaccuccacccucuccggcuccgcccagcacgucgaggagugcuccugcuacccccgcuaccccggcguccgcugcgucugccgcgacaacuggaagggcuccaaccgccccaucgucgacaucaacaucaaggaccacuccaucgucuccuccuacgucugcuccggccucgucggcgacaccccccgccgcaacgacuccuccuccuccucccacugccucgaccccaacaacgaggagggcggccacggcgucaagggcugggccuucgacgacggcaacgacgucuggaugggccgcaccaucaacgagaccucccgccucggcuacgagaccuucaaggucaucgagggcugguccaaccccaaguccaagcuccagaucaaccgccaggucaucgucgaccgcggcaaccgcuccggcuacuccggcaucuucuccgucgagggcaaguccugcaucaaccgcugcuucuacgucgagcucauccgcggccgcaaggaggagaccgagguccucuggaccuccaacuccaucgucgucuucugcggcaccuccggcaccuacggcaccggcuccuggcccgacggcgccgaccucaaccucaugcccaccuga

SEQ ID NO: 121351 - RNA, 1410 nt, Artificial Sequence; identical to SEQ ID NO: 119425
  derived and/or modified CDS sequence (opt2) from neuraminidase__InfluenzaA__AHZ39833

SEQ ID NO: 121352 - RNA, 1410 nt, Artificial Sequence; identical to SEQ ID NO: 118182
  derived and/or modified CDS sequence (opt2) from neuraminidase__InfluenzaA__AHZ39844

SEQ ID NO: 121353 - RNA, 1410 nt, Artificial Sequence
  derived and/or modified CDS sequence (opt2) from neuraminidase__InfluenzaA__AHZ39856
augaaccccaaccagaagaucaucaccaucggcuccgucucccucaccaucuccaccaucugcuucuucaugcagaucgccauccucaucaccaccgucacccuccacuucaagcaguacgaguucaacuccccccccaacaaccaggucaugcucugcgagcccaccaucaucgagcgcaacaucaccgagaucgucuaccucaccaacaccaccaucgagaaggagaucugccccaagcccgccgaguaccgcaacugguccaagccccagugcgacaucaccggcuucgcccccuucuccaaggacaacuccauccgccucuccgccggcggcgacaucugggucacccgcgagcccuacgucuccugcgaccccgacaagugcuaccaguucgcccucggccagggcaccacccucaacaacguccacuccaacaacaccguccgcgaccgcacccccuaccgcacccuccucaugaacgagcucggcguccccuuccaccucggcaccaagcaggucugcaucgccugguccuccuccuccugccacgacggcaaggccuggcuccacgucugcaucaccggcgacgacaagaacgccaccgccuccuucaucuacaacggccgccucgucgacuccgucgucuccugguccaaggagauccuccgcacccaggaguccgagugcgucugcaucaacggcaccugcaccgucgucaugaccgacggcuccgccuccggcaaggccgacaccaagauccucuucaucgaggagggcaagaucguccacaccuccacccucuccggcuccgcccagcacgucgaggagugcuccugcuacccccgcuaccccggcguccgcugcgucugccgcgacaacuggaagggcuccaaccgccccaucgucgacaucaacaucaaggaccacuccaucgucucccgcuacgucugcuccggccucgucggcgacaccccccgcaagaacgacuccuccuccuccucccacugccucgaccccaacaacgaggagggcggccacggcgucaagggcugggccuucgacgacggcaacgacgucuggaugggccgcaccaucaacgagaccucccgccucggcuacgagaccuucaaggucaucgagggcugguccaaccccaaguccaagcuccccaucaaccgccaggucaucgucgaccgcggcgaccgcuccggcuacuccggcaucuucuccgucgagggcaaguccugcaucaaccgcugcuucuacgucgagcucauccgcggccgcaaggaggagaccgagguccucuggaccuccaacuccaucgucgucuucugcggcaccuccggcaccuacggcaccggcuccuggcccgacggcgccgaccucaaccucaugcccaucuga

SEQ ID NO: 121354 - RNA, 1410 nt, Artificial Sequence; identical to SEQ ID NO: 118182
  derived and/or modified CDS sequence (opt2) from neuraminidase__InfluenzaA__AHZ39868

SEQ ID NO: 121355 - RNA, 1410 nt, Artificial Sequence
  derived and/or modified CDS sequence (opt2) from neuraminidase__InfluenzaA__AHZ39892
augaaccccaaccagaagaucaucaccaucggcuccgucucccucaccaucuccaccaucugcuucuucaugcagaucgccauccucaucaccaccgucacccuccacuucaagcaguacgaguucaacuccccccccaacaaccaggucguccucugcgagcccaccaucaucgagcgcaacaucaccgagaucgucuaccucaccaacaccaccaucgagaaggagaucugccccaagcccgccgaguaccgcaacugguccaagccccagugcgacaucaccggcuucgcccccuucuccaaggacaacuccauccgccucuccgccggcggcgacaucugggucacccgcgagcccuacgucuccugcgaccccgacaagugcuaccaguucgcccucggccagggcaccacccucaacaacguccacuccaacaacaccguccgcgaccgcacccccuaccgcacccuccucaugaacgagcucggcguccccuuccaccucggcaccaagcaggucugcaucgccugguccuccuccuccugccacgacggcaaggccuggcuccacgucugcaucaccggcgacgacaagaacgccaccgccuccuucaucuacaacggccgccucgucgacuccgucgucuccugguccaaggagauccuccgcacccaggaguccgagugcgucugcaucaacggcaccugcaccgucgucaugaccgacggcuccgccuccggcaaggccgacaccaagauccucuucaucgaggagggcaagaucguccacaccuccacccucuccggcuccgcccagcacgucgaggagugcuccugcuacccccgcuaccccggcguccgcugcgucugccgcgacaacuggaagggcuccaaccgccccaucgucgacaucaacaucaaggaccacuccaucgucucccgcuacgucugcuccggccucgucggcgacaccccccgcaagaacgacuccuccuccuccucccacugccucgaccccaacaacgaggagggcggccacggcgucaagggcugggccuucgacgacggcaacgacgucuggaugggccgcaccaucaacgagaccucccgccucggcuacgagaccuucaaggucaucgagggcugguccaaccccaaguccaagcuccagaucaaccgccaggucaucgucgaccgcggcgaccgcuccggcuacuccggcaucuucuccgucgagggcaaguccugcaucaaccgcugcuucuacgucgagcucauccgcggccgcaaggaggagaccgagguccucuggaccuccaacuccaucgucgucuucugcggcaccuccggcaccuacggcaccggcuccuggcccgacggcgccgaccucaaccucaugcccaucuga

SEQ ID NO: 121356 - RNA, 1410 nt, Artificial Sequence; identical to SEQ ID NO: 119390
  derived and/or modified CDS sequence (opt2) from neuraminidase__InfluenzaA__AHZ39904

SEQ ID NO: 121357 - RNA, 1410 nt, Artificial Sequence; identical to SEQ ID NO: 119390
  derived and/or modified CDS sequence (opt2) from neuraminidase__InfluenzaA__AHZ39916

SEQ ID NO: 121358 - RNA, 1410 nt, Artificial Sequence; identical to SEQ ID NO: 118182
  derived and/or modified CDS sequence (opt2) from neuraminidase__InfluenzaA__AHZ39928

SEQ ID NO: 121359 - RNA, 1410 nt, Artificial Sequence
  derived and/or modified CDS sequence (opt2) from neuraminidase__InfluenzaA__AHZ39940
augaaccccaaccagaagaucaucaccaucggcuccgucucccucaccaucuccaccaucugcuucuucaugcagaucgccauccucaucaccaccgucacccuccacuucaagcaguacgaguucaacuccccccccaacaaccaggucaugcucugcgagcccaccaucaucgagcgcaacaugaccgagaucgucuaccucaccaacaccaccaucgagaaggagaucugccccaagcccgccgaguaccgcaacugguccaagccccagugcggcaucaccggcuucgcccccuucuccaaggacaacuccauccgccucuccgccggcggcgacaucugggucacccgcgagcccuacgucuccugcgaccccgacaagugcuaccaguucgcccucggccagggcaccacccucaacaacguccacuccaacaacaccguccgcgaccgcacccccuaccgcacccuccucaugaacgagcucggcguccccuuccaccucggcaccaagcaggucugcaucgccugguccuccuccuccugccacgacggcaaggccuggcuccacgucugcaucaccggcgacgacaagaacgccaccgccuccuucaucuacaacggccgccucgucgacuccgucgucuccugguccaaggagauccuccgcacccaggaguccgagugcgucugcaucaacggcaccugcaccgucgucaugaccgacggcuccgccuccggcaaggccgacaccaagauccucuucaucgaggagggcaagaucguccacaccuccacccucuccggcuccgcccagcacgucgaggagugcuccugcuacccccgcuaccccggcguccgcugcgucugccgcgacaacuggaagggcuccaaccgccccaucgucgacaucaacaucaaggaccacuccaucgucuccuccuacgucugcuccggccucgucggcgacaccccccgcaagaccgacuccuccuccuccucccacugccucgaccccaacaacgaggagggcggccacggcgucaagggcugggccuucgacgacggcaacgacgucuggaugggccgcaccaucaacgagaccucccgccucggcuacgagaccuucaaggucaucgagggcugguccaaccccaaguccaagcuccagaucaaccgccaggucaucgucgaccgcggcgaccgcuccggcuacuccggcaucuucuccgucgagggcaaguccugcaucaaccgcugcuucuacgucgagcucauccgcggccgcaaggaggagaccgagguccucuggaccuccaacuccaucgucgucuucugcggcaccuccggcaccuacggcaccggcuccuggcccgacggcgccgaccucaaccucaugcccaucuga

SEQ ID NO: 121360 - RNA, 1410 nt, Artificial Sequence; identical to SEQ ID NO: 118182
  derived and/or modified CDS sequence (opt2) from neuraminidase__InfluenzaA__AHZ39952

SEQ ID NO: 121361 - RNA, 1410 nt, Artificial Sequence; identical to SEQ ID NO: 118182
  derived and/or modified CDS sequence (opt2) from neuraminidase__InfluenzaA__AHZ39976

SEQ ID NO: 121362 - RNA, 1410 nt, Artificial Sequence
  derived and/or modified CDS sequence (opt2) from neuraminidase__InfluenzaA__AHZ39988
augaaccccaaccagaagaucaucaccaucggcuccgucucccucaccaucuccaccaucugcuucuucaugcagaucgccauccucaucaccaccgucacccuccacuucaagcaguacgaguucaacuccccccccaacaaccaggucaugcucugcgagcccaccaucaucgagcgcaacaucaccgagaucgucuaccucaccaacaccaccaucgagaaggagaucugccccaagcccgccgaguaccgcaacugguccaagccccagugcggcaucaccggcuucgcccccuucuccaaggacaacuccauccgccucuccgccggcggcgacaucugggucacccgcgagcccuacgucuccugcgaccccgacaagugcuaccaguucgcccucggccagggcaccacccucaacaacaugcacuccaacaacaccguccgcgaccgcacccccuaccgcacccuccucaugaacgagcucggcguccccuuccaccucggcaccaagcaggucugcaucgccugguccuccuccuccugccacgacggcaaggccuggcuccacgucugcaucaccggcgacgacaagaacgccaccgccuccuucaucuacaacggccgccucgucgacuccgucgucuccugguccaaggagauccuccgcacccaggaguccgagugcgucugcaucaacggcaccugcaccgucgucaugaccgacggcuccgccuccggcaaggccgacaccaagauccucuucaucgaggagggcaagaucguccacaccuccacccucuccggcuccacccagcacgucgaggagugcuccugcuacccccgcuaccccggcguccgcugcgucugccgcgacaacuggaagggcuccaaccgccccaucgucgacaucaacaucaaggaccacuccaucgucuccuccuacgucugcuccggccucgucggcgacaccccccgcaagaacgacuccuccuccuccucccacugccucgaccccaacaacgaggagggcggccacggcgucaagggcugggccuucgacgacggcaacgacgucuggaugggccgcaccaucaacgagaccucccgccucggcuacgagaccuucaaggucaucgagggcugguccaaccccaaguccaagcuccagaucaaccgccaggucaucgucgaccgcggcgaccgcuccggcuacuccggcaucuucuccgucgagggcaaguccugcaucaaccgcugcuucuacgucgagcucauccgcggccgcaaggaggagaccgagguccucuggaccuccaacuccaucgucgucuucugcggcaccuccggcaccuacggcaccggcuccuggcccgacggcgccgaccucaaccucaugcccaucuga

SEQ ID NO: 121363 - RNA, 1410 nt, Artificial Sequence; identical to SEQ ID NO: 118182
  derived and/or modified CDS sequence (opt2) from neuraminidase__InfluenzaA__AHZ40000

SEQ ID NO: 121364 - RNA, 1410 nt, Artificial Sequence; identical to SEQ ID NO: 118182
  derived and/or modified CDS sequence (opt2) from neuraminidase__InfluenzaA__AHZ40012

SEQ ID NO: 121365 - RNA, 1410 nt, Artificial Sequence
  derived and/or modified CDS sequence (opt2) from neuraminidase__InfluenzaA__AHZ40024
augaaccccaaccagaagaucaucaccaucggcuccgucucccucaccaucuccaccaucugcuucuucaugcagaucgccauccucaucaccaccgucacccuccacuucaagcaguacgaguucaacuccccccccaacaaccaggucaugcucugcgagcccaccaucaucgagcgcaacaucaccgagaucgucuaccucaccaacaccaccaucgagaaggagaucugccccaagcccgccgaguaccgcaacugguccaagccccagugcggcaucaccggcuucgcccccuucuccaaggacaacuccauccgccucuccgccggcggcgacaucugggucacccgcgagcccuacgucuccugcgaccccgacaagugcuaccaguucgcccucggccagggcaccacccucaacaacguccacuccaacaacaccguccgcgaccgcacccccuaccgcacccuccucaugaacgagcucggcguccccuuccaccucggcaccaagcaggucugcaucgccugguccuccuccuccugccacgacggcaaggccuggcuccacgucugcaucaccggcgacgacaagaacgccaccgccuccuucaucuacaacggccgccucgucgacuccgucgucuccugguccaaggagauccuccgcacccaggaguccgagugcgucugcaucaacggcaccugcaccgucgucaugaccgacggcuccgccuccggcaaggccgacaccaagauccucuucaucgaggagggcaagaucguccacaccuccacccucuccggcuccgcccagcacgucgaggagugcuccugcuacccccgcuaccccggcguccgcugcgucugccgcgacaacuggaagggcuccaaccgccccaucgucgacaucaacaucaaggaccacuccaucgucuccuccuacgucugcuccggccucgucggcgacaccccccgcaagaacgacuccuccuccuccucccacugccucgaccccaacaacgaggagggcggccacggcgucaagggcugggccuucgacgacggcaacgacgucuggaugggccgcaccaucaacgagaccucccgccucggcuucgagaccuucaaggucaucgagggcugguccaaccccaaguccaagcuccagaucaaccgccaggucaucgucgaccgcggcgaccgcuccggcuacuccggcaucuucuccgucgagggcaaguccugcaucaaccgcugcuucuacgucgagcucauccgcggccgcaaggaggagaccgagguccucuggaccuccaacuccaucgucgucuucugcggcaccuccggcaccuacggcaccggcuccuggcccgacggcgccgaccucaaccucaugcccaucuga

SEQ ID NO: 121366 - RNA, 1410 nt, Artificial Sequence; identical to SEQ ID NO: 118182
  derived and/or modified CDS sequence (opt2) from neuraminidase__InfluenzaA__AHZ40036

SEQ ID NO: 121367 - RNA, 1410 nt, Artificial Sequence; identical to SEQ ID NO: 119393
  derived and/or modified CDS sequence (opt2) from neuraminidase__InfluenzaA__AHZ40048

SEQ ID NO: 121368 - RNA, 1410 nt, Artificial Sequence; identical to SEQ ID NO: 118182
  derived and/or modified CDS sequence (opt2) from neuraminidase__InfluenzaA__AHZ40063

SEQ ID NO: 121369 - RNA, 1410 nt, Artificial Sequence
  derived and/or modified CDS sequence (opt2) from neuraminidase__InfluenzaA__AHZ40075
augaaccccaaccagaagaucaucaccaucggcuccgucucccucaccaucuccaccgucugcuucuucaugcagaucgccauccucaucaccaccgucacccuccacuucaagcaguacgaguucaacuccccccccaacaaccaggucaugcucugcgagcccaccaucaucgagcgcaacaucaccgagaucgucuaccucaccaacaccaccaucgagaaggagaucugccccaagcccgccgaguaccgcaacugguccaagccccagugcggcaucaccggcuucgcccccuucuccaaggacaacuccauccgccucuccgccggcggcgacaucugggucacccgcgagcccuacgucuccugcgaccccgacaagugcuaccaguucgcccucggccagggcaccacccucaacaacguccacuccaacaacaccguccgcgaccgcacccccuaccgcacccuccucaugaacgagcucggcguccccuuccaccucggcaccaagcaggucugcaucgccugguccuccuccuccugccacgacggcaaggccuggcuccacgucugcaucaccggcgacgacaagaacgccaccgccuccuucaucuacaacggccgccucgucgacuccgucgucuccugguccaaggagauccuccgcacccaggaguccgagugcgucugcaucaacggcaccugcaccgucgucaugaccgacggcuccgccuccggcaaggccgacaccaagauccucuucaucgaggagggcaagaucguccacaccuccacccucuccggcuccgcccagcacgucgaggagugcuccugcuacccccgcuaccccggcguccgcugcgucugccgcgacaacuggaagggcuccaaccgccccaucgucgacaucaacaucaaggaccacuccaucgucuccuccuacgucugcuccggccucgucggcgacaccccccgcaagaacgacuccuccuccuccucccacugccucgaccccaacaacgaggagggcggccacggcgucaagggcugggccuucgacgacggcaacgacgucuggaugggccgcaccaucaacgagaccucccgccucggcuacgagaccuucaaggucaucgagggcugguccaacuccaaguccaagcuccagaucaaccgccaggucaucgucgaccgcggcgaccgcuccggcuacuccggcaucuucuccgucgagggcaaguccugcaucaaccgcugcuucuacgucgagcucauccgcggccgcaaggaggagaccgagguccucuggaccuccaacuccaucgucgucuucugcggcaccuccggcaccuacggcaccggcuccuggcccgacggcgccgaccucaaccucaugcccaucuga

SEQ ID NO: 121370 - RNA, 1410 nt, Artificial Sequence; identical to SEQ ID NO: 118182
  derived and/or modified CDS sequence (opt2) from neuraminidase__InfluenzaA__AHZ40087

SEQ ID NO: 121371 - RNA, 1410 nt, Artificial Sequence; identical to SEQ ID NO: 119393
  derived and/or modified CDS sequence (opt2) from neuraminidase__InfluenzaA__AHZ40099

SEQ ID NO: 121372 - RNA, 1410 nt, Artificial Sequence
  derived and/or modified CDS sequence (opt2) from neuraminidase__InfluenzaA__AHZ40111
augaaccccaaccagaagaucaucaccaucggcuccgucucccucaccaucuccaccaucugcuucuucaugcagaucgccauccucaucaccaccgucacccuccacuucaagcaguacgaguucaaccccccccccaacaaccaggucaugcucugcgagcccaccaucaucgagcgcaacaucaccgagaucgucuaccucaccaacaccaccaucgagaaggagaucugccccaagcucgccgaguaccgcaacugguccaagccccagugcgacaucaccggcuucgcccccuucuccaaggacaacuccauccgccucuccgccggcggcgacaucugggucacccgcgagcccuacgucuccugcgaccccgacaagugcuaccaguucgcccucggccagggcaccacccucaacaacguccacuccaacaacaccguccgcgaccgcacccccuaccgcacccuccucaugaacgagcucggcguccccuuccaccucggcaccaagcaggucugcaucgccugguccuccuccuccugccacgacggcaaggccuggcuccacgucugcaucaccggcgacgacaagaacgccaccgccuccuucaucuacaacggccgccucgucgacuccgucgucuccugguccaaggacauccuccgcacccaggaguccgagugcgucugcaucaacggcaccugcgccgucgucaugaccgacggcuccgccuccggcaaggccgacaccaagauccucuucaucgaggagggcaagaucguccacaccuccacccucuccggcuccgcccagcacgucgaggagugcuccugcuacccccgcuaccccggcguccgcugcgucugccgcgacaacuggaagggcuccaaccgccccaucgucgacaucaacaucaaggaccacuccaucgucuccuccuacgucugcuccggccucgucggcgacaccccccgcaagaacgacuccuccuccuccggccacugccucgaccccaacaacgaggagggcggccacggcgucaagggcugggccuucgacgacggcaacgacgucuggaugggccgcaccaucaacgagaccucccgccucggcuacgagaccuucaaggucaucgagggcugguccaaccccaaguccaagcuccagaucaaccgccaggucaucgucgaccgcggcaaccgcuccggcuacuccggcaucuucuccgucgagggcaagaacugcaucaaccgcugcuucuacgucgagcucauccgcggccgcaaggaggagaccgagguccucuggaccuccaacuccaucgucgucuucugcggcaccuccggcaccuacggcaccggcuccuggcccgacggcgccgaccucaaccucaugcccaucuga

SEQ ID NO: 121373 - RNA, 1410 nt, Artificial Sequence
  derived and/or modified CDS sequence (opt2) from neuraminidase__InfluenzaA__AHZ40123
augaaccccaaccagaagaucaucaccaucggcuccgucucccucaccaucuccaccaucugcuucuucaugcagaucgccauccucaucaccaccgucacccuccacuucaagcaguacgaguucaacuccccccccaacaaccaggucaugcucugcgagcccaccaucaccgagcgcaacaucaccgagaucgucuaccucaccaacaccaccaucgagaaggagaucugccccaagcccgccgaguaccgcaacugguccaagccccagugcggcaucaccggcuucgcccccuucuccaaggacaacuccauccgccucuccgccggcggcgacaucugggucacccgcgagcccuacgucuccugcgaccccgacaagugcuaccaguucgcccucggccagggcaccacccucaacaacguccacuccaacaacaccguccgcgaccgcacccccuaccgcacccuccucaugaacgagcucggcguccccuuccaccucggcaccaagcaggucugcaucgccugguccuccuccuccugccacgacggcaaggccuggcuccacgucugcaucaccggcgacgacaagaacgccaccgccuccuucaucuacaacggccgccucgucgacuccgucgucuccugguccaaggagauccuccgcacccaggaguccgagugcgucugcaucaacggcaccugcaccgucgucaugaccgacggcuccgccuccggcaaggccgacaccaagauccucuucaucgaggagggcaagaucguccacacccgcacccucuccggcuccgcccagcacgucgaggagugcuccugcuacccccgcuaccccggcguccgcugcgucugccgcgacaacuggaagggcuccaaccgccccaucgucgacaucaacaucaaggaccacuccaucgucuccuccuacgucugcuccggccucgucggcgacaccccccgcaagaacgacuccuccuccuccucccacugccucgaccccaacaacgaggagggcggccacggcgucaagggcugggccuucgacgacggcaacgacgucuggaugggccgcaccaucaacgagaccucccgccucggcuacgagaccuucaaggucaucgagggcugguccaaccccaaguccaagcuccagaucaaccgccaggucaucgucgaccgcggcgaccgcuccggcuacuccggcaucuucuccgucgagggcaaguccugcaucaaccgcugcuucuacgucgagcucauccgcggccgcaaggaggagaccgagguccucuggaccuccaacuccaucgucgucuucugcggcaccuccggcaccuacggcaccggcuccuggcccgacggcgccgaccucaaccucaugcccaucuga

SEQ ID NO: 121374 - RNA, 1410 nt, Artificial Sequence; identical to SEQ ID NO: 118182
  derived and/or modified CDS sequence (opt2) from neuraminidase__InfluenzaA__AHZ40133

SEQ ID NO: 121375 - RNA, 1410 nt, Artificial Sequence; identical to SEQ ID NO: 119400
  derived and/or modified CDS sequence (opt2) from neuraminidase__InfluenzaA__AHZ40145

SEQ ID NO: 121376 - RNA, 1410 nt, Artificial Sequence
  derived and/or modified CDS sequence (opt2) from neuraminidase__InfluenzaA__AHZ40157
augaaccccaaccagaagaucaucaccaucggcuccgucucccucaccaucuccaccaucugcuucuucaugcagaucgccauccucaucaccaccgucacccuccacuucaagcaguacgaguucaacuccccccccaacaaccaggucaugcucugcgagcccaccaucaucgagcgcaacaucaccgagaucgucuaccucaccaacaccaccaucgagaaggagcucugccccaagcucgccgaguaccgcaacugguccaagccccagugcgacaucaccggcuucgcccccuucuccaaggacaacuccauccgccucuccgccggcggcgacaucugggucacccgcgagcccuacgucuccugcgaccccgacaagugcuaccaguucgcccucggccagggcaccacccucaacaacguccacuccaacaacaccguccgcgaccgcacccccuaccgcacccuccucaugaacgagcucggcguccccuuccaccucggcaccaagcaggucugcauggccugguccuccuccuccugccacgacggcaaggccuggcuccacgucugcaucaccggcgacgacaagaacgccaccgccuccuucaucuacaacggcaagcucgucgacuccgucgucuccugguccaaggagauccuccgcacccaggaguccgagugcgucugcaucaacggcaccugcaccgucgucaugaccgacggcuccgccuccggcaaggccgacaccaagauccucuucaucgaggagggcaagaucguccacaccuccacccucuccggcuccgcccagcacgucgaggagugcuccugcuacccccgcuaccccggcguccgcugcgucugccgcgacaacuggaagggcuccaaccgccccaucgucgacaucaacaucaaggaccacuccaucgucuccuccuacgucugcuccggccucgucggcgacaccccccgcaagaccgacuccuccuccuccucccacugccucgaccccaacaacgaggagggcggccacggcgucaagggcugggccuucgacgacggcaacgacgucuggaugggccgcaccaucaacgagaccucccgccucggcuacgagaccuucaaggucaucgagggcugguccaaccccaaguccaagcuccagaucaaccgccaggucaucgucgaccgcggcgaccgcuccggcuacuccggcaucuucuccgucgagggcaaguccugcaucaaccgcugcuucuacgucgagcucauccgcggccgcaaggaggagaccgccguccucuggaccuccaacuccaucgucgucuucugcggcaccuccggcaccuacggcaccggcuccuggcccgacggcgccgaccucaaccucaugcccaucuga

SEQ ID NO: 121377 - RNA, 1410 nt, Artificial Sequence
  derived and/or modified CDS sequence (opt2) from neuraminidase__InfluenzaA__AHZ40169
augaaccccaaccagaagaucaucaccaucggcuccgucugcaugaccaucggcauggccaaccucauccuccagaucggcaacaucaucuccaucuggaucucccacuccauccagcucgagaaccagucccagaucgagaccugcaaccaguccgucaucaccuacgagaacaacaccugggucaaccagaccuacgucaacaucuccaacaccaacuucgccgccggccaguccgucgucuccgucaagcucgccggcaacuccucccucugccccgucuccggcugggccaucuacuccaaggacaacuccguccgcaucggcuccaagggcgacgucuucgucauccgcgagcccuucaucuccugcuccccccucgagugccgcaccuucuuccucacccagggcgcccuccucaacgacaagcacuccaacggcaccaucaaggaccgcucccccuaccgcacccucauguccugccccaucggcgagguccccucccccuacaacucccgcuucgaguccgucgccugguccgccuccgccugccacgacggcaucaacuggcucaccaucggcaucuccggccccgacuccggcgccgucgccguccucaaguacaacggcaucaucaccgacaccaucaaguccuggcgcaacaacauccuccgcacccaggaguccgagugcgccugcgucaacggcuccugcuucaccaucaugaccgacggccccuccgacggccaggccuccuacaagaucuuccgcaucgagaagggcaagaucgucaaguccgucgagaugaacgcccccaacuaccacuacgaggagugcuccugcuaccccgacuccuccgagaucaccugcgucugccgcgacaacuggcacggcuccaaccgccccugggucuccuucaaccagaaccucgaguaccagaucggcuacaucugcuccggcaucuucggcgacaacccccgccccaacgacaagaccggcuccugcggccccgucuccuccaacggcgccaacggcgucaagggcuucuccuucaaguacggcaacggcgucuggaucggccgcaccaaguccaucuccucccgcaagggcuucgagaugaucugggaccccaacggcuggaccggcaccgacaacaacuucuccaucaagcaggacaucgucggcaucaacgagugguccggcuacuccggcuccuucguccagcaccccgagcucaccggccucgacugcauccgccccugcuucugggucgagcucauccgcggccgccccaaggagaacaccaucuggaccuccggcuccuccaucuccuucugcggcgucaacuccgacaccgucggcugguccuggcccgacggcgccgagcuccccuucaccaucgacaaguga

SEQ ID NO: 121378 - RNA, 1410 nt, Artificial Sequence
  derived and/or modified CDS sequence (opt2) from neuraminidase__InfluenzaA__AHZ40180
augaaccccaaccagaagaucaucaccaucggcuccgucucccucaccaucuccaccaucugcuucuucaugcagaucaccauccucaucaccaccgucacccuccacuucaagcaguacgaguucaacuccccccccaacaaccaggucaugcucugcgagcccaccaucaucgagcgcaacaucaccgagaucgucuaccucaccaacaccaccaucgagaaggagaucugccccaagcccgccgaguaccgcaacugguccaagccccagugcggcaucaccggcuucgcccccuucuccaaggacaacuccauccgccucuccgccggcggcgacaucugggucacccgcgagcccuacgucuccugcgaccccgacaagugcuaccaguucgcccucggccagggcaccacccucaacaacguccacuccaacaacaccguccgcgaccgcacccccuaccgcacccuccucaugaacgagcucggcguccccuuccaccucggcaccaagcaggucugcaucgccugguccuccuccuccugccacgacggcaaggccuggcuccacgucugcaucaccggcgacgacaagaacgccaccgccuccuucaucuacaacggccgccucgucgacuccgucgucuccugguccaaggagauccuccgcacccaggaguccgagugcgucugcaucaacggcaccugcaccgucgucaugaccgacggcuccgccuccggcaaggccgacaccaagauccucuucaucgaggagggcaagaucguccacaccuccacccucuccggcuccgcccagcacgucgaggagugcuccugcuacccccgcuaccccggcguccgcugcgucugccgcgacaacuggaagggcuccaaccgccccaucgucgacaucaacaucaaggaccacuccaucgucuccuccuacgucugcuccggccucgucggcgacaccccccgcaagaacgacuccuccuccuccucccacugccucgaccccaacaacgaggagggcggccacggcgucaagggcugggccuucgacgacggcaacgacgucuggaugggccgcaccaucaacgagaccucccgccucggcuacgagaccuucaaggucaucgagggcugguccaaccccaaguccaagcuccagaucaaccgccaggucaucgucgaccgcggcgaccgcuccggcuacuccggcaucuucuccgucgagggcaaguccugcaucaaccgcugcuucuacgucgagcucauccgcggccgcaaggaggagaccgagguccucuggaccuccaacuccaucgucgucuucugcggcaccuccggcaccuacggcaccggcuccuggcccgacggcgccgaccucaaccucaugcccaucuga

SEQ ID NO: 121379 - RNA, 1410 nt, Artificial Sequence; identical to SEQ ID NO: 119046
  derived and/or modified CDS sequence (opt2) from neuraminidase__InfluenzaA__AHZ40192

SEQ ID NO: 121380 - RNA, 1410 nt, Artificial Sequence; identical to SEQ ID NO: 118182
  derived and/or modified CDS sequence (opt2) from neuraminidase__InfluenzaA__AHZ40204

SEQ ID NO: 121381 - RNA, 1410 nt, Artificial Sequence; identical to SEQ ID NO: 118182
  derived and/or modified CDS sequence (opt2) from neuraminidase__InfluenzaA__AHZ40216

SEQ ID NO: 121382 - RNA, 1410 nt, Artificial Sequence; identical to SEQ ID NO: 119411
  derived and/or modified CDS sequence (opt2) from neuraminidase__InfluenzaA__AHZ40228

SEQ ID NO: 121383 - RNA, 1410 nt, Artificial Sequence
  derived and/or modified CDS sequence (opt2) from neuraminidase__InfluenzaA__AHZ40240
augaaccccaaccagaagaucaucaccaucggcuccgucucccucaccaucuccaccaucugcuuccucaugcagaucgccauccucaucaccaccgccacccuccacuucaagcaguacgaguucaacuccccccccaacaaccaggucaugcucugcgagcccaccaucaucgagcgcaacaucaccgagaucgucuaccucaccaacaccaccaucgagaaggagaucugccccaagcccgccgaguaccgcaacugguccaagccccagugcggcaucaccggcuucgcccccuucuccaaggacaacuccauccgccucuccgccggcggcgacaucugggucacccgcgagcccuacgucuccugcgaccccgacaagugcuaccaguucgcccucggccagggcaccacccucaacaacguccacuccaacaacaccguccgcgaccgcacccccuaccgcacccuccucaugaacgagcucggcguccccuuccaccucggcaccaagcaggucugcaucgccugguccuccuccuccugccacgacggcaaggccuggcuccacgucugcaucaccggcgacgacaagaacgccaccgccuccuucaucuacaacggccgccucgucgacuccgucgucuccugguccaaggagauccuccgcacccaggaguccgagugcgucugcaucaacggcaccugcaccgucgucaugaccgacggcuccgccuccggcaaggccgacaccaagauccucuucaucgaggagggcaagaucguccacaccuccacccucuccggcuccgcccagcacgucgaggagugcuccugcuacccccgcuaccccggcguccgcugcgucugccgcgacaacuggaagggcuccaaccgccccaucgucgacaucaacaucaaggaccgcuccaucgucuccuccuacgucugcuccggccucgucggcgacaccccccgcaagaacgacuccuccuccuccucccacugccucgaccccaacaacgaggagggcggccacggcgucaagggcugggccuucgacgacggcaacgacgucuggaugggccgcaccaucaacgagaccucccgccucggcuacgagaccuucaaggucaucgagggcugguccaaccccaaguccaagcuccagaucaaccgccaggucaucgucgaccgcggcgaccgcuccggcuacuccggcaucuucuccgucgagggcaaguccugcaucaaccgcugcuucuacgucgagcucauccgcggccgcaaggaggagaccgagguccucuggaccuccaacuccaucgucgucuucugcggcaccuccggcaccuacggcaccggcuccuggcccgacggcgccgaccucaaccucaugcccaucuga

SEQ ID NO: 121384 - RNA, 1410 nt, Artificial Sequence
  derived and/or modified CDS sequence (opt2) from neuraminidase__InfluenzaA__AHZ40252
augaaccccaaccagaagaucaucaccaucggcuccgucucccucaccaucuccaccaucugcuucuucaugcagaucgccauccucaucaccaccgucacccuccacuucaagcaguacgaguucaacuccccccccaacaaccaggucaugcucugcgagcccaccaucaucgagcgcaacaucaccgagaucgucuaccucaccaacaccaccaucgagaaggagaucugccccaagcccgccgaguaccgcaacugguccaagccccagugcggcaucaccggcuucgcccccuucuccaaggacaacuccauccgccucuccgccggcggcgacaucugggucacccgcgagcccuacgucuccugcgaccccgacaagugcuaccaguucgcccucggccagggcaccacccucaacaacguccacuccaacaacaccguccgcgaccgcacccccuaccgcacccuccucaugaacgagcucggcguccccuuccaccucggcaccaagcaggucugcaucgccugguccuccuccuccugccacgacggcaaggccuggcuccacgucugcaucaccggcgaggacaagaacgccaccgccuccuucaucuacaacggccgccucgucgacuccaucgucuccugguccaaggagauccuccgcacccaggaguccgagugcgucugcaucaacggcaccugcaccgucgucaugaccgacggcuccgccuccggcaaggccgacaccaagauccucuucaucgaggagggcaagaucguccacaccuccacccucuccggcuccgcccagcacgucgaggagugcuccugcuacccccgcuaccccggcguccgcugcgucugccgcgacaacuggaagggcuccaaccgccccaucgucgacaucaacaucaaggaccacuccaucgucuccuccuacgucugcuccggccucgucggcgacaccccccgcaagaacgacuccuccuccuccucccacugccucgaccccaacaacgaggagggcggccacggcgucaagggcugggccuucgacgacggcaacgacgucuggaugggccgcaccaucaacgagaccucccgccucggcuacgagaccuucaaggucaucgagggcugguccaaccccaaguccaagcuccagaucaaccgccaggucaucgucgaccgcggcgaccgcuccggcuacuccggcaucuucuccgucgagggcaaguccugcaucaaccgcugcuucuacgucgagcucauccgcggccgcaaggaggagaccgagguccucuggaccuccaacuccaucgucgucuucugcggcaccuccggcaccuacggcaccggcuccuggcccgacggcgccgaccucaaccucaugcccaucuga

SEQ ID NO: 121385 - RNA, 1410 nt, Artificial Sequence; identical to SEQ ID NO: 121130
  derived and/or modified CDS sequence (opt2) from neuraminidase__InfluenzaA__AHZ40264

SEQ ID NO: 121386 - RNA, 1410 nt, Artificial Sequence; identical to SEQ ID NO: 118182
  derived and/or modified CDS sequence (opt2) from neuraminidase__InfluenzaA__AHZ40276

SEQ ID NO: 121387 - RNA, 1410 nt, Artificial Sequence
  derived and/or modified CDS sequence (opt2) from neuraminidase__InfluenzaA__AHZ40288
augaaccccaaccagaagaucaucaccaucggcuccgucucccucaccaucuccaccaucugcuucuucaugcagaucgccauccucaucaccaccgucacccuccacuucaagcaguacgaguucaacuccccccccaacaaccaggucaugcucugcgagcccaccaucaucgagcgcaacaucaccgagaucgucuaccucaccaacaccaccaucgagaaggagaucugccccaagcucgccgaguaccgcaacugguccaagccccagugcgacaucaccggcuucgcccccuucuccaaggacaacuccauccgccucuccgccggcggcgacaucugggucacccgcgagcccuacgucuccugcgaccccgacaagugcuaccaguucgcccucggccagggcaccacccucaacaacguccacuccaacaacaccguccgcgaccgcacccccuaccgcacccuccucaugaacgagcucggcguccccuuccaccucggcaccaagcaggucugcaucgccugguccuccuccuccugccacgacggcaaggccuggcuccacgucugcaucaccggcgacgacaagaacgccaccgccuccuucaucuacaacggccgccucgucgacuccgucaucuccugguccaaggacauccuccgcacccaggaguccgagugcgucugcaucaacggcaccugcgccgucgucaugaccgacggcuccgccuccggcaaggccgacaccaagauccucuucaucgaggagggcaagaucguccacaccuccacccucuccggcuccgcccagcacgucgaggagugcuccugcuacccccgcuaccccggcguccgcugcgucugccgcgacaacuggaagggcuccaaccgccccaucgucgacaucaacaucaaggaccacuccaucgucuccuccuacgucugcuccggccucgucggcgacaccccccgcaagaacgacuccuccuccuccggccacugccucgaccccaacaacgaggagggcggccacggcgucaagggcugggccuucgacgacggcaacgacgucuggaugggccgcaccaucaacgagaccucccgccucggcuacgagaccuucaaggucaucgagggcugguccaaccccaaguccaagcuccagaucaaccgccaggucaucgucgaccgcggcaaccgcuccggcuacuccggcaucuucuccgucgagggcaagaacugcaucaaccgcugcuucuacgucgagcucauccgcggccgcaaggaggagaccgagguccucuggaccuccaacuccaucgucgucuucugcggcaccuccggcaccuacggcaccggcuccuggcccgacggcgccgaccucaaccucaugcccaucuga

SEQ ID NO: 121388 - RNA, 1410 nt, Artificial Sequence
  derived and/or modified CDS sequence (opt2) from neuraminidase__InfluenzaA__AHZ40312
augaaccccaaccagaagaucaucaccaucggcuccgucucccucaccaucuccaccaucugcuucuucaugcagaucgccauccucaucaccaccgucacccuccacuucaagcaguacgaguucaacuacccccccaacaaccaggucaugcucugcgagcccaccaucaucgagcgcaacaucaccgagaucgucuaccucaccaacaccaccaucgagaaggagaucugccccaagcccgccgaguaccgcaacugguccaagccccagugcggcaucaccggcuucgcccccuucuccaaggacaacuccauccgccucuccgccggcggcgacaucugggucacccgcgagcccuacgucuccugcgaccccgacaagugcuaccaguucgcccucggccagggcaccacccucaacaacguccacuccaacaacaccguccgcgaccgcacccccuaccgcacccuccucaugaacgagcucggcguccccuuccaccucggcaccaagcaggucugcaucgccugguccuccuccuccugccacgacggcaaggccuggcuccacgucugcaucaccggcgacgacaagaacgccaccgccuccuucaucuacaacggccgccucgucgacuccgucgucuccugguccaaggagauccuccgcacccaggaguccgagugcgucugcaucaacggcaccugcaccgucgucaugaccgacggcuccgccuccggcaaggccgacaccaagauccucuucaucgaggagggcaagaucguccacaccuccacccucuccggcuccgcccagcacgucgaggagugcuccugcuacccccgcuaccccggcguccgcugcgucugccgcgacaacuggaagggcuccaaccgccccaucgucgacaucaacaucaaggaccacuccgucgucuccuccuacgucugcuccggccucgucggcgacaccccccgcaagaacgacuccuccuccuccucccacugccucgaccccaacaacgaggagggcggccacggcgucaagggcugggccuucgacgacggcaacgacgucuggaugggccgcaccaucaacgagaccucccgccucggcuacgagaccuucaaggucaucgagggcugguccaaccccaaguccaagcuccagaucaaccgccaggucaucgucgaccgcggcgaccgcuccggcuacuccggcaucuucuccgucgagggcaaguccugcaucaaccgcugcuucuacgucgagcucauccgcggccgcaaggaggagaccgagguccucuggaccuccaacuccaucgucgucuucugcggcaccuccggcaccuacggcaccggcuccuggcccgacggcgccgaccucaaccucaugcccaucuga

SEQ ID NO: 121389 - RNA, 1410 nt, Artificial Sequence; identical to SEQ ID NO: 118182
  derived and/or modified CDS sequence (opt2) from neuraminidase__InfluenzaA__AHZ40324

SEQ ID NO: 121390 - RNA, 1410 nt, Artificial Sequence; identical to SEQ ID NO: 118182
  derived and/or modified CDS sequence (opt2) from neuraminidase__InfluenzaA__AHZ40336

SEQ ID NO: 121391 - RNA, 1410 nt, Artificial Sequence; identical to SEQ ID NO: 121365
  derived and/or modified CDS sequence (opt2) from neuraminidase__InfluenzaA__AHZ40348

SEQ ID NO: 121392 - RNA, 1410 nt, Artificial Sequence; identical to SEQ ID NO: 119390
  derived and/or modified CDS sequence (opt2) from neuraminidase__InfluenzaA__AHZ40360

SEQ ID NO: 121393 - RNA, 1410 nt, Artificial Sequence
  derived and/or modified CDS sequence (opt2) from neuraminidase__InfluenzaA__AHZ40372
augaaccccaaccagaagaucaucaccaucggcuccgucucccucaccaucuccaccaucugcuucuucaugcagaucgccauccucaucaccaccgucacccuccacuucaagcaguacgaguucaacuccccccccaacaaccaggucaugcucugcgagcccaccaucaucgagcgcaacaucaccgagaucgucuaccucaccaacaccaccaucgagaaggagaucugccccaagcccgccgaguaccgcaacugguccaagccccagugcggcaucaccggcuucgcccccuucuccaaggacaacuccauccgccucuccgccggcggcgacaucugggucacccgcgagcccuacgucuccugcgaccccgacaagugcuaccaguucgcccucggccagggcaccacccucaacaacguccacuccaacaacaccguccgcgaccgcacccccuaccgcacccuccucaugaacgagcucggcguccccuuccaccucggcaccaagcaggucugcaucgccugguccuccuccuccugccacgacggcaaggccuggcuccacgucugcaucaccggcgacgacaagaacgccaccgccuccuucaucuacaacggccgccucgucgacuccgucgucuccugguccaaggagauccuccgcacccaggaguccgagugcgucugcaucaacggcaccugcaccgucgucaugaccgacggcuccgccuccggcaaggccgacaccaagauccucuucaucgaggagggcaagaucguccacaccuccacccucuccggcuccgcccagcacgucgaggagugcuccugcuacccccgcuaccccggcguccgcugcgucugccgcgacaacuggaagggcuccaaccgccccaucgucgacaucaacaucaaggaccacuccaucgucuccuccuacgucugcuccggccucgucggcgacaccccccgcaagaacgacuccuccuccuccucccacugccucgaccccaacaacgaggagggcgaccacggcgucaagggcugggccuucgacgacggcaacgacgucuggaugggccgcaccaucaacgagaccucccgccucggcuacgagaccuucaaggucaucgagggcugguccaaccccaaguccaagcuccagaucaaccgccaggucaucgucgaccgcggcgaccgcuccggcuacuccggcaucuucuccgucgagggcaaguccugcaucaaccgcugcuucuacgucgagcucauccgcggccgcaaggaggagaccgagguccucuggaccuccaacuccaucgucgucuucugcggcaccuccggcaccuacggcaccggcuccuggcccgacggcgccgaccucaaccucaugcccaucuga

SEQ ID NO: 121394 - RNA, 1410 nt, Artificial Sequence; identical to SEQ ID NO: 119046
  derived and/or modified CDS sequence (opt2) from neuraminidase__InfluenzaA__AHZ40384

SEQ ID NO: 121395 - RNA, 1410 nt, Artificial Sequence; identical to SEQ ID NO: 118182
  derived and/or modified CDS sequence (opt2) from neuraminidase__InfluenzaA__AHZ40396

SEQ ID NO: 121396 - RNA, 1410 nt, Artificial Sequence; identical to SEQ ID NO: 118182
  derived and/or modified CDS sequence (opt2) from neuraminidase__InfluenzaA__AHZ40408

SEQ ID NO: 121397 - RNA, 1410 nt, Artificial Sequence; identical to SEQ ID NO: 118182
  derived and/or modified CDS sequence (opt2) from neuraminidase__InfluenzaA__AHZ40420

SEQ ID NO: 121398 - RNA, 1410 nt, Artificial Sequence
  derived and/or modified CDS sequence (opt2) from neuraminidase__InfluenzaA__AHZ40432
augaaccccaaccagaagaucaucaccaucggcuccgucucccucaccaucuccaccaucugcuucuucaugcagaucgccauccucaucaccaccgucacccuccacuucaagcaguacgaguucaacuccccccccaacaaccaggucaugcucugcgagcccaccaucaucgagcgcaacaucaccgagaucgucuaccucaccaacaccaccaucgagaaggagaucugccccaagcccgccgaguaccgcaacugguccaagccccagugcgacaucaccggcuucgcccccuucuccaaggacaacuccauccgccucuccgccggcggcgacaucugggucacccgcgagcccuacgucuccugcgaccccgacaagugcuaccaguucgcccucggccagggcaccacccucaacaacguccacuccaacaacaccguccgcgaccgcacccccuaccgcacccuccucaugaacgagcucggcguccccuuccaccucggcaccaagcaggucugcaucgccugguccuccuccuccugccacgacggcaaggccuggcuccacgucugcaucaccggcgacgacaagaacgccaccgccuccuucaucuacaacggccgccucgucgacuccgucgucuccugguccaaggagauccuccgcacccaggaguccgagugcgucugcaucaacggcaccugcaccgucgucaugaccgacggcuccgccuccggcaaggccgacaccaagauccucuucaucgaggagggcaagaucguccacaccuccacccucuccggcuccgcccagcacgucgaggagugcuccugcuacccccgcuaccccggcguccgcugcgucugccgcgacaacuggaagggcuccaaccgccccaucaucgacaucaacaucaaggaccacuccaucgucucccgcuacgucugcuccggccucgucggcgacaccccccgcaagaacgacuccuccuccuccucccacugccucgaccccaacaacgaggagggcggccacggcgucaagggcugggccuucgacgacggcaacgacgucuggaugggccgcaccaucaacgagaccucccgccucggcuacgagaccuucaaggucaucgagggcugguccaaccccaaguccaagcuccagaucaaccgccaggucaucgucgaccgcggcgaccgcuccggcuacuccggcaucuucuccgucgagggcaaguccugcaucaaccgcugcuucuacgucgagcucauccgcggccgcaaggaggagaccgagguccucuggaccuccaacuccaucgucgucuucugcggcaccuccggcaccuacggcaccggcuccuggcccgacggcgccgaccucaaccucaugcccaucuga

SEQ ID NO: 121399 - RNA, 1410 nt, Artificial Sequence; identical to SEQ ID NO: 118182
  derived and/or modified CDS sequence (opt2) from neuraminidase__InfluenzaA__AHZ40444

SEQ ID NO: 121400 - RNA, 1410 nt, Artificial Sequence
  derived and/or modified CDS sequence (opt2) from neuraminidase__InfluenzaA__AHZ40456
augaaccccaaccagaagaucaucaccaucggcuccgucucccucaccaucuccaccaucugcuucuucaugcagaucgccauccucaucaccaccgucacccuccacuucaagcaguacgaguucaacuccccccccaacaaccaggucaugcucugcgagcccaccaucaucgagcgcaacaucaccgagaucgucuaccucaccaacaccaccaucgagaaggagaucugccccaagcccgccgaguaccgcaacugguccaagccccagugcgacaucaccggcuucgcccccuucuccaaggacaacuccauccgccucuccgccggcggcgacaucugggucacccgcgagcccuacgucuccugcgaccccgacaagugcuaccaguucgcccucggccagggcaccacccucaacaacaugcacuccaacaacaccguccgcgaccgcacccccuaccgcacccuccucaugaacgagcucggcguccccuuccaccucggcaccaagcaggucugcaucgccugguccuccuccuccugccacgacggcaaggccuggcuccacgucugcaucaccggcgacgacaagaacgccaccgccuccuucaucuacaacggccgccucgucgacuccgucgucuccugguccaaggagauccuccgcacccaggaguccgagugcgucugcaucaacggcaccugcaccgucgucaugaccgacggcuccgccuccggcaaggccgacaccaagauccucuucaucgaggagggcaagaucguccacaccuccacccucuccggcuccgcccagcacgucgaggagugcuccugcuacccccgcuaccccggcguccgcugcgucugccgcgacaacuggaagggcuccaaccgccccaucgucgacaucaacaucaaggaccacuccaucgucuccuccuacgucugcuccggccucgucggcgacaccccccgcaagaacgacuccuccuccuccucccacugccucgaccccaacaacgaggagggcggccacggcgucaagggcugggccuucgacgacggcaacgacgucuggaugggccgcaccaucaacgagaccucccgccucggcuacgagaccuucaaggucaucgagggcugguccaaccccaaguccaagcuccagaucaaccgccaggucaucgucgaccgcggcgaccgcuccggcuacuccggcaucuucuccgucgagggcaaguccugcaucaaccgcugcuucuacgucgagcucauccgcggccgcaaggaggagaccgagguccucuggaccuccaacuccaucgucgucuucugcggcaccuccggcaccuacggcaccggcuccuggcccgacggcgccgaccucaaccucaugcccaucuga

SEQ ID NO: 121401 - RNA, 1410 nt, Artificial Sequence
  derived and/or modified CDS sequence (opt2) from neuraminidase__InfluenzaA__AHZ40468
augaaccccaaccagaagaucaucaccaucggcuccgucucccucaccaucuccaccaucugcuucuucaugcagaucgccauccucaucaccaccgucacccuccacuucaagcaguacgaguucaacuccccccccaacaaccaggucaugcucugcgagcccaccaucaucgagcgcaacaucaccgagaucgucuaccucaccaacaccaccaucgagaaggagaucugccccaagcccgccgaguaccgcaacugguccaagccccagugcggcaucaccggcuucgcccccuucuccaaggacaacuccauccgccucuccgccggcggcgacaucugggucacccgcgagcccuacgucuccugcgaccccgacaagugcuaccaguucgcccucggccagggcaccacccucaacaacguccacuccaacaacaccguccgcgaccgcacccccuaccgcacccuccucaugaacgagcucggcguccccuuccaccucggcaccaagcaggucugcaucgccugguccuccuccuccugccacgacggcaaggccuggcuccacgucugcaucaccggcaacgacaagaacgccaccgccuccuucaucuacaacggccgccucgucgacuccgucgucuccugguccaaggagauccuccgcacccaggaguccgagugcgucugcaucaacggcaccugcaccgucgucaugaccgacggcuccgccuccggcaaggccgacaccaagauccucuucaucgaggagggcaagaucguccacaccuccacccucuccggcuccgcccagcacgucgaggagugcuccugcuacccccgcuaccccggcguccgcugcgucugccgcgacaacuggaagggcuccaaccgccccaucgucgacaucaacaucaaggaccacuccaucgucuccuccuacgucugcuccggccucgucggcgacaccccccgcaagaacgacuccuccuccuccucccacugccucgaccccaacaacgaggagggcggccacggcgucaagggcugggccuucgacgacggcaacgacgucuggaugggccgcaccaucaacgagaccucccgccucggcuacgagaccuucaaggucaucgagggcugguccaaccccaaguccaagcuccagaucaaccgccaggucaucgucgaccgcggcgaccgcuccggcuacuccggcaucuucuccgucgagggcaaguccugcaucaaccgcugcuucuacgucgagcucauccgcggccgcaaggaggagaccgagguccucuggaccuccaacuccaucgucgucuucugcggcaccuccggcaccuacggcaccggcuccuggcccgacggcgccgaccucaaccucaugcccaucuga

SEQ ID NO: 121402 - RNA, 1410 nt, Artificial Sequence; identical to SEQ ID NO: 119390
  derived and/or modified CDS sequence (opt2) from neuraminidase__InfluenzaA__AHZ40480

SEQ ID NO: 121403 - RNA, 1410 nt, Artificial Sequence; identical to SEQ ID NO: 120828
  derived and/or modified CDS sequence (opt2) from neuraminidase__InfluenzaA__AHZ40492

SEQ ID NO: 121404 - RNA, 1410 nt, Artificial Sequence; identical to SEQ ID NO: 118182
  derived and/or modified CDS sequence (opt2) from neuraminidase__InfluenzaA__AHZ40503

SEQ ID NO: 121405 - RNA, 1410 nt, Artificial Sequence; identical to SEQ ID NO: 118182
  derived and/or modified CDS sequence (opt2) from neuraminidase__InfluenzaA__AHZ40515

SEQ ID NO: 121406 - RNA, 1410 nt, Artificial Sequence
  derived and/or modified CDS sequence (opt2) from neuraminidase__InfluenzaA__AHZ40527
augaaccccaaccagaagaucaucaccaucggcuccgucucccucaccaucuccaccaugugcuucuucaugcagaucgccauccucaucaccaccgucacccuccacuucaagcaguacgaguucgacuccccccccaacaaccaggucaugcucugcgagcccaccaucaucgagcgcaacaucaccgagaucgucuaccucaccaacaccaccaucgagaaggagaucugccccaagcccgccgaguaccgcaacugguccaagccccagugcggcaucaccggcuucgcccccuucuccaaggacaacuccauccgccucuccgccggcggcgacaucugggucacccgcgagcccuacgucuccugcgaccccgacaagugcuaccaguucgcccucggccagggcaccacccucaacaacguccacuccaacaacaccguccgcgaccgcacccccuaccgcacccuccucaugaacgagcucggcguccccuuccaccucggcaccaagcaggucugcaucgccugguccuccuccuccugccacgacggcaaggccuggcuccacgucugcaucaccggcgacgacaagaacgccaccgccuccuucaucuacaacggccgccucgucgacuccgucgucuccugguccaaggagauccuccgcacccaggaguccgagugcgucugcaucaacggcaccugcaccgucgucaugaccgacggcuccgccuccggcaaggccgacaccaagauccucuucaucgaggagggcaagaucguccacaccuccacccucuccggcuccgcccagcacgucgaggagugcuccugcuacccccgcuaccccggcguccgcugcgucugccgcgacaacuggaagggcuccaaccgccccaucgucgacaucaacaucaaggaccacuccaucgucuccuccuacgucugcuccggccucgucggcgacaccccccgcaagaacgacuccuccuccuccucccacugccucgaccccaacaacgaggagggcggccacggcgucaagggcugggccuucgacgacggcaacgacgucuggaugggccgcaccaucaacgagaccucccgccucggcuacgagaccuucaaggucaucgagggcugguccaaccccaaguccaagcuccagaucaaccgccaggucaucgucgaccgcggcgaccgcuccggcuacuccggcaucuucuccgucgagggcaaguccugcaucaaccgcugcuucuacgucgagcucauccgcggccgcaaggaggagaccgagguccucuggaccuccaacuccaucgucgucuucugcggcaccuccggcaccuacggcaccggcuccuggcccgacggcgccgaccucaaccucaugcccaucuga

SEQ ID NO: 121407 - RNA, 1410 nt, Artificial Sequence
  derived and/or modified CDS sequence (opt2) from neuraminidase__InfluenzaA__AHZ40539
augaaccccaaccagaagaucaucaccaucggcuccgucucccucaccaucuccaccaucugcuucuucaugcagaucgccauccucaucaccaccgucacccuccacuucaagcaguacgaguucaacuccccccccaacaaccaggucaugcucugcgagcccaccaucaucgagcgcaacaucaccgagaucgucuaccucaccaacaccaccaucgagaaggagaucugccccaagcccgccgaguaccgcaacugguccaagccccagugcggcaucaccggcuucgcccccuucuccaaggacaacuccauccgccucuccgccggcggcgacaucugggucacccgcgagcccuacgucuccugcgaccccgacaagugcuaccaguucgcccucggccagggcaccacccucaacaacguccacuccaacaacaccguccgcgaccgcacccccuaccgcacccuccucaugaacgagcucggcguccccuuccaccucggcaccaagcaggucugcaucgccugguccuccuccuccugccacgacggcaaggccuggcuccacgucugcaucaccggcgacgacaagaacgccaccgccuccuucaucuacaacggccgccucgucgacuccgucgucuccugguccaaggagauccuccgcacccaggaguccgagugcgucugcaucaacggcaccugcaccgucgucaugaccgacggcuccgccuccggcaaggccgacaccaagauccucuucaucgaggagggcaagaucgucaacaccuccacccucuccggcuccgcccagcacgucgaggagugcuccugcuacccccgcuaccccggcguccgcugcgucugccgcgacaacuggaagggcuccaaccgccccaucgucgacaucaacaucaaggaccacuccaucgucuccuccuacgucugcuccggccucgucggcgacaccccccgcaagaacgacuccuccuccuccucccacugccucgaccccaacaacgaggagggcggccacggcgucaagggcugggccuucgacgacggcaacgacgucuggaugggccgcaccaucaacgagaccucccgccucggcuacgagaccuucaaggucaucgagggcugguccaaccccaaguccaagcuccagaucaaccgccaggucaucgucgaccgcggcgaccgcuccggcuacuccggcaucuucuccgucgagggcaaguccugcaucaaccgcugcuucuacgucgagcucauccgcggccgcaaggaggagaccgagguccucuggaccuccaacuccaucgucgucuucugcggcaccuccggcaccuacggcaccggcuccuggcccgacggcgccgaccucaaccucaugcccaucuga

SEQ ID NO: 121408 - RNA, 1410 nt, Artificial Sequence; identical to SEQ ID NO: 118182
  derived and/or modified CDS sequence (opt2) from neuraminidase__InfluenzaA__AHZ40551

SEQ ID NO: 121409 - RNA, 1410 nt, Artificial Sequence
  derived and/or modified CDS sequence (opt2) from neuraminidase__InfluenzaA__AHZ40563
augaaccccaaccagaagaucaucaccaucggcuccgucucccucaccaucuccaccgucugcuucuucaugcagaucgccauccucaucaccaccgucacccuccacuucaagcaguacgaguucaacuccucccccaacaaccaggucaugcucugcgagcccaccaucaucgagcgcaacaucaccgagaucgucuaccucaccaacaccaccaucgagaaggagaucugccccaagcccgccgaguaccgcaacugguccaagccccagugcggcaucaccggcuucgcccccuucuccaaggacaacuccauccgccucuccgccggcggcgacaucugggucacccgcgagcccuacgucuccugcgaccccgacaagugcuaccaguucgcccucggccagggcaccacccucaacaacguccacuccaacaacaccguccgcgaccgcacccccuaccgcacccuccucaugaacgagcucggcguccccuuccaccucggcaccaagcaggucugcaucgccugguccuccuccuccugccacgacggcaaggccuggcuccacgucugcaucaccggcgacgacaagaacgccaccgccuccuucaucuacaacggccgccucgucgacuccgucgucuccugguccaaggagauccuccgcacccaggaguccgagugcgucugcaucaacggcaccugcaccgucgucaugaccgacggcuccgccuccggcaaggccgacaccaagauccucuucaucgaggagggcaagaucguccacaccuccacccucuccggcuccgcccagcacgucgaggagugcuccugcuacccccgcuaccccggcguccgcugcgucugccgcgacaacuggaagggcuccaaccgccccaucgucgacaucaacaucaaggaccacuccaucgucuccuccuacgucugcuccggccucgucggcgacaccccccgcaagaacgacuccuccuccuccucccacugccucgaccccaacaacgaggagggcggccacggcgucaagggcugggccuucgacgacggcaacgacgucuggaugggccgcaccaucaacgagaccucccgccucggcuacgagaccuucaaggucaucgagggcugguccaacuccaaguccaagcuccagaucaaccgccaggucaucgucgaccgcggcgaccgcuccggcuacuccggcaucuucuccgucgagggcaaguccugcaucaaccgcugcuucuacgucgagcucauccgcggccgcaaggaggagaccgagguccucuggaccuccaacuccaucgucgucuucugcggcaccuccggcaccuacggcaccggcuccuggcccgacggcgccgaccucaaccucaugcccaucuga

SEQ ID NO: 121410 - RNA, 1410 nt, Artificial Sequence
  derived and/or modified CDS sequence (opt2) from neuraminidase__InfluenzaA__AHZ40575
augaaccccaaccagaagaucaucaccaucggcuccgucucccucaccaucuccaccaucugcuucuucaugcagaucgccauccucaucaccaccgucacccuccacuucaagcaguacgaguucaacuccccccccaacaaccaggucaugcucugcgagcccaccaucaucgagcgcaacaucaccgagaucgucuaccucaccaacaccaccaucgagaaggagaucugccccaagcccgccgaguaccgcaacugguccaagccccagugcggcaucaccggcuucgcccccuucuccaaggacaacuccauccgccucuccgccggcggcgacaucugggucacccgcgagcccuacgucuccugcgaccccgacaagugcuaccaguucgcccucggccagggcaccacccucaacaacguccacuccaacaacaccguccgcgaccgcacccccuaccgcacccuccucaugaacgagcucggcguccccuuccaccucggcaccaagcaggucugcaucgccugguccuccuccuccugccacgacggcaaggccuggcuccacgucugcaucaccggcgacgacaagaacgccaccgccuccuucaucuacaacggccgccucgucgacuccgucgucuccugguccaaggagauccuccgcacccaggaguccgagugcgucugcaucaacggcaccugcaccgucgucaugaccgacggcuccgccuccggcaaggccgacaccaagauccucuucaucgaggagggcaagaucguccacaccuccacccucuccggcuccgcccagcacgucgaggagugcuccugcuacccccgcuaccccggcguccgcugcgucugccgcgacaacuggaagggcuccaaccgccccaucgucgacaucaacaucaaggaccacuccaucgucuccuccuacgucugcuccggccucgucggcgacaccccccgcaagaacgacuccuccuccuccucccacugccucgaccccaacaacgaggagggcggccacggcgucaagggcugggccuucgacgacggcaacgacgucuggaugggccgcaccaucaacgagaccucccgccucggcuacgagaccuucaaggucaucgagggcugguccaaccccaaguccaagcuccagaucucccgccaggucaucgucgaccgcggcgaccgcuccggcuacuccggcaucuucuccgucgagggcaaguccugcaucaaccgcugcuucuacgucgagcucauccgcggccgcaaggaggagaccgagguccucuggaccuccaacuccaucgucgucuucugcggcaccuccggcaccuacggcaccggcuccuggcccgacggcgccgaccucaaccucaugcccaucuga

SEQ ID NO: 121411 - RNA, 1410 nt, Artificial Sequence; identical to SEQ ID NO: 121129
  derived and/or modified CDS sequence (opt2) from neuraminidase__InfluenzaA__AHZ40586

SEQ ID NO: 121412 - RNA, 1410 nt, Artificial Sequence
  derived and/or modified CDS sequence (opt2) from neuraminidase__InfluenzaA__AHZ40598
augaaccccaaccagaagaucaucaccaucggcuccgucugcaugaccaucggcauggccaaccucauccuccagaucggcaacaucaucuccaucuggaucucccacuccauccaggucggcaaccagucccagaucgagaccugcaaccaguccgucaucaccuacgagaacaacaccugggucaaccagaccuacgucaacaucuccaacaccaacuucgccgccggccagcccgucgucuccgucaagcucgccggcaacuccucccucugccccgucuccggcugggccaucuacuccaaggacaacuccguccgcaucggcuccaagggcgacgucuucgucauccgcgagcccuucaucuccugcuccccccucgagugccgcaccuucuuccucacccagggcgcccuccucaacgacaagcacuccaacggcaccaucaaggaccgcucccccuaccgcacccucauguccugccccaucggcgagguccccucccccuacaacucccgcuucgaguccgucgccugguccgccuccgccugccacgacggcaucaacuggcucaccaucggcaucuccggccccgacuccggcgccgucgccguccucaaguacaacggcaucaucaccgacaccaucaaguccuggcgcaacgacauccuccgcacccaggaguccgagugcgccugcgucaacggcuccugcuucaccaucaugaccgacggccccuccgacggccaggccuccuacaagaucuuccgcaucgagaagggcaagaucgucaaguccgucgagaugaacgcccccaacuaccacuacgaggagugcuccugcuaccccgacuccuccgagaucaccugcgucugccgcgacaacuggcacggcuccaaccgccccugggucuccuucaaccagaaccucgaguaccagaucggcuacaucugcuccggcaucuucggcgacaacccccgccccaacgacaagaccggcuccugcggccccgucuccuccaacggcgccaacggcgucaagggcuucuccuucaaguacggcaacggcgucuggaucggccgcaccaaguccaucuccucccgcaagggcuucgagaugaucugggaccccaacggcuggaccggcaccgacaacaacuucuccaucaagcaggacaucgucggcaucaacgagugguccggcuacuccggcuccuucguccagcaccccgagcucaccggccucgacugcauccgccccugcuucugggucgagcucauccgcggccgccccaaggagaacaccaucuggaccuccggcuccuccaucuccuucugcggcgucaacuccgacaccgucggcugguccuggcccgacggcgccgagcuccccuucaccaucgacaaguga

SEQ ID NO: 121413 - RNA, 1410 nt, Artificial Sequence; identical to SEQ ID NO: 118182
  derived and/or modified CDS sequence (opt2) from neuraminidase__InfluenzaA__AHZ40609

SEQ ID NO: 121414 - RNA, 1410 nt, Artificial Sequence; identical to SEQ ID NO: 119411
  derived and/or modified CDS sequence (opt2) from neuraminidase__InfluenzaA__AHZ40629

SEQ ID NO: 121415 - RNA, 1410 nt, Artificial Sequence; identical to SEQ ID NO: 119393
  derived and/or modified CDS sequence (opt2) from neuraminidase__InfluenzaA__AHZ40641

SEQ ID NO: 121416 - RNA, 1410 nt, Artificial Sequence
  derived and/or modified CDS sequence (opt2) from neuraminidase__InfluenzaA__AHZ40653
augaaccccaaccagaagaucaucaccaucggcuccgucucccucaccaucuccaccaucugcuucuucaugcagaucgccauccucaucaccaccgucacccuccacuucaagcaguacgaguucaacuccccccccaacaaccaggucaugcucugcgagcccaccaucaucgagcgcaacaucaccgagaucgucuaccucaccaacaccaccaucgagaaggagaucugccccaagcccgccggcuaccgcaacugguccaagccccagugcggcaucaccggcuucgcccccuucuccaaggacaacuccauccgccucuccgccggcggcgacaucugggucacccgcgagcccuacgucuccugcgaccccgacaagugcuaccaguucgcccucggccagggcaccacccucaacaacguccacuccaacaacaccguccgcgaccgcacccccuaccgcacccuccucaugaacgagcucggcguccccuuccaccucggcaccaagcaggucugcaucgccugguccuccuccuccugccacgacggcaaggccuggcuccacgucugcaucaccggcgacgacaagaacgccaccgccuccuucaucuacaacggccgccucgucgacuccgucgucuccugguccaaggagauccuccgcacccaggaguccgagugcgucugcaucaacggcaccugcaccgucgucaugaccgacggcuccgccuccggcaaggccgacaccaagauccucuucaucgaggagggcaagaucguccacaccuccacccucuccggcuccgcccagcacgucgaggagugcuccugcuacccccgcuaccccggcguccgcugcgucugccgcgacaacuggaagggcuccaaccgccccaucgucgacaucaacaucaaggaccacuccaucgucuccuccuacgucugcuccggccucgucggcgacaccccccgcaagaacgacuccuccuccuccucccacugccucgaccccaacaacgaggagggcggccacggcgucaagggcugggccuucgacgacggcaacgacgucuggaugggccgcaccaucaacgagaccucccgccucggcuacgagaccuucaaggucaucgagggcugguccaaccccaaguccaagcuccagaucaaccgccaggucaucgucgaccgcggcgaccgcuccggcuacuccggcaucuucuccgucgagggcaaguccugcaucaaccgcugcuucuacgucgagcucauccgcggccgcaaggaggagaccgagguccucuggaccuccaacuccaucgucgucuucugcggcaccuccggcaccuacggcaccggcuccuggcccgacggcgccgaccucaaccucaugcccaucuga

SEQ ID NO: 121417 - RNA, 1410 nt, Artificial Sequence; identical to SEQ ID NO: 119411
  derived and/or modified CDS sequence (opt2) from neuraminidase__InfluenzaA__AHZ40665

SEQ ID NO: 121418 - RNA, 1410 nt, Artificial Sequence; identical to SEQ ID NO: 119411
  derived and/or modified CDS sequence (opt2) from neuraminidase__InfluenzaA__AHZ40677

SEQ ID NO: 121419 - RNA, 1410 nt, Artificial Sequence; identical to SEQ ID NO: 118182
  derived and/or modified CDS sequence (opt2) from neuraminidase__InfluenzaA__AHZ40689

SEQ ID NO: 121420 - RNA, 1410 nt, Artificial Sequence
  derived and/or modified CDS sequence (opt2) from neuraminidase__InfluenzaA__AHZ40713
augaaccccaaccagaagaucaucaccaucggcuccgucucccucaccaucuccaccaucugcuucuucaugcagaucgccauccucaucaccaccgucacccuccacuucaagcaguacgaguucaacuccccccccaacaaccaggucaugcucugcgagcccaccaucaucgagcgcaacaucaccgagaucgucuaccucaccaacaccaccaucgagaaggagaucugccccaagcccgccgaguaccgcaacugguccaagccccagugcggcaucaccggcuucgcccccuucuccaaggacaacuccauccgccucuccgccggcggcgacaucugggucacccgcgagcccuacgucuccugcgaccccgacaagugcuaccaguucgcccucggccagggcaccacccucaacaacguccacuccaacaacaccguccgcgaccgcacccccuaccgcacccuccucaugaacgagcucggcguccccuuccaccucggcaccaagcaggucugcaucgccugguccuccuccuccugccacgacggcaaggccuggcuccacgucugcaucaccggcgacgacaagaacgccaccgccuccuucaucuacaacggccgccucgucgacuccgucgucuccugguccaaggagauccuccgcacccaggaguccgagugcgucugcaucaacggcaccugcaccgucgucaugaccgacggcuccgccuccggcaaggccgacaccaagauccucuucaucgaggagggcaagaucguccacaccuccacccucuccggcuccgcccagcacgucgaggagugcuccugcuacccccgcuaccccggcguccgcugcgucugccgcgacaacuggaagggcuccaaccgccccaucgucgacaucaacaucaaggaccacuccaucgucuccuccuacgucugcuccggccucgucggcgacaccccccgcaagaacgacuccuccuccuccucccacugccucgaccccaacaacgaggagggcggccacggcgucaagggcugggccuucgacgacggcaacgacgucuggaugggccgcaccaucaacgagaccucccgccucggcuacgagaccuucaaggucaucgagggcugguccaaccccaaguccaagcuccagaucaaccgccaggucaucgucgaccgcggcgacaaguccggcuacuccggcaucuucuccgucgagggcaaguccugcaucaaccgcugcuucuacgucgagcucauccgcggccgcaaggaggagaccgagguccucuggaccuccaacuccaucgucgucuucugcggcaccuccggcaccuacggcaccggcuccuggcccgacggcgccgaccucaaccucaugcccaucuga

SEQ ID NO: 121421 - RNA, 1410 nt, Artificial Sequence
  derived and/or modified CDS sequence (opt2) from neuraminidase__InfluenzaA__AHZ40725
augaaccccaaccagaagaucaucaccaucggcuccgucucccucaccaucuccaccaucugcuucuucaugcagaucgccauccucaucaccaccgucacccuccacuucaagcaguacgaguucaacuccccccccaacaaccaggucaugcucugcgagcccaccaucaucgagcgcaacaucaccgagaucgucuaccucaccaacaccaccaucgagaaggagaucugccccaagcccgccgaguaccgcaacugguccaagccccagugcggcaucaccggcuucgcccccuucuccaaggacaacuccauccgccucuccgccggcggcgacaucugggucacccgcgagcccuacgucuccugcgaccccgacaagugcuaccaguucgcccucggccagggcaccacccucaacaacguccacuccaacaacaccguccgcgaccgcacccccuaccgcacccuccucaugaacgagcucggcguccccuuccaccucggcaccaagcaggucugcaucgccugguccuccuccuccugccacgacggcaaggccuggcuccacgucugcaucaccggcgacgacaagaacgccaccgccuccuucaucuacaacggccgccucgucgacuccgucgucuccugguccaaggagauccuccgcacccaggaguccgagugcgucugcaucaacggcaccugcaccgucgucaugaccgacggcuccgccuccggcaaggccgacaccaagauccucuucaucgaggagggcaagaucguccacaccuccacccucuccggcuccgcccagcacgucgaggagugcuccugcuacccccgcuaccccggcguccgcugcgucugccgcgacaacuggaagggcuccaaccgccccaucgucgacaucaacaucaaggaccacuccaucgucuccggcuacgucugcuccggccucgucggcgacaccccccgcaagaacgacuccuccuccuccucccacugccucgaccccaacaacgaggagggcggccacggcgucaagggcugggccuucgacgacggcaacgacgucuggaugggccgcaccaucaacgagaccucccgccucggcuacgagaccuucaaggucaucgagggcugguccaaccccaaguccaagcuccagaucaaccgccaggucaucgucgaccgcggcgaccgcuccggcuacuccggcaucuucuccgucgagggcaaguccugcaucaaccgcugcuucuacgucgagcucauccgcggccgcaaggaggagaccgagguccucuggaccuccaacuccaucgucgucuucugcggcaccuccggcaccuacggcaccggcuccuggcccgacggcgccgaccucaaccucaugcccaucuga

SEQ ID NO: 121422 - RNA, 1410 nt, Artificial Sequence; identical to SEQ ID NO: 119400
  derived and/or modified CDS sequence (opt2) from neuraminidase__InfluenzaA__AHZ40737

SEQ ID NO: 121423 - RNA, 1410 nt, Artificial Sequence
  derived and/or modified CDS sequence (opt2) from neuraminidase__InfluenzaA__AHZ40749
augaaccccaaccagaagaucaucaccaucggcuccgucucccucaccaucuccaccaucugccucuucaugcagaucgccauccucaucaccaccgucacccuccacuucaagcaguacgaguucaacuccccccccaacaaccaggucaugcucugcgagcccaccaucaucgagcgcaacaucaccgagaucgucuaccucaccaacaccaccaucgagaaggagaucugccccaagcccgccgaguaccgcaacugguccaagccccagugcggcaucaccggcuucgcccccuucuccaaggacaacuccauccgccucuccgccggcggcgacaucugggucacccgcgagcccuacgucuccugcgaccccgacaagugcuaccaguucgcccucggccagggcaccacccucaacaacguccacuccaacaacaccguccgcgaccgcacccccuaccgcacccuccucaugaacgagcucggcguccccuuccaccucggcaccaagcaggucugcaucgccugguccuccuccuccugccacgacggcaaggccuggcuccacgucugcaucaccggcgacgacaagaacgccaccgccuccuucaucuacaacggccgccucgucgacuccgucgucuccugguccaaggagauccuccgcacccaggaguccgagugcgucugcaucaacggcaccugcaccgucgucaugaccgacggcuccgccuccggcaaggccgacaccaagauccucuucaucgaggagggcaagaucguccacaccuccacccucuccggcuccgcccagcacgucgaggagugcuccugcuacccccgcuaccccggcguccgcugcgucugccgcgacaacuggaagggcuccaaccgccccaucgucgacaucaacaucaaggaccacuccaucgucuccuccuacgucugcuccggccucgucggcgacaccccccgcaagaacgacuccuccuccuccucccacugccucgaccccaacaacgaggagggcggccacggcgucaagggcugggccuucgacgacggcaacgacgucuggaugggccgcaccaucaacgagaccucccgccucggcuacgagaccuucaaggucaucgagggcugguccaaccccaaguccaagcuccagaucaaccgccaggucaucgucgaccgcggcgaccgcuccggcuacuccggcaucuucuccgucgagggcaaguccugcaucaaccgcugcuucuacgucgagcucauccgcggccgcaaggaggagaccgagguccucuggaccuccaacuccaucgucgucuucugcggcaccuccggcaccuacggcaccggccccuggcccgacggcgccgaccucaaccucaugcccaucuga

SEQ ID NO: 121424 - RNA, 1410 nt, Artificial Sequence
  derived and/or modified CDS sequence (opt2) from neuraminidase__InfluenzaA__AHZ40761
augaaccccaaccagaagaucaucaccaucggcuccgucucccucaccaucuccaccaucugcuucuucaugcagaucgccauccucaucaccaccgucacccuccacuucaagcaguacgaguucaacuccccccccaacaaccaggucaugcucugcgagcccaccaucaucgagcgcaacaucaccgagaucgucuaccucaccaacaccaccaucgagaaggagcucugccccaagcucgccgaguaccgcaacugguccaagccccagugcgacaucaccggcuucgcccccuucuccaaggacaacuccauccgccucuccgccggcggcgacaucugggucacccgcgagcccuacgucuccugcgaccccgacaagugcuaccaguucgcccucggccagggcaccacccucaacaacguccacuccaacaacaccguccgcgaccgcacccccuaccgcacccuccucaugaacgagcucggcguccccuuccaccucggcaccaagcaggucugcauggccugguccuccuccuccugccacgacggcaaggccuggcuccacgucugcaucaccggcgacgacaagaacgccaccgccuccuucaucuacaacggcaagcucgucgacuccgucgucuccugguccaaggagauccuccgcacccaggaguccgagugcgucugcaucaacggcaccugcaccgucgucaugaccgacggcuccgccuccggcaaggccgacaccaagauccucuucaucgaggagggcaagaucguccacaccuccacccucuccggcuccgcccagcacgucgaggagugcuccugcuacccccgcuaccccggcguccgcugcgucugccgcgacaacuggaagggcuccaaccgccccaucgucgacaucaacaucaaggaccacuccaucgucuccuccuacgucugcuccggccucgucggcgacaccccccgcaagaccgacuccuccuccuccucccacugccucgaccccaacaacgaggagggcggccacggcgucaagggcugggccuucgacgacggcaacgacgucuggaugggccgcaccaucaacgagaccucccgccucggcuacgagaccuucaaggucaucgagggcugguccaaccccaaguccaagcuccagaucaaccgccaggucaucgucgaccgcggcgaccgcuccggcuacuccggcaucuucuccgucgagggcaaguccugcaucaaccgcugcuucuacgucgagcucauccgcggccgcaagaaggagaccgccguccucuggaccuccaacuccaucgucgucuucugcggcaccuccggcaccuacggcaccggcuccuggcccgacggcgccgaccucaaccucaugcccaucuga

SEQ ID NO: 121425 - RNA, 1410 nt, Artificial Sequence; identical to SEQ ID NO: 118182
  derived and/or modified CDS sequence (opt2) from neuraminidase__InfluenzaA__AHZ40773

SEQ ID NO: 121426 - RNA, 1410 nt, Artificial Sequence; identical to SEQ ID NO: 112764
  derived and/or modified CDS sequence (opt2) from neuraminidase__InfluenzaA__AHZ40785

SEQ ID NO: 121427 - RNA, 1410 nt, Artificial Sequence; identical to SEQ ID NO: 112764
  derived and/or modified CDS sequence (opt2) from neuraminidase__InfluenzaA__AHZ40796

SEQ ID NO: 121428 - RNA, 1410 nt, Artificial Sequence; identical to SEQ ID NO: 112764
  derived and/or modified CDS sequence (opt2) from neuraminidase__InfluenzaA__AHZ40807

SEQ ID NO: 121429 - RNA, 1410 nt, Artificial Sequence; identical to SEQ ID NO: 112764
  derived and/or modified CDS sequence (opt2) from neuraminidase__InfluenzaA__AHZ40818

SEQ ID NO: 121430 - RNA, 1410 nt, Artificial Sequence; identical to SEQ ID NO: 112764
  derived and/or modified CDS sequence (opt2) from neuraminidase__InfluenzaA__AHZ40829

SEQ ID NO: 121431 - RNA, 1410 nt, Artificial Sequence; identical to SEQ ID NO: 112764
  derived and/or modified CDS sequence (opt2) from neuraminidase__InfluenzaA__AHZ40840

SEQ ID NO: 121432 - RNA, 1410 nt, Artificial Sequence; identical to SEQ ID NO: 112764
  derived and/or modified CDS sequence (opt2) from neuraminidase__InfluenzaA__AHZ40851

SEQ ID NO: 121433 - RNA, 1410 nt, Artificial Sequence; identical to SEQ ID NO: 112764
  derived and/or modified CDS sequence (opt2) from neuraminidase__InfluenzaA__AHZ40862

SEQ ID NO: 121434 - RNA, 1410 nt, Artificial Sequence; identical to SEQ ID NO: 112764
  derived and/or modified CDS sequence (opt2) from neuraminidase__InfluenzaA__AHZ40873

SEQ ID NO: 121435 - RNA, 1410 nt, Artificial Sequence; identical to SEQ ID NO: 112764
  derived and/or modified CDS sequence (opt2) from neuraminidase__InfluenzaA__AHZ40884

SEQ ID NO: 121436 - RNA, 1410 nt, Artificial Sequence; identical to SEQ ID NO: 112764
  derived and/or modified CDS sequence (opt2) from neuraminidase__InfluenzaA__AHZ40895

SEQ ID NO: 121437 - RNA, 1410 nt, Artificial Sequence; identical to SEQ ID NO: 112764
  derived and/or modified CDS sequence (opt2) from neuraminidase__InfluenzaA__AHZ40906

SEQ ID NO: 121438 - RNA, 1410 nt, Artificial Sequence; identical to SEQ ID NO: 112764
  derived and/or modified CDS sequence (opt2) from neuraminidase__InfluenzaA__AHZ40917

SEQ ID NO: 121439 - RNA, 1410 nt, Artificial Sequence; identical to SEQ ID NO: 112764
  derived and/or modified CDS sequence (opt2) from neuraminidase__InfluenzaA__AHZ40928

SEQ ID NO: 121440 - RNA, 1410 nt, Artificial Sequence; identical to SEQ ID NO: 112764
  derived and/or modified CDS sequence (opt2) from neuraminidase__InfluenzaA__AHZ40939

SEQ ID NO: 121441 - RNA, 1410 nt, Artificial Sequence; identical to SEQ ID NO: 112764
  derived and/or modified CDS sequence (opt2) from neuraminidase__InfluenzaA__AHZ40950

SEQ ID NO: 121442 - RNA, 1410 nt, Artificial Sequence; identical to SEQ ID NO: 112764
  derived and/or modified CDS sequence (opt2) from neuraminidase__InfluenzaA__AHZ40961

SEQ ID NO: 121443 - RNA, 1410 nt, Artificial Sequence; identical to SEQ ID NO: 112764
  derived and/or modified CDS sequence (opt2) from neuraminidase__InfluenzaA__AHZ40972

SEQ ID NO: 121444 - RNA, 1410 nt, Artificial Sequence; identical to SEQ ID NO: 112764
  derived and/or modified CDS sequence (opt2) from neuraminidase__InfluenzaA__AHZ40983

SEQ ID NO: 121445 - RNA, 1410 nt, Artificial Sequence; identical to SEQ ID NO: 112764
  derived and/or modified CDS sequence (opt2) from neuraminidase__InfluenzaA__AHZ40994

SEQ ID NO: 121446 - RNA, 1410 nt, Artificial Sequence; identical to SEQ ID NO: 112764
  derived and/or modified CDS sequence (opt2) from neuraminidase__InfluenzaA__AHZ41005

SEQ ID NO: 121447 - RNA, 1410 nt, Artificial Sequence; identical to SEQ ID NO: 112764
  derived and/or modified CDS sequence (opt2) from neuraminidase__InfluenzaA__AHZ41016

SEQ ID NO: 121448 - RNA, 1410 nt, Artificial Sequence; identical to SEQ ID NO: 112764
  derived and/or modified CDS sequence (opt2) from neuraminidase__InfluenzaA__AHZ41027

SEQ ID NO: 121449 - RNA, 1410 nt, Artificial Sequence; identical to SEQ ID NO: 112764
  derived and/or modified CDS sequence (opt2) from neuraminidase__InfluenzaA__AHZ41049

SEQ ID NO: 121450 - RNA, 1410 nt, Artificial Sequence; identical to SEQ ID NO: 112764
  derived and/or modified CDS sequence (opt2) from neuraminidase__InfluenzaA__AHZ41060

SEQ ID NO: 121451 - RNA, 1410 nt, Artificial Sequence; identical to SEQ ID NO: 112764
  derived and/or modified CDS sequence (opt2) from neuraminidase__InfluenzaA__AHZ41071

SEQ ID NO: 121452 - RNA, 1410 nt, Artificial Sequence; identical to SEQ ID NO: 112764
  derived and/or modified CDS sequence (opt2) from neuraminidase__InfluenzaA__AHZ41082

SEQ ID NO: 121453 - RNA, 1410 nt, Artificial Sequence; identical to SEQ ID NO: 112764
  derived and/or modified CDS sequence (opt2) from neuraminidase__InfluenzaA__AHZ41093

SEQ ID NO: 121454 - RNA, 1410 nt, Artificial Sequence; identical to SEQ ID NO: 112764
  derived and/or modified CDS sequence (opt2) from neuraminidase__InfluenzaA__AHZ41104

SEQ ID NO: 121455 - RNA, 1410 nt, Artificial Sequence; identical to SEQ ID NO: 112764
  derived and/or modified CDS sequence (opt2) from neuraminidase__InfluenzaA__AHZ41115

SEQ ID NO: 121456 - RNA, 1410 nt, Artificial Sequence; identical to SEQ ID NO: 112764
  derived and/or modified CDS sequence (opt2) from neuraminidase__InfluenzaA__AHZ41126

SEQ ID NO: 121457 - RNA, 1410 nt, Artificial Sequence; identical to SEQ ID NO: 112764
  derived and/or modified CDS sequence (opt2) from neuraminidase__InfluenzaA__AHZ41137

SEQ ID NO: 121458 - RNA, 1410 nt, Artificial Sequence; identical to SEQ ID NO: 112764
  derived and/or modified CDS sequence (opt2) from neuraminidase__InfluenzaA__AHZ41148

SEQ ID NO: 121459 - RNA, 1410 nt, Artificial Sequence; identical to SEQ ID NO: 112764
  derived and/or modified CDS sequence (opt2) from neuraminidase__InfluenzaA__AHZ41159

SEQ ID NO: 121460 - RNA, 1410 nt, Artificial Sequence; identical to SEQ ID NO: 112764
  derived and/or modified CDS sequence (opt2) from neuraminidase__InfluenzaA__AHZ41170

SEQ ID NO: 121461 - RNA, 1410 nt, Artificial Sequence; identical to SEQ ID NO: 112764
  derived and/or modified CDS sequence (opt2) from neuraminidase__InfluenzaA__AHZ41181

SEQ ID NO: 121462 - RNA, 1410 nt, Artificial Sequence; identical to SEQ ID NO: 112764
  derived and/or modified CDS sequence (opt2) from neuraminidase__InfluenzaA__AHZ41205

SEQ ID NO: 121463 - RNA, 1410 nt, Artificial Sequence; identical to SEQ ID NO: 112764
  derived and/or modified CDS sequence (opt2) from neuraminidase__InfluenzaA__AHZ41251

SEQ ID NO: 121464 - RNA, 1410 nt, Artificial Sequence; identical to SEQ ID NO: 112764
  derived and/or modified CDS sequence (opt2) from neuraminidase__InfluenzaA__AHZ41266

SEQ ID NO: 121465 - RNA, 1410 nt, Artificial Sequence; identical to SEQ ID NO: 112764
  derived and/or modified CDS sequence (opt2) from neuraminidase__InfluenzaA__AHZ41284

SEQ ID NO: 121466 - RNA, 1410 nt, Artificial Sequence; identical to SEQ ID NO: 112764
  derived and/or modified CDS sequence (opt2) from neuraminidase__InfluenzaA__AHZ41295

SEQ ID NO: 121467 - RNA, 1410 nt, Artificial Sequence; identical to SEQ ID NO: 112764
  derived and/or modified CDS sequence (opt2) from neuraminidase__InfluenzaA__AHZ41306

SEQ ID NO: 121468 - RNA, 1410 nt, Artificial Sequence; identical to SEQ ID NO: 112764
  derived and/or modified CDS sequence (opt2) from neuraminidase__InfluenzaA__AHZ41317

SEQ ID NO: 121469 - RNA, 1410 nt, Artificial Sequence; identical to SEQ ID NO: 112764
  derived and/or modified CDS sequence (opt2) from neuraminidase__InfluenzaA__AHZ41328

SEQ ID NO: 121470 - RNA, 1410 nt, Artificial Sequence; identical to SEQ ID NO: 112764
  derived and/or modified CDS sequence (opt2) from neuraminidase__InfluenzaA__AHZ41339

SEQ ID NO: 121471 - RNA, 1410 nt, Artificial Sequence; identical to SEQ ID NO: 112764
  derived and/or modified CDS sequence (opt2) from neuraminidase__InfluenzaA__AHZ41350

SEQ ID NO: 121472 - RNA, 1410 nt, Artificial Sequence; identical to SEQ ID NO: 112764
  derived and/or modified CDS sequence (opt2) from neuraminidase__InfluenzaA__AHZ41369

SEQ ID NO: 121473 - RNA, 1410 nt, Artificial Sequence; identical to SEQ ID NO: 112764
  derived and/or modified CDS sequence (opt2) from neuraminidase__InfluenzaA__AHZ41380

SEQ ID NO: 121474 - RNA, 1410 nt, Artificial Sequence; identical to SEQ ID NO: 112764
  derived and/or modified CDS sequence (opt2) from neuraminidase__InfluenzaA__AHZ41391

SEQ ID NO: 121475 - RNA, 1410 nt, Artificial Sequence; identical to SEQ ID NO: 112764
  derived and/or modified CDS sequence (opt2) from neuraminidase__InfluenzaA__AHZ41402

SEQ ID NO: 121476 - RNA, 1410 nt, Artificial Sequence; identical to SEQ ID NO: 112764
  derived and/or modified CDS sequence (opt2) from neuraminidase__InfluenzaA__AHZ41413

SEQ ID NO: 121477 - RNA, 1410 nt, Artificial Sequence; identical to SEQ ID NO: 112764
  derived and/or modified CDS sequence (opt2) from neuraminidase__InfluenzaA__AHZ41444

SEQ ID NO: 121478 - RNA, 1410 nt, Artificial Sequence; identical to SEQ ID NO: 112764
  derived and/or modified CDS sequence (opt2) from neuraminidase__InfluenzaA__AHZ41455

SEQ ID NO: 121479 - RNA, 1410 nt, Artificial Sequence; identical to SEQ ID NO: 112764
  derived and/or modified CDS sequence (opt2) from neuraminidase__InfluenzaA__AHZ41476

SEQ ID NO: 121480 - RNA, 1410 nt, Artificial Sequence; identical to SEQ ID NO: 112764
  derived and/or modified CDS sequence (opt2) from neuraminidase__InfluenzaA__AHZ41487

SEQ ID NO: 121481 - RNA, 1410 nt, Artificial Sequence; identical to SEQ ID NO: 112764
  derived and/or modified CDS sequence (opt2) from neuraminidase__InfluenzaA__AHZ41498

SEQ ID NO: 121482 - RNA, 1410 nt, Artificial Sequence; identical to SEQ ID NO: 112764
  derived and/or modified CDS sequence (opt2) from neuraminidase__InfluenzaA__AHZ41509

SEQ ID NO: 121483 - RNA, 1410 nt, Artificial Sequence; identical to SEQ ID NO: 112764
  derived and/or modified CDS sequence (opt2) from neuraminidase__InfluenzaA__AHZ41520

SEQ ID NO: 121484 - RNA, 1410 nt, Artificial Sequence; identical to SEQ ID NO: 112764
  derived and/or modified CDS sequence (opt2) from neuraminidase__InfluenzaA__AHZ41531

SEQ ID NO: 121485 - RNA, 1410 nt, Artificial Sequence; identical to SEQ ID NO: 112764
  derived and/or modified CDS sequence (opt2) from neuraminidase__InfluenzaA__AHZ41542

SEQ ID NO: 121486 - RNA, 1410 nt, Artificial Sequence; identical to SEQ ID NO: 112764
  derived and/or modified CDS sequence (opt2) from neuraminidase__InfluenzaA__AHZ41553

SEQ ID NO: 121487 - RNA, 1410 nt, Artificial Sequence; identical to SEQ ID NO: 112764
  derived and/or modified CDS sequence (opt2) from neuraminidase__InfluenzaA__AHZ41564

SEQ ID NO: 121488 - RNA, 1410 nt, Artificial Sequence; identical to SEQ ID NO: 112764
  derived and/or modified CDS sequence (opt2) from neuraminidase__InfluenzaA__AHZ41586

SEQ ID NO: 121489 - RNA, 1410 nt, Artificial Sequence; identical to SEQ ID NO: 112764
  derived and/or modified CDS sequence (opt2) from neuraminidase__InfluenzaA__AHZ41597

SEQ ID NO: 121490 - RNA, 1410 nt, Artificial Sequence; identical to SEQ ID NO: 112764
  derived and/or modified CDS sequence (opt2) from neuraminidase__InfluenzaA__AHZ41608

SEQ ID NO: 121491 - RNA, 1410 nt, Artificial Sequence; identical to SEQ ID NO: 112764
  derived and/or modified CDS sequence (opt2) from neuraminidase__InfluenzaA__AHZ41619

SEQ ID NO: 121492 - RNA, 1410 nt, Artificial Sequence; identical to SEQ ID NO: 112764
  derived and/or modified CDS sequence (opt2) from neuraminidase__InfluenzaA__AHZ41630

SEQ ID NO: 121493 - RNA, 1410 nt, Artificial Sequence; identical to SEQ ID NO: 112764
  derived and/or modified CDS sequence (opt2) from neuraminidase__InfluenzaA__AHZ41641

SEQ ID NO: 121494 - RNA, 1410 nt, Artificial Sequence; identical to SEQ ID NO: 112764
  derived and/or modified CDS sequence (opt2) from neuraminidase__InfluenzaA__AHZ41652

SEQ ID NO: 121495 - RNA, 1410 nt, Artificial Sequence; identical to SEQ ID NO: 112764
  derived and/or modified CDS sequence (opt2) from neuraminidase__InfluenzaA__AHZ41663

SEQ ID NO: 121496 - RNA, 1410 nt, Artificial Sequence; identical to SEQ ID NO: 112764
  derived and/or modified CDS sequence (opt2) from neuraminidase__InfluenzaA__AHZ41674

SEQ ID NO: 121497 - RNA, 1410 nt, Artificial Sequence; identical to SEQ ID NO: 112764
  derived and/or modified CDS sequence (opt2) from neuraminidase__InfluenzaA__AHZ41685

SEQ ID NO: 121498 - RNA, 1410 nt, Artificial Sequence; identical to SEQ ID NO: 112764
  derived and/or modified CDS sequence (opt2) from neuraminidase__InfluenzaA__AHZ41696

SEQ ID NO: 121499 - RNA, 1410 nt, Artificial Sequence; identical to SEQ ID NO: 112764
  derived and/or modified CDS sequence (opt2) from neuraminidase__InfluenzaA__AHZ41707

SEQ ID NO: 121500 - RNA, 1410 nt, Artificial Sequence; identical to SEQ ID NO: 112764
  derived and/or modified CDS sequence (opt2) from neuraminidase__InfluenzaA__AHZ41718

SEQ ID NO: 121501 - RNA, 1410 nt, Artificial Sequence; identical to SEQ ID NO: 112764
  derived and/or modified CDS sequence (opt2) from neuraminidase__InfluenzaA__AHZ41729

SEQ ID NO: 121502 - RNA, 1410 nt, Artificial Sequence; identical to SEQ ID NO: 112764
  derived and/or modified CDS sequence (opt2) from neuraminidase__InfluenzaA__AHZ41740

SEQ ID NO: 121503 - RNA, 1410 nt, Artificial Sequence; identical to SEQ ID NO: 112764
  derived and/or modified CDS sequence (opt2) from neuraminidase__InfluenzaA__AHZ41751

SEQ ID NO: 121504 - RNA, 1410 nt, Artificial Sequence; identical to SEQ ID NO: 112764
  derived and/or modified CDS sequence (opt2) from neuraminidase__InfluenzaA__AHZ41762

SEQ ID NO: 121505 - RNA, 1410 nt, Artificial Sequence; identical to SEQ ID NO: 119425
  derived and/or modified CDS sequence (opt2) from neuraminidase__InfluenzaA__AHZ42564

SEQ ID NO: 121506 - RNA, 1410 nt, Artificial Sequence; identical to SEQ ID NO: 118182
  derived and/or modified CDS sequence (opt2) from neuraminidase__InfluenzaA__AHZ42575

SEQ ID NO: 121507 - RNA, 1410 nt, Artificial Sequence
  derived and/or modified CDS sequence (opt2) from neuraminidase__InfluenzaA__AHZ42587
augaaccccaaccagaagaucaucaccaucggcuccgucucccucaccaucuccaccaucugcuucuucaugcagaucgccauccucaucaccaccgucacccuccacuucaagcaguacgaguucaacuccccccccaacaaccaggucaugcucugcgagcccaccaucaucgagcgcaacaucaccgagaucgucuaccucaccaacaccaccaucgagaaggagaugugccccaagcccgccgaguaccgcaacugguccaagccccagugcggcaucaccggcuucgcccccuucuccaaggacaacuccauccgccucuccgccggcggcgacaucugggucacccgcgagcccuacgucuccugcgaccccgacaagugcuaccaguucgcccucggccagggcaccacccucaacaacguccacuccaacaacaccguccgcgaccgcacccccuaccgcacccuccucaugaacgagcucggcguccccuuccaccucggcaccaagcaggucugcaucgccugguccuccuccuccugccacgacggcaaggccuggcuccacgucugcaucaccggcgacgacaagaacgccaccgccuccuucaucuacaacggccgccucgucgacuccgucgucuccugguccaaggagauccuccgcacccaggaguccgagugcgucugcaucaacggcaccugcaccgucgucaugaccgacggcuccgccuccggcaaggccgacaccaagauccucuucaucgaggagggcaagaucguccacaccuccacccucuccggcuccgcccagcacgucgaggagugcuccugcuacccccgcuaccccggcguccgcugcgucugccgcgacaacuggaagggcuccaaccgccccaucgucgacaucaacaucaaggaccacuccaucgucuccuccuacgucugcuccggccucgucggcgacaccccccgcaagaacgacuccuccuccuccucccacugccucgaccccaacaacgaggagggcggccacggcgucaagggcugggccuucgacgacggcaacgacgucuggaugggccgcaccaucaacgagaccucccgccucggcuacgagaccuucaaggucaucgagggcugguccaaccccaaguccaagcuccagaucaaccgccaggucaucgucgaccgcggcgaccgcuccggcuacuccggcaucuucuccgucgagggcaaguccugcaucaaccgcugcuucuacgucgagcucauccgcggccgcaaggaggagaccgagguccucuggaccuccaacuccaucgucgucuucugcggcaccuccggcaccuacggcaccggcuccuggcccgacggcgccgaccucaaccucaugcccaucuga

SEQ ID NO: 121508 - RNA, 1413 nt, Artificial Sequence
  derived and/or modified CDS sequence (opt2) from neuraminidase__InfluenzaA__AHZ42599
augaaccccaaccagaagaucaucaccaucggcuccgucucccucaccaucuccaccaucugcuucuucaugcagaucgccauccucaucaccaccgucacccuccacuucaagcaguacgaguucaacuccccccccaagaacaaccaggucaugcucugcgagcccaccaucaucgagcgcaacaucaccgagaucgucuaccucaccaacaccaccaucgagaaggagaucugccccaagcccgccgaguaccgcaacugguccaagccccagugcggcaucaccggcuucgcccccuucuccaaggacaacuccauccgccucuccgccggcggcgacaucugggucacccgcgagcccuacgucuccugcgaccccgacaagugcuaccaguucgcccucggccagggcaccacccucaacaacguccacuccaacaacaccguccgcgaccgcacccccuaccgcacccuccucaugaacgagcucggcguccccuuccaccucggcaccaagcaggucugcaucgccugguccuccuccuccugccacgacggcaaggccuggcuccacgucugcaucaccggcgacgacaagaacgccaccgccuccuucaucuacaacggccgccucgucgacuccgucgucuccugguccaaggagauccuccgcacccaggaguccgagugcgucugcaucaacggcaccugcaccgucgucaugaccgacggcuccgccuccgagaaggccgacaccaagauccucuucaucgaggagggcaagaucguccacaccuccacccucuccggcuccgcccagcacgucgaggagugcuccugcuacccccgcuaccccggcguccgcugcgucugccgcgacaacuggaagggcuccaaccgccccaucgucgacaucaacaucaaggaccacuccaucgucuccuccuacgucugcuccggccucgucggcgacaccccccgcaagaacgacuccuccuccuccucccacugccucgaccccaacaacgaggagggcggccacggcgucaagggcugggccuucgacgacggcaacgacgucuggaugggccgcaccaucaacgagaccucccgccucggcuacgagaccuucaaggucaucgagggcugguccaaccccaaguccaagcuccagaucaaccgccaggucaucgucgaccgcggcgaccgcuccggcuacuccggcaucuucuccgucgagggcaaguccugcaucaaccgcugcuucuacgucgagcucauccgcggccgcaaggaggagaccgagguccucuggaccuccaacuccaucgucgucuucugcggcaccuccggcaccuacggcaccggcuccuggcccgacggcgccgaccucaaccucaugcccaucuga

SEQ ID NO: 121509 - RNA, 1410 nt, Artificial Sequence; identical to SEQ ID NO: 120828
  derived and/or modified CDS sequence (opt2) from neuraminidase__InfluenzaA__AHZ42611

SEQ ID NO: 121510 - RNA, 1410 nt, Artificial Sequence; identical to SEQ ID NO: 118182
  derived and/or modified CDS sequence (opt2) from neuraminidase__InfluenzaA__AHZ42622

SEQ ID NO: 121511 - RNA, 1410 nt, Artificial Sequence; identical to SEQ ID NO: 121369
  derived and/or modified CDS sequence (opt2) from neuraminidase__InfluenzaA__AHZ42634

SEQ ID NO: 121512 - RNA, 1410 nt, Artificial Sequence; identical to SEQ ID NO: 121412
  derived and/or modified CDS sequence (opt2) from neuraminidase__InfluenzaA__AHZ42646

SEQ ID NO: 121513 - RNA, 1410 nt, Artificial Sequence; identical to SEQ ID NO: 118182
  derived and/or modified CDS sequence (opt2) from neuraminidase__InfluenzaA__AHZ42657

SEQ ID NO: 121514 - RNA, 1410 nt, Artificial Sequence; identical to SEQ ID NO: 121129
  derived and/or modified CDS sequence (opt2) from neuraminidase__InfluenzaA__AHZ42669

SEQ ID NO: 121515 - RNA, 1410 nt, Artificial Sequence; identical to SEQ ID NO: 118182
  derived and/or modified CDS sequence (opt2) from neuraminidase__InfluenzaA__AHZ42681

SEQ ID NO: 121516 - RNA, 1410 nt, Artificial Sequence
  derived and/or modified CDS sequence (opt2) from neuraminidase__InfluenzaA__AHZ42693
augaaccccaaccagaagaucaucaccaucggcuccgucugcaugaccaucggcauggccaaccucauccuccagaucggcaacaucaucuccaucuggaucucccacuccauccagcucggcaaccagucccagaucgagaccugcaaccaguccgucaucaccuacgagaacaacaccugggucaaccagaccuacgucaacaucuccaacaccaacuucgccgccggccaguccgucgucuccgucaagcucgccggcaacuccucccucugccccgucuccggcugggccaucuacuccaaggacaacuccguccgcaucggcuccaagggcgacgucuucgucauccgcgagcccuucaucuccugcuccccccucgagugccgcaccuucuuccucacccagggcgcccuccucaacgacaagcacuccaacggcaccaucaaggaccgcucccccuaccgcacccucauguccugccccaucggcgagguccccucccccuacaacucccgcuucgaguccgucgccugguccgccuccgccugccacgacggcaucaacuggcucaccaucggcaucuccggccccgacuccggcgccgucgccguccucaaguacaacggcaucaucaccgacaccaucaaguccuggcgcaacaacauccuccgcacccaggaguccgagugcgccugcgucaacggcuccugcuucaccaucaugaccgacggccccuccgacggccaggccuccuacaagaucuuccgcaucgagaagggcaagaucgucaaguccgucgagaugaacgcccccaacuaccacuacgaggagugcuccugcuaccccgacuccuccgagaucaccugcgucugccgcgacaacuggcacggcuccaaccgccccugggucuccuucaaccagaaccucgaguaccagaucggcuacaucugcuccggcaucuucggcgacaacccccgccccaacgacaagaccggcuccugcggccccgucuccuccaacggcgccaacggcgucaagggcuucuccuucaaguacggcaacggcgucuggaucggccgcaccaaguccaucuccucccgcaagggcuucgagaugaucugggaccccaacggcuggaccggcaccgacaacaacuucuccaucaagcaggacaucgucggcaucaacgagugguccggcuacuccggcuccuucguccagcaccccgagcucaccggcauggacugcauccgccccugcuucugggucgagcucauccgcggccgccccaaggagaacaccaucuggaccuccggcuccaucaucuccuucugcggcgucaacuccgacaccgucggcugguccuggcccgacggcgccgagcuccccuucaccaucgacaaguga

SEQ ID NO: 121517 - RNA, 1410 nt, Artificial Sequence; identical to SEQ ID NO: 118182
  derived and/or modified CDS sequence (opt2) from neuraminidase__InfluenzaA__AHZ42704

SEQ ID NO: 121518 - RNA, 1410 nt, Artificial Sequence
  derived and/or modified CDS sequence (opt2) from neuraminidase__InfluenzaA__AHZ42716
augaaccccaaccagaagaucaucaccaucggcuccgucucccucaccaucuccaccaucugcuucuucaugcagaucgccauccucaucaccaccgucacccuccacuucaagcaguacgaguucaacuccccccccaacaaccaggucaugcucugcgagcccaccaucaucgagcgcaacaucaccgagaucgucuaccucaccaacaccaccaucgagaaggagaucugccccaagcccgccgaguaccgcaacugguccaagccccagugcggcaucaccggcuucgcccccuucuccaaggacaacuccauccgccucuccgccggcggcgacaucugggucacccgcgagcccuacgucuccugcgaccccgacaagugcuaccaguucgcccucggccagggcaccacccucaacaacguccacuccaacaacaccguccgcgaccgcacccccuaccgcacccuccucaugaacgagcucggcguccccuuccaccucggcaccaagcaggucugcaucgccugguccuccuccuccugccacgacggcaaggccuggcuccacgucugcaucaccggcgacgacaagaacgccaccgccuccuucaucuacaacggccgccucgucgacuccgucgucuccugguccaaggagauccuccgcacccaggaguccgagugcgucugcaucaacggcaccugcaccgucgucaugaccgacggcuccgccuccggcaaggccgacaccaagauccucuucaucgaggagggcaagaucguccacaccuccacccucuccggcuccgcccagcacgucgaggagugcuccugcuacccccgcuaccccggcguccgcugcgucugccgcgacaacuggaagggcuccaaccgccccaucgucgacaucaacaucaaggaccacuccaucgucuccuccuacgucugcuccggccucgucggcgacaccccccgcaagaacgacuccuccuccuccucccacugccucgaccccaacaacgaggagggcggccacggcgucaagggcugggccuucgacgacggcaacgacgucuggaugggccgcaccaucaacgagaccucccgccucggcuacgagaccuucaaggucaucgagggcugguccaaccccaaguccaaguuccagaucaaccgccaggucaucgucgaccgcggcgaccgcuccggcuacuccggcaucuucuccgucgagggcaaguccugcaucaaccgcugcuucuacgucgagcucauccgcggccgcaaggaggagaccgagguccucuggaccuccaacuccaucgucgucuucugcggcaccuccggcaccuacggcaccggcuccuggcccgacggcgccgaccucaaccucaugcccaucuga

SEQ ID NO: 121519 - RNA, 1410 nt, Artificial Sequence; identical to SEQ ID NO: 118182
  derived and/or modified CDS sequence (opt2) from neuraminidase__InfluenzaA__AHZ42728

SEQ ID NO: 121520 - RNA, 1410 nt, Artificial Sequence; identical to SEQ ID NO: 119425
  derived and/or modified CDS sequence (opt2) from neuraminidase__InfluenzaA__AHZ42740

SEQ ID NO: 121521 - RNA, 1410 nt, Artificial Sequence; identical to SEQ ID NO: 119393
  derived and/or modified CDS sequence (opt2) from neuraminidase__InfluenzaA__AHZ42751

SEQ ID NO: 121522 - RNA, 1410 nt, Artificial Sequence
  derived and/or modified CDS sequence (opt2) from neuraminidase__InfluenzaA__AHZ42763
augaaccccaaccagaagaucaucaccaucggcuccgucucccucaccaucuccaccaucugcuucuucaugcagaucgccauccucaucaccaccgucacccuccacuucaagcaguacgaguucaacuccccccccaacaaccaggucaugcucugcgagcccaccaucaucgagcgcaacaucaccgagaucgucuaccucaccaacaccaccaucgagaaggagaucugccccaagcccgccgaguaccgcaacugguccaagccccagugcgacaucaccggcuucgcccccuucuccaaggacaacuccauccgccucuccgccggcggcgacaucugggucacccgcgagcccuacgucuccugcgaccccgacaagugcuaccaguucgcccucggccagggcaccacccucaacaacguccacuccaacaacaccguccgcgaccgcacccccuaccgcacccuccucaugaacgagcucggcguccccuuccaccucggcaccaagcaggucugcaucgccugguccuccuccuccugccacgacggcaaggccuggcuccacgucugcaucaccggcgacgacaagaacgccaccgccuccuucaucuacaacggccgccucgucgacuccgucgucuccugguccaaggagauccuccgcacccaggaguccgagugcgucugcaucaacggcaccugcaccgucgucaugaccgacggcuccgccuccggcaaggccgacaccaagauccucuucaucgaggagggcaagaucgucuacaccuccacccucuccggcuccgcccagcacgucgaggagugcuccugcuacccccgcuaccccggcguccgcugcgucugccgcgacaacuggaagggcuccaaccgccccaucgucgacaucaacaucaaggaccacuccaucgucucccgcuacgucugcuccggccucgucggcgacaccccccgcaagaacgacuccuccuccuccucccacugccucgaccccaacaacgaggagggcggccacggcgucaagggcugggccuucgacgacggcaacgacgucuggaugggccgcaccaucaacgagaccucccgccucggcuacgagaccuucaaggucaucgagggcugguccaaccccaaguccaagcuccagaucaaccgccaggucaucgucgaccgcggcgaccgcuccggcuacuccggcaucuucuccgucgagggcaaguccugcaucaaccgcugcuucuacgucgagcucauccgcggccgcaaggaggagaccgagguccucuggaccuccaacuccaucgucgucuucugcggcaccuccggcaccuacggcaccggcuccuggcccgacggcgccgaccucaaccucaugcccaucuga

SEQ ID NO: 121523 - RNA, 1410 nt, Artificial Sequence; identical to SEQ ID NO: 119411
  derived and/or modified CDS sequence (opt2) from neuraminidase__InfluenzaA__AHZ42775

SEQ ID NO: 121524 - RNA, 1410 nt, Artificial Sequence; identical to SEQ ID NO: 118182
  derived and/or modified CDS sequence (opt2) from neuraminidase__InfluenzaA__AHZ42787

SEQ ID NO: 121525 - RNA, 1410 nt, Artificial Sequence
  derived and/or modified CDS sequence (opt2) from neuraminidase__InfluenzaA__AHZ42799
augaaccccaaccagaagaucaucaccaucggcuccgucucccucaccaucuccaccaucugcuucuucaugcagaucgccauccucaucaccaccgucacccuccacuucaagcaguacgaguucaacuccccccccaacaaccaggucaugcucugcgagcccaccaucaucgagcgcaacaucaccgagaucgucuaccucaccaacaccaccaucgagaaggagaucugccccaagcccgccgaguaccgcaacugguccaagccccagugcggcaucaccggcuucgcccccuucuccaaggacaacuccauccgccucuccgccggcggcgacaucugggucacccgcgagcccuacgucuccugcgaccccgacaagugcuaccaguucgcccucggccagggcaccacccucaacaacguccacuccaacaacaccguccgcgaccgcacccccuaccgcacccuccucaugaacgagcucggcguccccuuccaccucggcaccaagcaggucugcaucgccugguccuccuccuccugccacgacggcaaggccuggcuccacgucugcaucaccggcgacgacaagaacgccaccgccuccuucaucuacaacggccgccucgucgacuccgucgucuccugguccaaggagauccuccgcacccaggaguccgagugcgucugcaucaacggcaccugcaccgucgucaugaccgacggcuccgccuccggcaaggccgacaccaagauccucuucaucgaggagggcaagaucguccacaccuccacccucuccggcuccgcccagcacgucgaggagugcuccugcuacccccgcuaccccggcguccgcugcgucugccgcgacaacuggaagggcuccaaccgccccaucaucgacaucaacaucaaggaccacuccaucgucuccuccuacgucugcuccggccucgucggcgacaccccccgcaagaacgacuccuccuccuccucccacugccucgaccccaacaacgaggagggcggccacggcgucaagggcugggccuucgacgacggcaacgacgucuggaugggccgcaccaucaacgagaccucccgccucggcuacgagaccuucaaggucaucgagggcugguccaaccccaaguccaagcuccagaucaaccgccaggucaucgucgaccgcggcgaccgcuccggcuacuccggcaucuucuccgucgagggcaaguccugcaucaaccgcugcuucuacgucgagcucauccgcggccgcaaggaggagaccgagguccucuggaccuccaacuccaucgucgucuucugcggcaccuccggcaccuacggcaccggcuccuggcccgacggcgccgaccucaaccucaugcccaucuga

SEQ ID NO: 121526 - RNA, 1410 nt, Artificial Sequence
  derived and/or modified CDS sequence (opt2) from neuraminidase__InfluenzaA__AHZ42811
augaaccccaaccagaagaucaucaccaucggcuccgucucccucaccaucuccaccaucugcuucuucaugcagaucgccauccucaucaccaccgucacccuccacuucaagcaguacgaguucaacuccccccccaacaaccaggucaugcucugcgagcccaccaucaucgagcgcaacaucaccgagaucgucuaccucaccaacaccaccaucgagaaggagaucugccccaagcccgccgaguaccgcaacugguccaagccccagugcggcaucaccggcuucgcccccuucuccaaggacaacuccauccgccucuccgccggcggcgacaucugggucacccgcgagcccuacgucuccugcgaccccgacaagugcuaccaguucgcccucggccagggcaccacccucaacaacguccacuccaacaacaccguccgcgaccgcacccccuaccgcacccuccucaugaacgagcucggcguccccuuccaccucggcaccaagcaggucugcaucgccugguccuccuccuccugccacgacggcaaggccuggcuccacgucugcaucaccggcgacgacaagaacgccaccgccuccuucaucuacaacggccgccucgucgacuccgucgucuccugguccaaggagauccuccgcacccaggaguccgagugcgucugcaucaacggcaccugcaccgucgucaugaccgacggcuccgccuccggcaaggccgacaccaagauccucuucaucgaggagggcaagaucguccacaccuccacccucuccggcuccgcccagcacgucgaggagugcuccugcuacccccgcuaccccggcguccgcugcgucugccgcgacaacuggaagggcuccaaccgccccaucgucgacaucaacaucaaggaccacuccaucgucuccuccuacgucugcuccggccucgucggcgacaccccccgcaagaacgacuccuccuccuccucccacugccucgaccccaacaacgaggagggcggccacggcgucaagggcugggccuucgacgacggcaacgacgucuggaugggccgcaccaucaacgagaccucccgccucggcuacgagaccuucaaggucaucgagggcugguccaaccccaaguccaagcuccagaucaaccgccaggucaucgucggccgcggcgaccgcuccggcuacuccggcaucuucuccgucgagggcaaguccugcaucaaccgcugcuucuacgucgagcucauccgcggccgcaaggaggagaccgagguccucuggaccuccaacuccaucgucgucuucugcggcaccuccggcaccuacggcaccggcuccuggcccgacggcgccgaccucaaccucaugcccaucuga

SEQ ID NO: 121527 - RNA, 1410 nt, Artificial Sequence
  derived and/or modified CDS sequence (opt2) from neuraminidase__InfluenzaA__AHZ42823
augaaccccaaccagaagaucaucaccaucggcuccgucugcaugaccaucggcauggccaaccucauccuccagaucggcaacaucaucuccaucuggaucucccacuccauccagcucggcaaccagucccagaucgagaccugcaaccaguccgucaucaccuacgagaacaacaccugggucaaccagaccuacgucaacaucuccaacaccaacuucgccgccgagcaguccgucgucuccgucaagcucgccggcaacuccucccucugccccgucuccggcugggccaucuacuccaaggacaacuccguccgcaucggcuccaagggcgacgucuucgucauccgcgagcccuucaucuccugcuccccccucgagugccgcaccuucuuccucacccagggcgcccuccucaacgacaagcacuccaacggcaccaucaaggaccgcucccccuaccgcacccucauguccugccccaucggcgagguccccucccccuacaacucccgcuucgaguccgucgccugguccgccuccgccugccacgacggcaucaacuggcucaccaucggcaucuccggccccgacuccggcgccgucgccguccucaaguacaacggcaucaucaccgacaccaucaaguccuggcgcaacaacauccuccgcacccaggaguccgagugcgccugcgucaacggcuccugcuucaccaucaugaccgacggccccuccgacggccaggccuccuacaagaucuuccgcaucgagaagggcaagaucgucaaguccgucgagaugaacgcccccaacuaccacuacgaggagugcuccugcuaccccgacuccuccgagaucaccugcgucugccgcgacaacuggcacggcuccaaccgccccugggucuccuucaaccagaaccucgaguaccagaucggcuacaucugcuccggcaucuucggcgacaacccccgccccaacgacaagaccggcuccugcggccccgucuccuccaacggcgccaacggcgucaagggcuucuccuucaaguacggcaacggcgucuggaucggccgcaccaaguccaucuccucccgcaagggcuucgagaugaucugggaccccaacggcuggaccggcaccgacaacaacuucuccaucaagcaggacaucgucggcaucaacgagugguccggcuacuccggcuccuucguccagcaccccgagcucaccggccucgacugcauccgccccugcuucugggucgagcucauccgcggccgccccaaggagaacaccaucuggaccuccggcuccuccaucuccuucugcggcgucaacuccgacaccgucggcugguccuggcccgacggcgccgagcuccccuucaccaucgacaaguga

SEQ ID NO: 121528 - RNA, 1410 nt, Artificial Sequence
  derived and/or modified CDS sequence (opt2) from neuraminidase__InfluenzaA__AHZ42834
augaaccccaaccagaagaucaucaccaucggcuccgucucccucaccaucuccaccaucugcuucuucaugcagaccgccauccucaucaccaccgucacccuccacuucaagcaguacgaguucaacuccccccccaacaaccaggucaugcucugcgagcccaccaucaucgagcgcaacaucaccgagaucgucuaccucaccaacaccaccaucgagaaggagaucugccccaagcccgccgaguaccgcaacugguccaagccccagugcggcaucaccggcuucgcccccuucuccaaggacaacuccauccgccucuccgccggcggcgacaucugggucacccgcgagcccuacgucuccugcgaccccgacaagugcuaccaguucgcccucggccagggcaccacccucaacaacguccacuccaacaacaccguccgcgaccgcacccccuaccgcacccuccucaugaacgagcucggcguccccuuccaccucggcaccaagcaggucugcaucgccugguccuccuccuccugccacgacggcaaggccuggcuccacgucugcaucaccggcgacgacaagaacgccaccgccuccuucaucuacaacggccgccucgucgacuccgucgucuccugguccaaggagauccuccgcacccaggaguccgagugcgucugcaucaacggcaccugcaccgucgucaugaccgacggcuccgccuccggcaaggccgacaccaagauccucuucaucgaggagggcaagaucguccacaccuccacccucuccggcuccgcccagcacgucgaggagugcuccugcuacccccgcuaccccggcguccgcugcgucugccgcgacaacuggaagggcuccaaccgccccaucgucgacaucaacaucaaggaccacuccaucgucuccuccuacgucugcuccggccucgucggcgacaccccccgcaagaacgacuccuccuccuccucccacugccucgaccccaacaacgaggagggcggccacggcgucaagggcugggccuucgacgacggcaacgacgucuggaugggccgcaccaucaacgagaccucccgccucggcuacgagaccuucaaggucaucgagggcugguccaaccccaaguccaagcuccagaucaaccgccaggucaucgucgaccgcggcgaccgcuccggcuacuccggcaucuucuccgucgagggcaaguccugcaucaaccgcugcuucuacgucgagcucauccgcggccgcaaggaggagaccgagguccucuggaccuccaacuccaucgucgucuucugcggcaccuccggcaccuacggcaccggcuccuggcccgacggcgccgaccucaaccucaugcccaucuga

SEQ ID NO: 121529 - RNA, 1410 nt, Artificial Sequence; identical to SEQ ID NO: 118182
  derived and/or modified CDS sequence (opt2) from neuraminidase__InfluenzaA__AHZ42846

SEQ ID NO: 121530 - RNA, 1410 nt, Artificial Sequence; identical to SEQ ID NO: 118182
  derived and/or modified CDS sequence (opt2) from neuraminidase__InfluenzaA__AHZ42858

SEQ ID NO: 121531 - RNA, 1410 nt, Artificial Sequence; identical to SEQ ID NO: 118182
  derived and/or modified CDS sequence (opt2) from neuraminidase__InfluenzaA__AHZ42870

SEQ ID NO: 121532 - RNA, 1410 nt, Artificial Sequence; identical to SEQ ID NO: 118182
  derived and/or modified CDS sequence (opt2) from neuraminidase__InfluenzaA__AHZ42882

SEQ ID NO: 121533 - RNA, 1410 nt, Artificial Sequence
  derived and/or modified CDS sequence (opt2) from neuraminidase__InfluenzaA__AHZ42894
augaaccccaaccagaagaucaucaccaucggcuccgucucccucaccaucuccaccaucugcuucuucaugcagaucgccauccucaucaccaccgucacccuccacuucaagcaguacgaguucaacuccccccccaacaaccaggucaugcucugcgagcccaccaucaucgagcgcaacaucaccgagaucgucuaccucaccaacaccaccaucgagaaggagaucugccccaagcccgccgaguaccgcaacugguccaagccccagugcggcaucaccggcuucgcccccuucuccaaggacaacuccauccgccucuccgccggcggcgacaucugggucacccgcgagcccuacgucuccugcgaccccgacaagugcuaccaguucgcccucggccagggcaccacccucaacaacguccacuccaacaacaccguccgcgaccgcacccccuaccgcacccuccucaugaacgagcucggcguccccuuccaccucggcaccaagcaggucugcaucgccugguccuccuccuccugccacgacggcaaggccuggcuccacgucugcaucaccggcgacgacaagaacgccaccgccuccuucaucuacaacggccgccucgucgacuccgucgucuccugguccaaggagauccuccgcacccaggaguccgagugcgucugcaucaacggcaccugcaccgucgucaugaccgacggcuccgccuccggcaaggccgacaccaagauccucuucaucgaggagggcaagaucguccacaccuccacccucuccggcuccgcccagcacgucgaggagugcuccugcuacccccgcuaccccggcguccgcugcgucugccgcgacaacuggaagggcuccaaccgccccaucgucgacaucaacaucaaggaccacuccaucgucuccuccuacgucugcuccggccucgucggcgacaccccccgcaagaacgacuccuccuccuccucccacugccucgaccccaacaacgaggagggcggccacggcgucaagggcugggccuucgacgacggcaacgacgucuggaugggccgcaccaucaacgagaccucccgccucggcuacgagaccuucaaggucaucgagggcugguccaaccccaaguccaagcuccagaucaaccgccaggucaucgucgacaagggcgaccgcuccggcuacuccggcaucuucuccgucgagggcaaguccugcaucaaccgcugcuucuacgucgagcucauccgcggccgcaaggaggagaccgagguccucuggaccuccaacuccaucgucgucuucugcggcaccuccggcaccuacggcaccggcuccuggcccgacggcgccgaccucaaccucaugcccaucuga

SEQ ID NO: 121534 - RNA, 1410 nt, Artificial Sequence; identical to SEQ ID NO: 118182
  derived and/or modified CDS sequence (opt2) from neuraminidase__InfluenzaA__AHZ42906

SEQ ID NO: 121535 - RNA, 1410 nt, Artificial Sequence; identical to SEQ ID NO: 119411
  derived and/or modified CDS sequence (opt2) from neuraminidase__InfluenzaA__AHZ42918

SEQ ID NO: 121536 - RNA, 1398 nt, Artificial Sequence; identical to SEQ ID NO: 119490
  derived and/or modified CDS sequence (opt2) from neuraminidase__InfluenzaA__AHZ59750

SEQ ID NO: 121537 - RNA, 1398 nt, Artificial Sequence; identical to SEQ ID NO: 119490
  derived and/or modified CDS sequence (opt2) from neuraminidase__InfluenzaA__AHZ59762

SEQ ID NO: 121538 - RNA, 1398 nt, Artificial Sequence; identical to SEQ ID NO: 119490
  derived and/or modified CDS sequence (opt2) from neuraminidase__InfluenzaA__AHZ59774

SEQ ID NO: 121539 - RNA, 1398 nt, Artificial Sequence; identical to SEQ ID NO: 119490
  derived and/or modified CDS sequence (opt2) from neuraminidase__InfluenzaA__AHZ59786

SEQ ID NO: 121540 - RNA, 1398 nt, Artificial Sequence; identical to SEQ ID NO: 119490
  derived and/or modified CDS sequence (opt2) from neuraminidase__InfluenzaA__AHZ59798

SEQ ID NO: 121541 - RNA, 1398 nt, Artificial Sequence; identical to SEQ ID NO: 119490
  derived and/or modified CDS sequence (opt2) from neuraminidase__InfluenzaA__AHZ59810

SEQ ID NO: 121542 - RNA, 1398 nt, Artificial Sequence; identical to SEQ ID NO: 119490
  derived and/or modified CDS sequence (opt2) from neuraminidase__InfluenzaA__AHZ59822

SEQ ID NO: 121543 - RNA, 1398 nt, Artificial Sequence; identical to SEQ ID NO: 119490
  derived and/or modified CDS sequence (opt2) from neuraminidase__InfluenzaA__AHZ59834

SEQ ID NO: 121544 - RNA, 1398 nt, Artificial Sequence; identical to SEQ ID NO: 119490
  derived and/or modified CDS sequence (opt2) from neuraminidase__InfluenzaA__AHZ59846

SEQ ID NO: 121545 - RNA, 1398 nt, Artificial Sequence; identical to SEQ ID NO: 119490
  derived and/or modified CDS sequence (opt2) from neuraminidase__InfluenzaA__AHZ59858

SEQ ID NO: 121546 - RNA, 1398 nt, Artificial Sequence; identical to SEQ ID NO: 119490
  derived and/or modified CDS sequence (opt2) from neuraminidase__InfluenzaA__AHZ59870

SEQ ID NO: 121547 - RNA, 1398 nt, Artificial Sequence; identical to SEQ ID NO: 119490
  derived and/or modified CDS sequence (opt2) from neuraminidase__InfluenzaA__AHZ59882

SEQ ID NO: 121548 - RNA, 1398 nt, Artificial Sequence; identical to SEQ ID NO: 119490
  derived and/or modified CDS sequence (opt2) from neuraminidase__InfluenzaA__AHZ59918

SEQ ID NO: 121549 - RNA, 1398 nt, Artificial Sequence; identical to SEQ ID NO: 119490
  derived and/or modified CDS sequence (opt2) from neuraminidase__InfluenzaA__AHZ59930

SEQ ID NO: 121550 - RNA, 1398 nt, Artificial Sequence; identical to SEQ ID NO: 119490
  derived and/or modified CDS sequence (opt2) from neuraminidase__InfluenzaA__AHZ59942

SEQ ID NO: 121551 - RNA, 1398 nt, Artificial Sequence; identical to SEQ ID NO: 119490
  derived and/or modified CDS sequence (opt2) from neuraminidase__InfluenzaA__AHZ59954

SEQ ID NO: 121552 - RNA, 1398 nt, Artificial Sequence; identical to SEQ ID NO: 119490
  derived and/or modified CDS sequence (opt2) from neuraminidase__InfluenzaA__AHZ59966

SEQ ID NO: 121553 - RNA, 1398 nt, Artificial Sequence; identical to SEQ ID NO: 119490
  derived and/or modified CDS sequence (opt2) from neuraminidase__InfluenzaA__AHZ59991

SEQ ID NO: 121554 - RNA, 1398 nt, Artificial Sequence; identical to SEQ ID NO: 119490
  derived and/or modified CDS sequence (opt2) from neuraminidase__InfluenzaA__AHZ60003

SEQ ID NO: 121555 - RNA, 1398 nt, Artificial Sequence; identical to SEQ ID NO: 119490
  derived and/or modified CDS sequence (opt2) from neuraminidase__InfluenzaA__AHZ60015

SEQ ID NO: 121556 - RNA, 1398 nt, Artificial Sequence; identical to SEQ ID NO: 119490
  derived and/or modified CDS sequence (opt2) from neuraminidase__InfluenzaA__AHZ60027

SEQ ID NO: 121557 - RNA, 1398 nt, Artificial Sequence; identical to SEQ ID NO: 119490
  derived and/or modified CDS sequence (opt2) from neuraminidase__InfluenzaA__AHZ60039

SEQ ID NO: 121558 - RNA, 1398 nt, Artificial Sequence; identical to SEQ ID NO: 119490
  derived and/or modified CDS sequence (opt2) from neuraminidase__InfluenzaA__AHZ60051

SEQ ID NO: 121559 - RNA, 1398 nt, Artificial Sequence; identical to SEQ ID NO: 119490
  derived and/or modified CDS sequence (opt2) from neuraminidase__InfluenzaA__AHZ60063

SEQ ID NO: 121560 - RNA, 1398 nt, Artificial Sequence; identical to SEQ ID NO: 119490
  derived and/or modified CDS sequence (opt2) from neuraminidase__InfluenzaA__AHZ60075

SEQ ID NO: 121561 - RNA, 1398 nt, Artificial Sequence; identical to SEQ ID NO: 119490
  derived and/or modified CDS sequence (opt2) from neuraminidase__InfluenzaA__AHZ60087

SEQ ID NO: 121562 - RNA, 1398 nt, Artificial Sequence; identical to SEQ ID NO: 119490
  derived and/or modified CDS sequence (opt2) from neuraminidase__InfluenzaA__AHZ60099

SEQ ID NO: 121563 - RNA, 1410 nt, Artificial Sequence; identical to SEQ ID NO: 118182
  derived and/or modified CDS sequence (opt2) from neuraminidase__InfluenzaA__AHZ60111

SEQ ID NO: 121564 - RNA, 1410 nt, Artificial Sequence; identical to SEQ ID NO: 112438
  derived and/or modified CDS sequence (opt2) from neuraminidase__InfluenzaA__AIA26299

SEQ ID NO: 121565 - RNA, 1374 nt, Artificial Sequence
  derived and/or modified CDS sequence (opt2) from neuraminidase__InfluenzaA__AIC64891
augaaccccaaccagaagaucaucaccaucggcuccgucugcaugaccaucggcauggccaaccucauccuccagaucggcaacaucaucuccaucuggaucucccacuccauccagcucggcaaccagaaccagaucgagaccugcaaccaguccgucaucaccuacgagaacaacaccaacuucgccgccggccaguccgucgucuccgucaagcucgccggcaacuccucccucugccccgucuccggcugggccaucuacuccaaggacaacuccguccgcaucggcuccaagggcgacgucuucgucauccgcgagcccuucaucuccugcuccccccucgagugccgcaccuucuuccucacccagggcgcccuccucaacgacaagcacuccaacggcaccaucaaggaccgcucccccuaccgcacccucauguccugccccaucggcgagguccccucccccuacaacucccgcuucgaguccgucgccugguccgccuccgccugccacgacggcaucaacuggcucaccaucggcaucuccggccccgacaacggcgccgucgccguccucaaguacaacggcaucaucaccgacaccaucaaguccuggcgcaacaacauccuccgcacccaggaguccgagugcgccugcgucaacggcuccugcuucaccgucaugaccgacggccccuccaacggccaggccuccuacaagaucuuccgcaucgagaagggcaagaucgucaaguccgucgagaugaacgcccccaacuaccacuacgaggagugcuccugcuaccccgacuccuccgagaucaccugcgucugccgcgacaacuggcacggcuccaaccgccccugggucuccuucaaccagaaccucgaguaccagaucggcuacaucugcuccggcaucuucggcgacaacccccgccccaacgacaagaccggcuccugcggccccgucuccuccaacggcgccaacggcgucaagggcuucuccuucaaguacggcaacggcgucuggaucggccgcaccaaguccaucuccucccgcaacggcuucgagaugaucugggaccccaacggcuggaccggcaccgacaacaacuucuccaucaagcaggacaucgucggcaucaacgagugguccggcuacuccggcuccuucguccagcaccccgagcucaccggccucgacugcauccgccccugcuucugggucgagcucauccgcggccgccccaaggagaacaccaucuggaccuccggcuccuccaucuccuucugcggcgucaacuccgacaccgucggcugguccuggcccgacggcgccgagcuccccuucaccaucgacaaguga

SEQ ID NO: 121566 - RNA, 1350 nt, Artificial Sequence
  derived and/or modified CDS sequence (opt2) from neuraminidase__InfluenzaA__AID48084
augaaccccaacaagaagaucaucaccaucggcuccaucugcauggucaccggcauggucucccucaugcuccagaucggcaaccucaucuccaucugggucucccacuccauccacaccggcaaccagcacaaggccgagcccaucuccaacaccaaccuccucaccgagaagaccgucgccuccgucaagcucgccggcaacuccucccucugccccaucaacggcugggccgucuacuccaaggacaacuccauccgcaucggcuccaagggcgacgucuucgucauccgcgagcccuucaucuccugcucccaccucgagugccgcaccuucuuccucacccagggcgcccuccucaacgacaagcacuccaacggcaccgucaaggaccgcuccccccaccgcacccucauguccugccccgucggcgaggcccccucccccuacaacucccgcuucgaguccgucgccugguccgccuccgccugccacgacggcaccuccuggcucaccaucggcaucuccggccccgacaacggcgccgucgccguccucaaguacaacggcaucaucaccgacaccaucaaguccuggcgcaacaacauccuccgcacccaggaguccgagugcgccugcgucaacggcuccugcuucaccgucaugaccgacggccccuccaacggccaggccucccacaagaucuucaagauggagaagggcaaggucgucaaguccgucgagcucgacgcccccaacuaccacuacgaggagugcuccugcuaccccgacgccggcgagaucaccugcgucugccgcgacaacuggcacggcuccaaccgccccugggucuccuucaaccagaaccucgaguaccagaucggcuacaucugcuccggcgucuucggcgacaacccccgccccaacgacggcgccggcuccugcggccccgucuccuccaacggcgccuacggcgucaagggcuucuccuucaaguacggcaacggcgucuggaucggccgcaccaaguccaccaacucccgcuccggcuucgagaugaucugggaccccaacggcuggaccgagaccgacuccuccuucuccgucaagcaggacaucgucgccaucaccgacugguccggcuacuccggcuccuucguccagcaccccgagcucaccggccucgacugcauccgccccugcuucugggucgagcucauccgcggccgccccaaggaguccaccaucuggaccuccggcuccuccaucuccuucugcggcgucaacuccgacaccgucggcugguccuggcccgacggcgccgagcuccccuucaccaucgacaaguga

SEQ ID NO: 121567 - RNA, 1410 nt, Artificial Sequence
  derived and/or modified CDS sequence (opt2) from neuraminidase__InfluenzaA__AID70507
augaaccccaaccagaagaucaucaccaucggcuccgucugcaccaccaucggcauggccaaccucauccuccagaucggcaacaucaucuccaucuggaucucccacuccauccagcucggcaaccagaaccagaucgagaccugcaaccaguccgucaucaccuacgagaacaagaccugggucaaccagaccuacgucaacaucuccaacaccaacuucgccgccggccaguccgucgucuccgucaagcucgccggcaacuccucccucugccccgucuccggcugggccaucuacuccaaggacaacuccauccgcaucggcuccaagggcgacgucuucgucauccgcgagcccuucaucuccugcuccccccucgagugccgcaccuucuuccucacccagggcgcccuccucaacgacaagcacuccaacggcaccaucaaggaccgcucccccuaccgcacccucauguccugccccaucggcgagguccccucccccuacaacucccgcuucgaguccgucgccugguccgccuccgccugccacgacggcaucaacuggcucaccaucggcaucuccggccccgacaacggcgccgucgccguccucaaguacaacggcaucaucaccgacaccaucaaguccuggcgcaacaacauccuccgcacccaggaguccgagugcgccugcgucaacggcuccugcuucaccgucaugaccgacggccccuccgacggccaggccuccuacaagaucuuccgcaucgagaagggcaagaucgucaaguccgucgagaugaacgcccccaacuaccacuacgaggagugcuccugcuaccccgacuccuccgagaucaccugcgucugccgcgacaacuggcacggcuccaaccgccccugggucuccuucaaccagaaccucgaguaccagaucggcuacaucugcuccggcaucuucggcgacaacccccgccccaacgacaagaccggcuccugcgaccccgucuccuucaacggcgccaacggcgucaagggcuucuccuucaaguacggcaacggcgucuggaucggccgcaccaaguccaucuccucccgcaacggcuucgagaugaucugggaccccaacggcuggaccggcaccgacaacaaguucuccaucaagcaggacaucgucggcaucaacgagugguccggcuacuccggcuccuucguccagcaccccgagcucaccggccucgacugcauccgccccugcuucugggucgagcucauccgcggccgccccaaggagaacaccaucuggaccuccggcuccuccaucuccuucugcggcgucaacuccgacaccgucggcugguucuggcccgacggcgccgagcuccccuucaccaucgacaaguga

SEQ ID NO: 121568 - RNA, 1410 nt, Artificial Sequence
  derived and/or modified CDS sequence (opt2) from neuraminidase__InfluenzaA__AID70508
augaaccccaaccagaagaucaucaccaucggcuccgucugcaugaccaucggcauggccaaccucauccuccagaucggcaacaucaucuccaucuggaucucccacuccauccagcucggcaaccagucccagaucgagaccugcaaccaguccgucaucaccuacgagaacaacaccugggucaaccagaccuacgucaacaucuccaacaccaacuucgccgccggccaguccgucgucuccgucaagcucgccggcaacuccucccucugccccgucuccggcugggccaucuacuccaaggacaacuccauccgcaucggcuccaagggcgacgucuucgucauccgcgagcccuucaucuccugcuccccccucgagugccgcaccuucuuccucacccagggcgcccuccucaacgacaagcacuccaacggcaccaucaaggaccgcucccccuaccgcacccucauguccugccccaucggcgagguccccucccccuacaacucccgcuucgaguccgucgccugguccgccuccgccugccacgacggcaucaacuggcucaccaucggcaucuccggccccaacaacggcgccgucgccguccucaaguacaacggcaucaucaccgacaccaucaaguccuggcgcaacaacauccuccgcacccaggaguccgagugcgccugcgucaacggcuccugcuucaccaucaugaccgacggccccuccgacggccaggccuccuacaagaucuuccgcaucgagaagggcaagaucgucaaguccgucgagaugaacgcccccaacuaccacuacgaggagugcuccugcuaccccgacuccuccgagaucaccugcgucugccgcgacaacuggcacggcuccaaccgccccugggucuccuucaaccagaaccucgaguaccagaucggcuacaucugcuccggcaucuucggcgacaacccccgccccaacgacaagaccggcuccugcggccccgucuccuccaacggcgccaacggcgucaagggcuucuccuucaaguacggcaacggcgucuggaucggccgcaccaaguccaucuccucccgcaagggcuucgagaugaucugggaccccaacggcuggaccggcaccgacaacaacuucuccaucaagcaggacaucgucggcaucaacgagugguccggcuacuccggcuccuucguccagcaccccgagcucaccggccucgacugcauccgccccugcuucugggucgagcucauccgcggccgccccaaggagaacaccaucuggaccuccggcuccuccaucuccuucugcggcgucaacuccgacaccgucggcugguccuggcccgacggcgccgagcuccccuucaccaucgacaaguga

SEQ ID NO: 121569 - RNA, 1410 nt, Artificial Sequence
  derived and/or modified CDS sequence (opt2) from neuraminidase__InfluenzaA__AID70509
augaaccccaaccagaagaucaucaccaucggcuccgucugcaugaccaucggcauggccaaccucauccuccagaucggcaacaucaucuccaucuggaucucccacuccauccagcucggcaaccagucccagaucgagaccugcaaccaguccgucaucaccuacgagaacaacaccugggucaaccagaccuacgucaacaucuccaacaccaacuucgccgccggccaguccgucgucuccgucaagcucgccggcaacuccucccucugccccgucuccggcugggccaucuacuccaaggacaacuccauccgcaucggcuccaagggcgacgucuucgucauccgcgagcccuucaucuccugcuccccccucgagugccgcaccuucuuccucacccagggcgcccuccucaacgacaagcacuccaacggcaccaucaaggaccgcucccccuaccgcacccucauguccugccccaucggcgagguccccucccccuacaacucccgcuucgaguccgucgccugguccgccuccgccugccacgacggcaucaacuggcucaccaucggcaucuccggccccgacaacggcgccgucgccguccucaaguacaacggcaucaucaccgacaccaucaaguccuggcgcaacaacauccuccgcacccaggaguccgagugcgccugcgucaacggcuccugcuucaccaucaugaccgacggccccuccgacggccaggccuccuacaagaucuuccgcaucgagaagggcaagaucgucaaguccgucgagaugaacgcccccaacuaccacuacgaggagugcuccugcuaccccgacuccuccgagaucaccugcgucugccgcgacaacuggcacggcuccaaccgccccugggucuccuucaaccagaaccucgaguaccagaucggcuacaucugcuccggcaucuucggcgacaacccccgccccaacgacaagaccggcuccugcggccccgucuccuccaacggcgccaacggcgucaagggcuucuccuucaaguacggcaacggcgucuggaucggccgcaccaaguccaucaacucccgcaagggcuucgagaugaucugggaccccaacggcuggaccggcaccgacaacaacuucuccaucaagcaggacaucgucggcaucaacgagugguccggcuacuccggcuccuucguccagcaccccgagcucaccggccucgacugcauccgccccugcuucugggucgagcucauccgcggccgccccaaggagaacaccaucuggaccuccggcuccuccaucuccuucugcggcgucaacuccgacaccgucggcugguccuggcccgacggcgccgagcuccccuucaccaucgacaaguga

SEQ ID NO: 121570 - RNA, 1410 nt, Artificial Sequence
  derived and/or modified CDS sequence (opt2) from neuraminidase__InfluenzaA__AID70510
augaaccccaaccagaagaucaucaccaucggcuccgucugcaucaccaucggcauggccaaccucauccuccagaucggcaacaucaucuccaucuggaucucccacuccauccagcucggcaaccagucccagaucgagaccugcaaccaguccgucaucaccuacgagaacaacaccugggucaaccagaccuacgucaacaucuccaacaccaacuucgccgccggccaguccgucgucuccgucaagcucgccggcaacuccucccucugccccgucuccggcugggccaucuacuccaaggacaacuccauccgcaucggcuccaagggcgacgucuucgucauccgcgagcccuucaucuccugcuccccccucgagugccgcaccuucuuccucacccagggcgcccuccucaacgacaagcacuccaacggcaccaucaaggaccgcucccccuaccgcacccucauguccugccccaucggcgagguccccucccccuacaacucccgcuucgaguccgucgccugguccgccuccgccugccacgacggcaucaacuggcucaccaucggcaucuccggccccgacaacggcgccgucgccguccucaaguacaacggcaucaucaccgacaccaucaaguccuggcgcaacaacauccuccgcacccaggaguccgagugcgccugcgucaacggcuccugcuucaccaucaugaccgacggccccuccgacggccaggccuccuacaagaucuuccgcaucgagaagggcaagaucgucaaguccgucgagaugaacgcccccaacuaccacuacgaggagugcuccugcuaccccgacuccuccgagaucaccugcgucugccgcgacaacuggcacggcuccaaccgccccugggucuccuucaaccagaaccucgaguaccagaucggcuacaucugcuccggcaucuucggcgacaacccccgccccaacgacaagaccggcuccugcggccccgucuccuccaacggcgccaacggcgucaagggcuucuccuucaaguacggcaacggcgucuggaucggccgcaccaaguccaucuccucccgcaagggcuucgagaugaucugggaccccaacggcuggaccggcaccgacaacaacuucuccaucaagcaggacaucgucggcaucaacgagugguccggcuacuccggcuccuucguccagcaccccgagcucaccggccucgacugcauccgccccugcuucugggucgagcucauccgcggccgccccaaggagaacaccaucuggaccuccggcuccuccaucuccuucugcggcgucaacuccgacaccgucggcugguccuggcccgacggcgccgagcuccccuucaccaucgacaaguga

SEQ ID NO: 121571 - RNA, 1410 nt, Artificial Sequence
  derived and/or modified CDS sequence (opt2) from neuraminidase__InfluenzaA__AID70511
augaaccccaaccagaagaucaucaccaugggcuccgucuggaugaccaucggcauggccaaccucauccuccaguccggcaacaucaucuccaucuggaucucccacuccauccagcuccgcaaccagucccagaucgagaccugcaaccaguccgucaucaccuacgagaacaacaccugggucaaccagaccuacgucaacaucuccaacaccaacuucgccgccggccaguccgucgucuccgucaagcucgccggcaacuccucccucugccccgucuccggcugggccaucuacuccaaggacaacuccauccgcaucggcuccaagggcgacgucuucgucauccgcgagcccuucaucuccugcuccccccucgagugccgcaccuucuuccucacccagggcgcccuccucaacgacaagcacuccaacggcaccaucaaggaccgcucccccuaccgcacccucauguccugccccaucggcgagguccccucccccuacaacucccgcuucgaguccgucgccugguccgccuccgccugccacgacggcaucaacuggcucaccaucggcaucuccggccccgacaacggcgccgucgccguccucaaguacaacggcaucaucaccgacaccaucaaguccuggcgcaacaacauccuccgcacccaggaguccgagugcgccugcgucaacggcuccugcuucaccaucaugaccgacggccccuccgacggccaggccuccuacaagaucuuccgcaucgagaagggcaagaucgucaaguccgucgagaugaacgcccccaacuaccacuacgaggagugcuccugcuaccccgacuccuccgagaucaccugcgucugccgcgacaacuggcacggcuccaaccgccccugggucuccuucaaccagaaccucgaguaccagaucggcuacaucugcuccggcaucuucggcgacaacccccgccccaacgacaagaccggcuccugcggccccgucuccuccaacggcgccaacggcgucaagggcuucuccuucaaguacggcaacggcgucuggaucggccgcaccaaguccaucuccucccgcaagggcuucgagaugaucugggaccccaacggcuggaccggcaccgacaacaacuucuccaucaagcaggacaucgucggcaucaacgagugguccggcuacuccggcuccuucguccagcaccccgagcucaccggccucgacugcauccgccccugcuucugggucgagcucauccgcggccgccccaaggagaacaccaucuggaccuccggcuccuccaucuccuucugcggcgucaacuccgacaccgucggcugguccuggcccgacggcgccgagcuccccuucaccaucgacaaguga

SEQ ID NO: 121572 - RNA, 1410 nt, Artificial Sequence
  derived and/or modified CDS sequence (opt2) from neuraminidase__InfluenzaA__AID70512
augaaccccaaccagaagaucaucaccaucggcuccgucuggaugaccaucggcauggccaaccucauccuccagaucggcaacaucaucuccaucuggaucucccacuccauccagcucggcaaccagucccagaucgagaccugcaaccaguccgucaucaccuacgagaacaacaccugggucaaccagaccuacgucaacaucuccaacaccaacuucgccgccggccaguccgucgucuccgucaagcucgccggcaacuccucccucugccccgucuccggcugggccaucuacuccaaggacaacuccauccgcaucggcuccaagggcgacgucuucgucauccgcgagcccuucaucuccugcuccccccucgagugccgcaccuucuuccucacccagggcgcccuccucaacgacaagcacuccaacggcaccaucaaggaccgcucccccuaccgcacccucauguccugccccaucggcgagguccccucccccuacaacucccgcuucgaguccgucgccugguccgccuccgccugccacgacggcaucaacuggcucaccaucggcaucuccggccccgacaacggcgccgucgccguccucaaguacaacggcaucaucaccgacaccaucaaguccuggcgcaacaacauccuccgcacccaggaguccgagugcgccugcgucaacggcuccugcuucaccaucaugaccgacggccccuccgacggccaggccuccuacaagaucuuccgcaucgagaagggcaagaucgucaaguccgucgagaugaaggcccccaacuaccacuacgaggagugcuccugcuaccccgacuccuccgagaucaccugcgucugccgcgacaacuggcacggcuccaaccgccccugggucuccuucaaccagaaccucgaguaccagaucggcuacaucugcuccggcaucuucggcgacaacccccgccccaacgacaagaccggcuccugcggccccgucuccuccaacggcgccaacggcgucaagggcuucuccuucaaguacggcaacggcgucuggaucggccgcaccaaguccaucuccucccgcaagggcuucgagaugaucugggaccccaacggcuggaccggcaccgacaacaacuucuccaucaagcaggacaucaucggcaucaacgagugguccggcuacuccggcuccuucguccagcaccccgagcucaccggccucgacugcauccgccccugcuucugggucgagcucauccgcggccgccccaaggagaacaccaucuggaccuccggcuccuccaucuccuucugcggcgucaacuccgacaccgucggcugguccuggcccgacggcgccgagcuccccuucaccaucgacaaguga

SEQ ID NO: 121573 - RNA, 1410 nt, Artificial Sequence; identical to SEQ ID NO: 116293
  derived and/or modified CDS sequence (opt2) from neuraminidase__InfluenzaA__AID70514

SEQ ID NO: 121574 - RNA, 1410 nt, Artificial Sequence
  derived and/or modified CDS sequence (opt2) from neuraminidase__InfluenzaA__AID70515
augaaccccaaccagaagaucaucaccaucggcuccgucugcaugaccaucggcauggccaaccucauccuccagaucggcaacaucaucuccaucuggaucucccacuccauccagcuccgcaaccagucccagaucgagaccugcaaccaguccgucaucaccuacgagaacaacaccugggucaaccagaccuacgucaacaucuccaacaccaacuucgccgccggccaguccgucgucuccgucaagcucgccggcaacuccucccucugccccgucuccggcugggccaucuacuccaaggacaacuccauccgcaucggcuccaagggcgacgucuucgucauccgcgagcccuucaucuccugcuccccccucgagugccgcaccuucuuccucacccagggcgcccuccucaacgacaagcacuccaacggcaccaucaaggaccgcucccccuaccgcacccucauguccugccccaucggcgagguccccucccccuacaacucccgcuucgaguccgucgccugguccgccuccgccugccacgacggcaucaacuggcucaccaucggcaucuccggccccgacaacggcgccgucgccguccucaaguacaacggcaucaucaccgacaccaucaaguccuggcgcaacaacauccuccgcacccaggaguccgagugcgccugcgucaacggcuccugcuucaccaucaugaccgacggccccuccgacggccaggccuccuacaagaucuuccgcaucgagaagggcaagaucgucaaguccgucgagaugaacgcccccaacuaccacuacgaggagugcuccugcuaccccgacuccuccgagaucaccugcgucugccgcgacaacuggcacggcuccaaccgccccugggucuccuucaaccagaaccucgaguaccagaucggcuacaucugcuccggcaucuucggcgacaacccccgccccaacgacaagaccggcuccugcggccccgucuccuccaacggcgccaacggcgucaagggcuucuccuucaaguacuccaacggcgucuggaucggccgcaccaaguccaucuccucccgcaagggcuucgagaugaucugggaccccaacggcuggaccggcaccgacaacaacuucuccaucaagcaggacaucgucggcaucaacgagugguccggcuacuccggcuccuucguccagcaccccgagcucaccggccucgacugcauccgccccugcuucugggucgagcucauccgcggccgccccaaggagaacaccaucuggaccuccggcuccuccaucuccuucugcggcgucaacuccgacaccgucggcugguccuggcccgacggcgccgagcuccccuucaccaucgacaaguga

SEQ ID NO: 121575 - RNA, 1410 nt, Artificial Sequence; identical to SEQ ID NO: 119194
  derived and/or modified CDS sequence (opt2) from neuraminidase__InfluenzaA__AID70516

SEQ ID NO: 121576 - RNA, 1410 nt, Artificial Sequence
  derived and/or modified CDS sequence (opt2) from neuraminidase__InfluenzaA__AID70517
augaaccccaaccagaagaucaucaccaucggcuccgucugcaugaccaucggcauggccaaccucacccuccagaucggcaacaucaucuccaucuggaucucccacuccauccagcucggcaaccagaaccagaucgagaccugcaaccaguccgucaucaccuacgagaacaacaccugggucaaccagaccuacgucaacaucuccaacaccaacuucgccgccggccaguccgucgucuccgucaagcucgccggcaacuccucccucugccccgucuccggcugggccaucuacuccaaggacaacuccauccgcaucggcuccaagggcgacgucuucgucauccgcgagcccuucaucuccugcuccccccucgagugccgcaccuucuuccucacccagggcgcccuccucaacgacaagcacuccaacggcaccaucaaggaccgcucccccuaccgcacccucauguccugccccaucggcgagguccccucccccuacaacucccgcuucgaguccgucgccugguccgccuccgccugccacgacggcaucaacuggcucaccaucggcaucuccggccccgacaacggcgccgucgccguccucaaguacaacggcaucaucaccgacaccaucaaguccuggcgcaacaacauccuccgcacccaggaguccgagugcgccugcgucaacggcuccugcuucaccaucaugaccgacggccccaacgacggccaggccuccuacaagaucuuccgcaucgagaagggcaagaucgucaaguccgucgagaugaacgcccccaacuaccacuacgaggagugcuccugcuaccccgacuccuccgagaucaccugcgucugccgcgacaacuggcacggcuccaaccgccccugggucuccuucaaccagaaccucgaguaccagaucggcuacaucugcuccggcaucuucggcgacaacccccgccccaacgacaagaccggcuccugcggccccgucuccuccaacggcgccaacggcgucaagggcuucuccuucaaguacggcaacggcgucuggaucggccgcaccaaguccaucuccucccgcaagggcuucgagaugaucugggaccccaacggcuggaccggcaccgacaacaacuucuccaucaagcaggacaucgucggcaucaacgagugguccggcuacuccggcuccuucguccagcaccccgagcucaccggccucgacugcauccgccccugcuucugggucgagcucauccgcggccgccccaaggagaacaccaucuggaccuccggcuccuccaucuccuucugcggcgucaacuccgacaccgucggcugguccuggcccgacggcgccgagcuccccuucaccaucgacaaguga

SEQ ID NO: 121577 - RNA, 1410 nt, Artificial Sequence
  derived and/or modified CDS sequence (opt2) from neuraminidase__InfluenzaA__AID70518
augaaccccaaccagaagaucaucaccaucggcuccgucugcaugaccaucggcauggccaaccucauccuccagaucggcaacaucaucuccaucuggaucucccacuccauccagcuccgcaaccagucccagaucgagaccugcaaccaguccgucaucaccuacgagaacaacaccugggucaaccagaccuacgucaacaucuccaacaccaacuucgccgccggccaguccgucgucuccgucaagcucgccggcaacuccucccucugccccgucuccggcugggccaucuacuccaaggacaacuccauccgcaucggcuccaagggcgacgucuucgucauccgcgagcccuucaucuccugcuccccccucgagugccgcaccuucuuccucacccagggcgcccuccucaacgacaagcacuccaacggcaccaucaaggaccgcucccccuaccgcacccucauguccugccccaucggcgagauccccucccccuacaacucccgcuucgaguccgucgccugguccgccuccgccugccacgacggcaucaacuggcucaccaucggcaucuccggccccgacaacggcgccgucgccguccucaaguacaacggcaucaucaccgacaccaucaaguccuggcgcaacaacauccuccgcacccaggaguccgagugcgccugcgucaacggcuccugcuucaccaucaugaccgacggccccuccgacggccaggccuccuacaagaucuuccgcaucgagaagggcaagaucgucaaguccgucgagaugaacgcccccaacuaccacuacgaggagugcuccugcuaccccgacuccuccgagaucaccugcgucugccgcgacaacuggcacggcuccaaccgccccugggucuccuucaaccagaaccucgaguaccagaucggcuacaucugcuccggcaucuucggcgacaacccccgccccaacgacaagaccggcuccugcggccccgucuccuccaacggcgccaacggcgucaagggcuucuccuucaaguacggcaacggcgucuggaucggccgcaccaaguccaucuccucccgcaagggcuucgagaugaucugggaccccaacggcuggaccggcaccgacaacaacuucuccaucaagcaggacaucgucggcaucaacgagugguccggcuacuccggcuccuucguccagcaccccgagcucaccggccucgacugcauccgccccugcuucugggucgagcucauccgcggccgccccaaggagaacaccaucuggaccuccggcuccuccaucuccuucugcggcgucaacuccgacaccgucggcugguccuggcccgacggcgccgagcuccccuucaccaucgacaaguga

SEQ ID NO: 121578 - RNA, 1410 nt, Artificial Sequence
  derived and/or modified CDS sequence (opt2) from neuraminidase__InfluenzaA__AID70519
augaaccccaaccagaagaucaucaccaucggcuccgucugcaugaccaucggcauggccaaccucauccuccagaucggcaacaucaucuccaucuggaucucccacuccauccagcucggcaaccagucccagaucgagaccugcaaccaguccgucaucaccuacgagaacaacaccugggucaaccagaccuacgucaacaucuccaacaccaacuucgccgccggccaguccgucgucuccgucaagcucgccggcaacuccucccucugccccgucuccggcugggccaucuacuccaaggacaacuccauccgcaucggcuccaagggcgacgucuucgucauccgcgagcccuucaucuccugcuccccccucgagugccgcaccuucuuccucacccagggcgcccuccucaacgacaagcacuccaacggcaccaucaaggaccgcucccccuaccgcacccucauguccugccccaucggcgagguccccucccccuacaacucccgcuucgaguccgucgccugguccgccuccgccugccacgacggcaucaacuggcucaccaucggcaucuccggccccgacaacggcgccgucgccguccucaaguacaacggcaucaucaccgacaccaucaaguccuggcgcaacaacauccuccgcacccaggaguccgagugcgccugcgucaacggcuccugcuucaccaucaugaccgacggccccuccgacggccaggccuccuacaagaucuuccgcaucgagaagggcaagaucgucaaguccgucgagaugaaggcccccaacuaccacuacgaggagugcuccugcuaccccgacuccuccgagaucaccugcgucugccgcgacaacuggcacggcuccaaccgccccugggucuccuucaaccagaaccucgaguaccagaucggcuacaucugcuccggcaucuucggcgacaacccccgccccaacgacaagaccggcuccugcggccccgucuccuccaacggcgccaacggcgucaagggcuucuccuucaaguacggcaacggcgucuggaucggccgcaccaaguccaucuccucccgcaagggcuucgagaugaucugggaccccaacggcuggaccggcaccgacaacaacuucuccaucaagcaggacaucgucggcaucaacgagugguccggcuacuccggcuccuucguccagcaccccgagcucaccggccucgacugcauccgccccugcuucugggucgagcucauccgcggccgccccaaggagaacaccaucuggaccuccggcuccuccaucuccuucugcggcgucaacuccgacaccgucggcugguccuggcccgacggcgccgagcuccccuucaccaucgacaaguga

SEQ ID NO: 121579 - RNA, 1410 nt, Artificial Sequence
  derived and/or modified CDS sequence (opt2) from neuraminidase__InfluenzaA__AID70520
augaaccccaaccagaagaucaucaccaucggcuccgucugcaugaccaucggcauggccaaccucauccuccagaucggcaacaucaucuccaucuggaucucccacuccauccagcuccgcaaccagucccagaucgagaccugcaaccaguccgucaucaccuacgagaacaacaccugggucaaccagaccuacgucaacaucuccaacaccaacuucgccgccggccaguccgucgucuccgucaagcucgccggcaacuccucccucugccccgucuccggcugggccaucuacuccaaggacaacuccauccgcaucggcuccaagggcgacgucuucgucauccgcgagcccuucaucuccugcuccccccucgagugccgcaccuucuuccucacccagggcgcccuccucaacgacaagcacuccaacggcaccaucaaggaccgcucccccuaccgcacccucauguccugccccaucggcgagguccccucccccuacaacucccgcuucgaguccgucgccugguccgccuccgccugccacgacggcaucaacuggcucaccaucggcaucuccggccccgacaacggcgccgucgccguccucaaguacaacggcaucaucaccgacaccaucaaguccuggcgcaacaacauccuccgcacccaggaguccgagugcgccugcgucaacggcuccugcuucaccaucaugaccgacggccccuccgacggccaggccuccuacaagaucuuccgcaucgagaagggcaagaucgucaaguccgucgagaugaacgcccccaacuaccacuacgaggagugcuccugcuaccccgacuccuccgagaucaccugcgucugccgcgacaacuggcacggcuccaaccgccccugggucuccuucaaccagaaccucgaguaccagaucggcuacaucugcuccggcaucuucggcgacaacccccgccccaacgacaagaccggcuccugcggccccgucuccuccaacggcgccaacggcgucaagggcuucuccuucaaguacggcaacggcgucuggaucggccgcaccaaguccaucuccucccgcaagggcuucgagaugaucugggaccccaacggcuggaccggcaccgacaacaacuucuccaucaagcaggacaucgucggcaucaacgagugguccggcuacuccggcuccuucguccagcaccccgagcucaccggccucgacugcauccgccccugcuucugggucgagcucauccgcggccgccccaaggagaacaccaucuggaccuccggcuccuccaucuccuucugcggcgucaacuccggcaccgucggcugguccuggcccgacggcgccgagcuccccuucaccaucgacaaguga

SEQ ID NO: 121580 - RNA, 1410 nt, Artificial Sequence
  derived and/or modified CDS sequence (opt2) from neuraminidase__InfluenzaA__AID70521
augaaccccaaccagaagaucaucaccaucggcuccgucucccucaccaucucccgcaucugcuucuucaugcagaucgccauccucaucaacaccgucacccuccacuucaagcaguacgaguucaacuccccccccaacaaccaggucaugcucugcgagcccaccaucaucgagcgcaacaucaccaagaucgucuaccucaccaacaccaccaucgagaaggagaucugccccaagcucgccgaguaccgcuccugguccaagccccagugcgacaucaccggcuucgcccccuucuccaaggacaacuccauccgccucuccgccggcggcgacaucugggucacccgcgagcccuacgucuccugcgaccccgacaagugcuuccaguucgcccucggccagggcaccacccucaacaacguccacuccaacgacaccguccacgaccgcacccccuaccgcacccuccucaugaacgagcucggcguccccuuccaccucggcaccaagcaggucugcaucgccugguccuccuccuccugccacgacggcaaggccuggcuccacgucugcaucaccggcgacgacaagaacgccaccgccuccaucaucuacaacggccgccucgucgacuccaucgucuccugguccaagaagauccuccgcacccaggaguccgagugcgucugcaucaacggcaccugcaccgucgucaugaccgacggcuccgccuccggcaaggccgacaccaagauccucuucaucgaggagggcaagaucguccacaccuccacccucuccggcuccgcccagcacgucgaggagugcuccugcuacccccgcuaccccggcguccgcugcgucugccgcgacaacuggaagggcuccaaccgccccaucgucgacaucaacaucaaggacuacuccaucgucuccuccuacgucugcuccggcuucgucggcgacaccccccgcaagcccgaccgcuccuccuccucccacugccucgaccccaacaacgaggagggcggccacggcgucaagggcugggccuucgacgacggcaacgacgucuggaugggccgcaccaucuccgagaagucccgccucggcuacgagaccuucaaggucaucggcggcugguccaaccccaacuccaagucccagaucaaccgccaggucaucgucgaccgcggcaaccgcuccggcuacuccggcaucuucuccgucgagggcaaguccugcaucaaccgcugcuucuacgucgagcucauccgcggccgcaaggacgagaccgagguccucuggaccuccaacuccaucgucgucuucugcggcaccuccggcaccuacggcaccggcuccuggcccgacggcgccgacaucaaccucaugcccaucuga

SEQ ID NO: 121581 - RNA, 1410 nt, Artificial Sequence
  derived and/or modified CDS sequence (opt2) from neuraminidase__InfluenzaA__AID70522
augaaccccaaccagaagaucaucaccaucggcuccgucucccucaccaucuccaccaucugcuucuucaugcagaucgccauccucaucaccaccgucacccuccacuuccgccaguacgaguucaacuccccccccaacaaccaggucaugcucugcgagcccaccaucaucgagcgcaacaucaccgagaucgucuaccucaccaacaccaccaucgagaaggagaucugccccaagcucgccgaguaccgcaacugguccaagccccagugcgacaucaccggcuucgcccccuucuccaaggacaacuccauccgccucuccgccggcggcgacaucugggucacccgcgagcccuacgucuccugcgaccccgacaagugcuaccaguucgcccucggccagggcaccacccucaacaacguccacuccaacaacaccguccgcgaccgcacccccuaccgcacccuccucaugaacgagcucggcguccccuuccaccucggcaccaagcaggucugcaucgccugguccuccuccuccugccacgacggcaaggccuggcuccacgucugcaucaccggcgacgacaagaacgccaccgccuccuucaucuacaacggccgccucgucgacuccgucgucuccugguccaaggagauccuccgcacccaggaguccgagugcgucugcaucaacggcaccugcaccgucgucaugaccgacggcuccgccuccggcaaggccgacaccaagauccucuucaucgaggagggcaagaucguccacaccuccacccucuccggcuccgcccagcacgucgaggagugcuccugcuacccccgcuaccccggcguccgcugcgucugccgcgacaacuggaagggcuccaaccgccccaucgucgacaucaacaucaaggaccacuccaucgucuccuccuacgucugcuccggccucgucggcgacaccccccgcaagaacgacuccuccuccuccucccacugccucgaccccaacaacgaggagggcggccacggcgucaagggcugggccuucgacgacggcaacgacgucuggaugggccgcaccaucaacgagaccucccgccucggcuacgagaccuucaaggucaucgagggcugguccaaccccaaguccaagcuccagaucaaccgccaggucaucgucgaccgcggcaaccgcuccggcuacuccggcaucuucuccgucgagggcaaguccugcaucaaccgcugcuucuacgucgagcucauccgcggccgcaaggaggagaccgagguccucuggaccuccaacuccaucgucgucuucugcggcaccuccggcaccuacggcaccggcuccuggcccgacggcgccgaccucaaccucaugcccaucuga

SEQ ID NO: 121582 - RNA, 1410 nt, Artificial Sequence
  derived and/or modified CDS sequence (opt2) from neuraminidase__InfluenzaA__AID70523
augaaccccaaccagaagaucaagaccaucggcuccgucucccucaccaacuccaccaucugcaucuucaugcagaucgccauccucaucaccaccgucacccuccacuucaagcaguacgaguucaacuccccccccaacaaccaggucaugcucugcgagcccaccaucaucgagcgcaacaucaccgagaucgucuaccucaccaacaccaccaucgagaaggagaucugccccaagcucgccgaguaccgcaacugguccaagccccagugcgacaucaccggcuucgcccccuucuccaaggacaacuccauccgccucuccgccggcggcgacaucugggucacccgcgagcccuacgucuccugcgaccccgacaagugcuaccaguucgcccucggccagggcaccacccucaacaacguccacuccaacaacaccguccgcgaccgcacccccuaccgcacccuccucaugaacgagcucggcguccccuuccaccucggcaccaagcaggucugcaucgccugguccuccuccuccugccacgacggcaaggccuggcuccacgucugcaucaccggcgacgacaagaacgccaccgccuccuucaucuacaacggccgccucgucgacuccgucgucuccugguccaaggagauccuccgcacccaggaguccgagugcgucugcaucaacggcaccugcaccgucgucaugaccgacggcuccgccuccggcaaggccgacaccaagauccucuucaucgaggagggcaagaucguccacaccuccacccucuccggcuccgcccagcacgucgaggagugcuccugcuacccccgcuaccccggcguccgcugcgucugccgcgacaacuggaagggcuccaaccgccccaucgucgacaucaacaucaaggaccacuccaucgucuccuccuacgucugcuccggccucgucggcgacaccccccgcaagaacgacuccuccuccuccucccacugccucgaccccaacaacgaggagggcggccacggcgucaagggcugggccuucgacgacggcaacgacgucuggaugggccgcaccaucaacgagaccucccgccucggcuacgagaccuucaaggucaucgagggcugguccaaccccaaguccaagcuccagaucaaccgccaguucaucgucgaccgcggcaaccgcuccggcuacuccggcaucuucuccgucgagggcaaguccugcaucaaccgcugcuucuacgucgagcucauccgcggccgcaaggaggagaccgagguccucuggaccuccaacuccaucgucgucuucugcggcaccuccggcaccuacggcaccggcuccuggcccgacggcgccgaccucaaccucaugcccaucuga

SEQ ID NO: 121583 - RNA, 1410 nt, Artificial Sequence
  derived and/or modified CDS sequence (opt2) from neuraminidase__InfluenzaA__AID70524
augaaccccaaccagaagaucaucaccaucggcgccgucuggcgcaccaucuccaccaucugcuucuucaugcagaucgccuuccucaucaccaccgucacccuccacuucaagcaguacgaguucaacuccccccccaacaaccaggucaugcccugcgagcccaccaucaucgagcgcaacaucaccgagaucgucuaccucaccaacaccaccaucgagaaggagaucugccccaagcucgccgaguaccgcaacugguccaagccccagugcgacaucaccggcuucgcccccuucuccaaggacaacuccauccgccucuccgccggcggcgacaucugggucacccgcgagcccuacgucuccugcgaccccgacaagugcuaccaguucgcccucggccagggcaccacccucaacaacguccacuccaacaacaccguccgcgaccgcacccccuaccgcacccuccucaugaacgagcucggcguccccuuccaccucggcaccaagcaggucugcaucgccugguccuccuccuccugccacgacggcaaggccuggcuccacgucugcaucaccggcgacgacaagaacgccaccgccuccuucaucuacaacggccgccucgucgacuccgucgucuccugguccaaggagauccuccgcacccaggaguccgagugcgucugcaucaacggcaccugcaccgucgucaugaccgacggcuccgccuccggcaaggccgacaccaagauccucuucaucgaggagggcaagaucguccacaccuccacccucuccggcuccgcccagcacgucgaggagugcuccugcuacccccgcuaccccggcguccgcugcgucugccgcgacaacuggaagggcuccaaccgccccaucgucgacaucaacaucaaggaccacuccaucgucuccuccuacgucugcuccggccucgucggcgacaccccccgcaagaacgacuccuccuccuccucccacugccucgaccccaacaacgaggagggcggccacggcgucaagggcugggccuucgacgacggcaacgacgucuggaugggccgcaccaucaacgagaccucccgccucggcuacgagaccuucaaggucaucgagggcugguccaaccccaaguccaagcuccagaucaaccgccaggucaucgucgaccgcggcaaccgcuccggcuacuccggcaucuucuccgucgagggcaaguccugcaucaaccgcugcuucuacgucgagcucauccgcggccgcaaggaggagaccgagguccucuggaccuccaacuccaucgucgucuucugcggcaccuccggcaccuacggcaccggcuccuggcccgacggcgccgaccucaaccucaugcccaucuga

SEQ ID NO: 121584 - RNA, 1410 nt, Artificial Sequence
  derived and/or modified CDS sequence (opt2) from neuraminidase__InfluenzaA__AID70525
augaaccccaaccagaagaucaucaccaucggcuccgucucccucaccaucuggaucaucugcuucuucaugcagaucgccauccucaucaccaccgucacccuccacuucaagcaguacgaguucaacuccccccccaacaaccaggucaugcucugcgagcccaccaucaucgagcgcaacaucaccgagaucgucuaccucaccaacaccaccaucgagaaggagaucugccccaagcucgccgaguaccgcaacugguccaagccccagugcgacaucaccggcuucgcccccuucuccaaggacaacuccauccgccucuccgccggcggcgacaucugggucacccgcgagcccuacgucuccugcgaccccgacaagugcuaccaguucgcccucggccagggcaccacccucaacaacguccacuccaacaacaccguccgcgaccgcacccccuaccgcacccuccucaugaacgagcucggcguccccuuccaccucggcaccaagcaggucugcaucgccugguccuccuccuccugccacgacggcaaggccuggcuccacgucugcaucaccggcgacgacaagaacgccaccgccuccuucaucuacaacggccgccucgucgacuccgucgucuccugguccaaggagauccuccgcacccaggaguccgagugcgucugcaucaacggcaccugcaccgucgucaugaccgacggcuccgccuccggcaaggccgacaccaagauccucuucaucgaggagggcaagaucguccacaccuccacccucuccggcuccgcccagcacgucgaggagugcuccugcuacccccgcuaccccggcguccgcugcgucugccgcgacaacuggaagggcuccaaccgccccaucgucgacaucaacaucaaggaccacuccaucgucuccuccuacgucugcuccggccucgucggcgacaccccccgcaagaacgacuccuccuccuccucccacugccucgaccccaacaacgaggagggcggccacggcgucaagggcugggccuucgacgacggcaacgacgucuggaugggccgcaccaucaacgagaccucccgccucggcuacgagaccuucaaggucaucgagggcugguccaaccccaaguccaagcuccagaucaaccgccaggucaucgucgaccgcggcaaccgcuccggcuacuccggcaucuucuccgucgagggcaaguccugcaucaaccgcugcuucuacgucgagcucauccgcggccgcaaggaggagaccgagguccucuggaccuccaacuccaucgucgucuucugcggcaccuccggcaccuacggcaccggcuccuggcccgacggcgccgaccucaacaucaugcccaucuga

SEQ ID NO: 121585 - RNA, 1410 nt, Artificial Sequence; identical to SEQ ID NO: 115554
  derived and/or modified CDS sequence (opt2) from neuraminidase__InfluenzaA__AID70526

SEQ ID NO: 121586 - RNA, 1410 nt, Artificial Sequence
  derived and/or modified CDS sequence (opt2) from neuraminidase__InfluenzaA__AID70527
augaaccccaaccagaagaucaucaccaucggcuccgucucccucaccauguggaucaucugcuucuucaugcagaucgccauccucaucaccaccgucacccuccacuucaagcaguacgaguucaacuccccccccaacaaccaggucaugcucugcgagcccaccaucaucgagcgcaacaucaccgagaucgucuaccucaccaacaccaccaucgagaaggagaucugccccaagcucgccgaguaccgcaacugguccaagccccagugcgacaucaccggcuucgcccccuucuccaaggacaacuccauccgccucuccgccggcggcgacaucugggucacccgcgagcccuacgucuccugcgaccccgacaagugcuaccaguucgcccucggccagggcaccacccucaacaacguccacuccaacaacaccguccgcgaccgcacccccuaccgcacccuccucaugaacgagcucggcguccccuuccaccucggcaccaagcaggucugcaucgccugguccuccuccuccugccacgacggcaaggccuggcuccacgucugcaucaccggcgacgacaagaacgccaccgccuccuucaucuacaacggccgccucgucgacuccgucgucuccugguccaaggagauccuccgcacccaggaguccgagugcgucugcaucaacggcaccugcaccgucgucaugaccgacggcuccgccuccggcaaggccgacaccaagauccucuucaucgaggagggcaagaucguccacaccuccacccucuccggcuccgcccagcacgucgaggagugcuccugcuacccccgcuaccccggcguccgcugcgucugccgcgacaacuggaagggcuccaaccgccccaucgucgacaucaacaucaaggaccacuccaucgucuccuccuacgucugcuccggccucgucggcgacaccccccgcaagaacgacuccuccuccuccucccacugccucgaccccaacaacgaggagggcggccacggcgucaagggcugggccuucgacgacggcaacgacgucuggaugggccgcaccaucaacgagaccucccgccucggcuacgagaccuucaaggucaucgagggcugguccaaccccaaguccaagcuccagaucaaccgccaggucaucgucgaccgcggcaaccgcuccggcuacuccggcaucuucuccgucgagggcaaguccugcaucaaccgcugcuucuacgucgagcucauccgcggccgcaaggaggagaccgagguccucuggaccuccaacuccaucgucgucuucugcggcaccuccggcaccuacggcaccggcuccuggcccgacggcgccgaccucaaccucaugcccaucuga

SEQ ID NO: 121587 - RNA, 1410 nt, Artificial Sequence
  derived and/or modified CDS sequence (opt2) from neuraminidase__InfluenzaA__AID70528
augaaccccaaccagaagaucaucaccaucggcuccgucucccucuccaucuccaccaucugcuucuucaugcagaucgccauccucaucaccaccgucacccuccacuucaagcaguacgaguucaacuccccccccaacaaccaggucaugcucugcgagcccaccaucaucgagcgcaacaucaccgagaucgucuaccucaccaacaccaccaucgagaaggagaucugccccaagcucgccgaguaccgcaacugguccaagccccagugcgacaucaccggcuucgcccccuucuccaaggacaacuccauccgccucuccgccggcggcgacaucugggucacccgcgagcccuacgucuccugcgaccccgacaagugcuaccaguucgcccucggccagggcaccacccucaacaacguccacuccaacaacaccguccgcgaccgcacccccuaccgcacccuccucaugaacgagcucggcguccccuuccaccucggcaccaagcaggucugcaucgccugguccuccuccuccugccacgacggcaaggccuggcuccacgucugcaucaccggcgacgacaagaacgccaccgccuccuucaucuacaacggccgccucgucgacuccgucgucuccugguccaaggagauccuccgcacccaggaguccgagugcgucugcaucaacggcaccugcaccgucgucaugaccgacggcuccgccuccggcaaggccgacaccaagauccucuucaucgaggagggcaagaucguccacaccuccacccucuccggcuccgcccagcacgucgaggagugcuccugcuacccccgcuaccccggcguccgcugcgucugccgcgacaacuggaagggcuccaaccgccccaucgucgacaucaacaucaaggaccacuccaucgucuccuccuacgucugcuccggccucgucggcgacaccccccgcaagaacgacuccuccuccuccucccacugccucgaccccaacaacgaggagggcggccacggcgucaagggcugggccuucgacgacggcaacgacgucuggaugggccgcaccaucaacgagaccucccgccucggcuacgagaccuucaaggucaucgagggcugguccaaccccaaguccaagcuccagaucaaccgccaggucaucgucgaccgcggcaaccgcuccggcuacuccggcaucuucuccgucgagggcaaguccugcaucaaccgcugcuucuacgucgagcucauccgcggccgcaaggaggagaccgagguccucuggaccuccaacuccaucgucgucuucugcggcaccuccggcaccuacggcaccggcuccuggcccgacggcgccgaccucaaccucaugcccaucuga

SEQ ID NO: 121588 - RNA, 1410 nt, Artificial Sequence; identical to SEQ ID NO: 115554
  derived and/or modified CDS sequence (opt2) from neuraminidase__InfluenzaA__AID70529

SEQ ID NO: 121589 - RNA, 1410 nt, Artificial Sequence
  derived and/or modified CDS sequence (opt2) from neuraminidase__InfluenzaA__AID70530
augaaccccaaccagaagaucaucaccaucggcuccgucucccucaccaucuccaccaucugcuucuucaugcagaucgccauccucaucaccaccgucacccuccacuucaagcaguacgaguucaacuccccccccaacaaccaggucaugcucugcgagcccaccaucaucgagcgcaacaucaccgagaucgucuaccucaccaacaccaccaucgagaaggagaucugccccaagcucgccgaguaccgcaacugguccaagccccagugcgacaucaccggcuucgcccccuucuccaaggacaacuccauccgccucuccgccggcggcgacaucugggucacccgcgagcccuacgucuccugcgaccccgacaagugcuaccaguucgcccucggccagggcaccacccucaacaacguccacuccaacaacaccguccgcgaccgcacccccuaccgcacccuccucaugaacgagcucggcguccccuuccaccucggcaccaagcaggucugcaucgccugguccuccuccuccugccacgacggcaaggccuggcuccacgucugcaucaccggcgacgacaagaacgccaccgccuccuucaucuacaacggccgccucgucgacuccgucgucuccugguccaaggagauccuccgcacccaggaguccgagugcgucugcaucaacggcaccugcaccgucgucaugaccgacggcuccgccuccggcaaggccgacaccaagauccucuucaucgaggagggcaagaucguccacaccuccacccucuccggcuccgcccagcacgucgaggagugcuccugcuacccccgcuaccccggcguccgcugcgucugccgcgacaacuggaagggcuccaaccgccccaucgucgacaucaacaucaaggaccacuccaucgucuccuccuacgucugcuccggccucgucggcgacaccccccgcaagaacgacuccuccuccuccucccacugccucgaccccaacaacgaggagggcggccacggcgucaagggcugggccuucgacgacggcaacgacgucuggaugggccgcaccaucaacgagaccucccgccucggcuacgagaccuucaaggucaucgagggcugguccaaccccaaguccaagcuccagaucaaccgccaggucaucgucgaccgcggcaaccgcuccggcuacuccggcaucuucuccgucgagggcaaguccugcaucaaccgcugcuucuacgucgagcucauccgcggccgcaaggaggagaccgagguccucuggaccuccaacuccaucgucgucuucugcggcaccuccggcaccuacggcaccggcuccuggcccgacggcgccgaccucaacaucaugcccaucuga

SEQ ID NO: 121590 - RNA, 1410 nt, Artificial Sequence; identical to SEQ ID NO: 115554
  derived and/or modified CDS sequence (opt2) from neuraminidase__InfluenzaA__AID70531

SEQ ID NO: 121591 - RNA, 1410 nt, Artificial Sequence
  derived and/or modified CDS sequence (opt2) from neuraminidase__InfluenzaA__AID70532
augaaccccaaccagaagaucaucaccaucggcuccgucucccucaccaucuccaccaucugcuucuucaugcagaucgccauccucaucaccaccgucacccuccacuucaagcaguacgaguucaacuccccccccaacaaccaggucaugcucugcgagcccaccaucaucgagcgcaacaucaccgagaucgucuaccucaccaacaccaccaucgagaaggagaucugccccaagcucgccgaguaccgcaacugguccaagccccagugcgacaucaccggcuucgcccccuucuccaaggacaacuccauccgccucuccgccggcggcgacaucugggucacccgcgagcccuacgucuccugcgaccccgacaagugcuaccaguucgcccucggccagggcaccacccucaacaacguccacuccaacaacaccguccgcgaccgcacccccuaccgcacccuccucaugaacgagcucggcguccccuuccaccucggcaccaagcaggucugcaucgccugguccuccuccuccugccacgacggcaaggccuggcuccacgucugcaucaccggcgacgacaagaacgccaccgccuccuucaucuacaacggccgccucgucgacuccgucgucuccugguccaaggagauccuccgcacccaggaguccgagugcgucugcaucaacggcaccugcaccgucgucaugaccgacggcuccgccuccggcaaggccgacaccaagauccucuucaucgaggagggcaagaucguccacaccuccacccucuccggcuccgcccagcacgucgaggagugcuccugcuacccccgcuaccccggcguccgcugcgucugccgcgacaacuggaagggcuccaaccgccccaucgucgacaucaacaucaaggaccacuccaucgucuccuccuacgucugcuccggccucgucggcgacaccccccgcaagaacgacuccuccuccuccucccacugccucgaccccaacaacgaggagggcggccacggcgucaagggcugggccuucgacgacggcaacgacgucuggaugggccgcaccaucaacgagaccucccgccucggcuacgagacccucaaggucaucgagggcugguccaaccccaaguccaagcuccagaucaaccgccaggucaucgucgaccgcggcaaccgcuccggcuacuacggcaucuucuccgucgagggcaaguccugcaucaaccgcugcuucuacgucgagcucaucuggggccgcaaggaggagaucgagguccucuggaccuccaacuccaaggucgucuucugcggcaccuccggcaccuacggcaccggcuccucccccgacggcgccgaccucaacuucaugcccaucuga

SEQ ID NO: 121592 - RNA, 1410 nt, Artificial Sequence
  derived and/or modified CDS sequence (opt2) from neuraminidase__InfluenzaA__AID70533
augaaccccaaccagaagaucaucaccaucggcuccgucucccucgccaucuccaccaucugcuucuucaugcagaucgccauccucaucaccaccgucacccuccacuucaagcaguacgaguucaacuccccccccaacaaccaggucaugcucugcgagcccaccaucaucgagcgcaacaucaccgagaucgucuaccucaccaacaccaccaucgagaaggagaucugccccaagcucgccgaguaccgcaacugguccaagccccagugcgacaucaccggcuucgcccccuucuccaaggacaacuccauccgccucuccgccggcggcgacaucugggucacccgcgagcccuacgucuccugcgaccccgacaagugcuaccaguucgcccucggccagggcaccacccucaacaacguccacuccaacaacaccguccgcgaccgcacccccuaccgcacccuccucaugaacgagcucggcguccccuuccaccucggcaccaagcaggucugcaucgccugguccuccuccuccugccacgacggcaaggccuggcuccacgucugcaucaccggcgacgacaagaacgccaccgccuccuucaucuacaacggccgccucgucgacuccgucgucuccugguccaaggagauccuccgcacccaggaguccgagugcgucugcaucaacggcaccugcaccgucgucaugaccgacggcuccgccuccggcaaggccgacaccaagauccucuucaucgaggagggcaagaucguccacaccuccacccucuccggcuccgcccagcacgucgaggagugcuccugcuacccccgcuaccccggcguccgcugcgucugccgcgacaacuggaagggcuccaaccgccccaucgucgacaucaacaucaaggaccacuccaucgucuccuccuacgucugcuccggccucgucggcgacaccccccgcaagaacgacuccuccuccuccucccacugccucgaccccaacaacgaggagggcggccacggcgucaagggcugggccuucgacgacggcaacgacgucuggaugggccgcaccaucaacgagaccucccgccucggcuacgagaccuucaaggucaucgagggcugguccaaccccaaguccaagcuccagaucaaccgccaggucaucgucgaccgcggcaaccgcuccggcuacuccggcaucuucuccgucgagggcaaguccugcaucaaccgcugcuucuacgucgagcucauccgcggccgcaaggaggagaccgagguccucuggaccuccaacuccaucgucgucuucugcggcaccuccggcaccuacggcaccggcuccuggcccgacggcgccgaccucaaccucaugcccaucuga

SEQ ID NO: 121593 - RNA, 1410 nt, Artificial Sequence
  derived and/or modified CDS sequence (opt2) from neuraminidase__InfluenzaA__AID70534
augaaccccaaccagaagaucaucaccaucggcuccgucucccucuccaucuacaucaucugcuucuucaugcagaucgccauccucaucaccaccgucacccuccacuucaagcaguacgaguucaacuccccccccaacaaccaggccaugcccugcgagcccaccaucaucgagcgcaacaucaccgagaucgucuaccucaccaacaccaccaucgagaaggagaucugccccaagcucgccgaguaccgcaacugguccaagccccagugcgacaucaccggcuucgcccccuucuccaaggacaacuccauccgccucuccgccggcggcgacaucugggucacccgcgagcccuacgucuccugcgaccccgacaagugcuaccaguucgcccucggccagggcaccacccucaacaacguccacuccaacaacaccguccgcgaccgcacccccuaccgcacccuccucaugaacgagcucggcguccccuuccaccucggcaccaagcaggucugcaucgccugguccuccuccuccugccacgacggcaaggccuggcuccacgucugcaucaccggcgacgacaagaacgccaccgccuccuucaucuacaacggccgccucgucgacuccgucgucuccugguccaaggagauccuccgcacccaggaguccgagugcgucugcaucaacggcaccugcaccgucgucaugaccgacggcuccgccuccggcaaggccgacaccaagauccucuucaucgaggagggcaagaucguccacaccuccacccucuccggcuccgcccagcacgucgaggagugcuccugcuacccccgcuaccccggcguccgcugcgucugccgcgacaacuggaagggcuccaaccgccccaucgucgacaucaacaucaaggaccacuccaucgucuccuccuacgucugcuccggccucgucggcgacaccccccgcaagaacgacuccuccuccuccucccacugccucgaccccaacaacgaggagggcggccacggcgucaagggcugggccuucgacgacggcaacgacgucuggaugggccgcaccaucaacgagaccucccgccucggcuacgagaccuucaaggucaucgagggcugguccaaccccaaguccaagcuccagaucaaccgccaggucaucgucgaccgcggcaaccgcuccggcuacuccggcaucuucuccgucgagggcaaguccugcaucaaccgcugcuucuacgucgagcucauccgcggccgcaaggaggagaccgagguccucuggaccuccaacuccaucgucgucuucugcggcaccuccggcaccuacggcaccggcuccuggcccgacggcgccgaccucaaccucaugcccaucuga

SEQ ID NO: 121594 - RNA, 1410 nt, Artificial Sequence
  derived and/or modified CDS sequence (opt2) from neuraminidase__InfluenzaA__AID70535
augaaccccaaccagaagaucaucaccaucggcuccgucucccucgccaugugcaccaucugcuucuucaugcagaucgccauccucaucaccaccgucacccuccacuucaagcaguacgaguucaacuccccccccaacaaccaggccaugcccugcgagcccaccaucaucgagcgcaacaucaccgagaucgucuaccucaccaacaccaccaucgagaaggagaucugccccaagcucgccgaguaccgcaacugguccaagccccagugcgacaucaccggcuucgcccccuucuccaaggacaacuccauccgccucuccgccggcggcgacaucugggucacccgcgagcccuacgucuccugcgaccccgacaagugcuaccaguucgcccucggccagggcaccacccucaacaacguccacuccaacaacaccguccgcgaccgcacccccuaccgcacccuccucaugaacgagcucggcguccccuuccaccucggcaccaagcaggucugcaucgccugguccuccuccuccugccacgacggcaaggccuggcuccacgucugcaucaccggcgacgacaagaacgccaccgccuccuucaucuacaacggccgccucgucgacuccgucgucuccugguccaaggagauccuccgcacccaggaguccgagugcgucugcaucaacggcaccugcaccgucgucaugaccgacggcuccgccuccggcaaggccgacaccaagauccucuucaucgaggagggcaagaucguccacaccuccacccucuccggcuccgcccagcacgucgaggagugcuccugcuacccccgcuaccccggcguccgcugcgucugccgcgacaacuggaagggcuccaaccgccccaucgucgacaucaacaucaaggaccacuccaucgucuccuccuacgucugcuccggccucgucggcgacaccccccgcaagaacgacuccuccuccuccucccacugccucgaccccaacaacgaggagggcggccacggcgucaagggcugggccuucgacgacggcaacgacgucuggaugggccgcaccaucaacgagaccucccgccucggcuacgagaccuucaaggucaucgagggcugguccaaccccaaguccaagcuccagaucaaccgccaggucaucgucgaccgcggcaaccgcuccggcuacuccggcaucuucuccgucgagggcaaguccugcaucaaccgcugcuucuacgucgagcucauccgcggccgcaaggaggagaccgagguccucuggaccuccaacuccaucgucgucuucugcggcaccuccggcaccuacggcaccggcuccuggcccgacggcgccgaccucaaccucaugcccaucuga

SEQ ID NO: 121595 - RNA, 1410 nt, Artificial Sequence
  derived and/or modified CDS sequence (opt2) from neuraminidase__InfluenzaA__AID70536
augaaccccaaccagaagaucaucaccaucggcuccgucucccucaccaucuccaccgucugcuucuucaugcagaucgccauccucaucaccaccgucacccuccacuucaagcaguacgaguucaacuccccccccaacaaccaggucaugcucugcgagcccaccaucaucgaccgcaacaucaccgagaucgucuaccucaccaacaccaccaucgagaaggagaucugccccaagcucgccgaguaccgcaacugguccaagccccagugcgacaucaccggcuucgcccccuucuccaaggacaacuccauccgccucuccgccggcggcgacaucugggucacccgcgagcccuacgucuccugcgaccccgacaagugcuaccaguucgcccucggccagggcaccacccucaacaacguccacuccaacaacaccguccgcgaccgcacccccuaccgcacccuccucaugaacgagcucggcguccccuuccaccucggcaccaagcaggucugcaucgccugguccuccuccuccugccacgacggcaaggccuggcuccacgucugcaucaccggcgacgacaagaacgccaccgccuccuucaucuacaacggccgccucgucgacuccgucgucuccugguccaaggagauccuccgcacccaggaguccgagugcgucugcaucaacggcaccugcaccgucgucaugaccgacggcuccgccuccggcaaggccgacaccaagauccucuucaucgaggagggcaagaucguccacaccuccacccucuccggcuccgcccagcacgucgaggagugcuccugcuacccccgcuaccccggcguccgcugcgucugccgcgacaacuggaagggcuccaaccgccccaucgucgacaucaacaucaaggaccacuccaucgucuccuccuacgucugcuccggccucgucggcgacaccccccgcaagaacgacuccuccuccuccucccacugccucgaccccaacaacgaggagggcggccacggcgucaagggcugggccuucgacgacggcaacgacgucuggaugggccgcaccaucaacgagaccucccgccucggcuacgagaccuucaaggucaucgagggcugguccaaccccaaguccaagcuccagaucaaccgccaggucaucgucgaccgcggcaaccgcuccggcuacuccggcaucuucuccgucgagggcaaguccugcaucaaccgcugcuucuacgucgagcucauccgcggccgcaaggaggagaccgagguccucuggaccuccaacuccaucgucgucuucugcggcaccuccggcaccuacggcaccggcuccuggcccgacggcgccgaccucaaccucaugcccaucuga

SEQ ID NO: 121596 - RNA, 1410 nt, Artificial Sequence; identical to SEQ ID NO: 115554
  derived and/or modified CDS sequence (opt2) from neuraminidase__InfluenzaA__AID70537

SEQ ID NO: 121597 - RNA, 1410 nt, Artificial Sequence
  derived and/or modified CDS sequence (opt2) from neuraminidase__InfluenzaA__AID70538
augaaccccaaccagaagaagaucaccaucggcgccgucucccucaccaugugcaccgucugcaucuucaugcagaucgccauccucaucaccaccgucacccuccacuuccgccaguacgaguucaacuccccccccaacaaccaggucaugcucugcgagcccaccaucaucgagcgcaacaucaccgagaucgucuaccucaccaacaccaccaucgagaaggagaucugccccaagcucgccgaguaccgcaacugguccaagccccagugcgacaucaccggcuucgcccccuucuccaaggacaacuccauccgccucuccgccggcggcgacaucugggucacccgcgagcccuacgucuccugcgaccccgacaagugcuaccaguucgcccucggccagggcaccacccucaacaacguccacuccaacaacaccguccgcgaccgcacccccuaccgcacccuccucaugaacgagcucggcguccccuuccaccucggcaccaagcaggucugcaucgccugguccuccuccuccugccacgacggcaaggccuggcuccacgucugcaucaccggcgacgacaagaacgccaccgccuccuucaucuacaacggccgccucgucgacuccgucgucuccugguccaaggagauccuccgcacccaggaguccgagugcgucugcaucaacggcaccugcaccgucgucaugaccgacggcuccgccuccggcaaggccgacaccaagauccucuucaucgaggagggcaagaucguccacaccuccacccucuccggcuccgcccagcacgucgaggagugcuccugcuacccccgcuaccccggcguccgcugcgucugccgcgacaacuggaagggcuccaaccgccccaucgucgacaucaacaucaaggaccacuccaucgucuccuccuacgucugcuccggccucgucggcgacaccccccgcaagaacgacuccuccuccuccucccacugccucgaccccaacaacgaggagggcggccacggcgucaagggcugggccuucgacgacggcaacgacgucuggaugggccgcaccaucaacgagaccucccgccucggcuacgagaccuucaaggucaucgagggcugguccaaccccaaguccaagcuccagaucaaccgccaggucaucgucgaccgcggcaaccgcuccggcuacuccggcaucuucuccgucgagggcaaguccugcaucaaccgcugcuucuacgucgagcucauccgcggccgcaaggaggagaccgagguccucuggaccuccaacuccaucgucgucuucugcggcaccuccggcaccuacggcaccggcuccuggcccgacggcgccgaccucaaccucaugcccaucuga

SEQ ID NO: 121598 - RNA, 1410 nt, Artificial Sequence
  derived and/or modified CDS sequence (opt2) from neuraminidase__InfluenzaA__AID70539
augaaccccaaccagaagaucaucaccaucggcuccgucucccucaccaucuccaccaucugcuucuucaugcagaucgccauccucaucaccaccgucacccuccacuucaagcaguacgaguucaacuccccccccaacaaccaggucaugcucugcgagcccaccaucaucgagcgcaacaucaccgagaucgucuaccucaccaacaccaccaucgagaaggagaucugccccaagcucgccgaguaccgcaacugguccaagccccagugcgacaucaccggcuucgcccccuucuccaaggacaacuccauccgccucuccgccggcggcgacaucugggucacccgcgagcccuacgucuccugcgaccccgacaagugcuaccaguucgcccucggccagggcaccacccucaacaacguccacuccaacaacaccguccgcgaccgcacccccuaccgcacccuccucaugaacgagcucggcguccccuuccaccucggcaccaagcaggucugcaucgccugguccuccuccuccugccacgacggcaaggccuggcuccacgucugcaucaccggcgacgacaagaacgccaccgccuccuucaucuacaacggccgccucgucgacuccgucgucuccugguccaaggagauccuccgcacccaggaguccgagugcgucugcaucaacggcaccugcaccgucgucaugaccgacggcuccgccuccggcaaggccgacaccaagauccucuucaucgaggagggcaagaucguccacaccuccacccucuccggcuccgcccagcacgucgaggagugcuccugcuacccccgcuaccccggcguccgcugcgucugccgcgacaacuggaagggcuccaaccgccccaucgucgacaucaacaucaaggaccacuccaucgucuccuccuacgucugcuccggccucgucggcgacaccccccgcaagaacgacuccuccuccuccucccacugccucaaccccaacaacgaggagggcggccacggcgucaagggcugggccuucgacgacggcaacgacgucuggaugggccgcaccaucaacgagaccucccgccucggcuacgagaccuucaaggucaucgagggcugguccaaccccaaguccaagcuccagaucaaccgccaggucaucgucgaccgcggcaaccgcuccggcuacuccggcaucuucuccgucgagggcaaguccugcaucaaccgcugcuucuacgucgagcucauccgcggccgcaaggaggagaccgagguccucuggaccuccaacuccaucgucgucuucugcggcaccuccggcaccuacggcaccggcuccuggcccgacggcgccgaccucaaccucaugcccaucuga

SEQ ID NO: 121599 - RNA, 1410 nt, Artificial Sequence; identical to SEQ ID NO: 115554
  derived and/or modified CDS sequence (opt2) from neuraminidase__InfluenzaA__AID70540

SEQ ID NO: 121600 - RNA, 1410 nt, Artificial Sequence; identical to SEQ ID NO: 115554
  derived and/or modified CDS sequence (opt2) from neuraminidase__InfluenzaA__AID70541

SEQ ID NO: 121601 - RNA, 1410 nt, Artificial Sequence
  derived and/or modified CDS sequence (opt2) from neuraminidase__InfluenzaA__AID70633
augaaccccaaccagaagaucaucaccaucggcuccgucugcaugaccaucggcauggccaaccucauccuccagaucggcaacaucaucuccaucugggucucccacuccauccagcucggcaaccagucccagaucgaggccugcaaccaguccgucaucaccuacgagaacaacaccugggucaaccagaccuacgucaacaucuccaacaccaacuucgccgccggccaguccgucgucuccgucaagcucgccggcaacuccucccucugccccgucuccggcugggccaucuacuccaaggacaacuccguccgcaucggcuccaagggcgacgucuucgucauccgcgagcccuucaucuccugcuccccccucgagugccgcaccuucuuccucacccagggcgcccuccucaacgacaagcacuccaacggcaccaucaaggaccgcucccccuaccgcacccucauguccugccccaucggcgagguccccucccccuacaacucccgcuucgaguccgucgccugguccgccuccgccugccacgacggcaucaacuggcucaccaucggcaucuccggccccgacuccggcgccgucgccguccucaaguacaacggcaucaucaccgacaccaucaaguccuggcgcaacaacauccuccgcacccaggaguccgagugcgccugcgucaacggcuccugcuucaccaucaugaccgacggccccuccgacggccaggccuccuacaagaucuuccgcaucgagaagggcaagaucgucaaguccgucgagaugaacgcccccaacuaccacuacgaggagugcuccugcuaccccgacuccuccgagaucaccugcgucugccgcgacaacuggcacggcuccaaccgccccugggucuccuucaaccagaaccucgaguaccagaucggcuacaucugcuccggcgucuucggcgacaacccccgccccaacgacaagaccggcuccugcggccccgucuccuccaacggcgccaacggcgucaagggcuucuccuucaaguacggcaacggcgucuggaucggccgcaccaaguccaucuccucccgcaagggcuucgagaugaucugggaccccaacggcuggaccggcaccgacaacaaguucuccaucaagcaggacaucgucggcaucaacgagugguccggcuacuccggcuccuucguccagcaccccgagcucaccggccucgacugcauccgccccugcuucugggucgagcucauccgcggccgccccgaggagaacaccaucuggaccuccggcuccuccaucuccuucugcggcgucaacuccgacaccgucggcugguccuggcccgacggcgccgagcuccccuucaccaucgacaaguga

SEQ ID NO: 121602 - RNA, 1398 nt, Artificial Sequence
  derived and/or modified CDS sequence (opt2) from neuraminidase__InfluenzaA__AID70635
augaaccccaagcagaagauccucugcaccuccgccaccgccaucaucaucggcgccaucgccguccucaucggcaucgccaaccucggccucaacaucggccuccaccucaagcccggcugcaacugcucccacucccagcccgagaccaccaacaccucccagaccaucaucaacaacuacuacaacgagaccaacaucaccaacauccagauggaggagcgcaccucccgcaacuucaacaaccucaccaagggccucugcaccaucaacuccuggcacaucuacggcaaggacaacgccguccgcaucggcgaguccuccgacguccucgucacccgcgagcccuacgucuccugcgaccccgacgagugccgcuucuacgcccucucccagggcaccaccauccgcggcaagcacuccaacggcaccauccacgacggcucccaguaccgcgcccucaucuccuggccccucuccuccccccccaccgucuacaacucccgcgucgagugcaucggcugguccuccaccuccugccacgacggcaagucccgcauguccaucugcaucuccggccccaacaacaacgccuccgccgucgucugguacaaccgccgccccgucgccgagaucaacaccugggcccgcaacauccuccgcacccaggaguccgagugcgucugccacaacggcgucugccccgucgucuucaccgacggcuccgccaccggccccgccgacacccgcaucuacuacuucaaggagggcaagauccucaagugggagucccucaccggcaccgccaagcacaucgaggagugcuccugcuacggcgagcgcaccggcaucaccugcaccugccgcgacaacuggcagggcuccaaccgccccgucauccagaucgaccccgucgccaugacccacaccucccaguacaucugcucccccguccucaccgacaacccccgccccaacgaccccaacaucggcaagugcaacgaccccuaccccggcaacaacaacaacggcgucaagggcuucuccuaccucgacggcgccaacaccuggcucggccgcaccaucuccaccgccucccgcuccggcuacgagaugcucaagguccccaacgcccucaccgacgaccgcuccaagcccauccagggccagaccaucguccucaacgccgacugguccggcuacuccggcuccuucauggacuacugggccgagggcgacugcuaccgcgccugcuucuacgucgagcucauccgcggccgccccaaggaggacaaggucugguggaccuccaacuccaucgucuccaugugcuccuccaccgaguuccucggccaguggaacuggcccgacggcgccaagaucgaguacuuccucuga

SEQ ID NO: 121603 - RNA, 1401 nt, Artificial Sequence
  derived and/or modified CDS sequence (opt2) from neuraminidase__InfluenzaA__AIG44695
augaaccccaaccagaagaucaccgccaucggcuccgucucccucaucaucgccaucaucugccuccucaugcagaucgccauccucaccaccaccaugacccuccacuuccgccagaacgagugcuccaaccccuccaacaaccaggucaugcccugcgagcccaucaucaucgagcgcaacaccguccaccucaacuccaccaccaucgagcgcgagaucugccccaaggucgccgaguacaagaacugguccaagccccagugccagaucaccggcuucgcccccuucuccaaggacaacuccauccgccucuccgccuccggcgacaucugggucacccgcgagcccuacgucuccugcucccucgacaagugcuaccaguucgcccucggccagggcaccacccucaagaacaagcacuccaacggcaccacccacgaccgcaccccccaccgcacccuccucaugaacgagcucggcguccccuuccaccucggcaccaagcaggucugcaucgccugguccuccuccuccugcuacgacggcaaggccuggcuccacgucugcgucaccggcgacgacaagaacgccaccgccuccaucaucuacgacggcaugcucgucgacuccgucggcuccugguccaagaacauccuccgcacccaggaguccgagugcgucugcaucaacggcaccugcgccgucgucaugaccgacggcuccgccuccggcaaggccgacacccgcguccucuucauccgcgagggcaagaucaucaacaucuccccccucuccggcuccgcccagcacgucgaggagugcuccugcuacccccgcuaccccgagguccgcugcgucugccgcgacaacuggaagggcuccaaccgccccauccucuacaucaacauggccgacuacuccaucgaguccuccuacgucugcuccggccucgucggcgacaccccccgcaacgacgacuccuccuccuccuccaacugccgcgaccccaacaacgagcgcggcgcccccggcgucaagggcugggccuucgacgacggcaacgacgucuggaugggccgcaccaucaagaacggcucccgcuccggcuacgagaccuuccgcgucgucaacggcuggaccauggccaacuccaagucccagaucaaccgccaggucaucgucgacuccgacggcugguccggcuacuccggcaucuucuccgucgagggcaagaagugcaucaaccgcugcuucuacgucgagcucauccgcggccgcccccaggagccccgcgucugguggaccuccaacuccaucaucgucuucugcggcaccuccggcaccuacggcaccggcuccuggcccgacggcgccaacaucaacuucaugcccaucuga

SEQ ID NO: 121604 - RNA, 1410 nt, Artificial Sequence
  derived and/or modified CDS sequence (opt2) from neuraminidase__InfluenzaA__AIJ10793
augaaccccaaccagaagaucaucaccaucggcuccgucucccucaccaucuccaccaucugcuucuucaugcagaucgccauccucaucaccaccgucacccuccacuucaagcaguacgaguucaacuccccccccaacaaccaggucaugcucugcgagcccaccaucaucgagcgcaacaucaccgagaucgucuaccucaccaacaccaccaucgagaaggagaucugccccaagcucgccgaguaccgcaacugguccaagccccagugcgacaucaccggcuucgcccccuucuccaaggacaacuccauccgccucuccgccggcggcgacaucugggucacccgcgagcccuacgucuccugcgaccccgacaagugcuaccaguucgcccucggccagggcaccacccucaacaacguccacuccaacaacaccguccgcgaccgcacccccuaccgcacccuccucaugaacgagcucggcguccccuuccaccucggcaccaagcaggucugcaucgccugguccuccuccuccugccacgacggcaaggccuggcuccacgucugcaucaccggcgacgacaagaacgccaccgccuccuucaucuacaacggccgccucgucgacuccgucgucuccugguccaaggagauccuccgcacccaggaguccgagugcgucugcaucaacggcaccugcaccgucgucaugaccgacggcuccgccuccggcaaggccgacaccaagauccucuucaucgaggagggcaagaucguccacaccuccacccucuccggcuccgcccagcacgucgaggagugcuccugcuacccccgcuaccccggcguccgcugcgucugccgcgacaacuggaagggcuccaaccgccccaucgucgacaucaacaucaaggaccacuccaucgucuccuccuacgucugcuccggccucgucggcgacaccccccgcaagaacgacuccuccuccuccucccacugccucgaccccaacaacgaggagggcggccacggcgucaagggcugggccuucgacgacggcaacgacgucuggaugggccgcaccaucaacgagaccucccgccucggcuacgagaccuucaaggccaucgagggcugguccaaccccaaguccaagcuccagaccaaccgccaggucaucgucgaccgcggcaaccgcuccggcuacuccggcaucuucuccgucgagggcaaguccugcaucaaccgcugcuucuacgucgagcucauccgcggccgcaaggaggagaccgagguccucuggaccuccaacuccaucgucgucuucugcggcaccuccggcaccuacggcaccggcuccuggcccgacggcgccgaccucaaccucaugcccaucuga

SEQ ID NO: 121605 - RNA, 1410 nt, Artificial Sequence; identical to SEQ ID NO: 115554
  derived and/or modified CDS sequence (opt2) from neuraminidase__InfluenzaA__AIJ10794

SEQ ID NO: 121606 - RNA, 1410 nt, Artificial Sequence; identical to SEQ ID NO: 117179
  derived and/or modified CDS sequence (opt2) from neuraminidase__InfluenzaA__AIJ10795

SEQ ID NO: 121607 - RNA, 1410 nt, Artificial Sequence; identical to SEQ ID NO: 117179
  derived and/or modified CDS sequence (opt2) from neuraminidase__InfluenzaA__AIJ10796

SEQ ID NO: 121608 - RNA, 1410 nt, Artificial Sequence
  derived and/or modified CDS sequence (opt2) from neuraminidase__InfluenzaA__AIJ10797
augaaccccaaccagaagaucaucaccaucggcuccgucucccucaccaucuccaccaucugcuucuucaugcagaucgccauccucaucaccaccgucacccuccacuucaagcaguacgaguucaacuccccccccaacaaccaggucaugcucugcgagcccaccaucaucgagcgcaacaucaccgagaucgucuaccucaccaacaccaccaucgagaaggagaucugccccaagcucgccgaguaccgcaacugguccaagccccagugcgacaucaccggcuucgcccccuucuccaaggacaacuccauccgccucuccgccggcggcgacaucugggucacccgcgagcccuacgucuccugcgaccccgacaagugcuaccaguucgcccucggccagggcaccacccucaacaacguccacuccaacaacaccguccgcgaccgcacccccuaccgcacccuccucaugaacgagcucggcguccccuuccaccucggcaccaagcaggucugcaucgccugguccuccuccuccugccacgacggcaaggccuggcuccacgucugcaucaccggcgacgacaagaacgccaccgccuccuucaucuacaacggcaagcucgucgacuccgucgucuccugguccaaggagauccuccgcacccaggaguccgagugcgucugcaucaacggcaccugcaccgucgucaugaccgacggcuccgccuccggcaaggccgacaccaagauccucuucaucgaggagggcaagaucguccacaccuccacccucuccggcuccgcccagcacgucgaggagugcuccugcuacccccgcuaccccggcguccgcugcgucugccgcgacaacuggaagggcuccaaccgccccaucgucgacaucaacaucaaggaccacuccaucgucuccuccuacgucugcuccggccucgucggcgacaccccccgcaagaacgacuccuccuccuccucccacugccucgaccccaacaacgaggagggcggccacggcgucaagggcugggccuucgacgacggcaacgacgucuggaugggccgcaccaucaacgagaccucccgccucggcuacgagaccuucaaggucaucgagggcugguccaaccccaaguccaagcuccagaucaaccgccaggucaucgucgaccgcggcaaccgcuccggcuacuccggcaucuucuccgucgaggacaaguccugcaucaaccgcugcuucuacgucgagcucauccgcggccgcaaggaggagaccgagguccucuggaccuccaacuccaucgucgucuucugcggcaccuccggcaccuacggcaccggcuccuggcccgacggcgccgaccucaaccucaugcccaucuga

SEQ ID NO: 121609 - RNA, 1410 nt, Artificial Sequence
  derived and/or modified CDS sequence (opt2) from neuraminidase__InfluenzaA__AIJ10798
augaaccccaaccagaagaucaucaccaucggcuccgucucccucaccaucuccaccaucugcuucuucaugcagaucgccauccucaucaccaccgucacccuccacuucaagcaguacgaguucaacuccccccccaacaaccaggucaugcucugcgagcccaccaucaucgagcgcaacaucaccgagaucgucuaccucaccaacaccaccaucgagaaggagaucugccccacccucgccgaguaccgcaacugguccaagccccagugcgacaucaccggcuucgcccccuucuccaaggacaacuccauccgccucuccgccggcggcgacaucugggucacccgcgagcccuacgucuccugcgaccccgacaagugcuaccaguucgcccucggccagggcaccacccucaacaacguccacuccaacaacaccguccgcgaccgcacccccuaccgcacccuccucaugaacgagcucggcguccccuuccaccucggcaccaagcaggucugcaucgccugguccuccuccuccugccacgacggcaaggccuggcuccacgucugcaucaccggcgacgacaagaacgccaccgccuccuucaucuacaacggccgccucgucgacuccgucgucuccugguccaaggagauccuccgcacccaggaguccgagugcgucugcaucaacggcaccugcaccgucgucaugaccgacggcuccgccuccggcaaggccgacaccaagauccucuucaucgaggagggcaagaucguccacaccuccacccucuccggcuccgcccagcacgucgaggagugcuccugcuacccccgcuaccccggcguccgcugcgucugccgcgacaacuggaagggcuccaaccgccccaucgucgacaucaacaucaaggaccacuccaucgucuccuccuacgucugcuccggccucgucggcgacaccccccgcaagaacgacuccuccuccuccucccacugccucgaccccaacaacgaggagggcggccacggcgucaagggcugggccuucgacgacggcaacgacgucuggaugggccgcaccaucaacgagaccucccgccucggcuacgagaccuucaaggucaucgagggcugguccaaccccaaguccaagcuccagaucaaccgccaggucaucgucgaccgcggcaaccgcuccggcuacuccggcaucuucuccgucgagggcaaguccugcaucaaccgcugcuucuacgucgagcucauccgcggccgcaaggaggagaccgagguccucuggaccuccaacuccaucgucgucuucugcggcaccuccggcaccuacggcaccggcuccuggcccgacggcgccgaccucaaccucaugcccaucuga

SEQ ID NO: 121610 - RNA, 1410 nt, Artificial Sequence; identical to SEQ ID NO: 117179
  derived and/or modified CDS sequence (opt2) from neuraminidase__InfluenzaA__AIJ10799

SEQ ID NO: 121611 - RNA, 1410 nt, Artificial Sequence
  derived and/or modified CDS sequence (opt2) from neuraminidase__InfluenzaA__AIJ10800
augaaccccaaccagaagaucaucaccaucggcuccgucucccucaccaucuccaccaucugcuucuucaugcagaucgccauccucaucaccaccgucacccuccacuucaagcaguacgaguucaacuccucccccaacaaccaggucaugcucugcgagcccaccaucaucgagcgcaacaucaccgagaucgucuaccucaccaacaccaccaucgagaaggagaucugccccaagcucgccgaguaccgcaacugguccaagccccagugcgacaucaccggcuucgcccccuucuccaaggacaacuccauccgccucuccgccggcggcgacaucugggucacccgcgagcccuacgucuccugcgaccccgacaagugcuaccaguucgcccucggccagggcaccacccucaacaacguccacuccaacaacaccguccgcgaccgcacccccuaccgcacccuccucaugaacgagcucggcguccccuuccaccucggcaccaagcaggucugcaucgccugguccuccuccuccugccacgacggcaaggccuggcuccacgucugcaucaccggcgacgacaagaacgccaccgccuccuucaucuacaacggcaagcucgucgacuccgucgucuccugguccaaggagauccuccgcacccaggaguccgagugcgucugcaucaacggcaccugcaccgucgucaugaccgacggcuccgccuccggcaaggccgacaccaagauccucuucaucgaggagggcaagaucguccacaccuccacccucuccggcuccgcccagcacgucgaggagugcuccugcuacccccgcuaccccggcguccgcugcgucugccgcgacaacuggaagggcuccaaccgccccaucgucgacaucaacaucaaggaccacuccaucgucuccuccuacgucugcuccggccucgucggcgacaccccccgcaagaacgacuccuccuccuccucccacugccucgaccccaacaacgaggagggcggccacggcgucaagggcugggccuucgacgacggcaacgacgucuggaugggccgcaccaucaacgagaccucccgccucggcuacgagaccuucaaggucaucgagggcugguccaaccccaaguccaagcuccagaucaaccgccaggucaucgucgaccgcggcaaccgcuccggcuacuccggcaucuucuccgucgagggcaaguccugcaucaaccgcugcuucuacgucgagcucauccgcggccgcaaggaggagaccgagguccucuggaccuccaacuccaucgucgucuucugcggcaccuccggcaccuacggcaccggcuccuggcccgacggcgccgaccucaaccucaugcccaucuga

SEQ ID NO: 121612 - RNA, 1410 nt, Artificial Sequence; identical to SEQ ID NO: 118182
  derived and/or modified CDS sequence (opt2) from neuraminidase__InfluenzaA__AIJ10801

SEQ ID NO: 121613 - RNA, 1410 nt, Artificial Sequence; identical to SEQ ID NO: 118182
  derived and/or modified CDS sequence (opt2) from neuraminidase__InfluenzaA__AIJ10803

SEQ ID NO: 121614 - RNA, 1410 nt, Artificial Sequence; identical to SEQ ID NO: 118182
  derived and/or modified CDS sequence (opt2) from neuraminidase__InfluenzaA__AIJ10804

SEQ ID NO: 121615 - RNA, 1410 nt, Artificial Sequence; identical to SEQ ID NO: 118182
  derived and/or modified CDS sequence (opt2) from neuraminidase__InfluenzaA__AIJ10805

SEQ ID NO: 121616 - RNA, 1410 nt, Artificial Sequence
  derived and/or modified CDS sequence (opt2) from neuraminidase__InfluenzaA__AIJ10806
augaaccccaaccagaagaucaucaccaucggcuccgucucccucaccaucuccaccaucugcuucuucaugcagaucgccauccucaucaccaccgucacccuccacuucaagcaguacgaguucaacuccccccccaacaaccaggucaugcucugcgagcccaccaucaucgagcgcaacaucaccgagaucgucuaccucaccaacaccaccaucgagaaggagaucugccccaagcccgccgaguaccgcaacugguccaagccccagugcggcaucaccggcuucgcccccuucuccaaggacaacuccauccgccucuccgccggcggcgacaucugggucacccgcgagcccuacgucuccugcgaccccgacaagugcuaccaguucgcccucggccagggcaccacccucaacaacguccacuccaacaacaccguccgcgaccgcacccccuaccgcacccuccucaugaacgagcucggcguccccuuccaccucggcaccaagcaggucugcaucgccugguccuccuccuccugccacgacggcaaggccuggcuccacgucugcaucaccggcgacgacaagaacgccaccgccuccuucaucuacaacggccgccucgucgacuccgucgucuccugguccaaggagauccuccgcacccaggaguccgagugcgucugcaucaacggcaccugcaccgucgucaugaccgacggcuccgccuccggcaaggccgacaccaagauccucuucaucgaggagggcaagaucguccacaccuccacccucuccggcuccgcccagcacgucgaggagugcuccugcuacccccgcuaccccggcguccgcugcgucugccgcgacaacuggaagggcuccaaccgccccaucgucgacaucaacaucaaggaccacuccaucgucuccuccuacgucugcuccggccucgucggcgacaccccccgcaagaacgacuccuccuccaucucccacugccucgaccccaacaacgaggagggcggccacggcgucaagggcugggccuucgacgacggcaacgacgucuggaugggccgcaccaucaacgagaccucccgccucggcuacgagaccuucaaggucaucgagggcugguccaaccccaaguccaagcuccagaucaaccgccaggucaucgucgaccgcggcgaccgcuccggcuacuccggcaucuucuccgucgagggcaaguccugcaucaaccgcugcuucuacgucgagcucauccgcggccgcaaggaggagaccgagguccucuggaccuccaacuccaucgucgucuucugcggcaccuccggcaccuacggcaccggcuccuggcccgacggcgccgaccucaaccucaugcccaucuga

SEQ ID NO: 121617 - RNA, 1410 nt, Artificial Sequence
  derived and/or modified CDS sequence (opt2) from neuraminidase__InfluenzaA__AIJ10807
augaaccccaaccagaagaucaucaccaucggcuccgucucccucaccaucuccaccaucugcuucuucaugcagaucgccauccucaucaccaccgucacccuccacuucaagcaguacgaguucaacuccccccccaacaaccaggucaugcucugcgagcccaccaucaucgagcgcaacaucaccgagaucgucuaccucaccaacaccaccaucgagaaggagaucugccccaagcccgccgaguaccgcaacugguccaagccccagugcggcaucaccggcuucgcccccuucuccaaggacaacuccauccgccucuccgccggcggcgacaucugggucacccgcgaggccuacgucuccugcgaccccgacaagugcuaccaguucgcccucggccagggcaccacccucaacaacguccacuccaacaacaccguccgcgaccgcacccccuaccgcacccuccucaugaacgagcucggcguccccuuccaccucggcaccaagcaggucugcaucgccugguccuccuccuccugccacgacggcaaggccuggcuccacgucugcaucaccggcgacgacaagaacgccaccgccuccuucaucuacaacggccgccucgucgacuccgucgucuccugguccaaggagauccuccgcacccaggaguccgagugcgucugcaucaacggcaccugcaccgucgucaugaccgacggcuccgccuccggcaaggccgacaccaagauccucuucaucgaggagggcaagaucguccacaccuccacccucuccggcuccgcccagcacgucgaggagugcuccugcuacccccgcuaccccggcguccgcugcgucugccgcgacaacuggaagggcuccaaccgccccaucgucgacaucaacaucaaggaccacuccaucgucuccuccuacgucugcuccggccucgucggcgacaccccccgcaagaacgacuccuccuccuccucccacugccucgaccccaacaacgaggagggcggccacggcgucaagggcugggccuucgacgacggcaacgacgucuggaugggccgcaccaucaacgagaccucccgccucggcuacgagaccuucaaggucaucgagggcugguccaaccccaaguccaagcuccagaucaaccgccaggucaucgucgaccgcggcgaccgcuccggcuacuccggcaucuucuccgucgagggcaaguccugcaucaaccgcugcuucuacgucgagcucauccgcggccgcaaggaggagaccgagguccucuggaccuccaacuccaucgucgucuucugcggcaccuccggcaccuacggcaccggcuccuggcccgacggcgccgaccucaaccucaugcccaucuga

SEQ ID NO: 121618 - RNA, 1410 nt, Artificial Sequence
  derived and/or modified CDS sequence (opt2) from neuraminidase__InfluenzaA__AIJ10808
augaaccccaaccagaagaucaucaccaucggcuccgucucccucaccaucuccaccaucugcuucuucaugcagaucgccauccucaucaccaccgucacccuccacuucaagcaguacgaguucaacuccccccccaacaaccaggucaugcucugcgagcccaccaucaucgagcgcaacaucaccgagaucgucuaccucaccaacaccaccaucgagaaggagaucugccccaagcccgccgaguaccgcaacugguccaagccccagugcggcaucaccggcuucgcccccuucuccaaggacaacuccauccgccucuccgccggcggcgacaucugggucacccgcgagcccuacgucuccugcgaccccgacaagugcuaccaguucgcccucggccagggcaccacccucaacaacguccacuccaacaacaccguccgcgaccgcacccccuaccgcacccuccucaugaacgagcucggcguccccuuccaccucggcaccaagcaggucugcaucgccugguccuccuccuccugccacgacggcaaggccuggcuccacgucugcaucaccggcgacgacaagaacgccaccgccuccuucaucuacaacggccgccucgucgacuccgucgucuccugguccaaggagguccuccgcacccaggaguccgagugcgucugcaucaacggcaccugcaccgucgucaugaccgacggcuccgccuccggcaaggccgacaccaagauccucuucaucgaggagggcaagaucguccacaccuccacccucuccggcuccgcccagcacgucgaggagugcuccugcuacccccgcuaccccggcguccgcugcgucugccgcgacaacuggaagggcuccaaccgccccaucgucgacaucaacaucaaggaccacuccaucgucuccuccuacgucugcuccggccucgucggcgacaccccccgcaagaacgacuccuccuccuccucccacugccucgaccccaacaacgaggagggcggccacggcgucaagggcugggccuucgacgacggcaacgacgucuggaugggccgcaccaucaacgagaccucccgccucggcuacgagaccuucaaggucaucgagggcugguccaaccccaaguccaagcuccagaucaaccgccaggucaucgucgaccgcggcgaccgcuccggcuacuccggcaucuucuccgucgagggcaaguccugcaucaaccgcugcuucuacgucgagcucauccgcggccgcaaggaggagaccgagguccucuggaccuccaacuccaucgucgucuucugcggcaccuccggcaccuacggcaccggcuccuggcccgacggcgccgaccucaaccucaugcccaucuga

SEQ ID NO: 121619 - RNA, 1410 nt, Artificial Sequence; identical to SEQ ID NO: 118182
  derived and/or modified CDS sequence (opt2) from neuraminidase__InfluenzaA__AIJ10809

SEQ ID NO: 121620 - RNA, 1410 nt, Artificial Sequence; identical to SEQ ID NO: 118182
  derived and/or modified CDS sequence (opt2) from neuraminidase__InfluenzaA__AIJ10810

SEQ ID NO: 121621 - RNA, 1410 nt, Artificial Sequence
  derived and/or modified CDS sequence (opt2) from neuraminidase__InfluenzaA__AIJ10812
augaaccccaaccagaagaucaucaccaucggcuccgucucccucaccaucuccaccaucugcuucuucaugcagaucgccauccucaucaccaccgucacccuccacuucaagcaguacgaguucaacuccccccccaacaaccaggucaugcucugcgagcccaccaucauggagcgcaacgucaccgagaucgucuaccucaccaacaccaccaucgagaaggagaucugccccaagcccgccgaguaccgcaacugguccaagccccagugcggcaucaccggcuucgcccccuucuccaaggacaacuccauccgccucuccgccggcggcgacaucugggucacccgcgagcccuacgucuccugcgaccccgacaagugcuaccaguucgcccucggccagggcaccacccucaacaacguccacuccaacaacaccguccgcgaccgcacccccuaccgcacccuccucaugaacgagcucggcguccccuuccaccucggcaccaagcaggucugcaucgccugguccuccuccuccugccacgacggcaaggccuggcuccacgucugcaucaccggcgacgacaagaacgccaccgccuccuucaucuacaacggccgccucgucgacuccgucgucuccugguccaaggagauccuccgcacccaggaguccgagugcgucugcaucaacggcaccugcaccgucgucaugaccgacggcuccgccuccggcaaggccgacaccaagauccucuucaucgaggagggcaagaucguccacaccuccacccucuccggcuccgcccagcacgucgaggagugcuccugcuacccccgcuaccccggcguccgcugcgucugccgcgacaacuggaagggcuccaaccgccccaucgucgacaucaacaucaaggaccacuccaucgucuccuccuacgucugcuccggccucgucggcgacaccccccgcaagaacgacuccuccuccuccucccacugccucgaccccaacaacgaggagggcggccacggcgucaagggcugggccuucgacgacggcaacgacgucuggaugggccgcaccaucaacgagaccucccgccucggcuacgagaccuucaaggucaucgagggcugguccaaccccaaguccaagcuccagaucaaccgccaggucaucgucgaccgcggcgaccgcuccggcuacuccggcaucuucuccgucgagggcaaguccugcaucaaccgcugcuucuacgucgagcucauccgcggccgcaaggaggagaccgagguccucuggaccuccaacuccaucgucgucuucugcggcaccuccggcaccuacggcaccggcuccuggcccgacggcgccgaccucaaccucaugcccaucuga

SEQ ID NO: 121622 - RNA, 1410 nt, Artificial Sequence
  derived and/or modified CDS sequence (opt2) from neuraminidase__InfluenzaA__AIJ10813
augaaccccaaccagaagaucaucaccaucggcuccgucucccucaccaucuccaccaucugcuucuucaugcagaucgccauccucaucaccaccgucacccuccacuucaagcaguacgaguucaacuccccccccaacaaccaggucaugcucugcgagcccaccaucauggagcgcaacgucaccgagaucgucuaccucaccaacaccaccaucgagaaggagaucugccccaagcccgccgaguaccgcaacugguccaagccccagugcggcaucaccggcuucgcccccuucuccaaggacaacuccauccgccucuccgccggcggcgacaucugggucacccgcgagcccuacgucuccugcgaccccgacaagugcuaccaguucgcccucggccagggcaccacccucaacaacguccacuccaacaaccccguccgcgaccgcacccccuaccgcacccuccucaugaacgagcucggcguccccuuccaccucggcaccaagcaggucugcaucgccugguccuccuccuccugccacgacggcaaggccuggcuccacgucugcaucaccggcgacgacaagaacgccaccgccuccuucaucuacaacggccgccucgucgacuccgucgucuccugguccaaggagauccuccgcacccaggaguccgagugcgucugcaucaacggcaccugcaccgucgucaugaccgacggcuccgccuccggcaaggccgacaccaagauccucuucaucgaggagggcaagaucguccacaccuccacccucuccggcuccgcccagcacgucgaggagugcuccugcuacccccgcuaccccggcguccgcugcgucugccgcgacaacuggaagggcuccaaccgccccaucgucgacaucaacaucaaggaccacuccaucgucuccuccuacgucugcuccggccucgucggcgacaccccccgcaagaacgacuccuccuccuccucccacugccucgaccccaacaacgaggagggcggccacggcgucaagggcugggccuucgacgacggcaacgacgucuggaugggccgcaccaucaacgagaccucccgccucggcuacgagaccuucaaggucaucgagggcugguccaaccccaaguccaagcuccagaucaaccgccaggucaucgucgaccgcggcgaccgcuccggcuacuccggcaucuucuccgucgagggcaaguccugcaucaaccgcugcuucuacgucgagcucauccgcggccgcaaggaggagaccgagguccucuggaccuccaacuccaucgucgucuucugcggcaccuccggcaccuacggcaccggcuccuggcccgacggcgccgaccucaaccucaugcccaucuga

SEQ ID NO: 121623 - RNA, 1410 nt, Artificial Sequence
  derived and/or modified CDS sequence (opt2) from neuraminidase__InfluenzaA__AIJ10814
augaaccccaaccagaagaucaucaccaucggcuccgucucccucaccaucuccaccaucugcuucuucaugcagaucgccauccucaucaccaccgucacccuccacuucaagcaguacgaguucaacuccccccccaacaaccaggucaugcucugcgagcccaccaucgucgagcgcaacaucaccgagaucgucuaccucaccaacaccaccaucgagaaggagaucugccccaagcccgccgaguaccgcaacugguccaagccccagugcggcaucaccggcuucgcccccuucuccaaggacaacuccauccgccucuccgccggcggcgacaucugggucacccgcgagcccuacgucuccugcgaccccgacaagugcuaccaguucgcccucggccagggcaccacccucaacaacguccacuccaacaacaccguccgcgaccgcacccccuaccgcacccuccucaugaacgagcucggcguccccuuccaccucggcaccaagcaggucugcaucgccugguccuccuccuccugccacgacggcaaggccuggcuccacgucugcaucaccggcgacgacaagaacgccaccgccuccuucaucuacaacggccgccucgucgacuccgucgucuccugguccaaggagauccuccgcacccaggaguccgagugcgucugcaucaacggcaccugcaccgucgucaugaccgacggcuccgccuccggcaaggccgacaccaagauccucuucaucgaggagggcaagaucguccacaccuccacccucuccggcuccgcccagcacgucgaggagugcuccugcuacccccgcuaccccggcguccgcugcgucugccgcgacaacuggaagggcuccaaccgccccaucgucgacaucaacaucaaggaccacuccaucgucuccuccuacgucugcuccggccucgucggcgacaccccccgcaagaacgacuccuccuccuccucccacugccucgaccccaacaacgaggagggcggccacggcgucaagggcugggccuucgacgacggcaacgacgucuggaugggccgcaccaucaacgagaccucccgccucggcuacgagaccuucaaggucaucgagggcugguccaaccccaaguccaagcuccagaucaaccgccaggucaucgucgacaagggcgaccgcuccggcuacuccggcaucuucuccgucgagggcaaguccugcaucaaccgcugcuucuacgucgagcucauccgcggccgcaaggaggagaccgagguccucuggaccuccaacuccaucgucgucuucugcggcaccuccggcaccuacggcaccggcuccuggcccgacggcgccgaccucaaccucaugcccaucuga

SEQ ID NO: 121624 - RNA, 1410 nt, Artificial Sequence
  derived and/or modified CDS sequence (opt2) from neuraminidase__InfluenzaA__AIJ10815
augaaccccaaccagaagaucaucaccaucggcuccgucucccucaccaucuccaccaucugcuucuucaugcagaucgccauccucaucaccaccgucacccuccacuucaagcaguacgaguucaacuccccccccaacaaccaggucaugcucugcgagcccaccaucaucgagcgcaacaucaccgagaucgucuaccucaccaacaccaccaucgagaaggagaucugccccaagcccgccgaguaccgcaacugguccaagccccagugcggcaucaccggcuucgcccccuucuccaaggacaacuccauccgccucuccgccggcggcgacaucugggucacccgcgagcccuacgucuccugcgaccccgacaagugcuaccaguucgcccucggccagggcaccacccucaacaacguccacuccaacaacaccguccgcgaccgcacccccuaccgcacccuccucaugaacgagcucggcguccccuuccaccucggcaccaagcaggucugcaucgccugguccuccuccuccugccacgacggcaaggccuggcuccacgucugcaucaccggcgacgacaagaacgccaccgccuccuucaucuacaacggccgccucgucgacuccgucgucuccugguccaaggagauccuccgcacccaggaguccgagugcgucugcaucaacggcaccugcaccgucgucaugaccgacggcuccgccuccggcaaggccgacaccaagauccucuucaucgaggagggcaagaucguccacaccuccacccucuccggcuccgcccagcacgucgaggagugcuccugcuacccccgcuaccccggcguccgcugcgucugccgcgacaacuggaagggcuccaaccgccccaucgucgacaucaacaucaaggaccacuccaucgucuccuccuacgucugcuccggccucgucggcgacaccccccgcaagaacgacuccuccuccuccucccacugccucgaccccaacaacgaggagggcggccacggcgucaagggcugggccuucgacgacggcaacgacgucuggaugggccgcaccaucaacgagaccucccgccucggcuacgagaccuucaaggucaucgagggcugguccaaccccaaguccaagcuccagaucaaccgccaggucaucgucgaccgcggcgaccgcuccggcuacuccggcaucuucuccgucgagggcaaguccugcaucaaccgcugcuucuacgucgagcucauccgcggccgcaaggaggagaacgagguccucuggaccuccaacuccaucgucgucuucugcggcaccuccggcaccuacggcaccggcuccuggcccgacggcgccgaccucaaccucaugcccaucuga

SEQ ID NO: 121625 - RNA, 1410 nt, Artificial Sequence
  derived and/or modified CDS sequence (opt2) from neuraminidase__InfluenzaA__AIJ10816
augaaccccaaccagaagaucaucaccaucggcuccgucucccucaccaucuccaccaucugcuucuucaugcagaucgccauccucaucaccaccgucacccuccacuucaagcaguacgaguucaacuccccccccaacaaccaggucaugcucugcgagcccaccaucaucgagcgcaacaucaccgagaucgucuaccucaccaacaccaccaucgagaaggagaucugccccaagcccgccgaguaccgcaacugguccaagccccagugcggcaucaccggcuucgcccccuucuccaaggacaacuccauccgccucuccgccggcggcgacaucugggucacccgcgagcccuacgucuccugcgaccccgacaagugcuaccaguucgcccucggccagggcaccacccucaacaacguccacuccaacaacaccguccgcgaccgcacccccuaccgcacccuccucaugaacgagcucggcguccccuuccaccucggcaccaagcaggucugcaucgccugguccuccuccuccugccacgacggcaaggccuggcuccacgucugcaucaccggcgacgacaagaacgccaccgccuccuucaucuacaacggccgccucgucgacuccgucgucuccugguccaaggagauccuccgcacccaggaguccgagugcgucugcaucaacggcaccugcaccgucgucaugaccgacggcuccgccuccggcaaggccgacaccaagauccucuucaucgaggagggcaagaucguccacaccuccacccucuccggcuccgcccagcacgucgaggagugcuccugcuacccccgcuaccccggcguccgcugcgucugccgcgacaacuggaagggcuccaaccgccccaucgucgacaucaacaucaaggaccacuccaucgucuccuccuacgucugcuccggccucgucggcgacaccccccgcaagaacgacuccuccuccuccucccacugccucgaccccaacaacgaggagggcggccacggcgucaagggcugggccuucgacgacggcaacgacgucuggaugggccgcaccaucaacgagaccucccgccucggcuacgagaccuucaaggucaucgagggcugguccaaccccaaguccaagcuccagaucaaccgccaggucaucgucgaccgcggcgaccgcuccggcuacuccggcaucuucuccgucgagggcaagggcugcaucaaccgcugcuucuacgucgagcucauccgcggccgcaaggaggagaccgagguccucuggaccuccaacuccaucgucgucuucugcggcaccuccggcaccuacggcaccggcuccuggcccgacggcgccgaccucaaccucaugcccaucuga

SEQ ID NO: 121626 - RNA, 1410 nt, Artificial Sequence; identical to SEQ ID NO: 118182
  derived and/or modified CDS sequence (opt2) from neuraminidase__InfluenzaA__AIJ10817

SEQ ID NO: 121627 - RNA, 1410 nt, Artificial Sequence; identical to SEQ ID NO: 118182
  derived and/or modified CDS sequence (opt2) from neuraminidase__InfluenzaA__AIJ10818

SEQ ID NO: 121628 - RNA, 1410 nt, Artificial Sequence
  derived and/or modified CDS sequence (opt2) from neuraminidase__InfluenzaA__AIJ10819
augaaccccaaccagaagaucaucaccaucggcuccgucucccucaccaucuccaccaucugcuucuucaugcagaucgccauccucaucaccaccgucgcccuccacuucaagcaguacgaguucaacuccccccccaacaaccaggucaugcucugcgagcccaccaucaucgagcgcaacaucaccgagaucgucuaccucaccaacaccaccaucgagaaggagaucugccccaagcccgccgaguaccgcaacugguccaagccccagugcggcaucaccggcuucgcccccuucuccaaggacaacuccauccgccucuccgccggcggcgacaucugggucacccgcgagcccuacgucuccugcgaccccgacaagugcuaccaguucgcccucggccagggcaccacccucaacaacguccacuccaacaacaccguccgcgaccgcacccccuaccgcacccuccucaugaacgagcucggcguccccuuccaccucggcaccaagcaggucugcaucgccugguccuccuccuccugccacgacggcaaggccuggcuccacgucugcaucaccggcgacgacaagaacgccaccgccuccuucaucuacaacggccgccucgucgacuccgucgucuccugguccaaggagauccuccgcacccaggaguccgagugcgucugcaucaacggcaccugcaccgucgucaugaccgacggcuccgccuccggcaaggccaacaccaagauccucuucaucgaggagggcaagaucguccacaccuccacccucuccggcuccgcccagcacgucgaggagugcuccugcuacccccgcuaccccggcguccgcugcgucugccgcgacaacuggaagggcuccaaccgccccaucgucgacaucaacaucaaggaccacuccaucgucuccuccuacgucugcuccggccucgucggcgacaccccccgcaagaacgacuccuccuccuccucccacugccucgaccccaacaacgaggagggcggccacggcgucaagggcugggccuucgacgacggcaacgacgucuggaugggccgcaccaucaacgagaccucccgccucggcuacgagaccuucaaggucaucgagggcugguccaaccccaaguccaagcuccagaucaaccgccaggucaucgucgaccgcggcgaccgcuccggcuacuccggcaucuucuccgucgagggcaaguccugcaucaaccgcugcuucuacgucgagcucauccgcggccgcaaggaggagaccgagguccucuggaccuccaacuccaucgucgucuucugcggcaccuccggcaccuacggcaccggcuccuggcccgacggcgccgaccucaaccucaugcccaucuga

SEQ ID NO: 121629 - RNA, 1410 nt, Artificial Sequence; identical to SEQ ID NO: 118182
  derived and/or modified CDS sequence (opt2) from neuraminidase__InfluenzaA__AIJ10820

SEQ ID NO: 121630 - RNA, 1410 nt, Artificial Sequence; identical to SEQ ID NO: 118182
  derived and/or modified CDS sequence (opt2) from neuraminidase__InfluenzaA__AIJ10821

SEQ ID NO: 121631 - RNA, 1410 nt, Artificial Sequence
  derived and/or modified CDS sequence (opt2) from neuraminidase__InfluenzaA__AIJ10822
augaaccccaaccagaagaucaucaccaucggcuccgucucccucaccaucuccaccaucugcuucuucaugcagaucgccauccucaucaccaccgucacccuccacuucaagcaguacgaguucaacuccccccccaacaaccaggucaugcucugcgagcccaccaucaucgagcgcaacaucaccgagaucgucuaccucaccaacaccaccaucgagaaggagaucugccccaagcccgccgaguaccgcaacugguccaagccccagugcggcaucaccggcuucgcccccuucuccaaggacaacuccauccgccucuccgccggcggcgacaucugggucacccgcgagcccuacgucuccugcgaccccgacaagugcuaccaguucgcccucggccagggcaccacccucaacaacguccacuccaacaacaccguccgcgaccgcacccccuaccgcacccuccucaugaacgagcucggcguccccuuccaccucggcaccaagcaggucugcaucgccugguccuccuccuccugccacgacggcaaggccuggcuccacgucugcaucaccggcgacgacaagaacgccaccgccuccuucaucuacaacggccgccucgucgacuccgucgucuccugguccaaggacauccuccgcacccaggaguccgagugcgucugcaucaacggcaccugcaccgucgucaugaccgacggcuccgccuccggcaaggccgacaccaagauccucuucaucgaggagggcaagaucguccacaccuccacccucuccggcuccgcccagcacgucgaggagugcuccugcuacccccgcuaccccggcguccgcugcgucugccgcgacaacuggaagggcuccaaccgccccaucgucgacaucaacaucaaggaccacuccaucgucuccuccuacgucugcuccggccucgucggcgacaccccccgcaagaacgacuccuccuccuccucccacugccucgaccccaacaacgaggagggcggccacggcgucaagggcugggccuucgacgacggcaacgacgucuggaugggccgcaccaucaacgagaccucccgccucggcuacgagaccuucaaggucaucgagggcugguccaaccccaaguccaagcuccagaucaaccgccaggucaucgucgaccgcggcgaccgcuccggcuacuccggcaucuucuccgucgagggcaaguccugcaucaaccgcugcuucuacgucgagcucauccgcggccgcaaggaggagaacgagguccucuggaccuccaacuccaucgucgucuucugcggcaccuccggcaccuacggcaccggcuccuggcccgacggcgccgaccucaaccucaugcccaucuga

SEQ ID NO: 121632 - RNA, 1410 nt, Artificial Sequence
  derived and/or modified CDS sequence (opt2) from neuraminidase__InfluenzaA__AIJ10823
augaaccccaaccagaagaucaucaccaucggcuccgucucccucaccaucuccaccaucugcuucuucaugcagaucgccauccucaucaccaccgucacccuccacuucaaccaguacgaguucaacuccccccccaacaaccaggucaugcucugcgagcccaccaucaucgagcgcaacaucaccgagaucgucuaccucaccaccaccaccaucgagaaggagaucugccccaagcccgccgaguaccgcaacugguccaagccccagugcggcaucaccggcuucgcccccuucuccaaggacaacuccauccgccucuccgccggcggcgacaucugggucacccgcgagcccuacgucuccugcgaccccgacaagugcuaccaguucgcccucggccagggcaccacccucaacaacguccacuccaacaacaccguccgcgaccgcacccccuuccgcacccuccucaugaacgagcucggcguccccuuccaccucggcaccaagcaggucugcaucgccugguccuccuccuccugccacgacggcaaggccuggcuccacgucugcaucaccggcgacgacaagaacgccaccgccuccuucaucuacaacggccgccucgucgacuccgucgucuccugguccaaggagauccuccgcacccaggaguccgagugcgucugcaucaacggcaccugcaccgucgucaugaccgacggcuccgccuccggcaaggccgucaccaagauccucuucaucgaggagggcaagaucguccacaccuccacccucuccggcuccgcccagcacgucgaggagugcuccugcuacccccgcuaccccggcguccgcugcgucugccgcgacaacuggaagggcuccaaccgccccaucgucgacaucaacaucaaggaccacuccaucgucuccggcuacgucugcuccggccucgucggcgacaccccccgcaagaacgacuccuccuccuccucccacugccucaaccccaacaacgaggagggcggccacggcgucaagggcugggccuucgacgacggcaacgacgucuggaugggccgcaccaucaacgagaccucccgccucggcuacgagaccuucaaggucaucgagggcugguccaaccccaaguccaagcuccagaucaaccgccaggucaucgucgaccgcggcgaccgcuccggcuacuccggcaucuucuccgucgagggcaaguccugcaucaaccgcugcuucuacgucgagcucauccgcggccgcaaggaggagaccgagguccucuggaccuccaacuccaucgucgucuucugcggcaccuccggcaccuacggcaccggcuccuggcccgacggcgccgaccucaaccucaugcccaucuga

SEQ ID NO: 121633 - RNA, 1410 nt, Artificial Sequence
  derived and/or modified CDS sequence (opt2) from neuraminidase__InfluenzaA__AIJ10824
augaaccccaaccagaagaucaucaccaucggcuccgucucccucaccaucuccaccaucugcuucuucaugcagaucgccauccucaucaccaccgucacccuccacuucaagcaguacgaguucaacuccccccccaacaaccaggucguccucugcgagcccaccaucaucgagcgcaacaucaccgagaucgucuaccucaccaacaccaccaucgagaaggagaucugccccaagcccgccgaguaccgcaacugguccaagccccagugcggcaucaccggcuucgcccccuucuccaaggacaacuccauccgccucuccgccggcggcgacaucugggucacccgcgagcccuacgucuccugcgaccccgacaagugcuaccaguucgcccucggccagggcaccacccucaacaacguccacuccaacaacaccguccgcgaccgcacccccuaccgcacccuccucaugaacgagcucggcguccccuuccaccucggcaccaagcaggucugcaucgccugguccuccuccuccugccacgacggcaaggccuggcuccacgucugcaucaccggcgacgacaagaacgccaccgccuccuucaucuacaacggccgccucgucgacuccgucgucuccugguccaaggagauccuccgcacccaggaguccgagugcgucugcaucaacggcaccugcaccgucgucaugaccgacggcuccgccuccggcaaggccgacaccaagauccucuucaucgaggagggcaagaucguccacaccuccacccucuccggcuccgcccagcacgucgaggagugcuccugcuacccccgcuaccccggcguccgcugcgucugccgcgacaacuggaagggcuccaaccgccccaucgucgacaucaacaucaaggaccacuccaucgucuccuccuacgucugcuccggccucgucggcgacaccccccgcaagaacgacuccuccuccuccucccacugccucgaccccaacaacgaggagggcggccacggcgucaagggcugggccuucgacgacggcaacgacgucuggaugggccgcaccaucaacgagaccucccgccucggcuacgagaccuucaaggucaucgagggcugguccaaccccaaguccaagcuccagaucaaccgccaggucaucgucgaccgcggcgaccgcuccggcuacuccggcaucuucuccgucgagggcaaguccugcaucaaccgcugcuucuacgucgagcucauccgcggccgcaaggaggagaccgagguccucuggaccuccaacuccaucgucgucuucugcggcaccuccggcaccuacggcaccggcuccuggcccgacggcgccgaccucaaccucaugcccaucuga

SEQ ID NO: 121634 - RNA, 1410 nt, Artificial Sequence
  derived and/or modified CDS sequence (opt2) from neuraminidase__InfluenzaA__AIJ10827
augaaccccaaccagaagaucaucaccaucggcuccgucucccucaccaucuccaccaucugcuucuucaugcagaucgccauccucaucaccaccgucacccuccacuucaagcaguacgaguucaacuccccccccaacaaccaggucaugcucugcgagcccaccaucaucgagcgcaacaucaccgagaucgucuaccucaccaacaccaccaucgagaaggagaucugccccaagcccgccgaguaccgcaacugguccaagccccagugcggcaucaccggcuucgcccccuucuccaaggacaacuccauccgccucuccgccggcggcgacaucugggucacccgcgagcccuacgucuccugcgaccccgacaagugcuaccaguucgcccucggccagggcaccacccucaacaacguccacuccaacaacaccguccgcgaccgcacccccuaccgcacccuccucaugaacgagcucggcguccccuuccaccucggcaccaagcaggucugcaucgccugguccuccuccuccugccacgacggcaaggccuggcuccacgucugcaucaccggcgacgacaagaacgccaccgccuccuucaucuacaacggccgccucgucgacuccgucgucuccugguccaaggacauccuccgcacccaggaguccgagugcgucugcaucaacggcaccugcaccgucgucaugaccgacggcuccgccuccggcaaggccgacaccaagauccucuucaucgaggagggcaagaucguccacaccuccacccucuccggcuccgcccagcacgucgaggagugcuccugcuacccccgcuaccccggcguccgcugcgucugccgcgacaacuggaagggcuccaaccgccccaucgucgacaucaacaucaaggaccacuccaucgucuccuccuacgucugcuccggccucgucggcgacaccccccgcaagaacgacuccuccuccuccucccacugccucgaccccaacaacgaggagggcggccacggcgucaagggcugggccuucgacgacggcaacgacgucuggaugggccgcaccaucaacgagaccucccgccucggcuacgagaccuucaaggucaucgagggcugguccaaccccaaguccaagcuccagaucaaccgccaggucaucgucgaccgcggcgaccgcuccggcuacuccggcaucuucuccaucgagggcaaguccugcaucaaccgcugcuucuacgucgagcucauccgcggccgcaaggaggagaccgagguccucuggaccuccaacuccaucgucgucuucugcggcaccuccggcaccuacggcaccggcuccuggcccgacggcgccgaccucaaccucaugcccaucuga

SEQ ID NO: 121635 - RNA, 1410 nt, Artificial Sequence
  derived and/or modified CDS sequence (opt2) from neuraminidase__InfluenzaA__AIJ10828
augaaccccaaccagaagaucaucaccaucggcuccgucucccucaccaucuccaccaucugcuucuucaugcagaucgccauccucaucaccaccgucacccuccacuucaagcaguacgaguucaacuccccccccaacaaccaggucaugcucugcgagcccaccaucaucgagcgcaacaucaccgagaucgucuaccucaccaacaccaccaucgagaaggagaucugccccaagcccgccgaguaccgcaacugguccaagccccagugcggcaucaccggcuucgcccccuucuccaaggacaacuccauccgccucuccgccggcggcgacaucugggucacccgcgagcccuacgucuccugcgaccccgacaagugcuaccaguucgcccucggccagggcaccacccucaacaacguccacuccaacaacaccguccgcgaccgcacccccuaccgcacccuccucaugaacgagcucggcguccccuuccaccucggcaccaagcaggucugcaucgccugguccuccuccuccugccacgacggcaaggccuggcuccacgucugcaucaccggcgacgacaagaacgccaccgccuccuucaucuacaacggccgccucgucgacuccgucgucuccugguccaaggacauccuccgcacccaggaguccgagugcgucugcaucaacggcaccugcaccgucgucaugaccgacggcuccgccuccggcaaggccgacaccaagauccucuucaucgaggagggcaagaucguccacaccuccacccucuccggcuccgcccagcacgucgaggagugcuccugcuacccccgcuaccccggcguccgcugcgucugccgcgacaacuggaagggcuccaaccgccccaucgucgacaucaacaucaaggaccacuccaucgucuccuccuacgucugcuccggccucgucggcgacaccccccgcaagaacgacuccuccuccuccucccacugccucgaccccaacaacgaggagggcggccacggcgucaagggcugggccuucgacgacggcaacgacgucuggaugggccgcaccaucaacgagaccucccgccucggcuacgagaccuucaaggucaucgagggcugguccaaccccaaguccaagcuccagaucaaccgccaggucaucgucgaccgcggcgaccgcuccggcuacuccggcaucuucuccaucgagggcaaguccugcaucaaccgcugcuucuacgucgagcucauccgcggccgcaaggaggagaccgaggucgucuggaccuccaacuccaucgucgucuucugcggcaccuccggcaccuacggcaccggcuccuggcccgacggcgccgaccucaaccucaugcccaucuga

SEQ ID NO: 121636 - RNA, 1410 nt, Artificial Sequence
  derived and/or modified CDS sequence (opt2) from neuraminidase__InfluenzaA__AIJ10829
augaaccccaaccagaagaucaucaccaucggcuccgucucccucaccaucuccaccaucugcuucuucaugcagaucgccauccucaucaccaccgucacccuccacuucaagcaguacgaguucaacuccccccccaacaaccaggucaugcucugcgagcccaccaucaucgagcgcaacaucaccgagaucgucuaccucaccaacaccaccaucgagaaggagaucugccccaagcccgccgaguaccgcaacugguccaagccccagugcggcaucaccggcuucgcccccuucuccaaggacaacuccauccgccucuccgccggcggcgacaucugggucacccgcgagcccuacgucuccugcgaccccgacaacugcuaccaguucgcccucggccagggcaccacccucaacaacguccacuccaacaacaccguccgcgaccgcacccccuaccgcacccuccucaugaacgagcucggcguccccuuccaccucggcaccaagcaggucugcaucgccugguccuccuccuccugccacgacggcaaggccuggcuccacgucugcaucaccggcgacgacaagaacgccaccgccuccuucaucuacaacggccgccucgucgacuccgucgucuccugguccaaggacauccuccgcacccaggaguccgagugcgucugcaucaacggcaccugcaccgucgucaugaccgacggcuccgccuccggcaaggccgacaccaagauccucuucaucgaggagggcaagaucguccacaccuccacccucuccggcuccgcccagcacgucgaggagugcuccugcuacccccgcuaccccggcguccgcugcgucugccgcgacaacuggaagggcuccaaccgccccaucgucgacaucaacaucaaggaccacuccaucgucuccuccuacgucugcuccggccucgucggcgacaccccccgcaagaacgacuccuccuccuccucccacugccucgaccccaacaacgaggagggcgaccacggcgucaagggcugggccuucgacgacggcaacgacgucuggaugggccgcaccaucaacgagaccucccgccucggcuacgagaccuucaaggucaucgagggcugguccaaccccaaguccaagcuccagaucaaccgccaggucaucgucgaccgcggcgaccgcuccggcuacuccggcaucuucuccaucgagggcaaguccugcaucaaccgcugcuucuacgucgagcucauccgcggccgcaaggaggagaccgagguccucuggaccuccaacuccaucgucgucuucugcggcaccuccggcaccuacggcaccggcuccuggcccgacggcgccgaccucaaccucaugcccaucuga

SEQ ID NO: 121637 - RNA, 1410 nt, Artificial Sequence
  derived and/or modified CDS sequence (opt2) from neuraminidase__InfluenzaA__AIJ10830
augaaccccaaccagaagaucaucaccaucggcuccgucucccucaccaucuccaccaucugcuucuucaugcagaucgccauccucaucaccaccgucacccuccacuucaagcaguacgaguucaacuccccccccaacaaccaggucaugcucugcgagcccaccaucaucgagcgcaacaucaccgagaucgucuaccucaccaacaccaccaucgagaaggagaucugccccaagcccgccgaguacaagaacugguccaagccccagugcggcaucaccggcuucgcccccuucuccaaggacaacuccauccgccucuccgccggcggcgacaucugggucacccgcgagcccuacgucuccugcgaccccgacaagugcuaccaguucgcccucggccagggcaccacccucaacaacguccacuccaacaacaccguccgcgaccgcacccccuaccgcacccuccucaugaacgagcucggcguccccuuccaccucggcaccaagcaggucugcaucgccugguccuccuccuccugccacgacggcaaggccuggcuccacgucugcaucaccggcgacgacaagaacgccaccgccuccuucaucuacaacggccgccucgucgacuccgucgucuccugguccaaggacauccuccgcacccaggaguccgagugcgucugcaucaacggcaccugcaccgucgucaugaccgacggcuccgccuccggcaaggccgacaccaagauccucuucaucgaggagggcaagaucguccacaccuccacccucuccggcuccgcccagcacgucgaggagugcuccugcuacccccgcuaccccggcguccgcugcgucugccgcgacaacuggaagggcuccaaccgccccaucgucgacaucaacaucaaggaccacuccaucgucuccuccuacgucugcuccggccucgucggcgacaccccccgcaagaacgacuccuccuccuccucccacugccucgaccccaacaacgaggagggcggccacggcgucaagggcugggccuucgacgacggcaacgacgucuggaugggccgcaccaucaacgagaccucccgccucggcuacgagaccuucaaggucaucgagggcugguccaaccccaaguccaagcuccagaucaaccgccaggucaucgucgaccgcggcgaccgcuccggcuacuccggcaucuucuccaucgagggcaaguccugcaucaaccgcugcuucuacgucgagcucauccgcggccgcaaggaggagaccgagguccucuggaccuccaacuccaucgucgucuucugcggcaccuccggcaccuacggcaccggcuccuggcccgacggcgccgaccucaaccucaugcccaucuga

SEQ ID NO: 121638 - RNA, 1410 nt, Artificial Sequence; identical to SEQ ID NO: 121634
  derived and/or modified CDS sequence (opt2) from neuraminidase__InfluenzaA__AIJ10831

SEQ ID NO: 121639 - RNA, 1410 nt, Artificial Sequence; identical to SEQ ID NO: 121634
  derived and/or modified CDS sequence (opt2) from neuraminidase__InfluenzaA__AIJ10832

SEQ ID NO: 121640 - RNA, 1410 nt, Artificial Sequence
  derived and/or modified CDS sequence (opt2) from neuraminidase__InfluenzaA__AIJ10834
augaaccccaaccagaagaucaucaccaucggcuccgucucccucaccaucuccaccaucugcuucuucaugcagaucgccauccucaucaccaccgucacccuccacuucaagcaguacgaguucaacuccccccccaacaaccaggucaugcucugcgagcccaccaucaucgagcgcaacaucaccgagaucgucuaccucaccaacaccaccaucgagaaggagaucugccccaagcccgccgaguaccgcaacugguccaagccccagugcggcaucaccggcuucgcccccuucuccaaggacaacuccauccgccucuccgccggcggcgacaucugggucacccgcgagcccuacgucuccugcgaccccgacaagugcuaccaguucgcccucggccagggcaccacccucaacaacguccacuccaacaacaccguccgcgaccgcacccccuaccgcacccuccucaugaacgagcucggcguccccuuccaccucggcaccaagcaggucugcaucgccugguccuccuccuccugccacgacggcaaggccuggcuccacgucugcaucaccggcgacgacaagaacgccaccgccuccuucaucuacaacggccgccucgucgacuccgucgucuccugguccaaggacauccuccgcacccaggaguccgagugcgucugcaucaacggcaccugcaccgucgucaugaccgacggcuccgccuccggcaaggccgacaccaagauccucuucaucgaggagggcaagaucguccacaccuccacccucuccggcuccgcccagcacgucgaggagugcuccugcuacccccgcuaccccggcguccgcugcgucugccgcgacaacuggaagggcuccaaccgccccaucgucgacaucaacaucaaggaccacuccaucgucuccuccuacgucugcuccggccucgucggcgacaccccccgcaagaacgacuccuccuccuccucccacugccucgaccccaacaacgaggagggcggccacggcgucaagggcugggccuucgacgacggcaacgacgucuggaugggccgcaccaucaacgagaccucccgccucggcuacgagaccuucaaggucaucgagggcugguccaaccccaaguccaagcuccagaucaaccgccaggucaucgucgaccgcggcgaccgcuccggcuacuccggcaucuucuccaucgaguccaaguccugcaucaaccgcugcuucuacgucgagcucauccgcggccgcaaggaggagaccgagguccucuggaccuccaacuccaucgucgucuucugcggcaccuccggcaccuacggcaccggcuccuggcccgacggcgccgaccucaaccucaugcccaucuga

SEQ ID NO: 121641 - RNA, 1410 nt, Artificial Sequence
  derived and/or modified CDS sequence (opt2) from neuraminidase__InfluenzaA__AIJ10835
augaaccccaaccagaagaucaucaccaucggcuccgucucccucaccaucuccaccaucugcuucuucaugcagaucgccauccucaucaccaccgucacccuccacuucaagcaguacgaguucaacuccacccccaacaaccaggucaugcucugcgagcccaccaucaucgagcgcaacaucaccgagaucgucuaccucaccaacaccaccaucgagaaggagaucugccccaagcccgccgaguaccgcaacugguccaagccccagugcggcaucaccggcuucgcccccuucuccaaggacaacuccauccgccucuccgccggcggcgacaucugggucacccgcgagcccuacgucuccugcgaccccgacaagugcuaccaguucgcccucggccagggcaccacccucaacaacguccacuccaacaacaccguccgcgaccgcacccccuaccgcacccuccucaugaacgagcucggcguccccuuccaccucggcaccaagcaggucugcaucgccugguccuccuccuccugccacgacggcaaggccuggcuccacgucugcaucaccggcgacgacaagaacgccaccgccuccuucaucuacaacggccgccucgucgacuccgucgucuccugguccaaggacauccuccgcacccaggaguccgagugcgucugcaucaacggcaccugcaccgucgucaugaccgacggcuccgccuccggcaaggccgacaccaagauccucuucaucgaggagggcaagaucguccacaccuccacccucuccggcuccgcccagcacgucgaggagugcuccugcuacccccgcuaccccggcguccgcugcgucugccgcgacaacuggaagggcuccaaccgccccaucgucgacaucaacaucaaggaccacuccaucgucuccuccuacgucugcuccggccucgucggcgacaccccccgcaagaacgacuccuccuccuccucccacugccucgaccccaacaacgaggagggcggccacggcgucaagggcugggccuucgacgacggcaacgacgucuggaugggccgcaccaucaacgagaccucccgccucggcuacgagaccuucaaggucaucgagggcugguccaaccccaaguccaagcuccagaucaaccgccaggucaucgucgaccgcggcgaccgcuccggcuacuccggcaucuucuccaucgagggcaaguccugcaucaaccgcugcuucuacgucgagcucauccgcggccgcaaggaggagaccgagguccucuggaccuccaacuccaucgucgucuucugcggcaccuccggcaccuacggcaccggcuccuggcccgacggcgccgaccucaaccucaugcccaucuga

SEQ ID NO: 121642 - RNA, 1410 nt, Artificial Sequence; identical to SEQ ID NO: 121634
  derived and/or modified CDS sequence (opt2) from neuraminidase__InfluenzaA__AIJ10836

SEQ ID NO: 121643 - RNA, 1410 nt, Artificial Sequence
  derived and/or modified CDS sequence (opt2) from neuraminidase__InfluenzaA__AIJ10837
augaaccccaaccagaagaucaucaccaucggcuccgucucccucaccaucuccaccaucugcuucuucaugcagaucgccauccucaucaccaccgucacccuccacuucaagcaguacgaguucaacuccccccccaacaaccaggucaugcucugcgagcccaccaucaucgagcgcaacaucaccgagaucgucuaccucaccaacaccaccaucgagaaggagaucugccccaagcccgccgaguaccgcaacugguccaagccccagugcggcaucaccggcuucgcccccuucuccaaggacaacuccauccgccucuccgccggcggcgacaucugggucacccgcgagcccuacgucuccugcgaccccgacaagugcuaccaguucgcccucggccagggcaccacccucaacaacguccacuccaacaacaccguccgcgaccgcacccccuaccgcacccuccucaugaacgagcucggcguccccuuccaccucggcaccaagcaggucugcaucgccugguccuccuccuccugccacgacggcaaggccuggcuccacgucugcaucaccggcgacgacaagaacgccaccgccuccuucaucuacaacggccgccucgucgacuccgucgucuccugguccaaggacauccuccgcacccaggaguccgagugcgucugcaucaacggcaccugcaccgucgucaugaccgacggcuccgccuccggcaaggccgacaccaagauccucuucaucgaggagggcaagaucauccacaccuccacccucuccggcuccgcccagcacgucgaggagugcuccugcuacccccgcuaccccggcguccgcugcgucugccgcgacaacuggaagggcuccaaccgccccaucgucgacaucaacaucaaggaccacuccaucgucuccuccuacgucugcuccggccucgucggcgacaccccccgcaagaacgacuccuccuccuccucccacugccucgaccccaacaacgaggagggcggccacggcgucaagggcugggccuucgacgacggcaacgacgucuggaugggccgcaccaucaacgagaccucccgccucggcuacgagaccuucaaggucaucgagggcugguccaaccccaaguccaagcuccagaucaaccgccaggucaucgucgaccgcggcgaccgcuccggcuacuccggcaucuucuccaucgagggcaaguccugcaucaaccgcugcuucuacgucgagcucauccgcggccgcaaggaggagaccgagguccucuggaccuccaacuccaucgucgucuucugcggcaccuccggcaccuacggcaccggcuccuggcccgacggcgccgaccucaaccucaugcccaucuga

SEQ ID NO: 121644 - RNA, 1410 nt, Artificial Sequence; identical to SEQ ID NO: 121634
  derived and/or modified CDS sequence (opt2) from neuraminidase__InfluenzaA__AIJ10838

SEQ ID NO: 121645 - RNA, 1410 nt, Artificial Sequence
  derived and/or modified CDS sequence (opt2) from neuraminidase__InfluenzaA__AIJ10841
augaaccccaaccagaagaucaucaccaucggcuccgucucccucaccaucuccaccaucugcuucuucaugcagaucgccauccucaucaccaccgucacccuccacuucaagcaguacgaguucaacuccccccccaacaaccaggucaugcucugcgagcccaccaucaucgagcgcaacaucaccgagaucgucuaccucaccaacaccaccaucgagaaggagaucugccccaagcccgccgaguaccgcaacugguccaagccccagugcggcaucaccggcuucgcccccuucuccaaggacaacuccauccgccucuccgccggcggcgacaucugggucacccgcgagcccuacgucuccugcgaccccgacaagugcuaccaguucgcccucggccagggcaccacccucaacaacguccacuccaacaacaccguccgcgaccgcacccccuaccgcacccuccucaugaacgagcucggcguccccuuccaccucggcaccaagcaggucugcaucgccugguccuccuccuccugccacgacggcaaggccuggcuccacgucugcaucaccggcgacgacaagaacgccaccgccuccuucaucuacaacggccgccucgucgacuccgucgucuccugguccaaggacauccuccgcacccaggaguccgagugcgucugcaucaacggcaccugcaccgucgucaugaccgacggcuccgccuccggcgaggccgacaccaagauccucuucaucgaggagggcaagaucguccacaccuccacccucuccggcuccgcccagcacgucgaggagugcuccugcuacccccgcuaccccggcguccgcugcgucugccgcgacaacuggaagggcuccaaccgccccaucgucgacaucaacaucaaggaccacuccaucgucuccuccuacgucugcuccggccucgucggcgacaccccccgcaagaacgacuccuccuccuccucccacugccucgaccccaacaacgaggagggcggccacggcgucaagggcugggccuucgacgacggcaacgacgucuggaugggccgcaccaucaacgagaccucccgccucggcuacgagaccuucaaggucaucgagggcugguccaaccccaaguccaagcuccagaucaaccgccaggucaucgucgaccgcggcgaccgcuccggcuacuccggcaucuucuccaucgagggcaaguccugcaucaaccgcugcuucuacgucgagcucauccgcggccgcaaggaggagaccgagguccucuggaccuccaacuccaucgucgucuucugcggcaccuccggcaccuacggcaccggcuccuggcccgacggcgccgaccucaaccucaugcccaucuga

SEQ ID NO: 121646 - RNA, 1410 nt, Artificial Sequence
  derived and/or modified CDS sequence (opt2) from neuraminidase__InfluenzaA__AIJ10842
augaaccccaaccagaagaucaucaccaucggcuccgucucccucaccaucuccaccaucugcuucuucaugcagaucgccauccucaucaccaccgucacccuccacuucaagcaguacgaguucaaccccccccccaacaaccaggucaugcucugcgagcccaccaucaucgagcgcaacaucaccgagaucgucuaccucaccaacaccaccaucgagaaggagaucugccccaagcccgccgaguaccgcaacugguccaagccccagugcggcaucaccggcuucgcccccuucuccaaggacaacuccauccgccucuccgccggcggcgacaucugggucacccgcgagcccuacgucuccugcgaccccgacaagugcuaccaguucgcccucggccagggcaccacccucaacaacguccacuccaacaacaccguccgcgaccgcacccccuaccgcacccuccucaugaacgagcucggcguccccuuccaccucggcaccaagcaggucugcaucgccugguccuccuccuccugccacgacggcaaggccuggcuccacgucugcaucaccggcgacgacaagaacgccaccgccuccuucaucuacaacggccgccucgucgacuccgucgucuccugguccaaggacauccuccgcacccaggaguccgagugcgucugcaucaacggcaccugcaccgucgucaugaccgacggcuccgccuccggcaaggccgacaccaagauccucuucaucgaggagggcaagaucguccacaccuccacccucuccggcuccgcccagcacgucgaggagugcuccugcuacccccgcuaccccggcguccgcugcgucugccgcgacaacuggaagggcuccaaccgccccaucgucgacaucaacaucaaggaccacuccaucgucuccuccuacgucugcuccggccucgucggcgacaccccccgcaagaacgacuccuccuccuccucccacugccucgaccccaacaacgaggagggcggccacggcgucaagggcugggccuucgacgacggcaacgacgucuggaugggccgcaccaucaacgagaccucccgccucggcuacgagaccuucaaggucaucgagggcugguccaaccccaaguccaagcuccagaucaaccgccaggucaucgucgaccgcggcgaccgcuccggcuacuccggcaucuucuccaucgagggcaaguccugcaucaaccgcugcuucuacgucgagcucauccgcggccgcaaggaggagaccgagguccucuggaccuccaacuccaucgucgucuucugcggcaccuccggcaccuacggcaccggcuccuggcccgacggcgccgaccucaaccucaugcccaucuga

SEQ ID NO: 121647 - RNA, 1410 nt, Artificial Sequence; identical to SEQ ID NO: 121634
  derived and/or modified CDS sequence (opt2) from neuraminidase__InfluenzaA__AIJ10843

SEQ ID NO: 121648 - RNA, 1410 nt, Artificial Sequence
  derived and/or modified CDS sequence (opt2) from neuraminidase__InfluenzaA__AIJ10844
augaaccccaaccagaagaucaucaccaucggcuccgucucccucaccaucuccaccaucugcuucuucaugcagaucgccauccucaucaccaccgucacccuccacuucaagcaguacgaguucaacuccccccccaacaaccaggucaugcucugcgagcccaccaucaucgagcgcaacaucaccgagaucgucuaccucaccaacaccaccaucgagaaggagaucugccccaagcccgccgaguaccgcaacugguccaagccccagugcggcaucaccggcuucgcccccuucuccaaggacaacuccauccgccucuccgccggcggcgacaucugggucacccgcgagcccuacgucuccugcgaccccgacaagugcuaccaguucgcccucggccagggcaccacccucaacaacguccacuccaacaacaccguccgcgaccgcacccccuuccgcacccuccucaugaacgagcucggcguccccuuccaccucggcaccaagcaggucugcaucgccugguccuccuccuccugccacgacggcaaggccuggcuccacgucugcaucaccggcgacgacaagaacgccaccgccuccuucaucuacaacggccgccucgucgacuccgucgucuccugguccaaggagauccuccgcacccaggaguccgagugcgucugcaucaacggcaccugcaccgucgucaugaccgacggcuccgccuccggcaaggccgucaccaagauccucuucaucgaggagggcaagaucguccacaccuccacccucuccggcuccgcccagcacgucgaggagugcuccugcuacccccgcuaccccggcguccgcugcgucugccgcgacaacuggaagggcuccaaccgccccaucgucgacaucaacaucaaggaccacuccaucgucuccggcuacgucugcuccggccucgucggcgacaccccccgcaagaacgacuccuccuccuccggccacugccucgaccccaacaacgaggagggcggccacggcgucaagggcugggccuucgacgacggcaacgacgucuggaugggccgcaccaucaacgagaccucccgccucggcuacgagaccuucaaggucaucaagggcugguccaaccccaaguccaagcuccagaucaaccgccaggucaucgucgaccgcggcgaccgcuccggcuacuccggcaucuucuccgucgagggcaaguccugcaucaaccgcugcuucuacgucgagcucauccgcggccgcaaggaggagaccgagguccucuggaccuccaacuccaucgucgucuucugcggcaccuccggcaccuacggcaccggcuccuggcccgacggcgccgaccucaaccucaugcccaucuga

SEQ ID NO: 121649 - RNA, 1410 nt, Artificial Sequence
  derived and/or modified CDS sequence (opt2) from neuraminidase__InfluenzaA__AIJ10845
augaaccccaaccagaagaucaucaccaucggcuccgucucccucaccaucuccaccaucugcuucuucaugcagaucgccauccucaucaccaccgucacccuccacuucaagcaguacgaguucaacuccccccccaacaaccaggucaugcucugcgagcccaccaucaucgagcgcaacaucaccgagaucgucuaccucaccaacaccaucaucgagaaggagaucugccccaagcccgccgaguaccgcaacugguccaagccccagugcggcaucaccggcuucgcccccuucuccaaggacaacuccauccgccucuccgccggcggcgacaucugggucacccgcgagcccuacgucuccugcgaccccgacaagugcuaccaguucgcccucggccagggcaccacccucaacaacguccacuccaacaacaccguccgcgaccgcacccccuuccgcacccuccucaugaacgagcucggcguccccuuccaccucggcaccaagcaggucugcaucgccugguccuccuccuccugccacgacggcaaggccuggcuccacgucugcaucaccggcgacgacaagaacgccaccgccuccuucaucuacaacggccgccucgucgacuccgucgucuccugguccaaggagauccuccgcacccaggaguccgagugcgucugcaucaacggcaccugcaccgucgucaugaccgacggcuccgccuccggcaaggccgucaccaagauccucuucaucgaggagggcaagaucguccacaccuccacccucuccggcuccgcccagcacgucgaggagugcuccugcuacccccgcuaccccggcguccgcugcgucugccgcgacaacuggaagggcuccaaccgccccaucgucgacaucaacaucaaggaccacuccaucgucuccggcuacgucugcuccggccucgucggcgacaccccccgcaagaacgacuccuccuccuccucccacugccucgaccccaacaacgaggagggcggccacggcgucaagggcugggccuucgacgacggcaacgacgucuggaugggccgcaccaucaacgagaccucccgccucggcuacgagaccuucaaggucaucgagggcugguccaaccccaaguccaagcuccagaucaaccgccaggucaucgucgaccgcggcgaccgcuccggcuacuccggcaucuucuccgucgagggcaaguccugcaucaaccgcugcuucuacgucgagcucauccgcggccgcaaggaggagaccgagguccucuggaccuccaacuccaucgucgucuucugcggcaccuccggcaccuacggcaccggcuccuggcccgacggcgccgaccucaaccucaugcccaucuga

SEQ ID NO: 121650 - RNA, 1410 nt, Artificial Sequence
  derived and/or modified CDS sequence (opt2) from neuraminidase__InfluenzaA__AIJ10847
augaaccccaaccagaagaucaucaccaucggcuccgucucccucaccaucuccaccaucugcuucuucaugcagaucgccauccucaucaccaccgucacccuccacuucaagcaguacgaguucaacuccccccccaacaaccaggucaugcucugcgagcccaccaucaucgagcgcaacaucaccgagaucgucuaccucaccaacaccaccaucgagaaggagaucugccccaagcccgccgaguaccgcaacugguccaagccccagugcggcaucaccggcuucgcccccuucuccaaggacaacuccauccgccucuccgccggcggcgacaucugggucacccgcgagcccuacgucuccugcgaccccgacaagugcuaccaguucgcccucggccagggcaccacccucaacaacguccacuccaacaacaccguccgcgaccgcacccccuaccgcacccuccucaugaacgagcucggcguccccuuccaccucggcaccaagcaggucugcaucgccugguccuccuccuccugccacgacggcaaggccuggcuccacgucugcaucaccggcgacgacaagaacgccaccgccuccuucaucuacaacggccgccucgucgacuccgucgucuccugguccaaggacauccuccgcacccaggaguccgagugcgucugcaucaacggcaccugcaccgucgucaugaccgacggcuccgccuccggcaaggccgacaccaagauccucuucaucgaggagggcaagaucguccacaccuccacccucuccggcuccgcccagcacgucgaggagugcuccugcuacccccgcuaccccggcguccgcugcgucugccgcgacaacuggaagggcuccaaccgccccaucgucgacaucaacaucaaggaccacuccaucgucuccuccuacgucugcuccggccucgucggcgacaccccccgcaagaacgacuccuucuccuccucccacugccucgaccccaacaacgaggagggcggccacggcgucaagggcugggccuucgacgacggcaacgacgucuggaugggccgcaccaucaacgagaccucccgccucggcuacgagaccuucaaggucaucgagggcugguccaaccccaaguccaagcuccagaucaaccgccaggucaucgucgaccgcggcgaccgcuccggcuacuccggcaucuucuccaucgagggcaaguccugcaucaaccgcugcuucuacgucgagcucauccgcggccgcaaggaggagaccgagguccucuggaccuccaacuccaucgucgucuucugcggcaccuccggcaccuacggcaccggcuccuggcccgacggcgccgaccucaaccucaugcccaucuga

SEQ ID NO: 121651 - RNA, 1410 nt, Artificial Sequence; identical to SEQ ID NO: 121634
  derived and/or modified CDS sequence (opt2) from neuraminidase__InfluenzaA__AIJ10848

SEQ ID NO: 121652 - RNA, 1410 nt, Artificial Sequence
  derived and/or modified CDS sequence (opt2) from neuraminidase__InfluenzaA__AIJ10849
augaaccccaaccagaagaucaucaccaucggcuccgucucccucaccaucuccaccaucugcuucuucaugcagaucgccauccucaucaccaccgucacccuccacuucaagcaguacgaguucaacuccccccccaacaaccaggucaugcucugcgagcccaccaucaucgagcgcaacaucaccgagaucgucuaccucaccaacaccaccaucgagaaggagaucugccccaagcccgccgaguaccgcaacugguccaagccccagugcggcaucaccggcuucgcccccuucuccaaggacaacuccauccgccucuccgccggcggcgacaucugggucacccgcgagcccuacgucuccugcgaccccgacaagugcuaccaguucgcccucggccagggcaccacccucaacaacguccacuccaacaacaccguccgcgaccgcacccccuuccgcacccuccucaugaacgagcucggcguccccuuccaccucggcaccaagcaggucugcaucgccugguccuccuccuccugccacgacggcaaggccuggcuccacgucugcaucaccggcgacgacaagaacgccaccgccuccuucaucuacaacggccgccucgucgacuccgucgucuccugguccaaggagauccuccgcacccaggaguccgagugcgucugcaucaacggcaccugcaccgucgucaugaccgacggcuccgccuccggcaaggccgucaccaagauccucuucaucgaggagggcaagaucguccacaccuccacccucuccggcuccgcccagcacgucgaggagugcuccugcuacccccgcuaccccggcguccgcugcgucugccgcgacaacuggaagggcuccaaccgccccaucgucgacaucaacaucaaggaccacuccaucgucuccggcuacgucugcuccggccucgucggcgacaccccccgcaagaacgacuccuccuccuccucccacugccucgaccccaacaacgaggagggcggccacggcgucaagggcugggccuucgacgacggcaacgacgucuggaugggccgcaccaucaacgagaccucccgccucggcuacgagaccuucaaggucaucgagggcugguccaaccccaaguccaagcuccagaucaaccgccaggucaucgucgaccgcggcgaccgcuccggcuacuccggcaucuucuccgucgagggcaaguccugcaucaaccgcugcuucuacgucgagcucauccgcggccgcaaggaggagaccgagguccucuggaccuccaacuccaucgucgucuucugcggcaccuccggcaccuacggcaccggcuccuggcccgacggcgccgaccucaaccucaugcccaucuga

SEQ ID NO: 121653 - RNA, 1410 nt, Artificial Sequence; identical to SEQ ID NO: 121652
  derived and/or modified CDS sequence (opt2) from neuraminidase__InfluenzaA__AIJ10851

SEQ ID NO: 121654 - RNA, 1410 nt, Artificial Sequence; identical to SEQ ID NO: 121652
  derived and/or modified CDS sequence (opt2) from neuraminidase__InfluenzaA__AIJ10852

SEQ ID NO: 121655 - RNA, 1410 nt, Artificial Sequence; identical to SEQ ID NO: 121648
  derived and/or modified CDS sequence (opt2) from neuraminidase__InfluenzaA__AIJ10853

SEQ ID NO: 121656 - RNA, 1410 nt, Artificial Sequence; identical to SEQ ID NO: 121648
  derived and/or modified CDS sequence (opt2) from neuraminidase__InfluenzaA__AIJ10854

SEQ ID NO: 121657 - RNA, 1410 nt, Artificial Sequence
  derived and/or modified CDS sequence (opt2) from neuraminidase__InfluenzaA__AIJ10855
augaaccccaaccagaagaucaucaccaucggcuccgucucccucaccaucuccaccaucugcuucuucaugcagaucgccauccucaucaccaccgucacccuccacuucaagcaguacgaguucaacuccccccccaacaaccaggucaugcucugcgagcccaccaucaucgagcgcaacaucaccgagaucgucuaccucaccaacaccaccaucgagaaggagaucugccccaagcccgccgaguaccgcaacugguccaagccccagugcggcaucaccggcuucgcccccuucuccaaggacaacuccauccgccucuccgccggcggcgacaucugggucacccgcgagcccuacgucuccugcgaccccgacaagugcuaccaguucgcccucggccagggcaccacccucaacaacguccacuccaacaacaccguccgcgaccgcacccccuuccgcacccuccucaugaacgagcucggcguccccuuccaccucggcaccaagcaggucugcaucgccugguccuccuccuccugccacgacggcaaggccuggcuccacgucugcaucaccggcgacgacaagaacgccaccgccuccuucaucuacaacggccgccucgucgacuccgucgucuccugguccaaggagauccuccgcacccaggaguccgagugcgucugcaucaacggcaccugcaccgucgucaugaccgacggcuccgccuccggcaaggccgucaccaagauccucuucaucgaggagggcaagaucguccacaccuccacccucuccggcuccgcccagcacgucgaggagugcuccugcuacccccgcuaccccggcguccgcugcgucugccgcgacaacuggaagggcuccaaccgccccaucgucgacaucaacaucaaggaccacuccaucgucuccggcuacgucugcuccggccucgucggcgacaccccccgcaagaacgacuccuccuccuccucccacugccucgaccccaacaacgaggagggcgaccacggcgucaagggcugggccuucgacgacggcaacgacgucuggaugggccgcaccaucaacgagaccucccgccucggcuacgagaccuucaaggucaucgagggcugguccaaccccaaguccaagcuccagaucaaccgccaggucaucgucgaccgcggcgaccgcuccggcuacuccggcaucuucuccgucgagggcaaguccugcaucaaccgcugcuucuacgucgagcucauccgcggccgcaaggaggagaccgagguccucuggaccuccaacuccaucgucgucuucugcggcaccuccggcaccuacggcaccggcuccuggcccgacggcgccgaccucaaccucaugcccaucuga

SEQ ID NO: 121658 - RNA, 1410 nt, Artificial Sequence
  derived and/or modified CDS sequence (opt2) from neuraminidase__InfluenzaA__AIJ10856
augaaccccaacaagaagaucaucaccaucggcuccgucucccucaccaucuccaccaucugcuucuucaugcagaucgccauccucaucaccaccgucacccuccacuucaagcaguacgaguucaacuccccccccaacaaccaggucaugcucugcgagcccaccaucaucgagcgcaacaucaccgagaucgucuaccucaccaacaccaccaucgagaaggagaucugccccaagcccgccgaguaccgcaacugguccaagccccagugcggcaucaccggcuucgcccccuucuccaaggacaacuccauccgccucuccgccggcggcgacaucugggucacccgcgagcccuacgucuccugcgaccccgacaagugcuaccaguucgcccucggccagggcaccacccucaagaacguccacuccaacaacaccguccgcgaccgcacccccuaccgcacccuccucaugaacgagcucggcguccccuuccaccucggcaccaagcaggucugcaucgccugguccuccuccuccugccacgacggcaaggccuggcuccacgucugcaucaccggcgacgacaagaacgccaccgccuccuucaucuacaacggccgccucgucgacuccgucgucuccugguccaaggacauccuccgcacccaggaguccgagugcgucugcaucaacggcaccugcaccgucgucaugaccgacggcuccgccuccggcaaggccgacaccaagauccucuucaucgaggagggcaagaucguccacaccuccacccucuccggcuccgcccagcacgucgaggagugcuccugcuacccccgcuaccccggcguccgcugcgucugccgcgacaacuggaagggcuccaaccgccccaucgucgacaucaacaucaaggaccacuccaucgucuccuccuacgucugcuccggccucgucggcgacaccccccgcaagaacgacuccuucuccuccggccacugccucgaccccaacaacgaggagggcggccacggcgucaagggcugggccuucgacgacggcaacgacgucuggaugggccgcaccaucaacgagaccucccgccucggcuacgagaccuucaaggucaucgagggcugguccaaccccaaguccaagcuccagaucaaccgccaggucaucgucgaccgcggcgaccgcuccggcuacuccggcaucuucuccaucgagggcaaguccugcaucaaccgcugcuucuacgucgagcucauccgcggccgcaaggaggagaccgagguccucuggaccuccaacuccaucgucgucuucugcggcaccuccggcaccuacggcaccggcuccuggcccgacggcgccgaccucaaccucaugcccaucuga

SEQ ID NO: 121659 - RNA, 1410 nt, Artificial Sequence; identical to SEQ ID NO: 121634
  derived and/or modified CDS sequence (opt2) from neuraminidase__InfluenzaA__AIJ10857

SEQ ID NO: 121660 - RNA, 1410 nt, Artificial Sequence; identical to SEQ ID NO: 118182
  derived and/or modified CDS sequence (opt2) from neuraminidase__InfluenzaA__AIJ29348

SEQ ID NO: 121661 - RNA, 1410 nt, Artificial Sequence; identical to SEQ ID NO: 118182
  derived and/or modified CDS sequence (opt2) from neuraminidase__InfluenzaA__AIJ29350

SEQ ID NO: 121662 - RNA, 1410 nt, Artificial Sequence
  derived and/or modified CDS sequence (opt2) from neuraminidase__InfluenzaA__AIJ29352
augaaccccaaccagaagaucaucaccaucggcuccgucucccucaccaucuccaccaucugcuucuucaugcagaucgccauccucaucaccaccgucacccuccacuucaagcaguacgaguucaacuccccccccaacaaccaggucaugcucugcgagcccaccaucaucgagcgcaacaucaccgagaucgucuaccucaccaacaccaccaucgagaaggagaucugccccaagcccgccaaguaccgcaacugguccaagccccagugcggcaucaccggcuucgcccccuucuccaaggacaacuccauccgccucuccgccggcggcgacaucugggucacccgcgagcccuacgucuccugcgaccccgacaagugcuaccaguucgcccucggccagggcaccacccucaacaacguccacuccaacaacaccguccgcgaccgcacccccuaccgcacccuccucaugaacgagcucggcguccccuuccaccucggcaccaagcaggucugcaucgccugguccuccuccuccugccacgacggcaaggccuggcuccacgucugcaucaccggcgacgacaagaacgccaccgccuccuucaucuacaacggccgccucgucgacuccgucgucuccugguccaaggagauccuccgcacccaggaguccgagugcgucugcaucaacggcaccugcaccgucgucaugaccgacggcuccgccuccggcaaggccgacaccaagauccucuucaucgaggagggcaagaucguccacaccuccacccucuccggcuccgcccagcacgucgaggagugcuccugcuacccccgcuaccccggcguccgcugcgucugccgcgacaacuggaagggcuccaaccgccccaucgucgacaucaacaucaaggaccacuccaucgucuccuccuacgucugcuccggccucgucggcgacaccccccgcaagaacgacuccuccuccuccucccacugccucgaccccaacaacgaggagggcggccacggcgucaagggcugggccuucgacgacggcaacgacgucuggaugggccgcaccaucaacgagaccucccgccucggcuacgagaccuucaaggucaucgagggcugguccaaccccaaguccaagcuccagaucaaccgccaggucaucgucgaccgcggcgaccgcuccggcuacuccggcaucuucuccgucgagggcaaguccugcaucaaccgcugcuucuacgucgagcucauccgcggccgcaaggaggagaccgagguccucuggaccuccaacuccaucgucgucuucugcggcaccuccggcaccuacggcaccggcuccuggcccgacggcgccgaccucaaccucaugcccaucuga

SEQ ID NO: 121663 - RNA, 1410 nt, Artificial Sequence; identical to SEQ ID NO: 117179
  derived and/or modified CDS sequence (opt2) from neuraminidase__InfluenzaA__AIJ29354

SEQ ID NO: 121664 - RNA, 1410 nt, Artificial Sequence; identical to SEQ ID NO: 118958
  derived and/or modified CDS sequence (opt2) from neuraminidase__InfluenzaA__AIJ29356

SEQ ID NO: 121665 - RNA, 1410 nt, Artificial Sequence; identical to SEQ ID NO: 118958
  derived and/or modified CDS sequence (opt2) from neuraminidase__InfluenzaA__AIJ29358

SEQ ID NO: 121666 - RNA, 1410 nt, Artificial Sequence
  derived and/or modified CDS sequence (opt2) from neuraminidase__InfluenzaA__AIJ29360
augaaccccaaccagaagaucaucaccaucggcuccgucucccucaccaucuccaccaucugcuucuucaugcagaucgccauccucaccaccaccgucacccuccacuucaagcaguacgaguucaacuccccccccaacaaccaggucaugcucugcgagcccaccaucaucgagcgcaacaucaccgagaucgucuaccucaccaacaccaccaucgagaaggagaucugccccaagcccgccgaguaccgcaacugguccaagccccagugcggcaucaccggcuucgcccccuucuccaaggacaacuccauccgccucuccgccggcggcgacaucugggucacccgcgagcccuacgucuccugcgaccccgacaagugcuaccaguucgcccucggccagggcaccacccucaacaacguccacuccaacaacaccguccgcgaccgcacccccuaccgcacccuccucaugaacgagcucggcguccccuuccaccucggcaccaagcaggucugcaucgccugguccuccuccuccugccacgacggcaaggccuggcuccacgucugcaucaccggcgacgacaagaacgccaccgccuccuucaucuacaacggccgccucgucgacuccgucgucuccugguccaaggagauccuccgcacccaggaguccgagugcgucugcaucaacggcaccugcaccgucgucaugaccgacggcuccgccuccggcaaggccgacaccaagauccucuucaucgaggagggcaagaucguccacaccuccacccucuccggcuccgcccagcacgucgaggagugcuccugcuacccccgcuaccccggcguccgcugcgucugccgcgacaacuggaagggcuccaaccgccccaucgucgacaucaacaucaaggaccacuccaucgucuccuccuacgucugcuccggccucgucggcgacaccccccgcaagaacgacuccuccuccuccucccacugccucgaccccaacaacgaggagggcggccacggcgucaagggcugggccuucgacgacggcaacgacgucuggaugggccgcaccaucaacgagaccucccgccucggcuacgagaccuucaaggucaucgagggcugguccaaccccaaguccaagcuccagaucaaccgccaggucaucgucgaccgcggcgaccgcuccggcuacuccggcaucuucuccgucgagggcaaguccugcaucaaccgcugcuucuacgucgagcucauccgcggccgcaaggaggagaccgagguccucuggaccuccaacuccaucgucgucuucugcggcaccuccggcaccuacggcaccggcuccuggcccgacggcgccgaccucaaccucaugcccaucuga

SEQ ID NO: 121667 - RNA, 1410 nt, Artificial Sequence; identical to SEQ ID NO: 118182
  derived and/or modified CDS sequence (opt2) from neuraminidase__InfluenzaA__AIJ29362

SEQ ID NO: 121668 - RNA, 1410 nt, Artificial Sequence
  derived and/or modified CDS sequence (opt2) from neuraminidase__InfluenzaA__AIL93626
augaaccccaaccagaagaucaucaccaucggcuccgucugcaugaccaucggcauggccaaccucauccuccagaucggcaacaucaucuccaucuggaucucccacuccauccagcucggcaaccagucccagaucgaggccugcaaccaguccgucaucaccuacgagaacaacaccuacgucaaccagaccuacgucaacaucuccaacaccaacuucgccgccggccgcuccgucgucuccgucaagcucgccggcaacuccucccucugccccgucuccggcugggccaucuacuccaaggacaacuccguccgcaucggcuccaagggcgacgucuucgucauccgcgagcccuucaucuccugcuccccccucgagugccgcaccuucuuccucacccagggcgcccuccucaacgacaagcacuccaacggcaccaucaaggaccgcucccccuaccgcacccucauguccugccccaucggcgagguccccucccccuacaacucccgcuucgaguccgucgccugguccgccuccgccugccacgacggcaucaacuggcucaccaucggcaucuccggccccgacuccggcgccgucgccguccucaaguacaacggcaucaucaccgacaccaucaaguccuggaagaacaacauccuccgcacccaggaguccgagugcgccugcgucaacggcuccugcuucaccaucaugaccgacggccccuccgacggccaggccuccuacaagaucuuccgcaucgagaagggcaagaucgucaaguccgucgagaugaacgcccccaacuaccacuacgaggagugcuccugcuaccccgacuccuccgagaucaccugcgucugccgcgacaacuggcacggcuccaaccgccccugggucuccuucaaccagaaccucgaguaccagaucggcuacaucugcuccggcgucuucggcgacaacccccgccccaacgacaagaccggcuccugcggccccguccucuccaacggcgccaacggcgucaagggcuucuccuucaaguacggcaacggcgucuggaucggccgcaccaaguccaucuccucccgcaagggcuucgagaugaucugggaccccaacggcuggaccggcaccgacaacaacuucuccaucaagcaggacaucgucggcaucaacgagugguccggcuacuccggcuccuucguccagcaccccgagcucaccggccucgacugcauccgccccugcuucugggucgagcucauccgcggccgccccaaggagaacaccaucuggaccuccggcuccuccaucuccuucugcggcgucaacuccgacaccgucggcugguccuggcccgacggcgccgagcuccccuucaccaucgacaaguga

SEQ ID NO: 121669 - RNA, 1410 nt, Artificial Sequence
  derived and/or modified CDS sequence (opt2) from neuraminidase__InfluenzaA__AIL93648
augaaccccaaccagaagaucaucaccaucggcuccgucucccucaccaucuccaccaucugcuucuucaugcagaucgccauccucaucaccaccgucacccuccacuucaagcaguacgaguucaacuccccccccaacaaccaggucaugcucugcgagcccaccaucaucgagcgcaacaucaccgagaucgucuaccucaccaacaccaccaucgagaaggagaucugccccaagcccgccgaguaccgcaacugguccaagccccagugcggcaucaccggcuucgcccccuucuccaaggacaacuccauccgccucuccgccggcggcgacaucugggucacccgcgagcccuacgucuccugcgaccccgacaagugcuaccaguucgcccucggccagggcaccacccucaacaacguccacuccaacaacaccguccgcgaccgcacccccuaccgcacccuccucaugaacgagcucggcguccccuuccaccucggcaccaagcaggucugcaucgccugguccuccuccuccugccacgacggcaaggccuggcuccacgucugcaucaccggcgacgacaagaacgccaccgccuccuucaucuacaacggccgccucgucgacuccgucgucuccugguccaaggagauccuccgcacccaggaguccgagugcgucugcaucaacggcaccugcaccgucgucaugaccgacggcuccgccuccggcaaggccgacaccaagauccucuucaucgaggagggccgcaucguccacaccuccacccucuccggcuccgcccagcacgucgaggagugcuccugcuacccccgcuaccccggcguccgcugcgucugccgcgacaacuggaagggcuccaaccgccccaucgucgacaucaacaucaaggaccacuccaucgucuccuccuacgucugcuccggccucgucggcgacaccccccgcaagaacgacuccuccuccuccucccacugccucgaccccaacaacgaggagggcggccacggcgucaagggcugggccuucgacgacggcaacgacgucuggaugggccgcaccaucaacgagaccucccgccucggcuacgagaccuucaaggucaucgagggcugguccaaccccaaguccaagcuccagaucaacaagcaggucaucgucgaccgcggcgaccgcuccggcuacuccggcaucuucuccgucgagggcaaguccugcaucaaccgcugcuucuacgucgagcucauccgcggccgcaaggaggagaccgagguccucuggaccuccaacuccaucgucgucuucugcggcaccuccggcaccuacggcaccggcuccuggcccgacggcgccgaccucaaccucaugcccaucuga

SEQ ID NO: 121670 - RNA, 1410 nt, Artificial Sequence; identical to SEQ ID NO: 118182
  derived and/or modified CDS sequence (opt2) from neuraminidase__InfluenzaA__AIL93660

SEQ ID NO: 121671 - RNA, 1410 nt, Artificial Sequence; identical to SEQ ID NO: 118182
  derived and/or modified CDS sequence (opt2) from neuraminidase__InfluenzaA__AIL93672

SEQ ID NO: 121672 - RNA, 1410 nt, Artificial Sequence
  derived and/or modified CDS sequence (opt2) from neuraminidase__InfluenzaA__AIL93684
augaaccccaaccagaagaucaucaccaucggcuccgucugcaugaccaucggcauggccaaccucauccuccagaucggcaacaucaucuccaucuggaucucccacuccauccagcucggcaaccagucccagaucgaggccugcaaccaguccgucaucaccuacgagaacaacaccugggucaaccagaccuacgucaacaucuccaacaccaacuccgccaccggccaguccgucgucuccgucaagcucgccggcaacuccucccucugccccgucuccggcugggccaucuacuccaaggacaacuccguccgcaucggcuccaagggcgacgucuucgucauccgcgagcccuucaucuccugcuccccccucgagugccgcaccuucuuccucacccagggcgcccuccucaacgacaagcacuccaacggcaccaucaaggaccgcucccccuaccgcacccucauguccugccccaucggcgagguccccucccccuacaacucccgcuucgaguccgucgccugguccgccuccgccugccacgacggcaucaacuggcucaccaucggcaucuccggccccgacuccggcgccgucgccguccucaaguacaacggcaucaucaccgacaccaucaaguccuggaagaacaacauccuccgcacccaggaguccgagugcgccugcgucaacggcuccugcuucaccaucaugaccgacggccccuccgacggccaggccuccuacaagaucuuccgcaucgagaagggcaagaucgucaaguccgucgagaugaacgcccccaacuaccacuacgaggagugcuccugcuaccccgacuccuccgagaucaccugcgucugccgcgacaacuggcacggcuccaaccgccccugggucuccuucaaccagaaccucgaguaccagaucggcuacaucugcuccggcgucuucggcgacaacccccgccccaacgacaagaccggcuccugcggccccguccucuccaacggcgccaacggcgucaagggcuucuccuucaaguacggcaacggcgucuggaucggccgcaccaaguccaucuccucccgcaagggcuucgagaugaucugggaccccaacggcuggaccggcaccgacaacaacuucuccaucaagcaggacaucgucggcaucaacgagugguccggcuacuccggcuccuucguccagcaccccgagcucaccggccucgacugcauccgccccugcuucuggaucgagcucauccgcggccgccccaaggagaacaccaucuggaccuccggcuccuccaucuccuucugcggcgucaacuccgacaccgucggcugguccuggcccgacggcgccgagcuccccuucaccaucgacaaguga

SEQ ID NO: 121673 - RNA, 1410 nt, Artificial Sequence
  derived and/or modified CDS sequence (opt2) from neuraminidase__InfluenzaA__AIL93719
augaaccccaaccagaagaucaucaccaucggcuccgucucccucaccaucuccaccaucugcuucuucaugcagaucgccauccucaucaccaccgucacccuccacuucaagcaguacgaguucaacuccccccccaacaaccaggucaugcucugcgagcccaccaucaucgagcgcaacaucaccgagaucgucuaccucaccaacaccaccaucgagaaggagaucugccccaagcccgccgaguaccgcaacugguccaagccccagugcggcaucaccggcuucgcccccuucuccaaggacaacuccauccgccucuccgccggcggcgacaucugggucacccgcgagcccuacgucuccugcgaccccgacaagugcuaccaguucgcccucggccagggcaccacccucaacaacguccacuccaacaacaccguccgcgaccgcacccccuaccgcacccuccucaugaacgagcucggcguccccuuccaccucggcaccaagcaggucugcaucgccugguccuccuccuccugccacgacggcaaggccuggcuccacgucugcaucaccggcgacgacaagaacgccaccgccuccuucaucuacaacggccgccucgucgacuccgucgucuccugguccaaggagauccuccgcacccaggaguccgagugcgucugcaucaacggcaccugcaccgucgucaugaccgacggcuccgccuccggcaaggccgacaccaagauccucuucaucgaggagggcaagaucguccacaccuccacccucuccggcuccgcccagcacgucgaggagugcuccugcuacccccgcuaccccggcguccgcugcgucugccgcgacaacuggaagggcuccaaccgccccaucgucgacaucaacaucaaggaccacuccaucgucuccuccuacgucugcuccggccucgucggcgacaccccccgcaagaacgacuccuccuccuccucccacugccucgaccccaacaacgaggagggcggccacggcgucaagggcugggccuucgacgacggcaacgacgucuggaugggccgcaccaucaacgagaccucccgccucggcuacgagaccuucaaggucaucgagggcugguccaaccccaaguccaagcuccagaucaacaagcaggucaucgucgaccgcggcgaccgcuccggcuacuccggcaucuucuccgucgagggcaaguccugcaucaaccgcugcuucuacgucgagcucauccgcggccgcaaggaggagaccgagguccucuggaccuccaacuccaucgucgucuucugcggcaccuccggcaccuacggcaccggcuccuggcccgacggcgccgaccucaaccucaugcccaucuga

SEQ ID NO: 121674 - RNA, 1410 nt, Artificial Sequence; identical to SEQ ID NO: 121673
  derived and/or modified CDS sequence (opt2) from neuraminidase__InfluenzaA__AIL93743

SEQ ID NO: 121675 - RNA, 1410 nt, Artificial Sequence; identical to SEQ ID NO: 121673
  derived and/or modified CDS sequence (opt2) from neuraminidase__InfluenzaA__AIL93755

SEQ ID NO: 121676 - RNA, 1410 nt, Artificial Sequence; identical to SEQ ID NO: 118182
  derived and/or modified CDS sequence (opt2) from neuraminidase__InfluenzaA__AIL93767

SEQ ID NO: 121677 - RNA, 1410 nt, Artificial Sequence; identical to SEQ ID NO: 118182
  derived and/or modified CDS sequence (opt2) from neuraminidase__InfluenzaA__AIL93779

SEQ ID NO: 121678 - RNA, 1410 nt, Artificial Sequence
  derived and/or modified CDS sequence (opt2) from neuraminidase__InfluenzaA__AIL93791
augaaccccaaccagaagaucaucaccaucggcuccgucucccucaccaucuccaccaucugcuucuucaugcagaucgccauccucaucaccaccgucacccuccacuucaagcaguacaaguucaacuccccccccaacaaccaggucaugcucugcgagcccaccaucaucgagcgcaacaucaccgagaucgucuaccucaccaacaccaccaucgagaaggagaucugccccaagcccgccgaguaccgcaacugguccaagccccagugcggcaucaccggcuucgcccccuucuccaaggacaacuccauccgccucuccgccggcggcgacaucugggucacccgcgagcccuacgucuccugcgaccccgacaagugcuaccaguucgcccucggccagggcaccacccucaacaacguccacuccaacaacaccguccgcgaccgcacccccuaccgcacccuccucaugaacgagcucggcguccccuuccaccucggcaccaagcaggucugcaucgccugguccuccuccuccugccacgacggcaaggccuggcuccacgucugcaucaccggcgacgacaagaacgccaccgccuccuucaucuacaacggccgccucgucgacuccgucgucuccugguccaaggagauccuccgcacccaggaguccgagugcgucugcaucaacggcaccugcaccgucgucaugaccgacggcuccgccuccggcaaggccgacaccaagauccucuucaucgaggagggcaagaucguccacacccgcacccucuccggcuccgcccagcacgucgaggagugcuccugcuacccccgcuaccccggcguccgcugcgucugccgcgacaacuggaagggcuccaaccgccccaucgucgacaucaacaucaaggaccacuccaucgucuccuccuacgucugcuccggccucgucggcgacaccccccgcaagaacgacuccuccuccuccucccacugccucgaccccaacaacgaggagggcggccacggcgucaagggcugggccuucgacgacggcaacgacgucuggaugggccgcaccaucaacgagaccucccgccucggcuacgagaccuucaaggucaucgagggcugguccaaccccaaguccaagcuccagaucaacaagcaggucaucgucgaccgcggcgaccgcuccggcuacuccggcaucuucuccgucgagggcaaguccugcaucaaccgcugcuucuacgucgagcucauccgcggccgcaaggaggagaccgagguccucuggaccuccaacuccaucgucgucuucugcggcaccuccggcaccuacggcaccggcuccuggcccgacggcgccgaccucaaccucaugcccaucuga

SEQ ID NO: 121679 - RNA, 1410 nt, Artificial Sequence; identical to SEQ ID NO: 121673
  derived and/or modified CDS sequence (opt2) from neuraminidase__InfluenzaA__AIL93803

SEQ ID NO: 121680 - RNA, 1410 nt, Artificial Sequence
  derived and/or modified CDS sequence (opt2) from neuraminidase__InfluenzaA__AIL93815
augaaccccaaccagaagaucaucaccaucggcuccgucucccucaccaucuccaccaucugcuucuucaugcagaucgccauccucaucaccaccgucacccuccacuucaagcaguacgaguucaacuccccccccaacaaccaggucaugcucugcgagcccaccaucaucgagcgcaacaucaccgagaucgucuaccucaccaacaccaccaucgagaaggagaucugccccaagcccgccgaguaccgcaacugguccaagccccagugcggcaucaccggcuucgcccccuucuccaaggacaacuccauccgccucuccgccggcggcgacaucugggucacccgcgagcccuacgucuccugcgaccccgacaagugcuaccaguucgcccucggccagggcaccacccucaacaacguccacuccaacaacaccguccgcgaccgcacccccuaccgcacccuccucaugaacgagcucggcguccccuuccaccucggcaccaagcaggucugcaucgccugguccuccuccuccugccacgacggcaaggccuggcuccacgucugcaucaccggcgacgacaagaacgccaccgccuccuucaucuacaacggccgccucgucgacuccgucgucuccugguccaaggagauccuccgcacccaggaguccgagugcgucugcaucaacggcaccugcaccgucgucaugaccgacggcuccgccuccggcaaggccgacaccaagauccucuucaucgaggagggcaagaucguccacaccuccacccucuccggcuccgcccagcacgucgaggagugcuccugcuacccccgcuaccccggcguccgcugcgucugccgcgacaacuggaagggcuccaaccgccccaucgucgacaucaacaucaaggaccacuccaucgucuacuccuacgucugcuccggccucgucggcgacaccccccgcaagaacgacuccuccuccuccucccacugccucaaccccaacaacgaggagggcggccacggcgucaagggcugggccuucgacgacggcaacgacgucuggaugggccgcaccaucaacgagaccucccgccucggcuacgagaccuucaaggucaucgagggcugguccaaccccaaguccaagcuccagaucaaccgccaggucaucgucgaccgcggcgaccgcuccggcuacuccggcaucuucuccgucgagggcaaguccugcaucaaccgcugcuucuacgucgagcucauccgcggccgcaaggaggagaccgagguccucuggaccuccaacuccaucgucgucuucugcggcaccuccggcaccuacggcaccggcuccuggcccgacggcgccgaccucaaccucaugcccaucuga

SEQ ID NO: 121681 - RNA, 1410 nt, Artificial Sequence; identical to SEQ ID NO: 118182
  derived and/or modified CDS sequence (opt2) from neuraminidase__InfluenzaA__AIL93827

SEQ ID NO: 121682 - RNA, 1410 nt, Artificial Sequence
  derived and/or modified CDS sequence (opt2) from neuraminidase__InfluenzaA__AIL93839
augaaccccaaccagaagaucaucaccaucggcuccgucugcaugaccaucggcauggccaaccucauccuccagaucggcaacaucaucuccaucuggaucucccacuccauccagcucggcaaccagucccagaucgaggccugcaaccaguccgucaucaccuacgagaacaacaccugggucaaccagaccuacgucaacaucuccaacaccaacuucgccaccggccaguccgucgucuccgucaagcucgccggcaacuccucccucugccccgucuccggcugggccaucuacuccaaggacaacuccguccgcaucggcuccaagggcgacgucuucgucauccgcgagcccuucaucuccugcuccccccucgagugccgcaccuucuuccucacccagggcgcccuccucaacgacaagcacuccaacggcaccaucaaggaccgcucccccuaccgcacccucauguccugccccaucggcgagguccccucccccuacaacucccgcuucgaguccgucgccugguccgccuccgccugccacgacggcaucaacuggcucaccaucggcaucuccggccccgacuccggcgccgucgccguccucaaguacaacggcaucaucaccgacaccaucaaguccuggaagaacaacauccuccgcacccaggaguccgagugcgccugcgucaacggcuccugcuucaccaucaugaccgacggccccuccgacggccaggccuccuacaagaucuuccgcaucgagaagggcaagaucgucaaguccgucgagaugaacgcccccaacuaccacuacgaggagugcuccugcuaccccgacuccuccgagaucaccugcgucugccgcgacaacuggcacggcuccaaccgccccugggucuccuucaaccagaaccucgaguaccagaucggcuacaucugcuccggcgucuucggcgacaacccccgccccaacgacaagaccggcuccugcggccccgucuccuccaacggcgccaacggcgucaagggcuucuccuucaaguacggcaacggcgucuggaucggccgcaccaaguccaucuccucccgcaagggcuucgagaugaucugggaccccaacggcuggaccggcaccgacaacaacuucuccaucaagcaggacaucgucggcaucaacgagugguccggcuacuccggcuccuucguccagcaccccgagcucaccggccucgacugcauccgccccugcuucugggucgagcucauccgcggccgccccaaggagaacaccaucuggaccuccggcuccuccaucuccuucugcggcgucaacuccgacaccgucggcugguccuggcccgacggcgccgagcuccccuucaccaucgacaaguga

SEQ ID NO: 121683 - RNA, 1410 nt, Artificial Sequence
  derived and/or modified CDS sequence (opt2) from neuraminidase__InfluenzaA__AIL93850
augaaccccaaccagaagaucaucaccaucggcuccgucugcaugaccaucggcauggccaaccucauccuccagaucggcaacaucaucuccaucuggaucucccacuccauccagcucggcaaccagucccagaucgaggccugcaaccaguccgucaucaccuacgagaacaacaccugggucaaccagaccuacgucaacaucuccaacaccaacuucgccaccggccaguccgucgucuccgucaagcucgccggcaacuccucccucugccccgucuccggcugggccaucuacuccaaggacaacuccguccgcaucggcuccaagggcgacgucuucgucauccgcgagcccuucaucuccugcuccccccucgagugccgcaccuucuuccucacccagggcgcccuccucaacgacaagcacuccaacggcaccaucaaggaccgcucccccuaccgcacccucauguccugccccaucggcgagguccccucccccuacaacucccgcuucgaguccgucgccugguccgccuccgccugccacgacggcaucaacuggcucaccaucggcaucuccggccccgacuccggcgccgucgccguccucaaguacaacggcaucaucaccgacaccaucaaguccuggaagaacaacauccuccgcacccaggaguccgagugcgccugcgucaacggcuccugcuucaccaucaugaccgacggccccuccgacggccaggccuccuacaagaucuuccgcaucgagaagggcaagaucgucaaguccgucgagaugaacgcccccaacuaccacuacgaggagugcuccugcuaccccgacuccuccgagaucaccugcgucugccgcgacaacuggcacggcuccaaccgccccugggucuccuucaaccagaaccucgaguaccagaucggcuacaucugcuccggcgucuucggcgacaacccccgccccaacgacaagaccggcuccugcggccccgucuccuccaacggcgccaagggcgucaagggcuucuccuucaaguacggcaacggcgucuggaucggccgcaccaaguccaucuccucccgcaagggcuucgagaugaucugggaccccaacggcuggaccggcaccgacaacaacuucuccaucaagcaggacaucgucggcaucaacgagugguccggcuacuccggcuccuucguccagcaccccgagcucaccggccucgacugcauccgccccugcuucugggucgagcucauccgcggccgccccaaggagaacaccaucuggaccuccggcuccuccaucuccuucugcggcgucaacuccgacaccgucggcugguccuggcccgacggcgccgagcuccccuucaccaucgacaaguga

SEQ ID NO: 121684 - RNA, 1410 nt, Artificial Sequence; identical to SEQ ID NO: 121673
  derived and/or modified CDS sequence (opt2) from neuraminidase__InfluenzaA__AIL93861

SEQ ID NO: 121685 - RNA, 1410 nt, Artificial Sequence
  derived and/or modified CDS sequence (opt2) from neuraminidase__InfluenzaA__AIL93885
augaaccccaaccagaagaucaucaccaucggcuccgucucccucaccaucuccaccaucugcuucuucaugcagaucgccauccucaucaccaccgucacccuccacuucaagcaguacgaguucgacuccccccccaacaaccaggucaugcucugcgagcccaccaucaucgagcgcaacaucaccgagaucgucuaccucaccaacaccaccaucgagaaggagaucugccccaagcccgccgaguaccgcaacugguccaagccccagugcggcaucaccggcuucgcccccuucuccaaggacaacuccauccgccucuccgccggcggcgacaucugggucacccgcgagcccuacgucuccugcgaccccgacaagugcuaccaguucgcccucggccagggcaccacccucaacaacguccacuccaacaacaccguccgcgaccgcacccccuaccgcacccuccucaugaacgagcucggcguccccuuccaccucggcaccaagcaggucugcaucgccugguccuccuccuccugccacgacggcaaggccuggcuccacgucugcaucaccggcgacgacaagaacgccaccgccuccuucaucuacaacggccgccucgucgacuccgucgucuccugguccaaggagauccuccgcacccaggaguccgagugcgucugcaucaacggcaccugcaccgucgucaugaccgacggcuccgccuccggcaaggccgacaccaagauccucuucaucgaggagggcaagaucguccacaccuccacccucuccggcuccgcccagcacgucgaggagugcuccugcuacccccgcuaccccggcguccgcugcgucugccgcgacaacuggaagggcuccaaccgccccaucgucgacaucaacaucaaggaccacuccaucgucuccuccuacgucugcuccggccucgucggcgacaccccccgcaagaacgacuccuccuccuccucccacugccucgaccccaacaacgaggagggcggccacggcgucaagggcugggccuucgacgacggcaacgacgucuggaugggccgcaccaucaacgagaccucccgccucggcuacgagaccuucaaggucaucgagggcugguccaaccccaaguccaagcuccagaucaaccgccaggucaucgucgaccgcggcgaccgcuccggcuacuccggcgucuucuccgucgagggcaaguccugcaucaaccgcugcuucuacgucgagcucauccgcggccgcaaggaggagaccgagguccucuggaccuccaacuccaucgucgucuucugcggcaccuccggcaccuacggcaccggcuccuggcccgacggcgccgaccucaaccucaugcccaucuga

SEQ ID NO: 121686 - RNA, 1410 nt, Artificial Sequence; identical to SEQ ID NO: 121673
  derived and/or modified CDS sequence (opt2) from neuraminidase__InfluenzaA__AIL93897

SEQ ID NO: 121687 - RNA, 1410 nt, Artificial Sequence
  derived and/or modified CDS sequence (opt2) from neuraminidase__InfluenzaA__AIL93909
augaaccccaaccagaagaucaucaccaucggcuccgucugcaugaccaucggcauggccaaccucauccuccagaucggcaacaucaucuccaucuggaucucccacuccauccagcucggcaaccagucccagaucgagaccugcaaccaguccgucaucaccuacgagaacaacaccugggucaaccagaccuacgucaacaucuccaacaccaacuucgccgccggccaguccgucgucuccgucaagcucgccggcaacuccucccucugccccgucuccggcugggccaucuacuccaaggacaacuccauccgcaucggcuccaagggcgacgucuucgucauccgcgagcccuucaucuccugcuccccccucgagugccgcaccuucuuccucacccagggcgcccuccucaacgacaagcacuccaacggcaccaucaaggaccgcucccccuaccgcacccucauguccugccccaucggcgagguccccucccccuacaacucccgcuucgaguccgucgccugguccgccuccgccugccacgacggcaucaacuggcucaccaucggcaucuccggccccgacuccggcgccgucgccguccucaaguacaacggcaucaucaccgacaccaucaaguccuggcgcaacaacauccuccgcacccaggaguccgagugcgucugcgucaacggcuccugcuucaccaucaugaccgacggccccuccgacggccaggccuccuacaagaucuuccgcaucgagaagggcaagaucgucaaguccgucgagaugaacgcccccaacuaccacuacgaggagugcuccugcuaccccgacuccuccgagaucaccugcgucugccgcgacaacuggcacggcuccaaccgccccugggucuccuucaaccagaaccucgaguaccagaucggcuacaucugcuccggcaucuucggcgacaacccccgccccaacgacaagaccggcuccugcggccccgucuccuccaacggcgccaacggcgucaagggcuucuccuucaaguacggcaacggcgucuggaucggccgcaccaaguccaucuccucccgcaagggcuucgagaugaucugggaccccaacggcuggaccggcaccgacaacaacuucuccaucaagcaggacaucgucggcaucaacgagugguccggcuacuccggcuccuucguccagcaccccgagcucaccggccucgacugcauccgccccugcuucugggucgagcucauccgcggccgccccaaggagaacaccaucuggaccuccggcuccuccaucuccuucugcggcgucaacuccgacaccgucggcugguccuggcccgacggcgccgagcuccccuucaccaucgacaaguga

SEQ ID NO: 121688 - RNA, 1410 nt, Artificial Sequence; identical to SEQ ID NO: 121673
  derived and/or modified CDS sequence (opt2) from neuraminidase__InfluenzaA__AIL93920

SEQ ID NO: 121689 - RNA, 1410 nt, Artificial Sequence
  derived and/or modified CDS sequence (opt2) from neuraminidase__InfluenzaA__AIL93943
augaaccccaaccagaagaucaucaccaucggcuccgucugcaugaccaucggcauggccaaccucauccuccagaucggcaacaucaucuccaucugggucucccacuccauccagcucggcaaccagucccagaucgagaccugcaaccaguccgucaucaccuacgagaacaacaccugggucaaccagaccuacgucaacaucuccaacaccaacuucgccgccggccaguccgucgucuccgucaagcucgccggcaacuccucccucugccccgucuccggcugggccaucuacuccaaggacaacuccguccgcaucggcuccaagggcgacgucuucgucauccgcgagcccuucaucuccugcucccccuccgagugccgcaccuucuuccucacccagggcgcccuccucaacgacaagcacuccaacggcaccaucaaggaccgcucccccuaccgcacccucauguccugccccaucggcgagguccccucccccuacaacucccgcuucgaguccgucgccugguccgccuccgccugccacgacggcaucaacuggcucaccaucggcaucuccggccccgacuccggcgccgucgccguccucaaguacaacggcaucaucaccgacaccaucaaguccuggcgcaacaacauccuccgcacccaggaguccgagugcgccugcgucaacggcuccugcuucaccaucaugaccgacggccccuccgacggccaggccuccuacaagaucuuccgcaucgagaagggcaagaucgucaaguccgucgagaugaacgcccccaacuaccacuacgaggagugcuccugcuaccccgacuccuccgagaucaccugcgucugccgcgacaacuggcacggcuccaaccgccccugggucuccuucaaccagaaccucgaguaccagaucggcuacaucugcuccggcgucuucggcgacaacccccgccccaacgacaagaccggcuccugcggccccgucuccuccaacggcgccaacggcgucaagggcuucuccuucaaguacggcaacggcgucuggaucggccgcaccaaguccaucuccucccgcaagggcuucgagaugaucugggaccccaacggcuggaccggcaccgacaacaacuucuccaucaagcaggacaucgucggcaucaaggagugguccggcuacuccggcuccuucguccagcaccccgagcucaccggccucgacugcauccgccccugcuucugggucgagcucauccgcggccgccccgaggagaacaccaucuggaccuccggcuccuccaucuccuucugcggcgucaacuccgacaccgucggcugguccuggcccgacggcgccgagcuccccuucaccaucgacaaguga

SEQ ID NO: 121690 - RNA, 1410 nt, Artificial Sequence; identical to SEQ ID NO: 121673
  derived and/or modified CDS sequence (opt2) from neuraminidase__InfluenzaA__AIL93954

SEQ ID NO: 121691 - RNA, 1410 nt, Artificial Sequence; identical to SEQ ID NO: 121673
  derived and/or modified CDS sequence (opt2) from neuraminidase__InfluenzaA__AIL93966

SEQ ID NO: 121692 - RNA, 1410 nt, Artificial Sequence
  derived and/or modified CDS sequence (opt2) from neuraminidase__InfluenzaA__AIL93978
augaaccccaaccagaagaucaucaccaucggcuccgucucccucaccaucuccaccaucugccucuucaugcagaucgccauccucaucaccaccgucacccuccacuucaagcaguacgaguucaacuccccccccaacaaccaggucaugcucugcgagcccaccaucaucgagcgcaacaucaccgagaucgucuaccucaccaacaccaccaucgagaaggagaucugccccaagcccgccgaguaccgcaacugguccaagccccagugcggcaucaccggcuucgcccccuucuccaaggacaacuccauccgccucuccgccggcggcgacaucugggucacccgcgagcccuacgucuccugcgaccccgacaagugcuaccaguucgcccucggccagggcaccacccucaacaacguccacuccaacaacaccguccgcgaccgcacccccuaccgcacccuccucaugaacgagcucggcguccccuuccaccucggcaccaagcaggucugcaucgccugguccuccuccuccugccacgacggcaaggccuggcuccacgucugcaucaccggcgacgacaagaacgccaccgccuccuucaucuacaacggccgccucgucgacuccgucgucuccugguccaaggagauccuccgcacccaggaguccgagugcgucugcaucaacggcaccugcaccgucgucaugaccgacggcuccgccuccggcaaggccgacaccaagauccucuucaucgaggagggcaagaucguccacaccuccacccucuccggcuccgcccagcacgucgaggagugcuccugcuacccccgcuaccccggcguccgcugcgucugccgcgacaacuggaagggcuccaaccgccccaucgucgacaucaacaucaaggaccacuccaucgucuccuccuacgucugcuccggccucgucggcgacaccccccgcaagaacgacuccuccuccuccucccacugccucgaccccaacaacgaggagggcggccacggcgucaagggcugggccuucgacgacggcaacgacgucuggaugggccgcaccaucaacgagaccucccgccucggcuacgagaccuucaaggucaucgagggcugguccaaccccaaguccaagcuccagaucaaccgccaggucaucgucgaccgcggcgaccgcuccggcuacuccggcaucuucuccgucgagggcaaguccugcaucaaccgcugcuucuacgucgagcucauccgcggccgcaaggaggagaccgagguccucuggaccuccaacuccaucgucgucuucugcggcaccuccggcaccuacggcaccggcuccuggcccgacggcgccgaccucaaccucaugcccaucuga

SEQ ID NO: 121693 - RNA, 1410 nt, Artificial Sequence; identical to SEQ ID NO: 121682
  derived and/or modified CDS sequence (opt2) from neuraminidase__InfluenzaA__AIL93990

SEQ ID NO: 121694 - RNA, 1410 nt, Artificial Sequence; identical to SEQ ID NO: 118182
  derived and/or modified CDS sequence (opt2) from neuraminidase__InfluenzaA__AIL94001

SEQ ID NO: 121695 - RNA, 1410 nt, Artificial Sequence; identical to SEQ ID NO: 121673
  derived and/or modified CDS sequence (opt2) from neuraminidase__InfluenzaA__AIL94013

SEQ ID NO: 121696 - RNA, 1410 nt, Artificial Sequence; identical to SEQ ID NO: 121673
  derived and/or modified CDS sequence (opt2) from neuraminidase__InfluenzaA__AIL94025

SEQ ID NO: 121697 - RNA, 1410 nt, Artificial Sequence; identical to SEQ ID NO: 121673
  derived and/or modified CDS sequence (opt2) from neuraminidase__InfluenzaA__AIL94037

SEQ ID NO: 121698 - RNA, 1410 nt, Artificial Sequence; identical to SEQ ID NO: 121673
  derived and/or modified CDS sequence (opt2) from neuraminidase__InfluenzaA__AIL94049

SEQ ID NO: 121699 - RNA, 1410 nt, Artificial Sequence; identical to SEQ ID NO: 121682
  derived and/or modified CDS sequence (opt2) from neuraminidase__InfluenzaA__AIL94061

SEQ ID NO: 121700 - RNA, 1410 nt, Artificial Sequence
  derived and/or modified CDS sequence (opt2) from neuraminidase__InfluenzaA__AIL94072
augaaccccaaccagaagaucaucaccaucggcuccgucugcaugaccaucggcauggccaaccucauccuccagaucggcaacaucaucuccaucuggaucucccacuccauccagcucggcaaccagucccagaucgaggccugcaaccaguccgucaucaccuacgagaacaacaccugggucaaccagaccuacgucaacaucuccaacaccaacuucgccaccggccaguccgucgucuccgucaagcucgccggcaacuccucccucugccccgucuccggcugggccaucuacuccaaggacaacuccguccgcaucggcuccaagggcgacgucuucgucauccgcgagcccuucaucuccugcuccccccucgagugccgcaccuucuuccucacccagggcgcccuccucaacgacaagcacuccaacggcaccaucaaggaccgcucccccuaccgcacccucauguccugccccaucggcgagguccccucccccuacaacucccgcuucgaguccgucgccugguccgccuccgccugccacgacggcaucaacuggcucaccaucggcaucuccggccccgacuccggcgccgucgccguccucaaguacaacggcaucaucaccgacaccaucaaguccuggaagaacaacauccuccgcacccaggaguccgagugcgccugcgucaacggcuccugcuucaccaucaugaccgacggccccuccgacggccaggccuccuacaagaucuuccgcaucgagaagggcaagaucgucaaguccgucgagaugaacgcccccaacuaccacuacgaggagugcuccugcuaccccgacuccuccgagaucaccugcgucugccgcgacaacuggcacggcuccaaccgccccugggucuccuucaaccagaaccucgaguaccagaucggcuacaucugcuccggcgucuucggcgacaacccccgccccaacgacaagaccggcuccugcggccccguccucuccaacggcgccaacggcgucaagggcuucuccuucaaguacggcaacggcgucuggaucggccgcaccaaguccaucuccucccgcaagggcuucgagaugaucugggaccccaacggcuggaccggcaccgacaacaacuucuccaucaagcaggacaucgucggcaucaacgagugguccggcuacuccggcuccuucguccagcaccccgagcucaccggccucgacugcauccgccccugcuucuggaucgagcucauccgcggccgccccaaggagaacaccaucuggaccuccggcuccuccaucuccuucugcggcgucaacuccgacaccgucggcugguccuggcccgacggcgccgagcuccccuucaccaucgacaaguga

SEQ ID NO: 121701 - RNA, 1410 nt, Artificial Sequence; identical to SEQ ID NO: 121682
  derived and/or modified CDS sequence (opt2) from neuraminidase__InfluenzaA__AIL94083

SEQ ID NO: 121702 - RNA, 1410 nt, Artificial Sequence; identical to SEQ ID NO: 121673
  derived and/or modified CDS sequence (opt2) from neuraminidase__InfluenzaA__AIL94238

SEQ ID NO: 121703 - RNA, 1410 nt, Artificial Sequence
  derived and/or modified CDS sequence (opt2) from neuraminidase__InfluenzaA__AIL94250
augaaccccaaccagaagaucaucaccaucggcuccgucugcaugaccaucggcauggccaaccucauccuccagaucggcaacaucaucuccaucuggaucucccacuccauccagcucggcaaccagucccagaucgaggccugcaaccaguccgucaucaccuacgagaacaacaccugggucaaccagaccuacgucaacaucuccaacaccaacuucgccgccggccaguccgucgucuccgucaagcucgccggcaacuccucccucugccccgucuccggcugggccaucuacuccaaggacaacuccguccgcaucggcuccaagggcgacgucuucgucauccgcgagcccuucaucuccugcuccccccucgagugccgcaccuucuuccucacccagggcgcccuccucaacgacaagcacuccaacggcaccaucaaggaccgcucccccuaccgcacccucauguccugccccaucggcgagguccccucccccuacaacucccgcuucgaguccgucgccugguccgccuccgccugccacgacggcaucaacuggcucaccaucggcaucuccggccccgacuccggcgccgucgccguccucaaguacaacggcaucaucaccgacaccaucaaguccuggaagaacaacauccuccgcacccaggaguccgagugcgccugcgucaacggcuccugcuucaccaucaugaccgacggccccaacgacggccaggccuccuacaagaucuuccgcaucgagaagggcaagaucgucaaguccgucgagaugaacgcccccaacuaccacuacgaggagugcuccugcuaccccgacuccuccgagaucaccugcgucugccgcgacaacuggcacggcuccaaccgccccugggucuccuucaaccagaaccucgaguaccagaucggcuacaucugcuccggcgucuucggcgacaacccccgccccaacgacaagaccggcuccugcggccccgucuccuccaacggcgccaacggcgucaagggcuucuccuucaaguacggcaacggcgucuggaucggccgcaccaaguccaucuccucccgcaagggcuucgagaugaucugggaccccaacggcuggaccggcaccgacaacaacuucuccaucaagcaggacaucgucggcaucaacgagugguccggcuacuccggcuccuucguccagcaccccgagcucaccggccucgacugcauccgccccugcuucugggucgagcucauccgcggccgccccaaggagaacaccaucuggaccuccggcuccuccaucuccuucugcggcgucaacuccgacaccgucggcugguccuggcccgacggcgccgagcuccccuucaccaucgacaaguga

SEQ ID NO: 121704 - RNA, 1410 nt, Artificial Sequence; identical to SEQ ID NO: 118182
  derived and/or modified CDS sequence (opt2) from neuraminidase__InfluenzaA__AIL94261

SEQ ID NO: 121705 - RNA, 1410 nt, Artificial Sequence; identical to SEQ ID NO: 118182
  derived and/or modified CDS sequence (opt2) from neuraminidase__InfluenzaA__AIL94273

SEQ ID NO: 121706 - RNA, 1410 nt, Artificial Sequence; identical to SEQ ID NO: 118182
  derived and/or modified CDS sequence (opt2) from neuraminidase__InfluenzaA__AIL94285

SEQ ID NO: 121707 - RNA, 1410 nt, Artificial Sequence
  derived and/or modified CDS sequence (opt2) from neuraminidase__InfluenzaA__AIL94297
augaaccccaaccagaagaucaucaccaucggcuccgucucccucaccaucuccaccaucugcuucuucaugcagaucgccauccucaucaccaccgucacccuccacuucaagcaguacgaguucaacuccccccccaacaaccaggucaugcucugcgagcccaccaucaucgagcgcaacaucaccgagaucgucuaccucaccaacaccaccaucgagaaggagaucugccccaagcccgccgaguaccgcaacugguccaagccccagugcggcaucaccggcuucgcccccuucuccaaggacaacuccauccgccucuccgccggcggcgacaucugggucacccgcgagcccuacgucuccugcgaccccgacaagugcuaccaguucgcccucggccagggcaccacccucaacaacguccacuccaacaacaccguccgcgaccgcacccccuaccgcacccuccucaugaacgagcucggcguccccuuccaccucggcaccaagcaggucugcaucgccugguccuccuccuccugccacgacggcaaggccuggcuccacgucugcaucaccggcgacgacaagaacgccaccgccuccuucaucuacaacggccgccucgucgacuccgucgucuccugguccaaggagauccuccgcacccaggaguccgagugcgucugcaucaacggcaccugcaccgucgucaugaccgacggcuccgccuccggcaaggccgacaccaagauccucuucaucgaggagggcaagaucguccacacccgcacccucuccggcuccgcccagcacgucgaggagugcuccugcuacccccgcuaccccggcguccgcugcgucugccgcgacaacuggaagggcuccaaccgccccaucgucgacaucaacaucaaggaccacuccaucgucuccuccuacgucugcuccggccucgucggcgacaccccccgcaagaacgacuccuccuccuccucccacugccucgaccccaacaacgaggagggcggccacggcgucaagggcugggccuucgacgacggcaacgacgucuggaugggccgcaccaucaacgagaccucccgccucggcuacgagaccuucaaggucaucgagggcugguccaaccccaaguccaagcuccagaucaacaagcaggucaucgucgaccgcggcgaccgcuccggcuacuccggcaucuucuccgucgagggcaaguccugcaucaaccgcugcuucuacgucgagcucauccgcggccgcaaggaggagaccgagguccucuggaccuccaacuccaucgucgucuucugcggcaccuccggcaccuacggcaccggcuccuggcccgacggcgccgaccucaaccucaugcccaucuga

SEQ ID NO: 121708 - RNA, 1410 nt, Artificial Sequence; identical to SEQ ID NO: 121673
  derived and/or modified CDS sequence (opt2) from neuraminidase__InfluenzaA__AIL94309

SEQ ID NO: 121709 - RNA, 1410 nt, Artificial Sequence; identical to SEQ ID NO: 121692
  derived and/or modified CDS sequence (opt2) from neuraminidase__InfluenzaA__AIL94321

SEQ ID NO: 121710 - RNA, 1410 nt, Artificial Sequence; identical to SEQ ID NO: 118182
  derived and/or modified CDS sequence (opt2) from neuraminidase__InfluenzaA__AIL94368

SEQ ID NO: 121711 - RNA, 1410 nt, Artificial Sequence
  derived and/or modified CDS sequence (opt2) from neuraminidase__InfluenzaA__AIL94380
augaaccccaaccagaagaucaucaccaucggcuccgucucccucaccaucuccaccaucugcuucuucaugcagaucgccauccucaucaccaccgucacccuccacuucaagcaguacgaguucaacuccccccccaacaaccaggucaugcucugcgagcccaccaucaucgagcgcaacaucaccgagaucgucuaccucaccaacaccaccaucgagaaggagaucugccccaagcccgccgaguaccgcaacugguccaagccccagugcggcaucaccggcuucgcccccuucuccaaggacaacuccauccgccucuccgccggcggcgacaucugggucacccgcgagcccuacgucuccugcgaccccgacaagugcuaccaguucgcccucggccagggcaccacccucaacaacguccacuccaacaacaccguccgcgaccgcacccccuaccgcacccuccucaugaacgagcucggcguccccuuccaccucggcaccaagcaggucugcaucgccugguccuccuccuccugccacgacggcaaggccuggcuccacgucugcaucaccggcgacgacaagaacgccaccgccuccuucaucuacaacggccgccucgucgacuccgucgucuccugguccaaggagauccuccgcacccaggaguccgagugcgucugcaucaacggcaccugcaccgucgucaugaccgacggcuccgccuccggcaaggccgacaccaagauccucuucaucgaggagggcaagaucguccacaccuccacccucuccggcuccgcccagcacgucgaggagugcuccugcuacccccgcuaccccggcguccgcugcgucugccgcgacaacuggaagggcuccaaccgccccgucgucgacaucaacaucaaggaccacuccaucgucuccuccuacgucugcuccggccucgucggcgacaccccccgcaagaacgacuccuccuccuccucccacugccucgaccccaacaacgaggagggcggccacggcgucaagggcugggccuucgacgacggcaacgacgucuggaugggccgcaccaucaacgagaccucccgccucggcuacgagaccuucaaggucaucgagggcugguccaaccccaaguccaagcuccagaucaacaagcaggucaucgucgaccgcggcgaccgcuccggcuacuccggcaucuucuccgucgagggcaaguccugcaucaaccgcugcuucuacgucgagcucauccgcggccgcaaggaggagaccgagguccucuggaccuccaacuccaucgucgucuucugcggcaccuccggcaccuacggcaccggcuccuggcccgacggcgccgaccucaaccucaugcccaucuga

SEQ ID NO: 121712 - RNA, 1410 nt, Artificial Sequence
  derived and/or modified CDS sequence (opt2) from neuraminidase__InfluenzaA__AIL94392
augaaccccaaccagaagaucaucaccaucggcuccgucugcaugaccaucggcauggccaaccucauccuccagaucggcaacaucaucuccaucuggaucucccacuccauccagcucggcaaccagucccagaucgaggccugcaaccaguccgucaucaccuacgagaacaacaccugggucaaccagaccuacgucaacaucuccaacaccaacuucgccgccggccaguccgucgucuccgucaagcucgccggcaacuccucccucugccccgucuccggcugggccaucuacuccaaggacaacuccguccgcaucggcuccaagggcgacgucuucgucauccgcgagcccuucaucuccugcuccccccucgagugccgcaccuucuuccucacccagggcgcccuccucaacgacaagcacuccaacggcaccaucaaggaccgcucccccuaccgcacccucauguccugccccaucggcgagguccccucccccuacaacucccgcuucgaguccgucgccugguccgccuccgccugccacgacggcaucaacuggcucaccaucggcaucuccggccccgacuccggcgccgucgccguccucaaguacaacggcaucaucaccgacaccaucaaguccuggaagaacaacauccuccgcacccaggaguccgagugcgccugcgucaacggcuccugcuucaccaucaugaccgacggccccuccgacggccaggccuccuacaagaucuuccgcaucgagaagggcaagaucgucaaguccgucgagaugaacgcccccaacuaccacuacgaggagugcuccugcuaccccgacuccuccgagaucaccugcgucugccgcgacaacuggcacggcuccaaccgccccugggucuccuucaaccagaaccucgaguaccagaucggcuacaucugcuccggcgucuucggcgacaacccccgccccaacgacaagaccggcuccugcggccccgucuccuccaacggcgccaacggcgucaagggcuucuccuucaaguacggcaacggcgucuggaucggccgcaccaaguccaucuccucccgcaagggcuucgagaugaucugggaccccaacggcuggaccggcaccgacaacaacuucuccaucaagcaggacaucgucggcaucaacgagugguccggcuacuccggcuccuucguccagcaccccgagcucaccggccucgacugcauccgccccugcuucugggucgagcucauccgcggccgccccaaggagaacaccaucuggaccuccggcuccuccaucuccuucugcggcgucaacuccgacaccgucggcugguccuggcccgacggcgccgagcuccccuucaccaucgacaaguga

SEQ ID NO: 121713 - RNA, 1410 nt, Artificial Sequence
  derived and/or modified CDS sequence (opt2) from neuraminidase__InfluenzaA__AIL94403
augaaccccaaccagaagaucaucaccaucggcuccgucugcaugaccaucggcauggccaaccucauccuccagaucggcaacaucaucuccaucuggaucucccacuccauccagcucggcaaccagucccagaucgaggccugcaaccaguccgucaucaccuacgagaacaacaccugggucaaccagaccuacgucaacaucuccaacaccaacuucgccgccggccaguccgucgucuccgucaagcucgccggcaacuccucccucugccccgucuccggcugggccaucuacuccaaggacaacuccguccgcaucggcuccaagggcgacgucuucgucauccgcgagcccuucaucuccugcuccccccucgagugccgcaccuucuuccucacccagggcgcccuccucaacgacaagcacuccaacggcaccaucaaggaccgcucccccuaccgcacccucauguccugccccaucggcgagguccccucccccuacaacucccgcuucgaguccgucgccugguccgccuccgccugccacgacggcaucaacuggcucaccaucggcaucuccggccccgacuccggcgccgucgccguccucaaguacaacggcaucaucaccgacaccaucaaguccuggaagaacaacauccuccgcacccaggaguccgagugcgccugcgucaacggcuccugcuucaccaucaugaccgacggccccuccgacggccaggccuccuacaagaucuuccgcaucgagaagggcaagaucgucaaguccgucgagaugaacgcccccaacuaccacuacgaggagugcuccugcuaccccgacuccuccgagaucaccugcgucugccgcgacaacuggcacggcuccaaccgccccugggucuccuucaaccagaaccucgaguaccagaucggcuacaucugcuccggcgucuucggcgacaacccccgccccaacgacaagaccggcuccugcgaccccgucuccuccaacggcgccaacggcgucaagggcuucuccuucaaguacggcaacggcgucuggaucggccgcaccaaguccaucuccucccgcaagggcuucgagaugaucugggaccccaacggcuggaccggcaccgacaacaacuucuccaucaagcaggacaucgucggcaucaacgagugguccggcuacuccggcuccuucguccagcaccccgagcucaccggccucgacugcauccgccccugcuucugggucgagcucauccgcggccgccccaaggagaacaccaucuggaccuccggcuccuccaucuccuucugcggcgucaacuccgacaccgucggcugguccuggcccgacggcgccgagcuccccuucaccaucgacaaguga

SEQ ID NO: 121714 - RNA, 1410 nt, Artificial Sequence; identical to SEQ ID NO: 118182
  derived and/or modified CDS sequence (opt2) from neuraminidase__InfluenzaA__AIL94426

SEQ ID NO: 121715 - RNA, 1410 nt, Artificial Sequence
  derived and/or modified CDS sequence (opt2) from neuraminidase__InfluenzaA__AIL94438
augaaccccaaccagaagaucaucaccaucggcuccgucugcaugaccaucggcauggccaaccucauccuccagaucggcaacaucaucuccaucuggaucucccacuccauccagcucggcaaccagucccagaucgaggccugcaaccaguccgucaucaccuacgagaacaacaccugggucaaccagaccuacgucaacaucuccaacaccaacuucgccaccggccaguccgucgucuccgucaagcucgccggcaacuccucccucugccccgucuccggcugggccaucuacuccaaggacaacuccguccgcaucggcuccaagggcgacgucuucgucauccgcgagcccuucaucuccugcuccccccucgagugccgcaccuucuuccucacccagggcgcccuccucaacgacaagcacuccaacggcaccaucaaggaccgcucccccuaccgcacccucauguccugccccaucggcgagguccccucccccuacaacucccgcuucgaguccgucgccugguccgccuccgccugccacgacggcaucaacuggcucaccaucggcaucuccggccccgacuccggcgccgucgccguccucaaguacaacggcaucaucaccgacaccaucaaguccuggaagaacaacauccuccgcacccaggaguccgagugcgccugcgucaacggcuccugcuucaccaucaugaccgacggccccuccgacggccaggccuccuacaagaucuuccgcaucgagaagggcaagaucgucaaguccgucgagaugaacgcccccaacuaccacuacgaggagugcuccugcuaccccgacuccuccgagaucaccugcgucugccgcgacaacuggcacggcuccaaccgccccugggucuccuucaaccagaaccucgaguaccagaucggcuacaucugcuccggcgucuucggcgacaacccccgccccaacgacaagaccggcuccugcggccccgucuccuccaacggcgccaacggcgucaagggcuucuccuucaaguacggcaacggcgucuggaucggccgcaccaaguccgucuccucccgcaagggcuucgagaugaucugggaccccaacggcuggaccggcaccgacaacaacuucuccaucaagcaggacaucgucggcaucaacgagugguccggcuacuccggcuccuucguccagcaccccgagcucaccggccucgacugcauccgccccugcuucugggucgagcucauccgcggccgccccaaggagaacaccaucuggaccuccggcuccuccaucuccuucugcggcgucaacuccgacaccgucggcugguccuggcccgacggcgccgagcuccccuucaccaucgacaaguga

SEQ ID NO: 121716 - RNA, 1410 nt, Artificial Sequence
  derived and/or modified CDS sequence (opt2) from neuraminidase__InfluenzaA__AIL94449
augaaccccaaccagaagaucaucaccaucggcuccgucucccucaccaucuccaccaucugcuucuucaugcagaucgccauccucaucaccaccgucacccuccacuucaagcaguacgaguucaacuccccccccaacaaccaggucaugcucugcgagcccaccaucaucgagcgcaacaucaccgagaucgucuaccucaccaacaccaccaucgagaaggagaucugccccaagcccgccaaguaccgcaacugguccaagccccagugcggcaucaccggcuucgcccccuucuccaaggacaacuccauccgccucuccgccggcggcgacaucugggucacccgcgagcccuacgucuccugcgaccccgacaagugcuaccaguucgcccucggccagggcaccacccucaacaacguccacuccaacaacaccguccgcgaccgcacccccuaccgcacccuccucaugaacgagcucggcguccccuuccaccucggcaccaagcaggucugcaucgccugguccuccuccuccugccacgacggcaaggccuggcuccacgucugcaucaccggcgacgacaagaacgccaccgccuccuucaucuacaacggccgccucgucgacuccgucgucuccugguccaaggagauccuccgcacccaggaguccgagugcgucugcaucaacggcaccugcaccgucgucaugaccgacggcuccgccuccggcaaggccgacaccaagauccucuucaucgaggagggcaagaucguccacaccuccacccucuccggcuccgcccagcacgucgaggagugcuccugcuacccccgcuaccccggcguccgcugcgucugccgcgacaacuggaagggcuccaaccgccccaucgucgacaucaacaucaaggaccacuccaucgucuacuccuacgucugcuccggccucgucggcgacaccccccgcaagaacgacuccuccuccuccucccacugccucaaccccaacaacgaggagggcggccacggcgucaagggcugggccuucgacgacggcaacgacgucuggaugggccgcaccaucaacgagaccucccgccucggcuacgagaccuucaaggucaucgagggcugguccaaccccaaguccaagcuccagaucaaccgccaggucaucgucgaccgcggcgaccgcuccggcuacuccggcaucuucuccgucgagggcaaguccugcaucaaccgcugcuucuacgucgagcucauccgcggccgcaaggaggagaccgagguccucuggaccuccaacuccaucgucgucuucugcggcaccuccggcaccuacggcaccggcuccuggcccgacggcgccgaccucaaccucaugcccaucuga

SEQ ID NO: 121717 - RNA, 1410 nt, Artificial Sequence; identical to SEQ ID NO: 121711
  derived and/or modified CDS sequence (opt2) from neuraminidase__InfluenzaA__AIL94461

SEQ ID NO: 121718 - RNA, 1410 nt, Artificial Sequence
  derived and/or modified CDS sequence (opt2) from neuraminidase__InfluenzaA__AIL94473
augaaccccaaccagaagaucaucaccaucggcuccgucugcaugaccaucggcauggccaaccucauccuccagaucggcaacaucaucuccaucugggucggccacuccauccagcucggcaaccagucccagaucgagaccugcaaccaguccgucaucaccuacgagaacaacaccugggucaaccagaccuacgucaacaucuccaacaccaacuucgccgccggccaguccgucguccccgucaagcucgccggcaacuccucccucugccccgucuccggcugggccaucuacuccaaggacaacuccguccgcaucggcuccaagggcgacgucuucgucauccgcgagcccuucaucuccugcuccccccucgagugccgcaccuucuuccucacccagggcgcccuccucaacgacaagcacuccaacggcaccaucaaggaccgcucccccuaccgcacccucauguccugccccaucggcgagguccccucccccuacaacucccgcuucgaguccgucgccugguccgccuccgccugccacgacggcaucaacuggcucaccaucggcaucuccggccccgacuccggcgccgucgccguccucaaguacaacggcaucaucaccgacaccaucaaguccuggcgcaacaacauccuccgcacccaggaguccgagugcgccugcgucaacggcuccugcuucaccaucaugaccgacggccccuccgacggccaggccuccuacaagaucuuccgcaucgagaagggcaagaucgucaaguccgucgagaugaacacccccaacuaccacuacgaggagugcuccugcuaccccgacuccuccgagaucaccugcgucugccgcgacaacuggcacggcuccaaccgccccugggucuccuucaaccagaaccucgaguaccagaucggcuacaucugcuccggcgucuucggcgacaacccccgccccaacgacaagaccggcuccugcggccccgucuccuccaacggcgccaacggcgucaagggcuucuccuucaaguacggcaacggcgucuggaucggccgcaccaaguccaucuccucccgcaagggcuucgagaugaucugggaccccaacggcuggaccggcaccgacaacaacuucuccaucaagcaggacaucgucggcaucaaggagugguccggcuacuccggcuccuucguccagcaccccgagcucaccggccucgacugcauccgccccugcuucugggucgagcucauccgcggccgccccgaggagaacaccaucuggaccuccggcuccuccaucuccuucugcggcgucaacuccgacaucgucggcugguccuggcccgacggcgccgagcuccccuucaccaucgacaaguga

SEQ ID NO: 121719 - RNA, 1410 nt, Artificial Sequence; identical to SEQ ID NO: 120772
  derived and/or modified CDS sequence (opt2) from neuraminidase__InfluenzaA__AIL94484

SEQ ID NO: 121720 - RNA, 1410 nt, Artificial Sequence; identical to SEQ ID NO: 121682
  derived and/or modified CDS sequence (opt2) from neuraminidase__InfluenzaA__AIL94507

SEQ ID NO: 121721 - RNA, 1410 nt, Artificial Sequence
  derived and/or modified CDS sequence (opt2) from neuraminidase__InfluenzaA__AIL94518
augaaccccaaccagaagaucaucaccaucggcuccgucucccucaccaucuccaccaucugcuucuucaugcagaucgccauccucaucaccaccgucacccuccacuucaagcaguacgaguucaacuccccccccaacaaccaggucaugcucugcgagcccaccaucaucgagcgcaacaucaccgagaucgucuaccucaccaacaccaccaucgagaaggagaucugccccaagcccgccgaguaccgcaacugguccaagccccagugcggcaucaccggcuucgcccccuucuccaaggacaacuccauccgccucuccgccggcggcgacaucugggucacccgcgagcccuacgucuccugcgaccccgacaagugcuaccaguucgcccucggccagggcaccacccucaacaacguccacuccaacaacaccguccgcgaccgcacccccuaccgcacccuccucaugaacgagcucggcguccccuuccaccucggcaccaagcaggucugcaucgccugguccuccuccuccugccacgacggcaaggccuggcuccacgucugcaucaccggcgacgacaagaacgccaccgccuccuucaucuacaacggccgccucgucgacuccgucgucuccugguccaaggagauccuccgcacccaggaguccgagugcgucugcaucaacggcaccugcaccgucgucaugaccgacggcuccgccuccggcaaggccgacaccaagauccucuucaucgaggagggcaagaucguccacaccuccacccucuccggcuccgcccagcacgucgaggagugcuccugcuacccccgcuaccccggcguccgcugcgucugccgcgacaacuggaagggcuccaaccgccccaucgucgacaucaacaucaaggaccacuccaucgucuccuccuacgucugcuccggccucgucggcgacaccccccgcaagaacgacuccuccuccuccucccacugccucgaccccaacaacgaggagggcggccacggcgucaagggcugggccuucgacgacggcaacgacgucuggaugggccgcaccaucaacgagaccucccgccucggcuacgagaccuucaaggucaucgagggcugguccaaccccaaguccaagcuccagaucaacaagcaggucaucgucgaccgcggcgaccgcuccggcuacuccggcaucuucuccgucgagggcaaguccugcaucaaccgcugcuucuacgucgagcucauccgcggccgcaaggaggagaccgagguccucuggaccuccaacuccaucgucgucuucugcggcaccuccggcaccuacggcaccggcuccuggcccgacggcgccgaccucucccucaugcccaucuga

SEQ ID NO: 121722 - RNA, 1410 nt, Artificial Sequence
  derived and/or modified CDS sequence (opt2) from neuraminidase__InfluenzaA__AIL94530
augaaccccaaccagaagaucaucaccaucggcuccgucucccucaccaucuccaccaucugcuucuucaugcagaucgccauccucaucaccaccgucacccuccacuucaagcaguacgaguucaacuccccccccaacaaccaggucaugcucugcgagcccaccaucaucgagcgcaacaucaccgagaucgucuaccucaccaacaccaccaucgagaaggagaucugccccaagcccgccgaguaccgcaacugguccaagccccagugcggcaucaccggcuucgcccccuucuccaaggacaacuccauccgccucuccgccggcggcgacaucugggucacccgcgagcccuacgucuccugcgaccccgacaagugcuaccaguucgcccucggccagggcaccacccucaacaacguccacuccaacaacaccguccgcgaccgcacccccuaccgcacccuccucaugaacgagcucggcguccccuuccaccucggcaccaagcaggucugcaucgccugguccuccuccuccugccacgacggcaaggccuggcuccacgucugcaucaccggcgacgacaagaacgccaccgccuccuucaucuacaacggccgccucgucgacuccgucgucuccugguccaaggagauccuccgcacccaggaguccgagugcgucugcaucaacggcaccugcaccgucgucaugaccgacggcuccgccuccggcaaggccgacaccaagauccucuucaucgaggagggcaagaucguccacaccuccacccucuccggcuccgcccagcacgucgaggagugcuccugcuacccccgcuaccccggcguccgcugcgucugccgcgacaacuggaagggcuccaaccgccccaucgucgacaucaacaucaaggaccacuccaucgucuccuccuacgucugcuccggccucgucggcgacaccccccgcaagaacgacuccuccuccuccucccacugccucaaccccaacaacgaggagggcggccacggcgucaagggcugggccuucgacgacggcaacgacgucuggaugggccgcaccaucaacgagaccucccgccucggcuacgagaccuucaaggucaucgagggcugguccaaccccaaguccaagcuccagaucaaccgccaggucaucgucgaccgcggcgaccgcuccggcuacuccggcaucuucuccgucgagggcaaguccugcaucaaccgcugcuucuacgucgagcucauccgcggccgcaaggaggagaccgagguccucuggaccuccaacuccaucgucgucuucugcggcaccuccggcaccuacggcaccggcuccuggcccgacggcgccgaccucaaccucaugcccaucuga

SEQ ID NO: 121723 - RNA, 1410 nt, Artificial Sequence; identical to SEQ ID NO: 121712
  derived and/or modified CDS sequence (opt2) from neuraminidase__InfluenzaA__AIL94542

SEQ ID NO: 121724 - RNA, 1410 nt, Artificial Sequence; identical to SEQ ID NO: 121682
  derived and/or modified CDS sequence (opt2) from neuraminidase__InfluenzaA__AIL94553

SEQ ID NO: 121725 - RNA, 1410 nt, Artificial Sequence; identical to SEQ ID NO: 121673
  derived and/or modified CDS sequence (opt2) from neuraminidase__InfluenzaA__AIL94564

SEQ ID NO: 121726 - RNA, 1410 nt, Artificial Sequence; identical to SEQ ID NO: 121682
  derived and/or modified CDS sequence (opt2) from neuraminidase__InfluenzaA__AIL94576

SEQ ID NO: 121727 - RNA, 1410 nt, Artificial Sequence
  derived and/or modified CDS sequence (opt2) from neuraminidase__InfluenzaA__AIL94587
augaaccccaaccagaagaucaucaccaucggcuccgucugcaugaccaucggcauggccaaccucauccuccagaucggcaacaucaucuccaucuggaucucccacuccauccagcucggcaaccagucccagaucgaggccugcaaccaguccgucaucaccuacgagaacaacaccugggucaaccagaccuacgucaacaucuccaacaccaacuucgccgccggccaguccgucgucuccgucaagcucgccggcaacuccucccucugccccgucuccggcugggccaucuacuccaaggacaacuccguccgcaucggcuccaagggcgacgucuucgucauccgcgagcccuucaucuccugcuccccccucgagugccgcaccuucuuccucacccagggcgcccuccucaacgacaagcacuccaacggcaccaucaaggaccgcucccccuaccgcacccucauguccugccccaucggcgagguccccucccccuacaacucccgcuucgaguccgucgccugguccgccuccgccugccacgacggcaucaacuggcucaccaucggcaucuccggccccgacuccggcgccgucgccguccucaaguacaacggcaucaucaccgacaccaucaaguccuggaagaacaacauccuccgcacccaggaguccgagugcgccugcgucaacggcuccugcuucaccaucaugaccgacggccccuccgacggccaggccuccuacaagaucuuccgcaucgagaagggcaagaucgucaaguccgucgagauggacgcccccaacuaccacuacgaggagugcuccugcuaccccgacuccuccgagaucaccugcgucugccgcgacaacuggcacggcuccaaccgccccugggucuccuucaaccagaaccucgaguaccagaucggcuacaucugcuccggcgucuucggcgacaacccccgccccaacgacaagaccggcuccugcggccccgucuccuccaacggcgccaacggcgucaagggcuucuccuucaaguacggcaacggcgucuggaucggccgcaccaaguccaucuccucccgcaagggcuucgagaugaucugggaccccaacggcuggaacggcaccgacaacaacuucuccaucaagcaggacaucgucggcaucaacgagugguccggcuacuccggcuccuucguccagcaccccgagcucaccggccucgacugcauccgccccugcuucugggucgagcucauccgcggccgccccaaggagaacaccaucuggaccggcggcuccuccaucuccuucugcggcgucaacuccgacaccgucggcugguccuggcccgacggcgccgagcuccccuucaccaucgacaaguga

SEQ ID NO: 121728 - RNA, 1410 nt, Artificial Sequence; identical to SEQ ID NO: 121712
  derived and/or modified CDS sequence (opt2) from neuraminidase__InfluenzaA__AIL94598

SEQ ID NO: 121729 - RNA, 1410 nt, Artificial Sequence
  derived and/or modified CDS sequence (opt2) from neuraminidase__InfluenzaA__AIL94609
augaaccccaaccagaagaucaucaccaucggcuccgucucccucaccaucuccaccaucugccucuucaugcagaucgccauccucaucaccaccgucacccuccacuucaagcaguacgaguucaacuccccccccaacaaccaggucaugcucugcgagcccaccaucaucgagcgcaacaucaccgagaucgucuaccucaccaacaccaccaucgagaaggagaucugccccaagcccgccgaguaccgcaacugguccaagccccagugcggcaucaccggcuucgcccccuucuccaaggacaacuccauccgccucuccgccggcggcgacaucugggucacccgcgagcccuacgucuccugcgaccccgacaagugcuaccaguucgcccucggccagggcaccacccucaacaacguccacuccaacaacaccguccgcgaccgcacccccuaccgcacccuccucauguccgagcucggcguccccuuccaccucggcaccaagcaggucugcaucgccugguccuccuccuccugccacgacggcaaggccuggcuccacgucugcaucaccggcgacgacaagaacgccaccgccuccuucaucuacaacggccgccucgucgacuccgucgucuccugguccaaggagauccuccgcacccaggaguccgagugcgucugcaucaacggcaccugcaccgucgucaugaccgacggcuccgccuccggcaaggccgacaccaagauccucuucaucgaggagggcaagaucguccacaccuccacccucuccggcuccgcccagcacgucgaggagugcuccugcuacccccucuaccccggcguccgcugcgucugccgcgacaacuggaagggcuccaaccgccccaucgucgacaucaacaucaaggaccacuccaucgucuccuccuacgucugcuccggccucgucggcgacaccccccgcaagaacgacuccuccuccuccucccacugccucgaccccaacaacgaggagggcggccacggcgucaagggcugggccuucgacgacggcaacgacgucuggaugggccgcaccaucaacgagaccucccgccucggcuacgagaccuucaaggucaucgagggcugguccaaccccaaguccaagcuccagaucaaccgccaggucaucgucgaccgcggcgaccgcuccggcuacuccggcaucuucuccgucgagggcaaguccugcaucaaccgcugcuucuacgucgagcucauccgcggccgcaaggaggagaccgagguccucuggaccuccaacuccaucgucgucuucugcggcaccuccggcaccuacggcaccggcuccuggcccgacggcgccgaccucaaccucaugcccaucuga

SEQ ID NO: 121730 - RNA, 1410 nt, Artificial Sequence
  derived and/or modified CDS sequence (opt2) from neuraminidase__InfluenzaA__AIL94621
augaaccccaaccagaagaucaucaccaucggcuccgucugcaugaccaucggcauggccaaccucauccuccagaucggcaacaucaucuccaucuggaucucccacuccauccagcucggcaaccagucccagaucgaggccugcaaccaguccgucaucaccuacgagaacaacaccugggucaaccagaccuacgucaacaucuccaacaccaacuucgccgccggccaguccgucguccccgucaagcucgccggcaacuccucccucugccccgucuccggcugggccaucuacuccaaggacaacuccguccgcaucggcuccaagggcgacgucuucgucauccgcgagcccuucaucuccugcuccccccucgagugccgcaccuucuuccucacccagggcgcccuccucaacgacaagcacuccaacggcaccaucaaggaccgcucccccuaccgcacccucauguccugccccaucggcgagguccccucccccuacaacucccgcuucgaguccgucgccugguccgccuccgccugccacgacggcaucaacuggcucaccaucggcaucuccggccccgacuccggcgccgucgccguccucaaguacaacggcaucaucaccgacaccaucaaguccuggaagaacaacauccuccgcacccaggaguccgagugcgccugcgucaacggcuccugcuucaccaucaugaccgacggccccuccgacggccaggccuccuacaagaucuuccgcaucgagaagggcaagaucgucaaguccgucgagaugaacgcccccaacuaccacuacgaggagugcuccugcuaccccgacuccuccgagaucaccugcgucugccgcgacaacuggcacggcuccaaccgccccugggucuccuucaaccagaaccucgaguaccagaucggcuacaucugcuccggcgucuucggcgacaacccccgccccaacgacaagaccggcuccugcggccccgucuccuccaacggcgccaacggcgucaagggcuucuccuucaaguacggcaacggcgucuggaucggccgcaccaaguccaucuccucccgcaagggcuucgagaugaucugggaccccaacggcuggaccggcaccgacaacgacuucuccaucaagcaggacaucgucggcaucaacgagugguccggcuacuccggcuccuucguccagcaccccgagcucaccggccucgacugcauccgccccugcuucugggucgagcucauccgcggccgccccaaggagaacaccaucuggaccuccggcuccuccaucuccuucugcggcgucaacuccgacaccgucggcugguccuggcccgacggcgccgagcuccccuucaccaucgacaaguga

SEQ ID NO: 121731 - RNA, 1410 nt, Artificial Sequence; identical to SEQ ID NO: 121682
  derived and/or modified CDS sequence (opt2) from neuraminidase__InfluenzaA__AIL94632

SEQ ID NO: 121732 - RNA, 1410 nt, Artificial Sequence; identical to SEQ ID NO: 118182
  derived and/or modified CDS sequence (opt2) from neuraminidase__InfluenzaA__AIL94643

SEQ ID NO: 121733 - RNA, 1410 nt, Artificial Sequence
  derived and/or modified CDS sequence (opt2) from neuraminidase__InfluenzaA__AIL94655
augaaccccaaccagaagaucaucaccaucggcuccgucugcaugaccaucggcauggccaaccucauccuccagaucggcaacaucaucuccaucuggaucucccacuccauccagcucggcaaccagucccagaucgagaccugcaaccaguccgucaucaccuacgagaacaacaccugggucaaccagaccuacgucaacaucuccaacaccaacuucgccgccggccaguccgucgucuccgucaagcucgccggcaacuccucccucugccccgucuccggcugggccaucuacuccaaggacaacuccauccgcaucggcuccaagggcgacgucuucgucauccgcgagcccuucaucuccugcuccccccucgagugccgcaccuucuuccucacccagggcgcccuccucaacgacaagcacuccaacggcaccaucaaggaccgcucccccuaccgcacccucauguccugccccaucggcgagguccccucccccuacaacucccgcuucgaguccgucgccugguccgccuccgccugccacgacggcaucaacuggcucaccaucggcaucuccggccccgacuccggcgccgucgccguccucaaguacaacggcaucaucaccgacaccaucaaguccuggcgcaacaacauccuccgcacccaggaguccgagugcgccugcgucaacggcuccugcuucaccaucaugaccgacggccccuccgacggccaggccuccuacaagaucuuccgcaucgagaagggcaagaucgucaaguccgucgagaugaacgcccccaacuaccacuacgaggagugcuccugcuaccccgacuccuccgagaucaccugcgucugccgcgacaacuggcacggcuccaaccgccccugggucuccuucaaccagaaccucgaguaccagaucggcuacaucugcuccggcaucuucggcgacaacccccgccccaacgacaagaccggcuccugcggccccgucuccuccaacggcgccaacggcgucaagggcuucuccuucaaguacggcaacggcgucuggaucggccgcaccaaguccaucuccucccgcaagggcuucgagaugaucugggaccccaacggcuggaccggcaccgacaacaacuucuccaucaagcaggacaucgucggcaucaacgagugguccggcuacuccggcuccuucguccagcaccccgagcucaccggccucgacugcauccgccccugcuucugggucgagcucauccgcggccgccccaaggagaacaccaucuggaccuccggcuccuccaucuccuucugcggcgucaacuccgacaccgucggcugguccuggcccgacggcgccgagcuccccuucaccaucgacaaguga

SEQ ID NO: 121734 - RNA, 1410 nt, Artificial Sequence
  derived and/or modified CDS sequence (opt2) from neuraminidase__InfluenzaA__AIL94677
augaaccccaaccagaagaucaucaccaucggcuccgucugcaugaccaucggcauggccaaccucauccuccagaucggcaacaucaucuccaucuggaucucccacuccauccagcucggcaaccagucccagaucgaggccugcaaccaguccgucaucaccuacgagaacaacaccugggucaaccagaccuacgucaacaucuccaacaccaacuucgccgccggccaguccgucguccccgucaagcucgccggcaacuccucccucugccccgucuccggcugggccaucuacuccaaggacaacuccguccgcaucggcuccaagggcgacgucuucgucauccgcgagcccuucaucuccugcuccccccucgagugccgcaccuucuuccucacccagggcgcccuccucaacgacaagcacuccaacggcaccaucaaggaccgcucccccuaccgcacccucauguccugccccaucggcgagguccccucccccuacaacucccgcuucgaguccgucgccugguccgccuccgccugccacgacggcaucaacuggcucaccaucggcaucuccggccccgacuccggcgccgucgccguccucaaguacaacggcaucaucaccgacaccaucaaguccuggaagaacaacauccuccgcacccaggaguccgagugcgccugcgucaacggcuccugcuucaccaucaugaccgacggccccuccgacggccaggccuccuacaagaucuuccgcaucgagaagggcaagaucgucaaguccgucgagaugaacgcccccaacuaccacuacgaggagugcuccugcuaccccgacuccuccgagaucaccugcgucugccgcgacaacuggcacggcuccaaccgccccugggucuccuucaaccagaaccucgaguaccagaucggcuacaucugcuccggcgucuucggcgacaacccccgccccaacgacaagaccggcuccugcggccccgucuccuccaacggcgccaacggcgucaagggcuucuccuucaaguacggcaacggcgucuggaucggccgcaccaaguccaucuccucccgcaagggcuucgagaugaucugggaccccaacggcuggaccggcaccgacaacaacuucuccaucaagcaggacaucgucggcaucaacgagugguccggcuacuccggcuccuucguccagcaccccgagcucaccggccucgacugcauccgccccugcuucugggucgagcucauccgcggccgccccaaggagaacaccaucuggaccuccggcuccuccaucuccuucugcggcgucaacuccgacaccgucggcugguccuggcccgacggcgccgagcuccccuucaccaucgacaaguga

SEQ ID NO: 121735 - RNA, 1410 nt, Artificial Sequence; identical to SEQ ID NO: 121673
  derived and/or modified CDS sequence (opt2) from neuraminidase__InfluenzaA__AIL94688

SEQ ID NO: 121736 - RNA, 1410 nt, Artificial Sequence
  derived and/or modified CDS sequence (opt2) from neuraminidase__InfluenzaA__AIL94700
augaaccccaaccagaagaucaucaccaucggcuccgucucccucaccaucuccaccaucugcuucuucaugcagaucgccauccucaucaccaucgucacccuccacuucaagcaguacgaguucaacuccccccccaacaaccaggucaugcucugcgagcccaccaucaucgagcgcaacaucaccgagaucgucuaccucaccaacaccaccaucgagaaggagaucugccccaagcccgccgaguaccgcaacugguccaagccccagugcggcaucaccggcuucgcccccuucuccaaggacaacuccauccgccucuccgccggcggcgacaucugggucacccgcgagcccuacgucuccugcgaccccgacaagugcuaccaguucgcccucggccagggcaccacccucaacaacguccacuccaacaacaccguccgcgaccgcacccccuaccgcacccuccucaugaacgagcucggcguccccuuccaccucggcaccaagcaggucugcaucgccugguccuccuccuccugccacgacggcaaggccuggcuccacgucugcaucaccggcgacgacaagaacgccaccgccuccuucaucuacaacggccgccucgucgacuccgucgucuccugguccaaggagauccuccgcacccaggaguccgagugcgucugcaucaacggcaccugcaccgucgucaugaccgacggcuccgccuccggcaaggccgacaccaagauccucuucaucgaggagggcaagaucguccacaucuccacccucuccggcuccgcccagcacgucgaggagugcuccugcuacccccgcuaccccggcguccgcugcgucugccgcgacaacuggaagggcuccaaccgccccaucgucgacaucaacaucgaggaccacuccaucgucuccuccuacgucugcuccggccucgucggcgacaccccccgcaagaacgacuccuccuccuccucccacugccucgaccccaacaacgaggagggcggccacggcgucaagggcugggccuucgacgacggcaacgacgucuggaugggccgcaccaucaacgagaccucccgccucggcuacgagaccuucaaggucaucgagggcugguccaaccccaaguccaagcuccagaucaaccgccaggucaucgucgaccgcggcgaccgcuccggcuacuccggcaucuucuccgucgagggcaaguccugcaucaaccgcugcuucuacgucgagcucauccgcggccgcaaggaggagaccgagguccucuggaccuccaacuccaucgucgucuucugcggcaccuccggcaccuacggcaccggcuccuggcccgacggcgccgaccucaaccucaugcccaucuga

SEQ ID NO: 121737 - RNA, 1410 nt, Artificial Sequence; identical to SEQ ID NO: 121682
  derived and/or modified CDS sequence (opt2) from neuraminidase__InfluenzaA__AIL94712

SEQ ID NO: 121738 - RNA, 1410 nt, Artificial Sequence; identical to SEQ ID NO: 121712
  derived and/or modified CDS sequence (opt2) from neuraminidase__InfluenzaA__AIL94723

SEQ ID NO: 121739 - RNA, 1410 nt, Artificial Sequence
  derived and/or modified CDS sequence (opt2) from neuraminidase__InfluenzaA__AIL94734
augaaccccaaccagaagaucaucaccaucggcuccgucucccucaccaucuccaccaucugcuucuucaugcagaucgccauccucaucaccaccgucacccuccacuucaagcaguacgaguucaacuccccccccaacaaccaggucaugcucugcgagcccaccaucaucgagcgcaacaucaccgagaucgucuaccucaccaacaccaccaucgagaaggagaucugccccaagcccgccgaguaccgcaacugguccaagccccagugcggcaucaccggcuucgcccccuucuccaaggacaacuccauccgccucuccgccggcggcgacaucugggucacccgcgagcccuacgucuccugcgaccccgacaagugcuaccaguucgcccucggccagggcaccacccucaacaacgagcacuccaacaacaccguccgcgaccgcacccccuaccgcacccuccucaugaacgagcucggcguccccuuccaccucggcaccaagcaggucugcaucgccugguccuccuccuccugccacgacggcaaggccuggcuccacgucugcaucaccggcgacgacaagaacgccaccgccuccuucaucuacaacggccgccucgucgacuccgucgucuccugguccaaggagauccuccgcacccaggaguccgagugcgucugcaucaacggcaccugcaccgucgucaugaccgacggcuccgccuccggcaaggccgacaccaagauccucuucaucgaggagggcaagaucguccacaucuccacccucuccggcuccgcccagcacgucgaggagugcuccugcuacccccgcuaccccggcguccgcugcgucugccgcgacaacuggaagggcuccaaccgccccaucgucgacaucaacaucaaggaccacuccaucgucuccuccuacgucugcuccggccucgucggcgacaccccccgcaagaacgacuccuccuccuccucccacugccucgaccccaacaacgaggagggcggccacggcgucaagggcugggccuucgacgacggcaacgacgucuggaugggccgcaccaucaacgagaccucccgccucggcuacgagaccuucaaggucaucgagggcugguccaaccccaaguccaagcuccagaucaaccgccaggucaucgucgaccgcggcgaccgcuccggcuacuccggcaucuucuccgucgagggcaaguccugcaucaaccgcugcuucuacgucgagcucauccgcggccgcaaggaggagaccgagguccucuggaccuccaacuccaucgucgucuucugcggcaccuccggcaccuacggcaccggcuccuggcccgacggcgccgaccucaaccucaugcccaucuga

SEQ ID NO: 121740 - RNA, 1410 nt, Artificial Sequence; identical to SEQ ID NO: 121682
  derived and/or modified CDS sequence (opt2) from neuraminidase__InfluenzaA__AIL94746

SEQ ID NO: 121741 - RNA, 1410 nt, Artificial Sequence; identical to SEQ ID NO: 121712
  derived and/or modified CDS sequence (opt2) from neuraminidase__InfluenzaA__AIL94757

SEQ ID NO: 121742 - RNA, 1410 nt, Artificial Sequence; identical to SEQ ID NO: 121673
  derived and/or modified CDS sequence (opt2) from neuraminidase__InfluenzaA__AIL94768

SEQ ID NO: 121743 - RNA, 1410 nt, Artificial Sequence; identical to SEQ ID NO: 118182
  derived and/or modified CDS sequence (opt2) from neuraminidase__InfluenzaA__AIL94780

SEQ ID NO: 121744 - RNA, 1410 nt, Artificial Sequence; identical to SEQ ID NO: 121712
  derived and/or modified CDS sequence (opt2) from neuraminidase__InfluenzaA__AIL94803

SEQ ID NO: 121745 - RNA, 1410 nt, Artificial Sequence; identical to SEQ ID NO: 121692
  derived and/or modified CDS sequence (opt2) from neuraminidase__InfluenzaA__AIL94814

SEQ ID NO: 121746 - RNA, 1410 nt, Artificial Sequence
  derived and/or modified CDS sequence (opt2) from neuraminidase__InfluenzaA__AIL94826
augaaccccaaccagaagaucaucaccaucggcuccgucucccucaccaucuccaccaucugcuucuucaugcagaucgccauccucaucaccaccgucacccuccacuucaagcaguacgaguucaacucccuccccaacaaccaggucaugcucugcgagcccaccaucaucgagcgcaacaucaccgagaucgucuaccucaccaacaccaccaucgagaaggagaucugccccaagcccgccgaguaccgcaacugguccaagccccagugcggcaucaccggcuucgcccccuucuccaaggacaacuccauccgccucuccgccggcggcgacaucugggucacccgcgagcccuacgucuccugcgaccccgacaagugcuaccaguucgcccucggccagggcaccacccucaacaacguccacuccaacaacaccgcccgcgaccgcacccccuaccgcacccuccucaugaacgagcucggcguccccuuccaccucggcaccaagcaggucugcaucgccugguccuccuccuccugccacgacggcaaggccuggcuccacgucugcaucaccggcgacgacaagaacgccaccgccuccuucaucuacaacggccgccucgucgacuccgucgucuccugguccaaggagauccuccgcacccaggaguccgagugcgucugcaucaacggcaccugcaccgucgucaugaccgacggcuccgccuccggcaaggccgacaccaagauccucuucaucgaggagggcaagaucguccacaccuccacccucuccggcuccgcccagcacgucgaggagugcuccugcuacccccgcuaccccggcguccgcugcgucugccgcgacaacuggaagggcuccaaccgccccaucgucgacaucaacaucaaggaccacuccaucgucuccuccuacgucugcuccggccucgucggcgacaccccccgcaagaacgacuccuccuccuccucccacugccucaaccccaacaacgaggagggcggccacggcgucaagggcugggccuucgacgacggcaacgacgucuggaugggccgcaccaucaacgagaccucccgccucggcuacgagaccuucaaggucaucgagggcugguccaaccccaaguccaagcuccagaucaaccgccaggucaucgucgaccgcggcgaccgcuccggcuacuccggcaucuucuccgucgagggcaaguccugcaucaaccgcugcuucuacgucgagcucauccgcggccgcaaggaggagaccgagguccucuggaccuccaacuccaucgucgucuucugcggcaccuccggcaccuacggcaccggcuccuggcccgacggcgccgaccucaaccucaugcccaucuga

SEQ ID NO: 121747 - RNA, 1410 nt, Artificial Sequence
  derived and/or modified CDS sequence (opt2) from neuraminidase__InfluenzaA__AIL94850
augaaccccaaccagaagaucaucaccaucggcuccgucucccucaccaucuccaccaucugcuucuucaugcagaucgccauccucaucaccaccgucacccuccacuucaagcaguacgaguucaacuccccccccaacaaccaggucaugcucuucgagcccaccaucaucgagcgcaacaucaccgagaucgucuaccucaccaacaccaccaucgagaaggagaucugccccaagcucgccgaguaccgcaacugguccaagccccagugcgacaucaccggcuucgcccccuucuccaaggacaacuccauccgccucuccgccggcggcgacaucugggucacccgcgagcccuacgucuccugcgaccccgacaagugcuaccaguucgcccucggccagggcaccacccucaacaacguccacuccaacgacaccguccgcgaccgcacccccuaccgcacccuccucaugaacgagcucggcguccccuuccaccucggcaccaagcaggucugcaucgccugguccuccuccuccugccacgacggcaaggccuggcuccacgucugcaucaccggcgacgacaagaacgccaccgccuccuucaucuacaacggccgccucgucgacuccaucgucuccugguccaaggagauccuccgcacccaggaguccgagugcgucugcaucaacggcaccugcaccgucgucaugaccgacggcuccgccuccggcaaggccgacaccaagauccucuucaucaaggagggcaagaucguccacaccuccacccucuccggcuccgcccagcacgucgaggagugcuccugcuacccccgcuaccccggcguccgcugcgucugccgcgacaacuggaagggcuccaaccgccccaucgucgacaucaacaucaaggaccacuccaucgucuccuccuacgucugcuccggccucgucggcgacaccccccgcaagaacgacuccuccuccuccucccacugccucgaccccaacuccgaggagggcggccacggcgucaagggcugggccuucgacgacggcaacgacgucuggaugggccgcaccaucuccgagaagucccgccucggcuacgagaccuucaaggucaucgagggcugguccaaccccaaguccaaguuccagaucaaccgccaggucaucgucgaccgcggcaaccgcuccggcuacuccggcaucuucuccgucgagggcaaguccugcaucaaccgcugcuucuacgucgagcucauccgcggccgcaaggaggagaccgagguccucuggaccuccaacuccaucgucgucuucugcggcaccuccggcaccuacggcaccggcuccuggcccgacggcgccgaccucaaccucaugcccaucuga

SEQ ID NO: 121748 - RNA, 1410 nt, Artificial Sequence; identical to SEQ ID NO: 115446
  derived and/or modified CDS sequence (opt2) from neuraminidase__InfluenzaA__AIL94862

SEQ ID NO: 121749 - RNA, 1410 nt, Artificial Sequence; identical to SEQ ID NO: 115446
  derived and/or modified CDS sequence (opt2) from neuraminidase__InfluenzaA__AIL94874

SEQ ID NO: 121750 - RNA, 1410 nt, Artificial Sequence
  derived and/or modified CDS sequence (opt2) from neuraminidase__InfluenzaA__AIL94886
augaaccccaaccagaagaucaucaccaucggcuccgucugcaugaccaucggcauggccaaccucaugcuccagaucggcaacaucaucuccaucuggaucucccacuccauccagcucggcaacaagaaccagaucgagaccugcaaccaguccgucaucaccuacgagaacaacaccugggucaaccagaccuacgucaacaucuccaacaccaacuucgccgccggccaguccgucgucuccgucaagaucgccggcaacuccucccucugccccgucuccggcugggccaucuacuccaaggacaacuccauccgcaucggcuccaagggcgacgucuucgucauccgcgagcccuucaucuccugcuccccccucgagugccgcaccuucuuccucacccagggcgcccuccucaacgacaagcacuccaacggcaccaucaaggaccgcucccccuaccgcacccucauguccugccccaucggcgagguccccucccccuacaacucccgcuucgaguccgucgccugguccgccuccgccugccacgacggcaucaacuggcucaccaucggcaucuccggccccgacgacggcgccgucgccguccucaaguacaacggcaucaucaccgacaccaucaaguccuggcgcaacaacauccuccgcacccaggaguccgagugcgccugcgucaacggcuccugcuucaccaucaugaccgacggccccuccgacggccaggccuccuacaagaucuuccgcaucgagaagggcaagaucgucaaguccgucgagaugaacgcccccaacuaccacuacgaggagugcuccugcuaccccgacuccuccgagaucaccugcgucugccgcgacaacuggcacggcuccaaccgccccugggucuccuucaaccagaaccucgaguaccagaucggcuacaucugcuccggcaucuucggcgacaacccccgcccccacgacaagaccggcuccugcggccccgucuccuccaacggcgccaacggcgucaagggcuucuccuucaaguacggcaacggcgucuggaucggccgcaccaaguccaucuccucccgcaagggcuucgagaugaucugggaccccaacggcuggaccggcaccgacaacaacuucuccaucaagcaggacaucgucggcaucaacgagugguccggcuacuccggcuccuucguccagcaccccgagcucaccggccucgacugcauccgccccugcuucugggucgagcucauccgcggccgccccaaggagaacaccaucuggaccuccggcuccuccaucuccuucugcggcgucaacuccgacaccgucggcugguccuggcccgacggcgccgagcuccccuucaccaucgacaaguga

SEQ ID NO: 121751 - RNA, 1410 nt, Artificial Sequence; identical to SEQ ID NO: 118958
  derived and/or modified CDS sequence (opt2) from neuraminidase__InfluenzaA__AIL94897

SEQ ID NO: 121752 - RNA, 1410 nt, Artificial Sequence; identical to SEQ ID NO: 121746
  derived and/or modified CDS sequence (opt2) from neuraminidase__InfluenzaA__AIL94909

SEQ ID NO: 121753 - RNA, 1410 nt, Artificial Sequence; identical to SEQ ID NO: 118182
  derived and/or modified CDS sequence (opt2) from neuraminidase__InfluenzaA__AIL94921

SEQ ID NO: 121754 - RNA, 1410 nt, Artificial Sequence; identical to SEQ ID NO: 118182
  derived and/or modified CDS sequence (opt2) from neuraminidase__InfluenzaA__AIL94933

SEQ ID NO: 121755 - RNA, 1410 nt, Artificial Sequence; identical to SEQ ID NO: 121673
  derived and/or modified CDS sequence (opt2) from neuraminidase__InfluenzaA__AIL94945

SEQ ID NO: 121756 - RNA, 1410 nt, Artificial Sequence
  derived and/or modified CDS sequence (opt2) from neuraminidase__InfluenzaA__AIL94957
augaaccccaaccagaagaucaucaccaucggcuccgucugcaugaccaucggcauggccaaccucauccuccagaucggcaacaucaucuccaucuggaucucccacuccauccagcucggcaaccagucccagaucgaggccugcaaccaguccgucaucaccuacgagaacaacaccugggucaaccagaccuacgucaacaucuccaacaccaacuucgccgccggccaguccgucgucuccgucaagcucgccggcaacuccucccucugccccgucuccggcugggccaucuacuccaaggacaacuccguccgcaucggcuccaagggcgacgucuucgucauccgcgagcccuucaucuccugcuccccccucgagugccgcaccuucuuccucacccagggcgcccuccucaacgacaagcacuccaacggcaccaucaaggaccgcucccccuaccgcacccucauguccugccccaucggcgagguccccucccccuacaacucccgcuucgaguccgucgccugguccgccuccgccugccacgacggcaucaacuggcucaccaucggcaucuccggccccgacuccggcgccgucgccguccucaaguacaacggcaucaucaccgacaccaucaaguccuggaagaacaacauccuccgcacccaggaguccgagugcgccugcgucaacggcuccugcuucaccaucaugaccgacggccccuccgacggccaggccuccuacaagaucuuccgcaucgagaagggcaagaucgucaaguccgucgagauggacgcccccaacuaccacuacgaggagugcuccugcuaccccgacuccuccgagaucaccugcgucugccgcgacaacuggcacggcuccaaccgccccugggucuccuucaaccagaaccucgaguaccagaucggcuacaucugcuccggcgucuucggcgacaacccccgccccaacgacaagaccggcuccugcggccccgucuccuccaacggcgccaacggcgucaagggcuucuccuucaaguacggcaacggcgucuggaucggccgcaccaaguccaucuccucccgcaagggcuucgagaugaucugggaccccaacggcuggaacggcaccgacaacaacuucuccaucaagcaggacaucgucggcaucaacgagugguccggcuacuccggcuccuucguccagcaccccgagcucaccggccucgacugcauccgccccugcuucugggucgagcucauccgcggccgccccaaggagaacaccaucuggaccuccggcuccuccaucuccuucugcggcgucaacuccgacaccgucggcugguccuggcccgacggcgccgagcuccccuucaccaucgacaaguga

SEQ ID NO: 121757 - RNA, 1410 nt, Artificial Sequence; identical to SEQ ID NO: 121746
  derived and/or modified CDS sequence (opt2) from neuraminidase__InfluenzaA__AIL94968

SEQ ID NO: 121758 - RNA, 1410 nt, Artificial Sequence
  derived and/or modified CDS sequence (opt2) from neuraminidase__InfluenzaA__AIM55840
augaaccccaaccagaagaucaucaccaucggcuccgucugcaugaccaucggcauggccaaccucauccuccagaucggcaacaucaucuccaucuggaucucccacuccauccaggucggcaaccagucccagaucgagaucugcaaccaguccgucaucaccuacgagaacaacaccugggucaaccagaccuacgucaacaucuccaacaccaacuucgccgccggccagcccgucgucuccgucaagcucgccggcaacuccucccucugccccgucuccggcugggccaucuacuccaaggacaacuccguccgcaucggcuccaagggcgacgucuucgucauccgcgagcccuucaucuccugcuccccccucgagugccgcaccuucuuccucacccagggcgcccuccucaacgacaagcacuccaacggcaccaucaaggaccgcucccccuaccgcacccucauguccugccccaucggcgagguccccucccccuacaacucccgcuucgaguccgucgccugguccgccuccgccugccacgacggcaucaacuggcucaccaucggcaucuccggccccgacuccggcgccgucgccguccucaaguacaacggcaucaucaccgacaccaucaaguccuggcgcaacgacauccuccgcacccaggaguccgagugcgccugcgucaacggcuccugcuucaccaucaugaccgacggccccuccgacggccaggccuccuacaagaucuuccgcaucgagaagggcaagaucgucaaguccgucgagaugaacgcccccaacuaccacuucgaggagugcuccugcuaccccgacuccuccgagaucaccugcgucugccgcgacaacuggcacggcuccaaccgccccugggucuccuucaaccagaaccucgaguaccagaucggcuacaucugcuccggcaucuucggcgacaacccccgccccaacgacaagaccggcuccugcggccccgucuccuccaacggcgccaacggcgucaagggcuucuccuucaaguacggcaacggcgucuggaucggccgcaccaaguccaucuccucccgcaagggcuucgagaugaucugggaccccaacggcuggaccggcaccgacaacaacuucuccaucaagcaggacaucgucggcaucaacgagugguccggcuacuccggcuccuucguccagcaccccgagcucaccggccucgacugcauccgccccugcuucugggucgagcucauccgcggccgccccaaggagaacaccaucuggaccuccggcuccuccaucuccuucugcggcgucaacuccgacaccgucggcugguccuggcccgacggcgccgagcuccccuucaccaucgacaaguga

SEQ ID NO: 121759 - RNA, 1410 nt, Artificial Sequence
  derived and/or modified CDS sequence (opt2) from neuraminidase__InfluenzaA__AIM55851
augaaccccaaccagaagaucaucaccaucggcuccgucugcaugaccaucggcauggccaaccucauccuccagaucggcaacaucaucuccaucugggucucccacuccauccagcucggcaaccagucccagaucgagaccugcaaccaguccgucaucaccuacgagaacaacaccugggucaaccagaccuacgucaacaucuccaacaccaacuucgccgccggccaguccgucguccccgucaagcucgccggcaacuccucccucugccccgucuccggcugggccaucuacuccaaggacaacuccguccgcaucggcuccaagggcgacgucuucgucauccgcgagcccuucaucuccugcuccccccucgagugccgcaccuucuuccucacccagggcgcccuccucaacgacaagcacuccaacggcaccaucaaggaccgcucccccuaccgcacccucauguccugccccaucggcgagguccccucccccuacaacucccgcuucgaguccgucgccugguccgccuccgccugccacgacggcaucaacuggcucaccaucggcaucuccggccccgacuccggcgccgucgccguccucaaguacaacggcaucaucaccgacaccaucaaguccuggcgcaacaacauccuccgcacccaggaguccgagugcgccugcgucaacggcuccugcuucaccaucaugaccgacggccccuccgacggccaggccuccuacaagaucuuccgcaucgagaagggccgcaucgucaaguccgucgagaugaacgcccccaacuaccacuacgaggagugcuccugcuaccccgacuccuccgagaucaccugcgucugccgcgacaacuggcacggcuccaaccgccccugggucuccuucaaccagaaccucgaguaccagaucggcuacaucugcuccggcgucuucggcgacaacccccgccccaacgacaagaccggcuccugcggccccgucuccuccaacggcgccaacggcgucaagggcuucuccuucaaguacggcaacggcgucuggaucggccgcaccaaguccaucuccucccgcaagggcuucgagaugaucugggaccccaacggcuggaccggcaccgacaacaaguucuccaucaagcaggacaucgucggcaucaacgagugguccggcuacuccggcuccuucguccagcaccccgagcucaccggccucgacugcauccgccccugcuucugggucgagcucauccgcggccgccccgaggagaacaccaucuggaccuccggcuccuccaucuccuucugcggcgucaaguccgacaccgucggcugguccuggcccgacggcgccgagcuccccuucaccaucgacaaguga

SEQ ID NO: 121760 - RNA, 1410 nt, Artificial Sequence
  derived and/or modified CDS sequence (opt2) from neuraminidase__InfluenzaA__AIM55862
augaaccccaaccagaagaucaucaccaucggcuccgucugcaugaccaucggcauggccaaccucauccuccagaucggcaacaucaucuccaucugggucucccacuccauccagcucggcaaccagucccagaucgagaccugcaaccaguccgucaucaccuacgagaacaacaccugggucaaccagaccuacgucaacaucuccaacaccaacuucgccgccggccaguccgucguccccgucaagcucgccggcaacuccucccucugccccgucuccggcugggccaucuacuccaaggacaacuccguccgcaucggcuccaagggcgacgucuucgucauccgcgagcccuucaucuccugcuccccccucgagugccgcaccuucuuccucacccagggcgcccuccucaacgacaagcacuccaacggcaccaucaaggaccgcucccccuaccgcacccucauguccugccccaucggcgagguccccucccccuacaacucccgcuucgaguccgucgccugguccgccuccgccugccacgacggcaucaacuggcucaccaucggcaucuccggccccgacuccggcgccgucgccguccucaaguacaacggcaucaucaccgacaccaucaaguccuggcgcaacaacauccuccgcacccaggaguccgagugcgccugcgucaacggcuccugcuucaccaucaugaccgacggccccuccgacggccaggccuccuacaagaucuucaagaucgagaagggcaagaucgucaaguccgucgagaugaacgcccccaacuaccacuacgaggagugcuccugcuaccccgacuccuccgagaucaccugcgucugccgcgacaacuggcacggcuccaaccgccccugggucuccuucaaccagaaccucgaguaccagaucggcuacaucugcuccggcgucuucggcgacaacccccgccccaacgacaagaccggcuccugcggccccgucuccuccaacggcgccaacggcgucaagggcuucuccuucaaguacggcaacggcgucuggaucggccgcaccaaguccaucuccucccgcaagggcuucgagaugaucugggaccccaacggcuggaacggcaccgacaacaacuucuccaucaagcaggacaucgucggcaucaaggagugguccggcuacuccggcuccuucguccagcaccccgagcucaccggccucgacugcauccgccccugcuucugggucgagcucauccgcggccgccccgaggagaacaccaucuggaccuccggcuccuccaucuccuucugcggcgucaacuccgacaccgucggcugguccuggcccgacggcgccgagcuccccuucaccaucgacaaguga

SEQ ID NO: 121761 - RNA, 1410 nt, Artificial Sequence
  derived and/or modified CDS sequence (opt2) from neuraminidase__InfluenzaA__AIM55873
augaaccccaaccagaagaucaucaccaucggcuccgucugcaugaccaucggcauggccaaccucauccuccagaucggcaacaucaucuccaucugggucucccacuccauccagcucggcaaccagucccagaucgagaccugcaaccaguccgucaucaccuacgagaacaacaccugggucaaccagaccuacgucaacaucuccaacaccaacuucgccgccggccaguccgucguccccgucaagcucgccggcaacuccucccucugccccgucuccggcugggccaucuacuccaaggacaacuccguccgcaucggcuccaagggcgacgucuucgucauccgcgagcccuucaucuccugcuccccccucgagugccgcaccuucuuccucacccagggcgcccuccucaacgacaagcacuccaacggcaccaucaaggaccgcucccccuaccgcacccucauguccugccccaucggcgagguccccucccccuacaacucccgcuucgaguccgucgccugguccgccuccgccugccacgacggcaucaacuggcucaccaucggcaucuccggccccgacuccggcgccgucgccguccucaaguacaacggcaucaucaccgacaccaucaaguccuggcgcaacaacauccuccgcacccaggaguccgagugcgccugcgucaacggcuccugcuucaccaucaugaccgacggccccuccgacggccaggccuccuacaagaucuuccgcaucgagaagggcaagaucgucaaguccgucgagaugaacgcccccaacuaccacuacgaggagugcuccugcuaccccgacuccuccgagaucaccugcgucugccgcgacaacuggcacggcuccaaccgccccugggucuccuucaaccagaaccucgaguaccagaucggcuacaucugcuccggcgucuucggcgacaacccccgccccaacgacaagaccggcuccugcggccccgucuccuccaacggcgccaacggcgucaagggcuucuccuucaaguacggcaacggcgucuggaucggccgcaccaaguccaucuccucccgcaagggcuucgagaugaucugggaccccaacggcuggaccggcaccgacaacaacuucuccaucaagcaggacaucgucggcaucaaggagugguccggcuacuccggcuccuucguccagcaccccgagcucaccggccucgacugcauccgccccugcuucugggucgagcucauccgcggccgccccgaggagaacaccaucuggaccuccggcuccuccaucuccuucugcggcgucaacuccgacaccgucggcugguccuggcccgacggcgccgagcuccccuucaccaucgacaaguga

SEQ ID NO: 121762 - RNA, 1410 nt, Artificial Sequence; identical to SEQ ID NO: 121761
  derived and/or modified CDS sequence (opt2) from neuraminidase__InfluenzaA__AIM55884

SEQ ID NO: 121763 - RNA, 1410 nt, Artificial Sequence; identical to SEQ ID NO: 121761
  derived and/or modified CDS sequence (opt2) from neuraminidase__InfluenzaA__AIM55918

SEQ ID NO: 121764 - RNA, 1410 nt, Artificial Sequence
  derived and/or modified CDS sequence (opt2) from neuraminidase__InfluenzaA__AIM55929
augaaccccaaccagaagaucaucaccaucggcuccgucugcaugaccaucggcauggccaaccucauccuccagaucggcaacaucaucuccaucugggucucccacuccauccagcucggcaaccagucccagaucgagaccugcaaccaguccgucaucaccuacgagaacaacaccugggucaaccagaccuacgucaacaucuccaacaccaacuucgccgccggccaguccgucgucuccgucaagcucgccggcaacuccucccucugccccgucuccggcugggccaucuacuccaaggacaacuccguccgcaucggcuccaagggcgacgucuucgucauccgcgagcccuucaucuccugcuccccccucgagugccgcaccuucuuccucacccagggcgcccuccucaacgacaagcacuccaacggcaccaucaaggaccgcucccccuaccgcacccucauguccugccccaccggcgagguccccucccccuacaacucccgcuucgaguccgucgccugguccgccuccgccugccacgacggcaucaacuggcucaccaucggcaucuccggccccgacuccggcgccgucgccguccucaaguacaacggcaucaucaccgacaccaucaaguccuggcgcaacaacauccuccgcacccaggaguccgagugcgccugcgucaacggcuccugcuucaccaucaugaccgacggccccuccgacggccaggccuccuacaagaucuuccgcaucgagaagggcaagaucgucaaguccgucgagaugaacgcccccaacuaccacuacgaggagugcuccugcuaccccgacuccuccgagaucaccugcgucugccgcgacaacuggcacggcuccaaccgccccugggucuccuucaaccagaaccucgaguaccagaucggcuacaucugcuccggcgucuucggcgacaacccccgccccaacgacaagaccggcuccugcggccccgucuccuccaacggcgccaacggcgucaagggcuucuccuucaaguacggcaacggcgucuggaucggccgcaccaaguccaucuccucccgcaagggcuucgagaugaucugggaccccaacggcuggaccggcaccgacaacaacuucuccaucaagcaggacaucgucggcaucaaggagugguccggcuacuccggcuccuucguccagcaccccgagcucaccggccucgacugcauccgccccugcuucugggucgagcucauccgcggccgccccgaggagaacaccaucuggaccuccggcuccuccaucuccuucugcggcgucaacuccgacaccgucggcugguccuggcccgacggcgccgagcuccccuucaccaucgacaaguga

SEQ ID NO: 121765 - RNA, 1410 nt, Artificial Sequence
  derived and/or modified CDS sequence (opt2) from neuraminidase__InfluenzaA__AIM55940
augaaccccaaccagaagaucaucaccaucggcuccgucugcaugaccaucggcauggccaaccucauccuccagaucggcaacaucaucuccaucugggucucccacuccauccagcucggcaaccagucccagaucgagaccugcaaccaguccgucaucaccuacgagaacaacaccugggucaaccagaccuacgucaacaucuccuccaccaacuucgccgccggccaguccgucguccccgucaagcucgccggcaacuccucccucugccccgucuccggcugggccaucuacuccaaggacaacuccguccgcaucggcuccaagggcgacgucuucgucauccgcgagcccuucaucuccugcuccccccucgagugccgcaccuucuuccucacccagggcgcccuccucaacgacaagcacuccaacggcaccaucaaggaccgcucccccuaccgcacccucauguccugccccaucggcgagguccccucccccuacaacucccgcuucgaguccgucgccugguccgccuccgccugccacgacggcaucaacuggcucaccaucggcaucuccggccccgacuccggcgccgucgccguccucaaguacaacggcaucaucaccgacaccaucaaguccuggcgcaacaacauccuccgcacccaggaguccgagugcgccugcgucaacggcuccugcuucaccaucaugaccgacggccccuccgacggccaggccuccuacaagaucuuccgcaucgagaagggcaagaucgucaaguccgucgagaugaacgcccccaacuaccacuacgaggagugcuccugcuaccccgacuccuccgagaucaccugcgucugccgcgacaacuggcacggcuccaaccgccccugggucuccuucaaccagaaccucgaguaccagaucggcuacaucugcuccggcgucuucggcgacaacccccgccccaacgacaagaccggcuccugcggccccgucuccuccaacggcgccaacggcgucaagggcuucuccuucaaguacggcaacggcgucuggaucggccgcaccaaguccaucuccucccgcaagggcuucgagaugaucugggaccccaacggcuggaccggcaccgacaacaacuucuccaucaagcaggacaucgucggcaucaaggagugguccggcuacuccggcuccuucguccagcaccccgagcucaccggccucgacugcauccgccccugcuucugggucgagcucauccgcggccgccccgaggagaacaccaucuggaccuccggcuccuccaucuccuucugcggcgucaacuccgacaccgucggcugguccuggcccgacggcgccgagcuccccuucaccaucgacaaguga

SEQ ID NO: 121766 - RNA, 1410 nt, Artificial Sequence
  derived and/or modified CDS sequence (opt2) from neuraminidase__InfluenzaA__AIM55965
augaaccccaaccagaagaucaucaccaucggcuccgucugcaugaccaucggcauggccaaccucauccuccagaucggcaacaucaucuccaucugggucucccacuccauccagcucggcaaccagucccagaucgagaccugcaaccaguccgucaucaccuacgagaacaacaccugggucaaccagaccuacgucaacaucuccaacaccaacuucgccgccggccaguccgucguccccgucaagcucgccggcaacuccucccucugccccgucuccggcugggccaucuacuccaaggacaacuccguccgcaucggcuccaagggcgacgucuucgucauccgcgagcccuucaucuccugcuccccccucgagugccgcaccuucuuccucacccagggcgcccuccucaacgacaagcacuccaacggcaccaucaaggaccgcucccccuaccgcacccucauguccugccccaucggcgagguccccucccccuacaacucccgcuucgaguccgucgccugguccgccuccgccugccacgacggcaucaacuggcucaccaucggcaucuccggccccgacuccggcgccgucgccguccucaaguacaacggcaucaucaccgacaccaucaaguccuggcgcaacaacauccuccgcacccaggaguccgagugcgccugcgucaacggcuccugcuucaccaucaugaccgacggccccuccgacggccaggccuccuacaagaucuuccgcaucgagaagggcaagaucgucaaguccgucgagaugaacgcccccaacuaccacuacgaggagugcuccugcuaccccgacuccuccgagaucaccugcgucugccgcgacaacuggcacggcuccaaccgccccugggucuccuucaaccagaaccucgaguaccagaucggcuacaucugcuccggcgucuucggcgacaacccccgccccaacgacaagaccggcuccugcggccccgucuccuccaacggcgccaacggcgucaagggcuucuccuucaaguacggcaacggcgucuggaucggccgcaccaaguccaucuccucccgcaagggcuucgagaugaucugggaccccaacggcuggaccggcaccgacaacaacuucuccaucaagcaggacaucgucggcaucaaggagugguccggcuacuccggcuccuucguccagcaccccgagcucaccggccucgacugcauccgccccugcuucugggucgagcucauccgcggccgccccgaggagaacaccaucuggaccuccggcuccuccaucuccuucugcggcgucaacuccgacgccgucggcugguccuggcccgacggcgccgagcuccccuucaccaucgacaaguga

SEQ ID NO: 121767 - RNA, 1410 nt, Artificial Sequence
  derived and/or modified CDS sequence (opt2) from neuraminidase__InfluenzaA__AIM55976
augaaccccaaccagaagaucaucaccaucggcuccgucugcaugaccaucggcauggccaaccucauccuccagaucggcaacaucaucuccaucugggucucccacuccauccagcucggcaaccagucccagaucgagaccugcaaccaguccgucaucaccuacgagaacaacaccugggucaaccagaccuacgucaacaucuccaacaccaacuucgccgccggccaguccgucgucuccgucaagcucgccggcaacuccucccucugccccgucuccggcugggccaucuacuccaaggacaacuccguccgcaucggcuccaagggcgacgucuucgucauccgcgagcccuucaucuccugcuccccccucgagugccgcaccuucuuccucacccagggcgcccuccucaacgacaagcacuccaacggcaccaucaaggaccgcucccccuaccgcacccucauguccugccccaucggcgagguccccucccccuacaacucccgcuucgaguccgucgccugguccgccuccgccugccacgacggcaucaacuggcucaccaucggcaucuccggccccgacuccggcgccgucgccguccucaaguacaacggcaucaucaccgacaccaucaaguccuggcgcaacaacauccuccgcacccaggaguccgagugcgccugcgucaacggcuccugcuucaccaucaugaccgacggccccuccgacggccaggccuccuacaagaucuuccgcaucgagaagggcaagaucgucaaguccgucgagaugaacgcccccaacuaccacuacgaggagugcuccugcuaccccgacuccuccgagaucaccugcgucugccgcgacaacuggcacggcuccaaccgccccugggucuccuucaaccagaaccucgaguaccagaucggcuacaucugcuccggcgucuucggcgacaacccccgccccaacgacaagaccggcuccugcggccccgucuccuccaacggcgccaacggcgucaagggcuucuccuucaaguacggcaacggcgucuggaucggccgcaccaaguccaucuccucccgcaagggcuucgagaugaucugggaccccaacggcuggaccggcaccgacaacaacuucuccaucaagcaggacaucgucggcaucaaggagugguccggcuacuccggcuccuucguccagcaccccgagcucaccggccucgacugcauccgccccugcuucugggucgagcucauccgcggccgccccgaggagaacaccaucuggaccuccggcuccuccaucuccuucugcggcgucaacuccgacaccgucggcugguccuggcccgacggcgccgagcuccccuucaccaucgacaaguga

SEQ ID NO: 121768 - RNA, 1410 nt, Artificial Sequence
  derived and/or modified CDS sequence (opt2) from neuraminidase__InfluenzaA__AIM55987
augaaccccaaccagaagaucaucaccaucggcuccgucugcaugaccaucggcauggccaaccucauccuccagaucggcaacaucaucuccaucugggucucccacuccauccagcucggcaaccagucccagaucgagaccugcaaccaguccgucaucaccuacgagaacaacaccugggucaaccagaccuacgucaacaucuccaacaccaacuucgccgccggccaguccgucgucuccgucaagcucgccggcaacuccucccucugccccgucuccggcugggccaucuacuccaaggacaacuccguccgcaucggcuccaagggcgacgucuucgucauccgcgagcccuucaucuccugcuccccccucgagugccgcaccuucuuccucacccagggcgcccuccucaacgacaagcacuccaacggcaccaucaaggaccgcucccccuaccgcacccucauguccugccccaccggcgagguccccucccccuacaacucccgcuucgaguccgucgccugguccgccuccgccugccacgacggcaucaacuggcucaccaucggcaucuccggccccgacuccggcgccgucgccguccucaaguacaacggcaucaucaccgacaccaucaaguccuggcgcaacaacauccuccgcacccaggaguccgagugcgccugcgucaacggcuccugcuucaccaucaugaccgacggccccuccgacggccaggccuccuacaagaucuuccgcaucgagaagggcaagaucgucaaguccgucgagaugaacgcccccaacuaccacuacgaggagugcuccugcuaccccgacuccuccgagaucaccugcgucugccgcgacaacuggcacggcuccaaccgccccugggucuccuucaaccagaaccucgaguaccagaucggcuacaucugcuccggcgucuucggcgacaacccccgccccaacgacaagaccggcuccugcggccccgucuccuccaacggcgccaacggcgucaagggcuucuccuucaaguacggcaacggcgucuggaucggccgcaccaaguccaucuccucccgcaagggcuucgagaugaucugggaccccaacggcuggaccggcaccgacaacaacuucuccaucaagcaggacaucgucggcaucaaggagugguccggcuacuccggcuccuucguccagcaccccgagcucaccggccucgacugcauccgccccugcuucugggucgagcucauccgcggccgccccgaggagaacaccaucuggaccuccggcuccuccaucuccuucugcggcgucaacuccgacaccgucgacugguccuggcccgacggcgccgagcuccccuucaccaucgacaaguga

SEQ ID NO: 121769 - RNA, 1410 nt, Artificial Sequence
  derived and/or modified CDS sequence (opt2) from neuraminidase__InfluenzaA__AIM55998
augaaccccaaccagaagaucaucaccaucggcuccgucugcaugaccaucggcauggccaaccucauccuccagaucggcaacaccaucuccaucugggucucccacuccauccagcucggcaaccagucccagaucgagaccugcaaccaguccgucaucaccuacgagaacaacaccugggucaaccagaccuacgucaacaucuccaacaccaacuucgccgccggccaguccgucguccccgucaagcucgccggcaacuccucccucugccccgucuccggcugggccaucuacuccaaggacaacuccguccgcaucggcuccaagggcgacgucuucgucauccgcgagcccuucaucuccugcuccccccucgagugccgcaccuucuuccucacccagggcgcccuccucaacgacaagcacuccaacggcaccaucaaggaccgcucccccuaccgcacccucauguccugccccaucggcgagguccccucccccuacaacucccgcuucgaguccgucgccugguccgccuccgccugccacgacggcaucaacuggcucaccaucggcaucuccggccccgacuccggcgccgucgccguccucaaguacaacggcaucaucaccgacaccaucaaguccuggcgcaacaacauccuccgcacccaggaguccgagugcgccugcgucaacggcuccugcuucaccaucaugaccgacggccccuccgacggccaggccuccuacaagaucuuccgcaucgagaagggcaagaucgucaaguccgucgagaugaacgcccccaacuaccacuacgaggagugcuccugcuaccccgacuccuccgagaucaccugcgucugccgcgacaacuggcacggcuccaaccgccccugggucuccuucaaccagaaccucgaguaccagaucggcuacaucugcuccggcgucuucggcgacaacccccgccccaacgacaagaccggcuccugcggccccgucuccuccaacggcgccaacggcgucaagggcuucuccuucaaguacggcaacggcgucuggaucggccgcaccaaguccaucuccucccgcaagggcuucgagaugaucugggaccccaacggcuggaccggcaccgacaacaaguucuccaucaagcaggacaucgucggcaucaacgagugguccggcuacuccggcuccuucguccagcaccccgagcucaccggccucgacugcauccgccccugcuucugggucgagcucauccgcggccgccccgaggagaacaccaucuggaccuccggcuccuccaucuccuucugcggcgucaaguccgacaccgucggcugguccuggcccgacggcgccgagcuccccuucaccaucgacaaguga

SEQ ID NO: 121770 - RNA, 1410 nt, Artificial Sequence; identical to SEQ ID NO: 121767
  derived and/or modified CDS sequence (opt2) from neuraminidase__InfluenzaA__AIM56009

SEQ ID NO: 121771 - RNA, 1410 nt, Artificial Sequence; identical to SEQ ID NO: 121767
  derived and/or modified CDS sequence (opt2) from neuraminidase__InfluenzaA__AIM56020

SEQ ID NO: 121772 - RNA, 1410 nt, Artificial Sequence; identical to SEQ ID NO: 121767
  derived and/or modified CDS sequence (opt2) from neuraminidase__InfluenzaA__AIM56031

SEQ ID NO: 121773 - RNA, 1410 nt, Artificial Sequence
  derived and/or modified CDS sequence (opt2) from neuraminidase__InfluenzaA__AIM56042
augaaccccaaccagaagaucaucaccaucggcuccgucugcaugaccaucggcauggccaaccucauccuccagaucggcaacaucaucuccaucugggucucccacuccauccagcucggcaaccagucccagaucgagaccugcaaccaguccgucaucaccuacgagaacaacaccugggucaaccagaccuacgucaacaucuccaacaccaacuucgccgccggccaguccgucguccccgucaagcucgccggcaacuccucccucugccccgucuccggcugggccaucuacuccaaggacaacuccguccgcaucggcuccaagggcgacgucuucgucauccgcgagcccuucaucuccugcuccccccucgagugccgcaccuucuuccucacccagggcgcccuccucaacgacaagcacuccaacggcaccaucaaggaccgcucccccuaccgcacccucauguccugccccaucggcgagguccccucccccuacaacucccgcuucgaguccgucgccugguccgccuccgccugccacgacggcaucaacuggcucaccaucggcaucuccggccccgacuccggcgccgucgccguccucaaguacaacggcaucaucaccgacaccaucaaguccuggcgcaacaacauccuccgcacccaggaguccgagugcgccugcgucaacggcuccugcuucaccaucaugaccgacggccccuccaacggccaggccuccuacaagaucuuccgcaucgagaagggcaagaucgucaaguccgucgagaugaacgcccccaacuaccacuacgaggagugcuccugcuaccccgacuccuccgagaucaccugcgucugccgcgacaacuggcacggcuccaaccgccccugggucuccuucaaccagaaccucgaguaccagaucggcuacaucugcuccggcgucuucggcgacaacccccgccccaacgacaagaccggcuccugcggccccgucuccuccaacggcgccaacggcgucaagggcuucuccuucaaguacggcaacggcgucuggaucggccgcaccaaguccaucuccucccgcaagggcuucgagaugaucugggaccccaacggcuggaccggcaccgacaacaacuucuccaucaagcaggacaucgucggcaucaaggagugguccggcuacuccggcuccuucguccagcaccccgagcucaccggccucgacugcauccgccccugcuucugggucgagcucauccgcggccgccccgaggagaacaccaucuggaccuccggcuccuccaucuccuucugcggcgucaacuccgacaccgucggcugguccuggcccgacggcgccgagcuccccuucaccaucgacaaguga

SEQ ID NO: 121774 - RNA, 1410 nt, Artificial Sequence
  derived and/or modified CDS sequence (opt2) from neuraminidase__InfluenzaA__AIM56053
augaaccccaaccagaagaucaucaccaucggcuccgucugcaugaccaucggcauggccaaccucauccuccagaucggcaacaucaucuccaucugggucucccacuccauccagcucggcaaccagucccagaucgagaccugcaaccaguccgucaucaccuacgagaacaacaccugggucaaccagaccuacgucaacaucuccaacaccaacuucgccgccggccaguccgucgucuccgucaagcucgccggcaacuccucccucugccccgucuccggcugggccaucuacuccaaggacaacuccguccgcaucggcuccaagggcgacgucuucgucauccgcgagcccuucaucuccugcuccccccucgagugccgcaccuucuuccucacccagggcgcccuccucaacgacaagcacuccaacggcaccaucaaggaccgcucccccuaccgcacccucauguccugccccaucggcgagguccccucccccuacaacucccgcuucgaguccgucgccugguccgccuccgccugccacgacggcaucaacuggcucaccaucggcaucuccggccccgacuccggcgccgucgccguccucaaguacaacggcaucaucaccgacaccaucaaguccuggcgcaacaacauccuccgcacccaggaguccgagugcgccugcgucaacggcuccugcuucaccaucaugaccgacggccccuccgacgagcaggccuccuacaagaucuuccgcaucgagaagggcaagaucgucaaguccgucgagaugaacgcccccaacuaccacuacgaggagugcuccugcuaccccgacuccuccgagaucaccugcgucugccgcgacaacuggcacggcuccaaccgccccugggucuccuucaaccagaaccucgaguaccagaucggcuacaucugcuccggcgucuucggcgacaacccccgccccaacgacaagaccggcuccugcggccccgucuccuccaacggcgccaacggcgucaagggcuucuccuucaaguacggcaacggcgucuggaucggccgcaccaaguccaucuccucccgcaagggcuucgagaugaucugggaccccaacggcuggaccggcaccgacaacaacuucuccaucaagcaggacaucgucggcaucaaggagugguccggcuacuccggcuccuucguccagcaccccgagcucaccggccucgacugcauccgccccugcuucugggucgagcucauccgcggccgccccgaggagaacaccaucuggaccuccggcuccuccaucuccuucugcggcgucaacuccgacaccgucggcugguccuggcccgacggcgccgagcuccccuucaccaucgacaaguga

SEQ ID NO: 121775 - RNA, 1410 nt, Artificial Sequence
  derived and/or modified CDS sequence (opt2) from neuraminidase__InfluenzaA__AIM56064
augaaccccaaccagaagaucaucaccaucggcuccgucugcaugaccaucggcauggccaaccucauccuccagaucggcaacaucaucuccaucugggucucccacuccauccagcucggcaaccagucccagaucgagaccugcaaccaguccgucaucaccuacgagaacaacaccugggucaaccagaccuacgucaacaucuccaacaccaacuucgccgccggccaguccgucguccccgucaagcucgccggcaacuccucccucugccccgucuccggcugggccaucuacuccaaggacaacuccguccgcaucggcuccaagggcgacgucuucgucauccgcgagcccuucaucuccugcuccccccucgagugccgcaccuucuuccucacccagggcgcccuccucaacgacaagcacuccaacggcaccaucaaggaccgcucccccuaccgcacccucauguccugccccaucggcgagguccccucccccuacaacucccgcuucgaguccgucgccugguccgccuccgccugccacgacggcaucaacuggcucaccaucggcaucuccggccccgacuccggcgccgucgccguccucaaguacaacggcaucaucaccgacaccaucaaguccuggcgcaacaacauccuccgcacccaggaguccgagugcgccugcgucaacggcuccugcuucaccaucaugaccgacggccccuccgacggccaggccuccuacaagaucuuccgcaucgagaagggcaagaucgucaaguccgucgagaugaacgcccccaacuaccacuacgaggagugcuccugcuaccccgacuccuccgagaucaccugcgucugccgcgacaacuggcacggcuccaaccgccccugggucuccuucaaccagaaccucgaguaccagaucggcuacaucugcuccggcgucuucggcgacaacccccgccccaacgacaagaccggcuccugcggccccgucuccuccaacggcgccaacggcgucaagggcuucuccuucaaguacggcaacggcgucuggaucggccgcaccaaguccaucuccucccgcaagggcuucgagaugaucugggaccccaacggcuggaccggcaccgacaacaacuucuccaucaagcaggacaucgucggcaucaaggagugguccggcuacuccggcuccuucguccagcaccccgagcucaccggccucgacugcauccgccccugcuucugggucgagcucguccgcggccgccccgaggagaacaccaucuggaccuccggcuccuccaucuccuucugcggcgucaacuccgacaccgucggcugguccuggcccgacggcgccgagcuccccuucaccaucgacaaguga

SEQ ID NO: 121776 - RNA, 1410 nt, Artificial Sequence
  derived and/or modified CDS sequence (opt2) from neuraminidase__InfluenzaA__AIM56086
augaaccccaaccagaagaucaucaccaucggcuccgucugcaugaccaucggcauggccaaccucauccuccagaucggcaacaucaucuccaucugggucucccacuccauccagcucggcaaccagucccacaucgagaccugcaaccaguccgucaucaccuacgagaacaacaccugggucaaccagaccuacgucaacaucuccaacaccaacuucgccgccggccaguccgucguccccgucaagcucgccggcaacuccucccucugccccgucuccggcugggccaucuacuccaaggacaacuccguccgcaucggcuccaagggcgacgucuucgucauccgcgagcccuucaucuccugcuccccccucgagugccgcaccuucuuccucacccagggcgcccuccucaacgacaagcacuccaacggcaccaucaaggaccgcucccccuaccgcacccucauguccugccccaucggcgagguccccucccccuacaacucccgcuucgaguccgucgccugguccgccuccgccugccacgacggcaucaacuggcucaccaucggcaucuccggccccgacaacggcgccgucgccguccucaaguacaacggcaucaucaccgacaccaucaaguccuggcgcaacaacauccuccgcacccaggaguccgagugcgccugcgucaacggcuccugcuucaccaucaugaccgacggccccuccgacggccaggccuccuacaagaucuuccgcaucgagaagggcaagaucgucaaguccgucgagaugaacgcccccaacuaccacuacgaggagugcuccugcuaccccgacuccuccgagaucaccugcgucugccgcgacaacuggcacggcuccaaccgccccugggucuccuucaaccagaaccucgaguaccagaucggcuacaucugcuccggcgucuucggcgacaacccccgccccaacgacaagaccggcuccugcggccccgucaccuccaacggcgccaacggcgucaagggcuucuccuucaaguacggcaacggcgucuggaucggccgcaccaaguccaucuccucccgcaagggcuucgagaugaucugggaccccaacggcuggaccggcaccgacaacaacuucuccaucaagcaggacaucaucggcaucaaggagugguccggcuacuccggcuccuucguccagcaccccgagcucaccggccucgacugcauccgccccugcuucugggucgagcucauccgcggccgccccgaggagaacaccaucuggaccuccggcuccuccaucuccuucugcggcgucaacuccgacaccgucggcugguccuggcccgacggcgccgagcuccccuucaccaucgacaaguga

SEQ ID NO: 121777 - RNA, 1410 nt, Artificial Sequence
  derived and/or modified CDS sequence (opt2) from neuraminidase__InfluenzaA__AIM56097
augaaccccaaccagaagaucaucaccaucggcuccgucugcaugaccaucggcauggccaaccucauccuccagaucggcaacaucaucuccaucugggucucccacuccauccagcucggcaaccagucccagaucgagaccugcaaccaguccgucaucaccuacgagaacaacaccugggucaaccagaccuacgucaacaucuccaacaccaacuucgccgccgagcaguccgucgucuccgucaagcucgccggcaacuccucccucugccccgucuccggcugggccaucuacuccaaggacaacuccguccgcaucggcuccaagggcgacgucuucgucauccgcgagcccuucaucuccugcuccccccucgagugccgcaccuucuuccucacccagggcgcccuccucaacgacaagcacuccaacggcaccaucaaggaccgcucccccuaccgcacccucauguccugccccaucggcgagguccccucccccuacaacucccgcuucgaguccgucgccugguccgccuccgccugccacgacggcaucaacuggcucaccaucggcaucuccggccccgacuccggcgccgucgccguccucaaguacaacggcaucaucaccgacaccaucaaguccuggcgcaacaacauccuccgcacccaggaguccgagugcgccugcgucaacggcuccugcuucaccaucaugaccgacggccccuccgacggccaggccuccuacaagaucuuccgcaucgagaagggcaagaucgucaaguccgucgagaugaacgcccccaacuaccacuacgaggagugcuccugcuaccccgacuccuccgagaucaccugcgucugccgcgacaacuggcacggcuccaaccgccccugggucuccuucaaccagaaccucgaguaccagaucggcuacaucugcuccggcgucuucggcgacaacccccgccccaacgacaagaccggcuccugcggccccgucuccuccaacggcgccaacggcgucaagggcuucuccuucaaguacggcaacggcgucuggaucggccgcaccaaguccaucuccucccgcaagggcuucgagaugaucugggaccccaacggcuggaccggcaccgacaacaacuucuccaucaagcaggacaucgucggcaucaaggagugguccggcuacuccggcuccuucguccagcaccccgagcucaccggccucgacugcauccgccccugcuucugggucgagcucauccgcggccgccccgaggagaacaccaucuggaccuccggcuccuccaucuccuucugcggcgucaacuccgacaccgucggcugguccuggcccgacggcgccgagcuccccuucaccaucgacaaguga

SEQ ID NO: 121778 - RNA, 1410 nt, Artificial Sequence
  derived and/or modified CDS sequence (opt2) from neuraminidase__InfluenzaA__AIM56108
augaaccccaaccagaagaucaucaccaucggcuccgucugcaugaccaucggcauggccaaccucauccuccagaucggcaacaucaucuccaucugggucucccacuccauccagcucggcaaccagucccagaucgagaccugcaaccaguccgucaucaccuacgagaacaacaccuggaucaaccagaccuacgucaacaucuccaacaccaacuucgccgccggccaguccgucguccccgucaagcucgccggcaacuccucccucugccccgucuccggcugggccaucuacuccaaggacaacuccguccgcaucggcuccaagggcgacgucuucgucauccgcgagcccuucaucuccugcuccccccucgagugccgcaccuucuuccucacccagggcgcccuccucaacgacaagcacuccaacggcaccaucaaggaccgcucccccuaccgcacccucauguccugccccaucggcgagguccccucccccuacaacucccgcuucgaguccgucgccugguccgccuccgccugccacgacggcaucaacuggcucaccaucggcaucuccggccccgacuccggcgccgucgccguccucaaguacaacggcaucaucaccgacaccaucaaguccuggcgcaacaacauccuccgcacccaggaguccgagugcgccugcgucaacggcuccugcuucaccaucaugaccgacggccccuccgacggccaggccuccuacaagaucuuccgcaucgagaagggcaagaucgucaaguccgucgagaugaacgcccccaacuaccacuacgaggagugcuccugcuaccccgacuccuccgagaucaccugcgucugccgcgacaacuggcacggcuccaaccgccccugggucuccuucaaccagaaccucgaguaccagaucggcuacaucugcuccggcgucuucggcgacaacccccgccccaacgacaagaccggcuccugcggccccgucuccuccaacggcgccaacggcgucaagggcuucuccuucaaguacggcaacggcgucuggaucggccgcaccaaguccaucuccucccgcaagggcuucgagaugaucugggaccccaacggcuggaccggcaccgacaacaacuucuccaucaagcaggacaucgucggcaucaaggagugguccggcuacuccggcuccuucguccagcaccccgagcucaccggccucgacugcauccgccccugcuucugggucgagcucauccgcggccgccccgaggagaacaccaucuggaccuccggcuccuccaucuccuucugcggcgucaacuccgacaccgucggcugguccuggcccgacggcgccgagcuccccuucaccaucgacaaguga

SEQ ID NO: 121779 - RNA, 1410 nt, Artificial Sequence
  derived and/or modified CDS sequence (opt2) from neuraminidase__InfluenzaA__AIM56119
augaaccccaaccagaagaucaucaccaucggcuccgucugcaugaccaucggcauggccaaccucauccuccagaucggcaacaucaucuccaucugggucucccacuccauccagaucggcaaccagucccagaucgagaccugcaaccaguccgucaucaccuacgagaacaacaccugggucaaccagaccuacgucaacaucuccaacaccaacuucgccgccggccaguccgucgucuccgucaagcucgccggcaacuccucccucugccccgucuccggcugggccaucuacuccaaggacaacuccguccgcaucggcuccaagggcgacgucuucgucauccgcgagcccuucaucuccugcuccccccucgagugccgcaccuucuuccucacccagggcgcccuccucaacgacaagcacuccaacggcaccaucaaggaccgcucccccuaccgcacccucauguccugccccaucggcgagguccccucccccuacaacucccgcuucgaguccgucgccugguccgccuccgccugccacgacggcaucaacuggcucaccaucggcaucuccggccccgacuccggcgccgucgccguccucaaguacaacggcaucaucaccgacaccaucaaguccuggcgcaacaacauccuccgcacccaggaguccgagugcgccugcgucaacggcuccugcuucaccaucaugaccgacggccccuccgacggccaggccuccuacaagaucuuccgcaucgagaagggcaagaucgucaaguccgucgagaugaacgcccccaacuaccacuacgaggagugcuccugcuaccccgacuccuccgagaucaccugcgucugccgcgacaacuggcacggcuccaaccgccccugggucuccuucaaccagaaccucgaguaccagaucggcuacaucugcuccggcgucuucggcgacaacccccgccccaacgacaagaccggcuccugcggccccgucuccuccaacggcgccaacggcgucaagggcuucuccuucaaguacggcaacggcgucuggaucggccgcaccaaguccaucuccucccgcaagggcuucgagaugaucugggaccccaacggcuggaccggcaccgacaacaaguucuccaucaagcaggacaucgucggcaucaacgagugguccggcuacuccggcuccuucguccagcaccccgagcucaccggccucgacugcauccgccccugcuucugggucgagcucauccgcggccgccccgaggagaacaccaucuggaccuccggcuccuccaucuccuucugcggcgucaacuccgacaccgucggcugguccuggcccgacggcgccgagcuccccuucaccaucgacaaguga

SEQ ID NO: 121780 - RNA, 1410 nt, Artificial Sequence
  derived and/or modified CDS sequence (opt2) from neuraminidase__InfluenzaA__AIM56130
augaaccccaaccagaagaucaucaccaucggcuccgucugcaugaccaucggcauggccaaccucauccuccagaucggcaacaucaucuccaucugggucucccacuccauccagcucggcaaccagucccagaucgagaccugcaaccaguccgucaucaccuacgagaacaacaccugggucaaccagaccuacgucaacaucuccaacaccaacuucgccgccggccaguccgucguccccgucaagcucgccggcaacuccucccucugccccgucuccggcugggccaucuacuccaaggacaacuccguccgcaucggcuccaagggcgacgucuucgucauccgcgagcccuucaucuccugcuccccccucgagugccgcaccuucuuccucacccagggcgcccuccucaacgacaagcacuccaacggcaccaucaaggaccgcucccccuaccgcacccucauguccugccccaucggcgagguccccucccccuacaacucccgcuucgaguccgucgccugguccgccuccgccugccacgacggcaucaacuggcucaccaucggcaucuccggccccgacuccggcgccgucgccguccucaaguacaacggcaucaucaccgacaccaucaaguccuggcgcaacaacauccuccgcacccaggaguccgagugcgccugcgucaacggcuccugcuucaccaucaugaccgacggccccuccgacggccaggccuccuacaagaucuuccgcaucgagaagggcaagaucgucaaguccgucgagaugaacgcccccaacuaccacuacgaggagugcuccugcuaccccgacuccuccgagaucaccugcgucugccgcgacaacuggcacggcuccaaccgccccugggucuccuucaaccagaaccucgaguaccagaucggcuacaucugcuccggcgucuucggcgacaacccccgccccaacgacaagaccggcuccugcggccccgucuccuccaacggcgccaacggcgucaagggcuucuccuucaaguacggcaacggcgucuggaucggccgcaccaaguccaucuccucccgcaagggcuucgagaugaucugggaccccaacggcuggaccggcaccgacaacaaguucuccaucaagcaggacaucgucggcaucaacgagugguccggcuacuccggcuccuucguccagcaccccgagcucaccggccucgacugcauccgccccugcuucugggucgagcucauccgcggccgccccgaggagaacaccaucuggaccuccggcuccuccaucuccuucugcggcgucaaguccgacaccgucggcugguccuggcccgacggcgccgagcuccccuucaccaucgacaaguga

SEQ ID NO: 121781 - RNA, 1410 nt, Artificial Sequence
  derived and/or modified CDS sequence (opt2) from neuraminidase__InfluenzaA__AIM56141
augaaccccaaccagaagaucaucaccaucggcuccgucugcaugaccaucggcauggccaaccucauccuccagaucggcaacaucaucuccaucugggucucccacuccauccagcucggcaaccagucccagaucgagaccugcaaccaguccgucaucaucuacgagaacaacaccugggucaaccagaccuacgucaacaucuccaacaccaacuucgccgccggccaguccgucgucuccgucaagcucgccggcaacuccucccucugccccgucuccggcugggccaucuacuccaaggacaacuccguccgcaucggcuccaagggcgacgucuucgucauccgcgagcccuucaucuccugcuccccccucgagugccgcaccuucuuccucacccagggcgcccuccucaacgacaagcacuccaacggcaccaucaaggaccgcucccccuaccgcacccucauguccugccccaucggcgagguccccucccccuacaacucccgcuucgaguccgucgccugguccgccuccgccugccacgacggcaucaacuggcucaccaucggcaucuccggccccgacuccggcgccgucgccguccucaaguacaacggcaucaucaccgacaccaucaaguccuggcgcaacaacauccuccgcacccaggaguccgagugcgccugcgucaacggcuccugcuucaccaucaugaccgacggccccuccgacggccaggccuccuacaagaucuuccgcaucgagaagggcaagaucgucaaguccgucgagaugaacgcccccaacuaccacuacgaggagugcuccugcuaccccgacuccuccgagaucaccugcgucugccgcgacaacuggcacggcuccaaccgccccugggucuccuucaaccagaaccucgaguaccagaucggcuacaucugcuccggcgucuucggcgacaacccccgccccaacgacaagaccggcuccugcggccccgucuccuccaacggcgccaacggcgucaagggcuucuccuucaaguacggcaacggcgucuggaucggccgcaccaaguccaucuccucccgcaagggcuucgagaugaucugggaccccaacggcuggaccggcaccgacaacaacuucuccaucaagcaggacaucgucggcaucaaggagugguccggcuacuccggcuccuucguccagcaccccgagcucaccggccucgacugcauccgccccugcuucugggucgagcucauccgcggccgccccgaggagaacaccaucuggaccuccggcuccuccaucuccuucugcggcgucaacuccgacaccgucggcugguccuggcccgacggcgccgagcuccccuucaccaucgacaaguga

SEQ ID NO: 121782 - RNA, 1410 nt, Artificial Sequence; identical to SEQ ID NO: 121767
  derived and/or modified CDS sequence (opt2) from neuraminidase__InfluenzaA__AIM56152

SEQ ID NO: 121783 - RNA, 1410 nt, Artificial Sequence
  derived and/or modified CDS sequence (opt2) from neuraminidase__InfluenzaA__AIM56163
augaaccccaaccagaagaucaucaccaucggcuccgucugcaugaccaucggcauggccaaccucauccuccagaucggcaacaucaucuccaucugggucucccacuccauccagcucggcaaccagucccacaucgagaccugcaaccaguccgucaucaccuacgagaacaacaccugggucaaccagaccuacgucaacaucuccaacaccaacuucgccgccggccaguccgucguccccgucaagcucgccggcaacuccucccucugccccgucuccggcugggccaucuacuccaaggacaacuccguccgcaucggcuccaagggcgacgucuucgucauccgcgagcccuucaucuccugcuccccccucgagugccgcaccuucuuccucacccagggcgcccuccucaacgacaagcacuccaacggcaccaucaaggaccgcucccccuaccgcacccucauguccugccccaucggcgagguccccucccccuacaacucccgcuucgaguccgucgccugguccgccuccgccugccacgacggcaucaacuggcucaccaucggcaucuccggccccgacaacggcgccgucgccguccucaaguacaacggcaucaucaccgacaccaucaaguccuggcgcaacaacauccuccgcacccaggaguccgagugcgccugcgucaacggcuccugcuucaccaucaugaccgacggccccuccgacggccaggccuccuacaagaucuuccgcaucgagaagggcaagaucgucaaguccgucgagaugaacgcccccaacuaccacuacgaggagugcuccugcuaccccgacuccuccgagaucaccugcgucugccgcgacaacuggcacggcuccaaccgccccugggucuccuucaaccagaaccucgaguaccagaucggcuacaucugcuccggcgucuucggcgacaacccccgccccaacgacaagaccggcuccugcggccccgucaccuccaacggcgccaacggcgucaagggcuucuccuucaaguacggcaacggcgucuggaucggccgcaccaaguccaucuccucccgcaagggcuucgagaugaucugggaccccaacggcuggaccggcaccgacaacaacuucuccaucaagcaggacaucgucggcaucaaggagugguccggcuacuccggcuccuucguccagcaccccgagcucaccggccucgacugcauccgccccugcuucugggucgagcucauccgcggccgccccgaggagaacaccaucuggaccuccggcuccuccaucuccuucugcggcgucaacuccgacaccgucggcugguccuggcccgacggcgccgagcuccccuucaccaucgacaaguga

SEQ ID NO: 121784 - RNA, 1410 nt, Artificial Sequence
  derived and/or modified CDS sequence (opt2) from neuraminidase__InfluenzaA__AIM56174
augaaccccaaccagaagaucaucaccaucggcuccgucugcaugaccaucggcauggccaaccucauccuccagaucggcaacaucaucuccaucugggucucccacuccauccagcucggcaaccagucccagaucgagaccugcaaccaguccgucaucaccuacgagaacaacaccugggucaaccagaccuacgucaacaucuccaacaccaacuucgccgccggccaguccgucguccccgucaagcucgccggcaacuccucccucugccccgucuccggcugggccaucuacuccaaggacaacuccguccgcaucggcuccaagggcgacgucuucgucauccgcgagcccuucaucuccugcuccccccucgagugccgcaccuucuuccucacccagggcgcccuccucaacgacaagcacuccaacggcaccaucaaggaccgcucccccuaccgcacccucauguccugccccaucggcgagguccccucccccuacaacucccgcuucgaguccgucgccugguccgccuccgccugccacgacggcaucaacuggcucaccaucggcaucuccggccccgacuccggcgccgucgccguccucaaguacaacggcaucaucaccgacaccaucaaguccuggcgcaacaacauccuccgcacccaggaguccgagugcgccugcgucaacggcuccugcuucaccaucaugaccgacggccccuccgacggccaggccuccuacaagaucuuccgcaucgagaagggcaagaucgucaaguccgucgagaugaacgcccccaacuaccacuacgaggagugcuccugcuaccccgacuccuccgagaucaccugcgucugccgcgacaacuggcacggcuccaaccgccccugggucuccuucaaccagaaccucgaguaccagaucggcuacaucugcuccggcgucuucggcgacaacccccgccccaacgacaagaccggcuccugcggccccgucuccuccaacggcgccaacggcgucaagggcuucuccuucaaguacggcaacggcgucuggaucggccgcaccaaguccaucuccucccgcaagggcuucgagaugaucugggaccccaacggcuggaccggcaccgacaacaacuucuccaucaagcaggacaucgucggcaucaaggagugguccggcuacuccggcuccuucguccagcaccccgagcucaccggccucgacugcauccgccccugcuucugggucgagcucauccgcggccgccccgaggagaacaccaucuggaccuccggcuccuccaucuccuucugcggcgucaacuccgacaccgucggcugguccuggcccgacggcgccgagcuccccuucaccgucgacaaguga

SEQ ID NO: 121785 - RNA, 1410 nt, Artificial Sequence; identical to SEQ ID NO: 121780
  derived and/or modified CDS sequence (opt2) from neuraminidase__InfluenzaA__AIM56185

SEQ ID NO: 121786 - RNA, 1410 nt, Artificial Sequence; identical to SEQ ID NO: 121779
  derived and/or modified CDS sequence (opt2) from neuraminidase__InfluenzaA__AIM56196

SEQ ID NO: 121787 - RNA, 1410 nt, Artificial Sequence; identical to SEQ ID NO: 121761
  derived and/or modified CDS sequence (opt2) from neuraminidase__InfluenzaA__AIM56207

SEQ ID NO: 121788 - RNA, 1410 nt, Artificial Sequence
  derived and/or modified CDS sequence (opt2) from neuraminidase__InfluenzaA__AIM56229
augaaccccaaccagaagaucaucaccaucggcuccgucugcaugaccaucggcauggccaaccucauccuccagaucggcaacaccaucuccaucugggucucccacuccauccagaucggcaaccagucccagaucgagaccugcaaccaguccgucaucaccuacgagaacaacaccugggucaaccagaccuacgucaacaucuccaacaccaacuucgccgccggccaguccgucgucuccgucaagcucgccggcaacuccucccucugccccgucuccggcugggccaucuacuccaaggacaacuccguccgcaucggcuccaagggcgacgucuucgucauccgcgagcccuucaucuccugcuccccccucgagugccgcaccuucuuccucacccagggcgcccuccucaacgacaagcacuccaacggcaccaucaaggaccgcucccccuaccgcacccucauguccugccccaucggcgagguccccucccccuacaacucccgcuucgaguccgucgccugguccgccuccgccugccacgacggcaucaacuggcucaccaucggcaucuccggccccgacuccggcgccgucgccguccucaaguacaacggcaucaucaccgacaccaucaaguccuggcgcaacaacauccuccgcacccaggaguccgagugcgccugcgucaacggcuccugcuucaccaucaugaccgacggccccuccgacggccacgccuccuacaagaucuuccgcaucgagaagggcaagaucgucaaguccgucgagaugaacgcccccaacuaccacuacgaggagugcuccugcuaccccgacuccuccgagaucaccugcgucugccgcgacaacuggcacggcuccaaccgccccugggucuccuucaaccagaaccucgaguaccagaucggcuacaucugcuccggcgucuucggcgacaacccccgccccaacgacaagaccggcuccugcggccccgucuccuccaacggcgccaacggcgucaagggcuucuccuucaaguacggcaacggcgucuggaucggccgcaccaaguccaucuccucccgcaagggcuucgagaugaucugggaccccaacggcuggaccggcaccgacaacaaguucuccaucaagcaggacaucgucggcaucaacgagugguccggcuacuccggcuccuucguccagcaccccgagcucaccggccucgacugcauccgccccugcuucugggucgagcucauccgcggccgccccgaggagaacaccaucuggaccuccggcuccuccaucuccuucugcggcgucaacuccgacaccgucggcugguccuggcccgacggcgccgagcuccccuucaccaucgacaaguga

SEQ ID NO: 121789 - RNA, 1410 nt, Artificial Sequence
  derived and/or modified CDS sequence (opt2) from neuraminidase__InfluenzaA__AIM56240
augaaccccaaccagaagaucaucaccaucggcuccgucugcaugaccaucggcauggccaaccucauccuccagaucggcaacaucaucuccaucuggaucucccacuccauccaggucggcaaccagucccagaucgagaccugcaaccaguccgucaucaccuacgagaacaacaccugggucaaccagaccuacgucaacaucuccaacaccaacuucgccgccggccagcccgucgucuccgucaagcucgccggcaacuccucccucugcuccgucuccggcugggccaucuacuccaaggacaacuccguccgcaucggcuccaagggcgacgucuucgucauccgcgagcccuucaucuccugcuccccccucgagugccgcaccuucuuccucacccagggcgcccuccucaacgacaagcacuccaacggcaccaucaaggaccgcucccccuaccgcacccucauguccugccccaucggcgagguccccucccccuacaacucccgcuucgaguccgucgccugguccgccuccgccugccacgacggcaucaacuggcucaccaucggcaucuccggccccgacuccggcgccgucgccguccucaaguacaacggcaucaucaccgacaccaucaaguccuggcgcaacgacauccuccgcacccaggaguccgagugcgccugcgucaacggcuccugcuucaccaucaugaccgacggccccuccgacggccaggccuccuacaagaucuuccgcaucgagaagggcaagaucgucaaguccgucgagaugaacgcccccaacuaccacuacgaggagugcuccugcuaccccgacuccuccgagaucaccugcgucugccgcgacaacuggcacggcuccaaccgccccugggucuccuucaaccagaaccucgaguaccagaucggcuacaucugcuccggcaucuucggcgacaacccccgccccaacgacaagaccggcuccugcggccccgucuccuccaacggcgccaacggcgucaagggcuucuccuucaaguacggcaacggcgucuggaucggccgcaccaaguccaucuccucccgcaagggcuucgagaugaucugggaccccaacggcuggaccggcaccgacaacaacuucuccaucaagcaggacaucgucggcaucaacgagugguccggcuacuccggcuccuucguccagcaccccgagcucaccggccucgacugcauccgccccugcuucugggucgagcucauccgcggccgccccaaggagaacaccaucuggaccuccggcuccuccaucuccuucugcggcgucaacuccgacaccgucggcugguccuggcccgacggcgccgagcuccccuucaccaucgacaaguga

SEQ ID NO: 121790 - RNA, 1410 nt, Artificial Sequence
  derived and/or modified CDS sequence (opt2) from neuraminidase__InfluenzaA__AIM56251
augaaccccaaccagaagaucaucaccaucggcuccgucugcaugaccaucggcauggccaaccucauccuccagaucggcaacaucaucuccaucugggucucccacuccauccagcucggcaaccagucccacaucgagaccugcaaccaguccgucaucaccuacgagaacaacaccugggucaaccagaccuacgucaacaucuccaacaccaacuucgccgccggccaguccgucguccccgucaagcucgccggcaacuccucccucugccccgucuccggcugggccaucuacuccaaggacaacuccguccgcaucggcuccaagggcgacgucuucgucauccgcgagcccuucaucuccugcuccccccucgagugccgcaccuucuuccucacccagggcgcccuccucaacgacaagcacuccaacggcaccaucaaggaccgcucccccuaccgcacccucauguccugccccaucggcgagguccccucccccuacaacucccgcuucgaguccgucgccugguccgccuccgccugccacgacggcaucaacuggcucaccaucggcaucuccggccccgacuccggcgccgucgccguccucaaguacaacggcaucaucaccgacaccaucaaguccuggcgcaacaacauccuccgcacccaggaguccgagugcgccugcgucaacggcuccugcuucaccaucaugaccgacggccccuccgacggccaggccuccuacaagaucuuccgcaucgagaagggcaagaucgucaaguccgucgagaugaacgcccccaacuaccacuacgaggagugcuccugcuaccccgacuccuccgagaucaccugcgucugccgcgacaacuggcacggcuccaaccgccccugggucuccuucaaccagaaccucgaguaccagaucggcuacaucugcuccggcgucuucggcgacaacccccgccccaacgacaagaccggcuccugcggccccgucuccuccaacggcgccaacggcgucaagggcuucuccuucaaguacggcaacggcgucuggaucggccgcaccaaguccaucuccucccgcaagggcuucgagaugaucugggaccccaacggcuggaccggcaccgacaacaacuucuccaucaagcaggacaucgucggcaucaaggagugguccggcuacuccggcuccuucguccagcaccccgagcucaccggccucgacugcauccgccccugcuucugggucgagcucauccgcggccgccccgaggagaacaccaucuggaccuccggcuccuccaucuccuucugcggcgucaacuccgacaccgucggcugguccuggcccgacggcgccgagcuccccuucaccaucgacaaguga

SEQ ID NO: 121791 - RNA, 1410 nt, Artificial Sequence; identical to SEQ ID NO: 121790
  derived and/or modified CDS sequence (opt2) from neuraminidase__InfluenzaA__AIM56262

SEQ ID NO: 121792 - RNA, 1410 nt, Artificial Sequence; identical to SEQ ID NO: 121761
  derived and/or modified CDS sequence (opt2) from neuraminidase__InfluenzaA__AIM56273

SEQ ID NO: 121793 - RNA, 1410 nt, Artificial Sequence
  derived and/or modified CDS sequence (opt2) from neuraminidase__InfluenzaA__AIM56284
augaaccccaaccagaagaucaucaccaucggcuccgucugcaucaccaucggcauggccaaccucauccuccagaucggcaacaucaucuccaucugggucucccacuccauccagaucggcaaccagucccagaucgagaccugcaaccaguccgucaucaccuacgagaacaacaccugggucaaccagaccuacgucaacaucuccaacaccaacuucgccgccggccaguccgucgucuccgucaagcucgccggcaacuccucccucugccccgucuccggcugggccaucuacuccaaggacaacuccguccgcaucggcuccaagggcgacgucuucgucauccgcgagcccuucaucuccugcuccccccucgagugccgcaccuucuuccucacccagggcgcccuccucaacgacaagcacuccaacggcaccaucaaggaccgcucccccuaccgcacccucauguccugccccaucggcgagguccccucccccuacaacucccgcuucgaguccgucgccugguccgccuccgccugccacgacggcaucaacuggcucaccaucggcaucuccggccccgacuccggcgccgucgccguccucaaguacaacggcaucaucaccgacaccaucaaguccuggcgcaacaacauccuccgcacccaggaguccgagugcgccugcgucaacggcuccugcuucaccaucaugaccgacggccccuccgacggccaggccuccuacaagaucuuccgcaucgagaagggcaagaucgucaaguccgucgagaugaacgcccccaacuaccacuacgaggagugcuccugcuaccccgacuccuccgagaucaccugcgucugccgcgacaacuggcacggcuccaaccgccccugggucuccuucaaccagaaccucgaguaccagaucggcuacaucugcuccggcgucuucggcgacaacccccgccccaacgacaagaccggcuccugcggccccgucuccuccaacggcgccaacggcgucaagggcuucuccuucaaguacggcaacggcgucuggaucggccgcaccaaguccaucuccucccgcaagggcuucgagaugaucugggaccccaacggcuggaccggcaccgacaacaaguucuccaucaagcaggacgucgucggcaucaacgagugguccggcuacuccggcuccuucguccagcaccccgagcucaccggccucgacugcauccgccccugcuucugggucgagcucauccgcggccgccccgaggagaacaccaucuggaccuccggcuccuccaucuccuucugcggcgucaacuccgacaccgucggcugguccuggcccgacggcgccgagcuccccuucaccaucgacaaguga

SEQ ID NO: 121794 - RNA, 1410 nt, Artificial Sequence; identical to SEQ ID NO: 121761
  derived and/or modified CDS sequence (opt2) from neuraminidase__InfluenzaA__AIM56295

SEQ ID NO: 121795 - RNA, 1410 nt, Artificial Sequence; identical to SEQ ID NO: 121761
  derived and/or modified CDS sequence (opt2) from neuraminidase__InfluenzaA__AIM56306

SEQ ID NO: 121796 - RNA, 1410 nt, Artificial Sequence; identical to SEQ ID NO: 121761
  derived and/or modified CDS sequence (opt2) from neuraminidase__InfluenzaA__AIM56317

SEQ ID NO: 121797 - RNA, 1410 nt, Artificial Sequence; identical to SEQ ID NO: 121780
  derived and/or modified CDS sequence (opt2) from neuraminidase__InfluenzaA__AIM56339

SEQ ID NO: 121798 - RNA, 1410 nt, Artificial Sequence
  derived and/or modified CDS sequence (opt2) from neuraminidase__InfluenzaA__AIM56350
augaaccccaaccagaagaucaucaccaucggcuccgucugcaugaccaucggcauggccaaccucauccuccagaucggcaacaucaucuccaucugggucucccacuccauccagcucggcaaccagucccagaucgagaccugcaaccaguccgucaucaccuacgagaacaacaccugggucaaccagaccuacgucaacaucuccaacaccaacuucgccgccggccaguccgucguccccgucaagcucgccggcaacuccucccucugccccgucuccggcugggccaucuacuccaaggacaacuccguccgcaucggcuccaagggcgacgucuucgucauccgcgagcccuucaucuccugcuccccccucgagugccgcaccuucuuccucacccagggcgcccuccucaacgacaagcacuccaacggcaccaucaaggaccgcucccccuaccgcacccucauguccugccccaucggcgagguccccucccccuacaacucccgcuucgaguccgucgccugguccgccuccgccugccacgacggcaucaacuggcucaccaucggcaucuccggccccgacuccggcgccgucgccguccucaaguacaacggcaucaucaccgacaccaucaaguccuggcgcaacaacauccuccgcacccaggaguccgagugcgccugcgucaacggcuccugcuucaccaucaugaccgacggccccuccgacggccaggccuccuacaagaucuuccgcaucgagaagggcaagaucgucaaguccgucgagaugaacgcccccaacuaccacuacgaggagugcuccugcuaccccgacuccuccgagaucaccugcgucugccgcgacaacuggcacggcuccaaccgccccugggucuccuucaaccagaaccucgaguaccagaucggcuacaucugcuccggcgucuucggcgacaacccccgccccaacgacaagaccggcuccugcggccccgucuccuccaacggcgccaacggcgucaagggcuucuccuucaaguacggcaacggcgucuggaucggccgcaccaaguccaucuccucccgcaagggcuucgagaugaucugggaccccaacggcuggaccggcaccgacaacaacuucuccaucaagcaggacaucgucggcaucaaggagugguccggcuacuccggcuccuucguccagcaccccgagcucaccggccucgacugcauccgccccugcuucugggucgagcucauccgcggccgccccgaggagaacaccaucuggaccuccggcuccuccaucuccuucugcggcaucaacuccgacaccgucggcugguccuggcccgacggcgccgagcuccccuucaccaucgacaaguga

SEQ ID NO: 121799 - RNA, 1410 nt, Artificial Sequence; identical to SEQ ID NO: 121790
  derived and/or modified CDS sequence (opt2) from neuraminidase__InfluenzaA__AIM56361

SEQ ID NO: 121800 - RNA, 1410 nt, Artificial Sequence; identical to SEQ ID NO: 121761
  derived and/or modified CDS sequence (opt2) from neuraminidase__InfluenzaA__AIM56372

SEQ ID NO: 121801 - RNA, 1410 nt, Artificial Sequence; identical to SEQ ID NO: 121790
  derived and/or modified CDS sequence (opt2) from neuraminidase__InfluenzaA__AIM56383

SEQ ID NO: 121802 - RNA, 1410 nt, Artificial Sequence
  derived and/or modified CDS sequence (opt2) from neuraminidase__InfluenzaA__AIM56394
augaaccccaaccagaagaucaucaccaucggcuccgucugcaugaccaucggcauggccaaccucauccuccagaucggcaacaucaucuccaucugggucucccacuccauccagaucggcaaccagucccagaucgagaccugcaaccaguccgucaucaccuacgagaacaacaccugggucaaccagaccuacgucaacaucuccaacaccaacuucgccgccggccaguccgucgucuccgucaagcucgccggcaacuccucccucugccccgucuccggcugggccaucuacuccaaggacaacuccguccgcaucggcuccaagggcgacgucuucgucauccgcgagcccuucaucuccugcuccccccucgagugccgcaccuucuuccucacccagggcgcccuccucaacgacaagcacuccaacggcaccaucaaggaccgcucccccuaccgcacccucauguccugccccaucggcgagguccccucccccuacaacucccgcuucgaguccgucgccugguccgccuccgccugccacgacggcaucaacuggcucaccaucggcaucuccggccccgacuccggcgccgucgccguccucaaguacaacggcaucaucaccgacaccaucaaguccuggcgcaacaacauccuccgcacccaggaguccgagugcgccugcgucaacggcuccugcuucaccaucaugaccgacggccccuccgacggccaggccuccuacaagaucuuccgcaucgagaagggcaagaucgucaaguccgucgagaugaacgcccccaacuaccacuacgaggagugcuccugcuaccccgacuccuccgagaucaccugcgucugccgcgacaacuggcacggcuccaaccgccccugggucuccuucaaccagaaccucgaguaccagaucggcuacaucugcuccggcaucuucggcgacaacccccgccccaacgacaagaccggcuccugcggccccgucuccuccaacggcgccaacggcgucaagggcuucuccuucaaguacggcaacggcgucuggaucggccgcaccaaguccaucuccucccgcaagggcuucgagaugaucugggaccccaacggcuggaccggcaccgacaacaaguucuccaucaagcaggacaucgucggcaucaacgagugguccggcuacuccggcuccuucguccagcaccccgagcucaccggccucgacugcauccgccccugcuucugggucgagcucauccgcggccgccccgaggagaacaccaucuggaccuccggcuccuccaucuccuucugcggcgucaacuccgacaccgucggcugguccuggcccgacggcgccgagcuccccuucaccaucgacaaguga

SEQ ID NO: 121803 - RNA, 1410 nt, Artificial Sequence; identical to SEQ ID NO: 121779
  derived and/or modified CDS sequence (opt2) from neuraminidase__InfluenzaA__AIM56405

SEQ ID NO: 121804 - RNA, 1410 nt, Artificial Sequence
  derived and/or modified CDS sequence (opt2) from neuraminidase__InfluenzaA__AIM56416
augaaccccaaccagaagaucaucaccaucggcuccgucugcaugaccaucggcauggccaaccucauccuccagaucggcaacaucaucuccaucugggucucccacuccauccagcucggcaaccagucccacaucgagaccugcaaccaguccgucaucaccuacgagaacaacaccugggucaaccagaccuacgucaacaucuccaacaucaacuucgccgccggccaguccgucguccccgucaagcucgccggcaacuccucccucugccccgucuccggcugggccaucuacuccaaggacaacuccguccgcaucggcuccaagggcgacgucuucgucauccgcgagcccuucaucuccugcuccccccucgagugccgcaccuucuuccucacccagggcgcccuccucaacgacaagcacuccaacggcaccaucaaggaccgcucccccuaccgcacccucauguccugccccaucggcgagguccccucccccuacaacucccgcuucgaguccgucgccugguccgccuccgccugccacgacggcaucaacuggcucaccaucggcaucuccggccccgacaacggcgccgucgccguccucaaguacaacggcaucaucaccgacaccaucaaguccuggcgcaacaacauccuccgcacccaggaguccgagugcgccugcgucaacggcuccugcuucaccaucaugaccgacggccccuccgacggccaggccuccuacaagaucuuccgcaucgagaagggcaagaucgucaaguccgucgagaugaacgcccccaacuaccacuacgaggagugcuccugcuaccccgacuccuccgagaucaccugcgucugccgcgacaacuggcacggcuccaaccgccccugggucuccuucaaccagaaccucgaguaccagaucggcuacaucugcuccggcgucuucggcgacaacccccgccccaacgacaagaccggcuccugcggccccgucaccuccaacggcgccaacggcgucaagggcuucuccuucaaguacggcaacggcgucuggaucggccgcaccaaguccaucuccucccgcaagggcuucgagaugaucugggaccccaacggcuggaccggcaccgacaacaacuucuccaucaagcaggacaucgucggcaucaaggagugguccggcuacuccggcuccuucguccagcaccccgagcucaccggccucgacugcauccgccccugcuucugggucgagcucauccgcggccgccccgaggagaacaccaucuggaccuccggcuccuccaucuccuucugcggcgucaacuccgacaccgucggcugguccuggcccgacggcgccgagcuccccuucaccaucgacaaguga

SEQ ID NO: 121805 - RNA, 1410 nt, Artificial Sequence; identical to SEQ ID NO: 121779
  derived and/or modified CDS sequence (opt2) from neuraminidase__InfluenzaA__AIM56428

SEQ ID NO: 121806 - RNA, 1410 nt, Artificial Sequence; identical to SEQ ID NO: 121761
  derived and/or modified CDS sequence (opt2) from neuraminidase__InfluenzaA__AIM56439

SEQ ID NO: 121807 - RNA, 1410 nt, Artificial Sequence
  derived and/or modified CDS sequence (opt2) from neuraminidase__InfluenzaA__AIM56450
augaaccccaaccagaagaucaucaccaucggcuccgucugcaugaccaucggcauggccaaccucauccuccagaucggcaacaucaucuccaucuggaucucccacuccauccaggucggcaaccagucccagaucgagaccugcaaccaguccgucaucaccuacgagaacaacaccugggucaaccagaccuacgucaacaucuccaacaccaacuucgccgccggccagcccgucgucuccgucaagcucgccggcaacuccucccucugccccgucuccggcugggccaucuacuccaaggacaacuccguccgcgucggcuccaagggcgacgucuucgucauccgcgagcccuucaucuccugcuccccccucgagugccgcaccuucuuccucacccagggcgcccuccucaacgacaagcacuccaacggcaccaucaaggaccgcucccccuaccgcacccucauguccugccccaucggcgagguccccucccccuacaacucccgcuucgaguccgucgccugguccgccuccgccugccacgacggcaucaacuggcucaccaucggcaucuccggccccgacuccggcgccgucgccguccucaaguacaacggcaucaucaccgacaccaucaaguccuggcgcaacgacauccuccgcacccaggaguccgagugcgccugcgucaacggcuccugcuucaccaucaugaccgacggccccuccgacggccaggccuccuacaagaucuuccgcaucgagaagggcaagaucgucaaguccgucgagaugaacgcccccaacuaccacuacgaggagugcuccugcuaccccgacuccuccgagaucaccugcgucugccgcgacaacuggcacggcuccaaccgccccugggucuccuucaaccagaaccucgaguacaagaucggcuacaucugcuccggcaucuucggcgacaacccccgccccaacgacaagaccggcuccugcggccccgucuccuccaacggcgccaacggcgucaagggcuucuccuucaaguacggcaacggcgucuggaucggccgcaccaaguccaucuccucccgcaagggcuucgagaugaucugggaccccaacggcuggaccggcaccgacaacaacuucuccgucaagcaggacaucgucggcaucaacgagugguccggcuacuccggcuccuucguccagcaccccgagcucaccggccucgacugcauccgccccugcuucugggucgagcucauccgcggccgccccaaggagaacaccaucuggaccuccggcuccuccaucuccuucugcggcgucaacuccgacaccgucggcugguccuggcccgacggcgccgagcuccccuucaccaucgacaaguga

SEQ ID NO: 121808 - RNA, 1410 nt, Artificial Sequence
  derived and/or modified CDS sequence (opt2) from neuraminidase__InfluenzaA__AIM56461
augaaccccaaccagaagaucaucaccaucggcuccgucugcaugaccaucggcauggccaaccucauccuccagaucggcaacaucaucuccaucugggucucccacuccauccagaucggcaaccagucccagaucgagaccugcaaccaguccgucaucaccuacgagaacaacaccugggucaaccagaccuacgucaacaucuccaacaccaacuucgccgccggccaguccgucgucuccgucaagcucgccggcaacuccucccucugccccgucuccggcugggccaucuacuccaaggacaacuccguccgcaucggcuccaagggcgacgucuucgucauccgcgagcccuucaucuccugcuccccccucgagugccgcaccuucuuccucacccagggcgcccuccucaacgacaagcacuccaacggcaccaucaaggaccgcucccccuaccgcacccucauguccugccccaucggcgagguccccucccccuacaacucccgcuucgaguccgucgccugguccgccuccgccugccacgacggcaucaacuggcucaccaucggcaucuccggccccgacuccggcgccgucgccguccucaaguacaacggcaucaucaccgacaccaucaaguccuggaagaacaacauccuccgcacccaggaguccgagugcgccugcgucaacggcuccugcuucaccaucaugaccgacggccccuccgacggccaggccuccuacaagaucuuccgcaucgagaagggcaagaucgucaaguccgucgagaugaacgcccccaacuaccacuacgaggagugcuccugcuaccccgacuccuccgagaucaccugcgucugccgcgacaacuggcacggcuccaaccgccccugggucuccuucaaccagaaccucgaguaccagaucggcuacaucugcuccggcgucuucggcgacaacccccgccccaacgacaagaccggcuccugcggccccgucuccuccaacggcgccaacggcgucaagggcuucuccuucaaguacggcaacggcgucuggaucggccgcaccaaguccaucuccucccgcaagggcuucgagaugaucugggaccccaacggcuggaccggcaccgacaacaaguucuccaucaagcaggacaucgucggcgucaacgagugguccggcuacuccggcuccuucguccagcaccccgagcucaccggccucgacugcauccgccccugcuucugggucgagcucauccgcggccgccccgaggagaacaccaucuggaccuccggcuccuccaucuccuucugcggcgucaacuccgacaccgucggcugguccuggcccgacggcgccgagcuccccuucaccaucgacaaguga

SEQ ID NO: 121809 - RNA, 1410 nt, Artificial Sequence
  derived and/or modified CDS sequence (opt2) from neuraminidase__InfluenzaA__AIM56472
augaaccccaaccagaagaucaucaccaucggcuccgucugcaugaccaucggcauggccaaccucauccuccagaucggcaacaucaucuccaucugggucucccacuccauccagaucggcaaccagucccagaucgagaccugcaaccaguccgucaucaccuacgagaacaacaccugggucaaccagaccuacgucaacaucuccaacaccaacuucgccgccggccaguccgucgucuccgucaagcucgccggcaacuccucccucugccccgucuccggcugggccaucuacuccaaggacaacuccguccgcaucggcuccaagggcgacgucuucgucauccgcgagcccuucaucuccugcuccccccucgagugccgcaccuucuuccucacccagggcgcccuccucaacgacaagcacuccaacggcaccaucaaggaccgcucccccuaccgcacccucauguccugccccaucggcgagguccccucccccuacaacucccgcuucgaguccgucgccugguccgccuccgccugcaacgacggcaucaacuggcucaccaucggcaucuccggccccgacuccggcgccgucgccguccucaaguacaacggcaucaucaccgacaccaucaaguccuggcgcaacaacauccuccgcacccaggaguccgagugcgccugcgucaacggcuccugcuucaccaucaugaccgacggccccuccgacggccaggccuccuacaagaucuuccgcaucgagaagggcaagaucgucaaguccgucgagaugaacgcccccaacuaccacuacgaggagugcuccugcuaccccgacuccuccgagaucaccugcgucugccgcgacaacuggcacggcuccaaccgccccugggucuccuucaaccagaaccucgaguaccagaucggcuacaucugcuccggcgucuucggcgacaacccccgccccaacgacaagaccggcuccugcggccccgucuccuccaacggcgccaacggcgucaagggcuucuccuucaaguacggcaacggcgucuggaucggccgcaccaaguccaucuccucccgcaagggcuucgagaugaucugggaccccaacggcuggaccggcaccgacaacaaguucuccaucaagcaggacaucgucggcaucaacgagugguccggcuacuccggcuccuucguccagcaccccgagcucaccggccucgacugcauccgccccugcuucugggucgagcucauccgcggccgccccgaggagaacaccaucuggaccuccggcuccuccaucuccuucugcggcgucaacuccgacaccgucggcugguccuggcccgacggcgccgagcuccccuucaccaucgacaaguga

SEQ ID NO: 121810 - RNA, 1410 nt, Artificial Sequence; identical to SEQ ID NO: 121767
  derived and/or modified CDS sequence (opt2) from neuraminidase__InfluenzaA__AIM56483

SEQ ID NO: 121811 - RNA, 1410 nt, Artificial Sequence; identical to SEQ ID NO: 121790
  derived and/or modified CDS sequence (opt2) from neuraminidase__InfluenzaA__AIM56494

SEQ ID NO: 121812 - RNA, 1410 nt, Artificial Sequence; identical to SEQ ID NO: 121780
  derived and/or modified CDS sequence (opt2) from neuraminidase__InfluenzaA__AIM56505

SEQ ID NO: 121813 - RNA, 1410 nt, Artificial Sequence; identical to SEQ ID NO: 121779
  derived and/or modified CDS sequence (opt2) from neuraminidase__InfluenzaA__AIM56516

SEQ ID NO: 121814 - RNA, 1410 nt, Artificial Sequence
  derived and/or modified CDS sequence (opt2) from neuraminidase__InfluenzaA__AIM56527
augaaccccaaccagaagaucaucaccaucggcuccgucugcaugaccaucggcauggccaaccucauccuccagaucggcaacaucaucuccaucugggucucccacuccauccagcucggcaaccagucccagaucgagaccugcaaccaguccgucaucaccuacgagaacaacaccugggucaaccagaccuacgucaacaucuccaacaccaacuucgccgccgagcaguccgucgucuccgucaagcucgccggcaacuccucccucugccccgucuccggcugggccaucuacuccaaggacaacuccguccgcaucggcuccaagggcgacgucuucgucauccgcgagcccuucaucuccugcuccccccucgagugccgcaccuucuuccucacccagggcgcccuccucaacgacaagcacuccaacggcaccaucaaggaccgcucccccuaccgcacccucauguccugccccaucggcgagguccccucccccuacaacucccgcuucgaguccgucgccugguccgccuccgccugccacgacggcaucaacuggcucaccaucggcaucuccggccccgacuccggcgccgucgccguccucaaguacaacggcaucaucaccgacaccaucaaguccuggcgcaacaacauccuccgcacccaggaguccgagugcgccugcgucaacggcuccugcuucaccaucaugaccgacggccccuccgacggccaggccuccuacaagaucuuccgcaucgagaagggcaagaucgucaaguccgucgagaugaacgcccccaacuaccacuacgaggagugcuccugcuaccccgacuccuccgagaucaccugcgucugccgcgacaacuggcacggcuccaaccgccccugggucuccuucaaccagaaccucgaguaccagaucggcuacaucugcuccggcguccucggcgacaacccccgccccaacgacaagaccggcuccugcggccccgucuccuccaacggcgccaacggcgucaagggcuucuccuucaaguacggcaacggcgucuggaucggccgcaccaaguccaucuccucccgcaagggcuucgagauggucugggaccccaacggcuggaccggcaccgacaacaacuucuccaucaagcaggacaucgucggcaucaaggagugguccggcuacuccggcuccuucguccagcaccccgagcucaccggccucgacugcauccgccccugcuucugggucgagcucauccgcggccgccccgaggagaacaccaucuggaccuccggcuccuccaucuccuucugcggcgucaacuccgacaccgucggcugguccuggcccgacggcgccgagcuccccuucaccaucgacaaguga

SEQ ID NO: 121815 - RNA, 1410 nt, Artificial Sequence; identical to SEQ ID NO: 121761
  derived and/or modified CDS sequence (opt2) from neuraminidase__InfluenzaA__AIM56538

SEQ ID NO: 121816 - RNA, 1410 nt, Artificial Sequence
  derived and/or modified CDS sequence (opt2) from neuraminidase__InfluenzaA__AIM56549
augaaccccaaccagaagaucaucaccaucggcuccgucugcaugaccaucggcauggccaaccucauccuccagaucggcaacaucaucuccaucugggucucccacuccauccagaucggcaaccagucccagaucgagaccugcaaccaguccgucaucaccuacgagaacaacaccugggucaaccagaccuacgucaacaucuccaacaccaacuucgccgccggccaguccgucgucuccgucaagcucgccggcaacuccucccucugccccgucuccggcugggccaucuacuccaaggacaacuccguccgcaucggcuccaagggcgacgucuucgucauccgcgagcccuucaucuccugcuccccccucgagugccgcaccuucuuccucacccagggcgcccuccucaacgacaagcacuccaacggcaccaucaaggaccgcucccccuaccgcacccucauguccugccccaucggcgagguccccucccccuacaacucccgcuucgaguccgucgccugguccgccuccgccugccacgacggcaucaacuggcucaccaucggcaucuccggccccgacuccggcgccgucgccguccucaaguacaacggcaucaucaccgacaccaucaaguccuggcgcaacaacauccuccgcacccaggaguccgagugcgccugcgucaacggcuccugcuucaccaucaugaccgacggccccuccgacggccaggccuccuacaagaucuuccgcaucgagaagggcaagaucgucaaguccgucgagaugaacgcccccaacuaccacuacgaggagugcuccugcuaccccgacuccuccgaggucaccugcgucugccgcgacaacuggcacggcuccaaccgccccugggucuccuucaaccagaaccucgaguaccagaucggcuacaucugcuccggcgucuucggcgacaacccccgccccaacgacaagaccggcuccugcggccccgucuccuccaacggcgccaacggcgucaagggcuucuccuucaaguacggcaacggcgucuggaucggccgcaccaaguccaucuccucccgcaagggcuucgagaugaucugggaccccaacggcuggaccggcaccgacaacaaguucuccaucaagcaggacaucgucggcaucaacgagugguccggcuacuccggcuccuucguccagcaccccgagcucaccggccucgacugcauccgccccugcuucugggucgagcucauccgcggccgccccgaggagaacaccaucuggaccuccggcuccuccaucuccuucugcggcgucaacuccgacaccgucggcugguccuggcccgacggcgccgagcuccccuucaccaucgacaaguga

SEQ ID NO: 121817 - RNA, 1410 nt, Artificial Sequence
  derived and/or modified CDS sequence (opt2) from neuraminidase__InfluenzaA__AIM56560
augaaccccaaccagaagaucaucaccaucggcuccgucugcaugaccaucggcauggccaaccucauccuccagaucggcaacaucaucuccaucugggucucccacuccauccagcucggcaaccagucccacaucgagaccugcaaccaguccgucaucaccuacgagaacaacaccugggucaaccagaccuacgucaacaucuccaacaccaacuucgccgccggccaguccgucguccccgucaagcucgccggcaacuccucccucugccccgucuccggcugggccauccacuccaaggacaacuccguccgcaucggcuccaagggcgacgucuucgucauccgcgagcccuucaucuccugcuccccccucgagugccgcaccuucuuccucacccagggcgcccuccucaacgacaagcacuccaacggcaccaucaaggaccgcucccccuaccgcacccucauguccugccccaucggcgagguccccucccccuacaacucccgcuucgaguccgucgccugguccgccuccgccugccacgacggcaucaacuggcucaccaucggcaucuccggccccgacaacggcgccgucgccguccucaaguacaacggcaucaucaccgacaccaucaaguccuggcgcaacaacauccuccgcacccaggaguccgagugcgccugcgucaacggcuccugcuucaccaucaugaccgacggccccuccgacggccaggccuccuacaagaucuuccgcaucgagaagggcaagaucgucaaguccgucgagaugaacgcccccaacuaccacuacgaggagugcuccugcuaccccgacuccuccgagaucaccugcgucugccgcgacaacuggcacggcuccaaccgccccugggucuccuucaaccagaaccucgaguaccagaucggcuacaucugcuccggcgucuucggcgacaacccccgccccaacgacaagaccggcuccugcggccccgucaccuccaacggcgccaacggcgucaagggcuucuccuucaaguacggcaacggcgucuggaucggccgcaccaaguccaucuccucccgcaagggcuucgagaugaucugggaccccaacggcuggaccggcaccgacaacaacuucuccaucaagcaggacaucgucggcaucaaggagugguccggcuacuccggcuccuucguccagcaccccgagcucaccggccucgacugcauccgccccugcuucugggucgagcucauccgcggccgccccgaggagaacaccaucuggaccuccggcuccuccaucuccuucugcggcgucaacuccgacaccgucggcugguccuggcccgacggcgccgagcuccccuucaccaucgacaaguga

SEQ ID NO: 121818 - RNA, 1410 nt, Artificial Sequence; identical to SEQ ID NO: 121767
  derived and/or modified CDS sequence (opt2) from neuraminidase__InfluenzaA__AIM56571

SEQ ID NO: 121819 - RNA, 1410 nt, Artificial Sequence
  derived and/or modified CDS sequence (opt2) from neuraminidase__InfluenzaA__AIM56582
augaaccccaaccagaagaucaucaccaucggcuccgucugcaucaccaucggcauggccaaccucauccuccagaucggcaacaucaucuccaucugggucucccacuccauccagcucggcaaccagucccagaucgagaccugcaaccaguccgucaucaccuacgagaacaacaccugggucaaccagaccuacgucaacaucuccaacaccaacuucgccgccggccaguccgucgucuccgucaagcucgccggcaacuccucccucugccccgucuccggcugggccaucuacuccaaggacaacuccguccgcaucggcuccaagggcgacgucuucgucauccgcgagcccuucaucuccugcuccccccucgagugccgcaccuucuuccucacccagggcgcccuccucaacgacaagcacuccaacggcaccaucaaggaccgcucccccuaccgcacccucauguccugccccaucggcgagguccccucccccuacaacucccgcuucgaguccgucgccugguccgccuccgccugccacgacggcaucaacuggcucaccaucggcaucuccggccccgacuccggcgccgucgccguccucaaguacaacggcaucaucaccgacaccaucaaguccuggcgcaacaacauccuccgcacccaggaguccgagugcgccugcgucaacggcuccugcuucaccaucaugaccgacggccccuccgacggccaggccuccuacaagaucuuccgcaucgagaagggcaagaucgucaaguccgucgagaugaacgcccccaacuaccacuacgaggagugcuccugcuaccccgacuccuccgagaucaccugcgucugccgcgacaacuggcacggcuccaaccgccccugggucuccuucaaccagaaccucgaguaccagaucggcuacaucugcuccggcgucuucggcgacaacccccgccccaacgacaagaccggcuccugcggccccgucuccuccaacggcgccaacggcgucaagggcuucuccuucaaguacggcaacggcgucuggaucggccgcaccaaguccaucuccucccgcaagggcuucgagaugaucugggaccccaacggcuggaccggcaccgacaacaacuucuccaucaagcaggacaucgucggcaucaaggagugguccggcuacuccggcuccuucguccagcaccccgagcucaccggccucgacugcauccgccccugcuucugggucgagcucauccgcggccgccccgaggagaacaccaucuggaccuccggcuccuccaucuccuucugcggcgucaacuccgacaccgucggcugguccuggcccgacggcgccgagcuccccuucaccaucgacaaguga

SEQ ID NO: 121820 - RNA, 1410 nt, Artificial Sequence
  derived and/or modified CDS sequence (opt2) from neuraminidase__InfluenzaA__AIM56593
augaaccccaaccagaagaucaucaccaucggcuccgucugcaugaccaucggcauggccaaccucauccuccagaucggcaacaucaucuccaucugggucucccacuccauccagcucggcaaccagucccagaucgagaccugcaaccaguccgucaucaccuacgagaacaacaccugggucaaccagaccuacgucaacaucuccaacaccaacuucgccgccgagcaguccgucgucuccgucaagcucgccggcaacuccucccucugccccgucuccggcugggccaucuacuccaaggacaacuccguccgcaucggcuccaagggcgacgucuucgucauccgcgagcccuucaucuccugcuccccccucgagugccgcaccuucuuccucacccagggcgcccuccucaacgacaagcacuccaacggcaccaucaaggaccgcucccccuaccgcacccucauguccugccccaucggcgagguccccucccccuacaacucccgcuucgaguccgucgccugguccgccuccgccugccacgacggcaucaacuggcucaccaucggcaucuccggccccgacuccggcgccgucgccguccucaaguacaacggcaucaucaccgacaccaucaaguccuggcgcaacaacauccuccgcacccaggaguccgagugcgccugcgucaacggcuccugcuucaccaucaugaccgacggccccuccgacggccaggccuccuacaagaucuuccgcaucgagaagggcaagaucgucaaguccgucgagaugaacgcccccaacuaccacuacgaggagugcuccugcuaccccgacuccuccgagaucaccugcgucugccgcgacaacuggcacggcuccaaccgccccugggucuccuucaaccagaaccucgaguaccagaucggcuacaucugcuccggcguccucggcgacaacccccgccccaacgacaagaccggcuccugcggccccgucuccuccaacggcgccaacggcgucaagggcuucuccuucaaguacggcaacggcgucuggaucggccgcaccaaguccaucuccucccgcaagggcuucgagaugaucugggaccccaacggcuggaccgagaccgacaacaacuucuccaucaagcaggacaucgucggcaucaaggagugguccggcuacuccggcuccuucguccagcaccccgagcucaccggccucgacugcauccgccccugcuucugggucgagcucauccgcggccgccccgaggagaacaccaucuggaccuccggcuccuccaucuccuucugcggcgucaacuccgacaccgucggcugguccuggcccgacggcgccgagcuccccuucaccaucgacaaguga

SEQ ID NO: 121821 - RNA, 1410 nt, Artificial Sequence
  derived and/or modified CDS sequence (opt2) from neuraminidase__InfluenzaA__AIM56604
augaaccccaaccagaagaucaucaccaucggcuccgucugcaugaccaucggcauggccaaccucauccuccagaucggcaacaucaucuccaucugggucucccacuccauccagaucggcaaccagucccagaucgagaccugcaaccaguccgucaucaccuacgagaacaacaccugggucaaccagaccuacgucaacaucuccaacaucaacuucgccgccggccaguccgucgucuccgucaagcucgccggcaacuccucccucugccccgucuccggcugggccaucuacuccaaggacaacuccguccgcaucggcuccaagggcgacgucuucgucauccgcgagcccuucaucuccugcuccccccucgagugccgcaccuucuuccucacccagggcgcccuccucaacgacaagcacuccaacggcaccaucaaggaccgcucccccuaccgcacccucauguccugccccaucggcgagguccccucccccuacaacucccgcuucgaguccgucgccugguccgccuccgccugccacgacggcaucaacuggcucaccaucggcaucuccggccccgacuccggcgccgucgccguccucaaguacaacggcaucaucaccgacaccaucaaguccuggcgcaacaacauccuccgcacccaggaguccgagugcgccugcgucaacggcuccugcuucaccaucaugaccgacggccccuccgacggccaggccuccuacaagaucuuccgcaucgagaagggcaagaucgucaaguccgucgagaugaacgcccccaacuaccacuacgaggagugcuccugcuaccccgacuccuccgagaucaccugcgucugccgcgacaacuggcacggcuccaaccgccccugggucuccuucaaccagaaccucgaguaccagaucggcuacaucugcuccggcgucuucggcgacaacccccgccccaacgacaagaccggcuccugcggccccgucuccuccaacggcgccaacggcgucaagggcuucuccuucaaguacggcaacggcgucuggaucggccgcaccaaguccaucuccucccgcaagggcuucgagaugaucugggaccccaacggcuggaccggcaccgacaacaaguucuccaucaagcaggacaucgucggcaucaacgagugguccggcuacuccggcuccuucguccagcaccccgagcucaccggccucgacugcauccgccccugcuucugggucgagcucauccgcggccgccccgaggagaacaccaucuggaccuccggcuccuccaucuccuucugcggcgucaacuccgacaccgucggcugguccuggcccgacggcgccgagcuccccuucaccaucgacaaguga

SEQ ID NO: 121822 - RNA, 1410 nt, Artificial Sequence
  derived and/or modified CDS sequence (opt2) from neuraminidase__InfluenzaA__AIM56615
augaaccccaaccagaagaucaucaccaucggcuccgucugcaugaccaucggcauggccaaccucauccuccagaucggcaacaucaucuccaucugggucucccacuccauccagaucggcaaccagucccagaucgagaccugcaaccaguccgucaucaccuacgagaacaacaccugggucaaccagaccuacgucgacaucuccaacaccaacuucgccgccggccaguccgucgucuccgucaagcucgccggcaacuccucccucugccccgucuccggcugggccaucuacuccaaggacaacuccguccgcaucggcuccaagggcgacgucuucgucauccgcgagcccuucaucuccugcuccccccucgagugccgcaccuucuuccucacccagggcgcccuccucaacgacaagcacuccaacggcaccaucaaggaccgcucccccuaccgcacccucauguccugccccaucggcgagguccccucccccuacaacucccgcuucgaguccgucgccugguccgccuccgccugccacgacggcaucaacuggcucaccaucggcaucuccggccccgacuccggcgccgucgccguccucaaguacaacggcaucaucaccgacaccaucaaguccuggcgcaacaacauccuccgcacccaggaguccgagugcgccugcgucaacggcuccugcuucaccaucaugaccgacggccccuccgacggccaggccuccuacaagaucuuccgcaucgagaagggcaagaucgucaaguccgucgagaugaacgcccccaacuaccacuacgaggagugcuccugcuaccccgacuccuccgagaucaccugcgucugccgcgacaacuggcacggcuccaaccgccccugggucuccuucaaccagaaccucgaguaccagaucggcuacaucugcuccggcgucuucggcgacaacccccgccccaacgacaagaccggcuccugcggccccgucuccuccaacggcgccaacggcgucaagggcuucuccuucaaguacuccaacggcgucuggaucggccgcaccaaguccaucuccucccgcaagggcuucgagaugaucugggaccccaacggcuggaccggcaccgacaacaaguucuccaucaagcaggacaucgucggcaucaacgagugguccggcuacuccggcuccuucguccagcaccccgagcucaccggccucgacugcauccgccccugcuucugggucgagcucauccgcggccgccccgaggagaacaccaucuggaccuccggcuccuccaucuccuucugcggcgucaacuccgacaccgucggcugguccuggcccgacggcgccgagcuccccuucaccaucgacaaguga

SEQ ID NO: 121823 - RNA, 1410 nt, Artificial Sequence; identical to SEQ ID NO: 121816
  derived and/or modified CDS sequence (opt2) from neuraminidase__InfluenzaA__AIM56626

SEQ ID NO: 121824 - RNA, 1410 nt, Artificial Sequence; identical to SEQ ID NO: 121761
  derived and/or modified CDS sequence (opt2) from neuraminidase__InfluenzaA__AIM56637

SEQ ID NO: 121825 - RNA, 1410 nt, Artificial Sequence; identical to SEQ ID NO: 121767
  derived and/or modified CDS sequence (opt2) from neuraminidase__InfluenzaA__AIM56648

SEQ ID NO: 121826 - RNA, 1410 nt, Artificial Sequence
  derived and/or modified CDS sequence (opt2) from neuraminidase__InfluenzaA__AIM56659
augaaccccaaccagaagaucaucaccaucggcuccgucugcaugaccaucggcauggccaaccucauccuccagaucggcaacaucaucuccaucugggucucccacuccauccagcucggcaaccagucccacaucgagaccugcaaccaguccgucaucaccuacgagaacaacaccugggucaaccagaccuacgucaacaucuccaacaccaacuucgccgccggccaguccgucguccccgucaagcucgccggcaacuccucccucugccccgucuccggcugggccaucuacuccaaggacaacuccguccgcaucggcuccaagggcgacgucuucgucauccgcgagcccuucaucuccugcuccccccucgagugccgcaccuucuuccucacccagggcgcccuccucaacgacaagcacuccaacggcaccaucaaggaccgcucccccuaccgcacccucauguccugccccaucggcgagguccccucccccuacaacucccgcuucgaguccgucgccugguccgccuccgccugccacgacggcaucaacuggcucaccaucggcaucuccggccccgacuccggcgccgucgccguccucaaguacaacggcaucaucaccgacaccaucaaguccuggcgcaacaacauccuccgcacccaggaguccgagugcgccugcgucaacggcuccugcuucaccaucaugaccgacggccccuccgacggccaggccuccuacaagaucuuccgcaucgagaagggcaagaucgucaaguccgucgagaugaacgcccccaacuaccacuacgaggagugcuccugcuaccccgacuccuccgagaucaccugcgucugccgcgacaacuggcacggcuccaaccgccccugggucuccuucaaccagaaccucgaguaccagaucggcuacaucugcuccggcgucuucggcgacaacccccgccccaacgacaagaucggcuccugcggccccgucuccuccaacggcgccaacggcgucaagggcuucuccuucaaguacggcaacggcgucuggaucggccgcaccaaguccaucuccucccgcaagggcuucgagaugaucugggaccccaacggcuggaccggcaccgacaacaacuucuccaucaagcaggacaucgucggcaucaaggagugguccggcuacuccggcuccuucguccagcaccccgagcucaccggccucgacugcauccgccccugcuucugggucgagcucauccgcggccgccccgaggagaagaccaucuggaccuccggcuccuccaucuccuucugcggcgucaacuccgacaccgucggcugguccuggcccgacggcgccgagcuccccuucaccaucgacaaguga

SEQ ID NO: 121827 - RNA, 1410 nt, Artificial Sequence
  derived and/or modified CDS sequence (opt2) from neuraminidase__InfluenzaA__AIM56670
augaaccccaaccagaagaucaucaccaucggcuccgucugcaugaccaucggcauggccaaccucauccuccagaucggcaacaccaucuccaucugggucucccacuccauccagaucggcaaccagucccagaucgagaccugcaaccaguccgucaucaccuacgagaacaacaccugggucaaccagaccuacgucaacaucuccaacaccaacuucgccgccggccaguccgucgucuccgucaagcucgccggcaacuccucccucugccccgucuccggcugggccaucuacuccaaggacaacuccguccgcaucggcuccaagggcgacgucuucgucauccgcgagcccuucaucuccugcuccccccucgagugccgcaccuucuuccucacccagggcgcccuccucaacgacaagcacuccaacggcaccaucaaggaccgcucccccuaccgcacccucauguccugccccaucggcgagguccccucccccuacaacucccgcuucgaguccgucgccugguccgccuccgccugccacgacggcaucaacuggcucaccaucggcaucuccggccccgacuccggcgccgucgccguccucaaguacaacggcaucaucaccgacaccaucaaguccuggcgcaacaacauccuccgcacccaggaguccgagugcgccugcgucaacggcuccugcuucaccaucaugaccgacggccccuccgacggccaggccuccuacaagaucuuccgcaucgagaagggcaagaucgucaaguccgucgagaugaacgcccccaacuaccacuacgaggagugcuccugcuaccccgacuccuccgagaucaccugcgucugccgcgacaacuggcacggcuccaaccgccccugggucuccuucaaccagaaccucgaguaccagaucggcuacaucugcuccggcgucuucggcgacaacccccgccccaacgacaagaccggcuccugcggccccgucuccuccaacggcgccaacggcgucaagggcuucuccuucaaguacggcaacggcgucuggaucggccgcaccaaguccaucuccucccgcaagggcuucgagaugaucugggaccccaacggcuggaccggcaccgacaacaaguucuccaucaagcaggacaucgucggcaucaacgagugguccggcuacuccggcuccuucguccagcaccccgagcucaccggccucgacugcauccgccccugcuucugggucgagcucauccgcggccgccccgaggagaacaccaucuggaccuccggcuccuccaucuccuucugcggcgucaacuccgacaccgucggcugguccuggcccgacggcgccgagcuccccuucaccaucgacaaguga

SEQ ID NO: 121828 - RNA, 1410 nt, Artificial Sequence; identical to SEQ ID NO: 121779
  derived and/or modified CDS sequence (opt2) from neuraminidase__InfluenzaA__AIM56703

SEQ ID NO: 121829 - RNA, 1410 nt, Artificial Sequence
  derived and/or modified CDS sequence (opt2) from neuraminidase__InfluenzaA__AIM56714
augaaccccaaccagaagaucaucaccaucggcuccgucugcaugaccaucggcauggccaaccucauccuccagaucggcaacaucaucuccaucugggucucccacuccauccagaucggcaaccagucccagaucgagaccugcaaccaguccgucaucaccuacgagaacaacaccugggucaaccagaccuacgucaacaucuccaacaccaacuucgccgccggccaguccgucgucuccgucaagcucgccggcaacuccucccucugccccgucuccggcugggccaucuacuccaaggacaacuccguccgcaucggcuccaagggcgacgucuucgucauccgcgagcccuucaucuccugcuccccccucgagugccgcaccuucuuccucacccagggcgcccuccucaacgacaagcacuccaacggcaccaucaaggaccgcucccccuaccgcacccucauguccugccccaucggcgagguccccucccccuacaacucccgcuucgaguccgucgccugguccgccuccgccugccacgacggcaucaacuggcucaccaucggcaucuccggccccgacuccggcgccgucgccguccucaaguacaacggcaucaucaccgacaccaucaaguccuggcgcaacaacauccuccgcacccaggaguccgagugcgccugcgucaacggcuccugcuucaccaucaugaccgacggccccuccgacggccaggccuccuacaagaucuuccgcaucgagaagggcaagaucgucaaguccgucgagaugaacgcccccaacuaccacuacgaggagugcuccugcuaccccgacuccuccgagaucaccugcgucugccgcgacaacuggcacggcuccaaccgccccugggucuccuucaaccagaaccucgaguaccagaucggcuacaucugcuccggcgucuucggcgacaacccccgccccaacgacaagaccggcuccugcggccccguccccuccaacggcgccaacggcgucaagggcuucuccuucaaguacggcaacggcgucuggaucggccgcaccaaguccaucuccucccgcaagggcuucgagaugaucugggaccccaacggcuggaccggcaccgacaacaaguucuccaucaagcaggacaucgucggcaucaacgagugguccggcuacuccggcuccuucguccagcaccccgagcucaccggccucgacugcauccgccccugcuucugggucgagcucauccgcggccgccccgaggagaacaccaucuggaccuccggcuccuccaucuccuucugcggcgucaacuccgacaccgucggcugguccuggcccgacggcgccgagcuccccuucaccaucgacaaguga

SEQ ID NO: 121830 - RNA, 1410 nt, Artificial Sequence
  derived and/or modified CDS sequence (opt2) from neuraminidase__InfluenzaA__AIM56725
augaaccccaaccagaagaucaucaccaucggcuccgucugcaugaccaucggcauggccaaccucauccuccagaucggcaacaucaucuccaucugggucucccacuccauccagaucggcaaccagucccagaucgagaccugcaaccaguccgucaucaccuacgagaacaacaccugggucaaccagaccuacgucaacaucuccaacaccaacuucgccgccggccaguccgucgucuccgucaagcucgccggcaacuccucccucugccccgucuccggcugggccaucuacuccaaggacaacuccguccgcaucggcuccaagggcgacgucuucgucauccgcgagcccuucaucuccugcuccccccucgagugccgcaccuucuuccucacccagggcgcccuccucaacgacaagcacuccaacggcaccaucaaggaccgcucccccuaccgcacccucauguccugccccaucggcgagguccccucccccuacaacucccgcuucgaguccgucgccugguccgccuccgccugccacgacggcaucaacuggcucaccaucggcaucuccggccccgacuccggcgccgucgccguccucaaguacaacggcaucaucaccgacaccaucaaguccuggcgcaacaacauccuccgcacccaggaguccgagugcgccugcgucaacggcuccugcuucaccaucaugaccgacggccccuccgacggccaggccuccuacaagaucuuccgcaucgagaagggcaagaucgucaaguccgucgagaugaacgcccccaacuaccacuacgaggagugcuccugcuaccccgacuccuccgaggucaccugcgucugccgcgacaacuggcacggcuccaaccgccccugggucuccuucaaccagaaccucgaguaccagaucggcuacaucugcuccggcaucuucggcgacaacccccgccccaacgacaagaccggcuccugcggccccgucuccuccaacggcgccaacggcgucaagggcuucuccuucaaguacggcaacggcgucuggaucggccgcaccaaguccaucuccucccgcaagggcuucgagaugaucugggaccccaacggcuggaccggcaccgacaacaaguucuccaucaagcaggacaucgucggcaucaacgagugguccggcuacuccggcuccuucguccagcaccccgagcucaccggccucgacugcauccgccccugcuucugggucgagcucauccgcggccgccccgaggagaacaccaucuggaccuccggcuccuccaucuccuucugcggcgucaacuccgacaccgucggcugguccuggcccgacggcgccgagcuccccuucaccaucgacaaguga

SEQ ID NO: 121831 - RNA, 1410 nt, Artificial Sequence; identical to SEQ ID NO: 121779
  derived and/or modified CDS sequence (opt2) from neuraminidase__InfluenzaA__AIM56736

SEQ ID NO: 121832 - RNA, 1410 nt, Artificial Sequence
  derived and/or modified CDS sequence (opt2) from neuraminidase__InfluenzaA__AIM56747
augaaccccaaccagaagaucaucaccaucggcuccgucugcaugaccaucggcauggccaaccucauccuccagaucggcaacaucaucuccaucugggucucccacuccauccagaucggcaaccagucccagaucgagaccugcaaccaguccgucaucaccuacgagaacaacaccugggucaaccagaccuacgucaacaucuccaacaccaacuucgccgccggccaguccgucgucuccgucaagcucgccggcaacuccucccucugccccgucuccggcugggccaucuacuccaaggacaacuccguccgcaucggcuccaagggcgacgucuucgucauccgcgagcccuucaucuccugcuccucccucgagugccgcaccuucuuccucacccagggcgcccuccucaacgacaagcacuccaacggcaccaucaaggaccgcucccccuaccgcacccucauguccugccccaucggcgagguccccucccccuacaacucccgcuucgaguccgucgccugguccgccuccgccugccacgacggcaucaacuggcucaccaucggcaucuccggccccgacuccggcgccgucgccguccucaaguacaacggcaucaucaccgacaccaucaaguccuggcgcaacaacauccuccgcacccaggaguccgagugcgccugcgucaacggcuccugcuucaccaucaugaccgacggccccuccgacggccaggccuccuacaagaucuuccgcaucgagaagggcaagaucgucaaguccgucgagaugaacgcccccaacuaccacuacgaggagugcuccugcuaccccgacuccuccgagaucaccugcgucugccgcgacaacuggcacggcuccaaccgccccugggucuccuucaaccagaaccucgaguaccagaucggcuacaucugcuccggcgucuucggcgacaacccccgccccaacgacaagaccggcuccugcggccccgucuccuccaacggcgccaacggcgucaagggcuucuccuucaaguacggcaacggcgucuggaucggccgcaccaaguccaucuccucccgcaagggcuucgagaugaucugggaccccaacggcuggaccggcaccgacaacaaguucuccaucaagcaggacaucgucggcaucaacgagugguccggcuacuccggcuccuucguccagcaccccgagcucaccggccucgacugcauccgccccugcuucugggucgagcucauccgcggccgccccgaggagaacaccaucuggaccuccggcuccuccaucuccuucugcggcgucaacuccgacaccgucggcugguccuggcccgacggcgccgagcuccccuucaccaucgacaaguga

SEQ ID NO: 121833 - RNA, 1410 nt, Artificial Sequence; identical to SEQ ID NO: 121816
  derived and/or modified CDS sequence (opt2) from neuraminidase__InfluenzaA__AIM56758

SEQ ID NO: 121834 - RNA, 1410 nt, Artificial Sequence; identical to SEQ ID NO: 121779
  derived and/or modified CDS sequence (opt2) from neuraminidase__InfluenzaA__AIM56769

SEQ ID NO: 121835 - RNA, 1410 nt, Artificial Sequence
  derived and/or modified CDS sequence (opt2) from neuraminidase__InfluenzaA__AIM56780
augaaccccaaccagaagaucaucaccaucggcuccgucugcaugaccaucggcauggccaaccucauccuccagaucggcaacaucaucuccaucugggucucccacuccauccagcucggcaaccagucccagaucggcaccugcaaccaguccgucaucaccuacgagaacaacaccugggucaaccagaccuacgucaacaucuccaacaccaacuucgccgccggccaguccgucgucuccgucaagcucgccggcaacuccucccucugccccgucuccggcugggccaucuacuccaaggacaacuccguccgcaucggcuccaagggcgacgucuucgucauccgcgagcccuucaucuccugcuccccccucgagugccgcaccuucuuccucacccagggcgcccuccucaacgacaagcacuccaacggcaccaucaaggaccgcucccccuaccgcacccucauguccugccccaucggcgagguccccucccccuacaacucccgcuucgaguccgucgccugguccgccuccgccugccacgacggcaucaacuggcucaccaucggcaucuccggccccgacuccggcgccgucgccguccucaaguacaacggcaucaucaccgacaccaucaaguccuggcgcaacaacauccuccgcacccaggaguccgagugcgccugcgucaacggcuccugcuucaccaucaugaccgacggccccuccgacggccaggccuccuacaagaucuuccgcaucgagaagggcaagaucaucaaguccgucgagaugaacgcccccaacuaccacuacgaggagugcuccugcuaccccgacuccuccgagaucaccugcgucugccgcgacaacuggcacggcuccaaccgccccugggucuccuucaaccagaaccucgaguaccagaucggcuacaucugcuccggcgucuucggcgacaacccccgccccaacgacaagaccggcuccugcggccccgucuccuccaacggcgccaacggcgucaagggcuucuccuucaaguacggcaacggcgucuggaucggccgcaccaaguccaucuccucccgcaagggcuucgagaugaucugggaccccaacggcuggaccggcaccgacaacaaguucuccaucaagcaggacaucgucggcauccacgagugguccggcuacuccggcuccuucguccagcaccccgagcucaccggccucgacugcauccgccccugcuucugggucgagcucauccgcggccgccccgaggagaacaccaucuggaccuccggcuccuccaucuccuucugcggcgucaacuccgacaccgucggcugguccuggcccgacggcgccgagcuccccuucaccaucgacaaguga

SEQ ID NO: 121836 - RNA, 1410 nt, Artificial Sequence
  derived and/or modified CDS sequence (opt2) from neuraminidase__InfluenzaA__AIM56791
augaaccccaaccagaagaucaucaccaucggcuccgucugcaugaccaucggcauggccaaccucauccuccagaucggcaacaucaucuccaucugggucucccacuccauccagcucggcaaccagucccagaucgagaccugcaaccaguccgucaucaccuacgagaacaacaccugggucaaccagaccuacgucaacaucuccaacaccaacuucgccgccggccaguccgucgucuccgucaagcucgccggcaacuccucccucugccccgucuccggcugggccaucuacuccaaggacaacuccguccgcaucggcuccaagggcgacgucuucgucauccgcgagcccuucaucuccugcuccccccucgagugccgcaccuucuuccucacccagggcgcccuccucaacgacaagcacuccaacggcaccaucaaggaccgcucccccuaccgcacccucauguccugccccaucggcgagguccccucccccuacaacucccgcuucgaguccgucgccugguccgccuccgccugccacgacggcaucuccuggcucaccaucggcaucuccggccccgacuccggcgccgucgccguccucaaguacaacggcaucaucaccgacaccaucaaguccuggcgcaacaacauccuccgcacccaggaguccgagugcgccugcgucaacggcuccugcuucaccaucaugaccgacggccccuccgacggccaggccuccuacaagaucuuccgcaucgagaagggcaagaucgucaaguccgucgagaugaacgcccccaacuaccacuacgaggagugcuccugcuaccccgacuccuccgagaucaccugcgucugccgcgacaacuggcacggcuccaaccgccccugggucuccuucaaccagaaccucgaguaccagaucggcuacaucugcuccggcgucuucggcgacaacccccgccccaacgacaagaccggcuccugcggccccgucuccuccaacggcgccaacggcgucaagggcuucuccuucaaguacggcaacggcgucuggaucggccgcaccaaguccaucuccucccgcaagggcuucgagaugaucugggaccccaacggcuggaccggcaccgacaacaacuucuccaucaagcaggacaucgucggcaucaaggagugguccggcuacuccggcuccuucguccagcaccccgagcucaccggccucgacugcauccgccccugcuucugggucgagcucauccgcggccgccccgaggagaacaccaucuggaccuccggcuccuccaucuccuucugcggcgucaacuccgacaccgucggcugguccuggcccgacggcgccgagcuccccuucaccaucgacaaguga

SEQ ID NO: 121837 - RNA, 1410 nt, Artificial Sequence
  derived and/or modified CDS sequence (opt2) from neuraminidase__InfluenzaA__AIM56813
augaaccccaaccagaagaucaucaccaucggcuccgucugcaugaccaucggcauggccaaccucauccuccagaucggcaacaucaucuccaucugggucucccacuccauccagaucggcaaccagucccagaucgagaccugcaaccaguccgucaucaccuacgagaacaacaccugggucaaccagaccuacgucaacaucuccaacaccaacuucgccgccggccaguccgucgucuccgucaagcucgccggcaacuccucccucugccccgucuccggcugggccaucuacuccaaggacaacuccguccgcaucggcuccaagggcgacgucuucgucauccgcgagcccuucaucuccugcuccccccucgagugccgcaccuucuuccucacccagggcgcccuccucaacgacaagcacuccaacggcaccaucaaggaccgcucccccuaccgcacccucauguccugccccaucggcgagguccccucccccuacaacuccaaguucgaguccgucgccugguccgccuccgccugccacgacggcaucaacuggcucaccaucggcaucuccggccccgacaacggcgccgucgccguccucaaguacaacggcaucaucaccgacaccaucaaguccuggcgcaacaacauccuccgcacccaggaguccgagugcgccugcgucaacggcuccugcuucaccaucaugaccgacggccccuccgacggccaggccuccuacaagaucuuccgcaucgagaagggcaagaucgucaaguccgucgagaugaacgcccccaacuaccacuacgaggagugcuccugcuaccccgacuccuccgagaucaccugcgucugccgcgacaacuggcacggcuccaaccgccccugggucuccuucaaccagaaccucgaguaccagaucggcuacaucugcuccggcgucuucggcgacaacccccgccccaacgacaagaccggcuccugcggccccgucuccuccaacggcgccaacggcgucaagggcuucuccuucaaguacggcaacggcgucuggaucggccgcaccaaguccaucuccucccgcaagggcuucgagaugaucugggaccccaacggcuggaccggcaccgacaacaaguucuccaucaagcaggacaucgucggcaucaacgagugguccggcuacuccggcuccuucguccagcaccccgagcucaccggccucgacugcauccgccccugcuucugggucgagcucauccgcggccgccccgaggagaacaccaucuggaccuccggcuccuccaucuccuucugcggcgucaacuccgacaccgucggcugguccuggcccgacggcgccgagcuccccuucaccaucgacaaguga

SEQ ID NO: 121838 - RNA, 1410 nt, Artificial Sequence
  derived and/or modified CDS sequence (opt2) from neuraminidase__InfluenzaA__AIM56824
augaaccccaaccagaagaucaucaccaucggcuccgucugcaugaccaucggcauggccaaccucauccuccagaucggcaacaucaucuccaucugggucucccacuccauccagaucggcaaccagucccagaucgagaccugcaaccaguccgucaucaccuacgagaacaacaccugggucaaccagaccuacgucaacaucuccaacaccaacuucgccgccggccaguccgucgucuccgucaagcucgccggcaacuccucccucugccccgucuccggcugggccaucuacuccaaggacaacuccguccgcaucggcuccaagggcgacgucuucgucauccgcgagcccuucaucuccugcuccccccucgagugccgcaccuucuuccucacccagggcgcccuccucaacgacaagcacuccaacggcaccaucaaggaccgcucccccuaccgcacccucauguccugccccaucggcgagguccccucccccuacaacucccgcuucgaguccgucgccugguccgccuccgccugccacgacggcaucaacuggcucaccaucggcaucuccggccccgacuccggcgccgucgccguccucaaguacaacggcaucaucaccgacaccaucaaguccuggcgcaacaacauccuccgcacccaggaguccgagugcgccugcgucaacggcuccugcuucaccaucaugaccgacggccccuccgacggccaggccuccuacaagaucuuccgcaucgagaagggcaagaucgucaaguccgucgagaugaacgcccccaacuaccacuacgaggagugcuccugcuaccccgacuccuccgagaucaccugcgucugccgcgacaacuggcacggcuccaaccgccccugggucuccuucaaccagaaccucgaguaccagaucggcuacaucugcuccggcgucuucggcgacaacccccgccccaacgacaagaccggcuccugcggccccguccccuccaacggcgccaacggcgucaagggcuucuccuucaaguacuccaacggcgucuggaucggccgcaccaaguccaucuccucccgcaagggcuucgagaugaucugggaccccaacggcuggaccggcaccgacaacaaguucuccaucaagcaggacaucgucggcaucaacgagugguccggcuacuccggcuccuucguccagcaccccgagcucaccggccucgacugcauccgccccugcuucugggucgagcucauccgcggccgccccgaggagaacaccaucuggaccuccggcuccuccaucuccuucugcggcgucaacuccgacaccgucggcugguccuggcccgacggcgccgagcuccccuucaccaucgacaaguga

SEQ ID NO: 121839 - RNA, 1398 nt, Artificial Sequence
  derived and/or modified CDS sequence (opt2) from neuraminidase__InfluenzaA__AIN76385
augaaccccaaccagaagauccucugcaccuccgccaccgccaucaucaucggcgccaucgccguccucaucggcaucgccaaccucggccucaacaucggccuccaccucaagcccggcugcaacugcucccacucccagcccggcaccaccaacaccucccagaccaucaucaacaacuacuacaacgagaccaacaucaccaacauccagauggaggagcgcaccucccgcaacuucaacucccucaccaagggccucugcaccaucaacuccuggcacaucuacggcaaggacaacgccguccgcaucggcgaguccuccgacguccucgucacccgcgagcccuacgucuccugcgaccccgacgagugccgcuucuacgcccucucccagggcaccaccauccgcggcaagcacuccaacggcaccauccacgaccgcucccaguaccgcgcccucaucuccuggccccucuccuccccccccaccgucuacaacucccgcgucgagugcaucggcugguccuccaccuccugccacgacggcaagucccgcauguccaucugcaucuccggccccaacaacaacgccuccgccgucgucugguacaaccgccgccccgucgccgagaucaacaccugggcccgcaacauccuccgcacccaggaguccgagugcgucugccacaacggcaucugccccaucgucuucaccgacggcuccgccaccggccccgccgacacccgcaucuacuacuucaaggagggcaagauccucaagugggagucccucaccggcaccgccaagcacaucgaggagugcuccugcuacggcgagcgcaccggcaucaccugcaccugcaaggacaacuggcagggcuccaaccgccccgucauccagaucgaccccgucgccaugacccacaccucccaguacaucugcucccccguccucaccgacaccccccgccccaacgaccccaacaucggcaagugcaacgaccccuaccccggcaacaacaacaacggcgucaagggcuucuccuaccucgacggcgccaacaccuggcucggccgcaccaucuccaccgccucccgcuccggcuacgagaugcucaagguccccaacgcccucaccgacgaccgcuccaagcccauccagggccagaccaucguccucaacgccgacugguccggcuacuccggcuccuucauggacuacugggccgagggcgacugcuaccgcgccugcuucuacgucgagcucauccgcggccgccccaaggaggacaaggucugguggaccuccaacuccaucgucuccaugugcuccuccaccgaguuccucggccaguggaacuggcccgacggcgcccgcaucgaguacuuccucuga

SEQ ID NO: 121840 - RNA, 1410 nt, Artificial Sequence; identical to SEQ ID NO: 110123
  derived and/or modified CDS sequence (opt2) from neuraminidase__InfluenzaA__AIP93105

SEQ ID NO: 121841 - RNA, 1410 nt, Artificial Sequence
  derived and/or modified CDS sequence (opt2) from neuraminidase__InfluenzaA__AIP93117
augaaccccaaccagaagaucaucaccaucggcuccgucucccucaccaucgccaccgucugcuuccucaugcagaucgccauccucgccaccaccgucacccuccacuucaagcagcacgagugcgacucccccgccuccaaccaggucaugcccugcgagcccaucaucaucgagcgcaacaucaccgagaucgucuaccucaacaacaccaccaucgagaaggagaucugccccgaggucgucgaguaccgcaacugguccaagccccagugccagaucaccggcuucgcccccuucuccaaggacaacuccauccgccucuccgccggcggcgacaucugggucacccgcgagcccuacgucuccugcgaccccggcaagugcuaccaguucgcccucggccagggcaccacccucgacaacaagcacuccaacggcaccauccacgaccgcaucccccaccgcacccuccucaugaacgagcucggcguccccuuccaccucggcaccaagcaggucugcgucgccugguccuccuccuccugccacgacggcaaggccuggcuccacgucugcgucaccggcgacgaccgcaacgccaccgccuccuucaucuacgacggccgccucgucgacuccaucggcuccuggucccagaacauccuccgcacccaggaguccgagugcgucugcaucaacggcaccugcaccgucgucaugaccgacggcuccgccuccggccgcgccgacacccgcauccucuucaucaaggagggcaagaucguccacaucuccccccucuccggcuccgcccagcacaucgaggagugcuccugcuacccccgcuaccccgacguccgcugcaucugccgcgacaacuggaagggcuccaaccgccccgucaucgacaucaacauggaggacuacuccaucgacuccuccuacgucugcuccggccucgucggcgacaccccccgcaacgacgacuccuccuccaacuccaacugccgcgaccccaacaacgagcgcggcaaccccggcgucaagggcugggccuucgacaacggcgacgacgucuggaugggccgcaccaucuccaaggaccuccgcuccggcuacgagaccuucaaggucaucggcggcugguccacccccaacuccaagucccaggucaaccgccaggucaucgucgacaacaacaacugguccggcuacuccggcaucuucuccgucgagggcaaguccugcaucaaccgcugcuucuacgucgagcucauccgcggccgcccccaggagacccgcgucugguggaccuccaacuccaucgucgucuucugcggcaccuccggcaccuacggcaccggcuccuggcccgacggcgccaacaucaacuucaugcccaucuga

SEQ ID NO: 121842 - RNA, 1410 nt, Artificial Sequence
  derived and/or modified CDS sequence (opt2) from neuraminidase__InfluenzaA__AIR93973
augaaccccaaccagaagaucaucaccaucggcuccgucugcaugaccaucggcauggccaaccucauccuccagaucggcaacaucaucuccaucuggaucucccacuccauccagcucggcucccgcaaccagaucgaggccugcaaccaguccgucaucaccuacgagaacaacaccugggucaaccagaccuacgucaacaucuccaacaccaacuucgccgccggccaguccgucguccccgucaagcucgccggcaacuccucccucugccccgucuccggcugggccaucuacuccaaggacaacuccauccgcaucggcuccaagggcgacgucuucgucauccgcgagcccuucaucuccugcuccccccucgagugccgcaccuucuuccucacccagggcgcccuccucaacgacaagcacuccaacggcaccaucaaggaccgcucccccuaccgcacccucauguccugccccaucggcgagguccccucccccuacaacucccgcuucgaguccgucgccugguccgccuccgccugccacgacggcaucaacuggcucaccaucggcaucuccggccccgacaacggcgccgucgccguccucaaguacaacggcaucaucaccgacaccaucaaguccuggcgcaacaacauccuccgcacccaggaguccgagugcgucugcgucaacggcuccugcuucaccgucaugaccgacggccccuccaacggccaggccuccuacaagaucuuccgcaucgagaagggcaagaucgucaaguccgucgagaugaacgcccccaacuaccacuacgaggagugcuccugcuaccccgacuccuccgagaucaccugcgucugccgcgacaacuggcacggcuccaaccgccccugggucuccuucaaccagaaccucgaguaccagaucggcuacaucugcuccggcaucuucggcgacaacccccgccccaacgacaagaccggcuccugcggccccgucuccuccaacggcgccaacggcgucaagggcuucuccuucaaguacggcaacggcgucuggaucggccgcaccaaguccaucuccucccgcaacggcuucgagaugaucugggaccccaacggcuggaccgagaccgacaacaacuucuccaucaagcaggacaucgucggcaucaacgagugguccggcuacuccggcuccuucguccagcaccccgagcucaccggccucgacugcauccgccccugcuucugggucgagcucauccgcggccgccccaaggagaacaccaucuggaccuccggcuccuccaucuccuucugcggcgucaacuccaacaccgucggcugguccuggcccgacggcgccgagcuccccuucaccaucgacaaguga

SEQ ID NO: 121843 - RNA, 1410 nt, Artificial Sequence
  derived and/or modified CDS sequence (opt2) from neuraminidase__InfluenzaA__AIR93984
augaaccccaaccagaagaucaucaccaucggcuccgucugcaugaccaucggcauggccaaccucauccuccagaucggcaacaucaucuccaucuggaucucccacuccauccagcucggcaaccagaaccagaucgagaccugcaaccaguccgucaucaccuacgagaacaacaccugggucaaccagaccuacgucaacaucuccaacaccaacuucgccgccggccaguccgucgucuccgucaagcucgccggcaacuccucccucugccccgucuccggcugggccaucuacuccaaggacaacuccauccgcaucggcuccaagggcgacgucuucgucauccgcgagcccuucaucuccugcuccccccucgagugccgcaccuucuuccucacccagggcgcccuccucaacgacaagcacuccaacggcaccaucaaggaccgcucccccuaccgcacccucauguccugccccaucggcgagguccccucccccuacaacucccgcuucgaguccgucgccugguccgccuccgccugccacgacggcaucaacuggcucaccaucggcaucuccggccccgacaacggcgccgucgccguccucaaguacaacggcaucaucaccgacaccaucaaguccuggcgcaacaacauccuccgcacccaggaguccgagugcgccugcgucaacggcuccugcuucaccgucaugaccgacggccccuccaacggccaggccuccuacaagaucuuccgcaucgagaagggcaagaucgucaaguccgucgagaucaacgcccccaacuaccacuacgaggagugcuccugcuaccccgacuccuccgagaucaccugcgucugccgcgacaacuggcacggcuccaaccgccccugggucuccuucaaccagaaccucgaguaccagaucggcuacaucugcuccggcaucuucggcgacaacccccgccccaacgacaagaccggcuccugcggccccgucuccuccaacggcgccaacggcgucaagggcuucuccuucaaguacggcaacggcgucuggaucggccgcaccaaguccaucuccucccgcaacggcuucgagaugaucugggaccccaacggcuggaccggcaccgacaacaacuucuccaucaagcaggacaucgucggcaucaacgagugguccggcuacuccggcuccuucguccagcaccccgagcucaccggccucggcugcauccgccccugcuucugggucgagcucauccgcggccgccccaaggagaacaccaucuggaccuccggcuccuccaucuccuucugcggcgucaacuccgacaccgucggcugguccuggcccgacggcgccgagcuccccuucaccaucgacaaguga

SEQ ID NO: 121844 - RNA, 1410 nt, Artificial Sequence
  derived and/or modified CDS sequence (opt2) from neuraminidase__InfluenzaA__AIR93995
augaaccccaaccagaagaucaucaucaucggcuccgucugcaugaccaucggcauggccaaccucauccuccagaucggcaacaucaucuccaucuggaucucccacuccauccagcucggcaaccagaaccagaucgagaccugcaaccaguccgucaucaccuacgagaacaacaccugggucaaccagaccuacgucaacaucuccaacaccaacuucgccgccggccaguccgucguccccgucaagcucgccggcaacuccucccucugccccgucuccggcugggccaucuacuccaaggacaacuccauccgcaucggcuccaagggcgacgucuucgucauccgcgagcccuucaucuccugcuccccccucgagugccgcaccuucuuccucacccagggcgcccuccucaacgacaagcacuccaacggcaccaucaaggaccgcucccccuaccgcacccucauguccugccccaucggcgagguccccucccccuacaacucccgcuucgaguccgucgccugguccgccuccgccugccacgacggcaucaacuggcucaccaucggcaucuccggccccgacaacggcgccgucgccguccucaaguacaacggcaucaucaccgacaccaucaaguccuggaagaacaacauccuccgcacccaggaguccgagugcgucugcgucaacggcuccugcuucaccgucaugaccgacggccccuccaacggccaggccuccuacaagaucuuccgcaucgagaagggcaagaucgucaaguccgucgagaugaacgcccccaacuaccacuacgaggagugcuccugcuaccccgacuccuccgagaucaccugcgucugccgcgacaacuggcacggcuccaaccgccccugggucuccuucaaccagaaccucgaguaccagaucggcuacaucugcuccggcgucuucggcgacaacccccgccccaacgacaagaccggcuccugcggccccgucuccuccaacggcgccaacggcgucaagggcuucuccuucaaguacggcaacggcgucuggaucggccgcaccaaguccaucuccucccgcaacggcuucgagaugaucugggaccccaacggcuggaccggcaccgacaacaacuucuccaucaagcaggacaucaucggcaucaacgagugguccggcuacuccggcuccuucguccagcaccccgagcucaccggcauggacugcauccgccccugcuucugggucgagcucauccgcggccgccccaaggagaacaccaucuggaccuccggcuccuccaucuccuucugcggcgucaacuccgacaccgucggcugguccuggcccgacggcgccgagcuccccuucaccaucgacaaguga

SEQ ID NO: 121845 - RNA, 1401 nt, Artificial Sequence
  derived and/or modified CDS sequence (opt2) from neuraminidase__InfluenzaA__AIR94118
augaaccccaaccagaagaucaucgccaucggcuccgucucccucaucaucgccaucaucugccuccucaugcagaucgccauccucaccaccaccaugacccuccacuuccgccagaacgagugcaacaacuccuccaacaaccaggucaugcccugcgagcccaucaucaucgagcgcaacaccguccaccucaacuccaccaccaucgagcgcgagaucugccccaaggucgccgaguacaagaacugguccaagccccagugccagaucaccggcuucgcccccuucuccaaggacaacuccauccgccucuccgccggcggcgacaucugggucacccgcgagcccuacgucuccugcucccucgacaagugcuaccaguucgcccucggccagggcaccacccucaagaacaagcacuccaacggcaccacccacgaccgcaccccccaccgcacccuccucaugaacgagcucggcguccccuuccaccucggcaccaagcaggucugcaucgccugguccuccuccuccugcuacgacggcaaggccuggcuccacaucugcgucaccggcgacgacaagaacgccaccgccuccaucaucuacaacggcaugcucgucgacuccaucggcuccugguccaagaacauccuccgcacccaggaguccgagugcgucugcaucaacggcaccugcgccgucgucaugaccgacggcuccgccuccggcaaggccgacacccgcguccucuucaucaaggagggcaagaucaucaacaucuccccccucuccggcuccgcccagcacgucgaggagugcuccugcuacccccgcuaccccgagguccgcugcgucugccgcgacaacuggaagggcuccaaccgccccauccucuacaucaacauggccgacuacuccaucgaguccuccuacgucugcuccggccucgucggcgacaccccccgcaacgacgacuccuccuccuccuccaacugcaaggaccccaacuccgagcgcggcgcccccggcgucaagggcugggccuucgacgacggcaacgacgucuggaugggccgcaccaucaagaacggcucccgcuccggcuacgagaccuuccgcgucgucaacggcuggaccgucgccaacuccaagucccaggucaaccgccaggucaucgucgacuccgacgacugguccggcuacuccggcaucuucuccgucgagggcaagaagugcaucaaccgcugcuucuacgucgagcucauccgcggccgcccccaggagccccgcgucugguggaccuccaacuccaucaucgucuucugcggcaccuccggcaccuacggcaccggcuccuggcccgacggcgccaacaucaacuucaugcccaucuga

SEQ ID NO: 121846 - RNA, 1410 nt, Artificial Sequence
  derived and/or modified CDS sequence (opt2) from neuraminidase__InfluenzaA__AIT38335
augaaccccaaccagaagaucaucaccaucggcuccgucucccucaccaucgccaccaucugcuuccucaugcagaucgccauccucgucaccaccgucacccuccacuucaagcaguacgagugcaacuccccccccaccaaccaggucaugcucugcgagcccaccaucaucgagcgcaacaucaccgagaucgucuaccucaccaacaccaccaucgagaaggagaucugccccaagcucgucgaguaccgcaacugguccaagccccagugcaagaucaccggcuucgcccccuucuccaaggacaacuccauccgccucuccgccggcggcgacaucugggucacccgcgagcccuacgucuccugcgaccccgacaagugcuaccaguucgcccucggccagggcaccacccucaacaaccgccacuccaacgacaccguccacgaccgcacccccuaccgcacccuccucaugaacgagcucggcauccccuuccaccucggcaccaagcaggucugcaucgccugguccuccuccuccugccacgacggcaaggccuggcuccacgucugcgucaccggccacgacgagaacgccaccgccuccuucaucuacgacggccgccucgucgacuccaucgucuccugguccaagcgcauccuccgcacccaggaguccgagugcgucugcaucgacggcaccugcaccgucgucaugaccgacggcuccgccuccggccgcgccgacacccgcauccucuucaucaaggagggcaagaucauccacaucucccagcucuccggcuccgcccagcacgucgaggagugcuccugcuacccccgcuaccccggcguccgcugcgucugccgcgacaacuggaagggcuccaaccgccccaucgucgacaucaacgucaaggacuacuccaucaacuccuccuacgucugcuccggccucgucggcgacaccccccgcaagaacgacuccuucuccuccuccuacugccucaaccccaacaacgaggagggcggccacggcgucaagggcugggccuucgacgacggcgacgacgucuggaugggccgcaccaucaacgagaagcuccgcuccggcuacgagaccuucaaggucaucaagggcugguccaagcccaacuccaagcuccagaucaaccgccaggucaucgucgaccgcggcaaccgcuccggcuacuccggcaucuucuccgucgagggcaagggcugcaucaaccgcugcuucuacgucgagcucauccgcggccgcaagcaggagaccgaggucugguggaccuccaacuccaucgucgucuucugcggcaccuccggcaccuacggcaccggcuccuggcccgacggcgccaacaucaaccucaugcccaucuga

SEQ ID NO: 121847 - RNA, 1410 nt, Artificial Sequence
  derived and/or modified CDS sequence (opt2) from neuraminidase__InfluenzaA__AIT38346
augaaccccaaccagaagaucaucaccaucggcuccaucucccucaccaucgccaccaucugcuuccuccuccaggucgccauccucgucaccaccgucacccuccacuucaagcaguucgagugcaaccccacccccaacaaccaggucaugcucugcgagcccaccgucaucgagcgcaacaucaccaagaucgucuaccucaccaacaccaccgucgagaaggagaucugccccaagcccgccgaguaccgcaacugguccaagccccagugcaagaucaccggcuucgcccccuucuccaaggacaacuccauccgccucuccgccggcggcgacaucugggucacccgcgagcccuacgucuccugcgcccccaacaagugcuaccaguucgcccucggccagggcaccacccucaacaaccgccacuccaacgacaccguccacgaccgcacccccuaccgcacccuccucaugaacgagcucggcauccccuuccaccucggcaccaagcaggucugcaucgccugguccuccuccuccugccacgacggcaaggccuggcuccacgucugcgucaccggccacgacaagaacgccaccgccuccuucaucuacgacggccgccucgucgacuccaucggcuccugguccaagaacauccuccgcacccaggaguccgagugcgucugcaucaacggcaccugcaccgucgucaugaccgacggcuccgccuccggccgcgccgacaccaagauccucuucaucaaggagggcaagaucauccacaucucccagcucuccggcuccgcccagcacgucgaggagugcuccugcuacccccgcuaccccggcguccgcugcgucugccgcgacaacuggaagggcuccaaccgccccaucgucgacaucaacguccgcgacuacuccaucgucuccuccuacgucugcuccggccucgucggcgacaccccccgcaagaacgacuccuucuccuccucccacugccucaaccccaacaacgaggagggcggccacggcgucaagggcugggccuucgacgacggcgacgacgucuggaugggccgcaccaucuccgagaagcuccgcuccggcuacgagaccuucaaggucaucaagggcugguccaagcccaacuccaagcuccagaucaaccgccaggucaucgucgaccgcggcaaccgcuccggcuacuccggcaucuucuccgucgagggcaaguccugcaucaaccgcugcuucuacgucgagcucauccgcggccgcaagcaggagaccgaggucugguggaccuccaacuccaucgucgucuucugcggcaccuccggcaccuacggcaccggcuccuggcccgacggcgccgacaucaaccucaugcccaucuga

SEQ ID NO: 121848 - RNA, 1410 nt, Artificial Sequence
  derived and/or modified CDS sequence (opt2) from neuraminidase__InfluenzaA__AIT38361
augaaccccaaccagaagaucaucaccaucggcuccaucucccucaccaucgccaccaucugcuuccucaugcaggucgccauccucgucaccaccgucacccuccacuucaagcaguacgagugcaacuccacccccaacaaccaggucaugcucugcgagcccaccgucaucgagcgcaacaucaccaagaucgucuaccucaccaacaccaccgucgucaaggaggucugccccaagcccgccgaguaccgcaacugguccaagccccagugcaagaucaccggcuucgcccccuucuccaaggacaacuccauccgccucuccgccggcggcgacaucugggucacccgcgagcccuacgucuccugcgcccccaacaagugcuaccaguucgcccucggccagggcaccacccucaacaaccgccacuccaacgacaccguccacgaccgcacccccuaccgcacccuccucaugaacgagcucggcauccccuuccaccucggcaccaagcaggucugcaucgccugguccuccuccuccugcuacgacggcaaggccuggcuccacgucugcgucaccggccacgacaagaacgccaccgccuccuucaucuacgacggccgccucgucgacuccaucggcuccugguccaagaacauccuccgcacccaggaguccgagugcgucugcaucaacggcaccugcaccgucgucaugaccgacggcuccgccuccggccgcgccgacaccaagauccucuucaucaaggagggcaagaucauccacaucucccagcucuccggcuccgcccagcacgucgaggagugcuccugcuacccccgcuaccccggcguccgcugcgucugccgcgacaacuggaagggcuccaaccgccccaucgucgacaucaacaugcgcgacuacuccaucgucuccuccuacgucugcuccggccucgucggcgacaccccccgcgagaacgacuccuucuccuccucccacugccucaaccccaacaacgaggagggcggccacggcgucaagggcugggccuucgacgacggcgacgacgucuggaugggccgcaccaucuccgagaagcuccgcuccggcuacgagaccuucaaggucaucaagggcugguccaagcccaacuccaagcuccagaucaaccgccaggucaucgucgaccgcggcaaccgcuccggcuacuccggcaucuucuccgucgagggcaaguccugcaucaaccgcugcuucuacgucgagcucauccgcggccgcaagcaggagaccgaggucugguggaccuccaacuccaucgucgucuucugcggcaccuccggcaccuacggcaccggcuccuggcccgacggcgccgacaucaaccucaugcccaucuga

SEQ ID NO: 121849 - RNA, 1410 nt, Artificial Sequence
  derived and/or modified CDS sequence (opt2) from neuraminidase__InfluenzaA__AIT38375
augaaccccaaccagaagaucaucaccaucggcuccgucugcaugaccaucggcauggucaaccucauccuccagaucggcaacaucaucuccaucuggaucucccacuccauccagcucggcaaccagaaccagaucgagaucugcaaccaguccgucaucaccuacgagaacaacaccugggucaaccagaccuacgucaacaucuccaacaccaacuucgccgccggccaguccgucguccccgucaagcucgccggcaacuccucccucugcuccgucuccggcugggccaucuacuccaaggacaacuccauccgcaucggcuccaagggcgacgucuucgucauccgcgagcccuucaucuccugcuccccccucgagugccgcaccuucuuccucacccagggcgcccuccucaacgacaagcacuccaacggcaccaucaaggaccgcucccccuaccgcacccucauguccugccccaucggcgagguccccucccccuacaacucccgcuucgaguccgucgccugguccgccuccgccugccacgacggcaucaacuggcucaccaucggcaucuccggccccgacaacggcgccgucgccguccucaaguacaacggcaucaucaccgacaccaucaaguccuggcgcaacaacauccuccgcacccaggaguccgagugcgccugcgucaacggcuccugcuucaccgucaugaccgacggccccuccgacggccaggccuccuacaagaucuuccgcaucgagaagggcaagaucgucaaguccgucgagaugaacgcccccaacuaccacuacgaggagugcuccugcuaccccgacuccuccgagaucaccugcgucugccgcgacaacuggcacggcuccaaccgccccugggucuccuucaaccagaaccucgaguaccagaucggcuacaucugcuccggcaucuucggcgacaacccccgccccaacgacaagaccggcuccugcggccccgucuccuccaacggcgccaacggcgucaagggcuucuccuucaaguacggcaacggcgucuggaucggccgcaccaaguccaucuccucccgcaacggcuucgagaugaucugggaccccaacggcuggaccggcaccgacaacaacuucuccaucaagcaggacaucgucggcaucaacgagugguccggcuacuccggcuccuucguccagcaccccgagcucaccggccucgacugcauccgccccugcuucugggucgagcucauccgcggccgccccaaggagaacaccaucuggaccuccggcuccuccaucuccuucugcggcgucaacuccgacaccgucggcugguccuggcccgacggcgccgagcuccccuucaccaucgacaaguga

SEQ ID NO: 121850 - RNA, 1410 nt, Artificial Sequence
  derived and/or modified CDS sequence (opt2) from neuraminidase__InfluenzaA__AIT93148
augaaccccaaccagaagaucaucaccaucggcuccgucugcaugaccaucggcauggccaaccucauccuccagaucggcaacaucaucuccaucugggucucccacuccauccagcucggcaaccagucccagaucgagaccugcaaccaguccgucaucaccuacgagaacaacaccugggucaaccagaccuacgucaacaucuccaacaccaacuucgccgccggccaguccgucgucuccgucaagcucgccggcaacuccucccucugccccgucuccggcugggccaucuacuccaaggacaacuccguccgcaucggcuccaagggcgacgucuucgucauccgcgagcccuucaucuccugcuccccccucgagugccgcaccuucuuccucacccagggcgcccuccucaacgacaagcacuccaacggcaccaucaaggaccgcucccccuaccgcacccucauguccugccccaucggcgagguccccucccccuacaacucccgcuucgaguccgucgccugguccgccuccgccugccacgacggcaucaacuggcucaccaucggcaucuccggccccgacuccggcgccgucgccguccucaaguacaacggcaucaucaccgacaccaucaaguccuggcgcaacaacauccuccgcacccaggaguccgagugcgccugcgucaacggcuccugcuucaccaucaugaccgacggccccuccgacggccaggccuccuacaagaucuuccgcaucgagaagggcaagaucgucaaguccgucgagaugaacgcccccaacuaccacuacgaggagugcuccugcuaccccgacuccuccgagaucaccugcgucugccgcgacaacuggcacggcuccaaccgccccugggucuccuucaaccagaaccucgaguaccagaucggcuacaucugcuccggcgucuucggcgacaacccccgccccaacgacaagaccggcuccugcggccccgucuccuccaacggcgccaacggcgucaagggcuucuccuucaaguacggcaacggcgucuggaucggccgcaccaaguccaucuccucccgcaagggcuucgagaugaucugggaccccaacggcuggaccggcaccgacaacaaguucuccaucaagcaggacaucgucggcaucaacgagugguccggcuacuccggcuccuucguccagcaccccgagcucaccggccucgacugcauccgccccugcuucugggucgagcucauccgcggccgccccgaggagaacaccaucuggaccuccggcuccuccaucuccuucugcggcgucaacuccgacaccgucggcugguccuggcccgacggcgccgagcuccccuucaccaucgacaaguga

SEQ ID NO: 121851 - RNA, 1410 nt, Artificial Sequence; identical to SEQ ID NO: 114676
  derived and/or modified CDS sequence (opt2) from neuraminidase__InfluenzaA__AIU39701

SEQ ID NO: 121852 - RNA, 1410 nt, Artificial Sequence; identical to SEQ ID NO: 112774
  derived and/or modified CDS sequence (opt2) from neuraminidase__InfluenzaA__AIU39703

SEQ ID NO: 121853 - RNA, 1410 nt, Artificial Sequence
  derived and/or modified CDS sequence (opt2) from neuraminidase__InfluenzaA__AIU39705
augaaccccaaccagaagaucaucaccaucggcuccgucugcaugaccaucggcauggccaaccucauccuccagaucggcaacaucaucuccaucuggaucucccacuccauccagcucggcaaccagucccagaucgagaccugcaaccaguccgucaucaccuacgagaacaacaccugggucaaccagaccuacgucaacaucuccaacaccaacuucgccgccggccaguccgucgucuccgucaagcucgccggcaacuccucccucugccccgucuccggcugggccaucuacuccaaggacaacuccauccgcaucggcuccaagggcgacgucuucgucauccgcgagcccuucaucuccugcuccccccucgagugccgcaccuucuuccucacccagggcgcccuccucaacgacaagcacuccaacggcaccaucaaggaccgcucccccuaccgcacccucauguccugccccaucggcgagguccccucccccuacaacucccgcuucgaguccgucgccugguccgccuccgccugccacgacggcaucaacuggcucaccaucggcaucuccggccccgacaacggcgccgucgccguccucaaguacaacggcaucaucaccgacaccaucaaguccuggcgcaacaacauccuccgcacccaggaguccgagugcgccugcgucaacggcuccugcuucaccgucaugaccgacggccccuccgacggccaggccuccuacaagaucuuccgcaucgagaagggcaagaucgucaaguccgucgagaugaacgcccccaacuaccacuacgaggagugcuccugcuaccccgacuccuccgagaucaccugcgucugccgcgacaacuggcacggcuccaaccgccccugggucuccuucaaccagaaccucgaguaccagaucggcuacaucugcuccggcaucuucggcgacaacccccgccccaacgacaacaccggcuccugcggccccgucuccuccaacggcgccaacggcgucaagggcuucuccuucaaguacggcaacggcgucuggaucggccgcaccaaguccaucuccucccgcaacggcuucgagaugaucugggaccccaacggcuggaccggcaccgacaacaacuucuccaucaagcaggacaucgucggcaucaacgagugguccggcuacuccggcuccuucguccagcaccccgagcucaccggccucgacugcauccgccccugcuucugggucgagcucauccgcggccgccccaaggagaacaccaucuggaccuccggcuccuccaucuccuucugcggcgucaacuccgacaccgucggcugguccuggcccgacggcgccgagcuccccuucaccaucgacaaguga

SEQ ID NO: 121854 - RNA, 1413 nt, Artificial Sequence
  derived and/or modified CDS sequence (opt2) from neuraminidase__InfluenzaA__AIU46611
augaaccccaaccagaagaucaccugcaucuccgccaccggcaugacccucuccgucgucuccaugcucaucggcaucgccaaccucggccucaacaucggccuccacuacaaggucggcgacuccaccaacaucaacauccccaacaugaacgagaccucccccaccaccaccaucaucaacaaccacccccagaacaacuucaccaacaucaccaacaucaucgucacccgcaacgaggagggccaccuccucaaccucaccaagccccucugcgaggucaacuccuggcacauccucuccaaggacaacgccauccgcaucggcgaggacgcccacaucaucgucacccgcgagcccuaccucuccugcgacccccagggcugccgcauguucgcccucucccagggcaccacccuccgcggcaagcacgccaacggcaccauccacgaccgcucccccuuccgcgcccucgucuccugggagaugggccaggcccccucccccuacaacacccgcgucgagugcaucggcugguccuccaccuccugccacgacggcaucucccgcauguccaucugcaucuccggccccaacaacaacgccuccgccgucgucugguacggcggccgccccgucaccgagauccccuccugggccggcaacauccuccgcacccaggaguccgagugcgucugccacggcggcaucugccccgucgucaugaccgacggccccgccaacaaccgcgccgagaccaagaucaucuacuucaaggagggcaagaucaagaagaucgaggagcucaagggcgacgcccagcacaucgaggagugcuccugcuacggcgccuccgagaugaucaagugcaucugccgcgacaacuggaagggcgccaaccgccccgucaucaccaucgaccccgagaugaugacccacaccuccaaguaccucugcuccaagauccucaccgacaccucccgccccaacgaccccaccaacggcaacugcgaggcccccaucaccggcggcucccccgaccccggcgucaagggcuucgccuuccucgacggcgagaacuccuggcucggccgcaccaucuccaaggacucccgcuccggcuacgagaugcucaagguccccaacgccgagaccgacacccaguccggcgccaucucccaccagaucaucgucaacaaccagaacugguccggcuacuccggcgccuucaucgacuacugggccaacaaggagugcuucaaccccugcuucuacgucgagcucauccgcggccgccccaaggaguccuccguccucuggaccuccaacuccaucgucgcccucugcggcuccaaggagcgccucggcuccugguccuggcacgacggcgccgagaucaucuacuucaaguga

SEQ ID NO: 121855 - RNA, 1410 nt, Artificial Sequence
  derived and/or modified CDS sequence (opt2) from neuraminidase__InfluenzaA__AIV09221
augaaccccaaccagaagaucaucaccaucggcuccgucugcaugaccaucggcauggccaaccucauccuccagaucggcaacaucaccuccaucuggaucucccacuccauccagaucggcaaccgcaaccagaucgaggccugcaaccaguccgucaucaccuacgagaacaacaccugggucaaccagaccuacgucaacaucuccaacaccaacuucgccgucggccaguccgucguccccgucaagcucgccggcaacuccucccucugccccgucuccggcugggccaucuacuccaaggacaacuccauccgcaucggcuccaagggcgacgucuucgucauccgcgagcccuucaucuccugcuccccccucgagugccgcaccuucuuccucacccagggcgcccuccucaacgacaagcacuccaacggcaccaucaaggaccgcucccccuaccgcacccucauguccugccccaucggcgagguccccucccccuacaacucccgcuucgaguccgucgccugguccgccuccgccugccacgacggcaucaacuggcucaccaucggcaucuccggccccgacaacggcgccgucgccguccucaaguacaacggcaucaucaccgacaccaucaaguccuggcgcaacaacauccuccgcacccaggaguccgagugcgucugcgucaacggcuccugcuucaccgucaugaccgacggccccuccaacggccaggccuccuacaagaucuuccgcaucgagaagggcaagaucgucaaguccgucgagaugaacgcccccaacuaccacuacgaggagugcuccugcuaccccgacuccuccgagaucaccugcgucugccgcgacaacuggcacggcuccaaccgccccugggucuccuucaaccagaaccucgaguaccagaucggcuacaucugcuccggcaucuucggcgacaacccccgccccaacgacaagaccggcuccugcggccccguccccuccaacggcgccaacggcgucaagggcuucuccuucaaguacggcaacggcgucuggaucggccgcaccaaguccaucuccucccgcaacggcuucgagaugaucugggaccccaacggcuggaccgagaccgacaacgacuucuccaucaagcaggacaucgucggcaucaacgagugguccggcuacuccggcuccuucguccagcaccccgagcucaccggccucgacugcauccgccccugcuucugggucgagcucauccgcggccgccccaaggagaacaccaucuggaccuccggcuccuccaucuccuucugcggcgucaacuccaacaccgucgacugguccuggcccgacggcgccgagcuccccuucaccaucgacaaguga

SEQ ID NO: 121856 - RNA, 1410 nt, Artificial Sequence
  derived and/or modified CDS sequence (opt2) from neuraminidase__InfluenzaA__AIW60703
augaaccccaaccagaagaucaucaccaucggcuccgucucccucaccaucgccaccaucugcuuccucaugcagaucgucauccucgucaccaccgucacccuccacuucaagcaguacgagugcaacuccccccccaacaaccaggucaugcucugcgagcccaccaucaucgagcgcaacaucaccgagaucgucuaccucaccaacaccaccaucgagaaggagaucugccccaagcucgccgaguaccgcaacugguccaagccccagugcaagaucaccggcuucgcccccuucuccaaggacaacuccauccgccucuccgccggcggcgacaucugggucacccgcgagcccuacgucuccugcgaccccgacaagugcuaccaguucgcccucggccagggcaccacccucaacaaccgccacuccaacgacaccguccacgaccgcacccccuaccgcacccuccucaugaacgagcucggcguccccuuccaccucggcaccaagcaggucugcaucgccugguccuccuccuccugccacgacggcaaggccuggcuccacgucugcgucaccggccacgacgagaacgccaccgccuccuucaucuacgacggccgccucgucgacuccaucggcuccugguccaagaagauccuccgcacccaggaguccgagugcgucugcaucaacggcaccugcaccgucgucaugaccgacggcuccgccuccggccgcgccgacaccaagauccucuucaucgaggagggcaagaucguccacaucuccccccucuccggcuccgcccagcacgucgaggagugcuccugcuacccccaguacuccggcguccgcugcgucugccgcgacaacuggaagggcuccaaccgccccaucgucgacaucaacgucaaggacuacuccaucgucuccuccuacgucugcuccggccucgucggcgacaccccccgcaagaacgacuccuccuccuccucccacugccucaaccccaacaacgaggagggcggccacggcgucaagggcugggccuucgacgacggcaacgacgucuggaugggccgcaccaucuccgagaagcuccgcuccggcuacgagaccuucaaggucaucggcggcugguccaagcccaacuccaagcuccagaucaaccgccaggucaucgucgaccgcggcaaccgcuccggcuacuccggcaucuucuccgucgagggcaagaacugcaucaaccgcugcuucuacgucgagcucauccgcggccgcaagcaggagaccgaggucugguggaccuccaacuccaucgucgucuucugcggcaccuccggcaccuacggcaccggcuccuggcccgacggcgccgacaucaaccucaugcccaucuga

SEQ ID NO: 121857 - RNA, 1410 nt, Artificial Sequence
  derived and/or modified CDS sequence (opt2) from neuraminidase__InfluenzaA__AIW60704
augaaccccaaccagaagaucaucaccaucggcuccgucucccucaccaucgccaccaucugcuuccucaugcagaucgucauccucgucaccaccgucacccuccacuucaagcaguacgagugcaacuccccccccaacaaccaggucaugcucugcgagcccaccaucaucgagcgcaacaucaccgagaucgucuaccucaccaacaccaccaucgagaaggagaucugccccaagcucgccgaguaccgcaacugguccaagccccagugcaagaucaccggcuucgcccccuucuccaaggacaacuccauccgccucuccgccggcggcgacaucugggucacccgcgagcccuacgucuccugcgaccccgacaagugcuaccaguucgcccucggccagggcaccacccucaacaaccgccacuccaacgacaucguccacgaccgcacccccuaccgcacccuccucaugaacgagcucggcguccccuuccaccucggcaccaagcaggucugcaucgccugguccuccuccuccugccacgacggcaaggccuggcuccacgucugcgucaccggccacgacgagaacgccaccgccuccuucaucuacgacggccgccucgucgacuccaucggcuccugguccaagaagauccuccgcacccaggaguccgagugcgucugcaucaacggcaccugcaccgucgucaugaccgacggcuccgccuccggccgcgccgacaccaagauccucuucaucgaggagggcaagaucguccacaucuccccccucuccggcuccgcccagcacgucgaggagugcuccugcuacccccaguacuccggcguccgcugcgucugccgcgacaacuggaagggcuccaaccgccccaucgucgacaucaacgucaaggacuacuccaucgucuccuccuacgucugcuccggccucgucggcgacaccccccgcaagaacgacuccuccuccuccucccacugccucaaccccaacaacgaggagggcggccacggcgucaagggcugggccuucgacgacggcaacgacgucuggaugggccgcaccaucuccgagaagcuccgcuccggcuacgagaccuucaaggucaucggcggcugguccaagcccaacuccaagcuccagaucaaccgccaggucaucgucgaccgcggcaaccgcuccggcuacuccggcaucuucuccgucgagggcaagaacugcaucaaccgcugcuucuacgucgagcucauccgcggccgcaagcaggagaccgaggucugguggaccuccaacuccaucgucgucuucugcggcaccuccggcaccuacggcaccggcuccuggcccgacggcgccgacaucaaccucaugcccaucuga

SEQ ID NO: 121858 - RNA, 1410 nt, Artificial Sequence
  derived and/or modified CDS sequence (opt2) from neuraminidase__InfluenzaA__AIW60705
augaaccccaaccagaagaucaucaccaucggcuccgucucccucaccaucgccaccaucugcuuccucaugcagaucgccauccucgucaccaccgucacccuccacuucaagcaguacgagugcaacuccccccccaacaaccaggucaugcucugcgagcccaccaucaucgagcgcaacaucaccgagaucgucuaccucaccaacaccaccaucgagaaggagaucugccccaagcucgccgaguaccgcaacugguccaagccccagugcaagaucaccggcuucgcccccuucuccaaggacaacuccauccgccucuccgccggcggcgacaucugggucacccgcgagcccuacgucuccugcgaccccgacaagugcuaccaguucgcccucggccagggcaccacccucaacaaccgccacuccaacgacaccguccacgaccgcacccccuaccgcacccuccucaugaacgagcucggcguccccuuccaccucggcaccaagcaggucugcaucgccugguccuccuccuccugccacgacggcaaggccuggcuccacgucugcgucaccggccacgacgagaacgccaccgccuccuucaucuacgacggccgccucgucgacuccaucggcuccugguccaagaagauccuccgcacccaggaguccgagugcgucugcaucaacggcaccugcaccgucgucaugaccgacggcuccgccuccggccgcgccgacaccaagauccucuucaucgaggagggcaagaucguccacaucuccccccucuccggcuccgcccagcacgucgaggagugcuccugcuacccccgcuacuccggcguccgcugcgucugccgcgacaacuggaagggcuccaaccgccccaucgucgacaucaacgucaaggacuacuccaucgucuccuccuacgucugcuccggccucgucggcgacaccccccgcaagaacgacuccuccuccuccucccacugccucaaccccaacaacgaggagggcggccacggcgucaagggcugggccuucgacgacggcaacgacgucuggaugggccgcaccaucuccgagaaguuccgcuccggcuacgagaccuucaaggucaucggcggcugguccaagcccaacuccaagcuccagaucaaccgccaggucaucgucgaccgcggcaaccgcuccggcuacuccggcaucuucuccgucgagggcaaguccugcaucaaccgcugcuucuacgucgagcucauccgcggccgcaagcaggagaccgaggucugguggaccuccaacuccaucgucgucuucugcggcaccuccggcaccuacggcaccggcuccuggcccgacggcgccgacaucaaccucaugcccaucuga

SEQ ID NO: 121859 - RNA, 1410 nt, Artificial Sequence; identical to SEQ ID NO: 121858
  derived and/or modified CDS sequence (opt2) from neuraminidase__InfluenzaA__AIW60706

SEQ ID NO: 121860 - RNA, 1410 nt, Artificial Sequence
  derived and/or modified CDS sequence (opt2) from neuraminidase__InfluenzaA__AIW60708
augaaccccaaccagaagaucaucaccaucggcuccgucucccucaccaucgccaccaucugcuuccucaugcagaucgccauccucgucaccaccgucacccuccacuucaagcaguacgagugcaacuccccccccaacaaccaggucaugcucugcgagcccaccaucaucgagcgcaacaucaccgagaucgucuaccucaccaacaccaccaucgagaaggagaucugccccaagcucgccgaguaccgcaacugguccaagccccagugcaacaucaccggcuucgcccccuucuccaaggacaacuccauccgccucuccgccggcggcgacaucugggucacccgcgagcccuacgucuccugcgaccccgacaagugcuaccaguucgcccucggccagggcaccacccucaacaaccgccacuccaacgacaccguccacgaccgcacccccuaccgcacccuccucaugaacgagcucggcguccccuuccaccucggcaccaagcaggucugcaucgccugguccuccuccuccugccacgacggcaaggccuggcuccacgucugcgucaccggccacgacgagaacgccaccgccuccuucaucuacaacggccgccucgucgacuccaucggcuccugguccaagaagauccuccgcacccaggaguccgagugcgucugcaucaacggcaccugcaccgucgucaugaccgacggcuccgccuccggcaaggccgacaccaagauccucuucaucgaggagggcaagaucguccacaucuccccccucuccggcuccgcccagcacgucgaggagugcuccugcuacccccgcuaccccggcguccgcugcgucugccgcgacaacuggaagggcuccaaccgccccaucgucgacaucaacgucaaggacuacuccaucgucuccuccuacgucugcuccggccucgucggcgacaccccccgcaagaacgacuccuccuccuccucccacugccucaaccccaacaacgaggagggcggccacggcgucaagggcugggccuucgacgacggcaacgacgucuggaugggccgcaccaucuccgagaagcuccgcuccggcuacgagaccuucaaggucaucgagggcugguccaaccccaacuccaagcuccagaucaaccgccaggucaucgucgaccgcggcaacuccuccggcuacuccggcaucuucuccgucgagggcaaguccugcaucaaccgcugcuucuacgucgagcucauccgcggccgcaagcaggagaccgaggucugguggaccuccaacuccaucgucguccucugcggcaccuccggcaccuacggcaccggcuccuggcccgacggcgccgacaucaaccucaugcccaucuga

SEQ ID NO: 121861 - RNA, 1410 nt, Artificial Sequence
  derived and/or modified CDS sequence (opt2) from neuraminidase__InfluenzaA__AIW60710
augaaccccaaccagaagaucaucaccaucggcuccgucucccucaccaucgccaccaucugcuuccucaugcagaucgccauccucgucaccaccgucacccuccacuucaagcaguacgagugcaacuccccccccaacaaccaggucaugcucugcgagcccaccaucaucgagcgcaacaucaccgagaucgucuaccucaccaacaccaccaucgagaaggagaucugccccaagcucgccgaguaccgcaacugguccaagccccagugcaacaucaccggcuucgcccccuucuccaaggacaacuccauccgccucuccgccggcggcgacaucugggucacccgcgagcccuacgucuccugcgaccccgacaagugcuaccaguucgcccucggccagggcaccacccucaacaacggccacuccaacgacaccguccacgaccgcacccccuaccgcacccuccucaugaacgagcucggcguccccuuccaccucggcaccaagcaggucugcaucgccugguccuccuccuccugccacgacggcaaggccuggcuccacgucugcgucaccggcgacgacgagaacgccaccgccuccuucaucuacaacggccgccucgucgacuccaucggcuccugguccaagaagauccuccgcacccaggaguccgagugcgucugcaucaacggcaccugcaccgucgucaugaccgacggcuccgccuccggcaaggccgacaccaagauccucuucaucgaggagggcaagaucguccacaccuccucccucuccggcuccgcccagcacgucgaggagugcuccugcuacccccgcuaccccggcguccgcugcgucugccgcgacaacuggaagggcuccaaccgccccaccgucgacaucaacgucaaggacuacuccaucgucuccuccuacgucugcuccggccucgucggcgacaccccccgcaagaacgacuccuccuccuccucccacugccucgaccccaacaacgaggagggcggccacggcgucaagggcugggccuucgacgacggcaacgacgucuggaugggccgcaccaucuccgagaagcuccgcuccggcuacgagaccuucaaggucaucgagggcugguccaagcccaacuccaagcuccagaucaaccgccaggucaucgucgaccgcggcaaccgcuccggcuacuccggcaucuucuccgucgaguccaaguccugcaucaaccgcugcuucuacgucgagcucauccgcggccgcaagcaggagaccgagguccucuggaccuccaacuccaucgucgucuucugcggcaccuccggcaccuacggcaccggcuccuggcccgacggcgccgacaucaaccucaugcccaucuga

SEQ ID NO: 121862 - RNA, 1410 nt, Artificial Sequence; identical to SEQ ID NO: 110627
  derived and/or modified CDS sequence (opt2) from neuraminidase__InfluenzaA__AIW60711

SEQ ID NO: 121863 - RNA, 1410 nt, Artificial Sequence; identical to SEQ ID NO: 110627
  derived and/or modified CDS sequence (opt2) from neuraminidase__InfluenzaA__AIW60712

SEQ ID NO: 121864 - RNA, 1410 nt, Artificial Sequence
  derived and/or modified CDS sequence (opt2) from neuraminidase__InfluenzaA__AIW60713
augaaccccaaccagaagaucaucaccaucggcuccgucucccucaccaucuccaccaucugcuucuucaugcagaucgccauccucaucaccaccgucacccuccacuucaagcaguacgaguucuccuccccccccaacaaccaggucaugcucugcgagcccaccaucaucgagcgcaacaucaccgagaucgucuaccucaccaacaccaccaucgagaaggagaucugccccaagcucgccgaguaccgcaacugguccaagccccagugcgacaucaccggcuucgcccccuucuccaaggacaacuccauccgccucuccgccggcggcgacaucugggucacccgcgagcccuacgucuccugcgaccccgacaagugcuaccaguucgcccucggccagggcaccacccucaacaacguccacuccaacgacaccguccacgaccgcacccccuaccgcacccuccucaugaacgagcucggcguccccuuccaccucggcaccaagcaggucugcaucgccugguccuccuccuccugccacgacggcaaggccuggcuccacgucugcgucaccggcgacgacaagaacgccaccgccuccuucaucuacaacggccgccucgucgacuccaucgucuccugguccaaggagauccuccgcacccaggaguccgagugcgucugcaucaacggcaccugcaccgucgucaugaccgacggcuccgccuccggcaaggccgacaccaagauccucuucaucgaggagggcaagaucguccacaccuccacccucuccggcuccgcccagcacgucgaggagugcuccugcuacccccgcuaccccggcguccgcugcgucugccgcgacaacuggaagggcuccaaccgccccaucgucgacaucaacaucaaggacuacuccaucgccuccuccuacgucugcuccggccucgucggcgacaccccccgcaagaacgacuccuccuccuccucccacugccucgaccccaacaacgaggagggcggccacggcgucaagggcugggccuucgacgacggcaacgacgucuggaugggccgcaccaucuccgagaagcuccgcuccggcuacgagaccuucaaggucaucgagggcugguccaaccccaacuccaagcuccagaucaaccgccaggucaucgucgaccgcggcaaccgcuccggcuacuccggcaucuucuccgucgagggcaaguccugcaucaaccgcugcuucuacgucgagcucauccgcggccgcaaggaggagaccgagguccucuggaccuccaacuccaucgucgucuucugcggcaccuccggcaccuacggcaccggcuccuggcccgacggcgccgacaucaaccucaugcccaucuga

SEQ ID NO: 121865 - RNA, 1410 nt, Artificial Sequence
  derived and/or modified CDS sequence (opt2) from neuraminidase__InfluenzaA__AIW60714
augaaccccaaccagaagaucaucaccaucggcuccgucucccucaccaucuccaccaucugcuucuucaugcagaucgccauccucaucaccaccgucacccuccacuucaagcaguacgaguucuccuccccccccaacaaccaggucaugcucugcgagcccaccaucaucgagcgcaacaucaccgagaucgucuaccucaccaacaccaccaucgagaaggagaucugccccaagcucgccgaguaccgcaacugguccaagccccagugcgacaucaccggcuucgcccccuucuccaaggacaacuccauccgccucuccgccggcggcgacaucugggucacccgcgagcccuacgucuccugcgaccccgacaagugcuaccaguucgcccucggccagggcaccacccucaacaacguccacuccaacgacaccguccacgaccgcacccccuaccgcacccuccucaugaacgagcucggcguccccuuccaccucggcaccaagcaggucugcaucgccugguccuccuccuccugccacgacggcaaggccuggcuccacgucugcgucaccggcgacgacaagaacgccaccgccuccuucaucuacaacggccgccucgucgacuccaucgucuccugguccaaggagauccuccgcacccaggaguccgagugcgucugcaucaacggcaccugcaccgucgucaugaccgacggcuccgccuccggcaaggccgacaccaagauccucuucaucgaggagggcaagaucguccacaccuccacccucuccggcuccgcccagcacgucgaggagugcuccugcuacccccgcuaccccggcguccgcugcgucugccgcgacaacuggaagggcuccaaccgccccaucgucgacaucaacaucaaggacuacuccaucgccuccuccuacgucugcuccggccucgucggcgacaccccccgcaagaacgacuccuccuccuccucccacugccucgaccccaacaacgaggagggcggccacggcgucaagggcugggccuucgacgacggcaacgacgucuggaugggccgcaccaucuccgagaagcuccgcuccggcuacgagaccuucaaggucaucgagggcugguccaaccccaacuccaagcuccagaucaaccgccaggucaucgucggccgcggcaaccgcuccggcuacuccggcaucuucuccgucgagggcaaguccugcaucaaccgcugcuucuacgucgagcucauccgcggccgcaaggaggagaccgagguccucuggaccuccaacuccaucgucgucuucugcggcaccuccggcaccuacggcaccggcuccuggcccgacggcgccgacaucaaccucaugcccaucuga

SEQ ID NO: 121866 - RNA, 1410 nt, Artificial Sequence
  derived and/or modified CDS sequence (opt2) from neuraminidase__InfluenzaA__AIW60715
augaaccccaaccagaagaucaucaccaucggcuccgucucccucaccaucuccaccaucugcuucuucaugcagaucgccauccucaucaccaccgucacccuccacuucaagcaguacgaguucaacuccccccccaacaaccaggucaugcucugcgagcccaccaucaucgagcgcaacaucaccgagaucgucuaccucaccaacaccaccaucgagaaggagaucugccccaagcucgccgaguaccgcaacugguccaagccccagugcgacaucaccggcuucgcccccuucuccaaggacaacuccauccgccucuccgccggcggcgacaucugggucacccgcgagcccuacgucuccugcgaccccgacaagugcuaccaguucgcccucggccagggcaccacccucaacaacguccacuccaacgacaccguccgcgaccgcacccccuaccgcacccuccucaugaacgagcucggcguccccuuccaccucggcaccaagcaggucugcaucgccugguccuccuccuccugccacgacggcaaggccuggcuccacgucugcaucaccggcgacgacaagaacgccaccgccuccuucaucuacaacggccgccucgucgacuccaucgucuccugguccaagaagauccuccgcacccaggaguccgagugcgucugcaucaacggcaccugcaccgucgucaugaccgacggcuccgccuccggcaaggccgacaccaagauccucuucaucgaggagggcaagaucguccacaccuccacccucuccggcuccgcccagcacgucgaggagugcuccugcuacccccgcuaccccggcguccgcugcgucugccgcgacaacuggaagggcuccaaccgccccaucgucgacaucaacaucaaggaccacuccaucgucuccuccuacgucugcuccggccucgucggcgacaccccccgcaagaacgacuccuccuccuccucccacugccucgaccccaacaacgaggagggcggccacggcgucaagggcugggccuucgacgacggcaacgacgucuggaugggccgcaccaucuccgagaagucccgccucggcuacgagaccuucaaggucaucgagggcugguccaaccccaaguccaagcuccagaucaaccgccaggucaucgucgaccgcggcaaccgcuccggcuacuccggcaucuucuccgucgagggcaaguccugcaucaaccgcugcuucuacgucgagcucauccgcggccgcaaggaggagaccgagguccucuggaccuccaacuccaucgucgucuucugcggcaccuccggcaccuacggcaccggcuccuggcccgacggcgccgacaucaaccucaugcccaucuga

SEQ ID NO: 121867 - RNA, 1410 nt, Artificial Sequence; identical to SEQ ID NO: 112547
  derived and/or modified CDS sequence (opt2) from neuraminidase__InfluenzaA__AIW60716

SEQ ID NO: 121868 - RNA, 1410 nt, Artificial Sequence
  derived and/or modified CDS sequence (opt2) from neuraminidase__InfluenzaA__AIY54970
augaaccccaaccagaagaucaucaccaucggcuccgucucccucaccaucuccaccaucugcuucuucaugcagaucgccauccucaucaccaccgucacccuccacuucaagcaguacgaguucaacuccccccccaacaaccaggucaugcucugcgagcccaccaucaucgagcgcaacaucaccgagaucgucuaccucaccaacaccaccaucgagaaggagaucugccccaagcucgccgaguaccgcaacugguccaagccccagugcaacaucaccggcuucgcccccuucuccaaggacaacuccauccgccucuccgccggcggcgacaucugggucacccgcgagcccuacgucuccugcgaccccgacaagugcuaccaguucgcccucggccagggcaccacccucaacaacguccacuccaacgacaccguccacgaccgcacccccuaccgcacccuccucaugaacgagcucggcguccccuuccaccucggcaccaagcaggucugcaucgccugguccuccuccuccugccacgacggcaaggccuggcuccacgucugcgucaccggcgacgacgagaacgccaccgccuccuucaucuacaacggccgccucgucgacuccaucgucuccugguccaagaagauccuccgcacccaggaguccgagugcgucugcaucaacggcaccugcaccgucgucaugaccgacggcuccgccuccggcaaggccgacaccaagauccucuucaucgaggagggcaagaucguccacaccuccacccucuccggcuccgcccagcacgucgaggagugcuccugcuacccccgcuaccccggcguccgcugcgucugccgcgacaacuggaagggcuccaaccgccccaucgucgacaucaacaucaaggacuacuccaucgucuccuccuacgucugcuccggccucgucggcgacaccccccgcaagaccgacuccuccuccuccucccacugccucgaccccaacaacgaggagggcggccacggcgucaagggcugggccuucgacgacggcaacgaccucuggaugggccgcaccaucucccagaaccuccgcuccggcuacgagaccuucaaggucaucgagggcugguccaaccccaacuccaagcuccagaucaaccgccaggucaucgucgaccgcggcaaccgcuccggcuacuccggcaucuucuccgucgagggcaaguccugcaucaaccgcugcuucuacgucgagcucauccgcggccgcaagcaggagaccgagguccucuggaccuccaacuccaucgucgucuucugcggcaccuccggcaccuacggcaccggcuccuggcccgacggcgccgacaucaaccucaugcccaucuga

SEQ ID NO: 121869 - RNA, 1410 nt, Artificial Sequence
  derived and/or modified CDS sequence (opt2) from neuraminidase__InfluenzaA__AIY54974
augaaccccaaccagaagaucaucaccaucggcuccgucucccucaccaucuccaccaucugcuucuucaugcagaucgccauccucaucaccaccgucacccuccacuucaagcaguacgaguucaacuccccccccaacaaccaggucaugcucugcgagcccaccaucaucgagcgcaacaucaccgagaucgucuaccucaccaacaccaccaucgagaaggagaucugccccaagcucgccgaguaccgcaacugguccaagccccagugcgacaucaccggcuucgcccccuucuccaaggacaacuccauccgccucuccgccggcggcgacaucugggucacccgcgagcccuacgucuccugcgaccccgacaagugcuaccaguucgcccucggccagggcaccacccucaacaacguccacuccaacgacaccguccacgaccgcacccccuaccgcacccuccucauguccgagcucggcguccccuuccaccucggcaccaagcaggucugcaucgccugguccuccuccuccugccacgacggcaaggccuggcuccacgucugcgucaccggcgacgacaagaacgccaccgccuccuucaucuacaacggccgccucgucgacuccaucgucuccugguccaagaagauccuccgcacccaggaguccgagugcgucugcaucaacggcaccugcaccgucgucaugaccgacggcuccgccuccggcaaggccgacaccaagauccucuucaucgaggagggcaagaucguccacaccuccacccucuccggcuccgcccagcacgucgaggagugcuccugcuacccccgcuaccccggcguccgcugcgucugccgcgacaacuggaagggcuccaaccgccccaucgucgacaucaacaucaaggacuacuccaucgucuccuccuacgucugcuccggccucgucggcgacaccccccgcaagaacgacuccuccuccuccucccacugccucgaccccaacaacgaggagggcggccacggcgucaagggcugggccuucgacgacggcaacgacgucuggaugggccgcaccaucuccgagaagcuccgcuccggcuacgagaccuucaaggucaucgagggcugguccaaccccaacuccaagcuccagaucaaccgccaggucaaggucgaccgcggcaaccgcuccggcuacuccggcaucuucuccgucgagggcaaguccugcaucaaccgcugcuucuacgucgagcucauccgcggccgcaaggaggagaccaagguccucuggaccuccaacuccaucgucgucuucugcggcaccuccggcaccuacggcaccggcuccuggcccgacggcgccgacaucaaccucaugcccaucuga

SEQ ID NO: 121870 - RNA, 1410 nt, Artificial Sequence
  derived and/or modified CDS sequence (opt2) from neuraminidase__InfluenzaA__AIY54982
augaaccccaaccagaagaucaucaccaucggcuccgucucccucaccaucuccaccaucugcuucuucaugcagaucgccauccucaucaccaccgucacccuccacuucaagcaguacgaguucaacuccccccccaacaaccaggucaugcucugcgagcccaccaucaucgagcgcaacaucaccgagaucgucuaccucaccaacaccaccaucgagaaggagaucugccccaagcucgccgaguaccgcaacugguccaagccccagugcgacaucaccggcuucgcccccuucuccaaggacaacuccauccgccucuccgccggcggcgacaucugggucacccgcgagcccuacgucuccugcgaccccgacaagugcuaccaguucgcccucggccagggcaccacccucaacaacguccacuccaacgacaccguccacgaccgcacccccuaccgcacccuccucaugaacgagcucggcguccccuuccaccucggcaccaagcaggucugcaucgccugguccuccuccuccugccacgacggcaaggccuggcuccacgucugcgucaccggcgacgacaagaacgccaccgccuccuucaucuacaacggccgccucgucgacuccaucgucuccugguccaaggagauccuccgcacccaggaguccgagugcgucugcaucaacggcaccugcaccgucgucaugaccgacggcuccgccuccggcaaggccgacaccaagauccucuucaucgaggagggcaagaucguccacaccuccacccucuccggcuccgcccagcacgucgaggagugcuccugcuacccccgcuaccccggcguccgcugcgucugccgcgacaacuggaagggcuccaaccgccccaucgucgacaucaacaucaaggacuacuccaucgucuccuccuacgucugcuccggccucgucggcgacaccccccgcaagaacgacuccuccuccuccucccacugccucgaccccaacaacgaggagggcggccacggcgucaagggcugggccuucgacgacggcaacgacgucuggaugggccgcaccaucuccgagaaguuccgcuccggcuacgagaccuucaaggucaucgagggcugguccaaccccaacuccaagcuccagaucaaccgccaggucaucgucgaccgcggcaaccgcuccggcuacuccggcaucuucuccgucgagggcaaguccugcaucaaccgcugcuucuacgucgagcucauccgcggccgcaaggaggagaccgagguccucuggaccuccaacuccaucgucgucuucugcggcaccuccggcaccuacggcaccggcuccuggcccgacggcgccgacaucaaccucaugcccaucuga

SEQ ID NO: 121871 - RNA, 1410 nt, Artificial Sequence
  derived and/or modified CDS sequence (opt2) from neuraminidase__InfluenzaA__AIY54990
augaaccccaaccagaagaucaucaccaucggcuccgucucccucaccaucuccaccaucugcuucuucaugcagaucgccauccucaucaccaccgucacccuccacuucaagcaguacgaguucuccuccccccccaacaaccaggucaugcucugcgagcccaccaucaucgagcgcaacaucaccgagaucgucuaccucaccaacaccaccaucgagaaggagaucugccccaagcucgccgaguaccgcaacugguccaagccccagugcggcaucaccggcuucgcccccuucuccaaggacaacuccauccgccucuccgccggcggcgacaucugggucacccgcgagcccuacgucuccugcgaccccgacaagugcuaccaguucgcccucggccagggcaccacccucaacaacguccacuccaacgacaccguccacgaccgcacccccuaccgcacccuccucaugaacgagcucggcguccccuuccaccucggcaccaagcaggucugcaucgccugguccuccuccuccugccacgacggcaaggccuggcuccacgucugcgucaccggcgacgacaagaacgccaccgccuccuucaucuacaacggccgccucgucgacuccaucgucuccugguccaaggagauccuccgcacccaggaguccgagugcgucugcaucaacggcaccugcaccgucgucaugaccgacggcuccgccuccggcaaggccgacaccaagauccucuucaucgaggagggcaagaucguccacaccuccacccucuccggcuccgcccagcacgucgaggagugcuccugcuacccccgcuaccccggcguccgcugcgucugccgcgacaacuggaagggcuccaaccgccccaucgucgacaucaacaucaaggacuacuccaucgucucccgcuacgucugcuccggccucgucggcgacaccccccgcaagaacgacuccuccuccuccucccacugccucgaccccaacaacgaggagggcggccacggcgucaagggcugggccuucgacgacggcaacgacgucuggaugggccgcaccaucuccgagaagucccgcuccggcuacgagaccuucaaggucaucgagggcugguccaaccccaacuccaagcuccagaucaaccgccaggucaucgucgaccgcggcaaccgcuccggcuacuccggcaucuucuccgucgagggcaaguccugcaucaaccgcugcuucuacgucgagcucauccgcggccgcaaggaggagaccgagguccucuggaccuccaacuccaucgucgucuucugcggcaccuccggcaccuacggcaccggcuccuggcccgacggcgccgacaucaaccucaugcccaucuga

SEQ ID NO: 121872 - RNA, 1401 nt, Artificial Sequence
  derived and/or modified CDS sequence (opt2) from neuraminidase__InfluenzaA__AJD78177
augaaccccaaccagaagaucaucgccaucggcuccgucucccucaucaucgccgucaucugccuccucaugcagaucgccauccucaccaccaccaugacccuccacuucaugcagaacgagugcuccaaccccuccaacaaccaggucaugcccugcgagcccaucaucaucgagcgcaacaccguccaccucaacaacaccaccaucgagcgcgagaucugccccaaggccgccgaguacaagaacugguccaagccccagugccagaucaccggcuucgcccccuucuccaaggacaacuccauccgccucuccgccggcggcgacaucugggucacccgcgagcccuacgucuccugcucccucgacaagugcuaccaguucgcccucggccagggcaccacccucaagaacaagcacuccaacggcaccacccacgaccgcaccccccaccgcacccuccucaugaacgagcucggcguccccuuccaccucggcaccaagcaggucugcaucgccugguccuccuccuccugcuacgacggcaaggccuggcuccacaucugcgucaccggcgacgacaagaacgccaccgccuccaucaucuacgacggcaugcucgucgacuccaucggcuccugguccaagaacauccuccgcacccaggaguccgagugcgucugcaucaacggcaccugcgccgucgucaugaccgacggcuccgccuccggcaaggccgacacccgcguccucuucauccgcgagggcaagaucaucaacaucuccccccucuccggcuccgcccagcacgucgaggagugcuccugcuacccccgcuaccccgagguccgcugcgucugccgcgacaacuggaagggcuccaaccgccccauccucuacaucaacauggccgacuacuccaucgaguccuccuacgucugcuccggccucgucggcgacaccccccgcaacgacgacuccuccuccuccuccaacugccgcgaccccaacaacgagcgcggcgcccccggcgucaagggcugggccuucgacgacggcaacgacgucuggaugggccgcaccaucaagaacggcucccgcuccggcuacgagaccuuccgcgucgucaacggcuggaccauggccaacuccaagucccagaucaaccgccaggucaucgucgacuccgacgacugguccggcuacuccggcaucuucuccgucgagggcaagaagugcaucaaccgcugcuucuacgucgagcucauccgcggccgcccccaggagccccgcgucugguggaccuccaacuccaucaucgucuucugcggcaccuccggcaccuacggcaccggcuccuggcccgacggcgccaacaucaacuucaugcccaucuga

SEQ ID NO: 121873 - RNA, 1401 nt, Artificial Sequence
  derived and/or modified CDS sequence (opt2) from neuraminidase__InfluenzaA__AJD78189
augaaccccaaccagaagaucaucgccaucggcuccgucucccucaucaucgccaucaucugccuccucaugcagaucgccauccucaccaccaccaugacccuccacuuccgccagaacgagugcaacaacuccuccaacaaccaggucaugcccugcgagcccaucaucaucgagcgcaacaccguccaccucaacuccaccaccaucgagcgcgagaucugccccaaggucgccgaguacaagaacugguccaagccccagugccagaucaccggcuucgcccccuucuccaaggacaacuccauccgccucuccgccggcggcgacaucugggucacccgcgagcccuacgucuccugcucccucgacaagugcuaccaguucgcccucggccagggcaccacccucaagaacaagcacuccaacggcaccacccacgaccgcaccucccaccgcacccuccucaugaacgagcucggcguccccuuccaccucggcaccaagcaggucugcaucgccugguccuccuccuccugcuacgacggcaaggccuggcuccacaucugcgucaccggcgacgacaagaacgccaccgccuccaucaucuacaacggcaugcucgucgacuccaucggcuccugguccaagaacauccuccgcacccaggaguccgagugcgucugcaucaacggcaccugcgccgucgucaugaccgacggcuccgccuccggcaaggccgacacccgcguccucuucauccgcgagggcaagaucaucaacaucuccccccucuccggcuccgcccagcacgucgaggagugcuccugcuacccccgcuaccccgagguccgcugcgucugccgcgacaacuggaagggcuccaaccgccccauccucuacaucaacauggccgacuacuccaucgaguccuccuacgucugcuccggccucgucggcgacaccccccgcaacgacgacuccuccuccuccuccaacugcaaggaccccaacuccgagcgcggcgcccccggcgucaagggcugggccuucgacgacggcaacgacgucuggaugggccgcaccaucaagaacggcucccgcuccggcuacgagaccuuccgcguccucaacggcuggaccgucgccaacuccaagucccagaucaaccgccaggucaucgucgacuccgacgacugguccggcuacuccggcaucuucuccgucgagggcaagaagugcaucaaccgcugcuucuacgucgagcucauccgcggccgcccccaggagccccgcgucugguggaccuccaacuccaucaucgucuucugcggcaccuccggcaccuacggcaccggcuccuggcccgacggcgccaacaucaacuucaugcccaucuga

SEQ ID NO: 121874 - RNA, 1401 nt, Artificial Sequence
  derived and/or modified CDS sequence (opt2) from neuraminidase__InfluenzaA__AJD78201
augaaccccaaccagaagaucaccgccaucggcuccgucucccucaucaucgccaucaucugccuccucaugcagaucgccauccucaccaccaccaugacccuccacuuccgccagaaggagugcuccaaccccuccaacaaccaggucaugcccugcgagcccaucaucaucgagcgcaacaccguccaccucaacuccaccaccaucgagcgcgagaucugccccaaggucgccgaguacaagaacugguccaagccccagugccucaucaccggcuucgcccccuucuccaaggacaacuccauccgccucuccgccggcggcgacaucugggucacccgcgagcccuacgucuccugcucccccgacaagugcuaccaguucgcccucggccagggcaccacccucaagaacaagcacuccaacggcaccacccacgaccgcaccccccaccgcacccuccucaugaacgagcucggcguccccuuccaccucggcaccaagcaggucugcaucgccugguccuccuccuccugcuacgacggcaaggccuggcuccacaucugcgucaccggcgacgacaagaacgccaccgccuccaucaucuacgacggcaugcucgucgacuccaucggcuccugguccaagaacauccuccgcacccaggaguccgagugcgucugcaucaacggcaccugcgccgucgucaugaccgacggcuccgccuccggcgucgccgacacccgcguccucuucauccgcgagggcaagaucaucaacauccgcccccucuccggcuccgcccagcacgucgaggagugcuccugcuacccccgcuaccccgagguccgcugcgucugccgcgacaacuggaagggcuccaaccgccccaucaucuacaucaacauggccgacuacuccaucgaguccuccuacgucugcuccggccucgucggcgacaccccccgcaacgacgacuccuccuccuccuccaacugccgcgaccccaacaacgagcgcggcgcccccggcgucaagggcugggccuucgacgacggcaacgacgucuggaugggccgcaccaucaagaacggcucccgcuccggcuacgagaccuuccgcgucaucaacggcuggaccauggccaacuccaagucccagaucaaccgccaggucaucgucgacuccgacgacugguccggcuacuccggcaucuucuccgucgagggcaagaagugcaucaaccgcugcuucuacgucgagcucauccgcggccgcccccaggagccccgcgucugguggaccuccaacuccaucaucgucuucugcggcaccuccggcaccuacggcaccggcuccuggcccgacggcgccaacaucaacuucaugcccaucuga

SEQ ID NO: 121875 - RNA, 1401 nt, Artificial Sequence
  derived and/or modified CDS sequence (opt2) from neuraminidase__InfluenzaA__AJD78213
augaaccccaaccagaagaucaccgccaucggcuccgucucccucaucaucgccaucaucugccucuucaugcagaucgccauccucaccaccaccaugacccuccacuuccgccagaaggagugcuccaaccccuccaacaaccaggucaugcccugcgagcccaucaucaucgagcgcaacaccguccaccucaacuccaccaccaucgagcgcgagaucugccccaaggucgccgaguacaagaacugguccaagccccagugccucaucaccggcuucgcccccuucuccaaggacaacuccauccgccucuccgccggcggcgacaucugggucacccgcgagcccuacgucuccugcucccccgacaagugcuaccaguucgcccucggccagggcaccacccucaagaacaagcacuccaacggcaccacccacgaccgcaccccccaccgcacccuccucaugaacgagcucggcguccccuuccaccucggcaccaagcaggucugcaucgccugguccuccuccuccugcuacgacggcaaggccuggcuccacaucugcgucaccggcgacgacaagaacgccaccgccuccaucaucuacgacggcaugcucgucgacuccaucggcuccugguccaagaacauccuccgcacccaggaguccgagugcgucugcaucaacggcaccugcgccgucgucaugaccgacggcuccgccuccggcgucgccgacacccgcguccucuucauccgcgagggcaagaucaucaacauccgcccccucuccggcuccgcccagcacgucgaggagugcuccugcuacccccgcuaccccgagguccgcugcgucugccgcgacaacuggaagggcuccaaccgccccaucaucuacaucaacauggccgacuacuccaucgaguccuccuacgucugcuccggccucgucggcgacaccccccgcaacgacgacuccuccuccuccuccaacugccgcgaccccaacaacgagcgcggcgcccccggcgucaagggcugggccuucgacgacggcaacgacgucuggaugggccgcaccaucaagaacggcucccgcuccggcuacgagaccuuccgcgucaucaacggcuggaccauggccaacuccaagucccagaucaaccgccaggucaucgucgacuccgacgacugguccggcuacuccggcaucuucuccgucgagggcaagaagugcaucaaccgcugcuucuacgucgagcucauccgcggccgcccccaggagccccgcgucugguggaccuccaacuccaucaucgucuucugcggcaccuccggcaccuacggcaccggcuccuggcccgacggcgccaacaucaacuucaugcccaucuga

SEQ ID NO: 121876 - RNA, 1410 nt, Artificial Sequence; identical to SEQ ID NO: 118958
  derived and/or modified CDS sequence (opt2) from neuraminidase__InfluenzaA__AJI80140

SEQ ID NO: 121877 - RNA, 1410 nt, Artificial Sequence; identical to SEQ ID NO: 118958
  derived and/or modified CDS sequence (opt2) from neuraminidase__InfluenzaA__AJI80152

SEQ ID NO: 121878 - RNA, 1410 nt, Artificial Sequence; identical to SEQ ID NO: 121734
  derived and/or modified CDS sequence (opt2) from neuraminidase__InfluenzaA__AJI80164

SEQ ID NO: 121879 - RNA, 1410 nt, Artificial Sequence; identical to SEQ ID NO: 121673
  derived and/or modified CDS sequence (opt2) from neuraminidase__InfluenzaA__AJI80175

SEQ ID NO: 121880 - RNA, 1410 nt, Artificial Sequence; identical to SEQ ID NO: 121673
  derived and/or modified CDS sequence (opt2) from neuraminidase__InfluenzaA__AJI80187

SEQ ID NO: 121881 - RNA, 1410 nt, Artificial Sequence; identical to SEQ ID NO: 121673
  derived and/or modified CDS sequence (opt2) from neuraminidase__InfluenzaA__AJI80199

SEQ ID NO: 121882 - RNA, 1410 nt, Artificial Sequence; identical to SEQ ID NO: 121673
  derived and/or modified CDS sequence (opt2) from neuraminidase__InfluenzaA__AJI80211

SEQ ID NO: 121883 - RNA, 1410 nt, Artificial Sequence; identical to SEQ ID NO: 119907
  derived and/or modified CDS sequence (opt2) from neuraminidase__InfluenzaA__AJI80223

SEQ ID NO: 121884 - RNA, 1410 nt, Artificial Sequence; identical to SEQ ID NO: 121673
  derived and/or modified CDS sequence (opt2) from neuraminidase__InfluenzaA__AJI80235

SEQ ID NO: 121885 - RNA, 1410 nt, Artificial Sequence; identical to SEQ ID NO: 119907
  derived and/or modified CDS sequence (opt2) from neuraminidase__InfluenzaA__AJI80247

SEQ ID NO: 121886 - RNA, 1410 nt, Artificial Sequence; identical to SEQ ID NO: 121692
  derived and/or modified CDS sequence (opt2) from neuraminidase__InfluenzaA__AJI80259

SEQ ID NO: 121887 - RNA, 1410 nt, Artificial Sequence; identical to SEQ ID NO: 118182
  derived and/or modified CDS sequence (opt2) from neuraminidase__InfluenzaA__AJI80271

SEQ ID NO: 121888 - RNA, 1410 nt, Artificial Sequence; identical to SEQ ID NO: 121673
  derived and/or modified CDS sequence (opt2) from neuraminidase__InfluenzaA__AJI80283

SEQ ID NO: 121889 - RNA, 1410 nt, Artificial Sequence
  derived and/or modified CDS sequence (opt2) from neuraminidase__InfluenzaA__AJI80306
augaaccccaaccagaagaucaucaccaucggcuccgucucccucaccaucuccaccaucugcuucuucaugcagaucgccauccucaucaccaccgucacccuccacuucaagcaguacgaguucaacuccccccccaacaaccaggucaugcucugcgagcccaccaucaucgagcgcaacaucaccgagaucgucuaccucaccaacaccaccaucgagaaggagaucugccccaagcccgccgaguaccgcaacugguccaagccccagugcggcaucaccggcuucgcccccuucuccaaggacaacuccauccgccucuccgccggcggcgacaucugggucacccgcgagcccuacgucuccugcgaccccgacaagugcuaccaguucgcccucggccagggcaccacccucaacaacguccacuccaacaacaccguccucgaccgcacccccuaccgcacccuccucaugaacgagcucggcguccccuuccaccucggcaccaagcaggucugcaucgccugguccuccuccuccugccacgacggcaaggccuggcuccacgucugcaucaccggcgacgacaagaacgccaccgccuccuucaucuacaacggccgccucgucgacuccgucgucuccugguccaaggagauccuccgcacccaggaguccgagugcgucugcaucaacggcaccugcaccgucgucaugaccgacggcuccgccuccggcaaggccgacaccaagauccucuucaucgaggagggcaagaucguccacaccuccacccucuccggcuccgcccagcacgucgaggagugcuccugcuacccccgcuaccccggcguccgcugcgucugccgcgacaacuggaagggcuccaaccgccccaucgucgacaucaacaucaaggaccacuccaucgucuccuccuacgucugcuccggccucgucggcgacaccccccgcaagaacgacuccuccuccuccucccacugccucgaccccaacaacgaggagggcggccacggcgucaagggcugggccuucgacgacggcaacgacgucuggaugggccgcaccaucaacgagaccucccgccucggcuacgagaccuucaaggucaucgagggcugguccaaccccaaguccaagcuccagaucaacaagcaggucaucgucgaccgcggcgaccgcuccggcuacuccggcaucuucuccgucgagggcaaguccugcaucaaccgcugcuucuacgucgagcucauccgcggccgcaaggaggagaccgagguccucuggaccuccaacuccaucgucgucuucugcggcaccuccggcaccuacggcaccggcuccuggcccgacggcgccgaccucaaccucaugcccaucuga

SEQ ID NO: 121890 - RNA, 1410 nt, Artificial Sequence
  derived and/or modified CDS sequence (opt2) from neuraminidase__InfluenzaA__AJI80318
augaaccccaaccagaagaucaucaccaucggcuccgucugcaugaccaucggcauggccaaccucauccuccagaucggcaacaucaucuccaucuggaucucccacuccauccagcucggcaaccagucccagaucgaggccugcaaccagaacgucaucaccuacgagaacaacaccugggucaaccagaccuacgucaacaucuccaacaccaacuucgccaccggccaguccgucgucuccgucaagcucgccggcaacuccucccucugccccgucuccggcugggccaucuacuccaaggacaacuccguccgcaucggcuccaagggcgacgucuucgucauccgcgagcccuucaucuccugcuccccccucgagugccgcaccuucuuccucacccagggcgcccuccucaacgacaagcacuccaacggcaccaucaaggaccgcucccccuaccgcacccucauguccugccccaucggcgagguccccucccccuacaacucccgcuucgaguccgucgccugguccgccuccgccugccacgacggcaucaacuggcucaccaucggcaucuccggccccgacuccggcgccgucgccguccucaaguacaacggcaucaucaccgacaccaucaaguccuggaagaacaacauccuccgcacccaggaguccgagugcgccugcgucaacggcuccugcuucaccaucaugaccgacggccccuccgacggccaggccuccuacaagaucuuccgcaucgagaagggcaagaucgucaaguccgucgagaugaacgcccccaacuaccacuacgaggagugcuccugcuaccccgacuccuccgagaucaccugcgucugccgcgacaacuggcacggcuccaaccgccccugggucuccuucaaccagaaccucgaguaccagaucggcuacaucugcuccggcgucuucggcgacaacccccgccccaacgacaagaccggcuccugcggccccgucuccuccaacggcgccaacggcgucaagggcuucuccuucaaguacggcaacggcgucuggaucggccgcaccaaguccaucuccucccgcaagggcuucgagaugaucugggaccccaacggcuggaccggcaccgacaacaacuucuccaucaagcaggacaucgucggcaucaacgagugguccggcuacuccggcuccuucguccagcaccccgagcucaccggccucgacugcauccgccccugcuucugggucgagcucauccgcggccgccccaaggagaacaccaucuggaccuccggcuccuccaucuccuucugcggcgucaacuccgacaccgucggcugguccuggcccgacggcgccgagcuccccuucaccaucgacaaguga

SEQ ID NO: 121891 - RNA, 1410 nt, Artificial Sequence
  derived and/or modified CDS sequence (opt2) from neuraminidase__InfluenzaA__AJI80329
augaaccccaaccagaagaucaucaccaucggcuccgucugcaugaccaucggcauggccaaccucauccuccagaucggcaacaucaucuccaucuggaucucccacuccauccagcucggcaaccagucccagaucgagaccugcaaccaguccgucaucaccuacgagaacaacaccugggucaaccagaccuacgucaacaucuccaacaccaacuucgccgccggccaguccgucgucuccgucaagcucgccggcaacuccucccucugccccgucuccggcugggccaucuacuccaaggacaacuccguccgcaucggcuccaagggcgacgucuucgucauccgcgagcccuucaucuccugcuccccccucgagugccgcaccuucuuccucacccagggcgcccuccucaacgacaagcacuccaacggcaccaucaaggaccgcucccccuaccgcacccucauguccugccccaucggcgagguccccucccccuacaacucccgcuucgaguccgucgccugguccgccuccgccugccacgacggcaucaacuggcucaccaucggcaucuccggccccgacuccggcgccgucgccguccucaaguacaacggcaucaucaccgacaccaucaaguccuggaagaacaacauccuccgcacccaggaguccgagugcgccugcgucaacggcuccugcuucaccaucaugaccgacggccccuccgacggccaggccuccuacaagaucuuccgcaucgagaagggcaagaucgucaaguccgucgagaugaacgcccccaacuaccacuacgaggagugcuccugcuaccccgacuccuccgagaucaccugcgucugccgcgacaacuggcacggcuccaaccgccccugggucuccuucaaccagaaccucgaguaccagaucggcuacaucugcuccggcgucuucggcgacaacccccgccccaacgacaagaccggcuccugcggccccgucuccuccaacggcgccaacggcgucaagggcuucuccuucaaguacggcaacggcgucuggaucggccgcaccaaguccaucuccucccgcaagggcuucgagaugaucugggaccccaacggcuggaccggcaccgacaacaacuucuccaucaagcaggacaucgucggcaucaacgagugguccggcuacuccggcuccuucguccagcaccccgagcucaccggccucgacugcauccgccccugcuucugggucgagcucauccgcggccgccccaaggagaacaccaucuggaccuccggcuccuccaucuccuucugcggcgucaacuccgacaccgucggcugguccuggcccgacggcgccgagcuccccuucaccaucgacaaguga

SEQ ID NO: 121892 - RNA, 1410 nt, Artificial Sequence
  derived and/or modified CDS sequence (opt2) from neuraminidase__InfluenzaA__AJI80340
augaaccccaaccagaagaucaucaccaucggcuccgucugcaugaccaucggcauggccaaccucauccuccagaucggcaacaucaucuccaucuggaucucccacuccauccagcucggcaaccagucccagaucgagaccugcaaccaguccgucaucaccuacgagaacaacaccugggucaaccagaccuacgucaacaucuccaacaccaacuucgccgccggccaguccgucgucuccgucaagcucgccggcaacuccucccucugccccgucuccggcugggccaucuacuccaaggacaacuccauccgcaucggcuccaagggcgacgucuucgucauccgcgagcccuucaucuccugcuccccccucgagugccgcaccuucuuccucacccagggcgcccuccucaacgacaagcacuccaacggcaccaucaaggaccgcucccccuaccgcacccucauguccugccccaucggcgagguccccucccccuacaacucccgcuucgaguccgucgccugguccgccuccgccugccacgacggcaucaacuggcucaccaucggcaucuccggccccgacuccggcgccgucgccguccucaaguacaacggcaucaucaccgacaccaucaaguccuggaagaacaacauccuccgcacccaggaguccgagugcgccugcgucaacggcuccugcuucaccaucaugaccgacggccccuccgacggccaggccuccuacaagaucuuccgcaucgagaagggcaagaucgucaaguccgucgagaugaacgcccccaacuacuacuacgaggagugcuccugcuaccccgacuccuccgagaucaccugcgucugccgcgacaacuggcacggcuccaaccgccccugggucuccuucaaccagaaccucgaguaccagaucggcuacaucugcuccggcaucuucggcgacaacccccgccccaacgacaagaccggcuccugcggccccgucuccuccaacggcgccaacggcgucaagggcuucuccuucaaguacggcaacggcgucuggaucggccgcaccaaguccaucuccucccgcaagggcuucgagaugaucugggaccccaacggcuggaccggcaccgacaacaacuucuccaucaagcaggacaucgucggcaucaacgagugguccggcuacuccggcuccuucguccagcaccccgagcucaccggccucgacugcauccgccccugcuucugggucgagcucauccgcggccgccccaaggagaacaccaucuggaccuccggcuccuccaucuccuucugcggcgucaacuccgacaccgucggcugguccuggcccgacggcgccgagcuccccuucaccaucgacaaguga

SEQ ID NO: 121893 - RNA, 1410 nt, Artificial Sequence; identical to SEQ ID NO: 118182
  derived and/or modified CDS sequence (opt2) from neuraminidase__InfluenzaA__AJI80351

SEQ ID NO: 121894 - RNA, 1410 nt, Artificial Sequence
  derived and/or modified CDS sequence (opt2) from neuraminidase__InfluenzaA__AJI80363
augaaccccaaccagaagaucaucaccaucggcuccgucucccucaccaucuccaccaucugcuucuucaugcagaucgccauccucaucaccaccgucacccuccacuucaagcaguacgaguucaacucccuccccaacaaccaggucaugcucugcgagcccaccaucaucgagcgcaacaucaccgagaucgucuaccucaccaacaccaccaucgagaaggagaucugccccaagcccgccgaguaccgcaacugguccaagccccagugcggcaucaccggcuucgcccccuucuccaaggacaacuccauccgccucuccgccggcggcgacaucugggucacccgcgagcccuacgucuccugcgaccccgacaagugcuaccaguucgcccucggccagggcaccacccucaacaacguccacuccaacaacaccgcccgcgaccgcacccccuaccgcacccuccucaugaacgagcucggcguccccuuccaccucggcaccaagcaggucugcaucgccugguccuccuccuccugccacgacggcaaggccuggcuccacgucugcaucaccggcgacgacaagaacgccaccgccuccuucaucuacaacggccgccucgucgacuccgucgucuccugguccaaggagauccuccgcacccaggaguccgagugcgucugcaucaacggcaccugcaccgucgucaugaccgacggcuccgccuccggcaaggccgacaccaagauccucuucaucgaggagggcaagaucguccacaccuccacccucuccggcggcgcccagcacgucgaggagugcuccugcuacccccgcuaccccggcguccgcugcgucugccgcgacaacuggaagggcuccaaccgccccaucgucgacaucaacaucaaggaccacuccaucgucuccuccuacgucugcuccggccucgucggcgacaccccccgcaagaacgacuccuccuccuccucccacugccucaaccccaacaacgaggagggcggccacggcgucaagggcugggccuucgacgacggcaacgacgucuggaugggccgcaccaucaacgagaccucccgccucggcuacgagaccuucaaggucaucgagggcugguccaaccccaaguccaagcuccagaucaaccgccaggucaucgucgaccgcggcgaccgcuccggcuacuccggcaucuucuccgucgagggcaaguccugcaucaaccgcugcuucuacgucgagcucauccgcggccgcaaggaggagaccgagguccucuggaccuccaacuccaucgucgucuucugcggcaccuccggcaccuacggcaccggcuccuggcccgacggcgccgaccucaaccucaugcccaucuga

SEQ ID NO: 121895 - RNA, 1410 nt, Artificial Sequence
  derived and/or modified CDS sequence (opt2) from neuraminidase__InfluenzaA__AJI80375
augaaccccaaccagaagaucaucaccaucggcuccgucucccucaccaucuccaccaucugccucuucaugcagaucgccauccucaucaccaccgucacccuccacuucaagcagcacgaguucaacuccccccccaacaaccaggucaugcucugcgagcccaccaucaucgagcgcaacaucaccgagaucgucuaccucaccaacaccaccaucgagaaggagaucugccccaagcccgccgaguaccgcaacugguccaagccccagugcggcaucaccggcuucgcccccuucuccaaggacaacuccauccgccucuccgccggcggcgacaucugggucacccgcgagcccuacgucuccugcgaccccgacaagugcuaccaguucgcccucggccagggcaccacccucaacaacguccacuccaacaacaccguccgcgaccgcacccccuaccgcacccuccucaugaacgagcucggcguccccuuccaccucggcaccaagcaggucugcaucgccugguccuccuccuccugccacgacggcaaggccuggcuccacgucugcaucaccggcgacgacaagaacgccaccgccuccuucaucuacaacggccgccucgucgacuccgucgucuccugguccaaggagauccuccgcacccaggaguccgagugcgucugcaucaacggcaccugcaccgucgucaugaccgacggcuccgccuccggcaaggccgacaccaagauccucuucaucgaggagggcaagaucguccacaccuccacccucuccggcuccgcccagcacgucgaggagugcuccugcuacccccgcuaccccggcguccgcugcgucugccgcgacaacuggaagggcuccaaccgccccaucgucgacaucaacaucaaggaccacuccaucgucuccuccuacgucugcuccggccucgucggcgacaccccccgcaagaacgacuccuccuccuccucccacugccucgaccccaacaacgaggagggcggccacggcgucaagggcugggccuucgacgacggcaacgacgucuggaugggccgcaccaucaacgagaccucccgccucggcuacgagaccuucaaggucaucgagggcugguccaaccccaaguccaagcuccagaucaaccgccaggucaucgucgaccgcggcgaccgcuccggcuacuccggcaucuucuccgucgagggcaaguccugcaucaaccgcugcuucuacgucgagcucauccgcggccgcaaggaggagaccgagguccucuggaccuccaacuccaucgucgucuucugcggcaccuccggcaccuacggcaccggcuccuggcccgacggcgccgaccucaaccucaugcccaucuga

SEQ ID NO: 121896 - RNA, 1410 nt, Artificial Sequence; identical to SEQ ID NO: 121712
  derived and/or modified CDS sequence (opt2) from neuraminidase__InfluenzaA__AJI80387

SEQ ID NO: 121897 - RNA, 1410 nt, Artificial Sequence; identical to SEQ ID NO: 121712
  derived and/or modified CDS sequence (opt2) from neuraminidase__InfluenzaA__AJI80398

SEQ ID NO: 121898 - RNA, 1410 nt, Artificial Sequence; identical to SEQ ID NO: 121712
  derived and/or modified CDS sequence (opt2) from neuraminidase__InfluenzaA__AJI80409

SEQ ID NO: 121899 - RNA, 1410 nt, Artificial Sequence; identical to SEQ ID NO: 121712
  derived and/or modified CDS sequence (opt2) from neuraminidase__InfluenzaA__AJI80420

SEQ ID NO: 121900 - RNA, 1410 nt, Artificial Sequence; identical to SEQ ID NO: 121712
  derived and/or modified CDS sequence (opt2) from neuraminidase__InfluenzaA__AJI80431

SEQ ID NO: 121901 - RNA, 1410 nt, Artificial Sequence; identical to SEQ ID NO: 121707
  derived and/or modified CDS sequence (opt2) from neuraminidase__InfluenzaA__AJI80442

SEQ ID NO: 121902 - RNA, 1410 nt, Artificial Sequence; identical to SEQ ID NO: 121712
  derived and/or modified CDS sequence (opt2) from neuraminidase__InfluenzaA__AJI80454

SEQ ID NO: 121903 - RNA, 1410 nt, Artificial Sequence; identical to SEQ ID NO: 121707
  derived and/or modified CDS sequence (opt2) from neuraminidase__InfluenzaA__AJI80465

SEQ ID NO: 121904 - RNA, 1410 nt, Artificial Sequence; identical to SEQ ID NO: 121712
  derived and/or modified CDS sequence (opt2) from neuraminidase__InfluenzaA__AJI80477

SEQ ID NO: 121905 - RNA, 1410 nt, Artificial Sequence; identical to SEQ ID NO: 121712
  derived and/or modified CDS sequence (opt2) from neuraminidase__InfluenzaA__AJI80488

SEQ ID NO: 121906 - RNA, 1410 nt, Artificial Sequence; identical to SEQ ID NO: 121734
  derived and/or modified CDS sequence (opt2) from neuraminidase__InfluenzaA__AJI80499

SEQ ID NO: 121907 - RNA, 1410 nt, Artificial Sequence; identical to SEQ ID NO: 121712
  derived and/or modified CDS sequence (opt2) from neuraminidase__InfluenzaA__AJI80510

SEQ ID NO: 121908 - RNA, 1410 nt, Artificial Sequence; identical to SEQ ID NO: 121734
  derived and/or modified CDS sequence (opt2) from neuraminidase__InfluenzaA__AJI80521

SEQ ID NO: 121909 - RNA, 1410 nt, Artificial Sequence
  derived and/or modified CDS sequence (opt2) from neuraminidase__InfluenzaA__AJJ98767
augaaccccaaccagaagaucaucaccaucggcuccgucucccucaccaucuccaccaucugcuucuucaugcagaucgccauccucaucaccaccgucacccuccacuucaagcaguacgaguucaacucccccuccaacaaccaggucaugcucugcgagcccaccaucaucgagcgcaacaucaccgagaucgucuaccucaccaacaccaccaucgagaaggagaagugccccaagcccgccgaguaccgcaacugguccaagccccagugcgacaucaccggcuucgcccccuucuccaaggacaacuccauccgccucuccgccggcggcgacaucugggucacccgcgagcccuacgucuccugcgaccccgacaagugcuaccaguucgcccucggccagggcaccacccucaacaacguccacuccaacaacaccguccgcgaccgcacccccuaccgcacccuccucaugaacgagcucggcguccccuuccaccucggcaccaagcaggucugcaucgccugguccuccuccuccugccacgacggcaaggccuggcuccacgucugcaucaccggcgacgacaagaacgccaccgccuccuucaucuacaacggccgccucgucgacuccgucgucuccugguccaaggagauccuccgcacccaggaguccgagugcgucugcaucaacggcaccugcaccgucgucaugaccgacggcuccgccuccggcaaggccgacaccaagauccucuucaucgaggagggcaagaucguccacaccuccacccucuccggcuccgcccagcacgucgaggagugcuccugcuacccccgcuaccccggcguccgcugcgucugccgcgacaacuggaagggcuccaaccgccccaucgucgacaucaacaucaaggaccacuccaucgucuccuccuacgucugcuccggccucgucggcgacaccccccgcaagaacgacuccuccuccuccucccacugccucgaccccaacaacgaggagggcggccacggcgucaagggcugggccuucgacgacggcgacgacgucuggaugggccgcaccaucuccgagaagucccgccucggcuacgagaccuucaaggucaucgagggcugguccaaccccaaguccaagcuccagaucaaccgccaggucaucgucgaccgcggcaaccgcuccggcuacuccggcaucuucuccgucgagggcaaguccugcaucaaccgcugcuucuacgucgagcucauccgcggccgcaaggaggagaccgacguccucuggaccuccaacuccaucgucgucuucugcggcaccuccggcaccuacggcaccggcuccuggcccgacggcgccgacaucaaccucaugcccaucuga

SEQ ID NO: 121910 - RNA, 1410 nt, Artificial Sequence
  derived and/or modified CDS sequence (opt2) from neuraminidase__InfluenzaA__AJJ98779
augaaccccaaccagaagaucaucaccaucggcuccgucucccucaccaucuccaccaucugcuucuucaugcagaccgccauccucaucaccaccgucacccuccacuucaagcaguacgaguucaacuccccccccaacaaccaggucaugcucugcgagcccaccaucaucgagcgcaacaucaccgagaucgucuaccucaccaacaccaccaucgagaaggagaucugccccaagcccgccgaguaccgcaacugguccaagccccagugcgacaucaccggcuucgcccccuucuccaaggacaacuccauccgccucuccgccggcggcgacaucugggucacccgcgagcccuacgucuccugcgaccccgacaagugcuaccaguucgcccucggccagggcaccacccucaacaacguccacuccaacgacaccguccgcgaccgcacccccuaccgcacccuccucaugaacgagcucggcguccccuuccaccucggcaccaagcaggucugcaucgccugguccuccuccuccugccacgacggcaaggccuggcuccacgucugcaucaccggcgacgacaagaacgccaccgccuccuucaucuacaacggccgccucgucgacuccaucgucuccuggaccaaggagauccuccgcacccaggaguccgagugcgucugcaucaacggcaccugcaccgucgucaugaccgacggcuccgccuccggcaaggccgacaccaagauccucuucaucgaggagggcaagaucguccacaccuccacccucuccggcuccgcccagcacgucgaggagugcuccugcuacccccgcuaccccggcguccgcugcgucugccgcgacaacuggaagggcuccaaccgccccaucgucgacaucaacaucaaggaccacuccaucgucuccuccuacgucugcuccggccucgucggcgacaccccccgcaagaacgacuccuccuccuccucccacugccucgaccccaacaacgaggagggcggccacggcgucaagggcugggccuucgacgacggcaacgacgucuggaugggccgcaccaucuccgagaagucccgccucggcuacgagaccuucaaggucaucgagggcugguccaaccccaaguccaagcuccagaucaaccgccaggucaucgucgaccgcggcaaccgcuccggcuacuccggcaucuucuccgucgagggcaaguccugcaucaaccgcugcuucuacgucgagcucauccgcggccgcaaggaggagaccgagguccucuggaccuccaacuccaucgucgucuucugcggcaccuccggcaccuacggcaccggcuccuggcccgacggcgccgacaucaaccucaugcccaucuga

SEQ ID NO: 121911 - RNA, 1410 nt, Artificial Sequence; identical to SEQ ID NO: 118182
  derived and/or modified CDS sequence (opt2) from neuraminidase__InfluenzaA__AJJ98791

SEQ ID NO: 121912 - RNA, 1410 nt, Artificial Sequence
  derived and/or modified CDS sequence (opt2) from neuraminidase__InfluenzaA__AJJ98803
augaaccccaaccagaagaucaucaccaucggcuccgucucccucaccaucuccaccaucugcuucuucaugcagaucgccauccucaucaccaccgucacccuccacuucaagcaguacgaguucaacuccccccccaacaaccaggucaugcucugcgagcccaccaucaucgagcgcaacaucaccgagaucgucuaccucaccaacaccaccaucgagaaggagaucugccccaagcccgccgaguaccgcaacugguccaagccccagugcggcaucaccggcuucgcccccuucuccaaggacaacuccauccgccucuccgccggcggcgacaucugggucacccgcgagcccuacgucuccugcgaccccgacaagugcuaccaguucgcccucggccagggcaccacccucaacaacguccacuccaacaacaagguccgcgaccgcacccccuaccgcacccuccucaugaacgagcucggcguccccuuccaccucggcaccaagcaggucugcaucgccugguccuccuccuccugccacgacggcaaggccuggcuccacgucugcaucaccggcgacgacaagaacgccaccgccuccuucaucuacaacggccgccucgucgacuccgucgucuccugguccaaggagauccuccgcacccaggaguccgagugcgucugcaucaacggcaccugcaccgucgucaugaccgacggcuccgccuccggcaaggccgacaccaagauccucuucaucgaggagggcaagaucguccacaccuccacccucuccggcuccgcccagcacgucgaggagugcuccugcuacccccgcuaccccggcguccgcugcgucugccgcgacaacuggaagggcuccaaccgccccaucgucgacaucaacaucaaggaccacuccaucgucuccuccuacgucugcuccggccucgucggcgacaccccccgcaagaacgacuccuccuccuccucccacugccucgaccccaacaacgaggagggcggccacggcgucaagggcugggccuucgacgacggcaacgacgucuggaugggccgcaccaucaacgagaccucccgccucggcuacgagaccuucaaggucaucgagggcugguccaaccccaaguccaagcuccagaucaaccgccaggucaucgucgaccgcggcgaccgcuccggcuacuccggcaucuucuccgucgagggcaaguccugcaucaaccgcugcuucuacgucgagcucauccgcggccgcaaggaggagaccgagguccucuggaccuccaacuccaucgucgucuucugcggcaccuccggcaccuacggcaccggcuccuggcccgacggcgccgaccucaaccucaugcccaucuga

SEQ ID NO: 121913 - RNA, 1410 nt, Artificial Sequence; identical to SEQ ID NO: 118182
  derived and/or modified CDS sequence (opt2) from neuraminidase__InfluenzaA__AJJ98815

SEQ ID NO: 121914 - RNA, 1410 nt, Artificial Sequence
  derived and/or modified CDS sequence (opt2) from neuraminidase__InfluenzaA__AJJ98827
augaaccccaaccagaagaucaucaccaucggcuccgucucccucaccaucuccaccaucugcuucuucaugcagaucgccauccucaucaccaccgucacccuccacuucaagcaguacgaguucaacuccccccccaacaaccaggucaugcucugcgagcccaccaucaucgagcgcaacaucaccgagaucgucuaccucaccaacaccaccaucgagaaggagaucugccccaagcccgccgaguaccgcaacugguccaagccccagugcggcaucaccggcuucgcccccuucuccaaggacaacuccauccgccucuccgccggcggcgacaucugggucacccgcgagcccuacgucuccugcgaccccgacaagugcuaccaguucgcccucggccagggcaccacccucaacaacguccacuccaacaacaccguccgcgaccgcacccccuaccgcacccuccucaugaacgagcucggcguccccuuccaccucggcaccaagcaggucugcaucgccugguccuccuccuccugccacgacggcaaggccuggcuccacgucugcaucaccggcgacgacaagaacgccaccgccuccuucaucuacaacggccgccucgucgacuccgucgucuccugguccaaggagauccuccgcacccaggaguccgagugcgucugcaucaacggcaccugcaccgucgucaugaccgacggcuccgccuccggcaaggccgacaccaagauccucuucaucgaggagggcaagaucguccacaccuccacccucuccggcuccgcccagcacgucgaggagugcuccugcuacccccgcuaccccggcguccgcugcgucugccgcgacaacuggaagggcuccaaccgccccaucgucgacaucaacaucaaggaccacaacaucgucuccuccuacgucugcuccggccucgucggcgacaccccccgcaagaacgacuccuccuccuccucccacugccucgaccccaacaacgaggagggcggccacggcgucaagggcugggccuucgacgacggcaacgacgucuggaugggccgcaccaucaacgagaccucccgccucggcuacgagaccuucaaggucaucgagggcugguccaaccccaaguccaagcuccagaucaaccgccaggucaucgucgaccgcggcgaccgcuccggcuacuccggcaucuucuccgucgagggcaaguccugcaucaaccgcugcuucuacgucgagcucauccgcggccgcaaggaggagaccgagguccucuggaccuccaacuccaucgucgucuucugcggcaccuccggcaccuacggcaccggcuccuggcccgacggcgccgaccucaaccucaugcccaucuga

SEQ ID NO: 121915 - RNA, 1410 nt, Artificial Sequence; identical to SEQ ID NO: 117179
  derived and/or modified CDS sequence (opt2) from neuraminidase__InfluenzaA__AJJ98839

SEQ ID NO: 121916 - RNA, 1410 nt, Artificial Sequence; identical to SEQ ID NO: 115554
  derived and/or modified CDS sequence (opt2) from neuraminidase__InfluenzaA__AJJ98851

SEQ ID NO: 121917 - RNA, 1410 nt, Artificial Sequence
  derived and/or modified CDS sequence (opt2) from neuraminidase__InfluenzaA__AJJ98863
augaaccccaaccagaagaucaucaccaucggcuccgucucccucaccaucuccaccaucugcuucuucaugcagaucgccauccucaucaccaccgucacccuccacuucaagcaguacgaguucaacuccccccccaacaaccaggucaugcucugcgagcccaccaucaucgagcgcaacaucaccgagaucgucuaccucaccaacaccaccaucgagaaggagaucugccccaagcccgccgaguaccgcaacugguccaagccccagugcgacaucaccggcuucgcccccuucuccaaggacaacuccauccgccucuccgccggcggcgacaucugggucacccgcgagcccuacgucuccugcgaccccgacaagugcuaccaguucgcccucggccagggcaccacccucaacaacguccacuccaacaacaccguccgcgagcgcacccccuaccgcacccuccucaugaacgagcucggcguccccuuccaccucggcaccaagcaggucugcaucgccugguccuccuccuccugccacgacggcaaggccuggcuccacgucugcaucaccggcgacgacaagaacgccaccgccuccuucaucuacaacggccgccucgucgacuccgucgucuccugguccaaggagauccuccgcacccaggaguccgagugcaucugcaucaacggcaccugcaccgucgucaugaccgacggcuccgccuccggcaaggccgacaccaagauccucuucaucgaggagggcaagaucguccacaccuccacccucuccggcuccgcccagcacgucgaggagugcuccugcuacccccgcuaccccggcguccgcugcgucugccgcgacaacuggaagggcuccaaccgccccaucgucgacaucaacaugaaggaccacuccaucgucuccuccuacgucugcuccggccucgucggcgacaccccccgcaagaacgacuccuccuccuccucccacugccucgaccccaacaacgaggagggcggccacggcgucaagggcugggccuucgacgacggcaacgacgucuggaugggccgcaccaucuccgagaagucccgccucggcuacgagaccuucaaggucaucgagggcugguccaaccccaaguccaagcuccagaucaaccgccaggucaucgucgaccgcggcaaccgcuccggcuacuccggcaucuucuccgucgagggcaaguccugcaucaaccgcugcuucuacgucgagcucauccgcggccgcaaggaggagaccgagguccucuggaccuccaacuccaucgucgucuucugcggcaccuccggcaccuacggcaccggcuccuggcccgacggcgccgacaucaaccucaugcccaucuga

SEQ ID NO: 121918 - RNA, 1410 nt, Artificial Sequence
  derived and/or modified CDS sequence (opt2) from neuraminidase__InfluenzaA__AJJ98875
augaaccccaaccagaagaucaucaccaucggcuccgucucccucaccaucuccaccaucugcuucuucaugcagaucgccauccucaucaccaccgucacccuccacuucaagcaguacgaguucaacuccccccccaacaaccaggucaugcucugcgagcccaccaucaucgagcgcaacaucaccgagaucgucuaccucaccaacaccaccaucgagaaggagaucugccccaagcccgccgaguaccgcaacugguccaagccccagugcgacaucaccggcuucgcccccuucuccaaggacaacuccauccgccucuccgccggcggcgacaucugggucacccgcgagcccuacgucuccugcgaccccgacaagugcuaccaguucgcccucggccagggcaccacccucaacaacguccacuccaacgacaccguccgcaaccgcacccccuaccgcacccuccucaugaacgagcucggcguccccuuccaccucggcaccaagcaggucugcaucgccugguccuccuccuccugccacgacggcaaggccuggcuccacgucugcaucaccggcgacgacaagaacgccaccgccuccuucaucuacaacggccgccucgucgacuccgucgucuccugguccaaggagauccuccgcacccaggaguccgagugcgucugcaucaacggcaccugcaccgucgucaugaccgacggcuccgccuccggcaaggccgacaccaagauccucuucaucgaggagggcaagaucguccacaccuccacccucuccggcuccgcccagcacgucgaggagugcuccugcuacccccgcuaccccggcguccgcugcgucugccgcgacaacuggaagggcuccaaccgccccaucgucgacaucaacaucaaggaccacuccaucgucuccuccuacgucugcuccggccucgucggcgacaccccccgcaagaacgacuccuccuccuccucccacugccucgaccccaacaacgaggagggcggccacggcgucaagggcugggccuucgacgacggcaacgacgucuggaugggccgcaccaucuccgagaagucccgccucggcuacgagaccuucaaggucaucgagggcugguccaaccccaaguccaagcuccagaucaaccgccaggucaucgucgaccgcggcaaccgcuccggcuacuccggcaucuucuccgucgagggcaaguccugcaucaaccgcugcuucuacgucgagcucauccgcggccgcaaggaggagaccgagguccucuggaccuccaacuccaucgucgucuucugcggcaccuccggcaccuacggcaccggcuccuggcccgacggcgccgacaucaaccucaugcccaucuga

SEQ ID NO: 121919 - RNA, 1410 nt, Artificial Sequence
  derived and/or modified CDS sequence (opt2) from neuraminidase__InfluenzaA__AJJ98887
augaaccccaaccagaagaucaucaccaucggcuccgucucccucaccaucuccaccaucugcuucuucaugcagaucgccauccucaucaccaccgucacccuccacuucaagcaguacgaguucaacuccccccccaacaaccaggucaugcucugcgagcccaccaucaucgagcgcaacaucaccgagaucgucuaccucaccaacaccaccaucgagaaggagaucugccccaagcucgccgaguaccgcaacugguccaagccccagugcgacaucaccggcuucgcccccuucuccaaggacaacuccauccgccucuccgccggcggcgacaucugggucacccgcgagcccuacgucuccugcgaccccgacaagugcuaccaguucgcccucggccagggcaccacccucaacaacguccacuccaacaacaccguccgcaaccgcacccccuaccgcacccuccucaugaacgagcucggcguccccuuccaccucggcaccaagcaggucugcaucgccugguccuccuccuccugccacgacggcaaggccuggcuccacgucugcaucaccggcgacgacaagaacgccaccgccuccuucaucuacaacggccgccucgucgacuccaucgucuccugguccaaggagauccuccgcacccaggaguccgagugcgucugcaucaacggcaccugcaccgucgucaugaccgacggcuccgccuccggcaaggccgacaccaagauccucuucaucgaggagggcaagaucguccacaccuccacccucuccggcuccgcccagcacgucgaggagugcuccugcuacccccgcuaccccggcguccgcugcgucugccgcgacaacuggaagggcuccaaccgccccaucgucgacaucaacaucaaggaccacuccaucgucuccuccuacgucugcuccggccucgucggcgacaccccccgcaagaacgacuccuccuccuccucccacugccucgaccccaacaacgaggagggcggccacggcgucaagggcugggccuucgacgacggcaacgacgucuggaugggccgcaccaucuccgagaagucccgccucggcuacgagaccuucaaggucaucgagggcugguccaaccccaaguccaagcuccagaucaaccgccaggucaucgucgaccgcggcaaccgcuccggcuacuccggcaucuucuccgucgagggcaaguccugcaucaaccgcugcuucuacgucgagcucauccgcggccgcaaggaggagaccgacguccucuggaccuccaacuccaucgucgucuucugcggcaccuccggcaccuacggcaccggcuccuggcccgacggcgccgacaucaaccucaugcccaucuga

SEQ ID NO: 121920 - RNA, 1410 nt, Artificial Sequence
  derived and/or modified CDS sequence (opt2) from neuraminidase__InfluenzaA__AJJ98899
augaaccccaaccagaagaucaucaccaucggcuccgucucccucaccaucuccaccaucugcuucuucaugcagaccgccauccucaucaccaccgucacccuccacuucaagcaguacgaguucaacuccccccccaacaaccaggucaugcucugcgagcccaccaucaucgagcgcaacaucaccgagaucgucuaccucaccaacaccaccaucgagaaggagaucugccccaagcucgccgaguaccgcaacugguccaagccccagugcgacaucaccggcuucgcccccuucuccaaggacaacuccauccgccucuccgccggcggcgacaucugggucacccgcgagcccuacgucuccugcgaccccgacaagugcuaccaguucgcccucggccagggcaccacccucaacaacguccacuccaacaacaccguccgcaaccgcacccccuaccgcacccuccucaugaacgagcucggcguccccuuccaccucggcaccaagcaggucugcaucgccugguccuccuccuccugccacgacggcaaggccuggcuccacgucugcaucaccggcgacgacaagaacgccaccgccuccuucaucuacaacggccgccucgucgacuccaucgucuccugguccaaggagauccuccgcacccaggaguccgagugcgucugcaucaacggcaccugcaccgucgucaugaccgacggcuccgccuccggcaaggccgacaccaagauccucuucaucgaggagggcaagaucguccacaccuccacccucuccggcuccgcccagcacgucgaggagugcuccugcuacccccgcuaccccggcguccgcugcgucugccgcgacaacuggaagggcuccaaccgccccaucgucgacaucaacaucaaggaccacuccaucgucuccuccuacgucugcuccggccucgucggcgacaccccccgcaagaacgacuccuccuccuccucccacugccucgaccccaacaacgaggagggcggccacggcgucaagggcugggccuucgacgacggcaacgacgucuggaugggccgcaccaucuccgagaagucccgccucggcuacgagaccuucaaggucaucgagggcugguccaaccccaaguccaagcuccagaucaaccgccaggucaucgucgaccgcggcaaccgcuccggcuacuccggcaucuucuccgucgagggcaaguccugcaucaaccgcugcuucuacgucgagcucauccgcggccgcaaggaggagaccgagguccucuggaccuccaacuccaucgucgucuucugcggcaccuccggcaccuacggcaccggcuccuggcccgacggcgccgacaucaaccucaugcccaucuga

SEQ ID NO: 121921 - RNA, 1410 nt, Artificial Sequence; identical to SEQ ID NO: 118182
  derived and/or modified CDS sequence (opt2) from neuraminidase__InfluenzaA__AJJ98911

SEQ ID NO: 121922 - RNA, 1410 nt, Artificial Sequence; identical to SEQ ID NO: 118958
  derived and/or modified CDS sequence (opt2) from neuraminidase__InfluenzaA__AJJ98923

SEQ ID NO: 121923 - RNA, 1410 nt, Artificial Sequence
  derived and/or modified CDS sequence (opt2) from neuraminidase__InfluenzaA__AJJ98935
augaaccccaaccagaagaucaucaccaucggcuccgucucccucaccaucuccaccaucugcuucuucaugcagaucgccauccucaucaccaccgucacccuccacuucaagcgcuacgaguucaacuccccccccaacaaccaggucaugcucugcgagcccaccaucaucgagcgcaacaucaccgagaucgucuaccucaccaacaccaccaucgagaaggagaucugccccaagcccgccgaguaccgcaacugguccaagccccagugcggcaucaccggcuucgcccccuucuccaaggacaacuccauccgccucuccgccggcggcgacaucugggucacccgcgagcccuacgucuccugcgaccccgacaagugcuaccaguucgcccucggccagggcaccacccucaacaacguccacuccaacaacaccguccgcgaccgcacccccuaccgcacccuccucaugaacgagcucggcguccccuuccaccucggcaccaagcaggucugcaucgccugguccuccuccuccugccacgacggcaaggccuggcuccacgucugcaucaccggcgacgacaagaacgccaccgccuccuucaucuacaacggccgccucgucgacuccgucgucuccugguccaaggagauccuccgcacccaggaguccgagugcgucugcaucaacggcaccugcaccgucgucaugaccgacggcuccgccuccggcaaggccgacaccaagauccucuucaucgaggagggcaagaucguccacaccuccacccucuccggcuccgcccagcacgucgaggagugcuccugcuacccccgcuaccccggcguccgcugcgucugccgcgacaacuggaagggcuccaaccgccccaucgucgacaucaacaucaaggaccacuccaucgucuccuccuacgucugcuccggccucgucggcgacaccccccgcaagaacgacuccuccuccuccucccacugccucgaccccaacaacgaggagggcggccacggcgucaagggcugggccuucgacgacggcaacgacgucuggaugggccgcaccaucaacgagaccucccgccucggcuacgagaccuucaaggucaucgagggcugguccaaccccaaguccaagcuccagaucaaccgccaggucaucgucgaccgcggcgaccgcuccggcuacuccggcaucuucuccgucgagggcaaguccugcaucaaccgcugcuucuacgucgagcucauccgcggccgcaaggaggagaccgagguccucuggaccuccaacuccaucgucgucuucugcggcaccuccggcaccuacggcaccggcuccuggcccgacggcgccgaccucaaccucaugcccaucuga

SEQ ID NO: 121924 - RNA, 1410 nt, Artificial Sequence
  derived and/or modified CDS sequence (opt2) from neuraminidase__InfluenzaA__AJJ98947
augaaccccaaccagaagaucaucaccaucggcuccgucucccucaccaucuccaccaucugcuucuucaugcagaucgccauccucaucaccaccgucacccuccacuucaagcaguacgaguucaacuccccccccaacaaccaggucacccucugcgagcccaccaucaucgagcgcaacaucaccgagaucgucuaccucaccaacaccaccaucgagaaggagaucugccccaagcucgccgaguaccgcaacugguccaagccccagugcgacaucaccggcuucgcccccuucuccaaggacaacuccauccgccucuccgccggcggcgacaucugggucacccgcgagcccuacgucuccugcgaccccgacaagugcuaccaguucgcccucggccagggcaccacccucaacaacguccacuccaacaacaccguccgcgaccgcacccccuaccgcacccuccucaugaacgagcucggcguccccuuccaccucggcaccaagcaggucugcaucgccugguccuccuccuccugccacgacggcaaggccuggcuccacgucugcaucaccggcaacgacaagaacgccaccgccuccuucaucuacaacggccgccucgucgacuccgucgucuccugguccaaggagauccuccgcacccaggaguccgagugcgucugcaucaacggcaccugcaccgucgucaugaccgacggcuccgccuccggcaaggccgacaccaagauccucuucaucgaggagggcaagaucguccacaccuccacccucuccggcuccgcccagcacgucgaggagugcuccugcuacccccgcuaccccggcguccgcugcgucugccgcgacaacuggaagggcuccaaccgccccaucgucgacaucaacaucaaggaccacuccaucgucuccuccuacgucugcuccggccucgucggcgacaccccccgcaagaacgacuccuccuccuccucccacugccucgaccccaacaacgaggagggcggccacggcgucaagggcugggccuucgacgacggcaacgacgucuggaugggccgcaccaucaacgagaccucccgccucggcuacgagaccuucaaggucaucgagggcugguccaaccccaaguccaagcuccagaucaaccgccaggucaucgucgaccgcggcaaccgcuccggcuacuccggcaucuucuccgucgagggcaaguccugcaucaaccgcugcuucuacgucgagcucauccgcggccgcaaggaggagaccgagguccucuggaccuccaacuccaucgucgucuucugcggcaccuccggcaccuacggcaccggcuccuggcccgacggcgccgaccucaaccucaugcccaucuga

SEQ ID NO: 121925 - RNA, 1410 nt, Artificial Sequence
  derived and/or modified CDS sequence (opt2) from neuraminidase__InfluenzaA__AJJ98971
augaaccccaaccagaagaucaucaccaucggcuccgucucccucaccaucuccaccaucugcuucuucaugcagaucgccauccucaucaccaccgucacccuccacuucaagcaguacgaguucaacuccccccccaacaaccaggucaugcucugcgagcccaccaucaucgagcgcaacaucaccgagaucgucuaccucaccaacaccaccaucgagaaggagaucugccccaagcucgccgaguaccgcaacugguccaagccccagugcgacaucaccggcuucgcccccuucuccaaggacaacuccauccgccucuccgccggcggcgacaucugggucacccgcgagcccuacgucuccugcgaccccgacaagugcuaccaguucgcccucggccagggcaccacccucaacaacguccacuccaacgacaccguccgcaaccgcacccccuaccgcacccuccucaugaacgagcucggcguccccuuccaccucggcaccaagcaggucugcaucgccugguccuccuccuccugccacgacggcaaggccuggcuccacgucugcaucaccggcgacgacaagaacgccaccgccuccuucaucuacaacggccgccucgucgacuccgucgucuccugguccaaggagauccuccgcacccaggaguccgagugcgucugcaucaacggcaccugcaccgucgucaugaccgacggcuccgccuccggcaaggccgacaccaagauccucuucaucgaggagggcaagaucguccacaccuccacccucuccggcuccgcccagcacgucgaggagugcuccugcuacccccgcuaccccggcguccgcugcgucugccgcgacaacuggaagggcuccaaccgccccaucgucgacaucaacaucaaggaccacuccaucgucuccuccuacgucugcuccggccucgucggcgacaccccccgcaagaacgacuccuccuccuccucccacugccucgaccccaacaacgaggagggcggccacggcgucaagggcugggccuucgacgacggcaacgacgucuggaugggccgcaccaucuccgagaagucccgccucggcuacgagaccuucaaggucaucgagggcugguccaaccccaaguccaagcuccagaucaaccgccaggucaucgucgaccgcggcaaccgcuccggcuacuccggcaucuucuccgucgagggcaaguccugcaucaaccgcugcuucuacgucgagcucauccgcggccgcaaggaggagaccgagguccucuggaccuccaacuccaucgucgucuucugcggcaccuccggcaccuacggcaccggcuccuggcccgacggcgccgacaucaaccucaugcccaucuga

SEQ ID NO: 121926 - RNA, 1410 nt, Artificial Sequence
  derived and/or modified CDS sequence (opt2) from neuraminidase__InfluenzaA__AJJ98995
augaaccccaaccagaagaucaucaccaucggcuccgucucccucaccaucuccaccaucugcuucuucaugcagaucgccauccucaucaccaccgucacccuccacuucaagcaguacgaguucaacuccccccccaacaaccaggucaugcucugcgagcccaccaucaucgagcgcaacaugaccgagaucgucuaccucaccaacaccaccaucgagaaggagaucugccccaagcccgccgaguaccgcaacugguccaagccccagugcgacaucaccggcuucgcccccuucuccaaggacaacuccauccgccucuccgccggcggcgacaucugggucacccgcgagcccuacgucuccugcgaccccgacaagugcuaccaguucgcccucggccagggcaccacccucaacaacguccacuccaacaacaucguccgcgaccgcacccccuaccgcacccuccucaugaacgagcucggcguccccuuccaccucggcaccaagcaggucugcaucgccugguccuccuccuccugccacgacggcaaggccuggcuccacgucugcaucaccggcgacgacaagaacgccaccgccuccuucaucuacaacggccgccucgucgacuccgucgucuccugguccaaggagauccuccgcacccaggaguccgagugcgucugcaucaacggcaccugcaccgucgucaugaccgacggcuccgccuccggcaaggccgacaccaagauccucuucaucgaggagggcaagaucguccacaccuccacccucuccggcuccgcccagcacgucgaggagugcuccugcuacccccgcuaccccggcguccgcugcgucugccgcgacaacuggaagggcuccaaccgccccaucgucgacaucaacaucaaggaccacuccaucgucuccuccuacgucugcuccggccucgucggcgacaccccccgcaagaacgacuccuccuccuccucccacugccucgaccccaacaacgaggagggcggccacggcgucaagggcugggccuucgacgacggcaacgacgucuggaugggccgcaccaucaacgagaccucccgccucggcuacgagaccuucaaggucaucgagggcugguccaaccccaaguccaagcuccagaucaaccgccaggucaucgucgaccgcuccgaccgcuccggcuacuccggcaucuucuccgucgagggcaaguccugcaucaaccgcugcuucuacgucgagcucauccgcggccgcaaggaggagaccgagguccucuggaccuccaacuccaucgucgucuucugcggcaccuccggcaccuacggcaccggcuccuggcccgacggcgccgaccucaaccucaugcccaucuga

SEQ ID NO: 121927 - RNA, 1410 nt, Artificial Sequence; identical to SEQ ID NO: 117179
  derived and/or modified CDS sequence (opt2) from neuraminidase__InfluenzaA__AJJ99007

SEQ ID NO: 121928 - RNA, 1410 nt, Artificial Sequence
  derived and/or modified CDS sequence (opt2) from neuraminidase__InfluenzaA__AJJ99019
augaaccccaaccagaagaucaucaccaucggcuccgucucccucaccaucuccaccaucugcuucuucaugcagaccgccauccucaucaccaccgucacccuccacuucaagcagugcgaguucaacuccccccccaacaaccaggucaugcucugcgagcccaccaucaucgagcgcaacaucaccgagaucgucuaccucaccaacaccaccaucgagaaggagaucugccccaagcucgccgaguaccgcaacugguccaagccccagugcgacaucaccggcuucgcccccuucuccaaggacaacuccauccgccucuccgccggcggcgacaucugggucacccgcgagcccuacgucuccugcgaccccgacaagugcuaccaguucgcccucggccagggcaccacccucaacaacguccacuccaacaacaccguccgcgaccgcacccccuaccgcacccuccucaugaacgagcucggcguccccuuccaccucggcaccaagcaggucugcaucgccugguccuccuccuccugccacgacggcaaggccuggcuccacgucugcaucaccggcgacgacaagaacgccaccgccuccuucaucuacaacggccgccucgucgacuccgucgucuccugguccaaggagauccuccgcacccaggaguccgagugcgucugcaucaacggcaccugcaccgucgucaugaccgacggcuccgccuccggcaaggccgacaccaagauccucuucaucgaggagggcaagaucguccacaccuccacccucuccggcuccgcccagcacgucgaggagugcuccugcuacccccgcuaccccggcguccgcugcgucugccgcgacaacuggaagggcuccaaccgccccaucgucgacaucaacaucaaggaccacuccaucgucuccaacuacgucugcuccggccucgucggcgacaccccccgcaagaacgacuccuccuccuccucccacugccucgaccccaacaacgaggagggcggccacggcgucaagggcugggccuucgacgacggcaacgacgucuggaugggccgcaccaucuccgagaagucccgcuucggcuacgagaccuucaaggucaucgagggcugguccaaccccaaguccaagcuccagaucaaccgccaggucaucgucgaccgcggcaaccgcuccggcuacuccggcaucuucuccgucgagggcaaguccugcaucaaccgcugcuucuacgucgagcucauccgcggccgcaaggaggagaccgagguccucuggaccuccaacuccaucgucgucuucugcggcaccuccggcaccuacggcaccggcuccuggcccgacggcgccgacaucaaccucaugcccaucuga

SEQ ID NO: 121929 - RNA, 1410 nt, Artificial Sequence
  derived and/or modified CDS sequence (opt2) from neuraminidase__InfluenzaA__AJJ99031
augaaccccaaccagaagaucaucaccaucggcuccgucucccucaccaucuccaccaucugcuucuucaugcagaucgccauccucaucaccaccgucacccuccacuucaagcaguacgaguucaacuccccccccaacaaccaggucaugcucugcgagcccaccaucaucgagcgcaacaucaccgagaucgucuaccucaccaacaccaccaucgagaaggagaucugccccaagcucgccgaguaccgcaacugguccaagccccagugcgacaucaccggcuucgcccccuucuccaaggacaacuccauccgccucuccgccggcggcgacaucugggucacccgcgagcccuacgucuccugcgaccccgacaagugcuaccaguucgcccucggccagggcaccaccaucaacaacguccacuccaacgacaccguccgcgaccgcacccccuaccgcacccuccucaugaacgagcucggcguccccuuccaccucggcaccaagcaggucugcaucgccugguccuccuccuccugccacgacggcaaggccuggcuccacgucugcaucaccggcgacgacaagaacgccaccgccuccuucaucuacaacggccgccucgucgacuccgucgucuccugguccaaggagauccuccgcacccaggaguccgagugcgucugcaucaacggcaccugcaccgucgucaugaccgacggcuccgccuccggcaaggccgacaccaagauccucuucaucgaggagggcaagaucguccacaccuccacccucuccggcuccgcccagcacgucgaggagugcuccugcuacccccgcuaccccggcguccgcugcgucugccgcgacaacuggaagggcuccaaccgccccaucgucgacaucaacaucaaggaccacuccaucgucuccuccuacgucugcuccggccucgucggcgacaccccccgcaagaacgacuccuccuccuccucccacugccucgaccccaacaacgaggagggcggccacggcgucaagggcugggccuucgacgacggcaacgacgucuggaugggccgcaccaucuccgagaagucccgccucggcuacgagaccuucaaggucaucgagggcugguccaaccccaaguccaagcuccagaucaaccgccaggucaucgucgaccgcggcaaccgcuccggcuacuccggcaucuucuccgucgagggcaaguccugcaucaaccgcugcuucuacgucgagcucauccgcggccgcaaggaggagaccgagguccucuggaccuccaacuccaucgucgucuucugcggcaccuccggcaccuacggcaccggcuccuggcccgacggcgccgacaucaaccucaugcccaucuga

SEQ ID NO: 121930 - RNA, 1410 nt, Artificial Sequence
  derived and/or modified CDS sequence (opt2) from neuraminidase__InfluenzaA__AJJ99043
augaaccccaaccagaagaucaucaccaucggcuccgucucccucaccaucuccaccaucugcuucuucaugcagaucgccauccucaucaccaccgucacccuccacuucaagcaguacgaguucaacuccccccccaacaaccaggucaugcucugcgagcccaccaucaucgagcgcaacaucaccgagaucgucuaccucaccaacaccaccaucgagaaggagaucugccccaagcucgccgaguaccgcaagugguccaagccccagugcaacaucaccggcuucgcccccuucuccaaggacaacuccauccgccucuccgccggcggcgacaucugggucacccgcgagcccuacgucuccugcgaccccgacaagugcuaccaguucgcccucggccagggcaccacccucaacaacguccacuccaacgacaccguccgcgaccgcacccccuaccgcacccuccucaugaacgagcucggcguccccuuccaccucggcaccaagcaggucugcaucgccugguccuccuccuccugccacgacggcaaggccuggcuccacgucugcgucaccggcgacgacaagaacgccaccgccuccuucaucuacaacggccgccucgucgacuccaucgucuccugguccaaggagauccuccgcacccaggaguccgagugcgucugcaucaacggcaccugcaccgucgucaugaccgacggcuccgccuccggcaaggccgacaccaagauccucuucaucgaggagggcaagaucguccacaccuccacccucuccggcuccgcccagcacgucgaggagugcuccugcuacccccgcuaccccggcguccgcugcgucugccgcgacaacuggcgcggcuccaaccgccccaucgucgacaucaacaugaaggacuacuccaucgucuccuccuacgucugcuccggccucgucggcgacaccccccgcaagaacgacuccuccuccuccggccacugccucgaccccaacaacgaggagggcggccacggcgucaagggcugggccuucgacgacggcaacgacgucuggaugggccgcaccaucuccgagaagucccgcuccggcuacgagaccuucaaggucaucgagggcugguccaaccccaacuccaagcuccagaucaaccgccaggucaucgucgaccgcggcaaccgcuccggcuacuccggcaucuucuccgucgagggcaaguccugcaucaaccgcugcuucuacgucgagcucauccgcggccgcaaggaggagaccgagguccucuggaccuccaacuccaucgucgucuucugcggcaccuccggcaccuacggcaccggcuccuggcccgacggcgccgacaucaaccucaugcccaucuga

SEQ ID NO: 121931 - RNA, 1410 nt, Artificial Sequence
  derived and/or modified CDS sequence (opt2) from neuraminidase__InfluenzaA__AJJ99067
augaaccccaaccagaagaucaucaccaucggcuccgucucccucaccaucuccaccaucugcuucuucaugcagaucgccauccucaucaccaccgucacccuccacuucaagcaguacgaguucaacuccccccccaacaaccaggucaugcucugcgagcccaccaucaucgagcgcaacaucaccgagaucgucuaccucaccaacaccaccaucgagaaggagaucugccccaagcccgccgaguaccgcaacugguccaagccccagugcggcaucaccggcuucgcccccuucuccaaggacaacuccauccgccucuccgccggcggcgacaucugggucacccgcgagcccuacgucuccugcgaccccgacaagugcuaccaguucgcccucggccagggcaccacccucaacaacguccacuccaacaacaccguccgcggccgcacccccuaccgcacccuccucaugaacgagcucggcguccccuuccaccucggcaccaagcaggucugcaucgccugguccuccuccuccugccacgacggcaaggccuggcuccacgucugcaucaccggcgacgacaagaacgccaccgccuccuucaucuacaacggccgccucgucgacuccgucgucuccugguccaaggacauccuccgcacccaggaguccgagugcgucugcaucaacggcaccugcaccgucgucaugaccgacggcuccgccuccggcaaggccgacaccaagauccucuucaucgaggagggcaagaucguccacaccuccacccucuccggcuccgcccagcacgucgaggagugcuccugcuacccccgcuaccccggcguccgcugcgucugccgcgacaacuggaagggcuccaaccgccccaucgucgacaucaacaucaaggaccacuccaucgucuccuccuacgucugcuccggccucgucggcgacaccccccgcaagaacgacuccuccuccuccucccacugccucgaccccaacaacgaggagggcggccacggcgucaagggcugggccuucgacgacggcaacgacgucuggaugggccgcaccaucaacgagaccucccgccucggcuacgagaccuucaaggucaucgagggcugguccaaccccaaguccaagcuccagaucaaccgccaggucaucgucgaccgcggcgaccgcuccggcuacuccggcaucuucuccgucgagggcaaguccugcaucaaccgcugcuucuacgucgagcucauccgcggccgcaaggaggagaccgagguccucuggaccuccaacuccaucgucgucuucugcggcaccuccggcaccuacggcaccggcuccuggcccgacggcgccgaccucaaccucaugcccaucuga

SEQ ID NO: 121932 - RNA, 1410 nt, Artificial Sequence
  derived and/or modified CDS sequence (opt2) from neuraminidase__InfluenzaA__AJJ99079
augaaccccaaccagaagaucaucaccaucggcuccgucucccucaccaucuccaccaucugcuucuucaugcagaucgccauccucaucaccaccgucacccuccacuucaagcaguacgaguucaacuccccccccaacaaccaggucaugcucugcgagcccaccaucaucgagcgcaacaucaccgagaucgucuaccucaccaacaccaccaucgagaaggagaucugccccaagcccgccgaguaccgcaacugguccaagccccagugcggcaucaccggcuucgcccccuucuccaaggacaacuccauccgccucuccgccggcggcgacaucugggucacccgcgagcccuacgucuccugcgaccccgacaagugcuaccaguucgcccucggccagggcaccacccucaacaacguccacuccaacaacaccguccgcaaccgcacccccuaccgcacccuccucaugaacgagcucggcguccccuuccaccucggcaccaagcaggucugcaucgccugguccuccuccuccugccacgacggcaaggccuggcuccacgucugcaucaccggcgacgacaagaacgccaccgccuccuucaucuacaacggccgccucgucgacuccgucgucuccugguccaaggagauccuccgcacccaggaguccgagugcgucugcaucaacggcaccugcaccgucgucaugaccgacggcuccgccuccggcaaggccgacaccaagauccucuucaucgaggagggcaagaucguccacaccuccacccucuccggcuccgcccagcacgucgaggagugcuccugcuacccccgcuaccccggcguccgcugcgucugccgcgacaacuggaagggcuccaaccgccccaucgucgacaucaacaucaaggaccacuccaucgucuccuccuacgucugcuccggccucgucggcgacaccccccgcaagaacgacuccuccuccuccucccacugccucgaccccaacaacgaggagggcggccacggcgucaagggcugggccuucgacgacggcaacgacgucuggaugggccgcaccaucaacgagaccucccgccucggcuacgagaccuucaaggucaucgagggcugguccaaccccaaguccaagcuccagaucaaccgccaggucaucgucgaccgcggcgaccgcuccggcuacuccggcaucuucuccgucgagggcaaguccugcaucaaccgcugcuucuacgucgagcucauccgcggccgcaaggaggagaccgagguccucuggaccuccaacuccaucgucgucuucugcggcaccuccggcaccuacggcaccggcuccuggcccgacggcgccgaccucaaccucaugcccaucuga

SEQ ID NO: 121933 - RNA, 1410 nt, Artificial Sequence
  derived and/or modified CDS sequence (opt2) from neuraminidase__InfluenzaA__AJJ99091
augaaccccaaccagaagaucaucaccaucggcuccgucucccucaccaucuccaccaucugcuucuucaugcagaucgccauccucaucaccaccgucacccuccacuucaagcaguacgaguucaacuccccccccaacaaccaggucaugcucugcgagcccaccaucaucgagcgcaacaucaccgagaucgucuaccucaccaacaccaccaucgagaaggagaucugccccaagcccgccgaguaccgcaacugguccaagccccagugcggcaucaccggcuucgcccccuucuccaaggacaacuccauccgccucuccgccggcggcgacaucugggucacccgcgagcccuacgucuccugcgaccccgacaagugcuaccaguucgcccucggccagggcaccacccucaacaacguccacuccaacaacaccguccgcgaccgcacccccuaccgcacccuccucaugaacgagcucggcguccccuuccaccucggcaccaagcaggucugcaucgccugguccuccuccuccugccacgacggcaaggccuggcuccacgucugcaucaccggcgacgacaagaacgccaccgccuccuucaucuacaacggccgccucgucgacuccgucgucuccugguccaaggagauccuccgcacccaggaguccgagugcgucugcaucaacggcaccugcaccgucgucaugaccgacggcuccgccuccggcaaggccgacaccaagauccucuucaucgaggagggcaagaucguccacaccuccacccucuccggcuccgcccagcacgucgaggagugcuccugcuacccccgcuaccccggcguccgcugcgucugccgcgacaacuggaagggcuccaaccgccccaucgucgacaucaacaucaaggaccacuccaucgucuccuccuacgucugcuccggccucgucggcgacaccccccgcaagaacgacuccuccuccuccucccacugccucgaccccaacaacgaggagggcggccacggcgucaagggcugggccuucgacgacggcaacgaccucuggaugggccgcaccaucaacgagaccucccgccucggcuacgagaccuucaaggucaucgagggcugguccaaccccaaguccaagcuccagaucaaccgccaggucaucgucgaccgcggcgaccgcuccggcuacuccggcaucuucuccgucgagggcaaguccugcaucaaccgcugcuucuacgucgagcucauccgcggccgcaaggaggagaccgagguccucuggaccuccaacuccaucgucgucuucugcggcaccuccggcaccuacggcaccggcuccuggcccgacggcgccgaccucaaccucaugcccaucuga

SEQ ID NO: 121934 - RNA, 1410 nt, Artificial Sequence
  derived and/or modified CDS sequence (opt2) from neuraminidase__InfluenzaA__AJJ99103
augaaccccaaccagaagaucaucaccaucggcuccgucucccucaccaucuccaccaucugcuucuucaugcagaucgccauccucaucaccaccgucacccuccacuucaagcaguacgaguucaacuccccccccaacaaccaggucaugcucugcgagcccaccaucaucgagcgcaacaugaccgagaucgucuaccucaccaacaccaccaucgagaaggagaucugccccaagcccgccgaguaccgcaacugguccaagccccagugcgacaucaccggcuucgcccccuucuccaaggacaacuccauccgccucuccgccggcggcgacaucugggucacccgcgagcccuacgucuccugcgaccccgacaagugcuaccaguucgcccucggccagggcaccacccucaacaacguccacuccaacaacaccguccgcaaccgcacccccuaccgcacccuccucaugaacgagcucggcguccccuuccaccucggcaccaagcaggucugcaucgccugguccuccuccuccugccacgacggcaaggccuggcuccacgucugcaucaccggcgacgacaagaacgccaccgccuccuucaucuacaacggccgccucgucgacuccgucgucuccugguccaaggagauccuccgcacccaggaguccgagugcgucugcaucaacggcaccugcaccgucgucaugaccgacggcuccgccuccggcaaggccgacaccaagauccucuucaucgaggagggcaagaucguccacaccuccacccucuccggcuccgcccagcacgucgaggagugcuccugcuacccccgcuaccccggcguccgcugcgucugccgcgacaacuggaagggcuccaaccgccccaucgucgacaucaacaucaaggaccacuccaucgucuccuccuacgucugcuccggccucgucggcgacaccccccgcaagaacgacuccuccuccuccucccacugccucgaccccaacaacgaggagggcggccacggcgucaagggcugggccuucgacgacggcaacgacgucuggaugggccgcaccaucaacgagaccucccgccucggcuacgagaccuucaaggucaucgagggcugguccaaccccaaguccaagcuccagaucaaccgccaggucaucgucgaccgcuccgaccgcuccggcuacuccggcaucuucuccgucgagggcaaguccugcaucaaccgcugcuucuacgucgagcucauccgcggccgcaaggaggagaccgagguccucuggaccuccaacuccaucgucgucuucugcggcaccuccggcaccuacggcaccggcuccuggcccgacggcgccgaccucaaccucaugcccaucuga

SEQ ID NO: 121935 - RNA, 1410 nt, Artificial Sequence; identical to SEQ ID NO: 121401
  derived and/or modified CDS sequence (opt2) from neuraminidase__InfluenzaA__AJJ99115

SEQ ID NO: 121936 - RNA, 1410 nt, Artificial Sequence; identical to SEQ ID NO: 120321
  derived and/or modified CDS sequence (opt2) from neuraminidase__InfluenzaA__AJJ99127

SEQ ID NO: 121937 - RNA, 1410 nt, Artificial Sequence; identical to SEQ ID NO: 121609
  derived and/or modified CDS sequence (opt2) from neuraminidase__InfluenzaA__AJJ99139

SEQ ID NO: 121938 - RNA, 1410 nt, Artificial Sequence
  derived and/or modified CDS sequence (opt2) from neuraminidase__InfluenzaA__AJJ99151
augaaccccaaccagaagaucaucaccaucggcuccgucucccucaccaucuccaccaucugcuucuucaugcagaucgccauccucaucaccaccgucacccuccacuucaagcaguacgaguucaacuccccccccaacaaccaggucaugcucugcgagcccaccaucaucgagcgcaacaucaccgagaucgucuaccucaccaacaccaccaucgagaaggagaucugccccaagcccgccgaguaccgcaacugguccaagccccagugcgacaucaccggcuucgcccccuucuccaaggacaacuccauccgccucuccgccggcggcgacaucugggucacccgcgagcccuacgucuccugcgaccccgacaagugcuaccaguucgcccucggccagggcaccacccucaacaacguccacuccaacaacaccguccgcgaccgcacccccuaccgcacccuccucaugaacgagcucggcguccccuuccaccucggcaccaagcaggucugcaucgccugguccuccuccuccugccacgacggcaaggccuggcuccacgucugcaucaccggcgacgacaagaacgccaccgccuccuucaucuacaacggccgccucgucgacuccgucgucuccugguccaaggagauccuccgcacccaggaguccgagugcgucugcaucaacggcaccugcaccgucgucaugaccgacggcuccgccuccggcaaggccgacaccaagauccucuucaucgaggagggcaagaucguccacaccuccacccucuccggcuccgcccagcacgucgaggagugcuccugcuacccccgcuaccccggcguccgcugcgucugccgcgacaacuggaagggcuccaaccgccccaucgucgacaucaacaucaaggaccacuccaucgucuccuccuacgucugcuccggccucgucggcgacaccccccgcaagaacgacuccuccuccuccucccacugccucgaccccaacaacgaggagggcggccacggcgucaagggcugggccuucgacgacggcaacgacgucuggaugggccgcaccaucuccgagaagucccgccucggcuacgagaccuucaaggucaucgagggcugguccaaccccaaguccaagcuccagaucaaccgccaggucaucgucgaccgcggcaaccgcuccggcuacuccggcaucuucuccgucgagggcaaguccugcaucaaccgcugcuucuacgucgagcucauccgcggccgcaaggaggagaccgagguccucuggaccuccaacuccaucgucgucuucugcggcaccuccggcaccuacggcaccggcuccuggcccgacggcgccgacaucaaccucaugcccaucuga

SEQ ID NO: 121939 - RNA, 1410 nt, Artificial Sequence; identical to SEQ ID NO: 112635
  derived and/or modified CDS sequence (opt2) from neuraminidase__InfluenzaA__AJJ99163

SEQ ID NO: 121940 - RNA, 1410 nt, Artificial Sequence
  derived and/or modified CDS sequence (opt2) from neuraminidase__InfluenzaA__AJJ99175
augaaccccaaccagaagaucaucaccaucggcuccgucucccucaccaucuccaccaucugccucuucaugcagaucgccauccucaucaccaccgucacccuccacuucaagcaguacgaguucaacuccccccccaacaaccaggucaugcucugcgagcccaccaucaucgagcgcaacaucaccgagaucgucuaccucaccaacaccaccaucgagaaggagaucugccccaagcucgccgaguaccgcaacugguccaagccccagugcgacaucaccggcuucgcccccuucuccaaggacaacuccauccgccucuccgccggcggcgacaucugggucacccgcgagcccuacgucuccugcgaccccgacaagugcuaccaguucgcccucggccagggcaccacccucaacaacguccacuccaacaacaccguccgcgaccgcacccccuaccgcacccuccucaugaacgagcucggcguccccuuccaccucggcaccaagcaggucugcaucgccugguccuccuccuccugccacgacggcaaggccuggcuccacgucugcaucaccggcgacgacaagaacgccaccgccuccuucaucuacaacggccgccucgucgacuccgucgucuccugguccaaggagauccuccgcacccaggaguccgagugcgucugcaucaacggcaccugcaccgucgucaugaccgacggcuccgccuccggcaaggccgacaccaagauccucuucaucgaggagggcaagaucguccacaccuccacccucuccggcuccgcccagcacgucgaggagugcuccugcuacccccgcuaccccggcguccgcugcgucugccgcgacaacuggaagggcuccaaccgccccaucgucgacaucaacaucaaggaccacuccaucgucuccuccuacgucugcuccggccucgucggcgacaccccccgcaagaacgacuccuccuccuccucccacugccucgaccccaacaacgaggagggcggccacggcgucaagggcugggccuucgacgacggcaacgacgucuggaugggccgcaccaucuccgagaagucccgccucggcuacgagaccuucaaggucaucgagggcugguccaaccccaaguccaagcuccagaucaaccgccaggucaucgucgaccgcggcaaccgcuccggcuacuccggcaucuucuccgucgagggcaaguccugcaucaaccgcugcuucuacgucgagcucauccgcggccgcaaggaggagaccgagguccucuggaccuccaacuccaucgucgucuucugcggcaccuccggcaccuacggcaccggcuccuggcccgacggcaccgacaucaaccucaugcccaucuga

SEQ ID NO: 121941 - RNA, 1410 nt, Artificial Sequence
  derived and/or modified CDS sequence (opt2) from neuraminidase__InfluenzaA__AJJ99199
augaaccccaaccagaagaucaucaccaucggcuccgucucccucaccaucuccaccaucugcuucuucaugcagaucgccauccucaucaccaccgucacccuccacuucaagcaguacgaguucaacuccccccccaacaaccaggucaugcucugcgagcccaccaucaucgagcgcaacaucaccgagaucgucuaccucaccaacaccaccaucgagaaggagaucugccccaagcucgccgaguaccgcaacugguccaagccccagugcgacaucaccggcuucgcccccuucuccaaggacaacuccauccgccucuccgccggcggcgacaucugggucacccgcgagcccuacgucuccugcgaccccgacaagugcuaccaguucgcccucggccagggcaccacccucaacaacguccacuccaacgacaccguccgcaaccgcacccccuaccgcacccuccucaugaacgagcucggcguccccuuccaccucggcaccaagcaggucugcaucgccugguccuccuccuccugccacgacggcaaggccuggcuccacgucugcaucaccggcgacgacaagaacgccaccgccuccuucaucuacaacggccgccucgucgacuccaucgucuccugguccaaggagauccuccgcacccaggaguccgagugcgucugcaucaacggcaccugcaccgucgucaugaccgacggcuccgccuccggcaaggccgacaccaagauccucuucaucgaggagggcaagaucguccacaccuccacccucuccggcuccgcccagcacgucgaggagugcuccugcuacccccgcuaccccggcguccgcugcgucugccgcgacaacuggaagggcuccaaccgccccaucgucgacaucaacaucaaggaccacuccaucgucuccuccuacgucugcuccggccucgucggcgacaccccccgcaagaacgacuccuccuccuccucccacugccucgaccccaacaacgaggagggcggccacggcgucaagggcugggccuucgacgacggcaacgacgucuggaugggccgcaccaucuccgagaagucccgccucggcuacgagaccuucaaggucaucgagggcugguccaaccccaaguccaagcuccagaucaaccgccaggucaucgucgaccgcggcaaccgcuccggcuacuccggcaucuucuccgucgagggcaaguccugcaucaaccgcugcuucuacgucgagcucauccgcggccgcaaggaggagaccgagguccucuggaccuccaacuccaucgucgucuucugcggcaccuccggcaccuacggcaccggcuccuggcccgacggcgccgacaucaaccucaugcccaucuga

SEQ ID NO: 121942 - RNA, 1410 nt, Artificial Sequence; identical to SEQ ID NO: 112779
  derived and/or modified CDS sequence (opt2) from neuraminidase__InfluenzaA__AJJ99211

SEQ ID NO: 121943 - RNA, 1410 nt, Artificial Sequence
  derived and/or modified CDS sequence (opt2) from neuraminidase__InfluenzaA__AJJ99223
augaaccccaaccagaagaucaucaccaucggcuccgucucccucaccaucuccaccaucugcuucuucaugcagaucgccauccucaucaccaccgucacccuccacuucaagcaguacgaguucaacuccccccccaacaaccaggucaugcucugcgagcccaccaucaucgagcgcaacaucaccgagaucgucuaccucaccaacaccaccaucgagaaggagaucugccccaagcucgccgaguaccgcaacugguccaagccccagugcgacaucaccggcuucgcccccuucuccaaggacaacuccauccgccucuccgccggcggcgacaucugggucacccgcgagcccuacgucuccugcgaccccgacaagugcuaccaguucgcccucggccagggcaccacccucaacaacguccacuccaacgacaccguccgcaaccgcacccccuaccgcacccuccucaugaacgagcucggcguccccuuccaccucggcaccaagcaggucugcaucgccugguccuccuccuccugccacgacggcaaggccuggcuccacgucugcaucaccggcgacgacaagaacgccaccgccuccuucaucuacaacggccgccucgucgacuccaucgucuccugguccaaggagauccuccgcacccaggaguccgagugcgucugcaucaacggcaccugcaccgucgucaugaccgacggcuccgccuccggcgaggccgacaccaagauccucuucaucgaggagggcaagaucguccacaccuccacccucuccggcuccgcccagcacgucgaggagugcuccugcuacccccgcuaccccggcguccgcugcgucugccgcgacaacuggaagggcuccaaccgccccaucgucgacaucaacaucaaggaccacuccaucgucuccuccuacgucugcuccggccucgucggcgacaccccccgcaagaacgacuccuccuccuccucccacugccucgaccccaacaacgaggagggcggccacggcgucaagggcugggccuucgacgacggcaacgacgucugggucggccgcaccaucuccgagaagucccgccucggcuacgagaccuucaaggucaucgagggcugguccaaccccaaguccaagcuccagaucaaccgccaggucaucgucgaccgcggcaaccgcuccggcuacuccggcaucuucuccgucgagggcaaguccugcaucaaccgcugcuucuacgucgagcucauccgcggccgcaaggaggagaccgagguccucuggaccuccaacuccaucgucgucuucugcggcaccuccggcaccuacggcaccggcuccuggcccgacggcgccgacaucaaccucaugcccaucuga

SEQ ID NO: 121944 - RNA, 1410 nt, Artificial Sequence
  derived and/or modified CDS sequence (opt2) from neuraminidase__InfluenzaA__AJJ99235
augaaccccaaccagaagaucaucaccaucggcuccgucucccucaccaucuccaccaucugcuucuucaugcagaucgccauccucaucaccaccgucacccuccacuucaagcaguacgaguucaacuccccccccaacaaccaggucaugcucugcgagcccaccaucaucgagcgcaacaucaccgagaucgucuaccucaccaacaccaccaucgagaaggagaucugccccaagcccgccgaguaccgcaacugguccaagccccagugcgacaucaccggcuucgcccccuucuccaaggacaacuccauccgccucuccgccggcggcgacaucugggucacccgcgagcccuacgucuccugcgaccccgacaagugcuaccaguucgcccucggccagggcaccacccucaacaacguccacuccaacgacaccguccgcgaccgcacccccuaccgcacccuccucaugaacgagcucggcguccccuuccaccucggcaccaagcaggucugcaucgccugguccuccuccuccugccacgacggcaaggccuggcuccacgucugcaucaccggcgacgacaagaacgccaccgccuccuucaucuacaacggccgccucgucgacuccaucgucuccugguccaaggagauccuccgcacccaggaguccgagugcgucugcaucaacggcaccugcaccgucgucaugaccgacggcuccgccuccggcgaggccgacaccaagauccucuucaucgaggagggcaagaucguccacaccuccacccucuccggcuccgcccagcacgucgaggagugcuccugcuacccccgcuaccccggcguccgcugcgucugccgcgacaacuggaagggcuccaaccgccccaucgucgacaucaacaucaaggaccacuccaucgucuccuccuacgucugcuccggccucgucggcgacaccccccgcaagaacgacuccuccuccuccucccacugccucgaccccaacaacgaggagggcggccacggcgucaagggcugggccuucgacgacggcaacgacgucuggaugggccgcaccaucuccgagaagucccgccucggcuacgagaccuucaaggucaucgagggcugguccaaccccaaguccaagcuccagaucaaccgccaggucaucgucgaccgcggcaaccgcuccggcuacuccggcaucuucuccgucgagggcaaguccugcaucaaccgcugcuucuacgucgagcucauccgcggccgcaaggaggagaccgagguccucuggaccuccaacuccaucgucgucuucugcggcaccuccggcaccuacggcaccggcuccuggcccgacggcgccgacaucaaccucaugcccaucuga

SEQ ID NO: 121945 - RNA, 1410 nt, Artificial Sequence
  derived and/or modified CDS sequence (opt2) from neuraminidase__InfluenzaA__AJJ99246
augaaccccaaccagaagaucaucaccaucggcuccgucugcaugaccaucggcauggccaaccucauccuccagaucggcaacaucaucuccaucuggaucucccacuccauccagcucggcaaccagucccagaucgagaccugcaaccagaacgucaucaccuacgagaacaacaccugggucaaccagaccuacgucaacaucuccaacaccaacuucgccgccggccaguccgucgucuccgucaagcucgccggcaacuccucccucugccccgucuccggcugggccaucuacuccaaggacaacuccguccgcaucggcuccaagggcgacgucuucgucauccgcgagcccuucaucuccugcuccccccucgagugccgcaccuucuuccucacccagggcgcccuccucaacgacaagcacuccaacggcaccaucaaggaccgcucccccuaccgcacccucauguccugccccaucggcgagguccccucccccuacaacucccgcuucgaguccgucgccugguccgccuccgccugccacgacggcaucaacuggcucaccaucggcaucuccggccccgacuccggcgccgucgccguccucaaguacaacggcaucaucaccgacaccaucaaguccuggcgcaacaacauccuccgcacccaggaguccgagugcgccugccucaacggcuccugcuucaccaucaugaccgacggccccuccgacggccaggccuccuacaagaucuuccgcaucgagaagggcaagaucgucaaguccgucgagaugaacgcccccaacuaccacuacgaggagugcuccugcuaccccgacuccuccgagaucaccugcgucugccgcgacaacuggcacggcuccaaccgccccugggucuccuucaaccagaaccucgaguaccagaucggcuacaucugcuccggcaucuucggcgacaacccccgccccaacgacaagaccggcuccugcggccccgucuccuccuccggcgccaacggcgucaagggcuucuccuucaaguacggcaacggcgucuggaucggccgcaccaaguccaucuccucccgcaagggcuucgagaugaucugggaccccaacggcuggaccggcaccgacaacaacuucuccaucaagcaggacaucgucggcaucaacgagugguccggcuacuccggcuccuucguccagcaccccgagcucaccggccucgacugcauccgccccugcuucugggucgagcucauccgcggccgccccaaggagaacaccaucuggaccuccggcuccuccaucuccuucugcggcgucaacuccgacaccgucggcugguccuggcccgacggcgccgagcuccccuucaccaucgacaaguga

SEQ ID NO: 121946 - RNA, 1410 nt, Artificial Sequence
  derived and/or modified CDS sequence (opt2) from neuraminidase__InfluenzaA__AJJ99257
augaaccccaaccagaagaucaucaccaucggcuccgucugcaugaccaucggcauggccaaccucauccuccagaucggcaacaucaucuccaucuggaucucccacuccauccagcucggcaaccagaaccagaucgagaccugcaaccaguccgucaucaccuacgagaacaacaccugggucaaccagaccuacgucaacaucuccaacaccaacuucgccgccggccaguccgucgucuccgucaagcucgccggcaacuccucccucugccccgucuccggcugggccaucuacuccaaggacaacuccauccgcaucggcuccaagggcgacgucuucgucauccgcgagcccuucaucuccugcuccccccucgagugccgcaccuucuuccucacccagggcgcccuccucaacgacaagcacuccaacggcaccaucaaggaccgcucccccuaccgcacccucauguccugccccaucggcgagguccccucccccuacaacucccgcuucgaguccgucgccugguccgccuccgccugccacgacggcaucaacuggcucaccaucggcaucuccggccccgacaacggcgccgucgccguccucaaguacaacggcaucaucaccgacaccaucaaguccuggcgcaacaacauccuccgcacccaggaguccgagugcgccugcgucaacggcuccugcuucaccaucaugaccgacggccccuccgacggccaggccuccuacaagaucuuccgcaucgagaagggcaagaucgucaaguccgucgagaugaacgcccccaacuaccacuacgaggagugcuccugcuaccccgacuccuccgagaucaccugcgucugccgcgacaacuggcacggcuccaaccgccccugggucuccuucaaccagaaccucgaguaccagaucggcuacaucugcuccggcaucuucggcgacaacccccgccccaacgacaagaccggcuccugcggccccguccccuccaacggcgccaacggcgucaagggcuucuccuucaaguacggcaacggcgucuggaucggccgcaccaaguccaucuccucccgcaagggcuucgagaugaucugggaccccaacggcuggaccggcaccgacaacuccuucuccaucaagcaggacaucgucggcaccaacgagugguccggcuacuccggcuccuucguccagcaccccgagcucaccggccucgacugcauccgccccugcuucugggucgagcucauccgcggccgccccaaggagaacaccaucuggaccuccggcuccuccaucuccuucugcggcgucaacuccggcaccgucggcugguccuggcccgacggcgccgagcuccccuucaccaucgacaaguga

SEQ ID NO: 121947 - RNA, 1413 nt, Artificial Sequence; identical to SEQ ID NO: 112668
  derived and/or modified CDS sequence (opt2) from neuraminidase__InfluenzaA__AJJ99269

SEQ ID NO: 121948 - RNA, 1410 nt, Artificial Sequence; identical to SEQ ID NO: 116994
  derived and/or modified CDS sequence (opt2) from neuraminidase__InfluenzaA__AJJ99280

SEQ ID NO: 121949 - RNA, 1410 nt, Artificial Sequence; identical to SEQ ID NO: 116745
  derived and/or modified CDS sequence (opt2) from neuraminidase__InfluenzaA__AJJ99291

SEQ ID NO: 121950 - RNA, 1413 nt, Artificial Sequence
  derived and/or modified CDS sequence (opt2) from neuraminidase__InfluenzaA__AJJ99303
augaaccccaaccagaagaucaucaccaucggcuccaucuccaucgccaucggcaucaucucccucaugcuccagaucggcaacaucaucuccaucugggccucccacuccauccagaccggcucccagaacaacaccggcaucugcaaccagcgcaucaucaccuacgagaacuccaccugggucaaccacaccuacgucaacaucaacaacaccaacgucgucgccggcgaggacaagaccuccgucacccucgccggcaacuccucccucugcuccaucuccggcugggccaucuacaccaaggacaacuccauccgcaucggcuccaagggcgacgucuucgucauccgcgagcccuucaucuccugcucccaccucgagugccgcaccuucuuccucacccagggcgcccuccucaacgacaagcacuccaacggcaccgucaaggaccgcucccccuaccgcgcccucauguccugcccccucggcgaggcccccucccccuacaacuccaaguucgaguccgucgccugguccgccuccgccugccacgacggcaugggcuggcucaccaucggcaucuccggccccgacaacggcgccgucgccguccucaaguacaacggcaucaucaccggcaccaucaaguccuggaagaagcagauccuccgcacccaggaguccgagugcgucugcaugaacggcuccugcuucaccaucaugaccgacggccccuccaacaaggccgccuccuacaagaucuucaagaucgagaagggcaaggucaccaaguccauggagcucaacgcccccaacuuccacuacgaggagugcuccugcuaccccgacaccggcaucgucaugugcgucugccgcgacaacuggcacggcuccaaccgccccugggucuccuucaaccagaaccucgacuaccagaucggcuacaucugcuccggcgucuucggcgacaacccccgccccgaggacggcgagggcuccugcaaccccgucaccgucgacggcgccaacggcgucaagggcuucuccuacaaguacgacaacggcgucuggaucggccgcaccaaguccaaccgccuccgcaagggcuucgagaugaucugggaccccaacggcuggaccaacaccgacuccgacuucuccgucaagcaggacgucgucgccaucaccgacugguccggcuacuccggcuccuucguccagcaccccgagcucaccggccucgacugcauccgccccugcuucugggucgagcucguccgcggccucccccgcgagaacaccaccaucuggaccuccggcuccuccaucuccuucugcggcgucaacuccgacaccgccaacugguccuggcccgacggcgccgagcuccccuucaccaucgacaaguga

SEQ ID NO: 121951 - RNA, 1410 nt, Artificial Sequence
  derived and/or modified CDS sequence (opt2) from neuraminidase__InfluenzaA__AJJ99314
augaaccccaaccagaagaucaucaccaucggcuccgccugcaugaccaucggcauggccaaccucauccuccagaucggcaacaucaucuccaucuggaucucccacuccauccagcucggcaaccagaaccagaucgagaccugcaaccaguccgucaucaccuacgagaacaacaccugggucaaccagaccuacgucaacaucuccaacaccaacuucgccgccggccaguccgucgucuccgucaagcucgccggcaacuccucccucugccccgucuccggcugggccaucuacuccaaggacaacuccauccgcaucggcuccaagggcgacgucuucgucauccgcgagcccuucaucuccugcuccccccucgagugccgcaccuucuuccucacccagggcgcccuccucaacgacaagcacuccaacggcaccaucaaggaccgcucccccuaccgcacccucauguccugccccaucggcgagguccccucccccuacaacucccgcuucgaguccgucgccugguccgccuccgccugccacgacggcaucaacuggcucaccaucggcaucuccggccccgacaacggcgccgucgccguccucaaguacaacggcaucaucaccgacaccaucaaguccuggcgcaacaacauccuccgcacccaggaguccgagugcgccugcgucaacggcuccugcuucaccgucaugaccgacggccccuccgacggccaggccuccuacaagaucuuccgcaucgagaagggcaagaucgucaaguccgucgagaugaacgcccccaacuaccacuacgaggagugcuccugcuaccccgacuccuccgagaucaccugcgucugccgcgacaacuggcacggcuccaaccgccccugggucuccuucaaccagaaccucgaguaccagaucggcuacaucugcuccggcaucuucggcgacaacccccgccccaacgacaagaccggcuccugcggccccgucuccuccaacggcgccaacggcgucaagggcuucuccuucaaguacggcaacggcgucuggaucggccgcaccaaguccaucuccucccgcaacggcuucgagaugaucugggaccccaacggcuggaccggcaccgacaacaacuucuccaucaagcaggacaucgucggcaucaacgagugguccggcuacuccggcuccuucguccagcaccccgagcucaccggccucgacugcauccgccccugcuucugggucgagcucauccgcggccgccccaaggagaacaccaucuggaccuccggcuccuccaucuccuucugcggcgucaacuccgacaccgucggcugguccuggcccgacggcgccgagcuccccuucaccaucgacaaguga

SEQ ID NO: 121952 - RNA, 1413 nt, Artificial Sequence
  derived and/or modified CDS sequence (opt2) from neuraminidase__InfluenzaA__AJJ99326
augaaccccaaccagaagaucaucaccaucggcuccaucuccaucgccaucggcaucaucucccucaugcuccagaucggcaacaucaucuccaucugggccucccacuccauccagaccggcucccagaacaacaccggcaucugcaaccagcgcaucaucaccuacgagaacuccaccugggucaaccacaccuacgucaacaucaacaacaccaacgucgucgccggcgaggacaagaccuccgucacccucgccggcaacuccucccucugcuccaucuccggcugggccaucuacaccaaggacaacuccauccgcaucggcuccaagggcgacgucuucgucauccgcgagcccuucaucuccugcucccaccucgagugccgcaccuucuuccucacccagggcgcccuccucaacgacaagcacuccaacggcaccgucaaggaccgcucccccuaccgcgcccucauguccugcccccucggcgaggcccccucccccuacaacuccaaguucgaguccgucgccugguccgccuccgccugccacgacggccucggcuggcucaccaucggcaucuccggccccgacaacggcgccgucgccguccucaaguacaacggcaucaucaccggcaccaucaaguccuggaagaagcagauccuccgcacccaggaguccgagugcgucugcaugaacggcuccugcuucaccaucaugaccgacggccccuccaacaaggccgccuccuacaagaucuucaagaucgagaagggcaaggucaccaaguccaucgagcucaacgcccccaacuucuacuacgaggagugcuccugcuaccccgacaccggcaucgucaugugcgucugccgcgacaacuggcacggcuccaaccgccccugggucuccuucaaccagaaccucgacuaccagaucggcuacaucugcuccggcgucuucggcgacaacccccgccccgaggacggcgagggcuccugcaaccccgucaccgucgacggcgccaacggcgucaagggcuucuccuacaaguacggcaacggcgucuggaucggccgcaccaaguccaaccgccuccgcaagggcuucgagaugaucugggaccccaacggcuggaccaacaccgacuccgacuucuccgucaagcaggacgucgucgccaucaccgacugguccggcuacuccggcuccuucguccagcaccccgagcucaccggccucgacugcauccgccccugcuucugggucgagcucguccgcggccucccccgcgagaacaccaccaucuggaccuccggcuccuccaucuccuucugcggcgucaacuccgacaccgccaacugguccuggcccgacggcgccgagcuccccuucaccaucgacaaguga

SEQ ID NO: 121953 - RNA, 1410 nt, Artificial Sequence; identical to SEQ ID NO: 114418
  derived and/or modified CDS sequence (opt2) from neuraminidase__InfluenzaA__AJJ99337

SEQ ID NO: 121954 - RNA, 1410 nt, Artificial Sequence; identical to SEQ ID NO: 113881
  derived and/or modified CDS sequence (opt2) from neuraminidase__InfluenzaA__AJJ99348

SEQ ID NO: 121955 - RNA, 1410 nt, Artificial Sequence; identical to SEQ ID NO: 112774
  derived and/or modified CDS sequence (opt2) from neuraminidase__InfluenzaA__AJJ99359

SEQ ID NO: 121956 - RNA, 1410 nt, Artificial Sequence
  derived and/or modified CDS sequence (opt2) from neuraminidase__InfluenzaA__AJJ99370
augaaccccaaccagaagaucaucaccaucggcuccgucugcaugaucaucggcauggccaaccucauccuccagaucggcaacaucaucuccaucuggaucucccacuccauccagcucggcaaccagucccagaucgagaccugcaaccaguccgucaucaccuacgagaacaacaccugggucaaccagaccuacgucaacaucuccaacaccaacuucgccgccggccaguccgucgucuccgucaagcucgccggcaacuccucccucugccccgucuccggcugggccaucuacuccaaggacaacuccauccgcaucggcuccaagggcgacgucuucgucauccgcgagcccuucaucuccugcuccccccucgagugccgcaccuucuuccucacccagggcgcccuccucaacgacaagcacuccaacggcaccaucaaggaccgcuccccccaccgcacccucauguccugccccaucggcgagguccccucccccuacaacucccgcuucgaguccgucgccugguccgccuccgccugccacgacggcaucaacuggcucaccaucggcaucuccggccccgacaacggcgccgucgccguccucaaguacaacggcaucaucaccgacaccaucaaguccuggcgcaacaacauccuccgcacccaggaguccgagugcgccugcgucaacggcuccugcuucaccaucaugaccgacggccccuccgaccgccaggccuccuacaagaucuuccgcaucgagaagggcaagaucgucaaguccgucgagaugaacgcccccaacuaccacuacgaggagugcuccugcuaccccgacuccuccgagaucaccugcgucugccgcgacaacuggcacggcuccaaccgccccugggucuccuucaaccagaaccucgaguaccagaucggcuacaucugcuccggcaucuucggcgacaacccccgccccaacgacaagaccggcuccugcggccccgucuccuccaacggcgccaacggcgucaagggcuucuccuucaaguacggcaacggcgucuggaucggccgcaccaaguccaucuccucccgcaagggcuucgagaugaucugggaccccaacggcuggaccggcaccgacaacaacuucuccaucaagcaggacaucgucggcaucaacgagugguccggcuacuccggcuccuucguccagcaccccgagcucaccggccucgacugcauccgccccugcuucugggucgagcucauccgcggccgccccaaggagaacaccaucuggaccuccggcuccuccaucuccuucugcggcgucaacuccgacaccgucggcugguccuggcccgacggcgccgagcuccccuucaccaucgacaaguga

SEQ ID NO: 121957 - RNA, 1410 nt, Artificial Sequence; identical to SEQ ID NO: 116293
  derived and/or modified CDS sequence (opt2) from neuraminidase__InfluenzaA__AJJ99381

SEQ ID NO: 121958 - RNA, 1410 nt, Artificial Sequence
  derived and/or modified CDS sequence (opt2) from neuraminidase__InfluenzaA__AJJ99392
augaaccccaaccagaagaucaucaccaucggcuccgucugcaugaccaucggcauggccaaccucauccuccagaucggcaacaucaucuccaucuggaucucccacuccauccagcucggcaaccagaaccagaucgagaccugcaaccaguccgucaucaccuacgagaacaacaccugggucaaccagaccuacgucaacaucuccaacaccaacuucgccgccggccaguccgucgucuccgucaagcucgccggcaacuccucccucugccccgucuccggcugggccaucuacuccaaggacaacuccauccgcaucggcuccaagggcgacgucuucgucauccgcgagcccuucaucuccugcuccccccucgagugccgcaccuucuuccucacccagggcgcccuccucaacgacaagcacuccaacggcaccaucaaggaccgcucccccuaccgcacccucauguccugccccaucggcgagguccccucccccuacaacucccgcuucgaguccgucgccugguccgccuccgccugccacgacggcaucaacuggcucaccaucggcaucuccggccccgacaacggcgccgucgccguccucaaguacaacggcaucaucaccgacaccaucaaguccuggcgcaacaacauccuccgcacccaggaguccgagugcgccugcgucaacggcuccugcuucaccgucaugaccgacggccccuccgacggccaggccuccuacaagaucuuccgcaucgagaagggcaagaucgucaaguccgucgagaugaacgcccccaacuaccacuacgaggagugcuccugcuaccccgacuccuccgagaucaccugcgucugccgcgacaacuggcacggcuccaaccgccccugggucuccuucaaccagaaccucgaguaccagaucggcuacaucugcuccggcaucuucggcgacaacccccgccccaacgacaagaccggcuccugcggccccgucucccccaacggcgccaacggcgucaagggcuucuccuucaaguacggcaacggcgucuggaucggccgcaccaaguccaucuccucccgcaacggcuucgagaugaucugggaccccaacggcuggaccggcaccgacaacaacuucuccaucaagcaggacaucgucggcaucaacgagugguccggcuacuccggcuccuucguccagcaccccgagcucaccggccucgacugcauccgccccugcuucugggucgagcucauccgcggccgccccaaggagaacaccaucuggaccuccggcuccuccaucuccuucugcggcgucaacuccgacaccgucggcugguccuggcccgacggcgccaagcuccccuucaccaucgacaaguga

SEQ ID NO: 121959 - RNA, 1410 nt, Artificial Sequence; identical to SEQ ID NO: 112774
  derived and/or modified CDS sequence (opt2) from neuraminidase__InfluenzaA__AJJ99403

SEQ ID NO: 121960 - RNA, 1413 nt, Artificial Sequence; identical to SEQ ID NO: 113497
  derived and/or modified CDS sequence (opt2) from neuraminidase__InfluenzaA__AJJ99415

SEQ ID NO: 121961 - RNA, 1413 nt, Artificial Sequence
  derived and/or modified CDS sequence (opt2) from neuraminidase__InfluenzaA__AJJ99427
augaaccccaaccagaagaucaucaccaucggcuccaucuccaucgccaucggcaucaucucccucaugcuccagaucggcaacaucaucuccaucugggccucccacuccauccagaccggcucccagaacaacaccggcaucugcaaccagcgcaucaucaccuacgagaacuccaccugggucaaccacaccuacgucaacaucaacaacaccaacgucgucgccggcgaggacaagaccuccgucacccucgccggcaacuccucccucugcuccaucuccggcugggccgucuacaccaaggacaacuccauccgcaucggcuccaagggcgacgucuucgucauccgcgagcccuucaucuccugcucccaccucgagugccgcaccuucuuccucacccagggcgcccuccucaacgacaagcacuccaacggcaccgucaaggaccgcucccccuaccgcgcccucauguccugcccccucggcgaggcccccucccccuacaacuccaaguucgaguccgucgccugguccgccuccgccugccacgacggcaugggcuggcucaccaucggcaucuccggccccgacaacggcgccgucgccguccucaaguacaacggcaucaucaccggcaccaucaaguccuggaagaagcagauccuccgcacccaggaguccgagugcgucugcaugaacggcuccugcuucaccaucaugaccgacggccccuccgacaaggccgccuccuacaagaucuucaagaucgagaagggcaaggucaccaaguccaucgagcucaacgcccccaacuucuacuacgaggagugcuccugcuaccccgacaccggcaucgucaugugcgucugccgcgacaacuggcacggcuccaaccgccccugggucuccuucaaccagaaccucgacuaccagaucggcuacaucugcuccggcgucuucggcgacaacccccgccccgaggacggcgagggcuccugcaaccccgucaccgucgacggcgccaacggcgucaagggcuucuccuacaaguacggcaacggcgucuggaucggccgcaccaaguccaaccgccuccgcaagggcuucgagaugaucugggaccccaacggcuggaucaacaccgacuccgacuucuccgucaagcaggacgucgucgccaucaccgacugguccggcuacuccggcuccuucguccagcaccccgagcucaccggccucgacugcauccgccccugcuucugggucgagcucguccgcggccucccccgcgagaacaccaccaucuggaccuccggcuccuccaucuccuucugcggcgucaacuccgacaccgccaacugguccuggcccgacggcgccgagcuccccuucaccaucgacaaguga

SEQ ID NO: 121962 - RNA, 1413 nt, Artificial Sequence
  derived and/or modified CDS sequence (opt2) from neuraminidase__InfluenzaA__AJJ99439
augaaccccaaccagaagaucaucaccaucggcuccaucuccaucgccaucggcaucaucucccucaugcuccagaucggcaacaucaucuccaucugggccucccacuccauccagaccggcucccagaacaacaccggcaucugcaaccagcgcaucaucaccuacgagaacuccaccugggucaaccacaccuacgucaacaucaacaacaccaacgucgucgccggcgaggacaagaccuccgucacccucgccggcaacuccucccucugcuccaccuccggcugggccaucuacaccaaggacaacuccauccgcaucggcuccaagggcgacgucuucgucauccgcgagcccuucaucuccugcucccaccucgagugccgcaccuucuuccucacccagggcgcccuccucaacgacaagcacuccaacggcaccgucaaggaccgcucccccuaccgcgcccucauguccugcccccucggcgaggcccccucccccuacaacuccaaguucgaguccgucgccugguccgccuccgccugccacgacggcaugggcuggcucaccaucggcaucuccggccccgacaacggcgccgucgccguccucaaguacaacggcaucaucaccggcaccaucaaguccuggaagaagcagauccuccgcacccaggaguccgagugcgucugcaugaacggcuccugcuucaccaucaugaccgacggccccuccaacaaggccgccuccuacaagaucuucaagaucgagaagggcaaggucaccaaguccaucgagcucaacgcccccaacuucuacuacgaggagugcuccugcuaccccgacaccggcaucgucaugugcgucugccgcgacaacuggcacggcuccaaccgccccugggucuccuucaaccagaaccucgacuaccagaucggcuacaucugcuccggcgucuucggcgacaacccccgccccgaggacggcgagggcuccugcaaccccgucaccgucgacggcgccaacggcgucaagggcuucuccuacaaguacggcaacggcgucuggaucggccgcaccaaguccaaccgccuccgcaagggcuucgagaugaucugggaccccaacggcuggaccaacaccgacuccgacuucuccgucaagcaggacgucgucgccaucaccgacugguccggcuacuccggcuccuucguccagcaccccgagcucaccggccucgacugcauccgccccugcuucugggucgagcucguccgcggccucccccgcgagaacaccaccaucuggaccuccggcuccuccaucuccuucugcggcgucaacuccgacaccgccaacugguccuggcccgacggcgccgagcuccccuucaccaucgacaaguga

SEQ ID NO: 121963 - RNA, 1413 nt, Artificial Sequence
  derived and/or modified CDS sequence (opt2) from neuraminidase__InfluenzaA__AJJ99451
augaaccccaaccagaagaucaucaccaucggcuccaucuccaucgccaucggcaucaucucccucaugcuccagaucggcaacaucaucuccaucugggccucccacuccauccagaccggcucccagaacaacaccggcaucugcaaccagcgcaucaucaccuacgagaacuccaccugggucaaccacaccuacgucaacaucaacaacaccaacgucgucgccggcgaggacaagaccuccgucacccucgccggcaacuccucccucugcuccaucuccggcugggccaucuacaccaaggacaacuccauccgcaucggcuccaagggcgacgucuucgucauccgcgagcccuucaucuccugcucccaccucgagugccgcaccuucuuccucacccagggcgcccuccucaacgacaagcacuccaaccgcaccgucaaggaccgcucccccuaccgcgcccucauguccugcccccucggcgaggcccccucccccuacaacuccaaguucgaguccgucgccugguccgccuccgccugccacgacggcaugggcuggcucaccaucggcaucuccggccccgacaacggcgccgucgccguccucaaguacaacggcaucaucaccggcaccaucaaguccuggaagaagcagauccuccgcacccaggaguccgagugcgucugcaugaacggcuccugcuucaccaucaugaccgacggccccuccaacaaggccgccuccuacaagaucuucaagaucgagaagggcaaggucaccaaguccaucgagcucaacgcccccaacuuccacuacgaggagugcuccugcuaccccgacaccggcaucgucaugugcgucugccgcgacaacuggcacggcuccaaccgccccugggucuccuucaaccagaaccucgacuaccagaucggcuacaucugcuccggcgucuucggcgacaacccccgccccgaggacggcgagggcuccugcaaccccgucaccgucgacggcgccaacggcgucaagggcuucuccuacaaguacgacaacggcgucuggaucggccgcaccaaguccaaccgccuccgcaagggcuucgagaugaucugggaccccaacggcuggaccaacaccgacuccgacuucuccgucaagcaggacgucgucgccaucaccgacugguccggcuacuccggcuccuucguccagcaccccgagcucaccggccucgacugcauccgccccugcuucugggucgagcucguccgcggccucccccgcgagaacaccaccaucuggaccuccggcuccuccaucuccuucugcggcgucaacuccgacaccgccaacugguccuggcccgacggcgccgagcuccccuucaccaucgacaaguga

SEQ ID NO: 121964 - RNA, 1413 nt, Artificial Sequence; identical to SEQ ID NO: 112668
  derived and/or modified CDS sequence (opt2) from neuraminidase__InfluenzaA__AJJ99463

SEQ ID NO: 121965 - RNA, 1410 nt, Artificial Sequence
  derived and/or modified CDS sequence (opt2) from neuraminidase__InfluenzaA__AJJ99474
augaaccccaaccagaagaucaucaccaucggcuccgucugcaugaccaucggcaucgccaaccucauccuccagaucggcaacaucaucuccaucuggaucucccacuccauccagcucggcaaccagaaccagaucgagaccugcaaccaguccgucaucaucuacgagaacaacaccugggucaaccagaccuacgucaacaucuccaacaccaacuucgccgccggccaguccgucgucuccgucaagcucgccggcaacuccucccucugccccgucuccggcugggccaucuacuccaaggacaacuccauccgcaucggcuccaagggcgacgucuucgucauccgcgagcccuucaucuccugcuccccccucgagugccgcaccuucuuccucacccagggcgcccuccucaacgacaagcacuccaacggcaccaucaaggaccgcucccccuaccgcacccucauguccugccccaucggcgagguccccucccccuacaacucccgcuucgaguccgucgccugguccgccuccgccugccacgacggcaucaacuggcucaccaucggcaucuccggccccgacaacggcgccgucgccguccucaaguacaacggcaucaucaccgacaccaucaaguccuggcgcaacaacauccuccgcacccaggaguccgagugcgccugcgucaacggcuccugcuucaccaucaugaccgacggccccuccgacggccaggccuccuacaagaucuuccgcaucgagaagggcaagaucaucaaguccgucgagaugaacgcccccaacuaccacuacgaggagugcuccugcuaccccgacuccuccgagaucaccugcgucugccgcgacaacuggcacggcuccaaccgccccugggucuccuucaaccagaaccucgaguaccagaucggcuacaucugcuccggcaucuucggcgacaacccccgccccaacgacaagaccggcuccugcggccccgucuccuccaacggcgccaacggcgucaagggcuucuccuucaaguacggcaacggcgucuggaucggccgcaccaaguccaucuccucccgcaagggcuucgagaugaucugggaccccaacggcuggaccggcaccgacaacuccuucuccaucaagcaggacaucgucggcaucaacgagugguccggcuacuccggcuccuucguccagcaccccgagcucaccggccucgacugcauccgccccugcuucugggucgagcucauccgcggccgccccaaggagaacaccaucuggaccuccggcuccuccaucuccuucugcggcgucaacuccggcaccgucggcugguccuggcccgacggcgccgagcuccccuucaccaucgacaaguga

SEQ ID NO: 121966 - RNA, 1410 nt, Artificial Sequence; identical to SEQ ID NO: 116745
  derived and/or modified CDS sequence (opt2) from neuraminidase__InfluenzaA__AJJ99496

SEQ ID NO: 121967 - RNA, 1410 nt, Artificial Sequence
  derived and/or modified CDS sequence (opt2) from neuraminidase__InfluenzaA__AJJ99507
augaaccccaaccagaagaucaucaccaucggcuccgucugcaugaccaucggcauggccaaccucauccuccagaucggcaacaucaucuccaucuggaucucccacuccauccagcucggcaaccagaaccagaucgagaccugcaaccaguccgucaucaccuacgagaacaacaccugggucaaccagaccuacgucaacaucuccaacaccaacuucgccgccggccaguccgucgucuccgucaagcucgccggcaacuccucccucugccccgucuccggcugggccaucuacuccaaggacaacuccauccgcaucggcuccaagggcgacgucuucgucauccgcgagcccuucaucuccugcuccccccucgagugccgcaccuucuuccucacccagggcgcccuccucaacgacaagcacuccaacggcaccaucaaggaccgcucccccuaccgcacccucauguccugccccaucggcgagguccccucccccuacaacucccgcuucgaguccgucgccugguccgccuccgccugccacgacggcaucaacuggcucaccaucggcaucuccggccccgacaacggcgccgucgccguccucaaguacaacggcaucaucaccgacaccaucaaguccuggcgcaacaacauccuccgcacccaggaguccgagugcgccugcgucaacggcuccugcuucaccgucaugaccgacggccccuccgacggccaggccuccuacaagaucuuccgcaucgagaagggcaagaucgucaaguccgucgagaugaacgcccccaacuaccacuacgaggagugcuccugcuaccccgacuccuccgagaucaccugcgucugccgcgacaacuggcacggcgccaaccgccccugggucuccuucaaccagaaccucgaguaccagaucggcuacaucugcuccggcaucuucggcgacaacccccgccccaacgacaagaccggcuccugcggccccgucuccuccaacggcgccaacggcgucaagggcuucuccuucaaguacgacaacggcgucuggaucggccgcaccaaguccaucuccucccgcaacggcuucgagaugaucugggaccccaacggcuggaccggcaccgacaacgacuucuccaucaagcaggacaucgucggcaucaacgagugguccggcuacuccggcuccuucguccagcaccccgagcucaccggccucgacugcauccgccccugcuucugggucgagcucauccgcggccgccccaaggagaacaccaucuggaccuccggcuccuccaucuccuucugcggcgucaacuccgacaccgucggcugguccuggcccgacggcgccgagcuccccuucaccaucgacaaguga

SEQ ID NO: 121968 - RNA, 1410 nt, Artificial Sequence; identical to SEQ ID NO: 112774
  derived and/or modified CDS sequence (opt2) from neuraminidase__InfluenzaA__AJJ99518

SEQ ID NO: 121969 - RNA, 1410 nt, Artificial Sequence
  derived and/or modified CDS sequence (opt2) from neuraminidase__InfluenzaA__AJJ99529
augaaccccaaccagaagaucaucaccaucggcuccgucugcaugaccaucggcauggccaaccucauccuccaggucggcaacaucaucuccaucuggaucucccacuccauccagcucggcaaccagaaccagaucgagaccugcaaccaguccgucaucaccuacgagaacaacaccugggucaaccagaccuacgucaacaucuccaacaccaacuucgccgccggccaguccgucgucuccgucaagcucgccggcaacuccucccucugccccgucuccggcugggccaucuacuccaaggacaacuccauccgcaucggcuccaagggcgacgucuucgucauccgcgagcccuucaucuccugcuccccccucgagugccgcaccuucuuccucacccagggcgcccuccucaacgacaagcacuccaacggcaccaucaaggaccgcucccccuaccgcacccucauguccugccccaucggcgagguccccucccccuacaacucccgcuucgaguccgucgccugguccgccuccgccugccacgacggcuucaacuggcucaccaucggcaucuccggccccgacaacggcgccgucgccguccucaaguacaacggcaucaucaccgacaccaucaaguccuggcgcaacaacauccuccgcacccaggaguccgagugcgccugcgucaacggcuccugcuucaccaucaugaccgacggccccuccgacggccaggccuccuacaagaucuuccgcaucgagaagggcaagaucaucaaguccgucgagaugaacgcccccaacuaccacuacgaggagugcuccugcuaccccgacuccuccgagaucaccugcgucugccgcgacaacuggcacggcuccaaccgccccugggucuccuucaaccagaaccucgaguaccagaucggcuacaucugcuccggcaucuucggcgacaacccccgccccaacgacaagaccggcuccugcggccccgucuccuccaacggcgccaacggcgucaagggcuucuccuucaaguacggcaacggcgucuggaucggccgcaccaaguccaucuccucccgcaagggcuucgagaugaucugggaccccaacggcuggaccggcaccgacaacuccuucuccaucaagcaggacaucgucggcaucaacgagugguccggcuacuccggcuccuucguccagcaccccgagcucaccggccucgacugcauccgccccugcuucugggucgagcucauccgcggccgccccaaggagaacaccaucuggaccuccggcuccuccaucuccuucugcggcgucaacuccggcaccgucggcugguccuggcccgacggcgccgagcuccccuucaccaucgacaaguga

SEQ ID NO: 121970 - RNA, 1410 nt, Artificial Sequence
  derived and/or modified CDS sequence (opt2) from neuraminidase__InfluenzaA__AJJ99540
augaaccccaaccagaagaucaucaccaucggcuccgucugcaugaccaucggcauggccaaccucauccuccagaucggcaacaucaucuccaucuggaucucccacuccauccagcucggcaaccagaaccagaucgagaccugcaaccaguccgucaucaccuacgagaacaacaccugggucaaccagaccuacgucaacaucuccaacaccaacuucgccgccggccaguccgucgucuccgucaagcucgccggcaacuccucccucugccccgucuccggcugggccaucuacuccaaggacaacuccauccgcaucggcuccaagggcgacgucuucgucauccgcgagcccuucaucuccugcuccccccucgagugccgcaccuucuuccucacccagggcgcccuccucaacgacaagcacuccaacggcaccaucaaggaccgcucccccuaccgcacccucauguccugccccaucggcgagguccccucccccuacaacucccgcuucgaguccgucgccugguccgccuccgccugccacgacggcaucaacuggcucaccaucggcaucuccggccccgacaacggcgccgucgccguccucaaguacaacggcaucaucaccgacaccaucaaguccuggcgcaacaacauccuccgcacccaggaguccgagugcgccugcgucaacggcuccugcuucaccaucaugaccgacggccccuccgacggccaggccuccuacaagaucuuccgcaucgagaagggcaagaucgucaaguccgucgagaugaacgcccccaacuaccacuacgaggagugcuccugcuaccccgacuccuccaagaucaccugcgucugccgcgacaacuggcacggcuccaaccgccccugggucuccuucaaccagaaccucgaguaccagaucggcuacaucugcuccggcaucuucggcgacaacccccgccccaacgacaagaccggcuccugcggccccgucuccuccaacggcgccaacggcgucaagggcuucuccuucaaguacggcaacggcaucuggaucggccgcaccaaguccaucuccucccgcaagggcuucgagaugaucugggaccccaacggcuggaccggcaccgacaacaacuucuccaucaagcaggacaucgucggcaucaacgagugguccggcuacuccggcuccuucguccagcaccccgagcucaccggccucgacugcauccgccccugcuucugggucgagcucauccgcggccgccccaaggagaacaccaucuggaccuccggcuccuccaucuccuucugcggcgucaacuccgacaccgucggcugguccuggcccgacggcgccgagcuccccuucaccaucgacaaguga

SEQ ID NO: 121971 - RNA, 1410 nt, Artificial Sequence
  derived and/or modified CDS sequence (opt2) from neuraminidase__InfluenzaA__AJJ99551
augaaccccaaccagaagaucaucaccaucggcuccgucugcaugaccaucggcauggccaaccucauccuccagaucggcaacaucaucuccaucuggaucucccacuccauccagcucggcaaccagucccagaccgagaccugcaaccaguccgucaucaccuacgagaacaacaccugggucaaccagaccuacgucaacaucuccaacaccaaccccgccgccggccaguccgucgucuccgucaagcucgccggcaacuccucccucugccccgucuccggcugggccaucuacuccaaggacaacuccauccgcaucggcuccaagggcgacgucuucgucauccgcgagcccuucaucuccugcuccucccucgagugccgcaccuucuuccucacccagggcgcccuccucaacgacaagcacuccaacggcaccaucaaggaccgcucccccuaccgcacccucauguccugccccaucggcgagguccccucccccuacaacucccgcuucgaguccgucgccugguccgccuccgccugccacgacggcaucaacuggcucaccaucggcaucuccggccccgacaacggcgccgucgccguccucaaguacaacggcaucaucaccgacaccaucaaguccuggcgcaacaacauccuccgcacccaggaguccgagugcgccugcgucaacggcuccugcuucaccaucaugaccgacggccccuccgacggccaggccuccuacaagaucuuccgcaucgagaagggcaagaucgucaaguccgucgagaugaacgcccccaacuaccacuacgaggagugcuccugcuaccccgacuccuccgagaucaccugcgucugccgcgacaacuggcacggcuccaaccgccccugggucuccuucaaccagaaccucgaguaccagaucggcuacaucugcuccggcaucuucggcgacaacccccgccccaacgacaagaccggcuccugcggccccgucuccuccaacggcgccaacggcgucaagggcuucuccuucaaguacggcaacggcgucuggaucggccgcaccaaguccaucuccucccgcaagggcuucgagaugaucugggaccccaacggcuggaccggcaccgacaacaacuucuccaucaagcaggacaucgucggcaucaacgagugguccggcuacuccggcuccuucguccagcaccccgagcucaccggccucgacugcauccgccccugcuucugggucgagcucauccgcggccgccccaaggagaacaccaucuggaccuccggcuccuccaucuccuucugcggcgucaacuccgacaccgucggcugguccuggcccgacggcgccgagcuccccuucaccaucgacaaguga

SEQ ID NO: 121972 - RNA, 1410 nt, Artificial Sequence; identical to SEQ ID NO: 116761
  derived and/or modified CDS sequence (opt2) from neuraminidase__InfluenzaA__AJJ99562

SEQ ID NO: 121973 - RNA, 1410 nt, Artificial Sequence
  derived and/or modified CDS sequence (opt2) from neuraminidase__InfluenzaA__AJJ99573
augaaccccaaccagaagaucaucaccaucggcuccgucugcaugaccaucggcauggccaaccucauccuccagaucggcaacaucaucuccaucuggaucucccacuccauccagcucggcaaccagucccagaucgagaccugcaaccaguccgucaucaccuacgagaacaacaccugggucaaccagaccuacgucaacaucuccaacaccaacuucgccgccggccaguccgucgucuccgucaagcucgccggcaacuccucccucugccccgucuccggcugggccaucuacuccaaggacaacuccauccgcaucggcuccaagggcgacgucuucgucauccgcgagcccuucaucuccugcuccccccucgagugccgcaccuucuuccucacccagggcgcccuccucaacgacaagcacuccaacggcaccaucaaggaccgcucccccuaccgcacccucauguccugccccaucggcgagguccccucccccuacaacucccgcuucgaguccgucgccugguccgccuccgccugccacgacggcaucaacuggcucaccaucggcaucuccggccccgacaacggcgccgucgccguccucaaguacaacggcaucaucaccgacaccaucaaguccuggcgcaacaacauccuccgcacccaggaguccgagugcgccugcgucaacggcuccugcuucaccaucaugaccgacggccccuccgacggccaggccuccuacaagaucuuccgcaucgagaagggcaagaucgucaaguccgucgagaugaacgcccccaacuaccacuacgaggagugcuccugcuaccccgacuccuccgagaucaccugcgucugccgcgacaacuggcacggcuccaaccgccccugggucuccuucaaccagaaccucgaguaccagaucggcuacaucugcuccggcaucuucggcgacaacccccgccccaacgacaagaccggcuccugcggccccgucuccuccaacggcgccaacggcgucaagggcuucuccuucaaguacggcaacggcgucuggaucggccgcaccaaguccaucuccucccgcaagggcuucgagaugaucugggaccccaacggcuggaccggcaccgacaacaacuucuccaucaagcaggacgucgucggcaucaacgagugguccggcuacuccggcuccuucguccagcaccccgagcucaccggccucgacugcauccgccccugcuucugggucgagcucauccgcggccgccccaaggagaacaccaucuggaccuccggcuccuccaucuccuucugcggcgucaacuccgacaccgucggcugguccuggcccgacggcgccgagcuccccuucaccaucgacaaguga

SEQ ID NO: 121974 - RNA, 1410 nt, Artificial Sequence; identical to SEQ ID NO: 121951
  derived and/or modified CDS sequence (opt2) from neuraminidase__InfluenzaA__AJJ99584

SEQ ID NO: 121975 - RNA, 1410 nt, Artificial Sequence
  derived and/or modified CDS sequence (opt2) from neuraminidase__InfluenzaA__AJJ99595
augaaccccaaccagaagaucaucaccaucggcuccgucugcaugaccaucggcauggccaaccucaucuuccagaucggcaacaucaucuccaucuggaucucccacuccauccagcucggcaaccagaaccagaucgagaccugcaaccaguccgucaucaccuacgagaacaacaccugggucaaccagaccuacgucaacaucuccaacaccaacuucgccgccggccaguccgucgucuccgucaagcucgccggcaacuccucccucugccccgucuccggcugggccaucuacuccaaggacaacuccauccgcaucggcuccaagggcgacgucuucgucauccgcgagcccuucaucuccugcuccccccucgagugccgcaccuucuuccucacccagggcgcccuccucaacgacaagcacuccaacggcaccaucaaggaccgcucccccuaccgcacccucauguccugccccaucggcgagguccccucccccuacaacucccgcuucgaguccgucgccugguccgccuccgccugccacgacggcaucaacuggcucaccaucggcaucuccggccccgacaacggcgccgucgccguccucaaguacaacggcaucaucaccgacaccaucaaguccuggcgcaacaacauccuccgcacccaggaguccgagugcgccugcgucaacggcuccugcuucaccgucaugaccgacggccccuccgacggccaggccuccuacaagaucuuccgcaucgagaagggcaagaucgucaaguccgucgagaugaacgcccccaacuaccacuacgaggagugcuccugcuaccccgacuccuccgagaucaccugcgucugccgcgacaacuggcacggcuccaaccgccccugggucuccuucaaccagaaccucgaguaccagaucggcuacaucugcuccggcaucuucggcgacaacccccgccccaacgacaagaccggcuccugcggccccgucuccuccaacggcgccaacggcgucaagggcuucuccuucaaguacggcaacggcgucuggaucggccgcaccaaguccaucuccucccgcaacggcuucgagaugaucugggaccccaacggcuggaccggcaccgacaacaacuucuccaucaagcaggacaucgucggcaucaacgagugguccggcuacuccggcuccuucguccagcaccccgagcucaccggccucgacugcauccgccccugcuucugggucgagcucauccgcggccgccccaaggagaacaccaucuggaccuccggcuccuccaucuccuucugcggcgucaacuccgacaccgucggcugguccuggcccgacggcgccgagcuccccuucaccaucgacaaguga

SEQ ID NO: 121976 - RNA, 1410 nt, Artificial Sequence
  derived and/or modified CDS sequence (opt2) from neuraminidase__InfluenzaA__AJJ99606
augaaccccaaccagaagaucaucaccaucggcuccgucugcaugaccaucggcauggccaaccucauccuccagaucggcaacaucaucuccaucuggaucucccacuccauccagcucggcaaccagaaccagaucgagaccugcaaccaguccgucaucaccuacgagaacaacaccugggucaaccagaccuacgucaacaucuccaacaccaacuucgccgccggccaguccgucgucuccgucaagcucgccggcaacuccucccucugccccgucuccggcugggccaucuacuccaaggacaacuccauccgcaucggcuccaagggcgacgucuucgucauccgcgagcccuucaucuccugcuccccccucgagugccgcaccuucuuccucacccagggcgcccuccucaacgacaagcacuccaacggcaccaucaaggaccgcucccccuaccgcacccucauguccugccccaucggcgagguccccucccccuacaacucccgcuucgaguccgucgccugguccgccuccgccugccacgacggcaucaacuggcucaccaucggcaucuccggccccgacaacggcgccgucgccguccucaaguacaacggcgucaucaccgacaccaucaaguccuggcgcaacaacauccuccgcacccaggaguccgagugcgccugcgucaacggcuccugcuucaccgucaugaccgacggccccuccgacggccaggccuccuacaagaucuuccgcaucgagaagggcaagaucgucaaguccgucgagaugaacgcccccaacuaccacuacgaggagugcuccugcuaccccgacuccuccgagaucaccugcgucugccgcgacaacuggcacggcuccaaccgccccugggucuccuucaaccagaaccucgaguaccagaucggcuacaucugcuccggcaucuucggcgacaacccccgccccaacgacaagaccggcuccugcggccccgucuccuccaacggcgccaacggcgucaagggcuucuccuucaaguacggcaacggcgucuggaucggccgcaccaaguccaucuccucccgcaacggcuucgagaugaucugggaccccaacggcuggaccggcaccgacaacaacuucuccaucaagcaggacaucgucggcaucaacgagugguccggcuacuccggcuccuucguccagcaccccgagcucaccggccucgacugcauccgccccugcuucugggucgagcucauccgcggccgccccaaggagaacaccaucuggaccuccggcuccuccaucuccuucugcggcgucaacuccgacaccgucggcugguccuggcccgacggcgccgagcuccccuucaccaucgacaaguga

SEQ ID NO: 121977 - RNA, 1413 nt, Artificial Sequence; identical to SEQ ID NO: 113497
  derived and/or modified CDS sequence (opt2) from neuraminidase__InfluenzaA__AJJ99618

SEQ ID NO: 121978 - RNA, 1413 nt, Artificial Sequence
  derived and/or modified CDS sequence (opt2) from neuraminidase__InfluenzaA__AJJ99630
augaaccccaaccagaagaucaucaccaucggcuccaucuccaucgccaucggcaucaucucccucaugcuccagaucggcaacaucaucuccaucugggccucccacuccauccagaccggcucccagaacaacaccggcaucugcaaccagcgcaucaucaccuacgagaacuccaccugggucaaccacaccuacgucaacaucaacaacaccaacgucgucgccggcgaggacaagaccuccgucacccucgccggcaacuccucccucugcuccaucuccggcugggccaucuacaccaaggacaacuccauccgcaucggcuccaagggcgacgucuucgucauccgcgagcccuucaucuccugcucccaccucgagugccgcaccuucuuccucacccagggcgcccuccucaacgacaagcacuccaacggcaccgucaaggaccgcucccccuaccgcgcccucauguccugcccccucggcgaggcccccucccccuacaacuccaaguucgaguccgucgccugguccgccuccgccugccacgacggcaugggcuggcucaccaucggcaucuccggccccgacaacggcgccgucgccguccucaaguacaacggcaucaucaccggcaccaucaaguccuggaagaagcagauccuccgcacccaggaguccgagugcgucugcaugaacggcuccugcuucaccaucaugaccgacggccccuccaacaaggccgccuccuacaagaucuucaagaucgagaagggcaaggucaccaaguccaucgagcucaacgcccccaacuucuacuacgaggagugcuccugcuaccccgacaccggcaucgucaugugcgucugccgcgacaacuggcacggcuccaaccgccccugggucuccuucaaccagaaccucgacuaccagaucggcuacaucugcuccggcgucuucggcgacaacccccgccccgaggacggcgagggcuccugcaaccccgucaccgucgacggcgccaacggcgucaagggcuucuccuacaaguacggcaacggcgucuggaucggccgcaccaaguccaaccgccuccgcaagggcuucgagaugaucugggaccccaacggcuggaccaacaccgacuccgacuucuccaugaagcagaacgucgucgccaucaccgacugguccggcuacuccggcuccuucguccagcaccccgagcucaccggccucgacugcauccgccccugcuucugggucgagcucguccgcggccucccccgcgagaacaccaccaucuggaccuccggcuccuccaucuccuucugcggcgucaacuccgacaccgccaacugguccuggcccgacggcgccgagcuccccuucaccaucgacaaguga

SEQ ID NO: 121979 - RNA, 1413 nt, Artificial Sequence; identical to SEQ ID NO: 113497
  derived and/or modified CDS sequence (opt2) from neuraminidase__InfluenzaA__AJJ99642

SEQ ID NO: 121980 - RNA, 1413 nt, Artificial Sequence; identical to SEQ ID NO: 113497
  derived and/or modified CDS sequence (opt2) from neuraminidase__InfluenzaA__AJJ99654

SEQ ID NO: 121981 - RNA, 1413 nt, Artificial Sequence
  derived and/or modified CDS sequence (opt2) from neuraminidase__InfluenzaA__AJJ99666
augaaccccaaccagaagaucaucaccaucggcuccaucuccaucgccaucggcaucaucucccucaugcuccagaucggcaacaucaucuccaucugggccucccacuccauccagaccggcucccagaacaacaccggcaucugcaaccagcgcaucaucaccuacgagaacuccaccugggucaaccacaccuacgucaacaucaacaacaacaacgucgucgccggcgaggacaagaccuccgucacccucgccggcaacuccucccucugcuccaucuccggcugggccaucuacaccaaggacaacuccauccgcaucggcuccaagggcgacgucuucgucauccgcgagcccuucaucuccugcucccaccucgagugccgcaccuucuuccucacccagggcgcccuccucaacgacaagcacuccaacggcaccgucaaggaccgcucccccuaccgcgcccucauguccugcccccucggcgaggcccccucccccuacaacuccaaguucgaguccgucgccugguccgccuccgccugccacgacggcaugggcuggcucaccaucggcaucuccggccccgacaacggcgccgucgccguccucaaguacaacggcaucaucaccggcaccaucaaguccuggaagaagcagauccuccgcacccaggaguccgagugcgucugcaugaacggcuccugcuucaccaucaugaccgacggccccuccaacaaggccgccuccuacaagaucuucaagaucgagaagggcaaggucaccaaguccaucgagcucaacgcccccaacuuccacuacgaggagugcuccugcuaccccgacaccggcaucgucaugugcgucugccgcgacaacuggcacggcuccaaccgccccugggucuccuucaaccagaaccucgacuaccagaucggcuacaucugcuccggcgucuucggcgacaacccccgccccgaggacggcgagggcuccugcaaccccgucaccgucgacggcgccaacggcgucaagggcuucuccuacaaguacgacaacggcgucuggaucggccgcaccaaguccaaccgccuccgcaagggcuucgagaugaucugggaccccaacggcuggaccaacaccgacuccgacuucuccgucaagcaggacgucgucgccaucaccgacugguccggcuacuccggcuccuucguccagcaccccgagcucaccggccucgacugcauccgccccugcuucugggucgagcucguccgcggccucccccgcgagaacaccaccaucuggaccuccggcuccuccaucuccuucugcggcgucaacuccgacaccgccaacugguccuggcccgacggcgccgagcuccccuucaccaucgacaaguga

SEQ ID NO: 121982 - RNA, 1410 nt, Artificial Sequence
  derived and/or modified CDS sequence (opt2) from neuraminidase__InfluenzaA__AJJ99677
augaaccccaaccagaagaucaucaccaucggcuccgucugcaugaccaucggcauggccaaccucauccuccagaucggcaacaucaucuccaucuggaucucccacuccauccagcucggcaaccagaaccagaucgagaccugcaaccaguccgucaucaccuacgagaacaacaccugggucaaccagaccuacgucaacaucuccaacaccaacuucgccgccggccaguccgucgucuccgucaagcucgccggcaacuccucccucugccccgucuccggcugggccaucuacuccaaggacaacuccauccgcaucggcuccaagggcgacgucuucgucauccgcgagcccuucaucuccugcuccccccucgagugccgcaccuucuuccucacccagggcgcccuccucaacgacaagcacuccaacggcaccaucaaggaccgcucccccuaccgcacccucauguccugccccaucggcgagguccccucccccuacaacucccgcuucgaguccgucgccugguccgccuccgccugccacgacggcaucaacuggcucaccaucggcaucuccggccccgacaacggcgccgucgccguccucaaguacaacggcaucaucaccgacaccaucaaguccuggcgcaacaacauccuccgcacccaggaguccgagugcgccugcgucaacggcuccugcuucaccaucaugaccgacggccccuccgacggccaggccuccuacaagaucuuccgcaucgagaagggcaagaucaucaaguccgucgagaugaacgcccccaacuaccacuacgaggagugcuccugcuaccccgacuccuccgagaucaccugcgucugccgcgacaacuggcacggcuccaaccgccccugggucuccuucaaccagaaccucgaguaccagaucggcuacaucugcuccggcaucuucggcgacaacccccgccccaacgacaagaccggcuccugcggccccgucuccuccaacggcgccaacggcgucaagggcuucuccuucaaguacggcaacggcgucuggaucggccgcaccaaguccaucuccucccgcaagggcuucgagaugaucugggaccccaacggcuggaccggcaccgacaacuccuucuccaucaagcaggacaucgucggcaugaacgagugguccggcuacuccggcuccuucguccagcaccccgagcucaccggccucgacugcauccgccccugcuucugggucgagcucauccgcggccgccccaaggagaacaccaucuggaccuccggcuccuccaucuccuucugcggcgucaacuccggcaccgucggcugguccuggcccgacggcgccgagcuccccuucaccaucgacaaguga

SEQ ID NO: 121983 - RNA, 1410 nt, Artificial Sequence
  derived and/or modified CDS sequence (opt2) from neuraminidase__InfluenzaA__AJJ99688
augaaccccaaccagaagaucaucaccaucggcuccgucugcaugaccaucggcauggccaaccucauccuccagaucggcaacaucaucuccaucuggaucucccacuccauccagcucggcaaccagaaccagaucgagaccugcaaccaguccgucaucaccuacgagaacaacaccugggucaaccagaccuacgucaacaucuccaacaccaacuucgccgccggccaguccgucgucuccgucaagcucgccggcaacuccucccucugccccgucuccggcugggccaucuacuccaaggacaacuccauccgcaucggcuccaagggcgacgucuucgucauccgcgagcccuucaucuccugcuccccccucgagugccgcaccuucuuccucacccagggcgcccuccucaacgacaagcacuccaacggcaccaucaaggaccgcucccccuaccgcacccucauguccugccccaucggcgagguccccucccccuacaacucccgcuucgaguccgucgccugguccgccuccgccugccacgacggcaucaacuggcucaccaucggcaucuccggccccgacaacggcgccgucgccguccucaaguacaacggcaucaucaccgacaccaucaaguccuggcgcaacaacauccuccgcacccaggaguccgagugcgccugcgucaacggcuccugcuucaccaucaugaccgacggccccuccgacggccaggccuccuacaagaucuuccgcaucgagaagggcaagaucaucaaguccgucgagaugaacgcccccaacuaccacuacgaggagugcuccugcuaccccgacuccuccgagaucaccugcgucugccgcgacaacuggcacggcuccaaccgccccugggucuccuucaaccagaaccucgaguaccagaucggcuacaucugcuccggcaucuucggcgacaacccccgccccaacgacaagaccggcuccugcggccccgucuccuccaacggcgccaacggcgucaagggcuucuccuucaaguacggcaacggcgucuggaucggccgcaccaaguccaucuccucccgcaagggcuucgagaugaucugggaccccaacggcuggaccggcaccgacaacuccuucuccaucaagcaggacaucgucggcaucaacgagugguccggcuacuccggcuccuucguccagcaccccgagcucaccggccucgacugcauccgccccugcuucugggucgagcucauccgcggccgccccaaggagaacaccaucuggaccuccggcuccuccaucuccuucugcggcgucaacuccggcaccgucggcugguccuggcccgacggcgccgagcuccccuucaccaucgacaaguga

SEQ ID NO: 121984 - RNA, 1410 nt, Artificial Sequence
  derived and/or modified CDS sequence (opt2) from neuraminidase__InfluenzaA__AJJ99710
augaaccccaaccagaagaucaucaccaucggcuccgucugcaugaccaucggcauggccaaccucauccuccagaucggcaacaucaucuccaucuggaucucccacuccauccagcucggcaaccagucccagaucgagaccugcaaccaguccgucaucaccuacgagaacaacaccugggucaaccagaccuacgucaacaucuccaacaccaacuucgccgccggccaguccgucgucuccgucaagcucgccggcaacuccucccucugccccgucuccggcugggccaucuacuccaaggacaacuccauccgcaucggcuccaagggcgacgucuucgucauccgcgagcccuucaucuccugcuccccccucgagugccgcaccuucuuccucacccagggcgcccuccucaacgacaagcacuccaacggcaccaucaaggaccgcucccccuaccgcacccucauguccugccccaucggcgagguccccucccccuacaacucccgcuucgaguccgucgccugguccgccuccgccugccacgacggcaucaacuggcucaccaucggcaucuccggccccgacaacggcgccgucgccguccucaaguacaacggcaucaucaccgacaccaucaaguccuggcgcaacaacauccuccgcacccaggaguccgagugcgccugcgucaacggcuccugcuucaccaucaugaccgacggccccuccgacggccaggccuccuacaagaucuuccgcaucgagaagggcaagaucgucaaguccgucgagaugaacgcccccaacuaccacuacgaggagugcuccugcuaccccgacuccuccaagaucaccugcgucugccgcgacaacuggcacggcuccaaccgccccugggucuccuucaaccagaaccucgaguaccagaucggcuacaucugcuccggcaucuucggcgacaacccccgccccaacgacaagaccggcuccugcggccccgucuccuccaacggcgccaacggcgucaagggcuucuccuucaaguacggcaacggcgucuggaucggccgcaccaaguccaucuccucccgcaagggcuucgagaugaucugggaccccaacggcuggaccggcaccgacaacaacuucuccaucaagcaggacaucgucggcaucaacgagugguccggcuacuccggcuccuucguccagcaccccgagcucaccggccucgacugcauccgccccugcuucugggucgagcucauccgcggccgccccaaggagaacaccaucuggaccuccggcuccuccaucuccuucugcggcgucaacuccgacaccgucggcugguccuggcccgacggcgccgagcuccccuucaccaucgacaaguga

SEQ ID NO: 121985 - RNA, 1410 nt, Artificial Sequence; identical to SEQ ID NO: 116293
  derived and/or modified CDS sequence (opt2) from neuraminidase__InfluenzaA__AJJ99721

SEQ ID NO: 121986 - RNA, 1410 nt, Artificial Sequence; identical to SEQ ID NO: 116293
  derived and/or modified CDS sequence (opt2) from neuraminidase__InfluenzaA__AJJ99732

SEQ ID NO: 121987 - RNA, 1410 nt, Artificial Sequence; identical to SEQ ID NO: 116993
  derived and/or modified CDS sequence (opt2) from neuraminidase__InfluenzaA__AJJ99743

SEQ ID NO: 121988 - RNA, 1410 nt, Artificial Sequence; identical to SEQ ID NO: 114327
  derived and/or modified CDS sequence (opt2) from neuraminidase__InfluenzaA__AJJ99754

SEQ ID NO: 121989 - RNA, 1410 nt, Artificial Sequence
  derived and/or modified CDS sequence (opt2) from neuraminidase__InfluenzaA__AJJ99765
augaaccccaaccagaagaucaucaccaucggcuccgucugcaugaccaucggcauggccaaccucauccuccagaucggcaacaucaucuccaucuggaucucccacuccauccagcucggcaaccagaaccagaucgagaccugcaaccaguccgucaucaccuacgagaacaacaccugggucaaccagaccuacgucaacaucuccaacaccaacuucgccaccggccaguccgucgucuccgucaagcucgccggcaacuccucccucugccccgucuccggcugggccaucuacuccaaggacaacuccauccgcaucggcuccaagggcgacgucuucgucauccgcgagcccuucaucuccugcuccccccucgagugccgcaccuucuuccucacccagggcgcccuccucaacgacaagcacuccaacggcaccaucaaggaccgcucccccuaccgcacccucauguccugccccaucggcgagguccccucccccuacaacucccgcuucgaguccgucgccugguccgccuccgccugccacgacggcaucaacuggcucaccaucggcaucuccggccccgacaacggcgccgucgccguccucaaguacaacggcaucaucaccgacaccaucaaguccuggcgcaacaacauccuccgcacccaggaguccgagugcgccugcgucaacggcuccugcuucaccgucaugaccgacggccccuccgacggccaggccuccuacaagaucuuccgcaucgagaagggcaagaucgucaaguccgucgagaugaacgcccccaacuaccacuacgaggagugcuccugcuaccccgacuccuccgagaucaccugcgucugccgcgacaacuggcacggcuccaaccgccccugggucuccuucaaccagaaccucgaguaccagaucggcuacaucugcuccggcaucuucggcgacaacccccgccccaacgacaagaccggcuccugcggccccgucuccuccaacggcgccaacggcgucaagggcuucuccuucaaguacggcaacggcgucuggaucggccgcaccaaguccaucuccucccgcaacggcuucgagaugaucugggaccccaacggcuggaccggcaccgacaacaacuucuccaucaagcaggacaucgucggcaucaacgagugguccggcuacuccggcuccuucguccagcaccccgagcucaccggccucgacugcauccgccccugcuucugggucgagcucauccgcggccgccccaaggagaacaccaucuggaccuccggcuccuccaucuccuucugcggcgucaacuccgacaccgucggcugguccuggcccgacggcgccgagcuccccuucaccaucgacaaguga

SEQ ID NO: 121990 - RNA, 1413 nt, Artificial Sequence
  derived and/or modified CDS sequence (opt2) from neuraminidase__InfluenzaA__AJJ99777
augaaccccaaccagaagaucaucaccaucggcuccaucuccaucgccaucggcaucaucucccucauccuccagaucggcaacaucaucuccaucugggccucccacuccauccagaccggcucccagaacaacaccggcaucugcaaccagcgcaucaucaccuacgagaacuccaccugggucaaccacaccuacgucaacaucaacaacaccaacgucgucgccggcgaggacaagaccuccgucacccucgccggcaacuccucccucugcuccaucuccggcugggccaucuacaccaaggacaacuccauccgcaucggcuccaagggcgacgucuucgucauccgcgagcccuucaucuccugcucccaccucgagugccgcaccuucuuccucacccagggcgcccuccucaacgacaagcacuccaacggcaccgucaaggaccgcucccccuaccgcgcccucauguccugcccccucggcgaggcccccucccccuacaacuccaaguucgaguccgucgccugguccgccuccgccugccacgacggcaugggcuggcucaccaucggcaucuccggccccgacaacggcgccgucgccguccucaaguacaacggcaucaucaccggcaccaucaaguccuggaagaagcagauccuccgcacccaggaguccgagugcgucugcaugaacggcuccugcuucaccaucaugaccgacggccccuccaacaaggccgccuccuacaagaucuucaagaucgagaagggcaaggucaccaaguccaucgagcucaacgcccccaacuucuacuacgaggagugcuccugcuaccccgacaccggcaucgucaugugcgucugccgcgacaacuggcacggcuccaaccgccccugggucuccuucaaccagaaccucgacuaccagaucggcuacaucugcuccggcgucuucggcgacaacccccgccccgaggacggcgagggcuccugcaaccccgucaccgucgacggcgccaacggcgucaagggcuucuccuacaaguacggcaacggcgucuggaucggccgcaccaaguccaaccgccuccgcaagggcuucgagaugaucugggaccccaacggcuggaccaacaccgacuccgacuucuccgucaagcaggacgucgucgccaucaccgacugguccggcuacuccggcuccuucguccagcaccccgagcucaccggccucgacugcauccgccccugcuucugggucgagcucguccgcggccucccccgcgagaacaccgccgucuggaccuccggcuccuccaucuccuucugcggcgucaacuccgacaccgccaacugguccuggcccgacggcgccgagcuccccuucaccaucgacaaguga

SEQ ID NO: 121991 - RNA, 1410 nt, Artificial Sequence; identical to SEQ ID NO: 112774
  derived and/or modified CDS sequence (opt2) from neuraminidase__InfluenzaA__AJJ99788

SEQ ID NO: 121992 - RNA, 1413 nt, Artificial Sequence
  derived and/or modified CDS sequence (opt2) from neuraminidase__InfluenzaA__AJJ99800
augaaccccaaccagaagaucaucaccaucggcuccaucuccaucgccaucggcaucaucucccucaugcuccagaucggcaacaucaucuccaucugggccucccacuccauccagaccggcucccagaacaacaccggcaucugcaaccagcgcaucaucaccuacgagaacuccaccugggucaaccacaccuacgucaacaucaacaacaccaacgucgucgccggcgaggacaagaccuccgucacccucgccggcaacuccucccucugcuccaucuccggcugggccaucuacaccaaggacaacuccauccgcaucggcuccaagggcgacgucuucgucauccgcgagcccuucaucuccugcucccaccucgagugccgcaccuucuuccucacccagggcgcccuccucaacgacaagcacuccaacggcaccgucaaggaccgcucccccuaccgcgcccucauguccugcccccucggcgaggcccccucccccuacaacuccaaguucgaguccgucgccugguccgccuccgccugccacgacggcaugggcuggcucaccaucggcaucuccggccccgacaacggcgccgucgccguccucaaguacaacggcaucaucaccggcaccaucaaguccuggaagaagcagauccuccgcacccaggaguccgagugcgucugcaugaacggcuccugcuucaccaucaugaccgacggccccuccaacaaggccgccuccuacaagaucuucaagaucgagaagggcaaggucaccaaguccaucgagcucaacgcccccaacuucuacuacgaggagugcuccugcuaccccgacaccggcaucgucaugugcgucugccgcgacaacuggcacggcuccaaccgccccugggucuccuucaaccagaaccucgacuaccagaucggcuacaucugcuccggcgucuucggcgacaacccccgccccgaggacggcgagggcuccugcaaccccgucaccgucgacggcgccaacggcgucaagggcuucuccuacaaguacggcaacggcgucuggaucggccgcaccaaguccaaccgccuccgcaagggcuucgagaugaucugggaccccaacggcuggaccaacaccgacuccgacuucuccgucaagcaggacgucgucgccaucaccgacugguccggcuacuccggcuccuucguccagcaccccgagcucaccggccucgacugcauccgccccugcuucugggucgagcucguccgcggccucccccgcgagaacaccaccaucuggaccuccggcuccuccaucuccuucugcggcgucaacuccgacaccgccaacugguccuggcccgacggcgccgagcuccccuucaucaucgacaaguga

SEQ ID NO: 121993 - RNA, 1413 nt, Artificial Sequence; identical to SEQ ID NO: 113497
  derived and/or modified CDS sequence (opt2) from neuraminidase__InfluenzaA__AJJ99812

SEQ ID NO: 121994 - RNA, 1413 nt, Artificial Sequence
  derived and/or modified CDS sequence (opt2) from neuraminidase__InfluenzaA__AJJ99824
augaaccccaaccagaagaucaucaccaucggcuccaucuccaucgccaucggcaccaucucccucaugcuccagaucggcaacaucaucuccaucugggccucccacuccauccagaccggcucccagaacaacaccggcaucugcaaccagcgcaucaucaccuacgagaacuccaccugggucaaccacaccuacgucaacaucaacaacaccaacgucgucgccggcgaggacaagaccuccgucacccucgccggcaacuccucccucugcuccaucuccggcugggccaucuacaccaaggacaacuccauccgcaucggcuccaagggcgacgucuucgucauccgcgagcccuucaucuccugcucccaccucgagugccgcaccuucuuccucacccagggcgcccuccucaacgacaagcacuccaacggcaccgucaaggaccgcucccccuaccgcgcccucauguccugcccccucggcgaggcccccucccccuacaacuccaaguucgaguccgucgccugguccgccuccgccugccacgacggcaugggcuggcucaccaucggcaucuccggccccgacaacggcgccgucgccguccucaaguacaacggcaucaucaccggcaccaucaaguccuggaagaagcagauccuccgcacccaggaguccgagugcgucugcaugaacggcuccugcuucaccaucaugaccgacggccccuccaacaaggccgccuccuacaagaucuucaagaucgagaagggcaaggucaccaaguccaucgagcucaacgcccccaacuuccacuacgaggagugcuccugcuaccccgacaccggcaucgucaugugcgucugccgcgacaacuggcacggcuccaaccgccccugggucuccuucaaccagaaccucgacuaccagaucggcuacaucugcuccggcgucuucggcgacaacccccgccccgaggacggcgagggcuccugcaaccccgucaccgucgacggcgccaacggcgucaagggcuucuccuacaaguacgacaacggcgucuggaucggccgcaccaaguccaaccgccuccgcaagggcuucgagaugaucugggaccccaacggcuggaccaacaccgacuccgacuucuccgucaagcaggacgucgucgccaucaccgacugguccggcuacuccggcuccuucguccagcaccccgagcucaccggccucgacugcauccgccccugcuucugggucgagcucguccgcggccucccccgcgagaacaccaccaucuggaccuccggcuccuccaucuccuucugcggcgucaacuccgacaccgccaacugguccuggcccgacggcgccgagcuccccuucaccaucgacaaguga

SEQ ID NO: 121995 - RNA, 1410 nt, Artificial Sequence; identical to SEQ ID NO: 121983
  derived and/or modified CDS sequence (opt2) from neuraminidase__InfluenzaA__AJJ99835

SEQ ID NO: 121996 - RNA, 1410 nt, Artificial Sequence; identical to SEQ ID NO: 116293
  derived and/or modified CDS sequence (opt2) from neuraminidase__InfluenzaA__AJJ99846

SEQ ID NO: 121997 - RNA, 1410 nt, Artificial Sequence; identical to SEQ ID NO: 116293
  derived and/or modified CDS sequence (opt2) from neuraminidase__InfluenzaA__AJJ99857

SEQ ID NO: 121998 - RNA, 1410 nt, Artificial Sequence
  derived and/or modified CDS sequence (opt2) from neuraminidase__InfluenzaA__AJJ99868
augaaccccaaccagaagaucaucaccaucggcuccgucugcaugaccaucggcauggccaaccucauccuccagaucggcaacaucaucuccaucuggaucucccacuccauccagcucggcaaccagaaccagaucgagaccugcaaccaguccgucaucaccuacgagaacaacaccugggucaaccagaccuacgucaacaucuccaacaccaacuucgccgccggccaguccgucgucuccgucaagcucgccggcaacuccucccucugccccgucuccggcugggccaucuacuccaaggacaacuccauccgcaucggcuccaagggcgacgucuucgucauccgcgagcccuucaucuccugcuccccccucgagugccgcaccuucuuccucacccagggcgcccuccucaacgacaagcacuccaacggcaccaucaaggaccgcucccccuaccgcacccucauguccugccccaucggcgagguccccucccccuacaacucccgcuucgaguccgucgccugguccgccuccgccugccacgacggcaucaacuggcucaccaucggcaucuccggccccgacaacggcgccgucgccguccucaaguacaacggcaucaucaccgacaccaucaaguccuggcgcaacaacauccuccgcacccaggaguccgagugcgccugcgucaacggcuccugcuucaccgucaugaccgacggccccuccgacggccaggccuccuacaagaucuuccgcaucgagaagggcaagaucgucaaguccgucgagaugaacgcccccaacuaccacuacgaggagugcuccugcuaccccgacuccuccgucaucaccugcgucugccgcgacaacuggcacggcuccaaccgccccugggucuccuucaaccagaaccucgaguaccagaucggcuacaucugcuccggcaucuucggcgacaacccccgccccaacgacaagaccggcuccugcggccccgucuccuccaacggcgccaacggcgucaagggcuucuccuucaaguacggcaacggcgucuggaucggccgcaccaaguccaucuccucccgcaacggcuucgagaugaucugggaccccaacggcuggaccggcaccgacaacaacuucuccaucaagcagaacaucgucggcaucaacgagugguccggcuacuccggcuccuucguccagcaccccgagcucaccggccucgacugcauccgccccugcuucugggucgagcucauccgcggccgccccaaggagaacaccaucuggaccuccggcuccuccaucuccuucugcggcgucaacuccgacaccgucggcugguccuggcccgacggcgccgagcuccccuucaccaucgacaaguga

SEQ ID NO: 121999 - RNA, 1410 nt, Artificial Sequence; identical to SEQ ID NO: 115193
  derived and/or modified CDS sequence (opt2) from neuraminidase__InfluenzaA__AJJ99879

SEQ ID NO: 122000 - RNA, 1410 nt, Artificial Sequence; identical to SEQ ID NO: 112774
  derived and/or modified CDS sequence (opt2) from neuraminidase__InfluenzaA__AJJ99890

SEQ ID NO: 122001 - RNA, 1410 nt, Artificial Sequence
  derived and/or modified CDS sequence (opt2) from neuraminidase__InfluenzaA__AJJ99901
augaaccccaaccagaagaucaucaccaucggcuccgucugcaugaccaucggcauggccaaccucauccuccagaucggcaacaucaucuccaucuggaucucccacuccauccagcucggcaaccagaaccagaucgagaccugcaaccaguccgucaucaccuacgagaacaacaccugggucaaccagaccuacgucaacaucuccaacaccaacuucgccgccggccaguccgucgucuccgucaagcucgccggcaacuccucccucugccccgucuccggcugggccaucuacuccaaggacaacuccauccgcaucggcuccaagggcgacgucuucgucauccgcgagcccuucaucuccugcuccccccucgagugccgcaccuucuuccucacccagggcgcccuccucaacgacaagcacuccaacggcaccaucaaggaccgcucccccuaccgcacccucauguccugccccaucggcgagguccccucccccuacaacucccgcuucgaguccgucgccugguccgccuccgccugccacgacggcaucaacuggcucaccaucggcaucuccggccccgacaacggcgccgucgccguccucaaguacaacggcaucaucaccgacaccaucaaguccuggcgcaacaacauccuccgcacccaggaguccgagugcgccugcgucaacggcuccugcuucaccaucaugaccgacggccccuccgacggccaggccuccuacaagaucuuccgcaucgagaagggcaagaucgucaaguccgucgagaugaacgcccccaacuaccacuacgaggagugcuccugcuaccccgacuccuccgagaucaccugcgucugccgcgacaacuggcacggcuccaaccgccccugggucuccuucaaccagaaccucgaguaccagaucggcuacaucugcuccggcaucuucggcgacaacccccgccccaacgacaagaccggcuccugcggccccgucuccuccaacggcgccaacggcgucaagggcuucuccuucaaguacggcaacggcgucuggaucggccgcaccaaguccaucuccucccgcaagggcuucgagaugaucugggaccccaacggcuggaccggcaccgacaacuccuucuccaucaagcaggacaucgucggcaucaacgagugguccggcuacuccggcuccuucguccagcaccccgagcucaccggccucgacugcauccgccccugcuucugggucgagcucauccgcggccgccccaaggagaacaccaucuggaccuccggcuccuccaucuccuucugcggcgucgacuccggcaccgucggcugguccuggcccgacggcgccgagcuccccuucaccaucgacaaguga

SEQ ID NO: 122002 - RNA, 1410 nt, Artificial Sequence
  derived and/or modified CDS sequence (opt2) from neuraminidase__InfluenzaA__AJJ99912
augaaccccaaccagaagaucaucaccaucggcuccgucugcaugaccaucggcauggccaaccucauccuccagaucggcaacaucaucuccaucuggaucucccacuccauccagcucggcaaccagucccagaucgagaccugcaaccaguccgucaucaccuacgagaacaacaccugggucaaccagaccuacgucaacaucuccaacaccaacuucgccgccggccaguccgucgucuccgucaagcucgccggcaacuccucccucugccccgucuccggcugggccaucuacuccaaggacaacuccauccgcaucggcuccaagggcgacgucuucgucauccgcgagcccuucaucuccugcuccccccucgagugccgcaccuucuuccucacccagggcgcccuccucaacgacaagcacuccaacggcaccaucaaggaccgcucccccuaccgcacccucauguccugccccaucggcgagguccccucccccuacaacucccgcuucgaguccgucgccugguccgccuccgccugccacgacggcaucaacuggcucaccaucggcaucuccggccccgacaacggcgccgucgccguccucaaguacaacggcaucaucaccgacaccaucaaguccuggcgcaacaacauccuccgcacccaggaguccgagugcgccugcgucaacggcuccugcuucaccaucaugaccgacggccccuccgacggccaggccuccuacaagaucuuccgcaucgagaagggcaagaucgucaaguccgucgagaugaacgcccccaacuaccacuacgaggagugcuccugcuaccccgacuccuccaagaucaccugcgucugccgcgacaacuggcacggcuccaaccgccccugggucuccuucaaccagaaccucgaguaccagaucggcuacaucugcuccggcaucuucggcgacaacccccgccccaaggacaagaccggcuccugcggccccgucuccuccaacggcgccaacggcgucaagggcuucuccuucaaguacggcaacggcgucuggaucggccgcaccaaguccaucuccucccgcaagggcuucgagaugaucugggaccccaacggcuggaccggcaccgacaacaacuucuccaucaagcaggacaucgucggcaucaacgagugguccggcuacuccggcuccuucguccagcaccccgagcucaccggccucgacugcauccgccccugcuucugggucgagcucauccgcggccgccccaaggagaacaccaucuggaccuccggcuccuccaucuccuucugcggcgucaacuccgacaccgucggcugguccuggcccgacggcgccgagcuccccuucaccaucgacaaguga

SEQ ID NO: 122003 - RNA, 1410 nt, Artificial Sequence; identical to SEQ ID NO: 116293
  derived and/or modified CDS sequence (opt2) from neuraminidase__InfluenzaA__AJJ99923

SEQ ID NO: 122004 - RNA, 1410 nt, Artificial Sequence; identical to SEQ ID NO: 116745
  derived and/or modified CDS sequence (opt2) from neuraminidase__InfluenzaA__AJJ99934

SEQ ID NO: 122005 - RNA, 1410 nt, Artificial Sequence; identical to SEQ ID NO: 116293
  derived and/or modified CDS sequence (opt2) from neuraminidase__InfluenzaA__AJJ99945

SEQ ID NO: 122006 - RNA, 1410 nt, Artificial Sequence
  derived and/or modified CDS sequence (opt2) from neuraminidase__InfluenzaA__AJJ99956
augaaccccaaccagaagaucaucaccaucggcuccgucugcaugaccaucggcauggccaaccucauccuccagaucggcaacaucaucuccaucuggaucucccacuccauccagcucggcaaccagaaccagaucgagaccugcaaccaguccgucaucaccuacgagaacaacaccugggucaaccagaccuacgucaacaucuccaacaccaacuucgccgccggccaguccgucgucuccgucaagcucgccggcaacuccucccucugccccgucuccggcugggccaucuacuccaaggacaacuccauccgcaucggcuccaagggcgacgucuucgucauccgcgagcccuucaucuccugcuccccccucgagugccgcaccuucuuccucacccagggcgcccuccucaacgacaagcacuccaacggcaccaucaaggaccgcucccccuaccgcacccucauguccugccccaucggcgagguccccucccccuacaacucccgcuucgaguccgucgccugguccgccuccgccugccacgacggcaucaacuggcucaccaucggcaucuccggccccgacaacggcgccgucgccguccucaaguacaacggcaucaucaccgacaccaucaaguccuggcgcaacaacauccuccgcacccaggaguccgagugcgccugcgucaacggcuccugcuucaccgucaugaccgacggccccuccgacggccaggccuccuacaagaucuuccgcaucgagaagggcaagaucgucaaguccgucgagaugaacgcccccaacuaccacuacgaggagugcuccugcuaccccgacuccuccgagaucaccugcgucugccgcgacaacuggcacggcuccaaccgccccugggucuccuucaaccagaaccucgaguaccagaucggcuacaucugcuccggcaucuucggcgacaacccccgccccaacgacaagaccggcuccugcggccccguccucuccaacggcgccaacggcgucaagggcuucuccuucaaguacggcaacggcgucuggaucggccgcaccaaguccaucuccucccgcaacggcuucgagaugaucugggaccccaacggcuggaccggcaccgacaacaacuucuccaucaagcaggacaucgucggcaucaacgagugguccggcuacuccggcuccuucguccagcaccccgagcucaccggccucgacugcauccgccccugcuucugggucgagcucauccgcggccgccccaaggagaacaccaucuggaccuccggcuccuccaucuccuucugcggcgucaacuccgacaccgucggcugguccuggcccgacggcgccgagcuccccuucaccaucgacaaguga

SEQ ID NO: 122007 - RNA, 1410 nt, Artificial Sequence; identical to SEQ ID NO: 112774
  derived and/or modified CDS sequence (opt2) from neuraminidase__InfluenzaA__AJJ99967

SEQ ID NO: 122008 - RNA, 1413 nt, Artificial Sequence
  derived and/or modified CDS sequence (opt2) from neuraminidase__InfluenzaA__AJJ99991
augaaccccaaccagaagaucaucaccaucggcuccaucuccaucgccaucggcaucaucucccucaugcuccagaucggcaacaucaucuccaucugggccucccacuccauccagaccggcucccagaacaacaccggcaucugcaaccagcgcaucaucaccuacgagaacugcaccugggucaaccacaccuacgucaacaucaacaacaccaacgucgucgccggcgaggacaagaccuccgucacccucgccggcaacuccucccucugcuccaucuccggcugggccaucuacaccaaggacaacuccauccgcaucggcuccaagggcgacgucuucgucauccgcgagcccuucaucuccugcucccaccucgagugccgcaccuucuuccucacccagggcgcccuccucaacgacaagcacuccaacggcaccgucaaggaccgcucccccuaccgcgcccucauguccugcccccucggcgaggcccccucccccuacaacuccaaguucgaguccgucgccugguccgccuccgccugccacgacggcaugggcuggcucaccaucggcaucuccggccccgacaacggcgccgucgccguccucaaguacaacggcaucaucaccggcaccaucaaguccuggaagaagcagauccuccgcacccaggaguccgagugcgucugcaugaacggcuccugcuucaccaucaugaccgacggccccuccaacaaggccgccuccuacaagaucuucaagaucgagaagggcaaggucaccaaguccaucgagcucaacgcccccaacuuccacuacgaggagugcuccugcuaccccgacaccggcaucgucaugugcgucugccgcgacaacuggcacggcuccaaccgccccugggucuccuucaaccagaaccucgacuaccagaucggcuacaucugcuccggcgucuucggcgacaacccccgccccgaggacggcgagggcuccugcaaccccgucaccgucgacggcgccaacggcgucaagggcuucuccuacaaguacgacaacggcgucuggaucggccgcaccaaguccaaccgccuccgcaagggcuucgagaugaucugggaccccaacggcuggaccaacaccgacuccgacuucuccgucaagcaggacgucgucgccaucaccgacugguccggcuacuccggcuccuucguccagcaccccgagcucaccggccucgacugcauccgccccugcuucugggucgagcucguccgcggccucccccgcgagaacaccaccaucuggaccuccggcuccuccaucuccuucugcggcgucaacuccgacaccgccaacugguccuggcccgacggcgccgagcuccccuucaccaucgacaaguga

SEQ ID NO: 122009 - RNA, 1410 nt, Artificial Sequence; identical to SEQ ID NO: 121983
  derived and/or modified CDS sequence (opt2) from neuraminidase__InfluenzaA__AJK00003

SEQ ID NO: 122010 - RNA, 1410 nt, Artificial Sequence
  derived and/or modified CDS sequence (opt2) from neuraminidase__InfluenzaA__AJK00014
augaaccccaaccagaagaucaucaccaucggcuccgucugcaugaccaucggcauggccaaccucauccuccagaucggcaacaucaucuccaucuggaucucccacuccauccagcucggcaaccagucccagaucgagaccugcaaccaguccgucaucaccuacgagaacaacaccugggucaaccagaccuacgucaacaucuccaacaccaacuucgccgccggccaguccgucgucuccgucaagcucgccggcaacuccucccucugccccgucuccggcugggccaucuacuccaaggacaacuccauccgcaucggcuccaagggcgacgucuucgucauccgcgagcccuucaucuccugcuccccccucgagugccgcaccuucuuccucacccagggcgcccuccucaacgacaagcacuccaacggcaccaucaaggaccgcucccccuaccgcacccucauguccugccccaucggcgagguccccucccccuacaacucccgcuucgaguccgucgccugguccgccuccgccugccacgacggcaucaacuggcucaccaucggcaucuccggccccgacaacggcgccgucgccguccucaaguacaacggcgucaucaccgacaccaucaaguccuggcgcaacaacauccuccgcacccaggaguccgagugcgccugcgucaacggcuccugcuucaccaucaugaccgacggccccuccgacggccaggccuccuacaagaucuuccgcaucgagaagggcaagaucgucaaguccgucgagaugaacgcccccaacuaccacuacgaggagugcuccugcuaccccgacuccuccgagaucaccugcgucugccgcgacaacuggcacggcuccaaccgccccugggucuccuucaaccagaaccucgaguaccagaucggcuacaucugcuccggcaucuucggcgacaacccccgccccaacgacaagaccggcuccugcggccccgucuccuccaacggcgccaacggcgucaagggcuucuccuucaaguacggcaacggcgucuggaucggccgcaccaaguccaucuccucccgcaagggcuucgagaugaucugggaccccaacggcuggaccggcaccgacaacaacuucuccaccaagcaggacaucgucggcaucaacgagugguccggcuacuccggcuccuucguccagcaccccgagcucaccggccucgacugcauccgccccugcuucugggucgagcucauccgcggccgccccaaggagaacaccaucuggaccuccggcuccaucaucuccuucugcggcgucaacuccgacaccgucggcugguccuggcccgacggcgccgagcuccccuucaccaucgacaacuga

SEQ ID NO: 122011 - RNA, 1410 nt, Artificial Sequence
  derived and/or modified CDS sequence (opt2) from neuraminidase__InfluenzaA__AJK00025
augaaccccaaccagaagaucaucaccaucggcuccgucugcaugaccaucggcauggccaaccucauccuccagaucggcaacaucaucuccaucuggaucucccacuccauccagcucggcaaccagaaccagaucgagaccugcaaccaguccgucaucaccuacgagaacaacaccugggucaaccagaccuacgucaacaucuccaacaccaacuucgccgccggccaguccgucgucuccgucaagcucgccggcaacuccucccucugccccgucuccggcugggccaucuacuccaaggacaacuccauccgcaucggcuccaagggcgacgucuucgucauccgcgagcccuucaucuccugcuccccccucgagugccgcaccuucuuccucacccagggcgcccuccucaacgacaagcacuccaacggcaccaucaaggaccgcucccccuaccgcacccucauguccugccccaucggcgagguccccucccccuacaacucccgcuucgaguccgucgccugguccgccuccgccugccacgacggcaucaacuggcucaccaucggcaucuccggccccgacaacggcgccgucgccguccucaaguacaacggcaucaucaccgacaccaucaaguccuggcgcaacaacauccuccgcacccaggaguccgagugcgccugcgucaacggcuccugcuucaccaucaugaccgacggccccuccgacggccaggccuccuacaagaucuuccgcaucgagaagggcaagaucgucaaguccgucgagaugaacgcccccaacuaccacuacgaggagugcuccugcuaccccgacuccuccgagaucaccugcgucugccgcgacaacuggcacggcuccaaccgccccugggucuccuucaaccagaaccucgaguaccagaucggcuacaucugcuccggcaucuucggcgacaacccccgccccaacgacaagaccggcuccugcggccccgucuccuccaacggcgccaacggcgucaagggcuucuccuucaaguacggcaacggcgucuggaucggccgcaccaaguccaucuccucccgcaagggcuucgagaugaucugggaccccaacggcuggaccggcaccgacaacuccuucuccaucaagcaggacaucgucggcaucaacgagugguccggcuacuccggcuccuucguccagcaccccgagcucaccggccucgacugcauccgccccugcuucugggucgagcucauccgcggccgccccaaggagaacaccaucuggaccuccggcuccuccaucuccuucugcggcgucaacuccggcaccgucggcugguccuggcccgacggcgccgagcuccccuucaccaucgacaaguga

SEQ ID NO: 122012 - RNA, 1410 nt, Artificial Sequence
  derived and/or modified CDS sequence (opt2) from neuraminidase__InfluenzaA__AJK00036
augaaccccaaccagaagaucaucaccaucggcuccgucugcaugaccaucggcauggccaaccucauccuccagaucggcaacaucaucuccaucuggaucucccacuccauccagcucggcaaccagucccagaucgagaccugcaaccaguccgucaucaccuacgagaacaacaccugggucaaccagaccuacgucaacaucuccaacaucaacuucgccgccggccaguccgucgucuccgucaagcucgccggcaacuccucccucugccccgucuccggcugggccaucuacuccaaggacaacuccauccgcaucggcuccaagggcgacgucuucgucauccgcgagcccuucaucuccugcuccccccucgagugccgcaccuucuuccucacccagggcgcccuccucaacgacaagcacuccaacggcaccaucaaggaccgcucccccuaccgcacccucauguccugccccaucggcgagguccccucccccuacaacucccgcuucgaguccgucgccugguccgccuccgccugccacgacggcaucaacuggcucaccaucggcaucuccggccccgacaacggcgccgucgccguccucaaguacaacggcaucaucaccgacaccaucaaguccuggcgcaacaacauccuccgcacccaggaguccgagugcgccugcgucaacggcuccugcuucaccaucaugaccgacggccccuccgacggccaggccuccuacaagaucuuccgcaucgagaagggcaagaucgucaaguccgucgagaugaacgcccccaacuaccacuacgaggagugcuccugcuaccccgacuccuccgagaucaccugcgucugccgcgacaacuggcacggcuccaaccgccccugggucuccuucaaccagaaccucgaguaccagaucggcuacaucugcuccggcaucuucggcgacaacccccgccccaacgacaagaccggcuccugcggccccgucuccuccaacggcgccaacggcgucaagggcuucuccuucaaguacggcaacggcgucuggaucggccgcaccaaguccaucuccucccgcaagggcuucgagaugaucugggaccccaacggcuggaccggcaccgacaacaacuucuccaucaagcaggacaucgucggcaucaacgagugguccggcuacuccggcuccuucguccagcaccccgagcucaccggccucgacugcauccgccccugcuucugggucgagcucauccgcggccgccccaaggagaacaccaucuggaccuccggcuccuccaucuccuucugcggcgucaacuccgacaccgucggcugguccuggcccgacggcgccgagcuccccuucaccaucgacaaguga

SEQ ID NO: 122013 - RNA, 1410 nt, Artificial Sequence; identical to SEQ ID NO: 116993
  derived and/or modified CDS sequence (opt2) from neuraminidase__InfluenzaA__AJK00047

SEQ ID NO: 122014 - RNA, 1410 nt, Artificial Sequence; identical to SEQ ID NO: 116993
  derived and/or modified CDS sequence (opt2) from neuraminidase__InfluenzaA__AJK00058

SEQ ID NO: 122015 - RNA, 1410 nt, Artificial Sequence
  derived and/or modified CDS sequence (opt2) from neuraminidase__InfluenzaA__AJK00069
augaaccccaaccagaagaucaucaccaucggcuccgucugcaugaccaucggcauggccaaccucauccuccagaucggcaacaucaucuccaucuggaucucccacuccauccagcucggcaaccagaaccagaucgagaccugcaaccaguccgucaucaccuacgagaacaacaccugggucaaccagaccuacuucaacaucuccaacaccaacuucgccgccggccaguccgucgucuccgucaagcucgccggcaacuccucccucugccccgucuccggcugggccaucuacuccaaggacaacuccauccgcaucggcuccaagggcgacgucuucgucauccgcgagcccuucaucuccugcuccccccucgagugccgcaccuucuuccucacccagggcgcccuccucaacgacaagcacuccaacggcaccaucaaggaccgcucccccuaccgcacccucauguccugccccaucggcgagguccccucccccuacaacucccgcuucgaguccgucgccugguccgccuccgccugccacgacggcaucaacuggcucaccaucggcaucuccggccccgacaacggcgccgucgccguccucaaguacaacggcaucaucaccgacaccaucaaguccuggcgcaacaacauccuccgcacccaggaguccgagugcgccugcgucaacggcuccugcuucaccgucaugaccgacggccccuccgacggccaggccuccuacaagaucuuccgcaucgagaagggcaagaucgucaaguccgucgagaugaacgcccccaacuaccacuacgaggagugcuccugcuaccccgacuccuccgagaucaccugcgucugccgcgacaacuggcacggcuccaaccgccccugggucuccuucaaccagaaccucgaguaccagaucggcuacaucugcuccggcaucuucggcgacaacccccgccccaacgacaagaccggcuccugcggccccgucuccuccaacggcgccaacggcgucaagggcuucuccuucaaguacggcaacggcgucuggaucggccgcaccaaguccaucuccucccgcaacggcuucgagaugaucugggaccccaacggcuggaccggcaccgacaacaacuucuccaucaagcaggacaucgucggcaucaacgagugguccggcuacuccggcuccuucguccagcaccccgagcucaccggccucgacugcauccgccccugcuucugggucgagcucauccgcggccgccccaaggagaacaccaucuggaccuccggcuccuccaucuccuucugcggcgucaacuccgacaccgucggcugguccuggcccgacggcgccgagcuccccuucaccaucgacaaguga

SEQ ID NO: 122016 - RNA, 1413 nt, Artificial Sequence; identical to SEQ ID NO: 113497
  derived and/or modified CDS sequence (opt2) from neuraminidase__InfluenzaA__AJK00081

SEQ ID NO: 122017 - RNA, 1413 nt, Artificial Sequence; identical to SEQ ID NO: 112668
  derived and/or modified CDS sequence (opt2) from neuraminidase__InfluenzaA__AJK00093

SEQ ID NO: 122018 - RNA, 1413 nt, Artificial Sequence
  derived and/or modified CDS sequence (opt2) from neuraminidase__InfluenzaA__AJK00105
augucccccaaccagaagaucaucaccaucggcuccaucuccaucgccaucggcaucaucucccucaugcuccagaucggcaacaccaucuccaucugggccucccacuccauccagaccggcucccagaacaacaccggcaucugcaaccagcgcaucaucaccuacgagaacuccaccugggucaaccacaccuacgucaacaucaacaacaccaacgucgucgccggcgaggacaagaccuccgucacccucgccggcaacuccucccucugcuccaucuccggcugggccaucuacaccaaggacaacuccauccgcaucggcuccaagggcgacgucuucgucauccgcgagcccuucaucuccugcucccaccucgagugccgcaccuucuuccucacccagggcgcccuccucaacgacaagcacuccaacggcaccgucaaggaccgcucccccuaccgcgcccucauguccugcccccucggcgaggcccccucccccuacaacuccaaguucgaguccgucgccugguccgccuccgccugccacgacggcaugggcuggcucaccaucggcaucuccggccccgacaacggcgccgucgccguccucaaguacaacggcaucaucaccggcaccaucaaguccuggaagaagcagauccuccgcacccaggaguccgagugcgucugcaugaacggcuccugcuucaccaucaugaccgacggccccuccaacaaggccgccuccuacaagaucuucaagaucgagaagggcaaggucaccaaguccaucgagcucaacgcccccaacuuccacuacgaggagugcuccugcuaccccgacaccggcaucgucaugugcgucugccgcgacaacuggcacggcuccaaccgccccugggucuccuucaaccagaaccucgacuaccagaucggcuacaucugcuccggcgucuucggcgacaacccccgccccgaggacggcgagggcuccugcaaccccgucaccgucgacggcgccaacggcgucaagggcuucuccuacaaguacgacaacggcgucuggaucggccgcaccaaguccaaccgccuccgcaagggcuucgagaugaucugggaccccaacggcuggaccaacaccgacuccgacuucuccgucaagcaggacgucgucgccaucaccgacugguccggcuacuccggcuccuucguccagcaccccgagcucaccggccucgacugcauccgccccugcuucugggucgagcucguccgcggccucccccgcgagaacaccaccaucuggaccuccggcuccuccaucuccuucugcggcgucaacuccgacaccgccaacugguccuggcccgacggcgccgagcuccccuucaccaucgacaaguga

SEQ ID NO: 122019 - RNA, 1410 nt, Artificial Sequence; identical to SEQ ID NO: 115049
  derived and/or modified CDS sequence (opt2) from neuraminidase__InfluenzaA__AJK00116

SEQ ID NO: 122020 - RNA, 1410 nt, Artificial Sequence; identical to SEQ ID NO: 113881
  derived and/or modified CDS sequence (opt2) from neuraminidase__InfluenzaA__AJK00127

SEQ ID NO: 122021 - RNA, 1410 nt, Artificial Sequence; identical to SEQ ID NO: 112774
  derived and/or modified CDS sequence (opt2) from neuraminidase__InfluenzaA__AJK00138

SEQ ID NO: 122022 - RNA, 1350 nt, Artificial Sequence
  derived and/or modified CDS sequence (opt2) from neuraminidase__InfluenzaA__AJK00152
augaaccccaaccagaagaucaucaccaucggcuccaucugcauggucaccggcaucgucucccucaugcuccagaucggcaacaucaucuccaugugggucucccacuccauccagacccgcaaccagcaccagaccgagcccauccgcaacaccaacuuccucaccgagaacgccgucgccuccgucacccucgccggcaacuccucccucugccccauccgcggcugggccguccacuccaaggacaacuccauccgcaucggcuccaagggcgacgucuucgucauccgcgagcccuucaucuccugcucccaccucgagugccgcaccuucuuccucacccagggcgcccucaucaacgacaagcacuccaacggcaccgucaaggaccgcuccccccaccgcacccucauguccugccccgucggcgaggcccccucccccuacaacucccgcuucgaguccgucgccugguccgccuccgccugccacgacggcaccuccuggcucaccaucggcaucuccggccccgacaacggcgccgucgccguccucaaguacaacggcaucaucaccgacaccaucaaguccuggcgcaacaacauccuccgcacccaggaguccgagugcgccugcgucaacggcuccugcuucaccgucaugaccgacggccccuccaacggccaggccuccuacaagaucuucaagauggagaagggcaaggucgucaaguccgucgagcucaacgcccccaacuaccacuacgaggagugcuccugcuaccccgacgccggcgagaucaccugcgucugccgcgacaacuggcacggcuccaaccgccccugggucuccuucaaccagaaccucgaguaccagaucggcuacaucugcuccggcgucuucggcgacaacccccgccccaacgacggcaccggcuccugcggccccgucucccccaacggcgccuacggcaucaagggcuucuccuucaaguacggcaacggcgucuggaucggccgcaccaaguccaccaacucccgcuccggcuucgagaugaucugggaccccaacggcuggaccggcaccgacuccgacuucuccgucaagcaggacaucgucgagaucaccgacugguccggcuacuccggcuccuucguccagcaccccgagcucaccggccucgacugcauccgccccugcuucugggucgagcucauccgcggccgccccaaggaguccaccaucuggaccuccggcuccuccaucuccuucugcggcgucaacuccgacaccgucuccugguccuggcccgacggcgccgagcuccccuucaccaucgacaaguga

SEQ ID NO: 122023 - RNA, 1350 nt, Artificial Sequence
  derived and/or modified CDS sequence (opt2) from neuraminidase__InfluenzaA__AJK00167
augaaccccaaccagaagaucaucaccaucggcuccaucugcauggucaucggcaucgucucccucaugcuccagaucggcaacaugaucuccaucugggucucccacuccauccagaccggcaaccagcaccaggccgagcccauccgcaacgccaacuuccucaccgagaacgccgucgccuccgucacccucgccggcaacuccucccucugccccguccgcggcugggccguccacuccaaggacaacuccauccgcaucggcuccaagggcgacgucuucgucauccgcgagcccuucaucuccugcucccaccucgagugccgcaccuucuuccucacccagggcgcccuccucaacgacaagcacuccaacggcaccgucaaggaccgcuccccccaccgcacccucauguccugccccgucggcgaggcccccucccccuacaacucccgcuucgaguccgucgccugguccgccuccgccugccacgacggcaccuccuggcucaccaucggcaucuccggccccgacaacggcgccgucgccguccucaaguacaacggcaucaucaccgacaccaucaaguccuggcgcaacaacauccuccgcacccaggaguccgagugcgccugcgucaacggcuccugcuucaccgucaugaccgacggccccuccaacggccaggccuccuacaagaucuucaagauggagaagggcaaggucgucaaguccgucgagcucaacgcccccaacuaccacuacgaggagugcuccugcuaccccgacgccggcgagaucaccugcgucugccgcgacaacuggcacggcuccaaccgccccugggucuccuucaaccagaaccucgaguaccagaucggcuacaucugcuccggcgucuucggcgacaacccccgccccaacgacggcaccggcuccugcggccccgucucccccaacggcgccuacggcaucaagggcuucuccuucaaguacggcaacggcgucuggaucggccgcaccaaguccaccaacucccgcuccggcuucgagaugaucugggaccccaacggcuggaccgagaccgacuccaacuucuccgucaagcaggacaucgucgccaucaccgacugguccggcuacuccggcuccuucguccagcaccccgagcucaccggccucgacugcauccgccccugcuucugggucgagcucauccgcggccgccccaaggaguccaccaucuggaccuccggcuccuccaucuccuucugcggcgucaacuccgacaccgucuccugguccuggcccgacggcgccgagcuccccuucaccaucgacaaguga

SEQ ID NO: 122024 - RNA, 1350 nt, Artificial Sequence
  derived and/or modified CDS sequence (opt2) from neuraminidase__InfluenzaA__AJK00178
augaaccccaaccagaagaucaucaccaucggcuccaucugcauggucaucggcaucgucucccucaugcuccagaucggcaacaugaucuccaucugggccucccacuccauccgcaccggcaaccagaaccaggucgagcccaucaucaacaccaacuuccccaccgagaaggccgccgccuccaucacccucgccggcaacuccucccucugccccauccgcggcugggccauccacuccaaggacaacuccauccgcaucggcuccaagggcgacgucuucgucauccgcgagcccuucaucuccugcucccaccucgagugccgcaccuucuuccucacccagggcgcccuccucaacgacaagcacuccaacggcaccgucaaggaccgcuccccccaccgcacccucauguccugccccgucggcgaggcccccucccccuacaacucccgcuucgaguccgucgccugguccgccuccgccugccacgacggcaccuccuggcucaccaucggcaucuccggccccgacaacggcgccgucgccguccucaaguacaacggcaucaucaccgacaccaucaagaccuggcgcaacaacauccuccgcacccaggaguccgagugcgccugcgucaacggcuccugcuucaccgucaugaccgacggccccuccgacggccaggccuccuacaagaucuucaagauggagaagggcaaggucaucaaguccgucgagcucgacgcccccaacuaccacuacgaggagugcuccugcuaccccgacgccggcgagaucaccugcgucugccgcgacaacuggcacggcuccaaccgccccugggucuccuucaaccagaaccucgaguaccagaucggcuacaucugcuccggcgucuucggcgacaacccccgccccaccgacggcaccggcuccugcggccccgucucccacaacggcgccuacggcgucaagggcuucuccuucaaguacggcaacggcgucuggaucggccgcaccaagucccccaacucccgcuccggcuucgagaugaucugggaccccaacggcugguccgagaccgacuccuccuucuccgucaagcaggacaucgucgccaucaccgacugguccggcuacuccggcuccuucguccagcaccccgagcucaccggccucgacugcauccgccccugcuucugggucgagcucauccgcggccgccccaaggaguccaccgucuggaccuccggcuccuccaucuccuucugcggcgucaacuccgacaccgucuccugguccuggcccgacggcgccgagcuccccuucaccaucgacaaguga

SEQ ID NO: 122025 - RNA, 1350 nt, Artificial Sequence
  derived and/or modified CDS sequence (opt2) from neuraminidase__InfluenzaA__AJK00199
augaaccccaaccagaagaucaucaccaucggcuccaucugcauggucaucggcaucgucucccucaugcuccagaucggcaacaugaucuccaucugggucucccacuccauccagaccggcaaccagaaccaggucgagcccaucaucaacaccaacuuccucaccgagaaggccgucgucuccaucacccucgccggcaacuccucccucugccccauccgcggcugggccauccacuccaaggacaacuccauccgcaucggcuccaagggcgacgucuucgucauccgcgagcccuucaucuccugcucccaccucgagugccgcaccuucuuccucacccagggcgcccuccucaacgacaagcacuccaacggcaccgucaaggaccgcuccccccaccgcacccucauguccugccccgucggcgaggcccccucccccuacaacucccgcuucgaguccgucgccugguccgccuccgccugccacgacggcaccuccuggcucaccaucggcaucuccggccccgacaacggcgccgccgccguccucaaguacaacggcaucaucaccgacaccaucaaguccuggcgcaacaacauccuccgcacccaggaguccgagugcgccugcgucaacggcuccugcuucaccgucaugaccgacggccccuccgacggccaggccuccuacaagaucuucaagauggagaagggcaaggucaucaaguccgucgagcucgacgcccccaacuaccacuacgaggagugcuccugcuaccccgacgccggcgagaucaccugcgucugccgcgacaacuggcacggcuccaaccgccccugggucuccuucaaccagaaccucgaguaccagaucggcuacaucugcuccggcgucuucggcgacaacccccgccccaacgacggcaccggcuccugcucccccgucucccacaacggcgccuacggcgucaagggcuucuccuucaaguacggcaacggcgucuggaucggccgcaccaagucccccaacucccgcuccggcuucgagaugaucugggaccccaacggcugguccgagaccgacuccuccuucuccgucaagcaggacaucgucgccaucaccgacugguccggcuacuccggcuccuucguccagcaccccgagcucaccggccucgacugcauccgccccugcuucugggucgagcucauccgcggccgccccaaggaguccaccgucuggaccuccggcuccuccaucuccuucugcggcgucaacuccgacaccgucuccugguccuggcccgacggcgccgagcuccccuucaccaucgacaaguga

SEQ ID NO: 122026 - RNA, 1350 nt, Artificial Sequence
  derived and/or modified CDS sequence (opt2) from neuraminidase__InfluenzaA__AJK00208
augaaccccaaccagaagaucaucaccaucggcuccaucugcauggucaccggcaucgucucccucaugcuccagaucggcaacaucaucuccaugugggucucccacuccauccagacccgcaaccagcaccagaccgagcccauccgcaacaccaacuuccucaccgagaacgccgucgccuccgucacccucgccggcaacuccucccucugccccauccgcggcugggccguccacuccaaggacaacuccauccgcaucggcuccaagggcgacgucuucgucauccgcgagcccuucaucuccugcucccaccucgagugccgcaccuucuuccucacccagggcgcccuccucaacgacaagcacuccaacggcaccgucaaggaccgcuccccccaccgcacccucauguccugccccgucggcgaggcccccucccccuacaacucccgcuucgaguccgucgccugguccgccuccgccugccacgacggcaccuccuggcucaccaucggcaucuccggccccgacaacggcgccgucgccguccucaaguacaacggcaucaucaccgacaccaucaaguccuggcgcaacaacauccuccgcacccaggaguccgagugcgccugcgucaacggcuccugcuucaccgucaugaccgacggccccuccaacggccaggccuccuacaagaucuucaagauggagaagggcaaggucgucaaguccgucgagcucaacgcccccaacuaccacuacgaggagugcuccugcuaccccgacgccggcgagaucaucugcgucugccgcgacaacuggcacggcuccaaccgccccugggucuccuucaaccagaaccucgaguaccagaucggcuacaucugcuccggcgucuucggcgacaacccccgccccaacgacggcaccggcuccugcggccccgucucccccaacggcgccuacggcaucaagggcuucuccuucaaguacggcaacggcgucuggaucggccgcaccaaguccaccaacucccgcuccggcuucgagaugaucugggaccccaacggcuggaccggcaccgacuccgacuucuccgucaagcaggacaucgucgagaucaccgacugguccggcuacuccggcuccuucguccagcaccccgagcucaccggccucgacugcauccgccccugcuucugggucgagcucauccgcggccgccccaaggaguccaccaucuggaccuccggcuccuccaucuccuucugcggcgucaacuccgacaccgucuccugguccuggcccgacggcgccgagcuccccuucaccaucgacaaguga

SEQ ID NO: 122027 - RNA, 1350 nt, Artificial Sequence
  derived and/or modified CDS sequence (opt2) from neuraminidase__InfluenzaA__AJK00219
augaaccccaaccagaagaucaucaccaucggcuccaucugcauggucaccggcaucgucucccucaugcuccagaucggcaacaucaucuccaugugggucucccacuccauccagacccgcaaccagcaccaggccgagcccauccgcaacaccaacuuccucaccgagaacgccgucgccuccgucacccucgccggcaaccucucccucugccccauccgcggcugggccguccacuccaaggacaacaacauccgcaucggcuccaagggcgacgucuucgucauccgcgagcccuucaucuccugcucccaccucgagugccgcaccuucuuccucacccagggcgcccuccucaacgacaagcacuccaacggcaccgucaaggaccgcuccccccaccgcacccucauguccugccccgucggcgaggcccccucccccuacaacucccgcuucgaguccgucgccugguccgccuccgccugccacgacggcaccuccuggcucaccaucggcaucuccggccccgacaacggcgccgucgccguccucaaguacaacggcaucaucaccgacaccaucaaguccuggcgcaacaacauccuccgcacccaggaguccgagugcgccugcgucaacggcuccugcuucaccgucaugaccgacggccccuccaacggccaggccuccuacaagaucuucaagauggagaagggcaaggucgucaaguccgucgagcucaacgcccccaacuaccacuacgaggagugcuccugcuaccccgacgccggcgagaucaucugcgucugccgcgacaacuggcacggcuccaaccgccccugggucuccuucaaccagaaccucgaguaccagaucggcuacaucugcuccggcgucuucggcgacaacccccgccccaacgacggcaccggcuccugcggccccgucucccccaacggcgccuacggcaucaagggcuucuccuucaaguacggcaacggcgucuggaucggccgcaccaaguccaccaacucccgcuccggcuucgagaugaucugggaccccaacggcuggaccggcaccgacuccgacuucuccgucaagcaggacaucgucgagaucaccgacugguccggcuacuccggcuccuucguccagcaccccgagcucaccggccucgacugcauccgccccugcuucugggucgagcucauccgcggccgccccaaggaguccaccaucuggaccuccggcuccuccaucuccuucugcggcgucaacuccgacaccgucuccugguccuggcccgacggcgccgagcuccccuucaccaucgacaaguga

SEQ ID NO: 122028 - RNA, 1350 nt, Artificial Sequence
  derived and/or modified CDS sequence (opt2) from neuraminidase__InfluenzaA__AJK00230
augaaccccaaccagaagaucaucaccaucggcuccaucugcauggucaccggcaucgucucccucaugcuccagaucggcaacaucaucuccaugugggucucccacuccauccagacccgcaaccagcaccagaccgagcccauccgcaacaccaacuuccucaccgagaacgccgucgccuccgucacccucgccggcaacuccucccucugccccauccgcggcugggccguccacuccaaggacaacuccauccgcaucggcuccaagggcgacgucuucgucauccgcgagcccuucaucuccugcucccaccucgagugccgcaccuucuuccucacccagggcgcccucaucaacgacaagcacuccaacggcaccgucaaggaccgcuccccccaccgcacccucauguccugccccgucggcgaggcccccucccccuacaacucccgcuucgaguccgucgccugguccgccuccgccugccacgacggcaccuccuggcucaccaucggcaucuccggccccgacaacggcgccgucgccguccucaaguacaacggcaucaucaccgacaccaucaaguccuggcgcaacaacauccuccgcacccaggaguccgagugcgccugcgucaacggcuccugcuucaccgucaugaccgacggccccuccaacggccaggccuccuacaagaucuucaagauggagaagggcaaggucgucaaguccgucgagcucaacgcccccaacuaccacuacgaggagugcuccugcuaccccgacgccggcgagaucaucugcgucugccgcgacaacuggcacggcuccaaccgccccugggucuccuucaaccagaaccucgaguaccagaucggcuacaucugcuccggcgucuucggcgacaacccccgccccaacgacggcaccggcuccugcggccccgucucccccaacggcgccuacggcaucaagggcuucuccuucaaguacggcaacggcgucuggaucggccgcaccaaguccaccaacucccgcuccggcuucgagaugaucugggaccccaacggcuggaccggcaccgacuccgacuucuccgucaagcaggacaucgucgagaucaccgacugguccggcuacuccggcuccuucguccagcaccccgagcucaccggccucgacugcauccgccccugcuucugggucgagcucauccgcggccgccccaaggaguccaccaucuggaccuccggcuccuccaucuccuucugcggcgucaacuccgacaccgucuccugguccuggcccgacggcgccgagcuccccuucaccaucgacaaguga

SEQ ID NO: 122029 - RNA, 1380 nt, Artificial Sequence
  derived and/or modified CDS sequence (opt2) from neuraminidase__InfluenzaA__AJS18470
augaaccccaaccagaagaucaccugcaucuccgccaccggcgucacccucuccgucgucucccuccucaucggcaucgccaaccucggccucaacaucggccuccacuacaaggucgacgacuccaccaccaucaacauccccaacaugaacgagaccaaccccaccaucaccaacaucaccaacaucaucgucaacaagaacgaggagcgcaccuuccucaaccucaccaagccccucugcgaggucaacuccuggcacauccucuccaaggacaacgccauccgcaucggcgaggacgcccacauccucgucacccgcgagcccuaccucuccugcgacccccagggcugccgcauguucgcccucucccagggcaccacccuccgcggccgccacgccaacggcaccauccacgaccgcucccccuuccgcgcccucaucuccugggagaugggccaggcccccucccccuacaacacccgcgucgagugcaucggcugguccuccaccuccugccacgacggcaucucccgcauguccaucugcaucuccggccccaacaacaacgccuccgccgucgucugguaccgcggccgccccgucaccgagauccccuccugggucggcaacauccuccgcacccaggaguccgagugcgucugccacaagggcaucugccccgucgucaugaccgacggccccgccaacaacaaggccgccaccaagaucaucuacuucaaggagggcaagauccagaagaucgaggagcuccagggcaacgcccagcacgucgaggagugcuccugcuacggcgccgccggcaugaucaagugcgucugccgcgacaacuggaagggcgccaaccgccccaucaucaccaucgaccccgagaugaugacccacaccuccaaguaccucugcuccaagauccucaccgacaccucccgccccaacgaccccaccaacggcaacugcgacgcccccaucaucggcggcucccccgaccccggcgucaagggcuucgccuaccucgacggcgagaacuccuggcucggccgcaccaucuccaaggacucccgcuccggcuacgagaugcucaagguccccaacgccgagaccgacacccaguccggccccaccuccuaccagcucaucgucaacaaccagaacugguccggcuacuccggcgccuucaucgacuacugggccaacaagggcugcuucaaccccugcuucuacgucgagcucauccgcggccgccccaaggagaucgacguccucuggaccuccaacuccauggucgcccucugcggcucccgcgagcgccucggcuccugguccuggcacgacggcgccgagaucaucuacuucaaguga

SEQ ID NO: 122030 - RNA, 1380 nt, Artificial Sequence
  derived and/or modified CDS sequence (opt2) from neuraminidase__InfluenzaA__AJS18481
augaaccccaaccagaagaucaccugcaucuccgccaccggcgucacccucuccgucgucucccuccucaucggcaucgccaaccucggccucaacaucggccuccacuacaaggucuccgacuccaccaccaucaacucccccaacaugaacgagaccaaccccaccaccaccaacaucaccaacaucaucgucaacaagaacgaggagcgcaccuuccucaaccucaccaagccccucugcgaggucaacuccuggcacauccucuccaaggacaacgccauccgcaucggcgaggaggcccacauccucgucacccgcgagcccuaccucuccugcgacccccagggcugccgcauguucgcccucucccagggcaccacccuccgcggccgccacgccaacggcaccauccacgaccgcucccccuuccgcgcccucaucuccugggagaugggccaggcccccucccccuacaacacccgcgucgagugcaucggcugguccuccaccuccugccacgacggcaucucccgcauguccaucugcaucuccggccccaacaacaacgccuccgccgucgucugguaccgcggccgccccgucaccgagauccccuccugggccggcaacauccuccgcacccaggaguccgagugcgucugccacaagggcaucugccccgucgucaugaccgacggccccgccaacaacaaggccgccaccaagaucaucuacuuccgcgagggcaagauccagaagaucgaggagcuccagggcaacgcccagcacaucgaggagugcuccugcuacggcgccgccggcaugaucaagugcgccugccgcgacaacuggaagggcgccaaccgccccaucaucaccaucgaccccgagaugaugacccacaccuccaaguaccucugcuccaagauccucaccgacaccucccgccccaacgaccccaccaacggcaacugcgacgcccccgucaccggcggcucccccgaccccggcaucaagggcuucgccuuccucgacggcgagaacuccuggcucggccgcaccaucuccaagaacucccgcuccggcuacgagaugcucaagguccccaacgccgagaccgacacccaguccggccccaccuccuaccagcucaucgucaacaaccagaacugguccggcuacuccggcgccuucaucgacuacugggccaacaaggagugcuucaaccccugcuucuacgucgagcucauccgcggccgccccaaggaguccgacguccucuggaccuccaacuccauggucgcccucugcggcucccgcgagcgccucggcuccugguccuggcacgacggcgccgagaucaucuacuucaaguga

SEQ ID NO: 122031 - RNA, 1410 nt, Artificial Sequence
  derived and/or modified CDS sequence (opt2) from neuraminidase__InfluenzaA__AKA59350
augaaccccaaccagaagaucaucaccaucggcuccgucugcaugaccaucggcgucgccaaccucauccuccagaucggcaacaucaucuccaucuggaucucccacuccauccagcucggcaaccagaaccagaucgagaccugcaaccaguccgucaucaccuacgagaacaacaccugggucaaccagaccgacgucaacaucuccaacaccaacuucgccgccggccaguccgucgucuccgucaagcucgccggcaacuccucccucugccccgucuccggcugggccaucuacuccaaggacaacuccauccgcaucggcuccaagggcgacgucuucgucauccgcgagcccuucaucuccugcuccccccucgagugccgcaccuucuuccucacccagggcgcccuccucaacgacaagcacuccaacggcaccaucaaggaccgcucccccuaccgcacccucauguccugccccaucggcgagguccccucccccuacaacucccgcuucgaguccgucgccugguccgccuccgccugccacgacggcaucaacuggcucaccaucggcaucuccggccccgacaacggcgccgucgccguccucaaguacaacggcaucaucaccgacaccaucaaguccuggcgcaacaacauccuccgcacccaggaguccgagugcgucugcgucaacggcuccugcuucaccgucaugaccgacggccccuccaacggccaggccuccuacaagaucuuccgcaucgagaagggcaagaucgucaaguccgucgagaugaacgcccccaacuaccacuacgaggagugcuccugcuaccccgacuccuccgagaucaccugcgucugccgcgacaacuggcacggcuccaaccgccccugggucuccuucaaccagaaccucgaguaccagaucggcuacaucugcuccggcaucuucggcgacaacccccgccccaacgacaagaccggcuccugcggccccgucuccuccaacggcgccaacggcgucaagggcuucuccuucaaguacggcaacggcgucuggaucggccgcaccaaguccaucuccucccgcaacggcuucgagaugaucugggaccccaacggcuggaccggcaccgacaacaacuucuccaucaagcaggacaucgucggcaucaacgagugguccggcuacuccggcuccuucguccagcaccccgagcucaccggccucgacugcauccgccccugcuucugggucgagcucauccgcggccgccccaaggagaacaccgucuggaccuccggcuccuccaucuccuucugcggcgucaacuccgacaccgucggcugguccuggcccgacggcgccgagcuccccuucaccaucgacaaguga

SEQ ID NO: 122032 - RNA, 1410 nt, Artificial Sequence
  derived and/or modified CDS sequence (opt2) from neuraminidase__InfluenzaA__AKA59352
augaaccccaaccagaagaucaucaccaucggcuccgucugcaugaccaucggcauggccaaccucaugcuccagaucggcaacaucaucuccaucuggaucucccacuccauccagcucggcaaccagaaccagaucgagaccugcaaccaguccgucaucaccuacgagaacaacaccugggucaaccagaccuacgucaacaucuccaacaccaaccucgccgucggccaguccgucgucuccaccaagcucgccggcaacuccucccucugccccgucuccggcugggccaucuacuccaaggacaacuccauccgcaucggcuccaagggcgacgucuucgucauccgcgagcccuucaucuccugcuccccccucgagugccgcaccuucuuccucacccagggcgcccuccucaacgacaagcacuccaacggcaccaucaaggaccgcucccccuaccgcacccucauguccugccccaucggcgagguccccucccccuacaacucccgcuucgaguccgucgccugguccgccuccgccugccacgacggcaucaacuggcucaccaucggcaucuccggccccgacaacggcgccgucgccguccucaaguacaacggcaucaucaccgacaccaucaaguccuggcgcaacaacauccuccgcacccaggaguccgagugcgccugcgucaacggcuccugcuucaccgucaugaccgacggccccuccgacggccaggccuccuacaagaucuuccgcaucgagaagggcaagaucgucaaguccgucgagaugaacgcccccaacuaccacuacgaggagugcuccugcuaccccgacuccuccgagaucaccugcgucugccgcgacaacuggcacggcuccaaccgccccugggucuccuucaaccagaaccucgaguaccagaucggcuacaucugcuccggcaucuucggcgacaacccccgccccaacgacaagaccggcuccugcggccccgucuccuccaacggcgccaacggcgucaagggcuucuccuucaaguacggcaacggcgucuggaucggccgcaccaaguccaucuccucccgcaacggcuucgagaugaucugggaccccaacggcuggaccggcaccgacaacaacuucuccaucaagcaggacaucgucggcaucaacgagugguccggcuacuccggcuccuucguccagcaccccgagcucaccggccucgacugcauccgccccugcuucugggucgagcucauccgcggccgccccaaggagaacaccaucuggaccuccggcuccuccaucuccuucugcggcgucaacuccgacaccgucggcugguccuggcccgacggcgccgagcuccccuucaccaucgacaaguga

SEQ ID NO: 122033 - RNA, 1410 nt, Artificial Sequence
  derived and/or modified CDS sequence (opt2) from neuraminidase__InfluenzaA__AKA59354
augaaccccaaccagaagaucaucaccaucggcuccgucugcaugaccaucggcgucgccaaccucauccuccagaucggcaacaucaucuccaucuggaucucccacuccauccagcucggcaaccagaaccagaucgagaccugcaaccaguccgucaucaccuacgagaacaacaccugggccaaccagaccuacgucaacaucuccaacaccaacuucgccgccggccaguccgucgucuccgucaagcucgccggcaacuccucccucugccccgucuccggcugggccaucuacuccaaggacaacuccauccgcaucggcuccaagggcgacgucuucgucauccgcgagcccuucaucuccugcuccccccucgagugccgcaccuucuuccucacccagggcgcccuccucaacgacaagcacuccaacggcaccaucaaggaccgcucccccuaccgcacccucauguccugccccaucggcgagguccccucccccuacaacucccgcuucgaguccgucgccugguccgccuccgccugccacgacggcaucaacuggcucaccaucggcaucuccggccccgacaacggcgccgucgccguccucaaguacaacggcaucaucaccgacaccaucaaguccuggcgcaacaacauccuccgcacccaggaguccgagugcgucugcgucaacggcuccugcuucaccgucaugaccgacggccccuccaacggccaggccuccuacaagaucuuccgcaucgagaagggcaagaucgucaaguccgucgagaugaacgcccccaacuaccacuacgaggagugcuccugcuaccccgacuccuccgagaucaccugcgucugccgcgacaacuggcacggcuccaaccgccccugggucuccuucaaccagaaccucgaguaccagaucggcuacaucugcuccggcaucuucggcgacaacccccgccccaacgacaagaccggcuccugcggccccgucuccuccaacggcgccaacggcgucaagggcuucuccuucaaguacggcaacggcgucuggaucggccgcaccaaguccaucuccucccgcaacggcuucgagaugaucugggaccccaacggcuggaccgagaccgacaacaacuucuccaucaagcaggacaucgucggcaucaacgagugguccggcuacuccggcuccuucguccagcaccccgagcucaccggccucgacugcauccgccccugcuucugggucgagcucauccgcggccgccccaaggagaacaccgucuggaccuccggcuccuccaucuccuucugcggcgucaacuccgacaccgucggcugguccuggcccgacggcgccgagcuccccuucaccaucgacaaguga

SEQ ID NO: 122034 - RNA, 1380 nt, Artificial Sequence
  derived and/or modified CDS sequence (opt2) from neuraminidase__InfluenzaA__AKS48026
augaaccccaaccagaagaucaccugcaucuccgccaccggcgucacccucuccgucgucucccuccucaucggcaucgccaaccucggccucaacaucggccuccacuacaaggucuccgacuccaccaccaucaacauccccaacaugaacgagaccaaccccaccaccaccaacaucaccaacaucaucgucaacaagaacgaggagcgcaccuuccucaaccucaccaagccccucugcgaggucaacuccuggcacauccucuccaaggacaacgccauccgcaucggcgaggacgcccacauccucgucacccgcgagcccuaccucuccugcgacccccagggcugccgcauguucgcccucucccagggcaccacccuccgcggccgccacgccaacggcaccauccacgacaagucccccuuccgcgcccucaucuccugggagaugggccaggcccccucccccuacaacacccgcgucgagugcaucggcugguccuccaccuccugccacgacggcaucucccgcauguccaucugcaucuccggccccaacaacaacgccuccgccgucgucugguaccgcggccgccccgucaccgagauccccuccugggucggcaacauccuccgcacccaggaguccgagugcgucugccacaagggcaucugccccgucgucaugaccgacggccccgccaacaacaaggccgccaccaagaucaucuacuucaaggagggcaagauccagaagaucgaggagcuccagggcaacgcccagcacaucgaggagugcuccugcuacggcgccgccggcaugaucaagugcgucugccgcgacaacuggaagggcgccaaccgccccaucaucaccaucgaccccgagaugaugacccacaccuccaaguaccucugcuccaagauccucaccgacaccucccgccccaacgaccccaccaacggcaacugcgacgagcccaucaccggcggcucccccgaccccggcgucaagggcuucgccuuccucgacggcgagaacuccuggcucggccgcaccaucuccaaggacucccgcuccggcuacgagaugcucaagguccccaacgccgagaccgacacccaguccggccccaccuccuaccagcucaucgucaacaaccagaacugguccggcuacuccggcgccuucaucgacuacugggccaacaaggagugcuucaaccccugcuucuacgucgagcucauccgcggccgccccaaggagaucgacguccucugggccuccaacuccauggucgcccucugcggcucccgcgagcgccucggcuccugguccuggcacgacggcgccgagaucaucuacuucaaguga

SEQ ID NO: 122035 - RNA, 1380 nt, Artificial Sequence
  derived and/or modified CDS sequence (opt2) from neuraminidase__InfluenzaA__AKS48040
augaaccccaaccagaagaucaccugcaucuccgccaccggcaugacccucuccgucgucucccuccucaucggcaucgccaaccucggccucaacaucggccuccacuacaaggucuccgacuccaccaccaucaacauccccaacaugaacgagaccaaccccaccaccaccaacaucaccaacaucaucgucaacaagaacgaggagcgcaccuuccucaaccucaccaagccccucugcgaggucaacuccuggcacauccucuccaaggacaacgccauccgcaucggcgaggacgcccacauccucgucacccgcgagcccuaccucuccugcgacccccagggcugccgcauguucgcccucucccagggcaccacccuccgcggccgccacgccaacggcaccauccacgaccgcucccccuuccgcgcccucaucuccugggagaugggccaggcccccucccccuacaacacccgcgucgagugcaucggcugguccuccaccuccugccacgacggcaucucccgcauguccaucugcaucuccggccccaacaacaacgccuccgccgucgucugguaccgcggccgccccgucaccgagauccccuccugggucggcaacauccuccgcacccaggaguccgagugcgucugccacaagggcaucugccccgucgucaugaccgacggccccgccaacaacaaggccgccaccaagaucaucuacuucaaggagggcaagauccagaagaucgaggagcuccagggcaacgcccagcacaucgaggagugcuccugcuacggcgccgccggcaugaucaagugcgucugccgcgacaacuggaagggcgccaaccgccccaucaucaccaucgaccccgagaugaugacccacaccuccaaguaccucugcuccaagauccucaccgacaccucccgccccaacgaccccaccaacggcaacugcgacgcccccaucaccggcggcucccccgaccccggcgucaagggcuucgccuuccucgacggcgagaacuccuggcucggccgcaccaucuccaaggacucccgcuccggcuacgagaugcucaagguccccaacgccgagaccgacacccaguccggccccaccuccuaccagcucaucgucaacaaccagaacugguccggcuacuccggcgccuucaucgacuacugggccaacaaggagugcuucaaccccugcuucuacgucgagcucauccgcggccgccccaaggagaucgacguccucugggccuccaacuccauggucgcccucugcggcucccgcgagcgccucggcuccugguccuggcacgacggcgccgagaucaucuacuucaaguga

SEQ ID NO: 122036 - RNA, 1380 nt, Artificial Sequence
  derived and/or modified CDS sequence (opt2) from neuraminidase__InfluenzaA__ALO75898
augaaccccaaccagaagaucaccugcaucuccgccaccggcgucacccucuccgucgucucccuccucaucggcaucgccaaccucggccucaacaucggccuccacuacaaggucuccgacuccaccaccaucaacauccccaacaugaacgagaccaaccccaccaccaccaacaucaccaacaucaucgucaacaagaacgaggagcgcaccuuccucaaccucaccaagccccucugcgaggucaacuccuggcacauccucuccaaggacaacgccauccgcaucggcgaggacgcccacauccucgucacccgcgagcccuaccucuccugcgacccccagggcugccgcauguucgcccucucccagggcaccacccuccgcggccgccacgccaacggcaccauccacgaccgcucccccuuccgcgcccucaucuccugggagaugggccaggcccccucccccuacaacacccgcgucgagugcaucggcugguccuccaccuccugccacgacggcaucucccgcauguccaucugcaucuccggccccaacaacaacgccuccgccgucgucugguaccgcggccgccccgucaccgagauccccuccugggucggcaacauccuccgcacccaggaguccgagugcgucugccacaagggcaucugccccgucgucaugaccgacggccccgccaacaacaaggccgccaccaagaucaucuacuucaaggagggcaagauccagaagaucgaggagcuccagggcaacgcccagcacaucgaggagugcuccugcuacggcgccgccggcaugaucaagugcgucugccgcgacaacuggaagggcgccaaccgccccaucaucaccaucgaccccgagaugaugacccacaccuccaaguaccucugcuccaagauccucaccgacaccucccgccccaacgaccccaccaacggcaacugcgacgcccccaucaccggcggcucccccgaccccggcgucaagggcuucgccuuccucgacggcgagaacuccuggcucggccgcaccaucuccaaggacucccgcuccggcuacgagaugcucaagguccccaacgccgagaccgacacccaguccggccccaccuccuaccagcucaucgucaacaaccagaacugguccggcuacuccggcgccuucaucgacuacugggccaacaaggagugcuucaaccccugcuucuacgucgagcucauccgcggccgccccaaggagaucgacguccucugggccuccaacuccauggucgcccucugcggcucccgcgagcgccucggcuccugguccuggcacgacggcgccgagaucaucuacuucaaguga

SEQ ID NO: 122037 - RNA, 1380 nt, Artificial Sequence; identical to SEQ ID NO: 122036
  derived and/or modified CDS sequence (opt2) from neuraminidase__InfluenzaA__ALO75910

SEQ ID NO: 122038 - RNA, 1380 nt, Artificial Sequence
  derived and/or modified CDS sequence (opt2) from neuraminidase__InfluenzaA__ALO75922
augaaccccaaccagaagaucaccugcaucuccgccaccggcgucacccucuccgucgucucccuccucaucggcaucgccaaccucggccucaacaucggccuccacuacaaggucuccgacuccaccaccaucaacauccccaacaugaacgagaccaaccccaccaccaccaacaucaccaacaucaucgucaacaagaacgaggagcgcaccuuccucaaccucaccaagccccucugcgaggucaacuccuggcacauccucuccaaggacaacgccauccgcaucggcgaggacgcccacauccucgucacccgcgagcccuaccucuccugcgacccccagggcugccgcauguucgcccucucccagggcaccacccuccgcggccgccacgccaacggcaccauccacgaccgcucccccuuccgcgcccucaucuccugggagaugggccaggcccccucccccuacaacacccgcgucgagugcaucggcugguccuccaccuccugccacgacggcaucucccgcauguccaucugcaucuccggccccaacaacaacgccuccgccgucgucugguaccgcggccgccccgucaccgagauccccuccugggucggcaacauccuccgcacccaggaguccgagugcgucugccacaagggcaucugccccgucgucaugaccgacggccccgccaacaacaaggccgccaccaagaucaucuacuucaaggagggcaagauccagaagaucgaggagcuccagggcaacgcccagcacaucgaggagugcuccugcuacggcgccgccggcaugaucaagugcgucugccgcgacaacuggaagggcgccaaccgccccaucaucaccaucgaccccgagaugaugacccacaccuccaaguaccucugcuccaagauccucaccgacaccucccgccccaacgaccccaccaacggcaacugcgacgagcccaucaccggcggcucccccgaccccggcgucaagggcuucgccuuccucgacggcgagaacuccuggcucggccgcaccaucuccaaggacucccgcuccggcuacgagaugcucaagguccccaacgccgagaccgacacccaguccggccccaccuccuaccagcucaucgucaacaaccagaacugguccggcuacuccggcgccuucaucgacuacugggccaacaaggagugcuucaaccccugcuucuacgucgagcucauccgcggccgccccaaggagaucgacguccucugggccuccaacuccauggucgcccucugcggcucccgcgagcgccucggcuccugguccuggcacgacggcgccgagaucaucuacuucaaguga

SEQ ID NO: 122039 - RNA, 1401 nt, Artificial Sequence
  derived and/or modified CDS sequence (opt2) from neuraminidase__InfluenzaA__ALT20083
augaaccccaaccagcgcaucaccgccaucggcuccgucucccucaucaucgccaucaucugccuccucaugcagaucgccauccucaccaccaccaugacccuccacuuccgccagaacgagugcuccaaccccuccaacaaccaggucaugcccugcgagcccaucaucaucgagcgcaacaccguccaccucaacuccaccaccaucgagcgcgagaucugccccaaggucgccgaguacaagaacugguccaagccccagugccagaucaccggcuucgcccccuucuccaaggacaacuccauccgccucuccgccuccggcgacaucugggucacccgcgagcccuacgucuccugcucccucaacaagugcuaccaguucgcccucggccagggcaccacccucaagaacaagcacuccaacggcaccacccacgaccgcaccccccaccgcacccuccucaugaacgagcucggcguccccuuccaccucggcaccaagcaggucugcaucgccugguccuccuccuccugcuacgacggcaaggccuggcuccacgucugcgucaccggcgacgacaagaacgccaccgccuccaucaucuacgacggcaugcucgucgacuccaucggcuccugguccaagaacauccuccgcacccaggaguccgagugcgucugcaucaacggcaccugcgccgucgucaugaccgacggcuccgccuccggcaaggccgacacccgcguccucuucauccgcgagggcaagaucaucaacaucuccccccucuccggcuccgcccagcacgucgaggagugcuccugcuacccccgcuaccccgagguccgcugcgucugccgcgacaacuggaagggcuccaaccgccccauccucuacaucaacauggccgacuacuccaucgaguccuccuacgucugcuccggccucgucggcgacaccccccgcaacgacgacuccuccuccuccuccaacugccgcgaccccaacaacgagcgcggcgcccccggcgucaagggcugggccuucgacgacggcaacgacgucuggaugggccgcaccaucaagaacggcucccgcuccggcuacgagaccuuccgcgucgucaacggcuggaccauggccaacuccaagucccagaucaaccgccaggucaucgucgacuccaacgacugguccggcuacuccggcaucuucuccgucgagggcaagaagugcaucaaccgcugcuucuacgucgagcucauccgcggccgcccccaggagccccgcgucugguggaccuccaacuccaucaucgucuucugcggcaccuccggcaccuacggcaccggcuccuggcccgacggcgccaacaucaacuucaugcccaucuga

SEQ ID NO: 122040 - RNA, 1410 nt, Artificial Sequence
  derived and/or modified CDS sequence (opt2) from neuraminidase__InfluenzaA__AMA65392
augaaccccaaccagaagaucaucaccaucggcuccgucugcaugaccaucggcauggccaaccucauccuccagaucggcaacaucaucuccaucugggucucccacuccauccagaucggcaaccagucccagaucgagaccugcaaccaguccgucaucaccuacgagaacaacaccugggucaaccagaccuacgucaacaucuccaacaccaacuucgccgccggccaguccgucgucuccgucaagcucgccggcaacuccucccucugccccgucuccggcugggccaucuacuccaaggacaacuccguccgcaucggcucccgcggcgacgucuucgucauccgcgagcccuucaucuccugcuccccccucgagugccgcaccuucuuccucacccagggcgcccuccucaacgacaagcacuccaacggcaccaucaaggaccgcucccccuaccgcacccucauguccugccccaucggcgagguccccucccccuacaacucccgcuucgaguccgucgccugguccgccuccgccugccacgacggcaucaacuggcucaccaucggcaucuccggccccgacuccggcgccgucgccguccucaaguacaacggcaucaucaccgacaccaucaaguccuggcgcaacaacauccuccgcacccaggaguccgagugcgccugcgucaacggcuccugcuucaccaucaugaccgacggccccuccgacggccaggccuccuacaagaucuuccgcaucgagaagggcaagaucaucaaguccgucgagaugaaggcccccaacuaccacuacgaggagugcuccugcuaccccgacuccuccgagaucaccugcgucugccgcgacaacuggcacggcuccaaccgccccugggucuccuucaaccagaaccucgaguaccagaugggcuacaucugcuccggcgucuucggcgacaacccccgccccaacgacaagaccggcuccugcggccccgucuccuccaacggcgccaacggcgucaagggcuucuccuucaaguacggcaacggcgucuggaucggccgcaccaaguccaucuccucccgcaagggcuucgagaugaucugggaccccaacggcuggaccggcaccgacaacaaguucuccaucaagcaggacaucgucggcaucaacgagugguccggcuacuccggcuccuucguccagcaccccgagcucaccggccucgacugcauccgccccugcuucugggucgagcucauccgcggccgccccgaggagaacaccaucuggaccuccggcuccuccaucuccuucugcggcgucaacuccgacaccgucggcugguccuggcccgacggcgccgagcuccccuucaccaucgacaaguga

SEQ ID NO: 122041 - RNA, 1410 nt, Artificial Sequence
  derived and/or modified CDS sequence (opt2) from neuraminidase__InfluenzaA__AMA65394
augaaccccaaccagaagaucaucaccaucggcuccgucugcaugaccaucggcauggccaaccucauccuccagaucggcaacaucaucuccaucugggucucccacuccauccagaucggcaaccagucccagaucgagaccugcaaccaguccgucaucaccuacgagaacaacaccugggucaaccagaccuacgucaacaucuccaacaccaacuucgccgccggccaguccgucgucuccgucaagcucgccggcaacuccucccucugccccgucuccggcugggccaucuacuccaaggacaacuccguccgcaucggcuccaagggcgacgucuucgucauccgcgagcccuucaucuccugcuccccccucgagugccgcaccuucuuccucacccagggcgcccuccucaacgacaagcacuccaacggcaccaucaaggaccgcucccccuaccgcacccucauguccugccccaucggcgagguccccucccccuacaacucccgcuucgaguccgucgccugguccgccuccgccugccacgacggcaucaacuggcucaccaucggcaucuccggccccgacuccggcgccgucgccguccucaaguacaacggcaucaucaccgacaccaucaaguccuggcgcaacaacauccuccgcacccaggaguccgagugcgccugcgucaacggcuccugcuucaccaucaugaccgacggccccuccgacggccaggccuccuacaagaucuuccgcaucgagaagggcaagaucaucaaguccgucgagaugaaggcccccaacuaccacuacgaggagugcuccugcuaccccgacuccuccgagaucaccugcgucugccgcgacaacuggcacggcuccaaccgccccugggucuccuucaaccagaaccucgaguaccagaugggcuacaucugcuccggcgucuucggcgacaacccccgccccaacgacaagaccggcuccugcggccccgucuccuccaacggcgccaacggcgucaagggcuucuccuucaaguacggcaacggcgucuggaucggccgcaccaaguccaucuccucccgcaagggcuucgagaugaucugggaccccaacggcuggaccggcaccgacaacaaguucuccaucaagcaggacaucgucggcaucaacgagugguccggcuacuccggcuccuucguccagcaccccgagcucaccggccucgacugcauccgccccugcuucugggucgagcucauccgcggccgccccgaggagaacaccaucuggaccuccggcuccuccaucuccuucugcggcgucaacuccgacaccgucggcugguccuggcccgacggcgccgagcuccccuucaccaucgacaaguga

SEQ ID NO: 122042 - RNA, 1410 nt, Artificial Sequence
  derived and/or modified CDS sequence (opt2) from neuraminidase__InfluenzaA__BAA00618
augaaccccaaccagaagaucaucaccaugggcuccgucuccaucaucaucgccaucgucugccuccucaugcagaucgccauccucgucaccaccgucacccuccacuuccgccagcacgaguccgacuccccccccuccaaccaggucauccccugcgagcccaucaucaucgagcgcaacaucaccgagaucgucuaccucaacaacaccaccaucgagaaggagaccugccccaaguccgucgaguaccgcaacugguccaagccccagugcaagaucaccggcuucgcccccuucuccaaggacaacuccauccgccucuccgccggcggcgacaucugggucacccgcgagcccuacgucuccugcgaccccggcaagugcuaccaguucgcccucggccagggcaccacccucgacaacaagcacuccaacgacaccauccacgaccgcaucccccaccgcacccuccucaugaacgagcucggcguccccuuccaccucggcacccgccaggucugcaucgccugguccuccuccuccugccacgacggcaaggccuggcuccacgucugcgucaccggcgacgacaagaacgccaccgccuccuucaucuacaacggccgccucgucgacuccaucggcuccuggucccagaacauccuccgcacccaggaguccgagugcgucugcaucaacggcaccugcaccgucgucaugaccgacggcuccgccuccggccgcgccgacacccgcauccucuucaucgaggagggcaagaucguccacaucuccccccucuccggcuccgcccagcacgucgaggagugcuccugcuacccccgcuaccccgacguccgcugcaucugccgcgacaacuggaagggcuccaacucccccgucgucgacaucaacaugaaggacuacuccaucgacuccuccuacgucugcuccggccucgucggcgacaccccccgcaacgacgaccgcuccuccaaguccaacugccgcaaccccaacaacgagcgcggcaaccacggcgucaagggcugggccuucgacaacggcgacgacgucuggaugggccgcaccaucuccaaggaccuccgcuccggcuacgagaccuucaaggucaucggcggcugguccacccccaacuccaagucccagaccaaccgccaggucaucgucgacuccaacaacugguccggcuacuccggcaucuucuccgucgagggcaaguccugcaucaaccgcugcuucuacgucgagcucauccgcggccgcaagcaggagacccgcgucugguggaccuccaacuccaucgucgucuucugcggcaccuccggcaccuacggcaccggcuccuggcccgacggcgccaacaucgacuucaugcccaucuga

SEQ ID NO: 122043 - RNA, 1410 nt, Artificial Sequence
  derived and/or modified CDS sequence (opt2) from neuraminidase__InfluenzaA__BAA00619
augaaccccaaccagaagaucaucaccaucggcuccgucucccucaccuucgccgccaucugcuuccucaugcagaucgccauccucgucaccaccgucacccucaacuucaagcaguacgagugcgacccccccgccaccaaccaggucaugcccugcgagcccaucaucaucgagcgcaacaucaccgagaucgucuaccucaccaacaccaccaucgagcgcgagaucugccccaagcucgucgaguaccgcaacugguccaagccccagugcaagaucaccggcuucgcccccuucuccaaggacaacuccauccgccucuccgccggcggcgacaucugggucacccgcgagcccuacgucuccugcgaccccggccgcugcuaccaguucgcccucggccagggcaccacccucgacaacaagcacuccaacgacaccauccacgaccgcaccccccaccgcacccuccucaugaacgagcucggcguccccuuccaccucggcacccgccaggucugcaucgccugguccuccuccuccugccacgacggcaaggccuggcuccacgucugcaucaccggcuacgacaagaacgccaccgccuccuucaucuacgacggccgccucgucgacuccaucggcuccugguccaagaacauccuccgcacccaggaguccgagugcgucugcaucaacggcaccugcaccgucgucaugaccgacggcuccgccuccggccgcgccgacacccgcauccucuucaucgaggagggccgcaucguccacaucuccccccucuccggcuccgcccagcacgucgaggagugcuccugcuacccccgcuaccccggcguccgcugcaucugccgcgacaacuggaagggcuccaaccgccccgucgucgacaucaacgucaaggacuacuccaucaacuccuccuacgucugcuccggccucgucggcgacaccccccgcaacaacgaccgcuccuccaacuccuacugccagaaccccaacaacgagaagggcaaccacggcgucaagggcugggccuucgacgacggcaacgacgucuggaugggccgcaccaucuccgaggacucccgcuccggcuaccagaccuucaaggucaucggcggcugguccacccccaacuccaagcuccagaucaaccgccaggucaucgucgacuccgacaaccgcuccggcuacuccggcaucuucuccgucgagggcaaguccugcaucaaccgcugcuucuacgucgagcucauccgcggccgccgccaggagacccgcgucugguggaccuccaacuccaucgucgucuucugcggcaccuccggcaccuacggcaccggcuccuggcccgacggcgccgacaucaaccucaugcccaucuga

SEQ ID NO: 122044 - RNA, 1410 nt, Artificial Sequence
  derived and/or modified CDS sequence (opt2) from neuraminidase__InfluenzaA__BAA00620
augaaccccaaccagaagaucaugaccaucggcuccgucucccucaucaucgccgccgucugcuuccucaugcagaucgccauccucgucaccaccgucacccuccacuucaagcagugcgagugcgacucccccuccaacaaccaggucaagcccugcgagcccaucaucaucgagcgcaacaucaccgagaucgucuaccucaacaacaccaccaucgagaaggagaccugccccaagcucgucgaguaccgcaacugguccaagccccagugcaagaucaccggcuucgcccccuucuccaaggacaacuccauccgccucuccgccggcggcgacaucugggucacccgcgagcccuacgucuccugcgaccccggcaagugcuaccaguucgcccucggccagggcaccacccucgacaacaagcacuccaacgacaccauccacgaccgcaucccccaccgcacccuccucaugaacgagcucggcguccccuuccaccucggcacccgccaggucugcaucgccugguccuccuccuccugccacgacggcaaggccuggcuccacgucugcgucaccggcgacgacaagaacgccaccgccuccuucaucuacgacggccgccucgucgacuccaucggcuccuggucccagaacauccuccgcacccaggaguccgagugcgucugcaucaacggcaccugcaccgucgucaugaccgacggcuccgccuccggccgcgccgacacccgcauccucuucaucgaggagggcaagaucguccacaucuccccccucuccggcuccgcccagcacgucgaggagugcuccugcuacccccgcuaccccaacguccgcugcaucugccgcgacaacuggaagggcuccaaccgccccaucgucgacaucaacaugaaggacuacuccaucgacuccuccuacgucugcuccggccucgucggcgacaccccccgcaacgacgaccgcuccuccaaguccaacugccgcaaccccaacaacgagaagggcaaccacggcgucaagggcugggccuucgacaacggcgacgacgucuggaugggccgcaccaucuccaaggaccuccgcuccggcuacgagaccuucaaggucaucggcggcugguucacccccaacuccaagucccaggucaaccgccaggucaucgucgacuccgacaaccgcuccggcuacuccggcaucuucuccgucgagggcaaguccugcaucaaccgcugcuucuacgucgagcucauccgcggccgcggccaggagacccgcgucugguggaccuccaacuccaucgucgucuucugcggcaccuccggcaccuacggcaagggcuccuggcccgacggcgccaacaucaacuucaugcccaucuga

SEQ ID NO: 122045 - RNA, 1410 nt, Artificial Sequence
  derived and/or modified CDS sequence (opt2) from neuraminidase__InfluenzaA__BAA00621
augaaccccaaccagaagaucaucaccaucggcuccgucucccucaccaucgccaccaucugcuuccucaugcagaucgccauccucgucaccaccgucacccuccacuucaagcaguacgagugcgacucccccgccaacaaccaggucaugcccugcgagcccaucaucaucgagcgcaacaucaccgagaucgucuaccucaccaacaccaccaucgagaaggagaucugccccaagcucgucgaguaccgcaacugguccaagccccagugcaagaucaccggcuucgcccccuucuccaaggacaacuccauccgccucuccgccggcggcgacaucugggucacccgcgagcccuacgucuccugcgaccccggcaagugcuaccaguucgcccucggccagggcaccacccucgacaacaagcacuccaacgacaccauccacgaccgcaccccccaccgcacccuccucaugaacgagcucggcguccccuuccaccucggcacccgccaggucugcaucgccugguccuccuccuccugccacgacggcaaggccuggcuccacgucugcgucaccggcuacgacaagaacgccaccgccuccuucaucuacgacggccgccucgucgacuccaucggcuccuggucccagaacauccuccgcacccaggaguccgagugcgucugcaucaacggcaccugcaccgucgucaugaccgacggcuccgccuccggccgcgccgacaccaagauccucuucaucgaggagggcaagaucguccacaccuccccccucuccggcuccgcccagcacgucgaggagugcuccugcuacccccgcuaccccggcguccgcugcaucugccgcgacaacuggaagggcuccaaccgccccgucgucgacaucaacgucaaggacuacuccaucgacuccuccuacgucugcuccggccucgucggcgacaccccccgcaagaacgaccgcuccuccuccuccuacugccgcaaccccaacaacgagaagggcacccacggcgucaagggcugggccuucgacgacggcaacgacgucuggaugggccgcaccaucuccgaggacucccgcuccggcuacgagaccuucaaggucaucggcggcugguccacccccaacuccaagcuccagaucaaccgccaggucaucgucgacuccaacgaccgcuccggcuacuccggcaucuucuccgucgagggcaaguccugcaucaaccgcugcuucuacgucgagcucauccgcggccgcgagcaggagacccgcgucugguggaccuccaacuccaucgucgucuucugcggcaccuccggcaccuacggcaccggcuccuggcccgacggcgccgacaucaaccucaugcccaucuga

SEQ ID NO: 122046 - RNA, 1413 nt, Artificial Sequence
  derived and/or modified CDS sequence (opt2) from neuraminidase__InfluenzaA__BAA06714
augaaccccaaccagaagaucaucaccaucggcuccaucuccauggccaucggcaucaucucccucauccuccagaucggcaacaucaucuccaucugggucucccacuccauccagaccggcucccagaaccacaccggcaucugcaaccagcgcaucaucaccuacgagaacuccaccugggucaaccagaccuacgucaacaucaacaacaccaacgucgucgccggcaaggacaagaccuccgucacccucgccggcaacuccucccucugccccauccgcggcugggccaucuacaccaaggacaacuccauccgcaucggcuccaagggcgacgucuucgucauccgcgagcccuucaucuccugcucccaccucgagugccgcaccuucuuccucacccagggcgcccuccucaacgacaagcacuccaacggcaccgucaaggaccgcucccccuaccgccgccucauguccugcccccucggcgaggcccccucccccuacaacucccgcuucgaguccaucgccugguccgccuccgccugccacgacggcaugggcuggcucaccaucggcaucuccggccccgacgacggcgccgucgccguccucaaguacaacggcaucaucaccgagaccaucaaguccuggaagaagcgcauccuccgcacccaggaguccgagugcgucugcgucaacggcuccugcuucaccaucaugaccgacggccccuccaacggccaggccuccuaccgcaucuucaagaucgagaagggcaaggucaccaaguccaucgagcucgacgcccccaacucccacuacgaggagugcuccugcuaccccgacaccggcaccgucaugugcgucugccgcgacaacuggcacggcuccaaccgccccugggucuccuucaaccagaaccucgacuaccagaucggcuacaucugcuccggcgucuucggcgacaaccccccccccaaggacggcaagggcuccugcgaccccgucaccgucgacggcgccgacggcgucaagggcuucuccuaccgcuacggcaacggcgucuggaucggccgcaccaaguccaaccgcuuccgcaagggcuucgagaugaucugggaccccaacggcuggaccgacaccgacuccgacuuccucgucaagcaggacgucgucgccaugaccgacugguccggcuacuccggcuccuucguccagcaccccgagcucaccggccucgacugcaugcgccccugcuucugggucgagcucguccgcggccgcccccgcgagaacaccaccaucuggaccuccggcuccuccaucuccuucugcggcgucaacuccgacaccgccaacugguccuggcccgacggcgccgagcuccccuucaccaucgacaaguga

SEQ ID NO: 122047 - RNA, 1413 nt, Artificial Sequence
  derived and/or modified CDS sequence (opt2) from neuraminidase__InfluenzaA__BAA06715
augaaccccaaccagaagaucaucaccaucggcuccaucuccauggccaucggcaucaucucccucauccuccagaucggcaacaucaucuccaucugggccucccacuccauccagaccggcucccagaaccacaccggcaucugcaaccagcgcaucaucaccuacgagaacuccaccugggucaaccagaccuacgucaacaucaacaacaccaacgucgucgccggcaaggacaagaccuccgucacccucgccggcaacuccucccucugccccauccgcggcugggccaucuacaccaaggacaacuccauccgcaucggcuccaagggcgacgucuucgucauccgcgagcccuucaucuccugcucccaccucgagugccgcaccuucuuccucacccagggcgcccuccucaacgacaagcacuccaacggcaccgucaaggaccgcucccccuaccgcgcccucauguccugcccccucggcgaggcccccucccccuacaacucccgcuucgaguccgucgccugguccgccuccgccugccacgacggcaugggcuggcucaccaucggcaucuccggccccgacaacggcgccgucgccguccucaaguacaacggcaucaucaccgagaccaucaaguccuggaagaagcgcauccuccgcacccaggaguccgagugcgucugcgucaacggcuccugcuucaccaucaugaccgacggccccuccaacggcgccgccuccuaccgcaucuucaagaucgagaagggcaaggucaccaaguccaucgagcucgacgcccccaacuaccacuacgaggagugcuccugcuaccccgacaccggcaccgucaugugcgucugccgcgacaacuggcacggcuccaaccgccccuccgucuccuucaaccagaaccucgacuaccagaucggcuacaucugcuccggcgucuucggcgacaacccccgccccaaggacggcgagggcuccugcaaccccgucaccgucgacggcgccgacggcgucaagggcuucuccuaccgcuacggcaacggcgucuggaucggccgcaccaaguccaaccgccuccgcaagggcuucgagaugaucugggaccccaacggcuggaccgacaccgacuccgacuucuccgucaagcaggacgucgucgccaugaccgacugguccggcuacuccggcuccuucguccagcaccccgagcucaccggccucgacugcaugcgccccugcuucugggucgagcucauccgcggccgcccccgcgagaagaccaccaucuggaccuccggcuccuccaucuccuucugcggcgucaacuccgacaccgccaacugguccuggcccgacggcgccgagcuccccuucaccaucgacaaguga

SEQ ID NO: 122048 - RNA, 1410 nt, Artificial Sequence
  derived and/or modified CDS sequence (opt2) from neuraminidase__InfluenzaA__BAA06716
augaacaccaaccagcgcaucaucaccaucggcaccaucugccucaucgucggcaucaucucccuccuccuccagaucggcaacaucauccuccucuggaugucccacuccauccagaccggcgagaagucccaccccaaggucugcaaccaguccgucaucaccuacgagaacaacaccugggucaaccagaccuacgucaacaucuccaacaccaacaucgccgccggccagggcgucacccccaucauccucgccggcaacuccucccucugccccaucuccggcugggccaucuacuccaaggacaacuccauccgcaucggcuccaagggcgacaucuucgucaugcgcgagcccuucaucuccugcucccaccucgagugccgcaccuucuuccucacccagggcgcccuccucaacgaccgccacuccaacggcaccgucaaggaccgcucccccuaccgcacccucauguccugccccaucggcgaggcccccucccccuacaacucccgcuucgaguccgucgccugguccgccuccgccugccacgacggcaugggcuggcucaccaucggcaucuccggccccgacaacggcgccgucgccguccucaaguacaacggcaucaucaccgacaccaucaaguccuggcgcaacaagauccuccgcacccaggaguccgagugcgucugcaucaacggcuccugcuucaccaucaugaccgacggccccuccaacggccaggccuccuacaagcucuucaagauggagaagggcaagaucaucaaguccaucgagcucgacgcccccaacuaccacuacgaggagugcuccugcuaccccgacaccggcaaggucgucugcgucugccgcgacaacuggcacgccuccaaccgccccugggucuccuucgaccagaaccucgacuaccagaucggcuacaucugcuccggcgucuucggcgacaacccccgcuccaacgacggcaagggcaacugcggccccguccucuccaacggcgccaacggcgucaagggcuucuccuuccgcuacggcaacggcgucuggaucggccgcaccaaguccaucuccucccgccgcggcuucgagaugaucugggaccccaacggcuggaccgagaccgacuccuccuucuccaugaagcaggacaucaucgcccucaccgacugguccggcuacuccggcuccuucguccagcaccccgagcucaccggcaugaacugcauccgccccugcuucugggucgagcucauccgcggccagcccaaggaguccaccaucuggaccuccggcuccuccaucuccuucugcggcgucaacuccggcaccgccuccugguccuggcccgacggcgccgaccuccccuucaccaucgacaaguga

SEQ ID NO: 122049 - RNA, 1413 nt, Artificial Sequence
  derived and/or modified CDS sequence (opt2) from neuraminidase__InfluenzaA__BAA06717
augaaccccaaccagaagaucaucaccaucggcuccaucuccauggccaucggcaucaucucccucauccuccagaucggcaacaucaucuccaucugggccucccacuccauccagaccggcucccagaaccacaccggcaucugcaaccagcgcaugaucaccuacgagaacuccaccugggucaaccagaccuacgucaacaucuccaacaccaacgucgucgccggcaaggacaagaccuccgucacccucgccggcaacuccucccucugccccauccgcggcugggccaucuacaccaaggacaacuccauccgcaucggcuccaagggcgacgucuucgucauccgcgagcccuucaucuccugcucccaccucgagugccgcaccuucuuccucacccagggcgcccuccucaacgacaagcacuccaacggcaccgucaaggaccgcucccccuaccgcgcccucauguccugcccccucggcgaggcccccucccccuacaacucccgcuucgaguccgucgccugguccgccuccgccugccacgacggcaugggcuggcucaccaucggcaucuccggccccgacgacggcgccgucgccguccucaaguacaacggcaucaucaccgagaccaucaaguccuggcgcaagcagauccuccgcacccaggaguccgagugcgucugcgucaacggcuccugcuucaccaucaugaccgacggccccuccgacggccccgccuccuaccgcaucuucaagaucgagaagggcaaggucaccaaguccaucgagcucgacgcccccaacuaccacuacgaggagugcuccugcuaccccgacaccggcaccgucaugugcgucugccgcgacaacuggcacggcuccaaccgccccugggucuccuucaaccagaaccucgacuaccagaucggcuacaucugcuccggcgucuucggcgacaacccccgccccaaggacggcgagggcuccugcaaccccgucaccgucgacggcgccgacggcgucaagggcuucuccuaccgcuacggcaacggcgucuggaucggccgcaccaaguccaaccgccuccgcaagggcuucgagaugaucugggaccccaacggcuggaccgacaccgacuccgacuucuccgucaagcaggacgucgucgccaugaccgacugguccggcuacuccggcuccuucguccagcaccccgagcucaccggccucgacugcaugcgccccugcuucugggucgagcucauccgcggccgcccccgcgagaagaccaccaucuggaccuccggcuccuccaucuccuucugcggcgucaacuccgacaccgccaacugguccuggcccgacggcgccgagcuccccuucaccaucgacaaguga

SEQ ID NO: 122050 - RNA, 1413 nt, Artificial Sequence
  derived and/or modified CDS sequence (opt2) from neuraminidase__InfluenzaA__BAA06718
augaaccccaaccagaagaucaucaccaucggcuccaucugcauggccaucggcaucaucucccucauccuccagaucggcaacaucgucuccaucuggaucucccacuccauccagaccggcucccagaacuacaccggcaucugcaaccagcgcaucaucaccuacgagaacuccaccugggucaaccagaccuacgucaacaucaacaacaccaacgucgucgccggccaggacaccaccuccgucgcccucgccggcaacuccucccucugccccaucuccggcugggccaucuacuccaaggacaacuccauccgcaucggcuccaagggcgacgucuucgucauccgcgagcccuucaucuccugcucccaccucgagugccgcaccuucuuccucacccagggcgcccuccucaacgacaagcacuccaacggcaccgucaaggaccgcucccccuaccgccgccucauguccugccccaucggcgaggcccccucccccuacaacucccgcuucgaguccgucgccugguccgccuccgccugccacgacggcaugggcuggcucaccaucggcaucuccggccccgacgacggcgccgucgccguccucaaguacaacggcaucaucaccgagaccaucaaguccuggcgcaagcgcauccuccgcacccaggaguccgagugcgucugcgucaacggcuccugcuucaccaucaugaccgacggccccaacaacggccccgccuccuaccgcaucuucaagaucgagaagggcaagaucaccaaguccaucgagcucgacgcccccaacucccacuacgaggagugcuccugcuaccccgacgccggcaccgucaugugcgucugccgcgacaacuggcacggcuccaaccgccccugggucuccuucaaccagaaccucgacuaccagaucggcuacaucugcuccggcgucuucggcgacaacccccgccccaaggacggcaagggcuccugcgaccccgucaccgucgacggcgccgacggcgucaagggcuucuccuaccgcuacggcaacggcgucuggaucggccgcaccaaguccaacuccucccgccgcggcuucgagaugaucugggaccccaacggcuggaccgacaccgacuccaaguuccucgucaagcaggacgucgucgccaugaccgacugguccggcuacuccggcuccuucguccagcaccccgagcucaccggccucgacugcaugcgccccugcuucugggucgagcucguccgcggccgcccccgcgagaacaccaccaucuggaccuccggcuccuccaucuccuucugcggcgucaacggcgacaccgccaacugguccuggcccgacggcgccgagcuccccuucaccaucgacaaguga

SEQ ID NO: 122051 - RNA, 1413 nt, Artificial Sequence
  derived and/or modified CDS sequence (opt2) from neuraminidase__InfluenzaA__BAA06720
augaaccccaaccagaagaucaucaccaucggcuccaucuccauggccaucggcaucaucucccucauccuccagaucggcaacaucaucuccaucugggucucccacuccauccagaccggcucccagaaccacaccggcaucugcaaccagcgcaucaucaccuacgagaacuccaccugggucaaccagaccuacgucaacaucaacaacaccaacgucgucgccggcaaggacaagaccuccgucacccucgccggcaacuccucccucugccccauccucggcugggccaucuacaccaaggacaacuccauccgcaucggcuccaagggcgacgucuucgucauccgcgagcccuucaucuccugcucccaccucgagugccgcaccuucuuccucacccagggcgcccuccucaacgacaagcacuccaacggcaccgucaaggaccgcucccccuaccgccgccucauguccugcccccucggcgaggcccccucccccuacaacucccgcuucgaguccgucgccugguccgccuccgccugccacgacggcaugggcuggcucaccaucggcaucuccggccccgacgacggcgccgucgccguccucaaguacaacggcaucaucaccgagaccaucaaguccuggaagaagcgcauccuccgcacccaggaguccgagugcgucugcgucaacggcuccugcuucaccaucaugaccgacggccccuccaacggcgccgccuccuaccgcaucuucaagaucgagaagggcaaggucaccaaguccaucgagcucgacgcccccaacucccacuacgaggagugcuccugcuaccccgacaccggcaccgucaugugcgucugccgcgacaacuggcacggcuccaaccgccccugggucuccuucaaccagaaccucgacuaccagaucggcuacaucugcuccggcgucuucggcgacaaccccccccccaaggacggcaagggcuccugcaaccccgucaccgucgacggcgccgacggcgucaagggcuucuccuaccgcuacggcaacggcgucuggaucggccgcaccaaguccaaccgcuuccgcaagggcuucgagaugaucugggaccccaacggcuggaccgacaccgacuccgacuucuccgucaagcaggacgucgucgccaugaccgacugguccggcuacuccggcuccuucguccagcaccccgagcucaccggccucgacugcaugcgccccugcuucugggucgagcucguccgcggccgcccccgcgagaacaccaccaucuggaccuccggcuccuccaucuccuucugcggcgucaacuccgacaccgccaacugguccuggcccgacggcgccgagcuccccuucaccaucgacaaguga

SEQ ID NO: 122052 - RNA, 1410 nt, Artificial Sequence
  derived and/or modified CDS sequence (opt2) from neuraminidase__InfluenzaA__BAD16637
augaaccccaaccagaagaucaucaccaucggcuccgucucccucaccaucgccaccgucugcuuccucaugcagaucgccauccucgccaccaccgucacccuccacuucaagcagcacgagugcgacucccccgccuccaaccaggucaugcccugcgagcccaucaucaucgagcgcaacaucaccgagaucgucuaccucaacaacaccaccaucgagaaggagaucugccccgaggucgucgaguaccgcaacugguccaagccccagugccagaucaccggcuucgcccccuucuccaaggacaacuccauccgccucuccgccggcggcgacaucugggucacccgcgagcccuacgucuccugcgaccccggcaagugcuaccaguucgcccucggccagggcaccacccucgacaacaagcacuccaacggcaccauccacgaccgcaucccccaccgcacccuccucaugaacgagcucggcguccccuuccaccucggcaccaagcaggucugcgucgccugguccuccuccuccugccacgacggcaaggccuggcuccacgucugcgucaccggcgacgaccgcaacgccaccgccuccuucaucuacgacggccgccucgucgacuccaucggcuccuggucccagaacauccuccgcacccaggaguccgagugcgucugcaucaacggcaccugcaccgucgucaugaccgacggcuccgccuccggccgcgccgacacccgcauccucuucaucaaggagggcaagaucguccacaucuccccccucuccggcuccgcccagcacaucgaggagugcuccugcuacccccgcuaccccgacguccgcugcaucugccgcgacaacuggaagggcuccaaccgccccgucaucgacaucaacauggaggacuacuccaucgacuccuccuacgucugcuccggccucgucggcgacaccccccgcaacgacgacuccuccuccaacuccaacugccgcgaccccaacaacgagcgcggcaaccccggcgucaagggcugggccuucgacaacggcgacgacgucuggaugggccgcaccaucuccaaggacucccgcuccggcuacgagaccuucaaggucaucggcggcugguccacccccaacuccaagucccaggucaaccgccaggucaucgucggcaacaacaacugguccggcuacuccggcaucuucuccgucgagggcaaguccugcaucaaccgcugcuucuacgucgagcucauccgcggcaugccccaggagacccgcgucugguggaccuccaacuccaucgucgucuucugcggcaccuccggcaccuacggcaccggcuccuggcccgacggcgccaacaucaacuucaugcccaucuga

SEQ ID NO: 122053 - RNA, 1410 nt, Artificial Sequence
  derived and/or modified CDS sequence (opt2) from neuraminidase__InfluenzaA__BAD16638
augaaccccaaccagaagaucaucaccaucggcuccgucucccucaccaucgccaccgucugcuuccucaugcagaucgccauccucgccaccaccgucacccuccacuucaagcagcacgagugcgacucccccgccuccaaccaggucaugcccugcgagcccaucaucaucgagcgcaacaucaccgagaucgucuaccucaacaacaccaccaucgagaaggagaucugccccgaggucgucgaguaccgcaacugguccaagccccagugccagaucaccggcuucgcccccuucuccaaggacaacuccauccgccucuccgccggcggcgacaucugggucacccgcgagcccuacgucuccugcgaccccggcaagugcuaccaguucgcccucggccagggcaccacccucgacaacaagcacuccaacggcaccauccacgaccgcaucccccaccgcacccuccucaugaacgagcucggcguccccuuccaccucggcaccaagcaggucugcgucgccugguccuccuccuccugccacgacggcaaggccuggcuccacgucugcgucaccggcgacgaccgcaacgccaccgccuccuucaucuacgacggccgccucgucgacuccaucggcuccuggucccagaacauccuccgcacccacgaguccgagugcgucugcaucaacggcaccugcaccgucgucaugaccgacggcuccgccuccggccgcgccgacacccgcauccucuucaucaaggagggcaagaucguccacaucuccccccucuccggcuccgcccagcacaucgaggagugcuccugcuacccccgcuaccccgacguccgcugcaucugccgcgacaacuggaagggcuccaaccgccccgucaucgacaucaacauggaggacuacuccaucgacuccuccuacgucugcuccggccucgucggcgacaccccccgcaacgacgacuccuccuccaacuccaacugccgcgaccccaacaacgagcgcggcaaccccggcgucaagggcugggccuucgacaacggcgacgacgucuggaugggccgcaccaucaacaaggacucccgcuccggcuacgagaccuucaaggucaucggcggcugguccacccccaacuccaagucccaggucaaccgccaggucaucgucgacaacaacaacugguccggcuacuccggcaucuucuccgucgagggcaaguccugcaucaaccgcugcuucuacgucgagcucauccgcggccgcccccaggagacccgcgucugguggaccuccaacuccaucgucgucuucugcggcaccuccggcaccuacggcaccggcuccuggcccgacggcgccaacaucaacuucaugcccaucuga

SEQ ID NO: 122054 - RNA, 1410 nt, Artificial Sequence; identical to SEQ ID NO: 119233
  derived and/or modified CDS sequence (opt2) from neuraminidase__InfluenzaA__BAD16639

SEQ ID NO: 122055 - RNA, 1410 nt, Artificial Sequence
  derived and/or modified CDS sequence (opt2) from neuraminidase__InfluenzaA__BAD16640
augaaccccaaccagaagaucaucaccaucggcuccgucucccucaccaucgccaccgucugcuuccucaugcagaucgccauccucgucaccaccgucacccuccacuucaagcagcacgagugcgacucccccgccuccaaccaggucaugcccugcgagcccaucaucaucgagcgcaacaucaccgagaucgucuaccucaacaacaccaccaucgagaaggagaucugccccgaggucgucgaguaccgcaacugguccaagccccagugccagaucaccggcuucgcccccuucuccaaggacaacuccauccgccucuccgccggcggcgacaucugggucacccgcgagcccuacgucuccugcgaccccggcaagugcuaccaguucgcccucggccagggcaccacccucgacaacaagcacuccaacgacaccauccacgaccgcaucccccaccgcacccuccucaugaacgagcucggcguccccuuccaccucggcacccgccaggucugcgucgccugguccuccuccuccugccacgacggcaaggccuggcuccacgucugcgucaccggcgacgacaagaacgccaccgccuccuucaucuacgacggccgccucauggacuccaucggcuccuggucccagaacauccuccgcacccaggaguccgagugcgucugcaucaacggcaccugcaccgucgucaugaccgacggcuccgccuccggccgcgccgacacccgcauccucuucaucgaggagggcaagaucguccacaucuccccccucuccggcuccgcccagcacgucgaggagugcuccugcuacccccgcuaccccgacguccgcugcaucugccgcgacaacuggaagggcuccaaccgccccgucaucgacaucaacauggaggacuacuccaucgacuccuccuacgucugcuccggccucgucggcgacaccccccgcaacgacgaccgcuccuccaacuccaacugccgcaaccccaacaacgagcgcggcaaccccggcgucaagggcugggccuucgacaacggcgacgacgucuggaugggccgcaccaucuccaaggaccuccgcuccggcuacgagaccuucaaggucaucggcggcugguccacccccaacuccaagucccagaucaaccgccaggucaucgucgacuccaacaacugguccggcuacuccggcaucuucuccgucgagggcaaguccugcaucaaccgcugcuucuacgucgagcucauccgcggccgccagcaggagacccgcgucugguggaccuccaacuccaucgucgucuucugcggcaccuccggcaccuacggcaccggcuccuggcccgacggcgccaacaucaacuucaugcccaucuga

SEQ ID NO: 122056 - RNA, 1410 nt, Artificial Sequence
  derived and/or modified CDS sequence (opt2) from neuraminidase__InfluenzaA__BAD16641
augaaccccaaccagaagaucaucaccaucggcuccgccucccucaccaucgccaccgucugcuuccucaugcagaucgccauccucgucaccaccgucacccuccacuucaagcagcacgagugcgacucccccgccuccaaccaggucaugcccugcgagcccaucaucaucgagcgcaacaccaccgagaucgucuaccucaacaacaccaccaucgagaaggagaucugccccaaggucgucgaguaccgcaacugguccaagccccagugcaagaucaccggcuucgcccccuucuccaaggacaacuccauccgccucuccgccggcggcgacaucugggucacccgcgagcccuacgucuccugcgaccccggcaagugcuaccaguucgcccucggccagggcaccacccucgacaacaagcacuccaacgacaccauccacgaccgcaucccccaccgcacccuccucaugaacgagcucggcguccccuuccaccucggcacccgccaggucugcaucgccugguccuccuccuccugccacgacggcaaggccuggcuccacgucugcgucaccggcgacgacaagaacgccaccgccuccuucaucuacgacggccgccucgucgacuccaucggcuccuggucccagaacauccuccgcacccaggaguccgagugcgucugcaucaacggcaccugcaccgucgucaugaccgacggcuccgccuccggccgcgccgacacccgcauccucuucaucgaggagggcaagaucguccacaucuccccccucuccggcuccgcccagcacgucgaggagugcuccugcuacccccgcuaccccgacguccgcugcaucugccgcgacaacuggaagggcuccaaccgccccgucgucgacaucaacauggaggacuacuccaucgacuccuccuacgucugcuccggccucgucggcgacaccccccgcaacgacgaccgcuccuccaacuccaacugccgcaaccccaacaacgagaagggcaaccagggcgucaagggcugggccuucgacaacggcgacgacgucuggaugggccgcaccaucuccaaggaccuccgcuccggcuacgagaccuucaaggucaucggcggcugguccacccccaacuccaagucccagaucaaccgccaggucaucgucgacuccgacaaccgcuccggcuacuccggcaucuucuccgucgagggcaaguccugcaucaaccgcugcuucuacgucgagcucauccgcggccgcaagcaggagacccgcgucugguggaccuccaacuccaucgucgucuucugcggcaccuccggcaccuacggcaccggcuccuggcccgacggcgccaacaucaaccucaugcccaucuga

SEQ ID NO: 122057 - RNA, 1410 nt, Artificial Sequence
  derived and/or modified CDS sequence (opt2) from neuraminidase__InfluenzaA__BAD16642
augaaccccaaccagaagaucaucaccaucggcuccgucucccucaccaucgccaccgucugcuuccucaugcagaucgccauccucgucaccaccgucacccuccacuucaagcaguacgagugcgacucccccgccuccaaccaggucaugcccugcgagcccaucaucaucgagcgcaacaucaccgagaucgucuaccucaacaacaccaccaucgacaaggagaagugccccaaggucgucgaguaccgcaacugguccaagccccagugccagaucaccggcuucgcccccuucuccaaggacaacuccauccgccucuccgccggcggcgacaucugggucacccgcgagcccuacgucuccugcgaccacggcaagugcuaccaguucgcccucggccagggcaccacccucgacaacaagcacuccaacgacaccauccacgaccgcaucccccaccgcacccuccucaugaacgagcucggcguccccuuccaccucggcacccgccaggucugcaucgccugguccuccuccuccugccacgacggcaaggccuggcuccacgucugcaucaccggcgacgacaagaacgccaccgccuccuucaucuacgacggccgccucgucgacuccaucggcuccuggucccagaacauccuccgcacccaggaguccgagugcgucugcaucaacggcaccugcaccgucgucaugaccgacggcuccgccuccggccgcgccgacacccgcauccucuucaucgaggagggcaagaucguccacaucuccccccucuccggcuccgcccagcacgucgaggagugcuccugcuacccccgcuaccccggcguccgcugcaucugccgcgacaacuggaagggcuccaaccgccccgucgucgacaucaacauggaggacuacuccaucgacuccuccuacgucugcuccggccucgucggcgacaccccccgcaacgacgaccgcuccuccaacuccaacugccgcaaccccaacaacgagcgcggcaaccagggcgucaagggcugggccuucgacaacggcgacgacgucuggaugggccgcaccaucuccaaggaccuccgcuccggcuacgagaccuucaaggucaucggcggcugguccacccccaacuccaagucccagaucaaccgccaggucaucgucgacuccgacaaccgcuccggcuacuccggcaucuucuccgucgagggcaaguccugcaucaaccgcugcuucuacgucgagcucauccgcggccgcaagcaggagacccgcgucugguggaccuccaacuccaucgucgucuucugcggcaccuccggcaccuacggcaccggcuccuggcccgacggcgccaacaucaacuucaugcccaucuga

SEQ ID NO: 122058 - RNA, 1410 nt, Artificial Sequence
  derived and/or modified CDS sequence (opt2) from neuraminidase__InfluenzaA__BAD16643
augaaccccaaccagaagaucaucaccaucggcuccgucucccucaccaucgccaccaucugcuuccucaugcagaucgccauccucgucaccaccgucacccuccacuucaagcaguacgagugcgacucccccgccaacaaccaggucaugcccugcgagcccaucaucaucgagcgcaacaucaccgagaucgucuaccucaccaacaccaccaucgagaaggagaucugccccaagcucgucgaguaccgcaacugguccaagccccagugcaagaucaccggcuucgcccccuucuccaaggacaacuccauccgccucuccgccggcggcgacaucugggucacccgcgagcccuacgucuccugcgaccccggcaagugcuaccaguucgcccucggccagggcaccacccucgacaacaagcacuccaacgacaccauccacgaccgcaccccccaccgcacccuccucaugaacgagcucggcguccccuuccaccucggcacccgccaggucugcaucgccugguccuccuccuccugccacgacggcaaggccuggcuccacgucugcgucaccggcuacgacaagaacgccaccgccuccuucaucuacgacggccgccucgucgacuccaucggcuccuggucccagaacauccuccgcacccaggaguccgagugcgucugcaucaacggcaccugcaccgucgucaugaccgacggcuccgccuccggccgcgccgacaccaagauccucuucaucgaggagggcaagaucguccacaucuccccccucuccggcuccgcccagcacgucgaggagugcuccugcuacccccgcuaccccggcguccgcugcaucugccgcgacaacuggaagggcuccaaccgccccgucgucgacaucaacgucaaggacuacuccaucgacuccuccuacgucugcuccggccucgucggcgacaccccccgcaacaacgaccgcuccuccaacuccuacugccgcaaccccaacaacgagaagggcaaccacggcgucaagggcugggccuucgacgacggcaacgacgucuggaugggccgcaccaucuccgaggacucccgcuccggcuacgagaccuucaaggucaucggcggccucuucacccccaacuccaagcuccagaucaaccgccaggucaucgucgacuccgacaaccgcuccggcuacuccggcaucuucuccgucgagggcaaguccugcaucaaccgcugcuucuacgucgagcucauccgcggccgcgagcaggagacccgcgucugguggaccuccaacuccaucgucgucuucugcggcaccuccggcaccuacggcaccggcuccuggcccgacggcgccgacaucaaccucaugcccaucuga

SEQ ID NO: 122059 - RNA, 1410 nt, Artificial Sequence
  derived and/or modified CDS sequence (opt2) from neuraminidase__InfluenzaA__BAD16644
augaaccccaaccagaagaucaucaccaucggcuccgucucccucaccaucgccaccaucugcuuccucaugcagaucgccauccucgucaccaccgucacccuccacuucaagcaguacgagugcgacuccccccccaacaaccaggucaugcccugcgagcccaucaucaucgagcgcaacaucaccgagaucgucuaccucaccaacaccaccaucgagaaggagaucugccccaagcucgucgaguaccgcaacugguccaagccccagugcaagaucaccggcuucgcccccuucuccaaggacaacuccauccgccucuccgccggcggcgacaucugggucacccgcgagcccuacgucuccugcgaccccggcaagugcuaccaguucgcccucggccagggcaccacccucgacaacaagcacuccaacgacaccauccacgaccgcaccccccaccgcacccuccucaugaacgagcucggcguccccuuccaccucggcacccgccaggucugcaucgccuggucccgcuccuccugccacgacggcaaggccuggcuccacgucugcgucaccggcuacgacaagaacgccaccgccuccuucaucuacgacggccgccucgucgacuccaucggcuccugguccaagaacauccuccgcacccaggaguccgagugcgucugcaucaacggcaccugcaccgucgucaugaccgacggcuccgccuccggccgcgccgacaccaagauccucuucaucgaggagggcaagaucguccacaucuccccccucuccggcuccgcccagcacgucgaggagugcuccugcuacccccgcuaccccggcguccgcugcaucugccgcgacaacuggaagggcuccaaccgccccgucgucgacaucaacgucaaggacuacuccaucgacuccuccuacgucugcuccggccucgucggcgacaccccccgcaacaacgaccgcuccuccaacuccuacugccgcaaccccaacaacgagaagggcaaccacggcgucaagggcugggccuucgacgacggcaacgacgucuggaugggccgcaccaucuccgaggacucccgcuccggcugcgagaccuucaaggucaucggcggcugguccacccccaacuccaagcuccagaucaaccgccaggucaucgucgacuccgacaaccgcuccggcuacuccggcaucuucuccgucgagggcaaguccugcaucaaccgcugcuucuacgucgagcucauccgcggccgcgagcaggagacccgcgucugguggaccuccaacuccaucgucgucuucugcggcaccuccggcaccuacggcaccggcuccuggcccgacggcgccgacaucaaccucaugcccaucuga

SEQ ID NO: 122060 - RNA, 1410 nt, Artificial Sequence; identical to SEQ ID NO: 110612
  derived and/or modified CDS sequence (opt2) from neuraminidase__InfluenzaA__BAD16645

SEQ ID NO: 122061 - RNA, 1410 nt, Artificial Sequence; identical to SEQ ID NO: 118580
  derived and/or modified CDS sequence (opt2) from neuraminidase__InfluenzaA__BAD16646

SEQ ID NO: 122062 - RNA, 1410 nt, Artificial Sequence; identical to SEQ ID NO: 110612
  derived and/or modified CDS sequence (opt2) from neuraminidase__InfluenzaA__BAD16647

SEQ ID NO: 122063 - RNA, 1410 nt, Artificial Sequence
  derived and/or modified CDS sequence (opt2) from neuraminidase__InfluenzaA__BAD16648
augaaccccaaccagaagaucaucaccaucggcuccgucucccucaccaucgccaccaucugcuuccucaugcagaucgccauccucgucaccaccgucacccuccacuucaagcaguacgagugcuccuccccccccaacaaccaggucaugcccugcgagcccaucaucaucgagcgcaacaucaccgagaucgucuaccucaccaacaccaccaucgagaaggagaucugccccaagcucgucgaguaccgcaacugguccaagccccagugcaagaucaccggcuucgcccccuucuccaaggacaacuccauccgccucuccgccggcggcgacaucugggucacccgcgagcccuacgucuccugcgaccccggcaagugcuaccaguucgcccucggccagggcaccacccucgacaacaagcacuccaacgacaccauccacgaccgcacccccuaccgcacccuccucaugaacgagcucggcguccccuuccaccucggcacccgccaggucugcaucgccugguccuccuccuccugccacgacggcaaggccuggcuccacgucugcgucaccggcuacgacaagaacgccaccgccuccuucaucuacgacggccgccucgucgacuccaucggcuccugguccaagaacauccuccgcacccaggaguccgagugcgucugcaucuacggcaccugcaccgucgucaugaccgacggcuccgccuccgagcgcgccgagaccaagauccucuucaucgaggagggcaagaucguccacaucuccccccucuccggcuccgcccagcacgucgaggagugcuccugcuacccccgcuaccccggcguccgcugcgucugccgcgacaacuggaagggcuccaaccgccccgucgucgacaucaacgucaaggacuacuccaucgucuccuccuacgucugcuccggccucgucggcgacaccccccgcaagaacgaccgcuccuccuccuccuacugccgcaaccccaacaacgagaagggcaaccacggcgucaagggcugggccuucgacgacggcaacgacgucuggaugggccgcaccaucuccgaggagucccgcuccggcuacgagaccuucaaggucaucggcggcugguccacccccaacuccaagcuccagaucaaccgccaggucaucgucgacuccgacaaccgcuccggcuacuccggcaucuucuccgucgagggcaaguccugcaucaaccgcugcuucuacgucgagcucauccgcggccgcgagcaggagacccgcgucugguggaccuccaacuccaucgucgucuucugcggcaccuccggcaccuacggcaccggcuccuggcccgacggcgccgacaucaaccucaugcccaucuga

SEQ ID NO: 122064 - RNA, 1410 nt, Artificial Sequence
  derived and/or modified CDS sequence (opt2) from neuraminidase__InfluenzaA__BAE07203
augaaccccaaccagaagaucaccaccaucggcuccaucugcauggucaucggcaucgucucccucaugcuccagaucggcaacaucaucuccaucugggucucccacuccauccagaccggcaaccagcaccaggccgagcccugcaaccaguccaucaucaccuacgagaacaacaccugggucaaccagaccuacgucaacaucuccaacaccaacuuccucaccgagaaggccgucgccuccgucacccucgccggcaacuccucccucugccccaucuccggcugggccgucuacuccaaggacaacggcauccgcaucggcuccaagggcgacgucuucgucauccgcgagcccuucaucuccugcucccaccucgagugccgcaccuucuuccucacccagggcgcccuccucaacgacaagcacuccaacggcaccgucaaggaccgcuccccccaccgcacccucauguccugccccgucggcgaggcccccucccccuacaacucccgcuucgaguccgucgccugguccgccuccgccugccacgacggcaccuccuggcucaccaucggcaucuccggccccgacaacggcgccgucgccguccucaaguacaacggcaucaucaccgacaccaucaaguccuggcgcaacaacaucaugcgcacccaggaguccgagugcgccugcgucaacggcuccugcuucaccgucaugaccgacggccccuccaacggccaggccuccuacaagaucuuccgcaucgagaagggcaaggucgucaaguccgccgagcucaacgcccccaacuaccacuacgaggagugcuccugcuaccccgacgccggcgagaucaccugcgucugccgcgacaacuggcacggcuccaaccgccccugggucuccuucaaccagaaccucgaguaccgcaucggcuacaucugcuccggcgucuucggcgacaacccccgccccaacgacggcaccggcuccugcggccccgucucccccaagggcgccuacggcaucaagggcuucuccuucaaguacggcaacggcgucuggaucggccgcaccaaguccaccaacucccgcuccggcuucgagaugaucugggaccccaacggcuggaccggcaccgacuccaacuucuccgucaagcaggacaucgucgccaucaccgacugguccggcuacuccggcuccuucguccagcaccccgagcucaccggccucgacugcauccgccccugcuucugggucgagcucauccgcggccgccccaaggaguccaccaucuggaccuccggcuccuccaucuccuucugcggcgucaacuccgacaccgucggcugguccuggcccgacggcgccgagcuccccuucaccaucgacaaguga

SEQ ID NO: 122065 - RNA, 1410 nt, Artificial Sequence
  derived and/or modified CDS sequence (opt2) from neuraminidase__InfluenzaA__BAF46322
augaaccccaaccccaagaucaucaccaucggcuccgucucccucaccaucuccaccaucugcuucuucaugcagaucgccauccucaucaccaccgucacccuccacuucaagcaguacgaguucaacuccccccccaacaaccaggucaugcucugcgagcccaccaucaucgagcgcaacaucaccgagaucgucuaccucaccaacaccaccaucgagaaggagaucugccccaagcucgccgaguaccgcaacugguccaagccccagugcgacaucaccggcuucgcccccuucuccaaggacaacuccauccgccucuccgccggcggcgacaucugggucacccgcgagcccuacgucuccugcgaccccgacaagugcuaccaguucgcccucggccagggcaccacccucaacaacguccacuccaacgacaccguccacgaccgcacccccuaccgcacccuccucaugaacgagcucggcguccccuuccaccucggcaccaagcaggucugcaucgccugguccuccuccuccugccacgacggcaaggccuggcuccacgucugcgucaccggcgacgacaagaacgccaccgccuccuucaucuacaacggccgccucgucgacuccaucgucuccugguccaagaagauccuccgcacccaggaguccgagugcgucugcaucaacggcaccugcaccgucgucaugaccgacggcuccgccuccggcaaggccgacaccaagauccucuucaucgaggagggcaagaucguccacaccuccacccucuccggcuccgcccagcacgucgaggagugcuccugcuacccccgcuaccccggcguccgcugcgucugccgcgacaacuggaagggcuccaaccgccccaucgucgacaucaacaucaaggacuacuccaucgucuccuccuacgucugcuccggccucgucggcgacaccccccgcaagaacgacuccuccuccuccucccacugccucgaccccaacaacgaggagggcggccacggcgucaagggcugggccuucgacgacggcaacgacgucuggaugggccgcaccaucuccgagaagcuccgcuccggcuacgagaccuucaaggucaucgagggcugguccaaccccaacuccaagcuccagaucaaccgccaggucaucgucgaccgcggcaaccgcuccggcuacuccggcaucuucuccgucgagggcaaguccugcaucaaccgcugcuucuacgucgagcucauccgcggccgcaaggaggagaccgagguccucuggaccuccaacuccaucgucgucuucugcggcaccuccggcaccuacggcaccggcuccuggcccgacggcgccgacaucaaccucaugcccaucuga

SEQ ID NO: 122066 - RNA, 1410 nt, Artificial Sequence; identical to SEQ ID NO: 110750
  derived and/or modified CDS sequence (opt2) from neuraminidase__InfluenzaA__BAF46323

SEQ ID NO: 122067 - RNA, 1410 nt, Artificial Sequence
  derived and/or modified CDS sequence (opt2) from neuraminidase__InfluenzaA__BAF46324
augaaccccaaccagaagaucaucaccaucggcuccgucucccucaccaucuccaccaucugcuucuucaugcagaucgccauccucaucaccaccgucacccuccacuucaagcaguacgaguucaacuccccccccaacaaccaggucaugcucugcgagcccaccaucaucgagcgcaacaucaccgagaucgucuaccucaccaacaccaccaucgagaaggagaucugccccaagcucgccgaguaccgcaacugguccaagccccagugcgacaucaccggcuucgcccccuucuccaaggacaacuccauccgccucuccgccggcggcgacaucugggucacccgcgagcccuacgucuccugcgaccccgacaagugcuaccaguucgcccucggccagggcaccacccucaacaacguccacuccaacgacaucguccacgaccgcacccccuaccgcacccuccucaugaacgagcucggcguccccuuccaccucggcaccaagcaggucugcaucgccugguccuccuccuccugccacgacggcaaggccuggcuccacgucugggucaccggcgacgacaagaacgccaccgccuccuucaucuacaacggccgccucgucgacuccaucgucuccugguccaagaagauccuccgcacccaggaguccgagugcgucugcaucaacggcaccugcaccgucgucaugaccgacggcuccgccuccggcaaggccgacaccaagauccucuucaucgaggagggcaagaucguccacaccuccacccucuccggcuccgcccagcacgucgaggagugcuccugcuacccccgcuaccccggcguccgcugcgucugccgcgacaacuggaagggcuccaaccgccccaucgucgacaucaacaucaaggacuacuccaucgucuccuccuacgucugcuccggccucgucggcgacaccccccgcaagaacgacuccuccuccuccucccacugccucgaccccaacaacgaggagggcggccacggcgucaagggcugggccuucgacgacggcaacgacgucuggaugggccgcaccaucuccgagaagcuccgcuccggcuacgagaccuucaaggucaucgagggcugguccaaccccaacuccaagcuccagaucaaccgccaggucaucgucgaccgcggcaaccgcuccggcuacuccggcaucuucuccgucgagggcaaguccugcaucaaccgcugcuucuacgucgagcucauccgcggccgcaaggaggagaccgagguccucuggaccuccaacuccaucgucgucuucugcggcaccuccggcaccuacggcaccggcuccuggcccgacggcgccgacaucaaccucaugcccaucuga

SEQ ID NO: 122068 - RNA, 1410 nt, Artificial Sequence
  derived and/or modified CDS sequence (opt2) from neuraminidase__InfluenzaA__BAF46332
augaaccccaaccagaagaucaucaccaucggcuccgucucccucaccaucuccaccaucugcuucuucaugcagaucgccauccucaucaccaccgucacccuccacuucaagcaguacgaguucaacuccccccccaacaaccaggucaugcucugcgagcccaccaucaucgagcgcaacaucaccgagaucgucuaccucaccaacaccaccaucgagaaggagaucugccccaagcucgccgaguaccgcaagugguccaagccccagugcaacaucaccggcuucgcccccuucuccaaggacaacuccauccgccucuccgccggcggcgacaucugggucacccgcgagcccuacgucuccugcgaccccgacaagugcuaccaguucgcccucggccagggcaccacccucaacaacguccacuccaacgacaccguccgcgaccgcacccccuaccgcacccuccucaugaacgagcucggcguccccuuccaccucggcaccaagcaggucugcaucgccugguccuccuccuccugccacgacggcaaggccuggcuccacgucugcgucaccggcgacgacaagaacgccaccgccuccuucaucuacaacggccgccucgucgacuccaucgucuccugguccaaggagauccuccgcacccaggaguccgagugcgucugcaucaacggcaccugcaccgucgucaugaccgacggcuccgccuccggcaaggccgacaccaagauccucuucaucgaggagggcaagaucguccacaccuccacccucuccggcuccgcccaccacgucgaggagugcuccugcuacccccgcuaccccggcguccgcugcgucugccgcgacaacuggaagggcuccaaccgccccaucgucgacaucaacaucaaggacuacuccaucgucuccuccuacgucugcuccggccucgucggcgacaccccccgcaagaacgacuccuccuccuccucccacugccucgaccccaacaacgaggagggcggccacggcgucaagggcugggccuucgacgacggcaacgacgucuggaugggccgcaccaucuccgagaagcuccgcuccggcuacgagaccuucaaggucaucgagggcugguccaaccccaacuccaagcuccagaucaaccgccaggucaucgucgaccgcggcaaccgcuccggcuacuccggcaucuucuccgucgagggcaaguccugcaucaaccgcugcuucuacgucgagcucauccgcggccgcaaggaggagaccgagguccucuggaccuccaacuccaucgucgucuucugcggcaccuccggcaccuacggcaccggcuccuggcccgacggcgccgacaucaaccucaugcccaucuga

SEQ ID NO: 122069 - RNA, 1410 nt, Artificial Sequence
  derived and/or modified CDS sequence (opt2) from neuraminidase__InfluenzaA__BAF46334
augaaccccaaccagaagaucaucaccaucggcuccgucucccucaccaucuccaccaucugcuucuucaugcagaucgccauccucaucaccaccgucacccuccacuucaagcaguacgaguucaacuccccccccaacaaccaggucaugcucugcgagcccaccaucaucgagcgcaacaucaccgagaucgucuaccucaccaacaccaccaucgagaaggagaucugccccaagcucgccgaguaccgcaagugguccaagccccagugcaacaucaccggcuucgcccccuucuccaaggacaacuccauccgccucuccgccggcggcgacaucugggucacccgcgagcccuacgucuccugcgaccccgacaagugcuaccaguucgcccucggccagggcaccacccucaacaacguccacuccaacgacaccguccgcgaccgcacccccuaccgcacccuccucaugaacgagcucggcguccccuuccaccucggcaccaagcaggucugcaucgccugguccuccuccuccugccacgacggcaaggccuggcuccacgucugcgucaccggcgacgacaagaacgccaccgccuccuucaucuacaacggccgccucgucgacuccaucgucuccugguccaaggagauccuccgcacccaggaguccgagugcgucugcaucaacggcaccugcaccgucgucaugaccgacggcuccgccuccggcaaggccgacaccaagauccucuucaucgaggagggcaagaucguccacaccuccacccucuccggcuccgcccagcacgucgaggagugcuccugcuacccccgcuaccccggcguccgcugcgucugccgcgacaacuggaagggcuccaaccgccccaucgucgacaucaacaucaaggacuacuccaucgucuccuccuacgucugcuccggccucgucggcgacaccccccgcaagaacgacuccuccuccuccucccacugccucgaccccaacaacgaggagggcggccacggcgucaagggcugggccuucgacgacggcaacgacgucuggaugggccgcaccaucuccgagaagcuccgcuccggcuacgagaccuucaaggucaucgagggcugguccaaccccaacuccaagcuccagaucaaccgccaggucaucgucgaccgcggcaaccgcuccggcuacuccggcaucuucuccgucgagggcaaguccugcaucaaccgcugcuucuacgucgagcucauccgcggccgcaaggaggagaccgagguccucuggaccuccaacuccaucgucgucuucugcggcaccuccggcaccuacggcaccggcuccuggcccgacggcgccgacaucaaccucaugcccaucuga

SEQ ID NO: 122070 - RNA, 1410 nt, Artificial Sequence; identical to SEQ ID NO: 122069
  derived and/or modified CDS sequence (opt2) from neuraminidase__InfluenzaA__BAF46335

SEQ ID NO: 122071 - RNA, 1410 nt, Artificial Sequence
  derived and/or modified CDS sequence (opt2) from neuraminidase__InfluenzaA__BAF46337
augaaccccaaccagaagaucaucaccaucggcuccgucucccucaccaucuccaccaucugcuucuucaugcagaucgccauccucaucaccaccgucacccuccacuucaagcaguacgaguucaacuccccccccaacaaccaggucaugcucugcgagcccaccaucaucgagcgcaacaucaccgagaucgucuaccucaccaacaccaccaucgagaaggagaucugccccaagcucgccgaguaccgcaagugguccaagccccagugcaacaucaccggcuucgcccccuucuccaaggacaacuccauccgccucuccgccggcggcgacaucugggucacccgcgagcccuacgucuccugcgaccccgacaagugcuaccaguucgcccucggccagggcaccacccucaacaacguccacuccaacgacaccguccgcguccgcacccccuaccgcacccuccucaugaacgagcucggcguccccuuccaccucggcaccaagcaggucugcaucgccugguccuccuccuccugccacgacggcaaggccuggcuccacgucugcgucaccggcgacgacaagaacgccaccgccuccuucaucuacaacggccgccucgucgacuccaucgucuccugguccaaggagauccuccgcacccaggaguccgagugcgucugcaucaacggcaccugcaccgucgucaugaccgacggcuccgccuccggcaaggccgacaccaagauccucuucaucgaggagggcaagaucguccacaccuccacccucuccggcuccgcccagcacgucgaggagugcuccugcuacccccgcuaccccggcguccgcugcgucugccgcgacaacuggaagggcuccaaccgccccaucgucgacaucaacaucaaggacuacuccaucgucuccuccuacgucugcuccggccucgucggcgacaccccccgcaagaacgacuccuccuccuccucccacugccucgaccccaacaacgaggagggcggccacggcgucaagggcugggccuucgacgacggcaacgacgucuggauggcccgcaccaucuccgagaagcuccgcuccggcuacgagaccuucaaggucaucgagggcugguccaaccccaacuccaagcuccagaucaaccgccaggucaucgucgaccgcggcaaccgcuccggcuacuccggcaucuucuccgucgagggcaaguccugcaucaaccgcugcuucuacgucgagcucauccgcggccgcaaggaggagaccgagguccucuggaccuccaacuccaucgucgucuucugcggcaccuccggcaccuacggcaccggcuccuggcccgacggcgccgacaucaaccucaugcccaucuga

SEQ ID NO: 122072 - RNA, 1410 nt, Artificial Sequence; identical to SEQ ID NO: 122069
  derived and/or modified CDS sequence (opt2) from neuraminidase__InfluenzaA__BAF46345

SEQ ID NO: 122073 - RNA, 1410 nt, Artificial Sequence
  derived and/or modified CDS sequence (opt2) from neuraminidase__InfluenzaA__BAF46346
augaaccccaaccagaagaucaucaccaucggcuccgucucccucaccaucuccaccaucugcuucuucaugcagaucgccauccucaucaccaccgucacccuccacuucaagcaguacgaguucaacuccccccccaacaaccaggucaugcucugcgagcccaccaucaucgagcgcaacaucaccgagaucgucuaccucaccaacaccaccaucgagaaggagaucugccccaagcucgccgaguaccgcaagugguccaagccccagugcaacaucgccggcuucgcccccuucuccaaggacaacuccauccgccucuccgccggcggcgacaucugggucacccgcgagcccuacgucuccugcgaccccgacaagugcuaccaguucgcccucggccagggcaccacccucaacaacguccacuccaacgacaccguccgcgaccgcacccccuaccgcacccuccucaugaacgagcucggcguccccuuccaccucggcaccaagcaggucugcaucgccugguccuccuccuccugccacgacggcaaggccuggcuccacgucugcgucaccggcgacgacaagaacgccaccgccuccuucaucuacaacggccgccucgucgacuccaucgucuccugguccaaggagauccuccgcacccaggaguccgagugcgucugcaucaacggcaccugcaccgucgucaugaccgacggcuccgccuccggcaaggccgacaccaagauccucuucaucgaggagggcaagaucguccacaccuccacccucuccggcuccgcccagcacgucgaggagugcuccugcuacccccgcuaccccggcgucaucugcgucugccgcgacaacuggaagggcuccaaccgccccaucgucgacaucaacaucaaggacuacuccaucgucuccuccuacgucugcuccggccucgucggcgacaccccccgcaagaacgacuccuccuccuccucccacugccucgaccccaacaacgaggagggcggccacggcgucaagggcugggccuucgacgacggcaacgacgucuggaugggccgcaccaucuccgagaagcuccgcuccggcuacgagaccuucaaggucaucgagggcugguccaaccccaacuccaagcuccagaucaaccgccaggucaucgucgaccgcggcaaccgcuccggcuacuccggcaucuucuccgucgagggcaaguccugcaucaaccgcugcuucuacgucgagcucauccgcggccgcaaggaggagaccgagguccucuggaccuccaacuccaucgucgucuucugcggcaccuccggcaccuacggcaccggcuccuggcccgacggcgccgacaucaaccucaugcccaucuga

SEQ ID NO: 122074 - RNA, 1410 nt, Artificial Sequence
  derived and/or modified CDS sequence (opt2) from neuraminidase__InfluenzaA__BAF46347
augaaccccaaccagaagaucaucaccaucggcuccgucucccucaccaucuccaccaucugcuucuucaugcagaucgccauccucaucaccaccgucacccuccacuucaagcaguacgaguucaacuccccccccaacaaccaggucaugcucugcgagcccaccaucaucgagcgcaacaucaccgagaucgucuaccucaccaacaccaccaucgagaaggagaucugccccaagcucgccgaguaccgcaagugguccaagccccagugcaacaucaccggcuucgcccccuucuccaaggacaacuccauccgccucuccgccggcggcgacaucugggucacccgcgagcccuacgucuccugcgaccccgacaagugcuaccaguucgcccucggccagggcaccacccucaacaacguccacuccaacgacaccguccgcgaccgcacccccuaccgcacccuccucaugaacgagcucggcguccccuuccaccucggcaccaagcaggucugcaucgccugguccuccuccuccugccacgacggcaaggccuggcuccacgucugcgucaccggcgacgacaagaacgccaccgccaccuucaucuacaacggccgccucgucgacuccaucgucuccugguccaaggagauccuccgcacccaggaguccgagugcgucugcaucaacggcaccugcaccgucgucaugaccgacggcuccgccuccggcaaggccgacaccaagauccucuucaucgaggagggcaagaucguccacaccuccacccucuccggcuccgcccagcacgucgaggagugcuccugcuacccccgcuaccccggcguccgcugcgucugccgcgacaacuggaagggcuccaaccgccccaucgucgacaucaacaucaaggacuacuccaucgucuccuccuacgucugcuccggccucgucggcgacaccccccgcaagaacgacuccuccuccuccucccacugccucgaccccaacaacgaggagggcggccacggcgucaagggcugggccuucgacgacggcaacgacgucuggaugggccgcaccaucuccgagaagcuccgcuccggcuacgagaccuucaaggucaucgagggcugguccaaccccaacuccaagcuccagaucaaccgccaggucaucgucgaccgcggcaaccgcuccggcuacuccggcaucuucuccgucgagggcaaguccugcaucaaccgcugcuucuacgucgagcucauccgcggccgcaaggaggagaccgagguccucuggaccuccaacuccaucgucgucuucugcggcaccuccggcaccuacggcaccggcuccuggcccgacggcgccgacaucaaccucaugcccaucuga

SEQ ID NO: 122075 - RNA, 1410 nt, Artificial Sequence
  derived and/or modified CDS sequence (opt2) from neuraminidase__InfluenzaA__BAF46349
augaaccccaaccagaagaucaucaccaucggcuccgucucccucaccaucuccaccaucugcuucuucaugcagaucgccauccucaucaccaccgucacccuccacuucaagcaguacgaguucaacuccccccccaacaaccaggucaugcucugcgagcccaccaucaucgagcgcaacaucaccgagaucgucuaccucaccaacaccaccaucgagaaggagaucugccccaagcucgccgaguaccgcaagugguccaagccccagugcaacaucaccggcuucgcccccuucuccaaggacaacuccauccgccucuccgccggcggcgacaucugggucacccgcgagcccuacgucuccugcgaccccgacaagugcuaccaguucgcccucggccagggcaccacccucaacaacguccacuccaacgacaccguccgcgcccgcacccccuaccgcacccuccucaugaacgagcucggcguccccuuccaccucggcaccaagcaggucugcaucgccugguccuccuccuccugccacgacggcaaggccuggcuccacgucugcgucaccggcgacgacaagaacgccaccgccuccuucaucuacaacggccgccucgucgacuccaucgucuccugguccaaggagauccuccgcacccaggaguccgagugcgucugcaucaacggcaccugcaccgucgucaugaccgacggcuccgccuccggcaaggccgacaccaagauccucuucaucgaggagggcaagaucguccacaccuccacccucuccggcuccgcccagcacgucgaggagugcuccugcuacccccgcuaccccggcguccgcugcgucugccgcgacaacuggaagggcuccaaccgccccaucgucgacaucaacaucaaggacuacuccaucgucuccuccuacgucugcuccggccucgucggcgacaccccccgcaagaacgacuccuccuccuccucccacugccucgaccccaacaacgaggagggcggccacggcgucaagggcugggccuucgacgacggcaacgacgucuggaugggccgcaccaucuccgagaagcuccgcuccggcuacgagaccuucaaggucuucgagggcugguccaaccccaacuccaagcuccagaucaaccgccaggucaucgucgaccgcggcaaccgcuccggcuacuccggcaucuucuccgucgagggcaaguccugcaucaaccgcugcuucuacgucgagcucauccgcggccgcaaggaggagaccgagguccucuggaccuccaacuccaucgucgucuucugcggcaccuccggcaccuacggcaccggcuccuggcccgacggcgccgacaucaaccucaugcccaucuga

SEQ ID NO: 122076 - RNA, 1410 nt, Artificial Sequence; identical to SEQ ID NO: 122069
  derived and/or modified CDS sequence (opt2) from neuraminidase__InfluenzaA__BAF46350

SEQ ID NO: 122077 - RNA, 1410 nt, Artificial Sequence
  derived and/or modified CDS sequence (opt2) from neuraminidase__InfluenzaA__BAF46351
augaaccccauccagaagaucaucaccaucggcuccgucucccucaccaucuccaccaucugcuucuucaugcagaucgccauccucaucaccaccgucacccuccacuucaagcaguacgaguucaacuccccccccaacaaccaggucaugcucugcgagcccaccaucaucgagcgcaacaucaccgagaucgucuaccucaccaacaccaccaucgagaaggagaucugccccaagcucgccgaguaccgcaagugguccaagccccagugcaacaucaccggcuucgcccccuucuccaaggacaacuccauccgccucuccgccggcggcgacaucugggucacccgcgagcccuacgucuccugcgaccccgacaagugcuaccaguucgcccucggccagggcaccacccucaacaacguccacuccaacgacaccguccgcgaccgcacccccuaccgcacccuccucaugaacgagcucggcguccccuuccaccucggcaccaagcaggucugcaucgccugguccuccuccuccugccacgacggcaaggccuggcuccacgucugcgucaccggcgacgacaagaacgccaccgccuccuucaucuacaacggccgccucgucgacuccaucgucuccugguccaaggagauccuccgcacccaggaguccgagugcgucugcaucaacggcaccugcaccgucgucaugaccgacggcuccgccuccggcaaggccgacaccaagauccucuucaucgaggagggcaagaucguccacaccuccacccucuccggcuccgcccagcacgucgaggagugcuccugcuacccccgcuaccccggcguccgcugcgucugccgcgacaacuggaagggcuccaaccgccccauggucgacaucaacaucaaggacuacuccaucgucuccuccuacgucugcuccggccucgucggcgacaccccccgcaagaacgacuccuccuccuccucccacugccucgaccccaacaacgaggagggcggccacggcgucaagggcugggccuucgacgacggcaacgacgucuggaugggccgcaccaucuccgagaagcuccgcuccggcuacgagaccuucaaggucaucgagggcugguccaaccccaacuccaagcuccagaucaaccgccaggucaucgucgaccgcggcaaccgcuccggcuacuccggcaucuucuccgucgagggcaaguccugcaucaaccgcugcuucuacgucgagcucauccgcggccgcaaggaggagaccgagguccucuggaccuccaacuccaucgucgucuucugcggcaccuccggcaccuacggcaccggcuccuggcccgacggcgccgacaucaaccucaugcccaucuga

SEQ ID NO: 122078 - RNA, 1410 nt, Artificial Sequence
  derived and/or modified CDS sequence (opt2) from neuraminidase__InfluenzaA__BAF46368
augaaccccaaccagaagaucaucaccaucggcuccgucucccucaccaucuccaccaucugcuucuucaugcagaucgccauccucaucaccaccgucacccuccacuucaagcaguacgaguucaacuccccccccaacaaccaggucaugcucugcgagcccaccaucaucgagcgcaacaucaccgagaucgucuaccucaccaacaccaccaucgagaaggagaucugccccaagcucgccgaguaccgcaacugguccaagccccagugcaacaucaccggcuucgcccccuucuccaaggacaacuccauccgccucuccgccggcggcgacaucugggucacccgcgagcccuacgucuccugcgaccccgacaagugcuaccaguucgcccucggccagggcaccacccucaacaacguccacuccaacgacaccguccgcgagcgcacccccuaccgcacccuccucaugaacgagcucggcguccccuuccaccucggcaccaagcaggucugcaucgccugguccuccuccuccugccacgacggcaaggccuggcuccacgucugcgucaccggcgacgacaagaacgccaccgccuccuucaucuacaacggccgccucgucgacuccaucgucuccugguccaaggagauccuccgcacccaggaguccgagugcgucugcaucaacggcaccugcaccgucgucaugaccgacggcuccgccuccggcaaggccgacaccaagauccucuucaucgaggagggcaagaucguccacaccuccacccucuccggcuccgcccagcacgucgaggagugcuccugcuacccccgcuaccccggcguccgcugcgucugccgcgacaacuggaagggcuccaaccgccccaucgucgacaucaacaucaaggacuacuccaucgucuccuccuacgucugcuccggccucgucggcgacaccccccgcaagaacgacuccuccuccuccucccacugccucgaccccaacaacgaggagggcggccacggcgucaagggcugggccuucgacgacggcaacgacgucuggaugggccgcaccaucuccgagaagcuccgcuccggcuacgagaccuucaaggucaucgagggcugguccaaccccaacuccaagcuccagaucaaccgccaggucaucgucgaccgcggcaaccgcuccggcuacuccggcaucuucuccgucgagggcaaguccugcaucaaccgcugcuucuacgucgagcucauccgcggccgcaaggaggagaccgagguccucuggaccuccaacuccaucgucgucuucugcggcaccuccggcaccuacggcaccggcuccuggcccgacggcgccgacaucaaccucaugcccaucuga

SEQ ID NO: 122079 - RNA, 1410 nt, Artificial Sequence
  derived and/or modified CDS sequence (opt2) from neuraminidase__InfluenzaA__BAF46369
augaaccccaaccagaagaucaucaccaucggcuccgucucccucaccaucuccaccaucugcuucuucaugcagaucgccauccucaucaccaccgucacccuccacuucaagcaguacgaguucaacuccccccccaacaaccaggucaugcucugcgagcccaccaucaucgagcgcaacaucaccgagaucgucuaccucaccaacaccaccaucgagaaggagaucugccccaagcucgccgaguaccgcaacugguccaagccccagugcaacaucaccggcuucgcccccuucuccaaggacaacuccauccgccucuccgccggcggcgacaucugggucacccgcgagcccuacgucuccugcgaccccgacaagugcuaccaguucgcccucggccagggcaccacccucaacaacguccacuccaacgacaccguccacgaccgcacccccuaccgcacccuccucaugaacgagcucggcguccccuuccaccucggcaccaagcaggucugcaucgccugguccuccuccuccugccacgacggcaaggccuggcuccacgucugcgucaccggcgacgacaagaacgccaccgccuccuucaucuacaacggcaagcucgucgacuccaucgucuccugguccaaggagauccuccgcacccaggaguccgagugcgucugcaucaacggcaccugcaccgucgucaugaccgacggcuccgccuccggcaaggccgacaccaagauccucuucaucgaggagggcaagaucguccacaccuccacccucuccggcuccgcccagcacgucgaggagugcuccugcuacccccgcuaccccggcguccgcugcgucugccgcgacaacuggaagggcuccaaccgccccaucgucgacaucaacaucaaggacuacuccaucgucuccuccuacgucugcuccggccucgucggcgacaccccccgcaagaacgacuccuccuccuccucccacugccucgaccccaacaacgaggagggcggccacggcgucaagggcugggccuucgacgacggcaacgacgucuggaugggccgcaccaucuccgagaagucccgcuccggcuacgagaccuuccaggucaucgagggcugguccaacuccaacuccaagcuccagaucaaccgccaggucaucgucgaccgcggcaaccgcuccggcuacuccggcaucuucuccgucgagggcaaguccugcaucaaccgcugcuucuacgucgagcucauccgcggccgcaaggaggagaccgagguccucuggaccuccaacuccaucgucgucuucugcggcaccuccggcaccuacggcaccggcuccuggcccgacggcgccgacaucaaccucaugcccaucuga

SEQ ID NO: 122080 - RNA, 1410 nt, Artificial Sequence
  derived and/or modified CDS sequence (opt2) from neuraminidase__InfluenzaA__BAF46370
augaaccccaaccagaagaucaucaccaucggcuccgucucccucaccaucuccaccaucugcuucuucaugcagaucgccauccucaucaccaccgucacccuccacuucaagcaguacgaguucaacucccuccccaacaaccaggucaugcucugcgagcccaccaucaucgagcgcaacaucaccgagaucgucuaccucaccaacaccaccaucgagaaggagaucugccccaagcucgccgaguaccgcaacugguccaagccccagugcaacaucaccggcuucgcccccuucuccaaggacaacuccauccgccucuccgccggcggcgacaucugggucacccgcgagcccuacgucuccugcgaccccgacaagugcuaccaguucgcccucggccagggcaccacccucaacaacguccacuccaacgacaccguccacgaccgcacccccuaccgcacccuccucaugaacgagcucggcguccccuuccaccucggcaccaagcaggucugcaucgccugguccuccuccuccugccacgacggcaaggccuggcuccacgucugcgucaccggcgacgacaagaacgccaccgccuccuucaucuacaacggccgccucgucgacuccaucgucuccugguccaaggagauccuccgcacccaggaguccgagugcgucugcaucaacggcaccugcaccgucgucaugaccgacggcuccgccuccggcaaggccgacaccaagauccucuucaucgaggagggcaagaucguccacaccuccacccucuccggcuccgcccagcacgucgaggagugcuccugcuacccccgcuaccccggcguccgcugcgucugccgcgacaacuggaagggcuccaaccgccccaucgucgacaucaacaucaaggacuacuccaucgucuccuccuacgucugcuccggccucgucggcgacaccccccgcaagaacgacuccuccuccuccucccacugccucgaccccaacaacgaggagggcggccacggcgucaagggcugggccuucgacgacggcaacgacgucuggaugggccgcaccaucuccgagaagcuccgcuccggcuacgagaccuucaaggucaucgagggcugguccaaccccaacuccaagcuccagaucaaccgccaggucaucgucgaccgcggcaaccgcuccggcuacuccggcaucuucuccgucgagggcaaguccugcaucaaccgcugcuucuacgucgagcucauccgcggccgcaaggaggagaccgagguccucuggaccuccaccuccaucgucgucuucugcggcuccuccggcaccuacggcaccggcuccuggcccgacggcgccgacaucaaccucaugcccaucuga

SEQ ID NO: 122081 - RNA, 1410 nt, Artificial Sequence
  derived and/or modified CDS sequence (opt2) from neuraminidase__InfluenzaA__BAF46371
augaaccccaaccagaagaucaucaccaucggcuccgucucccucaccaucuccaccaucugcuucuucaugcagaucgccauccucaucaccaccgucacccuccacuucaagcaguacgaguucaacuccccccccaacaaccaggucaugcucugcgagcccaccaucaucgagcgcaacaucaccgagaucguccaccucaccaacaccaccaucgagaaggagaucugccccaagcucgccgaguaccgcaacugguccaagccccagugcaacaucaccggcuucgcccccuucuccaaggacaacuccauccgccucuccgccggcggcgacaucugggucacccgcgagcccuacgucuccugcgaccccgacaagugcuaccaguucgcccucggccagggcaccacccucaacaacguccacuccaacgacaccguccacgaccgcacccccuaccgcacccuccucaugaacgagcucggcguccccuuccaccucggcaccaagcaggucugcaucgccugguccuccuccuccugccacgacggcaaggccuggcuccacgucugcgucaccggcgacgacaagaacgccaccgccuccuucaucuacaacggccgccucgucgacuccaucgucuccugguccaaggagauccuccgcacccaggaguccgagugcgucugcaucaacggcaccugcaccgucgucaugaccgacggcuccgccuccggcaaggccgacaccaagauccucuucaucgaggagggcaagaucguccacaccuccacccucuccggcuccgcccagcacgucgaggagugcuccugcuacccccgcuaccccggcguccgcugcgucugccgcgacaacuggaagggcuccaaccgccccaucgucgacaucaacaucaaggacuacuccaucgucuccuccuacgucugcuccggccucgucggcgacaccccccgcaagaacgacuccuccuccuccucccacugccucgaccccaacaacgaggagggcggccacggcgucaagggcugggccuucgacgacggcaacgacgucuggaugggccgcaccaucuccgagaagcuccgcuccggcuacgagaccuucaaggucaucgagggcugguccaaccccaacuccaagcuccagaccaaccgccaggucaucgucgaccgcuccaaccgcuccggcuacuccggcaucuucuccgucgagggcaaguccugcaucaaccgcugcuucuacgucgagcucauccgcggccgcaaggaggagaccgagguccucuggaccuccaacuccaucgucgucuucugcggcaccuccggcaccuacggcaccggcuccuggcccgacggcgccgacaucaaccucaugcccaucuga

SEQ ID NO: 122082 - RNA, 1410 nt, Artificial Sequence
  derived and/or modified CDS sequence (opt2) from neuraminidase__InfluenzaA__BAF46372
augaaccccaaccagaagaucaucaccaucggcuccgucucccucaccaucuccaccaucugcuucuucaugcagaucgccauccucaucaccaccgucacccuccacuucaagcaguacgaguucaacuccccccccaacaaccaggucaugcucugcgagcccaccaucaucgagcgcaacaucaccgagaucgucuaccucaccaacaccaccaucgagaaggagaucugccccaagcucgccgaguaccgcaacugguccaagccccagugcgacaucgccggcuucgcccccuucuccaaggacaacuccauccgccucuccgccggcggcgacaucugggucacccgcgagcccuacgucuccugcgaccccgacaagugcuaccaguucgcccucggccagggcaccacccucaacaacguccacuccaacgacaccguccacgaccgcacccccuaccgcacccuccucaugaacgagcucggcguccccuuccaccucggcaccaagcaggucugcaucgccugguccuccuccuccugccacgacggcaaggccuggcuccacgucugcgucaccggcgacgacaagaacgccaccgccuccuucaucuacaacggccgccucgucgacuccaucgucuccugguccaagaagauccuccgcacccaggaguccgagugcgucugcaucaacggcaccugcaccgucgucaugaccgacggcuccgccuccggcaaggccgacaccaagauccucuucaucgaggagggcaagaucguccacaccuccacccucuccggcuccgcccagcacgucgaggagugcuccugcuacccccgcuaccccggcguccgcugcgucugccgcgacaacuggaagggcuccaaccgccccaucgucgacaucaacaucaaggacuacuccaucgucuccuccuacgucugcuccggccucgucggcgacaccccccgcaagaacgacuccuccuccuccucccacugccucgaccccaacaacgaggagggcggccacggcgucaagggcugggccuucgacgacggcaacgacgucuggaugggccgcaccaucuccgagaagcuccgcuccggcuacgagaccuucaaggucaucgagggcugguccaaccccaacuccaagcuccagaucaaccgccaggucaucgucgaccgcggcaaccgcuccggcuacuccggcaucuucuccgucgagggcaaguccugcaucaaccgcugcuucuacgucgagcucauccgcggccgcaaggaggagaccgagguccucuggaccuccaacuccaucgucgucuucugcggcaccuccggcaccuacggcaccggcuccuggcccgacggcgccgacaucaaccucaugcccaucuga

SEQ ID NO: 122083 - RNA, 1410 nt, Artificial Sequence
  derived and/or modified CDS sequence (opt2) from neuraminidase__InfluenzaA__BAF46385
augaaccccaaccagaagaucaucaccaucggcuccgucucccucaccaucuccaccaucugcuucuucaugcagaucgccauccucaucaccaccgucacccuccacuucaagcaguacgaguucaacuccccccccaacaaccaggucaugcucugcgagcccaccaucaucgagcgcaacaucaccgagaucgucuaccucaccaacaccaccaucgagaaggagaucugccccaagcucgccgaguaccgcaacugguccaagccccagugcaacaucaccggcuucgcccccuucuccaaggacaacuccauccgccucuccgccggcggcgacaucugggucacccgcgagcccuacgucuccugcgaccccgacaagugcuaccaguucgcccucggccagggcaccacccucaacaacguccacuccaacgacaccguccacgaccgcacccccuaccgcacccuccucaugaacgagcucggcguccccuuccaccucggcaccaagcaggucugcaucgccugguccuccuccuccugccccgacggcaaggccuggcuccacgucugcgucaccggcgacgacaagaacgccaccgccuccuucaucuacaacggccgccucgucgacuccaucgucuccugguccaaggagauccuccgcacccaggaguccgagugcgucugcaucaacggcaccugcaccgucgucaugaccgacggcuccgccuccggcaaggccgacaccaagauccucuucaucgaggagggcaagaucguccacaccuccacccucuccggcuccgcccagcacgucgaggagugcuccugcuacccccgcuaccccggcgcccgcugcgucugccgcgacaacuggaagggcuccaaccgccccaucgucgacaucaacaucaaggacuacuccaucgucuccuccuacgucugcuccggccucgucggcgacaccccccgcaagaacgacuccuccuccuccucccacugccucgaccccaacaacgaggagggcggccacggcgucaagggcugggccuucgacgacggcaacgacgucuggaugggccgcaccaucuccgagaagcuccgcuccggcuacgagaccuucaaggucaucgagggcugguccaaccccaacuccaagcuccagaccaaccgccaggucaucgucgaccgcggcaaccgcuccggcuacuccggcaucuucuccgucgagggcaaguccugcaucaaccgcugcuucuacgucgagcucauccgcggccgcaaggaggagaccgagguccucuggaccuccaacuccaucgucgucuucugcggcaccuccuccaccuacggcaccggcuccuggcccgacggcgccgacaucaaccucaugcccaucuga

SEQ ID NO: 122084 - RNA, 1410 nt, Artificial Sequence
  derived and/or modified CDS sequence (opt2) from neuraminidase__InfluenzaA__BAF46386
augaaccccaaccagaagaucaucaccaucggcuccgucucccucaccaucuccaccaucugcuucuucaugcagaucgccauccucaucaccaccgucacccuccacuucaagcaguacgaguucaacuccccccccaacaaccaggucaugcucugcgagcccaccaucaucgagcgcaacaucaccgagaucgucuaccucaccaacaccaccaucgagaaggagaucugccccaagcucgccgaguaccgcaacugguccaagccccagugcaacaucaccggcuucgcccccuucuccaaggacaacuccauccgccucuccgccggcggcgacaucugggucacccgcgagcccuacgucuccugcgaccccgacaagugcuaccaguucgcccucggccagggcaccacccucaacaacguccacuccaacgacaccguccacgaccgcacccccuaccgcacccuccucaugaacgagcucggcguccccuuccaccucggcaccaagcaggucugcaucgccugguccuccuccuccugccacgacggcaaggccuggcuccacgucugcgucaccggcgacgacaagaacgccaccgccuccuucaucuacaacggccgccucgucgacuccaucgucuccugguccaaggagauccuccgcacccaggaguccgagugcgucugcaucaacggcaccugcaccgucgucaugaccgacggcuccgccuccggcaaggccgacaccaagauccucuucaucgaggagggcaagaucguccacaccuccacccucuccggcuccgcccagcacgucgaggagugcuccugcuacccccgcuaccccggcguccgcugcgucugccgcgacaacuggaagggcuccaaccgccccaucgucgacaucaacaucaaggacuacuccaucgucuccuccuacgucugcuccggccucgucggcgacaccccccgcaagaacgacuccuccuccuccucccacugccucgaccccaacaacgaggagggcggccacggcgucaagggcugggccuucgacgacggcaacgacgucuggaugggccgcaccaucuccgagaagcuccgcuccggcuacgagaccuucaaggucaucgagggcugguccaaccccaacuccaagcuccagaccaaccgccaggucaucgucgaccgcggcaaccgcuccggcuacuccggcaucuucuccgucgagggcaaguccugcaucaaccgcugcuucuacgucgagcucauccgcggccgcaaggaggagaccgagguccucuggaccuccaacuccaucgucgucuucugcggcaccuccuccaccuacggcaccggcuccuggcccgacggcgccgacaucaaccucaugcccaucuga

SEQ ID NO: 122085 - RNA, 1410 nt, Artificial Sequence; identical to SEQ ID NO: 112600
  derived and/or modified CDS sequence (opt2) from neuraminidase__InfluenzaA__BAF46387

SEQ ID NO: 122086 - RNA, 1410 nt, Artificial Sequence
  derived and/or modified CDS sequence (opt2) from neuraminidase__InfluenzaA__BAF46388
augaaccccaaccagaagaucaucaccaucggcuccgucucccucaccaucuccaccaucugcuucuucaugcagaucgccauccucaucaccaccgucacccuccacuucaagcaguacgaguucaacuccccccccaacaaccaggucaugcucugcgagcccaccaucaucgagcgcaacaucaccgagaucgucuaccucaccaacaccaccaucgagaaggagaucugccccaagcucgccgaguaccgcaacugguccaagccccagugcaacaucaccggcuucgcccccuucuccaaggacaacuccauccgccucuccgccggcggcgacaucugggucacccgcgagcccuacgucuccugcgaccccgacaagugcuaccaguucgcccucggccagggcaccacccucaacaacguccacuccaacgacaccguccacgaccgcacccccuaccgcacccuccucaugaacgagcucggcguccccuuccaccucggcaccaagcaggucugcaucgccugguccuccuccuccugccacgacggcaaggccuggcuccacgucugcgucaccggcgacgacaagaacgccaccgccuccuucaucuacaacggccgccucgucgacuccaucgucuccugguccaaggagauccuccgcacccaggaguccgagugcgucugcaucaacggcaccugcaccgucgucaugaccgacggcuccgccuccggcaaggccgacaccaagauccucuucaucgaggagggcaagaucguccacaccuccacccucuccggcuccgcccagcacgucgaggagugcuccugcuacccccgcuaccccggcguccgcugcgucugccgcgacaacuggaagggcuccaaccgccccaucgucgacaucaacaucaaggacuacuccaucgucuccuccuacgucugcuccggccucgucggcgacaccccccgcaagaacgacuccuccuccuccucccacugccucgaccccaacaacgaggagggcggccacggcgucaagggcugggccuucgacgacggcaacgacgucuggaugggccgcaccaucuccgagaagcuccgcuccggcuacgagaccuucaaggucaucgagggcugguccaaccccaacuccaagcuccagaucaaccgccaggacaucgucgaccgcggcaaccgcuccggcuacuccggcaucuucuccgucgagggcaaguccugcaucaaccgcugcuucuacgucgagcucauccgcggccgcaaggaggagaacgagguccucuggaccuccaacuccaucgucgucuucugcggcaccuccggcaccuacggcaccggcuccuggcccgacggcgccgacaucaaccucaugcccaucuga

SEQ ID NO: 122087 - RNA, 1410 nt, Artificial Sequence
  derived and/or modified CDS sequence (opt2) from neuraminidase__InfluenzaA__BAF47922
augaaccccaaccagaagaucaucaccaucggcuccgucucccucaccaucuccaccaucugcuucuucaugcagaucgccauccucaucaccaccgucacccuccacuucaagcaguacgaguucaacuccccccccaacauccaggucaugcucugcgagcccaccaucaucgagcgcaacaucaccgagaucgucuaccucaccaacaccaccaucgagaaggagaucugccccaagcucgccgaguaccgcaacugguccaagccccagugcgacaucaccggcuucgcccccuucuccaaggacaacuccauccgccucuccgccggcggcgacaucugggucacccgcgagcccuacgucuccugcgaccccgacaagugcuaccaguucgcccucggccagggcaccacccucaacaacguccacuccaacgacaccguccacgaccgcacccccuaccgcacccuccucaugaacgagcucggcguccccuuccaccucggcaccaagcaggucugcaucgccugguccuccuccuccugccacgacggcaaggccuggcuccacgucugcgucaccggcgacgacaagaacgccaccgccuccuucaucuacaacggccgccucgucgacuccaucgucuccugguccaaggagauccuccgcacccaggaguccgagugcgucugcaucaacggcaccugcaccgucgucaugaccgacggcuccgccuccggcaaggccgacaccaagauccucuucaucgaggagggcaagaucguccacaccuccacccucuccggcuccgcccagcacgucgaggagugcuccugcuacccccgcuaccccggcguccgcugcgucugccgcgacaacuggaagggcuccaaccgccccaucgucgacaucaacaucaaggacuacuccaucgccuccuccuacgucugcuccggccucgucggcgacaccccccgcaagaacgacuccuccuccuccucccacugccucgaccccaacaacgaggagggcggccacggcgucaagggcugggccuucgacgacggcaacgacgucuggaugggccgcaccaucuccgagaagcuccgcuccggcuacgagaccuucaaggucaucgagggcugguccaaccccaacuccaagcuccagaucaaccgccaggucaucgucgaccgcggcaaccgcuccggcuacuccggcaucuucuccgucgagggcaaguccugcaucaaccgcugcuucuacgucgagcucauccgcggccgcaaggaggagaccgagguccucuggaccuccaacuccaucgucgucuucugcggcaccuccggcaccuacggcaccggcuccuggcccgacggcgccgacaucaaccucaugcccaucuga

SEQ ID NO: 122088 - RNA, 1410 nt, Artificial Sequence; identical to SEQ ID NO: 110730
  derived and/or modified CDS sequence (opt2) from neuraminidase__InfluenzaA__BAF47923

SEQ ID NO: 122089 - RNA, 1410 nt, Artificial Sequence
  derived and/or modified CDS sequence (opt2) from neuraminidase__InfluenzaA__BAF47924
augaaccccaaccagaagaucaucaccaucggcuccgucucccucaccaucuccaccaucugcuucuucaugcagaucgccauccucaucaccaccgucacccuccacuucaagcaguacgaguucaacuccccccccaacaaccaggucaugcucugcgagcccaccaucaucgagcgcaacaucaccgagaucgucuaccucaccaacaccaccaucgagaaggagaucugccccaagcucgccgaguaccgcaacugguccaagccccagugcaacaucaccggcuucgcccccuucuccaaggacaacuccauccgccucuccgccggcggcgacaucugggucacccgcgagcccuacgucuccugcgaccccgacaagugcuaccaguucgcccucggccagggcaccacccucaacaacguccacuccaacgacaccguccacgaccgcacccccuaccgcacccuccucaugaacgagcucggcguccccuuccaccucggcaccaagcaggucugcaucgccugguccuccuccuccugccacgacggcaaggccuggcuccacgucugcgucaccggcgacgacaagaacgccaccgccuccuucaucuacaacggccgccucgucgacuccaucgucuccugguccaaggagauccuccgcacccaggaguccgagugcgucugcaucaacggcaccugcaccgucgucaugaccgacggcuccgccuccggcaaggccgacaccaagauccucuucaucgaggagggcaagaucguccacaccuccacccucuccggcuccgcccagcacgucgaggagugcuccugcuacccccgcuaccccggcguccgcugcgucugccgcgacaacuggaagggcuccaaccgccccaucgucgacaucaacaucaaggacuacuccaucgucuccuccuacgucugcuccggccucgucggcgacaccccccgcaagaacgacuccuccuccuccucccacugccucgaccccaacuccgaggagggcggccacggcgucaagggcugggccuucgacgacggcaacgacgucuggaugggccgcaccaucuccgagaagcuccgcuccggcuacgagaccuucaaggucaucgagggcugguccaaccccaacuccaagcuccagaccaaccgccaggucaucgucgaccgcggcaaccgcuccggcuacuccggcaucuucuccgucgagggcaaguccugcaucaaccgcugcuucuacgucgagcucauccgcggccgcaaggaggagaccgagguccucuggaccuccaacuccaucgucgucuucugcggcaccuccggcaccuacggcaccggcuccuggcccgacggcgccgacaucaaccucaugcccaucuga

SEQ ID NO: 122090 - RNA, 1410 nt, Artificial Sequence; identical to SEQ ID NO: 110748
  derived and/or modified CDS sequence (opt2) from neuraminidase__InfluenzaA__BAF47925

SEQ ID NO: 122091 - RNA, 1410 nt, Artificial Sequence; identical to SEQ ID NO: 110748
  derived and/or modified CDS sequence (opt2) from neuraminidase__InfluenzaA__BAF47926

SEQ ID NO: 122092 - RNA, 1410 nt, Artificial Sequence; identical to SEQ ID NO: 116735
  derived and/or modified CDS sequence (opt2) from neuraminidase__InfluenzaA__BAF47927

SEQ ID NO: 122093 - RNA, 1410 nt, Artificial Sequence; identical to SEQ ID NO: 112600
  derived and/or modified CDS sequence (opt2) from neuraminidase__InfluenzaA__BAF47928

SEQ ID NO: 122094 - RNA, 1410 nt, Artificial Sequence
  derived and/or modified CDS sequence (opt2) from neuraminidase__InfluenzaA__BAF47929
augaaccccaaccagaagaucaucaccaucggcuccgucucccucaccaucuccaccaucugcuucuucaugcagaucgccauccucaucaccaccgucacccuccacuucaagcaguacgaguucaacuccccccccaacaaccaggucaugcucugcgagcccaccaucaucgagcgcaacaucaccgagaucgucuaccucaccaacaccaccaccgagaaggagaucugccccaagcucgccgaguaccgcaacugguccaagccccagugcaacaucaccggcuucgcccccuucuccaaggacaacuccauccgccucuccgccggcggcgacaucugggucacccgcgagcccuacgucuccugcgaccccgacaagugcuaccaguucgcccucggccagggcaccacccucaacaacguccacuccgacgacaccguccacgaccgcacccccuaccgcacccuccucaugaacgagcucggcguccccuuccaccucggcaccaagcaggucugcaucgccugguccuccuccuccugccacgacggcaaggccuggcuccacgucugcgucaccggcgacgacaagaacgccaccgccuccuucaucuacaacggccgccucgucgacuccaucgucuccugguccaaggagauccuccgcacccaggaguccgagugcgucugcaucaacggcaccugcaccgucgucaugaccgacggcuccgccuccggcaaggccgacaccaagauccucuucaucgaggagggcaagaucguccacaccuccacccucuccggcuccgcccagcacgucgaggagugcuccugcuacccccgcuaccccggcguccgcugcgucugccgcgacaacuggaagggcuccaaccgccccaucgucgacaucaacaucaaggacuacuccaucgucuccuccuacgucugcuccggccucgucggcgacaccccccgcaagaacgacuccuccuccuccucccacugccucgaccccaacaacgaggagggcggccacggcgucaagggcugggccuucgacgacggcaacgacgucuggaugggccgcaccaucuccgagaagcuccgcuccggcuacgagaccuucaaggucaucgagggcugguccaaccccaacuccaagcuccagaucaaccgccaggucaucgucgaccgcggcaaccgcuccggcuacuccggcaucuucuccgucgagggcaaguccugcaucaaccgcugcuucuacgucgagcucauccgcggccgcaaggaggagaacgagguccucuggaccuccaacuccaucgucgucuucugcggcaccuccggcaccuacggcaccggcuccuggcccgacggcgccgacaucaaccucaugcccaucuga

SEQ ID NO: 122095 - RNA, 1410 nt, Artificial Sequence
  derived and/or modified CDS sequence (opt2) from neuraminidase__InfluenzaA__BAF47930
augaaccccaaccagaagaucaucaccaucggcuccgucucccucaccaucuccaccaucugcuucuucaugcagaucgccauccucaucaccaccgucacccuccacuucaagcaguacgaguucaacuccccccccaacaaccaggucaugcucugcgagcccaccaucaucgagcgcaacaucaccgagaucgucuaccucaccaacaccaccaucgagaaggagaucugccccaagcucgccgaguaccgcaacugguccaagccccagugcaacaucaccggcuucgcccccuucuccaaggacaacuccauccgccucuccgccggcggcgacaucugggucacccgcgagcccuacgucuccugcgaccccgacaagugcuaccaguucgcccucggccagggcaccacccucaacaacguccacuccaacgacaccguccacggccgcacccccuaccgcacccuccucaugaacgagcucggcguccccuuccaccucggcaccaagcaggucugcaucgccugguccuccuccuccugccacgacggcaaggccuggcuccacgucugcgucaccggcgacgacaagaacgccaccgccuccuucaucuacaacggccgccucgucgacuccaucgucuccugguccaaggagauccuccgcacccaggaguccgagugcgucugcaucaacggcaccugcaccgucgucaugaccgacggcuccgccuccggcaaggccgacaccaagauccucuucaucgaggagggcaagaucguccacaccuccacccucuccggcuccgcccagcacgucgaggagugcuccugcuacccccgcuaccccggcguccgcugcgucugccgcgacaacuggaagggcuccaaccgccccaucgucgacaucaacaucaaggacuacuccaccgucuccuccuacgucugcuccggccucgucggcgacaccccccgcaagaacgacuccuccuccuccggccacugccucgaccccaacaacgaggagggcggccacggcgucaagggcugggccuucgacgacggcaacgacgucuggaugggccgcaccaucuccgagaagcuccgcuccggcuacgagaccuucaaggucaucgagggcugguccaaccccaacuccaagcuccagaucaaccgccaggucaucgucgaccgcggcaaccgcuccggcuacuccggcaucuucuccgucgagggcaaguccugcaucaaccgcugcuucuacgucgagcucauccgcggccgcaaggaggagaccgagguccucuggaccuccaacuccaucgucgucuucugcggcaccuccggcaccuacggcaccggcuccuggcccgacggcgccgacaucaaccucaugcccaucuga

SEQ ID NO: 122096 - RNA, 1410 nt, Artificial Sequence; identical to SEQ ID NO: 116735
  derived and/or modified CDS sequence (opt2) from neuraminidase__InfluenzaA__BAF47931

SEQ ID NO: 122097 - RNA, 1410 nt, Artificial Sequence
  derived and/or modified CDS sequence (opt2) from neuraminidase__InfluenzaA__BAF47932
augaaccccaaccagaagaucaucaccaucggcuccgucucccucaccaucuccaccaucugcuucuucaugcagaucgccauccucaucaccaccgucacccuccacuucaagcaguacgaguucaacuccccccccaacaaccaggucaugcucugcgagcccaccaucaucgagcgcaacaucaccgagaucgucuaccucaccaacaccaccaucgagaaggagaucugccccaagcucgccgaguaccgcaacugguccaagccccagugcaacaucaccggcuucgcccccuucuccaaggacaacuccauccgccucuccgccggcggcgacaucugggucacccgcgagcccuacgucuccugcgaccccgacaagugcuaccaguucgcccucggccagggcaccacccucaacaacguccacuccaacgacaccguccacgaccgcacccccuaccgcacccuccucaugaacgagcucggcguccccuuccaccucggcaccaagcaggucugcaucgccugguccuccuccuccugccacgacggcaaggccuggcuccacgucugcgucaccggcgacgacaagaacgccaccgccuccuucaucuacaacggccgccucgucgacuccaucgucuccugguccaaggagauccuccgcacccaggaguccgagugcgucugcaucaacggcaccugcaccgucgucaugaccgacggcuccgccuccggcaaggccgacaccaagauccucuucaucgaggagggcaagaucguccacaccuccacccucuccggcuccgcccagcacgucgaggagugcuccugcuacccccgcuaccccggcguccgcugcgucugccgcgacaacuggaagggcuccaaccgccccaucgucgacaucaacaucaaggacuacuccaucgucuccuccuacgucugcuccggccucgucggcgacaccccccgcaagaacgacuccuccuccuccggccacugccucgaccccaacaacgaggagggcggccacggcgucaagggcugggccuucgacgacggcaacgacgucuggaugggccgcaccaucuccgagaagcuccgcuccggcuacgagaccuucaaggucaucgagggcugguccaaccccaacuccaagcuccagaucaaccgccaggucaucgucgaccgcggcaaccgcuccggcuacuccggcaucuucuccgucgagggcaaguccugcaucaaccgcugcuucuacgucgagcucauccgcggccgcaaggaggagaccgagguccucuggaccuccaacuccaucgucgucuucugcggcaccuccggcaccuacggcaccggcuccuggcccgacggcgccgacaucaaccucaugcccaucuga

SEQ ID NO: 122098 - RNA, 1410 nt, Artificial Sequence; identical to SEQ ID NO: 110748
  derived and/or modified CDS sequence (opt2) from neuraminidase__InfluenzaA__BAF47933

SEQ ID NO: 122099 - RNA, 1410 nt, Artificial Sequence; identical to SEQ ID NO: 110750
  derived and/or modified CDS sequence (opt2) from neuraminidase__InfluenzaA__BAF47934

SEQ ID NO: 122100 - RNA, 1410 nt, Artificial Sequence; identical to SEQ ID NO: 110750
  derived and/or modified CDS sequence (opt2) from neuraminidase__InfluenzaA__BAF47935

SEQ ID NO: 122101 - RNA, 1410 nt, Artificial Sequence
  derived and/or modified CDS sequence (opt2) from neuraminidase__InfluenzaA__BAF47936
augaaccccaaccagaagaucaucaccaucggcuccgucucccucaccaucuccaccaucugcuucuucaugcagaucgccauccucaucaccaccgucacccuccacuucaagcaguacgaguucaacuccccccccaacaaccaggucaugcucugcgagcccaccaucaucgagcgcaacaucaccgagaucgucuaccucaccaacaccaccaucgagaaggagaucugccccaagcucgccgaguaccgcaacugguccaagccccagugcaacaucaccggcuucgcccccuucuccaaggacaacuccauccgccucuccgccggcggcgacaucugggucacccgcgagcccuacgucuccugcgaccccgacaagugcuaccaguucgcccucggccagggcaccacccucaacaacguccacuccaacgacaccguccacgaccgcacccccuaccgcacccuccucaugaacgagcucggcguccccuuccaccucggcaccaagcaggucugcaucgccugguccuccuccuccugccacgacggcaaggccuggcuccacgucugcaucaccggcgacgacaagaacgccaccgccuccuucaucuacaacggccgccucgucgacuccaucgucuccugguccaaggagauccuccgcacccaggaguccgagugcgucugcaucaacggcaccugcaccgucgucaugaccgacggcuccgccuccggcaaggccgacaccaagauccucuucaucgaggagggcaagaucguccacaccuccacccucuccggcuccgcccagcacgucgaggagugcuccugcuacccccgcuaccccggcguccgcugcgucugccgcgacaacuggaagggcuccaaccgccccaucgucgacaucaacaucaaggacuacuccaucgucuccuccuacgucugcuccggccucgucggcgacaccccccgcaagaacgacuccuccuccuccggccacugccucgaccccaacaacgaggagggcggccacggcgucaagggcugggccuucgacgacggcaacgacgucuggaugggccgcaccaucuccgagaagcuccgcuccggcuacgagaccuucaaggucaucgagggcugguccaaccccaacuccaagcuccagaucaaccgccaggucaucgucgaccgcggcaaccgcuccggcuacuccggcaucuucuccgucgagggcaaguccugcaucaaccgcugcuucuacgucgagcucauccgcggccgcaaggaggagaccgagguccucuggaccuccaacuccaucgucgucuucugcggcaccuccggcaccuacggcaccggcuccuggcccgacggcgccgacaucaaccucaugcccaucuga

SEQ ID NO: 122102 - RNA, 1410 nt, Artificial Sequence
  derived and/or modified CDS sequence (opt2) from neuraminidase__InfluenzaA__BAF47937
augaaccccaaccagaagaucaucaccaucggcuccgucucccucaccaucuccaccaucugcuucuucaugcagaucgccauccucaucaccaccgucacccuccacuucaagcaguacgaguucaacuccccccccaacaaccaggucaugcucugcgagcccaccaucaucgagcgcaacaucaccgagaucgucuaccucaccaacaccaccaucgagaaggagaucugccccaagcucgccgaguaccgcaacugguccaagccccagugcaacaucaccggcuucgcccccuucuccaaggacaacuccauccgccucuccgccggcggcgacaucugggucacccgcgagcccuacgucuccugcggccccgacaagugcuaccaguucgcccucggccagggcaccacccucaacaacguccacuccaacgacaccguccacgaccgcacccccuaccgcacccuccucaugaacgagcucggcguccccuuccaccucggcaccaagcaggucugcaucgccugguccuccuccuccugccacgacggcaaggccuggcuccacgucugcgucaccggcgacgacaagaacgccaccgccuccuucaucuacaacggccgccucgucgacuccaucgucuccugguccaaggagauccuccgcacccaggaguccgagugcgucugcaucaacggcaccugcaccgucgucaugaccgacggcuccgccuccggcaaggccgacaccaagauccucuucaucgaggagggcaagaucguccacaccuccacccucuccggcuccgcccagcacgucgaggagugcuccugcuacccccgcuaccccggcguccgcugcgucugccgcgacaacuggaagggcuccaaccgccccaucgucgacaucaacaucaaggacuacuccaucgucuccuccuacgucugcuccggccucgucggcgacaccccccgcaagaacgacuccuccuccuccucccacugccucgaccccaacaacgaggagggcggccacggcgucaagggcugggccuucgacgacggcaacgacgucuggaugggccgcaccaucuccgagaagcuccgcuccggcuacgagaccuucaaggucaucgagggcugguccaaccccaacuccaagcuccagaucaaccgccaggucaucgucgaccgcggcaaccgcuccggcuacuccggcaucuucuccgucgagggcaaguccugcaucaaccgcugcuucuacgucgagcucauccgcggccgcaaggaggagaccgagguccucuggaccuccaacuccaucgucgucuucugcggcaccuccggcaccuacggcaccggcuccuggcccgacggcgccgacaucaaccucaugcccaucuga

SEQ ID NO: 122103 - RNA, 1410 nt, Artificial Sequence
  derived and/or modified CDS sequence (opt2) from neuraminidase__InfluenzaA__BAF47938
augaaccccaaccagaagaucaucaccaucggcuccgucucccucaccaucuccaccaucugcuucuucaugcagaucgccauccucaucaccaccgucacccuccacuucaagcaguacgaguucaacucccuccccaacaaccaggucaugcucugcgagcccaccaucaucgagcgcaacaucaccgagaucgucuaccucaccaacaccaccaucgagaaggagaucugccccaagcucgccgaguaccgcaacugguccaagccccagugcaacaucaccggcuucgcccccuucuccaaggacaacuccauccgccucuccgccggcggcgacaucugggucacccgcgagcccuacgucuccugcgaccccgacaagugcuaccaguucgcccucggccagggcaccacccucaacaacguccacuccaacgacaccguccacggccgcacccccuaccgcacccuccucaugaacgagcucggcguccccuuccaccucggcaccaagcaggucugcaucgccugguccuccuccuccugccacgacggcaaggccuggcuccacgucugcgucaccggcgacgacaagaacgccaccgccuccuucaucuacaacggccgccucgucgacuccaucgucuccugguccaaggagauccuccgcacccaggaguccgagugcgucugcaucaacggcaccugcaccgucgucaugaccgacggcuccgccuccggcaaggccgacaccaagauccucuucaucgaggagggcaagaucguccacaccuccacccucuccggcuccgcccagcacgucgaggagugcuccugcuacccccgcuaccccggcguccgcugcgucugccgcgacaacuggaagggcuccaaccgccccaucgucgacaucaacaucaaggacuacuccaucgucuccuccuacgucugcuccggccucgucggcgacaccccccgcaagaccgacuccuccuccuccucccacugccucgaccccaacaacgaggagggcggccacggcgucaagggcugggccuucgacgacggcaacgacgucuggaugggccgcaccaucuccgagaagcuccgcuccggcuacgagaccuucaaggucaucgagggcugguccaaccccaacuccaagcuccagaucaaccgccaggucaucgucgaccgcggcaaccgcuccggcuacuccggcaucuucuccgucgagggcaaguccugcaucaaccgcugcuucuacgucgagcucauccgcggccgcaaggaggagaccgagguccucuggaccuccaacuccaucgucgucuucugcggcaccuccggcaccuacggcaccggcuccuggcccgacggcgccgacaucaaccucaugcccaucuga

SEQ ID NO: 122104 - RNA, 1410 nt, Artificial Sequence; identical to SEQ ID NO: 110750
  derived and/or modified CDS sequence (opt2) from neuraminidase__InfluenzaA__BAF47939

SEQ ID NO: 122105 - RNA, 1410 nt, Artificial Sequence
  derived and/or modified CDS sequence (opt2) from neuraminidase__InfluenzaA__BAF47940
augaaccccaaccagaagaucaucaccaucggcuccgucucccucaccaucuccaccaucugcuucuucaugcagaucgccauccucaucaccaccgucacccuccacuucaagcaguacgaguucaacuccccccccaacaaccaggucaugcucugcgagcccaccaucaucgagcgcaacaucaccgagaucgucuaccucaccaacaccaccaucgagaaggagaucugccccaagcucgccgaguaccgcaacugguccaagccccagugcgacaucaccggcuucgcccccuucuccaaggacaacuccauccgccucuccgccggcggcgacaucugggucacccgcgagcccuacgucuccugcgaccccgacaagugcuaccaguucgcccucggccagggcaccacccucaacaacguccacuccaacgacaccguccacgaccgcacccccuaccgcacccuccucaugaacgagcucggcguccccuuccaccucggcaccaagcaggucugcaucgccugguccuccuccuccugccacgacggcaaggccuggcuccacgucugcgucaccggcgacgacaagaacgccaccgccuccuucaucuacaacggccgccucgucgacuccaucgucuccugguccaagaagauccuccgcacccaggaguccgagugcgucugcaucaacggcaccugcaccgucgucaugaccgacggcuccgccuccggcaaggccgacaccaagauccucuucaucgaggagggcaagaucguccacaccuccacccucuccggcuccgcccagcacgucgaggagugcuccugcuacccccgcuaccccggcguccgcugcgucugccgcgacaacuggaagggcuccaaccgccccaucgucgacaucaacaucaaggacuacuccaucgucuccuccuacgucugcuccggccucgucggcgacaccccccgcaagaacgacuccuccuccuccucccacugccucgaccccaacaacgaggagggcggccacggcgucaagggcugggccuucgacgacggcaacgacgucuggaugggccgcaccaucuccgagaagcuccgcuccggcuacgagaccuucaaggucaucgagggcugguccaaccccaacuccaagcuccagaucaaccgccaggucaucgucgaccgcggcaaccgcuccggcuacuccggcaucuucuccgucgagggcaaguccugcaucaaccgcugcuucuacgucgagcucauccgcggccgcaaggagaagaccgagguccucuggaccuccaacuccaucgucgucuucugcggcaccuccggcaccuacggcaccggcuccuggcccgacggcgccgacaucaaccucaugcccaucuga

SEQ ID NO: 122106 - RNA, 1410 nt, Artificial Sequence; identical to SEQ ID NO: 110748
  derived and/or modified CDS sequence (opt2) from neuraminidase__InfluenzaA__BAF47941

SEQ ID NO: 122107 - RNA, 1410 nt, Artificial Sequence
  derived and/or modified CDS sequence (opt2) from neuraminidase__InfluenzaA__BAF47943
augaaccccaaccagaagaucaucaccaucggcuccgucucccucaccaucuccaccaucugcuucuucaugcagaucgccauccucaucaccaccgucacccuccacuucaagcaguacgaguucaacuccccccccaacaaccaggucaugcucugcgagcccaccaucaucgagcgcaacaucaccgagaucgucuaccucaccaacaccaccaucgagaaggagaucugccccaagcucgccgaguaccgcaacugguccaagccccagugcaacaucaccggcuucgcccccuucuccaaggacaacuccauccgccucuccgccggcggcgacaucugggucacccgcgagcccuacgucuccugcgaccccgacaagugcuaccaguucgcccucggccagggcaccacccucaacaacguccacuccaacgacaccguccacgaccgcacccccuaccgcacccuccucaugaucgagcucggcguccccuuccaccucggcaccaagcaggucugcaucgccugguccuccuccuccugccacgacggcaaggccuggcuccacgucugcgucaccggcgacgacaagaacgccaccgccuccuucaucuacaacggccgccucgucgacuccaucgucuccugguccaaggagauccuccgcacccaggaguccgagugcgucugcaucaacggcaccugcaccgucgucaugaccgacggcuccgccuccggcaaggccgacaccaagauccucuucaucgaggagggcaagaucguccacaccuccacccucuccggcuccgcccagcacgucgaggagugcuccugcuacccccgcuaccccggcguccgcugcgucugccgcgacaacuggaagggcuccaaccgccccaucgucgacaucaacaucaaggacuacuccaucgucuccuccuacgucugcuccggccucgucggcgacaccccccgcaagaacgacuccuccuccuccucccacugccucgaccccaacaacgaggagggcggccacggcgucaagggcugggccuucgacgacggcaacgacgucuggaugggccgcaccaucuccgagaagcuccgcuccggcuacgagaccuucaaggucaucgagggcugguccaaccccaacuccaagcuccagaccaaccgccaggucaucgucgaccgcggcaaccgcuccggcuacuccggcaucuucuccgucgagggcaaguccugcaucaaccgcugcuucuacgucgagcucauccgcggccgcaaggaggagaccgagguccucuggaccuccaacuccaucgucgucuucugcggcaccuccggcaccuacggcaccggcuccuggcccgacggcgccgacaucaaccucaugcccaucuga

SEQ ID NO: 122108 - RNA, 1410 nt, Artificial Sequence
  derived and/or modified CDS sequence (opt2) from neuraminidase__InfluenzaA__BAF47944
augaaccccaaccagaagaucaucaccaucggcuccgucucccucaccaucuccaccaucugcuucuucaugcagaucgccauccucaucaccaccgucacccuccacuucaagcaguacgaguucaacuccccccccaacaaccaggucaugcucugcgagcccaccaucaucgagcgcaacaucaccgagaucgucuaccucaccaacaccaccaucgagaaggagaucugccccaagcucaccgaguaccgcaacugguccaagccccagugcaacaucaccggcuucgcccccuucuccaaggacaacuccauccgccucuccgccggcggcgacaucugggucacccgcgagcccuacgucuccugcgaccccgacaagugcuaccaguucgcccucggccagggcaccacccucaacaacguccacuccaacgaccccguccacgaccgcacccccuaccgcacccuccucaugaacgagcucggcguccccuuccaccucggcaccaagcaggucugcaucgccugguccuccuccuccugccacgacggcaaggccuggcuccacgucugcgucaccggcgacgacaagaacgccaccgccuccuucaucuacaacggccgccucgucgacuccaucgucuccugguccaaggagauccuccgcacccaggaguccgagugcgucugcaucaacggcaccugcaccgucgucaugaccgacggcuccgccuccggcaaggccgacaccaagauccucuucaucgaggagggcaagaucguccacaccuccacccucuccggcuccgcccagcacgucgaggagugcuccugcuacccccgcuaccccggcguccgcugcgucugccgcgacaacuggaagggcuccaaccgccccaucgucgacaucaacaucaaggacuacuccaucgucuccuccuacgucugcuccggccucgucggcgacaccccccgcaagaacgacuccuccuccuccucccacugccucgaccccaacaacgaggagggcggccacggcgucaagggcugggccuucgacgacggcaacgacgucuggaugggccgcaccaucuccgagaagcuccgcuccggcuacgagaccuucaaggucaucgagggcugguccaaccccaacuccaagcuccagaccaaccgccaggucaucgucgaccgcggcaaccgcuccggcuacuccggcaucuucuccgucgagggcaaguccugcaucaaccgcugcuucuacgucgagcucauccgcggccgcaaggaggagaccgagguccucuggaccuccaacuccaucgucgucuucugcggcaccuccggcaccuacggcaccggcuccuggcccgacggcgccgacaucaaccucaugcccaucuga

SEQ ID NO: 122109 - RNA, 1410 nt, Artificial Sequence
  derived and/or modified CDS sequence (opt2) from neuraminidase__InfluenzaA__BAF47945
augaaccccaaccagaagaucaucaccaucggcuccgucucccucaccaucuccaccaucugcuucuucaugcagaucgccauccucaucaccaccgucacccuccacuucaagcaguacgaguucaacuccccccccaacaaccaggucaagcucugcgagcccaccaucaucgagcgcaacaucaccgagaucgucuaccucaccaacaccaccaucgagaaggagaucugccccaagcucgccgaguaccgcaacugguccaagccccagugcaacaucaccggcuucgcccccuucuccaaggacaacuccauccgccucuccgccggcggcgacaucugggucacccgcgagcccuacgucuccugcgaccccgacaagugcuaccaguucgcccucggccagggcaccacccucaacaacguccacuccaacgacaccguccacgaccgcacccccuaccgcacccuccucaugaacgagcucggcguccccuuccaccucggcaccaagcaggucugcaucgccugguccuccuccuccugccacgacggcaaggccuggcuccacgucugcgucaccggcgacgacaagaacgccaccgccuccuucaucuacaacggccgccucgucgacuccaucgucuccugguccaaggagauccuccgcacccaggaguccgagugcgucugcaucaacggcaccugcaccgucgucaugaccgacggcuccgccuccggcaaggccgacaccaagauccucuucaucgaggagggcaagaucguccacaccuccacccucuccggcuccgcccagcacgucgaggagugcuccugcuacccccgcuaccccggcguccgcugcgucugccgcgacaacuggaagggcuccaaccgccccaucgucgacaucaacaucaaggacuacuccaucgucuccuccuacgucugcuccggccucgucggcgacaccccccgcaagaacgacuccuccuccuccucccacugccucgaccccaacaacgaggagggcggccacggcgucaagggcugggccuucgacgacggcaacgacgucuggaugggccgcaccaucuccgagaagcuccgcuccggcuacgagaccuucaaggucaucgagggcugguccaaccccaacuccaagcuccagaccaaccgccaggucaucgucgaccgcggcaaccgcuccggcuacuccggcaucuucuccgucgagggcaaguccugcaucaaccgcugcuucuacgucgagcucauccgcggccgcaaggaggagaccgagguccucuggaccuccaacuccaucgucgucuucugcggcaccuccggcaccuacggcaccggcuccuggcccgacggcgccgacaucaaccucaugcccaucuga

SEQ ID NO: 122110 - RNA, 1410 nt, Artificial Sequence
  derived and/or modified CDS sequence (opt2) from neuraminidase__InfluenzaA__BAF47946
augaaccccaaccagaagaucaucaccaucggcuccgucucccucaccaucuccaccaucugcuucuucaugcagaucgccauccucaucaccaccgucacccuccacuucaagcaguacgaguucaacuccccccccaacaaccaggucaugcucugcgagcccaccaucaucgagcgcaacaucaccgagaucgucuaccucaccaacaccaccaucgagaaggagaucugccccaagcucgccgaguaccgcaacugguccaagccccagugcaacaucaccggcuucgcccccuucuccaaggacaacuccauccgccucuccgccggcggcgacaucugggucacccgcgagcccuacgucuccugcgaccccgacaagugcuaccaguucgcccucggccagggcaccacccucaacaacguccacuccaacgacaccguccacgaccgcacccccuaccgcacccuccucaugaacgagcucggcguccccuuccaccucggcaccaagcaggucugcaucgccugguccuccuccuccugccacgacggcaaggccuggcuccacgucugcgucaccggcgacgacaagaacgccaccgccuccuucaucuacaacggccgccucgucgacuccaucgucuccugguccaaggagauccuccgcacccaggaguccgagugcgucugcaucaacggcaccugcaccgucgucaugaccgacggcuccgccuccggcaaggccgacaccaagauccucuucaucgaggagggcaagaucguccacaccuccacccucuccggcuccgcccagcacgucgaggagugcuccugcuacccccgcuaccccggcguccgcugcgucugccgcgacaacuggaagggcuccaaccgccccaucgucgacaucaacaucaaggacuacuccaucgucuccuccuacgucugcuccggccucgucggcgacaccccccgcaagaacgacuccuccuccuccucccacugccucgaccccaacaacgaggagggcggccacggcgucaagggcugggccuucgacgacggcaacgacgucuggaugggccgcaccaucuccgagaagcuccgcuccggcuacgagaccuucaagguccucgagggcugguccaaccccaacuccaagcuccagaccaaccgccaggucaucgucgaccgcggcaaccgcuccggcuacuccggcaucuucuccgucgagggcaaguccugcaucaaccgcugcuucuacgucgagcucauccgcggccgcaaggaggagaccgagguccucuggaccuccaacuccaucgucgucuucugcggcaccuccggcaccuacggcaccggcuccuggcccgacggcgccgacaucaaccucaugcccaucuga

SEQ ID NO: 122111 - RNA, 1410 nt, Artificial Sequence
  derived and/or modified CDS sequence (opt2) from neuraminidase__InfluenzaA__BAF47948
augaaccccaaccagaagaucaucaccaucggcuccgucucccucaccaucuccaccaucugcuucuucaugcagaucgccauccucaucaccaccgucacccuccacuucaagcaguacgaguucaacuccccccccaacaaccaggucaugcucugcgagcccaccaucaucgagcgcaacaucaccgagaucgucuaccucaccaacaccaccaucgagaaggagaucugccccaagcucgccgaguaccgcaacugguccaagccccagugcgacaucaccggcuucgcccccuucuccaaggacaacuccauccgccucuccgccggcggcgacaucugggucacccgcgagcccuacgucuccugcgaccccgacaagugcuaccaguucgcccucggccagggcaccacccucaacaacguccacuccaacgacaagguccacgaccgcacccccuaccgcacccuccucaugaacgagcucggcguccccuuccaccucggcaccaagcaggucugcaucgccugguccuccuccuccugccacgacggcaaggccuggcuccacgucugcgucaccggcgacgacaagaacgccaccgccuccuucaucuacaacggccgccucgucgacuccaucgucuccugguccaagaagauccuccgcacccaggaguccgagugcgucugcaucaacggcaccugcaccgucgucaugaccgacggcuccgccuccggcaaggccgacaccaagauccucuucaucgaggagggcaagaucguccacaccuccacccucuccggcuccgcccagcacgucgaggagugcuccugcuacccccgcuaccccggcguccgcugcgucugccgcgacaacuggaagggcuccaaccgccccaucgucgacaucaacaucaaggacuacuccaucgucuccuccuacgucugcuccggccucgucggcgacaccccccgcaagaacgacuccuccuccuccucccacugccucgaccccaacaacgaggagggcggccacggcgucaagggcugggccuucgacgacggcaacgacgucuggaugggccgcaccaucuccgagaagcuccgcuccggcuacgagaccuucaaggucaucgagggcugguccaacuccaacuccaagcuccagaucaaccgccaggucaucgucgaccgcggcaaccgcuccggcuacuccggcaucuucuccgucgagggcaaguccugcaucaaccgcugcuucuacgucgagcucauccgcggccgcaaggaggagaccgagguccucuggaccuccaacuccaucgucgucuucugcggcaccuccggcaccuacggcaccggcuccuggcccgacggcgccgacaucaaccucaugcccaucuga

SEQ ID NO: 122112 - RNA, 1410 nt, Artificial Sequence
  derived and/or modified CDS sequence (opt2) from neuraminidase__InfluenzaA__BAF47949
augaaccccaaccagaagaucaucaccaucggcuccgucucccucaccaucuccaccaucugcuucuucaugcagaucgccauccucaucaccaccgucacccuccacuucaagcaguacgaguucaacuccccccccaacaaccaggucaugcucugcgagcccaccaucaucgagcgcaacaucaccgagaucgucuaccucaccaacaccaccaucgagaaggagaucugccccaagcucgccgaguaccgcaacugguccaagccccagugcgacaucaccggcuucgcccccuucuccaaggacaacuccauccgccucuccgccggcggcgacaucugggucacccgcgagcccuacgucuccugcgaccccgacaagugcuaccaguucgcccucggccagggcaccacccucaacaacguccacuccaacgacaagguccacgaccgcacccccuaccgcacccuccucaugaacgagcucggcguccccuuccaccucggcaccaagcaggucugcaucgccugguccuccuccuccugccacgacggcaaggccuggcuccacgucugcgucaccggcgacgacaagaacgccaccgccuccuucaucuacaacggccgccucgucgacuccaucgucuccugguccaagaagauccuccgcacccaggaguccgagugcgucugcaucaacggcaccugcaccgucgucaugaccgacggcuccgccuccggcaaggccgacaccaagauccucuucaucgaggagggcaagaucguccacaccuccacccucuccggcuccgcccagcacgucgaggagugcuccugcuacccccgcuaccccggcguccgcugcgucugccgcgacaacuggaagggcuccaaccgccccaucgucgacaucaacaucaaggacuacuccaucgucuccuccuacgucugcuccggccucgucggcgacaccccccgcaagaacgacuccuccuccuccucccacugccucgaccccaacaacgaggagggcggccacggcgucaagggcugggccuucgacgacggcaacgacgucuggaugggccgcaccaucuccgagaagcuccgcuccggcuacgagaccuucaaggucaucgagggcugguccaaccccaacuccaagcuccagaucaaccgccaggucaucgucgaccgcggcaaccgcuccggcuacuccggcaucuucuccgucgagggcaaguccugcaucaaccgcugcuucuacgucgagcucauccgcggccgcaaggaggagaccgagguccucuggaccuccaacuccaucgucgucuucugcggcaccuccggcaccuacggcaccggcuccuggcccgacggcgccgacaucaaccucaugcccaucuga

SEQ ID NO: 122113 - RNA, 1410 nt, Artificial Sequence; identical to SEQ ID NO: 110750
  derived and/or modified CDS sequence (opt2) from neuraminidase__InfluenzaA__BAF47950

SEQ ID NO: 122114 - RNA, 1410 nt, Artificial Sequence
  derived and/or modified CDS sequence (opt2) from neuraminidase__InfluenzaA__BAF47951
augaaccccaaccagaagaucaucaccaucggcuccgucucccucaccaucuccaccaucugcuucuucaugcagaucgccauccucaucaccaccgucacccuccacuucaagcaguacgaguucaacuccccccccaacaaccaggucaugcucugcgagcccaccaucaucgagcgcaacaucaccgagaucgucuaccucaccaacaccaccaucgagaaggagaucugccccaagcucgccgaguaccgcaacugguccaagccccagugcgacaucaccggcuucgcccccuucuccaaggacaacuccauccgccucuccgccggcggcgacaucugggucacccgcgagcccuacgucuccugcgaccccgacaagugcuaccaguucgcccucggccagggcaccacccucaacaacguccacuccaacgacaccguccacgaccgcacccccuaccgcacccuccucaugaacgagcucggcguccccuuccaccucggcaccaagcaggucugcaucgccugguccuccuccuccugccacgacggcaaggccuggcuccacgucugcgucaccggcgacgacaagaacgccaccgccuccuucaucuacaacggccgccucgucgacuccaucgucuccugguccaagaagauccuccgcacccaggaguccgagugcgucugcaucaacggcaccugcaccgucgucaugaccgacggcuccgccuccggcaaggccgacaccaagauccucuucaucgaggagggcaagaucguccacaccuccacccucuccggcuccgcccagcacgucgaggagugcuccugcuacccccgcuaccccggcguccgcugcgucugccgcgacaacuggaagggcuccaaccgccccaucgucgacaucaacaucaaggacuacuccaucgucuccuccuacgucugcuccggccucgucggcgacaccccccgcaagaacgacuccuccuccuccucccacugccucgaccccaacaacgaggagggcggccacggcgucaagggcugggccuucgacgacggcaacgacgucuggaugggccgcaccaucuccgagaagcuccgcuccggcuacgagaccuucaaggucaucgagggcugguccaacuccaacuccaagcuccagaucaaccgccaggucaucgucgaccgcggcaaccgcuccggcuacuccggcaucuucuccgucgagggcaaguccugcaucaaccgcugcuucuacgucgagcucauccgcggccgcaaggaggagaccgagguccucuggaccuccaacuccaucgucgucuucugcggcaccuccggcaccuacggcaccggcuccuggcccgacggcgccgacaucaaccucaugcccaucuga

SEQ ID NO: 122115 - RNA, 1410 nt, Artificial Sequence
  derived and/or modified CDS sequence (opt2) from neuraminidase__InfluenzaA__BAF47952
augaaccccaaccagaagaucaucaccaucggcuccgucucccucaccaucuccaccaucugcuucuucaugcagaucgccauccucaucaccaccgucacccuccacuucaagcaguacgaguucaacuccccccccaacaaccaggucaugcucugcgagcccaccaucaucgagcgcaacaucaccgagaucgucuaccucaccaacaccaccaucgagaaggagaucugccccaagcucgccgaguaccgcaacugguccaagccccagugcaacaucaccggcuucgcccccuucuccaaggacaacuccauccgccucuccgccggcggcgacaucugggucacccgcgagcccuacgucuccugcgaccccgacaagugcuaccaguucgcccucggccagggcaccacccucaacaacguccacuccaacgacaccguccacgaccgcacccccuaccgcacccuccucaugaacgagcucggcguccccuuccaccucggcaccaagcaggucugcaucgccugguccuccuccuccugccacgacggcaaggccuggcuccacgucugcgucaccggcgacgacaagaacgccaccgccuccuucaucuacaacggccgccucgucgacuccaucgucuccugguccaaggagauccuccgcacccaggaguccgagugcgucugcaucaacggcaccugcaccgucgucaugaccgacggcuccgccuccggcaaggccgacaccaagauccucuucaucgaggagggcaagaucguccacaccuccacccucuccggcuccgcccagcacgucgaggagugcuccugcuacccccgcuaccccggcguccgcugcgucugccgcgacaacuggaagggcuccaaccgccccaucgucgacaucaacaucaaggacuacuccaucgucuccuccuacgucugcuccggccucgucggcgacaccccccgcaagaacgacuccuccuccuccucccacugccucgaccccaacaacgaggagggcggccacggcgucaagggcugggccuucgacgacggcaacgacgucuggaugggccgcaccaucuccgagaagcuccgcuccggcuacgagaccuucaaggucaucgagggcugguccaaccccaacuccaagcuccagaccaaccgccaggucaucgucgaccgcggcaaccgcuccggcuacuccggcaucuucuccgucgagggcaaguccugcaucaaccgcugcuucuacgucgagcucauccgcggccgcaaggaggagaccgagguccucuggaccuccaacuccaucgucgucuucugcggcaccuccggcaccuacggcaccggcuccuggcccgacggcgccaacaucaaccucaugcccaucuga

SEQ ID NO: 122116 - RNA, 1410 nt, Artificial Sequence
  derived and/or modified CDS sequence (opt2) from neuraminidase__InfluenzaA__BAF47953
augaaccccaaccagaagaucaucaccaucggcuccgucucccucaccaucuccaccaucugcuucuucaugcagaucgccauccucaucaccaccgucacccuccacuucaagcaguacgaguucaacuccccccccaacaaccaggucaugcucugcgagcccaccaucaucgagcgcaacaucaccgagaucgucuaccucaccaacaccaccaucgagaaggagaucugccccaagcucgccgaguaccgcaacugguccaagccccagugcgacaucaccggcuucgcccccuucuccaaggacaacuccauccgccucuccgccggcggcgacaucugggucacccgcgagcccuacgucuccugcgaccccgacaagugcuaccaguucgcccucggccagggcaccacccucaacaacguccacuccaacgacaccguccacgaccgcacccccuaccgcacccuccucaugaacgagcucggcguccccuuccaccucggcaccaagcaggucugcaucgccugguccuccuccuccugccacgacggcaaggccuggcuccacgucugcgucaccggcgacgacgagaacgccaccgccuccuucaucuacaacggccgccucgucgacuccaucgucuccugguccaagaagauccuccgcacccaggaguccgagugcgucugcaucaacggcaccugcaccgucgucaugaccgacggcuccgccuccggcaaggccgacaccaagauccucuucaucgaggagggcaagaucguccacaccuccacccucuccggcuccgcccagcacgucgaggagugcuccugcuacccccgcuaccccggcguccgcugcgucugccgcgacaacuggaagggcuccaaccgccccaucgucgacaucaacaucaaggacuacuccaucgucuccuccuacgucugcuccggccucgucggcgacaccccccgcaagaacgacuccuccuccuccucccacugccucgaccccaacaacgaggagggcggccacggcgucaagggcugggccuucgacgacggcaacgacgucuggaugggccgcaccaucuccgagaagcuccgcuccggcuacgagaccuucaaggucaucgagggcugguccaaccccaacuccaagcuccagaucaaccgccaggucaucgucgaccgcggcaaccgcuccggcuacuccggcaucuucuccgucgagggcaaguccugcaucaaccgcugcuucuacgucgagcucauccgcggccgcaaggaggagaccgagguccucuggaccuccaacuccaucgucgucuucugcggcaccuccggcaccuacggcaccggcuccuggcccgacggcgccgacaucaaccucaugcccaucuga

SEQ ID NO: 122117 - RNA, 1410 nt, Artificial Sequence; identical to SEQ ID NO: 122069
  derived and/or modified CDS sequence (opt2) from neuraminidase__InfluenzaA__BAF47954

SEQ ID NO: 122118 - RNA, 1410 nt, Artificial Sequence; identical to SEQ ID NO: 122069
  derived and/or modified CDS sequence (opt2) from neuraminidase__InfluenzaA__BAF47955

SEQ ID NO: 122119 - RNA, 1410 nt, Artificial Sequence
  derived and/or modified CDS sequence (opt2) from neuraminidase__InfluenzaA__BAF47956
augaaccccaaccagaagaucaucaccaucggcuccgucucccucaccaucuccaccaucugcuucuucaugcagaucgccauccucaucaccaccgucacccuccacuucaagcaguacgaguucaacuccccccccaacaaccaggucaugcucugcgagcccaccaucaucgagcgcaacaucaccgagaucgucuaccucaccaacaccaccaucgagaaggagaucugccccaagcucgccgaguaccgcaagugguccaagccccagugcaacaucaccggcuucgcccccuucuccaaggacaacuccauccgccucuccgccggcggcgacaucugggucacccgcgagcccuacgucuccugcgaccccgacaagugcuaccaguucgcccucggccagggcaccacccucaacaacguccacuccaacgacaccguccgcgaccgcacccccuaccgcacccuccucaugaacgagcucggcguccccuuccaccucggcaccaagcaggucugcaucgccugguccuccuccuccugccacgacggcaaggccuggcuccacgucugcgucaccggcgacgacaagaacgccaccgccuccuucaucuacaacggccgccucgucgacuccaucgucuccugguccaaggagauccuccgcacccaggaguccgagugcgucugcaucaacggcaccugcaccgucgucaugaccgacggcuccgccuccggcaaggccgacaccaagauccucuucaucgaggagggcaagaucguccacaccuccacccucuccggcuccgcccagcacgucgaggagugcuccugcuacccccgcuaccccggcguccgcugcgucugccgcgacaacuggaagggcuccaaccgccccaucgucgacaucaacaucaaggacuacuccaucgucuccuccuacgucugcuccggccucgucggcgacaccccccgcaagaacgacuccuccuccuccucccacugccucgaccccaacaacgaggagggcggccacggcgucaagggcugggccuucgacgacggcaacgacgucuggaugggccgcaccaucuccgagaagcuccgcuccggcuacgagaccuucaaggucaucgagggcugguccaaccccaacuccaagcuccagaucaaccgccaggucaucgucgaccgcggcaaccgcuccggcuacuccggcaucuucuccgucgagggcaaguccugcaucaaccgcugcuucuacgucgagcucauccgcggccgcaaggaggagaccgagguccucuggaccuccaacuccaucgucgucuucugcggcaccuccggcaccuacggcaccggcuccuggcccgacggcgccgacaucaacuucaugcccaucuga

SEQ ID NO: 122120 - RNA, 1410 nt, Artificial Sequence
  derived and/or modified CDS sequence (opt2) from neuraminidase__InfluenzaA__BAF47958
augaaccccaaccagaagaucaucaccaucggcuccgucucccucaccaucuccaccaucugcuucuucaugcagaucgccauccucaucaccaccgucacccuccacuucaagcaguacgaguucaacuccccccccaacaaccaggucaugcucugcgagcccaccaucaucgagcgcaacaucaccgagaucgucuaccucaccaacaccaccaucgagaaggagaucugccccaagcucgccgaguaccgcaagugguccaagccccagugcaacaucaccggcuucgcccccuucuccaaggacaacuccauccgccucuccgccggcggcgacaucugggucacccgcgagcccuacgucuccugcgaccccgacaagugcuaccaguucgcccucggccagggcaccacccucaacaacguccacuccaacgacaccguccgcgaccgcacccccuaccgcacccucaugaugaacgagcucggcguccccuuccaccucggcaccaagcaggucugcaucgccugguccuccuccuccugccacgacggcaaggccuggcuccacgucugcgucaccggcgacgacaagaacgccaccgccuccuucaucuacaacggccgccucgucgacuccaucgucuccugguccaaggagauccuccgcacccaggaguccgagugcgucugcaucaacggcaccugcaccgucgucaugaccgacggcuccgccuccggcaaggccgacaccaagauccucuucaucgaggagggcaagaucguccacaccuccacccucuccggcuccgcccagcacgucgaggagugcuccugcuacccccgcuaccccggcguccgcugcgucugccgcgacaacuggaagggcuccaaccgccccaucgucgacaucaacaucaaggacuacuccaucgucuccuccuacgucugcuccggccucgucggcgacaccccccgcaagaacgacuccuccuccuccucccacugccucgaccccaacaacgaggagggcggccacggcgucaagggcugggccuucgacgacggcaacgacgucuggaugggccgcaccaucuccgagaagcuccgcuccggcuacgagaccuucaaggucaucgagggcugguccaaccccaacuccaagcuccagaucaaccgccaggucaucgucgaccgcggcaaccgcuccggcuacuccggcaucuucuccgucgagggcaaguccugcaucaaccgcugcuucuacgucgagcucauccgcggccgcaaggaggagaccgagguccucuggaccuccaacuccaucgucgucuucugcggcaccuccggcaccuacggcaccggcuccuggaccgacggcgccgacaucaacuucaugcccaucuga

SEQ ID NO: 122121 - RNA, 1410 nt, Artificial Sequence
  derived and/or modified CDS sequence (opt2) from neuraminidase__InfluenzaA__BAF47959
augaaccccaaccagaagaucaucaccaucggcuccgucucccucaccaucuccaccaucugcuucuucaugcagaucgccauccucaucaccaccgucacccuccacuucaagcaguacgaguucaacuccccccccaacaaccaggucaugcucugcgagcccaccaucaucgagcgcaacaucaccgagaucgucuaccucaccaacaccaccaucgagaaggagaucugccccaagcucgccgaguaccgcaacugguccaagccccagugcaacaucaccggcuucgcccccuucuccaaggacaacuccauccgccucuccgccggcggcgacaucugggucacccgcgagcccuacgucuccugcgaccccgacaagugcuaccaguucgcccucggccagggcaccacccucaacaacguccacuccaacuacaccguccacgaccgcacccccuaccgcacccuccucaugaacgagcucggcguccccuuccaccucggcaccaagcaggucugcaucgccugguccuccuccuccugccacgacggcaaggccuggcuccacgucugcgucaccggcgacgacaagaacgccaccgccuccuucaucuacaacggccgccucgucgacuccaucgucuccugguccaaggagauccuccgcacccaggaguccgagugcgucugcaucaacggcaccugcaccgucgucaugaccgacggcuccgccuccggcaaggccgacaccaagauccucuucaucgaggagggcaagaucguccacaccuccacccucuccggcuccgcccagcacgucgaggagugcuccugcuacccccgcuaccccggcguccgcugcgucugccgcgacaacuggaagggcuccaaccgccccaucgucgacaucaacaucaaggacuacuccaucgucuccuccuacgucugcuccggccucgucggcgacaccccccgcaagaacgacuccuccuccuccggccacugccucgaccccaacaacgaggagggcggccacggcgucaagggcugggccuucgacgacggcaacgacgucuggaugggccgcaccaucuccgagaagcuccgcuccggcuacgagaccuucaaggucaucgagggcugguccaaccccaacuccaagcuccagaucaaccgccaggucaucgucgaccgcggcaaccgcuccggcuacuccggcaucuucuccgucgagggcaaguccugcaucaaccgcugcuucuacgucgagcucauccgcggccgcaaggaggagaccgagguccucuggaccuccaacuccaucgucgucuucugcggcaccuccggcaccuacggcaccggcuccuggcccgacggcgccgacaucaaccucaugcccaucuga

SEQ ID NO: 122122 - RNA, 1410 nt, Artificial Sequence
  derived and/or modified CDS sequence (opt2) from neuraminidase__InfluenzaA__BAF47960
augaaccccaaccagaagaucaucaccaucggcuccgucucccucaccaucuccaccaucugcuucuucaugcagaucgccauccucaucaccaccgucacccuccacuucaagcaguacgaguucaacuccccccccaacaaccaggucaugcucugcgagcccaccaucaucgagcgcaacaucaccgagaucgucuaccucaccaacaccaccaucgagaaggagaucugccccaagcucgccgaguaccgcaacugguccaagccccagugcaacaucaccggcuucgcccccuucuccaaggacaacuccauccgccucuccgccggcggcgacaucugggucacccgcgagcccuacgucuccugcgaccccgacaagugcuaccaguucgcccucggccagggcaccacccucaacaacguccacuccaacgacaccguccacaaccgcacccccuaccgcacccuccucaugaacgagcucggcguccccuuccaccucggcaccaagcaggucugcaucgccugguccuccuccuccugccacgacggcaaggccuggcuccacgucugcgucaccggcgacgacaagaacgccaccgccuccuucaucuacaacggccgccucgucgacuccaucgucuccugguccaaggagauccuccgcacccaggaguccgagugcgucugcaucaacggcaccugcaccgucgucaugaccgacggcuccgccuccggcaaggccgacaccaagauccucuucaucgaggagggcaagaucguccacaccuccacccucuccggcuccgcccagcacgucgaggagugcuccugcuacccccgcuaccccggcguccgcugcgucugccgcgacaacuggaagggcuccaaccgccccaucgucgacaucaacaucaaggacuacuccaucgucuccuccuacgucugcuccggccucgucggcgacaccccccgcaagaacgacuccuccuccuccggccacugccucgaccccaacaacgaggagggcggccacggcgucaagggcugggccuucgacgacggcaacgacgucuggaugggccgcaccaucuccgagaagcuccgcuccggcuacgagaccuucaaggucaucgagggcugguccaaccccaacuccaagcuccagaucaaccgccaggucaucgucgaccgcggcaaccgcuccggcuacuccggcaucuucuccgucgagggcaaguccugcaucaaccgcugcuucuacgucgagcucauccgcggccgcaaggaggagaccgagguccucuggaccuccaacuccaucgucgucuucugcggcaccuccggcaccuacggcaccggcuccuggcccgacggcgccgacaucaaccucaugcccaucuga

SEQ ID NO: 122123 - RNA, 1410 nt, Artificial Sequence
  derived and/or modified CDS sequence (opt2) from neuraminidase__InfluenzaA__BAF47975
augaaccccaaccagaagaucaucaccaucggcuccgucucccucaccaucuccaccaucugcuucuucaugcagaucgccauccucaucaccaccgucacccuccacuucaagcaguacgaguucaacuccccccccaacaaccaggucaugcucugcgagcccaccaucaucgagcgcaacaucaccgagaucgucuaccucaccaacaccaccaucgagaaggagaucugccccaagcucgccgaguaccgcaagugguccaagccccagugcaacaucaccggcuucgcccccuucuccaaggacaacuccauccgccucuccgccggcggcgacaucugggucacccgcgagcccuacgucuccugcgaccccgacaagugcuaccaguucgcccucggccagggcaccacccucaacaacguccacuccaacgacaccguccgcgaccgcacccccuaccgcacccuccucaugaacgagcucggcguccccuuccaccucggcaccaagcaggucugcaucgccugguccuccuccuccugccacgacggcaaggccuggcuccacgucugcgucaccggcgacgacaagaacgccaccgccuccuucaucuacaacggccgccucgucgacuccaucgucuccugguccaaggagauccuccgcacccaggaguccgagugcgucugcaucaacggcaccugcaccgucgucaugaccgacggcuccgccuccggcaaggccgacaccaagauccucuucaucgaggagggcaagaucguccacaccuccacccucuccggcuccgcccagcacgucgaggagugcuccugcuacccccgcuaccccggcguccgcugcgucugccgcgacaacuggaagggcuccaaccgccccaucgucgacaucaacaucaaggacuacuccaucgucuccuccuacgucugcuccggccucgucggcgacaccccccgcaagaacgacuccuccuccuccucccacugccucgaccccaacaacgaggagggcggccacggcgucaagggcugggccuucgacgacggcaacgacgucuggaugggccgcaccaucuccgagaagcuccgcuccggcuacgagaccuucaaggucaucgagggcugguccaaccccaacuccaagcuccagaucaaccgccaggucaucgucgaccgcggcaaccgcuccggcuacuccggcaucuucuccgucgagggcaaguccugcaucaaccgcugcuucuacgucgagcucauccgcggccgcaaggaggagaccgagguccucuggaccuccaacuccaucgucgucuucugcggcaccuccggcaccuacggcaccggcuccuggcccgacggcgccgacaucaaccacaugcccaucuga

SEQ ID NO: 122124 - RNA, 1410 nt, Artificial Sequence; identical to SEQ ID NO: 110748
  derived and/or modified CDS sequence (opt2) from neuraminidase__InfluenzaA__BAF47976

SEQ ID NO: 122125 - RNA, 1410 nt, Artificial Sequence
  derived and/or modified CDS sequence (opt2) from neuraminidase__InfluenzaA__BAF47977
augaaccccaaccagaagaucaucaccaucggcuccgucucccucaccaucuccaccaucugcuucuucaugcagaucgccauccucaucaccaccgucacccuccaguucaagcaguacgaguucaacuccccccccaacaaccaggucaugcucugcgagcccaccaucaucgagcgcaacaucaccgagaucgucuaccucaccaacaccaccaucgagaaggagaucugccccaagcucgccgaguaccgcaacugguccaagccccagugcaacaucaccggcuucgcccccuucuccaaggacaacuccauccgccucuccgccggcggcgacaucugggucacccgcgagcccuacgucuccugcgaccccgacaagugcuaccaguucgcccucggccagggcaccacccucaacaacguccacuccaacgacaccguccacggccgcacccccuaccgcacccuccucaugaacgagcucggcguccccuuccaccucggcaccaagcaggucugcaucgccugguccuccuccuccugccacgacggcaaggccuggcuccacgucugcgucaccggcgacgacaagaacgccaccgccuccuucaucuacaacggccgccucgucgacuccaucgucuccugguccaaggagauccuccgcacccaggaguccgagugcgucugcaucaacggcaccugcaccgucgucaugaccgacggcuccgccuccggcaaggccgacaccaagauccucuucaucgaggagggcaagaucguccacaccuccacccucuccggcuccgcccagcacgucgaggagugcuccugcuacccccgcuaccccggcguccgcugcgucugccgcgacaacuggaagggcuccaaccgccccaucgucgacaucaacaucaaggacuacuccaucgucuccuccuacgucugcuccggccucgucggcgacaccccccgcaagaacgacuccuccuccuccucccacugccucgaccccaacaacgaggagggcggccacggcgucaagggcugggccuucgacgacggcaacgacgucuggaugggccgcaccaucuccgagaagcuccgcuccggcuacgagaccuucaaggucaucgagggcugguccaaccccaacuccaagcuccagaccaaccgccaggucaucgucgaccgcggcaaccgcuccggcuacuccggcaucuucuccgucgagggcaaguccugcaucaaccgcugcuucuacgucgagcucauccgcggccgcaaggaggagaccgagguccucuggaccuccaacuccaucgucgucuucugcggcaccuccggcaccuacggcaccggcuccuggcccgacggcgccgacaucaaccucaugcccaucuga

SEQ ID NO: 122126 - RNA, 1410 nt, Artificial Sequence
  derived and/or modified CDS sequence (opt2) from neuraminidase__InfluenzaA__BAF47978
augaaccccaaccagaagaucaucaccaucggcuccgucucccucaccaucuccaccaucugcuucuucaugcagaucgccauccucgucaccaccgucacccuccacuucaagcaguacgaguucaacuccccccccaacaaccaggucaugcucugcgagcccaccaucaucgagcgcaacaucaccgagaucgucuaccucaccaacaccaccaucgagaaggagaucugccccaagcucgccgaguaccgcaacugguccaagccccagugcaacaucaccggcuucgcccccuucuccaaggacaacuccauccgccucuccgccggcggcgacaucugggucacccgcgagcccuacgucuccugcgaccccgacaagugcuaccaguucgcccucggccagggcaccacccucaacaacguccacuccaacgacaccguccacgaccgcacccccuaccgcacccuccucaugaacgagcucggcguccccuuccaccucggcaccaagcaggucugcaucgccugguccuccuccuccugccacgacggcaaggccuggcuccacgucugcgucaccggcgacgacaagaacgccaccgccuccuucaucuacaacggccgccucgucgacuccaucgucuccugguccaaggagauccuccgcacccaggaguccgagugcgucugcaucaacggcaccugcaccgucgucaugaccgacggcuccgccuccggcaaggccgacaccaagauccucuucaucgaggagggcaagaucguccacaccuccacccucuccggcuccgcccagcacgucgaggagugcuccugcuacccccgcuaccccggcguccgcugcgucugccgcgacaacuggaagggcuccaaccgccccaucgucgacaucaacaucaaggacuacuccaucgucuccuccuacgucugcuccggccucgucggcgacaccccccgcaagaacgacuccuccuccuccucccacugccucgaccccaacaacgaggagggcggccacggcgucaagggcugggccuucgacgacggcaacgacgccuggaugggccgcaccaucuccgagaagcuccgcuccggcuacgagaccuucaaggucaucgagggcugguccaaccccaacuccaagcuccagaucaaccgccaggucaucgucgaccgcggcaaccgcuccggcuacuccggcaucuucuccgucgagggcaaguccugcaucaaccgcugcuucuacgucgagcucauccgcggccgcaaggaggagaccgagguccucuggaccuccaacuccaucgucgucuucugcggcaccuccggcaccuacggcaccggcuccuggcccgacggcgccgacaucaaccucaugcccaucuga

SEQ ID NO: 122127 - RNA, 1410 nt, Artificial Sequence
  derived and/or modified CDS sequence (opt2) from neuraminidase__InfluenzaA__BAF47979
augaaccccaaccagaagaucaucaccaucggcuccgucucccucaccaucuccaccaucugcuucuucaugcagaucgccauccucaucaccaccgucacccuccacuucaagcaguacgaguucaacuccccccccaacaaccaggucaugcucugcgagcccaccaucaucgagcgcaacaucaccgagaucgucuaccucaccaacaccaccaucgagaaggagaucugccccaagcucgccgaguaccgcaacugguccaagccccagugcaacaucaccggcuucgcccccuucuccaaggacaacuccauccgccucuccgccggcggcgacaucugggucacccgcgagcccuacgucuccugcgaccccgacaagugcuaccaguucgcccucggccagggcaccacccucaacaacguccacuccaacgacaccguccacaaccgcacccccuaccgcacccuccucaugaacgagcucggcguccccuuccaccucggcaccaagcaggucugcaucgccugguccuccuccuccugccacgacggcaaggccuggcuccacgucugcgucaccggcgacgacaagaacgccaccgccuccuucaucuacaacggccgccucgucgacuccaucgucuccugguccaaggagauccuccgcacccaggaguccgagugcgucugcaucaacggcaccugcaccgucgucaugaccgacggcuccgccuccggcaaggccgacaccaagauccucuucaucgaggagggcaagaucguccacaccuccacccucuccggcuccgcccagcacgucgaggagugcuccugcuacccccgcuaccccggcguccgcugcgucugccgcgacaacuggaagggcuccaaccgccccaucgucgacaucaacaucaaggacuacuccaucgucuccuccuacgucugcuccggccucgucggcgacaccccccgcaagaacgacuccuccuccuccucccacugccucgaccccaacaacgaggagggcggccacggcgucaagggcugggccuucgacgacggcaacgacgucuggaugggccgcaccaucuccgagaagcuccgcuccggcuacgagaccuucaaggucaucgagggcugguccaaccccaacuccaagcuccagaccaaccgccaggucaucgucgaccgcggcaaccgcuccggcuacuccggcaucuucuccgucgagggcaaguccugcaucaaccgcugcuucuacgucgagcucauccgcggccgcaaggaggagaccgagguccucuggaccuccaacuccaucgucgucuucugcggcaccuccggcaccuacggcaccggcuccuggcccgacggcgccgacaucaaccucaugcccaucuga

SEQ ID NO: 122128 - RNA, 1410 nt, Artificial Sequence; identical to SEQ ID NO: 112600
  derived and/or modified CDS sequence (opt2) from neuraminidase__InfluenzaA__BAF47980

SEQ ID NO: 122129 - RNA, 1410 nt, Artificial Sequence
  derived and/or modified CDS sequence (opt2) from neuraminidase__InfluenzaA__BAF47981
augaaccccaaccagaagaucaucaccaucggcuccgucucccucaccaucuccaccaucugccucuucaugcagaucgccauccucaucaccaccgucacccuccacuucaagcaguacgaguucaacuccccccccaacaaccaggucaugcucugcgagcccaccaucaucgagcgcaacaucaccgagaucgucuaccucaccaacaccaccaucgagaaggagaucugccccaagcucgccgaguaccgcaagugguccaagccccagugcaacaucaccggcuucgcccccuucuccaaggacaacuccauccgccucuccgccggcggcgacaucugggucacccgcgagcccuacgucuccugcgaccccgacaagugcuaccaguucgcccucggccagggcaccacccucaacaacguccacuccaacgacaccguccgcaaccgcacccccuaccgcacccuccucaugaacgagcucggcguccccuuccaccucggcaccaagcaggucugcaucgccugguccuccuccuccugccacgacggcaaggccuggcuccacgucugcgucaccggcgacgacaagaacgccaccgccuccuucaucuacaacggccgccucgucgacuccaucgucuccugguccaaggagauccuccgcacccaggaguccgagugcgucugcaucaacggcaccugcaccgucgucaugaccgacggcuccgccuccggcaaggccgacaccaagauccucuucaucgaggagggcaagaucguccacaccuccacccucuccggcuccgcccagcacgucgaggagugcuccugcuacccccgcuaccccggcguccgcugcgucugccgcgacaacuggaagggcuccaaccgccccaucgucgacaucaacaucaaggacuacuccaucgucuccuccuacgucugcuccggccucgucggcgacaccccccgcaagaacgacuccuccuccuccucccacugccucgaccccaacaacgaggagggcggccacggcgucaagggcugggccuucgacgacggcaacgacgucuggaugggccgcaccaucuccgagaagcuccgcuccggcuacgagaccuucaaggucaucgagggcugguccaaccccaacuccaagcuccagaucaaccgccaggucaucgucgaccgcggcaaccgcuccggcuacuccggcaucuucuccgucgagggcaaguccugcaucaaccgcugcuucuacgucgagcucauccgcggccgcaaggaggagaccgagguccucuggaccuccaacuccaucgucgucuucugcggcaccuccggcaccuacggcaccggcuccuggcccgacggcgccgacaucaaccucaugcccaucuga

SEQ ID NO: 122130 - RNA, 1410 nt, Artificial Sequence
  derived and/or modified CDS sequence (opt2) from neuraminidase__InfluenzaA__BAF47982
augaaccccaaccagaagaucaucaccaucggcuccgucucccucaccaucuccaccaucugcuucuucaugcagaucgccauccucaucaccaccgucacccuccacuucaagcaguacgaguucaacuccccccccaacaaccaggucaugcucugcgagcccaccaucaucgagcgcaacaucaccgagaucgucuaccucaccaacaccaccaucgagaaggagaucugccccaagcucgccgaguaccgcaagugguccaagccccagugcaacaucaccggcuucgcccccuucuccaaggacaacuccauccgccucuccgccggcggcgacaucugggucacccgcgagcccuacgucuccugcgaccccgacaagugcuaccaguucgcccucggccagggcaccacccucaacaacguccacuccaacgacaccguccgcaaccgcacccccuaccgcacccuccucaugaacgagcucggcguccccuuccaccucggcaccaagcaggucugcaucgccugguccuccuccuccugccacgacggcaaggccuggcuccacgucugcgucaccggcgacgacaagaacgccaccgccuccuucaucuacaacggccgccucgucgacuccaucgucuccugguccaaggagauccuccgcacccaggaguccgagugcgucugcaucaacggcaccugcaccgucgucaugaccgacggcuccgccuccggcaaggccgacaccaagauccucuucaucgaggagggcaagaucguccacaccuccacccucuccggcuccgcccagcacgucgaggagugcuccugcuacccccgcuaccccggcguccgcugcgucugccgcgacaacuggaagggcuccaaccgccccaucgucgacaucaacaucaaggacuacuccaucgucuccuccuacgucugcuccggccucgucggcgacaccccccgcaagaacgacuccuccuccuccucccacugccucgaccccaacaacgaggagggcggccacggcgucaagggcugggccuucgacgacggcaacgacgucuggaugggccgcaccaucuccgagaagcuccgcuccggcuacgagaccuucaaggucaucgagggcugguccaaccccaacuccaagcuccagaucaaccgccaggucaucgucgaccgcggcaaccgcuccggcuacuccggcaucuucuccgucgagggcaaguccugcaucaaccgcugcuucuacgucgagcucauccgcggccgcaaggaggagaccgagguccucuggaccuccaacuccaucgucgucuucugcggcaccuccggcaccuacggcaccggcuccuggcccgacggcgccgacaucaaccucaugcccaucuga

SEQ ID NO: 122131 - RNA, 1410 nt, Artificial Sequence; identical to SEQ ID NO: 112600
  derived and/or modified CDS sequence (opt2) from neuraminidase__InfluenzaA__BAF47983

SEQ ID NO: 122132 - RNA, 1410 nt, Artificial Sequence
  derived and/or modified CDS sequence (opt2) from neuraminidase__InfluenzaA__BAF47984
augaaccccaaccagaagaucaucaccaucggcuccgucucccucaccaucuccaccaucugcuucuucaugcagaucgccauccucaucaccaccgucacccuccacuucaagcaguacgaguucaacuccccccccaacaaccaggucaugcucugcgagcccaccaucaucgagcgcaacaucaccgagaucgucuaccucaccaacaccaccaucgagaaggagaucugccccaagcucgccgaguaccgcaacugguccaagccccagugcaacaucaccggcuucgcccccuucuccaaggacaacuccauccgccucuccgccggcggcgacaucugggucacccgcgagcccuacgucuccugcgaccccgacaagugcuaccaguucgcccucggccagggcaccacccucaacaacguccacuccaacgacaccguccacggccgcacccccuaccgcacccuccucaugaacgagcucggcguccccuuccaccucggcaccaagcaggucugcaucgccugguccuccuccuccugccacgacggcaaggccuggcuccacgucugcgucaccggcgacgacaagaacgccaccgccuccuucaucuacaacggccgccucgucgacuccaucgucuccugguccaaggagauccuccgcacccaggaguccgagugcgucugcaucaacggcaccugcaccgucgucaugaccgacggcuccgccuccggcaaggccgacaccaagauccucuucaucgaggagggcaagaucguccacaccuccacccucuccggcuccgcccagcacgucgaggagugcuccugcuacccccgcuaccccggcguccgcugcgucugccgcgacaacuggaagggcuccaaccgccccaucgucgacaucaacaucaaggacuacuccaucgucuccuccuacgucugcuccggccucgucggcgacaccccccgcaagaacgacuccuccuccuccucccacugccucgaccccaacaacgaggagggcgaccacggcgucaagggcugggccuucgacgacggcaacgacgucuggaugggccgcaccaucuccgagaagcuccgcuccggcuacgagaccuucaaggucaucgagggcugguccaaccccaacuccaagcuccagaucaaccgccaggucaucgucgaccgcggcaaccgcuccggcuacuccggcaucuucuccgucgagggcaaguccugcaucaaccgcugcuucuacgucgagcucauccgcggccgcaaggaggagaccgagguccucuggaccuccaacuccaucgucgucuucugcggcaccuccggcaccuacggcaccggcuccuggcccgacggcgccgacaucaaccucaugcccaucuga

SEQ ID NO: 122133 - RNA, 1410 nt, Artificial Sequence
  derived and/or modified CDS sequence (opt2) from neuraminidase__InfluenzaA__BAF47985
augaaccccaaccagaagaucaucaccaucggcuccgucucccucaccaucuccaccaucugcuucuucaugcagaucgccauccucaucaccaccgucacccuccacuucaagcaguacgaguucaacuucccccccaacaaccaggucaugcucugcgagcccaccaucaucgagcgcaacaucaccgagaucgucuaccucaccaacaccaccaucgagaaggagaucugccccaagcucgccgaguaccgcaacugguccaagccccagugcgacaucaccggcuucgcccccuucuccaaggacaacuccauccgccucuccgccggcggcgacaucugggucacccgcgagcccuacgucuccugcgaccccgacaagugcuaccaguucgcccucggccagggcaccacccucaacaacguccacuccaacgacaccguccacgaccgcacccccuaccgcacccuccucaugaacgagcucggcguccccuuccaccucggcaccaagcaggucugcaucgccugguccuccuccuccugccacgacggcaaggccuggcuccacgucugcgucaccggcgacgacaagaacgccaccgccuccuucaucuacaacggccgccucgucgacuccaucgucuccugguccaagaagauccuccgcacccaggaguccgagugcgucugcaucaacggcaccugcaccgucgucaugaccgacggcuccgccuccggcaaggccgacaccaagauccucuucaucgaggagggcaagaucguccacaccuccacccucuccggcuccgcccagcacgucgaggagugcuccugcuacccccgcuaccccggcguccgcugcgucugccgcgacaacuggaagggcuccaaccgccccaucgucgacaucaacaucaaggacuacuccaucgucuccuccuacgucugcuccggccucgucggcgacaccccccgcaagaacgacuccuccuccuccucccacugccucgaccccaacaacgaggagggcggccacggcgucaagggcugggccuucgacgacggcaacgacgucuggaugggccgcaccaucuccgagaagcuccgcuccggcuacgagaccuucaaggucaucgagggcugguccaaccccaacuccaagcuccagaucaaccgccaggucaucgucgaccgcggcaaccgcuccggcuacuccggcaucuucuccgucgagggcaaguccugcaucaaccgcugcuucuacgucgagcucauccgcggccgcaaggaggagaccgagguccucuggaccuccaacuccaucgucgucuucugcggcaccuccggcaccuacggcaccggcuccuggcccgacggcgccgacaucaaccucaugcccaucuga

SEQ ID NO: 122134 - RNA, 1410 nt, Artificial Sequence
  derived and/or modified CDS sequence (opt2) from neuraminidase__InfluenzaA__BAF47986
augaaccccaaccagaagaucaucaccaucggcuccgucucccucaccaucuccaccaucugcuucuucaugcagaucgccauccucaucaccaccgucacccuccacuucaagcaguacgaguucaacuucccccccaacaaccaggucaugcucugcgagcccaccaucaucgagcgcaacaucaccgagaucgucuaccucaccaacaccaccaucgagaaggagaucugccccaagcucgccgaguaccgcaacugguccaagccccagugcgacaucaccggcuucgcccccuucuccaaggacaacuccauccgccucuccgccggcggcgacaucugggucacccgcgagcccuacgucuccugcgaccccgacaagugcuaccaguucgcccucggccagggcaccacccucaacaacguccacuccaacgacaccguccacgaccgcacccccuaccgcacccuccucaugaacgagcucggcguccccuuccaccucggcaccaagcaggucugcaucgccugguccuccuccuccugccacgacggcaaggccuggcuccacgucugcgucaccggcgacgacaagaacgccaccgccuccuucaucuacaacggccgccucgucgacuccaucgucuccugguccaagaagauccuccgcacccaggaguccgagugcgucugcaucaacggcaccugcaccgucgucaugaccgacggcuccgccuccggcaaggccgacaccaagauccucuucaucgaggagggcaagaucguccacaccuccacccucuccggcuccgcccagcacgucgaggagugcuccugcuacccccgcuaccccggcguccgcugcgucugccgcgacaacuggaagggcuccaaccgccccaucgucgacaucaacaucaaggacuacuccaucgucuccuccuacgucugcuccggccucgucggcgacaccccccgcaagaacgacuccuccuccuccucccacugccucgaccccaacaacgaggagggcggccacggcgucaagggcugggccuucgacgacggcaacgacgucuggaugggccgcaccaucuccgagaagcuccgcuccggcuacgagaccuucaaggucaucgagggcugguccaaccccaacuccaagcuccagaucaaccgccaggucaucgucgaccgcggcaaccgcuccggcuacuccggcaucuucuccgucgagggcaaguccugcaucaaccgccgcuucuacgucgagcucauccgcggccgcaaggaggagaccgagguccucuggaccuccaacuccaucgucgucuucugcggcaccuccggcaccuacggcaccggcuccuggcccgacggcgccgacaucaaccucaugcccaucuga

SEQ ID NO: 122135 - RNA, 1410 nt, Artificial Sequence
  derived and/or modified CDS sequence (opt2) from neuraminidase__InfluenzaA__BAF47987
augaaccccaaccagaagaucaucaccaucggcuccgucucccucaccaucuccaccaucugcuucuucaugcagaucgccauccucaucaccaccgucacccuccacuucaagcaguacgaguucaacuucccccccaacaaccaggucaugcucugcgagcccaccaucaucgagcgcaacaucaccgagaucgucuaccucaccaacaccaccaucgagaaggagaucugccccaagcucgccgaguaccgcaacugguccaagccccagugcgacaucaccggcuucgcccccuucuccaaggacaacuccauccgccucuccgccggcggcgacaucugggucacccgcgagcccuacgucuccugcgaccccgacaagugcuaccaguucgcccucggccagggcaccacccucaacaacguccacuccaacgacaagguccacgaccgcacccccuaccgcacccuccucaugaacgagcucggcguccccuuccaccucggcaccaagcaggucugcaucgccugguccuccuccuccugccacgacggcaaggccuggcuccacgucugcgucaccggcgacgacaagaacgccaccgccuccuucaucuacaacggccgccucgucgacuccaucgucuccugguccaagaagauccuccgcacccaggaguccgagugcgucugcaucaacggcaccugcaccgucgucaugaccgacggcuccgccuccggcaaggccgacaccaagauccucuucaucgaggagggcaagaucguccacaccuccacccucuccggcuccgcccagcacgucgaggagugcuccugcuacccccgcuaccccggcguccgcugcgucugccgcgacaacuggaagggcuccaaccgccccaucgucgacaucaacaucaaggacuacuccaucgucuccuccuacgucugcuccggccucgucggcgacaccccccgcaagaacgacuccuccuccuccucccacugccucgaccccaacaacgaggagggcggccacggcgucaagggcugggccuucgacgacggcaacgacgucuggaugggccgcaccaucuccgagaagcuccgcuccggcuacgagaccuucaaggucaucgagggcugguccaaccccaacuccaagcuccagaucaaccgccaggucaucgucgaccgcggcaaccgcuccggcuacuccggcaucuucuccgucgagggcaaguccugcaucaaccgcugcuucuacgucgagcucauccgcggccgcaaggaggagaccgagguccucuggaccuccaacuccaucgucgucuucugcggcaccuccggcaccuacggcaccggcuccuggcccgacggcgccgacaucaaccucaugcccaucuga

SEQ ID NO: 122136 - RNA, 1410 nt, Artificial Sequence; identical to SEQ ID NO: 110750
  derived and/or modified CDS sequence (opt2) from neuraminidase__InfluenzaA__BAF47988

SEQ ID NO: 122137 - RNA, 1410 nt, Artificial Sequence; identical to SEQ ID NO: 110750
  derived and/or modified CDS sequence (opt2) from neuraminidase__InfluenzaA__BAF47989

SEQ ID NO: 122138 - RNA, 1410 nt, Artificial Sequence
  derived and/or modified CDS sequence (opt2) from neuraminidase__InfluenzaA__BAF47990
augaaccccaaccagaagaucaucaccaucggcuccgucucccucaccaucuccaccaucugcuucuucaugcagaucgccauccucaucaccaccgucacccuccacuucaagcaguacgaguucaacuccccccccaacaaccaggucaugcucugcgagcccaccaucaucgagcgcaacaucaccgagaucgucuaccucaccaacaccaccaucgagaaggagaucugccccaagcucgccgaguaccgcaacugguccaagccccagugcaacaucaccggcuucgcccccuucuccaaggacaacuccauccgccucuccgccggcggcgacaucugggucacccgcgagcccuacgucuccugcgaccccgacaagugcuaccaguucgcccucggccagggcaccacccucaacaacguccacuccaacgacaccguccacgaccgcacccccuaccgcacccuccucaugaacgagcucggcguccccuuccaccucggcaccaagcaggucugcaucgccugguccuccuccuccugccacgacggcaaggccuggcuccacgucugcgucaccggcgacgacaagaacgccaccgccuccuucaucuacaacggccgccucgucgacuccaucgucuccugguccaaggagauccuccgcacccaggaguccgagugcgucugcaucaacggcaccugcaccgucaucaugaccgacggcuccgccuccggcaaggccgacaccaagauccucuucaucgaggagggcaagaucguccacaccuccacccucuccggcuccgcccagcacgucgaggagugcuccugcuacccccgcuaccccggcguccgcugcgucugccgcgacaacuggaagggcuccaaccgccccaucgucgacaucaacaucaaggacuacuccaucgucuccuccuacgucugcuccggccucgucggcgacaccccccgcaagaacgacuccuccuccuccucccacugccucgaccccaacaacgaggagggcggccacggcgucaagggcugggccuucgacgacggcaacgacgucuggaugggccgcaccgucuccgagaagcuccgcuccggcuacgagaccuucaaggucaucgagggcugguccaaccccaacuccaagcuccagaucaaccgccaggucaucgucgaccgcggcaaccgcuccggcuacuccggcaucuucuccgucgagggcaaguccugcaucaaccgcugcuucuacgucgagcucauccgcggccgcaaggaggagaccgagguccucuggaccuccaacuccaucgucgucuucugcggcaccuccggcaccuacggcaccggcuccuggcccgacggcgccgacaucaaccucaugcccaucuga

SEQ ID NO: 122139 - RNA, 1410 nt, Artificial Sequence
  derived and/or modified CDS sequence (opt2) from neuraminidase__InfluenzaA__BAF47991
augaaccccaaccagaagaucaucaccaucggcuccgucucccucaccaucuccaccaucugcuucuucaugcagaucgccauccucaucaccaccgucacccuccacuucaagcaguacgaguucaacuccccccccaacaaccaggucaugcucugcgagcccaccaucaucgagcgcaacaucaccgagaucgucuaccucaccaacaccaccaucgagaaggagaucugccccaagcucgccgaguaccgcaacugguccaagccccagugcgacaucaccggcuucgcccccuucuccaaggacaacuccauccgccucuccgccggcggcgacaucugggucacccgcgagcccuacgucuccugcgaccccgacaagugcuaccaguucgcccucggccagggcaccacccucaacaacguccacuccaacgacaucguccacgaccgcacccccuaccgcacccuccucaugaacgagcucggcguccccuuccaccucggcaccaagcaggucugcaucgccugguccuccuccuccugccacgacggcaaggccuggcuccacgucugcgucaccggcgacgacaagaacgccaccgccuccuucaucuacaacggccgccucgucgacuccaucgucuccugguccaagaagauccuccgcacccaggaguccgagugcgucugcaucaacggcaccugcaccgucgucaugaccgacggcuccgccuccggcaaggccgacaccaagauccucuucaucgaggagggcaagaucguccacaccuccacccucuccggcuccgcccagcacgucgaggagugcuccugcuacccccgcuaccccggcauccgcugcgucugccgcgacaacuggaagggcuccaaccgccccaucgucgacaucaacaucaaggacuacuccaucgucuccuccuacgucugcuccggccucgucggcgacaccccccgcaagaacgacuccuccuccuccucccacugccucgaccccaacaacgaggagggcggccacggcgucaagggcugggccuucgacgacggcaacgacgucuggaugggccgcaccaucuccgagaagcuccgcuccggcuacgagaccuucaaggucaucgagggcugguccaaccccaacuccaagcuccagaucaaccgccaggucaucgucgaccgcggcaaccgcuccggcuacuccggcaucuucuccgucgagggcaaguccugcaucaaccgcugcuucuacgucgagcucauccgcggccgcaaggaggagaccgagguccucuggaccuccaacuccaucgucgucuucugcggcaccuccggcaccuacggcaccggcuccuggcccgacggcgccgacaucaaccucaugcccaucuga

SEQ ID NO: 122140 - RNA, 1410 nt, Artificial Sequence
  derived and/or modified CDS sequence (opt2) from neuraminidase__InfluenzaA__BAF47992
augaaccccaaccagaagaucaucaccaucggcuccgucucccucaccaucuccaccaucugcuucuucaugcagaucgccauccucaucaccaccgucacccuccacuucaagcaguacgaguucaacuccccccccaacaaccaggucaugcucugcgagcccaccaucaucgagcgcaacaucaccgagaucgucuaccucaccaacaccaccaucgagaaggagaucugccccaagcucgccgaguaccgcaacugguccaagccccagugcaacaucaccggcuucgcccccuucuccaaggacaacuccauccgccucuccgccggcggcgacaucugggucacccgcgagcccuacgucuccugcgagcccgacaagugcuaccccuucgcccucguccagggcaccacccucaacaacguccacuccaacgacaccguccacgaccgcacccccuaccgcacccuccucaugaacgagcucggcguccccuuccaccucggcaccaagcaggucugcaucgccugguccuccuccuccugccacgacggcaaggccuggcuccacgucugcgucaccggcgacgacaagaacgccaccgccuccuucaucuacaacggccgccucgucgacuccaucgucuccugguccaaggagauccuccgcacccaggaguccgagugcgucugcaucaacggcaccugcaccgucgucaugaccgacggcuccgccuccggcaaggccgacaccaagauccucuucaucgaggagggcaagaucguccacaccuccacccucuccggcuccgcccagcacgucgaggagugcuccugcuacccccgcuaccccggcguccgcugcgucugccgcgacaacuggaagggcuccaaccgccccaucgucgacaucaacaucaaggacuacuccaucgucuccuccuacgucugcuccggccucgucggcgacaccccccgcaagaacgacuccuccuccuccggccacugccucgaccccaacaacgaggagggcggccacggcgucaagggcugggccuucgacgacggcaacgacgucuggaugggccgcaccaucuccgagaagcuccgcuccggcuacgagaccuucaaggucaucgagggcugguccaaccccaacuccaagcuccagaucaaccgccaggucaucgucgaccgcggcaaccgcuccggcuacuccggcaucuucuccgucgagggcaaguccugcaucaaccgcugcuucuacgucgagcucauccgcggccgcaaggaggagaccgagguccucuggaccuccaacuccuucgucgucuucugcggcaccuccggcaccuacggcaccggcuccuggcccgacggcgccgacaucaaccucaugcccaucuga

SEQ ID NO: 122141 - RNA, 1410 nt, Artificial Sequence; identical to SEQ ID NO: 122097
  derived and/or modified CDS sequence (opt2) from neuraminidase__InfluenzaA__BAF47993

SEQ ID NO: 122142 - RNA, 1410 nt, Artificial Sequence; identical to SEQ ID NO: 110748
  derived and/or modified CDS sequence (opt2) from neuraminidase__InfluenzaA__BAF47994

SEQ ID NO: 122143 - RNA, 1410 nt, Artificial Sequence
  derived and/or modified CDS sequence (opt2) from neuraminidase__InfluenzaA__BAF47995
augaaccccaaccagaagaucaucaccaucggcuccgucucccucaccaucuccaccaucugcuucuucaugcagaucgccauccucaucaccaccgucacccuccacuucaagcaguacgaguucaacuccccccccaacaaccaggucaugcucugcgagcccaccaucaucgagcgcaacaucaccgagaucgucuaccucaccaacaccaccaucgagaaggagaucugccccaagcucgccgaguaccgcaacugguccaagccccagugcaacaucaccggcuucgcccccuucuccaaggacaacuccauccgccucuccgccggcggcgacaucugggucacccgcgagcccuacgucuccugcgaccccgacaagugcuaccaguucgcccucggccagggcaccacccucaacaacguccacuccaacgacaccguccacggccgcacccccuaccgcacccuccucaugaacgagcucggcguccccuuccaccucggcaccaagcaggucugcaucgccugguccuccuccuccugccacgacggcaaggccuggcuccacgucugcgucaccggcgacgacaagaacgccaccgccuccuucaucuacaacggccgccucgucgacuccaucgucuccugguccaaggagauccuccgcacccaggaguccgagugcgucugcaucaacggcaccugcaccgucgucaugaccgacggcuccgccuccggcaaggccgacaccaagauccucuucaucgaggagggcaagaucguccacaccuccacccucuccggcuccgcccagcacgucgaggagugcuccugcuacccccgcuaccccggcguccgcugcgucugccgcgacaacuggaagggcuccaaccgccccaucgucgacaucaacaucaaggacuacuccaucgucuccuccuacgucugcuccggccucgucggcgacaccccccgcaagaacgacuccuccuccuccucccacugccucgaccccaacaacgaggagggcggccacggcgucaagggcugggccuucgacgacggcaacgacgucuggaugggccgcaccaucuccgagaagcuccgcuccggcuacgagaccuucaaggucaucgagggcugguccaaccccaacuccaagcuccagaucaaccgccaggucaucgucgaccgcggcaaccgcuccggcuacuccggcaucuucuccgucgagggcaaguccugcaucaaccgcugcuucuacgucgagcucauccgcggccgcaaggaggagaccgagguccucuggaccuccaacuccaucgucgucuucugcggcaccuccggcaccuacggcaccggcuccuggcccgacggcgccgacaucaaccucaugcccaucuga

SEQ ID NO: 122144 - RNA, 1410 nt, Artificial Sequence; identical to SEQ ID NO: 122143
  derived and/or modified CDS sequence (opt2) from neuraminidase__InfluenzaA__BAF47996

SEQ ID NO: 122145 - RNA, 1410 nt, Artificial Sequence; identical to SEQ ID NO: 110750
  derived and/or modified CDS sequence (opt2) from neuraminidase__InfluenzaA__BAF47997

SEQ ID NO: 122146 - RNA, 1410 nt, Artificial Sequence
  derived and/or modified CDS sequence (opt2) from neuraminidase__InfluenzaA__BAF57504
augaaccccaaccagaagaucaucaccaucggcuccgucucccucaccaucuccaccaucugcuucuucaugcagaucgccauccucaucaccaccgucacccuccacuucaagcaguacgaguucaaccccccccccaacaaccaggucaugcucugcgagcccaccaucaucgagcgcaacaucaccgagaucgucuaccucaccaacaccaccaucgagaaggagaucugccccaagcucgccgaguaccgcaacugguccaagccccagugcaacaucaccggcuucgcccccuucuccaaggacaacuccauccgccucuccgccggcggcgacaucugggucacccgcgagcccuacgucuccuccgaccccgacaagugcuaccaguucgcccucggccagggcaccacccucaacaacguccacuccaacgacaccguccacgaccgcacccccuaccgcacccuccucaugaaggagcucggcguccccuuccaccucggcaccaagcaggucugcaucgccugguccuccuccuccugccacgacggcaaggccuggcuccacgucugcgucaccggcgacgacgagaacgccaccgccuccuucaucuacaacggccgccucgucgacuccgucgucuccugguccaagaagauccuccgcacccaggaguccgagugcgucugcaucaacggcaccugcaccgucgucaugaccgacggcuccgccuccggcaaggccgacaccaagauccucuucaucgaggagggcaagaucguccacaccuccucccucuccggcuccgcccagcacgucgaggagugcuccugcuacccccgcuaccccggcguccgcugcgucugccgcgacaacuggaagggcuccaaccgccccaucgucgacaucaacaucaaggacuacuccaucgucuccuccuacgucugcuccggccucgucggcgacaccccccgcaagaacgacuccuccuccuccucccacugccucgaccccaacaacgaggagggcggccacggcgucaagggcugggccuucgacgacggcaacgacgucuggaugggccgcaccaucuccgagaagcuccgcuccggcuacgagaccuucaaggucaucgagggcugguccaaccccaacuccaagcuccagaucaaccgccaggucaucgucgaccgcggcaaccgcuccggcuacuccggcaucuucuccgucgagggcaaguccugcaucaaccgcugcuucuacgucgagcucauccgcggccgcaagcaggagaccgagguccucuggaccuccaacuccaucgucgucuucugcggcaccuccggcaccuacggcaccggcuccuggcccgacggcgccgacaucaaccucaugcccaucuga

SEQ ID NO: 122147 - RNA, 1410 nt, Artificial Sequence
  derived and/or modified CDS sequence (opt2) from neuraminidase__InfluenzaA__BAF57508
augaaccccaaccagaagaucaucaccaucggcuccgucucccucaccaucuccaccaucugcuucuucaugcagaucgccauccucaucaccacccucacccuccacuucaagcaguacgaguucaacuccccccccaacaaccaggucaugcucugcgagcccaccaucaucgagcgcaacaucaccgagaucgucuaccucaccaacaccaccaucgagaaggagaucugccccaagcucgccgaguaccgcaacugguccaagccccagugcaacaucaccggcuucgcccccuucuccaaggacaacuccauccgccucuccgccggcggcgacaucugggucacccgcgagcccuacgucuccugcgaccccgacaagugcuaccaguucgcccucggccagggcaccacccucaacaacguccacuccaacgacaccguccacgaccgcacccccuaccgcacccuccucaugaacgagcucggcguccccuuccaccucggcaccaagcaggucugcaucgccugguccuccuccuccugccacgacggcaaggccuggcuccacgucugcgucaccggcgacgacgagaacgccaccgccuccuucaucuacaacggccgccucgucgacuccaucgucuccugguccaagaagauccuccgcacccaggaguccgagugcgucugcaucaacggcaccugcaccgucgucaugaccgacggcuccgccuccggcaaggccgacaccaagauccucuucaucgaggagggcaagaucguccacaccuccacccucuccggcuccgcccagcacgucgaggagugcuccugcuacccccgcuaccccggcguccgcugcgucugccgcgacaacuggaagggcuccaaccgccccaucgucgacaucaacaucaaggacuacuccaucgucuccuccuacgucugcuccggccucgucggcgacaccccccgcaagaacgacuccuccuccuccucccacugccucgaccccaacaacgaggagggcggccacggcgucaagggcugggccuucgacgacggcaacgacgucuggaugggccgcaccaucuccgagaagcuccgcuccggcuacgagaccuucaaggucaucgagggcugguccaaccccaacuccaagcuccagaucaaccgccaggucaucgucgaccgcggcaaccgcuccggcuacuccggcaucuucuccgucgagggcaaguccugcaucaaccgcugcuucuacgucgagcucauccgcggccgcaagcaggagaccgagguccucuggaccuccaacuccaucgucgucuucugcggcaccuccggcaccuacggcaccggcuccuggcccgacggcgccgacaucaaccucaugcccaucuga

SEQ ID NO: 122148 - RNA, 1410 nt, Artificial Sequence; identical to SEQ ID NO: 111965
  derived and/or modified CDS sequence (opt2) from neuraminidase__InfluenzaA__BAF57511

SEQ ID NO: 122149 - RNA, 1410 nt, Artificial Sequence
  derived and/or modified CDS sequence (opt2) from neuraminidase__InfluenzaA__BAF57515
augaaccccaaccagcgcaucaucaccaucggcuccgucucccucaccaucuccaccaucugcuucuucaugcagaucgccauccucaucaccaccgucacccuccacuucaagcaguacgaguucaacuccccccccaacaaccaggucaugcucugcgagcccaccaucaucgagcgcaacaucaccgagaucgucuaccucaccaacaccaccaucgagaaggagaucugccccaagcucgccgaguaccgcaacugguccaagccccagugcaacaucaccggcuucgcccccuucuccaaggacaacuccauccgccucuccgccggcggcgacaucugggucacccgcgagcccuacgucuccugcgaccccgacaagugcuaccaguucgcccucggccagggcaccacccucaacaacguccacuccaacgacaagguccacgaccgcacccccuaccgcacccuccucaugaacgagcucggcguccccuuccaccucggcaccaagcaggucugcaucgccugguccuccuccuccugccacgacggcaaggccuggcuccacgucugcgucaccggcgacgacgagaacgccaccgccuccuucaucuacaacggccgccucgucgacuccaucgucuccugguccaagaagauccuccgcacccaggaguccgagugcgucugcaucaacggcaccugcaccgucgucaugaccgacggcuccgccuccggcaaggccgacaccaagauccucuucaucgaggagggcaagaucguccacaccuccacccucuccggcuccgcccagcacgucgaggagugcuccugcuacccccgcuaccccggcguccgcugcgucugccgcgacaacuggaagggcuccaaccgccccaucgucgacaucaacaucaaggacuacuccaucgucuccuccuaccucugcuccggccucgucggcgacaccccccgcaagaacgacuccuccuccuccucccacugccucgaccccaacaacgaggagggcggccacggcgucaagggcugggccuucgacgacggcaacgacgucuggaugggccgcaccaucuccgagaagcuccgcuccggcuacgagaccuucaaggucaucgagggcuggucccaccccaacucccagcuccagaucaaccgccaggucaucgucgaccgcggcaaccgcuccggcuacuccggcaucuucuccgucgagggcaaguccugcaucaaccgcugcuucuacgucgagcucauccgcggccgcaagcaggagaccgagguccucuggaccuccaacuccaucgucgucuucugcggcaccuccggcaccuacggcaccggcuccuggcccgacggcgccgacaucaaccucaugcccaucuga

SEQ ID NO: 122150 - RNA, 1410 nt, Artificial Sequence
  derived and/or modified CDS sequence (opt2) from neuraminidase__InfluenzaA__BAF57522
augaaccccaaccagaagaucaucaccaucggcuccgucucccucaccaucuccaccaucugcuucuucaugcagaucgccauccucaucaccaccgucacccuccacuucaagcaguacgaguucaacuccccccccaacaaccaggucaugcucugcgagcccaccaucaucgagcgcaacaucaccgagaucgucuaccucaccaacaccaucaucgagaaggagaucugccccaagcucgccgaguaccgcaacugguccaagccccagugcaacaucaccggcuucgcccccuucuccaaggacaacuccauccgccucuccgccggcggcgacaucugggucacccgcgagcccuacgucuccugcgaccccgacaagugcuaccaguucgcccucggccagggcaccacccucaacaacguccacuccaacgacaccguccacgaccgcacccccuaccgcacccuccucaugaacgagcucggcguccccuuccaccucggcaccaagcaggucugcaucgccugguccuccuccuccugccacgacggcaaggccuggcuccacgucugcgucaccggcgacgacgagaacgccaccgccuccuucaucuacaacggccgccucgucgacuccaucgucuccugguccaagaagauccuccgcacccaggaguccgagugcgucugcaucaacggcaccugcaccgucgucaugaccgacggcuccgccuccggcaaggccgacaccaagauccucuucaucgaggagggcaagaucguccacaccuccacccucuccggcuccgcccagcacgucgaggagugcuccugcuacccccgcuaccccggcguccgcugcgucugccgcgacaacuggaagggcuccaaccgccccaucgucgacaucaacaucaaggacuacuccaucgucuccuccuacgucugcuccggccucgucggcgacaccccccgcaagaacgaccgcucccgcuccucccacugccucgaccccaacaacgaggagggcggccacggcgucaagggcugggccuucgacgacggcaacgacgucuggaugggccgcaccaucuccgagaagcuccgcuccggcuacgagaccuucaaggucaucgagggcugguccaagcccaacuccaagcuccagaucaaccgccaggucaucgucgaccgcggcaaccgcaccggcuacuccggcaucuucuccgucgagggcaaguccugcaucaaccgcugcuucuacgucgagcucauccgcggccgcaagcaggagaccgagguccucuggaccuccaacuccaucgucgucuucugcggcaccuccggcaccuacggcaccggcuccuggcccgacggcgccgacaucaaccucaugcccaucuga

SEQ ID NO: 122151 - RNA, 1410 nt, Artificial Sequence
  derived and/or modified CDS sequence (opt2) from neuraminidase__InfluenzaA__BAF57529
augaaccccaaccagaagaucaucaccaucggcuccgucucccucaccaucuccaccaucugcuucuucaugcagaucgccauccucaucaccaccgucacccuccacuucaagcaguacgaguucaacuccccccccaacaaccaggucaugcucugcgagcccaccaucaucgagcgcaacaucaccgagaucgucuaccucaccaacaccaccaucgagaaggagaucugccccaagcucgccgaguaccgcaacugguccaagccccagugcgacaucaccggcuucgcccccuucuccaaggacaacuccauccgccucuccgccggcggcgacaucugggucacccgcgagcccuacgucuccugcgaccccgacaagugcuaccaguucgcccucggccagggcaccacccucaacaacguccacuccaacgacaagguccacgagcgcacccccuaccgcacccuccucaugaacgagcucggcguccccuuccaccucggcaccaagcaggucugcaucgccugguccuccuccuccugccacgacggcaaggccuggcuccacgucugcgucaccggcgacgacaagaacgccaccgccuccuucaucuacaacggccgccucgucgacuccaucgucuccugguccaagaagauccuccgcacccaggaguccgagugcgucugcaucaacggcaccugcaccgucgucaugaccgacggcuccgccuccggcaaggccgacaccaagauccucuucaucgaggagggcaagaucguccacaccuccacccucuccggcuccgcccagcacgucgaggagugcuccugcuacccccgcuaccccggcguccgcugcgucugccgcgacaacuggaagggcuccaaccgccccaucgucgacaucaacaucaaggacuacuccaucgucuccuccuacgucugcuccggccucgucggcgacaccccccgcaagaacgacuccuccuccuccucccacugccucgaccccaacaacgaggagggcggccacggcgucaagggcugggccuucgacgacggcaacgacgucuggaugggccgcaccaucuccgagaagcuccgcuccggcuacgagaccuucaaggucaucgagggcugguccaaccccaacuccaagcuccagaucaaccgccaggucaucgucgaccgcggcaaccgcuccggcuacuccggcaucuucuccgucgagggcaaguccugcaucaaccgcugcuucuacgucgagcucauccgcggccgcaaggaggagaccgagguccucuggaccuccaacuccaucgucgucuucugcggcaccuccggcaccuacggcaccggcuccuggcccgacggcgccgacaucaaccucaugcccaucuga

SEQ ID NO: 122152 - RNA, 1410 nt, Artificial Sequence; identical to SEQ ID NO: 117587
  derived and/or modified CDS sequence (opt2) from neuraminidase__InfluenzaA__BAF57532

SEQ ID NO: 122153 - RNA, 1410 nt, Artificial Sequence; identical to SEQ ID NO: 117587
  derived and/or modified CDS sequence (opt2) from neuraminidase__InfluenzaA__BAF57536

SEQ ID NO: 122154 - RNA, 1410 nt, Artificial Sequence
  derived and/or modified CDS sequence (opt2) from neuraminidase__InfluenzaA__BAF57539
augaaccccaaccagaagaucaucaccaucggcuccgucucccucaccaucuccaccaucugcuucuucaugcagaucgccauccucaucaccaccgucacccuccacuucaagcaguacgaguucaacuccccccccaacaaccaggucaugcucugcgagcccaccaucaucgagcgcaacaucaccgagaucgucuaccucaccaacaccaccaucgagaaggagaucugccccaagcucgccgaguaccgcaacugguccaagccccagugcgacaucaccggcuucgcccccuucuccaaggacaacuccauccgccucuccgccggcggcgacaucugggucacccgcgagcccuacgucuccugcgaccccgacaagugcuaccaguucgcccucggccagggcaccacccucaacaacguccacuccaacgacaccguccacgaccgcacccccuaccgcacccuccucaugaacgagcucggcguccccuuccaccucggcaccaagcaggucugcaucgccugguccuccuccuccugccacgacggcaaggccuggcuccacgucugcgucaccggcgacgacaagaacgccaccgccuccuucaucuacaacggccgccucaucgacuccaucgucuccugguccaagaagauccuccgcacccaggaguccgagugcgucugcaucaacggcaccugcaccgucgucaugaccgacggcuccgccuccggcaaggccgacaccaagauccucuucaucgaggagggcaagaucguccacaccuccacccucuccggcuccgcccagcacgucgaggagugcuccugcuacccccgcuaccccggcguccgcugcgucugccgcgacaacuggaagggcuccaaccgccccaucgucgacaucaacaucaaggacuacuccaucgucuccuccuacgucugcuccggccucgucggcgacaccccccgcaagaacgacuccuccuccuccucccacugccucgaccccaacaacgaggagggcggccacggcgucaagggcugggccuucgacgacggcaacgacgucuggaugggccgcaccaucuccgagaagcuccgcuccggcuacgagaccuucaaggucaucgagggcugguccaaccccaacuccaagcuccagaucaaccgccaggucaucgucgaccgcggcaaccgcuccggcuacuccggcaucuucuccgucgagggcaaguccugcaucaaccgcugcuucuacgucgagcucauccgcggccgcaaggagaagaccgagguccucuggaccuccaacuccaucgucgucuucugcggcaccuccggcaccuacggcaccggcuccuggcccgacggcgccgacaucaaccucaugcccaucuga

SEQ ID NO: 122155 - RNA, 1410 nt, Artificial Sequence
  derived and/or modified CDS sequence (opt2) from neuraminidase__InfluenzaA__BAF57543
augaaccccaaccagaagaucaucaccaucggcuccgucucccucaccaucuccaccaucugcuucuucaugcagaucgccauccucaucaccaccgucacccuccacuucaagcaguacgaguucaacuccccccccaacaaccaggucaugcucugcgagcccaccaucaucgagcgcaacaucaccgagaucgucuaccucaccaacaccaccaucgagaaggagaucugccccaagcucgccgaguaccgcaacugguccaagccccagugcgacaucaccggcuucgcccccuucuccaaggacaacuccauccgccucuccgccggcggcgacaucugggucacccgcgagcccuacgucuccugcgaccccgacaagugcuaccaguucgcccucggccagggcaccacccucaacaacguccacuccaacgacaccguccacgaccgcacccccuaccgcacccuccucaugaacgagcucggcguccccuuccaccucggcaccaagcaggucugcaucgccugguccuccuccuccugccacgacggcaaggccuggcuccacgucugcgucaccggcgacgacaagaacgccaccgccuccuucaucuacaacggccgccucgucgacuccaucgucuccugguccaagaagauccuccgcacccaggaguccgagugcgucugcaucaacggcaccugcaccgucgucaugaccgacggcuccgccuccggcaaggccgacaccaagauccucuucaucgaggagggcaagaucguccacaccuccacccucuccggcuccgcccagcacgucgaggagugcuccugcuacccccgcuaccccggcguccgcugcgucugccgcgacaacuggaagggcuccaaccgccccaucgucgacaucaacaucaaggacuacuccaucgucuccuccuacgucugcuccggccucgucggcgacaccccccgcaagaacgacuccuccuccuccucccacugccucgaccccaacaacgaggagggcggccacggcgucaagggcugggccuucgacgacggcaacgacgucuggaugggccgcaccaucuccgagaagcuccgcuccggcuacgagaccuucaaggucaucgagggcugguccaaccccaacuccaagcuccagaucaaccgccaggucaucgucgaccgcggcaaccgcuccggcuacuccgccaucuucuccgucgagggcaaguccugcaucaaccgcugcuucuacgucgagcucauccgcggccgcaaggaggagaccgagguccucuggaccuccaacuccaucgucgucuucugcggcaccuccggcaccuacggcaccggcuccuggcccgacggcgccgacaucaaccucaugcccaucuga

SEQ ID NO: 122156 - RNA, 1410 nt, Artificial Sequence
  derived and/or modified CDS sequence (opt2) from neuraminidase__InfluenzaA__BAF57547
augaaccccaaccagaagaucaucaccaucggcuccgucucccucaccaucuccaccaucugcuucuucaugcagaucgccauccucaucaccaccgucacccuccacuucaagcaguacgaguucaacuccccccccaacaaccaggucaugcucugcgagcccaccaucaucgagcgcaacaucaccgagaucgucuaccucaccaacaccaccaucgagaaggagaucugccccaagcucgccgaguaccgcaacugguccaagccccagugcgacaucaccggcuucgcccccuucuccaaggacaacuccauccgccucuccgccggcggcgacaucugggucacccgcgagcccuacgucuccugcgaccccgacaagugcuaccaguucgcccucggccagggcaccacccucaacaacguccacuccaacgacaccguccacgaccgcacccccuaccgcacccuccucaugaacgagcucggcguccccuuccaccucggcaccaagcaggucugcaucgccugguccuccuccuccugccacgacggcaaggccuggcuccacgucugcgucaccggcgacgacaagaacgccaccgccuccuucaucuacaacggccgccucgucgacuccaucgucuccugguccaagaagauccuccgcacccaggaguccgagugcgucugcaucaacggcaccugcaccgucgucaugaccgacggcuccgccuccggcaaggccgacaccaagauccucuucaucgaggagggcaagaucguccacaccuccacccucuccggcuccgcccagcacgucgaggagugcuccugcuacccccgcuaccccggcguccgcugcgucugccgcgacaacuggaagggcuccaaccgccccaucgucgacaucaacaucaaggacuacuccaucgucuccuccuacgucugcuccggccucgucggcgacaccccccgcaagaacgacuccuccuccuccucccacugccucgaccccaacaacgaggagggcggccacggcgucaagggcugggccuucgacgacggcaacgacgucuggaugggccgcaccaucuccgagaagcuccgcuccggcuacgagaccuucaaggucaucgagggcugguccaaccccaacuccaagcuccagaucaaccgccaggucaucgucgaccgcggcaaccgcuccggcuacuccggcaucuucuccgucgagggcaaguccugcaucaaccgcugcuucuacgucgagcucauccgcggccgcaaggaggagaccgaggcccucuggaccuccaacuccaucgucgucuucugcggcaccuccggcaccuacggcaccggcuccuggcccgacggcgccgacaucaaccucaugcccaucuga

SEQ ID NO: 122157 - RNA, 1410 nt, Artificial Sequence; identical to SEQ ID NO: 110750
  derived and/or modified CDS sequence (opt2) from neuraminidase__InfluenzaA__BAF57551

SEQ ID NO: 122158 - RNA, 1410 nt, Artificial Sequence; identical to SEQ ID NO: 110750
  derived and/or modified CDS sequence (opt2) from neuraminidase__InfluenzaA__BAF57555

SEQ ID NO: 122159 - RNA, 1410 nt, Artificial Sequence; identical to SEQ ID NO: 110748
  derived and/or modified CDS sequence (opt2) from neuraminidase__InfluenzaA__BAF57559

SEQ ID NO: 122160 - RNA, 1410 nt, Artificial Sequence
  derived and/or modified CDS sequence (opt2) from neuraminidase__InfluenzaA__BAF57563
augaaccccaaccagaagaucaucaccaucggcuccgucucccucaccaucuccaccaucugcuucuucaugcagaucgccauccucaucaccaccgucacccuccacuucaagcaguacgaguucaacuccccccccaacaaccaggucaugcucugcgagcccaccaucaucgagcgcaacaucaccgagaucgucuaccucaccaacaccaccaucgagaaggagaucugccccaagcucgccgaguaccgcaacugguccaagccccagugcgacaucaccggcuucgcccccuucuccaaggacaacuccauccgccucuccgccggcggcgacaucugggucacccgcgagcccuacgucuccugcgaccccgacaagugcuaccaguucgcccucggccagggcaccacccucaacaacguccacuccaacgacaucguccacgaccgcacccccuaccgcacccuccucaugaacgagcucggcguccccuuccaccucggcaccaagcaggucugcaucgccugguccuccuccuccugccacgacggcaaggccuggcuccacgucugcgucaccggcgacgacaagaacgccaccgccuccuucaucuacaacggccgccucgucgacuccaucgucuccugguccaaggagauccuccgcacccaggaguccgagugcgucugcaucaacggcaccugcaccgucgucaugaccgacggcuccgccuccggcaaggccgacaccaagauccucuucaucgaggagggcaagaucguccacaccuccacccucuccggcuccgcccagcacgucgaggagugcuccugcuacccccgcuaccccggcguccgcugcgucugccgcgacaacuggaagggcuccaaccgccccaucgucgacaucaacaucaaggacuacuccaucgucuccuccuacgucugcuccggccucgucggcgacaccccccgcaagaacgacuccuccuccuccucccacugccucgaccccaacaacgaggagggcggccacggcgucaagggcugggccuucgacgacggcaacgacgucuggaugggccgcaccaucuccgagaagcuccgcuccggcuacgagaccuucaaggucaucgagggcugguccaaccccaacuccaagcuccagaucaaccgccaggucaucgucgaccgcggcaaccgcuccggcuacuccggcaucuucuccgucgagggcaaguccugcaucaaccgcugcuucuacgucgagcucauccgcggccgcaaggaggagaccgagguccucuggaccuccaacuccaucgucgucuucugcggcaccuccggcaccuacggcaccggcuccuggcccgacggcgccgacaucaaccucaugcccaucuga

SEQ ID NO: 122161 - RNA, 1410 nt, Artificial Sequence; identical to SEQ ID NO: 110748
  derived and/or modified CDS sequence (opt2) from neuraminidase__InfluenzaA__BAF57571

SEQ ID NO: 122162 - RNA, 1410 nt, Artificial Sequence; identical to SEQ ID NO: 117492
  derived and/or modified CDS sequence (opt2) from neuraminidase__InfluenzaA__BAF57575

SEQ ID NO: 122163 - RNA, 1410 nt, Artificial Sequence; identical to SEQ ID NO: 110363
  derived and/or modified CDS sequence (opt2) from neuraminidase__InfluenzaA__BAF57579

SEQ ID NO: 122164 - RNA, 1410 nt, Artificial Sequence
  derived and/or modified CDS sequence (opt2) from neuraminidase__InfluenzaA__BAF57583
augaaccccaaccagaagaucaucaccaucggcuccgucucccucaccaucuccaccaucugcuucuucaugcagaucgccauccucaucaccaccgucacccuccacuucaagcaguacgaguucaacuccccccccaacaaccaggucaugcucugcgagcccaccaucaucgagcgcaacaucaccgagaucgucuaccucaccaacaccaccaucgagaaggagaucugccccaagcucgccgaguaccgcaacugguccaagccccagugcaacaucaccggcuucgcccccuucuccaaggacaacuccauccgccucuccgccggcggcgacauccgcgucacccgcgagcccuacgucuccugcgaccccgacaagugcuaccaguucgcccucggccagggcaccacccucaacaacguccacuccaacgacaccguccacgaccgcacccccuaccgcacccuccucaugaacgagcucggcguccccuuccaccucggcaccaagcaggucugcaucgccugguccuccuccuccugccacgacggcaaggccuggcuccacgucugcgucaccggcgacgacaagaacgccaccgccuccuucaucuacaacggccgccucgucgacuccaucgucuccugguccaaggagauccuccgcacccaggaguccgagugcgucugcaucaacggcaccugcaccgucgucaugaccgacggcuccgccuccggcaaggccgacaccaagauccucuucaucgaggagggcaagaucguccacaccuccacccucuccggcuccgcccagcacgucgaggagugcuccugcuacccccgcuaccccggcguccgcugcgucugccgcgacaacuggaagggcuccaaccgccccaucgucgacaucaacaucaaggacuacuccaucgucuccuccuacgucugcuccggccucgucggcgacaccccccgcaagaacgacuccuccuccuccucccacugccucgaccccaacaacgaggagggcggccacggcgucaagggcugggccuucgacgacggcaacgacgucuggaugggccgcaccaucuccgagaagcuccgcuccggcuacgagaccuucaaggucaucgagggcugguccaaccccaacuccaagcuccagaucaaccgccaggucaucgucgaccgcggcaaccgcuccggcuacuccggcaucuucuccgucgagggcaaguccugcaucaaccgcugcuucuacgucgagcucauccgcggccgcaaggaggagaccgagguccucuggaccuccaacuccaucgucgucuucugcggcaccuccggcaccuacggcaccggcuccuggcccgacggcgccgacaucaaccucaugcccaucuga

SEQ ID NO: 122165 - RNA, 1410 nt, Artificial Sequence
  derived and/or modified CDS sequence (opt2) from neuraminidase__InfluenzaA__BAF57587
augaaccccaaccagaagaucaucaccaucggcuccgucucccucaccaucuccaccaucugcuucuucaugcagaucgccauccucaucaccaccgucacccuccacuucaagcagugcgaguucaacuccccccccaacaaccaggucaugcucugcgagcccaccaucaucgagcgcaacaucaccgagaucgucuaccucaccaacaccaccaucgagaaggagaucugccccaagcucgccgaguaccgcaacugguccaagccccagugcaacaucaccggcuucgcccccuucuccaaggacaacuccauccgccucuccgccggcggcgacaucugggucacccgcgagcccuacgucuccugcgaccccgacaagugcuaccaguucgcccucggccagggcaccacccucaacaacguccacuccaacgacaccguccacgaccgcacccccuaccgcacccuccucaugaacgagcucggcguccccuuccaccucggcaccaagcaggucugcaucgccugguccuccuccuccugccacgacggcaaggccuggcuccacgucugcgucaccggcgacgacaagaacgccaccgccuccuucaucuacaacggccgccucgucgacuccaucgucuccugguccaaggagauccuccgcacccaggaguccgagugcgucugcaucaacggcaccugcaccgucgucaugaccgacggcuccgccuccggcaaggccgacaccaagauccucuucaucgaggagggcaagaucguccacaccuccacccucuccggcuccgcccagcacgucgaggagugcuccugcuacccccgcuaccccggcguccgcugcgucugccgcgacaacuggaagggcuccaaccgccccaucgucgacaucaacaucaaggacuacuccaucgucuccuccuacgucugcuccggccucgucggcgacaccccccgcaagaacgacuccuccuccuccucccacugccucgaccccaacaacgaggagggcggccacggcgucaagggcugggccuucgacgacggcaacgacgucuggaugggccgcaccaucuccgagaagcuccgcuccggcuacgagaccuucaaggucaucgagggcugguccaaccccaacuccaagcuccagaucaaccgccaggucaucgucgaccgcggcaaccgcuccggcuacuccggcaucuucuccgucgagggcaaguccugcaucaaccgcugcuucuacgucgagcucauccgcggccgcaaggaggagaccgagguccucuggaccuccaacuccaucgucgucuucugcggcaccuccggcaccuacggcaccggcuccuggcccgacggcgccgacaucaaccucaugcccaucuga

SEQ ID NO: 122166 - RNA, 1410 nt, Artificial Sequence
  derived and/or modified CDS sequence (opt2) from neuraminidase__InfluenzaA__BAF57591
augaaccccaaccagaagaucaucaccaucggcuccgucucccucaccaucuccaccaucugcuucuucaugcagaucgccauccucaucaccaccgucacccuccacuucaagcaguacgaguucaacuccccccccaacaaccaggucaugcucugcgagcccaccaucaucgagcgcaacaucaccgagaucgucuaccucaccaacaccaccaucgagaaggagaucugccccaagcucgccgaguaccgcaacugguccaagccccagugcgacaucaccggcuucgcccccuucuccaaggacaacuccauccgccucuccgccggcggcgacaucugggucacccgcgagcccuacgucuccugcgaccccgacaagugcuaccaguucgcccucggccagggcaccacccucaacaacguccacuccaacgacaccguccacgaccgcacccccuaccgcacccuccucaugaacgagcucggcguccccuuccaccucggcaccaagcaggucugcaucgccugguccuccuccuccugccacgacggcaaggccuggcuccacgucugcgucaccggcgacgacaagaacgccaccgccuccuucaucuacaacggccgccucgucgacuccaucgucuccugguccaaggagauccuccgcacccaggaguccgagugcgucugcaucaacggcaccugcaccgucgucaugaccgacggcuccgccuccggcaaggccgacaccaagauccucuucaucgaggagggcaagaucguccacaccuccacccucuccggcuccgcccagcacgucgaggagugcuccugcuacccccgcuaccccggcguccgcugcgucugccgcgacaacuggaagggcuccaaccgccccaucguccacaucaacaucaaggacuacuccaucgucuccuccuacgucugcuccggccucgucggcgacaccccccgcaagaacgacuccuccuccuccucccacugccucaaccccaacaacgaggagggcggccacggcgucaagggcugggccuucgacgacggcaacgacgucuggaugggccgcaccaucuccgagaagcuccgccucggcuacgagaccuucaaggucaucgagggcugguccaaccccaacuccaagcuccagaucaaccgccaggucaucgucgaccgcggcaaccgcuccggcuacuccggcaucuucuccgucgagggcaaguccugcaucaaccgcugcuucuacgucgagcucauccgcggccgcaaggaggagaccgagguccucuggaccuccaacuccaucgucgucuucugcggcaccuccggcaccuacggcaccggcuccuggcccgacggcgccgacaucaaccucaugcccaucuga

SEQ ID NO: 122167 - RNA, 1410 nt, Artificial Sequence
  derived and/or modified CDS sequence (opt2) from neuraminidase__InfluenzaA__BAF57595
augaaccccaaccagaagaucaucaccaucggcuccgucucccucaccaucuccaccaucugcuucuucaugcagaucgccauccucaucaccaccgucacccuccacuucaagcaguacgaguucaacuccccccccaacaaccaggucaugcucugcgagcccaccaucaucgagcgcaacaucaccgagaucgucuaccucaccaacaccaccaucgagaaggagaucugccccaagaucgccgaguaccgcaacugguccaagccccagugcaacaucaccggcuucgcccccuucuccaaggacaacuccauccgccucuccgccggcggcgacaucugggucacccgcgagcccuacgucuccugcgaccccgacaagugcuaccaguucgcccucggccagggcaccacccucaacaacguccacuccaacgacaccguccacgaccgcacccccuaccgcacccuccucaugaacgagcucggcguccccuuccaccucggcaccaagcaggucugcaucgccugguccuccuccuccugccacgacggcaaggccuggcuccacgucugcgucaccggcgacgacaagaacgccaccgccuccuucaucuacaacggccgccucgucgacuccaucgucuccugguccaaggagauccuccgcacccaggaguccgagugcgucugcgucaacggcaccugcaccgucgucaugaccgacggcuccgccuccggcaaggccgacaccaagauccucuucaucgaggagggcaagaucguccacaccuccacccucuccggcuccgcccagcacgucgaggagugcuccugcuacccccgcuaccccggcguccgcugcgucugccgcgacaacuggaagggcuccaaccgccccaucgucgacaucaacaucaaggacuacuccaucgucuccuccuacgucugcuccggccucgucggcgacaccccccgcaagaacgacuccuccuccuccucccacugccucgaccccaacaacgaggagggcggccacggcgucaagggcugggccuucgacgacggcaacgacgucuggaugggccgcaccaucuccgagaagcuccgcuccggcuacgagaccuucaaggucaucgagggcugguccaaccccaacuccaagcuccagaucaaccgccaggucaucgucgaccgcggcaaccgcuccggcuacuccggcaucuucuccgucgagggcaaguccugcaucaaccgcugcuucuacgucgagcucauccgcggccgcaaggaggagaccgagguccucuggaccuccaacuccaucgucgucuucugcggcaccuccggcaccuacggcaccggcuccuggcccgacggcgccgacaucaaccucaugcccaucuga

SEQ ID NO: 122168 - RNA, 1410 nt, Artificial Sequence; identical to SEQ ID NO: 117492
  derived and/or modified CDS sequence (opt2) from neuraminidase__InfluenzaA__BAF57599

SEQ ID NO: 122169 - RNA, 1410 nt, Artificial Sequence
  derived and/or modified CDS sequence (opt2) from neuraminidase__InfluenzaA__BAF57603
augaaccccaaccagaagaucaucaccaucggcuccgucucccucaccaucuccaccaucugcuucuucaugcagaucgccauccucaucaccaccgucacccuccacuucaagcaguacgaguucaacuccccccccaacaaccaggucaugcucugcgagcccaccaucaucgagcgcaacaucaccgagaucgucuaccucaccaacaccaccaucgagaaggagaucugccccaagcucgccgaguaccgcaacugguccaagccccagugcaacaucaccggcuucgcccccuucuccaaggacaacuccauccgccucuccgccggcggcgacaucugggucacccgcgagcccuacgucuccugcgaccccgacaagugcuaccaguucgcccucggccagggcaccacccucaacaacguccacuccaacgacaccguccacgaccgcacccccuaccgcacccuccucaugaacgagcucggcguccccuuccaccucggcaccaagcaggucugcaucgccugguccuccuccuccugccacgacggcaaggccuggcuccacgucugcgucaccggcgacgacaagaacgccaccgccuccuucaucuacaacggccgccucgucgacuccaucgucuccugguccaaggagauccuccgcacccaggaguccgagugcgucugcaucaacggcaccugcaccgucgucaugaccgacggcuccgccuccggcaaggccgacaccaagauccucuucaucgaggagggcaagaucguccacaccuccacccucuccggcuccgcccagcacgucgaggagugcuccugcuacccccgcuaccccggcguccgcugcgucugccgcgacaacuggaagggcuccaaccgccccaucgucgacaucaacaucaaggacuacuccaucgucuccuccuacgucugcuccggccucgucggcgacaccccccgcaagaacgacuccuccuccuccucccacugccucgaccccaacaacgaggagggcggccacggcgucaagggcugggccuucgacgacggcaacgacgucuggaugggccgcaccaucuccgagaagcuccgcuccggcuacgagaccuucaaggucaucgagggcugguccaaccccgacuccaagcuccagaucaaccgccaggucaucgucgaccgcggcaaccgcuccggcuacuccggcaucuucuccgucgagggcaaguccugcaucaaccgcugcuucuacgucgagcucauccgcggccgcaaggaggagaccgagguccucggcaccuccaacuccaucgucgucuucugcggcaccuccggcaccuacggcaccggcuccuggcccgacggcgccgacaucaaccucaugcccaucuga

SEQ ID NO: 122170 - RNA, 1410 nt, Artificial Sequence; identical to SEQ ID NO: 117587
  derived and/or modified CDS sequence (opt2) from Neuraminidase__InfluenzaA__BAF62620

SEQ ID NO: 122171 - RNA, 1413 nt, Artificial Sequence
  derived and/or modified CDS sequence (opt2) from neuraminidase__InfluenzaA__BAF63036
augaaccccaaccagaagaucaucaccaucggcuccaucuccaucgccaucggcaucaucucccucaugcuccagaucggcaacaucaucuccaucugggccucccacuccauccagaccggcucccagaaccacaccggcaucugcaaccagcgcaucaucaccuacgagaacuccaccugggucaaccacaccuacgucaccaucaacaacaccaacgucgucgccggcaaggacaagaccuccgucacccucgccggcaacuccucccucugcuccaucuccggcugggccaucuacaccaaggacaacuccauccgcaucggcuccaagggcgacgucuucgucauccgcgagcccuucaucuccugcucccaccucgagugccgcaccuucuuccucacccagggcgcccuccucaacgacaagcacuccaacggcaccgucaaggaccgcucccccuaccgcgcccucauguccugcccccucggcgaggcccccucccccuacaacuccaaguucgaguccgucgccugguccgccuccgccugccacgacggcaugggcuggcucaccaucggcaucuccggccccgacaacggcgccgucgccguccucaaguacaacggcaucaucaccgagaccaucaaguccuggaagaagcgcauccuccgcacccaggaguccgagugcgucugcgucaacggcuccugcuucaccaucaugaccgacggccccuccaacggcgccgccuccuacaagaucuucaagaucgagaagggcaaggucaccaaguccaucgagcucaacgcccccaacuuccacuacgaggagugcuccugcuaccccgacaccggcaccgucaugugcgucugccgcgacaacuggcacggcuccaaccgccccugggucuccuucaaccagaaccucgacuaccagaucggcuacaucugcuccggcgucuucggcgacaacccccgccccaaggacggcaagggcuccugcaaccccgucaccgucgacggcgccgacggcgucaagggcuucuccuacaaguacggcaacggcgucuggaucggccgcaccaaguccaaccgccuccgcaagggcuucgagaugaucugggaccccaacggcuggaccgacaccgacuccgacuucuccgucaagcaggacgucgucgccaucaccgacugguccggcuacuccggcuccuucguccagcaccccgagcucaccggccucgacugcauccgccccugcuucugggucgagcucguccgcggccucccccgcgagaacaccaccaucuggaccuccggcuccuccaucuccuucugcggcgucaacuccgacaccgccaacugguccuggcccgacggcgccgagcuccccuucaccaucgacaaguga

SEQ ID NO: 122172 - RNA, 1413 nt, Artificial Sequence; identical to SEQ ID NO: 117477
  derived and/or modified CDS sequence (opt2) from neuraminidase__InfluenzaA__BAF63040

SEQ ID NO: 122173 - RNA, 1413 nt, Artificial Sequence
  derived and/or modified CDS sequence (opt2) from neuraminidase__InfluenzaA__BAF63047
augaaccccaaccagaagaucaucaccaucggcuccaucuccaucgccaucggcaucaucucccucguccuccagaucggcaacaucaucuccaucugggccucccacuccauccagaccggcucccagaaccacaccggcaucugcaaccagcgcaucaucaccuacgagaacuccaccugggucaaccacaccuacgucaacaucaacaacaccaacgucgucgccggcaaggacaagaccuccgucacccucgccggcaacuccucccucugcuccaucuccggcugggccaucuacaccaaggacaacuccauccgcaucggcuccaagggcgacgucuucgucauccgcgagcccuucaucuccugcucccaccucgagugccgcaccuucuuccucacccagggcgcccuccucaacgacaagcacuccaacggcaccgucaaggaccgcucccccuaccgcgcccucauguccugcccccucggcgaggcccccucccccuacaacuccaaguucgaguccgucgccugguccgccuccgccugccacgacggcaugggcuggcucaccaucggcaucuccggccccgacaacggcgccgucgccguccucaaguacaacggcaucaucaccgagaccaucaaguccuggaagaagcgcauccuccgcacccaggaguccgagugcgucugcgucaacggcuccugcuucaccaucaugaccgacggccccuccaacggcgccgccuccuacaagaucuucaagaucgagaagggcaaggucaccaaguccaucgagcucaacgcccccaacuuccacuacgaggagugcuccugcuaccccgacaccggcaccgucaugugcgucugccgcgacaacuggcacggcuccaaccgccccugggucuccuucaaccagaaccucgacuaccagaucggcuacaucugcuccggcgucuucggcgacaacccccgccccaaggacggcgagggcuccugcaaccccgucaccgucgacggcgccgacggcgucaagggcuucuccuacaaguacggcaacggcgucuggaucggccgcaccaaguccaaccgccuccgcaagggcuucgagaugaucugggaccccaacggcuggaccgacaccgacuccgacuucuccgucaagcaggacgucgucgccaucaccgacugguccggcuacuccggcuccuucguccagcaccccgagcucaccggccucgacugcauccgccccugcuucugggucgagcucguccgcggccucccccgcgagaacaccaccaucuggaccuccggcuccuccaucuccuucugcggcgucaacuccgacaccgccgacugguccuggcccgacggcgccgagcuccccuucaccaucgacaaguga

SEQ ID NO: 122174 - RNA, 1413 nt, Artificial Sequence
  derived and/or modified CDS sequence (opt2) from neuraminidase__InfluenzaA__BAF63058
augaaccccaaccagaagaucaucaccaucggcuccaucuccaucgccaucggcaucaucucccucaugcuccagaucggcaacaucaucuccaucugggccucccacuccauccagaccggcucccagaaccacaccggcaucugcaaccagcgcaucaucaccuacgagaacuccaccugggucaaccacaccuacgucaacaucaacaacaccaacgucgucgccggcaaggacaagaccuccgucacccucgccggcaacuccucccucugcgccaucuccggcugggccaucuacaccaaggacaacuccauccgcaucggcuccaagggcgacgucuucgucauccgcgagcccuucaucuccugcucccaccucgagugccgcaccuucuuccucacccagggcgcccuccucaacgacaagcacuccaacggcaccgucaaggaccgcucccccuaccgcgcccucauguccugcccccucggcgaggcccccucccccuacaacuccaaguucgaguccgucgccugguccgccuccgccugccacgacggcaugggcuggcucaccaucggcaucuccggccccgacaacggcgccgucgccguccucaaguacaacggcaucaucaccgagaccaucaaguccuggaagaagcgcauccuccgcacccaggaguccgagugcgucugcgucaacggcuccugcuucaccaucaugaccgacggccccuccaacgaggccgccuccuacaagaucuucaagaucgagaagggcaaggucaccaaguccaucgagcucaacgcccccaacuuccacuacgaggagugcuccugcuaccccgacaccggcaccgucaugugcgucugccgcgacaacuggcacggcuccaaccgccccugggucuccuucaaccccaaccucgacuaccagaucggcuacaucugcuccggcgucuucggcgacaacccccgccccaaggacggcgagggcuccugcaaccccgucaccgucgacggcgccgacggcgucaagggcuucuccuacaaguacggcaacggcgucuggaucggccgcaccaaguccaaccgccuccgcaagggcuucgagauggucugggaccccaacggcuggaccgacaccgacuccgacuucuccgucaagcaggacgucgucgccaucaccgacugguccggcuacuccggcuccuucguccagcaccccgagcucaccggccucgacugcauccgccccugcuucugggucgagcucguccgcggccuccccaaggagaacaccaccaucuggaccuccggcuccuccaucuccuucugcggcgucaacuccgacaccgccaacugguccuggcccgacggcgccgagcuccccuucaccaucgacaaguga

SEQ ID NO: 122175 - RNA, 1413 nt, Artificial Sequence; identical to SEQ ID NO: 117477
  derived and/or modified CDS sequence (opt2) from neuraminidase__InfluenzaA__BAF63065

SEQ ID NO: 122176 - RNA, 1413 nt, Artificial Sequence; identical to SEQ ID NO: 117477
  derived and/or modified CDS sequence (opt2) from neuraminidase__InfluenzaA__BAF63069

SEQ ID NO: 122177 - RNA, 1413 nt, Artificial Sequence; identical to SEQ ID NO: 117477
  derived and/or modified CDS sequence (opt2) from neuraminidase__InfluenzaA__BAF63079

SEQ ID NO: 122178 - RNA, 1413 nt, Artificial Sequence; identical to SEQ ID NO: 117477
  derived and/or modified CDS sequence (opt2) from neuraminidase__InfluenzaA__BAF63092

SEQ ID NO: 122179 - RNA, 1413 nt, Artificial Sequence; identical to SEQ ID NO: 117477
  derived and/or modified CDS sequence (opt2) from neuraminidase__InfluenzaA__BAF63098

SEQ ID NO: 122180 - RNA, 1413 nt, Artificial Sequence
  derived and/or modified CDS sequence (opt2) from neuraminidase__InfluenzaA__BAF63104
augaaccccaaccagaagaucaucaccaucggcuccaucuccaucgccaucggcaucaucucccucaugcuccaggucggcaucgucgucuccaucugggccucccacuccauccagaccggcucccagaaccacaccggcaucugcaaccagcgcaucaucaccuacgagaacuccaccugggucaaccacaccuacgucaacaucaacaacaccaacgucgucgccggcaaggacaagaccuccgucgcccucgccggcaacuccucccucugcuccaucuccggcugggccaucuacaccaaggacaacuccauccgcaucggcuccaagggcgacgucuucgucauccgcgagcccuucaucuccugcucccaccucgagugccgcaccuucuuccucacccagggcgcccuccucaacgacaagcacuccaacggcaccgucaaggaccgcucccccuaccgcgcccucauguccugcccccucggcgaggcccccucccccuacaacuccaaguucgaguccgucgccugguccgccuccgccugccacgacggcaugggcuggcucaccaucggcaucuccggccccgacaacggcgccgucgccguccucaaguacaacggcaucaucaccgagaccaucaaguccuggaagaagcgcauccuccgcacccaggaguccgagugcgucugcgucaacggcuccugcuucaccaucaugaccgacggccccuccaacggcgccgccuccuacaagaucuucaagaucgagaagggccaggucaccaaguccgucgagcucaacgcccccaacuuccacuacgaggagugcuccugcuaccccgacaccggcaccgucaugugcgucugccgcgacaacuggcacggcuccaaccgccccugggucuccuucaaccagaaccucgacuaccagaucggcuacaucugcuccggcgucuucggcgacaacccccgccccaaggacggcaagggcuccugcaaccccgucaccgucgacggcgccgacggcgucaagggcuucuccuacaaguacggcaacggcgucuggaucggccgcaccaaguccaaccgccuccgcaagggcuucgagaugaucugggaccccaacggcuggaccgacaccgacuccgacuucuccgucaagcaggacgucgucgccaucaccgacugguccggcuacuccggcuccuucguccagcaccccgagcucaccggccucgacugcauccgccccugcuucugggucgagcucguccgcggccucccccgcgagaacaccaccaucuggaccuccggcuccuccaucuccuucugcggcgucgacuccgacaccgccaacugguccuggcccgacggcgccgagcuccccuucaccaucgacaaguga

SEQ ID NO: 122181 - RNA, 1413 nt, Artificial Sequence
  derived and/or modified CDS sequence (opt2) from neuraminidase__InfluenzaA__BAF63112
augaaccccaaccagaagaucaucaccaucggcuccaucuccaucgccaucggcaucaucucccucaugcuccaggucggcaacaucaucuccaucugggccucccacuccauccagaccggcucccagaaccacaccggcaucugcaaccagcgcaucaucaccuacgagaacuccaccugggucaaccacaccuacgucaacaucaacaacaccaacgucgucgccggcaaggacaagaccuccgucgcccucgccggcaacuccucccucugcuccaucuccggcugggccaucuacaccaaggacaacuccauccgcaucggcuccaagggcgacgucuucgucauccgcgagcccuucaucuccugcucccaccucgagugccgcaccuucuuccucacccagggcgcccuccucaacgacaagcacuccaacggcaccgucaaggaccgcucccccuaccgcgcccucauguccugcccccucggcgaggcccccucccccuacaacuccaaguucgaguccgucgccugguccgccuccgccugccacgacggcaugggcuggcucaccaucggcaucuccggccccgacaacggcgccgucgccguccucaaguacaacggcaucaucaccgagaccaucaaguccuggaagaagcgcauccuccgcacccaggaguccgagugcgucugcgucaacggcuccugcuucaccaucaugaccgacggccccuccaacggcgccgccuccuacaagaucuucaagaucgagaagggccaggucaccaaguccgucgagcucaacgcccccaacuuccacuacgaggagugcuccugcuaccccgacaccggcaccgucaugugcgucugccgcgacaacuggcacggcuccaaccgccccugggucuccuucaaccagaaccucgacuaccagaucggcuacaucugcuccggcgucuucggcgacaacccccgccccaaggacggcaagggcuccugcaaccccgucaccgucgacggcgccgacggcgucaagggcuucuccuacaaguacggcaacggcgucuggaucggccgcaccaaguccaaccgccuccgcaagggcuucgagaugaucugggaccccaacggcuggaccgacaccgacuccgacuucuccgucaagcaggacgucgucgccaucaccgacugguccggcuacuccggcuccuucguccagcaccccgagcucaccggccucgacugcauccgccccugcuucugggucgagcucguccgcggccucccccgcgagaacaccaccaucuggaccuccggcuccuccaucuccuucugcggcgucgacuccgacaccgccaacugguccuggcccgacggcgccgagcuccccuucaccaucgacaaguga

SEQ ID NO: 122182 - RNA, 1413 nt, Artificial Sequence
  derived and/or modified CDS sequence (opt2) from neuraminidase__InfluenzaA__BAF63116
augaaccccaaccagaagaucaucaccaucggcuccaucuccaucgccaucggcaucaucucccucaugcuccaggucggcaacaucaucuccaucugggccucccacuccauccagaccggcucccagaaccacaccggcaucugcaaccagcgcaucaucaccuacgagaacuccaccugggucaaccacaccuacgucaacaucaacaacaccaacgucgucgccggcaaggacaagaccuccgucgcccucgccggcaacuccucccucugcuccaucuccggcugggccaucuacaccaaggacaacuccauccgcaucggcuccaagggcgacgucuucgucauccgcgagcccuucaucuccugcucccaccucgagugccgcaccuucuuccucacccagggcgcccuccucaacgacaagcacuccaacggcaccgucaaggaccgcucccccuaccgcgcccucauguccugcccccucggcgaggcccccucccccuacaacuccaaguucgaguccgucgccugguccgccuccgccugccacgacggccucggcuggcucaccaucggcaucuccggccccgacaacggcgccgucgccguccucaaguacaacggcaucaucaccgagaccaucaaguccuggaagaagcgcauccuccgcacccaggaguccgagugcgucugcgucaacggcuccugcuucaccaucaugaccgacggccccuccaacggcgccgccuccuacaagaucuucaagaucgagaagggccaggucaccaaguccgucgagcucaacgcccccaacuuccacuacgaggagugcuccugcuaccccgacaccggcaccgucaugugcgucugccgcgacaacuggcacggcuccaaccgccccugggucuccuucaaccccgaccucgacuaccagaucggcuacaucugcuccggcgucuucggcgacaacccccgccccaaggacggcaagggcuccugcaaccccgucaccgucgacggcgccgacggcgucaagggcuucuccuacaaguacggcaacggcgucuggaucggccgcaccaaguccaaccgccuccgcaagggcuucgagaugaucugggaccccaacggcuggaccgacaccgacuccgacuucuccgucaagcaggacgucgucgccaucaccgacugguccggcuacuccggcuccuucguccagcaccccgagcucaccggccucgacugcauccgccccugcuucugggucgagcucguccgcggccucccccgcgagaacaccaccaucuggaccuccggcuccuccaucuccuucugcggcgucgacuccgacaccgccaacugguccuggcccgacggcgccgagcuccccuucaccaucgacaaguga

SEQ ID NO: 122183 - RNA, 1413 nt, Artificial Sequence
  derived and/or modified CDS sequence (opt2) from neuraminidase__InfluenzaA__BAF63124
augaaccccaaccagaagaucaucaccaucggcuccaucuccaucgccaucggcaucaucucccucaugcuccagaucggcaacaucaucuccaucugggccucccacuccauccagaccggcucccagaaccacaccggcaucugcaaccagcgcaucaucaccuacgagaacuccaccugggucaaccacaccuacgucaacaucaacaacaccaacgucgucgccggcaaggacaagaccuccgucacccucgccggcaacuccucccucugcuccaucuccggcugggccaucuacaccaaggacaacuccauccgcaucggcuccaagggcgacgucuucgucauccgcgagcccuucaucuccugcucccaccucgagugccgcaccuucuuccucacccagggcgcccuccucaacgacaagcacuccaacggcaccgucaaggaccgcucccccuaccgcgcccucauguccugcccccucggcgaggcccccucccccuacaacuccaaguucgaguccgucgccugguccgccuccgccugccacgacggcaugggcuggcucaccaucggcaucuccggccccgacaacggcgccgucgccguccucaaguacaacggcaucaucaccgagaccaucaaguccuggaagaagcgcauccuccgcacccaggaguccgagugcgucugcgucaacggcuccugcuucaccaucaugaccgacggccccuccaacggcgccgccuccuacaagaucuucaagaucgagaagggcaaggucaccaagucccgcgagcucaacgcccccaacuuccacuacgaggagugcuccugcuaccccgacaccggcaccgucaugugcgucugccgcgacaacuggcacggcuccaaccgccccugggucuccuucaaccccaaccucgacuaccagaucggcuacaucugcuccggcgucgucggcgacaacccccgccccaaggacggcaagggcuccugcaaccccgucaccgccgacggcgccgacggcgucaagggcuucuccuacaaguacggcaacggcgucuggaucggccgcaccaaguccaaccgccuccgcaagggcuucgagaugaucugggaccccaacggcuggaccgacaccgacuccgacuucuccgucaagcaggacgucgucgccaucaccgacugguccggcuacuccggcuccuucguccagcaccccgagcucaccggccucgacugcauccgccccugcuucugggucgagcucguccgcggccucccccgcgagaacaccaccaucuggaccuccggcuccuccaucuccuucugcggcgucgacuccgacaccgccaacugguccuggcccgacggcgccgagcuccccuucaccaucgacaaguga

SEQ ID NO: 122184 - RNA, 1413 nt, Artificial Sequence; identical to SEQ ID NO: 117539
  derived and/or modified CDS sequence (opt2) from neuraminidase__InfluenzaA__BAF63132

SEQ ID NO: 122185 - RNA, 1413 nt, Artificial Sequence
  derived and/or modified CDS sequence (opt2) from neuraminidase__InfluenzaA__BAF63136
augaaccccaaccagaagaucaucaccaucggcuccaucuccaucgccaucggcaucaucucccucaugcuccagaucggcaacaucaucuccaucugggccucccacuccauccagaccggcucccagaaccacaccggcaucugcaaccagcgcaucaucaccuacgagaacuccaccugggucaaccacaccuacgucaacaucaacaacaccaacgucgucgccggcaaggacaagaccuccgucacccucgccggcaacuccucccucugcuccaucuccggcugggccaucuacaccaaggacaacuccauccgcaucggcuccaagggcgacgucuucgucauccgcgagcccuucaucuccugcucccaccucgagugcaagaccuucuuccucacccagggcgcccuccucaacgacaagcacuccaacggcaccgucaaggaccgcucccccuaccgcgcccucauguccugcccccucggcgaggcccccucccccuacaacuccaaguucgaguccgucgccugguccgccuccgccugccacgacggcaugggcuggcucaccaucggcaucuccggccccgacaacggcgccgucgccguccucaaguacaacggcaucaucaccggcaccaucaaguccuggaagaagcagauccuccgcacccaggaguccgagugcgucugcaugaacggcuccugcuucaccaucaugaccgacggccccuccaacggcgccgccuccuacaagaucuucaagaucgagaagggcaaggucaccaaguccaucgagcucaacgcccccaacuuccacuacgaggagugcuccugcuaccccgacaccggcaccgucaugugcgucugccgcgacaacuggcacggcuccaaccgccccugggucuccuucaaccagaaccucgacuaccagaucggcuacaucugcuccggcgucuucggcgacaacccccgccccaaggacggcgagggcuccugcaaccccgucaccgucgacggcgccaacggcgucaagggcuucuccuacaaguacggcaacggcgucuggaucggccgcaccaaguccaaccgccuccgcaagggcuucgagaugaucugggaccccaacggcuggaccaacaccgacuccgacuucuccgucaagcaggacgucgucgccaucaccgacugguccggcuacuccggcuccuucguccagcaccccgagcucaccggccucgacugcauccgccccugcuucugggucgagcucguccgcggccucccccgcgagaacaccaccaucuggaccuccggcuccuccaucuccuucugcggcgucaacuccgacaccgccaacugguccuggcccgacggcgccgagcuccccuucaccaucgacaaguga

SEQ ID NO: 122186 - RNA, 1350 nt, Artificial Sequence
  derived and/or modified CDS sequence (opt2) from neuraminidase__InfluenzaA__BAH24021
augaaccccaaccagaagaucaucaccaucggcuccaucugcauggucaucggcaucgucucccucaugcuccagaucggcaacauggucucccucugggucucccacuccauccagaccggcaaccagcaccaggucgagcccaucuccaacaccaacuuccucaccgagaaggccgucgccuccgucacccucgccggcaacuccucccucugccccauccgcggcugggccguccacuccaaggacaacuccauccgcaucggcuccaagggcgacgucuucgucauccgcgagcccuucaucuccugcucccaccucgagugccgcaccuucuuccucacccagggcgcccuccucaacgacaagcacuccaacggcaccgucaaggaccgcuccccccaccgcacccucauguccugccccgucggcgaggcccccucccccuacaacucccgcuucgaguccgucgccugguccgccuccgccugccacgacggcaccuccuggcucaccaucggcaucuccggccccgacaacggcgccgucgccguccucaaguacaacggcaugaucaccgacaccaucaaguccuggcgcaacaacauccuccgcacccaggaguccgagugcgccugcgucaacggcuccugcuucaccgucaugaccgacggccccuccaacggccaggccuccuacaagaucuucaagauggagaagggcaaggucgucaaguccgucgagcucgacgcccccaacuaccacuacgaggagugcuccugcuaccccgacgccggcgagaucaccugcgucugccgcgacaacuggcacggcuccaaccgccccugggucuccuucaaccagaaccucgaguaccagaucggcuacaucugcuccggcgucuucggcgacaacccccgccccaacggcggcaccggcuccugcggccccgucucccccaacggcgccuacggcgucaagggcuucuccuucaaguacggcaacggcgucuggaucggccgcaccaagucccccuccucccgcuccggcuucgagaugaucugggaccccaacggcuggaccgagaccgacuccuccuucuccgucaagcaggacaucgucgccaucaccgacugguccggcuacuccggcuccuucguccagcaccccgagcucaccggccucgacugcauccgccccugcuucugggucgagcucauccgcggccgccccaaggaguccaccaucuggaccuccggcuccuccaucuccuucugcggcgucaacuccgacaccgucuccugguccuggcccgacggcgccgagcuccccuucaccaucgacaaguga

SEQ ID NO: 122187 - RNA, 1410 nt, Artificial Sequence; identical to SEQ ID NO: 112929
  derived and/or modified CDS sequence (opt2) from neuraminidase__InfluenzaA__BAH95825

SEQ ID NO: 122188 - RNA, 1410 nt, Artificial Sequence; identical to SEQ ID NO: 112764
  derived and/or modified CDS sequence (opt2) from neuraminidase__InfluenzaA__BAH95826

SEQ ID NO: 122189 - RNA, 1410 nt, Artificial Sequence
  derived and/or modified CDS sequence (opt2) from neuraminidase__InfluenzaA__BAJ07994
augaaccccaaccagaagaucaccaccaucggcuccaucugcauggucaucggcaucgucucccucaugcuccagaucggcaacaucaucuccaucugggucucccacuccauccagaccggcaaccagcaccaggccgagcccugcaaccaguccaucaucaccuacgagaacaacaccugggucaaccagaccuacgucaacaucuccaacaccaacuuccucaccgagaaggccgucgccuccgucacccucgccggcaacuccucccucugccccaucuccggcugggccgucuacuccaaggacaacggcauccgcaucggcuccaagggcgacgucuucgucauccgcgagcccuucaucuccugcucccaccucgagugccgcaucuucuuccucacccagggcgcccuccucaacgacaagcacuccaacggcaccgucaaggaccgcuccccccaccgcacccucauguccugccccgucggcgaggcccccucccccuacaacucccgcuucgaguccgucgccugguccgccuccgccugccacgacggcaccuccuggcucaccaucggcaucuccggccccgacaacggcgccgucgccguccucaaguacaacggcaucaucaccgacaccaucaaguccuggcgcaacaacaucaugcgcacccaggaguccgagugcgccugcgucaacggcuccugcuucaccgucaugaccgacggccccuccaacggccaggccuccuacaagaucuuccgcaucgagaagggcaaggucgucaaguccgccgagcucaacgcccccaacuaccacuacgaggagugcuccugcuaccccgacgccggcgagaucaccugcgucugccgcgacaacuggcacggcuccaaccgccccugggucuccuucaaccagaaccucgaguaccgcaucggcuacaucugcuccggcgucuucggcgacaacccccgccccaacgacggcaccggcuccugcggccccgucucccccaagggcgccuacggcaucaagggcuucuccuucaaguacggcaacggcgucuggaucggccgcaccaaguccaccaacucccgcuccggcuucgagaugaucugggaccccaacggcuggaccggcaccgacuccaacuucuccgucaagcaggacaucgucgccaucaccgacugguccggcuacuccggcuccuucguccagcaccccgagcucaccggccucgacugcauccgccccugcuucugggucgagcucauccgcggccgccccaaggaguccaccaucuggaccuccggcuccuccaucuccuucugcggcgucaacuccgacaccgucggcugguccuggcccgacggcgccgagcuccccuucaccaucgacaaguga

SEQ ID NO: 122190 - RNA, 1350 nt, Artificial Sequence
  derived and/or modified CDS sequence (opt2) from neuraminidase__InfluenzaA__BAK23415
augaaccccaaccagaagaucaucaccaucggcuccgucugcaugaucaucggcaucgucucccucaugcuccagaucggcaacaugaucuccaucugggucggccacuccauccagaccggcaaccagugccacgccgagcccaucuccaacaccaaguuccccaccgagaaggccgccgccuccgucacccucgccggcaacuccucccucugccccaucuccggcugggccgucuacuccaaggacaacuccauccgcaucggcucccgcggcgacgucuucgucauccgcgagcccuucaucuccugcucccaccucgagugccgcaccuucuuccucacccagggcgcccuccucaacgacaagcacuccaacggcaccgucaaggaccgcuccccccaccgcacccucauguccugccccgucggcgaggcccccucccccuacaacucccgcuucgaguccgucgccugguccgccuccgccugccacgacggcaccuccuggcucaccaucggcaucuccggccccgacaacggcgccgucgccguccucaaguacaacggcaucaucaccgacaccaucaaguccuggcgcaacaacauccuccgcacccaggaguccgagugcgccugcaucaacggcuccugcuucaccgucaugaccgacggccccuccuccggccaggccuccuacaagaucuucaagauggagaagggcaaggucgucaaguccgucgagcucgacgcccccaacuaccacuacgaggagugcuccugcuaccccgacgccggcgagaucaccugcgucugccgcgacaacuggcacggcuccaaccgccccugggucuccuucaaccagaaccucgaguaccagaucggcuacaucugcuccggcgucuucggcgacaacccccgccccaacgacggcaccggcuccugcggccccgucucccccaacggcgccuacggcgucaagggcuucuccuucaaguacggcaacggcgucuggaucggccgcaccaaguccaccaacucccgcuccggcuucgagaugaucugggaccccaacggcuggaccggcaccgacuccuccuucuccgucaagcaggacaucgucgccaucaccgacugguccggcuacuccggcuccuucguccagcaccccgagcucaccggccucgacugcauccgccccugcuucugggucgagcucauccgcggccgccccaaggaguccaccaucuggaccuccggcuccuccaucuccuucugcggcgucaacuccgacaccgucuccugguccuggcccgacggcgccgagcuccccuucaccaucgacaaguga

SEQ ID NO: 122191 - RNA, 1350 nt, Artificial Sequence
  derived and/or modified CDS sequence (opt2) from neuraminidase__InfluenzaA__BAK23416
augaaccccaaccagaagaucaucaccaucggcuccaucugcauggucaucggcaucgucucccucaugcuccagaucggcaacaugaucuccaucugggucucccacuccauccagaccggcaaccagugccaggccgagcccaucuccaacaccaaguuccucaccgagaaggccgucgccuccgucacccucgccggcaacuccucccucugccccaucuccggcugggccgucuacuccaaggacaacuccauccgcaucggcucccgcggcgacgucuucgucauccgcgagcccuucaucuccugcucccaccucgagugccgcaccuucuuccucacccagggcgcccuccucaacgacaagcacuccaacggcaccgucaaggaccgcuccccccaccgcacccucauguccugccccgucggcgaggcccccucccccuacaacucccgcuucgaguccgucgccugguccgccuccgccugccacgacggcaccuccuggcucaccaucggcaucuccggccccgacaacggcgccgucgccguccucaaguacaacggcaucaucaccgacaccaucaaguccuggcgcaacaacauccuccgcacccaggaguccgagugcgccugcgucaacggcuccugcuucaccgucaugaccgacggccccuccuccggccaggccuccuacaagaucuucaagauggagaagggcaaggucgucaaguccgucgagcucgacgcccccaacuaccacuacgaggagugcuccugcuaccccgacgccggcgagaucaccugcgucugccgcgacaacuggcacggcuccaaccgccccugggucuccuucaaccagaaccucgaguaccagaucggcuacaucugcuccggcgucuucggcgacaacccccgccccaacgacggcaccggcuccugcggccccgccucccccaacggcgccuacggcgucaagggcuucuccuucaaguacggcaacggcgucuggaucggccgcaccaaguccaccaacucccgcuccggcuucgagaugaucugggaccccaacggcuggaccggcaccgacuccuccuucuccgucaagcaggacaucgucgccaucaccgacugguccggcuacuccggcuccuucguccagcaccccgagcucaccggccucgacugcauccgccccugcuucugggucgagcucauccgcggccgccccaaggaguccaccaucuggaccuccggcuccuccaucuccuucugcggcgucaacuccgacaccgucuccugguccuggcccgacggcgccgagcuccccuucaccaucgacaaguga

SEQ ID NO: 122192 - RNA, 1350 nt, Artificial Sequence
  derived and/or modified CDS sequence (opt2) from neuraminidase__InfluenzaA__BAK23417
augaaccccaaccagaagaucaucaccaucggcuccaucugcauggucaucggcaucgucucccucaugcuccagaucggcaacaugaucuccaucugggucucccacuccauccagaccggcaaccagugccaguccgagcccaucuccaacaccaaguuccucaccgagaaggccgucgccuccgucacccucgccggcaacuccucccucugccccaucuccggcugggccgucuacuccaaggacaacuccauccgcaucggcucccgcggcgacgucuucgucauccgcgagcccuucaucuccugcucccaccucgagugccgcaccuucuuccucacccagggcgcccuccucaacgacaagcacuccaacggcaccgucaaggaccgcuccccccaccgcacccucauguccugccccgucggcgaggcccccucccccuacaacucccgcuucgaguccgucgccugguccgccuccgccugccacgacggcaucuccuggcucaccaucggcaucuccggccccgacaacggcgccgucgccguccucaaguacaacggcaucaucaccgacaccaucaaguccuggcgcaacaacauccuccgcacccaggaguccgagugcgccugcgucaacggcuccugcuucaccgucaugaccgacggccccuccuccggccaggccuccuacaagaucuucaagauggagaagggcaaggucgucaaguccgucgagcucgacgcccccaacuaccacuacgaggagugcuccugcuaccccgacgccggcgagaucaccugcgucugccgcgacaacuggcacggcuccaaccgccccugggucuccuucaaccagaaccucgaguaccagaucggcuacaucugcuccggcgucuucggcgacaacccccgccccaacgacggcaccggcuccugcggccccgucucccccaacggcgccuacggcgucaagggcuucuccuucaaguacggcaacggcgucuggaucggccgcaccaaguccaccaacucccgcuccggcuucgagaugaucugggaccccaacggcuggaccggcaccgacuccuccuucuccgucaagcaggacaucgucgccaucaccgacugguccggcuacuccggcuccuucguccagcaccccgagcucaccggccucgacugcauccgccccugcuucugggucgagcucauccgcggccgccccaaggaguccaccaucuggaccuccggcuccuccaucuccuucugcggcgucaacggcgacaccgucuccugguccuggcccgacggcgccgagcuccccuucaccaucgacaaguga

SEQ ID NO: 122193 - RNA, 1350 nt, Artificial Sequence
  derived and/or modified CDS sequence (opt2) from neuraminidase__InfluenzaA__BAK23418
augaaccccaaccagaccaucaucaccaucggcuccaucugcauggucaucggcaucgucucccucaugcuccagaucggcaacaugaucuccaucugggucucccacuccauccagaccggcaaccagugccaggccgagcccaucuccaacaccaaguuccucaccgagaaggccgucgccuccgucacccucgccggcaacuccucccucugccccaucuccggcugggccgucuacuccaaggacaacuccauccgcaucggcucccgcggcgacgucuucgucauccgcgagcccuucaucuccugcucccaccucgagugccgcaccuucuuccucacccagggcgcccuccucaacgacaagcacuccaacggcaccgucaaggaccgcuccccccaccgcacccucauguccugccccgucggcgaggcccccucccccuacaacucccgcuucgaguccgucgccugguccgccuccgccugccacgacggcaccuccuggcucaccaucggcaucuccggccccgacaacggcgccgucgccguccucaaguacaacggcaucaucaccgacaccaucaaguccuggcgcaacaacauccuccgcacccaggaguccgagugcgccugcgucaacggcuccugcuucaccgucaugaccgacggccccuccuccggccaggccuccuacaagaucuucaagauggagaagggcaaggucgucaaguccgucgagcucgacgcccccaacuaccacuacgaggagugcuccugcuaccccgacgccggcgagaucaccugcgucugccgcgacaacuggcacggcuccaaccgccccugggucuccuucaaccagaaccucgaguaccagaucggcuacaucugcuccggcgucuucggcgacaacccccgccccaacgacggcaccggcuccugcggccccgucucccccaacggcgccuacggcgucaagggcuucuccuucaaguacggcaacggcgucuggaucggccgcaccaaguccaccaacucccgcuccggcuucgagaugaucugggaccccaacggcuggaccggcaccgacuccuccuucuccgucaagcaggacaucgucgccaucaccgacugguccggcuacuccggcuccuucguccagcaccccgagcucaccggccucgacugcauccgccccugcuucugggucgagcucauccgcggccgccccaaggaguccaccaucuggaccuccggcuccuccaucuccuucugcggcgucaacuccgacaccgucuccugguccuggcccgacggcgccgagcuccccuucaccaucgacaaguga

SEQ ID NO: 122194 - RNA, 1350 nt, Artificial Sequence; identical to SEQ ID NO: 112613
  derived and/or modified CDS sequence (opt2) from neuraminidase__InfluenzaA__BAK23420

SEQ ID NO: 122195 - RNA, 1350 nt, Artificial Sequence; identical to SEQ ID NO: 112613
  derived and/or modified CDS sequence (opt2) from neuraminidase__InfluenzaA__BAK23421

SEQ ID NO: 122196 - RNA, 1350 nt, Artificial Sequence
  derived and/or modified CDS sequence (opt2) from neuraminidase__InfluenzaA__BAK23422
augaaccccaaccagaagaucaucaccaucggcuccgucugcauggucaucggcaucgucucccucaugcuccagaucggcaacaugaucuccaucugggucggccacuccauccagaccggcaaccagugccacgccgagcccaucuccaacaccaaguuccccaccgagaaggccgccgccuccgucacccucgccggcaacuccucccucugccccaucuccggcugggccgucuacuccaaggacaacuccauccgcaucggcucccgcggcgacgucuucgucauccgcgagcccuucaucuccugcucccaccucgagugccgcaccuucuuccucacccagggcgcccuccucaacgacaagcacuccaacggcaccgucaaggaccgcuccccccaccgcacccucauguccugccccgucggcgaggcccccucccccuacaacucccgcuucgaguccgucgccugguccgccuccgccugccacgacggcaccuccuggcucaccaucggcaucuccggccccgacaacggcgccgucgccguccucaaguacaacggcaucaucaccgacaccaucaaguccuggcgcaacaacauccuccgcacccaggaguccgagugcgccugcgucaacggcuccugcuucaccgucaugaccgacggccccuccuccggccaggccuccuacaagaucuucaagauggagaagggcaaggucgucaaguccgucgagcucgacgcccccaacuaccacuacgaggagugcuccugcuaccccgacgccggcgagaucaccugcgucugccgcgacaacuggcacggcuccaaccgccccugggucuccuucaaccagaaccucgaguaccagaucggcuacaucugcuccggcgucuucggcgacaacccccgccccaacgacggcaccggcuccugcggccccgucucccccaacggcgccuacggcgucaagggcuucuccuucaaguacggcaacggcgucuggaucggccgcaccaaguccaccaacucccgcuccggcuucgagaugaucugggaccccaacggcuggaccggcaccgacuccuccuucuccgucaagcaggacaucgucgccaucaccgacugguccggcuacuccggcuccuucguccagcaccccgagcucaccggccucgacugcauccgccccugcuucugggucgagcucauccgcggccgccccaaggaguccaccaucuggaccuccggcuccuccaucuccuucugcggcgucaacuccgacaccgucuccugguccuggcccgacggcgccgagcuccccuucaccaucgacaaguga

SEQ ID NO: 122197 - RNA, 1350 nt, Artificial Sequence
  derived and/or modified CDS sequence (opt2) from neuraminidase__InfluenzaA__BAK23423
augaaccccaaccagaagaucaucaccaucggcuccaucugcauggucaucggcaucgucucccucaugcuccagaucggcaacaugaucuccaucugggucucccacuccauccagaccggcaaccagugccaggccgagcccaucuccaccaccaaguuccucaccgagaaggccgucgccuccgucacccucgccggcaacuccucccucugccccaucuccggcugggccgucuacuccaaggacaacuccauccgcaucggcccccgcggcgacgucuucgucauccgcgagcccuucaucuccugcucccaccucgagugccgcaccuucuuccucacccagggcgcccuccucaacgacaagcacuccaacggcaccgucaaggaccgcuccccccaccgcacccucauguccugccccgucggcgaggcccccucccccuacaacucccgcuucgaguccgucgccugguccgccuccgccugccacgacggcaucuccuggcucaccaucggcaucuccggccccgacaacggcgccgucgccguccucaaguacaacggcaucaucaccgacaccaucaaguccuggcgcaacaacauccuccgcacccaggaguccgagugcgccugcgucaacggcuccugcuucaccgucaugaccgacggccccuccuccggccaggccuccuacaagaucuucaagauggagaagggcaaggucgucaaguccgucgagcucgacgcccccaacuaccacuacgaggagugcuccugcuaccccgacgccggcgagaucaccugcgucugccgcgacaacuggcacggcuccaaccgccccugggucuccuucaaccagaaccucgaguaccagaucggcuacaucugcuccggcgucuucggcgacaacccccgccccaacgacggcaccggcuccugcggccccgucucccccaacggcgccuacggcgucaagggcuucuccuucaaguacggcaacggcgucuggaucggccgcaccaaguccaccaacucccgcuccggcuucgagaugaucugggaccccaacggcuggaccggcaccgacuccuccuucuccgucaagcaggacaucgucgccaucaccgacugguccggcuacuccggcuccuucguccagcaccccgagcucaccggccucgacugcauccgccccugcuucugggucgagcucauccgcggccgccccaaggaguccaccaucuggaccuccggcuccuccaucuccuucugcggcgucaacuccgacaccgucuccugguccuggcccgacggcgccgagcuccccuucaccaucgacaaguga

SEQ ID NO: 122198 - RNA, 1350 nt, Artificial Sequence
  derived and/or modified CDS sequence (opt2) from neuraminidase__InfluenzaA__BAK23424
augaaccccaaccagaagaucaucaccaucggcuccaucugcauggucaucggcaucgucucccucaugcuccagaucggcaacaugaucuccaucugggucucccacuccauccagaccggcaaccagugccagggcgagcccaucuccaacaccaaguuccucaccgagaaggccgucgccuccgucacccucgccggcaacuccucccucugccccaucuccggcugggccgucuacuccaaggacaacuccauccgcaucggcucccgcggcgacgucuucgucauccgcgagcccuucaucuccugcucccaccucgagugccgcaccuucuuccucacccagggcgcccuccucaacgacaagcacuccaacggcaccgucaaggaccgcuccccccaccgcacccucauguccugccccgucggcgaggcccccucccccuacaacucccgcuucgaguccgucgccugguccgccuccgccugccacgacggcaccuccuggcucaccaucggcaucuccggccccgacaacggcgccgucgccguccucaaguacaacggcaucaucaccgacaccaucaaguccuggcgcaacaacauccuccgcacccaggaguccgagugcgccugcgucaacggcuccugcuucaccgucaugaccgacggccccuccuccggccaggccuccuacaagaucuucaagauggagaagggcaaggucgucaaguccgucgagcucgacgcccccaacuaccacuacgaggagugcuccugcuaccccgacgccggcgagaucaccugcgucugccgcgacaacuggcacggcuccaaccgccccugggucuccuucaaccagaaccucgaguaccagaucggcuacaucugcuccggcgucuucggcgacaacccccgccccaacgacggcaccggcuccugcggccccgucuucuccaacggcgccuacggcgucaagggcuucuccuucaaguacggcaacggcgucuggaucggccgcaccaaguccaccaacucccgcuccggcuucgagaugaucugggaccccaacggcuggaccggcaccgacuccuccuucuccggcaagcaggacaucgucgccaucaccgacugguccggcuacuccggcuccuucguccagcaccccgagcucaccggccucgacugcauccgccccugcuucugggucgagcucauccgcggccgccccaaggaguccaccaucuggaccuccggcuccuccaucuccuucugcggcgucaacuccgacaccgucuccugguccuggcccgacggcgccgagcuccccuucaccaucgacaaguga

SEQ ID NO: 122199 - RNA, 1350 nt, Artificial Sequence
  derived and/or modified CDS sequence (opt2) from neuraminidase__InfluenzaA__BAK23425
augaaccccaaccagaagaucaucaccaucggcuccaucugcauggucaucggcaucgucucccucaugcuccagaucggcaacaugaucuccaucugggucucccacuccauccagaccggcaaccagugccaggccgagcccaucuccaacaccaaguuccucaccgagaaggccgucgccuccgucacccucgccggcaacuccucccucugccccaucuccggcugggccgucuacuccaaggacaacuccauccgcaucggcucccgcggcgacgucuucgucauccgcgagcccuucaucuccugcucccaccucgagugccgcaccuucuuccucacccagggcgcccuccucaacgacaagcacuccaacggcaccgucaaggaccgcuccccccaccgcacccucauguccugccccgucggcgaggcccccucccccuacaacucccgcuucgaguccgucgccugguccgccuccgccugccacgacggcaucuccuggcucaccaucggcaucuccggccccgacaacggcgccgucgccguccucaaguacaacggcaucaucaccgacaccaucaaguccuggcgcaacaacauccuccgcacccaggaguccgagugcgccugcgucaacggcuccugcuucaccgucaugaccgacggccccuccuccggccaggccuccuacaagaucuucaagauggagaagggcaaggucgucaaguccgucgagcucgacgcccccaacuaccacuacgaggagugcuccugcuaccccgacgccggcgagaucaccugcgucugccgcgacaacuggcacggcuccaaccgccccugggucuccuucaaccagaaccucgaguaccagaucggcuacaucugcuccggcgucuucggcgacaacccccgccccaacgacggcaccggcuccugcggccccgucucccccaacggcgccuacggcgucaagggcuucuccuucaaguacggcaacggcgucuggaucggccgcaccaaguccaccaacucccgcuccggcuucgagaugaucugggaccccaacggcuggaucggcaccgacuccuccuucuccgucaagcaggacaucgucgccaucaccgacugguccggcuacuccggcuccuucguccagcaccccgagcucaccggccucgacugcauccgccccugcuucugggucgagcucauccgcggccgccccaaggaguccaccaucuggaccuccggcuccuccaucuccuucugcggcgucaacuccgacaccgucuccugguccuggcccgacggcgccgagcuccccuucaccaucgacaaguga

SEQ ID NO: 122200 - RNA, 1350 nt, Artificial Sequence
  derived and/or modified CDS sequence (opt2) from neuraminidase__InfluenzaA__BAK23426
augaaccccaaccagaagaucaucaccaucggcuccaucugcauggucaucggcaucgucucccucaugcuccagaucggcaacaugaucuccaucugggucucccacuccauccagaccggcaaccagugccaggccgagcccaucuccaacaccaaguucuucaccgagaaggccgucgccuccgucacccucgccggcaacuccucccucugccccaucuccggcugggccgucuacuccaaggacaacuccauccgcaucggcucccgcggcgacgucuucaucauccgcgagcccuucaucuccugcucccaccucgagugccgcaccuucuuccucacccagggcgcccuccucaacgacaagcacuccaacggcaccgucaaggaccgcuccccccaccgcacccucauguccugccccgucggcgaggcccccucccccuacaacucccgcuucgaguccgucgccugguccgccuccgccugccacgacggcaccuccuggcucaccaucggcaucuccggccccgacaacggcgccgucgccguccucaaguacaacggcaucaucaccgacaccaucaaguccuggcgcaacaacauccuccgcacccaggaguccgagugcgccugcgucaacggcuccugcuucaccgucaugaccgacggccccuccuccggccaggccuccuacaagaucuucaagauggagaagggcaaggucgucaaguccgucgagcucgacgcccccaacuaccacuacgaggagugcuccugcuaccccgacgccggcgagaucaccugcgucugccgcgacaacuggcacggcuccaaccgccccugggucuccuucaaccagaaccucgaguaccagaucggcuacaucugcuccggcgucuucggcgacaacccccgccccaacgacggcaccggcuccugcggccccgucucccccaacggcgccuacggcgucaagggcuucuccuucaaguacggcaacggcgucuggaucggccgcaccaaguccaccaacucccgcuccggcuucgagaugaucugggaccccaacggcuggaccggcaccgacuccuccuucuccgucaagcaggacaucgucgccaucaccgacugguccggcuacuccggcuccuucguccagcaccccgagcucaccggccucgacugcauccgccccugcuucugggucgagcucauccgcggccgccccaaggaguccaccaucuggaccuccggcuccuccaucuccuucugcggcgucaacuccgacaccgucuccugguccuggcccgacggcgccgagcuccccuucaccaucgacaaguga

SEQ ID NO: 122201 - RNA, 1350 nt, Artificial Sequence; identical to SEQ ID NO: 122199
  derived and/or modified CDS sequence (opt2) from neuraminidase__InfluenzaA__BAK23427

SEQ ID NO: 122202 - RNA, 1350 nt, Artificial Sequence
  derived and/or modified CDS sequence (opt2) from neuraminidase__InfluenzaA__BAK23428
augaaccccaaccagaagaucaucaccaucggcuccaucugcauggucaucggcaucgucucccucaugcuccagaucggcaacaugaucuccaucugggucucccacuccauccagaccggcaaccagugccaggccgagcccaucuccaacaccaaguuccucaccgagaaggccgucgccuccgucacccucgccggcaacuccucccucugccccaucuccggcugggccgucuacuccaaggacaacuccauccgcaucggcucccgcggcgacgucuucgucauccgcgagcccuucaucuccugcucccaccucgagugccgcaccuucuuccucacccagggcgcccuccucaacgacaagcacuccaacggcaccgucaaggaccgcuccccccaccgcacccucauguccugccccgucggcgaggcccccucccccuacaacucccgcuucgaguccgucgccugguccgccuccgccugccacgacggcaccuccuggcucaccaucggcaucuccggccccgacaacggcgccgucgccguccucaaguacaacggcaucaucaccgacaccaucaaguccuggcgcaacaacauccuccgcacccaggaguccgagugcgccugcgucaacggcuccugcuucaccgucaugaccgacggccccuccuccggccaggccuccuacaagaucuucaagauggagaagggcaaggucgucaaguccgucgagcucgacgcccccaacuaccacuacgaggagugcuccugcuaccccgacgccggcgagaucaccugcgucugccgcgacaacuggcacggcuccaaccgccccugggucuccuucaaccagaaccucgaguaccagaucggcuacaucugcuccggcgucuucggcgacaacccccgccccaacgacggcaccggcuccugcggccccgucucccccaacggcgccuacggcgucaagggcuucuccuucaaguacggcaacggcgucuggaucggccgcaccaaguccaccaacucccgcuccggcuucgagaugaucugggaccccaacggcuggaccggcaccgacuccuccgucuccgucaagcaggacaucgucgccaucaccgacugguccggcuacuccggcuccuucguccagcaccccgagcucaccggccucgacugcauccgccccugcuuccgcgucgagcucauccgcggccgccccaaggaguccaccaucuggaccuccggcuccuccaucuccuucugcggcgucaacuccgacaccgucuccugguccuggcccgacggcgccgagcuccccuucaccaucgacaaguga

SEQ ID NO: 122203 - RNA, 1350 nt, Artificial Sequence; identical to SEQ ID NO: 122199
  derived and/or modified CDS sequence (opt2) from neuraminidase__InfluenzaA__BAK23429

SEQ ID NO: 122204 - RNA, 1350 nt, Artificial Sequence
  derived and/or modified CDS sequence (opt2) from neuraminidase__InfluenzaA__BAK23430
augaaccccaaccagaagaucaucaccaucggcuccaucugcauggucaucggcaucgucucccucaugcuccagaucggcaacaugaucuccaucugggucucccacuccauccagaccggcaaccagugccaggccgagcccaucuccaacaccaaguuccucaccgagaaggccgucgccuccgucacccucgccggcaacuccucccucugccccaucuccggcugggccgucuacuccaaggacaacuccauccgcaucggcucccgcggcgacgucuucgucauccgcgagcccuucaucuccugcucccaccucgagugccgcaccuucuuccucacccagggcgcccuccucaacgacaagcacuccaacggcaccgucaaggaccgcuccccccaccgcacccucauguccugccccgucggcgaggcccccucccccuacaacucccgcuucgaguccgucgccugguccgccuccgccugccacgacggcaucuccuggcucaccaucggcaucuccggccccgacaacggcgccgucgccguccucaaguacaacggcaucaucaccgacaccaucaaguccuggcgcaacaacauccuccgcacccaggaguccgagugcgccugcgucaacggcuccugcuucaccgucaugaccgacggccccuccuccggccaggccuccuacaagaucuucaagauggagaagggcaaggucgucaaguccgucgagcucgacgcccccaacuaccacuacgaggagugcuccugcuaccccgacgccggcgagaucaccugcgucugccgcgacaacuggcacggcuccaaccgccccugggucuccuucaaccagaaccucgaguaccagaucggcuacaucugcuccggcgucuucggcgacaacccccgccccaacgacggcaccggcuccugcggccccgucucccccaacggcgccuacggcgucaagggcuucuccuucaaguacggcaacggcgucuggaucggccgcaccaaguccaccaacucccgcuccggcuucgagaugaucugggaccccaacggcuggaucggcaccgacuccuccuucuccgucaagcaggacaucgucgccaucaccgacugguccggcuacuccggcuccuucguccagcaccccgagcucaccggccucgacugcaugcgccccugcuucugggucgagcucauccgcggccgccccaaggaguccaccaucuggaccuccggcuccuccaucuccuucugcggcgucaacuccgacaccgucuccugguccuggcccgacggcgccgagcuccccuucaccaucgacaaguga

SEQ ID NO: 122205 - RNA, 1350 nt, Artificial Sequence
  derived and/or modified CDS sequence (opt2) from neuraminidase__InfluenzaA__BAK23431
augaaccccaaccagaagaucaucaccaucggcuccaucugcauggucaucggcaucgucucccucaugcuccagaucggcaacaugaucuccaucugggucucccacuccauccagaccggcaaccagugccaggccgagcccaucuccaacaccaaguuccucaccgagaaggccgucgccuccgucacccucgccggcaacuccucccucugccccaucuccggcugggccgucuacuccaaggacaacuccauccgcaucggcucccgcggcgacgucuucgucauccgcgagcccuucaucuccugcucccaccucgagugccgcaccuucuuccucacccagggcgcccuccucaacgacaagcacuccaacggcaccgucaaggaccgcuccccccaccgcacccucauguccugccccgucggcgaggcccccucccccuacaacucccgcuucgaguccgucgccugguccgccuccgccugccacgacggcaccuccuggcucaccaucggcaucuccggccccgacaacggcgccgucgccguccucaaguacaacggcaucaucaccgacaccaucaaguccuggcgcaacaacauccuccgcacccaggaguccgagugcgccugcgucaacggcuccugcuucaccgucaugaccgacggccccuccuccggccaggccuccuacaagaucuucaagauggagaagggcaaggucgucaaguccgucgagcucgacgcccccaacuaccacuacgaggagugcuccugcuaccccgacgccggcgagaucaccugcgucugccgcgacaacuggcacggcuccaaccgccccugggucuccuucaaccagaaccucgaguaccagaucggcuacaucugcuccggcgucuucggcgacaacccccgccccaacgacggcaccggcuccugcggccccgucucccccaacggcgccuacggcgucaagggcuucuccuucaaguacggcaacggcgucuggaucggccgcaccaaguccaccaacucccgcuccggcuucgagaugaucuggggccccaacggcuggaccggcaccgacuccuccuucuccgucaagcaggacaucgucgccaucaccgacugguccggcuacuccggcuccuucguccagcaccccgagcucaccggccucgacugcauccgccccugcuucugggucgagcucauccgcggccgccccaaggaguccaccaucuggaccuccggcuccuccaucuccuucugcggcgucaacuccgacaccgucuccugguccuggcccgacggcgccgagcuccccuucaccaucgacaaguga

SEQ ID NO: 122206 - RNA, 1350 nt, Artificial Sequence; identical to SEQ ID NO: 122199
  derived and/or modified CDS sequence (opt2) from neuraminidase__InfluenzaA__BAK23432

SEQ ID NO: 122207 - RNA, 1350 nt, Artificial Sequence; identical to SEQ ID NO: 122199
  derived and/or modified CDS sequence (opt2) from neuraminidase__InfluenzaA__BAK23433

SEQ ID NO: 122208 - RNA, 1410 nt, Artificial Sequence
  derived and/or modified CDS sequence (opt2) from neuraminidase__InfluenzaA__BAM65748
augaaccccaaccagaagaucaucaccaucggcuccgucucccucaccaucuccaccaucugcuucuucaugcagaucgccauccucaucaccaccgucacccuccacuucaagcaguacgaguucaacuccccccccaacaaccaggucaugcucugcgagcccaccaucaucgagcgcaacaucaccgagaucgucuaccucaccaacaccaccaucgagaaggagaucugccccaagcucgccgaguaccgcaacugguccaagccccagugcgacaucaccggcuucgcccccuucuccaaggacaacuccauccgccucuccgccggcggcgacaucugggucacccgcgagcccuacgucuccugcgaccccgacaagugcuuccaguucgcccucggccagggcaccacccucaacaacguccacuccaacgacaccguccacgaccgcacccccuaccgcacccuccucaugaacgagcucggcguccccuuccaccucggcaccaagcaggucugcaucgccugguccuccuccuccugccacgacggcaaggccuggcuccacgucugcgucaccggcgacgacaagaacgccaccgccuccuucaucuacaacggccgccucgucgacuccaucgucuccugguccaagaagauccuccgcacccaggaguccgagugcgucugcaucaacggcaccugcaccgucgucaugaccgacggcuccgccuccggcaaggccgacaccaagauccucuucaucgaggagggcaagaucguccacaccuccacccucuccggcuccgcccagcacgucgaggagugcuccugcuacccccgcuaccccggcguccgcugcgucugccgcgacaacuggaagggcuccaaccgccccaucgucgacaucaacaucaaggacuacuccaucgucuccuccuacgucugcuccggccucgucggcgacaccccccgcaagaccgacuccuccuccuccucccacugccucgaccccaacaacgaggagggcggccacggcgucaagggcugggccuucgacgacggcaacgacgucuggaugggccgcaccaucuccgagaagucccgccucggcuacgagaccuucaaggucaucggcggcugguccaaccccaacuccaagucccagaucaaccgccaggucaucgucgacaugggcaaccgcuccggcuacuccggcaucuucuccgucgagggcaaguccugcaucaaccgcugcuucuacgucgagcucauccgcggccgcaaggacgagaccgagguccucuggaccuccaacuccaucgucgucuucugcggcaccuccggcaccuacggcaccggcuccuggcccgacggcgccgacaucaagcucauguccaucuga

SEQ ID NO: 122209 - RNA, 1350 nt, Artificial Sequence
  derived and/or modified CDS sequence (opt2) from neuraminidase__InfluenzaA__BAM85817
augaaccccaaccagaagaucaucaccaucggcuccaucugcauggucaccggcaucgucucccucaugcuccagaucggcaacaugaucuccaucugggucucccacuccauccacaccggcaaccagcaccaguccgagcccaucuccaacaccaacuuccucaccgagaaggccgucgccuccgucaagcucgccggcaacuccucccucugccccaucaacggcugggccgucuacuccaaggacaacuccauccgcaucggcuccaagggcgacgucuucgucauccgcgagcccuucaucuccugcucccaccucgagugccgcaccuucuuccucacccagggcgcccuccucaacgacaagcacuccaacggcaccgucaaggaccgcuccccccaccgcacccucauguccugccccgucggcgaggcccccucccccuacaacucccgcuucgaguccgucgccugguccgccuccgccugccacgacggcaccuccuggcucaccaucggcaucuccggccccgacaacggcgccgucgccguccucaaguacaacggcaucaucaccgacaccaucaaguccuggcgcaacaacauccuccgcacccaggaguccgagugcgccugcgucaacggcuccugcuucaccgucaugaccgacggccccuccaacggccaggccucccacaagaucuucaagauggagaagggcaaggucgucaaguccgucgagcucgacgcccccaacuaccacuacgaggagugcuccugcuaccccaacgccggcgagaucaccugcgucugccgcgacaacuggcacggcuccaaccgccccugggucuccuucaaccagaaccucgaguaccagaucggcuacaucugcuccggcgucuucggcgacaacccccgccccaacgacggcaccggcuccugcggccccgucuccuccaacggcgccuacggcgucaagggcuucuccuucaaguacggcaacggcgucuggaucggccgcaccaaguccaccaacucccgcuccggcuucgagaugaucugggaccccaacggcuggaccgagaccgacuccuccuucuccgucaagcaggacaucgucgccaucaccgacugguccggcuacuccggcuccuucguccagcaccccgagcucaccggccucgacugcauccgccccugcuucugggucgagcucauccgcggccgccccaaggaguccaccaucuggaccuccggcuccuccaucuccuucugcggcgucaacuccgacaccgucggcugguccuggcccgacggcgccgagcuccccuucaccaucgacaaguga

SEQ ID NO: 122210 - RNA, 1350 nt, Artificial Sequence
  derived and/or modified CDS sequence (opt2) from neuraminidase__InfluenzaA__BAM85818
augaaccccaaccagaagaucaucaccaucggcuccaucugcauggucaucggcaucgucucccucaugcuccagaucggcaacaugaucuccaucugggucucccacuccauccagaccggcaaccagcaccaggccgagcccauccgcaacaccaacuuccucaccgagaacgccgucgccuccgucacccucgccggcaacuccucccucugccccauccgcggcugggccguccacuccaaggacaacuccauccgcaucggcuccaagggcgacgucuucgucauccgcgagcccuucaucuccugcucccaccucgagugccgcaccuucuuccucacccagggcgcccuccucaacgacaagcacuccaacggcaccgucaaggaccgcuccccccaccgcacccucauguccugccccgucggcgaggcccccucccccuacaacucccgcuucgaguccgucgccugguccgccuccgccugccacgacggcaccuccuggcucaccaucggcaucuccggccccgacaacggcgccgucgccguccucaaguacaacggcaucaucaccgacaccaucaaguccuggcgcaacaacauccuccgcacccaggaguccgagugcgccugcgucaacggcuccugcuucaccgucaugaccgacggccccuccaacggccaggccuccuacaagaucuucaagauggagaagggcaaggucgucaaguccgucgagcucaacgcccccaacuaccacuacgaggagugcuccugcuaccccgacgccggcgagaucaucugcgucugccgcgacaacuggcacggcuccaaccgccccugggucuccuucaaccagaaccucgaguaccagaucggcuacaucugcuccggcgucuucggcgacaacccccgccccaacgacggcaccggcuccugcggccccgucucccccaacggcgccuacggcaucaagggcuucuccuucaaguacggcaacggcgucuggaucggccgcaccaaguccaccaacucccgcuccggcuucgagaugaucugggaccccaacggcuggaccggcaccgacuccaacuucuccgucaagcaggacaucgucgccaucaccgacugguccggcuacuccggcuccuucguccagcaccccgagcucaccggccucgacugcauccgccccugcuucugggucgagcucauccgcggccgccccaaggaguccaccaucuggaccuccggcuccuccaucuccuucugcggcgucaacuccgacaccgucuccugguccuggcccgacggcgccgagcuccccuucaccaucgacaaguga

SEQ ID NO: 122211 - RNA, 1350 nt, Artificial Sequence
  derived and/or modified CDS sequence (opt2) from neuraminidase__InfluenzaA__BAM85819
augaaccccaaccagaagaucaucaccaucggcuccaucugcauggucaucggcaucgucucccucaugcuccagaucggcaacaugaucuccaucugggucucccacuccauccagaccggcaaccagaaccaggucgagcccaucaucaacaccaacuuccucaccgagaaggccgucgccuccaucacccucgccggcaacuccucccucugccccauccgcggcugggccauccacuccaaggacaacuccauccgcaucggcuccaagggcgacgucuucgucauccgcgagcccuucaucuccugcucccaccucgagugccgcaccuucuuccucacccagggcgcccuccucaacgacaagcacuccaacggcaccgucaaggaccgcuccccccaccgcacccucauguccugccccgucggcgaggcccccucccccuacaacucccgcuucgaguccgucgccugguccgccuccgccugccacgacggcaccuccuggcucaccaucggcaucuccggccccgacaacggcgccgucgccguccucaaguacaacggcaucaucaccgacaccaucaaguccuggcgcaacaacauccuccgcacccaggaguccgagugcgccugcgucaacggcuccugcuucaccgucaugaccgacggccccuccgacggccaggccuccuacaagaucuucaagauggagaagggcaaggucaucaaguccgucgagcucgacgcccccaacuaccacuacgaggagugcuccugcuaccccgacgccggcgagaucaccugcgucugccgcgacaacuggcacggcuccaaccgccccugggucuccuucaaccagaaccucgaguaccagaucggcuacaucugcuccggcgucuucggcgacaacccccgccccaacgacggcaccggcuccugcggccccgucucccacaacggcgccuacggcgucaagggcuucuccuucaaguacggcaacggcgucuggaucggccgcaccaagucccccaacucccgcuccggcuucgagaugaucugggaccccaacggcugguccgagaccgacuccuccuucuccgucaagcaggacaucgucgccaucaccgacugguccggcuacuccggcuccuucguccagcaccccgagcucaccggccucgacugcauccgccccugcuucugggucgagcucauccgcggccgccccaaggaguccaccgucuggaccuccggcuccuccaucuccuucugcggcgucuccuccgacaccgucuccugguccuggcccgacggcgccgagcuccccuucaccaucgacaaguga

SEQ ID NO: 122212 - RNA, 1350 nt, Artificial Sequence
  derived and/or modified CDS sequence (opt2) from neuraminidase__InfluenzaA__BAM85820
augaaccccaaccagaagaucaucaccaucggcuccaucugcauggucaucggcaucgucucccucaugcuccagaucggcaacaugaucuccaucugggucucccacuccauccagaccggcaaccagcaccaggccgagcccaucuccaacaccaacuuccucaccgagaaggccgucgccuccgucacccucgccggcaacuccucccucugccccauccgcggcugggccguccacuccaaggacaacuccauccgcaucggcuccaagggcgacgucuucgucauccgcgagcccuucaucuccugcucccaccucgagugccgcaccuucuuccucacccagggcgcccuccucaacgacaagcacuccaacggcaccgucaaggaccgcuccccccaccgcacccucauguccugccccgucggcgaggcccccucccccuacaacucccgcuucgaguccgucgccugguccgccuccgccugccacgacggcaccuccuggcucaccaucggcaucuccggccccgacaacggcgccgucgccguccucaaguacaacggcaucaucaccgacaccaucaaguccuggcgcaacaacauccuccgcacccaggaguccgagugcgccugcgucaacggcuccugcuucaccgucaugaccgacggccccuccaacggccaggccuccuacaagaucuucaagauggagaagggcaaggucgucaaguccgucgagcucgacgcccccaacuaccacuacgaggagugcuccugcuaccccgacgccggcgagaucaccugcgucugccgcgacaacuggcacggcuccaaccgccccugggucuccuucaaccagaaccucgaguaccagaucggcuacaucugcuccggcgucuucggcgacaacccccgccccaacgacggcaccggcuccugcggccccgucucccccaacggcgccuacggcgucaagggcuucuccuucaaguacggcaacggcgucuggaucggccgcaccaaguccaccaacucccgcuccggcuucgagaugaucugggaccccaacggcuggaccggcaccgacuccuccuucuccgucaagcaggacaucgucgccaucaccgacugguccggcuacuccggcuccuucguccagcaccccgagcucaccggccucgacugcauccgccccugcuucugggucgagcucauccgcggccgccccaaggaguccaccaucuggaccuccggcuccuccaucuccuucugcggcgucaacuccgacaccgucuccugguccuggcccgacggcgccgagcuccccuucaccaucgacaaguga

SEQ ID NO: 122213 - RNA, 1350 nt, Artificial Sequence; identical to SEQ ID NO: 111044
  derived and/or modified CDS sequence (opt2) from neuraminidase__InfluenzaA__BAM85821

SEQ ID NO: 122214 - RNA, 1350 nt, Artificial Sequence
  derived and/or modified CDS sequence (opt2) from neuraminidase__InfluenzaA__BAM85822
augaaccccaaccagaagaucaucaccaucggcuccaucugcauggucaccggcaucgucucccucaugcuccagaucggcaacaugaucuccaucugggucucccacuccauccacaccggcaaccagcaccaguccgagcccaucuccaacaccaacuuccucaccgagaaggccgucgccuccgucaagcucgccggcaacuccucccucugccccaucaacggcugggccgucuacuccaaggacaacuccauccgcaucggcuccaagggcgacgucuucgucauccgcgagcccuucaucuccugcucccaccucgagugccgcaccuucuuccucacccagggcgcccuccucaacgacaagcacuccaacggcaccgucaaggaccgcuccccccaccgcacccucauguccugccccgucggcgaggcccccucccccuacaacucccgcuucgaguccgucgccugguccgccuccgccugccacgacggcaccuccuggcucaccaucggcaucuccggccccgacaacggcgccgucgccgucgucaaguacaacggcaucaucaccgacaccaucaaguccuggcgcaacaacauccuccgcacccaggaguccgagugcgccugcgucaacggcuccugcuucaccgucaugaccgacggccccuccaacucccaggccucccacaagaucuucaagauggagaagggcaaggucgucaaguccgucgagcucgacgcccccaacuaccacuacgaggagugcuccugcuaccccgacgccggcgagaucaccugcgucugccgcgacaacuggcacggcuccaaccgccccugggucuccuucaaccagaaccucgaguaccagaucggcuacaucugcuccggcgucuucggcgacaacccccgccccaacgacggcaccggcuccugcggccccgucuccuccaacggcgccuacggcgucaagggcuucuccuucaaguacggcaacggcgucuggaucggccgcaccaaguccaccaacucccgcuccggcuucgagaugaucugggaccccaacggcuggaccgagaccgacuccuccuucuccgucaagcaggacaucgucgccaucaccgacugguccggcuacuccggcuccuucguccagcaccccgagcucaccggccucgacugcauccgccccugcuucugggucgagcucauccgcggccgccccaaggaguccaccaucuggaccuccggcuccuccaucuccuucugcggcgucaacuccgacaccgucggcugguccuggcccgacggcgccgagcuccccuucaccaucgacaaguga

SEQ ID NO: 122215 - RNA, 1410 nt, Artificial Sequence
  derived and/or modified CDS sequence (opt2) from neuraminidase__InfluenzaA__BAM85823
augaaccccaaccagaagaucaccaccaucggcuccaucugcauggucaucggcaucgucucccucaugcuccagaucggcaacaucaucuccaucugggucucccacuccauccagaccggcaaccagcaccaggccggccccugcaaccaguccaucaucaccuacgagaacaacaccugggucaaccagaccuacgucaacaucuccaacaccaacuuccucaccgagaagaccgucgccuccgucacccucgccggcaacuccucccucugccccaucuccggcugggccgucuacuccaaggacaacggcauccgcaucggcuccaagggcgacgucuucgucauccgcgagcccuucaucuccugcucccaccucgagugccgcaccuucuuccucacccagggcgcccuccucaacgacaagcacuccaacggcaccgucaaggaccgcuccccccaccgcacccucauguccugccccgucggcgaggcccccucccccuacaacucccgcuucgaguccgucgccugguccgccuccgccugccacgacggcaucaacuggcucaccaucggcaucuccggccccgacaacggcgccgucgccguccucaaguacaacggcaucaucaccgacaccaucaaguccuggcgcaacaacauccuccgcacccaggaguccgagugcgccugcgucaacggcuccugcuucaccaucaugaccgacggccccuccaacggccaggccuccuacaagaucuuccgcaucgagaagggcaaggucgucaaguccgucgagcucaacgcccccaacuaccacuacgaggagugcuccugcuaccccgacgccggcgagaucaccugcgucugccgcgacaacuggcacggcuccaaccgccccugggucuccuucaaccagaaccucgaguaccagaucggcuacaucugcuccggcaucuucggcgacaacccccgccccaacgacggcaccggcuccugcggccccgucucccccaacggcgccuacggcaucaagggcuucuccuucaaguacggcaacggcgucuggaucggccgcaccaaguccaccaacucccgcuccggcuucgagaugaucugggaccccaacggcuggaccggcaccgacuccaacuucuccgucaagcaggacaucgucgccaucaccgacugguccggcuacuccggcuccuucguccagcaccccgagcucaccggccucgacugcauccgccccugcuucugggucgagcucauccgcggccgccccaaggaguccaccaucuggaccuccggcuccuccaucuccuucugcggcgucaacuccgacaccgucggcugguccuggcccgacggcgccgagcuccccuucaccaucgacaaguga

SEQ ID NO: 122216 - RNA, 1350 nt, Artificial Sequence
  derived and/or modified CDS sequence (opt2) from neuraminidase__InfluenzaA__BAM85824
augaaccccaaccagaagaucaucaccaucggcuccaucugcauggucaucggcaucgucucccuccuccuccagaucggcaacaugaucuccaucuggaucucccacuccauccagaccggcaaccagcaccaggccgaguccaucuccaacaccaacccccucaccgagaaggccgucgccuccgucacccucgccggcaacuccucccucugccccauccgcggcugggccguccacuccaaggacaacuccauccgcaucggcuccaagggcgacgucuucgucauccgcgagcccuucaucuccugcucccaccucgagugccgcaccuucuuccucacccagggcgcccuccucaacgacaagcacuccaacggcaccgucaaggaccgcuccccccaccgcacccucauguccugccccgucggcgaggcccccucccccuacaacucccgcuucgaguccgucgccugguccgccuccgccugccacgacggcaccuccuggcucaccaucggcaucuccggccccgacaacggcgccgucgccguccucaaguacaacggcaucaucaccgacaccaucaaguccuggcgcaacaacauccuccgcacccaggaguccgagugcgccugcgucaacggcuccugcuucaccgucaugaccgacggccccuccaacggccaggccuccuacaagaucuucaagauggagaagggcaaggucgucaaguccgucgagcucgacgcccccaacuaccacuacgaggagugcuccugcuaccccgacgccuccgagaucaccugcgucugccgcgacaacuggcacggcuccaaccgccccugggucuccuucaaccagaaccucgaguaccagaucggcuacaucugcuccggcgucuucggcgacaacccccgccccaacgacggcaccggcuccugcggccccauguuccccaacggcgccuacggcaucaagggcuucuccuucaaguacggcaacggcgucuggaucggccgcaccaaguccaccaacucccgcuccggcuucgagaugaucugggaccccaacggcuggaccggcaccgacuccuccuucuccgucaagcaggacaucgucgccaucaccgacugguccggcuacuccggcuccuucguccagcaccccgagcucaccggccucgacugcauccgccccugcuucugggucgagcucauccgcggccgccccaaggaguccaccaucuggaccuccggcuccuccaucuccuucugcggcgucaacuccgacaccgucuccugguccuggcccgacggcgccgagcuccccuucaccaucgacaaguga

SEQ ID NO: 122217 - RNA, 1350 nt, Artificial Sequence
  derived and/or modified CDS sequence (opt2) from neuraminidase__InfluenzaA__BAM85825
augaaccccaaccagaagaucaucaccaucggcuccaucugcauggucaucggcaucgucucccucaugcuccagaucggcaacaugaucuccaucugggucucccacuccauccagaccggcaaccagaaccaggucgagcccaucaucaacaccaacuuccucaccgagaaggccgucgccuccaucacccucgccggcaacuccucccucugccccauccgcggcugggccauccacuccaaggacaacuccauccgcaucggcuccaagggcgacgucuucgucauccgcgagcccuucaucuccugcucccaccucgagugccgcaccuucuuccucacccagggcgcccuccucaacgacaagcacuccaacggcaccgucaaggaccgcuccccccaccgcacccucauguccugccccgucggcgaggcccccucccccuacaacucccgcuucgaguccgucgccugguccgccuccgccugccacgacggcaccuccuggcucaccaucggcaucuccggccccgacaacggcgccgucgccguccucaaguacaacggcaucaucaccgacaccaucaaguccuggcgcaacaacauccuccgcacccaggaguccgagugcgccugcgucaacggcuccugcuucaccgucaugaccgacggccccuccaacggccaggccuccuacaagaucuucaagauggagaagggcaaggucaucaaguccgucgagcucgacgcccccaacuaccacuacgaggagugcuccugcuaccccgacgccggcgagaucaccugcgucugccgcgacaacuggcacggcuccaaccgccccugggucuccuucaaccagaaccucgaguaccagaucggcuacaucugcuccggcgucuucggcgacaacccccgccccaacgacggcaccggcuccugcggccccgucucccacaacggcgccuacggcgucaagggcuucuccuucaaguacggcaacggcgucuggaucggccgcaccaagucccccaacucccgcuccggcuucgagaugaucugggaccccaacggcugguccgagaccgacuccuccuucuccgucaagcaggacaucgucgccaucaccgacugguccggcuacuccggcuccuucguccagcaccccgagcucaccggccucgacugcauccgccccugcuucugggucgagcucauccgcggccgccccaaggaguccaccgucuggaccuccggcuccuccaucuccuucugcggcgucaacuccgacaccgucuccugguccuggcccgacggcgccgagcuccccuucaccaucgacaaguga

SEQ ID NO: 122218 - RNA, 1350 nt, Artificial Sequence
  derived and/or modified CDS sequence (opt2) from neuraminidase__InfluenzaA__BAM85826
augaaccccaaccagaagaucaucaccaucggcuccaucugcauggucaucggcaucgucucccucaugcuccagaucggcaacaugaucuccaucugggucucccacuccauccagaccggcaaccagcgccaggccgagcccaucuccaacaccaaguuccucaccgagaaggccgucgccuccgucacccucgccggcaacuccucccucugccccaucuccggcugggccgucuacuccaaggacaacuccauccgcaucggcucccgcggcgacgucuucgucauccgcgagcccuucaucuccugcucccaccucgagugccgcaccuucuuccucacccagggcgcccuccucaacgacaagcacuccaacggcaccgucaaggaccgcuccccccaccgcacccucauguccugccccgucggcgaggcccccucccccuacaacucccgcuucgaguccgucgccugguccgccuccgccugccacgacggcaccuccuggcucaccaucggcaucuccggccccgacaacggcgccgucgccguccucaaguacaacggcaucaucaccgacaccaucaaguccuggcgcaacaacauccuccgcacccaggaguccgagugcgccugcgucaacggcuccugcuucaccgucaugaccgacggccccuccaacggccaggccuccuacaagaucuucaagauggagaagggcaaggucgucaaguccgucgagcucgacgcccccaacuaccacuacgaggagugcuccugcuaccccgacgccggcgagaucaccugcgucugccgcgacaacuggcacggcuccaaccgccccugggucuccuucaaccagaaccucgaguaccagaucggcuacaucugcuccggcgucuucggcgacaacccccgccccaacgacggcaccggcuccugcggccccgucucccucaacggcgccuacggcgucaagggcuucuccuucaaguacggcaacggcgucuggaucggccgcaccaaguccaccaacucccgcuccggcuucgagaugaucugggaccccaacggcuggaccggcaccgacuccuccuucuccgucaagcaggacaucgucgccaucaccgacugguccggcuacuccggcuccuucguccagcaccccgagcucaccggccucgacugcauccgccccugcuucugggucgagcucauccgcggccgccccaaggaguccaccaucuggaccuccggcuccuccaucuccuucugcggcgucaacuccgacaccgucuccugguccuggcccgacggcgccgagcuccccuucaccaucgacaaguga

SEQ ID NO: 122219 - RNA, 1350 nt, Artificial Sequence
  derived and/or modified CDS sequence (opt2) from neuraminidase__InfluenzaA__BAM85827
augaaccccaaccagaagaucaucaccaucggcuccaucugcauggucaucggcgucgucucccucaugcuccagaccggcaacaucaucuccaucugggucucccacuccauccagaagggcaaccagcaccaggccgaguccaucuccaacaccaacccccucaccgagaaggccgucgccuccgucacccucgccggcaacuccucccucugccccauccgcggcugggccguccacuccaaggacaacaacauccgcaucggcuccaagggcgacgucuucgucauccgcgagcccuucaucuccugcucccaccucgagugccgcaccuucuuccucacccagggcgcccuccucaacgacaagcacuccaacggcaccgucaaggaccgcuccccccaccgcacccucauguccugccccgucggcgaggcccccucccccuacaacucccgcuucgaguccgucgccugguccgccuccgccugccacgacggcaccuccuggcucaccaucggcaucuccggccccgacaacgaggccgucgccguccucaaguacaacggcaucaucaccgacaccaucaaguccuggcgcaacaacauccuccgcacccaggaguccgagugcgccugcgucaacggcuccugcuucaccgucaugaccgacggccccuccaacggccaggccuccuacaagaucuucaagauggagaagggcaaggucgucaaguccgucgagcucgacgcccccaacuaccacuacgaggagugcuccugcuaccccgacgccggcgagaucaccugcgucugccgcgacaacuggcacggcuccaaccgccccugggucuccuucaaccagaaccucgaguaccagaucggcuacaucugcuccggcgucuucggcgacaacccccgccccaacgacggcaccggcuccugcggccccaugucccccaacggcgccuacggcgucaagggcuucuccuucaaguacggcaacggcgucuggaucggccgcaccaaguccaccaccucccgcuccggcuucgagaugaucugggaccccaacggcuggaccggcaccgacuccuccuucuccgucaagcaggacaucgucgccaucaccgacugguccggcuacuccggcuccuucguccagcaccccgagcucaccggccucgacugcauccgccccugcuucugggucgagcucauccgcggccgccccaaggaguccaccaucuggaccuccggcuccuccaucuccuucugcggcgucgacuccgacaccgucuccugguccuggcccgacggcgccgagcuccccuucaccaucgacaaguga

SEQ ID NO: 122220 - RNA, 1350 nt, Artificial Sequence
  derived and/or modified CDS sequence (opt2) from neuraminidase__InfluenzaA__BAM85828
augaaccccaaccagaagaucaucaccaucggcuccaucugcauggucaucggcaucgucucccucaugcuccagaucggcaacaugaucuccaucugggucucccacuccauccagaccggcaaccagcgccaggccgagcccaucuccaacaccaaguuccucaccgagaaggccgucgccuccgucacccucgccggcaacuccucccucugccccaucuccggcugggccgucuacuccaaggacaacuccauccgcaucggcucccgcggcgacgucuucgucauccgcgagcccuucaucuccugcucccaccucgagugccgcaccuucuuccucacccagggcgcccuccucaacgacaagcacuccaacggcaccgucaaggaccgcuccccccaccgcacccucauguccugccccgucggcgaggcccccucccccuacaacucccgcuucgaguccgucgccugguccgccuccgccugccacgacggcaccuccuggcucaccaucggcaucuccggccccgacaacggcgccgucgccguccucaaguacaacggcaucaucaccgacaccaucaaguccuggcgcaacaacauccuccgcacccaggaguccgagugcgccugcgucaacggcuccugcuucaccgucaugaccgacggccccuccaacggccaggccuccuacaagaucuucaagauggagaagggcaaggucgucaaguccgucgagcucgacgcccccaacuaccacuacgaggagugcuccugcuaccccgacgccggcgagaucaccugcgucugccgcgacaacuggcacggcuccaaccgccccugggucuccuucaaccagaaccucgaguaccagaucggcuacaucugcuccggcgucuucggcgacaacccccgccccaacgacggcaccggcuccugcggccccgucucccccaacggcgccuacggcgucaagggcuucuccuucaaguacggcaacggcgucuggaucggccgcaccaaguccaccaacucccgcuccggcuucgagaugaucugggaccccaacggcuggaccggcaccgacuccuccuucuccgucaagcaggacaucgucgccaucaccgacugguccggcuacuccggcuccuucguccagcaccccgagcucaccggccucgacugcauccgccccugcuucugggucgagcucauccgcggccgccccaaggaguccaccaucuggaccuccggcuccuccaucuccuucugcggcgucaacuccgacaccgucuccugguccuggcccgacggcgccgagcuccccuucaccaucgacaaguga

SEQ ID NO: 122221 - RNA, 1350 nt, Artificial Sequence
  derived and/or modified CDS sequence (opt2) from neuraminidase__InfluenzaA__BAM85829
augaaccccaaccagaagaucaucaccaucggcuccaucugcaugaucaucggcaucgucucccucaugcuccagaucggcaacaucaucuccaucugggucucccacuccauccagaccggcaaccagcaccaggccgagcccaucuccgacaccaacuuccucaccgagaaggccgucgccuccgucauccucgccggcaacuccucccucugccacaucuccggcugggccguccacuccaaggacaacuccauccgcaucggcuccaagggcgacgucuucgucauccgcgagcccuucaucuccugcucccaccucgagugccgcaccuucuuccucacccagggcgcccuccucaacgacaagcacuccaacggcaccgucaaggaccgcuccccccaccgcacccucauguccugccccgucggcgaggcccccucccccuacaacucccgcuucgaguccgucgccugguccgccuccgccugccacgacggcaccuccuggcucaccaucggcaucuccggccccgacaacggcgccgucgccguccucaaguacaacggcaucaucaccgacaccaucaaguccuggcgcaacuacauccuccgcacccaggaguccgagugcgccugcgucaacggcuccugcuucaccgucaugaccgacggccccuccaacggccaggccuccuacaagaucuucaagaucgagaagggcaaggucgucaaguccgucgagcucgacgcccccaacuaccacuacgaggagugcuccugcuaccccgacgccggcgagaucaccugcgucugccgcgacaacuggcacggcuccaaccgccccugggucuccuucaaccagaaccucgaguaccagaucggcuacaucugcuccggcgucuucggcgacaccccccgccccaacgacggcaccggcuccugcggccccgucucccccaacggcgccuacggcgucaagggcuucuccuucaaguacggcaacggcgucuggaucggccgcaccaaguccaccaacucccgcuccggcuucgagaugaucugggaccccaacggcuggaccggcaccgacuccuccuucuccgucaagcaggaccucgucgccaucaccgacugguccggcuacuccggcuccuucguccagcaccccgagcucaccggccucgacugcauccgccccugcuucugggucgagcucauccgcggccgccccaaggaguccaccaucuggaccuccggcuccuccaucuccuucugcggcgucaacuccgacaccgucggcugguccuggcccgacggcgccgagcuccccuucaccaucgacaaguga

SEQ ID NO: 122222 - RNA, 1413 nt, Artificial Sequence
  derived and/or modified CDS sequence (opt2) from neuraminidase__InfluenzaA__BAM85830
augaaccccaaccagaagaucaucaccaucggcuccaucugcauggccaucggcaccaucucccucauccuccagaucggcaacaucaucuccaucuggaucucccacuccauccagaccggcucccagaaccacaccggcaucugcaaccagcgcaucaucaccuacgagaacaacaccugggucaaccagaccuacgucaacaucuccaacaccaacgucgucgccggcaaggacaccaccuccaugauccucgccggcaacuccucccucugccccauccgcggcugggccaucuacuccaaggacaacuccauccgcaucggcuccaagggcgacgucuucgucauccgcgagcccuucaucuccugcucccaccucgagugccgcaccuucuuccucacccagggcgcccuccucaacgacaagcacuccaacggcaccgucaaggaccgcucccccuaccgcgcccucauguccugccccaucggcgaggcccccucccccuacaacucccgcuucgaguccgucgccugguccgccuccgccugccacgacggcaugggcuggcucaccaucggcaucuccggccccgacgacggcgccgucgccguccucaaguacaacggcaucaucaccgagaucaucaaguccuggcgcaagcagauccuccgcacccaggaguccgagugcgucugcgucaacggcuccugcuucaccaucaugaccgacggccccuccaacggccccgccuccuaccgcaucuucaagaucaagaagggcaagaucaccaaguccaucgagcucgacgcccccaacucccacuacgaggagugcuccugcuaccccgacaccggcaaggucaugugcgucugccgcgacaacuggcacggcuccaaccgccccugggucuccuucaaccagaaccucgacuaccagaucggcuacaucugcuccggcgucuucggcgacaacccccgccccaaggacggcaagggcuccugcgaccccgucaacgucgacggcgccgacggcgucaagggcuucuccuaccgcuacggcaacggcgucuggaucggccgcaccaaguccaacuccucccgcaagggcuucgagaugaucugggaccccaacggcuggaccgacaccgacggcaacuuccucgucaagcaggacgucgucgccaugaccgacugguccggcuacuccggcuccuucguccagcaccccgagcucaccggccucgacugcaugcgccccugcuucugggucgagcucauccgcggccagccccgcgagaagaccaccaucuggaccuccggcuccuccaucuccuucugcggcgucaacuccgacaccgucaacugguccuggcccgacggcgccgagcuccccuucaccaucgacaaguga

SEQ ID NO: 122223 - RNA, 1413 nt, Artificial Sequence
  derived and/or modified CDS sequence (opt2) from neuraminidase__InfluenzaA__BAM85831
augaaccccaaccagaagaucaucaccaucggcuccaucuccaucgccaucggcaucaucucccucaugcuccagaucggcaacaucaucuccaucugggccucccacuccauccagaccggcucccagaaccacaccggcgucugcaaccagcgcaucaucaccuacgagaacuccaccugggucaaccacaccuacgucaacaucaacaacaccaacgucaucgccggcaaggacaagaccuccgucacccucgccggcaacuccucccucugcuccaucuccggcugggccaucuacaccaaggacaacuccauccgcaucggcuccaagggcgacgucuucgucauccgcgagcccuucaucuccugcucccaccucgagugccgcaccuucuuccucacccagggcgcccuccucaacgacaagcacuccaacggcaccgucaaggaccgcucccccuaccgcgcccucauguccugcccccucggcgaggcccccucccccuacaacuccaaguucgaguccgucgccugguccgccuccgccugccacgacggcaucggcuggcucaccaucggcaucuccggccccgacaacggcgccgucgccguccucaaguacaacggcaucaucaccgagaccaucaaguccuggaagaagcagauccuccgcacccaggaguccgagugcgucugcgucaacggcuccugcuucaccaucaugaccgacggccccuccaacggcgccgccuccuacaagaucuucaagaucgagaagggcaaggucaccaaguccaucgagcucaacgcccccaacuuccacuacgaggagugcuccugcuaccccgacaccggcaccgucaugugcgucugccgcgacaacuggcacggcuccaaccgccccugggucuccuucaaccagaaccucgacuaccagaucggcuacaucugcuccggcgucuucggcgacaacccccgcccccgcgacggcgagggcuccugcaaccccgucaccgccgacggcgccaacggcgucaagggcuucuccuacaaguacggcaacggcgucuggaucggccgcaccaaguccaaccgccuccgcaagggcuucgagaugaucugggaccccaacggcuggaccgacaccgacuccgacuucuccgucaagcaggacgucgucgccaucaccgacugguccggcuacuccggcuccuucguccagcaccccgagcucaccggccucggcugcauccgccccugcuucugggucgagcucguccgcggccucccccgcgagaacaccaccaucuggaccuccggcuccuccaucuccuucugcggcgucaacuccgacaccgccaacugguccuggcccgacggcgccgagcuccccuucaccaucgacaaguga

SEQ ID NO: 122224 - RNA, 1413 nt, Artificial Sequence; identical to SEQ ID NO: 117544
  derived and/or modified CDS sequence (opt2) from neuraminidase__InfluenzaA__BAM85832

SEQ ID NO: 122225 - RNA, 1410 nt, Artificial Sequence
  derived and/or modified CDS sequence (opt2) from neuraminidase__InfluenzaA__BAM85833
augaaccccaaccagaagaucaucaccaucggcuccaccugcauggucaucggcaucaucucccucauccuccagaucggcaacaucaucuccaucugggucucccacuccauccagaccggcaaccagaaccagcccgagaccugcaaccaguccgucaucaccuacgagaacaagaccugggucaaccagaccuacgucaacaucuccaacaccaaccucgucaucgagcgcgacgucaucuccgucgcccuccucggcaacuccucccucugccccaucuccggcugggccaucuacuccaaggacaacggcauccgcaucggcuccaagggcgacgucuucgucauccgcgagcccuucaucuccugcucccaccucgagugccgcaccuucuuccucacccagggcgcccuccucaacgacaagcacuccaacggcaccgucaaggaccgcucccccuaccgcacccucauguccugccccgucggcgaggcccccucccccuacaacucccgcuucgaguccgucgccugguccgccuccgccugccacgacggcaucuccuggcucaccgucggcaucuccggccccgacaacggcgccgucgccguccucaaguacaacggcaucaucaccgacaccgucaaguccuggcgcaacaacauccuccgcacccaggaguccgagugcgccugcaucaacggcuccugcuucaccaucaugaccgacggccccuccaacggccaggccuccuacaagaucuucaagaucgagaagggcaaggucgucaaguccgucgagcucaacgcccccaacuaccacuacgaggagugcuccugcuaccccgacgccuccgagaucaugugcgucugccgcgacaacuggcacggcuccaaccgccccugggucuccuucaaccgcaaccucgaguaccagaucggcuacaucugcuccggcgucuucggcgacaacccccgccccaacgacggcaccggcuccugcggccccgucuccuccaacggcgccuacggcgucaagggcuucuccuucaaguacggcaagggcgucuggaucggccgcaccaaguccaccuccucccgcuccggcuucgagaugaucugggaccccaacggcuggaccgagaccgacuccuccuucuccgucaagcaggacaucgucgccaucaccgacugguccggcuacuccggcuccuucguccagcaccccgagcucaccggccucgacugcauccgccccugcuucugggucgagcucauccgcggccgccccaaggagaacaccaucuggaccuccggcuccuccaucuccuucugcggcgucaacuccgacaccgucggcugguccuggcccgacggcgccgagcuccccuucaccaucgacaaguga

SEQ ID NO: 122226 - RNA, 1410 nt, Artificial Sequence
  derived and/or modified CDS sequence (opt2) from neuraminidase__InfluenzaA__BAM85834
augaaccccaaccagaagaucaucaccaucggcuccgucucccucaccgucgccaccgucugcuuccucaugcagaucgccauccucaccaccaccgucacccuccacuucaagcagaacgagugcuccauccccgccaacaaccaggucaugcccugcgagcccaucgucaucgagcgcaacaucaccgagaucgucuaccucaacaacaccaccaucgagaaggagaucugccucaaggccgccgaguaccgcaacugguccaagccccagugccagaucaccggcuucgcccccuucuccaaggacaacuccauccgccucuccgccggcggcgacaucugggucacccgcgagcccuacgucuccugcgaccccuccaagugcuaccaguucgcccucggccagggcaccacccucgagaacaagcacuccaacggcaccauccacgaccgcaucccccaccgcacccuccucaugaacgagcucggcguccccuuccaccucggcaccaagcaggucugcaucgccugguccuccuccuccugccacgacggcaaggccuggcuccacgucugcgucaccggcgacgaccgcaacgccaccgccuccuucaucuacgacggcaugcucgucgacuccaucggcuccuggucccagaacauccuccgcacccaggaguccgagugcgucugcaucaacggcaccugcgccgucgucaugaccgacggcuccgccuccggccgcgccgacacccgcauccucuucauccgcgagggcaagaucguccacaucuccccccucuccggcuccgcccagcacaucgaggagugcuccugcuacccccgcuaccccaucauccgcugcgucugccgcgacaacuggaagggcuccaaccgccccgucaucgacaucaacauggccgacuacuccaucgacuccuccuacgucugcuccggccucgucggcgacaccccccgcaacgacgacuccuccuccuccuccaacugccgcgaccccaacaacgagcgcggcaaccccggcgucaagggcugggccuucgacaacggcaacgacgucuggaugggccgcaccaucuccaaggacucccgcuccggcuacgagaccuuccgcgucaucggcggcugggccaccgccaacuccaagucccagaccaaccgccaggucaucgucgacaacaacaacugguccggcuacuccggcaucuucuccgucgaguccaaguccugcaucaaccgcugcuucuacgucgagcucauccgcggccgcccccaggagacccgcgucugguggaccuccaacuccaucgucgucuucugcggcaccuccggcaccuacggcaccggcuccuggcccgacggcgccaacaucaacuucaugcccaucuga

SEQ ID NO: 122227 - RNA, 1410 nt, Artificial Sequence
  derived and/or modified CDS sequence (opt2) from neuraminidase__InfluenzaA__BAM85835
augaaccccaaccagaagaucaucaccaucggcuccgucucccucaccaucgccaccgucugcuuccucaugcagaucgccauccucgccaccaccgucacccuccacuucaagcagaacgagugcuccauccccgccaacaaccaggucguccccugcgagcccaucaucaucgagcgcaacaucaccgagaucgucuaccucaacaacaccaccaucgagaaggagaucugcuccaaggccgucgacuaccgcaacugguccaagccccagugccagaucaccggcuucgcccccuucuccaaggacaacuccauccgccucuccgccggcggcgacaucugggucacccgcgagcccuacgucuccugcgacaccuccaagugcuaccaguucgcccucggccagggcaccacccucgacaacaagcacuccaacggcaccauccacgaccgcaucccccaccgcacccuccucaugaacgagcucggcguccccuuccaccucggcaccaagcaggucugcaucgccugguccuccuccuccugccacgacggcaaggccuggcuccacgucugcgucaccggcgacgaccgcaacgccaccgccuccuucaucuacaacggcaugcucgucgacuccaucggcuccuggucccagaacauccuccgcacccaggaguccgagugcgucugcaucaacggcuccugcaccgucgucaugaccgacggcuccgccuccggcaaggccgacacccgcauccucuucgucaaggagggcaagaucauccacaucuccccccucuccggcuccgcccagcacaucgaggagugcuccugcuacccccgcuaccccaacguccgcugcgucugccgcgacaacuggcgcggcuccaaccgccccgucaucgacaucaacauggccgacuacuccaucgacuccuccuacgucugcuccggccucgucggcgacaccccccgcaacgacgacaacuccuccuccuccaacugccgcgaccccaacaacgagcgcggcaaccccggcgucaagggcugggccuucgacuccggcgacgacgucuggaugggccgcaccaucucccgcgacucccgcuccggcuacgagaccuucaaggucaucggcggcugggccaccgccaacuccaagucccagaccucccgccaggucaucgucgacaacaacaacugguccggcuacuccggcgucuucuccgucgagcacaaguccugcaucaaccgcugcuucuacgucgagcucauccgcggccgcccccaggagacccgcgucugguggaccuccaacuccaucgucgucuucugcggcaccuccggcaccuacggcaccggcuccuggcccgacggcgccaacaucaacuucaugcccaucuga

SEQ ID NO: 122228 - RNA, 1410 nt, Artificial Sequence
  derived and/or modified CDS sequence (opt2) from neuraminidase__InfluenzaA__BAM85836
augaaccccaaccagaagaucaucaccaucggcuccgucucccucaccaucgccaccaucugcuuccucaugcagaucgccauccucgccaccaccgucacccuccacuucaagcagaacggcugcuccauccccuccaacaaccaggucguccccugcgagcccaucaucgucgagcgcaacaucaccgagaucgucuaccucaacaacaccaccaucgagaaggagcucugccccaagguccucgaguaccgcgacugguccaagccccagugccagaucaccggcuucgcccccuucuccaaggacaacuccauccgccucuccgccggcggcgacaucugggucacccgcgagcccuacgucuccugcucccccgacaagugcuaccaguucgcccucggccagggcaccacccucgacaaccgccacuccaacggcaccauccacgaccgcaucccccaccgcacccuccucaugaacgagcucggcguccccuuccaccucggcaccaagcaggucugcaucgccugguccuccuccuccugccacgacggccgcgccuggcuccacgucugcgucaccggcgacgaccgcaacgccaccgccuccuucaucuacgacggcaugcucgucgacuccaucggcuccuggucccagaacauccuccgcacccaggaguccgagugcgucugcaucaacggcaccugcaccgucgucaugaccgacggcuccgccuccggccgcgccgacacccgcauccucuucgucaaggagggcaagaucguccacaucuccccccucuccggcuccgcccagcacaucgaggagugcuccugcuacccccgcuaccccgacguccgcugcgucugccgcgacaacuggaagggcuccaaccgccccaucaucgacaucaacauggccgacuacuccaucggcuccuccuacgucugcuccggccucgucggcgacaccccccgcaacgacgacuccuccuccaacuccaacugccgcgaccccaacaacgagcgcggcaaccccggcgucaagggcugggccuucgacuacggcaacgacgucuggaugggccgcaccaucuccaaggacucccgcuccggcuacgagaccuuccgcgucaucggcggcuggaccaccgccaacuccaagucccaggucaaccgccaggucaucgucgacaacuccaacugguccggcuacuccggcaucuucuccgucgagggcaaguccugcaucaaccgcugcuucuacgucgagcucauccgcggccgcccccaggagacccgcgucugguggaccuccaacuccaucgucgucuucugcggcaccuccggcaccuacggcaccggcuccuggcccgacggcgccaacaucaacuucaugcccaucuga

SEQ ID NO: 122229 - RNA, 1410 nt, Artificial Sequence
  derived and/or modified CDS sequence (opt2) from neuraminidase__InfluenzaA__BAO79717
augaaccccaaccagaagaucaucaccaucggcuccgucucccucaccaucuccaccaucugcuucuucaugcagaucgccauccucaucaccaccgucacccuccacuucaagcaguacgaguucaacuccccccccaacaaccaggucaugcucugcgagcccaccaucaucgagcgcaacaucaccgagaucgucuaccucaccaacaccaccaucgagaaggagaucugccccaagcccgccgaguaccgcaacugguccaagccccagugcggcaucaccggcuucgcccccuucuccaaggacaacuccauccgccucuccgccggcggcgacaucugggucacccgcgagcccuacgucuccugcgaccccgacaagugcuaccaguucgcccucggccagggcaccacccucaacaacguccacuccaacaacaccguccgcgaccgcacccccuaccgcacccuccucaugaacgagcucggcguccccuuccaccucggcaccaagcaggucugcaucgccugguccuccuccuccugccacgacggcaaggccuggcuccacgucugcaucaccggcgacgacaagaacgccaccgccuccuucaucuacaacggccgccucgucgacuccgucgucuccugguccaaggacauccuccgcacccaggaguccgagugcgucugcaucaacggcaccugcaccgucgucaugaccgacggcuccgccuccggcaaggccgacaccaagauccucuucaucgaggagggcaagaucguccacaccuccacccucuccggcuccgcccagcacgucgaggagugcuccugcuacccccgcuaccccggcguccgcugcgucugccgcgacaacuggaagggcuccaaccgccccaucgucgacaucaacaucaaggaccacuccaucgucuccuccuacgucugcuccggccucgucggcgacaccccccgcaagaacgacuccuccuccuccucccacugccucgaccccaacaacgaggagggcggccacggcgucaagggcugggccuucgacgacggcaacgacgucuggaugggccgcaccaucaacgagaccucccgccucggcuacgagaccuucaaggucaucgagggcugguccaaccccaaguccaagcuccagaucaaccgccaggucaucgucgaccgcggcgaccgcuccggcuacuccggcaucuucuccgucgagggcaagaacugcaucaaccgcugcuucuacgucgagcucauccgcggccgcaaggaggagaccgagguccucuggaccuccaacuccaucgucgucuucugcggcaccuccggcaccuacggcaccggcuccuggcccgacggcgccgaccucaaccucaugcccaucuga

SEQ ID NO: 122230 - RNA, 1413 nt, Artificial Sequence; identical to SEQ ID NO: 111095
  derived and/or modified CDS sequence (opt2) from neuraminidase__InfluenzaA__CAA33354

SEQ ID NO: 122231 - RNA, 1404 nt, Artificial Sequence
  derived and/or modified CDS sequence (opt2) from Neuraminidase__InfluenzaA__CAB95858
augaaccccaaccagaagaucaucgcccucggcuccgucuccaucaccaucgccaccaucugccuccucaugcagaucgccauccucgccaccaccaugacccuccacuucaacgagugcaccaaccccuccaacaaccaggccaugcccugcgagcccaucaucaucgagcgcaacaucaccgagaucguccaccucaacaacaccaccaucgagaaggaguccugccccaaggucgccgaguacaagaacugguccaagccccagugccagaucaccggcuucgcccccuucuccaaggacaacuccauccgccucuccgccggcggcgacaucugggucacccgcgagcccuacgucuccugcggccucggcaacugcuaccaguucgcccucggccagggcaccacccucaacaacaagcacuccaacggcaccauccacgaccgcuccccccaccgcacccuccucaugaacgagcucggcguccccuuccaccucggcaccaagcaggucugcaucgccugguccuccuccuccugccacgacggcaaggccuggcuccacgucugcgucaccggcgacgaccgcaacgccaccgccuccaucaucuacgacggcaugcucaccgacuccaucggcuccugguccaagaacauccuccgcacccaggaguccgagugcgucugcaucaacggcaccugcaccgucgucaugaccgacggcuccgccuccggccgcgccgacaccaagauccucuucauccgcgagggcaagaucguccacaucuccccccucuccggcuccgcccagcacgucgaggagugcuccugcuacccccgcuaccccgagguccgcugcgucugccgcgacaacuggaagggcuccaaccgccccguccucuacaucaacgucgccgacuacuccgucgacuccuccuacgucugcuccggccucgucggcgacaccccccgcaacgacgacuccuccuccuccuccaacugccgcgaccccaacaacgagcgcggcggccccggcgucaagggcugggccuucgacaacggcaacgacgucuggaugggccgcaccaucaagaaggacucccgcuccggcuacgagaccuuccgcgucgucggcggcuggaccaccgccaacuccaagucccagaucaaccgccaggucaucgucgacuccgacaacugguccggcuacuccggcaucuucuccgucgagggcaagaccugcaucaaccgcugcuucuacgucgagcucauccgcggccgcccccaggagacccgcgucugguggaccuccaacuccaucaucgucuucugcggcaccuccggcaccuacggcaccggcuccuggcccgacggcgccaacaucaacuucauguccaucuga

SEQ ID NO: 122232 - RNA, 1404 nt, Artificial Sequence
  derived and/or modified CDS sequence (opt2) from neuraminidase__InfluenzaA__CAB95859
augaaccccaaccagaagaucaucgcccucggcuccgucuccaucaccaucgccaccaucugccuccucaugcagaucgccauccucgccaccaccaugacccuccacuucaacgagugcaccaaccccuccaacaaccaggccguccccugcgagcccaucaucaucgagcgcaacaucaccgagaucguccaccucaacaacaccaccaucgagaaggaguccugccccaaggucgccgaguacaagaacugguccaagccccagugccagaucaccggcuucgcccccuucuccaaggacaacuccauccgccucuccgccggcggcgacaucugggucacccgcgagcccuacgucuccugcggccucggcaagugcuaccaguucgcccucggccagggcaccacccucaacaacaagcacuccaacggcaccauccacgaccgcuccccccaccgcacccuccucaugaacgagcucggcguccccuuccaccucggcaccaagcaggucugcaucgccugguccuccuccuccugccacgacggcaaggccuggcuccacgucugcgucaccggcgacgaccgcaacgccaccgccuccaucaucuacgacggcaugcucaccgacuccaucggcuccugguccaagaacauccuccgcacccaggaguccgagugcgucugcaucaacggcaccugcaccgucgucaugaccgacggcuccgccuccggccgcgccgacaccaagauccucuucauccgcgagggcaagaucguccacaucggcccccucuccggcuccgcccagcacgucgaggagugcuccugcuacccccgcuaccccgagguccgcugcgucugccgcgacaacuggaagggcuccaaccgccccguccucuacaucaacgucgccgacuacuccgucgacuccuccuacgucugcuccggccucgucggcgacaccccccgcaacgacgacuccuccuccuccuccaacugccgcgaccccaacaacgagcgcggcggccccggcgucaagggcugggccuucgacaacggcaacgacgucuggaugggccgcaccaucaagaaggacucccgcuccggcuacgagaccuuccgcgucgucggcggcuggaccaccgccaacuccaagucccagaucaaccgccaggucaucgucgacuccgacaacugguccggcuacuccggcaucuucuccgucgagggcaagaccugcaucaaccgcugcuucuacgucgagcucauccgcggccgcccccaggagacccgcgucugguggaccuccaacuccaucaucgucuucugcggcaccuccggcaccuacggcaccggcuccuggcccgacggcgccaacaucaacuucauguccaucuga

SEQ ID NO: 122233 - RNA, 1410 nt, Artificial Sequence; identical to SEQ ID NO: 110609
  derived and/or modified CDS sequence (opt2) from Neuraminidase__InfluenzaA__CAC19707

SEQ ID NO: 122234 - RNA, 1410 nt, Artificial Sequence
  derived and/or modified CDS sequence (opt2) from neuraminidase__InfluenzaA__CAD29959
augaaccccaaccagaagaucaucaccaucggcuccgucucccucaccaucgccaccaucugcuuccucaugcagaucgccauccucgucaccaccgucacccuccacuucaagcaguacgagugcaacuccccccccaacaaccaggucaugcucugcgagcccaccaucaucgagcgcaacaucaccgagaucgucuaccucaccaacaccaccaucgagaaggagaucugccccaagcucgccgaguaccgcaacugguccaagccccagugcaacaucaccggcuucgcccccuucuccaaggacaacuccauccgccucuccgccggcggcgacaucugggucacccgcgagcccuacgucuccugcgaccccgacaagugcuaccaguucgcccucggccagggcaccacccucaacaacggccacuccaacgacaccguccacgaccgcacccccuaccgcacccuccucaugaacgagcucggcguccccuuccaccucggcaccaagcaggucugcaucgccugguccuccuccuccugccacgacggcaaggccuggcuccacgucugcgucaccggcgacgacgagaacgccaccgccuccuucaucuacaacggccgccucgucgacuccaucggcuccugguccaagaagauccuccgcacccaggaguccgagugcgucugcaucaacggcaccugcaccgucgucaugaccgacggcuccgccuccggcaaggccgacaccaagauccucuucaucgaggagggcaagaucguccacaccuccccccucuccggcuccgcccagcacgucgaggagugcuccugcuacccccgcuaccccggcguccgcugcgucugccgcgacaacuggaagggcuccaaccgccccaucgucgacaucaacgucaaggacuacuccaucgucuccuccuacgucugcuccggccucgucggcgacaccccccgcaagaacgacuccuccuccuccucccacugccucaaccccaacaacgaggagggcggccacggcgucaagggcugggccuucgacgacggcaacgacgucuggaugggccgcaccaucuccgagaagcuccgcuccggcuacgagaccuucaaggucaucgagggcugguccaagcccaacuccaagcuccagaucaaccgccaggucaucgucgaccgcggcaaccgcuccggcuacuccggcaucuucuccgucgagggcaaguccugcaucaaccgcugcuucuacgucgagcucauccgcggccgcaagcaggagaccgagguccucuggaccuccaacuccaucgucgucuucugcggcaccuccggcaccuacggcaccggcuccuggcccgacggcgccgacaucaaccucaugcccaucuga

SEQ ID NO: 122235 - RNA, 1410 nt, Artificial Sequence
  derived and/or modified CDS sequence (opt2) from neuraminidase__InfluenzaA__CAD29960
augaaccccaaccagaagaucaucaccaucggcuccgucucccucaccaucgccaccaucugcuuccucaugcagaucgccauccucgucaccaccgucacccuccacuucaagcaguacgagugcaaccccccccccaacaaccaggucaugcucugcgagcccaccaucaucgagcgcaacaucaccgagaucgucuaccucaccaacaccaccaucgagaaggagaucugccccaagcucgccgaguaccgcaacugguccaagccccagugcaacaucaccggcuucgcccccuucuccaaggacaacuccauccgccucuccgccggcggcgacaucugggucacccgcgagcccuacgucuccugcgaccccgacaagugcuaccaguucgcccucggccagggcaccacccucaacaacggccacuccaacgacaccguccacguccgcacccccuaccgcacccuccucaugaacgagcucggcguccccuuccaccucggcaccaagcaggucugcaucgccugguccuccuccuccugccacgacggcaaggccuggcuccacgucugcgucaccggcgacgacgagaacgccaccgccuccuucaucuacaacggccgccucgucgacuccaucggcuccugguccaagaagauccuccgcacccaggaguccgagugcgucugcaucaacggcaccugcaccgucgucaugaccgacggcuccgccuccggcaaggccgacaccaagauccucuucaucgaggagggcaagaucguccacaccuccccccucuccggcuccgcccagcacgucgaggagugcuccugcuacccccgcuaccccggcguccgcugcgucugccgcgacaacuggaagggcuccaaccgccccaucgucgacaucaacgucaaggacuacuccaucgucuccuccuacgucugcuccggccucgucggcgacaccccccgcaagaacgacuccuccuccuccucccacugccucaaccccaacaacgaggagggcggccacggcgucaagggcugggccuucgacgacggcaacgacgucuggaugggccgcaccaucuccgagaagcuccgcuccggcuacgagaccuucaaggucaucgagggcugguccaagcccaacuccaagcuccagaucaaccgccaggucaucgucgaccgcggcaaccgcuccggcuacuccggcaucuucuccgucgagggcaaguccugcaucaaccgcugcuucuacgucgagcucauccgcggccgcaagcaggagaccgagguccucuggaccuccaacuccaucgucgucuucugcggcaccuccggcaccuacggcaccggcuccuggcccgacggcgccgacaucaaccucaugcccaucuga

SEQ ID NO: 122236 - RNA, 1410 nt, Artificial Sequence
  derived and/or modified CDS sequence (opt2) from neuraminidase__InfluenzaA__CAD29961
augaaccccaaccagaagaucaucaccaucggcuccgucucccucaccaucuccaccaucugcuucuucaugcagaucgccauccucgucaccaccgucacccuccacuucaagcaguacgagugcaacuccccccccaacaaccaggucaugcucugcgagcccaccaucaucgagcgcaacaccaccgagaucgucuaccucaccaacaccaccaucgagaaggagaucugccccaagcucgccgaguaccgcaacugguccaagccccagugcaacaucaccggcuucgcccccuucuccaaggacaacuccauccgccucuccgccggcggcgacaucugggucacccgcgagcccuacgucuccugcgaccccgacaagugcuaccaguucgcccucggccagggcaccacccucaacaacggccacuccaacgacaccguccacgaccgcacccccuaccgcacccuccucaugaacgagcucggcguccccuuccaccucggcaccaagcaggucugcaucgccugguccuccuccuccugccacgacggcaaggccuggcuccacgucugcgucaccggcgacgacgagaacgccaccgccuccuucaucuacaacggccgccucgucgacuccaucggcuccugguccaagaagauccuccgcacccaggaguccgagugcgucugcaucaacggcaccugcaccgucgucaugaccgacggcuccgccuccggcaaggccgacaccaagauccucuucaucgaggagggcaagaucguccacaccuccacccucuccggcuccgcccagcacgucgaggagugcuccugcuacccccgcuaccccggcguccgcugcgucugccgcgacaacuggaagggcuccaaccgccccaucgucgacaucaacaucaaggacuacuccaucgucuccuccuacgucugcuccggccucgucggcgacaccccccgcaagaacgacuccuccuccuccucccacugccucgaccccaacaacgaggagggcggccacggcgucaagggcugggccuucgacgacggcaacgacgucuggaugggccgcaccaucuccgagaagcuccgcuccggcuacgagaccuucaaggucaucgagggcugguccaagcccaacuccaagcuccagaucaaccgccaggucaucgucgaccgcggcaaccgcuccggcuacuccggcaucuucuccgucgagggcaaguccugcaucaaccgcugcuucuacgucgagcucauccgcggccgcaagcaggagaccgagguccucuggaccuccaacuccaucgucgucuucugcggcaccuccggcaccuacggcaccggcuccggccccgacggcgccgacaucaaccucaugcccaucuga

SEQ ID NO: 122237 - RNA, 1410 nt, Artificial Sequence; identical to SEQ ID NO: 117581
  derived and/or modified CDS sequence (opt2) from neuraminidase__InfluenzaA__CAD29962

SEQ ID NO: 122238 - RNA, 1410 nt, Artificial Sequence; identical to SEQ ID NO: 110320
  derived and/or modified CDS sequence (opt2) from neuraminidase__InfluenzaA__CAD29963

SEQ ID NO: 122239 - RNA, 1410 nt, Artificial Sequence; identical to SEQ ID NO: 110320
  derived and/or modified CDS sequence (opt2) from neuraminidase__InfluenzaA__CAD29964

SEQ ID NO: 122240 - RNA, 1410 nt, Artificial Sequence; identical to SEQ ID NO: 110320
  derived and/or modified CDS sequence (opt2) from neuraminidase__InfluenzaA__CAD29965

SEQ ID NO: 122241 - RNA, 1410 nt, Artificial Sequence; identical to SEQ ID NO: 110320
  derived and/or modified CDS sequence (opt2) from neuraminidase__InfluenzaA__CAD29966

SEQ ID NO: 122242 - RNA, 1410 nt, Artificial Sequence; identical to SEQ ID NO: 110076
  derived and/or modified CDS sequence (opt2) from neuraminidase__InfluenzaA__CAD29967

SEQ ID NO: 122243 - RNA, 1410 nt, Artificial Sequence; identical to SEQ ID NO: 110076
  derived and/or modified CDS sequence (opt2) from neuraminidase__InfluenzaA__CAD29968

SEQ ID NO: 122244 - RNA, 1410 nt, Artificial Sequence; identical to SEQ ID NO: 110609
  derived and/or modified CDS sequence (opt2) from neuraminidase__InfluenzaA__CAD29969

SEQ ID NO: 122245 - RNA, 1410 nt, Artificial Sequence
  derived and/or modified CDS sequence (opt2) from neuraminidase__InfluenzaA__CAD29970
augaaccccaaccagaagaucaucaccaucggcuccgucucccucaccaucgccaccaucugcuuccucaugcagaucgccauccucgucaccaccgucacccuccacuucaagcaguacgagugcaacuccccccccaacaaccaggucaugcucugcgagcccaccaucaucgagcgcaacaucaccgagaucgucuaccucaccaacaccaccaucgagaaggagaucugccccaagcucgccgaguaccgcaacugguccaagccccagugcaagaucaccggcuucgcccccuucuccaaggacaacuccauccgccucuccgccggcggcgacaucugggucacccgcgagcccuacgucuccugcgaccccgacaagugcuaccaguucgcccucggccagggcaccacccucaacaaccgccacuccaacgacaccguccacgaccgcacccccuaccgcacccuccucaugaacgagcucggcguccccuuccaccucggcaccaagcaggucugcaucgccugguccuccuccuccugccacgacggcaaggccuggcuccacgucugcgucaccggccacgacgagaacgccaccgccuccuucaucuacgacggccgccucgucgacuccaucggcuccugguccaagaagauccuccgcacccaggaguccgagugcgucugcaucaacggcaccugcaccgucgucaugaccgacggcuccgccuccggccgcgccgacaccaagauccucuucaucgaggagggcaagaucguccacaucuccccccucuccggcuccgcccagcacgucgaggagugcuccugcuacccccgcuaccccggcauccgcugcgucugccgcgacaacuggaagggcuccaaccgccccaucgucgacaucaacgucaaggacuacuccaucgucuccuccuacgucugcuccggccucgucggcgacaccccccgcaagaacgacuccuccuccuccucccacugccucaaccccaacaacgaggagggcggccacggcgucaagggcugggccuucgacgacggcaacgacgucuggaugggccgcaccaucuccgagaagcuccgcuccggcuacgagaccuucaaggucaucgagggcugguccaagcccaacuccaagcuccagaucaaccgccaggucaucgucgaccgcggcaaccgcuccggcuacuccggcaucuucuccgucgagggcaaguccugcaucaaccgcugcuucuacgucgagcucauccgcggccgcaagcaggagaccgaggucugguggaccuccaacuccaucgucgucuucugcggcaccuccggcaccuacggcaccggcuccuggcccgacggcgccgacaucaaccucaugcccaucuga

SEQ ID NO: 122246 - RNA, 1410 nt, Artificial Sequence; identical to SEQ ID NO: 112591
  derived and/or modified CDS sequence (opt2) from neuraminidase__InfluenzaA__CAD29971

SEQ ID NO: 122247 - RNA, 1410 nt, Artificial Sequence
  derived and/or modified CDS sequence (opt2) from neuraminidase__InfluenzaA__CAD29972
augaaccccaaccagaagaucaucaccaucggcuccgucucccucaccaucgccaccaucugcuuccucaugcagaucgucauccucgucaccaccgucacccuccacuucaagcaguacgagugcaacuccccccccaacaaccaggucaugcucugcgagcccaccaucaucgagcgcaacaucaccgagaucgucuaccucaccaacaccaccaucgagaaggagaucugccccaagcucgccgaguaccgcaacugguccaagccccagugcaacaucaccggcuucgcccccuucuccaaggacaacuccauccgccucuccgccggcggcgacaucugggucacccgcgagcccuacgucuccugcgaccccgacaagugcuaccaguucgcccucggccagggcaccacccucaacaacggccacuccaacgacaccguccacgaccgcacccccuaccgcacccuccucaugaacgagcucggcguccccuuccaccucggcaccaagcaggucugcaucgccugguccuccuccuccugccacgacggcaaggccuggcuccacgucugcgucaccggcgacgacaagaacgccaccgccuccuucaucuacaacggccgccucgucgacuccaucggcuccugguccaagaagauccuccgcacccaggaguccgagugcgucugcaucaacggcaccugcgccgucgucaugaccgacggcuccgccuccggcaaggccgacaccaagauccucuucaucgaggagggcaagaucggccacaccucccuccucuccggcuccgcccagcacgucgaggagugcuccugcuacccccgcuaccccggcguccgcugcgucugccgcgacaacuggaagggcuccaaccgccccaucgucgacaucaacgucaaggacuacuccaucgucuccuccuacgucugcuccggccucgucggcgacaccccccgcaagaacgacuccuccuccuccucccacugccucgaccccaacaacgaggagggcggccacggcgucaagggcugggccuucgacgacggcaacgacgucuggaugggccgcaccaucuccgagaagcuccgcuccggcuacgagaccuucaaggucaucgagggcugguccaagcccaacuccaagcuccagaucaaccgccaggucaucgucgaccgcggcaaccgcuccggcuacuccggcaucuucuccgucgagggcaaguccugcaucaaccgcugcuucuacgucgagcucauccgcggccgcaaccaggagaccgagauccucuggaccuccaacuccaucgucgucuucugcggcaccuccggcaccuacggcaccggcuccuggcccgacggcgccgacaucaaccucaugcccaucuga

SEQ ID NO: 122248 - RNA, 1410 nt, Artificial Sequence
  derived and/or modified CDS sequence (opt2) from neuraminidase__InfluenzaA__CAD29973
augaaccccaaccagaagaucaucaccaucggcuccgucucccucaccaucgccaccaucugcuuccucaugcagaucgccauccucgucaccaccgucacccuccacuucaagcaguacgagugcaacuccccccccaacaaccaggucaugcucugcgagcccaccaucaucgagcgcaacaucaccgagaucgucuaccucaccaacaccaccaucgagaaggagaucugccccaagcucgccgaguaccgcaacugguccaagccccagugcaagaucaccggcuucgcccccuucuccaaggacaacuccauccgccucuccgccggcggcgacaucugggucacccgcgagcccuacgucuccugcgaccccggcaagugcuaccaguucgcccucggccagggcaccacccucaacaaccgccacuccaacgacaccguccacgaccgcacccccuaccgcacccuccucaugaacgagcucggcguccccuuccaccucggcaccaagcaggucugcaucgccugguccuccuccuccugccacgacggcaaggccuggcuccacgucugcgucaccggccacgacgagaacgccaccgccuccuucaucuacgacggccgccucgucgacuccaucggcuccugguccaagaagauccuccgcacccaggaguccgagugcgucugcaucaacggcaccugcaccgucgucaugaccgacggcuccgccuccggccgcgccgacaccaagauccucuucaucgaggagggcaagaucguccacaucuccccccucuccggcuccgcccagcacgucgaggagugcuccugcuacccccgcuacuccggcguccgcugcgucugccgcgacaacuggaagggcuccaaccgccccaucgucgacaucaacgucaaggacuacuccaucgucuccuccuacgucugcuccggccucgucggcgacaccccccgcaagaacgacuccuccuccuccucccacugccucaaccccaacaacgaggagggcggccacggcgucaagggcugggccuucgacgacggcaacgacgucuggaugggccgcaccaucuccgagaagcuccgcuccggcuacgagaccuucaaggucaucggcggcugguccaagcccaacuccaagcuccagaucaaccgccaggucaucgucgaccgcggcaaccgcuccggcuacuccggcaucuucuccgucgagggcaaguccugcaucaaccgcugcuucuacgucgagcucauccgcggccgcaagcaggagaccgaggucugguggaccuccaacuccaucgucgucuucugcggcaccuccggcaccuacggcaccggcuccuggcccgacggcgccgacaucaaccucaugcccaucuga

SEQ ID NO: 122249 - RNA, 1410 nt, Artificial Sequence; identical to SEQ ID NO: 118620
  derived and/or modified CDS sequence (opt2) from neuraminidase__InfluenzaA__CAD29974

SEQ ID NO: 122250 - RNA, 1410 nt, Artificial Sequence
  derived and/or modified CDS sequence (opt2) from neuraminidase__InfluenzaA__CAD29984
augaaccccaaccagaagaucaucaccaucggcuccgucucccucaccaucgccaccaucugcuuccucaugcagaucgccauccucgucaccaccgucacccuccacuucaagcaguacgagugcaacuccccccccaacaaccaggucaugcucugcgagcccaccaucaucgagcgcaacaucaccgagaucgucuaccucaccaacaccaccaucgagaaggagaucugccccaagcucgccgaguaccgcaacugguccaagccccagugcaacaucaccggcuucgcccccuucuccaaggacaacuccauccgccucuccgccggcggcgacaucugggucacccgcgagcacuacgucuccugcgaccgcgacaagugcuaccaguucgcccucggccagggcaccacccucaacaacggccacuccaacgacaccguccacgaccgcacccccuaccgcacccuccucaugaacgagcucggcguccccuuccaccucggcaccaagcaggucugcaucgccugguccuccuccuccugccaccacggcaaggccuggcuccacgucugcgucaccggcgacgacgagaacgccaccgccuccuucaucuacaacggccgccucgucgacuccaucggcuccugguccaagaagauccuccgcacccaggaguccgagugcgucugcaucaacggcaccugcaccgucgucaugaccgacggcuccgccuccggcaaggccgacaccaagauccucuucaucaaggagggcaagaucguccacaccuccucccucuccggcuccgcccagcacgucgaggagugcuccugcuacccccgcuaccccggcguccgcugcgucugccgcgacaacuggaagggcuccaaccgccccaucgucgacaucaacgucaaggacuacuccaucgucuccuccuacgucugcuccggccucgucggcgacaccccccgcaagaacgacuccuccuccuccucccacugccucgaccccaacaacgaggagggcggccacggcgucaagggcugggccuucgacgacggcaacgacgucuggaugggccgcaccaucuccgagaagcuccgcuccggcuacgagaccuucaaggucaucgagggcugguccaaggccaacuccaagcuccagaucaaccgccaggucaucgucgaccgcggcaaccgcuccggcuacuccggcaucuucuccgucgaguccaaguccugcaucaaccgcugcuucuacgucgagcucauccgcggccgcaagcaggagaccgagguccucuggaccuccaacuccaucgucgucuucugcggcaccuccggcaccuacggcaccggcuccuggcccgacggcgccgacaucaaccucaugcccaucuga

SEQ ID NO: 122251 - RNA, 1410 nt, Artificial Sequence
  derived and/or modified CDS sequence (opt2) from neuraminidase__InfluenzaA__CAD29985
augaaccccaaccagaagaucaucaccaucggcuccgucucccucaccaucgccaccaucugcuuccucaugcagaucgccauccucgucaccaccgucacccuccacuucaagcaguacgagugcaacuccccccccaacaaccaggucaugcucugcgagcccaccaucaucgagcgcaacaucaccgagaucgucuaccucaccaacaccaccaucgagaaggagaucugccccaagcucgccgaguaccgcaacugguccaagccccagugcaacaucaccggcuucgcccccuucuccaaggacaacuccauccgccucuccgccggcggcgacaucugggucacccgcgagcccuacgucuccugcgaccccgacaagugcuaccaguucgcccucggccagggcaccacccucaacaacggccacuccaacgacaccguccacgaccgcacccccuaccgcacccuccucaugaacgagcucggcguccccuuccaccucggcaccaagcaggucugcaucgccugguccuccuccuccugccacgacggcaaggccuggcuccacgucugcgucaccggcgacgacgagaacgccaccgccuccuucaucuacaacggccgccucgucgacuccaucggcuccugguccaagaagauccuccgcacccaggaguccgagugcgucugcaucaacggcaccugcaccgucgucaugaccgacggcuccgccuccggcaaggccgacaccaagauccucuucaucgaggagggcaagaucguccacaucuccacccucuccggcuccgcccagcacgucgaggagugcuccugcuacccccgcuaccccggcguccgcugcgucugccgcgacaacuggaagggcuccaaccgccccaucgucgacaucaacgucaaggacuacuccaucgucuccuccuacgucugcuccggccucgucggcgacaccccccgcaagaacgacuccuucuccuccucccacugccucgaccccaacaacgaggagggcggccacggcgucaagggcugggccuucgacgacggcaacgacgucuggaugggccgcaccaucuccgagaagcuccgcuccggcuacgagaccuucaaggucaucgagggcugguccaagcccaacuccaagcuccagaucaaccgccaggucaucgucgagcgcggcaaccgcuccggcuacuccggcaucuucuccgucgagggcaaguccugcaucaaccgcugcuucuacgucgagcucauccgcggccgcaaggaggagaccgaggucugguggaccuccaacuccaucgucgucuucugcggcaccucccgcaccuacggcaccggcuccuggcccgacggcgccgacaucaaccucaugcccaucuga

SEQ ID NO: 122252 - RNA, 1410 nt, Artificial Sequence
  derived and/or modified CDS sequence (opt2) from neuraminidase__InfluenzaA__CAD29988
augaaccccaaccagaagaucaucaccaucggcuccgucucccucaccaucgccaccaucugcuuccucaugcagaucgccauccucgucaccaccgucacccuccacuucaagcaguacgagugcaacuccccccccaacaaccaggucaugcucugcgagcccaccaucaucgagcgcaacaucaccgagaucgucuaccucaccaacaccaccaucgagaaggagaucugccccaagcucgccgaguaccgcaacugguccaagccccagugcaacaucaccggcuucgcccccuucuccaaggacaacuccauccgccucuccgccggcggcgacaucugggucacccgcgagcccuacgucuccugcgaccccgacaagugcuaccaguucgcccucggccagggcaccacccucaacaacggccacuccaacgacaccguccacgaccgcacccccuaccgcacccuccucaugaacgagcucggcguccccuuccaccucggcacccgccaggucugcaucgccugguccuccuccuccugccacgacggcaaggccuggcuccacgucugcgucaccggcgacgacgagaacgccaccgccuccuucaucuacaacggccgccucgucgacuccaucggcuccugguccaagaagauccuccgcacccaggaguccgagugcgucugcaucaacggcaccugcaccgucgucaugaccgacggcuccgccuccgagaaggccgacaccaagauccucuucaucgaggagggcaagaucguccacaucuccacccucuccggcuccgcccagcacgucgaggagugcuccugcuacccccgcuaccccggcguccgcugcgucugccgcgacaacuggaagggcuccaaccgccccaucgucgacaucaacgucaaggacuacuccaucgucuccuccuacgucugcuccggccucgucggcgacaccccccgcaagaacgacuccuucuccuccucccacugccucgaccccaacaacgaggagggcggccacggcgucaagggcugggccuucgacgacggcaacgacgucuggaugggccgcaccaucuccgagaagcuccgcuccggcuacgagaccuucaaggucaucgagggcugguccaagcccaacuccaagcuccagaucaaccgccaggucaucgucgagcgcggcaaccgcuccggcuacuccggcaucuucuccgucgagggcaaguccugcaucaaccgcugcuucuacgucgagcucauccgcggccgcaaggaggagaccgaggucugguggaccuccaacuccaucgucgucuucugcggcaccuccggcaccuacggcaccggcuccuggcccgacggcgccgacaucaaccucaugcccaucuga

SEQ ID NO: 122253 - RNA, 1410 nt, Artificial Sequence
  derived and/or modified CDS sequence (opt2) from neuraminidase__InfluenzaA__CAD29990
augaaccccaaccagaagaucaucaccaucggcuccgucucccucaccaucgccaccaucugcuuccucaugcagaucgccauccucgucaccaccgucacccuccacuucaagcaguacgagugcaacuccccccccaacaaccaggucaugcucugcgagcccaccaucaucgagcgcaacaucaccgagaucgucuaccucaccaacaccaccaucgagaaggagaucugccccaagcucgccgaguaccgcaacugguccaagccccagugcaacaucaccggcuucgcccccuucuccaaggacaacuccauccgccucuccgccggcggcgacaucugggucacccgcgagcccuacgucuccugcgaccccgacaagugcuaccaguucgcccucggccagggcaccacccucaacaacggccacuccaacgacaccguccacggccgcacccccuaccgcacccuccucaugaacgagcucggcguccccuuccaccucggcaccaagcaggucugcaucgccugguccuccuccuccugccacgacggcaaggccuggcuccacgucugcgucaccggcgacgacgagaacgccaccgccuccuucaucuacaacggccgccucgucgacuccaucggcuccugguccaagaagauccuccgcacccaggaguccgagugcgucugcaucaacggcaccugcaccgucgucaugaccgacggcuccgccuccggcaaggccgacaccaagauccucuucaucgaggagggcaagaucguccacaccucccuccucuccggcuccgcccagcacgucgaggagugcuccugcuacccccgcuaccccggcguccgcugcgucugccgcgacaacuggaagggcuccaaccgccccaucgucgacaucaacgucaaggacuacuccaucgucuccuccuacgucugcuccggccucgucggcgacaccccccgcaagaacgacaacuccuccuccucccacugccucgaccccaacaacgaggagggcggccacggcgucaagggcugggccuucgacgacggcaacgacgucuggaugggccgcaccaucuccgagaagcuccgcuccggcuacgagaccuucaaggucaucgagggcugguccaagcccaacuccaagcuccagaucaaccgccaggucaucgucgaccgcggcaaccgcuccggcuacuccggcaucuucuccgucgagggcaaguccugcaucaaccgcugcuucuacgucgagcucauccgcggccgcaagcaggagaccgagguccucuggaccuccaacuccaucgucgucuucugcggcaccuccggcaccuacggcaccggcuccuggcccgacggcgccgacaucaaccucaugcccaucuga

SEQ ID NO: 122254 - RNA, 1410 nt, Artificial Sequence; identical to SEQ ID NO: 110097
  derived and/or modified CDS sequence (opt2) from neuraminidase__InfluenzaA__CAD29991

SEQ ID NO: 122255 - RNA, 1410 nt, Artificial Sequence
  derived and/or modified CDS sequence (opt2) from neuraminidase__InfluenzaA__CAD29992
augaaccccaaccagaagaucaucaccaucggcuccgucucccucaccaucgccaccaucugcuuccucaugcagaucgccauccucgucaccaccgucacccuccacuucaagcaguacgagugcaacuccccccccaacaaccaggucaugcucugcgagcccaccaucaucgagcgcaacaucaccgagaucgucuaccucaccaacaccaccaucgagaaggagaucugccccaagcucgccgaguaccgcaacugguccaagccccagugcaacaucaccggcuucgcccccuucuccaaggacaacuccauccgccucuccgccggcggcgacaucugggucacccgcgagcccuacgucuccugcgaccccgacaagugcuaccaguucgcccucggccagggcaccacccucaacaacggccacuccaacgacaccguccacgaccgcacccccuaccgcacccuccucaugaacgagcucggcguccccuuccaccucggcaccaagcaggucugcaucgccugguccuccuccuccugccacgacggcaaggccuggcuccacgucugcgucaccggcgacgacgagaacgccaccgccuccuucaucuacaacggccgccucgucgacuccaucggcuccugguccaagaagauccuccgcacccaggaguccgagugcgucugcaucaacggcaccugcaccgucgucaugaccgacggcuccgccuccggcaaggccgacaccaagauccucuucaucgaggagggcaagaucguccacaccucccuccucuccggcuccgcccagcacgucgaggagugcuccugcuacccccgcuaccccggcguccgcugcgucugccgcgacaacuggaagggcuccaaccgccccaucgucgacaucaacgucaaggaccgcuccaucgucuccuccuacgucugcuccggccucgucggcgacaccccccgcaagaacgacuccuccuccuccucccacugccucgaccccaacaacgaggagggcggccacggcgucaagggcugggccuucgacgacggcaacgacgucuggaugggccgcaccaucuccgagaagcuccgcuccggcuacgagaccuucaaggucaucgagggcugguccaagcccaacuccaagcuccagaucaaccgccaggucaucgucgaccgcggcaaccgcuccggcuacuccggcaucuucuccgucgagggcaaguccugcaucaaccgcugcuucuacgucgagcucauccgcggccgcaagcaggagaccgagguccucuggaccuccaacuccaucgucgucuucugcggcaccuccggcaccuacggcaccggcuccuggcccgacggcgccgacaucaaccucaugcccaucuga

SEQ ID NO: 122256 - RNA, 1410 nt, Artificial Sequence
  derived and/or modified CDS sequence (opt2) from neuraminidase__InfluenzaA__CAD29993
augaaccccaaccagaagaucaucaccaucggcuccgucucccucaccaucgccaccaccugcuuccucaugcagaucgccauccucgucaccaccgucacccuccacuucaagcaguacgagugcaacuccccccccaacaaccaggucaugcucugcgagcccaccaucaucgagcgcaacaucaccgagaucgucuaccucaccaacaccaccaucgagaaggagaucugccccaagcucgccgaguaccgcaacugguccaagccccagugcaacaucaccggcuucgcccccuucuccaaggacaacuccauccgccucuccgccggcggcgacaucugggucacccgcgagcccuacgucuccugcgaccccgacaagugcuaccaguucgcccucggccagggcaccacccucaacaacggccacuccaacgacaccguccacgaccgcacccccuaccgcacccuccucaugaacgagcucggcguccccuuccaccucggcaccaagcaggucugcaucgccugguccuccuccuccugccacgacggcaaggccuggcuccacgucugcgucaccggcgacgacgagaacgccaccgccuccuucaucuacaacggccgccucgucgacuccaucggcuccugguccaagaagauccuccgcacccaggaguccgagugcgucugcaucaacggcaccugcaccgucgucaugaccgacggcuccgccuccggcaaggccgacaccaagauccucuucaucgaggagggcaagaucguccacaccuccccccucuccggcuccgcccagcacgucgaggagugcuccugcuacccccgcuaccccggcguccgcugcgucugccgcgacaacuggaagggcuccaaccgccccaucgucgacaucaacgucaaggacuacuccaucgucuccuccuacgucugcuccggccucgucggcgacaccccccgcaagaacgacuccuccuccuccucccacugccucgaccccaacaacgaggagggcggccacggcgucaagggcugggccuucgacgacggcaacgacgucuggaugggccgcaccaucuccgagaagcuccgcuccggcuacgagaccuucaaggucaucgagggcugguccaagcccaacuccaagcuccagaucaaccgccaggucaucgucgaccgcggcaaccgcuccggcuacuccggcaucuucuccgucgagggcaaguccugcaucaaccgcugcuucuacgucgagcucauccgcggccgcaagcaggagaccgagguccucuggaccuccaacuccaucgucgucuucugcggcaccuccggcaccuacggcaccggcuccuggcccgacggcgccgacaucaaccucaugcccaucuga

SEQ ID NO: 122257 - RNA, 1410 nt, Artificial Sequence; identical to SEQ ID NO: 111785
  derived and/or modified CDS sequence (opt2) from neuraminidase__InfluenzaA__CAD29994

SEQ ID NO: 122258 - RNA, 1413 nt, Artificial Sequence; identical to SEQ ID NO: 112489
  derived and/or modified CDS sequence (opt2) from neuraminidase__InfluenzaA__CAD57252

SEQ ID NO: 122259 - RNA, 1413 nt, Artificial Sequence
  derived and/or modified CDS sequence (opt2) from neuraminidase__InfluenzaA__CAD57253
augaaccccaaccagaagaucaucaccaucggcuccauccgcaucgccaucggcaucaucucccucaugcuccagaucggcaacaucaucuccaucugggccucccacuccauccagaccggcucccagaaccacaccggcgucugcaaccagcgcaucaucaccuacgagaacuccaccugggucaaccacaccuacgucaacaucaacaacaccaacgucaucgccggcaaggacaagaccuccgucacccucgccggcaacuccucccucugcuccaucuccggcugggccaucuacaccaaggacaacuccauccgcaucggcuccaagggcgacgucuucgucauccgcgagcccuucaucuccugcucccaccucgagugccgcaccuucuuccucacccagggcgcccuccucaacgacaagcacuccaacggcaccgucaaggaccgcucccccuaccgcgcccucauguccugcccccucggcgaggcccccucccccuacaacuccaaguucgaguccgucgccugguccgccuccgccugccacgacggcaugggcuggcucaccaucggcaucuccggccccgacaacggcgccgucgccguccucaaguacaacggcaucaucaccgagaccaucaaguccuggaagaagcagauccuccgcacccaggaguccgagugcgucugcgucaacggcuccugcuucaccaucaugaccgacggccccuccaacggcgccgccuccuacaagaucuucaagaucgagaagggcaagaucaccaaguccaucgagcucaacgcccccaacuuccacuacgaggagugcuccugcuaccccgacaccggcaccgucaugugcgucugccgcgacaacuggcacggcuccaaccgccccugggucuccuucaaccagaaccucgacuaccagaucggcuacaucugcuccggcgucuucggcgacaacccccgccccaaggacggcgagggcuccugcaaccccgucaccgucgacggcgccaacggcgucaagggcuucuccuacaaguacggcaacggcgucuggaucggccgcaccaaguccaaccgccuccgcaagggcuucgagaugaucugggaccccaacggcuggaccgacaccgacuccgacuucuccgucaagcaggacgucgucgccaucaccgacugguccggcuacuccggcuccuucguccagcaccccgagcucaccggccucgacugcauccgccccugcuucugggucgagcucguccgcggccuccccaaggagaacaccaccaucuggaccuccggcuccuccaucuccuucugcggcgucaacuccgacaccgccaacugguccuggcccgacggcgccgagcuccccuucaccaucgacaaguga

SEQ ID NO: 122260 - RNA, 1413 nt, Artificial Sequence; identical to SEQ ID NO: 110432
  derived and/or modified CDS sequence (opt2) from neuraminidase__InfluenzaA__CAD57255

SEQ ID NO: 122261 - RNA, 1413 nt, Artificial Sequence
  derived and/or modified CDS sequence (opt2) from neuraminidase__InfluenzaA__CAD57256
augaaccccaaccagaagaucaucaccaucggcuccaucuccgucgccaucggcaucaucucccucaugcuccagaucggcaacaucaucuccaucugggccucccacuccauccagaccggcucccagaaccacaccggcaucugcaaccagcgcaucaucaccuacgagaacuccaccugggucaaccacaccuacgucaacaucaacaacaccaacgucgucgccggcaaggacaagaccuccgucacccucgccggcaacuccucccucugcuccaucuccggcugggccaucuacaccaaggacaacuccauccgcaucggcuccaagggcgacgucuucgucauccgcgagcccuucaucuccugcucccaccucgagugccgcaccuucuuccucacccagggcgcccuccucaacgacaagcacuccaacggcaccgucaaggaccgcucccccuaccgcgcccucauguccugcccccucggcgaggcccccucccccuacaacuccaaguucgaguccgucgccugguccgccuccgccugccacgacggcaugggcuggcucaccaucggcaucuccggccccgacaacggcgccgucgccguccucaaguacaacggcaucaucaccgagaccaucaaguccuggaagaagcgcauccuccgcacccaggaguccgagugcgucugcgucaacggcuccugcuucaccaucaugaccgacggccccuccaacggcgccgccuccuaccgcaucuucaagaucgagaagggccgcgucaccaaguccaucgagcucgacgcccccaacuaccacuacgaggagugcuccugcuaccccgacaccggcaccgucaugugcgucugccgcgacaacuggcacggcuccaaccgccccugggucuccuucaaccagaaccucgacuaccagaucggcuacaucugcuccggcgucuucggcgacaacccccgccccaaggacggcgagggcuccugcaaccccgucaccgucgacggcgccgacggcgucaagggcuucuccuacaaguacggcaacggcgucuggaucggccgcaccaaguccaaccgccuccgcaagggcuucgagaugaucugggaccccaacggcuggaccgacaccgacuccgacuucuccgucaagcaggacgucgucgccaucaccgacugguccggcuacuccggcuccuucguccagcaccccgagcucaccggccucgacugcauccgccccugcuucugggucgagcucguccgcggccgcccccgcgagaacaccaccaucuggaccuccggcuccuccaucuccuucugcggcgucaacuccgacaccgccaacugguccuggcccgacggcgccgagcuccccuucaccaucgacaaguga

SEQ ID NO: 122262 - RNA, 1413 nt, Artificial Sequence
  derived and/or modified CDS sequence (opt2) from neuraminidase__InfluenzaA__CAD57257
augaaccccaaccagaagaucaucaccaucggcuccaucuccaucgccaucggcaucaucucccucaugcuccagaucggcaacaucaucuccaucugggccucccacuccauccagaccggcucccagaaccacaccggcaucugcaaccagcgcaucaucaccuacgagaacuccaccugggucaaccacaccuacgucaacaucaacaacaccaacgucgucgccggcaaggacaagaccuccgucacccucgccggcaacuccucccucugcuccaucuccggcugggccaucuacaccaaggacaacuccauccgcaucggcuccaagggcgacgucuucgucauccgcgagcccuucaucuccugcucccaccucgagugccgcaccuucuuccucacccagggcgcccuccucaacgacaagcacuccaacggcaccgucaaggaccgcucccccuaccgcgcccucauguccugcccccucggcgaggcccccucccccuacaacuccaaguucgaguccgucgccugguccgccuccgccugccacgacggcaugggcuggcucaccaucggcaucuccggccccgacaacggcgccgucgccguccucaaguacaacggcaucaucaccgagaccaucaaguccuggaagaagcgcauccuccgcacccaggaguccgagugcgucugcgucaacggcuccugcuucaccaucaugaccgacggccccuccaacggcgccgccuccuacaagaucuucaagaucgagaagggcaaggucaccaaguccaucgagcucaacgcccccaacucccacuacgaggagugcuccugcuaccccgacaccggcaccgucaugugcgucugccgcgacaacuggcacggcuccaaccgccccugggucuccuucaaccagaaccucgacuaccagaucggcuacaucugcuccggcgucuucggcgacaacccccgccccaaggacggcgagggcuccugcaaccccgucaccgucgacggcgccgacggcgucaagggcuucuccuaccgcuacggcaacggcgucuggaucggccgcaccaaguccaaccgccuccgcaagggcuucgagaugaucugggaccccaacggcuggaccgacaccgacuccgacuucuccaugaagcaggacgucgucgccaugaccgacugguccggcuacuccggcuccuucguccagcaccccgagcucaccggccucgacugcauccgccccugcuucugggucgagcucguccgcggccgcccccgcgagaacaccaccaucuggaccuccggcuccuccaucuccuucugcggcgucaacuccgacaccgccaacugguccuggcccgacggcgccgagcuccccuucaccaucgacaaguga

SEQ ID NO: 122263 - RNA, 1413 nt, Artificial Sequence
  derived and/or modified CDS sequence (opt2) from neuraminidase__InfluenzaA__CAD57258
augaaccccaaccagaagaucaucaccaucggcuccaucuccgucgccaucggcaucaucucccucauccuccagaucggcaacaucaucuccaucugggccucccacuccauccagaccggcucccagaacuacaccggcaucugcaaccagcgcaucaucaccuacgagaacuccaccugggucaaccagaccuacgucaacaucaacaacaccaacgucgucgccggcaaggacaagaccuccaugguccucgccggcaacuccucccucugccccauccgcggcugggccaucuacaccaaggacaacuccauccgcaucggcuccaagggcgacaucuucgucauccgcgagcccuucaucuccugcucccaccucgagugccgcaccuucuuccucacccagggcgcccuccucaacgacaagcacuccaacggcaccgucaaggaccgcucccccuaccgcgcccucauguccugcccccucggcgaggcccccucccccuacaacucccgcuucgaguccgucgccugguccgccuccgccugccacgacggccucggcuggcucaccaucggcaucuccggccccgacaacggcgccgucgccguccucaaguacaacggcaucaucaccgagaccaucaaguccuggaagaagcagauccuccgcacccaggaguccgagugcgucugcgucaacggcuccugcuucaccaucaugaccgacggccccuccaaccgcgccgccuccuaccgcaucuucaagaucgagaagggccgcgucaccaaguccaucgagcucgacgcccccaacuaccacuacgaggagugcuccugcuaccccgacaccggcaccgucaugugcgucugccgcgacaacuggcacggcuccaaccgccccugggucuccuucaaccagaaccucgacuaccagaucggcuacaucugcuccggcgucuucggcgacaacccccgccccaaggacggcgagggcuccugcaaccccgucaccgucgacggcgccgacggcgucaagggcuucuccuaccgcuacggcaacggcgucuggaucggccgcaccaaguccaaccgccuccgcaagggcuucgagaugaucugggaccccaacggcuggaccgacaccgacuccgacuucuccaugaagcaggacgucgucgccaugaccgacugguccggcuacuccggcuccuucguccagcaccccgagcucaccggccucgacugcaugcgccccugcuucugggucgagcucguccgcggccucccccgcgagaacaccaccaucuggaccuccggcuccuccaucuccuucugcggcgucaacuccgagaccgccaacugguccuggcccgacggcgccgagcuccccuucaccaucgacaaguga

SEQ ID NO: 122264 - RNA, 1413 nt, Artificial Sequence
  derived and/or modified CDS sequence (opt2) from neuraminidase__InfluenzaA__CAD57259
augaaccccaaccagaagaucaucaccaucggcuccaucuccaucgccaucggcaucaucucccucauccuccagaucggcaacaucaucuccaucugggccucccacuccauccagaccgagucccagaaccacaccggcaucugcaaccagcgcaucaucaccuacgagaacuccaccugggucaaccagaccuacgucaacaucaacaacaccaacgucgccgccggcaaggacaagaccuccaugacccucgccggcaacuccucccucugccccauccgcggcugggccaucuacaccaaggacaacuccauccgcaucggcuccaagggcgacaucuucgucauccgcgagcccuucaucuccugcucccaccucgagugccgcaccuucuuccucacccagggcgcccuccucaacgacaagcacuccaacggcaccgucaaggaccgcucccccuaccgcgcccucauguccugcccccucggcgaggcccccucccccuacaacucccgcuucgaguccgucgccugguccgccuccgccugccacgacggccucggcuggcucaccaucggcaucuccggccccgacaacggcgccgucgccguccucaaguacaacggcaucaucaccgagaccaucaaguccuggaagaagcgcauccuccgcacccaggaguccgagugcgucugcaugaacggcuccugcuucaccaucaugaccgacggccccuccaacggcgccgccuccuaccgcaucuucaagaucgagaagggccgcgucaccaaguccaucgagcucgacgcccccaacuaccacuacgaggagugcuccugcuaccccgagaccggcaccgucaugugcgucugccgcgacaacuggcacggcuccaaccgccccugggucuccuucaaccagaaccucgacuaccagaucggcuacaucugcuccggcgucuucggcgacaacccccgccccaaggacggcgagggcuccugcaaccccgucaccgucgacggcgccgacggcgucaagggcuucuccuaccgcuacggcaacggcgucuggaucggccgcaccaaguccaaccgccuccgcaagggcuucgagaugaucugggaccccaacggcuggaccgacaccgacuccgacuucuccaugaagcaggacaucgucgccaugaccgacugguccggcuacuccggcuccuucguccagcaccccgagcucaccggccucgacugcaugcgccccugcuucugggucgagcucguccgcggccucccccgcgagaacaccaccaucuggaccuccggcuccuccaucuccuucugcggcgucaacuccgacaccgccaacugguccuggcccgacggcgccgagcuccccuucaccaucgacaaguga

SEQ ID NO: 122265 - RNA, 1413 nt, Artificial Sequence
  derived and/or modified CDS sequence (opt2) from neuraminidase__InfluenzaA__CAD57264
augaaccccaaccagaagaucaucaccaucggcuccaucuccgucgccaucggcaucaucucccucauccuccagaucggcaacaucaucuccaucugggccucccacuccauccagaccggcucccagaacuacaccggcaucugcaaccagcgcaucaucaccuacgagaacuccaccugggucaaccagaccuacgucaacaucaacaacaccaacgucgucgccggcaaggacaagaccuccaugacccucgccggcaacuccucccucugccccauccgcggcugggccaucuacaccaaggacaacuccauccgcaucggcuccaagggcgacgucuucgucauccgcgagcccuucaucuccugcucccaccucgagugccgcaccuucuuccucacccagggcgcccuccucaacgacaagcacuccaacggcaccgucaaggaccgcucccccuaccgcgcccucauguccugcccccucggcgaggcccccucccccuacaacucccgcuucgaguccgucgccugguccgccuccgccugccacgacggccucggcuggcucaccaucggcaucuccggccccgacaacggcgccgucgccguccucaaguacaacggcaucaucaccgagaccaucaaguccuggaagaagcagauccuccgcacccaggaguccgagugcgucugcgucaacggcuccugcuucaccaucaugaccgacggccccuccaacggcgccgccuccuaccgcaucuucaagaucgagaagggccgcgucaccaaguccaucgagcucgacgcccccaacuaccacuacgaggagugcuccugcuaccccgacaccggcaccgucaugugcgucugccgcgacaacuggcacggcuccaaccgccccugggucuccuucaaccagaaccucgacuaccagaucggcuacaucugcuccggcgucuucggcgacaacccccgccccaaggacggcgagggcuccugcaaccccgucaccgucgacggcgccaacggcgucaagggcuucuccuaccgcuacggcaacggcgucuggaucggccgcaccaaguccaaccgccuccgcaagggcuucgagaugaucugggaccccaacggcuggaccgacaccgacuccgacuucuccaugaagcaggacgucgucgccaugaccgacugguccggcuacuccggcuccuucguccagcaccccgagcucaccggccucgacugcaugcgccccugcuucugggucgagcucguccgcggccucccccgcgagaacaccaccaucuggaccuccggcuccuccaucuccuucugcggcgucaacuccgagaccgccaacugguccuggcccgacggcgccgagcuccccuucaccaucgacaaguga

SEQ ID NO: 122266 - RNA, 1350 nt, Artificial Sequence
  derived and/or modified CDS sequence (opt2) from neuraminidase__InfluenzaA__CBW54819
augaaccccaaccagaagaucaucaccaucggcuccaucugcauggucaucggcaucgucucccucaugcuccagaucggcaacaugaucuccaucugggucucccacuccauccagaccggcaaccagugccaggccgagcccaucuccaacaccaaguuccucaccgagaaggccgucgccuccgucacccucgccggcaacuccucccucugccccaucuccggcugggccgucuacuccaaggacaacuccauccgcaucggcucccgcggcgacgucuucgucauccgcgagcccuucaucuccugcucccaccucgagugccgcaccuucuuccucacccagggcgcccuccucaacgacaagcacuccaacggcaccgucaaggaccgcuccccccaccgcacccucauguccugccccgucggcgaggcccccucccccuacaacucccgcuucgaguccgucgccugguccgccuccgccugccacgacggcaucuccuggcucaccaucggcaucuccggccccgacaacggcgccgucgccguccucaaguacaacggcaucaucaccgacaccaucaaguccuggcgcaacaacauccuccgcacccaggaguccgagugcgccugcgucaacggcuccugcuucaccgucaugaccgacggccccuccuccggccaggccuccuacaagaucuucaagauggagaagggcaaggucgucaaguccgucgagcucgacgcccccaacuaccacuacgaggagugcuccugcuaccccgacgccggcgagaucaccugcgucugccgcgacaacuggcacggcuccaaccgccccugggucuccuucaaccagaaccucgaguaccgcaucggcuacaucugcuccggcgucuucggcgacaacccccgccccaacgacggcaccggcuccugcggccccgucucccccaacggcgccuacggcgucaagggcuucuccuucaaguacggcgacggcgucuggaucggccgcaccaaguccaccaacucccgcuccggcuucgagauggucugggaccccaacggcuggaccggcaccgacuccuccuucuccgucaagcaggacaucgucgccaucaccgacugguccggcuacuccggcuccuucguccagcaccccgagcucaccggccucgacugcauccgccccugcuucugggucgagcucauccgcggccgccccaaggaguccaccaucuggaccuccggcuccuccaucuccuucugcggcgucaacuccgacaccgucuccugguccuggcccgacggcgccgagcuccccuucaccaucgacaaguga

SEQ ID NO: 122267 - RNA, 1350 nt, Artificial Sequence
  derived and/or modified CDS sequence (opt2) from neuraminidase__InfluenzaA__CBW54821
augaaccccaaccagaagaucaucaccaucggcuccaucugcaucgucaucggcaucgucucccucaugcuccagaucggcaacaugaucuccaucugggucucccacuccauccagaccggcaaccagugccaggccgagcccaucuccaacaccaaguuccucaccgagaaggccgucgccuccgucacccucgccggcaacuccucccucugccccaucuccggcugggccgucuacuccaaggacaacuccauccgcaucggcucccgcggcgacgucuucgucauccgcgagcccuucaucuccugcucccaccucgagugccgcaccuucuuccucacccagggcgcccuccucaacgacaagcacuccaacggcaccgucaaggaccgcuccccccaccgcacccucauguccugccccgucggcgaggcccccucccccuacaacucccgcuucgaguccgucgccugguccgccuccgccugccacgacggcaucuccuggcucaccaucggcaucuccggccccgacaacggcgccgucgccguccucaaguacaacggcaucaucaccgacaccaucaaguccuggcgcaacaacauccuccgcacccaggaguccgagugcgccugcaucaacggcuccugcuucaccgucaugaccgacggccccuccuccggccaggccuccuacaagaucuucaagauggagaagggcaaggucgucaaguccgucgagcucgacgcccccaacuaccacuacgaggagugcuccugcuaccccgacgccggcgagaucaccugcgucugccgcgacaacuggcacggcuccaaccgccccugggucuccuucaaccagaaccucgaguaccagaucggcuacaucugcuccggcgucuucggcgacaacccccgccccaacgacggcaccggcuccugcggccccgucucccccaacggcgccuacggcgucaagggcuucuccuucaaguacggcaacggcgucuggaucggccgcaccaaguccaccaacucccgcuccggcuucgagaugaucugggaccccaacggcuggaccggcaccgacuccuccuucuccgucaagcaggacaucgucgccaucaccgacugguccggcuacuccggcuccuucguccagcaccccgagcucaccggccucgacugcauccgccccugcuucugggucgagcucauccgcggccagcccaaggaguccaccaucuggaccuccggcuccuccaucuccuucugcggcgucaacuccgacaccgucuccugguccuggcccgacggcgccgagcuccccuucaccaucgacaaguga

SEQ ID NO: 122268 - RNA, 1410 nt, Artificial Sequence
  derived and/or modified CDS sequence (opt2) from neuraminidase__InfluenzaA__CCG47912
augaaccccaaccagaagaucaucaccaucggcuccgucucccucaccaucgccaccaugugccucuucaugcagaucgccauccucaucaccaccgucacccuccacuucaagcaguacgagugcgacucccccgccaacaaccaggucaugcccugcgagcccaucaucaucgagaagaacaucaccaagaucgucuaccucaccaacaccaccaucgagaaggaggucugccccaagcucggcgaguaccgcaacugguccaagccccagugccgcaucaccggcuucgcccccuucuccaaggacaacuccauccgccucuccgccggcggcgccaucugggucacccgcgagcccuacgucuccugcgaccccaacaagugcuaccaguucgcccucggccagggcaccacccucgacaaccgccacuccaacgacaccauccacgaccgcacccccuaccgcacccuccucaugaacgagcucggcguccccuuccaccucggcacccgccaggucugcaucgccugguccuccuccuccugccacgacggcaaggccuggcuccacgucugcgucaccggccacgacaagaacgccaccgccuccuucaucuacgacggcaagcucgucgacuccaucuccuccuggucccagaacauccuccgcacccaggaguccgagugcgucugcaucaacggcaucugcaccgucgucaugaccgacggcuccgccuccggcaaggccgacaccaagauccucuucaucgaggagggcaaggucauccacaucuccccccuccucggcuccgcccagcacgucgaggagugcuccugcuacccccgcuaccccgacguccgcugcaucugccgcgacaacuggaagggcuccaaccgccccaucgucgacauccgcaugaaggacuacuccaucggcuccuccuacaugugcuccggccucgucggcgacaccccccgcaacaacgacggcuccuccaacuccaacugccgcaaccccaacaacgagcgcggcaaccacggcgucaagggcugggccuucgacgacggcaacgacaucuggaugggccgcaccaucuccaaggacucccgccucggcuacgagaccuucaaggucgucggcggcuggucccagcccaacuccaaguuccagaucaaccgccaggucaucgucgacuccgacaaccgcuccggcuacuccggcaucuucuccgucgagggcaaguccugcaucaaccgcugcuucuacgucgagcucauccgcggccgccgccaggagacccgcgucugguggaccuccaacuccaucgucgucuucugcggcaccuccggcaccuacggcuccggcuccuggcccgacggcgccgacaucaacuucaugcccaucuga

SEQ ID NO: 122269 - RNA, 1353 nt, Artificial Sequence
  derived and/or modified CDS sequence (opt2) from neuraminidase__InfluenzaA__AAF74321
augaaccccaaccagaagaucaucaccaucggcuccaucugcauggucgucggcaucaucucccucaugcuccagaucggcaacaucaucuccgucugggucucccacaccauccagaccuggcaccccaaccagcccgagcccugcaaccaguccaucaacuucuacaccgagcaggccgccgccuccgucacccucgccggcaacuccucccucugccccaucuccggcugggccaucuacuccaaggacaacuccauccgcaucggcuccaagggcgacgucuucgucauccgcgagcccuucaucuccugcucccaccucgagugccgcaccuucuuccucacccagggcgcccuccucaacgacaagcacuccaacggcaccgucaaggaccgcucccccuaccgcacccucauguccugccccgucggcgaggcccccucccccuacaacucccgcuucgaguccgucgccugguccgccuccgccugccacgacggcaucuccuggcucaccaucggcaucuccggccccgacaacggcgccgucgccguccucaaguacaacggcaucaucaccgacaccaucaaguccuggcgcaacaacauccuccgcacccaggaguccgagugcgccugcgucaacggcuccugcuucaccgucaugaccgacggccccuccaacgagcaggccuccuacaagaucuucaagaucgagaagggccgcgucgucaaguccgucgagcucaacgcccccaacuaccacuaccaggagugcuccugcuaccccgacgccggcgagaucaccugcgucugccgcgacaacuggcacggcuccaaccgccccugggucuccuucaaccagaaccucgaguaccagaucggcuacaucugcuccggcgucuucggcgacuccccccgccccaacgacggcaccggcuccugcggccccgucucccucaacggcgccuacggcgucaagggcuucuccuucaaguacggcaacggcgucuggaucggccgcaccaaguccaccuccucccgcuccggcuucgagaugaucugggaccccaacggcuggaccgagaccgacuccuccuucucccucaagcaggacaucaucgccaucaccgacugguccggcuacuccggcuccuucauccagcaccccgagcucaccggccucaacugcaugcgccccugcuucugggucgagcucauccgcggccgccccaaggagaagaccaucuggaccuccggcuccuccaucuccuucugcggcgucaacuccgacaccgucggcugguccuggcccgacggcgccgagcuccccuucaccaucgacaaguga

SEQ ID NO: 122270 - RNA, 1353 nt, Artificial Sequence
  derived and/or modified CDS sequence (opt2) from neuraminidase__InfluenzaA__AAF74322
augaaccccaaccagaagaucaucaccaucggcuccaucugcauggucgucggcaucaucucccucaugcuccagaucggcaacaccaucuccgucugggucucccacaucaucaagaccuggcaccccaaccagcccgagcccugcaaccaguccaucaacuucuacaccgagcaggccgccgccuccgucacccucgccggcaacuccucccucugccccaucuccggcugggccaucuacuccaaggacaacuccauccgcaucggcuccaagggcgacgucuucgucauccgcgagcccuucaucuccugcucccaccucgagugccgcaccuucuuccucacccagggcgcccuccucaacgacaagcacuccaacggcaccgucaaggaccgcucccccuaccgcacccucauguccugccccgucggcgaggcccccucccccuacaacucccgcuucgaguccgucgccugguccgccuccgccugccacgacggcaucuccuggcucaccaucggcaucuccggccccgacaacggcgccgucgccguccucaaguacaacggcaucaucaccgacaccaucaaguccuggcgcaacaacacccuccgcacccaggaguccgagugcgccugcgucaacggcuccugcuucaccgucaugaccgacggccccuccaacgagcaggccuccuacaagaucuucaagaucgagaagggccgcgucgucaaguccgucgagcucaacgcccccaacuaccacuacgaggagugcuccugcuaccccgacgccggcgagaucaccugcgucugccgcgacaacuggcacggcuccaaccgccccugggucuccuucaaccagaaccucgaguaccagaucggcuacaucugcuccggcgucuucggcgacuccccccgccccaacgacggcaccggcuccugcggccccgucucccucaacggcgccuacggcgucaagggcuucuccuucaaguacggcaacggcgucuggaucggccgcaccaaguccaccuccucccgcuccggcuucgagaugaucugggaccccaacggcuggaccgagaccgacuccuccuucucccucaagcaggacaucaucgccaucaccgacugguccggcuacuccggcuccuucauccagcaccccgagcucaccggccucaacugcaugcgccccugcuucugggucgagcucauccgcggccgccccaaggagaagaccaucuggaccuccggcuccuccaucuccuucugcggcgucaacuccgacaccgucggcugguccuggcccgacggcgccgagcuccccuucaccaucgacaaguga

SEQ ID NO: 122271 - RNA, 1353 nt, Artificial Sequence
  derived and/or modified CDS sequence (opt2) from neuraminidase__InfluenzaA__AAF74323
augaaccccaaccagaagaucaucaccaucggcuccaucugcauggucgucggcaucaucucccucaugcuccagaucggcaacaucaucuccgucuggaucucccacaucauccagaccuggcaccccaaccagcccgagcccugcaaccaguccaucaacuucuacaccgagcaggccgccgccuccgucacccucgccggcaacuccucccucugccccaucuccggcugggccaucuacuccaaggacaacuccauccgcaucggcuccaagggcgacgucuucgucauccgcgagcccuucaucuccugcucccaccucgagugccgcaccuucuuccucacccagggcgcccuccucaacgacaagcacuccaacggcaccgucaaggaccgcucccccuaccgcacccucauguccugccccgucggcgaggcccccucccccuacaacucccgcuucgaguccgucgccugguccgccuccgccugccacgacggcaucuccuggcucaccaucggcaucuccggccccgacaacgaggccgucgccguccucaaguacaacggcaucaucaccgacaccauccgcuccuggcgcaacaacauccuccgcacccaggaguccgagugcgccugcgucaacggcuccugcuucaccgucaugaccgacggccccuccaacgagcaggccuccuacaagaucuucaagaucgagaagggccgcgucgucaaguccgucgagcucaacgcccccaacuaccacuacgaggagugcuccugcuaccccgacgccggcgagaucaccugcgucugccgcgacaacuggcacggcuccaaccgccccugggucuccuucaaccagaaccucgaguaccagaucggcuacaucugcuccggcgucuucggcgacuccccccgccccaacgacggcaccggcuccugcggccccgucucccucaacggcgccuacggcgucaagggcuucuccuucaaguacggcaacggcgucuggaucggccgcaccaaguccaccuccucccgcuccggcuucgagaugaucugggaccccaacggcuggaccgagaccgacuccuccuucucccucaagcaggacaucaucgccgucaccgacugguccggcuacuccggcuccuucauccagcaccccgagcucaccggccucaacugcaugcgccccugcuucugggucgagcucauccgcggccgccccaaggagaagaccaucuggaccuccggcuccuccaucuccuucugcggcgucaacuccgacaccgucggcugguccuggcccgacggcgccgagcuccccuucaccaucgacaaguga

SEQ ID NO: 122272 - RNA, 1353 nt, Artificial Sequence
  derived and/or modified CDS sequence (opt2) from neuraminidase__InfluenzaA__AAF74324
augaaccccaaccagaagaucaucaccaucggcuccaucugcauggucgucggcaucaucucccucaugcuccagaucggcaacaucaucuccgucugggucucccacaucauccagaccuggcaccccaaccagcccgagcccugcaaccaguccaucaacuucuacaccgagcaggccgccgccuccgucacccucgccggcaacuccucccucugccccaucuccggcugggccaucuacuccaaggacaacuccauccgcaucggcuccaagggcgacgucuucgucauccgcgagcccuucaucuccugcucccaccucgagugccgcaccuucuuccucacccagggcgcccuccucaacgacaagcacuccaacggcaccgucaaggaccgcucccccuaccgcacccucauguccugccccgucggcgaggcccccucccccuacaacucccgcuucgaguccgucgccugguccgccuccgccugccacgacggcaucuccuggcucaccaucggcaucuccggccccgacaacggcgccgucgccguccucaaguacaacggcaucaucaccgacaccaucaaguccuggcgcaacaacauccuccgcacccaggaguccgagugcgccugcgucaacggcuccugcuucaccgucaugaccgacggccccuccaacgagcaggccuccuacaagaucuucaagaucgagaagggccgcgucgucaaguccgucgagcucaacgcccccaacuaccacuacgaggagugcuccugcuaccccgacgccggcgagaucaccugcgucugccgcgacaacuggcacggcuccaaccgccccugggucuccuucaaccagaaccucgaguaccagaucggcuacaucugcuccggcgucuucggcgacuccccccgccccaacgacggcaccggcuccugcggccccgucucccucaacggcgccuacggcgucaagggcuucuccuucaaguacggcaacggcgucuggaucggccgcaccaaguccaccuccucccgcuccggcuucgagaugaucugggaccccaacggcuggaccgagaccgacuccuccuucucccucaagcaggacaucaucgccaucaccgacugguccggcuacuccggcuccuucauccagcaccccgagcucaccggccucaacugcaugcgccccugcuucugggucgagcucauccgcggccgccccaaggagaagaccaucuggaccuccggcuccuccgucuccuucugcggcgucaacuccgacaccaugggcugguccuggcccgacggcgccgagcuccccuucaccaucgacaaguga

SEQ ID NO: 122273 - RNA, 1353 nt, Artificial Sequence
  derived and/or modified CDS sequence (opt2) from neuraminidase__InfluenzaA__AAF74325
augaaccccaaccagaagaucaucaccaucggcuccaucugcauggucgucggcaucaucucccucaugcuccagaucggcaacaccaucuccgucugggucucccacaucaucaagaccuggcaccccaaccagcccgagcccugcaaccaguccaucaacuucuacaccgagcaggccgccgccuccgucacccucgccggcaacuccucccucugccccaucuccggcugggccaucuacuccaaggacaacuccauccgcaucggcuccaagggcgacgucuucgucauccgcgagcccuucaucuccugcucccaccucgagugccgcaccuucuuccucacccagggcgcccuccucaacgacaagcacuccaacggcaccgucaaggaccgcucccccuaccgcacccucauguccugccccgucggcgaggcccccucccccuacaacucccgcuucgaguccgucgccugguccgccuccgccugccacgacggcaucuccuggcucaccaucggcaucuccggccccgacaacggcgccgucgccguccucaaguacaacggcaucaucaccgacaccaucaaguccuggcgcaacaacacccuccgcacccaggaguccgagugcgccugcgucaacggcuccugcuucaccgucaugaccgacggccccuccaacgagcaggccuccuacaagaucuucaagaucgagaagggccgcgucgucaaguccgucgagcucaacgcccccaacuaccacuacgaggagugcuccugcuaccccgacgccggcgagaucaccugcgucugccgcgacaacuggcacggcuccaaccgccccugggucuccuucaaccagaaccucgaguaccagaucggcuacaucugcuccggcgucuucggcgacuccccccgccccaacgacggcaccggcuccugcggccccgucucccucaacggcgccuacggcgucaagggcuucuccuucaaguacggcaacggcgucuggaucggccgcaccaaguccaccuccucccgcuccggcuucgagaugaucugggaccccaacggcuggaccgagaccgacuccuccuucucccucaagcaggacaucaucgccaucaccgacugguccggcuacuccggcuccuucauccagcaccccgagcucaccggccucaacugcaugcgccccugcuucugggucgagcucauccgcggccgccccaaggagaagaccaucuggaccuccggcuccuccaucuccuucugcggcgucaacuccgacaccgucggcugguccuggcccgacggcgccgagcuccccuacaccaucgacaaguga

SEQ ID NO: 122274 - RNA, 1410 nt, Artificial Sequence; identical to SEQ ID NO: 112764
  derived and/or modified CDS sequence (opt2) from neuraminidase__InfluenzaA__EPI239900

SEQ ID NO: 122275 - RNA, 1410 nt, Artificial Sequence; identical to SEQ ID NO: 113113
  derived and/or modified CDS sequence (opt2) from neuraminidase__InfluenzaA__EPI221062

SEQ ID NO: 122276 - RNA, 1410 nt, Artificial Sequence; identical to SEQ ID NO: 112764
  derived and/or modified CDS sequence (opt2) from neuraminidase__InfluenzaA__EPI534079

SEQ ID NO: 122277 - RNA, 1410 nt, Artificial Sequence; identical to SEQ ID NO: 112764
  derived and/or modified CDS sequence (opt2) from neuraminidase__InfluenzaA__AGM53851

SEQ ID NO: 122278 - RNA, 1410 nt, Artificial Sequence
  derived and/or modified CDS sequence (opt2) from neuraminidase__InfluenzaA__EPI731464
augaaccccaaccagaagaucaucaccaucggcuccgucugcaugaccaucggcauggccaaccucauccuccagaucggcaacaucaucuccaucuggaucucccacuccauccagcucggcaaccagaaccagaucgagaccugcaaccaguccgucaucaccuacgagaacaacaccugggucaaccagaccuacgucaacaucuccaacaccaacuucgccgccggccaguccgucgucuccgucaagcucgccggcggcuccucccucugccccgucuccggcugggccaucuacuccaaggacaacuccguccgcaucggcuccaagggcgacgucuucgucauccgcgagcccuucaucuccugcuccccccucgagugccgcaccuucuuccucacccagggcgcccuccucaacgacaagcacuccaacggcaccaucaaggaccgcucccccuaccgcacccucauguccugccccaucggcgagguccccucccccuacaacucccgcuucgaguccgucgccugguccgccuccgccugccacgacggcaucaacuggcucaccaucggcaucuccggccccgacaacggcgccgucgccguccucaaguacaacggcaucaucaccgacaccaucaaguccuggcgcaacaacauccuccgcacccaggaguccgagugcgccugcgucaacggcuccugcuucaccgucaugaccgacggccccuccaacggccaggccuccuacaagaucuuccgcaucgagaagggcaagaucgucaaguccgucgagaugaacgcccccaacuaccacuacgaggagugcuccugcuaccccgacuccuccgagaucaccugcgucugccgcgacaacuggcacggcuccaaccgccccugggucuccuucaaccagaaccucgaguaccagaucggcuacaucugcuccggcaucuucggcgacaacccccgccccaacgacaagaccggcuccugcggccccgucuccuccaacggcgccaacggcgucaagggcuucuccuucaaguacggcaacggcgucuggaucggccgcaccaaguccaucuccucccgcaacggcuucgagaugaucugggaccccaacggcuggaccggcaccgacaacaacuucuccaucaagcaggacaucgucggcaucaacgagugguccggcuacuccggcuccuucguccagcaccccgagcucaccggccucgacugcauccgccccugcuucugggucgagcucauccgcggccgccccaaggagaacaccaucuggaccuccggcuccuccaucuccuucugcggcgucaacuccgacaccgucggcugguccuggcccgacggcgccgagcuccccuucaccaucgacaaguga

SEQ ID NO: 122279 - RNA, 1410 nt, Artificial Sequence; identical to SEQ ID NO: 112764
  derived and/or modified CDS sequence (opt2) from neuraminidase__InfluenzaA__EPI696973

SEQ ID NO: 122280 - RNA, 1410 nt, Artificial Sequence
  derived and/or modified CDS sequence (opt2) from neuraminidase__InfluenzaA__EPI662593
augaaccccaaccagaagaucaucaccaucggcuccaucugcaugaccaucggcauggccaaccucauccuccagaucggcaacaucaucuccaucugggucucccacuccauccagaucggcaaccagucccagaucgagaccugcaaccaguccgucaucaccuacgagaacaacaccugggucaaccagaccuacgucaacaucuccaacaccaacuucgccgccggccaguccgucgucuccgucaagcucgccggcaacuccucccucugccccgucuccggcugggccaucuacuccaaggacaacuccguccgcaucggcuccaagggcgacgucuucgucauccgcgagcccuucaucuccugcuccccccucgagugccgcaccuucuuccucacccagggcgcccuccucaacgacaagcacuccaacggcaccaucaaggaccgcucccccuaccgcacccucauguccugccccaucggcgagguccccucccccuacaacucccgcuucgaguccgucgccugguccgccuccgccugccacgacggcaucaacuggcucaccaucggcaucuccggccccgacuccggcgccgucgccguccucaaguacaacggcaucaucaccgacaccaucaaguccuggcgcaacaacauccuccgcacccaggaguccgagugcgccugcgucaacggcuccugcuucaccaucaugaccgacggccccuccgacggccaggccuccuacaagaucuuccgcaucgagaagggcaagaucaucaaguccgucgagaugaaggcccccaacuaccacuacgaggagugcuccugcuaccccgacuccuccgagaucaccugcgucugccgcgacaacuggcacggcuccaaccgccccugggucuccuucaaccagaaccucgaguaccagaugggcuacaucugcuccggcgucuucggcgacaacccccgccccaacgacaagaccggcuccugcggccccgucuccuccaacggcgccaacggcgucaagggcuucuccuucaaguacggcaacggcgucuggaucggccgcaccaaguccaucuccucccgcaagggcuucgagaugaucugggaccccaacggcuggaccggcaccgacaacaaguucuccaucaagcaggacaucgucggcaucaacgagugguccggcuacuccggcuccuucguccagcaccccgagcucaccggccucgacugcauccgccccugcuucugggucgagcucauccgcggccgccccgaggagaacaccaucuggaccuccggcuccuccaucuccuucugcggcgucaacuccgacaccgucggcugguccuggcccgacggcgccgagcuccccuucaccaucgacaaguga

SEQ ID NO: 122281 - RNA, 1410 nt, Artificial Sequence; identical to SEQ ID NO: 122280
  derived and/or modified CDS sequence (opt2) from neuraminidase__InfluenzaA__EPI830229

SEQ ID NO: 122282 - RNA, 1410 nt, Artificial Sequence; identical to SEQ ID NO: 119873
  derived and/or modified CDS sequence (opt2) from neuraminidase__InfluenzaA__AGU92879

SEQ ID NO: 122283 - RNA, 1410 nt, Artificial Sequence; identical to SEQ ID NO: 119872
  derived and/or modified CDS sequence (opt2) from neuraminidase__InfluenzaA__AGU92857

SEQ ID NO: 122284 - RNA, 1410 nt, Artificial Sequence; identical to SEQ ID NO: 119871
  derived and/or modified CDS sequence (opt2) from neuraminidase__InfluenzaA__AGU92846

SEQ ID NO: 122285 - RNA, 1410 nt, Artificial Sequence; identical to SEQ ID NO: 119882
  derived and/or modified CDS sequence (opt2) from neuraminidase__InfluenzaA__AGU92835

SEQ ID NO: 122286 - RNA, 1410 nt, Artificial Sequence; identical to SEQ ID NO: 119858
  derived and/or modified CDS sequence (opt2) from neuraminidase__InfluenzaA__AGU92703

SEQ ID NO: 122287 - RNA, 1410 nt, Artificial Sequence
  derived and/or modified CDS sequence (opt2) from neuraminidase__InfluenzaA__EPI643117
augaaccccaaccagaagaucaucaccaucggcuccgucucccucaccaucuccaccaucugcuucuucaugcagaucgccauccucaucaccaccgucacccuccacuucaagcaguacgaguucaacuccccccccaacaaccaggucaugcucugcgagcccaccaucaucgagcgcaacaucaccgagaucgucuaccucaccaacaccaccaucgagaaggagaucugccccaagcccgccgaguaccgcaacugguccaagccccagugcggcaucaccggcuucgcccccuucuccaaggacaacuccauccgccucuccgccggcggcgacaucugggucacccgcgagcccuacgucuccugcgaccccgacaagugcuaccaguucgcccucggccagggcaccacccucaacaacguccacuccaacaacaccguccgcgaccgcacccccuaccgcacccuccucaugaacgagcucggcguccccuuccaccucggcaccaagcaggucugcaucgccugguccuccuccuccugccacgacggcaaggccuggcuccacgucugcaucaccggcgacgacaagaacgccaccgccuccuucaucuacaacggccgccucgucgacuccgucgucuccugguccaaggacauccuccgcacccaggaguccgagugcaucugcaucaacggcaccugcaccgucgucaugaccgacggcuccgccuccggcaaggccgacaccaagauccucuucaucgaggagggcaagaucguccacaccuccacccucuccggcuccgcccagcacgucgaggagugcuccugcuacccccgcuaccccggcguccgcugcgucugccgcgacaacuggaagggcuccaaccgccccaucgucgacaucaacaucaaggaccacuccaucgucuccuccuacgucugcuccggccucgucggcgacaccccccgcaagaacgacuccuccuccuccucccacugccucgaccccaacaacgaggagggcggccacggcgucaagggcugggccuucgacgacggcaacgacgucuggaugggccgcaccaucaacgagaccucccgccucggcuacgagaccuucaaggucaucgagggcugguccaaccccaaguccaagcuccagaccaaccgccaggucaucgucgaccgcggcgaccgcuccggcuacuccggcaucuucuccgucgagggcaaguccugcaucaaccgcugcuucuacgucgagcucauccgcggccgcaaggaggagaccgagguccucuggaccuccaacuccaucgucgucuucugcggcaccuccggcaccuacggcaccggcuccuggcccgacggcgccgaccucaaccucaugcccaucuga

SEQ ID NO: 122288 - RNA, 1410 nt, Artificial Sequence
  derived and/or modified CDS sequence (opt2) from neuraminidase__InfluenzaA__EPI675797
augaaccccaaccagaagaucaucaccaucggcuccgucucccucaccaucuccaccaucugcuucuucaugcagaucgccauccucaucaccaccgucacccuccacuucaagcaguacgaguucaacuccccccccaacaaccaggucaugcucugcgagcccaccaucaucgagcgcaacaucaccgagaucgucuaccucaccaacaccaccaucgagaaggagaucugccccaagcccgccgaguaccgcaacugguccaagccccagugcggcaucaccggcuucgcccccuucuccaaggacaacuccauccgccucuccgccggcggcgacaucugggucacccgcgagcccuacgucuccugcgaccccgacaagugcuaccaguucgcccucggccagggcaccacccucaacaacguccacuccaacaacaagguccgcgaccgcacccccuaccgcacccuccucaugaacgagcucggcguccccuuccaccucggcaccaagcaggucugcaucgccugguccuccuccuccugccacgacggcaaggccuggcuccacgucugcaucaccggcgacgacaagaacgccaccgccuccuucaucuacaacggccgccucgucgacuccgucgucuccugguccaaggacauccuccgcacccaggaguccgagugcaucugcaucaacggcaccugcaccgucgucaugaccgacggcuccgccuccggcaaggccgacaccaagauccucuucaucgaggagggcaagaucguccacaccuccacccucuccggcuccgcccagcacgucgaggagugcuccugcuacccccgcuaccccggcguccgcugcgucugccgcgacaacuggaagggcuccaaccgccccaucgucgacaucaacaucaaggaccacuccaucgucuccuccuacgucugcuccggccucgucggcgacaccccccgcaagaacgacuccuccuccuccucccacugccucgaccccaacaacgaggagggcggccacggcgucaagggcugggccuucgacgacggcaacgacgucuggaugggccgcaccaucaacgagaccucccgccucggcuacgagaccuucaaggucaucgagggcugguccaaccccaaguccaagcuccagaccaaccgccaggucaucgucgaccgcggcgaccgcuccggcuacuccggcaucuucuccgucgagggcaaguccugcaucaaccgcugcuucuacgucgagcucauccgcggccgcaaggaggagaccgagguccucuggaccuccaacuccaucgucgucuucugcggcaccuccggcaccuacggcaccggcuccuggcccgacggcgccgaccucaaccucaugcccaucuga

SEQ ID NO: 122289 - RNA, 1410 nt, Artificial Sequence; identical to SEQ ID NO: 122287
  derived and/or modified CDS sequence (opt2) from neuraminidase__InfluenzaA__EPI578429

SEQ ID NO: 122290 - RNA, 1410 nt, Artificial Sequence; identical to SEQ ID NO: 122287
  derived and/or modified CDS sequence (opt2) from neuraminidase__InfluenzaA__EPI614405

SEQ ID NO: 122291 - RNA, 1350 nt, Artificial Sequence; identical to SEQ ID NO: 122209
  derived and/or modified CDS sequence (opt2) from neuraminidase__InfluenzaA__AAT73329

SEQ ID NO: 122292 - RNA, 1350 nt, Artificial Sequence; identical to SEQ ID NO: 122209
  derived and/or modified CDS sequence (opt2) from neuraminidase__InfluenzaA__AAW80723

SEQ ID NO: 122293 - RNA, 1350 nt, Artificial Sequence; identical to SEQ ID NO: 122209
  derived and/or modified CDS sequence (opt2) from neuraminidase__InfluenzaA__EF541467

SEQ ID NO: 122294 - RNA, 1398 nt, Artificial Sequence; identical to SEQ ID NO: 119490
  derived and/or modified CDS sequence (opt2) from neuraminidase__InfluenzaA__EPI439509

SEQ ID NO: 122295 - RNA, 1410 nt, Artificial Sequence
  derived and/or modified CDS sequence (opt2) from neuraminidase__InfluenzaA__EPI482776
augaacaccaaccagcgcaucaucaccaucggcaccgucugcaugaucgucggcaucaucucccuccuccuccagaucggcaacaucgucucccucuggaucucccacuccauccagaccggcugggagaaccacaccgucaugugcaaccaguccgucaucaccuacgucaacaacaccugggucaaccgcaccuacgucaacaucuccaacaucaagaucgccaccauccaggacgucaccuccaucauccucgccggcaacuccucccucugccccgucuccggcugggccgucuacuccaaggacaacuccauccgcaucggcuccaagggcgacaucuucgucauccgcgagcccuucaucuccugcucccagcucgagugccgcaccuucuuccucacccagggcgcccuccucaacgacaagcacuccaacggcaccgucaaggaccgcucccccuaccgcacccucauguccugccccaucggcgaggcccccucccccuacaacucccgcuucgaguccgucgccugguccgccuccgccugccacgacggcaugggcuggcucaccaucggcaucuccggccccgacaacggcgccgucgccguccucaaguacaacggcaucaucaccgacaccaucaaguccuggcgcaacaagauccuccgcacccaggaguccgagugcgucugcaugaacggcuccugcuucaccguccucaccgacggccccuccaacggccaggccuccuacaagaucuucaaggucgagaagggcaagaucaucaaguccaucgagcucgacgcccccaacuaccacuacgaggagugcuccugcuaccccgacaccggcaaggucaugugcgucugccgcgacaacuggcacgccuccaaccgccccugggucuccuucaaccagaaccucgacuaccagaucggcuacaucugcuccggcgucuucggcgacaacccccgcuccaacgacggcaagggcaacugcggccccguccucuccaacggcgccaacggcgucaagggcuucuccuaccgcuacggcaacggcgucuggaucggccgcaccaaguccaucaacucccgcuccggcuucgagaugaucugggaccccaacggcuggaccgagaccgacuccuccuucuccaugaagcaggacaucaucgcccucaacgacugguccggcuacuccggcuccuucguccagcaccccgagcucaccggcaugaacugcauccgccccugcuucugggucgagcucauccgcggccagcccaaggaguccaccaucugggccuccggcuccuccaucuccuucugcggcgucaacuccgagaccgccuccugguccuggcccgacggcgccgaccuccccuucaccaucgacaaguga

SEQ ID NO: 122296 - RNA, 1410 nt, Artificial Sequence
  derived and/or modified CDS sequence (opt2) from neuraminidase__InfluenzaA__EPI745533
augaaccccaaccagaagaucaucaccaucggcuccgucugcaucaccaucggcauggccaaccucauccuccagaucggcaacaucaucuccaucuggaucucccacuccauccagcucggcaaccagaaccagaucgagaccugcaaccaguccgucaucaccuacgagaacaacaccugggucaaccagaccuacgucaacaucuccaacaccaacuucgccgccggccaguccgucgucuccgucaagcucgccggcaacuccucccucugccccgucuccggcugggccaucuacuccaaggacaacuccauccgcaucggcuccaagggcgacgucuucgucauccgcgagcccuucaucuccugcuccccccucgagugccgcaccuucuuccucacccagggcgcccuccucaacgacaagcacuccaacggcaccaucaaggaccgcucccccuaccgcacccucauguccugccccaucggcgagguccccucccccuacaacucccgcuucgaguccgucgccugguccgccuccgccugccacgacggcaucuccuggcucaccaucggcaucuccggccccgacaacggcgccgucgccguccucaaguacaacggcaucaucaccgacaccaucaaguccuggcgcaacaacauccuccgcacccaggaguccgagugcgccugcgucaacggcuccugcuucaccgucaugaccgacggccccuccgacggccaggccuccuacaagaucuuccgcaucgagaagggcaagaucgucaaguccgucgagaugaacgcccccaacuaccacuacgaggagugcuccugcuaccccgacuccuccgagaucaccugcgucugccgcgacaacuggcacggcuccaaccgccccugggucuccuucaaccagaaccucgaguaccagaucggcuacaucugcuccggcaucuucggcgacaacccccgccccaacgacaagaccggcuccugcggccccgucuccuccaacggcgccaacggcgucaagggcuucuccuucaaguacggcaacggcgucuggaucggccgcaccaaguccaucuccucccgcaacggcuucgagaugaucugggaccccaacggcuggaccggcaccgacaacaacuucuccaucaagcaggacaucgucggcaucaacgagugguccggcuacuccggcuccuucguccagcaccccgagcucaccggccucgacugcaucaagcccugcuucugggucgagcucauccgcggccgccccaaggagaacaccaucuggaccuccggcuccuccaucuccuucugcggcgucaacuccgacaccgucggcugguccuggcccgacggcgccgagcuccccuucaccaucgacaaguga

SEQ ID NO: 122297 - RNA, 1410 nt, Artificial Sequence; identical to SEQ ID NO: 112764
  derived and/or modified CDS sequence (opt2) from neuraminidase__InfluenzaA__AEE69012

SEQ ID NO: 122298 - RNA, 1410 nt, Artificial Sequence; identical to SEQ ID NO: 112764
  derived and/or modified CDS sequence (opt2) from neuraminidase__InfluenzaA__EPI176609

SEQ ID NO: 122299 - RNA, 1410 nt, Artificial Sequence; identical to SEQ ID NO: 112764
  derived and/or modified CDS sequence (opt2) from neuraminidase__InfluenzaA__EPI176472

SEQ ID NO: 122300 - RNA, 1410 nt, Artificial Sequence
  derived and/or modified CDS sequence (opt2) from neuraminidase__InfluenzaA__EPI280340
augaaccccaaccagaagaucaucaccaucggcuccgucugcaucaccaucggcauggccaaccucauccuccagaucggcaacaucaucuccaucuggaucucccacuccauccagcucggcaaccagaaccagaucgagaccugcaaccaguccgucaucaccuacgagaacaacaccugggucaaccagaccuacgucaacaucuccaacaccaacuucgccgccggccaguccgucgucuccgucaagcucgccggcaacuccucccucugccccgucuccggcugggccaucuacuccaaggacaacuccauccgcaucggcuccaagggcgacgucuucgucauccgcgagcccuucaucuccugcuccccccucgagugccgcaccuucuuccucacccagggcgcccuccucaacgacaagcacuccaacggcaccaucaaggaccgcucccccuaccgcacccucauguccugccccaucggcgagguccccucccccuacaacucccgcuucgaguccgucgccugguccgccuccgccugccacgacggcaucuccuggcucaccaucggcaucuccggccccgacaacggcgccgucgccguccucaaguacaacggcaucaucaccgacaccaucaaguccuggcgcaacaacauccuccgcacccaggaguccgagugcgccugcgucaacggcuccugcuucaccgucaugaccgacggccccuccgacggccaggccuccuacaagaucuuccgcaucgagaagggcaagaucgucaaguccgucgagaugaacgcccccaacuaccacuacgaggagugcuccugcuaccccgacuccuccgagaucaccugcgucugccgcgacaacuggcacggcuccaaccgccccugggucuccuucaaccagaaccucgaguaccagaucggcuacaucugcuccggcaucuucggcgacaacccccgccccaacgacaagaccggcuccugcggccccgucuccuccaacggcgccaacggcgucaagggcuucuccuucaaguacggcaacggcgucuggaucggccgcaccaaguccaucuccucccgcaacggcuucgagaucaucugggaccccaacggcuggaccggcaccgacaacaacuucuccaucaagcaggacaucgucggcaucaacgagugguccggcuacuccggcuccuucguccagcaccccgagcucaccggccucgacugcauccgccccugcuucugggucgagcucauccgcggccgccccaaggagaacaccaucuggaccuccggcuccuccaucuccuucugcggcgucaacuccgacaccgucggcugguccuggcccgacggcgccgagcuccccuucaccaucgacaaguga

SEQ ID NO: 122301 - RNA, 1410 nt, Artificial Sequence; identical to SEQ ID NO: 112764
  derived and/or modified CDS sequence (opt2) from neuraminidase__InfluenzaA__EPI240318

SEQ ID NO: 122302 - RNA, 1410 nt, Artificial Sequence; identical to SEQ ID NO: 112764
  derived and/or modified CDS sequence (opt2) from neuraminidase__InfluenzaA__EPI183133

SEQ ID NO: 122303 - RNA, 1410 nt, Artificial Sequence; identical to SEQ ID NO: 112764
  derived and/or modified CDS sequence (opt2) from neuraminidase__InfluenzaA__EPI369141

SEQ ID NO: 122304 - RNA, 1410 nt, Artificial Sequence
  derived and/or modified CDS sequence (opt2) from neuraminidase__InfluenzaA__EPI482787
augaacaccaaccagcgcaucaucaccaucggcaccgucugccucaucgucggcaucgucucccuccuccuccagaucggcaacaucgucucccucuggaucucccacuccauccagaccggcaagcgcucccaccccgagaccugcucccagaacgucaucaccuacgagaacaacaccugggucaaccagaccuacgucaacaucuccaacaccaacaucgucgacggccagggcgucaccuccaucauccucgccggcaacuccccccucugccccaucuccggcugggccaucuacuccaaggacaacuccauccgcaucggcuccaagggcgacaucuucgucauccgcgagcccuucaucuccugcucccaccucgagugccgcaccuucuuccucacccagggcgcccuccucaacgaccgccacuccaacggcaccgucaaggaccgcucccccuaccgcacccucauguccugccccaucggcgaggcccccucccccuacaacucccgcuucgaguccgucgccugguccgccuccgccugccacgacggcaugggcuggcucaccaucggcaucuccggccccgacaacggcgccgucgccguccucaaguacaacggcaucaucaccgacaccaucaaguccuggcgcaacaagauccuccgcacccaggaguccgagugcgucugcaucaacggcuccugcuucaccaucaugaccgacggccccuccaacggccaggccuccuacaagaucuucaagauggagaagggcaagaucaucaaguccgucgagcucgacgcccccaacuaccacuacgaggagugcuccugcuaccccgacaccggcaaggucgucugcgucugccgcgacaacuggcacgccuccaaccgccccugggucaccuucgaccagaaccucaacuaccagaucggcuacaucugcuccggcgucuucggcgacaacccccgcuccaacgacggcaagggcaacugcggccccguccccuccaacggcgccaacggcgucaagggcuucuccuuccgcuacggcaacggcgucuggaucggccgcaccaaguccaucuccucccgcuccggcuucgagaugaucugggaccccaacggcuggaccgagaccgacuccuccuucuccaucaagcaggacaucaucgcccucaccgacugguccggcuacuccggcuccuucguccagcaccccgagcucaccggcaugaacugcaucaagcccugcuucugggucgagcucauccgcggccagcccaaggaguccaccaucuggaccuccggcuccuccaucuccuucugcggcgucgacuccgagaccgucuccugguccuggcccgacggcgccgaccuccccuucaccaucgacaaguga

SEQ ID NO: 122305 - RNA, 1410 nt, Artificial Sequence
  derived and/or modified CDS sequence (opt2) from neuraminidase__InfluenzaA__EPI482790
augaacaccaaccagcgcaucaucaccaucggcaccgucugccucaucgucggcaucaucucccuccuccuccagaucggcaacauggucucccucuggaucucccacuccauccagaccggcggcaagaaccacaccgagaugugcaaccagaacgucaucaccuacgucaacaacaccugggucaaccgcaccuacgucaacaucuccaacaccaagaucgucaacguccaggacgucgucuccgucauccucaccggcaacuccucccucugccccaucuccggcugggccaucuacuccaaggacaacuccauccgcaucggcuccaagggcgacaucuucgucauccgcgagcccuucaucuccugcucccaccucgagugccgcaccuucuuccucacccagggcgcccuccucaacgacaagcacuccaacggcaccgucaaggaccgcucccccuaccgcacccucauguccugccccgucggcgaggcccccucccccuacaacucccgcuucgaguccgucgccugguccgccuccgccugccacgacggcaugggcuggcucaccaucggcaucuccggccccgacaacggcgccgucgccguccucaaguacaacggcaucaucaccgacaccaucaaguccuggcgcaacaagauccuccgcacccaggaguccgagugcgucugcaugaacggcuccugcuucaccguccucaccgacggccccuccaacggccaggccuccuacaagaucuucaagauggagaagggcaagaucaucaaguccaucgagcucgacgcccccaacuaccacuacgaggagugcuccugcuaccccgacgccggcaaggucaugugcgucugccgcgacaacuggcacgccuccaaccgccccugggucuccuucgaccagaaccucgacuaccagaucggcuacaucugcuccggcgucuucggcgacaacccccgcuccaacgacggcaagggcaacugcggccccguccacuccaacggcgccaacggcgucaagggcuucuccuaccgcuacggcaacggcgucuggaucggccgcaccaaguccaucaacucccgcuccggcuucgagaugaucugggaccccaacggcuggaccggcaccgacuccuccuucuccaugaagcaggacaucaucgcccucaccgacugguccggcuacuccggcuccuucguccagcaccccgagcucaccggcaugaacugcauccgccccugcuucugggucgagcucauccgcggccagcccaaggagaacaccaucugggccuccggcuccuccaucuccuucugcggcgucaacggcgagaccgccuccugguccuggcccgacggcgccgaccuccccuucaccaucgacaaguga

SEQ ID NO: 122306 - RNA, 1410 nt, Artificial Sequence
  derived and/or modified CDS sequence (opt2) from neuraminidase__InfluenzaA__EPI291797
augaacaccaaccagcgcaucaucaccaucggcaccgucugcaugaucgucggcaucaucucccuccuccuccagaucggcaacaucgucucccucuggaucucccacuccauccagaccggcugggagaaccacaccgagaugugcaaccaguccgucaucaccuacgucaacaacaccugggucaaccgcaccuacgucaacaucuccaacaccaacaucgccaccauccaggacgucaccuccaucauccucgccggcaacuccucccucugccccgucuccggcugggccaucuacuccaaggacaacuccauccgcaucggcuccaagggcgacaucuucgucauccgcgagcccuucaucuccugcucccagcucgagugccgcaccuucuuccucacccagggcgcccuccucaacgacaagcacuccaacggcaccgucaaggaccgcucccccuaccgcacccucauguccugccccaucggcgaggcccccucccccuacaacucccgcuucgaguccgucgccugguccgccuccgccugccacgacggcaugggcuggcucaccaucggcaucuccggccccgacaacggcgccgucgccguccucaaguacaacggcaucaucaccgacaccaucaaguccuggcgcaacaagauccuccgcacccaggaguccgagugcgucugcaugaacggcuccugcuucaccguccucaccgacggccccuccaacggccaggccuccuacaagaucuucaaggucgagaagggcaagaucaucaaguccaucgagcucgacgcccccaacuaccacuacgaggagugcuccugcuaccccgacaccggcaaggucaugugcgucugccgcgacaacuggcacgccuccaaccgccccugggucuccuucaaccagaaccucgacuaccagaucggcuacaucugcuccggcgucuucggcgacaacccccgcuccaacgacggcaagggcaacugcggccccguccucuccaacggcgccaacggcgucaagggcuucuccuaccgcuacggcaacggcgucuggaucggccgcaccaaguccaucaacucccgcuccggcuucgagaugaucugggaccccaacggcuggaccgagaccgacuccuccuucuccaugaagcaggacaucaucgcccucaccgacugguccggcuacuccggcuccuucguccagcaccccgagcucaccggcaugaacugcauccgccccugcuucugggucgagcucauccgcggccagcccaaggaguccaccaucugggccuccggcuccuccaucuccuucugcggcgucaacuccgagaccgccuccugguccuggcccgacggcgccgaccuccccuucaccaucgacaaguga

SEQ ID NO: 122307 - RNA, 1410 nt, Artificial Sequence; identical to SEQ ID NO: 122306
  derived and/or modified CDS sequence (opt2) from neuraminidase__InfluenzaA__EPI482798

SEQ ID NO: 122308 - RNA, 1410 nt, Artificial Sequence
  derived and/or modified CDS sequence (opt2) from neuraminidase__InfluenzaA__EPI638969
augaacaccaaccagcgcaucaucaccaucggcaccgucugcaugaucgucggcaugaucucccuccuccuccagaucggcuccaucgucucccucuggaucucccacuccauccagaccggcugggagaaccacaccggcgucugcaaccaguccgucaucaccuacgucaacaacaccugggucaaccgcaccuacgucaacaucuccaacaucaagaucgccaccauccaggacgucacccccaucauccucgccggcaacuccucccucugccccgucaacggcugggccgucuacuccaaggacaacuccauccgcaucggcuccaagggcgacaucuucgucauccgcgagcccuucaucuccugcucccagcucgagugccgcaccuucuuccucacccagggcgcccuccucaacgacaagcacuccaacggcaccgucaaggaccgcucccccuaccgcacccucauguccugccccaucggcgaggcccccucccccuacaacucccgcuucgaguccgucgccugguccgccuccgccugccacgacggcaugggcuggcucaccaucggcaucuccggccccgacaacggcgccgucgccguccucaaguacaacggcaucaucaccgacaccaucaaguccuggcgcaacaagauccuccgcacccaggaguccgagugcgucugcaugaacggcuccugcuucaccguccucaccgacggccccuccaacggccaggccuccuacaagaucuucaaggucgagaagggcaagaucaucaaguccaucgagcucgacgcccccaacuaccacuacgaggagugcuccugcuaccccgacaccggcaaggucaugugcgucugccgcgacaacuggcacgccuccaaccgccccugggucuccuucaaccagaaccucgacuaccagaucggcuacaucugcuccggcgucuucggcgacaacccccgcuccaccgacggcaagggcaacugcggccccguccucuccaacggcgccaacggcgucaagggcuucuccuaccgcuacggcaacggcgucuggaucggccgcaccaaguccaucaacucccgcuccggcuucgagaugaucugggaccccaacggcuggaccgagaccgacuccuccuucuccaugaagcaggacaucaucgcccucaacgacuacuccggcuacuccggcuccuucguccagcaccccgagcucaccggcaugaacugcauccgccccugcuucugggucgagcucauccgcggccagcccaaggaguccaccaucugggccuccggcuccuccaucuccuucugcggcgucaacuccgagaccgccuccugguccuggcccgacggcgccgaccuccccuucgccaucgacaaguga

SEQ ID NO: 122309 - RNA, 1410 nt, Artificial Sequence
  derived and/or modified CDS sequence (opt2) from neuraminidase__InfluenzaA__ABI19012
augaacaccaaccagcgcaucaucaccaucggcaccgucugccucaucgucggcaucaucucccuccuccuccagaucggcaacauggucucccucuggaucucccacuccauccagaccggcggcaagaaccacaccgagaugugcaaccagaacgucaucaccuacgucaacaacaccugggucaaccgcaccuacgucaacaucuccaacaccaagaucgucaacguccaggacgucgucuccgucauccucaccggcaacuccucccucugccccaucuccggcugggccaucuacuccaaggacaacuccauccgcaucggcuccaagggcgacaucuucgucauccgcgagcccuucaucuccugcucccaccucgagugccgcaccuucuuccucacccagggcgcccuccucaacgacaagcacuccaacggcaccgucaaggaccgcucccccuaccgcacccucauguccugccccaucggcgaggcccccucccccuacaacucccgcuucgaguccgucgccugguccgccuccgccugccacgacggcaugggcuggcucaccaucggcaucuccggccccgacaacggcgccgucgccguccucaaguacaacggcaucaucaccgacaccaucaaguccuggcgcaacaagauccuccgcacccaggaguccgagugcgucugcaugaacggcuccugcuucaccguccucaccgacggccccuccaacggccaggccuccuacaagaucuucaagauggagaagggcaagaucaucaaguccaucgagcucgacgcccccaacuaccacuacgaggagugcuccugcuaccccgacgccggcaaggucaugugcgucugccgcgacaacuggcacgccuccaaccgccccugggucuccuucgaccagaaccucgacuaccagaucggcuacaucugcuccggcgucuucggcgacaacccccgcuccaacgacggcaagggcaacugcggccccguccacuccaacggcgccaacggcgucaagggcuucuccuaccgcuacggcaacggcgucuggaucggccgcaccaaguccaucaacucccgcuccggcuucgagaugaucugggaccccaacggcuggaccggcaccgacuccuccuucuccaugaagcaggacaucaucgcccucaccgacugguccggcuacuccggcuccuucguccgccaccccgagcucaccggcaugaacugcauccgccccugcuucugggucgagcucauccgcggccagcccaaggagaacaccaucugggccuccggcuccuccaucuccuucugcggcgucaacggcgagaccgccuccugguccuggcccgacggcgccgaccuccccuucaccaucgacaaguga

SEQ ID NO: 122310 - RNA, 1410 nt, Artificial Sequence
  derived and/or modified CDS sequence (opt2) from neuraminidase__InfluenzaA__EPI687791
augaaccccaaccagaagaucaucaccaucggcuccaucugcaugaccaucggcauggccaaccucauccuccagaucggcaacaucaucuccaucugggucucccacuccauccagaucggcaaccagucccagaucgagaccugcaaccaguccgucaucaccuacgagaacaacaccugggucaaccagaccuacgucaacaucuccaacaccaacuucgccgcccgccaguccgucgucuccgucaagcucgccggcaacuccucccucugccccgucuccggcugggccaucuacuccaaggacaacuccguccgcaucggcuccaagggcgacgucuucgucauccgcgagcccuucaucuccugcuccccccucgagugccgcaccuucuuccucacccagggcgcccuccucaacgacaagcacuccaacggcaccaucaaggaccgcucccccuaccgcacccucauguccugccccaucggcgagguccccucccccuacaacucccgcuucgaguccgucgccugguccgccuccgccugccacgacggcaucaacuggcucaccaucggcaucuccggccccgacuccggcgccgucgccguccucaaguacaacggcaucaucaccgacaccaucaaguccuggcgcaacaacauccuccgcacccaggaguccgagugcgccugcgucaacggcuccugcuucaccaucaugaccgacggccccuccgacggccaggccuccuacaagaucuuccgcaucgagaagggcaagaucaucaaguccgucgagaugaaggcccccaacuaccacuacgaggagugcuccugcuaccccgacuccuccgagaucaccugcgucugccgcgacaacuggcacggcuccaaccgccccugggucuccuucaaccagaaccucgaguaccagaugggcuacaucugcuccggcgucuucggcgacaacccccgccccaacgacaagaccggcuccugcggccccgucuccuccaacggcgccaacggcgucaagggcuucuccuucaaguacggcaacggcgucuggaucggccgcaccaaguccaucuccucccgcaagggcuucgagaugaucugggaccccaacggcuggaccggcaccgacaacaaguucuccaucaagcaggacaucgucggcaucaacgagugguccggcuacuccggcuccuucguccagcaccccgagcucaccggccucgacugcauccgccccugcuucugggucgagcucauccgcggccgccccgaggagaacaccaucuggaccuccggcuccuccaucuccuucugcggcgucaacuccgacaccgucggcugguccuggcccgacggcgccgagcuccccuucaccaucgacaaguga

SEQ ID NO: 122311 - RNA, 1410 nt, Artificial Sequence
  derived and/or modified CDS sequence (opt2) from neuraminidase__InfluenzaA__EPI841266
augaaccccaaccagaagaucaucaccaucggcuccaucugcaugaccaucggcauggccaaccucauccuccagaucggcaacaucaucuccaucugggucucccacuccauccagaucggcaaccagucccagaucgagaccugcaaccaguccgucaucaccuacgagaacaacaccugggucaaccagaccuacgucaacaucuccaacaccaacuucgccgcccgccaguccgucgucuccgucaagcucgccggcaacuccucccucugccccgucuccggcugggccaucuacuccaaggacaacuccguccgcaucggcuccaagggcgacgucuucgucauccgcgagcccuucaucuccugcuccccccucgagugccgcaccuucuuccucacccagggcgcccuccucaacgacaagcacuccaacggcaccaucaaggaccgcucccccuaccgcacccucauguccugccccaucggcgagguccccucccccuacaacucccgcuucgaguccgucgccugguccgccuccgccugccacgacggcaucaacuggcucaccaucggcaucuccggccccgacuccggcgccgucgccguccucaaguacaacggcaucaucaccgacaccaucaaguccuggcgcaacaacauccuccgcacccaggaguccgagugcgccugcgucaacggcuccugcuucaccaucaugaccgacggccccuccgacggccaggccuccuacaagaucuuccgcaucgaggagggcaagaucaucaaguccgucgagaugaaggcccccaacuaccacuacgaggagugcuccugcuaccccgacuccuccgagaucaccugcgucugccgcgacaacuggcacggcuccaaccgccccugggucuccuucaaccagaaccucgaguaccagaugggcuacaucugcuccggcgucuucggcgacaacccccgccccaacgacaagaccggcuccugcggccccgucuccuccaacggcgccaacggcgucaagggcuucuccuucaaguacggcaacggcgucuggaucggccgcaccaaguccaucuccucccgcaagggcuucgagaugaucugggaccccaacggcuggaccggcaccgacaacaaguucuccaucaagcaggacaucgucggcaucaacgagugguccggcuacuccggcuccuucguccagcaccccgagcucaccggccucgacugcauccgccccugcuucugggucgagcucauccgcggccgccccgaggagaacaccaucuggaccuccggcuccuccaucuccuucugcggcgucaacuccgacaccgucggcugguccuggcccgacggcgccgagcuccccuucaccaucgacaaguga

SEQ ID NO: 122312 - RNA, 1410 nt, Artificial Sequence
  derived and/or modified CDS sequence (opt2) from neuraminidase__InfluenzaA__EPI291844
augaacaccaaccagcgcaucaucaccaucggcaccgucugccucaucgucggcaucaucucccuccuccuccagaucggcaccauggucucccucuggaucucccacuccauccagaccggcggcaagaaccacaccgagaugugcaaccagaacgucaucaccuacgucaacaacaccugggucaaccgcaccuacgucaacaucuccaacaccaagaucgucaacguccaggacgucgucuccgucauccucaccggcaacuccucccucugccccaucuccggcugggccaucuacuccaaggacaacuccauccgcaucggcuccaagggcgacaucuucgucauccgcgagcccuucaucuccugcucccaccucgagugccgcaccuucuuccucacccagggcgcccuccucaacgacaagcacuccaacggcaccgucaaggaccgcucccccuaccgcacccucauguccugccccaucggcgaggcccccucccccuacaacucccgcuucgaguccgucgccugguccgccuccgccugccacgacggcaugggcuggcucaccaucggcaucuccggccccgacaacggcgccgucgccguccucaaguacaacggcaucaucaccgacaccaucaaguccuggcgcaacaagauccuccgcacccaggaguccgagugcgucugcaugaacggcuccugcuucaccguccucaccgacggccccuccaacggccaggccuccuacaagaucuucaagauggagaagggcaagaucaucaaguccaucgagcucgacgcccccaacuaccacuacgaggagugcuccugcuaccccgacgccggcaaggucaugugcgucugccgcgacaacuggcacgccuccaaccgccccugggucuccuucgaccagaaccucgacuaccagaucggcuacaucugcuccggcgucuucggcgacaacccccgcuccaacgacggcaagggcaacugcggccccguccacuccaacggcgccaacggcgucaagggcuucuccuacaaguacggcaacggcgucuggaucggccgcaccaaguccaucaacucccgcuccggcuucgagaugaucugggaccccaacggcuggaccggcaccgacuccuccuucuccaugaagcaggacaucaucgcccucaccgacugguccggcuacuccggcuccuucguccagcaccccgagcucaccggcaugaacugcauccgccccugcuucugggucgagcucauccgcggccagcccaaggagaacaccaucugggccuccggcuccuccaucuccuucugcggcgucaacggcgagaccgccuccugguccuggcccgacggcgccgaccuccccuucaccaucgacaaguga

SEQ ID NO: 122313 - RNA, 1410 nt, Artificial Sequence
  derived and/or modified CDS sequence (opt2) from neuraminidase__InfluenzaA__EPI558120
augaacaccaaccagcgcaucaucaccaucggcaccgucugcaugaucgucggcaucaucucccuccuccuccagaucggcaacaucgucucccucuggaucucccacuccauccagaccggcugggagaaccacaccgagaugugcaaccaguccgucaucaccuacgucaacaacaccuggaugaaccgcaccuacgucaacaucuccaacaucaagaucgccaccauccaggacgucaccuccaucguccucgccggcaacuccucccucugccccgucuccggcugggccgucuacuccaaggacaacuccauccgcaucggcuccaagggcgacaucuucgucauccgcgagcccuucaucuccugcucccagcucgagugccgcaccuucuuccucacccagggcgcccuccucaacgacaagcacuccaacggcaccgucaaggaccgcucccccuaccgcacccucauguccugccccaucggcgaggcccccucccccuacaacucccgcuucgaguccgucgccugguccgccuccgccugccacgacggcaugggcuggcucaccaucggcaucuccggccccgacaacggcgccgucgccguccucaaguacaacggcaucaucaccgacaccaucaaguccuggcgcaacaagauccuccgcacccaggaguccgagugcgucugcaucaacggcuccugcuucaccguccucaccgacggccccuccaacggccaggccuccuacaagaucuucaaggucgagaagggcaagaucaucaaguccaucgagcucgacgcccccaacuaccacuacgaggagugcuccugcuaccccgacaccggcaaggucaugugcaucugccgcgacaacuggcacgccuccaaccgccccugggucuccuucgaccagaaccucgacuaccagaucggcuacaucugcuccggcgucuucggcgacaacccccgcuccaacgacggcaagggcaacugcggccccguccucuccaacggcgccaacggcgucaagggcuucuccuaccgcuacggcaacggcgucuggaucggccgcaccaaguccaucaacucccgcuccggcuucgagaugaucugggaccccaacggcuggaccgagaccgacuccuccuucuccaugaagcaggacaucaucgcccucaacgacugguccggcuacuccggcuccuucguccagcaccccgagcucaccggcaugaacugcauccgccccugcuucugggucgagcucauccgcggccagcccaaggaguccaccaucugggccuccggcuccuccaucuccuucugcggcgucaacuccgagaccgccuccugguccuggcccgacggcgccgaccuccccuucaccaucgacaaguga

SEQ ID NO: 122314 - RNA, 1410 nt, Artificial Sequence
  derived and/or modified CDS sequence (opt2) from neuraminidase__InfluenzaA__EPI564138
augaaccccaaccagaagaucaucaccaucggcuccgucucccucaccaucuccaccaucugcuucuucaugcagaucgccauccucaucaccaccgucacccuccacuucaagcaguacgaguucaacuccccccccaacaaccaggucaugcucugcgagcccaccaucaucgagcgcaacaucaccgagaucgucuaccucaccaacaccaccaucgagaaggagaucugccccaagcccgccgaguaccgcaacugguccaagccccagugcggcaucaccggcuucgcccccuucuccaaggacaacuccauccgccucuccgccggcggcgacaucugggucacccgcgagcccuacgucuccugcgaccccgacaagugcuaccaguucgcccucggccagggcaccacccucaacaacguccacuccaacaacaccguccgcgaccgcacccccuaccgcacccuccucaugaacgagcucggcguccccuuccaccucggcaccaagcaggucugcaucgccugguccuccuccuccugccacgacggcaaggccuggcuccacgucugcaucaccggcgacgacaagaacgccaccgccuccuucaucuacaacggccgccucgucgacuccgucgucuccugguccaaggacauccuccgcacccaggaguccgagugcgucugcaucaacggcaccugcaccgucgucaugaccgacggcuccgccuccggcaaggccgacaccaagauccucuucaucgaggagggcaagaucguccacaccuccaagcucuccggcuccgcccagcacgucgaggagugcuccugcuacccccgcuaccccggcguccgcugcgucugccgcgacaacuggaagggcuccaaccgccccaucgucgacaucaacaucaaggaccacuccaucgucuccuccuacgucugcuccggccucgucggcgacaccccccgcaagaacgacuccuccuccuccucccacugccucgaccccaacaacgaggagggcggccacggcgucaagggcugggccuucgacgacggcaacgacgucuggaugggccgcaccaucaacgagaccucccgccucggcuacgagaccuucaaggucgucgagggcugguccaaccccaaguccaagcuccagaucaaccgccaggucaucgucgaccgcggcgaccgcuccggcuacuccggcaucuucuccgucgagggcaaguccugcaucaaccgcugcuucuacgucgagcucauccgcggccgcaaggaggagaccgagguccucuggaccuccaacuccaucgucgucuucugcggcaccuccggcaccuacggcaccggcuccuggcccgacggcgccgaccucaaccucaugcccaucuga

SEQ ID NO: 122315 - RNA, 1410 nt, Artificial Sequence
  derived and/or modified CDS sequence (opt2) from neuraminidase__InfluenzaA__ANM92825
augaaccccaaccagaagaucaucaccaucggcuccaucugcaugaccaucggcauggccaaccucauccuccagaucggcaacaucaucuccaucugggucucccacuccauccagaucggcaaccagucccagaucgagaccugcaaccaguccgucaucaccuacgagaacaacaccugggucaaccagaccuacgucaacaucuccaacaccaacuucgccgccggccaguccgucgucuccgucaagcucgccggcaacuccucccucugccccgucuccggcugggccaucuacuccaaggacaacuccguccgcaucggcuccaagggcgacgucuucgucauccgcgagcccuucaucuccugcuccccccucgagugccgcaccuucuuccucacccagggcgcccuccucaacgacaagcacuccaacggcaccaucaaggaccgcucccccuaccgcacccucauguccugccccaucggcgagguccccucccccuacaacucccgcuucgaguccgucgccugguccgccuccgccugccacgacggcaucaacuggcucaccaucggcaucuccggccccgacuccggcgccgucgccguccucaaguacaacggcaucaucaccgacaccaucaaguccuggcgcaacaacauccuccgcacccaggaguccgagugcgccugcgucaacggcuccugcuucaccaucaugaccgacggccccuccgacggccaggccuccuacaagaucuuccgcaucgagaagggcaagaucaucaaguccgucgagaugaaggcccccaacuaccacuacgaggagugcuccugcuaccccgacuccuccgagaucaccugcgucugccgcgacaacuggcacggcuccaaccgccccugggucuccuucaaccagaaccucgaguaccagaugggcuacaucugcuccggcgucuucggcgacaacccccgccccaacgacaagaccggcaacugcggccccgucuccuccaacggcgccaacggcgucaagggcuucuccuucaaguacggcaacggcgucuggaucggccgcaccaaguccaucuccucccgcaagggcuucgagaugaucugggaccccaacggcuggaccggcaccgacaacaaguucuccaucaagcaggacaucgucggcaucaacgagugguccggcuacuccggcuccuucguccagcaccccgagcucaccggccucgacugcauccgccccugcuucugggucgagcucauccgcggccgccccgaggagaacaccaucuggaccuccggcuccuccaucuccuucugcggcgucaacuccgacaccgucggcugguccuggcccgacggcgccgagcuccccuucaccaucgacaaguga

SEQ ID NO: 122316 - RNA, 1410 nt, Artificial Sequence
  derived and/or modified CDS sequence (opt2) from neuraminidase__InfluenzaA__EPI291694
augaacaccaaccagcgcaucaucaccaucggcaccgucugccucaucgucggcaucgucucccuccuccuccagaucggcaacaucgucucccucuggaucucccacuccauccagaccggcgagaagaaccacuccgaggucugcaaccagaacaucaucaccuacgagaacaagaccugggucaaccagaccuacgucaacaucuccaacaccaacaucgccgagggccagggcgucaccuccaucauccucgccggcaacuccucccucugccccgucuccggcugggccaucuacuccaaggacaacuccauccgcaucggcuccaagggcgacaucuucgucauccgcgagcccuucaucuccugcucccaccucgagugccgcaccuucuuccucacccagggcgcccuccucaacgaccgccacuccaacggcaccgucaaggaccgcucccccuaccgcacccucauguccugccucaccggcgaggcccccucccccuacaacucccgcuucgaguccgucgccugguccgccuccgccugccacgacggcaugggcuggcucaccaucggcaucuccggccccgacaacggcgccgucgccguccucaaguacaacggcaucaucaccgacaccaucaaguccuggcgcaacaagauccuccgcacccaggaguccgagugcgucugcaucaacggcuccugcuucaccaucaugaccgacggccccuccaacggccaggccuccuacaagaucuucaagauggagaagggcaagaucaucaaguccgucgagcucgacgcccccaacuaccacuacgaggagugcuccugcuaccccgacaccggcaaggucgucugcgucugccgcgacaacuggcacgccuccaaccgccccugggucuccuucgaccagaaccucgacuaccagaucggcuacaucugcuccggcgucuucggcgacaacccccgcuccaacgacggcaagggcaacugcggccccguccccuccaacggcgccaacggcgucaagggcuucuccuuccgcuacggcaacggcgucuggaucggccgcaccaaguccaucaucucccgcuccggcuucgagaugaucugggaccccaacggcuggaccgagaccgacuccuccuucuccaucaagcaggacaucaucgcccucaccgacugguccggcuacuccggcuccuucguccagcaccccgagcucaccggcaugaacugcauccgccccugcuucugggucgagcucauccgcggccagcccaaggaguccaccaucuggaccuccggcuccuccaucuccuucugcggcgucgacuccgagaccgccuccugguccuggcccgacggcgccgaccuccccuucaccaucgacaaguga

SEQ ID NO: 122317 - RNA, 1410 nt, Artificial Sequence; identical to SEQ ID NO: 113250
  derived and/or modified CDS sequence (opt2) from neuraminidase__InfluenzaA__EPI241027

SEQ ID NO: 122318 - RNA, 1410 nt, Artificial Sequence; identical to SEQ ID NO: 112774
  derived and/or modified CDS sequence (opt2) from neuraminidase__InfluenzaA__EPI177405

SEQ ID NO: 122319 - RNA, 1410 nt, Artificial Sequence; identical to SEQ ID NO: 112774
  derived and/or modified CDS sequence (opt2) from neuraminidase__InfluenzaA__EPI242475

SEQ ID NO: 122320 - RNA, 1410 nt, Artificial Sequence
  derived and/or modified CDS sequence (opt2) from neuraminidase__InfluenzaA__EPI590131
augaacgccaaccagcgcaucaucaccaucggcaccgucugccucaucaucggcaucaucucccuccuccuccagaucggcaacauggucucccucuggaucucccacuccauccagaccggcggcaagaaccacaccgagaugugcaaccagaacgucaucaccuacgucaacaacaccugggucaaccgcaccuacgucaacaucuccaacaccaagaucgucaacguccaggacgucgucuccgucauccucaccggcaacuccucccucugcuccaucuccggcugggccaucuacuccaaggacaacuccauccgcaucggcuccaagggcgacaucuucgucauccgcgagcccuucaucuccugcucccaccucgagugccgcaccuucuuccucacccagggcgcccuccucaacgacaagcacuccaacggcaccgucaaggaccgcucccccuaccgcacccucauguccugccccaucggcgaggcccccucccccuacaacucccgcuucgaguccgucgccugguccgccuccgccugccacgacggcaucggcuggcucaccaucggcaucuccggccccgacaacggcgccgucgccguccucaaguacaacggcaucaucaccgacaccaucaaguccuggcgcaacaagauccuccgcacccaggaguccgagugcgucugcaugaacggcuccugcuucgccguccucaccgacggccccuccaacggccaggccuccuacaagaucuucaaggucaagcagggcaagaucaucaaguccaucgagcucgacgcccccaacuaccacuacgaggagugcuccugcuaccccgacgccggcaaggucaugugcgucugccgcgacaacuggcacgccuccaaccgccccugggucuccuucgaccaggaccucaacuaccagaucggcuacaucugcuccggcgucuucggcgacaacccccgcuccaacgacggcaagggcaacugcggccccguccacuccaacggcgccaacggcgucaagggcuucuccuaccgcuacggcaacggcgucuggaucggccgcaccaaguccauccacucccgcuccggcuucgagaugaucugggaccccaacggcuggaccggcaccgacuccuccuucuccaugaagcaggacaucaucgcccucaccgacugguccggcuacuccggcuccuucguccagcaccccgagcucaccggcaugaacugcauccgccccugcuucugggucgagcucauccgcggccagcccaaggagaacaccaucugggccuccggcuccuccaucuccuucugcggcgucaacggcgagaccgccuccugguccuggcccgacggcgccgaccuccccuucaccaucgacaaguga

SEQ ID NO: 122321 - RNA, 1410 nt, Artificial Sequence
  derived and/or modified CDS sequence (opt2) from neuraminidase__InfluenzaA__EPI68596
augaacaccaaccagcgcaucaucaccaucggcaccgucugccucaucgucggcaucgucucccuccuccuccagaucggcaacaucgucucccucuggaucucccacuccauccagaccggcgagaagaaccacuccgagaucugcucccagaacgucaucaccuacgagaacaacaccugggucaaccagaccuacgucaacaucuccaacaccaacaucgccgacggccagggcgucaccuccaucauccucgccggcaacuccucccucugccccaucuccggcugggccaucuacuccaaggacaacuccauccgcaucggcuccaagggcgacaucuucgucauccgcgagcccuucaucuccugcucccaccucgagugccgcaccuucuuccucacccagggcgcccuccucaacgaccgccacuccaacggcaccgucaaggaccgcucccccuaccgcacccucauguccugccccaucggcgaggcccccucccccuacaacucccgcuucgaguccgucgccugguccgccuccgccugccacgacggcaugggcuggcucaccaucggcaucuccggccccgacaacggcgccgucgccguccucaaguacaacggcaucaucaccgacaccaucaaguccuggcgcaacaagauccuccgcacccaggaguccgagugcgucugcaucaacggcuccugcuucaccaucaugaccgacggccccuccaacggccaggccuccuacaagaucuucaagauggagaagggcaagaucaucaaguccgucgagcucgacgcccccaacuaccacuacgaggagugcuccugcuaccccgacaccggcaaggucgucugcgucugccgcgacaacuggcacgccuccaaccgccccugggucuccuucgaccagaaccucgacuaccagaucggcuacaucugcuccggcgucuucggcgacaacccccgcuccaacgacggcaagggcaacugcggccccguccucuccaacggcgccaacggcgucaagggcuucuccuuccgcuacggcaacggcgucuggaucggccgcaccaaguccaucuccucccgcuccggcuucgagaugaucugggaccccaacggcuggaccgagaccgacuccuccuucuccaucaagcaggacaucaucgcccucaccgacugguccggcuacuccggcuccuucguccagcaccccgagcucaccggcaugaacugcauccgccccugcuucugggucgagcucauccgcggccagcccaaggaguccaccaucuggaccuccggcuccuccaucuccuucugcggcgucgacuccgagaccgccuccugguccuggcccgacggcgccgaccuccccuucaccaucgacaaguga

SEQ ID NO: 122322 - RNA, 1365 nt, Artificial Sequence; identical to SEQ ID NO: 111755
  derived and/or modified CDS sequence (opt2) from neuraminidase__InfluenzaA__EPI115409

SEQ ID NO: 122323 - RNA, 1365 nt, Artificial Sequence; identical to SEQ ID NO: 111755
  derived and/or modified CDS sequence (opt2) from neuraminidase__InfluenzaA__ABD77678/m1

SEQ ID NO: 122324 - RNA, 1410 nt, Artificial Sequence; identical to SEQ ID NO: 112764
  derived and/or modified CDS sequence (opt2) from neuraminidase__InfluenzaA__EPI185224

SEQ ID NO: 122325 - RNA, 1410 nt, Artificial Sequence; identical to SEQ ID NO: 122280
  derived and/or modified CDS sequence (opt2) from neuraminidase__InfluenzaA__EPI697745

SEQ ID NO: 122326 - RNA, 1410 nt, Artificial Sequence; identical to SEQ ID NO: 122280
  derived and/or modified CDS sequence (opt2) from neuraminidase__InfluenzaA__EPI768524

SEQ ID NO: 122327 - RNA, 1410 nt, Artificial Sequence
  derived and/or modified CDS sequence (opt2) from neuraminidase__InfluenzaA__EPI726929
augaaccccaaccagaagaucaucaccaucggcuccaucuccaugaccaucggcauggccaaccucauccuccagaucggcaacaucaucuccaucugggucucccacuccauccagaucggcaaccagucccagaucgagaccugcaaccaguccgucaucaccuacgagaacaacaccugggucaaccagaccuacgucaacaucuccaacaccaacuucgccgccggccaguccgucgucuccgucaagcucgccggcaacuccucccucugccccgucuccggcugggccaucuacuccaaggacaacuccguccgcaucggcuccaagggcgacgucuucgucauccgcgagcccuucaucuccugcuccccccucgagugccgcaccuucuuccucacccagggcgcccuccucaacgacaagcacuccaacggcaccaucaaggaccgcucccccuaccgcacccucauguccugccccaucggcgagguccccucccccuacaacucccgcuucgaguccgucgccugguccgccuccgccugccacgacggcaucaacuggcucaccaucggcaucuccggccccgacuccggcgccgucgccguccucaaguacaacggcaucaucaccgacaccaucaaguccuggcgcaacaacauccuccgcacccaggaguccgagugcgccugcgucaacggcuccugcuucaccaucaugaccgacggccccuccgacggccaggccuccuacaagaucuuccgcaucgagaagggcaagaucaucaaguccgucgagaugaaggcccccaacuaccacuacgaggagugcuccugcuaccccgacuccuccgagaucaccugcgucugccgcgacaacuggcacggcuccaaccgccccugggucuccuucaaccagaaccucgaguaccagaugggcuacaucugcuccggcgucuucggcgacaacccccgccccaacgacaagaccggcuccugcggccccgucuccuccaacggcgccaacggcgucaagggcuucuccuucaaguacggcaacggcgucuggaucggccgcaccaaguccaucuccucccgcaagggcuucgagaugaucugggaccccaacggcuggaccggcaccgacaacaaguucuccaucaagcaggacaucgucggcaucaacgagugguccggcuacuccggcuccuucguccagcaccccgagcucaccggccucgacugcauccgccccugcuucugggucgagcucauccgcggccgccccgaggagaacaccaucuggaccuccggcuccuccaucuccuucugcggcgucaacuccgacaccgucggcugguccuggcccgacggcgccgagcuccccuucaccaucgacaaguga

SEQ ID NO: 122328 - RNA, 1410 nt, Artificial Sequence; identical to SEQ ID NO: 122327
  derived and/or modified CDS sequence (opt2) from neuraminidase__InfluenzaA__EPI813816

SEQ ID NO: 122329 - RNA, 1410 nt, Artificial Sequence
  derived and/or modified CDS sequence (opt2) from neuraminidase__InfluenzaA__EPI466627
augaaccccaaccagaagaucaucaccaucggcuccgucugcaugaccaucggcauggccaaccucauccuccagaucggcaacaucaucuccaucugggucucccacuccauccagcucggcaaccagucccagaucgagaccugcaaccaguccgucaucaccuacgagaacaacaccugggucaaccagaccuacgucaacaucuccaacaccaacuucgccgccggccaguccgucgucuccgucaagcucgccggcaacuccucccucugccccgucuccggcugggccaucuacuccaaggacaacuccguccgcaucggcuccaagggcgacgucuucgucauccgcgagcccuucaucuccugcuccccccucgagugccgcaccuucuuccucacccagggcgcccuccucaacgacaagcacuccaacggcaccaucaaggaccgcucccccuaccgcacccucauguccugccccaucggcgagguccccucccccuacaacucccgcuucgaguccgucgccugguccgccuccgccugccacgacggcaucaacuggcucaccaucggcaucuccggccccgacuccggcgccgucgccguccucaaguacaacggcaucaucaccgacaccaucaaguccuggcgcaacaacauccuccgcacccaggaguccgagugcgccugcgucaacggcuccugcuucaccaucaugaccgacggccccuccgacggccaggccuccuacaagaucuuccgcaucgagaagggcaagaucgucaaguccgucgagaugaacgcccccaacuaccacuacgaggagugcuccugcuaccccgacuccuccgagaucaccugcgucugccgcgacaacuggcacggcuccaaccgccccugggucuccuucaaccagaaccucgaguaccagaucggcuacaucugcuccggcgucuucggcgacaacccccgccccaacgacaagaccggcuccugcggccccgucuccuccaacggcgccaacggcgucaagggcuucuccuucaaguacggcaacggcgucuggaucggccgcaccaaguccaucuccucccgcaagggcuucgagaugaucugggaccccaacggcuggaccggcaccgacaacaacuucuccaucaagcaggacaucgucggcaucaacgagugguccggcuacuccggcuccuucguccagcaccccgagcucaccggccucgacugcauccgccccugcuucugggucgagcucauccgcggccgccccgaggagaacaccaucuggaccuccggcuccuccaucuccuucugcggcgucaacuccgacaccgucggcugguccuggcccgacggcgccgagcuccccuucaccaucgacaaguga

SEQ ID NO: 122330 - RNA, 1410 nt, Artificial Sequence
  derived and/or modified CDS sequence (opt2) from neuraminidase__InfluenzaA__EPI541965
augaaccccaaccagaagaucaucaccaucggcuccgucugcaugaccaucggcauggccaaccucauccuccagaucggcaacaucaucuccaucugggucucccacuccauccagcucggcaaccagucccagaucgagaccugcaaccaguccgucaucaccuacgagaacaacaccugggucaaccagaccuacgucaacaucuccaacaccaacuucgccgccggccagcccgucgucuccgucaagcucgccggcaacuccucccucugccccgucuccggcugggccaucuacuccaaggacaacuccguccgcaucggcuccaagggcgacgucuucgucauccgcgagcccuucaucuccugcuccccccucgagugccgcaccuucuuccucgcccagggcgcccuccucaacgacaagcacuccaacggcaccaucaaggaccgcucccccuaccgcacccucauguccugccccaucggcgagguccccucccccuacaacucccgcuucgaguccgucgccugguccgccuccgccugccacgacggcaucaacuggcucaccaucggcaucuccggccccgacuccggcgccgucgccguccucaaguacaacggcaucaucaccgacaccaucaaguccuggcgcaacaacauccuccgcacccaggaguccgagugcgccugcgucaacggcuccugcuucaccaucaugaccgacggccccuccgacggccaggccuccuacaagaucuuccgcaucgagaagggcaagaucgucaaguccgucgagaugaacgcccccaacuaccacuacgaggagugcuccugcuaccccgacuccuccgagaucaccugcgucugccgcgacaacuggcacggcuccaaccgccccugggucuccuucaaccagaaccucgaguaccagaucggcuacaucugcuccggcgucuucggcgacaacccccgccccaacgacaagaccggcuccugcggccccgucuccuccaacggcgccaacggcgucaagggcuucuccuucaaguacggcaacggcgucuggaucggccgcaccaaguccaucuccucccgcaagggcuucgagaugaucugggaccccaacggcuggaccggcaccgacaacaacuucuccaucaagcaggacaucgucggcaucaacgagugguccggcuacuccggcuccuucguccagcaccccgagcucaccggccucgacugcauccgccccugcuucugggucgagcucauccgcggccgccccgaggagaacaccaucuggaccuccggcuccuccaucuccuucugcggcgucaacuccgacaccgucggcugguccuggcccgacggcgccgagcuccccuucaccaucgacaaguga

SEQ ID NO: 122331 - RNA, 1410 nt, Artificial Sequence
  derived and/or modified CDS sequence (opt2) from neuraminidase__InfluenzaA__EPI652004
augaaccccaaccagaagaucaucaccaucggcuccgucugcaugaccaucggcauggccaaccucauccuccagaucggcaacaucaucuccaucugggucucccacuccauccagaucggcaaccagucccagaucgagaccugcaaccaguccgucaucaccuacgagaacaacaccugggucaaccagaccuacgucaacaucuccaacaccaacuucgccgccggccaguccgucgucuccgucaagcucgccggcaacuccucccucugccccgucuccggcugggccaucuacuccaaggacaacuccguccgcaucggcuccaagggcgacgucuucgucauccgcgagcccuucaucuccugcuccccccucgagugccgcaccuucuuccucgcccagggcgcccuccucaacgacaagcacuccaacggcaccaucaaggaccgcucccccuaccgcacccucauguccugccccaucggcgagguccccucccccuacaacucccgcuucgaguccgucgccugguccgccuccgccugccacgacggcaucaacuggcucaccaucggcaucuccggccccgacuccggcgccgucgccguccucaaguacaacggcaucaucaccgacaccaucaaguccuggcgcaacaacauccuccgcacccaggaguccgagugcgccugcgucaacggcuccugcuucaccaucaugaccgacggccccuccgacggccaggccuccuacaagaucuuccgcaucgagaagggcaagaucgucaaguccgucgagaugaacgcccccaacuaccacuacgaggagugcuccugcuaccccgacuccuccgagaucaccugcgucugccgcgacaacuggcacggcuccaaccgccccugggucuccuucaaccagaaccucgaguaccagaucggcuacaucugcuccggcgucuucggcgacaacccccgccccaacgacaagaccggcuccugcggccccgucuccuccaacggcgccaacggcgucaagggcuucuccuucaaguacggcaacggcgucuggaucggccgcaccaaguccaucuccucccgcaagggcuucgagaugaucugggaccccaacggcuggaccggcaccgacaacaacuucuccaucaagcaggacaucgucggcaucaacgagugguccggcuacuccggcuccuucguccagcaccccgagcucaccggccucgacugcauccgccccugcuucugggucgagcucauccgcggccgccccgaggagaacaccaucuggaccuccggcuccuccaucuccuucugcggcgucaacuccgacaccgucggcugguccuggcccgacggcgccgagcuccccuucaccaucgacaaguga

SEQ ID NO: 122332 - RNA, 1410 nt, Artificial Sequence
  derived and/or modified CDS sequence (opt2) from neuraminidase__InfluenzaA__EPI62526
augaacaccaaccagcgcaucaucaccaucggcaccgucugccucaucgucggcaucgucucccuccuccuccagaucggcaacaucgucucccucuggaucucccacuccauccagaccggcgagaagaaccaccccgagaucugcucccagaacgucaucaccuacgagaacaacaccugggucaaccagaccuacgucaacaucuccaacaccaacaucgucgacggccagggcgucaccuccaucauccucgccggcaacuccucccucugccccaucuccggcugggccaucuacuccaaggacaacuccauccgcaucggcuccaagggcgacaucuucgucauccgcgagcccuucaucuccugcucccaccucgagugccgcaccuucuuccucacccagggcgcccuccucaacgaccgccacuccaacggcaccgucaaggaccgcucccccuaccgcacccucauguccugccccaucggcgaggcccccucccccuacaacucccgcuucgaguccgucgccugguccgccuccgccugccacgacggcaugggcuggcucaccaucggcaucuccggccccgacaacggcgccgucgccguccucaaguacaacggcaucaucaccgacaccaucaaguccuggcgcaacaagauccuccgcacccaggaguccgagugcgucugcaucaacggcuccugcuucaccaucaugaccgacggccccuccaacggccaggccuccuacaagaucuucaagauggagaagggcaagaucaucaaguccgucgagcucgacgcccccaacuaccacuacgaggagugcuccugcuaccccgacaccggcaaggucgucugcgucugccgcgacaacuggcacgccuccaaccgccccugggucuccuucgaccagaaccucgacuaccagaucggcuacaucugcuccggcgucuucggcgacaacccccgcuccaacgacggcaagggcaacugcggccccguccucuccaacggcgccaacggcgucaagggcuucuccuuccgcuacggcaacggcgucuggaucggccgcaccaaguccaucuccucccgcuccggcuucgagaugaucugggaccccaacggcuggaccgagaccgacuccuccuucuccaucaagcaggacaucaucgcccucaccgacugguccggcuacuccggcuccuucguccagcaccccgagcucaccggcaugaacugcauccgccccugcuucugggucgagcucauccgcggccagcccaaggaguccaccaucuggaccuccggcuccuccaucuccuucugcggcgucgacuccgagaccgccuccugguccuggcccgacggcgccgaccuccccuucaccaucgacaaguga

SEQ ID NO: 122333 - RNA, 1410 nt, Artificial Sequence; identical to SEQ ID NO: 112764
  derived and/or modified CDS sequence (opt2) from neuraminidase__InfluenzaA__EPI189183

SEQ ID NO: 122334 - RNA, 1410 nt, Artificial Sequence; identical to SEQ ID NO: 112764
  derived and/or modified CDS sequence (opt2) from neuraminidase__InfluenzaA__EPI180576

SEQ ID NO: 122335 - RNA, 1410 nt, Artificial Sequence
  derived and/or modified CDS sequence (opt2) from neuraminidase__InfluenzaA__EPI346918
augaacaccaaccagcgcaucaucaccaucggcaccgucugcaugaucgucggcaucaucucccuccuccuccagaucggcaacaucgucucccucuggaucucccacuccauccagaccggcugggagaaccacaccgagaugugcaaccagaacgucaucaccuacgucaacaacaccugggucaaccgcaccuacgucaacgucuccaacaccaacaucgccaccauccaggacgucaccuccaucguccucgccggcaacuccucccucugccccgucuccggcugggccaucuacuccaaggacaacuccauccgcaucggcuccaagggcgacaucuucgucauccgcgagcccuucaucuccugcucccagcucgagugccgcaccuucuuccucacccagggcgcccuccucaacgacaagcacuccaacggcaccgucaaggaccgcucccccuaccgcacccucauguccugccccaucggcgaggcccccucccccuacaacucccgcuucgaguccgucgccugguccgccuccgccugccacgacggcaugggcuggcucaccaucggcaucuccggccccgacaacggcgccgucgccguccucaaguacaacggcaucaucaccgacaccaucaaguccuggcgcaacaagauccuccgcacccaggaguccgagugcgucugcaugaacggcuccugcuucaccguccucaccgacggccccuccaacggccaggccuccuacaagaucuucaaggucgagaagggccgcaucaucaaguccaucgagcucgacgcccccaacuaccacuacgaggagugcuccugcuaccccgacaccggcaaggucaugugcgucugccgcgacaacuggcacgccuccaaccgccccugggucuccuucaaccagaaccucgacuaccagaucggcuacaucugcuccggcgucuucggcgacaacccccgcuccaacgacggcaagggcaacugcggccccguccucuccaacggcgccaacggcgucaagggcuucuccuaccgcuacggcaacggcgucuggaucggccgcaccaaguccaucaacucccgccgcggcuucgagaucaucugggaccccaacggcuggaccgagaccgacuccuccuucuccaugaagcaggacaucaucgcccucaccgacugguccggcuacuccggcuccuucguccagcaccccgagcucaccggcaugaacugcauccgccccugcuucugggucgagcucauccgcggccagcccaaggaguccaccaucugggccuccggcuccuccaucuccuucugcggcgucaacuccgagaccgccuccugguccuggcccgacggcgccgaccuccccuucaccaucgacaaguga

SEQ ID NO: 122336 - RNA, 1410 nt, Artificial Sequence; identical to SEQ ID NO: 113352
  derived and/or modified CDS sequence (opt2) from neuraminidase__InfluenzaA__EPI240976

SEQ ID NO: 122337 - RNA, 1410 nt, Artificial Sequence; identical to SEQ ID NO: 110131
  derived and/or modified CDS sequence (opt2) from neuraminidase__InfluenzaA__EPI3165

SEQ ID NO: 122338 - RNA, 1410 nt, Artificial Sequence; identical to SEQ ID NO: 122057
  derived and/or modified CDS sequence (opt2) from neuraminidase__InfluenzaA__EPI957

SEQ ID NO: 122339 - RNA, 1410 nt, Artificial Sequence; identical to SEQ ID NO: 118182
  derived and/or modified CDS sequence (opt2) from neuraminidase__InfluenzaA__EPI507593

SEQ ID NO: 122340 - RNA, 1410 nt, Artificial Sequence; identical to SEQ ID NO: 118182
  derived and/or modified CDS sequence (opt2) from neuraminidase__InfluenzaA__EPI461954

SEQ ID NO: 122341 - RNA, 1410 nt, Artificial Sequence; identical to SEQ ID NO: 118182
  derived and/or modified CDS sequence (opt2) from neuraminidase__InfluenzaA__EPI461954

SEQ ID NO: 122342 - RNA, 1410 nt, Artificial Sequence
  derived and/or modified CDS sequence (opt2) from neuraminidase__InfluenzaA__EPI668104
augaaccccaaccagaagaucaucaccaucggcuccgucucccucaccaucuccaccaucugcuucuucaugcagaucgccauccucaucaccaccgucacccuccacuucaagcaguacgaguucaacuccccccccaacaaccaggucaugcucugcgagcccaccaucaucgagcgcaacaucaccgagaucgucuaccucaccaacaccaccaucgagaaggagaucugccccaagcccgccgaguaccgcaacugguccaagccccagugcggcaucaccggcuucgcccccuucuccaaggacaacuccauccgccucuccgccggcggcgacaucugggucacccgcgagcccuacgucuccugcgaccccgacaagugcuaccaguucgcccucggccagggcaccacccucaacaacguccacuccaacaacaccguccgcgaccgcacccccuaccgcacccuccucaugaacgagcucggcguccccuucuaccucggcaccaagcaggucugcaucgccugguccuccuccuccugccacgacggcaaggccuggcuccacgucugcaucaccggcgacgacaagaacgccaccgccuccuucaucuacaacggccgccucgucgacuccgucgucuccugguccaaggacauccuccgcacccaggaguccgagugcgucugcaucaacggcaccugcaccgucgucaugaccgacggcaacgccuccggcaaggccgacaccaagauccucuucaucgaggagggcaagaucguccacaccuccaagcucuccggcuccgcccagcacgucgaggagugcuccugcuacccccgcuaccccggcguccgcugcgucugccgcgacaacuggaagggcuccaaccgccccaucgucgacaucaacaucaaggaccacuccaucgucuccuccuacgucugcuccggccucgucggcgacaccccccgcaagaacgacuccuccuccuccucccacugccucgaccccaacaacgaggagggcggccacggcgucaagggcugggccuucgacgacggcaacgacgucuggaugggccgcaccaucaacgagaccucccgccucggcuacgagaccuucaaggucgucgagggcugguccaaccccaaguccaagcuccagaucaaccgccaggucaucgucgaccgcggcgaccgcuccggcuacuccggcaucuucuccgucgagggcaaguccugcaucaaccgcugcuucuacgucgagcucauccgcggccgcaaggaggagaccgagguccucuggaccuccaacuccaucgucgucuucugcggcaccuccggcaccuacggcaccggcuccuggcccgacggcgccgaccucaaccucaugcccaucuga

SEQ ID NO: 122343 - RNA, 1410 nt, Artificial Sequence
  derived and/or modified CDS sequence (opt2) from neuraminidase__InfluenzaA__EPI578445
augaaccccaaccagaagaucaucaccaucggcuccgucucccucaccaucuccaccaucugcuucuucaugcagaucgccauccucaucaccaccgucacccuccacuucaagcaguacgaguucaacuccccccccaacaaccaggucaugcucugcgagcccaccaucaucgagcgcaacaucaccgagaucgucuaccucaccaacaccaccaucgagaaggagaucugccccaagcccgccgaguaccgcaacugguccaagccccagugcggcaucaccggcuucgcccccuucuccaaggacaacuccauccgccucuccgccggcggcgacaucugggucacccgcgagcccuacgucuccugcgaccccgacaagugcuaccaguucgcccucggccagggcaccacccucaacaacguccacuccaacaacaccguccgcgaccgcacccccuaccgcacccuccucaugaacgagcucggcguccccuuccaccucggcaccaagcaggucugcaucgccugguccuccuccuccugccacgacggcaaggccuggcuccacgucugcaucaccggcgacgacaagaacgccaccgccuccuucaucuacaacggccgccucgucgacuccgucgucuccugguccaaggacauccuccgcacccaggaguccgagugcgucugcaucaacggcaccugcaccgucgucaugaccgacggcaacgccuccggcaaggccgacaccaagauccucuucaucgaggagggcaagaucguccacaccuccaagcucuccggcuccgcccagcacgucgaggagugcuccugcuacccccgcuaccccggcguccgcugcgucugccgcgacaacuggaagggcuccaaccgccccaucgucgacaucaacaucaaggaccacuccaucgucuccuccuacgucugcuccggccucgucggcgacaccccccgcaagaacgacuccuccuccuccucccacugccucgaccccaacaacgaggagggcggccacggcgucaagggcugggccuucgacgacggcaacgacgucuggaugggccgcaccaucaacgagaccucccgccucggcuacgagaccuucaaggucgucgagggcugguccaaccccaaguccaagcuccagaucaaccgccaggucaucgucgaccgcggcgaccgcuccggcuacuccggcaucuucuccgucgagggcaaguccugcaucaaccgcugcuucuacgucgagcucauccgcggccgcaaggaggagaccgagguccucuggaccuccaacuccaucgucgucuucugcggcaccuccggcaccuacggcaccggcuccuggcccgacggcgccgaccucaaccucaugcccaucuga

SEQ ID NO: 122344 - RNA, 1410 nt, Artificial Sequence; identical to SEQ ID NO: 122343
  derived and/or modified CDS sequence (opt2) from neuraminidase__InfluenzaA__EPI551883

SEQ ID NO: 122345 - RNA, 1410 nt, Artificial Sequence
  derived and/or modified CDS sequence (opt2) from neuraminidase__InfluenzaA__EPI344388
augaaccccaaccagaagaucaucaccaucggcuccgucucccucaucaucgccaccaucugcuuccucaugcagaucgccauccucgucaccaccgucacccuccacuucaagcagcacgacuacaacuccccccccaacaaccaggccaugcucugcgagcccaccaucaucgagcgcaacaccaccgagaucgucuaccucaccaacaccaccaucgagaaggagaucugccccaagcucgccgaguaccgcaacugguccaagccccagugcaacaucaccggcuucgcccccuucuccaaggacaacuccauccgccucuccgccggcggcgacaucugggucacccgcgagcccuacgucuccugcgaccccgacaagugcuaccaguucgcccucggccagggcaccacccucaacaacggccacuccaacaacaccguccacgaccgcacccccuaccgcacccuccucaugaacgagcucggcguccccuuccaccucggcacccgccaggucugcauggccugguccuccuccuccugccacgacggcaaggccuggcuccacgucugcaucaccggcaacgacaacaacgccaccgccuccuucaucuacaacggccgccucgucgacuccaucggcuccugguccaagaacauccuccgcacccaggaguccgagugcgucugcaucaacggcaccugcaccgucgucaugaccgacggcuccgccuccggcaaggccgacaccaagauccucuucgucgaggagggcaagaucguccacaucuccacccucuccggcuccgcccagcacgucgaggagugcuccugcuacccccgcuuccccggcguccgcugcgucugccgcgacaacuggaagggcuccaaccgccccaucgucgacaucaacgucaagaacuacuccaucgucuccuccuacgucugcuccggccucgucggcgacaccccccgcaaguccgacuccgucuccuccuccuacugccucgaccccaacaacgagaagggcggccacggcgucaagggcugggccuucgacgacggcaacgacgucuggaugggccgcaccaucaacgagacccuccgccucggcuacgagaccuucaaggucaucgagggcugguccaaggccaacuccaagcuccagaccaaccgccaggucaucgucgagaagggcgaccgcuccggcuacuccggcaucuucuccgucgagggcaaguccugcaucaaccgcugcuucuacgucgagcucauccgcggccgcaaggaggagaccaaggucugguggaccuccaacuccaucgucgucuucugcggcaccuccggcaccuacggcaccggcuccuggcccgacggcgccgacaucaaccucaugcccaucuga

SEQ ID NO: 122346 - RNA, 1410 nt, Artificial Sequence; identical to SEQ ID NO: 122345
  derived and/or modified CDS sequence (opt2) from neuraminidase__InfluenzaA__EPI347601

SEQ ID NO: 122347 - RNA, 1410 nt, Artificial Sequence
  derived and/or modified CDS sequence (opt2) from neuraminidase__InfluenzaA__EPI642512
augaaccccaaccagaagaucaucaccaucggcuccaucucccucaucaucgccaccaucugcuuccucaugcagaucgccauccucgucaucaccgucacccuccacuucaagcagcacaacugcgacuccucccccaacaaccaggucauguucugcgagcccaccaucaucgagcgcaacaagaccgagaucgucuaccucaucaacaccaccgucgagaaggagaucugccccaagcccaccgaguaccgcaacugguccaagccccagugcaacaucaccggcuucgcccccuucuccaaggacaacuccauccgccucuccgccggcggcgacaucugggucacccgcgagcccuacgucuccugcgaccccgacaagugcuaccaguucgcccucggccagggcaccacccucaacaacggccacuccaacgacaccguccacgaccgcacccccuaccgcacccuccucaugaacgagcucggcguccccuuccaccucggcacccgccaggucugcaucgccugguccuccuccuccugccacgacggcaaggccuggcuccacgucugcaucaccggcgacgacggcaacgccaccgccuccuucaucuacaacggccgccucgucgacuccaucggcuccugguccaagaacauccuccgcacccaggaguccgagugcgucugcaucaacggcaccugcaccgucgucaugaccgacggcuccgccuccggcaaggccgacaccaagauccucuucaucgaggagggcaagaucauccacaucuccacccucuccggcuccgcccagcacgucgaggagugcuccugcuacccccgcuaccccggcguccgcugcgucugccgcgacaacuggaagggcuccaaccgccccaucgucgacaucaacgucaaggacuacuccaucgucuccuccuacgucugcuccggccucgucggcgacaccccccgcaagaacgacuccuucuccuccucccacugccucgaccccaacaacgaggagggcggccacggcgucaagggcugggccuucgacgacggcaacgacgucuggaugggccgcaccaucuccgagaagucccgccucggcuacgagaccuucaaggucgucaagggcugguccgagcccaacuccaagcuccagaccaaccgccaggucaucgucggccgcggcaaccgcuccggcuacuccggcaucuucuccaucgagggcaagaacugcaucaaccgcugcuucuacgucgagcucauccgcggccgcaaggaggagaccaaggucugguggaccuccaacuccaucgucgucuucugcggcaccuccggcaccuacggcaccggcuccuggcccgacggcgccgacaucaaccucaugcccaucuga

SEQ ID NO: 122348 - RNA, 1410 nt, Artificial Sequence
  derived and/or modified CDS sequence (opt2) from neuraminidase__InfluenzaA__AIE52540
augaaccccaaccagaagaucaucaccaucggcuccgucucccucaucaucgccaccaucugcuuccucaugcagaucgccauccucgucaccaccgucacccuccacuucaagcagcacgacuacaacuccccccccaacaaccaggucaugcucugcgagcccaccaucaucgagcgcaacaccaccgagaucgucuaccucaccaacaucaccaucgagaaggagaucugccccaagcucgccgaguaccgcaacugguccaagccccagugcaacaucaccggcuucgcccccuucuccaaggacaacuccauccgccucuccgccggcggcgacaucugggucacccgcgagcccuacgucuccugcgaccccgacaagugcuaccaguucgcccucggccagggcaccacccucaacaaccgccacuccaacaacaccguccacgaccgcucccccuaccgcacccuccucaugaacgagcucggcguccccuuccaccucggcacccgccaggucugcaucgccugguccuccuccuccugccacgacggcaaggccuggcuccacgucugcaucaccggcgacgacaacaacgccaccgccuccuucaucuacaacggccgccucgucgacuccaucggcuccugguccaagaacauccuccgcacccaggaguccgagugcgucugcaucaacggcaccugcaccgucgucaugaccgacggcuccgccuccggcaaggccgacaccaagauccucuucaucgaggagggcaagaucguccacaucuccacccucuccggcuccgcccagcacgucgaggagugcuccugcuacccccgcuaccccggcguccgcugcgucugccgcgacaacuggaagggcuccaaccgccccaucgucgacaucaacaugaaggacuacuccaucgccuccuccuacgucugcuccggccucgucggcgacaccccccgcaagaacgacuccuucuccuccucccacugccucgaccccaacaacgagaagggcggccacggcgucaagggcugggccuucgacgacggcaacgacgucuggaugggccgcaccaucuccgaggaguuccgccucggcuacgagaccuucaaggucaucaagggcugguccaaccccaacuccaagcuccagaccaaccgccaggucaucgucgagaagggcaaccgcuccggcuacuccggcgucuucuccaucgaggacaaguccugcaucaaccgcugcuucuacgucgagcucauccgcggccgcaaggaggagaccaaggucugguggaccuccaacuccaucgucgucuucugcggcaccuccggcaccuacggcaccggcuccuggcccgacggcgccgacaucaaccucaugcccaucuga

SEQ ID NO: 122349 - RNA, 1410 nt, Artificial Sequence; identical to SEQ ID NO: 122348
  derived and/or modified CDS sequence (opt2) from neuraminidase__InfluenzaA__EPI465399

SEQ ID NO: 122350 - RNA, 1410 nt, Artificial Sequence; identical to SEQ ID NO: 122348
  derived and/or modified CDS sequence (opt2) from neuraminidase__InfluenzaA__EPI328899

SEQ ID NO: 122351 - RNA, 1410 nt, Artificial Sequence; identical to SEQ ID NO: 122348
  derived and/or modified CDS sequence (opt2) from neuraminidase__InfluenzaA__EPI328901

SEQ ID NO: 122352 - RNA, 1410 nt, Artificial Sequence
  derived and/or modified CDS sequence (opt2) from neuraminidase__InfluenzaA__EPI574645
augaaccccaaccagaagaucaucaccaucggcuccgucucccucaccaucuccaccaucugcuucuucaugcagaucgccauccucaucaccaccgucacccuccacuucaagcaguacgaguucaacuccccccccaacaaccaggucguccucugcgagcccaccaucaucgagcgcaacaucaccgagaucgucuaccucaccaacaccaccaucgagaaggagaucugccccaagcccgccgaguaccgcaacugguccaagccccagugcggcaucaccggcuucgcccccuucuccaaggacaacuccauccgccucuccgccggcggcgacaucugggucacccgcgagcccuacgucuccugcgaccccgacaagugcuaccaguucgcccucggccagggcaccacccucaacaacggccacuccaacaacaccguccgcgaccgcacccccuaccgcacccuccucaugaacgagcucggcguccccuuccaccucggcaccaagcaggucugcaucgccugguccuccuccuccugccacgacggcaaggccuggcuccacgucugcaucaccggcgacgacaagaacgccaccgccuccuucaucuacaacggccgccucgucgacuccgucgucuccugguccaaggacauccuccgcacccaggaguccgagugcgucugcaucaacggcaccugcaccgucgucaugaccgacggcuccgccuccggcaaggccgacaccaagauccucuucaucgaggagggcaagaucauccacaccuccacccucuccggcuccgcccagcacgucgaggagugcuccugcuacccccgcuaccccggcguccgcugcgucugccgcgacaacuggaagggcuccaaccgccccaucgucgacaucaacaucaaggaccacuccaucgucuccuccuacgucugcuccggccucgucggcgacaccccccgcaagaacgacuccuccuccuccucccacugccucgaccccaacaacgaggagggcggccacggcgucaagggcugggccuucgacgacggcaacgacgucuggaugggccgcaccaucaacgagaccucccgccucggcuacgagaccuucaaggucaucgagggcugguccaaccccaaguccaagcuccagaucaaccgccaggucaucgucgaccgcggcgaccgcuccggcuacuccggcaucuucuccgucgagggcaaguccugcaucaaccgcugcuucuacgucgagcucauccgcggccgcaaggaggagaacgagguccucuggaccuccaacuccaucgucgucuucugcggcaccuccggcaccuacggcaccggcuccuggcccgacggcgccgaccucaaccucaugcccaucuga

SEQ ID NO: 122353 - RNA, 1410 nt, Artificial Sequence
  derived and/or modified CDS sequence (opt2) from neuraminidase__InfluenzaA__EPI563214
augaaccccaaccagaagaucaucaccaucggcuccgucucccucaccaucuccaccaucugcuucuucaugcagaucgccauccucaucaccaccgucacccuccacuucaagcaguacgaguucaacuccccccccaacaaccaggucaugcucugcgagcccaccaucaucgagcgcaacaucaccgagaucgucuaccucaccaacaccaccaucgagaaggagaucugccccaagcccgccgaguaccgcaacugguccaagccccagugcuccaucaccggcuucgcccccuucuccaaggacaacuccauccgccucuccgccggcggcgacaucugggucacccgcgagcccuacgucuccugcgaccccgacaagugcuaccaguucgcccucggccagggcaccacccucaacaacguccacuccaacaacaccguccgcgaccgcacccccuaccgcacccuccucaugaacgagcucggcguccccuuccaccucggcaccaagcaggucugcaucgccugguccuccuccuccugccacgacggcaaggccuggcuccacgucugcaucaccggcgacgacaagaacgccaccgccuccuucaucuacaacggccgccucgucgacuccgucgucuccugguccaaggacauccuccgcacccaggaguccgagugcgucugcaucaacggcaccugcaccgucgucaugaccgacggcuccgccuccggcaaggccgacaccaagauccucuucaucgaggagggcaagaucgucuacaccuccaagcucuccggcuccgcccagcacgucgaggagugcuccugcuacccccgcuaccccggcguccgcugcgucugccgcgacaacuggaagggcuccaaccgccccaucgucgacaucaacaucaaggaccacuccaucgucuccuccuacgucugcuccggccucgucggcgacaccccccgcaagaacgacuccuccuccuccucccacugccucgaccccaacaacgaggagggcggccacggcgucaagggcugggccuucgacgacggcaacgacgucuggaugggccgcaccaucaacgagaccucccgccucggcuacgagaccuucaaggucgucgagggcugguccaaccccaaguccaagcuccagaucaaccgccaggucaucgucgaccgcggcgaccgcuccggcuacuccggcaucuucuccgucgagggcaaguccugcaucaaccgcugcuucuacgucgagcucauccgcggccgcaaggaggagaccgagguccucuggaccuccaacuccaucgucgucuucugcggcaccuccggcaccuacggcaccggcuccuggcccgacggcgccgaccucaaccucaugcccaucuga

SEQ ID NO: 122354 - RNA, 1410 nt, Artificial Sequence; identical to SEQ ID NO: 122353
  derived and/or modified CDS sequence (opt2) from neuraminidase__InfluenzaA__EPI553998

SEQ ID NO: 122355 - RNA, 1410 nt, Artificial Sequence
  derived and/or modified CDS sequence (opt2) from neuraminidase__InfluenzaA__EPI551568
augaaccccaaccagaagaucaucaccaucggcuccgucucccucaccaucuccaccaucugcuucuucaugcagaucgccauccucaucaccaccgucacccuccacuucaagcaguacgaguucaacuccccccccaacaaccaggucaugcucugcgagcccaccaucaucgagcgcaacaucaccgagaucgucuaccucaccaacaccaccaucgagaaggagaucugccccaagcccgccgaguaccgcaacugguccaagccccagugcuccaucaccggcuucgcccccuucuccaaggacaacuccauccgccucuccgccggcggcgacaucugggucacccgcgagcccuacgucuccugcgaccccgacaagugcuaccaguucgcccucggccagggcaccacccucaacaacguccacuccaacaacaucguccgcgaccgcacccccuaccgcacccuccucaugaacgagcucggcguccccuuccaccucggcaccaagcaggucugcaucgccugguccuccuccuccugccacgacggcaaggccuggcuccacgucugcaucaccggcgacgacaagaacgccaccgccuccuucaucuacaacggccgccucgucgacuccgucgucuccugguccaaggacauccuccgcacccaggaguccgagugcgucugcaucaacggcaccugcaccgucgucaugaccgacggcuccgccuccggcaaggccgacaccaagauccucuucaucgaggagggcaagaucgucuacaccuccaagcucuccggcuccgcccagcacgucgaggagugcuccugcuacccccgcuaccccggcguccgcugcgucugccgcgacaacuggaagggcuccaaccgccccaucgucgacaucaacaucaaggaccacuccaucgucuccuccuacgucugcuccggccucgucggcgacaccccccgcaagaacgacuccuccuccuccucccacugccucgaccccaacaacgaggagggcggccacggcgucaagggcugggccuucgacgacggcaacgacgucuggaugggccgcaccaucaacgagaccucccgccucggcuacgagaccuucaaggucgucgagggcugguccaaccccaaguccaagcuccagaucaaccgccaggucaucgucgaccgcggcgaccgcuccggcuacuccggcaucuucuccgucgagggcaaguccugcaucaaccgcugcuucuacgucgagcucauccgcggccgcaaggaggagaccgagguccucuggaccuccaacuccaucgucgucuucugcggcaccuccggcaccuacggcaccggcuccuggcccgacggcgccgaccucaaccucaugcccaucuga

SEQ ID NO: 122356 - RNA, 1410 nt, Artificial Sequence
  derived and/or modified CDS sequence (opt2) from neuraminidase__InfluenzaA__EPI629737
augaaccccaaccagaagaucaucgccaucggcuccgucucccucaccaucuccaccaucugcuucuucaugcagaucgccauccucaucaccaccgucacccuccacuucaagcaguacgaguucaacuccccccccaacaaccaggucaugcucugcgagcccaccaucaucgagcgcaacaucaccgagaucgucuaccucaccaacaccaccaucgagaaggagaucugccccaagcccgccgaguaccgcaacugguccaagccccagugcuccaucaccggcuucgcccccuucuccaaggacaacuccauccgccucuccgccggcggcgacaucugggucacccgcgagcccuacgucuccugcgaccccgacaagugcuaccaguucgcccucggccagggcaccacccucaacaacguccacuccaacaacaccguccgcgaccgcacccccuaccgcacccuccucaugaacgagcucggcguccccuuccaccucggcaccaagcaggucugcaucgccugguccuccuccuccugccacgacggcaaggccuggcuccacgucugcaucaccggcgacgacaagaacgccaccgccuccuucaucuacaacggccgccucgucgacuccgucgucuccugguccaaggacauccuccgcacccaggaguccgagugcgucugcaucaacggcaccugcaccgucgucaugaccgacggcuccgccuccggcaaggccgacaccaagauccucuucaucgaggagggcaagaucgucuacaccuccaagcucuccggcuccgcccagcacgucgaggagugcuccugcuacccccgcuaccccggcguccgcugcgucugccgcgacaacuggaagggcuccaaccgccccaucgucgacaucaacaucaaggaccacuccaucgucuccuccuacgucugcuccggccucgucggcgacaccccccgcaagaacgacuccuccuccuccucccacugccucgaccccaacaacgaggagggcggccacggcgucaagggcugggccuucgacgacggcaacgacgucuggaugggccgcaccaucaacgagaccucccgccucggcuacgagaccuucaaggucgucgagggcugguccaaccccaaguccaagcuccagaucaaccgccaggucaucgucgaccgcggcgaccgcuccggcuacuccggcaucuucuccgucgagggcaaguccugcaucaaccgcugcuucuacgucgagcucauccgcggccgcaaggaggagaccgagguccucuggaccuccaacuccaucgucgucuucugcggcaccuccggcaccuacggcaccggcuccuggcccgacggcgccgaccucaaccucaugcccaucuga

SEQ ID NO: 122357 - RNA, 1410 nt, Artificial Sequence; identical to SEQ ID NO: 122353
  derived and/or modified CDS sequence (opt2) from neuraminidase__InfluenzaA__EPI631886

SEQ ID NO: 122358 - RNA, 1410 nt, Artificial Sequence; identical to SEQ ID NO: 122353
  derived and/or modified CDS sequence (opt2) from neuraminidase__InfluenzaA__EPI577025

SEQ ID NO: 122359 - RNA, 1410 nt, Artificial Sequence; identical to SEQ ID NO: 119907
  derived and/or modified CDS sequence (opt2) from neuraminidase__InfluenzaA__EPI404926

SEQ ID NO: 122360 - RNA, 1410 nt, Artificial Sequence; identical to SEQ ID NO: 119907
  derived and/or modified CDS sequence (opt2) from neuraminidase__InfluenzaA__EPI492687

SEQ ID NO: 122361 - RNA, 1410 nt, Artificial Sequence
  derived and/or modified CDS sequence (opt2) from neuraminidase__InfluenzaA__EPI530648
augaaccccaaccagaagaucaucaccaucggcuccgucucccucaccaucuccaccaucugcuucuucaugcagaucgccauccucaucaccaccgucacccuccacuucaagcaguacgaguucaacuccccccccaacaaccaggucaugcucugcgagcccaccaucaucgagcgcaacaucaccgagaucgucuaccucaccaacaccaccaucgagaaggagaucugccccaagcccgccgaguaccgcaacugguccaagccccagugcggcaucaccggcuucgcccccuucuccaaggacaacuccauccgccucuccgccggcggcgacaucugggucacccgcgagcccuacgucuccugcgaccccgacaagugcuaccaguucgcccucggccagggcaccacccucaacaacguccacuccaacaacaccguccgcgaccgcacccccuaccgcacccuccucaugaacgagcucggcguccccuuccaccucggcaccaagcaggucugcaucgccugguccuccuccuccugccacgacggcaaggccuggcuccacgucugcaucaccggcgacgacaagaacgccaccgccuccuucaucuacaacggccgccucgucgacuccgucgucuccugguccaaggacauccuccgcacccaggaguccgagugcgucugcaucaacggcaccugcaccgucgucaugaccgacggcuccgccuccggcaaggccgacaccaagauccucuucaucgaggagggcaagaucguccacaccuccacccucuccggcuccgcccagcacgucgaggagugcuccugcuacccccgcuaccccggcguccgcugcgucugccgcgacaacuggaagggcuccaaccgccccaucgucgacaucaacaucaaggaccacuccaucgucuccuccuacgucugcuccggccucgucggcgacaccccccgcaagaacgacuccuccuccuccucccacugccucgaccccaacaacgaggagggcggccacggcgucaagggcugggccuucgacgacggcaacgacgucuggaugggccgcaccaucaacgagaccucccgccucggcuacgagaccuucaaggucaucgagggcugguccaaccccaaguccaagcuccagaccaaccgccaggucaucgucgaccgcggcgaccgcuccggcuacuccggcaucuucuccgucgagggcaaguccugcaucaaccgcugcuucuacgucgagcucauccgcggccgcaaggaggagaccgagguccucuggaccuccaacuccaucgucgucuucugcggcaccuccggcaccuacggcaccggcuccuggcccgacggcgccgaccucaaccucaugcccaucuga

SEQ ID NO: 122362 - RNA, 1410 nt, Artificial Sequence; identical to SEQ ID NO: 122343
  derived and/or modified CDS sequence (opt2) from neuraminidase__InfluenzaA__EPI684314

SEQ ID NO: 122363 - RNA, 1410 nt, Artificial Sequence
  derived and/or modified CDS sequence (opt2) from neuraminidase__InfluenzaA__EPI614459
augaaccccaaccagaagaucaucaccaucggcuccgucucccucaccaucuccaccaucugcuucuucaugcagaucgccauccucaucaccaccgucacccuccacuucaagcaguacaaguucaacuccccccccaacaaccaggucaugcucugcgagcccaccaucaucgagcgcaacaucaccgagaucgucuaccucaccaacaccaccaucgagaaggagaucugccccaagcccgccgaguaccgcaacugguccaagccccagugcggcaucaccggcuucgcccccuucuccaaggacaacuccauccgccucuccgccggcggcgacaucugggucacccgcgagcccuacgucuccugcgaccccgacaagugcuaccaguucgcccucggccagggcaccacccucaacaacguccacuccaacaacaccguccgcgaccgcacccccuaccgcacccuccucaugaacgagcucggcguccccuuccaccucggcaccaagcaggucugcaucgccugguccuccuccuccugccacgacggcaaggccuggcuccacgucugcaucaccggcgacgacaagaacgccaccgccuccuucaucuacaacggccgccucgucgacuccgucgucuccugguccaaggacauccuccgcacccaggaguccgagugcgucugcaucaacggcaccugcaccgucgucaugaccgacggcuccgccuccggcaaggccgacaccaagauccucuucaucgaggagggcaagaucguccacaccuccacccucuccggcuccgcccagcacgucgaggagugcuccugcuacccccgcuaccccggcguccgcugcgucugccgcgacaacuggaagggcuccaaccgccccaucgucgacaucaacaucaaggaccacuccaucgucuccuccuacgucugcuccggccucgucggcgacaccccccgcaagaacgacuccuccuccuccucccacugccucgaccccaacaacgaggagggcggccacggcgucaagggcugggccuucgacgacggcaacgacgucuggaugggccgcaccaucaacgagaccucccgccucggcuacgagaccuucaaggucaucgagggcugguccaaccccaaguccaagcuccagaccaaccgccaggucaucgucgaccgcggcgaccgcuccggcuacuccggcaucuucuccgucgagggcaaguccugcaucaaccgcugcuucuacgucgagcucauccgcggccgcaaggaggagaccgagguccucuggaccuccaacuccaucgucgucuucugcggcaccuccggcaccuacggcaccggcuccuggcccgacggcgccgaccucaaccucaugcccaucuga

SEQ ID NO: 122364 - RNA, 1410 nt, Artificial Sequence; identical to SEQ ID NO: 122363
  derived and/or modified CDS sequence (opt2) from neuraminidase__InfluenzaA__EPI541466

SEQ ID NO: 122365 - RNA, 1410 nt, Artificial Sequence; identical to SEQ ID NO: 122363
  derived and/or modified CDS sequence (opt2) from neuraminidase__InfluenzaA__EPI696968

SEQ ID NO: 122366 - RNA, 1410 nt, Artificial Sequence; identical to SEQ ID NO: 122363
  derived and/or modified CDS sequence (opt2) from neuraminidase__InfluenzaA__EPI674598

SEQ ID NO: 122367 - RNA, 1410 nt, Artificial Sequence; identical to SEQ ID NO: 122361
  derived and/or modified CDS sequence (opt2) from neuraminidase__InfluenzaA__EPI530678

SEQ ID NO: 122368 - RNA, 1410 nt, Artificial Sequence
  derived and/or modified CDS sequence (opt2) from neuraminidase__InfluenzaA__EPI530680
augaaccccaaccagaagaucaucaccaucggcuccgucucccucaccaucuccaccaucugcuucuucaugcagaucgccauccucaucaccaccgucacccuccacuucaagcaguacgaguucaacuccccccccaacaaccaggucaugcucugcgagcccaccaucaucgagcgcaacaucaccgagaucgucuaccucaccaacaccaccaucgagaaggagaucugccccaagcccgccgaguaccgcaacugguccaagccccagugcggcaucaccggcuucgcccccuucuccaaggacaacuccauccgccucuccgccggcggcgacaucugggucacccgcgagcccuacgucuccugcgaccccgacaagugcuaccaguucgcccucggccagggcaccacccucaacaacguccacuccaacaacaccguccgcgaccgcacccccuaccgcacccuccucaugaacgagcucggcguccccuuccaccucggcaccaagcaggucugcaucgccugguccuccuccuccugccacgacggcaaggccuggcuccacgucugcaucaccggcgacgacaagaacgccaccgccuccuucaucuacaacggccgccucgucgacuccgucgucuccugguccaaggacauccuccgcacccaggaguccgagugcgucugcaucaacggcaccugcaccgucgucaugaccgacggcuccgccuccggcaaggccgacaccaagauccucuucaucgaggagggcaagaucguccacaccuccacccucuccggcuccgcccagcacgucgaggagugcuccugcuacccccgcuaccccggcguccgcugcgucugccgcgacaacuggaagggcuccaaccgccccaucgucgacaucaacaucaaggaccacuccaucgucuccuccuacgucugcuccggccucgucggcgacaccccccgcaagaacgacuccuccuccuccucccacugccucgaccccaacaacgaggagggcggccacggcgucaagggcugggccuucgacgacggcaacggcgucuggaugggccgcaccaucaacgagaccucccgccucggcuacgagaccuucaaggucaucgagggcugguccaaccccaaguccaagcuccagaccaaccgccaggucaucgucgaccgcggcgaccgcuccggcuacuccggcaucuucuccgucgagggcaaguccugcaucaaccgcugcuucuacgucgagcucauccgcggccgcaaggaggagaccgagguccucuggaccuccaacuccaucgucgucuucugcggcaccuccggcaccuacggcaccggcuccuggcccgacggcgccgaccucaaccucaugcccaucuga

SEQ ID NO: 122369 - RNA, 1410 nt, Artificial Sequence; identical to SEQ ID NO: 110074
  derived and/or modified CDS sequence (opt2) from neuraminidase__InfluenzaA__EPI7603

SEQ ID NO: 122370 - RNA, 1410 nt, Artificial Sequence; identical to SEQ ID NO: 122361
  derived and/or modified CDS sequence (opt2) from neuraminidase__InfluenzaA__EPI814527

SEQ ID NO: 122371 - RNA, 1410 nt, Artificial Sequence; identical to SEQ ID NO: 122361
  derived and/or modified CDS sequence (opt2) from neuraminidase__InfluenzaA__EPI674737

SEQ ID NO: 122372 - RNA, 1410 nt, Artificial Sequence; identical to SEQ ID NO: 122361
  derived and/or modified CDS sequence (opt2) from neuraminidase__InfluenzaA__EPI614443

SEQ ID NO: 122373 - RNA, 1410 nt, Artificial Sequence; identical to SEQ ID NO: 122361
  derived and/or modified CDS sequence (opt2) from neuraminidase__InfluenzaA__EPI551812

SEQ ID NO: 122374 - RNA, 1410 nt, Artificial Sequence; identical to SEQ ID NO: 122361
  derived and/or modified CDS sequence (opt2) from neuraminidase__InfluenzaA__EPI696961

SEQ ID NO: 122375 - RNA, 1410 nt, Artificial Sequence; identical to SEQ ID NO: 122361
  derived and/or modified CDS sequence (opt2) from neuraminidase__InfluenzaA__EPI740789

SEQ ID NO: 122376 - RNA, 1410 nt, Artificial Sequence
  derived and/or modified CDS sequence (opt2) from neuraminidase__InfluenzaA__EPI377498
augaaccccaaccagaagaucaucaccaucggcuccgucucccucaccaucuccaccaucugcuucuucaugcagaucgccauccucaucaccaccgucacccuccacuucaagcaguacgaguucaacuccccccccaacaaccaggucaugcucugcgagcccaccaucaucgagcgcaacaucaccgagaucgucuaccucaccaacaccaccaucgagaaggagaucugccccaagcccgccgaguaccgcaacugguccaagccccagugcggcaucaccggcuucgcccccuucuccaaggacaacuccauccgccucuccgccggcggcgacaucugggucacccgcgagcccuacgucuccugcgaccccgacaagugcuaccaguucgcccucggccagggcaccacccucaacaacguccacuccaacaacaccguccacgaccgcacccccuaccgcacccuccucaugaacgagcucggcguccccuuccaccucggcaccaagcaggucugcaucgccugguccuccuccuccugccacgacggcaaggccuggcuccacgucugcaucaccggcgacgacaagaacgccaccgccuccuucaucuacaacggccgccucgucgacuccgucgucuccugguccaaggagauccuccgcacccaggaguccgagugcgucugcaucaacggcaccugcaccgucgucaugaccgacggcuccgccuccggcaaggccgacaccaagauccucuucaucgaggagggcaagaucguccacaccuccacccucuccggcuccgcccagcacgucgaggagugcuccugcuacccccgcuaccccggcguccgcugcgucugccgcgacaacuggaagggcuccaaccgccccaucgucgacaucaacaucaaggaccacuccaucgucuccuccuacgucugcuccggccucgucggcgacaccccccgcaagaacgacuccuccuccuccucccacugccucgaccccaacaacgaggagggcggccacggcgucaagggcugggccuucgacgacggcaacgacgucuggaugggccgcaccaucaacgagaccucccgccucggcuacgagaccuucaaggucaucgagggcugguccaaccccaaguccaagcuccagaucaaccgccaggucaucgucgaccgcggcgaccgcuccggcuacuccggcaucuucuccgucgagggcaaguccugcaucaaccgcugcuucuacgucgagcucauccgcggccgcaaggaggagaccgagguccucuggaccuccaacuccaucgucgucuucugcggcaccuccggcaccuacggcaccggcuccuggcccgacggcgccgaccucaaccucaugcccaucuga

SEQ ID NO: 122377 - RNA, 1410 nt, Artificial Sequence; identical to SEQ ID NO: 122376
  derived and/or modified CDS sequence (opt2) from neuraminidase__InfluenzaA__EPI377498

SEQ ID NO: 122378 - RNA, 1410 nt, Artificial Sequence; identical to SEQ ID NO: 122376
  derived and/or modified CDS sequence (opt2) from neuraminidase__InfluenzaA__EPI391246

SEQ ID NO: 122379 - RNA, 1410 nt, Artificial Sequence; identical to SEQ ID NO: 122376
  derived and/or modified CDS sequence (opt2) from neuraminidase__InfluenzaA__EPI407122

SEQ ID NO: 122380 - RNA, 1410 nt, Artificial Sequence; identical to SEQ ID NO: 122376
  derived and/or modified CDS sequence (opt2) from neuraminidase__InfluenzaA__EPI407125

SEQ ID NO: 122381 - RNA, 1410 nt, Artificial Sequence; identical to SEQ ID NO: 122343
  derived and/or modified CDS sequence (opt2) from neuraminidase__InfluenzaA__EPI562038

SEQ ID NO: 122382 - RNA, 1410 nt, Artificial Sequence; identical to SEQ ID NO: 122343
  derived and/or modified CDS sequence (opt2) from neuraminidase__InfluenzaA__EPI562038

SEQ ID NO: 122383 - RNA, 1410 nt, Artificial Sequence; identical to SEQ ID NO: 118653
  derived and/or modified CDS sequence (opt2) from neuraminidase__InfluenzaA__EU716525

SEQ ID NO: 122384 - RNA, 1350 nt, Artificial Sequence
  derived and/or modified CDS sequence (opt2) from neuraminidase__InfluenzaA__EPI232422
augaaccccaaccagaagaucaucaccaucggcuccaucugcauggucaucggcaucgucucccucaugcuccagaucggcaacaugaucuccaucugggucucccacuccauccagaccggcaaccagcgccaggccgagcccaucuccaacaccaaguuccucaccgagaaggccgucgccuccgucacccucgccggcaacuccucccucugccccaucuccggcugggccgucuacuccaaggacaacuccauccgcaucggcucccgcggcgacgucuucgucauccgcgagcccuucaucuccugcucccaccucgagugccgcaccuucuuccucacccagggcgcccuccucaacgacaagcacuccaacggcaccgucaaggaccgcuccccccaccgcacccucauguccugccccgucggcgaggcccccucccccuacaacucccgcuucgaguccgucgccugguccgccuccgccugccacgacggcaccuccuggcucaccaucggcaucuccggccccgacaacggcgccgucgccguccucaaguacaacggcaucaucaccgacaccaucaaguccuggcgcaacaacauccuccgcacccaggaguccgagugcgccugcgucaacggcuccugcuucaccgucaugaccgacggccccuccuccggccaggccuccuacaagaucuucaagauggagaagggcaaggucgucaaguccgucgagcucgacgcccccaacuaccacuacgaggagugcuccugcuaccccgacgccggcgagaucaccugcgucugccgcgacaacuggcacggcuccaaccgccccugggucuccuucaaccagaaccucgaguaccagaucggcuacaucugcuccggcgucuucggcgacaacccccgccccaacgacggcaccggcuccugcggccccgucucccccaacggcgccuacggcgucaagggcuucuccuucaaguacggcaacggcgucuggaucggccgcaccaaguccaccaacucccgcuccggcuucgagaugaucugggaccccaacggcuggaccggcaccgacuccuccuucuccgucaagcaggacaucgucgccaucaccgacugguccggcuacuccggcuccuucguccagcaccccgagcucaccggccucgacugcauccgccccugcuucugggucgagcucauccgcggccgccccaaggaguccaccaucuggaccuccggcuccuccaucuccuucugcggcgucaacuccgacaccgucuccugguccuggcccgacggcgccgagcuccccuucaccaucgacaaguga

SEQ ID NO: 122385 - RNA, 1350 nt, Artificial Sequence; identical to SEQ ID NO: 122220
  derived and/or modified CDS sequence (opt2) from neuraminidase__InfluenzaA__EPI227593

SEQ ID NO: 122386 - RNA, 1350 nt, Artificial Sequence
  derived and/or modified CDS sequence (opt2) from neuraminidase__InfluenzaA__EPI435658
augaaccccaaccagaagaucgucaccaucggcuccaucugcauggucaucggcaucaucucccucaugcuccagaucggcaacaucaucuccaucugggucucccacuccauccagaccggcaaccagcaccagaccgagcccauccgcaacaccaacuuccucaccgagaacgccgucgccuccgucacccucgccggcaacuccucccucugccccauccgcggcugggccguccacuccaaggacaacuccauccgcaucggcuccaagggcgacgucuucgucauccgcgagcccuucaucuccugcucccaccucgagugccgcaccuucuuccucacccagggcgcccuccucaacgacaagcacuccaacggcaccgucaaggaccgcuccccccaccgcacccucauguccugccccaucggcgaggcccccucccccuacaacucccgcuucgaguccgucgccugguccgccuccgccugccacgacggcaccuccuggcucaucaucggcaucuccggccccgacaacggcgccgucgccguccucaaguacaacggcaucaucaccgacaccaucaaguccuggcgcaacaacauccuccgcacccaggaguccgagugcgccugcgucaacggcuccugcuucaccgucaugaccgacggccccuccaacggccaggccuccuacaagaucuucaagaucgagaagggcaaggucgucaaguccgucgagcucaacgcccccaacuaccacuacgaggagugcuccugcuaccccgacgccggcgagaucaucugcgucugccgcgacaacuggcacggcuccaaccgccccugggucuccuucaaccagaaccucgaguaccagaucggcuacaucugcuccggcgucuucggcgacaacccccgccccaacgacggcaccggcuccugcggccccgucucccccaacggcgccuacggcgucaagggcuucuccuucaaguacggcaacggcgucuggaucggccgcaccaaguccacccacucccgcuccggcuucgagaugaucugggaccccaacggcuggaccggcaccgacuccgaguucuccaugaagcaggacaucgucgccaucaccgacugguccggcuacuccggcuccuucguccagcaccccgagcucaccggccucgacugcauccgccccugcuucugggucgagcucauccgcggccgccccaaggaguccaccaucuggaccuccggcuccuccaucuccuucugcggcgucaacuccgacaccgucuccugguccuggcccgacggcgccgagcuccccuucaccaucgacaaguga

SEQ ID NO: 122387 - RNA, 1350 nt, Artificial Sequence; identical to SEQ ID NO: 122386
  derived and/or modified CDS sequence (opt2) from neuraminidase__InfluenzaA__EPI492513

SEQ ID NO: 122388 - RNA, 1350 nt, Artificial Sequence; identical to SEQ ID NO: 115733
  derived and/or modified CDS sequence (opt2) from neuraminidase__InfluenzaA__EPI165066

SEQ ID NO: 122389 - RNA, 1350 nt, Artificial Sequence
  derived and/or modified CDS sequence (opt2) from neuraminidase__InfluenzaA__EPI531308
augaaccccaaccagaagaucaucaccaucggcuccaucugcauggucaccggcgucgucucccucaugcuccaggucggcaacaugaucuccaucuggaucucccacuccauccacaccggcaaccagcaccaggccgagcccaucuccaacaccaacuuccacaccgagaaggccgucgucuccgccaagcucgccggcaacuccucccucugccccaucaacggcugggccgucuacuccaaggacaacuccauccgcaucggcuccaagggcgacgucuucgucauccgcgagcccuucaucuccugcucccaccucgagugccgcaccuucuuccucacccagggcgcccuccucaacgacaagcacuccaacggcaccgccaaggaccgcuccccccaccgcacccucauguccugccccgucggcgaggcccccucccccuacaacucccgcuucgaguccgucgccugguccgccuccgccugccacgacggcaccuccuggcucaccaucggcaucuccggccccgacaacggcgccgucgccguccucaaguacaacggcaucaucaccgacaccaucaaguccuggcgcaacaacguccuccgcacccaggaguccgagugcgccugcgucaacggcuacugcuucaccgucaugaccgacggccccuccaacggccaggccucccacaagaucuucaagauggagaagggcaaggucaucaaguccgucgagcucgacgcccccaacuaccacuacgaggagugcuccugcuaccccgacgccggcgagaucaccugcgucugccgcgacaacuggcacggcuccaaccgccccuggaucuccuucaaccagaaccucgaguaccagaucggcuacaucugcuccggcgucuucggcgacaacccccgccccaacgacggcaagggcuccugcggccccgucuccuccaacggcgccuacggcgucaagggcuucuccuucaaguacggcaacggcgucuggaucggccgcaccaaguccaccaacucccgcuccggcuucgagaugaucugggaccccaacggcuggaccgagaccgacuccuccuucuccgucaagcaggacaucgucgccaucaccgacugguccggcuacuccggcuccuucguccagcaccccgagcucaccggccucgacugcauccgccccugcuucugggucgagcucauccgcggccgccccaaggagggcaccaucuggaccuccggcuccuccaucuccuucugcggcgucuccggcgacaccgucggcugguccuggcccgacggcgccgagcuccccuucaccaucgacaaguga

SEQ ID NO: 122390 - RNA, 1350 nt, Artificial Sequence
  derived and/or modified CDS sequence (opt2) from neuraminidase__InfluenzaA__EPI433308
augaaccccaaccagaagaucaucaccaucggcuccaucugcauggucaucggcaucgucucccucaugcuccagaucggcaaccucaucuccaucugggucucccacuccauccagcgcggcaaccucaaccaggucgagcccaucuccaacaccuccuuccccaccgagaaggccgucgccuccgucacccucgccggcaacuccucccucugccccauccgcggcugggccguccacuccaaggacaacuccauccgcaucggcuccaagggcgacgucuucgucauccgcgagcccuucaucuccugcucccaccucgagugccgcaccuucuuccucacccagggcgcccuccucaacgacaagcacuccaacggcaccgucaaggaccgcuccccccaccgcacccucauguccugccccgucggcgaggcccccucccccuacaacucccgcuucgaguccgucgccugguccgccuccgccugccacgacggcaccuccuggcucaccaucggcaucuccggccccgacaacggcgccgucgccgucgucaaguacaacggcaucaucaccgacaccaucaaguccuggggcaacaacauccuccgcacccaggaguccgagugcgccugcgucaacggcuccugcuucaccgucaugaccgacggccccuccaacggccaggccuccuacaagaucuucaagauggagaagggcaaggucaucaaguccgucgagcucgacgcccccaacuaccacuacgaggagugcuccugcuaccccgacgccggcgagaucaccugcgucugccgcgacaacuggcacggcuccaaccgccccugggucuccuucaaccagaaccucgaguaccagaucggcuacaucugcuccggcgucuucggcgacaacccccgccccaacgacggcaccggcuccugcggccccgucucccccaacggcgccuacggcgucaagggcuucuccuucaaguacggcaacggcgucuggaucggccgcaccaagucccccaacucccgcuccggcuucgagaugaucugggaccccaacggcugguccgagaccgacuccuccuucuccgucaagcaggacauccucgccgucaccgacugguccggcuacuccggcuccuucguccagcaccccgagcucaccggccucgacugcauccgccccugcuucugggucgagcucauccgcggccgccccgaggaguccaccaucuggaccuccggcuccuccaucuccuucugcggcgucaacuccgacaccgucuccugguccuggcccgacggcgccgagcuccccuucaccaucgacaaguga

SEQ ID NO: 122391 - RNA, 1350 nt, Artificial Sequence
  derived and/or modified CDS sequence (opt2) from neuraminidase__InfluenzaA__EPI114974
augaaccccaaccagaagaucaucaccaucggcuccaucugcauggucaucggcaucgucucccucaugcuccagaucggcaacaugaucuccaucugggucucccacuccauccagaccggcaaccagcgccaggccgagcccaucuccaacaccaaguuccucaccgagaaggccgucgccuccgucacccucgccggcaacuccucccucugccccaucuccggcugggccgucuacuccaaggacaacuccauccgcaucggcucccgcggcgacgucuucgucauccgcgagcccuucaucuccugcucccaccucgagugccgcaccuucuuccucacccagggcgcccuccucaacgacaagcacuccaacggcaccgucaaggaccgcuccccccaccgcacccucauguccugccccgucggcgaggcccccucccccuacaacucccgcuucgaguccgucgccugguccgccuccgccugccacgacggcaccuccuggcucaccaucggcaucuccggccccgacaacggcgccgucgccguccucaaguacaacggcaucaucaccgacaccaucaaguccuggcgcaacaacauccuccgcacccaggaguccgagugcgccugcgucaacggcuccugcuucaccgucaugaccgacggccccuccaacggccaggccuccuacaagaucuucaagauggagaagggcaaggucgucaaguccaucgagcucgacgcccccaacuaccacuacgaggagugcuccugcuaccccgacgccggcgagaucaccugcgucugccgcgacaacuggcacggcuccaaccgccccugggucuccuucaaccagaaccucgaguaccagaucggcuacaucugcuccggcgucuucggcgacaacccccgccccaacgacggcaccggcuccugcggccccgucucccccaacggcgccuacggcgucaagggcuucuccuucaaguacggcaacggcgucuggaucggccgcaccaaguccaccaacucccgcuccggcuucgagaugaucugggaccccaacggcuggaccggcaccgacuccuccuucuccgucaagcaggacaucgucgccaucaccgacugguccggcuacuccggcuccuucguccagcaccccgagcucaccggccucgacugcauccgccccugcuucugggucgagcucauccgcggccgccccaaggaguccaccaucuggaccuccggcuccuccaucuccuucugcggcgucaacuccgacaccgucuccugguccuggcccgacggcgccgagcuccccuucaccaucgacaaguga

SEQ ID NO: 122392 - RNA, 1350 nt, Artificial Sequence
  derived and/or modified CDS sequence (opt2) from neuraminidase__InfluenzaA__EPI622495
augaaccccaaccagaagaucaccaccaucggcuccaucugcauggucaucggcaucgucucccucaugcuccagaucggcaacauggucuccaucugggucucccacuccauccagacccgcaaccagcgccaggccgagcccaucuccaacacccgcucccucaccgagaaggccgucgccuccgucacccucgccggcaacuccucccucugccccaucuccggcugggccgucuacuccaaggacaacuccauccgcaucggcuccaagggcgacgucuucgucauccgcgagcccuucaucuccugcucccaccucgagugccgcaccuucuuccucacccagggcgcccuccucaacgacaagcacuccaacggcaccgucaaggaccgcuccccccaccgcacccucauguccugccccgucggcgaggcccccucccccuacaacucccgcuucgaguccgucgccugguccgccuccgccugccacgacggcaccuccuggcucaccaucggcaucuccggccccgacaacggcgccgucgccgucgucaaguacaacggcaucaucaccgacaccaucaaguccuggcgcaacaacauccuccgcacccaggaguccgagugcgucugcgucaacggcuccugcuucaccgucaugaccgacggccccuccaacaagcaggccuccuacaagaucuucaagauggagaagggcaaggucgucaaguccaucgagcucgacgcccccaacuaccacuacgaggagugcuccugcuaccccgacgccggcgagaucaccugcgucugccgcgacaacuggcacggcuccaaccgccccuggcucuccuucaaccagaaccucgaguaccagaucggcuacaucugcuccggcgucuucggcgacaacccccgccccaacgacggcaccggcuccugcggccccgucuccuccaacggcgccuacggcgucaagggcuucuccuucaaguacggcaacggcgucuggaucggccgcaccaaguccaccaacucccgcuccggcuucgagaugaucugggaccccaacggcuggaccggcaccgacuccuccuucuccaugaagcaggacaucgucgccaucaccgacugguccggcuacuccggcuccuucguccagcaccccgagcucaccggccucgacugcauccgccccugcuucugggucgagcucguccgcggccgccccaaggagggcaccaucuggaccuccggcuccuccaucuccuucugcggcgucaacuccgacaccgucuccugguccuggcccgacggcgccgagcuccccuucaccaucgacaaguga

SEQ ID NO: 122393 - RNA, 1350 nt, Artificial Sequence
  derived and/or modified CDS sequence (opt2) from neuraminidase__InfluenzaA__EPI349847
augaaccccaaccagaagaucaccaccaucggcuccaucugcauggucaucggcaucgucucccucaugcuccagaucggcaacauggucuccaucugggucucccacuccauccagacccgcaaccagcgccaggccgagcccaucuccaacacccgcucccucaccgagaaggccgucgccuccgucacccucgccggcaacuccucccucugccccaucuccggcugggccgucuacuccaaggacaacuccauccgcaucggcuccaagggcgacgucuucgucauccgcgagcccuucaucuccugcucccaccucgagugccgcaccuucuuccucacccagggcgcccuccucaacgacaagcacuccaacggcaccgucaaggaccgcuccccccaccgcacccucauguccugccccgucggcgaggcccccucccccuacaacucccgcuucgaguccgucgccugguccgccuccgccugccacgacggcaccuccuggcucaccaucggcaucuccggccccgacaacggcgccgucgccgucgucaaguacaacggcaucaucaccgacaccaucaaguccuggcgcaacaacauccuccgcacccaggaguccgagugcgucugcgucaacggcuccugcuucaccgucaugaccgacggccccuccaacaagcaggccuccuacaagaucuucaagauggagaagggcaaggucgucaaguccaucgagcucgacgcccccaacuaccacuacgaggagugcuccugcuaccccgacgccggcgagaucaccugcgucugccgcgacaacuggcacggcuccaaccgccccuggcucuccuucaaccagaaccucgaguaccagaucggcuacaucugcuccggcgucuucggcgacaacccccgccccaacgacggcaccggcuccugcggccccgucucccacaacggcgccuacggcgucaagggcuucuccuucaaguacggcaacggcgucuggaucggccgcaccaaguccaccaacucccgcuccggcuucgagaugaucugggaccccaacggcuggaccggcaccgacuccuccuucuccaugaagcaggacaucgucgccaucaccgacugguccggcuacuccggcuccuucguccagcaccccgagcucaccggccucgacugcauccgccccugcuucugggucgagcucguccgcggccgccccaaggagggcaccaucuggaccuccggcuccuccaucuccuucugcggcgucaacuccgacaccgucuccugguccuggcccgacggcgccgagcuccccuucaccaucgacaaguga

SEQ ID NO: 122394 - RNA, 1350 nt, Artificial Sequence
  derived and/or modified CDS sequence (opt2) from neuraminidase__InfluenzaA__EPI174804
augaaccccaaccagaagaucaucaccaucggcuccaucugcauggucaucggcaucgucucccucaugcuccagaucggcaacauggucuccaucugggucucccacuccauccagacccgcaaccagcgccaggccgagcccaucuccaacaccaagucccucaccgagaaggccgucgccuccgucacccucgccggcaacuccucccucugccccaucuccggcugggccgucuacuccaaggacaacuccauccgcaucggcuccaagggcgacgucuucgucauccgcgagcccuucaucuccugcucccaccucgagugccgcaccuucuuccucacccagggcgcccuccucaacgacaagcacuccaacggcaccaucaaggaccgcuccccccaccgcacccucauguccugccccgucggcgaggcccccucccccuacaacucccgcuucgaguccgucgccugguccgccuccgccugccacgacggcaccuccuggcucaccaucggcaucuccggccccgacaacggcgccgucgccguccucaaguacaacggcaucaucaccgacaccaucaaguccuggcgcaacaacauccuccgcacccaggaguccgagugcgccugcgucaacggcuccugcuucgccgucaugaccgacggccccuccaaccgccaggccuccuacaagaucuucaagauggagaagggcaaggucgucaaguccaucgagcucgacgcccccaacuaccacuacgaggagugcuccugcuaccccgacgccggcgagaucaccugcgucugccgcgacaacuggcacggcuccaaccgccccuggcucuccuucaaccagaaccucgaguaccagaucggcuacaucugcuccggcgucuucggcgacaacccccgccccaacgacggcaccggcuccugcggccccgucuccuccaacggcgccuacggcgucaagggcuucuccuucaaguacggcaacggcgucuggaucggccgcaccaaguccaccaacucccgcuccggcuucgagaugaucugggaccccaacggcuggaccgagaccgacuccuccuucuccaugaagcaggacaucgucgccaucaccgacugguccggcuacuccggcuccuucguccagcaccccgagcucaccggccucgacugcauccgccccugcuucugggucgagcucguccgcggccgccccaaggaguccaccaucuggaccuccggcuccuccaucuccuucugcggcgucaacuccgacaccgucuccugguccuggcccgacggcgccgagcuccccuucaccaucgacaaguga

SEQ ID NO: 122395 - RNA, 1350 nt, Artificial Sequence
  derived and/or modified CDS sequence (opt2) from neuraminidase__InfluenzaA__EPI492441
augaaccccaaccagaagaucauggccaucggcuccgucugcauggucaucggcaucgucucccucaugcuccagaucggcaacaccaucuccaucugggucucccacuccuuccagacccgcguccagcaccaggccgagcccauccgcaacaccaacuuccucaccgagaacgccgucgccuccgucacccucgccggcaacuccucccucugccccauccgcggcugggccguccacuccaaggacaacuccauccgcaucggcuccaagggcgacgucuucgucauccgcgagcccuucaucuccugcucccaccucgagugccgcaccuucuuccucacccagggcgcccuccucaacgacaagcacuccaaccgcaccgucaaggaccgcuccccccaccgcacccucauguccugccccgucggcgagguccccucccccuacaacucccgcuucgaguccgucgccugguccgccuccgccugccacgacggcaccuccuggcucaccaucggcaucuccggccccgacaacggcgccgucgccguccucaaguacaacggcaucaucaccgacaccaucaaguccuggcgcaacaacauccuccgcacccaggaguccgagugcgccugcgucaacggcuucugcuucaccgucaugaccgacggccccuccaacggccaggccuccuacaagaucuucaagaugaagaagggcaaggucgucaaguccgucgagcucaacgcccccaacuaccacuacgaggagugcuccugcuaccccgacgccggcgagaucaugugcgucugccgcgacaacuggcacggcuccaaccgccccugggucuccuucaaccagaaccucgaguaccagaucggcuacaucugcuccggcgucuucggcgacaacccccgccccaacgacggcaccggcuccugcggccccgucucccccaacggcgccuacggcaucaagggcuucuccuucaaguacggcaacggcgucuggaucggccgcaccaaguccaccaacucccgcuccggcuucgagauggucugggaccccaacggcuggaccgacaccgacuccgacuucuccaucaagcaggacaucgucgccaucaccgacugguccggcuacuccggcuccuucguccagcaccccgagcucaccggccucgacugcauccgccccugcuucugggucgagcucauccgcggccgccccaaggaguccaccaucuggaccuccggcuccuccaucuccuucugcggcgucaacuccgagaccgucuccugguccuggcccgacggcgccgagcuccccuucaccaucgacaaguga

SEQ ID NO: 122396 - RNA, 1350 nt, Artificial Sequence; identical to SEQ ID NO: 122023
  derived and/or modified CDS sequence (opt2) from neuraminidase__InfluenzaA__EPI164142

SEQ ID NO: 122397 - RNA, 1350 nt, Artificial Sequence
  derived and/or modified CDS sequence (opt2) from neuraminidase__InfluenzaA__EPI827076
augaaccccaaccagaagaucgucaccaucggcuccaucugcauggucaucggcaucaucucccucaugcuccagaucggcaacaucaucuccaucugggucucccacuccauccagaccggcaaccagcaccagaccgagcccauccgcaacaccaacuuccucaccgagaacgccgucgccuccgucacccucgccggcaacuccucccucugccccaucaagggcugggccguccacuccaaggacaacuccauccgcaucggcuccaagggcgacgucuucgucauccgcgagcccuucaucuccugcucccaccucgagugccgcaccuucuuccucacccagggcgcccuccucaacgacaagcacuccaacggcaccgucaaggaccgcuccccccaccgcacccucauguccugccccaucggcgaggcccccucccccuacaacucccgcuucgaguccgucgccugguccgccuccgccugccacgacggcaccuccuggcucaucaucggcaucuccggccccgacaacggcgccgucgccguccucaaguacaacggcaucaucaccgacaccaucaaguccuggcgcaacaacauccuccgcacccaggaguccgagugcgccugcgucaacggcuccugcuucgccgucaugaccgacggccccuccaacggccaggccuccuacaagaucuucaagaucgagaagggcaaggucgucaaguccgucgagcucaacgcccccaacuaccacuacgaggagugcuccugcuaccccgacgccggcgagaucaucugcgucugccgcgacaacuggcacggcuccaaccgccccugggucuccuucaaccagaaccucgaguaccagaucggcuacaucugcuccggcgucuucggcgacaacccccgccccaacgacggcaccggcuccugcggccccgucuccuccaacggcgccuacggcgucaagggcuucuccuucaaguacggcaacggcgucuggaucggccgcaccaaguccacccacucccgcuccggcuucgagaugaucugggaccccaacggcuggaccggcaccgacuccgaguucuccaugaagcaggacaucgucgccaucaccgacugguccggcuacuccggcuccuucguccagcaccccgagcucaccggccucgacugcauccgccccugcuucugggucgagcucauccgcggccgccccaaggaguccaccaucuggaccuccggcuccuccaucuccuucugcggcgucaacuccgacaccgucuccugguccuggcccgacggcgccgagcuccccuucaccaucgacaaguga

SEQ ID NO: 122398 - RNA, 1350 nt, Artificial Sequence; identical to SEQ ID NO: 112615
  derived and/or modified CDS sequence (opt2) from neuraminidase__InfluenzaA__EPI168491

SEQ ID NO: 122399 - RNA, 1350 nt, Artificial Sequence
  derived and/or modified CDS sequence (opt2) from neuraminidase__InfluenzaA__EPI827078
augaaccccaaccagaagaucaucaccaucggcuccaucugcauggucaucggcaucgccucccucaugcuccagaucggcaacaucaucuccaucuggaucucccacuccauccagaccggcaaccagugccagaacgaguccaucuccaacaccaaguuccucgccgagaaggccgucgccuccgucacccucgccggcaacuccucccucugccccgucuccggcugggccgucuacuccaaggacaacuccauccgcaucggcuccaagggcgacgucuucgucauccgcgagcccuucaucuccugcucccaccucgagugccgcaccuucuuccucacccagggcgcccuccucaacgacaagcacuccaacggcaccgucaaggaccgcuccccccaccgcacccucauguccugccccgucggcgaggcccccucccccuacaacucccgcuucgaguccgucgccugguccgccuccgccugccacgacggcaccuccuggcucaccaucggcaucuccggccccgacuccggcgccgucgccguccucaaguacaacggcaucaucaccgacaccaucaaguccuggcgcaacaacaucaugcgcacccaggaguccgagugcgccugcgucaacggcuccugcuucaccaucaugaccgacggccccuccuccggccaggccuccuacaagaucuucaagauggagaagggcaaggucaucaaguccgucgagcucgacgcccccaacuaccacuacgaggagugcuccugcuaccccgacgccggcgagaucaccugcgucugccgcgacaacuggcacggcuccaaccgccccuggaucuccuucaaccagaaccucgaguaccagaucggcuacaucugcuccggcgucuucggcgacaacccccgccccaacgacggcaccggcuccugcggccccgucuuccccaacggcgccuacggcgucaagggcuucuccuucaaguacggcaacggcgucuggaucggccgcaccaaguccaccaacucccgcuccggcuucgagaugaucugggaccccaacggcuggaccggcaccgacuccuccuucuccgucaagcaggacaucgucgccaucaccgagugguccggcuacuccggcuccuucguccagcaccccgagcucaccggccucgacugcauccgccccugcuucugggucgagcucauccgcggccgccccaaggaguccaccaucuggaccuccggcuccuccaucuccuucugcggcgucaacggcgacaccgucuccugguccuggcccgacggcgccgagcuccccuucaccaucgacaaguga

SEQ ID NO: 122400 - RNA, 1350 nt, Artificial Sequence
  derived and/or modified CDS sequence (opt2) from neuraminidase__InfluenzaA__EPI594521
augaaccccaaccagaagaucaucaccaucggcuccaucugcgucggcaucggcaucgucucccucaugcuccagaucggcaacauggucuccaucugggucaaccacuccauccagaccgagaaccagugccaggccgaguccaucuccaacaccaaguuccucaccgagaaggccgucgcccccgucacccucaugggcaacuccucccucugccccaucuccggcugggccguccacuccaaggacaacuccauccgcaucggcuccaagggcgacgucuucgucauccgcgagcccuucaucuccugcucccaccucgagugccgcaccuucuuccucacccagggcgcccuccucaacgacaagcacuccaacggcaccgucaaggaccgcuccccccaccgcgcccucauguccugccccgucggcgaggcccccucccccuacaacucccgcuucgaguccgucgccugguccgccuccgccugccacgacggcaccggcuggcucaccaucggcaucuccggccccgacaacggcgccgucgccguccucaaguacaacggcaucaucaccgacaccaucaaguccuggcgcaacaacauccuccgcacccaggaguccgagugcgccugcgucaacggcuccugcuucaccgucaugaccgacggccccuccaacggccaggccuccuacaagaucuucaagcucgagaagggcaaggucgucaaguccgucgagcucgacgcccccaacuaccacuacgaggagugcuccugcuaccccgacgccggcgagaucaccugcgucugccgcgacaacuggcacggcuccaaccgccccugggucuccuucaaccagaaccucgaguaccagaucggcuacaucugcuccggcgucuucggcgacaacccccgccccaacgacggcaccggcuccugcggccccgucucccccaacggcgccuacggcgucaagggcuucuccuucaaguacggcaacggcgucuggaucggccgcaccaaguccaccaacucccgcuccggcuucgagaugaucugggaccccaacggcuggaccgagaccgacuccuccuucuccgucaagcaggacaucgucgccaucaccgacugguccggcuacuccggcuccuucguccagcaccccgagcucaccggccucgacugcauccgccccugcuucugggucgagcucauccgcggccgccccaaggaguccaccaucuggaccuccggcuccuccaucuccuucugcggcgucaacuccgacaccgucggcugguccuggcccgacggcgccgagguccccuucaccaucgacaaguga

SEQ ID NO: 122401 - RNA, 1410 nt, Artificial Sequence
  derived and/or modified CDS sequence (opt2) from neuraminidase__InfluenzaA__EPI5787
augaaccccaaccagaagaucaucaccaucggcuccaucugcauggucgucggcaucaucucccucaugcuccagaucggcaacaucaucuccaucugggucucccacuccauccagaccggcaaccagcaccaggccgagcccugcaaccaguccaucaucaccuacgagaacaacaccugggucaaccagaccuacgucaacaucuccaacaccaacuuccucaccgagaaggccgucgccuccgucacccucgccggcaacuccucccucugccccaucuccggcugggccguccacuccaaggacaacggcauccgcaucggcuccaagggcgacgucuucgucauccgcgagcccuucaucuccugcucccaccucgagugccgcaccuucuuccucacccagggcgcccuccucaacgacaagcacuccaacggcaccgucaaggaccgcuccccccaccgcacccucauguccugccccgucggcgaggcccccucccccuacaacucccgcuucgaguccgucgccugguccgccuccgccugccacgacggcaccuccuggcucaccaucggcaucuccggccccgacaacggcgccgucgccguccucaaguacaacggcaucaucaccgacaccaucaaguccuggcgcaacaacauccuccgcacccaggaguccgagugcgccugcgucaacggcuccugcuucaccgucaugaccgacggccccuccaacggccaggccuccuacaagaucuucaagauggagaagggcaaggucgucaaguccgucgagcucaacgcccccaacuaccacuacgaggagugcuccugcuaccccgacgccggcgagaucaccugcgucugccgcgacaacuggcacggcuccaaccgccccugggucuccuucaaccagaaccucgaguaccagaucggcuacaucugcuccggcgucuucggcgacaacccccgccccaacgacggcaccggcuccugcggccccgucucccccaacggcgccuacggcgucaagggcuucuccuucaaguacggcaacggcgucuggaucggccgcaccaaguccaccaacucccgcuccggcuucgagaugaucugggaccccaacggcuggaccggcaccgacuccuccuucuccgucaagcaggacaucgucgccaucaccgacugguccggcuacuccggcuccuucguccagcaccccgagcucaccggccucgacugcauccgccccugcuucugggucgagcucauccgcggccgccccaaggaguccaccaucuggaccuccggcuccuccaucuccuucugcggcgucaacuccgacaccgucggcugguccuggcccgacgacgccgagcuccccuucaccaucgacaaguga

SEQ ID NO: 122402 - RNA, 1410 nt, Artificial Sequence; identical to SEQ ID NO: 122401
  derived and/or modified CDS sequence (opt2) from neuraminidase__InfluenzaA__EPI5787

SEQ ID NO: 122403 - RNA, 1350 nt, Artificial Sequence; identical to SEQ ID NO: 117101
  derived and/or modified CDS sequence (opt2) from neuraminidase__InfluenzaA__EPI267031

SEQ ID NO: 122404 - RNA, 1350 nt, Artificial Sequence; identical to SEQ ID NO: 118681
  derived and/or modified CDS sequence (opt2) from neuraminidase__InfluenzaA__EPI376539

SEQ ID NO: 122405 - RNA, 1350 nt, Artificial Sequence
  derived and/or modified CDS sequence (opt2) from neuraminidase__InfluenzaA__EPI124069
augaaccccaaccagaagaucaucaccaucggcuccaucugcauggucaucggcaucgucucccucaugcuccagaucggcaacaugaucuccaucugggucucccacuccauccagaccggcaaccagcaccaggccgaguccaucuccaacaccaacccccucaccgagaaggccgucgccuccgucacccucgccggcaacuccucccucugccccauccgcggcugggccguccacuccaaggacaacaacauccgcaucggcuccaagggcgacgucuucgucauccgcgagcccuucaucuccugcucccaccucgagugccgcaccuucuuccucacccagggcgcccuccucaacgacaagcacuccaacggcaccgucaaggaccgcuccccccaccgcacccucauguccugccccgucggcgaggcccccucccccuacaacucccgcuucgaguccgucgccugguccgccuccgccugccacgacggcaccuccuggcucaccaucggcaucuccggccccgacaacgaggccgucgccguccucaaguacaacggcaucaucaccgacaccaucaaguccuggcgcaacaacauccuccgcacccaggaguccgagugcgccugcgucaacggcuccugcuucaccgucaugaccgacggccccuccgacggccaggccuccuacaagaucuucaagauggagaagggcaaggucgucaaguccgucgagcucgacgcccccaacuaccacuacgaggagugcuccugcuaccccgacgccggcgagaucaccugcgucugccgcgacaacuggcacggcuccaaccgccccugggucuccuucaaccagaaccucgaguaccagaucggcuacaucugcuccggcgucuucggcgacaacccccgccccaacgacggcaccggcuccugcggccccaugucccccaacggcgccuacggcgucaagggcuucuccuucaaguacggcaacggcgucuggaucggccgcaccaaguccaccaacucccgcuccggcuucgagaugaucugggaccccaacggcuggaccggcaccgacuccuccuucuccgucaagcaggacaucgucgccaucaccgacugguccggcuacuccggcuccuucguccagcaccccgagcucaccggccucgacugcauccgccccugcuucugggucgagcucauccgcggccgccccaaggaguccaccaucuggaccuccggcuccuccaucuccuucugcggcgucaacuccgacaccgucuccugguccuggcccgacggcgccgagcuccccuucaccaucgacaaguga

SEQ ID NO: 122406 - RNA, 1350 nt, Artificial Sequence
  derived and/or modified CDS sequence (opt2) from neuraminidase__InfluenzaA__EPI342499
augaaccccaaccagaagaucaucaccaucggcuccaucugcauggucaucggcaucgucucccucaugcuccagaucggcaacaugaucuccaucuggaucucccacuccauccagaagggcaaccagcaccgcaccgaguccaucuccaacaccaacccccucaccgagaaggccgucgccuccgucacccucaccggcaacuccucccucugccccauccgcggcugggccguccacuccaaggacaacaacauccgcaucggcuccaagggcgacgucuucgucauccgcgagcccuucaucuccugcucccaccucgagugccgcaccuucuuccucacccagggcgcccuccucaacgacaagcacuccaacggcaccgucaaggaccgcuccccccaccgcacccucauguccugcccccucggcgaggcccccucccccuacaacucccgcuucgaguccgucgccugguccgccuccgccugccacgacggcaccggcuggcucaccaucggcaucuccggccccgacaacgaggccgucgccguccucaaguacaacggcaucaucaccgacaccaucaaguccuggcgcaacaacauccuccgcacccaggaguccgagugcgccugcgucaacggcuccugcuucaccgucaugaccgacggccccuccaacggccaggccuccuacaagaucuucaagaugcgcaagggcaaggucgucaaguccgucgagcucgacgcccccaacuaccacuacgaggagugcuccugcuaccccgacaccggcgagaucaccugcgucugccgcgacaacuggcacggcuccaaccgccccuggaucuccuucaaccagaaccucgaguaccagaucggcuacaucugcuccggcaucuucggcgacaacccccgccccaacgacggcaccggcuccugcggccccaugucccccaacggcgccuacggcgucaagggcuucuccuucaaguacggcaacggcgucuggaucggccgcaccaaguccaccaacucccgcuccggcuucgagaugaucugggaccccaacggcuggaccgagaccgacuccuccuucuccgucaagcaggacaucgucgccaucaccgacugguccggcuacuccggcuccuucguccagcaccccgagcucaccggccucgacugcauccgccccugcuucugggucgagcucauccgcggccgccccaaggaguccaccaucuggaccuccggcuccuccaucuccuucugcggcgucaacuccgacaccgucuccugguccuggcccgacggcgccgagcuccccuucaccaucgacaaguga

SEQ ID NO: 122407 - RNA, 1350 nt, Artificial Sequence
  derived and/or modified CDS sequence (opt2) from neuraminidase__InfluenzaA__EPI103069
augaaccccaaccagaagaucaucaccaucggcuccaucugcauggucaucggcaucgucucccucaugcuccagaucggcaacaugaucuccaucugggucucccacuccauccagaccggcaaccagcgccaggccgagcccaucuccaacaccaaguuccucaccgagaaggccgucgccuccgucacccucgccggcaacuccucccucugccccaucuccggcugggccgucuacuccaaggacaacuccauccgcaucggcucccgcggcgacgucuucgucauccgcgagcccuucaucuccugcucccaccucgagugccgcaccuucuuccucacccagggcgcccuccucaacgacaagcacuccaacggcaccaucaaggaccgcuccccccaccgcacccucauguccugccccgucggcgaggcccccucccccuacaacucccgcuucgaguccgucgccugguccgccuccgccugccacgacggcaccuccuggcucaccaucggcaucuccggccccgacaacggcgccgucgccguccucaaguacaacggcaucaucaccgacaccaucaaguccuggcgcaacaacauccuccgcacccaggaguccgagugcgccugcgucaacggcuccugcuucaccgucaugaccgacggccccuccuccggccaggccuccuacaagaucuucaagauggagaagggcaaggucgucaaguccgucgagcucgacgcccccaacuaccacuacgaggagugcuccugcuaccccgacgccggcgagaucaccugcgucugccgcgacaacuggcacggcuccaaccgccccugggucuccuucaaccagaaccucgaguaccagaucggcuacaucugcuccggcgucuucggcgacaacccccgccccaacgacggcaccggcuccugcggccccgucucccccaacggcgccuacggcgucaagggcuucuccuucaaguacggcaacggcgucuggaucggccgcaccaaguccaccaacucccgcuccggcuucgagaugaucugggaccccaacggcuggaccggcaccgacuccuccuucuccgucaagcaggacaucgucgccaucaccgacugguccggcuacuccggcuccuucguccagcaccccgagcucaccggccucgacugcauccgccccugcuucugggucgagcucauccgcggccgccccaaggaguccaccaucuggaccuccggcuccuccaucuccuucugcggcgucaacuccgacaccgucuccugguccuggcccgacggcgccgagcuccccuucaccaucgacaaguga

SEQ ID NO: 122408 - RNA, 1350 nt, Artificial Sequence; identical to SEQ ID NO: 122384
  derived and/or modified CDS sequence (opt2) from neuraminidase__InfluenzaA__EPI227595

SEQ ID NO: 122409 - RNA, 1410 nt, Artificial Sequence
  derived and/or modified CDS sequence (opt2) from neuraminidase__InfluenzaA__EPI569385
augaaccccaaccagaagaucaucaccaucggcuccgucucccucaccaucgccaccgucugcuuccucaugcagaucgccauccucgccaccaccgucacccuccacuucaagcagaacgagugcuccaucccccccaacaaccaggucguccccugcgagcccaucaucaucgagaagaacaucaccgagaucgucuaccucaacaacaccaccaucgagaaggaggucugccccgagguccccgaguaccgcaacugguccaagccccagugccagaucaccggcuucgcccccuucuccaaggacaacuccauccgccucuccgccggcggcgacaucugggucacccgcgagcccuacgucuccugcucccccggcaagugcuaccaguucgcccucggccagggcaccacccucaacaacaagcacuccaacggcaccauccacgaccgcaucccccaccgcacccuccucauguccgagcucggcguccccuuccaccucggcaccaagcaggucugcaucgccugguccuccuccuccugccacgacggcaaggccuggcuccacgucugcgucaccggcgacgaccgcaacgccaccgccuccuucaucuacgacggcaugcucgccgacuccaucggcuccuggucccagaacauccuccgcacccaggaguccgagugcgucugcaucaacggcaccugcaccgucgucaugaccgacggcuccgccuccggccgcgccgacacccgcauccucuucaucaaggagggcaagaucguccacaucuccccccucuccggcuccgcccagcacaucgaggagugcuccugcuacccccgcuaccccgacguccgcugcgucugccgcgacaacuggaagggcuccaaccgccccgucaucgacaucaacauggccgacuacuccaucgacuccuccuacgucugcuccggccucgucggcgacaccccccgcaacgacgacuccuccuccuccuccaacugccgcgaccccaacaacgagcgcggcaaccccggcgucaagggcugggccuucgacaacggcaacgacgucuggaugggccgcaccaucuccgaggacucccgcuccggcuacgagaccuuccgcgucaccgacggcuggaccaccgccaacuccaagucccaggucaaccgccagaucaucgucgacaacaacaacugguccggcuacuccggcaucuucuccgucgagggcaaguccugcaucaaccgcugcuucuacgucgagcucauccgcggccgcccccaggagacccgcgucugguggaccuccaacuccaucgucgucuucugcggcaccuccggcaccuacggcaccggcuccuggcccgacggcgccaacaucaacuucaugcccaucuga

SEQ ID NO: 122410 - RNA, 1380 nt, Artificial Sequence
  derived and/or modified CDS sequence (opt2) from neuraminidase__InfluenzaA__EPI736916
augaaccccaaccagaagaucaccugcaucuccgccaccggcgucacccucuccgucgucucccuccucaucggcaucgccaaccucggccucaacaucggccuccacuacaaggucuccgacuccaccaccaucuccauccccaacaugaacgagaccaaccccaccaccaccaacaucaccaacaucaucgucaacaagaacgaggagcgcaccuuccucaaccucaccaagccccucugcgaggucaacuccuggcacauccucuccaaggacaacgccauccgcaucggcgaggacgcccacauccucgucacccgcgagcccuaccucuccugcgacccccagggcugccgcauguucgcccucucccagggcaccacccuccgcggccgccacgccaacggcaccauccacgaccgcucccccuuccgcgcccucaucuccugggagaugggccaggcccccucccccuacaacacccgcgucgagugcaucggcugguccuccaccuccugccacgacggcaucucccgcauguccaucugcaucuccggccccaacaacaacgccuccgccgucgucugguaccgcggccgccccgucaccgagauccccuccugggccggcaacauccuccgcacccaggaguccgagugcgucugccacaagggcaucugccccgucgucaugaccgacggccccgccaacaacaaggccgccaccaagaucaucuacuucaaggagggcaagguccagaagaucgaggagcuccagggcaacgcccagcacaucgaggagugcuccugcuacggcgccgccggcaugaucaagugcgucugccgcgacaacuggaagggcgccaaccgccccaucaucaccaucgaccccgagaugaugacccacaccuccaaguaccucugcuccaagauccucaccgacaccucccgccccaacgaccccaccaacggcaacugcgacgcccccaucaccggcggcucccccgaccccggcgucaagggcuucgccuuccucgacggcgagaacuccuggcucggccgcaccaucuccaaggacucccgcuccggcuacgagaugcucaagguccccaacgccgagaccgacacccaguccggccccaccuccuaccagcucaucgucaacaaccagaacugguccggcuacuccggcgccuucaucgacuacugggccaacaaggagugcuucaaccccugcuucuacgucgagcucauccgcggccgccccaaggaguccgacguccucuggaccuccaacuccauggucgcccucugcggcucccgcgagcgccucggcuccugguccuggcacgacggcgccgagaucaucuacuucaaguga

SEQ ID NO: 122411 - RNA, 1380 nt, Artificial Sequence; identical to SEQ ID NO: 122030
  derived and/or modified CDS sequence (opt2) from neuraminidase__InfluenzaA__EPI593891

SEQ ID NO: 122412 - RNA, 1380 nt, Artificial Sequence
  derived and/or modified CDS sequence (opt2) from neuraminidase__InfluenzaA__EPI691380
augaaccccaaccagaagaucgucugcaucuccgucaccggcgucacccucuccgucgucucccuccucaucggcaucaccaaccucggccucaacaucggccuccacuacaaggucuccgacuccaccaccaucaacauccccaacaugaacgagaccaaccccaccaccaccaacaucaccaacaucaucaugaacaagaacgaggagcgcaccuuccucaagcucaccaagccccucugcgaggucaacuccuggcacauccucuccaaggacaacgccauccgcaucggcgaggacgcccacauccucgucacccgcgagcccuaccucuccugcgacccccagggcugccgcauguucgcccucucccagggcaccacccuccgcggccagcacgccaacggcaccauccacgaccgcucccccuuccgcgcccucaucuccugggagaugggccaggcccccucccccuacaacacccgcgucgagugcaucggcugguccuccaccuccugccacgacggcaucucccgcauguccaucugcaucuccggccccaacaacaacgccuccgccgucgucugguaccgcggccgccccgucaccgagauccccuccugggccggcaacauccuccgcacccaggaguccgagugcgucugccacaagggcaucugccccgucgucaugaccgacggccccgccaacaacaaggccgccaccaagaucaucuacuucaaggagggcaagauccagaagaccgaggagcuccagggcaacgcccagcacaucgaggagugcuccugcuacggcgccgccggcaugaucaagugcgucugccgcgacaacuggaagggcgccaaccgccccaucaucaccaucgaccccgagaugaugacccacaccuccaaguaccucugcuccaagauccucaccgacaccucccgccccaacgaccccaccaacggcaacugcgacgcccccaucaccggcggcucccccgaccccggcgucaagggcuucgccuuccucgacggcgagaacuccuggcucggccgcaccaucuccaaggacucccgcuccggcuacgagaugcucaagguccccaacgccgagaucgacauccaguccggccccaucuccuaccagcucgucgucaacaaccagaacugguccggcuacuccggcgccuucaucgacuacugggccaacaaggagugcuucaaccccugcuucuacgucgagcucauccgcggccgccccaaggaguccggcguccucuggaccuccaacuccauggucgcccucugcggcucccgcgagcgccucggcuccugguccuggcacgacggcgccgagaucaucuacuucaaguga

SEQ ID NO: 122413 - RNA, 1413 nt, Artificial Sequence
  derived and/or modified CDS sequence (opt2) from neuraminidase__InfluenzaA__EPI533584
augaaccccaaccagaagaucaccugcaucuccgccaccggcaugacccucuccgucgucuccaugcucaucggcaucgccaaccucggccucaacaucggccuccacuacaaggucuccgacuccaccaacaucaacauccccaacaugaacgagaccucccccaccaccaccaucaucaacaaccacccccagaacaacuucaccaacaucaccaacaucaucgucaccaagaacgaggagggccaccuccucaaccucaccaagccccucugcgaggucaacuccuggcacauccucuccaaggacaacgccauccgcaucggcgaggacgcccacaucaucgucacccgcgagcccuaccucuccugcgacccccagggcugccgcauguucgcccucucccagggcaccacccuccgcggcaagcacgccaacggcaccauccacgaccgcucccccuuccgcgcccucgucuccugggagaugggccaggcccccucccccuacaacacccgcgucgagugcaucggcugguccuccaccuccugccacgacggcaucucccgcauguccaucugcaucuccggccccaacaacaacgccuccgccgucgucugguacggcggccgccccgucaccgagauccccuccugggccggcaacauccuccgcacccaggaguccgagugcgucugccacggcggcaucugccccgucgucaugaccgacggccccgccaacaaccgcgccgagaccaagaucaucuacuucaaggagggcaagaucaagaagaucgaggagcucaagggcgacgcccagcacaucgaggagugcuccugcuacggcgccuccgagaugaucaagugcaucugccgcgacaacuggaagggcgccaaccgccccgucaucaccaucgaccccgagaugaugacccacaccuccaaguaccucugcuccaagauccucaccgacaccucccgccccaacgaccccaccaacggcaagugcgaggcccccaucaccggcggcucccccgaccccggcgucaagggcuucgccuuccucgacggcgagaacuccuggcucggccgcaccaucuccaaggacucccgcuccggcuacgagaugcucaagguccccaacgccgagaccgacacccaguccggcgccaucucccaccagaucaucgucaacaaccagaacugguccggcuacuccggcgccuucaucgacuacugggccaacaaggagugcuucaaccccugcuucuacgucgagcucauccgcggccgccccaaggaguccuccguccucuggaccuccaacuccaucgucgcccucugcggcuccaaggagcgccucggcuccugguccuggcacgacggcgccgagaucaucuacuucaaguga

SEQ ID NO: 122414 - RNA, 1380 nt, Artificial Sequence; identical to SEQ ID NO: 122034
  derived and/or modified CDS sequence (opt2) from neuraminidase__InfluenzaA__EPI641400

SEQ ID NO: 122415 - RNA, 1380 nt, Artificial Sequence; identical to SEQ ID NO: 122034
  derived and/or modified CDS sequence (opt2) from neuraminidase__InfluenzaA__EPI587620

SEQ ID NO: 122416 - RNA, 1410 nt, Artificial Sequence
  derived and/or modified CDS sequence (opt2) from neuraminidase__InfluenzaA__EPI569392
augaaccccaaccagaagaucgucaccaucggcucccucucccucggccucgucgucuucaacguccuccuccacgccgucuccaucauccucaccguccucgcccucggcaaguccgagaacaacggcaucugcaacggcaccgucguccgcgaguacaacgagaccguccgcaucgagaaggucacccagugguacaacaccuccgucgucgaguacgucccccacuggaacgagggcaccuacaucaacaacaccgagcccaucugcgacgucaagggcuucgcccccuucuccaaggacaacggcauccgcgucggcucccgcggccacaucuucgucauccgcgagcccuucgucuccugcucccccgucggcugccgcaccuucuuccucacccagggcucccuccucaacgacaagcacuccaacggcaccgucaaggaccgcucccccuuccgcacccucauguccgucgaggucggccagucccccaacgucuaccaggcccgcuucgaggccgucgccugguccgccaccgccugccacgacggcaagaaguggauggccaucggcgucaccggccccgacuccaaggccgucgccgucguccacuacggcggcguccccaccgacgucgucaacuccugggccggcgacauccuccgcacccaggaguccuccugcaccugcauccagggcaacugcuacugggucaugaccgacggccccgccaaccgccaggcccaguaccgcaucuacaaggccaaccagggcaagaucaucggccgcaaggacgucuccuucuccggcggccacaucgaggagugcuccugcuaccccaacgacggcaaggucgagugcgucugccgcgacaacuggaccggcaccaaccgccccguccucaucaucucccccgaccucuccuaccgcgucggcuaccucugcgccggccuccccuccgacaccccccgcggcgaggacacccaguucgucggcuccugcaccucccccaugggcaaccagggcuacggcgucaagggcuucggcuuccgccagggcaccgacgucugggucggccgcaccaucucccgcaccucccgcuccggcuucgagaucauccgcaucaagaacggcuggacccagaccuccaaggagcagauccgccgccaggucgucgucgacaacuccaacugguccggcuacuccggcuccuucacccuccccgucgagcucuccggccgcgagugccucguccccugcuucugggucgagaugauccgcggccgccccgaggagcgcaccaucuggaccuccuccuccuccaucgucaugugcggcgucgacuacgagaucgccgacugguccuggcacgacggcgccauccuccccuucgacaucgacaaguga

SEQ ID NO: 122417 - RNA, 1368 nt, Artificial Sequence
  derived and/or modified CDS sequence (opt2) from neuraminidase__InfluenzaA__EPI459857
augaaccccaaccagaagaucaucaccaucggcuccaucugcauggucaucggcaccgucucccucaucguccaggucggcaacaucauccucaucugggucaaccacuccauccagaccugcaucaccuacgagaacaacaccugggucaaccagaccuacgucuccaacaccaacuuccucaccggccaggccgucgccuccgucacccucgccggcaacuccucccucugccccaucuccggcugggccaucuacuccaaggacaacggcauccgcaucggcuccaagggcgacgucuucgucauccgcgagcccuucaucuccugcucccaccucgagugccgcaccuucuuccucacccagggcgcccuccucaacgacaagcacuccaacggcaccaucaaggaccgcucccccuaccgcacccucauguccugccccgucggcgaggcccccucccccuacaacucccgcuucgaguccgucgccugguccgccuccgccugccacgacggcaucaacuggcucaccaucggcaucuccggccccgacaacgaggccgucgccguccucaaguacaacggcgucaucaccgacaccaucaaguccuggcgcaacaacauccuccgcacccaggaguccgagugcgccugcgucaacggcuccugcuucaccgucaugaccgacggccccuccaacggccaggccuccuacaagaucuucaagaucgagaagggcaaggucguccgcuccgucgagcucgacgcccccaacuaccacuacgaggagugcuccugcuaccccgacgccggcgagaucaccugcgucugccgcgacaacuggcacggcuccaaccgccccugggucuccuucaaccagaaccucgaguaccagaccggcuacaucugcuccggcgucuucggcgacuccccccgccccaacgacggcaccggcuccugcggccccgucuccuccaacggcgccuucggcgucaagggcuucuccuucaaguacggcaacggcgucuggaucggccgcaccaagaccaccaacucccgcuccggcuucgagaugaucugggaccccaacggcuggaccgagaccgacuccuccuucuccaugaagcaggacaucaucgccaucaccgacugguccggcuacuccggcuccuucguccagcaccccgagcucaccggccucaacugcaugcgccccugcuucugggucgagcucauccgcggccagccccgcgagaacaccaucuggaccuccggcuccuccaucuccuucugcggcgucaacuccgagaccgucggcugguccuggcccgacggcgccgagcuccccuucaccaucgacaaguga

SEQ ID NO: 122418 - RNA, 1416 nt, Artificial Sequence
  derived and/or modified CDS sequence (opt2) from neuraminidase__InfluenzaA__EPI242204
augaaccccaaccagaagcucuucgcccucuccggcgucgccaucgcccucuccguccucaaccuccucaucggcaucuccaacgucggccucaacgucucccuccaccucaagggcgagggcgucaagcaggagaacaaccucaccugcaccaccaucacccagaacaacaccaccgucgucgagaacaccuacgucaacaacaccaccaucaucaacaagggcaccaaccucaaggcccccaacuaccuccuccucaacaagucccucugcuccgucgagggcugggucgucaucgccaaggacaacgccauccgcuucggcgaguccgagcagaucaucgucacccgcgagcccuacgucuccugcgaccccuccggcugcaagauguacgcccuccaccagggcaccaccauccgcaacaagcacuccaacggcaccauccacgaccgcaccaccuuccgcggccucaucuccaccccccucggcaccccccccaccgucuccaacuccgacuucaucugcgucggcugguccuccaccuccugccacgacggcgucggccgcaugaccaucugcauccagggcaacaacgacaacgccaccgccaccgucuacuacaaccgccgccucaccaccaccaucaagaccugggccaagaacauccuccgcacccaggaguccgagugcgucugccacaacggcaccugcgccgucgucaugaccgacggccccgccuccucccaggccuacaccaagaucauguacuuccacaagggccucaucaucaaggaggagccccuccgcggcuccgcccgccacaucgaggagugcuccugcuacggccacgaccagaaggucuccugcgucugccgcgacaacuggcagggcgccaaccgccccaucaucgagaucgacauguccacccucgagcacaccucccgcuacgucugcaccggcguccucaccgacaccucccgccccggcgacaagcccaacggcgacugcuccaaccccaucaccggcucccccggcgcccccggcgucaagggcuucggcuuccucaacggcgacaacaccuggcucggccgcaccaucuccccccgcucccgcuccggcuucgagaugcucaagauccccaacgccgagaccgaccccaacucccgcaucaucgagcgccaggagaucgucgacaacuccaacugguccggcuacuccggcuccuucaucgacuacugggacgaggccaacgagugcuacaaccccugcuucuacgucgagcucauccgcggccgccccgaggaggccaaguacgucugguggaccuccaacucccucaucgcccucugcggcucccccgucuccgucggcuccggcuccuuccccgacggcgcccagauccaguacuucuccuga

SEQ ID NO: 122419 - RNA, 1416 nt, Artificial Sequence
  derived and/or modified CDS sequence (opt2) from neuraminidase__InfluenzaA__EPI408029
augaaccccaaccagaagcucuucgcccucuccggcgucgccaucgcccucuccguccucaaccuccucaucggcaucuccaacgucggccucaacaugucccuccaccucaagggcgagggcgucaagcaggagaacaaccucaccugcaccaccaucacccagaacaacaccaccgucgucgagaacaccuacgucaacaacaccaccaucaucaacaagggcaccaaccucaaggcccccaacuaccuccuccucaacaagucccucugcuccgucgagggcugggucgucaucgccaaggacaacgccauccgcuucggcgaguccgagcagaucaucgucacccgcgagcccuacgucuccugcgaccccuccggcugcaagauguacgcccuccaccagggcaccaccauccgcaacaagcacuccaacggcaccauccacgaccgcaccaccuuccgcggccuccucuccaccccccucggcaccccccccaccgucuccaacuccgacuucaucugcgucggcugguccuccaccuccugccacgacggcgucggccgcaugaccaucugcauccagggcaacaacgacaacgccaccgccaccgucuacuacaaccgccgccucaccaccaccaucaagaccugggccaagaacauccuccgcacccaggaguccgagugcgucugccacaacggcaccugcgccgucgucaugaccgacggccccgccuccucccaggccuacaccaagaucauguacuuccacaagggccucaucaucaaggaggagccccuccgcggcuccgcccgccacaucgaggagugcuccugcuacggccacgaccagaaggucuccugcgucugccgcgacaacuggcagggcgccaaccgccccaucaucgagaucgacauguccacccucgagcacaccucccgcuacgucugcaccggcguccucaccgacaccucccgccccggcgacaagcccaacggcgacugcuccaaccccaucaccggcucccccggcgcccccggcgucaagggcuucggcuuccucaacggcgacaacaccuggcucggccgcaccaucuccccccgcucccgcuccggcuucgagaugcucaagauccccaacgccgagaccgaccccaacucccgcaucaucgagcgccaggagaucgucgacaacuccaaccgcuccggcuacuccggcuccuucaucgacuacugggacgaggccaacgagugcuacaaccccugcuucuacgucgagcucauccgcggccgccccgaggaggccaaguacgucugguggaccuccaacucccucaucgcccucugcggcucccccgucuccgucggcuccggcuccuuccccgacggcgcccagauccaguacuucuccuga

SEQ ID NO: 122420 - RNA, 1398 nt, Artificial Sequence; identical to SEQ ID NO: 119490
  derived and/or modified CDS sequence (opt2) from neuraminidase__InfluenzaA__EPI439509

SEQ ID NO: 122421 - RNA, 1350 nt, Artificial Sequence; identical to SEQ ID NO: 122023
  derived and/or modified CDS sequence (opt2) from neuraminidase__InfluenzaA__EPI164223

SEQ ID NO: 122422 - RNA, 1398 nt, Artificial Sequence; identical to SEQ ID NO: 119490
  derived and/or modified CDS sequence (opt2) from neuraminidase__InfluenzaA__EPI486493

SEQ ID NO: 122423 - RNA, 1398 nt, Artificial Sequence
  derived and/or modified CDS sequence (opt2) from neuraminidase__InfluenzaA__EPI740737
augaaccccaaccagaagauccucugcaccuccgccaccgccaucaccaucuccgccaucgccguccucaucggcaucgccaaccucggccucaacaucggccuccaccucaagcccggcugcaacugcucccacucccagcccgagaccaccaacaccucccagaccaucaucaacaacuacuacaacgagaccaacaucaccaacauccagaucgaggagcgcaccucccgcaacuucaacaaccucaccaagggccucugcaccaucaacuccuggcacaucuacggcaaggacaacgccguccgcaucggcgaguccuccgacguccucgucacccgcgagcccuacgucuccugcgaccccgacgagugccgcuucuacgcccucucccagggcaccaccauccgcggcaagcacuccaacggcaccauccacgaccgcucccaguaccgcgcccucaucuccuggccccucuccuccccccccaccguccacaacucccgcgucgagugcaucggcugguccuccaccuccugccacgacggcaagucccgcauguccaucugcaucuccggccccaacaacaacgccuccgccgucgucugguacaaccgccgccccgucgccgagaucaacaccugggcccgcaacauccuccgcacccaggaguccgagugcgucugccacaacggcgucugccccgucgucuucaccgacggccccgccaccggccccgccgacacccgcaucuacuacuucaaggagggcaagauccucaagugggagucccucaccggcaccgccaagcacaucgaggagugcuccugcuacggcgagcgcaccggcaucaccugcaccugccgcgacaacuggcagggcuccaaccgccccgucguccagaucgaccccgucgccaugacccacaccucccaguacaucugcucccccguccucaccgacuccccccgccccaacgaccccaacaucggcaagugcaacgaccccuaccccggcaacaacaacaacggcgucaagggcuucuccuaccucgacggcgccaacaccuggcucggccgcaccaucuccaccgccucccgcuccggcuacgagaugcucaagguccccaacgcccucaccgacgaccgcuccaagcccauccagggccagaccaucguccucaacgccgacugguccggcuacuccggcuccuucauggacuacugggccgagggcgacugcuaccgcgccugcuucuacgucgagcucauccgcggccgccccaaggaggacaaggucugguggaccuccaacuccaucgucuccaugugcuccuccaccgaguuccucggccaguggaacuggcccgacggcgccaagaucgaguacuuccucuga

SEQ ID NO: 122424 - RNA, 1398 nt, Artificial Sequence
  derived and/or modified CDS sequence (opt2) from neuraminidase__InfluenzaA__EPI730494
augaaccccaaccagaagauccucugcaccuccgccaccgccaucaccaucggcgccaucgccguccucaucggcaucgccaaccucggccucaacaucggccuccaccucaagcccggcugcaacugcucccacucccagcccgagaucaccaacaccucccagaccaucaucaacaacuacuacuccgagaccaacaucaccaacauccagauggaggagcgcaccuccaagaacuucaacaaccucaccaagggccucugcaccaucaacuccuggcacaucuacggcaaggacaacgccguccgcaucggcgaguccuccgacguccucgucacccgcgagcccuacgucuccugcgaccccgacgagugccgcuucuacgcccucucccagggcaccaccauccgcggcaagcacuccaacggcaccauccacgaccgcucccaguaccgcgcccucaucuccuggccccucuccuccccccccaccgucuacaacucccgcgucgagugcaucggcugguccuccaccuccugccacgacggcaagucccgcauguccaucugcaucuccggccccaacaacaacgccuccgccgucgucugguacaaccgccgccccgucgccgagaucaacaccugggcccgcaacauccuccgcacccaggaguccgagugcgucugccacaacggcgucugccccgucgucuucaccgacggcuccgccaccggccccgccgacacccgcaucuacuacuucaaggagggcaagauccucaagugggagucccucaccggcaccgccaagcacaucgaggagugcuccugcuacggcgagcgcaccggcaucaccugcaccugccgcgacaacuggcagggcuccaaccgccccgucauccagaucgaccccgucgccaugacccacaccucccaguacaucugcucccccguccucaccgacaacccccgccccaacgaccccaacaucggcaagugcaacgaccccuaccccggcaacaacaacaacggcaucaagggcuucuccuaccucgacggcgccaacaccuggcucggccgcaccaucuccaccgccucccgcuccggcuacgagaugcucaagguccccaacgcccucaccgacgaccgcuccaagcccauccagggccagaccaucguccucaacgccgacugguccggcuacuccggcuccuucauggacuacugggccgagggcgacugcuaccgcgccugcuucuacgucgagcucauccgcggccgccccaaggaggacaaggucugguggaccuccaacuccaucgucuccaugugcuccuccaccgaguuccucggccaguggaacuggcccgacggcgccaagaucgaguacuuccucuga

SEQ ID NO: 122425 - RNA, 1398 nt, Artificial Sequence
  derived and/or modified CDS sequence (opt2) from neuraminidase__InfluenzaA__EPI712925
augaaccccaaccagaagauccucugcaccuccgccaccgccaucaccaucggcgccaucgccguccucaucggcaucgccaaccucggccucaacaucggccuccaccucaagcccggcugcaacugcucccacucccagcccgagaccaccaacaccucccagaccaucaucaacaacuacuacaacgagaccaacaucaccaacauccagaucgaggagcgcaccucccgcaacuucaacaaccucaccaagggccucugcaccaucaacuccuggcacaucuacggcaaggacaacgccguccgcaucggcgaguccuccgacguccucgucacccgcgagcccuacgucuccugcgaccccgacgagugccgcuucuacgcccucucccagggcaccaccauccgcggcaagcacuccaacggcaccauccacgaccgcucccaguaccgcgcccucaucuccuggccccucuccuccccccccaccguccacaacucccgcgucgagugcaucggcugguccuccaccuccugccacgacggcaagucccgcauguccaucugcaucuccggccccaacaacaacgccuccgccgucgucugguacaaccgccgccccgucgccgagaucaacaccugggcccgcaacauccuccgcacccaggaguccgagugcgucugccacaacggcgucugccccgucgucuucaccgacggccccgccaccggccccgccgacacccgcaucuacuacuucaaggagggcaagauccucaagugggagucccucaccggcaccgccaagcacaucgaggagugcuccugcuacggcgagcgcaccggcaucaccugcaccugccgcgacaacuggcagggcuccaaccgccccgucguccagaucgaccccgucgccaugacccacaccucccaguacaucugcucccccguccucaccgacuccccccgccccaacgaccccaacaucggcaagugcaacgaccccuaccccggcaacaacaacaacggcgucaagggcuucuccuaccucgacggcgccaacaccuggcucggccgcaccaucuccaccgccucccgcuccggcuacgagaugcucaagguccccaacgcccucaccgacgaccgcuccaagcccauccagggccagaccaucguccucaacgccgacugguccggcuacuccggcuccuucauggacuacugggccgagggcgacugcuaccgcgccugcuucuacgucgagcucauccgcggccgccccaaggaggacaaggucugguggaccuccaacuccaucgucuccaugugcuccuccaccgaguuccucggccaguggaacuggcccgacggcgccaagaucgaguacuuccucuga

SEQ ID NO: 122426 - RNA, 1398 nt, Artificial Sequence
  derived and/or modified CDS sequence (opt2) from neuraminidase__InfluenzaA__EPI448938
augaaccccaaccagaagauccucugcaccuccgccaccgccaucaucaucggcgccaucgccguccucaucggcauggccaaccucggccucaacaucggccuccaccucaagcccggcugcaacugcucccacucccagcccgagaccaccaacaccucccagaccaucaucaacaacuacuacaacgagaccaacaucaccaacauccagauggaggagcgcaccucccgcaacuucaacaaccucaccaagggccucugcaccaucaacuccuggcacaucuacggcaaggacaacgccguccgcaucggcgaguccuccgacguccucgucacccgcgagcccuacgucuccugcgaccccgacgagugccgcuucuacgcccucucccagggcaccaccauccgcggcaagcacuccaacggcaccauccacgaccgcucccaguaccgcgcccucaucuccuggccccucuccuccccccccaccgucuacaacucccgcgucgagugcaucggcugguccuccaccuccugccacgacggcaagucccgcauguccaucugcaucuccggccccaacaacaacgccuccgccgucgucugguacaaccgccgccccgucgccgagaucaacaccugggcccgcaacauccuccgcacccaggaguccgagugcgucugccacaacggcgucugccccgucgucuucaccgacggcuccgccaccggccccgccgacacccgcaucuacuacuucaaggagggcaagauccucaagugggagucccucaccggcaccgccaagcacaucgaggagugcuccugcuacggcgagcgcaccggcaucaccugcaccugccgcgacaacuggcagggcuccaaccgccccgucauccagaucgaccccgucgccaugacccacaccucccaguacaucugcucccccguccucaccgacaacccccgccccaacgaccccaacaucggcaagugcaacgaccccuaccccggcaacaacaacaacggcgucaagggcuucuccuaccucgacggcgccaacaccuggcucggccgcaccaucuccaccgccucccgcuccggcuacgagaugcucaagguccccaacgcccucaccgacgaccgcuccaagcccauccagggccagaccaucguccucaacgccgacugguccggcuacuccggcuccuucauggacuacugggccgagggcgacugcuaccgcgccugcuucuacgucgagcucauccgcggccgccccaaggaggacaaggucugguggaccuccaacuccaucgucuccaugugcuccuccaccgaguuccucggccaguggaacuggcccgacggcgccaagaucgaguacuuccucuga

SEQ ID NO: 122427 - RNA, 1410 nt, Artificial Sequence
  derived and/or modified CDS sequence (opt2) from neuraminidase__InfluenzaA__EPI445995
augaaccccaaccagaagaucaucgcccucggcuccgccucccucaccaucgccaucaucugccuccucauccagaucgccauccucgccaccaccaugacccuccacuucaugcagaacgagcacaccaacuccacccgcaacaaggucguccccugcgaguccaucaucaucgagcgcaacaucaccgagaucguccaccucaacggcaccaucaucgagaaggaguccugccccaaggccgucgaguacaagaacugguccaagccccagugccagaucaccggcuucgcccccuucuccaaggacaacuccauccgccucuccgccggcggcgacaucugggucacccgcgagcccuacgucuccugcucccucuccaagugcuaccaguucgcccucggccagggcaccacccucaacaaccgccacuccaacggcaccacccacgaccgcucccccuaccgcacccuccucauguccgagcucggcguccccuuccaccucggcaccaagcaggucugcaucgccugguccuccuccuccugccacgacggccgcgccuggcuccacgucugcgucaccggcgacgacaagaacgccaccgccuccgucaucuacggcggcaugcucaccgacuccaucggcuccugguccaagaacauccuccgcacccaggaguccgagugcgucugcaucaacggcaccugcaccgucgucaugaccgacggcuccgccuccggccgcgccgacacccgcauccucuucauccgcgagggcaagaucguccacaucuccccccucuccggcuccgcccagcacgucgaggagugcuccugcuacccccgcuaccccgagguccgcugcgucugccgcgacaacuggaagggcuccaaccgccccguccucuacaucaacgucgccgacuacuccaucgacuccuccuacgucugcuccggccucgucggcgacaccccccgcaacgaggacuccuccuccuccuccaacugccgcgaccccaacaacgagcgcggcggccccggcgucaagggcugggccuucgacaacggcgacgacgucuggaugggccgcaccaucaagaaggacucccgcgccggcuacgagaccuuccgcgucgucgacggcuggacccucgccaacuccaagucccagaccaaccgccaggucaucgucgacuccgacaacugguccggcuacuccggcauguucuccgucgagggcaagaccugcaucaaccgcugcuucuacgucgagcucauccgcggccgcccccaggagacccgcgucugguggaccuccaacuccaucaucgucuucugcggcaccuccggcaccuacggcaccggcuccuggcccgacggcgccgacaucaacuucauguccaucuga

SEQ ID NO: 122428 - RNA, 1410 nt, Artificial Sequence
  derived and/or modified CDS sequence (opt2) from neuraminidase__InfluenzaA__EPI470861
augaaccccaaccagaagaucaucgccaucggcuccgucucccucaccaucgccaccaucugccuccucaugcagaucgccauccucgccaccaccaugacccuccacuucaagcagaacgagugcaucaacuccuccaacaaccaggucguccccugcgagcccaucaucaucgagcgcaacaucaccgagaucguccaccucaacuccaccacccucgagaaggagaucugccccaaggucgccgacuaccgcaacugguccaagccccagugccagaucaccggcuucgcccccuucuccaaggacaacuccauccgccucuccgccggcggcgacaucugggucacccgcgagcccuacgucuccugcggccucggcaagugcuaccaguucgcccucggccagggcaccacccucgagaacaagcacuccaacggcaccgcccacgaccgcaccccccaccgcacccuccucaugaacgagcucggcguccccuuccaccucgccaccaagcaggucugcaucgccugguccuccuccuccugccacgacggcaaggccuggcuccacgucugcgucaccggcgacgaccgcaacgccaccgccuccaucaucuacgacggcauccucgucgacuccaucggcuccugguccaagaacauccuccgcacccaggaguccgagugcgucugcaucaacggcaccugcgccgucgucaugaccgacggcuccgccuccggccgcgccgacacccgcauccucuucauccgcgagggcaagaucgcccacaucuccccccucuccggcuccgcccagcacgucgaggagugcuccugcuacccccgcuaccccgagguccgcugcgucugccgcgacaacuggaagggcuccaaccgccccguccucuacaucaacauggccaacuacuccaucgacuccuccuacgucugcuccggccucgucggcgacaccccccgcaacgacgaccgcuccuccuccuccaacugccgcgaccccaacaacgagcgcggcgcccccggcgucaagggcugggccuucgacaacggcaacgacaucuggaugggccgcaccaucaagaaggacucccgcuccggcuacgagaccuuccgcgucaucggcggcuggaccaccgccaacuccaagucccagaucaaccgccaggucaucgucgacuccgacaacuccuccggcuacuccggcaucuucuccgucgagggcaaguccugcaucaaccgcugcuucuacgucgagcucauccgcggccgccccaaggagacccgcgucugguggaccuccaacuccaucaucgucuucugcggcaccuccggcaccuacggcaccggcuccuggcccgacggcgccaacaucaacuucaugcccaucuga

SEQ ID NO: 122429 - RNA, 1401 nt, Artificial Sequence
  derived and/or modified CDS sequence (opt2) from neuraminidase__InfluenzaA__EPI498036
augaaccccaaccagaagaucaucgccaucggcuccgucucccucaucaucgccaucaucugccuccucaugcagaucgccauccucaccaccaccaugacccuccacuuccgccagaacgagugcuccaaccccuccaacaaccaggucaugcccugcgagcccaucauccucgagcgcaacaccguccaccucaacuccaccaucaucgagcgcgagaucugccccaaggucgccgacuacaagaacugguccaagccccagugccagaucaccggcuucgcccccuucuccaaggacaacuccauccgccucuccgccggcggcgacaucugggucacccgcgagcccuacgucuccugcucccucgacaagugcuaccaguucgcccucggccagggcaccacccucaagaacaagcacuccaacggcaccacccacgaccgcaccccccaccgcacccuccucaugaacgagcucggcguccccuuccaccucggcaccaagcaggucugcaucgccugguccuccuccuccugcuacgacggcaaggccuggcuccacaucugcgucaccggcgacgacaagaacgccaccgccuccaucaucuacgacggcaugcucgucgacuccaucggcuccugguccaagaacauccuccgcacccaggaguccgagugcgucugcaucaacggcaccugcgccgucgucaugaccgacggcuccgccuccggcaaggccgacacccgcguccucuucauccgcgagggcaagaucaucaacaucuccccccucuccggcuccgcccagcacgucgaggagugcuccugcuacccccgcuaccccgagguccgcugcgucugccgcgacaacuggaagggcuccaaccgccccauccucuacaucaacauggccgacuacuccaucgaguccuccuacgucugcuccggccucgucggcgacaccccccgcaacgacgacuccuccuccuccuccaacugccgcgaccccaacaacgagcgcggcgcccccggcgucaagggcugggccuucgacgacggcaacgacgucuggaugggccgcaccaucaagaacggcucccgcuccggcuacgagaccuuccgcgucgucaacggcuggaccauggccaacuccaagucccagaucaaccgccaggucaucgucgacuccgacgacugguccggcuacuccggcaucuucuccgucgagggcaagaagugcaucaaccgcugcuucuacgucgagcucauccgcggccgcccccaggagccccgcgucugguggaccuccaacuccaucaucgucuucugcggcaccuccggcaccuacggcaccggcuccuggcccgacggcgccaacaucaacuucaugcccgucuga

SEQ ID NO: 122430 - RNA, 1410 nt, Artificial Sequence
  derived and/or modified CDS sequence (opt2) from neuraminidase__InfluenzaA__EPI470902
augaaccccaaccagaagaucgucgccaucggcuccgccucccucaccaucgccaccaugugccuccucaugcagaucgcccucuucgccaccaccaugacccuccacuucaagcagaccggcugcaccaacuccuccgacaaccaggccguccccugcggccccaucaucaucgagcgcaacaucaccgagaucguccaccucaacuccaccacccucgagaaggagaccugccccaaguccgccggcuaccgcaacugguccaagccccagugccagaucaccggcuucgcccccuucuccaaggacaacuccauccgccucgccgccgccggcgacaucugggucacccgcgagcccuacgucuccugcggccucggcaagugcuaccaguucgcccucggccagggcaccacccucgacaacaagcacuccaacggcaccacccacgaccgcaccccccaccgcacccuccucaugaacgagcucggcguccccuuccaccucgccaccaagcaggucugcaucgccugguccuccuccuccugccacgacggcaaggccuggcuccacgucugcgucaccggcgacgacaagaacgccaccgccuccaucaucuacgacggcauccucgucgacuccaucgccuccugguccaagaacauccuccgcacccaggaguccgagugcgucugcaucaacggcaccugcaccgucgucaugaccgacggcuccgccuccggccgcgccgacacccgcauccucuucauccgcgagggcaagaucguccacaucuccccccucuccggcuccgcccagcacgucgaggagugcuccugcuacccccgcuaccccgagguccgcugcgucugccgcgacaacuggaagggcuccaaccgccccguccucuucaucaacauggccgacuacuccaucgacuccuccuacgucugcuccggccucgucggcgacaccccccgcaacgacgaccgcuccuccuccuccaacugccgcgaccccaacaacgagcgcggcgcccccggcgucaagggcugggccuucgacuccggcaacgacaucuggaugggccgcaccaucgagaaggacucccgcuccggcuacgagaccuuccgcgucaucggcggcugguccaccgccaacuccaagucccagaucaaccgccaggucaucgucgaccgcgacaacuccuccggcuacuccggcaucuucuccgucgagggcaaguccugcaucaaccgcugcuucuacgucgagcucauccgcggccgccccaaggagaaccgcgucugguggaccuccaacuccaucaucgucuucugcggcaccuccggcaccuacggcaccggcuccuggcccgacggcgccaacaucaaccucaugcccaucuga

SEQ ID NO: 122431 - RNA, 1401 nt, Artificial Sequence
  derived and/or modified CDS sequence (opt2) from neuraminidase__InfluenzaA__EPI838241
augaaccccaaccagaagaucaccgccaucggcuccgucucccucaucaucgccaucaucugccuccucaugcagaucgccauccucaccaccaccaugacccuccacuuccgccagaacgagugcuccaacuccuccaacaaccaggucaugcccugcgagcccaucaucaucgagcgcaacaccguccaccucaacuccaccaccaucgagcgcgagaucugccccaaggucgccgaguacaagaacugguccaagccccagugccagaucaccggcuucgcccccuucuccaaggacaacuccauccgccucuccgccuccggcgacaucugggucacccgcgagcccuacgucuccugcucccucgacaagugcuaccaguucgcccucggccagggcaccacccucaagaacaagcacuccaacggcaccgcccacgaccgcaccccccaccgcacccuccucaugaacgagcucggcguccccuuccaccucggcaccaagcaggucugcaucgccugguccuccuccuccugcuacgacggcaaggccuggcuccacgucugcgucaccggcgacgacaagaacgccaccgccuccaucaucuacgacggcaugcucgucgacuccaucggcuccugguccaagaacauccuccgcacccaggaguccgagugcgucugcaucaacggcaccugcgccgucgucaugaccgacggcuccgccuccggcaaggccgacacccgcguccucuucauccgcgagggcaagaucaucaacaucuccccccucuccggcuccgcccagcacgucgaggagugcuccugcuacccccgcuaccccgagguccgcugcgucugccgcgacaacuggaagggcuccaaccgccccauccucuacaucaacauggccgacuacuccaucgaguccuccuacgucugcuccggccucgucggcgacaccccccgcaacgacgacuccuccuccuccuccaacugccgcgaccccaacaacgagcgcggcgcccccggcgucaagggcugggccuucgacgacggcaacgacgucuggaugggccgcaccaucaagaacggcucccgcuccggcuacgagaccuuccgcgucgucaacggcuggaccauggccaacuccaagucccagaucaaccgccaggucaucgucgaguccgacgacugguccggcuacuccggcaucuucuccgucgagggcaagaagugcaucaaccgcugcuucuacgucgagcucauccgcggccgcccccaggagccccgcgucugguggaccuccaacuccaucaucgucuucugcggcaccuccggcaccuacggcaccggcuccuggcccgacggcgccaacaucaacuucaugcccaucuga

SEQ ID NO: 122432 - RNA, 1401 nt, Artificial Sequence; identical to SEQ ID NO: 122431
  derived and/or modified CDS sequence (opt2) from neuraminidase__InfluenzaA__EPI680525

SEQ ID NO: 122433 - RNA, 1401 nt, Artificial Sequence; identical to SEQ ID NO: 122039
  derived and/or modified CDS sequence (opt2) from neuraminidase__InfluenzaA__EPI690481

SEQ ID NO: 122434 - RNA, 1755 nt, Artificial Sequence
  derived and/or modified CDS sequence (opt2) from hemagglutinin__InfluenzaB__ABL76276
augaaggccaucaucguccuccucauggucgucaccuccaacgccgaccgcaucugcaccggcaucaccuccuccaacuccccccacgucgucaagaccgccacccagggcgaggucaacgucaccggcgucaucccccucaccaccacccccaccaagucccacuucgccaaccucaagggcaccaagacccgcggcaagcucugccccaccugccucaacugcaccgaccucgacgucgcccucggccgccccaugugcgucggcaucacccccuccgccaaggccuccauccuccacgagguccgccccgucaccuccggcugcuuccccaucaugcacgaccgcaccaagauccgccagcuccccaaccuccuccgcggcuacgagaagauccgccucuccacccagaacgucaucaacgccgagaaggcccccggcggccccuaccgccucggcaccuccggcuccugccccaacgccaccucccgcuccggcuucuucgccaccauggccugggccgucccccgcgacaacaacaagaccgccaccaacccccucaccgucgaggucccccacaucugcaccaaggaggaggaccagaucaccgucuggggcuuccacuccgacaacaagacccagaugaagaaccucuacggcgacuccaacccccagaaguucaccuccuccgccaacggcgucaccacccacuacgucucccagaucggcggcuuccccgaccagaccgaggacggcggccucccccaguccggccgcaucgucgucgacuacaugguccagaagcccggcaagaccggcaccaucgucuaccagcgcggcauccuccucccccagaaggucuggugcgccuccggccgcuccaaggucaucaagggcucccucccccucaucggcgaggccgacugccuccacgagaaguacggcggccucaacaaguccaagcccuacuacaccggcgagcacgccaaggccaucggcaacugccccaucugggucaagaccccccucaagcucgccaacggcaccaaguaccgcccccccgccaagcuccucaaggagcgcggcuucuucggcgccaucgccggcuuccucgagggcggcugggagggcaugaucgccggcuggcacggcuacaccucccacggcgcccacggcgucgccgucgccgccgaccucaaguccacccaggaggccaucaacaagaucaccaagaaccucaacucccucuccgagcucgaggucaagaaccuccagcgccucuccggcgccauggacgagcuccacaacgagauccucgagcucgacgagaaggucgacgaccuccgcgccgacaccaucuccucccagaucgagcucgccguccuccucuccaacgagggcaucaucaacuccgaggacgagcaccuccucgcccucgagcgcaagcucaagaagaugcucggccccuccgccgucgacaucggcaacggcugcuucgagaccaagcacaagugcaaccagaccugccucgaccgcaucgccgccggcaccuucaacgccggcgaguucucccuccccaccuucgacucccucaacaucaccgccgccucccucaacgacgacggccucgacaaccacaccauccuccucuacuacuccaccgccgccuccucccucgccgucacccucaugaucgccaucuucaucgucuacaugaucucccgcgacaacgucuccugcuccaucugccucuga

SEQ ID NO: 122435 - RNA, 1755 nt, Artificial Sequence
  derived and/or modified CDS sequence (opt2) from hemagglutinin__InfluenzaB__ABL76287
augaaggccaucaucguccuccucauggucgucaccuccaacgccgaccgcaucugcaccggcaucaccuccuccaacuccccccacgucgucaagaccgccacccagggcgaggucaacgucaccggcgucaucccccucaccaccacccccaccaagucccacuucgccaaccucaagggcaccaagacccgcggcaagcucugccccaccugccucaacugcaccgaccucgacgucgcccucggccgccccaugugcgucggcgucacccccuccgccaaggccuccauccuccacgagguccgccccgucaccuccggcugcuuccccaucaugcacgaccgcaccaagauccgccagcuccccaaccuccuccgcggcuacgagaagauccgccucuccacccagaacgucaucaacgccgagaaggcccccggcggccccuaccgccucggcaccuccggcuccugccccaacgccaccucccgcuccggcuucuucgccaccauggccugggccgucccccgcgacaacaacaagaccgccaccaacccccucaccaucgaggucccccacaucugcaccaaggaggaggaccagaucaccgucuggggcuuccacuccgacaacaagauccagaugaagaaccucuacggcgacuccaacccccagaaguucaccuccuccgccaacggcgucaccacccacuacgucucccagaucggcggcuuccccgaccagaccgaggacggcggccucccccaguccggccgcaucgucgucgacuacaugguccagaagcccggcaagaccggcaccaucgucuaccagcgcggcauccuccucccccagaaggucuggugcgccuccggccgcuccaaggucaucaagggcucccucccccucaucggcgaggccgacugccuccacgagaaguacggcggccucaacaaguccaagcccuacuacaccggcgagcacgccaaggccaucggcaacugccccaucugggucaagaccccccucaagcucgccaacggcaccaaguaccgcccccccgccaagcuccucaaggagcgcggcuucuucggcgccaucgccggcuuccucgagggcggcugggagggcaugaucgccggcuggcacggcuacaccucccacggcgcccacggcgucgccgucgccgccgaccucaaguccacccaggaggccaucaacaagaucaccaagaaccucaacucccucuccgagcucgaggucaagaaccuccagcgccucuccggcgccauggacgagcuccacaacgagauccucgagcucgacgagaaggucgacgaccuccgcgccgacaccaucuccucccagaucgagcucgccguccuccucuccaacgagggcaucaucaacuccgaggacgagcaccuccucgcccucgagcgcaagcucaagaagaugcucggccccuccgccgucgacaucggcaacggcugcuucgagaccaagcacaagugcaaccagaccugccucgaccgcaucgccgccggcaccuucaacgccggcgaguucucccuccccaccuucgacucccucaacaucaccgccgccucccucaacgacgacggccucgacaaccacaccauccuccucuacuacuccaccgccgccuccucccucgccgucacccucaugaucgccaucuucaucgucuacaugaucucccgcgacaacgucuccugcuccaucugccucuga

SEQ ID NO: 122436 - RNA, 1755 nt, Artificial Sequence
  derived and/or modified CDS sequence (opt2) from hemagglutinin__InfluenzaB__ABL76298
augaaggccaucaucguccuccucauggucgucaccuccaacgccgaccgcaucugcaccggcaucaccuccuccaacuccccccacgucgucaagaccgccacccagggcgaggucaacgucaccggcgucaucccccucaccaccacccccaccaagucccacuucgccaaccucaagggcaccaagacccgcggcaagcucugccccaccugccucaacugcaccgaccucgacgucgcccucggccgccccaugugcgucggcgucacccccuccgccaaggccuccauccuccacgagguccgccccgucaccuccggcugcuuccccaucaugcacgaccgcaccaagauccgccagcuccccaaccuccuccgcggcuacgagaagauccgccucuccacccagaacgucaucaacgccgagaaggcccccggcggccccuaccgccucggcaccuccggcuccugccccaacgccaccucccgcuccggcuucuucgccaccauggccugggccgucccccgcgacaacaacaagaccgccaccaacccccucaccgucgaggucccccacaucugcaccaaggaggaggaccagaucaccgucuggggcuuccacuccgacaacaagacccagaugaagaaccucuacggcgacuccaacccccagaaguucaccuccuccgccaacggcgucaccacccacuacgucucccagaucggcggcuuccccgaccagaccgaggacggcggccucccccaguccggccgcaucgucgucgacuacaugguccagaagcccggcaagaccggcaccaucgucuaccagcgcggcauccuccucccccagaaggucuggugcgccuccggccgcuccaaggucaucaagggcucccucccccucaucggcgaggccgacugccuccacgagaaguacggcggccucaacaaguccaagcccuacuacaccggcgagcacgccaaggccaucggcaacugccccaucugggucaagaccccccucaagcucgccaacggcaccaaguaccgcccccccgccaagcuccucaaggagcgcggcuucuucggcgccaucgccggcuuccucgagggcggcugggagggcaugaucgccggcuggcacggcuacaccucccacggcgcccacggcgucgccgucgccgccgaccucaaguccacccaggaggccaucaacaagaucaccaagaaccucaacucccucuccgagcucgaggucaagaaccuccagcgccucuccggcgccauggacgagcuccacaacgagauccucgagcucgacgagaaggucgacgaccuccgcgccgacaccaucuccucccagaucgagcucgccguccuccucuccaacgagggcaucaucaacuccgaggacgagcaccuccucgcccucgagcgcaagcucaagaagaugcucggccccuccgccgucgacaucggcaacggcugcuucgagaccaagcacaagugcaaccagaccugccucgaccgcaucgccgccggcaccuucaacgccggcgaguucucccuccccaccuucgacucccucaacaucaccgccgccucccucaacgacgacggccucgacaaccacaccauccuccucuacuacuccaccgccgccuccucccucgccgucacccucaugaucgccaucuucaucgucuacauggucucccgcgacaacgucuccugcuccaucugccucuga

SEQ ID NO: 122437 - RNA, 1755 nt, Artificial Sequence
  derived and/or modified CDS sequence (opt2) from hemagglutinin__InfluenzaB__ABL76309
augaaggccaucaucguccuccucauggucgucaccuccaacgccgaccgcaucugcaccggcaucaccuccuccaacuccccccacgucgucaagaccgccacccagggcgaggucaacgucaccggcgucaucccccucaccaccacccccaccaagucccacuucgccaaccucaagggcaccaagacccgcggcaagcucugccccaccugccucaacugcaccgaccucgacgucgcccucggccgccccaugugcgucggcgucacccccuccgccaaggccuccauccuccacgagguccgccccgucaccuccggcugcuuccccaucaugcacgaccgcaccaagauccgccagcuccccaaccuccuccgcggcuacgagaagauccgccucuccacccagaacgucaucaacgccgagaaggcccccggcggccccuaccgccucggcaccuccggcuccugccccaacgccaccucccgcuccggcuucuucgccaccauggccugggccgucccccgcgacaacaacaagaccgccaccaacccccucaccgucgaggucccccacaucugcaccaaggaggaggaccagaucaccgucuggggcuuccacuccgacaacaagacccagaugaagaaccucuacggcgacuccaacccccagaaguucaccuccuccgccaacggcgucaccacccacuacgucucccagaucggcggcuuccccgaccagaccgaggacggcggccucccccaguccggccgcaucgucgucgacuacaugguccagcgccccggcaagaccggcaccaucgucuaccagcgcggcauccuccucccccagaaggucuggugcgccuccggccgcuccaaggucaucaagggcucccucccccucaucggcgaggccgacugccuccacgagaaguacggcggccucaacaaguccaagcccuacuacaccggcgagcacgccaaggccaucggcaacugccccaucugggucaagaccccccucaagcucgccaacggcaccaaguaccgcccccccgccaagcuccucaaggagcgcggcuucuucggcgccaucgccggcuuccucgagggcggcugggagggcaugaucgccggcuggcacggcuacaccucccacggcgcccacggcgucgccgucgccgccgaccucaaguccacccaggaggccaucaacaagaucaccaagaaccucaacucccucuccgagcucgaggucaagaaccuccagcgccucuccggcgccauggacgagcuccacaacgagauccucgagcucgacgagaaggucgacgaccuccgcgccgacaccaucuccucccagaucgagcucgccguccuccucuccaacgagggcaucaucaacuccgaggacgagcaccuccucgcccucgagcgcaagcucaagaagaugcucggccccuccgccgucgacaucggcaacggcugcuucgagaccaagcacaagugcaaccagaccugccucgaccgcaucgccgccggcaccuucaacgccgaggaguucucccuccccaccuucgacucccucaacaucaccgccgccucccucaacgacgacggccucgacaaccacaccauccuccucuacuacuccaccgccgccuccucccucgccgucacccucaugaucgccaucuucaucgucuacaugaucucccgcgacaacgucuccugcuccaucugccucuga

SEQ ID NO: 122438 - RNA, 1755 nt, Artificial Sequence
  derived and/or modified CDS sequence (opt2) from hemagglutinin__InfluenzaB__ABL76331
augaaggccaucaucguccuccucauggucgucaccuccaacgccgaccgcaucugcaccggcaucaccuccuccaacuccccccacgucgucaagaccgccacccagggcgaggucaacgucaccggcgucaucccccucaccaccacccccaccaagucccacuucgccaaccucaagggcaccaagacccgcggcaagcucugccccaccugccucaacugcaccgaccucgacgucgcccucggccgccccaugugcgucggcaucacccccuccgccaaggccuccauccuccacgagguccgccccgucaccuccggcugcuuccccaucaugcacgaccgcaccaagauccgccagcuccccaaccuccuccgcggcuacgagaagauccgccucuccacccagaacgucaucaacgccgagaaggcccccggcggccccuaccgccucggcaccuccggcuccugccccaacgccaccucccgcuccggcuucuucgccaccauggccugggccgucccccgcgacaacaacaagaccgccaccaacccccucaccaucgaggucccccacaucugcaccaaggaggaggaccagaucaccgucuggggcuuccacuccgacaacaagacccagaugaagaaccucuacggcgacuccaacccccagaaguucaccuccuccgccaacggcgucaccacccacuacgucucccagaucggcggcuuccccgaccagaccgaggacggcggccucccccaguccggccgcaucgucgucgacuacaugguccagaagcccggcaagaccggcaccaucgucuaccagcgcggcauccuccucccccagaaggucuggugcgccuccggccgcuccaaggucaucaagggcucccucccccucaucggcgaggccgacugccuccacgagaaguacggcggccucaacaaguccaagcccuacuacaccggcgagcacgccaaggccaucggcaacugccccaucugggucaagaccccccucaagcucgccaacggcaccaaguaccgcccccccgccaagcuccucaaggagcgcggcuucuucggcgccaucgccggcuuccucgagggcggcugggagggcaugaucgccggcuggcacggcuacaccucccacggcgcccacggcgucgccgucgccgccgaccucaaguccacccaggaggccaucaacaagaucaccaagaaccucaacucccucuccgagcucgaggucaagaaccuccagcgccucuccggcgccauggacgagcuccacaacgagauccucgagcucgacgagaaggucgacgaccuccgcgccgacaccaucuccucccagaucgagcucgccguccuccucuccaacgagggcaucaucaacuccgaggacgagcaccuccucgcccucgagcgcaagcucaagaagaugcucggccccuccgccgucgacaucggcaacggcugcuucgagaccaagcacaagugcaaccagaccugccucgaccgcaucgccgccggcaccuucaacgccggcgaguucucccuccccaccuucgacucccucaacaucaccgccgccucccucaacgacgacggccucgacaaccacaccauccuccucuacuacuccaccgccgccuccucccucgccgucacccucaugaucgccaucuucaucgucuacaugaucucccgcgacaacgucuccugcuccaucugccucuga

SEQ ID NO: 122439 - RNA, 1755 nt, Artificial Sequence
  derived and/or modified CDS sequence (opt2) from hemagglutinin__InfluenzaB__ABL76342
augaaggccaucaucguccuccucauggucgucaccuccaacgccgaccgcaucugcaccggcaucaccuccuccaacuccccccacgucgucaagaccgccacccagggcgaggucaacgucaccggcgucaucccccucaccaccacccccaccaagucccacuucgccaaccucaagggcaccaagacccgcggcaagcucugccccaccugccucaacugcaccgaccucgacgucgcccucggccgccccaugugcgucggcgucacccccuccgccaaggccuccauccuccacgagguccgccccgucaccuccggcugcuuccccaucaugcacgaccgcaccaagauccgccagcuccccaaccuccuccgcggcuacgagaagauccgccucuccacccagaacgucaucaacgccgagaaggcccccggcggccccuaccgccucggcaccuccggcuccugccccaacgccaccucccgcuccggcuucuucgccaccauggccugggccgucccccgcgacaacaacaagaccgccaccaacccccucaccgucgaggucccccacaucugcaccaaggaggaggaccagaucaccgucuggggcuuccacuccgacaacaagacccagaugaagaaccucuacggcgacuccaacccccagaaguucaccuccuccgccaacggcgucaccacccacuacgucucccagaucggcgacuuccccgaccagaccgaggacggcggccucccccaguccggccgcaucgucgucgacuacaugguccagaagcccggcaagaccggcaccaucgucuaccagcgcggcauccuccucccccagaaggucuggugcgccuccggccgcuccaaggucauccgcggcucccucccccucaucggcgaggccgacugccuccacgagaaguacggcggccucaacaaguccaagcccuacuacaccggcgagcacgccaaggccaucggcaacugccccaucugggucaagaccccccucaagcucgccaacggcaccaaguaccgcccccccgccaagcuccucaaggagcgcggcuucuucggcgccaucgccggcuuccucgagggcggcugggagggcaugaucgccggcuggcacggcuacaccucccacggcgcccacggcgucgccgucgccgccgaccucaaguccacccaggaggccaucaacaagaucaccaagaaccucaacucccucuccgagcucgaggucaagaaccuccagcgccucuccggcgccauggacgagcuccacaacgagauccucgagcucgacgagaaggucgacgaccuccgcgccgacaccaucuccucccagaucgagcucgccguccuccucuccaacgagggcaucaucaacuccgaggacgagcaccuccucgcccucgagcgcaagcucaagaagaugcucggccccuccgccgucgacaucggcaacggcugcuucgagaccaagcacaagugcaaccagaccugccucgaccgcaucgccgccggcaccuucaacgccggcgacuucucccuccccaccuucgacucccucaacaucaccgccgccucccucaacgacgacggccucgacaaccacaccauccuccucuacuacuccaccgccgccuccucccucgccgucacccucaugaucgccaucuucaucgucuacaugaucucccgcgacaacgucuccugcuccaucugccucuga

SEQ ID NO: 122440 - RNA, 1755 nt, Artificial Sequence
  derived and/or modified CDS sequence (opt2) from hemagglutinin__InfluenzaB__ABL76353
augaaggccaucaucguccuccucauggucgucaccuccaacgccgaccgcaucugcaccggcaucaccuccuccaacuccccccacgucgucaagaccgccacccagggcgaggucaacgucaccggcgucaucccccucaccaccacccccaccaagucccacuucgccaaccucaagggcaccaagacccgcggcaagcucugccccaccugccucaacugcaccgaccucgacgucgcccucggccgccccaugugcgucggcgucacccccuccgccaaggccuccauccuccacgagguccgccccgucaccuccggcugcuuccccaucaugcacgaccgcaccaagauccgccagcuccccaaccuccuccgcggcuacgagaagauccgccucuccacccagaacgucaucaacgccgagaaggcccccggcggccccuaccgccucggcaccuccggcuccugccccaacgccaccucccgcuccggcuucuucgccaccauggccugggccgucccccgcgacaacaacaagaccgccaccaacccccucaccgucgaggucccccacaucugcaccaaggaggaggaccagaucaccgucuggggcuuccacuccgacaacaagacccagaugaagaaccucuacggcgacuccaacccccagaaguucaccuccuccgccaacggcgucaccacccacuacgucucccagaucggcggcuuccccgaccagaccgaggacggcggccucccccaguccggccgcaucgucgucgacuacaugguccagaagcccggcaagaccggcaccaucgucuaccagcgcggcauccuccucccccagaaggucuggugcgccuccggccgcuccaaggucauccgcggcucccucccccucaucggcgaggccgacugccuccacgagaaguacggcggccucaacaaguccaagcccuacuacaccggcgagcacgccaaggccaucggcaacugccccaucugggucaagaccccccucaagcucgccaacggcaccaaguaccgcccccccgccaagcuccucaaggagcgcggcuucuucggcgccaucgccggcuuccucgagggcggcugggagggcaugaucgccggcuggcacggcuacaccucccacggcgcccacggcgucgccgucgccgccgaccucaaguccacccaggaggccaucaacaagaucaccaagaaccucaacucccucuccgagcucgaggucaagaaccuccagcgccucuccggcgccauggacgagcuccacaacgagauccucgagcucgacgagaaggucgacgaccuccgcgccgacaccaucuccucccagaucgagcucgccguccuccucuccaacgagggcaucaucaacuccgaggacgagcaccuccucgcccucgagcgcaagcucaagaagaugcucggccccuccgccgucgacaucggcaacggcugcuucgagaccaagcacaagugcaaccagaccugccucgaccgcaucgccgccggcaccuucaacgccggcgacuucucccuccccaccuucgacucccucaacaucaccgccgccucccucaacgacgacggccucgacaaccacaccauccuccucuacuacuccaccgccgccuccucccucgccgucacccucaugaucgccaucuucaucgucuacaugaucucccgcgacaacgucuccugcuccaucugccucuga

SEQ ID NO: 122441 - RNA, 1755 nt, Artificial Sequence
  derived and/or modified CDS sequence (opt2) from hemagglutinin__InfluenzaB__ABL76375
augaaggccaucaucguccuccucauggucgucaccuccaacgccgaccgcaucugcaccggcaucaccuccuccaacuccccccacgucgucaagaccgccacccagggcgaggucaacgucaccggcgccaucccccucaccaccacccccaccaagucccacuucgccaaccucaagggcaccaagacccgcggcaagcucugccccaccugccucaacugcaccgaccucgacgucgcccucggccgccccaugugcgucggcaucacccccuccgccaaggccuccauccuccacgagguccgccccgucaccuccggcugcuuccccaucaugcacgaccgcaccaagauccgccagcuccccaaccuccuccgcggcuacgagaagauccgccucuccacccagaacgucaucaacgccgagaaggcccccggcggccccuaccgccucggcaccuccggcuccugccccaacgccaccuccaaguccggcuucuucgccaccauggccugggccgucccccgcgacaacaacaagaccgccaccaacccccucaccgucgaggucccccacaucugcaccaaggaggaggaccagaucaccgucuggggcuuccacuccgacaacaagacccagaugaagaaccucuacggcgacuccaacccccagaaguucaccuccuccgccaacggcaucaccacccacuacgucucccagaucggcggcuuccccgaccagaccgaggacggcggccucccccaguccggccgcaucgucgucgacuacaugguccagaagcccggcaagaccggcaccaucgucuaccagcgcggcauccuccucccccagaaggucuggugcgccuccggccgcuccaaggucaucaagggcucccucccccucaucggcgaggccgacugccuccacgagaaguacggcggccucaacaaguccaagcccuacuacaccggcgagcacgccaaggccaucggcaacugccccaucugggucaagaccccccucaagcucgccaacggcaccaaguaccgcccccccgccaagcuccucaaggagcgcggcuucuucggcgccaucgccggcuuccucgagggcggcugggagggcaugaucgccggcuggcacggcuacaccucccacggcgcccacggcgucgccgucgccgccgaccucaaguccacccaggaggccaucaacaagaucaccaagaaccucaacucccucuccgagcucgaggucaagaaccuccagcgccucuccggcgccauggacgagcuccacaacgagauccucgagcucgacgagaaggucgacgaccuccgcgccgacaccaucuccucccagaucgagcucgccguccuccucuccaacgagggcaucaucaacuccgaggacgagcaccuccucgcccucgagcgcaagcucaagaagaugcucggccccuccgccgucgacaucggcaacggcugcuucgagaccaagcacaagugcaaccagaccugccucgaccgcaucgccgccggcaccuucaacgccggcgaguucucccuccccaccuucgacucccucaacaucaccgccgccucccucaacgacgacggccucgacaaccacaccauccuccucuacuacuccaccgccgccuccucccucgccgucacccucaugaucgccaucuucaucgucuacaugaucucccgcgacaacgucuccugcuccaucugccucuga

SEQ ID NO: 122442 - RNA, 1755 nt, Artificial Sequence; identical to SEQ ID NO: 122441
  derived and/or modified CDS sequence (opt2) from hemagglutinin__InfluenzaB__ABL76386

SEQ ID NO: 122443 - RNA, 1755 nt, Artificial Sequence
  derived and/or modified CDS sequence (opt2) from hemagglutinin__InfluenzaB__ABL76408
augaaggccaucaucguccuccucauggucgucaccuccaacgccgaccgcaucugcaccggcaucaccuccuccaacuccccccacgucgucaagaccgccacccagggcgaggucaacgucaccggcgccaucccccucaccaccacccccaccaagucccacuucgccaaccucaagggcaccaagacccgcggcaagcucugccccaccugcuucaacugcaccgaccucgacgucgcccucggccgccccaugugcgucggcaucacccccuccgccaaggccuccauccuccacgagguccgccccgucaccuccggcugcuuccccaucaugcacgaccgcaccaagauccgccagcuccccaaccuccuccgcggcuacgagaagauccgccucuccacccagaacgucaucgacgccgagaaggcccccggcggccccuaccgccucggcaccuccggcuccugccccaacgccaccuccaaguccggcuucuucgccaccauggccugggccgucccccgcggcaacaacaagaccgccaccaacccccucaccgucgaggucccccacaucugcaccaaggaggaggaccagaucaccgucuggggcuuccacuccgacaacaagacccagaugaagaaccucuacggcgacuccaacccccagaaguucaccuccuccgccaacggcaucaccacccacuacgucucccagaucggcggcuuccccgaccagaccgaggacggcggccucccccaguccggccgcaucgucgucgacuacaugguccagaagcccggcaagaccggcaccaucgucuaccagcgcggcauccuccucccccagaaggucuggugcgccuccggccgcuccaaggucaucaagggcucccucccccucaucggcgaggccgacugccuccacgagaaguacggcggccucaacaaguccaagcccuacuacaccggcgagcacgccaaggccaucggcaacugccccaucugggucaagaccccccucaagcucgccaacggcaccaaguaccgcccccccgccaagcuccucaaggagcgcggcuucuucggcgccaucgccggcuuccucgagggcggcugggagggcaugaucgccggcuggcacggcuacaccucccacggcgcccacggcgucgccgucgccgccgaccucaaguccacccaggaggccaucaacaagaucaccaagaaccucaacucccucuccgagcucgaggucaagaaccuccagcgccucuccggcgccauggacgagcuccacaacgagauccucgagcucgacgagaaggucgacgaccuccgcgccgacaccaucuccucccagaucgagcucgccguccuccucuccaacgagggcaucaucaacuccgaggacgagcaccuccucgcccucgagcgcaagcucaagaagaugcucggccccuccgccgucgacaucggcaacggcugcuucgagaccaagcacaagugcaaccagaccugccucgaccgcaucgccgccggcaccuucaacgccggcgaguucucccuccccaccuucgacucccucaacaucaccgccgccucccucaacgacgacggccucgacaaccacaccauccuccucuacuacuccaccgccgccuccucccucgccgucacccucaugaucgccaucuucaucgucuacaugaucucccgcgacaacgucuccugcuccaucugccucuga

SEQ ID NO: 122444 - RNA, 1755 nt, Artificial Sequence
  derived and/or modified CDS sequence (opt2) from hemagglutinin__InfluenzaB__ABL76419
augaaggccaucaucguccuccucauggucgucaccuccaacgccgaccgcaucugcaccggcaucaccuccuccaacuccccccacgucgucaagaccgccacccagggcgaggucaacgucaccggcgccaucccccucaccaccacccccaccaagucccacuucgccaaccucaagggcaccaagacccgcggcaagcucugccccaccugcuucaacugcaccgaccucgacgucgcccucggccgccccaugugcgucggcaucacccccuccgccaaggccuccauccuccacgagauccgccccgucaccuccggcugcuuccccaucaugcacgaccgcaccaagauccgccagcuccccaaccuccuccgcggcuacgagaagauccgccucuccacccagaacgucaucgacgccgagaaggcccccggcggccccuaccgccucggcaccuccggcuccugccccaacgccaccuccaaguccggcuucuucgccaccauggccugggccgucccccgcggcaacaacaagaccgccaccaacccccucaccgucgaggucccccacaucugcaccaaggaggaggaccagaucaccgucuggggcuuccacuccgacaacaagacccagaugaagaaccucuacggcgacuccaacccccagaaguucaccuccuccgccaacggcaucaccacccacuacgucucccagaucggcggcuuccccgaccagaccgaggacggcggccucccccaguccggccgcaucgucgucgacuacaugguccagaagcccggcaagaccggcaccaucgucuaccagcgcggcauccuccucccccagaaggucuggugcgccuccggccgcuccaaggucaucaagggcucccucccccucaucggcgaggccgacugccuccacgagaaguacggcggccucaacaaguccaagcccuacuacaccggcgagcacgccaaggccaucggcaacugccccaucugggucaagaccccccucaagcucgccaacggcaccaaguaccgcccccccgccaagcuccucaaggagcgcggcuucuucggcgccaucgccggcuuccucgagggcggcugggagggcaugaucgccggcuggcacggcuacaccucccacggcgcccacggcgucgccgucgccgccgaccucaaguccacccaggaggccaucaacaagaucaccaagaaccucaacucccucuccgagcucgaggucaagaaccuccagcgccucuccggcgccauggacgagcuccacaacgagauccucgagcucgacgagaaggucgacgaccuccgcgccgacaccaucuccucccagaucgagcucgccguccuccucuccaacgagggcaucaucaacuccgaggacgagcaccuccucgcccucgagcgcaagcucaagaagaugcucggccccuccgccgucgacaucggcaacggcugcuucgagaccaagcacaagugcaaccagaccugccucgaccgcaucgccgccggcaccuucaacgccggcgaguucucccuccccaccuucgacucccucaacaucaccgccgccucccucaacgacgacggccucgacaaccacaccauccuccucuacuacuccaccgccgccuccucccucgccgucacccucaugaucgccaucuucaucgucuacaugaucucccgcgacaacgucuccugcuccaucugccucuga

SEQ ID NO: 122445 - RNA, 1758 nt, Artificial Sequence
  derived and/or modified CDS sequence (opt2) from hemagglutinin__InfluenzaB__ABL76441
augaaggccaucaucguccuccucauggucgucaccuccaacgccgaccgcaucugcaccggcaucaccuccuccaacuccccccacgucgucaagaccgccacccagggcgaggucaacgucaccggcgucaucccccucaccaccacccccaccaagucccacuucgccaaccucaagggcaccaagacccgcggcaagcucugccccaagugccucaacugcaccgaccucgacgucgcccucggccgccccaagugcaccggcaacauccccuccgccaaggucuccauccuccacgagguccgccccgucaccuccggcugcuuccccaucaugcacgaccgcaccaagauccgccagcuccccaaccuccuccgcggcuacgagcacauccgccucuccacccacaacgucaucaacgccgagaaggcccccggcggccccuacaagaucggcaccuccggcuccugccccaacgucaccaacggcaacggcuucuucgccaccauggccugggccguccccaagaacgacaacaacaagaccgccaccaacucccucaccaucgagguccccuacaucugcaccgagggcgaggaccagaucaccgucuggggcuuccacuccgacaacgagacccagauggccaagcucuacggcgacuccaagccccagaaguucaccuccuccgccaacggcgucaccacccacuacgucucccagaucggcggcuuccccaaccagaccgaggacggcggccucccccaguccggccgcaucgucgucgacuacaugguccagaaguccggcaagcccggcaccaucaccuaccagcgcggcauccuccucccccagaaggucuggugcgccuccggccgcuccaaggucaucaagggcucccucccccucaucggcgaggccgacugccuccacgagaaguacggcggccucaacaaguccaagcccuacuacaccggcgagcacgccaaggccaucggcaacugccccaucugggucaagaccccccucaagcucgccaacggcaccaaguaccgcccccccgccaagcuccucaaggagcgcggcuucuucggcgccaucgccggcuuccucgagggcggcugggagggcaugaucgccggcuggcacggcuacaccucccacggcgcccacggcgucgccgucgccgccgaccucaaguccacccaggaggccaucaacaagaucaccaagaaccucaacucccucuccgagcucgaggucaagaaccuccagcgccucuccggcgccauggacgagcuccacaacgagauccucgagcucgacgagaaggucgacgaccuccgcgccgacaccaucuccucccagaucgagcucgccguccuccucuccaacgagggcaucaucaacuccgaggacgagcaccuccucgcccucgagcgcaagcucaagaagaugcucggccccuccgccgucgagaucggcaacggcugcuucgagaccaagcacaagugcaaccagaccugccucgaccgcaucgccgccggcaccuucgacgccggcgaguucucccuccccaccuucgacucccucaacaucaccgccgccucccucaacgacgacgagcucgacaaccacaccauccuccucuacuacuccaccgccgccuccucccucgccgucacccucaugaucgccaucuucgucgucuacauggucucccgcgacaacgucuccugcuccaucugccucuga

SEQ ID NO: 122446 - RNA, 1758 nt, Artificial Sequence
  derived and/or modified CDS sequence (opt2) from hemagglutinin__InfluenzaB__ABL76463
augaaggccaucaucguccuccucauggucgucaccuccaacgccgaccgcaucugcaccggcaucaccuccuccaacuccccccacgucgucaagaccgccacccagggcgaggucaacgucaccggcgucaucccccucaccaccacccccaccaagucccacuucgccaaccucaagggcaccaagacccgcggcaagcucugccccaagugccucaacugcaccgaccucgacgucgcccucggccgccccaagugcaccggcaacauccccuccgccaaggucuccauccuccacgagguccgccccgucaccuccggcugcuuccccaucaugcacgaccgcaccaagauccgccagcuccccaaccuccuccgcggcuacgagcacauccgccucuccacccacaacgucaucaacgccgagaaggcccccggcggccccuacaagaucggcaccuccggcuccugccccaacgucaccaacggcaacggcuucuucgccaccauggccugggccguccccaagaacgacaacaacaagaccgccaccaacucccucaccaucgagguccccuacaucugcaccgagggcgaggaccagaucaccgucuggggcuuccacuccgacaacgagacccagauggccaagcucuacggcgacuccaagccccagaaguucaccuccuccgccaacggcgucaccacccacuacgucucccagaucggcggcuuccccaaccagaccgaggacggcggccucccccaguccggccgcaucgucgucgacuacaugguccagaaguccggcaagaccggcaccaucaccuaccagcgcggcauccuccucccccagaaggucuggugcgccuccggccgcuccaaggucaucaagggcucccucccccucaucggcgaggccgacugccuccacgagaaguacggcggccucaacaaguccaagcccuacuacaccggcgagcacgccaaggccaucggcaacugccccaucugggucaagaccccccucaagcucgccaacggcaccaaguaccgcccccccgccaagcuccucaaggagcgcggcuucuucggcgccaucgccggcuuccucgagggcggcugggagggcaugaucgccggcuggcacggcuacaccucccacggcgcccacggcgucgccgucgccgccgaccucaaguccacccaggaggccaucaacaagaucaccaagaaccucaacucccucuccgagcucgaggucaagaaccuccagcgccucuccggcgccauggacgagcuccacaacgagauccucgagcucgacgagaaggucaacgaccuccgcgccgacaccaucuccucccagaucgagcucgccguccuccucuccaacgagggcaucaucaacuccgaggacgagcaccuccucgcccucgagcgcaagcucaagaagaugcucggccccuccgccgucgagaucggcaacggcugcuucgagaccaagcacaagugcaaccagaccugccucgaccgcaucgccgccggcaccuucgacgccggcgaguucucccuccccaccuucgacucccucaacaucaccgccgccucccucaacgacgacggccucgacaaccacaccauccuccucuacuacuccaccgccgccuccucccucgccgucacccucaugaucgccaucuucgucgucuacauggucucccgcgacaacgucuccugcuccaucugccucuga

SEQ ID NO: 122447 - RNA, 1758 nt, Artificial Sequence
  derived and/or modified CDS sequence (opt2) from hemagglutinin__InfluenzaB__ABL76474
augaaggccaucaucguccuccucauggucgucaccuccaacgccgaccgcaucugcaccggcaucaccuccuccaacuccccccacgucgucaagaccgccacccagggcgaggucaacgucaccggcgucaucccccucaccaccacccccaccaagucccacuucgccaaccucaagggcaccaagacccgcggcaagcucugccccaagugccucaacugcaccgaccucgacgucgcccucggccgccccaagugcaccggcaacauccccuccgccaaggucuccauccuccacgagguccgccccgucaccuccggcugcuuccccaucaugcacgaccgcaccaagauccgccagcuccccaaccuccuccgcggcuacgagcacauccgccucuccacccacaacgucaucaacgccgagaaggcccccggcggccccuacaagaucggcaccuccggcuccugccccaacgucaccaacggcaacggcuucuucgccaccauggccugggccguccccaagaacgacaacaacaagaccgccaccaacucccucaccaucgagguccccuacaucugcaccgagggcgaggaccagaucaccgucuggggcuuccacuccgacaacgagacccagauggccaagcucuacggcgacuccaagccccagaaguucaccuccuccgccaacggcgucaccacccacuacgucucccagaucggcggcuuccccaaccagaccgaggacggcggccucccccaguccggccgcaucgucgucgacuacaugguccagaaguccggcaagaccggcaccaucaccuaccagcgcggcauccuccucccccagaaggucuggugcgccuccggccgcuccaaggucaucaagggcucccucccccucaucggcgaggccgacugccuccacgagaaguacggcggccucaacaaguccaagcccuacuacaccggcgagcacgccaaggccaucggcaacugccccaucugggucaagaccccccucaagcucgccaacggcaccaaguaccgcccccccgccaagcuccucaaggagcgcggcuucuucggcgccaucgccggcuuccucgagggcggcugggagggcaugaucgccggcuggcacggcuacaccucccacggcgcccacggcgucgccgucgccgccgaccucaaguccacccaggaggccaucaacaagaucaccaagaaccucaacucccucuccgagcucgaggucaagaaccuccagcgccucuccggcgccauggacgagcuccacaacgagauccucgagcucgacgagaaggucgacgaccuccgcgccgacaccaucuccucccagaucgagcucgccguccuccucuccaacgagggcaucaucaacuccgaggacgagcaccuccucgcccucgagcgcaagcucaagaagaugcucggccccuccgccgucgagaucggcaacggcugcuucgagaccaagcacaagugcaaccagaccugccucgaccgcaucgccgccggcaccuucgacgccggcgaguucucccuccccaccuucgacucccucaacaucaccgccgccucccucaacgacgacgagcucgacaaccacaccauccuccucuacuacuccaccgccgccuccucccucgccgucacccucaugaucgccaucuucgucgucuacauggucucccgcgacaacgucuccugcuccaucugccucuga

SEQ ID NO: 122448 - RNA, 1758 nt, Artificial Sequence
  derived and/or modified CDS sequence (opt2) from hemagglutinin__InfluenzaB__ABL76485
augaaggccaucaucguccuccucauggucgucaccuccaacgccgaccgcaucugcaccggcaucaccuccuccaacuccccccacgucgucaagaccgccacccagggcgaggucaacgucaccggcgucaucccccucaccaccacccccaccaagucccacuucgccaaccucaagggcaccaagacccgcggcaagcucugccccaagugccucaacugcaccgaccucgacgucgcccucggccgccccaagugcaccggcaacauccccuccgccgaggucuccauccuccacgagguccgccccgucaccuccggcugcuuccccaucaugcacgaccgcaccaagauccgccagcuccccaaccuccuccgcggcuacgagcacauccgccucuccacccacaacgucaucaacgccgagaaggcccccggcggccccuacaagaucggcaccuccggcuccugccccaacgucaccaacggcaacggcuucuucgucaccauggccugggccguccccaagaacgacaacaacaagaccgccaccaacucccucaccaucgagguccccuacaucugcaccgagggcgaggaccagaucaccgucuggggcuuccacuccgacaacgagacccagauggccaagcucuacggcgacuccaagccccagaaguucaccuccuccgccaacggcgucaccacccacuacgucucccagaucggcggcuuccccaaccagaccgaggacggcggccucccccaguccggccgcaucgucgucgacuacaugguccagaaguccggcaagaccggcaccaucaccuaccagcgcggcauccuccucccccagaaggucuggugcgccuccggccgcuccaaggucaucaagggcucccucccccucaucggcgaggccgacugccuccacgagaaguacggcggccucaacaaguccaagcccuacuacaccggcgagcacgccaaggccaucggcaacugccccaucugggucaagaccccccucaagcucgccaacggcaccaaguaccgcccccccgccaagcuccucaaggagcgcggcuucuucggcgccaucgccggcuuccucgagggcggcugggagggcaugaucgccggcuggcacggcuacaccucccacggcgcccacggcgucgccgucgccgccgaccucaaguccacccaggaggccaucaacaagaucaccaagaaccucaacucccucuccgagcucgaggucaagaaccuccagcgccucuccggcgccauggacgagcuccacaacgagauccucgagcucgacgagaaggucgacgaccuccgcgccgacaccaucuccucccagaucgagcucgccguccuccucuccaacgagggcaucaucaacuccgagaacgagcaccuccucgcccucgagcgcaagcucaagaagaugcucggccccuccgccgucgagaucggcaacggcugcuucgagaccaagcacaagugcaaccagaccugccucgaccgcaucgccgccggcaccuucgacgccggcgaguucucccuccccaccuucgacucccucaacaucaccgccgccucccucaacgacgacggccucgacaaccacaccauccuccucuacuacuccaccgccgccuccucccucgccgucacccucaugaucgccaucuucgucgucuacauggucucccgcgacaacgucuccugcuccaucugccucuga

SEQ ID NO: 122449 - RNA, 1758 nt, Artificial Sequence
  derived and/or modified CDS sequence (opt2) from hemagglutinin__InfluenzaB__ABL76507
augaaggccaucaucguccuccucauggucgucaccuccaacgccgaccgcaucugcaccggcaucaccuccuccaacuccccccacgucgucaagaccgccacccagggcgaggucaacgucaccggcgucaucccccucaccaccacccccaccaagucccacuucgccaaccucaagggcaccaagacccgcggcaagcucugccccaagugccucaacugcaccgaccucgacgucgcccucggccgccccaagugcaccggcaacauccccuccgccgaggucuccauccuccacgagguccgccccgucaccuccggcugcuuccccaucaugcacgaccgcaccaagauccgccagcuccccaaccuccuccgcggcuacgagcacauccgccucuccacccacaacgucaucaacgccgagaaggcccccggcggccccuacaagaucggcaccuccggcuccugccccaacgucaccaacggcaacggcuucuucgccaccauggccugggccguccccaagaacgacaacaacaagaccgccaccaacucccucaccaucgagguccccuacaucugcaccgagggcgaggaccagaucaccgucuggggcuuccacuccgacaacgagauccagauggccaagcucuacggcgacuccaagccccagaaguucaccuccuccgccaacggcgucaccacccacuacgucucccagaucggcggcuuccccaaccagaccgaggacggcggccucccccaguccggccgcaucgucgucgacuacaugguccagaaguccggcaagaccggcaccaucaccuaccagcgcggcauccuccucccccagaaggucuggugcgccuccggccgcuccaaggucaucaagggcucccucccccucaucggcgaggccgacugccuccacgagaaguacggcggccucaacaaguccaagcccuacuacaccggcgagcacgccaaggccaucggcaacugccccaucugggucaagaccccccucaagcucgccaacggcaccaaguaccgcccccccgccaagcuccucaaggagcgcggcuucuucggcgccaucgccggcuuccucgagggcggcugggagggcaugaucgccggcuggcacggcuacaccucccacggcgcccacggcgucgccgucgccgccgaccucaaguccacccaggaggccaucaacaagaucaccaagaaccucaacucccucuccgagcucgaggucaagaaccuccagcgccucuccggcgccauggacgagcuccacaacgagauccucgagcucgacgagaaggucgacgaccuccgcgccgacaccaucuccucccagaucgagcucgccguccuccucuccaacgagggcaucaucaacuccgaggacgagcaccuccucgcccucgagcgcaagcucaagaagaugcucggccccuccgccgucgagaucggcaacggcugcuucgagaccaagcacaagugcaaccagaccugccucgaccgcaucgccgccggcaccuucgacgccggcgaguucucccuccccaccuucgacucccucaacaucaccgccgccucccucaacgacgacggccucgacaaccacaccauccuccucuacuacuccaccgccgccuccucccucgccgucacccucaugaucgccaucuucgucgucuacauggucucccgcgacaacgucuccugcuccaucugccucuga

SEQ ID NO: 122450 - RNA, 1758 nt, Artificial Sequence
  derived and/or modified CDS sequence (opt2) from hemagglutinin__InfluenzaB__ABL76518
augaaggccaucaucguccuccucauggucgucaccuccaacgccgaccgcaucugcaccggcaucaccuccuccaacuccccccacgucgucaagaccgccacccagggcgaggucaacgucaccggcgucaucccccucaccaccacccccaccaagucccacuucgccaaccucaagggcaccaagacccgcggcaagcucugccccaagugccucaacugcaccgaccucgacgucgcccucggccgccccaagugcaccggcaacauccccuccgccgaggucuccauccuccacgagguccgccccgucaccuccggcugcuuccccaucaugcacgaccgcaccaagauccgccagcuccccaaccuccuccgcggcuacgagcacauccgccucuccacccacaacgucaucaacgccgagaaggcccccggcggccccuacaagaucggcaccuccggcuccugccccaacgucaccaacggcaacggcuucuucgccaccauggccugggccguccccaagaacgacaacaacaagaccgccaccaacucccucaccaucgagguccccuacaucugcaccgagggcgaggaccagaucaccgucuggggcuuccacuccgacaacgagaaccagauggccaagcucuacggcgacuccaagccccagaaguucaccuccuccgccaacggcgucaccacccacuacgucucccagaucggcggcuuccccaaccagaccgaggacggcggccucccccaguccggccgcaucgucgucgacuacaugguccagaaguccggcaagaccggcaccaucaccuaccagcgcggcauccuccucccccagaaggucuggugcgccuccggccgcuccaaggucaucaagggcucccucccccucaucggcgaggccgacugccuccacgagaaguacggcggccucaacaaguccaagcccuacuacaccggcgagcacgccaaggccaucggcaacugccccaucugggucaagaccccccucaagcucgccaacggcaccaaguaccgcccccccgccaagcuccucaaggagcgcggcuucuucggcgccaucgccggcuuccucgagggcggcugggagggcaugaucgccggcuggcacggcuacaccucccacggcgcccacggcgucgccgucgccgccgaccucaaguccacccaggaggccaucaacaagaucaccaagaaccucaacucccucuccgagcucgaggucaagaaccuccagcgccucuccggcgccauggacgagcuccacaacgagauccucgagcucgacgagaaggucgacgaccuccgcgccgacaccaucuccucccagaucgagcucgccguccuccucuccaacgagggcaucaucaacuccgaggacgagcaccuccucgcccucgagcgcaagcucaagaagaugcucggccccuccgccgucgagaucggcaacggcugcuucgagaccaagcacaagugcaaccagaccugccucgaccgcaucgccgccggcaccuucgacgccggcgaguucucccuccccaccuucgacucccucaacaucaccgccgccucccucaacgacgacggccucgacaaccacaccauccuccucuacuacuccaccgccgccuccucccucgccgucacccucaugaucgccaucuucgucgucuacauggucucccgcgacaacgucuccugcuccaucugccucuga

SEQ ID NO: 122451 - RNA, 1758 nt, Artificial Sequence
  derived and/or modified CDS sequence (opt2) from hemagglutinin__InfluenzaB__ABL76529
augaaggccaucaucguccuccucauggucgucaccuccaacgccgaccgcaucugcaccggcaucaccuccuccaacuccccccacgucgucaagaccgccacccagggcgaggucaacgucaccggcgucaucccccucaccaccacccccaccaagucccacuucgccaaccucaagggcaccaagacccgcggcaagcucugccccaagugccucaacugcaccgaccucgacgucgcccucggccgccccaagugcaccggcaacauccccuccgccgaggucuccauccuccacgagguccgccccgucaccuccggcugcuuccccaucaugcacgaccgcaccaagauccgccagcuccccaaccuccuccgcggcuacgagcacauccgccucuccacccacaacgucaucaacgccgagaaggcccccggcggccccuacaagaucggcaccuccggcuccugccccaacgucaccaacggcaacggcuucuucgucaccauggccugggccguccccaagaacgacaacaacaagaccgccaccaacucccucaccaucgagguccccuacaucugcaccgagggcgaggaccagaucaccgucuggggcuuccacuccgacaacgagacccagauggccaagcucuacggcgacuccaagccccagaaguucaccuccuccgccaacggcgucaccacccacuacgucucccagaucggcggcuuccccaaccagaccgaggacggcggccucccccaguccggccgcaucgucgucgacuacaugguccagaaguccggcaagaccggcaccaucaccuaccagcgcggcauccuccucccccagaaggucuggugcgccuccggccgcuccaaggucaucaagggcucccucccccucaucggcgaggccgacugccuccacgagaaguacggcggccucaacaaguccaagcccuacuacaccggcgagcacgccaaggccaucggcaacugccccaucugggucaagaccccccucaagcucgccaacggcaccaaguaccgcccccccgccaagcuccucaaggagcgcggcuucuucggcgccaucgccggcuuccucgagggcggcugggagggcaugaucgccggcuggcacggcuacaccucccacggcgcccacggcgucgccgucgccgccgaccucaaguccacccaggaggccaucaacaagaucaccaagaaccucaacucccucuccgagcucgaggucaagaaccuccagcgccucuccggcgccauggacgagcuccacaacgagauccucgagcucgacgagaaggucgacgaccuccgcgccgacaccaucuccucccagaucgagcucgccguccuccucuccaacgagggcaucaucaacuccgaggacgagcaccuccucgcccucgagcgcaagcucaagaagaugcucggccccuccgccgucgagaucggcaacggcugcuucgagaccaagcacaagugcaaccagaccugccucgaccgcaucgccgccggcaccuucgacgccggcgaguucucccuccccaccuucgacucccucaacaucaccgccgccucccucaacgacgacggccucgacaaccacaccauccuccucuacuacuccaccgccgccuccucccucgccgucacccucaugaucgccaucuucgucgucuacauggucucccgcgacaacgucuccugcuccaucugccucuga

SEQ ID NO: 122452 - RNA, 1758 nt, Artificial Sequence
  derived and/or modified CDS sequence (opt2) from hemagglutinin__InfluenzaB__ABL76540
augaaggccaucaucguccuccucauggucgucaccuccaacgccgaccgcaucugcaccggcaucaccuccuccaacuccccccacgucgucaagaccgccacccagggcgaggucaacgucaccggcgucaucccccucaccaccacccccaccaagucccacuucgccaaccucaagggcaccaagacccgcggcaagcucugccccaagugccucaacugcaccgaccucgacgucgcccucggccgccccaagugcaccggcaacauccccuccgccgaggucuccauccuccacgaggucaagcccgucaccuccggcugcuuccccaucaugcacgaccgcaccaagauccgccagcuccccaaccuccuccgcggcuacgagcacauccgccucuccacccacaacgucaucaacgccgagaaggcccccggcggccccuacaagaucggcaccuccggcuccugccccaacgucaccaacggcaacggcuucuucgccaccauggccugggccguccccaagaacgacaacaacaagaccgccaccaacucccucaccaucgagguccccuacaucugcaccgagggcgaggaccagaucaccgucuggggcuuccacuccgacaacgagacccagauggccaagcucuacggcgacuccaagccccagaaguucaccuccuccgccaacggcgucaccacccacuacgucucccagaucggcggcuuccccaaccagaccgaggacggcggccucccccaguccggccgcaucgucgucgacuacaugguccagaaguccggcaagaccggcaccaucaccuaccagcgcggcauccuccucccccagaaggucuggugcgccuccggccgcuccaaggucaucaagggcucccucccccucaucggcgaggccgacugccuccacgagaaguacggcggccucaacaaguccaagcccuacuacaccggcgagcacgccaaggccaucggcaacugccccaucugggucaagaccccccucaagcucgccaacggcaccaaguaccgcccccccgccaagcuccucaaggagcgcggcuucuucggcgccaucgccggcuuccucgagggcggcugggagggcaugaucgccggcuggcacggcuacaccucccacggcgcccacggcgucgccgucgccgccgaccucaaguccacccaggaggccaucaacaagaucaccaagaaccucaacucccucuccgagcucgaggucaagaaccuccagcgccucuccggcgccauggacgagcuccacaacgagauccucgagcucgacgagaaggucgacgaccuccgcgccgacaccaucuccucccagaucgagcucgccguccuccucuccaacgagggcaucaucaacuccgaggacgagcaccuccucgcccucgagcgcaagcucaagaagaugcucggccccuccgccgucgagaucggcaacggcugcuucgagaccaagcacaagugcaaccagaccugccucgaccgcaucgccgccggcaccuucgacgccggcgaguucucccuccccaccuucgacucccucaacaucaccgccgccucccucaacgacgacggccucgacaaccacaccauccuccucuacuacuccaccgccgccuccucccucgccgucacccucaugaucgccaucuucgucgucuacauggucucccgcgacaacgucuccugcuccaucugccucuga

SEQ ID NO: 122453 - RNA, 1758 nt, Artificial Sequence
  derived and/or modified CDS sequence (opt2) from hemagglutinin__InfluenzaB__ABL76551
augaaggccaucaucguccuccucauggucgucaccuccaacgccgaccgcaucugcaccggcaucaccuccuccaacuccccccacgucgucaagaccgccacccagggcgaggucaacgucaccggcgucaucccccucaccaccacccccaccaagucccacuucgccaaccucaagggcaccaagacccgcggcaagcucugccccaagugccucaacugcaccgaccucgacgucgcccucggccgccccaagugcaccggcaacauccccuccgccgaggucuccauccuccacgagguccgccccgucaccuccggcugcuuccccaucaugcacgaccgcaccaagauccgccagcuccccaaccuccuccgcggcuacgagcacauccgccucuccacccacaacgucaucaacgccgagaaggcccccggcggccccuacaagaucggcaccuccggcuccugccccaacgucaccaacggcaacggcuucuucgccaccauggccugggccguccccaagaacgacaacaacaagaccgccaccaacucccucaccaucgagguccccuacaucugcaccgagggcgaggaccagaucaccgucuggggcuuccacuccgacaacgagacccagauggccaagcucuacggcgacuccaagccccagaaguucaccuccuccgccaacggcgucaccacccacuacgucucccagaucggcggcuuccccaaccagaccgaggacggcggccucccccaguccggccgcaucgucgucgacuacaugguccagaaguccggcaagaccggcaccaucaccuaccagcgcggcauccuccucccccagaaggucuggugcgccuccggccgcuccaaggucaucaagggcucccucccccucaucggcgaggccgacugccuccacgagaaguacggcggccucaacaaguccaagcccuacuacaccggcgagcacgccaaggccaucggcaacugccccaucugggucaagaccccccucaagcucgccaacggcaccaaguaccgcccccccgccaagcuccucaaggagcgcggcuucuucggcgccaucgccggcuuccucgagggcggcugggagggcaugaucgccggcuggcacggcuacaccucccacggcgcccacggcgucgccgucgccgccgaccucaaguccacccaggaggccaucaacaagaucaccaagaaccucaacucccucuccgagcucgaggucaagaaccuccagcgccucuccggcgccauggacgagcuccacaacgagauccucgagcucgacgagaaggucgacgaccuccgcgccgacaccaucuccucccagaucgagcucgccguccuccucuccaacgagggcaucaucaacuccgaggacgagcaccuccucgcccucgagcgcaagcucaagaagaugcucggccccuccgccgucgagaucggcaacggcugcuucgagaccaagcacaagugcaaccagaccugccucgaccgcaucgccgccggcaccuucgacgccggcgaguucucccuccccaccuucgacucccucaacaucaccgccgccucccucaacgacgacggccucgacaaccacaccauccuccucuacuacuccaccgccgccuccucccucgccgucacccucaugauggccaucuucgucgucuacauggucucccgcgacaacgucuccugcuccaucugccucuga

SEQ ID NO: 122454 - RNA, 1758 nt, Artificial Sequence
  derived and/or modified CDS sequence (opt2) from hemagglutinin__InfluenzaB__ABL76562
augaaggccaucaucguccuccucauggucgucaccuccaacgccgaccgcaucugcacccgcaucaccuccuccaacuccccccacgucgucaagaccgccacccagggcgaggucaacgucaccggcgucaucccccucaccaccacccccaccaagucccacuucgccaaccucaagggcaccaagacccgcggcaagcucugccccaagugccucaacugcaccgaccucgacgucgcccucggccgccccaagugcaccggcaacauccccuccgccgaggucuccauccuccacgagguccgccccgucaccuccggcugcuuccccaucaugcacgaccgcaccaagauccgccagcuccccaaccuccuccgcggcuacgagcacauccgccucuccacccacaacgucaucaacgccgagaaggcccccggcggccccuacaagaucggcaccuccggcuccugccccaacgucaccaacggcaacggcuucuucgccaccauggccugggccguccccaagaacgacaacaacaagaccgccaccaacucccucaccaucgagguccccuacaucugcaccgagggcgaggaccagaucaccgucuggggcuuccacuccgacaacgagacccagauggccaagcucuacggcgacuccaagccccagaaguucaccuccuccgccaacggcgucaccacccacuacgucucccagaucggcggcuuccccaaccagaccgaggacggcggccucccccaguccggccgcaucgucgucgacuacaugguccagaaguccggcaagaccggcaccaucaccuaccagcgcggcauccuccucccccagaaggucuggugcgccuccggccgcuccaaggucaucaagggcucccucccccucaucggcgaggccgacugccuccacgagaaguacggcggccucaacaaguccaagcccuacuacaccggcgagcacgccaaggccaucggcaacugccccaucugggucaagaccccccucaagcucgccaacggcaccaaguaccgcccccccgccaagcuccucaaggagcgcggcuucuucggcgccaucgccggcuuccucgagggcggcugggagggcaugaucgccggcuggcacggcuacaccucccacggcgcccacggcgucgccgucgccgccgaccucaaguccacccaggaggccaucaacaagaucaccaagaaccucaacucccucuccgagcucgaggucaagaaccuccagcgccucuccggcgccauggacgagcuccacaacgagauccucgagcucgacgagaaggucgacgaccuccgcgccgacaccaucuccucccagaucgagcucgccguccuccucuccaacgagggcaucaucaacuccgaggacgagcaccuccucgcccucgagcgcaagcucaagaagaugcucggccccuccgccgucgagaucggcaacggcugcuucgagaccaagcacaagugcaaccagaccugccucgaccgcaucgccgccggcaccuucgacgucggcgaguucucccuccccaccuucgacucccucaacaucaccgccgccucccucaacgacgacggccucgacaaccacaccauccuccucuacuacuccaccgccgccuccucccucgccgucacccucaugaucgccaucuucgucgucuacauggucucccgcgacaacgucuccugcuccaucugccucuga

SEQ ID NO: 122455 - RNA, 1758 nt, Artificial Sequence
  derived and/or modified CDS sequence (opt2) from hemagglutinin__InfluenzaB__ABL76573
augaaggccaucaucguccuccucauggucgucaccuccaacgccgaccgcaucugcaccggcaucaccuccuccaacuccccccacgucgucaagaccgccacccagggcgaggucaacgucaccggcgucaucccccucaccaccacccccaccaagucccacuucgccaaccucaagggcaccaagacccgcggcaagcucugccccaagugccucaacugcaccgaccucgacgucgcccucggccgccccaagugcaccggcaacauccccuccgccgaggucuccauccuccacgagguccgccccgucaccuccggcugcuuccccaucaugcacgaccgcaccaagauccgccagcuccccaaccuccuccgcggcuacgagcacauccgccucuccacccacaacgucaucaacgccgagaaggcccccggcggccccuacaagaucggcaccuccggcuccugccccaacgucaccaacggcaacggcuucuucgccaccauggccugggccguccccaagaacgacaacaacaagaccgccaccaacucccucaccaucgagguccccuacaucugcaccgagggcgaggaccagaucaccgucuggggcuuccacuccgacaacgagacccagauggccaagcucuacggcgacuccaagccccagaaguucaccuccuccgccaacggcgucaccacccacuacgucucccagaucggcggcuuccccaaccagaccgaggacggcggccucccccaguccggccgcaucgucgucgacuacaugguccagaaguccggcaagaccggcaccaucaccuaccagcgcggcauccuccucccccagaaggucuggugcgccuccggccgcuccaaggucaucaagggcucccucccccucaucggcgaggccgacugccuccacgagaaguacggcggccucaacaaguccaagcccuacuacaccggcgagcacgccaaggccaucggcaacugccccaucugggucaagaccccccucaagcucgccaacggcaccaaguaccgcccccccgccaagcuccucaaggagcgcggcuucuucggcgccaucgccggcuuccucgagggcggcugggagggcaugaucgccggcuggcacggcuacaccucccacggcgcccacggcgucgccgucgccgccgaccucaaguccacccaggaggccaucaacaagaucaccaagaaccucaacucccucuccgagcucgaggucaagaaccuccagcgccucuccggcgccauggacgagcuccacaacgagauccucgagcucgacgagaaggucgacgaccuccgcgccgacaccaucuccucccagaucgagcucgccguccuccucuccaacgagggcaucaucaacuccgaggacgagcaccuccucgcccucgagcgcaagcucaagaagaugcucggccccuccgccgucgagaucggcaacggcugcuucgagaccaagcacaagugcaaccagaccugccucgaccgcaucgccgccggcaccuucgacgccggcgaguucucccuccccaccuucgacucccucaacaucaccgccgccucccucaacgacgacggccucgacaaccacaccauccuccucuacuacuccaccgccgccuccucccucgccgucacccucaugaucgccaucuucgucgucuacauggucucccgcgacaacgucuccugcuccaucugccucuga

SEQ ID NO: 122456 - RNA, 1758 nt, Artificial Sequence; identical to SEQ ID NO: 122455
  derived and/or modified CDS sequence (opt2) from hemagglutinin__InfluenzaB__ABL76584

SEQ ID NO: 122457 - RNA, 1758 nt, Artificial Sequence; identical to SEQ ID NO: 122455
  derived and/or modified CDS sequence (opt2) from hemagglutinin__InfluenzaB__ABL76595

SEQ ID NO: 122458 - RNA, 1758 nt, Artificial Sequence; identical to SEQ ID NO: 122455
  derived and/or modified CDS sequence (opt2) from hemagglutinin__InfluenzaB__ABL76606

SEQ ID NO: 122459 - RNA, 1758 nt, Artificial Sequence
  derived and/or modified CDS sequence (opt2) from hemagglutinin__InfluenzaB__ABL76617
augaaggccaucaucguccuccucauggucgucaccuccaacgccgaccgcaucugcaccggcaucaccuccuccaacuccccccacgucgucaagaccgccacccagggcgaggucaacgucaccggcgucaucccccucaccaccacccccaccaagucccacuucgccaaccucaagggcaccgagacccgcggcaagcucugccccaagugccucaacugcaccgaccucgacgucgcccucggccgccccaagugcaccggcaacauccccuccgccaaggucuccauccuccacgagguccgccccgucaccuccggcugcuuccccaucaugcacgaccgcaccaagauccgccagcuccccaaccuccuccgcggcuacgagcacauccgccucuccacccacaacgucaucaacgccgagaaggcccccggcggccccuacaagaucggcaccuccggcuccugccccaacgucaccaacggcaacggcuucuucgccaccauggccugggccguccccaagaacgacaacaacaagaccgccaccaacucccucaccaucgagguccccuacaucugcaccgagggcgaggaccagaucaccgucuggggcuuccacuccgacaacgagacccagauggccaagcucuacggcgacuccaagccccagaaguucaccuccuccgccaacggcgucaccacccacuacgucucccagaucggcggcuuccccaaccagaccgaggacggcggccucccccaguccggccgcaucgucgucgacuacaugguccagaaguccggcaagaccggcaccaucaccuaccagcgcggcauccuccucccccagaaggucuggugcgccuccggccgcuccaaggucaucaagggcucccucccccucaucggcgaggccgacugccuccacgagaaguacggcggccucaacaaguccaagcccuacuacaccggcgagcacgccaaggccaucggcaacugccccaucugggucaagaccccccucaagcucgccaacggcaccaaguaccgcccccccgccaagcuccucaaggagcgcggcuucuucggcgccaucgccggcuuccucgagggcggcugggagggcaugaucgccggcuggcacggcuacaccucccacggcgcccacggcgucgccgucgccgccgaccucaaguccacccaggaggccaucaacaagaucaccaagaaccucaacucccucuccgagcucgaggucaagaaccuccagcgccucuccggcgccauggacgagcuccacaacgagauccucgagcucgacgagaaggucgacgaccuccgcgccgacaccaucuccucccagaucgagcucgccguccuccucuccaacgagggcaucaucaacuccgaggacgagcaccuccucgcccucgagcgcaagcucaagaagaugcucggccccuccgccgucgagaucggcaacggcugcuucgagaccaagcacaagugcaaccagaccugccucgaccgcaucgccgccggcaccuucgacgccggcgaguucucccuccccaccuucgacucccucaacaucaccgccgccucccucaacgacgacggccucgacaaccacaccauccuccucuacuacuccaccgccgccuccucccucgccgucacccucaugaucgccaucuucgucgucuacauggucucccgcgacaacgucuccugcuccaucugccucuga

SEQ ID NO: 122460 - RNA, 1755 nt, Artificial Sequence
  derived and/or modified CDS sequence (opt2) from hemagglutinin__InfluenzaB__ABL76628
augaaggccaucaucguccuccucauggucgucaccuccaacgccgaccgcaucugcaccggcaucaccuccuccaacuccccccacgucgucaagaccgccacccagggcgaggucaacgucaccggcgucaucccccucaccaccacccccaccaaguccuacuucgccaaccucaagggcacccgcacccgcggcaagcucugccccgacugccucaacugcaccgaccucgacgucgcccucggccgccccaugugcgucggcaccacccccuccgccaaggccuccauccuccacgagguccgccccgucaccuccggcugcuuccccaucaugcacgaccgcaccaagauccgccagcucgccaaccuccuccgcggcuacgagaacauccgccucuccacccagaacgucaucgacgccgagaaggcccccggcggccccuaccgccucggcaccuccggcuccugccccaacgccaccuccaaguccggcuucuucgccaccauggccugggccguccccaaggacaacaacaagaacgccaccaacccccucaccgucgaggucccccacaucugcaccgagggcgaggaccagaucaccgucuggggcuuccacuccgacaacaagacccagaugaagaaccucuacggcgacuccaacccccagaaguucaccuccuccgccaacggcgucaccacccacuacgucucccagaucggcggcuuccccgaccagaccgaggacggcggccucccccaguccggccgcaucgucgucgacuacaugaugcagaagcccggcaagaccggcaccaucgucuaccagcgcggcguccuccucccccagaaggucuggugcgccuccggccgcuccaaggucaucaagggcucccucccccucaucggcgaggccgacugccuccacgagaaguacggcggccucaacaaguccaagcccuacuacaccggcgagcacgccaaggccaucggcaacugccccaucugggucaagaccccccucaagcucgccaacggcaccaaguaccgcccccccgccaagcuccucaaggagcgcggcuucuucggcgccaucgccggcuuccucgagggcggcugggagggcaugaucgccggcuggcacggcuacaccucccacggcgcccacggcgucgccgucgccgccgaccucaaguccacccaggaggccaucaacaagaucaccaagaaccucaacucccucuccgagcucgaggucaagaaccuccagcgccucuccggcgccauggacgagcuccacaacgagauccucgagcucgacgagaaggucgacgaccuccgcgccgacaccaucuccucccagaucgagcucgccguccuccucuccaacgagggcaucaucaacuccgaggacgagcaccuccucgcccucgagcgcaagcucaagaagaugcucggccccuccgccgucgacaucggcaacggcugcuucgagaccaagcacaagugcaaccagaccugccucgaccgcaucgccgccggcaccuucaacgccggcgaguucucccuccccaccuucgacucccucaacaucaccgccgccucccucaacgacgacggccucgacaaccacaccauccuccucuacuacuccaccgccgccuccucccucgccgucacccucaugcucgccaucuucaucgucuacauggucucccgcgacaacgucuccugcuccaucugccucuga

SEQ ID NO: 122461 - RNA, 1755 nt, Artificial Sequence
  derived and/or modified CDS sequence (opt2) from hemagglutinin__InfluenzaB__ABL76639
augaaggccaucaucguccuccucauggucgucaccuccaacgccgaccgcaucugcaccggcaucaccuccuccaacuccccccacgucgucaagaccgccacccagggcgaggucaacgucaccggcgucaucccccucaccaccacccccaccaaguccuacuucgccaaccucaagggcacccgcacccgcggcaagcucugccccgacugccucaacugcaccgaccucgacgucgcccucggccgccccaugugcgucggcaccacccccuccgccaaggccuccauccuccacgagguccgccccgucaccuccggcugcuuccccaucaugcacgaccgcaccaagauccgccagcucgccaaccuccuccgcggcuacgagaacauccgccucuccacccagaacgucaucgacgccgagaaggcccccggcggccccuaccgccucggcaccuccggcuccugccccaacgccaccuccaaguccggcuucuucgccaccauggccugggccguccccaaggacaacaacaagaacgccaccaacccccucaccgucgagguccccuacaucugcaccgagggcgaggaccagaucaccgucuggggcuuccacuccgacaacaagacccagaugaagaaccucuacggcgacuccaacccccagaaguucaccuccuccgccaacggcgucaccacccacuacgucucccagaucggcggcuuccccgaccagaccgaggacggcggccucccccaguccggccgcaucgucgucgacuacaugaugcagaagcccggcaaggccggcaccaucgucuaccagcgcggcguccuccucccccagaaggucuggugcgccuccggccgcuccaaggucaucaagggcucccucccccucaucggcgaggccgacugccuccacgagaaguacggcggccucaacaaguccaagcccuacuacaccggcgagcacgccaaggccaucggcaacugccccaucugggucaagaccccccucaagcucgccaacggcaccaaguaccgcccccccgccaagcuccucaaggagcgcggcuucuucggcgccaucgccggcuuccucgagggcggcugggagggcaugaucgccggcuggcacggcuacaccucccacggcgcccacggcgucgccgucgccgccgaccucaaguccacccaggaggccaucaacaagaucaccaagaaccucaacucccucuccgagcucgaggucaagaaccuccagcgccucuccggcgccauggacgagcuccacaacgagauccucgagcucgacgagaaggucgacgaccuccgcgccgacaccaucuccucccagaucgagcucgccguccuccucuccaacgagggcaucaucaacuccgaggacgagcaccuccucgcccucgagcgcaagcucaagaagaugcucggccccuccgccgucgacaucggcaacggcugcuucgagaccaagcacaagugcaaccagaccugccucgaccgcaucgccgccggcaccuucaacgccggcgaguucucccuccccaccuucgacucccucaacaucaccgccgccucccucaacgacgacggccucgacaaccacaccauccuccucuacuacuccaccgccgccuccucccucgccgucacccucaugcucgccaucuucaucgucuacauggucucccgcgacaacgucuccugcuccaucugccucuga

SEQ ID NO: 122462 - RNA, 1755 nt, Artificial Sequence
  derived and/or modified CDS sequence (opt2) from hemagglutinin__InfluenzaB__ABL76683
augaaggccaucaucguccuccucauggucgucaccuccaacgccgaccgcaucugcaccggcaucaccuccuccaacuccccccacgucgucaagaccgccacccagggcgaggucaacgucaccggcgucaucccccucaccaccacccccaccaaguccuacuucgccaaccucaagggcacccgcacccgcggcaagcucugccccgacugccucaacugcaccgaccucgacgucgcccucggccgccccaugugcgucggcaccacccccuccgccaaggccuccauccuccacgagguccgccccgucaccuccggcugcuuccccaucaugcacgaccgcaccaagauccgccagcucgccaaccuccuccgcggcuacgagaacauccgccucuccacccagaacgucaucgacgccgagaaggcccccggcggccccuaccgccucggcaccuccggcuccugccccaacgccaccuccaaguccggcuucuucgccaccauggccugggccguccccaaggacaacaacaagaacgccaccaacccccucaccgucgagguccccuacaucugcaccgagggcgaggaccagaucaccgucuggggcuuccacuccgacaacaagacccagaugaagaaccucuacggcgacuccaacccccagaaguucaccuccuccgccaacggcgucaccacccacuacgucucccagaucggcggcuuccccgaccagaccgaggacggcggccucccccaguccggccgcaucgucgucgacuacaugaugcagaagcccggcaagaccggcaccaucgucuaccagcgcggcguccuccucccccagaaggucuggugcgccuccggccgcuccaaggucaucaagggcucccucccccucaucggcgaggccgacugccuccacgagaaguacggcggccucaacaaguccaagcccuacuacaccggcgagcacgccaaggccaucggcaacugccccaucugggucaagaccccccucaagcucgccaacggcaccaaguaccgcccccccgccaagcuccucaaggagcgcggcuucuucggcgccaucgccggcuuccucgagggcggcugggagggcaugaucgccggcuggcacggcuacaccucccacggcgcccacggcgucgccgucgccgccgaccucaaguccacccaggaggccaucaacaagaucaccaagaaccucaacucccucuccgagcucgaggucaagaaccuccagcgccucuccggcgccauggacgagcuccacaacgagauccucgagcucgacgagaaggucgacgaccuccgcgccgacaccaucuccucccagaucgagcucgccguccuccucuccaacgagggcaucaucaacuccgaggacgagcaccuccucgcccucgagcgcaagcucaagaagaugcucggccccuccgccgucgacaucggcaacggcugcuucgagaccaagcacaagugcaaccagaccugccucgaccgcaucgccgccggcaccuucaacgccggcgaguucucccuccccaccuucgacucccucaacaucaccgccgccucccucaacgacgacggccucgacaaccacaccauccuccucuacuacuccaccgccgccuccucccucgccgucacccucaugcucgccaucuucaucgucuacauggucucccgcgacaacgucuccugcuccaucugccucuga

SEQ ID NO: 122463 - RNA, 1752 nt, Artificial Sequence
  derived and/or modified CDS sequence (opt2) from hemagglutinin__InfluenzaB__ABL76694
augaaggccaucaucguccuccucauggucgucaccuccaacgccgaccgcaucugcaccggcaucaccuccuccaacuccccccacgucgucaagaccgccacccagggcgaggucaacgucaccggcgucaucccccucaccaccacccccaccaagucccacuucgccaaccucaagggcaccaagacccgcggcaagcucugccccaacugccucaacugcaccgaccucgacgucgcccucggccgccccaugugcgucggcaccacccccuccgccaaggccuccauccuccacgagguccgccccgucaccuccggcugcuuccccaucaugcacgaccgcaccaagauccgccagcuccccaaccuccuccgcggcuacgagaacauccgccucuccacccagaacgucaucaacgccgagcgcgcccccggcggccccuaccgccucggcaccuccggcuccugccccaacgucaccucccgcgacggcuucuucgccaccauggccugggccgucccccgcgacaacaagaccgccaccaacccccucaccgucgagguccccuacaucugcaccaagggcgaggaccagaucaccgucuggggcuuccacuccgacaacaagacccagaugaagaaccucuacggcgacuccaacccccagaaguucaccuccuccgccaacggcgucaccacccacuacgucucccagaucggcggcuuccccaaccagaccgaggacggcggccucccccaguccggccgcaucgucgucgacuacaugguccagaagcccggcaagaccggcaccaucgucuaccagcgcggcguccuccucccccagaaggucuggugcgccuccggccgcuccaaggucaucaagggcucccucccccucaucggcgaggccgacugccuccacgagaaguacggcggccucaacaaguccaagcccuacuacaccggcgagcacgccaaggccaucggcaacugccccaucugggucaagaccccccucaagcucgccaacggcaccaaguaccgcccccccgccaagcuccucaaggagcgcggcuucuucggcgccaucgccggcuuccucgagggcggcugggagggcaugaucgccggcuggcacggcuacaccucccacggcgcccacggcgucgccgucgccgccgaccucaaguccacccaggaggccaucaacaagaucaccaagaaccucaacucccucuccgagcucgaggucaagaaccuccagcgccucuccggcgccauggacgagcuccacaacgagauccucgagcucgacgagaaggucgacgaccuccgcgccgacaccaucuccucccagaucgagcucgccguccuccucuccaacgagggcaucaucaacuccgaggacgagcaccuccucgcccucgagcgcaagcucaagaagaugcucggccccuccgccgucgacaucggcaacggcugcuucgagaccaagcacaagugcaaccagaccugccucgaccgcaucgccgccggcaccuucaacgccggcgaguucucccuccccaccuucgacucccucaacaucaccgccgccucccucaacgacgacggccucgacaaccacaccauccuccucuacuacuccaccgccgccuccucccucgccgucacccucaugaucgccaucuucaucgucuacauggucucccgcgacaacgucuccugcuccaucugccucuga

SEQ ID NO: 122464 - RNA, 1758 nt, Artificial Sequence
  derived and/or modified CDS sequence (opt2) from hemagglutinin__InfluenzaB__ABL76716
augaaggccaucaucguccuccucauggucgucaccuccaacgccgaccgcaucugcaccggcaucaccuccuccaacuccccccacgucgucaagaccgccacccagggcgaggucaacgucaccggcgucaucccccucaccaccacccccaccaagucccacuucgccaaccucaagggcaccgagacccgcggcaagcucugccccaagugccucaacugcaccgaccucgacgucgcccucggccgccccaagugcaccggcaacauccccuccgcccgcgucuccauccuccacgagguccgccccgucaccuccggcugcuuccccaucaugcacgaccgcaccaagauccgccagcuccccaaccuccuccgcggcuacgagcacauccgccucuccacccacaacgucaucaacgccgagaacgcccccggcggccccuacaagaucggcaccuccggcuccugccccaacgucaccaacggcaacggcuucuucgccaccauggccugggccguccccaagaacgacaacaacaagaccgccaccaacucccucaccaucgagguccccuacaucugcaccgagggcgaggaccagaucaccgucuggggcuuccacuccgacaacgagacccagauggccaagcucuacggcgacuccaagccccagaaguucaccuccuccgccaacggcgucaccacccacuacgucucccagaucggcggcuuccccaaccagaccgaggacggcggccucccccaguccggccgcaucgucgucgacuacaugguccagaaguccggcaagaccggcaccaucaccuaccagcgcggcauccuccucccccagaaggucuggugcgccuccggccgcuccaaggucaucaagggcucccucccccucaucggcgaggccgacugccuccacgagaaguacggcggccucaacaaguccaagcccuacuacaccggcgagcacgccaaggccaucggcaacugccccaucugggucaagaccccccucaagcucgucaacggcaccaaguaccgcccccccgccaagcuccucaaggagcgcggcuucuucggcgccaucgccggcuuccucgagggcggcugggagggcaugaucgccggcuggcacggcuacaccucccacggcgcccacggcgucgccgucgccgccgaccucaaguccacccaggaggccaucaacaagaucaccaagaaccucaacucccucuccgagcucgaggucaagaaccuccagcgccucuccggcgccauggacgagcuccacaacgagauccucgagcucgacgagaaggucgacgaccuccgcgccgacaccaucuccucccagaucgagcucgccguccuccucuccaacgagggcaucaucaacuccgaggacgagcaccuccucgcccucgagcgcaagcucaagaagaugcucggccccuccgccgucgagaucggcaacggcugcuucgagaccaagcacaagugcaaccagaccugccucgaccgcaucgccgccggcaccuucgacgccggcgaguucucccuccccaccuucgacucccucaacaucaccgccgccucccucaacgacgacggccucgacaaccacaccauccuccucuacuacuccaccgccgccuccucccucgccgucacccucaugaucgccaucuucgucgucuacauggucucccgcgacaacgucuccugcuccaucugccucuga

SEQ ID NO: 122465 - RNA, 1755 nt, Artificial Sequence
  derived and/or modified CDS sequence (opt2) from hemagglutinin__InfluenzaB__ABL76760
augaaggccaucaucguccuccucauggucgucaccuccaacgccgaccgcaucugcaccggcaucaccuccuccaacuccccccacgucgucaagaccgccacccagggcgaggucaacgucaccggcgucaucccccucaccaccacccccaccaagucccacuucgccaaccucaagggcaccaagacccgcggcaagcucugccccaccugccucaacugcaccgaccucgacgucgcccucggccgccccaugugcgucggcgucacccccuccgccaaggccuccauccuccacgagguccgccccgucaccuccggcugcuuccccaucaugcacgaccgcaccaagauccgccagcuccccaaccuccuccgcggcuacgagaagauccgccucuccacccagaacgucaucaacgccgagaaggcccccggcggccccuaccgccucggcaccuccggcuccugccccaacgccaccucccgcuccggcuucuucgccaccauggccugggccgucccccgcgacaacaacaagaccgccaccaacccccucaccaucgaggucccccacaucugcaccaaggaggaggaccagaucaccgucuggggcuuccacuccgacaacaagacccagaugaagaaccucuacggcgacuccaacccccagaaguucaccuccuccgccaacggcgucaccacccacuacgucucccagaucggcggcuuccccgaccagaccgaggacggcggccucccccaguccggccgcaucgucgucgacuacaugguccagaagcccggcaagaccggcaccaucgucuaccagcgcggcauccuccucccccagaaggucuggugcgccuccggccgcuccaaggucaucaagggcucccucccccucaucggcgaggccgacugccuccacgagaaguacggcggccucaacaaguccaagcccuacuacaccggcgagcacgccaaggccaucggcaacugccccaucugggucaagaccccccucaagcucgccaacggcaccaaguaccgcccccccgccaagcuccucaaggagcgcggcuucuucggcgccaucgccggcuuccucgagggcggcugggagggcaugaucgccggcuggcacggcuacaccucccacggcgcccacggcgucgccgucgccgccgaccucaaguccacccaggaggccaucaacaagaucaccaagaaccucaacucccucuccgagcucgaggucaagaaccuccagcgccucuccggcgccauggacgagcuccacaacgagauccucgagcucgacgagaaggucgacgaccuccgcgccgacaccaucuccucccagaucgagcucgccguccuccucuccaacgagggcaucaucaacuccgaggacgagcaccuccucgcccucgagcgcaagcucaagaagaugcucggccccuccgccgucgacaucggcaacggcugcuucgagaccaagcacaagugcaaccagaccugccucgaccgcaucgccgccggcaccuucgacgccggcgaguucucccuccccaccuucgacucccucaacaucaccgccgccucccucaacgacgacggccucgacaaccacaccauccuccucuacuacuccaccgccgccuccucccucgccgucacccucaugaucgccaucuucaucgucuacaugaucucccgcgacaacgucuccugcuccaucugccucuga

SEQ ID NO: 122466 - RNA, 1755 nt, Artificial Sequence
  derived and/or modified CDS sequence (opt2) from hemagglutinin__InfluenzaB__ABL76771
augaaggccaucaucguccuccucauggucgucaccuccaacgccgaccgcaucugcaccggcaucaccuccuccaacuccccccacgucgucaagaccgccacccagggcgaggucaacgucaccggcgucaucccccucaccaccacccccaccaagucccacuucgccaaccucaagggcaccaagacccgcggcaagcucugccccaccugccucaacugcaccgaccucgacgucgcccucggccgccccaugugcgucggcgucacccccuccgccaaggccuccauccuccacgagguccgccccgucaccuccggcugcuuccccaucaugcacgaccgcaccaagauccgccagcuccccaaccuccuccgcggcuacgagaagauccgccucuccacccagaacgucaucaacgccgagaaggcccccggcggccccuaccgccucggcaccuccggcuccugccccaacgccaccucccgcuccggcuucuucgccaccauggccugggccgucccccgcgacaacaacaagaccgccaccaacccccucaccaucgaggucccccacaucugcaccaaggaggaggaccagaucaccgucuggggcuuccacuccgacgacaagacccagaugaagaaccucuacggcgacuccaacccccagaaguucaccuccuccgccaacggcgucaccacccacuacgucucccagaucggcggcuuccccgaccagaccgaggacggcggccucccccaguccggccgcaucgucgucgacuacaugguccagaagcccggcaagaccggcaccaucgucuaccagcgcggcauccuccucccccagaaggucuggugcgccuccggccgcuccaaggucaucaagggcucccucccccucaucggcgaggccgacugccuccacgagaaguacggcggccucaacaaguccaagcccuacuacaccggcgagcacgccaaggccaucggcaacugccccaucugggucaagaccccccucaagcucgccaacggcaccaaguaccgcccccccgccaagcuccucaaggagcgcggcuucuucggcgccaucgccggcuuccucgagggcggcugggagggcaugaucgccggcuggcacggcuacaccucccacggcgcccacggcgucgccgucgccgccgaccucaaguccacccaggaggccaucaacaagaucaccaagaaccucaacucccucuccgagcucgaggucaagaaccuccagcgccucuccggcgccauggacgagcuccacaacgagauccucgagcucgacgagaaggucgacgaccuccgcgccgacaccaucuccucccagaucgagcucgccguccuccucuccaacgagggcaucaucaacuccgaggacgagcaccuccucgcccucgagcgcaagcucaagaagauccucggccccuccgccgucgacaucggcaacggcugcuucgagaccaagcacaagugcaaccagaccugccucgaccgcaucgccgccggcaccuucgacgccggcgaguucucccuccccaccuucgacucccucaacaucaccgccgccucccucaacgacgacggccucgacaaccacaccauccuccucuacuacuccaccgccgccuccucccucgccgucacccucaugaucgccaucuucaucgucuacaugaucucccgcgacaacgucuccugcuccaucugccucuga

SEQ ID NO: 122467 - RNA, 1755 nt, Artificial Sequence
  derived and/or modified CDS sequence (opt2) from hemagglutinin__InfluenzaB__ABL76782
augaaggccaucaucguccuccucauggucgucaccuccaacgccgaccgcaucugcaccggcaucaccuccuccaacuccccccacgucgucaagaccgccacccagggcgaggucaacgucaccggcgucaucccccucaccaccacccccaccaagucccacuucgccaaccucaagggcaccaagacccgcggcaagcucugccccaccugccucaacugcaccgaccucgacgucgcccucggcucccccaugugcgucggcaucacccccuccgccaaggccuccauccuccacgagguccgccccgucaccuccggcugcuuccccaucaugcacgaccgcaccaagauccgccagcuccccaaccuccuccgcggcuacgagaagauccgccucuccacccagaacgucaucaacaucgagaaggcccccggcggccccuaccgccucggcaccuccggcuccugccccaacgccaccucccgcuccggcuucuucgccaccauggccugggccgucccccgcgacaacaacaagaccgccaccaacccccucaccgucgaggucccccacaucugcaccaaggaggaggaccagaucaccgucuggggcuuccacuccgacaacaaggcccagaugaagaaccucuacggcgacuccaacccccagaaguucaccuccuccgccaacggcgucaccacccacuacgucucccagaucggcggcuuccccgaccagaccgaggacggcggccucccccaguccggccgcaucgucgucgacuacaugguccagaagcccggcaagaccggcaccaucgucuaccagcgcggcauccuccucccccagaaggucuggugcgccuccggccgcuccaaggucaucaagggcucccucccccucaucggcgaggccgacugccuccacgagaaguacggcggccucaacaaguccaagcccuacuacaccggcgagcacgccaaggccaucggcaacugccccaucugggucaagaccccccucaagcucgccaacggcaccaaguaccgcccccccgccaagcuccucaaggagcgcggcuucuucggcgccaucgccggcuuccucgagggcggcugggagggcaugaucgccggcuggcacggcuacaccucccacggcgcccacggcgucgccgucgccgccgaccucaaguccacccaggaggccaucaacaagaucaccaagaaccucaacucccucuccgagcucgaggucaagaaccuccagcgccucuccggcgccauggacgagcuccacaacgagauccucgagcucgacgagaaggucgacgaccuccgcgccgacaccaucuccucccagaucgagcucgccguccuccucuccaacgagggcaucaucaacuccgaggacgagcaccuccucgcccucgagcgcaagcucaagaagaugcucggccccuccgccgucgacaucggcaacggcugcuucgagaccaagcacaagugcaaccagaccugccucgaccgcaucgccgccggcaccuucaacgccggcgaguucucccuccccaccuucgacucccucaacaucaccgccgccucccucaacgacgacggccucgacaaccacaccauccuccucuacuacuccaccgccgccuccucccucgccgucacccucaugaucgccaucuucaucgucuacaugaucucccgcgacaacgucuccugcuccaucugccucuga

SEQ ID NO: 122468 - RNA, 1755 nt, Artificial Sequence; identical to SEQ ID NO: 122441
  derived and/or modified CDS sequence (opt2) from hemagglutinin__InfluenzaB__ABL76793

SEQ ID NO: 122469 - RNA, 1755 nt, Artificial Sequence; identical to SEQ ID NO: 122441
  derived and/or modified CDS sequence (opt2) from hemagglutinin__InfluenzaB__ABL76815

SEQ ID NO: 122470 - RNA, 1758 nt, Artificial Sequence
  derived and/or modified CDS sequence (opt2) from hemagglutinin__InfluenzaB__ABL76826
augaaggccaucaucguccuccucauggucgucaccuccaacgccgaccgcaucugcaccggcaucaccuccuccaacuccccccacgucgucaagaccgccacccagggcgaggucaacgucaccggcgucaucccccucaccaccacccccaccaagucccacuucgccaaccucaagggcaccaagacccgcggcaagcucugccccgagugccucaacugcaccgaccucgacgucgcccucggccgccccaagugcaccggcaacauccccuccgccaaggucuccauccuccacgagguccgccccgucaccuccggcugcuuccccaucaugcacgaccgcaccaagauccgccagcuccccaaccuccuccgcggcuacgagcacauccgccucuccacccacaacgucaucaacgccgagaaggcccccggcggccccuacaagaucggcaccuccggcuccugccccaacgucaccaacggcaacggcuucuucgccaccauggccugggccguccccaagaacgacaacaacaagaccgccaccaacucccucaccaucgagguccccuacaucugcaccgagggcgaggaccagaucaccgucuggggcuuccacuccgacaacgagacccagauggccaagcucuacggcgacuccaagccccagaaguucaccuccuccgccaacggcgucaccacccacuacgucucccagaucggcggcuuccccaaccagaccgaggacggcggccucccccaguccggccgcaucgucgucgacuacaugguccagaaguccggcaagaccggcaccaucaccuaccagcgcggcauccuccucccccagaaggucuggugcgccuccggccgcuccaaggucaucaagggcucccucccccucaucggcgaggccgacugccuccacgagaaguacggcggccucaacaaguccaagcccuacuacaccggcgagcacgccaaggccaucggcaacugccccaucugggucaagaccccccucaagcucgccaacggcaccaaguaccgcccccccgccaagcuccucaaggagcgcggcuucuucggcgccaucgccggcuuccucgagggcggcugggagggcaugaucgccggcuggcacggcuacaccucccacggcgcccacggcgucgccgucgccgccgaccucaaguccacccaggaggccaucaacaagaucaccaagaaccucaacucccucuccgagcucgaggucaagaaccuccagcgccucuccggcgccauggacgagcuccacaacgagauccucgagcucgacgagaaggucgacgaccuccgcgccgacaccaucuccucccagaucgagcucgccguccuccucuccaacgagggcaucaucaacuccgaggacgagcaccuccucgcccucgagcgcaagcucaagaagaugcucggccccuccgccgucgagaucggcaacggcugcuucgagaccaagcacaagugcaaccagaccugccucgaccgcaucgccgccggcaccuucgacgccggcgaguucucccuccccaccuucgacucccucaacaucaccgccgccucccucaacgacgacggccucgacaaccacaccauccuccucuacuacuccaccgccgccuccucccucgccgucacccucaugaucgccaucuucgucgucuacauggucucccgcgacaacgucuccugcuccaucugccucuga

SEQ ID NO: 122471 - RNA, 1758 nt, Artificial Sequence
  derived and/or modified CDS sequence (opt2) from hemagglutinin__InfluenzaB__ABL76837
augaaggccaucaucguccuccucauggucgucaccuccaacgccgaccgcaucugcaccggcaucaccuccuccaacuccccccacgucgucaagaccgccacccagggcgaggucaacgucaccggcgucaucccccucaccaccacccccaccaagucccacuucgccaaccucaagggcaccaagacccgcggcaagcucugccccaagugccucaacugcaccgaccucgacgucgcccucggccgccccaagugcaccggcaacauccccuccgccgaggucuccauccuccacgagguccgccccgucaccuccggcugcuuccccaucaugcacgaccgcaccaagguccgccagcuccccaaccuccuccgcggcuacgagcacauccgccucuccacccacaacgucaucaacgccgagaaggcccccggcggccccuacaagaucggcaccuccggcuccugccccaacgucaccaacggcaacggcuucuucgccaccauggccugggccguccccaagaacgacaacaacaagaccgccaccaacucccucaccgucgagguccccuacaucugcaccgagggcgaggaccagaucaccgucuggggcuuccacuccgacuccgagacccagauggccaagcucuacggcgacuccaagccccagaaguucaccuccuccuccaacggcgucaccacccacuacgucucccagaucggcggcuuccccaaccagaccgaggacggcggccucccccaguccggccgcaucgucgucgacuacaugguccagaaguccggcaagaccggcaccaucaccuaccagcgcggcauccuccucccccagaaggucuggugcgccuccggccgcuccaaggucaucaagggcucccucccccucaucggcgaggccgacugccuccacgagcgcuacggcggccucaacaaguccaagcccuacuacaccggcgagcacgccaaggccaucggcaacugccccaucugggucaagaccccccucaagcucgccaacggcaccaaguaccgcccccccgccaagcuccucaaggagcgcggcuucuucggcgccaucgccggcuuccucgagggcggcugggagggcaugaucgccggcuggcacggcuacaccucccacggcgcccacggcgucgccgucgccgccgaccucaaguccacccaggaggccaucaacaagaucaccaagaaccucaacucccucuccgagcucgaggucaagaaccuccagcgccucuccggcgccauggacgagcuccacaacgagauccucgagcucgacgagaaggucgacgaccuccgcgccgacaccaucuccucccagaucgagcucgccguccuccucuccaacgagggcaucaucaacuccgaggacgagcaccuccucgcccucgagcgcaagcucaagaagaugcucggccccuccgccgucgagaucggcaacggcugcuucgagaccaagcacaagugcaaccagaccugccucgaccgcaucgccgccggcaccuucgacgccggcgaguucucccuccccaccuucgacucccucaacaucaccgccgccucccucaacgacgacggccucgacaaccacaccauccuccucuacuacuccaccgccgccuccucccucgccgucacccucaugaucgccaucuucgucgucuacauggucucccgcgacaacgucuccugcuccaucugccucuga

SEQ ID NO: 122472 - RNA, 1755 nt, Artificial Sequence
  derived and/or modified CDS sequence (opt2) from hemagglutinin__InfluenzaB__ABL76848
augaaggccaucaucguccuccucauggucgucaccuccaacgccgaccgcaucugcaccggcaucaccuccuccaacuccucccacgucgucaagaccgccacccagggcgaggucaacgucaccggcgccaucccccucaccaccacccccaccaagucccacuucgccaaccucaagggcaccaagacccgcggcaagcucugccccaccugccucaacugcaccgaccucgacgucgcccucggccgccccaugugcgucggcaucaccccccccgccaaggccuccauccuccacgagguccgccccgucaccuccggcugcuuccccaucaugcacgaccgcaccaagauccgccagcuccccaaccuccuccgcggcuacgagaagauccgccucuccacccagaacgucaucaacgccgagaaggcccccggcggccccuaccgccucggcaccuccggcuccugccccaacgccaccuccaaguccggcuucuucgccaccauggccugggccgucccccgcgacaacaacaagaccgccaccaacccccucaccgucgaggucccccacaucugcaccaaggaggaggaccagaucaccgucuggggcuuccacuccgacaacaagacccagaugaagaaccucuacggcgacuccaacccccagaaguucaccuccuccgccaacggcaucaccacccacuacgucucccagaucggcggcuuccccgaccagaccgaggacggcggccucccccaguccggccgcaucgucgucgacuacaugguccagaagcccggcaagaccggcaccaucgucuaccagcgcggcauccuccucccccagaaggucuggugcgccuccggccgcuccaaggucaucaagggcucccucccccucaucggcgaggccgacugccuccacgagaaguacggcggccucaacaaguccaagcccuacuacaccggcgagcacgccaaggccaucggcaacugccccaucugggucaagaccccccucaagcucgccaacggcaccaaguaccgcccccccgccaagcuccucaaggagcgcggcuucuucggcgccaucgccggcuuccucgagggcggcugggagggcaugaucgccggcuggcacggcuacaccucccacggcgcccacggcgucgccgucgccgccgaccucaaguccacccaggaggccaucaacaagaucaccaagaaccucaacucccucuccgagcucgaggucaagaaccuccagcgccucuccggcgccauggacgagcuccacaacgagauccucgagcucgacgagaaggucgacgaccuccgcgccgacaccaucuccucccagaucgagcucgccguccuccucuccaacgagggcaucaucaacuccgaggacgagcaccuccucgcccucgagcgcaagcucaagaagaugcucggccccuccgccgucgacaucggcaacggcugcuucgagaccaagcacaagugcaaccagaccugccucgaccgcaucgccgccggcaccuucaacgccggcgaguucucccuccccaccuucgacucccucaacaucaccgccgccucccucaacgacgacggccucgacaaccacaccauccuccucuacuacuccaccgccgccuccucccucgccgucacccucaugaucgccaucuucaucgucuacaugaucucccgcgacaacgucuccugcuccaucugccucuga

SEQ ID NO: 122473 - RNA, 1755 nt, Artificial Sequence; identical to SEQ ID NO: 122441
  derived and/or modified CDS sequence (opt2) from hemagglutinin__InfluenzaB__ABL76859

SEQ ID NO: 122474 - RNA, 1755 nt, Artificial Sequence
  derived and/or modified CDS sequence (opt2) from hemagglutinin__InfluenzaB__ABL76881
augaaggccaucaucguccuccucauggucgucaccuccaacgccgaccgcaucugcaccggcaucaccuccuccaacuccccccacgucgucaagaccgccacccagggcgaggucaacgucaccggcgucaucccccucaccaccacccccaccaagucccacuucgccaaccucaagggcacccgcacccgcggcaagcucugccccgacugccucaacugcaccgaccucgacgucgcccucggccgccccaugugcgucggcaccacccccuccgccaaggccuccauccuccacgagguccgccccgucaccuccggcugcuuccccaucaugcacgaccgcaccaagauccgccagcuccccaaccuccuccgcggcuacgagaacauccgccucuccacccagaacgucaucgacgccgagaaggccuccggcggccccuaccgccucggcaccuccggcuccugccccaacgccaccuccaaguccggcuucuucgccaccauggccugggccguccccaaggacaacaacaagaacgccaccaacccccucaccgucgagguccccuacaucugcaccgagggcgaggaccagaucaccgucuggggcuuccacuccgacaacgagacccagaugaagaaccucuacggcgacuccaacccccagaaguucaccuccuccgccaacggcgucaccacccacuacgucucccagaucggcggcuuccccgaccagaaggaggacggcggccucccccaguccggccgcaucgucgucgacuacaugguccagaagcccggcaagaccggcaccaucgucuaccagcgcggcguccuccucccccagaaggucuggugcgccuccggccgcuccaaggucaucaagggcucccucccccucaucggcgaggccgacugccuccacgagaaguacggcggccucaacaaguccaagcccuacuacaccggcgagcacgccaaggccaucggcaacugccccaucugggucaagaccccccucaagcucgccaacggcaccaaguaccgcccccccgccaagcuccucaaggagcgcggcuucuucggcgccaucgccggcuuccucgagggcggcugggagggcaugaucgccggcuggcacggcuacaccucccacggcgcccacggcgucgccgucgccgccgaccucaaguccacccaggaggccaucaacaagaucaccaagaaccucaacucccucuccgagcucgaggucaagaaccuccagcgccucuccggcgccauggacgagcuccacaacgagauccucgagcucgacgagaaggucgacgaccuccgcgccgacaccaucuccucccagaucgagcucgccguccuccucuccaacgagggcaucaucaacuccgaggacgagcaccuccucgcccucgagcgcaagcucaagaagaugcucggccccuccgccgucgacaucggcaacggcugcuucgagaccaagcacaagugcaaccagaccugccucgaccgcaucgccgccggcaccuucaacgccggcgaguucucccuccccaccuucgacucccucaacaucaccgccgccucccucaacgacgacggccucgacaaccacaccauccuccucuacuacuccaccgccgccuccucccucgccgucacccucaugcucgccaucuucaucgucuacauggucucccgcgacaacgucuccugcuccaucugccucuga

SEQ ID NO: 122475 - RNA, 1755 nt, Artificial Sequence
  derived and/or modified CDS sequence (opt2) from hemagglutinin__InfluenzaB__ABL76892
augaaggccaucaucguccuccucauggucgucaccuccaacgccgaccgcaucugcaccggcaucaccuccuccaacuccccccacgucgucaagaccgccacccagggcgaggucaacgucaccggcgucaucccccucaccaccacccccaccaagucccacuucgccaaccucaagggcacccgcacccgcggcaagcucugccccgacugccucaacugcaccgaccucgacgucgcccucggccgccccaugugcgucggcaccacccccuccgccaaggccuccauccuccacgagguccgccccgucaccuccggcugcuuccccaucaugcacgaccgcaccaagauccgccagcuccccaaccuccuccgcggcuacgagaacauccgccucuccacccagaacgucaucgacgccgagaaggcccccggcggccccuaccgccucggcaccuccggcuccugccccaacgccaccuccaaguccggcuucuucgccaccauggccugggccguccccaaggacaacaacaagaacgccaccaacccccucaccgucgagguccccuacgucugcaccgagggcgaggaccagaucaccgucuggggcuuccacuccgacaacaagacccagaugaagaaccucuacggcgacuccaacccccagaaguucaccuccuccgccaacggcgucaccacccacuacgucucccagaucggcggcuuccccgaccagaccgaggacggcggccucccccaguccggccgcaucgucgucgacuacaugguccagaagcccggcaagaccggcaccaucgucuaccagcgcggcguccuccucccccagaaggucuggugcgccuccggccgcuccaaggucaucaagggcucccucccccucaucggcgaggccgacugccuccacgagaaguacggcggccucaacaaguccaagcccuacuacaccggcgagcacgccaaggccaucggcaacugccccaucugggucaagaccccccucaagcucgccaacggcaccaaguaccgcccccccgccaagcuccucaaggagcgcggcuucuucggcgccaucgccggcuuccucgagggcggcugggagggcaugaucgccggcuggcacggcuacaccucccacggcgcccacggcgucgccgucgccgccgaccucaaguccacccaggaggccaucaacaagaucaccaagaaccucaacucccucuccgagcucgaggucaagaaccuccagcgccucuccggcgccauggacgagcuccacaacgagauccucgagcucgacgagaaggucgacgaccuccgcgccgacaccaucuccucccagaucgagcucgccguccuccucuccaacgagggcaucaucaacuccgaggacgagcaccuccucgcccucgagcgcaagcucaagaagaugcucggccccuccgccgucgacaucggcaacggcugcuucgagaccaagcacaagugcaaccagaccugccucgaccgcaucgccgccggcaccuucaacgccggcgaguucucccuccccaccuucgacucccucaacaucaccgccgccucccucaacgacgacggccucgacaaccacaccauccuccucuacuacuccaccgccgccuccucccucgccgucacccucaugcucgccaucuucaucgucuacauggucucccgcgacaacgucuccugcuccaucugccucuga

SEQ ID NO: 122476 - RNA, 1755 nt, Artificial Sequence
  derived and/or modified CDS sequence (opt2) from hemagglutinin__InfluenzaB__ABL76903
augaaggccaucaucguccuccucauggucgucaccuccaacgccgaccgcaucugcaccggcaucaccuccuccaacuccccccacgucgucaagaccgccacccagggcgaggucaacgucaccggcgucaucccccucaccaccacccccaccaaguccuacuucgccaaccucaagggcacccgcacccgcggcaagcucugccccgacugccucaacugcaccgaccucgacgucgcccucggccgccccaugugcgucggcaccacccccuccgccaaggccuccauccuccacgagguccgccccgucaccuccggcugcuuccccaucaugcacgaccgcaccaagauccgccagcuccccaaccuccuccgcggcuacgagaacauccgccucuccacccaguccgucaucgacgccgagaaggcccccggcggccccuaccgccucggcaccuccggcuccugccccaacgccaccuccaaguccggcuucuucgccaccauggccugggccguccccaaggacaacaacaagaacgccaccaacccccucaccgucgagguccccuacaucugcaccgagggcgaggaccagaucaccgucuggggcuuccacuccgacgacaagacccagaugaagaaccucuacggcgacuccaacccccagaaguucaccuccuccgccaacggcgucaccacccacuacgucucccagaucggcggcuuccccgaccagaccgaggacggcggccucccccaguccggccgcaucgucgucgacuacaugauccagaagcccggcaagaccggcaccaucgucuaccagcgcggcguccuccucccccagaaggucuggugcgccuccggccgcuccaaggucaucaagggcucccucccccucaucggcgaggccgacugccuccacgagaaguacggcggccucaacaaguccaagcccuacuacaccggcgagcacgccaaggccaucggcaacugccccaucugggucaagaccccccucaagcucgccaacggcaccaaguaccgcccccccgccaagcuccucaaggagcgcggcuucuucggcgccaucgccggcuuccucgagggcggcugggagggcaugaucgccggcuggcacggcuacaccucccacggcgcccacggcgucgccgucgccgccgaccucaaguccacccaggaggccaucaacaagaucaccaagaaccucaacucccucuccgagcucgaggucaagaaccuccagcgccucuccggcgccauggacgagcuccacaacgagauccucgagcucgacgagaaggucgacgaccuccgcgccgacaccaucuccgcccagaucgagcucgccguccuccucuccaacgagggcaucaucaacuccgaggacgagcaccuccucgcccucgagcgcaagcucaagaagaugcucggccccuccgccgucgacaucggcaacggcugcuucgagaccaagcacaagugcaaccagaccugccucgaccgcaucgccgccggcaccuucaacgccggcgaguucucccuccccaccuucgacucccucaacaucaccgccgccucccucaacgacgacggccucgacaaccacaccauccuccucuacuacuccaccgccgccuccucccucgccgucacccucaugcucgccaucuucaucgucuacauggucucccgcgacaacgucuccugcuccaucugccucuga

SEQ ID NO: 122477 - RNA, 1758 nt, Artificial Sequence
  derived and/or modified CDS sequence (opt2) from hemagglutinin__InfluenzaB__ABL76914
augaaggccaucaucguccuccucauggucgucaccuccaacgccgaccgcaucugcaccggcaucaccuccuccaacuccccccacgucgucaagaccgccacccagggcgaggucaacgucaccggcgucaucccccucaccaccacccccaccaagucccacuucgccaaccucaagggcaccaagacccgcggcaagcucugccccaagugccucaacugcaccgaccucgacgucgcccucggccgccccaagugcaccggcaacauccccuccgccgaggucuccauccuccacgagguccgccccgucaccuccggcugcuuccccaucaugcacgaccgcaccaagauccgccagcuccccaaccuccuccgcggcuacgagcacauccgccucuccacccacaacgucaucaacgccgagaaggcccccggcggccccuacaagaucggcaccuccggcuccugccccaacgucaccaacggcaacggcuucuucgccaccauggccugggccguccccaagaacgacaacaacaagaccgccaccaacucccucaccaucgagguccccuacaucugcaccgagggcgaggaccagaucaccgucuggggcuuccacuccgacaacgaggcccagauggccaagcucuacggcgacuccaagccccagaaguucaccuccuccuccaacggcgucaccacccacuacgucucccagaucggcggcuuccccaaccagaccgaggacggcggccucccccaguccggccgcaucgucgucgacuacaugguccagaaguccggcaagaccggcaccaucaccuaccagcgcggcauccuccucccccagaaggucuggugcgccuccggccgcuccaaggucaucaagggcucccucccccucaucggcgaggccgacugccuccacgagcgcuacggcggccucaacaaguccaagcccuacuacaccggcgagcacgccaaggccaucggcaacugccccaucugggucaagaccccccucaagcucgccaacggcaccaaguaccgcccccccgccaagcuccucaaggagcgcggcuucuucggcgccaucgccggcuuccucgagggcggcugggagggcaugaucgccggcuggcacggcuacaccucccacggcgcccacggcgucgccgucgccgccgaccucaaguccacccaggaggccaucaacaagaucaccaagaaccucaacucccucuccgagcucgaggucaagaaccuccagcgccucuccggcgccauggacgagcuccacaacgagauccucgagcucgacgagaaggucgacgaccuccgcgccgacaccaucuccucccagaucgagcucgccguccuccucuccaacgagggcaucaucaacuccgaggacgagcaccuccucgcccucgagcgcaagcucaagaagaugcucggccccuccgccgucgagaucggcaacggcugcuucgagaccaagcacaagugcaaccagaccugccucgaccgcaucgccgccggcaccuucgacgccggcgaguucucccuccccaccuucgacucccucaacaucaccgccgccucccucaacgacgacggccucgacaaccacaccauccuccucuacuacuccaccgccgccuccucccucgccgucacccucaugaucgccaucuucgucgucuacauggucucccgcgacaacgucuccugcuccaucugccucuga

SEQ ID NO: 122478 - RNA, 1755 nt, Artificial Sequence
  derived and/or modified CDS sequence (opt2) from hemagglutinin__InfluenzaB__ABL76936
augaaggccaucaucguccuccucauggucgucaccuccaacgccgaccgcaucugcaccggcaucaccuccuccaacuccccccacgucgucaagaccgccacccagggcgaggucaacgucaccggcgucaucccccucaccaccacccccaccaagucccacuucgccaaccucaagggcaccaagacccgcggcaagcucugccccaccugccucaacugcaccgaccucgacgucgcccucggccgccccaugugcgucggcaccacccccuccgccaaggccuccauccuccacgagguccgccccgucaccuccggcugcuuccccaucaugcacgaccgcaccaagauccgccagcuccccaaccuccuccgcggcuacgagaagauccgccucuccacccagaacgucaucaacgccgagaaggcccccggcggccccuaccgccucggcaccuccggcuccugccccaacgccaccucccgcuccggcuucuucgccaccauggccugggccgucccccgcgacaacaacaagaccgccaccaacccccucaccgucgagguccccuacaucugcaccaaggaggaggaccagaucaccgucuggggcuuccacuccgacgacaagacccagaugaagaaccucuacggcgacuccaacccccagaaguucaccuccuccgccaacggcgucaccacccacuacgucucccagaucggcggcuuccccgaccagaccgaggacggcggccucccccaguccggccgcaucgucgucgacuacaugguccagaagcccggcaagaccggcaccaucgucuaccagcgcggcguccuccucccccagaaggucuggugcgccuccggccgcuccaaggucaucaagggcucccucccccucaucggcgaggccgacugccuccacgagaaguacggcggccucaacaaguccaagcccuacuacaccggcgagcacgccaaggccaucggcaacugccccaucugggucaagaccccccucaagcucgccaacggcaccaaguaccgcccccccgccaagcuccucaaggagcgcggcuucuucggcgccaucgccggcuuccucgagggcggcugggagggcaugaucgccggcuggcacggcuacaccucccacggcgcccacggcgucgccgucgccgccgaccucaaguccacccaggaggccaucaacaagaucaccaagaaccucaacucccucuccgagcucgaggucaagaaccuccagcgccucuccggcgccauggacgagcuccacaacgagauccucgagcucgacgagaaggucgacgaccuccgcgccgacaccaucuccucccagaucgagcucgccguccuccucuccaacgagggcaucaucaacuccgaggacgagcaccuccucgcccucgagcgcaagcucaagaagaugcucggccccuccgccgucgacaucggcaacggcugcuucgagaccaagcacaagugcaaccagaccugccucgaccgcaucgccgccggcaccuucaacgccggcgaguucucccuccccaccuucgacucccucaacaucaccgccgccucccucaacgacgacggccucgacaaccacaccauccuccucuacuacuccaccgccgccuccucccucgccgucacccucaugaucgccaucuucaucgucuacauggucucccgcgacaacgucuccugcuccaucugccucuga

SEQ ID NO: 122479 - RNA, 1755 nt, Artificial Sequence
  derived and/or modified CDS sequence (opt2) from hemagglutinin__InfluenzaB__ABL76947
augaaggccaucaucguccuccucauggucgucaccuccaacgccgaccgcaucugcaccggcaucaccuccuccaacuccccccacgucgucaagaccgccacccagggcgaggucaacgucaccggcgccaucccccucaccaccacccccaccaagucccacuucgccaaccucaagggcaccaagacccgcggcaagcucugccccaccugccucaacugcaccgaccucgacgucgcccucggccgccccaugugcgucggcaucacccccuccgccaaggccuccauccuccacgagguccgccccgucaccuccggcugcuuccccaucaugcacgaccgcaccaagauccgccagcuccccaaccuccuccgcggcuacgagaagauccgccucuccacccagaacgucaucaacgccgagaaggcccccggcggccccuaccgccucggcaccuccggcuccugccccaacgccaccucccgcuccggcuucuucgccaccauggccugggccgucccccgcgacaacaacaagaccgccaccaacccccucaccgucgaggucccccacaucugcaccaaggaggaggaccagaucaccgucuggggcuuccacuccgacgacaagacccagaugaagaaccucuacggcgacuccaacccccagaaguucaccuccuccaccaacggcaucaccacccacuacgucucccagaucggcggcuuccccgaccagaccgaggacggcggccucccccaguccggccgcaucgucgucgacuacaugguccagaagcccggcaagaccggcaccaucgucuaccagcgcggcauccuccucccccagaaggucuggugcgccuccggccgcuccaaggucaucaagggcucccucccccucaucggcgaggccgacugccuccacgagaaguacggcggccucaacaaguccaagcccuacuacaccggcgagcacgccaaggccaucggcaacugccccaucugggucaagaccccccucaagcucgccaacggcaccaaguaccgcccccccgccaagcuccucaaggagcgcggcuucuucggcgccaucgccggcuuccucgagggcggcugggagggcaugaucgccggcuggcacggcuacaccucccacggcgcccacggcgucgccgucgccgccgaccucaaguccacccaggaggccaucaacaagaucaccaagaaccucaacucccucuccgagcucgaggucaagaaccuccagcgccucuccggcgccauggacgagcuccacaacgagauccucgagcucgacgagaaggucgacgaccuccgcgccgacaccaucuccucccagaucgagcucgccguccuccucuccaacgagggcaucaucaacuccgaggacgagcaccuccucgcccucgagcgcaagcucaagaagaugcucggccccuccgccgucgacaucggcaacggcugcuucgagaccaagcacaagugcaaccagaccugccucgaccgcaucgccgccggcaccuucaacgccggcgaguucucccuccccaccuucgacucccucaacaucaccgccgccucccucaacgacgacggccucgacaaccacaccauccuccucuacuacuccaccgccgccuccucccucgccgucacccucaugaucgccaucuucaucgucuacaugaucucccgcgacaacgucuccugcuccaucugccucuga

SEQ ID NO: 122480 - RNA, 1758 nt, Artificial Sequence
  derived and/or modified CDS sequence (opt2) from hemagglutinin__InfluenzaB__ABL76958
augaaggccaucaucguccuccucauggucgucaccuccaacgccgaccgcaucugcaccggcaucaccuccuccaacuccccccacgucgucaagaccgccacccagggcgaggucaacgucaccggcgucaucccccucaccaccacccccaccaagucccacuucgccaaccucaagggcaccaagacccgcggcaagcucugccccaagugccucaacugcaccgaccucgacgucgcccucggccgccccaagugcaccggcaacauccccuccgccaaggucuccauccuccacgagguccgccccgucaccuccggcugcuuccccaucaugcacgaccgcaccaagauccgccagcuccccaaccuccuccgcggcuacgagcacauccgccucuccacccacaacgucaucaacgccgagaaggcccccggcggccccuacaagaucggcaccuccggcuccugccccaacgucaccaacggcaacggcuucuucgccaccauggccugggccguccccaagaacgacaacaacaagaccgccaccaacucccucaccaucgagguccccuacaucugcaccgagggcgaggaccagaucaccgucuggggcuuccacuccgacaacgaggcccagauggccaagcucuacggcgacuccaagccccagaaguucaccuccuccgccaacggcgucaccacccacuacgucucccagaucggcggcuuccccaaccagaccgaggacggcggccucccccaguccggccgcaucgucgucgacuacaugguccagaaguccggcaagaccggcaccaucaccuaccagcgcggcauccuccucccccagaaggucuggugcgccuccggccgcuccaaggucaucaagggcucccucccccucaucggcgaggccgacugccuccacgagaaguacggcggccucaacaaguccaagcccuacuacaccggcgagcacgccaaggccaucggcaacugccccaucugggucaagaccccccucaagcucgccaacggcaccaaguaccgcccccccgccaagcuccucaaggagcgcggcuucuucggcgccaucgccggcuuccucgagggcggcugggagggcaugaucgccggcuggcacggcuacaccucccacggcgcccacggcgucgccgucgccgccgaccucaaguccacccaggaggccaucaacaagaucaccaagaaccucaacucccucuccgagcucgaggucaagaaccuccagcgccucuccggcgccauggacgagcuccacaacgagauccucgagcucgacgagaaggucgacgaccuccgcgccgacaccaucuccucccagaucgagcucgccguccuccucuccaacgagggcaucaucaacuccgaggacgagcaccuccucgcccucgagcgcaagcucaagaagaugcucggccccuccgccgucgagaucggcaacggcugcuucgagaccaagcacaagugcaaccagaccugccucgaccgcaucgccgccggcaccuucaacgccggcgaguucucccuccccaccuucgacucccucaacaucaccgccgccucccucaacgacgacggccucgacaaccacaccauccuccucuacuacuccaccgccgccuccucccucgccgucacccucaugaucgccaucuucgucgucuacauggucucccgcgacaacaucuccugcuccaucugccucuga

SEQ ID NO: 122481 - RNA, 1758 nt, Artificial Sequence
  derived and/or modified CDS sequence (opt2) from hemagglutinin__InfluenzaB__ABL76969
augaaggccaucaucguccuccucauggucgucaccuccaacgccgaccgcaucugcaccggcaucaccuccuccaacuccccccacgucgucaagaccgccacccagggcgaggucaacgucaccggcgucaucccccucaccaccacccccaccaagucccacuucgccaaccucaagggcacccgcacccgcggcaagcucugccccaagugccucaacugcaccgaccucgacgucgcccucggccgccccaagugcaccggcaacauccccuccgccaaggucuccauccuccacgagguccgccccgucaccuccggcugcuuccccaucaugcacgaccgcaccaagauccgccagcuccccaaccuccuccgcggcuacgagcacauccgccucuccauccacaacgucaucaacgccgagaaggcccccggcggccccuacaagaucggcaccuccggcuccugccccaacgucaccaacggcaacggcuucuucgccaccauggccugggccguccccaagaacgacaacaacaagaccgccaccaacucccucaccaucgagguccccuacaucugcaccgagggcgaggaccagaucaccgucuggggcuuccacuccgacaacgaggcccagauggccaagcucuacggcgacuccaagccccagaaguucaccuccuccgccaacggcgucaccacccacuacgucucccagaucggcggcuuccccaaccagaccgaggacggcggccucccccaguccggccgcaucgucgucgacuacaugguccagaaguccggcaagaccggcaccaucaccuaccagcgcggcauccuccucccccagaaggucuggugcgccuccggccgcuccaaggucaucaagggcucccucccccucaucggcgaggccgacugccuccacgagaaguacggcggccucaacaaguccaagcccuacuacaccggcgagcacgccaaggccaucggcaacugccccaucugggucaagaccccccucaagcucgccaacggcaccaaguaccgcccccccgccaagcuccucaaggagcgcggcuucuucggcgccaucgccggcuuccucgagggcggcugggagggcaugaucgccggcuggcacggcuacaccucccacggcgcccacggcgucgccgucgccgccgaccucaaguccacccaggaggccaucaacaagaucaccaagaaccucaacucccucuccgagcucgaggucaagaaccuccagcgccucuccggcgccauggacgagcuccacaacgagauccucgagcucgacgagaaggucgacgaccuccgcgccgacaccaucuccucccagaucgagcucgccguccuccucuccaacgagggcaucaucaacuccgaggacgagcaccuccucgcccucgagcgcaagcucaagaagaugcucggccccuccgccgucgagaucggcaacggcugcuucgagaccaagcacaagugcaaccagaccugccucgaccgcaucgccgccggcaccuucgacgccggcgaguucucccuccccaccuucgacucccucaacaucaccgccgccucccucaacgacgacggccucgacaaccacaccauccuccucuacuacuccaccgccgccuccucccucgccgucacccucaugaucgccaucuucgucgucuacauggucucccgcgacaacgucuccugcuccaucugccucuga

SEQ ID NO: 122482 - RNA, 1755 nt, Artificial Sequence
  derived and/or modified CDS sequence (opt2) from hemagglutinin__InfluenzaB__ABL76980
augaaggccaucaucguccuccucauggucgucaccuccaacgccgaccgcaucugcaccggcaucaccuccuccaacuccccccacgucgucaagaccgccacccagggcgaggucaacgucaccggcgucaucccccucaccaccacccccaccaagucccacuucgccaaccucaagggcaccaagacccgcggcaagcucugccccaccugccucaacugcaccgaccucgacgucgcccucggccgccccaugugcgucggcaucacccccuccgccaaggccuccauccuccacgagguccgccccgucaccuccggcugcuuccccaucaugcacgaccgcaccaagauccgccagcuccccaaccuccuccgcggcuacgagaagauccgccucuccacccagaacgucaucaacgccgagaaggcccccggcggccccuaccgccucggcaccuccggcuccugccccaacgccaccuccaaguccggcuucuucgccaccauggccugggccgucccccgcgacaacaacaagaccgccaccaacccccucaccgucgagguccccuacaucugcaccaaggaggaggaccagaucaccgucuggggcuuccacuccgacaacaagacccagaugaagaaccucuacggcgacuccgacccccagaaguucaccuccuccgccaacggcgucaccacccacuacgucucccagaucggcggcuuccccgaccagaccgaggacggcggccucccccaguccggccgcaucgucgucgacuacaugguccagaagcccggcaagaccggcaccaucgucuaccagcgcggcauccuccucccccagaaggucuggugcgccuccggccgcuccaaggucaucaagggcucccucccccucaucggcgaggccgacugccuccacgagaaguacggcggccucaacaaguccaagcccuacuacaccggcgagcacgccaaggccaucggcaacugccccaucugggucaagaccccccucaagcucgccaacggcaccaaguaccgcccccccgccaagcuccucaaggagcgcggcuucuucggcgccaucgccggcuuccucgagggcggcugggagggcaugaucgccggcuggcacggcuacaccucccacggcgcccacggcgucgccgucgccgccgaccucaaguccacccaggaggccaucaacaagaucaccaagaaccucaacucccucuccgagcucgaggucaagaaccuccagcgccucuccggcgccauggacgagcuccacaacgagauccucgagcucgacgagaaggucgacgaccuccgcgccgacaccaucuccucccagaucgagcucgccguccuccucuccaacgagggcaucaucaacuccgaggacgagcaccuccucgcccucgagcgcaagcucaagaagaugcucggccccuccgccgucgacaucggcaacggcugcuucgagaccaagcacaagugcaaccagaccugccucgaccgcaucgccgccggcaccuucaacgccggcgaguucucccuccccaccuucgacucccucaacaucaccgccgccucccucaacgacgacggccucgacaaccacaccauccuccucuacuacuccaccgccgccuccucccucgccgucacccucaugaucgccaucuucaucgucuacaugaucucccgcgacaacgucuccugcuccaucugccucuga

SEQ ID NO: 122483 - RNA, 1752 nt, Artificial Sequence
  derived and/or modified CDS sequence (opt2) from hemagglutinin__InfluenzaB__ABL76991
augaaggccaucaucguccuccucauggucgucaccuccaacgccgaccgcaucugcaccggcaucaccuccuccaacuccccccacgucgucaagaccgccacccagggcgaggucaacgucaccggcgucaucccccucaccaccacccccaccaagucccacuucgccaaccucaagggcaccaagacccgcggcaagcucugccccaacugccucaacugcaccgaccucgacgucgcccucggccgccccaugugcaucggcaucacccccuccgccaaggccuccauccuccacgagguccgccccgucaccuccggcugcuuccccaucaugcacgaccgcaccaagauccgccagcuccccaaccuccuccgcggcuacgagcacauccgccucuccacccacaacgucaucaacgccgagcgcgcccccggcggccccuaccgccucggcaccuccggcuccugccccaacgucaccucccgcuccggcuucuucgccaccauggccugggccgucccccgcgacaacaagaccgccaccaacccccucaccgucgagguccccuacaucugcaccaagggcgaggaccagaucaccgucuggggcuuccacuccgacaacaagauccagaugaagaaccucuacggcgacuccaacccccagaaguucaccuccuccgccaacggcaucaccacccacuacgucucccagaucggcggcuuccccaaccagaccgaggacggcggccucccccaguccggccgcaucgucgucgacuacaugguccagaagcccggcaagaccggcaccaucgucuaccagcgcggcguccuccucccccagaaggucuggugcgccuccggccgcuccaaggucaucaagggcucccucccccucaucggcgaggccgacugccuccacgagaaguacggcggccucaacaaguccaagcccuacuacaccggcgagcacgccaaggccaucggcaacugccccaucugggucaagaccccccucaagcucgccaacggcaccaaguaccgcccccccgccaagcuccucaaggagaagggcuucuucggcgccaucgccggcuuccucgagggcggcugggagggcaugaucgccggcuggcacggcuacaccucccacggcgcccacggcgucgccgucgccgccgaccucaaguccacccaggaggccaucaacaagaucaccaagaaccucaacucccucuccgagcucgaggucaagaaccuccagcgccucuccggcgccauggacgagcuccacaacgagauccucgagcucgacgagaaggucgacgaccuccgcgccgacaccaucuccucccagaucgagcucgccguccuccucuccaacgagggcaucaucaacuccgaggacgagcaccuccucgcccucgagcgcaagcucaagaagaugcucggccccuccgccgucgacaucggcaacggcugcuucgagaccaagcacaagugcaaccagaccugccucgaccgcaucgccgccggcaccuucaacgccggcgaguucucccuccccaccuucgacucccucaacaucaccgccgccucccucaacgacgacggccucgacaaccacaccauccuccucuacuacuccaccgccgccuccucccucgccgucacccucaugaucgccaucuucaucgucuacauggucucccgcgacaacgucuccugcuccaucugccucuga

SEQ ID NO: 122484 - RNA, 1755 nt, Artificial Sequence
  derived and/or modified CDS sequence (opt2) from hemagglutinin__InfluenzaB__ABL77002
augaaggccaucaucguccuccucauggucgucaccuccaacgccgaccgcaucugcaccggcaucaccuccuccaacuccccccacgucgucaagaccgccacccagggcgaggucaacgucaccggcgucaucccccucaccaccacccccaccaagucccacuucgccaaccucaagggcaccaagacccgcggcaagcucugccccaccugccucaacugcaccgaccucgacgucgcccucggccgccccaugugcgucggcgucacccccuccgccaaggccuccauccuccacgagguccgccccgucaccuccggcugcuuccccaucaugcacgaccgcaccaagauccgccagcuccccaaccuccuccgcggcuacgagaagauccgccucuccacccagaacgucaucaacgccgagaaggcccccggcggccccuaccgccucggcaccuccggcuccugccccaacgccaccucccgcuccggcuucuucgccaccauggccugggccgucccccgcgacaacaacaagaccgccaccaacccccucaccaucgaggucccccacaucugcaccaaggaggaggaccagaucaccaucuggggcuuccacuccgacgacaagacccagaugaagaaccucuacggcgacuccaacccccagaaguucaccuccuccgccaacggcgucaccacccacuacgucucccagaucggcggcuuccccgaccagaccgaggacggcggccucccccaguccggccgcaucgucgucgacuacaugguccagaagcccggcaagaccggcaccaucgucuaccagcgcggcauccuccucccccagaaggucuggugcgccuccggccgcuccaaggucaucaagggcucccucccccucaucggcgaggccgacugccuccacgagaaguacggcggccucaacaaguccaagcccuacuacaccggcgagcacgccaaggccaucggcaacugccccaucugggucaagaccccccucaagcucgccaacggcaccaaguaccgcccccccgccaagcuccucaaggagcgcggcuucuucggcgccaucgccggcuuccucgagggcggcugggagggcaugaucgccggcuggcacggcuacaccucccacggcgcccacggcgucgccgucgccgccgaccucaaguccacccaggaggccaucaacaagaucaccaagaaccucaacucccucuccgagcucgaggucaagaaccuccagcgccucuccggcgccauggacgagcuccacaacgagauccucgagcucgacgagaaggucgacgaccuccgcgccgacaccaucuccucccagaucgagcucgccguccuccucuccaacgagggcaucaucaacuccgaggacgagcaccuccucgcccucgagcgcaagcucaagaagaugcucggccccuccgccgucgacaucggcaacggcugcuucgagaccaagcacaagugcaaccagaccugccucgaccgcaucgccgccggcaccuucgacgccggcgaguucucccuccccaccuucgacucccucaacaucaccgccgccucccucaacgacgacggccucgacaaccacaccauccuccucuacuacuccaccgccgccuccucccucgccgucacccucaugaucgccaucuucaucgucuacaugaucucccgcgacaacgucuccugcuccaucugccucuga

SEQ ID NO: 122485 - RNA, 1755 nt, Artificial Sequence
  derived and/or modified CDS sequence (opt2) from hemagglutinin__InfluenzaB__ABL77013
augaaggccaucaucguccuccucauggucgucaccuccaacgccgaccgcaucugcaccggcaucaccuccuccaacuccccccacgucgucaagaccgccacccagggcgaggucaacgucaccggcgucaucccccucaccaccacccccaccaaguccuacuucgccaaccucaagggcaccaagacccgcggcaagcucugccccaccugccucaacugcaccgaccucgacgucgcccucggccgccccaugugcgucggcaucacccccuccgccaaggccuccauccuccacgagguccgccccgucaccuccggcugcuuccccaucaugcacgaccgcaccaagauccgccagcuccccaaccuccuccgcggcuacgagaagauccgccucuccacccagaacgucaucaacgccgagaaggcccccggcggccccuaccgccucggcaccuccggcuccugccccaacgccaccuccaaguccggcuucuucgccaccauggccugggccgucccccgcgacaacaacaagaccgccaccaacccccucaccgucgagguccccuacaucugcaccaaggaggaggaccagaucaccgucuggggcuuccacuccgacaacaagaaccagaugaagaaccucuacggcgacuccgacccccagaaguucaccuccuccgccaacggcgucaccacccacuacgucucccagaucggcggcuuccccgaccagaccgaggacggcggccucccccaguccggccgcaucgucgucgacuacaugguccagaagcccggcaagaccggcaccaucgucuaccagcgcggcauccuccucccccagaaggucuggugcgccuccggccgcuccaaggucaucaagggcucccucccccucaucggcgaggccgacugccuccacgagaaguacggcggccucaacaaguccaagcccuacuacaccggcgagcacgccaaggccaucggcaacugccccaucugggucaagaccccccucaagcucgccaacggcaccaaguaccgcccccccgccaagcuccucaaggagcgcggcuucuucggcgccaucgccggcuuccucgagggcggcugggagggcaugaucgccggcuggcacggcuacaccucccacggcgcccacggcgucgccgucgccgccgaccucaaguccacccaggaggccaucaacaagaucaccaagaaccucaacucccucuccgagcucgaggucaagaaccuccagcgccucuccggcgccauggacgagcuccacaacgagauccucgagcucgacgagaaggucgacgaccuccgcgccgacaccaucuccucccagaucgagcucgccguccuccucuccaacgagggcaucaucaacuccgaggacgagcaccuccucgcccucgagcgcaagcucaagaagaugcucggccccuccgccgucgacaucggcaacggcugcuucgagaccaagcacaagugcaaccagaccugccucgaccgcaucgccgccggcaccuucaacgccggcgaguucucccuccccaccuucgacucccucaacaucaccgccgccucccucaacgacgacggccucgacaaccacaccauccuccucuacuacuccaccgccgccuccucccucgccgucacccucaugaucgccaucuucaucgucuacaugaucucccgcgacaacgucuccugcuccaucugccucuga

SEQ ID NO: 122486 - RNA, 1755 nt, Artificial Sequence
  derived and/or modified CDS sequence (opt2) from hemagglutinin__InfluenzaB__ABL77024
augaaggccaucaucguccuccucauggucgucaccuccaacgccgaccgcaucugcaccggcaucaccuccuccaacuccccccacgucgucaagaccgccacccagggcgaggucaacgucaccggcgccaucccccucaccaccacccccaccaagucccacuucgccaaccucaagggcaccaagacccgcggcaagcucugccccaccugccucaacugcaccgaccucgacgucgcccucggccgccccaugugcgucggcaucacccccuccgccaaggccuccauccuccacgagguccgccccgucaccuccggcugcuuccccaucaugcacgaccgcaccaagauccgccagcuccccaaccuccuccgcggcuacgagaagauccgccucuccacccagaacgucaucaacgccgagaaggcccccggcggccccuaccgccucggcaccuccggcuccugccccaacgccaccuccaaguccggcuucuucgccaccauggccugggccgucccccgcgacaacaacaagaccgccaccaacccccucaccgucgaggucccccacaucugcaccaaggaggaggaccagaucaccgucuggggcuuccacuccgacgacaagacccagaugaagaaccucuacggcgacuccaacccccagaaguucaccuccuccgccaacggcaucaccacccacuacgucucccagaucggcggcuuccccgaccagaccgaggacggcggccucccccaguccggccgcaucgucgucgacuacaugguccagaagcccggcaagaccggcaccaucgucuaccagcgcggcauccuccucccccagaaggucuggugcgccuccggccgcuccaaggucaucaagggcucccucccccucaucggcgaggccgacugccuccacgagaaguacggcggccucaacaaguccaagcccuacuacaccggcgagcacgccaaggccaucggcaacugccccaucugggucaagaccccccucaagcucgccaacggcaccaaguaccgcccccccgccaagcuccucaaggagcgcggcuucuucggcgccaucgccggcuuccucgagggcggcugggagggcaugaucgccggcuggcacggcuacaccucccacggcgcccacggcgucgccgucgccgccgaccucaaguccacccaggaggccaucaacaagaucaccaagaaccucaacucccucuccgagcucgaggucaagaaccuccagcgccucuccggcgccauggacgagcuccacaacgagauccucgagcucgacgagaaggucgacgaccuccgcgccgacaccaucuccucccagaucgagcucgccguccuccucuccaacgagggcaucaucaacuccgaggacgagcaccuccucgcccucgagcgcaagcucaagaagaugcucggccccuccgccgucgacaucggcaacggcugcuucgagaccaagcacaagugcaaccagaccugccucgaccgcaucgccgccggcaccuucaacgccggcgaguucucccuccccaccuucgacucccucaacaucaccgccgccucccucaacgacgacggccucgacaaccacaccauccuccucuacuacuccaccgccgccuccucccucgccgucacccucaugaucgccaucuucaucgucuacaugaucucccgcgacaacgucuccugcuccaucugccucuga

SEQ ID NO: 122487 - RNA, 1755 nt, Artificial Sequence
  derived and/or modified CDS sequence (opt2) from hemagglutinin__InfluenzaB__ABL77035
augaaggccaucaucguccuccucauggucgucaccuccaacgccgaccgcaucugcaccggcaucaccuccuccaacuccccccacgucgucaagaccgccacccagggcgaggucaacgucaccggcgccaucccccucaccaccacccccaccaagucccacuucgccaaccucaagggcaccaagacccgcggcaagcucugccccaccugccucaacugcaccgaccucgacgucgcccucggccgccccaugugcgucggcaucacccccuccgccaaggccuccauccuccacgagguccgccccgucaccuccggcugcuuccccaucaugcacgaccgcaccaagauccgccagcuccccaaccuccuccgcggcuacgagaagauccgccucuccacccagaacgucaucaacgccgagaaggcccccggcggccccuaccgccucggcaccuccggcuccugccccaacgccaccucccgcuccggcuucuucgccaccauggccugggccgucccccgcgacaacaacaagaccgccaccaacccccucaccgucgaggucccccacaucugcaccaaggaggaggaccagaucaccgucuggggcuuccacuccgacgacaagacccagaugaagaaccucuacggcgacuccaacccccagaaguucaccuccuccgccaacggcgucaccacccacuacgucucccagaucggcggcuuccccgaccagaccgaggacggcggccucccccaguccggccgcaucgucgucgacuacaugguccagaagcccggcaagaccggcaccaucgucuaccagcgcggcauccuccucccccagaaggucuggugcgccuccggccgcuccaaggucaucaagggcucccucccccucaucggcgaggccgacugccuccacgagaaguacggcggccucaacaaguccaagcccuacuacaccggcgagcacgccaaggccaucggcaacugccccaucugggucaagaccccccucaagcucgccaacggcaccaaguaccgcccccccgccaagcuccucaaggagcgcggcuucuucggcgccaucgccggcuuccucgagggcggcugggagggcaugaucgccggcuggcacggcuacaccucccacggcgcccacggcgucgccgucgccgccgaccucaaguccacccaggaggccaucaacaagaucaccaagaaccucaacucccucuccgagcucgaggucaagaaccuccagcgccucuccggcgccauggacgagcuccacaacgagauccucgagcucgacgagaaggucgacgaccuccgcgccgacaccaucuccucccagaucgagcucgccguccuccucuccaacgagggcaucaucaacuccgaggacgagcaccuccucgcccucgagcgcaagcucaagaagaugcucggccccuccgccgucgacaucggcaacggcugcuucgagaccaagcacaagugcaaccagaccugccucgaccgcaucgccgccggcaccuucaacgccggcgaguucucccuccccaccuucgacucccucaacaucaccgccgccucccucaacgacgacggccucgacaaccacaccauccuccucuacuacuccaccgccgccuccucccucgccgucacccucaugaucgccaucuucaucgucuacaugaucucccgcgacaacgucuccugcuccaucugccucuga

SEQ ID NO: 122488 - RNA, 1755 nt, Artificial Sequence
  derived and/or modified CDS sequence (opt2) from hemagglutinin__InfluenzaB__ABL77046
augaaggccaucaucguccuccucauggucgucaccuccaacgccgaccgcaucugcaccggcaucaccuccuccaacuccccccacgucgucaagaccgccacccagggcgaggucaacgucaccggcgccaucccccucaccaccacccccaccaagucccacuucgccaaccucaagggcaccaagacccgcggcaagcucugccccaccugccucaacugcaccgaccucgacgucgcccucggccgccccaugugcgucggcaucacccccuccgccaaggccuccauccuccacgagguccgccccgucaccuccggcugcuuccccaucaugcacgaccgcaccaagauccgccagcuccccaaccuccuccgcggcuacgagaagauccgccucuccacccagaacgucaucaacgccgagaaggcccccggcggccccuaccgccucggcaccuccggcuccugccccaacgccaccuccaaguccggcuucuucgccaccauggccugggccgucccccgcgacaacaacaagaccgccaccaacccccucaccgucgaggucccccacaucugcaccaaggaggaggaccagaucaccgucuggggcuuccacuccgacgacaagacccagaugaagaaccucuacggcgacuccaacccccagaaguucaccuccuccgccaacggcaucaccacccacuacgucucccagaucggcggcuuccccgaccagaccgaggacggcggccucccccaguccggccgcaucgucgucgacuacaugguccagaagcccggcaagaccggcaccaucgucuaccagcgcggcauccuccucccccagaaggucuggugcgccuccggccgcuccaaggucaucaagggcucccucccccucaucggcgaggccgacugccuccacgagaaguacggcggccucaacaaguccaagcccuacuacaccggcgagcacgccaaggccaucggcaacugccccaucugggucaagaccccccucaagcucgccaacggcaccaaguaccgcccccccgccaagcuccucaaggagcgcggcuucuucggcgccaucgccggcuuccucgagggcggcugggagggcaugaucgccggcuggcacggcuacaccucccacggcgcccacggcgucgccgucgccgccgaccucaaguccacccaggaggccaucaacaagaucaccaagaaccucaacucccucuccgagcucgaggucaagaaccuccagcgccucuccggcgccauggacgagcuccacaacgagauccucgagcucgacgagaaggucgacgaccuccgcgccgacaccaucuccucccagaucgagcucgccguccuccucuccaacgagggcaucaucaacuccgaggacgagcaccuccucgcccucgagcgcaagcucaagaagaugcucggccccuccgccaucgacaucggcaacggcugcuucgagaccaagcacaagugcaaccagaccugccucgaccgcaucgccgccggcaccuucaacgccggcgaguucucccuccccaccuucgacucccucaacaucaccgccgccucccucaacgacgacggccucgacaaccacaccauccuccucuacuacuccaccgccgccuccucccucgccgucacccucaugaucgccaucuucaucgucuacaugaucucccgcgacaacgucuccugcuccaucugccucuga

SEQ ID NO: 122489 - RNA, 1755 nt, Artificial Sequence
  derived and/or modified CDS sequence (opt2) from hemagglutinin__InfluenzaB__ABL77057
augaaggccaucaucguccuccucauggucgucaccuccaaggccgaccgcaucugcaccggcaucaccuccuccaacuccccccacgucgucaagaccgccacccagggcgaggucaacgucaccggcgccaucccccucaccaccacccccaccaagucccacuucgccaaccucaagggcaccaagacccgcggcaagcucugccccaccugccucaacugcaccgaccucgacgucgcccucggccgccccaugugcgucggcaucacccccuccgccaaggccuccauccuccacgaggucaagcccgucaccuccggcugcuuccccaucaugcacgaccgcaccaagauccgccagcuccccaaccuccuccgcggcuacgagaagauccgccucuccacccagaacgucaucaacgccgagaaggcccccggcggccccuaccgccucggcaccuccggcuccugccccaacgccaccuccaaguccggcuucuucgccaccauggccugggccgucccccgcgacaacaacaagaccgccaccaacccccucaccgucgaggucccccacaucugcaccaaggaggaggaccagaucaccgucuggggcuuccacuccgacaacaagccccagaugaagaaccucuacggcgacuccaacccccagaaguucaccuccuccgccaacggcaucaccacccacuacgucucccagaucggcggcuuccccgagcagaccgaggacggcggccucccccaguccggccgcaucgucgucgacuacaugguccagaagcccggcaagaccggcaccaucgucuaccagcgcggcauccuccucccccagaaggucuggugcgccuccggccgcuccaaggucaucaagggcucccucccccucaucggcgaggccgacugccuccacgagaaguacggcggccucaacaaguccaagcccuacuacaccggcgagcacgccaaggccaucggcaacugccccaucugggucaagaccccccucaagcucgccaacggcaccaaguaccgcccccccgccaagcuccucaaggagcgcggcuucuucggcgccaucgccggcuuccucgagggcggcugggagggcaugaucgccggcuggcacggcuacaccucccacggcgcccacggcgucgccgucgccgccgaccucaaguccacccaggaggccaucaacaagaucaccaagaaccucaacucccucuccgagcucgaggucaagaaccuccagcgccucuccggcgccauggacgagcuccacaacgagauccucgagcucgacgagaaggucgacgaccuccgcgccgacaccaucuccucccagaucgagcucgccguccuccucuccaacgagggcaucaucaacuccgaggacgagcaccuccucgcccucgagcgcaagcucaagaagaugcucggccccuccgccgucgacaucggcaacggcugcuucgagaccaagcacaagugcaaccagaccugccucgaccgcaucgccgccggcaccuucaacgccggcgaguucucccuccccaccuucgacucccucaacaucaccgccgccucccucaacgacgacggccucgacaaccacaccauccuccucuacuacuccaccgccgccuccucccucgccgucacccucaugaucgccaucuucaucgucuacaugaucucccgcgacaacgucuccugcuccaucugccucuga

SEQ ID NO: 122490 - RNA, 1758 nt, Artificial Sequence
  derived and/or modified CDS sequence (opt2) from hemagglutinin__InfluenzaB__ABL77068
augaaggccaucaucguccuccucauggucgucaccuccaacgccgaccgcaucugcaccggcaucaccuccuccaacuccccccacgucgucaagaccgccacccagggcgaggucaacgucaccggcgucaucccccucaccaccacccccaccaagucccacuucgccaaccucaagggcaccaagacccgcggcaagcucugccccaagugccucaacugcaccgaccucgacgucgcccucggccgccccaagugcaccggcaacauccccuccgccaaggucuccauccuccacgagguccgccccgucaccuccggcugcuuccccaucaugcacgaccgcaccaagauccgccagcuccccaaccuccuccgcggcuacgagcgcauccgccucuccaaccacaacgucaucaacgccgagaaggcccccggcggccccuacaagaucggcaccuccggcuccugccccaacgucaccaacggcaacggcuucuucgccaccauggccugggccguccccaagaacgagaacaacaagaccgccaccaacucccucaccaucgagguccccuacaucugcaccgagggcgaggaccagaucaccgucuggggcuuccacuccgacaacgagaaccagauggccaagcucuacggcgacuccaagccccagaaguucaccuccuccgccaacggcgucaccacccacuacgucucccagaucggcggcuuccccaaccagaccgaggacggcggccucccccaguccggccgcaucgucgucgacuacaugguccagaaguccggcaagaccggcaccaucaccuaccagcgcggcauccuccucccccagaaggucuggugcgccuccggccgcuccaaggucaucaagggcucccucccccucaucggcgaggccgacugccuccacgagaaguacggcggccucaacaaguccaagcccuacuacaccggcgagcacgccaaggccaucggcaacugccccaucugggucaagaccccccucaagcucgccaacggcaccaaguaccgcccccccgccaagcuccucaaggagcgcggcuucuucggcgccaucgccggcuuccucgagggcggcugggagggcaugaucgccggcuggcacggcuacaccucccacggcgcccacggcgucgccgucgccgccgaccucaaguccacccaggaggccaucaacaagaucaccaagaaccucaacucccucuccgagcucgaggucaagaaccuccagcgccucuccggcgccauggacgagcuccacaacgagauccucgagcucgacgagaaggucgacgaccuccgcgccgacaccaucuccucccagaucgagcucgccguccuccucuccaacgagggcaucaucaacuccgaggacgagcaccuccucgcccucgagcgcaagcucaagaagaugcucggccccuccgccgucgagaucggcaacggcugcuucgagaccaagcacaagugcaaccagaccugccucgaccgcaucgccgccggcaccuucaacgccggcgaguucucccuccccaccuucgacucccucaacaucaccgccgccucccucaacgacgacggccucgacaaccacaccauccuccucuacuacuccaccgccgccuccucccucgccgucacccucaugaucgccaucuucgucgucuacauggucucccgcgacaacgucuccugcuccaucugccucuga

SEQ ID NO: 122491 - RNA, 1758 nt, Artificial Sequence
  derived and/or modified CDS sequence (opt2) from hemagglutinin__InfluenzaB__ABL77090
augaaggccaucaucguccuccucauggucgucaccuccaacgccgaccgcaucugcaccggcaucaccuccuccaacuccccccacgucgucaagaccgccacccagggcgaggucaacgucaccggcgucaucccccucaccaccacccucaccaagucccacuucgccaaccucaagggcaccaagacccgcggcaagcucugccccaagugccucaacugcaccgaccucgacgucgcccucggccgccccaagugcaccggcaacauccccuccgccaaggucuccauccuccacgagguccgccccgucaccuccggcugcuuccccaucaugcacgaccgcaccaagauccgccagcuccccaaccuccuccgcggcuacgagcgcauccgccucuccaaccacaacgucaucaacgccgagaaggcccccggcggccccuacaagaucggcaccuccggcuccugccccaacgucaccaacggcaacggcuucuucgccaccauggccugggccguccccaagaacgagaacaacaagaccgccaccaacucccucaccaucgagguccccuacaucugcaccgagggcgaggaccagaucaccgucuggggcuuccacuccgacaacgagauccagauggucaagcucuacggcgacuccaagccccagaaguucaccuccuccgccaacggcgucaccacccacuacgucucccagaucggcggcuuccccaaccagaucgaggacggcggccucccccaguccggccgcaucgucgucgacuacaugguccagaaguccggcaagaccggcaccaucaccuaccagcgcggcauccuccucccccagaaggucuggugcgccuccggccgcuccaagaucaucaagggcucccucccccucaucggcgaggccgacugccuccacgagaaguacggcggccucaacaaguccaagcccuacuacaccggcgagcacgccaaggccaucggcaacugccccaucugggucaagaccccccucaagcucgccaacggcaccaaguaccgcccccccgccaagcuccucaaggagcgcggcuucuucggcgccaucgccggcuuccucgagggcggcugggagggcaugaucgccggcuggcacggcuacaccucccacggcgcccacggcgucgccgucgccgccgaccucaaguccacccaggaggccaucaacaagaucaccaagaaccucaacucccucuccgagcucgaggucaagaaccuccagcgccucuccggcgccauggacgagcuccacaacgagauccucgagcucgacgagaaggucgacgaccuccgcgccgacaccaucuccucccagaucgagcucgccguccuccucuccaacgagggcaucaucaacuccgaggacgagcaccuccucgcccucgagcgcaagcucaagaagaugcucggccccuccgccgucgagaucggcaacggcugcuucgagaccaagcacaagugcaaccagaccugccucgaccgcaucgccgccggcaccuucaacgccggcgaguucucccuccccaccuucgacucccucaacaucaccgccgccucccucaacgacgacggccucgacaaccacaccauccuccucuacuacuccaccgccgccuccucccucgccgucacccucaugaucgccaucuucgucgucuacauggucucccgcgacaacgucuccugcuccaucugccucuga

SEQ ID NO: 122492 - RNA, 1755 nt, Artificial Sequence
  derived and/or modified CDS sequence (opt2) from hemagglutinin__InfluenzaB__ABL77101
augaaggccaucaucguccuccucauggucgucaccuccaaggccgaccgcaucugcaccggcaucaccuccuccaacuccccccacgucgucaagaccgccacccagggcgaggucaacgucaccggcgccaucccccucaccaccacccccaccaagucccacuucgccaaccucaagggcaccaagacccgcggcaagcucugccccaccugccucaacugcaccgaccucgacgucgcccucggccgccccaugugcgucggcaucacccccuccgccaaggccuccauccuccacgaggucaagcccgucaccuccggcugcuuccccaucaugcacgaccgcaccaagauccgccagcuccccaaccuccuccgcggcuacgagaagauccgccucuccacccagaacgucaucaacgccgagaaggcccccggcggccccuaccgccucggcaccuccggcuccugccccaacgccaccuccaaguccggcuucuucgccaccauggccugggccgucccccgcgacaacaacaagaccgccaccaacccccucaccgucgaggucccccacaucugcaccaaggaggaggaccagaucaccgucuggggcuuccacuccgacgacaagacccagaugaagaaccucuacggcgacuccaacccccagaaguucaccuccuccgccaacggcaucaccacccacuacgucucccagaucggcggcuuccccgagcagaccgaggacggcggccucccccaguccggccgcaucgucgucgacuacaugguccagaagcccggcaagaccggcaccaucgucuaccagcgcggcauccuccucccccagaaggucuggugcgccuccggccgcuccaaggucaucaagggcucccucccccucaucggcgaggccgacugccuccacgagaaguacggcggccucaacaaguccaagcccuacuacaccggcgagcacgccaaggccaucggcaacugccccaucugggucaagaccccccucaagcucgccaacggcaccaaguaccgcccccccgccaagcuccucaaggagcgcggcuucuucggcgccaucgccggcuuccucgagggcggcugggagggcaugaucgccggcuggcacggcuacaccucccacggcgcccacggcgucgccgucgccgccgaccucaaguccacccaggaggccaucaacaagaucaccaagaaccucaacucccucuccgagcucgaggucaagaaccuccagcgccucuccggcgccauggacgagcuccacaacgagauccucgagcucgacgagaaggucgacgaccuccgcgccgacaccaucuccucccagaucgagcucgccguccuccucuccaacgagggcaucaucaacuccgaggacgagcaccuccucgcccucgagcgcaagcucaagaagaugcucggccccuccgccgucgacaucggcaacggcugcuucgagaccaagcacaagugcaaccagaccugccucgaccgcaucgccgccggcaccuucaacgccggcgaguucucccuccccaccuucgacucccucaacaucaccgccgccucccucaacgacgacggccucgacaaccacaccauccuccucuacuacuccaccgccgccuccucccucgccgucacccucaugaucgccaucuucaucgucuacaugaucucccgcgacaacgucuccugcuccaucugccucuga

SEQ ID NO: 122493 - RNA, 1758 nt, Artificial Sequence
  derived and/or modified CDS sequence (opt2) from hemagglutinin__InfluenzaB__ABL77134
augaaggccaucaucguccuccucauggucgucaccuccaacgccgaccgcaucugcaccggcaucaccuccuccaacuccccccacgucgucaagaccgccacccagggcgaggucaacgucaccggcgucaucccccucaccaccacccccaccaagucccacuucgccaaccucaagggcaccaagacccgcggcaagcucugccccaagugccucaacugcaccgaccucgacgucgcccucggccgccccaagugcaccggcaacauccccuccgccaaggucuccauccuccacgagguccgccccgucaccuccggcugcuuccccaucaugcacgaccgcaccaagauccgccagcuccccaaccuccuccgcggcuacgagcgcauccgccucuccaaccacaacgucaucaacgccgagaaggcccccggcggccccuacaagaucggcaccuccggcuccugccccaacgucaccaacggcaacggcuucuucgccaccauggccugggccguccccaagaacgagaacaacaagaccgccaccaacucccucaccaucgagguccccuacaucugcaccgagggcgaggaccagaucaccgucuggggcuuccacuccgacaacgaggcccagauggccaagcucuacggcgacuccaagccccagaaguucaccuccuccgccaacggcgucaccacccacuacgucucccagaucggcggcuuccccaaccagaccgaggacggcggccucccccaguccggccgcaucgucgucgacuacaugguccagaaguccggcaagaccggcaccaucaccuaccagcgcggcauccuccucccccagaaggucuggugcgccuccggccgcuccaaggucaucaagggcucccucccccucaucggcgaggccgacugccuccacgagaaguacggcggccucaacaaguccaagcccuacuacaccggcgagcacgccaaggccaucggcaacugccccaucugggucaagaccccccucaagcucgccaacggcaccaaguaccgcccccccgccaagcuccucaaggagcgcggcuucuucggcgccaucgccggcuuccucgagggcggcugggagggcaugaucgccggcuggcacggcuacaccucccacggcgcccacggcgucgccgucgccgccgaccucaaguccacccaggaggccaucaacaagaucaccaagaaccucaacucccucuccgagcucgaggucaagaaccuccagcgccucuccggcgccauggacgagcuccacaacgagauccucgagcucgacgagaaggucgacgaccuccgcgccgacaccaucuccucccagaucgagcucgccguccuccucuccaacgagggcaucaucaacuccgaggacgagcaccuccucgcccucgagcgcaagcucaagaagaugcucggccccuccgccgucgagaucggcaacggcugcuucgagaccaagcacaagugcaaccagaccugccucgaccgcaucgccgccggcaccuucaacgccggcgaguucucccuccccaccuucgacucccucaacaucaccgccgccucccucaacgacgacggccucgacaaccacaccauccuccucuacuacgccaccgccgccuccucccucgccgucacccucaugaucgccaucuucgucgucuacauggucucccgcgacaacgucuccugcuccaucugccucuga

SEQ ID NO: 122494 - RNA, 1758 nt, Artificial Sequence
  derived and/or modified CDS sequence (opt2) from hemagglutinin__InfluenzaB__ABL77145
augaaggccaucaucguccuccucauggucgucaccuccaacgccgaccgcaucugcaccggcaucaccuccuccaacuccccccacgucgucaagaccgccacccagggcgaggucaacgucaccggcgucaucccccucaccaccacccccaccaagucccacuucgccaaccucaagggcaccaagacccgcggcaagcucugccccaagugccucaacugcaccgaccucgacgucgcccucggccgccccaagugcaccggcaacauccccuccgccaaggucuccauccuccacgagguccgccccgucaccuccggcugcuuccccaucaugcacgaccgcaccaagauccgccagcuccccaaccuccuccgcggcuacgagcgcauccgccucuccaaccacaacgucaucaacgccgaggaggcccccggcggccccuacaagaucggcaccuccggcuccugccccaacgucaccaacggcaacggcuucuucgccaccauggccugggccguccccaagaacgagaacaacaagaccgccaccaacucccucaccaucgagguccccuacaucugcaccgagggcgaggaccagaucaccgucuggggcuuccacuccgacuccgagacccagauggccaagcucuacggcgacuccaagccccagaaguucaccuccuccgccaacggcgucaccacccacuacgucucccagaucggcggcuuccccaaccagaccgaggacggcggccucccccaguccggccgcaucgucgucgacuacaugguccagaaguccggcaagaccggcaccaucaccuaccagcgcggcauccuccucccccagaaggucuggugcgccuccggccgcuccaaggucaucaagggcucccucccccucaucggcgaggccgacugccuccacgagaaguacggcggccucaacaaguccaagcccuacuacaccggcgagcacgccaaggccaucggcaacugccccaucugggucaagaccccccucaagcucgccaacggcaccaaguaccgcccccccgccaagcuccucaaggagcgcggcuucuucggcgccaucgccggcuuccucgagggcggcugggagggcaugaucgccggcuggcacggcuacaccucccacggcgcccacggcgucgccgucgccgccgaccucaaguccacccaggaggccaucaacaagaucaccaagaaccucaacucccucuccgagcucgaggucaagaaccuccagcgccucuccggcgccauggacgagcuccacaacgagauccucgagcucgacgagaaggucgacgaccuccgcgccgacaccaucuccucccagaucgagcucgccguccuccucuccaacgagggcaucaucaacuccgaggacgagcaccuccucgcccucgagcgcaagcucaagaagaugcucggccccuccgccgucgagaucggcaacggcugcuucgagaccaagcacaagugcaaccagaccugccucgaccgcaucgccgccggcaccuucaacgccggcgaguucucccuccccaccuucgacucccucaacaucaccgccgccucccucaacgacgacggccucgacaaccacaccauccuccucuacuacuccaccgccgccuccucccucgccgucacccucaugaucgccaucuucgucgucuacauggucucccgcgacaacgucuccugcuccaucugccucuga

SEQ ID NO: 122495 - RNA, 1755 nt, Artificial Sequence
  derived and/or modified CDS sequence (opt2) from hemagglutinin__InfluenzaB__ABL77156
augaaggccaucaucguccuccucauggucgucaccuccaacgccgaccgcaucugcaccggcaucaccuccuccaacuccccccacgucgucaagaccgccacccagggcgaggucaacgucaccggcgucaucccccucaccaccacccccaccaaguccuacuucgccaaccucaagggcacccgcacccgcggcaagcucugccccgacugccucaacugcaccgaccucgacgucgcccucggccgccccaugugcgucggcaccacccccuccgccaaggccuccauccuccacgagguccgccccgucaccuccggcugcuuccccaucaugcacgaccgcaccaagauccgccagcuccccaaccuccuccgcggcuacgagaacauccgccucuccacccagaacgucaucgacgccgagaaggcccccggcggccccuaccgccucggcaccuccggcuccugccccaacgccaccuccaaguccggcuucuucgccaccauggccugggccguccccaaggacaacaacaagaacgccaccaacccccucaccgucgagguccccuacgucugcaccgagggcgaggaccagaucaccgucuggggcuuccacuccgacgacaagacccagaugaagaaccucuacggcgacuccaacccccagaaguucaccuccuccgccaacggcgucaccacccacuacgucucccagaucggcggcuuccccgaccagaccgaggacggcggccucccccaguccggccgcaucgucgucgacuacaugguccagaagcccggcaagaccggcaccaucgucuaccagcgcggcguccuccucccccagaaggucuggugcgccuccggccgcuccaaggucaucaagggcucccucccccucaucggcgaggccgacugccuccacgagaaguacggcggccucaacaaguccaagcccuacuacaccggcgagcacgccaaggccaucggcaacugccccaucugggucaagaccccccucaagcucgccaacggcaccaaguaccgcccccccgccaagcuccucaaggagcgcggcuucuucggcgccaucgccggcuuccucgagggcggcugggagggcaugaucgccggcuggcacggcuacaccucccacggcgcccacggcgucgccgucgccgccgaccucaaguccacccaggaggccaucaacaagaucaccaagaaccucaacucccucuccgagcucgaggucaagaaccuccagcgccucuccggcgccauggacgagcuccacaacgagauccucgagcucgacgagaaggucgacgaccuccgcgccgacaccaucuccucccagaucgagcucgccguccuccucuccaacgagggcaucaucaacuccgaggacgagcaccuccucgcccucgagcgcaagcucaagaagaugcucggccccuccgccgucgacaucggcaacggcugcuucgagaccaagcacaagugcaaccagaccugccucgaccgcaucgccgccggcaccuucaacgccggcgaguucucccuccccaccuucgacucccucaacaucaccgccgccucccucaacgacgacggccucgacaaccacaccauccuccucuacuacuccaccgccgccuccucccucgccgucacccucaugcucgccaucuucaucgucuacauggucucccgcgacaacgucuccugcuccaucugccucuga

SEQ ID NO: 122496 - RNA, 1758 nt, Artificial Sequence
  derived and/or modified CDS sequence (opt2) from hemagglutinin__InfluenzaB__ABL77178
augaaggccaucaucguccuccucauggucgucaccuccaacgccgaccgcaucugcaccggcaucaccuccuccaacuccccccacgucgucaagaccgccacccagggcgaggucaacgucaccggcgucaucccccucaccaccacccccaccaagucccacuucgccaaccucaagggcaccaagacccgcggcaagcucugccccaagugccucaacugcaccgaccucgacgucgcccucggccgccccaagugcaccggcaacauccccuccgccaaggucuccauccuccacgagguccgccccgucaccuccggcugcuuccccaucaugcacgaccgcaccaagauccgccagcuccccaaccuccuccgcggcuacgagcgcauccgccucuccaaccacaacgucaucaacgccgagaaggcccccggcggccccuacaagaucggcaccuccggcuccugccccaacgucaccaacggcaacggcuucuucgccaccauggccugggccguccccaagaacgagaacaacaagaccgccaccaacucccucaccaucgagguccccuacaucugcaccgagggcgaggaccagaucaccgucuggggcuuccacuccgacuccgagacccagauggccaagcucuacggcgacuccaagccccagaaguucaccuccuccgccaacggcgucaccacccacuacgucucccagaucggcggcuuccccaaccagaccgaggacggcggccucccccaguccggccgcaucgucgucgacuacaugguccagaaguccggcaagaccggcaccaucaccuaccagcgcggcauccuccucccccagaaggucuggugcgccuccggccgcuccaaggucaucaagggcucccucccccucaucggcgaggccgacugccuccacgagaaguacggcggccucaacaaguccaagcccuacuacaccggcgagcacgccaaggccaucggcaacugccccaucugggucaagaccccccucaagcucgccaacggcaccaaguaccgcccccccgccaagcuccucaaggagcgcggcuucuucggcgccaucgccggcuuccucgagggcggcugggagggcaugaucgccggcuggcacggcuacaccucccacggcgcccacggcgucgccgucgccgccgaccucaaguccacccaggaggccaucaacaagaucaccaagaaccucaacucccucuccgagcucgaggucaagaaccuccagcgccucuccggcgccauggacgagcuccacaacgagauccucgagcucgacgagaaggucgacgaccuccgcgccgacaccaucuccucccagaucgagcucgccguccuccucuccaacgagggcaucaucaacuccgaggacgagcaccuccucgcccucgagcgcaagcucaagaagaugcucggccccuccgccgucgagaucggcaacggcugcuucgagaccaagcacaagugcaaccagaccugccucgaccgcaucgccgccggcaccuucaacgccggcgaguucucccuccccaccuucgacucccucaacaucaccgccgccucccucaacgacgacggccucgacaaccacaccauccuccucuacuacuccaccgccgccuccucccucgccgucacccucaugaucgccaucuucgucgucuacauggucucccgcgacaacgucuccugcuccaucugccucuga

SEQ ID NO: 122497 - RNA, 1755 nt, Artificial Sequence
  derived and/or modified CDS sequence (opt2) from hemagglutinin__InfluenzaB__ABL77189
augaaggccaucaucguccuccucauggucgucaccuccaacgccgaccgcaucugcaccggcaucaccuccuccaacuccccccacgucgucaagaccgccacccagggcgaggucaacgucaccggcgucaucccccucaccaccacccccaccaaguccuacuucgccaaccucaagggcacccgcacccgcggcaagcucugccccgacugccucaacugcaccgaccucgacgucgcccucggcauccccaugugcgucggcaccacccccuccgccaaggccuccauccuccacgagguccgccccgucaccuccggcugcuuccccaucaugcacgaccgcaccaagauccgccagcuccccaaccuccuccgcggcuacgagaacauccgccucuccacccagaacgucaucgacgccgagaaggcccccggcggccccuaccgccucggcaccuccggcuccugccccaacgccaccuccaaguccggcuucuucgccaccauggccugggccguccccaaggacaacaacaagaacgccaccaacccccucaccgucgagguccccuacgucugcaccgagggcgaggaccagaucaccgucuggggcuuccacuccgacaacaagauccagaugaagaaccucuacggcgacuccaacccccagaaguucaccuccuccgccaacggcgucaccacccacuacgucucccagaucggcggcuuccccgaccagaccgaggacggcggccucccccaguccggccgcaucgucgucgacuacaugguccagaagcccggcaagaccggcaccaucgucuaccagcgcggcguccuccucccccagaaggucuggugcgccuccggccgcuccaaggucaucaagggcucccucccccucaucggcgaggccgacugccuccacgagaaguacggcggccucaacaaguccaagcccuacuacaccggcgagcacgccaaggccaucggcaacugccccaucugggucaagaccccccucaagcucgccaacggcaccaaguaccgcccccccgccaagcuccucaaggagcgcggcuucuucggcgccaucgccggcuuccucgagggcggcugggagggcaugaucgccggcuggcacggcuacaccucccacggcgcccacggcgucgccgucgccgccgaccucaaguccacccaggaggccaucaacaagaucaccaagaaccucaacucccucuccgagcucgaggucaagaaccuccagcgccucuccggcgccauggacgagcuccacaacgagauccucgagcucgacgagaaggucgacgaccuccgcgccgacaccaucuccucccagaucgagcucgccguccuccucuccaacgagggcaucaucaacuccgaggacgagcaccuccucgcccucgagcgcaagcucaagaagaugcucggccccuccgccgucgacaucggcaacggcugcuucgagaccaagcacaagugcaaccagaccugccucgaccgcaucgccgccggcaccuucaacgccggcgaguucucccuccccaccuucgacucccucaacaucaccgccgccucccucaacgacgacggccucgacaaccacaccauccuccucuacuacuccaccgccgccuccucccucgccgucacccucaugcucgccaucuucaucgucuacauggucucccgcgacaacgucuccugcuccaucugccucuga

SEQ ID NO: 122498 - RNA, 1758 nt, Artificial Sequence
  derived and/or modified CDS sequence (opt2) from hemagglutinin__InfluenzaB__ABL77200
augaaggccaucaucguccuccucauggucgucaccuccaacgccgaccgcaucugcaccggcaucaccuccuccaacuccccccacgucgucaagaccgccacccagggcgaggucaacgucaccggcgucaucccccucaccaccacccccaccaagucccacuucgccaaccucaagggcaccaagacccgcggcaagcucugccccaagugccucaacugcaccgaccucgacgucgcccucggccgccccaagugcaugggcaacauccccuccgccaaggucuccauccuccacgagguccgccccgucaccuccggcugcuuccccaucaugcacgaccgcaccaagauccgccagcuccccaaccuccuccgcggcuacgagcacauccgccucuccacccacaacgucaucaacgccgagaaggcccccggcggccccuacaagaucggcaccuccggcuccugccccaacgucaccaacggcaacggcuucuucgccaccauggccugggccguccccaagaacgacaacaacaagaccgccaccaacucccucaccaucgagguccccuacaucugcaccgagggcgaggaccagaucaccgucuggggcuuccacuccgacaacgagacccagauggccaagcucuacggcgacuccaagccccagaaguucaccuccuccgccaacggcgucaccacccacuacgucucccagaucggcggcuuccccaaccagaccgaggacggcggccucccccaguccggccgcaucgucgucgacuacaugguccagaaguccggcaaggccggcaccaucaccuaccagcgcggcauccuccucccccagaaggucuggugcgccuccggccgcuccaaggucaucaagggcucccucccccucaucggcgaggccgacugccuccacgagaaguacggcggccucaacaaguccaagcccuacuacaccggcgagcacgccaaggccaucggcaacugccccaucugggucaagaccccccucaagcucgccaacggcaccaaguaccgcccccccgccaagcuccucaaggagcgcggcuucuucggcgccaucgccggcuuccucgagggcggcugggagggcaugaucgccggcuggcacggcuacaccucccacggcgcccacggcgucgccgucgccgccgaccucaaguccacccaggaggccaucaacaagaucaccaagaaccucaacucccucuccgagcucgaggucaagaaccuccagcgccucuccggcgccauggacgagcuccacaacgagauccucgagcucgacggcaaggucgacgaccuccgcgccgacaccaucuccucccagaucgagcucgccguccuccucuccaacgagggcaucaucaacuccgaggacgagcaccuccucgcccucgagcgcaagcucaagaagaugcucggccccuccgccgucgagaucggcaacggcugcuucgagaccaagcacaagugcaaccagaccugccucgaccgcaucgccgccggcaccuucgacgccggcgaguucucccuccccaccuucgacucccucaacaucaccgccgccucccucaacgacgacggccucgacaaccacaccauccuccucuacuacuccaccgccgccuccucccucgccgucacccucaugaucgccaucuucgucgucuacauggucucccgcgacaacgucuccugcuccaucugccucuga

SEQ ID NO: 122499 - RNA, 1755 nt, Artificial Sequence
  derived and/or modified CDS sequence (opt2) from hemagglutinin__InfluenzaB__ABL77222
augaaggccaucaucguccuccucauggucgucaccuccaacgccgaccgcaucugcaccggcaucaccuccuccaacuccccccacgucgucaagaccgccacccagggcgaggucaacgucaccggcgucaucccccucaccaccacccccaccaaguccuacuucgccaaccucaagggcacccgcacccgcggcaagcucugccccgacugccucaacugcaccgaccucgacgucgcccucggccgccccaugugcgucggcaccacccccuccgccaaggccuccauccuccacgagguccgccccgucaccuccggcugcuuccccaucaugcacgaccgcaccaagauccgccagcucgccaaccuccuccgcggcuacgagaacauccgccucuccacccagaacgucaucgacgccgagaaggcccccggcggccccuaccgccucggcaccuccggcuccugccccaacgccaccuccaaguccggcuucuucgccaccauggccugggccguccccaaggacaacaacaagaacgccaccaacccccucaccgucgagguccccuacaucugcaccgagggcgaggaccagaucaccgucuggggcuuccacuccgacuccaagacccagaugaagaaccucuacggcgacuccaacccccagaaguucaccuccuccgccaacggcgucaccacccacuacgucucccagaucggcggcuuccccgaccagaccgaggacggcggccucccccaguccggccgcaucgucgucgacuacaugaugcagaagcccggcaagaccggcaccaucgucuaccagcgcggcguccuccucccccagaaggucuggugcgccuccggccgcuccaaggucaucaagggcucccucccccucaucggcgaggccgacugccuccacgagaaguacggcggccucaacaaguccaagcccuacuacaccggcgagcacgccaaggccaucggcaacugccccaucugggucaagaccccccucaagcucgccaacggcaccaaguaccgcccccccgccaagcuccucaaggagcgcggcuucuucggcgccaucgccggcuuccucgagggcggcugggagggcaugaucgccggcuggcacggcuacaccucccacggcgcccacggcgucgccgucgccgccgaccucaaguccacccaggaggccaucaacaagaucaccaagaaccucaacucccucuccgagcucgaggucaagaaccuccagcgccucuccggcgccauggacgagcuccacaacgagauccucgagcucgacgagaaggucgacgaccuccgcgccgacaccaucuccucccagaucgagcucgccguccuccucuccaacgagggcaucaucaacuccgaggacgagcaccuccucgcccucgagcgcaagcucaagaagaugcucggccccuccgccgucgacaucggcaacggcugcuucgagaccaagcacaagugcaaccagaccugccucgaccgcaucgccgccggcaccuucaacgccggcgaguucucccuccccaccuucgacucccucaacaucaccgccgccucccucaacgacgacggccucgacaaccacaccauccuccucuacuacuccaccgccgccuccucccucgccgucacccucaugcucgccaucuucaucgucuacauggucucccgcgacaacgucuccugcuccaucugccucuga

SEQ ID NO: 122500 - RNA, 1758 nt, Artificial Sequence
  derived and/or modified CDS sequence (opt2) from hemagglutinin__InfluenzaB__ABL77233
augaaggccaucaucguccuccucauggucgucaccuccaacgccgaccgcaucugcaccggcaucaccuccuccaacuccccccacgucgucaagaccgccacccagggcgaggucaacgucaccggcgucaucccccucaccaccacccccaccaagucccacuucgccaaccucaagggcaccaagacccgcggcaagcucugccccaagugccucaacugcaccgaccucgacgucgcccucggccgccccaagugcaccggcaacauccccuccgccgaggucuccauccuccacgagguccgccccgucaccuccggcugcuuccccaucaugcacgaccgcaccaagauccgccagcuccccaaccuccuccgcggcuacgagcacauccgccucuccacccacaacgucaucaacgccgagaaggcccccggcggccccuacaagaucggcaccuccggcuccugccccaacgucaccaacggcaacggcuucuucgccaccauggccugggccguccccaagaacgacaacaacaagaccgccaccaacucccucaccaucgagguccccuacaucugcaccgagggcgaggaccagaucaccaucuggggcuuccacuccgacaacgaggcccagauggccaagcucuacggcgacuccaagccccagaaguucaccuccuccgccaacggcgucaccacccacuacgucucccagaucggcggcuuccccaaccagaccgaggacggcggccucccccaguccggccgcaucgucgucgacuacaugguccagaagucccgcaagaccggcaccaucaccuaccagcgcggcauccuccucccccagaaggucuggugcgccuccggccgcuccaaggucaucaagggcucccucccccucaucggcgaggccgacugccuccacgagaaguacggcggccucaacaaguccaagcccuacuacaccggcgagcacgccaaggccaucggcaacugccccaucugggucaagaccccccucaagcucgccaacggcaccaaguaccgcccccccgccaagcuccucaaggagcgcggcuucuucggcgccaucgccggcuuccucgagggcggcugggagggcaugaucgccggcuggcacggcuacaccucccacggcgcccacggcgucgccgucgccgccgaccucaaguccacccaggaggccaucaacaagaucaccaagaaccucaacucccucuccgagcucgaggucaagaaccuccagcgccucuccggcgccauggacgagcuccacaacgagauccucgagcucgacgagaaggucgacgaccuccgcgccgacaccaucuccucccagaucgagcucgccguccuccucuccaacgagggcaucaucaacuccgaggacgagcaccuccucgcccucgagcgcaagcucaagaagaugcucggccccuccgccgucgagaucggcaacggcugcuucgagaccaagcacaagugcaaccagaccugccucgaccgcaucgccgccggcaccuucgacgccggcgaguucucccuccccaccuucgacucccucaacaucaccgccgccucccucaacgacgacggccucgacaaccacaccauccuccucuacuacuccaccgccgccuccucccucgccgucacccucaugaucgccaucuucgucgucuacauggucucccgcgacaacgucuccugcuccaucugccucuga

SEQ ID NO: 122501 - RNA, 1758 nt, Artificial Sequence
  derived and/or modified CDS sequence (opt2) from hemagglutinin__InfluenzaB__ABL77244
augaaggccaucaucguccuccucauggucgucaccuccaacgccgaccgcaucugcaccggcaucaccuccuccaacuccccccacgucgucaagaccgccacccagggcgaggucaacgucaccggcgucaucccccucaccaccacccccaccaagucccacuucgccaaccucaagggcaccaagacccgcggcaagcucugccccaagugccucaacugcaccgaccucgacgucgcccucggccgccccaagugcaccggcaccauccccuccgccaaggccuccauccuccacgaggucaagcccgucaccuccggcugcuuccccaucaugcacgaccgcaccaagauccgccagcuccccaaccuccuccgcggcuacgagcacauccgccucuccacccacaacgucaucaacgccgagaccgcccccggcggccccuacaaggucggcaccuccggcuccugccccaacgucaccaacggcaacggcuucuucgccaccauggccugggccguccccaagaacgacaacaacaagaccgccaccaacccccucaccgucgagguccccuacaucugcaccgagggcgaggaccagaucaccgucuggggcuuccacuccgacaacgaggcccagauggucaagcucuacggcgacuccaagccccagaaguucaccuccuccgccaacggcgucaccacccacuacgucucccagaucggcggcuuccccaaccaggccgaggacggcggccucccccaguccggccgcaucgucgucgacuacaugguccagaaguccggcaagaccggcaccaucaccuaccagcgcggcauccuccucccccagaaggucuggugcgccuccggccgcuccaaggucaucaagggcucccucccccucaucggcgaggccgacugccuccacgagaaguacggcggccucaacaaguccaagcccuacuacaccggcgagcacgccaaggccaucggcaacugccccaucugggucaagaccccccucaagcucgccaacggcaccaaguaccgcccccccgccaagcuccucaaggagaagggcuucuucggcgccaucgccggcuuccucgagggcggcugggagggcaugaucgccggcuggcacggcuacaccucccacggcgcccacggcgucgccgucgccgccgaccucaaguccacccaggaggccaucaacaagaucaccaagaaccucaacucccucuccgagcucgaggucaagaaccuccagcgccucuccggcgccauggacgagcuccacaacaagauccucgagcucgacgagaaggucgacgaccuccgcgccgacaccaucuccucccagaucgagcucgccguccuccucuccaacgagggcaucaucaacuccgaggacgagcaccuccucgcccucgagcgcaagcucaagaagaugcucggccccuccgccgucgagaucggcaacggcugcuucgagaccaagcacaagugcaaccagaccugccucgaccgcaucgccgccggcaccuucaacgccggcgaguucucccuccccaccuucgacucccucaacaucaccgccgccucccucaacgacgacggccucgacaaccacaccauccuccucuacuacuccaccgccgccuccucccucgccgucacccucaugaucgccaucuucaucgucuacauggucucccgcgacaacgucuccugcuccaucugccucuga

SEQ ID NO: 122502 - RNA, 1752 nt, Artificial Sequence
  derived and/or modified CDS sequence (opt2) from hemagglutinin__InfluenzaB__ABL77255
augaaggccaucaucguccuccucauggucgucaccuccaacgccgaccgcaucugcaccggcaucaccuccuccaacuccccccacgucgucaagaccgccacccagggcgaggucaacgucaccggcgucaucccccucaccaccacccccaccaagucccacuucgccaaccucaagggcaccaagacccgcggcaagcucugccccaacugccucaacugcaccgaccucgacgucgcccucggccgccccaugugcaugggcaccauccccuccgccaaggccuccauccuccacgagguccgccccgucaccuccggcugcuuccccaucaugcacgaccgcaccaagauccgccagcuccccaaccuccuccgcggcuacgagaacauccgccucuccacccacaacgucaucaacgccgagcgcgcccccggcggccccuaccgccucggcaccuccggcuccugccccaacgucaccucccgcaacggcuucuucgccaccauggccugggccgucccccgcgacaacaagaccgccaccaacccccucaccgucgagguccccuacaucugcaccaagggcgaggaccagaucaccgucuggggcuuccacuccgacgacaagacccagaugaagaaccucuacggcgacuccaacccccagaaguucaccuccuccgccaacggcgucaccacccacuacgucucccagaucggcgacuuccccaaccagaccgaggacggcggccucccccaguccggccgcaucgucgucgacuacaugguccagaagcccggcaagaccggcaccaucgucuaccagcgcggcguccuccucccccagaaggucuggugcgccuccggccgcuccaaggucaucaagggcucccucccccucaucggcgaggccgacugccuccacgagaaguacggcggccucaacaaguccaagcccuacuacaccggcgagcacgccaaggccaucggcaacugccccaucugggucaagaccccccucaagcucgccaacggcaccaaguaccgcccccccgccaagcuccucaaggagcgcggcuucuucggcgccaucgccggcuuccucgagggcggcugggagggcaugaucgccggcuggcacggcuacaccucccacggcgcccacggcgucgccgucgccgccgaccucaaguccacccaggaggccaucaacaagaucaccaagaaccucaacucccucuccgagcucgaggucaagaaccuccagcgccucuccggcgccauggacgagcuccacaacgagauccucgagcucgacgagaaggucgacgaccuccgcgccgacaccaucuccucccagaucgagcucgccguccuccucuccaacgagggcaucaucaacuccgaggacgagcaccuccucgcccucgagcgcaagcucaagaagaugcucggccccuccgccgucgacaucggcaacggcugcuucgagaccaagcacaagugcaaccagaccugccucgaccgcaucgccgccggcaccuucaacgccggcgaguucucccuccccaccuucgacucccucaacaucaccgccgccucccucaacgacgacggccucgacaaccacaccauccuccucuacuacuccaccgccgccuccucccucgccgucacccucaugaucgccaucuucaucgucuacauggucucccgcgacaacgucuccugcuccaucugccucuga

SEQ ID NO: 122503 - RNA, 1752 nt, Artificial Sequence
  derived and/or modified CDS sequence (opt2) from hemagglutinin__InfluenzaB__ABL77266
augaaggccaucaucguccuccucauggucgucaccuccaacgccgaccgcaucugcaccggcaucaccuccuccaacuccccccacgucgucaagaccgccacccagggcgaggucaacgucaccggcgucaucccccucaccaccacccccaccaagucccacuucgccaaccucaagggcaccaagacccgcggcaagcucugccccaacugccucaacugcaccgaccucgacgucgcccucggccgccccaugugcgucggcaccacccccuccgccaaggccuccauccuccacgagguccgccccgucaccuccggcugcuuccccaucaugcacgaccgcaccaagauccgccagcuccccaaccuccuccgcggcuacgagaacauccgccucuccacccagaacgucaucaacgccgagcgcgcccccggcggccccuaccgccucggcaccuccggcuccugccccaacgucaccucccgcgacggcuucuucgccaccauggccugggccgucccccgcgacaacaagaccgccaccaacccccucaccgucgagguccccuacaucugcaccaagggcgaggaccagaucaccgucuggggcuuccacuccgacuccaagacccagaugaagaaccucuacggcgacuccaacccccagaaguucaccuccuccgccaacggcgucaccacccacuacgucucccagaucggcggcuuccccaaccagaccgaggacggcggccucccccaguccggccgcaucgucgucgacuacaugguccagaagcccggcaagaccggcaccaucgucuaccagcgcggcguccuccucccccagaaggucuggugcgccuccggccgcuccaaggucaucaagggcucccucccccucaucggcgaggccgacugccuccacgagaaguacggcggccucaacaaguccaagcccuacuacaccggcgagcacgccaaggccaucggcaacugccccaucugggucaagaccccccucaagcucgccaacggcaccaaguaccgcccccccgccaagcuccucaaggagcgcggcuucuucggcgccaucgccggcuuccucgagggcggcugggagggcaugaucgccggcuggcacggcuacaccucccacggcgcccacggcgucgccgucgccgccgaccucaaguccacccaggaggccaucaacaagaucaccaagaaccucaacucccucuccgagcucgaggucaagaaccuccagcgccucuccggcgccauggacgagcuccacaacgagauccucgagcucgacgagaaggucgacgaccuccgcgccgacaccaucuccucccagaucgagcucgccguccuccucuccaacgagggcaucaucaacuccgaggacgagcaccuccucgcccucgagcgcaagcucaagaagaugcucggccccuccgccgucgacaucggcaacggcugcuucgagaccaagcacaagugcaaccagaccugccucgaccgcaucgccgccggcaccuucaacgccggcgaguucucccuccccaccuucgacucccucaacaucaccgccgccucccucaacgacgacggccucgacaaccacaccauccuccucuacuacuccaccgccgccuccucccucgccgucacccucaugaucgccaucuucaucgucuacauggucucccgcgacaacgucuccugcuccaucugccucuga

SEQ ID NO: 122504 - RNA, 1752 nt, Artificial Sequence
  derived and/or modified CDS sequence (opt2) from hemagglutinin__InfluenzaB__ABL77277
augaaggccaucaucguccuccucauggucgucaccuccaacgccgaccgcaucugcaccggcaucaccuccuccaacuccccccacgucgucaagaccgccacccagggcgaggucaacgucaccggcgucaucccccucaccaccacccccaccaagucccacuucgccaaccucaagggcaccaagacccgcggcaagcucugccccaacugccucaacugcaccgaccucgacgucgcccucggccgccccaugugcgucggcaacacccccuccgccaaggccuccauccuccacgagguccgccccgucaccuccggcugcuuccccaucaugcacgaccgcaccaagauccgccagcuccccaaccuccuccgcggcuacgagaacauccgccucuccacccagaacgucaucaacgccgagcgcgcccccggcggccccuaccgccucggcaccuccggcuccugccccaacgucaccaaccgcgacggcuucuucgccaccauggccugggccgucccccgcgacaacaagaccgccaccaacccccucaccgucgagguccccuacaucugcaccaagggcgaggaccagaucaccgucuggggcuuccacuccgacaacaagauccagaugaagaaccucuacggcgacuccaacccccagaaguucaccuccuccgccaacggcgucaccacccacuacgucucccagaucggcggcuuccccaaccagaccgaggacggcggccucccccaguccggccgcaucgucgucgacuacaugguccagaagcccggcaagaccggcaccaucgucuaccagcgcggcguccuccucccccagaaggucuggugcgccuccggccgcuccaaggucaucaagggcucccucccccucaucggcgaggccgacugccuccacgagaaguacggcggccucaacaaguccaagcccuacuacaccggcgagcacgccaaggccaucggcaacugccccaucugggucaagaccccccucaagcucgccaacggcaccaaguaccgcccccccgccaagcuccucaaggagcgcggcuucuucggcgccaucgccggcuuccucgagggcggcugggagggcaugaucgccggcuggcacggcuacaccucccacggcgcccacggcgucgccgucgccgccgaccucaaguccacccaggaggccaucaacaagaucaccaagaaccucaacucccucuccgagcucgaggucaagaaccuccagcgccucuccggcgccauggacgagcuccacaacgagauccucgagcucgacgagaaggucgacgaccuccgcgccgacaccaucuccucccagaucgagcucgccguccuccucuccaacgagggcaucaucaacuccgaggacgagcaccuccucgcccucgagcgcaagcucaagaagaugcucggccccuccgccgucgacaucggcaacggcugcuucgagaccaagcacaagugcaaccagaccugccucgaccgcaucgccgccggcaccuucaacgccggcgaguucucccuccccaccuucgacucccucaacaucaccgccgccucccucaacgacgacggccucgacaaccacaccauccuccucuacuacuccaccgccgccuccucccucgccgucacccucaugaucgccaucuucaucgucuacauggucucccgcgacaacgucuccugcuccaucugccucuga

SEQ ID NO: 122505 - RNA, 1752 nt, Artificial Sequence
  derived and/or modified CDS sequence (opt2) from hemagglutinin__InfluenzaB__ABL77288
augaaggccaucaucguccuccucauggucgucaccuccaacgccgaccgcaucugcaccggcaucaccuccuccaacuccccccacgucgucaagaccgccacccagggcgaggucaacgucaccggcgucaucccccucaccaccacccccaccaagucccacuucgccaaccucaagggcaccaagacccgcggcaagcucugccccaacugccucaacugcaccgaccucgacgucgcccucggccgccccaugugcgucggcaccacccccuccgccaaggccuccauccuccacgagguccgccccgucaccuccggcugcuuccccaucaugcacgaccgcaccaagauccgccagcuccccaaccuccuccgcggcuacgagcacauccgccucuccacccagaacgucaucaacgccgagaaggcccccggcggccccuacaagcucggcaccuccggcuccugccccaacgccaccucccgcuccggcuucuucgccaccauggccugggccgucccccgcgacaacaagaccgccaccaacccccucaccgucgagguccccuacaucugcaccaagggcgaggaccagaucaccgucuggggcuuccacuccgacaccaagacccagaugaagaaccucuacggcgacuccaacccccagaaguucaccuccuccgccaacggcgucaccacccacuacgucucccagaucggcggcuuccccgaccagaccgaggacggcggccucccccaguccggccgcaucgucgucgacuacaugguccagaagcccggcaagaccggcaccaucgucuaccagcgcggcguccuccucccccagaaggucuggugcgccuccggccgcuccaaggucaucaagggcucccucccccucaucggcgaggccgacugccuccacgagaaguacggcggccucaacaaguccaagcccuacuacaccggcgagcacgccaaggccaucggcaacugccccaucugggucaagaccccccucaagcucgccaacggcaccaaguaccgcccccccgccaagcuccucaaggagcgcggcuucuucggcgccaucgccggcuuccucgagggcggcugggagggcaugaucgccggcuggcacggcuacaccucccacggcgcccacggcgucgccgucgccgccgaccucaaguccacccaggaggccaucaacaagaucaccaagaaccucaacucccucuccgagcucgaggucaagaaccuccagcgccucuccggcgccauggacgagcuccacaacgagauccucgagcucgacgagaaggucgacgaccuccgcgccgacaccaucuccucccagaucgagcucgccguccuccucuccaacgagggcaucaucaacuccgaggacgagcaccuccucgcccucgagcgcaagcucaagaagaugcucggccccuccgccgucgacaucggcaacggcugcuucgagaccaagcacaagugcaaccagaccugccucgaccgcaucgccgccggcaccuucaacgccggcgaguucucccuccccaccuucgacucccucaacaucaccgccgccucccucaacgacgacggccucgacaaccacaccauccuccucuacuacuccaccgccgccuccucccucgccgucacccucaugaucgccaucuucaucgucuacauggucucccgcgacaacgucuccugcuccaucugccucuga

SEQ ID NO: 122506 - RNA, 1752 nt, Artificial Sequence
  derived and/or modified CDS sequence (opt2) from hemagglutinin__InfluenzaB__ABL77299
augaaggccaucaucguccuccucauggucgucaccuccaacgccgaccgcaucugcaccggcaucaccuccuccaacuccccccacgucgucaagaccgccacccagggcgaggucaacgucaccggcgucaucccccucaccaccacccccaccaagucccacuucgccaaccucaagggcaccaagacccgcggcaagcucugccccaacugccucaacugcaccgaccucgacgucgcccucggccgccccaugugcaucggcaacauccccuccgccaaggccuccauccuccacgagguccgccccgucaccuccggcugcuuccccaucaugcacgaccgcaccaagauccgccagcuccccaaccuccuccgcggcuacgagcacauccgccucuccacccacaacgucaucaacgccgagcgcgcccccggcggccccuaccgccucggcaccuccggcuccugccccaacgucaccucccgcuccggcuucuucgccaccauggccugggccgucccccgcgacaacaagaccgccaccaacccccucaccgucgagguccccuacaucugcaccaagggcgaggaccagaucaccgucuggggcuuccacuccgacaacgagacccagaugaagaaccucuacggcgacuccaacccccagaaguucaccuccuccgccaacggcaucaccacccacuacgucucccagaucggcggcuuccccaaccagaccgaggacggcggccucccccaguccggccgcaucgucgucgacuacaugguccagaagcccggcaagaccggcaccaucgucuaccagcgcggcguccuccucccccagaaggucuggugcgccuccggccgcuccaaggucaucaagggcucccucccccucaucggcgaggccgacugccuccacgagaaguacggcggccucaacaaguccaagcccuacuacaccggcgagcacgccaaggccaucggcaacugccccaucugggucaagaccccccucaagcucgccaacggcaccaaguaccgcccccccgccaagcuccucaaggagcgcggcuucuucggcgccaucgccggcuuccucgagggcggcugggagggcaugaucgccggcuggcacggcuacaccucccacggcgcccacggcgucgccgucgccgccgaccucaaguccacccaggaggccaucaacaagaucaccaagaaccucaacucccucuccgagcucgaggucaagaaccuccagcgccucuccggcgccauggacgagcuccacaacgagauccucgagcucgacgagaaggucgacgaccuccgcgccgacaccaucuccucccagaucgagcucgccguccuccucuccaacgagggcaucaucaacuccgaggacgagcaccuccucgcccucgagcgcaagcucaagaagaugcucggccccuccgccgucgacaucggcaacggcugcuucgagaccaagcacaagugcaaccagaccugccucgaccgcaucgccgccggcaccuucaacgccggcgaguucucccuccccaccuucgacucccucaacaucaccgccgccucccucaacgacgacggccucgacaaccacaccauccuccucuacuacuccaccgccgccuccucccucgccgucacccucaugaucgccaucuucaucgucuacauggucucccgcgacaacgucuccugcuccaucugccucuga

SEQ ID NO: 122507 - RNA, 1752 nt, Artificial Sequence
  derived and/or modified CDS sequence (opt2) from hemagglutinin__InfluenzaB__ABL77310
augaaggccaucaucguccuccucauggucgucaccuccaacgccgaccgcaucugcaccggcaucaccuccuccaacuccccccacgucgucaagaccgccacccagggcgaggucaacgucaccggcgucaucccccucaccaccacccccaccaagucccacuucgccaaccucaagggcaccaagacccgcggcaagcucugccccaacugccucaacugcaccgaccucgacgucgcccucggccgccccaugugcaucggcaccauccccuccgccaaggccuccauccuccacgagguccgccccgucaccuccggcugcuuccccaucaugcacgaccgcaccaagauccgccagcuccccaaccuccuccgcggcuacgagcacauccgccucuccacccacaacgucaucaacgccgagcgcgcccccggcggccccuaccgccucggcaccuccggcuccugccccaacgucaccucccgcuccggcuucuucgccaccauggccugggccgucccccgcgacaacaagaccgccaccaacccccucaccgucgagguccccuacaucugcaccaagggcgaggaccagaucaccgucuggggcuuccacuccgacaacaagaaccagaugaagaaccucuacggcgacuccaacccccagaaguucaccuccuccgccaacggcgucaccacccacuacgucucccagaucggcggcuuccccaaccagaccgaggacggcggccucccccaguccggccgcaucgucgucgacuacaugguccagaagcccggcaagaccggcaccaucgucuaccagcgcggcguccuccucccccagaaggucuggugcgucuccggccgcuccaaggucaucaagggcucccucccccucaucggcgaggccgacugccuccacgagaaguacggcggccucaacaaguccaagcccuacuacaccggcgagcacgccaaggccaucggcaacugccccaucugggucaagaccccccucaagcucgccaacggcaccaaguaccgcccccccgccaagcuccucaaggagcgcggcuucuucggcgccaucgccggcuuccucgagggcggcugggagggcaugaucgccggcuggcacggcuacaccucccacggcgcccacggcgucgccgucgccgccgaccucaaguccacccaggaggccaucaacaagaucaccaagaaccucaacucccucuccgagcucgaggucaagaaccuccagcgccucuccggcgccauggacgagcuccacaacgagauccucgagcucgacgagaaggucgacgaccuccgcgccgacaccaucuccucccagaucgagcucgccguccuccucuccaacgagggcaucaucaacuccgaggacgagcaccuccucgcccucgagcgcaagcucaagaagaugcucggccccuccgccgucgacaucggcaacggcugcuucgagaccaagcacaagugcaaccagaccugccucgaccgcaucgccgccggcaccuucaacgccggcgaguucucccuccccaccuucgacucccucaacaucaccgccgccucccucaacgacgacggccucgacaaccacaccauccuccucuacuacuccaccgccgccuccucccucgccgucacccucaugaucgccaucuucaucgucuacauggucucccgcgacaacgucuccugcuccaucugccucuga

SEQ ID NO: 122508 - RNA, 1758 nt, Artificial Sequence
  derived and/or modified CDS sequence (opt2) from hemagglutinin__InfluenzaB__ABL77321
augaaggccaucaucguccuccucauggucgucaccuccaacgccgaccgcaucugcaccggcaucaccuccuccaacuccccccacgucgucaagaccgccacccagggcgaggucaacgucaccggcgucaucccccucaccaccacccccaccaagucccacuucgccaaccucaagggcaccaagacccgcggcaagcucugccccaagugccucaacugcaccgaccucgacgucgcccucggccgccccaagugcaccggcaccauccccuccgccaaggucuccauccuccacgaggucaagcccgucaccuccggcugcuuccccaucaugcacgaccgcaccaagauccgccagcuccccaaccuccuccgcggcuacgagcacauccgccucuccacccacaacgucaucaacgccgagaaggcccccggcggccccuacaagaucggcaccuccggcuccugccccaacaucaccaacggcaacggcuucuucgccaccauggccugggccguccccaagaacgacaacaacaagaccgccaccaacucccucaccgucgagguccccuacaucugcaccgagggcgaggaccagaucaccgucuggggcuuccacuccgacaacgagacccagauggccaagcucuacggcgacuccaagccccagaaguucaccuccuccgccaacggcgucaccacccacuacgucucccagaucggcggcuuccccaaccaggccgaggacggcggccucccccaguccggccgcaucgucgucgacuacaugguccagaaguccggcaagaccggcaccaucaccuaccagcgcggcauccuccucccccagaaggucuggugcgccuccggccgcuccaaggucaucaagggcucccucccccucaucggcgaggccgacugccuccacgagaaguacggcggccucaacaaguccaagcccuacuacaccggcgagcacgccaaggccaucggcaacugccccaucugggucaagaccccccucaaccucgccaacggcaccaaguaccgcccccccgccaagcuccucaaggagcgcggcuucuucggcgccaucgccggcuuccucgagggcggcugggagggcaugaucgccggcuggcacggcuacaccucccacggcgcccacggcgucgccgucgccgccgaccucaaguccacccaggaggccaucaacaagaucaccaagaaccucaacucccucuccgagcucgaggucaagaaccuccagcgccucuccggcgccauggacgagcuccacaacgagauccucgagcucgacgagaaggucgacgaccuccgcgccgacaccaucuccucccagaucgagcucgccguccuccucuccaacgagggcaucaucaacuccgaggacgagcaccuccucgcccucgagcgcaagcucaagaagaugcucggccccuccgccgucgagaucggcaacggcugcuucgagaccaagcacaagugcaaccagaccugccucgaccgcaucgccgccggcaccuucaacgccggcgaguucucccuccccaccuucgacucccucaacaucaccgccgccucccucaacgacgacggccucgacaaccacaccauccuccucuacuacuccaccgccgccuccucccucgccgucacccucaugaucgccaucuucaucgucuacauggucucccgcgacaacgucuccugcuccaucugccucuga

SEQ ID NO: 122509 - RNA, 1755 nt, Artificial Sequence
  derived and/or modified CDS sequence (opt2) from hemagglutinin__InfluenzaB__ABL77332
augaaggccaucaucguccuccucauggucgucaccuccaacgccgaccgcaucugcaccggcaucaccuccuccaacuccccccacgucgucaagaccgccacccagggcgaggucaacgucaccggcgucaucccccucaccaccacccccaccaagucccacuucgccaaccucaagggcaccaagacccgcggcaagcucugccccaacugccucaacugcaccgaccucgacgucgcccucggccgccccaugugcgucggcaccacccccuccgccaaggccuccauccuccacgagguccgccccgucaccuccggcugcuuccccaucaugcacgaccgcaccaagauccgccagcuccccaaccuccuccgcggcuacgagaacauccgccucuccacccagaacgucaucaacgccgagaaggcccccggcggccccuacaagcucggcaccuccggcuccugccccaacgccaccucccgcuccggcuucuucgccaccauggccugggccgucccccgcgacaacaacaagaccgccaccaacccccucaccgucgagguccccuacaucugcaccaagggcgaggaccagaucaccgucuggggcuuccacuccgacgacaagacccagaugaagaaccucuacggcgacuccaacccccagaaguucaccuccuccgccaacggcgucaccacccacuacgucucccagaucggcggcuuccccgaccagaccgaggacggcggccucccccaguccggccgcaucgucgucgacuacaugguccagaagcccggcaagaccggcaccaucgucuaccagcgcggcguccuccucccccagaaggucuggugcgccuccggccgcuccaaggucaucaagggcucccucccccucaucggcgaggccgacugccuccacgagaaguacggcggccucaacaaguccaagcccuacuacaccggcgagcacgccaaggccaucggcaacugccccaucugggucaagaccccccucaagcucgccaacggcaccaaguaccgcccccccgccaagcuccucaaggagcgcggcuucuucggcgccaucgccggcuuccucgagggcggcugggagggcaugaucgccggcuggcacggcuacaccucccacggcgcccacggcgucgccgucgccgccgaccucaaguccacccaggaggccaucaacaagaucaccaagaaccucaacucccucuccgagcucgaggucaagaaccuccagcgccucuccggcgccauggacgagcuccacaacgagauccucgagcucgacgagaaggucgacgaccuccgcgccgacaccaucuccucccagaucgagcucgccguccuccucuccaacgagggcaucaucaacuccgaggacgagcaccuccucgcccucgagcgcaagcucaagaagaugcucggccccuccgccgucgacaucggcaacggcugcuucgagaccaagcacaagugcaaccagaccugccucgaccgcaucgccgccggcaccuucaacgccggcgaguucucccuccccaccuucgacucccucaacaucaccgccgccucccucaacgacgacggccucgacaaccacgccauccuccucuacuacuccaccgccgccuccucccucgccgucacccucaugaucgccaucuucaucgucuacauggucucccgcgacaacgucuccugcuccaucugccucuga

SEQ ID NO: 122510 - RNA, 1755 nt, Artificial Sequence
  derived and/or modified CDS sequence (opt2) from hemagglutinin__InfluenzaB__ABL77343
augaaggccaucaucguccuccucauggucgucaccuccaacgccgaccgcaucugcaccggcaucaccuccuccaacuccccccacgucgucaagaccgccacccagggcgaggucaacgucaccggcgucaucccccucaccaccacccccaccaagucccacuucgccaaccucaagggcaccaagacccgcggcaagcucugccccaacugccucaacugcaccgaccucgacgucgcccucggccgccccaugugcgucggcaccacccccuccgccaaggccuccauccuccacgagguccgccccgucaccuccggcugcuuccccaucaugcacgaccgcaccaagauccgccagcuccccaaccuccuccgcggcuacgagaacauccgccucuccacccagaacgucaucaacgccgagaaggcccccggcggccccuaccgccucggcaccuccggcuccugccccaacgccaccucccgcuccggcuucuucgccaccauggccugggccgucccccgcgacaacaacaagaccgccaccaacccccucaccgucgagguccccuacaucugcaccaagggcgaggaccagaucaccgucuggggcuuccacuccgacaacaagauccagaugaagaaccucuacggcgacuccaacccccagaaguucaccuccuccgccaacggcgucaccacccacuacgucucccagaucggcggcuuccccgaccagaccgaggacggcggccucccccaguccggccgcaucgucgucgacuacaugguccagaagcccggcaagaccggcaccaucgucuaccagcgcggcguccuccucccccagaaggucuggugcgccuccggccgcuccaaggucgucaagggcucccucccccucaucggcgaggccgacugccuccacgagaaguacggcggccucaacaaguccaagcccuacuacaccggcgagcacgccaaggccaucggcaacugccccaucugggucaagaccccccucaagcucgccaacggcaccaaguaccgcccccccgccaagcuccucaaggagcgcggcuucuucggcgccaucgccggcuuccucgagggcggcugggagggcaugaucgccggcuggcacggcuacaccucccacggcgcccacggcgucgccgucgccgccgaccucaaguccacccaggaggccaucaacaagaucaccaagaaccucaacucccucuccgagcucgaggucaagaaccuccagcgccucuccggcgccauggacgagcuccacaacgagauccucgagcucgacgagaaggucgacgaccuccgcgccgacaccaucuccucccagaucgagcucgccguccuccucuccaacgagggcaucaucaacuccgaggacgagcaccuccucgcccucgagcgcaagcucaagaagaugcucggccccuccgccgucgacaucggcaacggcugcuucgagaccaagcacaagugcaaccagaccugccucgaccgcaucgccgccggcaccuucaacgccggcgaguucucccuccccaccuucgacucccucaacaucaccgccgccucccucaacgacgacggccucgacaaccacaccauccuccucuacuacuccaccgccgccuccucccucgccgucacccucaugaucgccaucuucaucgucuacauggucucccgcgacaacgucuccugcuccaucugccucuga

SEQ ID NO: 122511 - RNA, 1755 nt, Artificial Sequence
  derived and/or modified CDS sequence (opt2) from hemagglutinin__InfluenzaB__ABL77365
augaaggccaucaucguccuccucauggucgucaccuccaacgccgaccgcaucugcaccggcaucaccuccuccaacuccccccacgucgucaagaccgccacccagggcgaggucaacgucaccggcgucaucccccucaccaccacccccaccaagucccacuucgccaaccucaagggcaccaagacccgcggcaagcucugccccaacugccucaacugcaccgaccucgacgucgcccucggccgccccaugugcgucggcaccacccccuccgccaaggccuccauccuccacgagguccgccccgucaccuccggcugcuuccccaucaugcacgaccgcaccaagauccgccagcuccccaaccuccuccgcggcuacgagaacauccgccucuccacccagaacgucaucaacgccgagaaggcccccggcggccccuaccgccucggcaccuccggcuccugccccaacgccaccucccgcuccggcuucuucgccaccauggccugggccgucccccgcgacaacaacaagaccgccaccaacccccucaccgucgagguccccuacgucugcaccgagggcgaggaccagaucaccgucuggggcuuccacuccgacaacaagacccagaugaagaaccucuacggcgacuccaacccccagaaguucaccuccuccgccaacggcgucaccacccacuacgucucccagaucggcggcuuccccgaccaggccgaggacggcggccucccccaguccggccgcaucgucgucgacuacaugguccagaagcccggcaagaccggcaccaucgucuaccagcgcggcguccuccucccccagaaggucuggugcgccuccggccgcuccaaggucaucaagggcucccucccccucaucggcgaggccgacugccuccacgagaaguacggcggccucaacaaguccaagcccuacuacaccggcgagcacgccaaggccaucggcaacugccccaucugggucaagaccccccucaagcucgccaacggcaccaaguaccgcccccccgccaagcuccucaaggagcgcggcuucuucggcgccaucgccggcuuccucgagggcggcugggagggcaugaucgccggcuggcacggcuacaccucccacggcgcccacggcgucgccgucgccgccgaccucaaguccacccaggaggccaucaacaagaucaccaagaaccucaacucccucuccgagcucgaggucaagaaccuccagcgccucuccggcgccauggacgagcuccacaacgagauccucgagcucgacgagaaggucgacgaccuccgcgccgacaccaucuccucccagaucgagcucgccguccuccucuccaacgagggcaucaucaacuccgaggacgagcaccuccucgcccucgagcgcaagcucaagaagaugcucggccccuccgccgucgacaucggcaacggcugcuucgagaccaagcacaagugcaaccagaccugccucgaccgcaucgccgccggcaccuucaacgccggcgaguucucccuccccaccuucgacucccucaacaucaccgccgccucccucaacgacgacggccucgacaaccacaccauccuccucuacuacuccaccgccgccuccucccucgccgucacccucaugaucgccaucuucaucgucuacauggucucccgcgacaacgucuccugcuccaucugccucuga

SEQ ID NO: 122512 - RNA, 1755 nt, Artificial Sequence
  derived and/or modified CDS sequence (opt2) from hemagglutinin__InfluenzaB__ABL84340
augaaggccaucaucguccuccucauggucgucaccuccaacgccgaccgcaucugcaccggcaucaccuccuccaacuccccccacgucgucaagaccgccacccagggcgaggucaacgucaccggcgucaucccccucaccaccacccccaccaagucccacuucgccaaccucaagggcaccaagacccgcggcaagcucugccccaccugccucaacugcaccgaccucgacgucgcccucggccgccccaugugcgucggcaucacccccuccgccaaggccuccauccuccacgagguccgccccgucaccuccggcugcuuccccaucaugcacgaccgcaccaagauccgccagcuccccaaccuccuccgcggcuacgagaagauccgccucuccacccagaacgucaucaacgccgagaaggcccccggcggccccuaccgccucggcaccuccggcuccugccccaacaccaccuccaaguccggcuucuucgccaccauggccugggccgucccccgcgacaacaacaagaccgccaccaacccccucaccgucgaggucccccacaucugcaccaaggaggaggaccagaucaccgucuggggcuuccacuccgacaacaagacccagaugaagaaccucuacggcgacuccaacccccagaaguucaccuccuccgccaacggcgucaccacccacuacgucucccagaucggcggcuuccccgaccagaccgaggacggcggccucccccaguccggccgcaucgucgucgacuacaugguccagaagcccggcaagaccggcaccaucgucuaccagcgcggcauccuccucccccagaaggucuggugcgccuccggccgcuccaaggucaucaagggcucccucccccucaucggcgaggccgacugccuccacgagaaguacggcggccucaacaaguccaagcccuacuacaccggcgagcacgccaaggccaucggcaacugccccaucugggucaagaccccccucaagcucgccaacggcaccaaguaccgcccccccgccaagcuccucaaggagcgcggcuucuucggcgccaucgccggcuuccucgagggcggcugggagggcaugaucgccggcuggcacggcuacaccucccacggcgcccacggcgucgccgucgccgccgaccucaaguccacccaggaggccaucaacaagaucaccaagaaccucaacucccucuccgagcucgaggucaagaaccuccagcgccucuccggcgccauggacgagcuccacaacgagauccucgagcucgacgagaaggucgacgaccuccgcgccgacaccaucuccucccagaucgagcucgccguccuccucuccaacgagggcaucaucaacuccgaggacgagcaccuccucgcccucgagcgcaagcucaagaagaugcucggccccuccgccgucgacaucggcaacggcugcuucgagaccaagcacaagugcaaccagaccugccucgaccgcaucgccgccggcaccuucaacgccggcgaguucucccuccccaccuucgacucccucaacaucaccgccgccucccucaacggcgacggccucgacaaccacaccauccuccucuacuacuccaccgccgccuccucccucgccgucacccucaugaucgccaucuucaucgucuacaugaucucccgcgacaacgucuccugcuccaucugccucuga

SEQ ID NO: 122513 - RNA, 1755 nt, Artificial Sequence; identical to SEQ ID NO: 122434
  derived and/or modified CDS sequence (opt2) from hemagglutinin__InfluenzaB__ABN50382

SEQ ID NO: 122514 - RNA, 1755 nt, Artificial Sequence; identical to SEQ ID NO: 122434
  derived and/or modified CDS sequence (opt2) from hemagglutinin__InfluenzaB__ABN50393

SEQ ID NO: 122515 - RNA, 1755 nt, Artificial Sequence
  derived and/or modified CDS sequence (opt2) from hemagglutinin__InfluenzaB__ABN50404
augaaggccaucaucguccuccucauggucgucaccuccaacgccgaccgcaucugcaccggcaucaccuccuccaacuccccccacgucgucaagaccgccacccagggcgaggucaacgucaccggcgucaucccccucaccaccacccccaccaagucccacuucgccaaccucaagggcaccaagacccgcggcaagcucugccccaccugccucaacugcaccgaccucgacgucgcccucggccgccccaugugcgucggcgucacccccuccgccaaggccuccauccuccacgagguccgccccgucaccuccggcugcuuccccaucaugcacgaccgcaccaagauccgccagcuccccaaccuccuccgcggcuacgagaagauccgccucuccacccagaacgucaucaacgccgagaaggcccccggcggccccuaccgccucggcaccuccggcuccugccccaacgccaccucccgcuccggcuucuucgccaccauggccugggccgucccccgcgacaacaacaagaccgccaccaacccccucaccgucgaggucccccacaucugcaccaaggaggaggaccagaucaccgucuggggcuuccacuccgacaacaagacccagaugaagaaccucuacggcgacuccaacccccagaaguucaccuccuccgccaacggcgucaccacccacuacgucucccagaucggcggcuuccccgaccagaccgaggacggcggccucccccaguccggccgcaucgucgucgacuacaugguccagaagcccggcaagaccggcaccaucgucuaccagcgcggcauccuccucccccagaaggucuggugcgccuccggccgcuccaaggucaucaagggcucccucccccucaucggcgaggccgacugccuccacgagaaguacggcggccucaacaaguccaagcccuacuacaccggcgagcacgccaaggccaucggcaacugccccaucugggucaagaccccccucaagcucgccaacggcaccaaguaccgcccccccgccaagcuccucaaggagcgcggcuucuucggcgccaucgccggcuuccucgagggcggcugggagggcaugaucgccggcuggcacggcuacaccucccacggcgcccacggcgucgccgucgccgccgaccucaaguccacccaggaggccaucaacaagaucaccaagaaccucaacucccucuccgagcucgaggucaagaaccuccagcgccucuccggcgccauggacgagcuccacaacgagauccucgagcucgacgagaaggucgacgaccuccgcgccgacaccaucuccucccagaucgagcucgccguccuccucuccaacgagggcaucaucaacuccgaggacgagcaccuccucgcccucgagcgcaagcucaagaagaugcucggccccuccgccgucgacaucggcaacggcugcuucgagaccaagcacaagugcaaccagaccugccucgaccgcaucgccgccggcaccuucaacgccggcgaguucucccuccccaccuucgacucccucaacaucaccgccgccucccucaacgacgacggccucgacaaccacaccauccuccucuacuacuccaccgccgccuccucccucgccgucacccucaugaucgccaucuucaucgucuacaugaucucccgcgacaacgucuccugcuccaucugccucuga

SEQ ID NO: 122516 - RNA, 1755 nt, Artificial Sequence; identical to SEQ ID NO: 122443
  derived and/or modified CDS sequence (opt2) from hemagglutinin__InfluenzaB__ABN50415

SEQ ID NO: 122517 - RNA, 1755 nt, Artificial Sequence; identical to SEQ ID NO: 122443
  derived and/or modified CDS sequence (opt2) from hemagglutinin__InfluenzaB__ABN50426

SEQ ID NO: 122518 - RNA, 1755 nt, Artificial Sequence
  derived and/or modified CDS sequence (opt2) from hemagglutinin__InfluenzaB__ABN50437
augaaggccaucaucguccuccucauggucgucaccuccaacgccgaccgcaucugcaccggcaucaccuccuccaacuccccccacgucgucaagaccgccacccagggcgaggucaacgucaccggcgucaucccccucaccaccacccccaccaaguccuacuucgccaaccucaagggcacccgcacccgcggcaagcucugccccgacugccucaacugcaccgaccucgacgucgcccucggccgccccaugugcgucggcaccacccccuccgccaaggccuccauccuccacgagguccgccccgucaccuccggcugcuuccccaucaugcacgaccgcaccaagauccgccagcuccccaaccuccuccgcggcuacgagaacauccgccucuccacccagaacgucaucgacgccgagaaggcccccggcggccccuaccgccucggcaccuccggcuccugccccaacgccaccuccaaguccggcuucuucgccaccauggccugggccguccccaaggacaacaacaagaacgccaccaacccccucaccgucgagguccccuacaucugcaccgagggcgaggaccagaucaccgucuggggcuuccacuccgacaacaagacccagaugaagaaccucuacggcgaccccaacccccagaaguucaccuccuccgccaacggcgucaccacccacuacgucucccagaucggcggcuuccccgaccagaccgaggacggcggccucccccaguccggccgcaucgucgucgacuacaugaugcagaagcccggcaagaccggcaccaucgucuaccagcgcggcguccuccucccccagaaggucuggugcgccuccggcaaguccaaggucaucaagggcucccucccccucaucggcgaggccgacugccuccacgagaaguacggcggccucaacaaguccaagcccuacuacaccggcgagcacgccaaggccaucggcaacugccccaucugggucaagaccccccucaagcucgccaacggcaccaaguaccgcccccccgccaagcuccucaaggagcgcggcuucuucggcgccaucgccggcuuccucgagggcggcugggagggcaugaucgccggcuggcacggcuacaccucccacggcgcccacggcgucgccgucgccgccgaccucaaguccacccaggaggccaucaacaagaucaccaagaaccucaacucccucuccgagcucgaggucaagaaccuccagcgccucuccggcgccauggacgagcuccacaacgagauccucgagcucgacgagaaggucgacgaccuccgcgccgacaccaucuccucccagaucgagcucgccguccuccucuccaacgagggcaucaucaacuccgaggacgagcaccuccucgcccucgagcgcaagcucaagaagaugcucggccccuccgccgucgacaucggcaacggcugcuucgagaccaagcacaagugcaaccagaccugccucgaccgcaucgccgccggcaccuucaacgccggcgaguucucccuccccaccuucgacucccucaacaucaccgccgccucccucaacgacgacggccucgacaaccacaccauccuccucuacuacuccaccgccgccuccucccucgccgucacccucaugcucgccaucuucaucgucuacauggucucccgcgacaacgucuccugcuccaucugccucuga

SEQ ID NO: 122519 - RNA, 1758 nt, Artificial Sequence
  derived and/or modified CDS sequence (opt2) from hemagglutinin__InfluenzaB__ABN50459
augaaggcccucaucguccuccucauggucgucaccuccaacgccgaccgcaucugcaccggcaucaccuccuccaacuccccccacgucgucaagaccgccacccagggcgaggucaacgucaccggcgucaucccccucaccaccacccccaccaagucccacuucgccaaccucaagggcaccaagacccgcggcaagcucugccccaagugccucaacugcaccgaccucgacgucgcccucggccgccccaagugcaccggcaacauccccuccgccgaggucuccauccuccacgagguccgccccgucaccuccggcugcuuccccaucaugcacgaccgcaccaagauccgccagcuccccaaccuccuccgcggcuacgagcacauccgccucuccacccacaacgucaucaacgccgagaaggcccccggcggccccuacaagaucggcaccuccggcuccugccccaacgucaccaacggcaacggcuucuucgccaccauggccugggccguccccaagaacgacaacaacaagaccgccaccaacucccucaccaucgagguccccuacaucugcaccgagggcgaggaccagaucaccaucuggggcuuccacuccgacaacgagauccagauggccaagcucuacggcgacuccaagccccagaaguucaccuccuccgccaacggcgucaccacccacuacgucucccagaucggcggcuuccccaaccagaccgaggacggcggccucccccaguccggccgcaucgucgucgacuacaugguccagaaguccggcaagaccggcaccaucaccuaccagcgcggcauccuccucccccagaaggucuggugcgccuccggccgcuccaaggucaucaagggcucccucccccucaucggcgaggccgacugccuccacgagaaguacggcggccucaacaaguccaagcccuacuacaccggcgagcacgccaaggccaucggcaacugccccaucugggucaagaccccccucaagcucgccaacggcaccaaguaccgcccccccgccaagcuccucaaggagcgcggcuucuucggcgccaucgccggcuuccucgagggcggcugggagggcaugaucgccggcuggcacggcuacaccucccacggcgcccacggcgucgccgucgccgccgaccucaaguccacccaggaggccaucaacaagaucaccaagaaccucaacucccucuccgagcucgaggucaagaaccuccagcgccucuccggcgccauggacgagcuccacaacgagauccucgagcucgacgagaaggucgacgaccuccgcgccgacaccaucuccucccagaucgagcucgccguccuccucuccaacgagggcaucaucaacuccgaggacgagcaccuccucgcccucgagcgcaagcucaagaagaugcucggccccuccgccgucgagaucggcaacggcugcuucgagaccaagcacaagugcaaccagaccugccucgaccgcaucgccgccggcaccuucgacgccggcgaguucucccuccccaccuucgacucccucaacaucaccgccgccucccucaacgacgacggccucgacaaccacaccauccuccucuacuacuccaccgccgccuccucccucgccgucacccucaugaucgccaucuucgucgucuacauggucucccgcgacaacgucuccugcuccaucugccucuga

SEQ ID NO: 122520 - RNA, 1758 nt, Artificial Sequence
  derived and/or modified CDS sequence (opt2) from hemagglutinin__InfluenzaB__ABN50470
augaaggccaucaucguccuccucauggucgucaccuccaacgccgaccgcaucugcaccggcaucaccuccuccaacuccccccacgucgucaagaccgccacccagggcgaggucaacgucaccggcgucaucccccucaccaccacccccaccaagucccacuucgccaaccucaagggcaccaagacccgcggcaagcucugccccaagugccucaacugcaccgaccucgacgucgcccucggccgccccaagugcaccggcaacauccccuccgccaaggucuccauccuccacgagguccgccccgucaccuccggcugcuuccccaucaugcacgaccgcaccaagauccgccagcuccccaaccuccuccgcggcuacgagcgcauccgccucuccaaccacaacgucaucaacgccgagaaggcccccggcggccccuacaagaucggcaccuccggcuccugccccaacgucaccaacggcaacggcuucuucgccaccauggccugggccguccccaagaacgagaacaacaagaccgccaccaacucccucaccaucgagguccccuacaucugcaccgagggcgaggaccagaucaccgucuggggcuuccacuccgacaacgagauccagauggccaagcucuacggcgacuccaagccccagaaguucaccuccuccgccaacggcgucaccacccacuacgucucccagaucggcggcuuccccaaccagaccgaggacggcggccucccccaguccggccgcaucgucgucgacuacaugguccagaaguccggcaagaccggcaccaucaccuaccagcgcggcauccuccucccccagaaggucuggugcgccuccggccgcuccaaggucaucaagggcucccucccccucaucggcgaggccgacugccuccacgagaaguacggcggccucaacaaguccaagcccuacuacaccggcgagcacgccaaggccaucggcaacugccccaucugggucaagaccccccucaagcucgccaacggcaccaaguaccgcccccccgccaagcuccucaaggagcgcggcuucuucggcgccaucgccggcuuccucgagggcggcugggagggcaugaucgccggcuggcacggcuacaccucccacggcgcccacggcgucgccgucgccgccgaccucaaguccacccaggaggccaucaacaagaucaccaagaaccucaacucccucuccgagcucgaggucaagaaccuccagcgccucuccggcgccauggacgagcuccacaacgagauccucgagcucgacgagaaggucgacgaccuccgcgccgacaccaucuccucccagaucgagcucgccguccuccucuccaacgagggcaucaucaacuccgaggacgagcaccuccucgcccucgagcgcaagcucaagaagaugcucggccccuccgccgucgagaucggcaacggcugcuucgagaccaagcacaagugcaaccagaccugccucgaccgcaucgccgccggcaccuucaacgccggcgaguucucccuccccaccuucgacucccucaacaucaccgccgccucccucaacgacgacggccucgacaaccacaccauccuccucuacuacuccaccgccgccuccucccucgccgucacccucaugaucgccaucuucgucgucuacauggucucccgcgacaacgucuccugcuccaucugccucuga

SEQ ID NO: 122521 - RNA, 1755 nt, Artificial Sequence
  derived and/or modified CDS sequence (opt2) from hemagglutinin__InfluenzaB__ABN50481
augaaggccaucaucguccuccuccucgucgucaccuccaacgccgaccgcaucugcaccggcaucaccuccuccaacuccccccacgucgucaagaccgccacccagggcgaggucaacgucaccggcgccaucccccucaccaccacccccaccaagucccacuucgccaaccucaagggcaccaagacccgcggcaagcucugccccaccugcuucaacugcaccgaccucgacgucgcccucggccgccccaugugcgucggcaucacccccuccgccaaggccuccauccuccacgagguccgccccgucaccuccggcugcuuccccaucaugcacgaccgcaccaagauccgccagcuccccaaccuccuccgcggcuacgagaagauccgccucuccacccagaacgucaucgacgccgagaaggcccccggcggccccuaccgccucggcaccuccggcuccugccccaacgccaccuccaaguccggcuucuucgccaccauggccugggccgucccccgcgacaacaacaagaccgccaccaacccccucaccgucgaggucccccacaucugcaccaaggaggaggaccagaucaccgucuggggcuuccacuccgacaacaagacccagaugaagaaccucuacggcgacuccaacccccagaaguucaccuccuccgccaacggcaucaccacccacuacgucucccagaucggcggcuuccccgaccagaccgaggacggcggccucccccaguccggccgcaucgucgucgacuacaugguccagaagcccggcaagaccggcaccaucgucuaccagcgcggcauccuccucccccagaaggucuggugcgccuccggccgcuccaaggucaucaagggcucccucccccucaucggcgaggccgacugccuccacgagaaguacggcggccucaacaaguccaagcccuacuacaccggcgagcacgccaaggccaucggcaacugccccaucugggucaagaccccccucaagcucgccaacggcaccaaguaccgcccccccgccaagcuccucaaggagcgcggcuucuucggcgccaucgccggcuuccucgagggcggcugggagggcaugaucgccggcuggcacggcuacaccucccacggcgcccacggcgucgccgucgccgccgaccucaaguccacccaggaggccaucaacaagaucaccaagaaccucaacucccucuccgagcucgaggucaagaaccuccagcgccucuccggcgccauggacgagcuccacaacgagauccucgagcucgacgagaaggucgacgaccuccgcgccgacaccaucuccucccagaucgagcucgccguccuccucuccaacgagggcaucaucaacuccgaggacgagcaccuccucgcccucgagcgcaagcucaagaagaugcucggccccuccgccgucgacaucggcaacggcugcuucgagaccaagcacaagugcaaccagaccugccucgaccgcaucgccgccggcaccuucaacgccggcgaguucucccuccccaccuucgacucccucaacaucaccgccgccucccucaacgacgacggccucgacaaccacaccauccuccucuacuacuccaccgccgccuccucccucgccgucacccucaugaucgccaucuucaucgucuacaugaucucccgcgacaacgucuccugcuccaucugccucuga

SEQ ID NO: 122522 - RNA, 1755 nt, Artificial Sequence
  derived and/or modified CDS sequence (opt2) from hemagglutinin__InfluenzaB__ABN50503
augaaggccaucaucguccuccucauggucgucaccuccaacgccgaccgcaucugcaccggcaucaccuccuccaacuccccccacgucgucaagaccgccacccagggcgaggucaacgucaccggcgucaucccccucaccaccacccccaccaagucccacuucgccaaccucaagggcaccaagacccgcggcaagcucugccccaccugccucaacugcaccgaccucgacgucgcccucggccgccccaugugcgucggcgucacccccuccgccaaggccuccauccuccacgagguccgccccgucaccuccggcugcuuccccaucaugcacgaccgcaccaagauccgccagcuccccaaccuccuccgcggcuacgagaagauccgccucuccacccagaacgucaucaacgccgagaaggcccccggcggccccuaccgccucggcaccuccggcuccugccccaacgccaccucccgcuccggcuucuucgccaccauggccugggccguccccaaggacaacaacaagaccgccaccaacccccucaccgucgaggucccccacaucugcaccaaggaggaggaccagaucaccgucuggggcuuccacuccgacgacaagacccagaugaagaaccucuacggcgacuccaacccccagaaguucaccuccuccgccaacggcgucaccacccacuacgucucccagaucggcggcuuccccgaccagaccgaggacggcggccucccccaguccggccgcaucgucgucgacuacaugguccagaagcccggcaagaccggcaccaucgucuaccagcgcggcauccuccucccccagaaggucuggugcgccuccggccgcuccaaggucaucaagggcucccucccccucaucggcgaggccgacugccuccacgagaaguacggcggccucaacaaguccaagcccuacuacaccggcgagcacgccaaggccaucggcaacugccccaucugggucaagaccccccucaagcucgccaacggcaccaaguaccgcccccccgccaagcuccucaaggagcgcggcuucuucggcgccaucgccggcuuccucgagggcggcugggagggcaugaucgccggcuggcacggcuacaccucccacggcgcccacggcgucgccgucgccgccgaccucaaguccacccaggaggccaucaacaagaucaccaagaaccucaacucccucuccgagcucgaggucaagaaccuccagcgccucuccggcgccauggacgagcuccacaacgagauccucgagcucgacgagaaggucgacgaccuccgcgccgacaccaucuccucccagaucgagcucgccguccuccucuccaacgagggcaucaucaacuccgaggacgagcaccuccucgcccucgagcgcaagcucaagaagaugcucggccccuccgccgucgacaucggcaacggcugcuucgagaccaagcacaagugcaaccagaccugccucgaccgcaucgccgccggcaccuucaacgccggcgaguucucccuccccaccuucgacucccucaacaucaccgccgccucccucaacgacgacggccucgacaaccacaccauccuccucuacuacuccaccgccgccuccucccucgccgucacccucaugaucgccaucuucaucgucuacaugaucucccgcgacaacgucuccugcuccaucugccucuga

SEQ ID NO: 122523 - RNA, 1755 nt, Artificial Sequence
  derived and/or modified CDS sequence (opt2) from hemagglutinin__InfluenzaB__ABN50514
augaaggccaucaucguccuccucauggucgccaccuccaacgccgaccgcaucugcaccggcaucaccuccuccaacuccccccacgucgucaagaccgccacccagggcgaggucaacgucaccggcgucaucccccucaccaccacccccaccaaguccuacuucgccaaccucaagggcacccgcacccgcggcaagcucugccccgacugccucaacugcaccgaccucgacgucgcccucggccgccccaugugcgucggcaccacccccuccgccaaggccuccauccuccacgagguccgccccgucaccuccggcugcuuccccaucaugcacgaccgcaccaagauccgccagcuccccaaccuccuccgcggcuacgagaacauccgccucuccacccagaacgucaucgacgccgagaaggcccccggcggccccuaccgccucggcaccuccggcuccugccccaacgccaccuccaaguccggcuucuucgccaccauggccugggccguccccaaggacaacaacaagaacgccaccaacccccucaccgucgagguccccuacgucugcaccgagggcgaggaccagaucaccgucuggggcuuccacuccgacaacaagccccagaugaagaaccucuacggcgacuccaacccccagaaguucaccuccuccgccaacggcgucaccacccacuacgucucccagaucggcggcuuccccgaccagaccgaggacggcggccucccccaguccggccgcaucgucgucgacuacaugguccagaagcccggcaagaccggcaccaucgucuaccagcgcggcguccuccucccccagaaggucuggugcgccuccggccgcuccaaggucaucaagggcucccucccccucaucggcgaggccgacugccuccacgagaaguacggcggccucaacaaguccaagcccuacuacaccggcgagcacgccaaggccaucggcaacugccccaucugggucaagaccccccucaagcucgccaacggcaccaaguaccgcccccccgccaagcuccucaaggagcgcggcuucuucggcgccaucgccggcuuccucgagggcggcugggagggcaugaucgccggcuggcacggcuacaccucccacggcgcccacggcgucgccgucgccgccgaccucaaguccacccaggaggccaucaacaagaucaccaagaaccucaacucccucuccgagcucgaggucaagaaccuccagcgccucuccggcgccauggacgagcuccacgacgagauccucgagcucgacgagaaggucgacgaccuccgcgccgacaccaucuccucccagaucgagcucgccguccuccucuccaacgagggcaucaucaacuccgaggacgagcaccuccucgcccucgagcgcaagcucaagaagaugcucggccccuccgccgucgacaucggcaacggcugcuucgagaccaagcacaagugcaaccagaccugccucgaccgcaucgccgccggcaccuucaacgccggcgaguucucccuccccaccuucgacucccucaacaucaccgccgccucccucaacgacgacggccucgacaaccacaccauccuccucuacuacuccaccgccgccuccucccucgccgucacccucaugcucgccaucuucaucgucuacauggucucccgcgacaacgucuccugcuccaucugccucuga

SEQ ID NO: 122524 - RNA, 1755 nt, Artificial Sequence
  derived and/or modified CDS sequence (opt2) from hemagglutinin__InfluenzaB__ABN50525
augaaggccaucaucguccuccucauggucgucaccuccaacgccgaccgcaucugcaccggcaucaccuccuccaacuccccccacgucgucaagaccgccacccagggcgaggucaacgucaccggcgucaucccccucaccaccacccccaccaaguccuacuucgccaaccucaagggcacccgcacccgcggcaagcucugccccgacugccucaacugcaccgaccucgacgucgcccucggccgccccaugugcgucggcaccacccccuccgccaaggccuccauccuccacgagguccgccccgucaccuccggcugcuuccccaucaugcacgaccgcaccaagauccgccagcuccccaaccuccuccgcggcuacgagaacauccgccucuccacccagaacgucaucgacgccgagaaggcccccggcggccccuaccgccucggcaccuccggcuccugccccaacgccaccuccaaguccggcuucuucuccaccauggccugggccguccccaaggacaacaacaagaacgccaccaacccccucaccgucgagguccccuacgucugcaccgagggcgaggaccagaucaccgucuggggcuuccacuccgacaacaagacccagaugaagaaccucuacggcgacuccaacccccagaaguucaccuccuccgccaacggcgucaccacccacuacgucucccagaucggcggcuuccccgaccagaccgaggacggcggccucccccaguccggccgcaucgucgucgacuacaugguccagaagcccggcaagaccggcaccaucgucuaccagcgcggcguccuccucccccagaaggucuggugcgccuccggccgcuccaaggucaucaagggcucccucccccucaucggcgaggccgacugccuccacgagaaguacggcggccucaacaaguccaagcccuacuacaccggcgagcacgccaaggccaucggcaacugccccaucugggucaagaccccccucaagcucgccaacggcaccaaguaccgcccccccgccaagcuccucaaggagcgcggcuucuucggcgccaucgccggcuuccucgagggcggcugggagggcaugaucgccggcuggcacggcuacaccucccacggcgcccacggcgucgccgucgccgccgaccucaaguccacccaggaggccaucaacaagaucaccaagaaccucaacucccucuccgagcucgaggucaagaaccuccagcgccucuccggcgccauggacgagcuccacaacgagauccucgagcucgacgagaaggucgacgaccuccgcgccgacaccaucuccucccagaucgagcucgccguccuccucuccaacgagggcaucaucaacuccgaggacgagcaccuccucgcccucgagcgcaagcucaagaagaugcucggccccuccgccgucgacaucggcaacggcugcuucgagaccaagcacaagugcaaccagaccugccucgaccgcaucgccgccggcaccuucaacgccggcgaguucucccuccccaccuucgacucccucaacaucaccgccgccucccucaacgacgacggccucgacaaccacaccauccuccucuacuacuccaccgccgccuccucccucgccgucacccucaugcucgccaucuucaucgucuacauggucucccgcgacaacgucuccugcuccaucugccucuga

SEQ ID NO: 122525 - RNA, 1758 nt, Artificial Sequence
  derived and/or modified CDS sequence (opt2) from hemagglutinin__InfluenzaB__ABN50536
augaaggccaucaucguccuccucauggucgucaccuccaacgccgaccgcaucugcaccggcaucaccuccuccaacuccccccacgucgucaagaccgccacccagggcgaggucaacgucaccggcgucaucccccucaccaccacccccaccaagucccacuucgccaaccucaagggcaccaagacccgcggcaagcucugccccaagugccucaacugcaccgaccucgacgucgcccucggccgccccaagugcaccggcaacauccccuccgccaaggucuccauccuccacgagguccgccccgucaccuccggcugcuuccccaucaugcacgaccgcaccaagauccgccagcuccccaaccuccuccgcggcuacgagcgcauccgccucuccaaccacaacgucaucaacgccgaggaggcccccggcggccccuacaagaucggcaccuccggcuccugccccaacgucaccaacggcaacggcuucuucgccaccauggccugggccguccccaagaacgagaacaacaagaccgccaccaacucccucaccaucgagguccccuacaucugcaccgagggcgaggaccagaucaccgucuggggcuuccacuccgacaacgagauccagauggccaagcucuacggcgacuccaagccccagaaguucaccuccuccgccaacggcgucaccacccacuacgucucccagaucggcggcuuccccaaccagaccgaggacggcggccucccccaguccggccgcaucgucgucgacuacaugguccagaaguccggcaagaccggcaccaucaccuaccagcgcggcauccuccucccccagaaggucuggugcgccuccggccgcuccaaggucaucaagggcucccucccccucaucggcgaggccgacugccuccacgagaaguacggcggccucaacaaguccaagcccuacuacaccggcgagcacgccaaggccaucggcaacugccccaucugggucaagaccccccucaagcucgccaacggcaccaaguaccgcccccccgccaagcuccucaaggagcgcggcuucuucggcgccaucgccggcuuccucgagggcggcugggagggcaugaucgccggcuggcacggcuacaccucccacggcgcccacggcgucgccgucgccgccgaccucaaguccacccaggaggccaucaacaagaucaccaagaaccucaacucccucuccgagcucgaggucaagaaccuccagcgccucuccggcgccauggacgagcuccacaacgagauccucgagcucgacgagaaggucgacgaccuccgcgccgacaccaucuccucccagaucgagcucgccguccuccucuccaacgagggcaucaucaacuccgaggacgagcaccuccucgcccucgagcgcaagcucaagaagaugcucggccccuccgccgucgagaucggcaacggcugcuucgagaccaagcacaagugcaaccagaccugccucgaccgcaucgccgccggcaccuucaacgccggcgaguucucccuccccaccuucgacucccucaacaucaccgccgccucccucaacgacgacggccucgacaaccacaccauccuccucuacuacuccaccgccgccuccucccucgccgucacccucaugaucgccaucuucgucgucuacauggucucccgcgacaacgucuccugcuccaucugccucuga

SEQ ID NO: 122526 - RNA, 1758 nt, Artificial Sequence
  derived and/or modified CDS sequence (opt2) from hemagglutinin__InfluenzaB__ABN50547
augaaggccaucaucguccuccucauggucgucaccuccaacgccgaccgcaucugcaccggcaucaccuccuccaacuccccccacgucgucaagaccgccacccagggcgaggucaacgucaccggcgucaucccccucaccaccacccccaccaagucccacuucgccaaccucaagggcaccaagacccgcggcaagcucugccccaagugccucaacugcaccgaccucgacgucgcccucggccgccccaagugcaccggcaacauccccuccgccaaggucuccauccuccacgagguccgccccgucaccuccggcugcuuccccaucaugcacgaccgcaccaagauccgccagcuccccaaccuccuccgcggcuacgagcacauccgccucuccacccacaacgucaucaacgccgagaaggcccccggcggccccuacaagaucggcaccuccggcuccugccccaacgucaccaacggcaacggcuucuucgccaccauggccugggccguccccaagaacgacaacaacaagaccgccaccaacucccucaccaucgagguccccuacaucugcaccgagggcgaggaccagcucaccgucuggggcuuccacuccgacaacgagaaccagauggccaagcucuacggcgacuccaagccccagaaguucaccuccuccgccaacggcgucaccacccacuacgucucccagaucggcggcuuccccaaccagaccgaggacggcggccucccccaguccggccgcaucgucgucgacuacaugguccagaaguccggcaagaccggcaccaucaccuaccagcgcggcauccuccucccccagaaggucuggugcgccuccggccgcuccaaggucaucaagggcucccucccccucaucggcgaggccgacugccuccacgagaaguacggcggccucaacaaguccaagcccuacuacaccggcgagcacgccaaggccaucggcaacugccccaucugggucaagaccccccucaagcucgccaacggcaccaaguaccgcccccccgccaagcuccucaaggagcgcggcuucuucggcgccaucgccggcuuccucgagggcggcugggagggcaugaucgccggcuggcacggcuacaccucccacggcgcccacggcgucgccgucgccgccgaccucaaguccacccaggaggccaucaacaagaucaccaagaaccucaacucccucuccgagcucgaggucaagaaccuccagcgccucuccggcgccauggacgagcuccacaacgagauccucgagcucgacgagaaggucgacgaccuccgcgccgacaccaucuccucccagaucgagcucgccguccuccucuccaacgagggcaucaucaacuccgaggacgagcaccuccucgcccucgagcgcaagcucaagaagaugcucggccccuccgccgucgagaucggcaacggcugcuucgagaccaagcacaagugcaaccagaccugccucgaccgcaucgccgccggcaccuucgacgccggcgaguucucccuccccaccuucgacucccucaacaucaccgccgccucccucaacgacgacggccucgacaaccacaccauccuccucuacuacuccaccgccgccuccucccucgccgucacccucaugaucgccaucuucgucgucuacauggucucccgcgacaacgucuccugcuccaucugccucuga

SEQ ID NO: 122527 - RNA, 1758 nt, Artificial Sequence
  derived and/or modified CDS sequence (opt2) from hemagglutinin__InfluenzaB__ABN50558
augaaggccaucaucguccuccucauggucgucaccuccaacgccgaccgcaucugcaccggcaucaccuccuccaacuccccccacgucgucaagaccgccacccagggcgaggucaacgucaccggcgucaucccccucaccaccacccccaccaagucccacuucgccaaccucaagggcaccaagacccgcggcaagcucugccccaagugccucaacugcaccgaccucgacgucgcccucggccgccccaagugcaccggcaacauccccuccgccaaggucuccauccuccacgagguccgccccgucaccuccggcugcuuccccaucaugcacgaccgcaccaagauccgccagcuccccaaccuccuccgcggcuacgagcacauccgccucuccacccacaacgucaucaacgccgagaaggcccccggcggccccuacaagaucggcaccuccggcuccugccccaacgucaccaacggcaacggcuucuucgccaccauggccugggccguccccaagaacgacaacaacaagaccgccaccaacucccucaccaucgagguccccuacaucugcaccgagggcgaggaccagaucaccgucuggggcuuccacuccgacaaggagacccagauggccaagcucuacggcgacuccaagccccagaaguucaccuccuccgccaacggcgucaccacccacuacgucucccagaucggcggcuuccccaaccagaccgaggacggcggccucccccaguccggccgcaucgucgucgacuacaugaugcagaaguccggcaagaccggcaccaucaccuaccagcgcggcauccuccucccccagaaggucuggugcgccuccggccgcuccaaggucaucaagggcucccucccccucaucggcgaggccgacugccuccacgagaaguacggcggccucaacaaguccaagcccuacuacaccggcgagcacgccaaggccaucggcaacugccccaucugggucaagaccccccucaagcucgccaacggcaccaaguaccgcccccccgccaagcuccucaaggagcgcggcuucuucggcgccaucgccggcuuccucgagggcggcugggagggcaugaucgccggcuggcacggcuacaccucccacggcgcccacggcgucgccgucgccgccgaccucaaguccacccaggaggccaucaacaagaucaccaagaaccucaacucccucuccgagcucgaggucaagaaccuccagcgccucuccggcgccauggacgagcuccacaacgagauccucgagcucgacgagaaggucgacgaccuccgcgccgacaccaucuccucccagaucgagcucgccguccuccucuccaacgagggcaucaucaacuccgaggacgagcaccuccucgcccucgagcgcaagcucaagaagaugcucggccccuccgccgucgagaucggcaacggcugcuucgagaccaagcacaagugcaaccagaccugccucgaccgcaucgccgccggcaccuucgacgccggcgaguucucccuccccaccuucgacucccucaacaucaccgccgccucccucaacgacgacggccucgacaaccacaccauccuccucuacuacuccaccgccgccuccucccucgccgucacccucaugaucgccaucuucgucgucuacauggucucccgcgacaacgucuccugcuccaucugccucuga

SEQ ID NO: 122528 - RNA, 1755 nt, Artificial Sequence; identical to SEQ ID NO: 122443
  derived and/or modified CDS sequence (opt2) from hemagglutinin__InfluenzaB__ABN50569

SEQ ID NO: 122529 - RNA, 1758 nt, Artificial Sequence; identical to SEQ ID NO: 122455
  derived and/or modified CDS sequence (opt2) from hemagglutinin__InfluenzaB__ABN50580

SEQ ID NO: 122530 - RNA, 1758 nt, Artificial Sequence
  derived and/or modified CDS sequence (opt2) from hemagglutinin__InfluenzaB__ABN50591
augaaggccaucaucguccuccucauggucgucaccuccaacgccgaccgcaucugcaccggcaucaccuccuccaacuccccccacgucgucaagaccgccacccagggcgaggucaacgucaccggcgucaucccccucaccaccacccccaccaagucccacuucgccaaccucaagggcaccaagacccgcggcaagcucugccccaagugccucaacugcaccgaccucgacgucgcccucggccgccccaagugcaccggcaacauccccuccgccaaggucuccauccuccacgagguccgccccgucaccuccggcugcuuccccaucaugcacgaccgcaccaagauccgccagcuccccaaccuccuccgcggcuacgagcgcauccgccucuccaaccacaacgucaucaacgccgagaaggcccccggcggccccuacaagaucggcaccuccggcuccugccccaacgucaccaacggcaacggcuucuucgccaccauggccugggccguccccaagaacgagaacaacaagaccgccaccaacucccucaccaucgagguccccuacaucugcaccgagggcgaggaccagaucaccgucuggggcuuccacuccgacaacgaggcccagauggccaagcucuacggcgacuccaagccccagaaguucaccuccuccgccaacggcgucaccacccacuacgucucccagaucggcggcuuccccaaccagaccgaggacggcggccucccccaguccggccgcaucgucgucgacuacaugguccagaaguccggcaagaccggcaccaucaccuaccagcgcggcauccuccucccccagaaggucuggugcgccuccggccgcuccaaggucaucaagggcucccucccccucaucggcgaggccgacugccuccacgagaaguacggcggccucaacaaguccaagcccuacuacaccggcgagcacgccaaggccaucggcaacugccccaucugggucaagaccccccucaagcucgccaacggcaccaaguaccgcccccccgccaagcuccucaaggagcgcggcuucuucggcgccaucgccggcuuccucgagggcggcugggagggcaugaucgccggcuggcacggcuacaccucccacggcgcccacggcgucgccgucgccgccgaccucaaguccacccaggaggccaucaacaagaucaccaagaaccucaacucccucuccgagcucgaggucaagaaccuccagcgccucuccggcgccauggacgagcuccacaacgagauccucgagcucgacgagaaggucgacgaccuccgcgccgacaccaucuccucccagaucgagcucgccguccuccucuccaacgagggcaucaucaacuccgaggacgagcaccuccucgcccucgagcgcaagcucaagaagaugcucggccccuccgccgucgagaucggcaacggcugcuucgagaccaagcacaagugcaaccagaccugccucgaccgcaucgccgccggcaccuucaacgccggcgaguucucccuccccaccuucgacucccucaacaucaccgccgccucccucaacgacgacggccucgacaaccacaccauccuccucuacuacuccaccgccgccuccucccucgccgucacccucaugaucgccaucuucgucgucuacauggucucccgcgacaacgucuccugcuccaucugccucuga

SEQ ID NO: 122531 - RNA, 1758 nt, Artificial Sequence
  derived and/or modified CDS sequence (opt2) from hemagglutinin__InfluenzaB__ABN50602
augaaggccaucaucguccuccucauggucgucaccuccaacgccgaccgcaucugcaccggcaucaccuccuccaacuccccccacgucgucaagaccgccacccagggcgaggucaacgucaccggcgucaucccccucaccaccacccccaccaagucccacuucgccaaccucaagggcaccaagacccgcggcaagcucugccccaagugccucaacugcaccgaccucgacgucgcccucggccgccccaagugcaugggcaccauccccuccgccaaggccuccauccuccacgaggucaagcccgucaccuccggcugcuuccccaucaugcacgaccgcaccaagauccgccagcuccccaaccuccuccgcggcuacgagaacauccgccucuccacccacaacgucaucaacgccgagaccgcccccggcggccccuacaagaucggcaccuccggcuccugccccaacaucaccaacggcaacggcuucuucgccaccauggccugggccguccccaagaacgacaacaacaagaccgccaccaacccccucaccgucgagguccccuacaucugcaccgagggcgaggaccagaucaccgucuggggcuuccacuccgacaacgagacccagauggucaagcucuacggcgacuccaagccccagaaguucaccuccuccgccaacggcgucaccgcccacuacgucucccagaucggcggcuuccccaaccaggccgaggacggcggccucccccaguccggccgcaucgucgucgacuacaugguccagaaguccggcaagaccggcaccaucaccuaccagcgcggcauccuccucccccagaaggucuggugcgccuccggccgcuccaaggucaucaagggcucccucccccucaucggcgaggccgacugccuccacgagaaguacggcggccucaacaaguccaagcccuacuacaccggcgagcacgccaaggccaucggcaacugccccaucugggucaagaccccccucaagcucgccaacggcaccaaguaccgcccccccgccaagcuccucaaggagcgcggcuucuucggcgccaucgccggcuuccucgagggcggcugggagggcaugaucgccggcuggcacggcuacaccucccacggcgcccacggcgucgccgucgccgccgaccucaaguccacccaggaggccaucaacaagaucaccaagaaccucaacucccucuccgagcucgaggucaagaaccuccagcgccucuccggcgccauggacgagcuccacaacgagauccucgagcucgacgagaaggucgacgaccuccgcgccgacaccaucuccucccagaucgagcucgccguccuccucuccaacgagggcaucaucaacuccgaggacgagcaccuccucgcccucgagcgcaagcucaagaagaugcucggccccuccgccgucgacaucggcaacggcugcuucgagaccaagcacaagugcaaccagaccugccucgaccgcaucgccgccggcaccuucaacgccggcgaguucucccuccccaccuucgacucccucaacaucaccgccgccucccucaacgacgacggccucgacaaccacaccauccuccucuacuacuccaccgccgccuccucccucgccgucacccucaugaucgccaucuucaucgucuacauggucucccgcgacaacgucuccugcuccaucugccucuga

SEQ ID NO: 122532 - RNA, 1752 nt, Artificial Sequence
  derived and/or modified CDS sequence (opt2) from hemagglutinin__InfluenzaB__ABN50624
augaaggccaucaucguccuccucauggucgucaccuccaacgccgaccgcaucugcaccggcaucaccuccuccaacuccccccacgucgucaagaccgccacccagggcgaggucaacgucaccggcgucaucccccucaccaccacccccaccaagucccacuucgccaaccucaagggcaccaagacccgcggcaagcucugccccaacugccucaacugcaccgaccucgacgucgcccucggccgccccaugugcaucggcaccauccccuccgccaaggccuccauccuccacgagguccgccccgucaccuccggcugcuuccccaucaugcacgaccgcaccaagauccgccagcuccccaaccuccuccgcggcuacgagaacauccgccucuccacccacaacgucaucaacgccgagcgcgcccccggcggccccuaccgccucggcaccuccggcuccugccccaacgucaccuccaaguccggcuucuucgccaccauggccugggccgucccccgcgacaacaagaccgccaccaacccccucaccgucgagguccccuacaucugcaccaagggcgaggaccagaucaccgucuggggcuuccacuccgacaacaagaaccagaugaagaaccucuacggcgacuccaacccccagaaguucaccuccuccgucaacggcgucaccacccacuacgucucccagaucggcggcuuccccaaccagaccgaggacggcggccucccccaguccggccgcaucgucgucgacuacaugguccagaagcccggcaagaccggcaccaucgucuaccagcgcggcguccuccucccccagaaggucuggugcgccuccggccgcuccaaggucaucaagggcucccucccccucaucggcgaggccgacugccuccacgagaaguacggcggccucaacaaguccaagcccuacuacaccggcgagcacgccaaggccaucggcaacugccccaucugggucaagaccccccucaagcucgccaacggcaccaaguaccgcccccccgccaagcuccucaaggagcgcggcuucuucggcgccaucgccggcuuccucgagggcggcugggagggcaugaucgccggcuggcacggcuacaccucccacggcgcccacggcgucgccgucgccgccgaccucaaguccacccaggaggccaucaacaagaucaccaagaaccucaacucccucuccgagcucgaggucaagaaccuccagcgccucuccggcgccauggacgagcuccacaacgagauccucgagcucgacgagaaggucgacgaccuccgcgccgacaccaucuccucccagaucgagcucgccguccuccucuccaacgagggcaucaucaacuccgaggacgagcaccuccucgcccucgagcgcaagcucaagaagaugcucggccccuccgccgucgacaucggcaacggcugcuucgagaccaagcacaagugcaaccagaccugccucgaccgcaucgccgccggcaccuucaacgccggcgaguucucccuccccaccuucgacucccucaacaucaccgccgccucccucaacgacgacggccucgacaaccacaccauccuccucuacuacuccaccgccgccuccucccucgccgucacccucaugaucgccaucuucaucgucuacauggucucccgcgacaacgucuccugcuccaucugccucuga

SEQ ID NO: 122533 - RNA, 1752 nt, Artificial Sequence
  derived and/or modified CDS sequence (opt2) from hemagglutinin__InfluenzaB__ABN50635
augaaggccaucaucguccuccucauggucgucaccuccaacgccgaccgcaucugcaccggcaucaccuccuccaacuccccccacgucgucaagaccgccacccagggcgaggucaacgucaccggcgucaucccccucaccaccacccccaccaagucccacuucgccaaccucaagggcaccaagacccgcggcaagcucugccccaacugccucaacugcaccgaccucgacgucgcccucggccgccccaugugcaucggcaccauccccuccgccaaggccuccauccuccacgagguccgccccgucaccuccggcugcuuccccaucaugcacgaccgcaccaagauccgccagcuccccaaccuccuccgcggcuacgagcacauccgccucuccacccacaacgucaucaacgccgagcgcgcccccggcggccccuaccgccucggcaccuccggcuccugccccaacgucaccucccgcuccggcuucuucgccaccauggccugggccgucccccgcgacaacaagaccgccaccaacccccucaccgucgagguccccuacaucugcaccaagggcgaggaccagaucaccgucuggggcuuccacuccgacuccaagacccagaugaagaaccucuacggcgacuccaacccccagaaguucaccuccuccgccaacggcgucaccacccacuacgucucccagaucggcggcuuccccaaccagaccgaggacggcggccucccccaguccggccgcaucgucgucgacuacaugguccagaagcccggcaagaccggcaccaucgucuaccagcgcggcguccuccucccccagaaggucuggugcgccuccggccgcuccaaggucaucaagggcucccucccccucaucggcgaggccgacugccuccacgagaaguacggcggccucaacaaguccaagcccuacuacaccggcgagcacgccaaggccaucggcaacugccccaucugggucaagaccccccucaagcucgccaacggcaccaaguaccgcccccccgccaagcuccucaaggagcgcggcuucuucggcgccaucgccggcuuccucgagggcggcugggagggcaugaucgccggcuggcacggcuacaccucccacggcgcccacggcgucgccgucgccgccgaccucaaguccacccaggaggccaucaacaagaucaccaagaaccucaacucccucuccgagcucgaggucaagaaccuccagcgccucuccggcgccauggacgagcuccacaacgagauccucgagcucgacgagaaggucgacgaccuccgcgccgacaccaucuccucccagaucgagcucgccguccuccucuccaacgagggcaucaucaacuccgaggacgagcaccuccucgcccucgagcgcaagcucaagaagaugcucggccccuccgccgucgacaucggcaacggcugcuucgagaccaagcacaagugcaaccagaccugccucgaccgcaucgccgccggcaccuucaacgccggcgaguucucccuccccaccuucgacucccucaacaucaccgccgccucccucaacgacgacggccucgacaaccacaccauccuccucuacuacuccaccgccgccuccucccucgccgucacccucaugaucgccaucuucaucgucuacauggucucccgcgacaacgucuccugcuccaucugccucuga

SEQ ID NO: 122534 - RNA, 1752 nt, Artificial Sequence
  derived and/or modified CDS sequence (opt2) from hemagglutinin__InfluenzaB__ABN50646
augaaggccaucaucguccuccucauggucgucaccuccaacgccgaccgcaucugcaccggcaucaccuccuccaacuccccccacgucgucaagaccgccacccagggcgaggucaacgucaccggcgucaucccccucaccaccacccccaccaagucccacuucgccaaccucaagggcaccaagacccgcggcaagcucugccccaacugccucaacugcaccgaccucgacgucgcccucggccgccccaugugcaucggcaccauccccuccgccaaggccuccauccuccacgagguccgccccgucaccuccggcugcuuccccaucaugcacgaccgcaccaagauccgccagcuccccaaccuccuccgcggcuacgagcacauccgccucuccacccacaacgucaucaacgccgagcgcgcccccggcggccccuaccgccucggcaccuccggcuccugccccaacgucaccucccgcuccggcuucuucgccaccauggccugggccgucccccgcgacaacaagaccgccaccaacccccucaccgucgagguccccuacaucugcaccaagggcgaggaccagaucaccgucuggggcuuccacuccgacaacaagaaccagaugaagaaccucuacggcgacuccaacccccagaaguucaccuccuccgccaacggcgucaccacccacuacgucucccagaucggcggcuuccccaaccagaccgaggacggcggccucccccaguccggccgcaucgucgucgacuacaugguccagaagcccggcaagaccggcaccaucgucuaccagcgcggcguccuccucccccagaaggucuggugcgccuccggccgcuccaaggucaucaagggcucccucccccucaucggcgaggccgacugccuccacgagaaguacggcggccucaacaaguccaagcccuacuacaccggcgagcacgccaaggccaucggcaacugccccaucugggucaagaccccccucaagcucgccaacggcaccaaguaccgcccccccgccaagcuccucaaggagcgcggcuucuucggcgccaucgccggcuuccucgagggcggcugggagggcaugaucgccggcuggcacggcuacaccucccacggcgcccacggcgucgccgucgccgccgaccucaaguccacccaggaggccaucaacaagaucaccaagaaccucaacucccucuccgagcucgaggucaagaaccuccagcgccucuccggcgccauggacgagcuccacaacgagauccucgagcucgacgagaaggucgacgaccuccgcgccgacaccaucuccucccagaucgagcucgccguccuccucuccaacgagggcaucaucaacuccgaggacgagcaccuccucgcccucgagcgcaagcucaagaagaugcucggccccuccgccgucgacaucggcaacggcugcuucgagaccaagcacaagugcaaccagaccugccucgaccgcaucgccgccggcaccuucaacgccggcgaguucucccuccccaccuucgacucccucaacaucaccgccgccucccucaacgacgacggccucgacaaccacaccauccuccucuacuacuccaccgccgccuccucccucgccgucacccucaugaucgccaucuucaucgucuacauggucucccgcgacaacgucuccugcuccaucugccucuga

SEQ ID NO: 122535 - RNA, 1752 nt, Artificial Sequence
  derived and/or modified CDS sequence (opt2) from hemagglutinin__InfluenzaB__ABN50657
augaaggccaucaucguccuccucauggucgucaccuccaacgccgaccgcaucugcaccggcaucaccuccuccaacuccccccacgucgucaagaccgccacccagggcgaggucaacgucaccggcgucaucccccucaccaccacccccaccaagucccacuucgccaaccucaagggcaccaagacccgcggcaagcucugccccaacugccucaacugcaccgaccucgacgucgcccucggccgccccaugugcgucggcaucacccccuccgccaaggccuccauccuccacgagguccgccccgucaccuccggcugcuuccccaucaugcacgaccgcaccaagauccgccagcuccccaaccuccuccgcggcuacgagaacauccgccucuccacccagaacgucaucaacgccgagaaggcccccggcggccccuaccgccucggcaccuccggcuccugccccaacgucaccucccgcaccggcuucuucgccaccauggccugggccgucccccgcgacaacaagaccgccaccaacccccucaccgucgagguccccuacaucugcaccaagggcgaggaccagaucaccgucuggggcuuccacuccgacaacaagacccagaugaagaaccucuacggcgacuccaacccccagaaguucaccuccuccgccaacggcgucaccacccacuacgucucccagaucggcggcuuccccgaccagaccgaggacggcggccucccccaguccggccgcaucgucgucgacuacaugguccagaagcccggcaagaccggcaccaucgucuaccagcgcggcauccuccucccccagaaggucuggugcgccuccggccgcuccaaggucaucaagggcucccucccccucaucggcgaggccgacugccuccacgagaaguacggcggccucaacaaguccaagcccuacuacaccggcgagcacgccaaggccaucggcaacugccccaucugggucaagaccccccucaagcucgccaacggcaccaaguaccgcccccccgccaagcuccucaaggagcgcggcuucuucggcgccaucgccggcuuccucgagggcggcugggagggcaugaucgccggcuggcacggcuacaccucccacggcgcccacggcgucgccgucgccgccgaccucaaguccacccaggaggccaucaacaagaucaccaagaaccucaacucccucuccgagcucgaggucaagaaccuccagcgccucuccggcgccauggacgagcuccacaacgagauccucgagcucgacgagaaggucgacgaccuccgcgccgacaccaucuccucccagaucgagcucgccguccuccucuccaacgagggcaucaucaacuccgaggacgagcaccuccucgcccucgagcgcaagcucaagaagaugcucggccccuccgccgucgacaucggcaacggcugcuucgagaccaagcacaagugcaaccagaccugccucgaccgcaucgccgccggcaccuucaacgccggcgaguucucccuccccaccuucgacucccucaacaucaccgccgccucccucaacgacgacggccucgacaaccacaccauccuccucuacuacuccaccgccgccuccucccucgccgucacccucaugaucgccaucuucaucgucuacauggucucccgcgacaacgucuccugcuccaucugccucuga

SEQ ID NO: 122536 - RNA, 1755 nt, Artificial Sequence
  derived and/or modified CDS sequence (opt2) from hemagglutinin__InfluenzaB__ABN50679
augaaggccaucaucguccuccucauggucgucaccuccaacgccgaccgcaucugcaccggcaucaccuccuccaacuccccccacgucgucaagaccgccacccagggcgaggucaacgucaccggcgucaucccccucaccaccacccccaccaagucccacuucgccaaccucaagggcaccaagacccgcggcaagcucugccccaacugccucaacugcaccgaccucgacgucgcccucggccgccccaugugcgucggcaccacccccuccgccaaggccuccauccuccacgagguccgccccgucaccuccggcugcuuccccaucaugcacgaccgcaccaagauccgccagcuccccaaccuccuccgcggcuacgagaacauccgccucuccacccagaacgucaucaacgccgagaaggcccccggcggccccuaccgccucggcaccuccggcuccugccccaacgccaccucccgcuccggcuucuucgccaccauggccugggccgucccccgcgacaacaacaagaccgccaccaacccccucaccgucgagguccccuacaucugcaccaagggcgaggaccagaucaccgucuggggcuuccacuccgacgacaagacccagaugaagaaccucuacggcgacuccaacccccagaaguucaccuccuccgccaacggcgucaccacccacuacgucucccagaucggcggcuuccccgaccagaccgaggacggcggccucccccaguccggccgcaucgucgucgacuacaugguccagaagcccggcaagaccggcaccaucgucuaccagcgcggcguccuccucccccagaaggucuggugcgccuccggccgcuccaaggucaucaagggcucccucccccucaucggcgaggccgacugccuccacgagaaguacggcggccucaacaaguccaagcccuacuacaccggcgagcacgccaaggccaucggcaacugccccaucugggucaagaccccccucaagcucgccaacggcaccaaguaccgcccccccgccaagcuccucaaggagcgcggcuucuucggcgccaucgccggcuuccucgagggcggcugggagggcaugaucgccggcuggcacggcuacaccucccacggcgcccacggcgucgccgucgccgccgaccucaaguccacccaggaggccaucaacaagaucaccaagaaccucaacucccucuccgagcucgaggucaagaaccuccagcgccucuccggcgccauggacgagcuccacaacgagauccucgagcucgacgagaaggucgacgaccuccgcgccgacaccaucuccucccagaucgagcucgccguccuccucuccaacgagggcaucaucaacuccgaggacgagcaccuccucgcccucgagcgcaagcucaagaagaugcucggccccuccgccgucgacaucggcaacggcugcuucgagaccaagcacaagugcaaccagaccugccucgaccgcaucgccgccggcaccuucaacgccggcgaguucucccuccccaccuucgacucccucaacaucaccgccgccucccucaacgacgacggccucgacaaccacaccauccuccucuacuacuccaccgccgccuccucccucgccgucacccucaugaucgccaucuucaucgucuacauggucucccgcgacaacgucuccugcuccaucugccucuga

SEQ ID NO: 122537 - RNA, 1755 nt, Artificial Sequence
  derived and/or modified CDS sequence (opt2) from hemagglutinin__InfluenzaB__ABN50690
augaaggccaucaucguccuccucauggucgucaccuccaacgccgaccgcaucugcaccggcaucaccuccuccaacuccccccacgucgucaagaccgccacccagggcgaggucaacgucaccggcgucaucccccucaccaccacccccaccaagucccacuucgccaaccucaagggcaccaagacccgcggcaagcucugccccaacugccucaacugcaccgaccucgacgucgcccucggccgccccaugugcgucggcaccacccccuccgccaaggccuccauccuccacgagguccgccccgucaccuccggcugcuuccccaucaugcacgaccgcaccaagauccgccagcuccccaaccuccuccgcggcuacgagaacauccgccucuccacccagaacgucaucaacgccgagaaggcccccggcggccccuaccgccucggcaccuccggcuccugccccaacgccaccucccgcuccggcuucuucgccaccauggccugggccgucccccgcgacaacaacaagaccgccaccaacccccucaccgucgagguccccuacgucugcaccgagggcgaggaccagaucaccgucuggggcuuccacuccgacaacaagacccagaugaagaaccucuacggcgacuccaacccccagaaguucaccuccuccgccaacggcgucaccacccacuacgucucccagaucggcggcuuccccgaccagaccgaggacggcggccucccccaguccggccgcaucgucgucgacuacaugguccagaagcccggcaagaccggcaccaucgucuaccagcgcggcguccuccucccccagaaggucuggugcgccuccggccgcuccaaggucaucaagggcucccucccccucaucggcgaggccgacugccuccacgagaaguacggcggccucaacaaguccaagcccuacuacaccggcgagcacgccaaggccaucggcaacugccccaucugggucaagaccccccucaagcucgccaacggcaccaaguaccgcccccccgccaagcuccucaaggagcgcggcuucuucggcgccaucgccggcuuccucgagggcggcugggagggcaugaucgccggcuggcacggcuacaccucccacggcgcccacggcgucgccgucgccgccgaccucaaguccacccaggaggccaucaacaagaucaccaagaaccucaacucccucuccgagcucgaggucaagaaccuccagcgccucuccggcgccauggacgagcuccacaacgagauccucgagcucgacgagaaggucgacgaccuccgcgccgacaccaucuccucccagaucgagcucgccguccuccucuccaacgagggcaucaucaacuccgaggacgagcaccuccucgcccucgagcgcaagcucaagaagaugcucggccccuccgccgucgacaucggcaacggcugcuucgagaccaagcacaagugcaaccagaccugccucgaccgcaucgccgccggcaccuucaacgccggcgaguucucccuccccaccuucgacucccucaacaucaccgccgccucccucaacgacgacggccucgacaaccacaccauccuccucuacuacuccaccgccgccuccucccucgccgucacccucaugaucgccaucuucaucgucuacauggucucccgcgacaacgucuccugcuccaucugccucuga

SEQ ID NO: 122538 - RNA, 1752 nt, Artificial Sequence
  derived and/or modified CDS sequence (opt2) from hemagglutinin__InfluenzaB__ABN50701
augaaggccaucaucguccuccucauggucgucaccuccaacgccgaccgcaucugcaccggcaucaccuccuccaacuccccccacgucgucaagaccgccacccagggcgaggucaacgucaccggcgucaucccccucaccaccacccccaccaagucccacuucgccaaccucaagggcaccaagacccgcggcaagcucugccccaacugccucaacugcaccgaccucgacgucgcccucggccgccccaugugcgucggcaucacccccuccgccaaggccuccauccuccacgagguccgccccgucaccuccggcugcuuccccaucaugcacgaccgcaccaagauccgccagcuccccaaccuccuccgcggcuacgagaacauccgccucuccacccagaacgucaucaacgccgagaaggcccccggcggccccuaccgccucggcaccuccggcuccugccccaacgucaccucccgcaccggcuucuucgccaccauggccugggccgucccccgcgacaacaagaccgccaccaacccccucaccgucgagguccccuacaucugcaccaagggcgaggaccagaucaccgucuggggcuuccacuccgacaacaaggcccagaugaagaaccucuacggcgacuccaacccccagaaguucaccuccuccgccaacggcgucaccacccacuacgucucccagaucggcggcuuccccgaccagaccgaggacggcggccucccccaguccggccgcaucgucgucgacuacaugguccagaagcccggcaagaccggcaccaucgucuaccagcgcggcauccuccucccccagaaggucuggugcgccuccggccgcuccaaggucaucaagggcucccucccccucaucggcgaggccgacugccuccacgagaaguacggcggccucaacaaguccaagcccuacuacaccggcgagcacgccaaggccaucggcaacugccccaucugggucaagaccccccucaagcucgccaacggcaccaaguaccgcccccccgccaagcuccucaaggagcgcggcuucuucggcgccaucgccggcuuccucgagggcggcugggagggcaugaucgccggcuggcacggcuacaccucccacggcgcccacggcgucgccgucgccgccgaccucaaguccacccaggaggccaucaacaagaucaccaagaaccucaacucccucuccgagcucgaggucaagaaccuccagcgccucuccggcgccauggacgagcuccacaacgagauccucgagcucgacgagaaggucgacgaccuccgcgccgacaccaucuccucccagaucgagcucgccguccuccucuccaacgagggcaucaucaacuccgaggacgagcaccuccucgcccucgagcgcaagcucaagaagaugcucggccccuccgccgucgacaucggcaacggcugcuucgagaccaagcacaagugcaaccagaccugccucgaccgcaucgccgccggcaccuucaacgccggcgaguucucccuccccaccuucgacucccucaacaucaccgccgccucccucaacgacgacggccucgacaaccacaccauccuccucuacuacuccaccgccgccuccucccucgccgucacccucaugaucgccaucuucaucgucuacauggucucccgcgacaacgucuccugcuccaucugccucuga

SEQ ID NO: 122539 - RNA, 1755 nt, Artificial Sequence; identical to SEQ ID NO: 122537
  derived and/or modified CDS sequence (opt2) from hemagglutinin__InfluenzaB__ABN50712

SEQ ID NO: 122540 - RNA, 1755 nt, Artificial Sequence
  derived and/or modified CDS sequence (opt2) from hemagglutinin__InfluenzaB__ABN50723
augaaggccaucaucguccuccucauggucgucaccuccaacgccgaccgcaucugcaccggcaucaccuccuccaacuccccccacgucgucaagaccgccacccagggcgaggucaacgucaccggcgucaucccccucaccaccacccccaccaagucccacuucgccaaccuccgcggcaccaagacccgcggcaagcucugccccaccugccucaacugcaccgaccucgacgucgcccucggccgccccaugugcgucggcaccacccccuccgccaaggccuccauccuccacgagguccgccccgucaccuccggcugcuuccccaucaugcacgaccgcaccaagauccgccagcuccccaaccuccuccgcggcuacgagaagauccgccucuccacccagaacgucaucaacgccgagaaggcccccggcggccccuaccgccucggcaccuccggcuccugccccaacgccaccucccgcuccggcuucuucgccaccauggccugggccgucccccgcgacaacaacaagaccgccaccaacccccucaccgucgagguccccuacaucugcaccaaggaggaggaccagaucaccgucuggggcuuccacuccgacaacaagacccagaugaagaaccucuacggcgacuccaacccccagaaguucaccuccuccgccaacggcgucaccacccacuacgucucccagaucggcggcuuccccgaccagaccgaggacggcggccucccccaguccggccgcaucgucgucgacuacaugguccagaagcccggcaagaccggcaccaucgucuaccagcgcggcauccuccucccccagaaggucuggugcgccuccggccgcuccaaggucaucaagggcucccucccccucaucggcgaggccgacugccuccacgagaaguacggcggccucaacaaguccaagcccuacuacaccggcgagcacgccaaggccaucggcaacugccccaucugggucaagaccccccucaagcucgccaacggcaccaaguaccgcccccccgccaagcuccucaaggagcgcggcuucuucggcgccaucgccggcuuccucgagggcggcugggagggcaugaucgccggcuggcacggcuacaccucccacggcgcccacggcgucgccgucgccgccgaccucaaguccacccaggaggccaucaacaagaucaccaagaaccucaacucccucuccgagcucgaggucaagaaccuccagcgccucuccggcgccauggacgagcuccacaacgagauccucgagcucgacgagaaggucgacgaccuccgcgccgacaccaucuccucccagaucgagcucgccguccuccucuccaacgagggcaucaucaacuccgaggacgagcaccuccucgcccucgagcgcaagcucaagaagaugcucggccccuccgccgucgacaucggcaacggcugcuucgagaccaagcacaagugcaaccagaccugccucgaccgcaucgccgccggcaccuucaacgccggcgaguucucccuccccaccuucgacucccucaacaucaccgccgccucccucaacgacgacggccucgacaaccacaccauccuccucuacuacuccaccgccgccuccucccucgccgucacccucaugaucgccaucuucaucgucuacaugaucucccgcgacaacgucuccugcuccaucugccucuga

SEQ ID NO: 122541 - RNA, 1755 nt, Artificial Sequence
  derived and/or modified CDS sequence (opt2) from hemagglutinin__InfluenzaB__ABN50734
augaaggccaucaucguccuccucauggucgucaccuccaacgccgaccgcaucugcaccggcaucaccuccuccaacuccccccacgucgucaagaccgccacccagggcgaggucaacgucaccggcgccaucccccucaccaccacccccaccaagucccacuucgccaaccucaagggcaccaagacccgcggcaagcucugccccaccugccucaacugcaccgaccucgacgucgcccucggccgccccaugugcgucggcaucacccccuccgccaaggccuccauccuccacgagguccgccccgucaccuccggcugcuuccccaucaugcacgaccgcaccaagauccgccagcuccccaaccuccuccgcggcuacgagaagauccgccucuccacccagaacgucaucaacgccgagaaggcccccggcggccccuaccgccucggcaccuccggcuccugccccaacgccaccucccgcuccggcuucuucaccaccauggccugggccgucccccgcgacaacaacaagaccgccaccaacccccucaccgucgaggucccccacaucugcaccaaggaggaggaccagaucaccgucuggggcuuccacuccgacgacaagacccagaugaagaaccucuacggcgacuccaacccccagaaguucaccuccuccaccaacggcaucaccacccacuacgucucccagaucggcggcuuccccgaccagaccgaggacggcggccucccccaguccggccgcaucgucgucgacuacaugguccagaagcccggcaagaccggcaccaucgucuaccagcgcggcauccuccucccccagaaggucuggugcgccuccggccgcuccaaggucaucaagggcucccucccccucaucggcgaggccgacugccuccacgagaaguacggcggccucaacaaguccaagcccuacuacaccggcgagcacgccaaggccaucggcaacugccccaucugggucaagaccccccucaagcucgccaacggcaccaaguaccgcccccccgccaagcuccucaaggagcgcggcuucuucggcgccaucgccggcuuccucgagggcggcugggagggcaugaucgccggcuggcacggcuacaccucccacggcgcccacggcgucgccgucgccgccgaccucaaguccacccaggaggccaucaacaagaucaccaagaaccucaacucccucuccgagcucgaggucaagaaccuccagcgccucuccggcgccauggacgagcuccacaacgagauccucgagcucgacgagaaggucgacgaccuccgcgccgacaccaucuccucccagaucgagcucgccguccuccucuccaacgagggcaucaucaacuccgaggacgagcaccuccucgcccucgagcgcaagcucaagaagaugcucggccccuccgccgucgacaucggcaacggcugcuucgagaccaagcacaagugcaaccagaccugccucgaccgcaucgccgccggcaccuucaacgccggcgaguucucccuccccaccuucgacucccucaacaucaccgccgccucccucaacgacgacggccucgacaaccacaccauccuccucuacuacuccaccgccgccuccucccucgccgucacccucaugaucgccaucuucaucgucuacaugaucucccgcgacaacgucuccugcuccaucugccucuga

SEQ ID NO: 122542 - RNA, 1758 nt, Artificial Sequence
  derived and/or modified CDS sequence (opt2) from hemagglutinin__InfluenzaB__ABN50745
augaaggccaucaucguccuccucauggucgucaccuccaacgccgaccgcaucugcaccggcaucaccuccuccaacuccccccacgucgucaagaccgccacccagggcgaggucaacgucaccggcgucaucccccucaccaccacccccaccaagucccacuucgccaaccucaagggcaccaagacccgcggcaagcucugccccaagugccucaacugcaccgaccucgacgucgcccucggccgccccaagugcaccggcaacauccccuccgccaaggucuccauccuccacgagguccgccccgucaccuccggcugcuuccccaucaugcacgaccgcaccaagauccgccagcuccccaaccuccuccgcggcuacgagcacauccgccucuccacccacaacgucaucaacgccgagaaggcccccggcggccccuacaagaucggcaccuccggcuccugccccaacaucaccaacggcaacggcuucuucgccaccauggccugggccguccccaagaacgacaacaacaagaccgccaccaacucccucaccaucgagguccccuacaucugcaccgagggcgaggaccagaucaccgucuggggcuuccacuccgacaacgagacccagauggccaagcucuacggcgacuccaagccccagaaguucaccuccuccgccaacggcgucaccacccacuacgucucccagaucggcggcuuccccaaccagaccgaggacggcggccucccccaguccggccgcaucgucgucgacuacaugguccagaaguccggcaagaccggcaccaucaccuaccagcgcggcauccuccucccccagaaggucuggugcgccuccggccgcuccaaggucaucaagggcucccucccccucaucggcgaggccgacugccuccacgagaaguacggcggccucaacaaguccaagcccuacuacaccggcgagcacgccaaggccaucggcaacugccccaucugggucaagaccccccucaagcucgccaacggcaccaaguaccgcccccccgccaagcuccucaaggagcgcggcuucuucggcgccaucgccggcuuccucgagggcggcugggagggcaugaucgccggcuggcacggcuacaccucccacggcgcccacggcgucgccgucgccgccgaccucaaguccacccaggaggccaucaacaagaucaccaagaaccucaacucccucuccgagcucgaggucaagaaccuccagcgccucuccggcgccauggacgagcuccacaacgagauccucgagcucgacgagaaggucgacgaccuccgcgccgacaccaucuccucccagaucgagcucgccguccuccucuccaacgagggcaucaucaacuccgaggacgagcaccuccucgcccucgagcgcaagcucaagaagaugcucggccccuccgccgucgagaucggcaacggcugcuucgagaccaagcacaagugcaaccagaccugccucgaccgcaucgccgccggcaccuucaacgccggcgaguucucccuccccaccuucgacucccucaacaucaccgccgccucccucaacgacgacggccucgacaaccacaccauccuccucuacuacuccaccgccgccuccucccucgccgucacccucaugaucgccaucuucgucgucuacauggucucccgcgacaacgucuccugcuccaucugccucuga

SEQ ID NO: 122543 - RNA, 1752 nt, Artificial Sequence
  derived and/or modified CDS sequence (opt2) from hemagglutinin__InfluenzaB__ABN51184
augaaggccaucaucguccuccucauggucgucaccuccaacgccgaccgcaucugcaccggcaucaccuccuccaacuccccccacgucgucaagaccgccacccagggcgaggucaacgucaccggcgucaucccccucaccaccacccccaccaagucccacuucgccaaccucaagggcaccaagacccgcggcaagcucugccccaacugccucaacugcaccgaccucgacgucgcccucggccgccccaugugcaucggcaccauccccuccgccaaggccuccauccuccacgagguccgccccgucaccuccggcugcuuccccaucaugcacgaccgcaccaagauccgccagcuccccaaccuccuccgcggcuacgagaacauccgccucuccacccacaacgucaucaacgccgagcgcgcccccggcggccccuaccgccucggcaccuccggcuccugccccaacgucaccuccaaguccggcuucuucgccaccauggccugggccgucccccgcgacaacaagaccgccaccaacccccucaccgucgagguccccuacaucugcaccaagggcgaggaccagaucaccgucuggggcuuccacuccgacaacaagauccagaugaagaaccucuacggcgacuccaacccccagaaguucaccuccuccgccaacggcgucaccacccacuacgucucccagaucggcggcuuccccaaccagaccgaggacggcggccucccccaguccggccgcaucgucgucgacuacaugguccagaagcccggcaagaccggcaccaucgucuaccagcgcggcguccuccucccccagaaggucuggugcgccuccggccgcuccaaggucaucaagggcucccucccccucaucggcgaggccgacugccuccacgagaaguacggcggccucaacaaguccaagcccuacuacaccggcgagcacgccaaggccaucggcaacugccccaucugggucaagaccccccucaagcucgccaacggcaccaaguaccgcccccccgccaagcuccucaaggagcgcggcuucuucggcgccaucgccggcuuccucgagggcggcugggagggcaugaucgccggcuggcacggcuacaccucccacggcgcccacggcgucgccgucgccgccgaccucaaguccacccaggaggccaucaacaagaucaccaagaaccucaacucccucuccgagcucgaggucaagaaccuccagcgccucuccggcgccauggacgagcuccacaacgagauccucgagcucgacgagaaggucgacgaccuccgcgccgacaccaucuccucccagaucgagcucgccguccuccucuccaacgagggcaucaucaacuccgaggacgagcaccuccucgcccucgagcgcaagcucaagaagaugcucggccccuccgccgucgacaucggcaacggcugcuucgagaccaagcacaagugcaaccagaccugccucgaccgcaucgccgccggcaccuucaacgccggcgaguucucccuccccaccuucgacucccucaacaucaccgccgccucccucaacgacgacggccucgacaaccacaccauccuccucuacuacuccaccgccgccuccucccucgccgucacccucaugaucgccaucuucaucgucuacauggucucccgcgacaacgucuccugcuccaucugccucuga

SEQ ID NO: 122544 - RNA, 1752 nt, Artificial Sequence
  derived and/or modified CDS sequence (opt2) from hemagglutinin__InfluenzaB__ABN51195
augaaggccaucaucguccuccucauggucgucaccuccaacgccgaccgcaucugcaccggcaucaccuccuccaacuccccccacgucgucaagaccgccacccagggcgaggucaacgucaccggcgucaucccccucaccaccacccccaccaagucccacuucgccaaccucaagggcaccaagacccgcggcaagcucugccccaacugccucaacugcaccgaccucgacgucgcccucggccgccccaugugcaucggcaccauccccuccgccaaggccuccauccuccacgagguccgccccgucaccuccggcugcuuccccaucaugcacgaccgcaccaagauccgccagcuccccaaccuccuccgcggcuacgagaacauccgccucuccacccacaacgucaucaacgccgagcgcgcccccggcggccccuaccgccucggcaccuccggcuccugccccaacgucaccucccgcuccggcuucuucgccaccauggccugggccgucccccgcgacaacaagaccgccaccaacccccucaccgucgagguccccuacaucugcaccaagggcgaggaccagaucaccgucuggggcuuccacuucgacaacaagauccagaugaagaaccucuacggcgacuccaacccccagaaguucaccuccuccgccaacggcgucaccacccacuacgucucccagaucggcggcuuccccaaccagaccgaggacggcggccucccccaguccggccgcaucgucgucgacuacaugguccagaagcccggcaagaccggcaccaucgucuaccagcgcggcguccuccucccccagaaggucuggugcgccuccggccgcuccaaggucaucaagggcucccucccccucaucggcgaggccgacugccuccacgagaaguacggcggccucaacaaguccaagcccuacuacaccggcgagcacgccaaggccaucggcaacugccccaucugggucaagaccccccucaagcucgccaacggcaccaaguaccgcccccccgccaagcuccucaaggagcgcggcuucuucggcgccaucgccggcuuccucgagggcggcugggagggcaugaucgccggcuggcacggcuacaccucccacggcgcccacggcgucgccgucgccgccgaccucaaguccacccaggaggccaucaacaagaucaccaagaaccucaacucccucuccgagcucgaggucaagaaccuccagcgccucuccggcgccauggacgagcuccacaacgagauccucgagcucgacgagaaggucgacgaccuccgcgccgacaccaucuccucccagaucgagcucgccguccuccucuccaacgagggcaucaucaacuccgaggacgagcaccuccucgcccucgagcgcaagcucaagaagaugcucggccccuccgccgucgacaucggcaacggcugcuucgagaccaagcacaagugcaaccagaccugccucgaccgcaucgccgccggcaccuucaacgccggcgaguucucccuccccaccuucgacucccucaacaucaccgccgccucccucaacgacgacggccucgacaaccacaccauccuccucuacuacuccaccgccgccuccucccucgccgucacccucaugaucgccaucuucaucgucuacauggucucccgcgacaacgucuccugcuccaucugccucuga

SEQ ID NO: 122545 - RNA, 1758 nt, Artificial Sequence
  derived and/or modified CDS sequence (opt2) from hemagglutinin__InfluenzaB__ABN58661
augaaggccaucaucguccuccucauggucgucaccuccaacgccgaccgcaucugcaccggcaucaccuccuccaacuccccccacgucgucaagaccgccacccagggcgaggucaacgucaccggcgucaucccccucaccaccacccccaccaagucccacuucgccaaccucaagggcaccaagacccgcggcaagcucugccccaagugccucaacugcaccgaccucgacgucgcccucggccgccccaagugcaccggcaccauccccuccgccaaggucuccauccuccacgaggucaagcccgucaccuccggcugcuuccccaucaugcacgaccgcaccaagauccgccagcuccccaaccuccuccgcggcuacgagcacauccgccucuccacccacaacgucaucaacgccgagaaggcccccggcggccccuacaagaucggcaccuccggcuccugccccaacgucaccaacggcaacggcuucuucgccaccauggccugggccguccccaagaacgacaacaacaagaccgccaccaacucccucaccgucgagguccccuacaucugcaccgagggcgaggaccagaucaccgucuggggcuuccacuccgacaacgagacccagauggccaagcucuacggcgacuccaagccccagaaguucaccuccuccgccaacggcgucaccacccacuacgucucccagaucggcggcuuccccaaccaggccgaggacggcggccucccccaguccggccgcaucgucgucgacuacaugguccagaaguccggcaagaccggcaccaucaccuaccagcgcggcauccuccucccccagaaggucuggugcgccuccggccgcuccaaggucaucaagggcucccucccccucaucggcgaggccgacugccuccacgagaaguacggcggccucaacaaguccaagcccuacuacaccggcgagcacgccaaggccaucggcaacugccccaucugggucaagaccccccucaagcucgccaacggcaccaaguaccgcccccccgccaagcuccucaaggagcgcggcuucuucggcgccaucgccggcuuccucgagggcggcugggagggcaugaucgccggcuggcacggcuacaccucccacggcgcccacggcgucgccgucgccgccgaccucaaguccacccaggaggccaucaacaagaucaccaagaaccucaacucccucuccgagcucgaggucaagaaccuccagcgccucuccggcgccauggacgagcuccacaacgagauccucgagcucgacgagaaggucgacgaccuccgcgccgacaccaucuccucccagaucgagcucgccguccuccucuccaacgagggcaucaucaacuccgaggacgagcaccuccucgcccucgagcgcaagcucaagaagaugcucggccccuccgccgucgagaucggcaacggcugcuucgagaccaagcacaagugcaaccagaccugccucgaccgcaucgccgccggcaccuucaacgccggcgaguucucccuccccaccuucgacucccucaacaucaccgccgccucccucaacgacgacggccucgacaaccacaccauccuccucuacuacuccaccgccgccuccucccucgccgucacccucaugaucgccaucuucaucgucuacauggucucccgcgacaacgucuccugcuccaucugccucuga

SEQ ID NO: 122546 - RNA, 1755 nt, Artificial Sequence; identical to SEQ ID NO: 122434
  derived and/or modified CDS sequence (opt2) from hemagglutinin__InfluenzaB__ABN59445

SEQ ID NO: 122547 - RNA, 1755 nt, Artificial Sequence
  derived and/or modified CDS sequence (opt2) from hemagglutinin__InfluenzaB__ABO72377
augaaggccaucaucguccuccucauggucgucaccuccaacgccgaccgcaucugcaccggcaucaccuccuccaacuccccccacgucgucaagaccgccacccagggcgaggucaacgucaccggcgccaucccccucaccaccacccccaccaagucccacuucgccaaccucaagggcaccaagacccgcggcaagcucugccccaccugcuucaacugcaccgaccucgacgucgcccucggccgccccaugugcgucggcaucacccccuccgccaaggccuccauccuccacgagguccgccccgucaccuccggcugcuuccccaucaugcacgaccgcaccaagauccgccagcuccccaaccuccuccgcggcuacgagaagauccgccucuccacccagaacgucaucgacgccgagaaggcccccggcggccccuaccgccucggcaccuccggcuccugccccaacgccaccuccaaguccggcuucuucgccaccauggccugggccgucccccgcgacaacaacaagaccgccaccaacccccucaccgucgaggucccccacaucugcaccaaggaggaggaccagaucaccgucuggggcuuccacuccgacaacaagacccagaugaagaaccucuacggcgacuccaacccccagaaguucaccuccuccgccaacggcaucaccacccacuacgucucccagaucggcggcuuccccgaccagaccgaggacggcggccucccccaguccggccgcaucgucgucgacuacaugguccagaagcccggcaagaccggcaccaucgucuaccagcgcggcauccuccucccccagaaggucuggugcgccuccggccgcuccaaggucaucaagggcucccucccccucaucggcgaggccgacugccuccacgagaaguacggcggccucaacaaguccaagcccuacuacaccggcgagcacgccaaggccaucggcaacugccccaucugggucaagaccccccucaagcucgccaacggcaccaaguaccgcccccccgccaagcuccucaaggagcgcggcuucuucggcgccaucgccggcuuccucgagggcggcugggagggcaugaucgccggcuggcacggcuacaccucccacggcgcccacggcgucgccgucgccgccgaccucaaguccacccaggaggccaucaacaagaucaccaagaaccucaacucccucuccgagcucgaggucaagaaccuccagcgccucuccggcgccauggacgagcuccacaacgagauccucgagcucgacgagaaggucgacgaccuccgcgccgacaccaucuccucccagaucgagcucgccguccuccucuccaacgagggcaucaucaacuccgaggacgagcaccuccucgcccucgagcgcaagcucaagaagaugcucggccccuccgccgucgacaucggcaacggcugcuucgagaccaagcacaagugcaaccagaccugccucgaccgcaucgccgccggcaccuucaacgccggcgaguucucccuccccaccuucgacucccucaacaucaccgccgccucccucaacgacgacggccucgacaaccacaccauccuccucuacuacuccaccgccgccuccucccucgccgucacccucaugaucgccaucuucaucgucuacaugaucucccgcgacaacgucuccugcuccaucugccucuga

SEQ ID NO: 122548 - RNA, 1755 nt, Artificial Sequence; identical to SEQ ID NO: 122441
  derived and/or modified CDS sequence (opt2) from hemagglutinin__InfluenzaB__ABR15973

SEQ ID NO: 122549 - RNA, 1752 nt, Artificial Sequence
  derived and/or modified CDS sequence (opt2) from hemagglutinin__InfluenzaB__ABR15995
augaaggccaucaucguccuccucauggucgucaccuccaacgccgaccgcaucugcaccggcaucaccuccuccaacuccccccacgucgucaagaccgccacccagggcgaggucaacgucaccggcgucaucccccucaccaccacccccaccaagucccacuucgccaaccucaagggcaccaagacccgcggcaagcucugccccaacugccucaacugcaccgaccucgacgucgcccucggccgccccaugugcaucggcaucacccccuccgccaaggccuccauccuccacgagguccgccccgucaccuccggcugcuuccccaucaugcacgaccgcaccaagauccgccagcuccccaaccuccuccgcggcuacgagcacauccgccucuccacccacaacgucaucaacgccgagcgcgcccccggcggccccuaccgccucggcaccuccggcuccugccccaacgucaccucccgcuccggcuucuucgccaccauggccugggccgucccccgcgacaacaagaccgccaccaacccccucaccgucgagguccccuacaucugcaccaagggcgaggaccagaucaccgucuggggcuuccacuccgacuacaagacccagaugaagaaccucuacggcgacuccaacccccagaaguucaccuccuccgccaacggcaucaccacccacuacgucucccagaucggcggcuuccccaaccagaccgaggacggcggccucccccaguccggccgcaucgucgucgacuacaugguccagaagcccggcaagaccggcaccaucgucuaccagcgcggcguccuccucccccagaaggucuggugcgccuccggccgcuccaaggucaucaagggcucccucccccucaucggcgaggccgacugccuccacgagaaguacggcggccucaacaaguccaagcccuacuacaccggcgagcacgccaaggccaucggcaacugccccaucugggucaagaccccccucaagcucgccaacggcaccaaguaccgcccccccgccaagcuccucaaggagcgcggcuucuucggcgccaucgccggcuuccucgagggcggcugggagggcaugaucgccggcuggcacggcuacaccucccacggcgcccacggcgucgccgucgccgccgaccucaaguccacccaggaggccaucaacaagaucaccaagaaccucaacucccucuccgagcucgaggucaagaaccuccagcgccucuccggcgccauggacgagcuccacaacgagauccucgagcucgacgagaaggucgacgaccuccgcgccgacaccaucuccucccagaucgagcucgccguccuccucuccaacgagggcaucaucaacuccgaggacgagcaccuccucgcccucgagcgcaagcucaagaagaugcucggccccuccgccgucgacaucggcaacggcugcuucgagaccaagcacaagugcaaccagaccugccucgaccgcaucgccgccggcaccuucaacgccggcgaguucucccuccccaccuucgacucccucaacaucaccgccgccucccucaacgacgacggccucgacaaccacaccauccuccucuacuacuccaccgccgccuccucccucgccgucacccucaugaucgccaucuucaucgucuacauggucucccgcgacaacgucuccugcuccaucugccucuga

SEQ ID NO: 122550 - RNA, 1758 nt, Artificial Sequence
  derived and/or modified CDS sequence (opt2) from hemagglutinin__InfluenzaB__ABR16017
augaaggccaucaucguccuccucauggucgucaccuccaacgccgaccgcaucugcaccggcaucaccuccuccaacuccccccacgucgucaagaccgccacccagggcgaggucaacgucaccggcgucaucccccucaccaccacccccaccaagucccacuucgccaaccucaagggcaccgagacccgcggcaagcucugccccaagugccucaacugcaccgaccucgacgucgcccucggccgccccaagugcaccggcaacauccccuccgcccgcgucuccauccuccacgagguccgccccgucaccuccggcugcuuccccaucaugcacgaccgcaccaagauccgccagcuccccaaccuccuccgcggcuacgagcacauccgccucuccacccacaacgucaucaacgccgagaacgcccccggcggccccuacaagaucggcaccuccggcuccugccccaacgucaccaacggcaacggcuucuucgccaccauggccugggccguccccaagaacgacaacaacaagaccgccaccaacucccucaccaucgagguccccuacaucugcaccgagggcgaggaccagaucaccgucuggggcuuccacuccgacaacgagacccagauggccaagcucuacggcgacuccaagccccagaaguucaccuccuccgccaacggcgucaccacccacuacgucucccagaucggcggcuuccccaaccagaccgaggacggcggccucccccaguccggccgcaucgucgucgacuacaugguccagaaguccggcaagaccggcaccaucaccuaccagcgcggcauccuccucccccagaaggucuggugcgccuccggccgcuccaaggucaucaagggcucccucccccucaucggcgaggccgacugccuccacgagaaguacggcggccucaacaaguccaagcccuacuacaccggcgagcacgccaaggccaucggcaacugccccaucugggucaagaccccccucaagcucgccaacggcaccaaguaccgcccccccgccaagcuccucaaggagcgcggcuucuucggcgccaucgccggcuuccucgagggcggcugggagggcaugaucgccggcuggcacggcuacaccucccacggcgcccacggcgucgccgucgccgccgaccucaaguccacccaggaggccaucaacaagaucaccaagaaccucaacucccucuccgagcucgaggucaagaaccuccagcgccucuccggcgccauggacgagcuccacaacgagauccucgagcucgacgagaaggucgacgaccuccgcgccgacaccaucuccucccagaucgagcucgccguccuccucuccaacgagggcaucaucaacuccgaggacgagcaccuccucgcccucgagcgcaagcucaagaagaugcucggccccuccgccgucgagaucggcaacggcugcuucgagaccaagcacaagugcaaccagaccugccucgaccgcaucgccgccggcaccuucgacgccggcgaguucucccuccccaccuucgacucccucaacaucaccgccgccucccucaacgacgacggccucgacaaccacaccauccuccucuacuacuccaccgccgccuccucccucgccgucacccucaugaucgccaucuucgucgucuacauggucucccgcgacaacgucuccugcuccaucugccucuga

SEQ ID NO: 122551 - RNA, 1758 nt, Artificial Sequence; identical to SEQ ID NO: 122550
  derived and/or modified CDS sequence (opt2) from hemagglutinin__InfluenzaB__ACA64899

SEQ ID NO: 122552 - RNA, 1758 nt, Artificial Sequence
  derived and/or modified CDS sequence (opt2) from hemagglutinin__InfluenzaB__ACA64932
augaaggccaucaucguccuccucauggucgucaccuccaacgccgaccgcaucugcaccggcaucaccuccuccaacuccccccacgucgucaagaccgccacccagggcgaggucaacgucaccggcgucaucccccucaccaccacccccaccaagucccacuucuccaaccucaagggcaccgagacccgcggcaagcucugccccaagugccucaacugcaccgaccucgacgucgcccucggccgccccaagugcaccggcaacauccccuccgcccgcgucuccauccuccacgagguccgccccgucaccuccggcugcuuccccaucaugcacgaccgcaccaagauccgccagcuccccaaccuccuccgcggcuacgagcacauccgccucuccacccacaacgucaucaacgccgagaacgcccccggcggccccuacaagaucggcaccuccggcuccugccccaacgucaccaacggcaacggcuucuucgccaccauggccugggccguccccaagaacgacaucaacaagaccgccaccaacucccucaccaucgagguccccuacaucugcaccgagggcgaggaccagaucaccgucuggggcuuccacuccgacaacgagacccagauggccaagcucuacggcgacuccaagccccagaaguucaccuccuccgccaacggcgucaccacccacuacgucucccagaucggcggcuuccccaaccagaccgaggacggcggccucccccaguccggccgcaucgucgucgacuacaugguccagaaguccggcaagaccggcaccaucaccuaccagcgcggcauccuccucccccagaaggucuggugcgccuccggccgcuccaaggucaucaagggcucccucccccucaucggcgaggccgacugccuccacgagaaguacggcggccucaacaaguccaagcccuacuacaccggcgagcacgccaaggccaucggcaacugccccaucugggucaagaccccccucaagcucgccaacggcaccaaguaccgcccccccgccaagcuccucaaggagcgcggcuucuucggcgccaucgccggcuuccucgagggcggcugggagggcaugaucgccggcuggcacggcuacaccucccacggcgcccacggcgucgccgucgccgccgaccucaaguccacccaggaggccaucaacaagaucaccaagaaccucaacucccucuccgagcucgaggucaagaaccuccagcgccucuccggcgccauggacgagcuccacaacgagauccucgagcucgacgagaaggucgacgaccuccgcgccgacaccaucuccucccagaucgagcucgccguccuccucuccaacgagggcaucaucaacuccgaggacgagcaccuccucgcccucgagcgcaagcucaagaagaugcucggccccuccgccgucgagaucggcaacggcugcuucgagaccaagcacaagugcaaccagaccugccucgacaagaucgccgccggcaccuucgacgccggcgaguucucccuccccaccuucgacucccucaacaucaccgccgccucccucaacgacgacggccucgacaaccacaccauccuccucuacuacuccaccgccgccuccucccucgccgucacccucaugaucgccaucuucgucgucuacauggucucccgcgacaacgucuccugcuccaucugccucuga

SEQ ID NO: 122553 - RNA, 1758 nt, Artificial Sequence; identical to SEQ ID NO: 122550
  derived and/or modified CDS sequence (opt2) from hemagglutinin__InfluenzaB__ACA64943

SEQ ID NO: 122554 - RNA, 1758 nt, Artificial Sequence
  derived and/or modified CDS sequence (opt2) from hemagglutinin__InfluenzaB__ACA64954
augaaggccaucaucguccuccucauggucgucaccuccaacgccgaccgcaucugcaccggcaucaccuccuccaacuccccccacgucgucaagaccgccacccagggcgaggucaacgucaccggcgucaucccccucaccaccacccccaccaagucccacuucgccaaccucaagggcaccgagacccgcggcaagcucugccccaagugccucaacugcaccgaccucgacgucgcccucggccgccccaagugcaccggcaacauccccuccgcccgcgucuccauccuccacgagguccgccccgucaccuccggcugcuuccccaucaugcacgaccgcaccaagauccgccagcuccccaaccuccuccgcggcuacgagcacauccgccucuccacccacaacgucaucaacgccgagaacgcccccggcggccccuacaagaucggcaccuccggcuccugccccaacgucaccaacggcaacggcuucuucgccaccauggccugggccguccccaagaacgacaacaacaagaccgccaccuccucccucaccaucgagguccccuacaucugcaccgagggcgaggaccagaucaccgucuggggcuuccacuccgacaacgagacccagauggccaagcucuacggcgacuccaagccccagaaguucaccuccuccgccaacggcgucaccacccacuacgucucccagaucggcggcuuccccaaccagaccgaggacggcggccucccccaguccggccgcaucgucgucgacuacaugguccagaaguccggcaagaccggcaccaucaccuaccagcgcggcauccuccucccccagaaggucuggugcgccuccggccgcuccaaggucaucaagggcucccucccccucaucggcgaggccgacugccuccacgagaaguacggcggccucaacaaguccaagcccuacuacaccggcgagcacgccaaggccaucggcaacugccccaucugggucaagaccccccucaagcucgccaacggcaccaaguaccgcccccccgccaagcuccucaaggagcgcggcuucuucggcgccaucgccggcuuccucgagggcggcugggagggcaugaucgccggcuggcacggcuacaccucccacggcgcccacggcgucgccgucgccgccgaccucaaguccacccaggaggccaucaacaagaucaccaagaaccucaacucccucuccgagcucgaggucaagaaccuccagcgccucuccggcgccauggacgagcuccacaacgagauccucgagcucgacgagaaggucgacgaccuccgcgccgacaccaucuccucccagaucgagcucgccguccuccucuccaacgagggcaucaucaacuccgaggacgagcaccuccucgcccucgagcgcaagcucaagaagaugcucggccccuccgccgucgagaucggcaacggcugcuucgagaccaagcacaagugcaaccagaccugccucgaccgcaucgccgccggcaccuucgacgccggcgaguucucccuccccaccuucgacucccucaacaucaccgccgccucccucaacgacgacggccucgacaaccacaccauccuccucuacuacuccaccgccgccuccucccucgccgucacccucaugaucgccaucuucgucgucuacauggucucccgcgacaacgucuccugcuccaucugccucuga

SEQ ID NO: 122555 - RNA, 1758 nt, Artificial Sequence; identical to SEQ ID NO: 122550
  derived and/or modified CDS sequence (opt2) from hemagglutinin__InfluenzaB__ACA64965

SEQ ID NO: 122556 - RNA, 1758 nt, Artificial Sequence
  derived and/or modified CDS sequence (opt2) from hemagglutinin__InfluenzaB__ACA64998
augaaggccaucaucguccuccucauggucgucaccuccaacgccgaccgcaucugcaccggcaucaccuccuccaacuccccccacgucgucaagaccgccacccagggcgaggucaacgucaccggcgucaucccccucaccaccacccccaccaagucccacuucgccaaccucaagggcaccgagacccgcggcaagcucugccccaagugcuucaacugcaccgaccucgacgucgcccucggccgccccaagugcaccggcaacauccccuccgcccgcgucuccauccuccacgagguccgccccgucaccuccggcugcuuccccaucaugcacgaccgcaccaagauccgccagcuccccaaccuccuccgcggcuacgagcacauccgccucuccacccacaacgucaucaacgccgagaacgcccccggcggccccuacaagaucggcaccuccggcuccugccccaacgucaccaacggcaacggcuucuucgccaccauggccugggccguccccaagaacgacaacaacaagaccgccaccaacucccucaccaucgagguccccuacaucugcaccgagggcgaggaccagaucaccgucuggggcuuccacuccgacaacgagacccagauggccaagcucuacggcgacuccaagccccagaaguucaccuccuccgccaacggcgucaccacccacuacgucucccagaucggcggcuuccccaaccagaccgaggacggcggccucccccaguccggccgcaucgucgucgacuacaugguccagaaguccggcaagaccggcaccaucaccuaccagcgcggcauccuccucccccagaaggucuggugcgccuccggccgcuccaaggucaucaagggcucccucccccucaucggcgaggccgacugccuccacgagaaguacggcggccucaacaaguccaagcccuacuacaccggcgagcacgccaaggccaucggcaacugccccaucugggucaagaccccccucaagcucgccaacggcaccaaguaccgcccccccgccaagcuccucaaggagcgcggcuucuucggcgccaucgccggcuuccucgagggcggcugggagggcaugaucgccggcuggcacggcuacaccucccacggcgcccacggcgucgccgucgccgccgaccucaaguccacccaggaggccaucaacaagaucaccaagaaccucaacucccucuccgagcucgaggucaagaaccuccagcgccucuccggcgccauggacgagcuccacaacgagauccucgagcucgacgagaaggucgacgaccuccgcgccgacaccaucuccucccagaucgagcucgccguccuccucuccaacgagggcaucaucaacuccgaggacgagcaccuccucgcccucgagcgcaagcucaagaagaugcucggccccuccgccgucgagaucggcaacggcugcuucgagaccaagcacaagugcaaccagaccugccucgaccgcaucgccgccggcaccuucgacgccggcgaguucucccuccccaccuucgacucccucaacaucaccgccgccucccucaacgacgacggccucgacaaccacaccauccuccucuacuacuccaccgccgccuccucccucgccgucacccucaugaucgccaucuucgucgucuacauggucucccgcgacaacgucuccugcuccaucugccucuga

SEQ ID NO: 122557 - RNA, 1758 nt, Artificial Sequence
  derived and/or modified CDS sequence (opt2) from hemagglutinin__InfluenzaB__ACA65020
augaaggccaucaucguccuccucauggucgucaccuccaacgccgaccgcaucugcaccggcaucaccuccuccaacuccccccacgucgucaagaccgccacccagggcgaggucaacgucaccggcgucaucccccucaccaccacccccaccaagucccacuucuccaaccucaagggcaccgagacccgcggcaagcucugccccaagugccucaacugcaccgaccucgacgucgcccucggccgccccaagugcaccggcaacauccccuccgcccgcgucuccauccuccacgagguccgccccgucaccuccggcugcuuccccaucaugcacgaccgcaccaagauccgccagcuccccaaccuccuccgcggcuacgagcacauccgccucuccacccacaacgucaucaacgccgagaacgcccccggcggccccuacaagaucggcaccuccggcuccugccccaacgucaccaacggcaacggcuucuucgccaccauggccugggccguccccaagaacgacaacaacaagaccgccaccaacucccucaccaucgagguccccuacaucugcaccgagggcgaggaccagaucaccaucuggggcuuccacuccgacaacgagacccagauggccaagcucuacggcgacuccaagccccagaaguucaccuccuccgccaacggcgucaccacccacuacgucucccagaucggcggcuuccccaaccagaccgaggacggcggccucccccaguccggccgcaucgucgucgacuacaugguccagaaguccggcaagaccggcaccaucaccuaccagcgcggcauccuccucccccagaaggucuggugcgccuccggccgcuccaaggucaucaagggcucccucccccucaucggcgaggccgacugccuccacgagaaguacggcggccucaacaaguccaagcccuacuacaccggcgagcacgccaaggccaucggcaacugccccaucugggucaagaccccccucaagcucgccaacggcaccaaguaccgcccccccgccaagcuccucaaggagcgcggcuucuucggcgccaucgccggcuuccucgagggcggcugggagggcaugaucgccggcuggcacggcuacaccucccacggcgcccacggcgucgccgucgccgccgaccucaaguccacccaggaggccaucaacaagaucaccaagaaccucaacucccucuccgagcucgaggucaagaaccuccagcgccucuccggcgccauggacgagcuccacaacgagauccucgagcucgacgagaaggucgacgaccuccgcgccgacaccaucuccucccagaucgagcucgccguccuccucuccaacgagggcaucaucaacuccgaggacgagcaccuccucgcccucgagcgcaagcucaagaagaugcucggccccuccgccgucgaggucggcaacggcugcuucgagaccaagcacaagugcaaccagaccugccucgaccgcaucgccgccggcaccuucgacgccggcgaguucucccuccccaccuucgacucccucaacaucaccgccgccucccucaacgacgacggccucgacaaccacaccauccuccucuacuacuccaccgccgccuccucccucgccgucacccucaugaucgccaucuucgucgucuacauggucucccgcgacaacgucuccugcuccaucugccucuga

SEQ ID NO: 122558 - RNA, 1758 nt, Artificial Sequence; identical to SEQ ID NO: 122556
  derived and/or modified CDS sequence (opt2) from hemagglutinin__InfluenzaB__ACA65031

SEQ ID NO: 122559 - RNA, 1758 nt, Artificial Sequence
  derived and/or modified CDS sequence (opt2) from hemagglutinin__InfluenzaB__ACA65042
augaaggccaucaucguccuccucauggucgucaccuccaacgccgaccgcaucugcaccggcaucaccuccuccaacuccccccacgucgucaagaccgccacccagggcgaggucaacgucaccggcgucaucccccucaccaccacccccaccaagucccacuucuccaaccucaagggcaccgagacccgcggcaagcucugccccaagugccucaacugcaccgaccucgacgucgcccucggccgccccaagugcaccggcaacauccccuccgcccgcgucuccauccuccacgagguccgccccgucaccuccggcugcuuccccaucaugcacgaccgcaccaagauccgccagcuccccaaccuccuccgcggcuacgagcacauccgccucuccacccacaacgucaucaacgccgagaacgcccccggcggccccuacaagaucggcaccuccggcuccugccccaacgucaccaacggcaacggcuucuucgccaccauggccugggccguccccaagaacgacaacaacaagaccgccaccaacucccucaccaucgagguccccuacaucugcaccgagggcgaggaccagaucaccgucuggggcuuccacuccgacaacgagacccagauggccaagcucuacggcgacuccaagccccagaaguucaccuccuccgccaacggcgucaccacccacuacgucucccagaucggcggcuuccccaaccagaccgaggacggcggccucccccaguccggccgcaucaucgucgacuacaugguccagaaguccggcaagaccggcaccaucaccuaccagcgcggcauccuccucccccagaaggucuggugcgccuccggccgcuccaaggucaucaagggcucccucccccucaucggcgaggccgacugccuccacgagaaguacggcggccucaacaaguccaagcccuacuacaccggcgagcacgccaaggccaucggcaacugccccaucugggucaagaccccccucaagcucgccaacggcaccaaguaccgcccccccgccaagcuccucaaggagcgcggcuucuucggcgccaucgccggcuuccucgagggcggcugggagggcaugaucgccggcuggcacggcuacaccucccacggcgcccacggcgucgccgucgccgccgaccucaaguccacccaggaggccaucaacaagaucaccaagaaccucaacucccucuccgagcucgaggucaagaaccuccagcgccucuccggcgccauggacgagcuccacaacgagauccucgagcucgacgagaaggucgacgaccuccgcgccgacaccaucuccucccagaucgagcucgccguccuccucuccaacgagggcaucaucaacuccgaggacgagcaccuccucgcccucgagcgcaagcucaagaagaugcucggccccuccgccgucgagaucggcaacggcugcuucgagaccaagcacaagugcaaccagaccugccucgaccgcaucgccgccggcaccuucgacgccggcgaguucucccuccccaccuucgacucccucaacaucaccgccgccucccucaacgacgacggccucgacaaccacaccauccuccucuacuacuccaccgccgccuccucccucgccgucacccucaugaucgccaucuucgucgucuacauggucucccgcgacaacgucuccugcuccaucugccucuga

SEQ ID NO: 122560 - RNA, 1758 nt, Artificial Sequence
  derived and/or modified CDS sequence (opt2) from hemagglutinin__InfluenzaB__ACA65053
augaaggccaucaucguccuccucauggucgucaccuccaacgccgaccgcaucugcaccggcaucaccuccuccaacuccccccacgucgucaagaccgccacccagggcgaggucaacgucaccggcgucaucccccucaccaccacccccaccaagucccacuucgccaaccucaagggcaccgagacccgcggcaagcucugccccaagugccucaacugcaccgaccucgacgucgcccucggccgccccaagugcaccggcaacauccccuccgcccgcgucuccauccuccacgagguccgccccgucaccuccggcugcuuccccaucaugcacgaccgcaccaagauccgccagcuccccaaccuccuccgcggcuacgagcacauccgccucuccacccgcaacgucaucaacgccgagaacgcccccggcggccccuacaagaucggcaccuccggcuccugccccaacgucaccaacggcaacggcuucuucgccaccauggccugggccguccccaagaacgacaacaacaagaccgccaccaacucccucaccaucgagguccccuacaucugcaccgagggcgaggaccagaucaccgucuggggcuuccacuccgacaacgagacccagauggccaagcucuacggcgacuccaagccccagaaguucaccuccuccgccaacggcgucaccacccacuacgucucccagaucggcggcuuccccaaccagaccgaggacggcggccucccccaguccggccgcaucgucgucgacuacaugguccagaaguccggcaagaccggcaccaucaccuaccagcgcggcauccuccucccccagaaggucuggugcgccuccggccgcuccaaggucaucaagggcucccucccccucaucggcgaggccgacugccuccacgagaaguacggcggccucaacaaguccaagcccuacuacaccggcgagcacgccaaggccaucggcaacugccccaucugggucaagaccccccucaagcucgccaacggcaccaaguaccgcccccccgccaagcuccucaaggagcgcggcuucuucggcgccaucgccggcuuccucgagggcggcugggagggcaugaucgccggcuggcacggcuacaccucccacggcgcccacggcgucgccgucgccgccgaccucaaguccacccaggaggccaucaacaagaucaccaagaaccucaacucccucuccgagcucgaggucaagaaccuccagcgccucuccggcgccauggacgagcuccacaacgagauccucgagcucgacgagaaggucgacgaccuccgcgccgacaccaucuccucccagaucgagcucgccguccuccucuccaacgagggcaucaucaacuccgaggacgagcaccuccucgcccucgagcgcaagcucaagaagaugcucggccccuccgccgucgagaucggcaacggcugcuucgagaccaagcacaagugcaaccagaccugccucgaccgcaucgccgccggcaccuucgacgccggcgaguucucccuccccaccuucgacucccucaacaucaccgccgccucccucaacgacgacggccucgacaaccacaccauccuccucuacuacuccaccgccgccuccucccucgccgucacccucaugaucgccaucuucgucgucuacauggucucccgcgacaacgucuccugcuccaucugccucuga

SEQ ID NO: 122561 - RNA, 1758 nt, Artificial Sequence
  derived and/or modified CDS sequence (opt2) from hemagglutinin__InfluenzaB__ACA65075
augaaggccaucaucguccuccucauggucgucaccuccaacgccgaccgcaucugcaccggcaucaccuccuccaacuccccccacgucgucaagaccgccacccagggcgaggucaacgucaccggcgucaucccccucaccaccacccccaccaagucccacuucgccaaccucaagggcaccgagacccgcggcaagcucugccccaagugccucaacugcaccgaccucgacgucgcccucggccgccccaagugcaccggcaacauccccuccgcccgcgucuccauccuccacgagguccgccccgucaccuccggcugcuuccccaucaugcacgaccgcaccaagauccgccagcuccccaaccuccuccgcggcuacgagcacauccgccucuccacccacaacgucaucaacgccgagaacgcccccggcggccccuacaagaucggcaccuccggcuccugccccaacaucaccaacggcaacggcuucuucgccaccauggccugggccguccccaagaacgacaacaacaagaccgccaccaacucccucaccaucgagguccccuacaucugcaccgagggcgaggaccagaucaccgucuggggcuuccacuccgacaacgagacccagauggccaagcucuacggcgacuccaagccccagaaguucaccuccuccgccaacggcgucaccacccacuacgucucccagaucggcggcuuccccaaccagaccgaggacggcggccucccccaguccggccgcaucgucgucgacuacaugguccagaaguccggcaagaccggcaccaucaccuaccagcgcggcauccuccucccccagaaggucuggugcgccuccggccgcuccaaggucaucaagggcucccucccccucaucggcgaggccgacugccuccacgagaaguacggcggccucaacaaguccaagcccuacuacaccggcgagcacgccaaggccaucggcaacugccccaucugggucaagaccccccucacccucgccaacggcaccaaguaccgcccccccgccaagcuccucaaggagcgcggcuucuucggcgccaucgccggcuuccucgagggcggcugggagggcaugaucgccggcuggcacggcuacaccucccacggcgcccacggcgucgccgucgccgccgaccucaaguccacccaggaggccaucaacaagaucaccaagaaccucaacucccucuccgagcucgaggucaagaaccuccagcgccucuccggcgccauggacgagcuccacaacgagauccucgagcucgacgagaaggucgacgaccuccgcgccgacaccaucuccucccagaucgagcucgccguccuccucuccaacgagggcaucaucaacuccgaggacgagcaccuccucgcccucgagcgcaagcucaagaagaugcucggccccuccgccgucgagaucggcaacggcugcuucgagaccaagcacaagugcaaccagaccugccucgaccgcaucgccgccggcaccuucgacgccggcgaguucucccuccccaccuucgacucccucaacaucaccgccgccucccucaacgacgacggccucgacaaccacaccauccuccucuacuacuccaccgccgccuccucccucgccgucacccucaugaucgccaucuucgucgucuacauggucucccgcgacaacgucuccugcuccaucugccucuga

SEQ ID NO: 122562 - RNA, 1758 nt, Artificial Sequence; identical to SEQ ID NO: 122550
  derived and/or modified CDS sequence (opt2) from hemagglutinin__InfluenzaB__ACA65086

SEQ ID NO: 122563 - RNA, 1758 nt, Artificial Sequence; identical to SEQ ID NO: 122550
  derived and/or modified CDS sequence (opt2) from hemagglutinin__InfluenzaB__ACA65097

SEQ ID NO: 122564 - RNA, 1758 nt, Artificial Sequence; identical to SEQ ID NO: 122550
  derived and/or modified CDS sequence (opt2) from hemagglutinin__InfluenzaB__ACA96552

SEQ ID NO: 122565 - RNA, 1758 nt, Artificial Sequence; identical to SEQ ID NO: 122550
  derived and/or modified CDS sequence (opt2) from hemagglutinin__InfluenzaB__ACA96563

SEQ ID NO: 122566 - RNA, 1758 nt, Artificial Sequence; identical to SEQ ID NO: 122550
  derived and/or modified CDS sequence (opt2) from hemagglutinin__InfluenzaB__ACA96574

SEQ ID NO: 122567 - RNA, 1758 nt, Artificial Sequence; identical to SEQ ID NO: 122550
  derived and/or modified CDS sequence (opt2) from hemagglutinin__InfluenzaB__ACA96585

SEQ ID NO: 122568 - RNA, 1758 nt, Artificial Sequence
  derived and/or modified CDS sequence (opt2) from hemagglutinin__InfluenzaB__ACA96596
augaaggccaucaucguccuccucauggucgucaccuccaacgccgaccgcaucugcaccggcaucaccuccuccaacuccccccacgucgucaagaccgccacccagggcgaggucaacgucaccggcgucaucccccucaccaccacccccaccaagucccacuucgccaaccucaagggcaccgagacccgcggcaagcucugccccaagugccucaacugcaccgaccucgacgucgcccucggccgccccaagugcaccggcaacauccccuccgcccgcgucuccauccuccacgagguccgccccgucaccuccggcugcuuccccaucaugcacgaccgcaccaagauccgccagcuccccaaccuccuccgcggcuacgagcacauccgccucuccacccacaacgucaucaacgccgagaacgcccccggcggccccuacaagaucggcaccuccggcuccugccccaacgucaccaacggcaacggcuucuucgccaccauggccugggccguccccaagaacgacaacaacaagaccgccaccaacucccucaccaucgagguccccuacaucugcaccgagggcgaggaccagaucaccgucuggggcuuccacuccgacaacgagacccagauggccaagcucuacggcgacuccaagccccagaaguucaccuccuccgccaacggcgucaccacccacuacgucucccagaucggcggcuuccccaaccagaccgaggacggcggccucccccaguccggccgcaucgucgucgacuacaugguccagaaguccggcaagaccggcaccaucaccuaccagcgcggcauccuccucccccagaaggucuggugcgccuccggccgcuccaaggucaucaagggcucccucccccucaucggcgaggccgacugccuccacgagaaguacggcggccucaacaaguccaagcccuacuacaccggcgagcacgccaaggccaucggcaacugccccaucugggucaagaccccccucaagcucgccaacggcaccaaguaccgcccccccgccaagcuccucaaggagcgcggcuucuucggcgccaucgccggcuuccucgagggcggcugggagggcaugaucgccggcuggcacggcuacaccucccacggcgcccacggcgucgccgucgccgccgaccucaaguccacccaggaggccaucgacaagaucaccaagaaccucaacucccucuccgagcucgaggucaagaaccuccagcgccucuccggcgccauggacgagcuccacaacgagauccucgagcucgacgagaaggucgacgaccuccgcgccgacaccaucuccucccagaucgagcucgccguccuccucuccaacgagggcaucaucaacuccgaggacgagcaccuccucgcccucgagcgcaagcucaagaagaugcucggccccuccgccgucgagaucggcaacggcugcuucgagaccaagcacaagugcaaccagaccugccucgaccgcaucgccgccggcaccuucgacgccggcgaguucucccuccccaccuucgacucccucaacaucaccgccgccucccucaacgacgacggccucgacaaccacaccauccuccucuacuacuccaccgccgccuccucccucgccgucacccucaugaucgccaucuucgucgucuacauggucucccgcgacaacgucuccugcuccaucugccucuga

SEQ ID NO: 122569 - RNA, 1758 nt, Artificial Sequence; identical to SEQ ID NO: 122550
  derived and/or modified CDS sequence (opt2) from hemagglutinin__InfluenzaB__ACA96607

SEQ ID NO: 122570 - RNA, 1758 nt, Artificial Sequence
  derived and/or modified CDS sequence (opt2) from hemagglutinin__InfluenzaB__ACA96618
augaaggccaucaucguccuccucauggucgucaccuccaacgccgaccgcaucugcaccggcaucaccuccuccaacuccccccacgucgucaagaccgccacccagggcgaggucaacgucaccggcgucaucccccucaccaccacccccaccaagucccacuucgccaaccucaagggcaccgagacccgcggcaagcucugccccaagugccucaacugcaccgaccucgacgucgcccucggccgccccaagugcaccggcaacauccccuccgcccgcgucuccauccuccacgagguccgccccgucaccuccggcugcuuccccaucaugcacgaccgcaccaagauccgccagcuccccaaccuccuccgcggcuacgagcacauccgccucuccacccacaacgucaucaacgccgagaacgcccccggcggccccuacaagaucggcaccuccggcuccugccccaacgucaccaacggcaacggcuucuucgccaccauggccugggccguccccaagaacgacaacaacaagaccgccaccaacucccucaccaucgagguccccuacaucugcaccgagggcgaggaccagaucaccgucuggggcuuccacuccgacaacgagacccagauggccaagcucuacggcgacuccaagccccagaaguucaccuccuccgccaacggcgucaccacccacuacgucucccagaucggcggcuuccccaaccagaccgaggacggcggccucccccaguccggccgcaucgucgucgacuacaugguccagaaguccggcaagaccggcaccaucaccuaccagcgcggcauccuccucccccagaaggucuggugcgccuccggccgcuccaaggucaucaagggcucccucccccucaucggcgaggccgacugccuccacgagaaguacggcggccucaacaaguccaagcccuacuacaccggcgagcacgccaaggccaucggcaacugccccaucugggucaagaccccccucaagcucgccaacggcaccaaguaccgcccccccgccaagcuccucaaggagcgcggcuucuucggcgccaucgccggcuuccucgagggcggcugggagggcaugaucgccggcuggcacggcuacaccucccacggcgcccacggcgucgccgucgccgccgaccucaaguccacccaggaggccaucaacaagaucaccaagaaccucaacucccucuccgagcucgaggucaagaaccuccagcgccucuccggcgccauggacgagcuccacaacgagauccucgagcucgacgagaaggucgacgaccuccgcgccgacaccaucuccucccagaucgagcucgccguccuccucuccaacgagggcaucaucaacuccgaggacgagcaccuccucgcccucgagcgcaagcucaagaagaugcucggccccuccgccgucgagaucggcaacggcugcuucgagaccaagcacaagugcaaccagaccugccucgaccgcaucgccgccggcaccuucgacgccggcgaguucuuccuccccaccuucgacucccucaacaucaccgccgccucccucaacgacgacggccucgacaaccacaccauccuccucuacuacuccaccgccgccuccucccucgccgucacccucaugaucgccaucuucgucgucuacauggucucccgcgacaacgucuccugcuccaucugccucuga

SEQ ID NO: 122571 - RNA, 1758 nt, Artificial Sequence; identical to SEQ ID NO: 122550
  derived and/or modified CDS sequence (opt2) from hemagglutinin__InfluenzaB__ACA96629

SEQ ID NO: 122572 - RNA, 1758 nt, Artificial Sequence; identical to SEQ ID NO: 122556
  derived and/or modified CDS sequence (opt2) from hemagglutinin__InfluenzaB__ACA96640

SEQ ID NO: 122573 - RNA, 1755 nt, Artificial Sequence
  derived and/or modified CDS sequence (opt2) from hemagglutinin__InfluenzaB__ACD56566
augaaggccaucaucguccuccucauggucgucaccuccaacgccgaccgcaucugcaccggcaucaccuccuccaacuccccccacgucgucaagaccgccacccagggcgaggucaacgucaccggcgucaucccccucaccaccacccccaccaaguccuacuucgccaaccucaagggcacccgcacccgcggcaagcucugccccgacugccucaacugcaccgaccucgacgucgcccucggccgccccaugugcgucggcaccacccccuccgccaaggccuccauccuccacgagguccgccccgucaccuccggcugcuuccccaucaugcacgaccgcaccaagauccgccagcuccccaaccuccuccgcggcuacgagaacauccgccucuccacccagaacgucgucgacgccgagaacgcccccggcggccccuaccgccucggcaccuccggcuccugccccaacgccaccuccaaguccggcuucuucgccaccauggccugggccguccccaaggacaacaacaagaacgccaccaacccccucaccgucgagguccccuacgucugcaccgagggcgaggaccagaucaccgucuggggcuuccacuccgacaacaagacccagaugaagaaccucuacggcgacuccaacccccagaaguucaccuccuccgccaacggcgucaccacccacuacgucucccagaucggcggcuuccccgcccagaccgaggacggcggccucccccaguccggccgcaucgucgucgacuacaugguccagaagccccgcaagaccggcaccaucgucuaccagcgcggcguccuccucccccagaaggucuggugcgccuccggccgcuccaaggucaucaagggcucccucccccucaucggcgaggccgacugccuccacgagaaguacggcggccucaacaaguccaagcccuacuacaccggcgagcacgccaaggccaucggcaacugccccaucugggucaagaccccccucaagcucgccaacggcaccaaguaccgcccccccgccaagcuccucaaggagcgcggcuucuucggcgccaucgccggcuuccucgagggcggcugggagggcaugaucgccggcuggcacggcuacaccucccacggcgcccacggcgucgccgucgccgccgaccucaaguccacccaggaggccaucaacaagaucaccaagaaccucaacucccucuccgagcucgaggucaagaaccuccagcgccucuccggcgccauggacgagcuccacaacgagauccucgagcucgacgagaaggucgacgaccuccgcgccgacaccaucuccucccagaucgagcucgccguccuccucuccaacgagggcaucaucaacuccgaggacgagcaccuccucgcccucgagcgcaagcucaagaagaugcucggccccuccgccgucgacaucggcaacggcugcuucgagaccaagcacaagugcaaccagaccugccucgacaagaucgccgccggcaccuucaacgccggcgaguucucccuccccaccuucgacucccucaacaucaccgccgccucccucaacgacgacggccucgacaaccacaccauccuccucuacuacuccaccgccgccuccucccucgccgucacccucaugcucgccaucuucaucgucuacauggucucccgcgacaacgucuccugcuccaucugccucuga

SEQ ID NO: 122574 - RNA, 1755 nt, Artificial Sequence
  derived and/or modified CDS sequence (opt2) from hemagglutinin__InfluenzaB__ACD56577
augaaggccaucaucguccuccucauggucgucaccuccaacgccgaccgcaucugcaccggcaucaccuccuccaacuccccccacgucgucaagaccgccacccagggcgaggucaacgucaccggcgucaucccccucaccaccacccccaccaaguccuacuucgccaaccucaagggcacccgcacccgcggcaagcucugccccgacugccucaacugcaccgaccucgacgucgcccucggccgccccaugugcgucggcaccacccccuccgccaaggccuccauccuccacgagguccgccccgucaccuccggcugcuuccccaucaugcacgaccgcaccaagauccgccagcuccccaaccuccuccgcggcuacgagaacauccgccucuccacccagaacgucaucgacgccgagaacgcccccggcggccccuaccgccucggcaccuccggcuccugccccaacgccaccuccaaguccggcuucuucgccaccauggccugggccguccccaaggacaacaacaagaacgccaccaacccccucaccgucgagguccccuacaucugcaccgagggcgaggaccagaucaccgucuggggcuuccacuccgacaacaaggcccagaugaagaaccucuacggcgacuccaacccccagaaguucaccuccuccgccaacggcgucaccacccacuacgucucccagaucggcggcuuccccgcccagaccgaggacggcggccucccccaguccggccgcaucgucgucgacuacaugguccagaagccccgcaagaccggcaccaucgucuaccagcgcggcguccuccucccccagaaggucuggugcgccuccggccgcuccaaggucaucaagggcucccucccccucaucggcgaggccgacugccuccacgagaaguacggcggccucaacaaguccaagcccuacuacaccggcgagcacgccaaggccaucggcaacugccccaucugggucaagaccccccucaagcucgccaacggcaccaaguaccgcccccccgccaagcuccucaaggagcgcggcuucuucggcgccaucgccggcuuccucgagggcggcugggagggcaugaucgccggcuggcacggcuacaccucccacggcgcccacggcgucgccgucgccgccgaccucaaguccacccaggaggccaucaacaagaucaccaagaaccucaacucccucuccgagcucgaggucaagaaccuccagcgccucuccggcgccauggacgagcuccacaacgagauccucgagcucgacgagaaggucgacgaccuccgcgccgacaccaucuccucccagaucgagcucgccguccuccucuccaacgagggcaucaucaacuccgaggacgagcaccuccucgcccucgagcgcaagcucaagaagaugcucggccccuccgccgucgacaucggcaacggcugcuucgagaccaagcacaagugcaaccagaccugccucgaccgcaucgccgccggcaccuucaacgccggcgaguucucccuccccaccuucgacucccucaacaucaccgccgccucccucaacgacgacggccucgacaaccacaccauccuccucuacuacuccaccgccgccuccucccucgccgucacccucaugcucgccaucuucaucgucuacauggucucccgcgacaacgucuccugcuccaucugccucuga

SEQ ID NO: 122575 - RNA, 1758 nt, Artificial Sequence; identical to SEQ ID NO: 122556
  derived and/or modified CDS sequence (opt2) from hemagglutinin__InfluenzaB__ACF41658

SEQ ID NO: 122576 - RNA, 1758 nt, Artificial Sequence
  derived and/or modified CDS sequence (opt2) from hemagglutinin__InfluenzaB__ACF54136
augaaggccaucaucguccuccucauggucgucaccuccaacgccgaccgcaucugcaccggcaucaccuccuccaacuccccccacgucgucaagaccgccacccagggcgaggucaacgucaccggcgucaucccccucaccaccacccccaccaagucccacuucgccaaccucaagggcaccgagacccgcggcaagcucugccccaagugccucaacugcaccgaccucgacgucgcccucggccgccccaagugcaccggcaacauccccuccgcccgcgucuccauccuccacgagguccgccccgucaccuccggcugcuuccccaucaugcacgaccgcaccaagauccgccagcuccccaaccuccuccgcggcuacgagcacauccgccucuccacccacaacgucaucaacgccgagaacgcccccggcggccccuacaagaucggcaccuccggcuccugccccaacgucaccaacggcaacggcuucuucgccaccauggccugggccguccccaagaacgacaacaacaagaccgccaccaacucccucaccaucgagguccccuacaucugcaccgagggcgaggaccagaucaccgucuggggcuuccacuccgacaacaagacccagauggccaagcucuacggcgacuccaagccccagaaguucaccuccuccgccaacggcgucaccacccacuacgucucccagaucggcggcuuccccaaccagaccgaggacggcggccucccccaguccggccgcaucgucgucgacuacaugguccagaaguccggcaagaccggcaccaucaccuaccagcgcggcauccuccucccccagaaggucuggugcgccuccggccgcuccaaggucaucaagggcucccucccccucaucggcgaggccgacugccuccacgagaaguacggcggccucaacaaguccaagcccuacuacaccggcgagcacgccaaggccaucggcaacugccccaucugggucaagaccccccucaagcucgccaacggcaccaaguaccgcccccccgccaagcuccucaaggagcgcggcuucuucggcgccaucgccggcuuccucgagggcggcugggagggcaugaucgccggcuggcacggcuacaccucccacggcgcccacggcgucgccgucgccgccgaccucaaguccacccaggaggccaucaacaagaucaccaagaaccucaacucccucuccgagcucgaggucaagaaccuccagcgccucuccggcgccauggacgagcuccacaacgagauccucgagcucgacgagaaggucgacgaccuccgcgccgacaccaucuccucccagaucgagcucgccguccuccucuccaacgagggcaucaucaacuccgaggacgagcaccuccucgcccucgagcgcaagcucaagaagaugcucggccccuccgccgucgagaucggcaacggcugcuucgagaccaagcacaagugcaaccagaccugccucgaccgcaucgccgccggcaccuucgacgccggcgaguucucccuccccaccuucgacucccucaacaucaccgccgccucccucaacgacgacggccucgacaaccacaccauccuccucuacuacuccaccgccgccuccucccucgccgucacccucaugaucgccaucuucgucgucuacauggucucccgcgacaacaucuccugcuccaucugccucuga

SEQ ID NO: 122577 - RNA, 1758 nt, Artificial Sequence; identical to SEQ ID NO: 122550
  derived and/or modified CDS sequence (opt2) from hemagglutinin__InfluenzaB__ACF54147

SEQ ID NO: 122578 - RNA, 1755 nt, Artificial Sequence
  derived and/or modified CDS sequence (opt2) from hemagglutinin__InfluenzaB__ACF54158
augaaggccaucaucguccuccucauggucgucaccuccaacgccgaccgcaucugcaccggcaucaccuccuccaacuccccccacgucgucaagaccgccacccagggcgaggucaacgucaccggcgucaucccccucaccaccacccccaccaaguccuacuucgccaaccucaagggcacccgcacccgcggcaagcucugccccgacugccucaacugcaccgaccucgacgucgcccucggccgccccaugugcgucggcaccacccccuccgccaaggccuccauccuccacgagguccgccccgucaccuccggcugcuuccccaucaugcacgaccgcaccaagauccgccagcucgccaaccuccuccgcggcuacgagaacauccgccucuccacccagaacgucaucgacgccgagaaggcccccggcggccccuaccgccucggcaccuccggcuccugccccaacgccaccuccaaguccggcuucuucgccaccauggccugggccguccccaaggacaacaacaagaacgccaccaacccccucaccgucgagguccccuacaucugcaccgagggcgaggaccagaucaccgucuggggcuuccacuccgacaacaagacccagaugaagaaccucuacggcgacuccaacccccagaaguucaccuccuccgccaacggcgucaccacccacuacgucucccagaucggcggcuuccccgaccagaccgaggacggcggccucccccaguccggccgcaucgucgucgacuacaugaugcagaagcccggcaagaccggcaccaucgucuaccagcgcggcguccuccucccccagaaggucuggugcgccuccggccgcuccaaggucaucaagggcucccucccccucaucggcgaggccgacugccuccacgagaaguacggcggccucaacaagucccgccccuacuacaccggcgagcacgccaaggccaucggcaacugccccaucugggucaagaccccccucaagcucgccaacggcaccaaguaccgcccccccgccaagcuccucaaggagcgcggcuucuucggcgccaucgccggcuuccucgagggcggcugggagggcaugaucgccggcuggcacggcuacaccucccacggcgcccacggcgucgccgucgccgccgaccucaaguccacccaggaggccaucaacaagaucaccaagaaccucaacucccucuccgagcucgaggucaagaaccuccagcgccucuccggcgccauggacgagcuccacaacgagauccucgagcucgacgagaaggucgacgaccuccgcgccgacaccaucuccucccagaucgagcucgccguccuccucuccaacgagggcaucaucaacuccgaggacgagcaccuccucgcccucgagcgcaagcucaagaagaugcucggccccuccgccgucgacaucggcaacggcugcuucgagaccaagcacaagugcaaccagaccugccucgaccgcaucgccgccggcaccuucaacgccggcgaguucucccuccccaccuucgacucccucaacaucaccgccgccucccucaacgacgacggccucgacaaccacaccauccuccucuacuacuccaccgccgccuccucccucgccgucacccucaugcucgccaucuucaucgucuacauggucucccgcgacaacgucuccugcuccaucugccucuga

SEQ ID NO: 122579 - RNA, 1755 nt, Artificial Sequence
  derived and/or modified CDS sequence (opt2) from hemagglutinin__InfluenzaB__ACF54169
augaaggccaucaucguccuccucauggucgucaccuccaacgccgaccgcaucugcaccggcaucaccuccuccaacuccccccacgucgucaagaccgccacccagggcgaggucaacgucaccggcgucaucccccucaccaccacccccaccaaguccuacuucgccaaccucaagggcacccgcacccgcggcaagcucugccccgacugccucaacugcaccgaccucgacgucgcccucggccgccccaugugcgucggcaccacccccuccgccaaggccuccauccuccacgagguccgccccgucaccuccggcugcuuccccaucaugcacgaccgcaccaagauccgccagcuccccaaccuccuccgcggcuacgagaacauccgccucuccacccagaacgucaucgacgccgagaacgcccccggcggccccuaccgccucggcaccuccggcuccugccccaacgccaccuccaaguccggcuucuucgccaccauggccugggccguccccaaggacaacaacaagaacgccaccaacccccucaccgucgagguccccuacgucugcaccgagggcgaggaccagaucaccgucuggggcuuccacuccgacaacaagacccccaugaagaaccucuacggcgacuccaacccccagaaguucaccuccuccgccaacggcgucaccacccacuacgucucccagaucggcggcuuccccgcccagaccgaggacgagggcaucccccaguccggccgcaucgucgucgacuacaugguccagaagccccgcaagaccggcaccaucgucuaccagcgcggcguccuccucccccagaaggucuggugcgccuccggccgcuccaaggucaucaagggcucccucccccucaucggcgaggccgacugccuccacgagaaguacggcggccucaacaaguccaagcccuacuacaccggcgagcacgccaaggccaucggcaacugccccaucugggucaagaccccccucaagcucgccaacggcaccaaguaccgcccccccgccaagcuccucaaggagcgcggcuucuucggcgccaucgccggcuuccucgagggcggcugggagggcaugaucgccggcuggcacggcuacaccucccacggcgcccacggcgucgccgucgccgccgaccucaaguccacccaggaggccaucuccaagaucaccaagaaccucaacucccucuccgagcucgaggucaagaaccuccagcgccucuccggcgccauggacgagcuccacaacgagauccucgagcucgacgagaaggucgacgaccuccgcgccgacaccaucuccucccagaucgagcucgccguccuccucuccaacgagggcaucaucaacuccgaggacgagcaccuccucgcccucgagcgcaagcucaagaagaugcucggccccuccgccgucgacaucggcaacggcugcuucgagaccaagcacaagugcaaccagaccugccucgaccgcaucgccgccggcaccuucaacgccggcgaguucucccuccccaccuucgacucccucaacaucaccgccgccucccucaacgacgacggccucgacaaccacaccauccuccucuacuacuccaccgccgccuccucccucgccgucacccucaugcucgccaucuucaucgucuacauggucucccgcgacaacgucuccugcuccaucugccucuga

SEQ ID NO: 122580 - RNA, 1755 nt, Artificial Sequence
  derived and/or modified CDS sequence (opt2) from hemagglutinin__InfluenzaB__ACF54180
augaaggccaucaucguccuccucauggucgucaccuccaacgccgaccgcaucugcaccggcaucaccuccuccaacuccccccacgucgucaagaccgccacccagggcgaggucaacgucaccggcgucaucccccucaccaccacccccaccaaguccuacuucgccaaccucaagggcacccgcacccgcggcaagcucugccccgacugccucaacugcaccgaccucgacgucgcccucggccgccccaugugcgucggcaccacccccuccgccaaggccuccauccuccacgagguccgccccgucaccuccggcugcuuccccaucaugcacgaccgcaccaagauccgccagcuccccaaccuccuccgcggcuacgagaacauccgccucuccacccagaacgucaucgacgccgagaacgcccccggcggccccuaccgccucggcaccuccggcuccugccccaacgccaccuccaaguccggcuucuucgccaccauggccugggccguccccaaggacaacaacaagaacgccaccaacccccucaccgucgagguccccuacgucugcaccgagggcgaggaccagaucaccgucuggggcuuccacuccgacaacaagacccccaugaagaaccucuacggcgacuccaacccccagaaguucaccuccuccgccaacggcgucaccacccacuacgucucccagaucggcggcuuccccgcccagaccgaggacggcggccucccccaguccggccgcaucgucgucgacuacaugguccagaagccccgcaagaccggcaccaucgucuaccagcgcggcguccuccucccccagaaggucuggugcgccuccggccgcuccaaggucaucaagggcucccucccccucaucggcgaggccgacugccuccacgagaaguacggcggccucaacaaguccaagcccuacuacaccggcgagcacgccaaggccaucggcaacugccccaucugggucaagaccccccucaagcucgccaacggcaccaaguaccgcccccccgccaagcuccucaaggagcgcggcuucuucggcgccaucgccggcuuccucgagggcggcugggagggcaugaucgccggcuggcacggcuacaccucccacggcgcccacggcgucgccgucgccgccgaccucaaguccacccaggaggccaucaacaagaucaccaagaaccucaacucccucuccgagcucgaggucaagaaccuccagcgccucuccggcgccauggacgagcuccacaacgagauccucgagcucgacgagaaggucgacgaccuccgcgccgacaccaucuccucccagaucgagcucgccguccuccucuccaacgagggcaucaucaacuccgaggacgagcaccuccucgcccucgagcgcaagcucaagaagaugcucggccccuccgccgucgacaucggcaacggcugcuucgagaccaagcacaagugcaaccagaccugccucgaccgcaucgccgccggcaccuucaacgccggcgaguucucccuccccaccuucgacucccucaacaucaccgccgccucccucaacgacgacggccucgacaaccacaccauccuccucuacuacuccaccgccgccuccucccucgccgucacccucaugcucgccaucuucaucgucuacauggucucccgcgacaacgucuccugcuccaucugccucuga

SEQ ID NO: 122581 - RNA, 1755 nt, Artificial Sequence
  derived and/or modified CDS sequence (opt2) from hemagglutinin__InfluenzaB__ACF54202
augaaggccaucaucguccuccucauggucgucaccuccaacgccgaccgcaucugcaccggcaucaccuccuccaacuccccccacgucgucaagaccgccacccagggcgaggucaacgucaccggcgucaucccccucaccaccacccccaccaaguccuacuucgccaaccucaagggcacccgcacccgcggcaagcucugccccgacugccucaacugcaccgaccucgacgucgcccucggccgccccaugugcgucggcaccacccccuccgccaaggccuccauccuccacgagguccgccccgucaccuccggcugcuuccccaucaugcacgaccgcaccaagauccgccagcuccccaaccuccuccgcggcuacgagaacauccgccucuccacccagaacgucaucgacgccgagaacgcccccggcggccccuaccgccucggcaccucccgcuccugccccaacgccaccuccaaguccggcuucuucgccaccauggccugggccguccccaaggacaacaacaagaacgccaccaacccccucaccgucgagguccccuacgucugcaccgagggcgaggaccagaucaccgucuggggcuuccacuccgacaacaagacccagaugaagaaccucuacggcgacuccaacccccagaaguucaccuccuccgccaacggcgucaccacccacuacgucucccagaucggcggcuuccccgcccagaccgaggacgagggccucccccaguccggccgcaucgucgucgacuacaugguccagaagccccgcaagaccggcaccaucgucuaccagcgcggcguccuccucccccagaaggucuggugcgccuccggccgcuccaaggucaucaagggcucccucccccucaucggcgaggccgacugccuccacgagaaguacggcggccucaacaaguccaagcccuacuacaccggcgagcacgccaaggccaucggcaacugccccaucugggucaagaccccccucaagcucgccaacggcaccaaguaccgcccccccgccaagcuccucaaggagcgcggcuucuucggcgccaucgccggcuuccucgagggcggcugggagggcaugaucgccggcuggcacggcuacaccucccacggcgcccacggcgucgccgucgccgccgaccucaaguccacccaggaggccaucaacaagaucaccaagaaccucaacucccucuccgagcucgaggucaagaaccuccagcgccucuccggcgccauggacgagcuccacaacgagauccucgagcucgacgagaaggucgacgaccuccgcgccgacaccaucuccucccagaucgagcucgccguccuccucuccaacgagggcaucaucaacuccgaggacgagcaccuccucgcccucgagcgcaagcucaagaagaugcucggccccuccgccgucgacaucggcaacggcugcuucgagaccaagcacaagugcaaccagaccugccucgaccgcaucgccgccggcaccuucaacgccggcgaguucucccuccccaccuucgacucccucaacaucaccgccgccucccucaacgacgacggccucgacaaccacaccauccuccucuacuacuccaccgccgccuccucccucgccgucacccucaugcucgccaucuucaucgucuacauggucucccgcgacaacgucuccugcuccaucugccucuga

SEQ ID NO: 122582 - RNA, 1755 nt, Artificial Sequence
  derived and/or modified CDS sequence (opt2) from hemagglutinin__InfluenzaB__ACF54213
augaaggccaucaucguccuccucauggucgucaccuccaacgccgaccgcaucugcaccggcaucaccuccuccaacuccccccacgucgucaagaccgccacccagggcgaggucaacgucaccggcgucaucccccucaccaccacccccaccaaguccuacuucgccaaccucaagggcacccgcacccgcggcaagcucugccccgacugccucaacugcaccgaccucgacgucgcccucggccgccccaugugcgucggcaccacccccuccgccaaggccuccauccuccacgagguccgccccgucaccuccggcugcuuccccaucaugcacgaccgcaccaagauccgccagcuccccaaccuccuccgcggcuacgagaacauccgccucuccacccagaacgucaucgacgccgagaaggcccccggcggccccuaccgccucggcaccuccggcuccugccccaacgccaccuccaaguccggcuucuucgccaccauggccugggccguccccaaggacaacaacaagaacgccaccaacccccucaccgucgagguccccuacaucugcaccgagggcgaggaccagaucaccgucuggggcuuccacuccgacgacaagacccagaugaagaaccucuacggcgacuccaacccccagaaguucaccuccuccgccaacggcgucaccacccacuacgucucccagaucggcggcuuccccgaccagaccgaggacggcggccucccccaguccggccgcaucgucgucgacuacaugaugcagaagcccggcaagaccggcaccaucgucuaccagcgcggcguccuccucccccagaaggucuggugcgccuccggccgcuccaaggucaucaagggcucccucccccucaucggcgaggccgacugccuccacgagaaguacggcggccucaacaaguccaagcccuacuacaccggcgagcacgccaaggccaucggcaacugccccaucugggucaagaccccccucaagcucgccaacggcaccaaguaccgcccccccgccaagcuccucaaggagcgcggcuucuucggcgccaucgccggcuuccucgagggcggcugggagggcaugaucgccggcuggcacggcuacaccucccacggcgcccacggcgucgccgucgccgccgaccucaaguccacccaggaggccaucaacaagaucaccaagaaccucaacucccucuccgagcucgaggucaagaaccuccagcgccucuccggcgccauggacgagcuccacaacgagauccucgagcucgacgagaaggucgacgaccuccgcgccgacaccaucuccucccagaucgagcucgccguccuccucuccaacgagggcaucaucaacuccgagaacgagcaccuccucgcccucgagcgcaagcucaagaagaugcucggccccuccgccgucgacaucggcaacggcugcuucgagaccaagcacaagugcaaccagaccugccucgaccgcaucgccgccggcaccuucaacgccggcgaguucucccuccccaccuucgacucccucaacaucaccgccgccucccucaacgacgacggccucgacaaccacaccauccuccucuacuacuccaccgccgccuccucccucgccgucacccucaugcucgccaucuucaucgucuacauggucucccgcgacaacgucuccugcuccaucugccucuga

SEQ ID NO: 122583 - RNA, 1758 nt, Artificial Sequence
  derived and/or modified CDS sequence (opt2) from hemagglutinin__InfluenzaB__ACF54224
augaaggccaucaucguccuccucauggucgucaccuccaacgccgaccgcaucugcaccggcaucaccuccuccaacuccccccacgucgucaagaccgccacccagggcgaggucaacgucaccggcgucaucccccucaccaccacccccaccaagucccacuucgccaaccucaagggcaccaagacccgcggcaagcucugccccaagugccucaacugcaccgaccucgacgucgcccucggccgccccaagugcaccggcaacauccccuccgccgaggucuccauccuccacgagguccgccccgucaccuccggcugcuuccccaucaugcacgaccgcaccaagauccgccagcuccccaaccuccuccgcggcuacgagcacauccgccucuccacccacaacgucaucaacgccgagaaggcccccggcggccccuacaagaucggcaccuccggcuccugccccaacgucaccaacggcaacggcuucuucgccaccauggccugggccguccccaagaacgacaacaacaagaccgccaccaacucccucaccaucgagguccccuacaucugcaccgagggcgaggaccagaucaccgucuggggcuuccacuccgacaacgagacccagauggccaagcucuacggcgacuccaagccccagaaguucaccuccuccuccaacggcgucaccacccacuacgucucccagaucggcggcuuccccaaccagaccgaggacggcggccucccccaguccggccgcaucgucgucgacuacaugguccagaaguccggcaagaccggcaccaucaccuaccagcgcggcauccuccucccccagaaggucuggugcgccuccggccgcuccaaggucaucaagggcucccucccccucaucggcgaggccgacugccuccacgagcgcuacggcggccucaacaaguccaagcccuacuacaccggcgagcacgccaaggccaucggcaacugccccaucugggucaagaccccccucaagcucgccaacggcaccaaguaccgcccccccgccaagcuccucaaggagcgcggcuucuucggcgccaucgccggcuuccucgagggcggcugggagggcaugaucgccggcuggcacggcuacaccucccacggcgcccacggcgucgccgucgccgccgaccucaaguccacccaggaggccaucaacaagaucaccaagaaccucaacucccucuccgagcucgaggucaagaaccuccagcgccucuccggcgccauggacgagcuccacaacgagauccucgagcucgacgagaaggucgacgaccuccgcgccgacaccaucuccucccagaucgagcucgccguccuccucuccaacgagggcaucaucaacuccgaggacgagcaccuccucgcccucgagcgcaagcucaagaagaugcucggccccuccgccgucgagaucggcaacggcugcuucgagaccaagcacaagugcaaccagaccugccucgaccgcaucgccgccggcaccuucgacgccggcgaguucucccuccccaccuucgacucccucaacaucaccgccgccucccucaacgacgacggccucgacaaccacaccauccuccucuacuacuccaccgccgccuccucccucgccgucacccucaugaucgccaucuucgucgucuacauggucucccgcgacaacgucuccugcuccaucugccucuga

SEQ ID NO: 122584 - RNA, 1755 nt, Artificial Sequence
  derived and/or modified CDS sequence (opt2) from hemagglutinin__InfluenzaB__ACF54257
augaaggccaucaucguccuccucauggucgucaccuccaacgccgaccgcaucugcaccggcaucaccuccuccaacuccccccacgucgucaagaccgccacccagggcgaggucaacgucaccggcgccaucccccucaccaccacccccaccaagucccacuucgccaaccucaagggcaccaagacccgcggcaagcucugccccaccugccucaacugcaccgaccucgacgucgcccucggccgccccaugugcgucggcaucacccccuccgccaaggccuccauccuccacgagguccgccccgucaccuccggcugcuuccccaucaugcacgaccgcaccaagauccgccagcuccccaaccuccuccgcggcuacgagaagauccgccucuccacccagaacgucaucgacgccgagaaggcccccggcggccccuaccgccucggcaccuccggcuccugccccaacgccaccuccaaguccggcuucuucgccaccauggccugggccgucccccgcgagaacaacaagaccgccaccaacccccucaccgucgaggucccccacaucugcaccaaggaggaggaccagaucaccgucuggggcuuccacuccgacaacaagccccagaugaagaaccucuacggcgacuccaacccccagaaguucaccuccuccgccaacggcaucaccacccacuacgucucccagaucggcggcuuccccgaccagaccgaggacggcggccucccccaguccggccgcaucgucgucgacuacaugguccagaagcccggcaagaccggcaccaucgucuaccagcgcggcauccuccucccccagaaggucuggugcgccuccggccgcuccaaggucaucaagggcucccucccccucaucggcgaggccgacugccuccacgagaaguacggcggccucaacaaguccaagcccuacuacaccggcgagcacgccaaggccaucggcaacugccccaucugggucaagaccccccucaagcucgccaacggcaccaaguaccgcccccccgccaagcuccucaaggagcgcggcuucuucggcgccaucgccggcuuccucgagggcggcugggagggcaugaucgccggcuggcacggcuacaccucccacggcgcccacggcgucgccgucgccgccgaccucaaguccacccaggaggccaucaacaagaucaccaagaaccucaacucccucuccgagcucgaggucaagaaccuccagcgccucuccggcgccauggacgagcuccacaacgagauccucgagcucgacgagaaggucgacgaccuccgcgccgacaccaucuccucccagaucgagcucgccguccuccucuccaacgagggcaucaucaacuccgaggacgagcaccuccucgcccucgagcgcaagcucaagaagaugcucggccccuccgccgucgacaucggcaacggcugcuucgagaccaagcacaagugcaaccagaccugccucgaccgcaucgccgccggcaccuucaacgccggcgaguucucccuccccaccuucgacucccucaacaucaccgccgccucccucaacgacgacggccucgacaaccacaccauccuccucuacuacuccaccgccgccuccucccucgccgucacccucaugaucgccaucuucaucgucuacaugaucucccgcgacaacgucuccugcuccaucugccucuga

SEQ ID NO: 122585 - RNA, 1755 nt, Artificial Sequence
  derived and/or modified CDS sequence (opt2) from hemagglutinin__InfluenzaB__ACF54268
augaaggccaucaucguccuccucauggucgucaccuccaacgccgaccgcaucugcaccggcaucaccuccuccaacuccccccacgucgucaagaccgccacccagggcgaggucaacgucaccggcgccaucccccucaccaccacccccaccaagucccacuucgccaaccucaagggcaccaagacccgcggcaagcucugccccaccugccucaacugcaccgaccucgacgucgcccucggccgccccaugugcgucggcaucacccccuccgccaaggccuccauccuccacgagguccgccccgucaccuccggcugcuuccccaucaugcacgaccgcaccaagauccgccagcuccccaaccuccuccgcggcuacgagaagauccgccucuccacccagaacgucaucgacgccgagaaggcccccggcggccccuaccgccucggcaccuccggcuccugccccaacgccaccuccaaguccggcuucuucgccaccauggccugggccgucccccgcgagaacaacaagaccgccaccaacccccucaccgucgaggucccccacaucugcaccaaggaggaggaccagaucaccgucuggggcuuccacuccgacaacaagauccagaugaagaaccucuacggcgacuccaacccccagaaguucaccuccuccgccaacggcaucaccacccacuacgucucccagaucggcggcuuccccgaccagaccgaggacggcggccucccccaguccggccgcaucgucgucgacuacaugguccagaagcccggcaagaccggcaccaucgucuaccagcgcggcauccuccucccccagaaggucuggugcgccuccggccgcuccaaggucaucaagggcucccucccccucaucggcgaggccgacugccuccacgagaaguacggcggccucaacaaguccaagcccuacuacaccggcgagcacgccaaggccaucggcaacugccccaucugggucaagaccccccucaagcucgccaacggcaccaaguaccgcccccccgccaagcuccucaaggagcgcggcuucuucggcgccaucgccggcuuccucgagggcggcugggagggcaugaucgccggcuggcacggcuacaccucccacggcgcccacggcgucgccgucgccgccgaccucaaguccacccaggaggccaucaacaagaucaccaagaaccucaacucccucuccgagcucgaggucaagaaccuccagcgccucuccggcgccauggacgagcuccacaacgagauccucgagcucgacgagaaggucgacgaccuccgcgccgacaccaucuccucccagaucgagcucgccguccuccucuccaacgagggcaucaucaacuccgaggacgagcaccuccucgcccucgagcgcaagcucaagaagaugcucggccccuccgccaucgacaucggcaacggcugcuucgagaccaagcacaagugcaaccagaccugccucgaccgcaucgccgccggcaccuucaacgccggcgaguucucccuccccaccuucgacucccucaacaucaccgccgccucccucaacgacgacggccucgacaaccacaccauccuccucuacuacuccaccgccgccuccucccucgccgucacccucaugaucgccaucuucaucgucuacaugaucucccgcgacaacgucuccugcuccaucugccucuga

SEQ ID NO: 122586 - RNA, 1755 nt, Artificial Sequence
  derived and/or modified CDS sequence (opt2) from hemagglutinin__InfluenzaB__ACF54279
augaaggccaucaucguccuccucauggucgucaccuccaacgccgaccgcaucugcaccggcaucaccuccuccaacuccccccacgucgucaagaccgccacccagggcgaggucaacgucaccggcgccaucccccucaccaccacccccaccaagucccacuucgccaaccucaagggcaccaagacccgcggcaagcucugccccaccugccucaacugcaccgaccucgacgucgcccucggccgccccaugugcgucggcaucacccccuccgccaaggccuccauccuccacgagguccgccccgucaccuccggcugcuuccccaucaugcacgaccgcaccaagauccgccagcuccccaaccuccuccgcggcuacgagaagauccgccucuccacccagaacgucaucgacgccgagaaggcccccggcggccccuaccgccucggcaccuccggcuccugccccaacgccaccuccaaguccggcuucuucgccaccauggccugggccgucccccgcgagaacaacaagaccgccaccaacccccucaccgucgaggucccccacaucugcaccaaggaggaggaccagaucaccgucuggggcuuccacuccgacaacaagacccagaugaagaaccucuacggcgacuccaacccccagaaguucaccuccuccgccaacggcaucaccacccacuacgucucccagaucggcggcuuccccgaccagaccgaggacggcggccucccccaguccggccgcaucgucgucgacuacaugguccagaagcccggcaagaccggcaccaucgucuaccagcgcggcauccuccucccccagaaggucuggugcgccuccggccgcuccaaggucaucaagggcucccucccccucaucggcgaggccgacugccuccacgagaaguacggcggccucaacaaguccaagcccuacuacaccggcgagcacgccaaggccaucggcaacugccccaucugggucaagaccccccucaagcucgccaacggcaccaaguaccgcccccccgccaagcuccucaaggagcgcggcuucuucggcgccaucgccggcuuccucgagggcggcugggagggcaugaucgccggcuggcacggcuacaccucccacggcgcccacggcgucgccgucgccgccgaccucaaguccacccaggaggccaucaacaagaucaccaagaaccucaacucccucuccgagcucgaggucaagaaccuccagcgccucuccggcgccauggacgagcuccacaacgagauccucgagcucgacgagaaggucgacgaccuccgcgccgacaccaucuccucccagaucgagcucgccguccuccucuccaacgagggcaucaucaacuccgaggacgagcaccuccucgcccucgagcgcaagcucaagaagaugcucggccccuccgccgucgacaucggcaacggcugcuucgagaccaagcacaagugcaaccagaccugccucgaccgcaucgccgccggcaccuucaacgccggcgaguucucccuccccaccuucgacucccucaacaucaccgccgccucccucaacgacgacggccucgacaaccacaccauccuccucuacuacuccaccgccgccuccucccucgccgucacccucaugaucgccaucuucaucgucuacaugaucucccgcgacaacgucuccugcuccaucugccucuga

SEQ ID NO: 122587 - RNA, 1755 nt, Artificial Sequence
  derived and/or modified CDS sequence (opt2) from hemagglutinin__InfluenzaB__ACF54290
augaaggccaucaucguccuccucauggucgucaccuccaacgccgaccgcaucugcaccggcaucaccuccuccaacuccccccacgucgucaagaccgccacccagggcgaggucaacgucaccggcgucaucccccucaccaccacccccaccaaguccuacuucgccaaccucaagggcacccgcacccgcggcaagcucugccccgacugccucaacugcaccgaccucgacgucgcccucggccgccccaugugcgucggcaccacccccuccgccaaggccuccauccuccacgagguccgccccgucaccuccggcugcuuccccaucaugcacgaccgcaccaagauccgccagcuccccaaccuccuccgcggcuacgagaacauccgccucuccacccagaacgucgucgacgccgagaacgcccccggcggccccuaccgccucggcaccuccggcuccugccccaacgccaccuccaaguccggcuucuucgccaccauggccugggccguccccaaggacaacaacaagaacgccaccaacccccucaccgucgagguccccuacgucugcaccgagggcgaggaccagaucaccgucuggggcuuccacuccgacaagaagacccagaugaagaaccucuacggcgacuccaacccccagaaguucaccuccuccgccaacggcgucaccacccacuacgucucccagaucggcggcuuccccgcccagaccgaggacggcggccucccccaguccggccgcaucgucgucgacuacaugguccagaagccccgcaagaccggcaccaucgucuaccagcgcggcguccuccucccccagaaggucuggugcgccuccggccgcuccaaggucaucaagggcucccucccccucaucggcgaggccgacugccuccacgagaaguacggcggccucaacaaguccaagcccuacuacaccggcgagcacgccaaggccaucggcaacugccccaucugggucaagaccccccucaagcucgccaacggcaccaaguaccgcccccccgccaagcuccucaaggagcgcggcuucuucggcgccaucgccggcuuccucgagggcggcugggagggcaugaucgccggcuggcacggcuacaccucccacggcgcccacggcgucgccgucgccgccgaccucaaguccacccaggaggccaucaacaagaucaccaagaaccucaacucccucuccgagcucgaggucaagaaccuccagcgccucuccggcgccauggacgagcuccacaacgagauccucgagcucgacgagaaggucgacgaccuccgcgccgacaccaucuccucccagaucgagcucgccguccuccucuccaacgagggcaucaucaacuccgaggacgagcaccuccucgcccucgagcgcaagcucaagaagaugcucggccccuccgccgucgacaucggcaacggcugcuucgagaccaagcacaagugcaaccagaccugccucgacaagaucgccgccggcaccuucaacgccggcgaguucucccuccccaccuucgacucccucaacaucaccgccgccucccucaacgacgacggccucgacaaccacaccauccuccucuacuacuccaccgccgccuccucccucgccgucacccucaugcucgccaucuucaucgucuacauggucucccgcgacaacgucuccugcuccaucugccucuga

SEQ ID NO: 122588 - RNA, 1758 nt, Artificial Sequence
  derived and/or modified CDS sequence (opt2) from hemagglutinin__InfluenzaB__ACF54312
augaaggccaucaucguccuccucauggucgucaccuccaacgccgaccgcaucugcaccggcaucaccuccuccaacuccccccacgucgucaagaccgccacccagggcgaggucaacgucaccggcgucaucccccucaccaccacccccaccaagucccacuucgccaaccucaagggcaccaagacccgcggcaagcucugccccaagugccucaacugcaccgaccucgacgucgcccucggccgccccaagugcaccggcaacauccccuccgccgaggucuccauccuccacgagguccgccccgucaccuccggcugcuuccccaucaugcacgaccgcaccaagauccgccagcuccccaaccuccuccgcggcuacgagcacauccgccucuccacccacaacgucaucaacgccgagaaggcccccggcggccccuacaagaucggcaccuccggcuccugccccaacgucaccaacggcaacggcuucuucgccaccauggccugggccguccccaagaacgacaacaacaagaccgccaccaacucccucaccaucgagguccccuacaucugcaccgagggcgaggaccagaucaccgucuggggcuuccacuccgacuccgagacccagauggccaagcucuacggcgacuccaagccccagaaguucaccuccuccuccaacggcgucaccacccacuacaucucccagaucggcggcuuccccaaccagaccgaggacggcggccucccccaguccggccgcaucgucgucgacuacaugguccagaaguccggcaagaccggcaccaucaccuaccagcgcggcauccuccucccccagaaggucuggugcgccuccggccgcuccaaggucaucaagggcucccucccccucaucggcgaggccgacugccuccacgagaaguacggcggccucaacaaguccaagcccuacuacaccggcgagcacgccaaggccaucggcaacugccccaucugggucaagaccccccucaagcucgccaacggcaccaaguaccgcccccccgccaagcuccucaaggagcgcggcuucuucggcgccaucgccggcuuccucgagggcggcugggagggcaugaucgccggcuggcacggcuacaccucccacggcgcccacggcgucgccgucgccgccgaccucaaguccacccaggaggccaucaacaagaucaccaagaaccucaacucccucuccgagcucgaggucaagaaccuccagcgccucuccggcgccauggacgagcuccacaacgagauccucgagcucgacgagaaggucgacgaccuccgcgccgacaccaucuccucccagaucgagcucgccguccuccucuccaacgagggcaucaucaacuccgaggacgagcaccuccucgcccucgagcgcaagcucaagaagaugcucggccccuccgccaucgagaucggcaacggcugcuucgagaccaagcacaagugcaaccagaccugccucgaccgcaucgccgccggcaccuucgacgccggcgaguucucccuccccaccuucgacucccucaacaucaccgccgccucccucaacgacgacggccucgacaaccacaccauccuccucuacuacuccaccgccgccuccucccucgccgucacccucaugaucgccaucuucgucgucuacauggucucccgcgacaacgucuccugcuccaucugccucuga

SEQ ID NO: 122589 - RNA, 1758 nt, Artificial Sequence
  derived and/or modified CDS sequence (opt2) from hemagglutinin__InfluenzaB__ACF54323
augaaggccaucaucguccuccucauggucgucaccuccaacgccgaccgcaucugcaccggcaucaccuccuccaacuccccccacgucgucaagaccgccacccagggcgaggucaacgucaccggcgucaucccccucaccaccacccccaccaagucccacuucgccaaccucaagggcaccgagacccgcggcaagcucugccccaagugccucaacugcaccgaccucgacgucgcccucggccgccccaagugcaccggcaacauccccuccgcccgcgucuccauccuccacgagguccgccccgucaccuccggcugcuuccccaucaugcacgaccgcaccaagauccgccagcuccccaaccuccuccgcggcuacgagcacauccgccucuccacccgcaacgucaucaacgccgagaacgcccccggcggccccuacaagaucggcaccuccggcuccugccccaacgucaccaacggcaacggcuucuucgccaccauggccugggccguccccaagaacgacaacaacaagaccgccaccaacucccucaccaucgagguccccuacaucugcaccgagggcgaggaccagaucaccgucuggggcuuccacuccgacaacgaggcccagauggccaagcucuacggcgacuccaagccccagaaguucaccuccuccgccaacggcgucaccacccacuacgucucccagaucggcggcuuccccaaccagaccgaggacggcggccucccccaguccggccgcaucgucgucgacuacaugguccagaaguccggcaagaccggcaccaucaccuaccagcgcggcauccuccucccccagaaggucuggugcgccuccggccgcuccaaggucaucaagggcucccucccccucaucggcgaggccgacugccuccacgagaaguacggcggccucaacaaguccaagcccuacuacaccggcgagcacgccaaggccaucggcaacugccccaucugggucaagaccccccucaagcucgccaacggcaccaaguaccgcccccccgccaagcuccucaaggagcgcggcuucuucggcgccaucgccggcuuccucgagggcggcugggagggcaugaucgccggcuggcacggcuacaccucccacggcgcccacggcgucgccgucgccgccgaccucaaguccacccaggaggccaucaacaagaucaccaagaaccucaacucccucuccgagcucgaggucaagaaccuccagcgccucuccggcgccauggacgagcuccacaacgagauccucgagcucgacgagaaggucgacgaccuccgcgccgacaccaucuccucccagaucgagcucgccguccuccucuccaacgagggcaucaucaacuccgaggacgagcaccuccucgcccucgagcgcaagcucaagaagaugcucggccccuccgccgucgagaucggcaacggcugcuucgagaccaagcacaagugcaaccagaccugccucgaccgcaucgccgccggcaccuucgacgccggcgaguucucccuccccaccuucgacucccucaacaucaccgccgccucccucaacgacgacggccucgacaaccacaccauccuccucuacuacuccaccgccgccuccucccucgccgucacccucaugaucgccaucuucgucgucuacauggucucccgcgacaacgucuccugcuccaucugccucuga

SEQ ID NO: 122590 - RNA, 1755 nt, Artificial Sequence
  derived and/or modified CDS sequence (opt2) from hemagglutinin__InfluenzaB__ACF54345
augaaggccaucaucguccuccucauggucgucaccuccaacgccgaccgcaucugcaccggcaucaccuccuccaacuccccccacgucgucaagaccgccacccagggcgaggucaacgucaccggcgucaucccccucaccaccacccccaccaaguccuacuucgccaaccucaagggcacccgcacccgcggcaagcucugccccgacugccucaacugcaccgaccucgacgucgcccucggccgccccaugugcgucggcaccacccccuccgccaaggccuccauccuccacgagguccgccccgucaccuccggcugcuuccccaucaugcacgaccgcaccaagauccgccagcucgccaaccuccuccgcggcuacgagaacauccgccucuccacccagaacgucaucgacgccgagaaggcccccggcggccccuaccgccucggcaccuccggcuccugccccaacgccaccuccaaguccggcuucuucgccaccauggccugggccguccccaaggacaacaacaagaacgccaccaacccccucaccgucgagguccccuacaucugcaccgagggcgaggaccagaucaccgucuggggcuuccacuccgacaacaaggcccagaugaagaaccucuacggcgacuccaacccccagaaguucaccuccuccgccaacggcgucaccacccacuacgucucccagaucggcggcuuccccgaccagaccgaggacggcggccucccccaguccggccgcaucgucgucgacuacaugauccagaagcccggcaagaccggcaccaucgucuaccagcgcggcguccuccucccccagaaggucuggugcgccuccggccgcuccaaggucaucaagggcucccucccccucaucggcgaggccgacugccuccacgagaaguacggcggccucaacaaguccaagcccuacuacaccggcgagcacgccaaggccaucggcaacugccccaucugggucaagaccccccucaagcucgccaacggcaccaaguaccgcccccccgccaagcuccuccgcgagcgcggcuucuucggcgccaucgccggcuuccucgagggcggcugggagggcaugaucgccggcuggcacggcuacaccucccacggcgcccacggcgucgccgucgccgccgaccucaaguccacccaggaggccaucaacaagaucaccaagaaccucaacucccucuccgagcucgaggucaagaaccuccagcgccucuccggcgccauggacgagcuccacaacgagauccucgagcucgacgagaaggucgacgaccuccgcgccgacaccaucuccucccagaucgagcucgccguccuccucuccaacgagggcaucaucaacuccgaggacgagcaccuccucgcccucgagcgcaagcucaagaagaugcucggccccuccgccgucgacaucggcaacggcugcuucgagaccaagcacaagugcaaccagaccugccucgaccgcaucgccgccggcaccuucaacgccggcgaguucucccuccccaccuucgacucccucaacaucaccgccgccucccucaacgacgacggccucgacaaccacaccauccuccucuacuacuccaccgccgccuccucccucgccgucacccucaugcucgccaucuucaucgucuacauggucucccgcgacaacgucuccugcuccaucugccucuga

SEQ ID NO: 122591 - RNA, 1755 nt, Artificial Sequence
  derived and/or modified CDS sequence (opt2) from hemagglutinin__InfluenzaB__ACF54367
augaaggccaucaucguccuccucauggucgucaccuccaacgccgaccgcaucugcaccggcaucaccuccuccaacuccccccacgucgucaagaccgccacccagggcgaggucaacgucaccggcgucaucccccucaccaccgcccccaccaaguccuacuucgccaaccucaagggcacccgcacccgcggcaagcucugccccgacugccucaacugcaccgaccucgacgucgcccucggccgccccaugugcgucggcaccacccccuccgccaaggccuccauccuccacgagguccgccccgucaccuccggcugcuuccccaucaugcacgaccgcaccaagauccgccagcucgccaaccuccuccgcggcuacgagaacauccgccucuccacccagaacgucaucgacgccgagaaggcccccggcggccccuaccgccucggcaccuccggcuccugccccaacgccaccuccaaguccggcuucuucgccaccauggccugggccguccccaaggacaacaacaagaacgccaccaacccccucaccgucgagguccccuacaucugcaccgagggcgaggaccagaucaccgucuggggcuuccacuccgacuccaagacccagaugaagaaccucuacggcgacuccaacccccagaaguucaccuccuccgccaacggcgucaccacccacuacgucucccagaucggcggcuuccccgaccagaccgaggacggcggccucccccaguccggccgcaucgucgucgacuacaugaugcagaagcccggcaagaccggcaccaucgucuaccagcgcggcguccuccucccccagaaggucuggugcgccuccggccgcuccaaggucaucaagggcucccucccccucaucggcgaggccgacugccuccacgagaaguacggcggccucaacaaguccaagcccuacuacaccggcgagcacgccaaggccaucggcaacugccccaucugggucaagaccccccucaagcucgccaacggcaccaaguaccgcccccccgccaagcuccucaaggagcgcggcuucuucggcgccaucgccggcuuccucgagggcggcugggagggcaugaucgccggcuggcacggcuacaccucccacggcgcccacggcgucgccgucgccgccgaccucaaguccacccaggaggccaucaacaagaucaccaagaaccucaacucccucuccgagcucgaggucaagaaccuccagcgccucuccggcgccauggacgagcuccacaacgagauccucgagcucgacgagaaggucgacgaccuccgcgccgacaccaucuccucccagaucgagcucgccguccuccucuccaacgagggcaucaucaacuccgaggacgagcaccuccucgcccucgagcgcaagcucaagaagaugcucggccccuccgccgucgacaucggcaacggcugcuucgagaccaagcacaagugcaaccagaccugccucgaccgcaucgccgccggcaccuucaacgccggcgaguucucccuccccaccuucgacucccucaacaucaccgccgccucccucaacgacgacggccucgacaaccacaccauccuccucuacuacuccaccgccgccuccucccucgccgucacccucaugcucgccaucuucaucgucuacauggucucccgcgacaacgucuccugcuccaucugccucuga

SEQ ID NO: 122592 - RNA, 1755 nt, Artificial Sequence
  derived and/or modified CDS sequence (opt2) from hemagglutinin__InfluenzaB__ACN32556
augaaggccaucaucguccuccucauggucgucaccuccaacgccgaccgcaucugcaccggcaucaccuccuccaacuccccccacgucgucaagaccgccacccagggcgaggucaacgucaccggcgccaucccccucaccaccacccccaccaagucccacuucgccaaccucaagggcaccaagacccgcggcaagcucugccccaccugccucaacugcaccgaccucgacgucgcccucggccgccccaugugcgucggcaucacccccuccgccaaggccuccauccuccacgagguccgccccgucaccuccggcugcuuccccaucaugcacgaccgcaccaagauccgccagcuccccaaccuccuccgcggcuacgagaagauccgccucuccacccagaacgucaucaacgccgagaaggcccccggcggccccuaccgccucggcaccuccggcuccugccccaacgccaccuccaaguccggcuucuucgccaccauggccugggccgucccccgcgacaacaacaagaccgccaccaacccccucaccgucgaggucccccacaucugcaccaaggaggaggaccagaucaccgucuggggcuuccacuccgacaacaagacccagaugaagaaccucuacggcgacuccaacccccagaaguucaccuccuucgccaacggcaucaccacccacuacgucucccagaucggcggcuuccccgaccagaccgaggacggcggccucccccaguccggccgcaucgucgucgacuacaugguccagaagcccggcaagaccggcaccaucgucuaccagcgcggcauccuccucccccagaaggucuggugcgccuccggccgcuccaaggucaucaagggcucccucccccucaucggcgaggccgacugccuccacgagaaguacggcggccucaacaaguccaagcccuacuacaccggcgagcacgccaaggccaucggcaacugccccaucugggucaagaccccccucaagcucgccaacggcaccaaguaccgcccccccgccaagcuccucaaggagcgcggcuucuucggcgccaucgccggcuuccucgagggcggcugggagggcaugaucgccggcuggcacggcuacaccucccacggcgcccacggcgucgccgucgccgccgaccucaaguccacccaggaggccaucaacaagaucaccaagaaccucaacucccucuccgagcucgaggucaagaaccuccagcgccucuccggcgccauggacgagcuccacaacgagauccucgagcucgacgagaaggucgacgaccuccgcgccgacaccaucuccucccagaucgagcucgccguccuccucuccaacgagggcaucaucaacuccgaggacgagcaccuccucgcccucgagcgcaagcucaagaagaugcucggccccuccgccgucgacaucggcaacggcugcuucgagaccaagcacaagugcaaccagaccugccucgaccgcaucgccgccggcaccuucaacgccggcgaguucucccuccccaccuucgacucccucaacaucaccgccgccucccucaacgacgacggccucgacaaccacaccauccuccucuacuacuccaccgccgccuccucccucgccgucacccucaugaucgccaucuucaucgucuacaugaucucccgcgacaacgucuccugcuccaucugccucuga

SEQ ID NO: 122593 - RNA, 1758 nt, Artificial Sequence
  derived and/or modified CDS sequence (opt2) from hemagglutinin__InfluenzaB__ACN32567
auggaggccaucaucguccuccucauggucgucaccuccaacgccgaccgcaucugcaccggcaucaccuccuccaacuccccccacgucgucaagaccgccacccagggcgaggucaacgucaccggcgucaucccccucaccaccacccccaccaagucccacuucgccaaccucaagggcaccgagacccgcggcaagcucugccccaagugccucaacugcaccgaccucgacgucgcccucggccgccccaagugcaccggcaacauccccuccgcccgcgucuccauccuccacgagguccgccccgucaccuccggcugcuuccccaucaugcacgaccgcaccaagauccgccagcuccccaaccuccuccgcggcuacgagcacauccgccucuccacccacaacgucaucaacgccgagaacgcccccggcggccccuacaagaucggcaccuccggcuccugccccaacgucaccaacggcaacggcuucuucgccaccauggccugggccguccccaagaacgacaacaacaagaccgccaccaacucccucaccaucgagguccccuacaucugcaccgagggcgaggaccagaucaccgucuggggcuuccacuccgacaacgagacccagauggccaagcucuacggcgacuccaagccccagaaguucaccuccuccgccaacggcgucaccacccacuacgucucccagaucggcggcuuccccaaccagaccgaggacggcggccucccccaguccggccgcaucgucgucgacuacaugguccagaaguccggcaagaccggcaccaucaccuaccagcgcggcauccuccucccccagaaggucuggugcgccuccggccgcuccaaggucaucaagggcucccucccccucaucggcgaggccgacugccuccacgagaaguacggcggccucaacaaguccaagcccuacuacaccggcgagcacgccaaggccaucggcaacugccccaucugggucaagaccccccucaagcucgccaacggcaccaaguaccgcccccccgccaagcuccucaaggagcgcggcuucuucggcgccaucgccggcuuccucgagggcggcugggagggcaugaucgccggcuggcacggcuacaccucccacggcgcccacggcgucgccgucgccgccgaccucaaguccacccaggaggccaucaacaagaucaccaagaaccucaacucccucuccgagcucgaggucaagaaccuccagcgccucuccggcgccauggacgagcuccacaacgagauccucgagcucgacgagaaggucgacgaccuccgcgccgacaccaucuccucccagaucgagcucgccguccuccucuccaacgagggcaucaucaacuccgaggacgagcaccuccucgcccucgagcgcaagcucaagaagaugcucggccccuccgccgucgagaucggcaacggcugcuucgagaccaagcacaagugcaaccagaccugccucgaccgcaucgccgccggcaccuucgacgccggcgaguucucccuccccaccuucgacucccucaacaucaccgccgccucccucaacgacgacggccucgacaaccacaccauccuccucuacuacuccaccgccgccuccucccucgccgucacccucaugaucgccaucuucgucgucuacauggucucccgcgacaacgucuccugcuccaucugccucuga

SEQ ID NO: 122594 - RNA, 1758 nt, Artificial Sequence; identical to SEQ ID NO: 122550
  derived and/or modified CDS sequence (opt2) from hemagglutinin__InfluenzaB__ACN32578

SEQ ID NO: 122595 - RNA, 1758 nt, Artificial Sequence
  derived and/or modified CDS sequence (opt2) from hemagglutinin__InfluenzaB__ACN32589
augaaggccaucaucguccuccucauggucgucaccuccaacgccgaccgcaucugcaccggcaucaccuccuccaacuccccccacgucgucaagaccgccacccagggcgaggucaacgucaccggcgucaucccccucaccaccacccccaccaagucccacuucuccaaccucaagggcaccgagacccgcggcaagcucugccccaagugccucaacugcaccgaccucgacgucgcccucggccgccccaagugcaccggcaacauccccuccgcccgcgucuccauccuccacgagguccgccccgucaccuccggcugcuuccccaucaugcacgaccgcaccaagauccgccagcuccccaaccuccuccgcggcuacgagcacauccgccucuccacccacaacgucaucaacgccgagaacgcccccggcggccccuacaagaucggcaccuccggcuccugccccaacgucaccaacggcaacggcuucuucgccaccauggccugggccguccccaagaacgacaacaacaagaccgccaccaacucccucaccaucgagguccccuacaucugcaccgagggcgaggaccagaucaccaucuggggcuuccacuccgacaacgagacccagauggccaagcucuacggcgacuccaagccccagaaguucaccuccuccgccaacggcgucaccacccacuacgucucccagaucggcggcuuccccaaccagaccgaggacggcggccucccccaguccggccgcaucgucgucgacuacaugguccagaaguccggcaagaccggcaccaucaccuaccagcgcggcauccuccucccccagaaggucuggugcgccuccggccgcuccaaggucaucaagggcucccucccccucaucggcgaggccgacugccuccacgagaaguacggcggccucaacaaguccaagcccuacuacaccggcgagcacgccaaggccaucggcaacugccccaucugggucaagaccccccucaagcucgccaacggcaccaaguaccgcccccccgccaagcuccucaaggagcgcggcuucuucggcgccaucgccggcuuccucgagggcggcugggagggcaugaucgccggcuggcacggcuacaccucccacggcgcccacggcgucgccgucgccgccgaccucaaguccacccaggaggccaucaacaagaucaccaagaaccucaacucccucuccgagcucgaggucaagaaccuccagcgccucuccggcgccauggacgagcuccacaacgagauccucgagcucgacgagaaggucgacgaccuccgcgccgacaccaucuccucccagaucgagcucgccguccuccucuccaacgagggcaucaucaacuccgaggacgagcaccuccucgcccucgagcgcaagcucaagaagaugcucggccccuccgccgucgagaucggcaacggcugcuucgagaccaagcacaagugcaaccagaccugccucgaccgcaucgccgccggcaccuucgacgccggcgaguucucccuccccaccuucgacucccucaacaucaccgccgccucccucaacgacgacggccucgacaaccacaccauccuccucuacuacuccaccgccgccuccucccucgccgucacccucaugaucgccaucuucgucgucuacauggucucccgcgacaacgucuccugcuccaucugccucuga

SEQ ID NO: 122596 - RNA, 1758 nt, Artificial Sequence
  derived and/or modified CDS sequence (opt2) from hemagglutinin__InfluenzaB__ACN32600
augaaggccaucaucguccuccucauggucgucaccuccaacgccgaccgcaucugcaccggcaucaccuccuccaacuccccccacgucgucaagaccgccacccagggcgaggucaacgucaccggcgucaucccccucaccaccacccccaccaagucccacuucuccaaccucaagggcaccgagacccgcggcaagcucugccccaagugccucaacugcaccgaccucgacgucgcccucggccgccccaagugcaccggcaacauccccuccgcccgcgucuccauccuccacgagguccgccccgucaccuccggcugcuuccccaucaugcacgaccgcaccaagauccgccagcuccccaaccuccuccgcggcuacgagcacauccgccucuccacccacaacgucaucaacgccgagaacgcccccggcggccccuacaagaucggcaccuccggcuccugccccaacgucaccaacggcaacggcuucuucgccaccauggccugggccguccccaagaacgacaacaacaagaccgccaccaacucccucaccaucgagguccccuacaucugcaccgagggcgaggaccagaucaccgucuggggcuuccacuccgacaacgagacccagauggccaagcucuacggcgacuccaagccccagaaguucaccuccuccgccaacggcgucaccacccacuacgucucccagaucggcggcuuccccaaccagaccgaggacggcggccucccccaguccggccgcaucgucgucgacuacaugguccagaaguccggcaagaccggcaccaucaccuaccagcgcggcauccuccucccccagaaggucuggugcgccuccggccgcuccaaggucaucaagggcucccucccccucaucggcgaggccgacugccuccacgagaaguacggcggccucaacaaguccaagcccuacuacaccggcgagcacgccaaggccaucggcaacugccccaucugggucaagaccccccucaagcucgccaacggcaccaaguaccgcccccccgcccgccuccucaaggagcgcggcuucuucggcgccaucgccggcuuccucgagggcggcugggagggcaugaucgccggcuggcacggcuacaccucccacggcgcccacggcgucgccgucgccgccgaccucaaguccacccaggaggccaucaacaagaucaccaagaaccucaacucccucuccgagcucgaggucaagaaccuccagcgccucuccggcgccauggacgagcuccacaacgagauccucgagcucgacgagaaggucgacgaccuccgcgccgacaccaucuccucccagaucgagcucgccguccuccucuccaacgagggcaucaucaacuccgaggacgagcaccuccucgcccucgagcgcaagcucaagaagaugcucggccccuccgccgucgagaucggcaacggcugcuucgagaccaagcacaagugcaaccagaccugccucgaccgcaucgccgccggcaccuucgacgccggcgaguucucccuccccaccuucgacucccucaacaucaccgccgccucccucaacgacgacggccucgacaaccacaccauccuccucuacuacuccaccgccgccuccucccucgccgucacccucaugaucgccaucuucgucgucuacauggucucccgcgacaacgucuccugcuccaucugccucuga

SEQ ID NO: 122597 - RNA, 1758 nt, Artificial Sequence; identical to SEQ ID NO: 122561
  derived and/or modified CDS sequence (opt2) from hemagglutinin__InfluenzaB__ACN32611

SEQ ID NO: 122598 - RNA, 1755 nt, Artificial Sequence; identical to SEQ ID NO: 122462
  derived and/or modified CDS sequence (opt2) from hemagglutinin__InfluenzaB__ACN32716

SEQ ID NO: 122599 - RNA, 1758 nt, Artificial Sequence; identical to SEQ ID NO: 122550
  derived and/or modified CDS sequence (opt2) from hemagglutinin__InfluenzaB__ACN32771

SEQ ID NO: 122600 - RNA, 1758 nt, Artificial Sequence; identical to SEQ ID NO: 122556
  derived and/or modified CDS sequence (opt2) from hemagglutinin__InfluenzaB__ACN32782

SEQ ID NO: 122601 - RNA, 1758 nt, Artificial Sequence
  derived and/or modified CDS sequence (opt2) from hemagglutinin__InfluenzaB__ACO05957
augaaggccaucaucguccuccucauggucgucaccuccaacgccgaccgcaucugcaccggcaucaccuccuccaacuccccccacgucgucaagaccgccacccagggcgaggucaacgucaccggcgucaucccccucaccaccacccccaccaagucccacuucgccaaccucaagggcaccgagacccgcggcaagcucugccccaagugccucaacugcaccgaccucgacgucgcccucggccgccccaagugcaccggcaacauccccuccgcccgcgucuccauccuccacgagguccgccccgucaccuccggcugcuuccccaucaugcacgaccgcaccaagauccgccagcuccccaaccuccuccgcggcuacgagcacauccgccucuccacccacaacgucaucaacgccgagaacgcccccggcggccccuacaagaucggcaccuccggcuccugccccaacgucaccaacggcaacggcuucuucgccaccauggccugggccguccccaagaacgacaacaacaagaccgccaccaacucccucaccaucgagguccccuacaucugcaccgagggcgaggaccagaucaccgucuggggcuuccacuccgacaacgagauccagauggccaagcucuacggcgacuccaagccccagaaguucaccuccuccgccaacggcgucaccacccacuacgucucccagaucggcggcuuccccaaccagaccgaggacggcggccucccccaguccggccgcaucgucgucgacuacaugguccagaaguccggcaagaccggcaccaucaccuaccagcgcggcauccuccucccccagaaggucuggugcgccuccggccgcuccaaggucaucaagggcucccucccccucaucggcgaggccgacugccuccacgagaaguacggcggccucaacaaguccaagcccuacuacaccggcgagcacgccaaggccaucggcaacugccccaucugggucaagaccccccucaagcucgccaacggcaccaaguaccgcccccccgccaagcuccucaaggagcgcggcuucuucggcgccaucgccggcuuccucgagggcggcugggagggcaugaucgccggcuggcacggcuacaccucccacggcgcccacggcgucgccgucgccgccgaccucaaguccacccaggaggccaucaacaagaucaccaagaaccucaacucccucuccgagcucgaggucaagaaccuccagcgccucuccggcgccauggacgagcuccacaacgagauccucgagcucgacgagaaggucgacgaccuccgcgccgacaccaucuccucccagaucgagcucgccguccuccucuccaacgagggcaucaucaacuccgaggacgagcaccuccucgcccucgagcgcaagcucaagaagaugcucggccccuccgccgucgagaucggcaacggcugcuucgagaccaagcacaagugcaaccagaccugccucgaccgcaucgccgccggcaccuucgacgccggcgaguucucccuccccaccuucgacucccucaacaucaccgccgccucccucaacgacgacggccucgacaaccacaccauccuccucuacuacuccaccgccgccuccucccucgccgucacccucaugaucgccaucuucgucgucuacauggucucccgcgacaacgucuccugcuccaucugccucuga

SEQ ID NO: 122602 - RNA, 1755 nt, Artificial Sequence
  derived and/or modified CDS sequence (opt2) from hemagglutinin__InfluenzaB__ACO05968
augaaggccaucaucguccuccucauggucgucaccuccaacgccgaccgcaucugcaccggcaucaccuccuccaacuccccccacgucgucaagaccgccacccagggcgaggucaacgucaccggcgucaucccccucaccaccacccccaccaaguccuacuucgccaaccucaagggcacccgcacccgcggcaagcucugccccgacugccucaacugcaccgaccucgacgucgcccucggccgccccaugugcgucggcaccacccccuccgccaaggccuccauccuccacgagguccgccccgucaccuccggcugcuuccccaucaugcacgaccgcaccaagauccgccagcuccccaaccuccuccgcggcuacgagaacauccgccucuccacccagaacgucaucgacgccgagaaggcccccggcggccccuaccgccucggcaccuccggcuccugccccaacgccaccuccaaguccggcuucuucgccaccauggccugggccguccccaaggacaacaacaagaacgccaccaacccccucaccgucgagguccccuacaucugcaccgagcgcgaggaccagaucaccgucuggggcuuccacuccgacaacaagacccagaugaagaaccucuacggcgacuccaacccccagaaguucaccuccuccgccaacggcgucaccacccacuacgucucccagaucggcuccuuccccgaccagaccgaggacggcggccucccccaguccggccgcaucgucgucgacuacaugaugcagaagcccggcaagaccggcaccaucgucuaccagcgcggcguccuccucccccagaaggucuggugcgccuccggccgcuccaaggucaucaagggcucccucccccucaucggcgaggccgacugccuccacgagaaguacggcggccucaacaaguccaagcccuacuacaccggcgagcacgccaaggccaucggcaacugccccaucugggucaagaccccccucaagcucgccaacggcaccaaguaccgcccccccgccaagcuccucaaggagcgcggcuucuucggcgccaucgccggcuuccucgagggcggcugggagggcaugaucgccggcuggcacggcuacaccucccacggcgcccacggcgucgccgucgccgccgaccucaaguccacccaggaggccaucaacaagaucaccaagaaccucaacucccucuccgagcucgaggucaagaaccuccagcgccucuccggcgccauggacgagcuccacaacgagauccucgagcucgacgagaaggucgacgaccuccgcgccgacaccaucuccucccagaucgagcucgccguccuccucuccaacgagggcaucaucaacuccgaggacgagcaccuccucgcccucgagcgcaagcucaagaagaugcucggccccuccgccgucgagaucggcaacggcugcuucgagaccaagcacaagugcaaccagaccugccucgaccgcaucgccgccggcaccuucaacgccggcgaguucucccuccccaccuucgacucccucaacaucaccgccgccucccucaacgacgacggccucgacaaccacaccauccuccucuacuacuccaccgccgccuccucccucgccgucacccucaugcucgccaucuucaucgucuacauggucucccgcgacaacgucuccugcuccaucugccucuga

SEQ ID NO: 122603 - RNA, 1755 nt, Artificial Sequence
  derived and/or modified CDS sequence (opt2) from hemagglutinin__InfluenzaB__ACO05979
augaaggccaucaucguccuccucauggucgucaccuccaacgccgaccgcaucugcaccggcaucaccuccuccaacuccccccacgucgucaagaccgccacccagggcgaggucaacgucaccggcgucaucccccucaccaccacccccaccaaguccuacuucgccaaccucaagggcacccgcacccgcggcaagcucugccccgacugccucaacugcaccgaccucgacgucgcccucggccgccccaugugcgucggcaccacccccuccgccaaggccuccauccuccacgagguccgccccgucaccuccggcugcuuccccaucaugcacgaccgcaccaagauccgccagcuccccaaccuccuccgcggcuacgagaacauccgccucuccacccagaacgucaucgacgccgagaaggcccccggcggccccuaccgccucggcaccuccggcuccugccccaacgccaccuccaaguccggcuucuucgccaccauggccugggccguccccaaggacaacaacaagaacgccaccaacccccucaccgucgagguccccuacaucugcaccgagggcgaggaccagaucaccgucuggggcuuccacuccgacaacaagacccagaugaagaaccucuacggcgacuccaacccccagaaguucaccuccuccgccaacggcgucaccacccacuacgucucccagaucggcuccuuccccgaccagaccgaggacggcggccucccccaguccggccgcaucgucgucgacuacaugaugcagaagcccggcaagaccggcaccaucgucuaccagcgcggcguccuccucccccagaaggucuggugcgccuccggccgcuccaaggucaucaagggcucccucccccucaucggcgaggccgacugccuccacgagaaguacggcggccucaacaaguccaagcccuacuacaccggcgagcacgccaaggccaucggcaacugccccaucugggucaagaccccccucaagcucgccaacggcaccaaguaccgcccccccgccaagcuccucaaggagcgcggcuucuucggcgccaucgccggcuuccucgagggcggcugggagggcaugaucgccggcuggcacggcuacaccucccacggcgcccacggcgucgccgucgccgccgaccucaaguccacccaggaggccaucaacaagaucaccaagaaccucaacucccucuccgagcucgaggucaagaaccuccagcgccucuccggcgccauggacgagcuccacaacgagauccucgagcucgacgagaaggucgacgaccuccgcgccgacaccaucuccucccagaucgagcucgccguccuccucuccaacgagggcaucaucaacuccgaggacgagcaccuccucgcccucgagcgcaagcucaagaagaugcucggccccuccgccgucgagaucggcaacggcugcuucgagaccaagcacaagugcaaccagaccugccucgaccgcaucgccgccggcaccuucaacgccggcgaguucucccuccccaccuucgacucccucaacaucaccgccgccucccucaacgacgacggccucgacaaccacaccauccuccucuacuacuccaccgccgccuccucccucgccgucacccucaugcucgccaucuucaucgucuacauggucucccgcgacaacgucuccugcuccaucugccucuga

SEQ ID NO: 122604 - RNA, 1755 nt, Artificial Sequence; identical to SEQ ID NO: 122603
  derived and/or modified CDS sequence (opt2) from hemagglutinin__InfluenzaB__ACO05990

SEQ ID NO: 122605 - RNA, 1758 nt, Artificial Sequence
  derived and/or modified CDS sequence (opt2) from hemagglutinin__InfluenzaB__ACO06001
augaaggccaucaucguccuccucauggucgucaccuccaacgccgaccgcaucugcaccggcaucaccuccuccaacuccccccacgucgucaagaccgccacccagggcgaggucaacgucaccggcgucaucccccucaccaccacccccaccaagucccacuucgccaaccucaagggcaccgagacccgcggcaagcucugccccaagugccucaacugcaccgaccucgacgucgcccucggccgccccaagugcaccggcaacauccccuccgcccgcgucuccauccuccacgagguccgccccgucaccuccggcugcuuccccaucaugcacgaccgcaccaagauccgccagcuccccaaccuccuccgcggcuacgagcacauccgccucuccacccacaacgucaucaacgccgagaacgcccccggcggccccuacaagaucggcaccuccggcuccugccccaacgucaccaacggcaacggcuucuucgccaccauggccugggccguccccaagaacgacaacaacaagaccgccaccaacucccucaccaucgagguccccuacaucugcaccgagggcgaggaccagaucaccgucuggggcuuccacuccgacaacgagaaccagauggccaagcucuacggcgacuccaagccccagaaguucaccuccuucgccaacggcgucaccacccacuacgucucccagaucggcggcuuccccaaccagaccgaggacggcggccucccccaguccggccgcaucgucgucgacuacaugguccagaaguccggcaagaccggcaccaucaccuaccagcgcggcauccuccucccccagaaggucuggugcgccuccggccgcuccaaggucaucaagggcucccucccccucaucggcgaggccgacugccuccacgagaaguacggcggccucaacaaguccaagcccuacuacaccggcgagcacgccaaggccaucggcaacugccccaucugggucaagaccccccucaagcucgccaacggcaccaaguaccgcccccccgccaagcuccucaaggagcgcggcuucuucggcgccaucgccggcuuccucgagggcggcugggagggcaugaucgccggcuggcacggcuacaccucccacggcgcccacggcgucgccgucgccgccgaccucaaguccacccaggaggccaucaacaagaucaccaagaaccucaacucccucuccgagcucgaggucaagaaccuccagcgccucuccggcgccauggacgagcuccacaacgagauccucgagcucgacgagaaggucgacgaccuccgcgccgacaccaucuccucccagaucgagcucgccguccuccucuccaacgagggcaucaucaacuccgaggacgagcaccuccucgcccucgagcgcaagcucaagaagaugcucggccccuccgccgucgagaucggcaacggcugcuucgagaccaagcacaagugcaaccagaccugccucgaccgcaucgccgccggcaccuucgacgccggcgaguucucccuccccaccuucgacucccucaacaucaccgccgccucccucaacgacgacggccucgacaaccacaccauccuccucuacuacuccaccgccgccuccucccucgccgucacccucaugaucgccaucuucgucgucuacauggucucccgcgacaacgucuccugcuccaucugccucuga

SEQ ID NO: 122606 - RNA, 1755 nt, Artificial Sequence; identical to SEQ ID NO: 122603
  derived and/or modified CDS sequence (opt2) from hemagglutinin__InfluenzaB__ACO06012

SEQ ID NO: 122607 - RNA, 1755 nt, Artificial Sequence; identical to SEQ ID NO: 122603
  derived and/or modified CDS sequence (opt2) from hemagglutinin__InfluenzaB__ACO06023

SEQ ID NO: 122608 - RNA, 1755 nt, Artificial Sequence
  derived and/or modified CDS sequence (opt2) from hemagglutinin__InfluenzaB__ACO06062
augaaggccaucaucguccuccucauggucgucaccuccaacgccgaccgcaucugcaccggcaucaccuccuccaacuccccccacgucgucaagaccgccacccagggcgaggucaacgucaccggcgucaucccccucaccaccacccccaccaaguccuacuucgccaaccucaagggcacccgcacccgcggcaagcucugccccgacugccucaacugcaccgaccucgacgucgcccucggccgccccaugugcgucggcaccacccccuccgccaaggccuccauccuccacgagguccgccccgucaccuccggcugcuuccccaucaugcacgaccgcaccaagauccgccagcuccccaaccuccuccgcggcuacgagaacauccgccucuccacccagaacgucaucgacgccgagaaggcccccggcggccccuaccgccucggcaccuccggcuccugccccaacgccaccuccaaguccggcuucuucgccaccauggccugggccguccccaaggacaacaacaagaacgccaccaacccccucaccgucgagguccccuacaucugcaccgagggcgaggaccagaucaccgucuggggcuuccacuccgacaacaagacccagaugaagaaccucuacggcgacuccaacccccagaaguucaccuccuccgccaacggcgucaccacccacuacgucucccagaucgacuccuuccccgaccagaccgaggacggcggccucccccaguccggccgcaucgucgucgacuacaugaugcagaagcccggcaagaccggcaccaucgucuaccagcgcggcguccuccucccccagaaggucuggugcgccuccggccgcuccaaggucaucaagggcucccucccccucaucggcgaggccgacugccuccacgagaaguacggcggccucaacaaguccaagcccuacuacaccggcgagcacgccaaggccaucggcaacugccccaucugggucaagaccccccucaagcucgccaacggcaccaaguaccgcccccccgccaagcuccucaaggagcgcggcuucuucggcgccaucgccggcuuccucgagggcggcugggagggcaugaucgccggcuggcacggcuacaccucccacggcgcccacggcgucgccgucgccgccgaccucaaguccacccaggaggccaucaacaagaucaccaagaaccucaacucccucuccgagcucgaggucaagaaccuccagcgccucuccggcgccauggacgagcuccacaacgagauccucgagcucgacgagaaggucgacgaccuccgcgccgacaccaucuccucccagaucgagcucgccguccuccucuccaacgagggcaucaucaacuccgaggacgagcaccuccucgcccucgagcgcaagcucaagaagaugcucggccccuccgccgucgagaucggcaacggcugcuucgagaccaagcacaagugcaaccagaccugccucgaccgcaucgccgccggcaccuucaacgccggcgaguucucccuccccaccuucgacucccucaacaucaccgccgccucccucaacgacgacggccucgacaaccacaccauccuccucuacuacuccaccgccgccuccucccucgccgucacccucaugcucgccaucuucaucgucuacauggucucccgcgacaacgucuccugcuccaucugccucuga

SEQ ID NO: 122609 - RNA, 1758 nt, Artificial Sequence
  derived and/or modified CDS sequence (opt2) from hemagglutinin__InfluenzaB__ACO94661
augaaggccaucaucguccuccucauggucgucaccuccaacgccgaccgcaucugcaccggcaucaccuccuccaacuccccccacgucgucaagaccgccacccagggcgaggucaacgucaccggcgucaucccccucaccaccacccccaccaagucccacuucgccaaccucaagggcaccgagacccgcggcaagcucugccccaagugccucaacugcaccgaccucgacgucgcccucggccgccccaagugcaccggcaacauccccuccgcccgcgucuccauccuccacgagguccgccccgucaccuccggcugcuuccccaucaugcacgaccgcaccaagauccgccagcuccccaaccuccuccgcggcuacgagcacauccgccucuccacccacaacgucaucaacgccgagaacgcccccggcggccccuacaagaucggcaccuccggcuccugccccaacgucaccaacggcaacggcuucuucaccaccauggccugggccguccccaagaacgacaacaacaagaccgccaccaacucccucaccaucgagguccccuacaucugcaccgagggcgaggaccagaucaccgucuggggcuuccacuccgacaacgagacccagauggccaagcucuacggcgacuccaagccccagaaguucaccuccuccgccaacggcgucaccacccacuacgucucccagaucggcggcuuccccaaccagaccgaggacggcggccucccccaguccggccgcaucgucgucgacuacaugguccagaaguccggcaagaccggcaccaucaccuaccagcgcggcauccuccucccccagaaggucuggugcgccuccggccgcuccaaggucaucaagggcucccucccccucaucggcgaggccgacugccuccacgagaaguacggcggccucaacaaguccaagcccuacuacaccggcgagcacgccaaggccaucggcaacugccccaucugggucaagaccccccucaagcucgccaacggcaccaaguaccgcccccccgccaagcuccucaaggagcgcggcuucuucggcgccaucgccggcuuccucgagggcggcugggagggcaugaucgccggcuggcacggcuacaccucccacggcgcccacggcgucgccgucgccgccgaccucaaguccacccaggaggccaucaacaagaucaccaagaaccucaacucccucuccgagcucgaggucaagaaccuccagcgccucuccggcgccauggacgagcuccacaacgagauccucgagcucgacgagaaggucgacgaccuccgcgccgacaccaucuccucccagaucgagcucgccguccuccucuccaacgagggcaucaucaacuccgaggacgagcaccuccucgcccucgagcgcaagcucaagaagaugcucggccccuccgccgucgagaucggcaacggcugcuucgagaccaagcacaagugcaaccagaccugccucgaccgcaucgccgccggcaccuucgacgccggcgaguucucccuccccaccuucgacucccucaacaucaccgccgccucccucaacgacgacggccucgacaaccacaccauccuccucuacuacuccaccgccgccuccucccucgccgucacccucaugaucgccaucuucgucgucuacauggucucccgcgacaacgucuccugcuccaucugccucuga

SEQ ID NO: 122610 - RNA, 1758 nt, Artificial Sequence; identical to SEQ ID NO: 122550
  derived and/or modified CDS sequence (opt2) from hemagglutinin__InfluenzaB__ACR15622

SEQ ID NO: 122611 - RNA, 1758 nt, Artificial Sequence
  derived and/or modified CDS sequence (opt2) from hemagglutinin__InfluenzaB__ACR15633
augaaggccaucaucguccuccucauggucgucaccuccaacgccgaccgcaucugcaccggcaucaccuccuccaacuccccccacgucgucaagaccgccacccagggcgaggucaacgucaccggcgucaucccccucaccaccacccccaccaagucccacuucgccaaccucaagggcaccgagacccgcggcaagcucugccccaagugccucaacugcaccgaccucgacgucgcccucggccgccccaagugcaccggcaacauccccuccgcccgcgucuccauccuccacgagguccgccccgucaccuccggcugcuuccccaucaugcacgaccgcaccaagauccgccagcuccccaaccuccuccgcggcuacgagcacauccgccucuccacccacaacgucaucaacgccgagaacgcccccggcggccccuacaagaucggcaccuccggcuccugccccaacgucaccaacggcaacggcuucuucgccaccauggccugggccguccccaagaacgacaacaacaagaccgccaccaacucccucaccaucgagguccccuacaucugcaccgagggcgaggaccagaucaccgucuggggcuuccacuccgacuccgagacccagauggccaagcucuacggcgacuccaagccccagaaguucaccuccuccgccaacggcgucaccacccacuacgucucccagaucggcggcuuccccaaccagaccgaggacggcggccucccccaguccggccgcaucgucgucgacuacaugguccagaaguccggcaagaccggcaccaucaccuaccagcgcggcauccuccucccccagaaggucuggugcgccuccggccgcuccaaggucaucaagggcucccucccccucaucggcgaggccgacugccuccacgagaaguacggcggccucaacaaguccaagcccuacuacaccggcgagcacgccaaggccaucggcaacugccccaucugggucaagaccccccucaagcucgccaacggcaccaaguaccgcccccccgccaagcuccucaaggagcgcggcuucuucggcgccaucgccggcuuccucgagggcggcugggagggcaugaucgccggcuggcacggcuacaccucccacggcgcccacggcgucgccgucgccgccgaccucaaguccacccaggaggccaucaacaagaucaccaagaaccucaacucccucuccgagcucgaggucaagaaccuccagcgccucuccggcgccauggacgagcuccacaacgagauccucgagcucgacgagaaggucgacgaccuccgcgccgacaccaucuccucccagaucgagcucgccguccuccucuccaacgagggcaucaucaacuccgaggacgagcaccuccucgcccucgagcgcaagcucaagaagaugcucggccccuccgccgucgagaucggcaacggcugcuucgagaccaagcacaagugcaaccagaccugccucgaccgcaucgccgccggcaccuucgacgccggcgaguucucccuccccaccuucgacucccucaacaucaccgccgccucccucaacgacgacggccucgacaaccacaccauccuccucuacuacuccaccgccgccuccucccucgccgucacccucaugaucgccaucuucgucgucuacauggucucccgcgacaacgucuccugcuccaucugccucuga

SEQ ID NO: 122612 - RNA, 1755 nt, Artificial Sequence
  derived and/or modified CDS sequence (opt2) from hemagglutinin__InfluenzaB__ACR15644
augaaggccaucaucguccuccucauggucgucaccuccaacgccgaccgcaucugcaccggcaucaccuccuccaacuccccccacgucgucaagaccgccacccagggcgaggucaacgucaccggcgucaucccccucaccaccacccccaccaaguccuacuucgccaaccucaagggcacccgcacccgcggcaagcucugccccgacugccucaacugcaccgaccucgacgucgcccucggccgccccaugugcgucggcaccacccccuccgccaaggccuccauccuccacgagguccgccccgucaccuccggcugcuuccccaucaugcacgaccgcaccaagauccgccagcuccccaaccuccuccgcggcuacgagaacauccgccucuccacccagaacgucaucgacgccgagaacgcccccggcggccccuaccgccucggcaccuccggcuccugccccaacgccaccuccaaguccggcuucuucgccaccauggccugggccguccccaaggacaacaacaagaacgccaccaacccccucaccgucgagguccccuacgucugcaccgagggcgaggaccagaucaccgucuggggcuuccacuccgacaacaagauccagaugaagaaccucuacggcgacuccaacccccagaaguucaccuccuccgccaacggcgucaccacccacuacgucucccagaucggcggcuuccccgcccagaccgaggacggcggccucccccaguccggccgcaucgucgucgacuacaugguccagaagccccgcaagaccggcaccaucgucuaccagcgcggcguccuccucccccagaaggucuggugcgccuccggccgcuccaaggucaucaagggcucccucccccucaucggcgaggccgacugccuccacgagaaguacggcggccucaacaaguccaagcccuacuacaccggcgagcacgccaaggccaucggcaacugccccaucugggucaagaccccccucaagcucgccaacggcaccaaguaccgcccccccgccaagcuccucaaggagcgcggcuucuucggcgccaucgccggcuuccucgagggcggcugggagggcaugaucgccggcuggcacggcuacaccucccacggcgcccacggcgucgccgucgccgccgaccucaaguccacccaggaggccaucaacaagaucaccaagaaccucaacucccucuccgagcucgaggucaagaaccuccagcgccucuccggcgccauggacgagcuccacaacgagauccucgagcucgacgagaaggucgacgaccuccgcgccgacaccaucuccucccagaucgagcucgccguccuccucuccaacgagggcaucaucaacuccgaggacgagcaccuccucgcccucgagcgcaagcucaagaagaugcucggccccuccgccgucgacaucggcaacggcugcuucgagaccaagcacaagugcaaccagaccugccucgaccgcaucgccgccggcaccuucaacgccggcgaguucucccuccccaccuucgacucccucaacaucaccgccgccucccucaacgacgacggccucgacaaccacaccauccuccucuacuacuccaccgccgccuccucccucgccgucacccucaugcucgccaucuucaucgucuacauggucucccgcgacaacgucuccugcuccaucugccucuga

SEQ ID NO: 122613 - RNA, 1758 nt, Artificial Sequence
  derived and/or modified CDS sequence (opt2) from hemagglutinin__InfluenzaB__ACR15655
augaaggccaucaucguccuccucauggucgucaccuccaacgccgaccgcaucugcaccggcaucaccuccuccaacuccccccacgucgucaagaccgccacccagggcgaggucaacgucaccggcgucaucccccucaccaccacccccaccaagucccacuucgccaaccucaagggcaccgagacccgcggcaagcucugccccaagugccucaacugcaccgaccucgacgucgcccucggccgccccaagugcaccggcaacauccccuccgcccgcgucuccauccuccacgagguccgccccgucaccuccggcugcuuccccaucaugcacgaccgcaccaagauccgccagcuccccaaccuccuccgcggcuacgagcacauccgccucuccacccacaacgucaucaacgccgagaacgcccccggcggccccuacaagaucggcaccuccggcuccugccccaacgucaccaacggcaacggcuucuucgccaccauggccugggccguccccaagaacgacaacaacaagaccgccaccaacucccucaccaucgagguccccuacaucugcaccgagggcgaggaccagaucaccgucuggggcuuccacuccgacuccgagacccagauggccaagcucuacggcgacuccaagccccagaaguucaccuccuccgccaacggcgucaccacccacuacgucucccagaucggcggcuuccccaaccagaccgaggacggcggccucccccaguccggccgcaucgucgucgacuacaugguccagaaguccggcaagaccggcaccaucaccuaccagcgcggcauccuccucccccagaaggucuggugcgccuccggccgcuccaaggucaucaagggcucccucccccucaucggcgaggccgacugccuccacgagaaguacggcggccucaacaaguccaagcccuacuacaccggcgagcacgccaaggccaucggcaacugccccaucugggucaagaccccccucaagcucgccaacggcaccaaguaccgcccccccgccaagcuccucaaggagcgcggcuucuucggcgccaucgccggcuuccucgagggcggcugggagggcaugaucgccggcuggcacggcuacaccucccacggcgcccacggcgucgccgucgccgccgaccucaaguccacccaggaggccaucaacaagaucaccaagaaccucaacucccucuccgagcucgaggucaagaaccuccagcgccucuccggcgccauggacgagcuccacaacgagauccucgagcucgacgagaaggucgacgaccuccgcgccgacaccaucuccucccagaucgagcucgccguccuccucuccaacgagggcaucaucaacuccgaggacgagcaccuccucgcccucgagcgcaagcucaagaagaugcucggccccuccgccgucgagaucggcaacggcugcuucgagaccaagcacaagugcaaccagaccugccucgaccgcaucgccgccggcaccuucgacgccggcgaguucucccuccccaccuucgacucccucaacaucaccgccgccucccucaacgacgacggccucgacaaccacaccauccuccucuacuacuccaccgccgccuccucccucgccgucacccucaugaucgccaucuucgucgucuacauggucucccgcgacaacaucuccugcuccaucugccucuga

SEQ ID NO: 122614 - RNA, 1758 nt, Artificial Sequence
  derived and/or modified CDS sequence (opt2) from hemagglutinin__InfluenzaB__ACR15666
augaaggccaucaucguccuccucauggucgucaccuccaacgccgaccgcaucugcaccggcaucaccuccuccaacuccccccacgucgucaagaccgccacccagggcgaggucaacgucaccggcgucaucccccucaccaccacccccaccaagucccacuucgccaaccucaagggcaccgagacccgcggcaagcucugccccaagugccucaacugcaccgaccucgacgucgcccucggccgccccaagugcaccggcaacauccccuccgcccgcgucuccauccuccacgagguccgccccgucaccuccggcugcuuccccaucaugcacaaccgcaccaagauccgccagcuccccaaccuccuccgcggcuacgagcacauccgccucuccacccacaacgucaucaacgccgagaacgcccccggcggccccuacaagaucggcaccuccggcuccugccccaacgucaccaacggcaacggcuucuucgccaccauggccugggccguccccaagaacgacaacaacaagaccgccaccaacucccucaccaucgagguccccuacaucugcaccgagggcgaggaccagaucaccgucuggggcuuccacuccgacgacgagacccagauggccaagcucuacggcgacuccaagccccagaaguucaccuccuccgccaacggcgucaccacccacuacgucucccagaucggcggcuuccccaaccagaccgaggacggcggccucccccaguccggccgcaucgucgucgacuacaugguccagaaguccggcaagaccggcaccaucaccuaccagcgcggcauccuccucccccagaaggucuggugcgccuccggccgcuccaaggucaucaagggcucccucccccucaucggcgaggccgacugccuccacgagaaguacggcggccucaacaaguccaagcccuacuacaccggcgagcacgccaaggccaucggcaacugccccaucugggucaagaccccccucaagcucgccaacggcaccaaguaccgcccccccgccaagcuccucaaggagcgcggcuucuucggcgccaucgccggcuuccucgagggcggcugggagggcaugaucgccggcuggcacggcuacaccucccacggcgcccacggcgucgccgucgccgccgaccucaaguccacccaggaggccaucaacaagaucaccaagaaccucaacucccucuccgagcucgaggucaagaaccuccagcgccucuccggcgccauggacgagcuccacaacgagauccucgagcucgacgagaaggucgacgaccuccgcgccgacaccaucuccucccagaucgagcucgccguccuccucuccaacgagggcaucaucaacuccgaggacgagcaccuccucgcccucgagcgcaagcucaagaagaugcucggccccuccgccgucgagaucggcaacggcugcuucgagaccaagcacaagugcaaccagaccugccucgaccgcaucgccgccggcaccuucgacgccggcgaguucucccuccccaccuucgacucccucaacaucaccgccgccucccucaacgacgacggccucgacaaccacaccauccuccucuacuacuccaccgccgccuccucccucgccgucacccucaugaucgccaucuucgucgucuacauggucucccgcgacaacgucuccugcuccaucugccucuga

SEQ ID NO: 122615 - RNA, 1758 nt, Artificial Sequence
  derived and/or modified CDS sequence (opt2) from hemagglutinin__InfluenzaB__ACR15677
augaaggccaucaucguccuccucauggucgucaccuccaacgccgaccgcaucugcaccggcaucaccuccuccaacuccccccacgucgucaagaccgccacccagggcgaggucaacgucaccggcgucaucccccucaccaccacccccaccaagucccacuucgccaaccucaagggcaccaagacccgcggcaagcucugccccaagugccucaacugcaccgaccucgacgucgcccucggccgccccaagugcaccggcaacauccccuccgccaaggucuccauccuccacgagguccgccccgucaccuccggcugcuuccccaucaugcacgaccgcaccaagauccgccagcuccccaaccuccuccgcggcuacgagcacauccgccucuccacccacaacgucaucaacgccgagaaggcccccggcggccccuacaagaucggcaccuccggcuccugccccaacaucaccaacggcaacggcuucuucgccaccauggccugggccguccccaagaacgacaacaacaagaccgccaccaacucccucaccaucgagguccccuacaucugcaccgagggcgaggaccagaucaccgucuggggcuuccacuccgacaacgaggcccagauggccaagcucuacggcgacuccaagccccagaaguucaccuccuccgccaacggcgucaccacccacuacgucucccagaucggcggcuuccccaaccagaccgaggacggcggccucccccaguccggccgcaucgucgucgacuacaugguccagaaguccggcaagaccggcaccaucaccuaccagcgcggcauccuccucccccagaaggucuggugcgccuccggccgcuccaaggucaucaagggcucccucccccucaucggcgaggccgacugccuccacgagaaguacggcggccucaacaaguccaagcccuacuacaccggcgagcacgccaaggccaucggcaacugccccaucugggucaagaccccccucaagcucgccaacggcaccaaguaccgcccccccgccaagcuccucaaggagcgcggcuucuucggcgccaucgccggcuuccucgagggcggcugggagggcaugaucgccggcuggcacggcuacaccucccacggcgcccacggcgucgccgucgccgccgaccucaaguccacccaggaggccaucaacaagaucaccaagaaccucaacucccucuccgagcucgaggucaagaaccuccagcgccucuccggcgccauggacgagcuccacaacgagauccucgagcucgacgagaaggucgacgaccuccgcgccgacaccaucuccucccagaucgagcucgccguccuccucuccaacgagggcaucaucaacuccgaggacgagcaccuccucgcccucgagcgcaagcucaagaagaugcucggccccuccgccgucgagaucggcaacggcugcuucgagaccaagcacaagugcaaccagaccugccucgaccgcaucgccgccggcaccuucgacgccggcgaguucucccuccccaccuucgacucccucaacaucaccgccgccucccucaacgacgacggccucgacaaccacaccauccuccucuacuacuccaccgccgccuccucccucgccgucacccucaugaucgccaucuucgucgucuacauggucucccgcgacaacgucuccugcuccaucugccucuga

SEQ ID NO: 122616 - RNA, 1755 nt, Artificial Sequence; identical to SEQ ID NO: 122603
  derived and/or modified CDS sequence (opt2) from hemagglutinin__InfluenzaB__ACR15710

SEQ ID NO: 122617 - RNA, 1755 nt, Artificial Sequence
  derived and/or modified CDS sequence (opt2) from hemagglutinin__InfluenzaB__ACR15721
augaaggccaucaucguccuccucauggucgucaccuccaacgccgaccgcaucugcaccggcaucaccuccuccaacuccccccacgucgucaagaccgccacccagggcgaggucaacgucaccggcgucaucccccucaccaccacccccaccaagucccacuucgccaaccucaagggcaccaagacccgcggcaagcucugccccaacugccucaacugcaccgaccucgacgucgcccucggccgccccaugugcgucggcaccacccccuccgccaaggccuccauccuccacgagguccgccccgucaccuccggcugcuuccccaucaugcacgaccgcaccaagauccgccagcuccccaaccuccuccgcggcuacgagaacauccgccucuccacccagaacgucaucaacgccgagaaggcccccggcggccccuaccgccucggcaccuccggcuccugccccaacgccaccucccgcuccggcuucuucgccaccauggccugggccgucccccgcgacgacaacaagaccgccaccaacccccucaccgucgagguccccuacgucugcaccgagggcgaggaccagaucaccgucuggggcuuccacuccgacaacaaggcccagaugaagaaccucuacggcgacuccaacccccagaaguucaccuccuccgccaacggcgucaccacccacuacgucucccagaucggcggcuuccccgaccagaccgaggacggcggccucccccaguccggccgcaucgucgucgacuacaugguccagaagcccggcaagaccggcaccaucgucuaccagcgcggcguccuccucccccagaaggucuggugcgccuccggccgcuccaaggucaucaagggcucccucccccucaucggcgaggccgacugccuccacgagaaguacggcggccucaacaaguccaagcccuacuacaccggcgagcacgccaaggccaucggcaacugccccaucugggucaagaccccccucaagcucgccaacggcaccaaguaccgcccccccgccaagcuccucaaggagcgcggcuucuucggcgccaucgccggcuuccucgagggcggcugggagggcaugaucgccggcuggcacggcuacaccucccacggcgcccacggcgucgccgucgccgccgaccucaaguccacccaggaggccaucaacaagaucaccaagaaccucaacucccucuccgagcucgaggucaagaaccuccagcgccucuccggcgccauggacgagcuccacaacgagauccucgagcucgacgagaaggucgacgaccuccgcgccgacaccaucuccucccagaucgagcucgccguccuccucuccaacgagggcaucaucaacuccgaggacgagcaccuccucgcccucgagcgcaagcucaagaagaugcucggccccuccgccgucgacaucggcaacggcugcuucgagaccaagcacaagugcaaccagaccugccucgaccgcaucgccgccggcaccuucaacgccggcgaguucucccuccccaccuucgacucccucaacaucaccgccgccucccucaacgacgacggccucgacaaccacaccauccuccucuacuacuccaccgccgccuccucccucgccgucacccucaugaucgccaucuucaucgucuacauggucucccgcgacaacgucuccugcuccaucugccucuga

SEQ ID NO: 122618 - RNA, 1758 nt, Artificial Sequence
  derived and/or modified CDS sequence (opt2) from hemagglutinin__InfluenzaB__ACR39336
augaaggccaucaucguccuccucauggucgucaccuccaacgccgaccgcaucugcaccggcaucaccuccuccaacuccccccacgucgucaagaccgccacccagggcgaggucaacgucaccggcgucaucccccucaccaccacccccaccaagucccacuucgccaaccucaagggcaccgagacccgcggcaagcucugccccaagugccucaacugcaccgaccucgacgucgcccucggccgccccaagugcaccggcaacauccccuccgcccgcgucuccauccuccacgagguccgccccgucaccuccggcugcuuccccaucaugcacgaccgcaccaagauccgccagcuccccaaccuccuccgcggcuacgagcacauccgccucuccacccacaacgucaucaacgccgagaacgcccccggcggccccuacaagaucggcaccuccggcuccugccccaacgucaccaacggcaacggcuucuucgccaccauggccugggccguccccaagaacgacaacaacaagaccgccaccaacucccucaccaucgagguccccuacaucugcaccgagggcgaggaccagaucaccgucuggggcuuccacuccgacaacgaggcccagauggccaagcucuacggcgacuccaagccccagaaguucaccuccuccgccaacggcgucaccacccacuacgucucccagaucggcggcuuccccaaccagaccgaggacggcggccucccccaguccggccgcaucgucgucgacuacaugguccagaaguccggcaagaccggcaccaucaccuaccagcgcggcauccuccucccccagaaggucuggugcgccuccggccgcuccaaggucaucaagggcucccucccccucaucggcgaggccgacugccuccacgagaaguacggcggccucaacaaguccaagcccuacuacaccggcgagcacgccaaggccaucggcaacugccccaucugggucaagaccccccucaagcucgccaacggcaccaaguaccgcccccccgccaagcuccucaaggagcgcggcuucuucggcgccaucgccggcuuccucgagggcggcugggagggcaugaucgccggcuggcacggcuacaccucccacggcgcccacggcgucgccgucgccgccgaccucaaguccacccaggaggccaucaacaagaucaccaagaaccucaacucccucuccgagcucgaggucaagaaccuccagcgccucuccggcgccauggacgagcuccacaacgagauccucgagcucgacgagaaggucgacgaccuccgcgccgacaccaucuccucccagaucgagcucgccguccuccucuccaacgagggcaucaucaacuccgaggacgagcaccuccucgcccucgagcgcaagcucaagaagaugcucggccccuccgccgucgagaucggcaacggcugcuucgagaccaagcacaagugcaaccagaccugccucgaccgcaucgccgccggcaccuucgacgccggcgaguucucccuccccaccuucgacucccucaacaucaccgccgccucccucaacgacgacggccucgacaaccacaccauccuccucuacuacuccaccgccgccuccucccucgccgucacccucaugaucgccaucuucgucgucuacauggucucccgcgacaacgucuccugcuccaucugccucuga

SEQ ID NO: 122619 - RNA, 1755 nt, Artificial Sequence
  derived and/or modified CDS sequence (opt2) from hemagglutinin__InfluenzaB__AEA51386
augaaggccaucaucguccuccucauggucgucaccuccaacgccgaccgcaucugcaccggcaucaccuccuccaacuccccccacgucgucaagaccgccacccagggcgaggucaacgucaccggcgucaucccccucaccaccacccccaccaaguccuacuucgccaaccucaagggcacccgcacccgcggcaagcucugccccgacugccucaacugcaccgaccucgacgucgcccucggccgccccaugugcgucggcaccacccccuccgccaaggccuccauccuccacgagguccgccccgucaccuccggcugcuuccccaucaugcacgaccgcaccaagauccgccagcuccccaaccuccuccgcggcuacgagaacauccgccucuccacccagaacgucaucgacgccgagaaggcccccggcggccccuaccgccucggcaccuccggcuccugccccaacgccaccuccaaguccggcuucuucgccaccauggccugggccguccccaaggacaacuacaagaacgccaccaacccccucaccgucgagguccccuacaucugcaccgagggcgagggccagaucaccgucuggggcuuccacuccgacaacaagccccagaugaagaaccucuacggcgacuccaacccccagaaguucaccuccuccgccuccggcgucaccacccacuacgucucccagaucggcgacuuccccgaccagaccgaggacggcggccucccccaguccggccgcaucgucgucgacuacaugaugcagaagcccggcaagaccggcaccaucgucuaccagcgcggcguccuccucccccagaaggucuggugcgccuccggccgcuccaaggucaucaagggcucccucccccucaucggcgaggccgacugccuccacgagaaguacggcggccucaacaaguccaagcccuacuacaccggcgagcacgccaaggccaucggcaacugccccaucugggucaucaccccccagaagcucgccaacggcaccaccuucuccccccccgccaagcuccucaaggagcgcggcuucuucggcgccaucgccggcuuccucgagggcggcugggagggcaugaucgccggcuggcacggcuacaccucccacggcgcccacggcgucgccgucgccgccgaccucaaguccacccaggaggccaucaacaagaucaccaagaaccucaacucccucuccgagcucgaggucaagaaccuccagcgccucuccggcgccauggacgagcuccacaacgagauccucgagcucgacgagaaggucgacgaccuccgcgccgacaccaucuccucccagaucgagcucgccguccuccucuccaacgagggcaucaucaacuccgaggacgagcaccuccucgcccucgagcgcaagcucaagaagaugcucggccccuccgccgucgacaucggcaacggcugcuucgagaccaagcacaagugcaaccagaccugccucgaccgcaucgccgccggcaccuucaacgccggcgaguucucccuccccaccuucgacucccucaacaucaccgccgccucccucaacgacgacggccucgacaaccacaccauccuccucuacuacuccaccgccgccuccucccucgccgucacccucaugcucgccaucuucaucgucuacauggucucccgcgacaacgucuccugcuccaucugccucuga

SEQ ID NO: 122620 - RNA, 1755 nt, Artificial Sequence
  derived and/or modified CDS sequence (opt2) from hemagglutinin__InfluenzaB__AEA51387
augaaggccaucaucguccuccucauggucgucaccuccaacgccgaccgcaucugcaccgagaucaccuccuccaacuccccccucgucgucaagaccgccacccagggcgaggucaacgucaccggcgucaucccccucaccaccacccccaccaaguccuacuucgccaaccucaagggcacccgcacccgcggcaagcucugccccgacugccucaacugcaccgaccucgacgucgcccucggccgccccaugugcgucggcaccacccccuccgccaaggccuccauccuccacgagguccgccccgucaccuccggcugcuuccccaucaugcacgaccgcaccaagauccgccagcuccccaaccuccuccgcggcuacgagaacauccgccucuccacccagaacgucaucgacgccgagaaggcccccggcggccccuaccgccucggcaccuccggcuccugccccaacgccaccuccaagaucggcuucuucgccaccauggccugggccguccccaaggacaacuacaagaacgccaccaacccccucaccgucgagguccccuacaucugcaccgagggcgaggaccagaucaccgucuggggcuuccacuccgacaacaagacccagaugaagaaccucuacggcgacuccaacccccagaaguucaccuccuccgccaacggcgucaccacccacuacgucucccagaucggcgacuuccccgaccagaccgaggacggcggccucccccaguccggccgcaucgucgucgacuacaugaugcagaagcccggcaagaccggccccaucgucuaccagcgcggcguccuccucccccagaaggucuggugcgccuccggccgcuccaaggucaucaagggcucccucccccucaucggcgaggccgacugccuccacgagaaguacggcggccucaacaaguccaaguacucccacaccggcgaccacgccaagacccucggcaacugccccaucugggucaagaccccccucaagcucgccaacggcaccaaguaccgcccccccgccaagcuccucaaggagcgcggcuucuucggcgccaucgccggcuuccucgagggcggcugggagggcaugaucgccggcuggcacggcuacaccucccacggcgcccacggcgucgccgucgccgccgaccucaaguccacccaggaggccaucaacaagaucaccaagaaccucaacucccucuccgagcucgaggucaagaaccuccagcgccucuccggcgccauggacgagcuccacaacgagauccucgagcucgacgagaaggucgacgaccuccgcgccgacaccaucuccucccagaucgagcucgccguccuccucuccaacgagggcaucaucaacuccgaggacgagcaccuccucgcccucgagcgcaagcucaagaagaugcucggccccuccgccgucgacaucggcaacggcugcuucgagaccaagcacaagugcaaccagaccugccucgaccgcaucgccgccggcaccuucaacgccggcgaguucucccuccccaccuucgacucccucaacaucaccgccgccucccucaacgacgacggccucgacaaccacaccauccuccucuacuacuccaccgccgccuccucccucgccgucacccucaugcucgccaucuucaucgucuacauggucucccgcgacaacgucuccugcuccaucugccucuga

SEQ ID NO: 122621 - RNA, 1755 nt, Artificial Sequence
  derived and/or modified CDS sequence (opt2) from hemagglutinin__InfluenzaB__AEA51388
augaaggccaucaucguccuccucauggucgucaccuccaacgccgaccgcaucugcaccggcaucaccuccuccaacuccccccacgucgucaagaccgccacccagggcgaggucaacgucaccggcgucaucccccucaccaccacccccaccaaguccuacuucgccaaccucaagggcacccgcacccgcggcaagcucugccccgacugccucaacugcaccgaccucgacgucgcccucggccgccccaugugcgucggcaccacccccuccgccaaggccuccauccuccacgagguccgccccgucaccuccggcugcuuccccaucaugcacgaccgcaccaagauccgccagcuccccaaccuccuccgcggcuacgagaacauccgccucuccacccagaacgucaucgacgccgagaaggcccccggcggccccuaccgccucggcaccuccggcuccugccccaacgccaccuccaagaucggcuucuucgccaccauggccugggccguccccaaggacaacuacaagaacgccaccaacccccucaccgucgagguccccuacaucugcaccgagggcgaggaccagaucaccgucuggggcuuccacuccgacaacaagacccagaugaagaaccucuacggcgacuccaacccccagaaguucaccuccuccgccaacggcgucaccacccacuacgucucccagaucggcgacuuccccgaccagaccgaggacggcggccucccccaguccggccgcaucgucgucgacuacaugaugcagaagcccggcaagaccggcaccaucgucuaccagcgcggcguccuccucccccagaaggucuggugcgccuccggccgcuccaaggucaucaagggcucccucccccucaucggcgaggccgacugccuccacgagaaguacggcggccucaacaaguccaagcccuccuacaccggcgagcacgccaaggccaagggcaacugccccaucugggucaacaccccccucaagcucgccaacggcaccaaguaccgcccccccgccaagcucuucaaggagcgcggcuucuucggcgccaucgccggcuuccucgagggcggcugggagggcaugaucgccggcuggcacggcuacaccucccacggcgcccacggcgucgccgucgccgccgaccucaaguccacccaggaggccaucaacaagaucaccaagaaccucaacucccucuccgagcucgaggucaagaaccuccagcgccucuccggcgccauggacgagcuccacaacgagauccucgagcucgacgagaaggucgacgaccuccgcgccgacaccaucuccucccagaucgagcucgccguccuccucuccaacgagggcaucaucaacuccgaggacgagcaccuccucgcccucgagcgcaagcucaagaagaugcucggccccuccgccgucgacaagggcaacggcugcuucgagaccaagcacaagugcaaccagaccugccucgaccgcaucgccgccggcaccuucaacgccggcgaguucucccuccccaccuucgacucccucaacaucaccgccgccucccucaacgacgacggccucgacaaccacaccauccuccucuacuacuccaccgccgccuccucccucgccgucacccucaugcucgccaucuucaucgucuacauggucucccgcgacaacgucuccugcuccaucugccucuga

SEQ ID NO: 122622 - RNA, 1755 nt, Artificial Sequence
  derived and/or modified CDS sequence (opt2) from hemagglutinin__InfluenzaB__AEA51389
augaaggccaucaucguccuccucauggucgucaccuccaacgccgaccgcaucugcaccggcaucaccuccuccaucuccccccucgucgacaagaccgccacccagggcgaggucaacgucaccggcgucaucccccucaccaccacccccaccaaguccuacuucgccaacgucaagggcacccgcacccgcggcaagcucugccccgacugccucaacugcaccgaccucgacgucgcccucggccgccccaugugcgucggcaccacccccuccgccaaggccuccauccuccacgagguccgccccgucaccuccggcugcuuccccaucaugcacgaccgcaccaagauccgccagcuccccaaccuccuccgcggcuacgagaacauccgccucuccacccagaacgucaucgacgcccagaaggcccccggcggccccuaccgccucggcaccuccggcuccugccccaacgccaccuccaagaucggcuucuucgccaccauggccugcgccguccccaaggacaacuacaagaacgccaccaacccccucaccgucgagguccccuacauccgcaccgagggcgaggaccagaucaccgucuggggcuuccacuccgacaacaagacccagaugaagaaccucuacggcgacuccaacccccccaaguucaccuccuccgccaacggcgucaccacccacuacgucucccagaccggcgacuuccccgaccagaccgaggacggcggccucccccccuccggccgcaucgucgucgacuacaugaugcagaagcccggcaagaccggcaccaucgccuaccagcgcggcguccuccucccccagaaggucuggugcgccuccggccgcuccaaggucaucaagggcucccucccccucaucggcgaggccgacugccuccacgagaaguacggcggccucaacaaguccaagcccccccacaccggcgagcacaccaaggccaucggcaacugccccaucugggucaagaccccccucaagcucgccaacggcaccaaguaccgccccuccgccaagcuccucaaggagcgcggcuucuucggcgccaucgccggcuuccucgagggcggcugggagggcaugaucgccggcuggcacggcuacaccucccacggcgcccacggcgucgccgucgccgccgaccucaaguccacccaggaggccaucaacaagaucaccaagaaccucaacucccucuccgagcucgaggucaagaaccuccagcgccucuccggcgccauggacgagcuccacaacgagauccucgagcucgacgagaaggucgacgaccuccgcgccgacaccaucuccucccagaucgagcucgccguccuccucuccaacgagggcaucaucaacuccgaggacgagcaccuccucgcccucgagcgcaagcucaagaagaugcucggccccuccgccgucgacaucggcaacggcugcuucgagaccaagcacaagugcaaccagaccugccucgaccgcaucgccgccggcaccuucaacgccggcgaguucuuccuccccaccuucgacucccucaacaucaccgccgccucccucaacgacgacggccucgacaaccacaccauccuccucuacuacuccaccgccgccuccucccucgccgucacccucaugcucgccaucuucaucgucuacauggucucccgcgacaacgucuccugcuccaucugccucuga

SEQ ID NO: 122623 - RNA, 1755 nt, Artificial Sequence
  derived and/or modified CDS sequence (opt2) from hemagglutinin__InfluenzaB__AEA51390
augaaggccaucaucguccuccucauggucgucaccuccaacgccgaccgcaucugcaccggcaucaccuccuccaacuccccccacgucgucaagaccgccacccagggcgaggucaacgucaccggcgucaucccccucaccaccacccccaccaaguccuacuucgccaaccucaagggcacccgcacccgcggcaagcucugccccgacugccucaacugcaccgaccucgacgucgcccucggccgccccaugugcgucggcaccacccccuccgccaaggccuccauccuccacgagguccgccccgucaccuccggcugcuuccccaucaugcacgaccgcaccaagauccgccagcuccccaaccuccuccgcggcuacgagaacauccgccucuccacccagaacgucaucgacgccgagaaggcccccggcggccccuaccgccucggcaccuccggcuccugccccaacgccaccuccaagaucggcuucuucgccaccauggccugggccguccccaaggacaacuacaagaacgccaccaacccccucaccgucgagguccccuacaucugcaccgagggcgaggaccagaucaccgucuggggcuuccacuccgacaacaagacccagaugaagaaccucuacggcgacuccaacccccagaaguucaccuccuccgccaacggcgucaccacccacuacgucucccagaucggcgacuuccccgaccagaccgaggacggcggccucccccccuccggccgcaucgucgucgacuacaugaugcagaagcccggcaagaccggcaccaucgucuaccagcgcggcggccuccucccccagaaggucuggugcgccuccggccgcuccaaggucaucaagggcucccucccccucaucggcgaggccgacugccuccacgagaaguacggcggccucaacaaguccaagcccuacuacaccggcgagcacgccaaggccaucggcaacugccccaucugggucaagcccccccucaagcucgccaacggcaccaaguaccgcccccccgccaagcucuucaaggagcgcggcuucuucggcgcccucgccggcuuccucgagggcggcugggagggcaugaucgccggcuggcacggcuacaccucccacggcgcccacggcgucgccgucgccgccgaccucaaguccacccaggaggccaucaacaagaucaccaagaaccucaacucccucuccgagcucgaggucaagaaccuccagcgccucuccggcgccauggacgagcuccacaacgagauccucgagcucgacgagaaggucgacgaccuccgcgccgacaccaucuccucccagaucgagcucgccguccuccucuccaacgagggcaucaucaacuccgaggacgagcaccuccucgcccucgagcgcaagcucaagaagaugcucggccccuccgccgucgacaucggcaacggcugcuucgagaccaagcacaagugcaaccagaccugccucgaccgcaucgccgccggcaccuucaacgccggcgaguucucccuccccaccuucgacucccucaacaucaccgccgccucccucaacgacgacggccucgacaaccacaccauccuccucuacuacuccaccgccgccuccucccucgccgucacccucaugcucgccaucuucaucgucuacauggucucccgcgacaacgucuccugcuccaucugccucuga

SEQ ID NO: 122624 - RNA, 1758 nt, Artificial Sequence
  derived and/or modified CDS sequence (opt2) from hemagglutinin__InfluenzaB__AEA51391
augaaggccaucaucguccuccucauggucgucaccuccaacgccgaccgcaucugcaccggcaucaccuccuccaacuccccccacgucgucaagaccgccacccagggcgaggucaacgucaccggcgucaucccccucaccaccacccccaccaagucccacuucgccaaccucaagggcaccgagacccgcggcaagcucugccccaagugccucaacugcaccgaccucgacgucgcccucggccgccccaagugcaccggcaagauccccuccgcccgcgucuccauccuccacgagguccgccccgucaccuccggcugcuuccccaucaugcacgaccgcaccaagauccgccagcuccccaaccuccuccgcggcuacgagcacauccgccucuccacccacaacgucaucaacgccgagaacgcccccggcggccccuacaagaucggcaccuccggcuccugccccaacaucaccaacggcaacggcuucuucgccaccauggccugggccguccccaagaacgacaagaacaagaccgccaccaacccccucaccaucgagguccccuacaucugcaccgagggcgaggaccagaucaccgucuggggcuuccacuccgucaacgagacccagauggccaagcucuacggcgacuccaagccccagaaguucaccuccuccgccaacggcgucaccacccacuacaucucccagaucggcggcuuccccaaccagaccgaggacggcggccucccccaguccggccgcaucgucgucgacuacaugguccagaaguccggcaagaccggcaccaucaccuaccagcgcggcauccuccucccccagaaggucuggugcgccuccggccgcuccaaggucaucaagggcucccucccccucaucggcgaggccgacugccuccacgagaaguacggcggccucaacaaguccaagcccuacuacaccggcgagcacgccaaggccaucggcaacugccccaucugggucaagaccccccucaagcucgccaacggcaccaaguaccgcccccccgccaagcuccucaaggagcgcggcuucuucggcgccaucgccggcuuccucgagggcggcugggagggcaugaucgccggcuggcacggcuacaccucccacggcgcccacggcguccccgucgccgccgaccucaaguccacccaggaggccaucaacaagaucaccaagaaccucaacucccucuccgagcucgaggucaagaaccuccagcgccucuccggcgccauggacgagcuccacaacgagauccucgagcucgacgagaaggucgacgaccuccgcgccgacaccaucuccucccagaucgagcucgccguccuccucuccaacgagggcaucaucaacuccgaggacgagcaccuccucgcccucgagcgcaagcucaagaagaugcucggccccuccgccgucgagaucggcaacggcugcuucgagaccaagcacaagugcaaccagaccugccucgaccgcaucgccgccggcaccuucgacgccggcgaguucucccuccccaccuucgacucccucaacaucaccgccgccucccucaacgacgacggccucgacaaccacaccauccuccucuacuacuccaccgccgccuccucccucgccgucacccucaugaucgccaucuucgucgucuacauggucucccgcgacaacgucuccugcuccaucugccucuga

SEQ ID NO: 122625 - RNA, 1758 nt, Artificial Sequence
  derived and/or modified CDS sequence (opt2) from hemagglutinin__InfluenzaB__AEA51392
augaaggccaucaucguccuccucauggucgucaccuccaacgccgaccgcaucugcaccggcaucaccuccuccaacuccccccacgucgucaagaccgccacccagggcgaggucaacgucaccggcgucaucccccucaccaccacccccaccaagucccacuucgccaaccucaagggcaccgagacccgcggcaagcucugccccaagugccccaacugcaccgaccucgacgucgcccucggccgccccaagugcaccggcaagauccccuccgcccgcgucuccauccuccacgagguccgccccgucaccuccggcugcuuccccaucaugcacgaccgcaccaagauccgccagcuccccaaccuccuccgcggcuacgagcacauccgccucuccacccacaacgucaucaacgccgagaacgcccccggcggccccuacaagaucggcaccuccggcuccugccccaacgucaccaacggcaacggcuucuucgccaccauggccugggccguccccaagaacgacaagaacaagaccgccaccaacccccucaccaucgagguccccuacaucugcaccgagggcgaggaccagaucaccgucuggggcuuccacuccgacaacgagacccagauggccaagcucuacggcgacuccaagccccagaaguucaccuccuccgccaacggcggcaccacccacuacgucucccagaucggcggcuuccccaaccagaccgaggacggcggccucccccaguccggccgcaucgucgucgacuacaugguccagaaguccggcaagaccggcaccaucaccuaccagcgcggcauccuccucccccagaaggucuggugcgccuccggccgcuccaaggucaucaagggcucccucccccucaucggcgaggccgacugccuccacgagaaguacggcggccucaacaaguccaagcccuacuacaccggcgagcacgccaaggccaucggcaacugccccaucugggucaagaccccccucaagcucgccaacggcaccaagaacaucgcccccgccaagcuccucaaggagcgcggcuucuucggcgccaucgccggcuuccucgagggcggcugggagggcaugaucgccggcuggcacggcuacaccucccacggcgcccacggcgucgccgucgccgccgaccucaaguccacccaggaggccaucaacaagaucaccaagaaccucaacucccucuccgagcucgaggucaagaaccuccagcgccucuccggcgccauggacgagcuccacaacgagauccucgagcucgacgagaaggucgacgaccuccgcgccgacaccaucuccucccagaucgagcucgccguccuccucuccaacgagggcaucaucaacuccgaggacgagcaccuccucgcccucgagcgcaagcucaagaagaugcucggccccuccgccgucgagaucggcaacggcugcuucgagaccaagcacaagugcaaccagaccugccucgaccgcaucgccgccggcaccuucgacgccggcgaguucucccuccccaccuucgacucccucaacaucaccgccgccucccucaacgacgacggccucgacaaccacaccauccuccucuacuacuccaccgccgccuccucccucgccgucacccucaugaucgccaucuucgucgucuacauggucucccgcgacaacgucuccugcuccaucugccucuga

SEQ ID NO: 122626 - RNA, 1755 nt, Artificial Sequence
  derived and/or modified CDS sequence (opt2) from hemagglutinin__InfluenzaB__AEA51395
augaaggccaucaucguccuccucauggucgucaccuccaacgccgaccgcaucugcaccggcaucaccuccuccaacuccccccacgucgucaagaccgccacccucggcgaggucaacgucaccggcgucaucccccucaccaccacccccaccaaguccuacuucgccaaccucaagggcacccgcacccgcggcaagcucugccccgacugccucaacugcaccgaccucgacgucgcccucggccgccccaugugcgucggcaccacccccuccgccaaggccuccauccuccacgagguccgccccgucaccuccggcugcuuccccaucaugcacgaccgcaccaagauccgccagcuccccaaccuccuccgcggcuacgagaacauccgccucuccacccagaacgucaucgacgccgagaaggcccccggcggccccuaccgccucggcaccuccggcuccugccccaacgccaccuccaagaucggcuucuucgccaccauggccugggccguccccaaggacaacuacaagaacgccaccaacccccucaccgucgagguccccuacaucugcaccgagggcgaggaccaguucaccgucuggggcuuccacuccgacaacaucacccagcucaagaaccucuucggcgacuccaacccccagcgcuucaccuccuccgccaacggcgucaccacccacuacgucucccagaucggcgacuuccccgaccagaccgaggacggcggccucccccaguccggccgcaucgucgucgacuacgucaugcagaagcccggcaagaccggcaccaucgucuaccagcgcggcguccuccucccccccaaggucugguucgcccgcggccgcuccaaggucaucaagggcucccucccccucaucggcgaggccgacugcauccacgagaaguacggcggccucaacaaguccaagcccuacuacaccggcgagcacgccaaggccaucggcaacugccccaucugggucaagaccccccucaagcucgccaacggcaccaaguaccgcccccccgccaagcuccucaaggagcgcggcuucuucggcgccaucgccggcuuccucgagggcggcugggagggcaugaucgccggcuggcacggcuacaccucccacggcgcccacggcgucgccgucgccgccgaccucaaguccacccaggaggccaucaacaagaucaccaagaaccucaacucccucuccgagcucgaggucaagaaccuccagcgccucuccggcgccauggacgagcuccacaacgagauccucgagcucgacgagaaggucgacgaccuccgcgccgacaccaucuccucccagaucgagcucgccguccuccucuccaacgagggcaucaucaacuccgaggacgagcaccuccucgcccucgagcgcaagcucaagaagaugcucggccccuccgccgucgacaucggcaacggcugcuucgagaccaagcacaagugcaaccagaccugccucgaccgcaucgccgccggcaccuucaacgccggcgaguucucccuccccaccuucgacucccucaacaucaccgccgccucccucaacgacgacggccucgacaaccacaccauccuccucuacuacuccaccgccgccuccucccucgccgucacccucaugcucgccaucuucaucgucuacauggucucccgcgacaacgucuccugcuccaucugccucuga

SEQ ID NO: 122627 - RNA, 1758 nt, Artificial Sequence
  derived and/or modified CDS sequence (opt2) from hemagglutinin__InfluenzaB__AEA51398
augaaggccaucaucguccuccucauggucgucaccuccaacgccgaccgcaucugcaccggcaucaccuccuccaacuccccccacgucgucaagaccgccacccagggcgaggucaacgucaccggcgucaucccccucaccaccacccccaccaagucccacuucgccaaccucaagggcaccgagacccgcggcaagcucugccccaagugccccaacugcaccgaccucgacgucgcccucggccgccccaagugcaccggcaagauccccuccgcccgcgucuccauccuccacgagguccgccccgucaccuccggcugcuuccccaucaugcacgaccgcaccaagauccgccagcuccccaaccuccuccgcggcuacgagcacauccgccucuccacccacaacgucaucaacgccgagaacgcccccggcggccccuacaagaucggcaccuccggcuccugccccaacgucaccaacggcaucggcuucuucgccaccauggccugggccguccccaagaacgacaagaacaagaccgccaccaacccccucaccaucgagguccccuacaucugcaccgagggcgaggaccagaucaccgucuggggcuuccacuccgacaacgagacccagauggccaagcucuacggcgacuccaagccccagaaguucaccuccuccgccaacggcgucaccacccacuacgucucccagaucggcggcuuccccaaccagaccgaggacggcggccucccccaguccggccgcaucgucgucgacuacaugguccagaaguccggcaagaccggcaccaucaccuaccagcgcggcauccuccucccccagaaggucuggugcgccuccggccgcuccaaggucaucaagggcucccucccccucaucggcgaggccgacugccuccacgagaaguacggcggccucaacaaguccaaguccuacuacaccggcgagcacgccaaggccaucggcaacugccccaucugggucaagaccccccucaagcucgccaacggcaccaaguaccgcccccccgcccaccucuccuacuucugcggcuucuucggcgccaucgccggcuuccucgagggcggcugggagggcaugaucgccggcuggaacggcuacaccucccacggcgcccacggcgucgccgucgucgccgaccucaaguccacccaggaggccaucaacaagaucaccaagaaccucaacucccucuccgagcucgaggucaagaaccuccagcgccucuccggcgccauggacgagcuccacaacgagauccucgagcucgacgagaaggucgacgaccuccgcgccgacaccaucuccucccagaucgagcucgccguccuccucuccaacgagggcaucaucaacuccgaggacgagcaccuccucgcccucgagcgcaagcucaagaagaugcucggccccuccgccgucgagaucggcaacggcugcuucgagaccaagcacaagugcaaccagaccugccucgaccgcaucgccgccggcaccuucgacgccggcgaguucucccuccccaccuucgacucccucaacaucaccgccgccucccucaacgacgacggccucgacaaccacaccauccuccucuacuacuccaccgccgccuccucccucgccgucacccucaugaucgccaucuucgucgucuacauggucucccgcgacaacgucuccugcuccaucugccucuga

SEQ ID NO: 122628 - RNA, 1758 nt, Artificial Sequence
  derived and/or modified CDS sequence (opt2) from hemagglutinin__InfluenzaB__AEA51399
augaaggccaucaucguccuccucauggucgucaccuccaacgccgaccgcaucugcaccggcaucaccgccucccagucccccaacaucgacaaguccuccacccagggcgaggucaacgucaccggcgucaucccccucaccaccacccccaccaagucccacuucgccaaccucaagggcaccgagacccgcggcaagcucugccccaagugccccaacugcaccgaccucgacgucgcccucggccgccccaagugcaccggcaagauccccuccgcccgcgucuccauccuccacgagguccgccccgucaccuccggcugcuuccccaucaugcacgaccgcaccaagauccgccagcuccccaaccuccuccgcggcuacgagcacauccgccucuccacccacaacgucaucaacgccgagaacgcccccggcggccccuacaagaucggcaccuccggcuccugccccaacgucaccaacggcaucggcuucuucgccaccauggccugggccguccccaagaacgacaagaacaagaccgccaccaacccccucaccaucgagguccccuacaucugcaccgagggcgaggaccagaucaccgucuggggcuuccacuccgacaacgagacccagauggccaagcucuacggcgacuccaagccccagaaguucaccuccuccgccaacggcgucaccacccacuacgucucccagaucggcggcuuccccaaccagaccgaggacggcggccucccccaguccggccgcaucgucgucgacuacaugguccagaaguccggcaagaccggcaccaucaccuaccagcgcggcauccuccucccccagaaggucuggugcgccuccggccgcuccaaggucaucaagggcucccucccccucaucggcgaggccgacugccuccacgagaaguacggcggccucaacaaguccaaguccuacuacaccggcgagcacgccaaggccaucggcaacugccccaucugggucaagaccccccucaagcucgccaacggcaccaaguaccgcccccccgcccaccucuccuacuucugcggcuucuucggcgccaucgccggcuuccucgagggcggcugggagggcaugaucgccggcuggaacggcuacaccucccacggcgcccacggcgucgccgucgucgccgaccucaaguccacccaggaggccaucaacaagaucaccaagaaccucaacucccucuccgagcucgaggucaagaaccuccagcgccucuccggcgccauggacgagcuccacaacgagauccucgagcucgacgagaaggucgacgaccuccgcgccgacaccaucuccucccagaucgagcucgccguccuccucuccaacgagggcaucaucaacuccgaggacgagcaccuccucgcccucgagcgcaagcucaagaagaugcucggccccuccgccgucgagaucggcaacggcugcuucgagaccaagcacaagugcaaccagaccugccucgaccgcaucgccgccggcaccuucgacgccggcgaguucucccuccccaccuucgacucccucaacaucaccgccgccucccucaacgacgacggccucgacaaccacaccauccuccucuacuacuccaccgccgccuccucccucgccgucacccucaugaucgccaucuucgucgucuacauggucucccgcgacaacgucuccugcuccaucugccucuga

SEQ ID NO: 122629 - RNA, 1758 nt, Artificial Sequence
  derived and/or modified CDS sequence (opt2) from hemagglutinin__InfluenzaB__AEG21014
augaaggccaucaucguccuccucauggucgucaccuccaacgccgaccgcaucugcaccggcaucaccuccuccaacuccccccacgucgucaagaccgccacccagggcgaggucaacgucaccggcgucaucccccucaccaccacccccaccaagucccacuucgccaaccucaagggcaccgagacccgcggcaagcucugccccaagugccuccacugcaccgaccucgacgucgcccucggccgccccaagugcaccggcaagauccccuccgcccgcgucuccauccuccacgagguccgccccgucaccuccggcugcuuccccaucaugcacgaccgcaccaagauccgccagcuccccaaccuccuccgcggcuacgagcacauccgccucuccacccacaacgucaucaacgccgagaacgcccccggcggccccuacaagaucggcaccuccggcuccugccccaacgucaccaacggcaacggcuucuucgccaccauggccugggccguccccaagaacgacaacaacaagaccgccaccaacucccucaccaucgagguccccuacaucugcaccgagggcgaggaccagaucaccgucuggggcuuccacuccgacaacgagacccagauggccaagcucuacggcgacuccaagccccagaaguucaccuccuccgccaacggcgucaccacccacuacgucucccagaugggcggcuuccccaaccagaccgaggacggcggccucccccaguccggccgcaucgucgucgacuacaugguccagaaguccggcaagaccggcaccaucaccuaccagcgcggcauccuccucccccagaaggucuggugcgccuccggccgcuccaaggucaucaagggcucccucccccucaucggcgaggccgacugccuccacgagaaguacggcggccucaacaaguccaagcccuacuacaccggcgagcacgccaaggccaucggcaacugccccaucugggucaagaccccccucaagcucgccaacggcaccaaguaccgcccccccgccaagcuccucauggagcgcggcuucuucggcgccaucgccggcuuccucgagggcggcugggagggcaugaucgccggcuggcacggcuacaccucccacggcgcccacggcgucgccgucgccgccgaccucaaguccacccaggaggccaucaacaagaucaccaagaaccucaacucccucuccgagcucgaggucaagaaccuccagcgccucuccggcgccauggacgagcuccacaacgagauccucgagcucgacgagaaggucgacgaccuccgcgccgacaccaucuccucccagaucgagcucgccguccuccucuccaacgagggcaucaucaacuccgaggacgagcaccuccucgcccucgagcgcaagcucaagaagaugcucggccccuccgccgucgagaucggcaacggcugcuucgagaccaagcacaagugcaaccagaccugccucgaccgcaucgccgccggcaccuucgacgccggcgaguucucccuccccaccuucgacucccucaacaucaccgccgccucccucaacgacgacggccucgacaaccacaccauccuccucuacuacuccaccgccgccuccucccucgccgucacccucaugaucgccaucuucgucgucuacauggucucccgcgacaacgucuccugcuccaucugccucuga

SEQ ID NO: 122630 - RNA, 1755 nt, Artificial Sequence
  derived and/or modified CDS sequence (opt2) from hemagglutinin__InfluenzaB__AEG21015
augaaggccaucaucguccuccucauggucgucaccuccaacgccgaccgcaucugcaccggcaucaccuccuccaacuccccccacgucgucaagaccgccacccagggcgaggucaacgucaccggcgucaucccccucaccaccacccccaccaaguccuacuucgccaaccucaagggcacccgcacccgcggcaagcucugccccgacugccucaacugcaccgaccucgacgucgcccucggccgccccaugugcgucggcaccacccccuccgccaaggccuccauccuccacgagguccgccccgucaccuccggcugcuuccccaucaugcacgaccgcaccaagauccgccagcuccccaaccuccuccgcggcuacgagaacauccgccucuccacccagaacgucaucgacgccgagaaggcccccggcggccccuaccgccucggcaccuccggcuccugccccaacgccaccuccaagaacggcuucuucgccaccauggccugggccguccccaaggacaacuacaagggcgccaccaaccccaagaccgucgagguccccuacaucugcaccgagggcgagggccagaucaccgucuggggcuuccacuccgacaacaagccccagaugaagaaccucuacggcgacuccaacccccagaaguucaccuccuccgccuccggcgucaccacccacuacgucucccagaucggcgacuuccccgaccagaccgaggacggcggccucccccaguccggccgcaucgucgucgacuacaugaugcagaagcccggcaagaccggcaccaucgucuaccagcgcggcguccuccucccccagaaggucuggugcgccuccggccgcuccaaggucaucaagggcucccucccccucaucggcgaggccgacugccuccacgagaaguacggcggccucaacaaguccaagcccuacuacaccggcgagcacgccaaggccaucggcaacugccccaucugggucaucaccccccagaagcucgccaacggcaccaccuucuccccccccgccaagcuccucaaggagcgcggcuucuucggcgccaucgccggcuuccucgagggcggcugggagggcaugaucgccggcuggcacggcuacaccucccacggcgcccacggcgucgccgucgccgccgaccucaaguccacccaggaggccaucaacaagaucaccaagaaccucaacucccucuccgagcucgaggucaagaaccuccagcgccucuccggcgccauggacgagcuccacaacgagauccucgagcucgacgagaaggucgacgaccuccgcgccgacaccaucuccucccagaucgagcucgccguccuccucuccaacgagggcaucaucaacuccgaggacgagcaccuccucgcccucgagcgcaagcucaagaagaugcucggccccuccgccgucgacaucggcaacggcugcuucgagaccaagcacaagugcaaccagaccugccucgaccgcaucgccgccggcaccuucaacgccggcgaguucucccuccccaccuucgacucccucaacaucaccgccgccucccucaacgacgacggccucgacaaccacaccauccuccucuacuacuccaccgccgccuccucccucgccgucacccucaugcucgccaucuucaucgucuacauggucucccgcgacaacgucuccugcuccaucugccucuga

SEQ ID NO: 122631 - RNA, 1755 nt, Artificial Sequence
  derived and/or modified CDS sequence (opt2) from hemagglutinin__InfluenzaB__AEG21016
augaaggccaucaucguccuccucauggucgucaccuccaacgccgaccgcaucugcaccggcaucaccuccuccaacuccccccacgucgucaagaccgccacccagggcgaggucaacgucaccggcgucaucccccucaccaccacccccaccaaguccuacuucgccaaccucaagggcacccgcacccgcggcaagcucugccccgacugccucaacugcaccgaccucgacgucgcccucggccgccccaugugcgucggcaccacccccuccgccaaggccuccauccuccacgagguccgccccgucaccuccggcugcuuccccaucaugcacgaccgcaccaagauccgccagcuccccaaccuccuccgcggcuacgagaacauccgccucuccacccagaacgucaucgacgccgagaaggcccccggcggccccuaccgccucggcaccuccggcuccugccccaacgccaccuccaagaucggcuucuucgccaccauggccugggccguccccaaggacaacuacaagcgcgccaccaaccccaagaccgucgagguccccuacaucugcaccgagggcgaggaccagaucaccgucuggggcuuccacuccgacaacaagccccagaugaagaaccccuacggcgacuccaacccccagaaguucaccuccuccgccuccggcgucaccacccacuacgucucccagaucggcgacuuccccgaccagaccgaggacggcggccucccccaguccggccgcaucgucgucgacuacaugaugcagaagcccggcaagaccggcaccaucgucuaccagcgcggcguccuccucccccagaaggucuggugcgccuccggccgcuccaaggucaucaagggcucccucccccucaucggcgaggccgacugccuccacgagaaguacggcggccucaacaaguccaagcccuacuacaccggcgagcacgccaaggccaucggcaacugccccaucugggucaagaccccccucaagcucgccaacggcaccaaguaccgcccccccgccaagcuccucaaggagcgcggcuucuucggcgccaucgccggcuuccucgagggcggcugggagggcaugaucgccggcuggcacggcuacaccucccacggcgcccacggcgucgccgucgccgccgaccucaaguccacccaggaggccaucaacaagaucaccaagaaccucaacucccucuccgagcucgaggucaagaaccuccagcgccucuccggcgccauggacgagcuccacaacgagauccucgagcucgacgagaaggucgacgaccuccgcgccgacaccaucuccucccagaucgagcucgccguccuccucuccaacgagggcaucaucaacuccgaggacgagcaccuccucgcccucgagcgcaagcucaagaagaugcucggccccuccgccgucgacaucggcaacggcugcuucgagaccaagcacaagugcaaccagaccugccucgaccgcaucgccgccggcaccuucaacgccggcgaguucucccuccccaccuucgacucccucaacaucaccgccgccucccucaacgacgacggccucgacaaccacaccauccuccucuacuacuccaccgccgccuccucccucgccgucacccucaugcucgccaucuucaucgucuacauggucucccgcgacaacgucuccugcuccaucugccucuga

SEQ ID NO: 122632 - RNA, 1755 nt, Artificial Sequence
  derived and/or modified CDS sequence (opt2) from hemagglutinin__InfluenzaB__AEG21017
augaaggccaucaucguccuccucauggucgucaccuccaacgccgaccgcaucugcaccggcaucaccuccuccaacuccccccacgucgucaagaccgccacccagggcgaggucaacgucaccggcgucaucccccucaccaccacccccaccaaguccuacuucgccaaccucaagggcacccgcacccgcggcaagcucugccccgacugccucaacugcaccgaccucgacgucgcccucggccgccccaugugcgucggcaccacccccuccgccaaggccuccauccuccacgagguccgccccgucaccuccggcugcuuccccaucaugcacgaccgcaccaagauccgccagcuccccaaccuccuccgcggcuacgagaacauccgccucuccacccagaacgucaucgacgccgagaaggcccccggcggccccuaccgccucggcaccuccggcuccugccccaacgccaccuccaagaucggcuucuucgccaccauggccugggccguccccaaggacaacuacaagaacgccaccaacccccucaccgucgagguccccuacaucugcaccgagggcgaggaccagaucaccgucuggggcuuccacuccgacaacaagacccagaugaagaaccucuacggcgacuccaacccccagaaguucaccuccuccgccaacggcgucaccacccacuacgucucccagaucggcgacuuccccgaccagaccgaggacggcggccucccccaguccggccgcaucgucgucgacuacaugaugcagaagcccggcaagaccggcaccaucgucuaccagcgcggcguccuccucccccagaaggucuggugcgccuccggccgcuccaaggucaucaagggcucccucccccucaucggcgaggccgacugccuccacgagaaguacggcggccucaacaaguccaagcccuccuacaccggcgagcacgccaaggccaucggcaacugccccaucugggucaagaccccccucaagcucgccaacggcaccaaguaccgcccccccgccaagcuccucaaggagcgcggcuucuucggcgccaucgccggcuuccucgagggcggcugggagggcaugaucgccggcuggcacggcuacaccucccacggcgcccacggcgucgccgucgccgccgaccucaaguccacccaggaggccaucaacaagaucaccaagaaccucaacucccucuccgagcucgaggucaagaaccuccagcgccucuccggcgccauggacgagcuccacaacgagauccucgagcucgacgagaaggucgacgaccuccgcgccgacaccaucuccucccagaucgagcucgccguccuccucuccaacgagggcaucaucaacuccgaggacgagcaccuccucgcccucgagcgcaagcucaagaagaugcucggccccuccgccgucgacaucggcaacggcugcuucgagaccaagcacaagugcaaccagaccugccucgaccgcaucgccgccggcaccuucaacgccggcgaguucucccuccccaccuucgacucccucaacaucaccgccgccucccucaacgacgacggccucgacaaccacaccauccuccucuacuacuccaccgccgccuccucccucgccgucacccucaugcucgccaucuucaucgucuacauggucucccgcgacaacgucuccugcuccaucugccucuga

SEQ ID NO: 122633 - RNA, 1755 nt, Artificial Sequence
  derived and/or modified CDS sequence (opt2) from hemagglutinin__InfluenzaB__AEG21018
augaaggccaucaucguccuccucauggucgucaccuccaacgccgaccgcaucugcaccggcaucaccuccuccaucuccccccucgucgacaagaccgccacccagggcgaggucaacgucaccggcgucaucccccucaccaccacccccaccaaguccuacuucgccaacgucaagggcacccgcacccgcggcaagcucugccccgacugccucaacugcaccgaccucgacgucgcccucggccgccccaugugcgucggcaccacccccuccgccaaggccuccauccuccacgagguccgccccgucaccuccggcugcuuccccaucaugcacgaccgcaccaagauccgccagcuccccaaccuccuccgcggcuacgagaacauccgccucuccacccagaacgucaucgacgcccagaaggcccccggcggccccuaccgccucggcaccuccggcuccugccccaacgccaccuccaagaucggcuucuucgccaccauggccugcgccguccccaaggacaacuacaagaacgccaccaacccccucaccgucgagguccccuacauccgcaccgagggcgaggaccagaucaccgucuggggcuuccacuccgacaacaagacccagaugaagaaccucuacggcgacuccaacccccccaaguucaccuccuccgccaacggcgucaccacccacuacgucucccagaccggcgacuuccccgaccagaccgaggacggcggccucccccccuccggccgcaucgucgucgacuacaugaugcagaagcccggcaagaccggccccaucgccuaccagcgcggcguccuccucccccagaaggucuggugcgccuccggccgcuccaaggucaucaagggcucccucccccucaucggcgaggccgacugccuccacgagaaguacggcggccucaacaaguccaaguacucccacaccggcgaccacgccaagacccucggcaacugccccaucugggucaagaccccccucaagcucgccaacggcaccaaguaccgccccuccgccaagcuccucaaggagcgcggcuucuucggcgccaucgccggcuuccucgagggcggcugggagggcaugaucgccggcuggcacggcuacaccucccacggcgcccacggcgucgccgucgccgccgaccucaaguccacccaggaggccaucaacaagaucaccaagaaccucaacucccucuccgagcucgaggucaagaaccuccagcgccucuccggcgccauggacgagcuccacaacgagauccucgagcucgacgagaaggucgacgaccuccgcgccgacaccaucuccucccagaucgagcucgccguccuccucuccaacgagggcaucaucaacuccgaggacgagcaccuccucgcccucgagcgcaagcucaagaagaugcucggccccuccgccgucgacaucggcaacggcugcuucgagaccaagcacaagugcaaccagaccugccucgaccgcaucgccgccggcaccuucaacgccggcgaguucucccuccccaccuucgacucccucaacaucaccgccgccucccucaacgacgacggccucgacaaccacaccauccuccucuacuacuccaccgccgccuccucccucgccgucacccucaugcucgccaucuucaucgucuacauggucucccgcgacaacgucuccugcuccaucugccucuga

SEQ ID NO: 122634 - RNA, 1755 nt, Artificial Sequence
  derived and/or modified CDS sequence (opt2) from hemagglutinin__InfluenzaB__AEG21019
augaaggccaucaucguccuccucauggucgucaccuccaacgccgaccgcaucugcaccggcaucaccuccuccaacuccccccacgucgucaagaccgccacccagggcgaggucaacgucaccggcgucaucccccucaccaccacccccaccaaguccuacuucgccaaccucaagggcacccgcacccgcggcaagcucugccccgacugccucaacugcaccgaccucgacgucgcccucggccgccccaugugcgucggcaccacccccuccgccaaggccuccauccuccacgagguccgccccgucaccuccggcugcuuccccaucaugcacgaccgcaccaagauccgccagcuccccaaccuccuccgcggcuacgagaacauccgccucuccacccagaacgucaucgacgccgagaaggcccccggcggccccuaccgccucggcaccuccggcuccugccccaacgccaccuccaagaucggcuucuucgccaccauggccugggccguccccaaggacaacuacaagaacgccaccaacccccucaccgucgagguccccuacaucugcaccgagggcgaggaccagaucaccgucuggggcuuccacuccgacaacaagacccagaugaagaaccucuacggcgacuccaacccccagaaguucaccuccuccgccaacggcgucaccacccacuacgucucccagaccggcgacuuccccgaccagaccgaggacggcggccucccccccuccggccgcaucgucgucgacuacaugaugcagaagcccggcaagaccggcaccaucgucuaccagcgcggcguccuccucccccagaaggucuggugcgccuccggccgcuccaaggucaucaagggcucccucccccucaucggcgaggccgacugccuccacgagaaguacggcggccucaacaaguccaagcccuccuacaccggcgagcacgccaaggccaucggcaacugccccaucugggucaagaccccccucaagcucgccaacggcaccaaguaccgccccuccgccaagcuccucaaggagcgcggcuucuucggcgccaucgccggcuuccucgagggcggcugggagggcaugaucgccggcuggcacggcuacaccucccacggcgcccacggcgucgccgucgccgccgaccucaaguccacccaggaggccaucaacaagaucaccaagaaccucaacucccucuccgagcucgaggucaagaaccuccagcgccucuccggcgccauggacgagcuccacaacgagauccucgagcucgacgagaaggucgacgaccuccgcgccgacaccaucuccucccagaucgagcucgccguccuccucuccaacgagggcaucaucaacuccgaggacgagcaccuccucgcccucgagcgcaagcucaagaagaugcucggccccuccgccgucgacaucggcaacggcugcuucgagaccaagcacaagugcaaccagaccugccucgaccgcaucgccgccggcaccuucaacgccggcgaguucucccuccccaccuucgacucccucaacaucaccgccgccucccucaacgacgacggccucgacaaccacaccauccuccucuacuacuccaccgccgccuccucccucgccgucacccucaugcucgccaucuucaucgucuacauggucucccgcgacaacgucuccugcuccaucugccucuga

SEQ ID NO: 122635 - RNA, 1758 nt, Artificial Sequence
  derived and/or modified CDS sequence (opt2) from hemagglutinin__InfluenzaB__AEG21021
augaaggccaucaucguccuccucauggucgucaccuccaacgccgaccgcaucugcaccggcaucaccuccuccaacuccccccacgucgucaagaccgccacccagggcgaggucaacgucaccggcgucaucccccucaccaccacccccaccaagucccacuucgccaaccucaagggcaccgagacccgcggcaagcucugccccaagugccucaacugcaccgaccucgacgucgcccucggccgccccaagugcaccggcaagauccccuccgcccgcgucuccauccuccacgagguccgccccgucaccuccggcugcuuccccauccuccacgaccgcaccaagauccgccagcuccccaaccuccuccgcggcuacgagcacauccgccucuccacccacaacgucaucaacgccgagaacgcccccggcggccccuacaagaucggcaccuccggcuccugccccaacaucaccaacggcaacggcuucuucgccaccauggccugggccguccccaagaacgacaagaacaagaccgccaccaacccccucuccaucgagguccccuacaucugcaccgagggcgaggaccagaucaccgucuggggcuuccacuccgacaacgagacccagauggccaagcucuacggcgacuccaagccccagaaguucaccuccuccgccaacggcgucgccacccacuacgucucccagaucggcggcuuccccaaccagaccgaggacggcggccucccccaguccggccgcaucgucgucgacuacaugguccagaaguccggcaagaccggcaccaucaccuaccagcgcggcauccuccucccccagaaggucuggugcgccuccggccgcuccaaggucaucaagggcucccucccccucuucggcgaggccgacugccuccacgagaaguacggcggcuucaacaaguccaagcccuacuacaccggcgagcacgccaaggccaucggcaacugccccaucugggucaagaccccccucaagcucgccaacggcaccaaguaccgcccccccgccaagcucuucaaggagcgcggcuucuucggcgccaucgccggcuuccucgagggcggcugggagggcaugaucgccggcuggcacggcuacaccucccacggcgcccacggcgucgccgucgccgccgaccucaaguccacccaggaggccaucaacaagaucaccaagaaccucaacucccucuccgagcucgaggucaagaaccuccagcgccucuccggcgccauggacgagcuccacaacgagauccucgagcucgacgagaaggucgacgaccuccgcgccgacaccaucuccucccagaucgagcucgccguccuccucuccaacgagggcaucaucaacuccgaggacgagcaccuccucgcccucgagcgcaagcucaagaagaugcucggccccuccgccgucgagaucggcaacggcugcuucgagaccaagcacaagugcaaccagaccugccucgaccgcaucgccgccggcaccuucgacgccggcgaguucucccuccccaccuucgacucccucaacaucaccgccgccucccucaacgacgacggccucgacaaccacaccauccuccucuacuacuccaccgccgccuccucccucgccgucacccucaugaucgccaucuucgucgucuacauggucucccgcgacaacgucuccugcuccaucugccucuga

SEQ ID NO: 122636 - RNA, 1758 nt, Artificial Sequence
  derived and/or modified CDS sequence (opt2) from hemagglutinin__InfluenzaB__AEG21022
augaaggccaucaucguccuccucauggucgucaccuccaacgccgaccgcaucugcaccggcaucaccuccuccaacuccccccacgucgucaagaccgccacccagggcgaggucaacgucaccggcgucaucccccucaccaccacccccaccaagucccacuucgccaaccucaagggcaccgagacccgcggcaagcucugccccaagugccucaacugcaccgaccucgacgucgcccucggccgccccaagugcaccggcaccacccccuccgcccgcgccuccauccuccacgagguccgccccgucaccuccggcugcuuccccauccuccacgaccgcaccaagauccgccagcuccccaaccuccuccgcggcuacgagcacauccgccucuccacccacaacgucaucaacgccgagaacgcccccggcggccccuacaagaucggcaccuccggcuccugccccaacaucaccaacggcaacggcuucuucgccaccauggccugggccguccccaagaacgacaagaacaagaccgccaccaacccccucuccgucgagguccccuacaucugcaccgagggcgaggaccagaucaccgucuggggcuuccacuccgacaacgagacccagauggccaagcucuacggcgacuccaagccccagaaguucaccuccuccgccaacggcgucgccacccacuacgucucccagaucggcggcuuccccaaccagaccgaggacggcggccucccccaguccggccgcaucgucgucgacuacaugguccagaaguccggcaagaccggcaccaucaccuaccagcgcggcauccuccucccccagcgcggcuggugcgccuccggccgcuccaaggucaucaagggcucccucccccucuucggcgaggccgacugccuccacgagaaguacggcggccucaacaaguccaagcccuacuacaccggcgagcacgccaaggccaucggcaacugccccaucugggucaagaccccccucaagcucgccaacggcaccaaguaccgcccccccgccaagcucuucaaggagcgcggcuucuucggcgccaucgccggcuuccucgagggcggcugggagggcaugaucgccggcuggcacggcuacaccucccacggcgcccacggcguccccgucgccgccgaccucaaguccacccaggaggccaucaacaagaucaccaagaaccucaacucccucuccgagcucgaggucaagaaccuccagcgccucuccggcgccauggacgagcuccacaacgagauccucgagcucgacgagaaggucgacgaccuccgcgccgacaccaucuccucccagaucgagcucgccguccuccucuccaacgagggcaucaucaacuccgaggacgagcaccuccucgcccucgagcgcaagcucaagaagaugcucggccccuccgccgucgagaucggcaacggcugcuucgagaccaagcacaagugcaaccagaccugccucgaccgcaucgccgccggcaccuucgacgccggcgaguucucccuccccaccuucgacucccucaacaucaccgccgccucccucaacgacgacggccucgacaaccacaccauccuccucuacuacuccaccgccgccuccucccucgccgucacccucaugaucgccaucuucgucgucuacauggucucccgcgacaacgucuccugcuccaucugccucuga

SEQ ID NO: 122637 - RNA, 1755 nt, Artificial Sequence
  derived and/or modified CDS sequence (opt2) from hemagglutinin__InfluenzaB__AEG21023
augaaggccaucaucguccuccucauggucgucaccuccaacgccgaccgcaucugcaccggcaucaccuccuccaacuccccccacgucgucaagaccgccacccucggcgaggucaacgagaccggcgucaucccccucaccaccacccccaccaaguccuacuucgccaaccucaagggcacccgcacccgcggcaagcucugccccgacugccucaacugcaccgaccucgacgucgcccucggccgccccaugugcgucggcaccacccccuccgccaaggccuccauccuccacgagguccgccccgucaccuccggcugcuuccccaucaugcacgaccgcaccaagauccgccagcuccccaaccuccuccgcggcuacgagaacauccgccucuccacccagaacgucaucgacgccgagaaggcccccggcggccccuaccgccucggcaccuccggcuccugccccaacgccaccuccaagaucggcuucuucgccaccauggccugggccguccccaaggacaacuacaagaacgccaccaacccccucaccgucgagguccccuacaucugcaccgagggcgaggaccagaucaccgucuggggcuuccacuccgacaacaagacccagaugaagaaccucuacggcgacuccaacccccagaaguucaccuccuccgccaacggcguccccacccacuacgucucccagaucggcgacuuccccgaccccaccgaggacggcggccucccccaguccggccgcaucggcgucgacuacaugaugcagaagcccggcaagaccggcaccaucgucuaccagcgcggcguccuccucccccagaaggucuggugcgccuccggccgcuccaaggucaucaagggcucccucccccucaucggcgaggccgacugccuccacgagaaguacggcggccucaacaaguccaagcccuacuacaccggcgagcacgccaaggccaucggcaacugccccaucugggucaagaccccccucaagcucgccaacggcaccaaguaccgcccccccgccaagcuccucaaggagcgcggcuucuucggcgccaucuccggcuuccucgagggcggcugggagggcaugaucgccggcuggcacggcuacaccucccacggcgcccacggcgucgccgucgccgccgaccucaaguccacccaggaggccaucaacaagaucaccaagaaccucaacucccucuccgagcucgaggucaagaaccuccagcgccucuccggcgccauggacgagcuccacaacgagauccucgagcucgacgagaaggucgacgaccuccgcgccgacaccaucuccucccagaucgagcucgccguccuccucuccaacgagggcaucaucaacuccgaggacgagcaccuccucgcccucgagcgcaagcucaagaagaugcucggccccuccgccgucgagaucggcaacggcugcuucgagaccaagcacaagugcaaccagaccugcuccgaccgcaucgccgccggcaccuucgacgccggcgaguucucccuccccaccuucgacucccucaacaucaccgccgccucccucaacgacgacggccucgacaaccacaccauccuccucuacuacuccaccgccgccuccucccucgccgucacccucaugaucgccaucuucgucgucuacauggucucccgcgacaacgucuccugcuccaucugccucuga

SEQ ID NO: 122638 - RNA, 1758 nt, Artificial Sequence
  derived and/or modified CDS sequence (opt2) from hemagglutinin__InfluenzaB__AEG21024
augaaggccaucaucguccuccucauggucgucaccuccaacgccgaccgcaucugcaccggcaucaccuccuccuccuccccccacgucgucaagaccgccacccagggcgaggucaacgucaccggcgucaucccccucaccaccacccccaccaaguccuacuucgccaaccucaagggcaccgagacccgcggcaagcucugccccgacugccccaacugcaccgaccucgacgucgcccucggccgccccaacugcuggggcaacauccccuccgcccgcgucuccauccuccacgagguccgccccgucaccuccggcugcuuccccaucaugcacgaccgcaccaagauccgccagcuccccaaccuccuccgcggcuacgagcacauccgccucuccacccacaacgucaucaacgccgagaacgcccccggcggccccuacaagaucggcaccuccggcuccugccccaacgucaccaacggcaacggcuucuucgccaccauggccugggccguccccaaggacgacaagaacaacgccgccacccaccuccucaccaucgagguccccuucuucugcaccggcggcgagcaccacaucgccgucuggggcuuccccuccgacaacgacacccucauggccaagcucuucggcgacuccaacccccagauguucuccuccuccgccaacggcaccaccacccacuacgucucccagaucggcggcuuccccaaccagaccgaggacggcggccucccccaguccggccgcaucgucgucgacuacaugguccagaaguccggcaagaccggcaccaucgccuaccagcgcggcguccuccucccccagaaggucuggugcgccuccggccgcuccaaggucaucaagggcucccucccccucaucggcgaggccgacugccuccacgagaaguacggcggccucaacaaguccaagcccuacuacaccggcgagcacgccaaggccaucggcaacugccccaucugggucaagaccccccucaagcucgccaacggcaccaaguaccgcccccccgccaagcuccucaaggagcgcggcuucuucggcgccaucgccggcuuccucgagggcggcugggagggcaugaucgccggcuggcacggcuacaccucccacggcgcccacggcgucgccgucgccgccgaccucaaguccacccaggaggccaucaacaagaucaccaagaaccucaacucccucuccgagcucgaggucaagaaccuccagcgccucuccggcgccauggacgagcuccacaacgagauccucgagcucgacgagaaggucgacgaccuccgcgccgacaccaucuccucccagaucgagcucgccguccuccucuccaacgagggcaucaucaacuccgaggacgagcaccuccucgcccucgagcgcaagcucaagaagaugcucggccccuccgccgucgagaucggcaacggcugcuucgagaccaagcacaagugcaaccagaccugccucgaccgcaucgccgccggcaccuucgacgccggcgaguucucccuccccaccuucgacucccucaacaucaccgccgccucccucaacgacgacggccucgacaaccacaccauccuccucuacuacuccaccgccgccuccucccucgccgucacccucaugaucgccaucuucgucgucuacauggucucccgcgacaacgucuccugcuccaucugccucuga

SEQ ID NO: 122639 - RNA, 1755 nt, Artificial Sequence
  derived and/or modified CDS sequence (opt2) from hemagglutinin__InfluenzaB__AEG21025
augaaggccaucaucguccuccucauggucgucaccuccaacgccgaccgcaucugcaccggcaucaccuccuccaacuccccccacgucgucaagaccgccacccucggcgaggucaacgagaccggcgucaucccccucaccaccacccccaccaaguccuacuucgccaaccucaagggcacccgcacccgcggcaagcucugccccgacugccucaacugcaccgaccucgacgucgcccucggccgccccaugugcgucggcaccacccccuccgccaaggccuccauccuccacgagguccgccccgucaccuccggcugcuuccccaucaugcacgaccgcaccaagauccgccagcuccccaaccuccuccgcggcuacgagaacauccgccucuccacccagaacgucaucgacgccgagaaggcccccggcggccccuaccgccucggcaccuccggcuccugccccaacgccaccuccaagaucggcuucuucgccaccauggccugggccguccccaaggacaacuacaagaacgccaccaacccccucaccgucgagguccccuacaucugcaccgagggcgaggaccagaucaccgucuggggcuuccacuccgacaucaagacccagaugaagaaccucuacggcgacuccaacccccagaaguucaccuccuccgccaacggcguccccacccacuacgucucccagaucggcgacuuccccgaccccaccgaggacggcggccucccccaguccggccgcaucggcgucgacuacaugaugcagaagcccggcaagaccggcaccaucgucuaccagcgcggcguccuccucccccagaaggucuggugcgccuccggccgcuccaaggucaucaagggcucccucccccucaucggcgaggccgacugccuccacgagaaguacggcggccucaacaaguccaagcccuacuacaccggcgagcacgccaaggccaucggcaacugccccaucugggucaagaccccccucaagcucgccaacggcaccaaguaccgcccccccgccaagcuccucaaggagcgcggcuucuucggcgccaucuccggcuuccucgagggcggcugggagggcaugaucgccggcuggcacggcuacaccucccacggcgcccacggcgucgccgucgccgccgaccucaaguccacccaggaggccaucaacaagaucaccaagaaccucaacucccucuccgagcucgaggucaagaaccuccagcgccucuccggcgccauggacgagcuccacaacgagauccucgagcucgacgagaaggucgacgaccuccgcgccgacaccaucuccucccagaucgagcucgccguccuccucuccaacgagggcaucaucaacuccgaggacgagcaccuccucgcccucgagcgcaagcucaagaagaugcucggccccuccgccgucgagaucggcaacggcugcuucgagaccaagcacaagugcaaccagaccugcuccgaccgcaucgccgccggcaccuucgacgccggcgaguucucccuccccaccuucgacucccucaacaucaccgccgccucccucaacgacgacggccucgacaaccacaccauccuccucuacuacuccaccgccgccuccucccucgccgucacccucaugaucgccaucuucgucgucuacauggucucccgcgacaacgucuccugcuccaucugccucuga

SEQ ID NO: 122640 - RNA, 1758 nt, Artificial Sequence
  derived and/or modified CDS sequence (opt2) from hemagglutinin__InfluenzaB__AEG21026
augaaggccaugaugguccuccucauggucgucaccuccaacgccgaccgcaucugcaccggcaucaccuccuccaacuccccccacgucgucaagaccgccacccagggcgaggucaacgucaccggcgucaucccccucaccaucacccccaccaagucccacuucgccaaccucaaggucaaggagacccgcggcaagcucugccccaagugccccaacugcaccgaccucgacgucgcccucggccgccccaagugcaccggcaagauccccuccgcccgcgucuccauccuccacgaggacacccccgucaccuccggcugcauccccaucaugcacgaccgcaccaagauccgccagcuccccaaccuccuccgcggcuacgagcacauccgccucuccacccacaacgucaucaacgccgaguccgcccccggcggccccuacaagaucggcaccuccggcuccugccccaacgucaccaacggcaucggcuucuucgccaccauggccugggccguccccaagaacgacaagaacaagaccgccaccaacccccucaccaucgagguccccuacaucugcaccgagggcgaggaccagaucaccgucuggggcuuccacuucgacaacgagacccagauggccaagcucuacggcgacuccaagccccaggucuucaccuccuccgccaacggcgucaacgccgacuucgucucccagauccgcggcuuccccaaccagaccgaggacggcggccucccccaguccggccgcaucgucgucgacuacaugguccagaaguccggcaagaccggcaccaucaccuaccagcgcggcauccuccucccccagaaggucuggugcgccuccggccgcuccaaggucaucaaggagucccucccccucaucggcgaggccuacuuccagcaggaggaguacggcggccucaacaaguccaaguccuacuacaccgaggagcacgccaaggccaucggcaucugccccaucugggucaagaccccccucaagcucgccaacaagaccaaguaccgcccccccgcccaccucuccuacuucugcggcuucuucggcgccaucgccggcuuccucgagggcggcugggagggcaugaucgccggcuggaacggcuacaccucccacggcgcccacggcgucgccgucgucgccgaccucaaguccacccaggaggccaucaacaagaucaccaagaaccucaacucccucuccgagcucgaggucgagacccuccagcgccucuccggcgccauggacgagcuccacaacgagauccucgagcucgacgagaaggucgacgaccaccgcgccgacaccaucuccucccagaucgagcuccccgaccagcucuccaacgacggcuccaucaacuccgaggacgagcaccuccucgcccucgagcgcaagcucaagaagaugcucggccccuccaacggcgacaagggcuccggcggcaucgagaccaagcacaagugcaaccagaccugccucgaccgcaucgccgccggcaccuucgacgccggcggcuucucccaccccaccuucgacuccaagaacgucaccgccgccucccucaacgacgacggccucgacuccggcaccauccuccucuacuacuccaccgacgucuccaaccucgccgucaccgucaugaugggcaucuucgucaaguacauggucucccgcgacaacgucuccugcuccaucugccucuga

SEQ ID NO: 122641 - RNA, 1758 nt, Artificial Sequence
  derived and/or modified CDS sequence (opt2) from hemagglutinin__InfluenzaB__AEG21027
augaaggccaucaucguccuccucauggucgucaccuccaacgccgaccgcaucugcaccggcaucaccuccuccaacuccccccacgucgucaagaccgccacccagggcgaggucaacgucaccggcgucaucccccucaccaucacccccaccaagucccacuucgccaaccucaagggcaccgagacccgcggcaagcucugccccaagugccccaacugcaccgaccucgacgucgcccucggccgccccaagugcaccggcaagauccccuccgcccgcgucuccauccuccacgagguccgccccgucaccuccggcugcuuccccaucaugcacgaccgcaccaagauccgccagcuccccaaccuccuccgcggcuacgagcacauccgccucuccacccacaacgucaucaacgccgagaacgcccccggcggccccuacaagaucggcaccuccggcuccugccccaacgucaccaacggcaucggcuucuucgccaccauggccugggccguccccaagaacgacaagaacaagaccgccaccaacccccucaccaucgagguccccuacaucugcaccgagggcgaggaccagaucaccgucuggggcuuccacuucgacaacgagacccagauggccaagcucuacggcgacuccaagccccagaaguucaccuccuccgccaacggcgucaacgccgacuucgucucccagaucggcggcuuccccaaccagaccgaggacggcggccucccccaguccggccgcaucgucgucgacuacaugguccagaaguccggcaagaccggcaccaucaccuaccagcgcggcauccuccucccccagaaggucuggugcgccuccggccgcuccaaggucaucaaggagucccucccccucaucggcgaggccuacuuccagcaggaggaguacggcggccucaacaaguccaaguccuacuacaccggcgagcacgccaaggccaucggcaacugccccaucugggucaagaccccccucaagcucgccaacggcaccaaguaccgcccccccgcccaccucuccuacuucugcggcuucuucggcgccaucgccggcuuccucgagggcggcugggagggcaugaucgccggcuggaacggcuacaccucccacggcgcccacggcgucgccgucgucgccgaccucaaguccacccaggaggccaucaacaagaucaccaagaaccucaacucccucuccgagcucgaggucgagacccuccagcgccucuccggcgccauggacgagcuccacaacgagauccucgagaucgacgagaaggucgacgaccaccgcgccgacaccaucuccucccagaucgagcucgccguccuccucuccaacgagggcaucaucaacuccgaggacgagcaccuccucgcccucgagcgcaagcucaagaagaugcucggccccuccaacggcgacaagggcuccggcggcaucgagaccaagcacaagugcaaccagaccugccucgaccgcaucgccgccggcaccuucgacgccggcgaguucucccuccccaccuucgacucccucaacaucaccgccgccucccucaacgacgacggccucgacuccggcaccauccuccucuacuacuccaccgacgucuccaaccucgccgucaccgucaugaugggcaucuucgucaaguacauggucucccgcgacaacgucuccugcuccaucugccucuga

SEQ ID NO: 122642 - RNA, 1758 nt, Artificial Sequence
  derived and/or modified CDS sequence (opt2) from hemagglutinin__InfluenzaB__AEG21028
augaaggccaucaucguccuccucauggucgucaccuccaacgccgaccgcaucugcaccggcaucaccgccucccagucccccaacaucgacaaguccuccacccagggcgaggucaacgucuccugcgucaucccccucaccaccacccccaccaagucccacuucgccaaccucaaggucaaggagacccgcggcaagcucugccccaagugccccaacugcaccgaccucgacgucucccucggccgccccaagugcaccggcaagauccccuccgcccgcgucuccauccuccacgagguccgccccgucgccuccggcggcuuccccaucaugcacgaccgcaccaagauccgccagcuccccaaccuccuccgcggcuacgagcacauccgccucuccacccacaacgucaucaacgccgagaacgcccccggcggccccuacaagaucggcaccuccggcuccugccccaacgucaccaacggcaucggcuucuucgccaccauggccugggccguccccaagaacgacaagaacaagaccgccaccaacccccucaccaucgagguccccuacaucugcaccgagggcgaggaccagaucaccgucuggggcuuccacuccgacaacgagacccagauggccaagcucuacggcgacuccaagccccagaaguucaccuccuccgccaacggcgucaccacccacuacgccgccaagcgccccugcuuccccaaccagaccgaggacggcggccucccccaguccggccgcaucgucgucgacuacaugguccagaaguccggcaagaccggcaccaucaccuaccagcgcggcauccuccucccccagaaggucuggugcgccuccggccgcuccaaggucaucaagggcucccucccccucaucggcgaggccgacugccuccacgagaaguacggcggccucaacaaguccaaguccuacuacaccggcgagcacgccaaggccaucggcaacugccccaucugggucaagaccccccucaagcucgccucccgcaccauguccaagacccccgcccaccucuccuacuucugcggcuucuucggcgccaucgccggcuuccucgagggcggcugggagggcaugaucgccggcuggaacggcuacaccucccacggcgcccacggcgucgccgucgucgccgaccucaaguccacccaggaggccaucaacaagaucaccaagaaccucaacucccucuccgagcucgaggucaagaaccuccagcgccucuccggcgccauggacgagcuccacaacgagauccucgagcucgacgagaaggucgacgaccuccgcgccgacaccaucuccucccagaucgagcucgccguccuccucuccaacgagggcaucaucaacuccgaggacgagcaccuccucgcccucgagcgcaagcucaagaagaugcucggccccuccgccgucgagaucggcaacggcugcuucgagaccaagcacaagugcaaccagaccugccucgaccgcaucgccgccggcaccuucgacgccggcgaguucucccuccccaccuucgacucccucaacaucaccgccgccucccucaacgacgacggccucgacaaccacaccauccuccucuacuacuccaccgccgccuccucccucgccgucacccucaugaucgccaucuucgucgucuacauggucucccgcgacaacgucuccugcuccaucugccucuga

SEQ ID NO: 122643 - RNA, 1758 nt, Artificial Sequence
  derived and/or modified CDS sequence (opt2) from hemagglutinin__InfluenzaB__AEG21029
augaaggccaucaucguccuccucauggucgucaccuccaacgccgaccgcaucugcaccggcaucaccuccuccaacuccccccacgucgucaagaccgccacccagggcgaggucaacgucaccggcgucaucccccucaccaccacccccaccaagucccacuucgccaaccucaagggcaccgagacccgcggcaagcucugccccaagugccccaacugcaccgaccucgacgucgcccucggccgccccaagugcaccggcaagauccccuccgcccgcgucuccauccuccacgagguccgccccgucaccuccggcugcuuccccaucaugcacgaccgcaccaagauccgccagcuccccaaccuccuccgcggcuacgagcacauccgccucuccacccacaacgucaucaacgccgagaacgcccccggcggccccuacaagaucggcaccuccggcuccugccccaacgucaccaacggcaucggcuucuucgccaccauggccugggccguccccaagaacgacaagaacaagaccgccaccaacccccucaccaucgagguccccuacaucugcaccgagggcgaggaccagaucaccgucuggggcuuccacuccgacuccgagacccagauggccaagcucuacggcgacuccaagccccagaaguucaccuccuccgccaacggcgucaccacccacuacgucucccagaucggcggcuuccccaaccagaccgaggacggcggccucccccaguccggccgcaucgucgucgacuacaugguccagaaguccggcaagaccggcaccaucaccuaccagcgcggcauccuccucccccagaaggucuggugcgccuccggccgcuccaaggucaucaagggcucccucccccucaucggcgaggccgacugccuccacgagaaguacggcggccucaacaaguccaagcccuacuacaccggcgagcacgccaaggccaucggcaacugccccaucugggucaagaccccccucaagcucgccaacggcaccaaguaccgcccccccgccaagcuccucaaggagcgcggcuucuucggcgccaucgccggcuuccucgagggcggcugggagggcaugaucgccggcuggcacggcuacaccucccacggcgcccacggcgucgccgucgccgccgaccucaaguccacccaggaggccaucaacaagaucaccaagaaccucaacucccucuccgagcucgaggucaagaaccuccagcgccucuccggcgccauggacgagcuccacaacgagauccucgagcucgacgagaaggucgacgaccuccgcgccgacaccaucuccucccagaucgagcucgccguccuccucuccaacgagggcaucaucaacuccgaggacgagcaccuccucgcccucgagcgcaagcucaagaagaugcucggccccuccgccgucgagaucggcaacggcugcuucgagaccaagcacaagugcaaccagaccugccucgaccgcaucgccgccggcaccuucgacgccggcgaguucucccuccccaccuucgacucccucaacaucaccgccgccucccucaacgacgacggccucgacaaccacaccauccuccucuacuacuccaccgccgccuccucccucgccgucacccucaugaucgccaucuucgucgucuacauggucucccgcgacaacgucuccugcuccaucugccucuga

SEQ ID NO: 122644 - RNA, 1758 nt, Artificial Sequence
  derived and/or modified CDS sequence (opt2) from hemagglutinin__InfluenzaB__AEO80052
augaaggccaucaucguccuccucauggucgucaccuccaacgccgaccgcaucugcaccggcaucaccuccuccaacuccccccacgucgucaagaccgccacccagggcgaggucaacgucaccggcgucaucccccucaccaccacccccaccaagucccacuucgccaaccucaagggcaccgagacccgcggcaagcucugccccaagugccccaacugcaccgaccucgacgucgcccucggccgccccaagugcaccggcaagauccccuccgcccgcgucuccauccuccacgagguccgccccgucaccuccggcugcuuccccaucaugcacgaccgcaccaagauccgccagcuccccaaccuccuccgcggcuacgagcacauccgccucuccacccacaacgucaucaacgccgagaacgcccccggcggccccuacaagaucggcaccuccggcuccugccccaacgucaccaacggcaacggcuucuucgccaccauggccugggccguccccaagaacgacaagaacaagaccgccaccaacccccucaccaucgagguccccuacaucugcaccgagggcgaggaccagaucaccgucuggggcuuccacuccgacaacgagacccagauggccaagcucuacggcgacuccaagccccagaaguucaccuccuccgccaacggcgucaccacccacuacgucucccagaucggcggcuuccccaaccagaccgaggacggcggccucccccaguccggccgcaucgucgucgacuacaugguccagaaguccggcaagaccggcaccaucaccuaccagcgcggcauccuccucccccagaaggucuggugcgccuccggccgcuccaaggucaucaagggcucccucccccucaucggcgaggccgacugccuccacgagaaguacggcggccucaacaaguccaagcccuacuacaccggcgagcacgccaaggccaucggcaacugccccaucugggucaagaccccccucaagcucgccaacggcaccaaguaccgcccccccgccaagcuccucaaggagcgcggcuucuucggcgccaucgccggcuuccucgagggcggcugggagggcaugaucgccggcuggcacggcuacaccucccacggcgcccacggcgucgccgucgccgccgaccucaaguccacccaggaggccaucaacaagaucaccaagaaccucaacucccucuccgagcucgaggucaagaaccuccagcgccucuccggcgccauggacgagcuccacaacgagauccucgagcucgacgagaaggucgacgaccuccgcgccgacaccaucuccucccagaucgagcucgccguccuccucuccaacgagggcaucaucaacuccgaggacgagcaccuccucgcccucgagcgcaagcucaagaagaugcucggccccuccgccgucgagaucggcaacggcugcuucgagaccaagcacaagugcaaccagaccugccucgaccgcaucgccgccggcaccuucgacgccggcgaguucucccuccccaccuucgacucccucaacaucaccgccgccucccucaacgacgacggccucgacaaccacaccauccuccucuacuacuccaccgccgccuccucccucgccgucacccucaugaucgccaucuucgucgucuacauggucucccgcgacaacgucuccugcuccaucugccucuga

SEQ ID NO: 122645 - RNA, 1758 nt, Artificial Sequence; identical to SEQ ID NO: 122550
  derived and/or modified CDS sequence (opt2) from hemagglutinin__InfluenzaB__AEO80067

SEQ ID NO: 122646 - RNA, 1755 nt, Artificial Sequence
  derived and/or modified CDS sequence (opt2) from hemagglutinin__InfluenzaB__AEO80078
augaaggagaucaucguccuccucauggucgucaccuccaacgccgaccgcaucugcaccggcaucaccuccuccaacuccccccacgucgucaagaccgccacccagggcgaggucaacgucaccggcgucaucccccucaccaccacccccaccaaguccuacuucgccaaccucaagggcacccgcacccgcggcaagcucugccccgacugccucaacugcaccgaccucgacgucgcccucggccgccccaugugcgucggcaccacccccuccgccaaggccuccauccuccacgagguccgccccgucaccuccggcugcuuccccaucaugcacgaccgcaccaagauccgccagcucgccaaccuccuccgcggcuacgagaacauccgccucuccacccagaacgucaucgacgccgagaaggcccccggcggccccuaccgccucggcaccuccggcuccugccccaacgccaccuccaaguccggcuucuucgccaccauggccugggccguccccaaggacaacaacaagaacgccaccaacccccucaccgucgagguccccuacaucugcaccgagggcgaggaccagaucaccgucuggggcuuccacuccgacaacaagacccagaugaagaaccucuacggcgacuccaacccccagaaguucaccuccuccgccaacggcgucaccacccacuacgucucccagaucggcggcuuccccgaccagaccgaggacggcggccucccccaguccggccgcaucgucgucgacuacaugaugcagaagcccggcaagaccggcaccaucgucuaccagcgcggcguccuccucccccagaaggucuggugcgccuccggccgcuccaaggucaucaagggcucccucccccucaucggcgaggccgacugccuccacgagaaguacggcggccucaacaaguccaagcccuacuacaccggcgagcacgccaaggccaucggcaacugccccaucugggucaagaccccccucaagcucgccaacggcaccaaguaccgcccccccgccaagcuccucaaggagcgcggcuucuucggcgccaucgccggcuuccucgagggcggcugggagggcaugaucgccggcuggcacggcuacaccucccacggcgcccacggcgucgccgucgccgccgaccucaaguccacccaggaggccaucaacaagaucaccaagaaccucaacucccucuccgagcucgaggucaagaaccuccagcgccucuccggcgccauggacgagcuccacaacgagauccucgagcucgacgagaaggucgacgaccuccgcgccgacaccaucuccucccagaucgagcucgccguccuccucuccaacgagggcaucaucaacuccgaggacgagcaccuccucgcccucgagcgcaagcucaagaagaugcucggccccuccgccgucgacaucggcaacggcugcuucgagaccaagcacaagugcaaccagaccugccucgaccgcaucgccgccggcaccuucaacgccggcgaguucucccuccccaccuucgacucccucaacaucaccgccgccucccucaacgacgacggccucgacaaccacaccauccuccucuacuacuccaccgccgccuccucccucgccgucacccucaugcucgccaucuucaucgucuacauggucucccgcgacaacgucuccugcuccaucugccucuga

SEQ ID NO: 122647 - RNA, 1758 nt, Artificial Sequence
  derived and/or modified CDS sequence (opt2) from hemagglutinin__InfluenzaB__AEO80086
augaaggccaucaucguccuccucauggucgucaccuccaacgccgaccgcaucugcaccggcaucaccuccuccaacuccccccacgucgucaagaccgccacccagggcgaggucaacgucaccggcgucaucccccucaccaccacccccaccaagucccacuucgccaaccucaagggcaccaagacccgcggcaagcucugccccaagugccucaacugcaccgaccucgacgucgcccucggccgccccaagugcaccggcaacauccccuccgccaaggucuccauccuccacgagguccgccccgucaccuccggcugcuuccccaucaugcacgaccgcaccaagauccgccagcuccccaaccuccuccgcggcuacgagcacauccgccucuccacccacaacgucaucaacgccgagaaggcccccggcggccccuacaagaucggcaccuccggcuccugccccaacgucaccaacggcaacggcuucuucgccaccauggccugggccguccccaagaacgacaacaacaagaccgccaccaacucccucaccaucgagguccccuacaucugcaccgagggcgaggaccagaucaccaucuggggcuuccacuccgacaacgagacccagauggccaagcucuacggcgacuccaagccccagaaguucaccuccuccgccaacggcgucaccacccacuacgucucccagaucggcggcuuccccaaccagaccgaggacggcggccucccccaguccggccgcaucgucgucgacuacaugguccagaaguccggcaagaccggcaccaucaccuaccagcgcggcauccuccucccccagaaggucuggugcgccuccggccgcuccaaggucaucaagggcucccucccccucaucggcgaggccgacugccuccacgagaaguacggcggccucaacaaguccaagcccuacuacaccggcgagcacgccaaggccaucggcaacugccccaucugggucaagaccccccucaagcucgccaacggcaccaaguaccgcccccccgccaagcuccucaaggagcgcggcuucuucggcgccaucgccggcuuccucgagggcggcugggagggcaugaucgccggcuggcacggcuacaccucccacggcgcccacggcgucgccgucgccgccgaccucaaguccacccaggaggccaucaacaagaucaccaagaaccucaacucccucuccgagcucgaggucaagaaccuccagcgccucuccggcgccauggacgagcuccacaacgagauccucgagcucgacgagaaggucgacgaccuccgcgccgacaccaucuccucccagaucgagcucgccguccuccucuccaacgagggcaucaucaacuccgaggacgagcaccuccucgcccucgagcgcaagcucaagaagaugcucggccccuccgccgucgagaucggcaacggcugcuucgagaccaagcacaagugcaaccagaccugccucgaccgcaucgccgccggcaccuucgacgccggcgaguucucccuccccaccuucgacucccucaacaucaccgccgccucccucaacgacgacggccucgacaaccacaccauccuccucuacuacuccaccgccgccuccucccucgccgucacccucaugaucgccaucuucgucgucuacauggucucccgcgacaacgucuccugcuccaucugccucuga

SEQ ID NO: 122648 - RNA, 1755 nt, Artificial Sequence
  derived and/or modified CDS sequence (opt2) from hemagglutinin__InfluenzaB__AEO80097
augaaggccaucaucguccuccucauggucgucaccuccaacgccgaccgcaucugcaccggcaucaccuccuccaacuccccccacgucgucaagaccgccacccagggcgaggucaacgucaccggcgucaucccccucaccaccacccccaccaagucccacuucgccaaccucaagggcacccgcacccgcggcaagcucugccccgacugccucaacugcaccgaccucgacgucgcccucggccgccccaugugcgucggcaccacccccuccgccaaggccuccauccuccacgagguccgccccgucaccuccggcugcuuccccaucaugcacgaccgcaccaagauccgccagcucgccaaccuccuccgcggcuacgagaacauccgccucuccacccagaacgucaucgacgccgagaaggcccccggcggccccuaccgccucggcaccuccggcuccugccccaacgccaccuccaaguccggcuucuucgccaccauggccugggccguccccaaggacaacaacaagaacgccaccaacccccucaccgucgagguccccuacaucugcaccgagggcgaggaccagaucaccgucuggggcuuccacuccgacaacaagacccagaugaagaaccucuacggcgacuccaacccccagaaguucaccuccuccgccaacggcgucaccacccacuacgucucccagaucggcggcuuccccgaccagaccgaggacggcggccucccccaguccggccgcaucgucgucgacuacaugaugcagaagcccggcaagaccggcaccaucgucuaccagcgcggcguccuccucccccagaaggucuggugcgccuccggccgcuccaaggucaucaagggcucccucccccucaucggcgaggccgacugccuccacgagaaguacggcggccucaacaaguccaagcccuacuacaccggcgagcacgccaaggccaucggcaacugccccaucugggucaagaccccccucaagcucgccaacggcaccaaguaccgcccccccgccaagcuccucaaggagcgcggcuucuucggcgccaucgccggcuuccucgagggcggcugggagggcaugaucgccggcuggcacggcuacaccucccacggcgcccacggcgucgccgucgccgccgaccucaaguccacccaggaggccaucaacaagaucaccaagaaccucaacucccucuccgagcucgaggucaagaaccuccagcgccucuccggcgccauggacgagcuccacaacgagauccucgagcucgacgagaaggucgacgaccuccgcgccgacaccaucuccucccagaucgagcucgccguccuccucuccaacgagggcaucaucaacuccgaggacgagcaccuccucgcccucgagcgcaagcucaagaagaugcucggccccuccgccgucgacaucggcaacggcugcuucgagaccaagcacaagugcaaccagaccugccucgaccgcaucgccgccggcaccuucaacgccggcgaguucucccuccccaccuucgacucccucaacaucaccgccgccucccucaacgacgacggccucgacaaccacaccauccuccucuacuacuccaccgccgccuccucccucgccgucacccucaugcucgccaucuucaucgucuacauggucucccgcgacaacgucuccugcuccaucugccucuga

SEQ ID NO: 122649 - RNA, 1755 nt, Artificial Sequence; identical to SEQ ID NO: 122462
  derived and/or modified CDS sequence (opt2) from hemagglutinin__InfluenzaB__AEO80108

SEQ ID NO: 122650 - RNA, 1758 nt, Artificial Sequence; identical to SEQ ID NO: 122550
  derived and/or modified CDS sequence (opt2) from hemagglutinin__InfluenzaB__AEO80145

SEQ ID NO: 122651 - RNA, 1758 nt, Artificial Sequence; identical to SEQ ID NO: 122609
  derived and/or modified CDS sequence (opt2) from hemagglutinin__InfluenzaB__AEO80154

SEQ ID NO: 122652 - RNA, 1758 nt, Artificial Sequence
  derived and/or modified CDS sequence (opt2) from hemagglutinin__InfluenzaB__AEO80183
augaaggccaucaucguccuccucauggucgucaccuccaacgccgaccgcaucugcaccggcaucaccuccuccaacuccccccacgucgucaagaccgccacccagggcgaggucaacgucaccggcgucaucccccucaccaccacccccaccaagucccacuucgccaaccucaagggcaccgagacccgcggcaagcucugccccaagugccucaacugcaccgaccucgacgucgcccucggccgccccaagugcaccggcaacauccccuccgcccgcgucuccauccuccacgagguccgccccgucaccuccggcugcuuccccaucaugcacgaccgcaccaagauccgccagcuccccaaccuccuccgcggcuacgagcacauccgccucuccacccacaacgucaucaacgccgagaacgcccccggcggccccuacaagaucggcaccuccggcuccugccccaacgucaccaacggcaacggcuucuucgccaccauggccugggccguccccaagaacgacaacaacaagaccgccaccaacucccucaccaucgagguccccuacaucugcaccgagggcgaggaccagaucaccgucuggggcuuccacuccgacaucgagacccagauggccaagcucuacggcgacuccaagccccagaaguucaccuccuccgccaacggcgucaccacccacuacgucucccagaucggcggcuuccccaaccagaccgaggacggcggccucccccaguccggccgcaucgucgucgacuacaugguccagaaguccggcaagaccggcaccaucaccuaccagcgcggcauccuccucccccagaaggucuggugcgccuccggccgcuccaaggucaucaagggcucccucccccucaucggcgaggccgacugccuccacgagaaguacggcggccucaacaaguccaagcccuacuacaccggcgagcacgccaaggccaucggcaacugccccaucugggucaagaccccccucaagcucgccaacggcaccaaguaccgcccccccgccaagcuccucaaggagcgcggcuucuucggcgccaucgccggcuuccucgagggcggcugggagggcaugaucgccggcuggcacggcuacaccucccacggcgcccacggcgucgccgucgccgccgaccucaaguccacccaggaggccaucaacaagaucaccaagaaccucaacucccucuccgagcucgaggucaagaaccuccagcgccucuccggcgccauggacgagcuccacaacgagauccucgagcucgacgagaaggucgacgaccuccgcgccgacaccaucuccucccagaucgagcucgccguccuccucuccaacgagggcaucaucaacuccgaggacgagcaccuccucgcccucgagcgcaagcucaagaagaugcucggccccuccgccgucgagaucggcaacggcugcuucgagaccaagcacaagugcaaccagaccugccucgaccgcaucgccgccggcaccuucgacgccggcgaguucucccuccccaccuucgacucccucaacaucaccgccgccucccucaacgacgacggccucgacaaccacaccauccuccucuacuacuccaccgccgccuccucccucgccgucacccucaugaucgccaucuucgucgucuacauggucucccgcgacaacgucuccugcuccaucugccucuga

SEQ ID NO: 122653 - RNA, 1758 nt, Artificial Sequence
  derived and/or modified CDS sequence (opt2) from hemagglutinin__InfluenzaB__AEO80194
augaaggccaucaucguccuccucauggucgucaccuccaacgccgaccgcaucugcaccggcaucaccuccuccaacuccccccacgucgucaagaccgccacccagggcgaggucaacgucaccggcgucaucccccucaccaccacccccaccaagucccacuucgccaaccucaagggcaccgagacccgcggcaagcucugccccaagugccucaacugcaccgaccucgacgucgcccucggccgccccaagugcaccggcaacauccccuccgcccgcgucuccauccuccacgagguccgccccgucaccuccggcugcuuccccaucaugcacgaccgcaccaagauccgccagcuccccaaccuccuccgcggcuacgagcacauccgccucuccacccacaacgucaucaacgccgagaacgcccccggcggccccuacaagaucggcaccuccggcuccugccccaacgucaccaacggcaacggcuucuucgccaccauggccugggccguccccaagaacgacaacaacaagaccgccaccaacucccucaccaucgagguccccuacaucugcaccgagggcgaggaccagaucaccgucuggggcuuccacuccgacaacgaggcccagauggccaagcucuacggcgacuccaagccccagaaguucaccuccuccgccaacggcgucaccacccacuacgucucccagaucggcggcuuccccaaccagaccgaggacggcggccucccccaguccggccgcaucgucgucgacuacaugguccagaaguccggcaagaccggcaccaucaccuaccagcgcggcauccuccucccccagaaggucuggugcgcccgcggccgcuccaaggucaucaagggcucccucccccucaucggcgaggccgacugccuccacgagaaguacggcggccucaacaaguccaagcccuacuacaccggcgagcacgccaaggccaucggcaacugccccaucugggucaagaccccccucaagcucgccaacggcaccaaguaccgcccccccgccaagcuccucaaggagcgcggcuucuucggcgccaucgccggcuuccucgagggcggcugggagggcaugaucgccggcuggcacggcuacaccucccacggcgcccacggcgucgccgucgccgccgaccucaaguccacccaggaggccaucaacaagaucaccaagaaccucaacucccucuccgagcucgaggucaagaaccuccagcgccucuccggcgccauggacgagcuccacaacgagauccucgagcucgacgagaaggucgacgaccuccgcgccgacaccaucuccucccagaucgagcucgccguccuccucuccaacgagggcaucaucaacuccgaggacgagcaccuccucgcccucgagcgcaagcucaagaagaugcucggccccuccgccgucgagaucggcaacggcugcuucgagaccaagcacaagugcaaccagaccugccucgaccgcaucgccgccggcaccuucgacgccggcgaguucucccuccccaccuucgacucccucaacaucaccgccgccucccucaacgacgacggccucgacaaccacaccauccuccucuacuacuccaccgccgccuccucccucgccgucacccucaugaucgccaucuucgucgucuacaugaucucccgcgacaacgucuccugcuccaucugccucuga

SEQ ID NO: 122654 - RNA, 1758 nt, Artificial Sequence; identical to SEQ ID NO: 122601
  derived and/or modified CDS sequence (opt2) from hemagglutinin__InfluenzaB__AEO80205

SEQ ID NO: 122655 - RNA, 1758 nt, Artificial Sequence; identical to SEQ ID NO: 122601
  derived and/or modified CDS sequence (opt2) from hemagglutinin__InfluenzaB__AEO80216

SEQ ID NO: 122656 - RNA, 1755 nt, Artificial Sequence
  derived and/or modified CDS sequence (opt2) from hemagglutinin__InfluenzaB__AEO80227
augaaggccaucaucguccuccucauggucgucaccuccaacgccgaccgcaucugcaccggcaucaccuccuccaacuccccccacgucgucaagaccgccacccagggcgaggucaacgucaccggcgucaucccccucaccaccacccccaccaaguccuacuucgccaaccucaagggcacccgcacccgcggcaagcucugccccgacugccucaacugcaccgaccucgacgucgcccucggccgccccaugugcgucggcaccacccccuccgccaaggccuccauccuccacgagguccgccccgucaccuccggcugcuuccccaucaugcacgaccgcaccaagauccgccagcucgccaaccuccuccgcggcuacgagaacauccgccucuccacccagaacgucaucgacgccgagaaggcccccggcggccccuaccgccucggcaccuccggcuccugccccaacgccaccuccaaguccggcuucuucgccaccauggccugggccguccccaaggacaacaacaagaacgccaccaacccccucaccgucgagguccccuacaucugcaccgagggcgaggaccagaucaccgucuggggcuuccacuccgacaacaagauccagaugaagaaccucuacggcgacuccaacccccagaaguucaccuccuccgccaacggcgucaccacccacuacgucucccagaucggcggcuuccccgaccagaccgaggacggcggccucccccaguccggccgcaucgucgucgacuacaugaugcagaagcccggcaagaccggcaccaucgucuaccagcgcggcguccuccucccccagaaggucuggugcgccuccggccgcuccaaggucaucaagggcucccucccccucaucggcgaggccgacugccuccacgagaaguacggcggccucaacaaguccaagcccuacuacaccggcgagcacgccaaggccaucggcaacugccccaucugggucaagaccccccucaagcucgccaacggcaccaaguaccgcccccccgccaagcuccucaaggagcgcggcuucuucggcgccaucgccggcuuccucgagggcggcugggagggcaugaucgccggcuggcacggcuacaccucccacggcgcccacggcgucgccgucgccgccgaccucaaguccacccaggaggccaucaacaagaucaccaagaaccucaacucccucuccgagcucgaggucaagaaccuccagcgccucuccggcgccauggacgagcuccacaacgagauccucgagcucgacgagaaggucgacgaccuccgcgccgacaccaucuccucccagaucgagcucgccguccuccucuccaacgagggcaucaucaacuccgaggacgagcaccuccucgcccucgagcgcaagcucaagaagaugcucggccccuccgccgucgacaucggcaacggcugcuucgagaccaagcacaagugcaaccagaccugccucgaccgcaucgccgccggcaccuucaacgccggcgaguucucccuccccaccuucgacucccucaacaucaccgccgccucccucaacgacgacggccucgacaaccacaccauccuccucuacuacuccaccgccgccuccucccucgccgucacccucaugcucgccaucuucaucgucuacauggucucccgcgacaacgucuccugcuccaucugccucuga

SEQ ID NO: 122657 - RNA, 1758 nt, Artificial Sequence; identical to SEQ ID NO: 122618
  derived and/or modified CDS sequence (opt2) from hemagglutinin__InfluenzaB__AEO80238

SEQ ID NO: 122658 - RNA, 1758 nt, Artificial Sequence
  derived and/or modified CDS sequence (opt2) from hemagglutinin__InfluenzaB__AEP20178
augaaggccaucaucguccuccucauggucgucaccuccaacgccgaccgcaucugcaccggcaucaccuccuccaacuccccccacgucgucaagaccgccacccagggcgaggucaacgucaccggcgucaucccccucaccaccacccccaccaagucccacuucuccaaccucaagggcaccgagacccgcggcaagcucugccccaagugccucaacugcaccgaccucgacgucgcccucggccgccccaagugcaccggcaacauccccuccgcccgcgucuccauccuccacgagguccgccccgucaccuccggcugcuuccccaucaugcacgaccgcaccaagauccgccagcuccccaaccuccuccgcggcuacgagcacauccgccucuccacccacaacgucaucaacgccgagaacgcccccggcggccccuacaagaucggcaccuccggcuccugccccaacgucaccaacggcaacggcuucuucgccaccauggccugggccguccccaagaacgacaacaacaagaccgccaccaacucccucaccaucgagguccccuacaucugcaccgagggcgaggaccagaucaccgucuggggcuuccacuccgacaacgagacccagauggccaagcucuacggcgacuccaagccccagaaguucaccuccuccgccaacggcgucaccacccacuacgucucccagaucggcggcuuccccaaccagaccgaggacggcggccucccccaguccggccgcaucgucgucgacuacaugguccagaaguccggcaagaccggcaccaucaccuaccagcgcggcauccuccucccccagaaggucuggugcgccuccggccgcuccaaggucaucaagggcucccucccccucaucggcgaggccgacugccuccacgagaaguacggcggccucaacaaguccaagcccuacuacaccggcgagcacgccaaggccaucggcaacugccccaucugggucaagaccccccucaagcucgccaacggcaccaaguaccgcccccccgccaagcuccucaaggagcgcggcuucuucggcgccaucgccggcuuccucgagggcggcugggagggcaugaucgccggcuggcacggcuacaccucccacggcgcccacggcgucgccgucgccgccgaccucaaguccacccaggaggccaucaacaagaucaccaagaaccucaacucccucuccgagcucgaggucaagaaccuccagcgccucuccggcgccauggacgagcuccacaacgagauccucgagcucgacgagaaggucgacgaccuccgcgccgacaccaucuccucccagaucgagcucgccguccuccucuccaacgagggcaucaucaacuccgaggacgagcaccuccucgcccucgagcgcaagcucaagaagaugcucggccccuccgccgucgagaucggcaacggcugcuucgagaccaagcacaagugcaaccagaccugccucgaccgcaucgccgccggcaccuucgacgccggcgaguucucccuccccaccuucgacucccucaacaucaccgccgccucccucaacgacgacggccucgacaaccacaccauccuccucuacuacuccaccgccgccuccucccucgccgucacccucaugaucgccaucuucgucgucuacauggucucccgcgacaacgucuccugcuccaucugccucuga

SEQ ID NO: 122659 - RNA, 1758 nt, Artificial Sequence
  derived and/or modified CDS sequence (opt2) from hemagglutinin__InfluenzaB__AEP20189
augaaggccaucaucguccuccucauggucgucaccuccaacgccgaccgcaucugcaccggcaucaccuccuccaacuccccccacgucgucaagaccgccacccagggcgaggucaacgucaccggcgucaucccccucaccaccacccccaccaagucccacuucgccaaccucaagggcaccgagacccgcggcaagcucugccccaagugccucaacugcaccgaccucgacgucgcccucggccgccccaagugcaccggcaacauccccuccgcccgcgucuccauccuccacgagguccgccccgucaccuccggcugcuuccccaucaugcacgaccgcaccaagauccgccagcuccccaaccuccuccgcggcuacgagcacauccgccucuccacccacaacgucaucaacgccgagaacgcccccggcggccccuacaagaucggcaccuccggcuccugccccaacgucaccaacggcaacggcuucuucgccaccauggccugggccguccccaagaacgacaacaacaagaccgccaccaacucccucaccaucgagguccccuacaucugcaccgagggcgaggaccagaucaccgucuggggcuuccacuccgacaacgagacccagauggccaagcucuacggcgacuccaagccccagaaguucaccuccuccgccaacggcgucaccacccacuacgucucccagaucggcggcuuccccaaccagaccgaggacggcggccucccccaguccggccgcaucgucgucgacuacaugguccagaaguccggcaagaccggcaccaucaccuaccagcgcggcauccuccucccccagaaggucuggugcgccuccggccgcuccaaggucaucaagggcucccucccccucaucggcgaggccgacugccuccacgagaaguacggcggccucaacaaguccaagcccuacuacaccggcgagcacgccaaggccaucggcaacugccccaucugggucaagaccccccucaagcucgccaacggcaccaaguaccgcccccccgccaagcuccucaaggagcgcggcuucuucggcgccaucgccggcuuccucgagggcggcugggagggcaugaucgccggcuggcacggcuacaccucccacggcgcccacggcgucgccgucgccgccgaccucaaguccacccaggaggccaucaacaagaucaccaagaaccucaacucccucuccgagcucgaggucaagaaccuccagcgccucuccggcgccauggacgagcuccacaacgagauccucgagcucgacgagaaggucgacgaccuccgcgccgacaccaucuccucccagaucgagcucgccguccuccucuccaacgagggcaucaucaacuccgaggacgagcaccuccucgcccucgagcgcaagcucaagaagaugcucggccccuccgccgucgagaucggcaacggcugcuucgagaccaagcacaagugcaaccagaccugccucgaccgcaucgccgccggcaccuucgacgccggcgaguucucccuccccaccuucgacucccucaacaucaccgccgccucccucaacgacgacggccucgacaaccacaccguccuccucuacuacuccaccgccgccuccucccucgccgucacccucaugaucgccaucuucgucgucuacauggucucccgcgacaacgucuccugcuccaucugccucuga

SEQ ID NO: 122660 - RNA, 1758 nt, Artificial Sequence; identical to SEQ ID NO: 122550
  derived and/or modified CDS sequence (opt2) from hemagglutinin__InfluenzaB__AEP20200

SEQ ID NO: 122661 - RNA, 1755 nt, Artificial Sequence; identical to SEQ ID NO: 122441
  derived and/or modified CDS sequence (opt2) from hemagglutinin__InfluenzaB__AEP20211

SEQ ID NO: 122662 - RNA, 1755 nt, Artificial Sequence
  derived and/or modified CDS sequence (opt2) from hemagglutinin__InfluenzaB__AEP20222
augaaggccaucaucguccuccucauggucgucaccuccaacgccgaccgcaucugcaccggcaucaccuccuccaacuccccccacgucgucaagaccgccacccagggcgaggucaacgucaccggcgccaucccccucaccaccacccccaccaagucccacuucgccaaccucaagggcaccaagacccgcggcaagcucugccccaccugcuucaacugcaccgaccucgacgucgcccucggccgccccaugugcgucggcaucacccccuccgccaaggccuccauccuccacgagguccgccccgucaccuccggcugcuuccccaucaugcacgaccgcaccaagauccgccagcuccccaaccuccuccgcggcuacgagaagauccgccucuccacccagaacgucaucgacgccgagaaggcccccggcggccccuaccgccucggcaccuccggcuccugccccaacgccaccuccaaguccggcuucuucgccaccauggccugggccgucccccgcgacaacaacaagaccgccaccaacccccucaccgucgagguccccaacaucugcaccaaggaggaggaccagaucaccgucuggggcuuccacuccgacaacaagacccagaugaagaaccucuacggcgaccccaacccccagaaguucaccuccuccgccaacggcaucaccacccacuacgucucccagaucggcggcuuccccgaccagaccgaggacggcggccucccccaguccggccgcaucgucgucgacuacaugguccagaagcccggcaagaccggcaccaucgucuaccagcgcggcauccuccucccccagaaggucuggugcgccuccggccgcuccaaggucaucaagggcucccucccccucaucggcgaggccgacugccuccacgagaaguacggcggccucaacaaguccaagcccuacuacaccggcgagcacgccaaggccaucggcaacugccccaucugggucaagaccccccucaagcucgccaacggcaccaaguaccgcccccccgccaagcuccucaaggagcgcggcuucuucggcgccaucgccggcuuccucgagggcggcugggagggcaugaucgccggcuggcacggcuacaccucccacggcgcccacggcgucgccgucgccgccgaccucaaguccacccaggaggccaucaacaagaucaccaagaaccucaacucccucuccgagcucgaggucaagaaccuccagcgccucuccggcgccauggacgagcuccacaacgagauccucgagcucgacgagaaggucgacgaccuccgcgccgacaccaucuccucccagaucgagcucgccguccuccucuccaacgagggcaucaucaacuccgaggacgagcaccuccucgcccucgagcgcaagcucaagaagaugcucggccccuccgccgucgacaucggcaacggcugcuucgagaccaagcacaagugcaaccagaccugccucgaccgcaucgccgccggcaccuucaacgccggcgaguucucccuccccaccuucgacucccucaacaucaccgccgccucccucaacgacgacggccucgacaaccacaccauccuccucuacuacuccaccgccgccuccucccucgccgucacccucaugaucgccaucuucaucgucuacaugaucucccgcgacaacgucuccugcuccaucugccucuga

SEQ ID NO: 122663 - RNA, 1755 nt, Artificial Sequence; identical to SEQ ID NO: 122547
  derived and/or modified CDS sequence (opt2) from hemagglutinin__InfluenzaB__AEP20233

SEQ ID NO: 122664 - RNA, 1755 nt, Artificial Sequence
  derived and/or modified CDS sequence (opt2) from hemagglutinin__InfluenzaB__AEP20244
augaaggccaucaucguccuccucauggucgucaccuccaacgccgaccgcaucugcaccggcaucaccuccuccaacuccccccacgucgucaagaccgccacccagggcgaggucaacgucaccggcgccaucccccucaccaccacccccaccaagucccacuucgccaaccucaagggcaccaagacccgcggcaagcucugccccaccugcuucaacugcaccgaccucgacgucgcccucggccgccccaugugcaugggcaucacccccuccgccaaggccuccauccuccacgagguccgccccgucaccuccggcugcuuccccaucaugcacgaccgcaccaagauccgccagcuccccaaccuccuccgcggcuacgagaagauccgccucuccacccagaacgucaucgacgccgagaaggcccccggcggccccuaccgccucggcaccuccggcuccugccccaacgccaccuccaaguccggcuucuucgccaccauggccugggccgucccccgcggcaacaacaagaccgccaccaacccccucaccgucgaggucccccacaucugcaccaaggaggaggaccagaucaccgucuggggcuuccacuccgacaacaagacccagaugaagaaccucuacggcgacuccaacccccagaaguucaccuccuccgccaacggcaucaccacccacuacgucucccagaucggcggcuuccccgaccagaccgaggacggcggccucccccaguccggccgcaucgucgucgacuacaugguccagaagcccggcaagaccggcaccaucgucuaccagcgcggcauccuccucccccagaaggucuggugcgccuccggccgcuccaaggucaucaagggcucccucccccucaucggcgaggccgacugccuccacgagaaguacggcggccucaacaaguccaagcccuacuacaccggcgagcacgccaaggccaucggcaacugccccaucugggucaagaccccccucaagcucgccaacggcaccaaguaccgcccccccgccaagcuccucaaggagcgcggcuucuucggcgccaucgccggcuuccucgagggcggcugggagggcaugaucgccggcuggcacggcuacaccucccacggcgcccacggcgucgccgucgccgccgaccucaaguccacccaggaggccaucaacaagaucaccaagaaccucaacucccucuccgagcucgaggucaagaaccuccagcgccucuccggcgccauggacgagcuccacaacgagauccucgagcucgacgagaaggucgacgaccuccgcgccgacaccaucuccucccagaucgagcucgccguccuccucuccaacgagggcaucaucaacuccgaggacgagcaccuccucgcccucgagcgcaagcucaagaagaugcucggccccuccgccgucgacaucggcaacggcugcuucgagaccaagcacaagugcaaccagaccugccucgaccgcaucgccgccggcaccuucaacgccggcgaguucucccuccccaccuucgacucccucaacaucaccgccgccucccucaacgacgacggccucgacaaccacaccauccuccucuacuacuccaccgccgccuccucccucgccgucacccucaugaucgccaucuucaucgucuacaugaucucccgcgacaacgucuccugcuccaucugccucuga

SEQ ID NO: 122665 - RNA, 1758 nt, Artificial Sequence; identical to SEQ ID NO: 122455
  derived and/or modified CDS sequence (opt2) from hemagglutinin__InfluenzaB__AEP20255

SEQ ID NO: 122666 - RNA, 1758 nt, Artificial Sequence
  derived and/or modified CDS sequence (opt2) from hemagglutinin__InfluenzaB__AEP20277
augaaggccaucaucguccuccucauggucgucaccuccaacgccgaccgcaucugcaccggcaucaccuccuccaacuccccccacgucgucaagaccgccacccagggcgaggucaacgucaccggcgucaucccccucaccaccacccccaccaagucccacuucgccaaccucaagggcaccaagacccgcggcaagcucugccccaagugccucaacugcaccgaccucgacgucgcccucggccgccccaagugcaccggcaacauccccuccgccgaggucuccauccuccacgagguccgccccgucaccuccggcugcuuccccaucaugcacgaccgcaccaagauccgccagcuccccaaccuccuccgcggcuacgagcacauccgccucuccacccacaacgucaucaacgccgagaaggcccccggcggccccuacaagaucggcaccuccggcuccugccccaacgucaccaacggcaacggcuucuucgccaccauggccugggccguccccaagaacgacaacaacaagaccgccaccaacucccucaccaucgagguccccuacaucugcaccgagggcgaggaccagaucaccgucuggggcuuccacuccgacaacgagacccagauggccaagcucuacggcgacuccaagccccagaaguucaccuccuccgccaacggcgucaccacccacuacgucucccagaucggcggcuuccccaaccagaccgaggacggcggccucccccaguccggccgcaucgucgucgacuacaugguccagaaguccggcaagaccggcaccaucaccuaccagcgcggcauccuccucccccagaaggucuggugcgccuccggccgcuccaaggucaucaagggcucccucccccucaucggcgaggccgacugccuccacgagaaguacggcggccucaacaaguccaagcccuacuacaccggcgagcacgccaaggccaucggcaacugccccaucugggucaagaccccccucaagcucgccaacggcaccaaguaccgcccccccgccaagcuccucaaggagcgcggcuucuucggcgccaucgccggcuuccucgagggcggcugggagggcaugaucgccggcuggcacggcuacaccucccacggcgcccacggcgucgccgucgccgccgaccucaaguccacccaggaggccaucaacaagaucaccaagaaccucaacucccucuccgagcucgaggucaagaaccuccagcgccucuccggcgccauggacgagcuccacaacgagauccucgagcucgacgagaaggucgacgaccuccgcgccgacaccaucuccucccagaucgagcucgccguccuccucuccaacgagggcaucaucaacuccgaggacgagcaccuccucgcccucgagcgcaagcucaagaagaugcucggccccuccgccgucgagaucggcaacggcugcuucgagaccaagcacaagugcaaccagaccugccucgacaagaucgccgccggcaccuucgacgccggcgaguucucccuccccaccuucgacucccucaacaucaccgccgccucccucaacgacgacggccucgacaaccacaccauccuccucuacuacuccaccgccgccuccucccucgccgucacccucaugaucgccaucuucgucgucuacauggucucccgcgacaacgucuccugcuccaucugccucuga

SEQ ID NO: 122667 - RNA, 1755 nt, Artificial Sequence
  derived and/or modified CDS sequence (opt2) from hemagglutinin__InfluenzaB__AEP20299
augaaggccaucaucguccuccucauggucgucaccuccaacgccgaccgcaucugcaccggcaucaccuccuccaacuccccccacgucgucaagaccgccacccagggcgaggucaacgucaccggcgucaucccccucaccaccacccccaccaaguccuacuucgccaaccucaagggcacccgcacccgcggcaagcucugccccgacugccucaacugcaccgaccucgacgucgcccucggccgccccaugugcgucggcaccacccccuccgccaaggccuccauccuccacgagguccgccccgucaccuccggcugcuuccccaucaugcacgaccgcaccaagauccgccagcucgccaaccuccuccgcggcuacgagaacauccgccucuccacccagaacgucaucgacgccgagaaggcccccggcggccccuaccgccucggcaccuccggcuccugccccaacgccaccuccaaguccggcuucuucgccaccauggccugggccguccccaagaacaacaacaagaacgccaccaacccccucaccgucgagguccccuacaucugcaccgagggcgaggaccagaucaccgucuggggcuuccacuccgacaacaagacccagaugaagaaccucuacggcgacuccaacccccagaaguucaccuccuccgccaacggcgucaccacccacuacgucucccagaucggcggcuuccccgaccagaccgaggacggcggccucccccaguccggccgcaucgucgucgacuacaugaugcagaagcccggcaagaccggcaccaucgucuaccagcgcggcguccuccucccccagaaggucuggugcgccuccggccgcuccaaggucaucaagggcucccucccccucaucggcgaggccgacugccuccacgagaaguacggcggccucaacaaguccaagcccuacuacaccggcgagcacgccaaggccaucggcaacugccccaucugggucaagaccccccucaagcucgccaacggcaccaaguaccgcccccccgccaagcuccucaaggagcgcggcuucuucggcgccaucgccggcuuccucgagggcggcugggagggcaugaucgccggcuggcacggcuacaccucccacggcgcccacggcgucgccgucgccgccgaccucaaguccacccaggaggccaucaacaagaucaccaagaaccucaacucccucuccgagcucgaggucaagaaccuccagcgccucuccggcgccauggacgagcuccacaacgagauccucgagcucgacgagaaggucgacgaccuccgcgccgacaccaucuccucccagaucgagcucgccguccuccucuccaacgagggcaucaucaacuccgaggacgagcaccuccucgcccucgagcgcaagcucaagaagaugcucggccccuccgccgucgacaucggcaacggcugcuucgagaccaagcacaagugcaaccagaccugccucgaccgcaucgccgccggcaccuucaacgccggcgaguucucccuccccaccuucgacucccucaacaucaccgccgccucccucaacgacgacggccucgacaaccacaccauccuccucuacuacuccaccgccgccuccucccucgccgucacccucaugcucgccaucuucaucgucuacauggucucccgcgacaacgucuccugcuccaucugccucuga

SEQ ID NO: 122668 - RNA, 1755 nt, Artificial Sequence
  derived and/or modified CDS sequence (opt2) from hemagglutinin__InfluenzaB__AEP20310
augaaggccaucaucguccuccucauggucgucaccuccaacgccgaccgcaucugcaccggcaucaccuccuccaacuccccccacgucgucaagaccgccacccagggcgaggucaacgucaccggcgucaucccccucaccaccacccccaccaaguccuacuucgccaaccucaagggcacccgcacccgcggcaagcucugccccgacugccucaacugcaccgaccucgacgucgcccucggccgccccaugugcgucggcaccacccccuccgccaaggccuccauccuccacgagguccgccccgucaccuccggcugcuuccccaucaugcacgaccgcaccaagauccgccagcuccccaaccuccuccgcggcuacgagaacauccgccucuccacccagaacgucaucgacgccgagaaggcccccggcggccccuaccgccucggcaccuccggcuccugccccaacgccaccuccaaguccggcuucuucgccaccauggccugggccguccccaaggacaacaacaagaacgccaccaacccccucaccgucgagguccccuacaucugcaccgagggcgaggaccagaucaccgucuggggcuuccacuccgacaacaagacccagaugaagaaccucuacggcgacuccaacccccagaaguucaccuccuccgccaacggcgucaccgcccacuacgucucccagaucggcggcuuccccgaccagaccgaggacggcggccucccccaguccggccgcaucgucgucgacuacaugaugcagaagcccggcaagaccggcaccaucgucuaccagcgcggcguccuccucccccagaaggucuggugcgccuccggccgcuccaaggucaucaagggcucccucccccucaucggcgaggccgacugccuccacgagaaguacggcggccucaacaaguccaagcccuacuacaccggcgagcacgccaaggccaucggcaacugccccaucugggucaagaccccccucaagcucgccaacggcaccaaguaccgcccccccgccaagcuccucaaggagcgcggcuucuucggcgccaucgccggcuuccucgagggcggcugggagggcaugaucgccggcuggcacggcuacaccucccacggcgcccacggcgucgccgucgccgccgaccucaaguccacccaggaggccaucaacaagaucaccaagaaccucaacucccucuccgagcucgaggucaagaaccuccagcgccucuccggcgccauggacgagcuccacaacgagauccucgagcucgacgagaaggucgacgaccuccgcgccgacaccaucuccucccagaucgagcucgccguccuccucuccaacgagggcaucaucaacuccgaggacgagcaccuccucgcccucgagcgcaagcucaagaagaugcucggccccuccgccgucgacaucggcaacggcugcuucgagaccaagcacaagugcaaccagaccugccucgaccgcaucgccgccggcaccuucaacgccggcgaguucucccuccccaccuucgacucccucaacaucaccgccgccucccucaacgacgacggccucgacaaccacaccauccuccucuacuacuccaccgccgccuccucccucgccgucacccucaugcucgccaucuucaucgucuacauggucucccgcgacaacgucuccugcuccaucugccucuga

SEQ ID NO: 122669 - RNA, 1758 nt, Artificial Sequence
  derived and/or modified CDS sequence (opt2) from hemagglutinin__InfluenzaB__AEP20332
augaaggccaucaucguccuccucauggucgucaccuccaacgccgaccgcaucugcaccggcaucaccuccuccaacuccccccacgucgucaagaccgccacccagggcgaggucaacgucaccggcgucaucccccucaccaccacccccaccaagucccacuucgccaaccucaagggcaccaagacccgcggcaagcucugccccaagugccucaacugcaccgaccucgacgucgcccucggccgccccaagugcaccggcaacauccccuccgccgaggucuccauccuccacgagguccgccccgucaccuccggcugcuuccccaucaugcacgaccgcaccaagauccgccagcuccccaaccuccuccgcggcuacgagcacauccgccucuccacccacaacgucaucaacgccgagaaggcccccggcggccccuacaagaucggcaccuccggcuccugccccaacgucaccaacggcaacggcuucuucgccaccauggccugggccguccccaagaacgacaacaacaagaccgccaccaacccccucaccaucgagguccccuacaucugcaccgagggcgaggaccagaucaccgucuggggcuuccacuccgacaacgagacccagauggccaagcucuacggcgacuccaagccccagaaguucaccuccuccgccaacggcgucaccacccacuacgucucccagaucggcggcuuccccaaccagaccgaggacggcggccucccccaguccggccgcaucgucgucgacuacaugguccagaaguccggcaagaccggcaccaucaccuaccagcgcggcauccuccucccccagaaggucuggugcgccuccggccgcuccaaggucaucaagggcucccucccccucaucggcgaggccgacugccuccacgagaaguacggcggccucaacaaguccaagcccuacuacaccggcgagcacgccaaggccaucggcaacugccccaucugggucaagaccccccucaagcucgccaacggcaccaaguaccgcccccccgccaagcuccucaaggagcgcggcuucuucggcgccaucgccggcuuccucgagggcggcugggagggcaugaucgccggcuggcacggcuacaccucccacggcgcccacggcgucgccgucgccgccgaccucaaguccacccaggaggccaucaacaagaucaccaagaaccucaacucccucuccgagcucgaggucaagaaccuccagcgccucuccggcgccauggacgagcuccacaacgagauccucgagcucgacgagaaggucgacgaccuccgcgccgacaccaucuccucccagaucgagcucgccguccuccucuccaacgagggcaucaucaacuccgaggacgagcaccuccucgcccucgagcgcaagcucaagaagaugcucggccccuccgccgucgagaucggcaacggcugcuucgagaccaagcacaagugcaaccagaccugccucgaccgcaucgccgccggcaccuucgacgccggcgaguucucccuccccaccuucgacucccucaacaucaccgccgccucccucaacgacgacggccucgacaaccacaccauccuccucuacuacuccaccgccgccuccucccucgccgucacccucaugaucgccaucuucgucgucuacauggucucccgcgacaacgucuccugcuccaucugccucuga

SEQ ID NO: 122670 - RNA, 1755 nt, Artificial Sequence; identical to SEQ ID NO: 122462
  derived and/or modified CDS sequence (opt2) from hemagglutinin__InfluenzaB__AEP20343

SEQ ID NO: 122671 - RNA, 1755 nt, Artificial Sequence; identical to SEQ ID NO: 122462
  derived and/or modified CDS sequence (opt2) from hemagglutinin__InfluenzaB__AEP20354

SEQ ID NO: 122672 - RNA, 1755 nt, Artificial Sequence; identical to SEQ ID NO: 122462
  derived and/or modified CDS sequence (opt2) from hemagglutinin__InfluenzaB__AEP20365

SEQ ID NO: 122673 - RNA, 1755 nt, Artificial Sequence; identical to SEQ ID NO: 122462
  derived and/or modified CDS sequence (opt2) from hemagglutinin__InfluenzaB__AEP20376

SEQ ID NO: 122674 - RNA, 1758 nt, Artificial Sequence
  derived and/or modified CDS sequence (opt2) from hemagglutinin__InfluenzaB__AEP20398
augaaggccaucaucguccuccucauggucgucaccuccaacgccgaccgcaucugcaccggcaucaccuccuccaacuccccccacgucgucaagaccgccacccagggcgaggucaacgucaccggcgucaucccccucaccaccacccccaccaagucccacuucgccaaccucaagggcaccaagacccgcggcaagcucugccccaagugccucaacugcaccgaccucgacgucgcccucggccgccccaagugcaccggcaacauccccuccgccgaggucuccauccuccacgagguccgccccgucaccuccggcugcuuccccaucaugcacgaccgcaccaagauccgccagcuccccaaccuccuccgcggcuacgagcacauccgccucuccacccacaacgucaucaacgccgagaaggcccccggcggccccuacaagaucggcaccuccggcuccugccccaacgucaccaacggcaacggcuucuucgccaccauggccugggccguccccaagaacgacaacaacaagaccgccaccaacucccucaccaucgagguccccuacaucugcaccgagggcgaggaccagaucaccaucuggggcuuccacuccgacaacgagacccagauggccaagcucuacggcgacuccaagccccagaaguucaccuccuccgccaacggcgucaccacccacuacgucucccagaucggcggcuuccccaaccagaccgaggacggcggccucccccaguccggccgcaucgucgucgacuacaugguccagaaguccggcaagaccggcaccaucaccuaccagcgcggcauccuccucccccagaaggucuggugcgccuccggccgcuccaaggucaucaagggcucccucccccucaucggcgaggccgacugccuccacgagaaguacggcggccucaacaaguccaagcccuacuacaccggcgagcacgccaaggccaucggcaacugccccaucugggucaagaccccccucaagcucgccaacggcaccaaguaccgcccccccgccaagcuccucaaggagcgcggcuucuucggcgccaucgccggcuuccucgagggcggcugggagggcaugaucgccggcuggcacggcuacaccucccacggcgcccacggcgucgccgucgccgccgaccucaaguccacccaggaggccaucaacaagaucaccaagaaccucaacucccucuccgagcucgaggucaagaaccuccagcgccucuccggcgccauggacgagcuccacaacgagauccucgagcucgacgagaaggucgacgaccuccgcgccgacaccaucuccucccagaucgagcucgccguccuccucuccaacgagggcaucaucaacuccgaggacgagcaccuccucgcccucgagcgcaagcucaagaagaugcucggccccuccgccgucgagaucggcaacggcugcuucgagaccaagcacaagugcaaccagaccugccucgaccgcaucgccgccggcaccuucgacgccggcgaguucucccuccccaccuucgacucccucaacaucaccgccgccucccucaacgacgacggccucgacaaccacaccauccuccucuacuacuccaccgccgccuccucccucgccgucacccucaugaucgccaucuucgucgucuacauggucucccgcgacaacgucuccugcuccaucugccucuga

SEQ ID NO: 122675 - RNA, 1758 nt, Artificial Sequence; identical to SEQ ID NO: 122644
  derived and/or modified CDS sequence (opt2) from hemagglutinin__InfluenzaB__AEP20409

SEQ ID NO: 122676 - RNA, 1758 nt, Artificial Sequence; identical to SEQ ID NO: 122644
  derived and/or modified CDS sequence (opt2) from hemagglutinin__InfluenzaB__AEP20420

SEQ ID NO: 122677 - RNA, 1758 nt, Artificial Sequence; identical to SEQ ID NO: 122644
  derived and/or modified CDS sequence (opt2) from hemagglutinin__InfluenzaB__AEP20431

SEQ ID NO: 122678 - RNA, 1758 nt, Artificial Sequence; identical to SEQ ID NO: 122644
  derived and/or modified CDS sequence (opt2) from hemagglutinin__InfluenzaB__AEP20442

SEQ ID NO: 122679 - RNA, 1758 nt, Artificial Sequence; identical to SEQ ID NO: 122644
  derived and/or modified CDS sequence (opt2) from hemagglutinin__InfluenzaB__AEP20453

SEQ ID NO: 122680 - RNA, 1755 nt, Artificial Sequence; identical to SEQ ID NO: 122462
  derived and/or modified CDS sequence (opt2) from hemagglutinin__InfluenzaB__AEQ39027

SEQ ID NO: 122681 - RNA, 1758 nt, Artificial Sequence
  derived and/or modified CDS sequence (opt2) from hemagglutinin__InfluenzaB__AEQ39260
augaaggccaucaucguccuccucauggucgucaccuccaacgccgaccgcaucugcaccggcaucaccuccuccaacuccccccacgucgucaagaccgccacccagggcgaggucaacgucaccggcgucaucccccucaccaccacccccaccaagucccacuucgccaaccucaagggcaccgagacccgcggcaagcucugccccaagugccucaacugcaccgaccucgacgucgcccucggccgccccaagugcaccggcaagauccccuccgcccgcgucuccauccuccacgagguccgccccgucaccuccggcugcuuccccaucaugcacgaccgcaccaagauccgccagcuccccaaccuccuccgcggcuacgagcacauccgccucuccacccacaacgucaucaacgccgagaacgcccccggcggccccuacaagaucggcaccuccggcuccugccccaacgucaccaacggcaacggcuucuucgccaccauggccugggccguccccaagaacgacaagaacaagaccgccaccaacccccucaccaucgagguccccuacaucugcaccgagggcgaggaccagaucaccgucuggggcuuccacuccgacaacgagacccagauggccaagcucuacggcgacuccaagccccagaaguucaccuccuccgccaacggcgucaccacccacuacgucucccagaucggcggcuuccccaaccagaccgaggacggcggccucccccaguccggccgcaucgucgucgacuacaugguccagaaguccggcaagaccggcaccaucaccuaccagcgcggcauccuccucccccagaaggucuggugcgccuccggccgcuccaaggucaucaagggcucccucccccucaucggcgaggccgacugccuccacgagaaguacggcggccucaacaaguccaagcccuacuacaccggcgagcacgccaaggccaucggcaacugccccaucugggucaagaccccccucaagcucgccaacggcaccaaguaccgcccccccgccaagcuccucaaggagcgcggcuucuucggcgccaucgccggcuuccucgagggcggcugggagggcaugaucgccggcuggcacggcuacaccucccacggcgcccacggcgucgccgucgccgccgaccucaaguccacccaggaggccaucaacaagaucaccaagaaccucaacucccucuccgagcucgaggucaagaaccuccagcgccucuccggcgccauggacgagcuccacaacgagauccucgagcucgacgagaaggucgacgaccuccgcgccgacaccaucuccucccagaucgagcucgccguccuccucuccaacgagggcaucaucaacuccgaggacgagcaccuccucgcccucgagcgcaagcucaagaagaugcucggccccuccgccgucgagaucggcaacggcugcuucgagaccaagcacaagugcaaccagaccugccucgaccgcaucgccgccggcaccuucgacgccggcgaguucucccuccccaccuucgacucccucaacaucaccgccgccucccucaacgacgacggccucgacaaccacaccauccuccucuacuacuccaccgccgccuccucccucgccgucacccucaugaucgccaucuucgucgucuacauggucucccgcgacaacgucuccugcuccaucugccucuga

SEQ ID NO: 122682 - RNA, 1758 nt, Artificial Sequence; identical to SEQ ID NO: 122681
  derived and/or modified CDS sequence (opt2) from hemagglutinin__InfluenzaB__AEQ39271

SEQ ID NO: 122683 - RNA, 1758 nt, Artificial Sequence
  derived and/or modified CDS sequence (opt2) from hemagglutinin__InfluenzaB__AEQ39282
augaaggccaucaucguccuccucauggucgucaccuccaacgccgaccgcaucugcaccggcaucaccuccuccaacuccccccacgucgucaagaccgccacccagggcgaggucaacgucaccggcgucaucccccucaccaccacccccaccaagucccacuucgccaaccucaagggcaccgagacccgcggcaagcucugccccaagugccucaacugcaccgaccucgacgucgcccucggccgccccaagugcaccggcaagauccccuccgcccgcgucuccauccuccacgagguccgccccgucaccuccggcugcuuccccaucaugcacgaccgcaccaagauccgccagcuccccaaccuccuccgcggcuacgagcacauccgccucuccacccacaacgucaucaacgccgagaacgcccccggcggccccuacaagaucggcaccuccggcuccugccccaacgucaccaacggcaacggcuucuucgccaccauggccugggccguccccaagaacgacaagaacaagaccgccaccaacccccucaccaucgagguccccuacaucugcaccgagggcgaggaccagaucaccgucuggggcuuccacuccgacaacgagacccagauggccaagcucuacggcgacuccaagccccagaaguucaccuccuccgccaacggcgucaccacccacuacgucucccagaucggcggcuuccccaaccagaccgaggacggcggccucccccaguccggccgcaucgucgucgacuacaugguccagaaguccggcaagaccggcaccaucaccuaccagcgcggcauccuccucccccagaaggucuggugcgccuccggccgcuccaaggucaucaagggcucccucccccucaucggcgaggccgacugccuccacgagaaguacggcggccucaacaaguccaagcccuacuacaccggcgagcacgccaaggccaucggcaacugccccaucugggucaagaccccccucaagcucgccaacggcaccaaguaccgcccccccgccaagcuccucaaggagcgcggcuucuucggcgccaucgccggcuuccucgagggcggcugggagggcaugaucgccggcuggcacggcuacaccucccacggcgcccacggcgucgccgucgccgccgaccucaaguccacccaggaggccaucaacaagaucaccaagaaccucaacucccucuccgagcucgaggucaagaaccuccagcgccucuccggcgccauggacgagcuccacaacgagauccucgagcucgacgagaaggucgacgaccuccgcgccgacaccaucuccucccagaucgagcucgccguccuccucuccaacgagggcaucaucaacuccgaggacgagcaccuccucgcccucgagcgcaagcucaagaagaugcucggccccuccgccgucgagaucggcaacggcugcuucgagaccaagcacaagugcaaccagaccugccucgaccgcaucgccgccggcaccuucgacgccggcgaguucucccuccccaccuucgacucccucaacaucaccgccgccucccucaacggcgacgagcucgacaaccacaccauccuccucuacuacuccaccgccgccuccucccucgccgucacccucaugaucgccaucuucgucgucuacauggucucccgcgacaacgucuccugcuccaucugccucuga

SEQ ID NO: 122684 - RNA, 1758 nt, Artificial Sequence
  derived and/or modified CDS sequence (opt2) from hemagglutinin__InfluenzaB__AEQ39315
augaaggccaucaucguccuccucauggucgucaccuccaacgccgaccgcaucugcaccggcaucaccuccuccaacuccccccacgucgucaagaccgccacccagggcgaggucaacgucaccggcgucaucccccucaccaccacccccaccaagucccacuucgccaaccucaagggcaccgagacccgcggcaagcucugccccaagugccucaacugcaccgaccucgacgucgcccucggccgccccaagugcaccggcaagauccccuccgcccgcgucuccauccuccacgagguccgccccgucaccuccggcugcuuccccaucaugcacgaccgcaccaagauccgccagcuccccaaccuccuccgcggcuacgagcacauccgccucuccacccacaacgucaucaacgccgagaacgcccccggcggccccuacaagaucggcaccuccggcuccugccccaacgucaccaacggcaacggcuucuucgccaccauggccugggccguccccaagaacgacaagaacaagaccgccaccaacccccucaccaucgagguccccuacaucugcaccgagggcgaggaccagaucaccgucuggggcuuccacuccgacaacgagacccagauggccaagcucuacggcgacuccaagccccagaaguucaccuccuccgccaacggcgucaccacccacuacgucucccagaucggcggcuuccccaaccagaccgaggacggcggccucccccaguccggccgcaucgucgucgacuacaugguccagaaguccggcaagaccggcaccaucaccuaccagcgcggcauccuccucccccagaaggucuggugcgccuccggccgcuccaaggucaucaagggcucccucccccucaucggcgaggccgacugccuccacgagaaguacggcggccucaacaaguccaagcccuacuacaccggcgagcacgccaaggccaucggcaacugccccaucugggucaagaccccccucaagcucgccaacggcaccaaguaccgcccccccgccaagcuccucaaggagcgcggcuucuucggcgccaucgccggcuuccucgagggcggcugggagggcaugaucgccggcuggcacggcuacaccucccacggcgcccacggcgucgccgucgccgccgaccucaaguccacccaggaggccaucaacaagaucaccaagaaccucaacucccucuccgagcucgaggucaagaaccuccagcgccucuccggcgccauggacgagcuccacaacgagauccucgagcucgacgagaaggucgacgaccuccgcgccgacaccaucuccucccagaucgagcucgccguccuccucuccaacgagggcaucaucaacuccgaggacgagcaccuccucgcccucgagcgcaagcucaagaagaugcucggccccuccgccgucgagaucggcaacggcugcuucgagaccaagcacaagugcaaccagaccugccucgaccgcaucgccgccggcaccuucgacgccggcgaguucucccuccccaccuucgacucccucaacaucaccgccgccucccucaacggcgacggccucgacaaccacaccauccuccucuacuacuccaccgccgccuccucccucgccgucacccucaugaucgccaucuucgucgucuacauggucucccgcgacaacgucuccugcuccaucugccucuga

SEQ ID NO: 122685 - RNA, 1758 nt, Artificial Sequence; identical to SEQ ID NO: 122684
  derived and/or modified CDS sequence (opt2) from hemagglutinin__InfluenzaB__AEQ39326

SEQ ID NO: 122686 - RNA, 1758 nt, Artificial Sequence
  derived and/or modified CDS sequence (opt2) from hemagglutinin__InfluenzaB__AEQ39337
augaaggccaucaucguccuccucauggucgucaccuccaacgccgaccgcaucugcaccggcaucaccuccuccaacuccccccacgucgucaagaccgccacccagggcgaggucaacgucaccggcgucaucccccucaccaccacccccaccaagucccacuucgccaaccucaagggcaccgagacccgcggcaagcucugccccaagugccucaacugcaccgaccucgacgucgcccucggccgccccaagugcaccggcaagauccccuccgcccgcgucuccauccuccacgagguccgccccgucaccuccggcugcuuccccaucaugcacgaccgcaccaagauccgccagcuccccaaccuccuccgcggcuacgagcacauccgccucuccacccacaacgucaucaacgccggcaacgcccccggcggccccuacaagaucggcaccuccggcuccugccccaacgucaccaacggcaacggcuucuucgccaccauggccugggccguccccaagaacgacaagaacaagaccgccaccaacccccucaccaucgagguccccuacaucugcaccgagggcgaggaccagaucaccgucuggggcuuccacuccgacaacgagacccagauggccaagcucuacggcgacuccaagccccagaaguucaccuccuccgccaacggcgucaccacccacuacgucucccagaucggcggcuuccccaaccagaccgaggacggcggccucccccaguccggccgcaucgucgucgacuacaugguccagaaguccggcaagaccggcaccaucaccuaccagcgcggcauccuccucccccagaaggucuggugcgccuccggccgcuccaaggucaucaagggcucccucccccucaucggcgaggccgacugccuccacgagaaguacggcggccucaacaaguccaagcccuacuacaccggcgagcacgccaaggccaucggcaacugccccaucugggucaagaagccccucaagcucgccaacggcaccaaguaccgcccccccgccaagcuccucaaggagcgcggcuucuucggcgccaucgccggcuuccucgagggcggcugggagggcaugaucgccggcuggcacggcuacaccucccacggcgcccacggcgucgccgucgccgccgaccucaaguccacccaggaggccaucaacaagaucaccaagaaccucaacucccucuccgagcucgaggucaagaaccuccagcgccucuccggcgccauggacgagcuccacaacgagauccucgagcucgacgagaaggucgacgaccuccgcgccgacaccaucuccucccagaucgagcucgccguccuccucuccaacgagggcaucaucaacuccgaggacgagcaccuccucgcccucgagcgcaagcucaagaagaugcucggccccuccgccgucgagaucggcaacggcugcuucgagaccaagcacaagugcaaccagaccugccucgaccgcaucgccgccggcaccuucgacgccggcgaguucucccuccccaccuucgacucccucaacaucaccgccgccucccucaacgacgacggccucgacaaccacaccauccuccucuacuacuccaccgccgccuccucccucgccgucacccucaugaucgccaucuucgucgucuacauggucucccgcgacaacgucuccugcuccaucugccucuga

SEQ ID NO: 122687 - RNA, 1758 nt, Artificial Sequence
  derived and/or modified CDS sequence (opt2) from hemagglutinin__InfluenzaB__AEQ39348
augaaggccaucaucguccuccucauggucgucaccuccaacgccgaccgcaucugcaccggcaucaccuccuccaacuccccccacgucgucaagaccgccacccagggcgaggucaacgucaccggcgucaucccccucaccaccacccccaccaagucccacuucgccaaccucaagggcaccgagacccgcggcaagcucugccccaagugccucaacugcaccgaccucgacgucgcccucggccgccccaagugcaccggcaagauccccuccgcccgcgucuccauccuccacgagguccgccccgucaccuccggcugcuuccccaucaugcacgaccgcaccaagauccgccagcuccccaaccuccuccgcggcuacgagcacauccgccucuccacccacaacgucaucaacgccgagaacgcccccggcggccccuacaagaucggcaccuccggcuccugccccaacgucaccaacggcaacggcuucuucgccaccauggccugggccguccccaagaacgacaagaacaagaccgccaccaacccccucaccaucgagguccccuacaucugcaccgagggcgaggaccagaucaccgucuggggcuuccacuccgacaacgagacccagauggccaagcucuacggcgacuccaagccccagaaguucaccuccuccgccaacggcgucaccacccacuacgucucccagaucggcggcuuccccaaccagaccgaggacggcggccucccccaguccggccgcaucgucgucgacuacaugguccagaaguccggcaagaccggcaccaucaccuaccagcgcggcauccuccucccccagaaggucuggugcgccuccggccgcuccaaggucaucaagggcucccucccccucaucggcgaggccgacugccuccacgagaaguacggcggccucaacaaguccaagcccuacuacaccggcgagcacgccaaggccaucggcaacugccccaucugggucaagaccccccucaagcucgccaacggcaccaaguaccgcccccccgccaagcuccucaaggagcgcggcuucuucggcgccaucgccggcuuccucgagggcggcugggagggcaugaucgccggcuggcacggcuacaccucccacggcgcccacggcgucgccgucgccgccgaccucaaguccacccaggaggccaucaacaagaucaccaagaaccucaacucccucuccgagcucgaggucaagaaccuccagcgccucuccggcgccauggacgagcuccacaacgagauccucgagcucgacgagaaggucgacgaccuccgcgccgacaccaucuccucccagaucgagcucgccguccuccucuccaacgagggcaucaucaacuccgaggacgagcaccuccucgcccucgagcgcaagcucaagaagaugcucggccccuccgccgucgagaucggcaacggcugcuucgagaccaagcacaagugcaaccagaccugccucgaccgcaucgccgccggcaccuucgacgccggcgaguucucccuccccaccuucgacucccucaacaucaccgccgccucccucaacgacgacggccucgacaaccacaucauccuccucuacuacuccaccgccgccuccucccucgccgucacccucaugaucgccaucuucgucgucuacauggucucccgcgacaacgucuccugcuccaucugccucuga

SEQ ID NO: 122688 - RNA, 1758 nt, Artificial Sequence; identical to SEQ ID NO: 122684
  derived and/or modified CDS sequence (opt2) from hemagglutinin__InfluenzaB__AEQ39359

SEQ ID NO: 122689 - RNA, 1758 nt, Artificial Sequence
  derived and/or modified CDS sequence (opt2) from hemagglutinin__InfluenzaB__AEQ39370
augaaggccaucaucguccuccucauggucgucaccuccaacgccgaccgcaucugcaccggcaucaccuccuccaacuccccccacgucgucaagaccgccacccagggcgaggucaacgucaccggcgucaucccccucaccaccacccccaccaagucccacuucgccaaccucaagggcaccgagacccgcggcaagcucugccccaagugccucaacugcaccgaccucgacgucgcccucggccgccccaagugcaccggcaacauccccuccgcccgcgucuccauccuccacgagguccgccccgucaccuccggcugcuuccccaucaugcacgaccgcaccaagauccgccagcuccccaaccuccuccgcggcuacgagcacauccgccucuccacccacaacgucgucaacgccgagaacgcccccggcggccccuacaagaucggcaccuccggcuccugccccaacgucaccaacggcaacggcuucuucgccaccauggccugggccguccccaagaacgacaacaacaagaccgccaccaacucccucaccaucgagguccccuacaucugcaccgagggcgaggaccagaucaccgucuggggcuuccacuccgacaacgagacccagauggccaagcucuacggcgacuccaagccccagaaguucaccuccuccgccaacggcgucaccacccacuacgucucccagaucggcggcuuccccaaccagaccgaggacggcggccucccccaguccggccgcaucgucgucgacuacaugguccagaaguccggcaagaccggcaccaucaccuaccagcgcggcauccuccucccccagaaggucuggugcgccuccggccgcuccaaggucaucaagggcucccucccccucaucggcgaggccgacugccuccacgagaaguacggcggccucaacaaguccaagcccuacuacaccggcgagcacgccaaggccaucggcaacugccccaucugggucaagaccccccucaagcucgccaacggcaccaaguaccgcccccccgccaagcuccucaaggagcgcggcuucuucggcgccaucgccggcuuccucgagggcggcugggagggcaugaucgccggcuggcacggcuacaccucccacggcgcccacggcgucgccgucgccgccgaccucaaguccacccaggaggccaucaacaagaucaccaagaaccucaacucccucuccgagcucgaggucaagaaccuccagcgccucuccggcgccauggacgagcuccacaacgagauccucgagcucgacgagaaggucgacgaccuccgcgccgacaccaucuccucccagaucgagcucgccguccuccucuccaacgagggcaucaucaacuccgaggacgagcaccuccucgcccucgagcgcaagcucaagaagaugcucggccccuccgccgucgagaucggcaacggcugcuucgagaccaagcacaagugcaaccagaccugccucgaccgcaucgccgccggcaccuucgacgccggcgaguucucccuccccaccuucgacucccucaacaucaccgccgccucccucaacgacgacggccucgacaaccacaccauccuccucuacuacuccaccgccgccuccucccucgccgucacccucaugaucgccaucuucgucgucuacauggucucccgcgacaacgucuccugcuccaucugccucuga

SEQ ID NO: 122690 - RNA, 1755 nt, Artificial Sequence; identical to SEQ ID NO: 122462
  derived and/or modified CDS sequence (opt2) from hemagglutinin__InfluenzaB__AEQ39392

SEQ ID NO: 122691 - RNA, 1755 nt, Artificial Sequence; identical to SEQ ID NO: 122462
  derived and/or modified CDS sequence (opt2) from hemagglutinin__InfluenzaB__AEQ39429

SEQ ID NO: 122692 - RNA, 1755 nt, Artificial Sequence; identical to SEQ ID NO: 122462
  derived and/or modified CDS sequence (opt2) from hemagglutinin__InfluenzaB__AEQ39440

SEQ ID NO: 122693 - RNA, 1755 nt, Artificial Sequence; identical to SEQ ID NO: 122462
  derived and/or modified CDS sequence (opt2) from hemagglutinin__InfluenzaB__AEQ39451

SEQ ID NO: 122694 - RNA, 1758 nt, Artificial Sequence; identical to SEQ ID NO: 122674
  derived and/or modified CDS sequence (opt2) from hemagglutinin__InfluenzaB__AEQ39462

SEQ ID NO: 122695 - RNA, 1758 nt, Artificial Sequence; identical to SEQ ID NO: 122681
  derived and/or modified CDS sequence (opt2) from hemagglutinin__InfluenzaB__AEQ39484

SEQ ID NO: 122696 - RNA, 1755 nt, Artificial Sequence; identical to SEQ ID NO: 122441
  derived and/or modified CDS sequence (opt2) from hemagglutinin__InfluenzaB__AEQ39506

SEQ ID NO: 122697 - RNA, 1758 nt, Artificial Sequence
  derived and/or modified CDS sequence (opt2) from hemagglutinin__InfluenzaB__AEQ39517
augaaggccaucaucguccuccucauggucgucaccuccaacgccgaccgcaucugcaccggcaucaccuccuccaacuccccccacgucgucaagaccgccacccagggcgaggucaacgucaccggcgucaucccccucaccaccacccccaccaagucccacuucgccaaccucaagggcaccaagacccgcggcaagcucugccccaagugccucaacugcaccgaccucgacgucgcccucggccgccccaagugcaccggcaacauccccuccgccgaggucuccauccuccacgagguccgccccgucaccuccggcugcuuccccaucaugcacgaccgcaccaagauccgccagcuccccaaccuccuccgcggcuacgagcacauccgccucuccacccacaacgucaucaacgccgagaaggcccccggcggccccuacaagaucggcaccuccggcuccugccccaacgucaccaacggcaacggcuucuucgccaccauggccugggccguccccaagaacgacaacaacaagaccgccaccaacucccucaccaucgagguccccuacaucugcaccgagggcgaggaccagaucaccaucuggggcuuccacuccgacaacgagacccagauggccaagcucuacggcgacuccaagccccagaaguucaccuccuccgccaacggcgucaccacccacuacgucucccagaucggcggcuuccccaaccagaccgaggacggcggccucccccaguccggccgcaucgucgucgacuacaugguccagaaguccggcaagaccggcaccaucaccuaccagcgcggcauccuccucccccagaaggucuggugcgccuccggccgcuccaaggucaucaagggcucccucccccucaucggcgaggccgacugccuccacgagaaguacggcggccucaacaaguccaagcccuacuacaccggcgagcacgccaaggccaucggcaacugccccaucugggucaagaccccccucaagcucgccaacggcaccaaguaccgcccccccgccaagcuccucaaggagcgcggcuucuucggcgccaucgccggcuuccucgagggcggcugggagggcaugaucgccggcuggcacggcuacaccucccacggcgcccacggcgucgccgucgccgccgaccucaaguccacccaggaggccaucaacaagaucaccaagaaccucaacucccucuccgagcucgaggucaagaaccuccagcgccucuccggcgccauggacgagcuccacaacgagauccucgagcucgacgagaaggucgacgaccuccgcgccgacaccaucuccucccagaucgagcucgccguccuccucuccaacgagggcaucaucaacuccgaggacgagcaccuccucgcccucgagcgcaagcucaagaagaugcucggccccuccgccgucgagaucggcaacggcugcuucgagaccaagcacaagugcaaccagaccugccucgaccgcaucgccgccggcaccuucgacgccggcgaguucucccuccccaccuucgacucccucaacaucaccgccgccucccucaacgacaacggccucgacaaccacaccauccuccucuacuacuccaccgccgccuccucccucgccgucacccucaugaucgccaucuucgucgucuacauggucucccgcgacaacgucuccugcuccaucugccucuga

SEQ ID NO: 122698 - RNA, 1758 nt, Artificial Sequence
  derived and/or modified CDS sequence (opt2) from hemagglutinin__InfluenzaB__AER27038
augaaggccaucaucguccuccucauggucgucaccuccaacgccgaccgcaucugcaccggcaucaccuccuccaacuccccccacgucgucaagaccgccacccagggcgaggucaacgucaccggcgucaucccccucaccaccacccccaccaagucccacuucgccaaccucaagggcaccgagacccgcggcaagcucugccccaagugccccaacugcaccgaccucgacgucgcccucggccgccccaagugcaccggcaagauccccuccgcccgcgucuccauccuccacgagguccgccccgucaccuccggcugcuuccccaucaugcacgaccgcaccaagauccgccagcuccccaaccuccuccgcggcuacgagcacauccgccucuccacccacaacgucaucaacgccgagaacgcccccggcggccccuacaagaucggcaccuccggcuccugccccaacgucaccaacggcaacggcuucuucgccaccauggccugggccguccccaagaacgacaagaacaagaccgccaccaacccccucaccaucgagguccccuacaucugcaccaagggcgaggaccagaucaccgucuggggcuuccacuccgacaacgagacccagauggccaagcucuacggcgacuccaagccccagaaguucaccuccuccgccaacggcgucaccacccacuacgucucccagaucggcggcuuccccaaccagaccgaggacggcggccucccccaguccggccgcaucgucgucgacuacaugguccagaaguccggcaagaccggcaccaucaccuaccagcgcggcauccuccucccccagaaggucuggugcgccuccggccgcuccaaggucaucaagggcucccucccccucaucggcgaggccgacugccuccacgagaaguacggcggccucaacaaguccaagcccuacuacaccggcgagcacgccaaggccaucggcaacugccccaucugggucaagaccccccucaagcucgccaacggcaccaaguaccgcccccccgccaagcuccucaaggagcgcggcuucuucggcgccaucgccggcuuccucgagggcggcugggagggcaugaucgccggcuggcacggcuacaccucccacggcgcccacggcaucgccgucgccgccgaccucaaguccacccaggaggccaucaacaagaucaccaagaaccucaacucccucuccgagcucgaggucaagaaccuccagcgccucuccggcgccauggacgagcuccacaacgagauccucgagcucgacgagaaggucgacgaccuccgcgccgacaccaucuccucccagaucgagcucgccguccuccucuccaacgagggcaucaucaacuccgaggacgagcaccuccucgcccucgagcgcaagcucaagaagaugcucggccccuccgccgucgagaucggcaacggcugcuucgagaccaagcacaagugcaaccagaccugccucgaccgcaucgccgccggcaccuucgacgccggcgaguucucccuccccaccuucgacucccucaacaucaccgccgccucccucaacgacgacggccucgacaaccacaccauccuccucuacuacuccaccgccgccuccucccucgccgucacccucaugaucgccaucuucgucgucuacauggucucccgcgacaacgucuccugcuccaucugccucuga

SEQ ID NO: 122699 - RNA, 1758 nt, Artificial Sequence; identical to SEQ ID NO: 122644
  derived and/or modified CDS sequence (opt2) from hemagglutinin__InfluenzaB__AER27060

SEQ ID NO: 122700 - RNA, 1758 nt, Artificial Sequence
  derived and/or modified CDS sequence (opt2) from hemagglutinin__InfluenzaB__AET10061
augaaggccaucaucguccuccucauggucgucaccuccaacgccgaccgcaucugcaccggcaucaccuccuccaacuccccccacgucgucaagaccgccacccagggcgaggucaacgucaccggcgucaucccccucaccaccacccccaccaagucccacuucgccaaccucaagggcaccgagacccgcggcaagcucugccccaagugccucaacugcaccgaccucgacgucgcccucggccgccccaagugcaccggcaacauccccuccgcccgcgucuccauccuccacgagguccgccccgucaccuccggcugcuuccccaucaugcacgaccgcaccaagauccgccagcuccccaaccuccuccgcggcuacgagcacauccgccucuccacccacaacgucaucaacgccaagaacgcccccggcggccccuacaagaucggcaccuccggcuccugccccaacgucaccaacggcaacggcuucuucgccaccauggccugggccguccccaagaacgacaagaaccgcaccgccaccaacucccucaccaucgagguccccuacaucugcaaggagggcgaggaccagaucaccgucuggggcuuccacuccgacaacgagacccagauggccaagcucuacggcgacuccaagccccagaaguucaccuccuccgccaacggcgucaccacccacuacgucucccagaucggcggcuuccccaaccagaccgaggacggcggccucccccaguccggccgcaucgucgucgacuacaugguccagaaguccggcaagaccggcaccaucaccuaccagcgcggcauccuccucccccagaaggucuggugcgccuccggccgcuccaaggucaucaagggcucccucccccucaucggcgaggccgacugccuccacgagaaguacggcggccucaacaaguccaagcccuacuacaccggcgagcacgccaaggccaucggcaacugccccaucugggucaagaccccccucaagcucgccaacggcaccaaguaccgcccccccgccaagcuccucaaggagcgcggcuucuucggcgccaucgccggcuuccucgagggcggcugggagggcaugaucgccggcuggcacggcuacaccucccacggcgcccacggcgucgccgucgccgccgaccucaaguccacccaggaggccaucaacaagaucaccaagaaccucaacucccucuccgagcucgaggucaagaaccuccagcgccucuccggcgccauggacgagcuccacaacgagauccucgagcucgacgagaaggucgacgaccuccgcgccgacaccaucuccucccagaucgagcucgccguccuccucuccaacgagggcaucaucaacuccgaggacgagcaccuccucgcccucgagcgcaagcucaagaagaugcucggccccuccgccgucgagaucggcaacggcugcuucgagaccaagcacaagugcaaccagaccugccucgaccgcaucgccgccggcaccuucgacgccggcgaguucucccuccccaccuucgacucccucaacaucaccgccgccucccucaacgacgacggccucgacaaccacaccauccuccucuacuacuccaccgccgccuccucccucgccgucacccucaugaucgccaucuucgucgucuacauggucucccgcgacaacgucuccugcuccaucugccucuga

SEQ ID NO: 122701 - RNA, 1755 nt, Artificial Sequence
  derived and/or modified CDS sequence (opt2) from hemagglutinin__InfluenzaB__AET10062
augaaggccaucaucguccuccucauggucgucaccuccaacgccgaccgcaucugcaccggcaucaccuccuccaacuccccccacgucgucaagaccgccacccagggcgaggucaacgucaccggcgucaucccccucaccaucacccccaccaaguccuacuucgccaaccucaagggcacccgcacccgcggcaagcucugccccgacugccucaacugcaccgaccucgacgucgcccucggccgccccaugugcgucggcaccacccccuccgccaaggccuccauccuccacgagguccgccccgucaccuccggcugcuuccccaucaugcacgaccgcaccaagauccgccagcuccccaaccuccuccgcggcuacgagaacauccgccucuccacccagaacgucaucgacgccgagaaggcccccggcggccccuaccgccucggcaccuccggcuccugccccaacgccaccuccaagaucggcuucuucgccaccauggccugggccguccccaaggacaacuacaagaacgccaccaacccccucaccgucgagguccccuacaucugcaaggagggcgaggaccagaucaccgucuggggcuuccacuccgacaacaagacccagaugaagaaccucuacggcgacuccaacccccagaaguucaccuccuccgccaacggcgucaccacccacuacgucucccagaucggcgacuuccccgaccagaccgaggacggcggccucccccaguccggccgcaucgucgucgacuacaugaugcagaagcccggcaagaccggcaccaucgucuaccagcgcggcguccuccucccccagaaggucuggugcgccuccggccgcuccaaggucaucaagggcucccucccccucaucggcgaggccgacugccuccacgagaaguacggcggccucaacaaguccaagcccuacuacaccggcgagcacgccaaggccaucggcaacugccccaucugggucaagaccccccucaagcucgccaacggcaccaaguaccgcccccccgccaagcuccucaaggagcgcggcuucuucggcgccaucgccggcuuccucgagggcggcugggagggcaugaucgccggcuggcacggcuacaccucccacggcgcccacggcgucgccgucgccgccgaccucaaguccacccaggaggccaucaacaagaucaccaagaaccucaacucccucuccgagcucgaggucaagaaccuccagcgccucuccggcgccauggacgagcuccacaacgagauccucgagcucgacgagaaggucgacgaccuccgcgccgacaccaucuccucccagaucgagcucgccguccuccucuccaacgagggcaucaucaacuccgaggacgagcaccuccucgcccucgagcgcaagcucaagaagaugcucggccccuccgccgucgacaucggcaacggcugcuucgagaccaagcacaagugcaaccagaccugccucgaccgcaucgccgccggcaccuucaacgccggcgaguucucccuccccaccuucgacucccucaacaucaccgccgccucccucaacgacgacggccucgacaaccacaccauccuccucuacuacuccaccgccgccuccucccucgccgucacccucaugcucgccaucuucaucgucuacauggucucccgcgacaacgucuccugcuccaucugccucuga

SEQ ID NO: 122702 - RNA, 1755 nt, Artificial Sequence
  derived and/or modified CDS sequence (opt2) from hemagglutinin__InfluenzaB__AET10064
augaaggccaucaucguccuccucauggucgucaccuccaacgccgaccgcaucugcaccggcaucaccuccuccaacuccccccacgucgucaagaccgccacccagggcgaggucaacgucaccggcgucaucccccucaccaccacccccaccaaguccuacuucgccaaccucaagggcacccgcacccgcggcaagcucugccccgacugccucaacugcaccgaccucgacgucgcccucggccgccccaugugcgucggcaccacccccuccgccaaggccuccauccuccacgagguccgccccgucaccuccggcugcuuccccaucaugcacgaccgcaccaagauccgccagcuccccaaccuccuccgcggcuacgagaacauccgccucuccacccagaacgucaucgacgccgagaaggcccccggcggccccuaccgccucggcaccuccggcuccugccccaacgccaccuccaagaucggcuucuucgccaccauggccugggccguccccaaggacaacuacaagaacgccaccaacccccucaccgucgagguccccuacaucugcaccgagggcgaggaccagaucaccaucuggggcuuccacuccgacaacaagacccagaugaagaaccucuacggcgacuccaacccccagaaguucaccuccuccgccaacggcgucaccacccacuacgucucccagaucggcgacuuccccgaccagaccgaggacggcggccucccccaguccggccgcaucgucgucgacuacaugaugcagaagcccggcaagaccggcaccaucgucuaccagcgcggcguccuccucccccagaaggucuggugcgccuccggccgcuccaaggucaucaagggcucccucccccucaucggcgaggccgacugccuccacgagaaguacggcggccucaacaaguccaagcccuacuacaccggcgagcacgccaaggccaucggcaacugccccaucugggucaagaccccccucaagcucgccaacggcaccaaguaccgcccccccgccaagcuccucaaggagcgcggcuucuucggcgccaucgccggcuuccucgagggcggcugggagggcaugaucgccggcuggcacggcuacaccucccacggcgcccacggcgucgccgucgccgccgaccucaaguccacccaggaggccaucaacaagaucaccaagaaccucaacucccucuccgagcucgaggucaagaaccuccagcgccucuccggcgccauggacgagcuccacaacgagauccucgagcucgacgagaaggucgacgaccuccgcgccgacaccaucuccucccagaucgagcucgccguccuccucuccaacgagggcaucaucaacuccgaggacgagcaccuccucgcccucgagcgcaagcucaagaagaugcucggccccuccgccgucgacaucggcaacggcugcuucgagaccaagcacaagugcaaccagaccugccucgaccgcaucgccgccggcaccuucaacgccggcgaguucucccuccccaccuucgacucccucaacaucaccgccgccucccucaacgacgacggccucgacaaccacaccauccuccucuacuacuccaccgccgccuccucccucgccgucacccucaugcucgccaucuucaucgucuacauggucucccgcgacaacgucuccugcuccaucugccucuga

SEQ ID NO: 122703 - RNA, 1755 nt, Artificial Sequence
  derived and/or modified CDS sequence (opt2) from hemagglutinin__InfluenzaB__AET10065
augaaggccaucaucguccuccucauggucgucaccuccaacgccgaccgcaucugcaccggcaucaccuccuccaacuccccccacgucgucaagaccgccacccagggcgaggucaacgucaccggcgucaucccccucaccaccacccccaccaaguccuacuucgccaaccucaagggcacccgcacccgcggcaagcucugccccgacugccucaacugcaccgaccucgacgucgcccucggccgccccaugugcgucggcaccacccccuccgccaaggccuccauccuccacgagguccgccccgucaccuccggcugcuuccccaucaugcacgaccgcaccaagauccgccagcuccccaaccuccuccgcggcuacgagaacauccgccucuccacccagaacgucaucgacgccgagaaggcccccggcggccccuaccgccucggcaccuccggcuccugccccaacgccaccuccaagaucggcuucuucgccaccauggccugggccguccccaaggacaacuacaagaacgccaccaacccccucaccgucgagguccccuacaucugcaaggagggcgaggaccagaucaccgucuggggcuuccacuccgacaacaagacccagaugaagaaccucuacggcgacuccaacccccagaaguucaccuccuccgccaacggcgucaccacccacuacgucucccagaucggcgacuuccccgaccagaccgaggacggcggccucccccaguccggccgcaucgucgucgacuacaugaugcagaagcccggcaagaccggcaccaucgucuaccagcgcggcguccuccucccccagaaggucuggugcgccuccggccgcuccaaggucaucaagggcucccucccccucaucggcgaggccgacugccuccacgagaaguacggcggccucaacaaguccaagcccuacuacaccggcgagcacgccaaggccaucggcaacugccccaucugggucaagaccccccucaagcucgccaacggcaccaaguaccgcccccccgccaagcuccucaaggagcgcggcuucuucggcgccaucgccggcuuccucgagggcggcugggagggcaugaucgccggcuggcacggcuacaccucccacggcgcccacggcgucgccgucgccgccgaccucaaguccacccaggaggccaucaacaagaucaccaagaaccucaacucccucuccgagcucgaggucaagaaccuccagcgccucuccggcgccauggacgagcuccacaacgagauccucgagcucgacgagaaggucgacgaccuccgcgccgacaccaucuccucccagaucgagcucgccguccuccucuccaacgagggcaucaucaacuccgaggacgagcaccuccucgcccucgagcgcaagcucaagaagaugcucggccccuccgccgucgacaucggcaacggcugcuucgagaccaagcacaagugcaaccagaccugccucgaccgcaucgccgccggcaccuucaacgccggcgaguucucccuccccaccuucgacucccucaacaucaccgccgccucccucaacgacgacggccucgacaaccacaccauccuccucuacuacuccaccgccgccuccucccucgccgucacccucaugcucgccaucuucaucgucuacauggucucccgcgacaacgucuccugcuccaucugccucuga

SEQ ID NO: 122704 - RNA, 1755 nt, Artificial Sequence; identical to SEQ ID NO: 122703
  derived and/or modified CDS sequence (opt2) from hemagglutinin__InfluenzaB__AET10066

SEQ ID NO: 122705 - RNA, 1755 nt, Artificial Sequence
  derived and/or modified CDS sequence (opt2) from hemagglutinin__InfluenzaB__AET10067
augaaggccaucaucguccuccucauggucgucaccuccaacgccgaccgcaucugcaccggcaucaccuccuccaacuccccccacgucgucaagaccgccacccagggcgaggucaacgucaccggcgucaucccccucaccgccacccccaccaaguccuacuucgccaaccucaagggcacccgcacccgcggcaagcucugccccgacugccucaacugcaccgaccucgacgucgcccucggccgccccaugugcgucggcaccacccccuccgccaaggccuccauccuccacgagguccgccccgucaccuccggcugcuuccccaucaugcacgaccgcaccaagauccgccagcuccccaaccuccuccgcggcuacgagaacauccgccucuccacccagaacgucaucgacgccgagaaggcccccggcggccccuaccgccucggcaccuccggcuccugccccaacgccaccuccaagaucggcuucuucgccaccauggccugggccguccccaaggacaacuacaagaacgccaccaacccccucaccgucgagguccccuacaucugcaaggagggcgaggaccagaucaccgucuggggcuuccacuccgacaacaagacccagaugaagaaccucuacggcgacuccaacccccagaaguucaccuccuccgccaacggcgucaccacccacuacgucucccagaucggcgacuuccccgaccagaccgaggacggcggccucccccaguccggccgcaucgucgucgacuacaugaugcagaagcccggcaagaccggcaccaucgucuaccagcgcggcguccuccucccccagaaggucuggugcgccuccggccgcuccaaggucaucaagggcucccucccccucaucggcgaggccgacugccuccacgagaaguacggcggccucaacaaguccaagcccuacuacaccggcgagcacgccaaggccaucggcaacugccccaucugggucaagaccccccucaagcucgccaacggcaccaaguaccgcccccccgccaagcuccucaaggagcgcggcuucuucggcgccaucgccggcuuccucgagggcggcugggagggcaugaucgccggcuggcacggcuacaccucccacggcgcccacggcgucgccgucgccgccgaccucaaguccacccaggaggccaucaacaagaucaccaagaaccucaacucccucuccgagcucgaggucaagaaccuccagcgccucuccggcgccauggacgagcuccacaacgagauccucgagcucgacgagaaggucgacgaccuccgcgccgacaccaucuccucccagaucgagcucgccguccuccucuccaacgagggcaucaucaacuccgaggacgagcaccuccucgcccucgagcgcaagcucaagaagaugcucggccccuccgccgucgacaucggcaacggcugcuucgagaccaagcacaagugcaaccagaccugccucgaccgcaucgccgccggcaccuucaacgccggcgaguucucccuccccaccuucgacucccucaacaucaccgccgccucccucaacgacgacggccucgacaaccacaccauccuccucuacuacuccaccgccgccuccucccucgccgucacccucaugcucgccaucuucaucgucuacauggucucccgcgacaacgucuccugcuccaucugccucuga

SEQ ID NO: 122706 - RNA, 1755 nt, Artificial Sequence
  derived and/or modified CDS sequence (opt2) from hemagglutinin__InfluenzaB__AET10068
augaaggccaucaucguccuccucauggucgucaccuccaacgccgaccgcaucugcaccggcaucaccuccuccaacuccccccacgucgucaagaccgccacccagggcgaggucaacgucaccggcgucaucccccucaccaccgcccccaccaaguccuacuucgccaaccucaagggcacccgcacccgcggcaagcucugccccgacugccucaacugcaccgaccucgacgucgcccucggccgccccaugugcgccggcaccacccccuccgccaaggccuccauccuccacgagguccgccccgucaccuccggcugcuuccccaucaugcacgaccgcaccaagauccgccagcuccccaaccuccuccgcggcuacgagaacauccgccucuccacccagaacgucaucgacgccgagaaggcccccggcggccccuaccgccucggcaccuccggcuccugccccaacgccaccuccaagaucggcuucuucgccaccauggccugggccguccccaaggacaacuacaagaacgccaccaacccccucaccgucgagguccccuacaucugcaaggagggcgaggaccagaucaccgucuggggcuuccacuccgacaacaagacccagaugaagaaccucuacggcgacuccaacccccagaaguucaccuccuccgccaacggcgucaccacccacuacgucucccagaucggcgacuuccccgaccagaccgaggacggcggccucccccaguccggccgcaucgucgucgacuacaugaugcagaagcccggcaagaccggcaccaucgucuaccagcgcggcguccuccucccccagaaggucuggugcgccuccggccgcuccaaggucaucaagggcucccucccccucaucggcgaggccgacugccuccacgagaaguacggcggccucaacaaguccaagcccuacuacaccggcgagcacgccaaggccaucggcaacugccccaucugggucaagaccccccucaagcucgccaacggcaccaaguaccgcccccccgccaagcuccucaaggagcgcggcuucuucggcgccaucgccggcuuccucgagggcggcugggagggcaugaucgccggcuggcacggcuacaccucccacggcgcccacggcgucgccgucgccgccgaccucaaguccacccaggaggccaucaacaagaucaccaagaaccucaacucccucuccgagcucgaggucaagaaccuccagcgccucuccggcgccauggacgagcuccacaacgagauccucgagcucgacgagaaggucgacgaccuccgcgccgacaccaucuccucccagaucgagcucgccguccuccucuccaacgagggcaucaucaacuccgaggacgagcaccuccucgcccucgagcgcaagcucaagaagaugcucggccccuccgccgucgacaucggcaacggcugcuucgagaccaagcacaagugcaaccagaccugccucgaccgcaucgccgccggcaccuucaacgccggcgaguucucccuccccaccuucgacucccucaacaucaccgccgccucccucaacgacgacggccucgacaaccacaccauccuccucuacuacuccaccgccgccuccucccucgccgucacccucaugcucgccaucuucaucgucuacauggucucccgcgacaacgucuccugcuccaucugccucuga

SEQ ID NO: 122707 - RNA, 1755 nt, Artificial Sequence; identical to SEQ ID NO: 122703
  derived and/or modified CDS sequence (opt2) from hemagglutinin__InfluenzaB__AET10069

SEQ ID NO: 122708 - RNA, 1758 nt, Artificial Sequence
  derived and/or modified CDS sequence (opt2) from hemagglutinin__InfluenzaB__AET10070
augaaggccaucaucguccuccucauggucgucaccuccaacgccgaccgcaucugcaccggcaucaccuccuccaacuccccccacgucgucaagaccgccacccagggcgaggucaaggucaccggcgucaucccccucaccaccacccccaccaagucccacuucgccaaccucaagggcaccgagacccgcggcaagcucugccccaagugccccaacugcaccgaccucgacgucgcccucggccgccccaagugcaccggcaagauccccuccgcccgcgucuccauccuccacgagguccgccccgucaccuccggcugcuuccccaucaugcacgaccgcaccaagauccgccagcuccccaaccuccuccgcggcuacgagcacauccgccucuccacccacaacgucaucaacgccgagaacgcccccggcggccccuacaagaucggcaccuccggcuccugccccaacgucaccaacggcaacggcuucuucgccaccauggccugggccguccccaagaacgacaagaacaagaccgccaccaacccccucaccaucgagguccccuacaucugcaccgagggcgaggaccagaucaccgucuggggcuuccacuccgacaacgagacccagauggccaagcucuacggcgacuccaagccccagaaguucaccuccuccgccaacggcgucaccacccacuacgucucccagaucggcggcuuccccaaccagaccgaggacggcggccucccccaguccggccgcaucgucgucgacuacaugguccagaaguccggcaagaccggcaccaucaccuaccagcgcggcauccuccucccccagaaggucuggugcgccuccggccgcuccaaggucaucaagggcucccucccccucaucggcgaggccgacugccuccacgagaaguacggcggccucaacaaguccaagcccuacuacaccggcgagcacgccaaggccaucggcaacugccccaucugggucaagaccccccucaagcucgccaacggcaccaaguaccgcccccccgccaagcuccucaaggagcgcggcuucuucggcgccaucgccggcuuccucgagggcggcugggagggcaugaucgccggcuggcacggcuacaccucccacggcgcccacggcgucgccgucgccgccgaccucaaguccacccaggaggccaucaacaagaucaccaagaaccucaacucccucuccgagcucgaggucaagaaccuccagcgccucuccggcgccauggacgagcuccacaacgagauccucgagcucgacgagaaggucgacgaccuccgcgccgacaccaucuccucccagaucgagcucgccguccuccucuccaacgagggcaucaucaacuccgaggacgagcaccuccucgcccucgagcgcaagcucaagaagaugcucggccccuccgccgucgagaucggcaacggcugcuucgagaccaagcacaagugcaaccagaccugccucgaccgcaucgccgccggcaccuucgacgccggcgaguucucccuccccaccuucgacucccucaacaucaccgccgccucccucaacgacgacggccucgacaaccacaccauccuccucuacuacuccaccgccgccuccucccucgccgucacccucaugaucgccaucuucgucgucuacauggucucccgcgacaacgucuccugcuccaucugccucuga

SEQ ID NO: 122709 - RNA, 1758 nt, Artificial Sequence; identical to SEQ ID NO: 122644
  derived and/or modified CDS sequence (opt2) from hemagglutinin__InfluenzaB__AET10071

SEQ ID NO: 122710 - RNA, 1758 nt, Artificial Sequence; identical to SEQ ID NO: 122644
  derived and/or modified CDS sequence (opt2) from hemagglutinin__InfluenzaB__AET10072

SEQ ID NO: 122711 - RNA, 1755 nt, Artificial Sequence
  derived and/or modified CDS sequence (opt2) from hemagglutinin__InfluenzaB__AET10073
augaaggccaucaucguccuccucauggucgucaccuccaacgccgaccgcaucugcaccggcaucaccuccuccaacuccccccacgucgucaagaccgccacccagggcgaggucaacgucaccggcgucaucccccucaccaccacccccaccaaguccuacuucgccaaccucaagggcacccgcacccgcggcaagcucugccccgacugccucaacugcaccgaccucgacgucgcccucggccgccccaugugcgucggcaccacccccuccgccaaggccuccauccuccacgagguccgccccgucaccuccggcugcuuccccaucaugcacgaccgcaccaagauccgccagcuccccaaccuccuccgcggcugcgagaacauccgccucuccacccagaacgucaucgacgccgagaaggcccccggcggccccuaccgccucggcaccuccggcuccugccccaacgccaccuccaagaucggcuucuucgccaccauggccugggccguccccaaggacaacuacaagaacgccaccaacccccucaccgucgagguccccuacaucugcaaggagggcgaggaccagaucaccgucuggggcuuccacuccgacaacaagacccagaugaagaaccucuacggcgacuccaacccccagaaguucaccuccuccgccaacggcgucaccacccacuacgucucccagaucggcgacuuccccgaccagaccgaggacggcggccucccccaguccggccgcaucgucgucgacuacaugaugcagaagcccggcaagaccggcaccaucgucuaccagcgcggcguccuccucccccagaaggucuggugcgccuccggccgcuccaaggucaucaagggcucccucccccucaucggcgaggccgacugccuccacgagaaguacggcggccucaacaaguccaagcccuacuacaccggcgagcacgccaaggccaucggcaacugccccaucugggucaagaccccccucaagcucgccaacggcaccaaguaccgcccccccgccaagcuccucaaggagcgcggcuucuucggcgccaucgccggcuuccucgagggcggcugggagggcaugaucgccggcuggcacggcuacaccucccacggcgcccacggcgucgccgucgccgccgaccucaaguccacccaggaggccaucaacaagaucaccaagaaccucaacucccucuccgagcucgaggucaagaaccuccagcgccucuccggcgccauggacgagcuccacaacgagauccucgagcucgacgagaaggucgacgaccuccgcgccgacaccaucuccucccagaucgagcucgccguccuccucuccaacgagggcaucaucaacuccgaggacgagcaccuccucgcccucgagcgcaagcucaagaagaugcucggccccuccgccgucgacaucggcaacggcugcuucgagaccaagcacaagugcaaccagaccugccucgaccgcaucgccgccggcaccuucaacgccggcgaguucucccuccccaccuucgacucccucaacaucaccgccgccucccucaacgacgacggccucgacaaccacaccauccuccucuacuacuccaccgccgccuccucccucgccgucacccucaugcucgccaucuucaucgucuacauggucucccgcgacaacgucuccugcuccaucugccucuga

SEQ ID NO: 122712 - RNA, 1758 nt, Artificial Sequence
  derived and/or modified CDS sequence (opt2) from hemagglutinin__InfluenzaB__AET10074
augaaggccaucaucguccuccucauggucgucaccuccaacgccgaccgcaucugcaccggcaucaccuccuccaacuccccccacgucgucaagaccgccacccagggcgaggucaacgucaccggcgucaucccccucaccaccacccccacccgcucccacuucgccaaccucaagggcaccgagacccgcggcaagcucugccccaagugccccaacugcaccgaccucgacgucgcccucggccgccccaagugcaccggcaagauccccuccgcccgcgucuccauccuccacgagguccgccccgucaccuccggcugcuuccccaucaugcacgaccgcaccaagauccgccagcuccccaaccuccuccgcggcuacgagcacauccgccucuccacccacaacgucaucaacgccgagaacgcccccggcggccccuacaagaucggcaccuccggcuccugccccaacgucaccaacggcaacggcuucuucgccaccauggccugggccguccccaagaacgacaagaacaagaccgccaccaacccccucaccaucgagguccccuacaucugcaccgagggcgaggaccagaucaccgucuggggcuuccacuccgacaacgagacccagauggccaagcucuacggcgacuccaagccccagaaguucaccuccuccgccaacggcgucaccacccacuacgucucccagaucggcggcuuccccaaccagaccgaggacggcggccucccccaguccggccgcaucgucgucgacuacaugguccagaaguccggccgcaccggcaccaucaccuaccagcgcggcauccuccucccccagaaggucuggugcgccuccggccgcuccaaggucaucaagggcucccucccccucaucggcgaggccgacugccuccacgagaaguacggcggccucaacaaguccaagcccuacuacaccggcgagcacgccaaggccaucggcaacugccccaucugggucaagaccccccucaagcucgccaacggcaccaaguaccgcccccccgccaagcuccucaaggagcgcggcuucuucggcgccaucgccggcuuccucgagggcggcugggagggcaugaucgccggcuggcacggcuacaccucccacggcgcccacggcgucgccgucgccgccgaccucaaguccacccaggaggccaucaacaagaucaccaagaaccucaacucccucuccgagcucgaggucaagaaccuccagcgccucuccggcgccauggacgagcuccacaacgagauccucgagcucgacgagaaggucgacgaccuccgcgccgacaccaucuccucccagaucgagcucgccguccuccucuccaacgagggcaucaucaacuccgaggacgagcaccuccucgcccucgagcgcaagcucaagaagaugcucggccccuccgccgucgagaucggcaacggcugcuucgagaccaagcacaagugcaaccagaccugccucgaccgcaucgccgccggcaccuucgacgccggcgaguucucccuccccaccuucgacucccucaacaucaccgccgccucccucgacgacgacggccucgacaaccacaccauccuccucuacuacuccaccgccgccuccucccucgccgucacccucaugaucgccaucuucgucgucuacauggucucccgcgacaacgucuccugcuccaucugccucuga

SEQ ID NO: 122713 - RNA, 1758 nt, Artificial Sequence; identical to SEQ ID NO: 122644
  derived and/or modified CDS sequence (opt2) from hemagglutinin__InfluenzaB__AET10076

SEQ ID NO: 122714 - RNA, 1758 nt, Artificial Sequence; identical to SEQ ID NO: 122644
  derived and/or modified CDS sequence (opt2) from hemagglutinin__InfluenzaB__AET10077

SEQ ID NO: 122715 - RNA, 1758 nt, Artificial Sequence
  derived and/or modified CDS sequence (opt2) from hemagglutinin__InfluenzaB__AET10078
augaaggccaucaucguccuccucauggucgucaccuccaacgccgaccgcaucugcaccggcaucaccuccuccaacuccccccacgucgucaagaccgccacccagggcgaggucaacgucaccggcgucaucccccucaccaccacccccaccaagucccacuucgccaaccucaagggcaccgagacccgcggcaagcucugccccaagugccucaacugcaccgaccucgacgucgcccucggccgccccaagugcaccggcaagauccccuccgcccgcgucuccguccuccacgagguccgccccgucaccuccggcugcuuccccaucaugcacgaccgcaccaagauccgccagcuccccaaccuccuccgcggcuacgagcacauccgccucuccacccacaacgucaucaacgccgagaacgcccccggcggccccuacaagaucggcaccuccggcuccugccccaacgucaccaacggcaacggcuucuucgccaccauggccugggccguccccaagaacgacaagaacaagaccgccaccaacccccucaccaucgagguccccuacaucugcaccgagggcgaggaccagaucaccgucuggggcuuccacuccgacaacgagacccagauggccaagcucuacggcgacuccaagccccagaaguucaccuccuccgccaacggcgucaccacccacuacgucucccagaucggcggcuuccccaaccagaccgaggacggcggccucccccaguccggccgcaucgucgucgacuacaugguccagaaguccggcaagaccggcaccaucaccuaccagcgcggcauccuccucccccagaaggucuggugcgccuccggccgcuccaaggucaucaagggcucccucccccucaucggcgaggccgacugccuccacgagaaguacggcggccucaacaaguccaagcccuacuacaccggcgagcacgccaaggccaucggcaacugccccaucugggucaagaccccccucaagcucgccaacggcaccaaguaccgcccccccgccaagcuccucaaggagcgcggcuucuucggcgccaucgccggcuuccucgagggcggcugggagggcaugaucgccggcuggcacggcuacaccucccacggcgcccacggcgucgccgucgccgccgaccucaaguccacccaggaggccaucaacaagaucaccaagaaccucaacucccucuccgagcucgaggucaagaaccuccagcgccucuccggcgccauggacgagcuccacaacgagauccucgagcucgacgagaaggucgacgaccuccgcgccgacaccaucuccucccagaucgagcucgccguccuccucuccaacgagggcaucaucaacuccgaggacgagcaccuccucgcccucgagcgcaagcucaagaagaugcucggccccuccgccgucgagaucggcaacggcugcuucgagaccaagcacaagugcaaccagaccugccucgaccgcaucgccgccggcaccuucaacgccggcgaguucucccuccccaccuucgacucccucaacaucaccgccgccucccucaacgaggacggccucgacaaccacgccauccuccucuacuacuccaccgccgccuccucccucgccgucacccucaugaucgccaucuucgucgucuacauggucucccgcgacaacgucuccugcuccaucugccucuga

SEQ ID NO: 122716 - RNA, 1758 nt, Artificial Sequence
  derived and/or modified CDS sequence (opt2) from hemagglutinin__InfluenzaB__AET10079
augaaggccaucaucguccuccucauggucgucaccuccaacgccgacggcaucugcaccggcaucaccuccuccaacuccccccacgucgucaagaccgccacccagggcgaggucaacgucaccggcgucaucccccucaccaccacccccaccaagucccacuucgccaaccucaagggcaccgagacccgcggcaagcucugccccaagugccccaacugcaccgaccucgacgucgcccucggccgccccaagugcaccggcaagauccccuccgcccgcgucuccauccuccacgagguccgccccgucaccuccggcugcuuccccaucaugcacgaccgcaccaagauccgccagcuccccaaccuccuccgcggcuacgagcacauccgccucuccacccacaacgucaucaacgccgagaacgcccccggcggccccuacaagaucggcaccuccggcuccugccccaacgucaccaacggcaacggcuucuucaccaccauggccugggccguccccaagaacgacaagaacaagaccgccaccaacccccucaccaucgagguccccuacaucugcaccgagggcgaggaccagaucaccgucuggggcuuccacuccgacaacgagacccagauggccaagcucuacggcgacuccaagccccagaaguucaccuccuccgccaacggcgucaccacccacuacgucucccagaucggcggcuuccccaaccagaccgaggacggcggccucccccaguccggccgcaucgucgucgacuacaugguccagaaguccggcaagaccggcaccaucaccuaccagcgcggcauccuccucccccagaaggucuggugcgccuccggccgcuccaaggucaucaagggcucccucccccucaucggcgaggccgacugccuccacgagaaguacggcggccucaacaaguccaagcccuacuacaccggcgagcacgccaaggccaucggcaacugccccaucugggucaagaccccccucaagcucgccaacggcaccaaguaccgcccccccgccaagcuccucaaggagcgcggcuucuucggcgccaucgccggcuuccucgagggcggcugggagggcaugaucgccggcuggcacggcuacaccucccacggcgcccacggcgucgccgucgccgccgaccucaaguccacccaggaggccaucaacaagaucaccaagaaccucaacucccucuccgagcucgaggucgagaaccuccagcgccucuccggcgccauggacgagcuccacaacgagauccucgagcucgacgagaaggucgacgaccuccgcgccgacaccaucuccucccagaucgagcucgccguccuccucuccaacgagggcaucaucaacuccgaggacgagcaccuccucgcccucgagcgcaagcucaagaagaugcucggccccuccgccgucgagaucggcaacggcugcuucgagaccaagcacaagugcaaccagaccugccucgaccgcaucgccgccggcaccuucgacgccggcgaguucucccuccccaccuucgacucccucaacaucaccgccgccucccucaacgacgacggccucgacaaccacaccauccuccucuacuacuccaccgccgccuccucccucgccgucacccucaugaucgccaucuucgucgucuacauggucucccgcgacaacgucuccugcuccaucugccucuga

SEQ ID NO: 122717 - RNA, 1758 nt, Artificial Sequence; identical to SEQ ID NO: 122644
  derived and/or modified CDS sequence (opt2) from hemagglutinin__InfluenzaB__AET10080

SEQ ID NO: 122718 - RNA, 1758 nt, Artificial Sequence; identical to SEQ ID NO: 122644
  derived and/or modified CDS sequence (opt2) from hemagglutinin__InfluenzaB__AET10081

SEQ ID NO: 122719 - RNA, 1758 nt, Artificial Sequence
  derived and/or modified CDS sequence (opt2) from hemagglutinin__InfluenzaB__AET10082
augaaggccaucaucguccuccucauggucgucaccuccaacgccgaccgcaucugcaccggcaucaccuccuccaacuccccccacaucgucaagaccgccacccagggcgaggucaacgucaccggcgucaucccccucaccaccacccccaccaagucccacuucgccaaccucaagggcaccgagacccgcggcaagcucugccccaagugccucaacugcaccgaccucgacgucgcccucggccgccccaagugcaccggcaagauccccuccgcccgcgucuccauccuccacgagguccgccccgucaccuccggcugcuuccccaucaugcacgaccgcaccaagauccgccagcuccccaaccuccuccgcggcuacgagcacauccgccucuccacccacaacgucaucaacgccgagaacgcccccggcggccccuacaagaucggcaccuccggcuccugccccaacaucaccaacggcaacggcuucuucgccaccauggccugggccguccccaagaacgacaagaacaagaccgccaccaacccccucaccaucgagguccccuacaucugcaccgagggcgaggaccagaucaccgucuggggcuuccacuccgacaacgagacccagauggccaagcucuacggcgacuccaagccccagaaguucaccuccuccgccaacggcgucaccacccacuacgucucccagaucggcggcuuccccaaccagaccgaggacggcggccucccccaguccggccgcaucgucgucgacuacaugguccagaaguccggcaagaccggcaccaucaccuaccagcgcggcauccuccucccccagaaggucuggugcgccuccggccgcuccaaggucaucaagggcucccucccccucaucggcgaggccgacugccuccacgagaaguacggcggccucaacaaguccaagcccuacuacaccggcgagcacgccaaggccaucggcaacugccccaucugggucaagaccccccucaagcucgccaacggcaccaaguaccgcccccccgccaagcuccucaaggagcgcggcuucuucggcgccaucgccggcuuccucgagggcggcugggagggcaugaucgccggcuggcacggcuacaccucccacggcgcccacggcgucgccgucgccgccgaccucaaguccacccaggaggccaucaacaagaucaccaagaaccucaacucccucuccgagcucgaggucaagaaccuccagcgccucuccggcgccauggacgagcuccacaacgagauccucgagcucgacgagaaggucgacgaccuccgcgccgacaccaucuccucccagaucgagcucgccguccuccucuccaacgagggcaucaucaacuccgaggacgagcaccuccucgcccucgagcgcaagcucaagaagaugcucggccccuccgccgucgagaucggcaacggcugcuucgagaccaagcacaagugcaaccagaccugccucgaccgcaucgccgccggcaccuucgacgccggcgaguucucccuccccaccuucgacucccucaacaucaccgccgccucccucaacgacgacggccucgacaaccacaccauccuccucuacuacuccaccgccgccuccucccucgccgucacccucaugaucgccaucuucgucgucuacauggucucccgcgacaacgucuccugcuccaucugccucuga

SEQ ID NO: 122720 - RNA, 1758 nt, Artificial Sequence
  derived and/or modified CDS sequence (opt2) from hemagglutinin__InfluenzaB__AET10083
augaaggccaucaucguccuccucauggucgucaccuccaacgccgaccgcaucugcaccggcaucaccuccuccaacuccccccacgucgucaagaccgccacccagggcgaggucaacgucaccggcgucaucccccucaccaccacccccaccaagucccacuucgccaaccucaagggcaccgagacccgcggcaagcucugccccaagugccucaacugcaccgaccucgacgucgcccucggccgccccaagugcaccggcaagguccccuccgcccgcgucuccauccuccacgagguccgccccgucaccuccggcugcuuccccaucaugcacgaccgcaccaagauccgccagcuccccaaccuccuccgcggcuacgagcacauccgccucuccacccacaacgucaucaacgccgagaacgcccccggcggccccuacaagaucggcaccuccggcuccugccccaacaucaccaacggcaacggcuucuucgccaccauggccugggccguccccaagaacgacaagaacaagaccgccaccaacccccucaccaucgagguccccuacaucugcaccgagggcgaggaccagaucaccgucuggggcuuccacuccgacaacgagacccagauggccaagcucuacggcgacuccaagccccagaaguucaccuccuccgccaacggcgucaccacccacuacgucucccagaucggcggcuuccccaaccagaccgaggacggcggccucccccaguccggccgcaucgucgucgacuacaugguccagaaguccggcaagaccggcaccaucaccuaccagcgcggcauccuccucccccagaaggucuggugcgccuccggccgcuccaaggucaucaagggcucccucccccucaucggcgaggccgacugccuccacgagaaguacggcggccucaacaaguccaagcccuacuacaccggcgagcacgccaaggccaucggcaacugccccaucugggucaagaccccccucaagcucgccaacggcaccaaguaccgcccccccgccaagcuccucaaggagcgcggcuucuucggcgccaucgccggcuuccucgagggcggcugggagggcaugaucgccggcuggcacggcuacaccucccacggcgcccacggcgucgccgucgccgccgaccucaaguccacccaggaggccaucaacaagaucaccaagaaccucaacucccucuccgagcucgaggucaagaaccuccagcgccucuccggcgccauggacgagcuccacaacgagauccucgagcucgacgagaaggucgacgaccuccgcgccgacaccaucuccucccagaucgagcucgccguccuccucuccaacgagggcaucaucaacuccgaggacgagcaccuccucgcccucgagcgcaagcucaagaagaugcucggccccuccgccgucgagaucggcaacggcugcuucgagaccaagcacaagugcaaccagaccugccucgaccgcaucgccgccggcaccuucgacgccggcgaguucucccuccccaccuucgacucccucaacaucaccgccgccucccucaacgacgacggccucgacaaccacaccauccuccucuacuacuccaccgccgccuccucccucgccgucacccucaugaucgccaucuucgucgucuacauggucucccgcgacaacgucuccugcuccaucugccucuga

SEQ ID NO: 122721 - RNA, 1758 nt, Artificial Sequence; identical to SEQ ID NO: 122681
  derived and/or modified CDS sequence (opt2) from hemagglutinin__InfluenzaB__AET10084

SEQ ID NO: 122722 - RNA, 1758 nt, Artificial Sequence; identical to SEQ ID NO: 122644
  derived and/or modified CDS sequence (opt2) from hemagglutinin__InfluenzaB__AET10085

SEQ ID NO: 122723 - RNA, 1758 nt, Artificial Sequence; identical to SEQ ID NO: 122684
  derived and/or modified CDS sequence (opt2) from hemagglutinin__InfluenzaB__AET43124

SEQ ID NO: 122724 - RNA, 1758 nt, Artificial Sequence; identical to SEQ ID NO: 122684
  derived and/or modified CDS sequence (opt2) from hemagglutinin__InfluenzaB__AET43135

SEQ ID NO: 122725 - RNA, 1758 nt, Artificial Sequence; identical to SEQ ID NO: 122684
  derived and/or modified CDS sequence (opt2) from hemagglutinin__InfluenzaB__AET43146

SEQ ID NO: 122726 - RNA, 1758 nt, Artificial Sequence; identical to SEQ ID NO: 122684
  derived and/or modified CDS sequence (opt2) from hemagglutinin__InfluenzaB__AET43157

SEQ ID NO: 122727 - RNA, 1758 nt, Artificial Sequence
  derived and/or modified CDS sequence (opt2) from hemagglutinin__InfluenzaB__AET43168
augaaggccaucaucguccuccucauggucgucaccuccaacgccgaccgcaucugcaccggcaucaccuccuccaacuccccccacgucgucaagaccgccacccagggcgaggucaacgucaccggcgucaucccccucaccaccacccccaccaagucccacuucgccaaccucaagggcaccgagacccgcggcaagcucugccccaagugccucaacugcaccgaccucgacgucacccucggccgccccaagugcaccggcaagauccccuccgcccgcgucuccauccuccacgagguccgccccgucaccuccggcugcuuccccaucaugcacgaccgcaccaagauccgccagcuccccaaccuccuccgcggcuacgagcacauccgccucuccacccacaacgucaucaacgccgagaacgcccccggcggccccuacaagaucggcaccuccggcuccugccccaacgucaccaacggcaacggcuucuucgccaccauggccugggccguccccaagaacgacaagaacaagaccgccaccaacccccucaccaucgagguccccuacaucugcaccgagggcgaggaccagaucaccgucuggggcuuccacuccgacaacgagacccagauggccaagcucuacggcgacuccaagccccagaaguucaccuccuccgccaacggcgucaccacccacuacgucucccagaucggcggcuuccccaaccagaccgaggacggcggccucccccaguccggccgcaucgucgucgacuacaugguccagaaguccggcaagaccggcaccaucaccuaccagcgcggcauccuccucccccagaaggucuggugcgccuccggccgcuccaaggucaucaagggcucccucccccucaucggcgaggccgacugccuccacgagaaguacggcggccucaacaaguccaagcccuacuacaccggcgagcacgccaaggccaucggcaacugccccaucugggucaagaccccccucaagcucgccaacggcaccaaguaccgcccccccgccaagcuccucaaggagcgcggcuucuucggcgccaucgccggcuuccucgagggcggcugggagggcaugaucgccggcuggcacggcuacaccucccacggcgcccacggcgucgccgucgccgccgaccucaaguccacccaggaggccaucaacaagaucaccaagaaccucaacucccucuccgagcucgaggucaagaaccuccagcgccucuccggcgccauggacgagcuccacaacgagauccucgagcucgacgagaaggucgacgaccuccgcgccgacaccaucuccucccagaucgagcucgccguccuccucuccaacgagggcaucaucaacuccgaggacgagcaccuccucgcccucgagcgcaagcucaagaagaugcucggccccuccgccgucgagaucggcaacggcugcuucgagaccaagcacaagugcaaccagaccugccucgaccgcaucgccgccggcaccuucgacgccggcgaguucucccuccccaccuucgacucccucaacaucaccgccgccucccucaacgacgacggccucgacaaccacaccauccuccucuacuacuccaccgccgccuccucccucgccgucacccucaugaucgccaucuucgucgucuacauggucucccgcgacaacgucuccugcuccaucugccucuga

SEQ ID NO: 122728 - RNA, 1758 nt, Artificial Sequence; identical to SEQ ID NO: 122684
  derived and/or modified CDS sequence (opt2) from hemagglutinin__InfluenzaB__AET43179

SEQ ID NO: 122729 - RNA, 1758 nt, Artificial Sequence; identical to SEQ ID NO: 122684
  derived and/or modified CDS sequence (opt2) from hemagglutinin__InfluenzaB__AET43190

SEQ ID NO: 122730 - RNA, 1758 nt, Artificial Sequence
  derived and/or modified CDS sequence (opt2) from hemagglutinin__InfluenzaB__AET43201
augaaggccaucaucguccuccucauggucgucaccuccaacgccgaccgcaucugcaccggcaucaccuccuccaacuccccccacgucgucaagaccgccacccagggcgaggucaacgucaccggcgucaucccccucaccaccacccccaccaagucccacuucgccaaccucaagggcaccgagacccgcggcaagcucugccccaagugccucaacugcaccgaccucgacgucgcccucggccgccccaagugcaccggcaagauccccuccgcccgcgucuccauccuccacgagguccgccccgucaccuccggcugcuuccccaucaugcacgaccgcaccaagauccgccagcuccccaaccuccuccgcggcuacgagcacauccgccucuccacccacaacgucaucaacgccggcaacgcccccggcggccccuacaagaucggcaccuccggcuccugccccaacgucaccaacggcaacggcuucuucgccaccauggccugggccguccccaagaacgacaagaacaagaccgccaccaacccccucaccaucgagguccccuacaucugcaccgagggcgaggaccagaucaccgucuggggcuuccacuccgacaacgagacccagauggccaagcucuacggcgacuccaagccccagaaguucaccuccuccgccaacggcgucaccacccacuacgucucccagaucggcggcuuccccaaccagaccgaggacggcggccucccccaguccggccgcaucgucgucgacuacaugguccagaaguccggcaagaccggcaccaucaccuaccagcgcggcauccuccucccccagaaggucuggugcgccuccggccgcuccaaggucaucaagggcucccucccccucaucggcgaggccgacugccuccacgagaaguacggcggccucaacaaguccaagcccuacuacaccggcgagcacgccaaggccaucggcaacugccccaucugggucaagaccccccucaagcucgccaacggcaccaaguaccgcccccccgccaagcuccucaaggagcgcggcuucuucggcgccaucgccggcuuccucgagggcggcugggagggcaugaucgccggcuggcacggcuacaccucccacggcgcccacggcgucgccgucgccgccgaccucaaguccacccaggaggccaucaacaagaucaccaagaaccucaacucccucuccgagcucgaggucaagaaccuccagcgccucuccggcgccauggacgagcuccacaacgagauccucgagcucgacgagaaggucgacgaccuccgcgccgacaccaucuccucccagaucgagcucgccguccuccucuccaacgagggcaucaucaacuccgaggacgagcaccuccucgcccucgagcgcaagcucaagaagaugcucggccccuccgccgucgagaucggcaacggcugcuucgagaccaagcacaagugcaaccagaccugccucgaccgcaucgccgccggcaccuucgacgccggcgaguucucccuccccaccuucgacucccucaacaucaccgccgccucccucaacgacgacggccucgacaaccacaccauccuccucuacuacuccaccgccgccuccucccucgccgucacccucaugaucgccaucuucgucgucuacauggucucccgcgacaacgucuccugcuccaucugccucuga

SEQ ID NO: 122731 - RNA, 1758 nt, Artificial Sequence; identical to SEQ ID NO: 122684
  derived and/or modified CDS sequence (opt2) from hemagglutinin__InfluenzaB__AET43212

SEQ ID NO: 122732 - RNA, 1758 nt, Artificial Sequence; identical to SEQ ID NO: 122684
  derived and/or modified CDS sequence (opt2) from hemagglutinin__InfluenzaB__AET43223

SEQ ID NO: 122733 - RNA, 1758 nt, Artificial Sequence; identical to SEQ ID NO: 122730
  derived and/or modified CDS sequence (opt2) from hemagglutinin__InfluenzaB__AET50943

SEQ ID NO: 122734 - RNA, 1758 nt, Artificial Sequence; identical to SEQ ID NO: 122684
  derived and/or modified CDS sequence (opt2) from hemagglutinin__InfluenzaB__AET50954

SEQ ID NO: 122735 - RNA, 1758 nt, Artificial Sequence; identical to SEQ ID NO: 122684
  derived and/or modified CDS sequence (opt2) from hemagglutinin__InfluenzaB__AET50965

SEQ ID NO: 122736 - RNA, 1758 nt, Artificial Sequence; identical to SEQ ID NO: 122684
  derived and/or modified CDS sequence (opt2) from hemagglutinin__InfluenzaB__AET50976

SEQ ID NO: 122737 - RNA, 1758 nt, Artificial Sequence; identical to SEQ ID NO: 122684
  derived and/or modified CDS sequence (opt2) from hemagglutinin__InfluenzaB__AET74255

SEQ ID NO: 122738 - RNA, 1758 nt, Artificial Sequence; identical to SEQ ID NO: 122730
  derived and/or modified CDS sequence (opt2) from hemagglutinin__InfluenzaB__AET74277

SEQ ID NO: 122739 - RNA, 1758 nt, Artificial Sequence; identical to SEQ ID NO: 122684
  derived and/or modified CDS sequence (opt2) from hemagglutinin__InfluenzaB__AET74288

SEQ ID NO: 122740 - RNA, 1758 nt, Artificial Sequence
  derived and/or modified CDS sequence (opt2) from hemagglutinin__InfluenzaB__AET74299
augaaggccaucaucguccuccucauggucgucaccuccaacgccgaccgcaucugcaccggcaucaccuccuccaacuccccccacgucgucaagaccgccacccagggcgaggucaacgucaccggcgucaucccccucaccaccacccccaccaagucccacuucgccaaccucaagggcaccgagacccgcggcaagcucugccccaagugccucaacugcaccgaccucgacgucacccucggccgccccaagugcaccggcaagauccccuccgcccgcgucuccauccuccacgagguccgccccgucaccuccggcugcuuccccaucaugcacgaccgcaccaagauccgccagcuccccaaccuccuccgcggcuacgagcacauccgccucuccacccacaacgucaucaacgccgagaacgcccccggcggccccuacaagaucggcaccuccggcuccugccccaacgucaccaacggcaacggcuucuucgccaccauggccugggccguccccaagaacgacaagaacaagaccgccaccaacccccucaccaucgagguccccuacaucugcaccgagggcgaggaccagaucaccgucuggggcuuccacuccgacaacgagacccagauggccaagcucuacggcgacuccaagccccagaaguucaccuccuccgccaacggcgucaccacccacuacgucucccagaucggcggcuuccccaaccagaccgaggacggcggccucccccaguccggccgcaucgucgucgacuacaugguccagaaguccggcaagaccggcaccaucaccuaccagcgcggcauccuccucccccagaaggucuggugcgccuccggccgcuccaaggucaucaagggcucccucccccucaucggcgaggccgacugccuccacgagaaguacggcggccucaacaaguccaagcccuacuacaccggcgagcacgccaaggccaucggcaacugccccaucugggucaagaccccccucaagcucgccaacggcaccaaguaccgcccccccgccaagcuccucaaggagcgcggcuucuucggcgccaucgccggcuuccucgagggcggcugggagggcaugaucgccggcuggcacggcuacaccucccacggcgcccacggcgucgccgucgccgccgaccucaaguccacccaggaggccaucaacaagaucaccaacaaccucaacucccucuccgagcucgaggucaagaaccuccagcgccucuccggcgccauggacgagcuccacaacgagauccucgagcucgacgagaaggucgacgaccuccgcgccgacaccaucuccucccagaucgagcucgccguccuccucuccaacgagggcaucaucaacuccgaggacgagcaccuccucgcccucgagcgcaagcucaagaagaugcucggccccuccgccgucgagaucggcaacggcugcuucgagaccaagcacaagugcaaccagaccugccucgaccgcaucgccgccggcaccuucgacgccggcgaguucucccuccccaccuucgacucccucaacaucaccgccgccucccucaacgacgacggccucgacaaccacaccauccuccucuacuacuccaccgccgccuccucccucgccgucacccucaugaucgccaucuucgucgucuacauggucucccgcgacaacgucuccugcuccaucugccucuga

SEQ ID NO: 122741 - RNA, 1758 nt, Artificial Sequence; identical to SEQ ID NO: 122684
  derived and/or modified CDS sequence (opt2) from hemagglutinin__InfluenzaB__AET74329

SEQ ID NO: 122742 - RNA, 1758 nt, Artificial Sequence; identical to SEQ ID NO: 122684
  derived and/or modified CDS sequence (opt2) from hemagglutinin__InfluenzaB__AET74340

SEQ ID NO: 122743 - RNA, 1758 nt, Artificial Sequence; identical to SEQ ID NO: 122684
  derived and/or modified CDS sequence (opt2) from hemagglutinin__InfluenzaB__AET74351

SEQ ID NO: 122744 - RNA, 1758 nt, Artificial Sequence; identical to SEQ ID NO: 122681
  derived and/or modified CDS sequence (opt2) from hemagglutinin__InfluenzaB__AEY69077

SEQ ID NO: 122745 - RNA, 1758 nt, Artificial Sequence; identical to SEQ ID NO: 122681
  derived and/or modified CDS sequence (opt2) from hemagglutinin__InfluenzaB__AFB77676

SEQ ID NO: 122746 - RNA, 1758 nt, Artificial Sequence
  derived and/or modified CDS sequence (opt2) from hemagglutinin__InfluenzaB__AFB77677
augaaggccaucaucguccuccucauggucgucaccuccaacgccgaccgcaucugcaccggcaucaccuccuccaacuccccccacgucgucaagaccgccacccagggcgaggucaacgucaccggcgucaucccccucaccaccacccccaccaagucccacuucgccaaccucaagggcaccgagacccgcggcaagcucugccccaagugcuucaacugcaccgaccucgacgucgcccucggccgccccaagugcaccggcaagauccccuccgcccgcgucuccauccuccacgagguccgccccgucaccuccggcugcuuccccaucaugcacgaccgcaccaagauccgccagcuccccaaccuccuccgcggcuacgagcacauccgccucuccacccacaacgucaucaacgccgagaacgcccccggcggccccuacaagaucggcaccuccggcuccugccccaacgucaccaacggcaacggcuucuucgccaccauggccugggccguccccaagaacgacaagaacaagaccgccaccaacccccucaccaucgagguccccuacaucugcaccgagggcgaggaccagaucaccgucuggggcuuccacuccgacaacgagacccagauggccaagcucuacggcgacuccaagccccagaaguucaccuccuccgccaacggcgucaccacccacuacgucucccagaucggcggcuuccccaaccagaccgaggacggcggccucccccaguccggccgcaucgucgucgacuacaugguccagaaguccggcaagaccggcaccaucaccuaccagcgcggcauccuccucccccagaaggucuggugcgccuccggccgcuccaaggucaucaagggcucccucccccucaucggcgaggccgacugccuccacgagaaguacggcggccucaacaaguccaagcccuacuacaccggcgagcacgccaaggccaucggcaacugccccaucugggucaagaccccccucaagcucgccaacggcaccaaguaccgcccccccgccaagcuccucaaggagcgcggcuucuucggcgccaucgccggcuuccucgagggcggcugggagggcaugaucgccggcuggcacggcuacaccucccacggcgcccacggcgucgccgucgccgccgaccucaaguccacccaggaggccaucaacaagaucaccaagaaccucaacucccucuccgagcucgaggucaagaaccuccagcgccucuccggcgccauggacgagcuccacaacgagauccucgagcucgacgagaaggucgacgaccuccgcgccgacaccaucuccucccagaucgagcucgccguccuccucuccaacgagggcaucaucaacuccgaggacgagcaccuccucgcccucgagcgcaagcucaagaagaugcucggccccuccgccgucgagaucggcaacggcugcuucgagaccaagcacaagugcaaccagaccugccucgaccgcaucgccgccggcaccuucgacgccggcgaguucucccuccccaccuucgacucccucaacaucaccgccgccucccucaacgacgacggccucgacaaccacaccauccuccucuacuacuccaccgccgccuccucccucgccgucacccucaugaucgccaucuucgucgucuacauggucucccgcgacaacgucuccugcuccaucugccucuga

SEQ ID NO: 122747 - RNA, 1758 nt, Artificial Sequence; identical to SEQ ID NO: 122681
  derived and/or modified CDS sequence (opt2) from hemagglutinin__InfluenzaB__AFB77678

SEQ ID NO: 122748 - RNA, 1758 nt, Artificial Sequence; identical to SEQ ID NO: 122681
  derived and/or modified CDS sequence (opt2) from hemagglutinin__InfluenzaB__AFB77679

SEQ ID NO: 122749 - RNA, 1758 nt, Artificial Sequence
  derived and/or modified CDS sequence (opt2) from hemagglutinin__InfluenzaB__AFB77680
augaaggccaucaucguccuccucauggucgucaccuccaacgccgaccgcaucugcaccggcaucaccuccuccaacuccccccacgucgucaagaccgccacccagggcgaggucaacgucaccggcgucaucccccucaccaccacccccaccaagucccacuucgccaaccucaagggcaccgagacccgcggcaagcucugccccaagugccucaacugcaccgaccucgacgucgcccucggccgccccaagugcaccggcaagauccccuccgcccgcgucuccauccuccacgagguccgccccaucaccuccggcugcuuccccaucaugcacgaccgcaccaagauccgccagcuccccaaccuccuccgcggcuacgagcacauccgccucuccacccacaacgucaucaacgccgagaacgcccccggcggccccuacaagaucggcaccuccggcuccugccccaacgucaccaacggcaacggcuucuucgccaccauggccugggccguccccaagaacgacaagaacaagaccgccaccaacccccucaccaucgagguccccuacaucugcaccgagggcgaggaccagaucaccgucuggggcuuccacuccgacaacgagacccagauggccaagcucuacggcgacuccaagccccagaaguucaccuccuccgccaacggcgucaccacccacuacgucucccagaucggcggcuuccccaaccagaccgaggacggcggccucccccaguccggccgcaucgucgucgacuacaugguccagaaguccggcaagaccggcaccaucaccuaccagcgcggcauccuccucccccagaaggucuggugcgccuccggccgcuccaaggucaucaagggcucccucccccucaucggcgaggccgacugccuccacgagaaguacggcggccucaacaaguccaagcccuacuacaccggcgagcacgccaaggccaucggcaacugccccaucugggucaagaccccccucaagcucgccaacggcaccaaguaccgcccccccgccaagcuccucaaggagcgcggcuucuucggcgccaucgccggcuuccucgagggcggcugggagggcaugaucgccggcuggcacggcuacaccucccacggcgcccacggcgucgccgucgccgccgaccucaaguccacccaggaggccaucaacaagaucaccaagaaccucaacucccucuccgagcucgaggucaagaaccuccagcgccucuccggcgccauggacgagcuccacaacgagauccucgagcucgacgagaaggucgacgaccuccgcgccgacaccaucuccucccagaucgagcucgccguccuccucuccaacgagggcaucaucaacuccgaggacgagcaccuccucgcccucgagcgcaagcucaagaagaugcucggccccuccgccgucgagaucggcaacggcugcuucgagaccaagcacaagugcaaccagaccugccucgaccgcaucgccgccggcaccuucgacgccggcgaguucucccuccccaccuucgacucccucaacaucaccgccgccucccucaacgacgacggccucgacaaccacaccauccuccucuacuacuccaccgccgccuccucccucgccgucacccucaugaucgccaucuucgucgucuacauggucucccgcgacaacgucuccugcuccaucugccucuga

SEQ ID NO: 122750 - RNA, 1758 nt, Artificial Sequence; identical to SEQ ID NO: 122681
  derived and/or modified CDS sequence (opt2) from hemagglutinin__InfluenzaB__AFB77681

SEQ ID NO: 122751 - RNA, 1758 nt, Artificial Sequence
  derived and/or modified CDS sequence (opt2) from hemagglutinin__InfluenzaB__AFB77682
augaaggccaucaucguccuccucauggucgucaccuccaacgccgaccgcaucugcaccggcaucaccuccuccaacuccccccacgucgucaagaccgccacccagggcgaggucaacgucaccggcgucaucccccucaccaccacccccaccaagucccacuucgccaaccucaagggcaccgagacccgcggcaagcucugccccaagugccucaacugcaccgaccucgacgucgcccucggccgccccaagugcaccggcaagauccccuccgcccgcgucuccauccuccacgagguccgccccgucaccuccggcugcuuccccaucaugcacgaccgcaccaagauccgccagcuccccaaccuccuccgcggcuacgagcacauccgccucuccacccacaacgucaucaacgccgagaacgcccccggcggccccuacaagaucggcaccuccggcuccugccccaacaucaccaacggcaacggcuucuucgccaccauggccugggccguccccaagaacgacaagaacaagaccgccaccaacccccucaccaucgagguccccuacaucugcaccgagggcgaggaccagaucaccgucuggggcuuccacuccgacaacgagacccagauggccaagcucuacggcgacuccaagccccagaaguucaccuccuccgccaacggcgucaccacccacuacgucucccagaucggcggcuuccccaaccagaccgaggacggcggccucccccaguccggccgcaucgucgucgacuacaugguccagaaguccggcaagaccggcaccaucaccuaccagcgcggcauccuccucccccagaaggucuggugcgccuccggccgcuccaaggucaucaagggcucccucccccucaucggcgaggccgacugccuccacgagaaguacggcggccucaacaaguccaagcccuacuacaccggcgagcacgccaaggccaucggcaacugccccaucugggucaagaccccccucaagcucgccaacggcaccaaguaccgcccccccgccaagcuccucaaggagcgcggcuucuucggcgccaucgccggcuuccucgagggcggcugggagggcaugaucgccggcuggcacggcuacaccucccacggcgcccacggcgucgccgucgccgccgaccucaaguccacccaggaggccaucaacaagaucacccagaaccucaacucccucuccgagcucgaggucaagaaccuccagcgccucuccggcgccauggacgagcuccacaacgagauccucgagcucgacgagaaggucgacgaccuccgcgccgacaccaucuccucccagaucgagcucgccguccuccucuccaacgagggcaucaucaacuccgaggacgagcaccuccucgcccucgagcgcaagcucaagaagaugcucggccccuccgccgucgagaucggcaacggcugcuucgagaccaagcacaagugcaaccagaccugccucgaccgcaucgccgccggcaccuucgacgccggcgaguucucccuccccaccuucgacucccucaacaucaccgccgccucccucaacgacgacggccucgacaaccacaccauccuccucuacuacuccaccgccgccuccucccucgccgucacccucaugaucgccaucuucgucgucuacauggucucccgcgacaacgucuccugcuccaucugccucuga

SEQ ID NO: 122752 - RNA, 1758 nt, Artificial Sequence; identical to SEQ ID NO: 122681
  derived and/or modified CDS sequence (opt2) from hemagglutinin__InfluenzaB__AFB77683

SEQ ID NO: 122753 - RNA, 1758 nt, Artificial Sequence; identical to SEQ ID NO: 122681
  derived and/or modified CDS sequence (opt2) from hemagglutinin__InfluenzaB__AFB77684

SEQ ID NO: 122754 - RNA, 1758 nt, Artificial Sequence
  derived and/or modified CDS sequence (opt2) from hemagglutinin__InfluenzaB__AFB77685
augaaggccaucaucguccuccucauggucgucaccuccaacgccgaccgcaucugcaccggcaucaccuccuccaacuccccccacgucgucaagaccgccacccagggcgaggucaacgucaccggcgucaucccccucaccaccacccccaccaagucccacuucgccaaccucaagggcaccgagacccgcggcaagcucugccccaagugccucaacugcaccgaccucgacgucgcccucggccgccccaagugcaccggcaagacccccuccgcccgcgucuccauccuccacgagguccgccccgucaccuccggcugcuuccccaucaugcacgaccgcaccaagauccgccagcuccccaaccuccuccgcggcuacgagcacauccgccucuccacccacaacgucaucaacgccgagaacgcccccggcggccccuacaagaucggcaccuccggcuccugccccaacaucaccaacggcaacggcuucuucgccaccauggccugggccguccccaagaacgacaagaacaagaccgccaccaacccccucaccaucgagguccccuacaucugcaccgagggcgaggaccagaucaccgucuggggcuuccacuccgacaacgagacccagauggccaagcucuacggcgacuccaagccccagaaguucaccuccuccgccaacggcgucaccacccacuacaucucccagaucggcggcuuccccaaccagaccgaggacggcggccucccccaguccggccgcaucgucgucgacuacaugguccagaaguccgagaagaccggcaccaucaccuaccagcgcggcauccuccucccccagaaggucuggugcgccuccggccgcuccaaggucaucaagggcucccucccccucaucggcgaggccgacugccuccacgagaaguacggcggccucaacaaguccaagcccuacuacaccggcgagcacgccaaggccaucggcaacugccccaucugggucaagaccccccucaagcucgccaacggcaccaaguaccgcccccccgccaagcuccucaaggagcgcggcuucuucggcgccaucgccggcuuccucgagggcggcugggagggcaugaucgccggcuggcacggcuacaccucccacggcgcccacggcgucgccgucgccgccgaccucaaguccacccaggaggccaucaacaagaucaccaagaaccucaacucccucuccgagcucgaggucaagaaccuccagcgccucuccggcgccauggacgagcuccacaacgagauccucgagcucgacgagaaggucgacgaccuccgcgccgacaccaucuccucccagaucgagcucgccguccuccucuccaacgagggcaucaucaacuccgaggacgagcaccuccucgcccucgagcgcaagcucaagaagaugcucggccccuccgccgucgagaucggcaacggcugcuucgagaccaagcacaagugcaaccagaccugccucgaccgcaucgccgccggcaccuucgacgccggcgaguucucccuccccaccuucgacucccucaacaucaccgccgccucccucaacgacgacggccucgacaaccacaccauccuccucuacuacuccaccgccgccuccucccucgccgucacccucaugaucgccaucuucgucgucuacauggucucccgcgacaacgucuccugcuccaucugccucuga

SEQ ID NO: 122755 - RNA, 1758 nt, Artificial Sequence
  derived and/or modified CDS sequence (opt2) from hemagglutinin__InfluenzaB__AFB77686
augaaggccaucaucguccuccucauggucgucaccuccaacgccgaccgcaucugcaccggcaucaccuccuccaacuccccccacgucgucaagaccgccacccagggcgaggucaacgucaccggcgucaucccccucaccaccacccccaccaagucccacuucgccaaccucaagggcaccgagacccgcggcaagcucugccccaagugccucaacugcaccgaccucgacgucgcccucggccgccccaagugcaccggcaagauccccuccgcccgcgucuccauccuccacgagguccgccccgucaccuccggcugcuuccccaucaugcacgaccgcaccaagauccgccagcuccccaaccuccuccgcggcuacgagcacauccgccucuccacccacaacgucaucaacgccgagaacgcccccggcggccccuacaagaucggcaccuccggcuccugccccaacaucaccaacggcaacggcuucuucgccaccauggccugggccguccccaagaacgacaagaacaagaccgccaccaacccccucaccaucgagguccccuacaucugcaccgagggcgaggaccagaucaccgucuggggcuuccacuccgacaacgagacccagauggccaagcucuacggcgacuccaagccccagaaguucaccuccuccgccaacggcgucaccacccacuacgucucccagaucuccggcuuccccaaccagaccgaggacggcggccucccccaguccggccgcaucgucgucgacuacaugguccagaaguccggcaagaccggcaccaucaccuaccagcgcggcauccuccucccccagaaggucuggugcgccuccggccgcuccaaggucaucaagggcucccucccccucaucggcgaggccgacugccuccacgagaaguacggcggccucaacaaguccaagcccuacuacaccggcgagcacgccaaggccaucggcaacugccccaucugggucaagaccccccucaagcucgccaacggcaccaaguaccgcccccccgccaagcuccucaaggagcgcggcuucuucggcgccaucgccggcuuccucgagggcggcugggagggcaugaucgccggcuggcacggcuacaccucccacggcgcccacggcgucgccgucgccgccgaccucaaguccacccaggaggccaucaacaagaucacccagaaccucaacucccucuccgagcucgaggucaagaaccuccagcgccucuccggcgccauggacgagcuccacaacgagauccucgagcucgacgagaaggucgacgaccuccgcgccgacaccaucuccucccagaucgagcucgccguccuccucuccaacgagggcaucaucaacuccgaggacgagcaccuccucgcccucgagcgcaagcucaagaagaugcucggccccuccgccgucgagaucggcaacggcugcuucgagaccaagcacaagugcaaccagaccugccucgaccgcaucgccgccggcaccuucgacgccggcgaguucucccuccccaccuucgacucccucaacaucaccgccgccucccucaacgacgacggccucgacaaccacaccauccuccucuacuacuccaccgccgccuccucccucgccgucacccucaugaucgccaucuucgucgucuacauggucucccgcgacaacgucuccugcuccaucugccucuga

SEQ ID NO: 122756 - RNA, 1758 nt, Artificial Sequence
  derived and/or modified CDS sequence (opt2) from hemagglutinin__InfluenzaB__AFB77687
augaaggccaucaucguccuccucauggucgucaccuccaacgccgaccgcaucugcaccggcaucaccuccuccaacuccccccacgucgucaagaccgccacccagggcgaggucaacgucaccggcgucaucccccucaccaccacccccaccaagucccacuucgccaaccucaagggcaccgagacccgcggcaagcucugccccaagugccucaacugcaccgaccucgacgucgcccucggccgccccaagugcaccggcaagauccccuccgcccgcgucuccauccuccacgagguccgccccgucaccuccggcugcuuccccaucaugcacgaccgcaccaagauccgccagcuccccaaccuccuccgcggcuacgagcacaucaagcucuccacccacaacgucaucaacgccgagaacgcccccggcggccccuacaagaucggcaccuccggcuccugccccaacgucaccaacggcaacggcuucuucgccaccauggccugggccguccccaagaacgacaagaacaagaccgccaccaacccccucaccaucgagguccccuacaucugcaccgagggcgaggaccagaucaccgucuggggcuuccacuccgacaacgagacccagauggccaagcucuacggcgacuccaagccccagaaguucaccuccuccgccaacggcgucaccacccacuacgucucccagaucggcggcuuccccaaccagaccgaggacggcggccucccccaguccggccgcaucgucgucgacuacaugguccagaaguccggcaagaccggcaccaucaccuaccagcgcggcauccuccucccccagaaggucuggugcgccuccggccgcuccaaggucaucaagggcucccucccccucaucggcgaggccgacugccuccacgagaaguacggcggccucaacaaguccaagcccuacuacaccggcgagcacgccaaggccaucggcaacugccccaucugggucaagaccccccucaagcucgccaacggcaccaaguaccgcccccccgccaagcuccucaaggagcgcggcuucuucggcgccaucgccggcuuccucgagggcggcugggagggcaugaucgccggcuggcacggcuacaccucccacggcgcccacggcgucgccgucgccgccgaccucaaguccacccaggaggccaucaacaagaucaccaagaaccucaacucccucuccgagcucgaggucaagaaccuccagcgccucuccggcgccauggacgagcuccacaacgagauccucgagcucgacgagaaggucgacgaccuccgcgccgacaccaucuccucccagaucgagcucgccguccuccucuccaacgagggcaucaucaacuccgaggacgagcaccuccucgcccucgagcgcaagcucaagaagaugcucggccccuccgccgucgagaucggcaacggcugcuucgagaccaagcacaagugcaaccagaccugccucgaccgcaucgccgccggcaccuucgacgccggcgaguucucccuccccaccuucgacucccucaacaucaccgccgccucccucaacgacgacggccucgacaaccacaccauccuccucuacuacuccaccgccgccuccucccucgccgucacccucaugaucgccaucuucgucgucuacauggucucccgcgacaacgucuccugcuccaucugccucuga

SEQ ID NO: 122757 - RNA, 1758 nt, Artificial Sequence
  derived and/or modified CDS sequence (opt2) from hemagglutinin__InfluenzaB__AFB77688
augaaggccaucaucguccuccucauggucgucaccuccaacgccgaccgcaucugcaccggcaucaccuccuccaacuccccccacgucgucaagaccgccacccagggcgaggucaacgucaccggcgucaucccccucaccaccacccccaccaagucccacuucgccaaccucaagggcaccgagacccgcggcaagcucugccccaagugccucaacugcaccgaccucgacgucgcccucggccgccccaagugcaccggcaagauccccuccgcccgcgucuccauccuccacgagguccgccccgucaccuccggcugcuuccccaucaugcacgaccgcaccaagauccgccagcuccccaaccuccuccgcggcuacgagcacauccgccucuccacccacaacgucaucaacgccgagaacgcccccggcggccccuacaagaucggcaccuccggcuccugccccaacgucaccaacggcaacggcuucuucgccaccauggccugggccguccccaagaacgacaagaacaagaccgccaccaacccccucaccaucgagguccccuacaucugcaccgagggcgaggaccagaucaccgucuggggcuuccacuccgacaacgagacccagauggccaagcucuacggcgacuccaagccccagaaguucaccuccuccgccaacggcgucaccacccacuacgucucccagaucggcggcuuccccaaccagaccgaggacggcggccucccccaguccggccgcaucgucgucgacuacaugguccagaaguccggcaagaccggcaccaucaccuaccagcgcggcauccuccucccccagaaggucuggugcgccuccggccgcuccaaggucaucaagggcucccucccccucaucggcgaggccgacugccuccacgagaaguacggcggccucaacaaguccaagcccuacuacaccggcgagcacgccaaggccaucggcaacugccccaucugggucaaggccccccucaagcucgccaacggcaccaaguaccgcccccccgccaagcuccucaaggagcgcggcuucuucggcgccaucgccggcuuccucgagggcggcugggagggcaugaucgccggcuggcacggcuacaccucccacggcgcccacggcgucgccgucgccgccgaccucaaguccacccaggaggccaucaacaagaucaccaagaaccucaacucccucuccgagcucgaggucaagaaccuccagcgccucuccggcgccauggacgagcuccacaacgagauccucgagcucgacgagaaggucgacgaccuccgcgccgacaccaucuccucccagaucgagcucgccguccuccucuccaacgagggcaucaucaacuccgaggacgagcaccuccucgcccucgagcgcaagcucaagaagaugcucggccccuccgccgucgagaucggcaacggcugcuucgagaccaagcacaagugcaaccagaccugccucgaccgcaucgccgccggcaccuucgacgccggcgaguucucccuccccaccuucgacucccucaacaucaccgccgccucccucaacgacgacggccucgacaaccacaccauccuccucuacuacuccaccgccgccuccucccucgccgucacccucaugaucgccaucuucgucgucuacauggucucccgcgacaacgucuccugcuccaucugccucuga

SEQ ID NO: 122758 - RNA, 1758 nt, Artificial Sequence; identical to SEQ ID NO: 122681
  derived and/or modified CDS sequence (opt2) from hemagglutinin__InfluenzaB__AFB77689

SEQ ID NO: 122759 - RNA, 1758 nt, Artificial Sequence; identical to SEQ ID NO: 122681
  derived and/or modified CDS sequence (opt2) from hemagglutinin__InfluenzaB__AFB77690

SEQ ID NO: 122760 - RNA, 1758 nt, Artificial Sequence; identical to SEQ ID NO: 122719
  derived and/or modified CDS sequence (opt2) from hemagglutinin__InfluenzaB__AFE00360

SEQ ID NO: 122761 - RNA, 1758 nt, Artificial Sequence; identical to SEQ ID NO: 122719
  derived and/or modified CDS sequence (opt2) from hemagglutinin__InfluenzaB__AFF18534

SEQ ID NO: 122762 - RNA, 1758 nt, Artificial Sequence; identical to SEQ ID NO: 122719
  derived and/or modified CDS sequence (opt2) from hemagglutinin__InfluenzaB__AFF18543

SEQ ID NO: 122763 - RNA, 1758 nt, Artificial Sequence; identical to SEQ ID NO: 122681
  derived and/or modified CDS sequence (opt2) from hemagglutinin__InfluenzaB__AFG48978

SEQ ID NO: 122764 - RNA, 1758 nt, Artificial Sequence; identical to SEQ ID NO: 122681
  derived and/or modified CDS sequence (opt2) from hemagglutinin__InfluenzaB__AFG48997

SEQ ID NO: 122765 - RNA, 1758 nt, Artificial Sequence
  derived and/or modified CDS sequence (opt2) from hemagglutinin__InfluenzaB__AFG48998
augaaggccaucaucguccuccucauggucgucaccuccaacgccgaccgcaucugcaccggcaucaccuccuccaacuccccccacgucgucaagaccgccacccagggcgaggucaacgucaccggcgucaucccccucaccaccacccccaccaagucccacuucgccaaccucaagggcaccgagacccgcggcaagcucugccccaagugccccaacugcaccgaccucgacgucgcccucggccgccccaagugcaccggcaagauccccuccgcccgcgucuccauccuccacgagguccgccccgucaccuccggcugcuuccccaucaugcacgaccgcaccaagauccgccagcuccccaaccuccuccgcggcuacgagcacauccgccucuccacccacaacgucaucaacgccgagaacgcccccggcggccccuacaagaucggcaccuccggcuccugccccaacgucaccaacggcaacggcuucuucgagaccauggccugggccguccccaagaacgacaagaacaagaccgccaccaacccccucaccaucgagguccccuacaucugcaccgagggcgaggaccagaucaccgucuggggcuuccacuccgacaacgagacccagauggccaagcucuacggcgacuccaagccccagaaguucaccuccuccgccaacggcgucaccacccacuacgucucccagaucggcggcuuccccaaccagaccgaggacggcggccucccccaguccggccgcaucgucgucgacuacaugguccagaaguccggcaagaccggcaccaucaccuaccagcgcggcauccuccucccccagaaggucuggugcgccuccggccgcuccaaggucaucaagggcucccucccccucaucggcgaggccgacugccuccacgagaaguacggcggccucaacaaguccaagcccuacuacaccggcgagcacgccaaggccaucggcaacugccccaucugggucaagaccccccucaagcucgccaacggcaccaaguaccgcccccccgccaagcuccucaaggagcgcggcuucuucggcgccaucgccggcuuccucgagggcggcugggagggcaugaucgccggcuggcacggcuacaccucccacggcgcccacggcgucgccgucgccgccgaccucaaguccacccaggaggccaucaacaagaucaccaagaaccucaacucccucuccgagcucgaggucaagaaccuccagcgccucuccggcgccauggacgagcuccacaacgagauccucgagcucgacgagaaggucgacgaccuccgcgccgacaccaucuccucccagaucgagcucgccguccuccucuccaacgagggcaucaucaacuccgaggacgagcaccuccucgcccucgagcgcaagcucaagaagaugcucggccccuccgccgucgagaucggcaacggcugcuucgagaccaagcacaagugcaaccagaccugccucgaccgcaucgccgccggcaccuucgacgccggcgaguucucccuccccaccuucgacucccucaacaucaccgccgccucccucaacgacgacggccucgacaaccacaccauccuccucuacuacuccaccgccgccuccucccucgccgucacccucaugaucgccaucuucgucgucuacauggucucccgcgacaacgucuccugcuccaucugccucuga

SEQ ID NO: 122766 - RNA, 1755 nt, Artificial Sequence
  derived and/or modified CDS sequence (opt2) from hemagglutinin__InfluenzaB__AFG49012
augaaggccaucaucguccuccucauggucgucaccuccaacgccgaccgcaucugcaccggcaucaccuccuccaacuccccccacgucgucaagaccgccacccagggcgaggucaacgucaccggcgucaucccccucaccaccacccccaccaaguccuacuucgccaaccucaagggcaccaagacccgcggcaagcucugccccgacugccucaacugcaccgaccucgacgucgcccucggccgccccaugugcgucggcaccacccccuccgccaaggccuccauccuccacgagguccgccccgucaccuccggcugcuuccccaucaugcacgaccgcaccaagauccgccagcuccccaaccuccuccgcggcuacgagaacauccgccucuccacccagaacgucaucgacgccgagaaggcccccggcggccccuaccgccucggcaccuccggcuccugccccaacgccaccuccaagaucggcuucuucgccaccauggccugggccguccccaaggacaacuacaagaacgccaccaacccccucaccgucgagguccccuacaucugcaccgagggcgaggaccagaucaccgucuggggcuuccacuccgacaacaagacccagaugaagaaccucuacggcgacuccaacccccagaaguucaccuccuccgccaacggcgucaccacccacuacgucucccagaucggcgacuuccccgaccagaccgaggacggcggccucccccaguccggccgcaucgucgucgacuacaugaugcagaagcccggcaagaccggcaccaucgucuaccagcgcggcguccuccucccccagaaggucuggugcgccuccggccgcuccaaggucaucaagggcucccucccccucaucggcgaggccgacugccuccacgagaaguacggcggccucaacaaguccaagcccuacuacaccggcgagcacgccaaggccaucggcaacugccccaucugggucaagaccccccucaagcucgccaacggcaccaaguaccgcccccccgccaagcuccucaaggagcgcggcuucuucggcgccaucgccuccuuccucgagggcggcugggagggcaugaucgccggcuggcacggcuacaccucccacggcgcccacggcgucgccgucgccgccgaccucaaguccacccaggaggccaucaacaagaucaccaagaaccucaacucccucuccgagcucgaggucaagaaccuccagcgccucuccggcgccauggacgagcuccacaacgagauccucgagcucgacgagaaggucgacgaccuccgcgccgacaccaucuccucccagaucgagcucgccguccuccucuccaacgagggcaucaucaacuccgaggacgagcaccuccucgcccucgagcgcaagcucaagaagaugcucggccccuccgccgucgacaucggcaacggcugcuucgagaccaagcacaagugcaaccagaccugccucgaccgcaucgccgccggcaccuucaacgccggcgaguucucccuccccaccuucgacucccucaacaucaccgccgccucccucaacgacgacggccucgacaaccacaccauccuccucuacuacuccaccgccgccuccucccucgccgucacccucaugcucgccaucuucaucgucuacauggucucccgcgacaacgucuccugcuccaucugccucuga

SEQ ID NO: 122767 - RNA, 1755 nt, Artificial Sequence
  derived and/or modified CDS sequence (opt2) from hemagglutinin__InfluenzaB__AFG49013
augaaggccaucaucguccuccucauggucgucaccuccaacgccgaccgcaucugcaccggcaucaccuccuccaacuccccccacgucgucaagaccgccacccagggcgaggucaacgucaccggcgucaucccccucaccaccacccccaccaaguccuacuucgccaaccucaagggcaccaagacccgcggcaagcucugccccgacugccucaacugcaccgaccucgacgucgcccucggccgccccaugugcgucggcaccacccccuccgccaaggccuccauccuccacgagguccgccccgucaccuccggcugcuuccccaucaugcacgaccgcaccaagauccgccagcucgccaaccuccuccgcggcuacgagaacauccgccucuccacccagaacgucaucgacgccgagaaggcccccggcggccccuaccgccucggcaccuccggcuccugccccaacgccaccuccaaguccggcuucuucgccaccauggccugggccguccccaaggacaacaacaagaacgccaccaacccccucaccgucgagguccccuacaucugcaccgagggcgaggaccagaucaccgucuggggcuuccacuccgacaacaagacccagaugaagaaccucuacggcgacuccaacccccagaaguucaccuccuccgccaacggcgucaccacccacuacgucucccagaucggcggcuuccccgaccagaccgaggacggcggccucccccaguccggccgcaucgucgucgacuacaugaugcagaagcccggcaagaccggcaccaucgucuaccagcgcggcguccuccucccccagaaggucuggugcgccuccggccgcuccaaggucaucaagggcucccucccccucaucggcgaggccgacugccuccacgagaaguacggcggccucaacaaguccaagcccuacuacaccggcgagcacgccaaggccaucggcaacugccccaucugggucaagaccccccucaagcucgccaacggcaccaaguaccgcccccccgccaagcuccucaaggagcgcggcuucuucggcgccaucgccggcuuccucgagggcggcugggagggcaugaucgccggcuggcacggcuacaccucccacggcgcccacggcgucgccgucgccgccgaccucaaguccacccaggaggccaucaacaagaucaccaagaaccucaacucccucuccgagcucgaggucaagaaccuccagcgccucuccggcgccauggacgagcuccacaacgagauccucgagcucgacgagaaggucgacgaccuccgcgccgacaccaucuccucccagaucgagcucgccguccuccucuccaacgagggcaucaucaacuccgaggacgagcaccuccucgcccucgagcgcaagcucaagaagaugcucggccccuccgccgucgacaucggcaacggcugcuucgagaccaagcacaagugcaaccagaccugccucgaccgcaucgccgccggcaccuucaacgccggcgaguucucccuccccaccuucgacucccucaacaucaccgccgccucccucaacgacgacggccucgacaaccacaccauccuccucuacuacuccaccgccgccuccucccucgccgucacccucaugcucgccaucuucaucgucuacauggucucccgcgacaacgucuccugcuccaucugccucuga

SEQ ID NO: 122768 - RNA, 1755 nt, Artificial Sequence
  derived and/or modified CDS sequence (opt2) from hemagglutinin__InfluenzaB__AFH57865
augaaggccaucaucguccuccucauggucgucaccuccaacgccgaccgcaucugcaccggcaucaccuccuccaacuccccccacgucgucaagaccgccacccagggcgaggucaacgucaccggcgucaucccccucaccaccacccccaccaaguccuacuucgccaaccucaagggcacccgcacccgcggcaagcucugccccgacugccucaacugcaccgaccucgacgucgcccucggccgccccaugugcgucggcaccacccccuccgccaaggccuccauccuccacgagguccgccccgucaccuccggcugcuuccccaucaugcacgaccgcaccaagauccgccagcuccccaaccuccuccgcggcuacgagaacauccgccucuccacccagaacgucaucgacgccgagaaggcccccggcggccccuaccgccucggcaccuccggcuccugccccaacgccaccuccaaguccggcuucuucgccaccauggccugggccguccccaaggacaacaacaagaacgccaccaacccccucaccgucgagguccccuacaucugcaccgagggcgaggaccagaucaccgucuggggcuuccacuccgacaacaagacccccaugaagaaccucuacggcgacuccaacccccagaaguucaccuccuccgccaacggcgucaccacccacuacgucucccagaucggcggcuuccccgaccagaccgaggacggcggccucccccaguccggccgcaucgucgucgacuacaugaugcagaagcccggcaagaccggcaccaucgucuaccagcgcggcguccuccucccccagaaggucuggugcgccuccggccgcuccaaggucaucaagggcucccucccccucaucggcgaggccgacugccuccacgagaaguacggcggccucaacaaguccaagcccuacuacaccggcgagcacgccaaggccaucggcaacugccccaucugggucaagaccccccucaagcucgccaacggcaccaaguaccgcccccccgccaagcuccucaaggagcgcggcuucuucggcgccaucgccggcuuccucgagggcggcugggagggcaugaucgccggcuggcacggcuacaccucccacggcgcccacggcgucgccgucgccgccgaccucaaguccacccaggaggccaucaacaagaucaccaagaaccucaacucccucuccgagcucgaggucaagaaccuccagcgccucuccggcgccauggacgagcuccacaacgagauccucgagcucgacgagaaggucgacgaccuccgcgccgacaccaucuccucccagaucgagcucgccguccuccucuccaacgagggcaucaucaacuccgaggacgagcaccuccucgcccucgagcgcaagcucaagaagaugcucggccccuccgccgucgacaucggcaacggcugcuucgagaccaagcacaagugcaaccagaccugccucgaccgcaucgccgccggcaccuucaacgccggcgaguucucccuccccaccuucgacucccucaacaucaccgccgccucccucaacgacgacggccucgacaaccacaccauccuccucuacuacuccaccgccgccuccucccucgccgucacccucaugcucgccaucuucaucgucuacauggucucccgcgacaacgucuccugcuccaucugccucuga

SEQ ID NO: 122769 - RNA, 1755 nt, Artificial Sequence
  derived and/or modified CDS sequence (opt2) from hemagglutinin__InfluenzaB__AFH57876
augaaggccaucaucguccuccucauggucgucaccuccaacgccgaccgcaucugcaccggcaucaccuccuccaacuccccccacgucgucaagaccgccacccagggcgaggucaacgucaccggcgucaucccccucaccaccacccccaccaaguccuacuucgccaaccucaagggcacccgcacccgcggcaagcucugccccgacugccucaacugcaccgaccucgacgucgcccucggccgccccaugugcgucggcaccacccccuccgccaaggccuccauccuccacgagguccgccccgucaccuccggcugcuuccccaucaugcacgaccgcaccaagauccgccagcuccccaaccuccuccgcggcuacgagaacauccgccucuccacccagaacgucaucgacgccgagaaggcccccggcggccccuaccgccucggcaccuccggcuccugccccaacgccaccuccaaguccggcuucuucgccaccauggccugggccguccccaaggacaacaacaagaacgccaccaacccccucaccgucgagguccccuacaucugcaccgagggcgaggaccagaucaccgucuggggcuuccacuccgacaacaagaaccagaugaagaaccucuacggcgacuccaacccccagaaguucaccuccuccgccaacggcgucaccacccacuacgucucccagaucggcuccuuccccgaccagaccgaggacggcggccucccccaguccggccgcaucgucgucgacuacaugaugcagaagcccggcaagaccggcaccaucgucuaccagcgcggcauccuccucccccagaaggucuggugcgccuccggccgcuccaaggucaucaagggcucccucccccucaucggcgaggccgacugccuccacgagaaguacggcggccucaacaaguccaagcccuacuacaccggcgagcacgccaaggccaucggcaacugccccaucugggucaagaccccccucaagcucgccaacggcaccaaguaccgcccccccgccaagcuccucaaggagcgcggcuucuucggcgccaucgccggcuuccucgagggcggcugggagggcaugaucgccggcuggcacggcuacaccucccacggcgcccacggcgucgccgucgccgccgaccucaaguccacccaggaggccaucaacaagaucaccaagaaccucaacucccucuccgagcucgaggucaagaaccuccagcgccucuccggcgccauggacgagcuccacaacgagauccucgagcucgacgagaaggucgacgaccuccgcgccgacaccaucuccucccagaucgagcucgccguccuccucuccaacgagggcaucaucaacuccgaggacgagcaccuccucgcccucgagcgcaagcucaagaagaugcucggccccuccgccgucgagaucggcaacggcugcuucgagaccaagcacaagugcaaccagaccugccucgaccgcaucgccgccggcaccuucaacgccggcgaguucucccuccccaccuucgacucccucaacaucaccgccgccucccucaacgacgacggccucgacaaccacaccauccuccucuacuacuccaccgccgccuccucccucgccgucacccucaugcucgccaucuucaucgucuacauggucucccgcgacaacgucuccugcuccaucugccucuga

SEQ ID NO: 122770 - RNA, 1755 nt, Artificial Sequence
  derived and/or modified CDS sequence (opt2) from hemagglutinin__InfluenzaB__AFH57942
augaaggccaucaucguccuccucauggucgucaccuccaacgccgaccgcaucugcaccggcaucaccuccuccaacuccccccacgucgucaagaccgccacccagggcgaggucaacgucaccggcgucaucccccucaccaccacccccaccaaguccuacuucgccaaccucaagggcacccgcacccgcggcaagcucugccccgacugccucaacugcaccgaccucgacgucgcccucggccgccccaugugcgucggcaccacccccuccgccaaggccuccauccuccacgagguccgccccgucaccuccggcugcuuccccaucaugcacgaccgcaccaagauccgccagcuccccaaccuccuccgcggcuacgagaacauccgccucuccacccagaacgucaucgacgccgagaaggcccccggcggccccuaccgccucggcaccuccggcuccugccccaacgccaccuccaagaucggcuucuucgccaccauggccugggccguccccaaggacaacuacaagaacgccaccaacccccucaccgucgagguccccuacaucugcaccgagggcgaggaccagaucaccgucuggggcuuccacuccgacaacaagaaccagaugaagucccucuacggcgacuccaacccccagaaguucaccuccuccgccaacggcgucaccacccacuacgucucccagaucggcgacuuccccgaccagaccgaggacggcggccucccccaguccggccgcaucgucgucgacuacaugaugcagaagcccggcaagaccggcaccaucgucuaccagcgcggcguccuccucccccagaaggucuggugcgccuccggccgcuccaaggucaucaagggcucccucccccucaucggcgaggccgacugccuccacgagaaguacggcggccucaacaaguccaagcccuacuacaccggcgagcacgccaaggccaucggcaacugccccaucugggucaagaccccccucaagcucgccaacggcaccaaguaccgcccccccgccaagcuccucaaggagcgcggcuucuucggcgccaucgccggcuuccucgagggcggcugggagggcaugaucgccggcuggcacggcuacaccucccacggcgcccacggcgucgccgucgccgccgaccucaaguccacccaggaggccaucaacaagaucaccaagaaccucaacucccucuccgagcucgaggucaagaaccuccagcgccucuccggcgccauggacgagcuccacaacgagauccucgagcucgacgagaaggucgacgaccuccgcgccgacaccaucuccucccagaucgagcucgccguccuccucuccaacgagggcaucaucaacuccgaggacgagcaccuccucgcccucgagcgcaagcucaagaagaugcucggccccuccgccgucgacaucggcaacggcugcuucgagaccaagcacaagugcaaccagaccugccucgaccgcaucgccgccggcaccuucaacgccggcgaguucucccuccccaccuucgacucccucaacaucaccgccgccucccucaacgacgacggccucgacaaccacaccauccuccucuacuacuccaccgccgccuccucccucgccgucacccucaugcucgccaucuucaucgucuacauggucucccgcgacaacgucuccugcuccaucugccucuga

SEQ ID NO: 122771 - RNA, 1752 nt, Artificial Sequence
  derived and/or modified CDS sequence (opt2) from hemagglutinin__InfluenzaB__AFH57986
augaaggccaucaucguccuccucauggucgucaccuccaacgccgaccgcaucugcaccggcaucaccuccuccaacuccccccacgucgucaagaccgccacccagggcgaggucaacgucaccggcgucaucccccucaccaccacccccaccaagucccacuucgccaaccucaagggcaccaagacccgcggcaagcucugccccaacugccucaacugcaccgaccucgacgucgcccucggccgccccaugugcgucggcaccacccccuccgccaaggccuccauccuccacgagguccgccccgucaccuccggcugcuuccccaucaugcacgaccgcaccaagauccgccagcuccccaaccuccuccgcggcuacgagaacauccgccucuccacccagaacgucaucaacgccgagcgcgcccccggcggccccuaccgccucggcaccuccggcuccugccccaacgucaccucccgcgacggcuucuucgccaccauggccugggccgucccccgcgacaacaagaccgccaccaacccccucaccgucgagguccccuacaucugcaccaagggcgaggaccagaucaccgucuggggcuuccacuccgacgacaagacccagaugaagaaccucuacggcgacuccaacccccagaaguucaccuccuccgccaacggcgucaccacccacuacgucucccagaucggcggcuuccccaaccagaccgaggacggcggccucccccaguccggccgcaucgucgucgacuacaugguccagaagcccggcaagaccggcaccaucgucuaccagcgcggcguccuccucccccagaaggucuggugcgccuccggccgcuccaaggucaucaagggcucccucccccucaucggcgaggccgacugccuccacgagaaguacggcggccucaacaaguccaagcccuacuacaccggcgagcacgccaaggccaucggcaacugccccaucugggucaagaccccccucaagcucgccaacggcaccaaguaccgcccccccgccaagcuccucaaggagcgcggcuucuucggcgccaucgccggcuuccucgagggcggcugggagggcaugaucgccggcuggcacggcuacaccucccacggcgcccacggcgucgccgucgccgccgaccucaaguccacccaggaggccaucaacaagaucaccaagaaccucaacucccucuccgagcucgaggucaagaaccuccagcgccucuccggcgccauggacgagcuccacaacgagauccucgagcucgacgagaaggucgacgaccuccgcgccgacaccaucuccucccagaucgagcucgccguccuccucuccaacgagggcaucaucaacuccgaggacgagcaccuccucgcccucgagcgcaagcucaagaagaugcucggccccuccgccgucgacaucggcaacggcugcuucgagaccaagcacaagugcaaccagaccugccucgaccgcaucgccgccggcaccuucaacgccggcgaguucucccuccccaccuucgacucccucaacaucaccgccgccucccucaacgacgacggccucgacaaccacaccauccuccucuacuacuccaccgccgccuccucccucgccgucacccucaugaucgccaucuucaucgucuacauggucucccgcgacaacgucuccugcuccaucugccucuga

SEQ ID NO: 122772 - RNA, 1758 nt, Artificial Sequence
  derived and/or modified CDS sequence (opt2) from hemagglutinin__InfluenzaB__AFH58249
augaaggccaucaucguccuccucauggucgucaccuccaacgccgaccgcaucugcaccggcaucaccuccuccaacuccccccacgucgucaagaccgccacccagggcgaggucaacgucaccggcgucaucccccucaccaccacccccaccaagucccacuucgccaaccucaagggcaccaagacccgcggcaagcucugccccaagugccucaacugcaccgaccucgacgucgcccucggccgccccaagugcaccggcaacaucccccccgccaaggucuccauccuccacgagguccgccccgucaccuccggcugcuuccccaucaugcacgaccgcaccaagauccgccagcuccccaaccuccuccgcggcuacgagcgcauccgccucuccaaccacaacgucaucaacgccgaggaggcccccggcggccccuacaagaucggcaccuccggcuccugccccaacgucaccaacggcaacggcuucuucgccaccauggccugggccguccccaagaacgagaacaacaagaccgccaccaacucccucaccaucgagguccccuacaucugcaccgagggcgaggaccagaucaccgucuggggcuuccacuccgacuccgagacccagauggccaagcucuacggcgacuccaagccccagaaguucaccuccuccgccaacggcgucaccacccacuacgucucccagaucggcggcuuccccaaccagaccgaggacggcggccucccccaguccggccgcaucgucgucgacuacaugguccagaaguccggcaagaccggcaccaucaccuaccagcgcggcauccuccucccccagaaggucuggugcgccuccggccgcuccaaggucaucaagggcucccucccccucaucggcgaggccgacugccuccacgagaaguacggcggccucaacaaguccaagcccuacuacaccggcgagcacgccaaggccaucggcaacugccccaucugggucaagaccccccucaagcucgccaacggcaccaaguaccgcccccccgccacccuccucaaggagcgcggcuucuucggcgccaucgccggcuuccucgagggcggcugggagggcaugaucgccggcuggcacggcuacaccucccacggcgcccacggcgucgccgucgccgccgaccucaaguccacccaggaggccaucaacaagaucaccaagaaccucaacucccucuccgagcucgaggucaagaaccuccagcgccucuccggcgccauggacgagcuccacaacgagauccucgagcucgacgagaaggucgacgaccuccgcgccgacaccaucuccucccagaucgagcucgccguccuccucuccaacgagggcaucaucaacuccgaggacgagcaccuccucgcccucgagcgcaagcucaagaagaugcucggccccuccgccgucgagaucggcaacggcugcuucgagaccaagcacaagugcaaccagaccugccucgaccgcaucgccgccggcaccuucaacgccggcgaguucucccuccccaccuucgacucccucaacaucaccgccgccucccucaacgacgacggccucgacaaccacaccauccuccucuacuacuccaccgccgccuccucccucgccgucacccucaugaucgccaucuucgucgucuacauggucucccgcgacaacgucuccugcuccaucugccucuga

SEQ ID NO: 122773 - RNA, 1758 nt, Artificial Sequence
  derived and/or modified CDS sequence (opt2) from hemagglutinin__InfluenzaB__AFH58260
augaaggccaucaucguccuccucauggucgucaccuccaacgccgaccgcaucugcaccggcaucaccuccuccaacuccccccacgucgucaagaccgccacccagggcgaggucaacgucaccggcgucaucccccucaccaccacccccaccaagucccacuucgccaaccucaagggcaccaagacccgcggcaagcucugccccaagugccucaacugcaccgaccucgacgucgcccucggccgccccaagugcaccggcaacauccccuccgccgaggucuccauccuccacgagguccgccccgucaccuccggcugcuuccccaucaugcacgaccgcaccaagauccgccagcuccccaaccuccuccgcggcuacgagcacauccgccucuccacccacaacgucaucaacgccgagaaggcccccggcggccccuacaagaucggcaccuccggcuccugccccaacgucaccaacggcaacggcuucuucgccaccauggccugggccguccccaagaacgacaacaacaagaccgccaccaacucccucaccaucgagguccccuacaucugcaccgagggcgaggaccagaucaccgucuggggcuuccacuccgacaacgagauccagauggccaagcucuacggcgacuccaagccccagaaguucaccuccuccuccaacggcgucaccacccacuacgucucccagaucggcggcuuccccaaccagaccgaggacggcggccucccccaguccggccgcaucgucgucgacuacaugguccagaaguccggcaagaccggcaccaucaccuaccagcgcggcauccuccucccccagaaggucuggugcgccuccggccgcuccaaggucaucaagggcucccucccccucaucggcgaggccgacugccuccacgagcgcuacggcggccucaacaaguccaagcccuacuacaccggcgagcacgccaaggccaucggcaacugccccaucugggucaagaccccccucaagcucgccaacggcaccaaguaccgcccccccgccaagcuccucaaggagcgcggcuucuucggcgccaucgccggcuuccucgagggcggcugggagggcaugaucgccggcuggcacggcuacaccucccacggcgcccacggcgucgccgucgccgccgaccucaaguccacccaggaggccaucaacaagaucaccaagaaccucaacucccucuccgagcucgaggucaagaaccuccagcgccucuccggcgccauggacgagcuccacaacgagauccucgagcucgacgagaaggucgacgaccuccgcgccgacaccaucuccucccagaucgagcucgccguccuccucuccaacgagggcaucaucaacuccgaggacgagcaccuccucgcccucgagcgcaagcucaagaagaugcucggccccuccgccgucgagaucggcaacggcugcuucgagaccaagcacaagugcaaccagaccugccucgaccgcaucgccgccggcaccuucgacgccggcgaguucucccuccccaccuucgacucccucaacaucaccgccgccucccucaacgacgacggccucgacaaccacaccauccuccucuacuacuccaccgccgccuccucccucgccgucacccucaugaucgccaucuucgucgucuacauggucucccgcgacaacgucuccugcuccaucugccucuga

SEQ ID NO: 122774 - RNA, 1755 nt, Artificial Sequence
  derived and/or modified CDS sequence (opt2) from hemagglutinin__InfluenzaB__AFH58271
augaaggccaucaucguccuccucauggucgucaccuccaacgccgaccgcaucugcaccggcaucaccuccuccaacuccccccacgucgucaagaccgccacccagggcgaggucaacgucaccggcgucaucccccucaccaccacccccaccaaguccuacuucgccaaccucaagggcacccgcacccgcggcaagcucugccccgacugccucaacugcaccgaccucgacgucgcccucggccgccccaugugcgucggcaccacccccuccgccaaggccuccauccuccacgaggucaagcccgucaccuccggcugcuuccccaucaugcacgaccgcaccaagauccgccagcuccccaaccuccuccgcggcuacgagaacauccgccucuccacccagaacgucaucgacgccgagaaggcccccggcggccccuaccgccucggcaccuccggcuccugccccaacgccaccuccaaguccggcuucuucgccaccauggccugggccguccccaaggacaacaacaagaacgccaccaacccccucaccgucgagguccccuacaucugcaccgagggcgaggaccagaucaccgucuggggcuuccacuccgacgacaagacccagaugaagaaccucuacggcgacuccaacccccagaaguucaccuccuccgccaacggcgucaccacccacuacgucucccagaucggcuccuuccccgaccagaccgaggacggcggccucccccaguccggccgcaucgucgucgacuacaugaugcagaagcccggcaagaccggcaccaucgucuaccagcgcggcguccuccucccccagaaggucuggugcgccuccggccgcuccaaggucaucaagggcucccucccccucaucggcgaggccgacugccuccacgagaaguacggcggccucaacaaguccaagcccuacuacaccggcgagcacgccaaggccaucggcaacugccccaucugggucaagaccccccucaagcucgccaacggcaccaaguaccgcccccccgccaagcuccucaaggagcgcggcuucuucggcgccaucgccggcuuccucgagggcggcugggagggcaugaucgccggcuggcacggcuacaccucccacggcgcccacggcgucgccgucgccgccgaccucaaguccacccaggaggccaucaacaagaucaccaagaaccucaacucccucuccgagcucgaggucaagaaccuccagcgccucuccggcgccauggacgagcuccacaacgagauccucgagcucgacgagaaggucgacgaccuccgcgccgacaccaucuccucccagaucgagcucgccguccuccucuccaacgagggcaucaucaacuccgaggacgagcaccuccucgcccucgagcgcaagcucaagaagaugcucggccccuccgccgucgagaucggcaacggcugcuucgagaccaagcacaagugcaaccagaccugccucgaccgcaucgccgccggcaccuucaacgccggcgaguucucccuccccaccuucgacucccucaacaucaccgccgccucccucaacgacgacggccucgacaaccacaccauccuccucuacuacuccaccgccgccuccucccucgccgucacccucaugcucgccaucuucaucgucuacauggucucccgcgacaacgucuccugcuccaucugccucuga

SEQ ID NO: 122775 - RNA, 1755 nt, Artificial Sequence; identical to SEQ ID NO: 122774
  derived and/or modified CDS sequence (opt2) from hemagglutinin__InfluenzaB__AFH58282

SEQ ID NO: 122776 - RNA, 1758 nt, Artificial Sequence
  derived and/or modified CDS sequence (opt2) from hemagglutinin__InfluenzaB__AFH58293
augaaggccaucaucguccuccucauggucgucaccuccaacgccgaccgcaucugcaccggcaucaccuccuccaacuccccccacgucgucaagaccgccacccagggcgaggucaacgucaccggcgucaucccccucaccaccacccccaccaagucccacuucgccaaccucaagggcaccgagacccgcggcaagcucugccccaagugccucaacugcaccgaccucgacgucgcccucggccgccccaagugcaccggcaagauccccuccgcccgcgucuccauccuccacgagguccgccccgucaccuccggcugcuuccccaucaugcacgaccgcaccaagauccgccagcuccccaaccuccuccgcggcuacgagcacauccgccucuccacccacaacgucaucaacgccgagaacgcccccggcggccccuacaagaucggcaccuccggcuccugccccaacaucaccaacggcaacggcuucuucgccaccauggccugggccguccccaagaacgacaagaacaagaccgccaccaacccccucaccaucgagguccccuacaucugcaccgagggcgaggaccagaucaccgucuggggcuuccacuccgacgacgagacccagauggccaagcucuacggcgacuccaagccccagaaguucaccuccuccgccaacggcgucaccacccacuacgucucccagaucggcggcuuccccaaccagaccgaggacggcggccucccccaguccggccgcaucgucgucgacuacaugguccagaaguccggcaagaccggcaccaucaccuaccagcgcggcauccuccucccccagaaggucuggugcgccuccggccgcuccaaggucaucaagggcucccucccccucaucggcgaggccgacugccuccacgagaaguacggcggccucaacaaguccaagcccuacuacaccggcgagcacgccaaggccaucggcaacugccccaucugggucaagaccccccucaagcucgccaacggcaccaaguaccgcccccccgccaagcuccucaaggagcgcggcuucuucggcgccaucgccggcuuccucgagggcggcugggagggcaugaucgccggcuggcacggcuacaccucccacggcgcccacggcgucgccgucgccgccgaccucaaguccacccaggaggccaucaacaagaucaccaagaaccucaacucccucuccgagcucgaggucaagaaccuccagcgccucuccggcgccauggacgagcuccacaacgagauccucgagcucgacgagaaggucgacgaccuccgcgccgacaccaucuccucccagaucgagcucgccguccuccucuccaacgagggcaucaucaacuccgaggacgagcaccuccucgcccucgagcgcaagcucaagaagaugcucggccccuccgccgucgagaucggcaacggcugcuucgagaccaagcacaagugcaaccagaccugccucgaccgcaucgccgccggcaccuucgacgccggcgaguucucccuccccaccuucgacucccucaacaucaccgccgccucccucaacgacgacggccucgacaaccacaccauccuccucuacuacuccaccgccgccuccucccucgccgucacccucaugaucgccaucuucgucgucuacauggucucccgcgacaacgucuccugcuccaucugccucuga

SEQ ID NO: 122777 - RNA, 1755 nt, Artificial Sequence
  derived and/or modified CDS sequence (opt2) from hemagglutinin__InfluenzaB__AFH58304
augaaggccaucaucguccuccucauggucgucaccuccaacgccgaccgcaucugcaccggcaucaccuccuccaacuccccccacgucgucaagaccgccacccagggcgaggucaacgucaccggcgucaucccccucaccaccacccccaccaaguccuacuucgccaaccucaagggcacccgcacccgcggcaagcucugccccgacugccucaacugcaccgaccucgacgucgcccucggccgccccaugugcgucggcaccacccccuccgccaaggccuccauccuccacgagguccgccccgucaccuccggcugcuuccccaucaugcacgaccgcaccaagauccgccagcuccccaaccuccuccgcggcuacgagaacauccgccucuccacccagaacgucaucgacgccgagaaggcccccggcggccccuaccgccucggcaccuccggcuccugccccaacgccaccuccaagaucggcuucuucgccaccauggccugggccguccccaaggacaacuacaagaacgccaccaacccccucaccgucgagguccccuacaucugcaccgagggcgaggaccagaucaccgucuggggcuuccacuccgacgacaagacccagaugaagaaccucuacggcgacuccaacccccagaaguucaccuccuccgccaacggcgucaccacccacuacgucucccagaucggcgacuuccccgaccagaccgaggacggcggccucccccaguccggccgcaucgucgucgacuacaugaugcagaagcccggcaagaccggcaccaucgucuaccagcgcggcguccuccucccccagaaggucuggugcgccuccggccgcuccaaggucaucaagggcucccucccccucaucggcgaggccgacugccuccacgagaaguacggcggccucaacaaguccaagcccuacuacaccggcgagcacgccaaggccaucggcaacugccccaucugggucaagaccccccucaagcucgccaacggcaccaaguaccgcccccccgccaagcuccucaaggagcgcggcuucuucggcgccaucgccggcuuccucgagggcggcugggagggcaugaucgccggcuggcacggcuacaccucccacggcgcccacggcgucgccgucgccgccgaccucaaguccacccaggaggccaucaacaagaucaccaagaaccucaacucccucuccgagcucgaggucaagaaccuccagcgccucuccggcgccauggacgagcuccacaacgagauccucgagcucgacgagaaggucgacgaccuccgcgccgacaccaucuccucccagaucgagcucgccguccuccucuccaacgagggcaucaucaacuccgaggacgagcaccuccucgcccucgagcgcaagcucaagaagaugcucggccccuccgccgucgacaucggcaacggcugcuucgagaccaagcacaagugcaaccagaccugccucgaccgcaucgccgccggcaccuucaacgccggcgaguucucccuccccaccuucgacucccucaacaucaccgccgccucccucaacgacgacggccucgacaaccacaccauccuccucuacuacuccaccgccgccuccucccucgccgucacccucaugcucgccaucuucaucgucuacauggucucccgcgacaacgucuccugcuccaucugccucuga

SEQ ID NO: 122778 - RNA, 1755 nt, Artificial Sequence; identical to SEQ ID NO: 122777
  derived and/or modified CDS sequence (opt2) from hemagglutinin__InfluenzaB__AFH58315

SEQ ID NO: 122779 - RNA, 1755 nt, Artificial Sequence
  derived and/or modified CDS sequence (opt2) from hemagglutinin__InfluenzaB__AFH58326
augaaggccaucaucguccuccucauggucgucaccuccaacgccgaccgcaucugcaccggcaucaccuccuccaacuccccccacgucgucaagaccgccacccagggcgaggucaacgucaccggcgucaucccccucaccaccacccccaccaaguccuacuucgccaaccucaagggcacccgcacccgcggcaagcucugccccgacugccucaacugcaccgaccucgacgucgcccucggccgccccaugugcgucggcaccacccccuccgccaaggccuccauccuccacgagguccgccccgucaccuccggcugcuuccccaucaugcacgaccgcaccaagauccgccagcuccccaaccuccuccgcggcuacgagaacauccgccucuccacccagaacgucaucgacgccgagaaggcccccggcggccccuaccgccucggcaccuccggcuccugccccaacgccaccuccaagaucggcuucuucgccaccauggccugggccguccccaaggacaacuacaagaacgccaccaacccccucaccgucgagguccccuacaucugcaccgagggcgaggaccagaucaccgucuggggcuuccacuccgacaacaaggcccagaugaagaaccucuacggcgacuccaacccccagaaguucaccuccuccgccaacggcgucaccacccacuacgucucccagaucggcgacuuccccgaccagaccgaggacggcggccccccccaguccggccgcaucgucgucgacuacaugaugcagaagcccggcaagaccggcaccaucgucuaccagcgcggcguccuccucccccagaaggucuggugcgccuccggccgcuccaaggucaucaagggcucccucccccucaucggcgaggccgacugccuccacgagaaguacggcggccucaacaaguccaagcccuacuacaccggcgagcacgccaaggccaucggcaacugccccaucugggucaagaccccccucaagcucgccaacggcaccaaguaccgcccccccgccaagcuccucaaggagcgcggcuucuucggcgccaucgccggcuuccucgagggcggcugggagggcaugaucgccggcuggcacggcuacaccucccacggcgcccacggcgucgccgucgccgccgaccucaaguccacccaggaggccaucaacaagaucaccaagaaccucaacucccucuccgagcucgaggucaagaaccuccagcgccucuccggcgccauggacgagcuccacaacgagauccucgagcucgacgagaaggucgacgaccuccgcgccgacaccaucuccucccagaucgagcucgccguccuccucuccaacgagggcaucaucaacuccgaggacgagcaccuccucgcccucgagcgcaagcucaagaagaugcucggccccuccgccgucgacaucggcaacggcugcuucgagaccaagcacaagugcaaccagaccugccucgaccgcaucgccgccggcaccuucaacgccggcgaguucucccuccccaccuucgacucccucaacaucaccgccgccucccucaacgacgacggccucgacaaccacaccauccuccucuacuacuccaccgccgccuccucccucgccgucacccucaugcucgccaucuucaucgucuacauggucucccgcgacaacgucuccugcuccaucugccucuga

SEQ ID NO: 122780 - RNA, 1755 nt, Artificial Sequence
  derived and/or modified CDS sequence (opt2) from hemagglutinin__InfluenzaB__AFH58337
augaaggccaucaucguccuccucauggucgucaccuccaacgccgaccgcaucugcaccggcaucaccuccuccaacuccccccacgucgucaagaccgccacccagggcgaggucaacgucaccggcgucaucccccucaccaccacccccaccaaguccuacuucgccaaccucaagggcacccgcacccgcggcaagcucugccccgacugccucaacugcaccgaccucgacgucgcccucggccgccccaugugcgucggcaccacccccuccgccaaggccuccauccuccacgagguccgccccgucaccuccggcugcuuccccaucaugcacgaccgcaccaagauccgccagcuccccaaccuccuccgcggcuacgagaacauccgccucuccacccagaacgucaucgacgccgagaaggcccccggcggccccuaccgccucggcaccuccggcuccugccccaacgccaccuccaagaucggcuucuucgccaccauggccugggccguccccaaggacaacuacaagaacgccaccaacccccucaccgucgagguccccuacaucugcaccgagggcgaggaccagaucaccgucuggggcuuccacuccgacaacaaggcccagaugaagaaccucuacggcgacuccaacccccagaaguucaccuccuccgccaacggcgucaccacccacuacgucucccagaucggcgacuuccccgaccagaccgaggacggcggccucccccaguccggccgcaucgucgucgacuacaugaugcagaagcccggcaagaccggcaccaucgucuaccagcgcggcguccuccucccccagaaggucuggugcgccuccggccgcuccaaggucaucaagggcucccucccccucaucggcgaggccgacugccuccacgagaaguacggcggccucaacaaguccaagcccuacuacaccggcgagcacgccaaggccaucggcaacugccccaucugggucaagaccccccucaagcucgccaacggcaccaaguaccgcccccccgccaagcuccucaaggagcgcggcuucuucggcgccaucgccggcuuccucgagggcggcugggagggcaugaucgccggcuggcacggcuacaccucccacggcgcccacggcgucgccgucgccgccgaccucaaguccacccaggaggccaucaacaagaucaccaagaaccucaacucccucuccgagcucgaggucaagaaccuccagcgccucuccggcgccauggacgagcuccacaacgagauccucgagcucgacgagaaggucgacgaccuccgcgccgacaccaucuccucccagaucgagcucgccguccuccucuccaacgagggcaucaucaacuccgaggacgagcaccuccucgcccucgagcgcaagcucaagaagaugcucggccccuccgccgucgacaucggcaacggcugcuucgagaccaagcacaagugcaaccagaccugccucgaccgcaucgccgccggcaccuucaacgccggcgaguucucccuccccaccuucgacucccucaacaucaccgccgccucccucaacgacgacggccucgacaaccacaccauccuccucuacuacuccaccgccgccuccucccucgccgucacccucaugcucgccaucuucaucgucuacauggucucccgcgacaacgucuccugcuccaucugccucuga

SEQ ID NO: 122781 - RNA, 1758 nt, Artificial Sequence
  derived and/or modified CDS sequence (opt2) from hemagglutinin__InfluenzaB__AFH58348
augaaggccaucaucguccuccucauggucgucaccuccaacgccgaccgcaucugcaccggcaucaccuccuccaacuccccccacgucgucaagaccgccacccagggcgaggucaacgucaccggcgucaucccccucaccaccacccccaccaagucccacuucgccaaccucaagggcaccgagacccgcggcaagcucugccccaagugccucaacugcaccgaccucgacgucgcccucggccgccccaagugcaccggcaacauccccuccgcccgcgucuccauccuccacgagguccgccccgucaccuccggcugcuuccccaucaugcacgaccgcaccaagauccgccagcuccccaaccuccuccgcggcuacgagcacauccgccucuccgcccacaacgucaucaacgccgagaacgcccccggcggccccuacaagaucggcaccuccggcuccugccccaacgucaccaacggcaacggcuucuucgccaccauggccugggccguccccaagaacgacaacaacaagaccgccaccaacucccucaccaucgagguccccuacaucugcaccgagggcgaggaccagaucaccgucuggggcuuccacuccgacaaggagacccagauggccaagcucuacggcgacuccaagccccagaaguucaccuccuccgccaacggcgucaccacccacuacgucucccagaucggcggcuuccccaaccagaccgaggacggcggccucccccaguccggccgcaucgucgucgacuacaugguccagaaguccggcaagaccggcaccaucaccuaccagcgcggcauccuccucccccagaaggucuggugcgccuccggccgcuccaaggucaucaagggcucccucccccucaucggcgaggccgacugccuccacgagaaguacggcggccucaacaaguccaagcccuacuacaccggcgagcacgccaaggccaucggcaacugccccaucugggucaagaccccccucaagcucgccaacggcaccaaguaccgcccccccgccaagcuccucaaggagcgcggcuucuucggcgccaucgccggcuuccucgagggcggcugggagggcaugaucgccggcuggcacggcuacaccucccacggcgcccacggcgucgccgucgccgccgaccucaaguccacccaggaggccaucaacaagaucaccaagaaccucaacucccucuccgagcucgaggucaagaaccuccagcgccucuccggcgccauggacgagcuccacaacgagauccucgagcucgacgagaaggucgacgaccuccgcgccgacaccaucuccucccagaucgagcucgccguccuccucuccaacgagggcaucaucaacuccgaggacgagcaccuccucgcccucgagcgcaagcucaagaagaugcucggccccuccgccgucgagaucggcaacggcugcuucgagaccaagcacaagugcaaccagaccugccucgaccgcaucgccgccggcaccuucaacgccggcgaguucucccuccccaccuucgacucccucaacaucaccgccgccucccucaacgacgacggccucgacaaccacaccauccuccucuacuacuccaccgccgccuccucccucgccgucacccucaugaucgccaucuucgucgucuacauggucucccgcgacaacgucuccugcuccaucugccucuga

SEQ ID NO: 122782 - RNA, 1758 nt, Artificial Sequence
  derived and/or modified CDS sequence (opt2) from hemagglutinin__InfluenzaB__AFH58370
augaaggccaucaucguccuccucauggucgucaccuccaacgccgaccgcaucugcaccggcaucaccuccuccaacuccccccacgucgucaagaccgccacccagggcgaggucaacgucaccggcgucaucccccucaccaccacccccaccaagucccacuucgccaaccucaagggcaccgagacccgcggcaagcucugccccaagugccucaacugcaccgaccucgacgucgcccucggccgccccaagugcaccggcaacauccccuccgcccgcgucuccauccuccacgagguccgccccgucaccuccggcugcuuccccaucaugcacgaccgcaccaagauccgccagcuccccaaccuccuccgcggcuacgagcacauccgccucuccgcccacaacgucaucaacgccgagaacgcccccggcggccccuacaagaucggcaccuccggcuccugccccaacgucaccaacggcaacggcuucuucgccaccauggccugggccguccccaagaacgacaacaacaagaccgccaccaacucccucaccaucgagguccccuacaucugcaccgagggcgaggaccagaucaccgucuggggcuuccacuccgacaacgagauccagauggccaagcucuacggcgacuccaagccccagaaguucaccuccuccgccaacggcgucaccacccacuacgucucccagaucggcggcuuccccaaccagaccgaggacggcggccucccccaguccggccgcaucgucgucgacuacaugguccagaaguccggcaagaccggcaccaucaccuaccagcgcggcauccuccucccccagaaggucuggugcgccuccggccgcuccaaggucaucaagggcucccucccccucaucggcgaggccgacugccuccacgagaaguacggcggccucaacaaguccaagcccuacuacaccggcgagcacgccaaggccaucggcaacugccccaucugggucaagaccccccucaagcucgccaacggcaccaaguaccgcccccccgccaagcuccucaaggagcgcggcuucuucggcgccaucgccggcuuccucgagggcggcugggagggcaugaucgccggcuggcacggcuacaccucccacggcgcccacggcgucgccgucgccgccgaccucaaguccacccaggaggccaucaacaagaucaccaagaaccucaacucccucuccgagcucgaggucaagaaccuccagcgccucuccggcgccauggacgagcuccacaacgagauccucgagcucgacgagaaggucgacgaccuccgcgccgacaccaucuccucccagaucgagcucgccguccuccucuccaacgagggcaucaucaacuccgaggacgagcaccuccucgcccucgagcgcaagcucaagaagaugcucggccccuccgccgucgagaucggcaacggcugcuucgagaccaagcacaagugcaaccagaccugccucgaccgcaucgccgccggcaccuucaacgccggcgaguucucccuccccaccuucgacucccucaacaucaccgccgccucccucaacgacgacggccucgacaaccacaccauccuccucuacuacuccaccgccgccuccucccucgccgucacccucaugaucgccaucuucgucgucuacauggucucccgcgacaacgucuccugcuccaucugccucuga

SEQ ID NO: 122783 - RNA, 1758 nt, Artificial Sequence
  derived and/or modified CDS sequence (opt2) from hemagglutinin__InfluenzaB__AFH58392
augaaggccaucaucguccuccucauggucgucaccuccaacgccgaccgcaucugcaccggcaucaccuccuccaacuccccccacgucgucaagaccgccacccagggcgaggucaacgucaccggcgucaucccccucaccaccacccccaccaagucccacuucgccaaccucaagggcaccgagacccgcggcaagcucugccccaagugccucaacugcaccgaccucgacgucgcccucggccgccccaagugcaccggcaagauccccuccgcccgcgucuccauccuccacgagguccgccccgucaccuccggcugcuuccccaucaugcacgaccgcaccaagauccgccagcuccccaaccuccuccgcggcuacgagcacauccgccucuccacccacaacgucaucaacgccgagaacgcccccggcggccccuacaagaucggcaccuccggcuccugccccaacaucaccaacggcaacggcuucuucgccaccauggccugggccguccccaagaacgacaagaacaagaccgccaccaacccccucaccaucgagguccccuacaucugcaccgagggcgaggaccagaucaccgucuggggcuuccacuccgacaacgagauccagauggccaagcucuacggcgacuccaagccccagaaguucaccuccuccgccaacggcgucaccacccacuacgucucccagaucggcggcuuccccaaccagaccgaggacggcggccucccccaguccggccgcaucgucgucgacuacaugguccagaaguccggcaagaccggcaccaucaccuaccagcgcggcauccuccucccccagaaggucuggugcgccuccggccgcuccaaggucaucaagggcucccucccccucaucggcgaggccgacugccuccacgagaaguacggcggccucaacaaguccaagcccuacuacaccggcgagcacgccaaggccaucggcaacugccccaucugggucaagaccccccucaagcucgccaacggcaccaaguaccgcccccccgccaagcuccucaaggagcgcggcuucuucggcgccaucgccggcuuccucgagggcggcugggagggcaugaucgccggcuggcacggcuacaccucccacggcgcccacggcgucgccgucgccgccgaccucaaguccacccaggaggccaucaacaagaucaccaagaaccucaacucccucuccgagcucgaggucaagaaccuccagcgccucuccggcgccauggacgagcuccacaacgagauccucgagcucgacgagaaggucgacgaccuccgcgccgacaccaucuccucccagaucgagcucgccguccuccucuccaacgagggcaucaucaacuccgaggacgagcaccuccucgcccucgagcgcaagcucaagaagaugcucggccccuccgccgucgagaucggcaacggcugcuucgagaccaagcacaagugcaaccagaccugccucgaccgcaucgccgccggcaccuucgacgccggcgaguucucccuccccaccuucgacucccucaacaucaccgccgccucccucaacgacgacggccucgacaaccacaccauccuccucuacuacuccaccgccgccuccucccucgccgucacccucaugaucgccaucuucgucgucuacauggucucccgcgacaacgucuccugcuccaucugccucuga

SEQ ID NO: 122784 - RNA, 1758 nt, Artificial Sequence; identical to SEQ ID NO: 122776
  derived and/or modified CDS sequence (opt2) from hemagglutinin__InfluenzaB__AFH58403

SEQ ID NO: 122785 - RNA, 1758 nt, Artificial Sequence; identical to SEQ ID NO: 122776
  derived and/or modified CDS sequence (opt2) from hemagglutinin__InfluenzaB__AFH58414

SEQ ID NO: 122786 - RNA, 1758 nt, Artificial Sequence; identical to SEQ ID NO: 122776
  derived and/or modified CDS sequence (opt2) from hemagglutinin__InfluenzaB__AFH58425

SEQ ID NO: 122787 - RNA, 1758 nt, Artificial Sequence; identical to SEQ ID NO: 122776
  derived and/or modified CDS sequence (opt2) from hemagglutinin__InfluenzaB__AFH58436

SEQ ID NO: 122788 - RNA, 1758 nt, Artificial Sequence
  derived and/or modified CDS sequence (opt2) from hemagglutinin__InfluenzaB__AFH58458
augaaggccaucaucguccuccucauggucgucaccuccaacgccgaccgcaucugcaccggcaucaccuccuccaacuccccccacgucgucaagaccgccacccagggcgaggucaacgucaccggcgucaucccccucaccaccacccccaccaagucccacuucgccaaccucaagggcaccgagacccgcggcaagcucugccccaagugccucaacugcaccgaccucgacgucgcccucggccgccccaagugcaccggcaagauccccuccgcccgcgucuccauccuccacgagguccgccccgucaccuccggcugcuuccccaucaugcacgaccgcaccaagauccgccagcuccccaaccuccuccgcggcuacgagcacauccgccucuccaccaacaacgucaucaacgccgagaacgcccccggcggccccuacaagaucggcaccuccggcuccugccccaacgucaccaacggcaacggcuucuucgccaccauggccugggccguccccaagaacgacaagaacaagaccgccaccaacccccucaccaucgagguccccuacaucugcaccgagggcgaggaccagaucaccgucuggggcuuccacuccgacaacgagauccagauggccaagcucuacggcgacucccgcccccagaaguucaccuccuccgccaacggcgucaccacccacuacgucucccagaucggcggcuuccccaaccagaccgaggacggcggccucccccaguccggccgcaucgucgucgacuacaugguccagaaguccggcaagaccggcaccaucaccuaccagcgcggcauccuccucccccagaaggucuggugcgccuccggccgcuccaaggucaucaagggcucccucccccucaucggcgaggccgacugccuccacgagaaguacggcggccucaacaaguccaagcccuacuacaccggcgagcacgccaaggccaucggcaacugccccaucugggucaagaccccccucaagcucgccaacggcaccaaguaccgcccccccgccaagcuccucaaggagcgcggcuucuucggcgccaucgccggcuuccucgagggcggcugggagggcaugaucgccggcuggcacggcuacaccucccacggcgcccacggcgucgccgucgccgccgaccucaaguccacccaggaggccaucaacaagaucaccaagaaccucaacucccucuccgagcucgaggucaagaaccuccagcgccucuccggcgccauggacgagcuccacaacgagauccucgagcucgacgagaaggucgacgaccuccgcgccgacaccaucuccucccagaucgagcucgccguccuccucuccaacgagggcaucaucaacuccgaggacgagcaccuccucgcccucgagcgcaagcucaagaagaugcucggccccuccgccgucgagaucggcaacggcugcuucgagaccaagcacaagugcaaccagaccugccucgaccgcaucgccgccggcaccuucgacgccggcgaguucucccuccccaccuucgacucccucaacaucaccgccgccucccucaacgacgacggccucgacaaccacaccauccuccucuacuacuccaccgccgccuccucccucgccgucacccucaugaucgccaucuucgucgucuacauggucucccgcgacaacgucuccugcuccaucugccucuga

SEQ ID NO: 122789 - RNA, 1758 nt, Artificial Sequence; identical to SEQ ID NO: 122788
  derived and/or modified CDS sequence (opt2) from hemagglutinin__InfluenzaB__AFH58469

SEQ ID NO: 122790 - RNA, 1755 nt, Artificial Sequence; identical to SEQ ID NO: 122770
  derived and/or modified CDS sequence (opt2) from hemagglutinin__InfluenzaB__AFH58480

SEQ ID NO: 122791 - RNA, 1755 nt, Artificial Sequence
  derived and/or modified CDS sequence (opt2) from hemagglutinin__InfluenzaB__AFH58502
augaaggccaucaucguccuccucauggucgucaccuccaacgccgaccgcaucugcaccggcaucaccuccuccaacuccccccacgucgucaagaccgccacccagggcgaggucaacgucaccggcgucaucccccucaccaccacccccaccaaguccuacuucgccaaccucaagggcacccgcacccgcggcaagcucugccccgacugccucaacugcaccgaccucgacgucgcccucggccgccccaugugcgucggcaccacccccuccgccaaggccuccauccuccacgagguccgccccgucaccuccggcugcuuccccaucaugcacgaccgcaccaagauccgccagcuccccaaccuccuccgcggcuacgagaacauccgccucuccacccagaacgucaucgacgccgagaaggcccccggcggccccuaccgccucggcaccuccggcuccugccccaacgccaccuccaagaucggcuucuucgccaccauggccugggccguccccaaggacaacuacaagaacgccaccaacccccucaccgucgagguccccuacaucugcaccgagggcgaggaccagaucaccgucuggggcuuccacuccgacgacaagacccagaugaagucccucuacggcgacuccaacccccagaaguucaccuccuccgccaacggcgucaccacccacuacgucucccagaucggcgacuuccccgaccagaccgaggacggcggccucccccaguccggccgcaucgucgucgacuacaugaugcagaagcccggcaagaccggcaccaucgucuaccagcgcggcguccuccucccccagaaggucuggugcgccuccggccgcuccaaggucaucaagggcucccucccccucaucggcgaggccgacugccuccacgagaaguacggcggccucaacaaguccaagcccuacuacaccggcgagcacgccaaggccaucggcaacugccccaucugggucaagaccccccucaagcucgccaacggcaccaaguaccgcccccccgccaagcuccucaaggagcgcggcuucuucggcgccaucgccggcuuccucgagggcggcugggagggcaugaucgccggcuggcacggcuacaccucccacggcgcccacggcgucgccgucgccgccgaccucaaguccacccaggaggccaucaacaagaucaccaagaaccucaacucccucuccgagcucgaggucaagaaccuccagcgccucuccggcgccauggacgagcuccacaacgagauccucgagcucgacgagaaggucgacgaccuccgcgccgacaccaucuccucccagaucgagcucgccguccuccucuccaacgagggcaucaucaacuccgaggacgagcaccuccucgcccucgagcgcaagcucaagaagaugcucggccccuccgccgucgacaucggcaacggcugcuucgagaccaagcacaagugcaaccagaccugccucgaccgcaucgccgccggcaccuucaacgccggcgaguucucccuccccaccuucgacucccucaacaucaccgccgccucccucaacgacgacggccucgacaaccacaccauccuccucuacuacuccaccgccgccuccucccucgccgucacccucaugcucgccaucuucaucgucuacauggucucccgcgacaacgucuccugcuccaucugccucuga

SEQ ID NO: 122792 - RNA, 1758 nt, Artificial Sequence
  derived and/or modified CDS sequence (opt2) from hemagglutinin__InfluenzaB__AFH58513
augaaggccaucaucguccuccucauggucgucaccuccaacgccgaccgcaucugcaccggcaucaccuccuccaacuccccccacgucgucaagaccgccacccagggcgaggucaacgucaccggcgucaucccccucaccaccacccccaccaagucccacuucgccaaccucaagggcaccgagacccgcggcaagcucugccccaagugccccaacugcaccgaccucgacgucgcccucggccgccccaagugcaccggcaagauccccuccgcccgcgucuccauccuccacgagguccgccccgucaccuccggcugcuuccccaucaugcacgaccgcaccaagauccgccagcuccccaaccuccuccgcggcuacgagcacauccgccucuccacccacaacgucaucaacgccgagaacgcccccggcggccccuacaagaucggcaccuccggcuccugccccaacgucaccaacggcaacggcuucuucgccaccauggccugggccguccccaagaacgacaagaacaagaccgccaccaacccccucaccaucgagguccccuacaucugcaccgagggcgaggaccagaucaccgucuggggcuuccacuccgacgacgagacccagauggccaagcucuacggcgacuccaagccccagaaguucaccuccuccgccaacggcgucaccacccacuacgucucccagaucggcggcuuccccaaccagaccgaggacggcggccucccccaguccggccgcaucgucgucgacuacaugguccagaaguccggcaagaccggcaccaucaccuaccagcgcggcauccuccucccccagaaggucuggugcgccuccggccgcuccaaggucaucaagggcucccucccccucaucggcgaggccgacugccuccacgagaaguacggcggccucaacaaguccaagcccuacuacaccggcgagcacgccaaggccaucggcaacugccccaucugggucaagaccccccucaagcucgccaacggcaccaaguaccgcccccccgccaagcuccucaaggagcgcggcuucuucggcgccaucgccggcuuccucgagggcggcugggagggcaugaucgccggcuggcacggcuacaccucccacggcgcccacggcgucgccgucgccgccgaccucaaguccacccaggaggccaucaacaagaucaccaagaaccucaacucccucuccgagcucgaggucaagaaccuccagcgccucuccggcgccauggacgagcuccacaacgagauccucgagcucgacgagaaggucgacgaccuccgcgccgacaccaucuccucccagaucgagcucgccguccuccucuccaacgagggcaucaucaacuccgaggacgagcaccuccucgcccucgagcgcaagcucaagaagaugcucggccccuccgccgucgagaucggcaacggcugcuucgagaccaagcacaagugcaaccagaccugccucgaccgcaucgccgccggcaccuucgacgccggcgaguucucccuccccaccuucgacucccucaacaucaccgccgccucccucaacgacgacggccucgacaaccacaccauccuccucuacuacuccaccgccgccuccucccucgccgucacccucaugaucgccaucuucgucgucuacauggucucccgcgacaacgucuccugcuccaucugccucuga

SEQ ID NO: 122793 - RNA, 1758 nt, Artificial Sequence; identical to SEQ ID NO: 122792
  derived and/or modified CDS sequence (opt2) from hemagglutinin__InfluenzaB__AFH58524

SEQ ID NO: 122794 - RNA, 1755 nt, Artificial Sequence
  derived and/or modified CDS sequence (opt2) from hemagglutinin__InfluenzaB__AFH58535
augaaggccaucaucguccuccucauggucgucaccuccaacgccgaccgcaucugcaccggcaucaccuccuccaacuccccccacgucgucaagaccgccacccagggcgaggucaacgucaccggcgucaucccccucaccaccacccccaccaagucccacuucgccaaccucaagggcacccagacccgcggcaagcucugccccaacugcuucaacugcaccgaccucgacgucgcccucggccgccccaagugcaugggcaacacccccuccgccaaggucuccauccuccacgaggucaagcccgccaccuccggcugcuuccccaucaugcacgaccgcaccaagauccgccagcuccccaaccuccuccgcggcuacgagaacauccgccucuccaccuccaacgucaucaacaccgagaccgcccccggcggccccuacaaggucggcaccuccggcuccugccccaacgucgccaacggcaacggcuucuucaacaccauggccugggucauccccaaggacaacaacaagaccgccaucaaccccgucaccgucgagguccccuacaucugcuccgagggcgaggaccagaucaccgucuggggcuuccacuccgacgacaagacccagauggagcgccucuacggcgacuccaacccccagaaguucaccuccuccgccaacggcgucaccacccacuacgucucccagaucggcggcuuccccaaccagaccgaggacgagggccucaagcaguccggccgcaucgucgucgacuacaugguccagaagcccggcaagaccggcaccaucgucuaccagcgcggcauccuccucccccagaaggucuggugcgccuccggccgcuccaaggucaucaagggcucccucccccucaucggcgaggccgacugccuccacgagaaguacggcggccucaacaaguccaagcccuacuacaccggcgagcacgccaaggccaucggcaacugccccaucugggucaagaccccccucaagcucgccaacggcaccaaguaccgcccccccgccaagcuccucaaggagcgcggcuucuucggcgccaucgccggcuuccucgagggcggcugggagggcaugaucgccggcuggcacggcuacaccucccacggcgcccacggcgucgccgucgccgccgaccucaaguccacccaggaggccaucaacaagaucaccaagaaccucaacuaccucuccgagcucgaggucaagaaccuccagcgccucuccggcgccaugaacgagcuccacgacgagauccucgagcucgacgagaaggucgacgaccuccgcgccgacaccaucuccucccagaucgagcucgccguccuccucuccaacgagggcaucaucaacuccgaggacgagcaccuccucgcccucgagcgcaagcucaagaagaugcucggccccuccgccgucgagaucggcaacggcugcuucgagaccaagcacaagugcaaccagaccugccucgaccgcaucgccgccggcaccuucaacgccggcgacuucucccuccccaccuucgacucccucaacaucaccgccgccucccucaacgacgacggccucgacaaccacaccauccuccucuacuacuccaccgccgccuccucccucgccgucacccucaugaucgccaucuucaucgucuacauggucucccgcgacaacgucuccugcuccaucugccucuga

SEQ ID NO: 122795 - RNA, 1752 nt, Artificial Sequence
  derived and/or modified CDS sequence (opt2) from hemagglutinin__InfluenzaB__AFH58557
augaaggccaucaucguccuccucauggucgucaccuccaacgccgaccgcaucugcaccggcaucaccuccuccaacuccccccacgucgucaagaccgccacccagggcgaggucaacgucaccggcgucaucccccucaccaccacccccaccaagucccacuucgccaaccucaagggcaccaagacccgcggcaagcucugccccaacugccucaacugcaccgaccucgacgucgcccucggccgccccaugugcgucggcaccacccccuccgccaaggccuccauccuccacgagguccgccccgucaccuccggcugcuuccccaucaugcacgaccgcaccaagauccgccagcuccccaaccuccuccgcggcuacgagaacauccgccucuccacccagaacgucaucaacgccgagcgcgcccccggcggccccuaccgccucggcaccuccggcuccugccccaacgucaccucccgcgacggcuucuucgccaccauggccugggccgucccccgcgacaacaagaccgccaccaacccccucaccgucgagguccccuacaucugcaccaagggcgaggaccagaucaccgucuggggcuuccacuccgacgacaagacccagaugaagaaccucuacggcgacuccaacccccagaaguucaccuccuccgccaacggcgucaccacccacuacgucucccagaucggcggcuuccccaaccagaccgaggacggcggccucccccaguccggccgcaucgucgucgacuacaugguccagaagcccggcaagaccggcaccaucgucuaccagcgcggcguccuccucccccagaaggucuggugcgccuccggccgcuccaaggucaucaagggcucccucccccucaucggcgaggccgacugccuccacgagaaguacggcggccucaacaaguccaagcccuacuacaccggcgagcacgccaaggccaucggcaacugccccaucugggucaagaccccccucaagcucgccaacggcaccaaguaccgcccccccgccaagcuccucaaggagcgcggcuucuucggcgccaucgccggcuuccucgagggcggcugggagggcaugaucgccggcuggcacggcuacaccucccacggcgcccacggcgucgccgucgccgccgaccucaaguccacccaggaggccaucaacaagaucaccaagaaccucaacucccucuccgagcucgaggucaagaaccuccagcgccucuccggcgccauggacgagcuccacaacgagauccucgagcucgacgagaaggucgacgaccuccgcgccgacaccaucuccucccagaucgagcucgccguccuccucuccaacgagggcaucaucaacuccgaggacgagcaccuccucgcccucgagcgcaagcucaagaagaugcucggccccuccgccgucgacaucggcaacggcugcuucgagaccaagcacaagugcaaccagaccugccucgaccgcaucgccgccggcaccuucaacgccggcgaguucuccuuccccaccuucgacucccucaacaucaccgccgccucccucaacgacgacggccucgacaaccacaccauccuccucuacuacuccaccgccgccuccucccucgccgucacccucaugaucgccaucuucaucgucuacauggucucccgcgacaacgucuccugcuccaucugccucuga

SEQ ID NO: 122796 - RNA, 1755 nt, Artificial Sequence
  derived and/or modified CDS sequence (opt2) from hemagglutinin__InfluenzaB__AFJ76224
augaaggccaucaucguccuccucauggucgucaccuccaacgccgaccgcaucugcaccggcaucaccuccuccaacuccccccacgucgucaagaccgccacccagggcgaggucaacgucaccggcgucaucccccucaccaccacccccaccaagucccacuucgccaaccucaagggcaccaagacccgcggcaagcucugccccaccugccucaacugcaccgaccucgacgucgcccucggcucccccaugugcgucggcaucacccccuccgccaaggccuccauccuccacgagguccgccccgucaccuccggcugcuuccccaucaugcacgaccgcaccaagauccgccagcuccccaaccuccuccgcggcuacgagaagauccgccucuccacccagaacgucaucaacaucgagaaggcccccggcggccccuaccgccucggcaccuccggcuccugccccaacgccaccucccgcuccggcuucuucgccaccauggccugggccgucccccgcgacaacaacaagaccgccaccaacccccucaccgucgaggucccccacaucugcaccaaggaggaggaccagaucaccgucuggggcuuccacuccgacaacaagacccagaugaagaaccucuacggcgacuccaacccccagaaguucaccuccuccgccaacggcgucaccacccacuacgucucccagaucggcggcuuccccgaccagaccgaggacggcggccucccccaguccggccgcaucgucgucgacuacaugguccagaagcccggcaagaccggcaccaucgucuaccagcgcggcauccuccucccccagaaggucuggugcgccuccggccgcuccaaggucaucaagggcucccucccccucaucggcgaggccgacugccuccacgagaaguacggcggccucaacaaguccaagcccuacuacaccggcgagcacgccaaggccaucggcaacugccccaucugggucaagaccccccucaagcucgccaacggcaccaaguaccgcccccccgccaagcuccucaaggagcgcggcuucuucggcgccaucgccggcuuccucgagggcggcugggagggcaugaucgccggcuggcacggcuacaccucccacggcgcccacggcgucgccgucgccgccgaccucaaguccacccaggaggccaucaacaagaucaccaagaaccucaacucccucuccgagcucgaggucaagaaccuccagcgccucuccggcgccauggacgagcuccacaacgagauccucgagcucgacgagaaggucgacgaccuccgcgccgacaccaucuccucccagaucgagcucgccguccuccucuccaacgagggcaucaucaacuccgaggacgagcaccuccucgcccucgagcgcaagcucaagaagaugcucggccccuccgccgucgacaucggcaacggcugcuucgagaccaagcacaagugcaaccagaccugccucgaccgcaucgccgccggcaccuucaacgccggcgaguucucccuccccaccuucgacucccucaacaucaccgccgccucccucaacgacgacggccucgacaaccacaccauccuccucuacuacuccaccgccgccuccucccucgccgucacccucaugaucgccaucuucaucgucuacaugaucucccgcgacaacgucuccugcuccaucugccucuga

SEQ ID NO: 122797 - RNA, 1755 nt, Artificial Sequence
  derived and/or modified CDS sequence (opt2) from hemagglutinin__InfluenzaB__AFJ76235
augaaggccaucaucguccuccucauggucgucaccuccaacgccgaccgcaucugcaccggcaucaccuccuccaacuccccccacgucgucaagaccgccacccagggcgaggucaacgucaccggcgucaucccccucaccaccacccccaccaagucccacuucgccaaccucaagggcaccaagacccgcggcaagcucugccccaccugccucaacugcaccgaccucgacgucgcccucggcucccccaugugcgucggcaucacccccuccgccaaggccuccauccuccacgagguccgccccgucaccucccgcugcuuccccaucaugcacgaccgcaccaagauccgccagcuccccaaccuccuccgcggcuacgagaagauccgccucuccacccagaacgucaucaacaucgagaaggcccccggcggccccuaccgccucggcaccuccggcuccugccccaacgccaccucccgcuccggcuucuucgccaccauggccugggccgucccccgcgacaacaacaagaccgccaccaacccccucaccgucgaggucccccacaucugcaccaaggaggaggaccagaucaccgucuggggcuuccacuccgacaacaagacccagaugaagaaccucuacggcgacuccaacccccagaaguucaccuccuccgccaacggcgucaccacccacuacgucucccagaucggcggcuuccccgaccagaccgaggacggcggccucccccaguccggccgcaucgucgucgacuacaugguccagaagcccggcaagaccggcaccaucgucuaccagcgcggcauccuccucccccagaaggucuggugcgccuccggccgcuccaaggucaucaagggcucccucccccucaucggcgaggccgacugccuccacgagaaguacggcggccucaacaaguccaagcccuacuacaccggcgagcacgccaaggccaucggcaacugccccaucugggucaagaccccccucaagcucgccaacggcaccaaguaccgcccccccgccaagcuccucaaggagcgcggcuucuucggcgccaucgccggcuuccucgagggcggcugggagggcaugaucgccggcuggcacggcuacaccucccacggcgcccacggcgucgccgucgccgccgaccucaaguccacccaggaggccaucaacaagaucaccaagaaccucaacucccucuccgagcucgaggucaagaaccuccagcgccucuccggcgccauggacgagcuccacaacgagauccucgagcucgacgagaaggucgacgaccuccgcgccgacaccaucuccucccagaucgagcucgccguccuccucuccaacgagggcaucaucaacuccgaggacgagcaccuccucgcccucgagcgcaagcucaagaagaugcucggccccuccgccgucgacaucggcaacggcugcuucgagaccaagcacaagugcaaccagaccugccucgaccgcaucgccgccggcaccuucaacgccggcgaguucucccuccccaccuucgacucccucaacaucaccgccgccucccucaacgacgacggccucgacaaccacaccauccuccucuacuacuccaccgccgccuccucccucgccgucacccucaugaucgccaucuucaucgucuacaugaucucccgcgacaacgucuccugcuccaucugccucuga

SEQ ID NO: 122798 - RNA, 1755 nt, Artificial Sequence; identical to SEQ ID NO: 122796
  derived and/or modified CDS sequence (opt2) from hemagglutinin__InfluenzaB__AFJ76246

SEQ ID NO: 122799 - RNA, 1758 nt, Artificial Sequence; identical to SEQ ID NO: 122550
  derived and/or modified CDS sequence (opt2) from hemagglutinin__InfluenzaB__AFJ76268

SEQ ID NO: 122800 - RNA, 1758 nt, Artificial Sequence; identical to SEQ ID NO: 122601
  derived and/or modified CDS sequence (opt2) from hemagglutinin__InfluenzaB__AFJ76301

SEQ ID NO: 122801 - RNA, 1755 nt, Artificial Sequence; identical to SEQ ID NO: 122462
  derived and/or modified CDS sequence (opt2) from hemagglutinin__InfluenzaB__AFJ76323

SEQ ID NO: 122802 - RNA, 1758 nt, Artificial Sequence
  derived and/or modified CDS sequence (opt2) from hemagglutinin__InfluenzaB__AFJ76334
augaaggccaucaucguccuccucauggucgucaccuccaacgccgaccgcaucugcaccggcaucaccuccuccaacuccccccacgucgucaagaccgccacccagggcgaggucaacgucaccggcgucaucccccucaccaccacccccaccaagucccacuucgccaaccucaagggcaccgagacccgcggcaagcucugccccaagugccucaacugcaccgaccucgacgucgcccucggccgccccaagugcaccggcaacauccccuccgcccgcgucuccauccuccacgagguccgccccgucaccuccggcugcuuccccaucaugcacgaccgcaccaagauccgccagcuccccaaccuccuccgcggcuacgagcacauccgccucuccacccacaacgucaucaacgccgagaacgcccccggcggccccuacaagaucggcaccuccggcuccugccccaacgucaccaacggcaacggcuucuucgccaccauggccugggccguccccaagaacgacaacaacaagaccgccaccaacucccucaccaucgagguccccuacaucugcaccgagggcgaggaccagaucaccgucuggggcuuccacuccgacuccgagacccagauggccaagcucuacggcgacuccaagccccagaaguucaccuccuccgccaacggcgucaccacccacuacgucucccagaucggcggcuuccccaaccagaccgaggacggcggccucccccaguccggccgcaucgucgucgacuacaugguccagaaguccggcaagaccggcaccaucaccuaccagcgcggcauccuccucccccagaaggucuggugcgccuccggccgcuccaaggucaucaagggcucccucccccucaucggcgaggccgacugccuccacgagaaguacggcggccucaacaaguccaagcccuacuacaccggcgagcacgccaaggccaucggcaacugccccaucugggucaagaccccccucaagcucgccaacggcaccaaguaccgcccccccgccaagcuccucaaggagcgcggcuucuucggcgccaucgccggcuuccucgagggcggcuggaagggcaugaucgccggcuggcacggcuacaccucccacggcgcccacggcgucgccgucgccgccgaccucaaguccacccaggaggccaucaacaagaucaccaagaaccucaacucccucuccgagcucgaggucaagaaccuccagcgccucuccggcgccauggacgagcuccacaacgagauccucgagcucgacgagaaggucgacgaccuccgcgccgacaccaucuccucccagaucgagcucgccguccuccucuccaacgagggcaucaucaacuccgaggacgagcaccuccucgcccucgagcgcaagcucaagaagaugcucggccccuccgccgucgagaucggcaacggcugcuucgagaccaagcacaagugcaaccagaccugccucgaccgcaucgccgccggcaccuucgacgccggcgaguucucccuccccaccuucgacucccucaacaucaccgccgccucccucaacgacgacggccucgacaaccacaccauccuccucuacuacuccaccgccgccuccucccucgccgucacccucaugaucgccgucuucgucgucuacauggucucccgcgacaacgucuccugcuccaucugccucuga

SEQ ID NO: 122803 - RNA, 1758 nt, Artificial Sequence; identical to SEQ ID NO: 122550
  derived and/or modified CDS sequence (opt2) from hemagglutinin__InfluenzaB__AFJ77327

SEQ ID NO: 122804 - RNA, 1755 nt, Artificial Sequence; identical to SEQ ID NO: 122462
  derived and/or modified CDS sequence (opt2) from hemagglutinin__InfluenzaB__AFJ77369

SEQ ID NO: 122805 - RNA, 1755 nt, Artificial Sequence; identical to SEQ ID NO: 122462
  derived and/or modified CDS sequence (opt2) from hemagglutinin__InfluenzaB__AFJ77380

SEQ ID NO: 122806 - RNA, 1755 nt, Artificial Sequence
  derived and/or modified CDS sequence (opt2) from hemagglutinin__InfluenzaB__AFJ80139
augaaggccaucaucguccuccucauggucgucaccuccaacgccgaccgcaucugcaccggcaucaccuccuccaacuccccccacgucgucaagaccgccacccagggcgaggucaacgucaccggcgucaucccccucaccaccacccccaccaagucccacuucgccaaccucaagggcaccaagacccgcggcaagcucugccccaccugccucaacugcaccgaccucgacgucgcccucggccgccccaugugcgucggcaucacccccuccgccaaggccuccauccuccacgagguccgccccgucaccuccggcugcuuccccaucaugcacgaccgcaccaagauccgccagcuccccaaccuccuccgcggcuacgagaagauccgccucuccacccagaacgucaucaacgccgagaaggcccccggcggccccuaccgccucggcaccuccggcuccugccccaacgccaccucccgcuccggcuucuucgccaccauggccugggccgucccccgcgacaacaacaagaccgccaccaacccccucaccgucgagguccccuacaucugcaccaaggaggaggaccagaucaccgucuggggcuuccacuccgacaacaagacccagaugaagaaccucuacggcgacuccaacccccagaaguucaccuccuccgccaacggcgucaccacccacuacgucucccagaucggcggcuuccccgaccagaccgaggacggcggccucccccaguccggccgcaucgucgucgacuacaugguccagaagcccggcaagaccggcaccaucgucuaccagcgcggcauccuccucccccagaaggucuggugcgccuccggccgcuccaaggucaucaagggcuuccucccccucaucggcgaggccgacugccuccacgagaaguacggcggccucaacaaguccaagcccuacuacaccggcgagcacgccaaggccaucggcaacugccccaucugggucaagaccccccucaagcucgccaacggcaccaaguaccgcccccccgccaagcuccucaaggagcgcggcuucuucggcgccaucgccggcuuccucgagggcggcugggagggcaugaucgccggcuggcacggcuacaccucccacggcgcccacggcgucgccgucgccgccgaccucaaguccacccaggaggccaucaacaagaucaccaagaaccucaacucccucuccgagcucgaggucaagaaccuccagcgccucuccggcgccauggacgagcuccacaacgagauccucgagcucgacgagaaggucgacgaccuccgcgccgacaccaucuccucccagaucgagcucgccguccuccucuccaacgagggcaucaucaacuccgaggacgagcaccuccucgcccucgagcgcaagcucaagaagaugcucggccccuccgccgucgacaucggcaacggcugcuucgagaccaagcacaagugcaaccagaccugccucgaccgcaucgccgccggcaccuucaacgccggcgaguucucccuccccaccuucgacucccucaacaucaccgccgccucccucaacgacgacggccucgacaaccacaccauccuccucuacuacuccaccgccgccuccucccucgccgucacccucaugaucgccaucuucaucgucuacaugaucucccgcgacaacgucuccugcuccaucugccucuga

SEQ ID NO: 122807 - RNA, 1755 nt, Artificial Sequence
  derived and/or modified CDS sequence (opt2) from hemagglutinin__InfluenzaB__AFJ80150
augaaggccaucaucguccuccucauggucgucaccuccaacgccgaccgcaucugcaccggcaucaccuccuccaacuccccccacgucgucaagaccgccacccagggcgaggucaacgucaccggcgucaucccccucaccaccacccccaccaagucccacuucgccaaccucaagggcaccaagacccgcggcaagcucugccccaccugccucaacugcaccgaccucgacgucgcccucggccgccccaugugcgucggcaucacccccuccgccaaggccuccauccuccacgagguccgccccgucaccuccggcugcuuccccaucaugcacgaccgcaccaagauccgccagcuccccaaccuccuccgcggcuacgagaagauccgccucuccacccagaacgucaucaacgccgagaaggcccccggcggccccuaccgccucggcaccuccggcuccugccccaacgccaccucccgcuccggcuucuucgccaccauggccugggccgucccccgcgacaacaacaagaccgccaccaacccccucaccgucgagguccccuacaucugcaccaaggaggaggaccagaucaccgucuggggcuuccacuccgacaacaagacccagaugaagaaccucuacggcgacuccaacccccagaaguucaccuccuccgccaacggcgucaccacccacuacgucucccagaucggcggcuuccccgaccagaccgaggacggcggccucccccaguccggccgcaucgucgucgacuacaugguccagaagcccggcaagaccggcaccaucgucuaccagcgcggcauccuccucccccagaaggucuggugcgccuccggccgcuccaaggucaucaagggcucccucccccucaucggcgaggccgacugccuccacgagaaguacggcggccucaacaaguccaagcccuacuacaccggcgagcacgccaaggccaucggcaacugccccaucugggucaagaccccccucaagcucgccaacggcaccaaguaccgcccccccgccaagcuccucaaggagcgcggcuucuucggcgccaucgccggcuuccucgagggcggcugggagggcaugaucgccggcuggcacggcuacaccucccacggcgcccacggcgucgccgucgccgccgaccucaaguccacccaggaggccaucaacaagaucaccaagaaccucaacucccucuccgagcucgaggucaagaaccuccagcgccucuccggcgccauggacgagcuccacaacgagauccucgagcucgacgagaaggucgacgaccuccgcgccgacaccaucuccucccagaucgagcucgccguccuccucuccaacgagggcaucaucaacuccgaggacgagcaccuccucgcccucgagcgcaagcucaagaagaugcucggccccuccgccgucgacaucggcaacggcugcuucgagaccaagcacaagugcaaccagaccugccucgaccgcaucgccgccggcaccuucaacgccggcgaguucucccuccccaccuucgacucccucaacaucaccgccgccucccucaacgacgacggccucgacaaccacaccauccuccucuacuacuccaccgccgccuccucccucgccgucacccucaugaucgccaucuucaucgucuacaugaucucccgcgacaacgucuccugcuccaucugccucuga

SEQ ID NO: 122808 - RNA, 1755 nt, Artificial Sequence
  derived and/or modified CDS sequence (opt2) from hemagglutinin__InfluenzaB__AFJ80161
augaaggccaucaucguccuccucauggucgucaccuccaacgccgaccgcaucugcaccggcaucaccuccuccaacuccccccacgucgucaagaccgccacccagggcgaggucaacgucaccggcgccaucccccucaccaccacccccaccaagucccacuucgccaaccucaagggcaccaagacccgcggcaagcucugccccaccugccucaacugcaccgaccucgacgucgcccucggccgccccaugugcgucggcaucacccccuccgccaaggccuccauccuccacgagguccgccccgucaccuccggcugcuuccccaucaugcacgaccgcaccaagauccgccagcuccccaaccuccuccgcggcuacgagaagauccgccucuccacccagaacgucaucaacgccgagaaggcccccggcggccccuaccgccucggcaccuccggcuccugccccaacgccaccucccgcuccggcuucuucgccaccauggccugggccgucccccgcgacaacaacaagaccgccaccaacccccucaccgucgaggucccccacaucugcaccaaggaggaggaccagaucaccgucuggggcuuccacuccgacaacaagacccagaugaagaaccucuacggcgacuccaacccccagaaguucaccuccuccgccaacggcaucaccacccacuacgucucccagaucggcggcuuccccgaccagaccgaggacggcggccucccccaguccggccgcaucgucgucgacuacaugguccagaagcccggcaagaccggcaccaucgucuaccagcgcggcauccuccucccccagaaggucuggugcgccuccggccgcuccaaggucaucaagggcucccucccccucaucggcgaggccgacugccuccacgagaaguacggcggccucaacaaguccaagcccuacuacaccggcgagcacgccaaggccaucggcaacugccccaucugggucaagaccccccucaagcucgccaacggcaccaaguaccgcccccccgccaagcuccucaaggagcgcggcuucuucggcgccaucgccggcuuccucgagggcggcugggagggcaugaucgccggcuggcacggcuacaccucccacggcgcccacggcgucgccgucgccgccgaccucaaguccacccaggaggccaucaacaagaucaccaagaaccucaacucccucuccgagcucgaggucaagaaccuccagcgccucuccggcgccauggacgagcuccacaacgagauccucgagcucgacgagaaggucgacgaccuccgcgccgacaccaucuccucccagaucgagcucgccguccuccucuccaacgagggcaucaucaacuccgaggacgagcaccuccucgcccucgagcgcaagcucaagaagaugcucggccccuccgccgucgacaucggcaacggcugcuucgagaccaagcacaagugcaaccagaccugccucgaccgcaucgccgccggcaccuucaacgccggcgaguucucccuccccaccuucgacucccucaacaucaccgccgccucccucaacgacgacggccucgacaaccacaccauccuccucuacuacuccaccgccgccuccucccucgccgucacccucaugaucgccaucuucaucgucuacaugaucuuccgcgacaacgucuccugcuccaucugccucuga

SEQ ID NO: 122809 - RNA, 1755 nt, Artificial Sequence
  derived and/or modified CDS sequence (opt2) from hemagglutinin__InfluenzaB__AFJ80172
augaaggccaucaucguccuccucauggucgucaccuccaacgccgaccgcaucugcaccggcaucaccuccuccaacuccccccacgucgucaagaccgccacccagggcgaggucaacgucaccggcgucaucccccucaccaccacccccaccaagucccacuucgccaaccucaagggcaccaagacccgcggcaagcucugccccaccugccucaacugcaccgaccucgacgucgcccucggccgccccaugugcgucggcaucacccccuccgccaaggccuccauccuccacgagguccgccccgucaccuccggcugcuuccccaucaugcacgaccgcaccaagauccgccagcuccccaaccuccuccgcggcuacgagaagauccgccucuccacccagaacgucaucaacgccgagaaggcccccggcggccccuaccgccucggcaccuccggcuccugccccaacgccaccucccgcuccggcuucuucgccaccauggccugggccgucccccgcgacaacaacaagaccgccaccaacccccucaccgucgagguccccuacaucugcaccaaggaggaggaccagaucaccgucuggggcuuccacuccgacaacaagacccagaugaagaaccucuacggcgacuccaacccccagaaguucaccuccuccgccaacggcgucaccacccacuacgucucccagaucggcgacuuccccgaccagaccgaggacggcggccucccccaguccggccgcaucgucgucgacuacaugguccagaagcccggcaagaccggcaccaucgucuaccagcgcggcauccuccucccccagaaggucuggugcgccuccggccgcuccaaggucaucaagggcucccucccccucaucggcgaggccgacugccuccacgagaaguacggcggccucaacaaguccaagcccuacuacaccggcgagcacgccaaggccaucggcaacugccccaucugggucaagaccccccucaagcucgccaacggcaccaaguaccgcccccccgccaagcuccucaaggagcgcggcuucuucggcgccaucgccggcuuccucgagggcggcugggagggcaugaucgccggcuggcacggcuacaccucccacggcgcccacggcgucgccgucgccgccgaccucaaguccacccaggaggccaucaacaagaucaccaagaaccucaacucccucuccgagcucgaggucaagaaccuccagcgccucuccggcgccauggacgagcuccacaacgagauccucgagcucgacgagaaggucgacgaccuccgcgccgacaccaucuccucccagaucgagcucgccguccuccucuccaacgagggcaucaucaacuccgaggacgagcaccuccucgcccucgagcgcaagcucaagaagaugcucggccccuccgccgucgacaucggcaacggcugcuucgagaccaagcacaagugcaaccagaccugccucgaccgcaucgccgccggcaccuucaacgccggcgaguucucccuccccaccuucgacucccucaacaucaccgccgccucccucaacgacgacggccucgacaaccacaccauccuccucuacuacuccaccgccgccuccucccucgccgucacccucaugaucgccaucuucaucgucuacaugaucucccgcgacaacgucuccugcuccaucugccucuga

SEQ ID NO: 122810 - RNA, 1755 nt, Artificial Sequence; identical to SEQ ID NO: 122796
  derived and/or modified CDS sequence (opt2) from hemagglutinin__InfluenzaB__AFJ80183

SEQ ID NO: 122811 - RNA, 1755 nt, Artificial Sequence; identical to SEQ ID NO: 122807
  derived and/or modified CDS sequence (opt2) from hemagglutinin__InfluenzaB__AFJ80194

SEQ ID NO: 122812 - RNA, 1755 nt, Artificial Sequence; identical to SEQ ID NO: 122796
  derived and/or modified CDS sequence (opt2) from hemagglutinin__InfluenzaB__AFJ80205

SEQ ID NO: 122813 - RNA, 1755 nt, Artificial Sequence; identical to SEQ ID NO: 122441
  derived and/or modified CDS sequence (opt2) from hemagglutinin__InfluenzaB__AFJ80216

SEQ ID NO: 122814 - RNA, 1755 nt, Artificial Sequence; identical to SEQ ID NO: 122796
  derived and/or modified CDS sequence (opt2) from hemagglutinin__InfluenzaB__AFJ80227

SEQ ID NO: 122815 - RNA, 1758 nt, Artificial Sequence
  derived and/or modified CDS sequence (opt2) from hemagglutinin__InfluenzaB__AFJ80238
augaaggccaucaucguccuccucauggucgucaccuccaacgccgaccgcaucugcaccggcaucaccuccuccaacuccccccacgucgucaagaccgccacccagggcgaggucaacgucaccggcgucaucccccucaccaccacccccaccaagucccacuucgccaaccucaagggcaccaagacccgcggcaagcucugccccaagugccucaacugcaccgaccucgacgucgcccucggccgccccaagugcaccggcaacauccccuccgccaaggucuccauccuccacgagguccgccccgucaccuccggcugcuuccccaucaugcacgaccgcaccaagauccgccagcuccccaaccuccuccgcggcuacgagcacauccgccucuccauccacaacgucaucaacgccgagaaggcccccggcggccccuacaagaucggcaccuccggcuccugccccaacgucaccaacggcaacggcuucuucgccaccauggccugggccguccccaagaacgacaacaacaagaccgccaccaacucccucaccaucgagguccccuacaucugcaccgagggcgaggaccagaucaccgucuggggcuuccacuccgacaacgagacccagauggccaagcucuacggcgacuccaagccccagaaguucaccuccuccgccaacggcgucaccacccacuacgucucccagaucggcggcuuccccaaccagaccgaggacggcggccucccccaguccggccgcaucgucgucgacuacaugguccagaaguccggcaagaccggcaccaucaccuaccagcgcggcauccuccucccccagaaggucuggugcgccuccggccgcuccaaggucaucaagggcucccucccccucaucggcgaggccgacugccuccacgagaaguacggcggccucaacaaguccaagcccuacuacaccggcgagcacgccaaggccaucggcaacugccccaucugggucaagaccccccucaagcucgccaacggcaccaaguaccgcccccccgccaagcuccucaaggagcgcggcuucuucggcgccaucgccggcuuccucgagggcggcugggagggcaugaucgccggcuggcacggcuacaccucccacggcgcccacggcgucgccgucgccgccgaccucaaguccacccaggaggccaucaacaagaucaccaagaaccucaacucccucuccgagcucgaggucaagaaccuccagcgccucuccggcgccauggacgagcuccacaacgagauccucgagcucgacgagaaggucgacgaccuccgcgccgacaccaucuccucccagaucgagcucgccguccuccucuccaacgagggcaucaucaacuccgaggacgagcaccuccucgcccucgagcgcaagcucaagaagaugcucggccccuccgccgucgagaucggcaacggcugcuucgagaccaagcacaagugcaaccagaccugccucgaccgcaucgccgccggcaccuucgacgccggcgaguucucccuccccaccuucgacucccucaacaucaccgccgccucccucaacgacgacggccucgacaaccacaccauccuccucuacuacuccaccgccgccuccucccucgccgucacccucaugaucgccaucuucgucgucuacauggucucccgcgacaacgucuccugcuccaucugccucuga

SEQ ID NO: 122816 - RNA, 1755 nt, Artificial Sequence
  derived and/or modified CDS sequence (opt2) from hemagglutinin__InfluenzaB__AFJ80656
augaaggccaucaucguccuccucauggucgucaccuccaacgccgaccgcaucugcaccggcaucaccuccuccaacuccccccacgucguccgcaccgccacccagggcgaggucaacgucaccggcgucaucccccucaccaccacccccaccaagucccacuucgccaaccucaagggcaccaagacccgcggcaagcucugccccaccugccucaacugcaccgaccucgacgucgcccucggccgccccaugugcgucggcaucacccccuccgccaaggccuccauccuccacgagguccgccccgucaccuccggcugcuuccccaucaugcacgaccgcaccaagauccgccagcuccccaaccuccuccgcggcuacgagaagauccgccucuccacccagaacgucaucaacgccgagaaggcccccggcggccccuaccgccucggcaccuccggcuccugccccaacgccaccucccgcuccggcuucuucgccaccauggccugggccgucccccgcgacaacaacaagaccgccaccaacccccucaccgucgaggucccccacaucugcaccaaggaggaggaccagaucaccgucuggggcuuccacuccgacaacaagacccagaugaagaaccucuacggcgacuccaacccccagaaguucaccuccuccgccaacggcgucaccacccacuacgucucccagaucggcggcuuccccgaccagaccgaggacggcggccucccccaguccggccgcaucgucgucgacuacaugguccagaagcccggcaagaccggcaccaucgucuaccagcgcggcauccuccucccccagaaggucuggugcgccuccggccgcuccaaggucaucaagggcucccucccccucaucggcgaggccgacugccuccacgagaaguacggcggccucaacaaguccaagcccuacuacaccggcgagcacgccaaggccaucggcaacugccccaucugggucaagaccccccucaagcucgccaacggcaccaaguaccgcccccccgccaagcuccucaaggagcgcggcuucuucggcgccaucgccggcuuccucgagggcggcugggagggcaugaucgccggcuggcacggcuacaccucccacggcgcccacggcgucgccgucgccgccgaccucaaguccacccaggaggccaucaacaagaucaccaagaaccucaacucccucuccgagcucgaggucaagaaccuccagcgccucuccggcgccauggacgagcuccacaacgagauccucgagcucgacgagaaggucgacgaccuccgcgccgacaccaucuccucccagaucgagcucgccguccuccucuccaacgagggcaucaucaacuccgaggacgagcaccuccucgcccucgagcgcaagcucaagaagaugcucggccccuccgccgucgacaucggcaacggcugcuucgagaccaagcacaagugcaaccagaccugccucgaccgcaucgccgccggcaccuucaacgccggcgaguucucccuccccaccuucgacucccucaacaucaccgccgccucccucaacgacgacggccucgacaaccacaccauccuccucuacuacuccaccgccgccuccucccucgccgucacccucaugaucgccaucuucaucgucuacaugaucucccgcgacaacgucuccugcuccaucugccucuga

SEQ ID NO: 122817 - RNA, 1755 nt, Artificial Sequence; identical to SEQ ID NO: 122796
  derived and/or modified CDS sequence (opt2) from hemagglutinin__InfluenzaB__AFJ80667

SEQ ID NO: 122818 - RNA, 1755 nt, Artificial Sequence; identical to SEQ ID NO: 122796
  derived and/or modified CDS sequence (opt2) from hemagglutinin__InfluenzaB__AFJ80678

SEQ ID NO: 122819 - RNA, 1755 nt, Artificial Sequence; identical to SEQ ID NO: 122796
  derived and/or modified CDS sequence (opt2) from hemagglutinin__InfluenzaB__AFJ80689

SEQ ID NO: 122820 - RNA, 1755 nt, Artificial Sequence
  derived and/or modified CDS sequence (opt2) from hemagglutinin__InfluenzaB__AFJ80711
augaaggccaucaucguccuccucauggucgucaccuccaacgccgaccgcaucugcaccggcaucaccuccuccaacuccccccacgucgucaagaccgccacccagggcgaggucaacgucaccggcgucaucccccucaccaccacccccaucaaguccuacuucgccaaccucaagggcaccaagacccgcggcaagcucugccccgacugccucaacugcaccgaccucgacgucgcccucggccgccccaugugcgucggcaccacccccuccgccaaggccuccauccuccacgagguccgccccgucaccuccggcugcuuccccaucaugcacgaccgcaccaagauccgccagcuccccaaccuccuccgcggcuacgagaacauccgccucuccacccagaacgucaucgacgccgagaaggcccccggcggccccuaccgccucggcaccuccggcuccugccccaacgccaccuccaaguccggcuucuucgccaccauggccugggccguccccaaggacaacaacaagaacgccaccaacccccucaccgucgagguccccuacgucugcaccgagggcgaggaccagaucaccgucuggggcuuccacuccgacaacaagacccagaugaagaaccucuacggcgacuccaacccccagaaguucaccuccuccgccaacggcgucaccacccacuacgucucccagaucggcggcuuccccgaccagaccgaggacggcggccucccccaguccggccgcaucgucgucgacuacaugguccagaagcccggcaagaccggcaccaucgucuaccagcgcggcguccuccucccccagaaggucuggugcgccuccggccgcuccaaggucaucaagggcucccucccccucaucggcgaggccgacugccuccacgagaaguacggcggccucaacaaguccaagcccuacuacaccggcgagcacgccaaggccaucggcaacugccccaucugggucaagaccccccucaagcucgccaacggcaccaaguaccgcccccccgccaagcuccucaaggagcgcggcuucuucggcgccaucgccggcuuccucgagggcggcugggagggcaugaucgccggcuggcacggcuacaccucccacggcgcccacggcgucgccgucgccgccgaccucaaguccacccaggaggccaucaacaagaucaccaagaaccucaacucccucuccgagcucgaggucaagaaccuccagcgccucuccggcgccauggacgagcuccacaacgagauccucgagcucgacgagaaggucgacgaccuccgcgccgacaccaucuccucccagaucgagcucgccguccuccucuccaacgagggcaucaucaacuccgaggacgagcaccuccucgcccucgagcgcaagcucaagaagaugcucggccccuccgccgucgacaucggcaacggcugcuucgagaccaagcacaagugcaaccagaccugccucgaccgcaucgccgccggcaccuucaacgccggcgaguucucccuccccaccuucgacucccucaacaucaccgccgccucccucaacgacgacggccucgacaaccacaccauccuccucuacuacuccaccgccgccuccucccucgccgucacccucaugcucgccaucuucaucgucuacauggucucccgcgacaacgucuccugcuccaucugccucuga

SEQ ID NO: 122821 - RNA, 1755 nt, Artificial Sequence; identical to SEQ ID NO: 122820
  derived and/or modified CDS sequence (opt2) from hemagglutinin__InfluenzaB__AFJ80722

SEQ ID NO: 122822 - RNA, 1755 nt, Artificial Sequence
  derived and/or modified CDS sequence (opt2) from hemagglutinin__InfluenzaB__AFJ80733
augaaggccaucaucguccuccucauggucgucaccuccaacgccgaccgcaucugcaccggcaucaccuccuccaacuccccccacgucgucaagaccgccacccagggcgaggucaacgucaccggcgucaucccccucaccaccacccccaccaaguccuacuucgccaaccucaagggcacccgcacccgcggcaagcucugccccgacugccucaacugcaccgaccucgacgucgcccucggccgccccaugugcaugggcaccacccccuccgccaaggccuccauccuccacgagguccgccccgucaccuccggcugcuuccccaucaugcacgaccgcaccaagauccgccagcuccccaaccuccuccgcggcuacgagaacauccgccucuccacccagaacgucaucgacgccgagaaggcccccggcggccccuaccgccucggcaccuccggcuccugccccgacgccaccaacaaguccggcuucuucgccaccauggccugggccguccccaaggacaacaacaagaacgccaccaacccccucaccgucgagguccccuacaucugcaccgagggcgaggaccagaucaccgucuggggcuuccacuccgacaacaagacccagaugaagaaccucuacggcgacuccaacccccagaaguucaccuccuccgccaacggcgucaccacccacuacgucucccagaucggcggcuuccccgaccagaccgaggacggcggccucccccaguccggccgcaucgucgucgacuacaugaugcagaagcccggcaagaccggcaccaucgucuaccagcgcggcguccuccucccccagaaggucuggugcgccuccggccgcuccaaggucaucaagggcucccucccccucaucggcgaggccgacugccuccacgagaaguacggcggccucaacaaguccaagcccuacuacaccggcgagcacgccaaggccaucggcaacugccccaucugggucaagaccccccucaagcucgccaacggcaccaaguaccgcccccccgccaagcuccucaaggagcgcggcuucuucggcgccaucgccggcuuccucgagggcggcugggagggcaugaucgccggcuggcacggcuacaccucccacggcgcccacggcgucgccgucgccgccgaccucaaguccacccaggaggccaucaacaagaucaccaagaaccucaacucccucuccgagcucgaggucaagaaccuccagcgccucuccggcgccauggacgagcuccacaacgagauccucgagcucgacgagaaggucgacgaccuccgcgccgacaccaucuccucccagaucgagcucgccguccuccucuccaacgagggcaucaucaacuccgaggacgagcaccuccucgcccucgagcgcaagcucaagaagaugcucggccccuccgccgucgacaucggcaacggcugcuucgagaccaagcacaagugcaaccagaccugccucgaccgcaucgccgccggcaccuucaacgccggcgaguucucccuccccaccuucgacucccucaacaucaccgccgccucccucaacgacgacggccucgacaaccacaccauccuccucuacuacuccaccgccgccuccucccucgccgucacccucaugcucgccaucuucaucgucuacauggucucccgcgacaacgucuccugcuccaucugccucuga

SEQ ID NO: 122823 - RNA, 1758 nt, Artificial Sequence; identical to SEQ ID NO: 122550
  derived and/or modified CDS sequence (opt2) from hemagglutinin__InfluenzaB__AFJ80744

SEQ ID NO: 122824 - RNA, 1758 nt, Artificial Sequence; identical to SEQ ID NO: 122550
  derived and/or modified CDS sequence (opt2) from hemagglutinin__InfluenzaB__AFJ80755

SEQ ID NO: 122825 - RNA, 1758 nt, Artificial Sequence; identical to SEQ ID NO: 122550
  derived and/or modified CDS sequence (opt2) from hemagglutinin__InfluenzaB__AFJ80781

SEQ ID NO: 122826 - RNA, 1758 nt, Artificial Sequence; identical to SEQ ID NO: 122550
  derived and/or modified CDS sequence (opt2) from hemagglutinin__InfluenzaB__AFJ80792

SEQ ID NO: 122827 - RNA, 1758 nt, Artificial Sequence; identical to SEQ ID NO: 122550
  derived and/or modified CDS sequence (opt2) from hemagglutinin__InfluenzaB__AFJ80803

SEQ ID NO: 122828 - RNA, 1758 nt, Artificial Sequence; identical to SEQ ID NO: 122550
  derived and/or modified CDS sequence (opt2) from hemagglutinin__InfluenzaB__AFJ80814

SEQ ID NO: 122829 - RNA, 1758 nt, Artificial Sequence
  derived and/or modified CDS sequence (opt2) from hemagglutinin__InfluenzaB__AFJ80825
augaaggccaucaucguccuccucauggucgucaccuccaacgccgaccgcaucugcaccggcaucaccuccuccaacuccccccacgucgucaagaccgccacccagggcgaggucaacgucaccggcgucaucccccucaccaccacccccaccaagucccacuucgccaaccucaagggcaccgagacccgcggcaagcucugccccaagugccucaacugcaccgaccucgacgucgcccucggccgccccaagugcaccggcaacauccccuccgcccgcgucuccauccuccacgagguccgccccaucaccuccggcugcuuccccaucaugcacgaccgcaccaagauccgccagcuccccaaccuccuccgcggcuacgagcacauccgccucuccacccacaacgucaucaacgccgagaacgcccccggcggccccuacaagaucggcaccuccggcuccugccccaacgucaccaacggcaacggcuucuucgccaccauggccugggccguccccaagaacgacaacaacaagaccgccaccaacucccucaccaucgagguccccuacaucugcaccgagggcgaggaccagaucaccgucuggggcuuccacuccgacaacgagacccagauggccaagcucuacggcgacuccaagccccagaaguucaccuccuccgccaacggcgucaccacccacuacgucucccagaucggcggcuuccccaaccagaccgaggacggcggccucccccaguccggccgcaucgucgucgacuacaugguccagaaguccggcaagaccggcaccaucaccuaccagcgcggcauccuccucccccagaaggucuggugcgccuccggccgcuccaaggucaucaagggcucccucccccucaucggcgaggccgacugccuccacgagaaguacggcggccucaacaaguccaagcccuacuacaccggcgagcacgccaaggccaucggcaacugccccaucugggucaagaccccccucaagcucgccaacggcaccaaguaccgcccccccgccaagcuccucaaggagcgcggcuucuucggcgccaucgccggcuuccucgagggcggcugggagggcaugaucgccggcuggcacggcuacaccucccacggcgcccacggcgucgccgucgccgccgaccucaaguccacccaggaggccaucaacaagaucaccaagaaccucaacucccucuccgagcucgaggucaagaaccuccagcgccucuccggcgccauggacgagcuccacaacgagauccucgagcucgacgagaaggucgacgaccuccgcgccgacaccaucuccucccagaucgagcucgccguccuccucuccaacgagggcaucaucaacuccgaggacgagcaccuccucgcccucgagcgcaagcucaagaagaugcucggccccuccgccgucgagaucggcaacggcugcuucgagaccaagcacaagugcaaccagaccugccucgaccgcaucgccgccggcaccuucgacgccggcgaguucucccuccccaccuucgacucccucaacaucaccgccgccucccucaacgacgacggccucgacaaccacaccauccuccucuacuacuccaccgccgccuccucccucgccgucacccucaugaucgccaucuucgucgucuacauggucucccgcgacaacgucuccugcuccaucugccucuga

SEQ ID NO: 122830 - RNA, 1758 nt, Artificial Sequence; identical to SEQ ID NO: 122550
  derived and/or modified CDS sequence (opt2) from hemagglutinin__InfluenzaB__AFJ80836

SEQ ID NO: 122831 - RNA, 1758 nt, Artificial Sequence; identical to SEQ ID NO: 122618
  derived and/or modified CDS sequence (opt2) from hemagglutinin__InfluenzaB__AFJ80847

SEQ ID NO: 122832 - RNA, 1758 nt, Artificial Sequence; identical to SEQ ID NO: 122550
  derived and/or modified CDS sequence (opt2) from hemagglutinin__InfluenzaB__AFJ80858

SEQ ID NO: 122833 - RNA, 1758 nt, Artificial Sequence; identical to SEQ ID NO: 122550
  derived and/or modified CDS sequence (opt2) from hemagglutinin__InfluenzaB__AFJ80869

SEQ ID NO: 122834 - RNA, 1758 nt, Artificial Sequence; identical to SEQ ID NO: 122550
  derived and/or modified CDS sequence (opt2) from hemagglutinin__InfluenzaB__AFJ80880

SEQ ID NO: 122835 - RNA, 1758 nt, Artificial Sequence; identical to SEQ ID NO: 122601
  derived and/or modified CDS sequence (opt2) from hemagglutinin__InfluenzaB__AFJ80891

SEQ ID NO: 122836 - RNA, 1758 nt, Artificial Sequence; identical to SEQ ID NO: 122601
  derived and/or modified CDS sequence (opt2) from hemagglutinin__InfluenzaB__AFJ80902

SEQ ID NO: 122837 - RNA, 1758 nt, Artificial Sequence; identical to SEQ ID NO: 122550
  derived and/or modified CDS sequence (opt2) from hemagglutinin__InfluenzaB__AFJ80913

SEQ ID NO: 122838 - RNA, 1758 nt, Artificial Sequence
  derived and/or modified CDS sequence (opt2) from hemagglutinin__InfluenzaB__AFJ80924
augaaggccaucaucguccuccucauggucgucaccuccaacgccgaccgcaucugcaccggcaucaccuccuccaacuccccccacgucgucaagaccgccacccagggcgaggucaacgucaccggcgucaucccccucaccaccacccccaccaagucccacuucgccaaccucaagggcaccgagacccgcggcaagcucugccccaagugccucaacugcaccgaccucgacgucgcccucggccgccccaagugcaccggcaacauccccuccgcccgcgucuccauccuccacgagguccgccccgucaccuccggcugcuuccccaucaugcacgaccgcaccaagauccgccagcuccccaaccuccuccgcggcuacgagcacauccgccucuccacccacaacgucaucaacgccgagaacgcccccggcggccccuacaagaucggcaccuccggcuccugccccaacgucaccaacggcaacggcuucuucgccaccauggccugggccguccccaagaacgacaacaacaagaccgccaccaacucccucaccaucgagguccccuacaucugcgccgagggcgaggaccagaucaccgucuggggcuuccacuccgacaacgagacccagauggccaagcucuacggcgacuccaagccccagaaguucaccuccuccgccaacggcgucaccacccacuacgucucccagaucggcggcuuccccaaccagaccgaggacggcggccucccccaguccggccgcaucgucgucgacuacaugguccagaaguccggcaagaccggcaccaucaccuaccagcgcggcauccuccucccccagaaggucuggugcgccuccggccgcuccaaggucaucaagggcucccucccccucaucggcgaggccgacugccuccacgagaaguacggcggccucaacaaguccaagcccuacuacaccggcgagcacgccaaggccaucggcaacugccccaucugggucaagaccccccucaagcucgccaacggcaccaaguaccgcccccccgccaagcuccucaaggagcgcggcuucuucggcgccaucgccggcuuccucgagggcggcugggagggcaugaucgccggcuggcacggcuacaccucccacggcgcccacggcgucgccgucgccgccgaccucaaguccacccaggaggccaucaacaagaucaccaagaaccucaacucccucuccgagcucgaggucaagaaccuccagcgccucuccggcgccauggacgagcuccacaacgagauccucgagcucgacgagaaggucgacgaccuccgcgccgacaccaucuccucccagaucgagcucgccguccuccucuccaacgagggcaucaucaacuccgaggacgagcaccuccucgcccucgagcgcaagcucaagaagaugcucggccccuccgccgucgagaucggcaacggcugcuucgagaccaagcacaagugcaaccagaccugccucgaccgcaucgccgccggcaccuucgacgccggcgaguucucccuccccaccuucgacucccucaacaucaccgccgccucccucaacgacgacggccucgacaaccacaccauccuccucuacuacuccaccgccgccuccucccucgccgucacccucaugaucgccaucuucgucgucuacauggucucccgcgacaacgucuccugcuccaucugccucuga

SEQ ID NO: 122839 - RNA, 1758 nt, Artificial Sequence; identical to SEQ ID NO: 122601
  derived and/or modified CDS sequence (opt2) from hemagglutinin__InfluenzaB__AFJ80935

SEQ ID NO: 122840 - RNA, 1755 nt, Artificial Sequence; identical to SEQ ID NO: 122462
  derived and/or modified CDS sequence (opt2) from hemagglutinin__InfluenzaB__AFJ80946

SEQ ID NO: 122841 - RNA, 1758 nt, Artificial Sequence
  derived and/or modified CDS sequence (opt2) from hemagglutinin__InfluenzaB__AFJ80957
augaaggccaucaucguccuccucauggucgccaccuccaacgccgaccgcaucugcaccggcaucaccuccuccaacuccccccacgucgucaagaccgccacccagggcgaggucaacgucaccggcgucaucccccucaccaccacccccaccaagucccacuucgccaaccucaagggcaccgagacccgcggcaagcucugccccaagugccucaacugcaccgaccucgacgucgcccucggccgccccaagugcaccggcaacauccccuccgcccgcgucuccauccuccacgagguccgccccgucaccuccggcugcuuccccaucaugcacgaccgcaccaagauccgccagcuccccaaccuccuccgcggcuacgagcacauccgccucuccacccacaacgucaucaacgccgagaacgcccccggcggccccuacaagaucggcaccuccggcuccugccccaacgucaccaacggcaacggcuucuucgccaccauggccugggccguccccaagaacgacaacaacaagaccgccaccaacucccucaccaucgagguccccuacaucugcaccgagggcgaggaccagaucaccgucuggggcuuccacuccgacaacgagacccagauggccaagcucuacggcgacuccaagccccagaaguucaccuccuccgccaacggcgucaccacccacuacgucucccagaucggcggcuuccccaaccagaccgaggacggcggccucccccaguccggccgcaucgucgucgacuacaugguccagaaguccggcaagaccggcaccaucaccuaccagcgcggcauccuccucccccagaaggucuggugcgccuccggccgcuccaaggucaucaagggcucccucccccucaucggcgaggccgacugccuccacgagaaguacggcggccucaacaaguccaagcccuacuacaccggcgagcacgccaaggccaucggcaacugccccaucugggucaagaccccccucaagcucgccaacggcaccaaguaccgcccccccgccaagcuccucaaggagcgcggcuucuucggcgccaucgccggcuuccucgagggcggcugggagggcaugaucgccggcuggcacggcuacaccucccacggcgcccacggcgucgccgucgccgccgaccucaaguccacccaggaggccaucaacaagaucaccaagaaccucaacucccucuccgagcucgaggucaagaaccuccagcgccucuccggcgccauggacgagcuccacaacgagauccucgagcucgacgagaaggucgacgaccuccgcgccgacaccaucuccucccagaucgagcucgccguccuccucuccaacgagggcaucaucaacuccgaggacgagcaccuccucgcccucgagcgcaagcucaagaagaugcucggccccuccgccgucgagaucggcaacggcugcuucgagaccaagcacaagugcaaccagaccugccucgaccgcaucgccgccggcaccuucaacgccggcgaguucucccuccccaccuucgacucccucaacaucaccgccgccucccucaacgacgacggccucgacaaccacaccauccuccucuacuacuccaccgccgccuccucccucgccgucacccucaugaucgccaucuucgucgucuacauggucucccgcgacaacgucuccugcuccaucugccucuga

SEQ ID NO: 122842 - RNA, 1755 nt, Artificial Sequence; identical to SEQ ID NO: 122462
  derived and/or modified CDS sequence (opt2) from hemagglutinin__InfluenzaB__AFJ80968

SEQ ID NO: 122843 - RNA, 1755 nt, Artificial Sequence; identical to SEQ ID NO: 122462
  derived and/or modified CDS sequence (opt2) from hemagglutinin__InfluenzaB__AFJ80979

SEQ ID NO: 122844 - RNA, 1755 nt, Artificial Sequence
  derived and/or modified CDS sequence (opt2) from hemagglutinin__InfluenzaB__AFJ80990
augaaggccaucaucguccuccucauggucgucaccuccaacgccgaccgcaucugcaccggcaucaccuccuccaacuccccccacgucgucaagaccgccacccagggcgaggucaacgucaccggcgucaucccccucaccaccacccccaccaaguccuacuucgccaaccucaagggcacccgcacccgcggcaagcucugccccgacugccucaacugcaccgaccucgacgucgcccucggccgccccaugugcgucggcaccacccccuccgccgaggccuccauccuccacgagguccgccccgucaccuccggcugcuuccccaucaugcacgaccgcaccaagauccgccagcuccccaaccuccuccgcggcuacgagaacauccgccucuccacccagaacgucaucgacgccgagaaggcccccggcggccccuaccgccucggcaccuccggcuccugccccaacgccaccaacaaguccggcuucuucgccaccauggccugggccguccccaaggacaacaacaagaacgccaccaacccccucaccgucgagguccccuacaucugcaccgagggcgaggaccagaucaccgucuggggcuuccacuccgacaacaagacccagaugaagaaccucuacggcgacuccaacccccagaaguucaccuccuccgccaacggcgucaccacccacuacgucucccagaucggcggcuuccccgaccagaccgaggacggcggccucccccaguccggccgcaucgucgucgacuacaugaugcagaagcccggcaagaccggcaccaucgucuaccagcgcggcguccuccucccccagaaggucuggugcgccuccggccgcuccaaggucaucaagggcucccucccccucaucggcgaggccgacugccuccacgagaaguacggcggccucaacaaguccaagcccuacuacaccggcgagcacgccaaggccaucggcaacugccccaucugggucaagaccccccucaagcucgccaacggcaccaaguaccgcccccccgccaagcuccucaaggagcgcggcuucuucggcgccaucgccggcuuccucgagggcggcugggagggcaugaucgccggcuggcacggcuacaccucccacggcgcccacggcgucgccgucgccgccgaccucaaguccacccaggaggccaucaacaagaucaccaagaaccucaacucccucuccgagcucgaggucaagaaccuccagcgccucuccggcgccauggacgagcuccacaacgagauccucgagcucgacgagaaggucgacgaccuccgcgccgacaccaucuccucccagaucgagcucgccguccuccucuccaacgagggcaucaucaacuccgaggacgagcaccuccucgcccucgagcgcaagcucaagaagaugcucggccccuccgccgucgacaucggcaacggcugcuucgagaccaagcacaagugcaaccagaccugccucgaccgcaucgccgccggcaccuucaacgccggcgaguucucccuccccaccuucgacucccucaacaucaccgccgccucccucaacgacgacggccucgacaaccacaccauccuccucuacuacuccaccgccgccuccucccucgccgucacccucaugcucgccaucuucaucgucuacauggucucccgcgacaacgucuccugcuccaucugccucuga

SEQ ID NO: 122845 - RNA, 1755 nt, Artificial Sequence; identical to SEQ ID NO: 122462
  derived and/or modified CDS sequence (opt2) from hemagglutinin__InfluenzaB__AFJ81001

SEQ ID NO: 122846 - RNA, 1755 nt, Artificial Sequence; identical to SEQ ID NO: 122462
  derived and/or modified CDS sequence (opt2) from hemagglutinin__InfluenzaB__AFJ84360

SEQ ID NO: 122847 - RNA, 1758 nt, Artificial Sequence; identical to SEQ ID NO: 122550
  derived and/or modified CDS sequence (opt2) from hemagglutinin__InfluenzaB__AFJ90395

SEQ ID NO: 122848 - RNA, 1755 nt, Artificial Sequence; identical to SEQ ID NO: 122462
  derived and/or modified CDS sequence (opt2) from hemagglutinin__InfluenzaB__AFJ90406

SEQ ID NO: 122849 - RNA, 1755 nt, Artificial Sequence; identical to SEQ ID NO: 122462
  derived and/or modified CDS sequence (opt2) from hemagglutinin__InfluenzaB__AFJ90417

SEQ ID NO: 122850 - RNA, 1755 nt, Artificial Sequence; identical to SEQ ID NO: 122462
  derived and/or modified CDS sequence (opt2) from hemagglutinin__InfluenzaB__AFJ90428

SEQ ID NO: 122851 - RNA, 1755 nt, Artificial Sequence; identical to SEQ ID NO: 122462
  derived and/or modified CDS sequence (opt2) from hemagglutinin__InfluenzaB__AFJ90450

SEQ ID NO: 122852 - RNA, 1755 nt, Artificial Sequence; identical to SEQ ID NO: 122462
  derived and/or modified CDS sequence (opt2) from hemagglutinin__InfluenzaB__AFJ91038

SEQ ID NO: 122853 - RNA, 1755 nt, Artificial Sequence
  derived and/or modified CDS sequence (opt2) from hemagglutinin__InfluenzaB__AFJ91049
augaaggccaucaucguccuccucauggucgucaccuccaacgccgaccgcaucugcaccggcaucaccuccuccaacuccccccacgucgucaagaccgccacccagggcgaggucaacgucaccggcgucaucccccucaccaucacccccaccaaguccuacuucgccaaccucaagggcacccgcacccgcggcaagcucugccccgacugccucaacugcaccgaccucgacgucgcccucggccgccccaugugcgucggcaccacccccuccgccaaggccuccauccuccacgagguccgccccgucaccuccggcugcuuccccaucaugcacgaccgcaccaagauccgccagcucgccaaccuccuccgcggcuacgagaacauccgccucuccacccagaacgucaucgacgccgagaaggcccccggcggccccuaccgccucggcaccuccggcuccugccccaacgccaccuccaaguccggcuucuucgccaccauggccugggccguccccaaggacaacaacaagaacgccaccaacccccucaccgucgagguccccuacaucugcaccgagggcgaggaccagaucaccgucuggggcuuccacuccgacaacaagacccagaugaagaaccucuacggcgacuccaacccccagaaguucaccuccuccgccaacggcgucaccacccacuacgucucccagaucggcggcuuccccgaccagaccgaggacggcggccucccccaguccggccgcaucgucgucgacuacaugaugcagaagcccggcaagaccggcaccaucgucuaccagcgcggcguccuccucccccagaaggucuggugcgccuccggccgcuccaaggucaucaagggcucccucccccucaucggcgaggccgacugccuccacgagaaguacggcggccucaacaaguccaagcccuacuacaccggcgagcacgccaaggccaucggcaacugccccaucugggucaagaccccccucaagcucgccaacggcaccaaguaccgcccccccgccaagcuccucaaggagcgcggcuucuucggcgccaucgccggcuuccucgagggcggcugggagggcaugaucgccggcuggcacggcuacaccucccacggcgcccacggcgucgccgucgccgccgaccucaaguccacccaggaggccaucaacaagaucaccaagaaccucaacucccucuccgagcucgaggucaagaaccuccagcgccucuccggcgccauggacgagcuccacaacgagauccucgagcucgacgagaaggucgacgaccuccgcgccgacaccaucuccucccagaucgagcucgccguccuccucuccaacgagggcaucaucaacuccgaggacgagcaccuccucgcccucgagcgcaagcucaagaagaugcucggccccuccgccgucgacaucggcaacggcugcuucgagaccaagcacaagugcaaccagaccugccucgaccgcaucgccgccggcaccuucaacgccggcgaguucucccuccccaccuucgacucccucaacaucaccgccgccucccucaacgacgacggccucgacaaccacaccauccuccucuacuacuccaccgccgccuccucccucgccgucacccucaugcucgccaucuucaucgucuacauggucucccgcgacaacgucuccugcuccaucugccucuga

SEQ ID NO: 122854 - RNA, 1758 nt, Artificial Sequence
  derived and/or modified CDS sequence (opt2) from hemagglutinin__InfluenzaB__AFJ91060
augaaggccaucaucguccuccucauggucgucaccuccaacgccgaccgcaucugcaccggcaucaccuccuccaacuccccccacgucgucaagaccgccacccagggcgaggucaacgucaccggcgucaucccccucaccaccacccccaccaagucccacuucgccaaccucaagggcaccgagacccgcggcaagcucugcccccgcugccucaacugcaccgaccucgacgucgcccucggccgccccaagugcaccggcaacauccccuccgcccgcgucuccauccuccacgagguccgccccgucaccuccggcugcuuccccaucaugcacgaccgcaccaagauccgccagcuccccaaccuccuccgcggcuacgagcacauccgccucuccacccacaacgucaucaacgccgagaacgcccccggcggccccuacaagaucggcaccuccggcuccugccccaacgucaccaacggcaacggcuucuucgccaccauggccugggccguccccaagaacgacaacaacaagaccgccaccaacucccucaccaucgagguccccuacaucugcaccgagggcgaggaccagaucaccgucuggggcuuccacuccgacaacgaggcccagauggccaagcucuacggcgacuccaagccccagaaguucaccuccuccgccaacggcgucaccacccacuacgucucccagaucggcggcuuccccaaccagaccgaggacggcggccucccccaguccggccgcaucgucgucgacuacaugguccagaaguccggcaagaccggcaccaucaccuaccagcgcggcauccuccucccccagaaggucuggugcgccuccggccgcuccaaggucaucaagggcucccucccccucaucggcgaggccgacugccuccacgagaaguacggcggccucaacaaguccaagcccuacuacaccggcgagcacgccaaggccaucggcaacugccccaucugggucaagaccccccucaagcucgccaacggcaccaaguaccgcccccccgccaagcuccucaaggagcgcggcuucuucggcgccaucgccggcuuccucgagggcggcugggagggcaugaucgccggcuggcacggcuacaccucccacggcgcccacggcgucgccgucgccgccgaccucaaguccacccaggaggccaucaacaagaucaccaagaaccucaacucccucuccgagcucgaggucaagaaccuccagcgccucuccggcgccauggacgagcuccacaacgagauccucgagcucgacgagaaggucgacgaccuccgcgccgacaccaucuccucccagaucgagcucgccguccuccucuccaacgagggcaucaucaacuccgaggacgagcaccuccucgcccucgagcgcaagcucaagaagaugcucggccccuccgccgucgagaucggcaacggcugcuucgagaccaagcacaagugcaaccagaccugccucgaccgcaucgccgccggcaccuucgacgccggcgaguucucccuccccaccuucgacucccucaacaucaccgccgccucccucaacgacgacggccucgacaaccacaccauccuccucuacuacuccaccgccgccuccucccucgccgucacccucaugaucgccaucuucgucgucuacauggucucccgcgacaacgucuccugcuccaucugccucuga

SEQ ID NO: 122855 - RNA, 1755 nt, Artificial Sequence; identical to SEQ ID NO: 122462
  derived and/or modified CDS sequence (opt2) from hemagglutinin__InfluenzaB__AFJ91071

SEQ ID NO: 122856 - RNA, 1755 nt, Artificial Sequence
  derived and/or modified CDS sequence (opt2) from hemagglutinin__InfluenzaB__AFJ91082
augaaggccaucaucguccuccucauggucgucaccuccaacgccgaccgcaucugcaccggcaucaccuccuccaacuccccccacgucgucaagaccgccacccagggcgaggucaacgucaccggcgucaucccccucaccaccacccccaccaaguccuacuucgccaaccucaagggcacccgcacccgcggcaagcucugccccgacugccucaacugcaccgaccucgacgucgcccucggccgccccaugugcgucggcaccacccccuccgccaaggccuccauccuccacgagguccgccccgucaccuccggcugcuuccccaucaugcacgaccgcaccaagauccgccagcuccccaaccuccuccgcggcuacgagaacauccgccucuccacccagaacgucaucgacgccgagaaggcccccggcggccccuaccgccucggcaccuccggcuccugccccaacgccaccuccaagaucggcuucuucgccaccauggccugggccguccccaaggacaacuacaagaacgccaccaacccccucaccgucgagguccccuacaucugcaccgagggcgaggaccagaucaccgucuggggcuuccacuccgacaacaagacccagaugaagaaccucuacggcgacuccaacccccagaaguucaccuccuccgccaacggcgucaccacccacuacgucucccagaucggcgacuuccccgaccagaccgaggacggcggccucccccaguccggccgcaucgucgucgacuacaugaugcagaagcccggcaagaccggcaccaucgucuaccagcgcggcguccuccucccccagaaggucuggugcgccuccggccgcuccaaggucaucaagggcucccucccccucaucggcgaggccgacugccuccacgagaaguacggcggccucaacaaguccaagcccuacuacaccggcgagcacgccaaggccaucggcaacugccccaucugggucaagaccccccucaagcucgccaacggcaccaaguaccgcccccccgccaagcuccucaaggagcgcggcuucuucggcgccaucgccggcuuccucgagggcggcugggagggcaugaucgccggcuggcacggcuacaccucccacggcgcccacggcgucgccgucgccgccgaccucaaguccacccaggaggccaucaacaagaucaccaagaaccucaacucccucuccgagcucgaggucaagaaccuccagcgccucuccggcgccauggacgagcuccacaacgagauccucgagcucgacgagaaggucgacgaccuccgcgccgacaccaucuccucccagaucgagcucgccguccuccucuccaacgagggcaucaucaacuccgaggacgagcaccuccucgcccucgagcgcaagcucaagaagaugcucggccccuccgccgucgacaucggcaacggcugcuucgagaccaagcacaagugcaaccagaccugccucgaccgcaucgccgccggcaccuucaacgccggcgaguucucccuccccaccuucgacucccucaacaucaccgccgccucccucaacgacgacggccucgacaaccacaccauccuccucuacuacuccaccgccgccuccucccucgccgucacccucaugcucgccaucuucaucgucuacauggucucccgcgacaacgucuccugcuccaucugccucuga

SEQ ID NO: 122857 - RNA, 1755 nt, Artificial Sequence; identical to SEQ ID NO: 122856
  derived and/or modified CDS sequence (opt2) from hemagglutinin__InfluenzaB__AFJ91093

SEQ ID NO: 122858 - RNA, 1755 nt, Artificial Sequence; identical to SEQ ID NO: 122856
  derived and/or modified CDS sequence (opt2) from hemagglutinin__InfluenzaB__AFJ91104

SEQ ID NO: 122859 - RNA, 1755 nt, Artificial Sequence; identical to SEQ ID NO: 122856
  derived and/or modified CDS sequence (opt2) from hemagglutinin__InfluenzaB__AFJ91115

SEQ ID NO: 122860 - RNA, 1758 nt, Artificial Sequence
  derived and/or modified CDS sequence (opt2) from hemagglutinin__InfluenzaB__AFJ91704
augaaggccaucaucguccuccucauggucgucaccuccaacgccgaccgcaucugcaccggcaucaccuccuccaacuccccccacgucgucaagaccgccacccagggcgaggucaacgucaccggcgucaucccccucaccaccacccccaccaagucccacuucgccaaccucaagggcaccgagacccgcggcaagcucugccccaagugccucaacugcaccgaccucgacgucgcccucggccgccccaagugcaccggcaacauccccuccgcccgcgucuccauccuccacgagguccgccccgucaccuccggcugcuuccccaucaugcacgaccgcaccaagauccgccagcuccccaaccuccuccgcggcuacgagcacauccgccucuccacccacaacgucaucaacgccgagaacgcccccggcggccccuacaagaucggcaccuccggcuccugccccaacgucaccaacggcaagggcuucuucgccaccauggccugggccguccccaagaacgacaacaacaagaccgccaccaacucccucaccaucgagguccccuacaucugcaccgagggcgaggaccagaucaccgucuggggcuuccacuccgacaacgagacccagauggccaagcucuacggcgacuccaagccccagaaguucaccuccuccgccaacggcgucaccacccacuacgucucccagaucggcggcuuccccaaccagaccgaggacggcggccucccccaguccggccgcaucgucgucgacuacaugguccagaaguccggcaagaccggcaccaucaccuaccagcgcggcauccuccucccccagaaggucuggugcgccuccggccgcuccaaggucaucaagggcucccucccccucaucggcgaggccgacugccuccacgagaaguacggcggccucaacaaguccaagcccuacuacaccggcgagcacgccaaggccaucggcaacugccccaucugggucaagaccccccucaagcucgccaacggcaccaaguaccgcccccccgccaagcuccucaaggagcgcggcuucuucggcgccaucgccggcuuccucgagggcggcugggagggcaugaucgccggcuggcacggcuacaccucccacggcgcccacggcgucgccgucgccgccgaccucaaguccacccaggaggccaucaacaagaucaccaagaaccucaacucccucuccgagcucgaggucaagaaccuccagcgccucuccggcgccauggacgagcuccacaacgagauccucgagcucgacgagaaggucgacgaccuccgcgccgacaccaucuccucccagaucgagcucgccguccuccucuccaacgagggcaucaucaacuccgaggacgagcaccuccucgcccucgagcgcaagcucaagaagaugcucggccccuccgccgucgagaucggcaacggcugcuucgagaccaagcacaagugcaaccagaccugccucgaccgcaucgccgccggcaccuucgacgccggcgaguucucccuccccaccuucgacucccucaacaucaccgccgccucccucaacgacgacggccucgacaaccacaccauccuccucuacuacuccaccgccgccuccucccucgccgucacccucaugaucgccaucuucgucgucuacauggucucccgcgacaacgucuccugcuccaucugccucuga

SEQ ID NO: 122861 - RNA, 1755 nt, Artificial Sequence
  derived and/or modified CDS sequence (opt2) from hemagglutinin__InfluenzaB__AFK09797
augaaggccaucaucguccuccucauggucgucaccuccaacgccgaccgcaucugcaccggcaucaccuccuccaacuccccccacgucgucaagaccgccacccagggcgaggucaacgucaccggcgucaucccccucaccaccacccccaucaaguccuacuucgccaaccucaagggcaccaagacccgcggcaagcucugccccgacugccucaacugcaccgaccucgacgucgcccucggccgccccaugugcgucggcaccacccccuccgccaaggccuccauccuccacgagguccgccccgucaccuccggcugcuuccccaucaugcacgaccgcaccaagauccgccagcuccccaaccuccuccgcggcuacgagaacauccgccucuccacccagaacgucaucgacgccgagaaggcccccggcggccccuaccgccucggcaccuccggcuccugccccaacgccaccuccaaguccggcuucuucgccaccauggccugggccguccccaaggacaacaacaagaacgccaccaacccccucaccgucgagguccccuacgucugcaccgagggcgaggaccagaucaccgucuggggcuuccacuccgacaacaagaaccagaugaagaaccucuacggcgacuccaacccccagaaguucaccuccuccgccaacggcgucaccacccacuacgucucccagaucggcggcuuccccgaccagaccgaggacggcggccucccccaguccggccgcaucgucgucgacuacaugguccagaagcccggcaagaccggcaccaucgucuaccagcgcggcguccuccucccccagaaggucuggugcgccuccggccgcuccaaggucaucaagggcucccucccccucaucggcgaggccgacugccuccacgagaaguacggcggccucaacaaguccaagcccuacuacaccggcgagcacgccaaggccaucggcaacugccccaucugggucaagaccccccucaagcucgccaacggcaccaaguaccgcccccccgccaagcuccucaaggagcgcggcuucuucggcgccaucgccggcuuccucgagggcggcugggagggcaugaucgccggcuggcacggcuacaccucccacggcgcccacggcgucgccgucgccgccgaccucaaguccacccaggaggccaucaacaagaucaccaagaaccucaacucccucuccgagcucgaggucaagaaccuccagcgccucuccggcgccauggacgagcuccacaacgagauccucgagcucgacgagaaggucgacgaccuccgcgccgacaccaucuccucccagaucgagcucgccguccuccucuccaacgagggcaucaucaacuccgaggacgagcaccuccucgcccucgagcgcaagcucaagaagaugcucggccccuccgccgucgacaucggcaacggcugcuucgagaccaagcacaagugcaaccagaccugccucgaccgcaucgccgccggcaccuucaacgccggcgaguucucccuccccaccuucgacucccucaacaucaccgccgccucccucaacgacgacggccucgacaaccacaccauccuccucuacuacuccaccgccgccuccucccucgccgucacccucaugcucgccaucuucaucgucuacauggucucccgcgacaacgucuccugcuccaucugccucuga

SEQ ID NO: 122862 - RNA, 1755 nt, Artificial Sequence; identical to SEQ ID NO: 122856
  derived and/or modified CDS sequence (opt2) from hemagglutinin__InfluenzaB__AFN54654

SEQ ID NO: 122863 - RNA, 1755 nt, Artificial Sequence; identical to SEQ ID NO: 122603
  derived and/or modified CDS sequence (opt2) from hemagglutinin__InfluenzaB__AFN54665

SEQ ID NO: 122864 - RNA, 1755 nt, Artificial Sequence; identical to SEQ ID NO: 122603
  derived and/or modified CDS sequence (opt2) from hemagglutinin__InfluenzaB__AFN54676

SEQ ID NO: 122865 - RNA, 1755 nt, Artificial Sequence; identical to SEQ ID NO: 122856
  derived and/or modified CDS sequence (opt2) from hemagglutinin__InfluenzaB__AFN54687

SEQ ID NO: 122866 - RNA, 1755 nt, Artificial Sequence
  derived and/or modified CDS sequence (opt2) from hemagglutinin__InfluenzaB__AFN54698
augaaggccaucaucguccuccucauggucgucaccuccaacgccgaccgcaucugcaccggcaucaccuccuccaacuccccccacgucgucaagaccgccacccagggcgaggucaacgucaccggcgucaucccccucaccaccacccccaccaaguccuacuucgccaaccucaagggcacccgcacccgcggcaagcucugccccgacugccucaacugcaccgaccucgacgucgcccucggccgccccaugugcgucggcaccacccccuccgccaaggccuccauccuccacgagguccgccccgucaccuccggcugcuuccccaucaugcacgaccgcaccaagauccgccagcuccccaaccuccuccgcggcuacgagaacauccgccucuccacccagaacgucaucgacgccgagaaggcccccggcggccccuaccgccucggcaccuccggcuccugccccaacgccaccuccaagaucggcuucuucgccaccauggccugggccguccccaaggacaacuacaagaacgccaccaacccccucaccgucgagguccccuacaucugcaccgagggcgaggaccagaucaccgucuggggcuuccacuccgacaacaagacccagaugaagaaccucuacggcgacuccaacccccagaaguucaccuccuucgccaacggcgucaccacccacuacgucucccagaucggcgacuuccccgaccagaccgaggacggcggccucccccaguccggccgcaucgucgucgacuacaugaugcagaagcccggcaagaccggcaccaucgucuaccagcgcggcguccuccucccccagaaggucuggugcgccuccggccgcuccaaggucaucaagggcucccucccccucaucggcgaggccgacugccuccacgagaaguacggcggccucaacaaguccaagcccuacuacaccggcgagcacgccaaggccaucggcaacugccccaucugggucaagaccccccucaagcucgccaacggcaccaaguaccgcccccccgccaagcuccucaaggagcgcggcuucuucggcgccaucgccggcuuccucgagggcggcugggagggcaugaucgccggcuggcacggcuacaccucccacggcgcccacggcgucgccgucgccgccgaccucaaguccacccaggaggccaucaacaagaucaccaagaaccucaacucccucuccgagcucgaggucaagaaccuccagcgccucuccggcgccauggacgagcuccacaacgagauccucgagcucgacgagaaggucgacgaccuccgcgccgacaccaucuccucccagaucgagcucgccguccuccucuccaacgagggcaucaucaacuccgaggacgagcaccuccucgcccucgagcgcaagcucaagaagaugcucggccccuccgccgucgacaucggcaacggcugcuucgagaccaagcacaagugcaaccagaccugccucgaccgcaucgccgccggcaccuucaacgccggcgaguucucccuccccaccuucgacucccucaacaucaccgccgccucccucaacgacgacggccucgacaaccacaccauccuccucuacuacuccaccgccgccuccucccucgccgucacccucaugcucgccaucuucaucgucuacauggucucccgcgacaacgucuccugcuccaucugccucuga

SEQ ID NO: 122867 - RNA, 1755 nt, Artificial Sequence; identical to SEQ ID NO: 122856
  derived and/or modified CDS sequence (opt2) from hemagglutinin__InfluenzaB__AFN54709

SEQ ID NO: 122868 - RNA, 1755 nt, Artificial Sequence; identical to SEQ ID NO: 122856
  derived and/or modified CDS sequence (opt2) from hemagglutinin__InfluenzaB__AFN54720

SEQ ID NO: 122869 - RNA, 1755 nt, Artificial Sequence; identical to SEQ ID NO: 122856
  derived and/or modified CDS sequence (opt2) from hemagglutinin__InfluenzaB__AFN54731

SEQ ID NO: 122870 - RNA, 1755 nt, Artificial Sequence; identical to SEQ ID NO: 122856
  derived and/or modified CDS sequence (opt2) from hemagglutinin__InfluenzaB__AFN54742

SEQ ID NO: 122871 - RNA, 1755 nt, Artificial Sequence; identical to SEQ ID NO: 122856
  derived and/or modified CDS sequence (opt2) from hemagglutinin__InfluenzaB__AFN54753

SEQ ID NO: 122872 - RNA, 1755 nt, Artificial Sequence; identical to SEQ ID NO: 122856
  derived and/or modified CDS sequence (opt2) from hemagglutinin__InfluenzaB__AFN54764

SEQ ID NO: 122873 - RNA, 1755 nt, Artificial Sequence; identical to SEQ ID NO: 122856
  derived and/or modified CDS sequence (opt2) from hemagglutinin__InfluenzaB__AFN54775

SEQ ID NO: 122874 - RNA, 1755 nt, Artificial Sequence; identical to SEQ ID NO: 122856
  derived and/or modified CDS sequence (opt2) from hemagglutinin__InfluenzaB__AFN54786

SEQ ID NO: 122875 - RNA, 1755 nt, Artificial Sequence; identical to SEQ ID NO: 122856
  derived and/or modified CDS sequence (opt2) from hemagglutinin__InfluenzaB__AFN54797

SEQ ID NO: 122876 - RNA, 1755 nt, Artificial Sequence; identical to SEQ ID NO: 122856
  derived and/or modified CDS sequence (opt2) from hemagglutinin__InfluenzaB__AFN54808

SEQ ID NO: 122877 - RNA, 1755 nt, Artificial Sequence; identical to SEQ ID NO: 122603
  derived and/or modified CDS sequence (opt2) from hemagglutinin__InfluenzaB__AFN54819

SEQ ID NO: 122878 - RNA, 1755 nt, Artificial Sequence; identical to SEQ ID NO: 122856
  derived and/or modified CDS sequence (opt2) from hemagglutinin__InfluenzaB__AFN54830

SEQ ID NO: 122879 - RNA, 1755 nt, Artificial Sequence; identical to SEQ ID NO: 122856
  derived and/or modified CDS sequence (opt2) from hemagglutinin__InfluenzaB__AFN54841

SEQ ID NO: 122880 - RNA, 1755 nt, Artificial Sequence; identical to SEQ ID NO: 122856
  derived and/or modified CDS sequence (opt2) from hemagglutinin__InfluenzaB__AFN54852

SEQ ID NO: 122881 - RNA, 1755 nt, Artificial Sequence; identical to SEQ ID NO: 122856
  derived and/or modified CDS sequence (opt2) from hemagglutinin__InfluenzaB__AFN54863

SEQ ID NO: 122882 - RNA, 1758 nt, Artificial Sequence
  derived and/or modified CDS sequence (opt2) from hemagglutinin__InfluenzaB__AFU34595
augaaggccaucaucguccuccucauggucgucaccuccaacgccgaccgcaucugcaccggcaucaccuccuccaacuccccccacgucgucaagaccgccacccagggcgaggucaacgucaccggcgucaucccccucaccaccacccccaccaagucccacuucgccaaccucaagggcaccgagacccgcggcaagcucugccccaagugccccaacugcaccgaccucgacgucgcccucggccgccccaagugcaccggcaagauccccuccgcccgcgucuccauccuccacgagguccgccccgucaccuccggcugcuuccccaucaugcacgaccgcaccaagauccgccagcuccccaaccuccuccgcggcuacgagcacauccgccucuccacccacaacgucaucaacgccgagaacgcccccggcggccccuacaagaucggcaccuccggcuccugccccaacgucaccaacggcaacggcuucuucgccaccauggccugggccguccccaagaacgacaagaacaagaccgccaccaacccccucaccaucgagguccccuacaucugcaccgagggcgaggaccagaucaccgucuggggcuuccacuccgacaacgagacccagauggccaagcucuaccgcgacuccaagccccagaaguucaccuccuccgccaacggcgucaccacccacuacgucucccagaucggcggcuuccccaaccagaccgaggacggcggccucccccaguccggccgcaucgucgucgacuacaugguccagaaguccggcaagaccggcaccaucaccuaccagcgcggcauccuccucccccagaaggucuggugcgccuccggccgcuccaaggucaucaagggcucccucccccucaucggcgaggccgacugccuccacgagaaguacggcggccucaacaaguccaagcccuacuacaccggcgagcacgccaaggccaucggcaacugccccaucugggucaagaccccccucaagcucgccaacggcaccaaguaccgcccccccaccaagcuccucaaggagcgcggcuucuucggcgccaucgccggcuuccucgagggcggcugggagggcaugaucgccggcuggcacggcuacaccucccacggcgcccacggcgucgccgucgccgccgaccucaaguccacccaggaggccaucaacaagaucaccaagaaccucaacucccucuccgagcucgaggucaagaaccuccagcgccucuccggcgccauggacgagcuccacaacgagauccucgagcucgacgagaaggucgacgaccuccgcgccgacaccaucuccucccagaucgagcucgccguccuccucuccaacgagggcaucaucaacuccgaggacgagcaccuccucgcccucgagcgcaagcucaagaagaugcucggccccuccgccgucgagaucggcaacggcugcuucgagaccaagcacaagugcaaccagaccugccucgaccgcaucgccgccggcaccuucgacgccggcgaguucucccuccccaccuucgacucccucaacaucaccgccgccucccucaacgacgacggccucgacaaccacaccauccuccucuacuacuccaccgccgccuccucccucgccgucacccucaugaucgccaucuucgucgucuacauggucucccgcgacaacgucuccugcuccaucugccucuga

SEQ ID NO: 122883 - RNA, 1758 nt, Artificial Sequence
  derived and/or modified CDS sequence (opt2) from hemagglutinin__InfluenzaB__AFU34606
augaaggccaucaucguccuccucauggucgucaccuccaacgccgaccgcaucugcaccggcaucaccuccuccaacuccccccacgucgucaagaccgccacccagggcgaggucaacgucaccggcgucaucccccucaccaccacccccaccaagucccacuucgccaaccucaagggcaccgagacccgcggcaagcucugccccaagugccccaacugcaccgaccucgacgucgcccucgaccgccccaagugcaccggcaagauccccuccgcccgcgucuccauccuccacgagguccgccucgucaccuccggcugcuuccccaucaugcacgaccgcaccaagauccgccagcuccccaaccuccuccgcggcuacgagcacauccgccucuccacccacaacgucaucaacgccgagaacgcccccggcggccccuacaagaucggcaccuccggcuccugccccaacgucaccaacggcaacggcuucuucgccaccauggccugggccguccccaagaacgacaagaacaagaccgccaccaacccccucaccaucgagguccccuacaucugcaccgagggcgaggaccagaucaccgucuggggcuuccacuccgacgacgagacccagauggccaagcucuacggcgacuccaagccccagaaguucaccuccuccgccaacggcgucaccacccacuacgucucccagaucggcggcuuccccaaccagaccgaggacggcggccucccccaguccggccgcaucgucgucgacuacaugguccagaaguccggcaagaccggcaccaucaccuaccagcgcggcauccuccucccccagaaggucuggugcgccuccggccgcuccaaggucaucaagggcucccucccccucaucggcgaggccgacugccuccacgagaaguacggcggccucaacaaguccaagcccuacuacaccggcgagcacgccaaggccaucggcaacugccccaucugggucaagaccccccucaagcucgccaacggcaccaaguaccgcccccccgccaagcuccucaaggagcgcggcuucuucggcgccaucgccggcuuccucgagggcggcugggagggcaugaucgccggcuggcacggcuacaccucccacggcgcccacggcgucgccgucgccgccgaccucaaguccacccaggaggccaucaacaagaucaccaagaaccucaacucccucuccgagcucgaggucaagaaccuccagcgccucuccggcgccauggacgagcuccacaacgagauccucgagcucgacgagaaggucgacgaccuccgcgccgacaccaucuccucccagaucgagcucgccguccuccucuccaacgagggcaucaucaacuccgaggacgagcaccuccucgcccucgagcgcaagcucaagaagaugcucggccccuccgccgucgagaucggcaacggcugcuucgagaccaagcacaagugcaaccagaccugccucgaccgcaucgccgccggcaccuucgacgccggcgaguucucccuccccaccuucgacucccucaacaucaccgccgccucccucaacgacgacggccucgacaaccacaccauccuccucuacuacuccaccgccgccuccucccucgccgucacccucaugaucgccaucuucgucgucuacauggucucccgcgacaacgucuccugcuccaucugccucuga

SEQ ID NO: 122884 - RNA, 1758 nt, Artificial Sequence; identical to SEQ ID NO: 122792
  derived and/or modified CDS sequence (opt2) from hemagglutinin__InfluenzaB__AFU34617

SEQ ID NO: 122885 - RNA, 1758 nt, Artificial Sequence
  derived and/or modified CDS sequence (opt2) from hemagglutinin__InfluenzaB__AFU34628
augaaggccaucaucguccuccucauggucgucaccuccaacgccgaccgcaucugcaccggcaucaccuccuccaacuccccccacgucgucaagaccgccacccagggcgaggucaacgucaccggcgucaucccccucaccaccacccccaccaagucccacuucgccaaccucaagggcaccgagacccgcggcaagcucugccccaagugccccaacugcaccgaccucgacgucgcccucggccgccccaagugcaccggcaagauccccuccgcccgcgucuccauccuccacgagguccgccccgucaccuccggcugcuuccccaucaugcacgaccgcaccaagauccgccagcuccccaaccuccuccgcggcuacgagcacauccgccucuccacccacaacgucaucaacgccgagaacgcccccggcggccccuacaagaucggcaccuccggcuccugccccaacgucaccaacggcaacggcuucuucgccaccauggccugggccguccccaagaacgacaagaacaagaccgccaccaacccccucaccaucgagguccccuacaucugcaccgagggcgaggaccagaucaccgucuggggcuuccacuccgacgacgagacccagauggccaagcucuacggcgacuccaagccccagaaguucaccuccuccgccaacggcgucaccacccacuacgucucccagaucggcggcuuccccaaccagaccgaggacggcggccucccccaguccggccgcaucgucgucgacuacaugguccagaaguccggcaagaccggcaccaucaccuaccagcgcggcauccuccucccccagaaggucuggugcgccuccggccgcuccaaggucaucaagggcucccucccccucaucggcgaggccgacugccuccacgagaaguacggcggccucaacaaguccaagcccuacuacaccggcgagcacgccaaggccaucggcaacugccccaucugggucaagaccccccucaagcucgccaacggcaccaaguaccgcccccccgccaagcuccucaaggagcgcggcuuccucggcgccaucgccggcuuccucgagggcggcuggaagggcaugaucgccggcuggcacggcuacaccucccacggcgcccacggcgucgccgucgccgccgaccucaaguccacccaggaggccaucaacaagaucaccaagaaccucaacucccucuccgagcucgaggucaagaaccuccagcgccucuccggcgccauggacgagcuccacaacgagauccucgagcucgacgagaaggucgacgaccuccgcgccgacaccaucuccucccagaucgagcucgccguccuccucuccaacgagggcaucaucaacuccgaggacgagcaccuccucgcccucgagcgcaagcucaagaagaugcucggccccuccgccgucgagaucggcaacggcugcuucgagaccaagcacaagugcaaccagaccugccucgaccgcaucgccgccggcaccuucgacgccggcgaguucucccuccccaccuucgacucccucaacaucaccgccgccucccucaacgacgacggccucgacaaccacaccauccuccucuacuacuccaccgccgccuccucccucgccgucacccucaugaucgccaucuucgucgucuacauggucucccgcgacaacgucuccugcuccaucugccucuga

SEQ ID NO: 122886 - RNA, 1758 nt, Artificial Sequence; identical to SEQ ID NO: 122644
  derived and/or modified CDS sequence (opt2) from hemagglutinin__InfluenzaB__AFU34639

SEQ ID NO: 122887 - RNA, 1758 nt, Artificial Sequence; identical to SEQ ID NO: 122681
  derived and/or modified CDS sequence (opt2) from hemagglutinin__InfluenzaB__AGB08299

SEQ ID NO: 122888 - RNA, 1758 nt, Artificial Sequence; identical to SEQ ID NO: 122681
  derived and/or modified CDS sequence (opt2) from hemagglutinin__InfluenzaB__AGB08300

SEQ ID NO: 122889 - RNA, 1755 nt, Artificial Sequence
  derived and/or modified CDS sequence (opt2) from hemagglutinin__InfluenzaB__AGB97259
augaaggccaucaucguccuccucauggucgucaccuccaacgccgaccgcaucugcaccggcaucaccuccuccaacuccccccacgucgucaagaccgccacccagggcgaggucaacgucaccggcgucaucccccucaccaccacccccaccaaguccuacuucgccaaccucaagggcacccgcacccgcggcaagcucugccccgacugccucaacugcaccgaccucgacgucgcccucggccgccccaugugcgucggcaccacccccuccgccaaggccuccauccuccacgagguccgccccgucaccuccggcugcuuccccaucaugcacgaccgcaccaagauccgccagcuccccaaccuccuccgcggcuacgagaagauccgccucuccacccagaacgucaucgacgccgagaaggcccccggcggccccuaccgccucggcaccuccggcuccugccccaacgccaccuccaagaucggcuucuucgccaccauggccugggccguccccaaggacaacuacaagaacgccaccaacccccucaccgucgagguccccuacaucugcaccgagggcgaggaccagaucaccgucuggggcuuccacuccgacaacaagacccagaugaagucccucuacggcgacuccaacccccagaaguucaccuccuccgccaacggcgucaccacccacuacgucucccagaucggcgacuuccccgaccagaccgaggacggcggccucccccaguccggccgcaucgucgucgacuacaugaugcagaagcccggcaagaccggcaccaucgucuaccagcgcggcguccuccucccccagaaggucuggugcgccuccggccgcuccaaggucaucaagggcucccucccccucaucggcgaggccgacugccuccacgaggaguacggcggccucaacaaguccaagcccuacuacaccggcaagcacgccaaggccaucggcaacugccccaucugggucaagaccccccucaagcucgccaacggcaccaaguaccgcccccccgccaagcuccucaaggagcgcggcuucuucggcgccaucgccggcuuccucgagggcggcugggagggcaugaucgccggcuggcacggcuacaccucccacggcgcccacggcgucgccgucgccgccgaccucaaguccacccaggaggccaucaacaagaucaccaagaaccucaacucccucuccgagcucgaggucaagaaccuccagcgccucuccggcgccauggacgagcuccacaacgagauccucgagcucgacgagaaggucgacgaccuccgcgccgacaccaucuccucccagaucgagcucgccguccuccucuccaacgagggcaucaucaacuccgaggacgagcaccuccucgcccucgagcgcaagcucaagaagaugcucggccccuccgccgucgacaucggcaacggcugcuucgagaccaagcacaagugcaaccagaccugccucgaccgcaucgccgccggcaccuucaacgccggcgaguucucccuccccaccuucgacucccucaacaucaccgccgccucccucaacgacgacggccucgacaaccacaccauccuccucuacuacuccaccgccgccuccucccucgccgucacccucaugcucgccaucuucaucgucuacaucgucucccgcgacaacgucuccugcuccaucugccucuga

SEQ ID NO: 122890 - RNA, 1755 nt, Artificial Sequence
  derived and/or modified CDS sequence (opt2) from hemagglutinin__InfluenzaB__AGB97265
augaaggccaucaucguccuccucauggucgucaccuccaacgccgaccgcaucugcaccggcaucaccuccuccaacuccccccacgucgucaagaccgccacccagggcgaggucaacgucaccggcgucaucccccucaccaccacccccaccaaguccuacuucgccaaccucaagggcaccaagacccgcggcaagcucugccccgacugccucaacugcaccgaccucgacgucgcccucggccgccccaugugcgucggcaccacccccuccgccaaggccuccauccuccacgagguccgccccgucaccuccggcugcuuccccaucaugcacgaccgcaccaagauccgccagcucgccaaccuccuccgcggcuacgagaacauccgccucuccacccagaacgucaucgacgccgagaaggcccccggcggccccuaccgccucggcaccuccggcuccugccccaacgccaccuccaaguccggcuucuucgccaccauggccugggccguccccaaggacaacaacaagaacgccaccaacccccucaccgucgagguccccuacaucugcgccgagggcgaggaccagaucaccgucuggggcuuccacuccgacaacaagacccagaugaagaaccucuacggcgacuccaacccccagaaguucaccuccuccgccaacggcgucaccacccacuacgucucccagaucggcggcuuccccgaccagaccgaggacggcggccucccccaguccggccgcaucgucgucgacuacaugaugcagaagcccggcaagaccggcaccaucgucuaccagcgcggcguccuccucccccagaaggucuggugcgccuccggccgcuccaaggucaucaagggcucccucccccucaucggcgaggccgacugccuccacgagaaguacggcggccucaacaaguccaagcccuacuacaccggcgagcacgccaaggccaucggcaacugccccaucugggucaagaccccccucaagcucgccaacggcaccaaguaccgcccccccgccaagcuccucaaggagcgcggcuucuucggcgccaucgccggcuuccucgagggcggcugggagggcaugaucgccggcuggcacggcuacaccucccacggcgcccacggcgucgccgucgccgccgaccucaaguccacccaggaggccaucaacaagaucaccaagaaccucaacucccucuccgagcucgaggucaagaaccuccagcgccucuccggcgccauggacgagcuccacaacgagauccucgagcucgacgagaaggucgacgaccuccgcgccgacaccaucuccucccagaucgagcucgccguccuccucuccaacgagggcaucaucaacuccgaggacgagcaccuccucgcccucgagcgcaagcucaagaagaugcucggccccuccgccgucgacaucggcaacggcugcuucgagaccaagcacaagugcaaccagaccugccucgaccgcaucgccgccggcaccuucaacgccggcgaguucucccuccccaccuucgacucccucaacaucaccgccgccucccucaacgacgacggccucgacaaccacaccauccuccucuacuacuccaccgccgccuccucccucgccgucacccucaugcucgccaucuucaucgucuacauggucucccgcgacaacgucuccugcuccaucugccucuga

SEQ ID NO: 122891 - RNA, 1755 nt, Artificial Sequence; identical to SEQ ID NO: 122890
  derived and/or modified CDS sequence (opt2) from hemagglutinin__InfluenzaB__AGF44878

SEQ ID NO: 122892 - RNA, 1755 nt, Artificial Sequence; identical to SEQ ID NO: 122890
  derived and/or modified CDS sequence (opt2) from hemagglutinin__InfluenzaB__AGF44879

SEQ ID NO: 122893 - RNA, 1755 nt, Artificial Sequence
  derived and/or modified CDS sequence (opt2) from hemagglutinin__InfluenzaB__AGF44881
augaaggccaucaucguccuccucauggucgucaccuccaacgccgaccgcaucugcaccggcaucaccuccuccaacuccccccacgucgucaagaccgccacccagggcgaggucaacgucaccggcgucaucccccucaccaccacccccaccaaguccuacuucgccaaccucaagggcaccaagacccgcggcaagcucugccccgacugccucaacugcaccgaccucgacgucgcccucggccgccccaugugcgucggcaccacccccuccgccaaggccuccauccuccacgagguccgccccgucaccuccggcugcuuccccaucaugcacgaccgcaccaagauccgccagcucgccaaccuccuccgcggcuacgagaacauccgccucuccacccagaacgucaucgacgccgagaaggcccccggcggccccuaccgccucggcaccuccggcuccugccccaacgccaccuccaaguccggcuucuucgccaccauggccugggccguccccaaggacaacaacaagaacgccaccaacccccucaccgucgagguccccuacaucugcgccgagggcgaggaccagaucgccgucuggggcuuccacuccgacaacaagacccagaugaagaaccucuacggcgacuccaacccccagaaguucaccuccuccgccaacggcgucaccacccacuacgucucccagaucggcggcuuccccgaccagaccgaggacggcggccucccccaguccggccgcaucgucgucgacuacaugaugcagaagcccggcaagaccggcaccaucgucuaccagcgcggcguccuccucccccagaaggucuggugcgccuccggccgcuccaaggucaucaagggcucccucccccucaucggcgaggccgacugccuccacgagaaguacggcggccucaacaaguccaagcccuacuacaccggcgagcacgccaaggccaucggcaacugccccaucugggucaagaccccccucaagcucgccaacggcaccaaguaccgcccccccgccaagcuccucaaggagcgcggcuucuucggcgccaucgccggcuuccucgagggcggcugggagggcaugaucgccggcuggcacggcuacaccucccacggcgcccacggcgucgccgucgccgccgaccucaaguccacccaggaggccaucaacaagaucaccaagaaccucaacucccucuccgagcucgaggucaagaaccuccagcgccucuccggcgccauggacgagcuccacaacgagauccucgagcucgacgagaaggucgacgaccuccgcgccgacaccaucuccucccagaucgagcucgccguccuccucuccaacgagggcaucaucaacuccgaggacgagcaccuccucgcccucgagcgcaagcucaagaagaugcucggccccuccgccgucgacaucggcaacggcugcuucgagaccaagcacaagugcaaccagaccugccucgaccgcaucgccgccggcaccuucaacgccggcgaguucucccuccccaccuucgacucccucaacaucaccgccgccucccucaacgacgacggccucgacaaccacaccauccuccucuacuacuccaccgccgccuccucccucgccgucauccucaugcucgccaucuucaucgucuacauggucucccgcgacaacgucuccugcuccaucugccucuga

SEQ ID NO: 122894 - RNA, 1755 nt, Artificial Sequence
  derived and/or modified CDS sequence (opt2) from hemagglutinin__InfluenzaB__AGF44882
augaaggccaucaucguccuccucauggucgucaccuccaacgccgaccgcaucugcaccggcaucaccuccuccaacuccccccacgucgucaagaccgccacccagggcgaggucaacgucaccggcgucaucccccucaccaccacccccaccaaguccuacuucgccaaccucaagggcaccaagacccgcggcaagcucugccccgacugccucaacugcaccgaccucgacgucgcccucggccgccccaugugcgucggcaccacccccuccgccaaggccuccauccuccacgagguccgccccgucaccuccggcugcuuccccaucaugcacgaccgcaccaagauccgccagcucgccaaccuccuccgcggcuacgagaacauccgccucuccacccagaacgucaucgacgccgagaaggcccccggcggccccuaccgccucggcaccuccggcuccugccccaacgccaccuccaaguccggcuucuucgccaccauggccugggccguccccaaggacaacaacaagaacgccaccaacccccucaccgucgagguccccuacaucugcgccgagggcgaggaccagaucaccgucuggggcuuccacuccgacaacaagacccagaugaagaaccucuacggcgacuccaacccccagaaguucaccuccuccgccaacggcgucaccacccacuacgucucccagaucggcggcuuccccgaccagaccgaggacggcggccucccccaguccggccgcaucgucgucgacuacaugaugcagaagcccggcaagaccggcaccaucgucuaccagcgcggcguccuccucccccagaaggucuggugcgccuccggcaaguccaaggucaucaagggcucccucccccucaucggcgaggccgacugccuccacgagaaguacggcggccucaacaaguccaagcccuacuacaccggcgagcacgccaaggccaucggcaacugccccaucugggucaagaccccccucaagcucgccaacggcaccaaguaccgcccccccgccaagcuccucaaggagcgcggcuucuucggcgccaucgccggcuuccucgagggcggcugggagggcaugaucgccggcuggcacggcuacaccucccacggcgcccacggcgucgccgucgccgccgaccucaaguccacccaggaggccaucaacaagaucaccaagaaccucaacucccucuccgagcucgaggucaagaaccuccagcgccucuccggcgccauggacgagcuccacaacgagauccucgagcucgacgagaaggucgacgaccuccgcgccgacaccaucuccucccagaucgagcucgccguccuccucuccaacgagggcaucaucaacuccgaggacgagcaccuccucgcccucgagcgcaagcucaagaagaugcucggccccuccgccgucgacaucggcaacggcugcuucgagaccaagcacaagugcaaccagaccugccucgaccgcaucgccgccggcaccuucaacgccggcgaguucucccuccccaccuucgacucccucaacaucaccgccgccucccucaacgacgacggccucgacaaccacaccauccuccucuacuacuccaccgccgccuccucccucgccgucacccucaugcucgccaucuucaucgucuacauggucucccgcgacaacgucuccugcuccaucugccucuga

SEQ ID NO: 122895 - RNA, 1755 nt, Artificial Sequence; identical to SEQ ID NO: 122890
  derived and/or modified CDS sequence (opt2) from hemagglutinin__InfluenzaB__AGF44883

SEQ ID NO: 122896 - RNA, 1755 nt, Artificial Sequence; identical to SEQ ID NO: 122890
  derived and/or modified CDS sequence (opt2) from hemagglutinin__InfluenzaB__AGF44884

SEQ ID NO: 122897 - RNA, 1755 nt, Artificial Sequence; identical to SEQ ID NO: 122890
  derived and/or modified CDS sequence (opt2) from hemagglutinin__InfluenzaB__AGF44886

SEQ ID NO: 122898 - RNA, 1755 nt, Artificial Sequence; identical to SEQ ID NO: 122890
  derived and/or modified CDS sequence (opt2) from hemagglutinin__InfluenzaB__AGF44887

SEQ ID NO: 122899 - RNA, 1755 nt, Artificial Sequence; identical to SEQ ID NO: 122890
  derived and/or modified CDS sequence (opt2) from hemagglutinin__InfluenzaB__AGF44888

SEQ ID NO: 122900 - RNA, 1755 nt, Artificial Sequence
  derived and/or modified CDS sequence (opt2) from hemagglutinin__InfluenzaB__AGL09834
augaaggccaucaucguccuccucauggucgucaccuccaacgccgaccgcaucugcaccggcaucaccuccuccaacuccccccacgucgucaagaccgccacccagggcgaggucaacgucaccggcgucaucccccucaccaccacccccaccaaguccuacuucgccaaccucaagggcaccaagacccgcggcaagcucugccccgacugccucaacugcaccgaccucgacgucgcccucggccgccccaugugcgucggcaccacccccuccgccaaggccuccauccuccacgagguccgccccgucaccuccggcugcuuccccaucaugcacgaccgcaccaagauccgccagcucgccaaccuccuccgcggcuacgagaacauccgccucuccacccagaacgucaucgacgccgagaaggcccccggcggccccuaccgccucggcaccuccggcuccugccccaacgccaccuccaaguccggcuucuucgccaccauggccugggccguccccaaggacaacaacaagaacgccaccaacccccucaccgucgagguccccuacaucugcgccgagggcgaggaccagaucgccgucuggggcuuccacuccgacaacaagacccagaugaagaaccucuacggcgacuccaacccccagaaguucaccuccuccgccaacggcgucaccacccacuacgucucccagaucggcggcuuccccgaccagaccgaggacggcggccucccccaguccggccgcaucgucgucgacuacaugaugcagaagcccggcaagaccggcaccaucgucuaccagcgcggcguccuccucccccagaaggucuggugcgccuccggccgcuccaaggucaucaagggcucccucccccucaucggcgaggccgacugccuccacgagaaguacggcggccucaacaaguccaagcccuacuacaccggcgagcacgccaaggccaucggcaacugccccaucugggucaagaccccccucaagcucgccaacggcaccaaguaccgcccccccgccaagcuccucaaggagcgcggcuucuucggcgccaucgccggcuuccucgagggcggcugggagggcaugaucgccggcuggcacggcuacaccucccacggcgcccacggcgucgccgucgccgccgaccucaaguccacccaggaggccaucaacaagaucaccaagaaccucaacucccucuccgagcucgaggucaagaaccuccagcgccucuccggcgccauggacgagcuccacaacgagauccucgagcucgacgagaaggucgacgaccuccgcgccgacaccaucuccucccagaucgagcucgccguccuccucuccaacgagggcaucaucaacuccgaggacgagcaccuccucgcccucgagcgcaagcucaagaagaugcucggccccuccgccgucgacaucggcaacggcugcuucgagaccaagcacaagugcaaccagaccugccucgaccgcaucgccgccggcaccuucaacgccggcgacuucucccuccccaccuucgacucccucaacaucaccgccgccucccucaacgacgacggccucgacaaccacaccauccuccucuacuacuccaccgccgccuccucccucgccgucacccucaugcucgccaucuucaucgucuacauggucucccgcgacaacgucuccugcuccaucugccucuga

SEQ ID NO: 122901 - RNA, 1755 nt, Artificial Sequence; identical to SEQ ID NO: 122890
  derived and/or modified CDS sequence (opt2) from hemagglutinin__InfluenzaB__AGL09835

SEQ ID NO: 122902 - RNA, 1755 nt, Artificial Sequence
  derived and/or modified CDS sequence (opt2) from hemagglutinin__InfluenzaB__AGL09836
augaaggccaucaucguccuccucauggucgucaccuccaacgccgaccgcaucugcaccggcaucaccuccuccaacuccccccacgucgucaagaccgccacccagggcgaggucaacgucaccggcgucaucccccucaccaccacccccaccaaguccuacuucgccaaccucaagggcaccaagacccgcggcaagcucugccccgacugccucaacugcaccgaccucgacgucgcccucggccgccccaugugcgucggcaccacccccuccgccaaggccuccauccuccacgagguccgccccgucaccuccggcugcuuccccaucaugcacgaccgcaccaagauccgccagcucgccaaccuccuccgcggcuacgagaacauccgccucuccacccagaacgucaucgacgccaagaaggcccccggcggccccuaccgccucggcaccuccggcuccugccccaacgccaccuccaaguccggcuucuucgccaccauggccugggccguccccgaggacaacaacaagaacgccaccaacccccucaccgucgagguccccuacaucugcgccgagggcgaggaccagaucaccgucuggggcuuccacuccgacaacaagacccagaugaagaaccucuacggcgacuccaacccccagaaguucaccuccuccgccaacggcgucaccacccacuacgucucccagaucggcggcuuccccgaccagaccgaggacggcggccucccccaguccggccgcaucgucgucgacuacaugaugcagaagcccggcaagaccggcaccaucgucuaccagcgcggcguccuccucccccagaaggucuggugcgccuccggccgcuccaaggucaucaagggcucccucccccucaucggcgaggccgacugccuccacgagaaguacggcggccucaacaaguccaagcccuacuacaccggcgagcacgccaaggccaucggcaacugccccaucugggucaagaccccccucaagcucgccaacggcaccaaguaccgcccccccgccaagcuccucaaggagcgcggcuucuucggcgccaucgccggcuuccucgagggcggcugggagggcaugaucgccggcuggcacggcuacaccucccacggcgcccacggcgucgccgucgccgccgaccucaaguccacccaggaggccaucaacaagaucaccaagaaccucaacucccucuccgagcucgaggucaagaaccuccagcgccucuccggcgccauggacgagcuccacaacgagauccucgagcucgacgagaaggucgacgaccuccgcgccgacaccaucuccucccagaucgagcucgccguccuccucuccaacgagggcaucaucaacuccgaggacgagcaccuccucgcccucgagcgcaagcucaagaagaugcucggccccuccgccgucgacaucggcaacggcugcuucgagaccaagcacaagugcaaccagaccugccucgaccgcaucgccgccggcaccuucaacgccggcgaguucucccuccccaccuucgacucccucaacaucaccgccgccucccucaacgacgacggccucgacaaccacaccauccuccucuacuacuccaccgccgccuccucccucgccgucacccucaugcucgccaucuucaucgucuacauggucucccgcgacaacgucuccugcuccaucugccucuga

SEQ ID NO: 122903 - RNA, 1755 nt, Artificial Sequence; identical to SEQ ID NO: 122890
  derived and/or modified CDS sequence (opt2) from hemagglutinin__InfluenzaB__AGL09837

SEQ ID NO: 122904 - RNA, 1755 nt, Artificial Sequence; identical to SEQ ID NO: 122890
  derived and/or modified CDS sequence (opt2) from hemagglutinin__InfluenzaB__AGL09838

SEQ ID NO: 122905 - RNA, 1755 nt, Artificial Sequence; identical to SEQ ID NO: 122890
  derived and/or modified CDS sequence (opt2) from hemagglutinin__InfluenzaB__AGL09839

SEQ ID NO: 122906 - RNA, 1755 nt, Artificial Sequence; identical to SEQ ID NO: 122890
  derived and/or modified CDS sequence (opt2) from hemagglutinin__InfluenzaB__AGL09840

SEQ ID NO: 122907 - RNA, 1755 nt, Artificial Sequence; identical to SEQ ID NO: 122890
  derived and/or modified CDS sequence (opt2) from hemagglutinin__InfluenzaB__AGL09841

SEQ ID NO: 122908 - RNA, 1758 nt, Artificial Sequence
  derived and/or modified CDS sequence (opt2) from hemagglutinin__InfluenzaB__AGL09842
augaaggccaucaucguccuccucauggucgucaccuccaacgccgaccgcaucugcaccggcaucaccuccuccaacuccccccacgucgucaagaccgccacccagggcgaggucaacgucaccggcgucaucccccucaccaccacccccaccaagucccacuucgccaaccucaagggcaccgagacccgcggcaagcucugccccaagugccucaacugcaccgaccucgacgucgcccucggccgccccaagugcaccggcaagauccccuccgcccgcgucuccauccuccacgagguccgccccgucaccuccggcugcuuccccaucaugcacgaccgcaccaagauccgccagcuccccaaccuccuccgcggcuacgagcacauccgccucuccacccacaacgucaucaacgccgagaacgcccccggcggccccuacaagaucggcaccuccggcuccugccccaacgucaccaacggcaacggcuucuucgccaccauggccugggccguccccaagaacgacaagaacaagaccgagaccaacccccucaccaucgagguccccuacaucugcaccgagggcgaggaccagaucaccgucuggggcuuccacuccgacaacgagacccagauggccaagcucuacggcgacuccaagccccagaaguucaccuccuccgccaacggcgucaccacccacuacgucucccagaucggcggcuuccccaaccagaccgaggacggcggccucccccaguccggccgcaucgucgucgacuacaugguccagaaguccggcaagaccggcaccaucaccuaccagcgcggcauccuccucccccagaaggucuggugcgccuccggccgcuccaaggucaucaagggcucccucccccucaucggcgaggccgacugccuccacgagaaguacggcggccucaacaaguccaagcccuacuacaccggcgagcacgccaaggccaucggcaacugccccaucugggucaagaccccccucaagcucgccaacggcaccaaguaccgcccccccgccaagcuccucaaggagcgcggcuucuucggcgccaucgccggcuuccucgagggcggcugggagggcaugaucgccggcuggcacggcuacaccucccacggcgcccacggcgucgccgucgccgccgaccucaaguccacccaggaggccaucaacaagaucaccaagaaccucaacucccucuccgagcucgaggucaagaaccuccagcgccucuccggcgccauggacgagcuccacaacgagauccucgagcucgacgagaaggucgacgaccuccgcgccgacaccaucuccucccagaucgagcucgccguccuccucuccaacgagggcaucaucaacuccgaggacgagcaccuccucgcccucgagcgcaagcucaagaagaugcucggccccuccgccgucgagaucggcaacggcugcuucgagaccaagcacaagugcaaccagaccugccucgaccgcaucgccgccggcaccuucgacgccggcgaguucucccuccccaccuucgacucccucaacaucaccgccgccucccucaacgacgacggccucgacaaccacaccauccuccucuacuacuccaccgccgccuccucccucgccgucacccucaugaucgccaucuucgucgucuacauggucucccgcgacaacgucuccugcuccaucugccucuga

SEQ ID NO: 122909 - RNA, 1755 nt, Artificial Sequence; identical to SEQ ID NO: 122890
  derived and/or modified CDS sequence (opt2) from hemagglutinin__InfluenzaB__AGL09843

SEQ ID NO: 122910 - RNA, 1755 nt, Artificial Sequence
  derived and/or modified CDS sequence (opt2) from hemagglutinin__InfluenzaB__AGL09844
augaaggccaucaucguccuccucauggucgucaccuccaacgccgaccgcaucugcaccggcaucaccuccuccaacuccccccacgucgucaagaccgccacccagggcgaggucaacgucaccggcgucaucccccucaccaccacccccaccaaguccuacuucgccaaccucaagggcaccaagacccgcggcaagcucugccccgacugccucaacugcaccgaccucgacgucgcccucggccgccccaugugcgucggcaccacccccuccgccaaggccuccauccuccacgagguccgccccgucaccuccggcugcuuccccaucaugcacgaccgcaccaagauccgccagcucgccaaccuccuccgcggcuacgagaacauccgccucuccacccagaacgucaucgacgccgagaaggcccccggcggccccuaccgccucggcaccuccggcuccugccccaacgccaccuccaaguccggcuucuucgccaccauggccugggccguccccaaggacaacaacaagaacgccaccaacccccucaccgucgagguccccuacaucugcgccgagggcgaggaccagaucaccgucuggggcuuccacuccgacaacaagacccagaugaagaaccucuacggcgacuccaacccccagaaguucaccuccuccgccaacggcgucaccacccacuacgucucccagaucggcggcuuccccgaccagaaggaggacggcggccucccccaguccggccgcaucgucgucgacuacaugaugcagaagcccggcaagaccggcaccaucgucuaccagcgcggcguccuccucccccagaaggucuggugcgccuccggccgcuccaaggucaucaagggcucccucccccucaucggcgaggccgacugccuccacgagaaguacggcggccucaacaaguccaagcccuacuacaccggcgagcacgccaaggccaucggcaacugccccaucugggucaagaccccccucaagcucgccaacggcaccaaguaccgcccccccgccaagcuccucaaggagcgcggcuucuucggcgccaucgccggcuuccucgagggcggcugggagggcaugaucgccggcuggcacggcuacaccucccacggcgcccacggcgucgccgucgccgccgaccucaaguccacccaggaggccaucaacaagaucaccaagaaccucaacucccucuccgagcucgaggucaagaaccuccagcgccucuccggcgccauggacgagcuccacaacgagauccucgagcucgacgagaaggucgacgaccuccgcgccgacaccaucuccucccagaucgagcucgccguccuccucuccaacgagggcaucaucaacuccgaggacgagcaccuccucgcccucgagcgcaagcucaagaagaugcucggccccuccgccgucgacaucggcaacggcugcuucgagaccaagcacaagugcaaccagaccugccucgaccgcaucgccgccggcaccuucaacgccggcgaguucucccuccccaccuucgacucccucaacaucaccgccgccucccucaacgacgacggccucgacaaccacaccauccuccucuacuacuccaccgccgccuccucccucgccgucacccucaugcucgccaucuucaucgucuacauggucucccgcgacaacgucuccugcuccaucugccucuga

SEQ ID NO: 122911 - RNA, 1755 nt, Artificial Sequence; identical to SEQ ID NO: 122890
  derived and/or modified CDS sequence (opt2) from hemagglutinin__InfluenzaB__AGL09845

SEQ ID NO: 122912 - RNA, 1755 nt, Artificial Sequence; identical to SEQ ID NO: 122890
  derived and/or modified CDS sequence (opt2) from hemagglutinin__InfluenzaB__AGL09846

SEQ ID NO: 122913 - RNA, 1755 nt, Artificial Sequence
  derived and/or modified CDS sequence (opt2) from hemagglutinin__InfluenzaB__AGL09847
augaaggccaucaucguccuccucauggucgucaccuccaacgccgaccgcaucugcaccggcaucaccuccuccaacuccccccacgucgucaagaccgccacccagggcgaggucaacgucaccggcgucaucccccucaccaccacccccaccaaguccuacuucgccaaccucaagggcaccaagacccgcggcaagcucugccccgacugccucaacugcaccgaccucgacgucgcccucggccgccccaugugcgucggcaccacccccuccgccaaggccuccauccuccacgagguccgccccgucaccuccggcugcuuccccaucaugcacgaccgcaccaagauccgccagcucgccaaccuccuccgcggcuacgagaacauccgccucuccacccagaacgucaucgacgccgagaaggcccccggcggccccuaccgccucggcaccuccggcuccugccccaacgccaccuccaaguccggcuucuucgccaccauggccugggccguccccaaggacaacaacaagaacgccaccaacccccucaccgucgagguccccuacaucugcgccgagggcgaggaccagaucgccaucuggggcuuccacuccgacaacaagacccagaugaagaaccucuacggcgacuccaacccccagaaguucaccuccuccgccaacggcgucaccacccacuacgucucccagaucggcggcuuccccgaccagaccgaggacggcggccucccccaguccggccgcaucgucgucgacuacaugaugcagaagcccggcaagaccggcaccaucgucuaccagcgcggcguccuccucccccagaaggucuggugcgccuccggccgcuccaaggucaucaagggcucccucccccucaucggcgaggccgacugccuccacgagaaguacggcggccucaacaaguccaagcccuacuacaccggcgagcacgccaaggccaucggcaacugccccaucugggucaagaccccccucaagcucgccaacggcaccaaguaccgcccccccgccaagcuccucaaggagcgcggcuucuucggcgccaucgccggcuuccucgagggcggcugggagggcaugaucgccggcuggcacggcuacaccucccacggcgcccacggcgucgccgucgccgccgaccucaaguccacccaggaggccaucaacaagaucaccaagaaccucaacucccucuccgagcucgaggucaagaaccuccagcgccucuccggcgccauggacgagcuccacaacgagauccucgagcucgacgagaaggucgacgaccuccgcgccgacaccaucuccucccagaucgagcucgccguccuccucuccaacgagggcaucaucaacuccgaggacgagcaccuccucgcccucgagcgcaagcucaagaagaugcucggccccuccgccgucgacaucggcaacggcugcuucgagaccaagcacaagugcaaccagaccugccucgaccgcaucgccgccggcaccuucaacgccggcgaguucucccuccccaccuucgacucccucaacaucaccgccgccucccucaacgacgacggccucgacaaccacaccauccuccucuacuacuccaccgccgccuccucccucgccgucacccucaugcucgccaucuucaucgucuacauggucucccgcgacaacgucuccugcuccaucugccucuga

SEQ ID NO: 122914 - RNA, 1755 nt, Artificial Sequence
  derived and/or modified CDS sequence (opt2) from hemagglutinin__InfluenzaB__AGL09849
augaaggccaucaucguccuccucauggucgucaccuccaacgccgaccgcaucugcaccggcaucaccuccuccaacuccccccacgucgucaagaccgccacccagggcgaggucaacgucaccggcgucaucccccucaccaccacccccaccaaguccuacuucgccaaccucaagggcaccaagacccgcggcaagcucugccccgacugccucaacugcaccgaccucgacgucgcccucggccgccccaugugcgucggcaccacccccuccgccaaggccuccauccuccacgagguccgccccgucaccuccggcugcuuccccaucaugcacgaccgcaccaagauccgccagcucgccaaccuccuccgcggcuacgagaacauccgccucuccacccagaacgucaucaacgccgagaaggcccccggcggccccuaccgccucggcaccuccggcuccugccccaacgccaccuccaaguccggcuucuucgccaccauggccugggccguccccaaggacaacaacaagaacgccaccaacccccucaccgucgagguccccuacaucugcgccgagggcgaggaccagaucaccgucuggggcuuccacuccgacaacaagacccagaugaagaaccucuacggcgacuccaacccccagaaguucaccuccuccgccaacggcgucaccacccacuacgucucccagaucggcggcuuccccgaccagaccgaggacggcggccucccccaguccggccgcaucgucgucgacuacaugaugcagaagcccggcaagaccggcaccaucgucuaccagcgcggcguccuccucccccagaaggucuggugcgccuccggccgcuccaaggucaucaagggcucccucccccucaucggcgaggccgacugccuccacgagaaguacggcggccucaacaaguccaagcccuacuacaccggcgagcacgccaaggccaucggcaacugccccaucugggucaagaccccccucaagcucgccaacggcaccaaguaccgcccccccgccaagcuccucaaggagcgcggcuucuucggcgccaucgccggcuuccucgagggcggcugggagggcaugaucgccggcuggcacggcuacaccucccacggcgcccacggcgucgccgucgccgccgaccucaaguccacccaggaggccaucaacaagaucaccaagaaccucaacucccucuccgagcucgaggucaagaaccuccagcgccucuccggcgccauggacgagcuccacaacgagauccucgagcucgacgagaaggucgacgaccuccgcgccgacaccaucuccucccagaucgagcucgccguccuccucuccaacgagggcaucaucaacuccgaggacgagcaccuccucgcccucgagcgcaagcucaagaagaugcucggccccuccgccgucgacaucggcaacggcugcuucgagaccaagcacaagugcaaccagaccugccucgaccgcaucgccgccggcaccuucaacgccggcgaguucucccuccccaccuucgacucccucaacaucaccgccgccucccucaacgacgacggccucgacaaccacaccauccuccucuacuacuccaccgccgccuccucccucgccgucacccucaugcucgccaucuucaucgucuacauggucucccgcgacaacgucuccugcuccaucugccucuga

SEQ ID NO: 122915 - RNA, 1755 nt, Artificial Sequence; identical to SEQ ID NO: 122890
  derived and/or modified CDS sequence (opt2) from hemagglutinin__InfluenzaB__AGL09850

SEQ ID NO: 122916 - RNA, 1755 nt, Artificial Sequence; identical to SEQ ID NO: 122890
  derived and/or modified CDS sequence (opt2) from hemagglutinin__InfluenzaB__AGL09851

SEQ ID NO: 122917 - RNA, 1758 nt, Artificial Sequence; identical to SEQ ID NO: 122681
  derived and/or modified CDS sequence (opt2) from hemagglutinin__InfluenzaB__AGL09852

SEQ ID NO: 122918 - RNA, 1755 nt, Artificial Sequence; identical to SEQ ID NO: 122890
  derived and/or modified CDS sequence (opt2) from hemagglutinin__InfluenzaB__AGL09853

SEQ ID NO: 122919 - RNA, 1755 nt, Artificial Sequence; identical to SEQ ID NO: 122890
  derived and/or modified CDS sequence (opt2) from hemagglutinin__InfluenzaB__AGL09854

SEQ ID NO: 122920 - RNA, 1758 nt, Artificial Sequence
  derived and/or modified CDS sequence (opt2) from hemagglutinin__InfluenzaB__AGL09855
augaaggccaucaucguccuccucauggucgucaccuccaacgccgaccgcaucugcaccggcaucaccuccuccaacuccccccacgucgucaagaccgccacccagggcgaggucaacgucaccggcgucaucccccucaccaccacccccaccaagucccacuucgccaaccucaagggcaccgagacccgcggcaagcucugccccaagugccucaacugcaccgaccucgacgucgcccucggccgccccaagugcaccggcaagauccccuccgcccgcgucuccauccuccacgagguccgccccgucaccuccggcugcuuccccaucaugcacgaccgcaccaagauccgccagcuccccaaccuccuccgcggcuacgagcacauccgccucuccacccacaacgucaucaacgccgagaacgcccccggcggccccuacaagaucggcaccuccggcuccugccccaacgucaccaacggcaacggcuucuucgccaccauggccugggccguccccaagaacgacaagaacaagaccgagaccaacccccucaccaucgagguccccuacaucugcaccgaggaggaggaccagaucaccgucuggggcuuccacuccgacaacgagacccagauggccaagcucuacggcgacuccaagccccagaaguucaccuccuccgccaacggcgucaccacccacuacgucucccagaucggcgacuuccccaaccagaccgaggacggcggccucccccaguccggccgcaucgucgucgacuacaugguccagaaguccggcaagaccggcaccaucaccuaccagcgcggcauccuccucccccagaaggucuggugcgccuccggccgcuccaaggucaucaagggcucccucccccucaucggcgaggccgacugccuccacgagaaguacggcggccucaacaaguccaagcccuacuacaccggcgagcacgccaaggccaucggcaacugccccaucugggucaagaccccccucaagcucgccaacggcaccaaguaccgcccccccgccaagcuccucaaggagcgcggcuucuucggcgccaucgccggcuuccucgagggcggcugggagggcaugaucgccggcuggcacggcuacaccucccacggcgcccacggcgucgccgucgccgccgaccucaaguccacccaggaggccaucaacaagaucaccaagaaccucaacucccucuccgagcucgaggucaagaaccuccagcgccucuccggcgccauggacgagcuccacaacgagauccucgagcucgacgagaaggucgacgaccuccgcgccgacaccaucuccucccagaucgagcucgccguccuccucuccaacgagggcaucaucaacuccgaggacgagcaccuccucgcccucgagcgcaagcucaagaagaugcucggccccuccgccgucgagaucggcaacggcugcuucgagaccaagcacaagugcaaccagaccugccucgaccgcaucgccgccggcaccuucgacgccggcgaguucucccuccccaccuucgacucccucaacaucaccgccgccucccucaacgacgacggccucgacaaccacaccauccuccucuacuacuccaccgccgccuccucccucgccgucacccucaugaucgccaucuucgucgucuacauggucucccgcgacaacgucuccugcuccaucugccucuga

SEQ ID NO: 122921 - RNA, 1755 nt, Artificial Sequence; identical to SEQ ID NO: 122890
  derived and/or modified CDS sequence (opt2) from hemagglutinin__InfluenzaB__AGL09856

SEQ ID NO: 122922 - RNA, 1755 nt, Artificial Sequence
  derived and/or modified CDS sequence (opt2) from hemagglutinin__InfluenzaB__AGL09857
augaaggccaucaucguccuccucauggucgucaccuccaacgccgaccgcaucugcaccggcaucaccuccuccaacuccccccacgucgucaagaccgccacccagggcgaggucaacgucaccggcgucaucccccucaccaccacccccaccaaguccuacuucgccaaccucaagggcaccaagacccgcggcaagcucugccccgacugccucaacugcaccgaccucgacgucgcccucggccgccccaugugcgucggcaccacccccuccgccaaggccuccauccuccacgagguccgccccgucaccuccggcugcuuccccaucaugcacgaccgcaccaagauccgccagcucgccaaccuccuccgcggcuacgagaacauccgccucuccacccagaaggucaucgacgccgagaaggcccccggcggccccuaccgccucggcaccuccggcuccugccccaacgccaccuccaaguccggcuucuucgccaccauggccugggccguccccaaggacaacaacaagaacgccaccaacccccucaccgucgagguccccuacaucugcgccgagggcgaggaccagaucaccgucuggggcuuccacuccgacaacaagacccagaugaagaaccucuacggcgacuccaacccccagaaguucaccuccuccgccaacggcgucaccacccacuacgucucccagaucggcggcuuccccgaccagaccgaggacggcggccucccccaguccggccgcaucgucgucgacuacaugauccagaagcccggcaagaccggcaccaucgucuaccagcgcggcguccuccucccccagaaggucuggugcgccuccggccgcuccaaggucaucaagggcucccucccccucaucggcgaggccgacugccuccacgagaaguacggcggccucaacaaguccaagcccuacuacaccggcgagcacgccaaggccaucggcaacugccccaucugggucaagaccccccucaagcucgccaacggcaccaaguaccgcccccccgccaagcuccucaaggagcgcggcuucuucggcgccaucgccggcuuccucgagggcggcugggagggcaugaucgccggcuggcacggcuacaccucccacggcgcccacggcgucgccgucgccgccgaccucaaguccacccaggaggccaucaacaagaucaccaagaaccucaacucccucuccgagcucgaggucaagaaccuccagcgccucuccggcgccauggacgagcuccacaacgagauccucgagcucgacgagaaggucgacgaccuccgcgccgacaccaucuccucccagaucgagcucgccguccuccucuccaacgagggcaucaucaacuccgaggacgagcaccuccucgcccucgagcgcaagcucaagaagaugcucggccccuccgccgucgacaucggcaacggcugcuucgagaccaagcacaagugcaaccagaccugccucgaccgcaucgccgccggcaccuucaacgccggcgaguucucccuccccaccuucgacucccucaacaucaccgccgccucccucaacgacgacggccucgacaaccacaccauccuccucuacuacuccaccgccgccuccucccucgccgucacccucaugcucgccaucuucaucgucuacauggucucccgcgacaacgucuccugcuccaucugccucuga

SEQ ID NO: 122923 - RNA, 1758 nt, Artificial Sequence
  derived and/or modified CDS sequence (opt2) from hemagglutinin__InfluenzaB__AGL09859
augaaggccaucaucguccuccucauggucgucaccuccaacgccgaccgcaucugcaccggcaucaccuccuccaacuccccccacgucgucaagaccgccacccagggcgaggucaacgucaccggcgucaucccccucaccaccacccccaccaagucccacuucgccaaccucaagggcaccgagacccgcggcaagcucugccccaagugccucaacugcaccgaccucgacgucgcccucggccgccccaagugcaccggcaagauccccuccgcccgcgucuccauccuccacgagguccgccccgucaccuccggcugcuuccccaucaugcacgaccgcaccaagauccgccagcuccccaaccuccuccgcggcuacgagcacauccgccucuccacccacaacgucaucaacgccgaggacgcccccggcggccccuacaagaucggcaccuccggcuccugccccaacgucaccaacggcaacggcuucuucgccaccauggccugggccguccccaagaacgacaagaacaagaccgccaccaacccccucaccaucgagguccccuacaucugcaccgagggcgaggaccagaucaccgucuggggcuuccacuccgacaacgagacccagauggccaagcucuacggcgacuccaagccccagaaguucaccuccuccgccaacggcgucaccacccacuacgucucccagaucggcggcuuccccaaccagaccgaggacggcggccucccccaguccggccgcaucgucgucgacuacaugguccagaaguccggcaagaccggcaccaucaccuaccagcgcggcauccuccucccccagaaggucuggugcgccuccggccgcuccaaggucaucaagggcucccucccccucaucggcgaggccgacugccuccacgagaaguacggcggccucaacaaguccaagcccuacuacaccggcgagcacgccaaggccaucggcaacugccccaucugggucaagaccccccucaagcucgccaacggcaccaaguaccgcccccccgccaagcuccucaaggagcgcggcuucuucggcgccaucgccggcuuccucgagggcggcugggagggcaugaucgccggcuggcacggcuacaccucccacggcgcccacggcgucgccgucgccgccgaccucaaguccacccaggaggccaucaacaagaucaccaagaaccucaacucccucuccgagcucgaggucaagaaccuccagcgccucuccggcgccauggacgagcuccacaacgagauccucgagcucgacgagaaggucgacgaccuccgcgccgacaccaucuccucccagaucgagcucgccguccuccucuccaacgagggcaucaucaacuccgaggacgagcaccuccucgcccucgagcgcaagcucaagaagaugcucggccccuccgccgucgagaucggcaacggcugcuucgagaccaagcacaagugcaaccagaccugccucgaccgcaucgccgccggcaccuucgacgccggcgaguucucccuccccaccuucgacucccucaacaucaccgccgccucccucaacgacgacggccucgacaaccacaccauccuccucuacuacuccaccgccgccuccucccucgccgucacccucaugaucgccaucuucgucgucuacauggucucccgcgacaacgucuccugcuccaucugccucuga

SEQ ID NO: 122924 - RNA, 1758 nt, Artificial Sequence; identical to SEQ ID NO: 122923
  derived and/or modified CDS sequence (opt2) from hemagglutinin__InfluenzaB__AGL09860

SEQ ID NO: 122925 - RNA, 1758 nt, Artificial Sequence; identical to SEQ ID NO: 122923
  derived and/or modified CDS sequence (opt2) from hemagglutinin__InfluenzaB__AGL09861

SEQ ID NO: 122926 - RNA, 1758 nt, Artificial Sequence; identical to SEQ ID NO: 122923
  derived and/or modified CDS sequence (opt2) from hemagglutinin__InfluenzaB__AGL09862

SEQ ID NO: 122927 - RNA, 1758 nt, Artificial Sequence; identical to SEQ ID NO: 122923
  derived and/or modified CDS sequence (opt2) from hemagglutinin__InfluenzaB__AGL09863

SEQ ID NO: 122928 - RNA, 1755 nt, Artificial Sequence; identical to SEQ ID NO: 122890
  derived and/or modified CDS sequence (opt2) from hemagglutinin__InfluenzaB__AGL09864

SEQ ID NO: 122929 - RNA, 1755 nt, Artificial Sequence; identical to SEQ ID NO: 122890
  derived and/or modified CDS sequence (opt2) from hemagglutinin__InfluenzaB__AGL09866

SEQ ID NO: 122930 - RNA, 1755 nt, Artificial Sequence; identical to SEQ ID NO: 122890
  derived and/or modified CDS sequence (opt2) from hemagglutinin__InfluenzaB__AGL09867

SEQ ID NO: 122931 - RNA, 1755 nt, Artificial Sequence; identical to SEQ ID NO: 122890
  derived and/or modified CDS sequence (opt2) from hemagglutinin__InfluenzaB__AGL09868

SEQ ID NO: 122932 - RNA, 1755 nt, Artificial Sequence
  derived and/or modified CDS sequence (opt2) from hemagglutinin__InfluenzaB__AGL09869
augaaggccaucaucguccuccucauggucgucaccuccaacgccgaccgcaucugcaccggcaucaccuccuccaacuccccccacgucgucaagaccgccacccagggcgaggucaacgucaccggcgucaucccccucaccaccacccccaccaaguccuacuucgccaaccucaagggcaccaagacccgcggcaagcucugccccgacugccucaacugcaccgaccucgacgucgcccucggccgccccaugugcgucggcaccacccccuccgccaaggccuccauccuccacgagguccgccccgucaccuccggcugcuuccccaucaugcacgaccgcaccaagauccgccagcucgccaaccuccuccgcggcuacgagaacauccgccucuccacccagaacgucaucgacgccgagaaggcccccggcggccccuaccgccucggcaccuccggcuccugccccaacaccaccuccaaguccggcuucuucgccaccauggccugggccguccccaaggacaacaacaagaacgccaccaacccccucaccgucgagguccccuacaucugcgccgagggcgaggaccagaucaccgucuggggcuuccacuccgacaacaagacccagaugaagaaccucuacggcgacuccaacccccagaaguucaccuccuccgccaacggcgucaccacccacuacgucucccagaucggcggcuuccccgaccagaccgaggacggcggccucccccaguccggccgcaucgucgucgacuacaugaugcagaagcccggcaagaccggcaccaucgucuaccagcgcggcguccuccucccccagaaggucuggugcgccuccggccgcuccaaggucaucaagggcucccucccccucaucggcgaggccgacugccuccacgagaaguacggcggccucaacaaguccaagcccuacuacaccggcgagcacgccaaggccaucggcaacugccccaucugggucaagaccccccucaagcucgccaacggcaccaaguaccgcccccccgccaagcuccucaaggagcgcggcuucuucggcgccaucgccggcuuccucgagggcggcugggagggcaugaucgccggcuggcacggcuacaccucccacggcgcccacggcgucgccgucgccgccgaccucaaguccacccaggaggccaucaacaagaucaccaagaaccucaacucccucuccgagcucgaggucaagaaccuccagcgccucuccggcgccauggacgagcuccacaacgagauccucgagcucgacgagaaggucgacgaccuccgcgccgacaccaucuccucccagaucgagcucgccguccuccucuccaacgagggcaucaucaacuccgaggacgagcaccuccucgcccucgagcgcaagcucaagaagaugcucggccccuccgccgucgacaucggcaacggcugcuucgagaccaagcacaagugcaaccagaccugccucgaccgcaucgccgccggcaccuucaacgccggcgaguucucccuccccaccuucgacucccucaacaucaccgccgccucccucaacgacgacggccucgacaaccacaccauccuccucuacuacuccaccgccgccuccucccucgccgucacccucaugcucgccaucuucaucgucuacauggucucccgcgacaacgucuccugcuccaucugccucuga

SEQ ID NO: 122933 - RNA, 1755 nt, Artificial Sequence
  derived and/or modified CDS sequence (opt2) from hemagglutinin__InfluenzaB__AGL09870
augaaggccaucaucguccuccucauggucgucaccuccaacgccgaccgcaucugcaccggcaucaccuccuccaacuccccccacgucgucaagaccgccacccagggcgaggucaacgucaccggcgucaucccccucaccaccacccccaccaaguccuacuucgccaaccucaagggcaccaagacccgcggcaagcucugccccgacugccucaacugcaccgaccucgacgucgcccucggccgccccaugugcgucggcaccacccccuccgccaaggccuccauccuccacgagguccgccccgucaccuccggcugcuuccccaucaugcacgaccgcaccaagauccgccagcucgccaaccuccuccgcggcuacgagaacauccgccucuccacccagaacgucaucgacgccgagaaggcccccggcggccccuaccgccucggcaccuccggcuccugccccaacgccaccuccaaguccggcuucuucgccaccauggccugggccguccccaaggacaacaacaagaacgccaccaacccccucaccgucgagguccccuacaucugcgccgagggcgaggaccagaucaccgucuggggcuuccacuccgacaacaagacccagaugaagaaccucuacggcgacuccaacccccagcgcuucaccuccuccgccaacggcgucaccacccacuacgucucccagaucggcggcuuccccgaccagaccgaggacggcggccucccccaguccggccgcaucgucgucgacuacaugaugcagaagcccggcaagaccggcaccaucgucuaccagcgcggcguccuccucccccagaaggucuggugcgccuccggccgcuccaaggucaucaagggcucccucccccucaucggcgaggccgacugccuccacgagaaguacggcggccucaacaaguccaagcccuacuacaccggcgagcacgccaaggccaucggcaacugccccaucugggucaagaccccccucaagcucgccaacggcaccaaguaccgcccccccgccaagcuccucaaggagcgcggcuucuucggcgccaucgccggcuuccucgagggcggcugggagggcaugaucgccggcuggcacggcuacaccucccacggcgcccacggcgucgccgucgccgccgaccucaaguccacccaggaggccaucaacaagaucaccaagaaccucaacucccucuccgagcucgaggucaagaaccuccagcgccucuccggcgccauggacgagcuccacaacgagauccucgagcucgacgagaaggucgacgaccuccgcgccgacaccaucuccucccagaucgagcucgccguccuccucuccaacgagggcaucaucaacuccgaggacgagcaccuccucgcccucgagcgcaagcucaagaagaugcucggccccuccgccgucgacaucggcaacggcugcuucgagaccaagcacaagugcaaccagaccugccucgaccgcaucgccgccggcaccuucaacgccggcgaguucucccuccccaccuucgacucccucaacaucaccgccgccucccucaacgacgacggccucgacaaccacaccauccuccucuacuacuccaccgccgccuccucccucgccgucacccucaugcucgccaucuucaucgucuacauggucucccgcgacaacgucuccugcuccaucugccucuga

SEQ ID NO: 122934 - RNA, 1755 nt, Artificial Sequence; identical to SEQ ID NO: 122890
  derived and/or modified CDS sequence (opt2) from hemagglutinin__InfluenzaB__AGL09871

SEQ ID NO: 122935 - RNA, 1755 nt, Artificial Sequence
  derived and/or modified CDS sequence (opt2) from hemagglutinin__InfluenzaB__AGL09872
augaaggccaucaucguccuccucauggucgucaccuccaacgccgaccgcaucugcaccggcaucaccuccuccaacuccccccacgucgucaagaccgccacccagggcgaggucaacgucaccggcgucaucccccucaccaccacccccaccaaguccuacuucgccaaccucaagggcaccaagacccgcggcaagcucugccccgacugccucaacugcaccgaccucgacgucgcccucggccgccccaugugcgucggcaccacccccuccgccaaggccuccauccuccacgagguccgccccgucaccuccggcugcuuccccaucaugcacgaccgcaccaagauccgccagcucgccaaccuccuccgcggcuacgagaacauccgccucuccacccagaacgucaucgacgccgagaaggcccccggcggccccuaccgccucggcaccuccggcuccugccccaacgccaccuccaaguccggcuucuucgccaccauggccugggccguccccaaggacaacaacaagaacgccaccaacccccucaccgucgagguccccuacaucugcgccgagggcgaggaccagaucgccgucuggggcuuccacuccgacaacaagacccagaugaagaaccucuacggcgacuccaacccccagaaguucaccuccuccgccaacggcgucaccacccacuacgucucccagaucggcggcuuccccgaccagaccgaggacggcggccucccccaguccggccgcaucgucgucgacuacaugaugcagaagcccggcaagaccggcaccaucgucuaccagcgcggcguccuccucccccagaaggucuggugcgccuccggccgcuccaaggucaucaagggcucccucccccucaucggcgaggccgacugccuccacgagaaguacggcggccucaacaaguccaagcccuacuacaccggcgagcacgccaaggccaucggcaacugccccaucugggucaagaccccccucaagcucgccaacggcaccaaguaccgcccccccgccaagcuccucaaggagcgcggcuucuucggcgccaucgccggcuuccucgagggcggcugggagggcaugaucgccggcuggcacggcuacaccucccacggcgcccacggcgucgccgucgccgccgaccucaaguccacccaggaggccaucaacaagaucaccaagaaccucaacucccucuccgagcucgaggucaagaaccuccagcgccucuccggcgccauggacgagcuccacaacgagauccucgagcucgacgagaaggucgacgaccuccgcgccgacaccaucuccucccagaucgagcucgccguccuccucuccaacgagggcaucaucaacuccgaggacgagcaccuccucgcccucgagcgcaagcucaagaagaugcucggccccuccgccgucgacaucggcaacggcugcuucgagaccaagcacaagugcaaccagaccugccucgaccgcaucgccgccggcaccuucaacgccggcgaguucucccuccccaccuucgacucccucaacaucaccgccgccucccucaacgacgacggccucgacaaccacaccauccuccucuacuacuccaccgccgccuccucccucgccgucacccucaugcucgccaucuucaucgucuacauggucucccgcgacaacgucuccugcuccaucugccucuga

SEQ ID NO: 122936 - RNA, 1755 nt, Artificial Sequence; identical to SEQ ID NO: 122890
  derived and/or modified CDS sequence (opt2) from hemagglutinin__InfluenzaB__AGL09873

SEQ ID NO: 122937 - RNA, 1758 nt, Artificial Sequence; identical to SEQ ID NO: 122923
  derived and/or modified CDS sequence (opt2) from hemagglutinin__InfluenzaB__AGL09874

SEQ ID NO: 122938 - RNA, 1758 nt, Artificial Sequence; identical to SEQ ID NO: 122908
  derived and/or modified CDS sequence (opt2) from hemagglutinin__InfluenzaB__AGO02695

SEQ ID NO: 122939 - RNA, 1755 nt, Artificial Sequence; identical to SEQ ID NO: 122890
  derived and/or modified CDS sequence (opt2) from hemagglutinin__InfluenzaB__AGQ16249

SEQ ID NO: 122940 - RNA, 1758 nt, Artificial Sequence; identical to SEQ ID NO: 122923
  derived and/or modified CDS sequence (opt2) from hemagglutinin__InfluenzaB__AGQ16250

SEQ ID NO: 122941 - RNA, 1758 nt, Artificial Sequence; identical to SEQ ID NO: 122923
  derived and/or modified CDS sequence (opt2) from hemagglutinin__InfluenzaB__AGQ16251

SEQ ID NO: 122942 - RNA, 1755 nt, Artificial Sequence
  derived and/or modified CDS sequence (opt2) from hemagglutinin__InfluenzaB__AGQ16252
augaaggccaucaucguccuccucauggucgucaccuccaacgccgaccgcaucugcaccggcaucaccuccuccaacuccccccacgucgucaagaccgccacccagggcgaggucaacgucaccggcgucaucccccucaccaccacccccgccaaguccuacuucgccaaccucaagggcacccgcacccgcggcaagcucugccccgacugccucaacugcaccgaccucgacgucgcccucggccgccccaugugcgucggcaccacccccuccgccaaggccuccauccuccacgagguccgccccgucaccuccggcugcuuccccaucaugcacgaccgcaccaagauccgccagcuccccaaccuccuccgcggcuacgagaacauccgccucuccacccagaacgucaucgacgccgagaaggcccccggcggccccuaccgccucggcaccuccggcuccugccccaacgccaccuccaagaucggcuucuucgccaccauggccugggccguccccaaggacaacuacaagaacgccaccaacccccucaccgucgagguccccuacaucugcaaggagggcgaggaccagaucaccgucuggggcuuccacuccgacaacaagacccagaugaagaaccucuacggcgacuccaacccccagaaguucaccuccuccgccaacggcgucaccacccacuacgucucccagaucggcgacuuccccgaccagaccgaggacggcggccucccccaguccggccgcaucgucgucgacuacaugaugcagaagcccggcaagaccggcaccaucgucuaccagcgcggcguccuccucccccagaaggucuggugcgccuccggccgcuccaaggucaucaagggcucccucccccucaucggcgaggccgacugccuccacgaggaguacggcggccucaacaaguccaagcccuacuacaccggcaagcacgccaaggccaucggcaacugccccaucugggucaagaccccccucaagcucgccaacggcaccaaguaccgcccccccgccaagcuccucaaggagcgcggcuucuucggcgccaucgccggcuuccucgagggcggcugggagggcaugaucgccggcuggcacggcuacaccucccacggcgcccacggcgucgccgucgccgccgaccucaaguccacccaggaggccaucaacaagaucaccaagaaccucaacucccucuccgagcucgaggucaagaaccuccagcgccucuccggcgccauggacgagcuccacaacgagauccucgagcucgacgagaaggucgacgaccuccgcgccgacaccaucuccucccagaucgagcucgccguccuccucuccaacgagggcaucaucaacuccgaggacgagcaccuccucgcccucgagcgcaagcucaagaagaugcucggccccuccgccgucgacaucggcaacggcugcuucgagaccaagcacaagugcaaccagaccugccucgaccgcaucgccgccggcaccuucaacgccggcgaguucucccuccccaccuucgacucccucaacaucaccgccgccucccucaacgacgacggccucgacaaccacaccauccuccucuacuacuccaccgccgccuccucccucgccgucacccucaugcucgccaucuucaucgucuacauggucucccgcgacaacgucuccugcuccaucugccucuga

SEQ ID NO: 122943 - RNA, 1755 nt, Artificial Sequence; identical to SEQ ID NO: 122890
  derived and/or modified CDS sequence (opt2) from hemagglutinin__InfluenzaB__AGQ16253

SEQ ID NO: 122944 - RNA, 1755 nt, Artificial Sequence
  derived and/or modified CDS sequence (opt2) from hemagglutinin__InfluenzaB__AGQ16255
augaaggccaucaucguccuccucauggucgucaccuccaacgccgaccgcaucugcaccggcaucaccuccuccaacuccccccacgucgucaagaccgccacccagggcgaggucaacgucaccggcgucaucccccucaccaccacccccaccaaguccuacuucgccaaccucaagggcaccaagacccgcggcaagcucugccccgacugccucaacugcaccgaccucgacgucgcccucggccgccccaugugcgucggcaccacccccuccgccaaggccuccauccuccacgagguccgccccgucaccuccggcugcuuccccaucaugcacgaccgcaccaagauccgccagcucgccaaccuccuccgcggcuacgagaacauccgccucuccacccagaacgucaucgacgccgagaaggcccccggcggccccuaccgccucggcaccuccggcuccugccccaacgccaccuccaaguccggcuucuucgccaccauggccugggccguccccaaggacaacaacaagaacgccaccaacccccucaccgucgagguccccuacaucugcgccgagggcgaggaccagaucaccgucuggggcuuccacuccgacaacaagacccagaugaagaaccucuacggcgacuccaacccccagaaguucaccuccuccgccaacggcaucaccacccacuacgucucccagaucggcggcuuccccgaccagaccgaggacggcggccucccccaguccggccgcaucgucgucgacuacaugaugcagaagcccggcaagaccggcaccaucgucuaccagcgcggcguccuccucccccagaaggucuggugcgccuccggccgcuccaaggucaucaagggcucccucccccucaucggcgaggccgacugccuccacgagaaguacggcggccucaacaaguccaagcccuacuacaccggcgagcacgccaaggccaucggcaacugccccaucugggucaagaccccccucaagcucgccaacggcaccaaguaccgcccccccgccaagcuccucaaggagcgcggcuucuucggcgccaucgccggcuuccucgagggcggcugggagggcaugaucgccggcuggcacggcuacaccucccacggcgcccacggcgucgccgucgccgccgaccucaaguccacccaggaggccaucaacaagaucaccaagaaccucaacucccucuccgagcucgaggucaagaaccuccagcgccucuccggcgccauggacgagcuccacaacgagauccucgagcucgacgagaaggucgacgaccuccgcgccgacaccaucuccucccagaucgagcucgccguccuccucuccaacgagggcaucaucaacuccgaggacgagcaccuccucgcccucgagcgcaagcucaagaagaugcucggccccuccgccgucgacaucggcaacggcugcuucgagaccaagcacaagugcaaccagaccugccucgaccgcaucgccgccggcaccuucaacgccggcgaguucucccuccccaccuucgacucccucaacaucaccgccgccucccucaacgacgacggccucgacaaccacaucauccuccucuacuacuccaccgccgccuccucccucgccgucacccucaugcucgccaucuucaucgucuacauggucucccgcgacaacgucuccugcuccaucugccucuga

SEQ ID NO: 122945 - RNA, 1755 nt, Artificial Sequence
  derived and/or modified CDS sequence (opt2) from hemagglutinin__InfluenzaB__AGQ16256
augaaggccaucaucguccuccucauggucgucaccuccaacgccgaccgcaucugcaccggcaucaccuccuccaacuccccccacgucgucaagaccgucacccagggcgaggucaacgucaccggcgucaucccccucaccaccacccccaccaaguccuacuucgccaaccucaagggcaccaagacccgcggcaagcucugccccgacugccucaacugcaccgaccucgacgucgcccucggccgccccaugugcgucggcaccacccccuccgccaaggccuccauccuccacgagguccgccccgucaccuccggcugcuuccccaucaugcacgaccgcaccaagauccgccagcucgccaaccuccuccgcggcuacgagaacauccgccucuccacccagaacgucaucgacgccgagaaggcccccggcggccccuaccgccucggcaccuccggcuccugccccaacgccaccuccaaguccggcuucuucgccaccauggccugggccguccccaaggacuccaacaagaacgccaccaacccccucaccgucgagguccccuacaucugcgccgagggcgaggaccagaucaccgucuggggcuuccacuccgacaacaagacccagaugaagaaccucuacggcgacuccaacccccagaaguucaccuccuccgccaacggcgucaccacccacuacgucucccagaucggcggcuuccccgaccagaccgaggacggcggccucccccaguccggccgcaucgucgucgacuacaugaugcagaagcccggcaagaccggcaccaucgucuaccagcgcggcguccuccucccccagaaggucuggugcgccuccggccgcuccaaggucaucaagggcucccucccccucaucggcgaggccgacugccuccacgagaaguacggcggccucaacaaguccaagcccuacuacaccggcgagcacgccaaggccaucggcaacugccccaucugggucaagaccccccucaagcucgccaacggcaccaaguaccgcccccccgccaagcuccucaaggagcgcggcuucuucggcgccaucgccggcuuccucgagggcggcugggagggcaugaucgccggcuggcacggcuacaccucccacggcgcccacggcgucgccgucgccgccgaccucaaguccacccaggaggccaucaacaagaucaccaagaaccucaacucccucuccgagcucgaggucaagaaccuccagcgccucuccggcgccauggacgagcuccacaacgagauccucgagcucgacgagaaggucgacgaccuccgcgccgacaccaucuccucccagaucgagcucgccguccuccucuccaacgagggcaucaucaacuccgaggacgagcaccuccucgcccucgagcgcaagcucaagaagaugcucggccccuccgccgucgacaucggcaacggcugcuucgagaccaagcacaagugcaaccagaccugccucgaccgcaucgccgccggcaccuucaacgccggcgaguucucccuccccaccuucgacucccucaacaucaccgccgccucccucaacgacgacggccucgacaaccacaccauccuccucuacuacuccaccgccgccuccucccucgccgucacccucaugcucgccaucuucaucgucuacauggucucccgcgacaacgucuccugcuccaucugccucuga

SEQ ID NO: 122946 - RNA, 1755 nt, Artificial Sequence; identical to SEQ ID NO: 122890
  derived and/or modified CDS sequence (opt2) from hemagglutinin__InfluenzaB__AGQ16257

SEQ ID NO: 122947 - RNA, 1755 nt, Artificial Sequence; identical to SEQ ID NO: 122890
  derived and/or modified CDS sequence (opt2) from hemagglutinin__InfluenzaB__AGQ16258

SEQ ID NO: 122948 - RNA, 1755 nt, Artificial Sequence; identical to SEQ ID NO: 122890
  derived and/or modified CDS sequence (opt2) from hemagglutinin__InfluenzaB__AGQ16259

SEQ ID NO: 122949 - RNA, 1755 nt, Artificial Sequence
  derived and/or modified CDS sequence (opt2) from hemagglutinin__InfluenzaB__AGQ16260
augaagaccaucaucguccuccucauggucgucaccuccaacgccgaccgcaucugcaccggcaucaccuccuccaacuccccccacgucgucaagaccgccacccagggcgaggucaacgucaccggcgucaucccccucaccaccacccccaccaaguccuacuucgccaaccucaagggcaccaagacccgcggcaagcucugccccgacugccucaacugcaccgaccucgacgucgcccucggccgccccaugugcgucggcaccacccccuccgccaaggccuccauccuccacgagguccgccccgucaccuccggcugcuuccccaucaugcacgaccgcaccaagauccgccagcucgccaaccuccuccgcggcuacgagaacauccgccucuccucccagaacgucaucgacgccgagaaggcccccggcggccccuaccgccucggcaccuccggcuccugccccaacgccaccuccaaguccggcuucuucgccaccauggccugggccguccccaaggacaacaacaagaacgccaccaacccccucaccgucgagguccccuacaucugcgccgagggcgaggaccagaucaccgucuggggcuuccacuccgacaacaagacccagaugaagaaccucuacggcgacuccaacccccagaaguucaccuccuccgccaacggcgucaccacccacuacgucucccagaucggcggcuuccccgaccagaccgaggacggcggccucccccaguccggccgcaucgucgucgacuacaugaugcagaagcccggcaagaccggcaccaucgucuaccagcgcggcguccuccucccccagaaggucuggugcgccuccggccgcuccaaggucaucaagggcucccucccccucaucggcgaggccgacugccuccacgagaaguacggcggccucaacaaguccaagcccuacuacaccggcgagcacgccaaggccaucggcaacugccccaucugggucaagaccccccucaagcucgccaacggcaccaaguaccgcccccccgccaagcuccucaaggagcgcggcuucuucggcgccaucgccggcuuccucgagggcggcugggagggcaugaucgccggcuggcacggcuacaccucccacggcgcccacggcgucgccgucgccgccgaccucaaguccacccaggaggccaucaacaagaucaccaagaaccucaacucccucuccgagcucgaggucaagaaccuccagcgccucuccggcgccauggacgagcuccacaacgagauccucgagcucgacgagaaggucgacgaccuccgcgccgacaccaucuccucccagaucgagcucgccguccuccucuccaacgagggcaucaucaacuccgaggacgagcaccuccucgcccucgagcgcaagcucaagaagaugcucggccccuccgccgucgacaucggcaacggcugcuucgagaccaagcacaagugcaaccagaccugccucgaccgcaucgccgccggcaccuucaacgccggcgaguucucccuccccaccuucgacucccucaacaucaccgccgccucccucaacgacgacggccucgacaaccacaccauccuccucuacuacuccaccgccgccuccucccucgccgucacccucaugcucgccaucuucaucgucuacauggucucccgcgacaacgucuccugcuccaucugccucuga

SEQ ID NO: 122950 - RNA, 1755 nt, Artificial Sequence; identical to SEQ ID NO: 122890
  derived and/or modified CDS sequence (opt2) from hemagglutinin__InfluenzaB__AGQ16261

SEQ ID NO: 122951 - RNA, 1755 nt, Artificial Sequence; identical to SEQ ID NO: 122890
  derived and/or modified CDS sequence (opt2) from hemagglutinin__InfluenzaB__AGQ16262

SEQ ID NO: 122952 - RNA, 1758 nt, Artificial Sequence; identical to SEQ ID NO: 122923
  derived and/or modified CDS sequence (opt2) from hemagglutinin__InfluenzaB__AGQ16263

SEQ ID NO: 122953 - RNA, 1758 nt, Artificial Sequence; identical to SEQ ID NO: 122923
  derived and/or modified CDS sequence (opt2) from hemagglutinin__InfluenzaB__AGQ16264

SEQ ID NO: 122954 - RNA, 1755 nt, Artificial Sequence; identical to SEQ ID NO: 122935
  derived and/or modified CDS sequence (opt2) from hemagglutinin__InfluenzaB__AGQ16265

SEQ ID NO: 122955 - RNA, 1755 nt, Artificial Sequence
  derived and/or modified CDS sequence (opt2) from hemagglutinin__InfluenzaB__AGQ16266
augaaggccaucaucguccuccucauggucgucaccuccaacgccgaccgcaucugcaccggcaucaccuccuccaacuccccccacgucgucaagaccgccacccagggcgaggucaacgucaccggcgucaucccccucaccaccacccccaccaaguccuacuucgccaaccucaagggcaccaagacccgcggcaagcucugccccgacugccucaacugcaccgaccucgacgucgcccucggccgccccaugugcgucggcaccacccccuccgccaaggccuccauccuccacgagguccgccccgucaccuccggcugcuuccccaucaugcacgaccgcaccaagauccgccagcucgccaaccuccuccgcggcuacgagaacauccgccucuccacccagaacgucaucgacgccgagaaggcccccggcggccccuaccgccucggcaccuccggcuccugccccaacgccaccuccaaguccggcuucuucgccaccauggccugggccguccccaaggacaacaacaagaacgccaccaacccccucaccgucgagguccccuacaucugcgccgagggcgaggaccagaucaccgucuggggcuuccacuccgacaacaagacccagaugaagaaccucuacggcgacuccaacccccagaaguucaccuccuccgccaacggcgucaccacccacuacgucucccaggucggcggcuuccccgaccagaccgaggacggcggccucccccaguccggccgcaucgucgucgacuacaugaugcagaagcccggcaagaccggcaccaucgucuaccagcgcggcguccuccucccccagaaggucuggugcgccuccggccgcuccaaggucaucaagggcucccucccccucaucggcgaggccgacugccuccacgagaaguacggcggccucaacaaguccaagcccuacuacaccggcgagcacgccaaggccaucggcaacugccccaucugggucaagaccccccucaagcucgccaacggcaccaaguaccgcccccccgccaagcuccucaaggagcgcggcuucuucggcgccaucgccggcuuccucgagggcggcugggagggcaugaucgccggcuggcacggcuacaccucccacggcgcccacggcgucgccgucgccgccgaccucaaguccacccaggaggccaucaacaagaucaccaagaaccucaacucccucuccgagcucgaggucaagaaccuccagcgccucuccggcgccauggacgagcuccacaacgagauccucgagcucgacgagaaggucgacgaccuccgcgccgacaccaucuccucccagaucgagcucgccguccuccucuccaacgagggcaucaucaacuccgaggacgagcaccuccucgcccucgagcgcaagcucaagaagaugcucggccccuccgccgucgacaucggcaacggcugcuucgagaccaagcacaagugcaaccagaccugccucgaccgcaucgccgccggcaccuucaacgccggcgaguucucccuccccaccuucgacucccucaacaucaccgccgccucccucaacgacgacggccucgacaaccacaccauccuccucuacuacuccaccgccgccuccucccucgccgucacccucaugcucgccaucuucaucgucuacauggucucccgcgacaacgucuccugcuccaucugccucuga

SEQ ID NO: 122956 - RNA, 1755 nt, Artificial Sequence; identical to SEQ ID NO: 122935
  derived and/or modified CDS sequence (opt2) from hemagglutinin__InfluenzaB__AGQ16267

SEQ ID NO: 122957 - RNA, 1755 nt, Artificial Sequence; identical to SEQ ID NO: 122935
  derived and/or modified CDS sequence (opt2) from hemagglutinin__InfluenzaB__AGQ16268

SEQ ID NO: 122958 - RNA, 1758 nt, Artificial Sequence; identical to SEQ ID NO: 122908
  derived and/or modified CDS sequence (opt2) from hemagglutinin__InfluenzaB__AGQ16269

SEQ ID NO: 122959 - RNA, 1755 nt, Artificial Sequence; identical to SEQ ID NO: 122935
  derived and/or modified CDS sequence (opt2) from hemagglutinin__InfluenzaB__AGQ16270

SEQ ID NO: 122960 - RNA, 1755 nt, Artificial Sequence
  derived and/or modified CDS sequence (opt2) from hemagglutinin__InfluenzaB__AGQ16272
augaaggccaucaucguccuccucauggucgucaccuccaacgccgaccgcaucugcaccggcaucaccuccuccaacuccccccacgucgucaagaccgccacccagggcgaggucaacgucaccggcgucaucccccucaccaccacccccaccaaguccuacuucgccaaccucaagggcaccaagacccgcggcaagcucugccccgacugccucaacugcaccgaccucgacgucgcccucggccgccccaugugcgucggcaccacccccuccgccaaggccuccauccuccacgagguccgccccgucaccuccggcugcuuccccaucaugcacgaccgcaccaagauccgccagcucgccaaccuccuccgcggcuacgagaacauccgccucuccacccagaacgucaucgacgccgagaaggcccccggcggccccuaccgccucggcaccuccggcuccugccccaacgccaccuccaaguccggcuucuucgccaccauggccugggccgucccccgcgacaacaacaagaacgccaccaacccccucaccgucgagguccccuacaucugcgaggagggcgaggaccagaucaccgucuggggcuuccacuccgacaacaagacccagaugaagaaccucuacggcgacuccaacccccagaaguucaccuccuccgccaacggcgucaccacccacuacgucucccagaucggcggcuuccccgaccagaccgaggacggcggccucccccaguccggccgcaucgucgucgacuacaugaugcagaagcccggcaagaccggcaccaucgucuaccagcgcggcguccuccucccccagaaggucuggugcgccuccggccgcuccaaggucaucaagggcucccucccccucaucggcgaggccgacugccuccacgagaaguacggcggccucaacaaguccaagcccuacuacaccggcgagcacgccaaggccaucggcaacugccccaucugggucaagaccccccucaagcucgccaacggcaccaaguaccgcccccccgccaagcuccucaaggagcgcggcuucuucggcgccaucgccggcuuccucgagggcggcugggagggcaugaucgccggcuggcacggcuacaccucccacggcgcccacggcgucgccgucgccgccgaccucaaguccacccaggaggccaucaacaagaucaccaagaaccucaacucccucuccgagcucgaggucaagaaccuccagcgccucuccggcgccauggacgagcuccacaacgagauccucgagcucgacgagaaggucgacgaccuccgcgccgacaccaucuccucccagaucgagcucgccguccuccucuccaacgagggcaucaucaacuccgaggacgagcaccuccucgcccucgagcgcaagcucaagaagaugcucggccccuccgccgucgacaucggcaacggcugcuucgagaccaagcacaagugcaaccagaccugccucgaccgcaucgccgccggcaccuucaacgccggcgaguucucccuccccaccuucgacucccucaacaucaccgccgccucccucaacgacgacggccucgacaaccacaccauccuccucuacuacuccaccgccgccuccucccucgccgucacccucaugcucgccaucuucaucgucuacauggucucccgcgacaacgucuccugcuccaucugccucuga

SEQ ID NO: 122961 - RNA, 1755 nt, Artificial Sequence; identical to SEQ ID NO: 122890
  derived and/or modified CDS sequence (opt2) from hemagglutinin__InfluenzaB__AGQ16273

SEQ ID NO: 122962 - RNA, 1755 nt, Artificial Sequence; identical to SEQ ID NO: 122890
  derived and/or modified CDS sequence (opt2) from hemagglutinin__InfluenzaB__AGQ16274

SEQ ID NO: 122963 - RNA, 1755 nt, Artificial Sequence; identical to SEQ ID NO: 122890
  derived and/or modified CDS sequence (opt2) from hemagglutinin__InfluenzaB__AGQ16275

SEQ ID NO: 122964 - RNA, 1755 nt, Artificial Sequence; identical to SEQ ID NO: 122890
  derived and/or modified CDS sequence (opt2) from hemagglutinin__InfluenzaB__AGQ16276

SEQ ID NO: 122965 - RNA, 1755 nt, Artificial Sequence; identical to SEQ ID NO: 122935
  derived and/or modified CDS sequence (opt2) from hemagglutinin__InfluenzaB__AGQ16277

SEQ ID NO: 122966 - RNA, 1755 nt, Artificial Sequence; identical to SEQ ID NO: 122935
  derived and/or modified CDS sequence (opt2) from hemagglutinin__InfluenzaB__AGQ16278

SEQ ID NO: 122967 - RNA, 1755 nt, Artificial Sequence; identical to SEQ ID NO: 122935
  derived and/or modified CDS sequence (opt2) from hemagglutinin__InfluenzaB__AGQ16279

SEQ ID NO: 122968 - RNA, 1755 nt, Artificial Sequence; identical to SEQ ID NO: 122935
  derived and/or modified CDS sequence (opt2) from hemagglutinin__InfluenzaB__AGQ16280

SEQ ID NO: 122969 - RNA, 1755 nt, Artificial Sequence
  derived and/or modified CDS sequence (opt2) from hemagglutinin__InfluenzaB__AGQ16281
augaaggccaucaucguccuccucauggucgucaccuccaacgccgaccgcaucugcaccggcaucaccuccuccaacuccccccacgucgucaagaccgccacccagggcgaggucaacgucaccggcgucaucccccucaccaccacccccaccaaguccuacuucgccaaccucaagggcaccaagacccgcggcaagcucugccccgacugccucaacugcaccgaccucgacgucgcccucggccgccccaugugcgucggcaccacccccuccgccaaggccuccauccuccacgagguccgccccgucaccuccggcugcuuccccaucaugcacgaccgcaccaagauccgccagcucgccaaccuccuccgcggcuacgagaacauccgccucuccacccagaacgucaucgacgccgagaaggcccccggcggccccuaccgccucggcaccuccggcuccugccccaacgccaccuccaaguccggcuucuucgccaccauggccugggccguccccaaggacaacaacaagaacgccaccaacccccucaccgucgagguccccuacaucugcgccgagggcgaggaccagaucaccgucuggggcuuccacuccgacaacaagacccagaugaagaaccucuacggcgacuccaacccccagaaguucaccuccuccgccaacggcgucaccacccacuacgucucccagaucggcuccuuccccgaccagaccgaggacggcggccucccccaguccggccgcaucgucgucgacuacaugaugcagaagcccggcaagaccggcaccaucgucuaccagcgcggcguccuccucccccagaaggucuggugcgccuccggccgcuccaaggucaucaagggcucccucccccucaucggcgaggccgacugccuccacgagaaguacggcggccucaacaaguccaagcccuacuacaccggcgagcacgccaaggccaucggcaacugccccaucugggucaagaccccccucaagcucgccaacggcaccaaguaccgcccccccgccaagcuccucaaggagcgcggcuucuucggcgccaucgccggcuuccucgagggcggcugggagggcaugaucgccggcuggcacggcuacaccucccacggcgcccacggcgucgccgucgccgccgaccucaaguccacccaggaggccaucaacaagaucaccaagaaccucaacucccucuccgagcucgaggucaagaaccuccagcgccucuccggcgccauggacgagcuccacaacgagauccucgagcucgacgagaaggucgacgaccuccgcgccgacaccaucuccucccagaucgagcucgccguccuccucuccaacgagggcaucaucaacuccgaggacgagcaccuccucgcccucgagcgcaagcucaagaagaugcucggccccuccgccgucgacaucggcaacggcugcuucgagaccaagcacaagugcaaccagaccugccucgaccgcaucgccgccggcaccuucaacgccggcgaguucucccuccccaccuucgacucccucaacaucaccgccgccucccucaacgacgacggccucgacaaccacaccauccuccucuacuacuccaccgccgccuccucccucgccgucacccucaugcucgccaucuucaucgucuacauggucucccgcgacaacgucuccugcuccaucugccucuga

SEQ ID NO: 122970 - RNA, 1755 nt, Artificial Sequence
  derived and/or modified CDS sequence (opt2) from hemagglutinin__InfluenzaB__AGQ16282
augaaggccaucaucguccuccucauggucgucaccuccaacgccgaccgcaucugcaccggcaucaccuccuccaacuccccccacgucgucaagaccgccacccagggcgaggucaacgucaccggcgucaucccccucaccaccacccccaccaaguccuacuucgccaaccucaagggcaccaagacccgcggcaagcucugccccgacugccucaacugcaccgaccucgacgucgcccucggccgccccaugugcgucggcaccacccccuccgccaaggccuccauccuccacgagguccgccccgucaccuccggcugcuuccccaucaugcacgaccgcaccaagauccgccagcucgccaaccuccuccgcggcuacgagaacauccgccucuccacccagaacgucaucgacgccgagaaggcccccggcggccccuaccgccucggcaccuccggcuccugccccaacgccaccuccaaguccggcuucuucgccaccauggccugggccguccccaagggcaacaacaagaacgccaccaacccccucaccgucgagguccccuacaucugcgccgagggcgaggaccagaucaccgucuggggcuuccacuccgacaacaagacccagaugaagaaccucuacggcgacuccaacccccagcgcuucaccuccuccgccaacggcgucaccacccacuacgucucccagaucggcggcuuccccgaccagaccgaggacggcggccucccccaguccggccgcaucgucgucgacuacaugaugcagaagcccggcaagaccggcaccaucgucuaccagcgcggcguccuccucccccagaaggucuggugcgccuccggccgcuccaaggucaucaagggcucccucccccucaucggcgaggccgacugccuccacgagaaguacggcggccucaacaaguccaagcccuacuacaccggcgagcacgccaaggccaucggcaacugccccaucugggucaagaccccccucaagcucgccaacggcaccaaguaccgcccccccgccaagcuccucaaggagcgcggcuucuucggcgccaucgccggcuuccucgagggcggcugggagggcaugaucgccggcuggcacggcuacaccucccacggcgcccacggcgucgccgucgccgccgaccucaaguccacccaggaggccaucaacaagaucaccaagaaccucaacucccucuccgagcucgaggucaagaaccuccagcgccucuccggcgccauggacgagcuccacaacgagauccucgagcucgacgagaaggucgacgaccuccgcgccgacaccaucuccucccagaucgagcucgccguccuccucuccaacgagggcaucaucaacuccgaggacgagcaccuccucgcccucgagcgcaagcucaagaagaugcucggccccuccgccgucgacaucggcaacggcugcuucgagaccaagcacaagugcaaccagaccugccucgaccgcaucgccgccggcaccuucaacgccggcgaguucucccuccccaccuucgacucccucaacaucaccgccgccucccucaacgacgacggccucgacaaccacaccauccuccucuacuacuccaccgccgccuccucccucgccgucacccucaugcucgccaucuucaucgucuacauggucucccgcgacaacgucuccugcuccaucugccucuga

SEQ ID NO: 122971 - RNA, 1755 nt, Artificial Sequence
  derived and/or modified CDS sequence (opt2) from hemagglutinin__InfluenzaB__AGQ16283
augaaggccaucaucguccuccucauggucgucaccuccaacgccgaccgcaucugcaccggcaucaccuccuccaacuccccccacgucgucaagaccgccacccacggcgaggucaacgucaccggcgucaucccccucaccaccacccccaccaaguccuacuucgccaaccucaagggcaccaagacccgcggcaagcucugccccgacugccucaacugcaccgaccucgacgucgcccucggccgccccaugugcgucggcaccacccccuccgccaaggccuccauccuccacgagguccgccccgucaccuccggcugcuuccccaucaugcacgaccgcaccaagauccgccagcucgccaaccuccuccgcggcuacgagaacauccgccucuccacccagaacgucaucgacgccgagaaggcccccggcggccccuaccgccucggcaccuccggcuccugccccaacgccaccuccaaguccggcuucuucgccaccauggccugggccguccccaaggacaacaacaagaacgccaccaacccccucaccgucgagguccccuacaucugcgccgagggcgaggaccagaucgccgucuggggcuuccacuccgacaacaagacccagaugaagaaccucuacggcgacuccaacccccagaaguucaccuccuccgccaacggcgucaccacccacuacgucucccagaucggcggcuuccccgaccagaccgaggacggcggccucccccaguccggccgcaucgucgucgacuacaugaugcagaagcccggcaagaccggcaccaucgucuaccagcgcggcguccuccucccccagaaggucuggugcgccuccggccgcuccaaggucaucaagggcucccucccccucaucggcgaggccgacugccuccacgagaaguacggcggccucaacaaguccaagcccuacuacaccggcgagcacgccaaggccaucggcaacugccccaucugggucaagaccccccucaagcucgccaacggcaccaaguaccgcccccccgccaagcuccucaaggagcgcggcuucuucggcgccaucgccggcuuccucgagggcggcugggagggcaugaucgccggcuggcacggcuacaccucccacggcgcccacggcgucgccgucgccgccgaccucaaguccacccaggaggccaucaacaagaucaccaagaaccucaacucccucuccgagcucgaggucaagaaccuccagcgccucuccggcgccauggacgagcuccacaacgagauccucgagcucgacgagaaggucgacgaccuccgcgccgacaccaucuccucccagaucgagcucgccguccuccucuccaacgagggcaucaucaacuccgaggacgagcaccuccucgcccucgagcgcaagcucaagaagaugcucggccccuccgccgucgacaucggcaacggcugcuucgagaccaagcacaagugcaaccagaccugccucgaccgcaucgccgccggcaccuucaacgccggcgaguucucccuccccaccuucgacucccucaacaucaccgccgccucccucaacgacgacggccucgacaaccacaccauccuccucuacuacuccaccgccgccuccucccucgccgucacccucaugcucgccaucuucaucgucuacauggucucccgcgacaacgucuccugcuccaucugccucuga

SEQ ID NO: 122972 - RNA, 1758 nt, Artificial Sequence
  derived and/or modified CDS sequence (opt2) from hemagglutinin__InfluenzaB__AGQ16284
augaaggccaucaucguccuccucauggucgucaccuccaacgccgaccgcaucugcaccggcaucaccuccuccaacuccccccacgucgucaagaccgccacccagggcgaggucaacgucaccggcgucaucccccucaccaccacccccaccaagucccacuucgccaaccucaagggcaccgagacccgcggcaagcucugccccaagugccucaacugcaccgaccucgacgucgcccucggccgccccaagugcaccggcaagauccccuccgcccgcgucuccauccuccacgaggcccgccccgucaccuccggcugcuuccccaucaugcacgaccgcaccaagauccgccagcuccccaaccuccuccgcggcuacgagcacaucaagcucuccacccacaacgucaucaacgccgagaacgcccccggcggccccuacaagaucggcaccuccggcuccugccccaacgucaccaacggcaacggcuucuucgccaccauggccugggccguccccaagaacgacaagaacaagaccgccaccaacccccucaccaucgagguccccuacaucugcaccgagggcgaggaccagaucaccgucuggggcuuccacuccgacaacgagacccagauggccaagcucuacggcgacuccaagccccagaaguucaccuccuccgccaacggcgucaccacccacuacgucucccagaucggcggcuuccccaaccagaccgaggacggcggccucccccaguccggccgcaucgucgucgacuacaugguccagaaguccggcaagaccggcaccaucaccuaccagcgcggcauccuccucccccagaaggucuggugcgccuccggccgcuccaaggucaucaagggcucccucccccucaucggcgaggccgacugccuccacgagaaguacggcggccucaacaaguccaagcccuacuacaccggcgagcacgccaaggccaucggcaacugccccaucugggucaagaccccccucaagcucgccaacggcaccaaguaccgcccccccgccaagcuccucaaggagcgcggcuucuucggcgccaucgccggcuuccucgagggcggcugggagggcaugaucgccggcuggcacggcuacaccucccacggcgcccacggcgucgccgucgccgccgaccucaaguccacccaggaggccaucaacaagaucaccaagaaccucaacucccucuccgagcucgaggucaagaaccuccagcgccucuccggcgccauggacgagcuccacaacgagauccucgagcucgacgagaaggucgacgaccuccgcgccgacaccaucuccucccagaucgagcucgccguccuccucuccaacgagggcaucaucaacuccgaggacgagcaccuccucgcccucgagcgcaagcucaagaagaugcucggccccuccgccgucgagaucggcaacggcugcuucgagaccaagcacaagugcaaccagaccugccucgaccgcaucgccgccggcaccuucgacgccggcgaguucucccuccccaccuucgacucccucaacaucaccgccgccucccucaacgacgacggccucgacaaccacaccauccuccucuacuacuccaccgccgccuccucccucgccgucacccucaugaucgccaucuucgucgucuacauggucucccgcgacaacgucuccugcuccaucugccucuga

SEQ ID NO: 122973 - RNA, 1755 nt, Artificial Sequence; identical to SEQ ID NO: 122935
  derived and/or modified CDS sequence (opt2) from hemagglutinin__InfluenzaB__AGQ16285

SEQ ID NO: 122974 - RNA, 1755 nt, Artificial Sequence; identical to SEQ ID NO: 122935
  derived and/or modified CDS sequence (opt2) from hemagglutinin__InfluenzaB__AGQ16286

SEQ ID NO: 122975 - RNA, 1755 nt, Artificial Sequence
  derived and/or modified CDS sequence (opt2) from hemagglutinin__InfluenzaB__AGQ16287
augaaggccaucaucguccuccucauggucgucaccuccaacgccgaccgcaucugcaccggcaucaccuccuccaacuccccccacgucgucaagaccgccacccagggcgaggucaacgucaccggcgucaucccccucaccaccacccccaccaaguccuacuucgccaaccucaagggcaccaagacccgcggcaagcucugccccgacugccucaacugcaccgaccucgacgucgcccucggccgccccaugugcgucggcaccacccccuccgccaaggccuccauccuccacgagguccgccccgucaccuccggcugcuuccccaucaugcacgaccgcaccaagauccgccagcucgccaaccuccuccgcggcuacgagaacauccgccucuccacccagaacgucaucgacgccgagaaggcccccggcggccccuaccgccucggcaccuccggcuccugccccaacgccaccuccaaguccggcuucuucgccaccauggccugggccguccccaaggacaacaacaagaacgccaccaacccccucaccgucgagguccccuacaucugcgaggagggcgaggaccagaucaccgucuggggcuuccacuccgacaacaagacccagaugaagaaccucuacggcgacuccaacccccagaaguucaccuccuccgccaacggcgucaccacccacuacgucucccagaucggcggcuuccccgaccagaccgaggacggcggccucccccaguccggccgcaucgucgucgacuacaugaugcagaagcccggcaagaccggcaccaucgucuaccagcgcggcguccuccucccccagaaggucuggugcgccuccggccgcuccaaggucaucaagggcucccucccccucaucggcgaggccgacugccuccacgagaaguacggcggccucaacaaguccaagcccuacuacaccggcgagcacgccaaggccaucggcaacugccccaucugggucaagaccccccucaagcucgccaacggcaccaaguaccgcccccccgccaagcuccucaaggagcgcggcuucuucggcgccaucgccggcuuccucgagggcggcugggagggcaugaucgccggcuggcacggcuacaccucccacggcgcccacggcgucgccgucgccgccgaccucaaguccacccaggaggccaucaacaagaucaccaagaaccucaacucccucuccgagcucgaggucaagaaccuccagcgccucuccggcgccauggacgagcuccacaacgagauccucgagcucgacgagaaggucgacgaccuccgcgccgacaccaucuccucccagaucgagcucgccguccuccucuccaacgagggcaucaucaacuccgaggacgagcaccuccucgcccucgagcgcaagcucaagaagaugcucggccccuccgccgucgacaucggcaacggcugcuucgagaccaagcacaagugcaaccagaccugccucgaccgcaucgccgccggcaccuucaacgccggcgaguucucccuccccaccuucgacucccucaacaucaccgccgccucccucaacgacgacggccucgacaaccacaccauccuccucuacuacuccaccgccgccuccucccucgccgucacccucaugcucgccaucuucaucgucuacauggucucccgcgacaacgucuccugcuccaucugccucuga

SEQ ID NO: 122976 - RNA, 1755 nt, Artificial Sequence; identical to SEQ ID NO: 122890
  derived and/or modified CDS sequence (opt2) from hemagglutinin__InfluenzaB__AGQ16289

SEQ ID NO: 122977 - RNA, 1755 nt, Artificial Sequence; identical to SEQ ID NO: 122890
  derived and/or modified CDS sequence (opt2) from hemagglutinin__InfluenzaB__AGQ16290

SEQ ID NO: 122978 - RNA, 1755 nt, Artificial Sequence
  derived and/or modified CDS sequence (opt2) from hemagglutinin__InfluenzaB__AGQ16291
augaaggccaucaucguccuccucauggucgucaccuccaacgccgaccgcaucugcaccggcaucaccuccuccaacuccccccacgucgucaagaccgccacccagggcgaggucaacgucaccggcgucaucccccucaccaccacccccaccaaguccuacuucgccaaccucaagggcaccaagacccgcggcaagcucugccccgacugccucaacugcaccgaccucgacgucgcccucggccgccccaugugcgucggcaccacccccuccgccaaggccuccauccuccacgagguccgccccgucaccuccggcugcuuccccaucaugcacgaccgcaccaagauccgccagcucgccaaccuccuccgcggcuacgagaacauccgccucuccacccagaacgucaucgacgccgagaaggcccccggcggccccuaccgccucggcaccuccggcuccugccccaacaccaccuccaaguccggcuucuucgccaccauggccugggccguccccaaggacaacaacaagaacgccaccaacccccucaccgucgagguccccuacaucugcgccgagggcgaggaccagaucgccgucuggggcuuccacuccgacaacaagacccagaugaagaaccucuacggcgacuccaacccccagaaguucaccuccuccgccaacggcgucaccacccacuacgucucccagaucggcggcuuccccgaccagaccgaggacggcggccucccccaguccggccgcaucgucgucgacuacaugaugcagaagcccggcaagaccggcaccaucgucuaccagcgcggcguccuccucccccagaaggucuggugcgccuccggccgcuccaaggucaucaagggcucccucccccucaucggcgaggccgacugccuccacgagaaguacggcggccucaacaaguccaagcccuacuacaccggcgagcacgccaaggccaucggcaacugccccaucugggucaagaccccccucaagcucgccaacggcaccaaguaccgcccccccgccaagcuccucaaggagcgcggcuucuucggcgccaucgccggcuuccucgagggcggcugggagggcaugaucgccggcuggcacggcuacaccucccacggcgcccacggcgucgccgucgccgccgaccucaaguccacccaggaggccaucaacaagaucaccaagaaccucaacucccucuccgagcucgaggucaagaaccuccagcgccucuccggcgccauggacgagcuccacaacgagauccucgagcucgacgagaaggucgacgaccuccgcgccgacaccaucuccucccagaucgagcucgccguccuccucuccaacgagggcaucaucaacuccgaggacgagcaccuccucgcccucgagcgcaagcucaagaagaugcucggccccuccgccgucgacaucggcaacggcugcuucgagaccaagcacaagugcaaccagaccugccucgaccgcaucgccgccggcaccuucaacgccggcgaguucucccuccccaccuucgacucccucaacaucaccgccgccucccucaacgacgacggccucgacaaccacaccauccuccucuacuacuccaccgccgccuccucccucgccgucacccucaugcucgccaucuucaucgucuacauggucucccgcgacaacgucuccugcuccaucugccucuga

SEQ ID NO: 122979 - RNA, 1755 nt, Artificial Sequence
  derived and/or modified CDS sequence (opt2) from hemagglutinin__InfluenzaB__AGQ16292
augaaggccaucaucguccuccucauggucgucaccuccaacgccgaccgcaucugcaccggcaucaccuccuccaacuccccccacgucgucaagaccgccacccagggcgaggucaacgucaccggcgucaucccccucaccaccacccccaccaaguccuacuucgccaaccucaagggcaccaagacccgcggcaagcucugccccgacugccucaacugcaccgaccucgacgucgcccucggccgccccaugugcgucggcaccacccccuccgccaaggccuccauccuccacgagguccgccccgucaccuccggcugcuuccccaucaugcacgaccgcaccaagauccgccagcucgccaaccuccuccgcggcuacgagaacauccgccucuccacccagaacgucaucgacgccgagaaggcccccggcggccccuaccgccucggcaccuccggcuccugccccaacgccaccuccaaguccggcuucuucgccaccauggccugggccguccccaaggacaacaacaagaacgccaccaacccccucaccgucgagguccccuacaucugcgccgagggcgaggaccagaucgccgucuggggcuuccacuccgacaacaagacccagaugaagaaccucuacggcgacuccaacccccagaaguucaccuccuccgccaacggcgucaccacccacuacgucucccagaucggcggcuuccccgaccagaccgaggacggcggccucccccaguccggccgcaucgucgucgacuacaugaugcagaagcccggcaagaccggcaccaucgucuaccagcgcggcguccuccucccccagaaggucuggugcgccuccggccgcuccaaggucaucaagggcucccucccccucaucggcgaggccgacugccuccacgagaaguacggcggccucaacaaguccaagcccuacuacaccggcgagcacgccaaggccaucggcaacugccccaucugggucaagaccccccucaagcucgccaacggcaccaaguaccgcccccccgccaagcuccucaaggagcgcggcuucuucggcgccaucgccggcuuccucgagggcggcugggagggcaugaucgccggcuggcacggcuacaccucccacggcgcccacggcgucgccgucgccgccgaccucaaguccacccaggaggccaucaacaagaucaccaagaaccucaacucccucuccgagcucgagaucaagaaccuccagcgccucuccggcgccauggacgagcuccacaacgagauccucgagcucgacgagaaggucgacgaccuccgcgccgacaccaucuccucccagaucgagcucgccguccuccucuccaacgagggcaucaucaacuccgaggacgagcaccuccucgcccucgagcgcaagcucaagaagaugcucggccccuccgccgucgacaucggcaacggcugcuucgagaccaagcacaagugcaaccagaccugccucgaccgcaucgccgccggcaccuucaacgccggcgaguucucccuccccaccuucgacucccucaacaucaccgccgccucccucaacgacgacggccucgacaaccacaccauccuccucuacuacuccaccgccgccuccucccucgccgucacccucaugcucgccaucuucaucgucuacauggucucccgcgacaacgucuccugcuccaucugccucuga

SEQ ID NO: 122980 - RNA, 1755 nt, Artificial Sequence; identical to SEQ ID NO: 122979
  derived and/or modified CDS sequence (opt2) from hemagglutinin__InfluenzaB__AGQ16293

SEQ ID NO: 122981 - RNA, 1755 nt, Artificial Sequence; identical to SEQ ID NO: 122979
  derived and/or modified CDS sequence (opt2) from hemagglutinin__InfluenzaB__AGQ16294

SEQ ID NO: 122982 - RNA, 1758 nt, Artificial Sequence
  derived and/or modified CDS sequence (opt2) from hemagglutinin__InfluenzaB__AGQ16295
augaaggccaucaucguccuccucauggucgucaccuccaacgccgaccgcaucugcaccggcaucaccuccuccaacuccccccacgucgucaagaccgccacccagggcgaggucaacgucaccggcgccaucccccucaccaccacccccaccaagucccacuucgccaaccucaagggcaccgagacccgcggcaagcucugccccaagugccucaacugcaccgaccucgacgucgcccucggccgccccaagugcaccggcaagauccccuccgcccgcgucuccauccuccacgagguccgccccgucaccuccggcugcuuccccaucaugcacgaccgcaccaagauccgccagcuccccaaccuccuccgcggcuacgagcacauccgccucuccacccacaacgucaucaacgccgagaacgcccccggcggccccuacaagaucggcaccuccggcuccugccccaacgucaccaacggcaacggcuucuucgccaccauggccugggccguccccaagaacgacaagaacaagaccgagaccaacccccucaccaucgagguccccuacaucugcaccgaggaggaggaccagaucaccgucuggggcuuccacuccgacaacgagacccagauggccaagcucuacggcgacuccaagccccagaaguucaccuccuccgccaacggcgucaccacccacuacgucucccagaucggcggcuuccccaaccagaccgaggacggcggccucccccaguccggccgcaucgucgucgacuacaugguccagaaguccggcaagaccggcaccaucaccuaccagcgcggcauccuccucccccagaaggucuggugcgccuccggccgcuccaaggucaucaagggcucccucccccucaucggcgaggccgacugccuccacgagaaguacggcggccucaacaaguccaagcccuacuacaccggcgagcacgccaaggccaucggcaacugccccaucugggucaagaccccccucaagcucgccaacggcaccaaguaccgcccccccgccaagcuccucaaggagcgcggcuucuucggcgccaucgccggcuuccucgagggcggcugggagggcaugaucgccggcuggcacggcuacaccucccacggcgcccacggcgucgccgucgccgccgaccucaaguccacccaggaggccaucaacaagaucaccaagaaccucaacucccucuccgagcucgaggucaagaaccuccagcgccucuccggcgccauggacgagcuccacaacgagauccucgagcucgacgagaaggucgacgaccuccgcgccgacaccaucuccucccagaucgagcucgccguccuccucuccaacgagggcaucaucaacuccgaggacgagcaccuccucgcccucgagcgcaagcucaagaagaugcucggccccuccgccgucgagaucggcaacggcugcuucgagaccaagcacaagugcaaccagaccugccucgaccgcaucgccgccggcaccuucgacgccggcgaguucucccuccccaccuucgacucccucaacaucaccgccgccucccucaacgacgacggccucgacaaccacaccauccuccucuacuacuccaccgccgccuccucccucgccgucacccucaugaucgccaucuucgucgucuacauggucucccgcgacaacgucuccugcuccaucugccucuga

SEQ ID NO: 122983 - RNA, 1758 nt, Artificial Sequence; identical to SEQ ID NO: 122923
  derived and/or modified CDS sequence (opt2) from hemagglutinin__InfluenzaB__AGQ16296

SEQ ID NO: 122984 - RNA, 1755 nt, Artificial Sequence; identical to SEQ ID NO: 122890
  derived and/or modified CDS sequence (opt2) from hemagglutinin__InfluenzaB__AGQ16297

SEQ ID NO: 122985 - RNA, 1755 nt, Artificial Sequence
  derived and/or modified CDS sequence (opt2) from hemagglutinin__InfluenzaB__AGQ16298
augaaggccaucaucguccuccucauggucgucaccuccaacgccgaccgcaucugcaccggcaucaccuccuccaacuccccccacgucgucaagaccgccacccagggcgaggucaacgucaccggcgucaucccccucaccaccacccccaccaaguccuacuucgccaaccucaagggcaccaagacccgcggcaagcucugccccgacugccucaacugcaccgaccucgacgucgcccucggccgccccaugugcgucggcaccacccccuccgccaaggccuccauccuccacgagguccgccccgucaccuccggcugcuuccccaucaugcacgaccgcaccaagauccgccagcucgccaaccuccuccgcggcuacgagaacauccgccucuccacccagaacgucaucgacgccgagaaggcccccggcggccccuaccgccucggcaccuccggcuccugccccaacgccaccuccaaguccggcuucuucgccaccauggccugggccguccccaaggacaacaacaagaacgccaccaacccccucaccgucgagguccccuacaucugcgccgagggcgaggaccagaucaccgucuggggcuuccacuccgacaacaagacccagaugaagaaccucuacggcgacuccaacccccagaaguucaccuccuccgccaacggcgucaccacccacuacgucucccagaucggcggcuuccccgaccagaccgaggacggcggccucccccaguccggccgcaucgucgucgacuacaugaugcagaagcccggcaagaccggcaccaucgucuaccagcgcggcguccuccucccccagaaggucuggugcgccuccggccgcuccaaggucaucaagggcucccucccccucaucggcgaggccgacugccuccacgagaaguacggcggccucaacaaguccaagcccuacuacaccggcgagcacgccaaggccaucggcaacugccccaucugggucaagaccccccucaagcucgccaacggcaccaaguaccgcccccccgccaagcuccucaaggagcgcggcuucuucggcgccaucgccggcuuccucgagggcggcugggagggcaugaucgccggcuggcacggcuacaccucccacggcgcccacggcgucgccaucgccgccgaccucaaguccacccaggaggccaucaacaagaucaccaagaaccucaacucccucuccgagcucgaggucaagaaccuccagcgccucuccggcgccauggacgagcuccacaacgagauccucgagcucgacgagaaggucgacgaccuccgcgccgacaccaucuccucccagaucgagcucgccguccuccucuccaacgagggcaucaucaacuccgaggacgagcaccuccucgcccucgagcgcaagcucaagaagaugcucggccccuccgccgucgacaucggcaacggcugcuucgagaccaagcacaagugcaaccagaccugccucgaccgcaucgccgccggcaccuucaacgccggcgaguucucccuccccaccuucgacucccucaacaucaccgccgccucccucaacgacgacggccucgacaaccacaccauccuccucuacuacuccaccgccgccuccucccucgccgucacccucaugcucgccaucuucaucgucuacauggucucccgcgacaacgucuccugcuccaucugccucuga

SEQ ID NO: 122986 - RNA, 1755 nt, Artificial Sequence; identical to SEQ ID NO: 122935
  derived and/or modified CDS sequence (opt2) from hemagglutinin__InfluenzaB__AGQ16299

SEQ ID NO: 122987 - RNA, 1755 nt, Artificial Sequence; identical to SEQ ID NO: 122935
  derived and/or modified CDS sequence (opt2) from hemagglutinin__InfluenzaB__AGQ16300

SEQ ID NO: 122988 - RNA, 1755 nt, Artificial Sequence; identical to SEQ ID NO: 122890
  derived and/or modified CDS sequence (opt2) from hemagglutinin__InfluenzaB__AGQ16301

SEQ ID NO: 122989 - RNA, 1755 nt, Artificial Sequence; identical to SEQ ID NO: 122890
  derived and/or modified CDS sequence (opt2) from hemagglutinin__InfluenzaB__AGQ16302

SEQ ID NO: 122990 - RNA, 1755 nt, Artificial Sequence; identical to SEQ ID NO: 122890
  derived and/or modified CDS sequence (opt2) from hemagglutinin__InfluenzaB__AGQ16303

SEQ ID NO: 122991 - RNA, 1755 nt, Artificial Sequence; identical to SEQ ID NO: 122890
  derived and/or modified CDS sequence (opt2) from hemagglutinin__InfluenzaB__AGQ16305

SEQ ID NO: 122992 - RNA, 1758 nt, Artificial Sequence
  derived and/or modified CDS sequence (opt2) from hemagglutinin__InfluenzaB__AGQ16306
augaaggccaucaucguccuccucauggucgucaccuccaacgccgaccgcaucugcaccggcaucaccuccuccaacuccccccacgucgucaagaccgccacccagggcgaggucaacgucaccggcgucaucccccucaccaccacccccaccaagucccacuucgccaaccucaagggcaccgagacccgcggcaagcucugccccaagugccucaacugcaccgaccucgacgucgcccucggccgccccaagugcaccggcaagauccccuccgcccgcgucuccauccuccacgagguccgccccgucaccuccggcugcuuccccaucaugcacgaccgcaccaagauccgccagcuccccaaccuccuccgcggcuacgagcacauccgccucuccacccacaacgucaucaacgccgagaacgcccccggcggccccuacaagaucggcaccuccggcuccugccccaacgucaccaacggcaacggcuucuucgccaccauggccugggccguccccaagaacgacaagaacaagaccgagaccaacccccucaccaucgagguccccuacaucugcaaggagggcgaggaccagaucaccgucuggggcuuccacuccgacaacgagacccagauggccaagcucuacggcgacuccaagccccagaaguucaccuccuccgccaacggcgucaccacccacuacgucucccagaucggcggcuuccccaaccagaccgaggacggcggccucccccaguccggccgcaucgucgucgacuacaugguccagaaguccggcaagaccggcaccaucaccuaccagcgcggcauccuccucccccagaaggucuggugcgccuccggccgcuccaaggucaucaagggcucccucccccucaucggcgaggccgacugccuccacgagaaguacggcggccucaacaaguccaagcccuacuacaccggcgagcacgccaaggccaucggcaacugccccaucugggucaagaccccccucaagcucgccaacggcaccaaguaccgcccccccgccaagcuccucaaggagcgcggcuucuucggcgccaucgccggcuuccucgagggcggcugggagggcaugaucgccggcuggcacggcuacaccucccacggcgcccacggcgucgccgucgccgccgaccucaaguccacccaggaggccaucaacaagaucaccaagaaccucaacucccucuccgagcucgaggucaagaaccuccagcgccucuccggcgccauggacgagcuccacaacgagauccucgagcucgacgagaaggucgacgaccuccgcgccgacaccaucuccucccagaucgagcucgccguccuccucuccaacgagggcaucaucaacuccgaggacgagcaccuccucgcccucgagcgcaagcucaagaagaugcucggccccuccgccgucgagaucggcaacggcugcuucgagaccaagcacaagugcaaccagaccugccucgaccgcaucgccgccggcaccuucgacgccggcgaguucucccuccccaccuucgacucccucaacaucaccgccgccucccucaacgacgacggccucgacaaccacaccauccuccucuacuacuccaccgccgccuccucccucgccgucacccucaugaucgccaucuucgucgucuacauggucucccgcgacaacgucuccugcuccaucugccucuga

SEQ ID NO: 122993 - RNA, 1755 nt, Artificial Sequence; identical to SEQ ID NO: 122890
  derived and/or modified CDS sequence (opt2) from hemagglutinin__InfluenzaB__AGQ16307

SEQ ID NO: 122994 - RNA, 1758 nt, Artificial Sequence; identical to SEQ ID NO: 122923
  derived and/or modified CDS sequence (opt2) from hemagglutinin__InfluenzaB__AGQ16308

SEQ ID NO: 122995 - RNA, 1755 nt, Artificial Sequence
  derived and/or modified CDS sequence (opt2) from hemagglutinin__InfluenzaB__AGQ16309
augaaggccaucaucguccuccucauggucgucaccuccaacgccgaccgcaucugcaccggcaucaccuccuccaacuccccccacgucgucaagaccgccacccagggcgaggucaacgucaccggcgucaucccccucaccaccacccccaccaaguccuacuucgccaaccucaagggcaccaagacccgcggcaagcucugccccgacugccucaacugcaccgaccucgacgucgcccucggccgccccaugugcgucggcaccacccccuccgccaaggccuccauccuccacgagguccgccccgucaccuccggcugcuuccccaucaugcacgaccgcaccaagauccgccagcucgccaaccuccuccgcggcuacgagaacauccgccucuccacccagaacgucaucgacgccgagaaggcccccggcggccccuaccgccucggcaccuccggcuccugccccaacgccaccuccaaguccggcuucuucgccaccauggccugggccguccccaaggacaacaacaagaacgccaccaacccccucaccgucgagguccccuacaucugcgccgagggcgaggaccagaucaccgucuggggcuuccacuccgacaacaagacccagaugaagaaccucuacggcgacuccaacccccagaaguucaccuccuccgccaacggcgucaccacccacuacgucucccagaucggcggcuuccccgaccagaccgaggacggcggccucccccaguccggccgcaucgucgccgacuacaugaugcagaagcccggcaagaccggcaccaucgucuaccagcgcggcguccuccucccccagaaggucuggugcgccuccggccgcuccaaggucaucaagggcucccucccccucaucggcgaggccgacugccuccacgagaaguacggcggccucaacaaguccaagcccuacuacaccggcgagcacgccaaggccaucggcaacugccccaucugggucaagaccccccucaagcucgccaacggcaccaaguaccgcccccccgccaagcuccucaaggagcgcggcuucuucggcgccaucgccggcuuccucgagggcggcugggagggcaugaucgccggcuggcacggcuacaccucccacggcgcccacggcgucgccgucgccgccgaccucaaguccacccaggaggccaucaacaagaucaccaagaaccucaacucccucuccgagcucgaggucaagaaccuccagcgccucuccggcgccauggacgagcuccacaacgagauccucgagcucgacgagaaggucgacgaccuccgcgccgacaccaucuccucccagaucgagcucgccguccuccucuccaacgagggcaucaucaacuccgaggacgagcaccuccucgcccucgagcgcaagcucaagaagaugcucggccccuccgccgucgacaucggcaacggcugcuucgagaccaagcacaagugcaaccagaccugccucgaccgcaucgccgccggcaccuucaacgccggcgaguucucccuccccaccuucgacucccucaacaucaccgccgccucccucaacgacgacggccucgacaaccacaccauccuccucuacuacuccaccgccgccuccucccucgccgucacccucaugcucgccaucuucaucgucuacauggucucccgcgacaacgucuccugcuccaucugccucuga

SEQ ID NO: 122996 - RNA, 1755 nt, Artificial Sequence
  derived and/or modified CDS sequence (opt2) from hemagglutinin__InfluenzaB__AGQ16310
augaaggccaucaucguccuccucauggucgucaccuccaacgccgaccgcaucugcaccggcaucaccuccuccaacuccccccacgucgucaagaccgccacccagggcgaggucaacgucaccggcgucaucccccucaccaccacccccaccaaguccuacuucgccaaccucaagggcaccaagacccgcggcaagcucugccccgacugccucaacugcaccgaccucgacgucgcccucggccgccccaugugcgucggcaccacccccuccgccaaggccuccauccuccacgagguccgccccgucaccuccggcugcuuccccaucaugcacgaccgcaccaagauccgccagcucgccaaccuccuccgcggcuacgagaacauccgccucuccacccagaacgucaucgacgccgagaaggcccccggcggccccuaccgccucggcaccuccggcuccugccccaacgccaccuccaaguccggcuucuucgccaccauggccugggccguccccaaggacaacaacaagaacgccaccaacccccucaccgucgagguccccuacaucugcgccgagggcgaggaccagaucaccgucuggggcuuccacuccgacaacaagacccagaugaagaaccucuacggcgacuccaacccccagaaguucaccuccuccgccaacggcgucaccacccacuacgucucccagaucggcggcuuccccgaccagaccgaggacggcggccucccccaguccggccgcaucgucgucgacuacaugaugcagaagcccggcaagaccggcaccaucgucuaccagcgcggcguccuccucccccagaaggucuggugcgccuccggccgcuccaaggucaucaagggcucccucccccucaucggcgaggccgacugccuccacgagaaguacggcggccucaacaaguccaagcccuacuacaccggcgagcacgccaaggccaucggcaacugccccaucugggucaagaccccccucaagcucgccaacggcaccaaguaccgcccccccgccaagcuccucaaggagcgcggcuucuucggcgccaucgccggcuuccucgagggcggcugggagggcauggucgccggcuggcacggcuacaccucccacggcgcccacggcgucgccgucgccgccgaccucaaguccacccaggaggccaucaacaagaucaccaagaaccucaacucccucuccgagcucgaggucaagaaccuccagcgccucuccggcgccauggacgagcuccacaacgagauccucgagcucgacgagaaggucgacgaccuccgcgccgacaccaucuccucccagaucgagcucgccguccuccucuccaacgagggcaucaucaacuccgaggacgagcaccuccucgcccucgagcgcaagcucaagaagaugcucggccccuccgccgucgacaucggcaacggcugcuucgagaccaagcacaagugcaaccagaccugccucgaccgcaucgccgccggcaccuucaacgccggcgaguucucccuccccaccuucgacucccucaacaucaccgccgccucccucaacgacgacggccucgacaaccacaccauccuccucuacuacuccaccgccgccuccucccucgccgucacccucaugcucgccaucuucaucgucuacauggucucccgcgacaacgucuccugcuccaucugccucuga

SEQ ID NO: 122997 - RNA, 1758 nt, Artificial Sequence; identical to SEQ ID NO: 122923
  derived and/or modified CDS sequence (opt2) from hemagglutinin__InfluenzaB__AGQ16311

SEQ ID NO: 122998 - RNA, 1755 nt, Artificial Sequence; identical to SEQ ID NO: 122890
  derived and/or modified CDS sequence (opt2) from hemagglutinin__InfluenzaB__AGQ16312

SEQ ID NO: 122999 - RNA, 1755 nt, Artificial Sequence
  derived and/or modified CDS sequence (opt2) from hemagglutinin__InfluenzaB__AGQ16313
augaaggccaucaucguccuccucauggucgucaccuccaacgccgaccgcaucugcaccggcaucaccuccuccaacuccccccacgucgucaagaccgccacccagggcgaggucaacgucaccggcgucaucccccucaccaccacccccaccaaguccuacuucgccaaccucaagggcaccaagacccgcggcaagcucugccccgacugccucaacugcaccgaccucgacgucgcccucggccgccccaugugcgucggcaccacccccuccgccaaggccuccauccuccacgagguccgccccgucaccuccggcugcuuccccaucaugcacgaccgcaccaagauccgccagcucgccaaccuccuccgcggcuacgagaacauccgccucuccacccagaacgucaucgacgccgagaaggcccccggcggccccuaccgccucggcaccuccggcuccugccccaacgccaccuccaaguccggcuucuucgccaccauggccugggccguccccaaggacaacaacaagaacgccaccaacccccucaccgucgagguccccuacaucugcgccgagggcgaggaccagaucgccgucuggggcuuccacuccgacaacaagacccagaugaagaaccucuacggcgacuccaacccccagaaguucaccuccuccgccaacggcgucaccacccacuacgucucccagaucggcggcuuccccgaccagaccgaggacggcggccucccccaguccggccgcaucgucgucgacuacaugaugcagaagcccggcaagaccggcaccaucgucuaccagcgcggcguccuccucccccagaaggucuggugcgccuccggccgcuccaaggucaucaagggcucccucccccucaucggcgaggccgacugccuccacgagaaguacggcggccucaacaaguccaagcccuacuacaccggcgagcacgccaaggccaucggcaacugccccaucugggucaagaccccccucaagcucgccaacggcaccaaguaccgcccccccgccaagcuccucaaggagaagggcuucuucggcgccaucgccggcuuccucgagggcggcugggagggcaugaucgccggcuggcacggcuacaccucccacggcgcccacggcgucgccgucgccgccgaccucaaguccacccaggaggccaucaacaagaucaccaagaaccucaacucccucuccgagcucgaggucaagaaccuccagcgccucuccggcgccauggacgagcuccacaacgagauccucgagcucgacgagaaggucgacgaccuccgcgccgacaccaucuccucccagaucgagcucgccguccuccucuccaacgagggcaucaucaacuccgaggacgagcaccuccucgcccucgagcgcaagcucaagaagaugcucggccccuccgccgucgacaucggcaacggcugcuucgagaccaagcacaagugcaaccagaccugccucgaccgcaucgccgccggcaccuucaacgccggcgaguucucccuccccaccuucgacucccucaacaucaccgccgccucccucaacgacgacggccucgacaaccacaccauccuccucuacuacuccaccgccgccuccucccucgccgucacccucaugcucgccaucuucaucgucuacauggucucccgcgacaacgucuccugcuccaucugccucuga

SEQ ID NO: 123000 - RNA, 1758 nt, Artificial Sequence
  derived and/or modified CDS sequence (opt2) from hemagglutinin__InfluenzaB__AGQ16314
augaaggccaucaucguccuccucauggucgucaccuccaacgccgaccgcaucugcaccggcaucaccuccuccaacuccccccacgucgucaagaccgccacccagggcgaggucaacgucaccggcgucaucccccucaccaccacccccaccaagucccacuucgccaaccucaagggcaccgagacccgcggcaagcucugccccaagugccucaacugcaccgaccucgacgucgcccucggccgccccaagugcaccggcaagauccccuccgcccgcgucuccauccuccacgagguccgccccgucaccuccggcugcuuccccaucaugcacgaccgcaccaagauccgccagcuccccaaccuccuccgcggcuacgagcacauccgccucuccacccacaacgucaucaacgccgagaacgcccccggcggccccuacaagaucggcaccuccggcuccugccccaacgucaccaacggcaacggcuucuucgccaccauggccugggccguccccaagaacgacaagaacaagaccgagaccaacccccucaccaucgagguccccuacaucugcaccgaggaggaggaccagaucaccgucuggggcuuccacuccgacaacgagacccagauggccaagcucuacggcgacuccaagccccagaaguucaccuccuccgccaacggcgucaccacccacuacgucucccagaucggcggcuuccccaaccagaccgaggacggcggccucccccaguccggccgcaucgucgucgacuacaugguccagaaguccggcaagaccggcaccaucaccuaccagcgcggcauccuccucccccagaaggucuggugcgccuccggccgcuccaaggucaucaagggcucccucccccucaucggcgaggccgacugccuccacgagaaguacggcggccucaacaaguccaagcccuacuacaccggcgagcacgccaaggccaucggcaacugccccaucugggucaagaccccccucaagcucgccaacggcaccaaguaccgcccccccgccaagcuccucaaggagcgcggcuucuucggcgccaucgccggcuuccucgagggcggcugggagggcaugaucgccggcuggcacggcuacaccucccacggcgcccacggcgucgccgucgccgccgaccucaaguccacccaggaggccaucaacaagaucaccaagaaccucaacucccucuccgagcucgaggucaagaaccuccagcgccucuccggcgccauggacgagcuccacaacgagauccucgagcucgacgagaaggucgacgaccuccgcgccgacaccaucuccucccagaucgagcucgccguccuccucuccaacgagggcaucaucaacuccgaggacgagcaccuccucgcccucgagcgcaagcucaagaagaugcucggccccuccgccgucgagaucggcaacggcugcuucgagaccaagcacaagugcaaccagaccugccucgaccgcaucgccgccggcaccuucgacgccggcgaguucucccuccccaccuucgacucccucaacaucaccgccgccucccucaacgacgacggccucgacaaccacaccauccuccucuacuacuccaccgccgccuccucccucgccgucacccucaugaucgccaucuucgucgucuacauggucucccgcgacaacgucuccugcuccaucugccucuga

SEQ ID NO: 123001 - RNA, 1755 nt, Artificial Sequence
  derived and/or modified CDS sequence (opt2) from hemagglutinin__InfluenzaB__AGQ16315
augaaggccaucaucguccuccucauggucgucaccuccaacgccgaccgcaucugcaccggcaucaccuccuccaacuccccccacgucgucaagaccgccacccagggcgaggucaacgucaccggcgucaucccccucaccaccacccccaccaaguccuacuucgccaaccucaagggcaccaagacccgcggcaagcucugccccgacugccucaacugcaccgaccucgacgucgcccucggccgccccaugugcgucggcaccacccccuccgccaaggccuccauccuccacgagguccgccccgucaccuccggcugcuuccccaucaugcacgaccgcaccaagauccgccagcucgccaaccuccuccgcggcuacgagaacauccgccucuccacccagaccgucaucgacgccgagaaggcccccggcggccccuaccgccucggcaccuccggcuccugccccaacgccaccuccaaguccggcuucuucgccaccauggccugggccguccccaaggacaacaacaagaacgccaccaacccccucaccgucgagguccccuacaucugcgccgagggcgaggaccagaucaccgucuggggcuuccacuccgacaacaagacccagaugaagaaccucuacggcgacuccaacccccagaaguucaccuccuccgccaacggcaucaccacccacuacgucucccagaucggcggcuuccccgaccagaccgaggacggcggccucccccaguccggccgcaucgucgucgacuacaugaugcagaagcccggcaagaccggcaccaucgucuaccagcgcggcguccuccucccccagaaggucuggugcgccuccggccgcuccaaggucaucaagggcucccucccccucaucggcgaggccgacugccuccacgagaaguacggcggccucaacaaguccaagcccuacuacaccggcgagcacgccaaggccaucggcaacugccccaucugggucaagaccccccucaagcucgccaacggcaccaaguaccgcccccccgccaagcuccucaaggagcgcggcuucuucggcgccaucgccggcuuccucgagggcggcugggagggcaugaucgccggcuggcacggcuacaccucccacggcgcccacggcgucgccgucgccgccgaccucaaguccacccaggaggccaucaacaagaucaccaagaaccucaacucccucuccgagcucgaggucaagaaccuccagcgccucuccggcgccauggacgagcuccacaacgagauccucgagcucgacgagaaggucgacgaccuccgcgccgacaccaucuccucccagaucgagcucgccguccuccucuccaacgagggcaucaucaacuccgaggacgagcaccuccucgcccucgagcgcaagcucaagaagaugcucggccccuccgccgucgacaucggcaacggcugcuucgagaccaagcacaagugcaaccagaccugccucgaccgcaucgccgccggcaccuucaacgccggcgaguucucccuccccaccuucgacucccucaacaucaccgccgccucccucaacgacgacggccucgacaaccacaucauccuccucuacuacuccaccgccgccuccucccucgccgucacccucaugcucgccaucuucaucgucuacauggucucccgcgacaacgucuccugcuccaucugccucuga

SEQ ID NO: 123002 - RNA, 1755 nt, Artificial Sequence; identical to SEQ ID NO: 122890
  derived and/or modified CDS sequence (opt2) from hemagglutinin__InfluenzaB__AGQ16316

SEQ ID NO: 123003 - RNA, 1755 nt, Artificial Sequence; identical to SEQ ID NO: 122890
  derived and/or modified CDS sequence (opt2) from hemagglutinin__InfluenzaB__AGQ16317

SEQ ID NO: 123004 - RNA, 1758 nt, Artificial Sequence; identical to SEQ ID NO: 122681
  derived and/or modified CDS sequence (opt2) from hemagglutinin__InfluenzaB__AGQ16318

SEQ ID NO: 123005 - RNA, 1755 nt, Artificial Sequence
  derived and/or modified CDS sequence (opt2) from hemagglutinin__InfluenzaB__AGQ16319
augaaggccaucaucguccuccucauggucgucaccuccaacgccgaccgcaucugcaccggcaucaccuccuccaacuccccccacgucgucaagaccgccacccagggcgaggucaacgucaccggcgucaucccccucaccaccacccccaccaaguccuacuucgccaaccucaagggcaccaagacccgcggcaagcucugccccggcugccucaacugcaccgaccucgacgucgcccucggccgccccaugugcgucggcaccacccccuccgccaaggccuccauccuccacgagguccgccccgucaccuccggcugcuuccccaucaugcacgaccgcaccaagauccgccagcucgccaaccuccuccgcggcuacgagaacauccgccucuccacccagaacgucaucgacgccgagaaggcccccggcggccccuaccgccucggcaccuccggcuccugccccaacgccaccuccaaguccggcuucuucgccaccauggccugggccguccccaaggacaacaacaagaacgccaccaacccccucaccgucgagguccccuacaucugcgccgagggcgaggaccagaucgccgucuggggcuuccacuccgacaacaagacccagaugaagaaccucuacggcgacuccaacccccagaaguucaccuccuccgccaacggcgucaccacccacuacgucucccagaucggcggcuuccccgaccagaccgaggacggcggccucccccaguccggccgcaucgucgucgacuacaugaugcagaagcccggcaagaccggcaccaucgucuaccagcgcggcguccuccucccccagaaggucuggugcgccuccggccgcuccaaggucaucaagggcucccucccccucaucggcgaggccgacugccuccacgagaaguacggcggccucaacaaguccaagcccuacuacaccggcgagcacgccaaggccaucggcaacugccccaucugggucaagaccccccucaagcucgccaacggcaccaaguaccgcccccccgccaagcuccucaaggagcgcggcuucuucggcgccaucgccggcuuccucgagggcggcugggagggcaugaucgccggcuggcacggcuacaccucccacggcgcccacggcgucgccgucgccgccgaccucaaguccacccaggaggccaucaacaagaucaccaagaaccucaacucccucuccgagcucgaggucaagaaccuccagcgccucuccggcgccauggacgagcuccacaacgagauccucgagcucgacgagaaggucgacgaccuccgcgccgacaccaucuccucccagaucgagcucgccguccuccucuccaacgagggcaucaucaacuccgaggacgagcaccuccucgcccucgagcgcaagcucaagaagaugcucggccccuccgccgucgacaucggcaacggcugcuucgagaccaagcacaagugcaaccagaccugccucgaccgcaucgccgccggcaccuucaacgccggcgaguucucccuccccaccuucgacucccucaacaucaccgccgccucccucaacgacgacggccucgacaaccacaccauccuccucuacuacuccaccgccgccuccucccucgccgucacccucaugcucgccaucuucaucgucuacauggucucccgcgacaacgucuccugcuccaucugccucuga

SEQ ID NO: 123006 - RNA, 1755 nt, Artificial Sequence; identical to SEQ ID NO: 122935
  derived and/or modified CDS sequence (opt2) from hemagglutinin__InfluenzaB__AGQ16320

SEQ ID NO: 123007 - RNA, 1755 nt, Artificial Sequence; identical to SEQ ID NO: 122890
  derived and/or modified CDS sequence (opt2) from hemagglutinin__InfluenzaB__AGQ16321

SEQ ID NO: 123008 - RNA, 1755 nt, Artificial Sequence; identical to SEQ ID NO: 122890
  derived and/or modified CDS sequence (opt2) from hemagglutinin__InfluenzaB__AGQ16322

SEQ ID NO: 123009 - RNA, 1758 nt, Artificial Sequence
  derived and/or modified CDS sequence (opt2) from hemagglutinin__InfluenzaB__AGQ16323
augaaggccaucaucguccuccucauggucgucaccuccaacgccgaccgcaucugcaccggcaucaccuccuccaacuccccccacgucgucaagaccgccacccagggcgaggucaacgucaccggcgucaucccccucaccaccacccccaccaagucccacuucgccucccucaagggcaccgagacccgcggcaagcucugccccaagugccucaacugcaccgaccucgacgucgcccucggccgccccaagugcaccggcaagauccccuccgcccgcgucuccauccuccacgagguccgccccgucaccuccggcugcuuccccaucaugcacgaccgcaccaagauccgccagcuccccaaccuccuccgcggcuacgagcacauccgccucuccacccacaacgucaucaacgccgaggacgcccccggcggccccuacaagaucggcaccuccggcuccugccccaacgucaccaacggcaacggcuucuucgccaccauggccugggccguccccaagaacgacaagaacaagaccgccaccaacccccucaccaucgagguccccuacaucugcaccgagggcgaggaccagaucaccgucuggggcuuccacuccgacaacgagacccagauggccaagcucuacggcgacuccaagccccagaaguucaccuccuccgccaacggcgucaccacccacuacgucucccagaucggcggcuuccccaaccagaccgaggacggcggccucccccaguccggccgcaucgucgucgacuacaugguccagaaguccggcaagaccggcaccaucaccuaccagcgcggcauccuccucccccagaaggucuggugcgccuccggccgcuccaaggucaucaagggcucccucccccucaucggcgaggccgacugccuccacgagaaguacggcggccucaacaaguccaagcccuacuacaccggcgagcacgccaaggccaucggcaacugccccaucugggucaagaccccccucaagcucgccaacggcaccaaguaccgcccccccgccaagcuccucaaggagcgcggcuucuucggcgccaucgccggcuuccucgagggcggcugggagggcaugaucgccggcuggcacggcuacaccucccacggcgcccacggcgucgccgucgccgccgaccucaaguccacccaggaggccaucaacaagaucaccaagaaccucaacucccucuccgagcucgaggucaagaaccuccagcgccucuccggcgccauggacgagcuccacaacgagauccucgagcucgacgagaaggucgacgaccuccgcgccgacaccaucuccucccagaucgagcucgccguccuccucuccaacgagggcaucaucaacuccgaggacgagcaccuccucgcccucgagcgcaagcucaagaagaugcucggccccuccgccgucgagaucggcaacggcugcuucgagaccaagcacaagugcaaccagaccugccucgaccgcaucgccgccggcaccuucgacgccggcgaguucucccuccccaccuucgacucccucaacaucaccgccgccucccucaacgacgacggccucgacaaccacaccauccuccucuacuacuccaccgccgccuccucccucgccgucacccucaugaucgccaucuucgucgucuacauggucucccgcgacaacgucuccugcuccaucugccucuga

SEQ ID NO: 123010 - RNA, 1755 nt, Artificial Sequence; identical to SEQ ID NO: 122890
  derived and/or modified CDS sequence (opt2) from hemagglutinin__InfluenzaB__AGQ16324

SEQ ID NO: 123011 - RNA, 1755 nt, Artificial Sequence; identical to SEQ ID NO: 122890
  derived and/or modified CDS sequence (opt2) from hemagglutinin__InfluenzaB__AGQ16325

SEQ ID NO: 123012 - RNA, 1755 nt, Artificial Sequence; identical to SEQ ID NO: 122890
  derived and/or modified CDS sequence (opt2) from hemagglutinin__InfluenzaB__AGQ16326

SEQ ID NO: 123013 - RNA, 1755 nt, Artificial Sequence; identical to SEQ ID NO: 122890
  derived and/or modified CDS sequence (opt2) from hemagglutinin__InfluenzaB__AGQ16327

SEQ ID NO: 123014 - RNA, 1758 nt, Artificial Sequence
  derived and/or modified CDS sequence (opt2) from hemagglutinin__InfluenzaB__AGQ16328
augaaggccaucaucguccuccucauggucgucaccuccaacgccgaccgcaucugcaccggcaucaccuccuccaacuccccccacgucgucaagaccgccacccagggcgaggucaacgucaccggcgucaucccccucaccaccacccccaccaagucccacuucgccaaccucaagggcaccgagacccgcggcaagcucugccccaagugccucaacugcaccgaccucgacgucgcccucggccgccccaagugcaccggcaagacccccuccgcccgcgucuccauccuccacgagguccgccccgucaccuccggcugcuuccccaucaugcacgaccgcaccaagauccgccagcuccccaaccuccuccgcggcuacgagcacauccgccucuccacccacaacgucaucaacgccgagaacgcccccggcggccccuacaagaucggcaccuccggcuccugccccaacgucaccaacggcaacggcuucuucgccaccauggccugggccguccccaagaacgacaagaacaagaccgccaccaacccccucaccaucgagguccccuacaucugcaccgagggcgaggaccagaucaccgucuggggcuuccacuccgacaacgagacccagauggccaagcucuacggcgacuccaacccccagaaguucaccuccuccgccaacggcgucaccacccacuacgucucccagaucggcggcuuccccaaccagaccgaggacggcggccucccccaguccggccgcaucgucgucgacuacaugguccagaaguccggcaagaccggcaccaucaccuaccagcgcggcauccuccucccccagaaggucuggugcgccuccggccgcuccaaggucaucaagggcucccucccccucaucggcgaggccgacugccuccacgagaaguacggcggccucaacaaguccaagcccuacuacaccggcgagcacgccaaggccaucggcaacugccccaucugggucaagaccccccucaagcucgccaacggcaccaaguaccgcccccccgccaagcuccucaaggagcgcggcuucuucggcgccaucgccggcuuccucgagggcggcugggagggcaugaucgccggcuggcacggcuacaccucccacggcgcccacggcgucgccgucgccgccgaccucaaguccacccaggaggccaucaacaagaucaccaagaaccucaacucccucuccgagcucgaggucaagaaccuccagcgccucuccggcgccauggacgagcuccacaacgagauccucgagcucgacgagaaggucgacgaccuccgcgccgacaccaucuccucccagaucgagcucgccguccuccucuccaacgagggcaucaucaacuccgaggacgagcaccuccucgcccucgagcgcaagcucaagaagaugcucggccccuccgccgucgagaucggcaacggcugcuucgagaccaagcacaagugcaaccagaccugccucgaccgcaucgccgccggcaccuucgacgccggcgaguucucccuccccaccuucgacucccucaacaucaccgccgccucccucaacgacgacggccucgacaaccacaccauccuccucuacuacuccaccgccgccuccucccucgccgucacccucaugaucgccaucuucgucgucuacauggucucccgcgacaacgucuccugcuccaucugccucuga

SEQ ID NO: 123015 - RNA, 1758 nt, Artificial Sequence
  derived and/or modified CDS sequence (opt2) from hemagglutinin__InfluenzaB__AGX15487
augaaggccaucaucguccuccucauggucgucaccuccaacgccgaccgcaucugcaccggcaucaccuccuccaacuccccccacgucgucaagaccgccacccagggcgaggucaacgucaccggcgucaucccccucaccaccacccccaccaagucccacuucgccaaccucaagggcaccaagacccgcggcaagcucugccccaagugccucaacugcaccgaccucgacgucgcccucggccgccccaagugcaccggcaacauccccuccgccaaggucuccauccuccacgagguccgccccgucaccuccggcugcuuccccaucaugcacgaccgcaccaagauccgccagcuccccaaccuccuccgcggcuacgagcacauccgccucuccacccacaacgucaucaacgccgagaaggcccccggcggccccuacaagaucggcaccuccggcuccugccccaacgucaccaacggcaacggcuucuucgccaccauggccugggccguccccaagaacgacaacaacaagaccgccaccaacucccucaccaucgagguccccuacaucugcaccgagggcgaggaccagaucaccgucuggggcuuccacuccgacaacgagacccagauggccaagcucuacggcgacuccaagccccagaaguucaccuccuccgccaacggcgucaccacccacuacgucucccagaucggcggcuuccccaaccagaccgaggacggcggccucccccaguccggccgcaucgucgucgacuacaugguccagaaguccggcaagaccggcaccaucaccuaccagcgcggcauccuccucccccagaaggucuggugcgccuccggccgcuccaaggucaucaagggcucccucccccucaucggcgaggccgacugccuccacgagaaguacggcggccucaacaaguccaagcccuacuacaccggcgagcacgccaaggccaucggcaacugccccaucugggucaagaccccccucaagcucgccaacggcaccaaguaccgcccccccgccaagcuccucaaggagcgcggcuucuucggcgccaucgccggcuuccucgagggcggcugggagggcaugaucgccggcuggcacggcuacaccucccacggcgcccacggcgucgccgucgccgccgaccucaaguccacccaggaggccaucaacaagaucaccaagaaccucaacucccucuccgagcucgaggucaagaaccuccagcgccucuccggcgccauggacgagcuccacaacgagauccucgagcucgacgagaaggucgacgaccuccgcgccgacaccaucuccucccagaucgagcucgccguccuccucuccaacgagggcaucaucaacuccgaggacgagcaccuccucgcccucgagcgcaagcucaagaagaugcucggccccuccgccgucgagaucggcaacggcugcuucgagaccaagcacaagugcaaccagaccugccucgaccgcaucgccgccggcaccuucgacgccggcgaguucucccuccccaccuucgacucccucaacaucaccgccgccucccucaacgacgacggccucgacaaccacaccauccuccucuacuacuccaccgccgccuccucccucgccgucacccucaugaucgccaucuucgucgucuacauggucucccgcgacaacgucuccugcuccaucugccucuga

SEQ ID NO: 123016 - RNA, 1758 nt, Artificial Sequence; identical to SEQ ID NO: 123015
  derived and/or modified CDS sequence (opt2) from hemagglutinin__InfluenzaB__AGX15496

SEQ ID NO: 123017 - RNA, 1758 nt, Artificial Sequence
  derived and/or modified CDS sequence (opt2) from hemagglutinin__InfluenzaB__AGX15518
augaaggccaucaucguccuccucauggucgucaccuccaacgccgaccgcaucugcaccggcaucaccuccuccaacuccccccacgucgucaagaccgccacccagggcgaggucaacgucaccggcgucaucccccucaccaccgcccccaccaagucccacuucgccaaccucaagggcaccaagacccgcggcaagcucugccccaagugccucaacugcaccgaccucgacgucgcccucggccgccccaagugcaccggcaacauccccuccgccgaggucuccauccuccacgagguccgccccgucaccuccggcugcuuccccaucaugcacgaccgcaccaagauccgccagcuccccaaccuccuccgcggcuacgagcacauccgccucuccacccacaacgucaucaacgccgagaaggcccccggcggccccuacaagaucggcaccuccggcuccugccccaacgucaccaacggcaacggcuucuucgccaccauggccugggccguccccaagaacgacaacaacaagaccgccaccaacucccucaccaucgagguccccuacaucugcaccgagggcgaggaccagaucaccaucuggggcuuccacuccgacaacgagacccagauggccaagcucuacggcgacuccaagccccagaaguucaccuccuccgccaacggcgucaccacccacuacgucucccagaucggcggcuuccccaaccagaccgaggacggcggccucccccaguccggccgcaucgucgucgacuacaugguccagaagcccggcaagaccggcaccaucaccuaccagcgcggcauccuccucccccagaaggucuggugcgccuccggccgcuccaaggucaucaagggcucccucccccucaucggcgaggccgacugccuccacgagaaguacggcggccucaacaaguccaagcccuacuacaccggcgagcacgccaaggccaucggcaacugccccaucugggucaagaccccccucaagcucgccaacggcaccaaguaccgcccccccgccaagcuccucaaggagcgcggcuucuucggcgccaucgccggcuuccucgagggcggcugggagggcaugaucgccggcuggcacggcuacaccucccacggcgcccacggcgucgccgucgccgccgaccucaaguccacccaggaggccaucaacaagaucaccaagaaccucaacucccucuccgagcucgaggucaagaaccuccagcgccucuccuccgccauggacgagcuccacaacgagauccucgagcucgacgagaaggucgacgaccuccgcgccgacaccaucuccucccagaucgagcucgccguccuccucuccaacgagggcaucaucaacuccgaggacgagcaccuccucgcccucgagcgcaagcucaagaagaugcucggccccuccgccgucgagaucggcaacggcugcuucgagaccaagcacaagugcaaccagaccugccucgaccgcaucgccgccggcaccuucgacgccggcgaguucucccuccccaccuucgacucccucaacaucaccgccgccucccucaacgacgacggccucgacaaccacaccauccuccucuacuacuccaccgccgccuccucccucgccgucacccucaugaucgccaucuucgucgucuacauggucucccgcgacaacgucuccugcuccaucugccucuga

SEQ ID NO: 123018 - RNA, 1758 nt, Artificial Sequence
  derived and/or modified CDS sequence (opt2) from hemagglutinin__InfluenzaB__AGX15529
augaaggccaucaucguccuccucauggucgucaccuccaacgccgaccgcgucugcaccggcaucaccuccuccaacuccccccacgucgucaagaccgccacccagggcgaggucaacgucaccggcgucaucccccucaccaccacccccaccaagucccacuucgccaaccucaagggcaccaagacccgcggcaagcucugccccaagugccucaacugcaccgaccucgacgucgcccucggccgccccaagugcaccggcaacauccccuccgccgaggucuccauccucuacgagguccgccccgucaccuccggcugcuuccccaucaugcacgaccgcaccaagauccgccagcuccccaaccuccuccgcggcuacgagcacauccgccucuccacccacaacgucaucaacgccgagaaggcccccggcggccccuacaagaucggcaccuccggcuccugccccaacgucaccaacggcaacggcuucuucgccaccauggccugggccguccccaagaacgacaacaacaagaccgccaccaacucccucaccaucgagguccccuacaucugcaccgagggcgaggaccagaucaccaucuggggcuuccacuccgacaacgagacccagauggccaagcucuacggcgacuccaagccccagaaguucaccuccuccgccaacggcgucaccacccacuacgucucccagaucggcggcuuccccaaccagaccgaggacggcggccucccccaguccggccgcaucgucgucgacuacaugguccagaaguccggcaagaccggcaccaucaccuaccagcgcggcauccuccucccccagaaggucuggugcgccuccggccgcuccaaggucaucaagggcacccucccccucaucggcgaggccgacugccuccacgagaaguacggcggccucaacaaguccaagcccuacuacaccggcgagcacgccaaggccaucggcaacugccccaucugggucaagaccccccucaagcucgccaacggcaccaaguaccgcccccccgccaagcuccucaaggagcgcggcuucuucggcgccaucgccggcuuccucgagggcggcugggagggcaugaucgccggcuggcacggcuacaccucccacggcgcccacggcgucgccgucgccgccgaccucaaguccacccaggaggccaucaacaagaucaccaagaaccucaacucccucuccgagcucgaggucaagaaccuccagcgccucuccggcgccauggacgagcuccacaacgagauccucgagcucgacgagaaggucgacgaccuccgcgccgacaccaucuccucccagaucgagcucgccguccuccucuccaacgagggcaucaucaacuccgaggacgagcaccuccucgcccucgagcgcaagcucaagaagaugcucggccccuccgccgucgagaucggcaacggcugcuucgagaccaagcacaagugcaaccagaccugccucgaccgcaucgccgccggcaccuucgacgccggcgaguucucccuccccaccuucgacucccucaacaucaccgccgccucccucaacgacgacggccucgacaaccacaccauccuccucuacuacuccaccgccgccuccucccucgccgucacccucaugaucgccaucuucgucgucuacauggucucccgcgacaacgucuccugcuccaucugccucuga

SEQ ID NO: 123019 - RNA, 1758 nt, Artificial Sequence; identical to SEQ ID NO: 122609
  derived and/or modified CDS sequence (opt2) from hemagglutinin__InfluenzaB__AGX15541

SEQ ID NO: 123020 - RNA, 1758 nt, Artificial Sequence
  derived and/or modified CDS sequence (opt2) from hemagglutinin__InfluenzaB__AGX15552
augaaggccaucaucguccuccucauggucgucaccuccaacgccgaccgcaucugcaccggcaucaccuccuccaacuccccccacgucgucaagaccgccacccagggcgaggucaacgucaccggcgucaucccccucaccaccacccccaccaagucccacuucgccaaccucaagggcaccgagacccgcggcaagcucugccccaagugccucaacugcaccgaccucgacgucgcccucggccgccccaagugcaccggcaacauccccuccgcccgcgucuccauccuccacgagguccgccccgucaccuccggcugcuuccccaucaugcacgaccgcaccaagauccgccagcuccccaaccuccuccgcggcuacgagcacauccgccucuccacccacaacgucaucaacgccaagaacgcccccggcggccccuacaagaucggcaccuccggcuccugccccaacgucaccaacggcaacggcuucuucgccaccauggccugggccguccccaagaacgacaacaacaagaccgccaccaacucccucaccaucgagguccccuacaucugcaccgagggcgaggaccagaucaccgucuggggcuuccacuccgacaacgagacccagauggccaagcucuacggcgacuccaagccccagaaguucaccuccuccgccaacggcgucaccacccacuacgucucccagaucggcggcuuccccaaccagaccgaggacggcggccucccccaguccggccgcaucgucgucgacuacaugguccagaaguccggcaagaccggcaccaucaccuaccagcgcggcauccuccucccccagaaggucuggugcgccuccggccgcuccaaggucaucaagggcucccucccccucaucggcgaggccgacugccuccacgagaaguacggcggccucaacaaguccaagcccuacuacaccggcgagcacgccaaggccaucggcaacugccccaucugggucaagaccccccucaagcucgccaacggcaccaaguaccgcccccccgccaagcuccucaaggagcgcggcuucuucggcgccaucgccggcuuccucgagggcggcugggagggcaugaucgccggcuggcacggcuacaccucccacggcgcccacggcgucgccgucgccgccgaccucaaguccacccaggaggccaucaacaagaucaccaagaaccucaacucccucuccgagcucgaggucaagaaccuccagcgccucuccggcgccauggacgagcuccacaacgagauccucgagcucgacgagaaggucgacgaccuccgcgccgacaccaucuccucccagaucgagcucgccguccuccucuccaacgagggcaucaucaacuccgaggacgagcaccuccucgcccucgagcgcaagcucaagaagaugcucggccccuccgccgucgagaucggcaacggcugcuucgagaccaagcacaagugcaaccagaccugccucgaccgcaucgccgccggcaccuucgacgccggcgaguucucccuccccaccuucgacucccucaacaucaccgccgccucccucaacgacgacggccucgacaaccacaccauccuccucuacuacuccaccgccgccuccucccucgccgucacccucaugaucgccaucuucgucgucuacauggucucccgcgacaacgucuccugcuccaucugccucuga

SEQ ID NO: 123021 - RNA, 1758 nt, Artificial Sequence; identical to SEQ ID NO: 122618
  derived and/or modified CDS sequence (opt2) from hemagglutinin__InfluenzaB__AGX15563

SEQ ID NO: 123022 - RNA, 1758 nt, Artificial Sequence; identical to SEQ ID NO: 122618
  derived and/or modified CDS sequence (opt2) from hemagglutinin__InfluenzaB__AGX15574

SEQ ID NO: 123023 - RNA, 1758 nt, Artificial Sequence
  derived and/or modified CDS sequence (opt2) from hemagglutinin__InfluenzaB__AGX15607
augaaggccaucaucguccuccucauggucgucaccuccaacgccgaccgcaucugcaccggcaucaccuccuccaacuccccccacgucgucaagaccgccacccagggcgaggucaacgucaccggcgucaucccccucaccaccacccccaccaagucccacuucgccaaccucaagggcaccgagacccgcggcaagcucugccccaagugccucaacugcaccgaccucgacgucgcccucggccgccccaagugcaccggcaacacccccuccgcccgcgucuccauccuccacgagguccgccccgucaccuccggcugcuuccccaucaugcacgaccgcaccaagauccgccagcuccccaaccuccuccgcggcuacgagcacauccgccucuccacccacaacgucaucaacgccgagaacgcccccggcggccccuacaagaucggcaccuccggcuccugccccaacgucaccaacggcaacggcuucuucgccaccauggccugggccguccccaagaacgacaacaacaagaccgccaccaacucccucaccaucgagguccccuacaucugcaccgagggcgaggaccagaucaccgucuggggcuuccacuccgacaacgagacccagauggccaagcucuacggcgacuccaagccccagaaguucaccuccuccgccaacggcgucaccacccacuacgucucccagaucggcggcuuccccaaccagaccgaggacggcggccucccccaguccggccgcaucgucgucgacuacaugguccagaaguccggcaagaccggcaccaucaccuaccagcgcggcauccuccucccccagaaggucuggugcgccuccggccgcuccaaggucaucaagggcucccucccccucaucggcgaggccgacugccuccacgagaaguacggcggccucaacaaguccaagcccuacuacaccggcgagcacgccaaggccaucggcaacugccccaucugggucaagaccccccucaagcucgccaacggcaccaaguaccgcccccccgccaagcuccucaaggagcgcggcuucuucggcgccaucgccggcuuccucgagggcggcugggagggcaugaucgccggcuggcacggcuacaccucccacggcgcccacggcgucgccgucgccgccgaccucaaguccacccaggaggccaucaacaagaucaccaagaaccucaacucccucuccgagcucgaggucaagaaccuccagcgccucuccggcgccauggacgagcuccacaacgagauccucgagcucgacgagaaggucgacgaccuccgcgccgacaccaucuccucccagaucgagcucgccguccuccucuccaacgagggcaucaucaacuccgaggacgagcaccuccucgcccucgagcgcaagcucaagaagaugcucggccccuccgccgucgagaucggcaacggcugcuucgagaccaagcacaagugcaaccagaccugccucgaccgcaucgccgccggcaccuucgacgccggcgaguucucccuccccaccuucgacucccucaacaucaccgccgccucccucaacgacgacggccucgacaaccacaccauccuccucuacuacuccaccgccgccuccucccucgccgucacccucaugaucgccaucuucgucgucuacauggucucccgcgacaacgucuccugcuccaucugccucuga

SEQ ID NO: 123024 - RNA, 1758 nt, Artificial Sequence
  derived and/or modified CDS sequence (opt2) from hemagglutinin__InfluenzaB__AGX15629
augaaggccaucaucguccuccucauggucgucaccuccaacgccgaccgcaucugcaccggcaucaccuccuccaacuccccccacgucgucaagaccgccacccagggcgaggucaacgucaccggcgucaucccccucaccaccacccccaccaagucccacuucgccaaccucaagggcaccgagacccgcggcaagcucugccccaagugccucaacugcaccgaccucgacgucgcccucggccgccccaagugcaccggcaacauccccuccgcccgcgucuccauccuccacgagguccgccccgucaccuccggcugcuuccccaucaugcacgaccgcaccaagauccgccagcuccccaaccuccuccgcggcuacgagcacauccgccucuccacccacaacgucaucaacgccgagaacgcccccggcggccccuacaagaucggcaccuccggcuccugccccaacgucaccaacggcaacggcuucuucgccaccauggccugggccguccccaagaacgacaacaacaagaccgccaccaacucccucaccaucgagguccccuacaucugcaccgagggcgaggaccagaucaccgucuggggcuuccacuccgacaacgagauccagauggccaagcucuacggcgacuccaagccccagaaguucaccuccuccgccaacggcgucaccacccacuacgucucccagaucggcggcuuccccaaccagaccgaggacggcggccucccccaguccggccgcaucgucgucgacuacaugguccagaaguccggcaagaccggcaccaucaccuaccagcgcggcauccuccucccccagaaggucuggugcaccuccggccgcuccaaggucaucaagggcucccucccccucaucggcgaggccgacugccuccacgagaaguacggcggccucaacaaguccaagcccuacuacaccggcgagcacgccaaggccaucggcaacugccccaucugggucaagaccccccucaagcucgccaacggcaccaaguaccgcccccccgccaagcuccucaaggagcgcggcuucuucggcgccaucgccggcuuccucgagggcggcugggagggcaugaucgccggcuggcacggcuacaccucccacggcgcccacggcgucgccgucgccgccgaccucaaguccacccaggaggccaucaacaagaucaccaagaaccucaacucccucuccgagcucgaggucaagaaccuccagcgccucuccggcgccauggacgagcuccacaacgagauccucgagcucgacgagaaggucgacgaccuccgcgccgacaccaucuccucccagaucgagcucgccguccuccucuccaacgagggcaucaucaacuccgaggacgagcaccuccucgcccucgagcgcaagcucaagaagaugcucggccccuccgccgucgagaucggcaacggcugcuucgagaccaagcacaagugcaaccagaccugccucgaccgcaucgccgccggcaccuucgacgccggcgaguucucccuccccaccuucgacucccucaacaucaccgccgccucccucaacgacgacggccucgacaaccacaccauccuccucuacuacuccaccgccgccuccucccucgccgucacccucaugaucgccaucuucgucgucuacauggucucccgcgacaacgucuccugcuccaucugccucuga

SEQ ID NO: 123025 - RNA, 1758 nt, Artificial Sequence
  derived and/or modified CDS sequence (opt2) from hemagglutinin__InfluenzaB__AGX15651
augaaggccaucaucguccuccucauggucgucaccuccaacgccgaccgcaucugcaccggcaucaccuccuccaacuccccccacgucgucaagaccgccacccagggcgaggucaacgucaccggcgucaucccccucaccaccacccccaccaagucccacuucgccaaccucaagggcaccgagacccgcggcaagcucugccccaagugccucaacugcaccgaccucgacgucgcccucggccgccccaagugcaccggcaagauccccuccgcccgcgucuccauccuccacgagguccgccccgucaccuccggcugcuuccccaucaugcacgaccgcaccaagauccgccagcuccccaaccuccuccgcggcuacgagcacauccgccucuccacccacaacgucaucaacgccgagaacgcccccggcggccccuacaagaucggcaccuccggcuccugccccaacaucaccaacggcaacggcuucuucgccaccauggccugggccguccccaagaacgacaagaacaagaccgccaccaacccccucaccaucgagguccccuacaucugcaccgagggcgaggaccagaucaccgucuggggcuuccacuccgacaacgagacccagauggccaagcucuacggcgacuccaagccccagaaguucaccuccuccgccaacggcgucaccacccacuacgucucccagaucggcggcuuccccaaccagaccgaggacggcggccucccccaguccggccgcaucgucgucgacuacaugguccagaaguccggcaagaccggcaccaucaccuaccagcgcggcauccuccucccccagaaggucuggugcgccuccggccgcuccaaggucaucaagggcucccucccccucaucggcgaggccgacugccuccacgagaaguacggcggccucaacaaguccaagcccuacuacaccggcgagcacgccaaggccaucggcaacugccccaucugggucaagaccccccucaagcucgccaacggcaccaaguaccgcccccccgccaagcuccucaaggagcgcggcuucuucggcgccaucgccggcuuccucgagggcggcugggagggcaugaucgccggcuggcacggcuacaccucccacggcgcccacggcgucgccgucgccgccgaccucaaguccacccaggaggccaucaacaagaucaccaagaaccucaacucccucuccgagcucgaggucaagaaccuccagcgccucuccggcgccauggacgagcuccacaacgagauccucgagcucgacgagaaggucgacgaccuccgcgccgacaccaucuccucccagaucgagcucgccguccuccucuccaacgagggcaucaucaacuccgaggacgagcaccuccucgcccucgagcgcaagcucaagaagaugcucggccccuccgccgucgagaucggcaacggcugcuucgagaccaagcacaagugcaaccagaccugccucgaccgcaucgccgccggcaccuucgacgccggcgaguucucccuccccaccuucgacucccucaacaucaccgccgccucccucaacgacgacggccucgacaaccacaccauccuccucuacuacuccaccgccgccuccucccucgccgucacccucaugaucgccaucuucgucgucuacauggucucccgcgacaacgucuccugcuccaucugccucuga

SEQ ID NO: 123026 - RNA, 1758 nt, Artificial Sequence; identical to SEQ ID NO: 123025
  derived and/or modified CDS sequence (opt2) from hemagglutinin__InfluenzaB__AGX15675

SEQ ID NO: 123027 - RNA, 1758 nt, Artificial Sequence; identical to SEQ ID NO: 123025
  derived and/or modified CDS sequence (opt2) from hemagglutinin__InfluenzaB__AGX15686

SEQ ID NO: 123028 - RNA, 1758 nt, Artificial Sequence
  derived and/or modified CDS sequence (opt2) from hemagglutinin__InfluenzaB__AGX15697
augaaggccaucaucguccuccucauggucgucaccuccaacgccgaccgcaucugcaccggcaucaccuccuccaacuccccccacgucgucaagaccgccacccagggcgaggucaacgucaccggcgucaucccccucaccaccacccccaccaagucccacuucgccaaccucaagggcaccgagacccgcggcaagcucugccccaagugccucaacugcaccgaccucgacgucgcccucggccgccccaagugcaccggcaagauccccuccgcccgcgucuccauccuccacgagguccgccccgucaccuccggcugcuuccccaucaugcacgaccgcaccaagauccgccagcuccccaaccuccuccgcggcuacgagcacauccgccucuccacccacaacgucaucaacgccgagaacgcccccggcggccccuacaagaucggcaccuccggcuccugccccaacaucaccaacggcaacggcuucuucgccaccauggccugggccguccccaagaacgacaagaacaagaccgccaccaacccccucaccaucgagguccccuacaucugcaccgagggcgaggaccagaucaccgucuggggcuuccacuccgacaacgagaaccagauggccaagcucuacggcgacuccaagccccagaaguucaccuccuccgccaacggcgucaccacccacuacgucucccagaucggcggcuuccccaaccagaccgaggacggcggccucccccaguccggccgcaucgucgucgacuacaugguccagaaguccggcaagaccggcaccaucaccuaccagcgcggcauccuccucccccagaaggucuggugcgccuccggccgcuccaaggucaucaagggcucccucccccucaucggcgaggccgacugccuccacgagaaguacggcggccucaacaaguccaagcccuacuacaccggcgagcacgccaaggccaucggcaacugccccaucugggucaagaccccccucaagcucgccaacggcaccaaguaccgcccccccgccaagcuccucaaggagcgcggcuucuucggcgccaucgccggcuuccucgagggcggcugggagggcaugaucgccggcuggcacggcuacaccucccacggcgcccacggcgucgccgucgccgccgaccucaaguccacccaggaggccaucaacaagaucaccaagaaccucaacucccucuccgagcucgaggucaagaaccuccagcgccucuccggcgccauggacgagcuccacaacgagauccucgagcucgacgagaaggucgacgaccuccgcgccgacaccaucuccucccagaucgagcucgccguccuccucuccaacgagggcaucaucaacuccgaggacgagcaccuccucgcccucgagcgcaagcucaagaagaugcucggccccuccgccgucgagaucggcaacggcugcuucgagaccaagcacaagugcaaccagaccugccucgaccgcaucgccgccggcaccuucgacgccggcgaguucucccuccccaccuucgacucccucaacaucaccgccgccucccucaacgacgacggccucgacaaccacaccauccuccucuacuacuccaccgccgccuccucccucgccgucacccucaugaucgccaucuucgucgucuacauggucucccgcgacaacgucuccugcuccaucugccucuga

SEQ ID NO: 123029 - RNA, 1758 nt, Artificial Sequence; identical to SEQ ID NO: 123025
  derived and/or modified CDS sequence (opt2) from hemagglutinin__InfluenzaB__AGX15708

SEQ ID NO: 123030 - RNA, 1758 nt, Artificial Sequence; identical to SEQ ID NO: 123025
  derived and/or modified CDS sequence (opt2) from hemagglutinin__InfluenzaB__AGX15719

SEQ ID NO: 123031 - RNA, 1758 nt, Artificial Sequence; identical to SEQ ID NO: 122550
  derived and/or modified CDS sequence (opt2) from hemagglutinin__InfluenzaB__AGX15730

SEQ ID NO: 123032 - RNA, 1758 nt, Artificial Sequence; identical to SEQ ID NO: 123025
  derived and/or modified CDS sequence (opt2) from hemagglutinin__InfluenzaB__AGX15741

SEQ ID NO: 123033 - RNA, 1758 nt, Artificial Sequence; identical to SEQ ID NO: 123025
  derived and/or modified CDS sequence (opt2) from hemagglutinin__InfluenzaB__AGX15753

SEQ ID NO: 123034 - RNA, 1758 nt, Artificial Sequence
  derived and/or modified CDS sequence (opt2) from hemagglutinin__InfluenzaB__AGX15764
augaaggccaucaucguccuccucauggucgucaccuccaacgccgaccgcaucugcaccggcaucaccuccuccaacuccccccacgucgucaagaccgccacccagggcgaggucaacgucaccggcgucaucccccucaccaccacccccaccaagucccacuucgccaaccucaagggcaccgagacccgcggcaagcucugccccaagugccucaacugcaccgaccucgacgucgcccucggccgccccaagugcaccggcaagauccccuccgcccgcgucuccauccuccacgagguccgccccgucaccuccggcugcuuccccaucaugcacgaccgcaccaagauccgccagcuccccaaccuccuccgcggcuacgagcacauccgccucuccacccacaacgucaucaacgccgagaacgcccccggcggccccuacaagaucggcaccuccggcuccugccccaacaucaccaacggcaacggcuucuucgccaccauggccugggccguccccaagaacgacaagaacaagaccgccaccaacccccucaccaucgagguccccuacaucugcaccgagggcgaggaccagaucaccgucuggggcuuccacuccgacaacgagacccagauggccaagcucuacggcgacuccaagccccagaaguucaccuccuccgccaacggcgucaccacccacuacgucucccagaucggcggcuuccccaaccagaccgaggacggcggccucccccaguccggccgcaucgucgucgacuacaugguccagaaguccggcaagaccggcaccaucaccuaccagcgcggcauccuccucccccagaaggucuggugcgccuccggccgcuccaaggucaucaagggcucccucccccucaucggcgaggccgacugccuccacgagaaguacggcggccucaacaaguccaagcccuacuacaccggcgagcacgccaaggccaucggcaacugccccaucugggucaagaccccccucaagcucgccaacggcaccaaguaccgcccccccgccaagcuccucaaggagcgcggcuucuucggcgccaucgccggcuuccucgagggcggcugggagggcaugaucgccggcuggcacggcuacaccucccacggcgcccacggcgucgccgucgccgccgaccucaaguccacccaggaggccaucaacaagaucaccaagaaccucaacucccucuccgagcucgaggucaagaaccuccagcgccucuccggcgccauggacgagcuccacaacgagauccucgagcucgacgagaaggucgacgaccuccgcgccgacaccaucuccucccagaucgagcucgccguccuccucuccaacgagggcaucaucaacuccgaggacgagcaccuccucgcccucgagcgcaagcucaagaagaugcucggccccuccgccgucgagaucggcaacggcugcuucgagaccaagcacaagugcaaccagaccugccucgaccgcaucgccgccggcaccuucgacgccggcgaguucucccuccccaccuucgacucccucaacaucaccgccgccucccucaacgacgacggccucgacaaccacaccauccuccucuacuacuccaccgccgccuccucccucgccaucacccucaugaucgccaucuucgucgucuacauggucucccgcgacaacgucuccugcuccaucugccucuga

SEQ ID NO: 123035 - RNA, 1755 nt, Artificial Sequence
  derived and/or modified CDS sequence (opt2) from hemagglutinin__InfluenzaB__AGX15775
augaaggccaucaucguccuccucauggucgucaccuccaacgccgaccgcaucugcaccggcaucaccuccuccaacuccccccacgucgucaagaccgccacccagggcgaggucaacgucaccggcgucaucccccucaccaccacccccaccaaguccuacuucgccaaccucaagggcacccgcacccgcggcaagcucugccccgacugccucaacugcaccgaccucgacgucgcccucggccgccccaugugcgucggcaccacccccuccgccaaggccuccauccuccacgagguccgccccgucaccuccggcugcuuccccaucaugcacgaccgcaccaagauccgccagcuccccaaccuccuccgcggcuacgagaacauccgccucuccacccagaacgucaucgacgccgagaaggcccccggcggccccuaccgccucggcaccuccggcuccugccccaacgccaccuccaaguccggcuucuucgccaccauggccugggccguccccaaggacaacaacaagaacgccaccaacccccucaccgucgagguccccuacaucugcaccgagggcgaggaccagaucaccgucuggggcuuccacuccgacaacaagauccagaugaagaaccucuacggcgacuccaacccccagaaguucaccuccuccgccaacggcgucaccacccacuacgucucccagaucggcuccuuccccgaccagaccgaggacggcggccucccccaguccggccgcaucgucgucgacuacaugaugcagaagcccggcaagaccggcaccaucgucuaccagcgcggcguccuccucccccagcgcgucuggugcgccuccggccgcuccaaggucaucaagggcucccucccccucaucggcgaggccgacugccuccacgagaaguacggcggccucaacaaguccaagcccuacuacaccggcgagcacgccaaggccaucggcaacugccccaucugggucaagaccccccucaagcucgccaacggcaccaaguaccgcccccccgccaagcuccucaaggagcgcggcuucuucggcgccaucgccggcuuccucgagggcggcugggagggcaugaucgccggcuggcacggcuacaccucccacggcgcccacggcgucgccgucgccgccgaccucaaguccacccaggaggccaucaacaagaucaccaagaaccucaacucccucuccgagcucgaggucaagaaccuccagcgccucuccggcgccauggacgagcuccacaacgagauccucgagcucgacgagaaggucgacgaccuccgcgccgacaccaucuccucccagaucgagcucgccguccuccucuccaacgagggcaucaucaacuccgaggacgagcaccuccucgcccucgagcgcaagcucaagaagaugcucggccccuccgccgucgagaucggcaacggcugcuucgagaccaagcacaagugcaaccagaccugccucgaccgcaucgccgccggcaccuucaacgccggcgaguucucccuccccaccuucgacucccucaacaucaccgccgccucccucaacgacgacggccucgacaaccacaccauccuccucuacuacuccaccgccgccuccucccucgccgucacccucaugcucgccaucuucaucgucuacauggucucccgcgacaacgucuccugcuccaucugccucuga

SEQ ID NO: 123036 - RNA, 1758 nt, Artificial Sequence
  derived and/or modified CDS sequence (opt2) from hemagglutinin__InfluenzaB__AGX15786
augaaggccaucaucguccuccucauggucgucaccuccaacgccgaccgcaucugcaccggcaucaccuccuccaacuccccccacgucgucaagaccgccacccagggcgaggucaacgucaccggcgucaucccccucaccaccacccccaccaagucccacuucgccaaccucaagggcaccgagacccgcggcaagcucugccccaagugccucaacugcaccgaccucgacgucgcccucggccgccccaagugcaccggcaagauccccuccgcccgcgucuccauccuccacgagguccgccccgucaccuccggcugcuuccccaucaugcacgaccgcaccaagauccgccagcuccccaaccuccuccgcggcuacgagcacauccgccucuccacccacaacgucaucaacgccgagaacgcccccggcggccccuacaagaucggcaccuccggcuccugccccaacaucaccaacggcaacggcuucuucgccaccauggccugggccguccccaagaacgacaagaacaagaccgccaccaacccccucaccaucgagguccccuacaucugcaccgagggcgaggaccagaucaccgucuggggcuuccacuccgacaacgagacccagauggccaagcucuacggcgacuccaagccccagaaguucaccuccuccgccaacggcgucaccacccacuacgucucccagaucggcggcuuccccaaccagaccgaggacggcggccucccccaguccggccgcaucgucgucgacuacaugguccagaaguccggcaagaccggcaccaucaccuaccagcgcggcauccuccucccccagaaggucuggugcgccuccggccgcuccaaggucaucaagggcucccucccccucaucggcgaggccgacugccuccacgagaaguacggcggccucaacaaguccaagcccuacuacaccggcgagcacgccaaggccaucggcaacugccccaucugggucaagaccccccucaagcucgccaacggcaccaaguaccgcccccccgccaagcuccucaaggagcgcggcuucuucggcgccaucgccggcuuccucgagggcggcugggagggcaugaucgccggcuggcacggcuacaccucccacggcgcccacggcgucgccgucgccgccgaccucaaguccacccaggaggccaucaacaagaucaccaagaaccucaacucccucuccgagcucgaggucaagaaccuccagcgccucuccggcgccauggacgagcuccacaacgagauccucgagcucgacgagaaggucgacgaccuccgcgccgacaccaucuccucccagaucgagcucgccguccuccucuccaacgagggcaucaucaacuccgaggacgagcaccuccucgcccucgagcgcaagcucaagaagaugcucggccccuccgccgucgagaucggcaacggcugcuucgagaccaagcacaagugcaaccagaccugccucgaccgcaucgccgccggcaccuucgacgccggcgaguucuuccuccccaccuucgacucccucaacaucaccgccgccucccucaacgacgacggccucgacaaccacaccauccuccucuacuacuccaccgccgccuccucccucgccgucacccucaugaucgccaucuucgucgucuacauggucucccgcgacaacgucuccugcuccaucugccucuga

SEQ ID NO: 123037 - RNA, 1758 nt, Artificial Sequence; identical to SEQ ID NO: 123025
  derived and/or modified CDS sequence (opt2) from hemagglutinin__InfluenzaB__AGX15797

SEQ ID NO: 123038 - RNA, 1758 nt, Artificial Sequence
  derived and/or modified CDS sequence (opt2) from hemagglutinin__InfluenzaB__AGX15808
augaaggccaucaucguccuccucauggucgucaccuccaacgccgaccgcaucugcaccggcaucaccuccuccaacuccccccacgucgucaagaccgccacccagggcgaggucaacgucaccggcgucaucccccucaccaccacccccaccaagucccacuucgccaaccucaagggcaccgagacccgcggcaagcucugccccaagugccucaacugcaccgaccucgacgucgcccucggccgccccaagugcaccggcaagauccccuccgcccgcgucuccauccuccacgagguccgccccgucaccuccggcugcuuccccaucaugcacgaccgcaccaagauccgccagcuccccaaccuccuccgcggcuacgagcacauccgccucuccacccacaacgucaucaacgccgagaacgcccccggcggccccuacaagaucggcaccuccggcuccugccccaacgucaccaacggcaacggcuucuucgccaccauggccugggccguccccaagaacgacaagaacaagaccgccaccaacccccucaccaucgagguccccuacaucugcaccgagggcgaggaccagaucaccgucuggggcuuccacuccgacaacgagacccagauggccaagcucuacggcgacuccaagccccagaaguucaccuccuccgccaacggcgucaccacccacuacgucucccagaucggcggcuuccccaaccagaccgaggacggcggccucccccaguccggccgcaucgucgucgacuacaugguccagaaguccggcaagaccggcaccaucaccuaccagcgcggcauccuccucccccagaaggucuggugcgccaucggccgcuccaaggucaucaagggcucccucccccucaucggcgaggccgacugccuccacgagaaguacggcggccucaacaaguccaagcccuacuacaccggcgagcacgccaaggccaucggcaacugccccaucugggucaagaccccccucaagcucgccaacggcaccaaguaccgcccccccgccaagcuccucaaggagcgcggcuucuucggcgccaucgccggcuuccucgagggcggcugggagggcaugaucgccggcuggcacggcuacaccucccacggcgcccacggcgucgccgucgccgccgaccucaaguccacccaggaggccaucaacaagaucaccaagaaccucaacucccucuccgagcucgaggucaagaaccuccagcgccucuccggcgccauggacgagcuccacaacgagauccucgagcucgacgagaaggucgacgaccuccgcgccgacaccaucuccucccagaucgagcucgccguccuccucuccaacgagggcaucaucaacuccgaggacgagcaccuccucgcccucgagcgcaagcucaagaagaugcucggccccuccgccgucgagaucggcaacggcugcuucgagaccaagcacaagugcaaccagaccugccucgaccgcaucgccgccggcaccuucgacgccggcgaguucucccuccccaccuucgacucccucaacaucaccgccgccucccucaacgacgacggccucgacaaccacaccauccuccucuacuacuccaccgccgccuccucccucgccgucacccucaugaucgccaucuucgucgucuacauggucucccgcgacaacgucuccugcuccaucugccucuga

SEQ ID NO: 123039 - RNA, 1758 nt, Artificial Sequence; identical to SEQ ID NO: 122644
  derived and/or modified CDS sequence (opt2) from hemagglutinin__InfluenzaB__AGX15830

SEQ ID NO: 123040 - RNA, 1758 nt, Artificial Sequence; identical to SEQ ID NO: 122644
  derived and/or modified CDS sequence (opt2) from hemagglutinin__InfluenzaB__AGX15841

SEQ ID NO: 123041 - RNA, 1758 nt, Artificial Sequence; identical to SEQ ID NO: 122644
  derived and/or modified CDS sequence (opt2) from hemagglutinin__InfluenzaB__AGX15852

SEQ ID NO: 123042 - RNA, 1758 nt, Artificial Sequence; identical to SEQ ID NO: 122644
  derived and/or modified CDS sequence (opt2) from hemagglutinin__InfluenzaB__AGX15863

SEQ ID NO: 123043 - RNA, 1758 nt, Artificial Sequence
  derived and/or modified CDS sequence (opt2) from hemagglutinin__InfluenzaB__AGX15874
augaaggccaucaucguccuccucauggucgucaccuccaacgccgaccgcaucugcaccggcaucaccuccuccaacuccccccacgucgucaagaccgccacccagggcgaggucaacgucaccggcgucaucccccucaccaccacccccaccaagucccacuucgccaaccucaagggcaccgagacccgcggcaagcucugccccaagugccccaacugcaccgaccucgacgucgcccucggccgccccaagugcaccggcaagauccccuccgcccgcgucuccauccuccacgagguccgccccgucaccuccggcugcuuccccaucaugcacgaccgcaccaagauccgccagcuccccaaccuccuccgcggcuacgagcacauccgccucuccacccacaacgucaucaacgccgagaacgcccccggcggccccuacaagaucggcaccuccggcuccugccccaacgucaccaacggcaacggcuucuucgccaccauggccugggccguccccaagaacgacaagaacaagaccgccaccaacccccucaccaucgagguccccuacaucugcaccgagggcgaggaccagaucaccgucuggggcuuccacuccgacaacgagacccagauggccaagcucuacggcgacuccaagccccagaaguucaccuccuccgccaacggcgucaccacccacuacgucucccagaucggcggcuuccccaaccagaccgaggacggcggccucccccaguccggccgcaucgucgucgacuacaugguccagaaguccggcaagaccggcaccaucaccuaccagcgcggcauccuccucccccagaaggucuggugcgccuccggccgcuccaaggucaucaagggcucccucccccucaucggcgaggccgacugccuccacgagaaguacggcggccucaacaaguccaagcccuacuacaccggcgagcacgccaaggccaucggcaacugccccaucugggucaagaccccccucaagcucgccaacggcaccaaguaccgcccccccgccaagcuccucaaggagcgcggcuucuucggcgccaucgccggcuuccucgagggcggcugggagggcaugaucgccggcuggcacggcuacaccucccacggcgcccacggcgucgccgucgccgccgaccucaaguccacccaggaggccaucaacaagaucaccaagaaccucaacucccucuccgagcucgaggucaagaaccuccagcgccucuccggcgccauggacgagcuccacaacgagauccucgagcucgacgagaaggucgacgaccuccgcgccgacaccaucuccucccagaucgagcucgccguccuccucuccaacgagggcaucaucaacuccgaggacgagcaccuccucgcccucgagcgcaagcucaagaagaugcucggccccuccgccgucgagaucggcaacggcugcuucgagaccaagcacaagugcaaccagaccugccucgaccgcaucgccgccggcaccuucgacgccggcgaguucucccuccccaccuucgacucccucaacaucaccgccgccucccucaacgacgacggccucaacaaccacaccauccuccucuacuacuccaccgccgccuccucccucgccgucacccucaugaucgccaucuucgucgucuacauggucucccgcgacaacgucuccugcuccaucugccucuga

SEQ ID NO: 123044 - RNA, 1758 nt, Artificial Sequence; identical to SEQ ID NO: 122644
  derived and/or modified CDS sequence (opt2) from hemagglutinin__InfluenzaB__AGX15885

SEQ ID NO: 123045 - RNA, 1758 nt, Artificial Sequence
  derived and/or modified CDS sequence (opt2) from hemagglutinin__InfluenzaB__AGX15896
augaaggccaucaucguccuccucauggucgucaccuccaacgccgaccgcaucugcaccggcaucaccuccuccaacuccccccacgucgucaagaccgccacccagggcgaggucaacgucaccggcgucaucccccucaccaccacccccaccaagucccacuucgccaaccucaagggcaccgagacccgcggcaagcucugccccaagugccccaacugcaccgaccucgacgucgcccucggccgccccaagugcaccggcaagauccccuccgcccgcgucuccauccuccacgagguccgccccgucaccuccggcugcuuccccaucaugcacgaccgcaccaagauccgccagcuccccaaccuccuccgcggcuacgagcacauccgccucuccacccacaacgucaucaacgccgagaacgcccccggcggccccuacaagaucggcaccuccggcuccugccccaacgucaccaacggcaacggcuucuucgccaccauggccugggccguccccaagaacgacaagaacaagaccgccaccaacccccucaccaucgagguccccuacaucugcaccgagggcgaggaccagaucaccgucuggggcuuccacuccgacaacgagacccagauggccaagcucuacggcgacuccaagccccagaaguucaccuccuccgccaacggcgucaccgcccacuacgucucccagaucggcggcuuccccaaccagaccgaggacggcggccucccccaguccggccgcaucgucgucgacuacaugguccagaaguccggcaagaccggcaccaucaccuaccagcgcggcauccuccucccccagaaggucuggugcgccuccggccgcuccaaggucaucaagggcucccucccccucaucggcgaggccgacugccuccacgagaaguacggcggccucaacaaguccaagcccuacuacaccggcgagcacgccaaggccaucggcaacugccccaucugggucaagaccccccucaagcucgccaacggcaccaaguaccgcccccccgccaagcuccucaaggagcgcggcuucuucggcgccaucgccggcuuccucgagggcggcugggagggcaugaucgccggcuggcacggcuacaccucccacggcgcccacggcgucgccgucgccgccgaccucaaguccacccaggaggccaucaacaagaucaccaagaaccucaacucccucuccgagcucgaggucaagaaccuccagcgccucuccggcgccauggacgagcuccacggcgagauccucgagcucgacgagaaggucgacgaccuccgcgccgacaccaucuccucccagaucgagcucgccguccuccucuccaacgagggcaucaucaacuccgaggacgagcaccuccucgcccucgagcgcaagcucaagaagaugcucggccccuccgccgucgagaucggcaacggcugcuucgagaccaagcacaagugcaaccagaccugccucgaccgcaucgccgccggcaccuucgacgccggcgaguucucccuccccaccuucgacucccucaacaucaccgccgccucccucaacgacgacggccucgacaaccacaccauccuccucuacuacuccaccgccgccuccucccucgccgucacccucaugaucgccaucuucgucgucuacauggucucccgcgacaacgucuccugcuccaucugccucuga

SEQ ID NO: 123046 - RNA, 1758 nt, Artificial Sequence; identical to SEQ ID NO: 122644
  derived and/or modified CDS sequence (opt2) from hemagglutinin__InfluenzaB__AGX15907

SEQ ID NO: 123047 - RNA, 1758 nt, Artificial Sequence; identical to SEQ ID NO: 122644
  derived and/or modified CDS sequence (opt2) from hemagglutinin__InfluenzaB__AGX15918

SEQ ID NO: 123048 - RNA, 1758 nt, Artificial Sequence
  derived and/or modified CDS sequence (opt2) from hemagglutinin__InfluenzaB__AGX15929
augaaggccaucaucguccuccucauggucgucaccuccaacgccgaccgcaucugcaccggcaucaccuccuccaacuccccccacgucgucaagaccgccacccagggcgaggucaacgucaccggcgucaucccccucaccaccacccccaccaagucccacuucgccaaccucaagggcaccgagacccgcggcaagcucugccccaagugccucaacugcaccgaccucgacgucgcccucggccgccccaagugcaccggcaagauccccuccgcccgcgucuccauccuccacgagguccgccccgucaccuccggcugcuuccccaucaugcacgaccgcaccaagauccgccagcuccccaaccuccuccgcggcuacgagcacauccgccucuccaccaacaacgucaucaacgccgagaacgcccccggcggccccuacaagaucggcaccuccggcuccugccccaacgucaccaacggcaacggcuucuucgccaccauggccugggccguccccaagaacgacaagaacaagaccgccaccaacccccucaccaucgagguccccuacaucugcaccgagggcgaggaccagaucaccgucuggggcuuccacuccgacaacgagacccagauggccaagcucuacggcgacuccaagccccagaaguucaccuccuccgccaacggcgucaccacccacuacgucucccagaucggcggcuuccccaaccagaccgaggacggcggccucccccaguccggccgcaucgucgucgacuacaugguccagaaguccgagaagaccggcaccaucaccuaccagcgcggcauccuccucccccagaaggucuggugcgccuccggccgcuccaaggucaucaagggcucccucccccucaucggcgaggccgacugccuccacgagaaguacggcggccucaacaaguccaagcccuacuacaccggcgagcacgccaaggccaucggcaacugccccaucugggucaagaccccccucaagcucgccaacggcaccaaguaccgcccccccgccaagcuccucaaggagcgcggcuucuucggcgccaucgccggcuuccucgagggcggcugggagggcaugaucgccggcuggcacggcuacaccucccacggcgcccacggcgucgccgucgccgccgaccucaaguccacccaggaggccaucaacaagaucaccaagaaccucaacucccucuccgagcucgaggucaagaaccuccagcgccucuccggcgccauggacgagcuccacaacgagauccucgagcucgacgagaaggucgacgaccuccgcgccgacaccaucuccucccagaucgagcucgccguccuccucuccaacgagggcaucaucaacuccgaggacgagcaccuccucgcccucgagcgcaagcucaagaagaugcucggccccuccgccgucgagaucggcaacggcugcuucgagaccaagcacaagugcaaccagaccugccucgaccgcaucgccgccggcaccuucgacgccggcgaguucucccuccccaccuucgacucccucaacaucaccgccgccucccucaacgacgacggccucgacaaccacaccauccuccucuacuacuccaccgccgccuccucccucgccgucacccucaugaucgccaucuucgucgucuacauggucucccgcgacaacgucuccugcuccaucugccucuga

SEQ ID NO: 123049 - RNA, 1758 nt, Artificial Sequence; identical to SEQ ID NO: 122644
  derived and/or modified CDS sequence (opt2) from hemagglutinin__InfluenzaB__AGX15940

SEQ ID NO: 123050 - RNA, 1758 nt, Artificial Sequence
  derived and/or modified CDS sequence (opt2) from hemagglutinin__InfluenzaB__AGX15962
augaaggccaucaucguccuccucauggucgucaccuccaacgccgaccgcaucugcaccggcaucaccuccuccaacuccccccacaucgucaagaccgccacccagggcgaggucaacgucaccggcgucaucccccucaccaccacccccaccaagucccacuucgccaaccucaagggcaccgagacccgcggcaagcucugccccaagugccucaacugcaccgaccucgacgucgcccucggccgccccaagugcaccggcaagauccccuccgcccgcgucuccauccuccacgagguccgccccgucaccuccggcugcuuccccaucaugcacgaccgcaccaagauccgccagcuccccaaccuccuccgcggcuacgagcacauccgccucuccacccacaacgucaucaacgccgagaacgcccccggcggccccuacaagaucggcaccuccggcuccugccccaacaucaccaacggcaacggcuucuucgccaccauggccugggccguccccaagaacgacaagaacaagaccgccaccaacccccucaccaucgagguccccuacaucugcaccgagggcgaggaccagaucaccgucuggggcuuccacuccgacaacgagacccagauggccaagcucuacggcgacuccaagccccagaaguucaccuccuccgccaacggcgucaccacccacuacgucucccagaucggcggcuuccccaaccagaccgaggacggcggccucccccaguccggccgcaucgucgucgacuacaugaugcagaaguccggcaagaccggcaccaucaccuaccagcgcggcauccuccucccccagaaggucuggugcgccuccggccgcuccaaggucaucaagggcucccucccccucaucggcgaggccgacugccuccacgagaaguacggcggccucaacaaguccaagcccuacuacaccggcgagcacgccaaggccaucggcaacugccccaucugggucaagaccccccucaagcucgccaacggcaccaaguaccgcccccccgccaagcuccucaaggagcgcggcuucuucggcgccaucgccggcuuccucgagggcggcugggagggcaugaucgccggcuggcacggcuacaccucccacggcgcccacggcgucgccgucgccgccgaccucaaguccacccaggaggccaucaacaagaucaccaagaaccucaacucccucuccgagcucgaggucaagaaccuccagcgccucuccggcgccauggacgagcuccacaacgagauccucgagcucgacgagaaggucgacgaccuccgcgccgacaccaucuccucccagaucgagcucgccguccuccucuccaacgagggcaucaucaacuccgaggacgagcaccuccucgcccucgagcgcaagcucaagaagaugcucggccccuccgccgucgagaucggcaacggcugcuucgagaccaagcacaagugcaaccagaccugccucgaccgcaucgccgccggcaccuucgacgccggcgaguucucccuccccaccuucgacucccucaacaucaccgccgccucccucaacgacgacggccucgacaaccacaccauccuccucuacuacuccaccgccgccuccucccucgccgucacccucaugaucgccaucuucgucgucuacauggucucccgcgacaacgucuccugcuccaucugccucuga

SEQ ID NO: 123051 - RNA, 1758 nt, Artificial Sequence; identical to SEQ ID NO: 122681
  derived and/or modified CDS sequence (opt2) from hemagglutinin__InfluenzaB__AGX15973

SEQ ID NO: 123052 - RNA, 1758 nt, Artificial Sequence; identical to SEQ ID NO: 122681
  derived and/or modified CDS sequence (opt2) from hemagglutinin__InfluenzaB__AGX15984

SEQ ID NO: 123053 - RNA, 1758 nt, Artificial Sequence; identical to SEQ ID NO: 122719
  derived and/or modified CDS sequence (opt2) from hemagglutinin__InfluenzaB__AGX15995

SEQ ID NO: 123054 - RNA, 1758 nt, Artificial Sequence; identical to SEQ ID NO: 122719
  derived and/or modified CDS sequence (opt2) from hemagglutinin__InfluenzaB__AGX16006

SEQ ID NO: 123055 - RNA, 1758 nt, Artificial Sequence
  derived and/or modified CDS sequence (opt2) from hemagglutinin__InfluenzaB__AGX16017
augaaggccaucaucguccuccucauggucgucaccuccaacgccgaccgcaucugcaccggcaucaccuccuccaacuccccccacaucgucaagaccgccacccagggcgaggucaacgucaccggcgucaucccccucaccaccacccccaccaagucccacuucgccaaccucaagggcaccgagacccgcggcaagcucugccccaagugccucaacugcaccgaccucgacgucgcccucggccgccccaagugcaccggcaagauccccuccgcccgcgucuccauccuccacgagguccgccccgucaccuccggcugcuuccccaucaugcacgaccgcaccaagauccgccagcuccccaaccuccuccgcggcuacgagcacauccgccucuccacccacaacgucaucaacgccgagaacgcccccggcggccccuacaagaucggcaccuccggcuccugccccaacaucaccaacggcaacggcuucuucgccaccauggccugggccguccccaagaacgacaagaacaagaccgccaccaacccccucaccaucgagguccccuacaucugcaccgagggcgaggaccagaucaccgucuggggcuuccacuccgacaacgagauccagauggccaagcucuacggcgacuccaagccccagaaguucaccuccuccgccaacggcgucaccacccacuacgucucccagaucggcggcuuccccaaccagaccgaggacggcggccucccccaguccggccgcaucgucgucgacuacaugguccagaaguccggcaagaccggcaccaucaccuaccagcgcggcauccuccucccccagaaggucuggugcgccuccggccgcuccaaggucaucaagggcucccucccccucaucggcgaggccgacugccuccacgagaaguacggcggccucaacaaguccaagcccuacuacaccggcgagcacgccaaggccaucggcaacugccccaucugggucaagaccccccucaagcucgccaacggcaccaaguaccgcccccccgccaagcuccucaaggagcgcggcuucuucggcgccaucgccggcuuccucgagggcggcugggagggcaugaucgccggcuggcacggcuacaccucccacggcgcccacggcgucgccgucgccgccgaccucaaguccacccaggaggccaucaacaagaucaccaagaaccucaacucccucuccgagcucgaggucaagaaccuccagcgccucuccggcgccauggacgagcuccacaacgagauccucgagcucgacgagaaggucgacgaccuccgcgccgacaccaucuccucccagaucgagcucgccguccuccucuccaacgagggcaucaucaacuccgaggacgagcaccuccucgcccucgagcgcaagcucaagaagaugcucggccccuccgccgucgagaucggcaacggcugcuucgagaccaagcacaagugcaaccagaccugccucgaccgcaucgccgccggcaccuucgacgccggcgaguucucccuccccaccuucgacucccucaacaucaccgccgccucccucaacgacgacggccucgacaaccacaccauccuccucuacuacuccaccgccgccuccucccucgccgucacccucaugaucgccaucuucgucgucuacauggucucccgcgacaacgucuccugcuccaucugccucuga

SEQ ID NO: 123056 - RNA, 1755 nt, Artificial Sequence; identical to SEQ ID NO: 122462
  derived and/or modified CDS sequence (opt2) from hemagglutinin__InfluenzaB__AGX16028

SEQ ID NO: 123057 - RNA, 1755 nt, Artificial Sequence
  derived and/or modified CDS sequence (opt2) from hemagglutinin__InfluenzaB__AGX16039
augaaggccaucaucguccuccucauggucgucaccuccaacgccgaccgcaucugcaccggcaucaccuccuccaacuccccccacgucgucaagaccgccacccagggcgaggucaacgucaccggcgucaucccccucaccaccacccccaccaaguccuacuucgccaaccucaagggcacccgcacccgcggcaagcucugccccgacugccucaacugcaccgaccucgacgucgcccucggccgccccaugugcgucggcaccacccccuccgccaaggccuccauccuccacgagguccgccccgucaccuccggcugcuuccccaucaugcacgaccgcaccaagauccgccagcuccccaaccuccuccgcggcuacgagaacauccgccucuccacccagaacgucaucgacgccgagaaggcccccggcggccccuaccgccucggcaccuccggcuccugccccaacgccaccuccaaguccggcuucuucgccaccauggccugggccguccccaaggacaacaacaagaacgccaccaacccccucaccgucgagguccccuacaucugcaccgagggcgaggaccagaucaccgucuggggcuuccacuccgacaacaagacccagaugaagaaccucuacggcgacuccaacccccagaaguucaccuccuccgccaacggcgucaccacccacuacgucucccagaucggcggcuuccccgaccagaccgaggacggcggccucccccaguccggccgcaucgucgucgacuacaugaugcagaagcccggcaagaccggcaccaucgucuaccagcgcggcguccuccucccccagaaggucuggugcgccuccggccgcuccaaggucaucaagggcucccucccccucaucggcgaggccgacugccuccacgagaaguacggcggccucaacaaguccaagcccuacuacaccggcgagcacgccaaggccaucggcaacugccccaucugggucaagaccccccucaagcucgccaacggcaccaaguaccgcccccccgccaagcuccucaaggagcgcggcuucuucggcgccaucgccggcuuccucgagggcggcugggagggcaugaucgccggcuggcacggcuacaccucccacggcgcccacggcgucgccgucgccgccgaccucaaguccacccaggaggccaucaacaagaucaccaagaaccucaacucccucuccgagcucgaggucaagaaccuccagcgccucuccggcgccgucgacgagcuccacaacgagauccucgagcucgacgagaaggucgacgaccuccgcgccgacaccaucuccucccagaucgagcucgccguccuccucuccaacgagggcaucaucaacuccgaggacgagcaccuccucgcccucgagcgcaagcucaagaagaugcucggccccuccgccgucgacaucggcaacggcugcuucgagaccaagcacaagugcaaccagaccugccucgaccgcaucgccgccggcaccuucaacgccggcgaguucucccuccccaccuucgacucccucaacaucaccgccgccucccucaacgacgacggccucgacaaccacaccauccuccucuacuacuccaccgccgccuccucccucgccgucacccucaugcucgccaucuucaucgucuacauggucucccgcgacaacgucuccugcuccaucugccucuga

SEQ ID NO: 123058 - RNA, 1755 nt, Artificial Sequence
  derived and/or modified CDS sequence (opt2) from hemagglutinin__InfluenzaB__AGX16050
augaaggccaucaucguccuccucauggucgucaccuccaacgccgaccgcaucugcaccggcaucaccuccuccaacuccccccacgucgucaagaccgccacccagggcgaggucaacgucaccggcgucaucccccucaccaccacccccaccaaguccuacuucgccaaccucaagggcacccgcacccgcggcaagcucugccccgacugccucaacugcaccgaccucgacgucgcccucggccgccccaugugcgucggcaccacccccuccgccaaggccuccauccuccacgagguccgccccgucaccuccggcugcuuccccaucaugcacgaccgcaccaagauccgccagcuccccaaccuccuccgcggcuacgagaacauccgccucuccacccagaacgucaucgacgccgagaacgcccccggcggccccuaccgccucggcaccuccggcuccugccccaacgccaccuccaaguccggcuucuucgccaccauggccugggccguccccaaggacaacaacaagaacgccaccaacccccucaccgucgagguccccuacaucugcaccgagggcgaggaccagaucaccgucuggggcuuccacuccgacaacaagacccagaugaagaaccucuacggcgacuccaacccccagaaguucaccuccuccgccaacggcgucaccacccacuacgucucccagaucggcggcuuccccgcccagaccgaggacggcggccucccccaguccggccgcaucgucgucgacuacaugguccagaagccccgcaagaccggcaccaucgucuaccagcgcggcguccuccucccccagaaggucuggugcgccuccggccgcuccaaggucaucaagggcucccucccccucaucggcgaggccgacugccuccacgagaaguacggcggccucaacaaguccaagcccuacuacaccggcgagcacgccaaggccaucggcaacugccccaucugggucaagaccccccucaagcucgccaacggcaccaaguaccgcccccccgccaagcuccucaaggagcgcggcuucuucggcgccaucgccggcuuccucgagggcggcugggagggcaugaucgccggcuggcacggcuacaccucccacggcgcccacggcgucgccgucgccgccgaccucaaguccacccaggaggccaucaacaagaucaccaagaaccucaacucccucuccgagcucgaggucaagaaccuccagcgccucuccggcgccauggacgagcuccacaacgagauccucgagcucgacgagaaggucgacgaccuccgcgccgacaccaucuccucccagaucgagcucgccguccuccucuccaacgagggcaucaucaacuccgaggacgagcaccuccucgcccucgagcgcaagcucaagaagaugcucggccccuccgccgucgacaucggcaacggcugcuucgagaccaagcacaagugcaaccagaccugccucgaccgcaucgccgccggcaccuucaacgccggcgaguucucccuccccaccuucgacucccucaacaucaccgccgccucccucaacgacgacggccucgacaaccacaccauccuccucuacuacuccaccgccgccuccucccucgccgucacccucaugcucgccaucuucaucgucuacauggucucccgcgacaacgucuccugcuccaucugccucuga

SEQ ID NO: 123059 - RNA, 1755 nt, Artificial Sequence
  derived and/or modified CDS sequence (opt2) from hemagglutinin__InfluenzaB__AGX16061
augaaggccaucaucguccuccucauggucgucaccuccaacgccgaccgcaucugcaccggcaucaccuccuccaacuccccccacgucgucaagaccgccacccagggcgaggucaacgucaccggcgucaucccccucaccaccacccccaccaaguccuacuucgccaaccucaagggcacccgcacccgcggcaagcucugccccgacugccucaacugcaccgaccucgacgucgcccucggccgccccaugugcgucggcaccacccccuccgccaaggccuccauccuccacgagguccgccccgucaccuccggcugcuuccccaucaugcacgaccgcaccaagauccgccagcuccccaaccuccuccgcggcuacgagaacauccgccucuccacccagaacgucaucgacgccgagaaggcccccggcggccccuaccgccucggcaccuccggcuccugccccaacgccaccuccaaguccggcuucuucgccaccauggccugggccguccccaaggacaacaacaagaacgccaccaacccccucaccgucgagguccccuacaucugcaccgagggcgaggaccagaucaccgucuggggcuuccacuccgacaacaagacccagaugaagaaccucuacggcgacuccaacccccagaaguucaccuccuccgccaacggcgucaccacccacuacgucucccagaucggcggcuuccccgaccagaccgaggacggcggccucccccaguccggccgcaucgucgucgacuacaugaugcagaagcccggcaagaccggcaccaucgucuaccagcgcggcguccuccucccccagaaggucuggugcgccuccggccgcuccaaggucaucaagggcucccucccccucaucggcgaggccgacugccuccacgagaaguacggcggccucaacaaguccaagcccuacuacaccggcgagcacgccaaggccaucggcaacugccccaucugggucaagaccccccucaagcucgccaacggcaccaaguaccgcccccccgccaagcuccucaaggagcgcggcuucuucggcgccaucgccggcuuccucgagggcggcugggagggcaugaucgccggcuggcacggcuacaccucccacggcgcccacggcgucgccgucgccgccgaccucaaguccacccaggaggccaucaacaagaucaccaagaaccucaacucccucuccgagcucgaggucaagaaccuccagcgccucuccggcgccauggacgagcuccacaacgagauccucgagcucgacgagaaggucgacgaccuccgcgccgacaccaucuccucccagaucgagcucgccguccuccucuccaacgagggcaucaucaacuccgaggacgagcaccuccucgcccucgagcgcaagcucaagaagaugcucggccccuccgccgucgacaucggcaacggcugcuucgagaccaagcacaagugcaaccagaccugccucgaccgcaucgccgccggcaccuucaacgccggcgaguucucccuccccaccuucgacucccucaacaucaccgccgccucccucaacgacgacggccucgacaaccacaccauccuccucuacuacuccaccgccgccuccucccucgccgucacccucaugcucgccaucuucaucgucuacauggucucccgcgacaacgucuccugcuccaucugccucuga

SEQ ID NO: 123060 - RNA, 1755 nt, Artificial Sequence
  derived and/or modified CDS sequence (opt2) from hemagglutinin__InfluenzaB__AGX16083
augaaggccaucaucguccuccucauggucgucaccuccaacgccgaccgcaucugcaccggcaucaccuccuccaacuccccccacgucgucaagaccgccacccagggcgaggucaacgucaccggcgucaucccccucaccaccacccccaccaaguccuacuucgccaaccucaagggcacccgcacccgcggcaagcucugccccgacugccucaacugcaccgaccucgacgucgcccucggccgccccaugugcgucggcaccacccccuccgccaaggccuccauccuccacgagguccgccccgucaccuccggcugcuuccccaucaugcacgaccgcaccaagauccgccagcuccccaaccuccuccgcggcuacgagaacauccgccucuccacccagaacgucaucgacgccgagaaggcccccggcggccccuaccgccucggcaccuccggcuccugccccaacgccaccuccaaguccggcuucuucgccaccauggccugggccguccccaaggacaacaacaagaacgccaccaacccccucaccgucgagguccccuacaucugcaccgagggcgaggaccagaucaccgucuggggcuuccacuccgacaacaagacccagaugaagaaccucuacggcgacuccaacccccagaaguucaccuccuccgccaacggcgucaccacccacuacgucucccagaucggcggcuuccccgaccagaccgaggacggcggccucccccaguccggccgcaucgucgucgacuacaugaugcagaagcccggcaagaccggcaccaucgucuaccagcgcggcguccuccucccccagaaggucuggugcgccuccggccgcuccaaggucaucaagggcucccucccccucaucggcgaggccgacugccuccacgagaaguacggcggccucaacaaguccaagcccuacuacaccggcgagcacgccaaggccaucggcaacugccccaucugggucaagaccccccucaagcucgccaacggcaccaaguaccgcccccccgccaagcuccucaaggagcgcggcuucuucggcgccaucgccggcuuccucgagggcggcugggagggcaugaucgccggcuggcacggcuacaccucccacggcgcccacggcgucgccgucgccgccgaccucaaguccacccaggaggccaucaacaagaucaccaagaaccucaacucccucuccgagcucgaggucaagaaccuccagcgccucuccggcgccauggacgagcuccacaacgagauccucgagcucgacgagaaggucgacgaccuccgcgccgacaccaucuccucccagaucgagcucgccguccuccucuccaacgagggcaucaucaacuccgaggacgagcaccuccucgcccucgagcgcaagcucaagaagaugcucggccccuccgccgucgagaucggcaacggcugcuucgagaccaagcacaagugcaaccagaccugccucgaccgcaucgccgccggcaccuucaacgccggcgaguucucccuccccaccuucgacucccucaacaucaccgccgccucccucaacgacgacggccucgacaaccacaccauccuccucuacuacuccaccgccgccuccucccucgccgucacccucaugcucgccaucuucaucgucuacauggucucccgcgacaacgucuccugcuccaucugccucuga

SEQ ID NO: 123061 - RNA, 1755 nt, Artificial Sequence
  derived and/or modified CDS sequence (opt2) from hemagglutinin__InfluenzaB__AGX16105
augaaggccaucaucguccuccucauggucgucaccuccaacgccgaccgcaucugcaccggcaucaccuccuccuccuccccccacgucgucaagaccgccacccagggcgaggucaacgucaccggcgucaucccccucaccaccacccccaccaaguccuacuucgccaaccucaagggcacccgcacccgcggcaagcucugccccgacugccucaacugcaccgaccucgacgucgcccucggccgccccaugugcgucggcaccacccccuccgccaaggccuccauccuccacgagguccgccccgucaccuccggcugcuuccccaucaugcacgaccgcaccaagauccgccagcuccccaaccuccuccgcggcuacgagaacauccgccucuccacccagaacgucaucgacgccgagaaggcccccggcggccccuaccgccucggcaccuccggcuccugccccaacgccaccuccaaguccggcuucuucgccaccauggccugggccguccccaaggacaacaacaagaacgccaccaacccccucaccgucgagguccccuacaucugcaccgagggcgaggaccagaucaccgucuggggcuuccacuccgacaacaagacccagaugaagaaccucuacggcgacuccaacccccagaaguucaccuccuccgccaacggcgucaccacccacuacgucucccagaucggcggcuuccccgaccagaccgaggacggcggccucccccaguccggccgcaucgucgucgacuacaugaugcagaagcccggcaagaccggcaccaucgucuaccagcgcggcguccuccucccccagaaggucuggugcgccuccggccgcuccaaggucaucaagggcucccucccccucaucggcgaggccgacugccuccacgagaaguacggcggccucaacaaguccaagcccuacuacaccggcgagcacgccaaggccaucggcaacugccccaucugggucaagaccccccucaagcucgccaacggcaccaaguaccgcccccccgccaagcuccucaaggagcgcggcuucuucggcgccaucgccggcuuccucgagggcggcugggagggcaugaucgccggcuggcacggcuacaccucccacggcgcccacggcgucgccgucgccgccgaccucaaguccacccaggaggccaucaacaagaucaccaagaaccucaacucccucuccgagcucgaggucaagaaccuccagcgccucuccggcgccauggacgagcuccacuccgagauccucgagcucgacgagaaggucgacgaccuccgcgccgacaccaucuccucccagaucgagcucgccguccuccucuccaacgagggcaucaucaacuccgaggacgagcaccuccucgcccucgagcgcaagcucaagaagaugcucggccccuccgccgucgacaucggcaacggcugcuucgagaccaagcacaagugcaaccagaccugccucgaccgcaucgccgccggcaccuucaacgccggcgaguucucccuccccaccuucgacucccucaacaucaccgccgccucccucaacgacgacggccucgacaaccacaccauccuccucuacuacuccaccgccgccuccucccucgccgucacccucaugcucgccaucuucaucgucuacauggucucccgcgacaacgucuccugcuccaucugccucuga

SEQ ID NO: 123062 - RNA, 1755 nt, Artificial Sequence
  derived and/or modified CDS sequence (opt2) from hemagglutinin__InfluenzaB__AGX16116
augaaggccaucaucguccuccucauggucgucaccuccaacgccgaccgcaucugcaccggcaucaccuccuccaacuccccccacgucgucaagaccgccacccagggcgaggucaacgucaccggcgucaucccccucaccaccacccccaccaaguccuacuucgccaaccucaagggcacccgcacccgcggcaagcucugccccgacugccucaacugcaccgaccucgacgucgcccucggccgccccaugugcgucggcaccacccccuccgccaaggccuccauccuccacgagguccgccccgucaccuccggcugcuuccccaucaugcacgaccgcaccaagauccgccagcuccccaaccuccuccgcggcuacgagaacauccgccucuccacccagaacgucaucgacgccgagaacgcccccggcggccccuaccgccucggcaccuccggcuccugccccaacgccaccuccaaguccggcuucuucgccaccauggccugggccguccccaaggacaacaacaagaacgccaccaacccccucaccgucgagguccccuacgucugcaccgagggcgaggaccagaucaccgucuggggcuuccacuccgacaacaagacccagaugaagaaccucuacggcgacuccaacccccagaaguucaccuccuccgccaacggcgucaccacccacuacgucucccagaucggcggcuuccccgcccagaccgaggacggcggccucccccaguccggccgcaucgucgucgacuacaugguccagaagccccgcaagaccggcaccaucgucuaccagcgcggcguccuccucccccagaaggucuggugcgccuccggccgcuccaaggucaucaagggcucccucccccucaucggcgaggccgacugccuccacgagaaguacggcggccucaacaaguccaagcccuacuacaccggcgagcacgccaaggccaucggcaacugccccaucugggucaagaccccccucaagcucgccaacggcaccaaguaccgcccccccgccaagcuccucaaggagcgcggcuucuucggcgccaucgccggcuuccucgagggcggcugggagggcaugaucgccggcuggcacggcuacaccucccacggcgcccacggcgucgccgucgccgccgaccucaaguccacccaggaggccaucaacaagaucaccaagaaccucaacucccucuccgagcucgagaucaagaaccuccagcgccucuccggcgccauggacgagcuccacaacgagauccucgagcucgacgagaaggucgacgaccuccgcgccgacaccaucuccucccagaucgagcucgccguccuccucuccaacgagggcaucaucaacuccgaggacgagcaccuccucgcccucgagcgcaagcucaagaagaugcucggccccuccgccgucgacaucggcaacggcugcuucgagaccaagcacaagugcaaccagaccugccucgaccgcaucgccgccggcaccuucaacgccggcgaguucucccuccccaccuucgacucccucaacaucaccgccgccucccucaacgacgacggccucgacaaccacaccauccuccucuacuacuccaccgccgccuccucccucgccgucacccucaugcucgccaucuucaucgucuacauggucucccgcgacaacgucuccugcuccaucugccucuga

SEQ ID NO: 123063 - RNA, 1755 nt, Artificial Sequence
  derived and/or modified CDS sequence (opt2) from hemagglutinin__InfluenzaB__AGX16127
augaaggccaucaucguccuccucauggucgucaccuccaacgccgaccgcaucugcaccggcaucaccuccuccaacuccccccacgucgucaagaccgccacccagggcgaggucaacgucaccggcgucaucccccucaccaccacccccaccaaguccuacuucgccaaccucaagggcacccgcacccgcggcaagcucugccccgacugccucaacugcaccgaccucgacgucgcccucggccgccccaugugcgucggcaccacccccuccgccaaggccuccauccuccacgagguccgccccgucaccuccggcugcuuccccaucaugcacgaccgcaccaagauccgccagcuccccaaccuccuccgcggcuacgagaacauccgccucuccacccagaacgucaucgacgccgagaacgcccccggcggccccuaccgccucggcaccuccggcuccugccccaacgccaccuccaaguccggcuucuucgccaccauggccugggccguccccaaggacaacaacaagaacgccaccaacccccucaccgucgagguccccuacgucugcaccgagggcgaggaccagaucaccgucuggggcuuccacuccgacaacaagauccagaugaagaaccucuacggcgacuccaacccccagaaguucaccuccuccgccaacggcgucaccacccacuacgucucccagaucggcggcuuccccgcccagaccgaggacggcggccucccccaguccggccgcaucgucgucgacuacaugguccagaagccccgcaagaccggcaccaucgucuaccagcgcggcguccuccucccccagaaggucuggugcgccuccggccgcuccaaggucaucaagggcucccucccccucaucggcgaggccgacugccuccacgagaaguacggcggccucaacaaguccaagcccuacuacaccggcgagcacgccaaggccaucggcaacugccccaucugggucaagaccccccucaagcucgccaacggcaccaaguaccgcccccccgccaagcuccucaaggagcgcggcuucuucggcgccaucgccggcuuccucgagggcggcugggagggcaugaucgccggcuggcacggcuacaccucccacggcgcccacggcgucgccgucgccgccgaccucaaguccacccaggaggccaucaacaagaucaccaagaaccucaacucccucuccgagcucgagaucaagaaccuccagcgccucuccggcgccauggacgagcuccacaacgagauccucgagcucgacgagaaggucgacgaccuccgcgccgacaccaucuccucccagaucgagcucgccguccuccucuccaacgagggcaucaucaacuccgaggacgagcaccuccucgcccucgagcgcaagcucaagaagaugcucggccccuccgccgucgacaucggcaacggcugcuucgagaccaagcacaagugcaaccagaccugccucgaccgcaucgccgccggcaccuucaacgccggcgaguucucccuccccaccuucgacucccucaacaucaccgccgccucccucaacgacgacggccucgacaaccacaccauccuccucuacuacuccaccgccgccuccucccucgccgucacccucaugcucgccaucuucaucgucuacauggucucccgcgacaacgucuccugcuccaucugccucuga

SEQ ID NO: 123064 - RNA, 1755 nt, Artificial Sequence; identical to SEQ ID NO: 123062
  derived and/or modified CDS sequence (opt2) from hemagglutinin__InfluenzaB__AGX16138

SEQ ID NO: 123065 - RNA, 1755 nt, Artificial Sequence; identical to SEQ ID NO: 123059
  derived and/or modified CDS sequence (opt2) from hemagglutinin__InfluenzaB__AGX16149

SEQ ID NO: 123066 - RNA, 1755 nt, Artificial Sequence; identical to SEQ ID NO: 123060
  derived and/or modified CDS sequence (opt2) from hemagglutinin__InfluenzaB__AGX16160

SEQ ID NO: 123067 - RNA, 1755 nt, Artificial Sequence; identical to SEQ ID NO: 123060
  derived and/or modified CDS sequence (opt2) from hemagglutinin__InfluenzaB__AGX16182

SEQ ID NO: 123068 - RNA, 1755 nt, Artificial Sequence; identical to SEQ ID NO: 122462
  derived and/or modified CDS sequence (opt2) from hemagglutinin__InfluenzaB__AGX16193

SEQ ID NO: 123069 - RNA, 1755 nt, Artificial Sequence; identical to SEQ ID NO: 122462
  derived and/or modified CDS sequence (opt2) from hemagglutinin__InfluenzaB__AGX16215

SEQ ID NO: 123070 - RNA, 1755 nt, Artificial Sequence; identical to SEQ ID NO: 122462
  derived and/or modified CDS sequence (opt2) from hemagglutinin__InfluenzaB__AGX16226

SEQ ID NO: 123071 - RNA, 1755 nt, Artificial Sequence
  derived and/or modified CDS sequence (opt2) from hemagglutinin__InfluenzaB__AGX16237
augaaggccaucaucguccuccucauggucgucaccuccaacgccgaccgcaucugcaccggcaucaccuccuccaacuccccccacgucgucaagaccgccacccagggcgaggucaacgucaccggcgucaucccccucaccaccacccccaccaaguccuacuucgccaaccucaagggcacccgcacccgcggcaagcucugccccgacugccucaacugcaccgaccucgacgucgcccucggccgccccaugugcgucggcaccacccccuccgccaaggccuccauccuccacgagguccgccccgucaccuccggcugcuuccccaucaugcacgaccgcaccaagauccgccagcuccccaaccuccuccgcggcuacgagaacauccgccucuccacccagaacgucaucgacgccgagaaggcccccggcggccccuaccgccucggcaccuccggcuccugccccaacgccaccuccaaguccggcuucuucgccaccauggccugggccguccccaaggacaacaacaagaacgccaccaacccccucaccgucgagguccccuacaucugcaccgagggcgaggaccagaucaccgucuggggcuuccacuccgacaacaagacccagaugaagaaccucuacggcgacuccaacccccagaaguucaccuccuccgccaacggcgucaccacccacuacgucucccagaucggcggcuuccccgaccagaccgaggacggcggccucccccaguccggccgcaucgucgucgacuacaugaugcagaagcccggcaagaccggcaccaucgucuaccagcgcggcguccuccucccccagaaggucuggugcgccuccggccgcuccaaggucaucaagggcucccucccccucaucggcgaggccgacugccuccacgagaaguacggcggccucaacaaguccaagcccuacuacaccggcgagcacgccaaggccaucggcaacugccccaucugggucaagaccccccucaagcucgccaacggcaccaaguaccgcccccccgccaagcuccucaaggagcgcggcuucuucggcgccaucgccggcuuccucgagggcggcugggagggcaugaucgccggcuggcacggcuacaccucccacggcgcccacggcgucgccgucgccgccgaccucaaguccacccaggaggccaucaacaagaucaccaagaaccucaacucccucuccgagcucgaggucaagaaccuccagcgccucuccggcgccauggacgagcuccacaacgagauccucgagcucgacgagaaggucgacgaccuccgcgccgacaccaucuccucccagaucgagcucgccguccuccucuccaacgagggcaucaucaacuccgaggacgagcaccuccucgcccucgagcgcaagcucaagaagaugcucggccccuccgccgucgacaucggcaacggcugcuucgagaccaagcacaagugcaaccagaccugccucgaccgcaucgccgccggcaccuucaacgccggcgaguucucccuccccaccuucgacucccucaacaucaccgccgccucccucaacgacgacggccucgacaaccacaccauccuccucuacuacuccaccgccgccuccucccucgccaucacccucaugcucgccaucuucaucgucuacauggucucccgcgacaacgucuccugcuccaucugccucuga

SEQ ID NO: 123072 - RNA, 1755 nt, Artificial Sequence; identical to SEQ ID NO: 122462
  derived and/or modified CDS sequence (opt2) from hemagglutinin__InfluenzaB__AGX16248

SEQ ID NO: 123073 - RNA, 1755 nt, Artificial Sequence; identical to SEQ ID NO: 122462
  derived and/or modified CDS sequence (opt2) from hemagglutinin__InfluenzaB__AGX16259

SEQ ID NO: 123074 - RNA, 1755 nt, Artificial Sequence
  derived and/or modified CDS sequence (opt2) from hemagglutinin__InfluenzaB__AGX16270
augaaggccaucaucguccuccucauggucgucaccuccaacgccgaccgcaucugcaccggcaucaccuccuccaacuccccccacgucgucaagaccgccacccagggcgaggucaacgucaccggcgucaucccccucaccaccacccccaccaaguccuacuucgccaaccucaagggcacccgcacccgcggcaagcucugccccgacugccucaacugcaccgaccucgacgucgcccucggccgccccaugugcgucggcaccacccccuccgccaaggccuccauccuccacgagguccgccccgucaccuccggcugcuuccccaucaugcacgaccgcaccaagauccgccagcucgccaaccuccuccgcggcuacgagaacauccgccucuccacccagaacgucaucgacgccgagaaggcccccggcggccccuaccgccucggcaccuccggcuccugccccaacgccaccuccaaguccggcuucuucgccaccauggccugggccguccccaaggacaacaacaagaacgccaccaacccccucaccgucgagguccccuacaucugcaaggagggcgaggaccagaucaccgucuggggcuuccacuccgacaacaagacccagaugaagaaccucuacggcgacuccaacccccagaaguucaccuccuccgccaacggcgucaccacccacuacgucucccagaucggcggcuuccccgaccagaccgaggacggcggccucccccaguccggccgcaucgucgucgacuacaugauccagaagcccggcaagaccggcaccaucgucuaccagcgcggcguccuccucccccagaaggucuggugcgccuccggccgcuccaaggucaucaagggcucccucccccucaucggcgaggccgacugccuccacgagaaguacggcggccucaacaaguccaagcccuacuacaccggcgagcacgccaaggccaucggcaacugccccaucugggucaagaccccccucaagcucgccaacggcaccaaguaccgcccccccgccaagcuccucaaggagcgcggcuucuucggcgccaucgccggcuuccucgagggcggcugggagggcaugaucgccggcuggcacggcuacaccucccacggcgcccacggcgucgccgucgccgccgaccucaaguccacccaggaggccaucaacaagaucaccaagaaccucaacucccucuccgagcucgaggucaagaaccuccagcgccucuccggcgccauggacgagcuccacaacgagauccucgagcucgacgagaaggucgacgaccuccgcgccgacaccaucuccucccagaucgagcucgccguccuccucuccaacgagggcaucaucaacuccgaggacgagcaccuccucgcccucgagcgcaagcucaagaagaugcucggccccuccgccgucgacaucggcaacggcugcuucgagaccaagcacaagugcaaccagaccugccucgaccgcaucgccgccggcaccuucaacgccggcgaguucucccuccccaccuucgacucccucaacaucaccgccgccucccucaacgacgacggccucgacaaccacaccauccuccucuacuacuccaccgccgccuccucccucgccgucacccucaugcucgccaucuucaucgucuacauggucucccgcgacaacgucuccugcuccaucugccucuga

SEQ ID NO: 123075 - RNA, 1755 nt, Artificial Sequence; identical to SEQ ID NO: 123074
  derived and/or modified CDS sequence (opt2) from hemagglutinin__InfluenzaB__AGX16281

SEQ ID NO: 123076 - RNA, 1755 nt, Artificial Sequence
  derived and/or modified CDS sequence (opt2) from hemagglutinin__InfluenzaB__AGX16292
augaaggccaucaucguccuccucauggucgucaccuccaacgccgaccgcaucugcaccggcaucaccuccuccaacuccccccacgucgucaagaccgccacccagggcgaggucaacgucaccggcgucaucccccucaccaccacccccaccaaguccuacuucgccaaccucaagggcacccgcacccgcggcaagcucugccccgacugccucaacugcaccgaccucgacgucgcccucggccgccccaugugcgucggcaccacccccuccgccaaggccuccauccuccacgagguccgccccgucaccuccggcugcuuccccaucaugcacgaccgcaccaagauccgccagcucgccaaccuccuccgcggcuacgagaacauccgccucuccaaccagaacgucaucgacgccgagaaggcccccggcggccccuaccgccucggcaccuccggcuccugccccaacgccaccuccaaguccggcuucuucgccaccauggccugggccguccccaaggacaacaacaagaacgccaccaacccccucaccgucgagguccccuacaucugcaccgagggcgaggaccagaucaccgucuggggcuuccacuccgacaacaagacccagaugaagaaccucuacggcgacuccaacccccagaaguucaccuccuccgccaacggcgucaccacccacuacgucucccagaucggcggcuuccccgaccagaccgaggacggcggccucccccaguccggccgcaucgucgucgacuacaugaugcagaagcccggcaagaccggcaccaucgucuaccagcgcggcguccuccucccccagaaggucuggugcgccuccggccgcuccaaggucaucaagggcgcccucccccucaucggcgaggccgacugccuccacgagaaguacggcggccucaacaaguccaagcccuacuacaccggcgagcacgccaaggccaucggcaacugccccaucugggucaagaccccccucaagcucgccaacggcaccaaguaccgcccccccgccaagcuccucaaggagcgcggcuucuucggcgccaucgccggcuuccucgagggcggcugggagggcaugaucgccggcuggcacggcuacaccucccacggcgcccacggcgucgccgucgccgccgaccucaaguccacccaggaggccaucaacaagaucaccaagaaccucaacucccucuccgagcucgaggucaagaaccuccagcgccucuccggcgccauggacgagcuccacaacgagauccucgagcucgacgagaaggucgacgaccuccgcgccgacaccaucuccucccagaucgagcucgccguccuccucuccaacgagggcaucaucaacuccgaggacgagcaccuccucgcccucgagcgcaagcucaagaagaugcucggccccuccgccgucgacaucggcaacggcugcuucgagaccaagcacaagugcaaccagaccugccucgaccgcaucgccgccggcaccuucaacgccggcgaguucucccuccccaccuucgacucccucaacaucaccgccgccucccucaacgacgacggccucgacaaccacaccauccuccucuacuacuccaccgccgccuccucccucgccgucacccucaugcucgccaucuucaucgucuacauggucucccgcgacaacgucuccugcuccaucugccucuga

SEQ ID NO: 123077 - RNA, 1758 nt, Artificial Sequence; identical to SEQ ID NO: 122550
  derived and/or modified CDS sequence (opt2) from hemagglutinin__InfluenzaB__AGX16303

SEQ ID NO: 123078 - RNA, 1755 nt, Artificial Sequence; identical to SEQ ID NO: 122462
  derived and/or modified CDS sequence (opt2) from hemagglutinin__InfluenzaB__AGX16314

SEQ ID NO: 123079 - RNA, 1755 nt, Artificial Sequence; identical to SEQ ID NO: 122462
  derived and/or modified CDS sequence (opt2) from hemagglutinin__InfluenzaB__AGX16325

SEQ ID NO: 123080 - RNA, 1755 nt, Artificial Sequence; identical to SEQ ID NO: 122767
  derived and/or modified CDS sequence (opt2) from hemagglutinin__InfluenzaB__AGX16336

SEQ ID NO: 123081 - RNA, 1755 nt, Artificial Sequence; identical to SEQ ID NO: 122767
  derived and/or modified CDS sequence (opt2) from hemagglutinin__InfluenzaB__AGX16347

SEQ ID NO: 123082 - RNA, 1755 nt, Artificial Sequence; identical to SEQ ID NO: 122767
  derived and/or modified CDS sequence (opt2) from hemagglutinin__InfluenzaB__AGX16358

SEQ ID NO: 123083 - RNA, 1755 nt, Artificial Sequence
  derived and/or modified CDS sequence (opt2) from hemagglutinin__InfluenzaB__AGX16369
augaaggccaucaucguccuccucauggucgucaccuccaacgccgaccgcaucugcaccggcaucaccuccuccaacuccccccacgucgucaagaccgccacccagggcgaggucaacgucaccggcgucaucccccucaccaccacccccaccaaguccuacuucgccaaccucaagggcacccgcacccgcggcaagcucugccccgacugccucaacugcaccgaccucgacgucgcccucggccgccccaugugcgucggcaccacccccuccgccaaggccuccauccuccacgagguccgccccgucaccuccggcugcuuccccaucaugcacgaccgcaccaagauccgccagcuccccaaccuccuccgcggcuacgagaacauccgccucuccacccagaacgucaucgacgccgagaaggcccccggcggccccuaccgccucggcaccuccggcuccugccccaacgccaccuccaaguccggcuucuucgccaccauggccugggccguccccaaggacaacaacaagaacgccaccaacccccucaccgucgagguccccuacaucugcaccgagggcgaggaccagaucaccgucuggggcuuccacuccgacaacaagacccagaugaagaaccucuacggcgacuccaacccccagaaguucaccuccuccgccaacggcgucaccacccacuacgucucccagaucggcuccuuccccgaccagaccgaggacggcggccucccccaguccggccgcaucgucgucgacuacaugaugcagaagcccggcaagaccggcaccaucgucuaccagcgcggcauccuccucccccagaaggucuggugcgccuccggccgcuccaaggucaucaagggcucccucccccucaucggcgaggccgacugccuccacgagaaguacggcggccucaacaaguccaagcccuacuacaccggcgagcacgccaaggccaucggcaacugccccaucugggucaagaccccccucaagcucgccaacggcaccaaguaccgcccccccgccaagcuccucaaggagcgcggcuucuucggcgccaucgccggcuuccucgagggcggcugggagggcaugaucgccggcuggcacggcuacaccucccacggcgcccacggcgucgccgucgccgccgaccucaaguccacccaggaggccaucaacaagaucaccaagaaccucaacucccucuccgagcucgaggucaagaaccuccagcgccucuccggcgccauggacgagcuccacaacgagauccucgagcucgacgagaaggucgacgaccuccgcgccgacaccaucuccucccagaucgagcucgccguccuccucuccaacgagggcaucaucaacuccgaggacgagcaccuccucgcccucgagcgcaagcucaagaagaugcucggccccuccgccgucgagaucggcaacggcugcuucgagaccaagcacaagugcaaccagaccugccucgaccgcaucgccgccggcaccuucaacgccggcgaguucucccuccccaccuucgacucccucaacaucaccgccgccucccucaacgacgacggccucgacaaccacaccauccuccucuacuacuccaccgccgccuccucccucgccgucacccucaugcucgccaucuucaucgucuacauggucucccgcgacaacgucuccugcuccaucugccucuga

SEQ ID NO: 123084 - RNA, 1755 nt, Artificial Sequence
  derived and/or modified CDS sequence (opt2) from hemagglutinin__InfluenzaB__AGX16380
augaaggccaucgucguccuccucauggucgucaccuccaacgccgaccgcaucugcaccggcaucaccuccuccaacuccccccacgucgucaagaccgccacccagggcgaggucaacgucaccggcgucaucccccucaccaccacccccaccaaguccuacuucgccaaccucaagggcacccgcacccgcggcaagcucugccccgacugccucaacugcaccgaccucgacgucgcccucggccgccccaugugcgucggcgccacccccuccgccaaggccuccauccuccacgagguccgccccgucaccuccggcugcuuccccaugaugcacgaccgcaccaagauccgccagcuccccaaccuccuccgcggcuacgagaacauccgccucuccacccagaacgucaucgacgccgagaaggcccccggcggccccuaccgccucggcaccuccggcuccugccccaacgccaccuccaaguccggcuucuucgccaccauggccugggccguccccaaggacaacaacaagaacgccaccaacccccucaccgucgagguccccuacaucugcaccgagggcgaggaccagaucaccgucuggggcuuccacuccgacaacaagacccagaugaagaaccucuacggcgacuccaacccccagaaguucaccuccuccgccaacggcgucaccacccacuacgucucccagaucggcuccuuccccgaccagaccgaggacggcggccucccccaguccggccgcaucgucgucgacuacaugaugcagaagcccggcaagaccggcaccaucgucuaccagcgcggcguccuccucccccagaaggucuggugcgccuccggccgcuccaaggucaucaagggcucccucccccucaucggcgaggccgacugccuccacgagaaguacggcggccucaacaaguccaagcccuacuacaccggcgagcacgccaaggccaucggcaacugccccaucugggucaagaccccccucaagcucgccaacggcaccaaguaccgcccccccgccaagcuccucaaggagcgcggcuucuucggcgccaucgccggcuuccucgagggcggcugggagggcaugaucgccggcuggcacggcuacaccucccacggcgcccacggcgucgccgucgccgccgaccucaaguccacccaggaggccaucaacaagaucaccaagaaccucaacucccucuccgagcucgaggucaagaaccuccagcgccucuccggcgccauggacgagcuccacaacgagauccucgagcucgacgagaaggucgacgaccuccgcgccgacaccaucuccucccagaucgagcucgccguccuccucuccaacgagggcaucaucaacuccgaggacgagcaccuccucgcccucgagcgcaagcucaagaagaugcucggccccuccgccgucgagaucggcaacggcugcuucgagaccaagcacaagugcaaccagaccugccucgaccgcaucgccgccggcaccuucaacgccggcgaguucucccuccccaccuucgacucccucaacaucaccgccgccucccucaacgacgacggccucgacaaccacaccauccuccucuacuacuccaccgccgccuccucccucgccgucacccucaugcucgccaucuucaucgucuacauggucucccgcgacaacgucuccugcuccaucugccucuga

SEQ ID NO: 123085 - RNA, 1755 nt, Artificial Sequence; identical to SEQ ID NO: 122603
  derived and/or modified CDS sequence (opt2) from hemagglutinin__InfluenzaB__AGX16391

SEQ ID NO: 123086 - RNA, 1755 nt, Artificial Sequence
  derived and/or modified CDS sequence (opt2) from hemagglutinin__InfluenzaB__AGX16402
augaaggccaucaucguccuccucauggucgucaccuccaacgccgaccgcaucugcaccggcaucaccuccuccaacuccccccacgucgucaagaccgccacccagggcgaggucaacgucaccggcgucaucccccucaccaccacccccaccaaguccuacuucgccaaccucaagggcacccgcacccgcggcaagcucugccccgacugccucaacugcaccgaccucgacgucgcccucggccgccccaugugcgucggcaccacccccuccgccaaggccuccauccuccacgagguccgccccgucaccuccggcugcuuccccaucaugcacgaccgcaccaagauccgccagcuccccaaccuccuccgcggcuacgagaacauccgccucuccacccagaacgucaucgacgccgagaaggcccccggcggccccuaccgccucggcaccuccggcuccugccccaacgccaccuccaagaucggcuucuucgccaccauggccugggccguccccaaggacaacuacaagaacgccaccaacccccucaccgucgagguccccuacaucugcaccgagggcgaggaccagaucaccgucuggggcuuccacuccgacaacaagccccagaugaagaaccucuacggcgacuccaacccccagaaguucaccuccuccgccaacggcgucaccacccacuacgucucccagaucggcgacuuccccgaccagaccgaggacggcggccucccccaguccggccgcaucgucgucgacuacaugaugcagaagcccggcaagaccggcaccaucgucuaccagcgcggcguccuccucccccagaaggucuggugcgccuccggccgcuccaaggucaucaagggcucccucccccucaucggcgaggccgacugccuccacgagaaguacggcggccucaacaaguccaagcccuacuacaccggcgagcacgccaaggccaucggcaacugccccaucugggucaagaccccccucaagcucgccaacggcaccaaguaccgcccccccgccaagcuccucaaggagcgcggcuucuucggcgccaucgccggcuuccucgagggcggcugggagggcaugaucgccggcuggcacggcuacaccucccacggcgcccacggcgucgccgucgccgccgaccucaaguccacccaggaggccaucaacaagaucaccaagaaccucaacucccucuccgagcucgaggucaagaaccuccagcgccucuccggcgccauggacgagcuccacaacgagauccucgagcucgacgagaaggucgacgaccuccgcgccgacaccaucuccucccagaucgagcucgccguccuccucuccaacgagggcaucaucaacuccgaggacgagcaccuccucgcccucgagcgcaagcucaagaagaugcucggccccuccgccgucgacaucggcaacggcugcuucgagaccaagcacaagugcaaccagaccugccucgaccgcaucgccgccggcaccuucaacgccggcgaguucucccuccccaccuucgacucccucaacaucaccgccgccucccucaacgacgacggccucgacaaccacaccauccuccucuacuacuccaccgccgccuccucccucgccgucacccucaugcucgccaucuucaucgucuacauggucucccgcgacaacgucuccugcuccaucugccucuga

SEQ ID NO: 123087 - RNA, 1755 nt, Artificial Sequence; identical to SEQ ID NO: 122856
  derived and/or modified CDS sequence (opt2) from hemagglutinin__InfluenzaB__AGX16413

SEQ ID NO: 123088 - RNA, 1755 nt, Artificial Sequence; identical to SEQ ID NO: 122856
  derived and/or modified CDS sequence (opt2) from hemagglutinin__InfluenzaB__AGX16423

SEQ ID NO: 123089 - RNA, 1755 nt, Artificial Sequence; identical to SEQ ID NO: 122856
  derived and/or modified CDS sequence (opt2) from hemagglutinin__InfluenzaB__AGX16434

SEQ ID NO: 123090 - RNA, 1755 nt, Artificial Sequence; identical to SEQ ID NO: 122856
  derived and/or modified CDS sequence (opt2) from hemagglutinin__InfluenzaB__AGX16445

SEQ ID NO: 123091 - RNA, 1755 nt, Artificial Sequence; identical to SEQ ID NO: 122856
  derived and/or modified CDS sequence (opt2) from hemagglutinin__InfluenzaB__AGX16456

SEQ ID NO: 123092 - RNA, 1755 nt, Artificial Sequence
  derived and/or modified CDS sequence (opt2) from hemagglutinin__InfluenzaB__AGX16467
augaaggccaucaucguccuccucauggucgucaccuccaacgccgaccgcaucugcaccggcaucaccuccuccaacuccccccacgucgucaagaccgccacccagggcgaggucaacgucaccggcgucaucccccucaccaccacccccaccaaguccuacuucgccaaccucaagggcacccgcacccgcggcaagcucugccccgacugccucaacugcaccgaccucgacgucgcccucggccgccccaugugcgucggcaccacccccuccgccaaggccuccauccuccacgagguccgccccgucaccuccggcugcuuccccaucaugcacgaccgcaccaagauccgccagcuccccaaccuccuccgcggcuacgagaacauccgccucuccacccagaacgucaucgacgccgagaaggcccccggcggccccuaccgccucggcaccuccggcuccugccccaacgccaccuccaaguccggcuucuucgccaccauggccugggccguccccaaggacaacaacaagaacgccaccaacccccucaccgucgagguccccuacaucugcaccgagggcgaggaccagaucaccgucuggggcuuccacuccgacaacaagacccagaugaagaaccucuacggcgacuccaacccccagaaguucaccuccuccgccaacggcgucaccacccacuacgucucccagaucggcuccuuccccgaccagaccgaggacggcggccucccccaguccggccgcaucgucgucgacuacaugaugcagaagcccggcaagaccggcaccaucgucuaccagcgcggcguccuccucccccagcgcgucuggugcgccuccggccgcuccaaggucaucaagggcucccucccccucaucggcgaggccgacugccuccacgagaaguacggcggccucaacaaguccaagcccuacuacaccggcgagcacgccaaggccaucggcaacugccccaucugggucaagaccccccucaagcucgccaacggcaccaaguaccgcccccccgccaagcuccucaaggagcgcggcuucuucggcgccaucgccggcuuccucgagggcggcugggagggcaugaucgccggcuggcacggcuacaccucccacggcgcccacggcgucgccgucgccgccgaccucaaguccacccaggaggccaucaacaagaucaccaagaaccucaacucccucuccgagcucgaggucaagaaccuccagcgccucuccggcgccauggacgagcuccacaacgagauccucgagcucgacgagaaggucgacgaccuccgcgccgacaccaucuccucccagaucgagcucgccguccuccucuccaacgagggcaucaucaacuccgaggacgagcaccuccucgcccucgagcgcaagcucaagaagaugcucggccccuccgccgucgagaucggcaacggcugcuucgagaccaagcacaagugcaaccagaccugccucgaccgcaucgccgccggcaccuucaacgccggcgaguucucccuccccaccuucgacucccucaacaucaccgccgccucccucaacgacgacggccucgacaaccacaccauccuccucuacuacuccaccgccgccuccucccucgccgucacccucaugcucgccaucuucaucgucuacauggucucccgcgacaacgucuccugcuccaucugccucuga

SEQ ID NO: 123093 - RNA, 1755 nt, Artificial Sequence; identical to SEQ ID NO: 122856
  derived and/or modified CDS sequence (opt2) from hemagglutinin__InfluenzaB__AGX16478

SEQ ID NO: 123094 - RNA, 1755 nt, Artificial Sequence; identical to SEQ ID NO: 122603
  derived and/or modified CDS sequence (opt2) from hemagglutinin__InfluenzaB__AGX16489

SEQ ID NO: 123095 - RNA, 1758 nt, Artificial Sequence; identical to SEQ ID NO: 123015
  derived and/or modified CDS sequence (opt2) from hemagglutinin__InfluenzaB__AGX16500

SEQ ID NO: 123096 - RNA, 1758 nt, Artificial Sequence; identical to SEQ ID NO: 123015
  derived and/or modified CDS sequence (opt2) from hemagglutinin__InfluenzaB__AGX16511

SEQ ID NO: 123097 - RNA, 1758 nt, Artificial Sequence; identical to SEQ ID NO: 123015
  derived and/or modified CDS sequence (opt2) from hemagglutinin__InfluenzaB__AGX16522

SEQ ID NO: 123098 - RNA, 1758 nt, Artificial Sequence
  derived and/or modified CDS sequence (opt2) from hemagglutinin__InfluenzaB__AGX16533
augaaggccaucaucguccuccucauggucgucaccuccaacgccgaccgcaucugcaccggcaucaccuccuccaacuccccccacgucgucaagaccgccacccagggcgaggucaacgucaccggcgucaucccccucaccaccacccccaccaagucccacuucgccaaccucaagggcaccaagacccgcggcaagcucugccccaagugccucaacugcaccgaccucgacgucgcccucggccgccccaagugcaccggcaacauccccuccgccaaggucuccauccuccacgagguccgccccgucaccuccggcugcuuccccaucaugcacgaccgcaccaagauccgccagcuccccaaccuccuccgcggcuacgagcacauccgccucuccacccacaacgucaucaacgccgagaaggcccccggcggccccuacaagaucggcaccuccggcuccugccccaacgucaccaacggcaacggcuucuucgccaccauggccugggccguccccaagaacgacaacaacaagaccgccaccaacucccucaccaucgagguccccuacaucugcaccgagggcgaggaccagaucaccgucuggggcuuccacuccgacaaggagacccagauggccaagcucuacggcgacuccaagccccagaaguucaccuccuccgccaacggcgucaccacccacuacgucucccagaucggcggcuuccccaaccagaccgaggacggcggccucccccaguccggccgcaucgucgucgacuacaugguccagaaguccggcaagaccggcaccaucaccuaccagcgcggcauccuccucccccagaaggucuggugcgccuccggccgcuccaaggucaucaagggcucccucccccucaucggcgaggccgacugccuccacgagaaguacggcggccucaacaaguccaagcccuacuacaccggcgagcacgccaaggccaucggcaacugccccaucugggucaagaccccccucaagcucgccaacggcaccaaguaccgcccccccgccaagcuccucaaggagcgcggcuucuucggcgccaucgccggcuuccucgagggcggcugggagggcaugaucgccggcuggcacggcuacaccucccacggcgcccacggcgucgccgucgccgccgaccucaaguccacccaggaggccaucaacaagaucaccaagaaccucaacucccucuccgagcucgaggucaagaaccuccagcgccucuccggcgccauggacgagcuccacaacgagauccucgagcucgacgagaaggucgacgaccuccgcgccgacaccaucuccucccagaucgagcucgccguccuccucuccaacgagggcaucaucaacuccgaggacgagcaccuccucgcccucgagcgcaagcucaagaagaugcucggccccuccgccgucgagaucggcaacggcugcuucgagaccaagcacaagugcaaccagaccugccucgaccgcaucgccgccggcaccuucgacgccggcgaguucucccuccccaccuucgacucccucaacaucaccgccgccucccucaacgacgacggccucgacaaccacaccauccuccucuacuacuccaccgccgccuccucccucgccgucacccucaugaucgccaucuucgucgucuacauggucucccgcgacaacgucuccugcuccaucugccucuga

SEQ ID NO: 123099 - RNA, 1758 nt, Artificial Sequence
  derived and/or modified CDS sequence (opt2) from hemagglutinin__InfluenzaB__AGX16555
augaaggccaucaucguccuccucauggucgucaccuccaacgccgaccgcaucugcaccggcaucaccuccuccaacuccccccacgucgucaagaccgccacccagggcgaggucaacgucaccggcgucaucccccucaccaccacccccaccaagucccacuucgccaaccucaagggcaccaagacccgcggcaagcucugccccaagugccucaacugcaccgaccucgacgucgcccucggccgccccaagugcaccggcaacauccccuccgccaaggucuccauccuccacgagguccgccccgucaccuccggcugcuuccccaucaugcacgaccgcaccaagauccgccagcuccccaaccuccuccgcggcuacgagcacauccgccucuccacccacaacgucaucaacgccgagaaggcccccggcggccccuacaagaucggcaccuccggcuccugccccaacgucaccaacggcaacggcuucuucgccaccauggccugggccguccccaagaacgacaacaacaagaccgccaccaacucccucaccaucgagguccccuacaucugcaccgagggcgaggaccagaucaccgucuggggcuuccacuccgacaacgaggcccagauggccaagcucuacggcgacuccaagccccagaaguucaccuccuccgccaacggcgucaccacccacuacgucucccagaucggcggcuuccccaaccagaccgaggacggcggccucccccaguccggccgcaucgucgucgacuacaugguccagaaguccggcaagaccggcaccaucaccuaccagcgcggcauccuccucccccagaaggucuggugcgccuccggccgcuccaaggucaucaagggcucccucccccucaucggcgaggccgacugccuccacgagaaguacggcggccucaacaaguccaagcccuacuacaccggcgagcacgccaaggccaucggcaacugccccaucugggucaagaccccccucaagcucgccaacggcaccaaguaccgcccccccgccaagcuccucaaggagcgcggcuucuucggcgccaucgccggcuuccucgagggcggcugggagggcaugaucgccggcuggcacggcuacaccucccacggcgcccacggcgucgccgucgccgccgaccucaaguccacccaggaggccaucaacaagaucaccaagaaccucaacucccucuccgagcucgaggucaagaaccuccagcgccucuccggcgccauggacgagcuccacaacgagauccucgagcucgacgagaaggucgacgaccuccgcgccgacaccaucuccucccagaucgagcucgccguccuccucuccaacgagggcaucaucaacuccgaggacgagcaccuccucgcccucgagcgcaagcucaagaagaugcucggccccuccgccgucgagaucggcaacggcugcuucgagaccaagcacaagugcaaccagaccugccucgaccgcaucgccgccggcaccuucgacgccggcgaguucucccuccccaccuucgacucccucaacaucaccgccgccucccucaacgacgacggccucgacaaccacaccauccuccucuacuacuccaccgccgccuccucccucgccgucacccucaugaucgccaucuucgucgucuacauggucucccgcgacaacgucuccugcuccaucugccucuga

SEQ ID NO: 123100 - RNA, 1758 nt, Artificial Sequence
  derived and/or modified CDS sequence (opt2) from hemagglutinin__InfluenzaB__AGX16566
augaaggccaucaucguccuccucauggucgucaccuccaacgccgaccgcaucugcaccggcaucaccuccuccaacuccccccacgucgucaagaccgccacccagggcgaggucaacgucaccggcgucaucccccucaccaccacccccaccaagucccacuucgccaaccucaagggcaccaagacccgcggcaagcucugccccaagugccucaacugcaccgaccucgacgucgcccucggccgccccaagugcaccggcaacauccccuccgccaaggucuccauccuccacgagguccgccccgucaccuccggcugcuuccccaucaugcacgaccgcaccaagauccgccagcuccccaaccuccuccgcggcuacgagcacauccgccucuccacccacaacgucaucaacgccgagaaggcccccggcggccccuacaagaucggcaccuccggcuccugccccaacgucaccaacggcaacggcuucuucgccaccauggccugggccguccccaagaacgacaacaacaagaccgccaccaacucccucaccaucgagguccccuacaucugcaccgagggcgaggaccagaucaccgucuggggcuuccacuccgacaacgagauccagauggccaagcucuacggcgacuccaagccccagaaguucaccuccuccgccaacggcgucaccacccacuacgucucccagaucggcggcuuccccaaccagaccgaggacggcggccucccccaguccggccgcaucgucgucgacuacaugguccagaaguccggcaagaccggcaccaucaccuaccagcgcggcauccuccucccccagaaggucuggugcgccuccggccgcuccaaggucaucaagggcucccucccccucaucggcgaggccgacugccuccacgagaaguacggcggccucaacaaguccaagcccuacuacaccggcgagcacgccaaggccaucggcaacugccccaucugggucaagaccccccucaagcucgccaacggcaccaaguaccgcccccccgccaagcuccucaaggagcgcggcuucuucggcgccaucgccggcuuccucgagggcggcugggagggcaugaucgccggcuggcacggcuacaccucccacggcgcccacggcgucgccgucgccgccgaccucaaguccacccaggaggccaucaacaagaucaccaagaaccucaacucccucuccgagcucgaggucaagaaccuccagcgccucuccggcgccauggacgagcuccacaacgagauccucgagcucgacgagaaggucgacgaccuccgcgccgacaccaucuccucccagaucgagcucgccguccuccucuccaacgagggcaucaucaacuccgaggacgagcaccuccucgcccucgagcgcaagcucaagaagaugcucggccccuccgccgucgagaucggcaacggcugcuucgagaccaagcacaagugcaaccagaccugccucgaccgcaucgccgccggcaccuucgacgccggcgaguucucccuccccaccuucgacucccucaacaucaccgccgccucccucaacgacgacggccucgacaaccacaccauccuccucuacuacuccaccgccgccuccucccucgccgucacccucaugaucgccaucuucgucgucuacauggucucccgcgacaacgucuccugcuccaucugccucuga

SEQ ID NO: 123101 - RNA, 1758 nt, Artificial Sequence; identical to SEQ ID NO: 123015
  derived and/or modified CDS sequence (opt2) from hemagglutinin__InfluenzaB__AGX16577

SEQ ID NO: 123102 - RNA, 1758 nt, Artificial Sequence
  derived and/or modified CDS sequence (opt2) from hemagglutinin__InfluenzaB__AGX16588
augaaggccaucaucguccuccucauggucgucaccuccaacgccgaccgcaucugcaccggcaucaccuccuccaacuccccccacgucgucaagaccgccacccagggcgaggucaacgucaccggcgucaucccccucaccaccacccccaccaagucccacuucgccaaccucaagggcaccaagacccgcggcaagcucugccccaagugccucaacugcaccgaccucgacgucgcccucggccgccccaagugcaccggcaacauccccuccgccaaggucuccauccuccacgagguccgccccgucaccuccggcugcuuccccaucaugcacgaccgcaccaagauccgccagcuccccaaccuccuccgcggcuacgagcacauccgccucuccacccacaacgucaucaacgccgagaaggcccccggcggccccuacaagaucggcaccuccggcuccugccccaacgucaccaacggcaacggcuucuucgccaccauggccugggccguccccaagaacgacaacaacaagaccgccaccaacucccucaccaucgagguccccuacaucugcaccgagggcgaggaccagaucaccgucuggggcuuccacuccgacaacgagauccagauggccaagcucuacggcgacuccaagccccagaaguucaccuccuccgccaacggcgucaccacccacuacgucucccagaucggcggcuuccccaaccagaccgaggacggcggccucccccaguccggccgcaucgucgucgacuacaugguccagaaguccggcaagaccggcaccaucaccuaccagcgcggcauccuccucccccagaaggucuggugcgccuccggccgcuccaaggucaucaagggcucccucccccucaucggcgaggccgacugccuccacgagaaguacggcggccucaacaaguccaagcccuacuacaccggcgagcacgccaaggccaucggcaacugccccaucugggucaagaccccccucaagcucgccaacggcaccaaguaccgcccccccgccaagcuccucaaggagcgcggcuucuucggcgccaucgccggcuuccucgagggcggcugggagggcaugaucgccggcuggcacggcuacaccucccacggcgcccacggcgucgccgucgccgccgaccucaaguccacccaggaggccaucaacaagaucaccaagaaccucaacucccucuccgagcucgaggucaagaaccuccagcgccucuccggcgccauggacgagcuccacaacgagauccucgagcucgacgagaaggucgacgaccuccgcgccgacaccaucuccucccagaucgagcucgccguccuccucuccaacgagggcaucaucaacuccgaggacgagcaccuccucgcccucgagcgcaagcucaagaagaugcucggccccuccgccaucgagaucggcaacggcugcuucgagaccaagcacaagugcaaccagaccugccucgaccgcaucgccgccggcaccuucgacgccggcgaguucucccuccccaccuucgacucccucaacaucaccgccgccucccucaacgacgacggccucgacaaccacaccauccuccucuacuacuccaccgccgccuccucccucgccgucacccucaugaucgccaucuucgucgucuacauggucucccgcgacaacgucuccugcuccaucugccucuga

SEQ ID NO: 123103 - RNA, 1758 nt, Artificial Sequence; identical to SEQ ID NO: 123015
  derived and/or modified CDS sequence (opt2) from hemagglutinin__InfluenzaB__AGX16599

SEQ ID NO: 123104 - RNA, 1758 nt, Artificial Sequence; identical to SEQ ID NO: 123098
  derived and/or modified CDS sequence (opt2) from hemagglutinin__InfluenzaB__AGX16610

SEQ ID NO: 123105 - RNA, 1758 nt, Artificial Sequence; identical to SEQ ID NO: 123015
  derived and/or modified CDS sequence (opt2) from hemagglutinin__InfluenzaB__AGX16621

SEQ ID NO: 123106 - RNA, 1758 nt, Artificial Sequence
  derived and/or modified CDS sequence (opt2) from hemagglutinin__InfluenzaB__AGX16654
augaaggccaucaucguccuccucauggucgucaccuccaacgccgaccgcaucugcaccggcaucaccuccuccaacuccccccacgucgucaagaccgccacccagggcgaggucaacgucaccggcgucaucccccucaccaccacccccaccaagucccacuucgccaaccucaagggcaccaagacccgcggcaagcucugccccaagugccucaacugcaccgaccucgacgucgcccucggccgccccaagugcaccggcaacauccccuccgccaaggucuccauccuccacgagguccgccccgucaccuccggcugcuuccccaucaugcacgaccgcaccaagauccgccagcuccccaaccuccuccgcggcuacgagcacauccgccucuccacccacaacgucaucaacgccgagaaggcccccggcggccccuacaagaucggcaccuccggcuccugccccaacgucaccaacggcaacggcuucuucgccaccauggccugggccguccccaagaacgacaacaacaagaccgccaucaacucccucaccaucgagguccccuacaucugcaccgagggcgaggaccagaucaccgucuggggcuuccacuccgacaacgagacccagauggccaagcucuacggcgacuccaagccccagaaguucaccuccuccgccaacggcgucaccacccacuacgucucccagaucggcggcuuccccaaccagaccgaggacggcggccucccccaguccggccgcaucgucgucgacuacaugguccagaaguccggcaagaccggcaccaucaccuaccagcgcggcauccuccucccccagaaggucuggugcgccuccggccgcuccaaggucaucaagggcucccucccccucaucggcgaggccgacugccuccacgagaaguacggcggccucaacaaguccaagcccuacuacaccggcgagcacgccaaggccaucggcaacugccccaucugggucaagaccccccucaagcucgccaacggcaccaaguaccgcccccccgccaagcuccucaaggagcgcggcuucuucggcgccaucgccggcuuccucgagggcggcugggagggcaugaucgccggcuggcacggcuacaccucccacggcgcccacggcgucgccgucgccgccgaccucaaguccacccaggaggccaucaacaagaucaccaagaaccucaacucccucuccgagcucgaggucaagaaccuccagcgccucuccggcgccauggacgagcuccacaacgagauccucgagcucgacgagaaggucgacgaccuccgcgccgacaccaucuccucccagaucgagcucgccguccuccucuccaacgagggcaucaucaacuccgaggacgagcaccuccucgcccucgagcgcaagcucaagaagaugcucggccccuccgccaucgagaucggcaacggcugcuucgagaccaagcacaagugcaaccagaccugccucgaccgcaucgccgccggcaccuucgacgccggcgaguucucccuccccaccuucgacucccucaacaucaccgccgccucccucaacgacgacggccucgacaaccacaccauccuccucuacuacuccaccgccgccuccucccucgccgucacccucaugaucgccaucuucgucgucuacauggucucccgcgacaacgucuccugcuccaucugccucuga

SEQ ID NO: 123107 - RNA, 1758 nt, Artificial Sequence; identical to SEQ ID NO: 123015
  derived and/or modified CDS sequence (opt2) from hemagglutinin__InfluenzaB__AGX16665

SEQ ID NO: 123108 - RNA, 1758 nt, Artificial Sequence; identical to SEQ ID NO: 123015
  derived and/or modified CDS sequence (opt2) from hemagglutinin__InfluenzaB__AGX16676

SEQ ID NO: 123109 - RNA, 1758 nt, Artificial Sequence; identical to SEQ ID NO: 123015
  derived and/or modified CDS sequence (opt2) from hemagglutinin__InfluenzaB__AGX16687

SEQ ID NO: 123110 - RNA, 1758 nt, Artificial Sequence; identical to SEQ ID NO: 123015
  derived and/or modified CDS sequence (opt2) from hemagglutinin__InfluenzaB__AGX16698

SEQ ID NO: 123111 - RNA, 1758 nt, Artificial Sequence
  derived and/or modified CDS sequence (opt2) from hemagglutinin__InfluenzaB__AGX16709
augaaggccaucaucguccuccucauggucgucaccuccaacgccgaccgcaucugcaccggcaucaccuccuccaacuccccccacgucgucaagaccgccacccagggcgaggucaacgucaccggcgucaucccccucaccaccacccccaccaagucccacuucgccaaccucaagggcaccaagacccgcggcaagcucugccccaagugccucaacugcaccgaccucgacgucgcccucggccgccccaagugcaccgagaacauccccuccgccaaggucuccauccuccacgagguccgccccgucaccuccggcugcuuccccaucaugcacgaccgcaccaagauccgccagcuccccaaccuccuccgcggcuacgagcacauccgccucuccacccacaacgucaucaacgccgagaaggcccccggcggccccuacaagaucggcaccuccggcuccugccccaacgucaccaacggcaacggcuucuucgccaccauggccugggccguccccaagaacgacaacaacaagaccgccaccaacucccucaccaucgagguccccuacaucugcaccgagggcgaggaccagaucaccgucuggggcuuccacuccgacaacgagacccagauggccaagcucuacggcgacuccaagccccagaaguucaccuccuccgccaacggcgucaccacccacuacgucucccagaucggcggcuuccccaaccagaccgaggacggcggccucccccaguccggccgcaucgucgucgacuacaugguccagaaguccggcaagaccggcaccaucaccuaccagcgcggcauccuccucccccagaaggucuggugcgccuccggccgcuccaaggucaucaagggcucccucccccucaucggcgaggccgacugccuccacgagaaguacggcggccucaacaaguccaagcccuacuacaccggcgagcacgccaaggccaucggcaacugccccaucugggucaagaccccccucaagcucgccaacggcaccaaguaccgcccccccgccaagcuccucaaggagcgcggcuucuucggcgccaucgccggcuuccucgagggcggcugggagggcaugaucgccggcuggcacggcuacaccucccacggcgcccacggcgucgccgucgccgccgaccucaaguccacccaggaggccaucaacaagaucaccaagaaccucaacucccucuccgagcucgaggucaagaaccuccagcgccucuccggcgccauggacgagcuccacaacgagauccucgagcucgacgagaaggucgacgaccuccgcgccgacaccaucuccucccagaucgagcucgccguccuccucuccaacgagggcaucaucaacuccgaggacgagcaccuccucgcccucgagcgcaagcucaagaagaugcucggccccuccgccgucgagaucggcaacggcugcuucgagaccaagcacaagugcaaccagaccugccucgaccgcaucgccgccggcaccuucgacgccggcgaguucucccuccccaccuucgacucccucaacaucaccgccgccucccucaacgacgacggccucgacaaccacaccauccuccucuacuacuccaccgccgccuccucccucgccgucacccucaugaucgccaucuucgucgucuacauggucucccgcgacaacgucuccugcuccaucugccucuga

SEQ ID NO: 123112 - RNA, 1758 nt, Artificial Sequence; identical to SEQ ID NO: 123015
  derived and/or modified CDS sequence (opt2) from hemagglutinin__InfluenzaB__AGX16720

SEQ ID NO: 123113 - RNA, 1758 nt, Artificial Sequence; identical to SEQ ID NO: 123015
  derived and/or modified CDS sequence (opt2) from hemagglutinin__InfluenzaB__AGX16731

SEQ ID NO: 123114 - RNA, 1758 nt, Artificial Sequence
  derived and/or modified CDS sequence (opt2) from hemagglutinin__InfluenzaB__AGX16742
augaaggccaucaucguccuccucauggucgucaccuccaacgccgaccgcaucugcaccggcaucaccuccuccaacuccccccacgucgucaagaccgccacccagggcgaggucaacgucaccggcgucaucccccucaccaccacccccaccaagucccacuucgccaaccucaagggcaccaagacccgcggcaagcucugccccaagugccucaacugcaccgaccucgacgucgcccucggccgccccaagugcaccggcaacauccccuccgccaaggucuccaucauccacgagguccgccccgucaccuccggcugcuuccccaucaugcacgaccgcaccaagauccgccagcuccccaaccuccuccgcggcuacgagcacauccgccucuccacccacaacgucaucaacgccgagaaggcccccggcggccccuacaagaucggcaccuccggcuccugccccaacgucaccaacggcaacggcuucuucgccaccauggccugggccguccccaagaacgacaacaacaagaccgccaccaacucccucaccaucgagguccccuacaucugcaccgagggcgaggaccagaucaccgucuggggcuuccacuccgacaacgagacccagauggccaagcucuacggcgacuccaagccccagaaguucaccuccuccgccaacggcgucaccacccacuacgucucccagaucggcggcuuccccaaccagaccgaggacggcggccucccccaguccggccgcaucgucgucgacuacaugguccagaaguccggcaagaccggcaccaucaccuaccagcgcggcauccuccucccccagaaggucuggugcgccuccggccgcuccaaggucaucaagggcucccucccccucaucggcgaggccgacugccuccacgagaaguacggcggccucaacaaguccaagcccuacuacaccggcgagcacgccaaggccaucggcaacugccccaucugggucaagaccccccucaagcucgccaacggcaccaaguaccgcccccccgccaagcuccucaaggagcgcggcuucuucggcgccaucgccggcuuccucgagggcggcugggagggcaugaucgccggcuggcacggcuacaccucccacggcgcccacggcgucgccgucgccgccgaccucaaguccacccaggaggccaucaacaagaucaccaagaaccucaacucccucuccgagcucgaggucaagaaccuccagcgccucuccggcgccauggacgagcuccacaacgagauccucgagcucgacgagaaggucgacgaccuccgcgccgacaccaucuccucccagaucgagcucgccguccuccucuccaacgagggcaucaucaacuccgaggacgagcaccuccucgcccucgagcgcaagcucaagaagaugcucggccccuccgccgucgagaucggcaacggcugcuucgagaccaagcacaagugcaaccagaccugccucgaccgcaucgccgccggcaccuucgacgccggcgaguucucccuccccaccuucgacucccucaacaucaccgccgccucccucaacgacgacggccucgacaaccacaccauccuccucuacuacuccaccgccgccuccucccucgccgucacccucaugaucgccaucuucgucgucuacauggucucccgcgacaacgucuccugcuccaucugccucuga

SEQ ID NO: 123115 - RNA, 1758 nt, Artificial Sequence; identical to SEQ ID NO: 123015
  derived and/or modified CDS sequence (opt2) from hemagglutinin__InfluenzaB__AGX16753

SEQ ID NO: 123116 - RNA, 1758 nt, Artificial Sequence; identical to SEQ ID NO: 123015
  derived and/or modified CDS sequence (opt2) from hemagglutinin__InfluenzaB__AGX16764

SEQ ID NO: 123117 - RNA, 1758 nt, Artificial Sequence; identical to SEQ ID NO: 123015
  derived and/or modified CDS sequence (opt2) from hemagglutinin__InfluenzaB__AGX16775

SEQ ID NO: 123118 - RNA, 1758 nt, Artificial Sequence
  derived and/or modified CDS sequence (opt2) from hemagglutinin__InfluenzaB__AGX16797
augaaggccaucaucguccuccucauggucgucaccuccaacgccgaccgcaucugcaccggcaucaccuccuccaacuccccccacgucgucaagaccgccacccagggcgaggucaacgucaccggcgucaucccccucaccaccacccccaccaagucccacuucgccaaccucaagggcaccaagacccgcggcaagcucugccccaagugccucaacugcaccgaccucgacgucgcccucggccgccccaagugcaccggcaacaugcccuccgccaaggucuccauccuccacgagguccgccccgucaccuccggcugcuuccccaucaugcacgaccgcaccaagauccgccagcuccccaaccuccuccgcggcuacgagcacauccgccucuccacccacaacgucaucaacgccgagaaggcccccggcggccccuacaagaucggcaccuccggcuccugccccaacgucaccaacggcaacggcuucuucgccaccauggccugggccguccccaagaacgacaacaacaagaccgccaccaacucccucaccaucgagguccccuacaucugcaccgagggcgaggaccagaucaccgucuggggcuuccacuccgacaacgagacccagauggccaagcucuacggcgacuccaagccccagaaguucaccuccuccgccaacggcgucaccacccacuacgucucccagaucggcggcuuccccaaccagaccgaggacggcggccucccccaguccggccgcaucgucgucgacuacaugguccagaaguccggcaagaccggcaccaucaccuaccagcgcggcauccuccucccccagaaggucuggugcgccuccggccgcuccaaggucaucaagggcucccucccccucaucggcgaggccgacugccuccacgagaaguacggcggccucaacaaguccaagcccuacuacaccggcgagcacgccaaggccaucggcaacugccccaucugggucaagaccccccucaagcucgccaacggcaccaaguaccgcccccccgccaagcuccucaaggagcgcggcuucuucggcgccaucgccggcuuccucgagggcggcugggagggcaugaucgccggcuggcacggcuacaccucccacggcgcccacggcgucgccgucgccgccgaccucaaguccacccaggaggccaucaacaagaucaccaagaaccucaacucccucuccgagcucgaggucaagaaccuccagcgccucuccggcgccauggacgagcuccacaacgagauccucgagcucgacgagaaggucgacgaccuccgcgccgacaccaucuccucccagaucgagcucgccguccuccucuccaacgagggcaucaucaacuccgaggacgagcaccuccucgcccucgagcgcaagcucaagaagaugcucggccccuccgccgucgagaucggcaacggcugcuucgagaccaagcacaagugcaaccagaccugccucgaccgcaucgccgccggcaccuucgacgccggcgaguucucccuccccaccuucgacucccucaacaucaccgccgccucccucaacgacgacggccucgacaaccacaccauccuccucuacuacuccaccgccgccuccucccucgccgucacccucaugaucgccaucuucgucgucuacauggucucccgcgacaacgucuccugcuccaucugccucuga

SEQ ID NO: 123119 - RNA, 1758 nt, Artificial Sequence; identical to SEQ ID NO: 123015
  derived and/or modified CDS sequence (opt2) from hemagglutinin__InfluenzaB__AGX16808

SEQ ID NO: 123120 - RNA, 1758 nt, Artificial Sequence
  derived and/or modified CDS sequence (opt2) from hemagglutinin__InfluenzaB__AGX16819
augaaggccaucaucguccuccucauggucgucaccuccaacgccgaccgcaucugcaccggcaucaccuccuccaacuccccccacgucgucaagaccgccacccagggcgaggucaacgucaccggcgucaucccccucaccaccacccccaccaagucccacuucgccaaccucaagggcaccaagacccgcggcaagcucugccccaagugccucaacugcaccgaccucgacgucgcccucggccgccccaagugcaccggcaacauccccuccgccaaggucuccauccuccacgagguccgccccgucaccuccggcugcuuccccaucaugcacgaccgcaccaagauccgccagcuccccaaccuccuccgcggcuacgagcacauccgccucuccacccacaacgucaucaacgccgagaaggcccccggcggccccuacaagaucggcaccuccggcuccugccccaacgucaccaacggcaacggcuucuucgccaccauggccugggccguccccaagaacgacaacaacaagaccgccaccaacucccucaccaucgagguccccuacaucugcaccgagggcgaggaccagaucaccgucuggggcuuccacuccgacuccgagacccagauggccaagcucuacggcgacuccaagccccagaaguucaccuccuccgccaacggcgucaccacccacuacgucucccagaucggcggcuuccccaaccagaccgaggacggcggccucccccaguccggccgcaucgucgucgacuacaugguccagaaguccggcaagaccggcaccaucaccuaccagcgcggcauccuccucccccagaaggucuggugcgccuccggccgcuccaaggucaucaagggcucccucccccucaucggcgaggccgacugccuccacgagaaguacggcggccucaacaaguccaagcccuacuacaccggcgagcacgccaaggccaucggcaacugccccaucugggucaagaccccccucaagcucgccaacggcaccaaguaccgcccccccgccaagcuccucaaggagcgcggcuucuucggcgccaucgccggcuuccucgagggcggcugggagggcaugaucgccggcuggcacggcuacaccucccacggcgcccacggcgucgccgucgccgccgaccucaaguccacccaggaggccaucaacaagaucaccaagaaccucaacucccucuccgagcucgaggucaagaaccuccagcgccucuccggcgccauggacgagcuccacaacgagauccucgagcucgacgagaaggucgacgaccuccgcgccgacaccaucuccucccagaucgagcucgccguccuccucuccaacgagggcaucaucaacuccgaggacgagcaccuccucgcccucgagcgcaagcucaagaagaugcucggccccuccgccgucgagaucggcaacggcugcuucgagaccaagcacaagugcaaccagaccugccucgaccgcaucgccgccggcaccuucgacgccggcgaguucucccuccccaccuucgacucccucaacaucaccgccgccucccucaacgacgacggccucgacaaccacaccauccuccucuacuacuccaccgccgccuccucccucgccgucacccucaugaucgccaucuucaucgucuacauggucucccgcgacaacgucuccugcuccaucugccucuga

SEQ ID NO: 123121 - RNA, 1758 nt, Artificial Sequence; identical to SEQ ID NO: 123015
  derived and/or modified CDS sequence (opt2) from hemagglutinin__InfluenzaB__AGX16830

SEQ ID NO: 123122 - RNA, 1758 nt, Artificial Sequence
  derived and/or modified CDS sequence (opt2) from hemagglutinin__InfluenzaB__AGX16841
augaaggccaucaucguccuccucauggucgucaccuccaacgccgaccgcaucugcaccggcaucaccuccuccaacuccccccacgucgucaagaccgccacccagggcgaggucaacgucaccggcgucaucccccucaccaccacccccaccaagucccacuucgccaaccucaagggcaccaagacccgcggcaagcucugccccaagugccucaacugcaccgaccucgacgucgcccucggccgccccaagugcaccggcaacauccccuccgccaaggucuccauccuccacgagguccgccccgucaccuccggcugcuuccccaucaugcacgaccgcaccaagauccgccagcuccccaaccuccuccgcggcuacgagcacauccgccucuccacccacaacgucaucaacgccgagaaggcccccggcggccccuacaagaucggcaccuccggcuccugccccaacgucaccaacggcaacggcuucuucgccaccauggccugggccguccccaagaacgacaacaacaagaccgccaccaacucccucaccaucgagguccccuacaucugcaccgagggcgaggaccagaucaccgucuggggcuuccacuccgacaacgagacccagauggccaagcucuacggcgacuccaagccccagaaguucaccuccuccgccaacggcaugaccacccacuacgucucccagaucggcggcuuccccaaccagaccgaggacggcggccucccccaguccggccgcaucgucgucgacuacaugguccagaaguccggcaagaccggcaccaucaccuaccagcgcggcauccuccucccccagaaggucuggugcgccuccggccgcuccaaggucaucaagggcucccucccccucaucggcgaggccgacugccuccacgagaaguacggcggccucaacaaguccaagcccuacuacaccggcgagcacgccaaggccaucggcaacugccccaucugggucaagaccccccucaagcucgccaacggcaccaaguaccgcccccccgccaagcuccucaaggagcgcggcuucuucggcgccaucgccggcuuccucgagggcggcugggagggcaugaucgccggcuggcacggcuacaccucccacggcgcccacggcgucgccgucgccgccgaccucaaguccacccaggaggccaucaacaagaucaccaagaaccucaacucccucuccgagcucgaggucaagaaccuccagcgccucuccggcgccauggacgagcuccacaacgagauccucgagcucgacgagaaggucgacgaccuccgcgccgacaccaucuccucccagaucgagcucgccguccuccucuccaacgagggcaucaucaacuccgaggacgagcaccuccucgcccucgagcgcaagcucaagaagaugcucggccccuccgccgucgagaucggcaacggcugcuucgagaccaagcacaagugcaaccagaccugccucgaccgcaucgccgccggcaccuucgacgccggcgaguucucccuccccaccuucgacucccucaacaucaccgccgccucccucaacggcgacggccucgacaaccacaccauccuccucuacuacuccaccgccgccuccucccucgccgucacccucaugaucgccaucuucgucgucuacauggucucccgcgacaacgucuccugcuccaucugccucuga

SEQ ID NO: 123123 - RNA, 1758 nt, Artificial Sequence
  derived and/or modified CDS sequence (opt2) from hemagglutinin__InfluenzaB__AGX16852
augaaggccaucaucguccuccucauggucgucaccuccaacgccgaccgcaucugcaccggcaucaccuccuccaacuccccccacgucgucaagaccgccacccagggcgaggucaacgucaccggcgucaucccccucaccaccacccccaccaagucccacuucgccaaccucaagggcaccaagacccgcggcaagcucugccccaagugccucaacugcaccgaccucgacgucgcccucggccgccccaagugcaccggcaacauccccuccgccaaggucuccauccuccacgagguccgccccgucaccuccggcugcuuccccaucaugcacgaccgcaccaagauccgccagcuccccaaccuccuccgcggcuacgagcacauccgccucuccacccacaacgucaucaacgccgagaaggcccccggcggccccuacaagaucggcaccuccggcuccugccccaacgucaccaacggcaacggcuucuucgccaccauggccugggccguccccaagaacgacaacaacaagaccgccaccaacucccucaccaucgagguccccuacaucugcaccgagggcgaggaccagaucaccgucuggggcuuccacuccgacaacgagacccagauggccaagcucuacggcgacuccaagccccagaaguucaccuccuccgccaacggcgucaccacccacuacgucucccagaucggcggcuuccccaaccagaccgaggacggcggccucccccaguccggccgcaucgucgucgacuacaugguccagaaguccggcaagaccggcaccaucaccuaccagcgcggcauccuccucccccagaaggucuggugcgccuccggccgcuccaaggucaucaagggcucccucccccucaucggcgaggccgacugccuccacgagaaguacggcggccucaacaaguccaagcccuacuacaccggcgagcacgccaaggccaucggcaacugccccaucugggucaagaccccccucaagcucgccaacggcaccaaguaccgcccccccgccaagcuccucaaggagcgcggcuucuucggcgccaucgccggcuuccucgagggcggcugggagggcaugaucgccggcuggcacggcuacaccucccacggcgcccacggcgucgccgucgccgccgaccucaaguccacccaggaggccaucaacaagaucaccaagaaccucaacucccucuccgagcucgaggucaagaaccuccagcgcaucuccggcgccauggacgagcuccacaacgagauccucgagcucgacgagaaggucgacgaccuccgcgccgacaccaucuccucccagaucgagcucgccguccuccucuccaacgagggcaucaucaacuccgaggacgagcaccuccucgcccucgagcgcaagcucaagaagaugcucggccccuccgccgucgagaucggcaacggcugcuucgagaccaagcacaagugcaaccagaccugccucgaccgcaucgccgccggcaccuucgacgccggcgaguucucccuccccaccuucgacucccucaacaucaccgccgccucccucaacgacgacggccucgacaaccacaccauccuccucuacuacuccaccgccgccuccucccucgccgucacccucaugaucgccaucuucgucgucuacauggucucccgcgacaacgucuccugcuccaucugccucuga

SEQ ID NO: 123124 - RNA, 1758 nt, Artificial Sequence; identical to SEQ ID NO: 123015
  derived and/or modified CDS sequence (opt2) from hemagglutinin__InfluenzaB__AGX16863

SEQ ID NO: 123125 - RNA, 1758 nt, Artificial Sequence; identical to SEQ ID NO: 123015
  derived and/or modified CDS sequence (opt2) from hemagglutinin__InfluenzaB__AGX16874

SEQ ID NO: 123126 - RNA, 1758 nt, Artificial Sequence
  derived and/or modified CDS sequence (opt2) from hemagglutinin__InfluenzaB__AGX16885
augaaggccaucaucguccuccucauggucgucaccuccaacgccgaccgcaucugcaccggcaucaccuccuccaacuccccccacgucgucaagaccgccacccagggcgaggucaacgucaccggcgucaucccccucaccaccacccccaccaagucccacuucgccaaccucaagggcaccaagacccgcggcaagcucugccccaagugccucaacugcaccgaccucgacgucgcccucggccgccccaagugcaccggcaacauccccuccgccaaggucuccauccuccacgagguccgccccgucaccuccggcugcuuccccaucaugcacgaccgcaccaagauccgccagcuccccaaccuccuccgcggcuacgagcacauccgccucuccacccacaacgucaucaacgccgagaaggcccccggcggccccuacaagaucggcaccuccggcuccugccccaacgucaccaacggcaacggcuucuucgccaccauggccugggccguccccaagaacgacaacaacaagaccgccaccaacucccucaccaucgagguccccuacaucugcaccgagggcgaggaccagaucaccgucuggggcuuccacuccgacaacgagacccagauggccaagcucuacggcgacuccaagccccagaaguucaccuccuccgccaacggcgucaccacccacuacgucucccagaucggcggcuuccccaaccagaccgaggacggcggccucccccaguccggccgcaucgucgucgacuacaugguccagaaguccggcaagaccggcaccaucaccuaccagcgcggcauccuccucccccagaaggucuggugcgccuccggccgcuccaaggucaucaagggcucccucccccucaucggcgaggccgacugccuccacgagaaguacggcggccucaacaaguccaagcccuacuacaccggcgagcacgccaaggccaucggcaacugccccaucugggucaagaccccccucaagcucgccaacggcaccaaguaccgcccccccgccaagcuccucaaggagcgcggcuucuucggcgccaucgccggcuuccucgagggcggcugggagggcaugaucgccggcuggcacggcuacaccucccacggcgcccacggcgucgccgucgccgccgaccucaaguccacccaggaggccaucaacaagaucaccaagaaccucaacucccucuccgagcucgaggucaagaaccuccagcgccucuccggcgccauggacgagcuccacaacgagauccucgagcucgacgagaaggucgacgaccuccgcgccgacaccaucuccucccagaucgagcucgccguccuccucuccaacgagggcaucaucaacuccgaggacgagcaccuccucgcccucgagcgcaagcucaagaagaugcucggccccuccgccaucgagaucggcaacggcugcuucgagaccaagcacaagugcaaccagaccugccucgaccgcaucgccgccggcaccuucgacgccggcgaguucucccuccccaccuucgacucccucaacaucaccgccgccucccucaacgacgacggccucgacaaccacaccauccuccucuacuacuccaccgccgccuccucccucgccgucacccucaugaucgccaucuucgucgucuacauggucucccgcgacaacgucuccugcuccaucugccucuga

SEQ ID NO: 123127 - RNA, 1758 nt, Artificial Sequence; identical to SEQ ID NO: 123126
  derived and/or modified CDS sequence (opt2) from hemagglutinin__InfluenzaB__AGX16896

SEQ ID NO: 123128 - RNA, 1758 nt, Artificial Sequence; identical to SEQ ID NO: 123015
  derived and/or modified CDS sequence (opt2) from hemagglutinin__InfluenzaB__AGX16907

SEQ ID NO: 123129 - RNA, 1758 nt, Artificial Sequence; identical to SEQ ID NO: 123100
  derived and/or modified CDS sequence (opt2) from hemagglutinin__InfluenzaB__AGX16918

SEQ ID NO: 123130 - RNA, 1758 nt, Artificial Sequence; identical to SEQ ID NO: 123015
  derived and/or modified CDS sequence (opt2) from hemagglutinin__InfluenzaB__AGX16940

SEQ ID NO: 123131 - RNA, 1758 nt, Artificial Sequence; identical to SEQ ID NO: 123126
  derived and/or modified CDS sequence (opt2) from hemagglutinin__InfluenzaB__AGX16951

SEQ ID NO: 123132 - RNA, 1758 nt, Artificial Sequence
  derived and/or modified CDS sequence (opt2) from hemagglutinin__InfluenzaB__AGX16962
augaaggccaucaucguccuccucauggucgucaccuccaacgccgaccgcaucugcaccggcaucaccuccuccaacuccccccacgucgucaagaccgccacccagggcgaggucaacgucaccggcgucaucccccucaccaccacccccaccgagucccacuucgccaaccucaagggcaccaagacccgcggcaagcucugccccaagugccucaacugcaccgaccucgacgucgcccucggccgccccaagugcaccggcaacauccccuccgccaaggucuccauccuccacgagguccgccccgucaccuccggcugcuuccccaucaugcacgaccgcaccaagauccgccagcuccccaaccuccuccgcggcuacgagcacauccgccucuccacccacaacgucaucaacgccgagaaggcccccggcggccccuacaagaucggcaccuccggcuccugccccaacgucaccaacggcaacggcuucuucgccaccauggccugggccguccccaagaacgacaacaacaagaccgccaccaacucccucaccaucgagguccccuacaucugcaccgagggcgaggaccagaucaccgucuggggcuuccacuccgacaacgagacccagauggccaagcucuacggcgacuccaagccccagaaguucaccuccuccgccaacggcgucaccacccacuacgucucccagaucggcggcuuccccaaccagaaggaggacggcggccucccccaguccggccgcaucgucgucgacuacaugguccagaaguccggcaacaccggcaccaucaccuaccagcgcggcauccuccucccccagaaggucuggugcgccuccggccgcuccaaggucaucaagggcucccucccccucaucggcgaggccgacugccuccacgagaaguacggcggccucaacaaguccaagcccuacuacaccggcgagcacgccaaggccaucggcaacugccccaucugggucaagaccccccucaagcucgccaacggcaccaaguaccgcccccccgccaagcuccucaaggagcgcggcuucuucggcgccaucgccggcuuccucgagggcggcugggagggcaugaucgccggcuggcacggcuacaccucccacggcgcccacggcgucgccgucgccgccgaccucaaguccacccaggaggccaucaacaagaucaccaagaaccucaacucccucuccgagcucgaggucaagaaccuccagcgccucuccggcgccauggacgagcuccacaacgagauccucgagcucgacgagaaggucgacgaccuccgcgccgacaccaucuccucccagaucgagcucgccguccuccucuccaacgagggcaucaucaacuccgaggacgagcaccuccucgcccucgagcgcaagcucaagaagaugcucggccccuccgccgucgagaucggcaacggcugcuucgagaccaagcacaagugcaaccagaccugccucgaccgcaucgccgccggcaccuucgacgccggcgaguucucccuccccaccuucgacucccucaacaucaccgccgccucccucaacgacgacggccucgacaaccacaccauccuccucuacuacuccaccgccgccuccucccucgccgucacccucaugaucgccaucuucgucgucuacauggucucccgcgacaacgucuccugcuccaucugccucuga

SEQ ID NO: 123133 - RNA, 1758 nt, Artificial Sequence; identical to SEQ ID NO: 123015
  derived and/or modified CDS sequence (opt2) from hemagglutinin__InfluenzaB__AGX16973

SEQ ID NO: 123134 - RNA, 1758 nt, Artificial Sequence
  derived and/or modified CDS sequence (opt2) from hemagglutinin__InfluenzaB__AGX16995
augaaggccaucaucguccuccucauggucgucaccuccaacgccgaccgcaucugcaccggcaucaccuccuccaacuccccccacgucgucaagaccgccacccagggcgaggucaacgucaccggcgucaucccccucaccaccacccccaccaagucccacuucgccaaccucaagggcaccaagacccgcggcaagcucugccccaagugccucaacugcaccgaccucgacgucgcccucggccgccccaagugcaccggcaacauccccuccgccaaggucuccauccuccacgagguccgccccgucaccuccggcugcuuccccaucaugcacgaccgcaccaagauccgccagcuccccaaccuccuccgcggcuacgagcacauccgccucuccacccacaacgucaucaacgccgagaaggcccccggcggccccuacaagaucggcaccuccggcuccugccccaacgucaccaacggcaacggcuucuucgccaccauggccugggccguccccaagaacgacaacaacaagaccgccaccaacucccucaccgucgagguccccuacaucugcaccgagggcgaggaccagaucaccgucuggggcuuccacuccgacaacgagauccagauggccaagcucuacggcgacuccaagccccagaaguucaccuccuccgccaacggcgucaccacccacuacgucucccagaucggcggcuuccccaaccagaccgaggacggcggccucccccaguccggccgcaucgucgucgacuacaugguccagaaguccggcaagaccggcaccaucaccuaccagcgcggcauccuccucccccagaaggucuggugcgccuccggccgcuccaaggucaucaagggcucccucccccucaucggcgaggccgacugccuccacgagaaguacggcggccucaacaaguccaagcccuacuacaccggcgagcacgccaaggccaucggcaacugccccaucugggucaagaccccccucaagcucgccaacggcaccaaguaccgcccccccgccaagcuccucaaggagcgcggcuucuucggcgccaucgccggcuuccucgagggcggcugggagggcaugaucgccggcuggcacggcuacaccucccacggcgcccacggcgucgccgucgccgccgaccucaaguccacccaggaggccaucaacaagaucaccaagaaccucaacucccucuccgagcucgaggucaagaaccuccagcgccucuccggcgccauggacgagcuccacaacgagauccucgagcucgacgagaaggucgacgaccuccgcgccgacaccaucuccucccagaucgagcucgccguccuccucuccaacgagggcaucaucaacuccgaggacgagcaccuccucgcccucgagcgcaagcucaagaagaugcucggccccuccgccgucgagaucggcaacggcugcuucgagaccaagcacaagugcaaccagaccugccucgaccgcaucgccgccggcaccuucgacgccggcgaguucucccuccccaccuucgacucccucaacaucaccgccgccucccucaacgacgacggccucgacaaccacaccauccuccucuacuacuccaccgccgccuccucccucgccgucacccucaugaucgccaucuucgucgucuacauggucucccgcgacaacgucuccugcuccaucugccucuga

SEQ ID NO: 123135 - RNA, 1758 nt, Artificial Sequence
  derived and/or modified CDS sequence (opt2) from hemagglutinin__InfluenzaB__AGX17006
augaaggccaucaucguccuccucauggucgucaccuccaacgccgaccgcaucugcaccggcaucaccuccuccaacuccccccacgucgucaagaccgccacccagggcgaggucaacgucaccggcgucaucccccucaccaccacccccaccaagucccacuucgccaaccucaagggcaccaagacccgcggcaagcucugccccaagugccucaacugcaccgaccucgacgucgcccucggccgccccaagugcaccggcaacauccccuccgccaaggucuccauccuccacgagguccgccccgucaccuccggcugcuuccccaucaugcacgaccgcaccaagauccgccagcuccccaaccuccuccgcggcuacgagcacauccgccucuccacccacaacgucaucaacgccgagaaggcccccggcggccccuacaagaucggcaccuccggcuccugccccaacgucaccaacggcaacggcuucuucgccaccauggccugggccguccccaagaacgacaacaacaagaccgccaccaacucccucaccaucgagguccccuacaucugcaccgagggcgaggaccagaucaccgucuggggcuuccacuccgacaacgagaaccagauggccaagcucuacggcgacuccaagccccagaaguucaccuccuccgccaacggcgucaccacccacuacgucucccagaucggcggcuuccccaaccagaccgaggacggcggccucccccaguccggccgcaucgucgucgacuacaugguccagaaguccggcaagaccggcaccaucaccuaccagcgcggcauccuccucccccagaaggucuggugcgccuccggccgcuccaaggucaucaagggcucccucccccucaucggcgaggccgacugccuccacgagaaguacggcggccucaacaaguccaagcccuacuacaccggcgagcacgccaaggccaucggcaacugccccaucugggucaagaccccccucaagcucgccaacggcaccaaguaccgcccccccgccaagcuccucaaggagcgcggcuucuucggcgccaucgccggcuuccucgagggcggcugggagggcaugaucgccggcuggcacggcuacaccucccacggcgcccacggcgucgccgucgccgccgaccucaaguccacccaggaggccaucaacaagaucaccaagaaccucaacucccucuccgagcucgaggucaagaaccuccagcgccucuccggcgccauggacgagcuccacaacgagauccucgagcucgacgagaaggucgacgaccuccgcgccgacaccaucuccucccagaucgagcucgccguccuccucuccaacgagggcaucaucaacuccgaggacgagcaccuccucgcccucgagcgcaagcucaagaagaugcucggccccuccgccgucgagaucggcaacggcugcuucgagaccaagcacaagugcaaccagaccugccucgaccgcaucgccgccggcaccuucgacgccggcgaguucucccuccccaccuucgacucccucaacaucaccgccgccucccucaacgacgacggccucgacaaccacaccauccuccucuacuacuccaccgccgccuccucccucgccgucacccucaugaucgccaucuucgucgucuacauggucucccgcgacaacgucuccugcuccaucugccucuga

SEQ ID NO: 123136 - RNA, 1758 nt, Artificial Sequence; identical to SEQ ID NO: 123015
  derived and/or modified CDS sequence (opt2) from hemagglutinin__InfluenzaB__AGX17017

SEQ ID NO: 123137 - RNA, 1758 nt, Artificial Sequence; identical to SEQ ID NO: 123015
  derived and/or modified CDS sequence (opt2) from hemagglutinin__InfluenzaB__AGX17028

SEQ ID NO: 123138 - RNA, 1758 nt, Artificial Sequence
  derived and/or modified CDS sequence (opt2) from hemagglutinin__InfluenzaB__AGX17039
augaaggccaucaucguccuccucauggucgucaccuccaacgccgaccgcaucugcaccggcaucaccuccuccaacuccccccacgucgucaagaccgccacccagggcgaggucaacgucaccggcgucaucccccucaccaccacccccaccgagucccacuucgccaaccucaagggcaccaagacccgcggcaagcucugccccaagugccucaacugcaccgaccucgacgucgcccucggccgccccaagugcaccggcaacauccccuccgccaaggucuccauccuccacgagguccgccccgucaccuccggcugcuuccccaucaugcacgaccgcaccaagauccgccagcuccccaaccuccuccgcggcuacgagcacauccgccucuccacccacaacgucaucaacgccgagaaggcccccggcggccccuacaagaucggcaccuccggcuccugccccaacgucaccaacggcaacggcuucuucgccaccauggccugggccguccccaagaacgacaacaacaagaccgccaccaacucccucaccaucgagguccccuacaucugcaccgagggcgaggaccagaucaccgucuggggcuuccacuccgacaacgagacccagauggccaagcucuacggcgacuccaagccccagaaguucaccuccuccgccaacggcgucaccacccacuacgucucccagaucggcggcuuccccaaccagaccgaggacggcggccucccccaguccggccgcaucgucgucgacuacaugguccagaaguccggcaacaccggcaccaucaccuaccagcgcggcauccuccucccccagaaggucuggugcgccuccggccgcuccaaggucaucaagggcucccucccccucaucggcgaggccgacugccuccacgagaaguacggcggccucaacaaguccaagcccuacuacaccggcgagcacgccaaggccaucggcaacugccccaucugggucaagaccccccucaagcucgccaacggcaccaaguaccgcccccccgccaagcuccucaaggagcgcggcuucuucggcgccaucgccggcuuccucgagggcggcugggagggcaugaucgccggcuggcacggcuacaccucccacggcgcccacggcgucgccgucgccgccgaccucaaguccacccaggaggccaucaacaagaucaccaagaaccucaacucccucuccgagcucgaggucaagaaccuccagcgccucuccggcgccauggacgagcuccacaacgagauccucgagcucgacgagaaggucgacgaccuccgcgccgacaccaucuccucccagaucgagcucgccguccuccucuccaacgagggcaucaucaacuccgaggacgagcaccuccucgcccucgagcgcaagcucaagaagaugcucggccccuccgccgucgagaucggcaacggcugcuucgagaccaagcacaagugcaaccagaccugccucgaccgcaucgccgccggcaccuucgacgccggcgaguucucccuccccaccuucgacucccucaacaucaccgccgccucccucaacgacgacggccucgacaaccacaccaucaugcucuacuacuccaccgccgccuccucccucgccgucacccucaugaucgccaucuucgucgucuacauggucucccgcgacaacgucuccugcuccaucugccucuga

SEQ ID NO: 123139 - RNA, 1758 nt, Artificial Sequence; identical to SEQ ID NO: 123015
  derived and/or modified CDS sequence (opt2) from hemagglutinin__InfluenzaB__AGX17050

SEQ ID NO: 123140 - RNA, 1758 nt, Artificial Sequence
  derived and/or modified CDS sequence (opt2) from hemagglutinin__InfluenzaB__AGX17061
augaaggccaucaucguccuccucauggucgucaccuccaacgccgaccgcaucugcaccggcaucaccuccuccaacuccccccacgucgucaagaccgccacccagggcgaggucaacgucaccggcgucaucccccucaccaccacccccaccaagucccacuucgccaaccucaagggcaccaagacccgcggcaagcucugccccaagugccucaacugcaccgaccucgacgucgcccucggccgccccaagugcaccggcaacauccccuccgccaaggucuccauccuccacgagguccgccccgucaccuccggcugcuuccccaucaugcacgaccgcaccaagauccgccagcuccccaaccuccuccgcggcuacgagcgcauccgccucuccaaccacaacgucaucaacgccgagaaggcccccggcggccccuacaagaucggcaccuccggcuccugccccaacgucaccaacggcaacggcuucuucgccaccauggccugggccguccccaagaacgagaacaacaagaccgccaccaacucccucaccaucgagguccccuacaucugcaccgagggcgaggaccagaucaccgucuggggcuuccacuccgacaacgagacccagauggccaagcucuacggcgacuccaagccccagaaguucaccuccuccgccaacggcgucaccacccacuacgucucccagaucggcggcuuccccaaccagaccgaggacggcggccucccccaguccggccgcaucgucgucgacuacaugguccagaaguccggcaagaccggcaccaucaccuaccagcgcggcauccuccucccccagaaggucuggugcgccuccggccgcuccaaggucaucaagggcucccucccccucaucggcgaggccgacugccuccacgagaaguacggcggccucaacaaguccaagcccuacuacaccggcgagcacgccaaggccaucggcaacugccccaucugggucaagaccccccucaagcucgccaacggcaccaaguaccgcccccccgccaagcuccucaaggagcgcggcuucuucggcgccaucgccggcuuccucgagggcggcugggagggcaugaucgccggcuggcacggcuacaccucccacggcgcccacggcgucgccgucgccgccgaccucaaguccacccaggaggccaucaacaagaucaccaagaaccucaacucccucuccgagcucgaggucaagaaccuccagcgccucuccggcgccauggacgagcuccacaacgagauccucgagcucgacgagaaggucgacgaccuccgcgccgacaccaucuccucccagaucgagcucgccguccuccucuccaacgagggcaucaucaacuccgaggacgagcaccuccucgcccucgagcgcaagcucaagaagaugcucggccccuccgccgucgagaucggcaacggcugcuucgagaccaagcacaagugcaaccagaccugccucgaccgcaucgccgccggcaccuucaacgccggcgaguucucccuccccaccuucgacucccucaacaucaccgccgccucccucaacgacgacggccucgacaaccacaccauccuccucuacuacuccaccgccgccuccucccucgccgucacccucaugaucgccaucuucgucgucuacauggucucccgcgacaacgucuccugcuccaucugccucuga

SEQ ID NO: 123141 - RNA, 1758 nt, Artificial Sequence
  derived and/or modified CDS sequence (opt2) from hemagglutinin__InfluenzaB__AGX17072
augaaggccaucaucguccuccucauggucgucaccuccaacgccgaccgcaucugcaccggcaucaccuccuccaacuccccccacgucgucaagaccgccacccagggcgaggucaacgucaccggcgucaucccccucaccaccacccccaccgagucccacuucgccaaccucaagggcaccaagacccgcggcaagcucugccccaagugccucaacugcaccgaccucgacgucgcccucggccgccccaagugcaccggcaacauccccuccgccaaggucuccauccuccacgagguccgccccgucaccuccggcugcuuccccaucaugcacgaccgcaccaagauccgccagcuccccaaccuccuccgcggcuacgagcacauccgccucuccacccacaacgucaucaacgccgagaaggcccccggcggccccuacaagaucggcaccuccggcuccugccccaacgucaccaacggcaacggcuucuucgccaccauggccugggccguccccaagaacgacaacaacaagaccgccaccaacucccucaccaucgagguccccuacaucugcaccgagggcgaggaccagaucaccgucuggggcuuccacuccgacaacgagacccagauggccaagcucuacggcgacuccaagccccagaaguucaccuccuccgccaacggcgucaccacccacuacgucucccagaucggcggcuuccccaaccagaccgaggacggcggccucccccaguccggccgcaucgucgucgacuacaugguccagaaguccggcaacaccggcaccaucaccuaccagcgcggcauccuccucccccagaaggucuggugcgccuccggccgcuccaaggucaucaagggcucccucccccucaucggcgaggccgacugccuccacgagaaguacggcggccucaacaaguccaagcccuacuacaccggcgagcacgccaaggccaucggcaacugccccaucugggucaagaccccccucaagcucgccaacggcaccaaguaccgcccccccgccaagcuccucaaggagcgcggcuucuucggcgccaucgccggcuuccucgagggcggcugggagggcaugaucgccggcuggcacggcuacaccucccacggcgcccacggcgucgccgucgccgccgaccucaaguccacccaggaggccaucaacaagaucaccaagaaccucaacucccucuccgagcucgaggucaagaaccuccagcgccucuccggcgccauggacgagcuccacaacgagauccucgagcucgacgagaaggucgacgaccuccgcgccgacaccaucuccucccagaucgagcucgccguccuccucuccaacgagggcaucaucaacuccgaggacgagcaccuccucgcccucgagcgcaagcucaagaagaugcucggccccuccgccgucgagaucggcaacggcugcuucgagaccaagcacaagugcaaccagaccugccucgaccgcaucgccgccggcaccuucgacgccggcgaguucucccuccccaccuucgacucccucaacaucaccgccgccucccucaacgacgacggccucgacaaccacaccauccuccucuacuacuccaccgccgccuccucccucgccgucacccucaugaucgccaucuucgucgucuacauggucucccgcgacaacgucuccugcuccaucugccucuga

SEQ ID NO: 123142 - RNA, 1758 nt, Artificial Sequence; identical to SEQ ID NO: 123126
  derived and/or modified CDS sequence (opt2) from hemagglutinin__InfluenzaB__AGX17083

SEQ ID NO: 123143 - RNA, 1758 nt, Artificial Sequence
  derived and/or modified CDS sequence (opt2) from hemagglutinin__InfluenzaB__AGX17094
augaaggccaucaucguccuccucauggucgucaccuccaacgccgaccgcaucugcaccggcaucaccuccuccaacuccccccacgucgucaagaccgccacccagggcgaggucaacgucaccggcgucaucccccucaccaccacccccaccaagucccacuucgccaaccucaagggcaccaagacccgcggcaagcucugccccaagugccucaacugcaccgaccucgacgucgcccucggccgccccaagugcaccggcaacauccccuccgccaaggucuccauccuccacgagguccgccccgucaccuccggcugcuuccccaucaugcacgaccgcaccaagauccgccagcuccccaaccuccuccgcggcuacgagcacauccgccucuccacccacaacgucaucaacgccgagaaggcccccggcggccccuacaagaucggcaccuccggcuccugccccaacgucaccaacggcaacggcuucuucgccaccauggccugggccguccccaagaacgacaacaacaagaccgccaccaacucccucaccaucgagguccccuacaucugcaccgagggcgaggaccagaucaccgucuggggcuuccacuccgacuccgagacccagauggccaagcucuacggcgacuccaagccccagaaguucaccuccuccgccaacggcgucaccacccacuacgucucccagaucggcggcuuccccaaccagaccgaggacggcggccucccccaguccggccgcaucgucgucgacuacaugguccagaaguccggcaagaccggcaccaucaccuaccagcgcggcauccuccucccccagaaggucuggugcgccuccggccgcuccaaggucaucaagggcucccucccccucaucggcgaggccgacugccuccacgagaaguacggcggccucaacaaguccaagcccuacuacaccggcgagcacgccaaggccaucggcaacugccccaucugggucaagaccccccucaagcucgccaacggcaccaaguaccgcccccccgccaagcuccucaaggagcgcggcuucuucggcgccaucgccggcuuccucgagggcggcugggagggcaugaucgccggcuggcacggcuacaccucccacggcgcccacggcgucgccgucgccgccgaccucaaguccacccaggaggccaucaacaagaucaccaagaaccucaacucccucuccgagcucgaggucaagaaccuccagcgccucuccggcgccauggacgagcuccacaacgagauccucgagcucgacgagaaggucgacgaccuccgcgccgacaccaucuccucccagaucgagcucgccguccuccucuccaacgagggcaucaucaacuccgaggacgagcaccuccucgcccucgagcgcaagcucaagaagaugcucggccccuccgccgucgagaucggcaacggcugcuucgagaccaagcacaagugcaaccagaccugccucgaccgcaucgccgccggcaccuucgacgccggcgaguucucccuccccaccuucgacucccucaacaucaccgccgccucccucaacgacgacggccucgacaaccacaccauccuccucuacuacuccaccgccgccuccucccucgccgucacccucaugaucgccaucuucgucgucuacauggucucccgcgacaacgucuccugcuccaucugccucuga

SEQ ID NO: 123144 - RNA, 1758 nt, Artificial Sequence
  derived and/or modified CDS sequence (opt2) from hemagglutinin__InfluenzaB__AGX17105
augaaggccaucaucguccuccucauggucgucaccuccaacgccgaccgcaucugcaccggcaucaccuccuccaacuccccccacgucgucaagaccgccacccagggcgagaucaacgucaccggcgucaucccccucaccaccacccccaccaagucccacuucgccaaccucaagggcaccaagacccgcggcaagcucugccccaagugccucaacugcaccgaccucgacgucgcccucggccgccccaagugcaccggcaacauccccuccgccaaggucuccauccuccacgagguccgccccgucaccuccggcugcuuccccaucaugcacgaccgcaccaagauccgccagcuccccaaccuccuccgcggcuacgagcacauccgccucuccacccacaacgucaucaacgccgagaaggcccccggcggccccuacaagaucggcaccuccggcuccugccccaacgucaccaacggcaacggcuucuucgccaccauggccugggccguccccaagaacgacaacaacaagaccgccaccaacucccucaccaucgaggucccccacaucugcaccgagggcgaggaccagaucaccgucuggggcuuccacuccgacaacgagauccagauggccaagcucuacggcgacuccaagccccagaaguucaccuccuccgccaacggcgucaccacccacuacaucucccagaucggcggcuuccccaaccagaccgaggacggcggccucccccaguccggccgcaucgucgucgacuacaugguccagaaguccggcaagaccggcaccaucaccuaccagcgcggcauccuccucccccagaaggucuggugcgccuccggccgcuccaaggucaucaagggcucccucccccucaucggcgaggccgacugccuccacgagaaguacggcggccucaacaaguccaagcccuacuacaccggcgagcacgccaaggccaucggcaacugccccaucugggucaagaccccccucaagcucgccaacggcaccaaguaccgcccccccgccaagcuccucaaggagcgcggcuucuucggcgccaucgccggcuuccucgagggcggcugggagggcaugaucgccggcuggcacggcuacaccucccacggcgcccacggcgucgccgucgccgccgaccucaaguccacccaggaggccaucaacaagaucaccaagaaccucaacucccucuccgagcucgaggucaagaaccuccagcgccucuccggcgccauggacgagcuccacaacgagauccucgagcucgacgagaaggucgacgaccuccgcgccgacaccaucuccucccagaucgagcucgccguccuccucuccaacgagggcaucaucaacuccgaggacgagcaccuccucgcccucgagcgcaagcucaagaagaugcucggccccuccgccaucgagaucggcaacggcugcuucgagaccaagcacaagugcaaccagaccugccucgaccgcaucgccgccggcaccuucgacgccggcgaguucucccuccccaccuucgacucccucaacaucaccgccgccucccucaacgacgacggccucgacaaccacaccauccuccucuacuacuccaccgccgccuccucccucgccgucacccucaugaucgccaucuucgucgucuacauggucucccgcgacaacgucuccugcuccaucugccucuga

SEQ ID NO: 123145 - RNA, 1758 nt, Artificial Sequence; identical to SEQ ID NO: 123126
  derived and/or modified CDS sequence (opt2) from hemagglutinin__InfluenzaB__AGX17116

SEQ ID NO: 123146 - RNA, 1758 nt, Artificial Sequence
  derived and/or modified CDS sequence (opt2) from hemagglutinin__InfluenzaB__AGX17127
augaaggccaucaucguccuccucauggucgucaccuccaacgccgaccgcaucugcaccggcaucaccuccuccaacuccccccacgucgucaagaccgccacccagggcgaggucaacgucaccggcgucaucccccucaccaccacccccaccgagucccacuucgccaaccucaagggcaccaagacccgcggcaagcucugccccaagugccucaacugcaccgaccucgacgucgcccucggccgccccaagugcaccggcaacauccccuccgccaaggucuccauccuccacgagguccgccccgucaccuccggcugcuuccccaucaugcacgaccgcaccaagauccgccagcuccccaaccuccuccgcggcuacgagcacauccgccucuccacccacaacgucaucaacgccgagaaggcccccggcggccccuacaagaucggcaccuccggcuccugccccaacgucaccaacggcaacggcuucuucgccaccauggccugggccguccccaagaacgacaacaacaagaccgccaccaacucccucaccaucgagguccccuacaucugcaccgagggcgaggaccagaucaccgucuggggcuuccacuccgacaacgagaaccagauggccaagcucuacggcgacuccaagccccagaaguucaccuccuccgccaacggcgucaccacccacuacgucucccagaucggcggcuuccccaaccagaccgaggacggcggccucccccaguccggccgcaucgucgucgacuacaugguccagaaguccggcaacaccggcaccaucaccuaccagcgcggcauccuccucccccagaaggucuggugcgccuccggccgcuccaaggucaucaagggcucccucccccucaucggcgaggccgacugccuccacgagaaguacggcggccucaacaaguccaagcccuacuacaccggcgagcacgccaaggccaucggcaacugccccaucugggucaagaccccccucaagcucgccaacggcaccaaguaccgcccccccgccaagcuccucaaggagcgcggcuucuucggcgccaucgccggcuuccucgagggcggcugggagggcaugaucgccggcuggcacggcuacaccucccacggcgcccacggcgucgccgucgccgccgaccucaaguccacccaggaggccaucaacaagaucaccaagaaccucaacucccucuccgagcucgaggucaagaaccuccagcgccucuccggcgccauggacgagcuccacaacgagauccucgagcucgacgagaaggucgacgaccuccgcgccgacaccaucuccucccagaucgagcucgccguccuccucuccaacgagggcaucaucaacuccgaggacgagcaccuccucgcccucgagcgcaagcucaagaagaugcucggccccuccgccgucgagaucggcaacggcugcuucgagaccaagcacaagugcaaccagaccugccucgaccgcaucgccgccggcaccuucgacgccggcgaguucucccuccccaccuucgacucccucaacaucaccgccgccucccucaacgacgacggccucgacaaccacaccauccuccucuacuacuccaccgccgccuccucccucgccgucacccucaugaucgccaucuucgucgucuacauggucucccgcgacaacgucuccugcuccaucugccucuga

SEQ ID NO: 123147 - RNA, 1758 nt, Artificial Sequence; identical to SEQ ID NO: 123135
  derived and/or modified CDS sequence (opt2) from hemagglutinin__InfluenzaB__AGX17138

SEQ ID NO: 123148 - RNA, 1758 nt, Artificial Sequence; identical to SEQ ID NO: 123135
  derived and/or modified CDS sequence (opt2) from hemagglutinin__InfluenzaB__AGX17149

SEQ ID NO: 123149 - RNA, 1758 nt, Artificial Sequence
  derived and/or modified CDS sequence (opt2) from hemagglutinin__InfluenzaB__AGX17160
augaaggccaucaucguccuccucauggucgucaccuccaacgccgaccgcaucugcaccggcaucaccuccuccaacuccccccacgucgucaagaccgccacccagggcgaggucaacgucaccggcaugaucccccucaccaccacccccaccaagucccacuucgccaaccucaagggcaccaagacccgcggcaagcucugccccaagugccucaacugcaccgaccucgacgucgcccucggccgccccaagugcaccggcaacauccccuccgccaaggucuccauccuccacgagguccgccccgucaccuccggcugcuuccccaucaugcacgaccgcaccaagauccgccagcuccccaaccuccuccgcggcuacgagcacauccgccucuccacccacaacgucaucaacgccgagaaggcccccggcggccccuacaagaucggcaccuccggcuccugccccaacgucaccaacggcaacggcuucuucgccaccauggccugggccguccccaagaacgacaacaacaagaccgccaccaacucccucaccaucgagguccccuacaucugcaccgagggcgaggaccagaucaccgucuggggcuuccacuccgacaacgagacccagauggccaagcucuacggcgacuccaagccccagaaguucaccuccuccgccaacggcgucaccacccacuacgucucccagaucggcggcuuccccaaccagaccgaggacggcggccucccccaguccggccgcaucgucgucgacuacaugguccagaaguccggcaagaccggcaccaucaccuaccagcgcggcauccuccucccccagaaggucuggugcgccuccggccgcuccaaggucaucaagggcucccucccccucaucggcgaggccgacugccuccacgagaaguacggcggccucaacaaguccaagcccuacuacaccggcgagcacgccaaggccaucggcaacugccccaucugggucaagaccccccucaagcucgccaacggcaccaaguaccgcccccccgccaagcuccucaaggagcgcggcuucuucggcgccaucgccggcuuccucgagggcggcugggagggcaugaucgccggcuggcacggcuacaccucccacggcgcccacggcgucgccgucgccgccgaccucaaguccacccaggaggccaucaacaagaucaccaagaaccucaacucccucuccgagcucgaggucaagaaccuccagcgccucuccggcgccauggacgagcuccacaacgagauccucgagcucgacgagaaggucgacgaccuccgcgccgacaccaucuccucccagaucgagcucgccguccuccucuccaacgagggcaucaucaacuccgaggacgagcaccuccucgcccucgagcgcaagcucaagaagaugcucggccccuccgccgucgagaucggcaacggcugcuucgagaccaagcacaagugcaaccagaccugccucgaccgcaucgccgccggcaccuucgacgccggcgaguucucccuccccaccuucgacucccucaacaucaccgccgccucccucaacgacgacggccucgacaaccacaccauccuccucuacuacuccaccgccgccuccucccucgccgucacccucaugaucgccaucuucgucgucuacauggucucccgcgacaacgucuccugcuccaucugccucuga

SEQ ID NO: 123150 - RNA, 1758 nt, Artificial Sequence
  derived and/or modified CDS sequence (opt2) from hemagglutinin__InfluenzaB__AGX17171
augaaggccaucaucguccuccucauggucgucaccuccaacgccgaccgcaucugcaccggcaucaccuccuccaacuccccccacgucgucaagaccgccacccagggcgaggucaacgucaccggcgucaucccccucaccaccacccccaccgagucccacuucgccaaccucaagggcaccaagacccgcggcaagcucugccccaagugccucaacugcaccgaccucgacgucgcccucggccgccccaagugcaccggcaacauccccuccgccaaggucuccauccuccacgagguccgccccgucaccuccggcugcuuccccaucaugcacaaccgcaccaagauccgccagcuccccaaccuccuccgcggcuacgagcacauccgccucuccacccacaacgucaucaacgccgagaaggcccccggcggccccuacaagaucggcaccuccggcuccugccccaacgucaccaacggcaacggcuucuucgccaccauggccugggccguccccaagaacgacaacaacaagaccgccaccaacucccucaccaucgagguccccuacaucugcaccgagggcgaggaccagaucaccgucuggggcuuccacuccgacaacgaggcccagauggccaagcucuacggcgacuccaagccccagaaguucaccuccuccgccaacggcgucaccacccacuacgucucccagaucggcggcuuccccaaccagaccgaggacggcggccucccccaguccggccgcaucgucgucgacuacaugguccagaaguccggcaacaccggcaccaucaccuaccagcgcggcauccuccucccccagaaggucuggugcgccuccggccgcuccaaggucaucaagggcucccucccccucaucggcgaggccgacugccuccacgagaaguacggcggccucaacaaguccaagcccuacuacaccggcgagcacgccaaggccaucggcaacugccccaucugggucaagaccccccucaagcucgccaacggcaccaaguaccgcccccccgccaagcuccucaaggagcgcggcuucuucggcgccaucgccggcuuccucgagggcggcugggagggcaugaucgccggcuggcacggcuacaccucccacggcgcccacggcgucgccgucgccgccgaccucaaguccacccaggaggccaucaacaagaucaccaagaaccucaacucccucuccgagcucgaggucaagaaccuccagcgccucuccggcgccauggacgagcuccacaacgagauccucgagcucgacgagaaggucgacgaccuccgcgccgacaccaucuccucccagaucgagcucgccguccuccucuccaacgagggcaucaucaacuccgaggacgagcaccuccucgcccucgagcgcaagcucaagaagaugcucggccccuccgccgucgagaucggcaacggcugcuucgagaccaagcacaagugcaaccagaccugccucgaccgcaucgccgccggcaccuucgacgccggcgaguucucccuccccaccuucgacucccucaacaucaccgccgccucccucaacgacgacggccucgacaaccacaccauccuccucuacuacuccaccgccgccuccucccucgccgucacccucaugaucgccaucuucgucgucuacauggucucccgcgacaacgucuccugcuccaucugccucuga

SEQ ID NO: 123151 - RNA, 1758 nt, Artificial Sequence; identical to SEQ ID NO: 123015
  derived and/or modified CDS sequence (opt2) from hemagglutinin__InfluenzaB__AGX17182

SEQ ID NO: 123152 - RNA, 1758 nt, Artificial Sequence; identical to SEQ ID NO: 123015
  derived and/or modified CDS sequence (opt2) from hemagglutinin__InfluenzaB__AGX17193

SEQ ID NO: 123153 - RNA, 1758 nt, Artificial Sequence; identical to SEQ ID NO: 123015
  derived and/or modified CDS sequence (opt2) from hemagglutinin__InfluenzaB__AGX17204

SEQ ID NO: 123154 - RNA, 1758 nt, Artificial Sequence
  derived and/or modified CDS sequence (opt2) from hemagglutinin__InfluenzaB__AGX17215
augaaggccaucaucguccuccucauggucgucaccuccaacgccgaccgcaucugcaccggcaucaccuccuccaacuccccccacgucgucaagaccgccacccagggcgaggucaacgucaccggcgucaucccccucaccaccacccccaccaagucccacuucgccaaccucaagggcaccaagacccgcggcaagcucugccccaagugccucaacugcaccgaccucgacgucgcccucggccgccccaagugcaccggcaacauccccuccgccaaggucuccauccuccacgagguccgccccgucaccuccggcugcuuccccaucaugcacgaccgcaccaagauccgccagcuccccaaccuccuccgcggcuacgagcacauccgccucuccacccacaacgucaucaacgccgagaaggcccccggcggccccuacaagaucggcaccuccggcuccugccccaacgucaccaacggcaacggcuucuucgccaccauggccugggccguccccaagaacgacaacaacaagaccgccaccaacucccucaccaucgagguccccuacaucugcaccgagggcgaggaccagaucaccgucuggggcuuccacuccgacaacgaggcccagauggccaagcucuacggcgacuccaagccccagaaguucaccuccuccgccaacggcgucaccacccacuacgucucccagaucggcggcuuccccaaccagaccgaggacggcggccucccccaguccggccgcaucgucgucgacuacaugguccagaaguccggcaagaccggcaccaucaccuaccagcgcggcauccuccucccccagaaggucuggugcgccuccggccgcuccaaggucaucaagggcucccucccccucaucggcgaggccgacugccuccacgagaaguacggcggccucaacaaguccaagcccuacuacaccggcgagcacgccaaggccaucggcaacugccccaucugggucaagaccccccucaagcucgccaacggcaccaaguaccgcccccccgccaagcuccucaaggagcgcggcuucuucggcgccaucgccggcuuccucgagggcggcugggagggcaugaucgccggcuggcacggcuacaccucccacggcgcccacggcgucgccgucgccgccgaccucaaguccacccaggaggccaucaacaagaucaccaagaaccucaacucccucuccgagcucgaggucaagaaccuccagcgccucuccggcgccauggacgagcuccacaacgagauccucgagcucgacgagaaggucgacgaccuccgcgccgacaccaucuccucccagaucgagcucgccguccuccucuccaacgagggcaucaucaacuccgaggacgagcaccuccucgcccucgagcgcaagcucaagaagaugcucggccccuccgccaucgagaucggcaacggcugcuucgagaccaagcacaagugcaaccagaccugccucgaccgcaucgccgccggcaccuucgacgccggcgaguucucccuccccaccuucgacucccucaacaucaccgccgccucccucaacgacgacggccucgacaaccacaccauccuccucuacuacuccaccgccgccuccucccucgccgucacccucaugaucgccaucuucgucgucuacauggucucccgcgacaacgucuccugcuccaucugccucuga

SEQ ID NO: 123155 - RNA, 1758 nt, Artificial Sequence; identical to SEQ ID NO: 123015
  derived and/or modified CDS sequence (opt2) from hemagglutinin__InfluenzaB__AGX17226

SEQ ID NO: 123156 - RNA, 1758 nt, Artificial Sequence
  derived and/or modified CDS sequence (opt2) from hemagglutinin__InfluenzaB__AGX17237
augaaggccaucaucguccuccucauggucgucaccuccaacgccgaccgcaucugcaccggcaucaccuccuccaacuccccccacgucgucaagaccgccacccagggcgaggucaacgucaccggcgucaucccccucaccaccacccccaccaagucccacuucgccaaccucaagggcaccaagacccgcggcaagcucugccccaagugccucaacugcaccgaccucgacgucgcccucggccgccccaagugcaccggcaacauccccuccgccaaggucuccauccuccacgagguccgccccgucaccuccggcugcuuccccaucaugcacgaccgcaccaagauccgccagcuccccaaccuccuccgcggcuacgagcacauccgccucuccacccacaacgucaucaacgccgagaaggcccccggcggccccuacaagaucggcaccuccggcuccugccccaacaucaccaacggcaacggcuucuucgccaccauggccugggccguccccaagaacgacaacaacaagaccgccaccaacucccucaccaucgagguccccuacaucugcaccgagggcgaggaccagaucaccgucuggggcuuccacuccgacaacgagauccagauggccaagcucuacggcgacuccaagccccagaaguucaccuccuccgccaacggcgucaccacccacuacgucucccagaucggcggcuuccccaaccagaccgaggacggcggccucccccaguccggccgcaucgucgucgacuacaugguccagaaguccggcaagaccggcaccaucaccuaccagcgcggcauccuccucccccagaaggucuggugcgccuccggccgcuccaaggucaucaagggcucccucccccucaucggcgaggccgacugccuccacgagaaguacggcggccucaacaaguccaagcccuacuacaccggcgagcacgccaaggccaucggcaacugccccaucugggucaagaccccccucaagcucgccaacggcaccaaguaccgcccccccgccaagcuccucaaggagcgcggcuucuucggcgccaucgccggcuuccucgagggcggcugggagggcaugaucgccggcuggcacggcuacaccucccacggcgcccacggcgucgccgucgccgccgaccucaaguccacccaggaggccaucaacaagaucaccaagaaccucaacucccucuccgagcucgaggucaagaaccuccagcgccucuccggcgccauggacgagcuccacaacgagauccucgagcucgacgagaaggucgacgaccuccgcgccgacaccaucuccucccagaucgagcucgccguccuccucuccaacgagggcaucaucaacuccgaggacgagcaccuccucgcccucgagcgcaagcucaagaagaugcucggccccuccgccgucgagaucggcaacggcugcuucgagaccaagcacaagugcaaccagaccugccucgaccgcaucgccgccggcaccuucgacgccggcgaguucucccuccccaccuucgacucccucaacaucaccgccgccucccucaacgacgacggccucgacaaccacaccauccuccucuacuacuccaccgccgccuccucccucgccgucacccucaugaucgccaucuucgucgucuacauggucucccgcgacaacgucuccugcuccaucugccucuga

SEQ ID NO: 123157 - RNA, 1758 nt, Artificial Sequence
  derived and/or modified CDS sequence (opt2) from hemagglutinin__InfluenzaB__AGX17248
augaaggccaucaucguccuccucauggucgucaccuccaacgccgaccgcaucugcaccggcaucaccuccuccaacuccccccacgucgucaagaccgccacccagggcgaggucaacgucaccggcgucaucccccucaccaccacccccaccaagucccacuucgccaaccucaagggcaccaagacccgcggcaagcucugccccaagugccucaacugcaccgaccucgacgucgcccucggccgccccaagugcaccggcaacauccccuccgccaaggucuccauccuccacgagguccgccccgucaccuccggcugcuuccccaucaugcacgaccgcaccaagauccgccagcuccccaaccuccuccgcggcuacgagcacauccgccucuccacccacaacgucaucaacgccgagaaggcccccggcggccccuacaagaucggcaccuccggcuccugccccaacgucaccaacggcaacggcuucuucgccaccauggccugggccguccccaagaacgacaacaacaagaccgccaccaacucccucaccaucgagguccccuacaucugcaccgagggcgaggaccagaucaccgucuggggcuuccacuccgacaacgagacccagauggccaagcucuacggcgacuccaagccccagaaguucaccuccuccgccaacggcgucaccacccacuacgucucccagaucggcggcuuccccaaccagaccgaggacggcggccucccccaguccggccgcaucgucgucgacuacaugguccagaaguccggcaagaccggcaccaucaccuaccagcgcggcauccuccucccccagaaggucuggugcaccuccggccgcuccaaggucaucaagggcucccucccccucaucggcgaggccgacugccuccacgagaaguacggcggccucaacaaguccaagcccuacuacaccggcgagcacgccaaggccaucggcaacugccccaucugggucaagaccccccucaagcucgccaacggcaccaaguaccgcccccccgccaagcuccucaaggagcgcggcuucuucggcgccaucgccggcuuccucgagggcggcugggagggcaugaucgccggcuggcacggcuacaccucccacggcgcccacggcgucgccgucgccgccgaccucaaguccacccaggaggccaucaacaagaucaccaagaaccucaacucccucuccgagcucgaggucaagaaccuccagcgccucuccggcgccauggacgagcuccacaacgagauccucgagcucgacgagaaggucgacgaccuccgcgccgacaccaucuccucccagaucgagcucgccguccuccucuccaacgagggcaucaucaacuccgaggacgagcaccuccucgcccucgagcgcaagcucaagaagaugcucggccccuccgccgucgagaucggcaacggcugcuucgagaccaagcacaagugcaaccagaccugccucgaccgcaucgccgccggcaccuucgacgccggcgaguucucccuccccaccuucgacucccucaacaucaccgccgccucccucaacgacgacggccucgacaaccacaccauccuccucuacuacuccaccgccgccuccucccucgccgucacccucaugaucgccaucuucgucgucuacauggucucccgcgacaacgucuccugcuccaucugccucuga

SEQ ID NO: 123158 - RNA, 1758 nt, Artificial Sequence; identical to SEQ ID NO: 123099
  derived and/or modified CDS sequence (opt2) from hemagglutinin__InfluenzaB__AGX17270

SEQ ID NO: 123159 - RNA, 1758 nt, Artificial Sequence; identical to SEQ ID NO: 123015
  derived and/or modified CDS sequence (opt2) from hemagglutinin__InfluenzaB__AGX17281

SEQ ID NO: 123160 - RNA, 1758 nt, Artificial Sequence; identical to SEQ ID NO: 123015
  derived and/or modified CDS sequence (opt2) from hemagglutinin__InfluenzaB__AGX17292

SEQ ID NO: 123161 - RNA, 1758 nt, Artificial Sequence; identical to SEQ ID NO: 123015
  derived and/or modified CDS sequence (opt2) from hemagglutinin__InfluenzaB__AGX17303

SEQ ID NO: 123162 - RNA, 1758 nt, Artificial Sequence; identical to SEQ ID NO: 123141
  derived and/or modified CDS sequence (opt2) from hemagglutinin__InfluenzaB__AGX17314

SEQ ID NO: 123163 - RNA, 1758 nt, Artificial Sequence; identical to SEQ ID NO: 123015
  derived and/or modified CDS sequence (opt2) from hemagglutinin__InfluenzaB__AGX17325

SEQ ID NO: 123164 - RNA, 1758 nt, Artificial Sequence; identical to SEQ ID NO: 123126
  derived and/or modified CDS sequence (opt2) from hemagglutinin__InfluenzaB__AGX17336

SEQ ID NO: 123165 - RNA, 1758 nt, Artificial Sequence; identical to SEQ ID NO: 123015
  derived and/or modified CDS sequence (opt2) from hemagglutinin__InfluenzaB__AGX17347

SEQ ID NO: 123166 - RNA, 1758 nt, Artificial Sequence; identical to SEQ ID NO: 123015
  derived and/or modified CDS sequence (opt2) from hemagglutinin__InfluenzaB__AGX17358

SEQ ID NO: 123167 - RNA, 1758 nt, Artificial Sequence
  derived and/or modified CDS sequence (opt2) from hemagglutinin__InfluenzaB__AGX17369
augaaggccaucaucguccuccucauggucgucaccuccaacgccgaccgcaucugcaccggcaucaccuccuccaacuccccccacgucgucaagaccgccacccagggcgaggucaacgucaccggcgucaucccccucaccaccacccccaccaagucccacuucgccaaccucaagggcaccaagacccgcggcaagcucugccccaagugccucaacugcaccgaccucgacgucgcccucggccgccccaagugcaccggcaacauccccuccgccaaggucuccauccuccacgagguccgccccgucaccuccggcugcuuccccaucaugcacgaccgcaccaagauccgccagcuccccaaccuccuccgcggcuacgagcacauccgccucuccacccacaacgucaucaacgccgagaaggcccccggcggccccuacaagaucggcaccuccggcuccugccccaacgucaccaacggcaacggcuucuucgccaccauggccugggccguccccaagaacgacaacaacaagaccgccaccaacucccucaccaucgagguccccuacaucugcaccgagggcgaggaccagaucaccgucuggggcuuccacuccgacaacgagacccagauggccaagcucuacggcgacuccaagccccagaaguucaccuccuccgccaacggcgucaccacccacuacgucucccagaucggcggcuuccccaaccagaccgaggacggcggccucccccaguccggccgcaucgucgccgacuacaugguccagaaguccggcaagaccggcaccaucaccuaccagcgcggcauccuccucccccagaaggucuggugcgccuccggccgcuccaaggucaucaagggcucccucccccucaucggcgaggccgacugccuccacgagaaguacggcggccucaacaaguccaagcccuacuacaccggcgagcacgccaaggccaucggcaacugccccaucugggucaagaccccccucaagcucgccaacggcaccaaguaccgcccccccgccaagcuccucaaggagcgcggcuucuucggcgccaucgccggcuuccucgagggcggcugggagggcaugaucgccggcuggcacggcuacaccucccacggcgcccacggcgucgccgucgccgccgaccucaaguccacccaggaggccaucaacaagaucaccaagaaccucaacucccucuccgagcucgaggucaagaaccuccagcgccucuccggcgccauggacgagcuccacaacgagauccucgagcucgacgagaaggucgacgaccuccgcgccgacaccaucuccucccagaucgagcucgccguccuccucuccaacgagggcaucaucaacuccgaggacgagcaccuccucgcccucgagcgcaagcucaagaagaugcucggccccuccgccgucgagaucggcaacggcugcuucgagaccaagcacaagugcaaccagaccugccucgaccgcaucgccgccggcaccuucgacgccggcgaguucucccuccccaccuucgacucccucaacaucaccgccgccucccucaacgacgacggccucgacaaccacaccauccuccucuacuacuccaccgccgccuccucccucgccgucacccucaugaucgccaucuucgucgucuacauggucucccgcgacaacgucuccugcuccaucugccucuga

SEQ ID NO: 123168 - RNA, 1758 nt, Artificial Sequence; identical to SEQ ID NO: 123141
  derived and/or modified CDS sequence (opt2) from hemagglutinin__InfluenzaB__AGX17380

SEQ ID NO: 123169 - RNA, 1758 nt, Artificial Sequence; identical to SEQ ID NO: 123015
  derived and/or modified CDS sequence (opt2) from hemagglutinin__InfluenzaB__AGX17391

SEQ ID NO: 123170 - RNA, 1758 nt, Artificial Sequence
  derived and/or modified CDS sequence (opt2) from hemagglutinin__InfluenzaB__AGX17400
augaaggccaucaucguccuccucauggucgucaccuccaacgccgaccgcaucugcaccggcaucaccuccuccaacuccccccacauggucaagaccgccacccagggcgaggucaacgucaccggcgucaucccccucaccaccacccccaccaagucccacuucgccaaccucaagggcaccaagacccgcggcaagcucugccccaagugccucaacugcaccgaccucgacgucgcccucggccgccccaagugcaccggcaacauccccuccgccaaggucuccauccuccacgagguccgccccgucaccuccggcugcuuccccaucaugcacgaccgcaccaagauccgccagcuccccaaccuccuccgcggcuacgagcacauccgccucuccacccacaacgucaucaacgccgagaaggcccccggcggccccuacaagaucggcaccuccggcuccugccccaacgucaccaacggcaacggcuucuucgccaccauggccugggccguccccaagaacgacaacaacaagaccgccaccaacucccucaccaucgagguccccuacaucugcaccgagggcgaggaccagaucaccgucuggggcuuccacuccgacaacgagacccagauggccaagcucuacggcgacuccaagccccagaaguucaccuccuccgccaacggcgucaccacccacuacgucucccagaucggcggcuuccccaaccagaccgaggacggcggccucccccaguccggccgcaucgucgucgacuacaugguccagaaguccggcaagaccggcaccaucaccuaccagcgcggcauccuccucccccagaaggucuggugcgccuccggccgcuccaaggucaucaagggcucccucccccucaucggcgaggccgacugccuccacgagaaguacggcggccucaacaaguccaagcccuacuacaccggcgagcacgccaaggccaucggcaacugccccaucugggucaagaccccccucaagcucgccaacggcaccaaguaccgcccccccgccaagcuccucaaggagcgcggcuucuucggcgccaucgccggcuuccucgagggcggcugggagggcaugaucgccggcuggcacggcuacaccucccacggcgcccacggcgucgccgucgccgccgaccucaaguccacccaggaggccaucaacaagaucaccaagaaccucaacucccucuccgagcucgaggucaagaaccuccagcgccucuccggcgccauggacgagcuccacaacgagauccucgagcucgacgagaaggucgacgaccuccgcgccgacaccaucuccucccagaucgagcucgccguccuccucuccaacgagggcaucaucaacuccgaggacgagcaccuccucgcccucgagcgcaagcucaagaagaugcucggccccuccgccgucgagaucggcaacggcugcuucgagaccaagcacaagugcaaccagaccugccucgaccgcaucgccgccggcaccuucgacgccggcgaguucucccuccccaccuucgacucccucaacaucaccgccgccucccucaacgacgacggccucgacaaccacaccauccuccucuacuacuccaccgccgccuccucccucgccgucacccucaugaucgccaucuucgucgucuacauggucucccgcgacaacgucuccugcuccaucugccucuga

SEQ ID NO: 123171 - RNA, 1758 nt, Artificial Sequence; identical to SEQ ID NO: 123015
  derived and/or modified CDS sequence (opt2) from hemagglutinin__InfluenzaB__AGX17411

SEQ ID NO: 123172 - RNA, 1758 nt, Artificial Sequence; identical to SEQ ID NO: 123015
  derived and/or modified CDS sequence (opt2) from hemagglutinin__InfluenzaB__AGX17422

SEQ ID NO: 123173 - RNA, 1758 nt, Artificial Sequence; identical to SEQ ID NO: 123098
  derived and/or modified CDS sequence (opt2) from hemagglutinin__InfluenzaB__AGX17433

SEQ ID NO: 123174 - RNA, 1758 nt, Artificial Sequence; identical to SEQ ID NO: 123015
  derived and/or modified CDS sequence (opt2) from hemagglutinin__InfluenzaB__AGX17444

SEQ ID NO: 123175 - RNA, 1758 nt, Artificial Sequence; identical to SEQ ID NO: 123098
  derived and/or modified CDS sequence (opt2) from hemagglutinin__InfluenzaB__AGX17455

SEQ ID NO: 123176 - RNA, 1758 nt, Artificial Sequence; identical to SEQ ID NO: 123141
  derived and/or modified CDS sequence (opt2) from hemagglutinin__InfluenzaB__AGX17466

SEQ ID NO: 123177 - RNA, 1758 nt, Artificial Sequence; identical to SEQ ID NO: 123015
  derived and/or modified CDS sequence (opt2) from hemagglutinin__InfluenzaB__AGX17477

SEQ ID NO: 123178 - RNA, 1758 nt, Artificial Sequence; identical to SEQ ID NO: 123100
  derived and/or modified CDS sequence (opt2) from hemagglutinin__InfluenzaB__AGX17488

SEQ ID NO: 123179 - RNA, 1758 nt, Artificial Sequence; identical to SEQ ID NO: 123015
  derived and/or modified CDS sequence (opt2) from hemagglutinin__InfluenzaB__AGX17499

SEQ ID NO: 123180 - RNA, 1758 nt, Artificial Sequence; identical to SEQ ID NO: 123141
  derived and/or modified CDS sequence (opt2) from hemagglutinin__InfluenzaB__AGX17510

SEQ ID NO: 123181 - RNA, 1758 nt, Artificial Sequence; identical to SEQ ID NO: 123141
  derived and/or modified CDS sequence (opt2) from hemagglutinin__InfluenzaB__AGX17521

SEQ ID NO: 123182 - RNA, 1758 nt, Artificial Sequence; identical to SEQ ID NO: 123143
  derived and/or modified CDS sequence (opt2) from hemagglutinin__InfluenzaB__AGX17532

SEQ ID NO: 123183 - RNA, 1758 nt, Artificial Sequence
  derived and/or modified CDS sequence (opt2) from hemagglutinin__InfluenzaB__AGX17543
augaaggccaucaucguccuccucauggucgucaccuccaacgccgaccgcaucugcaccggcaucaccuccuccaacuccccccacgucgucaagaccgccacccagggcgaggucaacgucaccggcgucaucccccucaccaccacccccaccaagucccacuucgccucccucaagggcaccaagacccgcggcaagcucugccccaagugccucaacugcaccgaccucgacgucgcccucggccgccccaagugcaccggcaacauccccuccgccaaggucuccauccuccacgagguccgccccgucaccuccggcugcuuccccaucaugcacgaccgcaccaagauccgccagcuccccaaccuccuccgcggcuacgagcacauccgccucuccacccacaacgucaucaacgccgagaaggcccccggcggccccuacaagaucggcaccuccggcuccugccccaacgucaccaacggcaacggcuucuucgccaccauggccugggccguccccaagaacgacaacaacaagaccgccaccaacucccucaccaucgagguccccuacaucugcaccgagggcgaggaccagaucaccgucuggggcuuccacuccgacaacgagacccagauggccaagcucuacggcgacuccaagccccagaaguucaccuccuccgccaacggcgucaccacccacuacgucucccagaucggcggcuuccccaaccagaccgaggacggcggccucccccaguccggccgcaucgucgucgacuacaugguccagaaguccggcaagaccggcaccaucaccuaccagcgcggcauccuccucccccagaaggucuggugcgccuccggccgcuccaaggucaucaagggcucccucccccucaucggcgaggccgacugccuccacgagaaguacggcggccucaacaaguccaagcccuacuacaccggcgagcacgccaaggccaucggcaacugccccaucugggucaagaccccccucaagcucgccaacggcaccaaguaccgcccccccgccaagcuccucaaggagcgcggcuucuucggcgccaucgccggcuuccucgagggcggcugggagggcaugaucgccggcuggcacggcuacaccucccacggcgcccacggcgucgccgucgccgccgaccucaaguccacccaggaggccaucaacaagaucaccaagaaccucaacucccucuccgagcucgaggucaagaaccuccagcgccucuccggcgccaugaacgagcuccacaacgagauccucgagcucgacgagaaggucgacgaccuccgcgccgacaccaucuccucccagaucgagcucgccguccuccucuccaacgagggcaucaucaacuccgaggacgagcaccuccucgcccucgagcgcaagcucaagaagaugcucggccccuccgccgucgagaucggcaacggcugcuucgagaccaagcacaagugcaaccagaccugccucgaccgcaucgccgccggcaccuucgacgccggcgaguucucccuccccaccuucgacucccucaacaucaccgccgccucccucaacgacgacggccucgacaaccacaccauccuccucuacuacuccaccgccgccuccucccucgccgucacccucaugaucgccaucuucgucgucuacauggucucccgcgacaacgucuccugcuccaucugccucuga

SEQ ID NO: 123184 - RNA, 1758 nt, Artificial Sequence
  derived and/or modified CDS sequence (opt2) from hemagglutinin__InfluenzaB__AGX17554
augaaggccaucaucguccuccuccucgucgucaccuccaacgccgaccgcaucugcaccggcaucaccuccuccaacuccccccacgucgucaagaccgccacccagggcgaggucaacgucaccggcgucaucccccucaccaccacccccaccaagucccacuucgccaaccucaagggcaccaagacccgcggcaagcucugccccaagugccucaacugcaccgaccucgacgucgcccucggccgccccaagugcaccggcaacauccccuccgccaaggucuccauccuccacgagguccgccccgucaccuccggcugcuuccccaucaugcacgaccgcaccaagauccgccagcuccccaaccuccuccgcggcuacgagcacauccgccucuccacccacaacgucaucaacgccgagaaggcccccggcggccccuacaagaucggcaccuccggcuccugccccaacgucaccaacggcaacggcuucuucgccaccauggccugggccguccccaagaacgacaacaacaagaccgccaccaacucccucaccaucgagguccccuacaucugcaccgagggcgaggaccagaucaccgucuggggcuuccacuccgacaacgagacccagauggccaagcucuacggcgacuccaagccccagaaguucaccuccuccgccaacggcgucaccacccacuacgucucccagaucggcggcuuccccaaccagaccgaggacggcggccucccccaguccggccgcaucgucgucgacuacaugguccagaaguccggcaagaccggcaccaucaccuaccagcgcggcauccuccucccccagaaggucuggugcgccuccggccgcuccaaggucaucaagggcucccucccccucaucggcgaggccgacugccuccacgagaaguacggcggccucaacaaguccaagcccuacuacaccggcgagcacgccaaggccaucggcaacugccccaucugggucaagaccccccucaagcucgccaacggcaccaaguaccgcccccccgccaagcuccucaaggagcgcggcuucuucggcgccaucgccggcuuccucgagggcggcugggagggcaugaucgccggcuggcacggcuacaccucccacggcgcccacggcgucgccgucgccgccgaccucaaguccacccaggaggccaucaacaagaucaccaagaaccucaacucccucuccgagcucgaggucaagaaccuccagcgccucuccggcgccauggacgagcuccacaacgagauccucgagcucgacgagaaggucgacgaccuccgcgccgacaccaucuccucccagaucgagcucgccguccuccucuccaacgagggcaucaucaacuccgaggacgagcaccuccucgcccucgagcgcaagcucaagaagaugcucggccccuccgccgucgagaucggcaacggcugcuucgagaccaagcacaagugcaaccagaccugccucgaccgcaucgccgccggcaccuucgacgccggcgaguucucccuccccaccuucgacucccucaacaucaccgccgccucccucaacgacgacggccucgacaaccacaccauccuccucuacuacuccaccgccgccuccucccucgccgucacccucaugaucgccaucuucgucgucuacauggucucccgcgacaacgucuccugcuccaucugccucuga

SEQ ID NO: 123185 - RNA, 1755 nt, Artificial Sequence; identical to SEQ ID NO: 123059
  derived and/or modified CDS sequence (opt2) from hemagglutinin__InfluenzaB__AGX17565

SEQ ID NO: 123186 - RNA, 1758 nt, Artificial Sequence
  derived and/or modified CDS sequence (opt2) from hemagglutinin__InfluenzaB__AGX17576
augaaggccaucaucguccuccucauggucgucaccuccaacgccgaccgcaucugcaccggcaucaccuccuccaacuccccccacgucgucaagaccgccacccagggcgaggucaacgucaccggcgucaucccccucaccaccacccccaccaagucccacuucgccaaccucaagggcaccaagacccgcggcaagcucugccccaagugccucaacugcaccgaccucgacgucgcccucggccgccccaagugcaccggcaacauccccuccgccgaggucuccauccuccacgagguccgccccgucaccuccggcugcuuccccaucaugcacgaccgcaccaagauccgccagcuccccaaccuccuccgcggcuacgagcacauccgccucuccacccacaacgucaucaacgccgagaaggcccccggcggccccuacaagaucggcaccuccggcuccugccccaacgucaccaacggcaacggcuucuucgccaccauggccugggccguccccaagaacgacaacaacaagaccgccaccaacucccucaccaucgagguccccuacaucugcaccgagggcgaggaccagaucaccaucuggggcuuccacuccgacaacgagacccagauggccaagcucuacggcgacuccaagccccagaaguucaccuccuccgccaacggcgucaccacccacuacgucucccagaucggcggcuuccccaaccagaccgaggacggcggccucccccaguccggccgcaucgucgucgacuacaugguccagaaguccggcaagaccggcaccaucaccuaccagcgcggcauccuccucccccagaaggucuggugcgccuccggccgcuccaaggucaucaagggcucccucccccucaucggcgaggccgacugccuccacgagaaguacggcggccucaacaaguccaagcccuacuacaccggcgagcacgccaaggccaucggcaacugccccaucugggucaagaccccccucaagcucgccaacggcaccaaguaccgcccccccgccaagcuccucaaggagcgcggcuucuucggcgccaucgccggcuuccucgagggcggcugggagggcaugaucgccggcuggcacggcuacaccucccacggcgcccacggcgucgccgucgccgccgaccucaaguccacccaggaggccaucaacaagaucaccaagaaccucaacucccucuccgagcucgaggucaagaaccuccagcgccucuccggcgccauggacgagcuccacaacgagauccucgagcucgacgagaaggucgacgaccuccgcgccgacaccaucuccucccagaucgagcucgccguccuccucuccaacgagggcaucaucaacuccgaggacgagcaccuccucgcccucgagcgcaagcucaagaagaugcucggccccuccgccgucgagaucggcaacggcugcuucgagaccaagcacaagugcaaccagaccugccucgaccgcaucgccgccggcaccuucgacgccggcgaguucucccuccccaccuucgacucccucaacaucaccgccgccucccucaacgacgacggccucgacaaccacaccauccuccucuacuacuccaccgccgccuccucccucgccgucacccucaugauggccaucuucgucgucuacauggucucccgcgacaacgucuccugcuccaucugccucuga

SEQ ID NO: 123187 - RNA, 1758 nt, Artificial Sequence; identical to SEQ ID NO: 122550
  derived and/or modified CDS sequence (opt2) from hemagglutinin__InfluenzaB__AGX17598

SEQ ID NO: 123188 - RNA, 1758 nt, Artificial Sequence
  derived and/or modified CDS sequence (opt2) from hemagglutinin__InfluenzaB__AGX17609
augaaggccaucaucguccuccucauggucgucaccuccaacgccgaccgcaucugcaccggcaucaccuccuccaacuccccccacgucgucaagaccgccacccagggcgaggucaacgucaccggcgucaucccccucaccaccacccccaccaagucccacuucgccaaccucaagggcaccgagacccgcggcaagcucugccccaagugccucaacugcaccgaccucgacgucgcccucggccgccccaagugcaccggcaagauccccuccgcccgcgucuccauccuccacgagguccgccccgucaccuccggcugcuuccccaucaugcacgaccgcaccaagauccgccagcuccccaaccuccuccgcggcuacgagcacauccgccucuccacccacaacgucaucaacgccgagaacgcccccggcggccccuacaagaucggcaccuccggcuccugccccaacgucaccaacggcaacggcuucuucgccaccauggccugggccguccccaagaacgacaacaacaagaccgccaccaacucccucaccaucgagguccccuacaucugcaccgagggcgaggaccagaucaccgucuggggcuuccacuccgacaacgagacccagauggccaagcucuacggcgacuccaagccccagaaguucaccuccuccgccaacggcgucaccacccacuacgucucccagaucggcggcuuccccaaccagaccgaggacggcggccucccccaguccggccgcaucgucgucgacuacaugguccagaaguccggcaagaccggcaccaucaccuaccagcgcggcauccuccucccccagaaggucuggugcgccuccggccgcuccaaggucaucaagggcucccucccccucaucggcgaggccgacugccuccacgagaaguacggcggccucaacaaguccaagcccuacuacaccggcgagcacgccaaggccaucggcaacugccccaucugggucaagaccccccucaagcucgccaacggcaccaaguaccgcccccccgccaagcuccucaaggagcgcggcuucuucggcgccaucgccggcuuccucgagggcggcugggagggcaugaucgccggcuggcacggcuacaccucccacggcgcccacggcgucgccgucgccgccgaccucaaguccacccaggaggccaucaacaagaucaccaagaaccucaacucccucuccgagcucgaggucaagaaccuccagcgccucuccggcgccauggacgagcuccacaacgagauccucgagcucgacgagaaggucgacgaccuccgcgccgacaccaucuccucccagaucgagcucgccguccuccucuccaacgagggcaucaucaacuccgaggacgagcaccuccucgcccucgagcgcaagcucaagaagaugcucggccccuccgccgucgagaucggcaacggcugcuucgagaccaagcacaagugcaaccagaccugccucgaccgcaucgccgccggcaccuucgacgccggcgaguucucccuccccaccuucgacucccucaacaucaccgccgccucccucaacgacgacggccucgacaaccacaccauccuccucuacuacuccaccgccgccuccucccucgccgucacccucaugaucgccaucuucgucgucuacauggucucccgcgacaacgucuccugcuccaucugccucuga

SEQ ID NO: 123189 - RNA, 1758 nt, Artificial Sequence; identical to SEQ ID NO: 123017
  derived and/or modified CDS sequence (opt2) from hemagglutinin__InfluenzaB__AGX17620

SEQ ID NO: 123190 - RNA, 1758 nt, Artificial Sequence; identical to SEQ ID NO: 122550
  derived and/or modified CDS sequence (opt2) from hemagglutinin__InfluenzaB__AGX17631

SEQ ID NO: 123191 - RNA, 1758 nt, Artificial Sequence; identical to SEQ ID NO: 122674
  derived and/or modified CDS sequence (opt2) from hemagglutinin__InfluenzaB__AGX17642

SEQ ID NO: 123192 - RNA, 1758 nt, Artificial Sequence; identical to SEQ ID NO: 123017
  derived and/or modified CDS sequence (opt2) from hemagglutinin__InfluenzaB__AGX17653

SEQ ID NO: 123193 - RNA, 1758 nt, Artificial Sequence; identical to SEQ ID NO: 122550
  derived and/or modified CDS sequence (opt2) from hemagglutinin__InfluenzaB__AGX17664

SEQ ID NO: 123194 - RNA, 1758 nt, Artificial Sequence; identical to SEQ ID NO: 122674
  derived and/or modified CDS sequence (opt2) from hemagglutinin__InfluenzaB__AGX17675

SEQ ID NO: 123195 - RNA, 1758 nt, Artificial Sequence; identical to SEQ ID NO: 123017
  derived and/or modified CDS sequence (opt2) from hemagglutinin__InfluenzaB__AGX17686

SEQ ID NO: 123196 - RNA, 1758 nt, Artificial Sequence
  derived and/or modified CDS sequence (opt2) from hemagglutinin__InfluenzaB__AGX17697
augaaggccaucaucguccuccucauggucgucaccuccaacgccgaccgcaucugcaccggcaucaccuccuccaacuccccccacgucgucaagaccgccacccagggcgaggucaacgucaccggcgucaucccccucaccaccacccccaccaagucccacuucgccaaccucaagggcaccgagacccgcggcaagcucugccccaagugccucaacugcaccgaccucgacgucgcccucggccgccccaagugcaccggcgagauccccuccgcccgcgucuccauccuccacgagguccgccccgucaccuccggcugcuuccccaucaugcacgaccgcaccaagauccgccagcuccccaaccuccuccgcggcuacgagcacauccgccucuccacccacaacgccaucaacgccgagaacgcccccggcggccccuacaagaucggcaccuccggcuccugccccaacgucaccaacggcaacggcuucuucgccaccauggccugggccguccccaagaacgacaacaacaagaccgccaccaacucccucaccaucgagguccccuacaucugcaccgagggcgaggaccagaucaccgucuggggcuuccacuccgacaacgagacccagauggccaagcucuacggcgacuccaagccccagaaguucaccuccuccgccaacggcgucaccacccacuacgucucccagaucggcggcuuccccaaccagaccgaggacggcggccucccccaguccggccgcaucgucgucgacuacaugguccagaaguccggcaagaccggcaccaucaccuaccagcgcggcauccuccucccccagaaggucuggugcgccuccggccgcuccaaggucaucaagggcucccucccccucaucggcgaggccgacugccuccacgagaaguacggcggccucaacaaguccaagcccuacuacaccggcgagcacgccaaggccaucggcaacugccccaucugggucaagaccccccucaagcucgccaacggcaccaaguaccgcccccccgccaagcuccucaaggagcgcggcuucuucggcgccaucgccggcuuccucgagggcggcugggagggcaugaucgccggcuggcacggcuacaccucccacggcgcccacggcgucgccgucgccgccgaccucaaguccacccaggaggccaucaacaagaucaccaagaaccucaacucccucuccgagcucgaggucaagaaccuccagcgccucuccggcgccauggacgagcuccacaacgagauccucgagcucgacgagaaggucgacgaccuccgcgccgacaccaucuccucccagaucgagcucgccguccuccucuccaacgagggcaucaucaacuccgaggacgagcaccuccucgcccucgagcgcaagcucaagaagaugcucggccccuccgccgucgagaucggcaacggcugcuucgagaccaagcacaagugcaaccagaccugccucgaccgcaucgccgccggcaccuucgacgccggcgaguucucccuccccaccuucgacucccucaacaucaccgccgccucccucaacgacgacggccucgacaaccacaccauccuccucuacuacuccaccgccgccuccucccucgccgucacccucaugaucgccaucuucgucgucuacauggucucccgcgacaacgucuccugcuccaucugccucuga

SEQ ID NO: 123197 - RNA, 1758 nt, Artificial Sequence; identical to SEQ ID NO: 122674
  derived and/or modified CDS sequence (opt2) from hemagglutinin__InfluenzaB__AGX17708

SEQ ID NO: 123198 - RNA, 1758 nt, Artificial Sequence; identical to SEQ ID NO: 123017
  derived and/or modified CDS sequence (opt2) from hemagglutinin__InfluenzaB__AGX17719

SEQ ID NO: 123199 - RNA, 1758 nt, Artificial Sequence; identical to SEQ ID NO: 122674
  derived and/or modified CDS sequence (opt2) from hemagglutinin__InfluenzaB__AGX17730

SEQ ID NO: 123200 - RNA, 1758 nt, Artificial Sequence; identical to SEQ ID NO: 122550
  derived and/or modified CDS sequence (opt2) from hemagglutinin__InfluenzaB__AGX17741

SEQ ID NO: 123201 - RNA, 1758 nt, Artificial Sequence; identical to SEQ ID NO: 123017
  derived and/or modified CDS sequence (opt2) from hemagglutinin__InfluenzaB__AGX17752

SEQ ID NO: 123202 - RNA, 1758 nt, Artificial Sequence; identical to SEQ ID NO: 123017
  derived and/or modified CDS sequence (opt2) from hemagglutinin__InfluenzaB__AGX17774

SEQ ID NO: 123203 - RNA, 1758 nt, Artificial Sequence
  derived and/or modified CDS sequence (opt2) from hemagglutinin__InfluenzaB__AGX17785
augaaggccaucaucguccuccucauggucgucaccuccaacgccgaccgcaucugcaccggcaucaccuccuccaacuccccccacgucgucaagaccgccacccagggcgaggucaacgucaccggcgucaucccccucaccaccacccccaccaagucccacuucgccaaccucaagggcaccaagacccgcggcaagcucugccccaagugccucaacugcaccgaccucgacgucgcccucggccgccccaagugcaccggcaacauccccuccgccgaggucuccauccuccacgagguccgccccgucaccuccggcugcuuccccaucaugcacgaccgcaccaagauccgccagcuccccaaccuccuccgcggcuacgagcacguccgccucuccacccacaacgucaucaacgccgagaaggcccccggcggccccuacaagaucggcaccuccggcuccugccccaacgucaccaacggcaacggcuucuucgccaccauggccugggccguccccaagaacgacaacaacaagaccgccaccaacucccucaccaucgagguccccuacaucugcaccgagggcgaggaccagaucaccaucuggggcuuccacuccgacaacgagacccagauggccaagcucuacggcgacuccaagccccagaaguucaccuccuccgccaacggcgucaccacccacuacgucucccagaucggcggcuuccccaaccagaccgaggacggcggccucccccaguccggccgcaucgucgucgacuacaugguccagaaguccggcaagaccggcaccaucaccuaccagcgcggcauccuccucccccagaaggucuggugcgccuccggccgcuccaaggucaucaagggcucccucccccucaucggcgaggccgacugccuccacgagaaguacggcggccucaacaaguccaagcccuacuacaccggcgagcacgccaaggccaucggcaacugccccaucugggucaagaccccccucaagcucgccaacggcaccaaguaccgcccccccgccaagcuccucaaggagcgcggcuucuucggcgccaucgccggcuuccucgagggcggcugggagggcaugaucgccggcuggcacggcuacaccucccacggcgcccacggcgucgccgucgccgccgaccucaaguccacccaggaggccaucaacaagaucaccaagaaccucaacucccucuccgagcucgaggucaagaaccuccagcgccucuccggcgccauggacgagcuccacaacgagauccucgagcucgacgagaaggucgacgaccuccgcgccgacaccaucuccucccagaucgagcucgccguccuccucuccaacgagggcaucaucaacuccgaggacgagcaccuccucgcccucgagcgcaagcucaagaagaugcucggccccuccgccgucgagaucggcaacggcugcuucgagaccaagcacaagugcaaccagaccugccucgaccgcaucgccgccggcaccuucgacgccggcgaguucucccuccccaccuucgacucccucaacaucaccgccgccucccucaacgacgacggccucgacaaccacaccauccuccucuacuacuccaccgccgccuccucccucgccgucacccucaugaucgccaucuucgucgucuacauggucucccgcgacaacgucuccugcuccaucugccucuga

SEQ ID NO: 123204 - RNA, 1758 nt, Artificial Sequence; identical to SEQ ID NO: 123017
  derived and/or modified CDS sequence (opt2) from hemagglutinin__InfluenzaB__AGX17796

SEQ ID NO: 123205 - RNA, 1758 nt, Artificial Sequence; identical to SEQ ID NO: 122601
  derived and/or modified CDS sequence (opt2) from hemagglutinin__InfluenzaB__AGX17807

SEQ ID NO: 123206 - RNA, 1758 nt, Artificial Sequence; identical to SEQ ID NO: 123188
  derived and/or modified CDS sequence (opt2) from hemagglutinin__InfluenzaB__AGX17818

SEQ ID NO: 123207 - RNA, 1758 nt, Artificial Sequence
  derived and/or modified CDS sequence (opt2) from hemagglutinin__InfluenzaB__AGX17829
augaaggccaucaucguccuccucauggucgucaccuccaacgccgaccgcaucugcaccggcaucaccuccuccaacuccccccacgucgucaagaccgccacccagggcgaggucaacgucaccggcgucaucccccucaccaccacccccaccaagucccacuucgccaaccucaagggcaccgagacccgcggcaagcucugccccaagugccucaacugcaccgaccucgacgucgcccucggccgccccaagugcaccggcaagauccccuccgcccgcgucuccauccuccacgagguccgccccgucaccuccggcugcuuccccaucaugcacgaccgcaccaagauccgccagcuccccaaccuccuccgcggcuacgagcacauccgccucuccacccacaacgucaucaacgccgagaacgcccccggcggccccuacaagaucggcaccuccggcuccugccccaacgucaccaacggcaacggcuucuucgccaccauggccugggccguccccaagaacgacaacaacaagaccgccaccaacucccucaccaucgagguccccuacaucugcaccgagggcgaggaccagaucaccgucuggggcuuccacuccgacaacgagacccagauggccaagcucuacggcgacuccaagccccagaaguucaccuccuccgccaacggcgucaccacccacuacgucucccagaucggcggcuuccccaaccagaccgaggacggcggccucccccaguccggccgcaucgucgucgacuacaugguccagaaguccggcaagaccggcaccaucaccuaccagcgcggcauccuccucccccagaaggucuggugcgccuccggccgcuccaaggucaucaagggcucccucccccucaucggcgaggccgacugccuccacgagaaguacggcggccucaacaaguccaagcccuacuacaccggcgagcacgccaaggccaucggcaacugccccaucugggucaagaccccccucaagcucgccaacggcaccaaguaccgcccccccgccaagcuccucaaggagcgcggcuucuucggcgccaucgccggcuuccucgagggcggcugggagggcaugaucgccggcuggcacggcuacaccucccacggcgcccacggcgucgccgucgccgccgaccucaaguccacccaggaggccgucaacaagaucaccaagaaccucaacucccucuccgagcucgaggucaagaaccuccagcgccucuccggcgccauggacgagcuccacaacgagauccucgagcucgacgagaaggucgacgaccuccgcgccgacaccaucuccucccagaucgagcucgccguccuccucuccaacgagggcaucaucaacuccgaggacgagcaccuccucgcccucgagcgcaagcucaagaagaugcucggccccuccgccgucgagaucggcaacggcugcuucgagaccaagcacaagugcaaccagaccugccucgaccgcaucgccgccggcaccuucgacgccggcgaguucucccuccccaccuucgacucccucaacaucaccgccgccucccucaacgacgacggccucgacaaccacaccauccuccucuacuacuccaccgccgccuccucccucgccgucacccucaugaucgccaucuucgucgucuacauggucucccgcgacaacgucuccugcuccaucugccucuga

SEQ ID NO: 123208 - RNA, 1758 nt, Artificial Sequence; identical to SEQ ID NO: 122674
  derived and/or modified CDS sequence (opt2) from hemagglutinin__InfluenzaB__AGX17840

SEQ ID NO: 123209 - RNA, 1758 nt, Artificial Sequence; identical to SEQ ID NO: 123017
  derived and/or modified CDS sequence (opt2) from hemagglutinin__InfluenzaB__AGX17851

SEQ ID NO: 123210 - RNA, 1758 nt, Artificial Sequence
  derived and/or modified CDS sequence (opt2) from hemagglutinin__InfluenzaB__AGX17862
augaaggccaucaucguccuccucauggucgucaccuccaacgccgaccgcaucugcaccggcaucaccuccuccaacuccccccacgucgucaagaccgccacccagggcgaggucaacgucaccggcgucaucccccucaccaccacccccaccaagucccacuucgccaaccucaagggcaccaagacccgcggcaagcucugccccaagugccucaacugcaccgaccucgacgucgcccucggccgccccaagugcaccggcaacauccccuccgccgaggucuccauccuccacgagguccgccccgucaccuccggcugcuuccccaucaugcacgaccgcaccaagauccgccagcuccccaaccuccuccgcggcuacgagcacauccgccucuccacccacaacgucaucaacgccgagaaggcccccggcggccccuacaagaucggcaccuccggcuccugccccaacgucaccaacggcaacggcuucuucgccaccauggccugggccguccccaagaacgacaacaacaagaccgccaccaacucccucaccaucgagguccccuacaucugcaccgagggcgaggaccagaucaccaucuggggcuuccacuccgacaacgagacccagauggccaagcucuacggcgacuccaagccccagaaguucaccuccuccgccaacggcgucaccacccacuacgucucccagaucggcggcuuccccaaccagaccgaggacggcggccucccccaguccggccgcaucgucgucgacuacaugguccagaaguccggcaagaccggcaccaucaccuaccagcgcggcauccuccucccccagaaggucuggugcgccuccggccgcuccaaggucaucaagggcacccucccccucaucggcgaggccgacugccuccacgagaaguacggcggccucaacaaguccaagcccuacuacaccggcgagcacgccaaggccaucggcaacugccccaucugggucaagaccccccucaagcucgccaacggcaccaaguaccgcccccccgccaagcuccucaaggagcgcggcuucuucggcgccaucgccggcuuccucgagggcggcugggagggcaugaucgccggcuggcacggcuacaccucccacggcgcccacggcgucgccgucgccgccgaccucaaguccacccaggaggccaucaacaagaucaccaagaaccucaacucccucuccgagcucgaggucaagaaccuccagcgccucuccggcgccauggacgagcuccacaacgagauccucgagcucgacgagaaggucgacgaccuccgcgccgacaccaucuccucccagaucgagcucgccguccuccucuccaacgagggcaucaucaacuccgaggacgagcaccuccucgcccucgagcgcaagcucaagaagaugcucggccccuccgccgucgagaucggcaacggcugcuucgagaccaagcacaagugcaaccagaccugccucgaccgcaucgccgccggcaccuucgacgccggcgaguucucccuccccaccuucgacucccucaacaucaccgccgccucccucaacgacgacggccucgacaaccacaccauccuccucuacuacuccaccgccgccuccucccucgccgucacccucaugaucgccaucuucgucgucuacauggucucccgcgacaacgucuccugcuccaucugccucuga

SEQ ID NO: 123211 - RNA, 1758 nt, Artificial Sequence
  derived and/or modified CDS sequence (opt2) from hemagglutinin__InfluenzaB__AGX17873
augaaggccaucaucguccuccucauggucgucaccuccaacgccgaccgcaucugcaccggcaucaccuccuccaacuccccccacgucgucaagaccgccacccagggcgaggucaacgucaccggcgucaucccccucaccaccacccccaccaagucccacuucgccaaccucaagggcaccgagacccgcggcaagcucugccccaagugccucgacugcaccgaccucgacgucgcccucggccgccccaagugcaccggcaacauccccuccgcccgcgucuccauccuccacgagguccgccccgucaccuccggcugcuuccccaucaugcacgaccgcaccaagauccgccagcuccccaaccuccuccgcggcuacgagcacauccgccucuccacccacaacgucaucaacgccgagaacgcccccggcggccccuacaagaucggcaccuccggcuccugccccaacgucaccaacggcaacggcuucuucgccaccauggccugggccguccccaagaacgacaacaacaagaccgccaccaacucccucaccaucgagguccccuacaucugcaccgagggcgaggaccagaucaccgucuggggcuuccacuccgacaacgagacccagauggccaagcucuacggcgacuccaagccccagaaguucaccuccuccgccaacggcgucaccacccacuacgucucccagaucggcggcuuccccaaccagaccgaggacggcggccucccccaguccggccgcaucgucgucgacuacaugguccagaaguccggcaagaccggcaccaucaccuaccagcgcggcauccuccucccccagaaggucuggugcgccuccggccgcuccaaggucaucaagggcucccucccccucaucggcgaggccgacugccuccacgagaaguacggcggccucaacaaguccaagcccuacuacaccggcgagcacgccaaggccaucggcaacugccccaucugggucaagaccccccucaagcucgccaacggcaccaaguaccgcccccccgccaagcuccucaaggagcgcggcuucuucggcgccaucgccggcuuccucgagggcggcugggagggcaugaucgccggcuggcacggcuacaccucccacggcgcccacggcgucgccgucgccgccgaccucaaguccacccaggaggccaucaacaagaucaccaagaaccucaacucccucuccgagcucgaggucaagaaccuccagcgccucuccggcgccauggacgagcuccacaacgagauccucgagcucgacgagaaggucgacgaccuccgcgccgacaccaucuccucccagaucgagcucgccguccuccucuccaacgagggcaucaucaacuccgaggacgagcaccuccucgcccucgagcgcaagcucaagaagaugcucggccccuccgccgucgagaucggcaacggcugcuucgagaccaagcacaagugcaaccagaccugccucgaccgcaucgccgccggcaccuucgacgccggcgaguucucccuccccaccuucgacucccucaacaucaccgccgccucccucaacgacgacggccucgacaaccacaccauccuccucuacuacuccaccgccgccuccucccucgccgucacccucaugaucgccaucuucgucgucuacauggucucccgcgacaacgucuccugcuccaucugccucuga

SEQ ID NO: 123212 - RNA, 1758 nt, Artificial Sequence; identical to SEQ ID NO: 122674
  derived and/or modified CDS sequence (opt2) from hemagglutinin__InfluenzaB__AGX17884

SEQ ID NO: 123213 - RNA, 1758 nt, Artificial Sequence
  derived and/or modified CDS sequence (opt2) from hemagglutinin__InfluenzaB__AGX17895
augaaggccaucaucguccuccucauggucgucaccuccaacgccgaccgcaucugcaccggcaucaccuccuccaacuccccccacgucgucaagaccgccacccagggcgaggucaacgucaccggcgucaucccccucaccaccacccccaccaagucccacuucgccaaccucaagggcaccgagacccgcggcaagcucugccccaagugccucaacugcaccgaccucgacgucgcccucggccgccccaagugcaccggcaacauccccuccgcccgcgucuccauccuccacgagguccgccccgucaccuccggcugcuuccccaucaugcacgaccgcaccaagauccgccagcuccccaaccuccuccgcggcuacgagcacauccgccucuccacccacaacgucaucaacgccgagaacgcccccggcggccccuacaagaucggcaccuccggcuccugccccaacgucaccaacggcaacggcuucuucgccaccauggccugggccguccccaagaacgacaacaacaagaccgccaccaacucccucaccaucgagguccccuacaucugcaccgagggcgaggaccagaucaccgucuggggcuuccacuccgacaacgagaaccagauggccaagcucuacggcgacuccaagccccagaaguucaccuccuccgccaacggcgucaccacccacuacgucucccagaucggcggcuuccccaaccagaccgaggacggcggccucccccaguccggccgcaucgucgucgacuacaugguccagaaguccggcaagaccggcaccaucaccuaccagcgcggcauccuccucccccagaaggucuggugcgccuccggccgcuccaaggucaucaagggcucccucccccucaucggcgaggccgacugccuccacgagaaguacggcggccucaacaaguccaagcccuacuacaccggcgagcacgccaaggccaucggcaacugccccaucugggucaagaccccccucaagcucgccaacggcaccaaguaccgcccccccgccaagcuccucaaggagcgcggcuucuucggcgccaucgccggcuuccucgagggcggcugggagggcaugaucgccggcuggcacggcuacaccucccacggcgcccacggcgucgccgucgccgccgaccucaaguccacccaggaggccaucaacaagaucaccaagaaccucaacucccucuccgagcucgaggucaagaaccuccagcgccucuccggcgccauggacgagcuccacaacgagauccucgagcucgacgagaaggucgacgaccuccgcgccgacaccaucuccucccagaucgagcucgccguccuccucuccaacgagggcaucaucaacuccgaggacgagcaccuccucgcccucgagcgcaagcucaagaagaugcucggccccuccgccgucgagaucggcaacggcugcuucgagaccaagcacaagugcaaccagaccugccucgaccgcaucgccgccggcaccuucgacgccggcgaguucucccuccccaccuucgacucccucaacaucaccgccgccucccucaacgacgacggccucgacaaccacaccauccuccucuacuacuccaccgccgccuccucccucgccgucacccucaugaucgccaucuucgucgucuacauggucucccgcgacaacgucuccugcuccaucugccucuga

SEQ ID NO: 123214 - RNA, 1758 nt, Artificial Sequence; identical to SEQ ID NO: 122674
  derived and/or modified CDS sequence (opt2) from hemagglutinin__InfluenzaB__AGX17906

SEQ ID NO: 123215 - RNA, 1758 nt, Artificial Sequence; identical to SEQ ID NO: 122674
  derived and/or modified CDS sequence (opt2) from hemagglutinin__InfluenzaB__AGX17917

SEQ ID NO: 123216 - RNA, 1758 nt, Artificial Sequence
  derived and/or modified CDS sequence (opt2) from hemagglutinin__InfluenzaB__AGX17928
augaagaccaucaucguccuccucauggucgucaccuccaacgccgaccgcaucugcaccggcaucaccuccuccaacuccccccacgucgucaagaccgccacccagggcgaggucaacgucaccggcgucaucccccucaccaccacccccaccaagucccacuucgccaaccucaagggcaccaagacccgcggcaagcucugccccaagugccucaacugcaccgaccucgacgucgcccucggccgccccaagugcaccggcaacauccccuccgccgaggucuccauccuccacgagguccgccccgucaccuccggcugcuuccccaucaugcacgaccgcaccaagauccgccagcuccccaaccuccuccgcggcuacgagcacauccgccucuccacccacaacgucaucaacgccgagaaggcccccggcggccccuacaagaucggcaccuccggcuccugccccaacgucaccaacggcaacggcuucuucgccaccauggccugggccguccccaagaacgacaacaacaagaccgccaccaacucccucaccaucgagguccccuacaucugcaccgagggcgaggaccagaucaccaucuggggcuuccacuccgacaacgagacccagauggccaagcucuacggcgacuccaagccccagaaguucaccuccuccgccaacggcgucaccacccacuacgucucccagaucggcggcuuccccaaccagaccgaggacggcggccucccccaguccggccgcaucgucgucgacuacaugguccagaaguccggcaagaccggcaccaucaccuaccagcgcggcauccuccucccccagaaggucuggugcgccuccggccgcuccaaggucaucaagggcacccucccccucaucggcgaggccgacugccuccacgagaaguacggcggccucaacaaguccaagcccuacuacaccggcgagcacgccaaggccaucggcaacugccccaucugggucaagaccccccucaagcucgccaacggcaccaaguaccgcccccccgccaagcuccucaaggagcgcggcuucuucggcgccaucgccggcuuccucgagggcggcugggagggcaugaucgccggcuggcacggcuacaccucccacggcgcccacggcgucgccgucgccgccgaccucaaguccacccaggaggccaucaacaagaucaccaagaaccucaacucccucuccgagcucgaggucaagaaccuccagcgccucuccggcgccauggacgagcuccacaacgagauccucgagcucgacgagaaggucgacgaccuccgcgccgacaccaucuccucccagaucgagcucgccguccuccucuccaacgagggcaucaucaacuccgaggacgagcaccuccucgcccucgagcgcaagcucaagaagaugcucggccccuccgccgucgagaucggcaacggcugcuucgagaccaagcacaagugcaaccagaccugccucgaccgcaucgccgccggcaccuucgacgccggcgaguucucccuccccaccuucgacucccucaacaucaccgccgccucccucaacgacgacggccucgacaaccacaccauccuccucuacuacuccaccgccgccuccucccucgccgucacccucaugaucgccaucuucgucgucuacauggucucccgcgacaacgucuccugcuccaucugccucuga

SEQ ID NO: 123217 - RNA, 1758 nt, Artificial Sequence; identical to SEQ ID NO: 122550
  derived and/or modified CDS sequence (opt2) from hemagglutinin__InfluenzaB__AGX17939

SEQ ID NO: 123218 - RNA, 1758 nt, Artificial Sequence; identical to SEQ ID NO: 122550
  derived and/or modified CDS sequence (opt2) from hemagglutinin__InfluenzaB__AGX17950

SEQ ID NO: 123219 - RNA, 1758 nt, Artificial Sequence; identical to SEQ ID NO: 122550
  derived and/or modified CDS sequence (opt2) from hemagglutinin__InfluenzaB__AGX17961

SEQ ID NO: 123220 - RNA, 1758 nt, Artificial Sequence; identical to SEQ ID NO: 123017
  derived and/or modified CDS sequence (opt2) from hemagglutinin__InfluenzaB__AGX17972

SEQ ID NO: 123221 - RNA, 1758 nt, Artificial Sequence; identical to SEQ ID NO: 122550
  derived and/or modified CDS sequence (opt2) from hemagglutinin__InfluenzaB__AGX17983

SEQ ID NO: 123222 - RNA, 1758 nt, Artificial Sequence; identical to SEQ ID NO: 122674
  derived and/or modified CDS sequence (opt2) from hemagglutinin__InfluenzaB__AGX17994

SEQ ID NO: 123223 - RNA, 1758 nt, Artificial Sequence
  derived and/or modified CDS sequence (opt2) from hemagglutinin__InfluenzaB__AGX18005
augaaggccaucaucguccuccucauggucgucaccuccaacgccgaccgcaucugcaccggcaucaccuccuccaacuccccccacgucgucaagaccgccacccagggcgaggucaacgucaccggcgucaucccccucaccaccacccccaccaagucccacuucgccaaccucaagggcaccgagacccgcggcaagcucugccccaagugccucaacugcaccgaccucgacgucgcccucggccgccccaagugcaccggcaacauccccuccgcccgcgucuccauccuccacgagguccgccccgucaccuccggcugcuuccccaucaugcacgaccgcaccaagauccgccagcuccccaaccuccuccgcggcuacgagcacauccgccucuccacccacaacgucaucaacgccgagaacgcccccggcggccccuacaagaucggcaccuccggcuccugccccaacgucaccaacggcaacggcuucuucgccaccauggccugggccguccccaagaacgacaacaacaagaccgccaccaacucccucaccaucgagguccccuacaucugcaccgagggcgaggaccagaucaccgucuggggcuuccacuccgacaacgagacccagauggccaagcucuacggcgacuccaagccccagaaguucaccuccuccgccaacggcgucaccacccacuacgucucccagaucggcggcuuccccaaccagaccgaggacggcggccucccccaguccggccgcaucgucgucgacuacaugguccagaaguccggcaagaccggcaccaucaccuaccagcgcggcauccuccucccccagaaggucuggugcgccuccggccgcuccaaggucaucaagggcucccucccccucaucggcgaggccgacugccuccacgagaaguacggcggccucaacaaguccaagcccuacuacaccggcgagcacgccaaggccaucggcaacugccccaucugggucaagaccccccucaagcucgccaacggcaccaaguaccgcccccccgccaagcuccucaaggagcgcggcuucuucggcgccaucgccggcuuccucgagggcggcugggagggcaugaucgccggcuggcacggcuacaccucccacggcgcccacggcgucgccgucgccgccgacaucaaguccacccaggaggccaucaacaagaucaccaagaaccucaacucccucuccgagcucgaggucaagaaccuccagcgccucuccggcgccauggacgagcuccacaacgagauccucgagcucgacgagaaggucgacgaccuccgcgccgacaccaucuccucccagaucgagcucgccguccuccucuccaacgagggcaucaucaacuccgaggacgagcaccuccucgcccucgagcgcaagcucaagaagaugcucggccccuccgccgucgagaucggcaacggcugcuucgagaccaagcacaagugcaaccagaccugccucgaccgcaucgccgccggcaccuucgacgccggcgaguucucccuccccaccuucgacucccucaacaucaccgccgccucccucaacgacgacggccucgacaaccacaccauccuccucuacuacuccaccgccgccuccucccucgccgucacccucaugaucgccaucuucgucgucuacauggucucccgcgacaacgucuccugcuccaucugccucuga

SEQ ID NO: 123224 - RNA, 1758 nt, Artificial Sequence
  derived and/or modified CDS sequence (opt2) from hemagglutinin__InfluenzaB__AGX18016
augaaggccaucaucguccuccucauggucgucaccuccaacgccgaccgcaucugcaccggcaucaccuccuccaacuccccccacgucgucaagaccgccacccagggcgaggucaacgucaccggcgucaucccccucaccaccacccccaccaagucccacuucgccaaccucaagggcaccgagacccgcggcaagcucugccccaagugccucaacugcaccgaccucgacgucgcccucggccgccccaagugcaccggcaacauccccuccgcccgcgucuccauccuccacgagguccgccccgucaccuccggcugcuuccccaucaugcacgaccgcaccaagauccgccagcuccccaaccuccuccgcggcuacgagcacauccgccucuccacccacaacgucaucaacgccgagaacgcccccggcggccccuacaagaucggcaccuccggcuccugccccaacgucaccaacggcaacggcuucuucgccaccauggccugggccguccccaagaacgacaacaacaagaccgccaccaacucccucaccaucgagguccccuacaucugcaucgagggcgaggaccagaucaccgucuggggcuuccacuccgacaacgagacccagauggccaagcucuacggcgacuccaagccccagaaguucaccuccuccgccaacggcgucaccacccacuacgucucccagaucggcggcuuccccaaccagaccgaggacggcggccucccccaguccggccgcaucgucgucgacuacaugguccagaaguccggcaagaccggcaccaucaccuaccagcgcggcauccuccucccccagaaggucuggugcgccuccggccgcuccaaggucaucaagggcucccucccccucaucggcgaggccgacugccuccacgagaaguacggcggccucaacaaguccaagcccuacuacaccggcgagcacgccaaggccaucggcaacugccccaucugggucaagaccccccucaagcucgccaacggcaccaaguaccgcccccccgccaagcuccucaaggagcgcggcuucuucggcgccaucgccggcuuccucgagggcggcugggagggcaugaucgccggcuggcacggcuacaccucccacggcgcccacggcgucgccgucgccgccgaccucaaguccacccaggaggccaucaacaagaucaccaagaaccucaacucccucuccgagcucgaggucaagaaccuccagcgccucuccggcgccauggacgagcuccacaacgagauccucgagcucgacgagaaggucgacgaccuccgcgccgacaccaucuccucccagaucgagcucgccguccuccucuccaacgagggcaucaucaacuccgaggacgagcaccuccucgcccucgagcgcaagcucaagaagaugcucggccccuccgccgucgagaucggcaacggcugcuucgagaccaagcacaagugcaaccagaccugccucgaccgcaucgccgccggcaccuucgacgccggcgaguucucccuccccaccuucgacucccucaacaucaccgccgccucccucaacgacgacggccucgacaaccacaccauccuccucuacuacuccaccgccgccuccucccucgccgucacccucaugaucgccaucuucgucgucuacauggucucccgcgacaacgucuccugcuccaucugccucuga

SEQ ID NO: 123225 - RNA, 1758 nt, Artificial Sequence; identical to SEQ ID NO: 123188
  derived and/or modified CDS sequence (opt2) from hemagglutinin__InfluenzaB__AGX18027

SEQ ID NO: 123226 - RNA, 1758 nt, Artificial Sequence; identical to SEQ ID NO: 122674
  derived and/or modified CDS sequence (opt2) from hemagglutinin__InfluenzaB__AGX18038

SEQ ID NO: 123227 - RNA, 1758 nt, Artificial Sequence; identical to SEQ ID NO: 122674
  derived and/or modified CDS sequence (opt2) from hemagglutinin__InfluenzaB__AGX18049

SEQ ID NO: 123228 - RNA, 1758 nt, Artificial Sequence; identical to SEQ ID NO: 122674
  derived and/or modified CDS sequence (opt2) from hemagglutinin__InfluenzaB__AGX18060

SEQ ID NO: 123229 - RNA, 1758 nt, Artificial Sequence; identical to SEQ ID NO: 122550
  derived and/or modified CDS sequence (opt2) from hemagglutinin__InfluenzaB__AGX18071

SEQ ID NO: 123230 - RNA, 1758 nt, Artificial Sequence; identical to SEQ ID NO: 123210
  derived and/or modified CDS sequence (opt2) from hemagglutinin__InfluenzaB__AGX18082

SEQ ID NO: 123231 - RNA, 1758 nt, Artificial Sequence; identical to SEQ ID NO: 123210
  derived and/or modified CDS sequence (opt2) from hemagglutinin__InfluenzaB__AGX18093

SEQ ID NO: 123232 - RNA, 1758 nt, Artificial Sequence; identical to SEQ ID NO: 123017
  derived and/or modified CDS sequence (opt2) from hemagglutinin__InfluenzaB__AGX18104

SEQ ID NO: 123233 - RNA, 1758 nt, Artificial Sequence; identical to SEQ ID NO: 122674
  derived and/or modified CDS sequence (opt2) from hemagglutinin__InfluenzaB__AGX18115

SEQ ID NO: 123234 - RNA, 1758 nt, Artificial Sequence; identical to SEQ ID NO: 122674
  derived and/or modified CDS sequence (opt2) from hemagglutinin__InfluenzaB__AGX18126

SEQ ID NO: 123235 - RNA, 1758 nt, Artificial Sequence; identical to SEQ ID NO: 122550
  derived and/or modified CDS sequence (opt2) from hemagglutinin__InfluenzaB__AGX18137

SEQ ID NO: 123236 - RNA, 1758 nt, Artificial Sequence; identical to SEQ ID NO: 123210
  derived and/or modified CDS sequence (opt2) from hemagglutinin__InfluenzaB__AGX18148

SEQ ID NO: 123237 - RNA, 1758 nt, Artificial Sequence; identical to SEQ ID NO: 122550
  derived and/or modified CDS sequence (opt2) from hemagglutinin__InfluenzaB__AGX18159

SEQ ID NO: 123238 - RNA, 1758 nt, Artificial Sequence; identical to SEQ ID NO: 122550
  derived and/or modified CDS sequence (opt2) from hemagglutinin__InfluenzaB__AGX18170

SEQ ID NO: 123239 - RNA, 1758 nt, Artificial Sequence; identical to SEQ ID NO: 123210
  derived and/or modified CDS sequence (opt2) from hemagglutinin__InfluenzaB__AGX18181

SEQ ID NO: 123240 - RNA, 1758 nt, Artificial Sequence
  derived and/or modified CDS sequence (opt2) from hemagglutinin__InfluenzaB__AGX18192
augaaggccaucaucguccuccucauggucgucaccuccaacgccgaccgcaucugcaccggcaucaccuccuccaacuccccccacgucgucaagaccgccacccagggcgaggucaacgucaccggcgucaucccccucaccaccacccccaccaagucccacuucgccaaccucaagggcaccaagacccgcggcaagcucugccccaagugccucaacugcaccgaccucgacgucgcccucggccgccccaagugcaccggcaacauccccuccgccgaggucuccauccuccacgagguccgccccgucaccuccggcugcuuccccaucaugcacgaccgcaccaagauccgccagcuccccaaccuccuccgcggcuacgagcacauccgccucuccacccacaacgucaucaacgccgagaaggcccccggcggccccuacaagaucggcaccuccggcuccugccccaacgucaccaacggcaacggcuucuucgccaccauggccugggccguccccaagaacgacaacaacaagaccgccaccaacucccucaccaucgagguccccuacaucugcaccgagggcgaggaccagaucaccaucuggggcuuccacuccgacaacgagacccagauggccaagcucuacggcgacuccaagccccagaaguucaccuccuccaccaacggcgucaccacccacuacgucucccagaucggcggcuuccccaaccagaccgaggacggcggccucccccaguccggccgcaucgucgucgacuacaugguccagaagcccggcaagaccggcaccaucaccuaccagcgcggcauccuccucccccagaaggucuggugcgccuccggccgcuccaaggucaucaagggcucccucccccucaucggcgaggccgacugccuccacgagaaguacggcggccucaacaaguccaagcccuacuacaccggcgagcacgccaaggccaucggcaacugccccaucugggucaagaccccccucaagcucgccaacggcaccaaguaccgcccccccgccaagcuccucaaggagcgcggcuucuucggcgccaucgccggcuuccucgagggcggcugggagggcaugaucgccggcuggcacggcuacaccucccacggcgcccacggcgucgccgucgccgccgaccucaaguccacccaggaggccaucaacaagaucaccaagaaccucaacucccucuccgagcucgaggucaagaaccuccagcgccucuccuccgccauggacgagcuccacaacgagauccucgagcucgacgagaaggucgacgaccuccgcgccgacaccaucuccucccagaucgagcucgccguccuccucuccaacgagggcaucaucaacuccgaggacgagcaccuccucgcccucgagcgcaagcucaagaagaugcucggccccuccgccgucgagaucggcaacggcugcuucgagaccaagcacaagugcaaccagaccugccucgaccgcaucgccgccggcaccuucgacgccggcgaguucucccuccccaccuucgacucccucaacaucaccgccgccucccucaacgacgacggccucgacaaccacaccauccuccucuacuacuccaccgccgccuccucccucgccgucacccucaugaucgccaucuucgucgucuacauggucucccgcgacaacgucuccugcuccaucugccucuga

SEQ ID NO: 123241 - RNA, 1758 nt, Artificial Sequence; identical to SEQ ID NO: 123188
  derived and/or modified CDS sequence (opt2) from hemagglutinin__InfluenzaB__AGX18203

SEQ ID NO: 123242 - RNA, 1758 nt, Artificial Sequence
  derived and/or modified CDS sequence (opt2) from hemagglutinin__InfluenzaB__AGX18214
augaaggccaucaucguccuccucauggucgucaccuccaacgccgaccgcaucugcaccggcaucaccuccuccaacuccccccacgucgucaagaccgccacccagggcgaggucaacgucaccggcgucaucccccucaccaccacccccaccaagucccacuucgccaaccucaagggcaccaagacccgcggcaagcucugccccaagugccucaacugcaccgaccucgacgucgcccucggccgccccaagugcaccggcaacauccccuccgccgaggucuccauccuccacgagguccgccccgucaccuccggcugcuuccccaucaugcacgaccgcaccaagauccgccagcuccccaaccuccuccgcggcuacgagcacauccgccucuccacccacaacgucaucaacgccgagaaggcccccggcggccccuacaagaccggcaccuccggcuccugccccaacgucaccaacggcaacggcuucuucgccaccauggccugggccguccccaagaacgacaacaacaagaccgccaccaacucccucaccaucgagguccccuacaucugcaccgagggcgaggaccagaucaccaucuggggcuuccacuccgacaacgagacccagauggccaagcucuacggcgacuccaagccccagaaguucaccuccuccgccaacggcgucaccacccacuacgucucccagaucggcggcuuccccaaccagaccgaggacggcggccucccccaguccggccgcaucgucgucgacuacaugguccagaaguccggcaagaccggcaccaucaccuaccagcgcggcauccuccucccccagaaggucuggugcgccuccggccgcuccaaggucaucaagggcucccucccccucaucggcgaggccgacugccuccacgagaaguacggcggccucaacaaguccaagcccuacuacaccggcgagcacgccaaggccaucggcaacugccccaucugggucaagaccccccucaagcucgccaacggcaccaaguaccgcccccccgccaagcuccucaaggagcgcggcuucuucggcgccaucgccggcuuccucgagggcggcugggagggcaugaucgccggcuggcacggcuacaccucccacggcgcccacggcgucgccgucgccgccgaccucaaguccacccaggaggccaucaacaagaucaccaagaaccucaacucccucuccgagcucgaggucaagaaccuccagcgccucuccggcgccauggacgagcuccacaacgagauccucgagcucgacgagaaggucgacgaccuccgcgccgacaccaucuccucccagaucgagcucgccguccuccucuccaacgagggcaucaucaacuccgaggacgagcaccuccucgcccucgagcgcaagcucaagaagaugcucggccccuccgccgucgagaucggcaacggcugcuucgagaccaagcacaagugcaaccagaccugccucgaccgcaucgccgccggcaccuucgacgccggcgaguucucccuccccaccuucgacucccucaacaucaccgccgccucccucaacgacgacggccucgacaaccacaucauccuccucuacuacuccaccgccgccuccucccucgccgucacccucaugaucgccaucuucgucgucuacauggucucccgcgacaacgucuccugcuccaucugccucuga

SEQ ID NO: 123243 - RNA, 1758 nt, Artificial Sequence
  derived and/or modified CDS sequence (opt2) from hemagglutinin__InfluenzaB__AGX18225
augaaggccaucaucguccuccucauggucgucaccuccaacgccgaccgcaucugcaccggcaucaccuccuccaacuccccccacgucgucaagaccgccacccagggcgaggucaacgucaccggcgucaucccccucaccaccacccccaccaagucccacuucgccaaccucaagggcaccaagacccgcggcaagcucugccccaagugccucaacugcaccgaccucgacgucgcccucggccgccccaagugcaccggcaacauccccuccgccgaggucuccauccuccacgagguccgccccgucaccuccggcugcuuccccaucaugcacgaccgcaccaagauccgccagcuccccaaccuccuccgcggcuacgagcacauccgccucuccacccacaacgucaucaacgccgagaaggcccccggcggccccuacaagaucggcaccuccggcuccugccccaacgucaccaacggcaacggcuucuucgccaccauggccugggccguccccaagaacgacaacaacaagaccgccaccaacucccucaccaucgagguccccuacaucugcaccgagggcgaggaccagaucaccaucuggggcuuccacuccgacaacgagacccagauggccaagcucuacggcgacuccaagccccagaaguucaccuccuccgccaacggcgucaccacccacuacgucucccagaucggcggcuuccccaaccagaccgaggacggcggccucccccaguccggccgcaucgucgucgacuacaugguccagaaguccggcaagaccggcaccaucaccuaccagcgcggcauccuccucccccagaaggucuggugcgccuccggccgcuccaaggucaucaagggcucccucccccucaucggcgaggccgacugccuccacgagaaguacggcggccucaacaaguccaagcccuacuacaccggcgagcacgccaaggccaucggcaacugccccaucugggucaagaccccccucaagcucgccaacggcaccaaguaccgcccccccgccaagcuccucaaggagcgcggcuucuucggcgccaucgccggcuuccucgagggcggcugggagggcaugaucgccggcuggcacggcuacaccucccacggcgcccacggcgucgccgucgccgccgaccucaaguccacccaggaggccaucaaccgcaucaccaagaaccucaacucccucuccgagcucgaggucaagaaccuccagcgccucuccggcgccauggacgagcuccacaacgagauccucgagcucgacgagaaggucgacgaccuccgcgccgacaccaucuccucccagaucgagcucgccguccuccucuccaacgagggcaucaucaacuccgaggacgagcaccuccucgcccucgagcgcaagcucaagaagaugcucggccccuccgccgucgagaucggcaacggcugcuucgagaccaagcacaagugcaaccagaccugccucgaccgcaucgccgccggcaccuucgacgccggcgaguucucccuccccaccuucgacucccucaacaucaccgccgccucccucaacgacgacggccucgacaaccacaccauccuccucuacuacuccaccgccgccuccucccucgccgucacccucaugaucgccaucuucgucgucuacauggucucccgcgacaacgucuccugcuccaucugccucuga

SEQ ID NO: 123244 - RNA, 1758 nt, Artificial Sequence
  derived and/or modified CDS sequence (opt2) from hemagglutinin__InfluenzaB__AGX18236
augaaggccaucaucguccuccucauggucgucaccuccaacgccgaccgcaucugcaccggcaucaccuccuccaacuccccccacgucgucaagaccgccacccagggcgaggucaacgucaccggcgucaucccccucaccaccacccccaccaagucccacuucgccaaccucaagggcaccaagacccgcggcaagcucugccccaagugccucaacugcaccgaccucgacgucgcccucggccgccccaagugcaccggcaacauccccuccgccgaggucuccauccuccacgagguccgccccgucaccuccggcugcuuccccaucaugcacgaccgcaccaagauccgccagcuccccaaccuccuccgcggcuacgagcacauccgccucuccacccacaacgucaucaacgccgagaaggcccccggcggccccuacaagaucggcaccuccggcuccugccccaacgucaccaacggcaacggcuucuucgccaccauggccugggccguccccaagaacgacaacaacaagaccgccaccaacucccucaccaucgagguccccuacaucugcaccgagggcgaggaccagaucaccaucuggggcuuccacuccgacaacgagacccagauggccaagcucuacggcgacuccaagccccagaaguucaccuccuccgccaacggcgucaccacccacuacgucucccagaucggcggcuuccccaaccagaccgaggacggcggccucccccaguccggccgcaucgucgucgacuacaugaugcagaaguccggcaagaccggcaccaucaccuaccagcgcggcauccuccucccccagaaggucuggugcgccuccggccgcuccaaggucaucaagggcucccucccccucaucggcgaggccgacugccuccacgagaaguacggcggccucaacaaguccaagcccuacuacaccggcgagcacgccaaggccaucggcaacugccccaucugggucaagaccccccucaagcucgccaacggcaccaaguaccgcccccccgccaagcuccucaaggagcgcggcuucuucggcgccaucgccggcuuccucgagggcggcugggagggcaugaucgccggcuggcacggcuacaccucccacggcgcccacggcgucgccgucgccgccgaccucaaguccacccaggaggccaucaacaagaucaccaagaaccucaacucccucuccgagcucgaggucaagaaccuccagcgccucuccggcgccauggacgagcuccacaacgagauccucgagcucgacgagaaggucgacgaccuccgcgccgacaccaucuccucccagaucgagcucgccguccuccucuccaacgagggcaucaucaacuccgaggacgagcaccuccucgcccucgagcgcaagcucaagaagaugcucggccccuccgccgucgagaucggcaacggcugcuucgagaccaagcacaagugcaaccagaccugccucgaccgcaucgccgccggcaccuucgacgccggcgaguucucccuccccaccuucgacucccucaacaucaccgccgccucccucaacgacgacggccucgacaaccacaccauccuccucuacuacuccaccgccgccuccucccucgccgucacccucaugaucgccaucuucgucgucuacauggucucccgcgacaacgucuccugcuccaucugccucuga

SEQ ID NO: 123245 - RNA, 1758 nt, Artificial Sequence; identical to SEQ ID NO: 122601
  derived and/or modified CDS sequence (opt2) from hemagglutinin__InfluenzaB__AGX18247

SEQ ID NO: 123246 - RNA, 1758 nt, Artificial Sequence
  derived and/or modified CDS sequence (opt2) from hemagglutinin__InfluenzaB__AGX18258
augaaggccaucaucguccuccucauggucgucaccuccaacgccgaccgcaucugcaccggcaucaccuccuccaacuccccccacgucgucaagaccgccacccagggcgaggucaacgucaccggcgucaucccccucaccaccacccccaccaagucccacuucgccaaccucaagggcaccaagacccgcggcaagcucugccccaagugccucaacugcaccgaccucgacgucgcccucggccgccccaagugcaccggcaacauccccuccgccgaggucuccauccuccacgagguccgccccgucaccuccggcugcuuccccaucaugcacgaccgcaccaagauccgccagcuccccaaccuccuccgcggcuacgagcacauccgccucuccacccacaacgucaucaacgccgagaaggcccccggcggccccuacaagaucggcaccuccggcuccugccccaacgucaccaacggcaacggcuucuucgccaccauggccugggccguccccaagaacgacaagaacaagaccgccaccaacucccucaccaucgagguccccuacaucugcaccgagggcgaggaccagaucaccaucuggggcuuccacuccgacaacgagacccagauggccaagcucuacggcgacuccaagccccagaaguucaccuccuccgccaacggcgucaccacccacuacgucucccagaucggcggcuuccccaaccagaccgaggacggcggccucccccaguccggccgcaucgucgucgacuacaugguccagaaguccggcaagaccggcaccaucaccuaccagcgcggcauccuccucccccagaaggucuggugcgccuccggccgcuccaaggucaucaagggcacccucccccucaucggcgaggccgacugccuccacgagaaguacggcggccucaacaaguccaagcccuacuacaccggcgagcacgccaaggccaucggcaacugccccaucugggucaagaccccccucaagcucgccaacggcaccaaguaccgcccccccgccaagcuccucaaggagcgcggcuucuucggcgccaucgccggcuuccucgagggcggcugggagggcaugaucgccggcuggcacggcuacaccucccacggcgcccacggcgucgccgucgccgccgaccucaaguccacccaggaggccaucaacaagaucaccaagaaccucaacucccucuccgagcucgaggucaagaaccuccagcgccucuccggcgccauggacgagcuccacaacgagauccucgagcucgacgagaaggucgacgaccuccgcgccgacaccaucuccucccagaucgagcucgccguccuccucuccaacgagggcaucaucaacuccgaggacgagcaccuccucgcccucgagcgcaagcucaagaagaugcucggccccuccgccgucgagaucggcaacggcugcuucgagaccaagcacaagugcaaccagaccugccucgaccgcaucgccgccggcaccuucgacgccggcgaguucucccuccccaccuucgacucccucaacaucaccgccgccucccucaacgacgacggccucgacaaccacaccauccuccucuacuacuccaccgccgccuccucccucgccgucacccucaugaucgccaucuucgucgucuacauggucucccgcgacaacgucuccugcuccaucugccucuga

SEQ ID NO: 123247 - RNA, 1758 nt, Artificial Sequence; identical to SEQ ID NO: 122550
  derived and/or modified CDS sequence (opt2) from hemagglutinin__InfluenzaB__AGX18280

SEQ ID NO: 123248 - RNA, 1758 nt, Artificial Sequence
  derived and/or modified CDS sequence (opt2) from hemagglutinin__InfluenzaB__AGX18291
augaaggccaucaucguccuccucauggucgucaccuccaacgccgaccgcaucugcaccggcaucaccuccuccaacuccccccacgucgucaagaccgccacccagggcgaggucaacgucaccggcgucaucccccucaccaccacccccaccaagucccacuucgccaaccucaagggcaccaagacccgcggcaagcucugccccaagugccucaacugcaccgaccucgacgucgcccucggccgccccaagugcaccggcaacauccccuccgccgaggucuccauccuccacgagguccgccccgucaccuccggcugcuuccccaucaugcacgaccgcaccaagauccgccagcuccccaaccuccuccgcggcuacgagcacauccgccucuccacccacaacgucaucaacgccgagaaggcccccggcggccccuacaagaucggcaccuccggcuccugccccaacgucaccaacggcaacggcuucuucgccaccauggccugggccguccccaagaacgacaacaacaagaccgccaccaacucccucaccaucgagguccccuacaucugcaccgagggcgaggaccagaucaccaucuggggcuuccacuccgacaacgagacccagauggccaagcucuacggcgacuccaagccccagaaguucaccuccuccgccaacggcgucaccacccacuacgucucccagaucggcggcuuccccaaccagaccgaggacggcggccucccccaguccggccgcaucgucgucgacuacaugguccagaaguccggcaagaccggcaccaucaccuaccagcgcggcauccuccucccccagaaggucuggugcgucuccggccgcuccaaggucaucaagggcucccucccccucaucggcgaggccgacugccuccacgagaaguacggcggccucaacaaguccaagcccuacuacaccggcgagcacgccaaggccaucggcaacugccccaucugggucaagaccccccucaagcucgccaacggcaccaaguaccgcccccccgccaagcuccucaaggagcgcggcuucuucggcgccaucgccggcuuccucgagggcggcugggagggcaugaucgccggcuggcacggcuacaccucccacggcgcccacggcgucgccgucgccgccgaccucaaguccacccaggaggccaucaacaagaucaccaagaaccucaacucccucuccgagcucgaggucaagaaccuccagcgccucuccggcgccauggacgagcuccacaacgagauccucgagcucgacgagaaggucgacgaccuccgcgccgacaccaucuccucccagaucgagcucgccguccuccucuccaacgagggcaucaucaacuccgaggacgagcaccuccucgcccucgagcgcaagcucaagaagaugcucggccccuccgccgucgagaucggcaacggcugcuucgagaccaagcacaagugcaaccagaccugccucgaccgcaucgccgccggcaccuucgacgccggcgaguucucccuccccaccuucgacucccucaacaucaccgccgccucccucaacgacgacggccucgacaaccacaccauccuccucuacuacuccaccgccgccuccucccucgccgucacccucaugaucgccaucuucgucgucuacauggucucccgcgacaacgucuccugcuccaucugccucuga

SEQ ID NO: 123249 - RNA, 1758 nt, Artificial Sequence
  derived and/or modified CDS sequence (opt2) from hemagglutinin__InfluenzaB__AGX18302
augaaggccaucaucguccuccucauggucgucaccuccaacgccgaccgcaucugcaccggcaucaccuccuccaacuccccccacgucgucaagaccgccacccagggcgaggucaacgucaccggcgucaucccccucaccaccacccccaccaagucccacuucgccaaccucaagggcaccaagacccgcggcaagcucugccccaagugccucaacugcaccgaccucgacgucgcccucggccgccccaagugcaccggcaacauccccuccgccgaggucuccauccuccacgagguccgccccgucaccuccggcugcuuccccaucaugcacgaccgcaccaagauccgccagcuccccaaccuccuccgcggcuacaagcacauccgccucuccacccacaacgucaucaacgccgagaaggcccccggcggccccuacaagaucggcaccuccggcuccugccccaacgucaccaacggcaacggcuucuucgccaccauggccugggccguccccaagaacgacaacaacaagaccgccaccaacucccucaccaucgagguccccuacaucugcaccgagggcgaggaccagaucaccaucuggggcuuccacuccgacaacgagacccagauggccaagcucuacggcgacuccaagccccagaaguucaccuccuccgccaacggcgucaccacccacuacgucucccagaucggcggcuuccccaaccagaccgaggacggcggccucccccaguccggccgcaucgucgucgacuacaugguccagaaguccggcaagaccggcaccaucaccuaccagcgcggcauccuccucccccagaaggucuggugcgccuccggccgcuccaaggucaucaagggcacccucccccucaucggcgaggccgacugccuccacgagaaguacggcggccucaacaaguccaagcccuacuacaccggcgagcacgccaaggccaucggcaacugccccaucugggucaagaccccccucaagcucgccaacggcaccaaguaccgcccccccgccaagcuccucaaggagcgcggcuucuucggcgccaucgccggcuuccucgagggcggcugggagggcaugaucgccggcuggcacggcuacaccucccacggcgcccacggcgucgccgucgccgccgaccucaaguccacccaggaggccaucaacaagaucaccaagaaccucaacucccucuccgagcucgaggucaagaaccuccagcgccucuccggcgccauggacgagcuccacaacgagauccucgagcucgacgagaaggucgacgaccuccgcgccgacaccaucuccucccagaucgagcucgccguccuccucuccaacgagggcaucaucaacuccgaggacgagcaccuccucgcccucgagcgcaagcucaagaagaugcucggccccuccgccgucgagaucggcaacggcugcuucgagaccaagcacaagugcaaccagaccugccucgaccgcaucgccgccggcaccuucgacgccggcgaguucucccuccccaccuucgacucccucaacaucaccgccgccucccucaacgacgacggccucgacaaccacaccauccuccucuacuacuccaccgccgccuccucccucgccgucacccucaugaucgccaucuucgucgucuacauggucucccgcgacaacgucuccugcuccaucugccucuga

SEQ ID NO: 123250 - RNA, 1758 nt, Artificial Sequence; identical to SEQ ID NO: 122550
  derived and/or modified CDS sequence (opt2) from hemagglutinin__InfluenzaB__AGX18313

SEQ ID NO: 123251 - RNA, 1758 nt, Artificial Sequence
  derived and/or modified CDS sequence (opt2) from hemagglutinin__InfluenzaB__AGX18324
augaaggccaucaucguccuccucauggucgucaccuccaacgccgaccgcaucugcaccggcaucaccuccuccaacuccccccacgucgucaagaccgccacccagggcgaggucaacgucaccggcgucaucccccucaccaccacccccaccaagucccacuucgccaaccucaagggcaccaagacccgcggcaagcucugccccaagugccucaacugcaccgaccucgacgucgcccucggccgccccaagugcaccggcaacauccccuccgccgaggucuccauccuccacgagguccgccccgucaccuccggcugcuuccccaucaugcacgaccgcaccaagauccgccagcuccccaaccuccuccgcggcuacgagcacauccgccucuccacccacaacgucaucaacgccgagaaggcccccggcggccccuacaagaucggcaccuccggcuccugccccaacgucaccaacggcaacggcuucuucgccaccauggccugggccguccccaagaacgacaacaacaagaccgccaccaacucccucaccaucgagguccccuacaucugcaccgagggcgaggaccagaucaccaucuggggcuuccacuccgacaacgaggcccagauggccaagcucuacggcgacuccaagccccagaaguucaccuccuccgccaacggcgucaccacccacuacgucucccagaucggcggcuuccccaaccagaccgaggacggcggccucccccaguccggccgcaucgucgucgacuacaugguccagaaguccggcaagaccggcaccaucaccuaccagcgcggcauccuccucccccagaaggucuggugcgccuccggccgcuccaaggucaucaagggcucccucccccucaucggcgaggccgacugccuccacgagaaguacggcggccucaacaaguccaagcccuacuacaccggcgagcacgccaaggccaucggcaacugccccaucugggucaagaccccccucaagcucgccaacggcaccaaguaccgcccccccgccaagcuccucaaggagcgcggcuucuucggcgccaucgccggcuuccucgagggcggcugggagggcaugaucgccggcuggcacggcuacaccucccacggcgcccacggcgucgccgucgccgccgaccucaaguccacccaggaggccaucaacaagaucaccaagaaccucaacucccucuccgagcucgaggucaagaaccuccagcgccucuccggcgccauggacgagcuccacaacgagauccucgagcucgacgagaaggucgacgaccuccgcgccgacaccaucuccucccagaucgagcucgccguccuccucuccaacgagggcaucaucaacuccgaggacgagcaccuccucgcccucgagcgcaagcucaagaagaugcucggccccuccgccgucgagaucggcaacggcugcuucgagaccaagcacaagugcaaccagaccugccucgaccgcaucgccgccggcaccuucgacgccggcgaguucucccuccccaccuucgacucccucaacaucaccgccgccucccucaacgacgacggccucgacaaccacaccauccuccucuacuacuccaccgccgccuccucccucgccgucacccucaugaucgccaucuucgucgucuacauggucucccgcgacaacgucuccugcuccaucugccucuga

SEQ ID NO: 123252 - RNA, 1758 nt, Artificial Sequence; identical to SEQ ID NO: 123210
  derived and/or modified CDS sequence (opt2) from hemagglutinin__InfluenzaB__AGX18335

SEQ ID NO: 123253 - RNA, 1758 nt, Artificial Sequence
  derived and/or modified CDS sequence (opt2) from hemagglutinin__InfluenzaB__AGX18346
augaaggccaucaucguccuccucauggucgucaccuccaacgccgaccgcaucugcaccggcaucaccuccuccaacuccccccacgucgucaagaccgccacccagggcgaggucaacgucaccggcgucaucccccucaccaccacccccaccaagucccacuucgccaaccucaagggcaccaagacccgcggcaagcucugccccaagugccucaacugcaccgaccucgacgucgcccucggccgccccaagugcaccggcaacauccccuccgccgaggucuccauccuccacgagguccgccccgucaccuccggcugcuuccccaucaugcacgaccgcaccaagauccgccagcuccccaaccuccuccgcggcuacgagcacauccgccucuccacccacaacgucaucaacgccgagaaggcccccggcggccccuacaagaucggcaccuccggcuccugccccaacgucaccaacggcaacggcuucuucgccaccauggccugggccguccccaagaacgacaacaacaagaccgccaccaacucccucaccaucgagguccccuacaucugcaccgagggcgaggaccagaucaccaucuggggcuuccacuccgacaacgagacccagauggccaagcucuacggcgacuccaagccccagaaguucaccuccuccgccaacggcgucaccacccacuacgucucccagaucggcggcuuccccaaccagaccgaggacggcggccucccccaguccggccgcaucgucgucgacuacaugguccagaaguccggcaagaccggcaccaucaccuaccagcgcggcauccuccucccccagaaggucuggugcgccuccggccgcuccaaggucaucaagggcucccucccccucaucggcgaggccgacugccuccacgagaaguacggcggccucaacaaguccaagcccuacuacaccggcgagcacgccaaggccaucggcaacugccccaucugggucaagaccccccucaagcucgccaacggcaccaaguaccgcccccccgccaagcuccucaaggagcgcggcuucuucggcgccaucgccggcuuccucgagggcggcugggagggcaugaucgccggcuggcacggcuacaccucccacggcgcccacggcgucgccgucgccgccgaccucaaguccacccaggaggccaucaacaagaucaccaagaaccucaacucccucuccgagcucgaggucaagaaccuccagcgccucuccggcgccauggacgagcuccacaacgagauccucgagcucgacgagaaggucgacgaccuccgcgccgacaccaucuccucccagaucgagcucgccguccuccucuccaacgagggcaucaucaacuccgaggacgagcaccuccucgcccucgagcgcaagcucaagaagaugcucggccccuccgccgucgagaucggcaacggcugcuucgagaccaagcacaagugcaaccagaccugccucgaccgcaucgccgccggcaccuucgacgccggcgaguucucccuccccaccuucgacucccucaacaucaccgccgccucccucaacgaggacggccucgacaaccacaccauccuccucuacuacuccaccgccgccuccucccucgccgucacccucaugaucgccaucuucgucgucuacauggucucccgcgacaacgucuccugcuccaucugccucuga

SEQ ID NO: 123254 - RNA, 1758 nt, Artificial Sequence
  derived and/or modified CDS sequence (opt2) from hemagglutinin__InfluenzaB__AGX18357
augaaggccaucaucguccuccucauggucgucaccuccaacgccgaccgcaucugcaccggcaucaccuccuccaacuccccccacgucgucaagaccgccacccagggcgaggucaacgucaccggcgucaucccccucaccaccgcccccaccaagucccacuucgccaaccucaagggcaccaagacccgcggcaagcucugccccaagugccucaacugcaccgaccucgacgucgcccucggccgccccaagugcaccggcaacauccccuccgccgaggucuccauccuccacgagguccgccccgucaccuccggcugcuuccccaucaugcacgaccgcaccaagauccgccagcuccccaaccuccuccgcggcuacgagcacauccgccucuccacccacaacgucaucaacgccgagaaggcccccggcggccccuacaagaucggcaccuccggcuccugccccaacgucaccaacggcaacggcuucuucgccaccauggccugggccguccccaagaacgacaacaacaagaccgccaccaacucccucaccaucgagguccccuacaucugcaccgagggcgaggaccagaucaccaucuggggcuuccacuccgacaaggagacccagauggccaagcucuacggcgacuccaagccccagaaguucaccuccuccgccaacggcgucaccacccacuacgucucccagaucggcggcuuccccaaccagaccgaggacggcggccucccccaguccggccgcaucgucgucgacuacaugguccagaagcccggcaagaccggcaccaucaccuaccagcgcggcauccuccucccccagaaggucuggugcgccuccggccgcuccaaggucaucaagggcucccucccccucaucggcgaggccgacugccuccacgagaaguacggcggccucaacaaguccaagcccuacuacaccggcgagcacgccaaggccaucggcaacugccccaucugggucaagaccccccucaagcucgccaacggcaccaaguaccgcccccccgccaagcuccucaaggagcgcggcuucuucggcgccaucgccggcuuccucgagggcggcugggagggcaugaucgccggcuggcacggcuacaccucccacggcgcccacggcgucgccgucgccgccgaccucaaguccacccaggaggccaucaacaagaucaccaagaaccucaacucccucuccgagcucgaggucaagaaccuccagcgccucuccuccgccauggacgagcuccacaacgagauccucgagcucgacgagaaggucgacgaccuccgcgccgacaccaucuccucccagaucgagcucgccguccuccucuccaacgagggcaucaucaacuccgaggacgagcaccuccucgcccucgagcgcaagcucaagaagaugcucggccccuccgccgucgagaucggcaacggcugcuucgagaccaagcacaagugcaaccagaccugccucgaccgcaucgccgccggcaccuucgacgccggcgaguucucccuccccaccuucgacucccucaacaucaccgccgccucccucaacgacgacggccucgacaaccacaccauccuccucuacuacuccaccgccgccuccucccucgccgucacccucaugaucgccaucuucgucgucuacauggucucccgcgacaacgucuccugcuccaucugccucuga

SEQ ID NO: 123255 - RNA, 1758 nt, Artificial Sequence
  derived and/or modified CDS sequence (opt2) from hemagglutinin__InfluenzaB__AGX18368
augaaggccaucaucguccuccucauggucgucaccuccaacgccgaccgcaucugcaccggcaucaccuccuccaacuccccccacgucgucaagaccgccacccagggcgaggucaacgucaccggcgucaucccccucaccaccgcccccaccaagucccacuucgccaaccucaagggcaccaagacccgcggcaagcucugccccaagugccucaacugcaccgaccucgacgucgcccucggccgccccaagugcaccggcaacacccccuccgccgaggucuccauccuccacgagguccgccccgucaccuccggcugcuuccccaucaugcacgaccgcaccaagauccgccagcuccccaaccuccuccgcggcuacgagcacauccgccucuccaaccacaacgucaucaacgccgagaaggcccccggcggccccuacaagaucggcaccuccggcuccugccccaacgucaccaacggcaacggcuucuucgccaccauggccugggccguccccaagaacgacaacaacaagaccgccaccaacucccucaccaucgagguccccuacaucugcaccgagggcgaggaccagaucaccaucuggggcuuccacuccgacaacgagacccagauggccaagcucuacggcgacuccaagccccagaaguucaccuccuccgccaacggcgucaccacccacuacgucucccagaucggcggcuuccccaaccagaccgaggacggcggccucccccaguccggccgcaucgucgucgacuacaugguccagaagcccggcaagaccggcaccaucaccuaccagcgcggcauccuccucccccagaaggucuggugcgccuccggccgcuccaaggucaucaagggcucccucccccucaucggcgaggccgacugccuccacgagaaguacggcggccucaacaaguccaagcccuacuacaccggcgagcacgccaaggccaucggcaacugccccaucugggucaagaccccccucaagcucgccaacggcaccaaguaccgcccccccgccaagcuccucaaggagcgcggcuucuucggcgccaucgccggcuuccucgagggcggcugggagggcaugaucgccggcuggcacggcuacaccucccacggcgcccacggcgucgccgucgccgccgaccucaaguccacccaggaggccaucaacaagaucaccaagaaccucaacucccucuccgagcucgaggucaagaaccuccagcgccucuccuccgccauggacgagcuccacaacgagauccucgagcucgacgagaaggucgacgaccuccgcgccgacaccaucuccucccagaucgagcucgccguccuccucuccaacgagggcaucaucaacuccgaggacgagcaccuccucgcccucgagcgcaagcucaagaagaugcucggccccuccgccgucgagaucggcaacggcugcuucgagaccaagcacaagugcaaccagaccugccucgaccgcaucgccgccggcaccuucgacgccggcgaguucucccuccccaccuucgacucccucaacaucaccgccgccucccucaacgacgacggccucgacaaccacaccauccuccucuacuacuccaccgccgccuccucccucgccgucacccucaugaucgccaucuucgucgucuacauggucucccgcgacaacgucuccugcuccaucugccucuga

SEQ ID NO: 123256 - RNA, 1758 nt, Artificial Sequence; identical to SEQ ID NO: 122674
  derived and/or modified CDS sequence (opt2) from hemagglutinin__InfluenzaB__AGX18379

SEQ ID NO: 123257 - RNA, 1758 nt, Artificial Sequence; identical to SEQ ID NO: 123210
  derived and/or modified CDS sequence (opt2) from hemagglutinin__InfluenzaB__AGX18390

SEQ ID NO: 123258 - RNA, 1758 nt, Artificial Sequence
  derived and/or modified CDS sequence (opt2) from hemagglutinin__InfluenzaB__AGX18401
augaaggccaucaucguccuccucauggucgucaccuccaacgccgaccgcaucugcaccggcaucaccuccuccaacuccccccacgucgucaagaccgccacccagggcgaggucaacgucaccggcgucaucccccucaccaccgcccccaccaagucccacuucgccaaccucaagggcaccaagacccgcggcaagcucugccccaagugccucaacugcaccgaccucgacgucgcccucggccgccccaagugcaccggcaacauccccuccgccgaggucuccauccuccacgagguccgccccgucaccuccggcugcuuccccaucaugcacgaccgcaccaagauccgccagcuccccaaccuccuccgcggcuacgagcacauccgccucuccacccacaacgucaucaacgccgagaaggcccccggcggccccuacaagaucggcaccuccggcuccugccccaacgucaccaacggcaacggcuucuucgccaccauggccugggccguccccaagaacgacaacaacaagaccgccaccaacucccucaccaucgagguccccuacaucugcaccgagggcgaggaccagaucaccaucuggggcuuccacuccgacaacgagauccagauggccaagcucuacggcgacuccaagccccagaaguucaccuccuccgccaacggcgucaccacccacuacgucucccagaucggcggcuuccccaaccagaccgaggacggcggccucccccaguccggccgcaucgucgucgacuacaugguccagaagcccggcaagaccggcaccaucaccuaccagcgcggcauccuccucccccagaaggucuggugcgccuccggccgcuccaaggucaucaagggcucccucccccucaucggcgaggccgacugccuccacgagaaguacggcggccucaacaaguccaagcccuacuacaccggcgagcacgccaaggccaucggcaacugccccaucugggucaagaccccccucaagcucgccaacggcaccaaguaccgcccccccgccaagcuccucaaggagcgcggcuucuucggcgccaucgccggcuuccucgagggcggcugggagggcaugaucgccggcuggcacggcuacaccucccacggcgcccacggcgucgccgucgccgccgaccucaaguccacccaggaggccaucaacaagaucaccaagaaccucaacucccucuccgagcucgaggucaagaaccuccagcgccucuccuccgccauggacgagcuccacaacgagauccucgagcucgacgagaaggucgacgaccuccgcgccgacaccaucuccucccagaucgagcucgccguccuccucuccaacgagggcaucaucaacuccgaggacgagcaccuccucgcccucgagcgcaagcucaagaagaugcucggccccuccgccgucgagaucggcaacggcugcuucgagaccaagcacaagugcaaccagaccugccucgaccgcaucgccgccggcaccuucgacgccggcgaguucucccuccccaccuucgacucccucaacaucaccgccgccucccucaacgacgacggccucgacaaccacaccauccuccucuacuacuccaccgccgccuccucccucgccgucacccucaugaucgccaucuucgucgucuacauggucucccgcgacaacgucuccugcuccaucugccucuga

SEQ ID NO: 123259 - RNA, 1758 nt, Artificial Sequence
  derived and/or modified CDS sequence (opt2) from hemagglutinin__InfluenzaB__AGX18412
augaaggccaucaucguccuccucauggucgucaccuccaacgccgaccgcaucugcaccggcaucaccuccuccaacuccccccacgucgucaagaccgccacccagggcgaggucaacgucaccggcgucaucccccucaccaccacccccaccaagucccacuucgccaaccucaagggcaccaagacccgcggcaagcucugccccaagugccucaacugcaccgaccucgacgucgcccucggccgccccaagugcaccggcaacauccccuccgccgaggucuccauccuccacgagguccgccccgucaccuccggcugcuuccccaucaugcacgaccgcaccaagauccgccagcuccccaaccuccuccgcggcuacgagcacauccgccucuccaaccacaacgucaucaacgccgagaaggcccccggcggccccuacaagaucggcaccuccggcuccugccccaacgucaccaacggcaacggcuucuucgccaccauggccugggccguccccaagaacgacaacaacaagaccgccaccaacucccucaccaucgagguccccuacaucugcaccgagggcgaggaccagaucaccaucuggggcuuccacuccgacaacgaggcccagauggccaagcucuacggcgacuccaagccccagaaguucaccuccuccgccaacggcgucaccacccacuacgucucccagaucggcggcuuccccaaccagaccgaggacggcggccucccccaguccggccgcaucgucgucgacuacaugguccagaaguccggcaagaccggcaccaucaccuaccagcgcggcauccuccucccccagaaggucuggugcgccuccggccgcuccaaggucaucaagggcucccucccccucaucggcgaggccgacugccuccacgagaaguacggcggccucaacaaguccaagcccuacuacaccggcgagcacgccaaggccaucggcaacugccccaucugggucaagaccccccucaagcucgccaacggcaccaaguaccgcccccccgccaagcuccucaaggagcgcggcuucuucggcgccaucgccggcuuccucgagggcggcugggagggcaugaucgccggcuggcacggcuacaccucccacggcgcccacggcgucgccgucgccgccgaccucaaguccacccaggaggccaucaacaagaucaccaagaaccucaacucccucuccgagcucgaggucaagaaccuccagcgccucuccggcgccauggacgagcuccacaacgagauccucgagcucgacgagaaggucgacgaccuccgcgccgacaccaucuccucccagaucgagcucgccguccuccucuccaacgagggcaucaucaacuccgaggacgagcaccuccucgcccucgagcgcaagcucaagaagaugcucggccccuccgccgucgagaucggcaacggcugcuucgagaccaagcacaagugcaaccagaccugccucgaccgcaucgccgccggcaccuucgacgccggcgaguucucccuccccaccuucgacucccucaacaucaccgccgccucccucaacgacgacggccucgacaaccacaccauccuccucuacuacuccaccgccgccuccucccucgccgucacccucaugaucgccaucuucgucgucuacauggucucccgcgacaacgucuccugcuccaucugccucuga

SEQ ID NO: 123260 - RNA, 1758 nt, Artificial Sequence; identical to SEQ ID NO: 123017
  derived and/or modified CDS sequence (opt2) from hemagglutinin__InfluenzaB__AGX18423

SEQ ID NO: 123261 - RNA, 1755 nt, Artificial Sequence
  derived and/or modified CDS sequence (opt2) from hemagglutinin__InfluenzaB__AGX18424
augaaggccaucaucguccuccucauggucgucaccuccaacgccgaccgcaucugcaccggcaucaccuccuccaacuccccccacgucgucaagaccgccacccagggcgaggucaacgucaccggcgucaucccccucaccaccacccccaucaagucccacuucgccaaccucaagggcacccgcacccgcggcaagcucugccccgacugccucaacugcaccgaccucgacgucgcccucggccgccccaugugcgucggcaccacccccuccgccaaggccuccauccuccacgagguccgccccgucaccuccggcugcuuccccaucaugcacgaccgcaccaagauccgccagcuccccaaccuccuccgcggcuacgagaacauccgccucuccacccagaacgucaucgacgccgagaaggcccucggcggccccuaccgccucggcaccuccggcuccugccccaacgccaccuccaaguccggcuucuucgccaccauggccugggccguccccaaggacaacaacaagaacgccaccaacccccucaccgucgagguccccuacaucugcaccgagggcgaggaccagaucaccgucuggggcuuccacuccgacgacaagacccagaugaagaaccucuacggcgacuccaacccccagaaguucaccuccuccgccaacggcgucaccacccacuacgucucccagaucggcggcuuccccgaccagaccgaggacggcggccucccccaguccggccgcaucgucgucgacuacaugguccagaagcccggcaagaccggcaccaucgucuaccagcgcggcguccuccucccccagaaggucuggugcgccuccggccgcuccaaggucaucaagggcucccucccccucaucggcgaggccgacugccuccacgagaaguacggcggccucaacaaguccaagcccuacuacaccggcgagcacgccaaggccaucggcaacugccccaucugggucaagaccccccucaagcucgccaacggcaccaaguaccgcccccccgccaagcuccucaaggagcgcggcuucuucggcgccaucgccggcuuccucgagggcggcugggagggcaugaucgccggcuggcacggcuacaccucccacggcgcccacggcgucgccgucgccgccgaccucaaguccacccaggaggccaucaacaagaucaccaagaaccucaacucccucuccgagcucgaggucaagaaccuccagcgccucuccggcgccauggacgagcuccacaacgagauccucgagcucgacgagaaggucgacgaccuccgcgccgacaccaucuccucccagaucgagcucgccguccuccucuccaacgagggcaucaucaacuccgaggacgagcaccuccucgcccucgagcgcaagcucaagaagaugcucggccccuccgccgucgacaucggcaacggcugcuucgagaccaagcacaagugcaaccagaccugccucgaccgcaucgccgccggcaccuucaacgccggcgaguucucccuccccaccuucgacucccucaacaucaccgccgccucccucaacgacgacggccucgacaaccacaccauccuccucuacuacuccaccgccgccuccucccucgccgucacccucaugcucgccaucuucaucgucuacauggucucccgcgacaacgucuccugcuccaucugccucuga

SEQ ID NO: 123262 - RNA, 1758 nt, Artificial Sequence
  derived and/or modified CDS sequence (opt2) from hemagglutinin__InfluenzaB__AGX18435
augaaggccaucaucguccuccucauggucgucaccuccaacgccgaccgcaucugcaccggcaucaccuccuccaacuccccccacgucgucaagaccgccacccagggcgaggucaacgucaccggcgucaucccccucaccaccacccccaccaagucccacuucgccaaccucaagggcaccaagacccgcggcaagcucugccccaagugccucaacugcaccgaccucgacgucgcccucggccgccccaagugcaccggcaacauccccuccgccgaggucuccauccuccacgagguccgccccgucaccuccggcugcuuccccaucaugcacgaccgcaccaagauccgccagcuccccaaccuccuccgcggcuacgagcacauccgccucuccacccacaacgucaucaacgccgagaaggcccccggcggccccuacaagaucggcaccuccggcuccugccccaacgucaccaacggcaacggcuucuucgccaccauggccugggccguccccaagaacgacaacaacaagaccgccaccaacucccucaccaucgagguccccuacaucugcaccgagggcgaggaccagaucaccaucuggggcuuccacuccgacaacgagauccagauggccaagcucuacggcgacuccaagccccagaaguucaccuccuccgccaacggcgucaccacccacuacgucucccagaucggcggcuuccccaaccagaccgaggacggcggccucccccaguccggccgcaucgucgucgacuacaugguccagaaguccggcaagaccggcaccaucaccuaccagcgcggcauccuccucccccagaaggucuggugcgccuccggccgcuccaaggucaucaagggcucccucccccucaucggcgaggccgacugccuccacgagaaguacggcggccucaacaaguccaagcccuacuacaccggcgagcacgccaaggccaucggcaacugccccaucugggucaagaccccccucaagcucgccaacggcaccaaguaccgcccccccgccaagcuccucaaggagcgcggcuucuucggcgccaucgccggcuuccucgagggcggcugggagggcaugaucgccggcuggcacggcuacaccucccacggcgcccacggcgucgccgucgccgccgaccucaaguccacccaggaggccaucaacaagaucaccaagaaccucaacucccucuccgagcucgaggucaagaaccuccagcgccucuccggcgccauggacgagcuccacaacgagauccucgagcucgacgagaaggucgacgaccuccgcgccgacaccaucuccucccagaucgagcucgccguccuccucuccaacgagggcaucaucaacuccgaggacgagcaccuccucgcccucgagcgcaagcucaagaagaugcucggccccuccgccgucgagaucggcaacggcugcuucgagaccaagcacaagugcaaccagaccugccucgaccgcaucgccgccggcaccuucgacgccggcgaguucucccuccccaccuucgacucccucaacaucaccgccgccucccucaacgacgacggccucgacaaccacaccauccuccucuacuacuccaccgccgccuccucccucgccgucacccucaugaucgccaucuucgucgucuacauggucucccgcgacaacgucuccugcuccaucugccucuga

SEQ ID NO: 123263 - RNA, 1758 nt, Artificial Sequence; identical to SEQ ID NO: 122674
  derived and/or modified CDS sequence (opt2) from hemagglutinin__InfluenzaB__AGX18446

SEQ ID NO: 123264 - RNA, 1758 nt, Artificial Sequence; identical to SEQ ID NO: 123210
  derived and/or modified CDS sequence (opt2) from hemagglutinin__InfluenzaB__AGX18457

SEQ ID NO: 123265 - RNA, 1758 nt, Artificial Sequence; identical to SEQ ID NO: 123017
  derived and/or modified CDS sequence (opt2) from hemagglutinin__InfluenzaB__AGX18468

SEQ ID NO: 123266 - RNA, 1758 nt, Artificial Sequence; identical to SEQ ID NO: 123210
  derived and/or modified CDS sequence (opt2) from hemagglutinin__InfluenzaB__AGX18479

SEQ ID NO: 123267 - RNA, 1758 nt, Artificial Sequence; identical to SEQ ID NO: 122550
  derived and/or modified CDS sequence (opt2) from hemagglutinin__InfluenzaB__AGX18490

SEQ ID NO: 123268 - RNA, 1758 nt, Artificial Sequence
  derived and/or modified CDS sequence (opt2) from hemagglutinin__InfluenzaB__AGX18512
augaaggccaucaucguccuccucauggucgucaccuccaacgccgaccgcaucugcaccggcaucaccuccuccaacuccccccacgucgucaagaccgccacccagggcgaggucaacgucaccggcgucaucccccucaccaccacccccaccaagucccacuucgccaaccucaagggcaccgagacccgcggccgccucugccccaagugccucaacugcaccgaccucgacgucgcccucggccgccccaagugcaccggcaacauccccuccgcccgcgucuccauccuccacgagguccgccccgucaccuccggcugcuuccccaucaugcacgaccgcaccaagauccgccagcuccccaaccuccuccgcggcuacgagcacauccgccucuccacccacaacgucaucaacgccgagaacgcccccggcggccccuacaagaucggcaccuccggcuccugccccaacgucaccaacggcaacggcuucuucgccaccauggccugggccguccccaagaacgacaacaacaagaccgccaccaacucccucaccaucgagguccccuacaucugcaccgagggcgaggaccagaucaccgucuggggcuuccacuccgacaacgagacccagauggccaagcucuacggcgacuccaagccccagaaguucaccuccuccgccaacggcgucaccacccacuacgucucccagaucggcggcuuccccaaccagaccgaggacggcggccucccccaguccggccgcaucgucgucgacuacaugguccagaaguccggcaagaccggcaccaucaccuaccagcgcggcauccuccucccccagaaggucuggugcgccuccggccgcuccaaggucaucaagggcucccucccccucaucggcgaggccgacugccuccacgagaaguacggcggccucaacaaguccaagcccuacuacaccggcgagcacgccaaggccaucggcaacugccccaucugggucaagaccccccucaagcucgccaacggcaccaaguaccgcccccccgccaagcuccucaaggagcgcggcuucuucggcgccaucgccggcuuccucgagggcggcugggagggcaugaucgccggcuggcacggcuacaccucccacggcgcccacggcgucgccgucgccgccgaccucaaguccacccaggaggccaucaacaagaucaccaagaaccucaacucccucuccgagcucgaggucaagaaccuccagcgccucuccggcgccauggacgagcuccacaacgagauccucgagcucgacgagaaggucgacgaccuccgcgccgacaccaucuccucccagaucgagcucgccguccuccucuccaacgagggcaucaucaacuccgaggacgagcaccuccucgcccucgagcgcaagcucaagaagaugcucggccccuccgccgucgagaucggcaacggcugcuucgagaccaagcacaagugcaaccagaccugccucgaccgcaucgccgccggcaccuucgacgccggcgaguucucccuccccaccuucgacucccucaacaucaccgccgccucccucaacgacgacggccucgacaaccacaccauccuccucuacuacuccaccgccgccuccucccucgccgucacccucaugaucgccaucuucgucgucuacauggucucccgcgacaacgucuccugcuccaucugccucuga

SEQ ID NO: 123269 - RNA, 1758 nt, Artificial Sequence; identical to SEQ ID NO: 122550
  derived and/or modified CDS sequence (opt2) from hemagglutinin__InfluenzaB__AGX18523

SEQ ID NO: 123270 - RNA, 1758 nt, Artificial Sequence; identical to SEQ ID NO: 122550
  derived and/or modified CDS sequence (opt2) from hemagglutinin__InfluenzaB__AGX18534

SEQ ID NO: 123271 - RNA, 1758 nt, Artificial Sequence; identical to SEQ ID NO: 122611
  derived and/or modified CDS sequence (opt2) from hemagglutinin__InfluenzaB__AGX18545

SEQ ID NO: 123272 - RNA, 1758 nt, Artificial Sequence; identical to SEQ ID NO: 122550
  derived and/or modified CDS sequence (opt2) from hemagglutinin__InfluenzaB__AGX18556

SEQ ID NO: 123273 - RNA, 1758 nt, Artificial Sequence; identical to SEQ ID NO: 122550
  derived and/or modified CDS sequence (opt2) from hemagglutinin__InfluenzaB__AGX18567

SEQ ID NO: 123274 - RNA, 1758 nt, Artificial Sequence
  derived and/or modified CDS sequence (opt2) from hemagglutinin__InfluenzaB__AGX18578
augaaggccaucaucguccuccucauggucgucaccuccaacgccgaccgcaucugcaccggcaucaccuccuccaacuccccccacgucgucaagaccgccacccagggcgaggucaacgucaccggcgucaucccccucaccaccacccccaccaagucccacuucgccaaccucaagggcaccgagacccgcggcaagcucugccccaagugccucaacugcaccgaccucgacgucgcccucggccgccccaagugcaccggcaacauccccuccgcccgcgucuccauccuccacgagguccgccccgucaccuccggcugcuuccccaucaugcacgaccgcaccaagauccgccagcuccccaaccuccuccgcggcuacgagcacauccgccucuccacccacaacgucaucaacgccgagaacgcccccggcggccccuacaagaucggcaccuccggcuccugccccaacgucaccaacggcaacggcuucuucgccaccauggccugggccguccccaagaacgacaagaacaagaccgccaccaacucccucaccaucgagguccccuacaucugcaccgagggcgaggaccagaucaccgucuggggcuuccacuccgacaacgagacccagauggccaagcucuacggcgacuccaagccccagaaguucaccuccuccgccaacggcgucaccacccacuacgucucccagaucggcggcuuccccaaccagaccgaggacggcggccucccccaguccggccgcaucgucgucgacuacaugguccagaaguccggcaagaccggcaccaucaccuaccagcgcggcauccuccucccccagaaggucuggugcgccuccggccgcuccaaggucaucaagggcucccucccccucaucggcgaggccgacugccuccacgagaaguacggcggccucaacaaguccaagcccuacuacaccggcgagcacgccaaggccaucggcaacugccccaucugggucaagaccccccucaagcucgccaacggcaccaaguaccgcccccccgccaagcuccucaaggagcgcggcuucuucggcgccaucgccggcuuccucgagggcggcugggagggcaugaucgccggcuggcacggcuacaccucccacggcgcccacggcgucgccgucgccgccgaccucaaguccacccaggaggccaucaacaagaucaccaagaaccucaacucccucuccgagcucgaggucaagaaccuccagcgccucuccggcgccauggacgagcuccacaaggagauccucgagcucgacgagaaggucgacgaccuccgcgccgacaccaucuccucccagaucgagcucgccguccuccucuccaacgagggcaucaucaacuccgaggacgagcaccuccucgcccucgagcgcaagcucaagaagaugcucggccccuccgccgucgagaucggcaacggcugcuucgagaccaagcacaagugcaaccagaccugccucgaccgcaucgccgccggcaccuucgacgccggcgaguucucccuccccaccuucgacucccucaacaucaccgccgccucccucaacgacgacggccucgacaaccacaccauccuccucuacuacuccaccgccgccuccucccucgccgucacccucaugaucgccaucuucgucgucuacauggucucccgcgacaacgucuccugcuccaucugccucuga

SEQ ID NO: 123275 - RNA, 1758 nt, Artificial Sequence
  derived and/or modified CDS sequence (opt2) from hemagglutinin__InfluenzaB__AGX18589
augaaggccaucaucguccuccucauggucgucaccuccaacgccgaccgcaucugcaccggcaucaccuccuccaacuccccccacgucgucaagaccgccacccagggcgaggucaacgucaccggcgucaucccccucaccaccacccccaccaagucccacuucgccaaccucaagggcaccgagacccgcggcaagcucugccccaagugccucaacugcaccgaccucgacgucgcccucggccgccccaagugcaccggcaacauccccuccgcccgcgucuccauccuccacgagguccgccccgucaccuccggcugcuuccccaucaugcacgaccgcaccaagauccgccagcuccccaaccuccuccgcggcuacgagcacauccgccucuccacccacaacgucaucaacgccgagaacgcccccggcggccccuacaagaucggcaccuccggcuccugccccaacgucaccaacggcaacggcuucuucgccaccauggccugggccguccccaagaacgacaacaacaagaccgccaccaacucccucaccaucgagguccccuacaucugcaccgagggcgaggaccagaucaccgucuggggcuuccacuccgacaccgagacccagauggccaagcucuacggcgacuccaagccccagaaguucaccuccuccgccaacggcgucaccacccacuacgucucccagaucggcgacuuccccaaccagaccgaggacggcggccucccccaguccggccgcaucgucgucgacuacaugguccagaaguccggcaagaccggcaccaucaccuaccagcgcggcauccuccucccccagaaggucuggugcgccuccggccgcuccaaggucaucaagggcucccucccccucaucggcgaggccgacugccuccacgagaaguacggcggccucaacaaguccaagcccuacuacaccggcgagcacgccaaggccaucggcaacugccccaucugggucaagaccccccucaagcucgccaacggcaccaaguaccgcccccccgccaagcuccucaaggagcgcggcuucuucggcgccaucgccggcuuccucgagggcggcugggagggcaugaucgccggcuggcacggcuacaccucccacggcgcccacggcgucgccgucgccgccgaccucaaguccacccaggaggccaucaacaagaucaccaagaaccucaacucccucuccgagcucgaggucaagaaccuccagcgccucuccggcgccauggacgagcuccacaacgagauccucgagcucgacgagaaggucgacgaccuccgcgccgacaccaucuccucccagaucgagcucgccguccuccucuccaacgagggcaucaucaacuccgaggacgagcaccuccucgcccucgagcgcaagcucaagaagaugcucggccccuccgccgucgagaucggcaacggcugcuucgagaccaagcacaagugcaaccagaccugccucgaccgcaucgccgccggcaccuucgacgccggcgaguucucccuccccaccuucgacucccucaacaucaccgccgccucccucaacgacgacggccucgacaaccacaccauccuccucuacuacuccaccgccgccuccucccucgccgucacccucaugaucgccaucuucgucgucuacauggucucccgcgacaacgucuccugcuccaucugccucuga

SEQ ID NO: 123276 - RNA, 1758 nt, Artificial Sequence; identical to SEQ ID NO: 122550
  derived and/or modified CDS sequence (opt2) from hemagglutinin__InfluenzaB__AGX18600

SEQ ID NO: 123277 - RNA, 1758 nt, Artificial Sequence; identical to SEQ ID NO: 122550
  derived and/or modified CDS sequence (opt2) from hemagglutinin__InfluenzaB__AGX18611

SEQ ID NO: 123278 - RNA, 1758 nt, Artificial Sequence; identical to SEQ ID NO: 122550
  derived and/or modified CDS sequence (opt2) from hemagglutinin__InfluenzaB__AGX18622

SEQ ID NO: 123279 - RNA, 1758 nt, Artificial Sequence; identical to SEQ ID NO: 122550
  derived and/or modified CDS sequence (opt2) from hemagglutinin__InfluenzaB__AGX18633

SEQ ID NO: 123280 - RNA, 1758 nt, Artificial Sequence; identical to SEQ ID NO: 122550
  derived and/or modified CDS sequence (opt2) from hemagglutinin__InfluenzaB__AGX18644

SEQ ID NO: 123281 - RNA, 1758 nt, Artificial Sequence; identical to SEQ ID NO: 122550
  derived and/or modified CDS sequence (opt2) from hemagglutinin__InfluenzaB__AGX18655

SEQ ID NO: 123282 - RNA, 1758 nt, Artificial Sequence; identical to SEQ ID NO: 122550
  derived and/or modified CDS sequence (opt2) from hemagglutinin__InfluenzaB__AGX18666

SEQ ID NO: 123283 - RNA, 1758 nt, Artificial Sequence; identical to SEQ ID NO: 122550
  derived and/or modified CDS sequence (opt2) from hemagglutinin__InfluenzaB__AGX18677

SEQ ID NO: 123284 - RNA, 1758 nt, Artificial Sequence; identical to SEQ ID NO: 122550
  derived and/or modified CDS sequence (opt2) from hemagglutinin__InfluenzaB__AGX18688

SEQ ID NO: 123285 - RNA, 1758 nt, Artificial Sequence; identical to SEQ ID NO: 122550
  derived and/or modified CDS sequence (opt2) from hemagglutinin__InfluenzaB__AGX18699

SEQ ID NO: 123286 - RNA, 1758 nt, Artificial Sequence; identical to SEQ ID NO: 122550
  derived and/or modified CDS sequence (opt2) from hemagglutinin__InfluenzaB__AGX18710

SEQ ID NO: 123287 - RNA, 1758 nt, Artificial Sequence; identical to SEQ ID NO: 122550
  derived and/or modified CDS sequence (opt2) from hemagglutinin__InfluenzaB__AGX18721

SEQ ID NO: 123288 - RNA, 1758 nt, Artificial Sequence; identical to SEQ ID NO: 122550
  derived and/or modified CDS sequence (opt2) from hemagglutinin__InfluenzaB__AGX18732

SEQ ID NO: 123289 - RNA, 1758 nt, Artificial Sequence
  derived and/or modified CDS sequence (opt2) from hemagglutinin__InfluenzaB__AGX18743
augaaggccaucaucguccuccucauggucgucaccuccaacgccgaccgcaucugcaccggcaucaccuccuccaacuccccccacgucgucaagaccgccacccagggcgaggucaacgucaccggcgucaucccccucaccaccacccccaccaagucccacuucgccaaccucaagggcaccgagacccgcggcaagcucugccccaagugccucaacugcaccgaccucgacgucgcccucggccgccccaagugcaccggcaacauccccuccgcccgcgucuccauccuccacgagguccgccccgucaccuccggcugcuuccccaucaugcacgaccgcaccaagauccgccagcuccccaaccuccuccgcggcuacgagcacauccgccucuccaaccacaacgucaucaacgccgagaacgcccccggcggccccuacaagaucggcaccuccggcuccugccccaacgucaccaacggcaacggcuucuucgccaccauggccugggccguccccaagaacgacaacaacaagaccgccaccaacucccucaccaucgagguccccuacaucugcaccgagggcgaggaccagaucaccgucuggggcuuccacuccgacaacgagacccagauggccaagcucuacggcgacuccaagccccagaaguucaccuccuccgccaacggcgucaccacccacuacgucucccagaucggcggcuuccccaaccagaccgaggacggcggccucccccaguccggccgcaucgucgucgacuacaugguccagaaguccggcaagaccggcaccaucaccuaccagcgcggcauccuccucccccagaaggucuggugcgccuccggccgcuccaaggucaucaagggcucccucccccucaucggcgaggccgacugccuccacgagaaguacggcggccucaacaaguccaagcccuacuacaccggcgagcacgccaaggccaucggcaacugccccaucugggucaagaccccccucaagcucgccaacggcaccaaguaccgcccccccgccaagcuccucaaggagcgcggcuucuucggcgccaucgccggcuuccucgagggcggcugggagggcaugaucgccggcuggcacggcuacaccucccacggcgcccacggcgucgccgucgccgccgaccucaaguccacccaggaggccaucaacaagaucaccaagaaccucaacucccucuccgagcucgaggucaagaaccuccagcgccucuccggcgccauggacgagcuccacaacgagauccucgagcucgacgagaaggucgacgaccuccgcgccgacaccaucuccucccagaucgagcucgccguccuccucuccaacgagggcaucaucaacuccgaggacgagcaccuccucgcccucgagcgcaagcucaagaagaugcucggccccuccgccgucgagaucggcaacggcugcuucgagaccaagcacaagugcaaccagaccugccucgaccgcaucgccgccggcaccuucgacgccggcgaguucucccuccccaccuucgacucccucaacaucaccgccgccucccucaacgacgacggccucgacaaccacaccauccuccucuacuacuccaccgccgccuccucccucgccgucacccucaugaucgccaucuucgucgucuacauggucucccgcgacaacgucuccugcuccaucugccucuga

SEQ ID NO: 123290 - RNA, 1758 nt, Artificial Sequence; identical to SEQ ID NO: 122550
  derived and/or modified CDS sequence (opt2) from hemagglutinin__InfluenzaB__AGX18754

SEQ ID NO: 123291 - RNA, 1758 nt, Artificial Sequence; identical to SEQ ID NO: 122550
  derived and/or modified CDS sequence (opt2) from hemagglutinin__InfluenzaB__AGX18765

SEQ ID NO: 123292 - RNA, 1758 nt, Artificial Sequence; identical to SEQ ID NO: 122601
  derived and/or modified CDS sequence (opt2) from hemagglutinin__InfluenzaB__AGX18776

SEQ ID NO: 123293 - RNA, 1758 nt, Artificial Sequence; identical to SEQ ID NO: 122550
  derived and/or modified CDS sequence (opt2) from hemagglutinin__InfluenzaB__AGX18787

SEQ ID NO: 123294 - RNA, 1758 nt, Artificial Sequence; identical to SEQ ID NO: 122550
  derived and/or modified CDS sequence (opt2) from hemagglutinin__InfluenzaB__AGX18798

SEQ ID NO: 123295 - RNA, 1758 nt, Artificial Sequence
  derived and/or modified CDS sequence (opt2) from hemagglutinin__InfluenzaB__AGX18809
augaaggccaucaucguccuccucauggucgucaccuccaacgccgaccgcaucugcaccggcaucaccuccuccaacuccccccacgucgucaagaccgccacccagggcgaggucaacgucaccggcgucaucccccucaccaccacccccaccaagucccacuucgccaaccucaagggcaccgagacccgcggcaagcucugccccaagugccucaacugcaccgaccucgacgucgcccucggccgccccaagugcaccggcaacauccccuccgcccgcgucuccauccuccacgagguccgccccgucaccuccggcugcuuccccaucaugcacgaccgcaccaagauccgccagcuccccaaccuccuccgcggcuacgagcacauccgccucuccacccacaacgucaucaacgccgagaacgcccccggcggccccuacaagaucggcaccuccggcuccugccccaacgucaccaacggcaacggcuucuucgccaccauggccugggccguccccaagaacgacaacaacaagaccgccaccaacucccucaccaucgagguccccuacaucugcaccgagggcgaggaccagaucaccgucuggggcuuccacuccgacuccgagacccagauggccaagcucuacggcgacuccaagccccagaaguucaccuccuccgccaacggcgucaccacccacuacgucucccagaucggcggcuuccccaaccagaccgaggacggcggccucccccaguccggccgcaucgucgucgacuacaugaugcagaaguccggcaagaccggcaccaucaccuaccagcgcggcauccuccucccccagaaggucuggugcgccuccggccgcuccaaggucaucaagggcucccucccccucaucggcgaggccgacugccuccacgagaaguacggcggccucaacaaguccaagcccuacuacaccggcgagcacgccaaggccaucggcaacugccccaucugggucaagaccccccucaagcucgccaacggcaccaaguaccgcccccccgccaagcuccucaaggagcgcggcuucuucggcgccaucgccggcuuccucgagggcggcugggagggcaugaucgccggcuggcacggcuacaccucccacggcgcccacggcgucgccgucgccgccgaccucaaguccacccaggaggccaucaacaagaucaccaagaaccucaacucccucuccgagcucgaggucaagaaccuccagcgccucuccggcgccauggacgagcuccacaacgagauccucgagcucgacgagaaggucgacgaccuccgcgccgacaccaucuccucccagaucgagcucgccguccuccucuccaacgagggcaucaucaacuccgaggacgagcaccuccucgcccucgagcgcaagcucaagaagaugcucggccccuccgccgucgagaucggcaacggcugcuucgagaccaagcacaagugcaaccagaccugccucgaccgcaucgccgccggcaccuucgacgccggcgaguucucccuccccaccuucgacucccucaacaucaccgccgccucccucaacgacgacggccucgacaaccacaccauccuccucuacuacuccaccgccgccuccucccucgccgucacccucaugaucgccaucuucgucgucuacauggucucccgcgacaacgucuccugcuccaucugccucuga

SEQ ID NO: 123296 - RNA, 1758 nt, Artificial Sequence; identical to SEQ ID NO: 123213
  derived and/or modified CDS sequence (opt2) from hemagglutinin__InfluenzaB__AGX18820

SEQ ID NO: 123297 - RNA, 1758 nt, Artificial Sequence; identical to SEQ ID NO: 122550
  derived and/or modified CDS sequence (opt2) from hemagglutinin__InfluenzaB__AGX18831

SEQ ID NO: 123298 - RNA, 1758 nt, Artificial Sequence; identical to SEQ ID NO: 122550
  derived and/or modified CDS sequence (opt2) from hemagglutinin__InfluenzaB__AGX18842

SEQ ID NO: 123299 - RNA, 1758 nt, Artificial Sequence; identical to SEQ ID NO: 122618
  derived and/or modified CDS sequence (opt2) from hemagglutinin__InfluenzaB__AGX18853

SEQ ID NO: 123300 - RNA, 1758 nt, Artificial Sequence
  derived and/or modified CDS sequence (opt2) from hemagglutinin__InfluenzaB__AGX18864
augaaggccaucaucguccuccucauggucgucaccuccaacgccgaccgcaucugcaccggcaucaccuccuccaacuccccccacgucgucaagaccgccacccagggcgaggucaacgucaccggcgucaucccccucaccaccacccccaccaaguccuacuucgccaaccucaagggcaccgagacccgcggcaagcucugccccaagugccucaacugcaccgaccucgacgucgcccucggccgccccaagugcaccggcaacauccccuccgcccgcgucuccauccuccacgagguccgccccgucaccuccggcugcuuccccaucaugcacgaccgcaccaagauccgccagcuccccaaccuccuccgcggcuacgagcacauccgccucuccaaccacaacgucaucaacgccgagaacgcccccggcggccccuacaagaucggcaccuccggcuccugccccaacgucaccaacggcaacggcuucuucgccaccauggccugggccguccccaagaacgacaacaacaagaccgccaccaacucccucaccaucgagguccccuacaucugcaccgagggcgaggaccagaucaccgucuggggcuuccacuccgacaacgaggcccagauggccaagcucuacggcgacuccaagccccagaaguucaccuccuccgccaacggcgucaccacccacuacgucucccagaucggcggcuuccccaaccagaccgaggacggcggccucccccaguccggccgcaucgucgucgacuacaugguccagaaguccggcaagaccggcaccaucaccuaccagcgcggcauccuccucccccagaaggucuggugcgccuccggccgcuccaaggucaucaagggcucccucccccucaucggcgaggccgacugccuccacgagaaguacggcggccucaacaaguccaagcccuacuacaccggcgagcacgccaaggccaucggcaacugccccaucugggucaagaccccccucaagcucgccaacggcaccaaguaccgcccccccgccaagcuccucaaggagcgcggcuucuucggcgccaucgccggcuuccucgagggcggcugggagggcaugaucgccggcuggcacggcuacaccucccacggcgcccacggcgucgccgucgccgccgaccucaaguccacccaggaggccaucaacaagaucaccaagaaccucaacucccucuccgagcucgaggucaagaaccuccagcgccucuccggcgccauggacgagcuccacaacgagauccucgagcucgacgagaaggucgacgaccuccgcgccgacaccaucuccucccagaucgagcucgccguccuccucuccaacgagggcaucaucaacuccgaggacgagcaccuccucgcccucgagcgcaagcucaagaagaugcucggccccuccgccgucgagaucggcaacggcugcuucgagaccaagcacaagugcaaccagaccugccucgaccgcaucgccgccggcaccuucgacgccggcgaguucucccuccccaccuucgacucccucaacaucaccgccgccucccucaacgacgacggccucgacaaccacaccauccuccucuacuacuccaccgccgccuccucccucgccgucacccucaugaucgccaucuucgucgucuacauggucucccgcgacaacgucuccugcuccaucugccucuga

SEQ ID NO: 123301 - RNA, 1758 nt, Artificial Sequence
  derived and/or modified CDS sequence (opt2) from hemagglutinin__InfluenzaB__AGX18875
augaaggccaucaucguccuccucauggucgucaccuccaacgccgaccgcaucugcaccggcaucaccuccuccaacuccccccacgucgucaagaccgccacccagggcgaggucaacgucaccggcgucaucccccucaccaccacccccaccaagucccacuucgccaaccucaagggcaccgagacccgcggcaagcucugccccaagugccucaacugcaccgaccucgacgucgcccucggccgccccaagugcaccggcaacauccccuccgcccgcgucuccauccuccacgagguccgccccgucaccuccggcugcuuccccaucaugcacgaccgcaccaagauccgccagcuccccaaccuccuccgcggcuacgagcacauccgccucuccacccacaacgucaucaacgccgagaacgcccccggcggccccuacaagaucggcaccuccggcuccugccccaacgucaccaaccgcaacggcuucuucgccaccauggccugggccguccccaagaacgacaacaacaagaccgccaccaacucccucaccaucgagguccccuacaucugcaccgagggcgaggaccagaucaccgucuggggcuuccacuccgacaacgagauccagauggccaagcucuacggcgacuccaagccccagaaguucaccuccuccgccaacggcgucaccacccacuacgucucccagaucggcggcuuccccaaccagaccgaggacggcggccucccccaguccggccgcaucgucgucgacuacaugguccagaaguccggcaagaccggcaccaucaccuaccagcgcggcauccuccucccccagaaggucuggugcgccuccggccgcuccaaggucaucaagggcucccucccccucaucggcgaggccgacugccuccacgagaaguacggcggccucaacaaguccaagcccuacuacaccggcgagcacgccaaggccaucggcaacugccccaucugggucaagaccccccucaagcucgccaacggcaccaaguaccgcccccccgccaagcuccucaaggagcgcggcuucuucggcgccaucgccggcuuccucgagggcggcugggagggcaugaucgccggcuggcacggcuacaccucccacggcgcccacggcgucgccgucgccgccgaccucaaguccacccaggaggccaucaacaagaucaccaagaaccucaacucccucuccgagcucgaggucaagaaccuccagcgccucuccggcgccaucgacgagcuccacaacgagauccucgagcucgacgagaaggucgacgaccuccgcgccgacaccaucuccucccagaucgagcucgccguccuccucuccaacgagggcaucaucaacuccgaggacgagcaccuccucgcccucgagcgcaagcucaagaagaugcucggccccuccgccgucgagaucggcaacggcugcuucgagaccaagcacaagugcaaccagaccugccucgaccgcaucgccgccggcaccuucgacgccggcgaguucucccuccccaccuucgacucccucaacaucaccgccgccucccucaacgacgacggccucgacaaccacaccauccuccucuacuacuccaccgccgccuccucccucgccgucacccucaugaucgccaucuucgucgucuacauggucucccgcgacaacgucuccugcuccaucugccucuga

SEQ ID NO: 123302 - RNA, 1758 nt, Artificial Sequence
  derived and/or modified CDS sequence (opt2) from hemagglutinin__InfluenzaB__AGX18886
augaaggccaucaucguccuccucauggucgucaccuccaacgccgaccgcaucugcaccggcaucaccuccuccaacuccccccacgucgucaagaccgccacccagggcgaggucaacgucaccggcgucaucccccucaccaccacccccaccaagucccacuucgccaaccucaagggcaccgagacccgcggcaagcucugccccaagugccucaacugcaccgaccucgacgucgcccucggccgccccaagugcaccggcaacauccccuccgcccgcgucuccauccuccacgagguccgccccgucaccuccggcugcuuccccaucaugcacgaccgcaccaagauccgccagcuccccaaccuccuccgcggcuacgagcacauccgccucuccacccacaacgucaucaacgccgagaacgcccccggcggccccuacaagaucggcaccuccggcuccugccccaacgucaccaacggcaacggcuucuucgccaccauggccugggccguccccaagaacgacaacaacaagaccgccaccaacucccucaccaucgagguccccuacaucugcaccgagggcgaggaccagaucaccgucuggggcuuccacuccgacaacgagauccagauggccaagcucuacggcgacuccaagccccagaaguucaccuccuccgccaacggcgucaccacccacuacgucucccagaucggcggcuuccccaaccagaccgaggacggcggccucccccaguccggccgcaucgucgucgacuacaugguccagaaguccggcaagaccggcaccaucaccuaccagcgcggcauccuccucccccagaaggucuggugcgccuccggccgcuccaaggucaucaagggcucccucccccucaucggcgaggccgacugccuccacgagaaguacggcggccucaacaaguccaagcccuacuacaccggcgagcacgccaaggccaucggcaacugccccaucugggucaagaccccccucaagcucgccaacggcaccaaguaccgcccccccgccaagcuccucaaggagcgcggcuucuucggcgccaucgccggcuuccucgagggcggcugggagggcaugaucgccggcuggcacggcuacaccucccacggcgcccacggcgucgccgucgccgccgaccucaaguccacccaggaggccaucaacaagaucaccaagaaccucaacucccucuccgagcucgaggucaagaaccuccagcgccucuccggcgccauggacgagcuccacaacgagauccucgagcucgacgagaaggucgacgaccuccgcgccgacaccaucuccucccagaucgagcucgccguccuccucuccaacgagggcaucaucaacuccgaggacgagcaccuccucgcccucgagcgcaagcucaagaagaugcucggccccuccgccgucgagaucggcaacggcugcuucgagaccaagcacaagugcaaccagaccugccucgaccgcaucgccgccggcaccuucgacgccggcgaguucucccuccccaccuucgacucccucaacaucaccgccgccucccucaacgacaacggccucgacaaccacaccauccuccucuacuacuccaccgccgccuccucccucgccgucacccucaucaucgccaucuucgucgucuacauggucucccgcgacaacgucuccugcuccaucugccucuga

SEQ ID NO: 123303 - RNA, 1758 nt, Artificial Sequence; identical to SEQ ID NO: 123023
  derived and/or modified CDS sequence (opt2) from hemagglutinin__InfluenzaB__AGX18897

SEQ ID NO: 123304 - RNA, 1758 nt, Artificial Sequence; identical to SEQ ID NO: 122550
  derived and/or modified CDS sequence (opt2) from hemagglutinin__InfluenzaB__AGX18908

SEQ ID NO: 123305 - RNA, 1758 nt, Artificial Sequence; identical to SEQ ID NO: 122550
  derived and/or modified CDS sequence (opt2) from hemagglutinin__InfluenzaB__AGX18919

SEQ ID NO: 123306 - RNA, 1758 nt, Artificial Sequence
  derived and/or modified CDS sequence (opt2) from hemagglutinin__InfluenzaB__AGX18930
augaaggccaucaucguccuccucauggucgucaccuccaacgccgaccgcaucugcaccggcaucaccuccuccaacuccccccacgucgucaagaccgccacccagggcgaggucaacgucaccggcgucaucccccucaccaccacccccaccaagucccacuucgccaaccucaagggcaccgagacccgcggcaagcucugccccaagugccucaacugcaccgaccucgacgucgcccucggccgccccaagugcaccggcaacauccccuccgcccgcgucuccauccuccacgagguccgccccgucaccuccggcugcuuccccaucaugcacgaccgcaccaagauccgccagcuccccaaccuccuccgcggcuacgagcacauccgccucuccacccacaacgucaucaacgccgagaacgcccccggcggccccuacaagaucggcaccuccggcuccugccccaacgucaccaacggcaacggcuucuucgccaccauggccugggccguccccaagaacgacaacaacaagaccgccaccaacucccucaccaucgagguccccuacaucugcaccgagggcgaggaccagaucaccgucuggggcuuccacuccgacaacgagacccagauggccaagcucuacggcgacuccaagccccagaaguucaccuccuccgccaacggcgucaccacccacuacgucucccagaucggcggcuuccccaaccagaccgaggacggcggccucccccaguccggccgcaucgucgucgacuacaugguccagaaguccggcaagaccggcaccaucaccuaccagcgcggcauccuccucccccagaaggucuggugcgccuccggccgcuccaaggucaucaagggcucccucccccucaucggcgaggccgacugccuccacgagaaguacggcggccucaacaaguccaagcccuacuacaccggcgagcacgccaaggccaucggcaacugccccaucugggucaagaccccccucaagcucgccaacggcaccaaguaccgcccccccgccaagcuccucaaggagcgcggcuucuucggcgccaucgccggcuuccucgagggcggcugggagggcaugaucgccggcuggcacggcuacaccucccacggcgcccacggcgucgccgucgccgccgaccucaaguccacccaggaggccaucaacaagaucaccaagaaccucaacucccucuccgagcucgaggucaagaaccuccagcgccucuccggcgccauggacgagcuccacaacgagauccucgagcucgacgagaaggucgacgaccuccgcgccgacaccaucuccucccagaucgagcucgccguccuccucuccaacgagggcaucaucaacuccgaggacgagcaccuccucgcccucgagcgcaagcucaagaagaugcucggccccuccgccgucgagaucggcaacggcugcuucgagaccaagcacaagugcaaccagaccugcaucgaccgcaucgccgccggcaccuucgacgccggcgaguucucccuccccaccuucgacucccucaacaucaccgccgccucccucaacgacgacggccucgacaaccacaccauccuccucuacuacuccaccgccgccuccucccucgccgucacccucaugaucgccaucuucgucgucuacauggucucccgcgacaacgucuccugcuccaucugccucuga

SEQ ID NO: 123307 - RNA, 1758 nt, Artificial Sequence; identical to SEQ ID NO: 122550
  derived and/or modified CDS sequence (opt2) from hemagglutinin__InfluenzaB__AGX18941

SEQ ID NO: 123308 - RNA, 1758 nt, Artificial Sequence; identical to SEQ ID NO: 122550
  derived and/or modified CDS sequence (opt2) from hemagglutinin__InfluenzaB__AGX18952

SEQ ID NO: 123309 - RNA, 1758 nt, Artificial Sequence; identical to SEQ ID NO: 122550
  derived and/or modified CDS sequence (opt2) from hemagglutinin__InfluenzaB__AGX18963

SEQ ID NO: 123310 - RNA, 1758 nt, Artificial Sequence
  derived and/or modified CDS sequence (opt2) from hemagglutinin__InfluenzaB__AGX18974
augaaggccaucaucguccuccucauggucgucaccuccaacgccgaccgcaucugcaccggcaucaccuccuccaacuccccccacgucgucaagaccgccacccagggcgaggucaacgucaccggcgucaucccccucaccaccacccccaccaagucccacuucgccaaccucaagggcaccgagacccgcggcaagcucugccccaagugccucaacugcaccgaccucgacgucgcccucggccgccccaagugcaccggcaacauccccuccgcccgcgucuccauccuccacgagguccgccccgucaccuccggcugcuuccccaucaugcacgaccgcaccaagauccgccagcuccccaaccuccuccgcggcuacgagcacauccgccucuccacccacaacgucaucaacgccgagaacgcccccggcggccccuacaagaucggcaccuccggcuccugccccaacgucaccaacggcaacggcuucuucgccaccauggccugggccguccccaagaacgacaacaacaagaccgccaccaacucccucaccaucgagguccccuacaucugcaccgagggcgaggaccagaucaccgucuggggcuuccacuccgacaacgagacccagauggccaagcucuacggcgacuccaagccccagaaguucaccuccuccgccaacggcgucaccacccacuacgucucccagaucggcggcuuccccaaccagaccgaggacggcggccucccccaguccggccgcaucgucgucgacuacaugguccagaaguccggcaagaccggcaccaucaccuaccagcgcggcauccuccucccccagaaggucuggugcgccuccggccgcuccaaggucaucaagggcucccucccccucaucggcgaggccgacugccuccacgagaaguacggcggccucaacaaguccaagcccuacuacaccggcgagcacgccaaggccaucggcaacugccccaucugggucaagaccccccucaagcucgccaacggcaccaaguaccgcccccccgccaagcuccucaaggagcgcggcuucuucggcgccaucgccggcuuccucgagggcggcugggagggcaugaucgccggcuggcacggcuacaccucccacggcgcccacggcgucgccgucgccgccgaccucaaguccacccaggaggccaucaacaagaucaccaagaaccucaacucccucuccgagcucgaggucaagaaccuccagcgccucuccggcgccauggacgagcuccacaacgagauccucgagcucgacgagaaggucgacgaccuccgcgccgacaccaucuccucccagaucgagcucgccguccuccucuccaacgagggcaucaucaacuccgaggacgagcaccuccucgcccucgagaagaagcucaagaagaugcucggccccuccgccgucgagaucggcaacggcugcuucgagaccaagcacaagugcaaccagaccugccucgaccgcaucgccgccggcaccuucgacgccggcgaguucucccuccccaccuucgacucccucaacaucaccgccgccucccucaacgacgacggccucgacaaccacaccauccuccucuacuacuccaccgccgccuccucccucgccgucacccucaugaucgccaucuucgucgucuacauggucucccgcgacaacgucuccugcuccaucugccucuga

SEQ ID NO: 123311 - RNA, 1758 nt, Artificial Sequence; identical to SEQ ID NO: 122550
  derived and/or modified CDS sequence (opt2) from hemagglutinin__InfluenzaB__AGX18985

SEQ ID NO: 123312 - RNA, 1758 nt, Artificial Sequence
  derived and/or modified CDS sequence (opt2) from hemagglutinin__InfluenzaB__AGX18996
augaaggccaucaucguccuccucauggucgucaccuccaacgccgaccgcaucugcaccggcaucaccuccuccaacuccccccacgucgucaagaccgccacccagggcgaggucaacgucaccggcgucaucccccucaccaccacccccaccaagucccacuucgccaaccucaagggcaccgagacccgcggcaagcucugccccaagugccucaacugcaccgaccucgacgucgcccucggccgccccaagugcaccggcaacacccccuccgcccgcgucuccauccuccacgagguccgccccgucaccuccggcugcuuccccaucaugcacgaccgcaccaagauccgccagcuccccaaccuccuccgcggcuacgagcacauccgccucuccacccacaacgucaucaacgccgagaacgcccccggcggccccuacaagaucggcaccuccggcuccugccccaacgucaccaacggcaacggcuucuucgccaccauggccugggccguccccaagaacgacaacaacaagaccgccaccaacucccucaccaucgagguccccuacaucugcaccgagggcgaggaccagaucaccgucuggggcuuccacuccgacaacggcacccagauggccaagcucuacggcgacuccaagccccagaaguucaccuccuccgccaacggcgucaccacccacuacgucucccagaucggcggcuuccccaaccagaccgaggacggcggccucccccaguccggccgcaucgucgucgacuacaugguccagaaguccggcaagaccggcaccaucaccuaccagcgcggcauccuccucccccagaaggucuggugcgccuccggccgcuccaaggucaucaagggcucccucccccucaucggcgaggccgacugccuccacgagaaguacggcggccucaacaaguccaagcccuacuacaccggcgagcacgccaaggccaucggcaacugccccaucugggucaagaccccccucaagcucgccaacggcaccaaguaccgcccccccgccaagcuccucaaggagcgcggcuucuucggcgccaucgccggcuuccucgagggcggcugggagggcaugaucgccggcuggcacggcuacaccucccacggcgcccacggcgucgccgucgccgccgaccucaaguccacccaggaggccaucaacaagaucaccaagaaccucaacucccucuccgagcucgaggucaagaaccuccagcgccucuccggcgccauggacgagcuccacaacgagauccucgagcucgacgagaaggucgacgaccuccgcgccgacaccaucuccucccagaucgagcucgccguccuccucuccaacgagggcaucaucaacuccgaggacgagcaccuccucgcccucgagcgcaagcucaagaagaugcucggccccuccgccgucgagaucggcaacggcugcuucgagaccaagcacaagugcaaccagaccugccucgaccgcaucgccgccggcaccuucgacgccggcgaguucucccuccccaccuucgacucccucaacaucaccgccgccucccucaacgacgacggccucgacaaccacaccauccuccucuacuacuccaccgccgccuccucccucgccgucacccucaugaucgccaucuucgucgucuacauggucucccgcgacaacgucuccugcuccaucugccucuga

SEQ ID NO: 123313 - RNA, 1758 nt, Artificial Sequence; identical to SEQ ID NO: 122550
  derived and/or modified CDS sequence (opt2) from hemagglutinin__InfluenzaB__AGX19007

SEQ ID NO: 123314 - RNA, 1758 nt, Artificial Sequence
  derived and/or modified CDS sequence (opt2) from hemagglutinin__InfluenzaB__AGX19018
augaaggccaucaucguccuccucauggucgucaccuccaacgccgaccgcaucugcaccggcaucaccuccuccaacuccccccacgucgucaagaccgccacccagggcgaggucaacgucaccggcgucaucccccucaccaccacccccaccaagucccacuucgccaaccucaagggcaccgagacccgcggcaagcucugccccaagugccucaacugcaccgaccucgacgucgcccucggccgccccaagugcaccggcaacauccccuccgcccgcgucuccauccuccacgagguccgccccgucaccuccggcugcuuccccaucaugcacgaccgcaccaagauccgccagcuccccaacuuccuccgcggcuacgagcacauccgccucuccacccacaacgucaucaacgccgagaacgcccccggcggccccuacaagaucggcaccuccggcuccugccccaacgucaccaacggcaacggcuucuucgccaccauggccugggccguccccaagaacgacaacaacaagaccgccaccaacucccucaccaucgagguccccuacaucugcaccgagggcgaggaccagaucaccgucuggggcuuccacuccgacuccgagacccagauggccaagcucuacggcgacuccaagccccagaaguucaccuccuccgccaacggcgucaccacccacuacgucucccagaucggcggcuuccccaaccagaccgaggacggcggccucccccaguccggccgcaucgucgucgacuacaugguccagaaguccggcaagaccggcaccaucaccuaccagcgcggcauccuccucccccagaaggucuggugcgccuccggccgcuccaaggucaucaagggcucccucccccucaucggcgaggccgacugccuccacgagaaguacggcggccucaacaaguccaagcccuacuacaccggcgagcacgccaaggccaucggcaacugccccaucugggucaagaccccccucaagcucgccaacggcaccaaguaccgcccccccgccaagcuccucaaggagcgcggcuucuucggcgccaucgccggcuuccucgagggcggcugggagggcaugaucgccggcuggcacggcuacaccucccacggcgcccacggcgucgccgucgccgccgaccucaaguccacccaggaggccaucaacaagaucaccaagaaccucaacucccucuccgagcucgaggucaagaaccuccagcgccucuccggcgccauggacgagcuccacaacgagauccucgagcucgacgagaaggucgacgaccuccgcgccgacaccaucuccucccagaucgagcucgccguccuccucuccaacgagggcaucaucaacuccgaggacgagcaccuccucgcccucgagcgcaagcucaagaagaugcucggccccuccgccgucgagaucggcaacggcugcuucgagaccaagcacaagugcaaccagaccugccucgaccgcaucgccgccggcaccuucgacgccggcgaguucucccuccccaccuucgacucccucaacaucaccgccgccucccucaacgacgacggccucgacaaccacaccauccuccucuacuacuccaccgccgccuccucccucgccgucacccucaugaucgccaucuucgucgucuacauggucucccgcgacaacgucuccugcuccaucugccucuga

SEQ ID NO: 123315 - RNA, 1758 nt, Artificial Sequence; identical to SEQ ID NO: 123213
  derived and/or modified CDS sequence (opt2) from hemagglutinin__InfluenzaB__AGX19029

SEQ ID NO: 123316 - RNA, 1758 nt, Artificial Sequence; identical to SEQ ID NO: 122550
  derived and/or modified CDS sequence (opt2) from hemagglutinin__InfluenzaB__AGX19040

SEQ ID NO: 123317 - RNA, 1758 nt, Artificial Sequence
  derived and/or modified CDS sequence (opt2) from hemagglutinin__InfluenzaB__AGX19051
augaaggccaucaucguccuccucauggucgucaccuccaacgccgaccgcaucugcaccggcaucaccuccuccaacuccccccacgucgucaagaccgccacccagggcgaggucaacgucaccggcgucaucccccucaccaccacccccaccaagucccacuucgccaaccucaagggcaccgagacccgcggcaagcucugccccaagugccucaacugcaccgaccucgacgucgcccucggccgccccaagugcaccggcaacauccccuccgcccgcgucuccauccuccacgagguccgccccgucaccuccggcugcuuccccaucaugcacgaccgcaccaagauccgccagcuccccaaccuccuccgcggcuacgagcacauccgccucuccacccacaacgucaucaacaccgagaacgcccccggcggccccuacaagaucggcaccuccggcuccugccccaacgucaccaacggcaacggcuucuucgccaccauggccugggccguccccaagaacgacaacaacaagaccgccaccaacucccucaccaucgagguccccuacaucugcaccgagggcgaggaccagaucaccgucuggggcuuccacuccgacuccgagacccagauggccaagcucuacggcgacuccaagccccagaaguucaccuccuccgccaacggcgucaccacccacuacgucucccagaucggcggcuuccccaaccagaccgaggacggcggccucccccaguccggccgcaucgucgucgacuacaugguccagaaguccggcaagaccggcaccaucaccuaccagcgcggcauccuccucccccagaaggucuggugcgccuccggccgcuccaaggucaucaagggcucccucccccucaucggcgaggccgacugccuccacgagaaguacggcggccucaacaaguccaagcccuacuacaccggcgagcacgccaaggccaucggcaacugccccaucugggucaagaccccccucaagcucgccaacggcaccaaguaccgcccccccgccaagcuccucaaggagcgcggcuucuucggcgccaucgccggcuuccucgagggcggcugggagggcaugaucgccggcuggcacggcuacaccucccacggcgcccacggcgucgccgucgccgccgaccucaaguccacccaggaggccaucaacaagaucaccaagaaccucaacucccucuccgagcucgaggucaagaaccuccagcgccucuccggcgccauggacgagcuccacaacgagauccucgagcucgacgagaaggucgacgaccuccgcgccgacaccaucuccucccagaucgagcucgccguccuccucuccaacgagggcaucaucaacuccgaggacgagcaccuccucgcccucgagcgcaagcucaagaagaugcucggccccuccgccgucgagaucggcaacggcugcuucgagaccaagcacaagugcaaccagaccugccucgaccgcaucgccgccggcaccuucgacgccggcgaguucucccuccccaccuucgacucccucaacaucaccgccgccucccucaacgacgacggccucgacaaccacaccauccuccucuacuacuccaccgccgccuccucccucgccgucacccucaugaucgccaucuucgucgucuacauggucucccgcgacaacgucuccugcuccaucugccucuga

SEQ ID NO: 123318 - RNA, 1758 nt, Artificial Sequence
  derived and/or modified CDS sequence (opt2) from hemagglutinin__InfluenzaB__AGX19062
augaaggccaucaucguccuccucauggucgucaccuccaacgccgaccgcaucugcaccggcaucaccuccuccaacuccccccacgucgucaagaccgccacccagggcgaggucaacgucaccggcgucaucccccucaccaccacccccaccaagucccacuucgccaaccucaagggcaccgagacccgcggcaagcucugccccaagugccucaacugcaccgaccucgacgucgcccucggccgccccaagugcaccggcaacauccccuccgcccgcgucuccauccuccacgagguccgccccgucaccuccggcugcuuccccaucaugcacgaccgcaccaagauccgccagcuccccaaccuccuccgcggcuacgagcacauccgccucuccacccacaacgucaucaacgccgagaacgcccccggcggccccuacaagaucggcaccuccggcuccugccccaacgucaccaacggcaacggcuucuucgccaccauggccugggccguccccaagaacgacaacaacaagaccgccaccaacucccucaccaucgagguccccuacaucugcaccgagggcgaggaccagaucaccgucuggggcuuccacuccgacaacgagacccagauggccaagcucuacggcgacuccaagccccagaaguucaccuccuccgccaacggcgucaccacccacuacgucucccagaucggcggcuuccccaaccagaccgaggacggcggccucccccaguccggccgcaucgucgucgacuacaugguccagaaguccggcaagaccggcaccaucaccuaccagcgcggcauccuccucccccagaaggucuggugcgccuccggccgcuccaaggucaucaagggcucccucccccucaucggcgaggccgacugccuccacgagaaguacggcggccucaacaaguccaagcccuacuacaccggcgagcacgccaaggccaucggcaacugccccaucugggucaagaccccccucaagcucgccaacggcaccaaguaccgcccccccgccaagcuccucaaggagcgcggcuucuucggcgccaucgccggcuuccucgagggcggcugggagggcaugaucgccggcuggcacggcuacaccucccacggcgcccacggcgucgccgucgccgccgaccucaaguccacccaggaggccaucaacaagaucaccaagaacuucaacucccucuccgagcucgaggucaagaaccuccagcgccucuccggcgccauggacgagcuccacaacgagauccucgagcucgacgagaaggucgacgaccuccgcgccgacaccaucuccucccagaucgagcucgccguccuccucuccaacgagggcaucaucaacuccgaggacgagcaccuccucgcccucgagcgcaagcucaagaagaugcucggccccuccgccgucgagaucggcaacggcugcuucgagaccaagcacaagugcaaccagaccugccucgaccgcaucgccgccggcaccuucgacgccggcgaguucucccuccccaccuucgacucccucaacaucaccgccgccucccucaacgacgacggccucgacaaccacaccauccuccucuacuacuccaccgccgccuccucccucgccgucacccucaugaucgccaucuucgucgucuacauggucucccgcgacaacgucuccugcuccaucugccucuga

SEQ ID NO: 123319 - RNA, 1758 nt, Artificial Sequence; identical to SEQ ID NO: 122550
  derived and/or modified CDS sequence (opt2) from hemagglutinin__InfluenzaB__AGX19073

SEQ ID NO: 123320 - RNA, 1758 nt, Artificial Sequence
  derived and/or modified CDS sequence (opt2) from hemagglutinin__InfluenzaB__AGX19084
augaaggccaucaucguccuccucauggucgucaccuccaacgccgaccgcaucugcaccggcaucaccuccuccaacuccccccacgucgucaagaccgccacccagggcgaggucaacgucaccggcgucaucccccucaccaccacccccaccaagucccacuucgccaaccucaagggcaccgagacccgcggcaagcucugccccaagugccucaacugcaccgaccucgacgucgcccucggccgccccaagugcaccggcaacauccccuccgcccgcgucuccauccuccacgagguccgccccgucaccuccggcugcuuccccaucaugcacgaccgcaccaagauccgccagcuccccaaccuccuccgcggcuacgagcacaucaagcucuccacccacaacgucaucaacgccgagaacgcccccggcggccccuacaagaucggcaccuccggcuccugccccaacgucaccaacggcaacggcuucuucgccaccauggccugggccguccccaagaacgacaacaacaagaccgccaccaacucccucaccaucgagguccccuacaucugcaccgagggcgaggaccagaucaccgucuggggcuuccacuccgacaacgagaaccagauggccaagcucuacggcgacuccaagccccagaaguucaccuccuccgccaacggcgucaccacccacuacgucucccagaucggcggcuuccccaaccagaccgaggacggcggccucccccaguccggccgcaucgucgucgacuacaugguccagaaguccggcaagaccggcaccaucaccuaccagcgcggcauccuccucccccagaaggucuggugcgccuccggccgcuccaaggucaucaagggcucccucccccucaucggcgaggccgacugccuccacgagaaguacggcggccucaacaaguccaagcccuacuacaccggcgagcacgccaaggccaucggcaacugccccaucugggucaagaccccccucaagcucgccaacggcaccaaguaccgcccccccgccaagcuccucaaggagcgcggcuucuucggcgccaucgccggcuuccucgagggcggcugggagggcaugaucgccggcuggcacggcuacaccucccacggcgcccacggcgucgccgucgccgccgaccucaaguccacccaggaggccaucaacaagaucaccaagaaccucaacucccucuccgagcucgaggucaagaaccuccagcgccucuccggcgccauggacgagcuccacaacgagauccucgagcucgacgagaaggucgacgaccuccgcgccgacaccaucuccucccagaucgagcucgccguccuccucuccaacgagggcaucaucaacuccgaggacgagcaccuccucgcccucgagcgcaagcucaagaagaugcucggccccuccgccgucgagaucggcaacggcugcuucgagaccaagcacaagugcaaccagaccugccucgaccgcaucgccgccggcaccuucgacgccggcgaguucucccuccccaccuucgacucccucaacaucaccgccgccucccucaacgacgacggccucgacaaccacaccauccuccucuacuacuccaccgccgccuccucccucgccgucacccucaugaucgccaucuucgucgucuacauggucucccgcgacaacgucuccugcuccaucugccucuga

SEQ ID NO: 123321 - RNA, 1758 nt, Artificial Sequence; identical to SEQ ID NO: 122550
  derived and/or modified CDS sequence (opt2) from hemagglutinin__InfluenzaB__AGX19095

SEQ ID NO: 123322 - RNA, 1758 nt, Artificial Sequence; identical to SEQ ID NO: 123213
  derived and/or modified CDS sequence (opt2) from hemagglutinin__InfluenzaB__AGX19106

SEQ ID NO: 123323 - RNA, 1758 nt, Artificial Sequence; identical to SEQ ID NO: 122550
  derived and/or modified CDS sequence (opt2) from hemagglutinin__InfluenzaB__AGX19117

SEQ ID NO: 123324 - RNA, 1758 nt, Artificial Sequence
  derived and/or modified CDS sequence (opt2) from hemagglutinin__InfluenzaB__AGX19128
augaaggccaucaucguccuccucauggucgucaccuccaacgccgaccgcaucugcaccggcaucaccuccuccaacuccccccacgucgucaagaccgccacccagggcgaggucaacgucaccggcgucaucccccucaccaccacccccaccaagucccacuucgccaaccucaagggcaccgagacccgcggcaagcucugccccaagugccucaacugcaccgaccucgacgucgcccucggccgccccaagugcaccggcaacacccccuccgcccgcgucuccauccuccacgagguccgccccgucaccuccggcugcuuccccaucaugcacgaccgcaccaagauccgccagcuccccaaccuccuccgcggcuacgagcacauccgccucuccacccacaacgucaucaacgccgagaacgcccccggcggccccuacaagaucggcaccuccggcuccugccccaacgucaccaacggcaacggcuucuucgccaccauggccugggccguccccaagaacgacaacaacaagaccgccaccaacucccucaccaucgagguccccuacaucugcaccgagggcgaggaccagaucaccgucuggggcuuccacuccgacuccgagacccagauggccaagcucuacggcgacuccaagccccagaaguucaccuccuccgccaacggcgucaccacccacuacgucucccagaucggcggcuuccccaaccagaccgaggacggcggccucccccaguccggccgcaucgucgucgacuacaugguccagaaguccggcaagaccggcaccaucaccuaccagcgcggcauccuccucccccagaaggucuggugcgccuccggccgcuccaaggucaucaagggcucccucccccucaucggcgaggccgacugccuccacgagaaguacggcggccucaacaaguccaagcccuacuacaccggcgagcacgccaaggccaucggcaacugccccaucugggucaagaccccccucaagcucgccaacggcaccaaguaccgcccccccgccaagcuccucaaggagcgcggcuucuucggcgccaucgccggcuuccucgagggcggcugggagggcaugaucgccggcuggcacggcuacaccucccacggcgcccacggcgucgccgucgccgccgaccucaaguccacccaggaggccaucaacaagaucaccaagaaccucaacucccucuccgagcucgaggucaagaaccuccagcgccucuccggcgccauggacgagcuccacaacgagauccucgagcucgacgagaaggucgacgaccuccgcgccgacaccaucuccucccagaucgagcucgccguccuccucuccaacgagggcaucaucaacuccgaggacgagcaccuccucgcccucgagcgcaagcucaagaagaugcucggccccuccgccgucgagaucggcaacggcugcuucgagaccaagcacaagugcaaccagaccugccucgaccgcaucgccgccggcaccuucgacgccggcgaguucucccuccccaccuucgacucccucaacaucaccgccgccucccucaacgacgacggccucgacaaccacaccauccuccucuacuacuccaccgccgccuccucccucgccgucacccucaugaucgccaucuucgucgucuacauggucucccgcgacaacgucuccugcuccaucugccucuga

SEQ ID NO: 123325 - RNA, 1758 nt, Artificial Sequence; identical to SEQ ID NO: 122550
  derived and/or modified CDS sequence (opt2) from hemagglutinin__InfluenzaB__AGX19139

SEQ ID NO: 123326 - RNA, 1758 nt, Artificial Sequence; identical to SEQ ID NO: 123023
  derived and/or modified CDS sequence (opt2) from hemagglutinin__InfluenzaB__AGX19150

SEQ ID NO: 123327 - RNA, 1758 nt, Artificial Sequence; identical to SEQ ID NO: 122550
  derived and/or modified CDS sequence (opt2) from hemagglutinin__InfluenzaB__AGX19161

SEQ ID NO: 123328 - RNA, 1758 nt, Artificial Sequence; identical to SEQ ID NO: 123023
  derived and/or modified CDS sequence (opt2) from hemagglutinin__InfluenzaB__AGX19172

SEQ ID NO: 123329 - RNA, 1758 nt, Artificial Sequence
  derived and/or modified CDS sequence (opt2) from hemagglutinin__InfluenzaB__AGX19183
augaaggccaucaucguccuccucauggucgucaccuccaacgccgaccgcaucugcaccggcaucaccuccuccaacuccccccacgucgucaagaccgccacccagggcgaggucaacgucaccggcgucaucccccucaccaccacccccaccaagucccacuucgccaaccucaagggcaccgagacccgcggcaagcucugccccaagugccucaacugcaccgaccucgacgucgcccucggccgccccaagugcaccggcaacauccccuccgcccgcgucuccauccuccacgagguccgccccgucaccuccggcugcuuccccaucaugcacgaccgcaccaagauccgccagcuccccaaccuccuccgcggcuacgagcacauccgccucuccacccacaacgucaucaacgccgagaacgcccccggcggccccuacaagaucggcaccuccggcuccugccccaacgucaccaacggcaacggcuucuucgccaccauggccugggccguccccaagaacgacaacaacaagaccgccaccaacucccucaccaucgagguccccuacaucugcaccgagggcgaggaccagaucaccgucuggggcuuccacuccgacaccgagacccagauggccaagcucuacggcgacuccaagccccagaaguucaccuccuccgccaacggcgucaccacccacuacgucucccagaucggcggcuuccccaaccagaccgaggacggcggccucccccaguccggccgcaucgucgucgacuacaugguccagaaguccggcaagaccggcaccaucaccuaccagcgcggcauccuccucccccagaaggucuggugcgccuccggccgcuccaaggucaucaagggcucccucccccucaucggcgaggccgacugccuccacgagaaguacggcggccucaacaaguccaagcccuacuacaccggcgagcacgccaaggccaucggcaacugccccaucugggucaagaccccccucaagcucgccaacggcaccaaguaccgcccccccgccaagcuccucaaggagcgcggcuucuucggcgccaucgccggcuuccucgagggcggcugggagggcaugaucgccggcuggcacggcuacaccucccacggcgcccacggcgucgccgucgccgccgaccucaaguccacccaggaggccaucaacaagaucaccaagaaccucaacucccucuccgagcucgaggucaagaaccuccagcgccucuccggcgccauggacgagcuccacaacgagauccucgagcucgacgagaaggucgacgaccuccgcgccgacaccaucuccucccagaucgagcucgccguccuccucuccaacgagggcaucaucaacuccgaggacgagcaccuccucgcccucgagcgcaagcucaagaagaugcucggccccuccgccgucgagaucggcaacggcugcuucgagaccaagcacaagugcaaccagaccugccucgaccgcaucgccgccggcaccuucgacgccggcgaguucucccuccccaccuucgacucccucaacaucaccgccgccucccucaacgacgacggccucgacaaccacaccauccuccucuacuacuccaccgccgccuccucccucgccgucacccucaugaucgccaucuucgucgucuacauggucucccgcgacaacgucuccugcuccaucugccucuga

SEQ ID NO: 123330 - RNA, 1758 nt, Artificial Sequence; identical to SEQ ID NO: 122550
  derived and/or modified CDS sequence (opt2) from hemagglutinin__InfluenzaB__AGX19194

SEQ ID NO: 123331 - RNA, 1758 nt, Artificial Sequence
  derived and/or modified CDS sequence (opt2) from hemagglutinin__InfluenzaB__AGX19205
augaaggccaucaucguccuccucauggucgucaccuccaacgccgaccgcgucugcaccggcaucaccuccuccaacuccccccacgucgucaagaccgccacccagggcgaggucaacgucaccggcgucaucccccucaccaccacccccaccaagucccacuucgccaaccucaagggcaccgagacccgcggcaagcucugccccaagugccucaacugcaccgaccucgacgucgcccucggccgccccaagugcaccggcaacauccccuccgcccgcgucuccauccuccacgagguccgccccgucaccuccggcugcuuccccaucaugcacgaccgcaccaagauccgccagcuccccaaccuccuccgcggcuacgagcacauccgccucuccacccacaacgucaucaacgccgagaacgcccccggcggccccuacaagaucggcaccuccggcuccugccccaacgucaccaacggcaacggcuucuucgccaccauggccugggccguccccaagaacgacaacaacaagaccgccaccaacucccucaccaucgagguccccuacaucugcaccgagggcgaggaccagaucaccgucuggggcuuccacuccgacaacgagacccagauggccaagcucuacggcgacuccaagccccagaaguucaccuccuccgccaacggcgucaccacccacuacgucucccagaucggcggcuuccccaaccagaccgaggacggcggccucccccaguccggccgcaucgucgucgacuacaugguccagaaguccggcaagaccggcaccaucaccuaccagcgcggcauccuccucccccagaaggucuggugcgccuccggccgcuccaaggucaucaagggcucccucccccucaucggcgaggccgacugccuccacgagaaguacggcggccucaacaaguccaagcccuacuacaccggcgagcacgccaaggccaucggcaacugccccaucugggucaagaccccccucaagcucgccaacggcaccaaguaccgcccccccgccaagcuccucaaggagcgcggcuucuucggcgccaucgccggcuuccucgagggcggcugggagggcaugaucgccggcuggcacggcuacaccucccacggcgcccacggcgucgccgucgccgccgaccucaaguccacccaggaggccaucaacaagaucaccaagaaccucaacucccucuccgagcucgaggucaagaaccuccagcgccucuccggcgccauggacgagcuccacaacgagauccucgagcucgacgagaaggucgacgaccuccgcgccgacaccaucuccucccagaucgagcucgccguccuccucuccaacgagggcaucaucaacuccgaggacgagcaccuccucgcccucgagcgcaagcucaagaagaugcucggccccuccgccgucgagaucggcaacggcugcuucgagaccaagcacaagugcaaccagaccugccucgaccgcaucgccgccggcaccuucgacgccggcgaguucucccuccccaccuucgacucccucaacaucaccgccgccucccucaacgacgacggccucgacaaccacaccauccuccucuacuacuccaccgccgccuccucccucgccgucacccucaugaucgccaucuucgucgucuacauggucucccgcgacaacgucuccugcuccaucugccucuga

SEQ ID NO: 123332 - RNA, 1758 nt, Artificial Sequence
  derived and/or modified CDS sequence (opt2) from hemagglutinin__InfluenzaB__AGX19216
augaaggccaucaucguccuccucauggucgucaccuccaacgccgaccgcaucugcaccggcaucaccuccuccaacuccccccacgucgucaagaccgccacccagggcgaggucaacgucaccggcgucaucccccucaccaccacccccaccaagucccacuucgccaaccucaagggcaccgagacccgcggcaagcucugccccaagugccucaacugcaccgaccucgacgucgcccucggccgccccaagugcaccggcaacauccccuccgcccgcgucuccauccuccacgagguccgccccgucaccuccggcugcuuccccaucaugcacgaccgcaccaagauccgccagcuccccaaccuccuccgcggcuacgagcacauccgccucuccacccacaacgucaucaacgccgagaacgcccccggcggccccuacaagaucggcaccuccggcuccugccccaacgucaccaacggcaacggcuucuucgccaccauggccugggccguccccaagaacgacaacaacaagaccgccaccaacucccucaccaucgagguccccuacaucugcaccgagggcgaggaccagaucaccgucuggggcuuccacuccgacaacgagacccagauggccaagcucuacggcgacuccaagccccagaaguucaccuccuccgccaacggcgucaccacccacuacgucucccagaucggcggcuuccccaaccagaccgaggacggcggccucccccaguccggccgcaucgucgucgacuacaugguccagaaguccggcaagcccggcaccaucaccuaccagcgcggcauccuccucccccagaaggucuggugcgccuccggccgcuccaaggucaucaagggcucccucccccucaucggcgaggccgacugccuccacgagaaguacggcggccucaacaaguccaagcccuacuacaccggcgagcacgccaaggccaucggcaacugccccaucugggucaagaccccccucaagcucgccaacggcaccaaguaccgcccccccgccaagcuccucaaggagcgcggcuucuucggcgccaucgccggcuuccucgagggcggcugggagggcaugaucgccggcuggcacggcuacaccucccacggcgcccacggcgucgccgucgccgccgaccucaaguccacccaggaggccaucaacaagaucaccaagaaccucaacucccucuccgagcucgaggucaagaaccuccagcgccucuccggcgccauggacgagcuccacaacgagauccucgagcucgacgagaaggucgacgaccuccgcgccgacaccaucuccucccagaucgagcucgccguccuccucuccaacgagggcaucaucaacuccgaggacgagcaccuccucgcccucgagcgcaagcucaagaagaugcucggccccuccgccgucgagaucggcaacggcugcuucgagaccaagcacaagugcaaccagaccugccucgaccgcaucgccgccggcaccuucgacgccggcgaguucucccuccccaccuucgacucccucaacaucaccgccgccucccucaacgacgacggccucgacaaccacaccauccuccucuacuacuccaccgccgccuccucccucgccgucacccucaugaucgccaucuucgucgucuacauggucucccgcgacaacgucuccugcuccaucugccucuga

SEQ ID NO: 123333 - RNA, 1758 nt, Artificial Sequence
  derived and/or modified CDS sequence (opt2) from hemagglutinin__InfluenzaB__AGX19227
augaaggccaucaucguccuccucauggucgucaccuccaacgccgaccgcaucugcaccggcaucaccuccuccaacuccccccacgucgucaagaccgccacccagggcgaggucaacgucaccggcgucaucccccucaccaccacccccaccaagucccacuucgccaaccucaagggcaccgagacccgcggcaagcucugcccccagugccucaacugcaccgaccucgacgucgcccucggccgccccaagugcaccggcaacauccccuccgcccgcgucuccauccuccacgagguccgccccgucaccuccggcugcuuccccaucaugcacgaccgcaccaagauccgccagcuccccaaccuccuccgcggcuacgagcacauccgccucuccacccacaacgucaucaacgccgagaacgcccccggcggccccuacaagaucggcaccuccggcuccugccccaacgucaccaacggcaacggcuucuucgccaccauggccugggccguccccaaguccgacaacaacaagaccgccaccaacucccucaccaucgagguccccuacaucugcaccgagggcgaggaccagaucaccgucuggggcuuccacuccgacaacgagacccagauggccaagcucuacggcgacuccaagccccagaaguucaccuccuccgccaacggcgucaccacccacuacgucucccagaucggcggcuuccccaaccagaccgaggacggcggccucccccaguccggccgcaucgucgucgacuacaugguccagaaguccggcaagaccggcaccaucaccuaccagcgcggcauccuccucccccagaaggucuggugcgccuccggccgcuccaaggucaucaagggcucccucccccucaucggcgaggccgacugccuccacgagaaguacggcggccucaacaaguccaagcccuacuacaccggcgagcacgccaaggccaucggcaacugccccaucugggucaagaccccccucaagcucgccaacggcaccaaguaccgcccccccgccaagcuccucaaggagcgcggcuucuucggcgccaucgccggcuuccucgagggcggcugggagggcaugaucgccggcuggcacggcuacaccucccacggcgcccacggcgucgccgucgccgccgaccucaaguccacccaggaggccaucaacaagaucaccaagaaccucaacucccucuccgagcucgaggucaagaaccuccagcgccucuccggcgccauggacgagcuccacaacgagauccucgagcucgacgagaaggucgacgaccuccgcgccgacaccaucuccucccagaucgagcucgccguccuccucuccaacgagggcaucaucaacuccgaggacgagcaccuccucgcccucgagcgcaagcucaagaagaugcucggccccuccgccgucgagaucggcaacggcugcuucgagaccaagcacaagugcaaccagaccugccucgaccgcaucgccgccggcaccuucgacgccggcgaguucucccuccccaccuucgacucccucaacaucaccgccgccucccucaacgacgacggccucgacaaccacaccauccuccucuacuacuccaccgccgccuccucccucgccgucacccucaugaucgccaucuucgucgucuacauggucucccgcgacaacgucuccugcuccaucugccucuga

SEQ ID NO: 123334 - RNA, 1758 nt, Artificial Sequence
  derived and/or modified CDS sequence (opt2) from hemagglutinin__InfluenzaB__AGX19238
augaaggccaucaucguccuccucauggucgucaccuccaacgccgaccgcaucugcaccggcaucaccuccuccaacuccccccacgucgucaagaccgccacccagggcgaggucaacgucaccggcgucaucccccucaccaccacccccaccaagucccacuucgccaaccucaagggcaccgagacccgcggcaagcucugccccaagugccucaacugcaccgaccucgacgucgcccucggccgccccaagugcaccggcaacauccccuccgcccgcgucuccauccuccacgagguccgccccgucaccuccggcugcuuccccaucaugcacgaccgcaccaagauccgccagcuccccaaccuccuccgcggcuacgagcacauccgccucuccacccacaacgucaucaacgccgagaacgcccccggcggccccuacaagaucggcaccuccggcuccugccccaacgucaccaacggcaacggcuucuucgccaccauggccugggccguccccaagaacgacaagaacaagaccgccaccaacucccucaccaucgagguccccuacaucugcaccgagggcgaggaccagaucaccgucuggggcuuccacuccgacaacgagacccagauggccaagcucuacggcgacuccaagccccagaaguucaccuccuccgccaacggcgucaccacccacuacgucucccagaucggcggcuuccccaaccagaccgaggacggcggccucccccaguccggccgcaucgucgucgacuacaugguccagaaguccggcaagaccggcaccaucaccuaccagcgcggcauccuccucccccagaaggucuggugcgccuccggccgcuccaaggucaucaagggcucccucccccucaucggcgaggccgacugccuccacgagaaguacggcggccucaacaaguccaagcccuacuacaccggcgagcacgccaaggccaucggcaacugccccaucugggucaagaccccccucaagcucgccaacggcaccaaguaccgcccccccgccaagcuccucaaggagcgcggcuucuucggcgccaucgccggcuuccucgagggcggcugggagggcaugaucgccggcuggcacggcuacaccucccacggcgcccacggcgucgccgucgccgccgaccucaaguccacccaggaggccaucaacaagaucaccaagaaccucaacucccucuccgagcucgaggucaagaaccuccagcgccucuccggcgccauggacgagcuccacaacgagauccucgagcucgacgagaaggucgacgaccuccgcgccgacaccaucuccucccagaucgagcucgccguccuccucuccaacgagggcaucaucaacuccgaggacgagcaccuccucgcccucgagcgcaagcucaagaagaugcucggccccuccgccgucgagaucggcaacggcugcuucgagaccaagcacaagugcaaccagaccugccucgaccgcaucgccgccggcaccuucgacgccggcgaguucucccuccccaccuucgacucccucaacaucaccgccgccucccucaacgacgacggccucgacaaccacaccauccuccucuacuacuccaccgccgccuccucccucgccgucacccucaugaucgccaucuucgucgucuacauggucucccgcgacaacgucuccugcuccaucugccucuga

SEQ ID NO: 123335 - RNA, 1758 nt, Artificial Sequence; identical to SEQ ID NO: 123334
  derived and/or modified CDS sequence (opt2) from hemagglutinin__InfluenzaB__AGX19249

SEQ ID NO: 123336 - RNA, 1758 nt, Artificial Sequence; identical to SEQ ID NO: 122550
  derived and/or modified CDS sequence (opt2) from hemagglutinin__InfluenzaB__AGX19260

SEQ ID NO: 123337 - RNA, 1758 nt, Artificial Sequence; identical to SEQ ID NO: 122550
  derived and/or modified CDS sequence (opt2) from hemagglutinin__InfluenzaB__AGX19271

SEQ ID NO: 123338 - RNA, 1758 nt, Artificial Sequence
  derived and/or modified CDS sequence (opt2) from hemagglutinin__InfluenzaB__AGX19282
augaaggccaucaucguccuccucauggucgucaccuccaacgccgaccgcaucugcaccggcaucaccuccuccaacuccccccacgucgucaagaccgccacccagggcgaggucaacgucaccggcgucaucccccucaccaccacccccaccaagucccacuucgccaaccucaagggcaccgagacccgcggcaagcucugccccaagugccucaacugcaccgaccucgacgucgcccucggccgccccaagugcaccggcaacauccccuccgcccgcgucuccauccuccacgagguccgccccgucaccuccggcugcuuccccaucaugcacgaccgcaccaagauccgccagcuccccaaccuccuccgcggcuacgagcacauccgccucuccacccacaacgucaucaacgccgagaacgcccccggcggccccuacaagaucggcaccuccggcuccugccccaacgucaccaacggcaacggcuucuucgccaccauggccugggccguccccaagaacgacaacaacaagaccgccaccaacucccucaccaucgagguccccuacaucugcaccgagggcgaggaccagaucaccgucuggggcuuccacuccgacaacgagacccagauggccaagcucuacggcgacuccaagccccagaaguucaccuccuccgccaacggcgucaccacccacuacgucucccagaucggcggcuuccccaaccagaccgaggacggcggccucccccaguccggccgcaucgucgucgacuacaugguccagaaguccggcaagaccggcaccaucaccuaccagcgcggcauccuccucccccagaaggucuggugcaccuccggccgcuccaaggucaucaagggcucccucccccucaucggcgaggccgacugccuccacgagaaguacggcggccucaacaaguccaagcccuacuacaccggcgagcacgccaaggccaucggcaacugccccaucugggucaagaccccccucaagcucgccaacggcaccaaguaccgcccccccgccaagcuccucaaggagcgcggcuucuucggcgccaucgccggcuuccucgagggcggcugggagggcaugaucgccggcuggcacggcuacaccucccacggcgcccacggcgucgccgucgccgccgaccucaaguccacccaggaggccaucaacaagaucaccaagaaccucaacucccucuccgagcucgaggucaagaaccuccagcgccucuccggcgccauggacgagcuccacaacgagauccucgagcucgacgagaaggucgacgaccuccgcgccgacaccaucuccucccagaucgagcucgccguccuccucuccaacgagggcaucaucaacuccgaggacgagcaccuccucgcccucgagcgcaagcucaagaagaugcucggccccuccgccgucgagaucggcaacggcugcuucgagaccaagcacaagugcaaccagaccugccucgaccgcaucgccgccggcaccuucgacgccggcgaguucucccuccccaccuucgacucccucaacaucaccgccgccucccucaacgacgacggccucgacaaccacaccauccuccucuacuacuccaccgccgccuccucccucgccgucacccucaugaucgccaucuucgucgucuacauggucucccgcgacaacgucuccugcuccaucugccucuga

SEQ ID NO: 123339 - RNA, 1758 nt, Artificial Sequence
  derived and/or modified CDS sequence (opt2) from hemagglutinin__InfluenzaB__AGX19304
augaaggccaucaucguccuccucauggucgucaccuccaacgccgaccgcaucugcaccggcaucaccuccuccaacuccccccacgucgucaagaccgccacccagggcgaggucaacgucaccggcgucaucccccucaccaccacccccaccaagucccacuucgccaaccucaagggcaccgagacccgcggcaagcucugccccaagugccucaacugcaccgaccucgacgucgcccucggccgccccaagugcaccggcaacauccccuccgcccgcgucuccauccuccacgagguccgccccgucaccuccggcugcuuccccaucaugcacgaccgcaccaagauccgccagcuccccaaccuccuccgcggcuacgagcacauccgccucuccacccacaacgucaucaacgccgagaacgcccccggcggccccuacaagaucggcaccuccggcuccugccccaacgucaccaacggcaacggcuucuucgccaccauggccugggccguccccaagaacgacaacaacaagaccgccaucaacucccucaccaucgagguccccuacaucugcaccgagggcgaggaccagaucaccgucuggggcuuccacuccgacaacgagacccagauggccaagcucuacggcgacuccaagccccagaaguucaccuccuccgccaacggcgucaccacccacuacgucucccagaucggcggcuuccccaaccagaccgaggacggcggccucccccaguccggccgcaucgucgucgacuacaugguccagaaguccggcaagaccggcaccaucaccuaccagcgcggcauccuccucccccagaaggucuggugcgccuccggccgcuccaaggucaucaagggcucccucccccucaucggcgaggccgacugccuccacgagaaguacggcggccucaacaaguccaagcccuacuacaccggcgagcacgccaaggccaucggcaacugccccaucugggucaagaccccccucaagcucgccaacggcaccaaguaccgcccccccgccaagcuccucaaggagcgcggcuucuucggcgccaucgccggcuuccucgagggcggcugggagggcaugaucgccggcuggcacggcuacaccucccacggcgcccacggcgucgccgucgccgccgaccucaaguccacccaggaggccaucaacaagaucaccaagaaccucaacucccucuccgagcucgaggucaagaaccuccagcgccucuccggcgccauggacgagcuccacaacgagauccucgagcucgacgagaaggucgacgaccuccgcgccgacaccaucuccucccagaucgagcucgccguccuccucuccaacgagggcaucaucaacuccgaggacgagcaccuccucgcccucgagcgcaagcucaagaagaugcucggccccuccgccgucgagaucggcaacggcugcuucgagaccaagcacaagugcaaccagaccugccucgaccgcaucgccgccggcaccuucgacgccggcgaguucucccuccccaccuucgacucccucaacaucaccgccgccucccucaacgacgacggccucgacaaccacaccauccuccucuacuacuccaccgccgccuccucccucgccgucacccucaugaucgccaucuucgucgucuacauggucucccgcgacaacgucuccugcuccaucugccucuga

SEQ ID NO: 123340 - RNA, 1758 nt, Artificial Sequence; identical to SEQ ID NO: 123339
  derived and/or modified CDS sequence (opt2) from hemagglutinin__InfluenzaB__AGX19315

SEQ ID NO: 123341 - RNA, 1758 nt, Artificial Sequence; identical to SEQ ID NO: 123338
  derived and/or modified CDS sequence (opt2) from hemagglutinin__InfluenzaB__AGX19326

SEQ ID NO: 123342 - RNA, 1758 nt, Artificial Sequence; identical to SEQ ID NO: 123338
  derived and/or modified CDS sequence (opt2) from hemagglutinin__InfluenzaB__AGX19337

SEQ ID NO: 123343 - RNA, 1758 nt, Artificial Sequence
  derived and/or modified CDS sequence (opt2) from hemagglutinin__InfluenzaB__AGX19348
augaaggccaucaucguccuccucauggucgucaccuccaacgccgaccgcaucugcaccggcaucaccuccuccaacuccccccacgucgucaagaccgccacccagggcgaggucaacgucaccggcgucaucccccucaccaccacccccaccaagucccacuucgccaaccucaagggcaccgagacccgcggcaagcucugccccaagugccucaacugcaccgaccucgacgucgcccucggccgccccaagugcaccggcaacauccccuccgcccgcgucuccauccuccacgagguccgccccgucaccuccggcugcuuccccaucaugcacgaccgcaccaagauccgccagcuccccaaccuccuccgcggcuacgagcacauccgccucuccacccacaacgucaucaacgccgagaacgcccccggcggccccuacaagaucggcaccuccggcuccugccccaacgucaccaacggcaacggcuucuucgccaccauggccugggccguccccaagaacgacaacaacaagaccgccaccaacucccucaccaucgagguccccuacaucugcaccgagggcgaggaccagaucaccgucuggggcuuccacuccgacaacgaggcccagauggccaagcucuacggcgacuccaagccccagaaguucaccuccuccgccaacggcgucaccacccacuacgucucccagaucggcggcuuccccaaccagaccgaggacggcggccucccccaguccggccgcaucgucgucgacuacaugguccagaaguccggcaagaccggcaccaucaccuaccagcgcggcauccuccucccccagaaggucuggugcaccuccggccgcuccaaggucaucaagggcucccucccccucaucggcgaggccgacugccuccacgagaaguacggcggccucaacaaguccaagcccuacuacaccggcgagcacgccaaggccaucggcaacugccccaucugggucaagaccccccucaagcucgccaacggcaccaaguaccgcccccccgccaagcuccucaaggagcgcggcuucuucggcgccaucgccggcuuccucgagggcggcugggagggcaugaucgccggcuggcacggcuacaccucccacggcgcccacggcgucgccgucgccgccgaccucaaguccacccaggaggccaucaacaagaucaccaagaaccucaacucccucuccgagcucgaggucaagaaccuccagcgccucuccggcgccauggacgagcuccacaacgagauccucgagcucgacgagaaggucgacgaccuccgcgccgacaccaucuccucccagaucgagcucgccguccuccucuccaacgagggcaucaucaacuccgaggacgagcaccuccucgcccucgagcgcaagcucaagaagaugcucggccccuccgccgucgagaucggcaacggcugcuucgagaccaagcacaagugcaaccagaccugccucgaccgcaucgccgccggcaccuucgacgccggcgaguucucccuccccaccuucgacucccucaacaucaccgccgccucccucaacgacgacggccucgacaaccacaccauccuccucuacuacuccaccgccgccuccucccucgccgucacccucaugaucgccaucuucgucgucuacauggucucccgcgacaacgucuccugcuccaucugccucuga

SEQ ID NO: 123344 - RNA, 1758 nt, Artificial Sequence; identical to SEQ ID NO: 123338
  derived and/or modified CDS sequence (opt2) from hemagglutinin__InfluenzaB__AGX19359

SEQ ID NO: 123345 - RNA, 1755 nt, Artificial Sequence; identical to SEQ ID NO: 122767
  derived and/or modified CDS sequence (opt2) from hemagglutinin__InfluenzaB__AGX19370

SEQ ID NO: 123346 - RNA, 1758 nt, Artificial Sequence; identical to SEQ ID NO: 122601
  derived and/or modified CDS sequence (opt2) from hemagglutinin__InfluenzaB__AGX19381

SEQ ID NO: 123347 - RNA, 1758 nt, Artificial Sequence; identical to SEQ ID NO: 123338
  derived and/or modified CDS sequence (opt2) from hemagglutinin__InfluenzaB__AGX19392

SEQ ID NO: 123348 - RNA, 1758 nt, Artificial Sequence; identical to SEQ ID NO: 123338
  derived and/or modified CDS sequence (opt2) from hemagglutinin__InfluenzaB__AGX19403

SEQ ID NO: 123349 - RNA, 1758 nt, Artificial Sequence; identical to SEQ ID NO: 123025
  derived and/or modified CDS sequence (opt2) from hemagglutinin__InfluenzaB__AGX19414

SEQ ID NO: 123350 - RNA, 1755 nt, Artificial Sequence
  derived and/or modified CDS sequence (opt2) from hemagglutinin__InfluenzaB__AGX19425
augaagaccaucaucguccuccucauggucgucaccuccaacgccgaccgcaucugcaccggcaucaccuccuccaacuccccccacgucgucaagaccgccacccagggcgaggucaacgucaccggcgucaucccccucaccaccacccccaccaaguccuacuucgccaaccucaagggcacccgcacccgcggcaagcucugccccgacugccucaacugcaccgaccucgacgucgcccucggccgccccaugugcgucggcaccacccccuccgccaaggccuccauccuccacgagguccgccccgucaccuccggcugcuuccccaucaugcacgaccgcaccaagauccgccagcuccccaaccuccuccgcggcuacgagaacauccgccucuccacccagaacgucaucgacgccgagaaggcccccggcggccccuaccgccucggcaccuccggcuccugccccaacgccaccuccaaguccggcuucuucgccaccauggccugggccguccccaaggacaacaacaagaacgccaccaacccccucaccgucgagguccccuacaucugcaccgagggcgaggaccagaucaccgucuggggcuuccacuccgacaacaagacccagaugcgcaaccucuacggcgacuccaacccccagaaguucaccuccuccgccaacggcgucaccacccacuacgucucccagaucggcuccuuccccgaccagaccgaggacggcggccucccccaguccggccgcaucgucgucgacuacaugaugcagaagcccggcaagaccggcaccaucgucuaccagcgcggcguccuccucccccagcgcgucuggugcgccuccggccgcuccaaggucaucaagggcgcccucccccucaucggcgaggccgacugccuccacgagaaguacggcggccucaacaaguccaagcccuacuacaccggcgagcacgccaaggccaucggcaacugccccaucugggucaagaccccccucaagcucgccaacggcaccaaguaccgcccccccgccaagcuccucaaggagcgcggcuucuucggcgccaucgccggcuuccucgagggcggcugggagggcaugaucgccggcuggcacggcuacaccucccacggcgcccacggcgucgccgucgccgccgaccucaaguccacccaggaggccaucaacaagaucaccaagaaccucaacucccucuccgagcucgaggucaagaaccuccagcgccucuccggcgccauggacgagcuccacaacgagauccucgagcucgacgagaaggucgacgaccuccgcgccgacaccaucuccucccagaucgagcucgccguccuccucuccaacgagggcaucaucaacuccgaggacgagcaccuccucgcccucgagcgcaagcucaagaagaugcucggccccuccgccgucgagaucggcaacggcugcuucgagaccaagcacaagugcaaccagaccugccucgaccgcaucgccgccggcaccuucaacgccggcgaguucucccuccccaccuucgacucccucaacaucaccgccgccucccucaacgacgacggccucgacaaccacaccauccuccucuacuacuccaccgccgccuccucccucgccgucacccucaugcucgccaucuucaucgucuacauggucucccgcgacaacgucuccugcuccaucugccucuga

SEQ ID NO: 123351 - RNA, 1758 nt, Artificial Sequence; identical to SEQ ID NO: 122550
  derived and/or modified CDS sequence (opt2) from hemagglutinin__InfluenzaB__AGX19436

SEQ ID NO: 123352 - RNA, 1758 nt, Artificial Sequence; identical to SEQ ID NO: 123213
  derived and/or modified CDS sequence (opt2) from hemagglutinin__InfluenzaB__AGX19447

SEQ ID NO: 123353 - RNA, 1755 nt, Artificial Sequence; identical to SEQ ID NO: 123092
  derived and/or modified CDS sequence (opt2) from hemagglutinin__InfluenzaB__AGX19458

SEQ ID NO: 123354 - RNA, 1755 nt, Artificial Sequence; identical to SEQ ID NO: 123092
  derived and/or modified CDS sequence (opt2) from hemagglutinin__InfluenzaB__AGX19469

SEQ ID NO: 123355 - RNA, 1758 nt, Artificial Sequence; identical to SEQ ID NO: 123025
  derived and/or modified CDS sequence (opt2) from hemagglutinin__InfluenzaB__AGX19480

SEQ ID NO: 123356 - RNA, 1758 nt, Artificial Sequence; identical to SEQ ID NO: 122618
  derived and/or modified CDS sequence (opt2) from hemagglutinin__InfluenzaB__AGX19491

SEQ ID NO: 123357 - RNA, 1758 nt, Artificial Sequence
  derived and/or modified CDS sequence (opt2) from hemagglutinin__InfluenzaB__AGX19502
augaaggccaucaucguccuccucauggucgucaccuccaacgccgaccgcaucugcaccggcaucaccuccuccaacuccccccacgucgucaagaccgccacccagggcgaggucaacgucaccggcgucaucccccucaccaccacccccaccaagucccacuucgccaaccucaagggcaccgagacccgcggcaagcucugccccaagugccucaacugcaccgaccucgacgucgcccucggccgccccaagugcaccggcaagauccccuccgcccgcgucuccauccuccacgagguccgccccgucaccuccggcugcuuccccaucaugcacgaccgcaccaagauccgccagcuccccaaccuccuccgcggcuacgagcacauccgccucuccacccacaacgucaucaacgccgagaacgcccccggcggccccuacaagaucggcaccuccggcuccugccccaacaucaccaacggcaacggcuucuucgccaccauggccugggccguccccaagaacgacaagaacaagaccgccaccaacccccucaccaucgagguccccuacaucugcaccgagggcgaggaccagaucaccgucuggggcuuccacuccgacuccgagacccagauggccaagcucuacggcgacuccaagccccagaaguucaccuccuccgccaacggcgucaccacccacuacgucucccagaucggcggcuuccccaaccagaccgaggacggcggccucccccaguccggccgcaucgucgucgacuacaugguccagaaguccggcaagaccggcaccaucaccuaccagcgcggcauccuccucccccagaaggucuggugcgccuccggccgcuccaaggucaucaagggcucccucccccucaucggcgaggccgacugccuccacgagaaguacggcggccucaacaaguccaagcccuacuacaccggcgagcacgccaaggccaucggcaacugccccaucugggucaagaccccccucaagcucgccaacggcaccaaguaccgcccccccgccaagcuccucaaggagcgcggcuucuucggcgccaucgccggcuuccucgagggcggcugggagggcaugaucgccggcuggcacggcuacaccucccacggcgcccacggcgucgccgucgccgccgaccucaaguccacccaggaggccaucaacaagaucaccaagaaccucaacucccucuccgagcucgaggucaagaaccuccagcgccucuccggcgccauggacgagcuccacaacgagauccucgagcucgacgagaaggucgacgaccuccgcgccgacaccaucuccucccagaucgagcucgccguccuccucuccaacgagggcaucaucaacuccgaggacgagcaccuccucgcccucgagcgcaagcucaagaagaugcucggccccuccgccgucgagaucggcaacggcugcuucgagaccaagcacaagugcaaccagaccugccucgaccgcaucgccgccggcaccuucgacgccggcgaguucucccuccccaccuucgacucccucaacaucaccgccgccucccucaacgacgacggccucgacaaccacaccauccuccucuacuacuccaccgccgccuccucccucgccgucacccucaugaucgccaucuucgucgucuacauggucucccgcgacaacgucuccugcuccaucugccucuga

SEQ ID NO: 123358 - RNA, 1758 nt, Artificial Sequence
  derived and/or modified CDS sequence (opt2) from hemagglutinin__InfluenzaB__AGX19513
augaaggccaucaucguccuccucauggucgucaccuccaacgccgaccgcaucugcaccggcaucaccuccuccaacuccccccacgucgucaagaccgccacccagggcgaggucaacgucaccggcgucaucccccucaccaccacccccaccaagucccacuucgccaaccucaagggcaccgagacccgcggcaagcucugccccaagugccucaacugcaccgaccucgacgucgcccucggccgccccaagugcaccggcaagauccccuccgcccgcgucuccauccuccacgagguccgccccgucaccuccggcugcuuccccaucaugcacgaccgcaccaagauccgccagcuccccaaccuccuccgcggcuacgagcacauccgccucuccacccacaacgucaucaacgccgagaacgcccccggcggccccuacaagaucggcaccuccggcuccugccccaacaucaccaacggcaacggcuucuucgccaccauggccugggccguccccaagaacgacaagaacaagaccgccaccaacccccucaccaucgagguccccuacaucugcaccgagggcgaggaccagaucaccgucuggggcuuccacuccgacaacgagacccagauggccaagcucuacggcgacuccaagccccagaaguucaccuccuccgccaacggcgucaccacccacuacaucucccagaucggcggcuuccccaaccagaccgaggacggcggccucccccaguccggccgcaucgucgucgacuacaugguccagaaguccggcaagaccggcaccaucaccuaccagcgcggcauccuccucccccagaaggucuggugcgccuccggccgcuccaaggucaucaagggcucccucccccucaucggcgaggccgacugccuccacgagaaguacggcggccucaacaaguccaagcccuacuacaccggcgagcacgccaaggccaucggcaacugccccaucugggucaagaccccccucaagcucgccaacggcaccaaguaccgcccccccgccaagcuccucaaggagcgcggcuucuucggcgccaucgccggcuuccucgagggcggcugggagggcaugaucgccggcuggcacggcuacaccucccacggcgcccacggcgucgccgucgccgccgaccucaaguccacccaggaggccaucaacaagaucaccaagaaccucaacucccucuccgagcucgaggucaagaaccuccagcgccucuccggcgccauggacgagcuccacaacgagauccucgagcucgacgagaaggucgacgaccuccgcgccgacaccaucuccucccagaucgagcucgccguccuccucuccaacgagggcaucaucaacuccgaggacgagcaccuccucgcccucgagcgcaagcucaagaagaugcucggccccuccgccgucgagaucggcaacggcugcuucgagaccaagcacaagugcaaccagaccugccucgaccgcaucgccgccggcaccuucgacgccggcgaguucucccuccccaccuucgacucccucaacaucaccgccgccucccucaacgacgacggccucgacaaccacaccauccuccucuacuacuccaccgccgccuccucccucgccgucacccucaugaucgccaucuucgucgucuacauggucucccgcgacaacgucuccugcuccaucugccucuga

SEQ ID NO: 123359 - RNA, 1758 nt, Artificial Sequence; identical to SEQ ID NO: 123358
  derived and/or modified CDS sequence (opt2) from hemagglutinin__InfluenzaB__AGX19524

SEQ ID NO: 123360 - RNA, 1758 nt, Artificial Sequence
  derived and/or modified CDS sequence (opt2) from hemagglutinin__InfluenzaB__AGX19535
augaaggccaucaucguccuccucauggucgucaccuccaacgccgaccgcaucugcaccggcaucaccuccuccaacuccccccacgucgucaagaccgccacccagggcgaggucaacgucaccggcgucaucccccucaccaccacccccaccaagucccacuucgccaaccucaagggcaccgagacccgcggcaagcucugccccaagugccucaacugcaccgaccucgacgucgcccucggccgccccaagugcaccggcaacauccccuccgcccgcgucuccauccuccacgagguccgccccgucaccuccggcugcuuccccaucaugcacgaccgcaccaagauccgccagcuccccaaccuccuccgcggcuacgagcacauccgccucuccacccacaacgucaucaacgccgagaacgcccccggcggccccuacaagaucggcaccuccggcuccugccccaacgucaccaacggcaacggcuucuucgccaccauggccugggccguccccaagaacgacaacaacaagaccgccaccaacucccucaccaucgagguccccuacaucugcaccgagggcgaggaccagaucaccgucuggggcuuccacuccgacgacgagacccagauggccaagcucuacggcgacuccaagccccagaaguucaccuccuccgccaacggcgucaccacccacuacgucucccagaucggcggcuuccccaaccagaccgaggacggcggccucccccaguccggccgcaucgucgucgacuacaugguccagaaguccggcaagaccggcaccaucaccuaccagcgcggcauccuccucccccagaaggucuggugcgccuccggccgcuccaaggucaucaagggcucccucccccucaucggcgaggccgacugccuccacgagaaguacggcggccucaacaaguccaagcccuacuacaccggcgagcacgccaaggccaucggcaacugccccaucugggucaagaccccccucaagcucgccaacggcaccaaguaccgcccccccgccaagcuccucaaggagcgcggcuucuucggcgccaucgccggcuuccucgagggcggcugggagggcaugaucgccggcuggcacggcuacaccucccacggcgcccacggcgucgccgucgccgccgaccucaaguccacccaggaggccaucaacaagaucaccaagaaccucaacucccucuccgagcucgaggucaagaaccuccagcgccucuccggcgccauggacgagcuccacaacgagauccucgagcucgacgagaaggucgacgaccuccgcgccgacaccaucuccucccagaucgagcucgccguccuccucuccaacgagggcaucaucaacuccgaggacgagcaccuccucgcccucgagcgcaagcucaagaagaugcucggccccuccgccgucgagaucggcaacggcugcuucgagaccaagcacaagugcaaccagaccugccucgaccgcaucgccgccggcaccuucgacgccggcgaguucucccuccccaccuucgacucccucaacaucaccgccgccucccucaacgacgacggccucgacaaccacaccauccuccucuacuacuccaccgccgccuccucccucgccgucacccucaugaucgccaucuucgucgucuacauggucucccgcgacaacgucuccugcuccaucugccucuga

SEQ ID NO: 123361 - RNA, 1758 nt, Artificial Sequence
  derived and/or modified CDS sequence (opt2) from hemagglutinin__InfluenzaB__AGX19546
augaaggccaucaucguccuccucauggucgucaccuccaacgccgaccgcaucugcaccggcaucaccuccuccaacuccccccacgucgucaagaccgccacccagggcgaggucaacgucaccggcgucaucccccucaccaccacccccaccaagucccacuucgccaaccucaagggcaccgagacccgcggcaagcucugccccaagugccucaacugcaccgaccucgacgucgcccucggccgccccaagugcaccggcaacauccccuccgcccgcgucuccauccuccacgagguccgccccgucaccuccggcugcuuccccaucaugcacgaccgcaccaagauccgccagcuccccaaccuccuccgcggcuacgagcacauccgccucuccacccacaacgucaucaacgccgagaacgcccccggcggccccuacaagaucggcaccuccggcuccugccccaacgucaccaacggcaacggcuucuucgccaccauggccugggccguccccaagaacgacaacaacaagaccgccaccaacucccucaccaucgagguccccuacaucugcaccgagggcgaggaccagaucaccgucuggggcuuccacuccgacaaggagacccagauggccaagcucuacggcgacuccaagccccagaaguucaccuccuccgccaacggcgucaccacccacuacgucucccagaucggcggcuuccccaaccagaccgaggacggcggccucccccaguccggccgcaucgucgucgacuacaugguccagaaguccggcaagaccggcaccaucaccuaccagcgcggcauccuccucccccagaaggucuggugcgccuccggccgcuccaaggucaucaagggcucccucccccucaucggcgaggccgacugccuccacgagaaguacggcggccucaacaaguccaagcccuacuacaccggcgagcacgccaaggccaucggcaacugccccaucugggucaagaccccccucaagcucgccaacggcaccaaguaccgcccccccgccaagcuccucaaggagcgcggcuucuucggcgccaucgccggcuuccucgagggcggcugggagggcaugaucgccggcuggcacggcuacaccucccacggcgcccacggcgucgccgucgccgccgaccucaaguccacccaggaggccaucaacaagaucaccaagaaccucaacucccucuccgagcucgaggucaagaaccuccagcgccucuccggcgccauggacgagcuccacaacgagauccucgagcucgacgagaaggucgacgaccuccgcgccgacaccaucuccucccagaucgagcucgccguccuccucuccaacgagggcaucaucaacuccgaggacgagcaccuccucgcccucgagcgcaagcucaagaagaugcucggccccuccgccgucgagaucggcaacggcugcuucgagaccaagcacaagugcaaccagaccugccucgaccgcaucgccgccggcaccuucgacgccggcgaguucucccuccccaccuucgacucccucaacaucaccgccgccucccucaacgacgacggccucgacaaccacaccauccuccucuacuacuccaccgccgccuccucccucgccgucacccucaugaucgccaucuucgucgucuacauggucucccgcgacaacgucuccugcuccaucugccucuga

SEQ ID NO: 123362 - RNA, 1758 nt, Artificial Sequence
  derived and/or modified CDS sequence (opt2) from hemagglutinin__InfluenzaB__AGX19557
augaaggccaucaucguccuccucauggucgucaccuccaacgccgaccgcaucugcaccggcaucaccuccuccaacuccccccacgucgucaagaccgccacccagggcgaggucaacgucaccggcgucaucccccucaccaccacccccaccaagucccacuucgccaaccucaagggcaccgagacccgcggcaagcucugccccaagugccucaacugcaccgaccucgacgucgcccucggccgccccaagugcaccggcaacauccccuccgcccgcgucuccauccuccacgagguccgccccgucaccuccggcugcuuccccaucaugcacgaccgcaccaagauccgccagcuccccaaccuccuccgcggcuacgagcacauccgccucuccacccacaacgucaucaacgccgagaacgcccccggcggccccuacaagaucggcaccuccggcuccugccccaacgucaccaacggcaacggcuucuucgccaccauggccugggccguccccaagaacgacaacaacaagaccgccaccaacucccucaccaucgagguccccuacaucugcaccggcggcgaggaccagaucaccgucuggggcuuccacuccgacaacgagacccagauggccaagcucuacggcgacuccaagccccagaaguucaccuccuccgccaacggcgucaccacccacuacgucucccagaucggcggcuuccccaaccagaccgaggacggcggccucccccaguccggccgcaucgucgucgacuacaugguccagaaguccggcaagaccggcaccaucaccuaccagcgcggcauccuccucccccagaaggucuggugcgccuccggccgcuccaaggucaucaagggcucccucccccucaucggcgaggccgacugccuccacgagaaguacggcggccucaacaaguccaagcccuacuacaccggcgagcacgccaaggccaucggcaacugccccaucugggucaagaccccccucaagcucgccaacggcaccaaguaccgcccccccgccaagcuccucaaggagcgcggcuucuucggcgccaucgccggcuuccucgagggcggcugggagggcaugaucgccggcuggcacggcuacaccucccacggcgcccacggcgucgccgucgccgccgaccucaaguccacccaggaggccaucaacaagaucaccaagaaccucaacucccucuccgagcucgaggucaagaaccuccagcgccucuccggcgccauggacgagcuccacaacgagauccucgagcucgacgagaaggucgacgaccuccgcgccgacaccaucuccucccagaucgagcucgccguccuccucuccaacgagggcaucaucaacuccgaggacgagcaccuccucgcccucgagcgcaagcucaagaagaugcucggccccuccgccgucgagaucggcaacggcugcuucgagaccaagcacaagugcaaccagaccugccucgaccgcaucgccgccggcaccuucgacgccggcgaguucucccuccccaccuucgacucccucaacaucaccgccgccucccucaacgacgacggccucgacaaccacaccauccuccucuacuacuccaccgccgccuccucccucgccgucacccucaugaucgccaucuucgucgucuacauggucucccgcgacaacgucuccugcuccaucugccucuga

SEQ ID NO: 123363 - RNA, 1758 nt, Artificial Sequence; identical to SEQ ID NO: 123025
  derived and/or modified CDS sequence (opt2) from hemagglutinin__InfluenzaB__AGX19568

SEQ ID NO: 123364 - RNA, 1758 nt, Artificial Sequence; identical to SEQ ID NO: 123358
  derived and/or modified CDS sequence (opt2) from hemagglutinin__InfluenzaB__AGX19579

SEQ ID NO: 123365 - RNA, 1758 nt, Artificial Sequence; identical to SEQ ID NO: 123025
  derived and/or modified CDS sequence (opt2) from hemagglutinin__InfluenzaB__AGX19590

SEQ ID NO: 123366 - RNA, 1758 nt, Artificial Sequence; identical to SEQ ID NO: 123025
  derived and/or modified CDS sequence (opt2) from hemagglutinin__InfluenzaB__AGX19601
